United States Patent Application Publication US 2007/0042381 A1 - sequence listing, part 87

SEQ ID NO: 3973386 - RNA, 18 nt, Human herpesvirus 4 [Epstein-Barr virus]
cucuuuguggccuuccuc

SEQ ID NO: 3973387 - RNA, 16 nt, Human herpesvirus 4 [Epstein-Barr virus]
cugacacacaggccug

SEQ ID NO: 3973388 - RNA, 18 nt, Human herpesvirus 4 [Epstein-Barr virus]
cugacacacaggccuggc

SEQ ID NO: 3973389 - RNA, 14 nt, Human herpesvirus 4 [Epstein-Barr virus]
cugacacuuuagag

SEQ ID NO: 3973390 - RNA, 18 nt, Human herpesvirus 4 [Epstein-Barr virus]
cugacccuucugcugcug

SEQ ID NO: 3973391 - RNA, 19 nt, Human herpesvirus 4 [Epstein-Barr virus]
cugacccuucugcugcugc

SEQ ID NO: 3973392 - RNA, 14 nt, Human herpesvirus 4 [Epstein-Barr virus]
cugaccgacgggca

SEQ ID NO: 3973393 - RNA, 14 nt, Human herpesvirus 4 [Epstein-Barr virus]
cugacgcuccagga

SEQ ID NO: 3973394 - RNA, 14 nt, Human herpesvirus 4 [Epstein-Barr virus]
cugagaaucuccug

SEQ ID NO: 3973395 - RNA, 17 nt, Human herpesvirus 4 [Epstein-Barr virus]
cugagcaccaacacaac

SEQ ID NO: 3973396 - RNA, 16 nt, Human herpesvirus 4 [Epstein-Barr virus]
cugagcugccugguga

SEQ ID NO: 3973397 - RNA, 20 nt, Human herpesvirus 4 [Epstein-Barr virus]
cugaggcggcuguggccucu

SEQ ID NO: 3973398 - RNA, 13 nt, Human herpesvirus 4 [Epstein-Barr virus]
cugagugcccagg

SEQ ID NO: 3973399 - RNA, 17 nt, Human herpesvirus 4 [Epstein-Barr virus]
cugauaaugucuucaau

SEQ ID NO: 3973400 - RNA, 23 nt, Human herpesvirus 4 [Epstein-Barr virus]
cugauucccccugcucauaccuc

SEQ ID NO: 3973401 - RNA, 19 nt, Human herpesvirus 4 [Epstein-Barr virus]
cugcacaaaggaaacugcu

SEQ ID NO: 3973402 - RNA, 21 nt, Human herpesvirus 4 [Epstein-Barr virus]
cugcacaaaggaaacugcuga

SEQ ID NO: 3973403 - RNA, 18 nt, Human herpesvirus 4 [Epstein-Barr virus]
cugcacuauauucuccag

SEQ ID NO: 3973404 - RNA, 12 nt, Human herpesvirus 4 [Epstein-Barr virus]
cugcaggcugga

SEQ ID NO: 3973405 - RNA, 20 nt, Human herpesvirus 4 [Epstein-Barr virus]
cugccaacuuugagcugggc

SEQ ID NO: 3973406 - RNA, 14 nt, Human herpesvirus 4 [Epstein-Barr virus]
cugccacaaggcca

SEQ ID NO: 3973407 - RNA, 19 nt, Human herpesvirus 4 [Epstein-Barr virus]
cugccccaauaugccaacc

SEQ ID NO: 3973408 - RNA, 21 nt, Human herpesvirus 4 [Epstein-Barr virus]
cugcccccggagcccugcccu

SEQ ID NO: 3973409 - RNA, 12 nt, Human herpesvirus 4 [Epstein-Barr virus]
cugccgccgccu

SEQ ID NO: 3973410 - RNA, 23 nt, Human herpesvirus 4 [Epstein-Barr virus]
cugccggaguuuucucccccaga

SEQ ID NO: 3973411 - RNA, 22 nt, Human herpesvirus 4 [Epstein-Barr virus]
cugccuauggauagauagccac

SEQ ID NO: 3973412 - RNA, 23 nt, Human herpesvirus 4 [Epstein-Barr virus]
cugccucgaguaggugccuccag

SEQ ID NO: 3973413 - RNA, 21 nt, Human herpesvirus 4 [Epstein-Barr virus]
cugcgaaacuugggggcaggc

SEQ ID NO: 3973414 - RNA, 17 nt, Human herpesvirus 4 [Epstein-Barr virus]
cugcgaugaggcggugg

SEQ ID NO: 3973415 - RNA, 19 nt, Human herpesvirus 4 [Epstein-Barr virus]
cugcgaugagggccuucca

SEQ ID NO: 3973416 - RNA, 17 nt, Human herpesvirus 4 [Epstein-Barr virus]
cugcggcccacugaaaa

SEQ ID NO: 3973417 - RNA, 13 nt, Human herpesvirus 4 [Epstein-Barr virus]
cugcggggaggag

SEQ ID NO: 3973418 - RNA, 16 nt, Human herpesvirus 4 [Epstein-Barr virus]
cugcuauucugagcac

SEQ ID NO: 3973419 - RNA, 20 nt, Human herpesvirus 4 [Epstein-Barr virus]
cugcucggggcaugcugccc

SEQ ID NO: 3973420 - RNA, 13 nt, Human herpesvirus 4 [Epstein-Barr virus]
cugcugcugcugg

SEQ ID NO: 3973421 - RNA, 14 nt, Human herpesvirus 4 [Epstein-Barr virus]
cugcugcugcuggu

SEQ ID NO: 3973422 - RNA, 14 nt, Human herpesvirus 4 [Epstein-Barr virus]
cugcuggucauggc

SEQ ID NO: 3973423 - RNA, 14 nt, Human herpesvirus 4 [Epstein-Barr virus]
cugcuucuggcucu

SEQ ID NO: 3973424 - RNA, 22 nt, Human herpesvirus 4 [Epstein-Barr virus]
cuggacccuauggagggcagcg

SEQ ID NO: 3973425 - RNA, 18 nt, Human herpesvirus 4 [Epstein-Barr virus]
cuggacgagguccuggac

SEQ ID NO: 3973426 - RNA, 15 nt, Human herpesvirus 4 [Epstein-Barr virus]
cuggagagcaugcag

SEQ ID NO: 3973427 - RNA, 22 nt, Human herpesvirus 4 [Epstein-Barr virus]
cuggaggucuucucugacaaau

SEQ ID NO: 3973428 - RNA, 18 nt, Human herpesvirus 4 [Epstein-Barr virus]
cuggcaaagauccccagu

SEQ ID NO: 3973429 - RNA, 23 nt, Human herpesvirus 4 [Epstein-Barr virus]
cuggcaaagauccccaguggagc

SEQ ID NO: 3973430 - RNA, 13 nt, Human herpesvirus 4 [Epstein-Barr virus]
cuggcacacacuc

SEQ ID NO: 3973431 - RNA, 15 nt, Human herpesvirus 4 [Epstein-Barr virus]
cuggcacacacuccc

SEQ ID NO: 3973432 - RNA, 16 nt, Human herpesvirus 4 [Epstein-Barr virus]
cuggcagaaaggcugg

SEQ ID NO: 3973433 - RNA, 12 nt, Human herpesvirus 4 [Epstein-Barr virus]
cuggccaaccug

SEQ ID NO: 3973434 - RNA, 19 nt, Human herpesvirus 4 [Epstein-Barr virus]
cuggccgagcuggaggcca

SEQ ID NO: 3973435 - RNA, 13 nt, Human herpesvirus 4 [Epstein-Barr virus]
cuggcucagcuug

SEQ ID NO: 3973436 - RNA, 16 nt, Human herpesvirus 4 [Epstein-Barr virus]
cugggaggaaguuuua

SEQ ID NO: 3973437 - RNA, 24 nt, Human herpesvirus 4 [Epstein-Barr virus]
cugggagguagauagguggucgca

SEQ ID NO: 3973438 - RNA, 17 nt, Human herpesvirus 4 [Epstein-Barr virus]
cugggaguccggcccuu

SEQ ID NO: 3973439 - RNA, 20 nt, Human herpesvirus 4 [Epstein-Barr virus]
cugggaugaacccuggggca

SEQ ID NO: 3973440 - RNA, 14 nt, Human herpesvirus 4 [Epstein-Barr virus]
cugggcagccagag

SEQ ID NO: 3973441 - RNA, 15 nt, Human herpesvirus 4 [Epstein-Barr virus]
cugggcagccagagc

SEQ ID NO: 3973442 - RNA, 15 nt, Human herpesvirus 4 [Epstein-Barr virus]
cugggccgcccggcc

SEQ ID NO: 3973443 - RNA, 18 nt, Human herpesvirus 4 [Epstein-Barr virus]
cuggggucucaggccucc

SEQ ID NO: 3973444 - RNA, 17 nt, Human herpesvirus 4 [Epstein-Barr virus]
cuggggugugaagggca

SEQ ID NO: 3973445 - RNA, 14 nt, Human herpesvirus 4 [Epstein-Barr virus]
cugggugcugagcg

SEQ ID NO: 3973446 - RNA, 12 nt, Human herpesvirus 4 [Epstein-Barr virus]
cuggucagggga

SEQ ID NO: 3973447 - RNA, 13 nt, Human herpesvirus 4 [Epstein-Barr virus]
cuggucaucagcc

SEQ ID NO: 3973448 - RNA, 22 nt, Human herpesvirus 4 [Epstein-Barr virus]
cuggugcgguuauaacugccag

SEQ ID NO: 3973449 - RNA, 12 nt, Human herpesvirus 4 [Epstein-Barr virus]
cugguggcccag

SEQ ID NO: 3973450 - RNA, 16 nt, Human herpesvirus 4 [Epstein-Barr virus]
gccugaguccaacauu

SEQ ID NO: 3973451 - RNA, 23 nt, Human herpesvirus 4 [Epstein-Barr virus]
gccugcaccaguggcugccccgg

SEQ ID NO: 3973452 - RNA, 18 nt, Human herpesvirus 4 [Epstein-Barr virus]
gccugcggacucaggcca

SEQ ID NO: 3973453 - RNA, 16 nt, Human herpesvirus 4 [Epstein-Barr virus]
cuggugggcucccucu

SEQ ID NO: 3973454 - RNA, 21 nt, Human herpesvirus 4 [Epstein-Barr virus]
cugguuguaaccuaugccugg

SEQ ID NO: 3973455 - RNA, 12 nt, Human herpesvirus 4 [Epstein-Barr virus]
cuguaacugugg

SEQ ID NO: 3973456 - RNA, 14 nt, Human herpesvirus 4 [Epstein-Barr virus]
cuguaaucacuggc

SEQ ID NO: 3973457 - RNA, 13 nt, Human herpesvirus 4 [Epstein-Barr virus]
cuguacgccgccg

SEQ ID NO: 3973458 - RNA, 13 nt, Human herpesvirus 4 [Epstein-Barr virus]
cuguagccacccg

SEQ ID NO: 3973459 - RNA, 13 nt, Human herpesvirus 4 [Epstein-Barr virus]
cugucucccaccc

SEQ ID NO: 3973460 - RNA, 22 nt, Human herpesvirus 4 [Epstein-Barr virus]
cugugcugacccuucugcugcu

SEQ ID NO: 3973461 - RNA, 22 nt, Human herpesvirus 4 [Epstein-Barr virus]
cuguugcgcccggcccuguaca

SEQ ID NO: 3973462 - RNA, 23 nt, Human herpesvirus 4 [Epstein-Barr virus]
cuguuucuguacaauggggccag

SEQ ID NO: 3973463 - RNA, 20 nt, Human herpesvirus 4 [Epstein-Barr virus]
cuguuuguccagcagggccu

SEQ ID NO: 3973464 - RNA, 13 nt, Human herpesvirus 4 [Epstein-Barr virus]
cuuacugcccagc

SEQ ID NO: 3973465 - RNA, 17 nt, Human herpesvirus 4 [Epstein-Barr virus]
cuuccagagaggcgcag

SEQ ID NO: 3973466 - RNA, 18 nt, Human herpesvirus 4 [Epstein-Barr virus]
cuucccagacucugcuuu

SEQ ID NO: 3973467 - RNA, 16 nt, Human herpesvirus 4 [Epstein-Barr virus]
cuuccgugccucgggc

SEQ ID NO: 3973468 - RNA, 23 nt, Human herpesvirus 4 [Epstein-Barr virus]
cuuccuggccggccgcccccuga

SEQ ID NO: 3973469 - RNA, 21 nt, Human herpesvirus 4 [Epstein-Barr virus]
cuucggucaaguaccagcugg

SEQ ID NO: 3973470 - RNA, 17 nt, Human herpesvirus 4 [Epstein-Barr virus]
cuucucauuagucagga

SEQ ID NO: 3973471 - RNA, 16 nt, Human herpesvirus 4 [Epstein-Barr virus]
cuucugcugcugcugg

SEQ ID NO: 3973472 - RNA, 21 nt, Human herpesvirus 4 [Epstein-Barr virus]
cuucuggcacgacuguuccua

SEQ ID NO: 3973473 - RNA, 14 nt, Human herpesvirus 4 [Epstein-Barr virus]
cuucuggcucuucu

SEQ ID NO: 3973474 - RNA, 19 nt, Human herpesvirus 4 [Epstein-Barr virus]
cuucuggcucuucugggaa

SEQ ID NO: 3973475 - RNA, 13 nt, Human herpesvirus 4 [Epstein-Barr virus]
gcagggcaaagcc

SEQ ID NO: 3973476 - RNA, 12 nt, Human herpesvirus 4 [Epstein-Barr virus]
gcagggcccagu

SEQ ID NO: 3973477 - RNA, 14 nt, Human herpesvirus 4 [Epstein-Barr virus]
gcagggguggugga

SEQ ID NO: 3973478 - RNA, 22 nt, Human herpesvirus 4 [Epstein-Barr virus]
gcaucaugcgugaccaccuggc

SEQ ID NO: 3973479 - RNA, 13 nt, Human herpesvirus 4 [Epstein-Barr virus]
gcauccucaaggg

SEQ ID NO: 3973480 - RNA, 15 nt, Human herpesvirus 4 [Epstein-Barr virus]
gcauggcggccuggc

SEQ ID NO: 3973481 - RNA, 14 nt, Human herpesvirus 4 [Epstein-Barr virus]
gcauuuuuggugcu

SEQ ID NO: 3973482 - RNA, 15 nt, Human herpesvirus 4 [Epstein-Barr virus]
gccaaagcugaagaa

SEQ ID NO: 3973483 - RNA, 21 nt, Human herpesvirus 4 [Epstein-Barr virus]
gccaaccugcucucucuggag

SEQ ID NO: 3973484 - RNA, 18 nt, Human herpesvirus 4 [Epstein-Barr virus]
gccaagguccugggccuc

SEQ ID NO: 3973485 - RNA, 12 nt, Human herpesvirus 4 [Epstein-Barr virus]
gccacacccacc

SEQ ID NO: 3973486 - RNA, 14 nt, Human herpesvirus 4 [Epstein-Barr virus]
gccacacuggggac

SEQ ID NO: 3973487 - RNA, 16 nt, Human herpesvirus 4 [Epstein-Barr virus]
gccacagagcaucaga

SEQ ID NO: 3973488 - RNA, 23 nt, Human herpesvirus 4 [Epstein-Barr virus]
gccacauguuuucuggacacagg

SEQ ID NO: 3973489 - RNA, 17 nt, Human herpesvirus 4 [Epstein-Barr virus]
gccacccucccccugcc

SEQ ID NO: 3973490 - RNA, 17 nt, Human herpesvirus 4 [Epstein-Barr virus]
gccacugcaggcuggac

SEQ ID NO: 3973491 - RNA, 21 nt, Human herpesvirus 4 [Epstein-Barr virus]
gccagacucucuucagugacc

SEQ ID NO: 3973492 - RNA, 18 nt, Human herpesvirus 4 [Epstein-Barr virus]
gccagagcggcauccuca

SEQ ID NO: 3973493 - RNA, 13 nt, Human herpesvirus 4 [Epstein-Barr virus]
gccagaggcgacg

SEQ ID NO: 3973494 - RNA, 17 nt, Human herpesvirus 4 [Epstein-Barr virus]
gccagccggcucgaccg

SEQ ID NO: 3973495 - RNA, 20 nt, Human herpesvirus 4 [Epstein-Barr virus]
gccaggcagaggaaggccac

SEQ ID NO: 3973496 - RNA, 12 nt, Human herpesvirus 4 [Epstein-Barr virus]
gccagguacagg

SEQ ID NO: 3973497 - RNA, 15 nt, Human herpesvirus 4 [Epstein-Barr virus]
gccagguacaggacc

SEQ ID NO: 3973498 - RNA, 18 nt, Human herpesvirus 4 [Epstein-Barr virus]
gccagucuccgggucagg

SEQ ID NO: 3973499 - RNA, 19 nt, Human herpesvirus 4 [Epstein-Barr virus]
gccagucuccgggucaggu

SEQ ID NO: 3973500 - RNA, 16 nt, Human herpesvirus 4 [Epstein-Barr virus]
gccaucaccucuugau

SEQ ID NO: 3973501 - RNA, 17 nt, Human herpesvirus 4 [Epstein-Barr virus]
gccaugaccagcagcag

SEQ ID NO: 3973502 - RNA, 16 nt, Human herpesvirus 4 [Epstein-Barr virus]
gccaugcuaucuugua

SEQ ID NO: 3973503 - RNA, 18 nt, Human herpesvirus 4 [Epstein-Barr virus]
gccauggccgagaagcuu

SEQ ID NO: 3973504 - RNA, 17 nt, Human herpesvirus 4 [Epstein-Barr virus]
gccauguguguccagug

SEQ ID NO: 3973505 - RNA, 18 nt, Human herpesvirus 4 [Epstein-Barr virus]
gcccaagaagaagcccac

SEQ ID NO: 3973506 - RNA, 19 nt, Human herpesvirus 4 [Epstein-Barr virus]
gcccacacagcgccagcag

SEQ ID NO: 3973507 - RNA, 15 nt, Human herpesvirus 4 [Epstein-Barr virus]
gcccaccagccagcg

SEQ ID NO: 3973508 - RNA, 17 nt, Human herpesvirus 4 [Epstein-Barr virus]
gcccaccagccagcgac

SEQ ID NO: 3973509 - RNA, 17 nt, Human herpesvirus 4 [Epstein-Barr virus]
gcccagaggcgcugugg

SEQ ID NO: 3973510 - RNA, 17 nt, Human herpesvirus 4 [Epstein-Barr virus]
gcccagggacaucccca

SEQ ID NO: 3973511 - RNA, 16 nt, Human herpesvirus 4 [Epstein-Barr virus]
gcccagugcacccagg

SEQ ID NO: 3973512 - RNA, 20 nt, Human herpesvirus 4 [Epstein-Barr virus]
gccccaauucuugcacccac

SEQ ID NO: 3973513 - RNA, 21 nt, Human herpesvirus 4 [Epstein-Barr virus]
gccccaauucuugcacccacc

SEQ ID NO: 3973514 - RNA, 16 nt, Human herpesvirus 4 [Epstein-Barr virus]
gcccccaccacuccca

SEQ ID NO: 3973515 - RNA, 19 nt, Human herpesvirus 4 [Epstein-Barr virus]
gccccccgcaccagggcca

SEQ ID NO: 3973516 - RNA, 17 nt, Human herpesvirus 4 [Epstein-Barr virus]
gcccccggagcccugcc

SEQ ID NO: 3973517 - RNA, 19 nt, Human herpesvirus 4 [Epstein-Barr virus]
gcccccucuuuguggccuu

SEQ ID NO: 3973518 - RNA, 12 nt, Human herpesvirus 4 [Epstein-Barr virus]
gcccccugaccu

SEQ ID NO: 3973519 - RNA, 18 nt, Human herpesvirus 4 [Epstein-Barr virus]
gccccgaaagcggcccag

SEQ ID NO: 3973520 - RNA, 15 nt, Human herpesvirus 4 [Epstein-Barr virus]
gccccgggcccagcc

SEQ ID NO: 3973521 - RNA, 14 nt, Human herpesvirus 4 [Epstein-Barr virus]
gccccgggcggcuc

SEQ ID NO: 3973522 - RNA, 16 nt, Human herpesvirus 4 [Epstein-Barr virus]
gccccgguccccccag

SEQ ID NO: 3973523 - RNA, 12 nt, Human herpesvirus 4 [Epstein-Barr virus]
gccccucagccu

SEQ ID NO: 3973524 - RNA, 21 nt, Human herpesvirus 4 [Epstein-Barr virus]
gcccgccuggcucgccuggag

SEQ ID NO: 3973525 - RNA, 20 nt, Human herpesvirus 4 [Epstein-Barr virus]
gcccguuccaggcucuccag

SEQ ID NO: 3973526 - RNA, 19 nt, Human herpesvirus 4 [Epstein-Barr virus]
gcccucauuccacggcccg

SEQ ID NO: 3973527 - RNA, 20 nt, Human herpesvirus 4 [Epstein-Barr virus]
gcccuccuccacccagcagc

SEQ ID NO: 3973528 - RNA, 21 nt, Human herpesvirus 4 [Epstein-Barr virus]
gcccuccucugggccgcccgg

SEQ ID NO: 3973529 - RNA, 22 nt, Human herpesvirus 4 [Epstein-Barr virus]
gcccuccucugggccgcccggc

SEQ ID NO: 3973530 - RNA, 13 nt, Human herpesvirus 4 [Epstein-Barr virus]
gcccucuccagca

SEQ ID NO: 3973531 - RNA, 22 nt, Human herpesvirus 4 [Epstein-Barr virus]
gcccugcaaacugacacacagg

SEQ ID NO: 3973532 - RNA, 17 nt, Human herpesvirus 4 [Epstein-Barr virus]
gcccuggaggccucagg

SEQ ID NO: 3973533 - RNA, 18 nt, Human herpesvirus 4 [Epstein-Barr virus]
gccgccagcauggcagcc

SEQ ID NO: 3973534 - RNA, 14 nt, Human herpesvirus 4 [Epstein-Barr virus]
gccgccccgggccc

SEQ ID NO: 3973535 - RNA, 14 nt, Human herpesvirus 4 [Epstein-Barr virus]
gccgccgccagcag

SEQ ID NO: 3973536 - RNA, 15 nt, Human herpesvirus 4 [Epstein-Barr virus]
gccgccgccagcagc

SEQ ID NO: 3973537 - RNA, 13 nt, Human herpesvirus 4 [Epstein-Barr virus]
gccgcgcugcucg

SEQ ID NO: 3973538 - RNA, 19 nt, Human herpesvirus 4 [Epstein-Barr virus]
gccgcguguuugcugcucg

SEQ ID NO: 3973539 - RNA, 22 nt, Human herpesvirus 4 [Epstein-Barr virus]
gccgcuccguggccccgggagc

SEQ ID NO: 3973540 - RNA, 20 nt, Human herpesvirus 4 [Epstein-Barr virus]
gccggaugccugccuaugga

SEQ ID NO: 3973541 - RNA, 14 nt, Human herpesvirus 4 [Epstein-Barr virus]
gccggcgcugugug

SEQ ID NO: 3973542 - RNA, 14 nt, Human herpesvirus 4 [Epstein-Barr virus]
gccgggagaggcag

SEQ ID NO: 3973543 - RNA, 18 nt, Human herpesvirus 4 [Epstein-Barr virus]
gccgguggauccuccacc

SEQ ID NO: 3973544 - RNA, 23 nt, Human herpesvirus 4 [Epstein-Barr virus]
gccguccacggccguagcccagu

SEQ ID NO: 3973545 - RNA, 14 nt, Human herpesvirus 4 [Epstein-Barr virus]
gccgucccagggcc

SEQ ID NO: 3973546 - RNA, 19 nt, Human herpesvirus 4 [Epstein-Barr virus]
gccgucucaaacggggaag

SEQ ID NO: 3973547 - RNA, 19 nt, Human herpesvirus 4 [Epstein-Barr virus]
gccuagccaucggggcacg

SEQ ID NO: 3973548 - RNA, 17 nt, Human herpesvirus 4 [Epstein-Barr virus]
gccuccuggccagcacc

SEQ ID NO: 3973549 - RNA, 14 nt, Human herpesvirus 4 [Epstein-Barr virus]
gccucuaccuucca

SEQ ID NO: 3973550 - RNA, 16 nt, Human herpesvirus 4 [Epstein-Barr virus]
gccucuacgccccaga

SEQ ID NO: 3973551 - RNA, 20 nt, Human herpesvirus 4 [Epstein-Barr virus]
gccucucaaaggccuuggac

SEQ ID NO: 3973552 - RNA, 18 nt, Human herpesvirus 4 [Epstein-Barr virus]
gccucuccguacccccuc

SEQ ID NO: 3973553 - RNA, 15 nt, Human herpesvirus 4 [Epstein-Barr virus]
gccugacggugccgc

SEQ ID NO: 3973554 - RNA, 20 nt, Human herpesvirus 4 [Epstein-Barr virus]
cccagguaccuuccuguguu

SEQ ID NO: 3973555 - RNA, 16 nt, Human herpesvirus 4 [Epstein-Barr virus]
cccaucuuggcccguc

SEQ ID NO: 3973556 - RNA, 17 nt, Human herpesvirus 4 [Epstein-Barr virus]
ccccaaaaguagaggcu

SEQ ID NO: 3973557 - RNA, 13 nt, Human herpesvirus 4 [Epstein-Barr virus]
ccccaccaccacc

SEQ ID NO: 3973558 - RNA, 17 nt, Human herpesvirus 4 [Epstein-Barr virus]
ccccagcugcaucuucc

SEQ ID NO: 3973559 - RNA, 22 nt, Human herpesvirus 4 [Epstein-Barr virus]
ccccccgccuuugggcacccca

SEQ ID NO: 3973560 - RNA, 11 nt, Human herpesvirus 4 [Epstein-Barr virus]
cccccuccauu

SEQ ID NO: 3973561 - RNA, 21 nt, Human herpesvirus 4 [Epstein-Barr virus]
ccccuauauccuagagggaca

SEQ ID NO: 3973562 - RNA, 13 nt, Human herpesvirus 4 [Epstein-Barr virus]
ccccucugcagag

SEQ ID NO: 3973563 - RNA, 16 nt, Human herpesvirus 4 [Epstein-Barr virus]
ccccuggagccagcgc

SEQ ID NO: 3973564 - RNA, 17 nt, Human herpesvirus 4 [Epstein-Barr virus]
ccccuggcggcccagcc

SEQ ID NO: 3973565 - RNA, 15 nt, Human herpesvirus 4 [Epstein-Barr virus]
ccccuguccacugcc

SEQ ID NO: 3973566 - RNA, 23 nt, Human herpesvirus 4 [Epstein-Barr virus]
ccccuguccacugccccgguccc

SEQ ID NO: 3973567 - RNA, 16 nt, Human herpesvirus 4 [Epstein-Barr virus]
cccgaguccaaggccc

SEQ ID NO: 3973568 - RNA, 15 nt, Human herpesvirus 4 [Epstein-Barr virus]
cccgcaccagggcca

SEQ ID NO: 3973569 - RNA, 17 nt, Human herpesvirus 4 [Epstein-Barr virus]
cccggcccucuuccgug

SEQ ID NO: 3973570 - RNA, 12 nt, Human herpesvirus 4 [Epstein-Barr virus]
cccggcucucag

SEQ ID NO: 3973571 - RNA, 20 nt, Human herpesvirus 4 [Epstein-Barr virus]
cccggcuggccgccguggcc

SEQ ID NO: 3973572 - RNA, 21 nt, Human herpesvirus 4 [Epstein-Barr virus]
cccgggaccgcgcccuccucu

SEQ ID NO: 3973573 - RNA, 12 nt, Human herpesvirus 4 [Epstein-Barr virus]
cccgggagccac

SEQ ID NO: 3973574 - RNA, 18 nt, Human herpesvirus 4 [Epstein-Barr virus]
cccggguucgggcacgcc

SEQ ID NO: 3973575 - RNA, 17 nt, Human herpesvirus 4 [Epstein-Barr virus]
cccgguccccccagaag

SEQ ID NO: 3973576 - RNA, 16 nt, Human herpesvirus 4 [Epstein-Barr virus]
cccucauugugcugaa

SEQ ID NO: 3973577 - RNA, 16 nt, Human herpesvirus 4 [Epstein-Barr virus]
cccuccucugggccgc

SEQ ID NO: 3973578 - RNA, 17 nt, Human herpesvirus 4 [Epstein-Barr virus]
cccucugggagaagggu

SEQ ID NO: 3973579 - RNA, 16 nt, Human herpesvirus 4 [Epstein-Barr virus]
cccucuguuucuucau

SEQ ID NO: 3973580 - RNA, 13 nt, Human herpesvirus 4 [Epstein-Barr virus]
cccucuugucccu

SEQ ID NO: 3973581 - RNA, 15 nt, Human herpesvirus 4 [Epstein-Barr virus]
cccuggaggccucag

SEQ ID NO: 3973582 - RNA, 13 nt, Human herpesvirus 4 [Epstein-Barr virus]
cccuucugcugcu

SEQ ID NO: 3973583 - RNA, 15 nt, Human herpesvirus 4 [Epstein-Barr virus]
cccuucugcugcugc

SEQ ID NO: 3973584 - RNA, 14 nt, Human herpesvirus 4 [Epstein-Barr virus]
ccgaaagcacuuug

SEQ ID NO: 3973585 - RNA, 13 nt, Human herpesvirus 4 [Epstein-Barr virus]
ccgagaccaaggc

SEQ ID NO: 3973586 - RNA, 13 nt, Human herpesvirus 4 [Epstein-Barr virus]
ccgagagcuccgc

SEQ ID NO: 3973587 - RNA, 16 nt, Human herpesvirus 4 [Epstein-Barr virus]
ccgagugaccagucac

SEQ ID NO: 3973588 - RNA, 17 nt, Human herpesvirus 4 [Epstein-Barr virus]
ccgcagaagagccgcuc

SEQ ID NO: 3973589 - RNA, 14 nt, Human herpesvirus 4 [Epstein-Barr virus]
ccgcagguggcugc

SEQ ID NO: 3973590 - RNA, 14 nt, Human herpesvirus 4 [Epstein-Barr virus]
ccgccaccuccggg

SEQ ID NO: 3973591 - RNA, 17 nt, Human herpesvirus 4 [Epstein-Barr virus]
ccgccccgggcccggga

SEQ ID NO: 3973592 - RNA, 15 nt, Human herpesvirus 4 [Epstein-Barr virus]
ccgccgccagcagcc

SEQ ID NO: 3973593 - RNA, 23 nt, Human herpesvirus 4 [Epstein-Barr virus]
ccgccguaaucuguggugggcuc

SEQ ID NO: 3973594 - RNA, 15 nt, Human herpesvirus 4 [Epstein-Barr virus]
ccgccucccccagcc

SEQ ID NO: 3973595 - RNA, 14 nt, Human herpesvirus 4 [Epstein-Barr virus]
ccgcgcccuccucu

SEQ ID NO: 3973596 - RNA, 15 nt, Human herpesvirus 4 [Epstein-Barr virus]
ccgcguguuugcugc

SEQ ID NO: 3973597 - RNA, 17 nt, Human herpesvirus 4 [Epstein-Barr virus]
ccgcguguuugcugcuc

SEQ ID NO: 3973598 - RNA, 19 nt, Human herpesvirus 4 [Epstein-Barr virus]
ccgcuccguggccccggga

SEQ ID NO: 3973599 - RNA, 23 nt, Human herpesvirus 4 [Epstein-Barr virus]
ccgcugcacaaaggaaacugcug

SEQ ID NO: 3973600 - RNA, 22 nt, Human herpesvirus 4 [Epstein-Barr virus]
ccgcugggccaggucacagacc

SEQ ID NO: 3973601 - RNA, 13 nt, Human herpesvirus 4 [Epstein-Barr virus]
ccggccgaggccu

SEQ ID NO: 3973602 - RNA, 20 nt, Human herpesvirus 4 [Epstein-Barr virus]
ccggcggcaguggaccucaa

SEQ ID NO: 3973603 - RNA, 15 nt, Human herpesvirus 4 [Epstein-Barr virus]
ccggggcggcggugg

SEQ ID NO: 3973604 - RNA, 14 nt, Human herpesvirus 4 [Epstein-Barr virus]
ccgggggccuuguc

SEQ ID NO: 3973605 - RNA, 17 nt, Human herpesvirus 4 [Epstein-Barr virus]
ccggggguccagccggg

SEQ ID NO: 3973606 - RNA, 22 nt, Human herpesvirus 4 [Epstein-Barr virus]
ccggguuugauguuucuguggc

SEQ ID NO: 3973607 - RNA, 12 nt, Human herpesvirus 4 [Epstein-Barr virus]
ccggugcugcca

SEQ ID NO: 3973608 - RNA, 14 nt, Human herpesvirus 4 [Epstein-Barr virus]
ccgugcaccugcca

SEQ ID NO: 3973609 - RNA, 13 nt, Human herpesvirus 4 [Epstein-Barr virus]
ccuacgcagaggc

SEQ ID NO: 3973610 - RNA, 21 nt, Human herpesvirus 4 [Epstein-Barr virus]
ccuagccaccguggccaggcc

SEQ ID NO: 3973611 - RNA, 16 nt, Human herpesvirus 4 [Epstein-Barr virus]
ccuagguacucuuggu

SEQ ID NO: 3973612 - RNA, 14 nt, Human herpesvirus 4 [Epstein-Barr virus]
ccuauggagggcag

SEQ ID NO: 3973613 - RNA, 15 nt, Human herpesvirus 4 [Epstein-Barr virus]
ccuauuugcacguug

SEQ ID NO: 3973614 - RNA, 15 nt, Human herpesvirus 4 [Epstein-Barr virus]
ccucacgcgaaggga

SEQ ID NO: 3973615 - RNA, 17 nt, Human herpesvirus 4 [Epstein-Barr virus]
ccucagcuguucccagu

SEQ ID NO: 3973616 - RNA, 19 nt, Human herpesvirus 4 [Epstein-Barr virus]
ccuccaaucaccagccacc

SEQ ID NO: 3973617 - RNA, 20 nt, Human herpesvirus 4 [Epstein-Barr virus]
ccuccacccagcagcagccc

SEQ ID NO: 3973618 - RNA, 23 nt, Human herpesvirus 4 [Epstein-Barr virus]
ccuccgagugaccagucaccuuc

SEQ ID NO: 3973619 - RNA, 14 nt, Human herpesvirus 4 [Epstein-Barr virus]
ccuccucugggccg

SEQ ID NO: 3973620 - RNA, 13 nt, Human herpesvirus 4 [Epstein-Barr virus]
ccuccuggccagc

SEQ ID NO: 3973621 - RNA, 19 nt, Human herpesvirus 4 [Epstein-Barr virus]
ccucggacauccagugucc

SEQ ID NO: 3973622 - RNA, 16 nt, Human herpesvirus 4 [Epstein-Barr virus]
ccucgguggugggcug

SEQ ID NO: 3973623 - RNA, 17 nt, Human herpesvirus 4 [Epstein-Barr virus]
ccucuacgccaggcucg

SEQ ID NO: 3973624 - RNA, 16 nt, Human herpesvirus 4 [Epstein-Barr virus]
ccucuccagcaaccaa

SEQ ID NO: 3973625 - RNA, 17 nt, Human herpesvirus 4 [Epstein-Barr virus]
ccucuccauucccagcc

SEQ ID NO: 3973626 - RNA, 22 nt, Human herpesvirus 4 [Epstein-Barr virus]
ccucugaugguggccggcagcc

SEQ ID NO: 3973627 - RNA, 12 nt, Human herpesvirus 4 [Epstein-Barr virus]
ccucugccggga

SEQ ID NO: 3973628 - RNA, 18 nt, Human herpesvirus 4 [Epstein-Barr virus]
ccucugccuccggccgcc

SEQ ID NO: 3973629 - RNA, 13 nt, Human herpesvirus 4 [Epstein-Barr virus]
ccucugggccgcc

SEQ ID NO: 3973630 - RNA, 17 nt, Human herpesvirus 4 [Epstein-Barr virus]
ccugaccgaauggggca

SEQ ID NO: 3973631 - RNA, 20 nt, Human herpesvirus 4 [Epstein-Barr virus]
ccugaccgaauggggcagug

SEQ ID NO: 3973632 - RNA, 13 nt, Human herpesvirus 4 [Epstein-Barr virus]
ccugacugacucu

SEQ ID NO: 3973633 - RNA, 20 nt, Human herpesvirus 4 [Epstein-Barr virus]
ccugacugacucucccucca

SEQ ID NO: 3973634 - RNA, 17 nt, Human herpesvirus 4 [Epstein-Barr virus]
ccugauauugucccccu

SEQ ID NO: 3973635 - RNA, 24 nt, Human herpesvirus 4 [Epstein-Barr virus]
ccugcagaguaauugcaguggacc

SEQ ID NO: 3973636 - RNA, 23 nt, Human herpesvirus 4 [Epstein-Barr virus]
ccugcgcuacuaugacaccuauc

SEQ ID NO: 3973637 - RNA, 18 nt, Human herpesvirus 4 [Epstein-Barr virus]
ccuggaagcaggagaugg

SEQ ID NO: 3973638 - RNA, 23 nt, Human herpesvirus 4 [Epstein-Barr virus]
ccuggacgagggggcgcggcugg

SEQ ID NO: 3973639 - RNA, 23 nt, Human herpesvirus 4 [Epstein-Barr virus]
ccuggagagcaugcaggucaggu

SEQ ID NO: 3973640 - RNA, 14 nt, Human herpesvirus 4 [Epstein-Barr virus]
ccuggagccagcgc

SEQ ID NO: 3973641 - RNA, 15 nt, Human herpesvirus 4 [Epstein-Barr virus]
ccuggccaggcaccc

SEQ ID NO: 3973642 - RNA, 18 nt, Human herpesvirus 4 [Epstein-Barr virus]
aggcuccggcggcagugg

SEQ ID NO: 3973643 - RNA, 16 nt, Human herpesvirus 4 [Epstein-Barr virus]
aggcucuccagcccca

SEQ ID NO: 3973644 - RNA, 17 nt, Human herpesvirus 4 [Epstein-Barr virus]
agggagacacaucugga

SEQ ID NO: 3973645 - RNA, 15 nt, Human herpesvirus 4 [Epstein-Barr virus]
agggaggacacugcc

SEQ ID NO: 3973646 - RNA, 20 nt, Human herpesvirus 4 [Epstein-Barr virus]
agggcccagggucacuggcu

SEQ ID NO: 3973647 - RNA, 21 nt, Human herpesvirus 4 [Epstein-Barr virus]
agggcgcucugcgccagcccc

SEQ ID NO: 3973648 - RNA, 15 nt, Human herpesvirus 4 [Epstein-Barr virus]
aggggcaggaggggc

SEQ ID NO: 3973649 - RNA, 23 nt, Human herpesvirus 4 [Epstein-Barr virus]
aggggccagguacaggaccugga

SEQ ID NO: 3973650 - RNA, 23 nt, Human herpesvirus 4 [Epstein-Barr virus]
aggggcucgaauaugaugaggac

SEQ ID NO: 3973651 - RNA, 15 nt, Human herpesvirus 4 [Epstein-Barr virus]
agggggccuggugcc

SEQ ID NO: 3973652 - RNA, 16 nt, Human herpesvirus 4 [Epstein-Barr virus]
aggggggaaucuuguu

SEQ ID NO: 3973653 - RNA, 16 nt, Human herpesvirus 4 [Epstein-Barr virus]
aggggguacggagagg

SEQ ID NO: 3973654 - RNA, 16 nt, Human herpesvirus 4 [Epstein-Barr virus]
agggguaacccuguag

SEQ ID NO: 3973655 - RNA, 22 nt, Human herpesvirus 4 [Epstein-Barr virus]
aggggucaccuuggauccccuu

SEQ ID NO: 3973656 - RNA, 16 nt, Human herpesvirus 4 [Epstein-Barr virus]
agggucagcacagcca

SEQ ID NO: 3973657 - RNA, 22 nt, Human herpesvirus 4 [Epstein-Barr virus]
agggucagcacagccagagagg

SEQ ID NO: 3973658 - RNA, 19 nt, Human herpesvirus 4 [Epstein-Barr virus]
agguccuggacgagggggc

SEQ ID NO: 3973659 - RNA, 13 nt, Human herpesvirus 4 [Epstein-Barr virus]
aggucgcggacca

SEQ ID NO: 3973660 - RNA, 20 nt, Human herpesvirus 4 [Epstein-Barr virus]
aggucgugguacuugaccag

SEQ ID NO: 3973661 - RNA, 19 nt, Human herpesvirus 4 [Epstein-Barr virus]
aggucugacacccacgccu

SEQ ID NO: 3973662 - RNA, 22 nt, Human herpesvirus 4 [Epstein-Barr virus]
agguguacgcccuggcgguuga

SEQ ID NO: 3973663 - RNA, 13 nt, Human herpesvirus 4 [Epstein-Barr virus]
agguuauuuugcc

SEQ ID NO: 3973664 - RNA, 14 nt, Human herpesvirus 4 [Epstein-Barr virus]
agguucucggucag

SEQ ID NO: 3973665 - RNA, 11 nt, Human herpesvirus 4 [Epstein-Barr virus]
aguaccagcug

SEQ ID NO: 3973666 - RNA, 15 nt, Human herpesvirus 4 [Epstein-Barr virus]
aguaccagcuggugg

SEQ ID NO: 3973667 - RNA, 13 nt, Human herpesvirus 4 [Epstein-Barr virus]
aguaggcgguggg

SEQ ID NO: 3973668 - RNA, 23 nt, Human herpesvirus 4 [Epstein-Barr virus]
aguaggcgguggggcugagacca

SEQ ID NO: 3973669 - RNA, 19 nt, Human herpesvirus 4 [Epstein-Barr virus]
aguaggugccuccagagcc

SEQ ID NO: 3973670 - RNA, 20 nt, Human herpesvirus 4 [Epstein-Barr virus]
agucagccuugcccccgcca

SEQ ID NO: 3973671 - RNA, 21 nt, Human herpesvirus 4 [Epstein-Barr virus]
agucaggagguacaugggcca

SEQ ID NO: 3973672 - RNA, 16 nt, Human herpesvirus 4 [Epstein-Barr virus]
agucaucccguggaga

SEQ ID NO: 3973673 - RNA, 15 nt, Human herpesvirus 4 [Epstein-Barr virus]
aguccaggggccaca

SEQ ID NO: 3973674 - RNA, 22 nt, Human herpesvirus 4 [Epstein-Barr virus]
agucccaacccaaaaccacaca

SEQ ID NO: 3973675 - RNA, 18 nt, Human herpesvirus 4 [Epstein-Barr virus]
agucccgggggaggagaa

SEQ ID NO: 3973676 - RNA, 13 nt, Human herpesvirus 4 [Epstein-Barr virus]
aguccggggagaa

SEQ ID NO: 3973677 - RNA, 16 nt, Human herpesvirus 4 [Epstein-Barr virus]
agucggccacagggga

SEQ ID NO: 3973678 - RNA, 21 nt, Human herpesvirus 4 [Epstein-Barr virus]
agucugacuacucagaugaag

SEQ ID NO: 3973679 - RNA, 15 nt, Human herpesvirus 4 [Epstein-Barr virus]
agucuguacuuggga

SEQ ID NO: 3973680 - RNA, 22 nt, Human herpesvirus 4 [Epstein-Barr virus]
agugccauguguguccagugcc

SEQ ID NO: 3973681 - RNA, 20 nt, Human herpesvirus 4 [Epstein-Barr virus]
aguggccggggccguggagc

SEQ ID NO: 3973682 - RNA, 12 nt, Human herpesvirus 4 [Epstein-Barr virus]
aguggcugggau

SEQ ID NO: 3973683 - RNA, 18 nt, Human herpesvirus 4 [Epstein-Barr virus]
agugguuucggacacacc

SEQ ID NO: 3973684 - RNA, 19 nt, Human herpesvirus 4 [Epstein-Barr virus]
aguuacaccgucaacagau

SEQ ID NO: 3973685 - RNA, 13 nt, Human herpesvirus 4 [Epstein-Barr virus]
aguugggguccuc

SEQ ID NO: 3973686 - RNA, 13 nt, Human herpesvirus 4 [Epstein-Barr virus]
auaacgcaggucc

SEQ ID NO: 3973687 - RNA, 17 nt, Human herpesvirus 4 [Epstein-Barr virus]
auaaggcucugaagcaa

SEQ ID NO: 3973688 - RNA, 16 nt, Human herpesvirus 4 [Epstein-Barr virus]
auaccgagauguacau

SEQ ID NO: 3973689 - RNA, 18 nt, Human herpesvirus 4 [Epstein-Barr virus]
auagacaagaggcagaga

SEQ ID NO: 3973690 - RNA, 17 nt, Human herpesvirus 4 [Epstein-Barr virus]
auagaggggagcagagg

SEQ ID NO: 3973691 - RNA, 21 nt, Human herpesvirus 4 [Epstein-Barr virus]
auagcaggacggggggcuggc

SEQ ID NO: 3973692 - RNA, 18 nt, Human herpesvirus 4 [Epstein-Barr virus]
auagccggccaggcagag

SEQ ID NO: 3973693 - RNA, 13 nt, Human herpesvirus 4 [Epstein-Barr virus]
auaggccucugcc

SEQ ID NO: 3973694 - RNA, 14 nt, Human herpesvirus 4 [Epstein-Barr virus]
auauugucccccua

SEQ ID NO: 3973695 - RNA, 14 nt, Human herpesvirus 4 [Epstein-Barr virus]
aucaccagccaccu

SEQ ID NO: 3973696 - RNA, 23 nt, Human herpesvirus 4 [Epstein-Barr virus]
aucaccccgaguccaaggcccaa

SEQ ID NO: 3973697 - RNA, 18 nt, Human herpesvirus 4 [Epstein-Barr virus]
aucaccuggguacccaaa

SEQ ID NO: 3973698 - RNA, 18 nt, Human herpesvirus 4 [Epstein-Barr virus]
aucagaugagacuuuguu

SEQ ID NO: 3973699 - RNA, 14 nt, Human herpesvirus 4 [Epstein-Barr virus]
aucagggccaggcu

SEQ ID NO: 3973700 - RNA, 22 nt, Human herpesvirus 4 [Epstein-Barr virus]
aucaucagcgccguccacggcc

SEQ ID NO: 3973701 - RNA, 18 nt, Human herpesvirus 4 [Epstein-Barr virus]
auccaaacccccuccccu

SEQ ID NO: 3973702 - RNA, 22 nt, Human herpesvirus 4 [Epstein-Barr virus]
auccaggaggaggacgugagug

SEQ ID NO: 3973703 - RNA, 13 nt, Human herpesvirus 4 [Epstein-Barr virus]
auccaguggggcu

SEQ ID NO: 3973704 - RNA, 16 nt, Human herpesvirus 4 [Epstein-Barr virus]
aucccaaauaaauguu

SEQ ID NO: 3973705 - RNA, 23 nt, Human herpesvirus 4 [Epstein-Barr virus]
auccuagagggacagcugacggu

SEQ ID NO: 3973706 - RNA, 12 nt, Human herpesvirus 4 [Epstein-Barr virus]
aucgcagcucua

SEQ ID NO: 3973707 - RNA, 19 nt, Human herpesvirus 4 [Epstein-Barr virus]
aucgcugguggcaguauuu

SEQ ID NO: 3973708 - RNA, 15 nt, Human herpesvirus 4 [Epstein-Barr virus]
aucuauuagcagccu

SEQ ID NO: 3973709 - RNA, 19 nt, Human herpesvirus 4 [Epstein-Barr virus]
aucucauccccagagggcg

SEQ ID NO: 3973710 - RNA, 19 nt, Human herpesvirus 4 [Epstein-Barr virus]
aucucggcuguuuguacuu

SEQ ID NO: 3973711 - RNA, 21 nt, Human herpesvirus 4 [Epstein-Barr virus]
aucucugauuauagcucuggc

SEQ ID NO: 3973712 - RNA, 16 nt, Human herpesvirus 4 [Epstein-Barr virus]
aucuggaccagaaggc

SEQ ID NO: 3973713 - RNA, 22 nt, Human herpesvirus 4 [Epstein-Barr virus]
aucuggcuggggcauuaacuaa

SEQ ID NO: 3973714 - RNA, 14 nt, Human herpesvirus 4 [Epstein-Barr virus]
aucuuccugucggc

SEQ ID NO: 3973715 - RNA, 16 nt, Human herpesvirus 4 [Epstein-Barr virus]
aucuuugacugacaca

SEQ ID NO: 3973716 - RNA, 16 nt, Human herpesvirus 4 [Epstein-Barr virus]
augaaaauguguauuc

SEQ ID NO: 3973717 - RNA, 14 nt, Human herpesvirus 4 [Epstein-Barr virus]
augaacccuggggc

SEQ ID NO: 3973718 - RNA, 22 nt, Human herpesvirus 4 [Epstein-Barr virus]
augaauccaguaugccugccug

SEQ ID NO: 3973719 - RNA, 20 nt, Human herpesvirus 4 [Epstein-Barr virus]
augagcacguguggaagagg

SEQ ID NO: 3973720 - RNA, 14 nt, Human herpesvirus 4 [Epstein-Barr virus]
augagcggggagau

SEQ ID NO: 3973721 - RNA, 22 nt, Human herpesvirus 4 [Epstein-Barr virus]
augauaaugaugaggagcaccg

SEQ ID NO: 3973722 - RNA, 18 nt, Human herpesvirus 4 [Epstein-Barr virus]
augauucaucagaagcua

SEQ ID NO: 3973723 - RNA, 21 nt, Human herpesvirus 4 [Epstein-Barr virus]
augcaauaaauaaaaguacag

SEQ ID NO: 3973724 - RNA, 22 nt, Human herpesvirus 4 [Epstein-Barr virus]
augcaauaaauaaaaguacaga

SEQ ID NO: 3973725 - RNA, 15 nt, Human herpesvirus 4 [Epstein-Barr virus]
augccaauccaugcc

SEQ ID NO: 3973726 - RNA, 19 nt, Human herpesvirus 4 [Epstein-Barr virus]
augccucacgcgaagggaa

SEQ ID NO: 3973727 - RNA, 16 nt, Human herpesvirus 4 [Epstein-Barr virus]
augccuuggcaugacg

SEQ ID NO: 3973728 - RNA, 12 nt, Human herpesvirus 4 [Epstein-Barr virus]
auggagaugugc

SEQ ID NO: 3973729 - RNA, 16 nt, Human herpesvirus 4 [Epstein-Barr virus]
auggccgccacccucc

SEQ ID NO: 3973730 - RNA, 14 nt, Human herpesvirus 4 [Epstein-Barr virus]
caucacaagucaca

SEQ ID NO: 3973731 - RNA, 15 nt, Human herpesvirus 4 [Epstein-Barr virus]
caucagcgccgucca

SEQ ID NO: 3973732 - RNA, 13 nt, Human herpesvirus 4 [Epstein-Barr virus]
caucagcucgccc

SEQ ID NO: 3973733 - RNA, 16 nt, Human herpesvirus 4 [Epstein-Barr virus]
caucaucagcgccguc

SEQ ID NO: 3973734 - RNA, 22 nt, Human herpesvirus 4 [Epstein-Barr virus]
caucaugcugaauauugccagc

SEQ ID NO: 3973735 - RNA, 17 nt, Human herpesvirus 4 [Epstein-Barr virus]
cauccacagccccacuc

SEQ ID NO: 3973736 - RNA, 14 nt, Human herpesvirus 4 [Epstein-Barr virus]
cauccgagaggaug

SEQ ID NO: 3973737 - RNA, 16 nt, Human herpesvirus 4 [Epstein-Barr virus]
cauccggugccugaga

SEQ ID NO: 3973738 - RNA, 15 nt, Human herpesvirus 4 [Epstein-Barr virus]
cauccucagaggagg

SEQ ID NO: 3973739 - RNA, 13 nt, Human herpesvirus 4 [Epstein-Barr virus]
caucuaaggucca

SEQ ID NO: 3973740 - RNA, 16 nt, Human herpesvirus 4 [Epstein-Barr virus]
caucuagcgggagaug

SEQ ID NO: 3973741 - RNA, 15 nt, Human herpesvirus 4 [Epstein-Barr virus]
caucuauuagcagcc

SEQ ID NO: 3973742 - RNA, 14 nt, Human herpesvirus 4 [Epstein-Barr virus]
caugagcuccucuc

SEQ ID NO: 3973743 - RNA, 15 nt, Human herpesvirus 4 [Epstein-Barr virus]
caugcacggcccuga

SEQ ID NO: 3973744 - RNA, 18 nt, Human herpesvirus 4 [Epstein-Barr virus]
caugcagggugcacagac

SEQ ID NO: 3973745 - RNA, 18 nt, Human herpesvirus 4 [Epstein-Barr virus]
cauggagagguuugagaa

SEQ ID NO: 3973746 - RNA, 23 nt, Human herpesvirus 4 [Epstein-Barr virus]
cauggaggauugaggacccaccu

SEQ ID NO: 3973747 - RNA, 13 nt, Human herpesvirus 4 [Epstein-Barr virus]
caugguggcuucu

SEQ ID NO: 3973748 - RNA, 12 nt, Human herpesvirus 4 [Epstein-Barr virus]
cauggugugaga

SEQ ID NO: 3973749 - RNA, 14 nt, Human herpesvirus 4 [Epstein-Barr virus]
cauguuuuuggcau

SEQ ID NO: 3973750 - RNA, 23 nt, Human herpesvirus 4 [Epstein-Barr virus]
cauucacggggccgugcaccugc

SEQ ID NO: 3973751 - RNA, 15 nt, Human herpesvirus 4 [Epstein-Barr virus]
cauucccccaugaga

SEQ ID NO: 3973752 - RNA, 21 nt, Human herpesvirus 4 [Epstein-Barr virus]
cauucguacaucuccaggcga

SEQ ID NO: 3973753 - RNA, 16 nt, Human herpesvirus 4 [Epstein-Barr virus]
cauugacccgaggauc

SEQ ID NO: 3973754 - RNA, 17 nt, Human herpesvirus 4 [Epstein-Barr virus]
cauugaugaacugguca

SEQ ID NO: 3973755 - RNA, 20 nt, Human herpesvirus 4 [Epstein-Barr virus]
cauugcuggccgcagcuggc

SEQ ID NO: 3973756 - RNA, 16 nt, Human herpesvirus 4 [Epstein-Barr virus]
cauuuucguccuccca

SEQ ID NO: 3973757 - RNA, 18 nt, Human herpesvirus 4 [Epstein-Barr virus]
cauuuuuagccccagccc

SEQ ID NO: 3973758 - RNA, 22 nt, Human herpesvirus 4 [Epstein-Barr virus]
ccaacgagggcagacaccaccu

SEQ ID NO: 3973759 - RNA, 17 nt, Human herpesvirus 4 [Epstein-Barr virus]
ccaaggacaacagcuag

SEQ ID NO: 3973760 - RNA, 17 nt, Human herpesvirus 4 [Epstein-Barr virus]
ccacagccugcaccagu

SEQ ID NO: 3973761 - RNA, 15 nt, Human herpesvirus 4 [Epstein-Barr virus]
ccacccccaccaccc

SEQ ID NO: 3973762 - RNA, 16 nt, Human herpesvirus 4 [Epstein-Barr virus]
ccacgauguagccgcu

SEQ ID NO: 3973763 - RNA, 20 nt, Human herpesvirus 4 [Epstein-Barr virus]
ccacgcuccgcgcucggccu

SEQ ID NO: 3973764 - RNA, 17 nt, Human herpesvirus 4 [Epstein-Barr virus]
ccacggccguagcccag

SEQ ID NO: 3973765 - RNA, 15 nt, Human herpesvirus 4 [Epstein-Barr virus]
ccacuacaccccuga

SEQ ID NO: 3973766 - RNA, 22 nt, Human herpesvirus 4 [Epstein-Barr virus]
ccacucaggaagcuggccaggc

SEQ ID NO: 3973767 - RNA, 20 nt, Human herpesvirus 4 [Epstein-Barr virus]
ccacugagcaagauccuucu

SEQ ID NO: 3973768 - RNA, 19 nt, Human herpesvirus 4 [Epstein-Barr virus]
ccacuuccacagcaauggc

SEQ ID NO: 3973769 - RNA, 17 nt, Human herpesvirus 4 [Epstein-Barr virus]
ccagacgcgauggcaca

SEQ ID NO: 3973770 - RNA, 19 nt, Human herpesvirus 4 [Epstein-Barr virus]
ccagagaggcccacugcag

SEQ ID NO: 3973771 - RNA, 14 nt, Human herpesvirus 4 [Epstein-Barr virus]
ccagagcccagagg

SEQ ID NO: 3973772 - RNA, 18 nt, Human herpesvirus 4 [Epstein-Barr virus]
ccagaguucccggcugcu

SEQ ID NO: 3973773 - RNA, 17 nt, Human herpesvirus 4 [Epstein-Barr virus]
ccagaucgccugccacu

SEQ ID NO: 3973774 - RNA, 19 nt, Human herpesvirus 4 [Epstein-Barr virus]
ccagcaaaaccagcccggg

SEQ ID NO: 3973775 - RNA, 23 nt, Human herpesvirus 4 [Epstein-Barr virus]
ccagcaacagaucuugcugaggu

SEQ ID NO: 3973776 - RNA, 13 nt, Human herpesvirus 4 [Epstein-Barr virus]
ccagcaggcucag

SEQ ID NO: 3973777 - RNA, 22 nt, Human herpesvirus 4 [Epstein-Barr virus]
ccagcccucgagaaccccagca

SEQ ID NO: 3973778 - RNA, 22 nt, Human herpesvirus 4 [Epstein-Barr virus]
ccagcgccuccucgcaggcccc

SEQ ID NO: 3973779 - RNA, 20 nt, Human herpesvirus 4 [Epstein-Barr virus]
ccagcuaacaggacauguuu

SEQ ID NO: 3973780 - RNA, 17 nt, Human herpesvirus 4 [Epstein-Barr virus]
ccagcucggccagcagg

SEQ ID NO: 3973781 - RNA, 19 nt, Human herpesvirus 4 [Epstein-Barr virus]
ccagcuggucaucagccgc

SEQ ID NO: 3973782 - RNA, 22 nt, Human herpesvirus 4 [Epstein-Barr virus]
ccagcuggugguccgcauguuu

SEQ ID NO: 3973783 - RNA, 20 nt, Human herpesvirus 4 [Epstein-Barr virus]
ccaggcacaucuggcaccug

SEQ ID NO: 3973784 - RNA, 22 nt, Human herpesvirus 4 [Epstein-Barr virus]
ccaggcagcacacgaagccugc

SEQ ID NO: 3973785 - RNA, 16 nt, Human herpesvirus 4 [Epstein-Barr virus]
ccaggccgccaugcuc

SEQ ID NO: 3973786 - RNA, 15 nt, Human herpesvirus 4 [Epstein-Barr virus]
ccaggcgacacuugg

SEQ ID NO: 3973787 - RNA, 21 nt, Human herpesvirus 4 [Epstein-Barr virus]
ccaggcgguuagggaggacac

SEQ ID NO: 3973788 - RNA, 17 nt, Human herpesvirus 4 [Epstein-Barr virus]
ccaggcuccuggaucug

SEQ ID NO: 3973789 - RNA, 19 nt, Human herpesvirus 4 [Epstein-Barr virus]
ccaggcuuucuaugccuga

SEQ ID NO: 3973790 - RNA, 13 nt, Human herpesvirus 4 [Epstein-Barr virus]
ccagggccagcaa

SEQ ID NO: 3973791 - RNA, 17 nt, Human herpesvirus 4 [Epstein-Barr virus]
ccaggggcgagcagcgc

SEQ ID NO: 3973792 - RNA, 16 nt, Human herpesvirus 4 [Epstein-Barr virus]
ccagucaccuuccaga

SEQ ID NO: 3973793 - RNA, 15 nt, Human herpesvirus 4 [Epstein-Barr virus]
ccaguguggcugggg

SEQ ID NO: 3973794 - RNA, 18 nt, Human herpesvirus 4 [Epstein-Barr virus]
ccaguuccccccagccug

SEQ ID NO: 3973795 - RNA, 18 nt, Human herpesvirus 4 [Epstein-Barr virus]
ccauauuggggcaauggc

SEQ ID NO: 3973796 - RNA, 23 nt, Human herpesvirus 4 [Epstein-Barr virus]
ccaucaccuggguacccaaacca

SEQ ID NO: 3973797 - RNA, 13 nt, Human herpesvirus 4 [Epstein-Barr virus]
ccaucagcucgcc

SEQ ID NO: 3973798 - RNA, 21 nt, Human herpesvirus 4 [Epstein-Barr virus]
ccaucugcuucuggcucuucu

SEQ ID NO: 3973799 - RNA, 16 nt, Human herpesvirus 4 [Epstein-Barr virus]
ccaugacgcugcugcu

SEQ ID NO: 3973800 - RNA, 20 nt, Human herpesvirus 4 [Epstein-Barr virus]
ccaugcaaguggaugcaucu

SEQ ID NO: 3973801 - RNA, 15 nt, Human herpesvirus 4 [Epstein-Barr virus]
ccaugccaucucuga

SEQ ID NO: 3973802 - RNA, 15 nt, Human herpesvirus 4 [Epstein-Barr virus]
ccaugcgcgcccugu

SEQ ID NO: 3973803 - RNA, 15 nt, Human herpesvirus 4 [Epstein-Barr virus]
cccaacagucuucag

SEQ ID NO: 3973804 - RNA, 12 nt, Human herpesvirus 4 [Epstein-Barr virus]
cccaaguacaga

SEQ ID NO: 3973805 - RNA, 22 nt, Human herpesvirus 4 [Epstein-Barr virus]
cccaauauccaucugcuucugg

SEQ ID NO: 3973806 - RNA, 19 nt, Human herpesvirus 4 [Epstein-Barr virus]
cccacacagcgccagcagg

SEQ ID NO: 3973807 - RNA, 14 nt, Human herpesvirus 4 [Epstein-Barr virus]
cccaccagccagcg

SEQ ID NO: 3973808 - RNA, 23 nt, Human herpesvirus 4 [Epstein-Barr virus]
cccacuaucacccauggccaggc

SEQ ID NO: 3973809 - RNA, 14 nt, Human herpesvirus 4 [Epstein-Barr virus]
cccacucuugccuc

SEQ ID NO: 3973810 - RNA, 18 nt, Human herpesvirus 4 [Epstein-Barr virus]
cccacugaaaaaccagac

SEQ ID NO: 3973811 - RNA, 20 nt, Human herpesvirus 4 [Epstein-Barr virus]
cccagaccugugugcuguau

SEQ ID NO: 3973812 - RNA, 13 nt, Human herpesvirus 4 [Epstein-Barr virus]
cccagcagaucca

SEQ ID NO: 3973813 - RNA, 11 nt, Human herpesvirus 4 [Epstein-Barr virus]
cccagccacag

SEQ ID NO: 3973814 - RNA, 16 nt, Human herpesvirus 4 [Epstein-Barr virus]
cccagcccuccucaga

SEQ ID NO: 3973815 - RNA, 13 nt, Human herpesvirus 4 [Epstein-Barr virus]
cccagcccucgag

SEQ ID NO: 3973816 - RNA, 18 nt, Human herpesvirus 4 [Epstein-Barr virus]
cccagcgcuggcuccagg

SEQ ID NO: 3973817 - RNA, 19 nt, Human herpesvirus 4 [Epstein-Barr virus]
cccaggcagccuugcgugg

SEQ ID NO: 3973818 - RNA, 11 nt, Human herpesvirus 4 [Epstein-Barr virus]
aaagggcccag

SEQ ID NO: 3973819 - RNA, 11 nt, Human herpesvirus 4 [Epstein-Barr virus]
aaaggggagau

SEQ ID NO: 3973820 - RNA, 21 nt, Human herpesvirus 4 [Epstein-Barr virus]
aaaguacaggauuauugccaa

SEQ ID NO: 3973821 - RNA, 17 nt, Human herpesvirus 4 [Epstein-Barr virus]
aaaguugaugauauuga

SEQ ID NO: 3973822 - RNA, 15 nt, Human herpesvirus 4 [Epstein-Barr virus]
aaauaaauguuacuu

SEQ ID NO: 3973823 - RNA, 19 nt, Human herpesvirus 4 [Epstein-Barr virus]
aaauaaauguuacuucuuu

SEQ ID NO: 3973824 - RNA, 18 nt, Human herpesvirus 4 [Epstein-Barr virus]
aaaucaacuacaagcagc

SEQ ID NO: 3973825 - RNA, 20 nt, Human herpesvirus 4 [Epstein-Barr virus]
aacacauauacgaagaagcg

SEQ ID NO: 3973826 - RNA, 12 nt, Human herpesvirus 4 [Epstein-Barr virus]
aacaggcugcug

SEQ ID NO: 3973827 - RNA, 19 nt, Human herpesvirus 4 [Epstein-Barr virus]
aacccccggcucucaggcc

SEQ ID NO: 3973828 - RNA, 23 nt, Human herpesvirus 4 [Epstein-Barr virus]
aacccuguagucaccugcacaga

SEQ ID NO: 3973829 - RNA, 11 nt, Human herpesvirus 4 [Epstein-Barr virus]
aaccugagccu

SEQ ID NO: 3973830 - RNA, 22 nt, Human herpesvirus 4 [Epstein-Barr virus]
aaccuuaaaaguccccccaucu

SEQ ID NO: 3973831 - RNA, 17 nt, Human herpesvirus 4 [Epstein-Barr virus]
aacgaucccaggccuca

SEQ ID NO: 3973832 - RNA, 21 nt, Human herpesvirus 4 [Epstein-Barr virus]
aacuggccaugcaggccugga

SEQ ID NO: 3973833 - RNA, 17 nt, Human herpesvirus 4 [Epstein-Barr virus]
aacuuggaggcugcuaa

SEQ ID NO: 3973834 - RNA, 15 nt, Human herpesvirus 4 [Epstein-Barr virus]
aacuuugagcugggc

SEQ ID NO: 3973835 - RNA, 17 nt, Human herpesvirus 4 [Epstein-Barr virus]
aacuuugagcugggcaa

SEQ ID NO: 3973836 - RNA, 14 nt, Human herpesvirus 4 [Epstein-Barr virus]
aagaagauugaaga

SEQ ID NO: 3973837 - RNA, 16 nt, Human herpesvirus 4 [Epstein-Barr virus]
aagaccaauacccagg

SEQ ID NO: 3973838 - RNA, 15 nt, Human herpesvirus 4 [Epstein-Barr virus]
aagacuauguucucu

SEQ ID NO: 3973839 - RNA, 17 nt, Human herpesvirus 4 [Epstein-Barr virus]
aagagccauggugagac

SEQ ID NO: 3973840 - RNA, 17 nt, Human herpesvirus 4 [Epstein-Barr virus]
aagcaacagguccucag

SEQ ID NO: 3973841 - RNA, 15 nt, Human herpesvirus 4 [Epstein-Barr virus]
aagcaacugcugcag

SEQ ID NO: 3973842 - RNA, 14 nt, Human herpesvirus 4 [Epstein-Barr virus]
aagcuuaugagcga

SEQ ID NO: 3973843 - RNA, 17 nt, Human herpesvirus 4 [Epstein-Barr virus]
aagcuuuugaccaagcu

SEQ ID NO: 3973844 - RNA, 13 nt, Human herpesvirus 4 [Epstein-Barr virus]
aaggcucugaagc

SEQ ID NO: 3973845 - RNA, 20 nt, Human herpesvirus 4 [Epstein-Barr virus]
aaggugguuauuuugggcca

SEQ ID NO: 3973846 - RNA, 18 nt, Human herpesvirus 4 [Epstein-Barr virus]
aagguguagaaguguguc

SEQ ID NO: 3973847 - RNA, 16 nt, Human herpesvirus 4 [Epstein-Barr virus]
aagucaggauucucua

SEQ ID NO: 3973848 - RNA, 23 nt, Human herpesvirus 4 [Epstein-Barr virus]
aauaaauaucuuccugucggcuc

SEQ ID NO: 3973849 - RNA, 23 nt, Human herpesvirus 4 [Epstein-Barr virus]
aaucaccgccguaaucuguggug

SEQ ID NO: 3973850 - RNA, 18 nt, Human herpesvirus 4 [Epstein-Barr virus]
aaucaccuuaacuggcac

SEQ ID NO: 3973851 - RNA, 17 nt, Human herpesvirus 4 [Epstein-Barr virus]
aauccgcgcagccuguu

SEQ ID NO: 3973852 - RNA, 15 nt, Human herpesvirus 4 [Epstein-Barr virus]
aaugaacccaggggu

SEQ ID NO: 3973853 - RNA, 22 nt, Human herpesvirus 4 [Epstein-Barr virus]
aauguaacacuacuuguuucug

SEQ ID NO: 3973854 - RNA, 23 nt, Human herpesvirus 4 [Epstein-Barr virus]
aauguagccccuaggccugccac

SEQ ID NO: 3973855 - RNA, 14 nt, Human herpesvirus 4 [Epstein-Barr virus]
aauguccagugggg

SEQ ID NO: 3973856 - RNA, 16 nt, Human herpesvirus 4 [Epstein-Barr virus]
aauuccccggggacac

SEQ ID NO: 3973857 - RNA, 22 nt, Human herpesvirus 4 [Epstein-Barr virus]
acaaccuuggacccugcugcga

SEQ ID NO: 3973858 - RNA, 24 nt, Human herpesvirus 4 [Epstein-Barr virus]
acaacugcuauucugagcaccaac

SEQ ID NO: 3973859 - RNA, 19 nt, Human herpesvirus 4 [Epstein-Barr virus]
acaagaguucucuggugaa

SEQ ID NO: 3973860 - RNA, 18 nt, Human herpesvirus 4 [Epstein-Barr virus]
acaagggaagagggaaaa

SEQ ID NO: 3973861 - RNA, 21 nt, Human herpesvirus 4 [Epstein-Barr virus]
acaauagaauuuuugcagcua

SEQ ID NO: 3973862 - RNA, 14 nt, Human herpesvirus 4 [Epstein-Barr virus]
acaaucuugugaac

SEQ ID NO: 3973863 - RNA, 14 nt, Human herpesvirus 4 [Epstein-Barr virus]
acaauguuccuucu

SEQ ID NO: 3973864 - RNA, 14 nt, Human herpesvirus 4 [Epstein-Barr virus]
acaccagucccaac

SEQ ID NO: 3973865 - RNA, 14 nt, Human herpesvirus 4 [Epstein-Barr virus]
acacgaaugcccag

SEQ ID NO: 3973866 - RNA, 15 nt, Human herpesvirus 4 [Epstein-Barr virus]
acacugaugagucug

SEQ ID NO: 3973867 - RNA, 22 nt, Human herpesvirus 4 [Epstein-Barr virus]
acacuucugaaaacugccuccu

SEQ ID NO: 3973868 - RNA, 20 nt, Human herpesvirus 4 [Epstein-Barr virus]
acacuugugguucuccugau

SEQ ID NO: 3973869 - RNA, 18 nt, Human herpesvirus 4 [Epstein-Barr virus]
acagaggaggcuggugcc

SEQ ID NO: 3973870 - RNA, 15 nt, Human herpesvirus 4 [Epstein-Barr virus]
acagauacaaaaacu

SEQ ID NO: 3973871 - RNA, 23 nt, Human herpesvirus 4 [Epstein-Barr virus]
acagccccacucuugccucggcg

SEQ ID NO: 3973872 - RNA, 19 nt, Human herpesvirus 4 [Epstein-Barr virus]
acagcugucacccaugccu

SEQ ID NO: 3973873 - RNA, 21 nt, Human herpesvirus 4 [Epstein-Barr virus]
acaggacuaaccaugccaucu

SEQ ID NO: 3973874 - RNA, 21 nt, Human herpesvirus 4 [Epstein-Barr virus]
acaggccgccuauggggccug

SEQ ID NO: 3973875 - RNA, 21 nt, Human herpesvirus 4 [Epstein-Barr virus]
acaggccuggcggguggagau

SEQ ID NO: 3973876 - RNA, 12 nt, Human herpesvirus 4 [Epstein-Barr virus]
acaggcugcgcc

SEQ ID NO: 3973877 - RNA, 14 nt, Human herpesvirus 4 [Epstein-Barr virus]
acaggggagguggc

SEQ ID NO: 3973878 - RNA, 22 nt, Human herpesvirus 4 [Epstein-Barr virus]
acaugagaaaauacuucucuag

SEQ ID NO: 3973879 - RNA, 13 nt, Human herpesvirus 4 [Epstein-Barr virus]
acaugcugaugug

SEQ ID NO: 3973880 - RNA, 18 nt, Human herpesvirus 4 [Epstein-Barr virus]
acaugcugaugugcugcc

SEQ ID NO: 3973881 - RNA, 14 nt, Human herpesvirus 4 [Epstein-Barr virus]
acaugguagauaaa

SEQ ID NO: 3973882 - RNA, 21 nt, Human herpesvirus 4 [Epstein-Barr virus]
acaugguuuaaggaaugaaca

SEQ ID NO: 3973883 - RNA, 16 nt, Human herpesvirus 4 [Epstein-Barr virus]
acauuggcagcagcuc

SEQ ID NO: 3973884 - RNA, 15 nt, Human herpesvirus 4 [Epstein-Barr virus]
accacuaggaaccca

SEQ ID NO: 3973885 - RNA, 15 nt, Human herpesvirus 4 [Epstein-Barr virus]
accagagcccagagg

SEQ ID NO: 3973886 - RNA, 12 nt, Human herpesvirus 4 [Epstein-Barr virus]
accagcuccagg

SEQ ID NO: 3973887 - RNA, 15 nt, Human herpesvirus 4 [Epstein-Barr virus]
accaggcgccgcagg

SEQ ID NO: 3973888 - RNA, 13 nt, Human herpesvirus 4 [Epstein-Barr virus]
accauaugaugac

SEQ ID NO: 3973889 - RNA, 15 nt, Human herpesvirus 4 [Epstein-Barr virus]
accauggacgaggac

SEQ ID NO: 3973890 - RNA, 16 nt, Human herpesvirus 4 [Epstein-Barr virus]
acccaaugugcauggg

SEQ ID NO: 3973891 - RNA, 17 nt, Human herpesvirus 4 [Epstein-Barr virus]
acccagccacuuacagc

SEQ ID NO: 3973892 - RNA, 15 nt, Human herpesvirus 4 [Epstein-Barr virus]
acccagcccucgaga

SEQ ID NO: 3973893 - RNA, 18 nt, Human herpesvirus 4 [Epstein-Barr virus]
acccaucugagggcagug

SEQ ID NO: 3973894 - RNA, 15 nt, Human herpesvirus 4 [Epstein-Barr virus]
acccccaccaccuca

SEQ ID NO: 3973895 - RNA, 15 nt, Human herpesvirus 4 [Epstein-Barr virus]
acccccaccaccucc

SEQ ID NO: 3973896 - RNA, 18 nt, Human herpesvirus 4 [Epstein-Barr virus]
acccccagcgcuggcucc

SEQ ID NO: 3973897 - RNA, 20 nt, Human herpesvirus 4 [Epstein-Barr virus]
acccgaaaucugacacuuua

SEQ ID NO: 3973898 - RNA, 22 nt, Human herpesvirus 4 [Epstein-Barr virus]
acccugggccggggccuccauc

SEQ ID NO: 3973899 - RNA, 21 nt, Human herpesvirus 4 [Epstein-Barr virus]
acccuucugcugcugcugguc

SEQ ID NO: 3973900 - RNA, 22 nt, Human herpesvirus 4 [Epstein-Barr virus]
accgcagccacguccagacucc

SEQ ID NO: 3973901 - RNA, 20 nt, Human herpesvirus 4 [Epstein-Barr virus]
accgcgcccuccucugggcc

SEQ ID NO: 3973902 - RNA, 23 nt, Human herpesvirus 4 [Epstein-Barr virus]
accgcgcccuccucugggccgcc

SEQ ID NO: 3973903 - RNA, 21 nt, Human herpesvirus 4 [Epstein-Barr virus]
accggccaagguccugggccu

SEQ ID NO: 3973904 - RNA, 13 nt, Human herpesvirus 4 [Epstein-Barr virus]
accgucagccaca

SEQ ID NO: 3973905 - RNA, 22 nt, Human herpesvirus 4 [Epstein-Barr virus]
accuacgccauuaagaacaagu

SEQ ID NO: 3973906 - RNA, 14 nt, Human herpesvirus 4 [Epstein-Barr virus]
accuaugccuggaa

SEQ ID NO: 3973907 - RNA, 21 nt, Human herpesvirus 4 [Epstein-Barr virus]
accuccaccaccuucaccacc

SEQ ID NO: 3973908 - RNA, 21 nt, Human herpesvirus 4 [Epstein-Barr virus]
accuccacuuacaaccaagcc

SEQ ID NO: 3973909 - RNA, 16 nt, Human herpesvirus 4 [Epstein-Barr virus]
accucccccccagacc

SEQ ID NO: 3973910 - RNA, 22 nt, Human herpesvirus 4 [Epstein-Barr virus]
accuccgggggcacugucgaga

SEQ ID NO: 3973911 - RNA, 19 nt, Human herpesvirus 4 [Epstein-Barr virus]
accugcacagaucugacca

SEQ ID NO: 3973912 - RNA, 16 nt, Human herpesvirus 4 [Epstein-Barr virus]
accugccggagggaca

SEQ ID NO: 3973913 - RNA, 20 nt, Human herpesvirus 4 [Epstein-Barr virus]
accuggacauagaggggcau

SEQ ID NO: 3973914 - RNA, 21 nt, Human herpesvirus 4 [Epstein-Barr virus]
accuguccuugucugcugcca

SEQ ID NO: 3973915 - RNA, 23 nt, Human herpesvirus 4 [Epstein-Barr virus]
accugucugauugcacccuggcc

SEQ ID NO: 3973916 - RNA, 16 nt, Human herpesvirus 4 [Epstein-Barr virus]
acgacuauccaggucu

SEQ ID NO: 3973917 - RNA, 22 nt, Human herpesvirus 4 [Epstein-Barr virus]
acgaggaggcggaagaccagga

SEQ ID NO: 3973918 - RNA, 18 nt, Human herpesvirus 4 [Epstein-Barr virus]
acgaucuucaagagucuc

SEQ ID NO: 3973919 - RNA, 21 nt, Human herpesvirus 4 [Epstein-Barr virus]
acgcaauuagagugccgggcc

SEQ ID NO: 3973920 - RNA, 22 nt, Human herpesvirus 4 [Epstein-Barr virus]
acgcauccaccaucaaugucac

SEQ ID NO: 3973921 - RNA, 21 nt, Human herpesvirus 4 [Epstein-Barr virus]
acgcccgacaauaaaguugau

SEQ ID NO: 3973922 - RNA, 14 nt, Human herpesvirus 4 [Epstein-Barr virus]
acgccggccugcug

SEQ ID NO: 3973923 - RNA, 20 nt, Human herpesvirus 4 [Epstein-Barr virus]
acgcucucuauguugucaca

SEQ ID NO: 3973924 - RNA, 18 nt, Human herpesvirus 4 [Epstein-Barr virus]
acgcugcccuagagguuu

SEQ ID NO: 3973925 - RNA, 16 nt, Human herpesvirus 4 [Epstein-Barr virus]
acgcugguacccgcca

SEQ ID NO: 3973926 - RNA, 14 nt, Human herpesvirus 4 [Epstein-Barr virus]
acgcuggucuugaa

SEQ ID NO: 3973927 - RNA, 21 nt, Human herpesvirus 4 [Epstein-Barr virus]
acggcaaggccggaggcagac

SEQ ID NO: 3973928 - RNA, 21 nt, Human herpesvirus 4 [Epstein-Barr virus]
acggccacguccccggccucc

SEQ ID NO: 3973929 - RNA, 21 nt, Human herpesvirus 4 [Epstein-Barr virus]
acggcccggggguggcagccc

SEQ ID NO: 3973930 - RNA, 19 nt, Human herpesvirus 4 [Epstein-Barr virus]
acgggaacaucaaccagug

SEQ ID NO: 3973931 - RNA, 13 nt, Human herpesvirus 4 [Epstein-Barr virus]
acgggacuucuuc

SEQ ID NO: 3973932 - RNA, 11 nt, Human herpesvirus 4 [Epstein-Barr virus]
acgggccucua

SEQ ID NO: 3973933 - RNA, 21 nt, Human herpesvirus 4 [Epstein-Barr virus]
acguccgugagagccuaccca

SEQ ID NO: 3973934 - RNA, 18 nt, Human herpesvirus 4 [Epstein-Barr virus]
acgugaacauccugcgug

SEQ ID NO: 3973935 - RNA, 15 nt, Human herpesvirus 4 [Epstein-Barr virus]
acguggcuuccagag

SEQ ID NO: 3973936 - RNA, 19 nt, Human herpesvirus 4 [Epstein-Barr virus]
acguggcuuccagagaggc

SEQ ID NO: 3973937 - RNA, 22 nt, Human herpesvirus 4 [Epstein-Barr virus]
acgugucgcguagcucugguag

SEQ ID NO: 3973938 - RNA, 18 nt, Human herpesvirus 4 [Epstein-Barr virus]
acguuggcuucugcugcu

SEQ ID NO: 3973939 - RNA, 20 nt, Human herpesvirus 4 [Epstein-Barr virus]
acguuguagguguccagcgc

SEQ ID NO: 3973940 - RNA, 19 nt, Human herpesvirus 4 [Epstein-Barr virus]
acuaauggaauauuaauaa

SEQ ID NO: 3973941 - RNA, 17 nt, Human herpesvirus 4 [Epstein-Barr virus]
acuacaagcagcuagag

SEQ ID NO: 3973942 - RNA, 16 nt, Human herpesvirus 4 [Epstein-Barr virus]
acuacaauguuccuuc

SEQ ID NO: 3973943 - RNA, 13 nt, Human herpesvirus 4 [Epstein-Barr virus]
acuacaccagucc

SEQ ID NO: 3973944 - RNA, 21 nt, Human herpesvirus 4 [Epstein-Barr virus]
acuacaccaucaccgucggca

SEQ ID NO: 3973945 - RNA, 19 nt, Human herpesvirus 4 [Epstein-Barr virus]
acuacgagggccucuggca

SEQ ID NO: 3973946 - RNA, 18 nt, Human herpesvirus 4 [Epstein-Barr virus]
acuaugacaccuaucugu

SEQ ID NO: 3973947 - RNA, 22 nt, Human herpesvirus 4 [Epstein-Barr virus]
acucacccccgaggagagggga

SEQ ID NO: 3973948 - RNA, 16 nt, Human herpesvirus 4 [Epstein-Barr virus]
acuccacagauggaga

SEQ ID NO: 3973949 - RNA, 14 nt, Human herpesvirus 4 [Epstein-Barr virus]
acucccaccacccc

SEQ ID NO: 3973950 - RNA, 20 nt, Human herpesvirus 4 [Epstein-Barr virus]
acucccauguaagccugccu

SEQ ID NO: 3973951 - RNA, 21 nt, Human herpesvirus 4 [Epstein-Barr virus]
acuccuaugcauuuccugccc

SEQ ID NO: 3973952 - RNA, 23 nt, Human herpesvirus 4 [Epstein-Barr virus]
acucucucccccgggcgcugccu

SEQ ID NO: 3973953 - RNA, 12 nt, Human herpesvirus 4 [Epstein-Barr virus]
acucugcuuucu

SEQ ID NO: 3973954 - RNA, 17 nt, Human herpesvirus 4 [Epstein-Barr virus]
acucuggggucucaggc

SEQ ID NO: 3973955 - RNA, 14 nt, Human herpesvirus 4 [Epstein-Barr virus]
acucuuggcagcag

SEQ ID NO: 3973956 - RNA, 15 nt, Human herpesvirus 4 [Epstein-Barr virus]
acugaauuuauaccc

SEQ ID NO: 3973957 - RNA, 18 nt, Human herpesvirus 4 [Epstein-Barr virus]
acugauggccaucuuuca

SEQ ID NO: 3973958 - RNA, 21 nt, Human herpesvirus 4 [Epstein-Barr virus]
acugcagugggccucucuggc

SEQ ID NO: 3973959 - RNA, 22 nt, Human herpesvirus 4 [Epstein-Barr virus]
acugcagugggccucucuggcu

SEQ ID NO: 3973960 - RNA, 20 nt, Human herpesvirus 4 [Epstein-Barr virus]
acugccacauuggacaccca

SEQ ID NO: 3973961 - RNA, 23 nt, Human herpesvirus 4 [Epstein-Barr virus]
acuggaacuguacuaaauuugcu

SEQ ID NO: 3973962 - RNA, 17 nt, Human herpesvirus 4 [Epstein-Barr virus]
acuggccaugcaggccu

SEQ ID NO: 3973963 - RNA, 16 nt, Human herpesvirus 4 [Epstein-Barr virus]
acuggggcugguggcc

SEQ ID NO: 3973964 - RNA, 22 nt, Human herpesvirus 4 [Epstein-Barr virus]
acuuacagcacauuuuguucua

SEQ ID NO: 3973965 - RNA, 19 nt, Human herpesvirus 4 [Epstein-Barr virus]
acuuacaucgacuuuaugc

SEQ ID NO: 3973966 - RNA, 17 nt, Human herpesvirus 4 [Epstein-Barr virus]
acuucauucucaaacag

SEQ ID NO: 3973967 - RNA, 23 nt, Human herpesvirus 4 [Epstein-Barr virus]
acuuggaggcugcuaagccagga

SEQ ID NO: 3973968 - RNA, 17 nt, Human herpesvirus 4 [Epstein-Barr virus]
acuugggggcaggcuac

SEQ ID NO: 3973969 - RNA, 16 nt, Human herpesvirus 4 [Epstein-Barr virus]
acuuuagagcucugga

SEQ ID NO: 3973970 - RNA, 13 nt, Human herpesvirus 4 [Epstein-Barr virus]
acuuuauuaauaa

SEQ ID NO: 3973971 - RNA, 16 nt, Human herpesvirus 4 [Epstein-Barr virus]
acuuuauuaauaaaca

SEQ ID NO: 3973972 - RNA, 20 nt, Human herpesvirus 4 [Epstein-Barr virus]
agaaaacucugcauggagaa

SEQ ID NO: 3973973 - RNA, 23 nt, Human herpesvirus 4 [Epstein-Barr virus]
agaacccccugcaggacacguga

SEQ ID NO: 3973974 - RNA, 23 nt, Human herpesvirus 4 [Epstein-Barr virus]
agaagugugucccccuccauucc

SEQ ID NO: 3973975 - RNA, 14 nt, Human herpesvirus 4 [Epstein-Barr virus]
agaaucugggcugg

SEQ ID NO: 3973976 - RNA, 19 nt, Human herpesvirus 4 [Epstein-Barr virus]
agacaugcagacuccaggu

SEQ ID NO: 3973977 - RNA, 17 nt, Human herpesvirus 4 [Epstein-Barr virus]
agaccaauacccaggau

SEQ ID NO: 3973978 - RNA, 22 nt, Human herpesvirus 4 [Epstein-Barr virus]
agacgagucugacuacagcgag

SEQ ID NO: 3973979 - RNA, 17 nt, Human herpesvirus 4 [Epstein-Barr virus]
agacguguguggcugua

SEQ ID NO: 3973980 - RNA, 18 nt, Human herpesvirus 4 [Epstein-Barr virus]
agagauuucauccucaga

SEQ ID NO: 3973981 - RNA, 19 nt, Human herpesvirus 4 [Epstein-Barr virus]
agagauuucauccucagag

SEQ ID NO: 3973982 - RNA, 15 nt, Human herpesvirus 4 [Epstein-Barr virus]
agaggacuguucucu

SEQ ID NO: 3973983 - RNA, 14 nt, Human herpesvirus 4 [Epstein-Barr virus]
caccucgggcucaa

SEQ ID NO: 3973984 - RNA, 15 nt, Human herpesvirus 4 [Epstein-Barr virus]
caccuugaggugcca

SEQ ID NO: 3973985 - RNA, 20 nt, Human herpesvirus 4 [Epstein-Barr virus]
caccuugaggugccacagag

SEQ ID NO: 3973986 - RNA, 12 nt, Human herpesvirus 4 [Epstein-Barr virus]
caccuuugcuau

SEQ ID NO: 3973987 - RNA, 17 nt, Human herpesvirus 4 [Epstein-Barr virus]
cacgguuauggcagagc

SEQ ID NO: 3973988 - RNA, 18 nt, Human herpesvirus 4 [Epstein-Barr virus]
cacguguggaagaggaaa

SEQ ID NO: 3973989 - RNA, 19 nt, Human herpesvirus 4 [Epstein-Barr virus]
cacguuugcccgcuuccuc

SEQ ID NO: 3973990 - RNA, 16 nt, Human herpesvirus 4 [Epstein-Barr virus]
cacucagacucuccgc

SEQ ID NO: 3973991 - RNA, 13 nt, Human herpesvirus 4 [Epstein-Barr virus]
cacuccaccugcc

SEQ ID NO: 3973992 - RNA, 14 nt, Human herpesvirus 4 [Epstein-Barr virus]
cacucccaccaccc

SEQ ID NO: 3973993 - RNA, 23 nt, Human herpesvirus 4 [Epstein-Barr virus]
cacuccggacgcagaggccugca

SEQ ID NO: 3973994 - RNA, 15 nt, Human herpesvirus 4 [Epstein-Barr virus]
cacucugaccaggac

SEQ ID NO: 3973995 - RNA, 14 nt, Human herpesvirus 4 [Epstein-Barr virus]
cacugaaaaaccag

SEQ ID NO: 3973996 - RNA, 23 nt, Human herpesvirus 4 [Epstein-Barr virus]
cacugaugagucugacuacucag

SEQ ID NO: 3973997 - RNA, 20 nt, Human herpesvirus 4 [Epstein-Barr virus]
cacugauuuugggcacacuu

SEQ ID NO: 3973998 - RNA, 19 nt, Human herpesvirus 4 [Epstein-Barr virus]
cacugcguccaccuggcca

SEQ ID NO: 3973999 - RNA, 19 nt, Human herpesvirus 4 [Epstein-Barr virus]
gggaaaaacuggccaugca

SEQ ID NO: 3974000 - RNA, 18 nt, Human herpesvirus 4 [Epstein-Barr virus]
gggacgggguggugccug

SEQ ID NO: 3974001 - RNA, 20 nt, Human herpesvirus 4 [Epstein-Barr virus]
cggguggagauagggaccag

SEQ ID NO: 3974002 - RNA, 15 nt, Human herpesvirus 4 [Epstein-Barr virus]
cggguucgggcacgc

SEQ ID NO: 3974003 - RNA, 18 nt, Human herpesvirus 4 [Epstein-Barr virus]
cggucaaguaccagcugg

SEQ ID NO: 3974004 - RNA, 15 nt, Human herpesvirus 4 [Epstein-Barr virus]
cggugaucagggaga

SEQ ID NO: 3974005 - RNA, 16 nt, Human herpesvirus 4 [Epstein-Barr virus]
cgguggaacaggagca

SEQ ID NO: 3974006 - RNA, 15 nt, Human herpesvirus 4 [Epstein-Barr virus]
cgguggccugcucac

SEQ ID NO: 3974007 - RNA, 13 nt, Human herpesvirus 4 [Epstein-Barr virus]
cguaucugggcac

SEQ ID NO: 3974008 - RNA, 19 nt, Human herpesvirus 4 [Epstein-Barr virus]
cgucacugauuuugggcac

SEQ ID NO: 3974009 - RNA, 20 nt, Human herpesvirus 4 [Epstein-Barr virus]
cgucaggagacacggcucug

SEQ ID NO: 3974010 - RNA, 15 nt, Human herpesvirus 4 [Epstein-Barr virus]
cguccuuguccagga

SEQ ID NO: 3974011 - RNA, 23 nt, Human herpesvirus 4 [Epstein-Barr virus]
cgucgacgcuguuuugcagcuga

SEQ ID NO: 3974012 - RNA, 20 nt, Human herpesvirus 4 [Epstein-Barr virus]
cgucgcggagagggaugggc

SEQ ID NO: 3974013 - RNA, 20 nt, Human herpesvirus 4 [Epstein-Barr virus]
cgucgggaaacacagcucug

SEQ ID NO: 3974014 - RNA, 22 nt, Human herpesvirus 4 [Epstein-Barr virus]
cgugaaccucccccccagaccu

SEQ ID NO: 3974015 - RNA, 20 nt, Human herpesvirus 4 [Epstein-Barr virus]
cgugaauugugcccaccaga

SEQ ID NO: 3974016 - RNA, 18 nt, Human herpesvirus 4 [Epstein-Barr virus]
cgugaguccagggcccug

SEQ ID NO: 3974017 - RNA, 19 nt, Human herpesvirus 4 [Epstein-Barr virus]
cgugagugacacugaugag

SEQ ID NO: 3974018 - RNA, 17 nt, Human herpesvirus 4 [Epstein-Barr virus]
cgugaucaugagggcuu

SEQ ID NO: 3974019 - RNA, 19 nt, Human herpesvirus 4 [Epstein-Barr virus]
cgugcuuuuugccaggccu

SEQ ID NO: 3974020 - RNA, 13 nt, Human herpesvirus 4 [Epstein-Barr virus]
cguggagguuguc

SEQ ID NO: 3974021 - RNA, 22 nt, Human herpesvirus 4 [Epstein-Barr virus]
cguggccaccuucuccaucucc

SEQ ID NO: 3974022 - RNA, 17 nt, Human herpesvirus 4 [Epstein-Barr virus]
cguggccagguacgggc

SEQ ID NO: 3974023 - RNA, 21 nt, Human herpesvirus 4 [Epstein-Barr virus]
cgugggaaaauaguuccaggu

SEQ ID NO: 3974024 - RNA, 14 nt, Human herpesvirus 4 [Epstein-Barr virus]
cguguguggcugua

SEQ ID NO: 3974025 - RNA, 20 nt, Human herpesvirus 4 [Epstein-Barr virus]
cguuaaaacaguagaagaac

SEQ ID NO: 3974026 - RNA, 16 nt, Human herpesvirus 4 [Epstein-Barr virus]
cguucaggaacagccu

SEQ ID NO: 3974027 - RNA, 17 nt, Human herpesvirus 4 [Epstein-Barr virus]
cguuggcuucugcugcu

SEQ ID NO: 3974028 - RNA, 18 nt, Human herpesvirus 4 [Epstein-Barr virus]
cguuggcuucugcugcug

SEQ ID NO: 3974029 - RNA, 18 nt, Human herpesvirus 4 [Epstein-Barr virus]
cuaacacgaaugcccagg

SEQ ID NO: 3974030 - RNA, 23 nt, Human herpesvirus 4 [Epstein-Barr virus]
cuaacacgcuuuugucugccugg

SEQ ID NO: 3974031 - RNA, 15 nt, Human herpesvirus 4 [Epstein-Barr virus]
cuaaggcaguccagg

SEQ ID NO: 3974032 - RNA, 18 nt, Human herpesvirus 4 [Epstein-Barr virus]
cuaaucgcugguggcagu

SEQ ID NO: 3974033 - RNA, 14 nt, Human herpesvirus 4 [Epstein-Barr virus]
cuacaacucagccc

SEQ ID NO: 3974034 - RNA, 11 nt, Human herpesvirus 4 [Epstein-Barr virus]
cuacaccaccc

SEQ ID NO: 3974035 - RNA, 17 nt, Human herpesvirus 4 [Epstein-Barr virus]
cuacacggccucaaagg

SEQ ID NO: 3974036 - RNA, 12 nt, Human herpesvirus 4 [Epstein-Barr virus]
cuacaguauuuu

SEQ ID NO: 3974037 - RNA, 21 nt, Human herpesvirus 4 [Epstein-Barr virus]
cuaccucuguuccuucugcuc

SEQ ID NO: 3974038 - RNA, 23 nt, Human herpesvirus 4 [Epstein-Barr virus]
cuaccucuguuccuucugcucca

SEQ ID NO: 3974039 - RNA, 16 nt, Human herpesvirus 4 [Epstein-Barr virus]
aaaaacuugagucucu

SEQ ID NO: 3974040 - RNA, 13 nt, Human herpesvirus 4 [Epstein-Barr virus]
aaaagcagccacc

SEQ ID NO: 3974041 - RNA, 21 nt, Human herpesvirus 4 [Epstein-Barr virus]
aaaaggggcagcaaucucggc

SEQ ID NO: 3974042 - RNA, 22 nt, Human herpesvirus 4 [Epstein-Barr virus]
aaaccuccaaucaccagccacc

SEQ ID NO: 3974043 - RNA, 16 nt, Human herpesvirus 4 [Epstein-Barr virus]
aaaggaaacugcugac

SEQ ID NO: 3974044 - RNA, 15 nt, Human herpesvirus 4 [Epstein-Barr virus]
aaaggggagauguua

SEQ ID NO: 3974045 - RNA, 22 nt, Human herpesvirus 4 [Epstein-Barr virus]
aaagugguucaguggacaccca

SEQ ID NO: 3974046 - RNA, 19 nt, Human herpesvirus 4 [Epstein-Barr virus]
aaaguuguccugggcugcc

SEQ ID NO: 3974047 - RNA, 19 nt, Human herpesvirus 4 [Epstein-Barr virus]
aaaugaacccagggguggc

SEQ ID NO: 3974048 - RNA, 14 nt, Human herpesvirus 4 [Epstein-Barr virus]
aacacgaaugccca

SEQ ID NO: 3974049 - RNA, 19 nt, Human herpesvirus 4 [Epstein-Barr virus]
aacauuugaggaggcacac

SEQ ID NO: 3974050 - RNA, 16 nt, Human herpesvirus 4 [Epstein-Barr virus]
aaccucacugucauuc

SEQ ID NO: 3974051 - RNA, 16 nt, Human herpesvirus 4 [Epstein-Barr virus]
aaccugauucccccug

SEQ ID NO: 3974052 - RNA, 18 nt, Human herpesvirus 4 [Epstein-Barr virus]
aaccuuggacccugcugc

SEQ ID NO: 3974053 - RNA, 21 nt, Human herpesvirus 4 [Epstein-Barr virus]
aacuagcggcgagacccgagg

SEQ ID NO: 3974054 - RNA, 20 nt, Human herpesvirus 4 [Epstein-Barr virus]
aacugccuaucauguuucaa

SEQ ID NO: 3974055 - RNA, 14 nt, Human herpesvirus 4 [Epstein-Barr virus]
aacuggccaugcag

SEQ ID NO: 3974056 - RNA, 23 nt, Human herpesvirus 4 [Epstein-Barr virus]
aacuggggcugguggccugggag

SEQ ID NO: 3974057 - RNA, 20 nt, Human herpesvirus 4 [Epstein-Barr virus]
aacuugacuacaauguuccu

SEQ ID NO: 3974058 - RNA, 15 nt, Human herpesvirus 4 [Epstein-Barr virus]
aacuuggaggcugcu

SEQ ID NO: 3974059 - RNA, 24 nt, Human herpesvirus 4 [Epstein-Barr virus]
aacuuuacuuuuauuucaguucug

SEQ ID NO: 3974060 - RNA, 14 nt, Human herpesvirus 4 [Epstein-Barr virus]
aagaaucggguggc

SEQ ID NO: 3974061 - RNA, 12 nt, Human herpesvirus 4 [Epstein-Barr virus]
aagaccaaggcc

SEQ ID NO: 3974062 - RNA, 18 nt, Human herpesvirus 4 [Epstein-Barr virus]
aagagacuucacagagca

SEQ ID NO: 3974063 - RNA, 15 nt, Human herpesvirus 4 [Epstein-Barr virus]
aagaguucucuggug

SEQ ID NO: 3974064 - RNA, 15 nt, Human herpesvirus 4 [Epstein-Barr virus]
aagaugucaaacaug

SEQ ID NO: 3974065 - RNA, 22 nt, Human herpesvirus 4 [Epstein-Barr virus]
aagcaugggggaaaccugcgaa

SEQ ID NO: 3974066 - RNA, 20 nt, Human herpesvirus 4 [Epstein-Barr virus]
aagcccaagaagaagcccac

SEQ ID NO: 3974067 - RNA, 14 nt, Human herpesvirus 4 [Epstein-Barr virus]
aagccgggggagaa

SEQ ID NO: 3974068 - RNA, 17 nt, Human herpesvirus 4 [Epstein-Barr virus]
aagcgggugcaguaaca

SEQ ID NO: 3974069 - RNA, 22 nt, Human herpesvirus 4 [Epstein-Barr virus]
aagcuaccgaugauucuggcca

SEQ ID NO: 3974070 - RNA, 12 nt, Human herpesvirus 4 [Epstein-Barr virus]
aagcugaagaac

SEQ ID NO: 3974071 - RNA, 14 nt, Human herpesvirus 4 [Epstein-Barr virus]
aaggccgcugccag

SEQ ID NO: 3974072 - RNA, 17 nt, Human herpesvirus 4 [Epstein-Barr virus]
aagggacccacggugga

SEQ ID NO: 3974073 - RNA, 18 nt, Human herpesvirus 4 [Epstein-Barr virus]
aagggcccagggucacug

SEQ ID NO: 3974074 - RNA, 15 nt, Human herpesvirus 4 [Epstein-Barr virus]
aagguccugggccuc

SEQ ID NO: 3974075 - RNA, 18 nt, Human herpesvirus 4 [Epstein-Barr virus]
aaguaguuggagcucaag

SEQ ID NO: 3974076 - RNA, 23 nt, Human herpesvirus 4 [Epstein-Barr virus]
aagugauuaggagcagggcccag

SEQ ID NO: 3974077 - RNA, 15 nt, Human herpesvirus 4 [Epstein-Barr virus]
aauaaaguugaugau

SEQ ID NO: 3974078 - RNA, 17 nt, Human herpesvirus 4 [Epstein-Barr virus]
aauaaauguuacuucuu

SEQ ID NO: 3974079 - RNA, 21 nt, Human herpesvirus 4 [Epstein-Barr virus]
aaucagaccacccggacccgg

SEQ ID NO: 3974080 - RNA, 16 nt, Human herpesvirus 4 [Epstein-Barr virus]
aaucuaaugaagagcc

SEQ ID NO: 3974081 - RNA, 20 nt, Human herpesvirus 4 [Epstein-Barr virus]
aaugggcgcgggucccccua

SEQ ID NO: 3974082 - RNA, 23 nt, Human herpesvirus 4 [Epstein-Barr virus]
aauuauccaagaaaccccacgga

SEQ ID NO: 3974083 - RNA, 15 nt, Human herpesvirus 4 [Epstein-Barr virus]
aauucagccaccucc

SEQ ID NO: 3974084 - RNA, 18 nt, Human herpesvirus 4 [Epstein-Barr virus]
aauucagccaccuccccu

SEQ ID NO: 3974085 - RNA, 18 nt, Human herpesvirus 4 [Epstein-Barr virus]
aauucccucgaaucccua

SEQ ID NO: 3974086 - RNA, 18 nt, Human herpesvirus 4 [Epstein-Barr virus]
aauucuugcacccacccc

SEQ ID NO: 3974087 - RNA, 15 nt, Human herpesvirus 4 [Epstein-Barr virus]
aauugugcccaccag

SEQ ID NO: 3974088 - RNA, 18 nt, Human herpesvirus 4 [Epstein-Barr virus]
aauuguuaguuuaaacag

SEQ ID NO: 3974089 - RNA, 12 nt, Human herpesvirus 4 [Epstein-Barr virus]
aauuuaaccaaa

SEQ ID NO: 3974090 - RNA, 15 nt, Human herpesvirus 4 [Epstein-Barr virus]
acaacggcugugacu

SEQ ID NO: 3974091 - RNA, 17 nt, Human herpesvirus 4 [Epstein-Barr virus]
acaaggagugccucugg

SEQ ID NO: 3974092 - RNA, 17 nt, Human herpesvirus 4 [Epstein-Barr virus]
acaagggaagagggaaa

SEQ ID NO: 3974093 - RNA, 15 nt, Human herpesvirus 4 [Epstein-Barr virus]
acacagccugacucu

SEQ ID NO: 3974094 - RNA, 15 nt, Human herpesvirus 4 [Epstein-Barr virus]
acacagcucuggcag

SEQ ID NO: 3974095 - RNA, 19 nt, Human herpesvirus 4 [Epstein-Barr virus]
acacauuacggugcuggag

SEQ ID NO: 3974096 - RNA, 19 nt, Human herpesvirus 4 [Epstein-Barr virus]
acacgaggaucucuuaaau

SEQ ID NO: 3974097 - RNA, 19 nt, Human herpesvirus 4 [Epstein-Barr virus]
acacggaaaccacaacagc

SEQ ID NO: 3974098 - RNA, 20 nt, Human herpesvirus 4 [Epstein-Barr virus]
acacuccauuaauuccacua

SEQ ID NO: 3974099 - RNA, 21 nt, Human herpesvirus 4 [Epstein-Barr virus]
acacucuggggucucaggccu

SEQ ID NO: 3974100 - RNA, 23 nt, Human herpesvirus 4 [Epstein-Barr virus]
acacugccaagguugaagagcag

SEQ ID NO: 3974101 - RNA, 20 nt, Human herpesvirus 4 [Epstein-Barr virus]
acagcagcagugugugaaga

SEQ ID NO: 3974102 - RNA, 12 nt, Human herpesvirus 4 [Epstein-Barr virus]
acagcucuggca

SEQ ID NO: 3974103 - RNA, 21 nt, Human herpesvirus 4 [Epstein-Barr virus]
acaggaggcccgaccccaacu

SEQ ID NO: 3974104 - RNA, 21 nt, Human herpesvirus 4 [Epstein-Barr virus]
acagggguauguggugccaug

SEQ ID NO: 3974105 - RNA, 17 nt, Human herpesvirus 4 [Epstein-Barr virus]
acaggugggacaaaaug

SEQ ID NO: 3974106 - RNA, 17 nt, Human herpesvirus 4 [Epstein-Barr virus]
acagucccgagaccggc

SEQ ID NO: 3974107 - RNA, 16 nt, Human herpesvirus 4 [Epstein-Barr virus]
acagucuucaggucug

SEQ ID NO: 3974108 - RNA, 15 nt, Human herpesvirus 4 [Epstein-Barr virus]
acaucugcccggcua

SEQ ID NO: 3974109 - RNA, 22 nt, Human herpesvirus 4 [Epstein-Barr virus]
acaugggccacugcaggcugga

SEQ ID NO: 3974110 - RNA, 13 nt, Human herpesvirus 4 [Epstein-Barr virus]
acauggggcauua

SEQ ID NO: 3974111 - RNA, 15 nt, Human herpesvirus 4 [Epstein-Barr virus]
acauggugucuguaa

SEQ ID NO: 3974112 - RNA, 23 nt, Human herpesvirus 4 [Epstein-Barr virus]
accaacaagcagguauugcagcu

SEQ ID NO: 3974113 - RNA, 22 nt, Human herpesvirus 4 [Epstein-Barr virus]
accccacggggugcucccccug

SEQ ID NO: 3974114 - RNA, 14 nt, Human herpesvirus 4 [Epstein-Barr virus]
acccccaccacccc

SEQ ID NO: 3974115 - RNA, 16 nt, Human herpesvirus 4 [Epstein-Barr virus]
acccccaccaccucca

SEQ ID NO: 3974116 - RNA, 16 nt, Human herpesvirus 4 [Epstein-Barr virus]
accccccccaccacca

SEQ ID NO: 3974117 - RNA, 19 nt, Human herpesvirus 4 [Epstein-Barr virus]
acccccggcucucaggccu

SEQ ID NO: 3974118 - RNA, 18 nt, Human herpesvirus 4 [Epstein-Barr virus]
acccccguccagcaggcu

SEQ ID NO: 3974119 - RNA, 19 nt, Human herpesvirus 4 [Epstein-Barr virus]
acccccuggagccagcgcu

SEQ ID NO: 3974120 - RNA, 15 nt, Human herpesvirus 4 [Epstein-Barr virus]
acccggacccggacc

SEQ ID NO: 3974121 - RNA, 22 nt, Human herpesvirus 4 [Epstein-Barr virus]
acccggucgcaugguggcuucu

SEQ ID NO: 3974122 - RNA, 17 nt, Human herpesvirus 4 [Epstein-Barr virus]
acccucauugugcugaa

SEQ ID NO: 3974123 - RNA, 17 nt, Human herpesvirus 4 [Epstein-Barr virus]
acccucuugcacuccaa

SEQ ID NO: 3974124 - RNA, 17 nt, Human herpesvirus 4 [Epstein-Barr virus]
acccugcauggccaggc

SEQ ID NO: 3974125 - RNA, 19 nt, Human herpesvirus 4 [Epstein-Barr virus]
accgccuuaugaggaccca

SEQ ID NO: 3974126 - RNA, 21 nt, Human herpesvirus 4 [Epstein-Barr virus]
accgcgaccaagacucaauuu

SEQ ID NO: 3974127 - RNA, 12 nt, Human herpesvirus 4 [Epstein-Barr virus]
accggugggcuc

SEQ ID NO: 3974128 - RNA, 23 nt, Human herpesvirus 4 [Epstein-Barr virus]
accuacgcugcccuagagguuuu

SEQ ID NO: 3974129 - RNA, 15 nt, Human herpesvirus 4 [Epstein-Barr virus]
accucauccugcuca

SEQ ID NO: 3974130 - RNA, 16 nt, Human herpesvirus 4 [Epstein-Barr virus]
accucauccugcucau

SEQ ID NO: 3974131 - RNA, 22 nt, Human herpesvirus 4 [Epstein-Barr virus]
accucuguuccuucugcuccag

SEQ ID NO: 3974132 - RNA, 23 nt, Human herpesvirus 4 [Epstein-Barr virus]
accugacuggcagaaaggcuggc

SEQ ID NO: 3974133 - RNA, 16 nt, Human herpesvirus 4 [Epstein-Barr virus]
accugagccugagcca

SEQ ID NO: 3974134 - RNA, 17 nt, Human herpesvirus 4 [Epstein-Barr virus]
accugauucccccugcu

SEQ ID NO: 3974135 - RNA, 17 nt, Human herpesvirus 4 [Epstein-Barr virus]
accuucaccaccacccc

SEQ ID NO: 3974136 - RNA, 17 nt, Human herpesvirus 4 [Epstein-Barr virus]
accuuccuguguucucc

SEQ ID NO: 3974137 - RNA, 22 nt, Human herpesvirus 4 [Epstein-Barr virus]
accuuggccgguggcuguggac

SEQ ID NO: 3974138 - RNA, 23 nt, Human herpesvirus 4 [Epstein-Barr virus]
accuuuuaauucucuucuguuug

SEQ ID NO: 3974139 - RNA, 16 nt, Human herpesvirus 4 [Epstein-Barr virus]
acgacaucugggagug

SEQ ID NO: 3974140 - RNA, 21 nt, Human herpesvirus 4 [Epstein-Barr virus]
acgaggcccugcaagccaaga

SEQ ID NO: 3974141 - RNA, 14 nt, Human herpesvirus 4 [Epstein-Barr virus]
acgcagaggccugc

SEQ ID NO: 3974142 - RNA, 14 nt, Human herpesvirus 4 [Epstein-Barr virus]
acgccagagacaag

SEQ ID NO: 3974143 - RNA, 17 nt, Human herpesvirus 4 [Epstein-Barr virus]
acgccggaugccugccu

SEQ ID NO: 3974144 - RNA, 13 nt, Human herpesvirus 4 [Epstein-Barr virus]
acgccggccugcu

SEQ ID NO: 3974145 - RNA, 22 nt, Human herpesvirus 4 [Epstein-Barr virus]
acgccggccugcuggccgagcu

SEQ ID NO: 3974146 - RNA, 18 nt, Human herpesvirus 4 [Epstein-Barr virus]
acgccguggcccugagca

SEQ ID NO: 3974147 - RNA, 12 nt, Human herpesvirus 4 [Epstein-Barr virus]
acgcgauggcac

SEQ ID NO: 3974148 - RNA, 21 nt, Human herpesvirus 4 [Epstein-Barr virus]
acgcucccgggcaaacagggc

SEQ ID NO: 3974149 - RNA, 16 nt, Human herpesvirus 4 [Epstein-Barr virus]
acgcuuccacccccug

SEQ ID NO: 3974150 - RNA, 13 nt, Human herpesvirus 4 [Epstein-Barr virus]
acggggaaggagg

SEQ ID NO: 3974151 - RNA, 20 nt, Human herpesvirus 4 [Epstein-Barr virus]
acgugcaaggauggaagaga

SEQ ID NO: 3974152 - RNA, 16 nt, Human herpesvirus 4 [Epstein-Barr virus]
acguggcugcgguggu

SEQ ID NO: 3974153 - RNA, 14 nt, Human herpesvirus 4 [Epstein-Barr virus]
acuacuuguuucug

SEQ ID NO: 3974154 - RNA, 12 nt, Human herpesvirus 4 [Epstein-Barr virus]
acuauaccaaag

SEQ ID NO: 3974155 - RNA, 15 nt, Human herpesvirus 4 [Epstein-Barr virus]
acuccacagauggag

SEQ ID NO: 3974156 - RNA, 13 nt, Human herpesvirus 4 [Epstein-Barr virus]
acucccuccagaa

SEQ ID NO: 3974157 - RNA, 17 nt, Human herpesvirus 4 [Epstein-Barr virus]
acuccggcccacgccau

SEQ ID NO: 3974158 - RNA, 17 nt, Human herpesvirus 4 [Epstein-Barr virus]
acucgagagaggccucu

SEQ ID NO: 3974159 - RNA, 15 nt, Human herpesvirus 4 [Epstein-Barr virus]
acucgugggaaaaug

SEQ ID NO: 3974160 - RNA, 21 nt, Human herpesvirus 4 [Epstein-Barr virus]
acucuccgcuuuaagaccaag

SEQ ID NO: 3974161 - RNA, 14 nt, Human herpesvirus 4 [Epstein-Barr virus]
acucugaaaaugau

SEQ ID NO: 3974162 - RNA, 13 nt, Human herpesvirus 4 [Epstein-Barr virus]
acucuucauucuu

SEQ ID NO: 3974163 - RNA, 15 nt, Human herpesvirus 4 [Epstein-Barr virus]
acugaaaaaccagac

SEQ ID NO: 3974164 - RNA, 16 nt, Human herpesvirus 4 [Epstein-Barr virus]
acugaccacucaggaa

SEQ ID NO: 3974165 - RNA, 17 nt, Human herpesvirus 4 [Epstein-Barr virus]
acugacucucccuccau

SEQ ID NO: 3974166 - RNA, 16 nt, Human herpesvirus 4 [Epstein-Barr virus]
acugauugucgcuggc

SEQ ID NO: 3974167 - RNA, 17 nt, Human herpesvirus 4 [Epstein-Barr virus]
acugauuuugggcacac

SEQ ID NO: 3974168 - RNA, 19 nt, Human herpesvirus 4 [Epstein-Barr virus]
acugcagugggccucucug

SEQ ID NO: 3974169 - RNA, 17 nt, Human herpesvirus 4 [Epstein-Barr virus]
acugccuggggaaaaug

SEQ ID NO: 3974170 - RNA, 21 nt, Human herpesvirus 4 [Epstein-Barr virus]
acugggaugaacccuggggca

SEQ ID NO: 3974171 - RNA, 20 nt, Human herpesvirus 4 [Epstein-Barr virus]
acuggggugugaagggcagg

SEQ ID NO: 3974172 - RNA, 22 nt, Human herpesvirus 4 [Epstein-Barr virus]
acuggugcuuguggugugggag

SEQ ID NO: 3974173 - RNA, 21 nt, Human herpesvirus 4 [Epstein-Barr virus]
acugguuguaaccuaugccug

SEQ ID NO: 3974174 - RNA, 14 nt, Human herpesvirus 4 [Epstein-Barr virus]
acugucacugugca

SEQ ID NO: 3974175 - RNA, 19 nt, Human herpesvirus 4 [Epstein-Barr virus]
acugugguuuccaugacgc

SEQ ID NO: 3974176 - RNA, 13 nt, Human herpesvirus 4 [Epstein-Barr virus]
acuuccucugcuu

SEQ ID NO: 3974177 - RNA, 11 nt, Human herpesvirus 4 [Epstein-Barr virus]
acuuccuggga

SEQ ID NO: 3974178 - RNA, 16 nt, Human herpesvirus 4 [Epstein-Barr virus]
acuucuucucugcucg

SEQ ID NO: 3974179 - RNA, 15 nt, Human herpesvirus 4 [Epstein-Barr virus]
acuugaggugggcug

SEQ ID NO: 3974180 - RNA, 17 nt, Human herpesvirus 4 [Epstein-Barr virus]
agaaaagagagcggcug

SEQ ID NO: 3974181 - RNA, 22 nt, Human herpesvirus 4 [Epstein-Barr virus]
agaaaggcuggccguguucacu

SEQ ID NO: 3974182 - RNA, 21 nt, Human herpesvirus 4 [Epstein-Barr virus]
agaaggcuccggcggcagugg

SEQ ID NO: 3974183 - RNA, 18 nt, Human herpesvirus 4 [Epstein-Barr virus]
agaaggggcccuguacau

SEQ ID NO: 3974184 - RNA, 14 nt, Human herpesvirus 4 [Epstein-Barr virus]
agaagugcugggag

SEQ ID NO: 3974185 - RNA, 15 nt, Human herpesvirus 4 [Epstein-Barr virus]
agaaguguguccccc

SEQ ID NO: 3974186 - RNA, 14 nt, Human herpesvirus 4 [Epstein-Barr virus]
agaaguuaccuggu

SEQ ID NO: 3974187 - RNA, 14 nt, Human herpesvirus 4 [Epstein-Barr virus]
agacaccaggcgcc

SEQ ID NO: 3974188 - RNA, 12 nt, Human herpesvirus 4 [Epstein-Barr virus]
agaccccaaaaa

SEQ ID NO: 3974189 - RNA, 15 nt, Human herpesvirus 4 [Epstein-Barr virus]
agaccucugugucca

SEQ ID NO: 3974190 - RNA, 17 nt, Human herpesvirus 4 [Epstein-Barr virus]
agacuaugcauacacug

SEQ ID NO: 3974191 - RNA, 18 nt, Human herpesvirus 4 [Epstein-Barr virus]
agacucaucucaagggag

SEQ ID NO: 3974192 - RNA, 17 nt, Human herpesvirus 4 [Epstein-Barr virus]
cggagcccugcccuccu

SEQ ID NO: 3974193 - RNA, 11 nt, Human herpesvirus 4 [Epstein-Barr virus]
cggagggacag

SEQ ID NO: 3974194 - RNA, 17 nt, Human herpesvirus 4 [Epstein-Barr virus]
cggaggucgacccuccu

SEQ ID NO: 3974195 - RNA, 13 nt, Human herpesvirus 4 [Epstein-Barr virus]
cggagucuucaag

SEQ ID NO: 3974196 - RNA, 24 nt, Human herpesvirus 4 [Epstein-Barr virus]
cggaguugaugaaaggggccgagg

SEQ ID NO: 3974197 - RNA, 16 nt, Human herpesvirus 4 [Epstein-Barr virus]
cggcaccgccaggugg

SEQ ID NO: 3974198 - RNA, 14 nt, Human herpesvirus 4 [Epstein-Barr virus]
cggcaguggaccuc

SEQ ID NO: 3974199 - RNA, 21 nt, Human herpesvirus 4 [Epstein-Barr virus]
cggcccacgccauaccugcac

SEQ ID NO: 3974200 - RNA, 13 nt, Human herpesvirus 4 [Epstein-Barr virus]
cggcccagcccga

SEQ ID NO: 3974201 - RNA, 14 nt, Human herpesvirus 4 [Epstein-Barr virus]
cggccgaggccugc

SEQ ID NO: 3974202 - RNA, 17 nt, Human herpesvirus 4 [Epstein-Barr virus]
cggccuacgaggcccug

SEQ ID NO: 3974203 - RNA, 20 nt, Human herpesvirus 4 [Epstein-Barr virus]
cggccuccuggccagcaccc

SEQ ID NO: 3974204 - RNA, 19 nt, Human herpesvirus 4 [Epstein-Barr virus]
cggcgaugucggggcugcu

SEQ ID NO: 3974205 - RNA, 22 nt, Human herpesvirus 4 [Epstein-Barr virus]
cggcgaugucggggcugcuggc

SEQ ID NO: 3974206 - RNA, 13 nt, Human herpesvirus 4 [Epstein-Barr virus]
cggcgccucuugu

SEQ ID NO: 3974207 - RNA, 22 nt, Human herpesvirus 4 [Epstein-Barr virus]
cggcgcucgucguucaggaaca

SEQ ID NO: 3974208 - RNA, 13 nt, Human herpesvirus 4 [Epstein-Barr virus]
cggcguggagcug

SEQ ID NO: 3974209 - RNA, 21 nt, Human herpesvirus 4 [Epstein-Barr virus]
cggcuagccugacuaagggug

SEQ ID NO: 3974210 - RNA, 13 nt, Human herpesvirus 4 [Epstein-Barr virus]
cggcucaggauca

SEQ ID NO: 3974211 - RNA, 14 nt, Human herpesvirus 4 [Epstein-Barr virus]
cggcucgaccggga

SEQ ID NO: 3974212 - RNA, 14 nt, Human herpesvirus 4 [Epstein-Barr virus]
cggcucucaggccu

SEQ ID NO: 3974213 - RNA, 16 nt, Human herpesvirus 4 [Epstein-Barr virus]
cggcugcugagaccuc

SEQ ID NO: 3974214 - RNA, 16 nt, Human herpesvirus 4 [Epstein-Barr virus]
cgggaugacucaucuc

SEQ ID NO: 3974215 - RNA, 18 nt, Human herpesvirus 4 [Epstein-Barr virus]
cggggaaaagagagcuga

SEQ ID NO: 3974216 - RNA, 22 nt, Human herpesvirus 4 [Epstein-Barr virus]
cggggcgauaccuugggcauca

SEQ ID NO: 3974217 - RNA, 14 nt, Human herpesvirus 4 [Epstein-Barr virus]
cggggcggcggugg

SEQ ID NO: 3974218 - RNA, 15 nt, Human herpesvirus 4 [Epstein-Barr virus]
cgggggagagaaaga

SEQ ID NO: 3974219 - RNA, 16 nt, Human herpesvirus 4 [Epstein-Barr virus]
cgggggagagaaagag

SEQ ID NO: 3974220 - RNA, 16 nt, Human herpesvirus 4 [Epstein-Barr virus]
cggguagaccacuggc

SEQ ID NO: 3974221 - RNA, 19 nt, Human herpesvirus 4 [Epstein-Barr virus]
cggguaguagcacuggugg

SEQ ID NO: 3974222 - RNA, 16 nt, Human herpesvirus 4 [Epstein-Barr virus]
cgggucccccuagccc

SEQ ID NO: 3974223 - RNA, 14 nt, Human herpesvirus 4 [Epstein-Barr virus]
cggguccuagcaca

SEQ ID NO: 3974224 - RNA, 19 nt, Human herpesvirus 4 [Epstein-Barr virus]
cggguggaggagcuccgug

SEQ ID NO: 3974225 - RNA, 12 nt, Human herpesvirus 4 [Epstein-Barr virus]
cggugcugccag

SEQ ID NO: 3974226 - RNA, 15 nt, Human herpesvirus 4 [Epstein-Barr virus]
cgguggaacaggagc

SEQ ID NO: 3974227 - RNA, 17 nt, Human herpesvirus 4 [Epstein-Barr virus]
cgguggaacaggagcag

SEQ ID NO: 3974228 - RNA, 19 nt, Human herpesvirus 4 [Epstein-Barr virus]
cgguggaacaggagcagga

SEQ ID NO: 3974229 - RNA, 20 nt, Human herpesvirus 4 [Epstein-Barr virus]
cgguggaacaggagcaggag

SEQ ID NO: 3974230 - RNA, 15 nt, Human herpesvirus 4 [Epstein-Barr virus]
cggugucggcaccua

SEQ ID NO: 3974231 - RNA, 13 nt, Human herpesvirus 4 [Epstein-Barr virus]
cgguugagcugag

SEQ ID NO: 3974232 - RNA, 17 nt, Human herpesvirus 4 [Epstein-Barr virus]
cguaaucuguggugggc

SEQ ID NO: 3974233 - RNA, 15 nt, Human herpesvirus 4 [Epstein-Barr virus]
cgucacucagcuccg

SEQ ID NO: 3974234 - RNA, 23 nt, Human herpesvirus 4 [Epstein-Barr virus]
cguccaucuugagcgccguggcc

SEQ ID NO: 3974235 - RNA, 23 nt, Human herpesvirus 4 [Epstein-Barr virus]
cgucccagggccggaaccugagc

SEQ ID NO: 3974236 - RNA, 18 nt, Human herpesvirus 4 [Epstein-Barr virus]
cguccccgggagcgggag

SEQ ID NO: 3974237 - RNA, 22 nt, Human herpesvirus 4 [Epstein-Barr virus]
cgucgacgcuguuuugcagcug

SEQ ID NO: 3974238 - RNA, 21 nt, Human herpesvirus 4 [Epstein-Barr virus]
cgucguucaggaacagccucc

SEQ ID NO: 3974239 - RNA, 14 nt, Human herpesvirus 4 [Epstein-Barr virus]
cgugcaugcagcgc

SEQ ID NO: 3974240 - RNA, 16 nt, Human herpesvirus 4 [Epstein-Barr virus]
cgugccucgggccuca

SEQ ID NO: 3974241 - RNA, 16 nt, Human herpesvirus 4 [Epstein-Barr virus]
cgugggauggcggggc

SEQ ID NO: 3974242 - RNA, 18 nt, Human herpesvirus 4 [Epstein-Barr virus]
cgugugcacccggcugga

SEQ ID NO: 3974243 - RNA, 21 nt, Human herpesvirus 4 [Epstein-Barr virus]
cguguucccuaagcagcugag

SEQ ID NO: 3974244 - RNA, 18 nt, Human herpesvirus 4 [Epstein-Barr virus]
cguuuaaacgagagaaga

SEQ ID NO: 3974245 - RNA, 18 nt, Human herpesvirus 4 [Epstein-Barr virus]
cguuuacuaauggaauau

SEQ ID NO: 3974246 - RNA, 20 nt, Human herpesvirus 4 [Epstein-Barr virus]
cguuugaguccaaacagcua

SEQ ID NO: 3974247 - RNA, 22 nt, Human herpesvirus 4 [Epstein-Barr virus]
cguuugugauucccagaaagaa

SEQ ID NO: 3974248 - RNA, 11 nt, Human herpesvirus 4 [Epstein-Barr virus]
cuaagcagcug

SEQ ID NO: 3974249 - RNA, 23 nt, Human herpesvirus 4 [Epstein-Barr virus]
cuaaggcaguccaggggccacac

SEQ ID NO: 3974250 - RNA, 18 nt, Human herpesvirus 4 [Epstein-Barr virus]
cuaaggccgggagaggca

SEQ ID NO: 3974251 - RNA, 20 nt, Human herpesvirus 4 [Epstein-Barr virus]
cuaauggccguccucuggac

SEQ ID NO: 3974252 - RNA, 17 nt, Human herpesvirus 4 [Epstein-Barr virus]
cuacaccaccccaccau

SEQ ID NO: 3974253 - RNA, 18 nt, Human herpesvirus 4 [Epstein-Barr virus]
cuacaccccugagaaccc

SEQ ID NO: 3974254 - RNA, 15 nt, Human herpesvirus 4 [Epstein-Barr virus]
cuacccucuuaggga

SEQ ID NO: 3974255 - RNA, 14 nt, Human herpesvirus 4 [Epstein-Barr virus]
cuacgcagaggcca

SEQ ID NO: 3974256 - RNA, 15 nt, Human herpesvirus 4 [Epstein-Barr virus]
cuacgcugcccuaga

SEQ ID NO: 3974257 - RNA, 15 nt, Human herpesvirus 4 [Epstein-Barr virus]
cuacuucgccaugcu

SEQ ID NO: 3974258 - RNA, 22 nt, Human herpesvirus 4 [Epstein-Barr virus]
cuagauuuccuacaacucagcc

SEQ ID NO: 3974259 - RNA, 23 nt, Human herpesvirus 4 [Epstein-Barr virus]
cuaggcgggcgggcuugugcuug

SEQ ID NO: 3974260 - RNA, 19 nt, Human herpesvirus 4 [Epstein-Barr virus]
cuaggcugaaaagccacau

SEQ ID NO: 3974261 - RNA, 20 nt, Human herpesvirus 4 [Epstein-Barr virus]
cuauaaagacaagccugcgu

SEQ ID NO: 3974262 - RNA, 19 nt, Human herpesvirus 4 [Epstein-Barr virus]
gccacugcaggcuggacgu

SEQ ID NO: 3974263 - RNA, 14 nt, Human herpesvirus 4 [Epstein-Barr virus]
gccagacuccgcca

SEQ ID NO: 3974264 - RNA, 22 nt, Human herpesvirus 4 [Epstein-Barr virus]
gccagagcggcauccucaaggg

SEQ ID NO: 3974265 - RNA, 17 nt, Human herpesvirus 4 [Epstein-Barr virus]
gccaggcccgaccugcc

SEQ ID NO: 3974266 - RNA, 14 nt, Human herpesvirus 4 [Epstein-Barr virus]
gccaggcuggugac

SEQ ID NO: 3974267 - RNA, 18 nt, Human herpesvirus 4 [Epstein-Barr virus]
gccaggcugucgccagcc

SEQ ID NO: 3974268 - RNA, 17 nt, Human herpesvirus 4 [Epstein-Barr virus]
gccaugcacggcccuga

SEQ ID NO: 3974269 - RNA, 16 nt, Human herpesvirus 4 [Epstein-Barr virus]
gccaugcucagggcca

SEQ ID NO: 3974270 - RNA, 16 nt, Human herpesvirus 4 [Epstein-Barr virus]
gccaugcuucuuacac

SEQ ID NO: 3974271 - RNA, 22 nt, Human herpesvirus 4 [Epstein-Barr virus]
gcccaccagagggugagcccac

SEQ ID NO: 3974272 - RNA, 20 nt, Human herpesvirus 4 [Epstein-Barr virus]
gcccaccagccagcgacuga

SEQ ID NO: 3974273 - RNA, 11 nt, Human herpesvirus 4 [Epstein-Barr virus]
gcccacccacu

SEQ ID NO: 3974274 - RNA, 18 nt, Human herpesvirus 4 [Epstein-Barr virus]
gcccagaggcgcugugga

SEQ ID NO: 3974275 - RNA, 17 nt, Human herpesvirus 4 [Epstein-Barr virus]
gcccauggaaugcucag

SEQ ID NO: 3974276 - RNA, 12 nt, Human herpesvirus 4 [Epstein-Barr virus]
gccccagccccu

SEQ ID NO: 3974277 - RNA, 16 nt, Human herpesvirus 4 [Epstein-Barr virus]
gcccccaccaccccca

SEQ ID NO: 3974278 - RNA, 15 nt, Human herpesvirus 4 [Epstein-Barr virus]
gcccccgccagcgcc

SEQ ID NO: 3974279 - RNA, 15 nt, Human herpesvirus 4 [Epstein-Barr virus]
gcccccggagcccug

SEQ ID NO: 3974280 - RNA, 20 nt, Human herpesvirus 4 [Epstein-Barr virus]
gccccgaaagcggcccagca

SEQ ID NO: 3974281 - RNA, 14 nt, Human herpesvirus 4 [Epstein-Barr virus]
gccccggucccccc

SEQ ID NO: 3974282 - RNA, 17 nt, Human herpesvirus 4 [Epstein-Barr virus]
gccccgguccccccaga

SEQ ID NO: 3974283 - RNA, 19 nt, Human herpesvirus 4 [Epstein-Barr virus]
gccccuaggccugccacgu

SEQ ID NO: 3974284 - RNA, 11 nt, Human herpesvirus 4 [Epstein-Barr virus]
gccccucagcc

SEQ ID NO: 3974285 - RNA, 19 nt, Human herpesvirus 4 [Epstein-Barr virus]
gcccucgguggugggcugc

SEQ ID NO: 3974286 - RNA, 21 nt, Human herpesvirus 4 [Epstein-Barr virus]
gcccucgguggugggcugcug

SEQ ID NO: 3974287 - RNA, 23 nt, Human herpesvirus 4 [Epstein-Barr virus]
gcccugcccuccuccacccagca

SEQ ID NO: 3974288 - RNA, 15 nt, Human herpesvirus 4 [Epstein-Barr virus]
gcccuggaggccuca

SEQ ID NO: 3974289 - RNA, 18 nt, Human herpesvirus 4 [Epstein-Barr virus]
gcccuggaggccucaggc

SEQ ID NO: 3974290 - RNA, 14 nt, Human herpesvirus 4 [Epstein-Barr virus]
gccgagccugucga

SEQ ID NO: 3974291 - RNA, 20 nt, Human herpesvirus 4 [Epstein-Barr virus]
gccgcagaagagccgcuccg

SEQ ID NO: 3974292 - RNA, 14 nt, Human herpesvirus 4 [Epstein-Barr virus]
gccgccagcagccc

SEQ ID NO: 3974293 - RNA, 16 nt, Human herpesvirus 4 [Epstein-Barr virus]
gccgcgcugcucgccc

SEQ ID NO: 3974294 - RNA, 18 nt, Human herpesvirus 4 [Epstein-Barr virus]
gccgcuaguugguccagg

SEQ ID NO: 3974295 - RNA, 13 nt, Human herpesvirus 4 [Epstein-Barr virus]
gccgcugccaggc

SEQ ID NO: 3974296 - RNA, 21 nt, Human herpesvirus 4 [Epstein-Barr virus]
cccauaaaaauaagugcaugg

SEQ ID NO: 3974297 - RNA, 17 nt, Human herpesvirus 4 [Epstein-Barr virus]
cccauguaagccugccu

SEQ ID NO: 3974298 - RNA, 22 nt, Human herpesvirus 4 [Epstein-Barr virus]
ccccaaaaguagaggcucaggc

SEQ ID NO: 3974299 - RNA, 12 nt, Human herpesvirus 4 [Epstein-Barr virus]
ccccagccacag

SEQ ID NO: 3974300 - RNA, 16 nt, Human herpesvirus 4 [Epstein-Barr virus]
ccccagcccgccagcc

SEQ ID NO: 3974301 - RNA, 20 nt, Human herpesvirus 4 [Epstein-Barr virus]
cccccagaccugugugcugu

SEQ ID NO: 3974302 - RNA, 17 nt, Human herpesvirus 4 [Epstein-Barr virus]
ccccccagaagccccca

SEQ ID NO: 3974303 - RNA, 12 nt, Human herpesvirus 4 [Epstein-Barr virus]
ccccccagccug

SEQ ID NO: 3974304 - RNA, 18 nt, Human herpesvirus 4 [Epstein-Barr virus]
ccccgaaagcggcccagc

SEQ ID NO: 3974305 - RNA, 22 nt, Human herpesvirus 4 [Epstein-Barr virus]
ccccuggacacuuauguuucaa

SEQ ID NO: 3974306 - RNA, 13 nt, Human herpesvirus 4 [Epstein-Barr virus]
cccgacaauaaag

SEQ ID NO: 3974307 - RNA, 17 nt, Human herpesvirus 4 [Epstein-Barr virus]
cccgccagcgccuccuc

SEQ ID NO: 3974308 - RNA, 17 nt, Human herpesvirus 4 [Epstein-Barr virus]
cccgccuagagcauuug

SEQ ID NO: 3974309 - RNA, 20 nt, Human herpesvirus 4 [Epstein-Barr virus]
cccgcgccgcaagcaugggc

SEQ ID NO: 3974310 - RNA, 22 nt, Human herpesvirus 4 [Epstein-Barr virus]
cccgcuuuugcgaccccucuga

SEQ ID NO: 3974311 - RNA, 13 nt, Human herpesvirus 4 [Epstein-Barr virus]
cccggcggcugcu

SEQ ID NO: 3974312 - RNA, 23 nt, Human herpesvirus 4 [Epstein-Barr virus]
cccgggggaggagaagagaggcu

SEQ ID NO: 3974313 - RNA, 16 nt, Human herpesvirus 4 [Epstein-Barr virus]
cccggggguggcagcc

SEQ ID NO: 3974314 - RNA, 20 nt, Human herpesvirus 4 [Epstein-Barr virus]
cccgggugggcugguugggg

SEQ ID NO: 3974315 - RNA, 19 nt, Human herpesvirus 4 [Epstein-Barr virus]
cccgucccggguacaaguc

SEQ ID NO: 3974316 - RNA, 12 nt, Human herpesvirus 4 [Epstein-Barr virus]
cccgucgggcca

SEQ ID NO: 3974317 - RNA, 21 nt, Human herpesvirus 4 [Epstein-Barr virus]
cccuagagguuuugcuaggga

SEQ ID NO: 3974318 - RNA, 18 nt, Human herpesvirus 4 [Epstein-Barr virus]
cccuccauaggccucugc

SEQ ID NO: 3974319 - RNA, 20 nt, Human herpesvirus 4 [Epstein-Barr virus]
cccuccauuccacccacuga

SEQ ID NO: 3974320 - RNA, 15 nt, Human herpesvirus 4 [Epstein-Barr virus]
cccucgguggugggc

SEQ ID NO: 3974321 - RNA, 19 nt, Human herpesvirus 4 [Epstein-Barr virus]
cccucgguggugggcugcu

SEQ ID NO: 3974322 - RNA, 12 nt, Human herpesvirus 4 [Epstein-Barr virus]
cccucuccagca

SEQ ID NO: 3974323 - RNA, 21 nt, Human herpesvirus 4 [Epstein-Barr virus]
cccugcagaguaauugcagug

SEQ ID NO: 3974324 - RNA, 13 nt, Human herpesvirus 4 [Epstein-Barr virus]
cccuggccaccua

SEQ ID NO: 3974325 - RNA, 21 nt, Human herpesvirus 4 [Epstein-Barr virus]
ccgaaagcggcccagcagauc

SEQ ID NO: 3974326 - RNA, 11 nt, Human herpesvirus 4 [Epstein-Barr virus]
ccgaacauggg

SEQ ID NO: 3974327 - RNA, 20 nt, Human herpesvirus 4 [Epstein-Barr virus]
ccgacaucgccgccccaggg

SEQ ID NO: 3974328 - RNA, 19 nt, Human herpesvirus 4 [Epstein-Barr virus]
ccgacgccguccucgaagg

SEQ ID NO: 3974329 - RNA, 23 nt, Human herpesvirus 4 [Epstein-Barr virus]
ccgacuuauggcuagauuuccua

SEQ ID NO: 3974330 - RNA, 22 nt, Human herpesvirus 4 [Epstein-Barr virus]
ccgcaccagcuaacaggacaug

SEQ ID NO: 3974331 - RNA, 15 nt, Human herpesvirus 4 [Epstein-Barr virus]
ccgcaccagggccag

SEQ ID NO: 3974332 - RNA, 21 nt, Human herpesvirus 4 [Epstein-Barr virus]
ccgcagaagagccgcuccgug

SEQ ID NO: 3974333 - RNA, 19 nt, Human herpesvirus 4 [Epstein-Barr virus]
ccgcagccgcugaagccag

SEQ ID NO: 3974334 - RNA, 20 nt, Human herpesvirus 4 [Epstein-Barr virus]
ccgcagccgcugaagccagg

SEQ ID NO: 3974335 - RNA, 10 nt, Human herpesvirus 4 [Epstein-Barr virus]
ccgcagcugg

SEQ ID NO: 3974336 - RNA, 18 nt, Human herpesvirus 4 [Epstein-Barr virus]
ccgcccccaccaccccca

SEQ ID NO: 3974337 - RNA, 14 nt, Human herpesvirus 4 [Epstein-Barr virus]
ccgccgccagcagc

SEQ ID NO: 3974338 - RNA, 14 nt, Human herpesvirus 4 [Epstein-Barr virus]
ccgcgccgcaagca

SEQ ID NO: 3974339 - RNA, 16 nt, Human herpesvirus 4 [Epstein-Barr virus]
ccgcgcucggccuaga

SEQ ID NO: 3974340 - RNA, 12 nt, Human herpesvirus 4 [Epstein-Barr virus]
ccgcugggccag

SEQ ID NO: 3974341 - RNA, 14 nt, Human herpesvirus 4 [Epstein-Barr virus]
ccggacgcagaggc

SEQ ID NO: 3974342 - RNA, 16 nt, Human herpesvirus 4 [Epstein-Barr virus]
ccggagacugaggccu

SEQ ID NO: 3974343 - RNA, 21 nt, Human herpesvirus 4 [Epstein-Barr virus]
ccggagacugaggccuuuguc

SEQ ID NO: 3974344 - RNA, 21 nt, Human herpesvirus 4 [Epstein-Barr virus]
ccggaucgaaggagagcugga

SEQ ID NO: 3974345 - RNA, 14 nt, Human herpesvirus 4 [Epstein-Barr virus]
ccggccaggcagag

SEQ ID NO: 3974346 - RNA, 15 nt, Human herpesvirus 4 [Epstein-Barr virus]
ccggccgaggccugc

SEQ ID NO: 3974347 - RNA, 13 nt, Human herpesvirus 4 [Epstein-Barr virus]
ccgggagccacgg

SEQ ID NO: 3974348 - RNA, 12 nt, Human herpesvirus 4 [Epstein-Barr virus]
ccgggggcggga

SEQ ID NO: 3974349 - RNA, 15 nt, Human herpesvirus 4 [Epstein-Barr virus]
ccggguacaaguccc

SEQ ID NO: 3974350 - RNA, 19 nt, Human herpesvirus 4 [Epstein-Barr virus]
ccgguccccccagaagccc

SEQ ID NO: 3974351 - RNA, 19 nt, Human herpesvirus 4 [Epstein-Barr virus]
ccggugucggcaccuagcc

SEQ ID NO: 3974352 - RNA, 17 nt, Human herpesvirus 4 [Epstein-Barr virus]
ccgucaaggccucggag

SEQ ID NO: 3974353 - RNA, 17 nt, Human herpesvirus 4 [Epstein-Barr virus]
ccgugcauggcagcaga

SEQ ID NO: 3974354 - RNA, 16 nt, Human herpesvirus 4 [Epstein-Barr virus]
ccguggccaggcccga

SEQ ID NO: 3974355 - RNA, 13 nt, Human herpesvirus 4 [Epstein-Barr virus]
ccgugucuccuga

SEQ ID NO: 3974356 - RNA, 20 nt, Human herpesvirus 4 [Epstein-Barr virus]
ccguugguggucagcagcag

SEQ ID NO: 3974357 - RNA, 14 nt, Human herpesvirus 4 [Epstein-Barr virus]
ccuaagcagcugag

SEQ ID NO: 3974358 - RNA, 16 nt, Human herpesvirus 4 [Epstein-Barr virus]
ccuacgaggcccuggc

SEQ ID NO: 3974359 - RNA, 23 nt, Human herpesvirus 4 [Epstein-Barr virus]
ccuagaaacugugccauggugcc

SEQ ID NO: 3974360 - RNA, 20 nt, Human herpesvirus 4 [Epstein-Barr virus]
ccuagagguuuugcuaggga

SEQ ID NO: 3974361 - RNA, 18 nt, Human herpesvirus 4 [Epstein-Barr virus]
ccuagauauaccccuccu

SEQ ID NO: 3974362 - RNA, 18 nt, Human herpesvirus 4 [Epstein-Barr virus]
ccuauagauccugggccc

SEQ ID NO: 3974363 - RNA, 21 nt, Human herpesvirus 4 [Epstein-Barr virus]
ccuaucacgggggucaagcaa

SEQ ID NO: 3974364 - RNA, 18 nt, Human herpesvirus 4 [Epstein-Barr virus]
ccucauucccccaugaga

SEQ ID NO: 3974365 - RNA, 14 nt, Human herpesvirus 4 [Epstein-Barr virus]
ccucauuggcuuug

SEQ ID NO: 3974366 - RNA, 20 nt, Human herpesvirus 4 [Epstein-Barr virus]
ccuccaacaggugcccgagc

SEQ ID NO: 3974367 - RNA, 22 nt, Human herpesvirus 4 [Epstein-Barr virus]
ccuccaagcggcacagauuaga

SEQ ID NO: 3974368 - RNA, 23 nt, Human herpesvirus 4 [Epstein-Barr virus]
ccuccaaucaccagccaccuucc

SEQ ID NO: 3974369 - RNA, 17 nt, Human herpesvirus 4 [Epstein-Barr virus]
ccuccauuccacccacu

SEQ ID NO: 3974370 - RNA, 21 nt, Human herpesvirus 4 [Epstein-Barr virus]
ccuccgcauccuaggcacggc

SEQ ID NO: 3974371 - RNA, 21 nt, Human herpesvirus 4 [Epstein-Barr virus]
ccuccggccgccccgggcccg

SEQ ID NO: 3974372 - RNA, 15 nt, Human herpesvirus 4 [Epstein-Barr virus]
ccuccuacacacauc

SEQ ID NO: 3974373 - RNA, 13 nt, Human herpesvirus 4 [Epstein-Barr virus]
ccuccucaccacu

SEQ ID NO: 3974374 - RNA, 16 nt, Human herpesvirus 4 [Epstein-Barr virus]
ccuccuggccagcacc

SEQ ID NO: 3974375 - RNA, 17 nt, Human herpesvirus 4 [Epstein-Barr virus]
ccuccuggccagcaccc

SEQ ID NO: 3974376 - RNA, 18 nt, Human herpesvirus 4 [Epstein-Barr virus]
ccucgaguccggggagaa

SEQ ID NO: 3974377 - RNA, 20 nt, Human herpesvirus 4 [Epstein-Barr virus]
ccucguguuucacggccuca

SEQ ID NO: 3974378 - RNA, 19 nt, Human herpesvirus 4 [Epstein-Barr virus]
ccucugccacaaggccagc

SEQ ID NO: 3974379 - RNA, 19 nt, Human herpesvirus 4 [Epstein-Barr virus]
ccugaagcgaagcagcucc

SEQ ID NO: 3974380 - RNA, 21 nt, Human herpesvirus 4 [Epstein-Barr virus]
ccugaccgaauggggcagugg

SEQ ID NO: 3974381 - RNA, 15 nt, Human herpesvirus 4 [Epstein-Barr virus]
ccugaggggcggugg

SEQ ID NO: 3974382 - RNA, 22 nt, Human herpesvirus 4 [Epstein-Barr virus]
ccugaguccaacauuaaagccu

SEQ ID NO: 3974383 - RNA, 16 nt, Human herpesvirus 4 [Epstein-Barr virus]
ccuggcggcccagccc

SEQ ID NO: 3974384 - RNA, 12 nt, Human herpesvirus 4 [Epstein-Barr virus]
ccuggcucgccu

SEQ ID NO: 3974385 - RNA, 16 nt, Human herpesvirus 4 [Epstein-Barr virus]
ccuggcuuccacucac

SEQ ID NO: 3974386 - RNA, 16 nt, Human herpesvirus 4 [Epstein-Barr virus]
ccugggaggugcugag

SEQ ID NO: 3974387 - RNA, 23 nt, Human herpesvirus 4 [Epstein-Barr virus]
ccugguaugcagaaggggcccug

SEQ ID NO: 3974388 - RNA, 14 nt, Human herpesvirus 4 [Epstein-Barr virus]
ccuggugccagacu

SEQ ID NO: 3974389 - RNA, 17 nt, Human herpesvirus 4 [Epstein-Barr virus]
ccugucggcucucuuug

SEQ ID NO: 3974390 - RNA, 21 nt, Human herpesvirus 4 [Epstein-Barr virus]
ccugugcagggacgaggacga

SEQ ID NO: 3974391 - RNA, 24 nt, Human herpesvirus 4 [Epstein-Barr virus]
ccuguuccggccucgguggcagug

SEQ ID NO: 3974392 - RNA, 23 nt, Human herpesvirus 4 [Epstein-Barr virus]
ccuuaaauucaccuaagaauggg

SEQ ID NO: 3974393 - RNA, 14 nt, Human herpesvirus 4 [Epstein-Barr virus]
ccuucuccucagcc

SEQ ID NO: 3974394 - RNA, 16 nt, Human herpesvirus 4 [Epstein-Barr virus]
ccuucuccucagccuc

SEQ ID NO: 3974395 - RNA, 21 nt, Human herpesvirus 4 [Epstein-Barr virus]
ccuucucugauggccuggaga

SEQ ID NO: 3974396 - RNA, 13 nt, Human herpesvirus 4 [Epstein-Barr virus]
ccuucugcugcug

SEQ ID NO: 3974397 - RNA, 20 nt, Human herpesvirus 4 [Epstein-Barr virus]
ccuucugcugcugcugguca

SEQ ID NO: 3974398 - RNA, 14 nt, Human herpesvirus 4 [Epstein-Barr virus]
ccuucuuccuagcc

SEQ ID NO: 3974399 - RNA, 18 nt, Human herpesvirus 4 [Epstein-Barr virus]
ccuugcccucuccagcaa

SEQ ID NO: 3974400 - RNA, 20 nt, Human herpesvirus 4 [Epstein-Barr virus]
ccuugcccucuccagcaacc

SEQ ID NO: 3974401 - RNA, 18 nt, Human herpesvirus 4 [Epstein-Barr virus]
ccuugcguggugcugucc

SEQ ID NO: 3974402 - RNA, 17 nt, Human herpesvirus 4 [Epstein-Barr virus]
ccuugcucgcagcugga

SEQ ID NO: 3974403 - RNA, 14 nt, Human herpesvirus 4 [Epstein-Barr virus]
ccuuggcaugacgu

SEQ ID NO: 3974404 - RNA, 16 nt, Human herpesvirus 4 [Epstein-Barr virus]
ccuugggggccuggac

SEQ ID NO: 3974405 - RNA, 15 nt, Human herpesvirus 4 [Epstein-Barr virus]
ccuuuacccagcccu

SEQ ID NO: 3974406 - RNA, 22 nt, Human herpesvirus 4 [Epstein-Barr virus]
ccuuucccccacccuggaacaa

SEQ ID NO: 3974407 - RNA, 16 nt, Human herpesvirus 4 [Epstein-Barr virus]
ccuuuccuaagaccua

SEQ ID NO: 3974408 - RNA, 11 nt, Human herpesvirus 4 [Epstein-Barr virus]
ccuuuugcaac

SEQ ID NO: 3974409 - RNA, 16 nt, Human herpesvirus 4 [Epstein-Barr virus]
cgaaaguaggcggugg

SEQ ID NO: 3974410 - RNA, 15 nt, Human herpesvirus 4 [Epstein-Barr virus]
cgaagcggucucaga

SEQ ID NO: 3974411 - RNA, 16 nt, Human herpesvirus 4 [Epstein-Barr virus]
cgaaucugacauuucu

SEQ ID NO: 3974412 - RNA, 20 nt, Human herpesvirus 4 [Epstein-Barr virus]
cgaaucugacauuucucaua

SEQ ID NO: 3974413 - RNA, 14 nt, Human herpesvirus 4 [Epstein-Barr virus]
cgacggccucggcg

SEQ ID NO: 3974414 - RNA, 13 nt, Human herpesvirus 4 [Epstein-Barr virus]
cgacuccaggccc

SEQ ID NO: 3974415 - RNA, 19 nt, Human herpesvirus 4 [Epstein-Barr virus]
cgacuuuguuuagggacag

SEQ ID NO: 3974416 - RNA, 12 nt, Human herpesvirus 4 [Epstein-Barr virus]
cgagaaggagga

SEQ ID NO: 3974417 - RNA, 21 nt, Human herpesvirus 4 [Epstein-Barr virus]
cgagaggaugaggcugaugau

SEQ ID NO: 3974418 - RNA, 22 nt, Human herpesvirus 4 [Epstein-Barr virus]
cgagaggaugauccuguacaaa

SEQ ID NO: 3974419 - RNA, 13 nt, Human herpesvirus 4 [Epstein-Barr virus]
cgagauggcccag

SEQ ID NO: 3974420 - RNA, 16 nt, Human herpesvirus 4 [Epstein-Barr virus]
cgagcagaaggccaug

SEQ ID NO: 3974421 - RNA, 17 nt, Human herpesvirus 4 [Epstein-Barr virus]
cgagcagaaggccaugg

SEQ ID NO: 3974422 - RNA, 20 nt, Human herpesvirus 4 [Epstein-Barr virus]
cgagcagaaggccauggaga

SEQ ID NO: 3974423 - RNA, 17 nt, Human herpesvirus 4 [Epstein-Barr virus]
cgagcuccgugggccca

SEQ ID NO: 3974424 - RNA, 17 nt, Human herpesvirus 4 [Epstein-Barr virus]
cgaggcccugcaagcca

SEQ ID NO: 3974425 - RNA, 21 nt, Human herpesvirus 4 [Epstein-Barr virus]
cgaggcugagaacugacgcuc

SEQ ID NO: 3974426 - RNA, 19 nt, Human herpesvirus 4 [Epstein-Barr virus]
cgaggcugagggggcgguc

SEQ ID NO: 3974427 - RNA, 16 nt, Human herpesvirus 4 [Epstein-Barr virus]
cgaggucuccccugac

SEQ ID NO: 3974428 - RNA, 13 nt, Human herpesvirus 4 [Epstein-Barr virus]
cgaguccaagcug

SEQ ID NO: 3974429 - RNA, 14 nt, Human herpesvirus 4 [Epstein-Barr virus]
cgauaccgggucag

SEQ ID NO: 3974430 - RNA, 13 nt, Human herpesvirus 4 [Epstein-Barr virus]
cgauagcccaggc

SEQ ID NO: 3974431 - RNA, 19 nt, Human herpesvirus 4 [Epstein-Barr virus]
cgaucuggacccuauggag

SEQ ID NO: 3974432 - RNA, 21 nt, Human herpesvirus 4 [Epstein-Barr virus]
cgauggucgucaucuggcucu

SEQ ID NO: 3974433 - RNA, 17 nt, Human herpesvirus 4 [Epstein-Barr virus]
cgauguacccccgggga

SEQ ID NO: 3974434 - RNA, 17 nt, Human herpesvirus 4 [Epstein-Barr virus]
cgcaacgccggccugcu

SEQ ID NO: 3974435 - RNA, 19 nt, Human herpesvirus 4 [Epstein-Barr virus]
cgcagaccccagagcagcc

SEQ ID NO: 3974436 - RNA, 13 nt, Human herpesvirus 4 [Epstein-Barr virus]
cgcagaggccauc

SEQ ID NO: 3974437 - RNA, 18 nt, Human herpesvirus 4 [Epstein-Barr virus]
cgcagcccagcccuccgc

SEQ ID NO: 3974438 - RNA, 23 nt, Human herpesvirus 4 [Epstein-Barr virus]
cgcaggccccccgcaccagggcc

SEQ ID NO: 3974439 - RNA, 18 nt, Human herpesvirus 4 [Epstein-Barr virus]
cgcagguggcugcugcca

SEQ ID NO: 3974440 - RNA, 13 nt, Human herpesvirus 4 [Epstein-Barr virus]
cgcauccuaggca

SEQ ID NO: 3974441 - RNA, 18 nt, Human herpesvirus 4 [Epstein-Barr virus]
cgccaccacggugcagcc

SEQ ID NO: 3974442 - RNA, 21 nt, Human herpesvirus 4 [Epstein-Barr virus]
cgccacccucccccugccccg

SEQ ID NO: 3974443 - RNA, 16 nt, Human herpesvirus 4 [Epstein-Barr virus]
cgccagcagccccgac

SEQ ID NO: 3974444 - RNA, 13 nt, Human herpesvirus 4 [Epstein-Barr virus]
cgccagcgccucc

SEQ ID NO: 3974445 - RNA, 23 nt, Human herpesvirus 4 [Epstein-Barr virus]
cgccagggcguacaccuggcugu

SEQ ID NO: 3974446 - RNA, 20 nt, Human herpesvirus 4 [Epstein-Barr virus]
cgcccagggacauccccaga

SEQ ID NO: 3974447 - RNA, 12 nt, Human herpesvirus 4 [Epstein-Barr virus]
cgcccccucugc

SEQ ID NO: 3974448 - RNA, 22 nt, Human herpesvirus 4 [Epstein-Barr virus]
cgccccugcguugaacccaccc

SEQ ID NO: 3974449 - RNA, 19 nt, Human herpesvirus 4 [Epstein-Barr virus]
cgcccucacgggccaucuc

SEQ ID NO: 3974450 - RNA, 14 nt, Human herpesvirus 4 [Epstein-Barr virus]
cgcccuccucuggg

SEQ ID NO: 3974451 - RNA, 14 nt, Human herpesvirus 4 [Epstein-Barr virus]
cgcccugagcugga

SEQ ID NO: 3974452 - RNA, 12 nt, Human herpesvirus 4 [Epstein-Barr virus]
cgcccugucacc

SEQ ID NO: 3974453 - RNA, 21 nt, Human herpesvirus 4 [Epstein-Barr virus]
cgcccugucccuggagcuggu

SEQ ID NO: 3974454 - RNA, 13 nt, Human herpesvirus 4 [Epstein-Barr virus]
cgccgccagcagc

SEQ ID NO: 3974455 - RNA, 14 nt, Human herpesvirus 4 [Epstein-Barr virus]
cgccgccagcaugg

SEQ ID NO: 3974456 - RNA, 18 nt, Human herpesvirus 4 [Epstein-Barr virus]
cgccgccagcauggcagc

SEQ ID NO: 3974457 - RNA, 14 nt, Human herpesvirus 4 [Epstein-Barr virus]
cgccgccgccagca

SEQ ID NO: 3974458 - RNA, 15 nt, Human herpesvirus 4 [Epstein-Barr virus]
cgccucauccuggcc

SEQ ID NO: 3974459 - RNA, 13 nt, Human herpesvirus 4 [Epstein-Barr virus]
cgccugagcugcc

SEQ ID NO: 3974460 - RNA, 17 nt, Human herpesvirus 4 [Epstein-Barr virus]
cgccuuaugaggaccca

SEQ ID NO: 3974461 - RNA, 22 nt, Human herpesvirus 4 [Epstein-Barr virus]
cgcgccgcaagcaugggcgagg

SEQ ID NO: 3974462 - RNA, 21 nt, Human herpesvirus 4 [Epstein-Barr virus]
cgcggugguggcccucggugg

SEQ ID NO: 3974463 - RNA, 13 nt, Human herpesvirus 4 [Epstein-Barr virus]
cgcucagagcugg

SEQ ID NO: 3974464 - RNA, 14 nt, Human herpesvirus 4 [Epstein-Barr virus]
cgcucccgggcaaa

SEQ ID NO: 3974465 - RNA, 20 nt, Human herpesvirus 4 [Epstein-Barr virus]
cgcuccgcgcucggccuaga

SEQ ID NO: 3974466 - RNA, 15 nt, Human herpesvirus 4 [Epstein-Barr virus]
cgcuccguccuuguc

SEQ ID NO: 3974467 - RNA, 14 nt, Human herpesvirus 4 [Epstein-Barr virus]
cgcugaagccaggc

SEQ ID NO: 3974468 - RNA, 18 nt, Human herpesvirus 4 [Epstein-Barr virus]
cggacaugucacgugucc

SEQ ID NO: 3974469 - RNA, 11 nt, Human herpesvirus 4 [Epstein-Barr virus]
cggagaggcgg

SEQ ID NO: 3974470 - RNA, 20 nt, Human herpesvirus 4 [Epstein-Barr virus]
cggagaucaucccacuggga

SEQ ID NO: 3974471 - RNA, 17 nt, Human herpesvirus 4 [Epstein-Barr virus]
caucagccgcugcgcaa

SEQ ID NO: 3974472 - RNA, 21 nt, Human herpesvirus 4 [Epstein-Barr virus]
caucaggcgaaggcggagaag

SEQ ID NO: 3974473 - RNA, 16 nt, Human herpesvirus 4 [Epstein-Barr virus]
caucauuagcccagcc

SEQ ID NO: 3974474 - RNA, 14 nt, Human herpesvirus 4 [Epstein-Barr virus]
cagggacuggcggc

SEQ ID NO: 3974475 - RNA, 15 nt, Human herpesvirus 4 [Epstein-Barr virus]
cagggcaaagccaca

SEQ ID NO: 3974476 - RNA, 15 nt, Human herpesvirus 4 [Epstein-Barr virus]
cagggguguaguggg

SEQ ID NO: 3974477 - RNA, 20 nt, Human herpesvirus 4 [Epstein-Barr virus]
cagggugaccuggcucaggu

SEQ ID NO: 3974478 - RNA, 23 nt, Human herpesvirus 4 [Epstein-Barr virus]
cagggugcacagacuagcgagga

SEQ ID NO: 3974479 - RNA, 22 nt, Human herpesvirus 4 [Epstein-Barr virus]
caggguggcuacuugcucaggu

SEQ ID NO: 3974480 - RNA, 14 nt, Human herpesvirus 4 [Epstein-Barr virus]
caggucuugccgug

SEQ ID NO: 3974481 - RNA, 23 nt, Human herpesvirus 4 [Epstein-Barr virus]
caggugcccgagccccgccuggc

SEQ ID NO: 3974482 - RNA, 16 nt, Human herpesvirus 4 [Epstein-Barr virus]
cagguggcugcugcca

SEQ ID NO: 3974483 - RNA, 14 nt, Human herpesvirus 4 [Epstein-Barr virus]
cagguuugacuuca

SEQ ID NO: 3974484 - RNA, 11 nt, Human herpesvirus 4 [Epstein-Barr virus]
caguauuuugc

SEQ ID NO: 3974485 - RNA, 15 nt, Human herpesvirus 4 [Epstein-Barr virus]
caguccgccaugacc

SEQ ID NO: 3974486 - RNA, 19 nt, Human herpesvirus 4 [Epstein-Barr virus]
caguggaccucaaagaaga

SEQ ID NO: 3974487 - RNA, 20 nt, Human herpesvirus 4 [Epstein-Barr virus]
cagugggcuucgggggccug

SEQ ID NO: 3974488 - RNA, 15 nt, Human herpesvirus 4 [Epstein-Barr virus]
caguguggcccgauc

SEQ ID NO: 3974489 - RNA, 23 nt, Human herpesvirus 4 [Epstein-Barr virus]
caguugacggacgugcccagcuc

SEQ ID NO: 3974490 - RNA, 14 nt, Human herpesvirus 4 [Epstein-Barr virus]
cauaacccagaauc

SEQ ID NO: 3974491 - RNA, 15 nt, Human herpesvirus 4 [Epstein-Barr virus]
cauaauggugccuga

SEQ ID NO: 3974492 - RNA, 22 nt, Human herpesvirus 4 [Epstein-Barr virus]
cauagagaugguguccggagac

SEQ ID NO: 3974493 - RNA, 14 nt, Human herpesvirus 4 [Epstein-Barr virus]
cauccccagagggc

SEQ ID NO: 3974494 - RNA, 23 nt, Human herpesvirus 4 [Epstein-Barr virus]
cauccugaagcgaagcagcuccg

SEQ ID NO: 3974495 - RNA, 13 nt, Human herpesvirus 4 [Epstein-Barr virus]
caucgcaagcucc

SEQ ID NO: 3974496 - RNA, 19 nt, Human herpesvirus 4 [Epstein-Barr virus]
caucucaagggaggagugc

SEQ ID NO: 3974497 - RNA, 12 nt, Human herpesvirus 4 [Epstein-Barr virus]
caucucagggac

SEQ ID NO: 3974498 - RNA, 15 nt, Human herpesvirus 4 [Epstein-Barr virus]
caucucauccccaga

SEQ ID NO: 3974499 - RNA, 23 nt, Human herpesvirus 4 [Epstein-Barr virus]
caucugcuucuggcucuucuggg

SEQ ID NO: 3974500 - RNA, 13 nt, Human herpesvirus 4 [Epstein-Barr virus]
caucuuccaggug

SEQ ID NO: 3974501 - RNA, 12 nt, Human herpesvirus 4 [Epstein-Barr virus]
caucuuccuccu

SEQ ID NO: 3974502 - RNA, 15 nt, Human herpesvirus 4 [Epstein-Barr virus]
caugacgcugcugcu

SEQ ID NO: 3974503 - RNA, 15 nt, Human herpesvirus 4 [Epstein-Barr virus]
caugagcauggaaga

SEQ ID NO: 3974504 - RNA, 20 nt, Human herpesvirus 4 [Epstein-Barr virus]
caugaggagguaauuagcac

SEQ ID NO: 3974505 - RNA, 14 nt, Human herpesvirus 4 [Epstein-Barr virus]
caugagggcaccga

SEQ ID NO: 3974506 - RNA, 22 nt, Human herpesvirus 4 [Epstein-Barr virus]
caugcacaccuuggcgggucau

SEQ ID NO: 3974507 - RNA, 17 nt, Human herpesvirus 4 [Epstein-Barr virus]
caugcuguaccugauga

SEQ ID NO: 3974508 - RNA, 21 nt, Human herpesvirus 4 [Epstein-Barr virus]
cauggguaaugauucaucaga

SEQ ID NO: 3974509 - RNA, 19 nt, Human herpesvirus 4 [Epstein-Barr virus]
cauggugucuguaaucucu

SEQ ID NO: 3974510 - RNA, 18 nt, Human herpesvirus 4 [Epstein-Barr virus]
cauguguacuuguccuca

SEQ ID NO: 3974511 - RNA, 21 nt, Human herpesvirus 4 [Epstein-Barr virus]
cauguugucacgucacucagc

SEQ ID NO: 3974512 - RNA, 19 nt, Human herpesvirus 4 [Epstein-Barr virus]
cauucgacaggccauuaga

SEQ ID NO: 3974513 - RNA, 17 nt, Human herpesvirus 4 [Epstein-Barr virus]
cauugcuaauguaccuc

SEQ ID NO: 3974514 - RNA, 12 nt, Human herpesvirus 4 [Epstein-Barr virus]
cauuggcagcag

SEQ ID NO: 3974515 - RNA, 15 nt, Human herpesvirus 4 [Epstein-Barr virus]
cauuggcagcagcuc

SEQ ID NO: 3974516 - RNA, 18 nt, Human herpesvirus 4 [Epstein-Barr virus]
cauugguguuccacagcc

SEQ ID NO: 3974517 - RNA, 15 nt, Human herpesvirus 4 [Epstein-Barr virus]
cauuugaggaggcac

SEQ ID NO: 3974518 - RNA, 17 nt, Human herpesvirus 4 [Epstein-Barr virus]
ccaaacuuuguccagau

SEQ ID NO: 3974519 - RNA, 12 nt, Human herpesvirus 4 [Epstein-Barr virus]
ccaagagcugcc

SEQ ID NO: 3974520 - RNA, 16 nt, Human herpesvirus 4 [Epstein-Barr virus]
ccaagccgggggagaa

SEQ ID NO: 3974521 - RNA, 17 nt, Human herpesvirus 4 [Epstein-Barr virus]
ccaaucaccagccaccu

SEQ ID NO: 3974522 - RNA, 18 nt, Human herpesvirus 4 [Epstein-Barr virus]
ccaauucacaucucaggg

SEQ ID NO: 3974523 - RNA, 21 nt, Human herpesvirus 4 [Epstein-Barr virus]
ccacgggaugacucaucucaa

SEQ ID NO: 3974524 - RNA, 13 nt, Human herpesvirus 4 [Epstein-Barr virus]
ccacuacaccccu

SEQ ID NO: 3974525 - RNA, 21 nt, Human herpesvirus 4 [Epstein-Barr virus]
ccacuccaccugccggaggga

SEQ ID NO: 3974526 - RNA, 23 nt, Human herpesvirus 4 [Epstein-Barr virus]
ccacugagcaagauccuucuggc

SEQ ID NO: 3974527 - RNA, 22 nt, Human herpesvirus 4 [Epstein-Barr virus]
ccagaaagauacccagagcaaa

SEQ ID NO: 3974528 - RNA, 21 nt, Human herpesvirus 4 [Epstein-Barr virus]
ccagacacgucguucaugaga

SEQ ID NO: 3974529 - RNA, 23 nt, Human herpesvirus 4 [Epstein-Barr virus]
ccagacuccggggguccagccgg

SEQ ID NO: 3974530 - RNA, 15 nt, Human herpesvirus 4 [Epstein-Barr virus]
ccagagcaaaagcaa

SEQ ID NO: 3974531 - RNA, 13 nt, Human herpesvirus 4 [Epstein-Barr virus]
ccagagcccagag

SEQ ID NO: 3974532 - RNA, 15 nt, Human herpesvirus 4 [Epstein-Barr virus]
ccagagcccagagga

SEQ ID NO: 3974533 - RNA, 12 nt, Human herpesvirus 4 [Epstein-Barr virus]
ccagagcugagu

SEQ ID NO: 3974534 - RNA, 18 nt, Human herpesvirus 4 [Epstein-Barr virus]
ccagcagauccagggccc

SEQ ID NO: 3974535 - RNA, 19 nt, Human herpesvirus 4 [Epstein-Barr virus]
ccagcagauccagggcccg

SEQ ID NO: 3974536 - RNA, 20 nt, Human herpesvirus 4 [Epstein-Barr virus]
ccagcagauccagggcccgu

SEQ ID NO: 3974537 - RNA, 18 nt, Human herpesvirus 4 [Epstein-Barr virus]
ccagccagcgacugaucc

SEQ ID NO: 3974538 - RNA, 21 nt, Human herpesvirus 4 [Epstein-Barr virus]
ccagcccccucccgccccugu

SEQ ID NO: 3974539 - RNA, 15 nt, Human herpesvirus 4 [Epstein-Barr virus]
ccagcccuccucaga

SEQ ID NO: 3974540 - RNA, 17 nt, Human herpesvirus 4 [Epstein-Barr virus]
ccagcccuuaacacacc

SEQ ID NO: 3974541 - RNA, 22 nt, Human herpesvirus 4 [Epstein-Barr virus]
ccagccgggugcacacgcucag

SEQ ID NO: 3974542 - RNA, 17 nt, Human herpesvirus 4 [Epstein-Barr virus]
ccagccuacucuccacu

SEQ ID NO: 3974543 - RNA, 15 nt, Human herpesvirus 4 [Epstein-Barr virus]
ccagcggggagaggg

SEQ ID NO: 3974544 - RNA, 16 nt, Human herpesvirus 4 [Epstein-Barr virus]
ccagcggggagagggu

SEQ ID NO: 3974545 - RNA, 23 nt, Human herpesvirus 4 [Epstein-Barr virus]
ccaggaccuggaugcuguagugg

SEQ ID NO: 3974546 - RNA, 15 nt, Human herpesvirus 4 [Epstein-Barr virus]
ccaggagucugcugc

SEQ ID NO: 3974547 - RNA, 17 nt, Human herpesvirus 4 [Epstein-Barr virus]
ccaggccucagcgucag

SEQ ID NO: 3974548 - RNA, 22 nt, Human herpesvirus 4 [Epstein-Barr virus]
ccagggacagggcgcugcaugc

SEQ ID NO: 3974549 - RNA, 15 nt, Human herpesvirus 4 [Epstein-Barr virus]
ccagggguggcagug

SEQ ID NO: 3974550 - RNA, 22 nt, Human herpesvirus 4 [Epstein-Barr virus]
ccagggguggcaguggaugggg

SEQ ID NO: 3974551 - RNA, 16 nt, Human herpesvirus 4 [Epstein-Barr virus]
ccaggucuugccgugg

SEQ ID NO: 3974552 - RNA, 19 nt, Human herpesvirus 4 [Epstein-Barr virus]
ccagucaccuuccagacua

SEQ ID NO: 3974553 - RNA, 18 nt, Human herpesvirus 4 [Epstein-Barr virus]
ccagucuccgggucaggu

SEQ ID NO: 3974554 - RNA, 14 nt, Human herpesvirus 4 [Epstein-Barr virus]
ccauaccaggugcc

SEQ ID NO: 3974555 - RNA, 20 nt, Human herpesvirus 4 [Epstein-Barr virus]
ccaucaacuucagcuccagg

SEQ ID NO: 3974556 - RNA, 15 nt, Human herpesvirus 4 [Epstein-Barr virus]
ccaucagcucgccca

SEQ ID NO: 3974557 - RNA, 23 nt, Human herpesvirus 4 [Epstein-Barr virus]
ccaucaugcugaauauugccagc

SEQ ID NO: 3974558 - RNA, 13 nt, Human herpesvirus 4 [Epstein-Barr virus]
ccaucauguguuu

SEQ ID NO: 3974559 - RNA, 12 nt, Human herpesvirus 4 [Epstein-Barr virus]
ccaucugcuucu

SEQ ID NO: 3974560 - RNA, 13 nt, Human herpesvirus 4 [Epstein-Barr virus]
ccaugaccagcag

SEQ ID NO: 3974561 - RNA, 14 nt, Human herpesvirus 4 [Epstein-Barr virus]
ccauuccacccacu

SEQ ID NO: 3974562 - RNA, 21 nt, Human herpesvirus 4 [Epstein-Barr virus]
cccaccagaucgccugccacu

SEQ ID NO: 3974563 - RNA, 13 nt, Human herpesvirus 4 [Epstein-Barr virus]
cccacccuggaac

SEQ ID NO: 3974564 - RNA, 21 nt, Human herpesvirus 4 [Epstein-Barr virus]
cccaccuaugccaauccaugc

SEQ ID NO: 3974565 - RNA, 22 nt, Human herpesvirus 4 [Epstein-Barr virus]
cccacgguggaacaggagcagg

SEQ ID NO: 3974566 - RNA, 18 nt, Human herpesvirus 4 [Epstein-Barr virus]
cccagcagauccagggcc

SEQ ID NO: 3974567 - RNA, 15 nt, Human herpesvirus 4 [Epstein-Barr virus]
cccagccccuccucu

SEQ ID NO: 3974568 - RNA, 16 nt, Human herpesvirus 4 [Epstein-Barr virus]
cccagcccgccagcca

SEQ ID NO: 3974569 - RNA, 13 nt, Human herpesvirus 4 [Epstein-Barr virus]
cccaggcagccuu

SEQ ID NO: 3974570 - RNA, 18 nt, Human herpesvirus 4 [Epstein-Barr virus]
cccagguaccuuccugug

SEQ ID NO: 3974571 - RNA, 12 nt, Human herpesvirus 4 [Epstein-Barr virus]
ccugauuuuccu

SEQ ID NO: 3974572 - RNA, 12 nt, Human herpesvirus 4 [Epstein-Barr virus]
ccugcaaacuga

SEQ ID NO: 3974573 - RNA, 14 nt, Human herpesvirus 4 [Epstein-Barr virus]
ccugcccucccacu

SEQ ID NO: 3974574 - RNA, 23 nt, Human herpesvirus 4 [Epstein-Barr virus]
ccugcccuccuccacccagcagc

SEQ ID NO: 3974575 - RNA, 14 nt, Human herpesvirus 4 [Epstein-Barr virus]
ccugccucugcucu

SEQ ID NO: 3974576 - RNA, 12 nt, Human herpesvirus 4 [Epstein-Barr virus]
ccugccuggauc

SEQ ID NO: 3974577 - RNA, 14 nt, Human herpesvirus 4 [Epstein-Barr virus]
ccugccuggaucug

SEQ ID NO: 3974578 - RNA, 23 nt, Human herpesvirus 4 [Epstein-Barr virus]
ccugcggcccacugaaaaaccag

SEQ ID NO: 3974579 - RNA, 16 nt, Human herpesvirus 4 [Epstein-Barr virus]
ccugcguugaacccac

SEQ ID NO: 3974580 - RNA, 20 nt, Human herpesvirus 4 [Epstein-Barr virus]
ccuggccagggcggaggaga

SEQ ID NO: 3974581 - RNA, 14 nt, Human herpesvirus 4 [Epstein-Barr virus]
ccuggccggccgcc

SEQ ID NO: 3974582 - RNA, 17 nt, Human herpesvirus 4 [Epstein-Barr virus]
accaagggcagggcaau

SEQ ID NO: 3974583 - RNA, 15 nt, Human herpesvirus 4 [Epstein-Barr virus]
accaaugccaaagcu

SEQ ID NO: 3974584 - RNA, 14 nt, Human herpesvirus 4 [Epstein-Barr virus]
accacgcucuguuu

SEQ ID NO: 3974585 - RNA, 20 nt, Human herpesvirus 4 [Epstein-Barr virus]
accacucaggaagcuggcca

SEQ ID NO: 3974586 - RNA, 21 nt, Human herpesvirus 4 [Epstein-Barr virus]
accagagggugagcccaccug

SEQ ID NO: 3974587 - RNA, 19 nt, Human herpesvirus 4 [Epstein-Barr virus]
accagcccuuuuuccagug

SEQ ID NO: 3974588 - RNA, 11 nt, Human herpesvirus 4 [Epstein-Barr virus]
accagcuccag

SEQ ID NO: 3974589 - RNA, 17 nt, Human herpesvirus 4 [Epstein-Barr virus]
acccagggguggcagug

SEQ ID NO: 3974590 - RNA, 20 nt, Human herpesvirus 4 [Epstein-Barr virus]
acccaucccggcccucuucc

SEQ ID NO: 3974591 - RNA, 22 nt, Human herpesvirus 4 [Epstein-Barr virus]
guacgugcgugaucaugagggc

SEQ ID NO: 3974592 - RNA, 11 nt, Human herpesvirus 4 [Epstein-Barr virus]
guagacagauc

SEQ ID NO: 3974593 - RNA, 14 nt, Human herpesvirus 4 [Epstein-Barr virus]
guagacgaggcaca

SEQ ID NO: 3974594 - RNA, 17 nt, Human herpesvirus 4 [Epstein-Barr virus]
guagccccuaggccugc

SEQ ID NO: 3974595 - RNA, 13 nt, Human herpesvirus 4 [Epstein-Barr virus]
guagccuuggggg

SEQ ID NO: 3974596 - RNA, 22 nt, Human herpesvirus 4 [Epstein-Barr virus]
guauccaccuagaaagagccau

SEQ ID NO: 3974597 - RNA, 21 nt, Human herpesvirus 4 [Epstein-Barr virus]
guaucccaaauaaauguuacu

SEQ ID NO: 3974598 - RNA, 22 nt, Human herpesvirus 4 [Epstein-Barr virus]
gucaaacaggugagucagccuu

SEQ ID NO: 3974599 - RNA, 20 nt, Human herpesvirus 4 [Epstein-Barr virus]
gucaaacauggugucuguaa

SEQ ID NO: 3974600 - RNA, 19 nt, Human herpesvirus 4 [Epstein-Barr virus]
gucaagagcuuccuggccg

SEQ ID NO: 3974601 - RNA, 17 nt, Human herpesvirus 4 [Epstein-Barr virus]
gucaaguaccagcuggu

SEQ ID NO: 3974602 - RNA, 19 nt, Human herpesvirus 4 [Epstein-Barr virus]
gucaauaauuucagugaaa

SEQ ID NO: 3974603 - RNA, 12 nt, Human herpesvirus 4 [Epstein-Barr virus]
gucacagcugcu

SEQ ID NO: 3974604 - RNA, 14 nt, Human herpesvirus 4 [Epstein-Barr virus]
gucacagcugcugg

SEQ ID NO: 3974605 - RNA, 15 nt, Human herpesvirus 4 [Epstein-Barr virus]
gucaccaggccugcc

SEQ ID NO: 3974606 - RNA, 22 nt, Human herpesvirus 4 [Epstein-Barr virus]
gucacccaugccuccccagcaa

SEQ ID NO: 3974607 - RNA, 16 nt, Human herpesvirus 4 [Epstein-Barr virus]
gucacucagcuccgcg

SEQ ID NO: 3974608 - RNA, 14 nt, Human herpesvirus 4 [Epstein-Barr virus]
gucagaccugaaga

SEQ ID NO: 3974609 - RNA, 15 nt, Human herpesvirus 4 [Epstein-Barr virus]
gucagcaaaccagcu

SEQ ID NO: 3974610 - RNA, 19 nt, Human herpesvirus 4 [Epstein-Barr virus]
guccaagagaaugacagca

SEQ ID NO: 3974611 - RNA, 15 nt, Human herpesvirus 4 [Epstein-Barr virus]
guccaggggccacac

SEQ ID NO: 3974612 - RNA, 20 nt, Human herpesvirus 4 [Epstein-Barr virus]
guccaguuuuuaugugccuc

SEQ ID NO: 3974613 - RNA, 19 nt, Human herpesvirus 4 [Epstein-Barr virus]
gucccagggccggaaccug

SEQ ID NO: 3974614 - RNA, 17 nt, Human herpesvirus 4 [Epstein-Barr virus]
gucccauguacagcaca

SEQ ID NO: 3974615 - RNA, 19 nt, Human herpesvirus 4 [Epstein-Barr virus]
guccccgagggugaggccc

SEQ ID NO: 3974616 - RNA, 20 nt, Human herpesvirus 4 [Epstein-Barr virus]
gucccgccucuccguacccc

SEQ ID NO: 3974617 - RNA, 15 nt, Human herpesvirus 4 [Epstein-Barr virus]
gucccuuuggaggac

SEQ ID NO: 3974618 - RNA, 14 nt, Human herpesvirus 4 [Epstein-Barr virus]
guccgugagagccu

SEQ ID NO: 3974619 - RNA, 15 nt, Human herpesvirus 4 [Epstein-Barr virus]
guccuuugggaacac

SEQ ID NO: 3974620 - RNA, 17 nt, Human herpesvirus 4 [Epstein-Barr virus]
gucgugguuuucugccc

SEQ ID NO: 3974621 - RNA, 13 nt, Human herpesvirus 4 [Epstein-Barr virus]
gucguuugauucu

SEQ ID NO: 3974622 - RNA, 18 nt, Human herpesvirus 4 [Epstein-Barr virus]
gucuacaucccauaccua

SEQ ID NO: 3974623 - RNA, 17 nt, Human herpesvirus 4 [Epstein-Barr virus]
gucuaccucuguuccuu

SEQ ID NO: 3974624 - RNA, 16 nt, Human herpesvirus 4 [Epstein-Barr virus]
gucuauccaggaggag

SEQ ID NO: 3974625 - RNA, 17 nt, Human herpesvirus 4 [Epstein-Barr virus]
gucuccuuguugaccuc

SEQ ID NO: 3974626 - RNA, 21 nt, Human herpesvirus 4 [Epstein-Barr virus]
gucucggccuacgaggcccug

SEQ ID NO: 3974627 - RNA, 17 nt, Human herpesvirus 4 [Epstein-Barr virus]
gucuggcagggggccgg

SEQ ID NO: 3974628 - RNA, 15 nt, Human herpesvirus 4 [Epstein-Barr virus]
gucuuugccaaccug

SEQ ID NO: 3974629 - RNA, 16 nt, Human herpesvirus 4 [Epstein-Barr virus]
gucuuugccaaccugc

SEQ ID NO: 3974630 - RNA, 17 nt, Human herpesvirus 4 [Epstein-Barr virus]
gugaauugugcccacca

SEQ ID NO: 3974631 - RNA, 21 nt, Human herpesvirus 4 [Epstein-Barr virus]
gugacaugcuauggugccggg

SEQ ID NO: 3974632 - RNA, 17 nt, Human herpesvirus 4 [Epstein-Barr virus]
gugaggagcgcccaccg

SEQ ID NO: 3974633 - RNA, 23 nt, Human herpesvirus 4 [Epstein-Barr virus]
ggccggaaccugagccugagcca

SEQ ID NO: 3974634 - RNA, 14 nt, Human herpesvirus 4 [Epstein-Barr virus]
ggccguccucugga

SEQ ID NO: 3974635 - RNA, 15 nt, Human herpesvirus 4 [Epstein-Barr virus]
ggccguccucuggac

SEQ ID NO: 3974636 - RNA, 15 nt, Human herpesvirus 4 [Epstein-Barr virus]
ggccuccagcucggc

SEQ ID NO: 3974637 - RNA, 13 nt, Human herpesvirus 4 [Epstein-Barr virus]
ggccuccuggcca

SEQ ID NO: 3974638 - RNA, 19 nt, Human herpesvirus 4 [Epstein-Barr virus]
ggccugcuggccgagcugg

SEQ ID NO: 3974639 - RNA, 20 nt, Human herpesvirus 4 [Epstein-Barr virus]
ggccugggaggugcugaggc

SEQ ID NO: 3974640 - RNA, 18 nt, Human herpesvirus 4 [Epstein-Barr virus]
ggccugugacuggugcuu

SEQ ID NO: 3974641 - RNA, 19 nt, Human herpesvirus 4 [Epstein-Barr virus]
ggccuugguuucagccuca

SEQ ID NO: 3974642 - RNA, 19 nt, Human herpesvirus 4 [Epstein-Barr virus]
ggccuuguccgcugggcca

SEQ ID NO: 3974643 - RNA, 14 nt, Human herpesvirus 4 [Epstein-Barr virus]
ggcgacgcggagag

SEQ ID NO: 3974644 - RNA, 12 nt, Human herpesvirus 4 [Epstein-Barr virus]
ggcgaggggcgc

SEQ ID NO: 3974645 - RNA, 18 nt, Human herpesvirus 4 [Epstein-Barr virus]
ggcgauaccuugggcauc

SEQ ID NO: 3974646 - RNA, 21 nt, Human herpesvirus 4 [Epstein-Barr virus]
ggcgcaggggagggggcagga

SEQ ID NO: 3974647 - RNA, 19 nt, Human herpesvirus 4 [Epstein-Barr virus]
ggcgccgcagggguggugg

SEQ ID NO: 3974648 - RNA, 16 nt, Human herpesvirus 4 [Epstein-Barr virus]
ggcgcgggucugggau

SEQ ID NO: 3974649 - RNA, 17 nt, Human herpesvirus 4 [Epstein-Barr virus]
ggcggacaucauuagcc

SEQ ID NO: 3974650 - RNA, 16 nt, Human herpesvirus 4 [Epstein-Barr virus]
ggcgggaauggccgcc

SEQ ID NO: 3974651 - RNA, 21 nt, Human herpesvirus 4 [Epstein-Barr virus]
ggcgggacuggcacgguggcu

SEQ ID NO: 3974652 - RNA, 17 nt, Human herpesvirus 4 [Epstein-Barr virus]
ggcuagacgcagcugug

SEQ ID NO: 3974653 - RNA, 14 nt, Human herpesvirus 4 [Epstein-Barr virus]
ggcucaggccgccg

SEQ ID NO: 3974654 - RNA, 21 nt, Human herpesvirus 4 [Epstein-Barr virus]
ggcucucccaacacaauagaa

SEQ ID NO: 3974655 - RNA, 14 nt, Human herpesvirus 4 [Epstein-Barr virus]
ggcugccgaagcag

SEQ ID NO: 3974656 - RNA, 12 nt, Human herpesvirus 4 [Epstein-Barr virus]
ggcugcugccaa

SEQ ID NO: 3974657 - RNA, 22 nt, Human herpesvirus 4 [Epstein-Barr virus]
ggcugcugccgucccagggccg

SEQ ID NO: 3974658 - RNA, 17 nt, Human herpesvirus 4 [Epstein-Barr virus]
ggcuggugggcucccuc

SEQ ID NO: 3974659 - RNA, 18 nt, Human herpesvirus 4 [Epstein-Barr virus]
ggcugugguaaccggugg

SEQ ID NO: 3974660 - RNA, 18 nt, Human herpesvirus 4 [Epstein-Barr virus]
ggcuuacaagaauaacau

SEQ ID NO: 3974661 - RNA, 23 nt, Human herpesvirus 4 [Epstein-Barr virus]
ggcuucuuagaugaggagcaggc

SEQ ID NO: 3974662 - RNA, 12 nt, Human herpesvirus 4 [Epstein-Barr virus]
ggcuugccaaaa

SEQ ID NO: 3974663 - RNA, 21 nt, Human herpesvirus 4 [Epstein-Barr virus]
gggaacaugagaaaauacuuc

SEQ ID NO: 3974664 - RNA, 14 nt, Human herpesvirus 4 [Epstein-Barr virus]
gggaagcucagcag

SEQ ID NO: 3974665 - RNA, 22 nt, Human herpesvirus 4 [Epstein-Barr virus]
gggacgcagaaugugcagggau

SEQ ID NO: 3974666 - RNA, 17 nt, Human herpesvirus 4 [Epstein-Barr virus]
gggagaacgguggccag

SEQ ID NO: 3974667 - RNA, 15 nt, Human herpesvirus 4 [Epstein-Barr virus]
gggagggacgggccu

SEQ ID NO: 3974668 - RNA, 23 nt, Human herpesvirus 4 [Epstein-Barr virus]
gggaugaacccuggggcaacaga

SEQ ID NO: 3974669 - RNA, 20 nt, Human herpesvirus 4 [Epstein-Barr virus]
gggauugcaacacgacggga

SEQ ID NO: 3974670 - RNA, 16 nt, Human herpesvirus 4 [Epstein-Barr virus]
gggcaaacagggcaga

SEQ ID NO: 3974671 - RNA, 13 nt, Human herpesvirus 4 [Epstein-Barr virus]
gggcaccguggga

SEQ ID NO: 3974672 - RNA, 21 nt, Human herpesvirus 4 [Epstein-Barr virus]
gggccacggcgugccagaggc

SEQ ID NO: 3974673 - RNA, 21 nt, Human herpesvirus 4 [Epstein-Barr virus]
gggccaggucacagaccagcc

SEQ ID NO: 3974674 - RNA, 19 nt, Human herpesvirus 4 [Epstein-Barr virus]
gggccauucgugaguccag

SEQ ID NO: 3974675 - RNA, 17 nt, Human herpesvirus 4 [Epstein-Barr virus]
gggcccgcuucauucac

SEQ ID NO: 3974676 - RNA, 14 nt, Human herpesvirus 4 [Epstein-Barr virus]
gggccucggccugg

SEQ ID NO: 3974677 - RNA, 18 nt, Human herpesvirus 4 [Epstein-Barr virus]
gggcggcguggagcuggg

SEQ ID NO: 3974678 - RNA, 17 nt, Human herpesvirus 4 [Epstein-Barr virus]
gggcgggcuugugcuug

SEQ ID NO: 3974679 - RNA, 16 nt, Human herpesvirus 4 [Epstein-Barr virus]
gggcuggccugccugg

SEQ ID NO: 3974680 - RNA, 21 nt, Human herpesvirus 4 [Epstein-Barr virus]
ggggcacucucgagggugccu

SEQ ID NO: 3974681 - RNA, 18 nt, Human herpesvirus 4 [Epstein-Barr virus]
ggggcaggaggggcagga

SEQ ID NO: 3974682 - RNA, 20 nt, Human herpesvirus 4 [Epstein-Barr virus]
ggggcgauaccuugggcauc

SEQ ID NO: 3974683 - RNA, 20 nt, Human herpesvirus 4 [Epstein-Barr virus]
ggggcugagaccaugcucag

SEQ ID NO: 3974684 - RNA, 15 nt, Human herpesvirus 4 [Epstein-Barr virus]
gggggccuggugcca

SEQ ID NO: 3974685 - RNA, 13 nt, Human herpesvirus 4 [Epstein-Barr virus]
gggggugggcacc

SEQ ID NO: 3974686 - RNA, 18 nt, Human herpesvirus 4 [Epstein-Barr virus]
gggguguagugggugggc

SEQ ID NO: 3974687 - RNA, 22 nt, Human herpesvirus 4 [Epstein-Barr virus]
ggguaggccauacgucuagcca

SEQ ID NO: 3974688 - RNA, 12 nt, Human herpesvirus 4 [Epstein-Barr virus]
ggguaggggagu

SEQ ID NO: 3974689 - RNA, 19 nt, Human herpesvirus 4 [Epstein-Barr virus]
ggguauagagcauaugccg

SEQ ID NO: 3974690 - RNA, 14 nt, Human herpesvirus 4 [Epstein-Barr virus]
gggucagugaugga

SEQ ID NO: 3974691 - RNA, 14 nt, Human herpesvirus 4 [Epstein-Barr virus]
ggguccgugcggcu

SEQ ID NO: 3974692 - RNA, 19 nt, Human herpesvirus 4 [Epstein-Barr virus]
gggucucggcacccaggca

SEQ ID NO: 3974693 - RNA, 17 nt, Human herpesvirus 4 [Epstein-Barr virus]
gggugaggccacgcuuu

SEQ ID NO: 3974694 - RNA, 19 nt, Human herpesvirus 4 [Epstein-Barr virus]
ggguggaacgcuccagcuu

SEQ ID NO: 3974695 - RNA, 21 nt, Human herpesvirus 4 [Epstein-Barr virus]
ggguggacagcagcguccugg

SEQ ID NO: 3974696 - RNA, 20 nt, Human herpesvirus 4 [Epstein-Barr virus]
gguaacauuguacagagcug

SEQ ID NO: 3974697 - RNA, 14 nt, Human herpesvirus 4 [Epstein-Barr virus]
gguacgauggcgga

SEQ ID NO: 3974698 - RNA, 22 nt, Human herpesvirus 4 [Epstein-Barr virus]
ggucacuaaaguuggucaggcu

SEQ ID NO: 3974699 - RNA, 22 nt, Human herpesvirus 4 [Epstein-Barr virus]
ggucacuggcuuaugcguggga

SEQ ID NO: 3974700 - RNA, 12 nt, Human herpesvirus 4 [Epstein-Barr virus]
ggucauggcgga

SEQ ID NO: 3974701 - RNA, 18 nt, Human herpesvirus 4 [Epstein-Barr virus]
ggucauggcggacugcgc

SEQ ID NO: 3974702 - RNA, 17 nt, Human herpesvirus 4 [Epstein-Barr virus]
gguccaggagucugcug

SEQ ID NO: 3974703 - RNA, 22 nt, Human herpesvirus 4 [Epstein-Barr virus]
gguccucauaaggcgguggggg

SEQ ID NO: 3974704 - RNA, 22 nt, Human herpesvirus 4 [Epstein-Barr virus]
ggucgcuagauggcgcggguga

SEQ ID NO: 3974705 - RNA, 14 nt, Human herpesvirus 4 [Epstein-Barr virus]
ggugacacagugcc

SEQ ID NO: 3974706 - RNA, 12 nt, Human herpesvirus 4 [Epstein-Barr virus]
ggugaggcccag

SEQ ID NO: 3974707 - RNA, 14 nt, Human herpesvirus 4 [Epstein-Barr virus]
ggugaggcccagcc

SEQ ID NO: 3974708 - RNA, 19 nt, Human herpesvirus 4 [Epstein-Barr virus]
ggugccaagcucagccccu

SEQ ID NO: 3974709 - RNA, 13 nt, Human herpesvirus 4 [Epstein-Barr virus]
ggugcccccacca

SEQ ID NO: 3974710 - RNA, 18 nt, Human herpesvirus 4 [Epstein-Barr virus]
ggugcccgagccccgccu

SEQ ID NO: 3974711 - RNA, 15 nt, Human herpesvirus 4 [Epstein-Barr virus]
ggugccggggcccac

SEQ ID NO: 3974712 - RNA, 16 nt, Human herpesvirus 4 [Epstein-Barr virus]
ggugccggggcccacg

SEQ ID NO: 3974713 - RNA, 18 nt, Human herpesvirus 4 [Epstein-Barr virus]
ggugcuugugguguggga

SEQ ID NO: 3974714 - RNA, 21 nt, Human herpesvirus 4 [Epstein-Barr virus]
gguggcagcccccuccuccag

SEQ ID NO: 3974715 - RNA, 14 nt, Human herpesvirus 4 [Epstein-Barr virus]
gguggccggcagcc

SEQ ID NO: 3974716 - RNA, 16 nt, Human herpesvirus 4 [Epstein-Barr virus]
gguugcgcugcuugcc

SEQ ID NO: 3974717 - RNA, 19 nt, Human herpesvirus 4 [Epstein-Barr virus]
gguuguauguucagagcuc

SEQ ID NO: 3974718 - RNA, 22 nt, Human herpesvirus 4 [Epstein-Barr virus]
guaaaaagcgggccugagucca

SEQ ID NO: 3974719 - RNA, 23 nt, Human herpesvirus 4 [Epstein-Barr virus]
guaacuugucuacaucccauacc

SEQ ID NO: 3974720 - RNA, 14 nt, Human herpesvirus 4 [Epstein-Barr virus]
guacgugccucaga

SEQ ID NO: 3974721 - RNA, 22 nt, Human herpesvirus 4 [Epstein-Barr virus]
gcugcacaaaggaaacugcuga

SEQ ID NO: 3974722 - RNA, 21 nt, Human herpesvirus 4 [Epstein-Barr virus]
gcugcaccggagccugccgga

SEQ ID NO: 3974723 - RNA, 23 nt, Human herpesvirus 4 [Epstein-Barr virus]
gcugcaccuggacauagaggggc

SEQ ID NO: 3974724 - RNA, 12 nt, Human herpesvirus 4 [Epstein-Barr virus]
gcugccagccuc

SEQ ID NO: 3974725 - RNA, 20 nt, Human herpesvirus 4 [Epstein-Barr virus]
gcugcccauggaaugcucag

SEQ ID NO: 3974726 - RNA, 17 nt, Human herpesvirus 4 [Epstein-Barr virus]
gcugccccgggcccacc

SEQ ID NO: 3974727 - RNA, 19 nt, Human herpesvirus 4 [Epstein-Barr virus]
gcugccgcuacugcugcua

SEQ ID NO: 3974728 - RNA, 16 nt, Human herpesvirus 4 [Epstein-Barr virus]
gcugcgccugagcugc

SEQ ID NO: 3974729 - RNA, 12 nt, Human herpesvirus 4 [Epstein-Barr virus]
gcugcuggucau

SEQ ID NO: 3974730 - RNA, 17 nt, Human herpesvirus 4 [Epstein-Barr virus]
gcugcuguccacccugg

SEQ ID NO: 3974731 - RNA, 21 nt, Human herpesvirus 4 [Epstein-Barr virus]
gcugcuuuuagccuaauugug

SEQ ID NO: 3974732 - RNA, 20 nt, Human herpesvirus 4 [Epstein-Barr virus]
gcuggacgugaaccuccccc

SEQ ID NO: 3974733 - RNA, 14 nt, Human herpesvirus 4 [Epstein-Barr virus]
gcuggcaguccuug

SEQ ID NO: 3974734 - RNA, 14 nt, Human herpesvirus 4 [Epstein-Barr virus]
gcuggccgcagcug

SEQ ID NO: 3974735 - RNA, 17 nt, Human herpesvirus 4 [Epstein-Barr virus]
gcuggccgcagcuggcg

SEQ ID NO: 3974736 - RNA, 15 nt, Human herpesvirus 4 [Epstein-Barr virus]
gcuggccugccugga

SEQ ID NO: 3974737 - RNA, 15 nt, Human herpesvirus 4 [Epstein-Barr virus]
gcugguggccuggga

SEQ ID NO: 3974738 - RNA, 15 nt, Human herpesvirus 4 [Epstein-Barr virus]
gcuguugacaugagc

SEQ ID NO: 3974739 - RNA, 18 nt, Human herpesvirus 4 [Epstein-Barr virus]
gcuguugacaugagcaug

SEQ ID NO: 3974740 - RNA, 14 nt, Human herpesvirus 4 [Epstein-Barr virus]
gcuuaaaaaugugc

SEQ ID NO: 3974741 - RNA, 23 nt, Human herpesvirus 4 [Epstein-Barr virus]
gcuuaaaaaugugcagcuucucc

SEQ ID NO: 3974742 - RNA, 14 nt, Human herpesvirus 4 [Epstein-Barr virus]
gcuuacagccagag

SEQ ID NO: 3974743 - RNA, 15 nt, Human herpesvirus 4 [Epstein-Barr virus]
gcuuaugcagcaccu

SEQ ID NO: 3974744 - RNA, 22 nt, Human herpesvirus 4 [Epstein-Barr virus]
gcuuccacccccuggagccagc

SEQ ID NO: 3974745 - RNA, 14 nt, Human herpesvirus 4 [Epstein-Barr virus]
gcuugugaacuuua

SEQ ID NO: 3974746 - RNA, 21 nt, Human herpesvirus 4 [Epstein-Barr virus]
gcuuugccggcauccagugcg

SEQ ID NO: 3974747 - RNA, 22 nt, Human herpesvirus 4 [Epstein-Barr virus]
ggaaagaggucccauguacagc

SEQ ID NO: 3974748 - RNA, 19 nt, Human herpesvirus 4 [Epstein-Barr virus]
ggaaauggccuaggagaga

SEQ ID NO: 3974749 - RNA, 19 nt, Human herpesvirus 4 [Epstein-Barr virus]
ggaacggugggaagcucag

SEQ ID NO: 3974750 - RNA, 18 nt, Human herpesvirus 4 [Epstein-Barr virus]
ggaagagaggggcaggga

SEQ ID NO: 3974751 - RNA, 21 nt, Human herpesvirus 4 [Epstein-Barr virus]
ggaagcaggagaugggugcau

SEQ ID NO: 3974752 - RNA, 21 nt, Human herpesvirus 4 [Epstein-Barr virus]
ggaagcguucuucacugucca

SEQ ID NO: 3974753 - RNA, 14 nt, Human herpesvirus 4 [Epstein-Barr virus]
ggaaggaggauggc

SEQ ID NO: 3974754 - RNA, 14 nt, Human herpesvirus 4 [Epstein-Barr virus]
ggaaucucugccaa

SEQ ID NO: 3974755 - RNA, 15 nt, Human herpesvirus 4 [Epstein-Barr virus]
ggacaaggcaguaga

SEQ ID NO: 3974756 - RNA, 17 nt, Human herpesvirus 4 [Epstein-Barr virus]
ggacaucauuagcccag

SEQ ID NO: 3974757 - RNA, 15 nt, Human herpesvirus 4 [Epstein-Barr virus]
ggacgaggaggaaga

SEQ ID NO: 3974758 - RNA, 21 nt, Human herpesvirus 4 [Epstein-Barr virus]
ggacguuggcgggacuggcac

SEQ ID NO: 3974759 - RNA, 22 nt, Human herpesvirus 4 [Epstein-Barr virus]
ggagacguggguccccucugcc

SEQ ID NO: 3974760 - RNA, 15 nt, Human herpesvirus 4 [Epstein-Barr virus]
ggagagggccagaga

SEQ ID NO: 3974761 - RNA, 18 nt, Human herpesvirus 4 [Epstein-Barr virus]
ggagauagggaccagagg

SEQ ID NO: 3974762 - RNA, 21 nt, Human herpesvirus 4 [Epstein-Barr virus]
ggagauccgccaggaccugga

SEQ ID NO: 3974763 - RNA, 19 nt, Human herpesvirus 4 [Epstein-Barr virus]
ggagcacucggggcccuuu

SEQ ID NO: 3974764 - RNA, 17 nt, Human herpesvirus 4 [Epstein-Barr virus]
ggagccagcgcuggggg

SEQ ID NO: 3974765 - RNA, 21 nt, Human herpesvirus 4 [Epstein-Barr virus]
ggaggagaagagaggcuuccc

SEQ ID NO: 3974766 - RNA, 18 nt, Human herpesvirus 4 [Epstein-Barr virus]
ggaggaggacgugaguga

SEQ ID NO: 3974767 - RNA, 14 nt, Human herpesvirus 4 [Epstein-Barr virus]
ggaggaugccagcc

SEQ ID NO: 3974768 - RNA, 17 nt, Human herpesvirus 4 [Epstein-Barr virus]
ggaggcacuggagcaga

SEQ ID NO: 3974769 - RNA, 16 nt, Human herpesvirus 4 [Epstein-Barr virus]
ggaggccccggccgcc

SEQ ID NO: 3974770 - RNA, 18 nt, Human herpesvirus 4 [Epstein-Barr virus]
ggaggccgagcagggacu

SEQ ID NO: 3974771 - RNA, 20 nt, Human herpesvirus 4 [Epstein-Barr virus]
ggaggccugggagggggcga

SEQ ID NO: 3974772 - RNA, 11 nt, Human herpesvirus 4 [Epstein-Barr virus]
ggaggcugcua

SEQ ID NO: 3974773 - RNA, 19 nt, Human herpesvirus 4 [Epstein-Barr virus]
ggagggagccugcccaucc

SEQ ID NO: 3974774 - RNA, 21 nt, Human herpesvirus 4 [Epstein-Barr virus]
ggagggcgcucugcgccagcc

SEQ ID NO: 3974775 - RNA, 14 nt, Human herpesvirus 4 [Epstein-Barr virus]
ggaggugaagaugg

SEQ ID NO: 3974776 - RNA, 13 nt, Human herpesvirus 4 [Epstein-Barr virus]
ggaugaagaucca

SEQ ID NO: 3974777 - RNA, 21 nt, Human herpesvirus 4 [Epstein-Barr virus]
ggcaaagauccccaguggagc

SEQ ID NO: 3974778 - RNA, 17 nt, Human herpesvirus 4 [Epstein-Barr virus]
ggcacaucuggcaccug

SEQ ID NO: 3974779 - RNA, 20 nt, Human herpesvirus 4 [Epstein-Barr virus]
ggcacguuuaccagugugcc

SEQ ID NO: 3974780 - RNA, 22 nt, Human herpesvirus 4 [Epstein-Barr virus]
ggcacguuuaccagugugccag

SEQ ID NO: 3974781 - RNA, 21 nt, Human herpesvirus 4 [Epstein-Barr virus]
ggcacucucgagggugccugu

SEQ ID NO: 3974782 - RNA, 18 nt, Human herpesvirus 4 [Epstein-Barr virus]
ggcagcacacgaagccug

SEQ ID NO: 3974783 - RNA, 24 nt, Human herpesvirus 4 [Epstein-Barr virus]
ggcagcagcucuggcacugcuagc

SEQ ID NO: 3974784 - RNA, 16 nt, Human herpesvirus 4 [Epstein-Barr virus]
ggcagccagagccagc

SEQ ID NO: 3974785 - RNA, 21 nt, Human herpesvirus 4 [Epstein-Barr virus]
ggcagccgcggccaucaccug

SEQ ID NO: 3974786 - RNA, 15 nt, Human herpesvirus 4 [Epstein-Barr virus]
ggcagcuuuuggccu

SEQ ID NO: 3974787 - RNA, 13 nt, Human herpesvirus 4 [Epstein-Barr virus]
ggcagggggccgg

SEQ ID NO: 3974788 - RNA, 18 nt, Human herpesvirus 4 [Epstein-Barr virus]
ggcagugauaagucauga

SEQ ID NO: 3974789 - RNA, 12 nt, Human herpesvirus 4 [Epstein-Barr virus]
ggcaugcugccc

SEQ ID NO: 3974790 - RNA, 15 nt, Human herpesvirus 4 [Epstein-Barr virus]
ggcaugggaccggga

SEQ ID NO: 3974791 - RNA, 13 nt, Human herpesvirus 4 [Epstein-Barr virus]
ggcauucagauuu

SEQ ID NO: 3974792 - RNA, 16 nt, Human herpesvirus 4 [Epstein-Barr virus]
ggccaaaagggcucug

SEQ ID NO: 3974793 - RNA, 18 nt, Human herpesvirus 4 [Epstein-Barr virus]
ggccaaaagggcucugac

SEQ ID NO: 3974794 - RNA, 16 nt, Human herpesvirus 4 [Epstein-Barr virus]
ggccacacuggggacc

SEQ ID NO: 3974795 - RNA, 18 nt, Human herpesvirus 4 [Epstein-Barr virus]
ggccaccggggaggccag

SEQ ID NO: 3974796 - RNA, 23 nt, Human herpesvirus 4 [Epstein-Barr virus]
ggccacgcugauaaaguuguccu

SEQ ID NO: 3974797 - RNA, 14 nt, Human herpesvirus 4 [Epstein-Barr virus]
ggccagcuuugagc

SEQ ID NO: 3974798 - RNA, 22 nt, Human herpesvirus 4 [Epstein-Barr virus]
ggccaggcgacgcucccgggca

SEQ ID NO: 3974799 - RNA, 22 nt, Human herpesvirus 4 [Epstein-Barr virus]
ggccaugcaggccuggacagca

SEQ ID NO: 3974800 - RNA, 20 nt, Human herpesvirus 4 [Epstein-Barr virus]
ggcccagcagauccagggcc

SEQ ID NO: 3974801 - RNA, 12 nt, Human herpesvirus 4 [Epstein-Barr virus]
ggcccagccccc

SEQ ID NO: 3974802 - RNA, 24 nt, Human herpesvirus 4 [Epstein-Barr virus]
ggcccagugcacccagguggucuu

SEQ ID NO: 3974803 - RNA, 23 nt, Human herpesvirus 4 [Epstein-Barr virus]
ggccccccgcaccagggccaggc

SEQ ID NO: 3974804 - RNA, 18 nt, Human herpesvirus 4 [Epstein-Barr virus]
ggccccgggagccacggc

SEQ ID NO: 3974805 - RNA, 16 nt, Human herpesvirus 4 [Epstein-Barr virus]
ggccccggucacccca

SEQ ID NO: 3974806 - RNA, 16 nt, Human herpesvirus 4 [Epstein-Barr virus]
ggcccgggaccgcgcc

SEQ ID NO: 3974807 - RNA, 23 nt, Human herpesvirus 4 [Epstein-Barr virus]
ggccgaggcugagggggcgguca

SEQ ID NO: 3974808 - RNA, 14 nt, Human herpesvirus 4 [Epstein-Barr virus]
gccggcagccuggc

SEQ ID NO: 3974809 - RNA, 22 nt, Human herpesvirus 4 [Epstein-Barr virus]
gccggcauccagugcgucagca

SEQ ID NO: 3974810 - RNA, 14 nt, Human herpesvirus 4 [Epstein-Barr virus]
gccgggcgcgcucc

SEQ ID NO: 3974811 - RNA, 13 nt, Human herpesvirus 4 [Epstein-Barr virus]
gccggggccgaga

SEQ ID NO: 3974812 - RNA, 23 nt, Human herpesvirus 4 [Epstein-Barr virus]
gccguccucuggacgcugguacc

SEQ ID NO: 3974813 - RNA, 17 nt, Human herpesvirus 4 [Epstein-Barr virus]
gccgugguugggcagaa

SEQ ID NO: 3974814 - RNA, 19 nt, Human herpesvirus 4 [Epstein-Barr virus]
gccuaaacgugauggugcu

SEQ ID NO: 3974815 - RNA, 17 nt, Human herpesvirus 4 [Epstein-Barr virus]
gccuacgcagaggccau

SEQ ID NO: 3974816 - RNA, 14 nt, Human herpesvirus 4 [Epstein-Barr virus]
gccuaggagagaag

SEQ ID NO: 3974817 - RNA, 16 nt, Human herpesvirus 4 [Epstein-Barr virus]
gccuaucauguuucaa

SEQ ID NO: 3974818 - RNA, 20 nt, Human herpesvirus 4 [Epstein-Barr virus]
gccuauggguuaccaggcau

SEQ ID NO: 3974819 - RNA, 19 nt, Human herpesvirus 4 [Epstein-Barr virus]
gccucagcgucaggagagg

SEQ ID NO: 3974820 - RNA, 14 nt, Human herpesvirus 4 [Epstein-Barr virus]
gccuccagagcccc

SEQ ID NO: 3974821 - RNA, 16 nt, Human herpesvirus 4 [Epstein-Barr virus]
gccuccagcucggcca

SEQ ID NO: 3974822 - RNA, 14 nt, Human herpesvirus 4 [Epstein-Barr virus]
gccuccgccugagc

SEQ ID NO: 3974823 - RNA, 17 nt, Human herpesvirus 4 [Epstein-Barr virus]
gccuccggccgccccgg

SEQ ID NO: 3974824 - RNA, 17 nt, Human herpesvirus 4 [Epstein-Barr virus]
gccucggccugggguaa

SEQ ID NO: 3974825 - RNA, 16 nt, Human herpesvirus 4 [Epstein-Barr virus]
gccucgugcaaccagg

SEQ ID NO: 3974826 - RNA, 20 nt, Human herpesvirus 4 [Epstein-Barr virus]
gccucuacgccccagaugaa

SEQ ID NO: 3974827 - RNA, 19 nt, Human herpesvirus 4 [Epstein-Barr virus]
gccugaauuccccugccug

SEQ ID NO: 3974828 - RNA, 16 nt, Human herpesvirus 4 [Epstein-Barr virus]
gccugagccacaccca

SEQ ID NO: 3974829 - RNA, 19 nt, Human herpesvirus 4 [Epstein-Barr virus]
gccugccaaagagccagau

SEQ ID NO: 3974830 - RNA, 17 nt, Human herpesvirus 4 [Epstein-Barr virus]
gccugccucugcucugg

SEQ ID NO: 3974831 - RNA, 16 nt, Human herpesvirus 4 [Epstein-Barr virus]
gccugcuucacgccuc

SEQ ID NO: 3974832 - RNA, 16 nt, Human herpesvirus 4 [Epstein-Barr virus]
gccuggauucuuacag

SEQ ID NO: 3974833 - RNA, 18 nt, Human herpesvirus 4 [Epstein-Barr virus]
gccuucuccucagccucc

SEQ ID NO: 3974834 - RNA, 16 nt, Human herpesvirus 4 [Epstein-Barr virus]
gccuugcccccgccag

SEQ ID NO: 3974835 - RNA, 22 nt, Human herpesvirus 4 [Epstein-Barr virus]
gcgacauguuucuggugagcca

SEQ ID NO: 3974836 - RNA, 21 nt, Human herpesvirus 4 [Epstein-Barr virus]
gcgacuucgggggcgacugcc

SEQ ID NO: 3974837 - RNA, 18 nt, Human herpesvirus 4 [Epstein-Barr virus]
gcgagacuuggaccaagg

SEQ ID NO: 3974838 - RNA, 16 nt, Human herpesvirus 4 [Epstein-Barr virus]
gcgagcaugaucagga

SEQ ID NO: 3974839 - RNA, 16 nt, Human herpesvirus 4 [Epstein-Barr virus]
gcgagcucuccagcca

SEQ ID NO: 3974840 - RNA, 14 nt, Human herpesvirus 4 [Epstein-Barr virus]
gcgagggggccugg

SEQ ID NO: 3974841 - RNA, 21 nt, Human herpesvirus 4 [Epstein-Barr virus]
gcgaugccucuacgccccaga

SEQ ID NO: 3974842 - RNA, 23 nt, Human herpesvirus 4 [Epstein-Barr virus]
gcgcaaccagcacgucgucagag

SEQ ID NO: 3974843 - RNA, 18 nt, Human herpesvirus 4 [Epstein-Barr virus]
gcgcacccggggaaccgg

SEQ ID NO: 3974844 - RNA, 17 nt, Human herpesvirus 4 [Epstein-Barr virus]
gcgccagcagggcacag

SEQ ID NO: 3974845 - RNA, 21 nt, Human herpesvirus 4 [Epstein-Barr virus]
gcgcccugucccuggagcugg

SEQ ID NO: 3974846 - RNA, 14 nt, Human herpesvirus 4 [Epstein-Barr virus]
gcgccgccagcaug

SEQ ID NO: 3974847 - RNA, 19 nt, Human herpesvirus 4 [Epstein-Barr virus]
gcgccgcccgggggccagu

SEQ ID NO: 3974848 - RNA, 15 nt, Human herpesvirus 4 [Epstein-Barr virus]
gcgccguccacggcc

SEQ ID NO: 3974849 - RNA, 23 nt, Human herpesvirus 4 [Epstein-Barr virus]
gcgcgcccugucaccaggccugc

SEQ ID NO: 3974850 - RNA, 19 nt, Human herpesvirus 4 [Epstein-Barr virus]
gcgcggcuggaugcccuca

SEQ ID NO: 3974851 - RNA, 15 nt, Human herpesvirus 4 [Epstein-Barr virus]
gcgcgggucccccua

SEQ ID NO: 3974852 - RNA, 22 nt, Human herpesvirus 4 [Epstein-Barr virus]
gcggcaagggcucaccagggag

SEQ ID NO: 3974853 - RNA, 11 nt, Human herpesvirus 4 [Epstein-Barr virus]
gcggcccagca

SEQ ID NO: 3974854 - RNA, 22 nt, Human herpesvirus 4 [Epstein-Barr virus]
gcggcgaugucggggcugcugg

SEQ ID NO: 3974855 - RNA, 12 nt, Human herpesvirus 4 [Epstein-Barr virus]
gcggcugcugcc

SEQ ID NO: 3974856 - RNA, 12 nt, Human herpesvirus 4 [Epstein-Barr virus]
gcggcugugagc

SEQ ID NO: 3974857 - RNA, 14 nt, Human herpesvirus 4 [Epstein-Barr virus]
gcggcuguggccuc

SEQ ID NO: 3974858 - RNA, 16 nt, Human herpesvirus 4 [Epstein-Barr virus]
gcgggauagcaggacg

SEQ ID NO: 3974859 - RNA, 14 nt, Human herpesvirus 4 [Epstein-Barr virus]
gcgggggccucagc

SEQ ID NO: 3974860 - RNA, 23 nt, Human herpesvirus 4 [Epstein-Barr virus]
gcggguggaggagcuccgugagc

SEQ ID NO: 3974861 - RNA, 14 nt, Human herpesvirus 4 [Epstein-Barr virus]
gcggugccugugga

SEQ ID NO: 3974862 - RNA, 13 nt, Human herpesvirus 4 [Epstein-Barr virus]
gcgucucauuccc

SEQ ID NO: 3974863 - RNA, 23 nt, Human herpesvirus 4 [Epstein-Barr virus]
gcgugacggcauucgugagcagg

SEQ ID NO: 3974864 - RNA, 12 nt, Human herpesvirus 4 [Epstein-Barr virus]
gcguggguguca

SEQ ID NO: 3974865 - RNA, 14 nt, Human herpesvirus 4 [Epstein-Barr virus]
gcguugccagacuc

SEQ ID NO: 3974866 - RNA, 17 nt, Human herpesvirus 4 [Epstein-Barr virus]
gcguuucugcggaucag

SEQ ID NO: 3974867 - RNA, 14 nt, Human herpesvirus 4 [Epstein-Barr virus]
gcuaauagcuuucu

SEQ ID NO: 3974868 - RNA, 16 nt, Human herpesvirus 4 [Epstein-Barr virus]
gcuaaucgcugguggc

SEQ ID NO: 3974869 - RNA, 18 nt, Human herpesvirus 4 [Epstein-Barr virus]
gcuaaucgcugguggcag

SEQ ID NO: 3974870 - RNA, 16 nt, Human herpesvirus 4 [Epstein-Barr virus]
gcuacaaacacgggcc

SEQ ID NO: 3974871 - RNA, 18 nt, Human herpesvirus 4 [Epstein-Barr virus]
gcuaguugguccaggguc

SEQ ID NO: 3974872 - RNA, 18 nt, Human herpesvirus 4 [Epstein-Barr virus]
gcuauugccgccucgugu

SEQ ID NO: 3974873 - RNA, 20 nt, Human herpesvirus 4 [Epstein-Barr virus]
gcucaaggcagucuccaccu

SEQ ID NO: 3974874 - RNA, 16 nt, Human herpesvirus 4 [Epstein-Barr virus]
gcucaccccugugcag

SEQ ID NO: 3974875 - RNA, 17 nt, Human herpesvirus 4 [Epstein-Barr virus]
gcucaggaucagggcca

SEQ ID NO: 3974876 - RNA, 17 nt, Human herpesvirus 4 [Epstein-Barr virus]
gcuccaccagcuucuca

SEQ ID NO: 3974877 - RNA, 16 nt, Human herpesvirus 4 [Epstein-Barr virus]
gcuccagggccagcaa

SEQ ID NO: 3974878 - RNA, 17 nt, Human herpesvirus 4 [Epstein-Barr virus]
gcuccagugccuccgcc

SEQ ID NO: 3974879 - RNA, 14 nt, Human herpesvirus 4 [Epstein-Barr virus]
gcucccgccucagg

SEQ ID NO: 3974880 - RNA, 16 nt, Human herpesvirus 4 [Epstein-Barr virus]
gcuccgagagcuccgc

SEQ ID NO: 3974881 - RNA, 19 nt, Human herpesvirus 4 [Epstein-Barr virus]
gcuccguccuuguccagga

SEQ ID NO: 3974882 - RNA, 16 nt, Human herpesvirus 4 [Epstein-Barr virus]
gcuccgugagcaggag

SEQ ID NO: 3974883 - RNA, 22 nt, Human herpesvirus 4 [Epstein-Barr virus]
gcuccgugagcaggagcuugag

SEQ ID NO: 3974884 - RNA, 19 nt, Human herpesvirus 4 [Epstein-Barr virus]
gcucgaccgggaugugaug

SEQ ID NO: 3974885 - RNA, 17 nt, Human herpesvirus 4 [Epstein-Barr virus]
gcucgcagcuggaggaa

SEQ ID NO: 3974886 - RNA, 16 nt, Human herpesvirus 4 [Epstein-Barr virus]
gcucggggcuggggag

SEQ ID NO: 3974887 - RNA, 18 nt, Human herpesvirus 4 [Epstein-Barr virus]
gcucgucguucaggaaca

SEQ ID NO: 3974888 - RNA, 16 nt, Human herpesvirus 4 [Epstein-Barr virus]
gcucucguugccaaaa

SEQ ID NO: 3974889 - RNA, 13 nt, Human herpesvirus 4 [Epstein-Barr virus]
gcucucucuggag

SEQ ID NO: 3974890 - RNA, 22 nt, Human herpesvirus 4 [Epstein-Barr virus]
gcucuggucgcccccucugccu

SEQ ID NO: 3974891 - RNA, 14 nt, Human herpesvirus 4 [Epstein-Barr virus]
gcucugucaguuau

SEQ ID NO: 3974892 - RNA, 18 nt, Human herpesvirus 4 [Epstein-Barr virus]
gcugacccuucugcugcu

SEQ ID NO: 3974893 - RNA, 17 nt, Human herpesvirus 4 [Epstein-Barr virus]
gcugaccggcucggcca

SEQ ID NO: 3974894 - RNA, 23 nt, Human herpesvirus 4 [Epstein-Barr virus]
gcugaggggcaaccugaacuuua

SEQ ID NO: 3974895 - RNA, 15 nt, Human herpesvirus 4 [Epstein-Barr virus]
gcugaugugcugccc

SEQ ID NO: 3974896 - RNA, 13 nt, Human herpesvirus 4 [Epstein-Barr virus]
agacuccugccug

SEQ ID NO: 3974897 - RNA, 14 nt, Human herpesvirus 4 [Epstein-Barr virus]
agagacaaggcagg

SEQ ID NO: 3974898 - RNA, 11 nt, Human herpesvirus 4 [Epstein-Barr virus]
agagagccaca

SEQ ID NO: 3974899 - RNA, 17 nt, Human herpesvirus 4 [Epstein-Barr virus]
agagagcggcugugagc

SEQ ID NO: 3974900 - RNA, 13 nt, Human herpesvirus 4 [Epstein-Barr virus]
agagaggccucug

SEQ ID NO: 3974901 - RNA, 23 nt, Human herpesvirus 4 [Epstein-Barr virus]
agagaggccucugccgcgcugcu

SEQ ID NO: 3974902 - RNA, 14 nt, Human herpesvirus 4 [Epstein-Barr virus]
aggcuaugaagaag

SEQ ID NO: 3974903 - RNA, 14 nt, Human herpesvirus 4 [Epstein-Barr virus]
aggcugcgccugag

SEQ ID NO: 3974904 - RNA, 16 nt, Human herpesvirus 4 [Epstein-Barr virus]
aggcugcgccugagcu

SEQ ID NO: 3974905 - RNA, 14 nt, Human herpesvirus 4 [Epstein-Barr virus]
aggcuucccgccua

SEQ ID NO: 3974906 - RNA, 21 nt, Human herpesvirus 4 [Epstein-Barr virus]
agggacccacgguggaacagg

SEQ ID NO: 3974907 - RNA, 13 nt, Human herpesvirus 4 [Epstein-Barr virus]
agggaggccuggg

SEQ ID NO: 3974908 - RNA, 22 nt, Human herpesvirus 4 [Epstein-Barr virus]
agggauaugaaggugucauuga

SEQ ID NO: 3974909 - RNA, 19 nt, Human herpesvirus 4 [Epstein-Barr virus]
agggaugggcuugauggcc

SEQ ID NO: 3974910 - RNA, 12 nt, Human herpesvirus 4 [Epstein-Barr virus]
agggcagacugc

SEQ ID NO: 3974911 - RNA, 13 nt, Human herpesvirus 4 [Epstein-Barr virus]
agggcagagaggc

SEQ ID NO: 3974912 - RNA, 14 nt, Human herpesvirus 4 [Epstein-Barr virus]
agggcaugcuuggg

SEQ ID NO: 3974913 - RNA, 23 nt, Human herpesvirus 4 [Epstein-Barr virus]
agggccacggcgugccagaggcc

SEQ ID NO: 3974914 - RNA, 19 nt, Human herpesvirus 4 [Epstein-Barr virus]
agggccgucacuccagcca

SEQ ID NO: 3974915 - RNA, 16 nt, Human herpesvirus 4 [Epstein-Barr virus]
agggcucaccagggag

SEQ ID NO: 3974916 - RNA, 10 nt, Human herpesvirus 4 [Epstein-Barr virus]
aggggcggca

SEQ ID NO: 3974917 - RNA, 17 nt, Human herpesvirus 4 [Epstein-Barr virus]
aggggcucgaauaugau

SEQ ID NO: 3974918 - RNA, 19 nt, Human herpesvirus 4 [Epstein-Barr virus]
agggggacaagagcacaaa

SEQ ID NO: 3974919 - RNA, 15 nt, Human herpesvirus 4 [Epstein-Barr virus]
aggggguacggagag

SEQ ID NO: 3974920 - RNA, 16 nt, Human herpesvirus 4 [Epstein-Barr virus]
aggucaggucccccuc

SEQ ID NO: 3974921 - RNA, 12 nt, Human herpesvirus 4 [Epstein-Barr virus]
agguccgcuccu

SEQ ID NO: 3974922 - RNA, 20 nt, Human herpesvirus 4 [Epstein-Barr virus]
aggugguuauuuugggccag

SEQ ID NO: 3974923 - RNA, 19 nt, Human herpesvirus 4 [Epstein-Barr virus]
agguguccagcgcucuggu

SEQ ID NO: 3974924 - RNA, 20 nt, Human herpesvirus 4 [Epstein-Barr virus]
aguaacagguaaucucuggu

SEQ ID NO: 3974925 - RNA, 22 nt, Human herpesvirus 4 [Epstein-Barr virus]
aguaaccacauauacuggagau

SEQ ID NO: 3974926 - RNA, 15 nt, Human herpesvirus 4 [Epstein-Barr virus]
aguaaggccgcugcc

SEQ ID NO: 3974927 - RNA, 19 nt, Human herpesvirus 4 [Epstein-Barr virus]
aguaggcacaucuggaccu

SEQ ID NO: 3974928 - RNA, 17 nt, Human herpesvirus 4 [Epstein-Barr virus]
aguaggugccuccagag

SEQ ID NO: 3974929 - RNA, 22 nt, Human herpesvirus 4 [Epstein-Barr virus]
agucagccuugcccccgccagc

SEQ ID NO: 3974930 - RNA, 17 nt, Human herpesvirus 4 [Epstein-Barr virus]
aguccaggggccacaca

SEQ ID NO: 3974931 - RNA, 15 nt, Human herpesvirus 4 [Epstein-Barr virus]
agucccgagcggccu

SEQ ID NO: 3974932 - RNA, 14 nt, Human herpesvirus 4 [Epstein-Barr virus]
aguccucauggcag

SEQ ID NO: 3974933 - RNA, 12 nt, Human herpesvirus 4 [Epstein-Barr virus]
agucgcugcugc

SEQ ID NO: 3974934 - RNA, 13 nt, Human herpesvirus 4 [Epstein-Barr virus]
agucugcuggacu

SEQ ID NO: 3974935 - RNA, 21 nt, Human herpesvirus 4 [Epstein-Barr virus]
agugcauggauauagcucugc

SEQ ID NO: 3974936 - RNA, 18 nt, Human herpesvirus 4 [Epstein-Barr virus]
agugcccuggaggccuca

SEQ ID NO: 3974937 - RNA, 14 nt, Human herpesvirus 4 [Epstein-Barr virus]
agugcgaggaacug

SEQ ID NO: 3974938 - RNA, 18 nt, Human herpesvirus 4 [Epstein-Barr virus]
agugcuaugaccaugccc

SEQ ID NO: 3974939 - RNA, 21 nt, Human herpesvirus 4 [Epstein-Barr virus]
aguggccgucuggcagggggc

SEQ ID NO: 3974940 - RNA, 19 nt, Human herpesvirus 4 [Epstein-Barr virus]
agugggcuucgggggccug

SEQ ID NO: 3974941 - RNA, 16 nt, Human herpesvirus 4 [Epstein-Barr virus]
aguucuacaaugccag

SEQ ID NO: 3974942 - RNA, 22 nt, Human herpesvirus 4 [Epstein-Barr virus]
aguugacggacgugcccagcuc

SEQ ID NO: 3974943 - RNA, 15 nt, Human herpesvirus 4 [Epstein-Barr virus]
aguuggucaggcuga

SEQ ID NO: 3974944 - RNA, 16 nt, Human herpesvirus 4 [Epstein-Barr virus]
aguuuaccugguacau

SEQ ID NO: 3974945 - RNA, 13 nt, Human herpesvirus 4 [Epstein-Barr virus]
auaaaaguacaga

SEQ ID NO: 3974946 - RNA, 15 nt, Human herpesvirus 4 [Epstein-Barr virus]
auacccagagcaaaa

SEQ ID NO: 3974947 - RNA, 20 nt, Human herpesvirus 4 [Epstein-Barr virus]
auaccuauagauccugggcc

SEQ ID NO: 3974948 - RNA, 20 nt, Human herpesvirus 4 [Epstein-Barr virus]
auacgcccgacaauaaaguu

SEQ ID NO: 3974949 - RNA, 19 nt, Human herpesvirus 4 [Epstein-Barr virus]
auacuucucuagagccagg

SEQ ID NO: 3974950 - RNA, 20 nt, Human herpesvirus 4 [Epstein-Barr virus]
auagagaugguguccggaga

SEQ ID NO: 3974951 - RNA, 22 nt, Human herpesvirus 4 [Epstein-Barr virus]
auagcaggacggggggcuggcg

SEQ ID NO: 3974952 - RNA, 23 nt, Human herpesvirus 4 [Epstein-Barr virus]
auagcaggucuccagagggcaga

SEQ ID NO: 3974953 - RNA, 15 nt, Human herpesvirus 4 [Epstein-Barr virus]
auagccggccaggca

SEQ ID NO: 3974954 - RNA, 15 nt, Human herpesvirus 4 [Epstein-Barr virus]
auauccuagagggac

SEQ ID NO: 3974955 - RNA, 13 nt, Human herpesvirus 4 [Epstein-Barr virus]
auaugcucucgca

SEQ ID NO: 3974956 - RNA, 18 nt, Human herpesvirus 4 [Epstein-Barr virus]
aucacccauggccaggcu

SEQ ID NO: 3974957 - RNA, 19 nt, Human herpesvirus 4 [Epstein-Barr virus]
aucagggccaagacauaga

SEQ ID NO: 3974958 - RNA, 15 nt, Human herpesvirus 4 [Epstein-Barr virus]
aucaucgggaaaggc

SEQ ID NO: 3974959 - RNA, 16 nt, Human herpesvirus 4 [Epstein-Barr virus]
aucaucgggaaaggcg

SEQ ID NO: 3974960 - RNA, 22 nt, Human herpesvirus 4 [Epstein-Barr virus]
aucaucucgcuggcucgccuca

SEQ ID NO: 3974961 - RNA, 21 nt, Human herpesvirus 4 [Epstein-Barr virus]
auccacagccccacucuugcc

SEQ ID NO: 3974962 - RNA, 19 nt, Human herpesvirus 4 [Epstein-Barr virus]
auccaguaugccugccugu

SEQ ID NO: 3974963 - RNA, 21 nt, Human herpesvirus 4 [Epstein-Barr virus]
auccagugcgucagcaacugc

SEQ ID NO: 3974964 - RNA, 22 nt, Human herpesvirus 4 [Epstein-Barr virus]
aucccaauucacaucucaggga

SEQ ID NO: 3974965 - RNA, 15 nt, Human herpesvirus 4 [Epstein-Barr virus]
aucccaggccucagc

SEQ ID NO: 3974966 - RNA, 17 nt, Human herpesvirus 4 [Epstein-Barr virus]
aucccccggacaccaga

SEQ ID NO: 3974967 - RNA, 13 nt, Human herpesvirus 4 [Epstein-Barr virus]
auccgccaggacc

SEQ ID NO: 3974968 - RNA, 15 nt, Human herpesvirus 4 [Epstein-Barr virus]
auccuaggcacggcc

SEQ ID NO: 3974969 - RNA, 11 nt, Human herpesvirus 4 [Epstein-Barr virus]
aucuggcucuc

SEQ ID NO: 3974970 - RNA, 15 nt, Human herpesvirus 4 [Epstein-Barr virus]
aucugggcagccaga

SEQ ID NO: 3974971 - RNA, 14 nt, Human herpesvirus 4 [Epstein-Barr virus]
aucugggcugggac

SEQ ID NO: 3974972 - RNA, 11 nt, Human herpesvirus 4 [Epstein-Barr virus]
aucuguugacg

SEQ ID NO: 3974973 - RNA, 17 nt, Human herpesvirus 4 [Epstein-Barr virus]
aucuuugcugaagauga

SEQ ID NO: 3974974 - RNA, 13 nt, Human herpesvirus 4 [Epstein-Barr virus]
augaacccugggg

SEQ ID NO: 3974975 - RNA, 14 nt, Human herpesvirus 4 [Epstein-Barr virus]
augacccacuccag

SEQ ID NO: 3974976 - RNA, 14 nt, Human herpesvirus 4 [Epstein-Barr virus]
augaggagcaggca

SEQ ID NO: 3974977 - RNA, 21 nt, Human herpesvirus 4 [Epstein-Barr virus]
augauagcagaagacuccugc

SEQ ID NO: 3974978 - RNA, 13 nt, Human herpesvirus 4 [Epstein-Barr virus]
augauccuguaca

SEQ ID NO: 3974979 - RNA, 16 nt, Human herpesvirus 4 [Epstein-Barr virus]
augcagggugcacaga

SEQ ID NO: 3974980 - RNA, 23 nt, Human herpesvirus 4 [Epstein-Barr virus]
augcccccuuuguggugggacug

SEQ ID NO: 3974981 - RNA, 15 nt, Human herpesvirus 4 [Epstein-Barr virus]
augcgauucugaacu

SEQ ID NO: 3974982 - RNA, 16 nt, Human herpesvirus 4 [Epstein-Barr virus]
augcgcgcccugucac

SEQ ID NO: 3974983 - RNA, 17 nt, Human herpesvirus 4 [Epstein-Barr virus]
augcgugaccaccuggc

SEQ ID NO: 3974984 - RNA, 18 nt, Human herpesvirus 4 [Epstein-Barr virus]
augcucagaccccggguu

SEQ ID NO: 3974985 - RNA, 18 nt, Human herpesvirus 4 [Epstein-Barr virus]
augcugccgcuacugcug

SEQ ID NO: 3974986 - RNA, 21 nt, Human herpesvirus 4 [Epstein-Barr virus]
auggacgaggacggggaagag

SEQ ID NO: 3974987 - RNA, 20 nt, Human herpesvirus 4 [Epstein-Barr virus]
uacagcaggauuccugauuu

SEQ ID NO: 3974988 - RNA, 17 nt, Human herpesvirus 4 [Epstein-Barr virus]
uacagugguucuccuga

SEQ ID NO: 3974989 - RNA, 14 nt, Human herpesvirus 4 [Epstein-Barr virus]
uaccaggcauacag

SEQ ID NO: 3974990 - RNA, 14 nt, Human herpesvirus 4 [Epstein-Barr virus]
uacccaacagucuu

SEQ ID NO: 3974991 - RNA, 21 nt, Human herpesvirus 4 [Epstein-Barr virus]
uacccaauuuguucugcaugu

SEQ ID NO: 3974992 - RNA, 18 nt, Human herpesvirus 4 [Epstein-Barr virus]
uacccugcauggccaggc

SEQ ID NO: 3974993 - RNA, 15 nt, Human herpesvirus 4 [Epstein-Barr virus]
uaccgagauguacau

SEQ ID NO: 3974994 - RNA, 18 nt, Human herpesvirus 4 [Epstein-Barr virus]
uaccgaugauucuggcca

SEQ ID NO: 3974995 - RNA, 19 nt, Human herpesvirus 4 [Epstein-Barr virus]
uaccucuguuccuucugcu

SEQ ID NO: 3974996 - RNA, 18 nt, Human herpesvirus 4 [Epstein-Barr virus]
uacgccgccgccagcagc

SEQ ID NO: 3974997 - RNA, 15 nt, Human herpesvirus 4 [Epstein-Barr virus]
uacgcgacugagggg

SEQ ID NO: 3974998 - RNA, 17 nt, Human herpesvirus 4 [Epstein-Barr virus]
uacguguccauguacaa

SEQ ID NO: 3974999 - RNA, 16 nt, Human herpesvirus 4 [Epstein-Barr virus]
uacuaauggaauauua

SEQ ID NO: 3975000 - RNA, 17 nt, Human herpesvirus 4 [Epstein-Barr virus]
uacuccuggcauacuuu

SEQ ID NO: 3975001 - RNA, 19 nt, Human herpesvirus 4 [Epstein-Barr virus]
uacugcgaugagggccuuc

SEQ ID NO: 3975002 - RNA, 11 nt, Human herpesvirus 4 [Epstein-Barr virus]
uacugcugcua

SEQ ID NO: 3975003 - RNA, 19 nt, Human herpesvirus 4 [Epstein-Barr virus]
uacuggcuuucguccucug

SEQ ID NO: 3975004 - RNA, 15 nt, Human herpesvirus 4 [Epstein-Barr virus]
uacuucuuuugcucu

SEQ ID NO: 3975005 - RNA, 20 nt, Human herpesvirus 4 [Epstein-Barr virus]
uagagugccgggcccgggac

SEQ ID NO: 3975006 - RNA, 23 nt, Human herpesvirus 4 [Epstein-Barr virus]
uagauaaauuaagagucccuccu

SEQ ID NO: 3975007 - RNA, 17 nt, Human herpesvirus 4 [Epstein-Barr virus]
uagaugaggagcaggca

SEQ ID NO: 3975008 - RNA, 14 nt, Human herpesvirus 4 [Epstein-Barr virus]
uagaugcugccgcu

SEQ ID NO: 3975009 - RNA, 19 nt, Human herpesvirus 4 [Epstein-Barr virus]
uagccaccguggccaggcc

SEQ ID NO: 3975010 - RNA, 15 nt, Human herpesvirus 4 [Epstein-Barr virus]
uagcccacuccccuc

SEQ ID NO: 3975011 - RNA, 20 nt, Human herpesvirus 4 [Epstein-Barr virus]
uagcgacauuuaccugguga

SEQ ID NO: 3975012 - RNA, 18 nt, Human herpesvirus 4 [Epstein-Barr virus]
uagggacagacccugggc

SEQ ID NO: 3975013 - RNA, 22 nt, Human herpesvirus 4 [Epstein-Barr virus]
uaggggcgaagggugggggugg

SEQ ID NO: 3975014 - RNA, 16 nt, Human herpesvirus 4 [Epstein-Barr virus]
uaguuccaggugacag

SEQ ID NO: 3975015 - RNA, 18 nt, Human herpesvirus 4 [Epstein-Barr virus]
uaucacccauggccaggc

SEQ ID NO: 3975016 - RNA, 17 nt, Human herpesvirus 4 [Epstein-Barr virus]
uaucccugcugucucug

SEQ ID NO: 3975017 - RNA, 14 nt, Human herpesvirus 4 [Epstein-Barr virus]
uaugaaggcuggca

SEQ ID NO: 3975018 - RNA, 18 nt, Human herpesvirus 4 [Epstein-Barr virus]
uaugcaugagccacaggc

SEQ ID NO: 3975019 - RNA, 22 nt, Human herpesvirus 4 [Epstein-Barr virus]
uauuaauaaacaauuacagaua

SEQ ID NO: 3975020 - RNA, 20 nt, Human herpesvirus 4 [Epstein-Barr virus]
uauuaauaaauaucuuccug

SEQ ID NO: 3975021 - RNA, 16 nt, Human herpesvirus 4 [Epstein-Barr virus]
uauugaaaccacgccu

SEQ ID NO: 3975022 - RNA, 23 nt, Human herpesvirus 4 [Epstein-Barr virus]
ucaacaagcuaccgaugauucug

SEQ ID NO: 3975023 - RNA, 20 nt, Human herpesvirus 4 [Epstein-Barr virus]
ucaaccugauucccccugcu

SEQ ID NO: 3975024 - RNA, 21 nt, Human herpesvirus 4 [Epstein-Barr virus]
ucaaccugauucccccugcuc

SEQ ID NO: 3975025 - RNA, 16 nt, Human herpesvirus 4 [Epstein-Barr virus]
ucugcagagagccaca

SEQ ID NO: 3975026 - RNA, 22 nt, Human herpesvirus 4 [Epstein-Barr virus]
ucugcgccagccccgcccuccc

SEQ ID NO: 3975027 - RNA, 17 nt, Human herpesvirus 4 [Epstein-Barr virus]
ucugcugccaugcacgg

SEQ ID NO: 3975028 - RNA, 20 nt, Human herpesvirus 4 [Epstein-Barr virus]
ucugcuucgcguccuuuggg

SEQ ID NO: 3975029 - RNA, 13 nt, Human herpesvirus 4 [Epstein-Barr virus]
ucuggcacugcua

SEQ ID NO: 3975030 - RNA, 23 nt, Human herpesvirus 4 [Epstein-Barr virus]
ucugggcauaaauucuccugccu

SEQ ID NO: 3975031 - RNA, 16 nt, Human herpesvirus 4 [Epstein-Barr virus]
ucuuccccugcagagu

SEQ ID NO: 3975032 - RNA, 14 nt, Human herpesvirus 4 [Epstein-Barr virus]
ucuucucugacaaa

SEQ ID NO: 3975033 - RNA, 12 nt, Human herpesvirus 4 [Epstein-Barr virus]
ucuucugaagga

SEQ ID NO: 3975034 - RNA, 18 nt, Human herpesvirus 4 [Epstein-Barr virus]
ucuugagcgccguggcca

SEQ ID NO: 3975035 - RNA, 19 nt, Human herpesvirus 4 [Epstein-Barr virus]
ucuugauagggauccgcua

SEQ ID NO: 3975036 - RNA, 12 nt, Human herpesvirus 4 [Epstein-Barr virus]
ucuuugcuucac

SEQ ID NO: 3975037 - RNA, 17 nt, Human herpesvirus 4 [Epstein-Barr virus]
ugaacaucucaucccca

SEQ ID NO: 3975038 - RNA, 15 nt, Human herpesvirus 4 [Epstein-Barr virus]
ugaacuuuaacauug

SEQ ID NO: 3975039 - RNA, 16 nt, Human herpesvirus 4 [Epstein-Barr virus]
ugaagauccaacuccg

SEQ ID NO: 3975040 - RNA, 18 nt, Human herpesvirus 4 [Epstein-Barr virus]
ugaagauggccucaaagu

SEQ ID NO: 3975041 - RNA, 18 nt, Human herpesvirus 4 [Epstein-Barr virus]
ugaagcaacccccggcuc

SEQ ID NO: 3975042 - RNA, 11 nt, Human herpesvirus 4 [Epstein-Barr virus]
ugaccaacaug

SEQ ID NO: 3975043 - RNA, 18 nt, Human herpesvirus 4 [Epstein-Barr virus]
ugacuggcagaaaggcug

SEQ ID NO: 3975044 - RNA, 23 nt, Human herpesvirus 4 [Epstein-Barr virus]
ugagaauaaggcucugaagcaac

SEQ ID NO: 3975045 - RNA, 12 nt, Human herpesvirus 4 [Epstein-Barr virus]
ugagaaugccaa

SEQ ID NO: 3975046 - RNA, 20 nt, Human herpesvirus 4 [Epstein-Barr virus]
ugagagccaaaaauuugaua

SEQ ID NO: 3975047 - RNA, 17 nt, Human herpesvirus 4 [Epstein-Barr virus]
ugagcccaccugucuga

SEQ ID NO: 3975048 - RNA, 14 nt, Human herpesvirus 4 [Epstein-Barr virus]
ugagcuauguggaa

SEQ ID NO: 3975049 - RNA, 15 nt, Human herpesvirus 4 [Epstein-Barr virus]
ugaggaaaggccuuu

SEQ ID NO: 3975050 - RNA, 13 nt, Human herpesvirus 4 [Epstein-Barr virus]
ugaggacucugaa

SEQ ID NO: 3975051 - RNA, 15 nt, Human herpesvirus 4 [Epstein-Barr virus]
ugaggcugaugaugg

SEQ ID NO: 3975052 - RNA, 21 nt, Human herpesvirus 4 [Epstein-Barr virus]
ugaggcugaugauggccacga

SEQ ID NO: 3975053 - RNA, 22 nt, Human herpesvirus 4 [Epstein-Barr virus]
ugagggacguaucugggcacuu

SEQ ID NO: 3975054 - RNA, 23 nt, Human herpesvirus 4 [Epstein-Barr virus]
ugagguaaaaagcgggccugagu

SEQ ID NO: 3975055 - RNA, 13 nt, Human herpesvirus 4 [Epstein-Barr virus]
ugaggugggcuga

SEQ ID NO: 3975056 - RNA, 15 nt, Human herpesvirus 4 [Epstein-Barr virus]
ugauaaugucuucaa

SEQ ID NO: 3975057 - RNA, 13 nt, Human herpesvirus 4 [Epstein-Barr virus]
ugcaagcagcacc

SEQ ID NO: 3975058 - RNA, 21 nt, Human herpesvirus 4 [Epstein-Barr virus]
ugcaauaaauaaaaguacaga

SEQ ID NO: 3975059 - RNA, 14 nt, Human herpesvirus 4 [Epstein-Barr virus]
ugcaaugcccaccc

SEQ ID NO: 3975060 - RNA, 16 nt, Human herpesvirus 4 [Epstein-Barr virus]
ugcaccagcuccaggg

SEQ ID NO: 3975061 - RNA, 21 nt, Human herpesvirus 4 [Epstein-Barr virus]
ugcagaggaugagaccagugg

SEQ ID NO: 3975062 - RNA, 18 nt, Human herpesvirus 4 [Epstein-Barr virus]
ugcagcaacgcccaggga

SEQ ID NO: 3975063 - RNA, 15 nt, Human herpesvirus 4 [Epstein-Barr virus]
ugcagcgcaucaggc

SEQ ID NO: 3975064 - RNA, 21 nt, Human herpesvirus 4 [Epstein-Barr virus]
ugcaucuuaccccuggcuucc

SEQ ID NO: 3975065 - RNA, 17 nt, Human herpesvirus 4 [Epstein-Barr virus]
ugccaaagagccagauc

SEQ ID NO: 3975066 - RNA, 21 nt, Human herpesvirus 4 [Epstein-Barr virus]
ugccacauguuuucuggacac

SEQ ID NO: 3975067 - RNA, 12 nt, Human herpesvirus 4 [Epstein-Barr virus]
ugccagaggccc

SEQ ID NO: 3975068 - RNA, 16 nt, Human herpesvirus 4 [Epstein-Barr virus]
ugccaggccugucauu

SEQ ID NO: 3975069 - RNA, 22 nt, Human herpesvirus 4 [Epstein-Barr virus]
ugccauuguuuaccgccaucgc

SEQ ID NO: 3975070 - RNA, 17 nt, Human herpesvirus 4 [Epstein-Barr virus]
ugcccauggaaugcuca

SEQ ID NO: 3975071 - RNA, 21 nt, Human herpesvirus 4 [Epstein-Barr virus]
ugcccccgccagcgccuccuc

SEQ ID NO: 3975072 - RNA, 22 nt, Human herpesvirus 4 [Epstein-Barr virus]
ugcccccuuuguggugggacug

SEQ ID NO: 3975073 - RNA, 22 nt, Human herpesvirus 4 [Epstein-Barr virus]
ugccccggggcuaaccaaggac

SEQ ID NO: 3975074 - RNA, 21 nt, Human herpesvirus 4 [Epstein-Barr virus]
ugccccgguccccccagaagc

SEQ ID NO: 3975075 - RNA, 21 nt, Human herpesvirus 4 [Epstein-Barr virus]
ugcccuccuccacccagcagc

SEQ ID NO: 3975076 - RNA, 18 nt, Human herpesvirus 4 [Epstein-Barr virus]
ugccgugguugggcagaa

SEQ ID NO: 3975077 - RNA, 19 nt, Human herpesvirus 4 [Epstein-Barr virus]
ugccucagauagccggacc

SEQ ID NO: 3975078 - RNA, 23 nt, Human herpesvirus 4 [Epstein-Barr virus]
cuggcacugcuagcgucacugau

SEQ ID NO: 3975079 - RNA, 13 nt, Human herpesvirus 4 [Epstein-Barr virus]
cuggccagcaccc

SEQ ID NO: 3975080 - RNA, 15 nt, Human herpesvirus 4 [Epstein-Barr virus]
cuggccgccguggcc

SEQ ID NO: 3975081 - RNA, 20 nt, Human herpesvirus 4 [Epstein-Barr virus]
cuggccggccgcccccugac

SEQ ID NO: 3975082 - RNA, 16 nt, Human herpesvirus 4 [Epstein-Barr virus]
cuggccguggccaggu

SEQ ID NO: 3975083 - RNA, 13 nt, Human herpesvirus 4 [Epstein-Barr virus]
cuggccugccugg

SEQ ID NO: 3975084 - RNA, 9 nt, Human herpesvirus 4 [Epstein-Barr virus]
cuggcucuc

SEQ ID NO: 3975085 - RNA, 14 nt, Human herpesvirus 4 [Epstein-Barr virus]
cuggcugugcugac

SEQ ID NO: 3975086 - RNA, 17 nt, Human herpesvirus 4 [Epstein-Barr virus]
cuggcuucugugacuuu

SEQ ID NO: 3975087 - RNA, 12 nt, Human herpesvirus 4 [Epstein-Barr virus]
cugggaggugcu

SEQ ID NO: 3975088 - RNA, 20 nt, Human herpesvirus 4 [Epstein-Barr virus]
cugggcauaaauucuccugc

SEQ ID NO: 3975089 - RNA, 21 nt, Human herpesvirus 4 [Epstein-Barr virus]
cugggcauaaauucuccugcc

SEQ ID NO: 3975090 - RNA, 22 nt, Human herpesvirus 4 [Epstein-Barr virus]
cugggcugccccgggcccaccc

SEQ ID NO: 3975091 - RNA, 16 nt, Human herpesvirus 4 [Epstein-Barr virus]
cuggggcuggccugcc

SEQ ID NO: 3975092 - RNA, 14 nt, Human herpesvirus 4 [Epstein-Barr virus]
cuggggcugguggc

SEQ ID NO: 3975093 - RNA, 20 nt, Human herpesvirus 4 [Epstein-Barr virus]
cuggucuccuuguugaccuc

SEQ ID NO: 3975094 - RNA, 16 nt, Human herpesvirus 4 [Epstein-Barr virus]
cuggucuuuuaugagc

SEQ ID NO: 3975095 - RNA, 22 nt, Human herpesvirus 4 [Epstein-Barr virus]
cuguacgccgccgccagcagcc

SEQ ID NO: 3975096 - RNA, 21 nt, Human herpesvirus 4 [Epstein-Barr virus]
cuguacuugggauugcaacac

SEQ ID NO: 3975097 - RNA, 19 nt, Human herpesvirus 4 [Epstein-Barr virus]
cuguaguggccuucucuga

SEQ ID NO: 3975098 - RNA, 15 nt, Human herpesvirus 4 [Epstein-Barr virus]
cuguauuuacaaaca

SEQ ID NO: 3975099 - RNA, 15 nt, Human herpesvirus 4 [Epstein-Barr virus]
cugucagacacucca

SEQ ID NO: 3975100 - RNA, 23 nt, Human herpesvirus 4 [Epstein-Barr virus]
cugucauucuaucaauuaaacaa

SEQ ID NO: 3975101 - RNA, 15 nt, Human herpesvirus 4 [Epstein-Barr virus]
cuguccuugucugcu

SEQ ID NO: 3975102 - RNA, 19 nt, Human herpesvirus 4 [Epstein-Barr virus]
cuguccuugucugcugcca

SEQ ID NO: 3975103 - RNA, 18 nt, Human herpesvirus 4 [Epstein-Barr virus]
cugugcagggacgaggac

SEQ ID NO: 3975104 - RNA, 16 nt, Human herpesvirus 4 [Epstein-Barr virus]
cugugcugacccuucu

SEQ ID NO: 3975105 - RNA, 14 nt, Human herpesvirus 4 [Epstein-Barr virus]
cugugguugucuuc

SEQ ID NO: 3975106 - RNA, 21 nt, Human herpesvirus 4 [Epstein-Barr virus]
cugugucccacuccaccugcc

SEQ ID NO: 3975107 - RNA, 15 nt, Human herpesvirus 4 [Epstein-Barr virus]
cugugugaccccuca

SEQ ID NO: 3975108 - RNA, 20 nt, Human herpesvirus 4 [Epstein-Barr virus]
cuguucaaacagcagcagca

SEQ ID NO: 3975109 - RNA, 16 nt, Human herpesvirus 4 [Epstein-Barr virus]
cuuagccacacugucu

SEQ ID NO: 3975110 - RNA, 21 nt, Human herpesvirus 4 [Epstein-Barr virus]
cuuauguuucaagcagcucac

SEQ ID NO: 3975111 - RNA, 21 nt, Human herpesvirus 4 [Epstein-Barr virus]
cuucaagauugggugguggca

SEQ ID NO: 3975112 - RNA, 22 nt, Human herpesvirus 4 [Epstein-Barr virus]
cuucagcaguagcuugggaaca

SEQ ID NO: 3975113 - RNA, 18 nt, Human herpesvirus 4 [Epstein-Barr virus]
cuucaggggaaucucugc

SEQ ID NO: 3975114 - RNA, 16 nt, Human herpesvirus 4 [Epstein-Barr virus]
cuuccagagaggcgca

SEQ ID NO: 3975115 - RNA, 9 nt, Human herpesvirus 4 [Epstein-Barr virus]
cuuccuguc

SEQ ID NO: 3975116 - RNA, 18 nt, Human herpesvirus 4 [Epstein-Barr virus]
cuucucuagagccaggcu

SEQ ID NO: 3975117 - RNA, 18 nt, Human herpesvirus 4 [Epstein-Barr virus]
cuucugaaaacugccucc

SEQ ID NO: 3975118 - RNA, 13 nt, Human herpesvirus 4 [Epstein-Barr virus]
cuucugcugcugc

SEQ ID NO: 3975119 - RNA, 16 nt, Human herpesvirus 4 [Epstein-Barr virus]
cuugccaauuggggug

SEQ ID NO: 3975120 - RNA, 22 nt, Human herpesvirus 4 [Epstein-Barr virus]
cuugcguggugcuguccugcug

SEQ ID NO: 3975121 - RNA, 15 nt, Human herpesvirus 4 [Epstein-Barr virus]
cuugcucgcagcugg

SEQ ID NO: 3975122 - RNA, 14 nt, Human herpesvirus 4 [Epstein-Barr virus]
cuugcucucagcac

SEQ ID NO: 3975123 - RNA, 16 nt, Human herpesvirus 4 [Epstein-Barr virus]
cuuggacccugcugcg

SEQ ID NO: 3975124 - RNA, 16 nt, Human herpesvirus 4 [Epstein-Barr virus]
cuuggcagcaguggcc

SEQ ID NO: 3975125 - RNA, 18 nt, Human herpesvirus 4 [Epstein-Barr virus]
cuuggccccuguguacau

SEQ ID NO: 3975126 - RNA, 16 nt, Human herpesvirus 4 [Epstein-Barr virus]
cuuggucaagguguca

SEQ ID NO: 3975127 - RNA, 14 nt, Human herpesvirus 4 [Epstein-Barr virus]
cuugugcuuguacu

SEQ ID NO: 3975128 - RNA, 17 nt, Human herpesvirus 4 [Epstein-Barr virus]
cuugugguucuccugau

SEQ ID NO: 3975129 - RNA, 15 nt, Human herpesvirus 4 [Epstein-Barr virus]
cuuguuucucagaga

SEQ ID NO: 3975130 - RNA, 17 nt, Human herpesvirus 4 [Epstein-Barr virus]
cuuuaaaggggagaugu

SEQ ID NO: 3975131 - RNA, 12 nt, Human herpesvirus 4 [Epstein-Barr virus]
cuuuauaugaaa

SEQ ID NO: 3975132 - RNA, 13 nt, Human herpesvirus 4 [Epstein-Barr virus]
cuuuccaguuccc

SEQ ID NO: 3975133 - RNA, 18 nt, Human herpesvirus 4 [Epstein-Barr virus]
cuuuuacccccuggccac

SEQ ID NO: 3975134 - RNA, 23 nt, Human herpesvirus 4 [Epstein-Barr virus]
cuuuucuccucagucuuugcaau

SEQ ID NO: 3975135 - RNA, 16 nt, Human herpesvirus 4 [Epstein-Barr virus]
gaaaagagagcugaug

SEQ ID NO: 3975136 - RNA, 17 nt, Human herpesvirus 4 [Epstein-Barr virus]
gaaaaucugcuucuccc

SEQ ID NO: 3975137 - RNA, 19 nt, Human herpesvirus 4 [Epstein-Barr virus]
gaaaccacgccugcuucac

SEQ ID NO: 3975138 - RNA, 23 nt, Human herpesvirus 4 [Epstein-Barr virus]
gaaacccaaguuuccuugccauc

SEQ ID NO: 3975139 - RNA, 14 nt, Human herpesvirus 4 [Epstein-Barr virus]
gaaagaggcucugc

SEQ ID NO: 3975140 - RNA, 16 nt, Human herpesvirus 4 [Epstein-Barr virus]
gaacaacugucagaca

SEQ ID NO: 3975141 - RNA, 22 nt, Human herpesvirus 4 [Epstein-Barr virus]
gaacaauuccccggggacaccu

SEQ ID NO: 3975142 - RNA, 20 nt, Human herpesvirus 4 [Epstein-Barr virus]
gaacacggcaccgucagcca

SEQ ID NO: 3975143 - RNA, 17 nt, Human herpesvirus 4 [Epstein-Barr virus]
gaacaggagcaggagca

SEQ ID NO: 3975144 - RNA, 20 nt, Human herpesvirus 4 [Epstein-Barr virus]
gaacaguaaacacugccaua

SEQ ID NO: 3975145 - RNA, 19 nt, Human herpesvirus 4 [Epstein-Barr virus]
gaacaucuggcuggggcau

SEQ ID NO: 3975146 - RNA, 18 nt, Human herpesvirus 4 [Epstein-Barr virus]
gaaccugagccugagcca

SEQ ID NO: 3975147 - RNA, 19 nt, Human herpesvirus 4 [Epstein-Barr virus]
gaacguggagguugucaaa

SEQ ID NO: 3975148 - RNA, 23 nt, Human herpesvirus 4 [Epstein-Barr virus]
gaacucugcccuucagugucugg

SEQ ID NO: 3975149 - RNA, 22 nt, Human herpesvirus 4 [Epstein-Barr virus]
gaacugggaugaacccuggggc

SEQ ID NO: 3975150 - RNA, 13 nt, Human herpesvirus 4 [Epstein-Barr virus]
gaagacgaggaga

SEQ ID NO: 3975151 - RNA, 21 nt, Human herpesvirus 4 [Epstein-Barr virus]
gaagacuguuggguagauggc

SEQ ID NO: 3975152 - RNA, 21 nt, Human herpesvirus 4 [Epstein-Barr virus]
gaagagccgcuccguggcccc

SEQ ID NO: 3975153 - RNA, 16 nt, Human herpesvirus 4 [Epstein-Barr virus]
gaagaguacgugcaga

SEQ ID NO: 3975154 - RNA, 17 nt, Human herpesvirus 4 [Epstein-Barr virus]
gaagauugucacagcug

SEQ ID NO: 3975155 - RNA, 22 nt, Human herpesvirus 4 [Epstein-Barr virus]
gaagcagauagccggccaggca

SEQ ID NO: 3975156 - RNA, 23 nt, Human herpesvirus 4 [Epstein-Barr virus]
gaagcccaagaagaagcccaccu

SEQ ID NO: 3975157 - RNA, 23 nt, Human herpesvirus 4 [Epstein-Barr virus]
gaagcgccgguacuuguuaagga

SEQ ID NO: 3975158 - RNA, 21 nt, Human herpesvirus 4 [Epstein-Barr virus]
gaagcggggcugggugggaga

SEQ ID NO: 3975159 - RNA, 17 nt, Human herpesvirus 4 [Epstein-Barr virus]
gaagcguucuucacugu

SEQ ID NO: 3975160 - RNA, 23 nt, Human herpesvirus 4 [Epstein-Barr virus]
gaagcuacaaacacgggccuggg

SEQ ID NO: 3975161 - RNA, 23 nt, Human herpesvirus 4 [Epstein-Barr virus]
gaagcuagugcagggggcucggc

SEQ ID NO: 3975162 - RNA, 18 nt, Human herpesvirus 4 [Epstein-Barr virus]
gaaggcgcaggggagggg

SEQ ID NO: 3975163 - RNA, 24 nt, Human herpesvirus 4 [Epstein-Barr virus]
gaaggcuccggcggcaguggaccu

SEQ ID NO: 3975164 - RNA, 14 nt, Human herpesvirus 4 [Epstein-Barr virus]
gaaggcuugccaaa

SEQ ID NO: 3975165 - RNA, 19 nt, Human herpesvirus 4 [Epstein-Barr virus]
uggcagccgcggccaucac

SEQ ID NO: 3975166 - RNA, 15 nt, Human herpesvirus 4 [Epstein-Barr virus]
uggcauaauuuccuc

SEQ ID NO: 3975167 - RNA, 22 nt, Human herpesvirus 4 [Epstein-Barr virus]
uggccaccacaucggacgggca

SEQ ID NO: 3975168 - RNA, 15 nt, Human herpesvirus 4 [Epstein-Barr virus]
uggccccuguguaca

SEQ ID NO: 3975169 - RNA, 16 nt, Human herpesvirus 4 [Epstein-Barr virus]
uggccgcggcccaggu

SEQ ID NO: 3975170 - RNA, 17 nt, Human herpesvirus 4 [Epstein-Barr virus]
uggcgaagauucccaac

SEQ ID NO: 3975171 - RNA, 19 nt, Human herpesvirus 4 [Epstein-Barr virus]
uggcgccguuugacuguuu

SEQ ID NO: 3975172 - RNA, 15 nt, Human herpesvirus 4 [Epstein-Barr virus]
uggcggcccagcccg

SEQ ID NO: 3975173 - RNA, 14 nt, Human herpesvirus 4 [Epstein-Barr virus]
uggcuacuugcuca

SEQ ID NO: 3975174 - RNA, 21 nt, Human herpesvirus 4 [Epstein-Barr virus]
uggcuccccauagacucccau

SEQ ID NO: 3975175 - RNA, 18 nt, Human herpesvirus 4 [Epstein-Barr virus]
uggcugccgaagcagaug

SEQ ID NO: 3975176 - RNA, 13 nt, Human herpesvirus 4 [Epstein-Barr virus]
uggcuugcuccac

SEQ ID NO: 3975177 - RNA, 20 nt, Human herpesvirus 4 [Epstein-Barr virus]
uggcuugcuccaccagcuuc

SEQ ID NO: 3975178 - RNA, 17 nt, Human herpesvirus 4 [Epstein-Barr virus]
ugggaacaccgggcagg

SEQ ID NO: 3975179 - RNA, 15 nt, Human herpesvirus 4 [Epstein-Barr virus]
ugggaccuacaggac

SEQ ID NO: 3975180 - RNA, 17 nt, Human herpesvirus 4 [Epstein-Barr virus]
ugggagcaaccagcugg

SEQ ID NO: 3975181 - RNA, 14 nt, Human herpesvirus 4 [Epstein-Barr virus]
ugggagcacauucc

SEQ ID NO: 3975182 - RNA, 17 nt, Human herpesvirus 4 [Epstein-Barr virus]
ugggccacugcaggcug

SEQ ID NO: 3975183 - RNA, 17 nt, Human herpesvirus 4 [Epstein-Barr virus]
ugggccucucuggcugu

SEQ ID NO: 3975184 - RNA, 15 nt, Human herpesvirus 4 [Epstein-Barr virus]
ugggcuugauggccc

SEQ ID NO: 3975185 - RNA, 13 nt, Human herpesvirus 4 [Epstein-Barr virus]
ugggcuuggguca

SEQ ID NO: 3975186 - RNA, 12 nt, Human herpesvirus 4 [Epstein-Barr virus]
uggggcaauggc

SEQ ID NO: 3975187 - RNA, 23 nt, Human herpesvirus 4 [Epstein-Barr virus]
uggggccaccggggaggccaggu

SEQ ID NO: 3975188 - RNA, 12 nt, Human herpesvirus 4 [Epstein-Barr virus]
ugggggcuacag

SEQ ID NO: 3975189 - RNA, 17 nt, Human herpesvirus 4 [Epstein-Barr virus]
ugggguccggucuugca

SEQ ID NO: 3975190 - RNA, 16 nt, Human herpesvirus 4 [Epstein-Barr virus]
ugggugcacagguggc

SEQ ID NO: 3975191 - RNA, 14 nt, Human herpesvirus 4 [Epstein-Barr virus]
uggugcuguccugc

SEQ ID NO: 3975192 - RNA, 20 nt, Human herpesvirus 4 [Epstein-Barr virus]
ugguggccggcagccuggcu

SEQ ID NO: 3975193 - RNA, 21 nt, Human herpesvirus 4 [Epstein-Barr virus]
uggugggcuccuuagacugag

SEQ ID NO: 3975194 - RNA, 22 nt, Human herpesvirus 4 [Epstein-Barr virus]
ugguguauuucuggccaucugu

SEQ ID NO: 3975195 - RNA, 15 nt, Human herpesvirus 4 [Epstein-Barr virus]
ugguucuccugauuu

SEQ ID NO: 3975196 - RNA, 14 nt, Human herpesvirus 4 [Epstein-Barr virus]
ugguugucuuccca

SEQ ID NO: 3975197 - RNA, 15 nt, Human herpesvirus 4 [Epstein-Barr virus]
uguaaccuaugccug

SEQ ID NO: 3975198 - RNA, 23 nt, Human herpesvirus 4 [Epstein-Barr virus]
uguagguguccagcgcucugguc

SEQ ID NO: 3975199 - RNA, 17 nt, Human herpesvirus 4 [Epstein-Barr virus]
uguauaaugacuaugag

SEQ ID NO: 3975200 - RNA, 14 nt, Human herpesvirus 4 [Epstein-Barr virus]
uguccagcagggcc

SEQ ID NO: 3975201 - RNA, 13 nt, Human herpesvirus 4 [Epstein-Barr virus]
ugucccccuagcc

SEQ ID NO: 3975202 - RNA, 21 nt, Human herpesvirus 4 [Epstein-Barr virus]
uguccgcagguggcugcugcc

SEQ ID NO: 3975203 - RNA, 15 nt, Human herpesvirus 4 [Epstein-Barr virus]
uguccugcugaaggg

SEQ ID NO: 3975204 - RNA, 16 nt, Human herpesvirus 4 [Epstein-Barr virus]
ugucgagcaugagcuc

SEQ ID NO: 3975205 - RNA, 18 nt, Human herpesvirus 4 [Epstein-Barr virus]
ugucugugguugucuucc

SEQ ID NO: 3975206 - RNA, 20 nt, Human herpesvirus 4 [Epstein-Barr virus]
ugugcugacccuucugcugc

SEQ ID NO: 3975207 - RNA, 17 nt, Human herpesvirus 4 [Epstein-Barr virus]
uguggugggacugagau

SEQ ID NO: 3975208 - RNA, 16 nt, Human herpesvirus 4 [Epstein-Barr virus]
uguguggcuguagcca

SEQ ID NO: 3975209 - RNA, 20 nt, Human herpesvirus 4 [Epstein-Barr virus]
uguuacccucauugugcuga

SEQ ID NO: 3975210 - RNA, 14 nt, Human herpesvirus 4 [Epstein-Barr virus]
uguuccuucucaug

SEQ ID NO: 3975211 - RNA, 21 nt, Human herpesvirus 4 [Epstein-Barr virus]
uguuucucagagagcauuuca

SEQ ID NO: 3975212 - RNA, 23 nt, Human herpesvirus 4 [Epstein-Barr virus]
uuaacgggaggaaacaggaggag

SEQ ID NO: 3975213 - RNA, 18 nt, Human herpesvirus 4 [Epstein-Barr virus]
uuaagagucccuccucac

SEQ ID NO: 3975214 - RNA, 20 nt, Human herpesvirus 4 [Epstein-Barr virus]
uuagccccagccccuccucu

SEQ ID NO: 3975215 - RNA, 23 nt, Human herpesvirus 4 [Epstein-Barr virus]
uuagccuaauuguguauugcucu

SEQ ID NO: 3975216 - RNA, 15 nt, Human herpesvirus 4 [Epstein-Barr virus]
uuauacccaauuugu

SEQ ID NO: 3975217 - RNA, 22 nt, Human herpesvirus 4 [Epstein-Barr virus]
uuaugagcgauuuuaucacagg

SEQ ID NO: 3975218 - RNA, 17 nt, Human herpesvirus 4 [Epstein-Barr virus]
uucccggacaauacacc

SEQ ID NO: 3975219 - RNA, 14 nt, Human herpesvirus 4 [Epstein-Barr virus]
uucgacugucauuu

SEQ ID NO: 3975220 - RNA, 15 nt, Human herpesvirus 4 [Epstein-Barr virus]
uucuacgaugaggaa

SEQ ID NO: 3975221 - RNA, 12 nt, Human herpesvirus 4 [Epstein-Barr virus]
uucuccugauuu

SEQ ID NO: 3975222 - RNA, 19 nt, Human herpesvirus 4 [Epstein-Barr virus]
uucucuaaucccucuggga

SEQ ID NO: 3975223 - RNA, 21 nt, Human herpesvirus 4 [Epstein-Barr virus]
uucugcauguuauuacugauu

SEQ ID NO: 3975224 - RNA, 15 nt, Human herpesvirus 4 [Epstein-Barr virus]
uucugcugcugcugg

SEQ ID NO: 3975225 - RNA, 16 nt, Human herpesvirus 4 [Epstein-Barr virus]
uucuggaaugcuucua

SEQ ID NO: 3975226 - RNA, 14 nt, Human herpesvirus 4 [Epstein-Barr virus]
uucugucucggccu

SEQ ID NO: 3975227 - RNA, 20 nt, Human herpesvirus 4 [Epstein-Barr virus]
uucuguuaaggcuguugaca

SEQ ID NO: 3975228 - RNA, 19 nt, Human herpesvirus 4 [Epstein-Barr virus]
uugacacccccagcgcugg

SEQ ID NO: 3975229 - RNA, 15 nt, Human herpesvirus 4 [Epstein-Barr virus]
uugaucuucuucucc

SEQ ID NO: 3975230 - RNA, 22 nt, Human herpesvirus 4 [Epstein-Barr virus]
uugcccucuccagcaaccaaug

SEQ ID NO: 3975231 - RNA, 12 nt, Human herpesvirus 4 [Epstein-Barr virus]
uugggggggugg

SEQ ID NO: 3975232 - RNA, 15 nt, Human herpesvirus 4 [Epstein-Barr virus]
uuguaagacaaucac

SEQ ID NO: 3975233 - RNA, 17 nt, Human herpesvirus 4 [Epstein-Barr virus]
uugucccugagauguga

SEQ ID NO: 3975234 - RNA, 20 nt, Human herpesvirus 4 [Epstein-Barr virus]
uugucuacaucccauaccua

SEQ ID NO: 3975235 - RNA, 15 nt, Human herpesvirus 4 [Epstein-Barr virus]
uugugugccuccuca

SEQ ID NO: 3975236 - RNA, 17 nt, Human herpesvirus 4 [Epstein-Barr virus]
uuguuaaggaacacggu

SEQ ID NO: 3975237 - RNA, 16 nt, Human herpesvirus 4 [Epstein-Barr virus]
uuguuaguuuaaacag

SEQ ID NO: 3975238 - RNA, 22 nt, Human herpesvirus 4 [Epstein-Barr virus]
uuuacuaauggaauauuaauaa

SEQ ID NO: 3975239 - RNA, 13 nt, Human herpesvirus 4 [Epstein-Barr virus]
uuucugaccuuua

SEQ ID NO: 3975240 - RNA, 12 nt, Human herpesvirus 4 [Epstein-Barr virus]
uuucuguacaau

SEQ ID NO: 3975241 - RNA, 13 nt, Human herpesvirus 4 [Epstein-Barr virus]
uuucuuugcuuca

SEQ ID NO: 3975242 - RNA, 17 nt, Human herpesvirus 4 [Epstein-Barr virus]
uuugccuugugugcugu

SEQ ID NO: 3975243 - RNA, 17 nt, Human herpesvirus 4 [Epstein-Barr virus]
uuugcuaucuuugcuga

SEQ ID NO: 3975244 - RNA, 12 nt, Human herpesvirus 4 [Epstein-Barr virus]
uuuggcaacgag

SEQ ID NO: 3975245 - RNA, 22 nt, Human herpesvirus 4 [Epstein-Barr virus]
uuugggcacacuuaacuugacu

SEQ ID NO: 3975246 - RNA, 18 nt, Human herpesvirus 4 [Epstein-Barr virus]
cugacucucauguacuuu

SEQ ID NO: 3975247 - RNA, 18 nt, Human herpesvirus 4 [Epstein-Barr virus]
cugagacagaggugcuca

SEQ ID NO: 3975248 - RNA, 16 nt, Human herpesvirus 4 [Epstein-Barr virus]
cugagaccaugcucag

SEQ ID NO: 3975249 - RNA, 15 nt, Human herpesvirus 4 [Epstein-Barr virus]
cugagcaccaacaca

SEQ ID NO: 3975250 - RNA, 20 nt, Human herpesvirus 4 [Epstein-Barr virus]
cugagcagggcaaagccaca

SEQ ID NO: 3975251 - RNA, 19 nt, Human herpesvirus 4 [Epstein-Barr virus]
cugagccugagccacaccc

SEQ ID NO: 3975252 - RNA, 22 nt, Human herpesvirus 4 [Epstein-Barr virus]
cugaggguugguguccucccgg

SEQ ID NO: 3975253 - RNA, 18 nt, Human herpesvirus 4 [Epstein-Barr virus]
cugauggcaaagguccca

SEQ ID NO: 3975254 - RNA, 18 nt, Human herpesvirus 4 [Epstein-Barr virus]
cugauucccccugcucau

SEQ ID NO: 3975255 - RNA, 15 nt, Human herpesvirus 4 [Epstein-Barr virus]
cugcaaagggaccca

SEQ ID NO: 3975256 - RNA, 17 nt, Human herpesvirus 4 [Epstein-Barr virus]
cugcaccaguggcugcc

SEQ ID NO: 3975257 - RNA, 20 nt, Human herpesvirus 4 [Epstein-Barr virus]
cugcacgagaccccugggcu

SEQ ID NO: 3975258 - RNA, 14 nt, Human herpesvirus 4 [Epstein-Barr virus]
cugcauggccaggc

SEQ ID NO: 3975259 - RNA, 22 nt, Human herpesvirus 4 [Epstein-Barr virus]
cugccaacuuugagcugggcaa

SEQ ID NO: 3975260 - RNA, 17 nt, Human herpesvirus 4 [Epstein-Barr virus]
cugccacaaggccagcu

SEQ ID NO: 3975261 - RNA, 23 nt, Human herpesvirus 4 [Epstein-Barr virus]
cugcccuagagguuuugcuaggg

SEQ ID NO: 3975262 - RNA, 19 nt, Human herpesvirus 4 [Epstein-Barr virus]
cugccgcuacugcugcuac

SEQ ID NO: 3975263 - RNA, 14 nt, Human herpesvirus 4 [Epstein-Barr virus]
cugccuaacggucg

SEQ ID NO: 3975264 - RNA, 19 nt, Human herpesvirus 4 [Epstein-Barr virus]
cugcgagggggccuggugc

SEQ ID NO: 3975265 - RNA, 18 nt, Human herpesvirus 4 [Epstein-Barr virus]
cugcgguugucacuuucu

SEQ ID NO: 3975266 - RNA, 14 nt, Human herpesvirus 4 [Epstein-Barr virus]
cugcguagaugagc

SEQ ID NO: 3975267 - RNA, 18 nt, Human herpesvirus 4 [Epstein-Barr virus]
cugcguccaccuggccac

SEQ ID NO: 3975268 - RNA, 13 nt, Human herpesvirus 4 [Epstein-Barr virus]
cugcguccucuac

SEQ ID NO: 3975269 - RNA, 19 nt, Human herpesvirus 4 [Epstein-Barr virus]
cugcguccucuaccugguc

SEQ ID NO: 3975270 - RNA, 16 nt, Human herpesvirus 4 [Epstein-Barr virus]
cugcucucucuggaga

SEQ ID NO: 3975271 - RNA, 13 nt, Human herpesvirus 4 [Epstein-Barr virus]
cugcugcagcacu

SEQ ID NO: 3975272 - RNA, 15 nt, Human herpesvirus 4 [Epstein-Barr virus]
cugcugcugcugguc

SEQ ID NO: 3975273 - RNA, 13 nt, Human herpesvirus 4 [Epstein-Barr virus]
cugcuggucaugg

SEQ ID NO: 3975274 - RNA, 22 nt, Human herpesvirus 4 [Epstein-Barr virus]
cuggacacaagagccaucaccu

SEQ ID NO: 3975275 - RNA, 15 nt, Human herpesvirus 4 [Epstein-Barr virus]
cuggacguggcugcg

SEQ ID NO: 3975276 - RNA, 20 nt, Human herpesvirus 4 [Epstein-Barr virus]
cuggaggccucaggcaacaa

SEQ ID NO: 3975277 - RNA, 18 nt, Human herpesvirus 4 [Epstein-Barr virus]
cuggaucuggggcuggcc

SEQ ID NO: 3975278 - RNA, 23 nt, Human herpesvirus 4 [Epstein-Barr virus]
cuggcauacuuuuugccacccag

SEQ ID NO: 3975279 - RNA, 12 nt, Human herpesvirus 4 [Epstein-Barr virus]
cuggccagcacc

SEQ ID NO: 3975280 - RNA, 16 nt, Human herpesvirus 4 [Epstein-Barr virus]
cuggccaggcugguga

SEQ ID NO: 3975281 - RNA, 20 nt, Human herpesvirus 4 [Epstein-Barr virus]
cuggccaugaaucugacucu

SEQ ID NO: 3975282 - RNA, 15 nt, Human herpesvirus 4 [Epstein-Barr virus]
cuggccguggccagg

SEQ ID NO: 3975283 - RNA, 18 nt, Human herpesvirus 4 [Epstein-Barr virus]
cuggccguggccagguac

SEQ ID NO: 3975284 - RNA, 13 nt, Human herpesvirus 4 [Epstein-Barr virus]
cuggcucuccugu

SEQ ID NO: 3975285 - RNA, 22 nt, Human herpesvirus 4 [Epstein-Barr virus]
cuggcuguacgccgccgccagc

SEQ ID NO: 3975286 - RNA, 17 nt, Human herpesvirus 4 [Epstein-Barr virus]
cuggcugugcugacccu

SEQ ID NO: 3975287 - RNA, 20 nt, Human herpesvirus 4 [Epstein-Barr virus]
cuggcugugcugacccuucu

SEQ ID NO: 3975288 - RNA, 15 nt, Human herpesvirus 4 [Epstein-Barr virus]
cuggggcugguggcc

SEQ ID NO: 3975289 - RNA, 13 nt, Human herpesvirus 4 [Epstein-Barr virus]
cugguaguaggca

SEQ ID NO: 3975290 - RNA, 19 nt, Human herpesvirus 4 [Epstein-Barr virus]
cugguggccugggaggugc

SEQ ID NO: 3975291 - RNA, 15 nt, Human herpesvirus 4 [Epstein-Barr virus]
cugguuggggcugcu

SEQ ID NO: 3975292 - RNA, 20 nt, Human herpesvirus 4 [Epstein-Barr virus]
cuguaaacuauggaggcccc

SEQ ID NO: 3975293 - RNA, 22 nt, Human herpesvirus 4 [Epstein-Barr virus]
cuguaacugugguuuccaugac

SEQ ID NO: 3975294 - RNA, 15 nt, Human herpesvirus 4 [Epstein-Barr virus]
cugucaccaccuccc

SEQ ID NO: 3975295 - RNA, 14 nt, Human herpesvirus 4 [Epstein-Barr virus]
cugucaccaggccu

SEQ ID NO: 3975296 - RNA, 14 nt, Human herpesvirus 4 [Epstein-Barr virus]
cugucacugugcac

SEQ ID NO: 3975297 - RNA, 16 nt, Human herpesvirus 4 [Epstein-Barr virus]
cugucccuggagcugg

SEQ ID NO: 3975298 - RNA, 21 nt, Human herpesvirus 4 [Epstein-Barr virus]
cugucccugggggccuguguc

SEQ ID NO: 3975299 - RNA, 20 nt, Human herpesvirus 4 [Epstein-Barr virus]
cugucucggccuccuggcca

SEQ ID NO: 3975300 - RNA, 14 nt, Human herpesvirus 4 [Epstein-Barr virus]
cugucuugucacca

SEQ ID NO: 3975301 - RNA, 17 nt, Human herpesvirus 4 [Epstein-Barr virus]
cugugcacucucucccc

SEQ ID NO: 3975302 - RNA, 21 nt, Human herpesvirus 4 [Epstein-Barr virus]
cugugugcgcgccgccagcau

SEQ ID NO: 3975303 - RNA, 16 nt, Human herpesvirus 4 [Epstein-Barr virus]
cuguucaaacagcagc

SEQ ID NO: 3975304 - RNA, 16 nt, Human herpesvirus 4 [Epstein-Barr virus]
cuguuccuucugcucc

SEQ ID NO: 3975305 - RNA, 13 nt, Human herpesvirus 4 [Epstein-Barr virus]
cuuacagccagag

SEQ ID NO: 3975306 - RNA, 15 nt, Human herpesvirus 4 [Epstein-Barr virus]
cuuacuccccuaccc

SEQ ID NO: 3975307 - RNA, 13 nt, Human herpesvirus 4 [Epstein-Barr virus]
cuuaugcagcacc

SEQ ID NO: 3975308 - RNA, 19 nt, Human herpesvirus 4 [Epstein-Barr virus]
cuuauguuucaagcagcuc

SEQ ID NO: 3975309 - RNA, 18 nt, Human herpesvirus 4 [Epstein-Barr virus]
cuucagcuccagggccag

SEQ ID NO: 3975310 - RNA, 20 nt, Human herpesvirus 4 [Epstein-Barr virus]
cuucagcuccagggccagca

SEQ ID NO: 3975311 - RNA, 23 nt, Human herpesvirus 4 [Epstein-Barr virus]
cuucaggggaaucucugccaacu

SEQ ID NO: 3975312 - RNA, 16 nt, Human herpesvirus 4 [Epstein-Barr virus]
cuuccagaaaaugccg

SEQ ID NO: 3975313 - RNA, 22 nt, Human herpesvirus 4 [Epstein-Barr virus]
cuucggucaaguaccagcuggu

SEQ ID NO: 3975314 - RNA, 21 nt, Human herpesvirus 4 [Epstein-Barr virus]
cuucuaggcauuaccauguca

SEQ ID NO: 3975315 - RNA, 19 nt, Human herpesvirus 4 [Epstein-Barr virus]
cuucucccacccuguacac

SEQ ID NO: 3975316 - RNA, 21 nt, Human herpesvirus 4 [Epstein-Barr virus]
cuucugaggcggcuguggccu

SEQ ID NO: 3975317 - RNA, 12 nt, Human herpesvirus 4 [Epstein-Barr virus]
cuucugcugcug

SEQ ID NO: 3975318 - RNA, 23 nt, Human herpesvirus 4 [Epstein-Barr virus]
cuucugcugcugcuggucauggc

SEQ ID NO: 3975319 - RNA, 14 nt, Human herpesvirus 4 [Epstein-Barr virus]
cuugaacgugugcu

SEQ ID NO: 3975320 - RNA, 21 nt, Human herpesvirus 4 [Epstein-Barr virus]
cuugaccaguguguacauucc

SEQ ID NO: 3975321 - RNA, 22 nt, Human herpesvirus 4 [Epstein-Barr virus]
cuugaccaguguguacauucca

SEQ ID NO: 3975322 - RNA, 21 nt, Human herpesvirus 4 [Epstein-Barr virus]
cuugacgugcaaggauggaag

SEQ ID NO: 3975323 - RNA, 15 nt, Human herpesvirus 4 [Epstein-Barr virus]
cuugaggugggcuga

SEQ ID NO: 3975324 - RNA, 19 nt, Human herpesvirus 4 [Epstein-Barr virus]
cuugaucuucuucucccuc

SEQ ID NO: 3975325 - RNA, 13 nt, Human herpesvirus 4 [Epstein-Barr virus]
cuugcacccaccc

SEQ ID NO: 3975326 - RNA, 16 nt, Human herpesvirus 4 [Epstein-Barr virus]
cuugcacccaccccca

SEQ ID NO: 3975327 - RNA, 23 nt, Human herpesvirus 4 [Epstein-Barr virus]
cuuggacuucucauuagucagga

SEQ ID NO: 3975328 - RNA, 13 nt, Human herpesvirus 4 [Epstein-Barr virus]
cuuggaggcugcu

SEQ ID NO: 3975329 - RNA, 23 nt, Human herpesvirus 4 [Epstein-Barr virus]
cuuggcccucucacuucuacucu

SEQ ID NO: 3975330 - RNA, 14 nt, Human herpesvirus 4 [Epstein-Barr virus]
cuuguccaggagac

SEQ ID NO: 3975331 - RNA, 16 nt, Human herpesvirus 4 [Epstein-Barr virus]
cuuguccgcugggcca

SEQ ID NO: 3975332 - RNA, 15 nt, Human herpesvirus 4 [Epstein-Barr virus]
cuugucuacauccca

SEQ ID NO: 3975333 - RNA, 18 nt, Human herpesvirus 4 [Epstein-Barr virus]
gcucagacuuagggccgg

SEQ ID NO: 3975334 - RNA, 21 nt, Human herpesvirus 4 [Epstein-Barr virus]
gcucagcucaaccgccagggc

SEQ ID NO: 3975335 - RNA, 19 nt, Human herpesvirus 4 [Epstein-Barr virus]
gcucaggaucagggccaag

SEQ ID NO: 3975336 - RNA, 14 nt, Human herpesvirus 4 [Epstein-Barr virus]
gcuccagggccagc

SEQ ID NO: 3975337 - RNA, 15 nt, Human herpesvirus 4 [Epstein-Barr virus]
gcuccagggccagca

SEQ ID NO: 3975338 - RNA, 20 nt, Human herpesvirus 4 [Epstein-Barr virus]
gcuccccagccacagcaccc

SEQ ID NO: 3975339 - RNA, 16 nt, Human herpesvirus 4 [Epstein-Barr virus]
gcucccucccccuccc

SEQ ID NO: 3975340 - RNA, 23 nt, Human herpesvirus 4 [Epstein-Barr virus]
gcuccggcggcaguggaccucaa

SEQ ID NO: 3975341 - RNA, 21 nt, Human herpesvirus 4 [Epstein-Barr virus]
gcuccguccuuguccaggaga

SEQ ID NO: 3975342 - RNA, 16 nt, Human herpesvirus 4 [Epstein-Barr virus]
gcuccguggccccggg

SEQ ID NO: 3975343 - RNA, 12 nt, Human herpesvirus 4 [Epstein-Barr virus]
gcuccuuugccu

SEQ ID NO: 3975344 - RNA, 13 nt, Human herpesvirus 4 [Epstein-Barr virus]
gcucgcagcugga

SEQ ID NO: 3975345 - RNA, 17 nt, Human herpesvirus 4 [Epstein-Barr virus]
gcucgcccacacagcgc

SEQ ID NO: 3975346 - RNA, 15 nt, Human herpesvirus 4 [Epstein-Barr virus]
gcucggcccuccgca

SEQ ID NO: 3975347 - RNA, 15 nt, Human herpesvirus 4 [Epstein-Barr virus]
gcucggggcaugcug

SEQ ID NO: 3975348 - RNA, 14 nt, Human herpesvirus 4 [Epstein-Barr virus]
gcucucaggccuca

SEQ ID NO: 3975349 - RNA, 12 nt, Human herpesvirus 4 [Epstein-Barr virus]
gcucugcacagg

SEQ ID NO: 3975350 - RNA, 14 nt, Human herpesvirus 4 [Epstein-Barr virus]
gcucuuggucaagg

SEQ ID NO: 3975351 - RNA, 14 nt, Human herpesvirus 4 [Epstein-Barr virus]
gcugaagcccaaga

SEQ ID NO: 3975352 - RNA, 20 nt, Human herpesvirus 4 [Epstein-Barr virus]
gcugcaucuuaccccuggcu

SEQ ID NO: 3975353 - RNA, 15 nt, Human herpesvirus 4 [Epstein-Barr virus]
gcugccagccucagc

SEQ ID NO: 3975354 - RNA, 19 nt, Human herpesvirus 4 [Epstein-Barr virus]
gcugccccaauaugccaac

SEQ ID NO: 3975355 - RNA, 15 nt, Human herpesvirus 4 [Epstein-Barr virus]
gcugccccgggccca

SEQ ID NO: 3975356 - RNA, 17 nt, Human herpesvirus 4 [Epstein-Barr virus]
gcugccguuauugccug

SEQ ID NO: 3975357 - RNA, 19 nt, Human herpesvirus 4 [Epstein-Barr virus]
gcugcgaggcauacagcau

SEQ ID NO: 3975358 - RNA, 21 nt, Human herpesvirus 4 [Epstein-Barr virus]
gcugcucggggcaugcugccc

SEQ ID NO: 3975359 - RNA, 16 nt, Human herpesvirus 4 [Epstein-Barr virus]
gcuggacgagguccug

SEQ ID NO: 3975360 - RNA, 16 nt, Human herpesvirus 4 [Epstein-Barr virus]
gcuggccaggcuggug

SEQ ID NO: 3975361 - RNA, 17 nt, Human herpesvirus 4 [Epstein-Barr virus]
gcuggggcuggugcuca

SEQ ID NO: 3975362 - RNA, 23 nt, Human herpesvirus 4 [Epstein-Barr virus]
gcugguggccugggaggugcuga

SEQ ID NO: 3975363 - RNA, 21 nt, Human herpesvirus 4 [Epstein-Barr virus]
gcuguccgccaggacggagaa

SEQ ID NO: 3975364 - RNA, 12 nt, Human herpesvirus 4 [Epstein-Barr virus]
gcugugcugacc

SEQ ID NO: 3975365 - RNA, 20 nt, Human herpesvirus 4 [Epstein-Barr virus]
gcuuagugccccccuugaga

SEQ ID NO: 3975366 - RNA, 20 nt, Human herpesvirus 4 [Epstein-Barr virus]
gcuucaaguuaccuucuuuc

SEQ ID NO: 3975367 - RNA, 23 nt, Human herpesvirus 4 [Epstein-Barr virus]
gcuucagcaguagcuugggaaca

SEQ ID NO: 3975368 - RNA, 16 nt, Human herpesvirus 4 [Epstein-Barr virus]
gcuucuggaccgugcc

SEQ ID NO: 3975369 - RNA, 20 nt, Human herpesvirus 4 [Epstein-Barr virus]
gcuugccuuuuugccacaug

SEQ ID NO: 3975370 - RNA, 17 nt, Human herpesvirus 4 [Epstein-Barr virus]
gcuuuugucugccugga

SEQ ID NO: 3975371 - RNA, 14 nt, Human herpesvirus 4 [Epstein-Barr virus]
ggaaaaacuggcca

SEQ ID NO: 3975372 - RNA, 14 nt, Human herpesvirus 4 [Epstein-Barr virus]
ggaacgaggggagg

SEQ ID NO: 3975373 - RNA, 18 nt, Human herpesvirus 4 [Epstein-Barr virus]
ggaacuggcucagcuugg

SEQ ID NO: 3975374 - RNA, 16 nt, Human herpesvirus 4 [Epstein-Barr virus]
ggaagcuggccaggcu

SEQ ID NO: 3975375 - RNA, 17 nt, Human herpesvirus 4 [Epstein-Barr virus]
ggacccccggagucugg

SEQ ID NO: 3975376 - RNA, 18 nt, Human herpesvirus 4 [Epstein-Barr virus]
ggacccggaccaaugcca

SEQ ID NO: 3975377 - RNA, 22 nt, Human herpesvirus 4 [Epstein-Barr virus]
ggacggaggacgauagcccagg

SEQ ID NO: 3975378 - RNA, 16 nt, Human herpesvirus 4 [Epstein-Barr virus]
ggacgggguggugccu

SEQ ID NO: 3975379 - RNA, 18 nt, Human herpesvirus 4 [Epstein-Barr virus]
ggacgggguggugccugg

SEQ ID NO: 3975380 - RNA, 18 nt, Human herpesvirus 4 [Epstein-Barr virus]
ggacguaucugggcacuu

SEQ ID NO: 3975381 - RNA, 13 nt, Human herpesvirus 4 [Epstein-Barr virus]
ggacgugaaccuc

SEQ ID NO: 3975382 - RNA, 14 nt, Human herpesvirus 4 [Epstein-Barr virus]
ggagagaagggaga

SEQ ID NO: 3975383 - RNA, 14 nt, Human herpesvirus 4 [Epstein-Barr virus]
ggagcagggcccag

SEQ ID NO: 3975384 - RNA, 14 nt, Human herpesvirus 4 [Epstein-Barr virus]
ggagccguggccuu

SEQ ID NO: 3975385 - RNA, 19 nt, Human herpesvirus 4 [Epstein-Barr virus]
ggaggacacugccaagguu

SEQ ID NO: 3975386 - RNA, 18 nt, Human herpesvirus 4 [Epstein-Barr virus]
ggaggaggggggcaguga

SEQ ID NO: 3975387 - RNA, 13 nt, Human herpesvirus 4 [Epstein-Barr virus]
ggaggagugcugc

SEQ ID NO: 3975388 - RNA, 21 nt, Human herpesvirus 4 [Epstein-Barr virus]
ggaggcccccggcuggccgcc

SEQ ID NO: 3975389 - RNA, 16 nt, Human herpesvirus 4 [Epstein-Barr virus]
ggaguccaugaccagg

SEQ ID NO: 3975390 - RNA, 22 nt, Human herpesvirus 4 [Epstein-Barr virus]
ggauccccgccggggcuagggg

SEQ ID NO: 3975391 - RNA, 21 nt, Human herpesvirus 4 [Epstein-Barr virus]
ggaucgaaggagagcuggaug

SEQ ID NO: 3975392 - RNA, 14 nt, Human herpesvirus 4 [Epstein-Barr virus]
ggaucucccgcgcc

SEQ ID NO: 3975393 - RNA, 15 nt, Human herpesvirus 4 [Epstein-Barr virus]
ggaugcaggaccuag

SEQ ID NO: 3975394 - RNA, 16 nt, Human herpesvirus 4 [Epstein-Barr virus]
ggcaaacagggcagag

SEQ ID NO: 3975395 - RNA, 15 nt, Human herpesvirus 4 [Epstein-Barr virus]
ggcaaggagcuguuu

SEQ ID NO: 3975396 - RNA, 21 nt, Human herpesvirus 4 [Epstein-Barr virus]
ggcacacauuacggugcugga

SEQ ID NO: 3975397 - RNA, 16 nt, Human herpesvirus 4 [Epstein-Barr virus]
ggcacaccagacaugg

SEQ ID NO: 3975398 - RNA, 17 nt, Human herpesvirus 4 [Epstein-Barr virus]
ggcacaccagacauggu

SEQ ID NO: 3975399 - RNA, 13 nt, Human herpesvirus 4 [Epstein-Barr virus]
ggcaccccacggg

SEQ ID NO: 3975400 - RNA, 15 nt, Human herpesvirus 4 [Epstein-Barr virus]
ggcacccccucugag

SEQ ID NO: 3975401 - RNA, 20 nt, Human herpesvirus 4 [Epstein-Barr virus]
ggcacgggcagaggacacgc

SEQ ID NO: 3975402 - RNA, 21 nt, Human herpesvirus 4 [Epstein-Barr virus]
ggcagcgaagaacacuccaca

SEQ ID NO: 3975403 - RNA, 19 nt, Human herpesvirus 4 [Epstein-Barr virus]
ggcagcggacgguggggcu

SEQ ID NO: 3975404 - RNA, 13 nt, Human herpesvirus 4 [Epstein-Barr virus]
ggcaggagcagga

SEQ ID NO: 3975405 - RNA, 19 nt, Human herpesvirus 4 [Epstein-Barr virus]
ggccaaggugguagcguug

SEQ ID NO: 3975406 - RNA, 15 nt, Human herpesvirus 4 [Epstein-Barr virus]
ggccacacagccuga

SEQ ID NO: 3975407 - RNA, 19 nt, Human herpesvirus 4 [Epstein-Barr virus]
ggccacggcgugccagagg

SEQ ID NO: 3975408 - RNA, 15 nt, Human herpesvirus 4 [Epstein-Barr virus]
ggccagcaggccggc

SEQ ID NO: 3975409 - RNA, 11 nt, Human herpesvirus 4 [Epstein-Barr virus]
ggccaggaccc

SEQ ID NO: 3975410 - RNA, 18 nt, Human herpesvirus 4 [Epstein-Barr virus]
ggccauucgacaggccau

SEQ ID NO: 3975411 - RNA, 22 nt, Human herpesvirus 4 [Epstein-Barr virus]
ggcccacgucuuuaccaccuca

SEQ ID NO: 3975412 - RNA, 19 nt, Human herpesvirus 4 [Epstein-Barr virus]
ggcccacgugaacauccug

SEQ ID NO: 3975413 - RNA, 12 nt, Human herpesvirus 4 [Epstein-Barr virus]
ggcccagcccuc

SEQ ID NO: 3975414 - RNA, 19 nt, Human herpesvirus 4 [Epstein-Barr virus]
ggccccccgcaccagggcc

SEQ ID NO: 3975415 - RNA, 15 nt, Human herpesvirus 4 [Epstein-Barr virus]
ggccccggcuggcca

SEQ ID NO: 3975416 - RNA, 13 nt, Human herpesvirus 4 [Epstein-Barr virus]
ggcccgggaccgc

SEQ ID NO: 3975417 - RNA, 20 nt, Human herpesvirus 4 [Epstein-Barr virus]
ggcccuccagcguggucaua

SEQ ID NO: 3975418 - RNA, 21 nt, Human herpesvirus 4 [Epstein-Barr virus]
ggcccugagcauggcggccug

SEQ ID NO: 3975419 - RNA, 16 nt, Human herpesvirus 4 [Epstein-Barr virus]
ggcccuuagcauggga

SEQ ID NO: 3975420 - RNA, 16 nt, Human herpesvirus 4 [Epstein-Barr virus]
ggccgcagcuggcgga

SEQ ID NO: 3975421 - RNA, 12 nt, Human herpesvirus 4 [Epstein-Barr virus]
gguugggcagaa

SEQ ID NO: 3975422 - RNA, 14 nt, Human herpesvirus 4 [Epstein-Barr virus]
gguugucuucccag

SEQ ID NO: 3975423 - RNA, 21 nt, Human herpesvirus 4 [Epstein-Barr virus]
gguugucuucccagacucugc

SEQ ID NO: 3975424 - RNA, 22 nt, Human herpesvirus 4 [Epstein-Barr virus]
gguuucauuuaagcaggugagg

SEQ ID NO: 3975425 - RNA, 19 nt, Human herpesvirus 4 [Epstein-Barr virus]
gguuuccaugacgcugcug

SEQ ID NO: 3975426 - RNA, 14 nt, Human herpesvirus 4 [Epstein-Barr virus]
guaaaacugccaca

SEQ ID NO: 3975427 - RNA, 15 nt, Human herpesvirus 4 [Epstein-Barr virus]
guaaccuaugccugg

SEQ ID NO: 3975428 - RNA, 23 nt, Human herpesvirus 4 [Epstein-Barr virus]
guacagacuaccggcgagcauga

SEQ ID NO: 3975429 - RNA, 19 nt, Human herpesvirus 4 [Epstein-Barr virus]
guacagacuuuuggcaaug

SEQ ID NO: 3975430 - RNA, 15 nt, Human herpesvirus 4 [Epstein-Barr virus]
guaccagcugguggu

SEQ ID NO: 3975431 - RNA, 17 nt, Human herpesvirus 4 [Epstein-Barr virus]
guacccauaacugggca

SEQ ID NO: 3975432 - RNA, 23 nt, Human herpesvirus 4 [Epstein-Barr virus]
guagcccuuggaacugacgggca

SEQ ID NO: 3975433 - RNA, 21 nt, Human herpesvirus 4 [Epstein-Barr virus]
guaguaacgcauucccuugcu

SEQ ID NO: 3975434 - RNA, 19 nt, Human herpesvirus 4 [Epstein-Barr virus]
guauaaagaaugcccacca

SEQ ID NO: 3975435 - RNA, 19 nt, Human herpesvirus 4 [Epstein-Barr virus]
guaugcagaaggggcccug

SEQ ID NO: 3975436 - RNA, 13 nt, Human herpesvirus 4 [Epstein-Barr virus]
guauguauuggga

SEQ ID NO: 3975437 - RNA, 15 nt, Human herpesvirus 4 [Epstein-Barr virus]
gucaaguaccagcug

SEQ ID NO: 3975438 - RNA, 14 nt, Human herpesvirus 4 [Epstein-Barr virus]
gucacugugcacuc

SEQ ID NO: 3975439 - RNA, 15 nt, Human herpesvirus 4 [Epstein-Barr virus]
gucacugugcacucu

SEQ ID NO: 3975440 - RNA, 16 nt, Human herpesvirus 4 [Epstein-Barr virus]
gucaggagggcagaga

SEQ ID NO: 3975441 - RNA, 18 nt, Human herpesvirus 4 [Epstein-Barr virus]
gucauggcggacugcgcc

SEQ ID NO: 3975442 - RNA, 18 nt, Human herpesvirus 4 [Epstein-Barr virus]
guccaccuggccaccaca

SEQ ID NO: 3975443 - RNA, 16 nt, Human herpesvirus 4 [Epstein-Barr virus]
guccacggggagacuu

SEQ ID NO: 3975444 - RNA, 10 nt, Human herpesvirus 4 [Epstein-Barr virus]
guccacugcc

SEQ ID NO: 3975445 - RNA, 21 nt, Human herpesvirus 4 [Epstein-Barr virus]
guccagaguucccggcugcuc

SEQ ID NO: 3975446 - RNA, 19 nt, Human herpesvirus 4 [Epstein-Barr virus]
guccagccacgcaggaugu

SEQ ID NO: 3975447 - RNA, 19 nt, Human herpesvirus 4 [Epstein-Barr virus]
guccaggggcuuguucuug

SEQ ID NO: 3975448 - RNA, 16 nt, Human herpesvirus 4 [Epstein-Barr virus]
guccagggguccccga

SEQ ID NO: 3975449 - RNA, 17 nt, Human herpesvirus 4 [Epstein-Barr virus]
guccaggguccaggaga

SEQ ID NO: 3975450 - RNA, 16 nt, Human herpesvirus 4 [Epstein-Barr virus]
gucccugcugcccaug

SEQ ID NO: 3975451 - RNA, 19 nt, Human herpesvirus 4 [Epstein-Barr virus]
guccgccaggacggagaag

SEQ ID NO: 3975452 - RNA, 16 nt, Human herpesvirus 4 [Epstein-Barr virus]
guccuccacggggaca

SEQ ID NO: 3975453 - RNA, 16 nt, Human herpesvirus 4 [Epstein-Barr virus]
guccuugucugcugcc

SEQ ID NO: 3975454 - RNA, 17 nt, Human herpesvirus 4 [Epstein-Barr virus]
guccuugucugcugcca

SEQ ID NO: 3975455 - RNA, 22 nt, Human herpesvirus 4 [Epstein-Barr virus]
gucggcuaaugccaugcagcgg

SEQ ID NO: 3975456 - RNA, 20 nt, Human herpesvirus 4 [Epstein-Barr virus]
gucgggagaacgaaggcgug

SEQ ID NO: 3975457 - RNA, 15 nt, Human herpesvirus 4 [Epstein-Barr virus]
gucggggcugcuggc

SEQ ID NO: 3975458 - RNA, 18 nt, Human herpesvirus 4 [Epstein-Barr virus]
gucgugguuuucugcccc

SEQ ID NO: 3975459 - RNA, 13 nt, Human herpesvirus 4 [Epstein-Barr virus]
gucuacccagagg

SEQ ID NO: 3975460 - RNA, 23 nt, Human herpesvirus 4 [Epstein-Barr virus]
gucuaccucuguuccuucugcuc

SEQ ID NO: 3975461 - RNA, 14 nt, Human herpesvirus 4 [Epstein-Barr virus]
gucuauccaggagg

SEQ ID NO: 3975462 - RNA, 23 nt, Human herpesvirus 4 [Epstein-Barr virus]
gucucaugggggaaugagggaaa

SEQ ID NO: 3975463 - RNA, 17 nt, Human herpesvirus 4 [Epstein-Barr virus]
gucuccagagggcagac

SEQ ID NO: 3975464 - RNA, 22 nt, Human herpesvirus 4 [Epstein-Barr virus]
gucugccgcguguuugcugcuc

SEQ ID NO: 3975465 - RNA, 19 nt, Human herpesvirus 4 [Epstein-Barr virus]
gucuguaaucucuaaagau

SEQ ID NO: 3975466 - RNA, 14 nt, Human herpesvirus 4 [Epstein-Barr virus]
gucuucaauagaca

SEQ ID NO: 3975467 - RNA, 18 nt, Human herpesvirus 4 [Epstein-Barr virus]
gucuucaaucuucuucau

SEQ ID NO: 3975468 - RNA, 20 nt, Human herpesvirus 4 [Epstein-Barr virus]
gucuugccguggcgccuggg

SEQ ID NO: 3975469 - RNA, 15 nt, Human herpesvirus 4 [Epstein-Barr virus]
gucuuuuaugagcca

SEQ ID NO: 3975470 - RNA, 20 nt, Human herpesvirus 4 [Epstein-Barr virus]
gugaaacuggcuucugugac

SEQ ID NO: 3975471 - RNA, 17 nt, Human herpesvirus 4 [Epstein-Barr virus]
gugaagggcagggcucg

SEQ ID NO: 3975472 - RNA, 23 nt, Human herpesvirus 4 [Epstein-Barr virus]
gugaaugcacgccaacagcgacc

SEQ ID NO: 3975473 - RNA, 17 nt, Human herpesvirus 4 [Epstein-Barr virus]
gugacauucacugggac

SEQ ID NO: 3975474 - RNA, 17 nt, Human herpesvirus 4 [Epstein-Barr virus]
gugaccugacuggcaga

SEQ ID NO: 3975475 - RNA, 20 nt, Human herpesvirus 4 [Epstein-Barr virus]
gugacgaagacccaucugag

SEQ ID NO: 3975476 - RNA, 22 nt, Human herpesvirus 4 [Epstein-Barr virus]
gugauaaccauggacgaggacg

SEQ ID NO: 3975477 - RNA, 20 nt, Human herpesvirus 4 [Epstein-Barr virus]
gugauuaggagcagggccca

SEQ ID NO: 3975478 - RNA, 17 nt, Human herpesvirus 4 [Epstein-Barr virus]
gugccauaccacacccc

SEQ ID NO: 3975479 - RNA, 18 nt, Human herpesvirus 4 [Epstein-Barr virus]
gugccauaccacaccccc

SEQ ID NO: 3975480 - RNA, 19 nt, Human herpesvirus 4 [Epstein-Barr virus]
gugccuaaacgugauggug

SEQ ID NO: 3975481 - RNA, 21 nt, Human herpesvirus 4 [Epstein-Barr virus]
gugcgcaacgccggccugcug

SEQ ID NO: 3975482 - RNA, 22 nt, Human herpesvirus 4 [Epstein-Barr virus]
gugcgguuauaacugccagagc

SEQ ID NO: 3975483 - RNA, 13 nt, Human herpesvirus 4 [Epstein-Barr virus]
gugcugaggcccg

SEQ ID NO: 3975484 - RNA, 18 nt, Human herpesvirus 4 [Epstein-Barr virus]
gugcugcguugggaacug

SEQ ID NO: 3975485 - RNA, 16 nt, Human herpesvirus 4 [Epstein-Barr virus]
guggaacagaugcugu

SEQ ID NO: 3975486 - RNA, 23 nt, Human herpesvirus 4 [Epstein-Barr virus]
guggcacacauuacggugcugga

SEQ ID NO: 3975487 - RNA, 22 nt, Human herpesvirus 4 [Epstein-Barr virus]
guggcagaaucaccagagccca

SEQ ID NO: 3975488 - RNA, 17 nt, Human herpesvirus 4 [Epstein-Barr virus]
guggcagugauguucug

SEQ ID NO: 3975489 - RNA, 21 nt, Human herpesvirus 4 [Epstein-Barr virus]
guggccaacgcaggcacggcc

SEQ ID NO: 3975490 - RNA, 15 nt, Human herpesvirus 4 [Epstein-Barr virus]
guggccacacugggg

SEQ ID NO: 3975491 - RNA, 23 nt, Human herpesvirus 4 [Epstein-Barr virus]
guggccagcucauaugccgcugc

SEQ ID NO: 3975492 - RNA, 18 nt, Human herpesvirus 4 [Epstein-Barr virus]
guggccccggcuggccau

SEQ ID NO: 3975493 - RNA, 16 nt, Human herpesvirus 4 [Epstein-Barr virus]
guggccgaguggcaga

SEQ ID NO: 3975494 - RNA, 23 nt, Human herpesvirus 4 [Epstein-Barr virus]
guggccuucucugauggccugga

SEQ ID NO: 3975495 - RNA, 20 nt, Human herpesvirus 4 [Epstein-Barr virus]
guggcgguggaacacggcac

SEQ ID NO: 3975496 - RNA, 14 nt, Human herpesvirus 4 [Epstein-Barr virus]
guggcuugggcugu

SEQ ID NO: 3975497 - RNA, 17 nt, Human herpesvirus 4 [Epstein-Barr virus]
gugggacguuuagaaac

SEQ ID NO: 3975498 - RNA, 12 nt, Human herpesvirus 4 [Epstein-Barr virus]
gugggaggccca

SEQ ID NO: 3975499 - RNA, 23 nt, Human herpesvirus 4 [Epstein-Barr virus]
gugggccucucuggcugugcuga

SEQ ID NO: 3975500 - RNA, 14 nt, Human herpesvirus 4 [Epstein-Barr virus]
guggugcuguccug

SEQ ID NO: 3975501 - RNA, 19 nt, Human herpesvirus 4 [Epstein-Barr virus]
gugguggcagcaggcgcug

SEQ ID NO: 3975502 - RNA, 21 nt, Human herpesvirus 4 [Epstein-Barr virus]
gugguguucuaacgggaagug

SEQ ID NO: 3975503 - RNA, 19 nt, Human herpesvirus 4 [Epstein-Barr virus]
gugguuauuuugggccagg

SEQ ID NO: 3975504 - RNA, 16 nt, Human herpesvirus 4 [Epstein-Barr virus]
gugguugucuucccag

SEQ ID NO: 3975505 - RNA, 20 nt, Human herpesvirus 4 [Epstein-Barr virus]
gugucauuuagaaaccuugc

SEQ ID NO: 3975506 - RNA, 19 nt, Human herpesvirus 4 [Epstein-Barr virus]
gugucccccuccauuccac

SEQ ID NO: 3975507 - RNA, 21 nt, Human herpesvirus 4 [Epstein-Barr virus]
gugucuggcggccgcugcgcc

SEQ ID NO: 3975508 - RNA, 20 nt, Human herpesvirus 4 [Epstein-Barr virus]
aucuggcagcuuuuggccuu

SEQ ID NO: 3975509 - RNA, 17 nt, Human herpesvirus 4 [Epstein-Barr virus]
aucuggcucuccugugu

SEQ ID NO: 3975510 - RNA, 14 nt, Human herpesvirus 4 [Epstein-Barr virus]
aucuggggccaagg

SEQ ID NO: 3975511 - RNA, 16 nt, Human herpesvirus 4 [Epstein-Barr virus]
augaaggugucauuga

SEQ ID NO: 3975512 - RNA, 13 nt, Human herpesvirus 4 [Epstein-Barr virus]
augacacaggaca

SEQ ID NO: 3975513 - RNA, 16 nt, Human herpesvirus 4 [Epstein-Barr virus]
augaggaaggggccuc

SEQ ID NO: 3975514 - RNA, 20 nt, Human herpesvirus 4 [Epstein-Barr virus]
augaugacgccgagaccuau

SEQ ID NO: 3975515 - RNA, 17 nt, Human herpesvirus 4 [Epstein-Barr virus]
augauugagaaugccaa

SEQ ID NO: 3975516 - RNA, 22 nt, Human herpesvirus 4 [Epstein-Barr virus]
augcaacagaggauuggcugca

SEQ ID NO: 3975517 - RNA, 20 nt, Human herpesvirus 4 [Epstein-Barr virus]
augcaauaaauaaaaguaca

SEQ ID NO: 3975518 - RNA, 15 nt, Human herpesvirus 4 [Epstein-Barr virus]
augcaaugcccaccc

SEQ ID NO: 3975519 - RNA, 13 nt, Human herpesvirus 4 [Epstein-Barr virus]
augcagaaggggc

SEQ ID NO: 3975520 - RNA, 15 nt, Human herpesvirus 4 [Epstein-Barr virus]
augcaggccuggaca

SEQ ID NO: 3975521 - RNA, 17 nt, Human herpesvirus 4 [Epstein-Barr virus]
augcauccgcaccacag

SEQ ID NO: 3975522 - RNA, 11 nt, Human herpesvirus 4 [Epstein-Barr virus]
augccaaagcu

SEQ ID NO: 3975523 - RNA, 15 nt, Human herpesvirus 4 [Epstein-Barr virus]
augcgaaacuacagg

SEQ ID NO: 3975524 - RNA, 12 nt, Human herpesvirus 4 [Epstein-Barr virus]
augcuaucuugu

SEQ ID NO: 3975525 - RNA, 22 nt, Human herpesvirus 4 [Epstein-Barr virus]
augcucaguggccgucuggcag

SEQ ID NO: 3975526 - RNA, 14 nt, Human herpesvirus 4 [Epstein-Barr virus]
augcuccuauggac

SEQ ID NO: 3975527 - RNA, 19 nt, Human herpesvirus 4 [Epstein-Barr virus]
augcucuggcgacuuggug

SEQ ID NO: 3975528 - RNA, 17 nt, Human herpesvirus 4 [Epstein-Barr virus]
augcuuacucaauccau

SEQ ID NO: 3975529 - RNA, 22 nt, Human herpesvirus 4 [Epstein-Barr virus]
auggagagauuucauccucaga

SEQ ID NO: 3975530 - RNA, 15 nt, Human herpesvirus 4 [Epstein-Barr virus]
auggaugugaaugcc

SEQ ID NO: 3975531 - RNA, 16 nt, Human herpesvirus 4 [Epstein-Barr virus]
auggauuacuggucuu

SEQ ID NO: 3975532 - RNA, 21 nt, Human herpesvirus 4 [Epstein-Barr virus]
auggcacggaugccuggcgcu

SEQ ID NO: 3975533 - RNA, 17 nt, Human herpesvirus 4 [Epstein-Barr virus]
auggccguccucuggac

SEQ ID NO: 3975534 - RNA, 19 nt, Human herpesvirus 4 [Epstein-Barr virus]
auggcuauacacaggagcc

SEQ ID NO: 3975535 - RNA, 18 nt, Human herpesvirus 4 [Epstein-Barr virus]
auggggccaggacgcugc

SEQ ID NO: 3975536 - RNA, 21 nt, Human herpesvirus 4 [Epstein-Barr virus]
augggggaggagagaccaaga

SEQ ID NO: 3975537 - RNA, 20 nt, Human herpesvirus 4 [Epstein-Barr virus]
augguggccggcagccuggc

SEQ ID NO: 3975538 - RNA, 23 nt, Human herpesvirus 4 [Epstein-Barr virus]
augugccucgguggccugcucac

SEQ ID NO: 3975539 - RNA, 12 nt, Human herpesvirus 4 [Epstein-Barr virus]
auguucagagcu

SEQ ID NO: 3975540 - RNA, 15 nt, Human herpesvirus 4 [Epstein-Barr virus]
auucagauuucuagu

SEQ ID NO: 3975541 - RNA, 22 nt, Human herpesvirus 4 [Epstein-Barr virus]
auucccuaggaauuauuuacca

SEQ ID NO: 3975542 - RNA, 11 nt, Human herpesvirus 4 [Epstein-Barr virus]
auucucagaug

SEQ ID NO: 3975543 - RNA, 15 nt, Human herpesvirus 4 [Epstein-Barr virus]
auucuggcacgucau

SEQ ID NO: 3975544 - RNA, 17 nt, Human herpesvirus 4 [Epstein-Barr virus]
auugaaaccacgccugc

SEQ ID NO: 3975545 - RNA, 14 nt, Human herpesvirus 4 [Epstein-Barr virus]
auugagaucagaaa

SEQ ID NO: 3975546 - RNA, 17 nt, Human herpesvirus 4 [Epstein-Barr virus]
auugaugugacuuguga

SEQ ID NO: 3975547 - RNA, 14 nt, Human herpesvirus 4 [Epstein-Barr virus]
auugccuucuguua

SEQ ID NO: 3975548 - RNA, 17 nt, Human herpesvirus 4 [Epstein-Barr virus]
auugcugaacuggggcu

SEQ ID NO: 3975549 - RNA, 17 nt, Human herpesvirus 4 [Epstein-Barr virus]
auuggacacccacccug

SEQ ID NO: 3975550 - RNA, 16 nt, Human herpesvirus 4 [Epstein-Barr virus]
auuggcagcagcucug

SEQ ID NO: 3975551 - RNA, 23 nt, Human herpesvirus 4 [Epstein-Barr virus]
auugggugguggcagcaggcgcu

SEQ ID NO: 3975552 - RNA, 16 nt, Human herpesvirus 4 [Epstein-Barr virus]
auuguucuacuccugg

SEQ ID NO: 3975553 - RNA, 19 nt, Human herpesvirus 4 [Epstein-Barr virus]
auuugcugacauauguaca

SEQ ID NO: 3975554 - RNA, 20 nt, Human herpesvirus 4 [Epstein-Barr virus]
auuugcugacauauguacaa

SEQ ID NO: 3975555 - RNA, 20 nt, Human herpesvirus 4 [Epstein-Barr virus]
auuuggacaucuaguggcag

SEQ ID NO: 3975556 - RNA, 20 nt, Human herpesvirus 4 [Epstein-Barr virus]
auuuggacgagagcaugcca

SEQ ID NO: 3975557 - RNA, 15 nt, Human herpesvirus 4 [Epstein-Barr virus]
auuuggaggaagagu

SEQ ID NO: 3975558 - RNA, 16 nt, Human herpesvirus 4 [Epstein-Barr virus]
auuugggagggaccac

SEQ ID NO: 3975559 - RNA, 17 nt, Human herpesvirus 4 [Epstein-Barr virus]
caaaacuuuagaggcga

SEQ ID NO: 3975560 - RNA, 20 nt, Human herpesvirus 4 [Epstein-Barr virus]
caaacaggugagucagccuu

SEQ ID NO: 3975561 - RNA, 18 nt, Human herpesvirus 4 [Epstein-Barr virus]
caaacaugggcugcuaua

SEQ ID NO: 3975562 - RNA, 18 nt, Human herpesvirus 4 [Epstein-Barr virus]
caaacucgacuucugaag

SEQ ID NO: 3975563 - RNA, 21 nt, Human herpesvirus 4 [Epstein-Barr virus]
caaauaaacauuuuauuggua

SEQ ID NO: 3975564 - RNA, 18 nt, Human herpesvirus 4 [Epstein-Barr virus]
caacagacuaaccaagcc

SEQ ID NO: 3975565 - RNA, 18 nt, Human herpesvirus 4 [Epstein-Barr virus]
caacagcuagcagacauu

SEQ ID NO: 3975566 - RNA, 21 nt, Human herpesvirus 4 [Epstein-Barr virus]
caacaggugcccgagccccgc

SEQ ID NO: 3975567 - RNA, 14 nt, Human herpesvirus 4 [Epstein-Barr virus]
caacauuaaagccu

SEQ ID NO: 3975568 - RNA, 23 nt, Human herpesvirus 4 [Epstein-Barr virus]
caacgcauccaccaucaauguca

SEQ ID NO: 3975569 - RNA, 23 nt, Human herpesvirus 4 [Epstein-Barr virus]
caacucggcccgucuuacugccc

SEQ ID NO: 3975570 - RNA, 23 nt, Human herpesvirus 4 [Epstein-Barr virus]
caacuucagcuccagggccagca

SEQ ID NO: 3975571 - RNA, 20 nt, Human herpesvirus 4 [Epstein-Barr virus]
caagaacccccugcaggaca

SEQ ID NO: 3975572 - RNA, 17 nt, Human herpesvirus 4 [Epstein-Barr virus]
caagacucccugacggu

SEQ ID NO: 3975573 - RNA, 18 nt, Human herpesvirus 4 [Epstein-Barr virus]
caagagucucgccaucua

SEQ ID NO: 3975574 - RNA, 20 nt, Human herpesvirus 4 [Epstein-Barr virus]
caagaguuuaagcagcacug

SEQ ID NO: 3975575 - RNA, 24 nt, Human herpesvirus 4 [Epstein-Barr virus]
caagauugggugguggcagcaggc

SEQ ID NO: 3975576 - RNA, 23 nt, Human herpesvirus 4 [Epstein-Barr virus]
caagccgggggagaagcaccuca

SEQ ID NO: 3975577 - RNA, 19 nt, Human herpesvirus 4 [Epstein-Barr virus]
caagcuuuugaccaagcua

SEQ ID NO: 3975578 - RNA, 15 nt, Human herpesvirus 4 [Epstein-Barr virus]
caaggacaggugcca

SEQ ID NO: 3975579 - RNA, 14 nt, Human herpesvirus 4 [Epstein-Barr virus]
caaguaccagcugg

SEQ ID NO: 3975580 - RNA, 17 nt, Human herpesvirus 4 [Epstein-Barr virus]
caauaaaguugaugaua

SEQ ID NO: 3975581 - RNA, 23 nt, Human herpesvirus 4 [Epstein-Barr virus]
caauccauuaucuuggcaccccg

SEQ ID NO: 3975582 - RNA, 21 nt, Human herpesvirus 4 [Epstein-Barr virus]
caaugagagccaaaaauuuga

SEQ ID NO: 3975583 - RNA, 14 nt, Human herpesvirus 4 [Epstein-Barr virus]
caauggggccagga

SEQ ID NO: 3975584 - RNA, 17 nt, Human herpesvirus 4 [Epstein-Barr virus]
caaugggggaggagaga

SEQ ID NO: 3975585 - RNA, 23 nt, Human herpesvirus 4 [Epstein-Barr virus]
caauguaucccaaauaaauguua

SEQ ID NO: 3975586 - RNA, 22 nt, Human herpesvirus 4 [Epstein-Barr virus]
caauucuacuguucaaacagca

SEQ ID NO: 3975587 - RNA, 15 nt, Human herpesvirus 4 [Epstein-Barr virus]
cacacagcgccagca

SEQ ID NO: 3975588 - RNA, 23 nt, Human herpesvirus 4 [Epstein-Barr virus]
cacaccuaaauuuagcacguccc

SEQ ID NO: 3975589 - RNA, 16 nt, Human herpesvirus 4 [Epstein-Barr virus]
cacacgaagccugccu

SEQ ID NO: 3975590 - RNA, 23 nt, Human herpesvirus 4 [Epstein-Barr virus]
cacagaucugaccacggcccacg

SEQ ID NO: 3975591 - RNA, 12 nt, Human herpesvirus 4 [Epstein-Barr virus]
cacagcgccagc

SEQ ID NO: 3975592 - RNA, 22 nt, Human herpesvirus 4 [Epstein-Barr virus]
cacaggguggggguggacauga

SEQ ID NO: 3975593 - RNA, 14 nt, Human herpesvirus 4 [Epstein-Barr virus]
cacaucuggaccug

SEQ ID NO: 3975594 - RNA, 17 nt, Human herpesvirus 4 [Epstein-Barr virus]
caccaagauagugacca

SEQ ID NO: 3975595 - RNA, 20 nt, Human herpesvirus 4 [Epstein-Barr virus]
ccacauacaucccugucucc

SEQ ID NO: 3975596 - RNA, 13 nt, Human herpesvirus 4 [Epstein-Barr virus]
ccaccccacacuc

SEQ ID NO: 3975597 - RNA, 19 nt, Human herpesvirus 4 [Epstein-Barr virus]
ccacccgucccggguacaa

SEQ ID NO: 3975598 - RNA, 15 nt, Human herpesvirus 4 [Epstein-Barr virus]
ccaccguggccaggc

SEQ ID NO: 3975599 - RNA, 21 nt, Human herpesvirus 4 [Epstein-Barr virus]
ccacggcccggggguggcagc

SEQ ID NO: 3975600 - RNA, 22 nt, Human herpesvirus 4 [Epstein-Barr virus]
ccacgggaaaaagaauagcuuc

SEQ ID NO: 3975601 - RNA, 19 nt, Human herpesvirus 4 [Epstein-Barr virus]
ccacucaggaagcuggcca

SEQ ID NO: 3975602 - RNA, 19 nt, Human herpesvirus 4 [Epstein-Barr virus]
ccacugagcaagauccuuc

SEQ ID NO: 3975603 - RNA, 19 nt, Human herpesvirus 4 [Epstein-Barr virus]
ccacuuuuaccccaguccc

SEQ ID NO: 3975604 - RNA, 15 nt, Human herpesvirus 4 [Epstein-Barr virus]
ccagaaagucccgag

SEQ ID NO: 3975605 - RNA, 11 nt, Human herpesvirus 4 [Epstein-Barr virus]
ccagaagcccc

SEQ ID NO: 3975606 - RNA, 18 nt, Human herpesvirus 4 [Epstein-Barr virus]
ccagaagucggccacagg

SEQ ID NO: 3975607 - RNA, 19 nt, Human herpesvirus 4 [Epstein-Barr virus]
ccagaaucgguaaggaggg

SEQ ID NO: 3975608 - RNA, 17 nt, Human herpesvirus 4 [Epstein-Barr virus]
ccagacucugcuuucug

SEQ ID NO: 3975609 - RNA, 18 nt, Human herpesvirus 4 [Epstein-Barr virus]
ccagagccucugccacaa

SEQ ID NO: 3975610 - RNA, 19 nt, Human herpesvirus 4 [Epstein-Barr virus]
ccagagggcgaaugggcug

SEQ ID NO: 3975611 - RNA, 18 nt, Human herpesvirus 4 [Epstein-Barr virus]
ccagcaaaaccagcccgg

SEQ ID NO: 3975612 - RNA, 15 nt, Human herpesvirus 4 [Epstein-Barr virus]
ccagcagauccaggg

SEQ ID NO: 3975613 - RNA, 15 nt, Human herpesvirus 4 [Epstein-Barr virus]
ccagcagcagcccgg

SEQ ID NO: 3975614 - RNA, 17 nt, Human herpesvirus 4 [Epstein-Barr virus]
ccagcauggcagccggg

SEQ ID NO: 3975615 - RNA, 17 nt, Human herpesvirus 4 [Epstein-Barr virus]
ccagcccuccucagaaa

SEQ ID NO: 3975616 - RNA, 20 nt, Human herpesvirus 4 [Epstein-Barr virus]
ccagccgggugcacacgcuc

SEQ ID NO: 3975617 - RNA, 20 nt, Human herpesvirus 4 [Epstein-Barr virus]
ccagccuacucuccacuccc

SEQ ID NO: 3975618 - RNA, 20 nt, Human herpesvirus 4 [Epstein-Barr virus]
ccagccuguuuguccagcag

SEQ ID NO: 3975619 - RNA, 17 nt, Human herpesvirus 4 [Epstein-Barr virus]
ccagcgcuggcuccagg

SEQ ID NO: 3975620 - RNA, 19 nt, Human herpesvirus 4 [Epstein-Barr virus]
ccagcuccgugguccugag

SEQ ID NO: 3975621 - RNA, 21 nt, Human herpesvirus 4 [Epstein-Barr virus]
ccagcucggccagcaggccgg

SEQ ID NO: 3975622 - RNA, 21 nt, Human herpesvirus 4 [Epstein-Barr virus]
ccaggcaccggucucguccau

SEQ ID NO: 3975623 - RNA, 14 nt, Human herpesvirus 4 [Epstein-Barr virus]
ccaggccucagcgu

SEQ ID NO: 3975624 - RNA, 12 nt, Human herpesvirus 4 [Epstein-Barr virus]
ccaggcucucca

SEQ ID NO: 3975625 - RNA, 22 nt, Human herpesvirus 4 [Epstein-Barr virus]
ccaggcuggugacaaacucucu

SEQ ID NO: 3975626 - RNA, 15 nt, Human herpesvirus 4 [Epstein-Barr virus]
ccaggguccaggaga

SEQ ID NO: 3975627 - RNA, 21 nt, Human herpesvirus 4 [Epstein-Barr virus]
ccagguagcccagcgucagga

SEQ ID NO: 3975628 - RNA, 17 nt, Human herpesvirus 4 [Epstein-Barr virus]
ccaggucuugccguggc

SEQ ID NO: 3975629 - RNA, 20 nt, Human herpesvirus 4 [Epstein-Barr virus]
ccagugcgaggaacuggcuc

SEQ ID NO: 3975630 - RNA, 22 nt, Human herpesvirus 4 [Epstein-Barr virus]
ccaguucccuucucccacccug

SEQ ID NO: 3975631 - RNA, 19 nt, Human herpesvirus 4 [Epstein-Barr virus]
ccauaccuacaccacccca

SEQ ID NO: 3975632 - RNA, 19 nt, Human herpesvirus 4 [Epstein-Barr virus]
ccauagucacggaugcugc

SEQ ID NO: 3975633 - RNA, 21 nt, Human herpesvirus 4 [Epstein-Barr virus]
ccaucccaauucacaucucag

SEQ ID NO: 3975634 - RNA, 17 nt, Human herpesvirus 4 [Epstein-Barr virus]
ccaucuaaacgccugau

SEQ ID NO: 3975635 - RNA, 17 nt, Human herpesvirus 4 [Epstein-Barr virus]
ccaucuggcagcuuuug

SEQ ID NO: 3975636 - RNA, 19 nt, Human herpesvirus 4 [Epstein-Barr virus]
ccaucuuaggagcccgggc

SEQ ID NO: 3975637 - RNA, 16 nt, Human herpesvirus 4 [Epstein-Barr virus]
ccaugaaucugacucu

SEQ ID NO: 3975638 - RNA, 18 nt, Human herpesvirus 4 [Epstein-Barr virus]
ccaugcccagacucaucu

SEQ ID NO: 3975639 - RNA, 16 nt, Human herpesvirus 4 [Epstein-Barr virus]
ccaugccuccccagca

SEQ ID NO: 3975640 - RNA, 23 nt, Human herpesvirus 4 [Epstein-Barr virus]
cccaaacucgacuucugaagaug

SEQ ID NO: 3975641 - RNA, 24 nt, Human herpesvirus 4 [Epstein-Barr virus]
cccaaacucgacuucugaagaugu

SEQ ID NO: 3975642 - RNA, 18 nt, Human herpesvirus 4 [Epstein-Barr virus]
cccaaagggacucaaugg

SEQ ID NO: 3975643 - RNA, 18 nt, Human herpesvirus 4 [Epstein-Barr virus]
cccaagaucaaagucugu

SEQ ID NO: 3975644 - RNA, 13 nt, Human herpesvirus 4 [Epstein-Barr virus]
cccaagccuggau

SEQ ID NO: 3975645 - RNA, 23 nt, Human herpesvirus 4 [Epstein-Barr virus]
cccaccauaugaugacgccgaga

SEQ ID NO: 3975646 - RNA, 20 nt, Human herpesvirus 4 [Epstein-Barr virus]
cccaccuuuuaauucucuuc

SEQ ID NO: 3975647 - RNA, 19 nt, Human herpesvirus 4 [Epstein-Barr virus]
cccacuaucacccauggcc

SEQ ID NO: 3975648 - RNA, 18 nt, Human herpesvirus 4 [Epstein-Barr virus]
cccagacucaucucaagg

SEQ ID NO: 3975649 - RNA, 13 nt, Human herpesvirus 4 [Epstein-Barr virus]
cccagacucugcu

SEQ ID NO: 3975650 - RNA, 18 nt, Human herpesvirus 4 [Epstein-Barr virus]
cccagacucugcuuucug

SEQ ID NO: 3975651 - RNA, 21 nt, Human herpesvirus 4 [Epstein-Barr virus]
cccagacucugcuuucugccg

SEQ ID NO: 3975652 - RNA, 15 nt, Human herpesvirus 4 [Epstein-Barr virus]
cccagaggaggcccc

SEQ ID NO: 3975653 - RNA, 15 nt, Human herpesvirus 4 [Epstein-Barr virus]
cccagcccccucccg

SEQ ID NO: 3975654 - RNA, 17 nt, Human herpesvirus 4 [Epstein-Barr virus]
cccagggacauccccag

SEQ ID NO: 3975655 - RNA, 23 nt, Human herpesvirus 4 [Epstein-Barr virus]
cccagguggucuuagggcgccag

SEQ ID NO: 3975656 - RNA, 19 nt, Human herpesvirus 4 [Epstein-Barr virus]
cccauacaugucucagagg

SEQ ID NO: 3975657 - RNA, 17 nt, Human herpesvirus 4 [Epstein-Barr virus]
cccauauuggggcaaug

SEQ ID NO: 3975658 - RNA, 18 nt, Human herpesvirus 4 [Epstein-Barr virus]
cccauauuggggcaaugg

SEQ ID NO: 3975659 - RNA, 23 nt, Human herpesvirus 4 [Epstein-Barr virus]
cccaugaccaacaugagggcacc

SEQ ID NO: 3975660 - RNA, 16 nt, Human herpesvirus 4 [Epstein-Barr virus]
cccauguacagcacaa

SEQ ID NO: 3975661 - RNA, 16 nt, Human herpesvirus 4 [Epstein-Barr virus]
ccccaaaaacguccaa

SEQ ID NO: 3975662 - RNA, 23 nt, Human herpesvirus 4 [Epstein-Barr virus]
ccccacggggugcucccccugga

SEQ ID NO: 3975663 - RNA, 15 nt, Human herpesvirus 4 [Epstein-Barr virus]
ccccagaagccccca

SEQ ID NO: 3975664 - RNA, 23 nt, Human herpesvirus 4 [Epstein-Barr virus]
ccccaucuuccagcgcaagcuug

SEQ ID NO: 3975665 - RNA, 14 nt, Human herpesvirus 4 [Epstein-Barr virus]
cccccgccuuuggg

SEQ ID NO: 3975666 - RNA, 16 nt, Human herpesvirus 4 [Epstein-Barr virus]
cccccgggcgccccca

SEQ ID NO: 3975667 - RNA, 20 nt, Human herpesvirus 4 [Epstein-Barr virus]
cccccuggcggcccagcccg

SEQ ID NO: 3975668 - RNA, 16 nt, Human herpesvirus 4 [Epstein-Barr virus]
ccccgcaccagggcca

SEQ ID NO: 3975669 - RNA, 15 nt, Human herpesvirus 4 [Epstein-Barr virus]
ccccgggcgccccca

SEQ ID NO: 3975670 - RNA, 21 nt, Human herpesvirus 4 [Epstein-Barr virus]
ccccggggacaccugcacgag

SEQ ID NO: 3975671 - RNA, 13 nt, Human herpesvirus 4 [Epstein-Barr virus]
ccccuaggccugc

SEQ ID NO: 3975672 - RNA, 21 nt, Human herpesvirus 4 [Epstein-Barr virus]
ccccuccgagugaccagucac

SEQ ID NO: 3975673 - RNA, 18 nt, Human herpesvirus 4 [Epstein-Barr virus]
ccccuggcggcccagccc

SEQ ID NO: 3975674 - RNA, 16 nt, Human herpesvirus 4 [Epstein-Barr virus]
ccccuuccacguggcc

SEQ ID NO: 3975675 - RNA, 19 nt, Human herpesvirus 4 [Epstein-Barr virus]
cccgaaagcggcccagcag

SEQ ID NO: 3975676 - RNA, 20 nt, Human herpesvirus 4 [Epstein-Barr virus]
cccgacaaugagcggggaga

SEQ ID NO: 3975677 - RNA, 16 nt, Human herpesvirus 4 [Epstein-Barr virus]
cccgagaccggcuccg

SEQ ID NO: 3975678 - RNA, 13 nt, Human herpesvirus 4 [Epstein-Barr virus]
cccgcaccagggc

SEQ ID NO: 3975679 - RNA, 18 nt, Human herpesvirus 4 [Epstein-Barr virus]
cccgcaccagggccaggc

SEQ ID NO: 3975680 - RNA, 19 nt, Human herpesvirus 4 [Epstein-Barr virus]
cccgcaccccccgccacca

SEQ ID NO: 3975681 - RNA, 11 nt, Human herpesvirus 4 [Epstein-Barr virus]
cccggacggcc

SEQ ID NO: 3975682 - RNA, 20 nt, Human herpesvirus 4 [Epstein-Barr virus]
cccgggcccagcccuccuca

SEQ ID NO: 3975683 - RNA, 21 nt, Human herpesvirus 4 [Epstein-Barr virus]
cccgggcccagcccuccucag

SEQ ID NO: 3975684 - RNA, 19 nt, Human herpesvirus 4 [Epstein-Barr virus]
cccggggguggaggcugcg

SEQ ID NO: 3975685 - RNA, 19 nt, Human herpesvirus 4 [Epstein-Barr virus]
cccgggucccgccucuccg

SEQ ID NO: 3975686 - RNA, 20 nt, Human herpesvirus 4 [Epstein-Barr virus]
cccggguggugaggacggug

SEQ ID NO: 3975687 - RNA, 23 nt, Human herpesvirus 4 [Epstein-Barr virus]
cccguccagcaggcucaggccgc

SEQ ID NO: 3975688 - RNA, 20 nt, Human herpesvirus 4 [Epstein-Barr virus]
cccgugcuuuuugccaggcc

SEQ ID NO: 3975689 - RNA, 13 nt, Human herpesvirus 4 [Epstein-Barr virus]
cccucccccugcc

SEQ ID NO: 3975690 - RNA, 16 nt, Human herpesvirus 4 [Epstein-Barr virus]
cccucggugggccaga

SEQ ID NO: 3975691 - RNA, 19 nt, Human herpesvirus 4 [Epstein-Barr virus]
cccucugaugguggccggc

SEQ ID NO: 3975692 - RNA, 18 nt, Human herpesvirus 4 [Epstein-Barr virus]
cccucugccuccggccgc

SEQ ID NO: 3975693 - RNA, 16 nt, Human herpesvirus 4 [Epstein-Barr virus]
cccucuuccgugccuc

SEQ ID NO: 3975694 - RNA, 18 nt, Human herpesvirus 4 [Epstein-Barr virus]
cccugcucauaccuccac

SEQ ID NO: 3975695 - RNA, 12 nt, Human herpesvirus 4 [Epstein-Barr virus]
cccuucugcugc

SEQ ID NO: 3975696 - RNA, 13 nt, Human herpesvirus 4 [Epstein-Barr virus]
ccgaggcacuugc

SEQ ID NO: 3975697 - RNA, 21 nt, Human herpesvirus 4 [Epstein-Barr virus]
ccgagugaccagucaccuucc

SEQ ID NO: 3975698 - RNA, 21 nt, Human herpesvirus 4 [Epstein-Barr virus]
ccgcagccacguccagacucc

SEQ ID NO: 3975699 - RNA, 15 nt, Human herpesvirus 4 [Epstein-Barr virus]
ccgcagguggcugcu

SEQ ID NO: 3975700 - RNA, 13 nt, Human herpesvirus 4 [Epstein-Barr virus]
ccgccagcagccc

SEQ ID NO: 3975701 - RNA, 13 nt, Human herpesvirus 4 [Epstein-Barr virus]
ccgccaggaccug

SEQ ID NO: 3975702 - RNA, 18 nt, Human herpesvirus 4 [Epstein-Barr virus]
ccgccaggaccuggaugc

SEQ ID NO: 3975703 - RNA, 12 nt, Human herpesvirus 4 [Epstein-Barr virus]
ccgcccugagcu

SEQ ID NO: 3975704 - RNA, 17 nt, Human herpesvirus 4 [Epstein-Barr virus]
ccgccgccugcggccca

SEQ ID NO: 3975705 - RNA, 20 nt, Human herpesvirus 4 [Epstein-Barr virus]
ccgccuagagcauuugcaag

SEQ ID NO: 3975706 - RNA, 20 nt, Human herpesvirus 4 [Epstein-Barr virus]
ccgcgguuucagcaucacag

SEQ ID NO: 3975707 - RNA, 13 nt, Human herpesvirus 4 [Epstein-Barr virus]
ccgcugggccagg

SEQ ID NO: 3975708 - RNA, 19 nt, Human herpesvirus 4 [Epstein-Barr virus]
ccggacgcagaggccugca

SEQ ID NO: 3975709 - RNA, 17 nt, Human herpesvirus 4 [Epstein-Barr virus]
ccggcaccgccaggugg

SEQ ID NO: 3975710 - RNA, 17 nt, Human herpesvirus 4 [Epstein-Barr virus]
ccggcccuuugccuggg

SEQ ID NO: 3975711 - RNA, 16 nt, Human herpesvirus 4 [Epstein-Barr virus]
ccggcgagacuuggac

SEQ ID NO: 3975712 - RNA, 14 nt, Human herpesvirus 4 [Epstein-Barr virus]
ccggcuaucugcuu

SEQ ID NO: 3975713 - RNA, 14 nt, Human herpesvirus 4 [Epstein-Barr virus]
ccgggcaaacaggg

SEQ ID NO: 3975714 - RNA, 19 nt, Human herpesvirus 4 [Epstein-Barr virus]
ccgggcagguccgugagaa

SEQ ID NO: 3975715 - RNA, 22 nt, Human herpesvirus 4 [Epstein-Barr virus]
ccgggcgcccccaaacuuuguc

SEQ ID NO: 3975716 - RNA, 22 nt, Human herpesvirus 4 [Epstein-Barr virus]
ccggguacccuuucuaccaggg

SEQ ID NO: 3975717 - RNA, 17 nt, Human herpesvirus 4 [Epstein-Barr virus]
ccggucgcaugguggcu

SEQ ID NO: 3975718 - RNA, 21 nt, Human herpesvirus 4 [Epstein-Barr virus]
ccggugguggguguggagccg

SEQ ID NO: 3975719 - RNA, 19 nt, Human herpesvirus 4 [Epstein-Barr virus]
ccgugcauggcagcagaca

SEQ ID NO: 3975720 - RNA, 18 nt, Human herpesvirus 4 [Epstein-Barr virus]
ccguggagccgggggcau

SEQ ID NO: 3975721 - RNA, 22 nt, Human herpesvirus 4 [Epstein-Barr virus]
ccguuccaggcucuccagcccc

SEQ ID NO: 3975722 - RNA, 20 nt, Human herpesvirus 4 [Epstein-Barr virus]
ccuacaccaagauagugacc

SEQ ID NO: 3975723 - RNA, 18 nt, Human herpesvirus 4 [Epstein-Barr virus]
ccuacgcugcccuagagg

SEQ ID NO: 3975724 - RNA, 23 nt, Human herpesvirus 4 [Epstein-Barr virus]
ccuagagguuuugcuagggagga

SEQ ID NO: 3975725 - RNA, 21 nt, Human herpesvirus 4 [Epstein-Barr virus]
ccuagccccgggcccagcccu

SEQ ID NO: 3975726 - RNA, 19 nt, Human herpesvirus 4 [Epstein-Barr virus]
ccuagugguuucggacaca

SEQ ID NO: 3975727 - RNA, 13 nt, Human herpesvirus 4 [Epstein-Barr virus]
ccuaucacaggga

SEQ ID NO: 3975728 - RNA, 15 nt, Human herpesvirus 4 [Epstein-Barr virus]
ccucagaggaggagg

SEQ ID NO: 3975729 - RNA, 16 nt, Human herpesvirus 4 [Epstein-Barr virus]
ccucagauagccggac

SEQ ID NO: 3975730 - RNA, 23 nt, Human herpesvirus 4 [Epstein-Barr virus]
ccucagcgcagggaugccuggac

SEQ ID NO: 3975731 - RNA, 14 nt, Human herpesvirus 4 [Epstein-Barr virus]
ccucaucccugacc

SEQ ID NO: 3975732 - RNA, 14 nt, Human herpesvirus 4 [Epstein-Barr virus]
ccucauccuggccc

SEQ ID NO: 3975733 - RNA, 23 nt, Human herpesvirus 4 [Epstein-Barr virus]
ccuccacuuacaaccaagccacu

SEQ ID NO: 3975734 - RNA, 14 nt, Human herpesvirus 4 [Epstein-Barr virus]
ccuccagagccccu

SEQ ID NO: 3975735 - RNA, 13 nt, Human herpesvirus 4 [Epstein-Barr virus]
ccucccgccccug

SEQ ID NO: 3975736 - RNA, 22 nt, Human herpesvirus 4 [Epstein-Barr virus]
ccuccgguuugaacaucagacc

SEQ ID NO: 3975737 - RNA, 18 nt, Human herpesvirus 4 [Epstein-Barr virus]
ccucgaaggugcagcugg

SEQ ID NO: 3975738 - RNA, 16 nt, Human herpesvirus 4 [Epstein-Barr virus]
ccucgccuucuccuca

SEQ ID NO: 3975739 - RNA, 13 nt, Human herpesvirus 4 [Epstein-Barr virus]
ccucggagucuuc

SEQ ID NO: 3975740 - RNA, 19 nt, Human herpesvirus 4 [Epstein-Barr virus]
ccucggcgccaacgcgcca

SEQ ID NO: 3975741 - RNA, 20 nt, Human herpesvirus 4 [Epstein-Barr virus]
ccucgugcaaccaggcccac

SEQ ID NO: 3975742 - RNA, 14 nt, Human herpesvirus 4 [Epstein-Barr virus]
ccucgugcaccuau

SEQ ID NO: 3975743 - RNA, 14 nt, Human herpesvirus 4 [Epstein-Barr virus]
ccucuaaguacagg

SEQ ID NO: 3975744 - RNA, 21 nt, Human herpesvirus 4 [Epstein-Barr virus]
ccucucgccuuguuucucaga

SEQ ID NO: 3975745 - RNA, 13 nt, Human herpesvirus 4 [Epstein-Barr virus]
ccucuggcacgcc

SEQ ID NO: 3975746 - RNA, 12 nt, Human herpesvirus 4 [Epstein-Barr virus]
ccucugggagaa

SEQ ID NO: 3975747 - RNA, 11 nt, Human herpesvirus 4 [Epstein-Barr virus]
ccucugggugc

SEQ ID NO: 3975748 - RNA, 23 nt, Human herpesvirus 4 [Epstein-Barr virus]
ccugagaaugcuuaucaagcuua

SEQ ID NO: 3975749 - RNA, 20 nt, Human herpesvirus 4 [Epstein-Barr virus]
ccugagcauggcggccuggc

SEQ ID NO: 3975750 - RNA, 20 nt, Human herpesvirus 4 [Epstein-Barr virus]
ccugaguucuacaaugccag

SEQ ID NO: 3975751 - RNA, 23 nt, Human herpesvirus 4 [Epstein-Barr virus]
ccugaucugggagaugagauaga

SEQ ID NO: 3975752 - RNA, 19 nt, Human herpesvirus 4 [Epstein-Barr virus]
ccugaugagucacacccca

SEQ ID NO: 3975753 - RNA, 16 nt, Human herpesvirus 4 [Epstein-Barr virus]
ccugauuugcucuucg

SEQ ID NO: 3975754 - RNA, 19 nt, Human herpesvirus 4 [Epstein-Barr virus]
ccugccaaagagccagauc

SEQ ID NO: 3975755 - RNA, 23 nt, Human herpesvirus 4 [Epstein-Barr virus]
ccugccggaguuuucucccccag

SEQ ID NO: 3975756 - RNA, 13 nt, Human herpesvirus 4 [Epstein-Barr virus]
ccugcuucacgcc

SEQ ID NO: 3975757 - RNA, 14 nt, Human herpesvirus 4 [Epstein-Barr virus]
ccuggcggcccagc

SEQ ID NO: 3975758 - RNA, 20 nt, Human herpesvirus 4 [Epstein-Barr virus]
ccuggcggcccagcccgacc

SEQ ID NO: 3975759 - RNA, 15 nt, Human herpesvirus 4 [Epstein-Barr virus]
ccugggccccccgga

SEQ ID NO: 3975760 - RNA, 21 nt, Human herpesvirus 4 [Epstein-Barr virus]
ccugucucuuucuggccaacc

SEQ ID NO: 3975761 - RNA, 20 nt, Human herpesvirus 4 [Epstein-Barr virus]
ccuguggccccggcuggcca

SEQ ID NO: 3975762 - RNA, 15 nt, Human herpesvirus 4 [Epstein-Barr virus]
ccuguguccugggca

SEQ ID NO: 3975763 - RNA, 12 nt, Human herpesvirus 4 [Epstein-Barr virus]
ccuguugauggu

SEQ ID NO: 3975764 - RNA, 18 nt, Human herpesvirus 4 [Epstein-Barr virus]
ccuguuucggcgccgccc

SEQ ID NO: 3975765 - RNA, 17 nt, Human herpesvirus 4 [Epstein-Barr virus]
ccuuacacuggaaagug

SEQ ID NO: 3975766 - RNA, 14 nt, Human herpesvirus 4 [Epstein-Barr virus]
ccuugcguggugcu

SEQ ID NO: 3975767 - RNA, 18 nt, Human herpesvirus 4 [Epstein-Barr virus]
ccuugggugaccuggcca

SEQ ID NO: 3975768 - RNA, 17 nt, Human herpesvirus 4 [Epstein-Barr virus]
ccuugucuuugguggau

SEQ ID NO: 3975769 - RNA, 12 nt, Human herpesvirus 4 [Epstein-Barr virus]
ucccaggccuca

SEQ ID NO: 3975770 - RNA, 14 nt, Human herpesvirus 4 [Epstein-Barr virus]
ucccauaccuacac

SEQ ID NO: 3975771 - RNA, 19 nt, Human herpesvirus 4 [Epstein-Barr virus]
ucccccaaacauguccugu

SEQ ID NO: 3975772 - RNA, 22 nt, Human herpesvirus 4 [Epstein-Barr virus]
ucccccaaacauguccuguuag

SEQ ID NO: 3975773 - RNA, 16 nt, Human herpesvirus 4 [Epstein-Barr virus]
ucccccuagccccggc

SEQ ID NO: 3975774 - RNA, 21 nt, Human herpesvirus 4 [Epstein-Barr virus]
uccccgagggugaggcccagc

SEQ ID NO: 3975775 - RNA, 15 nt, Human herpesvirus 4 [Epstein-Barr virus]
uccccggccucccgc

SEQ ID NO: 3975776 - RNA, 22 nt, Human herpesvirus 4 [Epstein-Barr virus]
uccccuuguauuugcuauucaa

SEQ ID NO: 3975777 - RNA, 16 nt, Human herpesvirus 4 [Epstein-Barr virus]
ucccgccccuguccac

SEQ ID NO: 3975778 - RNA, 15 nt, Human herpesvirus 4 [Epstein-Barr virus]
ucccgugcuuuuugc

SEQ ID NO: 3975779 - RNA, 18 nt, Human herpesvirus 4 [Epstein-Barr virus]
uccgcggugguggcccuc

SEQ ID NO: 3975780 - RNA, 20 nt, Human herpesvirus 4 [Epstein-Barr virus]
uccgcuuuaagaccaaggcc

SEQ ID NO: 3975781 - RNA, 14 nt, Human herpesvirus 4 [Epstein-Barr virus]
uccggaggggacca

SEQ ID NO: 3975782 - RNA, 21 nt, Human herpesvirus 4 [Epstein-Barr virus]
uccggcugcccgucucggccu

SEQ ID NO: 3975783 - RNA, 16 nt, Human herpesvirus 4 [Epstein-Barr virus]
uccgggcuccaugucc

SEQ ID NO: 3975784 - RNA, 21 nt, Human herpesvirus 4 [Epstein-Barr virus]
uccgggucaggucgcggacca

SEQ ID NO: 3975785 - RNA, 18 nt, Human herpesvirus 4 [Epstein-Barr virus]
uccuacaacucagcccca

SEQ ID NO: 3975786 - RNA, 22 nt, Human herpesvirus 4 [Epstein-Barr virus]
uccucaaauguuccagaagucg

SEQ ID NO: 3975787 - RNA, 15 nt, Human herpesvirus 4 [Epstein-Barr virus]
uccucaagcccuucu

SEQ ID NO: 3975788 - RNA, 21 nt, Human herpesvirus 4 [Epstein-Barr virus]
uccucauuggcuuugcccucu

SEQ ID NO: 3975789 - RNA, 20 nt, Human herpesvirus 4 [Epstein-Barr virus]
uccucauuucaguggcccuc

SEQ ID NO: 3975790 - RNA, 23 nt, Human herpesvirus 4 [Epstein-Barr virus]
ucgaugccgcuuacagccagaga

SEQ ID NO: 3975791 - RNA, 21 nt, Human herpesvirus 4 [Epstein-Barr virus]
ucgauuggaaaagggcccagg

SEQ ID NO: 3975792 - RNA, 19 nt, Human herpesvirus 4 [Epstein-Barr virus]
ucgccuucuccucagccuc

SEQ ID NO: 3975793 - RNA, 17 nt, Human herpesvirus 4 [Epstein-Barr virus]
ucgccuuguuucucaga

SEQ ID NO: 3975794 - RNA, 18 nt, Human herpesvirus 4 [Epstein-Barr virus]
ucgcgugacggcauucgu

SEQ ID NO: 3975795 - RNA, 14 nt, Human herpesvirus 4 [Epstein-Barr virus]
ucggcaccuccucg

SEQ ID NO: 3975796 - RNA, 10 nt, Human herpesvirus 4 [Epstein-Barr virus]
ucggcgccgc

SEQ ID NO: 3975797 - RNA, 19 nt, Human herpesvirus 4 [Epstein-Barr virus]
ucggucaaguaccagcugg

SEQ ID NO: 3975798 - RNA, 13 nt, Human herpesvirus 4 [Epstein-Barr virus]
ucggugggccaga

SEQ ID NO: 3975799 - RNA, 15 nt, Human herpesvirus 4 [Epstein-Barr virus]
ucgugagucugcugg

SEQ ID NO: 3975800 - RNA, 22 nt, Human herpesvirus 4 [Epstein-Barr virus]
ucgugcucuucauguccacuga

SEQ ID NO: 3975801 - RNA, 13 nt, Human herpesvirus 4 [Epstein-Barr virus]
ucguuaugcacuc

SEQ ID NO: 3975802 - RNA, 13 nt, Human herpesvirus 4 [Epstein-Barr virus]
ucuaacaguucac

SEQ ID NO: 3975803 - RNA, 14 nt, Human herpesvirus 4 [Epstein-Barr virus]
ucuacaaugccagg

SEQ ID NO: 3975804 - RNA, 15 nt, Human herpesvirus 4 [Epstein-Barr virus]
ucuacccuccccaug

SEQ ID NO: 3975805 - RNA, 23 nt, Human herpesvirus 4 [Epstein-Barr virus]
ucuaccuggucaagagcuuccug

SEQ ID NO: 3975806 - RNA, 12 nt, Human herpesvirus 4 [Epstein-Barr virus]
ucucauccccag

SEQ ID NO: 3975807 - RNA, 15 nt, Human herpesvirus 4 [Epstein-Barr virus]
ucucccacugucacu

SEQ ID NO: 3975808 - RNA, 13 nt, Human herpesvirus 4 [Epstein-Barr virus]
ucuccccugacgc

SEQ ID NO: 3975809 - RNA, 23 nt, Human herpesvirus 4 [Epstein-Barr virus]
ucuccucagccuccaacaggugc

SEQ ID NO: 3975810 - RNA, 14 nt, Human herpesvirus 4 [Epstein-Barr virus]
ucucuggcugugcu

SEQ ID NO: 3975811 - RNA, 21 nt, Human herpesvirus 4 [Epstein-Barr virus]
ucucuguuucuguacaauggg

SEQ ID NO: 3975812 - RNA, 15 nt, Human herpesvirus 4 [Epstein-Barr virus]
ucucuuaugccugug

SEQ ID NO: 3975813 - RNA, 15 nt, Human herpesvirus 4 [Epstein-Barr virus]
ucugacauuucucau

SEQ ID NO: 3975814 - RNA, 19 nt, Human herpesvirus 4 [Epstein-Barr virus]
ucugaccgacgggcaucuu

SEQ ID NO: 3975815 - RNA, 13 nt, Human herpesvirus 4 [Epstein-Barr virus]
ucugccacaaggc

SEQ ID NO: 3975816 - RNA, 14 nt, Human herpesvirus 4 [Epstein-Barr virus]
ucugccacaaggcc

SEQ ID NO: 3975817 - RNA, 15 nt, Human herpesvirus 4 [Epstein-Barr virus]
ucugccuccggccgc

SEQ ID NO: 3975818 - RNA, 15 nt, Human herpesvirus 4 [Epstein-Barr virus]
ucugcugcugcuggu

SEQ ID NO: 3975819 - RNA, 23 nt, Human herpesvirus 4 [Epstein-Barr virus]
ucugcuggacuccgaggaccagg

SEQ ID NO: 3975820 - RNA, 21 nt, Human herpesvirus 4 [Epstein-Barr virus]
ucugguugauaaucucaaaga

SEQ ID NO: 3975821 - RNA, 15 nt, Human herpesvirus 4 [Epstein-Barr virus]
ucuuacugcccagcc

SEQ ID NO: 3975822 - RNA, 15 nt, Human herpesvirus 4 [Epstein-Barr virus]
ucuucauucuugcua

SEQ ID NO: 3975823 - RNA, 12 nt, Human herpesvirus 4 [Epstein-Barr virus]
ucuuggcagcag

SEQ ID NO: 3975824 - RNA, 23 nt, Human herpesvirus 4 [Epstein-Barr virus]
ucuuguaacggcauagggggagg

SEQ ID NO: 3975825 - RNA, 20 nt, Human herpesvirus 4 [Epstein-Barr virus]
ugaagaucgugaggccugag

SEQ ID NO: 3975826 - RNA, 12 nt, Human herpesvirus 4 [Epstein-Barr virus]
ugaaucaggguc

SEQ ID NO: 3975827 - RNA, 15 nt, Human herpesvirus 4 [Epstein-Barr virus]
ugacagcugucaccc

SEQ ID NO: 3975828 - RNA, 18 nt, Human herpesvirus 4 [Epstein-Barr virus]
ugaccacucaggaagcug

SEQ ID NO: 3975829 - RNA, 18 nt, Human herpesvirus 4 [Epstein-Barr virus]
ugacccauaccaggugcc

SEQ ID NO: 3975830 - RNA, 17 nt, Human herpesvirus 4 [Epstein-Barr virus]
ugacccuucugcugcug

SEQ ID NO: 3975831 - RNA, 22 nt, Human herpesvirus 4 [Epstein-Barr virus]
ugaccucuacacgcuuggaguc

SEQ ID NO: 3975832 - RNA, 16 nt, Human herpesvirus 4 [Epstein-Barr virus]
ugagaacuuucuucua

SEQ ID NO: 3975833 - RNA, 23 nt, Human herpesvirus 4 [Epstein-Barr virus]
ugagccacuccggacgcagaggc

SEQ ID NO: 3975834 - RNA, 21 nt, Human herpesvirus 4 [Epstein-Barr virus]
ugagcgugugcacccggcugg

SEQ ID NO: 3975835 - RNA, 18 nt, Human herpesvirus 4 [Epstein-Barr virus]
ugaggaggcacacaaaau

SEQ ID NO: 3975836 - RNA, 12 nt, Human herpesvirus 4 [Epstein-Barr virus]
ugaggcccagcc

SEQ ID NO: 3975837 - RNA, 14 nt, Human herpesvirus 4 [Epstein-Barr virus]
ugaggcccagcccc

SEQ ID NO: 3975838 - RNA, 19 nt, Human herpesvirus 4 [Epstein-Barr virus]
ugaggcugaugauggccac

SEQ ID NO: 3975839 - RNA, 16 nt, Human herpesvirus 4 [Epstein-Barr virus]
ugagucagccuugccc

SEQ ID NO: 3975840 - RNA, 16 nt, Human herpesvirus 4 [Epstein-Barr virus]
ugaguccaacauuaaa

SEQ ID NO: 3975841 - RNA, 17 nt, Human herpesvirus 4 [Epstein-Barr virus]
ugauauugaauuccaca

SEQ ID NO: 3975842 - RNA, 20 nt, Human herpesvirus 4 [Epstein-Barr virus]
ugauguucaaaccggaggau

SEQ ID NO: 3975843 - RNA, 13 nt, Human herpesvirus 4 [Epstein-Barr virus]
ugauugagaucag

SEQ ID NO: 3975844 - RNA, 17 nt, Human herpesvirus 4 [Epstein-Barr virus]
ugcaacaaucuggacuc

SEQ ID NO: 3975845 - RNA, 21 nt, Human herpesvirus 4 [Epstein-Barr virus]
ugcaauuugccuaacauggag

SEQ ID NO: 3975846 - RNA, 17 nt, Human herpesvirus 4 [Epstein-Barr virus]
ugcacacgcucagcuca

SEQ ID NO: 3975847 - RNA, 21 nt, Human herpesvirus 4 [Epstein-Barr virus]
ugcacagaucugaccacggcc

SEQ ID NO: 3975848 - RNA, 17 nt, Human herpesvirus 4 [Epstein-Barr virus]
ugcacaggcuuggaaac

SEQ ID NO: 3975849 - RNA, 17 nt, Human herpesvirus 4 [Epstein-Barr virus]
ugcacccacccccaccc

SEQ ID NO: 3975850 - RNA, 18 nt, Human herpesvirus 4 [Epstein-Barr virus]
ugcacccacccccacccu

SEQ ID NO: 3975851 - RNA, 16 nt, Human herpesvirus 4 [Epstein-Barr virus]
ugcaccgauagcaugg

SEQ ID NO: 3975852 - RNA, 23 nt, Human herpesvirus 4 [Epstein-Barr virus]
ugcagcaccucagcuguucccag

SEQ ID NO: 3975853 - RNA, 12 nt, Human herpesvirus 4 [Epstein-Barr virus]
ugcaggcuggac

SEQ ID NO: 3975854 - RNA, 14 nt, Human herpesvirus 4 [Epstein-Barr virus]
ugcaguauguacag

SEQ ID NO: 3975855 - RNA, 13 nt, Human herpesvirus 4 [Epstein-Barr virus]
ugcagugggugag

SEQ ID NO: 3975856 - RNA, 19 nt, Human herpesvirus 4 [Epstein-Barr virus]
ugcaucuaagguccauccc

SEQ ID NO: 3975857 - RNA, 17 nt, Human herpesvirus 5
aaaucaucguucgcaug

SEQ ID NO: 3975858 - RNA, 12 nt, Human herpesvirus 5
aacaacagcagc

SEQ ID NO: 3975859 - RNA, 13 nt, Human herpesvirus 5
aacacgcaacacg

SEQ ID NO: 3975860 - RNA, 16 nt, Human herpesvirus 5
aacacuccucuccccg

SEQ ID NO: 3975861 - RNA, 14 nt, Human herpesvirus 5
aacacuggcugcgc

SEQ ID NO: 3975862 - RNA, 20 nt, Human herpesvirus 5
aacagccccgaagguuagcg

SEQ ID NO: 3975863 - RNA, 20 nt, Human herpesvirus 5
aacagccuguggcaccgccu

SEQ ID NO: 3975864 - RNA, 13 nt, Human herpesvirus 5
aacaucuuaagaa

SEQ ID NO: 3975865 - RNA, 21 nt, Human herpesvirus 5
aaccaagucuugccgugacgu

SEQ ID NO: 3975866 - RNA, 20 nt, Human herpesvirus 5
aaccagauacaacgucaugc

SEQ ID NO: 3975867 - RNA, 21 nt, Human herpesvirus 5
aaccagcugguaccugaaacc

SEQ ID NO: 3975868 - RNA, 21 nt, Human herpesvirus 5
aacccaaguagcggcgcgccc

SEQ ID NO: 3975869 - RNA, 11 nt, Human herpesvirus 5
aacccaucccc

SEQ ID NO: 3975870 - RNA, 23 nt, Human herpesvirus 5
aacccugggcuauaugcaucgga

SEQ ID NO: 3975871 - RNA, 19 nt, Human herpesvirus 5
aaccgcgcaaaaccacgcg

SEQ ID NO: 3975872 - RNA, 18 nt, Human herpesvirus 5
aaccgucgaaaacaacca

SEQ ID NO: 3975873 - RNA, 22 nt, Human herpesvirus 5
aaccgugcccguuuucacagca

SEQ ID NO: 3975874 - RNA, 15 nt, Human herpesvirus 5
aaccuaccugggcug

SEQ ID NO: 3975875 - RNA, 13 nt, Human herpesvirus 5
aaccuacgugcaa

SEQ ID NO: 3975876 - RNA, 16 nt, Human herpesvirus 5
aaccuacgugcaacgc

SEQ ID NO: 3975877 - RNA, 14 nt, Human herpesvirus 5
aaccugcugcacuu

SEQ ID NO: 3975878 - RNA, 13 nt, Human herpesvirus 5
aaccuggagcagc

SEQ ID NO: 3975879 - RNA, 20 nt, Human herpesvirus 5
aacgacaguaguagcggcag

SEQ ID NO: 3975880 - RNA, 17 nt, Human herpesvirus 5
aacgaggucguggaucu

SEQ ID NO: 3975881 - RNA, 16 nt, Human herpesvirus 5
aacgccgagcucuguc

SEQ ID NO: 3975882 - RNA, 13 nt, Human herpesvirus 5
aacgcuggcucac

SEQ ID NO: 3975883 - RNA, 13 nt, Human herpesvirus 5
aacguaacagcaa

SEQ ID NO: 3975884 - RNA, 19 nt, Human herpesvirus 5
aacgucaucucgccgacgu

SEQ ID NO: 3975885 - RNA, 18 nt, Human herpesvirus 5
aacgucguuguguucuua

SEQ ID NO: 3975886 - RNA, 18 nt, Human herpesvirus 5
aacgugccacgugacuca

SEQ ID NO: 3975887 - RNA, 12 nt, Human herpesvirus 5
aacgugugguga

SEQ ID NO: 3975888 - RNA, 14 nt, Human herpesvirus 5
aacguguggugaga

SEQ ID NO: 3975889 - RNA, 16 nt, Human herpesvirus 5
aacucuuuccccgccc

SEQ ID NO: 3975890 - RNA, 16 nt, Human herpesvirus 5
aacuguuccacggcca

SEQ ID NO: 3975891 - RNA, 21 nt, Human herpesvirus 5
aacuugagcacaaaaauacug

SEQ ID NO: 3975892 - RNA, 18 nt, Human herpesvirus 5
aacuuugccgucaugccu

SEQ ID NO: 3975893 - RNA, 16 nt, Human herpesvirus 5
aagaaaaaaugguguu

SEQ ID NO: 3975894 - RNA, 13 nt, Human herpesvirus 5
aagaaacgcugga

SEQ ID NO: 3975895 - RNA, 18 nt, Human herpesvirus 5
aagaaucuaggaacacug

SEQ ID NO: 3975896 - RNA, 23 nt, Human herpesvirus 5
aagacgggacggcugccucucau

SEQ ID NO: 3975897 - RNA, 13 nt, Human herpesvirus 5
aagacgggccugg

SEQ ID NO: 3975898 - RNA, 16 nt, Human herpesvirus 5
aagcccguggcccagg

SEQ ID NO: 3975899 - RNA, 20 nt, Human herpesvirus 5
aagccgacaaccugcugcac

SEQ ID NO: 3975900 - RNA, 13 nt, Human herpesvirus 5
aagccggcagcug

SEQ ID NO: 3975901 - RNA, 21 nt, Human herpesvirus 5
aagccuccggaacccucuggc

SEQ ID NO: 3975902 - RNA, 17 nt, Human herpesvirus 5
aagcgccgugcucuugg

SEQ ID NO: 3975903 - RNA, 21 nt, Human herpesvirus 5
aagcgcggagguuugucuggc

SEQ ID NO: 3975904 - RNA, 17 nt, Human herpesvirus 5
aagcuauaccaucaccu

SEQ ID NO: 3975905 - RNA, 22 nt, Human herpesvirus 5
aagcugcugguggugacccagg

SEQ ID NO: 3975906 - RNA, 14 nt, Human herpesvirus 5
aagcugucagccuc

SEQ ID NO: 3975907 - RNA, 22 nt, Human herpesvirus 5
aaggccgccucuucuggcccuc

SEQ ID NO: 3975908 - RNA, 15 nt, Human herpesvirus 5
aaggcggcggccgca

SEQ ID NO: 3975909 - RNA, 15 nt, Human herpesvirus 5
aagggagccccauca

SEQ ID NO: 3975910 - RNA, 18 nt, Human herpesvirus 5
aagggcgaaaacguuucg

SEQ ID NO: 3975911 - RNA, 13 nt, Human herpesvirus 5
aagggcugcucgg

SEQ ID NO: 3975912 - RNA, 22 nt, Human herpesvirus 5
aaggggaaaaggaauagcaaga

SEQ ID NO: 3975913 - RNA, 13 nt, Human herpesvirus 5
aagggugugacug

SEQ ID NO: 3975914 - RNA, 13 nt, Human herpesvirus 5
aaggucguucucc

SEQ ID NO: 3975915 - RNA, 12 nt, Human herpesvirus 5
aaguaugugcuc

SEQ ID NO: 3975916 - RNA, 12 nt, Human herpesvirus 5
aauaaaaaccac

SEQ ID NO: 3975917 - RNA, 15 nt, Human herpesvirus 5
aauaauauacacacg

SEQ ID NO: 3975918 - RNA, 15 nt, Human herpesvirus 5
aauaauggucaauaa

SEQ ID NO: 3975919 - RNA, 14 nt, Human herpesvirus 5
aauacagaguccgu

SEQ ID NO: 3975920 - RNA, 20 nt, Human herpesvirus 5
aauaugggaauuccccugcc

SEQ ID NO: 3975921 - RNA, 16 nt, Human herpesvirus 5
aauauugcuucguaua

SEQ ID NO: 3975922 - RNA, 13 nt, Human herpesvirus 5
aaucgucggcaga

SEQ ID NO: 3975923 - RNA, 15 nt, Human herpesvirus 5
aaucuccugagacac

SEQ ID NO: 3975924 - RNA, 17 nt, Human herpesvirus 5
aaucuuccccucugcug

SEQ ID NO: 3975925 - RNA, 19 nt, Human herpesvirus 5
aaucuuccccucugcugcu

SEQ ID NO: 3975926 - RNA, 19 nt, Human herpesvirus 5
aaugcgucugcaacggcau

SEQ ID NO: 3975927 - RNA, 20 nt, Human herpesvirus 5
aaugcuaguuuguagaggcu

SEQ ID NO: 3975928 - RNA, 14 nt, Human herpesvirus 5
aauggaagccauac

SEQ ID NO: 3975929 - RNA, 18 nt, Human herpesvirus 5
aauugcgggcccugcuga

SEQ ID NO: 3975930 - RNA, 17 nt, Human herpesvirus 5
acaaauaccaacacuau

SEQ ID NO: 3975931 - RNA, 21 nt, Human herpesvirus 5
acaacaccacggcacgacaua

SEQ ID NO: 3975932 - RNA, 21 nt, Human herpesvirus 5
acaacaccguguaaggaaaac

SEQ ID NO: 3975933 - RNA, 13 nt, Human herpesvirus 5
acaacacuacccu

SEQ ID NO: 3975934 - RNA, 15 nt, Human herpesvirus 5
acaacagucgcagcc

SEQ ID NO: 3975935 - RNA, 13 nt, Human herpesvirus 5
acaaccugcugca

SEQ ID NO: 3975936 - RNA, 18 nt, Human herpesvirus 5
acaaccuguggaauaccc

SEQ ID NO: 3975937 - RNA, 16 nt, Human herpesvirus 5
acaacggccgccgcag

SEQ ID NO: 3975938 - RNA, 23 nt, Human herpesvirus 5
acaagacggcuauccagcagcug

SEQ ID NO: 3975939 - RNA, 17 nt, Human herpesvirus 5
acaagcgccgucacuuc

SEQ ID NO: 3975940 - RNA, 12 nt, Human herpesvirus 5
acaagggcuggc

SEQ ID NO: 3975941 - RNA, 18 nt, Human herpesvirus 5
acaaggucguucuccucg

SEQ ID NO: 3975942 - RNA, 14 nt, Human herpesvirus 5
acaaguauuuauga

SEQ ID NO: 3975943 - RNA, 15 nt, Human herpesvirus 5
acacaccgcuuuggu

SEQ ID NO: 3975944 - RNA, 23 nt, Human herpesvirus 5
acacagaagaaaaaaacacaucg

SEQ ID NO: 3975945 - RNA, 12 nt, Human herpesvirus 5
acacauugcuga

SEQ ID NO: 3975946 - RNA, 23 nt, Human herpesvirus 5
acaccaguauugguucugggcgc

SEQ ID NO: 3975947 - RNA, 13 nt, Human herpesvirus 5
acacccugcggag

SEQ ID NO: 3975948 - RNA, 22 nt, Human herpesvirus 5
acacgcgcuacgaaacuuuucu

SEQ ID NO: 3975949 - RNA, 23 nt, Human herpesvirus 5
acacgcgcuacgaaacuuuucug

SEQ ID NO: 3975950 - RNA, 13 nt, Human herpesvirus 5
acacggggauuuu

SEQ ID NO: 3975951 - RNA, 18 nt, Human herpesvirus 5
acacguaaaguagcuggu

SEQ ID NO: 3975952 - RNA, 14 nt, Human herpesvirus 5
acacguugcuuucg

SEQ ID NO: 3975953 - RNA, 21 nt, Human herpesvirus 5
acacguuguuugucugcgacg

SEQ ID NO: 3975954 - RNA, 15 nt, Human herpesvirus 5
acacuacagcuugca

SEQ ID NO: 3975955 - RNA, 23 nt, Human herpesvirus 5
acacucgugacgucaaucaaauc

SEQ ID NO: 3975956 - RNA, 18 nt, Human herpesvirus 5
acacucuggcccugcugu

SEQ ID NO: 3975957 - RNA, 21 nt, Human herpesvirus 5
acacuugaauaaauaaaccgg

SEQ ID NO: 3975958 - RNA, 21 nt, Human herpesvirus 5
acagagacaccaauugcuuua

SEQ ID NO: 3975959 - RNA, 13 nt, Human herpesvirus 5
acagcagcaacag

SEQ ID NO: 3975960 - RNA, 21 nt, Human herpesvirus 5
acagcagcaacagcagccacc

SEQ ID NO: 3975961 - RNA, 11 nt, Human herpesvirus 5
acagcagcucg

SEQ ID NO: 3975962 - RNA, 17 nt, Human herpesvirus 5
acagcggcgacagacgg

SEQ ID NO: 3975963 - RNA, 14 nt, Human herpesvirus 5
acagcguccacagu

SEQ ID NO: 3975964 - RNA, 16 nt, Human herpesvirus 5
acagcguccacaguuu

SEQ ID NO: 3975965 - RNA, 15 nt, Human herpesvirus 5
acagcuaccucauga

SEQ ID NO: 3975966 - RNA, 17 nt, Human herpesvirus 5
acaggacgaggcagggu

SEQ ID NO: 3975967 - RNA, 17 nt, Human herpesvirus 5
acaggccagcugccacc

SEQ ID NO: 3975968 - RNA, 15 nt, Human herpesvirus 5
acaggcgccgcaaac

SEQ ID NO: 3975969 - RNA, 18 nt, Human herpesvirus 5
acaggcucgucgugggcu

SEQ ID NO: 3975970 - RNA, 19 nt, Human herpesvirus 5
acaggggaucuauaaaugu

SEQ ID NO: 3975971 - RNA, 22 nt, Human herpesvirus 5
acagguagguggccaugaugac

SEQ ID NO: 3975972 - RNA, 21 nt, Human herpesvirus 5
aggccaccgggacggccuggg

SEQ ID NO: 3975973 - RNA, 22 nt, Human herpesvirus 5
aggccucguugcacgagugggc

SEQ ID NO: 3975974 - RNA, 14 nt, Human herpesvirus 5
aggcgauccggacc

SEQ ID NO: 3975975 - RNA, 11 nt, Human herpesvirus 5
aggcgcucgug

SEQ ID NO: 3975976 - RNA, 21 nt, Human herpesvirus 5
aggcgcuggacgccaucaugg

SEQ ID NO: 3975977 - RNA, 13 nt, Human herpesvirus 5
aggcggaggagag

SEQ ID NO: 3975978 - RNA, 18 nt, Human herpesvirus 5
aggcggcguggacuggga

SEQ ID NO: 3975979 - RNA, 13 nt, Human herpesvirus 5
agggacgagcagc

SEQ ID NO: 3975980 - RNA, 19 nt, Human herpesvirus 5
agggcgcgcgucuggacgc

SEQ ID NO: 3975981 - RNA, 15 nt, Human herpesvirus 5
agguagguggccaug

SEQ ID NO: 3975982 - RNA, 20 nt, Human herpesvirus 5
agguauuccgaaaccuguau

SEQ ID NO: 3975983 - RNA, 14 nt, Human herpesvirus 5
aggucgaaagccac

SEQ ID NO: 3975984 - RNA, 16 nt, Human herpesvirus 5
aggucguggaggcagc

SEQ ID NO: 3975985 - RNA, 17 nt, Human herpesvirus 5
aggugcugcaccucaac

SEQ ID NO: 3975986 - RNA, 14 nt, Human herpesvirus 5
aggugcuggcggcc

SEQ ID NO: 3975987 - RNA, 15 nt, Human herpesvirus 5
agguuagcgccgcgg

SEQ ID NO: 3975988 - RNA, 13 nt, Human herpesvirus 5
agguugcgccgca

SEQ ID NO: 3975989 - RNA, 16 nt, Human herpesvirus 5
aguauacuaaacucug

SEQ ID NO: 3975990 - RNA, 16 nt, Human herpesvirus 5
aguaucaccuggaagg

SEQ ID NO: 3975991 - RNA, 19 nt, Human herpesvirus 5
agucagacccacuaccugg

SEQ ID NO: 3975992 - RNA, 19 nt, Human herpesvirus 5
agucauuaugauuuccucc

SEQ ID NO: 3975993 - RNA, 13 nt, Human herpesvirus 5
aguccaccucugc

SEQ ID NO: 3975994 - RNA, 20 nt, Human herpesvirus 5
agucgcuuagccaccaccug

SEQ ID NO: 3975995 - RNA, 19 nt, Human herpesvirus 5
agugguggggcugcgucgc

SEQ ID NO: 3975996 - RNA, 18 nt, Human herpesvirus 5
agugucucuaaacgccac

SEQ ID NO: 3975997 - RNA, 20 nt, Human herpesvirus 5
aguuaucagcaauaaaagca

SEQ ID NO: 3975998 - RNA, 23 nt, Human herpesvirus 5
aguugggucccagcgagcugcgc

SEQ ID NO: 3975999 - RNA, 22 nt, Human herpesvirus 5
aguuuaucgagcgcgcucuuga

SEQ ID NO: 3976000 - RNA, 15 nt, Human herpesvirus 5
auaagaaaagacaau

SEQ ID NO: 3976001 - RNA, 11 nt, Human herpesvirus 5
auaagcaccgu

SEQ ID NO: 3976002 - RNA, 13 nt, Human herpesvirus 5
auaauaccacaac

SEQ ID NO: 3976003 - RNA, 23 nt, Human herpesvirus 5
auaauagauuagcagaaggaaua

SEQ ID NO: 3976004 - RNA, 18 nt, Human herpesvirus 5
auaaucgccguuucguaa

SEQ ID NO: 3976005 - RNA, 11 nt, Human herpesvirus 5
auacacacgga

SEQ ID NO: 3976006 - RNA, 17 nt, Human herpesvirus 5
auacaucgcauaugacg

SEQ ID NO: 3976007 - RNA, 22 nt, Human herpesvirus 5
auacauugcccuucuggagcac

SEQ ID NO: 3976008 - RNA, 24 nt, Human herpesvirus 5
auacgacgauguuuuuugaaucau

SEQ ID NO: 3976009 - RNA, 14 nt, Human herpesvirus 5
auacgauaauugcu

SEQ ID NO: 3976010 - RNA, 24 nt, Human herpesvirus 5
auacuaauauccgcguuaucagaa

SEQ ID NO: 3976011 - RNA, 14 nt, Human herpesvirus 5
auacuggaagcugc

SEQ ID NO: 3976012 - RNA, 17 nt, Human herpesvirus 5
auacuggaagcugcugg

SEQ ID NO: 3976013 - RNA, 23 nt, Human herpesvirus 5
auacuuguuucauuuucuuucua

SEQ ID NO: 3976014 - RNA, 15 nt, Human herpesvirus 5
auagaaagucacagg

SEQ ID NO: 3976015 - RNA, 20 nt, Human herpesvirus 5
auaguguguuccuguccggu

SEQ ID NO: 3976016 - RNA, 11 nt, Human herpesvirus 5
auauacacaug

SEQ ID NO: 3976017 - RNA, 18 nt, Human herpesvirus 5
auaugcuaauauauccaa

SEQ ID NO: 3976018 - RNA, 23 nt, Human herpesvirus 5
auaugucaacaugaaucuucccc

SEQ ID NO: 3976019 - RNA, 13 nt, Human herpesvirus 5
aucaacagcagca

SEQ ID NO: 3976020 - RNA, 17 nt, Human herpesvirus 5
aucaacgacgccacaca

SEQ ID NO: 3976021 - RNA, 12 nt, Human herpesvirus 5
aucagccgccgc

SEQ ID NO: 3976022 - RNA, 17 nt, Human herpesvirus 5
aucauggaagagggcgc

SEQ ID NO: 3976023 - RNA, 14 nt, Human herpesvirus 5
auccagcagcugcg

SEQ ID NO: 3976024 - RNA, 19 nt, Human herpesvirus 5
auccgcuacucccgagcuc

SEQ ID NO: 3976025 - RNA, 13 nt, Human herpesvirus 5
auccggcggcgcc

SEQ ID NO: 3976026 - RNA, 14 nt, Human herpesvirus 5
auccuuggaagagg

SEQ ID NO: 3976027 - RNA, 15 nt, Human herpesvirus 5
aucgaccguuguccc

SEQ ID NO: 3976028 - RNA, 16 nt, Human herpesvirus 5
aucgcaacaacagcaa

SEQ ID NO: 3976029 - RNA, 15 nt, Human herpesvirus 5
aucgcagccuccucg

SEQ ID NO: 3976030 - RNA, 15 nt, Human herpesvirus 5
aucgcgagcugggcg

SEQ ID NO: 3976031 - RNA, 19 nt, Human herpesvirus 5
aucgcucgcuuuggagcgc

SEQ ID NO: 3976032 - RNA, 21 nt, Human herpesvirus 5
aucggcucucaggcgcgcaga

SEQ ID NO: 3976033 - RNA, 19 nt, Human herpesvirus 5
aucgggcgcgcaucgccgu

SEQ ID NO: 3976034 - RNA, 14 nt, Human herpesvirus 5
aucgugggccagga

SEQ ID NO: 3976035 - RNA, 16 nt, Human herpesvirus 5
aucgugggccaggacc

SEQ ID NO: 3976036 - RNA, 15 nt, Human herpesvirus 5
aucucaacgucaacg

SEQ ID NO: 3976037 - RNA, 21 nt, Human herpesvirus 5
aucucgccguacggcaacgag

SEQ ID NO: 3976038 - RNA, 21 nt, Human herpesvirus 5
aucugcaccucgaugaagccu

SEQ ID NO: 3976039 - RNA, 20 nt, Human herpesvirus 5
aucugggagguggcugggcu

SEQ ID NO: 3976040 - RNA, 15 nt, Human herpesvirus 5
aucugucaccucaca

SEQ ID NO: 3976041 - RNA, 23 nt, Human herpesvirus 5
aucugucaccucacaagcgucaa

SEQ ID NO: 3976042 - RNA, 23 nt, Human herpesvirus 5
aucuguucuuccaccagcuacuu

SEQ ID NO: 3976043 - RNA, 24 nt, Human herpesvirus 5
aucuguucuuccaccagcuacuuu

SEQ ID NO: 3976044 - RNA, 22 nt, Human herpesvirus 5
aucuuuuggaggauguucugca

SEQ ID NO: 3976045 - RNA, 16 nt, Human herpesvirus 5
augaaaaauaaaaaac

SEQ ID NO: 3976046 - RNA, 21 nt, Human herpesvirus 5
augaagccaagcguauccugg

SEQ ID NO: 3976047 - RNA, 15 nt, Human herpesvirus 5
augaagccuaucaau

SEQ ID NO: 3976048 - RNA, 22 nt, Human herpesvirus 5
augaaguuguugaucugcugaa

SEQ ID NO: 3976049 - RNA, 13 nt, Human herpesvirus 5
augagcgugcugc

SEQ ID NO: 3976050 - RNA, 14 nt, Human herpesvirus 5
augaggaagcgggg

SEQ ID NO: 3976051 - RNA, 13 nt, Human herpesvirus 5
augauauaaagcg

SEQ ID NO: 3976052 - RNA, 16 nt, Human herpesvirus 5
augcagcacauuguau

SEQ ID NO: 3976053 - RNA, 20 nt, Human herpesvirus 5
augccggccucaucuguaaa

SEQ ID NO: 3976054 - RNA, 16 nt, Human herpesvirus 5
augccucuacaucacu

SEQ ID NO: 3976055 - RNA, 19 nt, Human herpesvirus 5
augccuuggcgcucuggau

SEQ ID NO: 3976056 - RNA, 12 nt, Human herpesvirus 5
augcguguccug

SEQ ID NO: 3976057 - RNA, 21 nt, Human herpesvirus 5
auggauugggcggacgugcgu

SEQ ID NO: 3976058 - RNA, 14 nt, Human herpesvirus 5
auguaguugcagag

SEQ ID NO: 3976059 - RNA, 20 nt, Human herpesvirus 5
auguaucgcauaaagggugg

SEQ ID NO: 3976060 - RNA, 18 nt, Human herpesvirus 5
auguccgcucguguucca

SEQ ID NO: 3976061 - RNA, 14 nt, Human herpesvirus 5
auguggaaaucacc

SEQ ID NO: 3976062 - RNA, 17 nt, Human herpesvirus 5
auguggcuccgccggca

SEQ ID NO: 3976063 - RNA, 15 nt, Human herpesvirus 5
auguuacacauuacu

SEQ ID NO: 3976064 - RNA, 23 nt, Human herpesvirus 5
auuaacaauuccacgccgcugcu

SEQ ID NO: 3976065 - RNA, 20 nt, Human herpesvirus 5
auucuaaagccacgcggcgu

SEQ ID NO: 3976066 - RNA, 22 nt, Human herpesvirus 5
auucugagggccgauggcugcc

SEQ ID NO: 3976067 - RNA, 14 nt, Human herpesvirus 5
auuuuauugggaau

SEQ ID NO: 3976068 - RNA, 14 nt, Human herpesvirus 5
auuuucuuucuagu

SEQ ID NO: 3976069 - RNA, 17 nt, Human herpesvirus 5
caaaaaaaaaucggugg

SEQ ID NO: 3976070 - RNA, 14 nt, Human herpesvirus 5
caaaaccggguaca

SEQ ID NO: 3976071 - RNA, 15 nt, Human herpesvirus 5
caaaacgucaggaau

SEQ ID NO: 3976072 - RNA, 17 nt, Human herpesvirus 5
caaacacagacaggcgg

SEQ ID NO: 3976073 - RNA, 15 nt, Human herpesvirus 5
caaacgucacugaca

SEQ ID NO: 3976074 - RNA, 20 nt, Human herpesvirus 5
caaagacgaugauaccgaag

SEQ ID NO: 3976075 - RNA, 18 nt, Human herpesvirus 5
caacaguuaucagcaaua

SEQ ID NO: 3976076 - RNA, 20 nt, Human herpesvirus 5
caacucuaucgcgacagaca

SEQ ID NO: 3976077 - RNA, 18 nt, Human herpesvirus 5
caacugcaccagcaacca

SEQ ID NO: 3976078 - RNA, 12 nt, Human herpesvirus 5
caacugcugccu

SEQ ID NO: 3976079 - RNA, 16 nt, Human herpesvirus 5
caacuguuguuaguuu

SEQ ID NO: 3976080 - RNA, 21 nt, Human herpesvirus 5
caacuuuggcgugcccagccc

SEQ ID NO: 3976081 - RNA, 18 nt, Human herpesvirus 5
caagaguugcaacgcgcc

SEQ ID NO: 3976082 - RNA, 19 nt, Human herpesvirus 5
caagccuguuagaaccgcg

SEQ ID NO: 3976083 - RNA, 21 nt, Human herpesvirus 5
caagcucguuucgccggcgcg

SEQ ID NO: 3976084 - RNA, 16 nt, Human herpesvirus 5
caagcuuuagccaggu

SEQ ID NO: 3976085 - RNA, 17 nt, Human herpesvirus 5
caaggccgccucuucug

SEQ ID NO: 3976086 - RNA, 15 nt, Human herpesvirus 5
caaggcgagccacuc

SEQ ID NO: 3976087 - RNA, 17 nt, Human herpesvirus 5
gaguucaaagccgcgug

SEQ ID NO: 3976088 - RNA, 13 nt, Human herpesvirus 5
gaguugcugugca

SEQ ID NO: 3976089 - RNA, 22 nt, Human herpesvirus 5
gaguuggccucgauccauccug

SEQ ID NO: 3976090 - RNA, 23 nt, Human herpesvirus 5
gaguuggccucgauccauccugg

SEQ ID NO: 3976091 - RNA, 16 nt, Human herpesvirus 5
gauaacuacaacagcg

SEQ ID NO: 3976092 - RNA, 12 nt, Human herpesvirus 5
gauaagcgcuuu

SEQ ID NO: 3976093 - RNA, 16 nt, Human herpesvirus 5
gauacuaucgggggag

SEQ ID NO: 3976094 - RNA, 13 nt, Human herpesvirus 5
gauaggcaccugg

SEQ ID NO: 3976095 - RNA, 15 nt, Human herpesvirus 5
gaucacguuguccuu

SEQ ID NO: 3976096 - RNA, 17 nt, Human herpesvirus 5
gaucagccgccgccucc

SEQ ID NO: 3976097 - RNA, 12 nt, Human herpesvirus 5
gaucaugugcuu

SEQ ID NO: 3976098 - RNA, 22 nt, Human herpesvirus 5
gauccaaggccuccagcgccuc

SEQ ID NO: 3976099 - RNA, 17 nt, Human herpesvirus 5
gauccacgggccgcgcu

SEQ ID NO: 3976100 - RNA, 13 nt, Human herpesvirus 5
gaucccacuggca

SEQ ID NO: 3976101 - RNA, 20 nt, Human herpesvirus 5
gauccgcucaccacguacga

SEQ ID NO: 3976102 - RNA, 17 nt, Human herpesvirus 5
gauccugggacaccacg

SEQ ID NO: 3976103 - RNA, 17 nt, Human herpesvirus 5
gaucgaggcggcggcga

SEQ ID NO: 3976104 - RNA, 16 nt, Human herpesvirus 5
gaucgcagccuccucg

SEQ ID NO: 3976105 - RNA, 22 nt, Human herpesvirus 5
gaucgccgucacuaaggaccga

SEQ ID NO: 3976106 - RNA, 19 nt, Human herpesvirus 5
gaucgcggccuucagcguc

SEQ ID NO: 3976107 - RNA, 17 nt, Human herpesvirus 5
gaucggccgcggugcgc

SEQ ID NO: 3976108 - RNA, 18 nt, Human herpesvirus 5
gaugaaccuuccccaccc

SEQ ID NO: 3976109 - RNA, 16 nt, Human herpesvirus 5
gaugaacgcucucguc

SEQ ID NO: 3976110 - RNA, 13 nt, Human herpesvirus 5
gaugaacuguucc

SEQ ID NO: 3976111 - RNA, 14 nt, Human herpesvirus 5
gaugagauaaaagu

SEQ ID NO: 3976112 - RNA, 17 nt, Human herpesvirus 5
gaugcgcaccuucggcg

SEQ ID NO: 3976113 - RNA, 17 nt, Human herpesvirus 5
gauggaggucugcgaga

SEQ ID NO: 3976114 - RNA, 15 nt, Human herpesvirus 5
gaugucaacacugac

SEQ ID NO: 3976115 - RNA, 19 nt, Human herpesvirus 5
gauuaccuacgucaaagcg

SEQ ID NO: 3976116 - RNA, 17 nt, Human herpesvirus 5
gauucaguaaccuggag

SEQ ID NO: 3976117 - RNA, 22 nt, Human herpesvirus 5
gauucugagggccgauggcugc

SEQ ID NO: 3976118 - RNA, 14 nt, Human herpesvirus 5
gcaacaacagucgc

SEQ ID NO: 3976119 - RNA, 20 nt, Human herpesvirus 5
gcaacaacgacgacuaugau

SEQ ID NO: 3976120 - RNA, 13 nt, Human herpesvirus 5
gcaacacuaaauu

SEQ ID NO: 3976121 - RNA, 17 nt, Human herpesvirus 5
gcaacuucuucuacuca

SEQ ID NO: 3976122 - RNA, 13 nt, Human herpesvirus 5
gcaagggcugcuc

SEQ ID NO: 3976123 - RNA, 17 nt, Human herpesvirus 5
gcaaggucaacuacagc

SEQ ID NO: 3976124 - RNA, 16 nt, Human herpesvirus 5
gcaagugccugcacga

SEQ ID NO: 3976125 - RNA, 19 nt, Human herpesvirus 5
gcaaucgcuucaccgucgc

SEQ ID NO: 3976126 - RNA, 19 nt, Human herpesvirus 5
gcacaccuuuaagguacgg

SEQ ID NO: 3976127 - RNA, 21 nt, Human herpesvirus 5
gcaccacgucgauucccaucu

SEQ ID NO: 3976128 - RNA, 15 nt, Human herpesvirus 5
gcaccaguuggccac

SEQ ID NO: 3976129 - RNA, 15 nt, Human herpesvirus 5
gcaccaugccggagc

SEQ ID NO: 3976130 - RNA, 12 nt, Human herpesvirus 5
gcaccggcagcc

SEQ ID NO: 3976131 - RNA, 19 nt, Human herpesvirus 5
gcaccggcgccugcugcuc

SEQ ID NO: 3976132 - RNA, 16 nt, Human herpesvirus 5
gcaccgguuggagcag

SEQ ID NO: 3976133 - RNA, 19 nt, Human herpesvirus 5
gcaccgguuggagcagcuc

SEQ ID NO: 3976134 - RNA, 18 nt, Human herpesvirus 5
gcacgcgauuggccagca

SEQ ID NO: 3976135 - RNA, 19 nt, Human herpesvirus 5
gcacgcgauuggccagcac

SEQ ID NO: 3976136 - RNA, 13 nt, Human herpesvirus 5
gcacgcggcucac

SEQ ID NO: 3976137 - RNA, 18 nt, Human herpesvirus 5
gcacgggcucgggugacg

SEQ ID NO: 3976138 - RNA, 15 nt, Human herpesvirus 5
gcacgggcugcuggu

SEQ ID NO: 3976139 - RNA, 16 nt, Human herpesvirus 5
gcacguuuuggaaaac

SEQ ID NO: 3976140 - RNA, 18 nt, Human herpesvirus 5
gcacuuccuguacacauc

SEQ ID NO: 3976141 - RNA, 14 nt, Human herpesvirus 5
gcagaacccgguug

SEQ ID NO: 3976142 - RNA, 17 nt, Human herpesvirus 5
gcagaagaauguugcga

SEQ ID NO: 3976143 - RNA, 13 nt, Human herpesvirus 5
gcagaccauccuc

SEQ ID NO: 3976144 - RNA, 18 nt, Human herpesvirus 5
gcagaucgugccgcgagg

SEQ ID NO: 3976145 - RNA, 14 nt, Human herpesvirus 5
gcagcaacagcccc

SEQ ID NO: 3976146 - RNA, 23 nt, Human herpesvirus 5
gcagcacgcgauuggccagcacg

SEQ ID NO: 3976147 - RNA, 22 nt, Human herpesvirus 5
gcagcacgcggcucacguagca

SEQ ID NO: 3976148 - RNA, 13 nt, Human herpesvirus 5
gcagcagcuggug

SEQ ID NO: 3976149 - RNA, 21 nt, Human herpesvirus 5
gcagccaccgacacagcagca

SEQ ID NO: 3976150 - RNA, 18 nt, Human herpesvirus 5
gcagcccauccucgugga

SEQ ID NO: 3976151 - RNA, 23 nt, Human herpesvirus 5
gcagcccauccucguggaaggca

SEQ ID NO: 3976152 - RNA, 17 nt, Human herpesvirus 5
gcagcccgaggugugcg

SEQ ID NO: 3976153 - RNA, 18 nt, Human herpesvirus 5
gcagcgaguugcugugca

SEQ ID NO: 3976154 - RNA, 15 nt, Human herpesvirus 5
gcagcggaacucgac

SEQ ID NO: 3976155 - RNA, 14 nt, Human herpesvirus 5
gcagcggagguggg

SEQ ID NO: 3976156 - RNA, 23 nt, Human herpesvirus 5
gcagcggaggugggccggggccc

SEQ ID NO: 3976157 - RNA, 22 nt, Human herpesvirus 5
gcagcgggaaaccgcgucgucg

SEQ ID NO: 3976158 - RNA, 17 nt, Human herpesvirus 5
gcagcggggagaaaagu

SEQ ID NO: 3976159 - RNA, 23 nt, Human herpesvirus 5
gcagcggggagaaaaguggcaga

SEQ ID NO: 3976160 - RNA, 14 nt, Human herpesvirus 5
gcagcgugcugugc

SEQ ID NO: 3976161 - RNA, 14 nt, Human herpesvirus 5
gcagcucgcgcugg

SEQ ID NO: 3976162 - RNA, 13 nt, Human herpesvirus 5
gcaggccaugggu

SEQ ID NO: 3976163 - RNA, 16 nt, Human herpesvirus 5
gcaggccgcgcaggcc

SEQ ID NO: 3976164 - RNA, 13 nt, Human herpesvirus 5
gcaggcuaaagaa

SEQ ID NO: 3976165 - RNA, 20 nt, Human herpesvirus 5
gcaggggcuggacgugguua

SEQ ID NO: 3976166 - RNA, 17 nt, Human herpesvirus 5
gcaggucacacugggag

SEQ ID NO: 3976167 - RNA, 17 nt, Human herpesvirus 5
gcagugggcccacggcu

SEQ ID NO: 3976168 - RNA, 14 nt, Human herpesvirus 5
gcauacaaugugcu

SEQ ID NO: 3976169 - RNA, 22 nt, Human herpesvirus 5
gcauacggggaggagacacaga

SEQ ID NO: 3976170 - RNA, 17 nt, Human herpesvirus 5
gcauccugcccaccgcc

SEQ ID NO: 3976171 - RNA, 22 nt, Human herpesvirus 5
gcauccugcccaccgccuccga

SEQ ID NO: 3976172 - RNA, 18 nt, Human herpesvirus 5
gcaucgcaacaacagcaa

SEQ ID NO: 3976173 - RNA, 17 nt, Human herpesvirus 5
gcaucuucgacuuucug

SEQ ID NO: 3976174 - RNA, 21 nt, Human herpesvirus 5
gcauggagucgcgcggucgcc

SEQ ID NO: 3976175 - RNA, 12 nt, Human herpesvirus 5
gcaugucgccca

SEQ ID NO: 3976176 - RNA, 22 nt, Human herpesvirus 5
gcauguuggugccccaggauga

SEQ ID NO: 3976177 - RNA, 16 nt, Human herpesvirus 5
gccaacaugcccagca

SEQ ID NO: 3976178 - RNA, 23 nt, Human herpesvirus 5
gccaaggugcgggagacuagguc

SEQ ID NO: 3976179 - RNA, 16 nt, Human herpesvirus 5
gccaccaggugccggc

SEQ ID NO: 3976180 - RNA, 18 nt, Human herpesvirus 5
gccaccauagccacuacc

SEQ ID NO: 3976181 - RNA, 17 nt, Human herpesvirus 5
gccaccaugcaucccac

SEQ ID NO: 3976182 - RNA, 18 nt, Human herpesvirus 5
gccaccaugcaucccacc

SEQ ID NO: 3976183 - RNA, 22 nt, Human herpesvirus 5
gccaccaugcaucccaccacgg

SEQ ID NO: 3976184 - RNA, 20 nt, Human herpesvirus 5
gccaccgacauggagcccac

SEQ ID NO: 3976185 - RNA, 16 nt, Human herpesvirus 5
gccaccgccgccacca

SEQ ID NO: 3976186 - RNA, 20 nt, Human herpesvirus 5
gccaccgucccucagcgacg

SEQ ID NO: 3976187 - RNA, 18 nt, Human herpesvirus 5
gccaccgucgcccucagc

SEQ ID NO: 3976188 - RNA, 18 nt, Human herpesvirus 5
gccacguucuugcguccu

SEQ ID NO: 3976189 - RNA, 23 nt, Human herpesvirus 5
gccacguucuugcguccuucauc

SEQ ID NO: 3976190 - RNA, 15 nt, Human herpesvirus 5
gccacugggccucgg

SEQ ID NO: 3976191 - RNA, 18 nt, Human herpesvirus 5
gccagcguccgcgccugc

SEQ ID NO: 3976192 - RNA, 15 nt, Human herpesvirus 5
gccaggugaccagca

SEQ ID NO: 3976193 - RNA, 15 nt, Human herpesvirus 5
gccaucuagacucac

SEQ ID NO: 3976194 - RNA, 20 nt, Human herpesvirus 5
gccaugcggauccagcugcu

SEQ ID NO: 3976195 - RNA, 16 nt, Human herpesvirus 5
gccauuuucagcgacg

SEQ ID NO: 3976196 - RNA, 13 nt, Human herpesvirus 5
gcccaaagaccgc

SEQ ID NO: 3976197 - RNA, 14 nt, Human herpesvirus 5
gcccacgaaggcgc

SEQ ID NO: 3976198 - RNA, 20 nt, Human herpesvirus 5
gcccaucgucugcauguuca

SEQ ID NO: 3976199 - RNA, 15 nt, Human herpesvirus 5
gccccacaugcugcu

SEQ ID NO: 3976200 - RNA, 16 nt, Human herpesvirus 5
gccccacaugcugcuu

SEQ ID NO: 3976201 - RNA, 15 nt, Human herpesvirus 5
gccccaucauggccc

SEQ ID NO: 3976202 - RNA, 14 nt, Human herpesvirus 5
ggccgucuccacca

SEQ ID NO: 3976203 - RNA, 15 nt, Human herpesvirus 5
ggccuacggcugcau

SEQ ID NO: 3976204 - RNA, 14 nt, Human herpesvirus 5
ggcgaagcgggaag

SEQ ID NO: 3976205 - RNA, 17 nt, Human herpesvirus 5
ggcgacaagcuguggcu

SEQ ID NO: 3976206 - RNA, 13 nt, Human herpesvirus 5
ggcgacagacggc

SEQ ID NO: 3976207 - RNA, 24 nt, Human herpesvirus 5
ggcgaccgucuggagguggccugc

SEQ ID NO: 3976208 - RNA, 20 nt, Human herpesvirus 5
ggcgcaggucacacugggag

SEQ ID NO: 3976209 - RNA, 19 nt, Human herpesvirus 5
ggcgcccaaaccgcaggag

SEQ ID NO: 3976210 - RNA, 15 nt, Human herpesvirus 5
ggcgccgggacucug

SEQ ID NO: 3976211 - RNA, 18 nt, Human herpesvirus 5
ggcgccgggacucuggug

SEQ ID NO: 3976212 - RNA, 18 nt, Human herpesvirus 5
ggcgccugguugcugccg

SEQ ID NO: 3976213 - RNA, 20 nt, Human herpesvirus 5
ggcgcguuauaagcaccgug

SEQ ID NO: 3976214 - RNA, 12 nt, Human herpesvirus 5
ggcgcucuggau

SEQ ID NO: 3976215 - RNA, 15 nt, Human herpesvirus 5
ggcgcuucgagggcu

SEQ ID NO: 3976216 - RNA, 12 nt, Human herpesvirus 5
ggcggcagccac

SEQ ID NO: 3976217 - RNA, 19 nt, Human herpesvirus 5
ggcggccgagucuccgcgc

SEQ ID NO: 3976218 - RNA, 14 nt, Human herpesvirus 5
ggcggcgaucgcgc

SEQ ID NO: 3976219 - RNA, 16 nt, Human herpesvirus 5
ggcggcgauggucaug

SEQ ID NO: 3976220 - RNA, 17 nt, Human herpesvirus 5
ggcggcgccgggcgcca

SEQ ID NO: 3976221 - RNA, 14 nt, Human herpesvirus 5
ggcggcggugguga

SEQ ID NO: 3976222 - RNA, 14 nt, Human herpesvirus 5
ggcggcugaucugc

SEQ ID NO: 3976223 - RNA, 17 nt, Human herpesvirus 5
ggcgggcgcgggguggc

SEQ ID NO: 3976224 - RNA, 19 nt, Human herpesvirus 5
ggcgguacugaagccgccg

SEQ ID NO: 3976225 - RNA, 13 nt, Human herpesvirus 5
ggcgguggccguc

SEQ ID NO: 3976226 - RNA, 17 nt, Human herpesvirus 5
ggcgguuucagcuggca

SEQ ID NO: 3976227 - RNA, 21 nt, Human herpesvirus 5
ggcguagucggcuaacaaagc

SEQ ID NO: 3976228 - RNA, 19 nt, Human herpesvirus 5
ggcgucuuccuccucgucg

SEQ ID NO: 3976229 - RNA, 21 nt, Human herpesvirus 5
ggcgugaccacgucaccgugc

SEQ ID NO: 3976230 - RNA, 14 nt, Human herpesvirus 5
ggcgugccgagcug

SEQ ID NO: 3976231 - RNA, 19 nt, Human herpesvirus 5
ggcguggaugagguacugc

SEQ ID NO: 3976232 - RNA, 22 nt, Human herpesvirus 5
ggcguggcggccgacggcagcg

SEQ ID NO: 3976233 - RNA, 12 nt, Human herpesvirus 5
ggcguucugcuc

SEQ ID NO: 3976234 - RNA, 16 nt, Human herpesvirus 5
ggcuacguacgacugc

SEQ ID NO: 3976235 - RNA, 14 nt, Human herpesvirus 5
ggcuacugcugcuu

SEQ ID NO: 3976236 - RNA, 20 nt, Human herpesvirus 5
ggcucaccacgcagcaggcu

SEQ ID NO: 3976237 - RNA, 15 nt, Human herpesvirus 5
ggcuccacacgcauc

SEQ ID NO: 3976238 - RNA, 21 nt, Human herpesvirus 5
ggcucgcaaagacgugccacg

SEQ ID NO: 3976239 - RNA, 13 nt, Human herpesvirus 5
ggcucgcucggcc

SEQ ID NO: 3976240 - RNA, 17 nt, Human herpesvirus 5
ggcucguguggcagcug

SEQ ID NO: 3976241 - RNA, 19 nt, Human herpesvirus 5
ggcucucaggcgcgcagac

SEQ ID NO: 3976242 - RNA, 20 nt, Human herpesvirus 5
ggcucucggaucugcggcuc

SEQ ID NO: 3976243 - RNA, 13 nt, Human herpesvirus 5
ggcugacagucga

SEQ ID NO: 3976244 - RNA, 15 nt, Human herpesvirus 5
ggcugaccgucgucc

SEQ ID NO: 3976245 - RNA, 19 nt, Human herpesvirus 5
ggcugagacaggacgaggc

SEQ ID NO: 3976246 - RNA, 22 nt, Human herpesvirus 5
ggcugagacaggacgaggcagg

SEQ ID NO: 3976247 - RNA, 21 nt, Human herpesvirus 5
ggcugagauucgcgggaucgu

SEQ ID NO: 3976248 - RNA, 12 nt, Human herpesvirus 5
ggcugccggucu

SEQ ID NO: 3976249 - RNA, 15 nt, Human herpesvirus 5
ggcugccuguuccug

SEQ ID NO: 3976250 - RNA, 22 nt, Human herpesvirus 5
ggcugcgcgcucgucuccacgc

SEQ ID NO: 3976251 - RNA, 19 nt, Human herpesvirus 5
ggcuggcgacccgcagucu

SEQ ID NO: 3976252 - RNA, 15 nt, Human herpesvirus 5
ggcuggcgugcuguu

SEQ ID NO: 3976253 - RNA, 19 nt, Human herpesvirus 5
ggcuucccuccugcagcug

SEQ ID NO: 3976254 - RNA, 14 nt, Human herpesvirus 5
ggcuugaccgcguu

SEQ ID NO: 3976255 - RNA, 13 nt, Human herpesvirus 5
gggaacacaucgc

SEQ ID NO: 3976256 - RNA, 13 nt, Human herpesvirus 5
gggacggugauga

SEQ ID NO: 3976257 - RNA, 17 nt, Human herpesvirus 5
gggagacaaggugguga

SEQ ID NO: 3976258 - RNA, 12 nt, Human herpesvirus 5
gggagccccauc

SEQ ID NO: 3976259 - RNA, 19 nt, Human herpesvirus 5
gggaggccacaggcggcgc

SEQ ID NO: 3976260 - RNA, 14 nt, Human herpesvirus 5
gggagucaacacua

SEQ ID NO: 3976261 - RNA, 13 nt, Human herpesvirus 5
gggaugacgggga

SEQ ID NO: 3976262 - RNA, 19 nt, Human herpesvirus 5
gggcauacgcgauaucugg

SEQ ID NO: 3976263 - RNA, 13 nt, Human herpesvirus 5
gggccaacgguac

SEQ ID NO: 3976264 - RNA, 20 nt, Human herpesvirus 5
gggccgccaauuggcggcga

SEQ ID NO: 3976265 - RNA, 19 nt, Human herpesvirus 5
gggccgcgcuccaggcgga

SEQ ID NO: 3976266 - RNA, 22 nt, Human herpesvirus 5
gggcgacacucaguacuuuggg

SEQ ID NO: 3976267 - RNA, 19 nt, Human herpesvirus 5
gggcgauggguccgagcug

SEQ ID NO: 3976268 - RNA, 13 nt, Human herpesvirus 5
gggcgauucugug

SEQ ID NO: 3976269 - RNA, 22 nt, Human herpesvirus 5
gggcgcaucacccgccucaugg

SEQ ID NO: 3976270 - RNA, 12 nt, Human herpesvirus 5
gggcguuguuga

SEQ ID NO: 3976271 - RNA, 20 nt, Human herpesvirus 5
gggcucguguggcagcuggc

SEQ ID NO: 3976272 - RNA, 21 nt, Human herpesvirus 5
gggcuucccuccugcagcugc

SEQ ID NO: 3976273 - RNA, 22 nt, Human herpesvirus 5
ggggaaaaucacgaaaggcacc

SEQ ID NO: 3976274 - RNA, 19 nt, Human herpesvirus 5
ggggcgcagaaacuuuucc

SEQ ID NO: 3976275 - RNA, 12 nt, Human herpesvirus 5
ggggcugcucaa

SEQ ID NO: 3976276 - RNA, 16 nt, Human herpesvirus 5
gggguacgcuaugugu

SEQ ID NO: 3976277 - RNA, 17 nt, Human herpesvirus 5
ggguggcgaagcgggaa

SEQ ID NO: 3976278 - RNA, 16 nt, Human herpesvirus 5
gguaacuggcagagcc

SEQ ID NO: 3976279 - RNA, 15 nt, Human herpesvirus 5
gguacgccaguagcc

SEQ ID NO: 3976280 - RNA, 15 nt, Human herpesvirus 5
ggucaaaagccuggg

SEQ ID NO: 3976281 - RNA, 18 nt, Human herpesvirus 5
ggucacugacgugcagga

SEQ ID NO: 3976282 - RNA, 15 nt, Human herpesvirus 5
ggucagcuugaggcu

SEQ ID NO: 3976283 - RNA, 16 nt, Human herpesvirus 5
ggucaugaaguuguug

SEQ ID NO: 3976284 - RNA, 12 nt, Human herpesvirus 5
gguccagccagc

SEQ ID NO: 3976285 - RNA, 14 nt, Human herpesvirus 5
gguccgcccgccga

SEQ ID NO: 3976286 - RNA, 20 nt, Human herpesvirus 5
gguccgucgagaccggcgga

SEQ ID NO: 3976287 - RNA, 19 nt, Human herpesvirus 5
gguccuccagcagcagcug

SEQ ID NO: 3976288 - RNA, 21 nt, Human herpesvirus 5
gguccuccagcagcagcuggu

SEQ ID NO: 3976289 - RNA, 23 nt, Human herpesvirus 5
ggucgacugcguggggugcugga

SEQ ID NO: 3976290 - RNA, 17 nt, Human herpesvirus 5
ggucggucagccgaccc

SEQ ID NO: 3976291 - RNA, 12 nt, Human herpesvirus 5
ggucggugucuc

SEQ ID NO: 3976292 - RNA, 17 nt, Human herpesvirus 5
ggugacgucgguggugg

SEQ ID NO: 3976293 - RNA, 16 nt, Human herpesvirus 5
ggugaugaugcugcug

SEQ ID NO: 3976294 - RNA, 15 nt, Human herpesvirus 5
ggugcaucaucuggu

SEQ ID NO: 3976295 - RNA, 20 nt, Human herpesvirus 5
ggugcggugaaacucuaugg

SEQ ID NO: 3976296 - RNA, 18 nt, Human herpesvirus 5
ggugcuauggcugcucaa

SEQ ID NO: 3976297 - RNA, 15 nt, Human herpesvirus 5
ggugcucgaccagga

SEQ ID NO: 3976298 - RNA, 20 nt, Human herpesvirus 5
gguggacuuccaggugcgca

SEQ ID NO: 3976299 - RNA, 20 nt, Human herpesvirus 5
gguggagaugaggcggcgug

SEQ ID NO: 3976300 - RNA, 13 nt, Human herpesvirus 5
gguggcggcagcc

SEQ ID NO: 3976301 - RNA, 14 nt, Human herpesvirus 5
gguggcucuugcgc

SEQ ID NO: 3976302 - RNA, 22 nt, Human herpesvirus 5
gguggugugugauggggugugg

SEQ ID NO: 3976303 - RNA, 19 nt, Human herpesvirus 5
ggugguuuaugaugaaacc

SEQ ID NO: 3976304 - RNA, 17 nt, Human herpesvirus 5
gguguuucuccgugugu

SEQ ID NO: 3976305 - RNA, 16 nt, Human herpesvirus 5
gguuaccccucgcugg

SEQ ID NO: 3976306 - RNA, 11 nt, Human herpesvirus 5
gguugcagcuu

SEQ ID NO: 3976307 - RNA, 15 nt, Human herpesvirus 5
gguuguuucuccguc

SEQ ID NO: 3976308 - RNA, 16 nt, Human herpesvirus 5
gguuucgggccgacgu

SEQ ID NO: 3976309 - RNA, 17 nt, Human herpesvirus 5
gguuugugccucugaaa

SEQ ID NO: 3976310 - RNA, 24 nt, Human herpesvirus 5
guaacacacggccagcuccacgcu

SEQ ID NO: 3976311 - RNA, 14 nt, Human herpesvirus 5
guaaccuggagcag

SEQ ID NO: 3976312 - RNA, 14 nt, Human herpesvirus 5
guaagcggcagcau

SEQ ID NO: 3976313 - RNA, 16 nt, Human herpesvirus 5
guacagcggcucgccg

SEQ ID NO: 3976314 - RNA, 19 nt, Human herpesvirus 5
guacagcggcucgccgcag

SEQ ID NO: 3976315 - RNA, 11 nt, Human herpesvirus 5
guaccacauuu

SEQ ID NO: 3976316 - RNA, 15 nt, Human herpesvirus 5
guacccaccaccucc

SEQ ID NO: 3976317 - RNA, 12 nt, Human herpesvirus 5
guaccuacggac

SEQ ID NO: 3976318 - RNA, 20 nt, Human herpesvirus 5
ucacgacgacgcgcccccca

SEQ ID NO: 3976319 - RNA, 21 nt, Human herpesvirus 5
ucacggcggcguguguuuuau

SEQ ID NO: 3976320 - RNA, 20 nt, Human herpesvirus 5
ucacgggaaggcuaguuaga

SEQ ID NO: 3976321 - RNA, 19 nt, Human herpesvirus 5
ucacgggacccgccgccgc

SEQ ID NO: 3976322 - RNA, 13 nt, Human herpesvirus 5
ucacuagacagau

SEQ ID NO: 3976323 - RNA, 19 nt, Human herpesvirus 5
ucacuugcgcgguuauggc

SEQ ID NO: 3976324 - RNA, 23 nt, Human herpesvirus 5
ucacuuuuaacagcucaugccuc

SEQ ID NO: 3976325 - RNA, 17 nt, Human herpesvirus 5
ucagacccacuaccugg

SEQ ID NO: 3976326 - RNA, 12 nt, Human herpesvirus 5
ucagagcaucaa

SEQ ID NO: 3976327 - RNA, 19 nt, Human herpesvirus 5
ucagaguaggugauccagu

SEQ ID NO: 3976328 - RNA, 22 nt, Human herpesvirus 5
ucagccucuguguucccaacac

SEQ ID NO: 3976329 - RNA, 17 nt, Human herpesvirus 5
ucagcggcacgccgccg

SEQ ID NO: 3976330 - RNA, 23 nt, Human herpesvirus 5
ucagcggcguguacagcuaccuc

SEQ ID NO: 3976331 - RNA, 13 nt, Human herpesvirus 5
ucaucagccaacu

SEQ ID NO: 3976332 - RNA, 19 nt, Human herpesvirus 5
ucaucuuuauuugcaucau

SEQ ID NO: 3976333 - RNA, 18 nt, Human herpesvirus 5
ucaugaguuggugcagcu

SEQ ID NO: 3976334 - RNA, 13 nt, Human herpesvirus 5
ucaugucuuacaa

SEQ ID NO: 3976335 - RNA, 16 nt, Human herpesvirus 5
ucauguucucccagga

SEQ ID NO: 3976336 - RNA, 19 nt, Human herpesvirus 5
ucauuagcgcgcugguuug

SEQ ID NO: 3976337 - RNA, 19 nt, Human herpesvirus 5
uccaaggccuccagcgccu

SEQ ID NO: 3976338 - RNA, 21 nt, Human herpesvirus 5
uccacagagccgcguggcugu

SEQ ID NO: 3976339 - RNA, 22 nt, Human herpesvirus 5
uccaccauccgaagcuacagcc

SEQ ID NO: 3976340 - RNA, 15 nt, Human herpesvirus 5
uccacgccaccgccg

SEQ ID NO: 3976341 - RNA, 21 nt, Human herpesvirus 5
uccacggccuccgacgagcgu

SEQ ID NO: 3976342 - RNA, 15 nt, Human herpesvirus 5
uccacguagguuucu

SEQ ID NO: 3976343 - RNA, 19 nt, Human herpesvirus 5
uccacugccaacccagcag

SEQ ID NO: 3976344 - RNA, 22 nt, Human herpesvirus 5
uccacugccaacccagcagccg

SEQ ID NO: 3976345 - RNA, 21 nt, Human herpesvirus 5
uccagauacgcgcugguucug

SEQ ID NO: 3976346 - RNA, 15 nt, Human herpesvirus 5
uccagcacaaaaaac

SEQ ID NO: 3976347 - RNA, 18 nt, Human herpesvirus 5
uccaggagguggucgagc

SEQ ID NO: 3976348 - RNA, 20 nt, Human herpesvirus 5
uccaucggcagauccggcaa

SEQ ID NO: 3976349 - RNA, 16 nt, Human herpesvirus 5
uccaugucuccaaguc

SEQ ID NO: 3976350 - RNA, 15 nt, Human herpesvirus 5
uccaugugcagcugg

SEQ ID NO: 3976351 - RNA, 21 nt, Human herpesvirus 5
ucccaccgcgacccagcgaca

SEQ ID NO: 3976352 - RNA, 17 nt, Human herpesvirus 5
ucccaugcaacuucuuc

SEQ ID NO: 3976353 - RNA, 17 nt, Human herpesvirus 5
uccccgacuccgcgguc

SEQ ID NO: 3976354 - RNA, 18 nt, Human herpesvirus 5
uccccggucgcuuaugcg

SEQ ID NO: 3976355 - RNA, 15 nt, Human herpesvirus 5
uccccuaacgucacu

SEQ ID NO: 3976356 - RNA, 13 nt, Human herpesvirus 5
uccccucugcugc

SEQ ID NO: 3976357 - RNA, 16 nt, Human herpesvirus 5
uccccucugcugcugg

SEQ ID NO: 3976358 - RNA, 21 nt, Human herpesvirus 5
ucccggauccaagggacgagc

SEQ ID NO: 3976359 - RNA, 15 nt, Human herpesvirus 5
ucccggccuugcugu

SEQ ID NO: 3976360 - RNA, 16 nt, Human herpesvirus 5
ucccgugugugggggg

SEQ ID NO: 3976361 - RNA, 17 nt, Human herpesvirus 5
ucccuacuaccgucgug

SEQ ID NO: 3976362 - RNA, 20 nt, Human herpesvirus 5
ucccucaccgaccagcacuc

SEQ ID NO: 3976363 - RNA, 11 nt, Human herpesvirus 5
ucccucagccu

SEQ ID NO: 3976364 - RNA, 16 nt, Human herpesvirus 5
ucccucagccucugug

SEQ ID NO: 3976365 - RNA, 17 nt, Human herpesvirus 5
ucccuccugcagcugca

SEQ ID NO: 3976366 - RNA, 18 nt, Human herpesvirus 5
ucccuccugcagcugcac

SEQ ID NO: 3976367 - RNA, 20 nt, Human herpesvirus 5
uccgacgucggucccaucgc

SEQ ID NO: 3976368 - RNA, 22 nt, Human herpesvirus 5
uccgacucgcugucgagacggc

SEQ ID NO: 3976369 - RNA, 18 nt, Human herpesvirus 5
uccgcuacucccgagcuc

SEQ ID NO: 3976370 - RNA, 15 nt, Human herpesvirus 5
uccgcuuccucagcu

SEQ ID NO: 3976371 - RNA, 18 nt, Human herpesvirus 5
uccggcggcgccgucaga

SEQ ID NO: 3976372 - RNA, 23 nt, Human herpesvirus 5
uccguccucgucgccuuccagcu

SEQ ID NO: 3976373 - RNA, 14 nt, Human herpesvirus 5
uccuccucccucgc

SEQ ID NO: 3976374 - RNA, 17 nt, Human herpesvirus 5
uccuccucugccugggc

SEQ ID NO: 3976375 - RNA, 20 nt, Human herpesvirus 5
uccucggguuccucggccuc

SEQ ID NO: 3976376 - RNA, 14 nt, Human herpesvirus 5
uccugguuuuucau

SEQ ID NO: 3976377 - RNA, 14 nt, Human herpesvirus 5
uccuuaucugggug

SEQ ID NO: 3976378 - RNA, 15 nt, Human herpesvirus 5
ucgaccgacaaggcg

SEQ ID NO: 3976379 - RNA, 14 nt, Human herpesvirus 5
ucgacgauaugucg

SEQ ID NO: 3976380 - RNA, 18 nt, Human herpesvirus 5
ucgagaacuacagcuucu

SEQ ID NO: 3976381 - RNA, 19 nt, Human herpesvirus 5
ucgagacuugcacgcuguc

SEQ ID NO: 3976382 - RNA, 17 nt, Human herpesvirus 5
ucgaggaggggccgcug

SEQ ID NO: 3976383 - RNA, 20 nt, Human herpesvirus 5
ucgauccucucucacgcguc

SEQ ID NO: 3976384 - RNA, 16 nt, Human herpesvirus 5
ucgcacaaagaagucu

SEQ ID NO: 3976385 - RNA, 20 nt, Human herpesvirus 5
ucgcagccuccucgcuggga

SEQ ID NO: 3976386 - RNA, 15 nt, Human herpesvirus 5
ucgcccagaaagaac

SEQ ID NO: 3976387 - RNA, 15 nt, Human herpesvirus 5
ucgcccucgacggcg

SEQ ID NO: 3976388 - RNA, 18 nt, Human herpesvirus 5
ucgccgaggcuacugcug

SEQ ID NO: 3976389 - RNA, 13 nt, Human herpesvirus 5
ucgccgccaccuu

SEQ ID NO: 3976390 - RNA, 22 nt, Human herpesvirus 5
ucgcgagccccaucgggcccgc

SEQ ID NO: 3976391 - RNA, 19 nt, Human herpesvirus 5
ucgcgcaucgccugcaccu

SEQ ID NO: 3976392 - RNA, 15 nt, Human herpesvirus 5
ucgcgccuccuccug

SEQ ID NO: 3976393 - RNA, 18 nt, Human herpesvirus 5
ucgcgugccgaauacaaa

SEQ ID NO: 3976394 - RNA, 15 nt, Human herpesvirus 5
ucgcucgcuuuggag

SEQ ID NO: 3976395 - RNA, 15 nt, Human herpesvirus 5
ucggaggaacccugc

SEQ ID NO: 3976396 - RNA, 14 nt, Human herpesvirus 5
ucggaugaggcagg

SEQ ID NO: 3976397 - RNA, 15 nt, Human herpesvirus 5
ucggccgaccccguc

SEQ ID NO: 3976398 - RNA, 18 nt, Human herpesvirus 5
ucggccggaccgugcacg

SEQ ID NO: 3976399 - RNA, 23 nt, Human herpesvirus 5
ucggcgugaaugggcacgccgug

SEQ ID NO: 3976400 - RNA, 23 nt, Human herpesvirus 5
ucggcguggucaacgcuuuggaa

SEQ ID NO: 3976401 - RNA, 22 nt, Human herpesvirus 5
ucggcugccuguuccugcugcu

SEQ ID NO: 3976402 - RNA, 20 nt, Human herpesvirus 5
ucgggcgcaucacccgccuc

SEQ ID NO: 3976403 - RNA, 16 nt, Human herpesvirus 5
ucggggugcaucaucu

SEQ ID NO: 3976404 - RNA, 17 nt, Human herpesvirus 5
ucgguguuaaggauucu

SEQ ID NO: 3976405 - RNA, 18 nt, Human herpesvirus 5
ucguacgacgucugcuca

SEQ ID NO: 3976406 - RNA, 16 nt, Human herpesvirus 5
ucguaguuguugcaga

SEQ ID NO: 3976407 - RNA, 11 nt, Human herpesvirus 5
ucguccagcag

SEQ ID NO: 3976408 - RNA, 13 nt, Human herpesvirus 5
ucgucgugcccgu

SEQ ID NO: 3976409 - RNA, 12 nt, Human herpesvirus 5
ucgucugcaugu

SEQ ID NO: 3976410 - RNA, 13 nt, Human herpesvirus 5
ucgugcgaggaca

SEQ ID NO: 3976411 - RNA, 15 nt, Human herpesvirus 5
ucguuguccuccucg

SEQ ID NO: 3976412 - RNA, 21 nt, Human herpesvirus 5
ucuaaugugcuguuugaaaca

SEQ ID NO: 3976413 - RNA, 16 nt, Human herpesvirus 5
ucuaccuccugcagga

SEQ ID NO: 3976414 - RNA, 21 nt, Human herpesvirus 5
ucuacgugucugggccacagg

SEQ ID NO: 3976415 - RNA, 18 nt, Human herpesvirus 5
ucuacuccaucaugaagg

SEQ ID NO: 3976416 - RNA, 17 nt, Human herpesvirus 5
ucuacuccgaauaacaa

SEQ ID NO: 3976417 - RNA, 13 nt, Human herpesvirus 5
ucuacugcaacug

SEQ ID NO: 3976418 - RNA, 14 nt, Human herpesvirus 5
ucuaggaacacuga

SEQ ID NO: 3976419 - RNA, 19 nt, Human herpesvirus 5
ucuaggcuacucugacugu

SEQ ID NO: 3976420 - RNA, 23 nt, Human herpesvirus 5
ucuauaggcgguacuuacgucac

SEQ ID NO: 3976421 - RNA, 13 nt, Human herpesvirus 5
ucuauauucugca

SEQ ID NO: 3976422 - RNA, 14 nt, Human herpesvirus 5
ucucaacgacuuuc

SEQ ID NO: 3976423 - RNA, 14 nt, Human herpesvirus 5
ucucagccucgucg

SEQ ID NO: 3976424 - RNA, 19 nt, Human herpesvirus 5
ucucaugucgcucuuggag

SEQ ID NO: 3976425 - RNA, 15 nt, Human herpesvirus 5
ucucccgacgucacu

SEQ ID NO: 3976426 - RNA, 14 nt, Human herpesvirus 5
ucuccgguuucaaa

SEQ ID NO: 3976427 - RNA, 19 nt, Human herpesvirus 5
ucugacgcugucuugcuua

SEQ ID NO: 3976428 - RNA, 13 nt, Human herpesvirus 5
ucugccucuuccu

SEQ ID NO: 3976429 - RNA, 15 nt, Human herpesvirus 5
ucuggcccuccgcca

SEQ ID NO: 3976430 - RNA, 22 nt, Human herpesvirus 5
ucugggugcaaugccucauccu

SEQ ID NO: 3976431 - RNA, 16 nt, Human herpesvirus 5
ucuggucuucccuaca

SEQ ID NO: 3976432 - RNA, 20 nt, Human herpesvirus 5
ucuguaaaagcugcaugaaa

SEQ ID NO: 3976433 - RNA, 16 nt, Human herpesvirus 5
ucugucguacuguccu

SEQ ID NO: 3976434 - RNA, 12 nt, Human herpesvirus 5
ucuucuggcccu

SEQ ID NO: 3976435 - RNA, 15 nt, Human herpesvirus 5
ucuugacuggccgga

SEQ ID NO: 3976436 - RNA, 14 nt, Human herpesvirus 5
ucuugcccacgccg

SEQ ID NO: 3976437 - RNA, 20 nt, Human herpesvirus 5
ucuuuaaaaacacuggcugc

SEQ ID NO: 3976438 - RNA, 15 nt, Human herpesvirus 5
ucuuucuacaagaca

SEQ ID NO: 3976439 - RNA, 17 nt, Human herpesvirus 5
ucuuugccggcucuccu

SEQ ID NO: 3976440 - RNA, 14 nt, Human herpesvirus 5
ugaaaagguacuuu

SEQ ID NO: 3976441 - RNA, 19 nt, Human herpesvirus 5
ugaacaccuuuuugcugca

SEQ ID NO: 3976442 - RNA, 20 nt, Human herpesvirus 5
ugaacaccuuuuugcugcac

SEQ ID NO: 3976443 - RNA, 20 nt, Human herpesvirus 5
ugaagccgccgucgagccac

SEQ ID NO: 3976444 - RNA, 22 nt, Human herpesvirus 5
ugaauaacaccaaaaauccaga

SEQ ID NO: 3976445 - RNA, 17 nt, Human herpesvirus 5
ugaaucgaugucaagga

SEQ ID NO: 3976446 - RNA, 19 nt, Human herpesvirus 5
ugaaucgcgagcugggcga

SEQ ID NO: 3976447 - RNA, 20 nt, Human herpesvirus 5
ugacacagcuccugaaugag

SEQ ID NO: 3976448 - RNA, 13 nt, Human herpesvirus 5
ugaccaugggcua

SEQ ID NO: 3976449 - RNA, 16 nt, Human herpesvirus 5
ugacccagggcugcuc

SEQ ID NO: 3976450 - RNA, 20 nt, Human herpesvirus 5
ugacgacggcgugguaucca

SEQ ID NO: 3976451 - RNA, 14 nt, Human herpesvirus 5
ugacgcggacgagg

SEQ ID NO: 3976452 - RNA, 16 nt, Human herpesvirus 5
ugacggggcugggugg

SEQ ID NO: 3976453 - RNA, 20 nt, Human herpesvirus 5
ugacgucccuuuuacuagua

SEQ ID NO: 3976454 - RNA, 17 nt, Human herpesvirus 5
ugacguggauacuagua

SEQ ID NO: 3976455 - RNA, 22 nt, Human herpesvirus 5
ugagaaccgcacggaguaauca

SEQ ID NO: 3976456 - RNA, 15 nt, Human herpesvirus 5
ugagaagcacggaga

SEQ ID NO: 3976457 - RNA, 19 nt, Human herpesvirus 5
ugagcaggguaaaaaccac

SEQ ID NO: 3976458 - RNA, 19 nt, Human herpesvirus 5
ugagccggaaaaaccgcag

SEQ ID NO: 3976459 - RNA, 16 nt, Human herpesvirus 5
ugagccggggugccgc

SEQ ID NO: 3976460 - RNA, 14 nt, Human herpesvirus 5
ugagcgacagcagc

SEQ ID NO: 3976461 - RNA, 14 nt, Human herpesvirus 5
ugagcgugcugcuc

SEQ ID NO: 3976462 - RNA, 16 nt, Human herpesvirus 5
ugagcgugcugcucug

SEQ ID NO: 3976463 - RNA, 16 nt, Human herpesvirus 5
ugagcuguuucgacgu

SEQ ID NO: 3976464 - RNA, 23 nt, Human herpesvirus 5
ugaggagcucacccggcugcugg

SEQ ID NO: 3976465 - RNA, 23 nt, Human herpesvirus 5
ugauaauaaccgcggugugcuuu

SEQ ID NO: 3976466 - RNA, 21 nt, Human herpesvirus 5
ugauaggcggcgaggcgaaac

SEQ ID NO: 3976467 - RNA, 13 nt, Human herpesvirus 5
ugaucugggcagc

SEQ ID NO: 3976468 - RNA, 12 nt, Human herpesvirus 5
ugaugcugcuga

SEQ ID NO: 3976469 - RNA, 16 nt, Human herpesvirus 5
ugaugucggauccggc

SEQ ID NO: 3976470 - RNA, 15 nt, Human herpesvirus 5
ugauuucuugcuugc

SEQ ID NO: 3976471 - RNA, 17 nt, Human herpesvirus 5
ugauuuuuuuuacaaua

SEQ ID NO: 3976472 - RNA, 15 nt, Human herpesvirus 5
ugcaacgccuggcgu

SEQ ID NO: 3976473 - RNA, 15 nt, Human herpesvirus 5
ugcaacgcgugaaac

SEQ ID NO: 3976474 - RNA, 22 nt, Human herpesvirus 5
ugcaccuggguggaacgagcgc

SEQ ID NO: 3976475 - RNA, 16 nt, Human herpesvirus 5
ugcacgcgcugcuuuc

SEQ ID NO: 3976476 - RNA, 21 nt, Human herpesvirus 5
ugcagcacgcgauuggccagc

SEQ ID NO: 3976477 - RNA, 18 nt, Human herpesvirus 5
ugcagcgcuacgugcgcg

SEQ ID NO: 3976478 - RNA, 15 nt, Human herpesvirus 5
ugccaccgacaugga

SEQ ID NO: 3976479 - RNA, 16 nt, Human herpesvirus 5
ugccaguugcuguugc

SEQ ID NO: 3976480 - RNA, 21 nt, Human herpesvirus 5
ugcccuuuacggugcugcguc

SEQ ID NO: 3976481 - RNA, 19 nt, Human herpesvirus 5
ugccgcguggcgcugcaca

SEQ ID NO: 3976482 - RNA, 15 nt, Human herpesvirus 5
ugccggaacccuucc

SEQ ID NO: 3976483 - RNA, 15 nt, Human herpesvirus 5
ugccggagcuacgcg

SEQ ID NO: 3976484 - RNA, 20 nt, Human herpesvirus 5
ugccugcacgaccugcucca

SEQ ID NO: 3976485 - RNA, 23 nt, Human herpesvirus 5
ugccuuuuuaauaaagucugggu

SEQ ID NO: 3976486 - RNA, 20 nt, Human herpesvirus 5
ugcgccuccucgucggccug

SEQ ID NO: 3976487 - RNA, 17 nt, Human herpesvirus 5
ugcgcgauacauugccc

SEQ ID NO: 3976488 - RNA, 19 nt, Human herpesvirus 5
ugcggcggcuugggcagca

SEQ ID NO: 3976489 - RNA, 17 nt, Human herpesvirus 5
ugcgggaugcugcggcg

SEQ ID NO: 3976490 - RNA, 15 nt, Human herpesvirus 5
ugcgucuggauuugu

SEQ ID NO: 3976491 - RNA, 12 nt, Human herpesvirus 5
ugcuacagggag

SEQ ID NO: 3976492 - RNA, 21 nt, Human herpesvirus 5
ugcuccucggagcacgggcga

SEQ ID NO: 3976493 - RNA, 14 nt, Human herpesvirus 5
ugcucgaccaggag

SEQ ID NO: 3976494 - RNA, 16 nt, Human herpesvirus 5
ugcucgaccaggaggu

SEQ ID NO: 3976495 - RNA, 17 nt, Human herpesvirus 5
ugcucggcggccacggc

SEQ ID NO: 3976496 - RNA, 19 nt, Human herpesvirus 5
ugcucuacugcaacugcac

SEQ ID NO: 3976497 - RNA, 13 nt, Human herpesvirus 5
ugcucucuuagug

SEQ ID NO: 3976498 - RNA, 14 nt, Human herpesvirus 5
ugcugcaaggccuc

SEQ ID NO: 3976499 - RNA, 16 nt, Human herpesvirus 5
ugcugcugagacugag

SEQ ID NO: 3976500 - RNA, 15 nt, Human herpesvirus 5
ugcugggcugggugc

SEQ ID NO: 3976501 - RNA, 18 nt, Human herpesvirus 5
ugcuucuaccaccuuugu

SEQ ID NO: 3976502 - RNA, 17 nt, Human herpesvirus 5
uggaaacuacgugcaac

SEQ ID NO: 3976503 - RNA, 16 nt, Human herpesvirus 5
uggaacaagaaacaca

SEQ ID NO: 3976504 - RNA, 16 nt, Human herpesvirus 5
uggaacgagcgccguc

SEQ ID NO: 3976505 - RNA, 22 nt, Human herpesvirus 5
uggaacggucuuuauauauaca

SEQ ID NO: 3976506 - RNA, 21 nt, Human herpesvirus 5
uggaagcgaauaagcgcgacc

SEQ ID NO: 3976507 - RNA, 14 nt, Human herpesvirus 5
uggaccugaccugu

SEQ ID NO: 3976508 - RNA, 15 nt, Human herpesvirus 5
uggacggguuucagc

SEQ ID NO: 3976509 - RNA, 15 nt, Human herpesvirus 5
uggagcgggucgccg

SEQ ID NO: 3976510 - RNA, 21 nt, Human herpesvirus 5
uggaggucuaucacgggcucg

SEQ ID NO: 3976511 - RNA, 23 nt, Human herpesvirus 5
uggagucgcgguucggccggacc

SEQ ID NO: 3976512 - RNA, 18 nt, Human herpesvirus 5
uggauuaguaauggaaag

SEQ ID NO: 3976513 - RNA, 18 nt, Human herpesvirus 5
uggcaaggugcugcaccu

SEQ ID NO: 3976514 - RNA, 20 nt, Human herpesvirus 5
uggcacguuuuggaaaacgu

SEQ ID NO: 3976515 - RNA, 14 nt, Human herpesvirus 5
uggcagcuggcuug

SEQ ID NO: 3976516 - RNA, 23 nt, Human herpesvirus 5
uggcgcggucugcgugaugccug

SEQ ID NO: 3976517 - RNA, 17 nt, Human herpesvirus 5
uggcuuuccucgggcga

SEQ ID NO: 3976518 - RNA, 13 nt, Human herpesvirus 5
ugggauugacgcg

SEQ ID NO: 3976519 - RNA, 19 nt, Human herpesvirus 5
ugggcauacgcgauaucug

SEQ ID NO: 3976520 - RNA, 23 nt, Human herpesvirus 5
ugggccaggacccguacugcgac

SEQ ID NO: 3976521 - RNA, 14 nt, Human herpesvirus 5
ugggcgacaugcac

SEQ ID NO: 3976522 - RNA, 15 nt, Human herpesvirus 5
ugggcgcccccaccc

SEQ ID NO: 3976523 - RNA, 15 nt, Human herpesvirus 5
uggggacggugauga

SEQ ID NO: 3976524 - RNA, 17 nt, Human herpesvirus 5
uggggcaacugcugccu

SEQ ID NO: 3976525 - RNA, 13 nt, Human herpesvirus 5
uggggcuucgccu

SEQ ID NO: 3976526 - RNA, 13 nt, Human herpesvirus 5
uggggugggcgcg

SEQ ID NO: 3976527 - RNA, 16 nt, Human herpesvirus 5
uggggugucuagcugg

SEQ ID NO: 3976528 - RNA, 17 nt, Human herpesvirus 5
ugggucagcggcacgcc

SEQ ID NO: 3976529 - RNA, 18 nt, Human herpesvirus 5
ugggucugcgcugccccg

SEQ ID NO: 3976530 - RNA, 13 nt, Human herpesvirus 5
ugggugaaaccga

SEQ ID NO: 3976531 - RNA, 17 nt, Human herpesvirus 5
uggucauguucucccag

SEQ ID NO: 3976532 - RNA, 18 nt, Human herpesvirus 5
uggucgagcgcgaccgcc

SEQ ID NO: 3976533 - RNA, 16 nt, Human herpesvirus 5
ugguggcucaugccgc

SEQ ID NO: 3976534 - RNA, 20 nt, Human herpesvirus 5
ugguggucuacaagcgcaac

SEQ ID NO: 3976535 - RNA, 14 nt, Human herpesvirus 5
uggugugucggcaa

SEQ ID NO: 3976536 - RNA, 19 nt, Human herpesvirus 5
uguacaaucucacgguuaa

SEQ ID NO: 3976537 - RNA, 18 nt, Human herpesvirus 5
uguauggaggucacuguc

SEQ ID NO: 3976538 - RNA, 19 nt, Human herpesvirus 5
uguauuuuuaucgggaaug

SEQ ID NO: 3976539 - RNA, 21 nt, Human herpesvirus 5
ugucaaggaacgcguguuuug

SEQ ID NO: 3976540 - RNA, 20 nt, Human herpesvirus 5
ugucacggaacauguccugg

SEQ ID NO: 3976541 - RNA, 14 nt, Human herpesvirus 5
ugucaugggucugc

SEQ ID NO: 3976542 - RNA, 15 nt, Human herpesvirus 5
ugucgagcugguuaa

SEQ ID NO: 3976543 - RNA, 14 nt, Human herpesvirus 5
ugucucuacgcucc

SEQ ID NO: 3976544 - RNA, 19 nt, Human herpesvirus 5
ugugcaccgucaucggcac

SEQ ID NO: 3976545 - RNA, 13 nt, Human herpesvirus 5
ugugcgucaaugc

SEQ ID NO: 3976546 - RNA, 21 nt, Human herpesvirus 5
uguguuauucagaaccaugua

SEQ ID NO: 3976547 - RNA, 13 nt, Human herpesvirus 5
uguguuugacauu

SEQ ID NO: 3976548 - RNA, 23 nt, Human herpesvirus 5
caaguauuuaugacggacacgga

SEQ ID NO: 3976549 - RNA, 20 nt, Human herpesvirus 5
caagucgccgacgaagaaga

SEQ ID NO: 3976550 - RNA, 17 nt, Human herpesvirus 5
caagugcaagcgccgcg

SEQ ID NO: 3976551 - RNA, 14 nt, Human herpesvirus 5
caaguugguggugg

SEQ ID NO: 3976552 - RNA, 14 nt, Human herpesvirus 5
caauaaaaaccacc

SEQ ID NO: 3976553 - RNA, 14 nt, Human herpesvirus 5
caaugggcuucccu

SEQ ID NO: 3976554 - RNA, 14 nt, Human herpesvirus 5
caauuccacgccgc

SEQ ID NO: 3976555 - RNA, 13 nt, Human herpesvirus 5
cacaauacacaug

SEQ ID NO: 3976556 - RNA, 13 nt, Human herpesvirus 5
cacacaccgcuuu

SEQ ID NO: 3976557 - RNA, 14 nt, Human herpesvirus 5
cacacgcaucugca

SEQ ID NO: 3976558 - RNA, 11 nt, Human herpesvirus 5
cacacggcuaa

SEQ ID NO: 3976559 - RNA, 20 nt, Human herpesvirus 5
cacacggugugaugguacua

SEQ ID NO: 3976560 - RNA, 13 nt, Human herpesvirus 5
cacagcagcacca

SEQ ID NO: 3976561 - RNA, 12 nt, Human herpesvirus 5
cacagcuccuga

SEQ ID NO: 3976562 - RNA, 20 nt, Human herpesvirus 5
cacagcuccugaaugagcuc

SEQ ID NO: 3976563 - RNA, 23 nt, Human herpesvirus 5
cacagcuccugaaugagcucuuu

SEQ ID NO: 3976564 - RNA, 13 nt, Human herpesvirus 5
cacaguuaccacc

SEQ ID NO: 3976565 - RNA, 17 nt, Human herpesvirus 5
cacauuagacacacggg

SEQ ID NO: 3976566 - RNA, 14 nt, Human herpesvirus 5
caccaaagaugaag

SEQ ID NO: 3976567 - RNA, 18 nt, Human herpesvirus 5
caccacacgucgugagca

SEQ ID NO: 3976568 - RNA, 19 nt, Human herpesvirus 5
caccagacuuuuugcuuua

SEQ ID NO: 3976569 - RNA, 21 nt, Human herpesvirus 5
caccaucgugguagcgccgcg

SEQ ID NO: 3976570 - RNA, 17 nt, Human herpesvirus 5
cacccaggccgcggggu

SEQ ID NO: 3976571 - RNA, 19 nt, Human herpesvirus 5
cacccccgauaugggccgc

SEQ ID NO: 3976572 - RNA, 16 nt, Human herpesvirus 5
cacccgcaccagacuu

SEQ ID NO: 3976573 - RNA, 15 nt, Human herpesvirus 5
caccgacacagcagc

SEQ ID NO: 3976574 - RNA, 16 nt, Human herpesvirus 5
caccgacccugcgucc

SEQ ID NO: 3976575 - RNA, 19 nt, Human herpesvirus 5
caccgggacggccugggcg

SEQ ID NO: 3976576 - RNA, 14 nt, Human herpesvirus 5
caccguaccugcau

SEQ ID NO: 3976577 - RNA, 14 nt, Human herpesvirus 5
caccgugacaccgg

SEQ ID NO: 3976578 - RNA, 18 nt, Human herpesvirus 5
caccgugccccacucgcu

SEQ ID NO: 3976579 - RNA, 17 nt, Human herpesvirus 5
caccugagacuggucug

SEQ ID NO: 3976580 - RNA, 23 nt, Human herpesvirus 5
caccugccucgacaucucgccgu

SEQ ID NO: 3976581 - RNA, 14 nt, Human herpesvirus 5
cacgaccgcgacga

SEQ ID NO: 3976582 - RNA, 14 nt, Human herpesvirus 5
cacgacgaccccgc

SEQ ID NO: 3976583 - RNA, 12 nt, Human herpesvirus 5
cacgacggcucc

SEQ ID NO: 3976584 - RNA, 13 nt, Human herpesvirus 5
cacgccgccguga

SEQ ID NO: 3976585 - RNA, 15 nt, Human herpesvirus 5
cacgccggccugagc

SEQ ID NO: 3976586 - RNA, 15 nt, Human herpesvirus 5
cacgccgugcucgcg

SEQ ID NO: 3976587 - RNA, 18 nt, Human herpesvirus 5
cacgccguugccacgagc

SEQ ID NO: 3976588 - RNA, 13 nt, Human herpesvirus 5
cacgcgcuagccu

SEQ ID NO: 3976589 - RNA, 15 nt, Human herpesvirus 5
cacgcugcacgaccu

SEQ ID NO: 3976590 - RNA, 22 nt, Human herpesvirus 5
cacgcugcuauaagaaggccau

SEQ ID NO: 3976591 - RNA, 19 nt, Human herpesvirus 5
cacggaacauguccuggcg

SEQ ID NO: 3976592 - RNA, 19 nt, Human herpesvirus 5
cacggccuccgacgagcgu

SEQ ID NO: 3976593 - RNA, 23 nt, Human herpesvirus 5
cacggccuuauguggcugcgccg

SEQ ID NO: 3976594 - RNA, 16 nt, Human herpesvirus 5
cacggcgaaccgccgu

SEQ ID NO: 3976595 - RNA, 19 nt, Human herpesvirus 5
cacggcgccggugacccgc

SEQ ID NO: 3976596 - RNA, 17 nt, Human herpesvirus 5
cacgguacaaaccucua

SEQ ID NO: 3976597 - RNA, 19 nt, Human herpesvirus 5
cacggucugcuugcuggcu

SEQ ID NO: 3976598 - RNA, 23 nt, Human herpesvirus 5
cacgucaccgugccccacucgcu

SEQ ID NO: 3976599 - RNA, 23 nt, Human herpesvirus 5
cacguccaugucgcgacacgacc

SEQ ID NO: 3976600 - RNA, 20 nt, Human herpesvirus 5
cacgucggagccccugcgcg

SEQ ID NO: 3976601 - RNA, 21 nt, Human herpesvirus 5
cacgugugugcguuuucuagu

SEQ ID NO: 3976602 - RNA, 12 nt, Human herpesvirus 5
cacuacucuggg

SEQ ID NO: 3976603 - RNA, 17 nt, Human herpesvirus 5
cacuauauuaucuuuua

SEQ ID NO: 3976604 - RNA, 16 nt, Human herpesvirus 5
cacucgcaccggcagc

SEQ ID NO: 3976605 - RNA, 18 nt, Human herpesvirus 5
cacugccaacccagcagc

SEQ ID NO: 3976606 - RNA, 21 nt, Human herpesvirus 5
cacugccaacccagcagccgg

SEQ ID NO: 3976607 - RNA, 17 nt, Human herpesvirus 5
cacugcuacccugcgcu

SEQ ID NO: 3976608 - RNA, 20 nt, Human herpesvirus 5
cacugggagacggccuggau

SEQ ID NO: 3976609 - RNA, 19 nt, Human herpesvirus 5
cacuuuacauaaaaccacc

SEQ ID NO: 3976610 - RNA, 22 nt, Human herpesvirus 5
cacuuuaggcggcgcagcgcca

SEQ ID NO: 3976611 - RNA, 12 nt, Human herpesvirus 5
cacuuucucugg

SEQ ID NO: 3976612 - RNA, 17 nt, Human herpesvirus 5
cacuuuuaacagcucau

SEQ ID NO: 3976613 - RNA, 17 nt, Human herpesvirus 5
cagaagaaaaaaacaca

SEQ ID NO: 3976614 - RNA, 17 nt, Human herpesvirus 5
cagaagcugcggcucug

SEQ ID NO: 3976615 - RNA, 19 nt, Human herpesvirus 5
cagacccgauacagucagc

SEQ ID NO: 3976616 - RNA, 14 nt, Human herpesvirus 5
cagacugcccuuga

SEQ ID NO: 3976617 - RNA, 18 nt, Human herpesvirus 5
cagagaccgccgccgcgc

SEQ ID NO: 3976618 - RNA, 20 nt, Human herpesvirus 5
cagauauccacaacgacaaa

SEQ ID NO: 3976619 - RNA, 18 nt, Human herpesvirus 5
cagaucuaccaugucuuu

SEQ ID NO: 3976620 - RNA, 20 nt, Human herpesvirus 5
cagauucaguaaccuggagc

SEQ ID NO: 3976621 - RNA, 20 nt, Human herpesvirus 5
cagauuuacagcccggcggu

SEQ ID NO: 3976622 - RNA, 16 nt, Human herpesvirus 5
cagcaagaguugcaac

SEQ ID NO: 3976623 - RNA, 14 nt, Human herpesvirus 5
cagcacauuagaca

SEQ ID NO: 3976624 - RNA, 17 nt, Human herpesvirus 5
cagcaccaguuggccac

SEQ ID NO: 3976625 - RNA, 18 nt, Human herpesvirus 5
cagcaccccgcgucacuu

SEQ ID NO: 3976626 - RNA, 21 nt, Human herpesvirus 5
cagcagauacaugcgucguau

SEQ ID NO: 3976627 - RNA, 16 nt, Human herpesvirus 5
cagcagcagcuggugc

SEQ ID NO: 3976628 - RNA, 17 nt, Human herpesvirus 5
cagcagcuggugcauca

SEQ ID NO: 3976629 - RNA, 15 nt, Human herpesvirus 5
cagcauggacugucu

SEQ ID NO: 3976630 - RNA, 18 nt, Human herpesvirus 5
cagccaccgacacagcag

SEQ ID NO: 3976631 - RNA, 22 nt, Human herpesvirus 5
cagccaccgcgaggccacccac

SEQ ID NO: 3976632 - RNA, 18 nt, Human herpesvirus 5
cagcgaguugcugugcac

SEQ ID NO: 3976633 - RNA, 18 nt, Human herpesvirus 5
cagcgccagcggccuggc

SEQ ID NO: 3976634 - RNA, 20 nt, Human herpesvirus 5
cagcgccagcggccuggccu

SEQ ID NO: 3976635 - RNA, 16 nt, Human herpesvirus 5
cagcgcuacgugcgcg

SEQ ID NO: 3976636 - RNA, 18 nt, Human herpesvirus 5
cagcggaacucgaccucu

SEQ ID NO: 3976637 - RNA, 14 nt, Human herpesvirus 5
cagcggauugggua

SEQ ID NO: 3976638 - RNA, 21 nt, Human herpesvirus 5
cagcggucguaagcggcagca

SEQ ID NO: 3976639 - RNA, 14 nt, Human herpesvirus 5
cagcgguggcugga

SEQ ID NO: 3976640 - RNA, 21 nt, Human herpesvirus 5
cagcguauuuucuacuccgaa

SEQ ID NO: 3976641 - RNA, 13 nt, Human herpesvirus 5
cagcgucacagag

SEQ ID NO: 3976642 - RNA, 15 nt, Human herpesvirus 5
cagcgucuggccagc

SEQ ID NO: 3976643 - RNA, 17 nt, Human herpesvirus 5
cagcuaucgugacuggg

SEQ ID NO: 3976644 - RNA, 19 nt, Human herpesvirus 5
cagcugcuggagcgcggcc

SEQ ID NO: 3976645 - RNA, 19 nt, Human herpesvirus 5
cagcuggugaucggccgcg

SEQ ID NO: 3976646 - RNA, 14 nt, Human herpesvirus 5
caggaccacgucca

SEQ ID NO: 3976647 - RNA, 23 nt, Human herpesvirus 5
caggacccguacugcgacggcag

SEQ ID NO: 3976648 - RNA, 14 nt, Human herpesvirus 5
caggagcugcugcu

SEQ ID NO: 3976649 - RNA, 22 nt, Human herpesvirus 5
caggaggaaaaaaaaacuagac

SEQ ID NO: 3976650 - RNA, 19 nt, Human herpesvirus 5
caggaucuggugcaggcca

SEQ ID NO: 3976651 - RNA, 13 nt, Human herpesvirus 5
caggccgcaaagc

SEQ ID NO: 3976652 - RNA, 14 nt, Human herpesvirus 5
caggccgcgcaggc

SEQ ID NO: 3976653 - RNA, 12 nt, Human herpesvirus 5
caggcgcgcaga

SEQ ID NO: 3976654 - RNA, 19 nt, Human herpesvirus 5
caggcucgucgugggcuac

SEQ ID NO: 3976655 - RNA, 16 nt, Human herpesvirus 5
caggcuguucacgcgg

SEQ ID NO: 3976656 - RNA, 22 nt, Human herpesvirus 5
cagggacagugcgccaacggca

SEQ ID NO: 3976657 - RNA, 15 nt, Human herpesvirus 5
caggguaacagccuu

SEQ ID NO: 3976658 - RNA, 22 nt, Human herpesvirus 5
cagguaggauuccaagccgcag

SEQ ID NO: 3976659 - RNA, 18 nt, Human herpesvirus 5
cagguccaaucgcacuag

SEQ ID NO: 3976660 - RNA, 20 nt, Human herpesvirus 5
caguacaacaguuaucagca

SEQ ID NO: 3976661 - RNA, 12 nt, Human herpesvirus 5
caguacuuuggg

SEQ ID NO: 3976662 - RNA, 20 nt, Human herpesvirus 5
caguagcaccggccccacgc

SEQ ID NO: 3976663 - RNA, 21 nt, Human herpesvirus 5
caguagcgguaccagacgcgg

SEQ ID NO: 3976664 - RNA, 15 nt, Human herpesvirus 5
caguauuccccgcug

SEQ ID NO: 3976665 - RNA, 16 nt, Human herpesvirus 5
caguauuccccgcugu

SEQ ID NO: 3976666 - RNA, 16 nt, Human herpesvirus 5
caguauuuacuucacc

SEQ ID NO: 3976667 - RNA, 21 nt, Human herpesvirus 5
caguauuucuagagcacugag

SEQ ID NO: 3976668 - RNA, 15 nt, Human herpesvirus 5
cagugaguacacgca

SEQ ID NO: 3976669 - RNA, 17 nt, Human herpesvirus 5
caguggcaggcccgggu

SEQ ID NO: 3976670 - RNA, 23 nt, Human herpesvirus 5
caguguauuggcauauagccaau

SEQ ID NO: 3976671 - RNA, 18 nt, Human herpesvirus 5
caguguuggaucagacuc

SEQ ID NO: 3976672 - RNA, 17 nt, Human herpesvirus 5
caguugggaccgcagcg

SEQ ID NO: 3976673 - RNA, 21 nt, Human herpesvirus 5
cauaaaaccaccguaccugca

SEQ ID NO: 3976674 - RNA, 20 nt, Human herpesvirus 5
cauaaguuuacgggaggaau

SEQ ID NO: 3976675 - RNA, 14 nt, Human herpesvirus 5
cauagugccagccc

SEQ ID NO: 3976676 - RNA, 13 nt, Human herpesvirus 5
cauaucgggcccu

SEQ ID NO: 3976677 - RNA, 12 nt, Human herpesvirus 5
caucaggugaca

SEQ ID NO: 3976678 - RNA, 17 nt, Human herpesvirus 5
caucaucaacagcagca

SEQ ID NO: 3976679 - RNA, 16 nt, Human herpesvirus 5
caucaucagcgccgug

SEQ ID NO: 3976680 - RNA, 13 nt, Human herpesvirus 5
cauccaauuacac

SEQ ID NO: 3976681 - RNA, 18 nt, Human herpesvirus 5
cauccagcuccguucgcg

SEQ ID NO: 3976682 - RNA, 16 nt, Human herpesvirus 5
cauccugcccaccgcc

SEQ ID NO: 3976683 - RNA, 20 nt, Human herpesvirus 5
cauccuuuucaugcucauac

SEQ ID NO: 3976684 - RNA, 22 nt, Human herpesvirus 5
caucgcccacaguagcgguacc

SEQ ID NO: 3976685 - RNA, 20 nt, Human herpesvirus 5
caucggugccggccagguag

SEQ ID NO: 3976686 - RNA, 13 nt, Human herpesvirus 5
caucucacggaua

SEQ ID NO: 3976687 - RNA, 15 nt, Human herpesvirus 5
caucugcggcagcgg

SEQ ID NO: 3976688 - RNA, 12 nt, Human herpesvirus 5
caugaacaaaaa

SEQ ID NO: 3976689 - RNA, 20 nt, Human herpesvirus 5
caugaaguuguugaucugcu

SEQ ID NO: 3976690 - RNA, 21 nt, Human herpesvirus 5
caugaaguuguugaucugcug

SEQ ID NO: 3976691 - RNA, 15 nt, Human herpesvirus 5
caugacgcacgccgg

SEQ ID NO: 3976692 - RNA, 19 nt, Human herpesvirus 5
caugaguuggugcagcugc

SEQ ID NO: 3976693 - RNA, 22 nt, Human herpesvirus 5
caugcauucugguaccugcuaa

SEQ ID NO: 3976694 - RNA, 17 nt, Human herpesvirus 5
caugcggcaaucggugc

SEQ ID NO: 3976695 - RNA, 21 nt, Human herpesvirus 5
caugcugagcaaguacacgcg

SEQ ID NO: 3976696 - RNA, 21 nt, Human herpesvirus 5
cauggacauaaaaaagagaca

SEQ ID NO: 3976697 - RNA, 15 nt, Human herpesvirus 5
cauggagacaguuuc

SEQ ID NO: 3976698 - RNA, 15 nt, Human herpesvirus 5
cauggccaaugcaua

SEQ ID NO: 3976699 - RNA, 17 nt, Human herpesvirus 5
cauggccaaugcauauc

SEQ ID NO: 3976700 - RNA, 17 nt, Human herpesvirus 5
cauguccggccgucgca

SEQ ID NO: 3976701 - RNA, 14 nt, Human herpesvirus 5
caugucgcgacaga

SEQ ID NO: 3976702 - RNA, 18 nt, Human herpesvirus 5
caugucuuacaaaucaca

SEQ ID NO: 3976703 - RNA, 15 nt, Human herpesvirus 5
cauguggcguacacg

SEQ ID NO: 3976704 - RNA, 15 nt, Human herpesvirus 5
cauguucggcuccgu

SEQ ID NO: 3976705 - RNA, 16 nt, Human herpesvirus 5
cauguuuuaggaauga

SEQ ID NO: 3976706 - RNA, 17 nt, Human herpesvirus 5
cauuccccaccuucccu

SEQ ID NO: 3976707 - RNA, 21 nt, Human herpesvirus 5
cauugcccuucuggagcacac

SEQ ID NO: 3976708 - RNA, 21 nt, Human herpesvirus 5
ccaaagaugaagacacccugc

SEQ ID NO: 3976709 - RNA, 12 nt, Human herpesvirus 5
ccaacacguccc

SEQ ID NO: 3976710 - RNA, 13 nt, Human herpesvirus 5
ccaaccucgccgu

SEQ ID NO: 3976711 - RNA, 19 nt, Human herpesvirus 5
ccaacuccgugccagcugg

SEQ ID NO: 3976712 - RNA, 12 nt, Human herpesvirus 5
ccaagcacgcca

SEQ ID NO: 3976713 - RNA, 22 nt, Human herpesvirus 5
ccaaggaaccaccguagcacug

SEQ ID NO: 3976714 - RNA, 14 nt, Human herpesvirus 5
ccaaggccuccagc

SEQ ID NO: 3976715 - RNA, 15 nt, Human herpesvirus 5
ccaaggccuccagcg

SEQ ID NO: 3976716 - RNA, 13 nt, Human herpesvirus 5
ccaagucuugccg

SEQ ID NO: 3976717 - RNA, 15 nt, Human herpesvirus 5
ccaaguucagcagca

SEQ ID NO: 3976718 - RNA, 15 nt, Human herpesvirus 5
ccacaaccuguggaa

SEQ ID NO: 3976719 - RNA, 19 nt, Human herpesvirus 5
ccacaagaaacgcuggaaa

SEQ ID NO: 3976720 - RNA, 15 nt, Human herpesvirus 5
ccacagagccgcgug

SEQ ID NO: 3976721 - RNA, 14 nt, Human herpesvirus 5
ccacaggcgccgca

SEQ ID NO: 3976722 - RNA, 21 nt, Human herpesvirus 5
ccaccaaggcgacauggcccu

SEQ ID NO: 3976723 - RNA, 14 nt, Human herpesvirus 5
ccaccauagccacu

SEQ ID NO: 3976724 - RNA, 22 nt, Human herpesvirus 5
ccaccgaagccguauuccguuu

SEQ ID NO: 3976725 - RNA, 13 nt, Human herpesvirus 5
ccaccgacacagc

SEQ ID NO: 3976726 - RNA, 21 nt, Human herpesvirus 5
ccaccgccgcuuucucaucuc

SEQ ID NO: 3976727 - RNA, 20 nt, Human herpesvirus 5
ccaccguaccugcaucacgg

SEQ ID NO: 3976728 - RNA, 20 nt, Human herpesvirus 5
ccaccgugucuccgugacgg

SEQ ID NO: 3976729 - RNA, 13 nt, Human herpesvirus 5
ccacgacaaacac

SEQ ID NO: 3976730 - RNA, 17 nt, Human herpesvirus 5
ccacgccaccgccgcca

SEQ ID NO: 3976731 - RNA, 21 nt, Human herpesvirus 5
ccacgcuauacauagcccgcu

SEQ ID NO: 3976732 - RNA, 20 nt, Human herpesvirus 5
ccacgcucgagggcuccguc

SEQ ID NO: 3976733 - RNA, 23 nt, Human herpesvirus 5
ccacgcucgcucugacgccgcgc

SEQ ID NO: 3976734 - RNA, 19 nt, Human herpesvirus 5
ccacgcugacaacccacuc

SEQ ID NO: 3976735 - RNA, 14 nt, Human herpesvirus 5
ccacgcugcuucac

SEQ ID NO: 3976736 - RNA, 12 nt, Human herpesvirus 5
ccacggccagcg

SEQ ID NO: 3976737 - RNA, 13 nt, Human herpesvirus 5
ccacggcugcuga

SEQ ID NO: 3976738 - RNA, 18 nt, Human herpesvirus 5
ccacgguacgccaguagc

SEQ ID NO: 3976739 - RNA, 18 nt, Human herpesvirus 5
ccacgguuuaccacaggc

SEQ ID NO: 3976740 - RNA, 16 nt, Human herpesvirus 5
ccacguagguuucugu

SEQ ID NO: 3976741 - RNA, 18 nt, Human herpesvirus 5
ccacguagucgcgcgcga

SEQ ID NO: 3976742 - RNA, 15 nt, Human herpesvirus 5
ccacgucaccgugcc

SEQ ID NO: 3976743 - RNA, 16 nt, Human herpesvirus 5
ccacguccacccaucc

SEQ ID NO: 3976744 - RNA, 18 nt, Human herpesvirus 5
ccacgucuucaaaguagc

SEQ ID NO: 3976745 - RNA, 17 nt, Human herpesvirus 5
ccacuaccaccacgacc

SEQ ID NO: 3976746 - RNA, 14 nt, Human herpesvirus 5
ccacugggccucgg

SEQ ID NO: 3976747 - RNA, 20 nt, Human herpesvirus 5
ccagacugcccuugaaugua

SEQ ID NO: 3976748 - RNA, 13 nt, Human herpesvirus 5
ccagagacagaga

SEQ ID NO: 3976749 - RNA, 15 nt, Human herpesvirus 5
ccagauacgcguugg

SEQ ID NO: 3976750 - RNA, 14 nt, Human herpesvirus 5
ccagcagccggagg

SEQ ID NO: 3976751 - RNA, 18 nt, Human herpesvirus 5
ccagcggccgcagugggc

SEQ ID NO: 3976752 - RNA, 19 nt, Human herpesvirus 5
ccagcuuaccgccaccguc

SEQ ID NO: 3976753 - RNA, 21 nt, Human herpesvirus 5
ccaggcgcguaaaacucccca

SEQ ID NO: 3976754 - RNA, 15 nt, Human herpesvirus 5
ccaggcucugcgccg

SEQ ID NO: 3976755 - RNA, 15 nt, Human herpesvirus 5
ccaggcuuaacacua

SEQ ID NO: 3976756 - RNA, 19 nt, Human herpesvirus 5
ccagugcgucgcuguugag

SEQ ID NO: 3976757 - RNA, 17 nt, Human herpesvirus 5
ccaguuacacucgcucu

SEQ ID NO: 3976758 - RNA, 20 nt, Human herpesvirus 5
ccaguuggccacgaccacga

SEQ ID NO: 3976759 - RNA, 17 nt, Human herpesvirus 5
ccauacuuaccaccgug

SEQ ID NO: 3976760 - RNA, 18 nt, Human herpesvirus 5
ccauacuuuuacaugaac

SEQ ID NO: 3976761 - RNA, 18 nt, Human herpesvirus 5
ccaucuagacucacuuua

SEQ ID NO: 3976762 - RNA, 12 nt, Human herpesvirus 5
ccaugagccuca

SEQ ID NO: 3976763 - RNA, 19 nt, Human herpesvirus 5
ccaugagguagaagggcug

SEQ ID NO: 3976764 - RNA, 13 nt, Human herpesvirus 5
ccaugcagaccua

SEQ ID NO: 3976765 - RNA, 14 nt, Human herpesvirus 5
ccaugcaucccacc

SEQ ID NO: 3976766 - RNA, 15 nt, Human herpesvirus 5
ccaugccuuccgcgu

SEQ ID NO: 3976767 - RNA, 19 nt, Human herpesvirus 5
ccaugucuccaagucuggu

SEQ ID NO: 3976768 - RNA, 18 nt, Human herpesvirus 5
ccauuuucagcgacgacc

SEQ ID NO: 3976769 - RNA, 18 nt, Human herpesvirus 5
cccacaaaggguaucugg

SEQ ID NO: 3976770 - RNA, 16 nt, Human herpesvirus 5
cccaccccccgggcca

SEQ ID NO: 3976771 - RNA, 15 nt, Human herpesvirus 5
cccaguagacagaca

SEQ ID NO: 3976772 - RNA, 21 nt, Human herpesvirus 5
cccaucgucccccuuucucua

SEQ ID NO: 3976773 - RNA, 22 nt, Human herpesvirus 5
ccccaccuucccucuagagaca

SEQ ID NO: 3976774 - RNA, 22 nt, Human herpesvirus 5
ccccacggcggcggccugcucg

SEQ ID NO: 3976775 - RNA, 17 nt, Human herpesvirus 5
cccccacggaucucgcg

SEQ ID NO: 3976776 - RNA, 18 nt, Human herpesvirus 5
cccccuaccugcgcgaua

SEQ ID NO: 3976777 - RNA, 15 nt, Human herpesvirus 5
ccccgaacuggagcu

SEQ ID NO: 3976778 - RNA, 18 nt, Human herpesvirus 5
ccccgugacgugcaagac

SEQ ID NO: 3976779 - RNA, 12 nt, Human herpesvirus 5
ccccuaccuaga

SEQ ID NO: 3976780 - RNA, 12 nt, Human herpesvirus 5
ccccucugcugc

SEQ ID NO: 3976781 - RNA, 19 nt, Human herpesvirus 5
cccgaggcacgucggggcu

SEQ ID NO: 3976782 - RNA, 22 nt, Human herpesvirus 5
cccgaggucuuuugcacgcgcg

SEQ ID NO: 3976783 - RNA, 18 nt, Human herpesvirus 5
cccgauaaucggcucuca

SEQ ID NO: 3976784 - RNA, 19 nt, Human herpesvirus 5
cccgccaccaugcauccca

SEQ ID NO: 3976785 - RNA, 17 nt, Human herpesvirus 5
cccgccgcacgcgcuua

SEQ ID NO: 3976786 - RNA, 14 nt, Human herpesvirus 5
cccgccguugcggc

SEQ ID NO: 3976787 - RNA, 19 nt, Human herpesvirus 5
cccgccguugcggccgccg

SEQ ID NO: 3976788 - RNA, 13 nt, Human herpesvirus 5
cccgcgucccugg

SEQ ID NO: 3976789 - RNA, 15 nt, Human herpesvirus 5
cccgggccgccgcca

SEQ ID NO: 3976790 - RNA, 17 nt, Human herpesvirus 5
cccgguguuggccacca

SEQ ID NO: 3976791 - RNA, 12 nt, Human herpesvirus 5
cccucaugacgc

SEQ ID NO: 3976792 - RNA, 13 nt, Human herpesvirus 5
cccucgcugggcu

SEQ ID NO: 3976793 - RNA, 13 nt, Human herpesvirus 5
cccucugcugcug

SEQ ID NO: 3976794 - RNA, 15 nt, Human herpesvirus 5
cccucugcugcuggu

SEQ ID NO: 3976795 - RNA, 16 nt, Human herpesvirus 5
cccugacacguaauac

SEQ ID NO: 3976796 - RNA, 22 nt, Human herpesvirus 5
ccgaacgcucgugagcaacagu

SEQ ID NO: 3976797 - RNA, 19 nt, Human herpesvirus 5
ccgaagaccucaccaucuc

SEQ ID NO: 3976798 - RNA, 17 nt, Human herpesvirus 5
ccgacaaccugcugcac

SEQ ID NO: 3976799 - RNA, 17 nt, Human herpesvirus 5
ccgacauucgcgucggc

SEQ ID NO: 3976800 - RNA, 14 nt, Human herpesvirus 5
ccgacgaagaagaa

SEQ ID NO: 3976801 - RNA, 18 nt, Human herpesvirus 5
ccgacgacgacagucucc

SEQ ID NO: 3976802 - RNA, 12 nt, Human herpesvirus 5
ccgacgccgggu

SEQ ID NO: 3976803 - RNA, 20 nt, Human herpesvirus 5
ccgacgcuggcgcugcggcu

SEQ ID NO: 3976804 - RNA, 19 nt, Human herpesvirus 5
ccgacugcagcccaccgcc

SEQ ID NO: 3976805 - RNA, 15 nt, Human herpesvirus 5
ccgagacggaggaau

SEQ ID NO: 3976806 - RNA, 18 nt, Human herpesvirus 5
ccgagcgggaggcgguga

SEQ ID NO: 3976807 - RNA, 14 nt, Human herpesvirus 5
ccgaguaacgcgcc

SEQ ID NO: 3976808 - RNA, 17 nt, Human herpesvirus 5
ccgaguaacgcgccguc

SEQ ID NO: 3976809 - RNA, 22 nt, Human herpesvirus 5
ccgcaacagcggcgacagacgg

SEQ ID NO: 3976810 - RNA, 15 nt, Human herpesvirus 5
ccgcaagcgccgcca

SEQ ID NO: 3976811 - RNA, 17 nt, Human herpesvirus 5
ccgcaaugggcuucccu

SEQ ID NO: 3976812 - RNA, 19 nt, Human herpesvirus 5
ccgcacgaccgcgacgagg

SEQ ID NO: 3976813 - RNA, 20 nt, Human herpesvirus 5
ccgcacgaccgcgacgaggu

SEQ ID NO: 3976814 - RNA, 13 nt, Human herpesvirus 5
ccgcagaaggcca

SEQ ID NO: 3976815 - RNA, 11 nt, Human herpesvirus 5
ccgcagccacg

SEQ ID NO: 3976816 - RNA, 18 nt, Human herpesvirus 5
ccgcagcgaguugcugug

SEQ ID NO: 3976817 - RNA, 14 nt, Human herpesvirus 5
ccgcagcugcugga

SEQ ID NO: 3976818 - RNA, 16 nt, Human herpesvirus 5
ccgcagcugcuggagc

SEQ ID NO: 3976819 - RNA, 18 nt, Human herpesvirus 5
ccgcagcugcuggagcgc

SEQ ID NO: 3976820 - RNA, 22 nt, Human herpesvirus 5
ccgcagcugcuggagcgcggcc

SEQ ID NO: 3976821 - RNA, 18 nt, Human herpesvirus 5
ccgcaggagcugcuuuuc

SEQ ID NO: 3976822 - RNA, 15 nt, Human herpesvirus 5
ccgcagguuagcggc

SEQ ID NO: 3976823 - RNA, 15 nt, Human herpesvirus 5
ccgcaguuacaccac

SEQ ID NO: 3976824 - RNA, 13 nt, Human herpesvirus 5
ccgccacaccugu

SEQ ID NO: 3976825 - RNA, 14 nt, Human herpesvirus 5
ccgccagcggaagc

SEQ ID NO: 3976826 - RNA, 19 nt, Human herpesvirus 5
ccgccccucuuuuccccgu

SEQ ID NO: 3976827 - RNA, 13 nt, Human herpesvirus 5
ccgccgaagccug

SEQ ID NO: 3976828 - RNA, 19 nt, Human herpesvirus 5
ccgccgaagccuggggcac

SEQ ID NO: 3976829 - RNA, 15 nt, Human herpesvirus 5
ccgccggccacgagc

SEQ ID NO: 3976830 - RNA, 17 nt, Human herpesvirus 5
ccgccguugcggccgcc

SEQ ID NO: 3976831 - RNA, 23 nt, Human herpesvirus 5
ccgcgagcggcggacuuggcagc

SEQ ID NO: 3976832 - RNA, 16 nt, Human herpesvirus 5
ccgcguagcgcuccug

SEQ ID NO: 3976833 - RNA, 16 nt, Human herpesvirus 5
ccgcgucgcuucgccg

SEQ ID NO: 3976834 - RNA, 21 nt, Human herpesvirus 5
ccgcguuuggucgccugccua

SEQ ID NO: 3976835 - RNA, 22 nt, Human herpesvirus 5
ccgcugccguacagcgccgccg

SEQ ID NO: 3976836 - RNA, 19 nt, Human herpesvirus 5
ccgcuggacugacacagcu

SEQ ID NO: 3976837 - RNA, 17 nt, Human herpesvirus 5
ccgcuguggcugccgcu

SEQ ID NO: 3976838 - RNA, 20 nt, Human herpesvirus 5
ccgcuuaacaacguguccag

SEQ ID NO: 3976839 - RNA, 16 nt, Human herpesvirus 5
ccgcuugcgcccgaga

SEQ ID NO: 3976840 - RNA, 20 nt, Human herpesvirus 5
ccgcuuucucaucucagccu

SEQ ID NO: 3976841 - RNA, 21 nt, Human herpesvirus 5
ccgcuuucucaucucagccuc

SEQ ID NO: 3976842 - RNA, 16 nt, Human herpesvirus 5
ccgcuuuucagaccgc

SEQ ID NO: 3976843 - RNA, 17 nt, Human herpesvirus 5
ccgcuuuucagaccgca

SEQ ID NO: 3976844 - RNA, 15 nt, Human herpesvirus 5
ccggaaacaccgcga

SEQ ID NO: 3976845 - RNA, 17 nt, Human herpesvirus 5
ccggaacgcuguuacga

SEQ ID NO: 3976846 - RNA, 18 nt, Human herpesvirus 5
ccggaggaagcggcggua

SEQ ID NO: 3976847 - RNA, 12 nt, Human herpesvirus 5
ccggaggagcgu

SEQ ID NO: 3976848 - RNA, 11 nt, Human herpesvirus 5
ccggcagcugc

SEQ ID NO: 3976849 - RNA, 22 nt, Human herpesvirus 5
ccggccccacgcugacaaccca

SEQ ID NO: 3976850 - RNA, 22 nt, Human herpesvirus 5
ccggccgucgcaagggcugcuc

SEQ ID NO: 3976851 - RNA, 18 nt, Human herpesvirus 5
ccggcguggcggccgacg

SEQ ID NO: 3976852 - RNA, 14 nt, Human herpesvirus 5
ccggcuugaccgcg

SEQ ID NO: 3976853 - RNA, 12 nt, Human herpesvirus 5
ccgggaucacga

SEQ ID NO: 3976854 - RNA, 18 nt, Human herpesvirus 5
ccgggccaccagccgcga

SEQ ID NO: 3976855 - RNA, 20 nt, Human herpesvirus 5
ccgguaaaggaacaacccgu

SEQ ID NO: 3976856 - RNA, 18 nt, Human herpesvirus 5
ccggucacuggacucggu

SEQ ID NO: 3976857 - RNA, 16 nt, Human herpesvirus 5
ccggugccgaugagau

SEQ ID NO: 3976858 - RNA, 18 nt, Human herpesvirus 5
ccguacacgcacgcuggu

SEQ ID NO: 3976859 - RNA, 18 nt, Human herpesvirus 5
ccgucacgacgcuccguc

SEQ ID NO: 3976860 - RNA, 17 nt, Human herpesvirus 5
ccgucacugccaccgac

SEQ ID NO: 3976861 - RNA, 12 nt, Human herpesvirus 5
ccgucagccucg

SEQ ID NO: 3976862 - RNA, 22 nt, Human herpesvirus 5
ccgucccucuccucccuccgcg

SEQ ID NO: 3976863 - RNA, 16 nt, Human herpesvirus 5
ccgucgccggccgacg

SEQ ID NO: 3976864 - RNA, 20 nt, Human herpesvirus 5
ccgugauaacggucaagaag

SEQ ID NO: 3976865 - RNA, 23 nt, Human herpesvirus 5
ccgugcccguuuucacagcagcc

SEQ ID NO: 3976866 - RNA, 20 nt, Human herpesvirus 5
ccgugcucuuggcgccgcgg

SEQ ID NO: 3976867 - RNA, 14 nt, Human herpesvirus 5
ccguggccuguggc

SEQ ID NO: 3976868 - RNA, 16 nt, Human herpesvirus 5
ccgugggucccggcgc

SEQ ID NO: 3976869 - RNA, 18 nt, Human herpesvirus 5
ccguguaaaaggcguccu

SEQ ID NO: 3976870 - RNA, 21 nt, Human herpesvirus 5
ccguguauaacuaacgugucc

SEQ ID NO: 3976871 - RNA, 14 nt, Human herpesvirus 5
ccguuuugcugucc

SEQ ID NO: 3976872 - RNA, 15 nt, Human herpesvirus 5
ccguuuugcuguccu

SEQ ID NO: 3976873 - RNA, 15 nt, Human herpesvirus 5
ccuaagacgucgcga

SEQ ID NO: 3976874 - RNA, 18 nt, Human herpesvirus 5
ccuacggaccgcagcacc

SEQ ID NO: 3976875 - RNA, 23 nt, Human herpesvirus 5
ccuaucuccgacagcgcgacgag

SEQ ID NO: 3976876 - RNA, 14 nt, Human herpesvirus 5
ccuauggcgccgug

SEQ ID NO: 3976877 - RNA, 17 nt, Human herpesvirus 5
ccucaaaaagcaggugg

SEQ ID NO: 3976878 - RNA, 16 nt, Human herpesvirus 5
ccucagcgugcucagc

SEQ ID NO: 3976879 - RNA, 14 nt, Human herpesvirus 5
ccucagcuugcccg

SEQ ID NO: 3976880 - RNA, 23 nt, Human herpesvirus 5
ccucauggcggcggccacggccu

SEQ ID NO: 3976881 - RNA, 12 nt, Human herpesvirus 5
ccuccacugcca

SEQ ID NO: 3976882 - RNA, 14 nt, Human herpesvirus 5
ccuccagcagcagc

SEQ ID NO: 3976883 - RNA, 16 nt, Human herpesvirus 5
ccuccgacgacgccga

SEQ ID NO: 3976884 - RNA, 11 nt, Human herpesvirus 5
ccuccgcggcc

SEQ ID NO: 3976885 - RNA, 13 nt, Human herpesvirus 5
ccuccggcuguca

SEQ ID NO: 3976886 - RNA, 15 nt, Human herpesvirus 5
ccucgcccaggcugu

SEQ ID NO: 3976887 - RNA, 13 nt, Human herpesvirus 5
ccucgcgccgccc

SEQ ID NO: 3976888 - RNA, 21 nt, Human herpesvirus 5
ccucgcugggcuacaagugca

SEQ ID NO: 3976889 - RNA, 19 nt, Human herpesvirus 5
ccucgggaggacucagagc

SEQ ID NO: 3976890 - RNA, 17 nt, Human herpesvirus 5
ccucggguugccuggac

SEQ ID NO: 3976891 - RNA, 19 nt, Human herpesvirus 5
ccucgucggccugggcugc

SEQ ID NO: 3976892 - RNA, 15 nt, Human herpesvirus 5
ccucgucgugcccgu

SEQ ID NO: 3976893 - RNA, 17 nt, Human herpesvirus 5
ccucguuguccucuccu

SEQ ID NO: 3976894 - RNA, 18 nt, Human herpesvirus 5
ccucuacacuuggugcuc

SEQ ID NO: 3976895 - RNA, 13 nt, Human herpesvirus 5
ccucugccugggc

SEQ ID NO: 3976896 - RNA, 22 nt, Human herpesvirus 5
ccucuuaacaagccgaccccca

SEQ ID NO: 3976897 - RNA, 22 nt, Human herpesvirus 5
ccucuucuuugccggcucuccu

SEQ ID NO: 3976898 - RNA, 15 nt, Human herpesvirus 5
ccugacccgcggcua

SEQ ID NO: 3976899 - RNA, 15 nt, Human herpesvirus 5
ccugcacgaccugcu

SEQ ID NO: 3976900 - RNA, 20 nt, Human herpesvirus 5
ccugcacguccaugucgcga

SEQ ID NO: 3976901 - RNA, 17 nt, Human herpesvirus 5
ccugcagaccgaggcgc

SEQ ID NO: 3976902 - RNA, 20 nt, Human herpesvirus 5
ccugcagcgcuacgugcgcg

SEQ ID NO: 3976903 - RNA, 18 nt, Human herpesvirus 5
ccugccagucuccgcagu

SEQ ID NO: 3976904 - RNA, 23 nt, Human herpesvirus 5
ccugccgaagaccucaccaucuc

SEQ ID NO: 3976905 - RNA, 17 nt, Human herpesvirus 5
ccugcgacggcgggugg

SEQ ID NO: 3976906 - RNA, 23 nt, Human herpesvirus 5
ccuggacacucuggcccugcugu

SEQ ID NO: 3976907 - RNA, 20 nt, Human herpesvirus 5
ccuggacguaaauccagacc

SEQ ID NO: 3976908 - RNA, 14 nt, Human herpesvirus 5
ccuggccccggcca

SEQ ID NO: 3976909 - RNA, 20 nt, Human herpesvirus 5
ccugggaacgcgcgcacggc

SEQ ID NO: 3976910 - RNA, 16 nt, Human herpesvirus 5
ccugugguagaaugcu

SEQ ID NO: 3976911 - RNA, 14 nt, Human herpesvirus 5
ccuguuccugcugc

SEQ ID NO: 3976912 - RNA, 19 nt, Human herpesvirus 5
ccuguugugucgcacgccc

SEQ ID NO: 3976913 - RNA, 20 nt, Human herpesvirus 5
ccuuagcuuucuugacuggc

SEQ ID NO: 3976914 - RNA, 20 nt, Human herpesvirus 5
ccuucccucuagagacagac

SEQ ID NO: 3976915 - RNA, 15 nt, Human herpesvirus 5
ccuuccuccucugcc

SEQ ID NO: 3976916 - RNA, 21 nt, Human herpesvirus 5
ccuucugcuacgcggcgcccg

SEQ ID NO: 3976917 - RNA, 13 nt, Human herpesvirus 5
ccuugcgcgcggu

SEQ ID NO: 3976918 - RNA, 15 nt, Human herpesvirus 5
ccuuuugcuggcugg

SEQ ID NO: 3976919 - RNA, 13 nt, Human herpesvirus 5
cgaagaagaacaa

SEQ ID NO: 3976920 - RNA, 15 nt, Human herpesvirus 5
cgaauuugggcggug

SEQ ID NO: 3976921 - RNA, 18 nt, Human herpesvirus 5
cgacaucuuccgcgagca

SEQ ID NO: 3976922 - RNA, 14 nt, Human herpesvirus 5
cgaccgucuggagg

SEQ ID NO: 3976923 - RNA, 19 nt, Human herpesvirus 5
cgacgccggguuggcacga

SEQ ID NO: 3976924 - RNA, 12 nt, Human herpesvirus 5
cgacgcgcgacc

SEQ ID NO: 3976925 - RNA, 14 nt, Human herpesvirus 5
cgacgcgcggcggc

SEQ ID NO: 3976926 - RNA, 18 nt, Human herpesvirus 5
cgacggcuccaagaaaaa

SEQ ID NO: 3976927 - RNA, 19 nt, Human herpesvirus 5
cgacgggugguaccugcaa

SEQ ID NO: 3976928 - RNA, 15 nt, Human herpesvirus 5
cgacguaccagcugu

SEQ ID NO: 3976929 - RNA, 19 nt, Human herpesvirus 5
cgacguagguuaccgcgug

SEQ ID NO: 3976930 - RNA, 18 nt, Human herpesvirus 5
cgacucgcugccgcagcu

SEQ ID NO: 3976931 - RNA, 15 nt, Human herpesvirus 5
cgacugcgcggccug

SEQ ID NO: 3976932 - RNA, 16 nt, Human herpesvirus 5
cgacuggcucaacuuu

SEQ ID NO: 3976933 - RNA, 18 nt, Human herpesvirus 5
cgacuuuacggugcgcgg

SEQ ID NO: 3976934 - RNA, 16 nt, Human herpesvirus 5
cgagcauggaucacgc

SEQ ID NO: 3976935 - RNA, 17 nt, Human herpesvirus 5
cgagcguugcgcucgcg

SEQ ID NO: 3976936 - RNA, 12 nt, Human herpesvirus 5
cgagcucagccc

SEQ ID NO: 3976937 - RNA, 17 nt, Human herpesvirus 5
cgagcugaaggacacgg

SEQ ID NO: 3976938 - RNA, 21 nt, Human herpesvirus 5
cgagcuggacaaguacagcgg

SEQ ID NO: 3976939 - RNA, 21 nt, Human herpesvirus 5
cgagcuuauugagcgcagcca

SEQ ID NO: 3976940 - RNA, 16 nt, Human herpesvirus 5
cgaggaggaggggccg

SEQ ID NO: 3976941 - RNA, 13 nt, Human herpesvirus 5
cgagugggccagc

SEQ ID NO: 3976942 - RNA, 20 nt, Human herpesvirus 5
cgaguucggggugcaucauc

SEQ ID NO: 3976943 - RNA, 22 nt, Human herpesvirus 5
cgaguugcaaaagaagcugccc

SEQ ID NO: 3976944 - RNA, 11 nt, Human herpesvirus 5
cgaguuguagu

SEQ ID NO: 3976945 - RNA, 14 nt, Human herpesvirus 5
cgauauaggugaca

SEQ ID NO: 3976946 - RNA, 21 nt, Human herpesvirus 5
cgaucgcgcuuuugaccgcga

SEQ ID NO: 3976947 - RNA, 19 nt, Human herpesvirus 5
cgaucuggaaggcguggau

SEQ ID NO: 3976948 - RNA, 15 nt, Human herpesvirus 5
cgaugaaccuucccc

SEQ ID NO: 3976949 - RNA, 18 nt, Human herpesvirus 5
cgaugguauuacgcccga

SEQ ID NO: 3976950 - RNA, 16 nt, Human herpesvirus 5
cgaugugcagggacag

SEQ ID NO: 3976951 - RNA, 12 nt, Human herpesvirus 5
cgcaagggcugc

SEQ ID NO: 3976952 - RNA, 20 nt, Human herpesvirus 5
cgcaaugggcuucccuccug

SEQ ID NO: 3976953 - RNA, 23 nt, Human herpesvirus 5
cgcaaugggcuucccuccugcag

SEQ ID NO: 3976954 - RNA, 20 nt, Human herpesvirus 5
cgcacaacugguuccugcag

SEQ ID NO: 3976955 - RNA, 18 nt, Human herpesvirus 5
cgcaccgguuggagcagc

SEQ ID NO: 3976956 - RNA, 20 nt, Human herpesvirus 5
cgcacgaccgcgacgagguc

SEQ ID NO: 3976957 - RNA, 23 nt, Human herpesvirus 5
cgcacgagacgcgacuccugcag

SEQ ID NO: 3976958 - RNA, 17 nt, Human herpesvirus 5
cgcagcccggcuccgcg

SEQ ID NO: 3976959 - RNA, 17 nt, Human herpesvirus 5
cgcaggcaagccaaacc

SEQ ID NO: 3976960 - RNA, 21 nt, Human herpesvirus 5
cgcauaagaacggagugguga

SEQ ID NO: 3976961 - RNA, 20 nt, Human herpesvirus 5
cgcaucaucaacagcagcaa

SEQ ID NO: 3976962 - RNA, 13 nt, Human herpesvirus 5
cgcauccugccca

SEQ ID NO: 3976963 - RNA, 15 nt, Human herpesvirus 5
cgcaugggaaaguac

SEQ ID NO: 3976964 - RNA, 15 nt, Human herpesvirus 5
cgccacaacgccguc

SEQ ID NO: 3976965 - RNA, 15 nt, Human herpesvirus 5
cgccaccgauccgca

SEQ ID NO: 3976966 - RNA, 16 nt, Human herpesvirus 5
cgccacuauguccucc

SEQ ID NO: 3976967 - RNA, 22 nt, Human herpesvirus 5
cgccacuauguccuccgcacuu

SEQ ID NO: 3976968 - RNA, 13 nt, Human herpesvirus 5
cgccagcggccug

SEQ ID NO: 3976969 - RNA, 22 nt, Human herpesvirus 5
cgccaugaggcgguggcugcgc

SEQ ID NO: 3976970 - RNA, 14 nt, Human herpesvirus 5
cgcccgagacggcg

SEQ ID NO: 3976971 - RNA, 16 nt, Human herpesvirus 5
cgcccgagacggcggc

SEQ ID NO: 3976972 - RNA, 21 nt, Human herpesvirus 5
cgcccgaggcggaggagccgg

SEQ ID NO: 3976973 - RNA, 20 nt, Human herpesvirus 5
cgcccucagcgugcucagcu

SEQ ID NO: 3976974 - RNA, 22 nt, Human herpesvirus 5
cgccgacgugauccaggaggug

SEQ ID NO: 3976975 - RNA, 20 nt, Human herpesvirus 5
cgccgaugcuccgcgaccgg

SEQ ID NO: 3976976 - RNA, 14 nt, Human herpesvirus 5
cgccgcaacagcgg

SEQ ID NO: 3976977 - RNA, 22 nt, Human herpesvirus 5
cgccgccacccgcaccagacuu

SEQ ID NO: 3976978 - RNA, 15 nt, Human herpesvirus 5
cgccgccagcgcggu

SEQ ID NO: 3976979 - RNA, 22 nt, Human herpesvirus 5
cgccgcucauaaugccgucacc

SEQ ID NO: 3976980 - RNA, 14 nt, Human herpesvirus 5
cgccggaggcugug

SEQ ID NO: 3976981 - RNA, 17 nt, Human herpesvirus 5
cgccggcguugccgcca

SEQ ID NO: 3976982 - RNA, 17 nt, Human herpesvirus 5
cgccgggcggcuuccug

SEQ ID NO: 3976983 - RNA, 13 nt, Human herpesvirus 5
cgccguuugcccg

SEQ ID NO: 3976984 - RNA, 23 nt, Human herpesvirus 5
cgccguuugcccgaagcggcugu

SEQ ID NO: 3976985 - RNA, 14 nt, Human herpesvirus 5
cgccuccgguggug

SEQ ID NO: 3976986 - RNA, 15 nt, Human herpesvirus 5
cgccuccguccucgu

SEQ ID NO: 3976987 - RNA, 15 nt, Human herpesvirus 5
cgccucuucuggccc

SEQ ID NO: 3976988 - RNA, 16 nt, Human herpesvirus 5
cgccugcgacggcggg

SEQ ID NO: 3976989 - RNA, 14 nt, Human herpesvirus 5
cgccugguugcugc

SEQ ID NO: 3976990 - RNA, 23 nt, Human herpesvirus 5
cgcgaaagcuucggccggcugcu

SEQ ID NO: 3976991 - RNA, 12 nt, Human herpesvirus 5
cgcgaacggcga

SEQ ID NO: 3976992 - RNA, 13 nt, Human herpesvirus 5
cgcgacacggugg

SEQ ID NO: 3976993 - RNA, 19 nt, Human herpesvirus 5
cgcgagccccaucgggccc

SEQ ID NO: 3976994 - RNA, 13 nt, Human herpesvirus 5
cgcgagcggcgga

SEQ ID NO: 3976995 - RNA, 17 nt, Human herpesvirus 5
cgcgaguaucgggccgu

SEQ ID NO: 3976996 - RNA, 19 nt, Human herpesvirus 5
cgcgcaagugccugcacga

SEQ ID NO: 3976997 - RNA, 12 nt, Human herpesvirus 5
cgcgcaggcagc

SEQ ID NO: 3976998 - RNA, 22 nt, Human herpesvirus 5
cgcgcaggccgccgccgcucag

SEQ ID NO: 3976999 - RNA, 13 nt, Human herpesvirus 5
cgcgcccacugga

SEQ ID NO: 3977000 - RNA, 14 nt, Human herpesvirus 5
cgcgcccgacagcu

SEQ ID NO: 3977001 - RNA, 23 nt, Human herpesvirus 5
cgcgcccucuucuuugccggcuc

SEQ ID NO: 3977002 - RNA, 14 nt, Human herpesvirus 5
cgcgccuuccuccu

SEQ ID NO: 3977003 - RNA, 22 nt, Human herpesvirus 5
cgcgcgaagguguggcggcagc

SEQ ID NO: 3977004 - RNA, 12 nt, Human herpesvirus 5
cgcgcgcccgcg

SEQ ID NO: 3977005 - RNA, 15 nt, Human herpesvirus 5
cgcgcgcgaaggugu

SEQ ID NO: 3977006 - RNA, 21 nt, Human herpesvirus 5
cgcgcggucauauagccuccg

SEQ ID NO: 3977007 - RNA, 14 nt, Human herpesvirus 5
cgcgcuucuggucg

SEQ ID NO: 3977008 - RNA, 18 nt, Human herpesvirus 5
cgcgcuuugcgccgccgc

SEQ ID NO: 3977009 - RNA, 19 nt, Human herpesvirus 5
cgcgcuuuugaccgcgagc

SEQ ID NO: 3977010 - RNA, 17 nt, Human herpesvirus 5
cgcggacacccgcggcc

SEQ ID NO: 3977011 - RNA, 13 nt, Human herpesvirus 5
cgcggcaccagga

SEQ ID NO: 3977012 - RNA, 17 nt, Human herpesvirus 5
cgcggcgagguggucaa

SEQ ID NO: 3977013 - RNA, 11 nt, Human herpesvirus 5
cgcggcggugg

SEQ ID NO: 3977014 - RNA, 22 nt, Human herpesvirus 5
cgcggucgccgcgucagcggcc

SEQ ID NO: 3977015 - RNA, 23 nt, Human herpesvirus 5
cgcggucgccgcgucagcggccg

SEQ ID NO: 3977016 - RNA, 18 nt, Human herpesvirus 5
cgcguacggacgagugga

SEQ ID NO: 3977017 - RNA, 14 nt, Human herpesvirus 5
cgcguagaaggcaa

SEQ ID NO: 3977018 - RNA, 13 nt, Human herpesvirus 5
cgcguagccaccu

SEQ ID NO: 3977019 - RNA, 15 nt, Human herpesvirus 5
cgcguaggacgacgu

SEQ ID NO: 3977020 - RNA, 16 nt, Human herpesvirus 5
cgcguccagcuucugg

SEQ ID NO: 3977021 - RNA, 18 nt, Human herpesvirus 5
cgcgugccugggaacgcg

SEQ ID NO: 3977022 - RNA, 14 nt, Human herpesvirus 5
cgcgugcuccacca

SEQ ID NO: 3977023 - RNA, 12 nt, Human herpesvirus 5
cgcguggcccug

SEQ ID NO: 3977024 - RNA, 24 nt, Human herpesvirus 5
cgcguguuuugucugagcgccgac

SEQ ID NO: 3977025 - RNA, 16 nt, Human herpesvirus 5
cgcuaggcggcgccgg

SEQ ID NO: 3977026 - RNA, 13 nt, Human herpesvirus 5
cgcuccucgagcc

SEQ ID NO: 3977027 - RNA, 22 nt, Human herpesvirus 5
cgcugauggccuacggcugcau

SEQ ID NO: 3977028 - RNA, 13 nt, Human herpesvirus 5
cgcugccgcagcu

SEQ ID NO: 3977029 - RNA, 17 nt, Human herpesvirus 5
cgcugccgcagcugcug

SEQ ID NO: 3977030 - RNA, 20 nt, Human herpesvirus 5
cgcuggaggacgcgcuggcu

SEQ ID NO: 3977031 - RNA, 14 nt, Human herpesvirus 5
cgcuggcgggccga

SEQ ID NO: 3977032 - RNA, 20 nt, Human herpesvirus 5
cgcuugcgcccgagacggcg

SEQ ID NO: 3977033 - RNA, 18 nt, Human herpesvirus 5
cgcuuuaagcugcucaug

SEQ ID NO: 3977034 - RNA, 11 nt, Human herpesvirus 5
cgcuuucacac

SEQ ID NO: 3977035 - RNA, 21 nt, Human herpesvirus 5
cgcuuuucagaccgcaacaac

SEQ ID NO: 3977036 - RNA, 12 nt, Human herpesvirus 5
cggaaacagcgu

SEQ ID NO: 3977037 - RNA, 14 nt, Human herpesvirus 5
cggaagaagaagaa

SEQ ID NO: 3977038 - RNA, 19 nt, Human herpesvirus 5
cggacacuaggcguccgcg

SEQ ID NO: 3977039 - RNA, 21 nt, Human herpesvirus 5
cggacuuggcagcgggccugu

SEQ ID NO: 3977040 - RNA, 18 nt, Human herpesvirus 5
cggagcacgggcugcugg

SEQ ID NO: 3977041 - RNA, 18 nt, Human herpesvirus 5
cggagcagccgccagcga

SEQ ID NO: 3977042 - RNA, 17 nt, Human herpesvirus 5
cggagccccugcgcgcc

SEQ ID NO: 3977043 - RNA, 21 nt, Human herpesvirus 5
cggaggaggugaccuggcugc

SEQ ID NO: 3977044 - RNA, 22 nt, Human herpesvirus 5
cggaggaggugaccuggcugcu

SEQ ID NO: 3977045 - RNA, 12 nt, Human herpesvirus 5
cggaucgcggua

SEQ ID NO: 3977046 - RNA, 17 nt, Human herpesvirus 5
cggcaacuucuugguga

SEQ ID NO: 3977047 - RNA, 14 nt, Human herpesvirus 5
cggcaagagccgga

SEQ ID NO: 3977048 - RNA, 18 nt, Human herpesvirus 5
cggcaaggcggaggagag

SEQ ID NO: 3977049 - RNA, 21 nt, Human herpesvirus 5
cggcaaucggugcgauauccc

SEQ ID NO: 3977050 - RNA, 21 nt, Human herpesvirus 5
cggcacgccguugccacgagc

SEQ ID NO: 3977051 - RNA, 18 nt, Human herpesvirus 5
cggcagccaccgcgaggc

SEQ ID NO: 3977052 - RNA, 19 nt, Human herpesvirus 5
cggcagcccauccucgugg

SEQ ID NO: 3977053 - RNA, 19 nt, Human herpesvirus 5
cggcagcggaacucgaccu

SEQ ID NO: 3977054 - RNA, 18 nt, Human herpesvirus 5
cggcaggaaggccucguu

SEQ ID NO: 3977055 - RNA, 22 nt, Human herpesvirus 5
cggcauccucgggcuuuccggc

SEQ ID NO: 3977056 - RNA, 20 nt, Human herpesvirus 5
cggccaacaaccacggcgaa

SEQ ID NO: 3977057 - RNA, 22 nt, Human herpesvirus 5
cggccgacggcagcgugcugug

SEQ ID NO: 3977058 - RNA, 14 nt, Human herpesvirus 5
cggccgcagaaggc

SEQ ID NO: 3977059 - RNA, 19 nt, Human herpesvirus 5
cggccgcagugggcccacg

SEQ ID NO: 3977060 - RNA, 15 nt, Human herpesvirus 5
cggccggcugcugca

SEQ ID NO: 3977061 - RNA, 13 nt, Human herpesvirus 5
cggccgugcagca

SEQ ID NO: 3977062 - RNA, 21 nt, Human herpesvirus 5
cggccugggcgcccccacccc

SEQ ID NO: 3977063 - RNA, 12 nt, Human herpesvirus 5
cggccuuucuag

SEQ ID NO: 3977064 - RNA, 18 nt, Human herpesvirus 5
cggcgaauggaucaucug

SEQ ID NO: 3977065 - RNA, 17 nt, Human herpesvirus 5
cggcgacugacgccggc

SEQ ID NO: 3977066 - RNA, 19 nt, Human herpesvirus 5
cggcgcccaaaccgcagga

SEQ ID NO: 3977067 - RNA, 23 nt, Human herpesvirus 5
cggcggacuuggcagcgggccug

SEQ ID NO: 3977068 - RNA, 21 nt, Human herpesvirus 5
cggcgguggagggcgcgcggc

SEQ ID NO: 3977069 - RNA, 22 nt, Human herpesvirus 5
cggcgguggagggcgcgcggca

SEQ ID NO: 3977070 - RNA, 18 nt, Human herpesvirus 5
cggcucaccacgcagcag

SEQ ID NO: 3977071 - RNA, 20 nt, Human herpesvirus 5
cggcucaccacgcagcaggc

SEQ ID NO: 3977072 - RNA, 14 nt, Human herpesvirus 5
cggcucgccgcaga

SEQ ID NO: 3977073 - RNA, 18 nt, Human herpesvirus 5
cggcugacgcggacgagg

SEQ ID NO: 3977074 - RNA, 21 nt, Human herpesvirus 5
cggcugccuguuccugcugcu

SEQ ID NO: 3977075 - RNA, 16 nt, Human herpesvirus 5
cggcuugggcagcagc

SEQ ID NO: 3977076 - RNA, 15 nt, Human herpesvirus 5
cgggaaaccacgccg

SEQ ID NO: 3977077 - RNA, 16 nt, Human herpesvirus 5
cgggaaaccacgccgg

SEQ ID NO: 3977078 - RNA, 19 nt, Human herpesvirus 5
cgggacagcgugccggcga

SEQ ID NO: 3977079 - RNA, 22 nt, Human herpesvirus 5
cgggaggacucagagccacuga

SEQ ID NO: 3977080 - RNA, 16 nt, Human herpesvirus 5
cgggagucuaccuccu

SEQ ID NO: 3977081 - RNA, 13 nt, Human herpesvirus 5
cgggcacugggga

SEQ ID NO: 3977082 - RNA, 14 nt, Human herpesvirus 5
cgggcccugcugac

SEQ ID NO: 3977083 - RNA, 15 nt, Human herpesvirus 5
cgggccgccgccagc

SEQ ID NO: 3977084 - RNA, 21 nt, Human herpesvirus 5
cgggccugguauacgaggcuc

SEQ ID NO: 3977085 - RNA, 20 nt, Human herpesvirus 5
cgggcggcuuccugcggccg

SEQ ID NO: 3977086 - RNA, 15 nt, Human herpesvirus 5
cgggcguuggccugu

SEQ ID NO: 3977087 - RNA, 22 nt, Human herpesvirus 5
cgggcucaccgcaguugcugcc

SEQ ID NO: 3977088 - RNA, 23 nt, Human herpesvirus 5
cgggcucaccgcaguugcugccu

SEQ ID NO: 3977089 - RNA, 19 nt, Human herpesvirus 5
cgggcucguguggcagcug

SEQ ID NO: 3977090 - RNA, 18 nt, Human herpesvirus 5
cgggcucugggaagcugc

SEQ ID NO: 3977091 - RNA, 21 nt, Human herpesvirus 5
cggggcgugccgagcugccuu

SEQ ID NO: 3977092 - RNA, 18 nt, Human herpesvirus 5
cggguccauuggagccgc

SEQ ID NO: 3977093 - RNA, 18 nt, Human herpesvirus 5
cgggucucuuugacacga

SEQ ID NO: 3977094 - RNA, 14 nt, Human herpesvirus 5
cgggugacggcgac

SEQ ID NO: 3977095 - RNA, 13 nt, Human herpesvirus 5
cggguugcagcuu

SEQ ID NO: 3977096 - RNA, 16 nt, Human herpesvirus 5
cgguaccauuucuugg

SEQ ID NO: 3977097 - RNA, 22 nt, Human herpesvirus 5
cgguacgcagucacugcguguc

SEQ ID NO: 3977098 - RNA, 19 nt, Human herpesvirus 5
cggucccccccguccaggu

SEQ ID NO: 3977099 - RNA, 15 nt, Human herpesvirus 5
cggucgcgacgguga

SEQ ID NO: 3977100 - RNA, 19 nt, Human herpesvirus 5
cggucguaagcggcagcau

SEQ ID NO: 3977101 - RNA, 18 nt, Human herpesvirus 5
cgguggaauucgcugggc

SEQ ID NO: 3977102 - RNA, 18 nt, Human herpesvirus 5
cgguggucgaugcugauc

SEQ ID NO: 3977103 - RNA, 22 nt, Human herpesvirus 5
cgguggucgaugcugaucacgu

SEQ ID NO: 3977104 - RNA, 14 nt, Human herpesvirus 5
cgguggugacuggg

SEQ ID NO: 3977105 - RNA, 17 nt, Human herpesvirus 5
cggugguuucgcuggga

SEQ ID NO: 3977106 - RNA, 22 nt, Human herpesvirus 5
cggugucuccucgcgaggcuga

SEQ ID NO: 3977107 - RNA, 17 nt, Human herpesvirus 5
cgguguuucggcucccg

SEQ ID NO: 3977108 - RNA, 14 nt, Human herpesvirus 5
cgguuugaccacac

SEQ ID NO: 3977109 - RNA, 23 nt, Human herpesvirus 5
cguacgcgagaccugaaaguuua

SEQ ID NO: 3977110 - RNA, 15 nt, Human herpesvirus 5
cguauacgcgcugga

SEQ ID NO: 3977111 - RNA, 16 nt, Human herpesvirus 5
cgucacaauugacgug

SEQ ID NO: 3977112 - RNA, 17 nt, Human herpesvirus 5
cgucacuacucugggau

SEQ ID NO: 3977113 - RNA, 16 nt, Human herpesvirus 5
cgucacuucaaccacg

SEQ ID NO: 3977114 - RNA, 21 nt, Human herpesvirus 5
cgucagccucgggugcaccgc

SEQ ID NO: 3977115 - RNA, 20 nt, Human herpesvirus 5
cgucaucucgccgacguggu

SEQ ID NO: 3977116 - RNA, 21 nt, Human herpesvirus 5
cgucaugccuuggcgcucugg

SEQ ID NO: 3977117 - RNA, 22 nt, Human herpesvirus 5
cgucgaccuugagcgacagcag

SEQ ID NO: 3977118 - RNA, 13 nt, Human herpesvirus 5
cgucgacggugaa

SEQ ID NO: 3977119 - RNA, 14 nt, Human herpesvirus 5
cgucgagcggcgug

SEQ ID NO: 3977120 - RNA, 14 nt, Human herpesvirus 5
cgucggccaacaac

SEQ ID NO: 3977121 - RNA, 16 nt, Human herpesvirus 5
cgucggcggggcggac

SEQ ID NO: 3977122 - RNA, 18 nt, Human herpesvirus 5
cgucggcgguccuccagc

SEQ ID NO: 3977123 - RNA, 23 nt, Human herpesvirus 5
cgucggcugccuguuccugcugc

SEQ ID NO: 3977124 - RNA, 11 nt, Human herpesvirus 5
cgucgguggaa

SEQ ID NO: 3977125 - RNA, 15 nt, Human herpesvirus 5
cgucugacgcugucu

SEQ ID NO: 3977126 - RNA, 14 nt, Human herpesvirus 5
cgugaaacagcagc

SEQ ID NO: 3977127 - RNA, 13 nt, Human herpesvirus 5
cgugacacuuugg

SEQ ID NO: 3977128 - RNA, 14 nt, Human herpesvirus 5
cgugacgcagucug

SEQ ID NO: 3977129 - RNA, 14 nt, Human herpesvirus 5
cgugauaggcggcg

SEQ ID NO: 3977130 - RNA, 12 nt, Human herpesvirus 5
cgugccaccugc

SEQ ID NO: 3977131 - RNA, 20 nt, Human herpesvirus 5
cgugccaucaaucgcguccg

SEQ ID NO: 3977132 - RNA, 21 nt, Human herpesvirus 5
cgugcgauuuggaccuggagg

SEQ ID NO: 3977133 - RNA, 16 nt, Human herpesvirus 5
cgugcgcacgccgcgc

SEQ ID NO: 3977134 - RNA, 18 nt, Human herpesvirus 5
cgugcugauucgcgccgu

SEQ ID NO: 3977135 - RNA, 22 nt, Human herpesvirus 5
cgugcugauucgcgccgugcgc

SEQ ID NO: 3977136 - RNA, 18 nt, Human herpesvirus 5
cguggaccucacguugaa

SEQ ID NO: 3977137 - RNA, 13 nt, Human herpesvirus 5
cguggagaccacc

SEQ ID NO: 3977138 - RNA, 15 nt, Human herpesvirus 5
cguggccuguggccc

SEQ ID NO: 3977139 - RNA, 12 nt, Human herpesvirus 5
cguggcgcacac

SEQ ID NO: 3977140 - RNA, 15 nt, Human herpesvirus 5
cguggcgcgggcacg

SEQ ID NO: 3977141 - RNA, 16 nt, Human herpesvirus 5
cgugggcuacuuugac

SEQ ID NO: 3977142 - RNA, 13 nt, Human herpesvirus 5
cguggugcgcugc

SEQ ID NO: 3977143 - RNA, 16 nt, Human herpesvirus 5
cgugucgggaaaggag

SEQ ID NO: 3977144 - RNA, 15 nt, Human herpesvirus 5
cgugucugauaccgg

SEQ ID NO: 3977145 - RNA, 19 nt, Human herpesvirus 5
cgugucugggccacaggga

SEQ ID NO: 3977146 - RNA, 18 nt, Human herpesvirus 5
cgugugguagaagagcac

SEQ ID NO: 3977147 - RNA, 14 nt, Human herpesvirus 5
cguguuaucacaga

SEQ ID NO: 3977148 - RNA, 15 nt, Human herpesvirus 5
cguuacgccgacgug

SEQ ID NO: 3977149 - RNA, 21 nt, Human herpesvirus 5
cguuagagaaagagcagcgcg

SEQ ID NO: 3977150 - RNA, 18 nt, Human herpesvirus 5
cguucgcgugcacgcgcc

SEQ ID NO: 3977151 - RNA, 16 nt, Human herpesvirus 5
cguugcuuuggcggca

SEQ ID NO: 3977152 - RNA, 21 nt, Human herpesvirus 5
cguuggacgcuuaucgggcgc

SEQ ID NO: 3977153 - RNA, 18 nt, Human herpesvirus 5
cguuggcucucgcagccc

SEQ ID NO: 3977154 - RNA, 16 nt, Human herpesvirus 5
cguugggucugcgcug

SEQ ID NO: 3977155 - RNA, 20 nt, Human herpesvirus 5
cguuguuucuguacggcguu

SEQ ID NO: 3977156 - RNA, 19 nt, Human herpesvirus 5
cuaaaacgguacgggcccc

SEQ ID NO: 3977157 - RNA, 16 nt, Human herpesvirus 5
cuaacuagccuucccg

SEQ ID NO: 3977158 - RNA, 16 nt, Human herpesvirus 5
cuaacucgcguuuaua

SEQ ID NO: 3977159 - RNA, 21 nt, Human herpesvirus 5
cuaagagauccugggacacca

SEQ ID NO: 3977160 - RNA, 13 nt, Human herpesvirus 5
cuacacuauguuc

SEQ ID NO: 3977161 - RNA, 16 nt, Human herpesvirus 5
cuacgccggggaagcc

SEQ ID NO: 3977162 - RNA, 22 nt, Human herpesvirus 5
cuacgccggggaagccuccgga

SEQ ID NO: 3977163 - RNA, 19 nt, Human herpesvirus 5
cuacgcgugcacgcgcugc

SEQ ID NO: 3977164 - RNA, 15 nt, Human herpesvirus 5
cuacgugcaacgcca

SEQ ID NO: 3977165 - RNA, 19 nt, Human herpesvirus 5
cuacgugcgcgccacggcg

SEQ ID NO: 3977166 - RNA, 22 nt, Human herpesvirus 5
cuacucacguugguguuguagc

SEQ ID NO: 3977167 - RNA, 21 nt, Human herpesvirus 5
cuacuucacgugcggcugugu

SEQ ID NO: 3977168 - RNA, 14 nt, Human herpesvirus 5
cuagacgaaauuca

SEQ ID NO: 3977169 - RNA, 15 nt, Human herpesvirus 5
cuagcauucugguga

SEQ ID NO: 3977170 - RNA, 20 nt, Human herpesvirus 5
cuagccuuucugaccuugcu

SEQ ID NO: 3977171 - RNA, 20 nt, Human herpesvirus 5
cuagcuggcggccucuuuug

SEQ ID NO: 3977172 - RNA, 19 nt, Human herpesvirus 5
cuaguuagauuuccugugu

SEQ ID NO: 3977173 - RNA, 20 nt, Human herpesvirus 5
cuaucaccaaacaacaccac

SEQ ID NO: 3977174 - RNA, 14 nt, Human herpesvirus 5
cuaugagggccugc

SEQ ID NO: 3977175 - RNA, 15 nt, Human herpesvirus 5
cuaugauccuguggu

SEQ ID NO: 3977176 - RNA, 13 nt, Human herpesvirus 5
cuauguggcuccg

SEQ ID NO: 3977177 - RNA, 15 nt, Human herpesvirus 5
cuauguggcuccgcc

SEQ ID NO: 3977178 - RNA, 17 nt, Human herpesvirus 5
cuauguggcuccgccgg

SEQ ID NO: 3977179 - RNA, 17 nt, Human herpesvirus 5
cuauugccacacgcgcu

SEQ ID NO: 3977180 - RNA, 20 nt, Human herpesvirus 5
cucaacgacuuucuggagca

SEQ ID NO: 3977181 - RNA, 21 nt, Human herpesvirus 5
cucaccccgcgcgacguagaa

SEQ ID NO: 3977182 - RNA, 11 nt, Human herpesvirus 5
cucagagccac

SEQ ID NO: 3977183 - RNA, 20 nt, Human herpesvirus 5
cucagcgacgucccgcgcgg

SEQ ID NO: 3977184 - RNA, 17 nt, Human herpesvirus 5
cucagcggcguguacag

SEQ ID NO: 3977185 - RNA, 18 nt, Human herpesvirus 5
cucagcggcguguacagc

SEQ ID NO: 3977186 - RNA, 23 nt, Human herpesvirus 5
cucagcggcguguacagcuaccu

SEQ ID NO: 3977187 - RNA, 16 nt, Human herpesvirus 5
cucagcuugauggugu

SEQ ID NO: 3977188 - RNA, 14 nt, Human herpesvirus 5
cucaggcgcgcaga

SEQ ID NO: 3977189 - RNA, 23 nt, Human herpesvirus 5
cucagggcugggauccgccgcca

SEQ ID NO: 3977190 - RNA, 20 nt, Human herpesvirus 5
cucagucaccgaguccauca

SEQ ID NO: 3977191 - RNA, 17 nt, Human herpesvirus 5
cucagugaauucuggca

SEQ ID NO: 3977192 - RNA, 16 nt, Human herpesvirus 5
cucaucucagccucgu

SEQ ID NO: 3977193 - RNA, 12 nt, Human herpesvirus 5
cuccacaaccug

SEQ ID NO: 3977194 - RNA, 15 nt, Human herpesvirus 5
cuccacgucuucaaa

SEQ ID NO: 3977195 - RNA, 16 nt, Human herpesvirus 5
cuccagcagcagcugg

SEQ ID NO: 3977196 - RNA, 15 nt, Human herpesvirus 5
cuccaucaugaagga

SEQ ID NO: 3977197 - RNA, 22 nt, Human herpesvirus 5
cuccaucgcagccacgcgcugg

SEQ ID NO: 3977198 - RNA, 18 nt, Human herpesvirus 5
cucccgacaggcucgucg

SEQ ID NO: 3977199 - RNA, 22 nt, Human herpesvirus 5
cuccgcaguuacaccacacguc

SEQ ID NO: 3977200 - RNA, 15 nt, Human herpesvirus 5
cuccgcuugcugcga

SEQ ID NO: 3977201 - RNA, 13 nt, Human herpesvirus 5
cuccggcugucau

SEQ ID NO: 3977202 - RNA, 14 nt, Human herpesvirus 5
cuccgucaauaaaa

SEQ ID NO: 3977203 - RNA, 14 nt, Human herpesvirus 5
cuccgucacgccuc

SEQ ID NO: 3977204 - RNA, 15 nt, Human herpesvirus 5
cuccgucacgccucu

SEQ ID NO: 3977205 - RNA, 14 nt, Human herpesvirus 5
cuccguccucgucg

SEQ ID NO: 3977206 - RNA, 22 nt, Human herpesvirus 5
cuccgucguuaucuucccugag

SEQ ID NO: 3977207 - RNA, 12 nt, Human herpesvirus 5
cuccgucucugg

SEQ ID NO: 3977208 - RNA, 16 nt, Human herpesvirus 5
cuccgugcggccccca

SEQ ID NO: 3977209 - RNA, 17 nt, Human herpesvirus 5
cuccuccgagccaaaag

SEQ ID NO: 3977210 - RNA, 20 nt, Human herpesvirus 5
cuccucgacgcgcggcggcg

SEQ ID NO: 3977211 - RNA, 14 nt, Human herpesvirus 5
cuccucguccucgu

SEQ ID NO: 3977212 - RNA, 15 nt, Human herpesvirus 5
cuccucugccugggc

SEQ ID NO: 3977213 - RNA, 16 nt, Human herpesvirus 5
cuccucugccugggca

SEQ ID NO: 3977214 - RNA, 14 nt, Human herpesvirus 5
cuccugcagcugca

SEQ ID NO: 3977215 - RNA, 19 nt, Human herpesvirus 5
cucgaccgcuggaggccuc

SEQ ID NO: 3977216 - RNA, 16 nt, Human herpesvirus 5
cucgaccggcggcugc

SEQ ID NO: 3977217 - RNA, 20 nt, Human herpesvirus 5
cucgaccggcggcugcuguu

SEQ ID NO: 3977218 - RNA, 19 nt, Human herpesvirus 5
cucgagcuuauugagcgca

SEQ ID NO: 3977219 - RNA, 15 nt, Human herpesvirus 5
cucgaggaggggccg

SEQ ID NO: 3977220 - RNA, 22 nt, Human herpesvirus 5
cucgagggcuccgucugcguca

SEQ ID NO: 3977221 - RNA, 14 nt, Human herpesvirus 5
cucgcgcccgcaga

SEQ ID NO: 3977222 - RNA, 21 nt, Human herpesvirus 5
cucgcugccgcagcugcugga

SEQ ID NO: 3977223 - RNA, 12 nt, Human herpesvirus 5
cucgcuggaagc

SEQ ID NO: 3977224 - RNA, 19 nt, Human herpesvirus 5
cucgcuuacgucuacagca

SEQ ID NO: 3977225 - RNA, 22 nt, Human herpesvirus 5
cucgcuuacgucuacagcaugg

SEQ ID NO: 3977226 - RNA, 15 nt, Human herpesvirus 5
cucggaucugcggcu

SEQ ID NO: 3977227 - RNA, 21 nt, Human herpesvirus 5
cucggccuugcgcucccugcu

SEQ ID NO: 3977228 - RNA, 19 nt, Human herpesvirus 5
cucgggaggacucagagcc

SEQ ID NO: 3977229 - RNA, 16 nt, Human herpesvirus 5
cucgggcuggcgugcu

SEQ ID NO: 3977230 - RNA, 16 nt, Human herpesvirus 5
cucgggugcaccgcgg

SEQ ID NO: 3977231 - RNA, 15 nt, Human herpesvirus 5
cucggguugccugga

SEQ ID NO: 3977232 - RNA, 17 nt, Human herpesvirus 5
cucggugugcgacgcca

SEQ ID NO: 3977233 - RNA, 19 nt, Human herpesvirus 5
cucgucaaucuugcguugc

SEQ ID NO: 3977234 - RNA, 21 nt, Human herpesvirus 5
cucgucgccagcgcgagcgcu

SEQ ID NO: 3977235 - RNA, 20 nt, Human herpesvirus 5
cucgucgcucuaucugcgcg

SEQ ID NO: 3977236 - RNA, 20 nt, Human herpesvirus 5
cucgucggugagacgaggcc

SEQ ID NO: 3977237 - RNA, 18 nt, Human herpesvirus 5
cucgucugagccggggug

SEQ ID NO: 3977238 - RNA, 20 nt, Human herpesvirus 5
cucguuucgccggcgcgcca

SEQ ID NO: 3977239 - RNA, 19 nt, Human herpesvirus 5
cucucgagugcggucggug

SEQ ID NO: 3977240 - RNA, 12 nt, Human herpesvirus 5
cucucgggccga

SEQ ID NO: 3977241 - RNA, 22 nt, Human herpesvirus 5
cucucugugagcuuuuuucccc

SEQ ID NO: 3977242 - RNA, 14 nt, Human herpesvirus 5
cucugccugggcac

SEQ ID NO: 3977243 - RNA, 21 nt, Human herpesvirus 5
cucuggaugguacgucucuac

SEQ ID NO: 3977244 - RNA, 17 nt, Human herpesvirus 5
cucuggcccugcuguac

SEQ ID NO: 3977245 - RNA, 17 nt, Human herpesvirus 5
cucugucggcgccgccg

SEQ ID NO: 3977246 - RNA, 16 nt, Human herpesvirus 5
cucuuccaaaucuccg

SEQ ID NO: 3977247 - RNA, 13 nt, Human herpesvirus 5
cucuugcgcccuc

SEQ ID NO: 3977248 - RNA, 13 nt, Human herpesvirus 5
cugaacaauaaac

SEQ ID NO: 3977249 - RNA, 14 nt, Human herpesvirus 5
cugaacaauaaacu

SEQ ID NO: 3977250 - RNA, 14 nt, Human herpesvirus 5
cugaaggacacggu

SEQ ID NO: 3977251 - RNA, 22 nt, Human herpesvirus 5
cugaaugacguuaucauaaacu

SEQ ID NO: 3977252 - RNA, 14 nt, Human herpesvirus 5
cugacacagcuccu

SEQ ID NO: 3977253 - RNA, 20 nt, Human herpesvirus 5
cugacccuccccccaucccg

SEQ ID NO: 3977254 - RNA, 19 nt, Human herpesvirus 5
cugacgcuguacaaucuca

SEQ ID NO: 3977255 - RNA, 15 nt, Human herpesvirus 5
cugacgugaggcgcu

SEQ ID NO: 3977256 - RNA, 19 nt, Human herpesvirus 5
cugagaaccuacgugcaac

SEQ ID NO: 3977257 - RNA, 15 nt, Human herpesvirus 5
cugagacagccacau

SEQ ID NO: 3977258 - RNA, 18 nt, Human herpesvirus 5
cugagacugguggugaga

SEQ ID NO: 3977259 - RNA, 17 nt, Human herpesvirus 5
cugagcgcgcucagcua

SEQ ID NO: 3977260 - RNA, 17 nt, Human herpesvirus 5
cugaggaaggggaggag

SEQ ID NO: 3977261 - RNA, 17 nt, Human herpesvirus 5
cugaguuccgucagcac

SEQ ID NO: 3977262 - RNA, 17 nt, Human herpesvirus 5
cugauccaguugcaccu

SEQ ID NO: 3977263 - RNA, 23 nt, Human herpesvirus 5
cugauggccgacgaggccggcgg

SEQ ID NO: 3977264 - RNA, 23 nt, Human herpesvirus 5
cugauuaaccauaucgugaacca

SEQ ID NO: 3977265 - RNA, 18 nt, Human herpesvirus 5
cugcaacugcaccagcaa

SEQ ID NO: 3977266 - RNA, 18 nt, Human herpesvirus 5
cugcaccucgugcgagga

SEQ ID NO: 3977267 - RNA, 23 nt, Human herpesvirus 5
cugcagcacgcgauuggccagca

SEQ ID NO: 3977268 - RNA, 14 nt, Human herpesvirus 5
cugcagcugcacca

SEQ ID NO: 3977269 - RNA, 20 nt, Human herpesvirus 5
cugccucagucucucggugc

SEQ ID NO: 3977270 - RNA, 23 nt, Human herpesvirus 5
cugccucagucucucggugcgug

SEQ ID NO: 3977271 - RNA, 20 nt, Human herpesvirus 5
cugccugguuaguucgccgu

SEQ ID NO: 3977272 - RNA, 17 nt, Human herpesvirus 5
cugcgcaggccgccgcu

SEQ ID NO: 3977273 - RNA, 13 nt, Human herpesvirus 5
cugcgcgacacgg

SEQ ID NO: 3977274 - RNA, 22 nt, Human herpesvirus 5
cugcgcgccuccguccucgucg

SEQ ID NO: 3977275 - RNA, 13 nt, Human herpesvirus 5
cugcggcgacugg

SEQ ID NO: 3977276 - RNA, 22 nt, Human herpesvirus 5
cugcggcggcgcgaccuucccu

SEQ ID NO: 3977277 - RNA, 15 nt, Human herpesvirus 5
cugcguaagcaccgu

SEQ ID NO: 3977278 - RNA, 18 nt, Human herpesvirus 5
cugcguucacgaggacca

SEQ ID NO: 3977279 - RNA, 18 nt, Human herpesvirus 5
cugcguucuguggugcgu

SEQ ID NO: 3977280 - RNA, 19 nt, Human herpesvirus 5
cugcuauaagaaggccaug

SEQ ID NO: 3977281 - RNA, 15 nt, Human herpesvirus 5
cugcugcccacggaa

SEQ ID NO: 3977282 - RNA, 20 nt, Human herpesvirus 5
cugcugugguguugccuucu

SEQ ID NO: 3977283 - RNA, 17 nt, Human herpesvirus 5
cuggacccacaagcgcc

SEQ ID NO: 3977284 - RNA, 13 nt, Human herpesvirus 5
cuggauacaagcu

SEQ ID NO: 3977285 - RNA, 16 nt, Human herpesvirus 5
cuggcaacgugccacg

SEQ ID NO: 3977286 - RNA, 17 nt, Human herpesvirus 5
cuggcaauuacgugggu

SEQ ID NO: 3977287 - RNA, 12 nt, Human herpesvirus 5
cuggcagagcca

SEQ ID NO: 3977288 - RNA, 16 nt, Human herpesvirus 5
cuggcccaaagaccgc

SEQ ID NO: 3977289 - RNA, 15 nt, Human herpesvirus 5
cuggccgagacggcg

SEQ ID NO: 3977290 - RNA, 19 nt, Human herpesvirus 5
cuggcgacccgcagucugg

SEQ ID NO: 3977291 - RNA, 21 nt, Human herpesvirus 5
cugggagagccgcacagacca

SEQ ID NO: 3977292 - RNA, 21 nt, Human herpesvirus 5
cugggagugguggcggcagcc

SEQ ID NO: 3977293 - RNA, 19 nt, Human herpesvirus 5
cugggauaccgcccgcaug

SEQ ID NO: 3977294 - RNA, 16 nt, Human herpesvirus 5
cugggcgcccccaccc

SEQ ID NO: 3977295 - RNA, 18 nt, Human herpesvirus 5
cugggcgcccccaccccc

SEQ ID NO: 3977296 - RNA, 14 nt, Human herpesvirus 5
cugggcugggugca

SEQ ID NO: 3977297 - RNA, 14 nt, Human herpesvirus 5
cuggggcugcugcu

SEQ ID NO: 3977298 - RNA, 19 nt, Human herpesvirus 5
cuggggcugcugcugcacg

SEQ ID NO: 3977299 - RNA, 14 nt, Human herpesvirus 5
cuggguauccccga

SEQ ID NO: 3977300 - RNA, 12 nt, Human herpesvirus 5
cugggugcaaug

SEQ ID NO: 3977301 - RNA, 22 nt, Human herpesvirus 5
cugguagcgcuugcggcacagc

SEQ ID NO: 3977302 - RNA, 14 nt, Human herpesvirus 5
cugguauaaccagu

SEQ ID NO: 3977303 - RNA, 24 nt, Human herpesvirus 5
cuguaguacuaccguuaacuauuc

SEQ ID NO: 3977304 - RNA, 14 nt, Human herpesvirus 5
cuguauuauauaca

SEQ ID NO: 3977305 - RNA, 24 nt, Human herpesvirus 5
cugucagcgccgggugcgcgacac

SEQ ID NO: 3977306 - RNA, 17 nt, Human herpesvirus 5
cugucaucacgguacac

SEQ ID NO: 3977307 - RNA, 23 nt, Human herpesvirus 5
cugucguguuccagaccagcgcc

SEQ ID NO: 3977308 - RNA, 20 nt, Human herpesvirus 5
cugucuaacuagccuucccg

SEQ ID NO: 3977309 - RNA, 17 nt, Human herpesvirus 5
cugucuugcuuaaugau

SEQ ID NO: 3977310 - RNA, 15 nt, Human herpesvirus 5
cugugaucugcacgu

SEQ ID NO: 3977311 - RNA, 23 nt, Human herpesvirus 5
cuguggcaccgccuccgaacgcu

SEQ ID NO: 3977312 - RNA, 13 nt, Human herpesvirus 5
cugugggcccacu

SEQ ID NO: 3977313 - RNA, 19 nt, Human herpesvirus 5
cugugucgcaugagaucca

SEQ ID NO: 3977314 - RNA, 21 nt, Human herpesvirus 5
cuguuaacccccgacgagcag

SEQ ID NO: 3977315 - RNA, 16 nt, Human herpesvirus 5
cuguuacgagaagaaa

SEQ ID NO: 3977316 - RNA, 20 nt, Human herpesvirus 5
cuguuagaaccgcgggccgc

SEQ ID NO: 3977317 - RNA, 14 nt, Human herpesvirus 5
cuguuccugcugcu

SEQ ID NO: 3977318 - RNA, 15 nt, Human herpesvirus 5
cuguugaccugggua

SEQ ID NO: 3977319 - RNA, 14 nt, Human herpesvirus 5
cuguugcucuaccg

SEQ ID NO: 3977320 - RNA, 17 nt, Human herpesvirus 5
cuguuggcuuacugccu

SEQ ID NO: 3977321 - RNA, 23 nt, Human herpesvirus 5
cuuagacauuccccaccuucccu

SEQ ID NO: 3977322 - RNA, 15 nt, Human herpesvirus 5
cuucaaccacgagua

SEQ ID NO: 3977323 - RNA, 19 nt, Human herpesvirus 5
cuucaucuuucagcuggcu

SEQ ID NO: 3977324 - RNA, 21 nt, Human herpesvirus 5
cuucauggcuuggcgcagcgg

SEQ ID NO: 3977325 - RNA, 20 nt, Human herpesvirus 5
cuuccauaauaaaaguaaaa

SEQ ID NO: 3977326 - RNA, 21 nt, Human herpesvirus 5
cuuccuagcgacggcggccau

SEQ ID NO: 3977327 - RNA, 18 nt, Human herpesvirus 5
cuucggucucgggcucgc

SEQ ID NO: 3977328 - RNA, 17 nt, Human herpesvirus 5
cuucucgaucuuuugga

SEQ ID NO: 3977329 - RNA, 12 nt, Human herpesvirus 5
cuugcccggcgu

SEQ ID NO: 3977330 - RNA, 16 nt, Human herpesvirus 5
cuugcgcucggucagc

SEQ ID NO: 3977331 - RNA, 16 nt, Human herpesvirus 5
cuugggcagcagcggc

SEQ ID NO: 3977332 - RNA, 19 nt, Human herpesvirus 5
cuugguacgcugacguggu

SEQ ID NO: 3977333 - RNA, 22 nt, Human herpesvirus 5
cuugucgucauucgggccagga

SEQ ID NO: 3977334 - RNA, 20 nt, Human herpesvirus 5
cuuuagccaggugaccagca

SEQ ID NO: 3977335 - RNA, 15 nt, Human herpesvirus 5
cuuuauuugcaucau

SEQ ID NO: 3977336 - RNA, 15 nt, Human herpesvirus 5
cuuucuggagcagga

SEQ ID NO: 3977337 - RNA, 19 nt, Human herpesvirus 5
cuuugacgugcucaagagg

SEQ ID NO: 3977338 - RNA, 17 nt, Human herpesvirus 5
cuuugcuuaucugccuc

SEQ ID NO: 3977339 - RNA, 18 nt, Human herpesvirus 5
cuuugcuuaucugccucu

SEQ ID NO: 3977340 - RNA, 17 nt, Human herpesvirus 5
cuuuggcgugcccagcc

SEQ ID NO: 3977341 - RNA, 17 nt, Human herpesvirus 5
cuuuggcuacgguggug

SEQ ID NO: 3977342 - RNA, 19 nt, Human herpesvirus 5
cuuuuacaugaacaaaaaa

SEQ ID NO: 3977343 - RNA, 23 nt, Human herpesvirus 5
cuuuugcgucgcccucgacggcg

SEQ ID NO: 3977344 - RNA, 13 nt, Human herpesvirus 5
gaaaaagaaaccc

SEQ ID NO: 3977345 - RNA, 14 nt, Human herpesvirus 5
gaaaacuuguuuua

SEQ ID NO: 3977346 - RNA, 13 nt, Human herpesvirus 5
gaaaaguggcaga

SEQ ID NO: 3977347 - RNA, 16 nt, Human herpesvirus 5
gaaacacgguuucuuc

SEQ ID NO: 3977348 - RNA, 23 nt, Human herpesvirus 5
gaaaccguacuaagucucccgug

SEQ ID NO: 3977349 - RNA, 22 nt, Human herpesvirus 5
gaaagaggacguucgcucgggc

SEQ ID NO: 3977350 - RNA, 18 nt, Human herpesvirus 5
gaaagcucuacgagcugg

SEQ ID NO: 3977351 - RNA, 23 nt, Human herpesvirus 5
gaaagcuucggccggcugcugca

SEQ ID NO: 3977352 - RNA, 20 nt, Human herpesvirus 5
gaaagugauuauaucuuucu

SEQ ID NO: 3977353 - RNA, 17 nt, Human herpesvirus 5
gaaaguuggcugcgccc

SEQ ID NO: 3977354 - RNA, 15 nt, Human herpesvirus 5
gaaauccggcggcgc

SEQ ID NO: 3977355 - RNA, 19 nt, Human herpesvirus 5
gaacaaauucagcaacacu

SEQ ID NO: 3977356 - RNA, 15 nt, Human herpesvirus 5
gaacccaucgaggag

SEQ ID NO: 3977357 - RNA, 16 nt, Human herpesvirus 5
gaaccccguggaucag

SEQ ID NO: 3977358 - RNA, 22 nt, Human herpesvirus 5
gaacugucgucgccggaaggaa

SEQ ID NO: 3977359 - RNA, 23 nt, Human herpesvirus 5
gaagaccaugacgacggugacga

SEQ ID NO: 3977360 - RNA, 13 nt, Human herpesvirus 5
gaagacggagcuc

SEQ ID NO: 3977361 - RNA, 17 nt, Human herpesvirus 5
gaagccgccagcggaag

SEQ ID NO: 3977362 - RNA, 18 nt, Human herpesvirus 5
gaagcgcugauguaccug

SEQ ID NO: 3977363 - RNA, 14 nt, Human herpesvirus 5
gaagcuguuuuguu

SEQ ID NO: 3977364 - RNA, 14 nt, Human herpesvirus 5
gaaggaacgcacgc

SEQ ID NO: 3977365 - RNA, 14 nt, Human herpesvirus 5
gaaggcaaagaaaa

SEQ ID NO: 3977366 - RNA, 19 nt, Human herpesvirus 5
gaagggcgcgggcggccag

SEQ ID NO: 3977367 - RNA, 21 nt, Human herpesvirus 5
gaagucgaacuauaccgggcg

SEQ ID NO: 3977368 - RNA, 15 nt, Human herpesvirus 5
gaaucaccgucggcg

SEQ ID NO: 3977369 - RNA, 15 nt, Human herpesvirus 5
gaaucgcgagcuggg

SEQ ID NO: 3977370 - RNA, 16 nt, Human herpesvirus 5
gaaucgcgagcugggc

SEQ ID NO: 3977371 - RNA, 17 nt, Human herpesvirus 5
gaaugauuuggcugggu

SEQ ID NO: 3977372 - RNA, 13 nt, Human herpesvirus 5
gacaaccgcaucc

SEQ ID NO: 3977373 - RNA, 18 nt, Human herpesvirus 5
gacaauacgcguaagaua

SEQ ID NO: 3977374 - RNA, 19 nt, Human herpesvirus 5
gacacacguucgacaugga

SEQ ID NO: 3977375 - RNA, 13 nt, Human herpesvirus 5
gacacccgcggcc

SEQ ID NO: 3977376 - RNA, 22 nt, Human herpesvirus 5
gacacggaggaugacgaggagc

SEQ ID NO: 3977377 - RNA, 15 nt, Human herpesvirus 5
gacacggugcugcug

SEQ ID NO: 3977378 - RNA, 18 nt, Human herpesvirus 5
gacacucuggcccugcug

SEQ ID NO: 3977379 - RNA, 15 nt, Human herpesvirus 5
gacagagaccgccgc

SEQ ID NO: 3977380 - RNA, 17 nt, Human herpesvirus 5
gacagagaccgccgccg

SEQ ID NO: 3977381 - RNA, 13 nt, Human herpesvirus 5
gacagaugcggcg

SEQ ID NO: 3977382 - RNA, 19 nt, Human herpesvirus 5
gacagcaaggccgccgccg

SEQ ID NO: 3977383 - RNA, 13 nt, Human herpesvirus 5
gacagcgugccgg

SEQ ID NO: 3977384 - RNA, 17 nt, Human herpesvirus 5
gacaugauggaaaugcc

SEQ ID NO: 3977385 - RNA, 12 nt, Human herpesvirus 5
gacauggagccc

SEQ ID NO: 3977386 - RNA, 14 nt, Human herpesvirus 5
gacauggauaacga

SEQ ID NO: 3977387 - RNA, 21 nt, Human herpesvirus 5
gacaugguuuggccguguccu

SEQ ID NO: 3977388 - RNA, 19 nt, Human herpesvirus 5
gacauuuuuucggccgcgg

SEQ ID NO: 3977389 - RNA, 22 nt, Human herpesvirus 5
gaccaccguuaccaguaccacc

SEQ ID NO: 3977390 - RNA, 23 nt, Human herpesvirus 5
gaccagcaguaugacgugcgaug

SEQ ID NO: 3977391 - RNA, 15 nt, Human herpesvirus 5
gaccaggagguguug

SEQ ID NO: 3977392 - RNA, 17 nt, Human herpesvirus 5
gacccacggucugcgug

SEQ ID NO: 3977393 - RNA, 21 nt, Human herpesvirus 5
gacccgcagucuggcuugggu

SEQ ID NO: 3977394 - RNA, 14 nt, Human herpesvirus 5
gaccgaagacgccg

SEQ ID NO: 3977395 - RNA, 16 nt, Human herpesvirus 5
gaccgauuccagaacu

SEQ ID NO: 3977396 - RNA, 16 nt, Human herpesvirus 5
gaccgcaacaacagca

SEQ ID NO: 3977397 - RNA, 21 nt, Human herpesvirus 5
gaccgcaacaacagcagcaac

SEQ ID NO: 3977398 - RNA, 15 nt, Human herpesvirus 5
gaccgcaacgugcug

SEQ ID NO: 3977399 - RNA, 18 nt, Human herpesvirus 5
gaccgcaacgugcugcug

SEQ ID NO: 3977400 - RNA, 15 nt, Human herpesvirus 5
gaccgcgacgagguc

SEQ ID NO: 3977401 - RNA, 13 nt, Human herpesvirus 5
gaccgcggcgcag

SEQ ID NO: 3977402 - RNA, 16 nt, Human herpesvirus 5
gaccggcggcugcugu

SEQ ID NO: 3977403 - RNA, 20 nt, Human herpesvirus 5
gaccggugguacugcugugg

SEQ ID NO: 3977404 - RNA, 15 nt, Human herpesvirus 5
gaccugcacgacauc

SEQ ID NO: 3977405 - RNA, 18 nt, Human herpesvirus 5
gaccuguuuaccucaugc

SEQ ID NO: 3977406 - RNA, 15 nt, Human herpesvirus 5
gacgacucagggcug

SEQ ID NO: 3977407 - RNA, 17 nt, Human herpesvirus 5
gacgaggccggcggcgg

SEQ ID NO: 3977408 - RNA, 18 nt, Human herpesvirus 5
gacgagggucugcgcgac

SEQ ID NO: 3977409 - RNA, 16 nt, Human herpesvirus 5
gacgaucccucgccgc

SEQ ID NO: 3977410 - RNA, 14 nt, Human herpesvirus 5
gacgaugcuuuccu

SEQ ID NO: 3977411 - RNA, 19 nt, Human herpesvirus 5
gacgauuuuaugcgccgcc

SEQ ID NO: 3977412 - RNA, 22 nt, Human herpesvirus 5
gacgcaugauuagcaauauuau

SEQ ID NO: 3977413 - RNA, 20 nt, Human herpesvirus 5
gacgccaugcucaagacaga

SEQ ID NO: 3977414 - RNA, 17 nt, Human herpesvirus 5
gacgcgccgggcggcuu

SEQ ID NO: 3977415 - RNA, 20 nt, Human herpesvirus 5
gacgcgcguggccgcgcugg

SEQ ID NO: 3977416 - RNA, 16 nt, Human herpesvirus 5
gacgcgcuggacucuu

SEQ ID NO: 3977417 - RNA, 17 nt, Human herpesvirus 5
gacgcggaacgugacgg

SEQ ID NO: 3977418 - RNA, 19 nt, Human herpesvirus 5
gacgcggugcagguucuga

SEQ ID NO: 3977419 - RNA, 18 nt, Human herpesvirus 5
gacgcucggccuugcgcu

SEQ ID NO: 3977420 - RNA, 15 nt, Human herpesvirus 5
gacgcuuaucgggcg

SEQ ID NO: 3977421 - RNA, 12 nt, Human herpesvirus 5
gacggaggagac

SEQ ID NO: 3977422 - RNA, 18 nt, Human herpesvirus 5
gacggccugggcgccccc

SEQ ID NO: 3977423 - RNA, 23 nt, Human herpesvirus 5
gacggcggcgcguugccacagcg

SEQ ID NO: 3977424 - RNA, 15 nt, Human herpesvirus 5
gacggugacgagcgc

SEQ ID NO: 3977425 - RNA, 19 nt, Human herpesvirus 5
gacgugcgaccuggacggc

SEQ ID NO: 3977426 - RNA, 13 nt, Human herpesvirus 5
gacuacaugcuau

SEQ ID NO: 3977427 - RNA, 20 nt, Human herpesvirus 5
gacuaugagggccugcggcg

SEQ ID NO: 3977428 - RNA, 13 nt, Human herpesvirus 5
gacucgaaggcgc

SEQ ID NO: 3977429 - RNA, 13 nt, Human herpesvirus 5
gacucgcucucgu

SEQ ID NO: 3977430 - RNA, 17 nt, Human herpesvirus 5
gacucuaacacccaggc

SEQ ID NO: 3977431 - RNA, 20 nt, Human herpesvirus 5
gacucuaacacccaggccgc

SEQ ID NO: 3977432 - RNA, 22 nt, Human herpesvirus 5
gacucuauaaaaacccacgucc

SEQ ID NO: 3977433 - RNA, 13 nt, Human herpesvirus 5
gacugacacagcu

SEQ ID NO: 3977434 - RNA, 14 nt, Human herpesvirus 5
gacugacacagcuc

SEQ ID NO: 3977435 - RNA, 18 nt, Human herpesvirus 5
gacugcagcccaccgccc

SEQ ID NO: 3977436 - RNA, 18 nt, Human herpesvirus 5
gacugcguggggugcugg

SEQ ID NO: 3977437 - RNA, 14 nt, Human herpesvirus 5
gacugguggugaga

SEQ ID NO: 3977438 - RNA, 18 nt, Human herpesvirus 5
gacuuacaucugcucccc

SEQ ID NO: 3977439 - RNA, 16 nt, Human herpesvirus 5
gacuuagaaucucuug

SEQ ID NO: 3977440 - RNA, 17 nt, Human herpesvirus 5
gacuugcacgcuguccg

SEQ ID NO: 3977441 - RNA, 19 nt, Human herpesvirus 5
gacuugggcgauucugugu

SEQ ID NO: 3977442 - RNA, 15 nt, Human herpesvirus 5
gacuuugauguaguu

SEQ ID NO: 3977443 - RNA, 15 nt, Human herpesvirus 5
gagaaacccccaccc

SEQ ID NO: 3977444 - RNA, 14 nt, Human herpesvirus 5
gagaaagagcagcg

SEQ ID NO: 3977445 - RNA, 17 nt, Human herpesvirus 5
gagacacgcagaccgug

SEQ ID NO: 3977446 - RNA, 19 nt, Human herpesvirus 5
gagacgagagaaccuaccu

SEQ ID NO: 3977447 - RNA, 14 nt, Human herpesvirus 5
gagacgagcucuug

SEQ ID NO: 3977448 - RNA, 17 nt, Human herpesvirus 5
gagagccaccuuggugg

SEQ ID NO: 3977449 - RNA, 14 nt, Human herpesvirus 5
gagagggucuuucu

SEQ ID NO: 3977450 - RNA, 16 nt, Human herpesvirus 5
gagcacaaacugcgac

SEQ ID NO: 3977451 - RNA, 17 nt, Human herpesvirus 5
gagcacaaacugcgaca

SEQ ID NO: 3977452 - RNA, 20 nt, Human herpesvirus 5
gagcacgggcugcuggucuc

SEQ ID NO: 3977453 - RNA, 16 nt, Human herpesvirus 5
gagcaucgcaacaaca

SEQ ID NO: 3977454 - RNA, 16 nt, Human herpesvirus 5
gagccacggcuuggac

SEQ ID NO: 3977455 - RNA, 20 nt, Human herpesvirus 5
gagcgccggggagacgacga

SEQ ID NO: 3977456 - RNA, 15 nt, Human herpesvirus 5
gagcgcgagcgggca

SEQ ID NO: 3977457 - RNA, 18 nt, Human herpesvirus 5
gagcgggcggcgguggug

SEQ ID NO: 3977458 - RNA, 14 nt, Human herpesvirus 5
gagcguccgacgcc

SEQ ID NO: 3977459 - RNA, 15 nt, Human herpesvirus 5
gagcuggccagcaaa

SEQ ID NO: 3977460 - RNA, 15 nt, Human herpesvirus 5
gaggacagcaaggcc

SEQ ID NO: 3977461 - RNA, 13 nt, Human herpesvirus 5
gaggguaacuaug

SEQ ID NO: 3977462 - RNA, 18 nt, Human herpesvirus 5
gaggucguggaggcagcg

SEQ ID NO: 3977463 - RNA, 16 nt, Human herpesvirus 5
gaguaccccacgcaua

SEQ ID NO: 3977464 - RNA, 17 nt, Human herpesvirus 5
gagucacacuuaagaaa

SEQ ID NO: 3977465 - RNA, 13 nt, Human herpesvirus 5
gaguccuggucuu

SEQ ID NO: 3977466 - RNA, 18 nt, Human herpesvirus 5
gagucgcggggacgcgug

SEQ ID NO: 3977467 - RNA, 16 nt, Human herpesvirus 5
gagugguggcggcagc

SEQ ID NO: 3977468 - RNA, 14 nt, Human herpesvirus 5
uguucucccaggac

SEQ ID NO: 3977469 - RNA, 17 nt, Human herpesvirus 5
uguugccgcuggacuga

SEQ ID NO: 3977470 - RNA, 22 nt, Human herpesvirus 5
uguuggaacccaucgaggaggc

SEQ ID NO: 3977471 - RNA, 19 nt, Human herpesvirus 5
uguuguagcaacuggcaaa

SEQ ID NO: 3977472 - RNA, 22 nt, Human herpesvirus 5
uguuugggaacuuugccgucau

SEQ ID NO: 3977473 - RNA, 12 nt, Human herpesvirus 5
uguuuugucuga

SEQ ID NO: 3977474 - RNA, 14 nt, Human herpesvirus 5
uuaacauguuaugu

SEQ ID NO: 3977475 - RNA, 19 nt, Human herpesvirus 5
uuaacccccgacgagcagg

SEQ ID NO: 3977476 - RNA, 15 nt, Human herpesvirus 5
uuaagaggucacagg

SEQ ID NO: 3977477 - RNA, 14 nt, Human herpesvirus 5
uuaagcuggaccug

SEQ ID NO: 3977478 - RNA, 20 nt, Human herpesvirus 5
uuacagcuuuuuaauaaaaa

SEQ ID NO: 3977479 - RNA, 15 nt, Human herpesvirus 5
uuacauaaaaccacc

SEQ ID NO: 3977480 - RNA, 18 nt, Human herpesvirus 5
uuaccaacguaacagcaa

SEQ ID NO: 3977481 - RNA, 16 nt, Human herpesvirus 5
uuacggguaaugcaug

SEQ ID NO: 3977482 - RNA, 22 nt, Human herpesvirus 5
uuacucgagcuuauugagcgca

SEQ ID NO: 3977483 - RNA, 15 nt, Human herpesvirus 5
uuauaaggaggcaaa

SEQ ID NO: 3977484 - RNA, 15 nt, Human herpesvirus 5
uuaugaagcugaaca

SEQ ID NO: 3977485 - RNA, 18 nt, Human herpesvirus 5
uuaugauucugcacagau

SEQ ID NO: 3977486 - RNA, 13 nt, Human herpesvirus 5
uuauuacccgcua

SEQ ID NO: 3977487 - RNA, 17 nt, Human herpesvirus 5
uuauuuacaucuguaca

SEQ ID NO: 3977488 - RNA, 18 nt, Human herpesvirus 5
uucaaccucacguuaaac

SEQ ID NO: 3977489 - RNA, 16 nt, Human herpesvirus 5
uucaauaaaaaccacc

SEQ ID NO: 3977490 - RNA, 18 nt, Human herpesvirus 5
uucaauaaaaaccaccgu

SEQ ID NO: 3977491 - RNA, 21 nt, Human herpesvirus 5
uucagucagagagucugaaac

SEQ ID NO: 3977492 - RNA, 22 nt, Human herpesvirus 5
uuccaugacgcgccucauggcg

SEQ ID NO: 3977493 - RNA, 20 nt, Human herpesvirus 5
uuccccaccuucccucuaga

SEQ ID NO: 3977494 - RNA, 17 nt, Human herpesvirus 5
uuccccgugacgugcaa

SEQ ID NO: 3977495 - RNA, 15 nt, Human herpesvirus 5
uuccuauugggaagg

SEQ ID NO: 3977496 - RNA, 15 nt, Human herpesvirus 5
uucgcgccccucugc

SEQ ID NO: 3977497 - RNA, 16 nt, Human herpesvirus 5
uucgggccgacgucaa

SEQ ID NO: 3977498 - RNA, 15 nt, Human herpesvirus 5
uucucccgacgucac

SEQ ID NO: 3977499 - RNA, 20 nt, Human herpesvirus 5
uucugcuuuuuugucuccug

SEQ ID NO: 3977500 - RNA, 23 nt, Human herpesvirus 5
uugaaacgcgagaugaacuguuc

SEQ ID NO: 3977501 - RNA, 22 nt, Human herpesvirus 5
uugaccacacucgugacgucaa

SEQ ID NO: 3977502 - RNA, 14 nt, Human herpesvirus 5
uugagacacgcgcu

SEQ ID NO: 3977503 - RNA, 17 nt, Human herpesvirus 5
uugagcgccuucugcua

SEQ ID NO: 3977504 - RNA, 16 nt, Human herpesvirus 5
uugaugguguaggaga

SEQ ID NO: 3977505 - RNA, 23 nt, Human herpesvirus 5
uugcaacgcgcccgacagcugca

SEQ ID NO: 3977506 - RNA, 17 nt, Human herpesvirus 5
uugcacauccucacgag

SEQ ID NO: 3977507 - RNA, 21 nt, Human herpesvirus 5
uugcccgcacgccccggggcg

SEQ ID NO: 3977508 - RNA, 17 nt, Human herpesvirus 5
uugcugacgcuggaaac

SEQ ID NO: 3977509 - RNA, 22 nt, Human herpesvirus 5
uugcuuuggcggcagcggaggu

SEQ ID NO: 3977510 - RNA, 23 nt, Human herpesvirus 5
uugggacacugggcguuguugag

SEQ ID NO: 3977511 - RNA, 12 nt, Human herpesvirus 5
uugguggacucg

SEQ ID NO: 3977512 - RNA, 17 nt, Human herpesvirus 5
uugucauuaaacaggcu

SEQ ID NO: 3977513 - RNA, 12 nt, Human herpesvirus 5
uuguccuccucg

SEQ ID NO: 3977514 - RNA, 17 nt, Human herpesvirus 5
uuuacgcgaaacgauga

SEQ ID NO: 3977515 - RNA, 14 nt, Human herpesvirus 5
uuuauuaaagguuu

SEQ ID NO: 3977516 - RNA, 21 nt, Human herpesvirus 5
uuucaugucuuacaaaucaca

SEQ ID NO: 3977517 - RNA, 18 nt, Human herpesvirus 5
uuucggauguuuacccuu

SEQ ID NO: 3977518 - RNA, 16 nt, Human herpesvirus 5
uuucgugcguggaaaa

SEQ ID NO: 3977519 - RNA, 22 nt, Human herpesvirus 5
uuucugucgccgacuaaauuca

SEQ ID NO: 3977520 - RNA, 22 nt, Human herpesvirus 5
uuucuugccaagcuuuagccag

SEQ ID NO: 3977521 - RNA, 13 nt, Human herpesvirus 5
uuucuuuccucgg

SEQ ID NO: 3977522 - RNA, 13 nt, Human herpesvirus 5
uuucuuucucagu

SEQ ID NO: 3977523 - RNA, 13 nt, Human herpesvirus 5
uuuggauguaugu

SEQ ID NO: 3977524 - RNA, 21 nt, Human herpesvirus 5
uuuuaaagucggucaugaagu

SEQ ID NO: 3977525 - RNA, 16 nt, Human herpesvirus 5
uuuuaaucgucgaaaa

SEQ ID NO: 3977526 - RNA, 21 nt, Human herpesvirus 5
uuuuccguguugccgacggcg

SEQ ID NO: 3977527 - RNA, 14 nt, Human herpesvirus 5
uuuugcugcaccag

SEQ ID NO: 3977528 - RNA, 15 nt, Human herpesvirus 5
uuuuuauuacccgcu

SEQ ID NO: 3977529 - RNA, 13 nt, Human herpesvirus 5
aaaaaaaagagag

SEQ ID NO: 3977530 - RNA, 15 nt, Human herpesvirus 5
aaaaacacagagacg

SEQ ID NO: 3977531 - RNA, 15 nt, Human herpesvirus 5
aaaaagugcgucaaa

SEQ ID NO: 3977532 - RNA, 17 nt, Human herpesvirus 5
aaaaaucgauauuugaa

SEQ ID NO: 3977533 - RNA, 14 nt, Human herpesvirus 5
aaaacauaagaaua

SEQ ID NO: 3977534 - RNA, 23 nt, Human herpesvirus 5
aaaacaugcgguguuuccgaugg

SEQ ID NO: 3977535 - RNA, 14 nt, Human herpesvirus 5
aaaagaagcugccc

SEQ ID NO: 3977536 - RNA, 15 nt, Human herpesvirus 5
aaaagggacgucaaa

SEQ ID NO: 3977537 - RNA, 11 nt, Human herpesvirus 5
aaaauauguag

SEQ ID NO: 3977538 - RNA, 17 nt, Human herpesvirus 5
aaaaucggugguggugu

SEQ ID NO: 3977539 - RNA, 12 nt, Human herpesvirus 5
aaacagcacauu

SEQ ID NO: 3977540 - RNA, 14 nt, Human herpesvirus 5
aaaccgagcaagca

SEQ ID NO: 3977541 - RNA, 20 nt, Human herpesvirus 5
aaacgccaccugcaaaguua

SEQ ID NO: 3977542 - RNA, 19 nt, Human herpesvirus 5
aaacucccacuccuguugg

SEQ ID NO: 3977543 - RNA, 23 nt, Human herpesvirus 5
aaacucccacuccuguuggcuua

SEQ ID NO: 3977544 - RNA, 20 nt, Human herpesvirus 5
aaagaaaaaaugguguuaca

SEQ ID NO: 3977545 - RNA, 14 nt, Human herpesvirus 5
aaagaccgcugccu

SEQ ID NO: 3977546 - RNA, 15 nt, Human herpesvirus 5
aaaguagguacuaac

SEQ ID NO: 3977547 - RNA, 17 nt, Human herpesvirus 5
aaaguccgucaugcugg

SEQ ID NO: 3977548 - RNA, 14 nt, Human herpesvirus 5
aaauacagaguccg

SEQ ID NO: 3977549 - RNA, 13 nt, Human herpesvirus 5
aaauauguaguau

SEQ ID NO: 3977550 - RNA, 14 nt, Human herpesvirus 5
aaaucuacacugaa

SEQ ID NO: 3977551 - RNA, 14 nt, Human herpesvirus 5
aaaugagaccccau

SEQ ID NO: 3977552 - RNA, 18 nt, Human herpesvirus 5
aacaaugacuaacccugg

SEQ ID NO: 3977553 - RNA, 18 nt, Human herpesvirus 5
aacagacccgauacaguc

SEQ ID NO: 3977554 - RNA, 18 nt, Human herpesvirus 5
aacagcagcaacagcagc

SEQ ID NO: 3977555 - RNA, 18 nt, Human herpesvirus 5
aacagccuucccuuguaa

SEQ ID NO: 3977556 - RNA, 16 nt, Human herpesvirus 5
aacauuccccugggaa

SEQ ID NO: 3977557 - RNA, 17 nt, Human herpesvirus 5
aaccaccguagcacugc

SEQ ID NO: 3977558 - RNA, 21 nt, Human herpesvirus 5
aaccaccguagcacugcgcaa

SEQ ID NO: 3977559 - RNA, 20 nt, Human herpesvirus 5
aaccacgaguaacaccguca

SEQ ID NO: 3977560 - RNA, 15 nt, Human herpesvirus 5
aaccagauacaacgu

SEQ ID NO: 3977561 - RNA, 16 nt, Human herpesvirus 5
aaccauugagaaagcu

SEQ ID NO: 3977562 - RNA, 12 nt, Human herpesvirus 5
aacccagcagcc

SEQ ID NO: 3977563 - RNA, 16 nt, Human herpesvirus 5
aaccccguguccgccc

SEQ ID NO: 3977564 - RNA, 18 nt, Human herpesvirus 5
aaccgcaugggaaaguac

SEQ ID NO: 3977565 - RNA, 23 nt, Human herpesvirus 5
aaccgcgggccgcccaaacaucu

SEQ ID NO: 3977566 - RNA, 15 nt, Human herpesvirus 5
aacgaggagcggcaa

SEQ ID NO: 3977567 - RNA, 22 nt, Human herpesvirus 5
aacgccuggcgugaucacgccu

SEQ ID NO: 3977568 - RNA, 18 nt, Human herpesvirus 5
aacggauggcguguauau

SEQ ID NO: 3977569 - RNA, 13 nt, Human herpesvirus 5
aacgggugggcug

SEQ ID NO: 3977570 - RNA, 12 nt, Human herpesvirus 5
aacguucuguaa

SEQ ID NO: 3977571 - RNA, 17 nt, Human herpesvirus 5
aacuacuaauacagaua

SEQ ID NO: 3977572 - RNA, 14 nt, Human herpesvirus 5
aacuagccuucccg

SEQ ID NO: 3977573 - RNA, 12 nt, Human herpesvirus 5
aacucuuucccc

SEQ ID NO: 3977574 - RNA, 12 nt, Human herpesvirus 5
aacuuugcugcu

SEQ ID NO: 3977575 - RNA, 15 nt, Human herpesvirus 5
aagaacgugguuguu

SEQ ID NO: 3977576 - RNA, 20 nt, Human herpesvirus 5
aagacaucgucacaccuauc

SEQ ID NO: 3977577 - RNA, 18 nt, Human herpesvirus 5
aagaccaagagcaugcug

SEQ ID NO: 3977578 - RNA, 15 nt, Human herpesvirus 5
aagacgucaaugaca

SEQ ID NO: 3977579 - RNA, 14 nt, Human herpesvirus 5
aagagguuggugug

SEQ ID NO: 3977580 - RNA, 23 nt, Human herpesvirus 5
aagauaaucugccaaucgcaccu

SEQ ID NO: 3977581 - RNA, 21 nt, Human herpesvirus 5
aagauagagaaaccgcaugug

SEQ ID NO: 3977582 - RNA, 12 nt, Human herpesvirus 5
aagaugauacau

SEQ ID NO: 3977583 - RNA, 23 nt, Human herpesvirus 5
aagcaccguggggucaucgaccg

SEQ ID NO: 3977584 - RNA, 18 nt, Human herpesvirus 5
aagcgccgcggcagcacc

SEQ ID NO: 3977585 - RNA, 13 nt, Human herpesvirus 5
aagcuugguacac

SEQ ID NO: 3977586 - RNA, 12 nt, Human herpesvirus 5
aaggcacacggu

SEQ ID NO: 3977587 - RNA, 17 nt, Human herpesvirus 5
aaggccaugagcggcag

SEQ ID NO: 3977588 - RNA, 20 nt, Human herpesvirus 5
aaggccgccucuucuggccc

SEQ ID NO: 3977589 - RNA, 22 nt, Human herpesvirus 5
aaggccguggagaugcaggagg

SEQ ID NO: 3977590 - RNA, 22 nt, Human herpesvirus 5
aaggcggaggagagaacggaag

SEQ ID NO: 3977591 - RNA, 18 nt, Human herpesvirus 5
aagggcaaggaggcggcg

SEQ ID NO: 3977592 - RNA, 17 nt, Human herpesvirus 5
aagguacuuuaccuagc

SEQ ID NO: 3977593 - RNA, 21 nt, Human herpesvirus 5
aagguugggagaugcggggug

SEQ ID NO: 3977594 - RNA, 18 nt, Human herpesvirus 5
aagucuacgaucgcugga

SEQ ID NO: 3977595 - RNA, 20 nt, Human herpesvirus 5
aagugcucgacuuuacggug

SEQ ID NO: 3977596 - RNA, 18 nt, Human herpesvirus 5
aauaaaagcacuucagaa

SEQ ID NO: 3977597 - RNA, 15 nt, Human herpesvirus 5
aauaaagagaguugu

SEQ ID NO: 3977598 - RNA, 16 nt, Human herpesvirus 5
aauaaagucuggguuu

SEQ ID NO: 3977599 - RNA, 16 nt, Human herpesvirus 5
aauacgauaauugcua

SEQ ID NO: 3977600 - RNA, 13 nt, Human herpesvirus 5
aaucaagccuguu

SEQ ID NO: 3977601 - RNA, 17 nt, Human herpesvirus 5
aaucagcagugaguaca

SEQ ID NO: 3977602 - RNA, 22 nt, Human herpesvirus 5
aaucuguguguucugugauaac

SEQ ID NO: 3977603 - RNA, 20 nt, Human herpesvirus 5
aaucuuccauaauaaaagua

SEQ ID NO: 3977604 - RNA, 13 nt, Human herpesvirus 5
aaugcauuaucau

SEQ ID NO: 3977605 - RNA, 19 nt, Human herpesvirus 5
aauugcaacuuaacgcgca

SEQ ID NO: 3977606 - RNA, 13 nt, Human herpesvirus 5
aauugggaaagag

SEQ ID NO: 3977607 - RNA, 16 nt, Human herpesvirus 5
aauuuuuucgcugcca

SEQ ID NO: 3977608 - RNA, 10 nt, Human herpesvirus 5
acaaaacaac

SEQ ID NO: 3977609 - RNA, 13 nt, Human herpesvirus 5
acaaacaaugaca

SEQ ID NO: 3977610 - RNA, 16 nt, Human herpesvirus 5
acaacagcagcaacag

SEQ ID NO: 3977611 - RNA, 16 nt, Human herpesvirus 5
acaagcgggacgaaaa

SEQ ID NO: 3977612 - RNA, 15 nt, Human herpesvirus 5
acaaguaugaaaguu

SEQ ID NO: 3977613 - RNA, 15 nt, Human herpesvirus 5
acaccgucagcugcg

SEQ ID NO: 3977614 - RNA, 23 nt, Human herpesvirus 5
acaccugccucgacaucucgccg

SEQ ID NO: 3977615 - RNA, 13 nt, Human herpesvirus 5
acacgacgaaagc

SEQ ID NO: 3977616 - RNA, 16 nt, Human herpesvirus 5
acacgcagaccguggg

SEQ ID NO: 3977617 - RNA, 18 nt, Human herpesvirus 5
acacgccuugcaccuggg

SEQ ID NO: 3977618 - RNA, 19 nt, Human herpesvirus 5
acacgccuugcaccugggu

SEQ ID NO: 3977619 - RNA, 22 nt, Human herpesvirus 5
acacggugacguagcagcacgc

SEQ ID NO: 3977620 - RNA, 21 nt, Human herpesvirus 5
acacguaauacucgcgucacg

SEQ ID NO: 3977621 - RNA, 19 nt, Human herpesvirus 5
acacuaaauuguuauugcc

SEQ ID NO: 3977622 - RNA, 17 nt, Human herpesvirus 5
acacugcuacccugcgc

SEQ ID NO: 3977623 - RNA, 23 nt, Human herpesvirus 5
acacuuggugcucgaccaggagg

SEQ ID NO: 3977624 - RNA, 14 nt, Human herpesvirus 5
acagaaugaaccuu

SEQ ID NO: 3977625 - RNA, 16 nt, Human herpesvirus 5
acagacaggacaccgc

SEQ ID NO: 3977626 - RNA, 20 nt, Human herpesvirus 5
acagacuuuauaaaccguag

SEQ ID NO: 3977627 - RNA, 19 nt, Human herpesvirus 5
acagcaacaacagucgcag

SEQ ID NO: 3977628 - RNA, 15 nt, Human herpesvirus 5
acagccuugagaacc

SEQ ID NO: 3977629 - RNA, 18 nt, Human herpesvirus 5
acagcggcgacagacggc

SEQ ID NO: 3977630 - RNA, 13 nt, Human herpesvirus 5
acagcggcucgcc

SEQ ID NO: 3977631 - RNA, 14 nt, Human herpesvirus 5
acagcgucuggcca

SEQ ID NO: 3977632 - RNA, 15 nt, Human herpesvirus 5
acagcucaugccucu

SEQ ID NO: 3977633 - RNA, 16 nt, Human herpesvirus 5
acagguagguggccau

SEQ ID NO: 3977634 - RNA, 23 nt, Human herpesvirus 5
acagucgcagcccccguggccgc

SEQ ID NO: 3977635 - RNA, 15 nt, Human herpesvirus 5
acaguuuccacgcag

SEQ ID NO: 3977636 - RNA, 12 nt, Human herpesvirus 5
acauaaaaccac

SEQ ID NO: 3977637 - RNA, 23 nt, Human herpesvirus 5
acaucaacaguuuacgaguacaa

SEQ ID NO: 3977638 - RNA, 14 nt, Human herpesvirus 5
acaucauaaaaacc

SEQ ID NO: 3977639 - RNA, 16 nt, Human herpesvirus 5
acauccgucagccucg

SEQ ID NO: 3977640 - RNA, 16 nt, Human herpesvirus 5
acaucugucaccucac

SEQ ID NO: 3977641 - RNA, 19 nt, Human herpesvirus 5
acaucugucaccucacaag

SEQ ID NO: 3977642 - RNA, 13 nt, Human herpesvirus 5
acaugaggaagcg

SEQ ID NO: 3977643 - RNA, 20 nt, Human herpesvirus 5
acaugcccagcaucuccucg

SEQ ID NO: 3977644 - RNA, 17 nt, Human herpesvirus 5
acauggagcccacgccg

SEQ ID NO: 3977645 - RNA, 15 nt, Human herpesvirus 5
acauguaucucacca

SEQ ID NO: 3977646 - RNA, 22 nt, Human herpesvirus 5
acauuccccaccuucccucuag

SEQ ID NO: 3977647 - RNA, 18 nt, Human herpesvirus 5
acauuuuuugacagauga

SEQ ID NO: 3977648 - RNA, 14 nt, Human herpesvirus 5
accacgcagcaggc

SEQ ID NO: 3977649 - RNA, 16 nt, Human herpesvirus 5
accacgguuaccuucu

SEQ ID NO: 3977650 - RNA, 13 nt, Human herpesvirus 5
accauccucaccc

SEQ ID NO: 3977651 - RNA, 20 nt, Human herpesvirus 5
accaugugcaaaaacuuguc

SEQ ID NO: 3977652 - RNA, 14 nt, Human herpesvirus 5
acccacgaccauuu

SEQ ID NO: 3977653 - RNA, 13 nt, Human herpesvirus 5
acccauuacagua

SEQ ID NO: 3977654 - RNA, 14 nt, Human herpesvirus 5
gaugugcagcaucg

SEQ ID NO: 3977655 - RNA, 20 nt, Human herpesvirus 5
gauucaggacgaggagccaa

SEQ ID NO: 3977656 - RNA, 12 nt, Human herpesvirus 5
gcaaacucccac

SEQ ID NO: 3977657 - RNA, 18 nt, Human herpesvirus 5
gcaaaucacgugugugcg

SEQ ID NO: 3977658 - RNA, 20 nt, Human herpesvirus 5
gcaacaacagucgcagcccc

SEQ ID NO: 3977659 - RNA, 22 nt, Human herpesvirus 5
gcaacaacagucgcagcccccg

SEQ ID NO: 3977660 - RNA, 12 nt, Human herpesvirus 5
gcaacauguguu

SEQ ID NO: 3977661 - RNA, 23 nt, Human herpesvirus 5
gcaacggccguuaucaaggccac

SEQ ID NO: 3977662 - RNA, 21 nt, Human herpesvirus 5
gcaacuaucaccaaacaacac

SEQ ID NO: 3977663 - RNA, 12 nt, Human herpesvirus 5
gcaacugcugcc

SEQ ID NO: 3977664 - RNA, 16 nt, Human herpesvirus 5
gcaagccgagcgggag

SEQ ID NO: 3977665 - RNA, 22 nt, Human herpesvirus 5
gcacaccuauggcgccgugggu

SEQ ID NO: 3977666 - RNA, 21 nt, Human herpesvirus 5
gcacaccugccucgacaucuc

SEQ ID NO: 3977667 - RNA, 20 nt, Human herpesvirus 5
gcacaucggugccggccagg

SEQ ID NO: 3977668 - RNA, 19 nt, Human herpesvirus 5
gcaccccgaacuggagcuc

SEQ ID NO: 3977669 - RNA, 20 nt, Human herpesvirus 5
gcaccggccuccgacgacgc

SEQ ID NO: 3977670 - RNA, 13 nt, Human herpesvirus 5
gcaccugcugccg

SEQ ID NO: 3977671 - RNA, 18 nt, Human herpesvirus 5
gcaccugucgucgacaug

SEQ ID NO: 3977672 - RNA, 12 nt, Human herpesvirus 5
gcacgacaugac

SEQ ID NO: 3977673 - RNA, 16 nt, Human herpesvirus 5
gcacgacgcggcguug

SEQ ID NO: 3977674 - RNA, 13 nt, Human herpesvirus 5
gcacgacuggcca

SEQ ID NO: 3977675 - RNA, 16 nt, Human herpesvirus 5
gcacgagugggccagc

SEQ ID NO: 3977676 - RNA, 17 nt, Human herpesvirus 5
gcacgagugggccagcc

SEQ ID NO: 3977677 - RNA, 18 nt, Human herpesvirus 5
gcacgccaaaccgcgucc

SEQ ID NO: 3977678 - RNA, 20 nt, Human herpesvirus 5
gcacggcaucaugcugggcg

SEQ ID NO: 3977679 - RNA, 15 nt, Human herpesvirus 5
gcacgucagugguga

SEQ ID NO: 3977680 - RNA, 17 nt, Human herpesvirus 5
gcacuucggucucgggc

SEQ ID NO: 3977681 - RNA, 16 nt, Human herpesvirus 5
gcagaacgaucccuuu

SEQ ID NO: 3977682 - RNA, 16 nt, Human herpesvirus 5
gcagaaguuguugcaa

SEQ ID NO: 3977683 - RNA, 14 nt, Human herpesvirus 5
gcagagggcgcgcc

SEQ ID NO: 3977684 - RNA, 16 nt, Human herpesvirus 5
gcagcaacagcagcca

SEQ ID NO: 3977685 - RNA, 16 nt, Human herpesvirus 5
gcagcaccucuuucca

SEQ ID NO: 3977686 - RNA, 21 nt, Human herpesvirus 5
gcagcacgcgauuggccagca

SEQ ID NO: 3977687 - RNA, 14 nt, Human herpesvirus 5
gcagcagcuggugc

SEQ ID NO: 3977688 - RNA, 15 nt, Human herpesvirus 5
gcagcagcuggugca

SEQ ID NO: 3977689 - RNA, 19 nt, Human herpesvirus 5
gcagcaucgcguugcucag

SEQ ID NO: 3977690 - RNA, 13 nt, Human herpesvirus 5
gcagcccccgugg

SEQ ID NO: 3977691 - RNA, 15 nt, Human herpesvirus 5
gcagcgcgugcgcau

SEQ ID NO: 3977692 - RNA, 15 nt, Human herpesvirus 5
gcagcggcugcgcgc

SEQ ID NO: 3977693 - RNA, 13 nt, Human herpesvirus 5
gcagcgggccugu

SEQ ID NO: 3977694 - RNA, 21 nt, Human herpesvirus 5
gcagcucuuuuccagcgugcg

SEQ ID NO: 3977695 - RNA, 24 nt, Human herpesvirus 5
gcaggacgggauaucccagaggaa

SEQ ID NO: 3977696 - RNA, 19 nt, Human herpesvirus 5
gcaggucacacugggagac

SEQ ID NO: 3977697 - RNA, 15 nt, Human herpesvirus 5
gcaggugugcgcguc

SEQ ID NO: 3977698 - RNA, 14 nt, Human herpesvirus 5
gcaguccgcuccgg

SEQ ID NO: 3977699 - RNA, 13 nt, Human herpesvirus 5
gcaguugcugccu

SEQ ID NO: 3977700 - RNA, 13 nt, Human herpesvirus 5
gcaucaugugccu

SEQ ID NO: 3977701 - RNA, 14 nt, Human herpesvirus 5
gcaucaugugccuc

SEQ ID NO: 3977702 - RNA, 23 nt, Human herpesvirus 5
gcaugacggugacuauguguacu

SEQ ID NO: 3977703 - RNA, 13 nt, Human herpesvirus 5
gcaugauuagcaa

SEQ ID NO: 3977704 - RNA, 19 nt, Human herpesvirus 5
gccaacuccgugccagcug

SEQ ID NO: 3977705 - RNA, 21 nt, Human herpesvirus 5
gccaacuccgugccagcuggc

SEQ ID NO: 3977706 - RNA, 18 nt, Human herpesvirus 5
gccaagaugcugcgggcc

SEQ ID NO: 3977707 - RNA, 23 nt, Human herpesvirus 5
gccaccacccgacugcagcccac

SEQ ID NO: 3977708 - RNA, 15 nt, Human herpesvirus 5
gccacccgccggagc

SEQ ID NO: 3977709 - RNA, 17 nt, Human herpesvirus 5
gccaccgucgcccucag

SEQ ID NO: 3977710 - RNA, 16 nt, Human herpesvirus 5
gccacgcguacuggcu

SEQ ID NO: 3977711 - RNA, 18 nt, Human herpesvirus 5
gccacuuuucuccccgcu

SEQ ID NO: 3977712 - RNA, 13 nt, Human herpesvirus 5
gccagcggccugg

SEQ ID NO: 3977713 - RNA, 14 nt, Human herpesvirus 5
gccagcguccgcgc

SEQ ID NO: 3977714 - RNA, 13 nt, Human herpesvirus 5
gccagcugccacc

SEQ ID NO: 3977715 - RNA, 16 nt, Human herpesvirus 5
gccagcugcgucguca

SEQ ID NO: 3977716 - RNA, 22 nt, Human herpesvirus 5
gccaguacagcgccgacgugcu

SEQ ID NO: 3977717 - RNA, 14 nt, Human herpesvirus 5
gcccaccgccuccg

SEQ ID NO: 3977718 - RNA, 17 nt, Human herpesvirus 5
gcccagcaucuccucgc

SEQ ID NO: 3977719 - RNA, 20 nt, Human herpesvirus 5
gcccauugagcgagaacuaa

SEQ ID NO: 3977720 - RNA, 22 nt, Human herpesvirus 5
gccccccaccuacgagcaggcc

SEQ ID NO: 3977721 - RNA, 20 nt, Human herpesvirus 5
gccccgaagguuagcgccgc

SEQ ID NO: 3977722 - RNA, 18 nt, Human herpesvirus 5
gccccucacgucaguguu

SEQ ID NO: 3977723 - RNA, 21 nt, Human herpesvirus 5
gcccgacugcggacgccgacg

SEQ ID NO: 3977724 - RNA, 16 nt, Human herpesvirus 5
gcccgaggcggaggag

SEQ ID NO: 3977725 - RNA, 15 nt, Human herpesvirus 5
gcccgccacugcccg

SEQ ID NO: 3977726 - RNA, 23 nt, Human herpesvirus 5
gcccgccggcgggcggcugccgg

SEQ ID NO: 3977727 - RNA, 16 nt, Human herpesvirus 5
gcccgucgcgcacggc

SEQ ID NO: 3977728 - RNA, 18 nt, Human herpesvirus 5
gcccgucggcugccuguu

SEQ ID NO: 3977729 - RNA, 20 nt, Human herpesvirus 5
gcccucgacggcgguacuga

SEQ ID NO: 3977730 - RNA, 11 nt, Human herpesvirus 5
gcccucgccgg

SEQ ID NO: 3977731 - RNA, 17 nt, Human herpesvirus 5
gcccugucugcagccgg

SEQ ID NO: 3977732 - RNA, 14 nt, Human herpesvirus 5
gccgagacgcugcg

SEQ ID NO: 3977733 - RNA, 14 nt, Human herpesvirus 5
gccgagacggcgug

SEQ ID NO: 3977734 - RNA, 12 nt, Human herpesvirus 5
gccgagcccaac

SEQ ID NO: 3977735 - RNA, 14 nt, Human herpesvirus 5
gccgaggcuacugc

SEQ ID NO: 3977736 - RNA, 12 nt, Human herpesvirus 5
gccgagucuccg

SEQ ID NO: 3977737 - RNA, 19 nt, Human herpesvirus 5
gccgagucuccgcgcaaca

SEQ ID NO: 3977738 - RNA, 17 nt, Human herpesvirus 5
gccgauccacgggccgc

SEQ ID NO: 3977739 - RNA, 15 nt, Human herpesvirus 5
gccgauggcugcccg

SEQ ID NO: 3977740 - RNA, 19 nt, Human herpesvirus 5
gccgaugugaguuucugug

SEQ ID NO: 3977741 - RNA, 23 nt, Human herpesvirus 5
gccgauucguaaucgacaggagg

SEQ ID NO: 3977742 - RNA, 14 nt, Human herpesvirus 5
gccgcaacagcggc

SEQ ID NO: 3977743 - RNA, 15 nt, Human herpesvirus 5
gccgcaacagcggcg

SEQ ID NO: 3977744 - RNA, 13 nt, Human herpesvirus 5
gccgcaagcggcg

SEQ ID NO: 3977745 - RNA, 15 nt, Human herpesvirus 5
gccgcagaaggccau

SEQ ID NO: 3977746 - RNA, 14 nt, Human herpesvirus 5
gccgccaacgccga

SEQ ID NO: 3977747 - RNA, 16 nt, Human herpesvirus 5
gccgccaacgccgagc

SEQ ID NO: 3977748 - RNA, 15 nt, Human herpesvirus 5
gccgccaacgcgagc

SEQ ID NO: 3977749 - RNA, 19 nt, Human herpesvirus 5
gccgccaucaucauguggg

SEQ ID NO: 3977750 - RNA, 15 nt, Human herpesvirus 5
gccgcccgacgccga

SEQ ID NO: 3977751 - RNA, 21 nt, Human herpesvirus 5
gccgccgaagccuggggcacc

SEQ ID NO: 3977752 - RNA, 15 nt, Human herpesvirus 5
gccgccgcgccacac

SEQ ID NO: 3977753 - RNA, 15 nt, Human herpesvirus 5
gccgccgcucagguc

SEQ ID NO: 3977754 - RNA, 13 nt, Human herpesvirus 5
gccgccuccgcgg

SEQ ID NO: 3977755 - RNA, 13 nt, Human herpesvirus 5
gccgccuggaguc

SEQ ID NO: 3977756 - RNA, 20 nt, Human herpesvirus 5
gccgcgaggugucauguucg

SEQ ID NO: 3977757 - RNA, 13 nt, Human herpesvirus 5
gccgcggcagcac

SEQ ID NO: 3977758 - RNA, 16 nt, Human herpesvirus 5
gccgcggccgcugccg

SEQ ID NO: 3977759 - RNA, 14 nt, Human herpesvirus 5
gccgcgggguacgg

SEQ ID NO: 3977760 - RNA, 16 nt, Human herpesvirus 5
gccgcggugcaggccg

SEQ ID NO: 3977761 - RNA, 18 nt, Human herpesvirus 5
gccgcggugcgcugcagc

SEQ ID NO: 3977762 - RNA, 16 nt, Human herpesvirus 5
gccgcgugccugggaa

SEQ ID NO: 3977763 - RNA, 18 nt, Human herpesvirus 5
gccgcucauaaugccguc

SEQ ID NO: 3977764 - RNA, 18 nt, Human herpesvirus 5
gccgcuggacugacacag

SEQ ID NO: 3977765 - RNA, 22 nt, Human herpesvirus 5
gccgcuuuucagaccgcaacaa

SEQ ID NO: 3977766 - RNA, 22 nt, Human herpesvirus 5
gccggagcccggucugagcucc

SEQ ID NO: 3977767 - RNA, 15 nt, Human herpesvirus 5
gccggaggagcaggc

SEQ ID NO: 3977768 - RNA, 18 nt, Human herpesvirus 5
gccggcgagcgacgcggc

SEQ ID NO: 3977769 - RNA, 16 nt, Human herpesvirus 5
gccggcgccugguugc

SEQ ID NO: 3977770 - RNA, 14 nt, Human herpesvirus 5
gccggcggcggcgu

SEQ ID NO: 3977771 - RNA, 16 nt, Human herpesvirus 5
gccggcggcggcguca

SEQ ID NO: 3977772 - RNA, 21 nt, Human herpesvirus 5
gccggcguggcggccgacggc

SEQ ID NO: 3977773 - RNA, 17 nt, Human herpesvirus 5
gccggcuugaccgcguu

SEQ ID NO: 3977774 - RNA, 20 nt, Human herpesvirus 5
gccgggaaagacgggcgaca

SEQ ID NO: 3977775 - RNA, 12 nt, Human herpesvirus 5
gccggggcccgu

SEQ ID NO: 3977776 - RNA, 14 nt, Human herpesvirus 5
gccgucaaggccgc

SEQ ID NO: 3977777 - RNA, 15 nt, Human herpesvirus 5
gccgucacugccacc

SEQ ID NO: 3977778 - RNA, 21 nt, Human herpesvirus 5
gccgucagagcaucaacgacg

SEQ ID NO: 3977779 - RNA, 22 nt, Human herpesvirus 5
gccgucucgucacacggcaaca

SEQ ID NO: 3977780 - RNA, 15 nt, Human herpesvirus 5
gccgugcugggcugg

SEQ ID NO: 3977781 - RNA, 13 nt, Human herpesvirus 5
gccgugguggccg

SEQ ID NO: 3977782 - RNA, 15 nt, Human herpesvirus 5
gccgugguggccgug

SEQ ID NO: 3977783 - RNA, 20 nt, Human herpesvirus 5
gccguguguuaccgccgccg

SEQ ID NO: 3977784 - RNA, 18 nt, Human herpesvirus 5
gccguucgacgaucuuua

SEQ ID NO: 3977785 - RNA, 23 nt, Human herpesvirus 5
gccucaaaaagcagguggaggac

SEQ ID NO: 3977786 - RNA, 21 nt, Human herpesvirus 5
gccucgauccauccuggggaa

SEQ ID NO: 3977787 - RNA, 13 nt, Human herpesvirus 5
gccucugggcuga

SEQ ID NO: 3977788 - RNA, 16 nt, Human herpesvirus 5
gccugcacgaccugcu

SEQ ID NO: 3977789 - RNA, 22 nt, Human herpesvirus 5
gccugcacgccgccgugacugc

SEQ ID NO: 3977790 - RNA, 20 nt, Human herpesvirus 5
gccugccgaagaccucacca

SEQ ID NO: 3977791 - RNA, 14 nt, Human herpesvirus 5
gccuggacccacaa

SEQ ID NO: 3977792 - RNA, 14 nt, Human herpesvirus 5
gccuggacgccugg

SEQ ID NO: 3977793 - RNA, 22 nt, Human herpesvirus 5
gccuggauuaucacaucggugu

SEQ ID NO: 3977794 - RNA, 14 nt, Human herpesvirus 5
gccuggcggcgggu

SEQ ID NO: 3977795 - RNA, 14 nt, Human herpesvirus 5
gccuguggauagau

SEQ ID NO: 3977796 - RNA, 20 nt, Human herpesvirus 5
gccuguggauagauuucugc

SEQ ID NO: 3977797 - RNA, 20 nt, Human herpesvirus 5
gccuuccccgaugugcaggg

SEQ ID NO: 3977798 - RNA, 19 nt, Human herpesvirus 5
gccuuccuccucugccugg

SEQ ID NO: 3977799 - RNA, 14 nt, Human herpesvirus 5
gccuucggccagcg

SEQ ID NO: 3977800 - RNA, 17 nt, Human herpesvirus 5
gccuugagaaccugcuc

SEQ ID NO: 3977801 - RNA, 13 nt, Human herpesvirus 5
gccuugcaccugg

SEQ ID NO: 3977802 - RNA, 20 nt, Human herpesvirus 5
gccuugcgcucccugcuccg

SEQ ID NO: 3977803 - RNA, 16 nt, Human herpesvirus 5
gccuuggcgcucugga

SEQ ID NO: 3977804 - RNA, 21 nt, Human herpesvirus 5
gccuuucugaccuugcugaug

SEQ ID NO: 3977805 - RNA, 15 nt, Human herpesvirus 5
gcgaacggcgacggc

SEQ ID NO: 3977806 - RNA, 16 nt, Human herpesvirus 5
gcgaauaagcgcgacc

SEQ ID NO: 3977807 - RNA, 20 nt, Human herpesvirus 5
gcgacaccguaucagcuacc

SEQ ID NO: 3977808 - RNA, 15 nt, Human herpesvirus 5
gcgaccgucuggagg

SEQ ID NO: 3977809 - RNA, 17 nt, Human herpesvirus 5
gcgaccuggacggcuac

SEQ ID NO: 3977810 - RNA, 15 nt, Human herpesvirus 5
gcgacgagggucugc

SEQ ID NO: 3977811 - RNA, 13 nt, Human herpesvirus 5
gcgacggagagga

SEQ ID NO: 3977812 - RNA, 17 nt, Human herpesvirus 5
gcgacguaccagcuguc

SEQ ID NO: 3977813 - RNA, 14 nt, Human herpesvirus 5
gcgacguggaggag

SEQ ID NO: 3977814 - RNA, 18 nt, Human herpesvirus 5
gcgacuuuuuucugugag

SEQ ID NO: 3977815 - RNA, 20 nt, Human herpesvirus 5
gcgagaccgauuccagaacu

SEQ ID NO: 3977816 - RNA, 14 nt, Human herpesvirus 5
gcgagcgcucggcg

SEQ ID NO: 3977817 - RNA, 18 nt, Human herpesvirus 5
gcgagcggaacccgggcu

SEQ ID NO: 3977818 - RNA, 22 nt, Human herpesvirus 5
gcgagcgggguucaccugcagc

SEQ ID NO: 3977819 - RNA, 13 nt, Human herpesvirus 5
gcgagcugggcga

SEQ ID NO: 3977820 - RNA, 23 nt, Human herpesvirus 5
gcgaggacaaggcuccgaaaccg

SEQ ID NO: 3977821 - RNA, 16 nt, Human herpesvirus 5
gcgcacggcgcggucc

SEQ ID NO: 3977822 - RNA, 20 nt, Human herpesvirus 5
gcgcagacgucggcgguccu

SEQ ID NO: 3977823 - RNA, 19 nt, Human herpesvirus 5
gcgcagcgccagccuuagc

SEQ ID NO: 3977824 - RNA, 13 nt, Human herpesvirus 5
gcgcaggccgccg

SEQ ID NO: 3977825 - RNA, 21 nt, Human herpesvirus 5
gcgcagugcgccgagcggccg

SEQ ID NO: 3977826 - RNA, 18 nt, Human herpesvirus 5
gcgcccgcgccucacgcu

SEQ ID NO: 3977827 - RNA, 21 nt, Human herpesvirus 5
gcgcccgcgccucacgcugca

SEQ ID NO: 3977828 - RNA, 19 nt, Human herpesvirus 5
gcgccggccgucuccacca

SEQ ID NO: 3977829 - RNA, 15 nt, Human herpesvirus 5
gcgccgugcucagcg

SEQ ID NO: 3977830 - RNA, 22 nt, Human herpesvirus 5
gcgccgugcucuuggcgccgcg

SEQ ID NO: 3977831 - RNA, 14 nt, Human herpesvirus 5
gcgcgacacggugg

SEQ ID NO: 3977832 - RNA, 18 nt, Human herpesvirus 5
gcgcgcacccgacggcgg

SEQ ID NO: 3977833 - RNA, 12 nt, Human herpesvirus 5
gcgcgcagacgc

SEQ ID NO: 3977834 - RNA, 12 nt, Human herpesvirus 5
gcgcgccccggc

SEQ ID NO: 3977835 - RNA, 19 nt, Human herpesvirus 5
gcgcgcgguuucgccgccg

SEQ ID NO: 3977836 - RNA, 17 nt, Human herpesvirus 5
gcgcgcgucuggacgcg

SEQ ID NO: 3977837 - RNA, 14 nt, Human herpesvirus 5
gcgcggcggcagcu

SEQ ID NO: 3977838 - RNA, 21 nt, Human herpesvirus 5
gcgcguuuguugcgcggcgac

SEQ ID NO: 3977839 - RNA, 24 nt, Human herpesvirus 5
gcgcuacgaaacuuuucugcgggu

SEQ ID NO: 3977840 - RNA, 13 nt, Human herpesvirus 5
gcgcucccugcuc

SEQ ID NO: 3977841 - RNA, 17 nt, Human herpesvirus 5
gcgcucgcccccgguuu

SEQ ID NO: 3977842 - RNA, 14 nt, Human herpesvirus 5
gcgcucggucagcu

SEQ ID NO: 3977843 - RNA, 18 nt, Human herpesvirus 5
gcgcuuuugaccgcgagc

SEQ ID NO: 3977844 - RNA, 15 nt, Human herpesvirus 5
gcggacgccugcgac

SEQ ID NO: 3977845 - RNA, 13 nt, Human herpesvirus 5
gcggaggagguga

SEQ ID NO: 3977846 - RNA, 23 nt, Human herpesvirus 5
gcggaggauccaaggccuccagc

SEQ ID NO: 3977847 - RNA, 15 nt, Human herpesvirus 5
gcggauaggcaccug

SEQ ID NO: 3977848 - RNA, 15 nt, Human herpesvirus 5
gcggcaccagagaca

SEQ ID NO: 3977849 - RNA, 21 nt, Human herpesvirus 5
gcggcaccagagacagagacc

SEQ ID NO: 3977850 - RNA, 21 nt, Human herpesvirus 5
gcggcaccaggaacacggugg

SEQ ID NO: 3977851 - RNA, 16 nt, Human herpesvirus 5
gcggcagccacggagg

SEQ ID NO: 3977852 - RNA, 15 nt, Human herpesvirus 5
gcggccgcagaaggc

SEQ ID NO: 3977853 - RNA, 18 nt, Human herpesvirus 5
gcggccgugguggccgug

SEQ ID NO: 3977854 - RNA, 15 nt, Human herpesvirus 5
gcggcggacaggccu

SEQ ID NO: 3977855 - RNA, 12 nt, Human herpesvirus 5
gcggcgguggag

SEQ ID NO: 3977856 - RNA, 19 nt, Human herpesvirus 5
gcggcgugauugcaaagcc

SEQ ID NO: 3977857 - RNA, 15 nt, Human herpesvirus 5
gcggcugcgcgcucg

SEQ ID NO: 3977858 - RNA, 23 nt, Human herpesvirus 5
gcggcuguauuauuagacgccgg

SEQ ID NO: 3977859 - RNA, 15 nt, Human herpesvirus 5
gcgggagacuagguc

SEQ ID NO: 3977860 - RNA, 16 nt, Human herpesvirus 5
gcgggugccgggacag

SEQ ID NO: 3977861 - RNA, 14 nt, Human herpesvirus 5
gcggguggagauga

SEQ ID NO: 3977862 - RNA, 23 nt, Human herpesvirus 5
gcggucagaaaaagaaaacgccg

SEQ ID NO: 3977863 - RNA, 22 nt, Human herpesvirus 5
gcggucaugaguuggugcagcu

SEQ ID NO: 3977864 - RNA, 16 nt, Human herpesvirus 5
gcggugcaggccgcgc

SEQ ID NO: 3977865 - RNA, 20 nt, Human herpesvirus 5
gcggugcgcugcagccggag

SEQ ID NO: 3977866 - RNA, 20 nt, Human herpesvirus 5
gcggugggugguaaaaaccg

SEQ ID NO: 3977867 - RNA, 15 nt, Human herpesvirus 5
gcgguuauggcuccg

SEQ ID NO: 3977868 - RNA, 16 nt, Human herpesvirus 5
gcguagcgcuccugga

SEQ ID NO: 3977869 - RNA, 15 nt, Human herpesvirus 5
gcguaggacgacgug

SEQ ID NO: 3977870 - RNA, 20 nt, Human herpesvirus 5
gcguaugguuaugaccaagc

SEQ ID NO: 3977871 - RNA, 23 nt, Human herpesvirus 5
gcguauguuaucaucauggagcu

SEQ ID NO: 3977872 - RNA, 14 nt, Human herpesvirus 5
gcgucacagagggc

SEQ ID NO: 3977873 - RNA, 17 nt, Human herpesvirus 5
gcgucagaagacgagcu

SEQ ID NO: 3977874 - RNA, 16 nt, Human herpesvirus 5
gcgucagcggccgccg

SEQ ID NO: 3977875 - RNA, 17 nt, Human herpesvirus 5
gcgucccuggggcugcu

SEQ ID NO: 3977876 - RNA, 14 nt, Human herpesvirus 5
gcguccgacgccgg

SEQ ID NO: 3977877 - RNA, 20 nt, Human herpesvirus 5
gcgucgucaaggacggcgug

SEQ ID NO: 3977878 - RNA, 15 nt, Human herpesvirus 5
gcgugucccugccag

SEQ ID NO: 3977879 - RNA, 12 nt, Human herpesvirus 5
gcuacagggagu

SEQ ID NO: 3977880 - RNA, 13 nt, Human herpesvirus 5
gcuacaugugucc

SEQ ID NO: 3977881 - RNA, 17 nt, Human herpesvirus 5
gcuaccagcugcaggca

SEQ ID NO: 3977882 - RNA, 17 nt, Human herpesvirus 5
gcuacgcggcgcccgcg

SEQ ID NO: 3977883 - RNA, 23 nt, Human herpesvirus 5
gcuacgguggcgcgacggugaug

SEQ ID NO: 3977884 - RNA, 19 nt, Human herpesvirus 5
gcuacguaggccuccucuc

SEQ ID NO: 3977885 - RNA, 16 nt, Human herpesvirus 5
uucuuccucucaguca

SEQ ID NO: 3977886 - RNA, 13 nt, Human herpesvirus 5
uugacgcugcugg

SEQ ID NO: 3977887 - RNA, 21 nt, Human herpesvirus 5
uugagaguggugggaaugcac

SEQ ID NO: 3977888 - RNA, 16 nt, Human herpesvirus 5
uugagcacaaacugcg

SEQ ID NO: 3977889 - RNA, 23 nt, Human herpesvirus 5
uugaggcgcucgugaaacagcag

SEQ ID NO: 3977890 - RNA, 20 nt, Human herpesvirus 5
uugauuucaacaaauaccaa

SEQ ID NO: 3977891 - RNA, 12 nt, Human herpesvirus 5
uugcccgcaaaa

SEQ ID NO: 3977892 - RNA, 13 nt, Human herpesvirus 5
uugcggccgccgc

SEQ ID NO: 3977893 - RNA, 16 nt, Human herpesvirus 5
uugcgggcccugcuga

SEQ ID NO: 3977894 - RNA, 13 nt, Human herpesvirus 5
uugcugcaacggc

SEQ ID NO: 3977895 - RNA, 22 nt, Human herpesvirus 5
uugcuggcuuggcucgccuucc

SEQ ID NO: 3977896 - RNA, 22 nt, Human herpesvirus 5
uuggacgaugcuuuccuggaca

SEQ ID NO: 3977897 - RNA, 18 nt, Human herpesvirus 5
uuggccgaccugugcgug

SEQ ID NO: 3977898 - RNA, 18 nt, Human herpesvirus 5
uuggcggucgggucuguc

SEQ ID NO: 3977899 - RNA, 20 nt, Human herpesvirus 5
uuggugcucgaccaggaggu

SEQ ID NO: 3977900 - RNA, 14 nt, Human herpesvirus 5
uuguaucauuacag

SEQ ID NO: 3977901 - RNA, 12 nt, Human herpesvirus 5
uugucccggggg

SEQ ID NO: 3977902 - RNA, 18 nt, Human herpesvirus 5
uuguuagacuagcacaga

SEQ ID NO: 3977903 - RNA, 15 nt, Human herpesvirus 5
uuguugagcauaugu

SEQ ID NO: 3977904 - RNA, 12 nt, Human herpesvirus 5
uuucgccgccgg

SEQ ID NO: 3977905 - RNA, 16 nt, Human herpesvirus 5
uuucgcugccaacgcc

SEQ ID NO: 3977906 - RNA, 19 nt, Human herpesvirus 5
uuucuaucauaaacuguuc

SEQ ID NO: 3977907 - RNA, 17 nt, Human herpesvirus 5
uuucugcgucggagcuc

SEQ ID NO: 3977908 - RNA, 17 nt, Human herpesvirus 5
uuugauaaccuaccugg

SEQ ID NO: 3977909 - RNA, 17 nt, Human herpesvirus 5
uuuggaggauguucugc

SEQ ID NO: 3977910 - RNA, 19 nt, Human herpesvirus 5
uuuggcucuuuccugugca

SEQ ID NO: 3977911 - RNA, 14 nt, Human herpesvirus 5
uuuguaacacuaca

SEQ ID NO: 3977912 - RNA, 20 nt, Human herpesvirus 5
uuuuaucgucucaauaaaag

SEQ ID NO: 3977913 - RNA, 13 nt, Human herpesvirus 5
uuuuaucuuuaaa

SEQ ID NO: 3977914 - RNA, 18 nt, Human herpesvirus 5
cgggugccgggacagcgu

SEQ ID NO: 3977915 - RNA, 14 nt, Human herpesvirus 5
cgguaccagacgcg

SEQ ID NO: 3977916 - RNA, 17 nt, Human herpesvirus 5
cgguaccgucuccacca

SEQ ID NO: 3977917 - RNA, 18 nt, Human herpesvirus 5
cgguacugaagccgccgu

SEQ ID NO: 3977918 - RNA, 20 nt, Human herpesvirus 5
cgguauggcugcgcgccucc

SEQ ID NO: 3977919 - RNA, 12 nt, Human herpesvirus 5
cggucuguucag

SEQ ID NO: 3977920 - RNA, 16 nt, Human herpesvirus 5
cggugagacccgcguc

SEQ ID NO: 3977921 - RNA, 18 nt, Human herpesvirus 5
cggugaggaggacggcga

SEQ ID NO: 3977922 - RNA, 18 nt, Human herpesvirus 5
cgguggucggcugccgcc

SEQ ID NO: 3977923 - RNA, 16 nt, Human herpesvirus 5
cgguggugacugggga

SEQ ID NO: 3977924 - RNA, 19 nt, Human herpesvirus 5
cgguuuccacgccaccgcc

SEQ ID NO: 3977925 - RNA, 16 nt, Human herpesvirus 5
cguaacgguggaauaa

SEQ ID NO: 3977926 - RNA, 19 nt, Human herpesvirus 5
cguaagcggcagcaugggc

SEQ ID NO: 3977927 - RNA, 13 nt, Human herpesvirus 5
cguaauguagaca

SEQ ID NO: 3977928 - RNA, 17 nt, Human herpesvirus 5
cguacaccgcuggagcu

SEQ ID NO: 3977929 - RNA, 12 nt, Human herpesvirus 5
cguaccagcugu

SEQ ID NO: 3977930 - RNA, 16 nt, Human herpesvirus 5
cguacgccguguacca

SEQ ID NO: 3977931 - RNA, 15 nt, Human herpesvirus 5
cguacggcaacgagc

SEQ ID NO: 3977932 - RNA, 16 nt, Human herpesvirus 5
cguacugcgacggcag

SEQ ID NO: 3977933 - RNA, 21 nt, Human herpesvirus 5
cguagccuccuccaccacggc

SEQ ID NO: 3977934 - RNA, 18 nt, Human herpesvirus 5
cguaguuguugcagaagu

SEQ ID NO: 3977935 - RNA, 20 nt, Human herpesvirus 5
cguauacaacaguucuauca

SEQ ID NO: 3977936 - RNA, 13 nt, Human herpesvirus 5
cguauauucuaca

SEQ ID NO: 3977937 - RNA, 14 nt, Human herpesvirus 5
cguauccuggucaa

SEQ ID NO: 3977938 - RNA, 20 nt, Human herpesvirus 5
cgucacucuuggcacgggga

SEQ ID NO: 3977939 - RNA, 16 nt, Human herpesvirus 5
cguccacacaccgcuu

SEQ ID NO: 3977940 - RNA, 16 nt, Human herpesvirus 5
cguccacgggcugcgc

SEQ ID NO: 3977941 - RNA, 17 nt, Human herpesvirus 5
cguccagcuucugguag

SEQ ID NO: 3977942 - RNA, 13 nt, Human herpesvirus 5
cgucccuggggcu

SEQ ID NO: 3977943 - RNA, 14 nt, Human herpesvirus 5
cguccgcuggaaau

SEQ ID NO: 3977944 - RNA, 15 nt, Human herpesvirus 5
cguccgggcuuuccu

SEQ ID NO: 3977945 - RNA, 14 nt, Human herpesvirus 5
cguccucguggcgg

SEQ ID NO: 3977946 - RNA, 14 nt, Human herpesvirus 5
cgucgacaugucgc

SEQ ID NO: 3977947 - RNA, 13 nt, Human herpesvirus 5
cgucgaccuugag

SEQ ID NO: 3977948 - RNA, 17 nt, Human herpesvirus 5
cgucgacgcaucuguca

SEQ ID NO: 3977949 - RNA, 15 nt, Human herpesvirus 5
cgucgagcacccguc

SEQ ID NO: 3977950 - RNA, 18 nt, Human herpesvirus 5
cgucgccugcgacggcgg

SEQ ID NO: 3977951 - RNA, 19 nt, Human herpesvirus 5
cgucgggggggacuuggcu

SEQ ID NO: 3977952 - RNA, 13 nt, Human herpesvirus 5
cgucggucccauc

SEQ ID NO: 3977953 - RNA, 23 nt, Human herpesvirus 5
cgucgugagcagcgugcaccugc

SEQ ID NO: 3977954 - RNA, 18 nt, Human herpesvirus 5
cgucuaccggcgagggug

SEQ ID NO: 3977955 - RNA, 22 nt, Human herpesvirus 5
cgucuccaugauugugccgcgu

SEQ ID NO: 3977956 - RNA, 21 nt, Human herpesvirus 5
cgucugcacgccccggagugc

SEQ ID NO: 3977957 - RNA, 14 nt, Human herpesvirus 5
cgugcaucugccga

SEQ ID NO: 3977958 - RNA, 13 nt, Human herpesvirus 5
cgugccgagcugc

SEQ ID NO: 3977959 - RNA, 20 nt, Human herpesvirus 5
cgugcgacgcgacuaugagg

SEQ ID NO: 3977960 - RNA, 14 nt, Human herpesvirus 5
cgugcgaggacaac

SEQ ID NO: 3977961 - RNA, 21 nt, Human herpesvirus 5
cgugcgccuuccaguccauac

SEQ ID NO: 3977962 - RNA, 17 nt, Human herpesvirus 5
cgugcucaagaggugag

SEQ ID NO: 3977963 - RNA, 21 nt, Human herpesvirus 5
cgugcucaagaggugagggua

SEQ ID NO: 3977964 - RNA, 18 nt, Human herpesvirus 5
cgugcucagcugguggcu

SEQ ID NO: 3977965 - RNA, 22 nt, Human herpesvirus 5
cguggacgacuggcucaacuuu

SEQ ID NO: 3977966 - RNA, 15 nt, Human herpesvirus 5
cguggaggcagcggg

SEQ ID NO: 3977967 - RNA, 18 nt, Human herpesvirus 5
cguggcccuggucuggcc

SEQ ID NO: 3977968 - RNA, 20 nt, Human herpesvirus 5
cguggcguaggaguggcgcc

SEQ ID NO: 3977969 - RNA, 19 nt, Human herpesvirus 5
cguggugacugagcacagc

SEQ ID NO: 3977970 - RNA, 20 nt, Human herpesvirus 5
cgugguggccgugcugggcu

SEQ ID NO: 3977971 - RNA, 14 nt, Human herpesvirus 5
cguguggcagcugg

SEQ ID NO: 3977972 - RNA, 23 nt, Human herpesvirus 5
cgugugguagaagagcacgcgga

SEQ ID NO: 3977973 - RNA, 21 nt, Human herpesvirus 5
cguguguuggcuacggcggac

SEQ ID NO: 3977974 - RNA, 19 nt, Human herpesvirus 5
cguguuucaaacagcacau

SEQ ID NO: 3977975 - RNA, 19 nt, Human herpesvirus 5
cguuccguggagucgucuc

SEQ ID NO: 3977976 - RNA, 17 nt, Human herpesvirus 5
cguugaugcggcgcgua

SEQ ID NO: 3977977 - RNA, 19 nt, Human herpesvirus 5
cguuuugagauuucugucg

SEQ ID NO: 3977978 - RNA, 22 nt, Human herpesvirus 5
cuacaauguauagauacacgug

SEQ ID NO: 3977979 - RNA, 13 nt, Human herpesvirus 5
cuacagucccgag

SEQ ID NO: 3977980 - RNA, 15 nt, Human herpesvirus 5
cuaccagcccaggga

SEQ ID NO: 3977981 - RNA, 15 nt, Human herpesvirus 5
cuaccauccuuuuca

SEQ ID NO: 3977982 - RNA, 14 nt, Human herpesvirus 5
cuaccgugccaccu

SEQ ID NO: 3977983 - RNA, 16 nt, Human herpesvirus 5
cuacgaaacuuuucug

SEQ ID NO: 3977984 - RNA, 17 nt, Human herpesvirus 5
cuacgaugcgagccacg

SEQ ID NO: 3977985 - RNA, 13 nt, Human herpesvirus 5
cuacgcgaccagc

SEQ ID NO: 3977986 - RNA, 17 nt, Human herpesvirus 5
cuacgcgugcacgcgcu

SEQ ID NO: 3977987 - RNA, 17 nt, Human herpesvirus 5
cuacgcuacgaccuggc

SEQ ID NO: 3977988 - RNA, 19 nt, Human herpesvirus 5
cuacgcuccuacgacaaca

SEQ ID NO: 3977989 - RNA, 14 nt, Human herpesvirus 5
cuacggcugcaucg

SEQ ID NO: 3977990 - RNA, 23 nt, Human herpesvirus 5
cuacgguggcgcgacggugaugc

SEQ ID NO: 3977991 - RNA, 21 nt, Human herpesvirus 5
cuacucgcacaaccuguggug

SEQ ID NO: 3977992 - RNA, 12 nt, Human herpesvirus 5
cuacuuuggaau

SEQ ID NO: 3977993 - RNA, 15 nt, Human herpesvirus 5
cuagaaagaccaaga

SEQ ID NO: 3977994 - RNA, 15 nt, Human herpesvirus 5
cuagacagauucauc

SEQ ID NO: 3977995 - RNA, 20 nt, Human herpesvirus 5
cuagacaggguaacagccuu

SEQ ID NO: 3977996 - RNA, 14 nt, Human herpesvirus 5
cuagccgggcagga

SEQ ID NO: 3977997 - RNA, 21 nt, Human herpesvirus 5
cuagcgacggcggccauggag

SEQ ID NO: 3977998 - RNA, 15 nt, Human herpesvirus 5
cuagcuacuuuggaa

SEQ ID NO: 3977999 - RNA, 14 nt, Human herpesvirus 5
cuaguaaaaaaagu

SEQ ID NO: 3978000 - RNA, 20 nt, Human herpesvirus 5
cuaguaaaagggacgucaaa

SEQ ID NO: 3978001 - RNA, 16 nt, Human herpesvirus 5
cuaguaauaccaccgu

SEQ ID NO: 3978002 - RNA, 15 nt, Human herpesvirus 5
cuauagggaggacga

SEQ ID NO: 3978003 - RNA, 16 nt, Human herpesvirus 5
cuaucuguguccgccc

SEQ ID NO: 3978004 - RNA, 14 nt, Human herpesvirus 5
cucaaacaccgcug

SEQ ID NO: 3978005 - RNA, 21 nt, Human herpesvirus 5
cucaacuuuggcgugcccagc

SEQ ID NO: 3978006 - RNA, 20 nt, Human herpesvirus 5
cucaagaggaccguuaagcu

SEQ ID NO: 3978007 - RNA, 16 nt, Human herpesvirus 5
cucacccgaguccugg

SEQ ID NO: 3978008 - RNA, 17 nt, Human herpesvirus 5
cucacccggcugcuggc

SEQ ID NO: 3978009 - RNA, 20 nt, Human herpesvirus 5
cucaccgugcucgugcccau

SEQ ID NO: 3978010 - RNA, 21 nt, Human herpesvirus 5
cucagccucgucgugcccguc

SEQ ID NO: 3978011 - RNA, 21 nt, Human herpesvirus 5
cucagggcugggauccgccgc

SEQ ID NO: 3978012 - RNA, 17 nt, Human herpesvirus 5
cuccacgcucgagggcu

SEQ ID NO: 3978013 - RNA, 20 nt, Human herpesvirus 5
cuccacggccuccgacgagc

SEQ ID NO: 3978014 - RNA, 17 nt, Human herpesvirus 5
cuccccggugugucuau

SEQ ID NO: 3978015 - RNA, 12 nt, Human herpesvirus 5
cucccuucucug

SEQ ID NO: 3978016 - RNA, 13 nt, Human herpesvirus 5
cuccgacagcgcg

SEQ ID NO: 3978017 - RNA, 14 nt, Human herpesvirus 5
cuccgucugcguca

SEQ ID NO: 3978018 - RNA, 22 nt, Human herpesvirus 5
cuccgugcggcccccagaggcc

SEQ ID NO: 3978019 - RNA, 18 nt, Human herpesvirus 5
cuccucgucggccugggc

SEQ ID NO: 3978020 - RNA, 12 nt, Human herpesvirus 5
cuccucugccug

SEQ ID NO: 3978021 - RNA, 17 nt, Human herpesvirus 5
cucgaccggcggcugcu

SEQ ID NO: 3978022 - RNA, 15 nt, Human herpesvirus 5
cucgacguuucugau

SEQ ID NO: 3978023 - RNA, 22 nt, Human herpesvirus 5
cucgagcuuauugagcgcagcc

SEQ ID NO: 3978024 - RNA, 23 nt, Human herpesvirus 5
cucgaugcgccuccgguggugcg

SEQ ID NO: 3978025 - RNA, 19 nt, Human herpesvirus 5
cucgcaaagacgugccacg

SEQ ID NO: 3978026 - RNA, 23 nt, Human herpesvirus 5
cucgccuauacuauguguaugau

SEQ ID NO: 3978027 - RNA, 16 nt, Human herpesvirus 5
cucgcgcccgcuccuu

SEQ ID NO: 3978028 - RNA, 20 nt, Human herpesvirus 5
cucgcgucuuagacgcgcgg

SEQ ID NO: 3978029 - RNA, 18 nt, Human herpesvirus 5
gaagucucuuucucugcu

SEQ ID NO: 3978030 - RNA, 21 nt, Human herpesvirus 5
gaaguuguugcaacuguuguu

SEQ ID NO: 3978031 - RNA, 18 nt, Human herpesvirus 5
gaauacccagcuggggaa

SEQ ID NO: 3978032 - RNA, 14 nt, Human herpesvirus 5
gaaucagcagugag

SEQ ID NO: 3978033 - RNA, 11 nt, Human herpesvirus 5
gaauccggcug

SEQ ID NO: 3978034 - RNA, 22 nt, Human herpesvirus 5
gaauccuaaucgcauccugcau

SEQ ID NO: 3978035 - RNA, 18 nt, Human herpesvirus 5
gaaucgcgagcugggcga

SEQ ID NO: 3978036 - RNA, 16 nt, Human herpesvirus 5
gaaugaaccuuguaau

SEQ ID NO: 3978037 - RNA, 22 nt, Human herpesvirus 5
gaaugaaccuuguaaugcuuau

SEQ ID NO: 3978038 - RNA, 17 nt, Human herpesvirus 5
gaaugccucuacuugga

SEQ ID NO: 3978039 - RNA, 16 nt, Human herpesvirus 5
gacaacggcuggaaau

SEQ ID NO: 3978040 - RNA, 20 nt, Human herpesvirus 5
gacaagucguuucagcccaa

SEQ ID NO: 3978041 - RNA, 16 nt, Human herpesvirus 5
gacacagcagcaccag

SEQ ID NO: 3978042 - RNA, 22 nt, Human herpesvirus 5
gacacagcggaaaaugccgccg

SEQ ID NO: 3978043 - RNA, 14 nt, Human herpesvirus 5
gacacaugcacaau

SEQ ID NO: 3978044 - RNA, 20 nt, Human herpesvirus 5
gacacaugcacaauacgaua

SEQ ID NO: 3978045 - RNA, 14 nt, Human herpesvirus 5
gacaccucaauguu

SEQ ID NO: 3978046 - RNA, 15 nt, Human herpesvirus 5
gacacggcgagaccg

SEQ ID NO: 3978047 - RNA, 17 nt, Human herpesvirus 5
gacacuuuaggcggcgc

SEQ ID NO: 3978048 - RNA, 22 nt, Human herpesvirus 5
gacagcugcaauccgguaacgu

SEQ ID NO: 3978049 - RNA, 16 nt, Human herpesvirus 5
gacaggaggcugugcg

SEQ ID NO: 3978050 - RNA, 19 nt, Human herpesvirus 5
gacaggaggcugugcgcgc

SEQ ID NO: 3978051 - RNA, 18 nt, Human herpesvirus 5
gacauggagacaguuucc

SEQ ID NO: 3978052 - RNA, 19 nt, Human herpesvirus 5
gacauggagacaguuucca

SEQ ID NO: 3978053 - RNA, 18 nt, Human herpesvirus 5
gaccacaagcucagcauc

SEQ ID NO: 3978054 - RNA, 23 nt, Human herpesvirus 5
gaccacguagucgcgcgcgaagg

SEQ ID NO: 3978055 - RNA, 21 nt, Human herpesvirus 5
gaccagccaccgucccucagc

SEQ ID NO: 3978056 - RNA, 18 nt, Human herpesvirus 5
gacccacgacccgagccg

SEQ ID NO: 3978057 - RNA, 16 nt, Human herpesvirus 5
gacccagcgacagauc

SEQ ID NO: 3978058 - RNA, 14 nt, Human herpesvirus 5
gacccgccgccgcc

SEQ ID NO: 3978059 - RNA, 18 nt, Human herpesvirus 5
gaccgcagguuagcggcg

SEQ ID NO: 3978060 - RNA, 14 nt, Human herpesvirus 5
gaccgcggcgcagg

SEQ ID NO: 3978061 - RNA, 23 nt, Human herpesvirus 5
gaccggcagcaccaguuggccac

SEQ ID NO: 3978062 - RNA, 18 nt, Human herpesvirus 5
gaccggggugguggugcu

SEQ ID NO: 3978063 - RNA, 15 nt, Human herpesvirus 5
gaccguuguccccgc

SEQ ID NO: 3978064 - RNA, 23 nt, Human herpesvirus 5
gaccuguuuaccucaugcggcaa

SEQ ID NO: 3978065 - RNA, 21 nt, Human herpesvirus 5
gaccuugcggauacgccgccg

SEQ ID NO: 3978066 - RNA, 19 nt, Human herpesvirus 5
gacgaagugccgcgccgcc

SEQ ID NO: 3978067 - RNA, 22 nt, Human herpesvirus 5
gacgacgguuuccacgccaccg

SEQ ID NO: 3978068 - RNA, 17 nt, Human herpesvirus 5
gacgacguggccuccuc

SEQ ID NO: 3978069 - RNA, 14 nt, Human herpesvirus 5
gacgagcaggcucg

SEQ ID NO: 3978070 - RNA, 15 nt, Human herpesvirus 5
gacgauaugucgcga

SEQ ID NO: 3978071 - RNA, 18 nt, Human herpesvirus 5
gacgcgguaaggagcaaa

SEQ ID NO: 3978072 - RNA, 18 nt, Human herpesvirus 5
gacggcagcgucacagag

SEQ ID NO: 3978073 - RNA, 11 nt, Human herpesvirus 5
gacggcagcua

SEQ ID NO: 3978074 - RNA, 19 nt, Human herpesvirus 5
gacggcagcuaucgugacu

SEQ ID NO: 3978075 - RNA, 17 nt, Human herpesvirus 5
gacggcguuuuggcgcc

SEQ ID NO: 3978076 - RNA, 15 nt, Human herpesvirus 5
gacggcuccaagaaa

SEQ ID NO: 3978077 - RNA, 21 nt, Human herpesvirus 5
gacgggucucuuugacacgag

SEQ ID NO: 3978078 - RNA, 18 nt, Human herpesvirus 5
gacggugaugcguguggc

SEQ ID NO: 3978079 - RNA, 20 nt, Human herpesvirus 5
gacgguuuccacgccaccgc

SEQ ID NO: 3978080 - RNA, 13 nt, Human herpesvirus 5
gacgucaaugaca

SEQ ID NO: 3978081 - RNA, 16 nt, Human herpesvirus 5
gacgucggcgguccuc

SEQ ID NO: 3978082 - RNA, 22 nt, Human herpesvirus 5
gacgucggugguggcuguaggc

SEQ ID NO: 3978083 - RNA, 15 nt, Human herpesvirus 5
gacgugacgguguuu

SEQ ID NO: 3978084 - RNA, 21 nt, Human herpesvirus 5
gacucaccagacuuuuugcuu

SEQ ID NO: 3978085 - RNA, 21 nt, Human herpesvirus 5
gacucagggcugggauccgcc

SEQ ID NO: 3978086 - RNA, 14 nt, Human herpesvirus 5
gacucgcggaugac

SEQ ID NO: 3978087 - RNA, 22 nt, Human herpesvirus 5
gacucgcugccgcagcugcugg

SEQ ID NO: 3978088 - RNA, 23 nt, Human herpesvirus 5
gacucgcugccgcagcugcugga

SEQ ID NO: 3978089 - RNA, 23 nt, Human herpesvirus 5
gacucggguguccuacaaaggaa

SEQ ID NO: 3978090 - RNA, 13 nt, Human herpesvirus 5
gacuggagagacu

SEQ ID NO: 3978091 - RNA, 15 nt, Human herpesvirus 5
gacuggucuggcccg

SEQ ID NO: 3978092 - RNA, 17 nt, Human herpesvirus 5
gacuuagaaucucuugc

SEQ ID NO: 3978093 - RNA, 22 nt, Human herpesvirus 5
gacuugaguaccaagugccgcc

SEQ ID NO: 3978094 - RNA, 14 nt, Human herpesvirus 5
gagacacuugaaua

SEQ ID NO: 3978095 - RNA, 14 nt, Human herpesvirus 5
gagacccggcuggc

SEQ ID NO: 3978096 - RNA, 15 nt, Human herpesvirus 5
gagaccgccgccgcg

SEQ ID NO: 3978097 - RNA, 13 nt, Human herpesvirus 5
gagagucugaaac

SEQ ID NO: 3978098 - RNA, 22 nt, Human herpesvirus 5
gagauccaguuacacucgcucu

SEQ ID NO: 3978099 - RNA, 19 nt, Human herpesvirus 5
gagcagcaaaacgaccaga

SEQ ID NO: 3978100 - RNA, 16 nt, Human herpesvirus 5
gagcaggucucgcgca

SEQ ID NO: 3978101 - RNA, 20 nt, Human herpesvirus 5
gagccgccgacgcuggcgcu

SEQ ID NO: 3978102 - RNA, 13 nt, Human herpesvirus 5
gagcgccgacugg

SEQ ID NO: 3978103 - RNA, 14 nt, Human herpesvirus 5
gagcgccggcgagc

SEQ ID NO: 3978104 - RNA, 16 nt, Human herpesvirus 5
gagcgcgaccgccuca

SEQ ID NO: 3978105 - RNA, 23 nt, Human herpesvirus 5
gaggaccauuuccaugugcagcu

SEQ ID NO: 3978106 - RNA, 12 nt, Human herpesvirus 5
gaggagcaggcu

SEQ ID NO: 3978107 - RNA, 17 nt, Human herpesvirus 5
gaggagcgccggggaga

SEQ ID NO: 3978108 - RNA, 16 nt, Human herpesvirus 5
gaggagugucagacac

SEQ ID NO: 3978109 - RNA, 21 nt, Human herpesvirus 5
gaggcacauacgggacuuaca

SEQ ID NO: 3978110 - RNA, 23 nt, Human herpesvirus 5
gaggcgcucgugaaacagcagcu

SEQ ID NO: 3978111 - RNA, 15 nt, Human herpesvirus 5
gaggcggaggagccg

SEQ ID NO: 3978112 - RNA, 15 nt, Human herpesvirus 5
gaggcucuguggacc

SEQ ID NO: 3978113 - RNA, 15 nt, Human herpesvirus 5
gaggcuguggccagc

SEQ ID NO: 3978114 - RNA, 13 nt, Human herpesvirus 5
gagguacugcagc

SEQ ID NO: 3978115 - RNA, 20 nt, Human herpesvirus 5
gaggucugggaugugcagca

SEQ ID NO: 3978116 - RNA, 17 nt, Human herpesvirus 5
gagguugucguccgaau

SEQ ID NO: 3978117 - RNA, 20 nt, Human herpesvirus 5
gaguaccgcauuacugggac

SEQ ID NO: 3978118 - RNA, 15 nt, Human herpesvirus 5
gaguccuggucuuuc

SEQ ID NO: 3978119 - RNA, 17 nt, Human herpesvirus 5
gagugguggcggcagcc

SEQ ID NO: 3978120 - RNA, 13 nt, Human herpesvirus 5
gauaaacgucacg

SEQ ID NO: 3978121 - RNA, 16 nt, Human herpesvirus 5
gauacagggugccgcc

SEQ ID NO: 3978122 - RNA, 20 nt, Human herpesvirus 5
gauacauugcccuucuggag

SEQ ID NO: 3978123 - RNA, 22 nt, Human herpesvirus 5
gauaccgggcgccgggacucug

SEQ ID NO: 3978124 - RNA, 20 nt, Human herpesvirus 5
gaucagcgaggccgaagccg

SEQ ID NO: 3978125 - RNA, 12 nt, Human herpesvirus 5
gauccagcugcu

SEQ ID NO: 3978126 - RNA, 11 nt, Human herpesvirus 5
gauccaggagg

SEQ ID NO: 3978127 - RNA, 21 nt, Human herpesvirus 5
gauccaguugcaccucgaccu

SEQ ID NO: 3978128 - RNA, 19 nt, Human herpesvirus 5
gauccuuggaagagggaag

SEQ ID NO: 3978129 - RNA, 15 nt, Human herpesvirus 5
gaucgcgccgccucg

SEQ ID NO: 3978130 - RNA, 17 nt, Human herpesvirus 5
gaucguacccaccaccu

SEQ ID NO: 3978131 - RNA, 10 nt, Human herpesvirus 5
gaugaaccuc

SEQ ID NO: 3978132 - RNA, 22 nt, Human herpesvirus 5
gaugaacguggugaggggcgug

SEQ ID NO: 3978133 - RNA, 19 nt, Human herpesvirus 5
gaugaacuguuccacggcc

SEQ ID NO: 3978134 - RNA, 23 nt, Human herpesvirus 5
accccuuuuggugugugucuaua

SEQ ID NO: 3978135 - RNA, 20 nt, Human herpesvirus 5
acccggcugcacguggccug

SEQ ID NO: 3978136 - RNA, 23 nt, Human herpesvirus 5
acccucaaaacaucaccaccauc

SEQ ID NO: 3978137 - RNA, 16 nt, Human herpesvirus 5
acccucgcgcggaguc

SEQ ID NO: 3978138 - RNA, 20 nt, Human herpesvirus 5
acccugcguccccgcacgac

SEQ ID NO: 3978139 - RNA, 17 nt, Human herpesvirus 5
accgacaaggcgcggcg

SEQ ID NO: 3978140 - RNA, 15 nt, Human herpesvirus 5
accgacauggagccc

SEQ ID NO: 3978141 - RNA, 19 nt, Human herpesvirus 5
accgacgacgacagucucc

SEQ ID NO: 3978142 - RNA, 14 nt, Human herpesvirus 5
accgagacggagga

SEQ ID NO: 3978143 - RNA, 16 nt, Human herpesvirus 5
accgcaguugcugccu

SEQ ID NO: 3978144 - RNA, 20 nt, Human herpesvirus 5
accgccguucggcucuccuc

SEQ ID NO: 3978145 - RNA, 13 nt, Human herpesvirus 5
accgcgacggcga

SEQ ID NO: 3978146 - RNA, 15 nt, Human herpesvirus 5
accgcgagcggcgga

SEQ ID NO: 3978147 - RNA, 16 nt, Human herpesvirus 5
accgcggcaccuacca

SEQ ID NO: 3978148 - RNA, 19 nt, Human herpesvirus 5
accgcuacaacgcgcgccu

SEQ ID NO: 3978149 - RNA, 23 nt, Human herpesvirus 5
accggccuccgacgacgccgagg

SEQ ID NO: 3978150 - RNA, 21 nt, Human herpesvirus 5
accggggugguggugcugcug

SEQ ID NO: 3978151 - RNA, 17 nt, Human herpesvirus 5
accgguuggagcagcuc

SEQ ID NO: 3978152 - RNA, 13 nt, Human herpesvirus 5
accgucagcugcg

SEQ ID NO: 3978153 - RNA, 16 nt, Human herpesvirus 5
accgucgucgcucuag

SEQ ID NO: 3978154 - RNA, 14 nt, Human herpesvirus 5
accgugcacgcgcu

SEQ ID NO: 3978155 - RNA, 16 nt, Human herpesvirus 5
accucagucaccgagu

SEQ ID NO: 3978156 - RNA, 22 nt, Human herpesvirus 5
accuccuccucccucgcgccgc

SEQ ID NO: 3978157 - RNA, 19 nt, Human herpesvirus 5
accucguuguccucuccuc

SEQ ID NO: 3978158 - RNA, 14 nt, Human herpesvirus 5
accucucgggccga

SEQ ID NO: 3978159 - RNA, 22 nt, Human herpesvirus 5
accucuuuccauucuuccgugu

SEQ ID NO: 3978160 - RNA, 14 nt, Human herpesvirus 5
accucuuugagcac

SEQ ID NO: 3978161 - RNA, 14 nt, Human herpesvirus 5
accuggaucugccc

SEQ ID NO: 3978162 - RNA, 23 nt, Human herpesvirus 5
accuguuggagcaacgggcggcc

SEQ ID NO: 3978163 - RNA, 16 nt, Human herpesvirus 5
acgaacgacguacguc

SEQ ID NO: 3978164 - RNA, 14 nt, Human herpesvirus 5
acgacauauguuuu

SEQ ID NO: 3978165 - RNA, 22 nt, Human herpesvirus 5
acgaccuccgcgucggucgccg

SEQ ID NO: 3978166 - RNA, 16 nt, Human herpesvirus 5
acgacgggacggcggc

SEQ ID NO: 3978167 - RNA, 17 nt, Human herpesvirus 5
acgagcaucgcaacaac

SEQ ID NO: 3978168 - RNA, 21 nt, Human herpesvirus 5
acgagcaucgcaacaacagca

SEQ ID NO: 3978169 - RNA, 19 nt, Human herpesvirus 5
acgagcgccguccugcaga

SEQ ID NO: 3978170 - RNA, 20 nt, Human herpesvirus 5
acgagcuggacaaguacagc

SEQ ID NO: 3978171 - RNA, 15 nt, Human herpesvirus 5
acgaucgcuggaaag

SEQ ID NO: 3978172 - RNA, 18 nt, Human herpesvirus 5
acgaugcuuuccuggaca

SEQ ID NO: 3978173 - RNA, 15 nt, Human herpesvirus 5
acgcaaacgcgggcc

SEQ ID NO: 3978174 - RNA, 21 nt, Human herpesvirus 5
acgcagcgggaaaccgcgucg

SEQ ID NO: 3978175 - RNA, 18 nt, Human herpesvirus 5
acgcaggugaggcucucg

SEQ ID NO: 3978176 - RNA, 19 nt, Human herpesvirus 5
acgccaaguaccuaugcgc

SEQ ID NO: 3978177 - RNA, 13 nt, Human herpesvirus 5
acgccacgucgga

SEQ ID NO: 3978178 - RNA, 16 nt, Human herpesvirus 5
acgcccuguaugagcu

SEQ ID NO: 3978179 - RNA, 18 nt, Human herpesvirus 5
acgccgaucauguccgag

SEQ ID NO: 3978180 - RNA, 17 nt, Human herpesvirus 5
acgccgcgcgaacgacg

SEQ ID NO: 3978181 - RNA, 23 nt, Human herpesvirus 5
acgccggcggagacgacggcggu

SEQ ID NO: 3978182 - RNA, 21 nt, Human herpesvirus 5
acgccggggaagccuccggaa

SEQ ID NO: 3978183 - RNA, 18 nt, Human herpesvirus 5
acgccgucaaggccgccu

SEQ ID NO: 3978184 - RNA, 17 nt, Human herpesvirus 5
acgccguugccacgagc

SEQ ID NO: 3978185 - RNA, 24 nt, Human herpesvirus 5
acgcgacuaugagggccugcggcg

SEQ ID NO: 3978186 - RNA, 22 nt, Human herpesvirus 5
acgcgauuggccagcacgggga

SEQ ID NO: 3978187 - RNA, 14 nt, Human herpesvirus 5
acgcgccgggcggc

SEQ ID NO: 3978188 - RNA, 22 nt, Human herpesvirus 5
acgcgcgcacggcgcggucccg

SEQ ID NO: 3978189 - RNA, 15 nt, Human herpesvirus 5
acgcgcggcuagagc

SEQ ID NO: 3978190 - RNA, 13 nt, Human herpesvirus 5
acgcggcagcggc

SEQ ID NO: 3978191 - RNA, 19 nt, Human herpesvirus 5
acgcggcguauccucaagu

SEQ ID NO: 3978192 - RNA, 20 nt, Human herpesvirus 5
acgcggucaugaguuggugc

SEQ ID NO: 3978193 - RNA, 19 nt, Human herpesvirus 5
acgcggugcagguucugaa

SEQ ID NO: 3978194 - RNA, 21 nt, Human herpesvirus 5
acgcgucagggcggugcggcg

SEQ ID NO: 3978195 - RNA, 17 nt, Human herpesvirus 5
acgcucgcucugacgcc

SEQ ID NO: 3978196 - RNA, 21 nt, Human herpesvirus 5
acgcugcgucgcagucagacc

SEQ ID NO: 3978197 - RNA, 14 nt, Human herpesvirus 5
acggaccgcagcac

SEQ ID NO: 3978198 - RNA, 15 nt, Human herpesvirus 5
acggacggcaaggcg

SEQ ID NO: 3978199 - RNA, 15 nt, Human herpesvirus 5
acggagcacgggcug

SEQ ID NO: 3978200 - RNA, 19 nt, Human herpesvirus 5
acggaguggugagcggguu

SEQ ID NO: 3978201 - RNA, 16 nt, Human herpesvirus 5
acggcaaggcggagga

SEQ ID NO: 3978202 - RNA, 11 nt, Human herpesvirus 5
acggccgccgc

SEQ ID NO: 3978203 - RNA, 19 nt, Human herpesvirus 5
acggcgguuucagcuggca

SEQ ID NO: 3978204 - RNA, 20 nt, Human herpesvirus 5
acggcguuuuggcgcccccc

SEQ ID NO: 3978205 - RNA, 20 nt, Human herpesvirus 5
acgggaggcugaucgcggcc

SEQ ID NO: 3978206 - RNA, 23 nt, Human herpesvirus 5
acggggcuggguggagagggaag

SEQ ID NO: 3978207 - RNA, 19 nt, Human herpesvirus 5
acgggggggaccgggggcg

SEQ ID NO: 3978208 - RNA, 19 nt, Human herpesvirus 5
acgguacgcagucacugcg

SEQ ID NO: 3978209 - RNA, 20 nt, Human herpesvirus 5
acggugaugcguguggccgc

SEQ ID NO: 3978210 - RNA, 22 nt, Human herpesvirus 5
acggugccauggaccugaccug

SEQ ID NO: 3978211 - RNA, 12 nt, Human herpesvirus 5
acgguggugugu

SEQ ID NO: 3978212 - RNA, 20 nt, Human herpesvirus 5
acgguuacuccacaaccugu

SEQ ID NO: 3978213 - RNA, 10 nt, Human herpesvirus 5
acgguuugac

SEQ ID NO: 3978214 - RNA, 17 nt, Human herpesvirus 5
acguagaaaaagaggaa

SEQ ID NO: 3978215 - RNA, 16 nt, Human herpesvirus 5
acguaggccuccucuc

SEQ ID NO: 3978216 - RNA, 15 nt, Human herpesvirus 5
acgucacgccagacu

SEQ ID NO: 3978217 - RNA, 15 nt, Human herpesvirus 5
acgucccgcgcggau

SEQ ID NO: 3978218 - RNA, 12 nt, Human herpesvirus 5
acgucuucugaa

SEQ ID NO: 3978219 - RNA, 14 nt, Human herpesvirus 5
acgugcgaccugga

SEQ ID NO: 3978220 - RNA, 20 nt, Human herpesvirus 5
acgugcuuuuggugcgccac

SEQ ID NO: 3978221 - RNA, 17 nt, Human herpesvirus 5
acguggguuucggugac

SEQ ID NO: 3978222 - RNA, 20 nt, Human herpesvirus 5
acgugguaacgauggcggcc

SEQ ID NO: 3978223 - RNA, 22 nt, Human herpesvirus 5
acgugguuuuuuuaacagugug

SEQ ID NO: 3978224 - RNA, 15 nt, Human herpesvirus 5
acguguccgcggaca

SEQ ID NO: 3978225 - RNA, 20 nt, Human herpesvirus 5
acguguuucaaacagcacau

SEQ ID NO: 3978226 - RNA, 22 nt, Human herpesvirus 5
acguguuucgcgaacuggcgcg

SEQ ID NO: 3978227 - RNA, 14 nt, Human herpesvirus 5
acguucgucgugac

SEQ ID NO: 3978228 - RNA, 23 nt, Human herpesvirus 5
acguugcuaggucccuuaacugu

SEQ ID NO: 3978229 - RNA, 18 nt, Human herpesvirus 5
acuacagaauugauuuca

SEQ ID NO: 3978230 - RNA, 16 nt, Human herpesvirus 5
acuaccgugccaccug

SEQ ID NO: 3978231 - RNA, 12 nt, Human herpesvirus 5
acuaccuccccu

SEQ ID NO: 3978232 - RNA, 20 nt, Human herpesvirus 5
acuagcgaaguacacaguuu

SEQ ID NO: 3978233 - RNA, 18 nt, Human herpesvirus 5
acuaucgacguguuauca

SEQ ID NO: 3978234 - RNA, 14 nt, Human herpesvirus 5
acuauuguauacuc

SEQ ID NO: 3978235 - RNA, 13 nt, Human herpesvirus 5
acucagaggccac

SEQ ID NO: 3978236 - RNA, 14 nt, Human herpesvirus 5
acugaaaacaccau

SEQ ID NO: 3978237 - RNA, 14 nt, Human herpesvirus 5
acugacacagcucc

SEQ ID NO: 3978238 - RNA, 21 nt, Human herpesvirus 5
acugcuauguaucaucuuuau

SEQ ID NO: 3978239 - RNA, 23 nt, Human herpesvirus 5
acugcuauguaucaucuuuauuu

SEQ ID NO: 3978240 - RNA, 18 nt, Human herpesvirus 5
acuggaccacguuguccg

SEQ ID NO: 3978241 - RNA, 18 nt, Human herpesvirus 5
acugggagacggccugga

SEQ ID NO: 3978242 - RNA, 15 nt, Human herpesvirus 5
acugggccucggcgu

SEQ ID NO: 3978243 - RNA, 12 nt, Human herpesvirus 5
acuuucaaugau

SEQ ID NO: 3978244 - RNA, 15 nt, Human herpesvirus 5
acuuucuccuuuggu

SEQ ID NO: 3978245 - RNA, 14 nt, Human herpesvirus 5
acuuuggcucuuuc

SEQ ID NO: 3978246 - RNA, 13 nt, Human herpesvirus 5
agaagcacggaga

SEQ ID NO: 3978247 - RNA, 19 nt, Human herpesvirus 5
agaauacuggaagcugcug

SEQ ID NO: 3978248 - RNA, 14 nt, Human herpesvirus 5
agaaugcugcucag

SEQ ID NO: 3978249 - RNA, 15 nt, Human herpesvirus 5
agaauggaccgucga

SEQ ID NO: 3978250 - RNA, 12 nt, Human herpesvirus 5
agacacuugaau

SEQ ID NO: 3978251 - RNA, 14 nt, Human herpesvirus 5
agacagacaggaca

SEQ ID NO: 3978252 - RNA, 18 nt, Human herpesvirus 5
agacaggcggccagcuuc

SEQ ID NO: 3978253 - RNA, 21 nt, Human herpesvirus 5
agacauuccccaccuucccuc

SEQ ID NO: 3978254 - RNA, 18 nt, Human herpesvirus 5
agaccaugacgacgguga

SEQ ID NO: 3978255 - RNA, 20 nt, Human herpesvirus 5
agaccgcaacaacagcagca

SEQ ID NO: 3978256 - RNA, 23 nt, Human herpesvirus 5
agaccgugggucgggagcacaua

SEQ ID NO: 3978257 - RNA, 23 nt, Human herpesvirus 5
agaccucauguacgccaccgauc

SEQ ID NO: 3978258 - RNA, 15 nt, Human herpesvirus 5
agacgaagaggacac

SEQ ID NO: 3978259 - RNA, 12 nt, Human herpesvirus 5
agacggccugga

SEQ ID NO: 3978260 - RNA, 14 nt, Human herpesvirus 5
agacugugguggga

SEQ ID NO: 3978261 - RNA, 20 nt, Human herpesvirus 5
agagacguugauaauaaccg

SEQ ID NO: 3978262 - RNA, 14 nt, Human herpesvirus 5
agagagucugaaac

SEQ ID NO: 3978263 - RNA, 19 nt, Human herpesvirus 5
agaggaagucgaucuggaa

SEQ ID NO: 3978264 - RNA, 20 nt, Human herpesvirus 5
agaguggugggaaugcacgu

SEQ ID NO: 3978265 - RNA, 14 nt, Human herpesvirus 5
agaucgucuacggc

SEQ ID NO: 3978266 - RNA, 21 nt, Human herpesvirus 5
agcacagagacaccaauugcu

SEQ ID NO: 3978267 - RNA, 12 nt, Human herpesvirus 5
agcaccgccggc

SEQ ID NO: 3978268 - RNA, 14 nt, Human herpesvirus 5
agcacuaccagcug

SEQ ID NO: 3978269 - RNA, 13 nt, Human herpesvirus 5
agcacugacaggg

SEQ ID NO: 3978270 - RNA, 21 nt, Human herpesvirus 5
agcagcaaugucguaguacaa

SEQ ID NO: 3978271 - RNA, 21 nt, Human herpesvirus 5
agcagcaucuggcgcggucug

SEQ ID NO: 3978272 - RNA, 17 nt, Human herpesvirus 5
agcagccgacacagcgg

SEQ ID NO: 3978273 - RNA, 13 nt, Human herpesvirus 5
agcauacggggag

SEQ ID NO: 3978274 - RNA, 18 nt, Human herpesvirus 5
agcccaaguucagcagca

SEQ ID NO: 3978275 - RNA, 17 nt, Human herpesvirus 5
agcccauccucguggaa

SEQ ID NO: 3978276 - RNA, 17 nt, Human herpesvirus 5
agcccgggccgccgcca

SEQ ID NO: 3978277 - RNA, 22 nt, Human herpesvirus 5
agcccggucggucuuccugcug

SEQ ID NO: 3978278 - RNA, 16 nt, Human herpesvirus 5
agcccguggcccagga

SEQ ID NO: 3978279 - RNA, 13 nt, Human herpesvirus 5
agccgagcgggag

SEQ ID NO: 3978280 - RNA, 11 nt, Human herpesvirus 5
agccggcagcu

SEQ ID NO: 3978281 - RNA, 12 nt, Human herpesvirus 5
agccggcagcug

SEQ ID NO: 3978282 - RNA, 15 nt, Human herpesvirus 5
agccggggugccgcc

SEQ ID NO: 3978283 - RNA, 14 nt, Human herpesvirus 5
agccugccgccggc

SEQ ID NO: 3978284 - RNA, 20 nt, Human herpesvirus 5
agcgacgucccgcgcggauc

SEQ ID NO: 3978285 - RNA, 23 nt, Human herpesvirus 5
agcgaguggggcaacugcugccu

SEQ ID NO: 3978286 - RNA, 19 nt, Human herpesvirus 5
agcgccagcggccuggccu

SEQ ID NO: 3978287 - RNA, 14 nt, Human herpesvirus 5
agcgcggcggcagc

SEQ ID NO: 3978288 - RNA, 14 nt, Human herpesvirus 5
agcgcgugaccugu

SEQ ID NO: 3978289 - RNA, 19 nt, Human herpesvirus 5
agcggcaggaaggccucgu

SEQ ID NO: 3978290 - RNA, 18 nt, Human herpesvirus 5
agcggcgcgccccggcgu

SEQ ID NO: 3978291 - RNA, 23 nt, Human herpesvirus 5
agcggcggcgguggugacugggg

SEQ ID NO: 3978292 - RNA, 21 nt, Human herpesvirus 5
agcggcgugauugcaaagccg

SEQ ID NO: 3978293 - RNA, 18 nt, Human herpesvirus 5
agcggcucgccgcagacc

SEQ ID NO: 3978294 - RNA, 17 nt, Human herpesvirus 5
agcggcucgggcuggcg

SEQ ID NO: 3978295 - RNA, 22 nt, Human herpesvirus 5
agcggcuguggcuucucuggag

SEQ ID NO: 3978296 - RNA, 22 nt, Human herpesvirus 5
agcggggguguauagaccccaa

SEQ ID NO: 3978297 - RNA, 22 nt, Human herpesvirus 5
agcguaaauccccgugugaugu

SEQ ID NO: 3978298 - RNA, 18 nt, Human herpesvirus 5
agcgucagaagacgagcu

SEQ ID NO: 3978299 - RNA, 16 nt, Human herpesvirus 5
agcguccgcuggaaau

SEQ ID NO: 3978300 - RNA, 22 nt, Human herpesvirus 5
agcguucaacacuuucucugga

SEQ ID NO: 3978301 - RNA, 16 nt, Human herpesvirus 5
agcucccgcgguccga

SEQ ID NO: 3978302 - RNA, 18 nt, Human herpesvirus 5
agcucguuucgccggcgc

SEQ ID NO: 3978303 - RNA, 14 nt, Human herpesvirus 5
agcucugucggcgc

SEQ ID NO: 3978304 - RNA, 17 nt, Human herpesvirus 5
agcugcuuucuuuuugc

SEQ ID NO: 3978305 - RNA, 17 nt, Human herpesvirus 5
agcuggugaucggccgc

SEQ ID NO: 3978306 - RNA, 16 nt, Human herpesvirus 5
agcuuuagccagguga

SEQ ID NO: 3978307 - RNA, 17 nt, Human herpesvirus 5
agcuuucuugacuggcc

SEQ ID NO: 3978308 - RNA, 15 nt, Human herpesvirus 5
aggaaugcaugugga

SEQ ID NO: 3978309 - RNA, 23 nt, Human herpesvirus 5
aggaaugcggcacccggcugcac

SEQ ID NO: 3978310 - RNA, 15 nt, Human herpesvirus 5
aggaauucaucuauc

SEQ ID NO: 3978311 - RNA, 17 nt, Human herpesvirus 5
aggaauuggcaggaaag

SEQ ID NO: 3978312 - RNA, 17 nt, Human herpesvirus 5
aggacaaaaaguacacu

SEQ ID NO: 3978313 - RNA, 23 nt, Human herpesvirus 5
aggaccauuuccaugugcagcug

SEQ ID NO: 3978314 - RNA, 18 nt, Human herpesvirus 5
aggacucgcucacgucgu

SEQ ID NO: 3978315 - RNA, 15 nt, Human herpesvirus 5
aggagacaccgucgc

SEQ ID NO: 3978316 - RNA, 18 nt, Human herpesvirus 5
aggaggccgagacgcugc

SEQ ID NO: 3978317 - RNA, 23 nt, Human herpesvirus 5
aggaggccgcacuggacgacguc

SEQ ID NO: 3978318 - RNA, 13 nt, Human herpesvirus 5
aggaguggcugcu

SEQ ID NO: 3978319 - RNA, 16 nt, Human herpesvirus 5
aggauucugagggccg

SEQ ID NO: 3978320 - RNA, 23 nt, Human herpesvirus 5
aggccaccgggacggccugggcg

SEQ ID NO: 3978321 - RNA, 19 nt, Human herpesvirus 5
aggccagcugccaccaggg

SEQ ID NO: 3978322 - RNA, 14 nt, Human herpesvirus 5
aggccguggagaug

SEQ ID NO: 3978323 - RNA, 14 nt, Human herpesvirus 5
aggccuccagcgcc

SEQ ID NO: 3978324 - RNA, 20 nt, Human herpesvirus 5
aggcggcgccggcgccuggu

SEQ ID NO: 3978325 - RNA, 16 nt, Human herpesvirus 5
aggcggcucgcuggaa

SEQ ID NO: 3978326 - RNA, 16 nt, Human herpesvirus 5
aggcugugcgcgccgg

SEQ ID NO: 3978327 - RNA, 21 nt, Human herpesvirus 5
agggaaaacauaagaauagga

SEQ ID NO: 3978328 - RNA, 17 nt, Human herpesvirus 5
agggacacguagauccc

SEQ ID NO: 3978329 - RNA, 17 nt, Human herpesvirus 5
agggccgauggcugccc

SEQ ID NO: 3978330 - RNA, 22 nt, Human herpesvirus 5
agggcucuucacggucgggcac

SEQ ID NO: 3978331 - RNA, 17 nt, Human herpesvirus 5
agggcugcucggcggcc

SEQ ID NO: 3978332 - RNA, 16 nt, Human herpesvirus 5
aggguagaaacgugag

SEQ ID NO: 3978333 - RNA, 15 nt, Human herpesvirus 5
aggguaucuggggag

SEQ ID NO: 3978334 - RNA, 14 nt, Human herpesvirus 5
agguacggacucua

SEQ ID NO: 3978335 - RNA, 18 nt, Human herpesvirus 5
aggucacacugggagacg

SEQ ID NO: 3978336 - RNA, 18 nt, Human herpesvirus 5
aggugcgccgcagcggcu

SEQ ID NO: 3978337 - RNA, 12 nt, Human herpesvirus 5
agguggaggaca

SEQ ID NO: 3978338 - RNA, 18 nt, Human herpesvirus 5
aggugggguggcucuugc

SEQ ID NO: 3978339 - RNA, 20 nt, Human herpesvirus 5
agguucuaagaccgcggcgc

SEQ ID NO: 3978340 - RNA, 17 nt, Human herpesvirus 5
agguuugucuggcggcu

SEQ ID NO: 3978341 - RNA, 19 nt, Human herpesvirus 5
aguacaaaacaggaaagga

SEQ ID NO: 3978342 - RNA, 12 nt, Human herpesvirus 5
aguagugguggg

SEQ ID NO: 3978343 - RNA, 20 nt, Human herpesvirus 5
aguaugaaagucccgugugu

SEQ ID NO: 3978344 - RNA, 20 nt, Human herpesvirus 5
aguaugaaaguuggcugcgc

SEQ ID NO: 3978345 - RNA, 23 nt, Human herpesvirus 5
aguccaccaggccgcaaagcugg

SEQ ID NO: 3978346 - RNA, 22 nt, Human herpesvirus 5
agucguaagaagcgcgaggacg

SEQ ID NO: 3978347 - RNA, 22 nt, Human herpesvirus 5
agucuagacaggguaacagccu

SEQ ID NO: 3978348 - RNA, 18 nt, Human herpesvirus 5
agucucuuucucugcuuc

SEQ ID NO: 3978349 - RNA, 15 nt, Human herpesvirus 5
agugacguggauacu

SEQ ID NO: 3978350 - RNA, 19 nt, Human herpesvirus 5
agugacguggauacuagua

SEQ ID NO: 3978351 - RNA, 18 nt, Human herpesvirus 5
agugcgccaagccaugca

SEQ ID NO: 3978352 - RNA, 14 nt, Human herpesvirus 5
agugcgcgcggcgc

SEQ ID NO: 3978353 - RNA, 23 nt, Human herpesvirus 5
aguggaugcgcgaagcugcgcag

SEQ ID NO: 3978354 - RNA, 18 nt, Human herpesvirus 5
aguggauuugggcgugga

SEQ ID NO: 3978355 - RNA, 15 nt, Human herpesvirus 5
aguggcgccccggcu

SEQ ID NO: 3978356 - RNA, 13 nt, Human herpesvirus 5
agugggccagccc

SEQ ID NO: 3978357 - RNA, 20 nt, Human herpesvirus 5
aguggucuuucacaucgcca

SEQ ID NO: 3978358 - RNA, 22 nt, Human herpesvirus 5
aguguauuggcauauagccaau

SEQ ID NO: 3978359 - RNA, 15 nt, Human herpesvirus 5
agugucagacacagc

SEQ ID NO: 3978360 - RNA, 18 nt, Human herpesvirus 5
aguugcaaaagaagcugc

SEQ ID NO: 3978361 - RNA, 14 nt, Human herpesvirus 5
aguuggcguugagc

SEQ ID NO: 3978362 - RNA, 17 nt, Human herpesvirus 5
aguuggugcagcugcgc

SEQ ID NO: 3978363 - RNA, 18 nt, Human herpesvirus 5
aguuguagucgcgguggc

SEQ ID NO: 3978364 - RNA, 19 nt, Human herpesvirus 5
auaaaacgccaugaugaca

SEQ ID NO: 3978365 - RNA, 23 nt, Human herpesvirus 5
auaaaauaauaagccggcagcug

SEQ ID NO: 3978366 - RNA, 23 nt, Human herpesvirus 5
auaaaaugcuguauuauauacaa

SEQ ID NO: 3978367 - RNA, 16 nt, Human herpesvirus 5
auaacaacacaucaac

SEQ ID NO: 3978368 - RNA, 19 nt, Human herpesvirus 5
auaauaagccggcagcugc

SEQ ID NO: 3978369 - RNA, 14 nt, Human herpesvirus 5
auaauauucuauau

SEQ ID NO: 3978370 - RNA, 17 nt, Human herpesvirus 5
auaaucggcucucaggc

SEQ ID NO: 3978371 - RNA, 15 nt, Human herpesvirus 5
auacgcaguguuguu

SEQ ID NO: 3978372 - RNA, 23 nt, Human herpesvirus 5
auacgcgcuggaggcccuggugg

SEQ ID NO: 3978373 - RNA, 18 nt, Human herpesvirus 5
auacuggaagcugcuggu

SEQ ID NO: 3978374 - RNA, 21 nt, Human herpesvirus 5
auacuucucguacgacgucug

SEQ ID NO: 3978375 - RNA, 14 nt, Human herpesvirus 5
auauaagaaaagac

SEQ ID NO: 3978376 - RNA, 18 nt, Human herpesvirus 5
auaucgagguacaugucc

SEQ ID NO: 3978377 - RNA, 11 nt, Human herpesvirus 5
auauguagcac

SEQ ID NO: 3978378 - RNA, 15 nt, Human herpesvirus 5
auauugaaaaugucg

SEQ ID NO: 3978379 - RNA, 18 nt, Human herpesvirus 5
auauuuuccauaaaucua

SEQ ID NO: 3978380 - RNA, 15 nt, Human herpesvirus 5
aucacaucacccaac

SEQ ID NO: 3978381 - RNA, 12 nt, Human herpesvirus 5
aucacccacaga

SEQ ID NO: 3978382 - RNA, 20 nt, Human herpesvirus 5
aucacgggacccgccgccgc

SEQ ID NO: 3978383 - RNA, 23 nt, Human herpesvirus 5
aucacgugugugcguuuucuagu

SEQ ID NO: 3978384 - RNA, 15 nt, Human herpesvirus 5
aucaucaacagcagc

SEQ ID NO: 3978385 - RNA, 21 nt, Human herpesvirus 5
aucaugcugggcgacacucag

SEQ ID NO: 3978386 - RNA, 23 nt, Human herpesvirus 5
aucauguuccuacacgccuugca

SEQ ID NO: 3978387 - RNA, 18 nt, Human herpesvirus 5
auccugggacaccacggu

SEQ ID NO: 3978388 - RNA, 16 nt, Human herpesvirus 5
auccuuuucaugcuca

SEQ ID NO: 3978389 - RNA, 17 nt, Human herpesvirus 5
aucgacugccuaacugu

SEQ ID NO: 3978390 - RNA, 16 nt, Human herpesvirus 5
aucgggcccgccggcc

SEQ ID NO: 3978391 - RNA, 14 nt, Human herpesvirus 5
aucucaacgucaac

SEQ ID NO: 3978392 - RNA, 20 nt, Human herpesvirus 5
aucucacaccgucagcugcg

SEQ ID NO: 3978393 - RNA, 15 nt, Human herpesvirus 5
aucuccgacagcgcg

SEQ ID NO: 3978394 - RNA, 15 nt, Human herpesvirus 5
aucuccgucucuggu

SEQ ID NO: 3978395 - RNA, 15 nt, Human herpesvirus 5
aucugccacuuuucu

SEQ ID NO: 3978396 - RNA, 15 nt, Human herpesvirus 5
aucugcugaaacugc

SEQ ID NO: 3978397 - RNA, 18 nt, Human herpesvirus 5
aucuuccccucugcugcu

SEQ ID NO: 3978398 - RNA, 15 nt, Human herpesvirus 5
aucuuucagcuggcu

SEQ ID NO: 3978399 - RNA, 19 nt, Human herpesvirus 5
augaaggaacgcacgcugg

SEQ ID NO: 3978400 - RNA, 16 nt, Human herpesvirus 5
augacacgaacgugac

SEQ ID NO: 3978401 - RNA, 23 nt, Human herpesvirus 5
augcagaccuacagcaccccccu

SEQ ID NO: 3978402 - RNA, 23 nt, Human herpesvirus 5
augcaugcuaagaugaacgggug

SEQ ID NO: 3978403 - RNA, 20 nt, Human herpesvirus 5
augcaugucgcgacagagag

SEQ ID NO: 3978404 - RNA, 22 nt, Human herpesvirus 5
augccaugcggauccagcugcu

SEQ ID NO: 3978405 - RNA, 12 nt, Human herpesvirus 5
augcgagcgggg

SEQ ID NO: 3978406 - RNA, 17 nt, Human herpesvirus 5
augcggucggucagccg

SEQ ID NO: 3978407 - RNA, 22 nt, Human herpesvirus 5
augcguguucaguugggcggca

SEQ ID NO: 3978408 - RNA, 16 nt, Human herpesvirus 5
augcucaagacagaca

SEQ ID NO: 3978409 - RNA, 23 nt, Human herpesvirus 5
augcuuuccuggacacucuggcc

SEQ ID NO: 3978410 - RNA, 21 nt, Human herpesvirus 5
auggaaauacaugaugaaugu

SEQ ID NO: 3978411 - RNA, 15 nt, Human herpesvirus 5
auggacugucugcac

SEQ ID NO: 3978412 - RNA, 17 nt, Human herpesvirus 5
auggagccgcaagugcu

SEQ ID NO: 3978413 - RNA, 13 nt, Human herpesvirus 5
auggcuggugugu

SEQ ID NO: 3978414 - RNA, 18 nt, Human herpesvirus 5
augggaaacggacacuag

SEQ ID NO: 3978415 - RNA, 17 nt, Human herpesvirus 5
auggggucguggcucag

SEQ ID NO: 3978416 - RNA, 16 nt, Human herpesvirus 5
auggucguugcccacg

SEQ ID NO: 3978417 - RNA, 12 nt, Human herpesvirus 5
augucuccaagu

SEQ ID NO: 3978418 - RNA, 17 nt, Human herpesvirus 5
augucuuacaaaucaca

SEQ ID NO: 3978419 - RNA, 14 nt, Human herpesvirus 5
augugcuuaagcag

SEQ ID NO: 3978420 - RNA, 19 nt, Human herpesvirus 5
augugugggaccuggucaa

SEQ ID NO: 3978421 - RNA, 23 nt, Human herpesvirus 5
auguuuuuauauaauacacgugg

SEQ ID NO: 3978422 - RNA, 20 nt, Human herpesvirus 5
auuagccccacaugcugcuu

SEQ ID NO: 3978423 - RNA, 15 nt, Human herpesvirus 5
auucacaaaaacacc

SEQ ID NO: 3978424 - RNA, 14 nt, Human herpesvirus 5
auucguaggcagcg

SEQ ID NO: 3978425 - RNA, 11 nt, Human herpesvirus 5
auucugacacg

SEQ ID NO: 3978426 - RNA, 20 nt, Human herpesvirus 5
auugacgcgguuuaucauga

SEQ ID NO: 3978427 - RNA, 15 nt, Human herpesvirus 5
auugcccuucuggag

SEQ ID NO: 3978428 - RNA, 15 nt, Human herpesvirus 5
auugcuuagcugcac

SEQ ID NO: 3978429 - RNA, 14 nt, Human herpesvirus 5
auugggcggacgug

SEQ ID NO: 3978430 - RNA, 22 nt, Human herpesvirus 5
auuugcgacaguugccggaacc

SEQ ID NO: 3978431 - RNA, 18 nt, Human herpesvirus 5
auuuuaugcgccgccagc

SEQ ID NO: 3978432 - RNA, 23 nt, Human herpesvirus 5
auuuugcgagagaugggccgcgg

SEQ ID NO: 3978433 - RNA, 13 nt, Human herpesvirus 5
auuuuugggcaua

SEQ ID NO: 3978434 - RNA, 20 nt, Human herpesvirus 5
auuuuuucggccgcggaggu

SEQ ID NO: 3978435 - RNA, 15 nt, Human herpesvirus 5
auuuuuuguaacacu

SEQ ID NO: 3978436 - RNA, 14 nt, Human herpesvirus 5
caaaagaagcugcc

SEQ ID NO: 3978437 - RNA, 23 nt, Human herpesvirus 5
caaacgccgcgacaacggccgcc

SEQ ID NO: 3978438 - RNA, 14 nt, Human herpesvirus 5
caaacgcugcuugg

SEQ ID NO: 3978439 - RNA, 19 nt, Human herpesvirus 5
caaagaaaagaaaaaaugg

SEQ ID NO: 3978440 - RNA, 15 nt, Human herpesvirus 5
caaagaacgaaaaca

SEQ ID NO: 3978441 - RNA, 22 nt, Human herpesvirus 5
caaaggacucgcucacgucguu

SEQ ID NO: 3978442 - RNA, 13 nt, Human herpesvirus 5
caaaguucaaagu

SEQ ID NO: 3978443 - RNA, 14 nt, Human herpesvirus 5
caacagcgggucaa

SEQ ID NO: 3978444 - RNA, 17 nt, Human herpesvirus 5
caaccacgucggggcug

SEQ ID NO: 3978445 - RNA, 20 nt, Human herpesvirus 5
caaccauuggcaacaucacc

SEQ ID NO: 3978446 - RNA, 17 nt, Human herpesvirus 5
caaccgcauccugccca

SEQ ID NO: 3978447 - RNA, 15 nt, Human herpesvirus 5
caaccguauauucua

SEQ ID NO: 3978448 - RNA, 20 nt, Human herpesvirus 5
caacgacguuuaaaguaaau

SEQ ID NO: 3978449 - RNA, 15 nt, Human herpesvirus 5
caacgcguggcccug

SEQ ID NO: 3978450 - RNA, 14 nt, Human herpesvirus 5
caacgcuuuggaaa

SEQ ID NO: 3978451 - RNA, 17 nt, Human herpesvirus 5
caacggccgccgcagcc

SEQ ID NO: 3978452 - RNA, 23 nt, Human herpesvirus 5
caacguggaaggcggcucgcugg

SEQ ID NO: 3978453 - RNA, 16 nt, Human herpesvirus 5
caacguucacgcugcu

SEQ ID NO: 3978454 - RNA, 19 nt, Human herpesvirus 5
caacuaucaccaaacaaca

SEQ ID NO: 3978455 - RNA, 13 nt, Human herpesvirus 5
caacuuaaccaca

SEQ ID NO: 3978456 - RNA, 17 nt, Human herpesvirus 5
caacuucuaccaucucc

SEQ ID NO: 3978457 - RNA, 15 nt, Human herpesvirus 5
caagagcaugcugug

SEQ ID NO: 3978458 - RNA, 21 nt, Human herpesvirus 5
caagagcaugcugugggccca

SEQ ID NO: 3978459 - RNA, 20 nt, Human herpesvirus 5
caagcgcccgaagccgcgcg

SEQ ID NO: 3978460 - RNA, 12 nt, Human herpesvirus 5
caagcggccgcc

SEQ ID NO: 3978461 - RNA, 22 nt, Human herpesvirus 5
caaggagcgacguaccagcugu

SEQ ID NO: 3978462 - RNA, 22 nt, Human herpesvirus 5
caaggugauuauuaaaccgccc

SEQ ID NO: 3978463 - RNA, 20 nt, Human herpesvirus 5
caagucccuggccccggcca

SEQ ID NO: 3978464 - RNA, 20 nt, Human herpesvirus 5
caauaaagacgucaaugaca

SEQ ID NO: 3978465 - RNA, 15 nt, Human herpesvirus 5
caauaaguaccucua

SEQ ID NO: 3978466 - RNA, 23 nt, Human herpesvirus 5
caaucaaaccuguuccugucaau

SEQ ID NO: 3978467 - RNA, 20 nt, Human herpesvirus 5
caaugacacucgaagcaaca

SEQ ID NO: 3978468 - RNA, 19 nt, Human herpesvirus 5
caauugcgggcccugcuga

SEQ ID NO: 3978469 - RNA, 21 nt, Human herpesvirus 5
cacaacggccgccgacgucgc

SEQ ID NO: 3978470 - RNA, 14 nt, Human herpesvirus 5
cacaagcgcccgaa

SEQ ID NO: 3978471 - RNA, 17 nt, Human herpesvirus 5
cacacaggccagcugcc

SEQ ID NO: 3978472 - RNA, 19 nt, Human herpesvirus 5
cacacaucugucaccucac

SEQ ID NO: 3978473 - RNA, 16 nt, Human herpesvirus 5
cacaccugccucgaca

SEQ ID NO: 3978474 - RNA, 23 nt, Human herpesvirus 5
cacacgguccgugggagacgcgg

SEQ ID NO: 3978475 - RNA, 18 nt, Human herpesvirus 5
cacacugggagacggccu

SEQ ID NO: 3978476 - RNA, 11 nt, Human herpesvirus 5
cacagaagaaa

SEQ ID NO: 3978477 - RNA, 12 nt, Human herpesvirus 5
cacagcagcacc

SEQ ID NO: 3978478 - RNA, 14 nt, Human herpesvirus 5
cacagcagcaccag

SEQ ID NO: 3978479 - RNA, 23 nt, Human herpesvirus 5
cacagcggaaaaugccgccgcca

SEQ ID NO: 3978480 - RNA, 23 nt, Human herpesvirus 5
cacagguagguggccaugaugac

SEQ ID NO: 3978481 - RNA, 14 nt, Human herpesvirus 5
caccacucccacca

SEQ ID NO: 3978482 - RNA, 21 nt, Human herpesvirus 5
caccaguuccugcgcgccuac

SEQ ID NO: 3978483 - RNA, 12 nt, Human herpesvirus 5
cacccaggccgc

SEQ ID NO: 3978484 - RNA, 18 nt, Human herpesvirus 5
cacccccgcgacccucgc

SEQ ID NO: 3978485 - RNA, 12 nt, Human herpesvirus 5
cacccgcggccg

SEQ ID NO: 3978486 - RNA, 20 nt, Human herpesvirus 5
cacccguacgcgcaggcagc

SEQ ID NO: 3978487 - RNA, 23 nt, Human herpesvirus 5
caccgacacagcagcaccaggcg

SEQ ID NO: 3978488 - RNA, 20 nt, Human herpesvirus 5
caccgagacgugcgaccugg

SEQ ID NO: 3978489 - RNA, 15 nt, Human herpesvirus 5
caccgaugccggccu

SEQ ID NO: 3978490 - RNA, 20 nt, Human herpesvirus 5
caccgcuuuggucguagacg

SEQ ID NO: 3978491 - RNA, 22 nt, Human herpesvirus 5
caccguaucagcuaccgccgca

SEQ ID NO: 3978492 - RNA, 17 nt, Human herpesvirus 5
caccgucaccacuccca

SEQ ID NO: 3978493 - RNA, 14 nt, Human herpesvirus 5
caccgucccucagc

SEQ ID NO: 3978494 - RNA, 18 nt, Human herpesvirus 5
caccguguucucccgacg

SEQ ID NO: 3978495 - RNA, 23 nt, Human herpesvirus 5
caccguugucggaggaacccugc

SEQ ID NO: 3978496 - RNA, 19 nt, Human herpesvirus 5
caccguuuucaugcccguc

SEQ ID NO: 3978497 - RNA, 13 nt, Human herpesvirus 5
cacgacgcaugca

SEQ ID NO: 3978498 - RNA, 17 nt, Human herpesvirus 5
cacgcaggugaggcucu

SEQ ID NO: 3978499 - RNA, 23 nt, Human herpesvirus 5
cacgccccugaguucacgcgcgg

SEQ ID NO: 3978500 - RNA, 17 nt, Human herpesvirus 5
cacgccgaugcuccgcg

SEQ ID NO: 3978501 - RNA, 15 nt, Human herpesvirus 5
cacgccgcgcgaacg

SEQ ID NO: 3978502 - RNA, 21 nt, Human herpesvirus 5
cacgcggcucacguagcaggc

SEQ ID NO: 3978503 - RNA, 16 nt, Human herpesvirus 5
cacgcgucgucaaaaa

SEQ ID NO: 3978504 - RNA, 18 nt, Human herpesvirus 5
cacgcugacaacccacuc

SEQ ID NO: 3978505 - RNA, 17 nt, Human herpesvirus 5
cacggacacgacaaaug

SEQ ID NO: 3978506 - RNA, 18 nt, Human herpesvirus 5
cacggagcacgggcugcu

SEQ ID NO: 3978507 - RNA, 18 nt, Human herpesvirus 5
cacggccagcuccacgcu

SEQ ID NO: 3978508 - RNA, 15 nt, Human herpesvirus 5
cacggcgaaccgccg

SEQ ID NO: 3978509 - RNA, 19 nt, Human herpesvirus 5
cacggcgaaccgccgucgc

SEQ ID NO: 3978510 - RNA, 19 nt, Human herpesvirus 5
cacggcggcggccugcucg

SEQ ID NO: 3978511 - RNA, 16 nt, Human herpesvirus 5
cacgggacccgccgcc

SEQ ID NO: 3978512 - RNA, 22 nt, Human herpesvirus 5
cacgggcucguguggcagcugg

SEQ ID NO: 3978513 - RNA, 19 nt, Human herpesvirus 5
cacgguggccaacaagcgg

SEQ ID NO: 3978514 - RNA, 16 nt, Human herpesvirus 5
cacgguuucuucccau

SEQ ID NO: 3978515 - RNA, 22 nt, Human herpesvirus 5
cacgucgaccaggugcugucgc

SEQ ID NO: 3978516 - RNA, 19 nt, Human herpesvirus 5
cacgucggcucgaagaggu

SEQ ID NO: 3978517 - RNA, 19 nt, Human herpesvirus 5
cacgucggggcugugucgc

SEQ ID NO: 3978518 - RNA, 19 nt, Human herpesvirus 5
cacuaauuuauccaagaua

SEQ ID NO: 3978519 - RNA, 12 nt, Human herpesvirus 5
cacuagccgggc

SEQ ID NO: 3978520 - RNA, 19 nt, Human herpesvirus 5
cacucacgcggccgucacg

SEQ ID NO: 3978521 - RNA, 13 nt, Human herpesvirus 5
cacucgcucgcuu

SEQ ID NO: 3978522 - RNA, 13 nt, Human herpesvirus 5
cacucuggcccug

SEQ ID NO: 3978523 - RNA, 18 nt, Human herpesvirus 5
cacucuggcccugcugua

SEQ ID NO: 3978524 - RNA, 22 nt, Human herpesvirus 5
cacugacaagucguuucagccc

SEQ ID NO: 3978525 - RNA, 14 nt, Human herpesvirus 5
cacuuuacauaaaa

SEQ ID NO: 3978526 - RNA, 19 nt, Human herpesvirus 5
cacuuuccacggcgccggu

SEQ ID NO: 3978527 - RNA, 21 nt, Human herpesvirus 5
cagaccgcaacaacagcagca

SEQ ID NO: 3978528 - RNA, 15 nt, Human herpesvirus 5
cagacgucggcgguc

SEQ ID NO: 3978529 - RNA, 18 nt, Human herpesvirus 5
cagacuuucgacgugcgc

SEQ ID NO: 3978530 - RNA, 19 nt, Human herpesvirus 5
cagagccaccaggugccgg

SEQ ID NO: 3978531 - RNA, 22 nt, Human herpesvirus 5
cagagccaccaggugccggcga

SEQ ID NO: 3978532 - RNA, 22 nt, Human herpesvirus 5
cagagggucguuguccuccucg

SEQ ID NO: 3978533 - RNA, 21 nt, Human herpesvirus 5
cagaucgucuacggcuccaca

SEQ ID NO: 3978534 - RNA, 15 nt, Human herpesvirus 5
cagcaacaacagucg

SEQ ID NO: 3978535 - RNA, 16 nt, Human herpesvirus 5
cagcacauuagacaca

SEQ ID NO: 3978536 - RNA, 23 nt, Human herpesvirus 5
cagcacauuguaugccgauacac

SEQ ID NO: 3978537 - RNA, 14 nt, Human herpesvirus 5
cagcagcaccaggc

SEQ ID NO: 3978538 - RNA, 12 nt, Human herpesvirus 5
cagcagcagcug

SEQ ID NO: 3978539 - RNA, 18 nt, Human herpesvirus 5
cagcaguaugacgugcga

SEQ ID NO: 3978540 - RNA, 13 nt, Human herpesvirus 5
cagcauacgggga

SEQ ID NO: 3978541 - RNA, 17 nt, Human herpesvirus 5
cagcauacggggaggag

SEQ ID NO: 3978542 - RNA, 16 nt, Human herpesvirus 5
cagcaucgcgugcgcc

SEQ ID NO: 3978543 - RNA, 20 nt, Human herpesvirus 5
cagccaccgcgaggccaccc

SEQ ID NO: 3978544 - RNA, 12 nt, Human herpesvirus 5
cagcccagggau

SEQ ID NO: 3978545 - RNA, 17 nt, Human herpesvirus 5
cagcccauccucgugga

SEQ ID NO: 3978546 - RNA, 15 nt, Human herpesvirus 5
cagccccgucaaaac

SEQ ID NO: 3978547 - RNA, 13 nt, Human herpesvirus 5
cagcccgaggugu

SEQ ID NO: 3978548 - RNA, 18 nt, Human herpesvirus 5
cagcgagcucgaggaggg

SEQ ID NO: 3978549 - RNA, 14 nt, Human herpesvirus 5
cagcgagcugcgcg

SEQ ID NO: 3978550 - RNA, 21 nt, Human herpesvirus 5
cagcgccaccauagccacuac

SEQ ID NO: 3978551 - RNA, 15 nt, Human herpesvirus 5
cagcgcggcggcagc

SEQ ID NO: 3978552 - RNA, 20 nt, Human herpesvirus 5
cagcggccgccggugcuucu

SEQ ID NO: 3978553 - RNA, 17 nt, Human herpesvirus 5
cagcggcgacagacggc

SEQ ID NO: 3978554 - RNA, 16 nt, Human herpesvirus 5
cagcgucacagagggc

SEQ ID NO: 3978555 - RNA, 13 nt, Human herpesvirus 5
cagcgucuggcca

SEQ ID NO: 3978556 - RNA, 18 nt, Human herpesvirus 5
cagcgugcaccugcugcc

SEQ ID NO: 3978557 - RNA, 20 nt, Human herpesvirus 5
cagcgugcucagcugguggc

SEQ ID NO: 3978558 - RNA, 17 nt, Human herpesvirus 5
cagcucguggaccucac

SEQ ID NO: 3978559 - RNA, 15 nt, Human herpesvirus 5
cagcugcgccuggac

SEQ ID NO: 3978560 - RNA, 12 nt, Human herpesvirus 5
cagcuggcuugu

SEQ ID NO: 3978561 - RNA, 22 nt, Human herpesvirus 5
ucguuaccacaacggccgccga

SEQ ID NO: 3978562 - RNA, 18 nt, Human herpesvirus 5
ucuacagcauggacuguc

SEQ ID NO: 3978563 - RNA, 16 nt, Human herpesvirus 5
ucuaccccgccgccgu

SEQ ID NO: 3978564 - RNA, 18 nt, Human herpesvirus 5
ucuauaaacgguuucuca

SEQ ID NO: 3978565 - RNA, 20 nt, Human herpesvirus 5
ucuccaucaggaucuggugc

SEQ ID NO: 3978566 - RNA, 14 nt, Human herpesvirus 5
ucuccgagcccccg

SEQ ID NO: 3978567 - RNA, 11 nt, Human herpesvirus 5
ucuccugugga

SEQ ID NO: 3978568 - RNA, 12 nt, Human herpesvirus 5
ucucgagcccca

SEQ ID NO: 3978569 - RNA, 13 nt, Human herpesvirus 5
ucucgcguucgug

SEQ ID NO: 3978570 - RNA, 15 nt, Human herpesvirus 5
ucucggagccgccga

SEQ ID NO: 3978571 - RNA, 15 nt, Human herpesvirus 5
ucugaaucugcucca

SEQ ID NO: 3978572 - RNA, 23 nt, Human herpesvirus 5
ucugaccuugcugaugugccagc

SEQ ID NO: 3978573 - RNA, 20 nt, Human herpesvirus 5
ucugcauagaguuacaugca

SEQ ID NO: 3978574 - RNA, 17 nt, Human herpesvirus 5
ucugcgacuccuggacc

SEQ ID NO: 3978575 - RNA, 20 nt, Human herpesvirus 5
ucugcgcgggcagcccaagu

SEQ ID NO: 3978576 - RNA, 15 nt, Human herpesvirus 5
ucuggcgaucugccu

SEQ ID NO: 3978577 - RNA, 20 nt, Human herpesvirus 5
ucuggugcuauggcugcuca

SEQ ID NO: 3978578 - RNA, 14 nt, Human herpesvirus 5
ucuguauauucagu

SEQ ID NO: 3978579 - RNA, 15 nt, Human herpesvirus 5
ucuguucuuccacca

SEQ ID NO: 3978580 - RNA, 11 nt, Human herpesvirus 5
ucuuaagaaac

SEQ ID NO: 3978581 - RNA, 12 nt, Human herpesvirus 5
ucuuccuccucg

SEQ ID NO: 3978582 - RNA, 12 nt, Human herpesvirus 5
ucuucuaccugg

SEQ ID NO: 3978583 - RNA, 15 nt, Human herpesvirus 5
ucuugcgcccucucg

SEQ ID NO: 3978584 - RNA, 21 nt, Human herpesvirus 5
ucuuggguagcuucucucugg

SEQ ID NO: 3978585 - RNA, 23 nt, Human herpesvirus 5
ucuugucgucauucgggccagga

SEQ ID NO: 3978586 - RNA, 21 nt, Human herpesvirus 5
ugaacgagucgcucaucguca

SEQ ID NO: 3978587 - RNA, 14 nt, Human herpesvirus 5
ugaagcggagugca

SEQ ID NO: 3978588 - RNA, 14 nt, Human herpesvirus 5
ugaagguaaagccc

SEQ ID NO: 3978589 - RNA, 14 nt, Human herpesvirus 5
ugaaguuguugauc

SEQ ID NO: 3978590 - RNA, 23 nt, Human herpesvirus 5
ugaaucuuccccucugcugcugg

SEQ ID NO: 3978591 - RNA, 17 nt, Human herpesvirus 5
ugaauugcgaagccagc

SEQ ID NO: 3978592 - RNA, 20 nt, Human herpesvirus 5
ugacacauagcguaccccug

SEQ ID NO: 3978593 - RNA, 20 nt, Human herpesvirus 5
ugaccuggguagcaaguccu

SEQ ID NO: 3978594 - RNA, 23 nt, Human herpesvirus 5
ugacgacggcgugguauccacgc

SEQ ID NO: 3978595 - RNA, 15 nt, Human herpesvirus 5
ugacgcggucgccgc

SEQ ID NO: 3978596 - RNA, 16 nt, Human herpesvirus 5
ugacgcugcuggccga

SEQ ID NO: 3978597 - RNA, 21 nt, Human herpesvirus 5
ugacggauaaacacgacaucc

SEQ ID NO: 3978598 - RNA, 16 nt, Human herpesvirus 5
ugacggcgacaucacg

SEQ ID NO: 3978599 - RNA, 20 nt, Human herpesvirus 5
ugacgucgcggcaccaggaa

SEQ ID NO: 3978600 - RNA, 19 nt, Human herpesvirus 5
ugacgugcucaagagguga

SEQ ID NO: 3978601 - RNA, 18 nt, Human herpesvirus 5
ugacuaccuuguuuuuua

SEQ ID NO: 3978602 - RNA, 15 nt, Human herpesvirus 5
ugagacaggacgagg

SEQ ID NO: 3978603 - RNA, 16 nt, Human herpesvirus 5
ugagauacauguucau

SEQ ID NO: 3978604 - RNA, 15 nt, Human herpesvirus 5
ugaggagggugguga

SEQ ID NO: 3978605 - RNA, 22 nt, Human herpesvirus 5
ugaggcgcucgugaaacagcag

SEQ ID NO: 3978606 - RNA, 22 nt, Human herpesvirus 5
ugaggcggcguggacugggacg

SEQ ID NO: 3978607 - RNA, 13 nt, Human herpesvirus 5
ugagguacugcag

SEQ ID NO: 3978608 - RNA, 14 nt, Human herpesvirus 5
ugaucgugggccag

SEQ ID NO: 3978609 - RNA, 24 nt, Human herpesvirus 5
ugaugcgcgaacaggccgccaucc

SEQ ID NO: 3978610 - RNA, 18 nt, Human herpesvirus 5
ugaugggugagggucgug

SEQ ID NO: 3978611 - RNA, 14 nt, Human herpesvirus 5
ugaugugccagccg

SEQ ID NO: 3978612 - RNA, 18 nt, Human herpesvirus 5
ugcaaagucaacauguag

SEQ ID NO: 3978613 - RNA, 17 nt, Human herpesvirus 5
ugcaaaguuauccuguu

SEQ ID NO: 3978614 - RNA, 17 nt, Human herpesvirus 5
ugcaacgccuggcguga

SEQ ID NO: 3978615 - RNA, 21 nt, Human herpesvirus 5
ugcacaccaguauugguucug

SEQ ID NO: 3978616 - RNA, 22 nt, Human herpesvirus 5
ugcacccccgauaugggccgcu

SEQ ID NO: 3978617 - RNA, 16 nt, Human herpesvirus 5
ugcaccucgaccuccg

SEQ ID NO: 3978618 - RNA, 17 nt, Human herpesvirus 5
ugcaccucgaccuccga

SEQ ID NO: 3978619 - RNA, 13 nt, Human herpesvirus 5
ugcacgccgccgu

SEQ ID NO: 3978620 - RNA, 18 nt, Human herpesvirus 5
ugcacgggcucgggugac

SEQ ID NO: 3978621 - RNA, 18 nt, Human herpesvirus 5
ugcacuuccuguacacau

SEQ ID NO: 3978622 - RNA, 14 nt, Human herpesvirus 5
ugcagacgguggug

SEQ ID NO: 3978623 - RNA, 15 nt, Human herpesvirus 5
ugcagcuuuugcacg

SEQ ID NO: 3978624 - RNA, 17 nt, Human herpesvirus 5
ugccauggaccugaccu

SEQ ID NO: 3978625 - RNA, 19 nt, Human herpesvirus 5
ugcccgaccacgacacggu

SEQ ID NO: 3978626 - RNA, 22 nt, Human herpesvirus 5
ugcccgaccacgacacggugcu

SEQ ID NO: 3978627 - RNA, 20 nt, Human herpesvirus 5
ugcccguuuucacagcagcc

SEQ ID NO: 3978628 - RNA, 14 nt, Human herpesvirus 5
ugcccugugggccc

SEQ ID NO: 3978629 - RNA, 15 nt, Human herpesvirus 5
ugcccugugggccca

SEQ ID NO: 3978630 - RNA, 21 nt, Human herpesvirus 5
ugccgcacgcgcuagccuuuc

SEQ ID NO: 3978631 - RNA, 11 nt, Human herpesvirus 5
ugccgccgcca

SEQ ID NO: 3978632 - RNA, 24 nt, Human herpesvirus 5
ugccgccgccaacgccgagcucug

SEQ ID NO: 3978633 - RNA, 19 nt, Human herpesvirus 5
ugccgugacgucgcggcac

SEQ ID NO: 3978634 - RNA, 22 nt, Human herpesvirus 5
ugccgugacgucgcggcaccag

SEQ ID NO: 3978635 - RNA, 14 nt, Human herpesvirus 5
ugccucuacuugga

SEQ ID NO: 3978636 - RNA, 16 nt, Human herpesvirus 5
ugccuguuccugcugc

SEQ ID NO: 3978637 - RNA, 15 nt, Human herpesvirus 5
ugcgaaguguugacc

SEQ ID NO: 3978638 - RNA, 16 nt, Human herpesvirus 5
ugcgacgccaugcuca

SEQ ID NO: 3978639 - RNA, 18 nt, Human herpesvirus 5
ugcgagcgggguucaccu

SEQ ID NO: 3978640 - RNA, 18 nt, Human herpesvirus 5
ugcgauuuggaccuggag

SEQ ID NO: 3978641 - RNA, 17 nt, Human herpesvirus 5
ugcgccguuuugcuguc

SEQ ID NO: 3978642 - RNA, 13 nt, Human herpesvirus 5
ugcgccuuccagu

SEQ ID NO: 3978643 - RNA, 14 nt, Human herpesvirus 5
ugcgcgacacggcu

SEQ ID NO: 3978644 - RNA, 16 nt, Human herpesvirus 5
ugcgcgccuccguccu

SEQ ID NO: 3978645 - RNA, 11 nt, Human herpesvirus 5
ugcgcgcggcg

SEQ ID NO: 3978646 - RNA, 14 nt, Human herpesvirus 5
ugcgcuucugcagc

SEQ ID NO: 3978647 - RNA, 15 nt, Human herpesvirus 5
ugcggcacagcgucg

SEQ ID NO: 3978648 - RNA, 18 nt, Human herpesvirus 5
ugcggcguucgcgugcac

SEQ ID NO: 3978649 - RNA, 19 nt, Human herpesvirus 5
ugcgggaacuggccuggcg

SEQ ID NO: 3978650 - RNA, 15 nt, Human herpesvirus 5
ugcgggguggugcuc

SEQ ID NO: 3978651 - RNA, 16 nt, Human herpesvirus 5
ugcgucaagacgggcc

SEQ ID NO: 3978652 - RNA, 15 nt, Human herpesvirus 5
ugcgugucgcugggc

SEQ ID NO: 3978653 - RNA, 20 nt, Human herpesvirus 5
ugcuauaccucaguuauccc

SEQ ID NO: 3978654 - RNA, 20 nt, Human herpesvirus 5
ugcuccucggagcacgggcg

SEQ ID NO: 3978655 - RNA, 15 nt, Human herpesvirus 5
ugcucuaaaaacacc

SEQ ID NO: 3978656 - RNA, 15 nt, Human herpesvirus 5
ugcucucccgcaugg

SEQ ID NO: 3978657 - RNA, 16 nt, Human herpesvirus 5
ugcugauucgcgccgu

SEQ ID NO: 3978658 - RNA, 15 nt, Human herpesvirus 5
ugcugcaacggccgu

SEQ ID NO: 3978659 - RNA, 23 nt, Human herpesvirus 5
ugcugcaaggccucuaucugcgc

SEQ ID NO: 3978660 - RNA, 14 nt, Human herpesvirus 5
ugcugccgggcggc

SEQ ID NO: 3978661 - RNA, 20 nt, Human herpesvirus 5
cagcuuaccgccaccgucgc

SEQ ID NO: 3978662 - RNA, 21 nt, Human herpesvirus 5
cagcuucuuucucaccgugcu

SEQ ID NO: 3978663 - RNA, 12 nt, Human herpesvirus 5
caggaaaguaug

SEQ ID NO: 3978664 - RNA, 19 nt, Human herpesvirus 5
caggaacacgguggcuuuc

SEQ ID NO: 3978665 - RNA, 17 nt, Human herpesvirus 5
caggacgucaaccacgu

SEQ ID NO: 3978666 - RNA, 19 nt, Human herpesvirus 5
caggcacgucauugacagc

SEQ ID NO: 3978667 - RNA, 16 nt, Human herpesvirus 5
caggccagcugcgucg

SEQ ID NO: 3978668 - RNA, 15 nt, Human herpesvirus 5
caggccgacucgcgg

SEQ ID NO: 3978669 - RNA, 22 nt, Human herpesvirus 5
caggccgccgcucaagccgcgg

SEQ ID NO: 3978670 - RNA, 19 nt, Human herpesvirus 5
caggcgaugcgcacggccg

SEQ ID NO: 3978671 - RNA, 23 nt, Human herpesvirus 5
caggcgcaggaggcuaacgcgcu

SEQ ID NO: 3978672 - RNA, 13 nt, Human herpesvirus 5
caggcggagauga

SEQ ID NO: 3978673 - RNA, 12 nt, Human herpesvirus 5
caggcuaaagaa

SEQ ID NO: 3978674 - RNA, 18 nt, Human herpesvirus 5
cagggaaagguuauauaa

SEQ ID NO: 3978675 - RNA, 20 nt, Human herpesvirus 5
cagggcugggauccgccgcc

SEQ ID NO: 3978676 - RNA, 17 nt, Human herpesvirus 5
caggggcuggacguggu

SEQ ID NO: 3978677 - RNA, 22 nt, Human herpesvirus 5
cagguaaaaacaacguguguga

SEQ ID NO: 3978678 - RNA, 19 nt, Human herpesvirus 5
cagguucugaaucugcucc

SEQ ID NO: 3978679 - RNA, 20 nt, Human herpesvirus 5
caguaccgacgacgacaguc

SEQ ID NO: 3978680 - RNA, 20 nt, Human herpesvirus 5
caguaccuggacgcggugaa

SEQ ID NO: 3978681 - RNA, 13 nt, Human herpesvirus 5
caguacgauccuc

SEQ ID NO: 3978682 - RNA, 23 nt, Human herpesvirus 5
caguacggccucugggcugagac

SEQ ID NO: 3978683 - RNA, 22 nt, Human herpesvirus 5
caguacggcuuucugcggaaug

SEQ ID NO: 3978684 - RNA, 15 nt, Human herpesvirus 5
gucgccuacacccgu

SEQ ID NO: 3978685 - RNA, 15 nt, Human herpesvirus 5
gucgcguguaggcga

SEQ ID NO: 3978686 - RNA, 17 nt, Human herpesvirus 5
uaccuagcuacuuugga

SEQ ID NO: 3978687 - RNA, 14 nt, Human herpesvirus 5
uaccuggaggagau

SEQ ID NO: 3978688 - RNA, 15 nt, Human herpesvirus 5
uacgcgaccagcugc

SEQ ID NO: 3978689 - RNA, 19 nt, Human herpesvirus 5
uacgcgccuuuugaucgcc

SEQ ID NO: 3978690 - RNA, 23 nt, Human herpesvirus 5
uacggcccggcagcaccaugccg

SEQ ID NO: 3978691 - RNA, 18 nt, Human herpesvirus 5
uacgugcgcgccacggcg

SEQ ID NO: 3978692 - RNA, 12 nt, Human herpesvirus 5
uacuauguguau

SEQ ID NO: 3978693 - RNA, 21 nt, Human herpesvirus 5
uacugcauccaucacaucacc

SEQ ID NO: 3978694 - RNA, 17 nt, Human herpesvirus 5
uacuucccccuccccuu

SEQ ID NO: 3978695 - RNA, 23 nt, Human herpesvirus 5
uagaccaaaccggacgcugccuc

SEQ ID NO: 3978696 - RNA, 21 nt, Human herpesvirus 5
uagacgauuuuaugcgccgcc

SEQ ID NO: 3978697 - RNA, 19 nt, Human herpesvirus 5
uagagcauuaagcauaguc

SEQ ID NO: 3978698 - RNA, 20 nt, Human herpesvirus 5
uagcaauaaucccuguaauu

SEQ ID NO: 3978699 - RNA, 17 nt, Human herpesvirus 5
uagcacgucagugguga

SEQ ID NO: 3978700 - RNA, 14 nt, Human herpesvirus 5
uagcccucugggcc

SEQ ID NO: 3978701 - RNA, 15 nt, Human herpesvirus 5
uagcgaucgcaugcu

SEQ ID NO: 3978702 - RNA, 16 nt, Human herpesvirus 5
uagcggcucgggcugg

SEQ ID NO: 3978703 - RNA, 21 nt, Human herpesvirus 5
uagcuagugcagccuuaggaa

SEQ ID NO: 3978704 - RNA, 12 nt, Human herpesvirus 5
uaggagacgagc

SEQ ID NO: 3978705 - RNA, 15 nt, Human herpesvirus 5
uaguauccacgucac

SEQ ID NO: 3978706 - RNA, 16 nt, Human herpesvirus 5
uauacaucuccgucuc

SEQ ID NO: 3978707 - RNA, 17 nt, Human herpesvirus 5
uauauucaaucauuacu

SEQ ID NO: 3978708 - RNA, 16 nt, Human herpesvirus 5
uaucagaaagcugcaa

SEQ ID NO: 3978709 - RNA, 14 nt, Human herpesvirus 5
uaucgcgacagaca

SEQ ID NO: 3978710 - RNA, 21 nt, Human herpesvirus 5
uaugauagaaagucacaggaa

SEQ ID NO: 3978711 - RNA, 14 nt, Human herpesvirus 5
uaugggggaacgcc

SEQ ID NO: 3978712 - RNA, 13 nt, Human herpesvirus 5
uauguaguccgua

SEQ ID NO: 3978713 - RNA, 11 nt, Human herpesvirus 5
uauucaacaau

SEQ ID NO: 3978714 - RNA, 13 nt, Human herpesvirus 5
uauuucuagagca

SEQ ID NO: 3978715 - RNA, 21 nt, Human herpesvirus 5
ucaaacagcacauuagacaca

SEQ ID NO: 3978716 - RNA, 12 nt, Human herpesvirus 5
ucaaaguucaaa

SEQ ID NO: 3978717 - RNA, 15 nt, Human herpesvirus 5
ucaacaaacagcucu

SEQ ID NO: 3978718 - RNA, 16 nt, Human herpesvirus 5
ucaacaaacagcucuu

SEQ ID NO: 3978719 - RNA, 20 nt, Human herpesvirus 5
ucaaccacgaguaacaccgu

SEQ ID NO: 3978720 - RNA, 17 nt, Human herpesvirus 5
ucaacgacgccacacac

SEQ ID NO: 3978721 - RNA, 15 nt, Human herpesvirus 5
ucaacgccugcacca

SEQ ID NO: 3978722 - RNA, 15 nt, Human herpesvirus 5
ucaaucacccacaga

SEQ ID NO: 3978723 - RNA, 19 nt, Human herpesvirus 5
ucacacaggccagcugcca

SEQ ID NO: 3978724 - RNA, 16 nt, Human herpesvirus 5
ucacaccuaucauaaa

SEQ ID NO: 3978725 - RNA, 13 nt, Human herpesvirus 5
ucacacugggaga

SEQ ID NO: 3978726 - RNA, 20 nt, Human herpesvirus 5
ucaccaccaucagcaaagcu

SEQ ID NO: 3978727 - RNA, 22 nt, Human herpesvirus 5
ucaccaccaucagcaaagcucc

SEQ ID NO: 3978728 - RNA, 17 nt, Human herpesvirus 5
ucaccaucgugccgcuc

SEQ ID NO: 3978729 - RNA, 15 nt, Human herpesvirus 5
ucacccgccucaugg

SEQ ID NO: 3978730 - RNA, 20 nt, Human herpesvirus 5
ucaccgaguccaucauguuc

SEQ ID NO: 3978731 - RNA, 14 nt, Human herpesvirus 5
ucaccgaugccggc

SEQ ID NO: 3978732 - RNA, 17 nt, Human herpesvirus 5
ucaccgcaguugcugcc

SEQ ID NO: 3978733 - RNA, 18 nt, Human herpesvirus 5
ucaccuagacgcaaacgc

SEQ ID NO: 3978734 - RNA, 14 nt, Human herpesvirus 5
ucacgccagacuug

SEQ ID NO: 3978735 - RNA, 22 nt, Human herpesvirus 5
ucacgcgcggaacccacaaagg

SEQ ID NO: 3978736 - RNA, 14 nt, Human herpesvirus 5
ucacuaucuucaac

SEQ ID NO: 3978737 - RNA, 17 nt, Human herpesvirus 5
ucacuaucuucaaccuc

SEQ ID NO: 3978738 - RNA, 22 nt, Human herpesvirus 5
ucagaaagcaccagaacccguc

SEQ ID NO: 3978739 - RNA, 20 nt, Human herpesvirus 5
ucagaccgcaacaacagcag

SEQ ID NO: 3978740 - RNA, 21 nt, Human herpesvirus 5
ucagaccgcaacaacagcagc

SEQ ID NO: 3978741 - RNA, 13 nt, Human herpesvirus 5
ucagccgugagaa

SEQ ID NO: 3978742 - RNA, 20 nt, Human herpesvirus 5
ucagcuaccgccgcaacagc

SEQ ID NO: 3978743 - RNA, 18 nt, Human herpesvirus 5
ucaggucgcccaggcuca

SEQ ID NO: 3978744 - RNA, 16 nt, Human herpesvirus 5
ucagucuauucucaac

SEQ ID NO: 3978745 - RNA, 19 nt, Human herpesvirus 5
ucaguguacacgcgcccag

SEQ ID NO: 3978746 - RNA, 21 nt, Human herpesvirus 5
ucauacaaaccccguguccgc

SEQ ID NO: 3978747 - RNA, 19 nt, Human herpesvirus 5
ucauauaaaagucuguaua

SEQ ID NO: 3978748 - RNA, 13 nt, Human herpesvirus 5
ucaucaacagcag

SEQ ID NO: 3978749 - RNA, 13 nt, Human herpesvirus 5
ucauggacccgcc

SEQ ID NO: 3978750 - RNA, 14 nt, Human herpesvirus 5
uccaaaacgugcca

SEQ ID NO: 3978751 - RNA, 16 nt, Human herpesvirus 5
uccaauaaacccaucc

SEQ ID NO: 3978752 - RNA, 19 nt, Human herpesvirus 5
uccaccacggcugcugauc

SEQ ID NO: 3978753 - RNA, 13 nt, Human herpesvirus 5
uccacggcgccgg

SEQ ID NO: 3978754 - RNA, 15 nt, Human herpesvirus 5
uccacuccaucacac

SEQ ID NO: 3978755 - RNA, 11 nt, Human herpesvirus 5
uccagccagca

SEQ ID NO: 3978756 - RNA, 17 nt, Human herpesvirus 5
uccagcuuaccgccacc

SEQ ID NO: 3978757 - RNA, 23 nt, Human herpesvirus 5
uccaggcggagaugaggacgacg

SEQ ID NO: 3978758 - RNA, 14 nt, Human herpesvirus 5
uccaugugcagcug

SEQ ID NO: 3978759 - RNA, 23 nt, Human herpesvirus 5
ucccaugcaacuucuucuacuca

SEQ ID NO: 3978760 - RNA, 20 nt, Human herpesvirus 5
uccccacccaguagacagac

SEQ ID NO: 3978761 - RNA, 13 nt, Human herpesvirus 5
ucccccugaucug

SEQ ID NO: 3978762 - RNA, 21 nt, Human herpesvirus 5
uccccgcaaacucccacuccu

SEQ ID NO: 3978763 - RNA, 17 nt, Human herpesvirus 5
uccccggugugucuauu

SEQ ID NO: 3978764 - RNA, 21 nt, Human herpesvirus 5
uccccuaguaauaccaccguc

SEQ ID NO: 3978765 - RNA, 14 nt, Human herpesvirus 5
uccccugacccucc

SEQ ID NO: 3978766 - RNA, 21 nt, Human herpesvirus 5
ucccgacaggcucgucguggg

SEQ ID NO: 3978767 - RNA, 22 nt, Human herpesvirus 5
ucccgcauagccucuacaaacu

SEQ ID NO: 3978768 - RNA, 19 nt, Human herpesvirus 5
ucccgcugugcuggccgcc

SEQ ID NO: 3978769 - RNA, 17 nt, Human herpesvirus 5
ucccucagccucugugu

SEQ ID NO: 3978770 - RNA, 12 nt, Human herpesvirus 5
ucccuccugcag

SEQ ID NO: 3978771 - RNA, 14 nt, Human herpesvirus 5
ucccucgcgccgcc

SEQ ID NO: 3978772 - RNA, 16 nt, Human herpesvirus 5
ucccucguuacccccg

SEQ ID NO: 3978773 - RNA, 16 nt, Human herpesvirus 5
ucccuggggcugcugc

SEQ ID NO: 3978774 - RNA, 19 nt, Human herpesvirus 5
uccgcgucggucgccgccu

SEQ ID NO: 3978775 - RNA, 21 nt, Human herpesvirus 5
uccgcgucggucgccgccucc

SEQ ID NO: 3978776 - RNA, 15 nt, Human herpesvirus 5
uccguuaccacgguu

SEQ ID NO: 3978777 - RNA, 17 nt, Human herpesvirus 5
uccuccucuuccucagu

SEQ ID NO: 3978778 - RNA, 17 nt, Human herpesvirus 5
uccucguccgggucuac

SEQ ID NO: 3978779 - RNA, 13 nt, Human herpesvirus 5
uccucgucgccuu

SEQ ID NO: 3978780 - RNA, 17 nt, Human herpesvirus 5
uccugcccaccgccucc

SEQ ID NO: 3978781 - RNA, 20 nt, Human herpesvirus 5
uccuggaucuuggcggccga

SEQ ID NO: 3978782 - RNA, 15 nt, Human herpesvirus 5
uccuguugcucuccu

SEQ ID NO: 3978783 - RNA, 11 nt, Human herpesvirus 5
uccuucaucuc

SEQ ID NO: 3978784 - RNA, 20 nt, Human herpesvirus 5
uccuuggaagagggaagcac

SEQ ID NO: 3978785 - RNA, 14 nt, Human herpesvirus 5
uccuuuuggcgcag

SEQ ID NO: 3978786 - RNA, 16 nt, Human herpesvirus 5
ucgacacuaauuuauc

SEQ ID NO: 3978787 - RNA, 19 nt, Human herpesvirus 5
ucgaccggcggcugcuguu

SEQ ID NO: 3978788 - RNA, 20 nt, Human herpesvirus 5
ucgacgaucuuuaguccgga

SEQ ID NO: 3978789 - RNA, 19 nt, Human herpesvirus 5
ucgacggcgguacugaagc

SEQ ID NO: 3978790 - RNA, 18 nt, Human herpesvirus 5
ucgacuggaggcucugug

SEQ ID NO: 3978791 - RNA, 23 nt, Human herpesvirus 5
ucgagcgcgcucuugaggcgcuc

SEQ ID NO: 3978792 - RNA, 12 nt, Human herpesvirus 5
ucgaucucaugu

SEQ ID NO: 3978793 - RNA, 13 nt, Human herpesvirus 5
ucgaugcugcaag

SEQ ID NO: 3978794 - RNA, 19 nt, Human herpesvirus 5
ucgauggggucguggcuca

SEQ ID NO: 3978795 - RNA, 17 nt, Human herpesvirus 5
ucgauuaccuacgucaa

SEQ ID NO: 3978796 - RNA, 17 nt, Human herpesvirus 5
ucgcagccacgcgcugg

SEQ ID NO: 3978797 - RNA, 18 nt, Human herpesvirus 5
ucgcaucaucaacagcag

SEQ ID NO: 3978798 - RNA, 20 nt, Human herpesvirus 5
ucgcaucaucaacagcagca

SEQ ID NO: 3978799 - RNA, 15 nt, Human herpesvirus 5
ucgcauccugcauca

SEQ ID NO: 3978800 - RNA, 19 nt, Human herpesvirus 5
ucgccaacuaccgugccac

SEQ ID NO: 3978801 - RNA, 16 nt, Human herpesvirus 5
gucggaugaggcaggc

SEQ ID NO: 3978802 - RNA, 18 nt, Human herpesvirus 5
gucggccgaucgcgccgc

SEQ ID NO: 3978803 - RNA, 15 nt, Human herpesvirus 5
gucggccugggcugc

SEQ ID NO: 3978804 - RNA, 13 nt, Human herpesvirus 5
gucggcgccgccg

SEQ ID NO: 3978805 - RNA, 21 nt, Human herpesvirus 5
gucggcugccuguuccugcug

SEQ ID NO: 3978806 - RNA, 23 nt, Human herpesvirus 5
gucggugauuucuugcuugcccg

SEQ ID NO: 3978807 - RNA, 17 nt, Human herpesvirus 5
gucgguggaaccgugcc

SEQ ID NO: 3978808 - RNA, 16 nt, Human herpesvirus 5
gucgugcucuugacgg

SEQ ID NO: 3978809 - RNA, 22 nt, Human herpesvirus 5
gucuccaugauugugccgcguu

SEQ ID NO: 3978810 - RNA, 22 nt, Human herpesvirus 5
gucucuaccaacgcuuccugcg

SEQ ID NO: 3978811 - RNA, 22 nt, Human herpesvirus 5
gucucuccaguccauauguugu

SEQ ID NO: 3978812 - RNA, 22 nt, Human herpesvirus 5
gucucuguuuuuuuuuguuaac

SEQ ID NO: 3978813 - RNA, 14 nt, Human herpesvirus 5
gucugagcgccgac

SEQ ID NO: 3978814 - RNA, 23 nt, Human herpesvirus 5
gucugcauguuggugccccagga

SEQ ID NO: 3978815 - RNA, 16 nt, Human herpesvirus 5
gucugcgacuccugga

SEQ ID NO: 3978816 - RNA, 21 nt, Human herpesvirus 5
gucugcgucaagacgggccug

SEQ ID NO: 3978817 - RNA, 19 nt, Human herpesvirus 5
gucuuggguagcuucucuc

SEQ ID NO: 3978818 - RNA, 14 nt, Human herpesvirus 5
gucuuuugcacgcg

SEQ ID NO: 3978819 - RNA, 16 nt, Human herpesvirus 5
gugaauucuggcaaga

SEQ ID NO: 3978820 - RNA, 19 nt, Human herpesvirus 5
gugacccgccccccggcag

SEQ ID NO: 3978821 - RNA, 14 nt, Human herpesvirus 5
gugacguggauacu

SEQ ID NO: 3978822 - RNA, 22 nt, Human herpesvirus 5
gugagggacccucgucggaagc

SEQ ID NO: 3978823 - RNA, 22 nt, Human herpesvirus 5
gugaucacguacguuuuccaaa

SEQ ID NO: 3978824 - RNA, 20 nt, Human herpesvirus 5
gugaucggccgcggugcgcu

SEQ ID NO: 3978825 - RNA, 19 nt, Human herpesvirus 5
gugaucgugggccaggacc

SEQ ID NO: 3978826 - RNA, 19 nt, Human herpesvirus 5
gugcaccugcugccgccac

SEQ ID NO: 3978827 - RNA, 19 nt, Human herpesvirus 5
gugcaucugccgaaacacc

SEQ ID NO: 3978828 - RNA, 17 nt, Human herpesvirus 5
gugcaugacaacgggaa

SEQ ID NO: 3978829 - RNA, 18 nt, Human herpesvirus 5
gugcccgaagaggacgaa

SEQ ID NO: 3978830 - RNA, 17 nt, Human herpesvirus 5
gugcccgucggcugccu

SEQ ID NO: 3978831 - RNA, 15 nt, Human herpesvirus 5
gugccgccgcugccg

SEQ ID NO: 3978832 - RNA, 15 nt, Human herpesvirus 5
gugccucauuuguau

SEQ ID NO: 3978833 - RNA, 14 nt, Human herpesvirus 5
gugccugcacgacc

SEQ ID NO: 3978834 - RNA, 14 nt, Human herpesvirus 5
gugcgccaagccau

SEQ ID NO: 3978835 - RNA, 13 nt, Human herpesvirus 5
gugcgcgccgccg

SEQ ID NO: 3978836 - RNA, 20 nt, Human herpesvirus 5
gugcuaccagcugcaggcag

SEQ ID NO: 3978837 - RNA, 20 nt, Human herpesvirus 5
gugcuacgagaucagccgug

SEQ ID NO: 3978838 - RNA, 13 nt, Human herpesvirus 5
gugcucaggccac

SEQ ID NO: 3978839 - RNA, 22 nt, Human herpesvirus 5
gugcucgacuuuacggugcgcg

SEQ ID NO: 3978840 - RNA, 18 nt, Human herpesvirus 5
gugcucgggcgugugggu

SEQ ID NO: 3978841 - RNA, 21 nt, Human herpesvirus 5
gugcugccgggcggcuuugcc

SEQ ID NO: 3978842 - RNA, 14 nt, Human herpesvirus 5
gugcuggcggccgu

SEQ ID NO: 3978843 - RNA, 11 nt, Human herpesvirus 5
guggaaggcac

SEQ ID NO: 3978844 - RNA, 14 nt, Human herpesvirus 5
guggaaggcaccgc

SEQ ID NO: 3978845 - RNA, 13 nt, Human herpesvirus 5
guggagggcgcgc

SEQ ID NO: 3978846 - RNA, 16 nt, Human herpesvirus 5
guggccgagcuaugcg

SEQ ID NO: 3978847 - RNA, 23 nt, Human herpesvirus 5
guggcugcacacggagcacgggc

SEQ ID NO: 3978848 - RNA, 12 nt, Human herpesvirus 5
guggcugggcuc

SEQ ID NO: 3978849 - RNA, 15 nt, Human herpesvirus 5
guggcugggcucacg

SEQ ID NO: 3978850 - RNA, 17 nt, Human herpesvirus 5
guggcuucucuggagac

SEQ ID NO: 3978851 - RNA, 16 nt, Human herpesvirus 5
gugggaaugguaaaga

SEQ ID NO: 3978852 - RNA, 22 nt, Human herpesvirus 5
gugggcaagaugggcaccgucu

SEQ ID NO: 3978853 - RNA, 22 nt, Human herpesvirus 5
guggggcugcgucgccugcgac

SEQ ID NO: 3978854 - RNA, 13 nt, Human herpesvirus 5
gugguaccugcaa

SEQ ID NO: 3978855 - RNA, 14 nt, Human herpesvirus 5
guggucgaugcuga

SEQ ID NO: 3978856 - RNA, 13 nt, Human herpesvirus 5
guggugacggugg

SEQ ID NO: 3978857 - RNA, 17 nt, Human herpesvirus 5
gugguggccgugcuggg

SEQ ID NO: 3978858 - RNA, 22 nt, Human herpesvirus 5
guggugguuguacgaguacacg

SEQ ID NO: 3978859 - RNA, 21 nt, Human herpesvirus 5
gugguguugccuucugcugcc

SEQ ID NO: 3978860 - RNA, 17 nt, Human herpesvirus 5
guguaccaucuggcgca

SEQ ID NO: 3978861 - RNA, 20 nt, Human herpesvirus 5
guguacgccaucuucaucuu

SEQ ID NO: 3978862 - RNA, 12 nt, Human herpesvirus 5
guguaugcaugu

SEQ ID NO: 3978863 - RNA, 19 nt, Human herpesvirus 5
guguccgcucaacuuucua

SEQ ID NO: 3978864 - RNA, 21 nt, Human herpesvirus 5
guguucccaacacgucccccc

SEQ ID NO: 3978865 - RNA, 18 nt, Human herpesvirus 5
guguuucgguccgaugua

SEQ ID NO: 3978866 - RNA, 17 nt, Human herpesvirus 5
guguuuucaccgacgug

SEQ ID NO: 3978867 - RNA, 18 nt, Human herpesvirus 5
guuaaggauucugagggc

SEQ ID NO: 3978868 - RNA, 14 nt, Human herpesvirus 5
guuacaaugucacu

SEQ ID NO: 3978869 - RNA, 23 nt, Human herpesvirus 5
guuacccugguauccaacuucac

SEQ ID NO: 3978870 - RNA, 14 nt, Human herpesvirus 5
guuaccggucacug

SEQ ID NO: 3978871 - RNA, 18 nt, Human herpesvirus 5
guuacgccggaggccgcc

SEQ ID NO: 3978872 - RNA, 15 nt, Human herpesvirus 5
guuaucuucccugag

SEQ ID NO: 3978873 - RNA, 15 nt, Human herpesvirus 5
guuauuucgugcgug

SEQ ID NO: 3978874 - RNA, 17 nt, Human herpesvirus 5
guucaucgucuacgucg

SEQ ID NO: 3978875 - RNA, 19 nt, Human herpesvirus 5
guucaucgucuacgucguu

SEQ ID NO: 3978876 - RNA, 14 nt, Human herpesvirus 5
guuccacggccagc

SEQ ID NO: 3978877 - RNA, 17 nt, Human herpesvirus 5
guuccuguaaauaaaaa

SEQ ID NO: 3978878 - RNA, 15 nt, Human herpesvirus 5
guucgucucugccuc

SEQ ID NO: 3978879 - RNA, 18 nt, Human herpesvirus 5
guugacccagggcugcuc

SEQ ID NO: 3978880 - RNA, 20 nt, Human herpesvirus 5
guugagcacgucuagcaggc

SEQ ID NO: 3978881 - RNA, 21 nt, Human herpesvirus 5
guuggaacccaucgaggaggc

SEQ ID NO: 3978882 - RNA, 17 nt, Human herpesvirus 5
guuggcuuacugccugc

SEQ ID NO: 3978883 - RNA, 22 nt, Human herpesvirus 5
guuguccucgcaccgggcuuug

SEQ ID NO: 3978884 - RNA, 14 nt, Human herpesvirus 5
guuguguuuugcuu

SEQ ID NO: 3978885 - RNA, 15 nt, Human herpesvirus 5
guuucucgcuuacgu

SEQ ID NO: 3978886 - RNA, 17 nt, Human herpesvirus 5
guuugcggcgcagacgu

SEQ ID NO: 3978887 - RNA, 11 nt, Human herpesvirus 5
guuuucuaguu

SEQ ID NO: 3978888 - RNA, 22 nt, Human herpesvirus 5
uaaaaugugcgaauuaggcaac

SEQ ID NO: 3978889 - RNA, 22 nt, Human herpesvirus 5
uaaagcuuucuuucucagucug

SEQ ID NO: 3978890 - RNA, 22 nt, Human herpesvirus 5
uaaaucacgucagguucacacg

SEQ ID NO: 3978891 - RNA, 18 nt, Human herpesvirus 5
uaaccacguugcgucgug

SEQ ID NO: 3978892 - RNA, 16 nt, Human herpesvirus 5
uaaccgagcugaagga

SEQ ID NO: 3978893 - RNA, 14 nt, Human herpesvirus 5
uaacggucaagaag

SEQ ID NO: 3978894 - RNA, 18 nt, Human herpesvirus 5
uaagcagccucuucgugg

SEQ ID NO: 3978895 - RNA, 16 nt, Human herpesvirus 5
uaagcgcgaccggcag

SEQ ID NO: 3978896 - RNA, 18 nt, Human herpesvirus 5
uaaggaaaacgugacuuu

SEQ ID NO: 3978897 - RNA, 22 nt, Human herpesvirus 5
uaauaagccggcagcugcuuuc

SEQ ID NO: 3978898 - RNA, 18 nt, Human herpesvirus 5
uaaugugucgcuauacac

SEQ ID NO: 3978899 - RNA, 15 nt, Human herpesvirus 5
uaauuguccuucucc

SEQ ID NO: 3978900 - RNA, 15 nt, Human herpesvirus 5
uacaagaaccacguu

SEQ ID NO: 3978901 - RNA, 22 nt, Human herpesvirus 5
uacaagacggcuauccagcagc

SEQ ID NO: 3978902 - RNA, 18 nt, Human herpesvirus 5
uacaaucauaauauucua

SEQ ID NO: 3978903 - RNA, 18 nt, Human herpesvirus 5
uacacgcacgcugguuac

SEQ ID NO: 3978904 - RNA, 17 nt, Human herpesvirus 5
uacagauacgcaaugca

SEQ ID NO: 3978905 - RNA, 14 nt, Human herpesvirus 5
uacauauacgugau

SEQ ID NO: 3978906 - RNA, 21 nt, Human herpesvirus 5
uacaucacugacaagucguuu

SEQ ID NO: 3978907 - RNA, 24 nt, Human herpesvirus 5
uacauugcccuucuggagcacacu

SEQ ID NO: 3978908 - RNA, 16 nt, Human herpesvirus 5
uaccagcccagggauc

SEQ ID NO: 3978909 - RNA, 18 nt, Human herpesvirus 5
ucgccgccgucgcgccuu

SEQ ID NO: 3978910 - RNA, 15 nt, Human herpesvirus 5
ucgccugcgacggcg

SEQ ID NO: 3978911 - RNA, 14 nt, Human herpesvirus 5
ucgcgagccccauc

SEQ ID NO: 3978912 - RNA, 17 nt, Human herpesvirus 5
ucgcgccuuccuccucu

SEQ ID NO: 3978913 - RNA, 20 nt, Human herpesvirus 5
ucgcucggccucgcucggaa

SEQ ID NO: 3978914 - RNA, 14 nt, Human herpesvirus 5
ucggcgccgccucg

SEQ ID NO: 3978915 - RNA, 15 nt, Human herpesvirus 5
ucgggcccgccacug

SEQ ID NO: 3978916 - RNA, 17 nt, Human herpesvirus 5
ucggggcgcagaaacuu

SEQ ID NO: 3978917 - RNA, 14 nt, Human herpesvirus 5
ucgucucaucacau

SEQ ID NO: 3978918 - RNA, 14 nt, Human herpesvirus 5
ucgucuccacguag

SEQ ID NO: 3978919 - RNA, 13 nt, Human herpesvirus 5
ucguguacuaccg

SEQ ID NO: 3978920 - RNA, 23 nt, Human herpesvirus 5
caguagcggguaauaaaaacaau

SEQ ID NO: 3978921 - RNA, 15 nt, Human herpesvirus 5
caguaugacgugcga

SEQ ID NO: 3978922 - RNA, 20 nt, Human herpesvirus 5
caguauuucuagagcacuga

SEQ ID NO: 3978923 - RNA, 23 nt, Human herpesvirus 5
cagucagacccacuaccuggagg

SEQ ID NO: 3978924 - RNA, 15 nt, Human herpesvirus 5
cagucagagagucug

SEQ ID NO: 3978925 - RNA, 20 nt, Human herpesvirus 5
caguccauugucaguauuuu

SEQ ID NO: 3978926 - RNA, 12 nt, Human herpesvirus 5
caguccgcuccg

SEQ ID NO: 3978927 - RNA, 22 nt, Human herpesvirus 5
cagucgacgggugguaccugca

SEQ ID NO: 3978928 - RNA, 19 nt, Human herpesvirus 5
cagugacgcuaggcggcgc

SEQ ID NO: 3978929 - RNA, 15 nt, Human herpesvirus 5
cagugcgucgcuguu

SEQ ID NO: 3978930 - RNA, 18 nt, Human herpesvirus 5
caguggcagcaggaccug

SEQ ID NO: 3978931 - RNA, 16 nt, Human herpesvirus 5
caguuaccaccgucgc

SEQ ID NO: 3978932 - RNA, 21 nt, Human herpesvirus 5
caguuuccgaagaugccgugu

SEQ ID NO: 3978933 - RNA, 20 nt, Human herpesvirus 5
cauaaugccgucaccgucgc

SEQ ID NO: 3978934 - RNA, 18 nt, Human herpesvirus 5
cauagcguaaauccccgu

SEQ ID NO: 3978935 - RNA, 14 nt, Human herpesvirus 5
cauauagccaauaa

SEQ ID NO: 3978936 - RNA, 22 nt, Human herpesvirus 5
cauauguagcacucaacauguu

SEQ ID NO: 3978937 - RNA, 14 nt, Human herpesvirus 5
caucacgcaaagca

SEQ ID NO: 3978938 - RNA, 22 nt, Human herpesvirus 5
caucaguuucugcggcguaccu

SEQ ID NO: 3978939 - RNA, 22 nt, Human herpesvirus 5
caucaucaacagcagcaacagc

SEQ ID NO: 3978940 - RNA, 13 nt, Human herpesvirus 5
caucauggcccaa

SEQ ID NO: 3978941 - RNA, 20 nt, Human herpesvirus 5
caucgaggaggccgcacugg

SEQ ID NO: 3978942 - RNA, 17 nt, Human herpesvirus 5
caucgcagccacgcgcu

SEQ ID NO: 3978943 - RNA, 21 nt, Human herpesvirus 5
caucgccgucgaguacgugcu

SEQ ID NO: 3978944 - RNA, 21 nt, Human herpesvirus 5
caucggcaacuucuuggugau

SEQ ID NO: 3978945 - RNA, 13 nt, Human herpesvirus 5
caucgucaaagcc

SEQ ID NO: 3978946 - RNA, 15 nt, Human herpesvirus 5
caucugccgaaacac

SEQ ID NO: 3978947 - RNA, 19 nt, Human herpesvirus 5
caucugcggcagcgguacc

SEQ ID NO: 3978948 - RNA, 16 nt, Human herpesvirus 5
caucuguuuuugcugc

SEQ ID NO: 3978949 - RNA, 17 nt, Human herpesvirus 5
caucuuucagcuggcuu

SEQ ID NO: 3978950 - RNA, 13 nt, Human herpesvirus 5
caugaagcggaug

SEQ ID NO: 3978951 - RNA, 23 nt, Human herpesvirus 5
caugaaucuuccccucugcugcu

SEQ ID NO: 3978952 - RNA, 19 nt, Human herpesvirus 5
caugagucgccgacgguca

SEQ ID NO: 3978953 - RNA, 19 nt, Human herpesvirus 5
caugaugaagauggccauc

SEQ ID NO: 3978954 - RNA, 18 nt, Human herpesvirus 5
caugcuauaagacagccu

SEQ ID NO: 3978955 - RNA, 19 nt, Human herpesvirus 5
caugcuucaugucgucccg

SEQ ID NO: 3978956 - RNA, 23 nt, Human herpesvirus 5
cauggacccgccgcuaccgucgc

SEQ ID NO: 3978957 - RNA, 17 nt, Human herpesvirus 5
cauggcggcggccacgg

SEQ ID NO: 3978958 - RNA, 17 nt, Human herpesvirus 5
caugucccuacucacca

SEQ ID NO: 3978959 - RNA, 17 nt, Human herpesvirus 5
caugucgcgacagagag

SEQ ID NO: 3978960 - RNA, 17 nt, Human herpesvirus 5
cauuacuaaacaaaaaa

SEQ ID NO: 3978961 - RNA, 16 nt, Human herpesvirus 5
cauuggagaacagugc

SEQ ID NO: 3978962 - RNA, 16 nt, Human herpesvirus 5
cauuggcaacaucacc

SEQ ID NO: 3978963 - RNA, 14 nt, Human herpesvirus 5
cauuuucuuucuag

SEQ ID NO: 3978964 - RNA, 15 nt, Human herpesvirus 5
cauuuucuuucuagu

SEQ ID NO: 3978965 - RNA, 19 nt, Human herpesvirus 5
ccaaaccgcaggagcugcu

SEQ ID NO: 3978966 - RNA, 22 nt, Human herpesvirus 5
ccaaagccgccgccgaagccug

SEQ ID NO: 3978967 - RNA, 15 nt, Human herpesvirus 5
ccaaccgacguacga

SEQ ID NO: 3978968 - RNA, 14 nt, Human herpesvirus 5
ccaacuucacuuca

SEQ ID NO: 3978969 - RNA, 18 nt, Human herpesvirus 5
ccaagagcaugcuguggg

SEQ ID NO: 3978970 - RNA, 20 nt, Human herpesvirus 5
ccaagccgcagcgcggaaac

SEQ ID NO: 3978971 - RNA, 18 nt, Human herpesvirus 5
ccaaggaaccaccguagc

SEQ ID NO: 3978972 - RNA, 12 nt, Human herpesvirus 5
ccaaguucagca

SEQ ID NO: 3978973 - RNA, 13 nt, Human herpesvirus 5
ccaaucgacugcc

SEQ ID NO: 3978974 - RNA, 21 nt, Human herpesvirus 5
ccacaagcgccgucacuuccc

SEQ ID NO: 3978975 - RNA, 11 nt, Human herpesvirus 5
ccacaguuucc

SEQ ID NO: 3978976 - RNA, 22 nt, Human herpesvirus 5
ccaccaggccgcaaagcuggac

SEQ ID NO: 3978977 - RNA, 17 nt, Human herpesvirus 5
ccaccccccgggccacc

SEQ ID NO: 3978978 - RNA, 13 nt, Human herpesvirus 5
ccaccgacaugga

SEQ ID NO: 3978979 - RNA, 16 nt, Human herpesvirus 5
ccaccgagacgugcga

SEQ ID NO: 3978980 - RNA, 14 nt, Human herpesvirus 5
ccaccucugcuacu

SEQ ID NO: 3978981 - RNA, 16 nt, Human herpesvirus 5
ccacgagugacgacga

SEQ ID NO: 3978982 - RNA, 17 nt, Human herpesvirus 5
ccacgccgaugcuccgc

SEQ ID NO: 3978983 - RNA, 22 nt, Human herpesvirus 5
ccacgccggccugagcgcgcuc

SEQ ID NO: 3978984 - RNA, 16 nt, Human herpesvirus 5
ccacgcucgagggcuc

SEQ ID NO: 3978985 - RNA, 21 nt, Human herpesvirus 5
ccacgcucgagggcuccgucu

SEQ ID NO: 3978986 - RNA, 17 nt, Human herpesvirus 5
ccacggcgaaccgccgu

SEQ ID NO: 3978987 - RNA, 17 nt, Human herpesvirus 5
ccacguccacucagaca

SEQ ID NO: 3978988 - RNA, 21 nt, Human herpesvirus 5
ccacguucuugcguccuucau

SEQ ID NO: 3978989 - RNA, 15 nt, Human herpesvirus 5
ccacuaauccgcacc

SEQ ID NO: 3978990 - RNA, 17 nt, Human herpesvirus 5
ccacuacuaccuccccu

SEQ ID NO: 3978991 - RNA, 14 nt, Human herpesvirus 5
ccacucccaccacg

SEQ ID NO: 3978992 - RNA, 18 nt, Human herpesvirus 5
ccacucgcaccggcagca

SEQ ID NO: 3978993 - RNA, 17 nt, Human herpesvirus 5
ccagaggcccgccgaga

SEQ ID NO: 3978994 - RNA, 13 nt, Human herpesvirus 5
ccagccccagagc

SEQ ID NO: 3978995 - RNA, 18 nt, Human herpesvirus 5
ccagccccgucaaaacac

SEQ ID NO: 3978996 - RNA, 17 nt, Human herpesvirus 5
ccagcccuauccuccau

SEQ ID NO: 3978997 - RNA, 12 nt, Human herpesvirus 5
ccagcgccacca

SEQ ID NO: 3978998 - RNA, 17 nt, Human herpesvirus 5
ccagcggccgcaguggg

SEQ ID NO: 3978999 - RNA, 17 nt, Human herpesvirus 5
ccagcugccaccagggc

SEQ ID NO: 3979000 - RNA, 14 nt, Human herpesvirus 5
ccaguacagcgccg

SEQ ID NO: 3979001 - RNA, 15 nt, Human herpesvirus 5
ccaguaccaccgcug

SEQ ID NO: 3979002 - RNA, 17 nt, Human herpesvirus 5
ccaguagacagacagga

SEQ ID NO: 3979003 - RNA, 12 nt, Human herpesvirus 5
ccaguugcuguu

SEQ ID NO: 3979004 - RNA, 19 nt, Human herpesvirus 5
ccaucaguacggcuuucug

SEQ ID NO: 3979005 - RNA, 18 nt, Human herpesvirus 5
ccauccucacacugacgg

SEQ ID NO: 3979006 - RNA, 16 nt, Human herpesvirus 5
ccaucgguacgaacgc

SEQ ID NO: 3979007 - RNA, 16 nt, Human herpesvirus 5
ccaugagaagagaaaa

SEQ ID NO: 3979008 - RNA, 19 nt, Human herpesvirus 5
ccaugagcggcaggaaggc

SEQ ID NO: 3979009 - RNA, 18 nt, Human herpesvirus 5
ccaugccggagcuacgcg

SEQ ID NO: 3979010 - RNA, 14 nt, Human herpesvirus 5
ccaugugcagcugg

SEQ ID NO: 3979011 - RNA, 14 nt, Human herpesvirus 5
cccaagccaaaaac

SEQ ID NO: 3979012 - RNA, 16 nt, Human herpesvirus 5
cccacuggaguugcuc

SEQ ID NO: 3979013 - RNA, 16 nt, Human herpesvirus 5
cccagcagaccagcca

SEQ ID NO: 3979014 - RNA, 21 nt, Human herpesvirus 5
cccaugacgcagucgcucauc

SEQ ID NO: 3979015 - RNA, 16 nt, Human herpesvirus 5
ccccacccaguagaca

SEQ ID NO: 3979016 - RNA, 13 nt, Human herpesvirus 5
ccccaccuucccu

SEQ ID NO: 3979017 - RNA, 18 nt, Human herpesvirus 5
cccccgucgcccgaggcg

SEQ ID NO: 3979018 - RNA, 18 nt, Human herpesvirus 5
ccccgaauuugggcggug

SEQ ID NO: 3979019 - RNA, 22 nt, Human herpesvirus 5
ccccgauaaucggcucucaggc

SEQ ID NO: 3979020 - RNA, 20 nt, Human herpesvirus 5
ccccggcagcggucucaucu

SEQ ID NO: 3979021 - RNA, 17 nt, Human herpesvirus 5
ccccgggccaccagccg

SEQ ID NO: 3979022 - RNA, 13 nt, Human herpesvirus 5
ccccucgcugggc

SEQ ID NO: 3979023 - RNA, 17 nt, Human herpesvirus 5
ccccucugcugcugguu

SEQ ID NO: 3979024 - RNA, 14 nt, Human herpesvirus 5
cccgaggcggagga

SEQ ID NO: 3979025 - RNA, 23 nt, Human herpesvirus 5
cccgaggucuuuugcacgcgcga

SEQ ID NO: 3979026 - RNA, 20 nt, Human herpesvirus 5
cccgaugugcagggacagug

SEQ ID NO: 3979027 - RNA, 16 nt, Human herpesvirus 5
cccgcacacuggcugg

SEQ ID NO: 3979028 - RNA, 17 nt, Human herpesvirus 5
cccgccggagcccgguc

SEQ ID NO: 3979029 - RNA, 23 nt, Human herpesvirus 5
cccgccggagcccggucugagcu

SEQ ID NO: 3979030 - RNA, 18 nt, Human herpesvirus 5
cccgccggcgggcggcug

SEQ ID NO: 3979031 - RNA, 20 nt, Human herpesvirus 5
cccgcuucaacgccugcacc

SEQ ID NO: 3979032 - RNA, 24 nt, Human herpesvirus 5
cccggucggucuuccugcugcgca

SEQ ID NO: 3979033 - RNA, 18 nt, Human herpesvirus 5
cccgguugcggccccgua

SEQ ID NO: 3979034 - RNA, 17 nt, Human herpesvirus 5
cccgucaaaacacacgc

SEQ ID NO: 3979035 - RNA, 19 nt, Human herpesvirus 5
cccguggacgacuggcuca

SEQ ID NO: 3979036 - RNA, 18 nt, Human herpesvirus 5
cccguggaucagccgccg

SEQ ID NO: 3979037 - RNA, 20 nt, Human herpesvirus 5
cccguuacgccggaggccgc

SEQ ID NO: 3979038 - RNA, 18 nt, Human herpesvirus 5
cccuccgacuuccuccuc

SEQ ID NO: 3979039 - RNA, 14 nt, Human herpesvirus 5
cccuccuuuucccc

SEQ ID NO: 3979040 - RNA, 18 nt, Human herpesvirus 5
cccucuucuuugccggcu

SEQ ID NO: 3979041 - RNA, 20 nt, Human herpesvirus 5
cccuggaagcgugugugggc

SEQ ID NO: 3979042 - RNA, 19 nt, Human herpesvirus 5
cccuguaugagcuguuucg

SEQ ID NO: 3979043 - RNA, 14 nt, Human herpesvirus 5
cccuuccaugacgc

SEQ ID NO: 3979044 - RNA, 19 nt, Human herpesvirus 5
cccuucuggagcacacugc

SEQ ID NO: 3979045 - RNA, 14 nt, Human herpesvirus 5
ccgaacagacuugg

SEQ ID NO: 3979046 - RNA, 13 nt, Human herpesvirus 5
ccgacaaccugcu

SEQ ID NO: 3979047 - RNA, 16 nt, Human herpesvirus 5
ccgacaaggcgcggcg

SEQ ID NO: 3979048 - RNA, 14 nt, Human herpesvirus 5
ccgacauggagaca

SEQ ID NO: 3979049 - RNA, 13 nt, Human herpesvirus 5
ccgacgacgacga

SEQ ID NO: 3979050 - RNA, 17 nt, Human herpesvirus 5
ccgacgcgcgaccgcga

SEQ ID NO: 3979051 - RNA, 20 nt, Human herpesvirus 5
ccgacggccaaucgcguggc

SEQ ID NO: 3979052 - RNA, 21 nt, Human herpesvirus 5
ccgacucgcugccgcagcugc

SEQ ID NO: 3979053 - RNA, 22 nt, Human herpesvirus 5
ccgagauaucagaggccaccca

SEQ ID NO: 3979054 - RNA, 14 nt, Human herpesvirus 5
ccgagcacguacac

SEQ ID NO: 3979055 - RNA, 19 nt, Human herpesvirus 5
ccgagcaggugcgcguggu

SEQ ID NO: 3979056 - RNA, 19 nt, Human herpesvirus 5
ccgagcccccgucgcccga

SEQ ID NO: 3979057 - RNA, 16 nt, Human herpesvirus 5
ccgagcuugugcuucu

SEQ ID NO: 3979058 - RNA, 17 nt, Human herpesvirus 5
ccgaguccaccucugcu

SEQ ID NO: 3979059 - RNA, 23 nt, Human herpesvirus 5
ccgaguccaccucugcuacuggc

SEQ ID NO: 3979060 - RNA, 18 nt, Human herpesvirus 5
ccgauccgcacgaccgcg

SEQ ID NO: 3979061 - RNA, 17 nt, Human herpesvirus 5
ccgcaacaacagcagca

SEQ ID NO: 3979062 - RNA, 19 nt, Human herpesvirus 5
ccgcacuggacgacgucaa

SEQ ID NO: 3979063 - RNA, 15 nt, Human herpesvirus 5
ccgcagacaccaagc

SEQ ID NO: 3979064 - RNA, 16 nt, Human herpesvirus 5
ccgcagcggcuuugug

SEQ ID NO: 3979065 - RNA, 18 nt, Human herpesvirus 5
ccgcagucuggcuugggu

SEQ ID NO: 3979066 - RNA, 15 nt, Human herpesvirus 5
ccgcagugggcccac

SEQ ID NO: 3979067 - RNA, 16 nt, Human herpesvirus 5
ccgccacgcugcuuca

SEQ ID NO: 3979068 - RNA, 18 nt, Human herpesvirus 5
ccgccaugucgcuccgcg

SEQ ID NO: 3979069 - RNA, 14 nt, Human herpesvirus 5
ccgccccagcagac

SEQ ID NO: 3979070 - RNA, 13 nt, Human herpesvirus 5
ccgcccgagcagg

SEQ ID NO: 3979071 - RNA, 21 nt, Human herpesvirus 5
ccgccgaagcuucgcgcgccg

SEQ ID NO: 3979072 - RNA, 16 nt, Human herpesvirus 5
ccgccgacucgcugcc

SEQ ID NO: 3979073 - RNA, 14 nt, Human herpesvirus 5
ccgccgcagccacg

SEQ ID NO: 3979074 - RNA, 18 nt, Human herpesvirus 5
ccgccucggaucuacuca

SEQ ID NO: 3979075 - RNA, 14 nt, Human herpesvirus 5
ccgcgacccucgcg

SEQ ID NO: 3979076 - RNA, 21 nt, Human herpesvirus 5
ccgcgaucgaggcggcggcga

SEQ ID NO: 3979077 - RNA, 14 nt, Human herpesvirus 5
ccgcgcccacugga

SEQ ID NO: 3979078 - RNA, 18 nt, Human herpesvirus 5
ccgcggacgccugcgacg

SEQ ID NO: 3979079 - RNA, 16 nt, Human herpesvirus 5
ccgcggcaccagagac

SEQ ID NO: 3979080 - RNA, 16 nt, Human herpesvirus 5
ccgcggcgguggccgu

SEQ ID NO: 3979081 - RNA, 18 nt, Human herpesvirus 5
ccgcgucagcggccgccg

SEQ ID NO: 3979082 - RNA, 16 nt, Human herpesvirus 5
ccgcgucccuggggcu

SEQ ID NO: 3979083 - RNA, 17 nt, Human herpesvirus 5
ccgcugugcuggccgcc

SEQ ID NO: 3979084 - RNA, 17 nt, Human herpesvirus 5
ccggaggacgacagcuc

SEQ ID NO: 3979085 - RNA, 17 nt, Human herpesvirus 5
ccggcagcacaccugcc

SEQ ID NO: 3979086 - RNA, 22 nt, Human herpesvirus 5
ccggccgcggugccggcggcua

SEQ ID NO: 3979087 - RNA, 22 nt, Human herpesvirus 5
ccggcgcaguuugcggcgcaga

SEQ ID NO: 3979088 - RNA, 18 nt, Human herpesvirus 5
ccggcgccugguugcugc

SEQ ID NO: 3979089 - RNA, 22 nt, Human herpesvirus 5
ccggcggggaaaauaccgaggc

SEQ ID NO: 3979090 - RNA, 13 nt, Human herpesvirus 5
ccggcuccgccgu

SEQ ID NO: 3979091 - RNA, 23 nt, Human herpesvirus 5
ccggcugcggcggcacucgcucc

SEQ ID NO: 3979092 - RNA, 14 nt, Human herpesvirus 5
ccgggcggcuuugc

SEQ ID NO: 3979093 - RNA, 18 nt, Human herpesvirus 5
ccgggcggcuuugccguc

SEQ ID NO: 3979094 - RNA, 20 nt, Human herpesvirus 5
ccgguauucggaaacagcgu

SEQ ID NO: 3979095 - RNA, 16 nt, Human herpesvirus 5
ccggugcgcgaccgca

SEQ ID NO: 3979096 - RNA, 20 nt, Human herpesvirus 5
ccguacuaagucucccgugu

SEQ ID NO: 3979097 - RNA, 18 nt, Human herpesvirus 5
ccguagcuagugcucggc

SEQ ID NO: 3979098 - RNA, 23 nt, Human herpesvirus 5
ccgucaacacggucauguuucuc

SEQ ID NO: 3979099 - RNA, 13 nt, Human herpesvirus 5
ccgucaccaccgc

SEQ ID NO: 3979100 - RNA, 13 nt, Human herpesvirus 5
ccgucacugccac

SEQ ID NO: 3979101 - RNA, 22 nt, Human herpesvirus 5
ccgucaucggcacgugcucuuu

SEQ ID NO: 3979102 - RNA, 12 nt, Human herpesvirus 5
ccgucgccgcga

SEQ ID NO: 3979103 - RNA, 20 nt, Human herpesvirus 5
ccgucgcuacauucgccgca

SEQ ID NO: 3979104 - RNA, 14 nt, Human herpesvirus 5
ccgucggcgccgcc

SEQ ID NO: 3979105 - RNA, 21 nt, Human herpesvirus 5
ccgucggcgucgcgucgcagg

SEQ ID NO: 3979106 - RNA, 21 nt, Human herpesvirus 5
ccgucuggagguggccugcau

SEQ ID NO: 3979107 - RNA, 13 nt, Human herpesvirus 5
ccgugccacggaa

SEQ ID NO: 3979108 - RNA, 14 nt, Human herpesvirus 5
ccgugccagcuggc

SEQ ID NO: 3979109 - RNA, 21 nt, Human herpesvirus 5
ccguggagaugcaggaggugg

SEQ ID NO: 3979110 - RNA, 20 nt, Human herpesvirus 5
ccgugguggccgugcugggc

SEQ ID NO: 3979111 - RNA, 16 nt, Human herpesvirus 5
ccguguucuuaaucuu

SEQ ID NO: 3979112 - RNA, 19 nt, Human herpesvirus 5
ccguugccgccucagaacc

SEQ ID NO: 3979113 - RNA, 21 nt, Human herpesvirus 5
ccuaaguccaacaucguggua

SEQ ID NO: 3979114 - RNA, 13 nt, Human herpesvirus 5
ccuaccgccgccg

SEQ ID NO: 3979115 - RNA, 19 nt, Human herpesvirus 5
ccuacgacaacaucccucc

SEQ ID NO: 3979116 - RNA, 19 nt, Human herpesvirus 5
ccuacgugcaacgccacca

SEQ ID NO: 3979117 - RNA, 23 nt, Human herpesvirus 5
ccuacucaccaaagccgccgccg

SEQ ID NO: 3979118 - RNA, 17 nt, Human herpesvirus 5
ccuagcgaucgcaugcu

SEQ ID NO: 3979119 - RNA, 19 nt, Human herpesvirus 5
ccuauaaaaccgugcccgu

SEQ ID NO: 3979120 - RNA, 15 nt, Human herpesvirus 5
ccuauccgcgcggcu

SEQ ID NO: 3979121 - RNA, 20 nt, Human herpesvirus 5
ccucagcuugcccgaccacg

SEQ ID NO: 3979122 - RNA, 15 nt, Human herpesvirus 5
ccucagguuccccga

SEQ ID NO: 3979123 - RNA, 15 nt, Human herpesvirus 5
ccucagucgccguca

SEQ ID NO: 3979124 - RNA, 13 nt, Human herpesvirus 5
ccucagucugccu

SEQ ID NO: 3979125 - RNA, 17 nt, Human herpesvirus 5
ccucauauacgguacac

SEQ ID NO: 3979126 - RNA, 22 nt, Human herpesvirus 5
ccuccgaacgcucgugagcaac

SEQ ID NO: 3979127 - RNA, 13 nt, Human herpesvirus 5
ccuccgcggcccg

SEQ ID NO: 3979128 - RNA, 14 nt, Human herpesvirus 5
ccuccgcggcccgu

SEQ ID NO: 3979129 - RNA, 18 nt, Human herpesvirus 5
ccuccggaacccucuggc

SEQ ID NO: 3979130 - RNA, 24 nt, Human herpesvirus 5
ccucgcucggaacgacgacucagg

SEQ ID NO: 3979131 - RNA, 17 nt, Human herpesvirus 5
ccucggagcacgggcga

SEQ ID NO: 3979132 - RNA, 15 nt, Human herpesvirus 5
ccucggccucuuccu

SEQ ID NO: 3979133 - RNA, 22 nt, Human herpesvirus 5
ccucgucgugcccgucggcugc

SEQ ID NO: 3979134 - RNA, 20 nt, Human herpesvirus 5
ccucuacaaacuagcauucu

SEQ ID NO: 3979135 - RNA, 13 nt, Human herpesvirus 5
ccucuaccccgcc

SEQ ID NO: 3979136 - RNA, 14 nt, Human herpesvirus 5
ccucuagagacaga

SEQ ID NO: 3979137 - RNA, 15 nt, Human herpesvirus 5
ccucuagagacagac

SEQ ID NO: 3979138 - RNA, 21 nt, Human herpesvirus 5
ccucugccugggcacgcgcgu

SEQ ID NO: 3979139 - RNA, 22 nt, Human herpesvirus 5
ccugacaguuuaugagaaaagg

SEQ ID NO: 3979140 - RNA, 17 nt, Human herpesvirus 5
ccugaguuccgucagca

SEQ ID NO: 3979141 - RNA, 14 nt, Human herpesvirus 5
ccugcacgccgccg

SEQ ID NO: 3979142 - RNA, 18 nt, Human herpesvirus 5
ccugccgaagaccucacc

SEQ ID NO: 3979143 - RNA, 20 nt, Human herpesvirus 5
ccugccuacgucuucaugac

SEQ ID NO: 3979144 - RNA, 21 nt, Human herpesvirus 5
ccugccucgacaucucgccgu

SEQ ID NO: 3979145 - RNA, 19 nt, Human herpesvirus 5
ccugcgaggaccguacacg

SEQ ID NO: 3979146 - RNA, 19 nt, Human herpesvirus 5
ccugcugccgccacugggc

SEQ ID NO: 3979147 - RNA, 18 nt, Human herpesvirus 5
ccuggaagcguguguggg

SEQ ID NO: 3979148 - RNA, 18 nt, Human herpesvirus 5
ccuggaccggugguacug

SEQ ID NO: 3979149 - RNA, 16 nt, Human herpesvirus 5
gcuacgucgacaugaa

SEQ ID NO: 3979150 - RNA, 20 nt, Human herpesvirus 5
gcuacuuuccgauccuugga

SEQ ID NO: 3979151 - RNA, 15 nt, Human herpesvirus 5
gcuaggcgggcugga

SEQ ID NO: 3979152 - RNA, 22 nt, Human herpesvirus 5
gcucaaaguacuugucggcgug

SEQ ID NO: 3979153 - RNA, 13 nt, Human herpesvirus 5
gcucaacuuucua

SEQ ID NO: 3979154 - RNA, 20 nt, Human herpesvirus 5
gcucaccgcaguugcugccu

SEQ ID NO: 3979155 - RNA, 16 nt, Human herpesvirus 5
gcucacguagcaggcc

SEQ ID NO: 3979156 - RNA, 23 nt, Human herpesvirus 5
gcucacguugaugaaaacgaggu

SEQ ID NO: 3979157 - RNA, 21 nt, Human herpesvirus 5
gcucagcugguggcucaugcc

SEQ ID NO: 3979158 - RNA, 21 nt, Human herpesvirus 5
gcucagcuugaugguguagga

SEQ ID NO: 3979159 - RNA, 19 nt, Human herpesvirus 5
gcucaggccacccgccgga

SEQ ID NO: 3979160 - RNA, 13 nt, Human herpesvirus 5
gcucagucgccua

SEQ ID NO: 3979161 - RNA, 16 nt, Human herpesvirus 5
gcuccacacgcaucug

SEQ ID NO: 3979162 - RNA, 21 nt, Human herpesvirus 5
gcucccugcuccgcaagcgcc

SEQ ID NO: 3979163 - RNA, 13 nt, Human herpesvirus 5
gcucgcucgcgcc

SEQ ID NO: 3979164 - RNA, 22 nt, Human herpesvirus 5
gcucggcgcccaaaccgcagga

SEQ ID NO: 3979165 - RNA, 12 nt, Human herpesvirus 5
gcucuacgcgug

SEQ ID NO: 3979166 - RNA, 16 nt, Human herpesvirus 5
gcucucgcagcccgag

SEQ ID NO: 3979167 - RNA, 17 nt, Human herpesvirus 5
gcucucgcggcccuuca

SEQ ID NO: 3979168 - RNA, 18 nt, Human herpesvirus 5
gcucucggaucugcggcu

SEQ ID NO: 3979169 - RNA, 21 nt, Human herpesvirus 5
gcugacgcggacgaggaacag

SEQ ID NO: 3979170 - RNA, 16 nt, Human herpesvirus 5
gcugauaagacggacu

SEQ ID NO: 3979171 - RNA, 14 nt, Human herpesvirus 5
gcugcaagguacgg

SEQ ID NO: 3979172 - RNA, 23 nt, Human herpesvirus 5
gcugcaccucaacaagggcuggc

SEQ ID NO: 3979173 - RNA, 18 nt, Human herpesvirus 5
gcugcccgucaagaccga

SEQ ID NO: 3979174 - RNA, 18 nt, Human herpesvirus 5
gcugccgcagcugcugga

SEQ ID NO: 3979175 - RNA, 18 nt, Human herpesvirus 5
gcugcuauaagaaggcca

SEQ ID NO: 3979176 - RNA, 19 nt, Human herpesvirus 5
gcugcuauaagaaggccau

SEQ ID NO: 3979177 - RNA, 13 nt, Human herpesvirus 5
gcugcugagacug

SEQ ID NO: 3979178 - RNA, 15 nt, Human herpesvirus 5
gcugcugcacgggcu

SEQ ID NO: 3979179 - RNA, 16 nt, Human herpesvirus 5
gcugcuuucgcacgca

SEQ ID NO: 3979180 - RNA, 21 nt, Human herpesvirus 5
gcuggacugacacagcuccug

SEQ ID NO: 3979181 - RNA, 18 nt, Human herpesvirus 5
gcuggaggcccuggugga

SEQ ID NO: 3979182 - RNA, 13 nt, Human herpesvirus 5
gcuggccggcuug

SEQ ID NO: 3979183 - RNA, 13 nt, Human herpesvirus 5
gcuggcgggccga

SEQ ID NO: 3979184 - RNA, 20 nt, Human herpesvirus 5
gcuggcgguauggcugcgcg

SEQ ID NO: 3979185 - RNA, 15 nt, Human herpesvirus 5
gcugggucagugcca

SEQ ID NO: 3979186 - RNA, 11 nt, Human herpesvirus 5
gcuggugucuc

SEQ ID NO: 3979187 - RNA, 19 nt, Human herpesvirus 5
gcugucguucuccgcuugc

SEQ ID NO: 3979188 - RNA, 17 nt, Human herpesvirus 5
gcuguugaccuggguag

SEQ ID NO: 3979189 - RNA, 19 nt, Human herpesvirus 5
gcuguuuuuguucacaacu

SEQ ID NO: 3979190 - RNA, 19 nt, Human herpesvirus 5
gcuucggccggcugcugca

SEQ ID NO: 3979191 - RNA, 16 nt, Human herpesvirus 5
gcuucuuuucuggggu

SEQ ID NO: 3979192 - RNA, 15 nt, Human herpesvirus 5
gcuugcuccucuucc

SEQ ID NO: 3979193 - RNA, 13 nt, Human herpesvirus 5
gcuuuagccaggu

SEQ ID NO: 3979194 - RNA, 19 nt, Human herpesvirus 5
gcuuuauccgacucgcugu

SEQ ID NO: 3979195 - RNA, 15 nt, Human herpesvirus 5
ggaacguaccuagcu

SEQ ID NO: 3979196 - RNA, 22 nt, Human herpesvirus 5
ggaacugguuuucggacagagc

SEQ ID NO: 3979197 - RNA, 22 nt, Human herpesvirus 5
ggaacuuugccgucaugccuug

SEQ ID NO: 3979198 - RNA, 19 nt, Human herpesvirus 5
ggaagaaaccguguuucgc

SEQ ID NO: 3979199 - RNA, 15 nt, Human herpesvirus 5
ggaagaagaagaaca

SEQ ID NO: 3979200 - RNA, 22 nt, Human herpesvirus 5
ggaagaagaagaacaagcggug

SEQ ID NO: 3979201 - RNA, 15 nt, Human herpesvirus 5
ggaagagggaagcac

SEQ ID NO: 3979202 - RNA, 16 nt, Human herpesvirus 5
ggaauacccagcuggg

SEQ ID NO: 3979203 - RNA, 12 nt, Human herpesvirus 5
ggaaucugggag

SEQ ID NO: 3979204 - RNA, 22 nt, Human herpesvirus 5
ggaaugcggucaguuggggagu

SEQ ID NO: 3979205 - RNA, 17 nt, Human herpesvirus 5
ggaaugguaaagacauc

SEQ ID NO: 3979206 - RNA, 20 nt, Human herpesvirus 5
ggacaaccgcauccugccca

SEQ ID NO: 3979207 - RNA, 14 nt, Human herpesvirus 5
ggacaaggcuccga

SEQ ID NO: 3979208 - RNA, 23 nt, Human herpesvirus 5
ggacacguagaucccacuggcaa

SEQ ID NO: 3979209 - RNA, 23 nt, Human herpesvirus 5
ggaccauuuccaugugcagcugg

SEQ ID NO: 3979210 - RNA, 13 nt, Human herpesvirus 5
ggacccguacugc

SEQ ID NO: 3979211 - RNA, 20 nt, Human herpesvirus 5
ggacccguacugcgacggca

SEQ ID NO: 3979212 - RNA, 14 nt, Human herpesvirus 5
ggacgaaagugggg

SEQ ID NO: 3979213 - RNA, 21 nt, Human herpesvirus 5
ggacgacgcaccggccuccga

SEQ ID NO: 3979214 - RNA, 21 nt, Human herpesvirus 5
ggacgauauaaagaggcacgg

SEQ ID NO: 3979215 - RNA, 12 nt, Human herpesvirus 5
ggacgaugagcc

SEQ ID NO: 3979216 - RNA, 17 nt, Human herpesvirus 5
ggacgcgccacgcucgc

SEQ ID NO: 3979217 - RNA, 19 nt, Human herpesvirus 5
ggacucuuuaaccgagcug

SEQ ID NO: 3979218 - RNA, 20 nt, Human herpesvirus 5
ggagcgaguggggcaacugc

SEQ ID NO: 3979219 - RNA, 20 nt, Human herpesvirus 5
ggaggagugucagacacagc

SEQ ID NO: 3979220 - RNA, 23 nt, Human herpesvirus 5
ggaggauccaaggccuccagcgc

SEQ ID NO: 3979221 - RNA, 21 nt, Human herpesvirus 5
ggagguccuuuggguccagcc

SEQ ID NO: 3979222 - RNA, 15 nt, Human herpesvirus 5
ggaggugaccuggcu

SEQ ID NO: 3979223 - RNA, 15 nt, Human herpesvirus 5
ggaucgucaccacca

SEQ ID NO: 3979224 - RNA, 23 nt, Human herpesvirus 5
ggaucuacucaucggcauguucg

SEQ ID NO: 3979225 - RNA, 18 nt, Human herpesvirus 5
ggaucuggcggccgccgg

SEQ ID NO: 3979226 - RNA, 19 nt, Human herpesvirus 5
ggaucuuauucgcuuugaa

SEQ ID NO: 3979227 - RNA, 20 nt, Human herpesvirus 5
ggcaagccaaaccacaaggc

SEQ ID NO: 3979228 - RNA, 17 nt, Human herpesvirus 5
ggcaccaucggacucgc

SEQ ID NO: 3979229 - RNA, 13 nt, Human herpesvirus 5
ggcaccggcagcc

SEQ ID NO: 3979230 - RNA, 21 nt, Human herpesvirus 5
ggcaccuaucuccgacagcgc

SEQ ID NO: 3979231 - RNA, 22 nt, Human herpesvirus 5
ggcaggcggguugcagcuuuug

SEQ ID NO: 3979232 - RNA, 17 nt, Human herpesvirus 5
ggcauacaaugugcugc

SEQ ID NO: 3979233 - RNA, 15 nt, Human herpesvirus 5
ggccacccacccggu

SEQ ID NO: 3979234 - RNA, 17 nt, Human herpesvirus 5
ggccagcgccugguacu

SEQ ID NO: 3979235 - RNA, 15 nt, Human herpesvirus 5
ggccauggagcugca

SEQ ID NO: 3979236 - RNA, 19 nt, Human herpesvirus 5
ggcccugcugacgcuguug

SEQ ID NO: 3979237 - RNA, 16 nt, Human herpesvirus 5
ggcccuucaacggcac

SEQ ID NO: 3979238 - RNA, 15 nt, Human herpesvirus 5
ggccgacggcagcgu

SEQ ID NO: 3979239 - RNA, 22 nt, Human herpesvirus 5
ggccgacggcagcgugcugugc

SEQ ID NO: 3979240 - RNA, 23 nt, Human herpesvirus 5
ggccgacggugguuuccgcgccc

SEQ ID NO: 3979241 - RNA, 23 nt, Human herpesvirus 5
ggccgagacggcgugacacagca

SEQ ID NO: 3979242 - RNA, 18 nt, Human herpesvirus 5
ggccgauccacgggccgc

SEQ ID NO: 3979243 - RNA, 19 nt, Human herpesvirus 5
ggccgcacuggacgacguc

SEQ ID NO: 3979244 - RNA, 11 nt, Human herpesvirus 5
ggccgccgccc

SEQ ID NO: 3979245 - RNA, 21 nt, Human herpesvirus 5
ggccgccgcucaagccgcggu

SEQ ID NO: 3979246 - RNA, 13 nt, Human herpesvirus 5
ggccgcggaggug

SEQ ID NO: 3979247 - RNA, 16 nt, Human herpesvirus 5
ggccgcucgggaacag

SEQ ID NO: 3979248 - RNA, 22 nt, Human herpesvirus 5
ggccucuaucugcgccaguacg

SEQ ID NO: 3979249 - RNA, 15 nt, Human herpesvirus 5
ggccugggcugcugu

SEQ ID NO: 3979250 - RNA, 18 nt, Human herpesvirus 5
ggcgaaccgccgucgccg

SEQ ID NO: 3979251 - RNA, 15 nt, Human herpesvirus 5
ggcgacaccgccucg

SEQ ID NO: 3979252 - RNA, 23 nt, Human herpesvirus 5
ggcgauggucauguucucccagg

SEQ ID NO: 3979253 - RNA, 17 nt, Human herpesvirus 5
ggcgcccgggccgccug

SEQ ID NO: 3979254 - RNA, 21 nt, Human herpesvirus 5
ggcgccuuuuucuucgccucg

SEQ ID NO: 3979255 - RNA, 14 nt, Human herpesvirus 5
ggcgcgcaucgccg

SEQ ID NO: 3979256 - RNA, 20 nt, Human herpesvirus 5
ggcgcgcaucgccgucgagu

SEQ ID NO: 3979257 - RNA, 17 nt, Human herpesvirus 5
ggcggacuuggcagcgg

SEQ ID NO: 3979258 - RNA, 22 nt, Human herpesvirus 5
ggcggcgaucgcagccuccucg

SEQ ID NO: 3979259 - RNA, 23 nt, Human herpesvirus 5
ggcggcgggguuaagcguccucg

SEQ ID NO: 3979260 - RNA, 21 nt, Human herpesvirus 5
ggcgggcuuuuuugucccggg

SEQ ID NO: 3979261 - RNA, 19 nt, Human herpesvirus 5
ggcgguccaguggcaggcc

SEQ ID NO: 3979262 - RNA, 15 nt, Human herpesvirus 5
ggcgguccuccagca

SEQ ID NO: 3979263 - RNA, 18 nt, Human herpesvirus 5
ggcgguggucggcugccg

SEQ ID NO: 3979264 - RNA, 22 nt, Human herpesvirus 5
ggcgguuucagcuggcaacgug

SEQ ID NO: 3979265 - RNA, 19 nt, Human herpesvirus 5
ggcgugaaugggcacgccg

SEQ ID NO: 3979266 - RNA, 15 nt, Human herpesvirus 5
ggcgugcgcacgccg

SEQ ID NO: 3979267 - RNA, 20 nt, Human herpesvirus 5
ggcgugcucaggccacccgc

SEQ ID NO: 3979268 - RNA, 19 nt, Human herpesvirus 5
ggcguuacuugcggcgcuu

SEQ ID NO: 3979269 - RNA, 15 nt, Human herpesvirus 5
ggcuaacgcgcugcu

SEQ ID NO: 3979270 - RNA, 21 nt, Human herpesvirus 5
ggcuacguagcgcgugucccu

SEQ ID NO: 3979271 - RNA, 17 nt, Human herpesvirus 5
ggcucaucaccaacgug

SEQ ID NO: 3979272 - RNA, 13 nt, Human herpesvirus 5
ggcuccgccggca

SEQ ID NO: 3979273 - RNA, 19 nt, Human herpesvirus 5
ggcucgaccggcggcugcu

SEQ ID NO: 3979274 - RNA, 14 nt, Human herpesvirus 5
ggcucguguggcag

SEQ ID NO: 3979275 - RNA, 22 nt, Human herpesvirus 5
ggcucguguggcagcuggcuug

SEQ ID NO: 3979276 - RNA, 16 nt, Human herpesvirus 5
ggcucuccuccucucc

SEQ ID NO: 3979277 - RNA, 22 nt, Human herpesvirus 5
ggcucuugcgcuucugcagcuc

SEQ ID NO: 3979278 - RNA, 21 nt, Human herpesvirus 5
ggcugacgcggacgaggaaca

SEQ ID NO: 3979279 - RNA, 15 nt, Human herpesvirus 5
ggcugaucgcggccu

SEQ ID NO: 3979280 - RNA, 17 nt, Human herpesvirus 5
ggcugccuguuccugcu

SEQ ID NO: 3979281 - RNA, 19 nt, Human herpesvirus 5
ggcugccuguuccugcugc

SEQ ID NO: 3979282 - RNA, 18 nt, Human herpesvirus 5
ggcugcgccuccucgucg

SEQ ID NO: 3979283 - RNA, 20 nt, Human herpesvirus 5
ggcugcgcggguuucaggua

SEQ ID NO: 3979284 - RNA, 21 nt, Human herpesvirus 5
ggcuggugucacuagacagau

SEQ ID NO: 3979285 - RNA, 15 nt, Human herpesvirus 5
ggcuuacugccugcc

SEQ ID NO: 3979286 - RNA, 15 nt, Human herpesvirus 5
ggcuucccuccugca

SEQ ID NO: 3979287 - RNA, 18 nt, Human herpesvirus 5
gggaaaaacaaagaaguc

SEQ ID NO: 3979288 - RNA, 22 nt, Human herpesvirus 5
gggaaacggacacuaggcgucc

SEQ ID NO: 3979289 - RNA, 20 nt, Human herpesvirus 5
gggaacuacguggguaagug

SEQ ID NO: 3979290 - RNA, 23 nt, Human herpesvirus 5
gggaggacgaaccgcgacaacac

SEQ ID NO: 3979291 - RNA, 12 nt, Human herpesvirus 5
gggaggcgguga

SEQ ID NO: 3979292 - RNA, 17 nt, Human herpesvirus 5
gggagucaacacuacca

SEQ ID NO: 3979293 - RNA, 19 nt, Human herpesvirus 5
gggagugguggcggcagcc

SEQ ID NO: 3979294 - RNA, 21 nt, Human herpesvirus 5
gggaucauuuucuuggccgug

SEQ ID NO: 3979295 - RNA, 18 nt, Human herpesvirus 5
gggcagcagcggcggcua

SEQ ID NO: 3979296 - RNA, 14 nt, Human herpesvirus 5
gggccagcccgagu

SEQ ID NO: 3979297 - RNA, 12 nt, Human herpesvirus 5
gggcgugugggu

SEQ ID NO: 3979298 - RNA, 15 nt, Human herpesvirus 5
gggcucgugcguguc

SEQ ID NO: 3979299 - RNA, 21 nt, Human herpesvirus 5
gggcucguguggcagcuggcu

SEQ ID NO: 3979300 - RNA, 23 nt, Human herpesvirus 5
gggcuuuccggccaacaugccca

SEQ ID NO: 3979301 - RNA, 12 nt, Human herpesvirus 5
ggggcugcugcu

SEQ ID NO: 3979302 - RNA, 13 nt, Human herpesvirus 5
gggucaaaagccu

SEQ ID NO: 3979303 - RNA, 18 nt, Human herpesvirus 5
gggucguuguccuccucg

SEQ ID NO: 3979304 - RNA, 10 nt, Human herpesvirus 5
ggguggaaac

SEQ ID NO: 3979305 - RNA, 15 nt, Human herpesvirus 5
ggguuggcagcuggc

SEQ ID NO: 3979306 - RNA, 12 nt, Human herpesvirus 5
gguacugcugug

SEQ ID NO: 3979307 - RNA, 17 nt, Human herpesvirus 5
gguagcuagugcagccu

SEQ ID NO: 3979308 - RNA, 21 nt, Human herpesvirus 5
gguaucucacaccgucagcug

SEQ ID NO: 3979309 - RNA, 16 nt, Human herpesvirus 5
ggucagcggcacgccg

SEQ ID NO: 3979310 - RNA, 21 nt, Human herpesvirus 5
ggucaugaguuggugcagcug

SEQ ID NO: 3979311 - RNA, 13 nt, Human herpesvirus 5
ggucgacugcgug

SEQ ID NO: 3979312 - RNA, 23 nt, Human herpesvirus 5
ggucgccgaggcuacugcugcuu

SEQ ID NO: 3979313 - RNA, 16 nt, Human herpesvirus 5
ggucgggcguguggua

SEQ ID NO: 3979314 - RNA, 17 nt, Human herpesvirus 5
ggucguuguccuccucg

SEQ ID NO: 3979315 - RNA, 16 nt, Human herpesvirus 5
ggucucacugugacgu

SEQ ID NO: 3979316 - RNA, 17 nt, Human herpesvirus 5
ggucugcuugcuggcuu

SEQ ID NO: 3979317 - RNA, 15 nt, Human herpesvirus 5
ggugaaggccgugga

SEQ ID NO: 3979318 - RNA, 21 nt, Human herpesvirus 5
ggugccccaggaugaagccaa

SEQ ID NO: 3979319 - RNA, 14 nt, Human herpesvirus 5
ggugccgggacagc

SEQ ID NO: 3979320 - RNA, 14 nt, Human herpesvirus 5
gguggugugugggg

SEQ ID NO: 3979321 - RNA, 15 nt, Human herpesvirus 5
ggugucuagcuggcg

SEQ ID NO: 3979322 - RNA, 18 nt, Human herpesvirus 5
ggugugcgugcuguacgu

SEQ ID NO: 3979323 - RNA, 17 nt, Human herpesvirus 5
guaaaagcugcaugaaa

SEQ ID NO: 3979324 - RNA, 14 nt, Human herpesvirus 5
guaaauaaaaagcu

SEQ ID NO: 3979325 - RNA, 17 nt, Human herpesvirus 5
guaagcggcagcauggg

SEQ ID NO: 3979326 - RNA, 22 nt, Human herpesvirus 5
guacaauaaacuguugauuuug

SEQ ID NO: 3979327 - RNA, 20 nt, Human herpesvirus 5
guacacagccaaggugcggg

SEQ ID NO: 3979328 - RNA, 14 nt, Human herpesvirus 5
guacaccgcuggag

SEQ ID NO: 3979329 - RNA, 18 nt, Human herpesvirus 5
guaccuagcuacuuugga

SEQ ID NO: 3979330 - RNA, 10 nt, Human herpesvirus 5
guaccugcau

SEQ ID NO: 3979331 - RNA, 21 nt, Human herpesvirus 5
guacuuuauuaggucagggau

SEQ ID NO: 3979332 - RNA, 18 nt, Human herpesvirus 5
guagacgaaagacaauga

SEQ ID NO: 3979333 - RNA, 15 nt, Human herpesvirus 5
guagaucccacuggc

SEQ ID NO: 3979334 - RNA, 11 nt, Human herpesvirus 5
guagcuucucu

SEQ ID NO: 3979335 - RNA, 13 nt, Human herpesvirus 5
guagguggccaug

SEQ ID NO: 3979336 - RNA, 19 nt, Human herpesvirus 5
guaguauuuuuucauaguu

SEQ ID NO: 3979337 - RNA, 17 nt, Human herpesvirus 5
guaguuggcguugagca

SEQ ID NO: 3979338 - RNA, 14 nt, Human herpesvirus 5
guauaaacuggggc

SEQ ID NO: 3979339 - RNA, 15 nt, Human herpesvirus 5
guauaacuaacgugu

SEQ ID NO: 3979340 - RNA, 10 nt, Human herpesvirus 5
guauccacgu

SEQ ID NO: 3979341 - RNA, 16 nt, Human herpesvirus 5
guauccauuggagaac

SEQ ID NO: 3979342 - RNA, 19 nt, Human herpesvirus 5
guauucccccggacgggca

SEQ ID NO: 3979343 - RNA, 19 nt, Human herpesvirus 5
gucaacacuaccaaguacc

SEQ ID NO: 3979344 - RNA, 13 nt, Human herpesvirus 5
gucaaccugcuga

SEQ ID NO: 3979345 - RNA, 14 nt, Human herpesvirus 5
gucaagacgcugaa

SEQ ID NO: 3979346 - RNA, 20 nt, Human herpesvirus 5
gucaaggccgccucuucugg

SEQ ID NO: 3979347 - RNA, 21 nt, Human herpesvirus 5
gucaagggucacggugccaug

SEQ ID NO: 3979348 - RNA, 16 nt, Human herpesvirus 5
gucaaucagacuuucg

SEQ ID NO: 3979349 - RNA, 19 nt, Human herpesvirus 5
gucacgcguuauacgccga

SEQ ID NO: 3979350 - RNA, 23 nt, Human herpesvirus 5
gucacuauccgaugguuucauua

SEQ ID NO: 3979351 - RNA, 13 nt, Human herpesvirus 5
gucacugccaccg

SEQ ID NO: 3979352 - RNA, 23 nt, Human herpesvirus 5
gucacuggagaacaauaaagcgu

SEQ ID NO: 3979353 - RNA, 16 nt, Human herpesvirus 5
gucagagagucugaaa

SEQ ID NO: 3979354 - RNA, 18 nt, Human herpesvirus 5
gucagcggcacgccgccg

SEQ ID NO: 3979355 - RNA, 20 nt, Human herpesvirus 5
gucaggacuggaagugucac

SEQ ID NO: 3979356 - RNA, 17 nt, Human herpesvirus 5
gucaguuuaucgagcgc

SEQ ID NO: 3979357 - RNA, 19 nt, Human herpesvirus 5
gucaucucauuugcuuuua

SEQ ID NO: 3979358 - RNA, 20 nt, Human herpesvirus 5
gucaugggcgacuuucaggg

SEQ ID NO: 3979359 - RNA, 17 nt, Human herpesvirus 5
guccaaccucgccgucg

SEQ ID NO: 3979360 - RNA, 21 nt, Human herpesvirus 5
guccagaucgucuacggcucc

SEQ ID NO: 3979361 - RNA, 13 nt, Human herpesvirus 5
guccagcuucugg

SEQ ID NO: 3979362 - RNA, 16 nt, Human herpesvirus 5
guccaguggcaggccc

SEQ ID NO: 3979363 - RNA, 21 nt, Human herpesvirus 5
guccauagugcgccaagccau

SEQ ID NO: 3979364 - RNA, 18 nt, Human herpesvirus 5
gucccagcagggcgcgcc

SEQ ID NO: 3979365 - RNA, 15 nt, Human herpesvirus 5
guccccuucugugga

SEQ ID NO: 3979366 - RNA, 12 nt, Human herpesvirus 5
gucccgugaugg

SEQ ID NO: 3979367 - RNA, 21 nt, Human herpesvirus 5
gucccuacucaccaaagccgc

SEQ ID NO: 3979368 - RNA, 16 nt, Human herpesvirus 5
gucccuggggcugcug

SEQ ID NO: 3979369 - RNA, 20 nt, Human herpesvirus 5
guccggccgucgcaagggcu

SEQ ID NO: 3979370 - RNA, 22 nt, Human herpesvirus 5
guccggccgucgcaagggcugc

SEQ ID NO: 3979371 - RNA, 15 nt, Human herpesvirus 5
guccgugaucgccgc

SEQ ID NO: 3979372 - RNA, 18 nt, Human herpesvirus 5
gucgaacuauaccgggcg

SEQ ID NO: 3979373 - RNA, 14 nt, Human herpesvirus 5
gucgacgacgccgu

SEQ ID NO: 3979374 - RNA, 23 nt, Human herpesvirus 5
gucgcaucaucaacagcagcaac

SEQ ID NO: 3979375 - RNA, 19 nt, Human herpesvirus 5
gucgcccgaggcggaggag

SEQ ID NO: 3979376 - RNA, 19 nt, Human herpesvirus 5
gucgccgcgucagcggccg

SEQ ID NO: 3979377 - RNA, 22 nt, Human herpesvirus 5
gucgccgcgucagcggccgccg

SEQ ID NO: 3979378 - RNA, 15 nt, Human herpesvirus 5
ugcugcgucugucuu

SEQ ID NO: 3979379 - RNA, 23 nt, Human herpesvirus 5
ugcuggccgccgcugcacggcau

SEQ ID NO: 3979380 - RNA, 19 nt, Human herpesvirus 5
ugcuggcggccguggccug

SEQ ID NO: 3979381 - RNA, 15 nt, Human herpesvirus 5
ugcuguccucguccg

SEQ ID NO: 3979382 - RNA, 20 nt, Human herpesvirus 5
ugcuuauucuagcccucugg

SEQ ID NO: 3979383 - RNA, 15 nt, Human herpesvirus 5
ugcuugaagauuucc

SEQ ID NO: 3979384 - RNA, 22 nt, Human herpesvirus 5
uggaaaugcccgccaccaugca

SEQ ID NO: 3979385 - RNA, 24 nt, Human herpesvirus 5
uggaaauucaauaaaaaccaccgu

SEQ ID NO: 3979386 - RNA, 14 nt, Human herpesvirus 5
uggaacgcgugcgc

SEQ ID NO: 3979387 - RNA, 18 nt, Human herpesvirus 5
uggaaggcguggaugagg

SEQ ID NO: 3979388 - RNA, 15 nt, Human herpesvirus 5
uggaaguaacaucau

SEQ ID NO: 3979389 - RNA, 14 nt, Human herpesvirus 5
uggacaacuuuucc

SEQ ID NO: 3979390 - RNA, 16 nt, Human herpesvirus 5
uggaccagacggcguc

SEQ ID NO: 3979391 - RNA, 19 nt, Human herpesvirus 5
uggaccggugguacugcug

SEQ ID NO: 3979392 - RNA, 15 nt, Human herpesvirus 5
uggacgacgcgcugg

SEQ ID NO: 3979393 - RNA, 21 nt, Human herpesvirus 5
uggacgccaucauggaagagg

SEQ ID NO: 3979394 - RNA, 19 nt, Human herpesvirus 5
uggacgccugggcgcgacg

SEQ ID NO: 3979395 - RNA, 15 nt, Human herpesvirus 5
uggacugggacgagg

SEQ ID NO: 3979396 - RNA, 15 nt, Human herpesvirus 5
uggacuguguucgug

SEQ ID NO: 3979397 - RNA, 21 nt, Human herpesvirus 5
uggagaaaccgccguucggcu

SEQ ID NO: 3979398 - RNA, 11 nt, Human herpesvirus 5
uggagcccacg

SEQ ID NO: 3979399 - RNA, 13 nt, Human herpesvirus 5
uggagcccacgcc

SEQ ID NO: 3979400 - RNA, 18 nt, Human herpesvirus 5
uggaggagaccauccuca

SEQ ID NO: 3979401 - RNA, 13 nt, Human herpesvirus 5
uggauacuaguaa

SEQ ID NO: 3979402 - RNA, 14 nt, Human herpesvirus 5
uggaugagggcucu

SEQ ID NO: 3979403 - RNA, 22 nt, Human herpesvirus 5
uggcauauagccaauaaagaga

SEQ ID NO: 3979404 - RNA, 12 nt, Human herpesvirus 5
uggcccugcugu

SEQ ID NO: 3979405 - RNA, 17 nt, Human herpesvirus 5
uggcccuggucuggccc

SEQ ID NO: 3979406 - RNA, 18 nt, Human herpesvirus 5
uggcccuggucuggccca

SEQ ID NO: 3979407 - RNA, 16 nt, Human herpesvirus 5
uggccgaacagcagcu

SEQ ID NO: 3979408 - RNA, 22 nt, Human herpesvirus 5
uggccgcacaccuguuggagca

SEQ ID NO: 3979409 - RNA, 13 nt, Human herpesvirus 5
uggccuacggcug

SEQ ID NO: 3979410 - RNA, 17 nt, Human herpesvirus 5
uggccucgauccauccu

SEQ ID NO: 3979411 - RNA, 16 nt, Human herpesvirus 5
uggccugcaucuuccc

SEQ ID NO: 3979412 - RNA, 18 nt, Human herpesvirus 5
uggcgcaaaagcaccaug

SEQ ID NO: 3979413 - RNA, 20 nt, Human herpesvirus 5
uggcggcgguggagggcgcg

SEQ ID NO: 3979414 - RNA, 21 nt, Human herpesvirus 5
uggcgggccgaccgccgccgc

SEQ ID NO: 3979415 - RNA, 16 nt, Human herpesvirus 5
uggcgguccaguggca

SEQ ID NO: 3979416 - RNA, 15 nt, Human herpesvirus 5
uggcguccgggcucg

SEQ ID NO: 3979417 - RNA, 16 nt, Human herpesvirus 5
uggcucgggucggcug

SEQ ID NO: 3979418 - RNA, 22 nt, Human herpesvirus 5
uggcugcgccuccucgucggcc

SEQ ID NO: 3979419 - RNA, 17 nt, Human herpesvirus 5
ugggagaugcggggugg

SEQ ID NO: 3979420 - RNA, 22 nt, Human herpesvirus 5
ugggaguuuuuagcgcgugacc

SEQ ID NO: 3979421 - RNA, 16 nt, Human herpesvirus 5
ugggauggguguuuuu

SEQ ID NO: 3979422 - RNA, 15 nt, Human herpesvirus 5
ugggcgguggcggcc

SEQ ID NO: 3979423 - RNA, 19 nt, Human herpesvirus 5
ugggcgguggucggcugcc

SEQ ID NO: 3979424 - RNA, 14 nt, Human herpesvirus 5
ugggcuggggugcg

SEQ ID NO: 3979425 - RNA, 23 nt, Human herpesvirus 5
uggggacgagcaccggcgccugc

SEQ ID NO: 3979426 - RNA, 24 nt, Human herpesvirus 5
uggggcaacugcugccucgaugcg

SEQ ID NO: 3979427 - RNA, 13 nt, Human herpesvirus 5
uggggcugcgucg

SEQ ID NO: 3979428 - RNA, 11 nt, Human herpesvirus 5
uggggcugcug

SEQ ID NO: 3979429 - RNA, 12 nt, Human herpesvirus 5
uggggcugcugc

SEQ ID NO: 3979430 - RNA, 15 nt, Human herpesvirus 5
uggguauccccgauu

SEQ ID NO: 3979431 - RNA, 11 nt, Human herpesvirus 5
ugggugcaaug

SEQ ID NO: 3979432 - RNA, 22 nt, Human herpesvirus 5
ugguacgcugacguggugcgcu

SEQ ID NO: 3979433 - RNA, 21 nt, Human herpesvirus 5
ugguaguugauacgcuagcag

SEQ ID NO: 3979434 - RNA, 18 nt, Human herpesvirus 5
uggucauguucucccagg

SEQ ID NO: 3979435 - RNA, 14 nt, Human herpesvirus 5
ugguggcucaugcc

SEQ ID NO: 3979436 - RNA, 23 nt, Human herpesvirus 5
ugguguacgugcgguaacuggca

SEQ ID NO: 3979437 - RNA, 23 nt, Human herpesvirus 5
ugguuuauaagaagacuccaccg

SEQ ID NO: 3979438 - RNA, 14 nt, Human herpesvirus 5
ugguuuuugcuucc

SEQ ID NO: 3979439 - RNA, 22 nt, Human herpesvirus 5
uguacgugcgguaacuggcaga

SEQ ID NO: 3979440 - RNA, 17 nt, Human herpesvirus 5
uguagcgggcugucaca

SEQ ID NO: 3979441 - RNA, 16 nt, Human herpesvirus 5
uguaggcgacuggcua

SEQ ID NO: 3979442 - RNA, 14 nt, Human herpesvirus 5
uguccaccgacgcg

SEQ ID NO: 3979443 - RNA, 22 nt, Human herpesvirus 5
uguccauagugcgccaagccau

SEQ ID NO: 3979444 - RNA, 17 nt, Human herpesvirus 5
uguccucgcaccgggcu

SEQ ID NO: 3979445 - RNA, 15 nt, Human herpesvirus 5
uguccucuccuccuu

SEQ ID NO: 3979446 - RNA, 22 nt, Human herpesvirus 5
ugucgccacuauguccuccgca

SEQ ID NO: 3979447 - RNA, 16 nt, Human herpesvirus 5
ugucgcgacaaucgcc

SEQ ID NO: 3979448 - RNA, 23 nt, Human herpesvirus 5
ugucggcgugaaugggcacgccg

SEQ ID NO: 3979449 - RNA, 19 nt, Human herpesvirus 5
ugucucucgacguuucuga

SEQ ID NO: 3979450 - RNA, 14 nt, Human herpesvirus 5
ugucuucuccgggu

SEQ ID NO: 3979451 - RNA, 17 nt, Human herpesvirus 5
uguggcaaguuggccac

SEQ ID NO: 3979452 - RNA, 21 nt, Human herpesvirus 5
uguggcccgaagauguacaca

SEQ ID NO: 3979453 - RNA, 16 nt, Human herpesvirus 5
uguggcuguuguugac

SEQ ID NO: 3979454 - RNA, 13 nt, Human herpesvirus 5
uguggggcugcuc

SEQ ID NO: 3979455 - RNA, 22 nt, Human herpesvirus 5
ugugguagcuagugcagccuua

SEQ ID NO: 3979456 - RNA, 15 nt, Human herpesvirus 5
uguuacgugcccugu

SEQ ID NO: 3979457 - RNA, 16 nt, Human herpesvirus 5
uguuccuauugggaag

SEQ ID NO: 3979458 - RNA, 14 nt, Human herpesvirus 5
uguuccuguccggu

SEQ ID NO: 3979459 - RNA, 23 nt, Human herpesvirus 5
uguucgagaaugccucuacuugg

SEQ ID NO: 3979460 - RNA, 20 nt, Human herpesvirus 5
uguugcacgggcucggguga

SEQ ID NO: 3979461 - RNA, 22 nt, Human herpesvirus 5
uguuggccaccaugcugagcaa

SEQ ID NO: 3979462 - RNA, 17 nt, Human herpesvirus 5
uguuggugccccaggau

SEQ ID NO: 3979463 - RNA, 16 nt, Human herpesvirus 5
uguuuuauugacgaag

SEQ ID NO: 3979464 - RNA, 14 nt, Human herpesvirus 5
uguuuuuuccuucc

SEQ ID NO: 3979465 - RNA, 12 nt, Human herpesvirus 5
uuaaaguaaaua

SEQ ID NO: 3979466 - RNA, 23 nt, Human herpesvirus 5
uuaacaugaugaagauggccauc

SEQ ID NO: 3979467 - RNA, 15 nt, Human herpesvirus 5
uuacaaugucacugu

SEQ ID NO: 3979468 - RNA, 17 nt, Human herpesvirus 5
uuaccaacguaacagca

SEQ ID NO: 3979469 - RNA, 21 nt, Human herpesvirus 5
uuaccgccgccgcccgacgcc

SEQ ID NO: 3979470 - RNA, 17 nt, Human herpesvirus 5
uuagacacacgggggcg

SEQ ID NO: 3979471 - RNA, 15 nt, Human herpesvirus 5
uuagcggucuguuca

SEQ ID NO: 3979472 - RNA, 19 nt, Human herpesvirus 5
uuaucaucugcucccgcug

SEQ ID NO: 3979473 - RNA, 21 nt, Human herpesvirus 5
uuaucaucugcucccgcugcu

SEQ ID NO: 3979474 - RNA, 18 nt, Human herpesvirus 5
uuaucugccucuuccucg

SEQ ID NO: 3979475 - RNA, 20 nt, Human herpesvirus 5
uuaugauaucuacagcagau

SEQ ID NO: 3979476 - RNA, 16 nt, Human herpesvirus 5
uucaaagggagcccca

SEQ ID NO: 3979477 - RNA, 22 nt, Human herpesvirus 5
uucaccuuugcgcauccccuga

SEQ ID NO: 3979478 - RNA, 22 nt, Human herpesvirus 5
uucacggggagaagaaacaaga

SEQ ID NO: 3979479 - RNA, 17 nt, Human herpesvirus 5
uucagaccgcaacaaca

SEQ ID NO: 3979480 - RNA, 17 nt, Human herpesvirus 5
uucagcguccggccucg

SEQ ID NO: 3979481 - RNA, 14 nt, Human herpesvirus 5
uucagcucacuguu

SEQ ID NO: 3979482 - RNA, 20 nt, Human herpesvirus 5
uuccccauaagcuguguacu

SEQ ID NO: 3979483 - RNA, 17 nt, Human herpesvirus 5
uuccgauccuuggaaga

SEQ ID NO: 3979484 - RNA, 19 nt, Human herpesvirus 5
uuccuccucgucgucgccg

SEQ ID NO: 3979485 - RNA, 16 nt, Human herpesvirus 5
uucgaguccguccucg

SEQ ID NO: 3979486 - RNA, 19 nt, Human herpesvirus 5
uucgcgaggacaaggcucc

SEQ ID NO: 3979487 - RNA, 16 nt, Human herpesvirus 5
uucggccggcugcugc

SEQ ID NO: 3979488 - RNA, 18 nt, Human herpesvirus 5
uucggccggcugcugcac

SEQ ID NO: 3979489 - RNA, 15 nt, Human herpesvirus 5
uucggcucuccuccg

SEQ ID NO: 3979490 - RNA, 14 nt, Human herpesvirus 5
uucgucgagcaccc

SEQ ID NO: 3979491 - RNA, 23 nt, Human herpesvirus 5
uucugucgccgacuaaauucaug

SEQ ID NO: 3979492 - RNA, 20 nt, Human herpesvirus 5
gcuucuuucucaccgugcuc

SEQ ID NO: 3979493 - RNA, 11 nt, Human herpesvirus 5
gcuucuuuucu

SEQ ID NO: 3979494 - RNA, 23 nt, Human herpesvirus 5
gcuuuagccaggugaccagcagu

SEQ ID NO: 3979495 - RNA, 22 nt, Human herpesvirus 5
gcuuucagcguacucauuagcg

SEQ ID NO: 3979496 - RNA, 16 nt, Human herpesvirus 5
ggaaacauguccccau

SEQ ID NO: 3979497 - RNA, 16 nt, Human herpesvirus 5
ggaagcgaauaagcgc

SEQ ID NO: 3979498 - RNA, 12 nt, Human herpesvirus 5
ggaagcugcugg

SEQ ID NO: 3979499 - RNA, 20 nt, Human herpesvirus 5
ggaaggcggcucgcuggaag

SEQ ID NO: 3979500 - RNA, 13 nt, Human herpesvirus 5
ggaaugcggucag

SEQ ID NO: 3979501 - RNA, 18 nt, Human herpesvirus 5
ggaaugcggucaguuggg

SEQ ID NO: 3979502 - RNA, 22 nt, Human herpesvirus 5
ggacagagcagccguuuccaga

SEQ ID NO: 3979503 - RNA, 15 nt, Human herpesvirus 5
ggacgaaacagcagg

SEQ ID NO: 3979504 - RNA, 15 nt, Human herpesvirus 5
ggacgacguggccuc

SEQ ID NO: 3979505 - RNA, 21 nt, Human herpesvirus 5
ggacgcucguccucucugucu

SEQ ID NO: 3979506 - RNA, 16 nt, Human herpesvirus 5
ggacggcgacgaccgc

SEQ ID NO: 3979507 - RNA, 13 nt, Human herpesvirus 5
ggacuuggcagcg

SEQ ID NO: 3979508 - RNA, 18 nt, Human herpesvirus 5
ggagaaaaguggcagaua

SEQ ID NO: 3979509 - RNA, 21 nt, Human herpesvirus 5
ggagcagcucuuuuccagcgu

SEQ ID NO: 3979510 - RNA, 20 nt, Human herpesvirus 5
ggagccaaacugcgagcagc

SEQ ID NO: 3979511 - RNA, 23 nt, Human herpesvirus 5
ggagcuaauagauuaaugugucg

SEQ ID NO: 3979512 - RNA, 21 nt, Human herpesvirus 5
ggagcuacgcgaccagcugcu

SEQ ID NO: 3979513 - RNA, 22 nt, Human herpesvirus 5
ggagcuacgcgaccagcugcug

SEQ ID NO: 3979514 - RNA, 14 nt, Human herpesvirus 5
ggagcucaaguacc

SEQ ID NO: 3979515 - RNA, 21 nt, Human herpesvirus 5
ggagcucacccggcugcuggc

SEQ ID NO: 3979516 - RNA, 19 nt, Human herpesvirus 5
ggaggugaccuggcugcuu

SEQ ID NO: 3979517 - RNA, 16 nt, Human herpesvirus 5
ggagucuaccuccugc

SEQ ID NO: 3979518 - RNA, 22 nt, Human herpesvirus 5
ggaucaauugcgggcccugcug

SEQ ID NO: 3979519 - RNA, 20 nt, Human herpesvirus 5
ggaucauuuucuuggccgug

SEQ ID NO: 3979520 - RNA, 20 nt, Human herpesvirus 5
ggauccaaggccuccagcgc

SEQ ID NO: 3979521 - RNA, 23 nt, Human herpesvirus 5
ggaucggacacuuuaggcggcgc

SEQ ID NO: 3979522 - RNA, 23 nt, Human herpesvirus 5
ggaucuggcguuugaagcgcggu

SEQ ID NO: 3979523 - RNA, 12 nt, Human herpesvirus 5
ggaugaccuggc

SEQ ID NO: 3979524 - RNA, 13 nt, Human herpesvirus 5
ggaugacgagcgu

SEQ ID NO: 3979525 - RNA, 14 nt, Human herpesvirus 5
ggaugggggggacc

SEQ ID NO: 3979526 - RNA, 13 nt, Human herpesvirus 5
ggauugggcggac

SEQ ID NO: 3979527 - RNA, 19 nt, Human herpesvirus 5
ggauugggcggacgugcgu

SEQ ID NO: 3979528 - RNA, 16 nt, Human herpesvirus 5
ggcaacucgagauggu

SEQ ID NO: 3979529 - RNA, 18 nt, Human herpesvirus 5
ggcaauagcgcacacgag

SEQ ID NO: 3979530 - RNA, 13 nt, Human herpesvirus 5
ggcacgcgcgucg

SEQ ID NO: 3979531 - RNA, 16 nt, Human herpesvirus 5
ggcacgcgcgucggcc

SEQ ID NO: 3979532 - RNA, 19 nt, Human herpesvirus 5
ggcacucggcugugccugu

SEQ ID NO: 3979533 - RNA, 12 nt, Human herpesvirus 5
ggcagaaacgag

SEQ ID NO: 3979534 - RNA, 23 nt, Human herpesvirus 5
ggcagauucaguaaccuggagca

SEQ ID NO: 3979535 - RNA, 13 nt, Human herpesvirus 5
ggcagcggaggug

SEQ ID NO: 3979536 - RNA, 22 nt, Human herpesvirus 5
ggcagcgucucuugcggcgccg

SEQ ID NO: 3979537 - RNA, 12 nt, Human herpesvirus 5
ggcagcuggcuu

SEQ ID NO: 3979538 - RNA, 19 nt, Human herpesvirus 5
ggccaacaaccacggcgaa

SEQ ID NO: 3979539 - RNA, 21 nt, Human herpesvirus 5
ggccaacaagagaaagaccca

SEQ ID NO: 3979540 - RNA, 23 nt, Human herpesvirus 5
ggccaacaagagaaagacccauc

SEQ ID NO: 3979541 - RNA, 15 nt, Human herpesvirus 5
ggccacgagccagac

SEQ ID NO: 3979542 - RNA, 17 nt, Human herpesvirus 5
ggccaguacggccucug

SEQ ID NO: 3979543 - RNA, 23 nt, Human herpesvirus 5
ggccaguacggccucugggcuga

SEQ ID NO: 3979544 - RNA, 22 nt, Human herpesvirus 5
ggccauaagaaagagaaacccc

SEQ ID NO: 3979545 - RNA, 22 nt, Human herpesvirus 5
ggcccaugagguagaagggcug

SEQ ID NO: 3979546 - RNA, 15 nt, Human herpesvirus 5
ggccgaccgccgccg

SEQ ID NO: 3979547 - RNA, 16 nt, Human herpesvirus 5
ggccgacgaggccggc

SEQ ID NO: 3979548 - RNA, 20 nt, Human herpesvirus 5
ggccgccggugcuucuucua

SEQ ID NO: 3979549 - RNA, 14 nt, Human herpesvirus 5
ggccggcugcugca

SEQ ID NO: 3979550 - RNA, 15 nt, Human herpesvirus 5
ggccgucgcuugccg

SEQ ID NO: 3979551 - RNA, 22 nt, Human herpesvirus 5
ggccgucggcgucgcgucgcag

SEQ ID NO: 3979552 - RNA, 20 nt, Human herpesvirus 5
ggccgucugcacgccccgga

SEQ ID NO: 3979553 - RNA, 14 nt, Human herpesvirus 5
ggccgugguggccg

SEQ ID NO: 3979554 - RNA, 21 nt, Human herpesvirus 5
ggccugcaucuuccccgcgca

SEQ ID NO: 3979555 - RNA, 21 nt, Human herpesvirus 5
ggccuguggauagauuucugc

SEQ ID NO: 3979556 - RNA, 20 nt, Human herpesvirus 5
ggcgacgcgguuaagggaga

SEQ ID NO: 3979557 - RNA, 21 nt, Human herpesvirus 5
ggcgauggcaaggugcugcac

SEQ ID NO: 3979558 - RNA, 22 nt, Human herpesvirus 5
ggcgcaucacccgccucaugga

SEQ ID NO: 3979559 - RNA, 14 nt, Human herpesvirus 5
ggcgccgcgguggu

SEQ ID NO: 3979560 - RNA, 20 nt, Human herpesvirus 5
ggcgccgggacucuggugcu

SEQ ID NO: 3979561 - RNA, 14 nt, Human herpesvirus 5
ggcgcguagccacc

SEQ ID NO: 3979562 - RNA, 16 nt, Human herpesvirus 5
ggcgcguuguccucgc

SEQ ID NO: 3979563 - RNA, 17 nt, Human herpesvirus 5
ggcgcuguacggcagcg

SEQ ID NO: 3979564 - RNA, 22 nt, Human herpesvirus 5
ggcgcuguacggcagcggggag

SEQ ID NO: 3979565 - RNA, 14 nt, Human herpesvirus 5
ggcgcuucgagggc

SEQ ID NO: 3979566 - RNA, 23 nt, Human herpesvirus 5
ggcggaggagagaacggaagaag

SEQ ID NO: 3979567 - RNA, 13 nt, Human herpesvirus 5
ggcggaggagccg

SEQ ID NO: 3979568 - RNA, 20 nt, Human herpesvirus 5
ggcggcagccacggaggaga

SEQ ID NO: 3979569 - RNA, 18 nt, Human herpesvirus 5
ggcggccguugccggcaa

SEQ ID NO: 3979570 - RNA, 12 nt, Human herpesvirus 5
ggcggccucuuu

SEQ ID NO: 3979571 - RNA, 13 nt, Human herpesvirus 5
ggcgguccuccag

SEQ ID NO: 3979572 - RNA, 12 nt, Human herpesvirus 5
ggcgucggagag

SEQ ID NO: 3979573 - RNA, 16 nt, Human herpesvirus 5
ggcgugcaucugccga

SEQ ID NO: 3979574 - RNA, 17 nt, Human herpesvirus 5
ggcguucggacgaccuc

SEQ ID NO: 3979575 - RNA, 21 nt, Human herpesvirus 5
ggcguuucguccggaggagcg

SEQ ID NO: 3979576 - RNA, 17 nt, Human herpesvirus 5
ggcucacguagcaggcc

SEQ ID NO: 3979577 - RNA, 21 nt, Human herpesvirus 5
ggcucacgucacuacucuggg

SEQ ID NO: 3979578 - RNA, 21 nt, Human herpesvirus 5
ggcucccagagcugcuaggaa

SEQ ID NO: 3979579 - RNA, 12 nt, Human herpesvirus 5
ggcuccgccggc

SEQ ID NO: 3979580 - RNA, 15 nt, Human herpesvirus 5
ggcucuacagugggu

SEQ ID NO: 3979581 - RNA, 12 nt, Human herpesvirus 5
ggcugaucugca

SEQ ID NO: 3979582 - RNA, 13 nt, Human herpesvirus 5
ggcugcugcacca

SEQ ID NO: 3979583 - RNA, 12 nt, Human herpesvirus 5
ggcuggaggacu

SEQ ID NO: 3979584 - RNA, 15 nt, Human herpesvirus 5
ggcugugcgcgccgg

SEQ ID NO: 3979585 - RNA, 22 nt, Human herpesvirus 5
ggcuucccuccugcagcugcac

SEQ ID NO: 3979586 - RNA, 13 nt, Human herpesvirus 5
ggcuucgaacauc

SEQ ID NO: 3979587 - RNA, 13 nt, Human herpesvirus 5
ggcuucucuggag

SEQ ID NO: 3979588 - RNA, 20 nt, Human herpesvirus 5
ggcuugcuccucuuccaaau

SEQ ID NO: 3979589 - RNA, 14 nt, Human herpesvirus 5
gggagacggccugg

SEQ ID NO: 3979590 - RNA, 21 nt, Human herpesvirus 5
gggaucuaccagcccagggau

SEQ ID NO: 3979591 - RNA, 15 nt, Human herpesvirus 5
gggaugaugauaagu

SEQ ID NO: 3979592 - RNA, 14 nt, Human herpesvirus 5
gggcaacugcugcc

SEQ ID NO: 3979593 - RNA, 19 nt, Human herpesvirus 5
gggccggcccucggggugc

SEQ ID NO: 3979594 - RNA, 13 nt, Human herpesvirus 5
gggcgcagaaacu

SEQ ID NO: 3979595 - RNA, 17 nt, Human herpesvirus 5
gggcgcaucacccgccu

SEQ ID NO: 3979596 - RNA, 18 nt, Human herpesvirus 5
gggcgcaucacccgccuc

SEQ ID NO: 3979597 - RNA, 14 nt, Human herpesvirus 5
gggcgcgacggcaa

SEQ ID NO: 3979598 - RNA, 18 nt, Human herpesvirus 5
gggcggccgugcagcaag

SEQ ID NO: 3979599 - RNA, 14 nt, Human herpesvirus 5
gggcggucgacugg

SEQ ID NO: 3979600 - RNA, 20 nt, Human herpesvirus 5
gggcuggggugcgcuuggua

SEQ ID NO: 3979601 - RNA, 16 nt, Human herpesvirus 5
ggggcugcgucgccug

SEQ ID NO: 3979602 - RNA, 22 nt, Human herpesvirus 5
gggggaaccuacggcggcgguc

SEQ ID NO: 3979603 - RNA, 16 nt, Human herpesvirus 5
gggugccgccacgguu

SEQ ID NO: 3979604 - RNA, 18 nt, Human herpesvirus 5
gggugggcgcgacggcaa

SEQ ID NO: 3979605 - RNA, 16 nt, Human herpesvirus 5
gguaccgucuccacca

SEQ ID NO: 3979606 - RNA, 13 nt, Human herpesvirus 5
gguacgcugacgu

SEQ ID NO: 3979607 - RNA, 19 nt, Human herpesvirus 5
gcagcugcuggagcgcggc

SEQ ID NO: 3979608 - RNA, 13 nt, Human herpesvirus 5
gcagcugcuuucu

SEQ ID NO: 3979609 - RNA, 15 nt, Human herpesvirus 5
gcagcuggugaucgg

SEQ ID NO: 3979610 - RNA, 18 nt, Human herpesvirus 5
gcaggaaugcggcacccg

SEQ ID NO: 3979611 - RNA, 23 nt, Human herpesvirus 5
gcaggaggugggguggcucuugc

SEQ ID NO: 3979612 - RNA, 13 nt, Human herpesvirus 5
gcaggccgcgcag

SEQ ID NO: 3979613 - RNA, 15 nt, Human herpesvirus 5
gcagggaauuuugaa

SEQ ID NO: 3979614 - RNA, 19 nt, Human herpesvirus 5
gcaggucucgcgcaucgcc

SEQ ID NO: 3979615 - RNA, 19 nt, Human herpesvirus 5
gcaguaccucaacacauug

SEQ ID NO: 3979616 - RNA, 20 nt, Human herpesvirus 5
gcagugcaucuacguggucg

SEQ ID NO: 3979617 - RNA, 17 nt, Human herpesvirus 5
gcauaagcgcggagguu

SEQ ID NO: 3979618 - RNA, 12 nt, Human herpesvirus 5
gcaucacccgcc

SEQ ID NO: 3979619 - RNA, 18 nt, Human herpesvirus 5
gcaucaguuucugcggcg

SEQ ID NO: 3979620 - RNA, 15 nt, Human herpesvirus 5
gcaucgucaaagccg

SEQ ID NO: 3979621 - RNA, 22 nt, Human herpesvirus 5
gccaaacgcgugcgggugcaug

SEQ ID NO: 3979622 - RNA, 18 nt, Human herpesvirus 5
gccaacuccgugcuguug

SEQ ID NO: 3979623 - RNA, 19 nt, Human herpesvirus 5
gccaccaugcaucccacca

SEQ ID NO: 3979624 - RNA, 14 nt, Human herpesvirus 5
gccaguugcuguug

SEQ ID NO: 3979625 - RNA, 21 nt, Human herpesvirus 5
gccaugagcggcaggaaggcc

SEQ ID NO: 3979626 - RNA, 13 nt, Human herpesvirus 5
gcccaggguacgg

SEQ ID NO: 3979627 - RNA, 14 nt, Human herpesvirus 5
gcccauuguuuccu

SEQ ID NO: 3979628 - RNA, 15 nt, Human herpesvirus 5
gccccagcagaccag

SEQ ID NO: 3979629 - RNA, 14 nt, Human herpesvirus 5
gccccaucgggccc

SEQ ID NO: 3979630 - RNA, 12 nt, Human herpesvirus 5
gcccccaccccc

SEQ ID NO: 3979631 - RNA, 16 nt, Human herpesvirus 5
gcccccguggccgcuu

SEQ ID NO: 3979632 - RNA, 21 nt, Human herpesvirus 5
gcccgaagccgcgcgagcgug

SEQ ID NO: 3979633 - RNA, 13 nt, Human herpesvirus 5
gcccgacagcugc

SEQ ID NO: 3979634 - RNA, 23 nt, Human herpesvirus 5
gcccgaggaucuggcggccgccg

SEQ ID NO: 3979635 - RNA, 14 nt, Human herpesvirus 5
gcccgcagacacca

SEQ ID NO: 3979636 - RNA, 22 nt, Human herpesvirus 5
gcccgcuucaacgccugcacca

SEQ ID NO: 3979637 - RNA, 14 nt, Human herpesvirus 5
gcccgggccgccgc

SEQ ID NO: 3979638 - RNA, 17 nt, Human herpesvirus 5
gcccgggggugacaagg

SEQ ID NO: 3979639 - RNA, 18 nt, Human herpesvirus 5
gcccguucuccccgugga

SEQ ID NO: 3979640 - RNA, 16 nt, Human herpesvirus 5
gcccguucuuccgagu

SEQ ID NO: 3979641 - RNA, 22 nt, Human herpesvirus 5
gcccguuguguaugcaugucgc

SEQ ID NO: 3979642 - RNA, 13 nt, Human herpesvirus 5
gcccucgcagugc

SEQ ID NO: 3979643 - RNA, 11 nt, Human herpesvirus 5
gccgaaacacc

SEQ ID NO: 3979644 - RNA, 14 nt, Human herpesvirus 5
gccgacaaccugcu

SEQ ID NO: 3979645 - RNA, 17 nt, Human herpesvirus 5
gccgacaaccugcugca

SEQ ID NO: 3979646 - RNA, 14 nt, Human herpesvirus 5
gccgaccgccgccg

SEQ ID NO: 3979647 - RNA, 19 nt, Human herpesvirus 5
gccgacgcgcgcccgcgcc

SEQ ID NO: 3979648 - RNA, 13 nt, Human herpesvirus 5
gccgacucgcugc

SEQ ID NO: 3979649 - RNA, 17 nt, Human herpesvirus 5
gccgagugggacggcaa

SEQ ID NO: 3979650 - RNA, 18 nt, Human herpesvirus 5
gccgcagagggcgcgccg

SEQ ID NO: 3979651 - RNA, 17 nt, Human herpesvirus 5
gccgccaccacccgacu

SEQ ID NO: 3979652 - RNA, 19 nt, Human herpesvirus 5
gccgccgaagccuggggca

SEQ ID NO: 3979653 - RNA, 12 nt, Human herpesvirus 5
gccgccgccucc

SEQ ID NO: 3979654 - RNA, 14 nt, Human herpesvirus 5
gccgccgcggcguu

SEQ ID NO: 3979655 - RNA, 14 nt, Human herpesvirus 5
gccgcgcaggccgc

SEQ ID NO: 3979656 - RNA, 15 nt, Human herpesvirus 5
gccgcgccgccugga

SEQ ID NO: 3979657 - RNA, 14 nt, Human herpesvirus 5
gccgcgcuccaggc

SEQ ID NO: 3979658 - RNA, 21 nt, Human herpesvirus 5
gccgcgguacgcacgucgccg

SEQ ID NO: 3979659 - RNA, 19 nt, Human herpesvirus 5
gccgcggugccggcggcua

SEQ ID NO: 3979660 - RNA, 19 nt, Human herpesvirus 5
gccgcgugccugggaacgc

SEQ ID NO: 3979661 - RNA, 22 nt, Human herpesvirus 5
gccgcucaagccgcggugcagg

SEQ ID NO: 3979662 - RNA, 20 nt, Human herpesvirus 5
gccgcucaggucgcccaggc

SEQ ID NO: 3979663 - RNA, 21 nt, Human herpesvirus 5
gccgcucgggaacagacccga

SEQ ID NO: 3979664 - RNA, 19 nt, Human herpesvirus 5
gccgcuggacugacacagc

SEQ ID NO: 3979665 - RNA, 20 nt, Human herpesvirus 5
gccggagcuacgcgaccagc

SEQ ID NO: 3979666 - RNA, 19 nt, Human herpesvirus 5
gccggccguuacgccgacg

SEQ ID NO: 3979667 - RNA, 16 nt, Human herpesvirus 5
gccggcggagacgacg

SEQ ID NO: 3979668 - RNA, 18 nt, Human herpesvirus 5
gccgggacucuggugcua

SEQ ID NO: 3979669 - RNA, 18 nt, Human herpesvirus 5
gccggggaagccuccgga

SEQ ID NO: 3979670 - RNA, 22 nt, Human herpesvirus 5
gccguacccgccccagcagacc

SEQ ID NO: 3979671 - RNA, 20 nt, Human herpesvirus 5
gccgugacacuuuggcucuu

SEQ ID NO: 3979672 - RNA, 13 nt, Human herpesvirus 5
gccgugacgucgc

SEQ ID NO: 3979673 - RNA, 12 nt, Human herpesvirus 5
gccgugcucagc

SEQ ID NO: 3979674 - RNA, 19 nt, Human herpesvirus 5
gccgugcucuuggcgccgc

SEQ ID NO: 3979675 - RNA, 22 nt, Human herpesvirus 5
gccguguaaugggggugggcga

SEQ ID NO: 3979676 - RNA, 20 nt, Human herpesvirus 5
gccguguuuuugcucgagac

SEQ ID NO: 3979677 - RNA, 22 nt, Human herpesvirus 5
gccuccgaacgcucgugagcaa

SEQ ID NO: 3979678 - RNA, 23 nt, Human herpesvirus 5
gccuccguccucgucgccuucca

SEQ ID NO: 3979679 - RNA, 13 nt, Human herpesvirus 5
gccucggguugcc

SEQ ID NO: 3979680 - RNA, 21 nt, Human herpesvirus 5
gccugagcgcgcucagcuacc

SEQ ID NO: 3979681 - RNA, 17 nt, Human herpesvirus 5
gccugcaccaaccgacg

SEQ ID NO: 3979682 - RNA, 23 nt, Human herpesvirus 5
gccugccgcacgcgcuagccuuu

SEQ ID NO: 3979683 - RNA, 17 nt, Human herpesvirus 5
gccugcgacguuggcuc

SEQ ID NO: 3979684 - RNA, 17 nt, Human herpesvirus 5
gccuggacgccugggcg

SEQ ID NO: 3979685 - RNA, 19 nt, Human herpesvirus 5
gccuggagcgaguggggca

SEQ ID NO: 3979686 - RNA, 21 nt, Human herpesvirus 5
gccugggaacgcgcgcacggc

SEQ ID NO: 3979687 - RNA, 21 nt, Human herpesvirus 5
caaagcccgggccgccgccag

SEQ ID NO: 3979688 - RNA, 23 nt, Human herpesvirus 5
caaagcuggacagugagagcuca

SEQ ID NO: 3979689 - RNA, 15 nt, Human herpesvirus 5
caaauaccaacacua

SEQ ID NO: 3979690 - RNA, 19 nt, Human herpesvirus 5
caacaaaaaaaaggaggac

SEQ ID NO: 3979691 - RNA, 14 nt, Human herpesvirus 5
caacaacagcaaca

SEQ ID NO: 3979692 - RNA, 18 nt, Human herpesvirus 5
caacaacgguagaugagc

SEQ ID NO: 3979693 - RNA, 13 nt, Human herpesvirus 5
caacaauaaagcu

SEQ ID NO: 3979694 - RNA, 15 nt, Human herpesvirus 5
caacagcagcaacag

SEQ ID NO: 3979695 - RNA, 22 nt, Human herpesvirus 5
caacagccuguggcaccgccuc

SEQ ID NO: 3979696 - RNA, 16 nt, Human herpesvirus 5
caacagcggcgacaga

SEQ ID NO: 3979697 - RNA, 21 nt, Human herpesvirus 5
caacaguuaucagcaauaaaa

SEQ ID NO: 3979698 - RNA, 23 nt, Human herpesvirus 5
caacauacaguacaacaguuauc

SEQ ID NO: 3979699 - RNA, 20 nt, Human herpesvirus 5
caacgcgcccgacagcugca

SEQ ID NO: 3979700 - RNA, 19 nt, Human herpesvirus 5
caacgcgugaaacaagagc

SEQ ID NO: 3979701 - RNA, 15 nt, Human herpesvirus 5
caacgucaugcauuc

SEQ ID NO: 3979702 - RNA, 24 nt, Human herpesvirus 5
caacuaccgugccaccugcgagga

SEQ ID NO: 3979703 - RNA, 18 nt, Human herpesvirus 5
caacucuaucgcgacaga

SEQ ID NO: 3979704 - RNA, 18 nt, Human herpesvirus 5
caacugguuccugcaggu

SEQ ID NO: 3979705 - RNA, 22 nt, Human herpesvirus 5
caacuuaaccacaagaaacgcu

SEQ ID NO: 3979706 - RNA, 12 nt, Human herpesvirus 5
caagacgcauga

SEQ ID NO: 3979707 - RNA, 18 nt, Human herpesvirus 5
caagacgcgccucucgga

SEQ ID NO: 3979708 - RNA, 22 nt, Human herpesvirus 5
caagagcaugcugugggcccac

SEQ ID NO: 3979709 - RNA, 17 nt, Human herpesvirus 5
caagcgccgucacuucc

SEQ ID NO: 3979710 - RNA, 16 nt, Human herpesvirus 5
caagcguauccugguc

SEQ ID NO: 3979711 - RNA, 13 nt, Human herpesvirus 5
caagcuugguaca

SEQ ID NO: 3979712 - RNA, 22 nt, Human herpesvirus 5
caaggacuguuuucucaaucug

SEQ ID NO: 3979713 - RNA, 16 nt, Human herpesvirus 5
caaggcgacauggccc

SEQ ID NO: 3979714 - RNA, 24 nt, Human herpesvirus 5
caaggcuccgaaaccgagcaagca

SEQ ID NO: 3979715 - RNA, 16 nt, Human herpesvirus 5
caaggucaacuacagc

SEQ ID NO: 3979716 - RNA, 18 nt, Human herpesvirus 5
caaguacagcggcucgcc

SEQ ID NO: 3979717 - RNA, 21 nt, Human herpesvirus 5
caaguucgaucucaugucgcu

SEQ ID NO: 3979718 - RNA, 14 nt, Human herpesvirus 5
caaucacccacaga

SEQ ID NO: 3979719 - RNA, 20 nt, Human herpesvirus 5
caaucgacugccuaacugua

SEQ ID NO: 3979720 - RNA, 20 nt, Human herpesvirus 5
caauggaagccauacuucuc

SEQ ID NO: 3979721 - RNA, 17 nt, Human herpesvirus 5
caauguuacacauuacu

SEQ ID NO: 3979722 - RNA, 14 nt, Human herpesvirus 5
caauuccccucgcc

SEQ ID NO: 3979723 - RNA, 11 nt, Human herpesvirus 5
cacacgcagac

SEQ ID NO: 3979724 - RNA, 22 nt, Human herpesvirus 5
cacacguguggaagacauggcg

SEQ ID NO: 3979725 - RNA, 23 nt, Human herpesvirus 5
cacacuggcuggaauacguggcg

SEQ ID NO: 3979726 - RNA, 16 nt, Human herpesvirus 5
cacagaccacgugccu

SEQ ID NO: 3979727 - RNA, 15 nt, Human herpesvirus 5
cacagcagccgcgcu

SEQ ID NO: 3979728 - RNA, 13 nt, Human herpesvirus 5
cacagcgccaggc

SEQ ID NO: 3979729 - RNA, 19 nt, Human herpesvirus 5
cacagcgucgccacauugg

SEQ ID NO: 3979730 - RNA, 16 nt, Human herpesvirus 5
cacagcgucuggccag

SEQ ID NO: 3979731 - RNA, 23 nt, Human herpesvirus 5
cacagggaauaauaauaccacaa

SEQ ID NO: 3979732 - RNA, 18 nt, Human herpesvirus 5
cacaucacccaacacugc

SEQ ID NO: 3979733 - RNA, 12 nt, Human herpesvirus 5
cacaucggugcc

SEQ ID NO: 3979734 - RNA, 18 nt, Human herpesvirus 5
cacaucugucaccucaca

SEQ ID NO: 3979735 - RNA, 12 nt, Human herpesvirus 5
cacaugcugcuu

SEQ ID NO: 3979736 - RNA, 13 nt, Human herpesvirus 5
caccaaccgacgu

SEQ ID NO: 3979737 - RNA, 13 nt, Human herpesvirus 5
caccaagaaacac

SEQ ID NO: 3979738 - RNA, 15 nt, Human herpesvirus 5
caccaauaggggagu

SEQ ID NO: 3979739 - RNA, 15 nt, Human herpesvirus 5
caccaauugcuuuaa

SEQ ID NO: 3979740 - RNA, 16 nt, Human herpesvirus 5
caccacccgacugcag

SEQ ID NO: 3979741 - RNA, 15 nt, Human herpesvirus 5
caccacgcagcaggc

SEQ ID NO: 3979742 - RNA, 17 nt, Human herpesvirus 5
caccccccgggccacca

SEQ ID NO: 3979743 - RNA, 17 nt, Human herpesvirus 5
caccccuuuuggugugu

SEQ ID NO: 3979744 - RNA, 23 nt, Human herpesvirus 5
caccccuuuuggugugugucuau

SEQ ID NO: 3979745 - RNA, 14 nt, Human herpesvirus 5
cacccgacugcagc

SEQ ID NO: 3979746 - RNA, 15 nt, Human herpesvirus 5
caccgacgacgacga

SEQ ID NO: 3979747 - RNA, 14 nt, Human herpesvirus 5
caccgccuccgacg

SEQ ID NO: 3979748 - RNA, 23 nt, Human herpesvirus 5
caccgcgaguaucgggccgucgc

SEQ ID NO: 3979749 - RNA, 20 nt, Human herpesvirus 5
caccgcgccgggacccacgg

SEQ ID NO: 3979750 - RNA, 22 nt, Human herpesvirus 5
caccggccuccgacgacgccga

SEQ ID NO: 3979751 - RNA, 14 nt, Human herpesvirus 5
caccgucagcugcg

SEQ ID NO: 3979752 - RNA, 15 nt, Human herpesvirus 5
caccgucgcccucag

SEQ ID NO: 3979753 - RNA, 12 nt, Human herpesvirus 5
caccugcugccg

SEQ ID NO: 3979754 - RNA, 22 nt, Human herpesvirus 5
caccuggacgggggggaccggg

SEQ ID NO: 3979755 - RNA, 17 nt, Human herpesvirus 5
caccuggacuucaaugu

SEQ ID NO: 3979756 - RNA, 23 nt, Human herpesvirus 5
caccuucccucuagagacagacg

SEQ ID NO: 3979757 - RNA, 12 nt, Human herpesvirus 5
cacgacuggcca

SEQ ID NO: 3979758 - RNA, 19 nt, Human herpesvirus 5
cacgagcaugaacugccac

SEQ ID NO: 3979759 - RNA, 19 nt, Human herpesvirus 5
cacgaucgcuggugucucu

SEQ ID NO: 3979760 - RNA, 23 nt, Human herpesvirus 5
cacgcaucugcaagucccuggcc

SEQ ID NO: 3979761 - RNA, 14 nt, Human herpesvirus 5
cacgccaaaccgcg

SEQ ID NO: 3979762 - RNA, 11 nt, Human herpesvirus 5
cacgccggcgg

SEQ ID NO: 3979763 - RNA, 14 nt, Human herpesvirus 5
cacgcgcgacuugg

SEQ ID NO: 3979764 - RNA, 15 nt, Human herpesvirus 5
cacgcggaugagcgu

SEQ ID NO: 3979765 - RNA, 23 nt, Human herpesvirus 5
cacgcggaugagcgugcugcucu

SEQ ID NO: 3979766 - RNA, 24 nt, Human herpesvirus 5
cacgcggcguacgucaccgcgcua

SEQ ID NO: 3979767 - RNA, 24 nt, Human herpesvirus 5
cacgcuugucauagucacgucgcu

SEQ ID NO: 3979768 - RNA, 17 nt, Human herpesvirus 5
cacggcaucaugcuggg

SEQ ID NO: 3979769 - RNA, 21 nt, Human herpesvirus 5
cacggcaucaugcugggcgac

SEQ ID NO: 3979770 - RNA, 19 nt, Human herpesvirus 5
cacggccugcgggcaggcg

SEQ ID NO: 3979771 - RNA, 22 nt, Human herpesvirus 5
cacggcgccggugacccgcccc

SEQ ID NO: 3979772 - RNA, 16 nt, Human herpesvirus 5
cacggcuaccaugcgc

SEQ ID NO: 3979773 - RNA, 23 nt, Human herpesvirus 5
cacgggcucgaccggcggcugcu

SEQ ID NO: 3979774 - RNA, 14 nt, Human herpesvirus 5
cacgggcugcuggu

SEQ ID NO: 3979775 - RNA, 18 nt, Human herpesvirus 5
cacggucgggcacucggc

SEQ ID NO: 3979776 - RNA, 17 nt, Human herpesvirus 5
cacguagaucccacugg

SEQ ID NO: 3979777 - RNA, 14 nt, Human herpesvirus 5
cacguccaugucgc

SEQ ID NO: 3979778 - RNA, 19 nt, Human herpesvirus 5
cacgucgauucccaucuca

SEQ ID NO: 3979779 - RNA, 21 nt, Human herpesvirus 5
cacgucuagcaggcccaggcc

SEQ ID NO: 3979780 - RNA, 17 nt, Human herpesvirus 5
cacguguggaagacaug

SEQ ID NO: 3979781 - RNA, 14 nt, Human herpesvirus 5
cacguuaauuccag

SEQ ID NO: 3979782 - RNA, 21 nt, Human herpesvirus 5
cacuaaauuguuauugccagu

SEQ ID NO: 3979783 - RNA, 20 nt, Human herpesvirus 5
cacuaccagcugggccuaca

SEQ ID NO: 3979784 - RNA, 14 nt, Human herpesvirus 5
cacucacgcggccg

SEQ ID NO: 3979785 - RNA, 23 nt, Human herpesvirus 5
cacuccacacgccauaacaaacc

SEQ ID NO: 3979786 - RNA, 13 nt, Human herpesvirus 5
cacuccguaagga

SEQ ID NO: 3979787 - RNA, 20 nt, Human herpesvirus 5
cacuuuuaacagcucaugcc

SEQ ID NO: 3979788 - RNA, 15 nt, Human herpesvirus 5
cagaacccgacgcgg

SEQ ID NO: 3979789 - RNA, 20 nt, Human herpesvirus 5
cagaaucuauaaauugcucu

SEQ ID NO: 3979790 - RNA, 17 nt, Human herpesvirus 5
cagaaugaaccuuguaa

SEQ ID NO: 3979791 - RNA, 14 nt, Human herpesvirus 5
cagacaccaagcau

SEQ ID NO: 3979792 - RNA, 22 nt, Human herpesvirus 5
cagaccgcaacaacagcagcaa

SEQ ID NO: 3979793 - RNA, 19 nt, Human herpesvirus 5
cagacgaugaaccuucccc

SEQ ID NO: 3979794 - RNA, 23 nt, Human herpesvirus 5
cagacgucggcgguccuccagca

SEQ ID NO: 3979795 - RNA, 12 nt, Human herpesvirus 5
cagagcugcuag

SEQ ID NO: 3979796 - RNA, 14 nt, Human herpesvirus 5
cagaggacggagga

SEQ ID NO: 3979797 - RNA, 17 nt, Human herpesvirus 5
cagaggucgccgcugau

SEQ ID NO: 3979798 - RNA, 20 nt, Human herpesvirus 5
cagaugacgagcgccggcga

SEQ ID NO: 3979799 - RNA, 13 nt, Human herpesvirus 5
cagcaaugucgua

SEQ ID NO: 3979800 - RNA, 20 nt, Human herpesvirus 5
cagcacauuagacacacggg

SEQ ID NO: 3979801 - RNA, 19 nt, Human herpesvirus 5
cagcacggggaucuugguc

SEQ ID NO: 3979802 - RNA, 18 nt, Human herpesvirus 5
cagcagcaacagcagcca

SEQ ID NO: 3979803 - RNA, 16 nt, Human herpesvirus 5
uccgcgugcuccacca

SEQ ID NO: 3979804 - RNA, 12 nt, Human herpesvirus 5
uccgcuggaaau

SEQ ID NO: 3979805 - RNA, 22 nt, Human herpesvirus 5
uccgguggcgcguagccaccug

SEQ ID NO: 3979806 - RNA, 16 nt, Human herpesvirus 5
uccgugauagccacga

SEQ ID NO: 3979807 - RNA, 13 nt, Human herpesvirus 5
uccgugccagcug

SEQ ID NO: 3979808 - RNA, 22 nt, Human herpesvirus 5
uccgugugcugugguacgucaa

SEQ ID NO: 3979809 - RNA, 21 nt, Human herpesvirus 5
uccuccaacucgaccugccgc

SEQ ID NO: 3979810 - RNA, 22 nt, Human herpesvirus 5
uccucggacgaaggggaggacg

SEQ ID NO: 3979811 - RNA, 17 nt, Human herpesvirus 5
uccucuaccccgccgcc

SEQ ID NO: 3979812 - RNA, 17 nt, Human herpesvirus 5
uccugcugcgcaucuac

SEQ ID NO: 3979813 - RNA, 11 nt, Human herpesvirus 5
uccugcugcua

SEQ ID NO: 3979814 - RNA, 15 nt, Human herpesvirus 5
uccuuaucugggugc

SEQ ID NO: 3979815 - RNA, 15 nt, Human herpesvirus 5
ucgaaaacaaccaca

SEQ ID NO: 3979816 - RNA, 16 nt, Human herpesvirus 5
ucgaaauaaccuacgu

SEQ ID NO: 3979817 - RNA, 14 nt, Human herpesvirus 5
ucgacgacgccguc

SEQ ID NO: 3979818 - RNA, 16 nt, Human herpesvirus 5
ucgacgcaucugucau

SEQ ID NO: 3979819 - RNA, 12 nt, Human herpesvirus 5
ucgacggcggua

SEQ ID NO: 3979820 - RNA, 12 nt, Human herpesvirus 5
ucgagcgcgacc

SEQ ID NO: 3979821 - RNA, 14 nt, Human herpesvirus 5
ucgaugugguucug

SEQ ID NO: 3979822 - RNA, 12 nt, Human herpesvirus 5
ucgccccucacg

SEQ ID NO: 3979823 - RNA, 15 nt, Human herpesvirus 5
ucgccgccgcgccac

SEQ ID NO: 3979824 - RNA, 12 nt, Human herpesvirus 5
ucgccgccggga

SEQ ID NO: 3979825 - RNA, 14 nt, Human herpesvirus 5
ucgcgagcugagcu

SEQ ID NO: 3979826 - RNA, 17 nt, Human herpesvirus 5
ucgcgccgugcgcgacg

SEQ ID NO: 3979827 - RNA, 12 nt, Human herpesvirus 5
ucgcgcgucacu

SEQ ID NO: 3979828 - RNA, 13 nt, Human herpesvirus 5
ucgcggacgaaag

SEQ ID NO: 3979829 - RNA, 16 nt, Human herpesvirus 5
ucgcgguggcggccgc

SEQ ID NO: 3979830 - RNA, 19 nt, Human herpesvirus 5
ucgcuccgcggucaggucc

SEQ ID NO: 3979831 - RNA, 22 nt, Human herpesvirus 5
ucgcuggaaagacaauaaacag

SEQ ID NO: 3979832 - RNA, 15 nt, Human herpesvirus 5
ucggaagcuguuuug

SEQ ID NO: 3979833 - RNA, 23 nt, Human herpesvirus 5
ucggagcacgggcgaaacgucag

SEQ ID NO: 3979834 - RNA, 22 nt, Human herpesvirus 5
ucggcacgcuggcgggccgacc

SEQ ID NO: 3979835 - RNA, 19 nt, Human herpesvirus 5
ucggugacaucaccgccuc

SEQ ID NO: 3979836 - RNA, 19 nt, Human herpesvirus 5
ucggugaccacaaccacgu

SEQ ID NO: 3979837 - RNA, 20 nt, Human herpesvirus 5
ucguacgacgucugcucaaa

SEQ ID NO: 3979838 - RNA, 22 nt, Human herpesvirus 5
ucgucugcauguucaucacgua

SEQ ID NO: 3979839 - RNA, 17 nt, Human herpesvirus 5
ucgugaaacagcagcuc

SEQ ID NO: 3979840 - RNA, 22 nt, Human herpesvirus 5
ucgugagcagcgugcaccugcu

SEQ ID NO: 3979841 - RNA, 16 nt, Human herpesvirus 5
ucguguccggacccca

SEQ ID NO: 3979842 - RNA, 19 nt, Human herpesvirus 5
ucguuguccucuccuccuu

SEQ ID NO: 3979843 - RNA, 18 nt, Human herpesvirus 5
ucuaccagcccagggauc

SEQ ID NO: 3979844 - RNA, 13 nt, Human herpesvirus 5
ucuacgcgugcac

SEQ ID NO: 3979845 - RNA, 20 nt, Human herpesvirus 5
ucuagacucacuuuauugaa

SEQ ID NO: 3979846 - RNA, 17 nt, Human herpesvirus 5
ucuagcuggcggccucu

SEQ ID NO: 3979847 - RNA, 14 nt, Human herpesvirus 5
ucuauguuauacuc

SEQ ID NO: 3979848 - RNA, 18 nt, Human herpesvirus 5
ucucacgaucgcuggugu

SEQ ID NO: 3979849 - RNA, 14 nt, Human herpesvirus 5
ucucccucugcugu

SEQ ID NO: 3979850 - RNA, 19 nt, Human herpesvirus 5
ucuccuccgucgcggccag

SEQ ID NO: 3979851 - RNA, 23 nt, Human herpesvirus 5
ucucguuguacgcauuacacagg

SEQ ID NO: 3979852 - RNA, 17 nt, Human herpesvirus 5
ucucucuggucuucccu

SEQ ID NO: 3979853 - RNA, 14 nt, Human herpesvirus 5
ucugacguccagca

SEQ ID NO: 3979854 - RNA, 14 nt, Human herpesvirus 5
ucugcaagucccug

SEQ ID NO: 3979855 - RNA, 23 nt, Human herpesvirus 5
ucugccggcugcggcggcacucg

SEQ ID NO: 3979856 - RNA, 21 nt, Human herpesvirus 5
ucugcgccuuuugcuggcugg

SEQ ID NO: 3979857 - RNA, 19 nt, Human herpesvirus 5
ucugcgguacgcgcacgcc

SEQ ID NO: 3979858 - RNA, 15 nt, Human herpesvirus 5
ucuggagacggccgu

SEQ ID NO: 3979859 - RNA, 13 nt, Human herpesvirus 5
ucuuaugaagcug

SEQ ID NO: 3979860 - RNA, 14 nt, Human herpesvirus 5
ucuucacuacguug

SEQ ID NO: 3979861 - RNA, 13 nt, Human herpesvirus 5
ucuucagaaaaca

SEQ ID NO: 3979862 - RNA, 13 nt, Human herpesvirus 5
ucuuccccucugc

SEQ ID NO: 3979863 - RNA, 17 nt, Human herpesvirus 5
ucuugauacagggcgaa

SEQ ID NO: 3979864 - RNA, 16 nt, Human herpesvirus 5
ucuugcccacgccguc

SEQ ID NO: 3979865 - RNA, 21 nt, Human herpesvirus 5
ucuugcgauguagcagaaaac

SEQ ID NO: 3979866 - RNA, 20 nt, Human herpesvirus 5
ucuuugcuuaucugccucuu

SEQ ID NO: 3979867 - RNA, 23 nt, Human herpesvirus 5
ucuuuucgaugaaccuccgcccu

SEQ ID NO: 3979868 - RNA, 15 nt, Human herpesvirus 5
ugaaaccuaccuggg

SEQ ID NO: 3979869 - RNA, 18 nt, Human herpesvirus 5
ugaaaccuaccugggcug

SEQ ID NO: 3979870 - RNA, 20 nt, Human herpesvirus 5
ugaaacgcuuuaagcugcuc

SEQ ID NO: 3979871 - RNA, 15 nt, Human herpesvirus 5
ugaaccuccgcccuu

SEQ ID NO: 3979872 - RNA, 12 nt, Human herpesvirus 5
ugaaccuucccc

SEQ ID NO: 3979873 - RNA, 17 nt, Human herpesvirus 5
ugaagcggaugauucgc

SEQ ID NO: 3979874 - RNA, 22 nt, Human herpesvirus 5
ugaaucuuccccucugcugcug

SEQ ID NO: 3979875 - RNA, 17 nt, Human herpesvirus 5
ugacaacggcuggaaau

SEQ ID NO: 3979876 - RNA, 13 nt, Human herpesvirus 5
ugacacggcgguu

SEQ ID NO: 3979877 - RNA, 13 nt, Human herpesvirus 5
ugaccggaggcua

SEQ ID NO: 3979878 - RNA, 14 nt, Human herpesvirus 5
ugacgaggagcuuc

SEQ ID NO: 3979879 - RNA, 19 nt, Human herpesvirus 5
ugacgcuaggcggcgccgg

SEQ ID NO: 3979880 - RNA, 18 nt, Human herpesvirus 5
ugacugcaacgacaccuc

SEQ ID NO: 3979881 - RNA, 21 nt, Human herpesvirus 5
ugagauucaggacgaggagcc

SEQ ID NO: 3979882 - RNA, 21 nt, Human herpesvirus 5
ugagcacaaacugcgacacgu

SEQ ID NO: 3979883 - RNA, 15 nt, Human herpesvirus 5
ugagcagcaaaacga

SEQ ID NO: 3979884 - RNA, 19 nt, Human herpesvirus 5
ugagcggcaggaaggccuc

SEQ ID NO: 3979885 - RNA, 21 nt, Human herpesvirus 5
ggcaacgugccacgugacuca

SEQ ID NO: 3979886 - RNA, 14 nt, Human herpesvirus 5
ggcaacugcugccu

SEQ ID NO: 3979887 - RNA, 19 nt, Human herpesvirus 5
ggcaccgcgacagcuaccg

SEQ ID NO: 3979888 - RNA, 19 nt, Human herpesvirus 5
ggcagacggacggugcggg

SEQ ID NO: 3979889 - RNA, 14 nt, Human herpesvirus 5
ggcagaggucgccg

SEQ ID NO: 3979890 - RNA, 12 nt, Human herpesvirus 5
ggcagcacaccu

SEQ ID NO: 3979891 - RNA, 18 nt, Human herpesvirus 5
ggcagcccauccucgugg

SEQ ID NO: 3979892 - RNA, 14 nt, Human herpesvirus 5
ggcagcgggccugu

SEQ ID NO: 3979893 - RNA, 20 nt, Human herpesvirus 5
ggcagcgguacccgacgcgg

SEQ ID NO: 3979894 - RNA, 14 nt, Human herpesvirus 5
ggcaggccgugggg

SEQ ID NO: 3979895 - RNA, 14 nt, Human herpesvirus 5
ggcauagugccagc

SEQ ID NO: 3979896 - RNA, 18 nt, Human herpesvirus 5
ggcauagugccagcccua

SEQ ID NO: 3979897 - RNA, 23 nt, Human herpesvirus 5
ggccaacagccuguggcaccgcc

SEQ ID NO: 3979898 - RNA, 18 nt, Human herpesvirus 5
ugcggcgcuucgagggcu

SEQ ID NO: 3979899 - RNA, 15 nt, Human herpesvirus 5
ugcggcugugucggg

SEQ ID NO: 3979900 - RNA, 23 nt, Human herpesvirus 5
ugcgggcaggcggguugcagcuu

SEQ ID NO: 3979901 - RNA, 14 nt, Human herpesvirus 5
ugcggggucgacug

SEQ ID NO: 3979902 - RNA, 18 nt, Human herpesvirus 5
ugcgggugccgggacagc

SEQ ID NO: 3979903 - RNA, 17 nt, Human herpesvirus 5
ugcgugcuguacgucac

SEQ ID NO: 3979904 - RNA, 13 nt, Human herpesvirus 5
ugcuccucuucca

SEQ ID NO: 3979905 - RNA, 20 nt, Human herpesvirus 5
ugcucgaaauguugacccag

SEQ ID NO: 3979906 - RNA, 15 nt, Human herpesvirus 5
ugcucgcgcacguag

SEQ ID NO: 3979907 - RNA, 21 nt, Human herpesvirus 5
ugcugagacugagacuggugg

SEQ ID NO: 3979908 - RNA, 13 nt, Human herpesvirus 5
ugcugaucgccgu

SEQ ID NO: 3979909 - RNA, 16 nt, Human herpesvirus 5
ugcugaugugccagcc

SEQ ID NO: 3979910 - RNA, 19 nt, Human herpesvirus 5
ugcugauuacaaugauggc

SEQ ID NO: 3979911 - RNA, 16 nt, Human herpesvirus 5
ugcugcacgggcucga

SEQ ID NO: 3979912 - RNA, 22 nt, Human herpesvirus 5
ugcugcugguuuuugcccccuc

SEQ ID NO: 3979913 - RNA, 23 nt, Human herpesvirus 5
ugcugcugguuuuugcccccucc

SEQ ID NO: 3979914 - RNA, 13 nt, Human herpesvirus 5
ugcuggcggccgu

SEQ ID NO: 3979915 - RNA, 13 nt, Human herpesvirus 5
ugcuuagcugcac

SEQ ID NO: 3979916 - RNA, 14 nt, Human herpesvirus 5
ugcuuagcugcaca

SEQ ID NO: 3979917 - RNA, 13 nt, Human herpesvirus 5
ugcuucuuuucug

SEQ ID NO: 3979918 - RNA, 13 nt, Human herpesvirus 5
uggaagcugcugg

SEQ ID NO: 3979919 - RNA, 20 nt, Human herpesvirus 5
uggacacucuggcccugcug

SEQ ID NO: 3979920 - RNA, 16 nt, Human herpesvirus 5
uggacaugauggaaau

SEQ ID NO: 3979921 - RNA, 18 nt, Human herpesvirus 5
uggacauuuggguuucca

SEQ ID NO: 3979922 - RNA, 14 nt, Human herpesvirus 5
uggagacaguuucc

SEQ ID NO: 3979923 - RNA, 18 nt, Human herpesvirus 5
uggagacaguuuccacgc

SEQ ID NO: 3979924 - RNA, 15 nt, Human herpesvirus 5
uggagcaacgggcgg

SEQ ID NO: 3979925 - RNA, 13 nt, Human herpesvirus 5
uggagcagcucuu

SEQ ID NO: 3979926 - RNA, 15 nt, Human herpesvirus 5
uggaggccaacaucu

SEQ ID NO: 3979927 - RNA, 18 nt, Human herpesvirus 5
uggauccgcuuccucagc

SEQ ID NO: 3979928 - RNA, 15 nt, Human herpesvirus 5
uggcaagaguucaaa

SEQ ID NO: 3979929 - RNA, 12 nt, Human herpesvirus 5
uggcagagccac

SEQ ID NO: 3979930 - RNA, 16 nt, Human herpesvirus 5
uggcccgacggcagcu

SEQ ID NO: 3979931 - RNA, 15 nt, Human herpesvirus 5
uggcccucgcagugc

SEQ ID NO: 3979932 - RNA, 19 nt, Human herpesvirus 5
uggccgauccacgggccgc

SEQ ID NO: 3979933 - RNA, 16 nt, Human herpesvirus 5
uggcgcguagccaccu

SEQ ID NO: 3979934 - RNA, 19 nt, Human herpesvirus 5
uggcgcuuggugcgcgacg

SEQ ID NO: 3979935 - RNA, 13 nt, Human herpesvirus 5
uggcucagcuuga

SEQ ID NO: 3979936 - RNA, 15 nt, Human herpesvirus 5
uggcugcgcgccucc

SEQ ID NO: 3979937 - RNA, 16 nt, Human herpesvirus 5
ugggcaccgucuguuc

SEQ ID NO: 3979938 - RNA, 19 nt, Human herpesvirus 5
ugggcgggcucugggaagc

SEQ ID NO: 3979939 - RNA, 17 nt, Human herpesvirus 5
uggggaaguacaauauc

SEQ ID NO: 3979940 - RNA, 12 nt, Human herpesvirus 5
uggggaugauga

SEQ ID NO: 3979941 - RNA, 15 nt, Human herpesvirus 5
uggggccgucugcac

SEQ ID NO: 3979942 - RNA, 15 nt, Human herpesvirus 5
uggggcugcugcugc

SEQ ID NO: 3979943 - RNA, 12 nt, Human herpesvirus 5
uggggggugagg

SEQ ID NO: 3979944 - RNA, 18 nt, Human herpesvirus 5
uggggucaaaagccuggg

SEQ ID NO: 3979945 - RNA, 12 nt, Human herpesvirus 5
uggggugggcgc

SEQ ID NO: 3979946 - RNA, 14 nt, Human herpesvirus 5
ugggucccggcgcg

SEQ ID NO: 3979947 - RNA, 15 nt, Human herpesvirus 5
ugguaggaggcgcgc

SEQ ID NO: 3979948 - RNA, 17 nt, Human herpesvirus 5
uggucggugacaucacc

SEQ ID NO: 3979949 - RNA, 20 nt, Human herpesvirus 5
uggugaccauggucggugac

SEQ ID NO: 3979950 - RNA, 15 nt, Human herpesvirus 5
ugguggcucaugccg

SEQ ID NO: 3979951 - RNA, 15 nt, Human herpesvirus 5
ugguguuguagcaac

SEQ ID NO: 3979952 - RNA, 21 nt, Human herpesvirus 5
ugguucaaaaaguucaccgua

SEQ ID NO: 3979953 - RNA, 16 nt, Human herpesvirus 5
uguacguaccacggua

SEQ ID NO: 3979954 - RNA, 22 nt, Human herpesvirus 5
uguacuaccgcgcccacuggag

SEQ ID NO: 3979955 - RNA, 14 nt, Human herpesvirus 5
ugucaaaaaucacu

SEQ ID NO: 3979956 - RNA, 20 nt, Human herpesvirus 5
ugucagucucugaaggacag

SEQ ID NO: 3979957 - RNA, 12 nt, Human herpesvirus 5
uguccgccccuc

SEQ ID NO: 3979958 - RNA, 16 nt, Human herpesvirus 5
ugucgcguccacgggc

SEQ ID NO: 3979959 - RNA, 16 nt, Human herpesvirus 5
ugucguccgaaucgcc

SEQ ID NO: 3979960 - RNA, 18 nt, Human herpesvirus 5
ugucuaagagauccuggg

SEQ ID NO: 3979961 - RNA, 12 nt, Human herpesvirus 5
ugugauugacgu

SEQ ID NO: 3979962 - RNA, 16 nt, Human herpesvirus 5
ugugcuuaagcagaaa

SEQ ID NO: 3979963 - RNA, 20 nt, Human herpesvirus 5
ugugcuuuuuaucagggaga

SEQ ID NO: 3979964 - RNA, 19 nt, Human herpesvirus 5
ugugguucaaccugaacau

SEQ ID NO: 3979965 - RNA, 13 nt, Human herpesvirus 5
uguguguuucuua

SEQ ID NO: 3979966 - RNA, 15 nt, Human herpesvirus 5
uguuaccgccgccgc

SEQ ID NO: 3979967 - RNA, 13 nt, Human herpesvirus 5
uguuacgaccugu

SEQ ID NO: 3979968 - RNA, 14 nt, Human herpesvirus 5
uguucuuacaguuu

SEQ ID NO: 3979969 - RNA, 21 nt, Human herpesvirus 5
uguucuuacaguuuucaugua

SEQ ID NO: 3979970 - RNA, 19 nt, Human herpesvirus 5
uguugacccagggcugcuc

SEQ ID NO: 3979971 - RNA, 16 nt, Human herpesvirus 5
uguugagaacauauau

SEQ ID NO: 3979972 - RNA, 14 nt, Human herpesvirus 5
uguugaucugcuga

SEQ ID NO: 3979973 - RNA, 13 nt, Human herpesvirus 5
uguugauucugga

SEQ ID NO: 3979974 - RNA, 20 nt, Human herpesvirus 5
uguuguacucguguuuuuua

SEQ ID NO: 3979975 - RNA, 23 nt, Human herpesvirus 5
uuaacuauuccuccguguucuua

SEQ ID NO: 3979976 - RNA, 14 nt, Human herpesvirus 5
uuacugccugccgc

SEQ ID NO: 3979977 - RNA, 19 nt, Human herpesvirus 5
uuagccccacaugcugcuu

SEQ ID NO: 3979978 - RNA, 11 nt, Human herpesvirus 5
uuauucaucau

SEQ ID NO: 3979979 - RNA, 16 nt, Human herpesvirus 5
uuauucccgucaguga

SEQ ID NO: 3979980 - RNA, 18 nt, Human herpesvirus 5
uuauuguguucuccugcc

SEQ ID NO: 3979981 - RNA, 17 nt, Human herpesvirus 5
uucaacaaauaccaaca

SEQ ID NO: 3979982 - RNA, 21 nt, Human herpesvirus 5
uucacaaccguauauucuaca

SEQ ID NO: 3979983 - RNA, 21 nt, Human herpesvirus 5
uucagaccgcaacaacagcag

SEQ ID NO: 3979984 - RNA, 15 nt, Human herpesvirus 5
uucaugucuuacaaa

SEQ ID NO: 3979985 - RNA, 22 nt, Human herpesvirus 5
uuccaaagccgacgucccugau

SEQ ID NO: 3979986 - RNA, 22 nt, Human herpesvirus 5
uuccaagccgcagcgcggaaac

SEQ ID NO: 3979987 - RNA, 10 nt, Human herpesvirus 5
uuccacgccg

SEQ ID NO: 3979988 - RNA, 15 nt, Human herpesvirus 5
uuccauaauaaaagu

SEQ ID NO: 3979989 - RNA, 22 nt, Human herpesvirus 5
uuccccgccccaucaccucgcc

SEQ ID NO: 3979990 - RNA, 17 nt, Human herpesvirus 5
uuccgcgugcuccacca

SEQ ID NO: 3979991 - RNA, 16 nt, Human herpesvirus 5
uuccggucucggcucg

SEQ ID NO: 3979992 - RNA, 20 nt, Human herpesvirus 5
uuccugcgcgccuaccugac

SEQ ID NO: 3979993 - RNA, 19 nt, Human herpesvirus 5
uucgagucggauggcuuuu

SEQ ID NO: 3979994 - RNA, 18 nt, Human herpesvirus 5
uucgcgauccgcucacca

SEQ ID NO: 3979995 - RNA, 15 nt, Human herpesvirus 5
uucggacgaccuccg

SEQ ID NO: 3979996 - RNA, 18 nt, Human herpesvirus 5
uucggccgcggaggugcu

SEQ ID NO: 3979997 - RNA, 15 nt, Human herpesvirus 5
uucggccggcugcug

SEQ ID NO: 3979998 - RNA, 14 nt, Human herpesvirus 5
uucggguuccgcgu

SEQ ID NO: 3979999 - RNA, 13 nt, Human herpesvirus 5
uucuggcgcuugg

SEQ ID NO: 3980000 - RNA, 15 nt, Human herpesvirus 5
uucuucgccggaggc

SEQ ID NO: 3980001 - RNA, 23 nt, Human herpesvirus 5
uugaagauuuccgcuacauuugu

SEQ ID NO: 3980002 - RNA, 23 nt, Human herpesvirus 5
uugacgaagaugccgauguguga

SEQ ID NO: 3980003 - RNA, 14 nt, Human herpesvirus 5
uugacgcugcuggc

SEQ ID NO: 3980004 - RNA, 15 nt, Human herpesvirus 5
uugaucugcugaaac

SEQ ID NO: 3980005 - RNA, 23 nt, Human herpesvirus 5
uugccgcaccgguuggagcagcu

SEQ ID NO: 3980006 - RNA, 18 nt, Human herpesvirus 5
uuggguaacgcuggcuca

SEQ ID NO: 3980007 - RNA, 16 nt, Human herpesvirus 5
uugguaucuacaucag

SEQ ID NO: 3980008 - RNA, 13 nt, Human herpesvirus 5
uuguagcaacugg

SEQ ID NO: 3980009 - RNA, 16 nt, Human herpesvirus 5
uugugccucugaaagc

SEQ ID NO: 3980010 - RNA, 14 nt, Human herpesvirus 5
uuguugccgcugga

SEQ ID NO: 3980011 - RNA, 22 nt, Human herpesvirus 5
uuuaaacgucguuguguucuua

SEQ ID NO: 3980012 - RNA, 17 nt, Human herpesvirus 5
uuuaacaagucacuaua

SEQ ID NO: 3980013 - RNA, 13 nt, Human herpesvirus 5
uuuaagcugcuca

SEQ ID NO: 3980014 - RNA, 16 nt, Human herpesvirus 5
uuuaauguaccaagaa

SEQ ID NO: 3980015 - RNA, 22 nt, Human herpesvirus 5
uuuaucaauacaaugacacuaa

SEQ ID NO: 3980016 - RNA, 14 nt, Human herpesvirus 5
cggucuuccugcug

SEQ ID NO: 3980017 - RNA, 14 nt, Human herpesvirus 5
cggugagacgaggc

SEQ ID NO: 3980018 - RNA, 14 nt, Human herpesvirus 5
cggugauuucuugc

SEQ ID NO: 3980019 - RNA, 22 nt, Human herpesvirus 5
cggugcguggaccagacggcgu

SEQ ID NO: 3980020 - RNA, 20 nt, Human herpesvirus 5
cgguggagggcgcgcggcaa

SEQ ID NO: 3980021 - RNA, 11 nt, Human herpesvirus 5
cgguggcggcc

SEQ ID NO: 3980022 - RNA, 22 nt, Human herpesvirus 5
cgguucucaaaaacuguaaggu

SEQ ID NO: 3980023 - RNA, 15 nt, Human herpesvirus 5
cgguuuccgaacacc

SEQ ID NO: 3980024 - RNA, 14 nt, Human herpesvirus 5
cguaauguagacag

SEQ ID NO: 3980025 - RNA, 17 nt, Human herpesvirus 5
cguaauguagacagcgc

SEQ ID NO: 3980026 - RNA, 21 nt, Human herpesvirus 5
cguagaauacuggaagcugcu

SEQ ID NO: 3980027 - RNA, 22 nt, Human herpesvirus 5
cguagaauacuggaagcugcug

SEQ ID NO: 3980028 - RNA, 17 nt, Human herpesvirus 5
cguagcgcgugucccug

SEQ ID NO: 3980029 - RNA, 13 nt, Human herpesvirus 5
cgucacaauaaca

SEQ ID NO: 3980030 - RNA, 18 nt, Human herpesvirus 5
cgucacgccucuguucag

SEQ ID NO: 3980031 - RNA, 17 nt, Human herpesvirus 5
cgucaggaaucugggag

SEQ ID NO: 3980032 - RNA, 20 nt, Human herpesvirus 5
cguccccacguccacccauc

SEQ ID NO: 3980033 - RNA, 16 nt, Human herpesvirus 5
cgucgagggcccggcc

SEQ ID NO: 3980034 - RNA, 19 nt, Human herpesvirus 5
cgucgcagccaccggcgca

SEQ ID NO: 3980035 - RNA, 20 nt, Human herpesvirus 5
cgucgcaucaucaacagcag

SEQ ID NO: 3980036 - RNA, 16 nt, Human herpesvirus 5
cgucgccgccgucgcg

SEQ ID NO: 3980037 - RNA, 15 nt, Human herpesvirus 5
cgucgccuuccagcu

SEQ ID NO: 3980038 - RNA, 15 nt, Human herpesvirus 5
cgucgugcccgucgg

SEQ ID NO: 3980039 - RNA, 20 nt, Human herpesvirus 5
cgucguuucccccacccgcc

SEQ ID NO: 3980040 - RNA, 22 nt, Human herpesvirus 5
cgucuccaccaaucaagccugu

SEQ ID NO: 3980041 - RNA, 14 nt, Human herpesvirus 5
cucuaccgcgacgg

SEQ ID NO: 3980042 - RNA, 14 nt, Human herpesvirus 5
cucuagagacagac

SEQ ID NO: 3980043 - RNA, 17 nt, Human herpesvirus 5
cucuaucgcgacagaca

SEQ ID NO: 3980044 - RNA, 22 nt, Human herpesvirus 5
cucuauuguguguacgacagcc

SEQ ID NO: 3980045 - RNA, 13 nt, Human herpesvirus 5
cucucggucggcg

SEQ ID NO: 3980046 - RNA, 17 nt, Human herpesvirus 5
cucucuauccgguggcg

SEQ ID NO: 3980047 - RNA, 18 nt, Human herpesvirus 5
cucugcaacgccuggcgu

SEQ ID NO: 3980048 - RNA, 19 nt, Human herpesvirus 5
cucugccugggcacgcgcg

SEQ ID NO: 3980049 - RNA, 16 nt, Human herpesvirus 5
cucugcguugccacgc

SEQ ID NO: 3980050 - RNA, 16 nt, Human herpesvirus 5
cucuggcgaucugccu

SEQ ID NO: 3980051 - RNA, 15 nt, Human herpesvirus 5
cucuugcgaggcuuu

SEQ ID NO: 3980052 - RNA, 13 nt, Human herpesvirus 5
cugaaaacaccau

SEQ ID NO: 3980053 - RNA, 16 nt, Human herpesvirus 5
cugaagccgccgucga

SEQ ID NO: 3980054 - RNA, 15 nt, Human herpesvirus 5
cugaaucugcuccag

SEQ ID NO: 3980055 - RNA, 17 nt, Human herpesvirus 5
cugaaucugcuccagaa

SEQ ID NO: 3980056 - RNA, 19 nt, Human herpesvirus 5
cugacaguucacggggaga

SEQ ID NO: 3980057 - RNA, 23 nt, Human herpesvirus 5
cugaccgguaaggcggaaaaaga

SEQ ID NO: 3980058 - RNA, 17 nt, Human herpesvirus 5
cugaccugucagaaggc

SEQ ID NO: 3980059 - RNA, 20 nt, Human herpesvirus 5
cugacguggugcgcugcguu

SEQ ID NO: 3980060 - RNA, 23 nt, Human herpesvirus 5
cugacuucuacggaguuuucccu

SEQ ID NO: 3980061 - RNA, 17 nt, Human herpesvirus 5
cugagcguguggaggac

SEQ ID NO: 3980062 - RNA, 20 nt, Human herpesvirus 5
cugagcuacgaugaccacga

SEQ ID NO: 3980063 - RNA, 18 nt, Human herpesvirus 5
cugauaauaaaggcucuc

SEQ ID NO: 3980064 - RNA, 15 nt, Human herpesvirus 5
cugaucgccuggagc

SEQ ID NO: 3980065 - RNA, 16 nt, Human herpesvirus 5
cugauggccgacgagg

SEQ ID NO: 3980066 - RNA, 23 nt, Human herpesvirus 5
cugauuuugaugguuugugccuc

SEQ ID NO: 3980067 - RNA, 17 nt, Human herpesvirus 5
cugcaccaaccgacgua

SEQ ID NO: 3980068 - RNA, 23 nt, Human herpesvirus 5
cugcacgacaucuuccgcgagca

SEQ ID NO: 3980069 - RNA, 18 nt, Human herpesvirus 5
cugcacgaccugcuccag

SEQ ID NO: 3980070 - RNA, 22 nt, Human herpesvirus 5
cugcacgccgccgugacugcga

SEQ ID NO: 3980071 - RNA, 14 nt, Human herpesvirus 5
cugcacgcucuguc

SEQ ID NO: 3980072 - RNA, 19 nt, Human herpesvirus 5
cugcauccaucacaucacc

SEQ ID NO: 3980073 - RNA, 13 nt, Human herpesvirus 5
cugcauguuggug

SEQ ID NO: 3980074 - RNA, 14 nt, Human herpesvirus 5
cugccaccagggcg

SEQ ID NO: 3980075 - RNA, 23 nt, Human herpesvirus 5
cugcccuuuacggugcugcgucu

SEQ ID NO: 3980076 - RNA, 13 nt, Human herpesvirus 5
cugccgcagcugc

SEQ ID NO: 3980077 - RNA, 15 nt, Human herpesvirus 5
cugccgcagcugcug

SEQ ID NO: 3980078 - RNA, 22 nt, Human herpesvirus 5
cugccgcucagcgagcucgucg

SEQ ID NO: 3980079 - RNA, 15 nt, Human herpesvirus 5
cugccggcugcggcg

SEQ ID NO: 3980080 - RNA, 17 nt, Human herpesvirus 5
cugccucgaugcgccuc

SEQ ID NO: 3980081 - RNA, 15 nt, Human herpesvirus 5
cugccucucauguuc

SEQ ID NO: 3980082 - RNA, 20 nt, Human herpesvirus 5
cugcgaggaccguacacgca

SEQ ID NO: 3980083 - RNA, 13 nt, Human herpesvirus 5
cugcgcaggccgc

SEQ ID NO: 3980084 - RNA, 16 nt, Human herpesvirus 5
cugcgccuccucgucg

SEQ ID NO: 3980085 - RNA, 20 nt, Human herpesvirus 5
cugcgcgccuaccugacgcc

SEQ ID NO: 3980086 - RNA, 22 nt, Human herpesvirus 5
cugcgcgucaccgaugccggcc

SEQ ID NO: 3980087 - RNA, 19 nt, Human herpesvirus 5
cugcggcggcuugggcagc

SEQ ID NO: 3980088 - RNA, 20 nt, Human herpesvirus 5
cugcgugaugccuggaccca

SEQ ID NO: 3980089 - RNA, 14 nt, Human herpesvirus 5
cugcgugcuccgau

SEQ ID NO: 3980090 - RNA, 13 nt, Human herpesvirus 5
cugcucgaccgcu

SEQ ID NO: 3980091 - RNA, 14 nt, Human herpesvirus 5
cugcugagacugag

SEQ ID NO: 3980092 - RNA, 15 nt, Human herpesvirus 5
cugcugagacugaga

SEQ ID NO: 3980093 - RNA, 17 nt, Human herpesvirus 5
cugcuguguugucuuua

SEQ ID NO: 3980094 - RNA, 22 nt, Human herpesvirus 5
cuggaaauucaauaaaaaccac

SEQ ID NO: 3980095 - RNA, 17 nt, Human herpesvirus 5
cuggaagcagcaauguc

SEQ ID NO: 3980096 - RNA, 18 nt, Human herpesvirus 5
cuggacacucuggcccug

SEQ ID NO: 3980097 - RNA, 19 nt, Human herpesvirus 5
cuggagaagcgcagcgucg

SEQ ID NO: 3980098 - RNA, 20 nt, Human herpesvirus 5
cuggaggacgcgcuggcugu

SEQ ID NO: 3980099 - RNA, 13 nt, Human herpesvirus 5
cuggaggcucugu

SEQ ID NO: 3980100 - RNA, 23 nt, Human herpesvirus 5
cuggauacaguugauaacaaaca

SEQ ID NO: 3980101 - RNA, 18 nt, Human herpesvirus 5
cuggcaacgugccacgug

SEQ ID NO: 3980102 - RNA, 16 nt, Human herpesvirus 5
cuggccgagacggcgu

SEQ ID NO: 3980103 - RNA, 15 nt, Human herpesvirus 5
cuggcggccgccggc

SEQ ID NO: 3980104 - RNA, 21 nt, Human herpesvirus 5
cugggacgaggaggaggggcc

SEQ ID NO: 3980105 - RNA, 17 nt, Human herpesvirus 5
cugggagguggcugggc

SEQ ID NO: 3980106 - RNA, 14 nt, Human herpesvirus 5
cugggcgcccccac

SEQ ID NO: 3980107 - RNA, 20 nt, Human herpesvirus 5
cugggcuggcccucgcagug

SEQ ID NO: 3980108 - RNA, 23 nt, Human herpesvirus 5
cuggguaucaaccccgcggcuga

SEQ ID NO: 3980109 - RNA, 14 nt, Human herpesvirus 5
cugggucgccaggu

SEQ ID NO: 3980110 - RNA, 20 nt, Human herpesvirus 5
cuggucucgugauguggggg

SEQ ID NO: 3980111 - RNA, 22 nt, Human herpesvirus 5
cuggucuggcccaaagaccgcu

SEQ ID NO: 3980112 - RNA, 21 nt, Human herpesvirus 5
cuggucuucccuacagcgacu

SEQ ID NO: 3980113 - RNA, 20 nt, Human herpesvirus 5
cuggugagauacauguucau

SEQ ID NO: 3980114 - RNA, 23 nt, Human herpesvirus 5
cugguuuuugcccccucccuucu

SEQ ID NO: 3980115 - RNA, 21 nt, Human herpesvirus 5
cuguacuacgacgggacggcg

SEQ ID NO: 3980116 - RNA, 14 nt, Human herpesvirus 5
cugucaucuaccua

SEQ ID NO: 3980117 - RNA, 19 nt, Human herpesvirus 5
cugucauggggagaaaaga

SEQ ID NO: 3980118 - RNA, 19 nt, Human herpesvirus 5
cuguccgggauggaucgca

SEQ ID NO: 3980119 - RNA, 15 nt, Human herpesvirus 5
cugucggggcgcaga

SEQ ID NO: 3980120 - RNA, 15 nt, Human herpesvirus 5
cugugaaacgccaac

SEQ ID NO: 3980121 - RNA, 13 nt, Human herpesvirus 5
cugugccugucau

SEQ ID NO: 3980122 - RNA, 15 nt, Human herpesvirus 5
cugugcgcgccggcc

SEQ ID NO: 3980123 - RNA, 16 nt, Human herpesvirus 5
cugugcuggccgccgc

SEQ ID NO: 3980124 - RNA, 16 nt, Human herpesvirus 5
cuguggacccugcgcg

SEQ ID NO: 3980125 - RNA, 21 nt, Human herpesvirus 5
cuguggauagauuucugcgug

SEQ ID NO: 3980126 - RNA, 16 nt, Human herpesvirus 5
cuguucuuccaccagc

SEQ ID NO: 3980127 - RNA, 20 nt, Human herpesvirus 5
cuguuggagcaacgggcggc

SEQ ID NO: 3980128 - RNA, 19 nt, Human herpesvirus 5
cuguuggcuuacugccugc

SEQ ID NO: 3980129 - RNA, 14 nt, Human herpesvirus 5
cuguuugucugugc

SEQ ID NO: 3980130 - RNA, 15 nt, Human herpesvirus 5
cuuaacaugaugaag

SEQ ID NO: 3980131 - RNA, 21 nt, Human herpesvirus 5
cuuacaguuuucauguaauaa

SEQ ID NO: 3980132 - RNA, 15 nt, Human herpesvirus 5
cuuacaucucacgga

SEQ ID NO: 3980133 - RNA, 18 nt, Human herpesvirus 5
cuuacgucuacagcaugg

SEQ ID NO: 3980134 - RNA, 19 nt, Human herpesvirus 5
cuucaaccucacguuaaac

SEQ ID NO: 3980135 - RNA, 21 nt, Human herpesvirus 5
cuucaucaucaccacccgaga

SEQ ID NO: 3980136 - RNA, 14 nt, Human herpesvirus 5
aggccagcugccac

SEQ ID NO: 3980137 - RNA, 19 nt, Human herpesvirus 5
aggccgagacgcugcgcua

SEQ ID NO: 3980138 - RNA, 18 nt, Human herpesvirus 5
aggccgcaaagcuggaca

SEQ ID NO: 3980139 - RNA, 18 nt, Human herpesvirus 5
aggccgcacuggacgacg

SEQ ID NO: 3980140 - RNA, 10 nt, Human herpesvirus 5
aggccgccgc

SEQ ID NO: 3980141 - RNA, 23 nt, Human herpesvirus 5
aggccgccgccgcucaggucgcc

SEQ ID NO: 3980142 - RNA, 15 nt, Human herpesvirus 5
aggccuccagcgccu

SEQ ID NO: 3980143 - RNA, 18 nt, Human herpesvirus 5
aggccuccagcgccuccu

SEQ ID NO: 3980144 - RNA, 18 nt, Human herpesvirus 5
aggcggugacggcgcucu

SEQ ID NO: 3980145 - RNA, 15 nt, Human herpesvirus 5
aggcuacugcugcuu

SEQ ID NO: 3980146 - RNA, 21 nt, Human herpesvirus 5
aggcucgcaaagacgugccac

SEQ ID NO: 3980147 - RNA, 17 nt, Human herpesvirus 5
aggcucuguggacccug

SEQ ID NO: 3980148 - RNA, 22 nt, Human herpesvirus 5
aggggccgcagccguuggugga

SEQ ID NO: 3980149 - RNA, 14 nt, Human herpesvirus 5
agggugaaggcaaa

SEQ ID NO: 3980150 - RNA, 18 nt, Human herpesvirus 5
agguacgggucuaccaaa

SEQ ID NO: 3980151 - RNA, 19 nt, Human herpesvirus 5
agguagguggccaugauga

SEQ ID NO: 3980152 - RNA, 20 nt, Human herpesvirus 5
aggucagcgugucugauacc

SEQ ID NO: 3980153 - RNA, 12 nt, Human herpesvirus 5
aggucgcgcgua

SEQ ID NO: 3980154 - RNA, 23 nt, Human herpesvirus 5
aggucguagugcggcgugcugca

SEQ ID NO: 3980155 - RNA, 15 nt, Human herpesvirus 5
agguguaguuuuguu

SEQ ID NO: 3980156 - RNA, 20 nt, Human herpesvirus 5
agguuguugccgcuggacug

SEQ ID NO: 3980157 - RNA, 17 nt, Human herpesvirus 5
aguaaccuggagcagcg

SEQ ID NO: 3980158 - RNA, 16 nt, Human herpesvirus 5
aguaauguauacuucc

SEQ ID NO: 3980159 - RNA, 19 nt, Human herpesvirus 5
aguacaauacaaaaagcuc

SEQ ID NO: 3980160 - RNA, 17 nt, Human herpesvirus 5
aguacccaccgauggca

SEQ ID NO: 3980161 - RNA, 21 nt, Human herpesvirus 5
aguacuucccaugcaacuucu

SEQ ID NO: 3980162 - RNA, 21 nt, Human herpesvirus 5
aguaggcgcgcacccgacggc

SEQ ID NO: 3980163 - RNA, 13 nt, Human herpesvirus 5
aguauagcaugca

SEQ ID NO: 3980164 - RNA, 23 nt, Human herpesvirus 5
agucauagagccaacgagacuau

SEQ ID NO: 3980165 - RNA, 13 nt, Human herpesvirus 5
aguccggaggacg

SEQ ID NO: 3980166 - RNA, 18 nt, Human herpesvirus 5
agucgcgccuugggacac

SEQ ID NO: 3980167 - RNA, 16 nt, Human herpesvirus 5
agucgcgcggucgccg

SEQ ID NO: 3980168 - RNA, 16 nt, Human herpesvirus 5
agucgcucggaaacga

SEQ ID NO: 3980169 - RNA, 17 nt, Human herpesvirus 5
agucguuucagcccaag

SEQ ID NO: 3980170 - RNA, 23 nt, Human herpesvirus 5
agucuagacaggguaacagccuu

SEQ ID NO: 3980171 - RNA, 17 nt, Human herpesvirus 5
agugacgcuaggcggcg

SEQ ID NO: 3980172 - RNA, 18 nt, Human herpesvirus 5
agugacgcuaggcggcgc

SEQ ID NO: 3980173 - RNA, 14 nt, Human herpesvirus 5
agugauacguuguu

SEQ ID NO: 3980174 - RNA, 16 nt, Human herpesvirus 5
agugaucuucauucac

SEQ ID NO: 3980175 - RNA, 15 nt, Human herpesvirus 5
aguggucuuucacau

SEQ ID NO: 3980176 - RNA, 13 nt, Human herpesvirus 5
agugucgauacuu

SEQ ID NO: 3980177 - RNA, 14 nt, Human herpesvirus 5
aguucgccgucgcc

SEQ ID NO: 3980178 - RNA, 23 nt, Human herpesvirus 5
aguugcaacgcgcccgacagcug

SEQ ID NO: 3980179 - RNA, 22 nt, Human herpesvirus 5
aguuguagucgcgguggcggcc

SEQ ID NO: 3980180 - RNA, 17 nt, Human herpesvirus 5
auaagccggcagcugcu

SEQ ID NO: 3980181 - RNA, 14 nt, Human herpesvirus 5
auaaguaccagaca

SEQ ID NO: 3980182 - RNA, 14 nt, Human herpesvirus 5
auaauaaaaguaaa

SEQ ID NO: 3980183 - RNA, 16 nt, Human herpesvirus 5
auacgcuagcagaaga

SEQ ID NO: 3980184 - RNA, 18 nt, Human herpesvirus 5
auagcaagccagauacua

SEQ ID NO: 3980185 - RNA, 13 nt, Human herpesvirus 5
auauaaagaaucu

SEQ ID NO: 3980186 - RNA, 16 nt, Human herpesvirus 5
auaugcaucggaaaau

SEQ ID NO: 3980187 - RNA, 16 nt, Human herpesvirus 5
auauucaaucauuacu

SEQ ID NO: 3980188 - RNA, 18 nt, Human herpesvirus 5
aucaacagcagcaacagc

SEQ ID NO: 3980189 - RNA, 15 nt, Human herpesvirus 5
aucaauacaaugaca

SEQ ID NO: 3980190 - RNA, 14 nt, Human herpesvirus 5
aucaaugaagacuu

SEQ ID NO: 3980191 - RNA, 21 nt, Human herpesvirus 5
aucaguguacacgcgcccaga

SEQ ID NO: 3980192 - RNA, 17 nt, Human herpesvirus 5
aucauaugcuaauauau

SEQ ID NO: 3980193 - RNA, 12 nt, Human herpesvirus 5
aucauggagcua

SEQ ID NO: 3980194 - RNA, 21 nt, Human herpesvirus 5
auccacgcucguucaauaauc

SEQ ID NO: 3980195 - RNA, 15 nt, Human herpesvirus 5
auccagaccucaugu

SEQ ID NO: 3980196 - RNA, 11 nt, Human herpesvirus 5
auccaggaggu

SEQ ID NO: 3980197 - RNA, 16 nt, Human herpesvirus 5
auccuggccaccaugu

SEQ ID NO: 3980198 - RNA, 18 nt, Human herpesvirus 5
aucgcagccacgcgcugg

SEQ ID NO: 3980199 - RNA, 21 nt, Human herpesvirus 5
aucgccgauagagauggcgau

SEQ ID NO: 3980200 - RNA, 14 nt, Human herpesvirus 5
aucgccgcggacgc

SEQ ID NO: 3980201 - RNA, 22 nt, Human herpesvirus 5
aucguuuacgggggauggcgau

SEQ ID NO: 3980202 - RNA, 20 nt, Human herpesvirus 5
aucuacaacuuaaccacaag

SEQ ID NO: 3980203 - RNA, 16 nt, Human herpesvirus 5
aucuccgucacgccuc

SEQ ID NO: 3980204 - RNA, 18 nt, Human herpesvirus 5
aucucggcauaguggugu

SEQ ID NO: 3980205 - RNA, 21 nt, Human herpesvirus 5
aucugcccuauccgcgcggcu

SEQ ID NO: 3980206 - RNA, 19 nt, Human herpesvirus 5
aucugggcagcggcugcgc

SEQ ID NO: 3980207 - RNA, 15 nt, Human herpesvirus 5
aucuuaccacaguug

SEQ ID NO: 3980208 - RNA, 15 nt, Human herpesvirus 5
aucuucgacuuucug

SEQ ID NO: 3980209 - RNA, 18 nt, Human herpesvirus 5
augaaguuguugaucugc

SEQ ID NO: 3980210 - RNA, 15 nt, Human herpesvirus 5
augaccggacgugcu

SEQ ID NO: 3980211 - RNA, 15 nt, Human herpesvirus 5
augagcgugcugcuc

SEQ ID NO: 3980212 - RNA, 14 nt, Human herpesvirus 5
augaggcacaugau

SEQ ID NO: 3980213 - RNA, 16 nt, Human herpesvirus 5
augaggcgguggcugc

SEQ ID NO: 3980214 - RNA, 18 nt, Human herpesvirus 5
augaugaaucaugugguc

SEQ ID NO: 3980215 - RNA, 23 nt, Human herpesvirus 5
augcauaagaagccaagggggug

SEQ ID NO: 3980216 - RNA, 17 nt, Human herpesvirus 5
augccgaugugugacua

SEQ ID NO: 3980217 - RNA, 14 nt, Human herpesvirus 5
augccgccacuuug

SEQ ID NO: 3980218 - RNA, 17 nt, Human herpesvirus 5
augcgcgucgaccuuga

SEQ ID NO: 3980219 - RNA, 19 nt, Human herpesvirus 5
augcgugucgccugccgaa

SEQ ID NO: 3980220 - RNA, 17 nt, Human herpesvirus 5
augcguguuaaacacua

SEQ ID NO: 3980221 - RNA, 18 nt, Human herpesvirus 5
augcuauaagacagccuu

SEQ ID NO: 3980222 - RNA, 23 nt, Human herpesvirus 5
auggaaaugcccgccaccaugca

SEQ ID NO: 3980223 - RNA, 21 nt, Human herpesvirus 5
auggccaacagccuguggcac

SEQ ID NO: 3980224 - RNA, 15 nt, Human herpesvirus 5
auggccgacgaggcc

SEQ ID NO: 3980225 - RNA, 14 nt, Human herpesvirus 5
auggcgacggacgu

SEQ ID NO: 3980226 - RNA, 20 nt, Human herpesvirus 5
auggcgacggacgucgggac

SEQ ID NO: 3980227 - RNA, 16 nt, Human herpesvirus 5
auggcuaacgucucgg

SEQ ID NO: 3980228 - RNA, 14 nt, Human herpesvirus 5
augggcuucccucc

SEQ ID NO: 3980229 - RNA, 17 nt, Human herpesvirus 5
augggucggaucgccgu

SEQ ID NO: 3980230 - RNA, 20 nt, Human herpesvirus 5
augguuugugccucugaaag

SEQ ID NO: 3980231 - RNA, 23 nt, Human herpesvirus 5
auguauccuggggaaaaaaauac

SEQ ID NO: 3980232 - RNA, 21 nt, Human herpesvirus 5
augucauuguuguuuacugaa

SEQ ID NO: 3980233 - RNA, 14 nt, Human herpesvirus 5
augucgcccagaaa

SEQ ID NO: 3980234 - RNA, 19 nt, Human herpesvirus 5
augugccucauuuguauuu

SEQ ID NO: 3980235 - RNA, 15 nt, Human herpesvirus 5
auguggaacagcucg

SEQ ID NO: 3980236 - RNA, 20 nt, Human herpesvirus 5
auguuggugccccaggauga

SEQ ID NO: 3980237 - RNA, 12 nt, Human herpesvirus 5
auuacacucuau

SEQ ID NO: 3980238 - RNA, 15 nt, Human herpesvirus 5
auuacaguaacgcag

SEQ ID NO: 3980239 - RNA, 22 nt, Human herpesvirus 5
auuaucaucaaucacccacaga

SEQ ID NO: 3980240 - RNA, 21 nt, Human herpesvirus 5
auuauuaaggcgcuaacgccu

SEQ ID NO: 3980241 - RNA, 20 nt, Human herpesvirus 5
auucuguguuacgaccuguu

SEQ ID NO: 3980242 - RNA, 16 nt, Human herpesvirus 5
auugccucuacacuug

SEQ ID NO: 3980243 - RNA, 15 nt, Human herpesvirus 5
auugcgggcccugcu

SEQ ID NO: 3980244 - RNA, 13 nt, Human herpesvirus 5
auuguuucuuauu

SEQ ID NO: 3980245 - RNA, 15 nt, Human herpesvirus 5
auuugaagccaggcg

SEQ ID NO: 3980246 - RNA, 12 nt, Human herpesvirus 5
auuuuauuggga

SEQ ID NO: 3980247 - RNA, 20 nt, Human herpesvirus 5
auuuuccucguaaacuuaug

SEQ ID NO: 3980248 - RNA, 14 nt, Human herpesvirus 5
caaaagccugggua

SEQ ID NO: 3980249 - RNA, 15 nt, Human herpesvirus 5
caaaagggguggaaa

SEQ ID NO: 3980250 - RNA, 16 nt, Human herpesvirus 5
caaacacagacaggcg

SEQ ID NO: 3980251 - RNA, 14 nt, Human herpesvirus 5
caaagaacgaaaac

SEQ ID NO: 3980252 - RNA, 16 nt, Human herpesvirus 5
caaagaagucucuuuc

SEQ ID NO: 3980253 - RNA, 14 nt, Human herpesvirus 5
cagcagccaccgac

SEQ ID NO: 3980254 - RNA, 21 nt, Human herpesvirus 5
cagcagcucgcgcuggcuuuc

SEQ ID NO: 3980255 - RNA, 21 nt, Human herpesvirus 5
cagccaaggugcgggagacua

SEQ ID NO: 3980256 - RNA, 23 nt, Human herpesvirus 5
cagccacggaggagacgagagaa

SEQ ID NO: 3980257 - RNA, 23 nt, Human herpesvirus 5
cagccccgaagguuagcgccgcg

SEQ ID NO: 3980258 - RNA, 17 nt, Human herpesvirus 5
cagccucgucgugcccg

SEQ ID NO: 3980259 - RNA, 23 nt, Human herpesvirus 5
cagcgagcgcacccacucgucgc

SEQ ID NO: 3980260 - RNA, 19 nt, Human herpesvirus 5
cagcgccagcggccuggcc

SEQ ID NO: 3980261 - RNA, 23 nt, Human herpesvirus 5
cagcgccgggugcgcgacacggc

SEQ ID NO: 3980262 - RNA, 16 nt, Human herpesvirus 5
cagcgcggaaaccgag

SEQ ID NO: 3980263 - RNA, 13 nt, Human herpesvirus 5
cagcgcgugcgca

SEQ ID NO: 3980264 - RNA, 17 nt, Human herpesvirus 5
cagcggaaaaugccgcc

SEQ ID NO: 3980265 - RNA, 19 nt, Human herpesvirus 5
cagcggaaaaugccgccgc

SEQ ID NO: 3980266 - RNA, 20 nt, Human herpesvirus 5
cagcggaaaaugccgccgcc

SEQ ID NO: 3980267 - RNA, 12 nt, Human herpesvirus 5
cagcggaggugg

SEQ ID NO: 3980268 - RNA, 14 nt, Human herpesvirus 5
cagcggcgacagac

SEQ ID NO: 3980269 - RNA, 17 nt, Human herpesvirus 5
cagcggcggcgguggug

SEQ ID NO: 3980270 - RNA, 13 nt, Human herpesvirus 5
cagcggcugcgcg

SEQ ID NO: 3980271 - RNA, 13 nt, Human herpesvirus 5
cagcgggcuuugc

SEQ ID NO: 3980272 - RNA, 14 nt, Human herpesvirus 5
cagcggucucaucu

SEQ ID NO: 3980273 - RNA, 18 nt, Human herpesvirus 5
cagcgugacgcggugcag

SEQ ID NO: 3980274 - RNA, 19 nt, Human herpesvirus 5
cagcgugcaccugcugccg

SEQ ID NO: 3980275 - RNA, 15 nt, Human herpesvirus 5
cagcuccaaaacgac

SEQ ID NO: 3980276 - RNA, 17 nt, Human herpesvirus 5
cagcucgcgcuggcuuu

SEQ ID NO: 3980277 - RNA, 13 nt, Human herpesvirus 5
cagcugcgccugg

SEQ ID NO: 3980278 - RNA, 17 nt, Human herpesvirus 5
cagcuggcaacgugcca

SEQ ID NO: 3980279 - RNA, 18 nt, Human herpesvirus 5
cagcugguggcucaugcc

SEQ ID NO: 3980280 - RNA, 15 nt, Human herpesvirus 5
cagcuugcccgacca

SEQ ID NO: 3980281 - RNA, 21 nt, Human herpesvirus 5
cagcuuuugcacggaucacga

SEQ ID NO: 3980282 - RNA, 15 nt, Human herpesvirus 5
caggaaaacggaaug

SEQ ID NO: 3980283 - RNA, 17 nt, Human herpesvirus 5
caggaacgauaaccgug

SEQ ID NO: 3980284 - RNA, 15 nt, Human herpesvirus 5
caggacgaggcaggg

SEQ ID NO: 3980285 - RNA, 18 nt, Human herpesvirus 5
caggaggcugugcgcgcc

SEQ ID NO: 3980286 - RNA, 22 nt, Human herpesvirus 5
cagggaauuuugaaaaccgcgc

SEQ ID NO: 3980287 - RNA, 16 nt, Human herpesvirus 5
cagggcgcgccggcgc

SEQ ID NO: 3980288 - RNA, 12 nt, Human herpesvirus 5
cagggcugcucc

SEQ ID NO: 3980289 - RNA, 16 nt, Human herpesvirus 5
caggguaaaaaccacg

SEQ ID NO: 3980290 - RNA, 17 nt, Human herpesvirus 5
caggguaaaaaccacgu

SEQ ID NO: 3980291 - RNA, 18 nt, Human herpesvirus 5
cagggugagaaagaggag

SEQ ID NO: 3980292 - RNA, 18 nt, Human herpesvirus 5
caggugacauccucgccc

SEQ ID NO: 3980293 - RNA, 12 nt, Human herpesvirus 5
cagguucugaau

SEQ ID NO: 3980294 - RNA, 14 nt, Human herpesvirus 5
caguaccaccgcug

SEQ ID NO: 3980295 - RNA, 13 nt, Human herpesvirus 5
caguagacagaca

SEQ ID NO: 3980296 - RNA, 16 nt, Human herpesvirus 5
caguagacagacagga

SEQ ID NO: 3980297 - RNA, 13 nt, Human herpesvirus 5
caguggcaggccc

SEQ ID NO: 3980298 - RNA, 15 nt, Human herpesvirus 5
cagugucgguguggu

SEQ ID NO: 3980299 - RNA, 17 nt, Human herpesvirus 5
caguuaccaccgucgcc

SEQ ID NO: 3980300 - RNA, 22 nt, Human herpesvirus 5
caguuuuuuuccauccuggcca

SEQ ID NO: 3980301 - RNA, 20 nt, Human herpesvirus 5
cauaagaauaggaagaaacc

SEQ ID NO: 3980302 - RNA, 18 nt, Human herpesvirus 5
cauacaaaccccgugucc

SEQ ID NO: 3980303 - RNA, 16 nt, Human herpesvirus 5
cauacacguugcuuuc

SEQ ID NO: 3980304 - RNA, 14 nt, Human herpesvirus 5
cauauuuguuuuca

SEQ ID NO: 3980305 - RNA, 21 nt, Human herpesvirus 5
caucaauaaacuuuuuuuaac

SEQ ID NO: 3980306 - RNA, 17 nt, Human herpesvirus 5
cgcggguucacgcgucg

SEQ ID NO: 3980307 - RNA, 22 nt, Human herpesvirus 5
cgcggucauauagccuccggcu

SEQ ID NO: 3980308 - RNA, 21 nt, Human herpesvirus 5
cgcgguccuagcacgucagug

SEQ ID NO: 3980309 - RNA, 15 nt, Human herpesvirus 5
cgcguacggacgagu

SEQ ID NO: 3980310 - RNA, 12 nt, Human herpesvirus 5
cgcguccacggg

SEQ ID NO: 3980311 - RNA, 15 nt, Human herpesvirus 5
cgcguccgaccggga

SEQ ID NO: 3980312 - RNA, 13 nt, Human herpesvirus 5
cgcguccgggcuu

SEQ ID NO: 3980313 - RNA, 16 nt, Human herpesvirus 5
cgcguccgggcuuucc

SEQ ID NO: 3980314 - RNA, 20 nt, Human herpesvirus 5
cgcgucgcaaacgcugcuug

SEQ ID NO: 3980315 - RNA, 22 nt, Human herpesvirus 5
cgcguggugaucgugggccagg

SEQ ID NO: 3980316 - RNA, 18 nt, Human herpesvirus 5
cgcuaagagcuuugacgc

SEQ ID NO: 3980317 - RNA, 19 nt, Human herpesvirus 5
cgcuacaacgcgcgccuga

SEQ ID NO: 3980318 - RNA, 24 nt, Human herpesvirus 5
cgcuccuggaucuuggcggccgag

SEQ ID NO: 3980319 - RNA, 13 nt, Human herpesvirus 5
cgcucggccucgc

SEQ ID NO: 3980320 - RNA, 20 nt, Human herpesvirus 5
cgcucgugaaacagcagcuc

SEQ ID NO: 3980321 - RNA, 15 nt, Human herpesvirus 5
cgcugccgcucagcg

SEQ ID NO: 3980322 - RNA, 13 nt, Human herpesvirus 5
cgcugcugcucuc

SEQ ID NO: 3980323 - RNA, 14 nt, Human herpesvirus 5
cgcuggcucggcgc

SEQ ID NO: 3980324 - RNA, 18 nt, Human herpesvirus 5
cgcuggcucggcgcggcu

SEQ ID NO: 3980325 - RNA, 17 nt, Human herpesvirus 5
cgcugguuuggcugggu

SEQ ID NO: 3980326 - RNA, 14 nt, Human herpesvirus 5
cgcuguguggcgug

SEQ ID NO: 3980327 - RNA, 22 nt, Human herpesvirus 5
cggaaacagcguccacaguuuc

SEQ ID NO: 3980328 - RNA, 13 nt, Human herpesvirus 5
cggaacccucugg

SEQ ID NO: 3980329 - RNA, 14 nt, Human herpesvirus 5
cggaacccuucccg

SEQ ID NO: 3980330 - RNA, 17 nt, Human herpesvirus 5
cggaagaagaagaacaa

SEQ ID NO: 3980331 - RNA, 13 nt, Human herpesvirus 5
cggacgggcagga

SEQ ID NO: 3980332 - RNA, 19 nt, Human herpesvirus 5
cggagcacgggcugcuggu

SEQ ID NO: 3980333 - RNA, 22 nt, Human herpesvirus 5
cggagcaggaaccuccuccgcg

SEQ ID NO: 3980334 - RNA, 23 nt, Human herpesvirus 5
cggagcaggaaccuccuccgcga

SEQ ID NO: 3980335 - RNA, 23 nt, Human herpesvirus 5
cggagcggaggaggugaccuggc

SEQ ID NO: 3980336 - RNA, 23 nt, Human herpesvirus 5
cggaggaaucgucggcagagguc

SEQ ID NO: 3980337 - RNA, 20 nt, Human herpesvirus 5
cggaggagacgagagaaccu

SEQ ID NO: 3980338 - RNA, 23 nt, Human herpesvirus 5
cggagggccgccaauuggcggcg

SEQ ID NO: 3980339 - RNA, 17 nt, Human herpesvirus 5
cggaggugcuggcggcc

SEQ ID NO: 3980340 - RNA, 12 nt, Human herpesvirus 5
cggagucauuau

SEQ ID NO: 3980341 - RNA, 17 nt, Human herpesvirus 5
cggaguggugagcgggu

SEQ ID NO: 3980342 - RNA, 20 nt, Human herpesvirus 5
cggaucaauugcgggcccug

SEQ ID NO: 3980343 - RNA, 24 nt, Human herpesvirus 5
cggcacgccguugccacgagcaug

SEQ ID NO: 3980344 - RNA, 15 nt, Human herpesvirus 5
cggcagcggggagaa

SEQ ID NO: 3980345 - RNA, 20 nt, Human herpesvirus 5
cggccaguacggccucuggg

SEQ ID NO: 3980346 - RNA, 12 nt, Human herpesvirus 5
cggcccugugcu

SEQ ID NO: 3980347 - RNA, 14 nt, Human herpesvirus 5
cggccgaccccgcc

SEQ ID NO: 3980348 - RNA, 16 nt, Human herpesvirus 5
cggccgacggcagcgu

SEQ ID NO: 3980349 - RNA, 16 nt, Human herpesvirus 5
cggccgagucuccgcg

SEQ ID NO: 3980350 - RNA, 19 nt, Human herpesvirus 5
cggccgcagaaggccauga

SEQ ID NO: 3980351 - RNA, 12 nt, Human herpesvirus 5
cggccgccgacg

SEQ ID NO: 3980352 - RNA, 20 nt, Human herpesvirus 5
cggccgcggugcgcugcagc

SEQ ID NO: 3980353 - RNA, 14 nt, Human herpesvirus 5
cggccggcugcugc

SEQ ID NO: 3980354 - RNA, 16 nt, Human herpesvirus 5
cggccgucgcaagggc

SEQ ID NO: 3980355 - RNA, 14 nt, Human herpesvirus 5
cggccugcucgcac

SEQ ID NO: 3980356 - RNA, 21 nt, Human herpesvirus 5
cggcgaauggaucaucuguuu

SEQ ID NO: 3980357 - RNA, 18 nt, Human herpesvirus 5
cggcgacagacggcgucg

SEQ ID NO: 3980358 - RNA, 20 nt, Human herpesvirus 5
cggcgcagacgucggcgguc

SEQ ID NO: 3980359 - RNA, 14 nt, Human herpesvirus 5
cggcgccccacagc

SEQ ID NO: 3980360 - RNA, 16 nt, Human herpesvirus 5
cggcgccugcugcucg

SEQ ID NO: 3980361 - RNA, 16 nt, Human herpesvirus 5
cggcggccacggccug

SEQ ID NO: 3980362 - RNA, 18 nt, Human herpesvirus 5
cggcggccacggccugcg

SEQ ID NO: 3980363 - RNA, 18 nt, Human herpesvirus 5
cggcgguacugaagccgc

SEQ ID NO: 3980364 - RNA, 14 nt, Human herpesvirus 5
cggcgucaccacuu

SEQ ID NO: 3980365 - RNA, 20 nt, Human herpesvirus 5
cggcgugaaugggcacgccg

SEQ ID NO: 3980366 - RNA, 20 nt, Human herpesvirus 5
cggcguguacagcuaccuca

SEQ ID NO: 3980367 - RNA, 15 nt, Human herpesvirus 5
cggcguguuggacgc

SEQ ID NO: 3980368 - RNA, 17 nt, Human herpesvirus 5
cggcuaccaugcgcaac

SEQ ID NO: 3980369 - RNA, 21 nt, Human herpesvirus 5
cggcuaucuguacugcaagac

SEQ ID NO: 3980370 - RNA, 14 nt, Human herpesvirus 5
cggcugcugcacca

SEQ ID NO: 3980371 - RNA, 21 nt, Human herpesvirus 5
cggcuguggcuucucuggaga

SEQ ID NO: 3980372 - RNA, 21 nt, Human herpesvirus 5
cgggaugcacagcgucuggcc

SEQ ID NO: 3980373 - RNA, 19 nt, Human herpesvirus 5
cgggcaacgcguggcccug

SEQ ID NO: 3980374 - RNA, 23 nt, Human herpesvirus 5
cgggccgcgugccugggaacgcg

SEQ ID NO: 3980375 - RNA, 18 nt, Human herpesvirus 5
cgggcucaccgcaguugc

SEQ ID NO: 3980376 - RNA, 14 nt, Human herpesvirus 5
cgggcuccaugcug

SEQ ID NO: 3980377 - RNA, 17 nt, Human herpesvirus 5
cgggcucgaccggcggc

SEQ ID NO: 3980378 - RNA, 22 nt, Human herpesvirus 5
cgggcugcuggucuccauggcc

SEQ ID NO: 3980379 - RNA, 20 nt, Human herpesvirus 5
cgggucucuuugacacgagc

SEQ ID NO: 3980380 - RNA, 15 nt, Human herpesvirus 5
cggguggagaugagg

SEQ ID NO: 3980381 - RNA, 11 nt, Human herpesvirus 5
cggguguccca

SEQ ID NO: 3980382 - RNA, 14 nt, Human herpesvirus 5
cgguaaaaccacgu

SEQ ID NO: 3980383 - RNA, 13 nt, Human herpesvirus 5
cgguacacguccc

SEQ ID NO: 3980384 - RNA, 14 nt, Human herpesvirus 5
cgguaccacuacua

SEQ ID NO: 3980385 - RNA, 20 nt, Human herpesvirus 5
cgguaugggucacggcggcg

SEQ ID NO: 3980386 - RNA, 15 nt, Human herpesvirus 5
cggucagaaaaagaa

SEQ ID NO: 3980387 - RNA, 17 nt, Human herpesvirus 5
cggucccgacauggaga

SEQ ID NO: 3980388 - RNA, 22 nt, Human herpesvirus 5
cgguccgcggugucuccucgcg

SEQ ID NO: 3980389 - RNA, 13 nt, Human herpesvirus 5
cgguccuccagca

SEQ ID NO: 3980390 - RNA, 18 nt, Human herpesvirus 5
acacggagcacgggcugc

SEQ ID NO: 3980391 - RNA, 20 nt, Human herpesvirus 5
acacgugcuuuuggugcgcc

SEQ ID NO: 3980392 - RNA, 20 nt, Human herpesvirus 5
acacuaaauuguuauugcca

SEQ ID NO: 3980393 - RNA, 19 nt, Human herpesvirus 5
acacuaagaauaaagaaaa

SEQ ID NO: 3980394 - RNA, 20 nt, Human herpesvirus 5
acacucuuuugccgcaccgc

SEQ ID NO: 3980395 - RNA, 21 nt, Human herpesvirus 5
acagacugggcgacgaagugc

SEQ ID NO: 3980396 - RNA, 16 nt, Human herpesvirus 5
acagcaacaacagucg

SEQ ID NO: 3980397 - RNA, 14 nt, Human herpesvirus 5
acagcaaggccgcc

SEQ ID NO: 3980398 - RNA, 21 nt, Human herpesvirus 5
acagccacaucaacauacagu

SEQ ID NO: 3980399 - RNA, 19 nt, Human herpesvirus 5
acaggacaccgcaacucgg

SEQ ID NO: 3980400 - RNA, 15 nt, Human herpesvirus 5
acaggcuaugggaag

SEQ ID NO: 3980401 - RNA, 12 nt, Human herpesvirus 5
acagggugccgc

SEQ ID NO: 3980402 - RNA, 14 nt, Human herpesvirus 5
acaucgcauaugac

SEQ ID NO: 3980403 - RNA, 20 nt, Human herpesvirus 5
acaucuccgucucuggucuc

SEQ ID NO: 3980404 - RNA, 19 nt, Human herpesvirus 5
acaugaaucuuccccucug

SEQ ID NO: 3980405 - RNA, 19 nt, Human herpesvirus 5
acaugcccagcaucuccuc

SEQ ID NO: 3980406 - RNA, 17 nt, Human herpesvirus 5
accaacgcgaccaccgu

SEQ ID NO: 3980407 - RNA, 21 nt, Human herpesvirus 5
accaacugagcuucggagguc

SEQ ID NO: 3980408 - RNA, 15 nt, Human herpesvirus 5
accaagaaacaccgg

SEQ ID NO: 3980409 - RNA, 22 nt, Human herpesvirus 5
accacccuguuccccgugacgu

SEQ ID NO: 3980410 - RNA, 15 nt, Human herpesvirus 5
accaccgagacgugc

SEQ ID NO: 3980411 - RNA, 14 nt, Human herpesvirus 5
accaccuccugggu

SEQ ID NO: 3980412 - RNA, 15 nt, Human herpesvirus 5
accaccuccugggua

SEQ ID NO: 3980413 - RNA, 20 nt, Human herpesvirus 5
accacgacacggugcugcug

SEQ ID NO: 3980414 - RNA, 18 nt, Human herpesvirus 5
accacguacaucggcguc

SEQ ID NO: 3980415 - RNA, 14 nt, Human herpesvirus 5
accagcccagggau

SEQ ID NO: 3980416 - RNA, 16 nt, Human herpesvirus 5
accagcugcaggcagg

SEQ ID NO: 3980417 - RNA, 21 nt, Human herpesvirus 5
accauuaacaauuccacgccg

SEQ ID NO: 3980418 - RNA, 13 nt, Human herpesvirus 5
accccaagccaaa

SEQ ID NO: 3980419 - RNA, 17 nt, Human herpesvirus 5
accccauacacgguuuc

SEQ ID NO: 3980420 - RNA, 17 nt, Human herpesvirus 5
acccccguacugccugg

SEQ ID NO: 3980421 - RNA, 14 nt, Human herpesvirus 5
accccgcgcgacgu

SEQ ID NO: 3980422 - RNA, 18 nt, Human herpesvirus 5
acccgcggccguacccgc

SEQ ID NO: 3980423 - RNA, 12 nt, Human herpesvirus 5
acccguacugcg

SEQ ID NO: 3980424 - RNA, 17 nt, Human herpesvirus 5
acccuguuccccgugac

SEQ ID NO: 3980425 - RNA, 18 nt, Human herpesvirus 5
accgacaaggcgcggcga

SEQ ID NO: 3980426 - RNA, 21 nt, Human herpesvirus 5
accgacgacgacagucuccuc

SEQ ID NO: 3980427 - RNA, 14 nt, Human herpesvirus 5
accgcaaaggccac

SEQ ID NO: 3980428 - RNA, 23 nt, Human herpesvirus 5
accgcaacaacagcagcaacagc

SEQ ID NO: 3980429 - RNA, 13 nt, Human herpesvirus 5
accgcaggagcug

SEQ ID NO: 3980430 - RNA, 17 nt, Human herpesvirus 5
accgcaguugcugccuu

SEQ ID NO: 3980431 - RNA, 14 nt, Human herpesvirus 5
accgcgagcggcgg

SEQ ID NO: 3980432 - RNA, 21 nt, Human herpesvirus 5
accgcgcccacuggaguugcu

SEQ ID NO: 3980433 - RNA, 13 nt, Human herpesvirus 5
accgcggcgcagg

SEQ ID NO: 3980434 - RNA, 20 nt, Human herpesvirus 5
accggcgcaguuugcggcgc

SEQ ID NO: 3980435 - RNA, 13 nt, Human herpesvirus 5
accguaaagagag

SEQ ID NO: 3980436 - RNA, 17 nt, Human herpesvirus 5
accgucgcccucagcgu

SEQ ID NO: 3980437 - RNA, 17 nt, Human herpesvirus 5
accgucgccgucacugc

SEQ ID NO: 3980438 - RNA, 19 nt, Human herpesvirus 5
accgucgccgucacugcca

SEQ ID NO: 3980439 - RNA, 20 nt, Human herpesvirus 5
accgucgcuacauucgccgc

SEQ ID NO: 3980440 - RNA, 20 nt, Human herpesvirus 5
accgugcccguuuucacagc

SEQ ID NO: 3980441 - RNA, 20 nt, Human herpesvirus 5
accguggggucaucgaccga

SEQ ID NO: 3980442 - RNA, 12 nt, Human herpesvirus 5
accgugucuccg

SEQ ID NO: 3980443 - RNA, 17 nt, Human herpesvirus 5
accguuguggggauuuu

SEQ ID NO: 3980444 - RNA, 14 nt, Human herpesvirus 5
accuaccugggcug

SEQ ID NO: 3980445 - RNA, 21 nt, Human herpesvirus 5
accuacgucaaagcggucuca

SEQ ID NO: 3980446 - RNA, 21 nt, Human herpesvirus 5
accucaguggaccgucaauuu

SEQ ID NO: 3980447 - RNA, 16 nt, Human herpesvirus 5
accucgugcgaggaca

SEQ ID NO: 3980448 - RNA, 15 nt, Human herpesvirus 5
accugagacuggucu

SEQ ID NO: 3980449 - RNA, 20 nt, Human herpesvirus 5
accugcucaaaguacuuguc

SEQ ID NO: 3980450 - RNA, 15 nt, Human herpesvirus 5
accuggacgcgguga

SEQ ID NO: 3980451 - RNA, 23 nt, Human herpesvirus 5
accuggguagcaaguccuccaac

SEQ ID NO: 3980452 - RNA, 21 nt, Human herpesvirus 5
accuggucaagguagaggaac

SEQ ID NO: 3980453 - RNA, 24 nt, Human herpesvirus 5
accugugugaucugggcagcggcu

SEQ ID NO: 3980454 - RNA, 12 nt, Human herpesvirus 5
accuugucuccc

SEQ ID NO: 3980455 - RNA, 13 nt, Human herpesvirus 5
acgaaaggcaccg

SEQ ID NO: 3980456 - RNA, 13 nt, Human herpesvirus 5
acgaagaggacac

SEQ ID NO: 3980457 - RNA, 20 nt, Human herpesvirus 5
acgaagaugccgauguguga

SEQ ID NO: 3980458 - RNA, 21 nt, Human herpesvirus 5
acgaagaugccgaugugugac

SEQ ID NO: 3980459 - RNA, 17 nt, Human herpesvirus 5
acgacagucuccuccug

SEQ ID NO: 3980460 - RNA, 14 nt, Human herpesvirus 5
acgacccaccgccg

SEQ ID NO: 3980461 - RNA, 23 nt, Human herpesvirus 5
acgacccaccgccgcuuucucau

SEQ ID NO: 3980462 - RNA, 17 nt, Human herpesvirus 5
agaugaggcggcgugga

SEQ ID NO: 3980463 - RNA, 13 nt, Human herpesvirus 5
agaugcuauccgc

SEQ ID NO: 3980464 - RNA, 18 nt, Human herpesvirus 5
agcaagaguugcaacgcg

SEQ ID NO: 3980465 - RNA, 12 nt, Human herpesvirus 5
agcacaccugcc

SEQ ID NO: 3980466 - RNA, 15 nt, Human herpesvirus 5
agcacauuagacaca

SEQ ID NO: 3980467 - RNA, 17 nt, Human herpesvirus 5
agcacauuagacacacg

SEQ ID NO: 3980468 - RNA, 18 nt, Human herpesvirus 5
agcacguacaaauagcag

SEQ ID NO: 3980469 - RNA, 16 nt, Human herpesvirus 5
agcacgucagugguga

SEQ ID NO: 3980470 - RNA, 18 nt, Human herpesvirus 5
agcagccaccgacacagc

SEQ ID NO: 3980471 - RNA, 17 nt, Human herpesvirus 5
agcaggguaaaaaccac

SEQ ID NO: 3980472 - RNA, 22 nt, Human herpesvirus 5
agcaucgcaacaacagcaacaa

SEQ ID NO: 3980473 - RNA, 17 nt, Human herpesvirus 5
agcaugcugugggccca

SEQ ID NO: 3980474 - RNA, 17 nt, Human herpesvirus 5
agccacggaggagacga

SEQ ID NO: 3980475 - RNA, 14 nt, Human herpesvirus 5
agccagacugcccu

SEQ ID NO: 3980476 - RNA, 12 nt, Human herpesvirus 5
agcccaccgccc

SEQ ID NO: 3980477 - RNA, 15 nt, Human herpesvirus 5
agcccgggccgccgc

SEQ ID NO: 3980478 - RNA, 17 nt, Human herpesvirus 5
agccgagcgggaggcgg

SEQ ID NO: 3980479 - RNA, 15 nt, Human herpesvirus 5
agccggcuccgccgu

SEQ ID NO: 3980480 - RNA, 21 nt, Human herpesvirus 5
agccuguuagaaccgcgggcc

SEQ ID NO: 3980481 - RNA, 17 nt, Human herpesvirus 5
agcgccguccugcagac

SEQ ID NO: 3980482 - RNA, 24 nt, Human herpesvirus 5
agcgcgaguugcaaaagaagcugc

SEQ ID NO: 3980483 - RNA, 23 nt, Human herpesvirus 5
agcgcggucgccaccuggaucug

SEQ ID NO: 3980484 - RNA, 20 nt, Human herpesvirus 5
agcgcguuuguugcgcggcg

SEQ ID NO: 3980485 - RNA, 23 nt, Human herpesvirus 5
agcggcagccaccgcgaggccac

SEQ ID NO: 3980486 - RNA, 12 nt, Human herpesvirus 5
agcggccgccgg

SEQ ID NO: 3980487 - RNA, 14 nt, Human herpesvirus 5
agcgggcugucaca

SEQ ID NO: 3980488 - RNA, 15 nt, Human herpesvirus 5
agcgguaccagacgc

SEQ ID NO: 3980489 - RNA, 16 nt, Human herpesvirus 5
agcgucugcgccuuuu

SEQ ID NO: 3980490 - RNA, 14 nt, Human herpesvirus 5
agcgugcaccugcu

SEQ ID NO: 3980491 - RNA, 20 nt, Human herpesvirus 5
agcgugcucagcugguggcu

SEQ ID NO: 3980492 - RNA, 23 nt, Human herpesvirus 5
agcgugcugugcuacgagaucag

SEQ ID NO: 3980493 - RNA, 19 nt, Human herpesvirus 5
agcuacgcgaccagcugcu

SEQ ID NO: 3980494 - RNA, 18 nt, Human herpesvirus 5
agcuagugcagccuuagg

SEQ ID NO: 3980495 - RNA, 17 nt, Human herpesvirus 5
agcuauauagccggugu

SEQ ID NO: 3980496 - RNA, 16 nt, Human herpesvirus 5
agcucguccacacgcc

SEQ ID NO: 3980497 - RNA, 19 nt, Human herpesvirus 5
agcucuuccaaugguugaa

SEQ ID NO: 3980498 - RNA, 18 nt, Human herpesvirus 5
agcugcgcaggccgccgc

SEQ ID NO: 3980499 - RNA, 18 nt, Human herpesvirus 5
agcugcuuuucgggccgc

SEQ ID NO: 3980500 - RNA, 19 nt, Human herpesvirus 5
agcuggggaaguacaauau

SEQ ID NO: 3980501 - RNA, 15 nt, Human herpesvirus 5
agcuggugcaucacg

SEQ ID NO: 3980502 - RNA, 15 nt, Human herpesvirus 5
agcuguguauaguuu

SEQ ID NO: 3980503 - RNA, 22 nt, Human herpesvirus 5
agcuuaccgccaccgucgcccu

SEQ ID NO: 3980504 - RNA, 17 nt, Human herpesvirus 5
agcuucggccggcugcu

SEQ ID NO: 3980505 - RNA, 18 nt, Human herpesvirus 5
agcuucugguaggaggcg

SEQ ID NO: 3980506 - RNA, 20 nt, Human herpesvirus 5
aggaacgcacgcuggaggac

SEQ ID NO: 3980507 - RNA, 17 nt, Human herpesvirus 5
aggacagcaaggccgcc

SEQ ID NO: 3980508 - RNA, 22 nt, Human herpesvirus 5
aggagauuauccguaucugcau

SEQ ID NO: 3980509 - RNA, 15 nt, Human herpesvirus 5
aggagcuucuccccg

SEQ ID NO: 3980510 - RNA, 16 nt, Human herpesvirus 5
aggauguucugcacgg

SEQ ID NO: 3980511 - RNA, 16 nt, Human herpesvirus 5
aggccacccacccggu

SEQ ID NO: 3980512 - RNA, 21 nt, Human herpesvirus 5
cgccgcgaucgaggcggcggc

SEQ ID NO: 3980513 - RNA, 13 nt, Human herpesvirus 5
cgccgcgcccguc

SEQ ID NO: 3980514 - RNA, 20 nt, Human herpesvirus 5
cgccgcgccguaguucuccg

SEQ ID NO: 3980515 - RNA, 12 nt, Human herpesvirus 5
cgccgcggcguu

SEQ ID NO: 3980516 - RNA, 17 nt, Human herpesvirus 5
cgccggccacgagccag

SEQ ID NO: 3980517 - RNA, 15 nt, Human herpesvirus 5
cgccgugcgcgacga

SEQ ID NO: 3980518 - RNA, 20 nt, Human herpesvirus 5
cgccgugcucuuggcgccgc

SEQ ID NO: 3980519 - RNA, 15 nt, Human herpesvirus 5
cgccgugggcggcga

SEQ ID NO: 3980520 - RNA, 21 nt, Human herpesvirus 5
cgccucaaaaagcagguggag

SEQ ID NO: 3980521 - RNA, 17 nt, Human herpesvirus 5
cgccucacgcugcacga

SEQ ID NO: 3980522 - RNA, 22 nt, Human herpesvirus 5
cgccuccucgucggccugggcu

SEQ ID NO: 3980523 - RNA, 15 nt, Human herpesvirus 5
cgccugcgacggcgg

SEQ ID NO: 3980524 - RNA, 17 nt, Human herpesvirus 5
cgccugguugcugccgc

SEQ ID NO: 3980525 - RNA, 19 nt, Human herpesvirus 5
cgccugguugcugccgcgu

SEQ ID NO: 3980526 - RNA, 15 nt, Human herpesvirus 5
cgccuuccuccucug

SEQ ID NO: 3980527 - RNA, 13 nt, Human herpesvirus 5
cgcgaccuucccu

SEQ ID NO: 3980528 - RNA, 13 nt, Human herpesvirus 5
cgcgagcgggcaa

SEQ ID NO: 3980529 - RNA, 12 nt, Human herpesvirus 5
cgcgagcugggc

SEQ ID NO: 3980530 - RNA, 20 nt, Human herpesvirus 5
cgcgaggucugggaugugca

SEQ ID NO: 3980531 - RNA, 18 nt, Human herpesvirus 5
cgcgcaucgccugcaccu

SEQ ID NO: 3980532 - RNA, 15 nt, Human herpesvirus 5
cgcgcccgacagcug

SEQ ID NO: 3980533 - RNA, 19 nt, Human herpesvirus 5
cgcgccucauggcggcggc

SEQ ID NO: 3980534 - RNA, 21 nt, Human herpesvirus 5
cgcgccucucggagccgccga

SEQ ID NO: 3980535 - RNA, 17 nt, Human herpesvirus 5
cgcgccuuccuccucug

SEQ ID NO: 3980536 - RNA, 19 nt, Human herpesvirus 5
cgcgcucuguaccguuauu

SEQ ID NO: 3980537 - RNA, 20 nt, Human herpesvirus 5
cgcgcuggcaaacuccgaca

SEQ ID NO: 3980538 - RNA, 20 nt, Human herpesvirus 5
cgcggaaaccgagacggagg

SEQ ID NO: 3980539 - RNA, 15 nt, Human herpesvirus 5
cgcggaaacgacgga

SEQ ID NO: 3980540 - RNA, 18 nt, Human herpesvirus 5
cgcggaggugcuggcggc

SEQ ID NO: 3980541 - RNA, 14 nt, Human herpesvirus 5
cgcggcgacgagga

SEQ ID NO: 3980542 - RNA, 14 nt, Human herpesvirus 5
cgcggcgguggccg

SEQ ID NO: 3980543 - RNA, 15 nt, Human herpesvirus 5
cgcggcuagagcgcg

SEQ ID NO: 3980544 - RNA, 15 nt, Human herpesvirus 5
cgcggguggccggcg

SEQ ID NO: 3980545 - RNA, 21 nt, Human herpesvirus 5
gaggaugggggggaccggggu

SEQ ID NO: 3980546 - RNA, 19 nt, Human herpesvirus 5
gaggccgagacgcugcgcu

SEQ ID NO: 3980547 - RNA, 19 nt, Human herpesvirus 5
gagggucuuucuacgcccu

SEQ ID NO: 3980548 - RNA, 16 nt, Human herpesvirus 5
gagguacugcagcacg

SEQ ID NO: 3980549 - RNA, 22 nt, Human herpesvirus 5
gagguccuuuggguccagccag

SEQ ID NO: 3980550 - RNA, 17 nt, Human herpesvirus 5
gaggucuaucacgggcu

SEQ ID NO: 3980551 - RNA, 21 nt, Human herpesvirus 5
gagucaccguaaucaccaaag

SEQ ID NO: 3980552 - RNA, 20 nt, Human herpesvirus 5
cuuccccacccaguagacag

SEQ ID NO: 3980553 - RNA, 17 nt, Human herpesvirus 5
cuuccccucugcugcug

SEQ ID NO: 3980554 - RNA, 18 nt, Human herpesvirus 5
cuucccgaccucccacga

SEQ ID NO: 3980555 - RNA, 22 nt, Human herpesvirus 5
cuucgcgccccucugcguucac

SEQ ID NO: 3980556 - RNA, 16 nt, Human herpesvirus 5
cuucggaaucgggccc

SEQ ID NO: 3980557 - RNA, 21 nt, Human herpesvirus 5
cuucuuugguaucuacaucag

SEQ ID NO: 3980558 - RNA, 20 nt, Human herpesvirus 5
cuugaaagacggacccgcca

SEQ ID NO: 3980559 - RNA, 21 nt, Human herpesvirus 5
cuugcgcuucugcagcuccgc

SEQ ID NO: 3980560 - RNA, 17 nt, Human herpesvirus 5
cuugcggcgcuucgagg

SEQ ID NO: 3980561 - RNA, 17 nt, Human herpesvirus 5
cuuggccgaccugugcg

SEQ ID NO: 3980562 - RNA, 17 nt, Human herpesvirus 5
ggccaccaagaaacacc

SEQ ID NO: 3980563 - RNA, 13 nt, Human herpesvirus 5
ggccacgagccag

SEQ ID NO: 3980564 - RNA, 16 nt, Human herpesvirus 5
ggcccgaacgcugcuu

SEQ ID NO: 3980565 - RNA, 17 nt, Human herpesvirus 5
ggcccgcuggcucggcg

SEQ ID NO: 3980566 - RNA, 23 nt, Human herpesvirus 5
ggcccguuuugcauaagcgcgga

SEQ ID NO: 3980567 - RNA, 23 nt, Human herpesvirus 5
ggcccugugcuuuugcuuacugu

SEQ ID NO: 3980568 - RNA, 15 nt, Human herpesvirus 5
ggccgaccugugcgu

SEQ ID NO: 3980569 - RNA, 21 nt, Human herpesvirus 5
ggccgccgccagcguccgcgc

SEQ ID NO: 3980570 - RNA, 12 nt, Human herpesvirus 5
ggccgccucuuc

SEQ ID NO: 3980571 - RNA, 20 nt, Human herpesvirus 5
ggccgucgcaagggcugcuc

SEQ ID NO: 3980572 - RNA, 23 nt, Human herpesvirus 5
ggccuccgacgacgccgaggacg

SEQ ID NO: 3980573 - RNA, 15 nt, Human herpesvirus 5
ggccugcgggcaggc

SEQ ID NO: 3980574 - RNA, 17 nt, Human herpesvirus 5
ggccugguauacgaggc

SEQ ID NO: 3980575 - RNA, 18 nt, Human herpesvirus 5
ggccuguggugcgacugc

SEQ ID NO: 3980576 - RNA, 18 nt, Human herpesvirus 5
ggccuugcgcucccugcu

SEQ ID NO: 3980577 - RNA, 19 nt, Human herpesvirus 5
ggcgacaagcuguggcugc

SEQ ID NO: 3980578 - RNA, 13 nt, Human herpesvirus 5
ggcgacccgcagu

SEQ ID NO: 3980579 - RNA, 21 nt, Human herpesvirus 5
ggcgauacgccggugcugccg

SEQ ID NO: 3980580 - RNA, 21 nt, Human herpesvirus 5
ggcgaugacgaguaggcgcgc

SEQ ID NO: 3980581 - RNA, 15 nt, Human herpesvirus 5
ggcgcagucgcgagc

SEQ ID NO: 3980582 - RNA, 18 nt, Human herpesvirus 5
ggcgcagucgcgagcuga

SEQ ID NO: 3980583 - RNA, 14 nt, Human herpesvirus 5
ggcgcccgcgacgu

SEQ ID NO: 3980584 - RNA, 15 nt, Human herpesvirus 5
ggcgccgucagagca

SEQ ID NO: 3980585 - RNA, 17 nt, Human herpesvirus 5
ggcgcgcgucuggacgc

SEQ ID NO: 3980586 - RNA, 20 nt, Human herpesvirus 5
ggcgcggucccgugauggag

SEQ ID NO: 3980587 - RNA, 14 nt, Human herpesvirus 5
ggcgcucuuucagc

SEQ ID NO: 3980588 - RNA, 18 nt, Human herpesvirus 5
ggcgcuguacauucugcu

SEQ ID NO: 3980589 - RNA, 21 nt, Human herpesvirus 5
ggcgcuguucuggauguauau

SEQ ID NO: 3980590 - RNA, 19 nt, Human herpesvirus 5
ggcggccgacggcagcgug

SEQ ID NO: 3980591 - RNA, 14 nt, Human herpesvirus 5
ggcggccgcagaag

SEQ ID NO: 3980592 - RNA, 19 nt, Human herpesvirus 5
ggcggcggugguggaggag

SEQ ID NO: 3980593 - RNA, 15 nt, Human herpesvirus 5
ggcggcuugggcagc

SEQ ID NO: 3980594 - RNA, 18 nt, Human herpesvirus 5
ggcgguggccgucuuggg

SEQ ID NO: 3980595 - RNA, 14 nt, Human herpesvirus 5
ggcgguggcugcgc

SEQ ID NO: 3980596 - RNA, 18 nt, Human herpesvirus 5
ggcgucgcgucgcaggcc

SEQ ID NO: 3980597 - RNA, 20 nt, Human herpesvirus 5
ggcgugcugcacgcucaccg

SEQ ID NO: 3980598 - RNA, 22 nt, Human herpesvirus 5
ggcuaacgcgcugcugcucucc

SEQ ID NO: 3980599 - RNA, 17 nt, Human herpesvirus 5
ggcucaaacaccgcugc

SEQ ID NO: 3980600 - RNA, 21 nt, Human herpesvirus 5
ggcucaccgcaguugcugccu

SEQ ID NO: 3980601 - RNA, 14 nt, Human herpesvirus 5
ggcucacgccggca

SEQ ID NO: 3980602 - RNA, 16 nt, Human herpesvirus 5
ggcuccaugcugacgu

SEQ ID NO: 3980603 - RNA, 20 nt, Human herpesvirus 5
ggcucgaccggcggcugcug

SEQ ID NO: 3980604 - RNA, 22 nt, Human herpesvirus 5
ggcucgccgcagaccauccuca

SEQ ID NO: 3980605 - RNA, 19 nt, Human herpesvirus 5
ggcucguguggcagcuggc

SEQ ID NO: 3980606 - RNA, 15 nt, Human herpesvirus 5
ggcucugggaagcug

SEQ ID NO: 3980607 - RNA, 17 nt, Human herpesvirus 5
ggcucuugcgcuucugc

SEQ ID NO: 3980608 - RNA, 23 nt, Human herpesvirus 5
ggcugacgcggacgaggaacagc

SEQ ID NO: 3980609 - RNA, 20 nt, Human herpesvirus 5
ggcugccgccgcuguggcug

SEQ ID NO: 3980610 - RNA, 21 nt, Human herpesvirus 5
ggcugccgccgcuguggcugc

SEQ ID NO: 3980611 - RNA, 18 nt, Human herpesvirus 5
ggcugccuguuccugcug

SEQ ID NO: 3980612 - RNA, 18 nt, Human herpesvirus 5
ggcugucacaucaacucu

SEQ ID NO: 3980613 - RNA, 22 nt, Human herpesvirus 5
ggcuguucacgcggaggacagc

SEQ ID NO: 3980614 - RNA, 12 nt, Human herpesvirus 5
ggcuucccuccu

SEQ ID NO: 3980615 - RNA, 16 nt, Human herpesvirus 5
ggcuugucauggucug

SEQ ID NO: 3980616 - RNA, 17 nt, Human herpesvirus 5
gggaacgccguguggga

SEQ ID NO: 3980617 - RNA, 11 nt, Human herpesvirus 5
gggaagggugu

SEQ ID NO: 3980618 - RNA, 14 nt, Human herpesvirus 5
gggaccgcagcgug

SEQ ID NO: 3980619 - RNA, 19 nt, Human herpesvirus 5
gggcacggaccgcaacgug

SEQ ID NO: 3980620 - RNA, 19 nt, Human herpesvirus 5
gggcacucggcugugccug

SEQ ID NO: 3980621 - RNA, 23 nt, Human herpesvirus 5
gggccucggcgugcucaggccac

SEQ ID NO: 3980622 - RNA, 19 nt, Human herpesvirus 5
gggcgaaaggcaccccgac

SEQ ID NO: 3980623 - RNA, 11 nt, Human herpesvirus 5
gggcggcaggg

SEQ ID NO: 3980624 - RNA, 18 nt, Human herpesvirus 5
gggcucguguggcagcug

SEQ ID NO: 3980625 - RNA, 16 nt, Human herpesvirus 5
gggcugagacaggacg

SEQ ID NO: 3980626 - RNA, 22 nt, Human herpesvirus 5
gggcugcaagguacggacucua

SEQ ID NO: 3980627 - RNA, 13 nt, Human herpesvirus 5
gggcugggugcau

SEQ ID NO: 3980628 - RNA, 14 nt, Human herpesvirus 5
gggcuucccuccug

SEQ ID NO: 3980629 - RNA, 20 nt, Human herpesvirus 5
gggcuuuccuugucacguug

SEQ ID NO: 3980630 - RNA, 15 nt, Human herpesvirus 5
ggggaaaaucacgaa

SEQ ID NO: 3980631 - RNA, 18 nt, Human herpesvirus 5
ggggcccguuuugcauaa

SEQ ID NO: 3980632 - RNA, 14 nt, Human herpesvirus 5
gggguggugcgcga

SEQ ID NO: 3980633 - RNA, 12 nt, Human herpesvirus 5
gggucugugccc

SEQ ID NO: 3980634 - RNA, 12 nt, Human herpesvirus 5
gguaacagccuu

SEQ ID NO: 3980635 - RNA, 19 nt, Human herpesvirus 5
gguaacgcuggcucacgcc

SEQ ID NO: 3980636 - RNA, 13 nt, Human herpesvirus 5
gguaacguggacg

SEQ ID NO: 3980637 - RNA, 13 nt, Human herpesvirus 5
gguaacuggcaga

SEQ ID NO: 3980638 - RNA, 22 nt, Human herpesvirus 5
gguacaugucccgcauauuuug

SEQ ID NO: 3980639 - RNA, 15 nt, Human herpesvirus 5
gguaccuaaagcccc

SEQ ID NO: 3980640 - RNA, 22 nt, Human herpesvirus 5
gguacggacucgaaggcgcccg

SEQ ID NO: 3980641 - RNA, 20 nt, Human herpesvirus 5
gguagcuucucucuggucuu

SEQ ID NO: 3980642 - RNA, 19 nt, Human herpesvirus 5
gguauccacgcucguucaa

SEQ ID NO: 3980643 - RNA, 18 nt, Human herpesvirus 5
ggucauguucucccagga

SEQ ID NO: 3980644 - RNA, 19 nt, Human herpesvirus 5
gguccguuauguccgcucg

SEQ ID NO: 3980645 - RNA, 12 nt, Human herpesvirus 5
ggucggcugccg

SEQ ID NO: 3980646 - RNA, 19 nt, Human herpesvirus 5
ggucguuguccuccucguc

SEQ ID NO: 3980647 - RNA, 16 nt, Human herpesvirus 5
ggucugcgagaggaag

SEQ ID NO: 3980648 - RNA, 18 nt, Human herpesvirus 5
ggucugcuugcuggcuug

SEQ ID NO: 3980649 - RNA, 18 nt, Human herpesvirus 5
ggucugggaugugcagca

SEQ ID NO: 3980650 - RNA, 21 nt, Human herpesvirus 5
ggucuucgacgucgcugccgu

SEQ ID NO: 3980651 - RNA, 14 nt, Human herpesvirus 5
ggugacauccucgc

SEQ ID NO: 3980652 - RNA, 17 nt, Human herpesvirus 5
ggugaugcguguggccg

SEQ ID NO: 3980653 - RNA, 20 nt, Human herpesvirus 5
ggugauucuauuacacucua

SEQ ID NO: 3980654 - RNA, 16 nt, Human herpesvirus 5
ggugccgccgcugccg

SEQ ID NO: 3980655 - RNA, 18 nt, Human herpesvirus 5
ggugcgcugcagccggag

SEQ ID NO: 3980656 - RNA, 20 nt, Human herpesvirus 5
ggugcuucuucuaccuggcu

SEQ ID NO: 3980657 - RNA, 17 nt, Human herpesvirus 5
gguggccgugcugggcu

SEQ ID NO: 3980658 - RNA, 18 nt, Human herpesvirus 5
gguggcgaggugugagga

SEQ ID NO: 3980659 - RNA, 12 nt, Human herpesvirus 5
gguggcggccuu

SEQ ID NO: 3980660 - RNA, 15 nt, Human herpesvirus 5
gguggcggcggugga

SEQ ID NO: 3980661 - RNA, 15 nt, Human herpesvirus 5
gguggcgggcugcgu

SEQ ID NO: 3980662 - RNA, 14 nt, Human herpesvirus 5
gguggcugggcuca

SEQ ID NO: 3980663 - RNA, 18 nt, Human herpesvirus 5
gguguccggacggcgaag

SEQ ID NO: 3980664 - RNA, 21 nt, Human herpesvirus 5
guggugaucgugggccaggac

SEQ ID NO: 3980665 - RNA, 16 nt, Human herpesvirus 5
guggugguggcucacg

SEQ ID NO: 3980666 - RNA, 14 nt, Human herpesvirus 5
guguacagcuaccu

SEQ ID NO: 3980667 - RNA, 19 nt, Human herpesvirus 5
guguacgccaucuucaucu

SEQ ID NO: 3980668 - RNA, 18 nt, Human herpesvirus 5
guguagauuuauggaaaa

SEQ ID NO: 3980669 - RNA, 15 nt, Human herpesvirus 5
gugucagacacagcc

SEQ ID NO: 3980670 - RNA, 13 nt, Human herpesvirus 5
guguccucggugc

SEQ ID NO: 3980671 - RNA, 12 nt, Human herpesvirus 5
gugucgugacgu

SEQ ID NO: 3980672 - RNA, 18 nt, Human herpesvirus 5
gugugaucugggcagcgg

SEQ ID NO: 3980673 - RNA, 13 nt, Human herpesvirus 5
gugugggaccugg

SEQ ID NO: 3980674 - RNA, 14 nt, Human herpesvirus 5
guguuccacuccau

SEQ ID NO: 3980675 - RNA, 16 nt, Human herpesvirus 5
guguucuuacuccguc

SEQ ID NO: 3980676 - RNA, 13 nt, Human herpesvirus 5
guguugacagggc

SEQ ID NO: 3980677 - RNA, 19 nt, Human herpesvirus 5
guguugccgacggcggcgc

SEQ ID NO: 3980678 - RNA, 16 nt, Human herpesvirus 5
guguugcuacagggag

SEQ ID NO: 3980679 - RNA, 16 nt, Human herpesvirus 5
guguuuuuuccuuccu

SEQ ID NO: 3980680 - RNA, 21 nt, Human herpesvirus 5
guuaacgucguuuuggagcug

SEQ ID NO: 3980681 - RNA, 15 nt, Human herpesvirus 5
guuacggcaacagcg

SEQ ID NO: 3980682 - RNA, 20 nt, Human herpesvirus 5
guucaacacuuucucuggau

SEQ ID NO: 3980683 - RNA, 13 nt, Human herpesvirus 5
guucaauaaucuc

SEQ ID NO: 3980684 - RNA, 19 nt, Human herpesvirus 5
guucacgcgcggaacccac

SEQ ID NO: 3980685 - RNA, 21 nt, Human herpesvirus 5
guucaucacguacacguuggg

SEQ ID NO: 3980686 - RNA, 21 nt, Human herpesvirus 5
ucagcuuuuuuuuuuguagua

SEQ ID NO: 3980687 - RNA, 20 nt, Human herpesvirus 5
ucauaaauucugacacggcg

SEQ ID NO: 3980688 - RNA, 13 nt, Human herpesvirus 5
ucaucucagccuc

SEQ ID NO: 3980689 - RNA, 19 nt, Human herpesvirus 5
ucaugaguuggugcagcug

SEQ ID NO: 3980690 - RNA, 13 nt, Human herpesvirus 5
ucaugccgccacc

SEQ ID NO: 3980691 - RNA, 15 nt, Human herpesvirus 5
ucauucguguugaca

SEQ ID NO: 3980692 - RNA, 15 nt, Human herpesvirus 5
uccaaccucgccguc

SEQ ID NO: 3980693 - RNA, 20 nt, Human herpesvirus 5
uccacgggccgcgcuccagg

SEQ ID NO: 3980694 - RNA, 17 nt, Human herpesvirus 5
uccacgucuucaaagua

SEQ ID NO: 3980695 - RNA, 22 nt, Human herpesvirus 5
uccacuuccgugauagccacga

SEQ ID NO: 3980696 - RNA, 20 nt, Human herpesvirus 5
uccagauacgcguuggccag

SEQ ID NO: 3980697 - RNA, 16 nt, Human herpesvirus 5
uccaucgcagccacgc

SEQ ID NO: 3980698 - RNA, 13 nt, Human herpesvirus 5
uccaugugcagcu

SEQ ID NO: 3980699 - RNA, 13 nt, Human herpesvirus 5
ucccaccacgguu

SEQ ID NO: 3980700 - RNA, 15 nt, Human herpesvirus 5
ucccaucucaacguc

SEQ ID NO: 3980701 - RNA, 13 nt, Human herpesvirus 5
uccccgugcccga

SEQ ID NO: 3980702 - RNA, 14 nt, Human herpesvirus 5
uccccugccaccuc

SEQ ID NO: 3980703 - RNA, 18 nt, Human herpesvirus 5
ucccgcuuguuggccacc

SEQ ID NO: 3980704 - RNA, 14 nt, Human herpesvirus 5
ucccuacagcgacu

SEQ ID NO: 3980705 - RNA, 13 nt, Human herpesvirus 5
ucccuccugcagc

SEQ ID NO: 3980706 - RNA, 12 nt, Human herpesvirus 5
ucccucugcugu

SEQ ID NO: 3980707 - RNA, 13 nt, Human herpesvirus 5
ucccugccagucu

SEQ ID NO: 3980708 - RNA, 14 nt, Human herpesvirus 5
uccgagcugcggua

SEQ ID NO: 3980709 - RNA, 16 nt, Human herpesvirus 5
uccgcaagcgccgcca

SEQ ID NO: 3980710 - RNA, 17 nt, Human herpesvirus 5
uccgcggacacccgcgg

SEQ ID NO: 3980711 - RNA, 15 nt, Human herpesvirus 5
uccgcggcccccacg

SEQ ID NO: 3980712 - RNA, 20 nt, Human herpesvirus 5
uccgcgucggucgccgccuc

SEQ ID NO: 3980713 - RNA, 14 nt, Human herpesvirus 5
ccucccuccgcggc

SEQ ID NO: 3980714 - RNA, 21 nt, Human herpesvirus 5
ccuccgcgaacggcgacggca

SEQ ID NO: 3980715 - RNA, 21 nt, Human herpesvirus 5
ccuccucgucgucgccgccgu

SEQ ID NO: 3980716 - RNA, 15 nt, Human herpesvirus 5
ccuccugcagcugca

SEQ ID NO: 3980717 - RNA, 20 nt, Human herpesvirus 5
ccucggguugccuggacgcc

SEQ ID NO: 3980718 - RNA, 21 nt, Human herpesvirus 5
ccucggguugccuggacgccu

SEQ ID NO: 3980719 - RNA, 16 nt, Human herpesvirus 5
ccucgucgccuuccag

SEQ ID NO: 3980720 - RNA, 13 nt, Human herpesvirus 5
ccucgucggaagc

SEQ ID NO: 3980721 - RNA, 17 nt, Human herpesvirus 5
ccucuaccccgccgccg

SEQ ID NO: 3980722 - RNA, 13 nt, Human herpesvirus 5
ccucuacuuggac

SEQ ID NO: 3980723 - RNA, 15 nt, Human herpesvirus 5
ccucuaucugcgcca

SEQ ID NO: 3980724 - RNA, 15 nt, Human herpesvirus 5
ccugagaacaugugg

SEQ ID NO: 3980725 - RNA, 21 nt, Human herpesvirus 5
ccugcacgacaucuuccgcga

SEQ ID NO: 3980726 - RNA, 13 nt, Human herpesvirus 5
ccugcgcagcgcg

SEQ ID NO: 3980727 - RNA, 22 nt, Human herpesvirus 5
ccugcgcgccuaccugacgccg

SEQ ID NO: 3980728 - RNA, 13 nt, Human herpesvirus 5
ccugcugcuacgc

SEQ ID NO: 3980729 - RNA, 19 nt, Human herpesvirus 5
ccuggacacucuggcccug

SEQ ID NO: 3980730 - RNA, 15 nt, Human herpesvirus 5
ccuggacgccugggc

SEQ ID NO: 3980731 - RNA, 19 nt, Human herpesvirus 5
ccuggacggcuacaugugu

SEQ ID NO: 3980732 - RNA, 16 nt, Human herpesvirus 5
ccuggccuucggcacg

SEQ ID NO: 3980733 - RNA, 21 nt, Human herpesvirus 5
ccuggguagcaaguccuccaa

SEQ ID NO: 3980734 - RNA, 23 nt, Human herpesvirus 5
ccugguuaguucgccgucgccgc

SEQ ID NO: 3980735 - RNA, 21 nt, Human herpesvirus 5
ccugucgucgacaugucgcga

SEQ ID NO: 3980736 - RNA, 19 nt, Human herpesvirus 5
ccuguuccugucaaugucc

SEQ ID NO: 3980737 - RNA, 14 nt, Human herpesvirus 5
ccuguugcucuccu

SEQ ID NO: 3980738 - RNA, 16 nt, Human herpesvirus 5
ccuguuggaacccauc

SEQ ID NO: 3980739 - RNA, 17 nt, Human herpesvirus 5
ccuguuggcuuacugcc

SEQ ID NO: 3980740 - RNA, 19 nt, Human herpesvirus 5
ccuguugugguggcuggga

SEQ ID NO: 3980741 - RNA, 23 nt, Human herpesvirus 5
ccuuccccacccaguagacagac

SEQ ID NO: 3980742 - RNA, 18 nt, Human herpesvirus 5
ccuuccgcgugcuccacc

SEQ ID NO: 3980743 - RNA, 17 nt, Human herpesvirus 5
ccuucucccccucaugu

SEQ ID NO: 3980744 - RNA, 20 nt, Human herpesvirus 5
ccuugcugaugugccagccg

SEQ ID NO: 3980745 - RNA, 13 nt, Human herpesvirus 5
ccuuggcgcucug

SEQ ID NO: 3980746 - RNA, 20 nt, Human herpesvirus 5
cgaaagcuucggccggcugc

SEQ ID NO: 3980747 - RNA, 14 nt, Human herpesvirus 5
cgaacgcgacuggc

SEQ ID NO: 3980748 - RNA, 15 nt, Human herpesvirus 5
cgaacgcgacuggcg

SEQ ID NO: 3980749 - RNA, 13 nt, Human herpesvirus 5
cgaacggagcagg

SEQ ID NO: 3980750 - RNA, 14 nt, Human herpesvirus 5
cgaacguccucgga

SEQ ID NO: 3980751 - RNA, 20 nt, Human herpesvirus 5
cgaagacgccgucacgcagg

SEQ ID NO: 3980752 - RNA, 15 nt, Human herpesvirus 5
cgaagcggcuguggc

SEQ ID NO: 3980753 - RNA, 12 nt, Human herpesvirus 5
cgaagugccgcg

SEQ ID NO: 3980754 - RNA, 20 nt, Human herpesvirus 5
cgaaucaccgucggcggggc

SEQ ID NO: 3980755 - RNA, 14 nt, Human herpesvirus 5
cgaauggcuggugu

SEQ ID NO: 3980756 - RNA, 22 nt, Human herpesvirus 5
cgaccacgacacggugcugcug

SEQ ID NO: 3980757 - RNA, 12 nt, Human herpesvirus 5
cgacccaccgcc

SEQ ID NO: 3980758 - RNA, 13 nt, Human herpesvirus 5
cgaccggcggcug

SEQ ID NO: 3980759 - RNA, 16 nt, Human herpesvirus 5
cgaccguuguccccgc

SEQ ID NO: 3980760 - RNA, 19 nt, Human herpesvirus 5
cgaccuugagcgacagcag

SEQ ID NO: 3980761 - RNA, 15 nt, Human herpesvirus 5
cgacgagcaggcucg

SEQ ID NO: 3980762 - RNA, 16 nt, Human herpesvirus 5
cgacgcgcgaccgcga

SEQ ID NO: 3980763 - RNA, 12 nt, Human herpesvirus 5
cgacggacgcga

SEQ ID NO: 3980764 - RNA, 20 nt, Human herpesvirus 5
cgacggcuuuccaagcuguc

SEQ ID NO: 3980765 - RNA, 14 nt, Human herpesvirus 5
cgacgggacggcgg

SEQ ID NO: 3980766 - RNA, 15 nt, Human herpesvirus 5
cgacgggacggcggc

SEQ ID NO: 3980767 - RNA, 19 nt, Human herpesvirus 5
cgacgggacggcggcgcgu

SEQ ID NO: 3980768 - RNA, 22 nt, Human herpesvirus 5
cgacguacgaaaugaccguggc

SEQ ID NO: 3980769 - RNA, 20 nt, Human herpesvirus 5
cgacguagguuaccgcgugc

SEQ ID NO: 3980770 - RNA, 16 nt, Human herpesvirus 5
cgacguggccuccucg

SEQ ID NO: 3980771 - RNA, 13 nt, Human herpesvirus 5
cgacucgcugccg

SEQ ID NO: 3980772 - RNA, 17 nt, Human herpesvirus 5
cgacugcggcgacuggc

SEQ ID NO: 3980773 - RNA, 16 nt, Human herpesvirus 5
cgacuggauccgcuuc

SEQ ID NO: 3980774 - RNA, 22 nt, Human herpesvirus 5
cgacuggggucaaaagccuggg

SEQ ID NO: 3980775 - RNA, 18 nt, Human herpesvirus 5
cgacuuuuuucugugaga

SEQ ID NO: 3980776 - RNA, 16 nt, Human herpesvirus 5
cgagaugguguacccg

SEQ ID NO: 3980777 - RNA, 19 nt, Human herpesvirus 5
cgagcauggaucacgcgcu

SEQ ID NO: 3980778 - RNA, 15 nt, Human herpesvirus 5
cgagcccccgucgcc

SEQ ID NO: 3980779 - RNA, 16 nt, Human herpesvirus 5
cgagcgcgaacgccgc

SEQ ID NO: 3980780 - RNA, 17 nt, Human herpesvirus 5
cgagcgggaggcgguga

SEQ ID NO: 3980781 - RNA, 19 nt, Human herpesvirus 5
cgagcguugcgcucgcgcu

SEQ ID NO: 3980782 - RNA, 14 nt, Human herpesvirus 5
cgagcuggccagca

SEQ ID NO: 3980783 - RNA, 14 nt, Human herpesvirus 5
cgaggaacccgcga

SEQ ID NO: 3980784 - RNA, 17 nt, Human herpesvirus 5
cgaggagccaaacugcg

SEQ ID NO: 3980785 - RNA, 15 nt, Human herpesvirus 5
cgaggaggccgcacu

SEQ ID NO: 3980786 - RNA, 19 nt, Human herpesvirus 5
cgaggcgcuggacgccauc

SEQ ID NO: 3980787 - RNA, 16 nt, Human herpesvirus 5
cgagggcucgugcgug

SEQ ID NO: 3980788 - RNA, 18 nt, Human herpesvirus 5
cgagucaccuagacgcaa

SEQ ID NO: 3980789 - RNA, 15 nt, Human herpesvirus 5
cgagugggccagccc

SEQ ID NO: 3980790 - RNA, 20 nt, Human herpesvirus 5
cgaguggggcaacugcugcc

SEQ ID NO: 3980791 - RNA, 18 nt, Human herpesvirus 5
cgaguuguagucgcggug

SEQ ID NO: 3980792 - RNA, 23 nt, Human herpesvirus 5
cgaguuguagucgcgguggcggc

SEQ ID NO: 3980793 - RNA, 11 nt, Human herpesvirus 5
cgauccuugga

SEQ ID NO: 3980794 - RNA, 18 nt, Human herpesvirus 5
cgaucguaacccaggcgc

SEQ ID NO: 3980795 - RNA, 14 nt, Human herpesvirus 5
cgaucuccucccgg

SEQ ID NO: 3980796 - RNA, 14 nt, Human herpesvirus 5
cgaucuggaaggcg

SEQ ID NO: 3980797 - RNA, 21 nt, Human herpesvirus 5
cgaucugugauccgugcgcuc

SEQ ID NO: 3980798 - RNA, 18 nt, Human herpesvirus 5
cgaucuugacgcugcugg

SEQ ID NO: 3980799 - RNA, 21 nt, Human herpesvirus 5
cgauggcaaggugcugcaccu

SEQ ID NO: 3980800 - RNA, 22 nt, Human herpesvirus 5
cgaugguauuacgcccgacgug

SEQ ID NO: 3980801 - RNA, 22 nt, Human herpesvirus 5
cgaugugugggaccuggucaag

SEQ ID NO: 3980802 - RNA, 15 nt, Human herpesvirus 5
cgcaaaggccacgug

SEQ ID NO: 3980803 - RNA, 14 nt, Human herpesvirus 5
cgcaagggcugcuc

SEQ ID NO: 3980804 - RNA, 15 nt, Human herpesvirus 5
cgcaagggcugcucg

SEQ ID NO: 3980805 - RNA, 15 nt, Human herpesvirus 5
cgcacauauguagca

SEQ ID NO: 3980806 - RNA, 14 nt, Human herpesvirus 5
cgcacccgacggcg

SEQ ID NO: 3980807 - RNA, 12 nt, Human herpesvirus 5
cgcacgacuggc

SEQ ID NO: 3980808 - RNA, 20 nt, Human herpesvirus 5
cgcacgacuggccagagguc

SEQ ID NO: 3980809 - RNA, 20 nt, Human herpesvirus 5
cgcacuuuuuuuacuaguau

SEQ ID NO: 3980810 - RNA, 18 nt, Human herpesvirus 5
cgcagcagagccaccagg

SEQ ID NO: 3980811 - RNA, 15 nt, Human herpesvirus 5
cgcaggagcugcugc

SEQ ID NO: 3980812 - RNA, 14 nt, Human herpesvirus 5
cgcaggccgccgcc

SEQ ID NO: 3980813 - RNA, 15 nt, Human herpesvirus 5
cgcaggccgccgccg

SEQ ID NO: 3980814 - RNA, 18 nt, Human herpesvirus 5
cgcaucgccugcaccucg

SEQ ID NO: 3980815 - RNA, 16 nt, Human herpesvirus 5
cgcaucuugccggugc

SEQ ID NO: 3980816 - RNA, 16 nt, Human herpesvirus 5
cgcaugucgucucauc

SEQ ID NO: 3980817 - RNA, 16 nt, Human herpesvirus 5
cgccaacgccgagcuc

SEQ ID NO: 3980818 - RNA, 13 nt, Human herpesvirus 5
cgccaccgucgcc

SEQ ID NO: 3980819 - RNA, 21 nt, Human herpesvirus 5
cgccacgcucgcucugacgcc

SEQ ID NO: 3980820 - RNA, 15 nt, Human herpesvirus 5
cgcccgacugcggac

SEQ ID NO: 3980821 - RNA, 14 nt, Human herpesvirus 5
cgcccgggccgccu

SEQ ID NO: 3980822 - RNA, 16 nt, Human herpesvirus 5
cgcccucgacggcggu

SEQ ID NO: 3980823 - RNA, 15 nt, Human herpesvirus 5
cgccgaacagacuug

SEQ ID NO: 3980824 - RNA, 21 nt, Human herpesvirus 5
cgccgaacagacuugguacgc

SEQ ID NO: 3980825 - RNA, 17 nt, Human herpesvirus 5
cgccgacgaagaagaac

SEQ ID NO: 3980826 - RNA, 18 nt, Human herpesvirus 5
cgccgcaacagcggcgac

SEQ ID NO: 3980827 - RNA, 16 nt, Human herpesvirus 5
cgccgcccgacgccga

SEQ ID NO: 3980828 - RNA, 15 nt, Human herpesvirus 5
cgccgccgacucgcu

SEQ ID NO: 3980829 - RNA, 21 nt, Human herpesvirus 5
cgccgcgacaacggccgccgc

SEQ ID NO: 3980830 - RNA, 17 nt, Human herpesvirus 5
cgccgcgaucgaggcgg

SEQ ID NO: 3980831 - RNA, 13 nt, Human herpesvirus 5
ccgaagaccucac

SEQ ID NO: 3980832 - RNA, 13 nt, Human herpesvirus 5
ccgacacagcagc

SEQ ID NO: 3980833 - RNA, 21 nt, Human herpesvirus 5
ccgacccugcguccccgcacg

SEQ ID NO: 3980834 - RNA, 19 nt, Human herpesvirus 5
ccgaccgggaaaccacgcc

SEQ ID NO: 3980835 - RNA, 18 nt, Human herpesvirus 5
ccgacgccggguuggcac

SEQ ID NO: 3980836 - RNA, 16 nt, Human herpesvirus 5
ccgacgcggcagcggc

SEQ ID NO: 3980837 - RNA, 16 nt, Human herpesvirus 5
ccgacgucgcgucggc

SEQ ID NO: 3980838 - RNA, 12 nt, Human herpesvirus 5
ccgagaaaggga

SEQ ID NO: 3980839 - RNA, 20 nt, Human herpesvirus 5
ccgagacgugcgaccuggac

SEQ ID NO: 3980840 - RNA, 20 nt, Human herpesvirus 5
ccgaggagauccaguuacac

SEQ ID NO: 3980841 - RNA, 14 nt, Human herpesvirus 5
ccgaggcggaggag

SEQ ID NO: 3980842 - RNA, 16 nt, Human herpesvirus 5
ccgagucggacgacga

SEQ ID NO: 3980843 - RNA, 16 nt, Human herpesvirus 5
ccgaugcuccgcgacc

SEQ ID NO: 3980844 - RNA, 20 nt, Human herpesvirus 5
ccgcaccagacuuggagaca

SEQ ID NO: 3980845 - RNA, 21 nt, Human herpesvirus 5
ccgcagcgaguugcugugcac

SEQ ID NO: 3980846 - RNA, 13 nt, Human herpesvirus 5
ccgcagcgguggc

SEQ ID NO: 3980847 - RNA, 18 nt, Human herpesvirus 5
ccgcagcguggccggcgu

SEQ ID NO: 3980848 - RNA, 15 nt, Human herpesvirus 5
ccgcagucuggcuug

SEQ ID NO: 3980849 - RNA, 21 nt, Human herpesvirus 5
ccgccacgacaaacacuaccg

SEQ ID NO: 3980850 - RNA, 14 nt, Human herpesvirus 5
ccgcccaaacaucu

SEQ ID NO: 3980851 - RNA, 17 nt, Human herpesvirus 5
ccgcccuugguggagac

SEQ ID NO: 3980852 - RNA, 16 nt, Human herpesvirus 5
ccgccgccgcgcuggc

SEQ ID NO: 3980853 - RNA, 22 nt, Human herpesvirus 5
ccgccguugcggccgccgcuca

SEQ ID NO: 3980854 - RNA, 13 nt, Human herpesvirus 5
ccgccuccacugc

SEQ ID NO: 3980855 - RNA, 14 nt, Human herpesvirus 5
ccgccuccacuucc

SEQ ID NO: 3980856 - RNA, 20 nt, Human herpesvirus 5
ccgcgacaacggccgccgca

SEQ ID NO: 3980857 - RNA, 15 nt, Human herpesvirus 5
ccgcgcacgacuggc

SEQ ID NO: 3980858 - RNA, 18 nt, Human herpesvirus 5
ccgcgcccgucgcgcacg

SEQ ID NO: 3980859 - RNA, 19 nt, Human herpesvirus 5
ccgcgccucacgcugcacg

SEQ ID NO: 3980860 - RNA, 13 nt, Human herpesvirus 5
ccgcgcuccaggc

SEQ ID NO: 3980861 - RNA, 18 nt, Human herpesvirus 5
ccgcggccgcugccgccg

SEQ ID NO: 3980862 - RNA, 15 nt, Human herpesvirus 5
ccgcgucagcggccg

SEQ ID NO: 3980863 - RNA, 19 nt, Human herpesvirus 5
ccgcgucgcuucgccgcca

SEQ ID NO: 3980864 - RNA, 20 nt, Human herpesvirus 5
ccgcuauugcuuagcugcac

SEQ ID NO: 3980865 - RNA, 16 nt, Human herpesvirus 5
ccgcucuucuggggcg

SEQ ID NO: 3980866 - RNA, 23 nt, Human herpesvirus 5
ccgcugauacuaucgggggagau

SEQ ID NO: 3980867 - RNA, 21 nt, Human herpesvirus 5
ccgcugccgcucagcgagcuc

SEQ ID NO: 3980868 - RNA, 18 nt, Human herpesvirus 5
ccgcuuaacaacgugucc

SEQ ID NO: 3980869 - RNA, 14 nt, Human herpesvirus 5
ccgcuuccucagcu

SEQ ID NO: 3980870 - RNA, 18 nt, Human herpesvirus 5
ccggccguuacgccgacg

SEQ ID NO: 3980871 - RNA, 15 nt, Human herpesvirus 5
ccggccuugcugugu

SEQ ID NO: 3980872 - RNA, 16 nt, Human herpesvirus 5
ccggcgggcggcugcc

SEQ ID NO: 3980873 - RNA, 14 nt, Human herpesvirus 5
ccggcgucgcuggc

SEQ ID NO: 3980874 - RNA, 15 nt, Human herpesvirus 5
ccggcguucagucgc

SEQ ID NO: 3980875 - RNA, 18 nt, Human herpesvirus 5
ccggcguuggggaucuac

SEQ ID NO: 3980876 - RNA, 16 nt, Human herpesvirus 5
ccgggacggccugggc

SEQ ID NO: 3980877 - RNA, 16 nt, Human herpesvirus 5
ccgggccgccgccagc

SEQ ID NO: 3980878 - RNA, 20 nt, Human herpesvirus 5
ccggggagacaaggugguga

SEQ ID NO: 3980879 - RNA, 22 nt, Human herpesvirus 5
ccggggugguggugcugcugcu

SEQ ID NO: 3980880 - RNA, 19 nt, Human herpesvirus 5
ccgguaacguggacgacgc

SEQ ID NO: 3980881 - RNA, 21 nt, Human herpesvirus 5
ccggucgucugcgacuccugg

SEQ ID NO: 3980882 - RNA, 14 nt, Human herpesvirus 5
ccggugcugccgca

SEQ ID NO: 3980883 - RNA, 20 nt, Human herpesvirus 5
ccggugguacugcuguggug

SEQ ID NO: 3980884 - RNA, 22 nt, Human herpesvirus 5
ccggugucuggcuuuaccgccg

SEQ ID NO: 3980885 - RNA, 18 nt, Human herpesvirus 5
ccgguguuggccaccaug

SEQ ID NO: 3980886 - RNA, 19 nt, Human herpesvirus 5
ccguaaccacgucgaccag

SEQ ID NO: 3980887 - RNA, 20 nt, Human herpesvirus 5
ccgucaaggccgccucuucu

SEQ ID NO: 3980888 - RNA, 22 nt, Human herpesvirus 5
ccgucggaaacccgacgagaca

SEQ ID NO: 3980889 - RNA, 22 nt, Human herpesvirus 5
ccgucggcgucgcgucgcaggc

SEQ ID NO: 3980890 - RNA, 21 nt, Human herpesvirus 5
ccgugacgucgcggcaccagg

SEQ ID NO: 3980891 - RNA, 13 nt, Human herpesvirus 5
ccgugcugggcug

SEQ ID NO: 3980892 - RNA, 19 nt, Human herpesvirus 5
ccguuaccaguaccaccgc

SEQ ID NO: 3980893 - RNA, 15 nt, Human herpesvirus 5
ccguuagccugguca

SEQ ID NO: 3980894 - RNA, 19 nt, Human herpesvirus 5
ccguuugcgccagugggug

SEQ ID NO: 3980895 - RNA, 15 nt, Human herpesvirus 5
ccguuuucacagcag

SEQ ID NO: 3980896 - RNA, 15 nt, Human herpesvirus 5
ccuagcacgucagug

SEQ ID NO: 3980897 - RNA, 15 nt, Human herpesvirus 5
ccuaguaaugcauua

SEQ ID NO: 3980898 - RNA, 14 nt, Human herpesvirus 5
ccuaugcgccguag

SEQ ID NO: 3980899 - RNA, 17 nt, Human herpesvirus 5
ccucaccgaccagcacu

SEQ ID NO: 3980900 - RNA, 19 nt, Human herpesvirus 5
ccucauguguauggcccug

SEQ ID NO: 3980901 - RNA, 19 nt, Human herpesvirus 5
ccucccgguauucggaaac

SEQ ID NO: 3980902 - RNA, 15 nt, Human herpesvirus 5
aggcaggcgaugcgc

SEQ ID NO: 3980903 - RNA, 20 nt, Human herpesvirus 5
aggccaacaucuucugcacu

SEQ ID NO: 3980904 - RNA, 12 nt, Human herpesvirus 5
aggccggcggcg

SEQ ID NO: 3980905 - RNA, 13 nt, Human herpesvirus 5
aggccuccucucc

SEQ ID NO: 3980906 - RNA, 14 nt, Human herpesvirus 5
aggccuccucuccg

SEQ ID NO: 3980907 - RNA, 15 nt, Human herpesvirus 5
aggcgccgcaaacau

SEQ ID NO: 3980908 - RNA, 18 nt, Human herpesvirus 5
aggcggaggagccggcgg

SEQ ID NO: 3980909 - RNA, 23 nt, Human herpesvirus 5
aggcggcgaggcgaaacuggugc

SEQ ID NO: 3980910 - RNA, 20 nt, Human herpesvirus 5
aggcucucggaucugcggcu

SEQ ID NO: 3980911 - RNA, 15 nt, Human herpesvirus 5
agggaagccgcgucc

SEQ ID NO: 3980912 - RNA, 16 nt, Human herpesvirus 5
agggcgcgccggcgcc

SEQ ID NO: 3980913 - RNA, 15 nt, Human herpesvirus 5
agggcgcgggcggcc

SEQ ID NO: 3980914 - RNA, 21 nt, Human herpesvirus 5
aggguucguacgcuucggcac

SEQ ID NO: 3980915 - RNA, 22 nt, Human herpesvirus 5
aggguuucaaguacccaccgau

SEQ ID NO: 3980916 - RNA, 15 nt, Human herpesvirus 5
agguaugccgcgucu

SEQ ID NO: 3980917 - RNA, 20 nt, Human herpesvirus 5
aggucgucuuggaagccgau

SEQ ID NO: 3980918 - RNA, 13 nt, Human herpesvirus 5
agguguggcggca

SEQ ID NO: 3980919 - RNA, 15 nt, Human herpesvirus 5
agguugcgccgcaag

SEQ ID NO: 3980920 - RNA, 19 nt, Human herpesvirus 5
agguugggagaugcggggu

SEQ ID NO: 3980921 - RNA, 14 nt, Human herpesvirus 5
aguacuuucacaac

SEQ ID NO: 3980922 - RNA, 15 nt, Human herpesvirus 5
aguaggcgcgcaccc

SEQ ID NO: 3980923 - RNA, 16 nt, Human herpesvirus 5
aguagugguggggcug

SEQ ID NO: 3980924 - RNA, 16 nt, Human herpesvirus 5
agucaacacuaccaag

SEQ ID NO: 3980925 - RNA, 13 nt, Human herpesvirus 5
aguccauacagca

SEQ ID NO: 3980926 - RNA, 13 nt, Human herpesvirus 5
agucgaucuggaa

SEQ ID NO: 3980927 - RNA, 19 nt, Human herpesvirus 5
agucuccgcaguuacacca

SEQ ID NO: 3980928 - RNA, 18 nt, Human herpesvirus 5
agugccgcgccgccugga

SEQ ID NO: 3980929 - RNA, 20 nt, Human herpesvirus 5
agugccgcgccgccuggagu

SEQ ID NO: 3980930 - RNA, 13 nt, Human herpesvirus 5
agugcgcgccgcc

SEQ ID NO: 3980931 - RNA, 13 nt, Human herpesvirus 5
agugcgcgcggcg

SEQ ID NO: 3980932 - RNA, 19 nt, Human herpesvirus 5
agugcgucuacgaccaaag

SEQ ID NO: 3980933 - RNA, 13 nt, Human herpesvirus 5
aguggaagggugc

SEQ ID NO: 3980934 - RNA, 20 nt, Human herpesvirus 5
aguggggcaacugcugccuc

SEQ ID NO: 3980935 - RNA, 20 nt, Human herpesvirus 5
aguucaccguauggcugcgc

SEQ ID NO: 3980936 - RNA, 13 nt, Human herpesvirus 5
aguugagcggggu

SEQ ID NO: 3980937 - RNA, 16 nt, Human herpesvirus 5
aguuggccaccaagaa

SEQ ID NO: 3980938 - RNA, 15 nt, Human herpesvirus 5
aguuggugcagcugc

SEQ ID NO: 3980939 - RNA, 21 nt, Human herpesvirus 5
aguuguggcaaagagccaugu

SEQ ID NO: 3980940 - RNA, 17 nt, Human herpesvirus 5
auaaaaaaagacacuca

SEQ ID NO: 3980941 - RNA, 14 nt, Human herpesvirus 5
auaaaaacacagag

SEQ ID NO: 3980942 - RNA, 21 nt, Human herpesvirus 5
auaaaaaccauugagaaagcu

SEQ ID NO: 3980943 - RNA, 17 nt, Human herpesvirus 5
auaaacgucacggaagu

SEQ ID NO: 3980944 - RNA, 21 nt, Human herpesvirus 5
auaaaggguggcgagguguga

SEQ ID NO: 3980945 - RNA, 13 nt, Human herpesvirus 5
auaaccuaccugg

SEQ ID NO: 3980946 - RNA, 10 nt, Human herpesvirus 5
auaacgugac

SEQ ID NO: 3980947 - RNA, 22 nt, Human herpesvirus 5
auacaucuccgucucuggucuc

SEQ ID NO: 3980948 - RNA, 19 nt, Human herpesvirus 5
auacccagcuggggaagua

SEQ ID NO: 3980949 - RNA, 20 nt, Human herpesvirus 5
auagauuagcagaaggaaua

SEQ ID NO: 3980950 - RNA, 19 nt, Human herpesvirus 5
auagcaugcauaagaagcc

SEQ ID NO: 3980951 - RNA, 20 nt, Human herpesvirus 5
auagguguggcgaaagccuc

SEQ ID NO: 3980952 - RNA, 16 nt, Human herpesvirus 5
auauaaauugggaaag

SEQ ID NO: 3980953 - RNA, 19 nt, Human herpesvirus 5
auauauggaguuuguguaa

SEQ ID NO: 3980954 - RNA, 20 nt, Human herpesvirus 5
auauggaguuuguguaaugc

SEQ ID NO: 3980955 - RNA, 20 nt, Human herpesvirus 5
auauuugaaaauauggcaua

SEQ ID NO: 3980956 - RNA, 13 nt, Human herpesvirus 5
aucacagaacaca

SEQ ID NO: 3980957 - RNA, 15 nt, Human herpesvirus 5
aucaccuggcgacgu

SEQ ID NO: 3980958 - RNA, 16 nt, Human herpesvirus 5
aucaccuggcgacguc

SEQ ID NO: 3980959 - RNA, 16 nt, Human herpesvirus 5
aucacgaaaggcaccg

SEQ ID NO: 3980960 - RNA, 11 nt, Human herpesvirus 5
aucacgugcca

SEQ ID NO: 3980961 - RNA, 21 nt, Human herpesvirus 5
aucagccgugagaacuuugua

SEQ ID NO: 3980962 - RNA, 22 nt, Human herpesvirus 5
aucagcuaccgccgcaacagcg

SEQ ID NO: 3980963 - RNA, 23 nt, Human herpesvirus 5
aucauggaagagggcgcgcgucu

SEQ ID NO: 3980964 - RNA, 16 nt, Human herpesvirus 5
aucauuacuaaacaaa

SEQ ID NO: 3980965 - RNA, 13 nt, Human herpesvirus 5
auccauccugggg

SEQ ID NO: 3980966 - RNA, 13 nt, Human herpesvirus 5
auccgcaccuguc

SEQ ID NO: 3980967 - RNA, 13 nt, Human herpesvirus 5
auccgucagccuc

SEQ ID NO: 3980968 - RNA, 16 nt, Human herpesvirus 5
aucgaggaggccgcac

SEQ ID NO: 3980969 - RNA, 16 nt, Human herpesvirus 5
aucgcgagccccaucg

SEQ ID NO: 3980970 - RNA, 15 nt, Human herpesvirus 5
aucggcguucugcuc

SEQ ID NO: 3980971 - RNA, 18 nt, Human herpesvirus 5
aucgucgcggacugccgg

SEQ ID NO: 3980972 - RNA, 14 nt, Human herpesvirus 5
aucgucggcagagg

SEQ ID NO: 3980973 - RNA, 15 nt, Human herpesvirus 5
aucgucuacgucguu

SEQ ID NO: 3980974 - RNA, 13 nt, Human herpesvirus 5
aucgucucaauaa

SEQ ID NO: 3980975 - RNA, 16 nt, Human herpesvirus 5
aucgugccgcuccauc

SEQ ID NO: 3980976 - RNA, 23 nt, Human herpesvirus 5
aucuauaaauguucucugaaacc

SEQ ID NO: 3980977 - RNA, 11 nt, Human herpesvirus 5
aucucagccuc

SEQ ID NO: 3980978 - RNA, 24 nt, Human herpesvirus 5
aucucgccguacggcaacgagcag

SEQ ID NO: 3980979 - RNA, 15 nt, Human herpesvirus 5
aucugcaagucccug

SEQ ID NO: 3980980 - RNA, 18 nt, Human herpesvirus 5
aucugcucccgcugcugc

SEQ ID NO: 3980981 - RNA, 16 nt, Human herpesvirus 5
aucuggcggccgccgg

SEQ ID NO: 3980982 - RNA, 14 nt, Human herpesvirus 5
aucugggugcaaug

SEQ ID NO: 3980983 - RNA, 14 nt, Human herpesvirus 5
aucugucguacugu

SEQ ID NO: 3980984 - RNA, 16 nt, Human herpesvirus 5
augaaaaacaucuuaa

SEQ ID NO: 3980985 - RNA, 16 nt, Human herpesvirus 5
augaaucuuccccucu

SEQ ID NO: 3980986 - RNA, 16 nt, Human herpesvirus 5
augaauuccucuauug

SEQ ID NO: 3980987 - RNA, 17 nt, Human herpesvirus 5
augagcgugcugcucug

SEQ ID NO: 3980988 - RNA, 18 nt, Human herpesvirus 5
augaggcgguggcugcgc

SEQ ID NO: 3980989 - RNA, 14 nt, Human herpesvirus 5
augauccugugguc

SEQ ID NO: 3980990 - RNA, 23 nt, Human herpesvirus 5
augauccuuguacagauguaaau

SEQ ID NO: 3980991 - RNA, 22 nt, Human herpesvirus 5
augaucuccaucgugugccuag

SEQ ID NO: 3980992 - RNA, 14 nt, Human herpesvirus 5
augaugcaaauaaa

SEQ ID NO: 3980993 - RNA, 12 nt, Human herpesvirus 5
augaugcugcug

SEQ ID NO: 3980994 - RNA, 13 nt, Human herpesvirus 5
augaugcugcuga

SEQ ID NO: 3980995 - RNA, 11 nt, Human herpesvirus 5
augcaggaggu

SEQ ID NO: 3980996 - RNA, 22 nt, Human herpesvirus 5
augcauuaucaucuaaagacua

SEQ ID NO: 3980997 - RNA, 20 nt, Human herpesvirus 5
augccuuccgcgugcuccac

SEQ ID NO: 3980998 - RNA, 10 nt, Human herpesvirus 5
augcgccgcc

SEQ ID NO: 3980999 - RNA, 17 nt, Human herpesvirus 5
augcuucaugucguccc

SEQ ID NO: 3981000 - RNA, 18 nt, Human herpesvirus 5
auggaccgucgaggaggu

SEQ ID NO: 3981001 - RNA, 13 nt, Human herpesvirus 5
auggccaacagcc

SEQ ID NO: 3981002 - RNA, 15 nt, Human herpesvirus 5
auggcuauguacaca

SEQ ID NO: 3981003 - RNA, 23 nt, Human herpesvirus 5
auggcuuggcgcagcgggcuuug

SEQ ID NO: 3981004 - RNA, 20 nt, Human herpesvirus 5
augggcgguggucggcugcc

SEQ ID NO: 3981005 - RNA, 23 nt, Human herpesvirus 5
augggcuucccuccugcagcugc

SEQ ID NO: 3981006 - RNA, 14 nt, Human herpesvirus 5
auggggugugguga

SEQ ID NO: 3981007 - RNA, 13 nt, Human herpesvirus 5
auguaaggcggcg

SEQ ID NO: 3981008 - RNA, 12 nt, Human herpesvirus 5
auguaguugcag

SEQ ID NO: 3981009 - RNA, 19 nt, Human herpesvirus 5
augucgcgacagagaggug

SEQ ID NO: 3981010 - RNA, 17 nt, Human herpesvirus 5
augucuccgaacucaga

SEQ ID NO: 3981011 - RNA, 22 nt, Human herpesvirus 5
augucuuugggcgggcucuggg

SEQ ID NO: 3981012 - RNA, 15 nt, Human herpesvirus 5
augugcucggaccgu

SEQ ID NO: 3981013 - RNA, 18 nt, Human herpesvirus 5
auguggcuccgccggcac

SEQ ID NO: 3981014 - RNA, 11 nt, Human herpesvirus 5
auguggucgcg

SEQ ID NO: 3981015 - RNA, 15 nt, Human herpesvirus 5
auguugacuaccuug

SEQ ID NO: 3981016 - RNA, 14 nt, Human herpesvirus 5
auuaaaaaaaaaac

SEQ ID NO: 3981017 - RNA, 18 nt, Human herpesvirus 5
auuaaaaagcuguaaggu

SEQ ID NO: 3981018 - RNA, 15 nt, Human herpesvirus 5
auuaugcaggagacg

SEQ ID NO: 3981019 - RNA, 17 nt, Human herpesvirus 5
auuauucuuggaugcua

SEQ ID NO: 3981020 - RNA, 21 nt, Human herpesvirus 5
acggccguuaucaaggccacu

SEQ ID NO: 3981021 - RNA, 13 nt, Human herpesvirus 5
acggcgaaccgcc

SEQ ID NO: 3981022 - RNA, 14 nt, Human herpesvirus 5
acggcgaccgucug

SEQ ID NO: 3981023 - RNA, 18 nt, Human herpesvirus 5
acggcggcgcguugccac

SEQ ID NO: 3981024 - RNA, 18 nt, Human herpesvirus 5
acggcgucuuccuccucg

SEQ ID NO: 3981025 - RNA, 14 nt, Human herpesvirus 5
acgggccgcgcucc

SEQ ID NO: 3981026 - RNA, 17 nt, Human herpesvirus 5
acgggguuaaacuggau

SEQ ID NO: 3981027 - RNA, 22 nt, Human herpesvirus 5
acgggucucuuugacacgagcg

SEQ ID NO: 3981028 - RNA, 13 nt, Human herpesvirus 5
acggugacgagcg

SEQ ID NO: 3981029 - RNA, 13 nt, Human herpesvirus 5
acggugcgcggcg

SEQ ID NO: 3981030 - RNA, 12 nt, Human herpesvirus 5
acgguggugugc

SEQ ID NO: 3981031 - RNA, 20 nt, Human herpesvirus 5
acggugucgccaccguugac

SEQ ID NO: 3981032 - RNA, 18 nt, Human herpesvirus 5
acguacgacugcgcggcc

SEQ ID NO: 3981033 - RNA, 22 nt, Human herpesvirus 5
acguacuguuuaaccacguugc

SEQ ID NO: 3981034 - RNA, 13 nt, Human herpesvirus 5
acguaggccuccu

SEQ ID NO: 3981035 - RNA, 14 nt, Human herpesvirus 5
acgucaaccacccg

SEQ ID NO: 3981036 - RNA, 13 nt, Human herpesvirus 5
acgucaacgguuu

SEQ ID NO: 3981037 - RNA, 19 nt, Human herpesvirus 5
acgucauucguguugacag

SEQ ID NO: 3981038 - RNA, 12 nt, Human herpesvirus 5
acguccccccgc

SEQ ID NO: 3981039 - RNA, 22 nt, Human herpesvirus 5
acgucgcagccaccggcgcagu

SEQ ID NO: 3981040 - RNA, 16 nt, Human herpesvirus 5
acgucguugaagacac

SEQ ID NO: 3981041 - RNA, 17 nt, Human herpesvirus 5
acgucguuuuggagcug

SEQ ID NO: 3981042 - RNA, 15 nt, Human herpesvirus 5
acgugauccaggagg

SEQ ID NO: 3981043 - RNA, 17 nt, Human herpesvirus 5
acgugauuuacgagguc

SEQ ID NO: 3981044 - RNA, 20 nt, Human herpesvirus 5
acgugcgauuuggaccugga

SEQ ID NO: 3981045 - RNA, 18 nt, Human herpesvirus 5
acgugcgguaacuggcag

SEQ ID NO: 3981046 - RNA, 20 nt, Human herpesvirus 5
acgugcuuggacugguacau

SEQ ID NO: 3981047 - RNA, 18 nt, Human herpesvirus 5
acguggacguuacacggg

SEQ ID NO: 3981048 - RNA, 12 nt, Human herpesvirus 5
acguguggcggg

SEQ ID NO: 3981049 - RNA, 21 nt, Human herpesvirus 5
acguguuucaaacagcacauu

SEQ ID NO: 3981050 - RNA, 14 nt, Human herpesvirus 5
acguugaugcggcg

SEQ ID NO: 3981051 - RNA, 19 nt, Human herpesvirus 5
acguuggcucucgcagccc

SEQ ID NO: 3981052 - RNA, 15 nt, Human herpesvirus 5
acguugggaagacgg

SEQ ID NO: 3981053 - RNA, 16 nt, Human herpesvirus 5
acuacaacagcggguc

SEQ ID NO: 3981054 - RNA, 13 nt, Human herpesvirus 5
acuacgaagauau

SEQ ID NO: 3981055 - RNA, 21 nt, Human herpesvirus 5
acuacgacgggacggcggcgc

SEQ ID NO: 3981056 - RNA, 23 nt, Human herpesvirus 5
acuacucuguguugcuacaggga

SEQ ID NO: 3981057 - RNA, 17 nt, Human herpesvirus 5
acuauuguauacucuau

SEQ ID NO: 3981058 - RNA, 18 nt, Human herpesvirus 5
acucacaauggaagccau

SEQ ID NO: 3981059 - RNA, 16 nt, Human herpesvirus 5
acuccgucuccagaca

SEQ ID NO: 3981060 - RNA, 15 nt, Human herpesvirus 5
acuccgugcuguugg

SEQ ID NO: 3981061 - RNA, 23 nt, Human herpesvirus 5
acuccuguuggcuuacugccugc

SEQ ID NO: 3981062 - RNA, 20 nt, Human herpesvirus 5
acucgcugccgcagcugcug

SEQ ID NO: 3981063 - RNA, 22 nt, Human herpesvirus 5
acucguugggauugacgcgguu

SEQ ID NO: 3981064 - RNA, 14 nt, Human herpesvirus 5
acucuggcccugcu

SEQ ID NO: 3981065 - RNA, 18 nt, Human herpesvirus 5
acugcguggggugcugga

SEQ ID NO: 3981066 - RNA, 15 nt, Human herpesvirus 5
acuggaagcugcugg

SEQ ID NO: 3981067 - RNA, 14 nt, Human herpesvirus 5
acugggacgaggag

SEQ ID NO: 3981068 - RNA, 22 nt, Human herpesvirus 5
acuggggucaaaagccugggua

SEQ ID NO: 3981069 - RNA, 16 nt, Human herpesvirus 5
acuggugcuggcggcg

SEQ ID NO: 3981070 - RNA, 14 nt, Human herpesvirus 5
acuucaaccacgag

SEQ ID NO: 3981071 - RNA, 18 nt, Human herpesvirus 5
acuucagaaucuauaaau

SEQ ID NO: 3981072 - RNA, 22 nt, Human herpesvirus 5
acuuuccucgccaccacuacca

SEQ ID NO: 3981073 - RNA, 12 nt, Human herpesvirus 5
acuuugcugcua

SEQ ID NO: 3981074 - RNA, 18 nt, Human herpesvirus 5
acuuuuacaugaacaaaa

SEQ ID NO: 3981075 - RNA, 17 nt, Human herpesvirus 5
agaaaccgcauguguug

SEQ ID NO: 3981076 - RNA, 18 nt, Human herpesvirus 5
agaaacgucgcagccacc

SEQ ID NO: 3981077 - RNA, 20 nt, Human herpesvirus 5
agaaugcaacgcuuucagga

SEQ ID NO: 3981078 - RNA, 12 nt, Human herpesvirus 5
agaauguugcga

SEQ ID NO: 3981079 - RNA, 19 nt, Human herpesvirus 5
agacacgcgcuucuggucg

SEQ ID NO: 3981080 - RNA, 16 nt, Human herpesvirus 5
agacagccuuacagcu

SEQ ID NO: 3981081 - RNA, 18 nt, Human herpesvirus 5
agacauggcgacuuuccg

SEQ ID NO: 3981082 - RNA, 16 nt, Human herpesvirus 5
agacccacuaccugga

SEQ ID NO: 3981083 - RNA, 22 nt, Human herpesvirus 5
agaccgaugugugggaccuggu

SEQ ID NO: 3981084 - RNA, 17 nt, Human herpesvirus 5
agacgaugaaccuuccc

SEQ ID NO: 3981085 - RNA, 21 nt, Human herpesvirus 5
agacgaugauaccgaaggcga

SEQ ID NO: 3981086 - RNA, 16 nt, Human herpesvirus 5
agacgugcgaccugga

SEQ ID NO: 3981087 - RNA, 15 nt, Human herpesvirus 5
agagaaagagcagcg

SEQ ID NO: 3981088 - RNA, 16 nt, Human herpesvirus 5
agagggugaaggcaaa

SEQ ID NO: 3981089 - RNA, 15 nt, Human herpesvirus 5
agauuagcagaagga

SEQ ID NO: 3981090 - RNA, 13 nt, Human herpesvirus 5
agcacaccugccu

SEQ ID NO: 3981091 - RNA, 16 nt, Human herpesvirus 5
agcacguacaccgcug

SEQ ID NO: 3981092 - RNA, 21 nt, Human herpesvirus 5
agcagaaggaauaauccgugc

SEQ ID NO: 3981093 - RNA, 18 nt, Human herpesvirus 5
agcagaggguuggcuggu

SEQ ID NO: 3981094 - RNA, 15 nt, Human herpesvirus 5
agcagccgacacagc

SEQ ID NO: 3981095 - RNA, 12 nt, Human herpesvirus 5
agcagcucuuuu

SEQ ID NO: 3981096 - RNA, 14 nt, Human herpesvirus 5
agcaugaacugcca

SEQ ID NO: 3981097 - RNA, 15 nt, Human herpesvirus 5
agcaugaacugccac

SEQ ID NO: 3981098 - RNA, 21 nt, Human herpesvirus 5
agcauguuuuaggaaugacac

SEQ ID NO: 3981099 - RNA, 16 nt, Human herpesvirus 5
agccaccgacacagca

SEQ ID NO: 3981100 - RNA, 22 nt, Human herpesvirus 5
agccaggugaccagcaguauga

SEQ ID NO: 3981101 - RNA, 13 nt, Human herpesvirus 5
agccaucacagcg

SEQ ID NO: 3981102 - RNA, 18 nt, Human herpesvirus 5
agccgccgacgcuggcgc

SEQ ID NO: 3981103 - RNA, 14 nt, Human herpesvirus 5
agccgccgccucca

SEQ ID NO: 3981104 - RNA, 21 nt, Human herpesvirus 5
agccgcggccgcugccgccgc

SEQ ID NO: 3981105 - RNA, 20 nt, Human herpesvirus 5
agccgugucgcgcacccggc

SEQ ID NO: 3981106 - RNA, 21 nt, Human herpesvirus 5
agccguguuuagucgcggcga

SEQ ID NO: 3981107 - RNA, 23 nt, Human herpesvirus 5
agccucgggugcaccgcggcacc

SEQ ID NO: 3981108 - RNA, 11 nt, Human herpesvirus 5
agcgacggcgg

SEQ ID NO: 3981109 - RNA, 16 nt, Human herpesvirus 5
agcgacguaccagcug

SEQ ID NO: 3981110 - RNA, 19 nt, Human herpesvirus 5
agcgcccgaagccgcgcga

SEQ ID NO: 3981111 - RNA, 12 nt, Human herpesvirus 5
agcgccgcggca

SEQ ID NO: 3981112 - RNA, 14 nt, Human herpesvirus 5
agcgccguccugca

SEQ ID NO: 3981113 - RNA, 21 nt, Human herpesvirus 5
agcgcguuuguugcgcggcga

SEQ ID NO: 3981114 - RNA, 12 nt, Human herpesvirus 5
agcggugcugau

SEQ ID NO: 3981115 - RNA, 16 nt, Human herpesvirus 5
agcguauccuggucaa

SEQ ID NO: 3981116 - RNA, 23 nt, Human herpesvirus 5
agcgugacuuugagcggcucgcc

SEQ ID NO: 3981117 - RNA, 16 nt, Human herpesvirus 5
agcgugcaccugcugc

SEQ ID NO: 3981118 - RNA, 19 nt, Human herpesvirus 5
agcgugcuaccagcugcag

SEQ ID NO: 3981119 - RNA, 17 nt, Human herpesvirus 5
agcuacgcgaccagcug

SEQ ID NO: 3981120 - RNA, 22 nt, Human herpesvirus 5
agcuacuuuggaaucacgcaga

SEQ ID NO: 3981121 - RNA, 14 nt, Human herpesvirus 5
agcucuacgagcug

SEQ ID NO: 3981122 - RNA, 15 nt, Human herpesvirus 5
agcucugaaacacag

SEQ ID NO: 3981123 - RNA, 18 nt, Human herpesvirus 5
agcugcacucacgcggcc

SEQ ID NO: 3981124 - RNA, 16 nt, Human herpesvirus 5
agcugcgcaggccgcc

SEQ ID NO: 3981125 - RNA, 13 nt, Human herpesvirus 5
agcugcuggagcg

SEQ ID NO: 3981126 - RNA, 12 nt, Human herpesvirus 5
agcuucggccgg

SEQ ID NO: 3981127 - RNA, 14 nt, Human herpesvirus 5
agcuucucucuggu

SEQ ID NO: 3981128 - RNA, 15 nt, Human herpesvirus 5
aggaacaaaauaaua

SEQ ID NO: 3981129 - RNA, 14 nt, Human herpesvirus 5
aggaagcggcggua

SEQ ID NO: 3981130 - RNA, 18 nt, Human herpesvirus 5
aggacagcaaggccgccg

SEQ ID NO: 3981131 - RNA, 19 nt, Human herpesvirus 5
aggaccauuuccaugugca

SEQ ID NO: 3981132 - RNA, 13 nt, Human herpesvirus 5
aggacgaggcagg

SEQ ID NO: 3981133 - RNA, 13 nt, Human herpesvirus 5
aggacgaguggcu

SEQ ID NO: 3981134 - RNA, 17 nt, Human herpesvirus 5
aggagccaaacugcgag

SEQ ID NO: 3981135 - RNA, 16 nt, Human herpesvirus 5
aggagcugcugcucgg

SEQ ID NO: 3981136 - RNA, 17 nt, Human herpesvirus 5
aggauccaaggccucca

SEQ ID NO: 3981137 - RNA, 11 nt, Human herpesvirus 5
aggcacacggu

SEQ ID NO: 3981138 - RNA, 15 nt, Human herpesvirus 5
auucagaaccaugua

SEQ ID NO: 3981139 - RNA, 22 nt, Human herpesvirus 5
auucaucgugcaguaccucaac

SEQ ID NO: 3981140 - RNA, 19 nt, Human herpesvirus 5
auuccaguagcaccggccc

SEQ ID NO: 3981141 - RNA, 17 nt, Human herpesvirus 5
auugcccuucuggagca

SEQ ID NO: 3981142 - RNA, 15 nt, Human herpesvirus 5
auuggcaggaaagac

SEQ ID NO: 3981143 - RNA, 17 nt, Human herpesvirus 5
auuggugaaggccgugg

SEQ ID NO: 3981144 - RNA, 15 nt, Human herpesvirus 5
auuguguguacgaca

SEQ ID NO: 3981145 - RNA, 19 nt, Human herpesvirus 5
auuguuuuuauuacccgcu

SEQ ID NO: 3981146 - RNA, 23 nt, Human herpesvirus 5
auuuacuacuucgauucucuaua

SEQ ID NO: 3981147 - RNA, 13 nt, Human herpesvirus 5
auuuagaaacacc

SEQ ID NO: 3981148 - RNA, 21 nt, Human herpesvirus 5
auuuaucaauacaaugacacu

SEQ ID NO: 3981149 - RNA, 12 nt, Human herpesvirus 5
auuugaagccag

SEQ ID NO: 3981150 - RNA, 15 nt, Human herpesvirus 5
auuuucuuucuagug

SEQ ID NO: 3981151 - RNA, 23 nt, Human herpesvirus 5
auuuugggucagcggcacgccgc

SEQ ID NO: 3981152 - RNA, 14 nt, Human herpesvirus 5
caaaaaaacauggg

SEQ ID NO: 3981153 - RNA, 22 nt, Human herpesvirus 5
caaaagacguuaucgaugcugc

SEQ ID NO: 3981154 - RNA, 20 nt, Human herpesvirus 5
caaacgcgggcccggacgcg

SEQ ID NO: 3981155 - RNA, 17 nt, Human herpesvirus 5
caaacgcgugcgggugc

SEQ ID NO: 3981156 - RNA, 21 nt, Human herpesvirus 5
caaacgcgugcgggugcauga

SEQ ID NO: 3981157 - RNA, 18 nt, Human herpesvirus 5
caaagaaaaaaaaaagga

SEQ ID NO: 3981158 - RNA, 15 nt, Human herpesvirus 5
caaagucaacaugua

SEQ ID NO: 3981159 - RNA, 22 nt, Human herpesvirus 5
caaaucuccgcggcgguggccg

SEQ ID NO: 3981160 - RNA, 14 nt, Human herpesvirus 5
caacaaaaaaaagg

SEQ ID NO: 3981161 - RNA, 17 nt, Human herpesvirus 5
caacaaauaccaacacu

SEQ ID NO: 3981162 - RNA, 17 nt, Human herpesvirus 5
caacaacagcagcaaca

SEQ ID NO: 3981163 - RNA, 16 nt, Human herpesvirus 5
caacaagagaaagacc

SEQ ID NO: 3981164 - RNA, 18 nt, Human herpesvirus 5
caacaaugacuaacccug

SEQ ID NO: 3981165 - RNA, 11 nt, Human herpesvirus 5
caacagcagca

SEQ ID NO: 3981166 - RNA, 16 nt, Human herpesvirus 5
caacagcagccaccga

SEQ ID NO: 3981167 - RNA, 14 nt, Human herpesvirus 5
caacaugcccagca

SEQ ID NO: 3981168 - RNA, 23 nt, Human herpesvirus 5
caacccguaucugagcggcggcg

SEQ ID NO: 3981169 - RNA, 13 nt, Human herpesvirus 5
caaccgcgagcgg

SEQ ID NO: 3981170 - RNA, 15 nt, Human herpesvirus 5
caacgcgaccaccgu

SEQ ID NO: 3981171 - RNA, 13 nt, Human herpesvirus 5
caacggccccugu

SEQ ID NO: 3981172 - RNA, 21 nt, Human herpesvirus 5
caacggccgccgcagccacga

SEQ ID NO: 3981173 - RNA, 14 nt, Human herpesvirus 5
caacggcuggagga

SEQ ID NO: 3981174 - RNA, 20 nt, Human herpesvirus 5
caacguaacagcaaacgcua

SEQ ID NO: 3981175 - RNA, 13 nt, Human herpesvirus 5
caacgucacuucu

SEQ ID NO: 3981176 - RNA, 21 nt, Human herpesvirus 5
caacugagcuucggagguccu

SEQ ID NO: 3981177 - RNA, 19 nt, Human herpesvirus 5
caagacgcugaauugcacg

SEQ ID NO: 3981178 - RNA, 13 nt, Human herpesvirus 5
caagagaagaaac

SEQ ID NO: 3981179 - RNA, 20 nt, Human herpesvirus 5
caagagcaugcugugggccc

SEQ ID NO: 3981180 - RNA, 17 nt, Human herpesvirus 5
caagaucguacccacca

SEQ ID NO: 3981181 - RNA, 21 nt, Human herpesvirus 5
caaggagcgacguaccagcug

SEQ ID NO: 3981182 - RNA, 14 nt, Human herpesvirus 5
caaggccgccgccg

SEQ ID NO: 3981183 - RNA, 23 nt, Human herpesvirus 5
caaggccgccucuucuggcccuc

SEQ ID NO: 3981184 - RNA, 16 nt, Human herpesvirus 5
caaggcuccgaaaccg

SEQ ID NO: 3981185 - RNA, 14 nt, Human herpesvirus 5
caagugccugcacg

SEQ ID NO: 3981186 - RNA, 19 nt, Human herpesvirus 5
caagugccugcacgaccug

SEQ ID NO: 3981187 - RNA, 22 nt, Human herpesvirus 5
caaguuggugguggaaugcggu

SEQ ID NO: 3981188 - RNA, 15 nt, Human herpesvirus 5
caauaaagagaguug

SEQ ID NO: 3981189 - RNA, 15 nt, Human herpesvirus 5
caauugcaugucgcc

SEQ ID NO: 3981190 - RNA, 17 nt, Human herpesvirus 5
caauuuuucuuuuuccu

SEQ ID NO: 3981191 - RNA, 17 nt, Human herpesvirus 5
caauuuuuucgcugcca

SEQ ID NO: 3981192 - RNA, 17 nt, Human herpesvirus 5
cacaaccguauauucua

SEQ ID NO: 3981193 - RNA, 14 nt, Human herpesvirus 5
cacaaccuguggug

SEQ ID NO: 3981194 - RNA, 16 nt, Human herpesvirus 5
cacacugcuacccugc

SEQ ID NO: 3981195 - RNA, 19 nt, Human herpesvirus 5
cacagagucgccaguccau

SEQ ID NO: 3981196 - RNA, 10 nt, Human herpesvirus 5
cacagcagcc

SEQ ID NO: 3981197 - RNA, 20 nt, Human herpesvirus 5
cacaucggugccggccaggu

SEQ ID NO: 3981198 - RNA, 13 nt, Human herpesvirus 5
cacaugggcccgu

SEQ ID NO: 3981199 - RNA, 18 nt, Human herpesvirus 5
cacauuuuuugacagaug

SEQ ID NO: 3981200 - RNA, 20 nt, Human herpesvirus 5
caccaccgagacgugcgacc

SEQ ID NO: 3981201 - RNA, 19 nt, Human herpesvirus 5
caccacuuugaccacccug

SEQ ID NO: 3981202 - RNA, 20 nt, Human herpesvirus 5
caccagcgucgcgguuacua

SEQ ID NO: 3981203 - RNA, 16 nt, Human herpesvirus 5
caccaggugccggcga

SEQ ID NO: 3981204 - RNA, 15 nt, Human herpesvirus 5
caccccccgggccac

SEQ ID NO: 3981205 - RNA, 18 nt, Human herpesvirus 5
caccccgaacuggagcuc

SEQ ID NO: 3981206 - RNA, 16 nt, Human herpesvirus 5
cacccgaguccugguc

SEQ ID NO: 3981207 - RNA, 22 nt, Human herpesvirus 5
cacccgucaugguacagaucca

SEQ ID NO: 3981208 - RNA, 15 nt, Human herpesvirus 5
caccgaaagcgcgcu

SEQ ID NO: 3981209 - RNA, 13 nt, Human herpesvirus 5
caccgacccugcg

SEQ ID NO: 3981210 - RNA, 21 nt, Human herpesvirus 5
caccgccgcuauggcggccau

SEQ ID NO: 3981211 - RNA, 19 nt, Human herpesvirus 5
caccggcgccugcugcucg

SEQ ID NO: 3981212 - RNA, 21 nt, Human herpesvirus 5
caccgguuggagcagcucuuu

SEQ ID NO: 3981213 - RNA, 19 nt, Human herpesvirus 5
caccgucaccacucccacc

SEQ ID NO: 3981214 - RNA, 20 nt, Human herpesvirus 5
caccgucaccacucccacca

SEQ ID NO: 3981215 - RNA, 19 nt, Human herpesvirus 5
caccgucgccgucacugcc

SEQ ID NO: 3981216 - RNA, 23 nt, Human herpesvirus 5
caccgucgcguccgacgcgacgg

SEQ ID NO: 3981217 - RNA, 22 nt, Human herpesvirus 5
caccgucggcggggcggacugc

SEQ ID NO: 3981218 - RNA, 14 nt, Human herpesvirus 5
caccuacgagcagg

SEQ ID NO: 3981219 - RNA, 15 nt, Human herpesvirus 5
caccucgaugaagcc

SEQ ID NO: 3981220 - RNA, 18 nt, Human herpesvirus 5
caccucgugcgaggacaa

SEQ ID NO: 3981221 - RNA, 14 nt, Human herpesvirus 5
caccugagacuggu

SEQ ID NO: 3981222 - RNA, 17 nt, Human herpesvirus 5
cacgaccaagugucucu

SEQ ID NO: 3981223 - RNA, 21 nt, Human herpesvirus 5
cacgacggaguuugacuacga

SEQ ID NO: 3981224 - RNA, 14 nt, Human herpesvirus 5
cacgagugggccag

SEQ ID NO: 3981225 - RNA, 15 nt, Human herpesvirus 5
cacgcacgacaugac

SEQ ID NO: 3981226 - RNA, 14 nt, Human herpesvirus 5
cacgccagacuugg

SEQ ID NO: 3981227 - RNA, 14 nt, Human herpesvirus 5
cacgccgugcucgc

SEQ ID NO: 3981228 - RNA, 17 nt, Human herpesvirus 5
cacgccguugccacgag

SEQ ID NO: 3981229 - RNA, 20 nt, Human herpesvirus 5
cacgcguuauacgccgagug

SEQ ID NO: 3981230 - RNA, 12 nt, Human herpesvirus 5
cacgcucgcucu

SEQ ID NO: 3981231 - RNA, 21 nt, Human herpesvirus 5
cacgcucgcucugacgccgcg

SEQ ID NO: 3981232 - RNA, 17 nt, Human herpesvirus 5
cacgcugauggccuacg

SEQ ID NO: 3981233 - RNA, 16 nt, Human herpesvirus 5
cacggccagcuccacg

SEQ ID NO: 3981234 - RNA, 12 nt, Human herpesvirus 5
cacggccugcgg

SEQ ID NO: 3981235 - RNA, 16 nt, Human herpesvirus 5
cacggccuuauguggc

SEQ ID NO: 3981236 - RNA, 20 nt, Human herpesvirus 5
cacggcggcggccugcucgc

SEQ ID NO: 3981237 - RNA, 21 nt, Human herpesvirus 5
cacggcgucuuccuccucguc

SEQ ID NO: 3981238 - RNA, 13 nt, Human herpesvirus 5
cacggcugcugau

SEQ ID NO: 3981239 - RNA, 14 nt, Human herpesvirus 5
cacgggugucccau

SEQ ID NO: 3981240 - RNA, 22 nt, Human herpesvirus 5
cacgguacgauaaaaacaacgu

SEQ ID NO: 3981241 - RNA, 23 nt, Human herpesvirus 5
cacggugacguagcagcacgcgg

SEQ ID NO: 3981242 - RNA, 21 nt, Human herpesvirus 5
cacguagaucccacuggcaau

SEQ ID NO: 3981243 - RNA, 22 nt, Human herpesvirus 5
cacgucaagaucguacccacca

SEQ ID NO: 3981244 - RNA, 17 nt, Human herpesvirus 5
cacgucaccgugcccca

SEQ ID NO: 3981245 - RNA, 14 nt, Human herpesvirus 5
cacgucgaccaggu

SEQ ID NO: 3981246 - RNA, 18 nt, Human herpesvirus 5
cacgucgauucccaucuc

SEQ ID NO: 3981247 - RNA, 20 nt, Human herpesvirus 5
cacgucgccguccaugucgc

SEQ ID NO: 3981248 - RNA, 17 nt, Human herpesvirus 5
cacgucgcugauccgca

SEQ ID NO: 3981249 - RNA, 21 nt, Human herpesvirus 5
cacgucggagccccugcgcgc

SEQ ID NO: 3981250 - RNA, 15 nt, Human herpesvirus 5
cacguucuugcgucc

SEQ ID NO: 3981251 - RNA, 21 nt, Human herpesvirus 5
cacuacguugggucugcgcug

SEQ ID NO: 3981252 - RNA, 13 nt, Human herpesvirus 5
cacucgcaccggc

SEQ ID NO: 3981253 - RNA, 14 nt, Human herpesvirus 5
cacuggcugcgccg

SEQ ID NO: 3981254 - RNA, 20 nt, Human herpesvirus 5
cacugugacguuagagaaag

SEQ ID NO: 3981255 - RNA, 21 nt, Human herpesvirus 5
cacuuccccuaguaauaccac

SEQ ID NO: 3981256 - RNA, 14 nt, Human herpesvirus 5
cacuuuaggcggcg

SEQ ID NO: 3981257 - RNA, 18 nt, Human herpesvirus 5
cagacaggcggccagcuu

SEQ ID NO: 3981258 - RNA, 13 nt, Human herpesvirus 5
cagaccagccacc

SEQ ID NO: 3981259 - RNA, 20 nt, Human herpesvirus 5
cagaccgcaacaacagcagc

SEQ ID NO: 3981260 - RNA, 17 nt, Human herpesvirus 5
cagagaccgccgccgcg

SEQ ID NO: 3981261 - RNA, 20 nt, Human herpesvirus 5
cagaggucgccgcugauacu

SEQ ID NO: 3981262 - RNA, 20 nt, Human herpesvirus 5
cagagucgccaguccauggu

SEQ ID NO: 3981263 - RNA, 21 nt, Human herpesvirus 5
cagaucguguuucggcggcug

SEQ ID NO: 3981264 - RNA, 16 nt, Human herpesvirus 5
cagaugcucccggcgc

SEQ ID NO: 3981265 - RNA, 13 nt, Human herpesvirus 5
cagauguaaauaa

SEQ ID NO: 3981266 - RNA, 17 nt, Human herpesvirus 5
cagcaacagcagccacc

SEQ ID NO: 3981267 - RNA, 20 nt, Human herpesvirus 5
cagcaacaguauuccccgcu

SEQ ID NO: 3981268 - RNA, 16 nt, Human herpesvirus 5
cagcaaccaccguuuc

SEQ ID NO: 3981269 - RNA, 22 nt, Human herpesvirus 5
cagcaaccaccguuucuacaaa

SEQ ID NO: 3981270 - RNA, 15 nt, Human herpesvirus 5
cagcacaccugccuc

SEQ ID NO: 3981271 - RNA, 13 nt, Human herpesvirus 5
cagcaccaugccg

SEQ ID NO: 3981272 - RNA, 23 nt, Human herpesvirus 5
cagcagagccaccaggugccggc

SEQ ID NO: 3981273 - RNA, 13 nt, Human herpesvirus 5
cagcagcagcugg

SEQ ID NO: 3981274 - RNA, 15 nt, Human herpesvirus 5
cagcagccaccgaca

SEQ ID NO: 3981275 - RNA, 23 nt, Human herpesvirus 5
cagcagccaccgacacagcagca

SEQ ID NO: 3981276 - RNA, 22 nt, Human herpesvirus 5
cagcagcucuuccaaugguuga

SEQ ID NO: 3981277 - RNA, 21 nt, Human herpesvirus 5
cagcagggagccagauggcga

SEQ ID NO: 3981278 - RNA, 17 nt, Human herpesvirus 5
cagcagggcgcgccggc

SEQ ID NO: 3981279 - RNA, 19 nt, Human herpesvirus 5
cagcauacggggaggagac

SEQ ID NO: 3981280 - RNA, 16 nt, Human herpesvirus 5
cagcaugggcgacacc

SEQ ID NO: 3981281 - RNA, 15 nt, Human herpesvirus 5
cagccaccggcgcag

SEQ ID NO: 3981282 - RNA, 18 nt, Human herpesvirus 5
cagccacgcgcugguggc

SEQ ID NO: 3981283 - RNA, 13 nt, Human herpesvirus 5
cagcccagggauc

SEQ ID NO: 3981284 - RNA, 16 nt, Human herpesvirus 5
cagcccauccucgugg

SEQ ID NO: 3981285 - RNA, 15 nt, Human herpesvirus 5
cagccgacacagcgg

SEQ ID NO: 3981286 - RNA, 22 nt, Human herpesvirus 5
cagccgcgcuugucgccaugcu

SEQ ID NO: 3981287 - RNA, 23 nt, Human herpesvirus 5
cagccggagcccgcacacuggcu

SEQ ID NO: 3981288 - RNA, 17 nt, Human herpesvirus 5
cagccucgggugcaccg

SEQ ID NO: 3981289 - RNA, 15 nt, Human herpesvirus 5
cagcgaacgacgcag

SEQ ID NO: 3981290 - RNA, 17 nt, Human herpesvirus 5
cagcgacgucccgcgcg

SEQ ID NO: 3981291 - RNA, 14 nt, Human herpesvirus 5
cagcgccagcggcc

SEQ ID NO: 3981292 - RNA, 15 nt, Human herpesvirus 5
cagcgccaggcggcu

SEQ ID NO: 3981293 - RNA, 23 nt, Human herpesvirus 5
cagcgccaggcggcugaucugca

SEQ ID NO: 3981294 - RNA, 14 nt, Human herpesvirus 5
cagcgcccuggggc

SEQ ID NO: 3981295 - RNA, 20 nt, Human herpesvirus 5
cagcggccgcagugggccca

SEQ ID NO: 3981296 - RNA, 23 nt, Human herpesvirus 5
cagcggcggcgguggugacuggg

SEQ ID NO: 3981297 - RNA, 21 nt, Human herpesvirus 5
cagcggucguuuuaaccgcag

SEQ ID NO: 3981298 - RNA, 20 nt, Human herpesvirus 5
cagcguucaaaggaauauua

SEQ ID NO: 3981299 - RNA, 19 nt, Human herpesvirus 5
cagcuaccgccgcaacagc

SEQ ID NO: 3981300 - RNA, 21 nt, Human herpesvirus 5
cagcuaccgccgcaacagcgg

SEQ ID NO: 3981301 - RNA, 23 nt, Human herpesvirus 5
cagcuaccgccgcaacagcggcg

SEQ ID NO: 3981302 - RNA, 15 nt, Human herpesvirus 5
cagcucgcgcuggcu

SEQ ID NO: 3981303 - RNA, 15 nt, Human herpesvirus 5
cagcucguggaccuc

SEQ ID NO: 3981304 - RNA, 17 nt, Human herpesvirus 5
cagcugcaccacggccu

SEQ ID NO: 3981305 - RNA, 14 nt, Human herpesvirus 5
cagcugcaggcagg

SEQ ID NO: 3981306 - RNA, 22 nt, Human herpesvirus 5
cagcugguggcucaugccgcca

SEQ ID NO: 3981307 - RNA, 14 nt, Human herpesvirus 5
cagcuuaccgccac

SEQ ID NO: 3981308 - RNA, 15 nt, Human herpesvirus 5
caggaaucugggagg

SEQ ID NO: 3981309 - RNA, 20 nt, Human herpesvirus 5
caggacuuuuuaauggccaa

SEQ ID NO: 3981310 - RNA, 21 nt, Human herpesvirus 5
caggaggcugugcgcgccggc

SEQ ID NO: 3981311 - RNA, 15 nt, Human herpesvirus 5
caggagguguugagu

SEQ ID NO: 3981312 - RNA, 13 nt, Human herpesvirus 5
caggccagcugcc

SEQ ID NO: 3981313 - RNA, 23 nt, Human herpesvirus 5
caggcuuaacacuagccaucaca

SEQ ID NO: 3981314 - RNA, 17 nt, Human herpesvirus 5
cagggcugcuccaacuu

SEQ ID NO: 3981315 - RNA, 22 nt, Human herpesvirus 5
cagguacggcccggcagcacca

SEQ ID NO: 3981316 - RNA, 13 nt, Human herpesvirus 5
cagguaggauucc

SEQ ID NO: 3981317 - RNA, 16 nt, Human herpesvirus 5
caggucgcccaggcuc

SEQ ID NO: 3981318 - RNA, 22 nt, Human herpesvirus 5
caggugacauccucgcccaggc

SEQ ID NO: 3981319 - RNA, 20 nt, Human herpesvirus 5
cagguggaggacaguauuua

SEQ ID NO: 3981320 - RNA, 19 nt, Human herpesvirus 5
caggugugcgcgucggcgc

SEQ ID NO: 3981321 - RNA, 15 nt, Human herpesvirus 5
caguaaccuggagca

SEQ ID NO: 3981322 - RNA, 21 nt, Human herpesvirus 5
caguacaacaguuaucagcaa

SEQ ID NO: 3981323 - RNA, 23 nt, Human herpesvirus 5
caguacgauccuccggcgcugag

SEQ ID NO: 3981324 - RNA, 12 nt, Human herpesvirus 5
caguagacagac

SEQ ID NO: 3981325 - RNA, 19 nt, Human herpesvirus 5
caguagacagacaggacac

SEQ ID NO: 3981326 - RNA, 15 nt, Human herpesvirus 5
caguauuuuugugcu

SEQ ID NO: 3981327 - RNA, 13 nt, Human herpesvirus 5
cagugacugggua

SEQ ID NO: 3981328 - RNA, 13 nt, Human herpesvirus 5
caguguagauuua

SEQ ID NO: 3981329 - RNA, 20 nt, Human herpesvirus 5
caguucacggggagaagaaa

SEQ ID NO: 3981330 - RNA, 23 nt, Human herpesvirus 5
caguugcuguugcucuaccgcga

SEQ ID NO: 3981331 - RNA, 12 nt, Human herpesvirus 5
ucgcgagcccca

SEQ ID NO: 3981332 - RNA, 16 nt, Human herpesvirus 5
ucgcgccuuccuccuc

SEQ ID NO: 3981333 - RNA, 22 nt, Human herpesvirus 5
ucgcgccuuccuccucugccug

SEQ ID NO: 3981334 - RNA, 22 nt, Human herpesvirus 5
ucgcggcccuucaacggcacca

SEQ ID NO: 3981335 - RNA, 16 nt, Human herpesvirus 5
ucgcugccgcagcugc

SEQ ID NO: 3981336 - RNA, 16 nt, Human herpesvirus 5
ucgcuucgccgccacc

SEQ ID NO: 3981337 - RNA, 16 nt, Human herpesvirus 5
ucggaaucgggcccgc

SEQ ID NO: 3981338 - RNA, 18 nt, Human herpesvirus 5
ucggauacagggugccgc

SEQ ID NO: 3981339 - RNA, 21 nt, Human herpesvirus 5
ucggauacagggugccgccac

SEQ ID NO: 3981340 - RNA, 13 nt, Human herpesvirus 5
ucggccgaaacau

SEQ ID NO: 3981341 - RNA, 19 nt, Human herpesvirus 5
ucggccggaccgugcacgc

SEQ ID NO: 3981342 - RNA, 19 nt, Human herpesvirus 5
ucggccggcugcugcacca

SEQ ID NO: 3981343 - RNA, 15 nt, Human herpesvirus 5
ucggcgccccacagc

SEQ ID NO: 3981344 - RNA, 17 nt, Human herpesvirus 5
ucggcgguccuccagca

SEQ ID NO: 3981345 - RNA, 21 nt, Human herpesvirus 5
ucggcugccuguuccugcugc

SEQ ID NO: 3981346 - RNA, 16 nt, Human herpesvirus 5
ucgggcgugugguaga

SEQ ID NO: 3981347 - RNA, 21 nt, Human herpesvirus 5
ucgggcgugugguagaagagc

SEQ ID NO: 3981348 - RNA, 17 nt, Human herpesvirus 5
ucguauucgucauuugu

SEQ ID NO: 3981349 - RNA, 20 nt, Human herpesvirus 5
ucgucaaggcucgcaaagac

SEQ ID NO: 3981350 - RNA, 19 nt, Human herpesvirus 5
ucguccgccuccacuuccg

SEQ ID NO: 3981351 - RNA, 12 nt, Human herpesvirus 5
ucgucugagccg

SEQ ID NO: 3981352 - RNA, 23 nt, Human herpesvirus 5
ucguggaaggcaccgcgacagcu

SEQ ID NO: 3981353 - RNA, 13 nt, Human herpesvirus 5
ucuacgcuguacu

SEQ ID NO: 3981354 - RNA, 18 nt, Human herpesvirus 5
ucuauauauauuggucac

SEQ ID NO: 3981355 - RNA, 13 nt, Human herpesvirus 5
ucuaucuguuggc

SEQ ID NO: 3981356 - RNA, 19 nt, Human herpesvirus 5
ucucacaccgucagcugcg

SEQ ID NO: 3981357 - RNA, 12 nt, Human herpesvirus 5
ucucaccgugcu

SEQ ID NO: 3981358 - RNA, 16 nt, Human herpesvirus 5
ucucaccgugcucgug

SEQ ID NO: 3981359 - RNA, 13 nt, Human herpesvirus 5
ucuccgucucugg

SEQ ID NO: 3981360 - RNA, 19 nt, Human herpesvirus 5
ucuccucuaccccgccgcc

SEQ ID NO: 3981361 - RNA, 14 nt, Human herpesvirus 5
ucucgcgcaucgcc

SEQ ID NO: 3981362 - RNA, 20 nt, Human herpesvirus 5
ucucugaaggacaguguauu

SEQ ID NO: 3981363 - RNA, 19 nt, Human herpesvirus 5
ucucugcaacgccuggcgu

SEQ ID NO: 3981364 - RNA, 22 nt, Human herpesvirus 5
ucugaccuugcugaugugccag

SEQ ID NO: 3981365 - RNA, 21 nt, Human herpesvirus 5
ucugauaccgggcgccgggac

SEQ ID NO: 3981366 - RNA, 19 nt, Human herpesvirus 5
ucugcagccggugcgcgac

SEQ ID NO: 3981367 - RNA, 14 nt, Human herpesvirus 5
ucugcgagaggaag

SEQ ID NO: 3981368 - RNA, 12 nt, Human herpesvirus 5
ucugcuccccca

SEQ ID NO: 3981369 - RNA, 19 nt, Human herpesvirus 5
ucugcuugcuggcuuggcu

SEQ ID NO: 3981370 - RNA, 16 nt, Human herpesvirus 5
ucugggaugugcagca

SEQ ID NO: 3981371 - RNA, 20 nt, Human herpesvirus 5
ucugugaugaacgacacaug

SEQ ID NO: 3981372 - RNA, 19 nt, Human herpesvirus 5
ucuuauaaggaggcaaaua

SEQ ID NO: 3981373 - RNA, 13 nt, Human herpesvirus 5
ucuucuggcccuc

SEQ ID NO: 3981374 - RNA, 19 nt, Human herpesvirus 5
ucuugacguuuauaaaccg

SEQ ID NO: 3981375 - RNA, 16 nt, Human herpesvirus 5
ucuugcgcccucucgg

SEQ ID NO: 3981376 - RNA, 19 nt, Human herpesvirus 5
ucuugcgcuucugcagcuc

SEQ ID NO: 3981377 - RNA, 18 nt, Human herpesvirus 5
ucuugcggcgccgacucc

SEQ ID NO: 3981378 - RNA, 20 nt, Human herpesvirus 5
ugaacaccagaugcucccgg

SEQ ID NO: 3981379 - RNA, 21 nt, Human herpesvirus 5
ugaaccgaacuauguggcucc

SEQ ID NO: 3981380 - RNA, 23 nt, Human herpesvirus 5
ugaacggcgcuacgucggccaac

SEQ ID NO: 3981381 - RNA, 22 nt, Human herpesvirus 5
ugaagccgucagucauagagcc

SEQ ID NO: 3981382 - RNA, 15 nt, Human herpesvirus 5
ugaauauacagacuu

SEQ ID NO: 3981383 - RNA, 18 nt, Human herpesvirus 5
ugaauggaaauacaugau

SEQ ID NO: 3981384 - RNA, 12 nt, Human herpesvirus 5
ugacacagcucc

SEQ ID NO: 3981385 - RNA, 14 nt, Human herpesvirus 5
ugacagacgauaug

SEQ ID NO: 3981386 - RNA, 22 nt, Human herpesvirus 5
ugacaguauuaacgugugguga

SEQ ID NO: 3981387 - RNA, 11 nt, Human herpesvirus 5
ugaccugggua

SEQ ID NO: 3981388 - RNA, 22 nt, Human herpesvirus 5
ugacgcacuuuuuuuacuagua

SEQ ID NO: 3981389 - RNA, 20 nt, Human herpesvirus 5
ugacggcgcucuuucagcgu

SEQ ID NO: 3981390 - RNA, 13 nt, Human herpesvirus 5
ugacguacauaua

SEQ ID NO: 3981391 - RNA, 15 nt, Human herpesvirus 5
ugacguggugcgcug

SEQ ID NO: 3981392 - RNA, 23 nt, Human herpesvirus 5
ugacuacgaugaagacgcgacuc

SEQ ID NO: 3981393 - RNA, 19 nt, Human herpesvirus 5
ugagacagccacaucaaca

SEQ ID NO: 3981394 - RNA, 21 nt, Human herpesvirus 5
ugagacccgcgucccuggggc

SEQ ID NO: 3981395 - RNA, 15 nt, Human herpesvirus 5
ugagacgaggccgcc

SEQ ID NO: 3981396 - RNA, 16 nt, Human herpesvirus 5
ugagacugguggugag

SEQ ID NO: 3981397 - RNA, 16 nt, Human herpesvirus 5
ugagcaacaaacacag

SEQ ID NO: 3981398 - RNA, 17 nt, Human herpesvirus 5
ugagcaacagucggcag

SEQ ID NO: 3981399 - RNA, 17 nt, Human herpesvirus 5
ugaggggcggcaugccg

SEQ ID NO: 3981400 - RNA, 16 nt, Human herpesvirus 5
ugauaaccuaccuggu

SEQ ID NO: 3981401 - RNA, 18 nt, Human herpesvirus 5
ugauacaucgcauaugac

SEQ ID NO: 3981402 - RNA, 13 nt, Human herpesvirus 5
ugauccaggaggu

SEQ ID NO: 3981403 - RNA, 15 nt, Human herpesvirus 5
ugaugaugcugcuga

SEQ ID NO: 3981404 - RNA, 20 nt, Human herpesvirus 5
ugauggaaaugcccgccacc

SEQ ID NO: 3981405 - RNA, 11 nt, Human herpesvirus 5
ugauggagaaa

SEQ ID NO: 3981406 - RNA, 22 nt, Human herpesvirus 5
ugcaauacagaagggaauuugu

SEQ ID NO: 3981407 - RNA, 18 nt, Human herpesvirus 5
ugcaaugccucauccuua

SEQ ID NO: 3981408 - RNA, 21 nt, Human herpesvirus 5
ugcacccccgauaugggccgc

SEQ ID NO: 3981409 - RNA, 13 nt, Human herpesvirus 5
ugcaccugcugcc

SEQ ID NO: 3981410 - RNA, 13 nt, Human herpesvirus 5
ugcaccugggugg

SEQ ID NO: 3981411 - RNA, 17 nt, Human herpesvirus 5
ugcacgagugggccagc

SEQ ID NO: 3981412 - RNA, 21 nt, Human herpesvirus 5
ugcacggcaucaugcugggcg

SEQ ID NO: 3981413 - RNA, 13 nt, Human herpesvirus 5
ugcagcugcgccu

SEQ ID NO: 3981414 - RNA, 12 nt, Human herpesvirus 5
ugcagcugguga

SEQ ID NO: 3981415 - RNA, 18 nt, Human herpesvirus 5
ugcagggacagugcgcca

SEQ ID NO: 3981416 - RNA, 18 nt, Human herpesvirus 5
ugcccauuccgcaacguc

SEQ ID NO: 3981417 - RNA, 22 nt, Human herpesvirus 5
ugcccgggggugacaaggaagc

SEQ ID NO: 3981418 - RNA, 13 nt, Human herpesvirus 5
ugcccgucggcug

SEQ ID NO: 3981419 - RNA, 18 nt, Human herpesvirus 5
ugcccuauccgcgcggcu

SEQ ID NO: 3981420 - RNA, 22 nt, Human herpesvirus 5
ugccggucuacagacugggcga

SEQ ID NO: 3981421 - RNA, 20 nt, Human herpesvirus 5
ugccuggacgccugggcgcg

SEQ ID NO: 3981422 - RNA, 14 nt, Human herpesvirus 5
ugccugggcacgcg

SEQ ID NO: 3981423 - RNA, 14 nt, Human herpesvirus 5
ugcgaggcuuugau

SEQ ID NO: 3981424 - RNA, 18 nt, Human herpesvirus 5
ugcgcaccuucggcggua

SEQ ID NO: 3981425 - RNA, 16 nt, Human herpesvirus 5
ugcgccgucucuucgc

SEQ ID NO: 3981426 - RNA, 16 nt, Human herpesvirus 5
ugcgccuuccagucca

SEQ ID NO: 3981427 - RNA, 13 nt, Human herpesvirus 5
ugcgcgucaaccg

SEQ ID NO: 3981428 - RNA, 13 nt, Human herpesvirus 5
ugcgcgucgaccu

SEQ ID NO: 3981429 - RNA, 12 nt, Human herpesvirus 5
ugcgcugcagcc

SEQ ID NO: 3981430 - RNA, 16 nt, Human herpesvirus 5
ugcgcuucugcagcuc

SEQ ID NO: 3981431 - RNA, 14 nt, Human herpesvirus 5
ugcggaucgcggua

SEQ ID NO: 3981432 - RNA, 14 nt, Human herpesvirus 5
ugcguggggugcug

SEQ ID NO: 3981433 - RNA, 14 nt, Human herpesvirus 5
ugcguguccagaua

SEQ ID NO: 3981434 - RNA, 22 nt, Human herpesvirus 5
ugcucaacuuuggcgugcccag

SEQ ID NO: 3981435 - RNA, 13 nt, Human herpesvirus 5
ugcuccaacuuug

SEQ ID NO: 3981436 - RNA, 15 nt, Human herpesvirus 5
ugcuggagcgcggcc

SEQ ID NO: 3981437 - RNA, 19 nt, Human herpesvirus 5
ugcuggccgagacggcgug

SEQ ID NO: 3981438 - RNA, 18 nt, Human herpesvirus 5
ugcugugcaccucggccu

SEQ ID NO: 3981439 - RNA, 15 nt, Human herpesvirus 5
ugcuuaaugaucucc

SEQ ID NO: 3981440 - RNA, 17 nt, Human herpesvirus 5
ugcuuacccuucaauuu

SEQ ID NO: 3981441 - RNA, 16 nt, Human herpesvirus 5
ugcuucauccagcucc

SEQ ID NO: 3981442 - RNA, 15 nt, Human herpesvirus 5
uggaaaucccucacc

SEQ ID NO: 3981443 - RNA, 13 nt, Human herpesvirus 5
uggaaguaacauc

SEQ ID NO: 3981444 - RNA, 18 nt, Human herpesvirus 5
uggacgguacaguuuaug

SEQ ID NO: 3981445 - RNA, 19 nt, Human herpesvirus 5
uggagaaaacgccggcgga

SEQ ID NO: 3981446 - RNA, 14 nt, Human herpesvirus 5
uggagcccacgccg

SEQ ID NO: 3981447 - RNA, 12 nt, Human herpesvirus 5
uggaggucgacg

SEQ ID NO: 3981448 - RNA, 23 nt, Human herpesvirus 5
uggcaauuacguggguugcaccc

SEQ ID NO: 3981449 - RNA, 16 nt, Human herpesvirus 5
uggccaucacgggcaa

SEQ ID NO: 3981450 - RNA, 15 nt, Human herpesvirus 5
uggccgagcuaugcg

SEQ ID NO: 3981451 - RNA, 17 nt, Human herpesvirus 5
uggcgcguagccaccug

SEQ ID NO: 3981452 - RNA, 22 nt, Human herpesvirus 5
uggcggcagcggaggugggccg

SEQ ID NO: 3981453 - RNA, 14 nt, Human herpesvirus 5
uggcugcgcgccuc

SEQ ID NO: 3981454 - RNA, 13 nt, Human herpesvirus 5
uggcuuggcgcag

SEQ ID NO: 3981455 - RNA, 19 nt, Human herpesvirus 5
ugggaagaugggacguggu

SEQ ID NO: 3981456 - RNA, 18 nt, Human herpesvirus 5
ugggauaccgcccgcaug

SEQ ID NO: 3981457 - RNA, 19 nt, Human herpesvirus 5
ugggcacgcgcgucggccg

SEQ ID NO: 3981458 - RNA, 16 nt, Human herpesvirus 5
ugggcgcgcuggagcu

SEQ ID NO: 3981459 - RNA, 14 nt, Human herpesvirus 5
ugggcuacguaggc

SEQ ID NO: 3981460 - RNA, 22 nt, Human herpesvirus 5
ugggcugugguucauguuucug

SEQ ID NO: 3981461 - RNA, 13 nt, Human herpesvirus 5
uggggauuuuuga

SEQ ID NO: 3981462 - RNA, 17 nt, Human herpesvirus 5
uggggucugcuguuacu

SEQ ID NO: 3981463 - RNA, 18 nt, Human herpesvirus 5
uggguccagccagcaucg

SEQ ID NO: 3981464 - RNA, 18 nt, Human herpesvirus 5
ugguagcuagugcagccu

SEQ ID NO: 3981465 - RNA, 16 nt, Human herpesvirus 5
uggucuucccuacagc

SEQ ID NO: 3981466 - RNA, 24 nt, Human herpesvirus 5
ugguggccgaacagcagcucuucc

SEQ ID NO: 3981467 - RNA, 14 nt, Human herpesvirus 5
ugguggucuacaag

SEQ ID NO: 3981468 - RNA, 18 nt, Human herpesvirus 5
ugguuaccggucacugga

SEQ ID NO: 3981469 - RNA, 22 nt, Human herpesvirus 5
ugguuuuugcuuccgagcugug

SEQ ID NO: 3981470 - RNA, 14 nt, Human herpesvirus 5
uguaaauaaaaagc

SEQ ID NO: 3981471 - RNA, 12 nt, Human herpesvirus 5
uguacugaaggg

SEQ ID NO: 3981472 - RNA, 11 nt, Human herpesvirus 5
uguauacugug

SEQ ID NO: 3981473 - RNA, 22 nt, Human herpesvirus 5
ugucacggaacauguccuggcg

SEQ ID NO: 3981474 - RNA, 17 nt, Human herpesvirus 5
ugucagcgccgggugcg

SEQ ID NO: 3981475 - RNA, 19 nt, Human herpesvirus 5
uguccccgcaaacucccac

SEQ ID NO: 3981476 - RNA, 16 nt, Human herpesvirus 5
ugucccugccagucuc

SEQ ID NO: 3981477 - RNA, 21 nt, Human herpesvirus 5
uguccgcggcgugaccacguc

SEQ ID NO: 3981478 - RNA, 16 nt, Human herpesvirus 5
ugucgcgacagagagg

SEQ ID NO: 3981479 - RNA, 19 nt, Human herpesvirus 5
ugucgcugcguccagcguc

SEQ ID NO: 3981480 - RNA, 14 nt, Human herpesvirus 5
ugucugcagccggu

SEQ ID NO: 3981481 - RNA, 19 nt, Human herpesvirus 5
uguguccgcccgagcaggu

SEQ ID NO: 3981482 - RNA, 19 nt, Human herpesvirus 5
uguuaucaucauggagcua

SEQ ID NO: 3981483 - RNA, 15 nt, Human herpesvirus 5
uguuauguuauuaua

SEQ ID NO: 3981484 - RNA, 14 nt, Human herpesvirus 5
uguucgugguuggc

SEQ ID NO: 3981485 - RNA, 16 nt, Human herpesvirus 5
uguugcuacagggagu

SEQ ID NO: 3981486 - RNA, 22 nt, Human herpesvirus 5
uguuugacauuuuuucggccgc

SEQ ID NO: 3981487 - RNA, 22 nt, Human herpesvirus 5
uuaaagaugucgauggaggucu

SEQ ID NO: 3981488 - RNA, 19 nt, Human herpesvirus 5
uuacacacuccuugguacu

SEQ ID NO: 3981489 - RNA, 19 nt, Human herpesvirus 5
uuaguacgugcguguuuuu

SEQ ID NO: 3981490 - RNA, 22 nt, Human herpesvirus 5
uuaugaggagcgcgcacaaagg

SEQ ID NO: 3981491 - RNA, 13 nt, Human herpesvirus 5
uuaugauucugca

SEQ ID NO: 3981492 - RNA, 14 nt, Human herpesvirus 5
uuaugauugucugc

SEQ ID NO: 3981493 - RNA, 14 nt, Human herpesvirus 5
uucagaaccaugua

SEQ ID NO: 3981494 - RNA, 18 nt, Human herpesvirus 5
uuccacgcagcgggaaac

SEQ ID NO: 3981495 - RNA, 23 nt, Human herpesvirus 5
uucccaccgcgacccagcgacag

SEQ ID NO: 3981496 - RNA, 23 nt, Human herpesvirus 5
uuccccugggaauucaugcugua

SEQ ID NO: 3981497 - RNA, 20 nt, Human herpesvirus 5
uucccucuagagacagacga

SEQ ID NO: 3981498 - RNA, 17 nt, Human herpesvirus 5
uuccgaagaugccgugu

SEQ ID NO: 3981499 - RNA, 19 nt, Human herpesvirus 5
uuccgcguuuggucgccug

SEQ ID NO: 3981500 - RNA, 22 nt, Human herpesvirus 5
uucgacagcggcaacaacgacg

SEQ ID NO: 3981501 - RNA, 15 nt, Human herpesvirus 5
uucgaguccugcugu

SEQ ID NO: 3981502 - RNA, 20 nt, Human herpesvirus 5
uucgauucucuauacacaua

SEQ ID NO: 3981503 - RNA, 18 nt, Human herpesvirus 5
uucgccaagaugcugcgg

SEQ ID NO: 3981504 - RNA, 22 nt, Human herpesvirus 5
uucuacggaguuuucccucagc

SEQ ID NO: 3981505 - RNA, 14 nt, Human herpesvirus 5
uucuucgcggaggc

SEQ ID NO: 3981506 - RNA, 23 nt, Human herpesvirus 5
uucuucugucucgucgacgucau

SEQ ID NO: 3981507 - RNA, 21 nt, Human herpesvirus 5
uucuugcaagaggaaugcaug

SEQ ID NO: 3981508 - RNA, 19 nt, Human herpesvirus 5
uucuugcccacgccgucgc

SEQ ID NO: 3981509 - RNA, 14 nt, Human herpesvirus 5
uugacccagggcug

SEQ ID NO: 3981510 - RNA, 20 nt, Human herpesvirus 5
uugagcaggguaaaaaccac

SEQ ID NO: 3981511 - RNA, 13 nt, Human herpesvirus 5
uugagcucggaca

SEQ ID NO: 3981512 - RNA, 17 nt, Human herpesvirus 5
uugaguaacgaggaggc

SEQ ID NO: 3981513 - RNA, 20 nt, Human herpesvirus 5
uugcaaaagaagcugcccgc

SEQ ID NO: 3981514 - RNA, 14 nt, Human herpesvirus 5
uugcaccugggugg

SEQ ID NO: 3981515 - RNA, 18 nt, Human herpesvirus 5
uugcauaagcgcggaggu

SEQ ID NO: 3981516 - RNA, 22 nt, Human herpesvirus 5
uugccggugccgaugagauaaa

SEQ ID NO: 3981517 - RNA, 12 nt, Human herpesvirus 5
uugcgcauggua

SEQ ID NO: 3981518 - RNA, 14 nt, Human herpesvirus 5
uugcuuuugcauau

SEQ ID NO: 3981519 - RNA, 20 nt, Human herpesvirus 5
uuggaacccaucgaggaggc

SEQ ID NO: 3981520 - RNA, 14 nt, Human herpesvirus 5
uuggcaacaucacc

SEQ ID NO: 3981521 - RNA, 16 nt, Human herpesvirus 5
uuggugaaggccgugg

SEQ ID NO: 3981522 - RNA, 17 nt, Human herpesvirus 5
uuguaaucauccuaauu

SEQ ID NO: 3981523 - RNA, 22 nt, Human herpesvirus 5
uuguacccucacggucugcuug

SEQ ID NO: 3981524 - RNA, 22 nt, Human herpesvirus 5
uuuaagguacgggucuaccaaa

SEQ ID NO: 3981525 - RNA, 13 nt, Human herpesvirus 5
uuucagucagaga

SEQ ID NO: 3981526 - RNA, 14 nt, Human herpesvirus 5
uuuccaaagccgac

SEQ ID NO: 3981527 - RNA, 11 nt, Human herpesvirus 5
uuuccacgcca

SEQ ID NO: 3981528 - RNA, 17 nt, Human herpesvirus 5
uuucgaguccguccucg

SEQ ID NO: 3981529 - RNA, 14 nt, Human herpesvirus 5
uuucgguuccaacu

SEQ ID NO: 3981530 - RNA, 16 nt, Human herpesvirus 5
uuugcauccuccucau

SEQ ID NO: 3981531 - RNA, 20 nt, Human herpesvirus 5
uuuggcgcagucgcgagcug

SEQ ID NO: 3981532 - RNA, 15 nt, Human herpesvirus 5
uuuuucuacgugucu

SEQ ID NO: 3981533 - RNA, 15 nt, Human herpesvirus 5
cugcuauaagaaggc

SEQ ID NO: 3981534 - RNA, 12 nt, Human herpesvirus 5
cugcuccagaag

SEQ ID NO: 3981535 - RNA, 20 nt, Human herpesvirus 5
cugcucccccaacccaggga

SEQ ID NO: 3981536 - RNA, 13 nt, Human herpesvirus 5
cugcuccucggag

SEQ ID NO: 3981537 - RNA, 19 nt, Human herpesvirus 5
cugcucgaccgcuggaggc

SEQ ID NO: 3981538 - RNA, 14 nt, Human herpesvirus 5
cugcugaaacugcg

SEQ ID NO: 3981539 - RNA, 21 nt, Human herpesvirus 5
cugcugcaccacagcgccagg

SEQ ID NO: 3981540 - RNA, 19 nt, Human herpesvirus 5
cugcugguuuuugcccccu

SEQ ID NO: 3981541 - RNA, 22 nt, Human herpesvirus 5
cugcuuacccuucaauuuccac

SEQ ID NO: 3981542 - RNA, 18 nt, Human herpesvirus 5
cugcuuuucgggccgcgg

SEQ ID NO: 3981543 - RNA, 23 nt, Human herpesvirus 5
cugcuuuuuugucuccuguggau

SEQ ID NO: 3981544 - RNA, 23 nt, Human herpesvirus 5
cuggaaggcguggaugagguacu

SEQ ID NO: 3981545 - RNA, 15 nt, Human herpesvirus 5
cuggacgccugggcg

SEQ ID NO: 3981546 - RNA, 15 nt, Human herpesvirus 5
cuggacgcugcgucg

SEQ ID NO: 3981547 - RNA, 15 nt, Human herpesvirus 5
cuggacuucaauguc

SEQ ID NO: 3981548 - RNA, 12 nt, Human herpesvirus 5
cuggagguggcc

SEQ ID NO: 3981549 - RNA, 13 nt, Human herpesvirus 5
cuggaucugcccu

SEQ ID NO: 3981550 - RNA, 14 nt, Human herpesvirus 5
cuggcaacgugcca

SEQ ID NO: 3981551 - RNA, 18 nt, Human herpesvirus 5
cuggccgagacggcguga

SEQ ID NO: 3981552 - RNA, 16 nt, Human herpesvirus 5
cuggccgauccacggg

SEQ ID NO: 3981553 - RNA, 17 nt, Human herpesvirus 5
cuggcgcggucugcgug

SEQ ID NO: 3981554 - RNA, 17 nt, Human herpesvirus 5
cuggcgguauggcugcg

SEQ ID NO: 3981555 - RNA, 13 nt, Human herpesvirus 5
cuggcuuggcucg

SEQ ID NO: 3981556 - RNA, 16 nt, Human herpesvirus 5
cugggcacgcgcgucg

SEQ ID NO: 3981557 - RNA, 13 nt, Human herpesvirus 5
cugggccacaggg

SEQ ID NO: 3981558 - RNA, 20 nt, Human herpesvirus 5
cugggcgaccgucucuacca

SEQ ID NO: 3981559 - RNA, 22 nt, Human herpesvirus 5
cuggggcccuucgugggcaaga

SEQ ID NO: 3981560 - RNA, 14 nt, Human herpesvirus 5
cuggggucaaaagc

SEQ ID NO: 3981561 - RNA, 18 nt, Human herpesvirus 5
cuggggugucuagcuggc

SEQ ID NO: 3981562 - RNA, 14 nt, Human herpesvirus 5
cugggucagugcca

SEQ ID NO: 3981563 - RNA, 18 nt, Human herpesvirus 5
cuggguccguaaccacgu

SEQ ID NO: 3981564 - RNA, 22 nt, Human herpesvirus 5
cuggguuaccccucgcugggcu

SEQ ID NO: 3981565 - RNA, 16 nt, Human herpesvirus 5
cuggucaaccugcuga

SEQ ID NO: 3981566 - RNA, 14 nt, Human herpesvirus 5
cuggucaacugcgu

SEQ ID NO: 3981567 - RNA, 21 nt, Human herpesvirus 5
cuguaccguuauuucgugcgu

SEQ ID NO: 3981568 - RNA, 22 nt, Human herpesvirus 5
cugucagcgccgggugcgcgac

SEQ ID NO: 3981569 - RNA, 15 nt, Human herpesvirus 5
cugucauccacuugg

SEQ ID NO: 3981570 - RNA, 19 nt, Human herpesvirus 5
cugucaugggucugcgcuu

SEQ ID NO: 3981571 - RNA, 23 nt, Human herpesvirus 5
cugucggaugaggcaggcgaugc

SEQ ID NO: 3981572 - RNA, 21 nt, Human herpesvirus 5
cugucguggugacugagcaca

SEQ ID NO: 3981573 - RNA, 22 nt, Human herpesvirus 5
cugucguucuccgcuugcugcg

SEQ ID NO: 3981574 - RNA, 18 nt, Human herpesvirus 5
cugugaaacgccaacucc

SEQ ID NO: 3981575 - RNA, 13 nt, Human herpesvirus 5
cugugcuggccgc

SEQ ID NO: 3981576 - RNA, 15 nt, Human herpesvirus 5
cuguggaauacccag

SEQ ID NO: 3981577 - RNA, 17 nt, Human herpesvirus 5
cuguggaauacccagcu

SEQ ID NO: 3981578 - RNA, 22 nt, Human herpesvirus 5
cuguggaauacccagcugggga

SEQ ID NO: 3981579 - RNA, 20 nt, Human herpesvirus 5
cuguggcuucucuggagacg

SEQ ID NO: 3981580 - RNA, 15 nt, Human herpesvirus 5
cuguguccgcccgag

SEQ ID NO: 3981581 - RNA, 13 nt, Human herpesvirus 5
cuguuccugcugc

SEQ ID NO: 3981582 - RNA, 16 nt, Human herpesvirus 5
cuguucgacagcggca

SEQ ID NO: 3981583 - RNA, 17 nt, Human herpesvirus 5
cuuaaaauuucguaaac

SEQ ID NO: 3981584 - RNA, 16 nt, Human herpesvirus 5
cuuaacgcgcaagugc

SEQ ID NO: 3981585 - RNA, 19 nt, Human herpesvirus 5
cuuagucgagacuugcacg

SEQ ID NO: 3981586 - RNA, 14 nt, Human herpesvirus 5
cuuaucugggugca

SEQ ID NO: 3981587 - RNA, 18 nt, Human herpesvirus 5
cuucccugagcgagcgcg

SEQ ID NO: 3981588 - RNA, 21 nt, Human herpesvirus 5
cuuccguguccccugccaccu

SEQ ID NO: 3981589 - RNA, 13 nt, Human herpesvirus 5
cuucgcgaggucu

SEQ ID NO: 3981590 - RNA, 21 nt, Human herpesvirus 5
cuucggaaucgggcccgccgg

SEQ ID NO: 3981591 - RNA, 19 nt, Human herpesvirus 5
cuucuaccuggcuggcgca

SEQ ID NO: 3981592 - RNA, 17 nt, Human herpesvirus 5
cuucuuccucucaguca

SEQ ID NO: 3981593 - RNA, 15 nt, Human herpesvirus 5
cuugagcgacagcag

SEQ ID NO: 3981594 - RNA, 17 nt, Human herpesvirus 5
cuugcaaacgguacgca

SEQ ID NO: 3981595 - RNA, 14 nt, Human herpesvirus 5
cuugcaagaggaau

SEQ ID NO: 3981596 - RNA, 14 nt, Human herpesvirus 5
cuugcccacgccgu

SEQ ID NO: 3981597 - RNA, 13 nt, Human herpesvirus 5
cuugcgcuucugc

SEQ ID NO: 3981598 - RNA, 18 nt, Human herpesvirus 5
cuugcgcuucugcagcuc

SEQ ID NO: 3981599 - RNA, 15 nt, Human herpesvirus 5
cuugcuccucuucca

SEQ ID NO: 3981600 - RNA, 13 nt, Human herpesvirus 5
cuuggcggccgag

SEQ ID NO: 3981601 - RNA, 14 nt, Human herpesvirus 5
cuugucgccaugcu

SEQ ID NO: 3981602 - RNA, 19 nt, Human herpesvirus 5
cuuguucucgaccacguag

SEQ ID NO: 3981603 - RNA, 20 nt, Human herpesvirus 5
cuuuaacccaaaaccaugcu

SEQ ID NO: 3981604 - RNA, 22 nt, Human herpesvirus 5
cuuuauucagaaagcaccagaa

SEQ ID NO: 3981605 - RNA, 20 nt, Human herpesvirus 5
cuuuccauucuuccgugucc

SEQ ID NO: 3981606 - RNA, 15 nt, Human herpesvirus 5
cuuucgcgcagcgcg

SEQ ID NO: 3981607 - RNA, 23 nt, Human herpesvirus 5
cuuugacgucccuuuuacuagua

SEQ ID NO: 3981608 - RNA, 11 nt, Human herpesvirus 5
cuuugcugcua

SEQ ID NO: 3981609 - RNA, 16 nt, Human herpesvirus 5
cuuugcuuaucugccu

SEQ ID NO: 3981610 - RNA, 21 nt, Human herpesvirus 5
cuuuuacggguaaugcaugcu

SEQ ID NO: 3981611 - RNA, 13 nt, Human herpesvirus 5
cuuuuacuaguau

SEQ ID NO: 3981612 - RNA, 16 nt, Human herpesvirus 5
cuuuuggcgcagucgc

SEQ ID NO: 3981613 - RNA, 19 nt, Human herpesvirus 5
cuuuuuuuaaccaauaaca

SEQ ID NO: 3981614 - RNA, 18 nt, Human herpesvirus 5
gaaaaaaugguguuacac

SEQ ID NO: 3981615 - RNA, 13 nt, Human herpesvirus 5
gaaaagagaugau

SEQ ID NO: 3981616 - RNA, 14 nt, Human herpesvirus 5
gaaaaucugugugu

SEQ ID NO: 3981617 - RNA, 21 nt, Human herpesvirus 5
gaaacagcguccacaguuucc

SEQ ID NO: 3981618 - RNA, 23 nt, Human herpesvirus 5
gaaaccacgccggcgguuacaga

SEQ ID NO: 3981619 - RNA, 18 nt, Human herpesvirus 5
gaaaccacgcgucagggc

SEQ ID NO: 3981620 - RNA, 20 nt, Human herpesvirus 5
gaaaccguacuaagucuccc

SEQ ID NO: 3981621 - RNA, 15 nt, Human herpesvirus 5
gaaacuacgugcaac

SEQ ID NO: 3981622 - RNA, 14 nt, Human herpesvirus 5
gaaaguuguccgcg

SEQ ID NO: 3981623 - RNA, 23 nt, Human herpesvirus 5
gaacagugccgccuucgaaacgg

SEQ ID NO: 3981624 - RNA, 22 nt, Human herpesvirus 5
gaaccaagucuugccgugacgu

SEQ ID NO: 3981625 - RNA, 16 nt, Human herpesvirus 5
gaacccuucccgaccu

SEQ ID NO: 3981626 - RNA, 18 nt, Human herpesvirus 5
gaacccuucccgaccucc

SEQ ID NO: 3981627 - RNA, 13 nt, Human herpesvirus 5
gaacgcgugcgcg

SEQ ID NO: 3981628 - RNA, 19 nt, Human herpesvirus 5
gaacgcuacuucccccucc

SEQ ID NO: 3981629 - RNA, 17 nt, Human herpesvirus 5
gaacgggugggcugggg

SEQ ID NO: 3981630 - RNA, 21 nt, Human herpesvirus 5
gaacugucgucgccggaagga

SEQ ID NO: 3981631 - RNA, 18 nt, Human herpesvirus 5
gaacuuuguagugcgcgc

SEQ ID NO: 3981632 - RNA, 14 nt, Human herpesvirus 5
gaagaagagauggc

SEQ ID NO: 3981633 - RNA, 16 nt, Human herpesvirus 5
gaagacaccuggaaag

SEQ ID NO: 3981634 - RNA, 18 nt, Human herpesvirus 5
gaagacuuugauguaguu

SEQ ID NO: 3981635 - RNA, 20 nt, Human herpesvirus 5
gaagaggacgaagugacgga

SEQ ID NO: 3981636 - RNA, 16 nt, Human herpesvirus 5
gaagaugccgaugugu

SEQ ID NO: 3981637 - RNA, 17 nt, Human herpesvirus 5
gaagccgccaauacagc

SEQ ID NO: 3981638 - RNA, 17 nt, Human herpesvirus 5
gaagcgaauaagcgcga

SEQ ID NO: 3981639 - RNA, 20 nt, Human herpesvirus 5
gaagcggagugcaucucgag

SEQ ID NO: 3981640 - RNA, 19 nt, Human herpesvirus 5
gaaggccaugagcggcagg

SEQ ID NO: 3981641 - RNA, 17 nt, Human herpesvirus 5
gaaggguguugugcgug

SEQ ID NO: 3981642 - RNA, 19 nt, Human herpesvirus 5
gaagucgaucuggaaggcg

SEQ ID NO: 3981643 - RNA, 22 nt, Human herpesvirus 5
gaagucuucaucaucgucgucg

SEQ ID NO: 3981644 - RNA, 18 nt, Human herpesvirus 5
gaauacuggaagcugcug

SEQ ID NO: 3981645 - RNA, 15 nt, Human herpesvirus 5
gaaugcuaguuugua

SEQ ID NO: 3981646 - RNA, 19 nt, Human herpesvirus 5
gaauuguuaccagaacucu

SEQ ID NO: 3981647 - RNA, 17 nt, Human herpesvirus 5
gacaaccugcugcacuu

SEQ ID NO: 3981648 - RNA, 20 nt, Human herpesvirus 5
gacaaggucguucuccucga

SEQ ID NO: 3981649 - RNA, 20 nt, Human herpesvirus 5
gacacagcagcaccaggcga

SEQ ID NO: 3981650 - RNA, 18 nt, Human herpesvirus 5
gacacagcgccgcgcugg

SEQ ID NO: 3981651 - RNA, 23 nt, Human herpesvirus 5
gacaccguaucagcuaccgccgc

SEQ ID NO: 3981652 - RNA, 14 nt, Human herpesvirus 5
gacacggaggauga

SEQ ID NO: 3981653 - RNA, 19 nt, Human herpesvirus 5
gacacggugcugcugcgcg

SEQ ID NO: 3981654 - RNA, 19 nt, Human herpesvirus 5
gacacuaggcguccgcgcc

SEQ ID NO: 3981655 - RNA, 20 nt, Human herpesvirus 5
gacacucuggcccugcugua

SEQ ID NO: 3981656 - RNA, 16 nt, Human herpesvirus 5
gacagagaccgccgcc

SEQ ID NO: 3981657 - RNA, 14 nt, Human herpesvirus 5
gacagcaaggccgc

SEQ ID NO: 3981658 - RNA, 15 nt, Human herpesvirus 5
gacaggcucgucgug

SEQ ID NO: 3981659 - RNA, 23 nt, Human herpesvirus 5
gacaguagcggguaauaaaaaca

SEQ ID NO: 3981660 - RNA, 15 nt, Human herpesvirus 5
gacauccgucagccu

SEQ ID NO: 3981661 - RNA, 17 nt, Human herpesvirus 5
gacauggagcccacgcc

SEQ ID NO: 3981662 - RNA, 17 nt, Human herpesvirus 5
gacauggcgacuuuccg

SEQ ID NO: 3981663 - RNA, 19 nt, Human herpesvirus 5
gaccaagagcaugcugugg

SEQ ID NO: 3981664 - RNA, 20 nt, Human herpesvirus 5
gaccaagcuaguagcggccg

SEQ ID NO: 3981665 - RNA, 23 nt, Human herpesvirus 5
gaccaagugucucuaaacgccac

SEQ ID NO: 3981666 - RNA, 13 nt, Human herpesvirus 5
gaccaugggcuac

SEQ ID NO: 3981667 - RNA, 23 nt, Human herpesvirus 5
gaccauuuccaugugcagcuggu

SEQ ID NO: 3981668 - RNA, 14 nt, Human herpesvirus 5
gaccgcgagcggcg

SEQ ID NO: 3981669 - RNA, 15 nt, Human herpesvirus 5
gaccggcggcugcug

SEQ ID NO: 3981670 - RNA, 16 nt, Human herpesvirus 5
gaccgggaucacgacg

SEQ ID NO: 3981671 - RNA, 20 nt, Human herpesvirus 5
gaccgggaucacgacgacgc

SEQ ID NO: 3981672 - RNA, 15 nt, Human herpesvirus 5
gaccgguaaggcgga

SEQ ID NO: 3981673 - RNA, 14 nt, Human herpesvirus 5
gaccugccgcuuga

SEQ ID NO: 3981674 - RNA, 18 nt, Human herpesvirus 5
gaccuuccuagcgacggc

SEQ ID NO: 3981675 - RNA, 23 nt, Human herpesvirus 5
gacgaccuacgggacacgcugau

SEQ ID NO: 3981676 - RNA, 14 nt, Human herpesvirus 5
gacgacgcgccccc

SEQ ID NO: 3981677 - RNA, 22 nt, Human herpesvirus 5
gacgagcggcggccgaccccgc

SEQ ID NO: 3981678 - RNA, 17 nt, Human herpesvirus 5
gacgagcguugcgcucg

SEQ ID NO: 3981679 - RNA, 23 nt, Human herpesvirus 5
gacgagcucuugcgaggcuuuga

SEQ ID NO: 3981680 - RNA, 17 nt, Human herpesvirus 5
gacgcagugcguggccg

SEQ ID NO: 3981681 - RNA, 17 nt, Human herpesvirus 5
gacgccugggcgcgacg

SEQ ID NO: 3981682 - RNA, 22 nt, Human herpesvirus 5
gacgcgccucucggagccgccg

SEQ ID NO: 3981683 - RNA, 15 nt, Human herpesvirus 5
gacggaguuggccuc

SEQ ID NO: 3981684 - RNA, 16 nt, Human herpesvirus 5
gacggcgacaucacgg

SEQ ID NO: 3981685 - RNA, 20 nt, Human herpesvirus 5
gacggcuuuccaagcugucg

SEQ ID NO: 3981686 - RNA, 16 nt, Human herpesvirus 5
gacgggacggcggcgc

SEQ ID NO: 3981687 - RNA, 17 nt, Human herpesvirus 5
gacgggacggcugccuc

SEQ ID NO: 3981688 - RNA, 12 nt, Human herpesvirus 5
gacgggccuggu

SEQ ID NO: 3981689 - RNA, 21 nt, Human herpesvirus 5
gacgggccugguauacgaggc

SEQ ID NO: 3981690 - RNA, 15 nt, Human herpesvirus 5
gacgggcgacagcac

SEQ ID NO: 3981691 - RNA, 23 nt, Human herpesvirus 5
gacggucaccaucgugccgcucc

SEQ ID NO: 3981692 - RNA, 17 nt, Human herpesvirus 5
gacgguuuccacgccac

SEQ ID NO: 3981693 - RNA, 16 nt, Human herpesvirus 5
gacguagguaccgacu

SEQ ID NO: 3981694 - RNA, 13 nt, Human herpesvirus 5
gacgucaaagcuc

SEQ ID NO: 3981695 - RNA, 20 nt, Human herpesvirus 5
gacgugaugcgcgucgaccu

SEQ ID NO: 3981696 - RNA, 18 nt, Human herpesvirus 5
gacgugauuuacgagguc

SEQ ID NO: 3981697 - RNA, 23 nt, Human herpesvirus 5
gacgugcgaugguauuacgcccg

SEQ ID NO: 3981698 - RNA, 23 nt, Human herpesvirus 5
gacguuagagaaagagcagcgcg

SEQ ID NO: 3981699 - RNA, 15 nt, Human herpesvirus 5
gacguugaugcggcg

SEQ ID NO: 3981700 - RNA, 14 nt, Human herpesvirus 5
gacugcagcccacc

SEQ ID NO: 3981701 - RNA, 21 nt, Human herpesvirus 5
gagaacuuuguagugcgcgcc

SEQ ID NO: 3981702 - RNA, 13 nt, Human herpesvirus 5
gagacagccacau

SEQ ID NO: 3981703 - RNA, 22 nt, Human herpesvirus 5
gagacaggacgaggcaggguga

SEQ ID NO: 3981704 - RNA, 22 nt, Human herpesvirus 5
gagacccgcgucccuggggcug

SEQ ID NO: 3981705 - RNA, 13 nt, Human herpesvirus 5
gagaccggcggac

SEQ ID NO: 3981706 - RNA, 16 nt, Human herpesvirus 5
gagacgcucacccguu

SEQ ID NO: 3981707 - RNA, 14 nt, Human herpesvirus 5
gagcacgggcugcu

SEQ ID NO: 3981708 - RNA, 16 nt, Human herpesvirus 5
gagcagccggagcccg

SEQ ID NO: 3981709 - RNA, 11 nt, Human herpesvirus 5
gagcaggccau

SEQ ID NO: 3981710 - RNA, 18 nt, Human herpesvirus 5
gagcaugcugugggccca

SEQ ID NO: 3981711 - RNA, 22 nt, Human herpesvirus 5
gagccacucggccauaagaaag

SEQ ID NO: 3981712 - RNA, 22 nt, Human herpesvirus 5
gagccccaucauggcccaagga

SEQ ID NO: 3981713 - RNA, 19 nt, Human herpesvirus 5
gagcccgcacacuggcugg

SEQ ID NO: 3981714 - RNA, 21 nt, Human herpesvirus 5
gagcggcucgccgccgcgcca

SEQ ID NO: 3981715 - RNA, 15 nt, Human herpesvirus 5
gagcguaccagggaa

SEQ ID NO: 3981716 - RNA, 18 nt, Human herpesvirus 5
gagcguguggaggacggg

SEQ ID NO: 3981717 - RNA, 15 nt, Human herpesvirus 5
gagcugcgcgucacc

SEQ ID NO: 3981718 - RNA, 18 nt, Human herpesvirus 5
gaggaggaugggggggac

SEQ ID NO: 3981719 - RNA, 21 nt, Human herpesvirus 5
gaggagugucagacacagccg

SEQ ID NO: 3981720 - RNA, 13 nt, Human herpesvirus 5
gaggauguucugc

SEQ ID NO: 3981721 - RNA, 20 nt, Human herpesvirus 5
gaggcaaauauacuagggaa

SEQ ID NO: 3981722 - RNA, 15 nt, Human herpesvirus 5
gaggcgcgcugcucc

SEQ ID NO: 3981723 - RNA, 19 nt, Human herpesvirus 5
gagggcgcgcggcaacucg

SEQ ID NO: 3981724 - RNA, 17 nt, Human herpesvirus 5
gaggguggugacuuaca

SEQ ID NO: 3981725 - RNA, 17 nt, Human herpesvirus 5
gaggucgacgacgccgu

SEQ ID NO: 3981726 - RNA, 22 nt, Human herpesvirus 5
gaggucgcgcguacggacgagu

SEQ ID NO: 3981727 - RNA, 18 nt, Human herpesvirus 5
gaggugaccuggcugcuu

SEQ ID NO: 3981728 - RNA, 19 nt, Human herpesvirus 5
gaggugugaggaugaaaca

SEQ ID NO: 3981729 - RNA, 22 nt, Human herpesvirus 5
gaguacacguuaccgucgcccu

SEQ ID NO: 3981730 - RNA, 18 nt, Human herpesvirus 5
gagucgcguguguuuuga

SEQ ID NO: 3981731 - RNA, 18 nt, Human herpesvirus 5
gaguggggcaacugcugc

SEQ ID NO: 3981732 - RNA, 15 nt, Human herpesvirus 5
gaguggugaggagcg

SEQ ID NO: 3981733 - RNA, 23 nt, Human herpesvirus 5
gaguuggugcagcugcgccugga

SEQ ID NO: 3981734 - RNA, 17 nt, Human herpesvirus 5
gauaacaaacaaugaca

SEQ ID NO: 3981735 - RNA, 18 nt, Human herpesvirus 5
gauaaccuaccugguguc

SEQ ID NO: 3981736 - RNA, 20 nt, Human herpesvirus 5
gauaagacggacuguuucau

SEQ ID NO: 3981737 - RNA, 19 nt, Human herpesvirus 5
gauacuaguaaaaaaagug

SEQ ID NO: 3981738 - RNA, 22 nt, Human herpesvirus 5
gauagucaucucauuugcuuuu

SEQ ID NO: 3981739 - RNA, 12 nt, Human herpesvirus 5
gauaucugcggg

SEQ ID NO: 3981740 - RNA, 19 nt, Human herpesvirus 5
gaucaucuguuuuugcugc

SEQ ID NO: 3981741 - RNA, 12 nt, Human herpesvirus 5
gauccaggaggu

SEQ ID NO: 3981742 - RNA, 17 nt, Human herpesvirus 5
gauccaguuucaccaag

SEQ ID NO: 3981743 - RNA, 23 nt, Human herpesvirus 5
gaucgccgcggacgccugcgacg

SEQ ID NO: 3981744 - RNA, 13 nt, Human herpesvirus 5
gaucgccuggagc

SEQ ID NO: 3981745 - RNA, 14 nt, Human herpesvirus 5
gaucgggcggucga

SEQ ID NO: 3981746 - RNA, 17 nt, Human herpesvirus 5
gaucuggaaggcgugga

SEQ ID NO: 3981747 - RNA, 17 nt, Human herpesvirus 5
gaucuugacgcugcugg

SEQ ID NO: 3981748 - RNA, 21 nt, Human herpesvirus 5
gaugaaaaacaucuuaagaaa

SEQ ID NO: 3981749 - RNA, 19 nt, Human herpesvirus 5
gaugaacguggugaggggc

SEQ ID NO: 3981750 - RNA, 22 nt, Human herpesvirus 5
gaugaacuguuccacggccagc

SEQ ID NO: 3981751 - RNA, 15 nt, Human herpesvirus 5
gaugacagcgagcuc

SEQ ID NO: 3981752 - RNA, 16 nt, Human herpesvirus 5
gaugagcaauugccuc

SEQ ID NO: 3981753 - RNA, 18 nt, Human herpesvirus 5
gaugagccccucagucug

SEQ ID NO: 3981754 - RNA, 22 nt, Human herpesvirus 5
gaugagccccucagucuguuuc

SEQ ID NO: 3981755 - RNA, 13 nt, Human herpesvirus 5
gaugcgcacggcc

SEQ ID NO: 3981756 - RNA, 18 nt, Human herpesvirus 5
gauggaaaugcccgccac

SEQ ID NO: 3981757 - RNA, 23 nt, Human herpesvirus 5
gauggccaucacgggcaaagagu

SEQ ID NO: 3981758 - RNA, 18 nt, Human herpesvirus 5
gauggggucguggcucag

SEQ ID NO: 3981759 - RNA, 20 nt, Human herpesvirus 5
gaugguacuauaugcgugag

SEQ ID NO: 3981760 - RNA, 15 nt, Human herpesvirus 5
gauucaggacgagga

SEQ ID NO: 3981761 - RNA, 15 nt, Human herpesvirus 5
gauuccagaacuuug

SEQ ID NO: 3981762 - RNA, 20 nt, Human herpesvirus 5
gauucccaucucaacgucaa

SEQ ID NO: 3981763 - RNA, 14 nt, Human herpesvirus 5
gauucgguuacgaa

SEQ ID NO: 3981764 - RNA, 23 nt, Human herpesvirus 5
gcaaaaacuuguccuugcgcgcg

SEQ ID NO: 3981765 - RNA, 13 nt, Human herpesvirus 5
gcaaagucaacau

SEQ ID NO: 3981766 - RNA, 20 nt, Human herpesvirus 5
gucggcaagccgagcgggag

SEQ ID NO: 3981767 - RNA, 18 nt, Human herpesvirus 5
gucggcgcccgggccgcc

SEQ ID NO: 3981768 - RNA, 14 nt, Human herpesvirus 5
gucgggccgucgcg

SEQ ID NO: 3981769 - RNA, 22 nt, Human herpesvirus 5
gucgguuuuuucaccgucgucg

SEQ ID NO: 3981770 - RNA, 14 nt, Human herpesvirus 5
gucguaugccgcca

SEQ ID NO: 3981771 - RNA, 19 nt, Human herpesvirus 5
gucuaguucgcuucucacu

SEQ ID NO: 3981772 - RNA, 12 nt, Human herpesvirus 5
gucucaucacau

SEQ ID NO: 3981773 - RNA, 20 nt, Human herpesvirus 5
gucuccgaacucagaggcca

SEQ ID NO: 3981774 - RNA, 21 nt, Human herpesvirus 5
gucucgggcucgcucggccuc

SEQ ID NO: 3981775 - RNA, 22 nt, Human herpesvirus 5
gucucgggcucgcucggccucg

SEQ ID NO: 3981776 - RNA, 15 nt, Human herpesvirus 5
gucucuucgcgcccc

SEQ ID NO: 3981777 - RNA, 15 nt, Human herpesvirus 5
gucugacgcugcucc

SEQ ID NO: 3981778 - RNA, 18 nt, Human herpesvirus 5
gucugagcgccgacugga

SEQ ID NO: 3981779 - RNA, 19 nt, Human herpesvirus 5
gucugagcgccgacuggau

SEQ ID NO: 3981780 - RNA, 17 nt, Human herpesvirus 5
gucugcauguucaucac

SEQ ID NO: 3981781 - RNA, 22 nt, Human herpesvirus 5
gucugcgucaagacgggccugg

SEQ ID NO: 3981782 - RNA, 21 nt, Human herpesvirus 5
gugacauccucgcccaggcug

SEQ ID NO: 3981783 - RNA, 19 nt, Human herpesvirus 5
gugacgcuaggcggcgccg

SEQ ID NO: 3981784 - RNA, 15 nt, Human herpesvirus 5
gugacgucaaucaaa

SEQ ID NO: 3981785 - RNA, 18 nt, Human herpesvirus 5
gugacguggauacuagua

SEQ ID NO: 3981786 - RNA, 14 nt, Human herpesvirus 5
gugagcaacagucg

SEQ ID NO: 3981787 - RNA, 16 nt, Human herpesvirus 5
gugagcggguucccac

SEQ ID NO: 3981788 - RNA, 16 nt, Human herpesvirus 5
gugaggcgcuccguca

SEQ ID NO: 3981789 - RNA, 17 nt, Human herpesvirus 5
gugauccaggagguggu

SEQ ID NO: 3981790 - RNA, 14 nt, Human herpesvirus 5
gugaucugggcagc

SEQ ID NO: 3981791 - RNA, 16 nt, Human herpesvirus 5
gugauuuaucugccac

SEQ ID NO: 3981792 - RNA, 23 nt, Human herpesvirus 5
gugcagcaucgcgugcgccuccg

SEQ ID NO: 3981793 - RNA, 16 nt, Human herpesvirus 5
gugcagcugcgccugg

SEQ ID NO: 3981794 - RNA, 16 nt, Human herpesvirus 5
gugcaggccgcgcagg

SEQ ID NO: 3981795 - RNA, 19 nt, Human herpesvirus 5
gugcaucgcuucgagguug

SEQ ID NO: 3981796 - RNA, 14 nt, Human herpesvirus 5
gugccauggaccug

SEQ ID NO: 3981797 - RNA, 16 nt, Human herpesvirus 5
gugcccgucaucagcc

SEQ ID NO: 3981798 - RNA, 13 nt, Human herpesvirus 5
gugccucccgcgc

SEQ ID NO: 3981799 - RNA, 13 nt, Human herpesvirus 5
gugccucugaaag

SEQ ID NO: 3981800 - RNA, 13 nt, Human herpesvirus 5
gugcgacgccaug

SEQ ID NO: 3981801 - RNA, 17 nt, Human herpesvirus 5
gugcgcccaucugcggc

SEQ ID NO: 3981802 - RNA, 12 nt, Human herpesvirus 5
gugcgcgccgcc

SEQ ID NO: 3981803 - RNA, 14 nt, Human herpesvirus 5
gugcgcguccacag

SEQ ID NO: 3981804 - RNA, 17 nt, Human herpesvirus 5
gugcgggugccgggaca

SEQ ID NO: 3981805 - RNA, 15 nt, Human herpesvirus 5
gugcuacgagaucag

SEQ ID NO: 3981806 - RNA, 21 nt, Human herpesvirus 5
gugcucagcggcguguacagc

SEQ ID NO: 3981807 - RNA, 22 nt, Human herpesvirus 5
gugcucagcggcguguacagcu

SEQ ID NO: 3981808 - RNA, 18 nt, Human herpesvirus 5
gugcucucuauaaaacuu

SEQ ID NO: 3981809 - RNA, 22 nt, Human herpesvirus 5
gugcugauucgcgccgugcgcg

SEQ ID NO: 3981810 - RNA, 11 nt, Human herpesvirus 5
gugcuguugga

SEQ ID NO: 3981811 - RNA, 14 nt, Human herpesvirus 5
gugcuuuucaucua

SEQ ID NO: 3981812 - RNA, 12 nt, Human herpesvirus 5
guggaaggcacc

SEQ ID NO: 3981813 - RNA, 15 nt, Human herpesvirus 5
guggagagggaaggu

SEQ ID NO: 3981814 - RNA, 19 nt, Human herpesvirus 5
guggccagcgccugguacu

SEQ ID NO: 3981815 - RNA, 23 nt, Human herpesvirus 5
guggccgcgcuggcucgcgacga

SEQ ID NO: 3981816 - RNA, 23 nt, Human herpesvirus 5
guggcucuugcgcuucugcagcu

SEQ ID NO: 3981817 - RNA, 20 nt, Human herpesvirus 5
gugguggcuguaggcuaccg

SEQ ID NO: 3981818 - RNA, 14 nt, Human herpesvirus 5
guguaggcgacugg

SEQ ID NO: 3981819 - RNA, 18 nt, Human herpesvirus 5
gugucacuagacagauuc

SEQ ID NO: 3981820 - RNA, 20 nt, Human herpesvirus 5
gugucuacggauugcugacg

SEQ ID NO: 3981821 - RNA, 21 nt, Human herpesvirus 5
gugucuagcuggcggccucuu

SEQ ID NO: 3981822 - RNA, 23 nt, Human herpesvirus 5
gugucucuaaacgccaccugcaa

SEQ ID NO: 3981823 - RNA, 20 nt, Human herpesvirus 5
gugugaagcgguggaaacca

SEQ ID NO: 3981824 - RNA, 20 nt, Human herpesvirus 5
guguuuuucccauucccugu

SEQ ID NO: 3981825 - RNA, 18 nt, Human herpesvirus 5
guuaacccccgacgagca

SEQ ID NO: 3981826 - RNA, 18 nt, Human herpesvirus 5
guuacaaaagauagagaa

SEQ ID NO: 3981827 - RNA, 18 nt, Human herpesvirus 5
guuagacuagcacagaga

SEQ ID NO: 3981828 - RNA, 21 nt, Human herpesvirus 5
guuagcuuuugcccgcacgcc

SEQ ID NO: 3981829 - RNA, 16 nt, Human herpesvirus 5
guuaucacagaacaca

SEQ ID NO: 3981830 - RNA, 21 nt, Human herpesvirus 5
guuauccggcgucgcuggcgc

SEQ ID NO: 3981831 - RNA, 17 nt, Human herpesvirus 5
guuauguccgcucgugu

SEQ ID NO: 3981832 - RNA, 23 nt, Human herpesvirus 5
guuccaccaggcucugcgccguc

SEQ ID NO: 3981833 - RNA, 17 nt, Human herpesvirus 5
guucccggucgucgugu

SEQ ID NO: 3981834 - RNA, 14 nt, Human herpesvirus 5
guucgccgucgccg

SEQ ID NO: 3981835 - RNA, 20 nt, Human herpesvirus 5
guucgugauucguaggcagc

SEQ ID NO: 3981836 - RNA, 19 nt, Human herpesvirus 5
guucuaucaaugguggaaa

SEQ ID NO: 3981837 - RNA, 15 nt, Human herpesvirus 5
guucugcacggcguc

SEQ ID NO: 3981838 - RNA, 12 nt, Human herpesvirus 5
guucugggcgcg

SEQ ID NO: 3981839 - RNA, 16 nt, Human herpesvirus 5
guucuggucgggcgug

SEQ ID NO: 3981840 - RNA, 14 nt, Human herpesvirus 5
guucuguaaucuuc

SEQ ID NO: 3981841 - RNA, 16 nt, Human herpesvirus 5
guucuuccaccagcua

SEQ ID NO: 3981842 - RNA, 17 nt, Human herpesvirus 5
guugaccguugugggga

SEQ ID NO: 3981843 - RNA, 19 nt, Human herpesvirus 5
guugcagcaacgcgugcuc

SEQ ID NO: 3981844 - RNA, 22 nt, Human herpesvirus 5
guugccgcuggacugacacagc

SEQ ID NO: 3981845 - RNA, 22 nt, Human herpesvirus 5
guugcucuccucuaccccgccg

SEQ ID NO: 3981846 - RNA, 19 nt, Human herpesvirus 5
guuggaucagacucacguc

SEQ ID NO: 3981847 - RNA, 17 nt, Human herpesvirus 5
guugggaccgcagcgug

SEQ ID NO: 3981848 - RNA, 20 nt, Human herpesvirus 5
guugggaccgcagcguggcc

SEQ ID NO: 3981849 - RNA, 18 nt, Human herpesvirus 5
guuucuggggugggcgcg

SEQ ID NO: 3981850 - RNA, 11 nt, Human herpesvirus 5
guuugcgucuc

SEQ ID NO: 3981851 - RNA, 21 nt, Human herpesvirus 5
guuuucccucagccucugugu

SEQ ID NO: 3981852 - RNA, 20 nt, Human herpesvirus 5
guuuuugucaggacuggaag

SEQ ID NO: 3981853 - RNA, 15 nt, Human herpesvirus 5
uaaaacaccgacgcu

SEQ ID NO: 3981854 - RNA, 17 nt, Human herpesvirus 5
uaaaaguaaaaaugccc

SEQ ID NO: 3981855 - RNA, 15 nt, Human herpesvirus 5
uaaagcccccacgac

SEQ ID NO: 3981856 - RNA, 15 nt, Human herpesvirus 5
uaacaacgucacuuc

SEQ ID NO: 3981857 - RNA, 18 nt, Human herpesvirus 5
uaacaauuuuucuuuuuc

SEQ ID NO: 3981858 - RNA, 17 nt, Human herpesvirus 5
uaacccaaaaccaugcu

SEQ ID NO: 3981859 - RNA, 20 nt, Human herpesvirus 5
uaacuagccuucccgugaga

SEQ ID NO: 3981860 - RNA, 16 nt, Human herpesvirus 5
uaacucacuguuugaa

SEQ ID NO: 3981861 - RNA, 12 nt, Human herpesvirus 5
uaacuguagcac

SEQ ID NO: 3981862 - RNA, 18 nt, Human herpesvirus 5
uaagacagaaugaaccuu

SEQ ID NO: 3981863 - RNA, 16 nt, Human herpesvirus 5
uaagagauccugggac

SEQ ID NO: 3981864 - RNA, 16 nt, Human herpesvirus 5
uaagaucguccgagau

SEQ ID NO: 3981865 - RNA, 13 nt, Human herpesvirus 5
uaagcuguguacu

SEQ ID NO: 3981866 - RNA, 13 nt, Human herpesvirus 5
uaaggagcucuga

SEQ ID NO: 3981867 - RNA, 21 nt, Human herpesvirus 5
uaauaagccggcagcugcuuu

SEQ ID NO: 3981868 - RNA, 14 nt, Human herpesvirus 5
uaauagacacaccg

SEQ ID NO: 3981869 - RNA, 16 nt, Human herpesvirus 5
uaaucgacaggaggcu

SEQ ID NO: 3981870 - RNA, 15 nt, Human herpesvirus 5
uaaugcauuaucauc

SEQ ID NO: 3981871 - RNA, 10 nt, Human herpesvirus 5
uaauguacca

SEQ ID NO: 3981872 - RNA, 15 nt, Human herpesvirus 5
uacacgccuugcacc

SEQ ID NO: 3981873 - RNA, 14 nt, Human herpesvirus 5
uacacgucccccug

SEQ ID NO: 3981874 - RNA, 15 nt, Human herpesvirus 5
uacagcccggcggug

SEQ ID NO: 3981875 - RNA, 16 nt, Human herpesvirus 5
uacagguggagauucu

SEQ ID NO: 3981876 - RNA, 21 nt, Human herpesvirus 5
uacaugcuauaagacagccuu

SEQ ID NO: 3981877 - RNA, 22 nt, Human herpesvirus 5
uacauucgccgcaaugggcuuc

SEQ ID NO: 3981878 - RNA, 17 nt, Human herpesvirus 5
uaccaccgugacaccgg

SEQ ID NO: 3981879 - RNA, 16 nt, Human herpesvirus 5
uaccacgguaauugcg

SEQ ID NO: 3981880 - RNA, 16 nt, Human herpesvirus 5
uacccgccccagcaga

SEQ ID NO: 3981881 - RNA, 16 nt, Human herpesvirus 5
uaccgccccaccgccg

SEQ ID NO: 3981882 - RNA, 13 nt, Human herpesvirus 5
uaccgcuacaacg

SEQ ID NO: 3981883 - RNA, 18 nt, Human herpesvirus 5
uaccgucgccaccaccgg

SEQ ID NO: 3981884 - RNA, 21 nt, Human herpesvirus 5
uaccuaugcgccguagguucu

SEQ ID NO: 3981885 - RNA, 12 nt, Human herpesvirus 5
uaccugggcugc

SEQ ID NO: 3981886 - RNA, 22 nt, Human herpesvirus 5
uacgaccuguuuaccucaugcg

SEQ ID NO: 3981887 - RNA, 20 nt, Human herpesvirus 5
uacgauaauugcuacgucac

SEQ ID NO: 3981888 - RNA, 17 nt, Human herpesvirus 5
uacgucgcuuuuuacuu

SEQ ID NO: 3981889 - RNA, 15 nt, Human herpesvirus 5
uacuaacgucacauu

SEQ ID NO: 3981890 - RNA, 21 nt, Human herpesvirus 5
uacuagggaaaacauaagaau

SEQ ID NO: 3981891 - RNA, 18 nt, Human herpesvirus 5
uacucguguuuuuuauuc

SEQ ID NO: 3981892 - RNA, 15 nt, Human herpesvirus 5
uagacagacaggaca

SEQ ID NO: 3981893 - RNA, 17 nt, Human herpesvirus 5
uagacauuccccaccuu

SEQ ID NO: 3981894 - RNA, 20 nt, Human herpesvirus 5
uagacauuccccaccuuccc

SEQ ID NO: 3981895 - RNA, 15 nt, Human herpesvirus 5
uagcaaguccuccaa

SEQ ID NO: 3981896 - RNA, 16 nt, Human herpesvirus 5
uagccuuucugaccuu

SEQ ID NO: 3981897 - RNA, 17 nt, Human herpesvirus 5
uagcuuuuuuuauacau

SEQ ID NO: 3981898 - RNA, 13 nt, Human herpesvirus 5
uaggcgggcugga

SEQ ID NO: 3981899 - RNA, 13 nt, Human herpesvirus 5
uaguauucugcgu

SEQ ID NO: 3981900 - RNA, 15 nt, Human herpesvirus 5
uagugcgcgccgccg

SEQ ID NO: 3981901 - RNA, 14 nt, Human herpesvirus 5
uaguuguugcagaa

SEQ ID NO: 3981902 - RNA, 23 nt, Human herpesvirus 5
uauaagcguggauggucauauau

SEQ ID NO: 3981903 - RNA, 14 nt, Human herpesvirus 5
uauacaacaggugu

SEQ ID NO: 3981904 - RNA, 15 nt, Human herpesvirus 5
uauagacacacacca

SEQ ID NO: 3981905 - RNA, 22 nt, Human herpesvirus 5
uauaggcuaagcuauaccauca

SEQ ID NO: 3981906 - RNA, 16 nt, Human herpesvirus 5
uauaucuuucuacaag

SEQ ID NO: 3981907 - RNA, 23 nt, Human herpesvirus 5
uaucagaggccacccacccggug

SEQ ID NO: 3981908 - RNA, 19 nt, Human herpesvirus 5
uauccaacuucacuucaaa

SEQ ID NO: 3981909 - RNA, 23 nt, Human herpesvirus 5
uauccgaguccaccucugcuacu

SEQ ID NO: 3981910 - RNA, 15 nt, Human herpesvirus 5
uaucgggauaucgcc

SEQ ID NO: 3981911 - RNA, 12 nt, Human herpesvirus 5
uaucuggggagg

SEQ ID NO: 3981912 - RNA, 16 nt, Human herpesvirus 5
uaucuggggaggaggu

SEQ ID NO: 3981913 - RNA, 16 nt, Human herpesvirus 5
uaugauaucuacagca

SEQ ID NO: 3981914 - RNA, 20 nt, Human herpesvirus 5
uaugcaugucgcgacagaga

SEQ ID NO: 3981915 - RNA, 15 nt, Human herpesvirus 5
uaugccgucuucacu

SEQ ID NO: 3981916 - RNA, 12 nt, Human herpesvirus 5
uaugcgccgcca

SEQ ID NO: 3981917 - RNA, 14 nt, Human herpesvirus 5
uaugggcggugguc

SEQ ID NO: 3981918 - RNA, 20 nt, Human herpesvirus 5
uauuaauuuaacaagucacu

SEQ ID NO: 3981919 - RNA, 23 nt, Human herpesvirus 5
uauugagcaggguaaaaaccacg

SEQ ID NO: 3981920 - RNA, 20 nt, Human herpesvirus 5
uauugggaagggugugacug

SEQ ID NO: 3981921 - RNA, 17 nt, Human herpesvirus 5
uauugguucugggcgcg

SEQ ID NO: 3981922 - RNA, 15 nt, Human herpesvirus 5
uauuuuucagcucac

SEQ ID NO: 3981923 - RNA, 17 nt, Human herpesvirus 5
ucaaacaccgcugcggc

SEQ ID NO: 3981924 - RNA, 22 nt, Human herpesvirus 5
ucaacacggcauucucuacgaa

SEQ ID NO: 3981925 - RNA, 21 nt, Human herpesvirus 5
ucaacgguggaauucgcuggg

SEQ ID NO: 3981926 - RNA, 22 nt, Human herpesvirus 5
ucaagaucguacccaccaccuc

SEQ ID NO: 3981927 - RNA, 22 nt, Human herpesvirus 5
ucacacaggccagcugccacca

SEQ ID NO: 3981928 - RNA, 13 nt, Human herpesvirus 5
ucacacuuaagaa

SEQ ID NO: 3981929 - RNA, 14 nt, Human herpesvirus 5
ucaccaccacggua

SEQ ID NO: 3981930 - RNA, 17 nt, Human herpesvirus 5
ucaccacgcagcaggcu

SEQ ID NO: 3981931 - RNA, 16 nt, Human herpesvirus 5
ucaccagacuuuuugc

SEQ ID NO: 3981932 - RNA, 16 nt, Human herpesvirus 5
ucacccggcugcuggc

SEQ ID NO: 3981933 - RNA, 15 nt, Human herpesvirus 5
ucacgaggaccauuu

SEQ ID NO: 3981934 - RNA, 22 nt, Human herpesvirus 5
ucacgaucgcuggugucucugc

SEQ ID NO: 3981935 - RNA, 13 nt, Human herpesvirus 5
ucacgcaggugag

SEQ ID NO: 3981936 - RNA, 18 nt, Human herpesvirus 5
ucacgggacccgccgccg

SEQ ID NO: 3981937 - RNA, 22 nt, Human herpesvirus 5
ucacgggcucguguggcagcug

SEQ ID NO: 3981938 - RNA, 14 nt, Human herpesvirus 5
ucacuacucuggga

SEQ ID NO: 3981939 - RNA, 13 nt, Human herpesvirus 5
ucacuaucuucaa

SEQ ID NO: 3981940 - RNA, 21 nt, Human herpesvirus 5
ucagaaagcaccagaacccgu

SEQ ID NO: 3981941 - RNA, 15 nt, Human herpesvirus 5
ucagaccgcaacaac

SEQ ID NO: 3981942 - RNA, 16 nt, Human herpesvirus 5
ucagcaugguggccaa

SEQ ID NO: 3981943 - RNA, 13 nt, Human herpesvirus 5
ucagccgccgccu

SEQ ID NO: 3981944 - RNA, 14 nt, Human herpesvirus 5
ucagccgccgccuc

SEQ ID NO: 3981945 - RNA, 17 nt, Human herpesvirus 5
ucagcuaccgccgcaac

SEQ ID NO: 3981946 - RNA, 20 nt, Human herpesvirus 5
ucagcuggcuuucagcuucg

SEQ ID NO: 3981947 - RNA, 15 nt, Human herpesvirus 5
ucagcuugcccgacc

SEQ ID NO: 3981948 - RNA, 14 nt, Human herpesvirus 5
ucagguggaugagg

SEQ ID NO: 3981949 - RNA, 16 nt, Human herpesvirus 5
ucaguccauugucagu

SEQ ID NO: 3981950 - RNA, 20 nt, Human herpesvirus 5
ucaguguacacgcgcccaga

SEQ ID NO: 3981951 - RNA, 21 nt, Human herpesvirus 5
ucauauacgguacacgucccc

SEQ ID NO: 3981952 - RNA, 21 nt, Human herpesvirus 5
ucauauagccuccggcuguca

SEQ ID NO: 3981953 - RNA, 15 nt, Human herpesvirus 5
uccacaaccugugga

SEQ ID NO: 3981954 - RNA, 21 nt, Human herpesvirus 5
uccacaggcgcguuggacggg

SEQ ID NO: 3981955 - RNA, 20 nt, Human herpesvirus 5
uccacgacucgcacggccug

SEQ ID NO: 3981956 - RNA, 14 nt, Human herpesvirus 5
uccacggccuccga

SEQ ID NO: 3981957 - RNA, 14 nt, Human herpesvirus 5
uccagcaccacguc

SEQ ID NO: 3981958 - RNA, 18 nt, Human herpesvirus 5
uccagcggccgcaguggg

SEQ ID NO: 3981959 - RNA, 14 nt, Human herpesvirus 5
uccaucgcagccac

SEQ ID NO: 3981960 - RNA, 21 nt, Human herpesvirus 5
uccauuucgcaggagcugcug

SEQ ID NO: 3981961 - RNA, 16 nt, Human herpesvirus 5
ucccacaggagucucu

SEQ ID NO: 3981962 - RNA, 18 nt, Human herpesvirus 5
ucccacaggagucucugg

SEQ ID NO: 3981963 - RNA, 21 nt, Human herpesvirus 5
ucccacuacacuauguucgug

SEQ ID NO: 3981964 - RNA, 13 nt, Human herpesvirus 5
ucccaucuucuaa

SEQ ID NO: 3981965 - RNA, 23 nt, Human herpesvirus 5
uccccacccaguagacagacagg

SEQ ID NO: 3981966 - RNA, 17 nt, Human herpesvirus 5
uccccgaauuugggcgg

SEQ ID NO: 3981967 - RNA, 19 nt, Human herpesvirus 5
uccccgcaaacucccacuc

SEQ ID NO: 3981968 - RNA, 14 nt, Human herpesvirus 5
uccccgugugaugu

SEQ ID NO: 3981969 - RNA, 12 nt, Human herpesvirus 5
uccccuaacguc

SEQ ID NO: 3981970 - RNA, 11 nt, Human herpesvirus 5
uccccugccua

SEQ ID NO: 3981971 - RNA, 23 nt, Human herpesvirus 5
ucccgacaggcucgucgugggcu

SEQ ID NO: 3981972 - RNA, 19 nt, Human herpesvirus 5
ucccgguauucggaaacag

SEQ ID NO: 3981973 - RNA, 15 nt, Human herpesvirus 5
ucccgucccucuccu

SEQ ID NO: 3981974 - RNA, 12 nt, Human herpesvirus 5
ucccucagccuc

SEQ ID NO: 3981975 - RNA, 15 nt, Human herpesvirus 5
ucccucgcgccgccc

SEQ ID NO: 3981976 - RNA, 18 nt, Human herpesvirus 5
uccgacagcgcgacgagc

SEQ ID NO: 3981977 - RNA, 23 nt, Human herpesvirus 5
uccgaccgggaaaccacgccggc

SEQ ID NO: 3981978 - RNA, 23 nt, Human herpesvirus 5
uccgccgucggugcgcccaucug

SEQ ID NO: 3981979 - RNA, 16 nt, Human herpesvirus 5
uccgccuccacuuccg

SEQ ID NO: 3981980 - RNA, 22 nt, Human herpesvirus 5
uccggcaagaugcucgggauac

SEQ ID NO: 3981981 - RNA, 18 nt, Human herpesvirus 5
uccggcgucgcuggcgcu

SEQ ID NO: 3981982 - RNA, 21 nt, Human herpesvirus 5
uccguccucgucgccuuccag

SEQ ID NO: 3981983 - RNA, 14 nt, Human herpesvirus 5
uccgugccagcugg

SEQ ID NO: 3981984 - RNA, 16 nt, Human herpesvirus 5
uccuccuucuuccucg

SEQ ID NO: 3981985 - RNA, 18 nt, Human herpesvirus 5
uccucggagcacgggcga

SEQ ID NO: 3981986 - RNA, 14 nt, Human herpesvirus 5
uccucggugcccgc

SEQ ID NO: 3981987 - RNA, 15 nt, Human herpesvirus 5
uccuucaugauggag

SEQ ID NO: 3981988 - RNA, 18 nt, Human herpesvirus 5
ucgaccggcggcugcugu

SEQ ID NO: 3981989 - RNA, 19 nt, Human herpesvirus 5
ucgaccuugagcgacagca

SEQ ID NO: 3981990 - RNA, 22 nt, Human herpesvirus 5
ucgaccuugagcgacagcagca

SEQ ID NO: 3981991 - RNA, 20 nt, Human herpesvirus 5
ucgagaccgaagacgccguc

SEQ ID NO: 3981992 - RNA, 16 nt, Human herpesvirus 5
ucgagccaagucgccg

SEQ ID NO: 3981993 - RNA, 19 nt, Human herpesvirus 5
ucgagucgcguguguuuug

SEQ ID NO: 3981994 - RNA, 14 nt, Human herpesvirus 5
ucgaugaagccuau

SEQ ID NO: 3981995 - RNA, 14 nt, Human herpesvirus 5
ucgcagccuccucg

SEQ ID NO: 3981996 - RNA, 16 nt, Human herpesvirus 5
ucgccaagaugcugcg

SEQ ID NO: 3981997 - RNA, 20 nt, Human herpesvirus 5
ucgccacgguuuguggcaag

SEQ ID NO: 3981998 - RNA, 16 nt, Human herpesvirus 5
ucgccgucacugccac

SEQ ID NO: 3981999 - RNA, 22 nt, Human herpesvirus 5
ucgccuuccagcuuaccgccac

SEQ ID NO: 3982000 - RNA, 19 nt, Human herpesvirus 5
cguucagucgcggcugagc

SEQ ID NO: 3982001 - RNA, 15 nt, Human herpesvirus 5
cguucgcaugucguc

SEQ ID NO: 3982002 - RNA, 20 nt, Human herpesvirus 5
cguugucuauccccaaaaaa

SEQ ID NO: 3982003 - RNA, 15 nt, Human herpesvirus 5
cuaaagcucgccaac

SEQ ID NO: 3982004 - RNA, 15 nt, Human herpesvirus 5
cuaagaggauacauc

SEQ ID NO: 3982005 - RNA, 19 nt, Human herpesvirus 5
cuaaucgcauccugcauca

SEQ ID NO: 3982006 - RNA, 11 nt, Human herpesvirus 5
cuaaugugcug

SEQ ID NO: 3982007 - RNA, 22 nt, Human herpesvirus 5
cuacacuuggugcucgaccagg

SEQ ID NO: 3982008 - RNA, 15 nt, Human herpesvirus 5
cuacagacugggcga

SEQ ID NO: 3982009 - RNA, 22 nt, Human herpesvirus 5
cuacauauuuuccauaaaucua

SEQ ID NO: 3982010 - RNA, 19 nt, Human herpesvirus 5
cuaccaacgcuuccugcgc

SEQ ID NO: 3982011 - RNA, 23 nt, Human herpesvirus 5
cuaccaauaaagauaaucugcca

SEQ ID NO: 3982012 - RNA, 14 nt, Human herpesvirus 5
cuaccaugcgcaac

SEQ ID NO: 3982013 - RNA, 16 nt, Human herpesvirus 5
cuaccgccgcaacagc

SEQ ID NO: 3982014 - RNA, 15 nt, Human herpesvirus 5
cuaccuagagaggcu

SEQ ID NO: 3982015 - RNA, 20 nt, Human herpesvirus 5
cuaccuuguaccaacugagc

SEQ ID NO: 3982016 - RNA, 20 nt, Human herpesvirus 5
cuacgaucgcuggaaagaca

SEQ ID NO: 3982017 - RNA, 15 nt, Human herpesvirus 5
cuacgaugcgagcca

SEQ ID NO: 3982018 - RNA, 15 nt, Human herpesvirus 5
cuacuaccuccccua

SEQ ID NO: 3982019 - RNA, 13 nt, Human herpesvirus 5
cuacucugggaua

SEQ ID NO: 3982020 - RNA, 13 nt, Human herpesvirus 5
cuagagacagacg

SEQ ID NO: 3982021 - RNA, 22 nt, Human herpesvirus 5
cuaguaaaaaaagugcgucaaa

SEQ ID NO: 3982022 - RNA, 20 nt, Human herpesvirus 5
cuaucuucaaccucacguua

SEQ ID NO: 3982023 - RNA, 13 nt, Human herpesvirus 5
cuaugaggacgac

SEQ ID NO: 3982024 - RNA, 22 nt, Human herpesvirus 5
cuauugcuuagcugcacaccag

SEQ ID NO: 3982025 - RNA, 22 nt, Human herpesvirus 5
cuauuucgcgauccgcucacca

SEQ ID NO: 3982026 - RNA, 19 nt, Human herpesvirus 5
cucaaaacaucaccaccau

SEQ ID NO: 3982027 - RNA, 17 nt, Human herpesvirus 5
cucaagucgcguccggg

SEQ ID NO: 3982028 - RNA, 17 nt, Human herpesvirus 5
cucacagucuaucccua

SEQ ID NO: 3982029 - RNA, 14 nt, Human herpesvirus 5
cucaccaaagccgc

SEQ ID NO: 3982030 - RNA, 19 nt, Human herpesvirus 5
cucaccuggaccgguggua

SEQ ID NO: 3982031 - RNA, 22 nt, Human herpesvirus 5
cucacgucguugggaaugucca

SEQ ID NO: 3982032 - RNA, 20 nt, Human herpesvirus 5
cucagcgugcucagcuggug

SEQ ID NO: 3982033 - RNA, 15 nt, Human herpesvirus 5
cucaggccacccgcc

SEQ ID NO: 3982034 - RNA, 21 nt, Human herpesvirus 5
cucagguuccccgagagggug

SEQ ID NO: 3982035 - RNA, 13 nt, Human herpesvirus 5
cucaucucagccu

SEQ ID NO: 3982036 - RNA, 14 nt, Human herpesvirus 5
cucaucucagccuc

SEQ ID NO: 3982037 - RNA, 19 nt, Human herpesvirus 5
cuccaggcggagaugagga

SEQ ID NO: 3982038 - RNA, 14 nt, Human herpesvirus 5
cuccaguccauaug

SEQ ID NO: 3982039 - RNA, 17 nt, Human herpesvirus 5
cuccaucuauuggcaga

SEQ ID NO: 3982040 - RNA, 17 nt, Human herpesvirus 5
cuccgacauucgcgucg

SEQ ID NO: 3982041 - RNA, 18 nt, Human herpesvirus 5
cuccgacgacgccgagga

SEQ ID NO: 3982042 - RNA, 22 nt, Human herpesvirus 5
cuccgcaagcgccgccaacgcg

SEQ ID NO: 3982043 - RNA, 15 nt, Human herpesvirus 5
cuccuccaccacggc

SEQ ID NO: 3982044 - RNA, 18 nt, Human herpesvirus 5
cuccucccucgcgccgcc

SEQ ID NO: 3982045 - RNA, 17 nt, Human herpesvirus 5
cuccuccgcgaacggcg

SEQ ID NO: 3982046 - RNA, 12 nt, Human herpesvirus 5
cuccuccucccu

SEQ ID NO: 3982047 - RNA, 14 nt, Human herpesvirus 5
cuccuccucccucg

SEQ ID NO: 3982048 - RNA, 14 nt, Human herpesvirus 5
cuccucuaccccgc

SEQ ID NO: 3982049 - RNA, 21 nt, Human herpesvirus 5
cuccuguuggcuuacugccug

SEQ ID NO: 3982050 - RNA, 15 nt, Human herpesvirus 5
cucgcacggccugug

SEQ ID NO: 3982051 - RNA, 15 nt, Human herpesvirus 5
cucgccgacguggug

SEQ ID NO: 3982052 - RNA, 21 nt, Human herpesvirus 5
cucgcgacgagggucugcgcg

SEQ ID NO: 3982053 - RNA, 22 nt, Human herpesvirus 5
cucgcucacgucguugggaaug

SEQ ID NO: 3982054 - RNA, 16 nt, Human herpesvirus 5
cucgcucgcgcccgcu

SEQ ID NO: 3982055 - RNA, 19 nt, Human herpesvirus 5
cucgcucuacgcgugcacg

SEQ ID NO: 3982056 - RNA, 12 nt, Human herpesvirus 5
cucgcugggcua

SEQ ID NO: 3982057 - RNA, 18 nt, Human herpesvirus 5
cucggaaacugugcguca

SEQ ID NO: 3982058 - RNA, 18 nt, Human herpesvirus 5
cucggagccgccgacgcu

SEQ ID NO: 3982059 - RNA, 22 nt, Human herpesvirus 5
cucggaucugcggcucaaacac

SEQ ID NO: 3982060 - RNA, 16 nt, Human herpesvirus 5
cucgggaaugccagag

SEQ ID NO: 3982061 - RNA, 17 nt, Human herpesvirus 5
cucgggccgaaccccgu

SEQ ID NO: 3982062 - RNA, 17 nt, Human herpesvirus 5
cucgggucggcuggucg

SEQ ID NO: 3982063 - RNA, 16 nt, Human herpesvirus 5
cucguaaacuuaugaa

SEQ ID NO: 3982064 - RNA, 14 nt, Human herpesvirus 5
cucgucgugcccgu

SEQ ID NO: 3982065 - RNA, 14 nt, Human herpesvirus 5
cucgugcgugucgc

SEQ ID NO: 3982066 - RNA, 21 nt, Human herpesvirus 5
cucgugugcuguugaccuggg

SEQ ID NO: 3982067 - RNA, 23 nt, Human herpesvirus 5
cucgugugcuguugaccugggua

SEQ ID NO: 3982068 - RNA, 14 nt, Human herpesvirus 5
cucguucccagcgc

SEQ ID NO: 3982069 - RNA, 22 nt, Human herpesvirus 5
cucguuguacgcauuacacagg

SEQ ID NO: 3982070 - RNA, 15 nt, Human herpesvirus 5
cucuacgagcugggc

SEQ ID NO: 3982071 - RNA, 13 nt, Human herpesvirus 5
cucuauacacaua

SEQ ID NO: 3982072 - RNA, 15 nt, Human herpesvirus 5
cucuaucugcgccag

SEQ ID NO: 3982073 - RNA, 15 nt, Human herpesvirus 5
cucugcuacuggccc

SEQ ID NO: 3982074 - RNA, 16 nt, Human herpesvirus 5
cucugcuucuuuucug

SEQ ID NO: 3982075 - RNA, 13 nt, Human herpesvirus 5
cucuggcccugcu

SEQ ID NO: 3982076 - RNA, 15 nt, Human herpesvirus 5
cucugggaagcugcg

SEQ ID NO: 3982077 - RNA, 15 nt, Human herpesvirus 5
cucugucggcgccgc

SEQ ID NO: 3982078 - RNA, 16 nt, Human herpesvirus 5
cucuguggacccugcg

SEQ ID NO: 3982079 - RNA, 20 nt, Human herpesvirus 5
cucuugcgcccucucggugu

SEQ ID NO: 3982080 - RNA, 20 nt, Human herpesvirus 5
cucuuggcgccgcggugguc

SEQ ID NO: 3982081 - RNA, 22 nt, Human herpesvirus 5
cugacguggugcgcugcguucg

SEQ ID NO: 3982082 - RNA, 20 nt, Human herpesvirus 5
cugagaacauguggaaauca

SEQ ID NO: 3982083 - RNA, 22 nt, Human herpesvirus 5
cugagaacauguggaaaucacc

SEQ ID NO: 3982084 - RNA, 22 nt, Human herpesvirus 5
cugagcuacgaugaccacgaag

SEQ ID NO: 3982085 - RNA, 22 nt, Human herpesvirus 5
cugaguucacgcgcggaaccca

SEQ ID NO: 3982086 - RNA, 17 nt, Human herpesvirus 5
cugaucacguuguccuu

SEQ ID NO: 3982087 - RNA, 19 nt, Human herpesvirus 5
cugcaacggcaucauguuc

SEQ ID NO: 3982088 - RNA, 22 nt, Human herpesvirus 5
cugcaagucccuggccccggcc

SEQ ID NO: 3982089 - RNA, 24 nt, Human herpesvirus 5
cugcacaccuauggcgccgugggu

SEQ ID NO: 3982090 - RNA, 17 nt, Human herpesvirus 5
cugcaccaggagggcuu

SEQ ID NO: 3982091 - RNA, 22 nt, Human herpesvirus 5
cugcacgacaucuuccgcgagc

SEQ ID NO: 3982092 - RNA, 13 nt, Human herpesvirus 5
cugcacgcucugu

SEQ ID NO: 3982093 - RNA, 15 nt, Human herpesvirus 5
cugcacguggccugg

SEQ ID NO: 3982094 - RNA, 16 nt, Human herpesvirus 5
cugcagaccgaggcgc

SEQ ID NO: 3982095 - RNA, 16 nt, Human herpesvirus 5
cugcagccggaggaag

SEQ ID NO: 3982096 - RNA, 19 nt, Human herpesvirus 5
cugcagcucgaacgucucu

SEQ ID NO: 3982097 - RNA, 16 nt, Human herpesvirus 5
cugcagguacggcccg

SEQ ID NO: 3982098 - RNA, 22 nt, Human herpesvirus 5
cugcagguacggcccggcagca

SEQ ID NO: 3982099 - RNA, 22 nt, Human herpesvirus 5
cugccaccgacauggagcccac

SEQ ID NO: 3982100 - RNA, 15 nt, Human herpesvirus 5
cugccgcgguacgca

SEQ ID NO: 3982101 - RNA, 22 nt, Human herpesvirus 5
cugccggucuacagacugggcg

SEQ ID NO: 3982102 - RNA, 23 nt, Human herpesvirus 5
cugccggucuacagacugggcga

SEQ ID NO: 3982103 - RNA, 18 nt, Human herpesvirus 5
cugccuauguaaggcggc

SEQ ID NO: 3982104 - RNA, 14 nt, Human herpesvirus 5
cugcgacacgugcu

SEQ ID NO: 3982105 - RNA, 16 nt, Human herpesvirus 5
cugcgacguggaggag

SEQ ID NO: 3982106 - RNA, 23 nt, Human herpesvirus 5
cugcgagaggaagucgaucugga

SEQ ID NO: 3982107 - RNA, 15 nt, Human herpesvirus 5
cugcgcccguuggug

SEQ ID NO: 3982108 - RNA, 18 nt, Human herpesvirus 5
cugcgccguuuugcuguc

SEQ ID NO: 3982109 - RNA, 15 nt, Human herpesvirus 5
cugcgcgccuccguc

SEQ ID NO: 3982110 - RNA, 14 nt, Human herpesvirus 5
cugcggccggccgc

SEQ ID NO: 3982111 - RNA, 15 nt, Human herpesvirus 5
cugcggcgacuggcg

SEQ ID NO: 3982112 - RNA, 22 nt, Human herpesvirus 5
cugcggcguaccuacggaccgc

SEQ ID NO: 3982113 - RNA, 18 nt, Human herpesvirus 5
cugcgguuaacccuagca

SEQ ID NO: 3982114 - RNA, 19 nt, Human herpesvirus 5
cugcgucgucaaggacggc

SEQ ID NO: 3982115 - RNA, 23 nt, Human herpesvirus 5
cugcuagaugaccauguucagcu

SEQ ID NO: 3982116 - RNA, 16 nt, Human herpesvirus 5
ccuggaucuuggcggc

SEQ ID NO: 3982117 - RNA, 18 nt, Human herpesvirus 5
ccuggccuucggcacgcu

SEQ ID NO: 3982118 - RNA, 23 nt, Human herpesvirus 5
ccuggggcugcugcugcacgggc

SEQ ID NO: 3982119 - RNA, 22 nt, Human herpesvirus 5
ccuggguacuuaugaggagcgc

SEQ ID NO: 3982120 - RNA, 14 nt, Human herpesvirus 5
ccuggucuggccca

SEQ ID NO: 3982121 - RNA, 15 nt, Human herpesvirus 5
ccugguugcugccgc

SEQ ID NO: 3982122 - RNA, 19 nt, Human herpesvirus 5
ccugucgucgacaugucgc

SEQ ID NO: 3982123 - RNA, 15 nt, Human herpesvirus 5
ccuguugcucuccuc

SEQ ID NO: 3982124 - RNA, 16 nt, Human herpesvirus 5
ccuucggcacgcuggc

SEQ ID NO: 3982125 - RNA, 15 nt, Human herpesvirus 5
ccuugagcgacagca

SEQ ID NO: 3982126 - RNA, 16 nt, Human herpesvirus 5
ccuuggcgcucuggau

SEQ ID NO: 3982127 - RNA, 16 nt, Human herpesvirus 5
cgaaagacaaugaaaa

SEQ ID NO: 3982128 - RNA, 20 nt, Human herpesvirus 5
cgaagguuagcgccgcggca

SEQ ID NO: 3982129 - RNA, 20 nt, Human herpesvirus 5
cgacacacguucgacaugga

SEQ ID NO: 3982130 - RNA, 18 nt, Human herpesvirus 5
cgacagcgcgacgagcgc

SEQ ID NO: 3982131 - RNA, 13 nt, Human herpesvirus 5
cgacagcugcaau

SEQ ID NO: 3982132 - RNA, 14 nt, Human herpesvirus 5
cgacauggacauga

SEQ ID NO: 3982133 - RNA, 18 nt, Human herpesvirus 5
cgaccacgacacggugcu

SEQ ID NO: 3982134 - RNA, 19 nt, Human herpesvirus 5
cgaccuacgggacacgcug

SEQ ID NO: 3982135 - RNA, 15 nt, Human herpesvirus 5
cgacgaaggacggga

SEQ ID NO: 3982136 - RNA, 12 nt, Human herpesvirus 5
cgacgacccacc

SEQ ID NO: 3982137 - RNA, 15 nt, Human herpesvirus 5
cgacgagcgcugcga

SEQ ID NO: 3982138 - RNA, 22 nt, Human herpesvirus 5
cgacggucaccaucgugccgcu

SEQ ID NO: 3982139 - RNA, 18 nt, Human herpesvirus 5
cgacguaccagcugucca

SEQ ID NO: 3982140 - RNA, 18 nt, Human herpesvirus 5
cgacgucggucccaucgc

SEQ ID NO: 3982141 - RNA, 19 nt, Human herpesvirus 5
cgacguuucgcgaggacaa

SEQ ID NO: 3982142 - RNA, 17 nt, Human herpesvirus 5
cgacugcagcccaccgc

SEQ ID NO: 3982143 - RNA, 19 nt, Human herpesvirus 5
cgagaacuaauauugcaau

SEQ ID NO: 3982144 - RNA, 17 nt, Human herpesvirus 5
cgagagaugggccgcgg

SEQ ID NO: 3982145 - RNA, 17 nt, Human herpesvirus 5
cgagaugaaggaacgca

SEQ ID NO: 3982146 - RNA, 18 nt, Human herpesvirus 5
cgagcaccccgaacugga

SEQ ID NO: 3982147 - RNA, 12 nt, Human herpesvirus 5
cgagcgacgcgg

SEQ ID NO: 3982148 - RNA, 18 nt, Human herpesvirus 5
cgagcgcgaacgccgcgc

SEQ ID NO: 3982149 - RNA, 18 nt, Human herpesvirus 5
cgagcgcggcacgccguu

SEQ ID NO: 3982150 - RNA, 20 nt, Human herpesvirus 5
cgagcucgucgccagcgcga

SEQ ID NO: 3982151 - RNA, 19 nt, Human herpesvirus 5
cgagcuuauugagcgcagc

SEQ ID NO: 3982152 - RNA, 21 nt, Human herpesvirus 5
cgaggcggaggagccggcggc

SEQ ID NO: 3982153 - RNA, 20 nt, Human herpesvirus 5
cgaggcucucuauccggugg

SEQ ID NO: 3982154 - RNA, 21 nt, Human herpesvirus 5
cgaguacacguuaccgucgcc

SEQ ID NO: 3982155 - RNA, 20 nt, Human herpesvirus 5
cgaguaccgcagcgaguugc

SEQ ID NO: 3982156 - RNA, 15 nt, Human herpesvirus 5
cgaguccguccucga

SEQ ID NO: 3982157 - RNA, 17 nt, Human herpesvirus 5
cgaguggugaggagcgc

SEQ ID NO: 3982158 - RNA, 21 nt, Human herpesvirus 5
cgaguugcaaaagaagcugcc

SEQ ID NO: 3982159 - RNA, 16 nt, Human herpesvirus 5
cgaucaccagaaggcg

SEQ ID NO: 3982160 - RNA, 19 nt, Human herpesvirus 5
cgaugaaccuuccccaccc

SEQ ID NO: 3982161 - RNA, 12 nt, Human herpesvirus 5
cgaugauacauc

SEQ ID NO: 3982162 - RNA, 17 nt, Human herpesvirus 5
cgaugcugcaaggccuc

SEQ ID NO: 3982163 - RNA, 17 nt, Human herpesvirus 5
cgaugucaaggaacgcg

SEQ ID NO: 3982164 - RNA, 21 nt, Human herpesvirus 5
cgaugugugggaccuggucaa

SEQ ID NO: 3982165 - RNA, 23 nt, Human herpesvirus 5
cgcaaaucuacaacggccccugu

SEQ ID NO: 3982166 - RNA, 20 nt, Human herpesvirus 5
cgcaacagcggcgacagacg

SEQ ID NO: 3982167 - RNA, 15 nt, Human herpesvirus 5
cgcaagacgcgccuc

SEQ ID NO: 3982168 - RNA, 22 nt, Human herpesvirus 5
cgcaaugggcuucccuccugca

SEQ ID NO: 3982169 - RNA, 19 nt, Human herpesvirus 5
cgcacccuaaaacaccgug

SEQ ID NO: 3982170 - RNA, 15 nt, Human herpesvirus 5
cgcaccggcagcaca

SEQ ID NO: 3982171 - RNA, 21 nt, Human herpesvirus 5
cgcaccggcagcacaccugcc

SEQ ID NO: 3982172 - RNA, 14 nt, Human herpesvirus 5
cgcacgagacgcga

SEQ ID NO: 3982173 - RNA, 18 nt, Human herpesvirus 5
cgcacgcuggaggacgcg

SEQ ID NO: 3982174 - RNA, 19 nt, Human herpesvirus 5
cgcacuuuuuuuacuagua

SEQ ID NO: 3982175 - RNA, 21 nt, Human herpesvirus 5
cgcagcagagccaccaggugc

SEQ ID NO: 3982176 - RNA, 18 nt, Human herpesvirus 5
cgcagcgguggcuggaga

SEQ ID NO: 3982177 - RNA, 12 nt, Human herpesvirus 5
cgcagcugcugg

SEQ ID NO: 3982178 - RNA, 15 nt, Human herpesvirus 5
cgcaggucacacugg

SEQ ID NO: 3982179 - RNA, 17 nt, Human herpesvirus 5
cgcagucagacccacua

SEQ ID NO: 3982180 - RNA, 19 nt, Human herpesvirus 5
cgcagugcguggccgcaca

SEQ ID NO: 3982181 - RNA, 17 nt, Human herpesvirus 5
cgcaucacccgccucau

SEQ ID NO: 3982182 - RNA, 14 nt, Human herpesvirus 5
cgcauccugcccac

SEQ ID NO: 3982183 - RNA, 20 nt, Human herpesvirus 5
cgcaucugcaagucccuggc

SEQ ID NO: 3982184 - RNA, 19 nt, Human herpesvirus 5
cgccaacuaccgugccacc

SEQ ID NO: 3982185 - RNA, 18 nt, Human herpesvirus 5
cgccaccauagccacuac

SEQ ID NO: 3982186 - RNA, 21 nt, Human herpesvirus 5
cgccacggugcuuuucaucua

SEQ ID NO: 3982187 - RNA, 12 nt, Human herpesvirus 5
cgccagcgcgag

SEQ ID NO: 3982188 - RNA, 22 nt, Human herpesvirus 5
cgccagcgcggucgccaccugg

SEQ ID NO: 3982189 - RNA, 14 nt, Human herpesvirus 5
cgccagcguccgcg

SEQ ID NO: 3982190 - RNA, 16 nt, Human herpesvirus 5
cgcccgguaggucagc

SEQ ID NO: 3982191 - RNA, 15 nt, Human herpesvirus 5
cgccgaggcuacugc

SEQ ID NO: 3982192 - RNA, 23 nt, Human herpesvirus 5
cgccgaggcuacugcugcuucug

SEQ ID NO: 3982193 - RNA, 17 nt, Human herpesvirus 5
cgccgauagaggcgaca

SEQ ID NO: 3982194 - RNA, 23 nt, Human herpesvirus 5
cgccgccgaagccuggggcaccu

SEQ ID NO: 3982195 - RNA, 18 nt, Human herpesvirus 5
cgccgccgaagcuucgcg

SEQ ID NO: 3982196 - RNA, 13 nt, Human herpesvirus 5
cgccgccgucacc

SEQ ID NO: 3982197 - RNA, 16 nt, Human herpesvirus 5
cgccgccuccgcggcc

SEQ ID NO: 3982198 - RNA, 14 nt, Human herpesvirus 5
cgccgcgacaacgg

SEQ ID NO: 3982199 - RNA, 13 nt, Human herpesvirus 5
cgccgcucagguc

SEQ ID NO: 3982200 - RNA, 17 nt, Human herpesvirus 5
cgccgcucaggucgccc

SEQ ID NO: 3982201 - RNA, 15 nt, Human herpesvirus 5
cgccggacgagcugg

SEQ ID NO: 3982202 - RNA, 15 nt, Human herpesvirus 5
cgccggcgggcggcu

SEQ ID NO: 3982203 - RNA, 17 nt, Human herpesvirus 5
cgccggcuugcuccucu

SEQ ID NO: 3982204 - RNA, 21 nt, Human herpesvirus 5
cgccguacggcaacgagcagg

SEQ ID NO: 3982205 - RNA, 13 nt, Human herpesvirus 5
cgccgucacuucc

SEQ ID NO: 3982206 - RNA, 13 nt, Human herpesvirus 5
cgccguccugcag

SEQ ID NO: 3982207 - RNA, 19 nt, Human herpesvirus 5
cgccgucucgucacacggc

SEQ ID NO: 3982208 - RNA, 18 nt, Human herpesvirus 5
cgccguguguuaccgccg

SEQ ID NO: 3982209 - RNA, 18 nt, Human herpesvirus 5
cgccguucggcucuccuc

SEQ ID NO: 3982210 - RNA, 19 nt, Human herpesvirus 5
cgccguugcggccgccgcu

SEQ ID NO: 3982211 - RNA, 20 nt, Human herpesvirus 5
cgccguuuugcuguccucgu

SEQ ID NO: 3982212 - RNA, 19 nt, Human herpesvirus 5
cgccuaccuuagaccgaca

SEQ ID NO: 3982213 - RNA, 20 nt, Human herpesvirus 5
cgccucauggcggcggccac

SEQ ID NO: 3982214 - RNA, 16 nt, Human herpesvirus 5
cgccuuccuccucugc

SEQ ID NO: 3982215 - RNA, 16 nt, Human herpesvirus 5
cgcgacacacguucga

SEQ ID NO: 3982216 - RNA, 20 nt, Human herpesvirus 5
cgcgaccgggaucacgacga

SEQ ID NO: 3982217 - RNA, 14 nt, Human herpesvirus 5
cgcgagcggcggac

SEQ ID NO: 3982218 - RNA, 22 nt, Human herpesvirus 5
cgcgagcggcggacuuggcagc

SEQ ID NO: 3982219 - RNA, 14 nt, Human herpesvirus 5
cgcgagcuggccag

SEQ ID NO: 3982220 - RNA, 18 nt, Human herpesvirus 5
cgcgagcuggccagcaaa

SEQ ID NO: 3982221 - RNA, 11 nt, Human herpesvirus 5
cgcgagcuggg

SEQ ID NO: 3982222 - RNA, 14 nt, Human herpesvirus 5
cgcgauccgcucac

SEQ ID NO: 3982223 - RNA, 16 nt, Human herpesvirus 5
cgcgcaagugccugca

SEQ ID NO: 3982224 - RNA, 15 nt, Human herpesvirus 5
cgcgcagcgcgcuuu

SEQ ID NO: 3982225 - RNA, 16 nt, Human herpesvirus 5
cgcgcaucgccugcac

SEQ ID NO: 3982226 - RNA, 19 nt, Human herpesvirus 5
cgcgccacaacgccguccg

SEQ ID NO: 3982227 - RNA, 16 nt, Human herpesvirus 5
cgcgccacacgcugag

SEQ ID NO: 3982228 - RNA, 22 nt, Human herpesvirus 5
cgcgcccacgguccgggcacaa

SEQ ID NO: 3982229 - RNA, 18 nt, Human herpesvirus 5
cgcgccucacgcugcacg

SEQ ID NO: 3982230 - RNA, 19 nt, Human herpesvirus 5
cgcgccucacgcugcacga

SEQ ID NO: 3982231 - RNA, 12 nt, Human herpesvirus 5
cgcgcgaccgcg

SEQ ID NO: 3982232 - RNA, 13 nt, Human herpesvirus 5
cgcgcgcccgcgc

SEQ ID NO: 3982233 - RNA, 22 nt, Human herpesvirus 5
cgcgcgucuggucaacugcgug

SEQ ID NO: 3982234 - RNA, 14 nt, Human herpesvirus 5
cgcgcugcuccucg

SEQ ID NO: 3982235 - RNA, 16 nt, Human herpesvirus 5
cgcgcugcuccucgga

SEQ ID NO: 3982236 - RNA, 14 nt, Human herpesvirus 5
cgcgcuuuugaccg

SEQ ID NO: 3982237 - RNA, 16 nt, Human herpesvirus 5
cgcggaaacgacggac

SEQ ID NO: 3982238 - RNA, 23 nt, Human herpesvirus 5
cgcggaacgagagcgguccgccc

SEQ ID NO: 3982239 - RNA, 15 nt, Human herpesvirus 5
cgcggaggacagcaa

SEQ ID NO: 3982240 - RNA, 13 nt, Human herpesvirus 5
cgcggccgucacg

SEQ ID NO: 3982241 - RNA, 19 nt, Human herpesvirus 5
cgcggccugcugcgcaaua

SEQ ID NO: 3982242 - RNA, 15 nt, Human herpesvirus 5
cgcggcgacgggugg

SEQ ID NO: 3982243 - RNA, 14 nt, Human herpesvirus 5
cgcggcgcguuguc

SEQ ID NO: 3982244 - RNA, 14 nt, Human herpesvirus 5
cgcggcgugaccac

SEQ ID NO: 3982245 - RNA, 22 nt, Human herpesvirus 5
cgcggcuacguacgacugcgcg

SEQ ID NO: 3982246 - RNA, 19 nt, Human herpesvirus 5
cgcgguagcgaggcggcaa

SEQ ID NO: 3982247 - RNA, 23 nt, Human herpesvirus 5
cgcgguggcggccgcagaaggcc

SEQ ID NO: 3982248 - RNA, 14 nt, Human herpesvirus 5
cgcgguuaagggag

SEQ ID NO: 3982249 - RNA, 16 nt, Human herpesvirus 5
cgcgguuucgccgccg

SEQ ID NO: 3982250 - RNA, 18 nt, Human herpesvirus 5
cgcguagccaccuguugg

SEQ ID NO: 3982251 - RNA, 16 nt, Human herpesvirus 5
cgcguagcgcuccugg

SEQ ID NO: 3982252 - RNA, 21 nt, Human herpesvirus 5
cgcgucccaccccccgggcca

SEQ ID NO: 3982253 - RNA, 23 nt, Human herpesvirus 5
cgcgucgcuucgccgccaccuuc

SEQ ID NO: 3982254 - RNA, 20 nt, Human herpesvirus 5
cgcgucggcguaacaacggc

SEQ ID NO: 3982255 - RNA, 17 nt, Human herpesvirus 5
cgcgugcacgcgcugcu

SEQ ID NO: 3982256 - RNA, 15 nt, Human herpesvirus 5
cgcgugccugggaac

SEQ ID NO: 3982257 - RNA, 19 nt, Human herpesvirus 5
cgcguguaggcgacuggcu

SEQ ID NO: 3982258 - RNA, 13 nt, Human herpesvirus 5
cgcgugucccugc

SEQ ID NO: 3982259 - RNA, 14 nt, Human herpesvirus 5
cgcuaagagcuuug

SEQ ID NO: 3982260 - RNA, 19 nt, Human herpesvirus 5
cgcuacgucggccaacaac

SEQ ID NO: 3982261 - RNA, 18 nt, Human herpesvirus 5
cgcuacugaucgccugga

SEQ ID NO: 3982262 - RNA, 15 nt, Human herpesvirus 5
cgcuauggcggccau

SEQ ID NO: 3982263 - RNA, 12 nt, Human herpesvirus 5
cgcucacagucu

SEQ ID NO: 3982264 - RNA, 23 nt, Human herpesvirus 5
cgcucacagucuaucccuauggc

SEQ ID NO: 3982265 - RNA, 16 nt, Human herpesvirus 5
cgcucagcgagcucgu

SEQ ID NO: 3982266 - RNA, 18 nt, Human herpesvirus 5
cgcucgugaaacagcagc

SEQ ID NO: 3982267 - RNA, 20 nt, Human herpesvirus 5
cgcucucgucaggcuuguca

SEQ ID NO: 3982268 - RNA, 16 nt, Human herpesvirus 5
cgcucugacgccgcgc

SEQ ID NO: 3982269 - RNA, 15 nt, Human herpesvirus 5
cgcucugccggcugc

SEQ ID NO: 3982270 - RNA, 20 nt, Human herpesvirus 5
cgcugacguugaugcggcgc

SEQ ID NO: 3982271 - RNA, 18 nt, Human herpesvirus 5
cgcugauaacgacguggu

SEQ ID NO: 3982272 - RNA, 13 nt, Human herpesvirus 5
cgcugcccgacca

SEQ ID NO: 3982273 - RNA, 20 nt, Human herpesvirus 5
cgcugcuucauccagcuccg

SEQ ID NO: 3982274 - RNA, 21 nt, Human herpesvirus 5
cgcugcuuucgcacgcaccug

SEQ ID NO: 3982275 - RNA, 15 nt, Human herpesvirus 5
cgcuggaggccuccu

SEQ ID NO: 3982276 - RNA, 23 nt, Human herpesvirus 5
cgcugguggccgaacagcagcuc

SEQ ID NO: 3982277 - RNA, 18 nt, Human herpesvirus 5
cgcuucaacgccugcacc

SEQ ID NO: 3982278 - RNA, 17 nt, Human herpesvirus 5
cgcuuccucagcuugcc

SEQ ID NO: 3982279 - RNA, 15 nt, Human herpesvirus 5
cgcuucggcacccca

SEQ ID NO: 3982280 - RNA, 18 nt, Human herpesvirus 5
cgcuucugcagcuccgcg

SEQ ID NO: 3982281 - RNA, 15 nt, Human herpesvirus 5
cgcuuucccaccgcg

SEQ ID NO: 3982282 - RNA, 12 nt, Human herpesvirus 5
cggaagaagaag

SEQ ID NO: 3982283 - RNA, 17 nt, Human herpesvirus 5
cggaaguuccgacgcga

SEQ ID NO: 3982284 - RNA, 17 nt, Human herpesvirus 5
cggaggagucugucgac

SEQ ID NO: 3982285 - RNA, 18 nt, Human herpesvirus 5
cggaggcgggguguuuuu

SEQ ID NO: 3982286 - RNA, 13 nt, Human herpesvirus 5
cggaucuacucau

SEQ ID NO: 3982287 - RNA, 21 nt, Human herpesvirus 5
cggauggcuuuugcgucgccc

SEQ ID NO: 3982288 - RNA, 17 nt, Human herpesvirus 5
cggcaagccgagcggga

SEQ ID NO: 3982289 - RNA, 21 nt, Human herpesvirus 5
cggcagauuuguucgggguga

SEQ ID NO: 3982290 - RNA, 14 nt, Human herpesvirus 5
cggcagccacggag

SEQ ID NO: 3982291 - RNA, 23 nt, Human herpesvirus 5
cggcagcuaucgugacugggagu

SEQ ID NO: 3982292 - RNA, 19 nt, Human herpesvirus 5
cggcagucuuuuccgugac

SEQ ID NO: 3982293 - RNA, 23 nt, Human herpesvirus 5
cggcauacaaugugcugcaugag

SEQ ID NO: 3982294 - RNA, 15 nt, Human herpesvirus 5
cggcauagugccagc

SEQ ID NO: 3982295 - RNA, 19 nt, Human herpesvirus 5
cggcaugccguuggcggcg

SEQ ID NO: 3982296 - RNA, 21 nt, Human herpesvirus 5
cggccaacaugcccagcaucu

SEQ ID NO: 3982297 - RNA, 21 nt, Human herpesvirus 5
cggcccucucgcgcccgcaga

SEQ ID NO: 3982298 - RNA, 13 nt, Human herpesvirus 5
cggccgaccccgc

SEQ ID NO: 3982299 - RNA, 22 nt, Human herpesvirus 5
cggccgcccguguccgugauga

SEQ ID NO: 3982300 - RNA, 13 nt, Human herpesvirus 5
cggccgccgcagc

SEQ ID NO: 3982301 - RNA, 15 nt, Human herpesvirus 5
cggccgcggaggugc

SEQ ID NO: 3982302 - RNA, 13 nt, Human herpesvirus 5
cggccgcggugcg

SEQ ID NO: 3982303 - RNA, 22 nt, Human herpesvirus 5
cggccgucacgacgcuccgucg

SEQ ID NO: 3982304 - RNA, 22 nt, Human herpesvirus 5
cggccgucgcaagggcugcucg

SEQ ID NO: 3982305 - RNA, 15 nt, Human herpesvirus 5
cggccgucuccacca

SEQ ID NO: 3982306 - RNA, 15 nt, Human herpesvirus 5
cggccgugguggccg

SEQ ID NO: 3982307 - RNA, 18 nt, Human herpesvirus 5
cggccgugguggccgugc

SEQ ID NO: 3982308 - RNA, 13 nt, Human herpesvirus 5
cggccugagcgcg

SEQ ID NO: 3982309 - RNA, 17 nt, Human herpesvirus 5
cggccuugcgcucccug

SEQ ID NO: 3982310 - RNA, 13 nt, Human herpesvirus 5
cggcgacaucacg

SEQ ID NO: 3982311 - RNA, 15 nt, Human herpesvirus 5
cggcgauaaccgccg

SEQ ID NO: 3982312 - RNA, 23 nt, Human herpesvirus 5
cggcgauggcggggcugguugcu

SEQ ID NO: 3982313 - RNA, 15 nt, Human herpesvirus 5
cggcgcccgggccgc

SEQ ID NO: 3982314 - RNA, 16 nt, Human herpesvirus 5
cggcgccggcgccugg

SEQ ID NO: 3982315 - RNA, 16 nt, Human herpesvirus 5
cggcgccgucagagca

SEQ ID NO: 3982316 - RNA, 12 nt, Human herpesvirus 5
cggcgccguccg

SEQ ID NO: 3982317 - RNA, 21 nt, Human herpesvirus 5
cggcgcguuguccucgcaccg

SEQ ID NO: 3982318 - RNA, 19 nt, Human herpesvirus 5
cggcgcugacagcccaagg

SEQ ID NO: 3982319 - RNA, 19 nt, Human herpesvirus 5
cggcgcuguacggcagcgg

SEQ ID NO: 3982320 - RNA, 15 nt, Human herpesvirus 5
cggcgcuucgagggc

SEQ ID NO: 3982321 - RNA, 15 nt, Human herpesvirus 5
cggcggcggugguga

SEQ ID NO: 3982322 - RNA, 21 nt, Human herpesvirus 5
cggcggcgugaccggcggugc

SEQ ID NO: 3982323 - RNA, 16 nt, Human herpesvirus 5
cggcgugacacagcac

SEQ ID NO: 3982324 - RNA, 17 nt, Human herpesvirus 5
cggcgugauugcaaagc

SEQ ID NO: 3982325 - RNA, 12 nt, Human herpesvirus 5
cggcguggucaa

SEQ ID NO: 3982326 - RNA, 15 nt, Human herpesvirus 5
cggcucaccacgcag

SEQ ID NO: 3982327 - RNA, 23 nt, Human herpesvirus 5
cggcuccaagugcaagcgccgcg

SEQ ID NO: 3982328 - RNA, 12 nt, Human herpesvirus 5
cggcucucaggc

SEQ ID NO: 3982329 - RNA, 15 nt, Human herpesvirus 5
cggcugcuguugcac

SEQ ID NO: 3982330 - RNA, 13 nt, Human herpesvirus 5
cggcugucauggg

SEQ ID NO: 3982331 - RNA, 17 nt, Human herpesvirus 5
cggcuguggcuucucug

SEQ ID NO: 3982332 - RNA, 14 nt, Human herpesvirus 5
cggcuugcaaaacu

SEQ ID NO: 3982333 - RNA, 14 nt, Human herpesvirus 5
cggcuugggcagca

SEQ ID NO: 3982334 - RNA, 14 nt, Human herpesvirus 5
cgggaacuggccug

SEQ ID NO: 3982335 - RNA, 15 nt, Human herpesvirus 5
cgggacccgccgccg

SEQ ID NO: 3982336 - RNA, 22 nt, Human herpesvirus 5
cgggacgauauaaagaggcacg

SEQ ID NO: 3982337 - RNA, 16 nt, Human herpesvirus 5
cgggacggccugggcg

SEQ ID NO: 3982338 - RNA, 17 nt, Human herpesvirus 5
cgggcacguucuuucca

SEQ ID NO: 3982339 - RNA, 17 nt, Human herpesvirus 5
cgggccgcgcuccaggc

SEQ ID NO: 3982340 - RNA, 22 nt, Human herpesvirus 5
cgggccgcgcuccaggcggaga

SEQ ID NO: 3982341 - RNA, 16 nt, Human herpesvirus 5
cgggccucggcuuggc

SEQ ID NO: 3982342 - RNA, 17 nt, Human herpesvirus 5
cgggcguuggccugugg

SEQ ID NO: 3982343 - RNA, 23 nt, Human herpesvirus 5
cgggcucguguggcagcuggcuu

SEQ ID NO: 3982344 - RNA, 17 nt, Human herpesvirus 5
cgggcuuuuuugucccg

SEQ ID NO: 3982345 - RNA, 17 nt, Human herpesvirus 5
cgggugccgggacagcg

SEQ ID NO: 3982346 - RNA, 23 nt, Human herpesvirus 5
cucgcguguuuugucugagcgcc

SEQ ID NO: 3982347 - RNA, 23 nt, Human herpesvirus 5
cucggcgugcucaggccacccgc

SEQ ID NO: 3982348 - RNA, 16 nt, Human herpesvirus 5
cucggguuccucggcc

SEQ ID NO: 3982349 - RNA, 20 nt, Human herpesvirus 5
cucggucaacgcguccagcu

SEQ ID NO: 3982350 - RNA, 15 nt, Human herpesvirus 5
cucgucgccagcgcg

SEQ ID NO: 3982351 - RNA, 16 nt, Human herpesvirus 5
cucguguggcagcugg

SEQ ID NO: 3982352 - RNA, 15 nt, Human herpesvirus 5
cucguucccagcgcg

SEQ ID NO: 3982353 - RNA, 17 nt, Human herpesvirus 5
cucguuguccucuccuc

SEQ ID NO: 3982354 - RNA, 16 nt, Human herpesvirus 5
cucuaccgcgacggcg

SEQ ID NO: 3982355 - RNA, 18 nt, Human herpesvirus 5
cucucuauccgguggcgc

SEQ ID NO: 3982356 - RNA, 15 nt, Human herpesvirus 5
cucugcaacgccugg

SEQ ID NO: 3982357 - RNA, 12 nt, Human herpesvirus 5
cucugcugcugg

SEQ ID NO: 3982358 - RNA, 16 nt, Human herpesvirus 5
cucuggcccugcugua

SEQ ID NO: 3982359 - RNA, 18 nt, Human herpesvirus 5
cucuugcgcuucugcagc

SEQ ID NO: 3982360 - RNA, 23 nt, Human herpesvirus 5
cugaacaauaaacuaaaacauuc

SEQ ID NO: 3982361 - RNA, 22 nt, Human herpesvirus 5
cugaagccgccgucgagccacu

SEQ ID NO: 3982362 - RNA, 14 nt, Human herpesvirus 5
cugaaucugcucca

SEQ ID NO: 3982363 - RNA, 14 nt, Human herpesvirus 5
cugacgcuggaaac

SEQ ID NO: 3982364 - RNA, 23 nt, Human herpesvirus 5
cugagccggggugccgccgcugc

SEQ ID NO: 3982365 - RNA, 20 nt, Human herpesvirus 5
cugaugccgaucaugugcuu

SEQ ID NO: 3982366 - RNA, 15 nt, Human herpesvirus 5
cugauguaccugcag

SEQ ID NO: 3982367 - RNA, 17 nt, Human herpesvirus 5
cugcaacgccuggcgug

SEQ ID NO: 3982368 - RNA, 13 nt, Human herpesvirus 5
cugcaccagcaac

SEQ ID NO: 3982369 - RNA, 17 nt, Human herpesvirus 5
cugcacgaccugcucca

SEQ ID NO: 3982370 - RNA, 19 nt, Human herpesvirus 5
cugcacgaccugcuccagu

SEQ ID NO: 3982371 - RNA, 22 nt, Human herpesvirus 5
cugccaacgccgucaaggccgc

SEQ ID NO: 3982372 - RNA, 22 nt, Human herpesvirus 5
cugcccuuuacggugcugcguc

SEQ ID NO: 3982373 - RNA, 14 nt, Human herpesvirus 5
cugccgcacgcgcu

SEQ ID NO: 3982374 - RNA, 19 nt, Human herpesvirus 5
cugccgcuacugaucgccu

SEQ ID NO: 3982375 - RNA, 20 nt, Human herpesvirus 5
cugccggcauguccggccgu

SEQ ID NO: 3982376 - RNA, 17 nt, Human herpesvirus 5
cugccucuccuccgucg

SEQ ID NO: 3982377 - RNA, 14 nt, Human herpesvirus 5
cugccugccgcacg

SEQ ID NO: 3982378 - RNA, 13 nt, Human herpesvirus 5
cugccuguuccug

SEQ ID NO: 3982379 - RNA, 18 nt, Human herpesvirus 5
cugccuguuccugcugcu

SEQ ID NO: 3982380 - RNA, 18 nt, Human herpesvirus 5
cugccuuacggcgaccgu

SEQ ID NO: 3982381 - RNA, 13 nt, Human herpesvirus 5
cugcgcgggcagc

SEQ ID NO: 3982382 - RNA, 14 nt, Human herpesvirus 5
cugcgcgggcagcc

SEQ ID NO: 3982383 - RNA, 22 nt, Human herpesvirus 5
cugcggaaugauuuggcugggu

SEQ ID NO: 3982384 - RNA, 18 nt, Human herpesvirus 5
cugcggacgccgacggcc

SEQ ID NO: 3982385 - RNA, 20 nt, Human herpesvirus 5
cugcggcggcuugggcagca

SEQ ID NO: 3982386 - RNA, 20 nt, Human herpesvirus 5
cugcgggcccacgguacgcc

SEQ ID NO: 3982387 - RNA, 14 nt, Human herpesvirus 5
cugcgggucauggg

SEQ ID NO: 3982388 - RNA, 17 nt, Human herpesvirus 5
cugcuauaagaaggcca

SEQ ID NO: 3982389 - RNA, 19 nt, Human herpesvirus 5
cugcucaaaguacuugucg

SEQ ID NO: 3982390 - RNA, 20 nt, Human herpesvirus 5
cugcugagacugagacuggu

SEQ ID NO: 3982391 - RNA, 20 nt, Human herpesvirus 5
cugcugcuacgcgguccguc

SEQ ID NO: 3982392 - RNA, 14 nt, Human herpesvirus 5
cugcuugcuggcuu

SEQ ID NO: 3982393 - RNA, 16 nt, Human herpesvirus 5
cugcuuuucgggccgc

SEQ ID NO: 3982394 - RNA, 22 nt, Human herpesvirus 5
cugcuuuuuugucuccugugga

SEQ ID NO: 3982395 - RNA, 15 nt, Human herpesvirus 5
cuggaagcugcuggu

SEQ ID NO: 3982396 - RNA, 22 nt, Human herpesvirus 5
cuggaccggugguacugcugug

SEQ ID NO: 3982397 - RNA, 21 nt, Human herpesvirus 5
cuggacgcggugaacgugcgc

SEQ ID NO: 3982398 - RNA, 19 nt, Human herpesvirus 5
cuggagaacaauaaagcgu

SEQ ID NO: 3982399 - RNA, 21 nt, Human herpesvirus 5
cuggaggacgcgcuggcuguc

SEQ ID NO: 3982400 - RNA, 16 nt, Human herpesvirus 5
cuggaucuuggcggcc

SEQ ID NO: 3982401 - RNA, 17 nt, Human herpesvirus 5
cuggccgccgcugcacg

SEQ ID NO: 3982402 - RNA, 13 nt, Human herpesvirus 5
cuggcggccgugg

SEQ ID NO: 3982403 - RNA, 21 nt, Human herpesvirus 5
cuggcguucaccacgccggcc

SEQ ID NO: 3982404 - RNA, 15 nt, Human herpesvirus 5
cugggcuacaagugc

SEQ ID NO: 3982405 - RNA, 22 nt, Human herpesvirus 5
cuggggucaaaagccuggguac

SEQ ID NO: 3982406 - RNA, 17 nt, Human herpesvirus 5
cugguauaaccagucau

SEQ ID NO: 3982407 - RNA, 13 nt, Human herpesvirus 5
cugucaccaccac

SEQ ID NO: 3982408 - RNA, 14 nt, Human herpesvirus 5
cugucugcagccgg

SEQ ID NO: 3982409 - RNA, 18 nt, Human herpesvirus 5
cuguggcuucucuggaga

SEQ ID NO: 3982410 - RNA, 23 nt, Human herpesvirus 5
cugugguguugccuucugcugcc

SEQ ID NO: 3982411 - RNA, 18 nt, Human herpesvirus 5
cuguguuauucagaacca

SEQ ID NO: 3982412 - RNA, 23 nt, Human herpesvirus 5
cuguuacugaaucuucuuuucau

SEQ ID NO: 3982413 - RNA, 20 nt, Human herpesvirus 5
cuguuugaauaccguaaaca

SEQ ID NO: 3982414 - RNA, 15 nt, Human herpesvirus 5
cuuacaaaucacguu

SEQ ID NO: 3982415 - RNA, 13 nt, Human herpesvirus 5
cuuaccggggacc

SEQ ID NO: 3982416 - RNA, 14 nt, Human herpesvirus 5
cuuagcuuucuuga

SEQ ID NO: 3982417 - RNA, 12 nt, Human herpesvirus 5
cuuauguuucug

SEQ ID NO: 3982418 - RNA, 14 nt, Human herpesvirus 5
cuuauucuagcccu

SEQ ID NO: 3982419 - RNA, 14 nt, Human herpesvirus 5
cuucacgccccuga

SEQ ID NO: 3982420 - RNA, 16 nt, Human herpesvirus 5
cuucagaaucuauaaa

SEQ ID NO: 3982421 - RNA, 13 nt, Human herpesvirus 5
cuucggagguccu

SEQ ID NO: 3982422 - RNA, 15 nt, Human herpesvirus 5
cuucggccggcugcu

SEQ ID NO: 3982423 - RNA, 18 nt, Human herpesvirus 5
cuucggccggcugcugca

SEQ ID NO: 3982424 - RNA, 13 nt, Human herpesvirus 5
cuucugcagcucc

SEQ ID NO: 3982425 - RNA, 14 nt, Human herpesvirus 5
cuucugcagcuccg

SEQ ID NO: 3982426 - RNA, 19 nt, Human herpesvirus 5
cuucuggagcacacugcua

SEQ ID NO: 3982427 - RNA, 20 nt, Human herpesvirus 5
cuucuuugccggcucuccuc

SEQ ID NO: 3982428 - RNA, 15 nt, Human herpesvirus 5
cuugacgcugcuggc

SEQ ID NO: 3982429 - RNA, 16 nt, Human herpesvirus 5
cuugagaaccugcuca

SEQ ID NO: 3982430 - RNA, 13 nt, Human herpesvirus 5
cuugcgcucccug

SEQ ID NO: 3982431 - RNA, 20 nt, Human herpesvirus 5
cuugcgcucggucagcuuga

SEQ ID NO: 3982432 - RNA, 19 nt, Human herpesvirus 5
cuugcggcgccgacuccuu

SEQ ID NO: 3982433 - RNA, 20 nt, Human herpesvirus 5
cuuggcggccgagucuccgc

SEQ ID NO: 3982434 - RNA, 20 nt, Human herpesvirus 5
cuuggguagcuucucucugg

SEQ ID NO: 3982435 - RNA, 18 nt, Human herpesvirus 5
cuuguucucgaccacgua

SEQ ID NO: 3982436 - RNA, 21 nt, Human herpesvirus 5
cuuucacaccgauuuucgcgg

SEQ ID NO: 3982437 - RNA, 22 nt, Human herpesvirus 5
cuuucaugaugacggugaggag

SEQ ID NO: 3982438 - RNA, 18 nt, Human herpesvirus 5
cuuugagcacaaacugcg

SEQ ID NO: 3982439 - RNA, 18 nt, Human herpesvirus 5
cuuuguagcgcucaaagg

SEQ ID NO: 3982440 - RNA, 19 nt, Human herpesvirus 5
cuuuuggugcgccacguag

SEQ ID NO: 3982441 - RNA, 11 nt, Human herpesvirus 5
cuuuuugcaaa

SEQ ID NO: 3982442 - RNA, 17 nt, Human herpesvirus 5
gaaaaaggguuucaagu

SEQ ID NO: 3982443 - RNA, 20 nt, Human herpesvirus 5
gaaaacgccggacgagcugg

SEQ ID NO: 3982444 - RNA, 22 nt, Human herpesvirus 5
gaaaacguacgugaucacggac

SEQ ID NO: 3982445 - RNA, 14 nt, Human herpesvirus 5
gaaacagcagcucg

SEQ ID NO: 3982446 - RNA, 22 nt, Human herpesvirus 5
gaaacuacgugcaacggcgacg

SEQ ID NO: 3982447 - RNA, 22 nt, Human herpesvirus 5
gaaagugauuauaucuuucuac

SEQ ID NO: 3982448 - RNA, 16 nt, Human herpesvirus 5
gaaaguuggcugcgcc

SEQ ID NO: 3982449 - RNA, 17 nt, Human herpesvirus 5
gaacaccagaugcuccc

SEQ ID NO: 3982450 - RNA, 15 nt, Human herpesvirus 5
gaaccgccgucgccg

SEQ ID NO: 3982451 - RNA, 21 nt, Human herpesvirus 5
gaaccgcucauauagaccaaa

SEQ ID NO: 3982452 - RNA, 14 nt, Human herpesvirus 5
gaacucagaggcca

SEQ ID NO: 3982453 - RNA, 18 nt, Human herpesvirus 5
gaacuggccuggcggcgg

SEQ ID NO: 3982454 - RNA, 23 nt, Human herpesvirus 5
gaacugguuuucggacagagcag

SEQ ID NO: 3982455 - RNA, 15 nt, Human herpesvirus 5
gaacuugagcacaaa

SEQ ID NO: 3982456 - RNA, 19 nt, Human herpesvirus 5
gaagacgccgucacgcagg

SEQ ID NO: 3982457 - RNA, 15 nt, Human herpesvirus 5
gaagcugcgcaggcc

SEQ ID NO: 3982458 - RNA, 22 nt, Human herpesvirus 5
gaaggcggcucgcuggaagccg

SEQ ID NO: 3982459 - RNA, 14 nt, Human herpesvirus 5
gaagggugugacug

SEQ ID NO: 3982460 - RNA, 12 nt, Human herpesvirus 5
gaugcaggaggu

SEQ ID NO: 3982461 - RNA, 12 nt, Human herpesvirus 5
gaugcgcacggc

SEQ ID NO: 3982462 - RNA, 15 nt, Human herpesvirus 5
gaugcuauccgcugc

SEQ ID NO: 3982463 - RNA, 20 nt, Human herpesvirus 5
gaugcuauccgcugcgacua

SEQ ID NO: 3982464 - RNA, 14 nt, Human herpesvirus 5
gauguaguugcaga

SEQ ID NO: 3982465 - RNA, 17 nt, Human herpesvirus 5
gaugugaguuucugugu

SEQ ID NO: 3982466 - RNA, 16 nt, Human herpesvirus 5
gcugcauaaagggcga

SEQ ID NO: 3982467 - RNA, 14 nt, Human herpesvirus 5
gcugccuguuccug

SEQ ID NO: 3982468 - RNA, 18 nt, Human herpesvirus 5
gcugccuguuccugcugc

SEQ ID NO: 3982469 - RNA, 18 nt, Human herpesvirus 5
gcugcgaagaugcuaucc

SEQ ID NO: 3982470 - RNA, 22 nt, Human herpesvirus 5
gcugcuagaugaccauguucag

SEQ ID NO: 3982471 - RNA, 22 nt, Human herpesvirus 5
gcugcucaaugccaccaugaac

SEQ ID NO: 3982472 - RNA, 22 nt, Human herpesvirus 5
gcugcuccucggagcacgggcg

SEQ ID NO: 3982473 - RNA, 14 nt, Human herpesvirus 5
gcugcugcacgggc

SEQ ID NO: 3982474 - RNA, 20 nt, Human herpesvirus 5
gcugcugcacgggcucgacc

SEQ ID NO: 3982475 - RNA, 18 nt, Human herpesvirus 5
gcugcuuaaugacagcga

SEQ ID NO: 3982476 - RNA, 22 nt, Human herpesvirus 5
gcuggaaguggaagcggugcug

SEQ ID NO: 3982477 - RNA, 17 nt, Human herpesvirus 5
gcuggccagcaaagugg

SEQ ID NO: 3982478 - RNA, 17 nt, Human herpesvirus 5
gcuggcgguauggcugc

SEQ ID NO: 3982479 - RNA, 17 nt, Human herpesvirus 5
gcuggcuuuccucgggc

SEQ ID NO: 3982480 - RNA, 21 nt, Human herpesvirus 5
gcuggugaucggccgcggugc

SEQ ID NO: 3982481 - RNA, 15 nt, Human herpesvirus 5
gcugguguugccgca

SEQ ID NO: 3982482 - RNA, 15 nt, Human herpesvirus 5
gcugguuuccccugc

SEQ ID NO: 3982483 - RNA, 13 nt, Human herpesvirus 5
gcuguaugggcag

SEQ ID NO: 3982484 - RNA, 22 nt, Human herpesvirus 5
gcugucccuuaucccguuacaa

SEQ ID NO: 3982485 - RNA, 20 nt, Human herpesvirus 5
gcugucuguuugucugugcg

SEQ ID NO: 3982486 - RNA, 15 nt, Human herpesvirus 5
gcugugcaacgcgug

SEQ ID NO: 3982487 - RNA, 17 nt, Human herpesvirus 5
gcuguggcuucucugga

SEQ ID NO: 3982488 - RNA, 18 nt, Human herpesvirus 5
gcuguuguugacgcugcu

SEQ ID NO: 3982489 - RNA, 17 nt, Human herpesvirus 5
gcuuaaagaugucgaug

SEQ ID NO: 3982490 - RNA, 18 nt, Human herpesvirus 5
gcuuaaaggcgcacuugu

SEQ ID NO: 3982491 - RNA, 20 nt, Human herpesvirus 5
gcuuacccuucaauuuccac

SEQ ID NO: 3982492 - RNA, 15 nt, Human herpesvirus 5
gcuuacugccugccg

SEQ ID NO: 3982493 - RNA, 17 nt, Human herpesvirus 5
gcuuaucugccucuucc

SEQ ID NO: 3982494 - RNA, 16 nt, Human herpesvirus 5
gcuucccuccugcagc

SEQ ID NO: 3982495 - RNA, 12 nt, Human herpesvirus 5
gcuucgccgcca

SEQ ID NO: 3982496 - RNA, 18 nt, Human herpesvirus 5
gcuucggccggcugcugc

SEQ ID NO: 3982497 - RNA, 14 nt, Human herpesvirus 5
gcuucugcagcucc

SEQ ID NO: 3982498 - RNA, 16 nt, Human herpesvirus 5
gccugguauacgaggc

SEQ ID NO: 3982499 - RNA, 14 nt, Human herpesvirus 5
gccuguggcaccgc

SEQ ID NO: 3982500 - RNA, 23 nt, Human herpesvirus 5
gccuguggugcgacugcggcgac

SEQ ID NO: 3982501 - RNA, 20 nt, Human herpesvirus 5
gccuuccagcuuaccgccac

SEQ ID NO: 3982502 - RNA, 16 nt, Human herpesvirus 5
gccuuccgcgugcucc

SEQ ID NO: 3982503 - RNA, 21 nt, Human herpesvirus 5
gccuucgcaaugucucaggca

SEQ ID NO: 3982504 - RNA, 23 nt, Human herpesvirus 5
gccuuuuuaauaaagucuggguu

SEQ ID NO: 3982505 - RNA, 23 nt, Human herpesvirus 5
gcgaaagcuucggccggcugcug

SEQ ID NO: 3982506 - RNA, 19 nt, Human herpesvirus 5
gcgaagcugcgcaggccgc

SEQ ID NO: 3982507 - RNA, 20 nt, Human herpesvirus 5
gcgacacacguucgacaugg

SEQ ID NO: 3982508 - RNA, 21 nt, Human herpesvirus 5
gcgacauuuugggucagcggc

SEQ ID NO: 3982509 - RNA, 23 nt, Human herpesvirus 5
gcgaccgccucaaaaagcaggug

SEQ ID NO: 3982510 - RNA, 20 nt, Human herpesvirus 5
gcgacgauaggucgaaagcc

SEQ ID NO: 3982511 - RNA, 13 nt, Human herpesvirus 5
gcgacggcagcgc

SEQ ID NO: 3982512 - RNA, 14 nt, Human herpesvirus 5
gcgacggguggcag

SEQ ID NO: 3982513 - RNA, 21 nt, Human herpesvirus 5
gcgacugcggcgacuggcgag

SEQ ID NO: 3982514 - RNA, 16 nt, Human herpesvirus 5
gcgagagaugggccgc

SEQ ID NO: 3982515 - RNA, 23 nt, Human herpesvirus 5
gcgagagcacugacagggguggc

SEQ ID NO: 3982516 - RNA, 18 nt, Human herpesvirus 5
gcgagccccaucgggccc

SEQ ID NO: 3982517 - RNA, 20 nt, Human herpesvirus 5
gcgagcggcggacuuggcag

SEQ ID NO: 3982518 - RNA, 16 nt, Human herpesvirus 5
gcgaguaucgggccgu

SEQ ID NO: 3982519 - RNA, 21 nt, Human herpesvirus 5
gcgccaguugucgcaggucca

SEQ ID NO: 3982520 - RNA, 16 nt, Human herpesvirus 5
gcgcccgacagcugca

SEQ ID NO: 3982521 - RNA, 22 nt, Human herpesvirus 5
gcgcccgagacggcggcauccu

SEQ ID NO: 3982522 - RNA, 13 nt, Human herpesvirus 5
gcgcccgcagaca

SEQ ID NO: 3982523 - RNA, 19 nt, Human herpesvirus 5
gcgccgccaacgcgagcug

SEQ ID NO: 3982524 - RNA, 15 nt, Human herpesvirus 5
gcgccgccgacucgc

SEQ ID NO: 3982525 - RNA, 13 nt, Human herpesvirus 5
gcgccgccuggag

SEQ ID NO: 3982526 - RNA, 16 nt, Human herpesvirus 5
gcgccguaguucuccg

SEQ ID NO: 3982527 - RNA, 14 nt, Human herpesvirus 5
gcgccgucagagca

SEQ ID NO: 3982528 - RNA, 19 nt, Human herpesvirus 5
gcgccgucucuucgcgccc

SEQ ID NO: 3982529 - RNA, 20 nt, Human herpesvirus 5
gcgccgugcucagcggcgug

SEQ ID NO: 3982530 - RNA, 14 nt, Human herpesvirus 5
gcgccuuccuccuc

SEQ ID NO: 3982531 - RNA, 20 nt, Human herpesvirus 5
gcgccuuuaagcuggaccug

SEQ ID NO: 3982532 - RNA, 15 nt, Human herpesvirus 5
gcaacagcagccacc

SEQ ID NO: 3982533 - RNA, 23 nt, Human herpesvirus 5
gcaacgcguggcccuggucuggc

SEQ ID NO: 3982534 - RNA, 16 nt, Human herpesvirus 5
gcaacggcaucauguu

SEQ ID NO: 3982535 - RNA, 14 nt, Human herpesvirus 5
gcaacucgguguug

SEQ ID NO: 3982536 - RNA, 17 nt, Human herpesvirus 5
gcaacuuaacgcgcaag

SEQ ID NO: 3982537 - RNA, 16 nt, Human herpesvirus 5
gcaagcagucaaaaaa

SEQ ID NO: 3982538 - RNA, 21 nt, Human herpesvirus 5
gcaaggccucuaucugcgcca

SEQ ID NO: 3982539 - RNA, 18 nt, Human herpesvirus 5
gcaauaaucccuguaauu

SEQ ID NO: 3982540 - RNA, 13 nt, Human herpesvirus 5
gcaaugacaugga

SEQ ID NO: 3982541 - RNA, 17 nt, Human herpesvirus 5
gcacaaacugcgacacg

SEQ ID NO: 3982542 - RNA, 19 nt, Human herpesvirus 5
gcacaacugguuccugcag

SEQ ID NO: 3982543 - RNA, 21 nt, Human herpesvirus 5
gcacauuagacacacgggggc

SEQ ID NO: 3982544 - RNA, 19 nt, Human herpesvirus 5
gcaccacggcuugcaaaac

SEQ ID NO: 3982545 - RNA, 22 nt, Human herpesvirus 5
gcaccacgucgauucccaucuc

SEQ ID NO: 3982546 - RNA, 22 nt, Human herpesvirus 5
gcaccaucgugguagcgccgcg

SEQ ID NO: 3982547 - RNA, 12 nt, Human herpesvirus 5
gcacccgacggc

SEQ ID NO: 3982548 - RNA, 20 nt, Human herpesvirus 5
gcaccgagggcagaacuggu

SEQ ID NO: 3982549 - RNA, 14 nt, Human herpesvirus 5
gcaccgcgacagcu

SEQ ID NO: 3982550 - RNA, 13 nt, Human herpesvirus 5
gcaccggcagcac

SEQ ID NO: 3982551 - RNA, 15 nt, Human herpesvirus 5
gcaccggcagcccau

SEQ ID NO: 3982552 - RNA, 20 nt, Human herpesvirus 5
gcaccggcgccugcugcucg

SEQ ID NO: 3982553 - RNA, 13 nt, Human herpesvirus 5
gcaccuaucuccg

SEQ ID NO: 3982554 - RNA, 17 nt, Human herpesvirus 5
gcaccugcugccgccac

SEQ ID NO: 3982555 - RNA, 15 nt, Human herpesvirus 5
gcacgaccugcucca

SEQ ID NO: 3982556 - RNA, 16 nt, Human herpesvirus 5
gcacgcaccuguguga

SEQ ID NO: 3982557 - RNA, 21 nt, Human herpesvirus 5
gcacgcucugucggaugaggc

SEQ ID NO: 3982558 - RNA, 22 nt, Human herpesvirus 5
gcacgggcucgggugacggcga

SEQ ID NO: 3982559 - RNA, 13 nt, Human herpesvirus 5
gcacgggcugcug

SEQ ID NO: 3982560 - RNA, 14 nt, Human herpesvirus 5
gcacgggcugcugg

SEQ ID NO: 3982561 - RNA, 18 nt, Human herpesvirus 5
gcagaaaagccggcucca

SEQ ID NO: 3982562 - RNA, 14 nt, Human herpesvirus 5
gcagagccaccagg

SEQ ID NO: 3982563 - RNA, 22 nt, Human herpesvirus 5
gcagauucaguaaccuggagca

SEQ ID NO: 3982564 - RNA, 20 nt, Human herpesvirus 5
gcagcagcuggugcaucacg

SEQ ID NO: 3982565 - RNA, 22 nt, Human herpesvirus 5
gcagccacgagcaucgcaacaa

SEQ ID NO: 3982566 - RNA, 20 nt, Human herpesvirus 5
gcagcccaaguucagcagca

SEQ ID NO: 3982567 - RNA, 13 nt, Human herpesvirus 5
gcagcgaguugcu

SEQ ID NO: 3982568 - RNA, 14 nt, Human herpesvirus 5
gcagcggcugcgcg

SEQ ID NO: 3982569 - RNA, 21 nt, Human herpesvirus 5
cgguuucgcuguagcuguggu

SEQ ID NO: 3982570 - RNA, 20 nt, Human herpesvirus 5
cguaaaaagaauggccaugu

SEQ ID NO: 3982571 - RNA, 14 nt, Human herpesvirus 5
cguaaagagaguca

SEQ ID NO: 3982572 - RNA, 16 nt, Human herpesvirus 5
cguacgauacacccug

SEQ ID NO: 3982573 - RNA, 14 nt, Human herpesvirus 5
cguacgucaccgcg

SEQ ID NO: 3982574 - RNA, 22 nt, Human herpesvirus 5
cguacuucaugccccgaugaac

SEQ ID NO: 3982575 - RNA, 17 nt, Human herpesvirus 5
cguagaauacuggaagc

SEQ ID NO: 3982576 - RNA, 23 nt, Human herpesvirus 5
cguagaauacuggaagcugcugg

SEQ ID NO: 3982577 - RNA, 15 nt, Human herpesvirus 5
cguagcagcacgcgg

SEQ ID NO: 3982578 - RNA, 14 nt, Human herpesvirus 5
cguaggccuccucu

SEQ ID NO: 3982579 - RNA, 14 nt, Human herpesvirus 5
cguagugagcuuug

SEQ ID NO: 3982580 - RNA, 18 nt, Human herpesvirus 5
cguagugagcuuugacgu

SEQ ID NO: 3982581 - RNA, 15 nt, Human herpesvirus 5
cguaguuguugcaga

SEQ ID NO: 3982582 - RNA, 16 nt, Human herpesvirus 5
cguauuccguuugcgc

SEQ ID NO: 3982583 - RNA, 12 nt, Human herpesvirus 5
cgucaaaacaca

SEQ ID NO: 3982584 - RNA, 21 nt, Human herpesvirus 5
cgucacuagaucaccacccug

SEQ ID NO: 3982585 - RNA, 22 nt, Human herpesvirus 5
cgucacucuuggcacggggaau

SEQ ID NO: 3982586 - RNA, 18 nt, Human herpesvirus 5
cgucaucucgccgacgug

SEQ ID NO: 3982587 - RNA, 20 nt, Human herpesvirus 5
cgucccgcgcggaucggaca

SEQ ID NO: 3982588 - RNA, 18 nt, Human herpesvirus 5
cgucccuggggcugcugc

SEQ ID NO: 3982589 - RNA, 21 nt, Human herpesvirus 5
cguccgaaucgccggcuugcu

SEQ ID NO: 3982590 - RNA, 19 nt, Human herpesvirus 5
cguccgcggaaacgacgga

SEQ ID NO: 3982591 - RNA, 20 nt, Human herpesvirus 5
cguccgggcuuuccuuguca

SEQ ID NO: 3982592 - RNA, 17 nt, Human herpesvirus 5
cgucgauucccaucuca

SEQ ID NO: 3982593 - RNA, 23 nt, Human herpesvirus 5
cgucgccacauuggugaaggccg

SEQ ID NO: 3982594 - RNA, 13 nt, Human herpesvirus 5
cgucggcugccug

SEQ ID NO: 3982595 - RNA, 20 nt, Human herpesvirus 5
cgucgguaccgucuccacca

SEQ ID NO: 3982596 - RNA, 16 nt, Human herpesvirus 5
cgucggugcgcccauc

SEQ ID NO: 3982597 - RNA, 13 nt, Human herpesvirus 5
cgucgucccagca

SEQ ID NO: 3982598 - RNA, 13 nt, Human herpesvirus 5
cgucguuagccag

SEQ ID NO: 3982599 - RNA, 21 nt, Human herpesvirus 5
cgucguuuuguucaccgucgc

SEQ ID NO: 3982600 - RNA, 15 nt, Human herpesvirus 5
cgucuggacgcgcgg

SEQ ID NO: 3982601 - RNA, 17 nt, Human herpesvirus 5
cgucuggacgcgcggcu

SEQ ID NO: 3982602 - RNA, 13 nt, Human herpesvirus 5
cgucuucugaagc

SEQ ID NO: 3982603 - RNA, 16 nt, Human herpesvirus 5
cgugaaacagcagcuc

SEQ ID NO: 3982604 - RNA, 20 nt, Human herpesvirus 5
cgugagcagcgugcaccugc

SEQ ID NO: 3982605 - RNA, 18 nt, Human herpesvirus 5
cgugauucguaggcagcg

SEQ ID NO: 3982606 - RNA, 18 nt, Human herpesvirus 5
cgugcaacggcgacgcgg

SEQ ID NO: 3982607 - RNA, 15 nt, Human herpesvirus 5
cgugcccgaagagga

SEQ ID NO: 3982608 - RNA, 16 nt, Human herpesvirus 5
cgugcccugugggccc

SEQ ID NO: 3982609 - RNA, 14 nt, Human herpesvirus 5
cgugcgcacgccgc

SEQ ID NO: 3982610 - RNA, 15 nt, Human herpesvirus 5
cgugcguagcuguau

SEQ ID NO: 3982611 - RNA, 18 nt, Human herpesvirus 5
cguggacugggacgagga

SEQ ID NO: 3982612 - RNA, 19 nt, Human herpesvirus 5
cguggcccuggucuggccc

SEQ ID NO: 3982613 - RNA, 18 nt, Human herpesvirus 5
cguggcgguccaguggca

SEQ ID NO: 3982614 - RNA, 12 nt, Human herpesvirus 5
cgugggccagga

SEQ ID NO: 3982615 - RNA, 16 nt, Human herpesvirus 5
cgugguagcgccgcga

SEQ ID NO: 3982616 - RNA, 23 nt, Human herpesvirus 5
cgugucgcugggcuggcccucgc

SEQ ID NO: 3982617 - RNA, 17 nt, Human herpesvirus 5
cgugucgucuccacgua

SEQ ID NO: 3982618 - RNA, 17 nt, Human herpesvirus 5
cgugugacguggauacu

SEQ ID NO: 3982619 - RNA, 17 nt, Human herpesvirus 5
cguguuuagucgcggcg

SEQ ID NO: 3982620 - RNA, 17 nt, Human herpesvirus 5
cguuaccaguaccaccg

SEQ ID NO: 3982621 - RNA, 15 nt, Human herpesvirus 5
cguuaucagaaagcu

SEQ ID NO: 3982622 - RNA, 20 nt, Human herpesvirus 5
cguuauguuucgaaaacuug

SEQ ID NO: 3982623 - RNA, 23 nt, Human herpesvirus 5
cguucacuuuuccguuuuacgug

SEQ ID NO: 3982624 - RNA, 22 nt, Human herpesvirus 5
aaguauauaacgccgaucaugu

SEQ ID NO: 3982625 - RNA, 21 nt, Human herpesvirus 5
aagucacacaggccagcugcc

SEQ ID NO: 3982626 - RNA, 21 nt, Human herpesvirus 5
aagugcgucuacgaccaaagc

SEQ ID NO: 3982627 - RNA, 19 nt, Human herpesvirus 5
aaguggauuugggcgugga

SEQ ID NO: 3982628 - RNA, 22 nt, Human herpesvirus 5
aauaaucccuguaauuauucca

SEQ ID NO: 3982629 - RNA, 14 nt, Human herpesvirus 5
aauaccaacguauc

SEQ ID NO: 3982630 - RNA, 15 nt, Human herpesvirus 5
aauacuggacuuuug

SEQ ID NO: 3982631 - RNA, 18 nt, Human herpesvirus 5
aaucagcagugaguacac

SEQ ID NO: 3982632 - RNA, 14 nt, Human herpesvirus 5
aaucgacaggaggc

SEQ ID NO: 3982633 - RNA, 14 nt, Human herpesvirus 5
aaucuccugagaca

SEQ ID NO: 3982634 - RNA, 22 nt, Human herpesvirus 5
aaucugggagguggcugggcuc

SEQ ID NO: 3982635 - RNA, 17 nt, Human herpesvirus 5
aaugacauggauaacga

SEQ ID NO: 3982636 - RNA, 18 nt, Human herpesvirus 5
aaugauauuuuacaggua

SEQ ID NO: 3982637 - RNA, 23 nt, Human herpesvirus 5
aaugccaugcggauccagcugcu

SEQ ID NO: 3982638 - RNA, 16 nt, Human herpesvirus 5
aaugugcugcaugaga

SEQ ID NO: 3982639 - RNA, 14 nt, Human herpesvirus 5
aauguugacccagg

SEQ ID NO: 3982640 - RNA, 19 nt, Human herpesvirus 5
acaaauagcagugacuggg

SEQ ID NO: 3982641 - RNA, 18 nt, Human herpesvirus 5
acaaccacggcgaaccgc

SEQ ID NO: 3982642 - RNA, 21 nt, Human herpesvirus 5
acaacggccgccgcagccacg

SEQ ID NO: 3982643 - RNA, 15 nt, Human herpesvirus 5
acaacggcuggaaau

SEQ ID NO: 3982644 - RNA, 13 nt, Human herpesvirus 5
acaacuuuuccau

SEQ ID NO: 3982645 - RNA, 14 nt, Human herpesvirus 5
acaagaaacacagg

SEQ ID NO: 3982646 - RNA, 23 nt, Human herpesvirus 5
acaaggaagcguccgcuggaaau

SEQ ID NO: 3982647 - RNA, 13 nt, Human herpesvirus 5
acaagguggugaa

SEQ ID NO: 3982648 - RNA, 23 nt, Human herpesvirus 5
acaaugugcugcaugagaacacg

SEQ ID NO: 3982649 - RNA, 22 nt, Human herpesvirus 5
acacaaaaucuucuaaaacggu

SEQ ID NO: 3982650 - RNA, 11 nt, Human herpesvirus 5
acacagcagca

SEQ ID NO: 3982651 - RNA, 17 nt, Human herpesvirus 5
acacagcgccgcgcugg

SEQ ID NO: 3982652 - RNA, 20 nt, Human herpesvirus 5
acaccacgguuuaccacagg

SEQ ID NO: 3982653 - RNA, 11 nt, Human herpesvirus 5
acacccugcgg

SEQ ID NO: 3982654 - RNA, 12 nt, Human herpesvirus 5
acaccgcugcgg

SEQ ID NO: 3982655 - RNA, 16 nt, Human herpesvirus 5
acaccguuuguggugu

SEQ ID NO: 3982656 - RNA, 12 nt, Human herpesvirus 5
acaccuauggcg

SEQ ID NO: 3982657 - RNA, 14 nt, Human herpesvirus 5
acacgacacuagcc

SEQ ID NO: 3982658 - RNA, 17 nt, Human herpesvirus 5
acacgcgggggaaaaac

SEQ ID NO: 3982659 - RNA, 10 nt, Human herpesvirus 5
acacuacagc

SEQ ID NO: 3982660 - RNA, 21 nt, Human herpesvirus 5
acagacgccuauaaagaaacc

SEQ ID NO: 3982661 - RNA, 12 nt, Human herpesvirus 5
acagcaaugaca

SEQ ID NO: 3982662 - RNA, 20 nt, Human herpesvirus 5
acagccgggcguuggccugu

SEQ ID NO: 3982663 - RNA, 20 nt, Human herpesvirus 5
acagcgccgacgugcuucgc

SEQ ID NO: 3982664 - RNA, 20 nt, Human herpesvirus 5
acaguauagcaugcauaaga

SEQ ID NO: 3982665 - RNA, 17 nt, Human herpesvirus 5
acaucccaagcacgcca

SEQ ID NO: 3982666 - RNA, 12 nt, Human herpesvirus 5
acaucuuaagaa

SEQ ID NO: 3982667 - RNA, 17 nt, Human herpesvirus 5
acaugcuauaagacagc

SEQ ID NO: 3982668 - RNA, 13 nt, Human herpesvirus 5
acauggacucuug

SEQ ID NO: 3982669 - RNA, 15 nt, Human herpesvirus 5
acauguccuggcgcg

SEQ ID NO: 3982670 - RNA, 17 nt, Human herpesvirus 5
acauucaauacaucaua

SEQ ID NO: 3982671 - RNA, 17 nt, Human herpesvirus 5
accacccgacugcagcc

SEQ ID NO: 3982672 - RNA, 17 nt, Human herpesvirus 5
accacgaguaacaccgu

SEQ ID NO: 3982673 - RNA, 16 nt, Human herpesvirus 5
accacgucaccgugcc

SEQ ID NO: 3982674 - RNA, 17 nt, Human herpesvirus 5
accacgucgaccaggug

SEQ ID NO: 3982675 - RNA, 18 nt, Human herpesvirus 5
accagaugcucccggcgc

SEQ ID NO: 3982676 - RNA, 21 nt, Human herpesvirus 5
accagcaaggucaacuacagc

SEQ ID NO: 3982677 - RNA, 19 nt, Human herpesvirus 5
accagcaguaugacgugcg

SEQ ID NO: 3982678 - RNA, 20 nt, Human herpesvirus 5
accauccgaagcuacagccg

SEQ ID NO: 3982679 - RNA, 14 nt, Human herpesvirus 5
accaucgugccgcu

SEQ ID NO: 3982680 - RNA, 15 nt, Human herpesvirus 5
accaucuggcgcaga

SEQ ID NO: 3982681 - RNA, 21 nt, Human herpesvirus 5
acccagcuggggaaguacaau

SEQ ID NO: 3982682 - RNA, 15 nt, Human herpesvirus 5
acccaucgcaccauc

SEQ ID NO: 3982683 - RNA, 13 nt, Human herpesvirus 5
acccccacccgug

SEQ ID NO: 3982684 - RNA, 19 nt, Human herpesvirus 5
accccccgggccaccagcc

SEQ ID NO: 3982685 - RNA, 16 nt, Human herpesvirus 5
accccucgcugggcua

SEQ ID NO: 3982686 - RNA, 16 nt, Human herpesvirus 5
acccgccggagcccgg

SEQ ID NO: 3982687 - RNA, 21 nt, Human herpesvirus 5
acccgggcaacgcguggcccu

SEQ ID NO: 3982688 - RNA, 12 nt, Human herpesvirus 5
acccuaaaacac

SEQ ID NO: 3982689 - RNA, 17 nt, Human herpesvirus 5
accgacauggagcccac

SEQ ID NO: 3982690 - RNA, 16 nt, Human herpesvirus 5
accgcaacaacagcag

SEQ ID NO: 3982691 - RNA, 14 nt, Human herpesvirus 5
accgcaacucggug

SEQ ID NO: 3982692 - RNA, 18 nt, Human herpesvirus 5
accgccgccgagaaaguc

SEQ ID NO: 3982693 - RNA, 17 nt, Human herpesvirus 5
accgccucggcgacguc

SEQ ID NO: 3982694 - RNA, 14 nt, Human herpesvirus 5
accgcgacgagguc

SEQ ID NO: 3982695 - RNA, 19 nt, Human herpesvirus 5
accgcgaguaucgggccgu

SEQ ID NO: 3982696 - RNA, 12 nt, Human herpesvirus 5
accgcgggccgc

SEQ ID NO: 3982697 - RNA, 23 nt, Human herpesvirus 5
accgcuacaacgcgcgccugacc

SEQ ID NO: 3982698 - RNA, 12 nt, Human herpesvirus 5
accgcugcggca

SEQ ID NO: 3982699 - RNA, 15 nt, Human herpesvirus 5
accggcgccugcugc

SEQ ID NO: 3982700 - RNA, 17 nt, Human herpesvirus 5
accggcucaccacgcag

SEQ ID NO: 3982701 - RNA, 23 nt, Human herpesvirus 5
accgucgauguuggacgaaacgu

SEQ ID NO: 3982702 - RNA, 14 nt, Human herpesvirus 5
accgucgcccucag

SEQ ID NO: 3982703 - RNA, 21 nt, Human herpesvirus 5
accgucgcguccgacgcgacg

SEQ ID NO: 3982704 - RNA, 14 nt, Human herpesvirus 5
accgugcucgugcc

SEQ ID NO: 3982705 - RNA, 21 nt, Human herpesvirus 5
accguuguccccgcaaacucc

SEQ ID NO: 3982706 - RNA, 16 nt, Human herpesvirus 5
accuagcuacuuugga

SEQ ID NO: 3982707 - RNA, 18 nt, Human herpesvirus 5
accuaucauaaagaaugc

SEQ ID NO: 3982708 - RNA, 21 nt, Human herpesvirus 5
accuccccuaacgucacuuca

SEQ ID NO: 3982709 - RNA, 14 nt, Human herpesvirus 5
accuggguagcaag

SEQ ID NO: 3982710 - RNA, 22 nt, Human herpesvirus 5
accuugagcgacagcagcauca

SEQ ID NO: 3982711 - RNA, 21 nt, Human herpesvirus 5
acgacaucuuccgcgagcacc

SEQ ID NO: 3982712 - RNA, 12 nt, Human herpesvirus 5
acgacgcggcgu

SEQ ID NO: 3982713 - RNA, 20 nt, Human herpesvirus 5
acgacgucguccagucguug

SEQ ID NO: 3982714 - RNA, 18 nt, Human herpesvirus 5
acgacuggcucaacuuuc

SEQ ID NO: 3982715 - RNA, 11 nt, Human herpesvirus 5
acgagcucuug

SEQ ID NO: 3982716 - RNA, 11 nt, Human herpesvirus 5
acgaggaggag

SEQ ID NO: 3982717 - RNA, 15 nt, Human herpesvirus 5
acgaggaggccgaga

SEQ ID NO: 3982718 - RNA, 18 nt, Human herpesvirus 5
acgauacacccugucacc

SEQ ID NO: 3982719 - RNA, 14 nt, Human herpesvirus 5
acgauaugucgcga

SEQ ID NO: 3982720 - RNA, 21 nt, Human herpesvirus 5
acgaugugagagccaccuugg

SEQ ID NO: 3982721 - RNA, 15 nt, Human herpesvirus 5
acgcagucugcccug

SEQ ID NO: 3982722 - RNA, 23 nt, Human herpesvirus 5
acgccaaguaccuaugcgccgua

SEQ ID NO: 3982723 - RNA, 13 nt, Human herpesvirus 5
acgccugggcgcg

SEQ ID NO: 3982724 - RNA, 15 nt, Human herpesvirus 5
acgcgacuggcgucg

SEQ ID NO: 3982725 - RNA, 21 nt, Human herpesvirus 5
acgcgcaagugccugcacgac

SEQ ID NO: 3982726 - RNA, 22 nt, Human herpesvirus 5
acgcgcgccugacccgcggcua

SEQ ID NO: 3982727 - RNA, 18 nt, Human herpesvirus 5
acgcgcucuucacacacu

SEQ ID NO: 3982728 - RNA, 17 nt, Human herpesvirus 5
acgcgucgaugccuguu

SEQ ID NO: 3982729 - RNA, 23 nt, Human herpesvirus 5
acgcuacuuuccgauccuuggaa

SEQ ID NO: 3982730 - RNA, 13 nt, Human herpesvirus 5
acgcucaaggaca

SEQ ID NO: 3982731 - RNA, 13 nt, Human herpesvirus 5
acgcucgagggcu

SEQ ID NO: 3982732 - RNA, 15 nt, Human herpesvirus 5
acgcugcacgaccug

SEQ ID NO: 3982733 - RNA, 18 nt, Human herpesvirus 5
acgcuguuagugguggcg

SEQ ID NO: 3982734 - RNA, 19 nt, Human herpesvirus 5
acgcuguugagcucggaca

SEQ ID NO: 3982735 - RNA, 20 nt, Human herpesvirus 5
acgcuucauauuaguauacu

SEQ ID NO: 3982736 - RNA, 16 nt, Human herpesvirus 5
acgcuuuaagcugcuc

SEQ ID NO: 3982737 - RNA, 14 nt, Human herpesvirus 5
acggaaaagcagug

SEQ ID NO: 3982738 - RNA, 13 nt, Human herpesvirus 5
acggagccguuac

SEQ ID NO: 3982739 - RNA, 12 nt, Human herpesvirus 5
acggagugguga

SEQ ID NO: 3982740 - RNA, 17 nt, Human herpesvirus 5
acggaguuuucccucag

SEQ ID NO: 3982741 - RNA, 21 nt, Human herpesvirus 5
acggauaaccgcaaaggccac

SEQ ID NO: 3982742 - RNA, 17 nt, Human herpesvirus 5
ccaccgacacagcagca

SEQ ID NO: 3982743 - RNA, 14 nt, Human herpesvirus 5
ccaccgacgcgcga

SEQ ID NO: 3982744 - RNA, 21 nt, Human herpesvirus 5
ccaccgagacgugcgaccugg

SEQ ID NO: 3982745 - RNA, 22 nt, Human herpesvirus 5
ccaccgucgcccucagcgugcu

SEQ ID NO: 3982746 - RNA, 13 nt, Human herpesvirus 5
ccaccgucgccgu

SEQ ID NO: 3982747 - RNA, 15 nt, Human herpesvirus 5
ccaccgucgccguca

SEQ ID NO: 3982748 - RNA, 16 nt, Human herpesvirus 5
ccaccuggacgggggg

SEQ ID NO: 3982749 - RNA, 21 nt, Human herpesvirus 5
ccacgcgucgaccccaaccuu

SEQ ID NO: 3982750 - RNA, 19 nt, Human herpesvirus 5
ccacgcucgagggcuccgu

SEQ ID NO: 3982751 - RNA, 18 nt, Human herpesvirus 5
ccacggccugcgggcagg

SEQ ID NO: 3982752 - RNA, 19 nt, Human herpesvirus 5
ccacggccugcgggcaggc

SEQ ID NO: 3982753 - RNA, 18 nt, Human herpesvirus 5
ccacggcgucuuccuccu

SEQ ID NO: 3982754 - RNA, 13 nt, Human herpesvirus 5
ccacgggccgcgc

SEQ ID NO: 3982755 - RNA, 15 nt, Human herpesvirus 5
ccacgggccgcgcuc

SEQ ID NO: 3982756 - RNA, 14 nt, Human herpesvirus 5
ccacggugcuuuuc

SEQ ID NO: 3982757 - RNA, 17 nt, Human herpesvirus 5
ccacgucgaccaggugc

SEQ ID NO: 3982758 - RNA, 18 nt, Human herpesvirus 5
ccagagacagagaccgcc

SEQ ID NO: 3982759 - RNA, 20 nt, Human herpesvirus 5
ccagauacaacgucaugcau

SEQ ID NO: 3982760 - RNA, 17 nt, Human herpesvirus 5
ccagcagcagcuggugc

SEQ ID NO: 3982761 - RNA, 18 nt, Human herpesvirus 5
ccagcaucuccucgccca

SEQ ID NO: 3982762 - RNA, 13 nt, Human herpesvirus 5
ccagccgcgauuc

SEQ ID NO: 3982763 - RNA, 15 nt, Human herpesvirus 5
ccagcgagcugcgcg

SEQ ID NO: 3982764 - RNA, 23 nt, Human herpesvirus 5
ccagcggccgcagugggcccacg

SEQ ID NO: 3982765 - RNA, 16 nt, Human herpesvirus 5
ccagcugcuucuggua

SEQ ID NO: 3982766 - RNA, 14 nt, Human herpesvirus 5
ccagggagacuuag

SEQ ID NO: 3982767 - RNA, 21 nt, Human herpesvirus 5
ccaggugucucuacgcuccua

SEQ ID NO: 3982768 - RNA, 23 nt, Human herpesvirus 5
ccaucaggugacauccucgccca

SEQ ID NO: 3982769 - RNA, 22 nt, Human herpesvirus 5
ccaucaguacggcuuucugcgg

SEQ ID NO: 3982770 - RNA, 13 nt, Human herpesvirus 5
ccaucccgccuuc

SEQ ID NO: 3982771 - RNA, 14 nt, Human herpesvirus 5
ccauccucguggaa

SEQ ID NO: 3982772 - RNA, 20 nt, Human herpesvirus 5
ccauccuuuucaugcucaua

SEQ ID NO: 3982773 - RNA, 20 nt, Human herpesvirus 5
ccaucgucccccuuucucua

SEQ ID NO: 3982774 - RNA, 15 nt, Human herpesvirus 5
ccaugaugacggcga

SEQ ID NO: 3982775 - RNA, 16 nt, Human herpesvirus 5
ccaugucgcgacacga

SEQ ID NO: 3982776 - RNA, 13 nt, Human herpesvirus 5
ccaugugcauggg

SEQ ID NO: 3982777 - RNA, 21 nt, Human herpesvirus 5
cccacaugcugcuuaauaaac

SEQ ID NO: 3982778 - RNA, 21 nt, Human herpesvirus 5
cccacccgguguuggccacca

SEQ ID NO: 3982779 - RNA, 12 nt, Human herpesvirus 5
cccaccgccucc

SEQ ID NO: 3982780 - RNA, 16 nt, Human herpesvirus 5
cccacgguggccaaca

SEQ ID NO: 3982781 - RNA, 15 nt, Human herpesvirus 5
cccaggacacauuuc

SEQ ID NO: 3982782 - RNA, 15 nt, Human herpesvirus 5
cccagggucaguugc

SEQ ID NO: 3982783 - RNA, 20 nt, Human herpesvirus 5
cccaguagacagacaggaca

SEQ ID NO: 3982784 - RNA, 21 nt, Human herpesvirus 5
cccaugcgggaacuggccugg

SEQ ID NO: 3982785 - RNA, 21 nt, Human herpesvirus 5
ccccaucgggcccgccacugc

SEQ ID NO: 3982786 - RNA, 14 nt, Human herpesvirus 5
cccccaucccgccu

SEQ ID NO: 3982787 - RNA, 13 nt, Human herpesvirus 5
ccccccaugccgg

SEQ ID NO: 3982788 - RNA, 22 nt, Human herpesvirus 5
cccccgggauccaagagacccg

SEQ ID NO: 3982789 - RNA, 14 nt, Human herpesvirus 5
cccccguggccgcu

SEQ ID NO: 3982790 - RNA, 17 nt, Human herpesvirus 5
ccccgauaugggccgcu

SEQ ID NO: 3982791 - RNA, 14 nt, Human herpesvirus 5
ccccgauucccaca

SEQ ID NO: 3982792 - RNA, 22 nt, Human herpesvirus 5
ccccggacgggcaggacgucaa

SEQ ID NO: 3982793 - RNA, 22 nt, Human herpesvirus 5
ccccggggcgugccgagcugcc

SEQ ID NO: 3982794 - RNA, 15 nt, Human herpesvirus 5
ccccgucgcccgagg

SEQ ID NO: 3982795 - RNA, 13 nt, Human herpesvirus 5
ccccguggccgcu

SEQ ID NO: 3982796 - RNA, 17 nt, Human herpesvirus 5
cccgaccacgacacggu

SEQ ID NO: 3982797 - RNA, 14 nt, Human herpesvirus 5
cccgagacggcggc

SEQ ID NO: 3982798 - RNA, 19 nt, Human herpesvirus 5
cccgcacgacgaccccgcu

SEQ ID NO: 3982799 - RNA, 15 nt, Human herpesvirus 5
cccgccggagcccgg

SEQ ID NO: 3982800 - RNA, 14 nt, Human herpesvirus 5
cccgccggcgggcg

SEQ ID NO: 3982801 - RNA, 20 nt, Human herpesvirus 5
cccgcgucccuggggcugcu

SEQ ID NO: 3982802 - RNA, 12 nt, Human herpesvirus 5
cccgcuagaaug

SEQ ID NO: 3982803 - RNA, 17 nt, Human herpesvirus 5
cccggcacccgagcacg

SEQ ID NO: 3982804 - RNA, 14 nt, Human herpesvirus 5
cccgggccaccagc

SEQ ID NO: 3982805 - RNA, 17 nt, Human herpesvirus 5
cccgggccgccugagga

SEQ ID NO: 3982806 - RNA, 19 nt, Human herpesvirus 5
cccgucaaaacacacgcga

SEQ ID NO: 3982807 - RNA, 19 nt, Human herpesvirus 5
cccguggaucagccgccgc

SEQ ID NO: 3982808 - RNA, 11 nt, Human herpesvirus 5
cccguggccca

SEQ ID NO: 3982809 - RNA, 21 nt, Human herpesvirus 5
cccuagcaacgcgacuacggu

SEQ ID NO: 3982810 - RNA, 17 nt, Human herpesvirus 5
cccuauggcacgucgcu

SEQ ID NO: 3982811 - RNA, 15 nt, Human herpesvirus 5
cccucagccucugug

SEQ ID NO: 3982812 - RNA, 19 nt, Human herpesvirus 5
cccucagcgugcucagcug

SEQ ID NO: 3982813 - RNA, 20 nt, Human herpesvirus 5
cccucucgcgcccgcagaca

SEQ ID NO: 3982814 - RNA, 11 nt, Human herpesvirus 5
cccucugcugc

SEQ ID NO: 3982815 - RNA, 23 nt, Human herpesvirus 5
cccucuucuuugccggcucuccu

SEQ ID NO: 3982816 - RNA, 19 nt, Human herpesvirus 5
cccugaguucacgcgcgga

SEQ ID NO: 3982817 - RNA, 19 nt, Human herpesvirus 5
cccugaguuccgucagcac

SEQ ID NO: 3982818 - RNA, 22 nt, Human herpesvirus 5
cccugcuccgcaagcgccgcca

SEQ ID NO: 3982819 - RNA, 17 nt, Human herpesvirus 5
cccugguauccaacuuc

SEQ ID NO: 3982820 - RNA, 12 nt, Human herpesvirus 5
cccuucucuggu

SEQ ID NO: 3982821 - RNA, 20 nt, Human herpesvirus 5
ccgaaggcuacacgcuuuuc

SEQ ID NO: 3982822 - RNA, 19 nt, Human herpesvirus 5
ccgaagguuagcgccgcgg

SEQ ID NO: 3982823 - RNA, 17 nt, Human herpesvirus 5
ccgaauuugggcggugg

SEQ ID NO: 3982824 - RNA, 16 nt, Human herpesvirus 5
ccgacaaccugcugca

SEQ ID NO: 3982825 - RNA, 13 nt, Human herpesvirus 5
ccgaccacgacac

SEQ ID NO: 3982826 - RNA, 17 nt, Human herpesvirus 5
ccgacccccaccagcgu

SEQ ID NO: 3982827 - RNA, 14 nt, Human herpesvirus 5
ccgaccugugcgug

SEQ ID NO: 3982828 - RNA, 12 nt, Human herpesvirus 5
ccgacgagcagg

SEQ ID NO: 3982829 - RNA, 23 nt, Human herpesvirus 5
ccgagcaagcagucaaaaaagaa

SEQ ID NO: 3982830 - RNA, 14 nt, Human herpesvirus 5
ccgagcccaacuuu

SEQ ID NO: 3982831 - RNA, 13 nt, Human herpesvirus 5
ccgaggaucuggc

SEQ ID NO: 3982832 - RNA, 14 nt, Human herpesvirus 5
ccgaggcgccgcca

SEQ ID NO: 3982833 - RNA, 20 nt, Human herpesvirus 5
ccgagucgugucgcugcguc

SEQ ID NO: 3982834 - RNA, 16 nt, Human herpesvirus 5
ccgauccacgggccgc

SEQ ID NO: 3982835 - RNA, 17 nt, Human herpesvirus 5
ccgauccuuggaagagg

SEQ ID NO: 3982836 - RNA, 14 nt, Human herpesvirus 5
ccgaugcuccgcga

SEQ ID NO: 3982837 - RNA, 13 nt, Human herpesvirus 5
ccgauucagaucu

SEQ ID NO: 3982838 - RNA, 13 nt, Human herpesvirus 5
ccgcaaaggccac

SEQ ID NO: 3982839 - RNA, 16 nt, Human herpesvirus 5
ccgcaaugggcuuccc

SEQ ID NO: 3982840 - RNA, 21 nt, Human herpesvirus 5
ccgcaccgguuggagcagcuc

SEQ ID NO: 3982841 - RNA, 14 nt, Human herpesvirus 5
ccgcagugggccca

SEQ ID NO: 3982842 - RNA, 20 nt, Human herpesvirus 5
ccgcauccugcccaccgccu

SEQ ID NO: 3982843 - RNA, 22 nt, Human herpesvirus 5
ccgccccagcagaccagccacc

SEQ ID NO: 3982844 - RNA, 15 nt, Human herpesvirus 5
ccgccgacucgcugc

SEQ ID NO: 3982845 - RNA, 20 nt, Human herpesvirus 5
ccgccgacucgcugccgcag

SEQ ID NO: 3982846 - RNA, 13 nt, Human herpesvirus 5
ccgccgcaacagc

SEQ ID NO: 3982847 - RNA, 13 nt, Human herpesvirus 5
ccgccgccgcccg

SEQ ID NO: 3982848 - RNA, 13 nt, Human herpesvirus 5
ccgccgccgcgcu

SEQ ID NO: 3982849 - RNA, 12 nt, Human herpesvirus 5
ccgccgcggcgu

SEQ ID NO: 3982850 - RNA, 18 nt, Human herpesvirus 5
ccgccggcacgucaguuu

SEQ ID NO: 3982851 - RNA, 16 nt, Human herpesvirus 5
ccgccgucaccaccgc

SEQ ID NO: 3982852 - RNA, 19 nt, Human herpesvirus 5
ccgccgucgcgccuuccuc

SEQ ID NO: 3982853 - RNA, 23 nt, Human herpesvirus 5
ccgccucggaucuacucaucggc

SEQ ID NO: 3982854 - RNA, 17 nt, Human herpesvirus 5
ccgccucuucuggcccu

SEQ ID NO: 3982855 - RNA, 14 nt, Human herpesvirus 5
ccgcgaacggcgac

SEQ ID NO: 3982856 - RNA, 17 nt, Human herpesvirus 5
ccgcgacccagcgacag

SEQ ID NO: 3982857 - RNA, 15 nt, Human herpesvirus 5
ccgcgccgccuggag

SEQ ID NO: 3982858 - RNA, 12 nt, Human herpesvirus 5
ccgcggaggugc

SEQ ID NO: 3982859 - RNA, 16 nt, Human herpesvirus 5
ccgcggaggugcuggc

SEQ ID NO: 3982860 - RNA, 18 nt, Human herpesvirus 5
ccgcggugcaggccgcgc

SEQ ID NO: 3982861 - RNA, 19 nt, Human herpesvirus 5
ccgcggugcaggccgcgca

SEQ ID NO: 3982862 - RNA, 19 nt, Human herpesvirus 5
ccgcggugcgcugcagccg

SEQ ID NO: 3982863 - RNA, 18 nt, Human herpesvirus 5
ccgcgguucuauccccga

SEQ ID NO: 3982864 - RNA, 13 nt, Human herpesvirus 5
ccgcguagcgcuc

SEQ ID NO: 3982865 - RNA, 15 nt, Human herpesvirus 5
ccgcgugcuccacca

SEQ ID NO: 3982866 - RNA, 15 nt, Human herpesvirus 5
ccgcucacuuuccuc

SEQ ID NO: 3982867 - RNA, 18 nt, Human herpesvirus 5
ccgcucaggucgcccagg

SEQ ID NO: 3982868 - RNA, 17 nt, Human herpesvirus 5
ccgcuccaucgcagcca

SEQ ID NO: 3982869 - RNA, 13 nt, Human herpesvirus 5
ccgcugcacggca

SEQ ID NO: 3982870 - RNA, 23 nt, Human herpesvirus 5
ccgcugugcuggccgccgcugca

SEQ ID NO: 3982871 - RNA, 14 nt, Human herpesvirus 5
ccggaccgugcacg

SEQ ID NO: 3982872 - RNA, 20 nt, Human herpesvirus 5
ccggacgugcuuggacuggu

SEQ ID NO: 3982873 - RNA, 22 nt, Human herpesvirus 5
ccggagcuacgcgaccagcugc

SEQ ID NO: 3982874 - RNA, 18 nt, Human herpesvirus 5
ccggauaucugcggggau

SEQ ID NO: 3982875 - RNA, 14 nt, Human herpesvirus 5
ccggcgcgguguua

SEQ ID NO: 3982876 - RNA, 22 nt, Human herpesvirus 5
ccggcgcgguguuagacauggg

SEQ ID NO: 3982877 - RNA, 20 nt, Human herpesvirus 5
ccggcggcgccgucagagca

SEQ ID NO: 3982878 - RNA, 13 nt, Human herpesvirus 5
ccggcggcgugca

SEQ ID NO: 3982879 - RNA, 23 nt, Human herpesvirus 5
ccggcggcugcuguugcacgggc

SEQ ID NO: 3982880 - RNA, 14 nt, Human herpesvirus 5
ccggcguggcggcc

SEQ ID NO: 3982881 - RNA, 21 nt, Human herpesvirus 5
ccggcguugccgccaugucgc

SEQ ID NO: 3982882 - RNA, 13 nt, Human herpesvirus 5
ccggcuacgucga

SEQ ID NO: 3982883 - RNA, 15 nt, Human herpesvirus 5
ccggcugcacguggc

SEQ ID NO: 3982884 - RNA, 13 nt, Human herpesvirus 5
ccggcugcugcac

SEQ ID NO: 3982885 - RNA, 16 nt, Human herpesvirus 5
ccgggcaacgcguggc

SEQ ID NO: 3982886 - RNA, 19 nt, Human herpesvirus 5
ccgggcggcuuccugcggc

SEQ ID NO: 3982887 - RNA, 21 nt, Human herpesvirus 5
ccggucgcuaacugauaacga

SEQ ID NO: 3982888 - RNA, 17 nt, Human herpesvirus 5
ccggugguacugcugug

SEQ ID NO: 3982889 - RNA, 17 nt, Human herpesvirus 5
ccguccugcagaccgag

SEQ ID NO: 3982890 - RNA, 21 nt, Human herpesvirus 5
ccgucgaggagguaguccccu

SEQ ID NO: 3982891 - RNA, 14 nt, Human herpesvirus 5
ccgucgccaccacc

SEQ ID NO: 3982892 - RNA, 22 nt, Human herpesvirus 5
ccgucgccauggcuauguacac

SEQ ID NO: 3982893 - RNA, 19 nt, Human herpesvirus 5
ccgucgcggacgaaagugg

SEQ ID NO: 3982894 - RNA, 21 nt, Human herpesvirus 5
ccgucuggacaccggaaugca

SEQ ID NO: 3982895 - RNA, 20 nt, Human herpesvirus 5
ccgugacacuuuggcucuuu

SEQ ID NO: 3982896 - RNA, 16 nt, Human herpesvirus 5
ccgugagugacgcggu

SEQ ID NO: 3982897 - RNA, 15 nt, Human herpesvirus 5
ccgugaucgccgcgg

SEQ ID NO: 3982898 - RNA, 13 nt, Human herpesvirus 5
ccgugccagcugg

SEQ ID NO: 3982899 - RNA, 20 nt, Human herpesvirus 5
ccgugcccguuuucacagca

SEQ ID NO: 3982900 - RNA, 15 nt, Human herpesvirus 5
ccgugcucagcggcg

SEQ ID NO: 3982901 - RNA, 16 nt, Human herpesvirus 5
ccgugcucgugcccau

SEQ ID NO: 3982902 - RNA, 16 nt, Human herpesvirus 5
ccgugcugggcugggu

SEQ ID NO: 3982903 - RNA, 20 nt, Human herpesvirus 5
ccguggaucagccgccgccu

SEQ ID NO: 3982904 - RNA, 19 nt, Human herpesvirus 5
ccguguuuuugcucgagac

SEQ ID NO: 3982905 - RNA, 22 nt, Human herpesvirus 5
ccguuacgccgacgugauccag

SEQ ID NO: 3982906 - RNA, 20 nt, Human herpesvirus 5
ccguuguguaugcaugucgc

SEQ ID NO: 3982907 - RNA, 13 nt, Human herpesvirus 5
ccuaacuguagca

SEQ ID NO: 3982908 - RNA, 18 nt, Human herpesvirus 5
ccuacgucuucaugacgg

SEQ ID NO: 3982909 - RNA, 16 nt, Human herpesvirus 5
ccuacucaccaaagcc

SEQ ID NO: 3982910 - RNA, 23 nt, Human herpesvirus 5
ccuaucauaaagaaugcaacgcu

SEQ ID NO: 3982911 - RNA, 16 nt, Human herpesvirus 5
ccuauccgcgcggcua

SEQ ID NO: 3982912 - RNA, 13 nt, Human herpesvirus 5
ccuaugaggacga

SEQ ID NO: 3982913 - RNA, 22 nt, Human herpesvirus 5
ccuauuagccccacaugcugcu

SEQ ID NO: 3982914 - RNA, 13 nt, Human herpesvirus 5
ccucacacugacg

SEQ ID NO: 3982915 - RNA, 17 nt, Human herpesvirus 5
ccucauggacccgccgc

SEQ ID NO: 3982916 - RNA, 18 nt, Human herpesvirus 5
ccuccagcagcagcuggu

SEQ ID NO: 3982917 - RNA, 16 nt, Human herpesvirus 5
ccuccgcgaacggcga

SEQ ID NO: 3982918 - RNA, 16 nt, Human herpesvirus 5
ccuccgucgcggccag

SEQ ID NO: 3982919 - RNA, 14 nt, Human herpesvirus 5
ccuccugcagcugc

SEQ ID NO: 3982920 - RNA, 13 nt, Human herpesvirus 5
ccucggacaccgg

SEQ ID NO: 3982921 - RNA, 16 nt, Human herpesvirus 5
ccucggugcccgcaca

SEQ ID NO: 3982922 - RNA, 20 nt, Human herpesvirus 5
ccucuccuccgucgcggcca

SEQ ID NO: 3982923 - RNA, 14 nt, Human herpesvirus 5
ccucuccuccuucu

SEQ ID NO: 3982924 - RNA, 22 nt, Human herpesvirus 5
ccugcagaccgaggcgcuggac

SEQ ID NO: 3982925 - RNA, 13 nt, Human herpesvirus 5
ccugcagcugcac

SEQ ID NO: 3982926 - RNA, 12 nt, Human herpesvirus 5
ccuggagcagcg

SEQ ID NO: 3982927 - RNA, 13 nt, Human herpesvirus 5
ccuggagcagcgg

SEQ ID NO: 3982928 - RNA, 18 nt, Human herpesvirus 5
ccugggaacgcgcgcacg

SEQ ID NO: 3982929 - RNA, 20 nt, Human herpesvirus 5
ccugguauacgaggcucucu

SEQ ID NO: 3982930 - RNA, 20 nt, Human herpesvirus 5
ccuguguaugaggaucagga

SEQ ID NO: 3982931 - RNA, 15 nt, Human herpesvirus 5
caguuugcggcgcag

SEQ ID NO: 3982932 - RNA, 21 nt, Human herpesvirus 5
cauaaacuguuccgcccugcu

SEQ ID NO: 3982933 - RNA, 16 nt, Human herpesvirus 5
cauacagcaacaccau

SEQ ID NO: 3982934 - RNA, 15 nt, Human herpesvirus 5
caucaccgacccugc

SEQ ID NO: 3982935 - RNA, 16 nt, Human herpesvirus 5
caucagcgcacggugg

SEQ ID NO: 3982936 - RNA, 20 nt, Human herpesvirus 5
caucaggaucuggugcaggc

SEQ ID NO: 3982937 - RNA, 12 nt, Human herpesvirus 5
caucauggagcu

SEQ ID NO: 3982938 - RNA, 20 nt, Human herpesvirus 5
cauccucguggaaggcaccg

SEQ ID NO: 3982939 - RNA, 23 nt, Human herpesvirus 5
caucgaagguaacuucagugggc

SEQ ID NO: 3982940 - RNA, 19 nt, Human herpesvirus 5
caucucgcguaacgugucu

SEQ ID NO: 3982941 - RNA, 18 nt, Human herpesvirus 5
caugaggcgguggcugcg

SEQ ID NO: 3982942 - RNA, 18 nt, Human herpesvirus 5
caugaugcaaauaaagau

SEQ ID NO: 3982943 - RNA, 20 nt, Human herpesvirus 5
caugauguacccgcuggugu

SEQ ID NO: 3982944 - RNA, 14 nt, Human herpesvirus 5
caugccggcagaac

SEQ ID NO: 3982945 - RNA, 22 nt, Human herpesvirus 5
cauggagacaguuuccacgcag

SEQ ID NO: 3982946 - RNA, 19 nt, Human herpesvirus 5
caugggcgacaccgccucg

SEQ ID NO: 3982947 - RNA, 16 nt, Human herpesvirus 5
cauggggagaaaagag

SEQ ID NO: 3982948 - RNA, 19 nt, Human herpesvirus 5
cauggucggugacaucacc

SEQ ID NO: 3982949 - RNA, 21 nt, Human herpesvirus 5
cauguagaagcacccauuaca

SEQ ID NO: 3982950 - RNA, 13 nt, Human herpesvirus 5
cauguccagccug

SEQ ID NO: 3982951 - RNA, 13 nt, Human herpesvirus 5
caugugcagcugg

SEQ ID NO: 3982952 - RNA, 16 nt, Human herpesvirus 5
caugugcagcugguga

SEQ ID NO: 3982953 - RNA, 21 nt, Human herpesvirus 5
cauguuucugguuuuuggacu

SEQ ID NO: 3982954 - RNA, 15 nt, Human herpesvirus 5
cauuccccaccuucc

SEQ ID NO: 3982955 - RNA, 22 nt, Human herpesvirus 5
cauucgauacgcugcuuuuggc

SEQ ID NO: 3982956 - RNA, 21 nt, Human herpesvirus 5
cauugaacgcgguacaugugc

SEQ ID NO: 3982957 - RNA, 22 nt, Human herpesvirus 5
cauugagaaagcuaacauuccc

SEQ ID NO: 3982958 - RNA, 21 nt, Human herpesvirus 5
ccaaacgcgugcgggugcaug

SEQ ID NO: 3982959 - RNA, 16 nt, Human herpesvirus 5
ccaaagccgccgccga

SEQ ID NO: 3982960 - RNA, 22 nt, Human herpesvirus 5
ccaagaauaaaaagugcgucua

SEQ ID NO: 3982961 - RNA, 17 nt, Human herpesvirus 5
ccaagagacccggcugg

SEQ ID NO: 3982962 - RNA, 17 nt, Human herpesvirus 5
ccaagagcaugcugugg

SEQ ID NO: 3982963 - RNA, 17 nt, Human herpesvirus 5
ccaagccaugcagcacg

SEQ ID NO: 3982964 - RNA, 13 nt, Human herpesvirus 5
ccaagccgcagcg

SEQ ID NO: 3982965 - RNA, 15 nt, Human herpesvirus 5
ccaagccgcagcgcg

SEQ ID NO: 3982966 - RNA, 13 nt, Human herpesvirus 5
ccacacacaucug

SEQ ID NO: 3982967 - RNA, 14 nt, Human herpesvirus 5
ccacagcgccaggc

SEQ ID NO: 3982968 - RNA, 19 nt, Human herpesvirus 5
ccacagcgccaggcggcug

SEQ ID NO: 3982969 - RNA, 18 nt, Human herpesvirus 5
ccaccacgaccaugaugg

SEQ ID NO: 3982970 - RNA, 18 nt, Human herpesvirus 5
ccacccgacugcagccca

SEQ ID NO: 3982971 - RNA, 22 nt, Human herpesvirus 5
aaaacggacgggaaaggcuaac

SEQ ID NO: 3982972 - RNA, 18 nt, Human herpesvirus 5
aaaagugcgucaaagcuc

SEQ ID NO: 3982973 - RNA, 23 nt, Human herpesvirus 5
aaaauuucguaaacgacgucguc

SEQ ID NO: 3982974 - RNA, 12 nt, Human herpesvirus 5
aaacaacaccac

SEQ ID NO: 3982975 - RNA, 18 nt, Human herpesvirus 5
aaacacgacgaaagcguu

SEQ ID NO: 3982976 - RNA, 23 nt, Human herpesvirus 5
aaacauuuuauuuacaucuguac

SEQ ID NO: 3982977 - RNA, 15 nt, Human herpesvirus 5
aaaccgcaggagcug

SEQ ID NO: 3982978 - RNA, 13 nt, Human herpesvirus 5
aaaccgcuuucag

SEQ ID NO: 3982979 - RNA, 22 nt, Human herpesvirus 5
aaaccgucgaaaacaaccacac

SEQ ID NO: 3982980 - RNA, 20 nt, Human herpesvirus 5
aaacuagcauucuggugaga

SEQ ID NO: 3982981 - RNA, 13 nt, Human herpesvirus 5
aaagaaaaaagac

SEQ ID NO: 3982982 - RNA, 14 nt, Human herpesvirus 5
aaagacuguggugg

SEQ ID NO: 3982983 - RNA, 16 nt, Human herpesvirus 5
aaagagccauguuaug

SEQ ID NO: 3982984 - RNA, 23 nt, Human herpesvirus 5
aaagucuacgaucgcuggaaaga

SEQ ID NO: 3982985 - RNA, 22 nt, Human herpesvirus 5
aaauacagggaaugggaaaaac

SEQ ID NO: 3982986 - RNA, 12 nt, Human herpesvirus 5
aaaucuaccuga

SEQ ID NO: 3982987 - RNA, 15 nt, Human herpesvirus 5
aaaucuuaccacagu

SEQ ID NO: 3982988 - RNA, 19 nt, Human herpesvirus 5
aaauuagugucgauacuuu

SEQ ID NO: 3982989 - RNA, 23 nt, Human herpesvirus 5
aacaaccuaugauauaaagcggu

SEQ ID NO: 3982990 - RNA, 18 nt, Human herpesvirus 5
aacaacgucacuucugcu

SEQ ID NO: 3982991 - RNA, 12 nt, Human herpesvirus 5
aacaccgcgagu

SEQ ID NO: 3982992 - RNA, 21 nt, Human herpesvirus 5
aacacguaacgucuucugaag

SEQ ID NO: 3982993 - RNA, 22 nt, Human herpesvirus 5
aacacugaaaacaccauuggaa

SEQ ID NO: 3982994 - RNA, 22 nt, Human herpesvirus 5
aacagacuugguacgcugacgu

SEQ ID NO: 3982995 - RNA, 22 nt, Human herpesvirus 5
aacagccuucccuuguaagaca

SEQ ID NO: 3982996 - RNA, 22 nt, Human herpesvirus 5
aacagcggguguccucggugcc

SEQ ID NO: 3982997 - RNA, 15 nt, Human herpesvirus 5
aacaugcccagcauc

SEQ ID NO: 3982998 - RNA, 19 nt, Human herpesvirus 5
aacccguaucugagcggcg

SEQ ID NO: 3982999 - RNA, 20 nt, Human herpesvirus 5
aaccucuaccucguccgccu

SEQ ID NO: 3983000 - RNA, 24 nt, Human herpesvirus 5
aacgacagugucggugugguagcu

SEQ ID NO: 3983001 - RNA, 22 nt, Human herpesvirus 5
aacgagacuaucuacaacacua

SEQ ID NO: 3983002 - RNA, 16 nt, Human herpesvirus 5
aacgccacgucggagc

SEQ ID NO: 3983003 - RNA, 13 nt, Human herpesvirus 5
aacggggugggag

SEQ ID NO: 3983004 - RNA, 16 nt, Human herpesvirus 5
aacgggugggcugggg

SEQ ID NO: 3983005 - RNA, 12 nt, Human herpesvirus 5
aacgugccaggc

SEQ ID NO: 3983006 - RNA, 23 nt, Human herpesvirus 5
aacuacaauguauagauacacgu

SEQ ID NO: 3983007 - RNA, 11 nt, Human herpesvirus 5
aacucagggaa

SEQ ID NO: 3983008 - RNA, 21 nt, Human herpesvirus 5
aacugcugccucgaugcgccu

SEQ ID NO: 3983009 - RNA, 16 nt, Human herpesvirus 5
aacuggccuggcggcg

SEQ ID NO: 3983010 - RNA, 14 nt, Human herpesvirus 5
aacugguuccugca

SEQ ID NO: 3983011 - RNA, 16 nt, Human herpesvirus 5
aacuucuaccaucucc

SEQ ID NO: 3983012 - RNA, 17 nt, Human herpesvirus 5
aacuucugucucggcac

SEQ ID NO: 3983013 - RNA, 13 nt, Human herpesvirus 5
aacuuugcugcua

SEQ ID NO: 3983014 - RNA, 20 nt, Human herpesvirus 5
aagaaucuaggaacacugaa

SEQ ID NO: 3983015 - RNA, 14 nt, Human herpesvirus 5
aagaccgcugccuc

SEQ ID NO: 3983016 - RNA, 16 nt, Human herpesvirus 5
aagacggacuguuuca

SEQ ID NO: 3983017 - RNA, 21 nt, Human herpesvirus 5
aagccgccaauacagcacgua

SEQ ID NO: 3983018 - RNA, 21 nt, Human herpesvirus 5
aagcuucggccggcugcugca

SEQ ID NO: 3983019 - RNA, 22 nt, Human herpesvirus 5
aaggcagugacgcuaggcggcg

SEQ ID NO: 3983020 - RNA, 14 nt, Human herpesvirus 5
aaggcugguuuccc

SEQ ID NO: 3983021 - RNA, 14 nt, Human herpesvirus 5
aaggguaggugcgc

SEQ ID NO: 3983022 - RNA, 18 nt, Human herpesvirus 5
aaguaagcauggcuuaca

SEQ ID NO: 3983023 - RNA, 17 nt, Human herpesvirus 5
aaguacaauaucaaaga

SEQ ID NO: 3983024 - RNA, 16 nt, Human herpesvirus 5
aaguacacgccacacg

SEQ ID NO: 3983025 - RNA, 14 nt, Human herpesvirus 5
aaaaagcucccaug

SEQ ID NO: 3983026 - RNA, 12 nt, Human herpesvirus 5
aaaaauacugac

SEQ ID NO: 3983027 - RNA, 19 nt, Human herpesvirus 5
aaaacaugcacauaaacaa

SEQ ID NO: 3983028 - RNA, 19 nt, Human herpesvirus 5
aaaagacuuaccaccuccu

SEQ ID NO: 3983029 - RNA, 13 nt, Human herpesvirus 5
aaaagcaccauga

SEQ ID NO: 3983030 - RNA, 17 nt, Human herpesvirus 5
aaaagugcgucaaagcu

SEQ ID NO: 3983031 - RNA, 23 nt, Human herpesvirus 5
aaaauaugggaauuccccugccu

SEQ ID NO: 3983032 - RNA, 12 nt, Human herpesvirus 5
aaacagcagcuc

SEQ ID NO: 3983033 - RNA, 19 nt, Human herpesvirus 5
aaacaggaaaggaauacaa

SEQ ID NO: 3983034 - RNA, 14 nt, Human herpesvirus 5
aaacaguacggaca

SEQ ID NO: 3983035 - RNA, 18 nt, Human herpesvirus 5
aaacauuuguugagucau

SEQ ID NO: 3983036 - RNA, 20 nt, Human herpesvirus 5
aaaccgcaggcccucggaag

SEQ ID NO: 3983037 - RNA, 13 nt, Human herpesvirus 5
aaacgcugcuugg

SEQ ID NO: 3983038 - RNA, 20 nt, Human herpesvirus 5
aaacguugagacuaccacau

SEQ ID NO: 3983039 - RNA, 18 nt, Human herpesvirus 5
aaacucgucguuuccccc

SEQ ID NO: 3983040 - RNA, 13 nt, Human herpesvirus 5
aaacucuauggac

SEQ ID NO: 3983041 - RNA, 20 nt, Human herpesvirus 5
aaagccgacaaccugcugca

SEQ ID NO: 3983042 - RNA, 19 nt, Human herpesvirus 5
aaagccgcgcucgcccccg

SEQ ID NO: 3983043 - RNA, 21 nt, Human herpesvirus 5
aaagcgucaaucagacuuucg

SEQ ID NO: 3983044 - RNA, 13 nt, Human herpesvirus 5
aaagcuaacauuc

SEQ ID NO: 3983045 - RNA, 18 nt, Human herpesvirus 5
aaagggcgaacguccucg

SEQ ID NO: 3983046 - RNA, 20 nt, Human herpesvirus 5
aaagugauuauaucuuucua

SEQ ID NO: 3983047 - RNA, 12 nt, Human herpesvirus 5
aaauaccaacac

SEQ ID NO: 3983048 - RNA, 12 nt, Human herpesvirus 5
acuagcacagag

SEQ ID NO: 3983049 - RNA, 18 nt, Human herpesvirus 5
acucaacauguuagcuuu

SEQ ID NO: 3983050 - RNA, 22 nt, Human herpesvirus 5
acuccgaauaacaacacaucaa

SEQ ID NO: 3983051 - RNA, 21 nt, Human herpesvirus 5
acucgcgacgcuucauauuag

SEQ ID NO: 3983052 - RNA, 21 nt, Human herpesvirus 5
acucgcugccgcagcugcugg

SEQ ID NO: 3983053 - RNA, 19 nt, Human herpesvirus 5
acucuaucgcgacagacau

SEQ ID NO: 3983054 - RNA, 13 nt, Human herpesvirus 5
acugcacuuccug

SEQ ID NO: 3983055 - RNA, 15 nt, Human herpesvirus 5
acugcauccaucaca

SEQ ID NO: 3983056 - RNA, 20 nt, Human herpesvirus 5
acugcgauaauaacggcgca

SEQ ID NO: 3983057 - RNA, 22 nt, Human herpesvirus 5
acuggacucgguuucgcuguag

SEQ ID NO: 3983058 - RNA, 20 nt, Human herpesvirus 5
acuggagagacuuucaauga

SEQ ID NO: 3983059 - RNA, 15 nt, Human herpesvirus 5
acuggccuggcggcg

SEQ ID NO: 3983060 - RNA, 21 nt, Human herpesvirus 5
acuggggucaaaagccugggu

SEQ ID NO: 3983061 - RNA, 15 nt, Human herpesvirus 5
acuugaguacuuuca

SEQ ID NO: 3983062 - RNA, 16 nt, Human herpesvirus 5
acuuguccuugcgcgc

SEQ ID NO: 3983063 - RNA, 15 nt, Human herpesvirus 5
acuuuacauaaaacc

SEQ ID NO: 3983064 - RNA, 15 nt, Human herpesvirus 5
agaaaaaaaagagag

SEQ ID NO: 3983065 - RNA, 15 nt, Human herpesvirus 5
agaacaagcgguggu

SEQ ID NO: 3983066 - RNA, 18 nt, Human herpesvirus 5
agaacgaucccuuuaucc

SEQ ID NO: 3983067 - RNA, 21 nt, Human herpesvirus 5
agaacuuuguagugcgcgccg

SEQ ID NO: 3983068 - RNA, 22 nt, Human herpesvirus 5
agaagagauggcguccgggcuc

SEQ ID NO: 3983069 - RNA, 16 nt, Human herpesvirus 5
agaagucucuuucucu

SEQ ID NO: 3983070 - RNA, 17 nt, Human herpesvirus 5
agaaugccucuacuugg

SEQ ID NO: 3983071 - RNA, 12 nt, Human herpesvirus 5
agacacacacca

SEQ ID NO: 3983072 - RNA, 19 nt, Human herpesvirus 5
agacaucuuaugaagcuga

SEQ ID NO: 3983073 - RNA, 13 nt, Human herpesvirus 5
agaccgacagcgg

SEQ ID NO: 3983074 - RNA, 13 nt, Human herpesvirus 5
agaccgccgccgc

SEQ ID NO: 3983075 - RNA, 12 nt, Human herpesvirus 5
agaccgcugccu

SEQ ID NO: 3983076 - RNA, 13 nt, Human herpesvirus 5
agaccuacagcac

SEQ ID NO: 3983077 - RNA, 20 nt, Human herpesvirus 5
agacgauuuuaugcgccgcc

SEQ ID NO: 3983078 - RNA, 12 nt, Human herpesvirus 5
agacgcugcgcu

SEQ ID NO: 3983079 - RNA, 17 nt, Human herpesvirus 5
agacggcgugacacagc

SEQ ID NO: 3983080 - RNA, 13 nt, Human herpesvirus 5
agacgggccuggu

SEQ ID NO: 3983081 - RNA, 16 nt, Human herpesvirus 5
agacgggguugaucaa

SEQ ID NO: 3983082 - RNA, 18 nt, Human herpesvirus 5
agacugcgguuaacccua

SEQ ID NO: 3983083 - RNA, 15 nt, Human herpesvirus 5
agacugguggugaga

SEQ ID NO: 3983084 - RNA, 18 nt, Human herpesvirus 5
agagaaggguaggugcgc

SEQ ID NO: 3983085 - RNA, 15 nt, Human herpesvirus 5
agagccaaaggugac

SEQ ID NO: 3983086 - RNA, 16 nt, Human herpesvirus 5
agagccaccaggugcc

SEQ ID NO: 3983087 - RNA, 17 nt, Human herpesvirus 5
agagccaccuuggugga

SEQ ID NO: 3983088 - RNA, 13 nt, Human herpesvirus 5
agagcgguccgcc

SEQ ID NO: 3983089 - RNA, 23 nt, Human herpesvirus 5
agaggaggaugggggggaccggg

SEQ ID NO: 3983090 - RNA, 18 nt, Human herpesvirus 5
agagggcgcgcgucugga

SEQ ID NO: 3983091 - RNA, 18 nt, Human herpesvirus 5
agaguagugguggggcug

SEQ ID NO: 3983092 - RNA, 14 nt, Human herpesvirus 5
agaguuacaugcaa

SEQ ID NO: 3983093 - RNA, 20 nt, Human herpesvirus 5
agaugcggggucgacugcgu

SEQ ID NO: 3983094 - RNA, 14 nt, Human herpesvirus 5
agauucuaaagcca

SEQ ID NO: 3983095 - RNA, 15 nt, Human herpesvirus 5
agauuucgcccgacu

SEQ ID NO: 3983096 - RNA, 11 nt, Human herpesvirus 5
agauuucuguc

SEQ ID NO: 3983097 - RNA, 13 nt, Human herpesvirus 5
agcacgcggauga

SEQ ID NO: 3983098 - RNA, 15 nt, Human herpesvirus 5
agcacgggcugcugg

SEQ ID NO: 3983099 - RNA, 21 nt, Human herpesvirus 5
agcacgucuagcaggcccagg

SEQ ID NO: 3983100 - RNA, 15 nt, Human herpesvirus 5
agcacucggcgcugu

SEQ ID NO: 3983101 - RNA, 13 nt, Human herpesvirus 5
agcagcucgcgcu

SEQ ID NO: 3983102 - RNA, 23 nt, Human herpesvirus 5
agcaggcuaaagaagaccaugac

SEQ ID NO: 3983103 - RNA, 23 nt, Human herpesvirus 5
agcauacggggaggagacacaga

SEQ ID NO: 3983104 - RNA, 21 nt, Human herpesvirus 5
agcaucaguuucugcggcgua

SEQ ID NO: 3983105 - RNA, 17 nt, Human herpesvirus 5
agccaacagcagggagc

SEQ ID NO: 3983106 - RNA, 18 nt, Human herpesvirus 5
agccaccgacacagcagc

SEQ ID NO: 3983107 - RNA, 19 nt, Human herpesvirus 5
agccaccgacacagcagca

SEQ ID NO: 3983108 - RNA, 16 nt, Human herpesvirus 5
agccaccgucccucag

SEQ ID NO: 3983109 - RNA, 14 nt, Human herpesvirus 5
agccacgcggcgua

SEQ ID NO: 3983110 - RNA, 18 nt, Human herpesvirus 5
agccagcuacagccacga

SEQ ID NO: 3983111 - RNA, 17 nt, Human herpesvirus 5
agccaggugaccagcag

SEQ ID NO: 3983112 - RNA, 16 nt, Human herpesvirus 5
agccccaagcgguacg

SEQ ID NO: 3983113 - RNA, 21 nt, Human herpesvirus 5
agccccaucauggcccaagga

SEQ ID NO: 3983114 - RNA, 16 nt, Human herpesvirus 5
agcccuacuuuguguu

SEQ ID NO: 3983115 - RNA, 14 nt, Human herpesvirus 5
agccgcagcgcgga

SEQ ID NO: 3983116 - RNA, 19 nt, Human herpesvirus 5
agccgcggugcaggccgcg

SEQ ID NO: 3983117 - RNA, 17 nt, Human herpesvirus 5
agccggucaucuccgag

SEQ ID NO: 3983118 - RNA, 18 nt, Human herpesvirus 5
agccucaagaauccgucc

SEQ ID NO: 3983119 - RNA, 19 nt, Human herpesvirus 5
agccuccggaacccucugg

SEQ ID NO: 3983120 - RNA, 13 nt, Human herpesvirus 5
agccuggggcacc

SEQ ID NO: 3983121 - RNA, 19 nt, Human herpesvirus 5
agccuuaggaacagggaag

SEQ ID NO: 3983122 - RNA, 19 nt, Human herpesvirus 5
agccuucccuuguaagaca

SEQ ID NO: 3983123 - RNA, 17 nt, Human herpesvirus 5
agcgacgucaacggugg

SEQ ID NO: 3983124 - RNA, 22 nt, Human herpesvirus 5
agcgaguggggcaacugcugcc

SEQ ID NO: 3983125 - RNA, 16 nt, Human herpesvirus 5
agcgccaggcggcuga

SEQ ID NO: 3983126 - RNA, 20 nt, Human herpesvirus 5
agcgccaggcggcugaucug

SEQ ID NO: 3983127 - RNA, 17 nt, Human herpesvirus 5
agcgcccgaagccgcgc

SEQ ID NO: 3983128 - RNA, 11 nt, Human herpesvirus 5
agcgccgccgc

SEQ ID NO: 3983129 - RNA, 18 nt, Human herpesvirus 5
agcgccgcggcaccagag

SEQ ID NO: 3983130 - RNA, 16 nt, Human herpesvirus 5
agcgccguccugcaga

SEQ ID NO: 3983131 - RNA, 21 nt, Human herpesvirus 5
agcgccgugcucagcggcgug

SEQ ID NO: 3983132 - RNA, 13 nt, Human herpesvirus 5
agcgcuacgugcg

SEQ ID NO: 3983133 - RNA, 18 nt, Human herpesvirus 5
agcggccgugguggccgu

SEQ ID NO: 3983134 - RNA, 17 nt, Human herpesvirus 5
agcggcggacuuggcag

SEQ ID NO: 3983135 - RNA, 20 nt, Human herpesvirus 5
agcggcggacuuggcagcgg

SEQ ID NO: 3983136 - RNA, 15 nt, Human herpesvirus 5
agcggcggcgguggu

SEQ ID NO: 3983137 - RNA, 17 nt, Human herpesvirus 5
agcguagucuggcagcg

SEQ ID NO: 3983138 - RNA, 20 nt, Human herpesvirus 5
agcguauuuucuacuccgaa

SEQ ID NO: 3983139 - RNA, 20 nt, Human herpesvirus 5
agcgucucauuugucuuuac

SEQ ID NO: 3983140 - RNA, 17 nt, Human herpesvirus 5
agcgucucuugcggcgc

SEQ ID NO: 3983141 - RNA, 15 nt, Human herpesvirus 5
agcgugcugcucugc

SEQ ID NO: 3983142 - RNA, 13 nt, Human herpesvirus 5
agcguuggcggcg

SEQ ID NO: 3983143 - RNA, 12 nt, Human herpesvirus 5
agcucagcaucg

SEQ ID NO: 3983144 - RNA, 21 nt, Human herpesvirus 5
agcuccauuaugcaggagacg

SEQ ID NO: 3983145 - RNA, 16 nt, Human herpesvirus 5
agcucgucgccagcgc

SEQ ID NO: 3983146 - RNA, 20 nt, Human herpesvirus 5
agcucuuaaaggacgugaug

SEQ ID NO: 3983147 - RNA, 16 nt, Human herpesvirus 5
agcugcccgccggcgg

SEQ ID NO: 3983148 - RNA, 16 nt, Human herpesvirus 5
agcugcuggacgacgu

SEQ ID NO: 3983149 - RNA, 17 nt, Human herpesvirus 5
agcugucagccucucac

SEQ ID NO: 3983150 - RNA, 15 nt, Human herpesvirus 5
agcuuuugcccgcac

SEQ ID NO: 3983151 - RNA, 21 nt, Human herpesvirus 5
agcuuuuuaauaaaaaacaag

SEQ ID NO: 3983152 - RNA, 21 nt, Human herpesvirus 5
aggaaccaccguagcacugcg

SEQ ID NO: 3983153 - RNA, 14 nt, Human herpesvirus 5
aggaaggaaaaaac

SEQ ID NO: 3983154 - RNA, 16 nt, Human herpesvirus 5
aggaagucgaucugga

SEQ ID NO: 3983155 - RNA, 16 nt, Human herpesvirus 5
aggaccguacacgcac

SEQ ID NO: 3983156 - RNA, 14 nt, Human herpesvirus 5
aggacgaggcaggg

SEQ ID NO: 3983157 - RNA, 14 nt, Human herpesvirus 5
aggacgcgcuggcu

SEQ ID NO: 3983158 - RNA, 21 nt, Human herpesvirus 5
aggacgggaugcacagcgucu

SEQ ID NO: 3983159 - RNA, 14 nt, Human herpesvirus 5
aggaggcaaauaua

SEQ ID NO: 3983160 - RNA, 17 nt, Human herpesvirus 5
aggaggugaccuggcug

SEQ ID NO: 3983161 - RNA, 21 nt, Human herpesvirus 5
aggcaaagaaaaaaaaaagga

SEQ ID NO: 3983162 - RNA, 15 nt, Human herpesvirus 5
aggcacgucggggcu

SEQ ID NO: 3983163 - RNA, 19 nt, Human herpesvirus 5
gcggguccauuggagccgc

SEQ ID NO: 3983164 - RNA, 12 nt, Human herpesvirus 5
gcgggugcauga

SEQ ID NO: 3983165 - RNA, 14 nt, Human herpesvirus 5
gcgguaacuggcag

SEQ ID NO: 3983166 - RNA, 15 nt, Human herpesvirus 5
gcgguaucgcgcaca

SEQ ID NO: 3983167 - RNA, 17 nt, Human herpesvirus 5
gcggugaacgugcgcga

SEQ ID NO: 3983168 - RNA, 13 nt, Human herpesvirus 5
gcguaccaacaua

SEQ ID NO: 3983169 - RNA, 12 nt, Human herpesvirus 5
gcgucaaagcuc

SEQ ID NO: 3983170 - RNA, 17 nt, Human herpesvirus 5
gcguccgacgccggguu

SEQ ID NO: 3983171 - RNA, 17 nt, Human herpesvirus 5
gcgucgaccccaaccuu

SEQ ID NO: 3983172 - RNA, 17 nt, Human herpesvirus 5
gcgucgcccucgacggc

SEQ ID NO: 3983173 - RNA, 20 nt, Human herpesvirus 5
gcgucuuuauuuacgaggua

SEQ ID NO: 3983174 - RNA, 15 nt, Human herpesvirus 5
gcgugcaccugcugc

SEQ ID NO: 3983175 - RNA, 22 nt, Human herpesvirus 5
gcgugcaccugcugccgccacu

SEQ ID NO: 3983176 - RNA, 19 nt, Human herpesvirus 5
gcguggaccagacggcguc

SEQ ID NO: 3983177 - RNA, 14 nt, Human herpesvirus 5
gcguggccggcgug

SEQ ID NO: 3983178 - RNA, 21 nt, Human herpesvirus 5
gcguggucaacgcuuuggaaa

SEQ ID NO: 3983179 - RNA, 20 nt, Human herpesvirus 5
gcguguguguuucuuaacua

SEQ ID NO: 3983180 - RNA, 18 nt, Human herpesvirus 5
gcguuaugauaucuacag

SEQ ID NO: 3983181 - RNA, 19 nt, Human herpesvirus 5
gcguuguuugggaacuuug

SEQ ID NO: 3983182 - RNA, 15 nt, Human herpesvirus 5
gcuaauuauugccau

SEQ ID NO: 3983183 - RNA, 23 nt, Human herpesvirus 5
gcuacauucgccgcaaugggcuu

SEQ ID NO: 3983184 - RNA, 20 nt, Human herpesvirus 5
gcuaccucaugacgcacgcc

SEQ ID NO: 3983185 - RNA, 15 nt, Human herpesvirus 5
gcuaguuagacaggc

SEQ ID NO: 3983186 - RNA, 16 nt, Human herpesvirus 5
gcuauaagacagccuu

SEQ ID NO: 3983187 - RNA, 19 nt, Human herpesvirus 5
gcuauugggucacagccgc

SEQ ID NO: 3983188 - RNA, 23 nt, Human herpesvirus 5
gcucacagucuaucccuauggca

SEQ ID NO: 3983189 - RNA, 19 nt, Human herpesvirus 5
gcucaucgucacgcucaag

SEQ ID NO: 3983190 - RNA, 22 nt, Human herpesvirus 5
gcuccaaaacgacguuaacgac

SEQ ID NO: 3983191 - RNA, 20 nt, Human herpesvirus 5
gcuccaagugcaagcgccgc

SEQ ID NO: 3983192 - RNA, 20 nt, Human herpesvirus 5
gcuccacacgcaucugcaag

SEQ ID NO: 3983193 - RNA, 21 nt, Human herpesvirus 5
gcucccacguuuacgcgaaac

SEQ ID NO: 3983194 - RNA, 14 nt, Human herpesvirus 5
gcuccgacgcagga

SEQ ID NO: 3983195 - RNA, 17 nt, Human herpesvirus 5
gcucgcucugacgccgc

SEQ ID NO: 3983196 - RNA, 19 nt, Human herpesvirus 5
gcucggaccgugacggugg

SEQ ID NO: 3983197 - RNA, 19 nt, Human herpesvirus 5
gcucggcggccacggcguc

SEQ ID NO: 3983198 - RNA, 21 nt, Human herpesvirus 5
gcucgggaacagacccgauac

SEQ ID NO: 3983199 - RNA, 19 nt, Human herpesvirus 5
gcucggucagcuugaggcu

SEQ ID NO: 3983200 - RNA, 23 nt, Human herpesvirus 5
gcucgugcgugucgcugggcugg

SEQ ID NO: 3983201 - RNA, 12 nt, Human herpesvirus 5
gcucuagguuug

SEQ ID NO: 3983202 - RNA, 21 nt, Human herpesvirus 5
gcucugucggaugaggcaggc

SEQ ID NO: 3983203 - RNA, 15 nt, Human herpesvirus 5
gcucuuggcgccgcg

SEQ ID NO: 3983204 - RNA, 14 nt, Human herpesvirus 5
gcugacgaugagca

SEQ ID NO: 3983205 - RNA, 23 nt, Human herpesvirus 5
gcugauaauaaaggcucucuguu

SEQ ID NO: 3983206 - RNA, 13 nt, Human herpesvirus 5
gcugauccgcagg

SEQ ID NO: 3983207 - RNA, 21 nt, Human herpesvirus 5
gcugcacacggagcacgggcu

SEQ ID NO: 3983208 - RNA, 13 nt, Human herpesvirus 5
gcugcaggcaggu

SEQ ID NO: 3983209 - RNA, 16 nt, Human herpesvirus 5
gcugcaugagaacacg

SEQ ID NO: 3983210 - RNA, 14 nt, Human herpesvirus 5
gcugccaccagggc

SEQ ID NO: 3983211 - RNA, 20 nt, Human herpesvirus 5
gcugccgccgcuguggcugc

SEQ ID NO: 3983212 - RNA, 19 nt, Human herpesvirus 5
gcugccgcucagcgagcuc

SEQ ID NO: 3983213 - RNA, 23 nt, Human herpesvirus 5
gcugccggucuacagacugggcg

SEQ ID NO: 3983214 - RNA, 14 nt, Human herpesvirus 5
gcugcgcaggccgc

SEQ ID NO: 3983215 - RNA, 15 nt, Human herpesvirus 5
gcugcgcaggccgcc

SEQ ID NO: 3983216 - RNA, 14 nt, Human herpesvirus 5
gcugcgucugucuu

SEQ ID NO: 3983217 - RNA, 15 nt, Human herpesvirus 5
gcugcuccucggagc

SEQ ID NO: 3983218 - RNA, 19 nt, Human herpesvirus 5
gcugcugagacugagacug

SEQ ID NO: 3983219 - RNA, 15 nt, Human herpesvirus 5
gcugcugcaccacag

SEQ ID NO: 3983220 - RNA, 20 nt, Human herpesvirus 5
gcugcuguugugggugcgga

SEQ ID NO: 3983221 - RNA, 14 nt, Human herpesvirus 5
gcugcuucauccag

SEQ ID NO: 3983222 - RNA, 17 nt, Human herpesvirus 5
gcugcuuucuuuuugca

SEQ ID NO: 3983223 - RNA, 23 nt, Human herpesvirus 5
gcuggcggccguggccuguggcc

SEQ ID NO: 3983224 - RNA, 21 nt, Human herpesvirus 5
gcuggcugucgagcugguuaa

SEQ ID NO: 3983225 - RNA, 16 nt, Human herpesvirus 5
gcugggauccgccgcc

SEQ ID NO: 3983226 - RNA, 17 nt, Human herpesvirus 5
gcugggauccgccgcca

SEQ ID NO: 3983227 - RNA, 20 nt, Human herpesvirus 5
gcuguccauagugcgccaag

SEQ ID NO: 3983228 - RNA, 19 nt, Human herpesvirus 5
gcuguggcuucucuggaga

SEQ ID NO: 3983229 - RNA, 15 nt, Human herpesvirus 5
gcuguugaccugggu

SEQ ID NO: 3983230 - RNA, 16 nt, Human herpesvirus 5
gcuuacugccugccgc

SEQ ID NO: 3983231 - RNA, 19 nt, Human herpesvirus 5
gcuuagacauuccccaccu

SEQ ID NO: 3983232 - RNA, 13 nt, Human herpesvirus 5
gcuucgcgacugg

SEQ ID NO: 3983233 - RNA, 21 nt, Human herpesvirus 5
gcuuuccaagcugucguggug

SEQ ID NO: 3983234 - RNA, 13 nt, Human herpesvirus 5
gcuuugacgcacu

SEQ ID NO: 3983235 - RNA, 14 nt, Human herpesvirus 5
gcuuugguggauaa

SEQ ID NO: 3983236 - RNA, 14 nt, Human herpesvirus 5
ggaaaaacaaagaa

SEQ ID NO: 3983237 - RNA, 13 nt, Human herpesvirus 5
ggaaacgacagua

SEQ ID NO: 3983238 - RNA, 20 nt, Human herpesvirus 5
ggaaaugcccgccaccaugc

SEQ ID NO: 3983239 - RNA, 17 nt, Human herpesvirus 5
ggaacaacccgucgucg

SEQ ID NO: 3983240 - RNA, 14 nt, Human herpesvirus 5
ggaacauguccugg

SEQ ID NO: 3983241 - RNA, 22 nt, Human herpesvirus 5
ggaaccaccguagcacugcgca

SEQ ID NO: 3983242 - RNA, 20 nt, Human herpesvirus 5
ggaagcgcugauguaccugc

SEQ ID NO: 3983243 - RNA, 14 nt, Human herpesvirus 5
ggaagcguccgcug

SEQ ID NO: 3983244 - RNA, 21 nt, Human herpesvirus 5
ggaaggcggcucgcuggaagc

SEQ ID NO: 3983245 - RNA, 11 nt, Human herpesvirus 5
ggacaaguauu

SEQ ID NO: 3983246 - RNA, 15 nt, Human herpesvirus 5
ggacacgguagacga

SEQ ID NO: 3983247 - RNA, 12 nt, Human herpesvirus 5
ggacacugggcg

SEQ ID NO: 3983248 - RNA, 23 nt, Human herpesvirus 5
ggaccggggugguggugcugcug

SEQ ID NO: 3983249 - RNA, 23 nt, Human herpesvirus 5
ggaccugaccugucagaaggcag

SEQ ID NO: 3983250 - RNA, 16 nt, Human herpesvirus 5
ggacggcaaggcggag

SEQ ID NO: 3983251 - RNA, 20 nt, Human herpesvirus 5
ggacggugaugaugcugcug

SEQ ID NO: 3983252 - RNA, 14 nt, Human herpesvirus 5
ggacgugguaacga

SEQ ID NO: 3983253 - RNA, 14 nt, Human herpesvirus 5
ggacuuucuccuuu

SEQ ID NO: 3983254 - RNA, 15 nt, Human herpesvirus 5
ggagagccgcacaga

SEQ ID NO: 3983255 - RNA, 12 nt, Human herpesvirus 5
ggagcccacgcc

SEQ ID NO: 3983256 - RNA, 13 nt, Human herpesvirus 5
ggaggacuuuuuc

SEQ ID NO: 3983257 - RNA, 22 nt, Human herpesvirus 5
ggaggccgcacuggacgacguc

SEQ ID NO: 3983258 - RNA, 18 nt, Human herpesvirus 5
ggagguggucgagcgcga

SEQ ID NO: 3983259 - RNA, 23 nt, Human herpesvirus 5
ggaucacgacgacgcgcccccca

SEQ ID NO: 3983260 - RNA, 22 nt, Human herpesvirus 5
ggaugcgcgaagcugcgcaggc

SEQ ID NO: 3983261 - RNA, 15 nt, Human herpesvirus 5
ggauugggcggacgu

SEQ ID NO: 3983262 - RNA, 19 nt, Human herpesvirus 5
ggcaaacuccgacauucgc

SEQ ID NO: 3983263 - RNA, 19 nt, Human herpesvirus 5
ggcaaagaguccaucugcu

SEQ ID NO: 3983264 - RNA, 19 nt, Human herpesvirus 5
ggcaauugcaugucgccca

SEQ ID NO: 3983265 - RNA, 17 nt, Human herpesvirus 5
ggcaccgggaacuuaug

SEQ ID NO: 3983266 - RNA, 15 nt, Human herpesvirus 5
ggcagcacaccugcc

SEQ ID NO: 3983267 - RNA, 14 nt, Human herpesvirus 5
ggccaugagcggca

SEQ ID NO: 3983268 - RNA, 23 nt, Human herpesvirus 5
ggcccaaagaccgcugccucguu

SEQ ID NO: 3983269 - RNA, 24 nt, Human herpesvirus 5
ggcccgagcgguugccgugacgca

SEQ ID NO: 3983270 - RNA, 17 nt, Human herpesvirus 5
ggcccguucgaaggcua

SEQ ID NO: 3983271 - RNA, 19 nt, Human herpesvirus 5
ggcccguuucgacgaaauc

SEQ ID NO: 3983272 - RNA, 12 nt, Human herpesvirus 5
ggccgacgaggc

SEQ ID NO: 3983273 - RNA, 16 nt, Human herpesvirus 5
ggccgacggcagcgug

SEQ ID NO: 3983274 - RNA, 19 nt, Human herpesvirus 5
ggccgccucuucuggcccu

SEQ ID NO: 3983275 - RNA, 23 nt, Human herpesvirus 5
ggccgccugaggaaggggaggag

SEQ ID NO: 3983276 - RNA, 13 nt, Human herpesvirus 5
ggccgcgcaggcc

SEQ ID NO: 3983277 - RNA, 16 nt, Human herpesvirus 5
ggccgucggcgucgcg

SEQ ID NO: 3983278 - RNA, 18 nt, Human herpesvirus 5
guuccgcguuuggucgcc

SEQ ID NO: 3983279 - RNA, 17 nt, Human herpesvirus 5
guuccucauucaaccug

SEQ ID NO: 3983280 - RNA, 18 nt, Human herpesvirus 5
guucuccugccgagacga

SEQ ID NO: 3983281 - RNA, 16 nt, Human herpesvirus 5
guugagagugguggga

SEQ ID NO: 3983282 - RNA, 17 nt, Human herpesvirus 5
guugccgcguggcgcug

SEQ ID NO: 3983283 - RNA, 11 nt, Human herpesvirus 5
guugcgccgca

SEQ ID NO: 3983284 - RNA, 15 nt, Human herpesvirus 5
guuggacuccugugu

SEQ ID NO: 3983285 - RNA, 20 nt, Human herpesvirus 5
guuggccaccaagaaacacc

SEQ ID NO: 3983286 - RNA, 19 nt, Human herpesvirus 5
guuggcucccgcugugcug

SEQ ID NO: 3983287 - RNA, 21 nt, Human herpesvirus 5
guuggucacugacgugcagga

SEQ ID NO: 3983288 - RNA, 15 nt, Human herpesvirus 5
guuguacauggguag

SEQ ID NO: 3983289 - RNA, 17 nt, Human herpesvirus 5
guuguccucuccuccuu

SEQ ID NO: 3983290 - RNA, 16 nt, Human herpesvirus 5
guuuauuucaauaaau

SEQ ID NO: 3983291 - RNA, 21 nt, Human herpesvirus 5
guuuccagagaacgcagcgca

SEQ ID NO: 3983292 - RNA, 21 nt, Human herpesvirus 5
guuucuggaacaagaaacaca

SEQ ID NO: 3983293 - RNA, 16 nt, Human herpesvirus 5
guuugcgccagugggu

SEQ ID NO: 3983294 - RNA, 23 nt, Human herpesvirus 5
guuuuccaaaacgugccaggcug

SEQ ID NO: 3983295 - RNA, 18 nt, Human herpesvirus 5
guuuuuagcgcgugaccu

SEQ ID NO: 3983296 - RNA, 12 nt, Human herpesvirus 5
guuuuuauucau

SEQ ID NO: 3983297 - RNA, 19 nt, Human herpesvirus 5
uaaaagggacgucaaagcu

SEQ ID NO: 3983298 - RNA, 22 nt, Human herpesvirus 5
uaaaccgcccgugccucccgcg

SEQ ID NO: 3983299 - RNA, 16 nt, Human herpesvirus 5
uaaagaaucuaggaac

SEQ ID NO: 3983300 - RNA, 19 nt, Human herpesvirus 5
uaaagucuggguuuccaga

SEQ ID NO: 3983301 - RNA, 14 nt, Human herpesvirus 5
uaacaacacaucaa

SEQ ID NO: 3983302 - RNA, 20 nt, Human herpesvirus 5
uaacccccgacgagcaggcu

SEQ ID NO: 3983303 - RNA, 11 nt, Human herpesvirus 5
uaaccgcaaag

SEQ ID NO: 3983304 - RNA, 15 nt, Human herpesvirus 5
uaaccuacguccgug

SEQ ID NO: 3983305 - RNA, 13 nt, Human herpesvirus 5
uaacgauaugucg

SEQ ID NO: 3983306 - RNA, 13 nt, Human herpesvirus 5
uaacgccacggug

SEQ ID NO: 3983307 - RNA, 15 nt, Human herpesvirus 5
uaagauauaaagaau

SEQ ID NO: 3983308 - RNA, 14 nt, Human herpesvirus 5
uaagccggcagcug

SEQ ID NO: 3983309 - RNA, 15 nt, Human herpesvirus 5
uaagccggcagcugc

SEQ ID NO: 3983310 - RNA, 18 nt, Human herpesvirus 5
uaagcgcgaccggcagca

SEQ ID NO: 3983311 - RNA, 19 nt, Human herpesvirus 5
uaaggagcaaaaccgggua

SEQ ID NO: 3983312 - RNA, 22 nt, Human herpesvirus 5
uaagugacguggauacuaguaa

SEQ ID NO: 3983313 - RNA, 20 nt, Human herpesvirus 5
uaaucugucguacuguccuu

SEQ ID NO: 3983314 - RNA, 16 nt, Human herpesvirus 5
uaauuggagacacaac

SEQ ID NO: 3983315 - RNA, 23 nt, Human herpesvirus 5
uacaaggagcgacguaccagcug

SEQ ID NO: 3983316 - RNA, 19 nt, Human herpesvirus 5
uacaaguauguggaacagc

SEQ ID NO: 3983317 - RNA, 20 nt, Human herpesvirus 5
uacaccaguucguagaucac

SEQ ID NO: 3983318 - RNA, 19 nt, Human herpesvirus 5
uacacccugucaccgaaag

SEQ ID NO: 3983319 - RNA, 15 nt, Human herpesvirus 5
uacaccgcuggagcu

SEQ ID NO: 3983320 - RNA, 19 nt, Human herpesvirus 5
uacagccuugagaaccugc

SEQ ID NO: 3983321 - RNA, 15 nt, Human herpesvirus 5
uacagggugccgcca

SEQ ID NO: 3983322 - RNA, 13 nt, Human herpesvirus 5
uacauaaaaccac

SEQ ID NO: 3983323 - RNA, 12 nt, Human herpesvirus 5
uacaucauacaa

SEQ ID NO: 3983324 - RNA, 20 nt, Human herpesvirus 5
uacaugaugaaugucaucau

SEQ ID NO: 3983325 - RNA, 16 nt, Human herpesvirus 5
uaccaacgcuuccugc

SEQ ID NO: 3983326 - RNA, 17 nt, Human herpesvirus 5
uaccaauacugcaucca

SEQ ID NO: 3983327 - RNA, 19 nt, Human herpesvirus 5
uaccagacgcgauggcccg

SEQ ID NO: 3983328 - RNA, 15 nt, Human herpesvirus 5
uaccaucuggcgcag

SEQ ID NO: 3983329 - RNA, 13 nt, Human herpesvirus 5
uaccccgccgccg

SEQ ID NO: 3983330 - RNA, 14 nt, Human herpesvirus 5
uaccccucgcuggg

SEQ ID NO: 3983331 - RNA, 19 nt, Human herpesvirus 5
uacccgccccagcagacca

SEQ ID NO: 3983332 - RNA, 15 nt, Human herpesvirus 5
uaccgaggcgccgcc

SEQ ID NO: 3983333 - RNA, 19 nt, Human herpesvirus 5
uaccgcauuacugggacgc

SEQ ID NO: 3983334 - RNA, 13 nt, Human herpesvirus 5
uaccgccccaccg

SEQ ID NO: 3983335 - RNA, 16 nt, Human herpesvirus 5
uaccucggccuuuuca

SEQ ID NO: 3983336 - RNA, 17 nt, Human herpesvirus 5
uaccuggaggagauggc

SEQ ID NO: 3983337 - RNA, 16 nt, Human herpesvirus 5
uaccuggcuggcgcag

SEQ ID NO: 3983338 - RNA, 14 nt, Human herpesvirus 5
uacgcacgucgccg

SEQ ID NO: 3983339 - RNA, 18 nt, Human herpesvirus 5
uacgcgaccagcugcugg

SEQ ID NO: 3983340 - RNA, 18 nt, Human herpesvirus 5
uacgcgcuggaggcccug

SEQ ID NO: 3983341 - RNA, 19 nt, Human herpesvirus 5
uacggcccggcagcaccau

SEQ ID NO: 3983342 - RNA, 14 nt, Human herpesvirus 5
uacuaccuccccua

SEQ ID NO: 3983343 - RNA, 14 nt, Human herpesvirus 5
uacuacuaccaaua

SEQ ID NO: 3983344 - RNA, 19 nt, Human herpesvirus 5
uacuauagggaggacgaac

SEQ ID NO: 3983345 - RNA, 16 nt, Human herpesvirus 5
uacuaucguaauguag

SEQ ID NO: 3983346 - RNA, 17 nt, Human herpesvirus 5
uagaagcacccauuaca

SEQ ID NO: 3983347 - RNA, 18 nt, Human herpesvirus 5
uagacaggguaacagccu

SEQ ID NO: 3983348 - RNA, 19 nt, Human herpesvirus 5
uagacaucacaguucacca

SEQ ID NO: 3983349 - RNA, 11 nt, Human herpesvirus 5
uagagaggcug

SEQ ID NO: 3983350 - RNA, 22 nt, Human herpesvirus 5
uagccagcuguguauaguuugu

SEQ ID NO: 3983351 - RNA, 13 nt, Human herpesvirus 5
uagcgggcuguca

SEQ ID NO: 3983352 - RNA, 23 nt, Human herpesvirus 5
uaggcggcgcagcgccagccuua

SEQ ID NO: 3983353 - RNA, 19 nt, Human herpesvirus 5
uagguguggcgaaagccuc

SEQ ID NO: 3983354 - RNA, 22 nt, Human herpesvirus 5
uaguaauggaaaguaucgucac

SEQ ID NO: 3983355 - RNA, 22 nt, Human herpesvirus 5
uagugacgugucgggaaaggag

SEQ ID NO: 3983356 - RNA, 20 nt, Human herpesvirus 5
uaguggucuuucacaucgcc

SEQ ID NO: 3983357 - RNA, 14 nt, Human herpesvirus 5
uauaaagauucacu

SEQ ID NO: 3983358 - RNA, 21 nt, Human herpesvirus 5
uauagcaaucuccgucacgcc

SEQ ID NO: 3983359 - RNA, 16 nt, Human herpesvirus 5
uaucaucaaucaccca

SEQ ID NO: 3983360 - RNA, 18 nt, Human herpesvirus 5
uaucaucuaaagacuaua

SEQ ID NO: 3983361 - RNA, 22 nt, Human herpesvirus 5
uaucaucugucugcgagcaccu

SEQ ID NO: 3983362 - RNA, 17 nt, Human herpesvirus 5
uauccaauaaacccauc

SEQ ID NO: 3983363 - RNA, 22 nt, Human herpesvirus 5
uaucuguguccgcccgagcagg

SEQ ID NO: 3983364 - RNA, 21 nt, Human herpesvirus 5
uaucuuuguagccucaagaau

SEQ ID NO: 3983365 - RNA, 13 nt, Human herpesvirus 5
uaugagggccugc

SEQ ID NO: 3983366 - RNA, 18 nt, Human herpesvirus 5
uaugaugcuccgacuguc

SEQ ID NO: 3983367 - RNA, 16 nt, Human herpesvirus 5
uaugcuaauauaucca

SEQ ID NO: 3983368 - RNA, 12 nt, Human herpesvirus 5
uauggugaccau

SEQ ID NO: 3983369 - RNA, 22 nt, Human herpesvirus 5
uaugugcucccgacccacgguc

SEQ ID NO: 3983370 - RNA, 13 nt, Human herpesvirus 5
uauguggcugcgc

SEQ ID NO: 3983371 - RNA, 22 nt, Human herpesvirus 5
uauucucaacacguaacgucuu

SEQ ID NO: 3983372 - RNA, 16 nt, Human herpesvirus 5
uauugaaaucuaccug

SEQ ID NO: 3983373 - RNA, 13 nt, Human herpesvirus 5
uauuuuacaggua

SEQ ID NO: 3983374 - RNA, 15 nt, Human herpesvirus 5
ucaaaagccugggua

SEQ ID NO: 3983375 - RNA, 22 nt, Human herpesvirus 5
ucaaauuuuaucuuggauaaau

SEQ ID NO: 3983376 - RNA, 14 nt, Human herpesvirus 5
ucaacagcagcaac

SEQ ID NO: 3983377 - RNA, 17 nt, Human herpesvirus 5
ucaacagcagcaacagc

SEQ ID NO: 3983378 - RNA, 19 nt, Human herpesvirus 5
ucaaccauuggcaacauca

SEQ ID NO: 3983379 - RNA, 20 nt, Human herpesvirus 5
ucaacgacgagaugaaggaa

SEQ ID NO: 3983380 - RNA, 22 nt, Human herpesvirus 5
ucaagaccgaugugugggaccu

SEQ ID NO: 3983381 - RNA, 19 nt, Human herpesvirus 5
ucaagggucacggugccau

SEQ ID NO: 3983382 - RNA, 16 nt, Human herpesvirus 5
ucaauaaucuccugag

SEQ ID NO: 3983383 - RNA, 18 nt, Human herpesvirus 5
ucaauaaucuccugagac

SEQ ID NO: 3983384 - RNA, 21 nt, Human herpesvirus 5
ucaauugcgggcccugcugac

SEQ ID NO: 3983385 - RNA, 21 nt, Human herpesvirus 5
ucacacuaagaauaaagaaaa

SEQ ID NO: 3983386 - RNA, 15 nt, Human herpesvirus 5
ucacacuuaagaaaa

SEQ ID NO: 3983387 - RNA, 18 nt, Human herpesvirus 5
ucaccaaggcgagccacu

SEQ ID NO: 3983388 - RNA, 14 nt, Human herpesvirus 5
ucaccaccaucagc

SEQ ID NO: 3983389 - RNA, 18 nt, Human herpesvirus 5
ucaccaucgugccgcucc

SEQ ID NO: 3983390 - RNA, 12 nt, Human herpesvirus 5
ucacccgccuca

SEQ ID NO: 3983391 - RNA, 20 nt, Human herpesvirus 5
ucaccguauggcugcgcgug

SEQ ID NO: 3983392 - RNA, 14 nt, Human herpesvirus 5
ucaccugcagcgcu

SEQ ID NO: 3983393 - RNA, 21 nt, Human herpesvirus 5
aacuauuccuccguguucuua

SEQ ID NO: 3983394 - RNA, 20 nt, Human herpesvirus 5
aagaaacccucaaaacauca

SEQ ID NO: 3983395 - RNA, 15 nt, Human herpesvirus 5
aagaagaaccugccg

SEQ ID NO: 3983396 - RNA, 19 nt, Human herpesvirus 5
aagaaugcaacgcuuucag

SEQ ID NO: 3983397 - RNA, 22 nt, Human herpesvirus 5
aagaccauuaacaauuccacgc

SEQ ID NO: 3983398 - RNA, 20 nt, Human herpesvirus 5
aagaggaagccgcugcuaaa

SEQ ID NO: 3983399 - RNA, 20 nt, Human herpesvirus 5
aagaugggacgugguaacga

SEQ ID NO: 3983400 - RNA, 17 nt, Human herpesvirus 5
aagcccguggcccagga

SEQ ID NO: 3983401 - RNA, 23 nt, Human herpesvirus 5
aagcccuacuuuguguuucucgc

SEQ ID NO: 3983402 - RNA, 19 nt, Human herpesvirus 5
aagccgacaaccugcugca

SEQ ID NO: 3983403 - RNA, 13 nt, Human herpesvirus 5
aagcguucagugu

SEQ ID NO: 3983404 - RNA, 18 nt, Human herpesvirus 5
aagcugcggcggcuuggg

SEQ ID NO: 3983405 - RNA, 12 nt, Human herpesvirus 5
aagcuguaaggu

SEQ ID NO: 3983406 - RNA, 17 nt, Human herpesvirus 5
aaggccgugccgccgcg

SEQ ID NO: 3983407 - RNA, 17 nt, Human herpesvirus 5
aaggcgcgggugguguu

SEQ ID NO: 3983408 - RNA, 16 nt, Human herpesvirus 5
aagggauaguggcucg

SEQ ID NO: 3983409 - RNA, 18 nt, Human herpesvirus 5
aagggcgcgggcggccag

SEQ ID NO: 3983410 - RNA, 20 nt, Human herpesvirus 5
aaguaccucuaacaacguca

SEQ ID NO: 3983411 - RNA, 13 nt, Human herpesvirus 5
aagucacaggaaa

SEQ ID NO: 3983412 - RNA, 15 nt, Human herpesvirus 5
aaguccccccacgga

SEQ ID NO: 3983413 - RNA, 22 nt, Human herpesvirus 5
aagugccugcacgaccugcucc

SEQ ID NO: 3983414 - RNA, 13 nt, Human herpesvirus 5
aaguguugaccac

SEQ ID NO: 3983415 - RNA, 13 nt, Human herpesvirus 5
aauaaaaaacagc

SEQ ID NO: 3983416 - RNA, 18 nt, Human herpesvirus 5
aauacggcugccacuaca

SEQ ID NO: 3983417 - RNA, 19 nt, Human herpesvirus 5
aaucaccgucgagaaaacu

SEQ ID NO: 3983418 - RNA, 19 nt, Human herpesvirus 5
aaucacuuuuaacagcuca

SEQ ID NO: 3983419 - RNA, 12 nt, Human herpesvirus 5
aauccggcggcg

SEQ ID NO: 3983420 - RNA, 20 nt, Human herpesvirus 5
aaucuaggaacacugaaaac

SEQ ID NO: 3983421 - RNA, 15 nt, Human herpesvirus 5
aauucaauaaaaacc

SEQ ID NO: 3983422 - RNA, 22 nt, Human herpesvirus 5
aauugcgaagccagcuacagcc

SEQ ID NO: 3983423 - RNA, 20 nt, Human herpesvirus 5
aauugcucuacugcaacugc

SEQ ID NO: 3983424 - RNA, 18 nt, Human herpesvirus 5
acaaaaaaaaggaggaca

SEQ ID NO: 3983425 - RNA, 17 nt, Human herpesvirus 5
acaaagcccgggccgcc

SEQ ID NO: 3983426 - RNA, 14 nt, Human herpesvirus 5
acaaccugcugcac

SEQ ID NO: 3983427 - RNA, 16 nt, Human herpesvirus 5
acaaccugugguguac

SEQ ID NO: 3983428 - RNA, 18 nt, Human herpesvirus 5
acaagacggaggagacac

SEQ ID NO: 3983429 - RNA, 19 nt, Human herpesvirus 5
acaagcuguggcugcacac

SEQ ID NO: 3983430 - RNA, 13 nt, Human herpesvirus 5
acaaugucacugu

SEQ ID NO: 3983431 - RNA, 17 nt, Human herpesvirus 5
acacaggccagcugcca

SEQ ID NO: 3983432 - RNA, 22 nt, Human herpesvirus 5
acaccaguauugguucugggcg

SEQ ID NO: 3983433 - RNA, 18 nt, Human herpesvirus 5
acaccugagacuggucug

SEQ ID NO: 3983434 - RNA, 19 nt, Human herpesvirus 5
acaccuguuggagcaacgg

SEQ ID NO: 3983435 - RNA, 23 nt, Human herpesvirus 5
acacgccauaacaaaccacggac

SEQ ID NO: 3983436 - RNA, 13 nt, Human herpesvirus 5
acgacgacgcgcc

SEQ ID NO: 3983437 - RNA, 17 nt, Human herpesvirus 5
acgacgacgcgcccccc

SEQ ID NO: 3983438 - RNA, 13 nt, Human herpesvirus 5
acgacgcggcguu

SEQ ID NO: 3983439 - RNA, 18 nt, Human herpesvirus 5
acgacggcgguuucagcu

SEQ ID NO: 3983440 - RNA, 20 nt, Human herpesvirus 5
acgagcgccguccugcagac

SEQ ID NO: 3983441 - RNA, 19 nt, Human herpesvirus 5
acgaguaucucgacgacug

SEQ ID NO: 3983442 - RNA, 22 nt, Human herpesvirus 5
acgagugacgacgacgcugcuu

SEQ ID NO: 3983443 - RNA, 21 nt, Human herpesvirus 5
acgauaaaaauccuauuguuu

SEQ ID NO: 3983444 - RNA, 16 nt, Human herpesvirus 5
acgaucgcuggugucu

SEQ ID NO: 3983445 - RNA, 20 nt, Human herpesvirus 5
acgcacuuuuuauucuuggu

SEQ ID NO: 3983446 - RNA, 15 nt, Human herpesvirus 5
acgcaggugaggcuc

SEQ ID NO: 3983447 - RNA, 17 nt, Human herpesvirus 5
acgccaacuccgugcca

SEQ ID NO: 3983448 - RNA, 19 nt, Human herpesvirus 5
acgccgcgacaacggccgc

SEQ ID NO: 3983449 - RNA, 16 nt, Human herpesvirus 5
acgccgugggcggcga

SEQ ID NO: 3983450 - RNA, 18 nt, Human herpesvirus 5
acgccuugcaccugggug

SEQ ID NO: 3983451 - RNA, 18 nt, Human herpesvirus 5
acgcgccucauggcggcg

SEQ ID NO: 3983452 - RNA, 17 nt, Human herpesvirus 5
acgcgcgcccgcgccuc

SEQ ID NO: 3983453 - RNA, 15 nt, Human herpesvirus 5
acgcgcggcggcgga

SEQ ID NO: 3983454 - RNA, 22 nt, Human herpesvirus 5
acgcgcggcuagagcgcgaguu

SEQ ID NO: 3983455 - RNA, 15 nt, Human herpesvirus 5
acgcgcgucggccgc

SEQ ID NO: 3983456 - RNA, 16 nt, Human herpesvirus 5
acgcgcuggaggcccu

SEQ ID NO: 3983457 - RNA, 23 nt, Human herpesvirus 5
acgcggaccgaucaccagaaggc

SEQ ID NO: 3983458 - RNA, 13 nt, Human herpesvirus 5
acgcgugcgggug

SEQ ID NO: 3983459 - RNA, 17 nt, Human herpesvirus 5
acgcguggcccuggucu

SEQ ID NO: 3983460 - RNA, 17 nt, Human herpesvirus 5
acgcuacgaccuggccu

SEQ ID NO: 3983461 - RNA, 14 nt, Human herpesvirus 5
acgcugauggccua

SEQ ID NO: 3983462 - RNA, 13 nt, Human herpesvirus 5
acgcuggaggacg

SEQ ID NO: 3983463 - RNA, 19 nt, Human herpesvirus 5
acgcuggcucacgccggca

SEQ ID NO: 3983464 - RNA, 20 nt, Human herpesvirus 5
acgcugucuugcuuaaugau

SEQ ID NO: 3983465 - RNA, 14 nt, Human herpesvirus 5
acgcuuccugcgcg

SEQ ID NO: 3983466 - RNA, 12 nt, Human herpesvirus 5
acgcuuucagga

SEQ ID NO: 3983467 - RNA, 16 nt, Human herpesvirus 5
acgcuuuuaugaaggu

SEQ ID NO: 3983468 - RNA, 17 nt, Human herpesvirus 5
acggacggcaaggcgga

SEQ ID NO: 3983469 - RNA, 22 nt, Human herpesvirus 5
acggagcucccacguuuacgcg

SEQ ID NO: 3983470 - RNA, 11 nt, Human herpesvirus 5
acggaggagac

SEQ ID NO: 3983471 - RNA, 21 nt, Human herpesvirus 5
acggaguuuucccucagccuc

SEQ ID NO: 3983472 - RNA, 19 nt, Human herpesvirus 5
acggauugcgccaguuguc

SEQ ID NO: 3983473 - RNA, 22 nt, Human herpesvirus 5
acggcagcgccagcggccuggc

SEQ ID NO: 3983474 - RNA, 17 nt, Human herpesvirus 5
acggcauagugccagcc

SEQ ID NO: 3983475 - RNA, 18 nt, Human herpesvirus 5
acggcaucaugcugggcg

SEQ ID NO: 3983476 - RNA, 14 nt, Human herpesvirus 5
acggccagcuccac

SEQ ID NO: 3983477 - RNA, 15 nt, Human herpesvirus 5
acggcccggcagcac

SEQ ID NO: 3983478 - RNA, 15 nt, Human herpesvirus 5
acggccucugggcug

SEQ ID NO: 3983479 - RNA, 22 nt, Human herpesvirus 5
acggccucugggcugagacagg

SEQ ID NO: 3983480 - RNA, 14 nt, Human herpesvirus 5
acggccuguggugc

SEQ ID NO: 3983481 - RNA, 16 nt, Human herpesvirus 5
acggcgcucuuucagc

SEQ ID NO: 3983482 - RNA, 17 nt, Human herpesvirus 5
acggcggaggagacggc

SEQ ID NO: 3983483 - RNA, 13 nt, Human herpesvirus 5
acggcgguuugaa

SEQ ID NO: 3983484 - RNA, 14 nt, Human herpesvirus 5
acggcgucuuccuc

SEQ ID NO: 3983485 - RNA, 14 nt, Human herpesvirus 5
acgggacggcggcg

SEQ ID NO: 3983486 - RNA, 14 nt, Human herpesvirus 5
acgggcugcugguc

SEQ ID NO: 3983487 - RNA, 20 nt, Human herpesvirus 5
acgguaccgcugggaugggu

SEQ ID NO: 3983488 - RNA, 22 nt, Human herpesvirus 5
acgguacgcagucacugcgugu

SEQ ID NO: 3983489 - RNA, 13 nt, Human herpesvirus 5
acggucugcuugc

SEQ ID NO: 3983490 - RNA, 21 nt, Human herpesvirus 5
acggugcgcggcgacaagcug

SEQ ID NO: 3983491 - RNA, 14 nt, Human herpesvirus 5
acgucaaagcucac

SEQ ID NO: 3983492 - RNA, 20 nt, Human herpesvirus 5
acgucacuauccgaugguuu

SEQ ID NO: 3983493 - RNA, 18 nt, Human herpesvirus 5
acgucaguuuaucgagcg

SEQ ID NO: 3983494 - RNA, 22 nt, Human herpesvirus 5
acgucgaucuugacgcugcugg

SEQ ID NO: 3983495 - RNA, 21 nt, Human herpesvirus 5
acgucggccaacaaccacggc

SEQ ID NO: 3983496 - RNA, 23 nt, Human herpesvirus 5
acgucguuagccagcgucggcau

SEQ ID NO: 3983497 - RNA, 22 nt, Human herpesvirus 5
acguggaaggcggcucgcugga

SEQ ID NO: 3983498 - RNA, 23 nt, Human herpesvirus 5
acguuggcucucgcagcccgagg

SEQ ID NO: 3983499 - RNA, 19 nt, Human herpesvirus 5
acuaacguguccgcggaca

SEQ ID NO: 3983500 - RNA, 16 nt, Human herpesvirus 5
acuacguugggucugc

SEQ ID NO: 3983501 - RNA, 19 nt, Human herpesvirus 5
acuacguugggucugcgcu

SEQ ID NO: 3983502 - RNA, 15 nt, Human herpesvirus 5
acuauguggcuccgc

SEQ ID NO: 3983503 - RNA, 15 nt, Human herpesvirus 5
acuauuguauacucu

SEQ ID NO: 3983504 - RNA, 23 nt, Human herpesvirus 5
acuauuuuuuguaacacuacagc

SEQ ID NO: 3983505 - RNA, 16 nt, Human herpesvirus 5
acucagagccacugau

SEQ ID NO: 3983506 - RNA, 17 nt, Human herpesvirus 5
acucccaccacgguuuc

SEQ ID NO: 3983507 - RNA, 19 nt, Human herpesvirus 5
acucgcacaaccuguggug

SEQ ID NO: 3983508 - RNA, 18 nt, Human herpesvirus 5
acucgcaccggcagcaca

SEQ ID NO: 3983509 - RNA, 22 nt, Human herpesvirus 5
acucgcugccgcagcugcugga

SEQ ID NO: 3983510 - RNA, 23 nt, Human herpesvirus 5
acucgcugccgcagcugcuggag

SEQ ID NO: 3983511 - RNA, 17 nt, Human herpesvirus 5
acucuauguuauacucu

SEQ ID NO: 3983512 - RNA, 19 nt, Human herpesvirus 5
acucuauguuauacucugu

SEQ ID NO: 3983513 - RNA, 16 nt, Human herpesvirus 5
acugacacagcuccug

SEQ ID NO: 3983514 - RNA, 21 nt, Human herpesvirus 5
acugaccaagcuaguagcggc

SEQ ID NO: 3983515 - RNA, 14 nt, Human herpesvirus 5
acugaucgccugga

SEQ ID NO: 3983516 - RNA, 19 nt, Human herpesvirus 5
acugcgacggcagcgccag

SEQ ID NO: 3983517 - RNA, 16 nt, Human herpesvirus 5
acugggagacggccug

SEQ ID NO: 3983518 - RNA, 23 nt, Human herpesvirus 5
acuggggacggugaugaugcugc

SEQ ID NO: 3983519 - RNA, 21 nt, Human herpesvirus 5
acugggugcugccgggcggcu

SEQ ID NO: 3983520 - RNA, 21 nt, Human herpesvirus 5
acugucgccacuauguccucc

SEQ ID NO: 3983521 - RNA, 16 nt, Human herpesvirus 5
acugucggggcgcaga

SEQ ID NO: 3983522 - RNA, 15 nt, Human herpesvirus 5
acuucccccuccccu

SEQ ID NO: 3983523 - RNA, 22 nt, Human herpesvirus 5
acuucgcuagucaauaaagaaa

SEQ ID NO: 3983524 - RNA, 12 nt, Human herpesvirus 5
acuucuacggag

SEQ ID NO: 3983525 - RNA, 13 nt, Human herpesvirus 5
acuugaguaccaa

SEQ ID NO: 3983526 - RNA, 15 nt, Human herpesvirus 5
acuuuaggcggcgca

SEQ ID NO: 3983527 - RNA, 22 nt, Human herpesvirus 5
acuuuguagugcgcgccgccga

SEQ ID NO: 3983528 - RNA, 19 nt, Human herpesvirus 5
acuuuguggggcugcucaa

SEQ ID NO: 3983529 - RNA, 13 nt, Human herpesvirus 5
agaaagagcagcg

SEQ ID NO: 3983530 - RNA, 15 nt, Human herpesvirus 5
agaaagucacaggaa

SEQ ID NO: 3983531 - RNA, 22 nt, Human herpesvirus 5
agaaaguuguccgcgggcaauu

SEQ ID NO: 3983532 - RNA, 15 nt, Human herpesvirus 5
agaacuuugcugcua

SEQ ID NO: 3983533 - RNA, 23 nt, Human herpesvirus 5
agacaaccaaaacgucaggaauc

SEQ ID NO: 3983534 - RNA, 10 nt, Human herpesvirus 5
agacacaccg

SEQ ID NO: 3983535 - RNA, 21 nt, Human herpesvirus 5
agaccaagagcaugcuguggg

SEQ ID NO: 3983536 - RNA, 15 nt, Human herpesvirus 5
agacccacuaccugg

SEQ ID NO: 3983537 - RNA, 17 nt, Human herpesvirus 5
agacccaucgcaccauc

SEQ ID NO: 3983538 - RNA, 21 nt, Human herpesvirus 5
agacggcgugacacagcacgc

SEQ ID NO: 3983539 - RNA, 20 nt, Human herpesvirus 5
agacuacaugcuauaagaca

SEQ ID NO: 3983540 - RNA, 16 nt, Human herpesvirus 5
agagaaacccccaccc

SEQ ID NO: 3983541 - RNA, 17 nt, Human herpesvirus 5
agagacaccaauugcuu

SEQ ID NO: 3983542 - RNA, 15 nt, Human herpesvirus 5
agagacagagaccgc

SEQ ID NO: 3983543 - RNA, 15 nt, Human herpesvirus 5
agagccaugaagcgg

SEQ ID NO: 3983544 - RNA, 17 nt, Human herpesvirus 5
agagcucggucaacgcg

SEQ ID NO: 3983545 - RNA, 16 nt, Human herpesvirus 5
agaguuguggcaaaga

SEQ ID NO: 3983546 - RNA, 12 nt, Human herpesvirus 5
agauagagaaac

SEQ ID NO: 3983547 - RNA, 22 nt, Human herpesvirus 5
uuuaugacgcgcguggccgcgc

SEQ ID NO: 3983548 - RNA, 14 nt, Human herpesvirus 5
uuucaacaaauacc

SEQ ID NO: 3983549 - RNA, 12 nt, Human herpesvirus 5
uuucucaucuca

SEQ ID NO: 3983550 - RNA, 15 nt, Human herpesvirus 5
uuuggcgugcccagc

SEQ ID NO: 3983551 - RNA, 21 nt, Human herpesvirus 5
uuuuaucgucucaauaaaagc

SEQ ID NO: 3983552 - RNA, 21 nt, Human herpesvirus 5
uuuugggucagcggcacgccg

SEQ ID NO: 3983553 - RNA, 20 nt, Human herpesvirus 5
uuuuuaauaaaaaacaaggu

SEQ ID NO: 3983554 - RNA, 22 nt, Human herpesvirus 5
uuuuucuaugauaugcgugucu

SEQ ID NO: 3983555 - RNA, 14 nt, Human herpesvirus 5
gagugcaucucgag

SEQ ID NO: 3983556 - RNA, 15 nt, Human herpesvirus 5
gaguggcugcugugu

SEQ ID NO: 3983557 - RNA, 20 nt, Human herpesvirus 5
gaguggggcaacugcugccu

SEQ ID NO: 3983558 - RNA, 19 nt, Human herpesvirus 5
gaguuggugcagcugcgcc

SEQ ID NO: 3983559 - RNA, 22 nt, Human herpesvirus 5
gauaaaauuugauuacuccgug

SEQ ID NO: 3983560 - RNA, 15 nt, Human herpesvirus 5
gauaaccuaccuggu

SEQ ID NO: 3983561 - RNA, 17 nt, Human herpesvirus 5
gauaaccuaccuggugu

SEQ ID NO: 3983562 - RNA, 18 nt, Human herpesvirus 5
gauacagggugccgccac

SEQ ID NO: 3983563 - RNA, 15 nt, Human herpesvirus 5
gauacuaguaaaagg

SEQ ID NO: 3983564 - RNA, 13 nt, Human herpesvirus 5
gaucaccacccug

SEQ ID NO: 3983565 - RNA, 21 nt, Human herpesvirus 5
gaucacgccuugcgcggccgu

SEQ ID NO: 3983566 - RNA, 23 nt, Human herpesvirus 5
gaucaucuguuuuugcugcaacg

SEQ ID NO: 3983567 - RNA, 21 nt, Human herpesvirus 5
gaucgugggugguagaacuga

SEQ ID NO: 3983568 - RNA, 15 nt, Human herpesvirus 5
gaugaaaacgagguc

SEQ ID NO: 3983569 - RNA, 20 nt, Human herpesvirus 5
gaugaacgggugggcugggg

SEQ ID NO: 3983570 - RNA, 13 nt, Human herpesvirus 5
gaugaaucaugug

SEQ ID NO: 3983571 - RNA, 15 nt, Human herpesvirus 5
gaugaauuguuacca

SEQ ID NO: 3983572 - RNA, 18 nt, Human herpesvirus 5
gaugaccauguucagcuu

SEQ ID NO: 3983573 - RNA, 15 nt, Human herpesvirus 5
gaugagauaaaagua

SEQ ID NO: 3983574 - RNA, 17 nt, Human herpesvirus 5
gaugaucauggagccgc

SEQ ID NO: 3983575 - RNA, 20 nt, Human herpesvirus 5
gaugcgccuccgguggugcg

SEQ ID NO: 3983576 - RNA, 17 nt, Human herpesvirus 5
gauggccaucacgggca

SEQ ID NO: 3983577 - RNA, 15 nt, Human herpesvirus 5
gauggccgacgaggc

SEQ ID NO: 3983578 - RNA, 19 nt, Human herpesvirus 5
gauguaccugcagcucgaa

SEQ ID NO: 3983579 - RNA, 16 nt, Human herpesvirus 5
gauguacgcgugccug

SEQ ID NO: 3983580 - RNA, 21 nt, Human herpesvirus 5
gauguaguacaucgcgugcga

SEQ ID NO: 3983581 - RNA, 14 nt, Human herpesvirus 5
gaugugcagggaca

SEQ ID NO: 3983582 - RNA, 24 nt, Human herpesvirus 5
gauuuucaugaauccacaggcugc

SEQ ID NO: 3983583 - RNA, 17 nt, Human herpesvirus 5
gauuuucgcgcucuugu

SEQ ID NO: 3983584 - RNA, 17 nt, Human herpesvirus 5
gcaacaacgguagauga

SEQ ID NO: 3983585 - RNA, 22 nt, Human herpesvirus 5
gcaacagcagccaccgacacag

SEQ ID NO: 3983586 - RNA, 23 nt, Human herpesvirus 5
gcaacagcagccaccgacacagc

SEQ ID NO: 3983587 - RNA, 17 nt, Human herpesvirus 5
gcaacggaccgcugucg

SEQ ID NO: 3983588 - RNA, 23 nt, Human herpesvirus 5
gcaagacuacaugcuauaagaca

SEQ ID NO: 3983589 - RNA, 13 nt, Human herpesvirus 5
gcaagagccggaa

SEQ ID NO: 3983590 - RNA, 16 nt, Human herpesvirus 5
gcaagaugggcaccgu

SEQ ID NO: 3983591 - RNA, 16 nt, Human herpesvirus 5
gcaagggcugcucggc

SEQ ID NO: 3983592 - RNA, 14 nt, Human herpesvirus 5
gcaagugcucgacu

SEQ ID NO: 3983593 - RNA, 13 nt, Human herpesvirus 5
gcacaugaugcaa

SEQ ID NO: 3983594 - RNA, 21 nt, Human herpesvirus 5
gcaccacggccuuauguggcu

SEQ ID NO: 3983595 - RNA, 20 nt, Human herpesvirus 5
gcaccagacuuggagacaug

SEQ ID NO: 3983596 - RNA, 16 nt, Human herpesvirus 5
gcaccaugagaagaga

SEQ ID NO: 3983597 - RNA, 17 nt, Human herpesvirus 5
gcacccgucaugguaca

SEQ ID NO: 3983598 - RNA, 13 nt, Human herpesvirus 5
gcaccgcgacagc

SEQ ID NO: 3983599 - RNA, 21 nt, Human herpesvirus 5
gcaccgcgacagcuaccgagg

SEQ ID NO: 3983600 - RNA, 16 nt, Human herpesvirus 5
gcaccggccuccgacg

SEQ ID NO: 3983601 - RNA, 20 nt, Human herpesvirus 5
gcaccugugugaucugggca

SEQ ID NO: 3983602 - RNA, 22 nt, Human herpesvirus 5
gcacgacaucuuccgcgagcac

SEQ ID NO: 3983603 - RNA, 15 nt, Human herpesvirus 5
gcacgcgauuggcca

SEQ ID NO: 3983604 - RNA, 18 nt, Human herpesvirus 5
gcacgcgcuagccuuucu

SEQ ID NO: 3983605 - RNA, 14 nt, Human herpesvirus 5
gcacguggccuggc

SEQ ID NO: 3983606 - RNA, 13 nt, Human herpesvirus 5
gcacguugccggc

SEQ ID NO: 3983607 - RNA, 17 nt, Human herpesvirus 5
gcacuugucauuaaaca

SEQ ID NO: 3983608 - RNA, 19 nt, Human herpesvirus 5
gcagaacccgguugcggcc

SEQ ID NO: 3983609 - RNA, 13 nt, Human herpesvirus 5
gcagaaugaacaa

SEQ ID NO: 3983610 - RNA, 17 nt, Human herpesvirus 5
gcagaccuacagcaccc

SEQ ID NO: 3983611 - RNA, 21 nt, Human herpesvirus 5
gcagauucaguaaccuggagc

SEQ ID NO: 3983612 - RNA, 15 nt, Human herpesvirus 5
gcagcaacagcagcc

SEQ ID NO: 3983613 - RNA, 15 nt, Human herpesvirus 5
gcagcaacagccccg

SEQ ID NO: 3983614 - RNA, 19 nt, Human herpesvirus 5
gcagcaauagcagccgaca

SEQ ID NO: 3983615 - RNA, 20 nt, Human herpesvirus 5
gcagcaccaugccggagcua

SEQ ID NO: 3983616 - RNA, 15 nt, Human herpesvirus 5
gcagcaucgcgugcg

SEQ ID NO: 3983617 - RNA, 22 nt, Human herpesvirus 5
gcagcaugggcgacaccgccuc

SEQ ID NO: 3983618 - RNA, 17 nt, Human herpesvirus 5
gcagcauucaccuccag

SEQ ID NO: 3983619 - RNA, 13 nt, Human herpesvirus 5
gcagcccaccgcc

SEQ ID NO: 3983620 - RNA, 19 nt, Human herpesvirus 5
gcagcccggcuccgcgcag

SEQ ID NO: 3983621 - RNA, 16 nt, Human herpesvirus 5
gcagccgacacagcgg

SEQ ID NO: 3983622 - RNA, 14 nt, Human herpesvirus 5
gcagccgccgcgug

SEQ ID NO: 3983623 - RNA, 16 nt, Human herpesvirus 5
gcagccggaggagcag

SEQ ID NO: 3983624 - RNA, 18 nt, Human herpesvirus 5
gcagccguuuccagagaa

SEQ ID NO: 3983625 - RNA, 19 nt, Human herpesvirus 5
gcagccguuuccagagaac

SEQ ID NO: 3983626 - RNA, 22 nt, Human herpesvirus 5
gcagcggggagaaaaguggcag

SEQ ID NO: 3983627 - RNA, 17 nt, Human herpesvirus 5
gcagcgucacagagggc

SEQ ID NO: 3983628 - RNA, 18 nt, Human herpesvirus 5
gcagcgugcaccugcugc

SEQ ID NO: 3983629 - RNA, 22 nt, Human herpesvirus 5
gcagcguggccggcguggcggc

SEQ ID NO: 3983630 - RNA, 23 nt, Human herpesvirus 5
gcaggagcugcuuuucgggccgc

SEQ ID NO: 3983631 - RNA, 13 nt, Human herpesvirus 5
gcagucuggcuug

SEQ ID NO: 3983632 - RNA, 21 nt, Human herpesvirus 5
gcauaagaagccaagggggug

SEQ ID NO: 3983633 - RNA, 18 nt, Human herpesvirus 5
gcauacaaugugcugcau

SEQ ID NO: 3983634 - RNA, 21 nt, Human herpesvirus 5
gcauacggggaggagacacag

SEQ ID NO: 3983635 - RNA, 13 nt, Human herpesvirus 5
gcaucacccgccu

SEQ ID NO: 3983636 - RNA, 14 nt, Human herpesvirus 5
gcaucccaccacgg

SEQ ID NO: 3983637 - RNA, 18 nt, Human herpesvirus 5
gcauccgcuacucccgag

SEQ ID NO: 3983638 - RNA, 15 nt, Human herpesvirus 5
gcaucgcaacaacag

SEQ ID NO: 3983639 - RNA, 16 nt, Human herpesvirus 5
gcaucgccugcaccuc

SEQ ID NO: 3983640 - RNA, 15 nt, Human herpesvirus 5
gcaucuccucgccca

SEQ ID NO: 3983641 - RNA, 21 nt, Human herpesvirus 5
gcaugcugugggcccacugcg

SEQ ID NO: 3983642 - RNA, 18 nt, Human herpesvirus 5
gccaaaaucugacgcugu

SEQ ID NO: 3983643 - RNA, 20 nt, Human herpesvirus 5
gccaacuccgugccagcugg

SEQ ID NO: 3983644 - RNA, 12 nt, Human herpesvirus 5
gccacacgcgcu

SEQ ID NO: 3983645 - RNA, 20 nt, Human herpesvirus 5
gccacauuggugaaggccgu

SEQ ID NO: 3983646 - RNA, 24 nt, Human herpesvirus 5
gccaccacccgacugcagcccacc

SEQ ID NO: 3983647 - RNA, 13 nt, Human herpesvirus 5
gccaccacuacca

SEQ ID NO: 3983648 - RNA, 20 nt, Human herpesvirus 5
gccaccaggugccggcgacu

SEQ ID NO: 3983649 - RNA, 23 nt, Human herpesvirus 5
gccaccaggugccggcgacugac

SEQ ID NO: 3983650 - RNA, 12 nt, Human herpesvirus 5
gccaccgugggu

SEQ ID NO: 3983651 - RNA, 22 nt, Human herpesvirus 5
gccagcgaacaccaucucgcgg

SEQ ID NO: 3983652 - RNA, 19 nt, Human herpesvirus 5
gccagcgcgagcgcucggc

SEQ ID NO: 3983653 - RNA, 21 nt, Human herpesvirus 5
gccagcugccaccagggcgac

SEQ ID NO: 3983654 - RNA, 23 nt, Human herpesvirus 5
gccagugauaaguaccagacauc

SEQ ID NO: 3983655 - RNA, 11 nt, Human herpesvirus 5
gccaugaugac

SEQ ID NO: 3983656 - RNA, 11 nt, Human herpesvirus 5
gccaugccuuc

SEQ ID NO: 3983657 - RNA, 21 nt, Human herpesvirus 5
gccccgaagguuagcgccgcg

SEQ ID NO: 3983658 - RNA, 11 nt, Human herpesvirus 5
gcccgagcagg

SEQ ID NO: 3983659 - RNA, 22 nt, Human herpesvirus 5
gcccgaggaucuggcggccgcc

SEQ ID NO: 3983660 - RNA, 15 nt, Human herpesvirus 5
gcccgggccgccgcc

SEQ ID NO: 3983661 - RNA, 20 nt, Human herpesvirus 5
gcccggucggucuuccugcu

SEQ ID NO: 3983662 - RNA, 13 nt, Human herpesvirus 5
gcccgucggcugc

SEQ ID NO: 3983663 - RNA, 16 nt, Human herpesvirus 5
gcccgucggcugccug

SEQ ID NO: 3983664 - RNA, 15 nt, Human herpesvirus 5
guuccacggccagcg

SEQ ID NO: 3983665 - RNA, 17 nt, Human herpesvirus 5
guuccacggccagcgcc

SEQ ID NO: 3983666 - RNA, 23 nt, Human herpesvirus 5
guuccagaccagcgccaccauag

SEQ ID NO: 3983667 - RNA, 14 nt, Human herpesvirus 5
guuccggcggcgug

SEQ ID NO: 3983668 - RNA, 13 nt, Human herpesvirus 5
guuccugcgcgcc

SEQ ID NO: 3983669 - RNA, 18 nt, Human herpesvirus 5
guucgcccugucugcagc

SEQ ID NO: 3983670 - RNA, 14 nt, Human herpesvirus 5
guucgcgauucuca

SEQ ID NO: 3983671 - RNA, 21 nt, Human herpesvirus 5
guucuuccgagucgugucgcu

SEQ ID NO: 3983672 - RNA, 20 nt, Human herpesvirus 5
guugaagacaccuggaaaga

SEQ ID NO: 3983673 - RNA, 21 nt, Human herpesvirus 5
guugcguguuacgcggccgcc

SEQ ID NO: 3983674 - RNA, 19 nt, Human herpesvirus 5
guugcguugggccgagccc

SEQ ID NO: 3983675 - RNA, 18 nt, Human herpesvirus 5
guuggcucccgcugugcu

SEQ ID NO: 3983676 - RNA, 17 nt, Human herpesvirus 5
guuggcucucgcagccc

SEQ ID NO: 3983677 - RNA, 13 nt, Human herpesvirus 5
guuggcugguguc

SEQ ID NO: 3983678 - RNA, 15 nt, Human herpesvirus 5
guugugggugcggac

SEQ ID NO: 3983679 - RNA, 15 nt, Human herpesvirus 5
guuuaugagaaaagg

SEQ ID NO: 3983680 - RNA, 12 nt, Human herpesvirus 5
guuucaaaccca

SEQ ID NO: 3983681 - RNA, 20 nt, Human herpesvirus 5
guuucagcuggcaacgugcc

SEQ ID NO: 3983682 - RNA, 13 nt, Human herpesvirus 5
guuuccacgccac

SEQ ID NO: 3983683 - RNA, 16 nt, Human herpesvirus 5
guuucccccacccgcc

SEQ ID NO: 3983684 - RNA, 20 nt, Human herpesvirus 5
guuucggaguaccgaguaga

SEQ ID NO: 3983685 - RNA, 22 nt, Human herpesvirus 5
guuugcccgaagcggcuguggc

SEQ ID NO: 3983686 - RNA, 12 nt, Human herpesvirus 5
uaaaaaaaccac

SEQ ID NO: 3983687 - RNA, 16 nt, Human herpesvirus 5
uaaaaacaacgucccc

SEQ ID NO: 3983688 - RNA, 12 nt, Human herpesvirus 5
uaaaaaggcaau

SEQ ID NO: 3983689 - RNA, 19 nt, Human herpesvirus 5
uaaacccacgaccauuucc

SEQ ID NO: 3983690 - RNA, 18 nt, Human herpesvirus 5
uaaagauaaucugccaau

SEQ ID NO: 3983691 - RNA, 15 nt, Human herpesvirus 5
uaacaauuccacgcc

SEQ ID NO: 3983692 - RNA, 18 nt, Human herpesvirus 5
uaacaccaaaaauccaga

SEQ ID NO: 3983693 - RNA, 11 nt, Human herpesvirus 5
uaacagccuuc

SEQ ID NO: 3983694 - RNA, 18 nt, Human herpesvirus 5
uaacaugucucuguuuuu

SEQ ID NO: 3983695 - RNA, 21 nt, Human herpesvirus 5
uaaccacgucgaccaggugcu

SEQ ID NO: 3983696 - RNA, 13 nt, Human herpesvirus 5
uaagcaccguggg

SEQ ID NO: 3983697 - RNA, 15 nt, Human herpesvirus 5
uaauguaccaagaau

SEQ ID NO: 3983698 - RNA, 15 nt, Human herpesvirus 5
uacaaguauguggaa

SEQ ID NO: 3983699 - RNA, 22 nt, Human herpesvirus 5
uacagcaccccccucacgcuug

SEQ ID NO: 3983700 - RNA, 22 nt, Human herpesvirus 5
uacaugcuauaagacagccuua

SEQ ID NO: 3983701 - RNA, 13 nt, Human herpesvirus 5
uaccaagaauaaa

SEQ ID NO: 3983702 - RNA, 22 nt, Human herpesvirus 5
uaccaauaaagauaaucugcca

SEQ ID NO: 3983703 - RNA, 14 nt, Human herpesvirus 5
uaccacuacuaccu

SEQ ID NO: 3983704 - RNA, 14 nt, Human herpesvirus 5
uacccacauuuugc

SEQ ID NO: 3983705 - RNA, 16 nt, Human herpesvirus 5
uaccgaggcgccgcca

SEQ ID NO: 3983706 - RNA, 18 nt, Human herpesvirus 5
uaccuucuugcccacgcc

SEQ ID NO: 3983707 - RNA, 19 nt, Human herpesvirus 5
uacgagaucagccgugaga

SEQ ID NO: 3983708 - RNA, 21 nt, Human herpesvirus 5
uacggcagaaaagccggcucc

SEQ ID NO: 3983709 - RNA, 13 nt, Human herpesvirus 5
uacuucccccucc

SEQ ID NO: 3983710 - RNA, 12 nt, Human herpesvirus 5
uacuuuaccuag

SEQ ID NO: 3983711 - RNA, 13 nt, Human herpesvirus 5
uacuuuuacauga

SEQ ID NO: 3983712 - RNA, 19 nt, Human herpesvirus 5
uagaacugaguuuagugcu

SEQ ID NO: 3983713 - RNA, 14 nt, Human herpesvirus 5
uagcacugcgcaac

SEQ ID NO: 3983714 - RNA, 21 nt, Human herpesvirus 5
uagcgcguuuguugcgcggcg

SEQ ID NO: 3983715 - RNA, 13 nt, Human herpesvirus 5
uagcgcucaaagg

SEQ ID NO: 3983716 - RNA, 15 nt, Human herpesvirus 5
uagcgcuccuggauc

SEQ ID NO: 3983717 - RNA, 17 nt, Human herpesvirus 5
uagcgcuugcggcacag

SEQ ID NO: 3983718 - RNA, 14 nt, Human herpesvirus 5
uagcuacuuuggaa

SEQ ID NO: 3983719 - RNA, 19 nt, Human herpesvirus 5
uagggaucauuuucuuggc

SEQ ID NO: 3983720 - RNA, 19 nt, Human herpesvirus 5
uauaaagaaaccacgcguc

SEQ ID NO: 3983721 - RNA, 22 nt, Human herpesvirus 5
uauacaaucauaauauucuaua

SEQ ID NO: 3983722 - RNA, 18 nt, Human herpesvirus 5
uauagauagcggcacuuu

SEQ ID NO: 3983723 - RNA, 14 nt, Human herpesvirus 5
uauagccaauaaag

SEQ ID NO: 3983724 - RNA, 22 nt, Human herpesvirus 5
uauauucaguccauugucagua

SEQ ID NO: 3983725 - RNA, 18 nt, Human herpesvirus 5
uauccaauacggcugcca

SEQ ID NO: 3983726 - RNA, 18 nt, Human herpesvirus 5
uaucgagcgguguagcau

SEQ ID NO: 3983727 - RNA, 21 nt, Human herpesvirus 5
uaucgcguguguucuauggcc

SEQ ID NO: 3983728 - RNA, 12 nt, Human herpesvirus 5
uaucggaagcug

SEQ ID NO: 3983729 - RNA, 14 nt, Human herpesvirus 5
uaugagaaaaggga

SEQ ID NO: 3983730 - RNA, 21 nt, Human herpesvirus 5
uauggacaauuccccucgccu

SEQ ID NO: 3983731 - RNA, 17 nt, Human herpesvirus 5
ucaacacggucauguuu

SEQ ID NO: 3983732 - RNA, 11 nt, Human herpesvirus 5
ucaaguucagu

SEQ ID NO: 3983733 - RNA, 14 nt, Human herpesvirus 5
ucaauaaaaaccac

SEQ ID NO: 3983734 - RNA, 17 nt, Human herpesvirus 5
ucaauaaagaaaaccac

SEQ ID NO: 3983735 - RNA, 18 nt, Human herpesvirus 5
ucaauacaucauaugcua

SEQ ID NO: 3983736 - RNA, 23 nt, Human herpesvirus 5
ucaaucagacuuucgacgugcgc

SEQ ID NO: 3983737 - RNA, 16 nt, Human herpesvirus 5
ucaauugcgggcccug

SEQ ID NO: 3983738 - RNA, 17 nt, Human herpesvirus 5
ucaccaaagccgccgcc

SEQ ID NO: 3983739 - RNA, 20 nt, Human herpesvirus 5
ucaccaccuugucuccccgg

SEQ ID NO: 3983740 - RNA, 15 nt, Human herpesvirus 5
ucaccacucccacca

SEQ ID NO: 3983741 - RNA, 20 nt, Human herpesvirus 5
ucaccagaaugcuaguuugu

SEQ ID NO: 3983742 - RNA, 16 nt, Human herpesvirus 5
ucaccgugccccacuc

SEQ ID NO: 3983743 - RNA, 23 nt, Human herpesvirus 5
ucaccgugcucgugcccaucguc

SEQ ID NO: 3983744 - RNA, 21 nt, Human herpesvirus 5
ucacgaaaggcaccggcagcc

SEQ ID NO: 3983745 - RNA, 18 nt, Human herpesvirus 5
ucacgccuugcgcggccg

SEQ ID NO: 3983746 - RNA, 13 nt, Human herpesvirus 5
ucacuacucuggg

SEQ ID NO: 3983747 - RNA, 17 nt, Human herpesvirus 5
ucacuuuauugaaaucu

SEQ ID NO: 3983748 - RNA, 17 nt, Human herpesvirus 5
ucagaaagcugcaauca

SEQ ID NO: 3983749 - RNA, 17 nt, Human herpesvirus 5
ucagaccgcaacaacag

SEQ ID NO: 3983750 - RNA, 13 nt, Human herpesvirus 5
ucagcagcaccuc

SEQ ID NO: 3983751 - RNA, 21 nt, Human herpesvirus 5
ucagccucuguguucccaaca

SEQ ID NO: 3983752 - RNA, 19 nt, Human herpesvirus 5
ucagcgacgucccgcgcgg

SEQ ID NO: 3983753 - RNA, 13 nt, Human herpesvirus 5
ucagcgaggccga

SEQ ID NO: 3983754 - RNA, 22 nt, Human herpesvirus 5
ucagcggcguguacagcuaccu

SEQ ID NO: 3983755 - RNA, 11 nt, Human herpesvirus 5
guaaggcggcg

SEQ ID NO: 3983756 - RNA, 23 nt, Human herpesvirus 5
guaaugccaugcggauccagcug

SEQ ID NO: 3983757 - RNA, 16 nt, Human herpesvirus 5
guacaccgcuggagcu

SEQ ID NO: 3983758 - RNA, 23 nt, Human herpesvirus 5
guacaccgcuggagcuaucugug

SEQ ID NO: 3983759 - RNA, 16 nt, Human herpesvirus 5
guaccaucuggcgcag

SEQ ID NO: 3983760 - RNA, 19 nt, Human herpesvirus 5
guaccgucuccaccacagu

SEQ ID NO: 3983761 - RNA, 20 nt, Human herpesvirus 5
guaccuagcuacuuuggaau

SEQ ID NO: 3983762 - RNA, 22 nt, Human herpesvirus 5
guaccugaaaccuaccugggcu

SEQ ID NO: 3983763 - RNA, 19 nt, Human herpesvirus 5
guacucgcaggugugcgcg

SEQ ID NO: 3983764 - RNA, 14 nt, Human herpesvirus 5
guagaacugaguuu

SEQ ID NO: 3983765 - RNA, 20 nt, Human herpesvirus 5
guagcaccggccccacgcug

SEQ ID NO: 3983766 - RNA, 12 nt, Human herpesvirus 5
guauggcugcgc

SEQ ID NO: 3983767 - RNA, 22 nt, Human herpesvirus 5
gucaaagccgacaaccugcugc

SEQ ID NO: 3983768 - RNA, 17 nt, Human herpesvirus 5
gucaacaucaucagcgc

SEQ ID NO: 3983769 - RNA, 20 nt, Human herpesvirus 5
gucaccaguuccugcgcgcc

SEQ ID NO: 3983770 - RNA, 17 nt, Human herpesvirus 5
gucaccucucgggccga

SEQ ID NO: 3983771 - RNA, 14 nt, Human herpesvirus 5
gucacgcaggugag

SEQ ID NO: 3983772 - RNA, 16 nt, Human herpesvirus 5
gucacggugccaugga

SEQ ID NO: 3983773 - RNA, 23 nt, Human herpesvirus 5
gucacuucugcugucaccaccac

SEQ ID NO: 3983774 - RNA, 15 nt, Human herpesvirus 5
gucaggacuggaagu

SEQ ID NO: 3983775 - RNA, 13 nt, Human herpesvirus 5
gucagucagaagu

SEQ ID NO: 3983776 - RNA, 17 nt, Human herpesvirus 5
gucagucagaaguggau

SEQ ID NO: 3983777 - RNA, 13 nt, Human herpesvirus 5
gucagucuauucu

SEQ ID NO: 3983778 - RNA, 19 nt, Human herpesvirus 5
gucauguucucccaggacc

SEQ ID NO: 3983779 - RNA, 22 nt, Human herpesvirus 5
guccacacgccgucucgucaca

SEQ ID NO: 3983780 - RNA, 13 nt, Human herpesvirus 5
guccagccagcau

SEQ ID NO: 3983781 - RNA, 22 nt, Human herpesvirus 5
gucccuggaagcgugugugggc

SEQ ID NO: 3983782 - RNA, 15 nt, Human herpesvirus 5
gucccuggccccggc

SEQ ID NO: 3983783 - RNA, 14 nt, Human herpesvirus 5
guccgcggaaacga

SEQ ID NO: 3983784 - RNA, 18 nt, Human herpesvirus 5
guccgcggacacccgcgg

SEQ ID NO: 3983785 - RNA, 20 nt, Human herpesvirus 5
guccgcucugagccggcucc

SEQ ID NO: 3983786 - RNA, 23 nt, Human herpesvirus 5
guccggaggagcguccgacgccg

SEQ ID NO: 3983787 - RNA, 16 nt, Human herpesvirus 5
guccgucaugcuggca

SEQ ID NO: 3983788 - RNA, 23 nt, Human herpesvirus 5
guccuccagcagcagcuggugca

SEQ ID NO: 3983789 - RNA, 22 nt, Human herpesvirus 5
guccucuccuccuucuuccucg

SEQ ID NO: 3983790 - RNA, 15 nt, Human herpesvirus 5
gucgagacggcuccg

SEQ ID NO: 3983791 - RNA, 18 nt, Human herpesvirus 5
gucgaucuugacgcugcu

SEQ ID NO: 3983792 - RNA, 21 nt, Human herpesvirus 5
gucgcacaaagaagucucuuu

SEQ ID NO: 3983793 - RNA, 19 nt, Human herpesvirus 5
gucgcagcccccguggccg

SEQ ID NO: 3983794 - RNA, 18 nt, Human herpesvirus 5
gucgcaucaucaacagca

SEQ ID NO: 3983795 - RNA, 21 nt, Human herpesvirus 5
gucgcaucaucaacagcagca

SEQ ID NO: 3983796 - RNA, 12 nt, Human herpesvirus 5
gucgccaccugg

SEQ ID NO: 3983797 - RNA, 20 nt, Human herpesvirus 5
gucgccggccgacgcgcgcc

SEQ ID NO: 3983798 - RNA, 12 nt, Human herpesvirus 5
gucgccgucacu

SEQ ID NO: 3983799 - RNA, 17 nt, Human herpesvirus 5
gucgccgucacugccac

SEQ ID NO: 3983800 - RNA, 15 nt, Human herpesvirus 5
gucgcgcggucgccg

SEQ ID NO: 3983801 - RNA, 18 nt, Human herpesvirus 5
gucgcgucggcguaacaa

SEQ ID NO: 3983802 - RNA, 15 nt, Human herpesvirus 5
gucgcuucgccgcca

SEQ ID NO: 3983803 - RNA, 20 nt, Human herpesvirus 5
gucggaugaggcaggcgaug

SEQ ID NO: 3983804 - RNA, 16 nt, Human herpesvirus 5
gucggcgccccacagc

SEQ ID NO: 3983805 - RNA, 13 nt, Human herpesvirus 5
gucggcgccgccu

SEQ ID NO: 3983806 - RNA, 13 nt, Human herpesvirus 5
gucggugcgccca

SEQ ID NO: 3983807 - RNA, 16 nt, Human herpesvirus 5
gucgucgccggaagga

SEQ ID NO: 3983808 - RNA, 22 nt, Human herpesvirus 5
gucgugagcagcgugcaccugc

SEQ ID NO: 3983809 - RNA, 19 nt, Human herpesvirus 5
gucgugccuucggccagcg

SEQ ID NO: 3983810 - RNA, 16 nt, Human herpesvirus 5
gucuacgaucgcugga

SEQ ID NO: 3983811 - RNA, 20 nt, Human herpesvirus 5
gucuccaccaaucaagccug

SEQ ID NO: 3983812 - RNA, 16 nt, Human herpesvirus 5
gucuccgaacucagag

SEQ ID NO: 3983813 - RNA, 21 nt, Human herpesvirus 5
gucucgcgucuucgcgagguc

SEQ ID NO: 3983814 - RNA, 12 nt, Human herpesvirus 5
gucucuacggca

SEQ ID NO: 3983815 - RNA, 16 nt, Human herpesvirus 5
gucugacgcugcuccu

SEQ ID NO: 3983816 - RNA, 23 nt, Human herpesvirus 5
gucugcaacaugcggcugugucg

SEQ ID NO: 3983817 - RNA, 20 nt, Human herpesvirus 5
gugaagagggugaaggcaaa

SEQ ID NO: 3983818 - RNA, 16 nt, Human herpesvirus 5
gugaaggccguggaga

SEQ ID NO: 3983819 - RNA, 13 nt, Human herpesvirus 5
gugaauggaaaua

SEQ ID NO: 3983820 - RNA, 23 nt, Human herpesvirus 5
gugacgcagucugcccugcgcag

SEQ ID NO: 3983821 - RNA, 13 nt, Human herpesvirus 5
gugagaguuuaug

SEQ ID NO: 3983822 - RNA, 22 nt, Human herpesvirus 5
gugagauacauguucauaaacu

SEQ ID NO: 3983823 - RNA, 17 nt, Human herpesvirus 5
gugaucugggcagcggc

SEQ ID NO: 3983824 - RNA, 22 nt, Human herpesvirus 5
gugaugguacuauaugcgugag

SEQ ID NO: 3983825 - RNA, 14 nt, Human herpesvirus 5
gugcaaugccucau

SEQ ID NO: 3983826 - RNA, 11 nt, Human herpesvirus 5
gugcagcuggu

SEQ ID NO: 3983827 - RNA, 14 nt, Human herpesvirus 5
gugcagcuggugau

SEQ ID NO: 3983828 - RNA, 16 nt, Human herpesvirus 5
gugcagggacagugcg

SEQ ID NO: 3983829 - RNA, 19 nt, Human herpesvirus 5
gugcaucuacguggucggg

SEQ ID NO: 3983830 - RNA, 16 nt, Human herpesvirus 5
gugccgaauacaaaag

SEQ ID NO: 3983831 - RNA, 19 nt, Human herpesvirus 5
gugccgaugagauaaaagu

SEQ ID NO: 3983832 - RNA, 13 nt, Human herpesvirus 5
gugccgcgccgcc

SEQ ID NO: 3983833 - RNA, 15 nt, Human herpesvirus 5
gugccuucggccagc

SEQ ID NO: 3983834 - RNA, 14 nt, Human herpesvirus 5
gugcgcacgccgcg

SEQ ID NO: 3983835 - RNA, 18 nt, Human herpesvirus 5
gugcgccguggugcuggg

SEQ ID NO: 3983836 - RNA, 22 nt, Human herpesvirus 5
gugcgcggcgacaagcuguggc

SEQ ID NO: 3983837 - RNA, 18 nt, Human herpesvirus 5
gugcgcguccacagcgug

SEQ ID NO: 3983838 - RNA, 16 nt, Human herpesvirus 5
gugcggacggugcggg

SEQ ID NO: 3983839 - RNA, 20 nt, Human herpesvirus 5
gugcgguaacuggcagagcc

SEQ ID NO: 3983840 - RNA, 20 nt, Human herpesvirus 5
guggacggguuucagcgucc

SEQ ID NO: 3983841 - RNA, 16 nt, Human herpesvirus 5
guggauuugggcgugg

SEQ ID NO: 3983842 - RNA, 14 nt, Human herpesvirus 5
guggcaccgccucc

SEQ ID NO: 3983843 - RNA, 18 nt, Human herpesvirus 5
guggcccuggucuggccc

SEQ ID NO: 3983844 - RNA, 18 nt, Human herpesvirus 5
guggccgaacagcagcuc

SEQ ID NO: 3983845 - RNA, 14 nt, Human herpesvirus 5
guggccgcacaccu

SEQ ID NO: 3983846 - RNA, 14 nt, Human herpesvirus 5
guggccgugcuggg

SEQ ID NO: 3983847 - RNA, 18 nt, Human herpesvirus 5
guggcgcugcacaccuau

SEQ ID NO: 3983848 - RNA, 12 nt, Human herpesvirus 5
guggggcugcuc

SEQ ID NO: 3983849 - RNA, 13 nt, Human herpesvirus 5
guggugaucgugg

SEQ ID NO: 3983850 - RNA, 23 nt, Human herpesvirus 5
cuuggucacggcuauaaaaaaga

SEQ ID NO: 3983851 - RNA, 13 nt, Human herpesvirus 5
cuuuaagcugcuc

SEQ ID NO: 3983852 - RNA, 20 nt, Human herpesvirus 5
cuuuaggcggcgcagcgcca

SEQ ID NO: 3983853 - RNA, 17 nt, Human herpesvirus 5
cuuucucaucucagccu

SEQ ID NO: 3983854 - RNA, 23 nt, Human herpesvirus 5
cuuucuugacuggccggacggca

SEQ ID NO: 3983855 - RNA, 15 nt, Human herpesvirus 5
cuuuggguccagcca

SEQ ID NO: 3983856 - RNA, 17 nt, Human herpesvirus 5
cuuuguggggcugcuca

SEQ ID NO: 3983857 - RNA, 20 nt, Human herpesvirus 5
cuuuguuauuuuccucguaa

SEQ ID NO: 3983858 - RNA, 20 nt, Human herpesvirus 5
cuuuuaccaacguaacagca

SEQ ID NO: 3983859 - RNA, 14 nt, Human herpesvirus 5
gaaaaaagaccgga

SEQ ID NO: 3983860 - RNA, 15 nt, Human herpesvirus 5
gaaacaaacgucacu

SEQ ID NO: 3983861 - RNA, 21 nt, Human herpesvirus 5
gaaaccguacuaagucucccg

SEQ ID NO: 3983862 - RNA, 13 nt, Human herpesvirus 5
gaacauguccugg

SEQ ID NO: 3983863 - RNA, 16 nt, Human herpesvirus 5
gaaccagcugguaccu

SEQ ID NO: 3983864 - RNA, 13 nt, Human herpesvirus 5
gaaccuuccccac

SEQ ID NO: 3983865 - RNA, 19 nt, Human herpesvirus 5
gaacgacgacucagggcug

SEQ ID NO: 3983866 - RNA, 15 nt, Human herpesvirus 5
gaacggagcaggaac

SEQ ID NO: 3983867 - RNA, 14 nt, Human herpesvirus 5
gaacggagugguga

SEQ ID NO: 3983868 - RNA, 16 nt, Human herpesvirus 5
gaacuggcgcguacgg

SEQ ID NO: 3983869 - RNA, 14 nt, Human herpesvirus 5
gaacuuugcugcua

SEQ ID NO: 3983870 - RNA, 17 nt, Human herpesvirus 5
gaagauggccaucacgg

SEQ ID NO: 3983871 - RNA, 18 nt, Human herpesvirus 5
gaagcacggagacugcgg

SEQ ID NO: 3983872 - RNA, 14 nt, Human herpesvirus 5
gaagccauacuucu

SEQ ID NO: 3983873 - RNA, 14 nt, Human herpesvirus 5
gaagcggcuguggc

SEQ ID NO: 3983874 - RNA, 14 nt, Human herpesvirus 5
gaagcgguggagga

SEQ ID NO: 3983875 - RNA, 13 nt, Human herpesvirus 5
gaagcugcgcagg

SEQ ID NO: 3983876 - RNA, 16 nt, Human herpesvirus 5
gaagcugcggcucugc

SEQ ID NO: 3983877 - RNA, 13 nt, Human herpesvirus 5
gaagugacggacg

SEQ ID NO: 3983878 - RNA, 20 nt, Human herpesvirus 5
gaauaccguaaacauaauga

SEQ ID NO: 3983879 - RNA, 20 nt, Human herpesvirus 5
gaauacuggaagcugcuggu

SEQ ID NO: 3983880 - RNA, 16 nt, Human herpesvirus 5
gaaucucuugcgcccu

SEQ ID NO: 3983881 - RNA, 17 nt, Human herpesvirus 5
gaauugagcaacaaaca

SEQ ID NO: 3983882 - RNA, 22 nt, Human herpesvirus 5
gacaaacacuaccgucgccacc

SEQ ID NO: 3983883 - RNA, 16 nt, Human herpesvirus 5
gacaaccugcugcacu

SEQ ID NO: 3983884 - RNA, 19 nt, Human herpesvirus 5
gacaacggccgccgcagcc

SEQ ID NO: 3983885 - RNA, 20 nt, Human herpesvirus 5
gacaacggccgccgcagcca

SEQ ID NO: 3983886 - RNA, 19 nt, Human herpesvirus 5
gacaacggcuggaaaugga

SEQ ID NO: 3983887 - RNA, 16 nt, Human herpesvirus 5
gacaccaauugcuuua

SEQ ID NO: 3983888 - RNA, 22 nt, Human herpesvirus 5
gacaccgucgccgugcccgaag

SEQ ID NO: 3983889 - RNA, 16 nt, Human herpesvirus 5
gacacgcgcuucuggu

SEQ ID NO: 3983890 - RNA, 21 nt, Human herpesvirus 5
gacacguagaucccacuggca

SEQ ID NO: 3983891 - RNA, 14 nt, Human herpesvirus 5
gacagacgaugaac

SEQ ID NO: 3983892 - RNA, 20 nt, Human herpesvirus 5
gacagcacguuaguuacagc

SEQ ID NO: 3983893 - RNA, 15 nt, Human herpesvirus 5
gacaggcggccagcu

SEQ ID NO: 3983894 - RNA, 23 nt, Human herpesvirus 5
gacagguaugggcgguggucggc

SEQ ID NO: 3983895 - RNA, 14 nt, Human herpesvirus 5
gacaucacggucac

SEQ ID NO: 3983896 - RNA, 17 nt, Human herpesvirus 5
gacaucccccugcacgu

SEQ ID NO: 3983897 - RNA, 14 nt, Human herpesvirus 5
gacauggacucuug

SEQ ID NO: 3983898 - RNA, 12 nt, Human herpesvirus 5
gacauuccccac

SEQ ID NO: 3983899 - RNA, 17 nt, Human herpesvirus 5
gaccacguagucgcgcg

SEQ ID NO: 3983900 - RNA, 19 nt, Human herpesvirus 5
gaccagaaucagcagugag

SEQ ID NO: 3983901 - RNA, 20 nt, Human herpesvirus 5
gaccagcgccaccauagcca

SEQ ID NO: 3983902 - RNA, 13 nt, Human herpesvirus 5
gaccagcugcugg

SEQ ID NO: 3983903 - RNA, 14 nt, Human herpesvirus 5
gacccagggcugcu

SEQ ID NO: 3983904 - RNA, 21 nt, Human herpesvirus 5
gacccggcuggcgacccgcag

SEQ ID NO: 3983905 - RNA, 16 nt, Human herpesvirus 5
gacccguacugcgacg

SEQ ID NO: 3983906 - RNA, 14 nt, Human herpesvirus 5
gaccgaggcgcugg

SEQ ID NO: 3983907 - RNA, 12 nt, Human herpesvirus 5
gaccggcagcac

SEQ ID NO: 3983908 - RNA, 14 nt, Human herpesvirus 5
gaccgucuggaggu

SEQ ID NO: 3983909 - RNA, 21 nt, Human herpesvirus 5
gaccuccgcgucggucgccgc

SEQ ID NO: 3983910 - RNA, 15 nt, Human herpesvirus 5
gaccucguuguccuc

SEQ ID NO: 3983911 - RNA, 19 nt, Human herpesvirus 5
gaccuugcugaugugccag

SEQ ID NO: 3983912 - RNA, 15 nt, Human herpesvirus 5
gacgaagaggacacc

SEQ ID NO: 3983913 - RNA, 16 nt, Human herpesvirus 5
gacgacccaccgccgc

SEQ ID NO: 3983914 - RNA, 18 nt, Human herpesvirus 5
gacgagaugaaggaacgc

SEQ ID NO: 3983915 - RNA, 21 nt, Human herpesvirus 5
gacgaguaggcgcgcacccga

SEQ ID NO: 3983916 - RNA, 20 nt, Human herpesvirus 5
gacgauuuuaugcgccgcca

SEQ ID NO: 3983917 - RNA, 20 nt, Human herpesvirus 5
gacgcagugcguggccgcac

SEQ ID NO: 3983918 - RNA, 22 nt, Human herpesvirus 5
gacgccaucauggaagagggcg

SEQ ID NO: 3983919 - RNA, 12 nt, Human herpesvirus 5
gacgccgugggc

SEQ ID NO: 3983920 - RNA, 18 nt, Human herpesvirus 5
gacgcgccccccaccuac

SEQ ID NO: 3983921 - RNA, 14 nt, Human herpesvirus 5
gacgcgccucaugg

SEQ ID NO: 3983922 - RNA, 16 nt, Human herpesvirus 5
gacgcuucauauuagu

SEQ ID NO: 3983923 - RNA, 20 nt, Human herpesvirus 5
gacggagccguuaccgccuc

SEQ ID NO: 3983924 - RNA, 19 nt, Human herpesvirus 5
gacggcgguacugaagccg

SEQ ID NO: 3983925 - RNA, 22 nt, Human herpesvirus 5
gacgggaugcacagcgucuggc

SEQ ID NO: 3983926 - RNA, 20 nt, Human herpesvirus 5
gacggugaugaugcugcuga

SEQ ID NO: 3983927 - RNA, 20 nt, Human herpesvirus 5
gacggugaugcguguggccg

SEQ ID NO: 3983928 - RNA, 18 nt, Human herpesvirus 5
gacggugguuuccgcgcc

SEQ ID NO: 3983929 - RNA, 15 nt, Human herpesvirus 5
gacgguuuccacgcc

SEQ ID NO: 3983930 - RNA, 17 nt, Human herpesvirus 5
gacguaaauccagaccu

SEQ ID NO: 3983931 - RNA, 21 nt, Human herpesvirus 5
gacguagaaaaguaacacacg

SEQ ID NO: 3983932 - RNA, 14 nt, Human herpesvirus 5
gacgugaggcgcuc

SEQ ID NO: 3983933 - RNA, 15 nt, Human herpesvirus 5
gacguggaggagacc

SEQ ID NO: 3983934 - RNA, 23 nt, Human herpesvirus 5
gacuaacccugggcuauaugcau

SEQ ID NO: 3983935 - RNA, 23 nt, Human herpesvirus 5
gacucuuuaaccgagcugaagga

SEQ ID NO: 3983936 - RNA, 18 nt, Human herpesvirus 5
gacugagacuggugguga

SEQ ID NO: 3983937 - RNA, 16 nt, Human herpesvirus 5
gacugcagcccaccgc

SEQ ID NO: 3983938 - RNA, 18 nt, Human herpesvirus 5
gacugcggcgacuggcga

SEQ ID NO: 3983939 - RNA, 21 nt, Human herpesvirus 5
gacuugaguaccaagugccgc

SEQ ID NO: 3983940 - RNA, 14 nt, Human herpesvirus 5
gagaccgucgccac

SEQ ID NO: 3983941 - RNA, 15 nt, Human herpesvirus 5
gagacgugcgaccug

SEQ ID NO: 3983942 - RNA, 22 nt, Human herpesvirus 5
gagauucaggacgaggagccaa

SEQ ID NO: 3983943 - RNA, 14 nt, Human herpesvirus 5
gagcaccggcgccu

SEQ ID NO: 3983944 - RNA, 21 nt, Human herpesvirus 5
gagcacgucuagcaggcccag

SEQ ID NO: 3983945 - RNA, 13 nt, Human herpesvirus 5
gagcaggcucgcg

SEQ ID NO: 3983946 - RNA, 18 nt, Human herpesvirus 5
gagcaucgcaacaacagc

SEQ ID NO: 3983947 - RNA, 18 nt, Human herpesvirus 5
gagcgacguaccagcugu

SEQ ID NO: 3983948 - RNA, 15 nt, Human herpesvirus 5
gagcgccuucugcua

SEQ ID NO: 3983949 - RNA, 16 nt, Human herpesvirus 5
gagcuaucuguguccg

SEQ ID NO: 3983950 - RNA, 18 nt, Human herpesvirus 5
gaggaacccugcggcgcc

SEQ ID NO: 3983951 - RNA, 15 nt, Human herpesvirus 5
gaggaagcgggggug

SEQ ID NO: 3983952 - RNA, 19 nt, Human herpesvirus 5
gaggaagucgaucuggaag

SEQ ID NO: 3983953 - RNA, 21 nt, Human herpesvirus 5
gaggaaugcauguggaagcug

SEQ ID NO: 3983954 - RNA, 18 nt, Human herpesvirus 5
gaggacauggacucgcca

SEQ ID NO: 3983955 - RNA, 15 nt, Human herpesvirus 5
gaggacgacagcucg

SEQ ID NO: 3983956 - RNA, 14 nt, Human herpesvirus 5
gaggaggccgcacu

SEQ ID NO: 3983957 - RNA, 22 nt, Human herpesvirus 5
cccacaaaggguaucuggggag

SEQ ID NO: 3983958 - RNA, 14 nt, Human herpesvirus 5
cccaccacgggggc

SEQ ID NO: 3983959 - RNA, 22 nt, Human herpesvirus 5
cccaccgccgcuuucucaucuc

SEQ ID NO: 3983960 - RNA, 23 nt, Human herpesvirus 5
cccacgacuguucgucgagcacc

SEQ ID NO: 3983961 - RNA, 21 nt, Human herpesvirus 5
cccagcagaccagccaccguc

SEQ ID NO: 3983962 - RNA, 23 nt, Human herpesvirus 5
cccagcagggcgcgccggcgcca

SEQ ID NO: 3983963 - RNA, 15 nt, Human herpesvirus 5
cccagggcugcucca

SEQ ID NO: 3983964 - RNA, 23 nt, Human herpesvirus 5
cccaucucaacgucaacgguuuc

SEQ ID NO: 3983965 - RNA, 21 nt, Human herpesvirus 5
cccccgcugagcguuggcggc

SEQ ID NO: 3983966 - RNA, 17 nt, Human herpesvirus 5
ccccgcaaacucccacu

SEQ ID NO: 3983967 - RNA, 11 nt, Human herpesvirus 5
ccccgcugucg

SEQ ID NO: 3983968 - RNA, 12 nt, Human herpesvirus 5
ccccggcagcgg

SEQ ID NO: 3983969 - RNA, 15 nt, Human herpesvirus 5
ccccucugcugcugg

SEQ ID NO: 3983970 - RNA, 23 nt, Human herpesvirus 5
cccgauaaucggcucucaggcgc

SEQ ID NO: 3983971 - RNA, 16 nt, Human herpesvirus 5
cccgauaugggccgcu

SEQ ID NO: 3983972 - RNA, 22 nt, Human herpesvirus 5
cccgcacacagacgacgcgccg

SEQ ID NO: 3983973 - RNA, 12 nt, Human herpesvirus 5
cccgcacacugg

SEQ ID NO: 3983974 - RNA, 17 nt, Human herpesvirus 5
cccgccguugcggccgc

SEQ ID NO: 3983975 - RNA, 17 nt, Human herpesvirus 5
cccgcgucccuggggcu

SEQ ID NO: 3983976 - RNA, 13 nt, Human herpesvirus 5
cccgcugcugcug

SEQ ID NO: 3983977 - RNA, 16 nt, Human herpesvirus 5
cccggucggucuuccu

SEQ ID NO: 3983978 - RNA, 23 nt, Human herpesvirus 5
cccguauacgcgcuggaggcccu

SEQ ID NO: 3983979 - RNA, 16 nt, Human herpesvirus 5
cccgucggcugccugu

SEQ ID NO: 3983980 - RNA, 19 nt, Human herpesvirus 5
cccgucgugcucuugacgg

SEQ ID NO: 3983981 - RNA, 21 nt, Human herpesvirus 5
cccguggaucagccgccgccu

SEQ ID NO: 3983982 - RNA, 12 nt, Human herpesvirus 5
cccguggcccag

SEQ ID NO: 3983983 - RNA, 14 nt, Human herpesvirus 5
cccuauccuccauc

SEQ ID NO: 3983984 - RNA, 19 nt, Human herpesvirus 5
cccucaaaacaucaccacc

SEQ ID NO: 3983985 - RNA, 12 nt, Human herpesvirus 5
cccuccacaggc

SEQ ID NO: 3983986 - RNA, 15 nt, Human herpesvirus 5
cccucgcugggcuac

SEQ ID NO: 3983987 - RNA, 23 nt, Human herpesvirus 5
cccucggggugcggguggcgggc

SEQ ID NO: 3983988 - RNA, 12 nt, Human herpesvirus 5
cccucugcugcu

SEQ ID NO: 3983989 - RNA, 14 nt, Human herpesvirus 5
cccucugcugcugg

SEQ ID NO: 3983990 - RNA, 15 nt, Human herpesvirus 5
cccugccagucuccg

SEQ ID NO: 3983991 - RNA, 14 nt, Human herpesvirus 5
cccugcggcgccgu

SEQ ID NO: 3983992 - RNA, 19 nt, Human herpesvirus 5
cccugcugacgcuguugag

SEQ ID NO: 3983993 - RNA, 17 nt, Human herpesvirus 5
cccuggggcugcugcug

SEQ ID NO: 3983994 - RNA, 15 nt, Human herpesvirus 5
cccuggucuggccca

SEQ ID NO: 3983995 - RNA, 18 nt, Human herpesvirus 5
cccuguaauuauuccagc

SEQ ID NO: 3983996 - RNA, 19 nt, Human herpesvirus 5
cccugugggcccaugacgc

SEQ ID NO: 3983997 - RNA, 17 nt, Human herpesvirus 5
cccuguuccccgugacg

SEQ ID NO: 3983998 - RNA, 14 nt, Human herpesvirus 5
ccgaacagcagcuc

SEQ ID NO: 3983999 - RNA, 15 nt, Human herpesvirus 5
ccgaacgcgacuggc

SEQ ID NO: 3984000 - RNA, 12 nt, Human herpesvirus 5
ccgaacgcugcu

SEQ ID NO: 3984001 - RNA, 19 nt, Human herpesvirus 5
ccgaacuauguggcuccgc

SEQ ID NO: 3984002 - RNA, 13 nt, Human herpesvirus 5
ccgaacucagagg

SEQ ID NO: 3984003 - RNA, 22 nt, Human herpesvirus 5
ggugucucugcaacgccuggcg

SEQ ID NO: 3984004 - RNA, 16 nt, Human herpesvirus 5
gguguggcggcagcgg

SEQ ID NO: 3984005 - RNA, 20 nt, Human herpesvirus 5
ggugugguagcuagugcagc

SEQ ID NO: 3984006 - RNA, 18 nt, Human herpesvirus 5
gguuauggauaugaggaa

SEQ ID NO: 3984007 - RNA, 15 nt, Human herpesvirus 5
gguuauggcuccgcg

SEQ ID NO: 3984008 - RNA, 20 nt, Human herpesvirus 5
gguucacacgucguuagcca

SEQ ID NO: 3984009 - RNA, 19 nt, Human herpesvirus 5
gguucugaaucugcuccag

SEQ ID NO: 3984010 - RNA, 12 nt, Human herpesvirus 5
gguuuggccgug

SEQ ID NO: 3984011 - RNA, 17 nt, Human herpesvirus 5
gguuuucggacagagca

SEQ ID NO: 3984012 - RNA, 21 nt, Human herpesvirus 5
guaaacuuaugaauccggcug

SEQ ID NO: 3984013 - RNA, 20 nt, Human herpesvirus 5
guaaagagagucacacuuaa

SEQ ID NO: 3984014 - RNA, 18 nt, Human herpesvirus 5
guaaauaaaauguuuuua

SEQ ID NO: 3984015 - RNA, 21 nt, Human herpesvirus 5
guaacagccuucccuuguaag

SEQ ID NO: 3984016 - RNA, 20 nt, Human herpesvirus 5
guaaccacgucgaccaggug

SEQ ID NO: 3984017 - RNA, 17 nt, Human herpesvirus 5
guaacgccacggugcuu

SEQ ID NO: 3984018 - RNA, 13 nt, Human herpesvirus 5
acaucauacugac

SEQ ID NO: 3984019 - RNA, 16 nt, Human herpesvirus 5
acaucccaagcacgcc

SEQ ID NO: 3984020 - RNA, 17 nt, Human herpesvirus 5
acaugauggaaaugccc

SEQ ID NO: 3984021 - RNA, 15 nt, Human herpesvirus 5
acauggagacaguuu

SEQ ID NO: 3984022 - RNA, 17 nt, Human herpesvirus 5
acauuuuuucggccgcg

SEQ ID NO: 3984023 - RNA, 14 nt, Human herpesvirus 5
accaaggaaccacc

SEQ ID NO: 3984024 - RNA, 21 nt, Human herpesvirus 5
accaagucuugccgugacguc

SEQ ID NO: 3984025 - RNA, 20 nt, Human herpesvirus 5
accacaacggccgccgacgu

SEQ ID NO: 3984026 - RNA, 20 nt, Human herpesvirus 5
accacccgacugcagcccac

SEQ ID NO: 3984027 - RNA, 16 nt, Human herpesvirus 5
accacgaguaacaccg

SEQ ID NO: 3984028 - RNA, 19 nt, Human herpesvirus 5
accacucccaccacgguuu

SEQ ID NO: 3984029 - RNA, 17 nt, Human herpesvirus 5
accagacauccaauuac

SEQ ID NO: 3984030 - RNA, 13 nt, Human herpesvirus 5
accagacggcguc

SEQ ID NO: 3984031 - RNA, 23 nt, Human herpesvirus 5
accagggaggagggguuaagagg

SEQ ID NO: 3984032 - RNA, 20 nt, Human herpesvirus 5
accauccucaccccgcgcga

SEQ ID NO: 3984033 - RNA, 21 nt, Human herpesvirus 5
accaucucacguacaggcaua

SEQ ID NO: 3984034 - RNA, 20 nt, Human herpesvirus 5
accaugcaggcgcaggaggc

SEQ ID NO: 3984035 - RNA, 22 nt, Human herpesvirus 5
accauuuccaugugcagcuggu

SEQ ID NO: 3984036 - RNA, 16 nt, Human herpesvirus 5
acccacgaccauuucc

SEQ ID NO: 3984037 - RNA, 16 nt, Human herpesvirus 5
acccaguagacagaca

SEQ ID NO: 3984038 - RNA, 17 nt, Human herpesvirus 5
acccgacugcagcccac

SEQ ID NO: 3984039 - RNA, 20 nt, Human herpesvirus 5
acccgcgucccuggggcugc

SEQ ID NO: 3984040 - RNA, 12 nt, Human herpesvirus 5
acccggcugcug

SEQ ID NO: 3984041 - RNA, 17 nt, Human herpesvirus 5
acccugggcuauaugca

SEQ ID NO: 3984042 - RNA, 14 nt, Human herpesvirus 5
accgcaacaacagc

SEQ ID NO: 3984043 - RNA, 16 nt, Human herpesvirus 5
accgcagcgguggcug

SEQ ID NO: 3984044 - RNA, 18 nt, Human herpesvirus 5
accgcagguuagcggcga

SEQ ID NO: 3984045 - RNA, 17 nt, Human herpesvirus 5
accgccgccgcccuccc

SEQ ID NO: 3984046 - RNA, 20 nt, Human herpesvirus 5
accgccuccgaacgcucgug

SEQ ID NO: 3984047 - RNA, 13 nt, Human herpesvirus 5
accgcgacccagc

SEQ ID NO: 3984048 - RNA, 17 nt, Human herpesvirus 5
accggcgccugcugcuc

SEQ ID NO: 3984049 - RNA, 12 nt, Human herpesvirus 5
accgggucgccu

SEQ ID NO: 3984050 - RNA, 23 nt, Human herpesvirus 5
accgucgaaaacaaccacacaga

SEQ ID NO: 3984051 - RNA, 19 nt, Human herpesvirus 5
accgugcccguuuucacag

SEQ ID NO: 3984052 - RNA, 13 nt, Human herpesvirus 5
accuaccugggcu

SEQ ID NO: 3984053 - RNA, 23 nt, Human herpesvirus 5
accucguuguccucuccuccuuc

SEQ ID NO: 3984054 - RNA, 12 nt, Human herpesvirus 5
accugaccuguc

SEQ ID NO: 3984055 - RNA, 17 nt, Human herpesvirus 5
accugauuucuuuguua

SEQ ID NO: 3984056 - RNA, 16 nt, Human herpesvirus 5
accuggcuggcgcagu

SEQ ID NO: 3984057 - RNA, 19 nt, Human herpesvirus 5
accuggguggaacgagcgc

SEQ ID NO: 3984058 - RNA, 19 nt, Human herpesvirus 5
accuguuuaccucaugcgg

SEQ ID NO: 3984059 - RNA, 17 nt, Human herpesvirus 5
accuucccucuccaccc

SEQ ID NO: 3984060 - RNA, 18 nt, Human herpesvirus 5
accuucuugcccacgccg

SEQ ID NO: 3984061 - RNA, 18 nt, Human herpesvirus 5
accuugucuccccggugu

SEQ ID NO: 3984062 - RNA, 22 nt, Human herpesvirus 5
acgaaccagcugguaccugaaa

SEQ ID NO: 3984063 - RNA, 23 nt, Human herpesvirus 5
acgaagaagaacaagacggagga

SEQ ID NO: 3984064 - RNA, 18 nt, Human herpesvirus 5
acgaccuggccuguggug

SEQ ID NO: 3984065 - RNA, 16 nt, Human herpesvirus 5
acgacgcgccccccac

SEQ ID NO: 3984066 - RNA, 16 nt, Human herpesvirus 5
acgacggaaauggcac

SEQ ID NO: 3984067 - RNA, 12 nt, Human herpesvirus 5
acgacggcgguu

SEQ ID NO: 3984068 - RNA, 20 nt, Human herpesvirus 5
acgacggcgguuucagcugg

SEQ ID NO: 3984069 - RNA, 16 nt, Human herpesvirus 5
acgacguuuaaaguaa

SEQ ID NO: 3984070 - RNA, 19 nt, Human herpesvirus 5
acgacuguucgucgagcac

SEQ ID NO: 3984071 - RNA, 20 nt, Human herpesvirus 5
acgagcaucgcaacaacagc

SEQ ID NO: 3984072 - RNA, 22 nt, Human herpesvirus 5
acgaucguaacccaggcgcgua

SEQ ID NO: 3984073 - RNA, 19 nt, Human herpesvirus 5
acgaucuuuaguccggagg

SEQ ID NO: 3984074 - RNA, 19 nt, Human herpesvirus 5
acgcagugcguggccgcac

SEQ ID NO: 3984075 - RNA, 18 nt, Human herpesvirus 5
acgcaguugagcggggua

SEQ ID NO: 3984076 - RNA, 12 nt, Human herpesvirus 5
acgccaccgccg

SEQ ID NO: 3984077 - RNA, 16 nt, Human herpesvirus 5
acgccaugcucaagac

SEQ ID NO: 3984078 - RNA, 18 nt, Human herpesvirus 5
acgccgucacgcagguga

SEQ ID NO: 3984079 - RNA, 15 nt, Human herpesvirus 5
acgccgugggcggcg

SEQ ID NO: 3984080 - RNA, 22 nt, Human herpesvirus 5
acgccugcgacguuggcucucg

SEQ ID NO: 3984081 - RNA, 17 nt, Human herpesvirus 5
acgcgaccagcugcugg

SEQ ID NO: 3984082 - RNA, 16 nt, Human herpesvirus 5
acgcgccccccaccua

SEQ ID NO: 3984083 - RNA, 18 nt, Human herpesvirus 5
acgcgcccgacagcugca

SEQ ID NO: 3984084 - RNA, 14 nt, Human herpesvirus 5
acgcgccucauggc

SEQ ID NO: 3984085 - RNA, 23 nt, Human herpesvirus 5
acgcgccucauggcggcggccac

SEQ ID NO: 3984086 - RNA, 23 nt, Human herpesvirus 5
acgcggaugagcgugcugcucug

SEQ ID NO: 3984087 - RNA, 22 nt, Human herpesvirus 5
acgcggguccauuggagccgcc

SEQ ID NO: 3984088 - RNA, 18 nt, Human herpesvirus 5
acgcggugaacgugcgcg

SEQ ID NO: 3984089 - RNA, 23 nt, Human herpesvirus 5
acgcgucagggcggugcggcguu

SEQ ID NO: 3984090 - RNA, 15 nt, Human herpesvirus 5
acgcugacguggugc

SEQ ID NO: 3984091 - RNA, 21 nt, Human herpesvirus 5
acgcugcuauaagaaggccau

SEQ ID NO: 3984092 - RNA, 23 nt, Human herpesvirus 5
acgcugcuugguacccgaggucu

SEQ ID NO: 3984093 - RNA, 14 nt, Human herpesvirus 5
acggagcacgggcu

SEQ ID NO: 3984094 - RNA, 14 nt, Human herpesvirus 5
acggcaacgagcag

SEQ ID NO: 3984095 - RNA, 19 nt, Human herpesvirus 5
acggcccccuaccugcgcg

SEQ ID NO: 3984096 - RNA, 15 nt, Human herpesvirus 5
acggccgccgacguc

SEQ ID NO: 3984097 - RNA, 21 nt, Human herpesvirus 5
acggccuuauguggcugcgcc

SEQ ID NO: 3984098 - RNA, 17 nt, Human herpesvirus 5
acggcgucuuccuccuc

SEQ ID NO: 3984099 - RNA, 15 nt, Human herpesvirus 5
acggcuuuccaagcu

SEQ ID NO: 3984100 - RNA, 20 nt, Human herpesvirus 5
acgggccgcgcuccaggcgg

SEQ ID NO: 3984101 - RNA, 20 nt, Human herpesvirus 5
acgggccugguauacgaggc

SEQ ID NO: 3984102 - RNA, 17 nt, Human herpesvirus 5
acggggcgucggagagu

SEQ ID NO: 3984103 - RNA, 14 nt, Human herpesvirus 5
acgguccgggcaca

SEQ ID NO: 3984104 - RNA, 23 nt, Human herpesvirus 5
acgguccguuauguccgcucgug

SEQ ID NO: 3984105 - RNA, 14 nt, Human herpesvirus 5
acggugcgcggcga

SEQ ID NO: 3984106 - RNA, 12 nt, Human herpesvirus 5
acgguggcggcg

SEQ ID NO: 3984107 - RNA, 21 nt, Human herpesvirus 5
acgguuaccuucuugcccacg

SEQ ID NO: 3984108 - RNA, 16 nt, Human herpesvirus 5
acgguuuccacgccac

SEQ ID NO: 3984109 - RNA, 21 nt, Human herpesvirus 5
acguacaagaaccacguuguc

SEQ ID NO: 3984110 - RNA, 22 nt, Human herpesvirus 5
acguacgacugcgcggccugcu

SEQ ID NO: 3984111 - RNA, 22 nt, Human herpesvirus 5
acguagaaaaguaacacacggc

SEQ ID NO: 3984112 - RNA, 17 nt, Human herpesvirus 5
acguagaauacuggaag

SEQ ID NO: 3984113 - RNA, 15 nt, Human herpesvirus 5
acguaggccuccucu

SEQ ID NO: 3984114 - RNA, 20 nt, Human herpesvirus 5
acguaguuccccuacgugac

SEQ ID NO: 3984115 - RNA, 19 nt, Human herpesvirus 5
acgucaacgguuucuggaa

SEQ ID NO: 3984116 - RNA, 16 nt, Human herpesvirus 5
acgucaccgugcccca

SEQ ID NO: 3984117 - RNA, 12 nt, Human herpesvirus 5
acgucaggaauc

SEQ ID NO: 3984118 - RNA, 19 nt, Human herpesvirus 5
acgucaggaaucugggagg

SEQ ID NO: 3984119 - RNA, 21 nt, Human herpesvirus 5
acgucagguucacacgucguu

SEQ ID NO: 3984120 - RNA, 20 nt, Human herpesvirus 5
acgucgcuuuuuacuuugua

SEQ ID NO: 3984121 - RNA, 20 nt, Human herpesvirus 5
acgucggcgguccuccagca

SEQ ID NO: 3984122 - RNA, 14 nt, Human herpesvirus 5
acgucuaugagaaa

SEQ ID NO: 3984123 - RNA, 16 nt, Human herpesvirus 5
acgucucggacggacg

SEQ ID NO: 3984124 - RNA, 18 nt, Human herpesvirus 5
acgucugcguguguguuu

SEQ ID NO: 3984125 - RNA, 17 nt, Human herpesvirus 5
acgugaccgugggacaa

SEQ ID NO: 3984126 - RNA, 20 nt, Human herpesvirus 5
acgugauuauacaacaggug

SEQ ID NO: 3984127 - RNA, 23 nt, Human herpesvirus 5
acgugcaggauguuacgcgaguc

SEQ ID NO: 3984128 - RNA, 11 nt, Human herpesvirus 5
acguggccugg

SEQ ID NO: 3984129 - RNA, 15 nt, Human herpesvirus 5
acgugucuucuucgc

SEQ ID NO: 3984130 - RNA, 20 nt, Human herpesvirus 5
acguucuccaagggagacau

SEQ ID NO: 3984131 - RNA, 21 nt, Human herpesvirus 5
acuaccagcugggccuacacc

SEQ ID NO: 3984132 - RNA, 16 nt, Human herpesvirus 5
gcccccgucgcccgag

SEQ ID NO: 3984133 - RNA, 22 nt, Human herpesvirus 5
gccccgaagguuagcgccgcgg

SEQ ID NO: 3984134 - RNA, 23 nt, Human herpesvirus 5
gccccgauaaucggcucucaggc

SEQ ID NO: 3984135 - RNA, 22 nt, Human herpesvirus 5
gcccgacgugauuuacgagguc

SEQ ID NO: 3984136 - RNA, 16 nt, Human herpesvirus 5
gcccuauccgcgcggc

SEQ ID NO: 3984137 - RNA, 17 nt, Human herpesvirus 5
gcccucagcgugcucag

SEQ ID NO: 3984138 - RNA, 17 nt, Human herpesvirus 5
gcccuuuacggugcugc

SEQ ID NO: 3984139 - RNA, 17 nt, Human herpesvirus 5
gccgaacagcagcucuu

SEQ ID NO: 3984140 - RNA, 13 nt, Human herpesvirus 5
gccgacgcuggcg

SEQ ID NO: 3984141 - RNA, 13 nt, Human herpesvirus 5
gccgacggcggcg

SEQ ID NO: 3984142 - RNA, 13 nt, Human herpesvirus 5
gccgagacggcgu

SEQ ID NO: 3984143 - RNA, 22 nt, Human herpesvirus 5
gccgagcuaugcgagcggggac

SEQ ID NO: 3984144 - RNA, 18 nt, Human herpesvirus 5
gccgaggcuacugcugcu

SEQ ID NO: 3984145 - RNA, 20 nt, Human herpesvirus 5
gccgauccacgggccgcgcu

SEQ ID NO: 3984146 - RNA, 20 nt, Human herpesvirus 5
gccgcaacuucuaccaucuc

SEQ ID NO: 3984147 - RNA, 20 nt, Human herpesvirus 5
gccgcacgcgcuuaggacga

SEQ ID NO: 3984148 - RNA, 19 nt, Human herpesvirus 5
gccgcagccguugguggaa

SEQ ID NO: 3984149 - RNA, 13 nt, Human herpesvirus 5
gccgcagcugcug

SEQ ID NO: 3984150 - RNA, 14 nt, Human herpesvirus 5
gccgcagcugcugg

SEQ ID NO: 3984151 - RNA, 22 nt, Human herpesvirus 5
gccgccaccacccgacugcagc

SEQ ID NO: 3984152 - RNA, 15 nt, Human herpesvirus 5
gccgccccgugacga

SEQ ID NO: 3984153 - RNA, 17 nt, Human herpesvirus 5
gccgcccucccucaaca

SEQ ID NO: 3984154 - RNA, 15 nt, Human herpesvirus 5
gccgccgcucaagcc

SEQ ID NO: 3984155 - RNA, 19 nt, Human herpesvirus 5
gccgcgcaggccgccgccg

SEQ ID NO: 3984156 - RNA, 16 nt, Human herpesvirus 5
gccgcgcgagcgugcg

SEQ ID NO: 3984157 - RNA, 12 nt, Human herpesvirus 5
gccgcggcagca

SEQ ID NO: 3984158 - RNA, 17 nt, Human herpesvirus 5
gccgcggugcaggccgc

SEQ ID NO: 3984159 - RNA, 18 nt, Human herpesvirus 5
gccgcggugcaggccgcg

SEQ ID NO: 3984160 - RNA, 20 nt, Human herpesvirus 5
gccgcgucgcaaacgcugcu

SEQ ID NO: 3984161 - RNA, 14 nt, Human herpesvirus 5
gccgcgugccuggg

SEQ ID NO: 3984162 - RNA, 22 nt, Human herpesvirus 5
gccgcuacugaucgccuggagc

SEQ ID NO: 3984163 - RNA, 18 nt, Human herpesvirus 5
gccgcuuucucaucucag

SEQ ID NO: 3984164 - RNA, 17 nt, Human herpesvirus 5
gccgcuuuucagaccgc

SEQ ID NO: 3984165 - RNA, 18 nt, Human herpesvirus 5
gccggaaacaccgcgagu

SEQ ID NO: 3984166 - RNA, 15 nt, Human herpesvirus 5
gccggacggcagcgu

SEQ ID NO: 3984167 - RNA, 14 nt, Human herpesvirus 5
gccggaggcugugg

SEQ ID NO: 3984168 - RNA, 18 nt, Human herpesvirus 5
gccggcggagacgacggc

SEQ ID NO: 3984169 - RNA, 12 nt, Human herpesvirus 5
gccggcugcugc

SEQ ID NO: 3984170 - RNA, 16 nt, Human herpesvirus 5
gccggggugccgccgc

SEQ ID NO: 3984171 - RNA, 17 nt, Human herpesvirus 5
gccggguuggcacgacg

SEQ ID NO: 3984172 - RNA, 22 nt, Human herpesvirus 5
gccgucagcgucgucguccgug

SEQ ID NO: 3984173 - RNA, 17 nt, Human herpesvirus 5
gccgucgaguacgugcu

SEQ ID NO: 3984174 - RNA, 14 nt, Human herpesvirus 5
gccgucgcuugccg

SEQ ID NO: 3984175 - RNA, 22 nt, Human herpesvirus 5
gccgucucuucgcgccccucug

SEQ ID NO: 3984176 - RNA, 18 nt, Human herpesvirus 5
gccgugcgcgacgagauc

SEQ ID NO: 3984177 - RNA, 22 nt, Human herpesvirus 5
gccguguguuggcuacggcgga

SEQ ID NO: 3984178 - RNA, 18 nt, Human herpesvirus 5
gccguuauguucaguguc

SEQ ID NO: 3984179 - RNA, 16 nt, Human herpesvirus 5
gccuaccugacgccga

SEQ ID NO: 3984180 - RNA, 19 nt, Human herpesvirus 5
gccuaggucuguugcguug

SEQ ID NO: 3984181 - RNA, 14 nt, Human herpesvirus 5
gccucauccuuaug

SEQ ID NO: 3984182 - RNA, 17 nt, Human herpesvirus 5
gccuccgacgacgccga

SEQ ID NO: 3984183 - RNA, 11 nt, Human herpesvirus 5
gccuccggcug

SEQ ID NO: 3984184 - RNA, 13 nt, Human herpesvirus 5
gccuccucgcugg

SEQ ID NO: 3984185 - RNA, 14 nt, Human herpesvirus 5
gccucucauguucu

SEQ ID NO: 3984186 - RNA, 15 nt, Human herpesvirus 5
gccucuuuugacaug

SEQ ID NO: 3984187 - RNA, 18 nt, Human herpesvirus 5
gccugcacgaccugcucc

SEQ ID NO: 3984188 - RNA, 23 nt, Human herpesvirus 5
gccugcacgaccugcuccaguac

SEQ ID NO: 3984189 - RNA, 21 nt, Human herpesvirus 5
gccugcgggcaggcggguugc

SEQ ID NO: 3984190 - RNA, 18 nt, Human herpesvirus 5
gccugggcugcuguuggg

SEQ ID NO: 3984191 - RNA, 13 nt, Human herpesvirus 5
gccugguugcugc

SEQ ID NO: 3984192 - RNA, 18 nt, Human herpesvirus 5
gccuguggauagauuucu

SEQ ID NO: 3984193 - RNA, 21 nt, Human herpesvirus 5
gccuguggugcgacugcggcg

SEQ ID NO: 3984194 - RNA, 18 nt, Human herpesvirus 5
gccuuaucgugcuaggca

SEQ ID NO: 3984195 - RNA, 19 nt, Human herpesvirus 5
gccuugcgcucccugcucc

SEQ ID NO: 3984196 - RNA, 20 nt, Human herpesvirus 5
gcgaagccagcuacagccac

SEQ ID NO: 3984197 - RNA, 20 nt, Human herpesvirus 5
gcgacaagcuguggcugcac

SEQ ID NO: 3984198 - RNA, 22 nt, Human herpesvirus 5
gcgacaagcuguggcugcacac

SEQ ID NO: 3984199 - RNA, 21 nt, Human herpesvirus 5
gcgacaccguaucagcuaccg

SEQ ID NO: 3984200 - RNA, 12 nt, Human herpesvirus 5
gcgacacgugcu

SEQ ID NO: 3984201 - RNA, 12 nt, Human herpesvirus 5
gcgacagacauc

SEQ ID NO: 3984202 - RNA, 16 nt, Human herpesvirus 5
gcgacagcagcaucag

SEQ ID NO: 3984203 - RNA, 13 nt, Human herpesvirus 5
gcgaccagcugcu

SEQ ID NO: 3984204 - RNA, 14 nt, Human herpesvirus 5
gcgacccagcgaca

SEQ ID NO: 3984205 - RNA, 23 nt, Human herpesvirus 5
gcgacgagcgcugcgaagaugcu

SEQ ID NO: 3984206 - RNA, 18 nt, Human herpesvirus 5
gcgacggcgaauggauca

SEQ ID NO: 3984207 - RNA, 20 nt, Human herpesvirus 5
gcgacggcggguggagauga

SEQ ID NO: 3984208 - RNA, 20 nt, Human herpesvirus 5
gcgagcgggguucaccugca

SEQ ID NO: 3984209 - RNA, 15 nt, Human herpesvirus 5
gcgaggcggcaacug

SEQ ID NO: 3984210 - RNA, 19 nt, Human herpesvirus 5
gcgauggcccgcuaucgca

SEQ ID NO: 3984211 - RNA, 14 nt, Human herpesvirus 5
gcgcaagugccugc

SEQ ID NO: 3984212 - RNA, 16 nt, Human herpesvirus 5
gcgcaagugccugcac

SEQ ID NO: 3984213 - RNA, 12 nt, Human herpesvirus 5
gcgcacggcguc

SEQ ID NO: 3984214 - RNA, 12 nt, Human herpesvirus 5
gcgcagcgggcu

SEQ ID NO: 3984215 - RNA, 16 nt, Human herpesvirus 5
gcgcaucgccugcacc

SEQ ID NO: 3984216 - RNA, 23 nt, Human herpesvirus 5
gcgccacguagccgaugcugaug

SEQ ID NO: 3984217 - RNA, 19 nt, Human herpesvirus 5
gcgccaguacgauccuccg

SEQ ID NO: 3984218 - RNA, 16 nt, Human herpesvirus 5
gcgcccacuggaguug

SEQ ID NO: 3984219 - RNA, 20 nt, Human herpesvirus 5
gcgcccgaagccgcgcgagc

SEQ ID NO: 3984220 - RNA, 22 nt, Human herpesvirus 5
gcgccucacgcugcacgaccug

SEQ ID NO: 3984221 - RNA, 19 nt, Human herpesvirus 5
gcgccugguugcugccgcg

SEQ ID NO: 3984222 - RNA, 16 nt, Human herpesvirus 5
gcgcgcacccgacggc

SEQ ID NO: 3984223 - RNA, 14 nt, Human herpesvirus 5
gcgcgcggcgcguu

SEQ ID NO: 3984224 - RNA, 19 nt, Human herpesvirus 5
gcgcgucaucggcaccauc

SEQ ID NO: 3984225 - RNA, 15 nt, Human herpesvirus 5
gcgcuacgugcgcgc

SEQ ID NO: 3984226 - RNA, 12 nt, Human herpesvirus 5
gcgcucccugcu

SEQ ID NO: 3984227 - RNA, 13 nt, Human herpesvirus 5
gcgcuccucgagc

SEQ ID NO: 3984228 - RNA, 21 nt, Human herpesvirus 5
gcgcucuugugucucccgaca

SEQ ID NO: 3984229 - RNA, 18 nt, Human herpesvirus 5
gcgcugcggucccgacau

SEQ ID NO: 3984230 - RNA, 19 nt, Human herpesvirus 5
gcgcugguggccgaacagc

SEQ ID NO: 3984231 - RNA, 18 nt, Human herpesvirus 5
gcgcuucuggucgguuuu

SEQ ID NO: 3984232 - RNA, 14 nt, Human herpesvirus 5
gcgcuugcggcaca

SEQ ID NO: 3984233 - RNA, 19 nt, Human herpesvirus 5
gcggcagcggaacucgacc

SEQ ID NO: 3984234 - RNA, 19 nt, Human herpesvirus 5
gcggccacggccugcgggc

SEQ ID NO: 3984235 - RNA, 18 nt, Human herpesvirus 5
gcggcccuucaacggcac

SEQ ID NO: 3984236 - RNA, 13 nt, Human herpesvirus 5
gcggccguggccu

SEQ ID NO: 3984237 - RNA, 17 nt, Human herpesvirus 5
gcggcgacaagcugugg

SEQ ID NO: 3984238 - RNA, 13 nt, Human herpesvirus 5
gcggcgccgacuc

SEQ ID NO: 3984239 - RNA, 20 nt, Human herpesvirus 5
gcggcgguggugacugggga

SEQ ID NO: 3984240 - RNA, 18 nt, Human herpesvirus 5
gcggcucgggcuggcgug

SEQ ID NO: 3984241 - RNA, 15 nt, Human herpesvirus 5
gcggcuuauguuucu

SEQ ID NO: 3984242 - RNA, 15 nt, Human herpesvirus 5
gcgggaacuggccug

SEQ ID NO: 3984243 - RNA, 22 nt, Human herpesvirus 5
gcgggcaauugcaugucgccca

SEQ ID NO: 3984244 - RNA, 19 nt, Human herpesvirus 5
gcgggcacuggggacggug

SEQ ID NO: 3984245 - RNA, 17 nt, Human herpesvirus 5
gcgggccgaccgccgcc

SEQ ID NO: 3984246 - RNA, 14 nt, Human herpesvirus 5
gcggguccauugga

SEQ ID NO: 3984247 - RNA, 17 nt, Human herpesvirus 5
guacggcaacgagcagg

SEQ ID NO: 3984248 - RNA, 15 nt, Human herpesvirus 5
guacggcccggcagc

SEQ ID NO: 3984249 - RNA, 15 nt, Human herpesvirus 5
guacggccucugggc

SEQ ID NO: 3984250 - RNA, 10 nt, Human herpesvirus 5
guacugaagc

SEQ ID NO: 3984251 - RNA, 16 nt, Human herpesvirus 5
guacugcgacggcagc

SEQ ID NO: 3984252 - RNA, 22 nt, Human herpesvirus 5
guagccaccuguuggaacccau

SEQ ID NO: 3984253 - RNA, 18 nt, Human herpesvirus 5
guagcgggcugucacauc

SEQ ID NO: 3984254 - RNA, 14 nt, Human herpesvirus 5
guagcuagugcagc

SEQ ID NO: 3984255 - RNA, 19 nt, Human herpesvirus 5
guagcuuuuuuuauacauc

SEQ ID NO: 3984256 - RNA, 13 nt, Human herpesvirus 5
guaggaggcgcgc

SEQ ID NO: 3984257 - RNA, 14 nt, Human herpesvirus 5
guaggaguggcgcc

SEQ ID NO: 3984258 - RNA, 14 nt, Human herpesvirus 5
guauauucaaucau

SEQ ID NO: 3984259 - RNA, 20 nt, Human herpesvirus 5
guaucgggccgucgcuugcc

SEQ ID NO: 3984260 - RNA, 23 nt, Human herpesvirus 5
guaucugagcggcggcgugaccg

SEQ ID NO: 3984261 - RNA, 16 nt, Human herpesvirus 5
guauguggaacagcuc

SEQ ID NO: 3984262 - RNA, 19 nt, Human herpesvirus 5
guauucaucgggucgucuc

SEQ ID NO: 3984263 - RNA, 16 nt, Human herpesvirus 5
gucaaaagccugggua

SEQ ID NO: 3984264 - RNA, 13 nt, Human herpesvirus 5
gucaaagcucacu

SEQ ID NO: 3984265 - RNA, 18 nt, Human herpesvirus 5
gucaacaucaucagcgcc

SEQ ID NO: 3984266 - RNA, 23 nt, Human herpesvirus 5
gucacacaggccagcugccacca

SEQ ID NO: 3984267 - RNA, 15 nt, Human herpesvirus 5
gucacgucgggacga

SEQ ID NO: 3984268 - RNA, 18 nt, Human herpesvirus 5
gucacuaaggaccgacac

SEQ ID NO: 3984269 - RNA, 10 nt, Human herpesvirus 5
gucacuuccc

SEQ ID NO: 3984270 - RNA, 21 nt, Human herpesvirus 5
gucagcgaacgacgcagugcg

SEQ ID NO: 3984271 - RNA, 17 nt, Human herpesvirus 5
gucagcggcacgccgcc

SEQ ID NO: 3984272 - RNA, 14 nt, Human herpesvirus 5
gucaggacuggaag

SEQ ID NO: 3984273 - RNA, 17 nt, Human herpesvirus 5
gucaugccuuggcgcuc

SEQ ID NO: 3984274 - RNA, 23 nt, Human herpesvirus 5
gucaugggcgacuuucagggcau

SEQ ID NO: 3984275 - RNA, 21 nt, Human herpesvirus 5
gucaugucuccgaacucagag

SEQ ID NO: 3984276 - RNA, 22 nt, Human herpesvirus 5
guccaagcgcguccuguuucau

SEQ ID NO: 3984277 - RNA, 16 nt, Human herpesvirus 5
guccacacaccgcuuu

SEQ ID NO: 3984278 - RNA, 23 nt, Human herpesvirus 5
guccacccaucccgagcacucca

SEQ ID NO: 3984279 - RNA, 21 nt, Human herpesvirus 5
guccaccucugcuacuggccc

SEQ ID NO: 3984280 - RNA, 19 nt, Human herpesvirus 5
gucccagcagggcgcgccg

SEQ ID NO: 3984281 - RNA, 21 nt, Human herpesvirus 5
guccccugccaccucagugga

SEQ ID NO: 3984282 - RNA, 19 nt, Human herpesvirus 5
gucccgaaaugauauccgu

SEQ ID NO: 3984283 - RNA, 20 nt, Human herpesvirus 5
gucccgcgcggaucggacac

SEQ ID NO: 3984284 - RNA, 15 nt, Human herpesvirus 5
gucccgugugugggg

SEQ ID NO: 3984285 - RNA, 23 nt, Human herpesvirus 5
gucccuuuuacuaguauccacgu

SEQ ID NO: 3984286 - RNA, 16 nt, Human herpesvirus 5
guccgcggugucuccu

SEQ ID NO: 3984287 - RNA, 16 nt, Human herpesvirus 5
guccucgcccggugag

SEQ ID NO: 3984288 - RNA, 22 nt, Human herpesvirus 5
guccuucaucucuucgugacgg

SEQ ID NO: 3984289 - RNA, 18 nt, Human herpesvirus 5
gucgacuguugccgcgug

SEQ ID NO: 3984290 - RNA, 15 nt, Human herpesvirus 5
gucgaugccuguugg

SEQ ID NO: 3984291 - RNA, 20 nt, Human herpesvirus 5
gucgcaagggcugcucggcg

SEQ ID NO: 3984292 - RNA, 20 nt, Human herpesvirus 5
gucgccagcgcgagcgcucg

SEQ ID NO: 3984293 - RNA, 15 nt, Human herpesvirus 5
gucgccaugcuucau

SEQ ID NO: 3984294 - RNA, 16 nt, Human herpesvirus 5
gucgccgacgaagaag

SEQ ID NO: 3984295 - RNA, 16 nt, Human herpesvirus 5
gucgcgcccacggucc

SEQ ID NO: 3984296 - RNA, 12 nt, Human herpesvirus 5
gucgcguccggg

SEQ ID NO: 3984297 - RNA, 15 nt, Human herpesvirus 5
gucgcuauacaccaa

SEQ ID NO: 3984298 - RNA, 14 nt, Human herpesvirus 5
gucgcuccgcgucg

SEQ ID NO: 3984299 - RNA, 18 nt, Human herpesvirus 5
gucggagccccugcgcgc

SEQ ID NO: 3984300 - RNA, 17 nt, Human herpesvirus 5
gucggccugggcugcug

SEQ ID NO: 3984301 - RNA, 16 nt, Human herpesvirus 5
gucggcgguccuccag

SEQ ID NO: 3984302 - RNA, 13 nt, Human herpesvirus 5
gucggcugccugu

SEQ ID NO: 3984303 - RNA, 19 nt, Human herpesvirus 5
gucgguaccgucuccacca

SEQ ID NO: 3984304 - RNA, 19 nt, Human herpesvirus 5
gucggucccaucgcccaca

SEQ ID NO: 3984305 - RNA, 15 nt, Human herpesvirus 5
gucguggaggcagcg

SEQ ID NO: 3984306 - RNA, 17 nt, Human herpesvirus 5
gucguguccgugaucac

SEQ ID NO: 3984307 - RNA, 18 nt, Human herpesvirus 5
gucuacagacugggcgac

SEQ ID NO: 3984308 - RNA, 18 nt, Human herpesvirus 5
gucuacgaucgcuggaaa

SEQ ID NO: 3984309 - RNA, 20 nt, Human herpesvirus 5
gucuagauagucccacaggg

SEQ ID NO: 3984310 - RNA, 18 nt, Human herpesvirus 5
gucuccaagucuggugcg

SEQ ID NO: 3984311 - RNA, 13 nt, Human herpesvirus 5
gucuccaccacag

SEQ ID NO: 3984312 - RNA, 14 nt, Human herpesvirus 5
gucuccaccacagu

SEQ ID NO: 3984313 - RNA, 22 nt, Human herpesvirus 5
gucucccgacaggcucgucgug

SEQ ID NO: 3984314 - RNA, 14 nt, Human herpesvirus 5
gucugcgcuuuccc

SEQ ID NO: 3984315 - RNA, 18 nt, Human herpesvirus 5
gucuggagguggccugca

SEQ ID NO: 3984316 - RNA, 15 nt, Human herpesvirus 5
gucuggcccaaagac

SEQ ID NO: 3984317 - RNA, 20 nt, Human herpesvirus 5
gucuggcuuuaccgccgucg

SEQ ID NO: 3984318 - RNA, 15 nt, Human herpesvirus 5
gucuucugaagccgu

SEQ ID NO: 3984319 - RNA, 15 nt, Human herpesvirus 5
gucuuugucauaccc

SEQ ID NO: 3984320 - RNA, 13 nt, Human herpesvirus 5
gugaacgugcgcg

SEQ ID NO: 3984321 - RNA, 23 nt, Human herpesvirus 5
gugaccacgucaccgugccccac

SEQ ID NO: 3984322 - RNA, 15 nt, Human herpesvirus 5
gugacgcuaggcggc

SEQ ID NO: 3984323 - RNA, 22 nt, Human herpesvirus 5
gugaucggccgcggugcgcugc

SEQ ID NO: 3984324 - RNA, 18 nt, Human herpesvirus 5
gugauuauaucuuucuac

SEQ ID NO: 3984325 - RNA, 22 nt, Human herpesvirus 5
gugcagcaagaguugcaacgcg

SEQ ID NO: 3984326 - RNA, 13 nt, Human herpesvirus 5
gugcagcugguga

SEQ ID NO: 3984327 - RNA, 24 nt, Human herpesvirus 5
gugcagguucugaaucugcuccag

SEQ ID NO: 3984328 - RNA, 11 nt, Human herpesvirus 5
gugccaacaau

SEQ ID NO: 3984329 - RNA, 13 nt, Human herpesvirus 5
gugccagcuggcg

SEQ ID NO: 3984330 - RNA, 17 nt, Human herpesvirus 5
gugccgagaccgucgcc

SEQ ID NO: 3984331 - RNA, 21 nt, Human herpesvirus 5
gugccguugcuuuggcggcag

SEQ ID NO: 3984332 - RNA, 23 nt, Human herpesvirus 5
gugcgacugcggcgacuggcgag

SEQ ID NO: 3984333 - RNA, 18 nt, Human herpesvirus 5
gugcgccuuccaguccau

SEQ ID NO: 3984334 - RNA, 22 nt, Human herpesvirus 5
gugcgcgaccgcaaccgcgagc

SEQ ID NO: 3984335 - RNA, 19 nt, Human herpesvirus 5
gugcggcccccagaggccc

SEQ ID NO: 3984336 - RNA, 13 nt, Human herpesvirus 5
gugcgggugcaug

SEQ ID NO: 3984337 - RNA, 15 nt, Human herpesvirus 5
gugcguggaccagac

SEQ ID NO: 3984338 - RNA, 14 nt, Human herpesvirus 5
gugcucgugcccau

SEQ ID NO: 3984339 - RNA, 15 nt, Human herpesvirus 5
gugcugggucagugc

SEQ ID NO: 3984340 - RNA, 16 nt, Human herpesvirus 5
guggagaugaggcggc

SEQ ID NO: 3984341 - RNA, 22 nt, Human herpesvirus 5
guggaucgucgcggacugccgg

SEQ ID NO: 3984342 - RNA, 18 nt, Human herpesvirus 5
guggaugagggcucuuca

SEQ ID NO: 3984343 - RNA, 12 nt, Human herpesvirus 5
guggcaaagagc

SEQ ID NO: 3984344 - RNA, 15 nt, Human herpesvirus 5
guggcccuggucugg

SEQ ID NO: 3984345 - RNA, 19 nt, Human herpesvirus 5
guggcgccccggcuucauu

SEQ ID NO: 3984346 - RNA, 21 nt, Human herpesvirus 5
guggcggcgguggagggcgcg

SEQ ID NO: 3984347 - RNA, 12 nt, Human herpesvirus 5
guggcuggagaa

SEQ ID NO: 3984348 - RNA, 14 nt, Human herpesvirus 5
guggcuguuguuga

SEQ ID NO: 3984349 - RNA, 14 nt, Human herpesvirus 5
gugggccggggccc

SEQ ID NO: 3984350 - RNA, 15 nt, Human herpesvirus 5
gugggcuacuuugac

SEQ ID NO: 3984351 - RNA, 13 nt, Human herpesvirus 5
guggggcugcuca

SEQ ID NO: 3984352 - RNA, 18 nt, Human herpesvirus 5
guggggcugcucaacuuu

SEQ ID NO: 3984353 - RNA, 13 nt, Human herpesvirus 5
guggucccggaua

SEQ ID NO: 3984354 - RNA, 16 nt, Human herpesvirus 5
gugucgcgcacccggc

SEQ ID NO: 3984355 - RNA, 15 nt, Human herpesvirus 5
gugucgcugggcugg

SEQ ID NO: 3984356 - RNA, 16 nt, Human herpesvirus 5
gugugaucugggcagc

SEQ ID NO: 3984357 - RNA, 15 nt, Human herpesvirus 5
guuaaaaaaaccacg

SEQ ID NO: 3984358 - RNA, 22 nt, Human herpesvirus 5
guuagcgccgcggcaccagaga

SEQ ID NO: 3984359 - RNA, 15 nt, Human herpesvirus 5
guucacacgucguua

SEQ ID NO: 3984360 - RNA, 18 nt, Human herpesvirus 5
guucagguggaugagggc

SEQ ID NO: 3984361 - RNA, 14 nt, Human herpesvirus 5
guucccagcgcggc

SEQ ID NO: 3984362 - RNA, 13 nt, Human herpesvirus 5
aaaaaaaggcguu

SEQ ID NO: 3984363 - RNA, 19 nt, Human herpesvirus 5
aaaaacacgacgaaagcgu

SEQ ID NO: 3984364 - RNA, 16 nt, Human herpesvirus 5
aaaacuaaaagaccua

SEQ ID NO: 3984365 - RNA, 16 nt, Human herpesvirus 5
aaaagaccuaauacua

SEQ ID NO: 3984366 - RNA, 19 nt, Human herpesvirus 5
aaaagggacgucaaagcuc

SEQ ID NO: 3984367 - RNA, 14 nt, Human herpesvirus 5
aaaauaauagauua

SEQ ID NO: 3984368 - RNA, 15 nt, Human herpesvirus 5
aaaauaauauacaca

SEQ ID NO: 3984369 - RNA, 17 nt, Human herpesvirus 5
aaaauacuggacuuuug

SEQ ID NO: 3984370 - RNA, 18 nt, Human herpesvirus 5
aaacaccguguggugguu

SEQ ID NO: 3984371 - RNA, 21 nt, Human herpesvirus 5
aaacccacgaccauuuccgug

SEQ ID NO: 3984372 - RNA, 23 nt, Human herpesvirus 5
aaacgcgagaugaacuguuccac

SEQ ID NO: 3984373 - RNA, 20 nt, Human herpesvirus 5
aaacgguacgcagucacugc

SEQ ID NO: 3984374 - RNA, 22 nt, Human herpesvirus 5
aaagcacaauacacaugugguu

SEQ ID NO: 3984375 - RNA, 21 nt, Human herpesvirus 5
aaaggauggacguacuggacc

SEQ ID NO: 3984376 - RNA, 22 nt, Human herpesvirus 5
aaaguaccacauuuuuugacag

SEQ ID NO: 3984377 - RNA, 16 nt, Human herpesvirus 5
aaauuauaacggaaau

SEQ ID NO: 3984378 - RNA, 14 nt, Human herpesvirus 5
aacaaacaaugaca

SEQ ID NO: 3984379 - RNA, 17 nt, Human herpesvirus 5
aacaacagcaacaacag

SEQ ID NO: 3984380 - RNA, 12 nt, Human herpesvirus 5
aacaacgucacu

SEQ ID NO: 3984381 - RNA, 20 nt, Human herpesvirus 5
aacaagccgacccccaccag

SEQ ID NO: 3984382 - RNA, 19 nt, Human herpesvirus 5
aacacagacaggcggccag

SEQ ID NO: 3984383 - RNA, 21 nt, Human herpesvirus 5
aacaccguguucucccgacgu

SEQ ID NO: 3984384 - RNA, 15 nt, Human herpesvirus 5
aacagcagcaacagc

SEQ ID NO: 3984385 - RNA, 17 nt, Human herpesvirus 5
aacagguccagcuuaaa

SEQ ID NO: 3984386 - RNA, 18 nt, Human herpesvirus 5
aacaguacggacaaguau

SEQ ID NO: 3984387 - RNA, 19 nt, Human herpesvirus 5
aacaugaaucuuccccucu

SEQ ID NO: 3984388 - RNA, 18 nt, Human herpesvirus 5
aacauggcucccagagcu

SEQ ID NO: 3984389 - RNA, 17 nt, Human herpesvirus 5
aaccacaagaaacgcug

SEQ ID NO: 3984390 - RNA, 16 nt, Human herpesvirus 5
aaccaccgugucuccg

SEQ ID NO: 3984391 - RNA, 18 nt, Human herpesvirus 5
aacccagcagccggagga

SEQ ID NO: 3984392 - RNA, 17 nt, Human herpesvirus 5
aaccgcccgugccuccc

SEQ ID NO: 3984393 - RNA, 18 nt, Human herpesvirus 5
aaccguaguugucggcgc

SEQ ID NO: 3984394 - RNA, 14 nt, Human herpesvirus 5
aaccgugguccgcu

SEQ ID NO: 3984395 - RNA, 14 nt, Human herpesvirus 5
aacgcguggcccug

SEQ ID NO: 3984396 - RNA, 14 nt, Human herpesvirus 5
aacguugagacuac

SEQ ID NO: 3984397 - RNA, 23 nt, Human herpesvirus 5
caucaccaacguuaccuccgacu

SEQ ID NO: 3984398 - RNA, 21 nt, Human herpesvirus 5
caucacccgccucauggaccc

SEQ ID NO: 3984399 - RNA, 13 nt, Human herpesvirus 5
caucaccgccucc

SEQ ID NO: 3984400 - RNA, 23 nt, Human herpesvirus 5
caucacgugccacguucuugcgu

SEQ ID NO: 3984401 - RNA, 22 nt, Human herpesvirus 5
caucaggaucuggugcaggcca

SEQ ID NO: 3984402 - RNA, 17 nt, Human herpesvirus 5
caucauaaacuuaugau

SEQ ID NO: 3984403 - RNA, 23 nt, Human herpesvirus 5
caucaucagcgccgugcucagcg

SEQ ID NO: 3984404 - RNA, 23 nt, Human herpesvirus 5
cauccaucacaucacccaacacu

SEQ ID NO: 3984405 - RNA, 22 nt, Human herpesvirus 5
caucgguugccucuggguguug

SEQ ID NO: 3984406 - RNA, 19 nt, Human herpesvirus 5
caucgugguagcgccgcga

SEQ ID NO: 3984407 - RNA, 17 nt, Human herpesvirus 5
caucuccgucucugguc

SEQ ID NO: 3984408 - RNA, 23 nt, Human herpesvirus 5
caugaggaagcggggguguauag

SEQ ID NO: 3984409 - RNA, 14 nt, Human herpesvirus 5
caugcaucccacca

SEQ ID NO: 3984410 - RNA, 20 nt, Human herpesvirus 5
caugcgggaacuggccuggc

SEQ ID NO: 3984411 - RNA, 15 nt, Human herpesvirus 5
caugcgguguuuccg

SEQ ID NO: 3984412 - RNA, 19 nt, Human herpesvirus 5
caugcugugggcccacugc

SEQ ID NO: 3984413 - RNA, 20 nt, Human herpesvirus 5
cauggaggucuaucacgggc

SEQ ID NO: 3984414 - RNA, 15 nt, Human herpesvirus 5
cauggucggugacau

SEQ ID NO: 3984415 - RNA, 19 nt, Human herpesvirus 5
caugugcaaaaacuugucc

SEQ ID NO: 3984416 - RNA, 14 nt, Human herpesvirus 5
caugugcagcuggu

SEQ ID NO: 3984417 - RNA, 18 nt, Human herpesvirus 5
cauguucucccaggacca

SEQ ID NO: 3984418 - RNA, 16 nt, Human herpesvirus 5
cauuacuaaacaaaaa

SEQ ID NO: 3984419 - RNA, 17 nt, Human herpesvirus 5
cauuggaaguaacauca

SEQ ID NO: 3984420 - RNA, 14 nt, Human herpesvirus 5
ccaaaaccaugcua

SEQ ID NO: 3984421 - RNA, 13 nt, Human herpesvirus 5
ccaaggcgagcca

SEQ ID NO: 3984422 - RNA, 13 nt, Human herpesvirus 5
ccaauaacauguc

SEQ ID NO: 3984423 - RNA, 20 nt, Human herpesvirus 5
ccacaacgaggaacccgcga

SEQ ID NO: 3984424 - RNA, 22 nt, Human herpesvirus 5
ccaccgauccgcacgaccgcga

SEQ ID NO: 3984425 - RNA, 23 nt, Human herpesvirus 5
ccaccgugaugucaacacugacg

SEQ ID NO: 3984426 - RNA, 19 nt, Human herpesvirus 5
ccacgacgcagaaagaggg

SEQ ID NO: 3984427 - RNA, 20 nt, Human herpesvirus 5
ccacggaaguuccgacgcga

SEQ ID NO: 3984428 - RNA, 22 nt, Human herpesvirus 5
ccacggccuuauguggcugcgc

SEQ ID NO: 3984429 - RNA, 21 nt, Human herpesvirus 5
ccacggcgggucguuggcucc

SEQ ID NO: 3984430 - RNA, 16 nt, Human herpesvirus 5
ccacggcgucuuccuc

SEQ ID NO: 3984431 - RNA, 20 nt, Human herpesvirus 5
ccacggcugcugaucgccgu

SEQ ID NO: 3984432 - RNA, 19 nt, Human herpesvirus 5
ccacggugcuuuucaucua

SEQ ID NO: 3984433 - RNA, 19 nt, Human herpesvirus 5
ccacgguuuguggcaaggc

SEQ ID NO: 3984434 - RNA, 18 nt, Human herpesvirus 5
ccacguccacccaucccg

SEQ ID NO: 3984435 - RNA, 18 nt, Human herpesvirus 5
ccacuauguccuccgcac

SEQ ID NO: 3984436 - RNA, 14 nt, Human herpesvirus 5
ccagaacucucugc

SEQ ID NO: 3984437 - RNA, 22 nt, Human herpesvirus 5
ccagcagggcgcgccggcgcca

SEQ ID NO: 3984438 - RNA, 23 nt, Human herpesvirus 5
ccagccccgucaaaacacacgcg

SEQ ID NO: 3984439 - RNA, 23 nt, Human herpesvirus 5
ccagccuguuuaaugacaagugc

SEQ ID NO: 3984440 - RNA, 18 nt, Human herpesvirus 5
ccagcgccaccauagcca

SEQ ID NO: 3984441 - RNA, 16 nt, Human herpesvirus 5
ccagcggccgcagugg

SEQ ID NO: 3984442 - RNA, 13 nt, Human herpesvirus 5
ccagcggccuggc

SEQ ID NO: 3984443 - RNA, 16 nt, Human herpesvirus 5
ccagcuacagccacga

SEQ ID NO: 3984444 - RNA, 20 nt, Human herpesvirus 5
ccagcuaucaggccagcugc

SEQ ID NO: 3984445 - RNA, 23 nt, Human herpesvirus 5
ccagcuaucaggccagcugcguc

SEQ ID NO: 3984446 - RNA, 20 nt, Human herpesvirus 5
ccaggauuucaccgccgcua

SEQ ID NO: 3984447 - RNA, 22 nt, Human herpesvirus 5
ccaggcugucaaucaugccggu

SEQ ID NO: 3984448 - RNA, 12 nt, Human herpesvirus 5
ccaggugaccag

SEQ ID NO: 3984449 - RNA, 22 nt, Human herpesvirus 5
ccaguuucaccaaggcgagcca

SEQ ID NO: 3984450 - RNA, 15 nt, Human herpesvirus 5
ccaucgggcccgcca

SEQ ID NO: 3984451 - RNA, 15 nt, Human herpesvirus 5
ccaucucgcguaacg

SEQ ID NO: 3984452 - RNA, 20 nt, Human herpesvirus 5
ccaucucgcguaacgugucu

SEQ ID NO: 3984453 - RNA, 13 nt, Human herpesvirus 5
ccaucuucaucuu

SEQ ID NO: 3984454 - RNA, 17 nt, Human herpesvirus 5
ccaugaagcggaugauu

SEQ ID NO: 3984455 - RNA, 14 nt, Human herpesvirus 5
ccaugacgcgccuc

SEQ ID NO: 3984456 - RNA, 14 nt, Human herpesvirus 5
ccaugagcggcagg

SEQ ID NO: 3984457 - RNA, 23 nt, Human herpesvirus 5
ccaugcugagcaaguacacgcgc

SEQ ID NO: 3984458 - RNA, 15 nt, Human herpesvirus 5
ccauggagcugcacu

SEQ ID NO: 3984459 - RNA, 20 nt, Human herpesvirus 5
cccaaaagaagaaaaaaggc

SEQ ID NO: 3984460 - RNA, 20 nt, Human herpesvirus 5
cgucugagccggggugccgc

SEQ ID NO: 3984461 - RNA, 16 nt, Human herpesvirus 5
cgucugcgacuccugg

SEQ ID NO: 3984462 - RNA, 19 nt, Human herpesvirus 5
cgucuucaaaguagcugug

SEQ ID NO: 3984463 - RNA, 18 nt, Human herpesvirus 5
cgugaaugggcacgccgu

SEQ ID NO: 3984464 - RNA, 18 nt, Human herpesvirus 5
cgugacgcagucugcccu

SEQ ID NO: 3984465 - RNA, 22 nt, Human herpesvirus 5
cgugacggauaagcgcuuucug

SEQ ID NO: 3984466 - RNA, 14 nt, Human herpesvirus 5
cgugacuuggggcg

SEQ ID NO: 3984467 - RNA, 15 nt, Human herpesvirus 5
cgugcaacgccacca

SEQ ID NO: 3984468 - RNA, 19 nt, Human herpesvirus 5
cgugcaacggcgacgcggu

SEQ ID NO: 3984469 - RNA, 14 nt, Human herpesvirus 5
cgugcacgcgcugc

SEQ ID NO: 3984470 - RNA, 17 nt, Human herpesvirus 5
cgugccaggcuguucac

SEQ ID NO: 3984471 - RNA, 20 nt, Human herpesvirus 5
cgugcccguuuucacagcag

SEQ ID NO: 3984472 - RNA, 16 nt, Human herpesvirus 5
cgugccugggaacgcg

SEQ ID NO: 3984473 - RNA, 18 nt, Human herpesvirus 5
cgugcgaccuggacggcu

SEQ ID NO: 3984474 - RNA, 17 nt, Human herpesvirus 5
cgugcgguaacuggcag

SEQ ID NO: 3984475 - RNA, 15 nt, Human herpesvirus 5
cgugcucgcgcacgu

SEQ ID NO: 3984476 - RNA, 20 nt, Human herpesvirus 5
cgugcucgggcgugugggug

SEQ ID NO: 3984477 - RNA, 16 nt, Human herpesvirus 5
cgugcucgugcccauc

SEQ ID NO: 3984478 - RNA, 22 nt, Human herpesvirus 5
cgugcuuuuggugcgccacgua

SEQ ID NO: 3984479 - RNA, 14 nt, Human herpesvirus 5
cguggaaggcaccg

SEQ ID NO: 3984480 - RNA, 14 nt, Human herpesvirus 5
cguggacgacuggc

SEQ ID NO: 3984481 - RNA, 20 nt, Human herpesvirus 5
cguggacugggacgaggagg

SEQ ID NO: 3984482 - RNA, 23 nt, Human herpesvirus 5
cguggcggccgacggcagcgugc

SEQ ID NO: 3984483 - RNA, 19 nt, Human herpesvirus 5
cguggcuuucuccgacgug

SEQ ID NO: 3984484 - RNA, 16 nt, Human herpesvirus 5
cguguaggcgacuggc

SEQ ID NO: 3984485 - RNA, 17 nt, Human herpesvirus 5
cguguucucccgacguc

SEQ ID NO: 3984486 - RNA, 19 nt, Human herpesvirus 5
cguguugccgacggcggcg

SEQ ID NO: 3984487 - RNA, 20 nt, Human herpesvirus 5
cguuaacuauuccacuagua

SEQ ID NO: 3984488 - RNA, 16 nt, Human herpesvirus 5
cguuaagcguugagcc

SEQ ID NO: 3984489 - RNA, 16 nt, Human herpesvirus 5
cguuaccgccucuguc

SEQ ID NO: 3984490 - RNA, 20 nt, Human herpesvirus 5
cguuagagaaagagcagcgc

SEQ ID NO: 3984491 - RNA, 22 nt, Human herpesvirus 5
cguucuccucgacgcgcggcgg

SEQ ID NO: 3984492 - RNA, 14 nt, Human herpesvirus 5
cguugguggaaacu

SEQ ID NO: 3984493 - RNA, 22 nt, Human herpesvirus 5
cguuguucgucucugccucucc

SEQ ID NO: 3984494 - RNA, 15 nt, Human herpesvirus 5
cguuugcgccagugg

SEQ ID NO: 3984495 - RNA, 15 nt, Human herpesvirus 5
cuaaagcccccacga

SEQ ID NO: 3984496 - RNA, 17 nt, Human herpesvirus 5
cuaacacuccucucccc

SEQ ID NO: 3984497 - RNA, 18 nt, Human herpesvirus 5
cuaacauuccccugggaa

SEQ ID NO: 3984498 - RNA, 20 nt, Human herpesvirus 5
cuaaccacuaccgcaacagc

SEQ ID NO: 3984499 - RNA, 23 nt, Human herpesvirus 5
cuacacgccuugcaccugggugg

SEQ ID NO: 3984500 - RNA, 20 nt, Human herpesvirus 5
cuacauccuuaucugggugc

SEQ ID NO: 3984501 - RNA, 22 nt, Human herpesvirus 5
cuacaugcuauaagacagccuu

SEQ ID NO: 3984502 - RNA, 14 nt, Human herpesvirus 5
cuaccagcugggcc

SEQ ID NO: 3984503 - RNA, 15 nt, Human herpesvirus 5
cuacccucaaguacg

SEQ ID NO: 3984504 - RNA, 15 nt, Human herpesvirus 5
cuaccgcgacggcga

SEQ ID NO: 3984505 - RNA, 22 nt, Human herpesvirus 5
cuaccuagaugcuagcaauaau

SEQ ID NO: 3984506 - RNA, 14 nt, Human herpesvirus 5
cuaccucaugacgc

SEQ ID NO: 3984507 - RNA, 17 nt, Human herpesvirus 5
cuaccuggcuggcgcag

SEQ ID NO: 3984508 - RNA, 14 nt, Human herpesvirus 5
cuacgacaacaucc

SEQ ID NO: 3984509 - RNA, 13 nt, Human herpesvirus 5
cuacgagcugggc

SEQ ID NO: 3984510 - RNA, 15 nt, Human herpesvirus 5
cuacggaccgcagca

SEQ ID NO: 3984511 - RNA, 17 nt, Human herpesvirus 5
cuacggaguuuucccuc

SEQ ID NO: 3984512 - RNA, 19 nt, Human herpesvirus 5
cuacggaguuuucccucag

SEQ ID NO: 3984513 - RNA, 22 nt, Human herpesvirus 5
cuacggaguuuucccucagccu

SEQ ID NO: 3984514 - RNA, 23 nt, Human herpesvirus 5
cuacggaguuuucccucagccuc

SEQ ID NO: 3984515 - RNA, 14 nt, Human herpesvirus 5
cuacggcggaccgc

SEQ ID NO: 3984516 - RNA, 15 nt, Human herpesvirus 5
cuacguacgauacac

SEQ ID NO: 3984517 - RNA, 20 nt, Human herpesvirus 5
cuacucacaauggaagccau

SEQ ID NO: 3984518 - RNA, 15 nt, Human herpesvirus 5
cuacucacguuggug

SEQ ID NO: 3984519 - RNA, 17 nt, Human herpesvirus 5
cuacugaucgccuggag

SEQ ID NO: 3984520 - RNA, 17 nt, Human herpesvirus 5
cuagacgaagaggacac

SEQ ID NO: 3984521 - RNA, 17 nt, Human herpesvirus 5
cuagacucacuuuauug

SEQ ID NO: 3984522 - RNA, 16 nt, Human herpesvirus 5
cuaggaacacugaaaa

SEQ ID NO: 3984523 - RNA, 17 nt, Human herpesvirus 5
cuaggcuacuccgccgu

SEQ ID NO: 3984524 - RNA, 15 nt, Human herpesvirus 5
cuauaagacagccuu

SEQ ID NO: 3984525 - RNA, 23 nt, Human herpesvirus 5
cuaucacgggcucguguggcagc

SEQ ID NO: 3984526 - RNA, 22 nt, Human herpesvirus 5
cuauggacaauuccccucgccu

SEQ ID NO: 3984527 - RNA, 17 nt, Human herpesvirus 5
cuauguaaauguuuuua

SEQ ID NO: 3984528 - RNA, 16 nt, Human herpesvirus 5
cuauugcuuagcugca

SEQ ID NO: 3984529 - RNA, 22 nt, Human herpesvirus 5
cuauuggcagaagcauagcgau

SEQ ID NO: 3984530 - RNA, 22 nt, Human herpesvirus 5
cucaaagcagaccaaguacgac

SEQ ID NO: 3984531 - RNA, 16 nt, Human herpesvirus 5
cucacccggcugcugg

SEQ ID NO: 3984532 - RNA, 17 nt, Human herpesvirus 5
cucaccgugcucgugcc

SEQ ID NO: 3984533 - RNA, 13 nt, Human herpesvirus 5
cucacgggaaggc

SEQ ID NO: 3984534 - RNA, 13 nt, Human herpesvirus 5
cucacuguuugaa

SEQ ID NO: 3984535 - RNA, 17 nt, Human herpesvirus 5
cucagcccgcguaagaa

SEQ ID NO: 3984536 - RNA, 20 nt, Human herpesvirus 5
cucagccucuguguucccaa

SEQ ID NO: 3984537 - RNA, 20 nt, Human herpesvirus 5
cucagguuccccgagagggu

SEQ ID NO: 3984538 - RNA, 18 nt, Human herpesvirus 5
cucagucucucggugcgu

SEQ ID NO: 3984539 - RNA, 14 nt, Human herpesvirus 5
cucauaauaaagcu

SEQ ID NO: 3984540 - RNA, 15 nt, Human herpesvirus 5
cucaucggcauguuc

SEQ ID NO: 3984541 - RNA, 16 nt, Human herpesvirus 5
cuccaagucuggugcg

SEQ ID NO: 3984542 - RNA, 18 nt, Human herpesvirus 5
cuccaccgagacgcucac

SEQ ID NO: 3984543 - RNA, 13 nt, Human herpesvirus 5
cuccacggccucc

SEQ ID NO: 3984544 - RNA, 20 nt, Human herpesvirus 5
cuccagcagcagcuggugca

SEQ ID NO: 3984545 - RNA, 17 nt, Human herpesvirus 5
cuccgaacucagaggcc

SEQ ID NO: 3984546 - RNA, 18 nt, Human herpesvirus 5
cuccgaacucagaggcca

SEQ ID NO: 3984547 - RNA, 22 nt, Human herpesvirus 5
cuccgaaggcggacggaggagu

SEQ ID NO: 3984548 - RNA, 16 nt, Human herpesvirus 5
cuccgacuuccuccuc

SEQ ID NO: 3984549 - RNA, 21 nt, Human herpesvirus 5
cuccggcugucaugggucugc

SEQ ID NO: 3984550 - RNA, 15 nt, Human herpesvirus 5
cuccgugccagcugg

SEQ ID NO: 3984551 - RNA, 22 nt, Human herpesvirus 5
gcgucgccaguaccgacgacga

SEQ ID NO: 3984552 - RNA, 22 nt, Human herpesvirus 5
gcgucgcccucgacggcgguac

SEQ ID NO: 3984553 - RNA, 19 nt, Human herpesvirus 5
gcgucgccugcgacggcgg

SEQ ID NO: 3984554 - RNA, 16 nt, Human herpesvirus 5
gcgucggcgccccaca

SEQ ID NO: 3984555 - RNA, 16 nt, Human herpesvirus 5
gcgucgucccagcagg

SEQ ID NO: 3984556 - RNA, 14 nt, Human herpesvirus 5
gcgucuuccuccuc

SEQ ID NO: 3984557 - RNA, 14 nt, Human herpesvirus 5
gcguggacugggac

SEQ ID NO: 3984558 - RNA, 15 nt, Human herpesvirus 5
gcguggauggucaua

SEQ ID NO: 3984559 - RNA, 19 nt, Human herpesvirus 5
gcguguggaggacggggug

SEQ ID NO: 3984560 - RNA, 17 nt, Human herpesvirus 5
gcgugugggugaaaccg

SEQ ID NO: 3984561 - RNA, 16 nt, Human herpesvirus 5
gcguuccaaugcaccg

SEQ ID NO: 3984562 - RNA, 16 nt, Human herpesvirus 5
gcguuguuuacccccg

SEQ ID NO: 3984563 - RNA, 21 nt, Human herpesvirus 5
gcuacgcgaccagcugcugga

SEQ ID NO: 3984564 - RNA, 19 nt, Human herpesvirus 5
gcuacgguggugugugggg

SEQ ID NO: 3984565 - RNA, 18 nt, Human herpesvirus 5
gcuacguacgacugcgcg

SEQ ID NO: 3984566 - RNA, 17 nt, Human herpesvirus 5
gcuacguaggccuccuc

SEQ ID NO: 3984567 - RNA, 14 nt, Human herpesvirus 5
gcuacgugcgcgcc

SEQ ID NO: 3984568 - RNA, 20 nt, Human herpesvirus 5
gcuaucuguguccgcccgag

SEQ ID NO: 3984569 - RNA, 21 nt, Human herpesvirus 5
gcuaugcgggaugcugcggcg

SEQ ID NO: 3984570 - RNA, 23 nt, Human herpesvirus 5
gcucagcggcguguacagcuacc

SEQ ID NO: 3984571 - RNA, 19 nt, Human herpesvirus 5
gcucauccacaacgaggaa

SEQ ID NO: 3984572 - RNA, 14 nt, Human herpesvirus 5
gcucaugccgccac

SEQ ID NO: 3984573 - RNA, 21 nt, Human herpesvirus 5
gcuccagaagauacucgaugg

SEQ ID NO: 3984574 - RNA, 21 nt, Human herpesvirus 5
gcuccgcgucgcuucgccgcc

SEQ ID NO: 3984575 - RNA, 15 nt, Human herpesvirus 5
gcuccuaccgccgcc

SEQ ID NO: 3984576 - RNA, 15 nt, Human herpesvirus 5
gcuccucggagcacg

SEQ ID NO: 3984577 - RNA, 20 nt, Human herpesvirus 5
gcucgaaauguugacccagg

SEQ ID NO: 3984578 - RNA, 13 nt, Human herpesvirus 5
gcucgaccaggag

SEQ ID NO: 3984579 - RNA, 21 nt, Human herpesvirus 5
gcucgaccaggagguguugag

SEQ ID NO: 3984580 - RNA, 22 nt, Human herpesvirus 5
gcucgcuuagacauuccccacc

SEQ ID NO: 3984581 - RNA, 18 nt, Human herpesvirus 5
gcucggacacagcgccgc

SEQ ID NO: 3984582 - RNA, 20 nt, Human herpesvirus 5
gcucgugaaacagcagcucg

SEQ ID NO: 3984583 - RNA, 21 nt, Human herpesvirus 5
gcucgugcgugucgcugggcu

SEQ ID NO: 3984584 - RNA, 12 nt, Human herpesvirus 5
gcugagacagga

SEQ ID NO: 3984585 - RNA, 14 nt, Human herpesvirus 5
gcugagcgugugga

SEQ ID NO: 3984586 - RNA, 12 nt, Human herpesvirus 5
gcugaugucugc

SEQ ID NO: 3984587 - RNA, 13 nt, Human herpesvirus 5
gcugaugugccag

SEQ ID NO: 3984588 - RNA, 14 nt, Human herpesvirus 5
gcugcaccaggagg

SEQ ID NO: 3984589 - RNA, 16 nt, Human herpesvirus 5
gcugcacgaccugcac

SEQ ID NO: 3984590 - RNA, 22 nt, Human herpesvirus 5
gcugcccgggggugacaaggaa

SEQ ID NO: 3984591 - RNA, 19 nt, Human herpesvirus 5
gcugccgcagcugcuggag

SEQ ID NO: 3984592 - RNA, 17 nt, Human herpesvirus 5
gcugccgcucagcgagc

SEQ ID NO: 3984593 - RNA, 16 nt, Human herpesvirus 5
gcugccuguuccugcu

SEQ ID NO: 3984594 - RNA, 20 nt, Human herpesvirus 5
gcugcgcaauaugacgcuga

SEQ ID NO: 3984595 - RNA, 12 nt, Human herpesvirus 5
gcugcgcaggcc

SEQ ID NO: 3984596 - RNA, 13 nt, Human herpesvirus 5
gcugcgucgccug

SEQ ID NO: 3984597 - RNA, 18 nt, Human herpesvirus 5
gcugcucggcguggucaa

SEQ ID NO: 3984598 - RNA, 17 nt, Human herpesvirus 5
gcugcuguugcacgggc

SEQ ID NO: 3984599 - RNA, 18 nt, Human herpesvirus 5
gcugcuguugcacgggcu

SEQ ID NO: 3984600 - RNA, 17 nt, Human herpesvirus 5
gcugcuguugugggugc

SEQ ID NO: 3984601 - RNA, 19 nt, Human herpesvirus 5
gcugcuuuggagcacggga

SEQ ID NO: 3984602 - RNA, 16 nt, Human herpesvirus 5
gcuggagcuaucugug

SEQ ID NO: 3984603 - RNA, 19 nt, Human herpesvirus 5
gcuggccgauccacgggcc

SEQ ID NO: 3984604 - RNA, 16 nt, Human herpesvirus 5
gcuggccgccgcugca

SEQ ID NO: 3984605 - RNA, 21 nt, Human herpesvirus 5
gcuggcgguauggcugcgcgc

SEQ ID NO: 3984606 - RNA, 21 nt, Human herpesvirus 5
gcuggcuuuccucgggcgagu

SEQ ID NO: 3984607 - RNA, 17 nt, Human herpesvirus 5
gcugguggcucaugccg

SEQ ID NO: 3984608 - RNA, 20 nt, Human herpesvirus 5
gcuguacgucacgccagacu

SEQ ID NO: 3984609 - RNA, 21 nt, Human herpesvirus 5
gcuguccauagugcgccaagc

SEQ ID NO: 3984610 - RNA, 14 nt, Human herpesvirus 5
gcuguucacgcgga

SEQ ID NO: 3984611 - RNA, 13 nt, Human herpesvirus 5
gcuuaucugccuc

SEQ ID NO: 3984612 - RNA, 17 nt, Human herpesvirus 5
gcuuccauaaacgcuuu

SEQ ID NO: 3984613 - RNA, 17 nt, Human herpesvirus 5
gcuucgagggcucgugc

SEQ ID NO: 3984614 - RNA, 20 nt, Human herpesvirus 5
gcuucucucuggucuucccu

SEQ ID NO: 3984615 - RNA, 16 nt, Human herpesvirus 5
gcuugcuccucuucca

SEQ ID NO: 3984616 - RNA, 13 nt, Human herpesvirus 5
gcuugcuggcuug

SEQ ID NO: 3984617 - RNA, 19 nt, Human herpesvirus 5
gcuuucgcgucuuuuuucu

SEQ ID NO: 3984618 - RNA, 17 nt, Human herpesvirus 5
gcuuuuggugcgccacg

SEQ ID NO: 3984619 - RNA, 14 nt, Human herpesvirus 5
gcuuuuuugucccg

SEQ ID NO: 3984620 - RNA, 20 nt, Human herpesvirus 5
ggaaaaagguugggagaugc

SEQ ID NO: 3984621 - RNA, 23 nt, Human herpesvirus 5
ggaaacagcguccacaguuuccg

SEQ ID NO: 3984622 - RNA, 17 nt, Human herpesvirus 5
ggaaauacaugaugaau

SEQ ID NO: 3984623 - RNA, 19 nt, Human herpesvirus 5
ggaaauacaugaugaaugu

SEQ ID NO: 3984624 - RNA, 14 nt, Human herpesvirus 5
ggaacggagcagcc

SEQ ID NO: 3984625 - RNA, 21 nt, Human herpesvirus 5
ggaagccggucgucugcgacu

SEQ ID NO: 3984626 - RNA, 14 nt, Human herpesvirus 5
ggaagcggugcuga

SEQ ID NO: 3984627 - RNA, 22 nt, Human herpesvirus 5
ggaagcuuuggucgccugcacu

SEQ ID NO: 3984628 - RNA, 24 nt, Human herpesvirus 5
ggaaugucagaugacgagcgccgg

SEQ ID NO: 3984629 - RNA, 23 nt, Human herpesvirus 5
ggaaugugcuuucccggcauggg

SEQ ID NO: 3984630 - RNA, 15 nt, Human herpesvirus 5
ggacaaguacagcgg

SEQ ID NO: 3984631 - RNA, 23 nt, Human herpesvirus 5
ggacaugauggaaaugcccgcca

SEQ ID NO: 3984632 - RNA, 16 nt, Human herpesvirus 5
ggacauggacucgcca

SEQ ID NO: 3984633 - RNA, 18 nt, Human herpesvirus 5
ggacauggacucgccacg

SEQ ID NO: 3984634 - RNA, 15 nt, Human herpesvirus 5
ggaccgacacggagg

SEQ ID NO: 3984635 - RNA, 16 nt, Human herpesvirus 5
ggaccgacacggagga

SEQ ID NO: 3984636 - RNA, 23 nt, Human herpesvirus 5
ggacggcuacauguguccgggca

SEQ ID NO: 3984637 - RNA, 21 nt, Human herpesvirus 5
ggacucgguuucggcgacgug

SEQ ID NO: 3984638 - RNA, 18 nt, Human herpesvirus 5
ggacugacacagcuccug

SEQ ID NO: 3984639 - RNA, 15 nt, Human herpesvirus 5
ggagaaaagagauga

SEQ ID NO: 3984640 - RNA, 19 nt, Human herpesvirus 5
ggagcccgcacacuggcug

SEQ ID NO: 3984641 - RNA, 14 nt, Human herpesvirus 5
ggagcgggucgccg

SEQ ID NO: 3984642 - RNA, 19 nt, Human herpesvirus 5
ggagcgggucgccgaggcu

SEQ ID NO: 3984643 - RNA, 16 nt, Human herpesvirus 5
ggagcguaccagggaa

SEQ ID NO: 3984644 - RNA, 19 nt, Human herpesvirus 5
ggagcuacgcgaccagcug

SEQ ID NO: 3984645 - RNA, 14 nt, Human herpesvirus 5
ggagcucacccggc

SEQ ID NO: 3984646 - RNA, 17 nt, Human herpesvirus 5
ggagcugcugcucggcg

SEQ ID NO: 3984647 - RNA, 17 nt, Human herpesvirus 5
ggaggacucagagccac

SEQ ID NO: 3984648 - RNA, 14 nt, Human herpesvirus 5
ggaggaugacgaua

SEQ ID NO: 3984649 - RNA, 21 nt, Human herpesvirus 5
ggaggugcuggcggccguggc

SEQ ID NO: 3984650 - RNA, 16 nt, Human herpesvirus 5
ggaguuuguguaaugc

SEQ ID NO: 3984651 - RNA, 19 nt, Human herpesvirus 5
ggauagguguggcgaaagc

SEQ ID NO: 3984652 - RNA, 21 nt, Human herpesvirus 5
ggauccaaggccuccagcgcc

SEQ ID NO: 3984653 - RNA, 14 nt, Human herpesvirus 5
ggaugagggcucuu

SEQ ID NO: 3984654 - RNA, 12 nt, Human herpesvirus 5
gcccucgccggc

SEQ ID NO: 3984655 - RNA, 17 nt, Human herpesvirus 5
gcccugcugacgcuguu

SEQ ID NO: 3984656 - RNA, 20 nt, Human herpesvirus 5
gcccugcugacgcuguugag

SEQ ID NO: 3984657 - RNA, 22 nt, Human herpesvirus 5
gcccuguaugagcuguuucgac

SEQ ID NO: 3984658 - RNA, 11 nt, Human herpesvirus 5
gccgacgaggc

SEQ ID NO: 3984659 - RNA, 15 nt, Human herpesvirus 5
gccgacgaggccggc

SEQ ID NO: 3984660 - RNA, 15 nt, Human herpesvirus 5
gccgagacggcguga

SEQ ID NO: 3984661 - RNA, 21 nt, Human herpesvirus 5
gccgagacggcgugacacagc

SEQ ID NO: 3984662 - RNA, 16 nt, Human herpesvirus 5
gccgagcuaugcgagc

SEQ ID NO: 3984663 - RNA, 14 nt, Human herpesvirus 5
gccgaucaugugcu

SEQ ID NO: 3984664 - RNA, 11 nt, Human herpesvirus 5
gccgcaacagc

SEQ ID NO: 3984665 - RNA, 22 nt, Human herpesvirus 5
gccgcaaugggcuucccuccug

SEQ ID NO: 3984666 - RNA, 22 nt, Human herpesvirus 5
gccgcacgcgcuagccuuucug

SEQ ID NO: 3984667 - RNA, 18 nt, Human herpesvirus 5
gccgcagccguuggugga

SEQ ID NO: 3984668 - RNA, 15 nt, Human herpesvirus 5
gccgcagcugcugga

SEQ ID NO: 3984669 - RNA, 18 nt, Human herpesvirus 5
gccgccgucaccaccgcc

SEQ ID NO: 3984670 - RNA, 19 nt, Human herpesvirus 5
gccgccgucgcgccuuccu

SEQ ID NO: 3984671 - RNA, 13 nt, Human herpesvirus 5
gccgccgugacgu

SEQ ID NO: 3984672 - RNA, 23 nt, Human herpesvirus 5
gccgccuuccaagauacgcgguc

SEQ ID NO: 3984673 - RNA, 14 nt, Human herpesvirus 5
gccgcgacaacggc

SEQ ID NO: 3984674 - RNA, 19 nt, Human herpesvirus 5
gccgcgacaacggccgccg

SEQ ID NO: 3984675 - RNA, 22 nt, Human herpesvirus 5
gccgcgacaacggccgccgcag

SEQ ID NO: 3984676 - RNA, 13 nt, Human herpesvirus 5
gccgcgacacacg

SEQ ID NO: 3984677 - RNA, 23 nt, Human herpesvirus 5
gccgcgauucgucugacgcugcu

SEQ ID NO: 3984678 - RNA, 14 nt, Human herpesvirus 5
gccgcggugcaggc

SEQ ID NO: 3984679 - RNA, 15 nt, Human herpesvirus 5
gccgcggugcaggcc

SEQ ID NO: 3984680 - RNA, 19 nt, Human herpesvirus 5
gccgcucaagccgcggugc

SEQ ID NO: 3984681 - RNA, 16 nt, Human herpesvirus 5
gccgcucagcgagcuc

SEQ ID NO: 3984682 - RNA, 19 nt, Human herpesvirus 5
gccgcuccaucgcagccac

SEQ ID NO: 3984683 - RNA, 14 nt, Human herpesvirus 5
gccgcugccgccgc

SEQ ID NO: 3984684 - RNA, 16 nt, Human herpesvirus 5
gccgcugccgcucagc

SEQ ID NO: 3984685 - RNA, 20 nt, Human herpesvirus 5
gccgcuuucucaucucagcc

SEQ ID NO: 3984686 - RNA, 18 nt, Human herpesvirus 5
gccggcgacugacgccgg

SEQ ID NO: 3984687 - RNA, 22 nt, Human herpesvirus 5
gccggcuucgaacaucgcgucg

SEQ ID NO: 3984688 - RNA, 14 nt, Human herpesvirus 5
gccgggacucuggu

SEQ ID NO: 3984689 - RNA, 15 nt, Human herpesvirus 5
gccggggagacgacg

SEQ ID NO: 3984690 - RNA, 22 nt, Human herpesvirus 5
gccgucacugccaccgacaugg

SEQ ID NO: 3984691 - RNA, 14 nt, Human herpesvirus 5
gccguccaugucgc

SEQ ID NO: 3984692 - RNA, 14 nt, Human herpesvirus 5
gccgucgcaagggc

SEQ ID NO: 3984693 - RNA, 11 nt, Human herpesvirus 5
gccgugcucag

SEQ ID NO: 3984694 - RNA, 22 nt, Human herpesvirus 5
gccgugcucuuggcgccgcggu

SEQ ID NO: 3984695 - RNA, 19 nt, Human herpesvirus 5
gccguggccuguggcccga

SEQ ID NO: 3984696 - RNA, 21 nt, Human herpesvirus 5
gccguguguuaccgccgccgc

SEQ ID NO: 3984697 - RNA, 17 nt, Human herpesvirus 5
gccguugcggccgccgc

SEQ ID NO: 3984698 - RNA, 18 nt, Human herpesvirus 5
gccucaaaaagcaggugg

SEQ ID NO: 3984699 - RNA, 15 nt, Human herpesvirus 5
gccuccagcgccucc

SEQ ID NO: 3984700 - RNA, 16 nt, Human herpesvirus 5
gccucgauccauccug

SEQ ID NO: 3984701 - RNA, 17 nt, Human herpesvirus 5
gccucuacacuuggugc

SEQ ID NO: 3984702 - RNA, 12 nt, Human herpesvirus 5
gccucuuccucg

SEQ ID NO: 3984703 - RNA, 19 nt, Human herpesvirus 5
gccugaggaaggggaggag

SEQ ID NO: 3984704 - RNA, 20 nt, Human herpesvirus 5
gccuguugugguggcuggga

SEQ ID NO: 3984705 - RNA, 15 nt, Human herpesvirus 5
gccuucagcgucuca

SEQ ID NO: 3984706 - RNA, 16 nt, Human herpesvirus 5
gcgaagguguggcggc

SEQ ID NO: 3984707 - RNA, 22 nt, Human herpesvirus 5
gcgaccgucuggagguggccug

SEQ ID NO: 3984708 - RNA, 23 nt, Human herpesvirus 5
gcgaccgucuggagguggccugc

SEQ ID NO: 3984709 - RNA, 19 nt, Human herpesvirus 5
gcgacgagaucuacgcugu

SEQ ID NO: 3984710 - RNA, 14 nt, Human herpesvirus 5
gcgacggcagcgcc

SEQ ID NO: 3984711 - RNA, 16 nt, Human herpesvirus 5
gcgacguaccagcugu

SEQ ID NO: 3984712 - RNA, 13 nt, Human herpesvirus 5
gcgacguggagga

SEQ ID NO: 3984713 - RNA, 19 nt, Human herpesvirus 5
gcgacguggaggagaccau

SEQ ID NO: 3984714 - RNA, 13 nt, Human herpesvirus 5
gcgacuccuggac

SEQ ID NO: 3984715 - RNA, 18 nt, Human herpesvirus 5
gcgagaugaacuguucca

SEQ ID NO: 3984716 - RNA, 21 nt, Human herpesvirus 5
gcgagccccaucgggcccgcc

SEQ ID NO: 3984717 - RNA, 23 nt, Human herpesvirus 5
gcgagcggaacccgggcucaccg

SEQ ID NO: 3984718 - RNA, 23 nt, Human herpesvirus 5
gcgagcgggcaaucaaugcgucu

SEQ ID NO: 3984719 - RNA, 15 nt, Human herpesvirus 5
gcgagcuggccagca

SEQ ID NO: 3984720 - RNA, 12 nt, Human herpesvirus 5
gcgaggcggcaa

SEQ ID NO: 3984721 - RNA, 12 nt, Human herpesvirus 5
gcgcacgccaaa

SEQ ID NO: 3984722 - RNA, 22 nt, Human herpesvirus 5
gcgcaggccgccgccgcucagg

SEQ ID NO: 3984723 - RNA, 21 nt, Human herpesvirus 5
gcgcccaaaccgcaggagcug

SEQ ID NO: 3984724 - RNA, 19 nt, Human herpesvirus 5
gcgccccccaccuacgagc

SEQ ID NO: 3984725 - RNA, 14 nt, Human herpesvirus 5
gcgcccccgugugu

SEQ ID NO: 3984726 - RNA, 16 nt, Human herpesvirus 5
gcgccgccagcgcggu

SEQ ID NO: 3984727 - RNA, 19 nt, Human herpesvirus 5
gcgccgggcgccacggcca

SEQ ID NO: 3984728 - RNA, 14 nt, Human herpesvirus 5
gcgccguccugcag

SEQ ID NO: 3984729 - RNA, 20 nt, Human herpesvirus 5
gcgccguggguuggcagcug

SEQ ID NO: 3984730 - RNA, 18 nt, Human herpesvirus 5
gcgccguuuugcuguccu

SEQ ID NO: 3984731 - RNA, 12 nt, Human herpesvirus 5
gcgccuccuggu

SEQ ID NO: 3984732 - RNA, 14 nt, Human herpesvirus 5
gcgccugcugcucg

SEQ ID NO: 3984733 - RNA, 20 nt, Human herpesvirus 5
gcgccugguugcugccgcgu

SEQ ID NO: 3984734 - RNA, 20 nt, Human herpesvirus 5
gcgcgccuaccugacgccga

SEQ ID NO: 3984735 - RNA, 12 nt, Human herpesvirus 5
gcgcgcugcgug

SEQ ID NO: 3984736 - RNA, 14 nt, Human herpesvirus 5
gcgcggccugcugc

SEQ ID NO: 3984737 - RNA, 13 nt, Human herpesvirus 5
gcgcggcuacacg

SEQ ID NO: 3984738 - RNA, 14 nt, Human herpesvirus 5
gcgcgguguuagac

SEQ ID NO: 3984739 - RNA, 17 nt, Human herpesvirus 5
gcgcgguuucgccgccg

SEQ ID NO: 3984740 - RNA, 16 nt, Human herpesvirus 5
gcgcguccacagcgug

SEQ ID NO: 3984741 - RNA, 15 nt, Human herpesvirus 5
gcgcuaacgccucgu

SEQ ID NO: 3984742 - RNA, 20 nt, Human herpesvirus 5
gcgcuccaggcggagaugag

SEQ ID NO: 3984743 - RNA, 16 nt, Human herpesvirus 5
gcgcuucugcagcucc

SEQ ID NO: 3984744 - RNA, 19 nt, Human herpesvirus 5
gcgcuuucccaccgcgacc

SEQ ID NO: 3984745 - RNA, 23 nt, Human herpesvirus 5
gcggaagauaccgucggcgccgc

SEQ ID NO: 3984746 - RNA, 15 nt, Human herpesvirus 5
gcggacuuggcagcg

SEQ ID NO: 3984747 - RNA, 21 nt, Human herpesvirus 5
gcggaggaggugaccuggcug

SEQ ID NO: 3984748 - RNA, 13 nt, Human herpesvirus 5
gcggcaaucggug

SEQ ID NO: 3984749 - RNA, 13 nt, Human herpesvirus 5
gcggcaccaggaa

SEQ ID NO: 3984750 - RNA, 16 nt, Human herpesvirus 5
gcggccgacggcagcg

SEQ ID NO: 3984751 - RNA, 17 nt, Human herpesvirus 5
gcggccgcagaaggcca

SEQ ID NO: 3984752 - RNA, 14 nt, Human herpesvirus 5
gcggccguggccug

SEQ ID NO: 3984753 - RNA, 13 nt, Human herpesvirus 5
gcggcgccgggaa

SEQ ID NO: 3984754 - RNA, 23 nt, Human herpesvirus 5
gcggcgcuucgagggcucgugcg

SEQ ID NO: 3984755 - RNA, 13 nt, Human herpesvirus 5
gcggcggcacucg

SEQ ID NO: 3984756 - RNA, 24 nt, Human herpesvirus 5
gcggcgguagaaacgucgcagcca

SEQ ID NO: 3984757 - RNA, 15 nt, Human herpesvirus 5
gcggcgguggccguc

SEQ ID NO: 3984758 - RNA, 16 nt, Human herpesvirus 5
gcggcgugcgcacgcc

SEQ ID NO: 3984759 - RNA, 16 nt, Human herpesvirus 5
gcggcguggacuggga

SEQ ID NO: 3984760 - RNA, 23 nt, Human herpesvirus 5
gcggcuuauguuucugggguggg

SEQ ID NO: 3984761 - RNA, 16 nt, Human herpesvirus 5
gcgggagacuaggucg

SEQ ID NO: 3984762 - RNA, 17 nt, Human herpesvirus 5
gcgguacccgacgcggc

SEQ ID NO: 3984763 - RNA, 16 nt, Human herpesvirus 5
gcgguacugaagccgc

SEQ ID NO: 3984764 - RNA, 19 nt, Human herpesvirus 5
gcgguaugggucacggcgg

SEQ ID NO: 3984765 - RNA, 17 nt, Human herpesvirus 5
gcgguggucgaugcuga

SEQ ID NO: 3984766 - RNA, 19 nt, Human herpesvirus 5
gcgguguuuccgauggugg

SEQ ID NO: 3984767 - RNA, 19 nt, Human herpesvirus 5
gcgguuucguguugaaacc

SEQ ID NO: 3984768 - RNA, 20 nt, Human herpesvirus 5
gcguagucuggcagcguuau

SEQ ID NO: 3984769 - RNA, 18 nt, Human herpesvirus 5
gcgucccuggggcugcug

SEQ ID NO: 3984770 - RNA, 16 nt, Human herpesvirus 5
gcguccgggcuuuccu

SEQ ID NO: 3984771 - RNA, 21 nt, Human herpesvirus 5
ugaggcgguggcugcgccucc

SEQ ID NO: 3984772 - RNA, 16 nt, Human herpesvirus 5
ugauauuuuacaggua

SEQ ID NO: 3984773 - RNA, 16 nt, Human herpesvirus 5
ugaucgugggccagga

SEQ ID NO: 3984774 - RNA, 12 nt, Human herpesvirus 5
ugaucugucauc

SEQ ID NO: 3984775 - RNA, 15 nt, Human herpesvirus 5
ugauguaguugcaga

SEQ ID NO: 3984776 - RNA, 17 nt, Human herpesvirus 5
ugcacagcgucuggcca

SEQ ID NO: 3984777 - RNA, 21 nt, Human herpesvirus 5
ugcacaucaauaaacuuuuuu

SEQ ID NO: 3984778 - RNA, 16 nt, Human herpesvirus 5
ugcacgagugggccag

SEQ ID NO: 3984779 - RNA, 20 nt, Human herpesvirus 5
ugcagaccgaggcgcuggac

SEQ ID NO: 3984780 - RNA, 12 nt, Human herpesvirus 5
ugcagcccaccg

SEQ ID NO: 3984781 - RNA, 22 nt, Human herpesvirus 5
ugcagcgaauugagcaacaaac

SEQ ID NO: 3984782 - RNA, 13 nt, Human herpesvirus 5
ugcagcugcacca

SEQ ID NO: 3984783 - RNA, 17 nt, Human herpesvirus 5
ugcagcugcaccacggc

SEQ ID NO: 3984784 - RNA, 15 nt, Human herpesvirus 5
ugcaguccgcuccgg

SEQ ID NO: 3984785 - RNA, 20 nt, Human herpesvirus 5
ugcaugucgcccagaaagaa

SEQ ID NO: 3984786 - RNA, 14 nt, Human herpesvirus 5
ugccacguucuugc

SEQ ID NO: 3984787 - RNA, 19 nt, Human herpesvirus 5
ugccagcccuauccuccau

SEQ ID NO: 3984788 - RNA, 20 nt, Human herpesvirus 5
ugccccccgggauccaagag

SEQ ID NO: 3984789 - RNA, 14 nt, Human herpesvirus 5
ugcccgcgauuucu

SEQ ID NO: 3984790 - RNA, 14 nt, Human herpesvirus 5
ugccgaaacaccgu

SEQ ID NO: 3984791 - RNA, 13 nt, Human herpesvirus 5
ugccgcagcugcu

SEQ ID NO: 3984792 - RNA, 22 nt, Human herpesvirus 5
ugccgccgcuguggcugccgcu

SEQ ID NO: 3984793 - RNA, 19 nt, Human herpesvirus 5
ugccggcauguccggccgu

SEQ ID NO: 3984794 - RNA, 24 nt, Human herpesvirus 5
ugccggucuacagacugggcgacg

SEQ ID NO: 3984795 - RNA, 12 nt, Human herpesvirus 5
ugccuguuccug

SEQ ID NO: 3984796 - RNA, 16 nt, Human herpesvirus 5
ugcgacugcggcgacu

SEQ ID NO: 3984797 - RNA, 18 nt, Human herpesvirus 5
ugcgcaucuacauccuua

SEQ ID NO: 3984798 - RNA, 23 nt, Human herpesvirus 5
ugcgccgagcggccguugcccgg

SEQ ID NO: 3984799 - RNA, 18 nt, Human herpesvirus 5
ugcgcgaauggcuggugu

SEQ ID NO: 3984800 - RNA, 11 nt, Human herpesvirus 5
ugcgcgccgcc

SEQ ID NO: 3984801 - RNA, 15 nt, Human herpesvirus 5
ugcgcggcgacgagg

SEQ ID NO: 3984802 - RNA, 17 nt, Human herpesvirus 5
ugcgcucuugggcgaca

SEQ ID NO: 3984803 - RNA, 21 nt, Human herpesvirus 5
ugcggauacgccgccgggcgc

SEQ ID NO: 3984804 - RNA, 20 nt, Human herpesvirus 5
ugcggcccccagaggcccgc

SEQ ID NO: 3984805 - RNA, 14 nt, Human herpesvirus 5
ugcggcgcagacgu

SEQ ID NO: 3984806 - RNA, 21 nt, Human herpesvirus 5
ugcggcgcagacgucggcggu

SEQ ID NO: 3984807 - RNA, 23 nt, Human herpesvirus 5
ccugugugaucugggcagcggcu

SEQ ID NO: 3984808 - RNA, 19 nt, Human herpesvirus 5
ccuguuggcuuacugccug

SEQ ID NO: 3984809 - RNA, 21 nt, Human herpesvirus 5
ccuguuggcuuacugccugcc

SEQ ID NO: 3984810 - RNA, 15 nt, Human herpesvirus 5
ccuguuucggauguu

SEQ ID NO: 3984811 - RNA, 18 nt, Human herpesvirus 5
ccuuaucugggugcaaug

SEQ ID NO: 3984812 - RNA, 23 nt, Human herpesvirus 5
ccuuccagcuuaccgccaccguc

SEQ ID NO: 3984813 - RNA, 12 nt, Human herpesvirus 5
ccuucucccccu

SEQ ID NO: 3984814 - RNA, 12 nt, Human herpesvirus 5
ccuucuugccca

SEQ ID NO: 3984815 - RNA, 17 nt, Human herpesvirus 5
ccuugagcgacagcagc

SEQ ID NO: 3984816 - RNA, 20 nt, Human herpesvirus 5
ccuugcgcucccugcuccgc

SEQ ID NO: 3984817 - RNA, 22 nt, Human herpesvirus 5
ccuugcgcucccugcuccgcaa

SEQ ID NO: 3984818 - RNA, 13 nt, Human herpesvirus 5
ccuuuugcuggcu

SEQ ID NO: 3984819 - RNA, 15 nt, Human herpesvirus 5
cgaacggcgacggca

SEQ ID NO: 3984820 - RNA, 18 nt, Human herpesvirus 5
cgaagcugcgcaggccgc

SEQ ID NO: 3984821 - RNA, 15 nt, Human herpesvirus 5
cgaaggcuacucuau

SEQ ID NO: 3984822 - RNA, 23 nt, Human herpesvirus 5
cgaaucgccggcuugcuccucuu

SEQ ID NO: 3984823 - RNA, 15 nt, Human herpesvirus 5
cgacaaccugcugca

SEQ ID NO: 3984824 - RNA, 14 nt, Human herpesvirus 5
cgacacagcagcac

SEQ ID NO: 3984825 - RNA, 21 nt, Human herpesvirus 5
cgacagaugcggcgguuacac

SEQ ID NO: 3984826 - RNA, 17 nt, Human herpesvirus 5
cgacagucuccuccuga

SEQ ID NO: 3984827 - RNA, 15 nt, Human herpesvirus 5
cgaccagcugcugga

SEQ ID NO: 3984828 - RNA, 20 nt, Human herpesvirus 5
cgaccuugagcgacagcagc

SEQ ID NO: 3984829 - RNA, 17 nt, Human herpesvirus 5
cgacgacuaugaugaag

SEQ ID NO: 3984830 - RNA, 13 nt, Human herpesvirus 5
cgacgacucaggg

SEQ ID NO: 3984831 - RNA, 16 nt, Human herpesvirus 5
cgacgcagugcguggc

SEQ ID NO: 3984832 - RNA, 13 nt, Human herpesvirus 5
cgacgccgucgcu

SEQ ID NO: 3984833 - RNA, 22 nt, Human herpesvirus 5
cgacggcagcuaucgugacugg

SEQ ID NO: 3984834 - RNA, 22 nt, Human herpesvirus 5
cgacgugauuuacgaggucugc

SEQ ID NO: 3984835 - RNA, 17 nt, Human herpesvirus 5
cgacguucuccaaggga

SEQ ID NO: 3984836 - RNA, 20 nt, Human herpesvirus 5
cgacguuucgcgaggacaag

SEQ ID NO: 3984837 - RNA, 21 nt, Human herpesvirus 5
cgacuacgguuacuccacaac

SEQ ID NO: 3984838 - RNA, 18 nt, Human herpesvirus 5
cgacuggggucaaaagcc

SEQ ID NO: 3984839 - RNA, 14 nt, Human herpesvirus 5
cgagaaaacuaaaa

SEQ ID NO: 3984840 - RNA, 22 nt, Human herpesvirus 5
cgagacggcgugacacagcacg

SEQ ID NO: 3984841 - RNA, 16 nt, Human herpesvirus 5
cgagacuaucuacaac

SEQ ID NO: 3984842 - RNA, 20 nt, Human herpesvirus 5
cgagagguagccaacagcag

SEQ ID NO: 3984843 - RNA, 19 nt, Human herpesvirus 5
cgagcaccggcgccugcug

SEQ ID NO: 3984844 - RNA, 14 nt, Human herpesvirus 5
cgagcaggccaugg

SEQ ID NO: 3984845 - RNA, 23 nt, Human herpesvirus 5
cgagcaucgcaacaacagcaaca

SEQ ID NO: 3984846 - RNA, 13 nt, Human herpesvirus 5
cgagcgcucggcg

SEQ ID NO: 3984847 - RNA, 16 nt, Human herpesvirus 5
cgagcggcggacuugg

SEQ ID NO: 3984848 - RNA, 14 nt, Human herpesvirus 5
cgaggaacgagggc

SEQ ID NO: 3984849 - RNA, 19 nt, Human herpesvirus 5
cgaggacaaccgcauccug

SEQ ID NO: 3984850 - RNA, 16 nt, Human herpesvirus 5
cgaggacaaggcuccg

SEQ ID NO: 3984851 - RNA, 14 nt, Human herpesvirus 5
cgaggacgcgcuuc

SEQ ID NO: 3984852 - RNA, 15 nt, Human herpesvirus 5
cgaggccggcggcgg

SEQ ID NO: 3984853 - RNA, 20 nt, Human herpesvirus 5
cgagggcccucgccggcggc

SEQ ID NO: 3984854 - RNA, 12 nt, Human herpesvirus 5
cgagguggucaa

SEQ ID NO: 3984855 - RNA, 16 nt, Human herpesvirus 5
cgagucggauggcuuu

SEQ ID NO: 3984856 - RNA, 22 nt, Human herpesvirus 5
cgaguggugaggagcgccgggg

SEQ ID NO: 3984857 - RNA, 23 nt, Human herpesvirus 5
cgauagagauggcgauauuggaa

SEQ ID NO: 3984858 - RNA, 12 nt, Human herpesvirus 5
cgauccuuggaa

SEQ ID NO: 3984859 - RNA, 16 nt, Human herpesvirus 5
cgaugcugcaaggccu

SEQ ID NO: 3984860 - RNA, 17 nt, Human herpesvirus 5
cgaugugagagccaccu

SEQ ID NO: 3984861 - RNA, 17 nt, Human herpesvirus 5
cgaugugaguuucugug

SEQ ID NO: 3984862 - RNA, 22 nt, Human herpesvirus 5
cgauguuucggaguaccgagua

SEQ ID NO: 3984863 - RNA, 16 nt, Human herpesvirus 5
cgcaaacucccacucc

SEQ ID NO: 3984864 - RNA, 14 nt, Human herpesvirus 5
cgcaaaucuacaac

SEQ ID NO: 3984865 - RNA, 18 nt, Human herpesvirus 5
cgcaacaacagcagcaac

SEQ ID NO: 3984866 - RNA, 21 nt, Human herpesvirus 5
cgcaacaacagcagcaacagc

SEQ ID NO: 3984867 - RNA, 20 nt, Human herpesvirus 5
cgcaacuucugucucggcac

SEQ ID NO: 3984868 - RNA, 21 nt, Human herpesvirus 5
cgcaacuuuuggccgccacac

SEQ ID NO: 3984869 - RNA, 15 nt, Human herpesvirus 5
cgcacacuggcugga

SEQ ID NO: 3984870 - RNA, 13 nt, Human herpesvirus 5
cgcacgaccgcga

SEQ ID NO: 3984871 - RNA, 14 nt, Human herpesvirus 5
cgcacgcuggagga

SEQ ID NO: 3984872 - RNA, 21 nt, Human herpesvirus 5
cgcacggaaaagcaguggcag

SEQ ID NO: 3984873 - RNA, 18 nt, Human herpesvirus 5
cgcacuggacgacgucaa

SEQ ID NO: 3984874 - RNA, 13 nt, Human herpesvirus 5
cgcagccaccggc

SEQ ID NO: 3984875 - RNA, 14 nt, Human herpesvirus 5
cgcagccuccucgc

SEQ ID NO: 3984876 - RNA, 12 nt, Human herpesvirus 5
cgcagcgcacca

SEQ ID NO: 3984877 - RNA, 14 nt, Human herpesvirus 5
cgcagcgccagccu

SEQ ID NO: 3984878 - RNA, 14 nt, Human herpesvirus 5
cgcagucgcucauc

SEQ ID NO: 3984879 - RNA, 20 nt, Human herpesvirus 5
cgcagugcgccgagcggccg

SEQ ID NO: 3984880 - RNA, 13 nt, Human herpesvirus 5
cgcagugggccca

SEQ ID NO: 3984881 - RNA, 14 nt, Human herpesvirus 5
cgcagugggcccac

SEQ ID NO: 3984882 - RNA, 14 nt, Human herpesvirus 5
cgcaguugcugccu

SEQ ID NO: 3984883 - RNA, 14 nt, Human herpesvirus 5
cgcauaaagggugg

SEQ ID NO: 3984884 - RNA, 17 nt, Human herpesvirus 5
cgcauagccucuacaaa

SEQ ID NO: 3984885 - RNA, 19 nt, Human herpesvirus 5
cgcaucacccgccucaugg

SEQ ID NO: 3984886 - RNA, 17 nt, Human herpesvirus 5
cgccaacgcgagcuggc

SEQ ID NO: 3984887 - RNA, 12 nt, Human herpesvirus 5
cgccacacgugu

SEQ ID NO: 3984888 - RNA, 21 nt, Human herpesvirus 5
cgccacauuggugaaggccgu

SEQ ID NO: 3984889 - RNA, 13 nt, Human herpesvirus 5
cgccaccgguggc

SEQ ID NO: 3984890 - RNA, 21 nt, Human herpesvirus 5
cgccagcguccgcgccugcac

SEQ ID NO: 3984891 - RNA, 15 nt, Human herpesvirus 5
cgcccgagacggcgg

SEQ ID NO: 3984892 - RNA, 14 nt, Human herpesvirus 5
cgcccgcgccucac

SEQ ID NO: 3984893 - RNA, 18 nt, Human herpesvirus 5
cgcccgggccgccugagg

SEQ ID NO: 3984894 - RNA, 15 nt, Human herpesvirus 5
cgcccucgacggcgg

SEQ ID NO: 3984895 - RNA, 17 nt, Human herpesvirus 5
cgccgacgugcuucgcg

SEQ ID NO: 3984896 - RNA, 16 nt, Human herpesvirus 5
cgccgaggcuacugcu

SEQ ID NO: 3984897 - RNA, 18 nt, Human herpesvirus 5
cgccgauagagauggcga

SEQ ID NO: 3984898 - RNA, 15 nt, Human herpesvirus 5
cgccgauagaggcga

SEQ ID NO: 3984899 - RNA, 17 nt, Human herpesvirus 5
cgccgaucauguccgag

SEQ ID NO: 3984900 - RNA, 11 nt, Human herpesvirus 5
cgccgcagacc

SEQ ID NO: 3984901 - RNA, 19 nt, Human herpesvirus 5
cgccgccaacgcgagcugg

SEQ ID NO: 3984902 - RNA, 15 nt, Human herpesvirus 5
cgccgcgacaacggc

SEQ ID NO: 3984903 - RNA, 16 nt, Human herpesvirus 5
cgccgcggcagcacca

SEQ ID NO: 3984904 - RNA, 16 nt, Human herpesvirus 5
cgccggcguugccgcc

SEQ ID NO: 3984905 - RNA, 17 nt, Human herpesvirus 5
cgccggggagacgacga

SEQ ID NO: 3984906 - RNA, 15 nt, Human herpesvirus 5
cgccgucaaggccgc

SEQ ID NO: 3984907 - RNA, 22 nt, Human herpesvirus 5
cgccgucgcgccuuccuccucu

SEQ ID NO: 3984908 - RNA, 22 nt, Human herpesvirus 5
cgccgucggugcgcccaucugc

SEQ ID NO: 3984909 - RNA, 16 nt, Human herpesvirus 5
cgccgucucccucugc

SEQ ID NO: 3984910 - RNA, 16 nt, Human herpesvirus 5
cgccgugacguccgcu

SEQ ID NO: 3984911 - RNA, 20 nt, Human herpesvirus 5
cgccguggguuggcagcugg

SEQ ID NO: 3984912 - RNA, 17 nt, Human herpesvirus 5
cgccucuucuggcccuc

SEQ ID NO: 3984913 - RNA, 20 nt, Human herpesvirus 5
cgccuuuugaucgccaccgc

SEQ ID NO: 3984914 - RNA, 16 nt, Human herpesvirus 5
cgccuuuugcuggcug

SEQ ID NO: 3984915 - RNA, 13 nt, Human herpesvirus 5
cgcgaacgccgcg

SEQ ID NO: 3984916 - RNA, 13 nt, Human herpesvirus 5
cgcgacacccggg

SEQ ID NO: 3984917 - RNA, 11 nt, Human herpesvirus 5
cgcgacacggu

SEQ ID NO: 3984918 - RNA, 23 nt, Human herpesvirus 5
cgcgaccagcugcuggacgacgu

SEQ ID NO: 3984919 - RNA, 14 nt, Human herpesvirus 5
cgcgaccgccucaa

SEQ ID NO: 3984920 - RNA, 20 nt, Human herpesvirus 5
cgcgacguguugcgggaccu

SEQ ID NO: 3984921 - RNA, 18 nt, Human herpesvirus 5
cgcgagcggaacccgggc

SEQ ID NO: 3984922 - RNA, 17 nt, Human herpesvirus 5
cgcgaggugucauguuc

SEQ ID NO: 3984923 - RNA, 14 nt, Human herpesvirus 5
cgcgcccacuggag

SEQ ID NO: 3984924 - RNA, 13 nt, Human herpesvirus 5
cgcgcccgucgcg

SEQ ID NO: 3984925 - RNA, 15 nt, Human herpesvirus 5
cgcgccgggcggcuu

SEQ ID NO: 3984926 - RNA, 14 nt, Human herpesvirus 5
cgcgcgagcgugcg

SEQ ID NO: 3984927 - RNA, 23 nt, Human herpesvirus 5
cgcgcggucauauagccuccggc

SEQ ID NO: 3984928 - RNA, 14 nt, Human herpesvirus 5
cgcgcuggcucgcg

SEQ ID NO: 3984929 - RNA, 19 nt, Human herpesvirus 5
cgcgcuggcuuuccucggg

SEQ ID NO: 3984930 - RNA, 17 nt, Human herpesvirus 5
cgcggacgccugcgacg

SEQ ID NO: 3984931 - RNA, 21 nt, Human herpesvirus 5
cgcggagguuugucuggcggc

SEQ ID NO: 3984932 - RNA, 23 nt, Human herpesvirus 5
cgcggagguuugucuggcggcuu

SEQ ID NO: 3984933 - RNA, 22 nt, Human herpesvirus 5
cgcggaugagcgugcugcucug

SEQ ID NO: 3984934 - RNA, 19 nt, Human herpesvirus 5
cgcggcaacucgagauggu

SEQ ID NO: 3984935 - RNA, 14 nt, Human herpesvirus 5
cgcggcagcggcgc

SEQ ID NO: 3984936 - RNA, 18 nt, Human herpesvirus 5
cgcggcccccacggcggc

SEQ ID NO: 3984937 - RNA, 17 nt, Human herpesvirus 5
cgcggcgacaagcugug

SEQ ID NO: 3984938 - RNA, 16 nt, Human herpesvirus 5
cgcggggacgcgugac

SEQ ID NO: 3984939 - RNA, 13 nt, Human herpesvirus 5
cgcgguagagcuc

SEQ ID NO: 3984940 - RNA, 15 nt, Human herpesvirus 5
cgcggugcaggccgc

SEQ ID NO: 3984941 - RNA, 16 nt, Human herpesvirus 5
cgcguaagaaaccgcg

SEQ ID NO: 3984942 - RNA, 12 nt, Human herpesvirus 5
cgcguacggugg

SEQ ID NO: 3984943 - RNA, 15 nt, Human herpesvirus 5
cgcguagccuccucc

SEQ ID NO: 3984944 - RNA, 20 nt, Human herpesvirus 5
cgcguagccuccuccaccac

SEQ ID NO: 3984945 - RNA, 20 nt, Human herpesvirus 5
cgcgucggcgcccgggccgc

SEQ ID NO: 3984946 - RNA, 22 nt, Human herpesvirus 5
cgcgucggucgccgccuccgcg

SEQ ID NO: 3984947 - RNA, 15 nt, Human herpesvirus 5
cgcgucuuagacgcg

SEQ ID NO: 3984948 - RNA, 16 nt, Human herpesvirus 5
cgcgucuucgcgaggu

SEQ ID NO: 3984949 - RNA, 18 nt, Human herpesvirus 5
cgcguuuaccgaggagau

SEQ ID NO: 3984950 - RNA, 19 nt, Human herpesvirus 5
cgcguuuguugcgcggcga

SEQ ID NO: 3984951 - RNA, 17 nt, Human herpesvirus 5
cgcuaaaggugcaugac

SEQ ID NO: 3984952 - RNA, 22 nt, Human herpesvirus 5
cgcuacaacgcgcgccugaccc

SEQ ID NO: 3984953 - RNA, 13 nt, Human herpesvirus 5
cgcuauggcggcc

SEQ ID NO: 3984954 - RNA, 14 nt, Human herpesvirus 5
cgcuccaucgcagc

SEQ ID NO: 3984955 - RNA, 16 nt, Human herpesvirus 5
cgcucccugcuccgca

SEQ ID NO: 3984956 - RNA, 19 nt, Human herpesvirus 5
cgcucgcuuuggagcgcga

SEQ ID NO: 3984957 - RNA, 19 nt, Human herpesvirus 5
cgcucgucuccacgcucga

SEQ ID NO: 3984958 - RNA, 13 nt, Human herpesvirus 5
cgcugaagcggau

SEQ ID NO: 3984959 - RNA, 19 nt, Human herpesvirus 5
cgcugacagcauacgggga

SEQ ID NO: 3984960 - RNA, 23 nt, Human herpesvirus 5
cgcugauacuaucgggggagaug

SEQ ID NO: 3984961 - RNA, 20 nt, Human herpesvirus 5
cgcugcggucccgacaugga

SEQ ID NO: 3984962 - RNA, 22 nt, Human herpesvirus 5
cgcuggccgauccacgggccgc

SEQ ID NO: 3984963 - RNA, 14 nt, Human herpesvirus 5
cgcuuagccaccac

SEQ ID NO: 3984964 - RNA, 13 nt, Human herpesvirus 5
cgcuuuccgccgc

SEQ ID NO: 3984965 - RNA, 14 nt, Human herpesvirus 5
cggaaaaaccgcgc

SEQ ID NO: 3984966 - RNA, 22 nt, Human herpesvirus 5
cggaagcuuuggucgccugcac

SEQ ID NO: 3984967 - RNA, 13 nt, Human herpesvirus 5
cggaccgcagcac

SEQ ID NO: 3984968 - RNA, 13 nt, Human herpesvirus 5
cggagcagagggu

SEQ ID NO: 3984969 - RNA, 23 nt, Human herpesvirus 5
cggagcccggucugagcuccgac

SEQ ID NO: 3984970 - RNA, 18 nt, Human herpesvirus 5
cggaggacgcagaauaaa

SEQ ID NO: 3984971 - RNA, 12 nt, Human herpesvirus 5
cggaggagcguc

SEQ ID NO: 3984972 - RNA, 20 nt, Human herpesvirus 5
cggauaagcgcuuucugaau

SEQ ID NO: 3984973 - RNA, 17 nt, Human herpesvirus 5
cggaucggacaucauac

SEQ ID NO: 3984974 - RNA, 15 nt, Human herpesvirus 5
cggaugaccuggccg

SEQ ID NO: 3984975 - RNA, 14 nt, Human herpesvirus 5
cggcaaucggugcg

SEQ ID NO: 3984976 - RNA, 20 nt, Human herpesvirus 5
cggcaccaucggacucgcca

SEQ ID NO: 3984977 - RNA, 19 nt, Human herpesvirus 5
cggcacgccgccgaagcuu

SEQ ID NO: 3984978 - RNA, 19 nt, Human herpesvirus 5
cggcacgccguugccacga

SEQ ID NO: 3984979 - RNA, 21 nt, Human herpesvirus 5
cggcacuuuacauaaaaccac

SEQ ID NO: 3984980 - RNA, 17 nt, Human herpesvirus 5
cggcagcaugggcgaca

SEQ ID NO: 3984981 - RNA, 15 nt, Human herpesvirus 5
cggcagcgccagcgg

SEQ ID NO: 3984982 - RNA, 17 nt, Human herpesvirus 5
cggcaggaaggccucgu

SEQ ID NO: 3984983 - RNA, 13 nt, Human herpesvirus 5
cggcauccucggg

SEQ ID NO: 3984984 - RNA, 20 nt, Human herpesvirus 5
cggccagcgugacgcggugc

SEQ ID NO: 3984985 - RNA, 15 nt, Human herpesvirus 5
cggcccccuaccugc

SEQ ID NO: 3984986 - RNA, 19 nt, Human herpesvirus 5
cggccgaccccgucacugu

SEQ ID NO: 3984987 - RNA, 13 nt, Human herpesvirus 5
cggccgccggcgg

SEQ ID NO: 3984988 - RNA, 16 nt, Human herpesvirus 5
cggccgugcagcaaga

SEQ ID NO: 3984989 - RNA, 18 nt, Human herpesvirus 5
cggccguuaucaaggcca

SEQ ID NO: 3984990 - RNA, 19 nt, Human herpesvirus 5
cggccuuauguggcugcgc

SEQ ID NO: 3984991 - RNA, 22 nt, Human herpesvirus 5
cggcgagcgaagguagaggagu

SEQ ID NO: 3984992 - RNA, 15 nt, Human herpesvirus 5
cggcgaucgcgcuuu

SEQ ID NO: 3984993 - RNA, 17 nt, Human herpesvirus 5
cggcgauggucauguuc

SEQ ID NO: 3984994 - RNA, 21 nt, Human herpesvirus 5
cggcgcaacuucugucucggc

SEQ ID NO: 3984995 - RNA, 13 nt, Human herpesvirus 5
cggcgcagcacca

SEQ ID NO: 3984996 - RNA, 13 nt, Human herpesvirus 5
cggcgccugguug

SEQ ID NO: 3984997 - RNA, 14 nt, Human herpesvirus 5
cggcggcagcuugg

SEQ ID NO: 3984998 - RNA, 20 nt, Human herpesvirus 5
cggcggcuguucgacagcgg

SEQ ID NO: 3984999 - RNA, 21 nt, Human herpesvirus 5
cggcggcuugggcagcagcgg

SEQ ID NO: 3985000 - RNA, 14 nt, Human herpesvirus 5
cggcgguccuccag

SEQ ID NO: 3985001 - RNA, 20 nt, Human herpesvirus 5
cggcgucuuccuccucgucg

SEQ ID NO: 3985002 - RNA, 13 nt, Human herpesvirus 5
cggcgugcugcac

SEQ ID NO: 3985003 - RNA, 17 nt, Human herpesvirus 5
cggcguucgcgugcacg

SEQ ID NO: 3985004 - RNA, 19 nt, Human herpesvirus 5
cggcuaacaaagcccgggc

SEQ ID NO: 3985005 - RNA, 17 nt, Human herpesvirus 5
cggcucgccgccgcgcc

SEQ ID NO: 3985006 - RNA, 19 nt, Human herpesvirus 5
cggcugccggucuacagac

SEQ ID NO: 3985007 - RNA, 11 nt, Human herpesvirus 5
cggcugcugca

SEQ ID NO: 3985008 - RNA, 12 nt, Human herpesvirus 5
cggcugcugcac

SEQ ID NO: 3985009 - RNA, 19 nt, Human herpesvirus 5
cgggaaacauguccccauc

SEQ ID NO: 3985010 - RNA, 20 nt, Human herpesvirus 5
cgggcaaagaguccaucugc

SEQ ID NO: 3985011 - RNA, 15 nt, Human herpesvirus 5
cgggcacggaccgca

SEQ ID NO: 3985012 - RNA, 15 nt, Human herpesvirus 5
cgggcgacagcacgu

SEQ ID NO: 3985013 - RNA, 17 nt, Human herpesvirus 5
cgggcgcgcaucgccgu

SEQ ID NO: 3985014 - RNA, 17 nt, Human herpesvirus 5
cgggcucguguggcagc

SEQ ID NO: 3985015 - RNA, 15 nt, Human herpesvirus 5
cggggugccgccgcu

SEQ ID NO: 3985016 - RNA, 21 nt, Human herpesvirus 5
cggggugguggugcugcugcu

SEQ ID NO: 3985017 - RNA, 13 nt, Human herpesvirus 5
cgggugacggcga

SEQ ID NO: 3985018 - RNA, 16 nt, Human herpesvirus 5
cgguccaguggcaggc

SEQ ID NO: 3985019 - RNA, 17 nt, Human herpesvirus 5
cgguccuccagcagcag

SEQ ID NO: 3985020 - RNA, 21 nt, Human herpesvirus 5
cggucugagcuccgacgcagg

SEQ ID NO: 3985021 - RNA, 23 nt, Human herpesvirus 5
cggucugcuugcuggcuuggcuc

SEQ ID NO: 3985022 - RNA, 19 nt, Human herpesvirus 5
cggugacgucggugguggc

SEQ ID NO: 3985023 - RNA, 12 nt, Human herpesvirus 5
cggugagacccg

SEQ ID NO: 3985024 - RNA, 13 nt, Human herpesvirus 5
cggugcaggccgc

SEQ ID NO: 3985025 - RNA, 15 nt, Human herpesvirus 5
cggugcaggccgcgc

SEQ ID NO: 3985026 - RNA, 19 nt, Human herpesvirus 5
cggugcgcugcagccggag

SEQ ID NO: 3985027 - RNA, 18 nt, Human herpesvirus 5
cggugcugcugcgcgaca

SEQ ID NO: 3985028 - RNA, 13 nt, Human herpesvirus 5
cgguggcggccgc

SEQ ID NO: 3985029 - RNA, 21 nt, Human herpesvirus 5
cgguggucggcugccgccgcu

SEQ ID NO: 3985030 - RNA, 15 nt, Human herpesvirus 5
cgguugcggcuuggu

SEQ ID NO: 3985031 - RNA, 20 nt, Human herpesvirus 5
cgguuuaccacaggcgccgc

SEQ ID NO: 3985032 - RNA, 14 nt, Human herpesvirus 5
cgguuuccacgcca

SEQ ID NO: 3985033 - RNA, 19 nt, Human herpesvirus 5
gguacuucaguaugaaagu

SEQ ID NO: 3985034 - RNA, 15 nt, Human herpesvirus 5
gguaggugcgccgca

SEQ ID NO: 3985035 - RNA, 22 nt, Human herpesvirus 5
ggucaacgcguccagcuucugg

SEQ ID NO: 3985036 - RNA, 21 nt, Human herpesvirus 5
ggucccggauaauuguccuuc

SEQ ID NO: 3985037 - RNA, 17 nt, Human herpesvirus 5
ggucggcaagagccgga

SEQ ID NO: 3985038 - RNA, 20 nt, Human herpesvirus 5
ggucgggcacucggcugugc

SEQ ID NO: 3985039 - RNA, 17 nt, Human herpesvirus 5
ggucguagugcggcgug

SEQ ID NO: 3985040 - RNA, 16 nt, Human herpesvirus 5
ggucugcgcuuuccca

SEQ ID NO: 3985041 - RNA, 18 nt, Human herpesvirus 5
ggugagggucguggcgcg

SEQ ID NO: 3985042 - RNA, 17 nt, Human herpesvirus 5
ggugcaucaucugguag

SEQ ID NO: 3985043 - RNA, 14 nt, Human herpesvirus 5
ggugcgcgcagaag

SEQ ID NO: 3985044 - RNA, 18 nt, Human herpesvirus 5
ggugcgggagacuagguc

SEQ ID NO: 3985045 - RNA, 17 nt, Human herpesvirus 5
ggugcgggugccgggac

SEQ ID NO: 3985046 - RNA, 18 nt, Human herpesvirus 5
ggugcucgaccaggaggu

SEQ ID NO: 3985047 - RNA, 18 nt, Human herpesvirus 5
gguggaaaucccucaccc

SEQ ID NO: 3985048 - RNA, 19 nt, Human herpesvirus 5
gguggaaccgugccguugc

SEQ ID NO: 3985049 - RNA, 20 nt, Human herpesvirus 5
gguggcucuugcgcuucugc

SEQ ID NO: 3985050 - RNA, 13 nt, Human herpesvirus 5
gguggcugggcuc

SEQ ID NO: 3985051 - RNA, 23 nt, Human herpesvirus 5
gguguacgugcgguaacuggcag

SEQ ID NO: 3985052 - RNA, 17 nt, Human herpesvirus 5
gguguuaaggauucuga

SEQ ID NO: 3985053 - RNA, 20 nt, Human herpesvirus 5
gguguugccuucugcugccc

SEQ ID NO: 3985054 - RNA, 13 nt, Human herpesvirus 5
gguucgcugacga

SEQ ID NO: 3985055 - RNA, 22 nt, Human herpesvirus 5
gguugaaacgcuuuaagcugcu

SEQ ID NO: 3985056 - RNA, 18 nt, Human herpesvirus 5
gguuguuccggcggcgug

SEQ ID NO: 3985057 - RNA, 13 nt, Human herpesvirus 5
gguuucagcuggc

SEQ ID NO: 3985058 - RNA, 14 nt, Human herpesvirus 5
gguuucggcgacgu

SEQ ID NO: 3985059 - RNA, 16 nt, Human herpesvirus 5
guaaagcccguggccc

SEQ ID NO: 3985060 - RNA, 18 nt, Human herpesvirus 5
guaacuggcagagccacg

SEQ ID NO: 3985061 - RNA, 23 nt, Human herpesvirus 5
guaagguuuugcucuaaaaacac

SEQ ID NO: 3985062 - RNA, 16 nt, Human herpesvirus 5
guaaucuuccauaaua

SEQ ID NO: 3985063 - RNA, 21 nt, Human herpesvirus 5
guaaucuuccauaauaaaagu

SEQ ID NO: 3985064 - RNA, 19 nt, Human herpesvirus 5
guaccaacauagaggugag

SEQ ID NO: 3985065 - RNA, 17 nt, Human herpesvirus 5
guaccuaaagcccccac

SEQ ID NO: 3985066 - RNA, 21 nt, Human herpesvirus 5
guaccugaaaccuaccugggc

SEQ ID NO: 3985067 - RNA, 23 nt, Human herpesvirus 5
guaccuuaacaugaugaagaugg

SEQ ID NO: 3985068 - RNA, 13 nt, Human herpesvirus 5
guacgcgcacgcc

SEQ ID NO: 3985069 - RNA, 21 nt, Human herpesvirus 5
guacgcgcuaaaggugcauga

SEQ ID NO: 3985070 - RNA, 18 nt, Human herpesvirus 5
guacggcagcggggagaa

SEQ ID NO: 3985071 - RNA, 14 nt, Human herpesvirus 5
guagcaacuggcaa

SEQ ID NO: 3985072 - RNA, 14 nt, Human herpesvirus 5
guagccgaugcuga

SEQ ID NO: 3985073 - RNA, 20 nt, Human herpesvirus 5
guagcgcuugcggcacagcg

SEQ ID NO: 3985074 - RNA, 15 nt, Human herpesvirus 5
guaggaucuucgucg

SEQ ID NO: 3985075 - RNA, 16 nt, Human herpesvirus 5
guagugagcuuugacg

SEQ ID NO: 3985076 - RNA, 15 nt, Human herpesvirus 5
guauaaagauucacu

SEQ ID NO: 3985077 - RNA, 13 nt, Human herpesvirus 5
guauaugauuuug

SEQ ID NO: 3985078 - RNA, 14 nt, Human herpesvirus 5
guauccacgucaca

SEQ ID NO: 3985079 - RNA, 14 nt, Human herpesvirus 5
guauccacgucacu

SEQ ID NO: 3985080 - RNA, 21 nt, Human herpesvirus 5
guaugcaugucgcgacagaga

SEQ ID NO: 3985081 - RNA, 21 nt, Human herpesvirus 5
guaugccgcgucugcuggaag

SEQ ID NO: 3985082 - RNA, 22 nt, Human herpesvirus 5
guaugggcgguggucggcugcc

SEQ ID NO: 3985083 - RNA, 20 nt, Human herpesvirus 5
gucaaccacccgccggaacg

SEQ ID NO: 3985084 - RNA, 23 nt, Human herpesvirus 5
gucaaggccgccucuucuggccc

SEQ ID NO: 3985085 - RNA, 20 nt, Human herpesvirus 5
gucaaggcucgcaaagacgu

SEQ ID NO: 3985086 - RNA, 19 nt, Human herpesvirus 5
gucaauaaagaaaaccaca

SEQ ID NO: 3985087 - RNA, 16 nt, Human herpesvirus 5
gucaccaucgugccgc

SEQ ID NO: 3985088 - RNA, 16 nt, Human herpesvirus 5
gucacuacucugggau

SEQ ID NO: 3985089 - RNA, 12 nt, Human herpesvirus 5
gucagacacagc

SEQ ID NO: 3985090 - RNA, 19 nt, Human herpesvirus 5
gucagacccacuaccugga

SEQ ID NO: 3985091 - RNA, 17 nt, Human herpesvirus 5
gucaggcgcugcucuca

SEQ ID NO: 3985092 - RNA, 21 nt, Human herpesvirus 5
gucaucggcacgugcucuuuu

SEQ ID NO: 3985093 - RNA, 21 nt, Human herpesvirus 5
guccagauagcccggucgguc

SEQ ID NO: 3985094 - RNA, 13 nt, Human herpesvirus 5
guccagucacauu

SEQ ID NO: 3985095 - RNA, 14 nt, Human herpesvirus 5
guccaucauguucg

SEQ ID NO: 3985096 - RNA, 17 nt, Human herpesvirus 5
gucccagccccagagcg

SEQ ID NO: 3985097 - RNA, 16 nt, Human herpesvirus 5
gucccgcgcggaucgg

SEQ ID NO: 3985098 - RNA, 16 nt, Human herpesvirus 5
gucccuacggaaccug

SEQ ID NO: 3985099 - RNA, 21 nt, Human herpesvirus 5
guccgcgccugcacgccgccg

SEQ ID NO: 3985100 - RNA, 12 nt, Human herpesvirus 5
guccgcggacac

SEQ ID NO: 3985101 - RNA, 21 nt, Human herpesvirus 5
guccgcggacacccgcggccg

SEQ ID NO: 3985102 - RNA, 18 nt, Human herpesvirus 5
guccgucgaucgaccguu

SEQ ID NO: 3985103 - RNA, 16 nt, Human herpesvirus 5
guccgugaucgccgcg

SEQ ID NO: 3985104 - RNA, 17 nt, Human herpesvirus 5
guccuagcacgucagug

SEQ ID NO: 3985105 - RNA, 17 nt, Human herpesvirus 5
guccucggugcccgcac

SEQ ID NO: 3985106 - RNA, 17 nt, Human herpesvirus 5
gucgagacuugcacgcu

SEQ ID NO: 3985107 - RNA, 15 nt, Human herpesvirus 5
gucgcacaaagaagu

SEQ ID NO: 3985108 - RNA, 12 nt, Human herpesvirus 5
gucgcagccccc

SEQ ID NO: 3985109 - RNA, 15 nt, Human herpesvirus 5
gucgcagucagaccc

SEQ ID NO: 3985110 - RNA, 17 nt, Human herpesvirus 5
gucgccgccgucaccac

SEQ ID NO: 3985111 - RNA, 21 nt, Human herpesvirus 5
gucgccgcgucagcggccgcc

SEQ ID NO: 3985112 - RNA, 16 nt, Human herpesvirus 5
gucgccgucacugcca

SEQ ID NO: 3985113 - RNA, 13 nt, Human herpesvirus 5
gucgccugcgacg

SEQ ID NO: 3985114 - RNA, 14 nt, Human herpesvirus 5
gucgccuuccagcu

SEQ ID NO: 3985115 - RNA, 22 nt, Human herpesvirus 5
gucgccuuccagcuuaccgcca

SEQ ID NO: 3985116 - RNA, 16 nt, Human herpesvirus 5
gucgcgauuugcuuga

SEQ ID NO: 3985117 - RNA, 15 nt, Human herpesvirus 5
gucgcuuagccacca

SEQ ID NO: 3985118 - RNA, 11 nt, Human herpesvirus 5
gucggaaacgg

SEQ ID NO: 3985119 - RNA, 15 nt, Human herpesvirus 5
gcgcgaacaggccgc

SEQ ID NO: 3985120 - RNA, 16 nt, Human herpesvirus 5
gcgcgcaucgccgucg

SEQ ID NO: 3985121 - RNA, 20 nt, Human herpesvirus 5
gcgcgccacaacgccguccg

SEQ ID NO: 3985122 - RNA, 15 nt, Human herpesvirus 5
gcgcggaguccuggg

SEQ ID NO: 3985123 - RNA, 18 nt, Human herpesvirus 5
gcgcggucgccaccugga

SEQ ID NO: 3985124 - RNA, 13 nt, Human herpesvirus 5
gcgcguacggugg

SEQ ID NO: 3985125 - RNA, 21 nt, Human herpesvirus 5
gcgcgucaaccgccagcgagc

SEQ ID NO: 3985126 - RNA, 14 nt, Human herpesvirus 5
gcgcguguacuugc

SEQ ID NO: 3985127 - RNA, 14 nt, Human herpesvirus 5
gcgcguuauaagca

SEQ ID NO: 3985128 - RNA, 12 nt, Human herpesvirus 5
gcgcuggacucu

SEQ ID NO: 3985129 - RNA, 13 nt, Human herpesvirus 5
gcgcuggcucgcg

SEQ ID NO: 3985130 - RNA, 23 nt, Human herpesvirus 5
gcgcugguggccgaacagcagcu

SEQ ID NO: 3985131 - RNA, 20 nt, Human herpesvirus 5
gcgcuguacggcagcgggga

SEQ ID NO: 3985132 - RNA, 13 nt, Human herpesvirus 5
gcgcuugucgcca

SEQ ID NO: 3985133 - RNA, 12 nt, Human herpesvirus 5
gcgcuuucugaa

SEQ ID NO: 3985134 - RNA, 21 nt, Human herpesvirus 5
gcggaccgaucaccagaaggc

SEQ ID NO: 3985135 - RNA, 22 nt, Human herpesvirus 5
gcggacgccgucgguaccgucu

SEQ ID NO: 3985136 - RNA, 21 nt, Human herpesvirus 5
gcggaugagcgugcugcucug

SEQ ID NO: 3985137 - RNA, 13 nt, Human herpesvirus 5
gcggcacccggcu

SEQ ID NO: 3985138 - RNA, 13 nt, Human herpesvirus 5
gcggcaggaaggc

SEQ ID NO: 3985139 - RNA, 23 nt, Human herpesvirus 5
gcggccacggccugcgggcaggc

SEQ ID NO: 3985140 - RNA, 23 nt, Human herpesvirus 5
gcggccccguaccgcucuucugg

SEQ ID NO: 3985141 - RNA, 18 nt, Human herpesvirus 5
gcggccgcagugggccca

SEQ ID NO: 3985142 - RNA, 13 nt, Human herpesvirus 5
gcggcgguggccg

SEQ ID NO: 3985143 - RNA, 20 nt, Human herpesvirus 5
gcggcguaccuacggaccgc

SEQ ID NO: 3985144 - RNA, 11 nt, Human herpesvirus 5
gcggcgugcau

SEQ ID NO: 3985145 - RNA, 17 nt, Human herpesvirus 5
gcggcucaaacaccgcu

SEQ ID NO: 3985146 - RNA, 20 nt, Human herpesvirus 5
gcggcuuauguuucuggggu

SEQ ID NO: 3985147 - RNA, 13 nt, Human herpesvirus 5
gcgggcccugcug

SEQ ID NO: 3985148 - RNA, 21 nt, Human herpesvirus 5
gcgggggaaaaacaaagaagu

SEQ ID NO: 3985149 - RNA, 13 nt, Human herpesvirus 5
gcgguagagcucg

SEQ ID NO: 3985150 - RNA, 18 nt, Human herpesvirus 5
gcgguauggcugcgcgcc

SEQ ID NO: 3985151 - RNA, 16 nt, Human herpesvirus 5
gcggucagaaaaagaa

SEQ ID NO: 3985152 - RNA, 23 nt, Human herpesvirus 5
gcggucaugaguuggugcagcug

SEQ ID NO: 3985153 - RNA, 18 nt, Human herpesvirus 5
gcggucgcggguggccgg

SEQ ID NO: 3985154 - RNA, 16 nt, Human herpesvirus 5
gcggugggugguaaaa

SEQ ID NO: 3985155 - RNA, 12 nt, Human herpesvirus 5
gcggugguaagu

SEQ ID NO: 3985156 - RNA, 12 nt, Human herpesvirus 5
gcggugucuccu

SEQ ID NO: 3985157 - RNA, 16 nt, Human herpesvirus 5
gcgguuauggcuccgc

SEQ ID NO: 3985158 - RNA, 19 nt, Human herpesvirus 5
gcgguucgcugacgaugag

SEQ ID NO: 3985159 - RNA, 13 nt, Human herpesvirus 5
gcguacgguggac

SEQ ID NO: 3985160 - RNA, 18 nt, Human herpesvirus 5
gcguagccaccuguugga

SEQ ID NO: 3985161 - RNA, 13 nt, Human herpesvirus 5
gcguccacgggcu

SEQ ID NO: 3985162 - RNA, 22 nt, Human herpesvirus 5
gcgucccaccccccgggccacc

SEQ ID NO: 3985163 - RNA, 14 nt, Human herpesvirus 5
gcgucccuggggcu

SEQ ID NO: 3985164 - RNA, 20 nt, Human herpesvirus 5
gcguccucguguggcaaguu

SEQ ID NO: 3985165 - RNA, 23 nt, Human herpesvirus 5
gcgucguguaauccacgacucgc

SEQ ID NO: 3985166 - RNA, 16 nt, Human herpesvirus 5
gcgugccgaauacaaa

SEQ ID NO: 3985167 - RNA, 16 nt, Human herpesvirus 5
gcgugcgggugcauga

SEQ ID NO: 3985168 - RNA, 12 nt, Human herpesvirus 5
gcgugcuccacc

SEQ ID NO: 3985169 - RNA, 17 nt, Human herpesvirus 5
gcguggcggccgacggc

SEQ ID NO: 3985170 - RNA, 17 nt, Human herpesvirus 5
gcguguuuuauaaaaga

SEQ ID NO: 3985171 - RNA, 16 nt, Human herpesvirus 5
gcguucgcccugucug

SEQ ID NO: 3985172 - RNA, 21 nt, Human herpesvirus 5
gcguucgugauucguaggcag

SEQ ID NO: 3985173 - RNA, 14 nt, Human herpesvirus 5
gcguuuggucgccu

SEQ ID NO: 3985174 - RNA, 16 nt, Human herpesvirus 5
gcuaagagcuuugacg

SEQ ID NO: 3985175 - RNA, 17 nt, Human herpesvirus 5
gcuaagaugaacgggug

SEQ ID NO: 3985176 - RNA, 13 nt, Human herpesvirus 5
gcuacaccugaga

SEQ ID NO: 3985177 - RNA, 23 nt, Human herpesvirus 5
gcuacagccacgaccaagugucu

SEQ ID NO: 3985178 - RNA, 16 nt, Human herpesvirus 5
gcuacgaaacuuuucu

SEQ ID NO: 3985179 - RNA, 20 nt, Human herpesvirus 5
gcuacgcgaccagcugcugg

SEQ ID NO: 3985180 - RNA, 16 nt, Human herpesvirus 5
gcuacugaucgccugg

SEQ ID NO: 3985181 - RNA, 23 nt, Human herpesvirus 5
gcuacuucccccuccccuucugu

SEQ ID NO: 3985182 - RNA, 15 nt, Human herpesvirus 5
gcuaggauaaucaua

SEQ ID NO: 3985183 - RNA, 17 nt, Human herpesvirus 5
gcuaugggaagaaaccg

SEQ ID NO: 3985184 - RNA, 23 nt, Human herpesvirus 5
gcucacguagcaggccgacucgc

SEQ ID NO: 3985185 - RNA, 23 nt, Human herpesvirus 5
gcucacgucacuacucugggaua

SEQ ID NO: 3985186 - RNA, 18 nt, Human herpesvirus 5
gcucaggucgcccaggcu

SEQ ID NO: 3985187 - RNA, 13 nt, Human herpesvirus 5
gcucaucgucacg

SEQ ID NO: 3985188 - RNA, 16 nt, Human herpesvirus 5
gcuccgcaagcgccgc

SEQ ID NO: 3985189 - RNA, 22 nt, Human herpesvirus 5
gcucgccuuccccgaugugcag

SEQ ID NO: 3985190 - RNA, 19 nt, Human herpesvirus 5
gcucgggucggcuggucgg

SEQ ID NO: 3985191 - RNA, 20 nt, Human herpesvirus 5
gcucguguggcagcuggcuu

SEQ ID NO: 3985192 - RNA, 21 nt, Human herpesvirus 5
gcucguguggcagcuggcuug

SEQ ID NO: 3985193 - RNA, 16 nt, Human herpesvirus 5
gcucucuauccggugg

SEQ ID NO: 3985194 - RNA, 18 nt, Human herpesvirus 5
gcugacgcggacgaggaa

SEQ ID NO: 3985195 - RNA, 19 nt, Human herpesvirus 5
gcugagacaggacgaggca

SEQ ID NO: 3985196 - RNA, 22 nt, Human herpesvirus 5
gcugagcuacgaugaccacgaa

SEQ ID NO: 3985197 - RNA, 23 nt, Human herpesvirus 5
gcugauacuaucgggggagauga

SEQ ID NO: 3985198 - RNA, 16 nt, Human herpesvirus 5
gcugaucgccgucacu

SEQ ID NO: 3985199 - RNA, 16 nt, Human herpesvirus 5
gcugauucgcgccgug

SEQ ID NO: 3985200 - RNA, 22 nt, Human herpesvirus 5
gcugcagccggaggaagcggcg

SEQ ID NO: 3985201 - RNA, 20 nt, Human herpesvirus 5
cuccgugcggcccccagagg

SEQ ID NO: 3985202 - RNA, 23 nt, Human herpesvirus 5
cuccgugcggcccccagaggccc

SEQ ID NO: 3985203 - RNA, 14 nt, Human herpesvirus 5
cuccucgucgucgc

SEQ ID NO: 3985204 - RNA, 19 nt, Human herpesvirus 5
cuccucuuccaaaucuccg

SEQ ID NO: 3985205 - RNA, 18 nt, Human herpesvirus 5
cuccuguguaugaggauc

SEQ ID NO: 3985206 - RNA, 16 nt, Human herpesvirus 5
cuccuguugcucuccu

SEQ ID NO: 3985207 - RNA, 16 nt, Human herpesvirus 5
cucgaccaggaggugu

SEQ ID NO: 3985208 - RNA, 19 nt, Human herpesvirus 5
cucgaccggcggcugcugu

SEQ ID NO: 3985209 - RNA, 22 nt, Human herpesvirus 5
cucgaccuccgacccgaagaau

SEQ ID NO: 3985210 - RNA, 19 nt, Human herpesvirus 5
cucgccgcagaccauccuc

SEQ ID NO: 3985211 - RNA, 13 nt, Human herpesvirus 5
cucgcucucgucg

SEQ ID NO: 3985212 - RNA, 22 nt, Human herpesvirus 5
cucgcugggcuacaagugcagc

SEQ ID NO: 3985213 - RNA, 19 nt, Human herpesvirus 5
cucggaacgacgacucagg

SEQ ID NO: 3985214 - RNA, 16 nt, Human herpesvirus 5
cucggacggacguaga

SEQ ID NO: 3985215 - RNA, 22 nt, Human herpesvirus 5
cucggccuuucuaggcuacucc

SEQ ID NO: 3985216 - RNA, 17 nt, Human herpesvirus 5
cucggcggccacggcgu

SEQ ID NO: 3985217 - RNA, 17 nt, Human herpesvirus 5
cucgggugcaccgcggc

SEQ ID NO: 3985218 - RNA, 21 nt, Human herpesvirus 5
cucgguaaugcguguccagau

SEQ ID NO: 3985219 - RNA, 17 nt, Human herpesvirus 5
cucgguaguggacaugg

SEQ ID NO: 3985220 - RNA, 19 nt, Human herpesvirus 5
cucgucggccugggcugcu

SEQ ID NO: 3985221 - RNA, 19 nt, Human herpesvirus 5
cucgugaaacagcagcucg

SEQ ID NO: 3985222 - RNA, 15 nt, Human herpesvirus 6
agguguuuccugccc

SEQ ID NO: 3985223 - RNA, 17 nt, Human herpesvirus 6
agguguuuccugcccag

SEQ ID NO: 3985224 - RNA, 15 nt, Human herpesvirus 6
agguguuugcagaug

SEQ ID NO: 3985225 - RNA, 13 nt, Human herpesvirus 6
agguuagugggga

SEQ ID NO: 3985226 - RNA, 13 nt, Human herpesvirus 6
agguugagaauga

SEQ ID NO: 3985227 - RNA, 22 nt, Human herpesvirus 6
agguuuuauucguucagaaugu

SEQ ID NO: 3985228 - RNA, 15 nt, Human herpesvirus 6
agguuuugucguuug

SEQ ID NO: 3985229 - RNA, 15 nt, Human herpesvirus 6
aguaaaacuauugac

SEQ ID NO: 3985230 - RNA, 23 nt, Human herpesvirus 6
aguaaaucucucgguagauugga

SEQ ID NO: 3985231 - RNA, 15 nt, Human herpesvirus 6
aguaaauuaaaguuu

SEQ ID NO: 3985232 - RNA, 16 nt, Human herpesvirus 6
aguaacggaaaaauuu

SEQ ID NO: 3985233 - RNA, 19 nt, Human herpesvirus 6
aguagaaacuauggggcug

SEQ ID NO: 3985234 - RNA, 12 nt, Human herpesvirus 6
aguauugaagaa

SEQ ID NO: 3985235 - RNA, 11 nt, Human herpesvirus 6
agucagugggu

SEQ ID NO: 3985236 - RNA, 17 nt, Human herpesvirus 6
agucaguuuaauaguuu

SEQ ID NO: 3985237 - RNA, 22 nt, Human herpesvirus 6
aguccauuucuaccgauaguuu

SEQ ID NO: 3985238 - RNA, 20 nt, Human herpesvirus 6
agucccaucuauacacccug

SEQ ID NO: 3985239 - RNA, 15 nt, Human herpesvirus 6
aguccugugcuccac

SEQ ID NO: 3985240 - RNA, 14 nt, Human herpesvirus 6
agucgcgaagugcu

SEQ ID NO: 3985241 - RNA, 15 nt, Human herpesvirus 6
agucugaaugcgagu

SEQ ID NO: 3985242 - RNA, 13 nt, Human herpesvirus 6
agucugcuauuuu

SEQ ID NO: 3985243 - RNA, 19 nt, Human herpesvirus 6
agucuuuccccagcacacc

SEQ ID NO: 3985244 - RNA, 19 nt, Human herpesvirus 6
agugaaaaagguggcauca

SEQ ID NO: 3985245 - RNA, 17 nt, Human herpesvirus 6
agugauuagaauguuug

SEQ ID NO: 3985246 - RNA, 14 nt, Human herpesvirus 6
agugcgcuggcuua

SEQ ID NO: 3985247 - RNA, 16 nt, Human herpesvirus 6
agugcugugcucuuua

SEQ ID NO: 3985248 - RNA, 13 nt, Human herpesvirus 6
agugcuuuaucua

SEQ ID NO: 3985249 - RNA, 18 nt, Human herpesvirus 6
agugguuuaauggaaacc

SEQ ID NO: 3985250 - RNA, 22 nt, Human herpesvirus 6
agugguuuuuuggauaagcaga

SEQ ID NO: 3985251 - RNA, 14 nt, Human herpesvirus 6
aguguaacgagaau

SEQ ID NO: 3985252 - RNA, 19 nt, Human herpesvirus 6
aguguucgcauuagaaaau

SEQ ID NO: 3985253 - RNA, 22 nt, Human herpesvirus 6
aguuaugcgucuguuuauugcc

SEQ ID NO: 3985254 - RNA, 18 nt, Human herpesvirus 6
aguugggacuuggaaacg

SEQ ID NO: 3985255 - RNA, 22 nt, Human herpesvirus 6
aguuguauuuaacuugauguau

SEQ ID NO: 3985256 - RNA, 19 nt, Human herpesvirus 6
aguuuuacaucaucgccuu

SEQ ID NO: 3985257 - RNA, 19 nt, Human herpesvirus 6
aguuuuuuuucuuuaccga

SEQ ID NO: 3985258 - RNA, 22 nt, Human herpesvirus 6
auaaaaaguuugugcgaauugu

SEQ ID NO: 3985259 - RNA, 16 nt, Human herpesvirus 6
auaaaggucagugggu

SEQ ID NO: 3985260 - RNA, 14 nt, Human herpesvirus 6
auaaaguuaaaggu

SEQ ID NO: 3985261 - RNA, 13 nt, Human herpesvirus 6
auaaaguuaauuc

SEQ ID NO: 3985262 - RNA, 15 nt, Human herpesvirus 6
auaaaguuuaaagau

SEQ ID NO: 3985263 - RNA, 22 nt, Human herpesvirus 6
auaaaugaauagauaauaauca

SEQ ID NO: 3985264 - RNA, 22 nt, Human herpesvirus 6
auaacccuucaccgucucugaa

SEQ ID NO: 3985265 - RNA, 17 nt, Human herpesvirus 6
auaaccucacuacugaa

SEQ ID NO: 3985266 - RNA, 21 nt, Human herpesvirus 6
auaacuuuacauuaaacacua

SEQ ID NO: 3985267 - RNA, 17 nt, Human herpesvirus 6
auaaguacauagaauuu

SEQ ID NO: 3985268 - RNA, 16 nt, Human herpesvirus 6
auaauggcaugcauua

SEQ ID NO: 3985269 - RNA, 17 nt, Human herpesvirus 6
auaauuccgacuguguu

SEQ ID NO: 3985270 - RNA, 18 nt, Human herpesvirus 6
auaauuuauggaaauucg

SEQ ID NO: 3985271 - RNA, 18 nt, Human herpesvirus 6
auacaauaguaacuucuc

SEQ ID NO: 3985272 - RNA, 22 nt, Human herpesvirus 6
auacgccuugggacauguauau

SEQ ID NO: 3985273 - RNA, 17 nt, Human herpesvirus 6
auacguuugccaaagcu

SEQ ID NO: 3985274 - RNA, 13 nt, Human herpesvirus 6
auagaccuugauc

SEQ ID NO: 3985275 - RNA, 12 nt, Human herpesvirus 6
auauaaauagug

SEQ ID NO: 3985276 - RNA, 15 nt, Human herpesvirus 6
auauaucaaagaugu

SEQ ID NO: 3985277 - RNA, 17 nt, Human herpesvirus 6
auaucuugaaaucuacu

SEQ ID NO: 3985278 - RNA, 13 nt, Human herpesvirus 6
auaugaaaagcug

SEQ ID NO: 3985279 - RNA, 17 nt, Human herpesvirus 6
auaugaaaagcuggaaa

SEQ ID NO: 3985280 - RNA, 15 nt, Human herpesvirus 6
auaugaugcuguaga

SEQ ID NO: 3985281 - RNA, 22 nt, Human herpesvirus 6
auauuaauuaccuauagucaau

SEQ ID NO: 3985282 - RNA, 18 nt, Human herpesvirus 6
auauuggaauugggaagc

SEQ ID NO: 3985283 - RNA, 20 nt, Human herpesvirus 6
aucagaauccaccaaugaca

SEQ ID NO: 3985284 - RNA, 16 nt, Human herpesvirus 6
aucagucaaaaucuga

SEQ ID NO: 3985285 - RNA, 18 nt, Human herpesvirus 6
auccaacgaauacuucuc

SEQ ID NO: 3985286 - RNA, 21 nt, Human herpesvirus 6
auccaaucacaacaaaaaugc

SEQ ID NO: 3985287 - RNA, 15 nt, Human herpesvirus 6
auccgccccgauaaa

SEQ ID NO: 3985288 - RNA, 20 nt, Human herpesvirus 6
aucgaaaucguauacguuaa

SEQ ID NO: 3985289 - RNA, 13 nt, Human herpesvirus 6
aucgauuuaaccu

SEQ ID NO: 3985290 - RNA, 17 nt, Human herpesvirus 6
aucgcgaagccuguccg

SEQ ID NO: 3985291 - RNA, 14 nt, Human herpesvirus 6
aucgcgcaccgcug

SEQ ID NO: 3985292 - RNA, 18 nt, Human herpesvirus 6
aucgcgcgcgacgugcca

SEQ ID NO: 3985293 - RNA, 20 nt, Human herpesvirus 6
aucuacgccuauuccaaacu

SEQ ID NO: 3985294 - RNA, 21 nt, Human herpesvirus 6
aucuauuauaagcaaacaugu

SEQ ID NO: 3985295 - RNA, 14 nt, Human herpesvirus 6
aucuccaaaagcgc

SEQ ID NO: 3985296 - RNA, 17 nt, Human herpesvirus 6
aucugaucgaaauacuu

SEQ ID NO: 3985297 - RNA, 17 nt, Human herpesvirus 6
aucuguuggcggaaacg

SEQ ID NO: 3985298 - RNA, 15 nt, Human herpesvirus 6
aucuuauucaaaaau

SEQ ID NO: 3985299 - RNA, 22 nt, Human herpesvirus 6
aucuucccuuuuacaauacaca

SEQ ID NO: 3985300 - RNA, 18 nt, Human herpesvirus 6
aucuucugggugggaaga

SEQ ID NO: 3985301 - RNA, 12 nt, Human herpesvirus 6
aucuuuaacaug

SEQ ID NO: 3985302 - RNA, 18 nt, Human herpesvirus 6
augaaccacguuuuucca

SEQ ID NO: 3985303 - RNA, 15 nt, Human herpesvirus 6
augacucuaaauacg

SEQ ID NO: 3985304 - RNA, 14 nt, Human herpesvirus 6
augaggauuugcuu

SEQ ID NO: 3985305 - RNA, 16 nt, Human herpesvirus 6
augaggggaacacgcc

SEQ ID NO: 3985306 - RNA, 23 nt, Human herpesvirus 6
augauaaauugaugaaauuguga

SEQ ID NO: 3985307 - RNA, 16 nt, Human herpesvirus 6
augauauuccagacaa

SEQ ID NO: 3985308 - RNA, 20 nt, Human herpesvirus 6
augauccgguauaucgagaa

SEQ ID NO: 3985309 - RNA, 17 nt, Human herpesvirus 6
augaucgacauuuguau

SEQ ID NO: 3985310 - RNA, 17 nt, Human herpesvirus 6
augcaacgcaucacaca

SEQ ID NO: 3985311 - RNA, 20 nt, Human herpesvirus 6
augcuuugggaccuucagga

SEQ ID NO: 3985312 - RNA, 19 nt, Human herpesvirus 6
augcuuugguuucaguagu

SEQ ID NO: 3985313 - RNA, 20 nt, Human herpesvirus 6
augcuuuuagauggaaaauu

SEQ ID NO: 3985314 - RNA, 17 nt, Human herpesvirus 6
auggaugugcacuuucu

SEQ ID NO: 3985315 - RNA, 18 nt, Human herpesvirus 6
auggcgcauaacggaaaa

SEQ ID NO: 3985316 - RNA, 22 nt, Human herpesvirus 6
auggcuaacguacucaaagaaa

SEQ ID NO: 3985317 - RNA, 20 nt, Human herpesvirus 6
auguaaacacgaaauugcuu

SEQ ID NO: 3985318 - RNA, 15 nt, Human herpesvirus 6
auguagauaaauaua

SEQ ID NO: 3985319 - RNA, 18 nt, Human herpesvirus 6
auguaguuaaugcugcug

SEQ ID NO: 3985320 - RNA, 21 nt, Human herpesvirus 6
auguaguuaaugcugcugcug

SEQ ID NO: 3985321 - RNA, 16 nt, Human herpesvirus 6
auguaucguuugagau

SEQ ID NO: 3985322 - RNA, 15 nt, Human herpesvirus 6
augucggccucugcc

SEQ ID NO: 3985323 - RNA, 15 nt, Human herpesvirus 6
auguggcaucggcuu

SEQ ID NO: 3985324 - RNA, 17 nt, Human herpesvirus 6
auguuaacucagguggu

SEQ ID NO: 3985325 - RNA, 14 nt, Human herpesvirus 6
auguucaauuacuc

SEQ ID NO: 3985326 - RNA, 13 nt, Human herpesvirus 6
auguuuggauaau

SEQ ID NO: 3985327 - RNA, 22 nt, Human herpesvirus 6
auuaaauguuacugaacuuugu

SEQ ID NO: 3985328 - RNA, 13 nt, Human herpesvirus 6
auuacaaaacaau

SEQ ID NO: 3985329 - RNA, 22 nt, Human herpesvirus 6
auuacauaagcaaauguaacuu

SEQ ID NO: 3985330 - RNA, 18 nt, Human herpesvirus 6
auuagccauuuuuuucuu

SEQ ID NO: 3985331 - RNA, 15 nt, Human herpesvirus 6
auuaugguuaucauc

SEQ ID NO: 3985332 - RNA, 16 nt, Human herpesvirus 6
auucaaaacgacaucg

SEQ ID NO: 3985333 - RNA, 13 nt, Human herpesvirus 6
auucaaagaaagu

SEQ ID NO: 3985334 - RNA, 19 nt, Human herpesvirus 6
auucaaaugcaguaaauga

SEQ ID NO: 3985335 - RNA, 21 nt, Human herpesvirus 6
auuccuuaauucuaaauacga

SEQ ID NO: 3985336 - RNA, 20 nt, Human herpesvirus 6
auucgacgaucgcgaagccu

SEQ ID NO: 3985337 - RNA, 13 nt, Human herpesvirus 6
aaaguucaguaac

SEQ ID NO: 3985338 - RNA, 18 nt, Human herpesvirus 6
aaaguucaguaacauuua

SEQ ID NO: 3985339 - RNA, 16 nt, Human herpesvirus 6
aaaguuucggaaaaug

SEQ ID NO: 3985340 - RNA, 20 nt, Human herpesvirus 6
aaaguuuguguuuguaaaug

SEQ ID NO: 3985341 - RNA, 12 nt, Human herpesvirus 6
aaaguuuucuaa

SEQ ID NO: 3985342 - RNA, 23 nt, Human herpesvirus 6
aaauaaaguuuaaagauguguua

SEQ ID NO: 3985343 - RNA, 15 nt, Human herpesvirus 6
aaauacuagcuaaaa

SEQ ID NO: 3985344 - RNA, 16 nt, Human herpesvirus 6
aaauaucgaaauaacg

SEQ ID NO: 3985345 - RNA, 17 nt, Human herpesvirus 6
acccacgguggccuggc

SEQ ID NO: 3985346 - RNA, 17 nt, Human herpesvirus 6
accccucccaucccccu

SEQ ID NO: 3985347 - RNA, 16 nt, Human herpesvirus 6
acccgcguccuccauc

SEQ ID NO: 3985348 - RNA, 16 nt, Human herpesvirus 6
accgacuuauaucgaa

SEQ ID NO: 3985349 - RNA, 12 nt, Human herpesvirus 6
accgaucuguga

SEQ ID NO: 3985350 - RNA, 16 nt, Human herpesvirus 6
accgauucagaaaguu

SEQ ID NO: 3985351 - RNA, 22 nt, Human herpesvirus 6
accgcggccguucucucuccuc

SEQ ID NO: 3985352 - RNA, 16 nt, Human herpesvirus 6
accgucugggacccac

SEQ ID NO: 3985353 - RNA, 16 nt, Human herpesvirus 6
accuaauaaacugugu

SEQ ID NO: 3985354 - RNA, 15 nt, Human herpesvirus 6
accuaauuacaauuu

SEQ ID NO: 3985355 - RNA, 23 nt, Human herpesvirus 6
accucacuacugaaaccaaagca

SEQ ID NO: 3985356 - RNA, 14 nt, Human herpesvirus 6
accucgcgcaccgc

SEQ ID NO: 3985357 - RNA, 21 nt, Human herpesvirus 6
accucuaaaacaagacagacc

SEQ ID NO: 3985358 - RNA, 14 nt, Human herpesvirus 6
accucucgccgacc

SEQ ID NO: 3985359 - RNA, 14 nt, Human herpesvirus 6
accugucucugcuu

SEQ ID NO: 3985360 - RNA, 14 nt, Human herpesvirus 6
acgaagaauuauuu

SEQ ID NO: 3985361 - RNA, 16 nt, Human herpesvirus 6
acgacacgcuggagca

SEQ ID NO: 3985362 - RNA, 13 nt, Human herpesvirus 6
acgagagcugacu

SEQ ID NO: 3985363 - RNA, 14 nt, Human herpesvirus 6
acgauagcagcucu

SEQ ID NO: 3985364 - RNA, 19 nt, Human herpesvirus 6
acgccacgggcauuccucg

SEQ ID NO: 3985365 - RNA, 15 nt, Human herpesvirus 6
acgccaguccguaaa

SEQ ID NO: 3985366 - RNA, 18 nt, Human herpesvirus 6
acgccuugauguuuccug

SEQ ID NO: 3985367 - RNA, 18 nt, Human herpesvirus 6
acggcagcggaagugaaa

SEQ ID NO: 3985368 - RNA, 20 nt, Human herpesvirus 6
acgggucgggggucugcaaa

SEQ ID NO: 3985369 - RNA, 14 nt, Human herpesvirus 6
acgguggccuggca

SEQ ID NO: 3985370 - RNA, 15 nt, Human herpesvirus 6
acgguggccuggcac

SEQ ID NO: 3985371 - RNA, 18 nt, Human herpesvirus 6
acggugucacacagcaug

SEQ ID NO: 3985372 - RNA, 19 nt, Human herpesvirus 6
acguaagaaaaaaaacgaa

SEQ ID NO: 3985373 - RNA, 19 nt, Human herpesvirus 6
acguaauagccaaacaagg

SEQ ID NO: 3985374 - RNA, 19 nt, Human herpesvirus 6
acguaucccuaauaaaugu

SEQ ID NO: 3985375 - RNA, 19 nt, Human herpesvirus 6
acgugaaauaaaguuuaaa

SEQ ID NO: 3985376 - RNA, 20 nt, Human herpesvirus 6
acgugccaccgucugggacc

SEQ ID NO: 3985377 - RNA, 17 nt, Human herpesvirus 6
acguuuuccaugugaau

SEQ ID NO: 3985378 - RNA, 19 nt, Human herpesvirus 6
acuaacauagcgaauuuga

SEQ ID NO: 3985379 - RNA, 19 nt, Human herpesvirus 6
acuaagcaggaacccagau

SEQ ID NO: 3985380 - RNA, 14 nt, Human herpesvirus 6
acuacguuuugugu

SEQ ID NO: 3985381 - RNA, 15 nt, Human herpesvirus 6
acuagcgaaugaauu

SEQ ID NO: 3985382 - RNA, 20 nt, Human herpesvirus 6
acucuucgauccaauaagaa

SEQ ID NO: 3985383 - RNA, 15 nt, Human herpesvirus 6
acugaaaccaaagca

SEQ ID NO: 3985384 - RNA, 17 nt, Human herpesvirus 6
acugaaucggaaacuga

SEQ ID NO: 3985385 - RNA, 15 nt, Human herpesvirus 6
acugcacgcugggcu

SEQ ID NO: 3985386 - RNA, 18 nt, Human herpesvirus 6
acugcauacguuugccaa

SEQ ID NO: 3985387 - RNA, 20 nt, Human herpesvirus 6
acugccgguaacgcugucgu

SEQ ID NO: 3985388 - RNA, 18 nt, Human herpesvirus 6
acugcgaauccgucuccg

SEQ ID NO: 3985389 - RNA, 15 nt, Human herpesvirus 6
acuuagcuagaugug

SEQ ID NO: 3985390 - RNA, 19 nt, Human herpesvirus 6
acuugccucacaaauauug

SEQ ID NO: 3985391 - RNA, 22 nt, Human herpesvirus 6
acuuucauaggaaguaaauaca

SEQ ID NO: 3985392 - RNA, 12 nt, Human herpesvirus 6
acuuucauccug

SEQ ID NO: 3985393 - RNA, 23 nt, Human herpesvirus 6
acuuuccccauauuguguaacuc

SEQ ID NO: 3985394 - RNA, 17 nt, Human herpesvirus 6
acuuuguccuuacaaau

SEQ ID NO: 3985395 - RNA, 20 nt, Human herpesvirus 6
agaaaaaaaaauaaguacau

SEQ ID NO: 3985396 - RNA, 13 nt, Human herpesvirus 6
agaaaaacaacga

SEQ ID NO: 3985397 - RNA, 16 nt, Human herpesvirus 6
agaaaacuauauugcc

SEQ ID NO: 3985398 - RNA, 17 nt, Human herpesvirus 6
agaaaauugcagaucua

SEQ ID NO: 3985399 - RNA, 15 nt, Human herpesvirus 6
agaacaucucagauc

SEQ ID NO: 3985400 - RNA, 17 nt, Human herpesvirus 6
agaaccugaaaucugag

SEQ ID NO: 3985401 - RNA, 13 nt, Human herpesvirus 6
agaaguuacaaga

SEQ ID NO: 3985402 - RNA, 16 nt, Human herpesvirus 6
agaaucguuaaaugag

SEQ ID NO: 3985403 - RNA, 16 nt, Human herpesvirus 6
agaaucugcagauuuu

SEQ ID NO: 3985404 - RNA, 19 nt, Human herpesvirus 6
agaaugaaaaaaaaaauau

SEQ ID NO: 3985405 - RNA, 22 nt, Human herpesvirus 6
agacaaaacuguccucuuugaa

SEQ ID NO: 3985406 - RNA, 16 nt, Human herpesvirus 6
agacaguaaaaugugu

SEQ ID NO: 3985407 - RNA, 22 nt, Human herpesvirus 6
agacauccagaaaagcaaacau

SEQ ID NO: 3985408 - RNA, 22 nt, Human herpesvirus 6
agacaucgauuugcugguaaau

SEQ ID NO: 3985409 - RNA, 20 nt, Human herpesvirus 6
agacccugccuauacaggca

SEQ ID NO: 3985410 - RNA, 15 nt, Human herpesvirus 6
agaccuauauguguu

SEQ ID NO: 3985411 - RNA, 13 nt, Human herpesvirus 6
agacgagauguuu

SEQ ID NO: 3985412 - RNA, 10 nt, Human herpesvirus 6
agagaggaaa

SEQ ID NO: 3985413 - RNA, 16 nt, Human herpesvirus 6
agagauuuuggaagca

SEQ ID NO: 3985414 - RNA, 22 nt, Human herpesvirus 6
agagcaaaugccgacaagcuuu

SEQ ID NO: 3985415 - RNA, 16 nt, Human herpesvirus 6
agagcuggggaguugc

SEQ ID NO: 3985416 - RNA, 17 nt, Human herpesvirus 6
agaggaaauaaaaacac

SEQ ID NO: 3985417 - RNA, 19 nt, Human herpesvirus 6
agauaucauaaucugcguu

SEQ ID NO: 3985418 - RNA, 18 nt, Human herpesvirus 6
agaucacguucaggauga

SEQ ID NO: 3985419 - RNA, 14 nt, Human herpesvirus 6
agaucuaauucaca

SEQ ID NO: 3985420 - RNA, 21 nt, Human herpesvirus 6
agaugaaaccuagauguaaau

SEQ ID NO: 3985421 - RNA, 17 nt, Human herpesvirus 6
agaugacaucugcaaaa

SEQ ID NO: 3985422 - RNA, 21 nt, Human herpesvirus 6
agaugauuccaaguggugguu

SEQ ID NO: 3985423 - RNA, 15 nt, Human herpesvirus 6
agauguagcuggaua

SEQ ID NO: 3985424 - RNA, 21 nt, Human herpesvirus 6
agauuacggcaacauacccuu

SEQ ID NO: 3985425 - RNA, 19 nt, Human herpesvirus 6
agauucuaaugauaaauug

SEQ ID NO: 3985426 - RNA, 20 nt, Human herpesvirus 6
agcaauaggcaccuaucuag

SEQ ID NO: 3985427 - RNA, 16 nt, Human herpesvirus 6
agcagcuagagaaauu

SEQ ID NO: 3985428 - RNA, 24 nt, Human herpesvirus 6
agcagucugcuggaugcugaugaa

SEQ ID NO: 3985429 - RNA, 17 nt, Human herpesvirus 6
agccaaagaaacagaua

SEQ ID NO: 3985430 - RNA, 23 nt, Human herpesvirus 6
agccuguccgugacacacagaau

SEQ ID NO: 3985431 - RNA, 22 nt, Human herpesvirus 6
agcgacuuuuuaacaaaauggu

SEQ ID NO: 3985432 - RNA, 23 nt, Human herpesvirus 6
agcgccaacgaaaagcaucucaa

SEQ ID NO: 3985433 - RNA, 20 nt, Human herpesvirus 6
agcguguuauuucgggacaa

SEQ ID NO: 3985434 - RNA, 16 nt, Human herpesvirus 6
agcuaaacaccacuug

SEQ ID NO: 3985435 - RNA, 17 nt, Human herpesvirus 6
agcuguccaucuucaga

SEQ ID NO: 3985436 - RNA, 21 nt, Human herpesvirus 6
agcuuuucauaugaaaagcug

SEQ ID NO: 3985437 - RNA, 15 nt, Human herpesvirus 6
aggaacgauaugcug

SEQ ID NO: 3985438 - RNA, 14 nt, Human herpesvirus 6
aggaaguaaauaca

SEQ ID NO: 3985439 - RNA, 22 nt, Human herpesvirus 6
aggacuucguucuugacagaga

SEQ ID NO: 3985440 - RNA, 18 nt, Human herpesvirus 6
aggagacaacaacgaaaa

SEQ ID NO: 3985441 - RNA, 20 nt, Human herpesvirus 6
aggagauuucagguaauauu

SEQ ID NO: 3985442 - RNA, 18 nt, Human herpesvirus 6
aggaucgaacucuucgau

SEQ ID NO: 3985443 - RNA, 19 nt, Human herpesvirus 6
aggcaugugauugucuuuu

SEQ ID NO: 3985444 - RNA, 19 nt, Human herpesvirus 6
aggcuaucacuuagacacg

SEQ ID NO: 3985445 - RNA, 13 nt, Human herpesvirus 6
aggcuaugugucu

SEQ ID NO: 3985446 - RNA, 16 nt, Human herpesvirus 6
aggcuaugugucuccg

SEQ ID NO: 3985447 - RNA, 12 nt, Human herpesvirus 6
aggcugaaauuu

SEQ ID NO: 3985448 - RNA, 13 nt, Human herpesvirus 6
aggggaagggaau

SEQ ID NO: 3985449 - RNA, 15 nt, Human herpesvirus 6
agggggggucucugu

SEQ ID NO: 3985450 - RNA, 18 nt, Human herpesvirus 6
agggugagucacauagau

SEQ ID NO: 3985451 - RNA, 13 nt, Human herpesvirus 6
agguaaagaucug

SEQ ID NO: 3985452 - RNA, 12 nt, Human herpesvirus 6
aggucagugggu

SEQ ID NO: 3985453 - RNA, 16 nt, Human herpesvirus 6
aggucaucaugcugug

SEQ ID NO: 3985454 - RNA, 20 nt, Human herpesvirus 6
agguccccccucggacagau

SEQ ID NO: 3985455 - RNA, 22 nt, Human herpesvirus 6
agguggcaucagaauccagaaa

SEQ ID NO: 3985456 - RNA, 13 nt, Human herpesvirus 6
caaacuacggaaa

SEQ ID NO: 3985457 - RNA, 21 nt, Human herpesvirus 6
caaacuuuuugccgucacacu

SEQ ID NO: 3985458 - RNA, 18 nt, Human herpesvirus 6
caaagacaucgauuugcu

SEQ ID NO: 3985459 - RNA, 14 nt, Human herpesvirus 6
caaaggaaaccacc

SEQ ID NO: 3985460 - RNA, 20 nt, Human herpesvirus 6
caaaguucaguaacauuuaa

SEQ ID NO: 3985461 - RNA, 15 nt, Human herpesvirus 6
caaauaaaagcauuu

SEQ ID NO: 3985462 - RNA, 13 nt, Human herpesvirus 6
caaaugauuuuac

SEQ ID NO: 3985463 - RNA, 16 nt, Human herpesvirus 6
caaaugcaguaaauga

SEQ ID NO: 3985464 - RNA, 20 nt, Human herpesvirus 6
caaauuaauuaagugcgcug

SEQ ID NO: 3985465 - RNA, 20 nt, Human herpesvirus 6
caaauucuuacauuuuguac

SEQ ID NO: 3985466 - RNA, 13 nt, Human herpesvirus 6
caacaaccacagc

SEQ ID NO: 3985467 - RNA, 15 nt, Human herpesvirus 6
caacaucuuaaaaga

SEQ ID NO: 3985468 - RNA, 16 nt, Human herpesvirus 6
caacauuuauguuucu

SEQ ID NO: 3985469 - RNA, 16 nt, Human herpesvirus 6
caaccccgcacgcaua

SEQ ID NO: 3985470 - RNA, 15 nt, Human herpesvirus 6
caacgcuccuccccu

SEQ ID NO: 3985471 - RNA, 12 nt, Human herpesvirus 6
caacggagaaaa

SEQ ID NO: 3985472 - RNA, 14 nt, Human herpesvirus 6
caacugaauuugca

SEQ ID NO: 3985473 - RNA, 14 nt, Human herpesvirus 6
caagaaaagaaaca

SEQ ID NO: 3985474 - RNA, 17 nt, Human herpesvirus 6
caagcuguccaucuuca

SEQ ID NO: 3985475 - RNA, 17 nt, Human herpesvirus 6
caaguuugaauuuauac

SEQ ID NO: 3985476 - RNA, 21 nt, Human herpesvirus 6
caaucagccugcucagagcug

SEQ ID NO: 3985477 - RNA, 14 nt, Human herpesvirus 6
caaucauguuuauu

SEQ ID NO: 3985478 - RNA, 21 nt, Human herpesvirus 6
caaucgaugugacaaaucugu

SEQ ID NO: 3985479 - RNA, 19 nt, Human herpesvirus 6
caaucuaucuccgcaaacc

SEQ ID NO: 3985480 - RNA, 17 nt, Human herpesvirus 6
caauguuuuugacaaau

SEQ ID NO: 3985481 - RNA, 16 nt, Human herpesvirus 6
caauuacucaacauua

SEQ ID NO: 3985482 - RNA, 14 nt, Human herpesvirus 6
caauuaguccauua

SEQ ID NO: 3985483 - RNA, 13 nt, Human herpesvirus 6
caccaacacaccu

SEQ ID NO: 3985484 - RNA, 17 nt, Human herpesvirus 6
caccagcauaacuggaa

SEQ ID NO: 3985485 - RNA, 20 nt, Human herpesvirus 6
caccccggggggugggagga

SEQ ID NO: 3985486 - RNA, 22 nt, Human herpesvirus 6
caccgagggcggacggacggcu

SEQ ID NO: 3985487 - RNA, 15 nt, Human herpesvirus 6
caccgucucugaagc

SEQ ID NO: 3985488 - RNA, 18 nt, Human herpesvirus 6
caccuucccucccacccc

SEQ ID NO: 3985489 - RNA, 18 nt, Human herpesvirus 6
cacgaagacgaagaggaa

SEQ ID NO: 3985490 - RNA, 16 nt, Human herpesvirus 6
cacgaucuacacaccg

SEQ ID NO: 3985491 - RNA, 16 nt, Human herpesvirus 6
cacgcauagacaaacc

SEQ ID NO: 3985492 - RNA, 14 nt, Human herpesvirus 6
cacgcccccaccuc

SEQ ID NO: 3985493 - RNA, 16 nt, Human herpesvirus 6
cacgcuaaaaacagac

SEQ ID NO: 3985494 - RNA, 14 nt, Human herpesvirus 6
cacgguggccuggc

SEQ ID NO: 3985495 - RNA, 18 nt, Human herpesvirus 6
cacguggcagucugcucg

SEQ ID NO: 3985496 - RNA, 20 nt, Human herpesvirus 6
cacguuuuuccaugucuucu

SEQ ID NO: 3985497 - RNA, 18 nt, Human herpesvirus 6
cacugugauaugcaaacu

SEQ ID NO: 3985498 - RNA, 14 nt, Human herpesvirus 6
cagaagacuuuaaa

SEQ ID NO: 3985499 - RNA, 13 nt, Human herpesvirus 6
cagaccacacccc

SEQ ID NO: 3985500 - RNA, 16 nt, Human herpesvirus 6
cagaccacaccccugu

SEQ ID NO: 3985501 - RNA, 17 nt, Human herpesvirus 6
cagagacgguguuuuca

SEQ ID NO: 3985502 - RNA, 23 nt, Human herpesvirus 6
cagagacgugaccggagaaaauc

SEQ ID NO: 3985503 - RNA, 15 nt, Human herpesvirus 6
cagagccgaucagau

SEQ ID NO: 3985504 - RNA, 19 nt, Human herpesvirus 6
cagagccuagaccaagaau

SEQ ID NO: 3985505 - RNA, 19 nt, Human herpesvirus 6
cagcaaguugcuaccgcug

SEQ ID NO: 3985506 - RNA, 14 nt, Human herpesvirus 6
cagcauguuuucuc

SEQ ID NO: 3985507 - RNA, 19 nt, Human herpesvirus 6
caggacagcuucuauuacu

SEQ ID NO: 3985508 - RNA, 14 nt, Human herpesvirus 6
caggcgaacgagaa

SEQ ID NO: 3985509 - RNA, 16 nt, Human herpesvirus 6
cagucucgggagagga

SEQ ID NO: 3985510 - RNA, 18 nt, Human herpesvirus 6
cagucuucaauaaaaacu

SEQ ID NO: 3985511 - RNA, 22 nt, Human herpesvirus 6
cagucuucaauaaaaacucaau

SEQ ID NO: 3985512 - RNA, 12 nt, Human herpesvirus 6
cagugaaacgga

SEQ ID NO: 3985513 - RNA, 21 nt, Human herpesvirus 6
cagugaaggcugccaugaaac

SEQ ID NO: 3985514 - RNA, 17 nt, Human herpesvirus 6
cagugucguuagaaugu

SEQ ID NO: 3985515 - RNA, 16 nt, Human herpesvirus 6
caguucaacgcugucu

SEQ ID NO: 3985516 - RNA, 17 nt, Human herpesvirus 6
cauaacauagaaaaaug

SEQ ID NO: 3985517 - RNA, 22 nt, Human herpesvirus 6
cauaaggcgcgaguuggugcua

SEQ ID NO: 3985518 - RNA, 21 nt, Human herpesvirus 6
cauacauucucguaguugcau

SEQ ID NO: 3985519 - RNA, 15 nt, Human herpesvirus 6
cauagaaaaaugaga

SEQ ID NO: 3985520 - RNA, 14 nt, Human herpesvirus 6
cauagaauuucuaa

SEQ ID NO: 3985521 - RNA, 16 nt, Human herpesvirus 6
cauagagaaacgagag

SEQ ID NO: 3985522 - RNA, 14 nt, Human herpesvirus 6
cauagcgaauuuga

SEQ ID NO: 3985523 - RNA, 14 nt, Human herpesvirus 6
cauauaaacagauu

SEQ ID NO: 3985524 - RNA, 16 nt, Human herpesvirus 6
gauucccuucagacau

SEQ ID NO: 3985525 - RNA, 17 nt, Human herpesvirus 6
gauugaugaaagcuuca

SEQ ID NO: 3985526 - RNA, 22 nt, Human herpesvirus 6
gauuucaagauuguguuucugu

SEQ ID NO: 3985527 - RNA, 12 nt, Human herpesvirus 6
gauuuugugaau

SEQ ID NO: 3985528 - RNA, 16 nt, Human herpesvirus 6
gcaaccuugacagaua

SEQ ID NO: 3985529 - RNA, 15 nt, Human herpesvirus 6
gcacaaaccaaaaug

SEQ ID NO: 3985530 - RNA, 16 nt, Human herpesvirus 6
gcacacacaagaacag

SEQ ID NO: 3985531 - RNA, 21 nt, Human herpesvirus 6
gcacacacaagaacagagaga

SEQ ID NO: 3985532 - RNA, 16 nt, Human herpesvirus 6
gcagacgcugaaauca

SEQ ID NO: 3985533 - RNA, 17 nt, Human herpesvirus 6
gcagaguccggcgcacg

SEQ ID NO: 3985534 - RNA, 21 nt, Human herpesvirus 6
gcagcuuccacgcgacagauc

SEQ ID NO: 3985535 - RNA, 20 nt, Human herpesvirus 6
gcaugucgaacagcuuuuca

SEQ ID NO: 3985536 - RNA, 13 nt, Human herpesvirus 6
gcauguugcaguu

SEQ ID NO: 3985537 - RNA, 15 nt, Human herpesvirus 6
gccaacgaaaagcau

SEQ ID NO: 3985538 - RNA, 22 nt, Human herpesvirus 6
gccagacaucgaccgccggagg

SEQ ID NO: 3985539 - RNA, 16 nt, Human herpesvirus 6
gccauauccuagcauu

SEQ ID NO: 3985540 - RNA, 14 nt, Human herpesvirus 6
gcccagauguggaa

SEQ ID NO: 3985541 - RNA, 15 nt, Human herpesvirus 6
gcccccauacacacc

SEQ ID NO: 3985542 - RNA, 19 nt, Human herpesvirus 6
gcccccauacacacccagc

SEQ ID NO: 3985543 - RNA, 22 nt, Human herpesvirus 6
gcccgaaugugauuaugccaaa

SEQ ID NO: 3985544 - RNA, 13 nt, Human herpesvirus 6
gcccgauccgccc

SEQ ID NO: 3985545 - RNA, 20 nt, Human herpesvirus 6
gccuauacaggcaaccgccg

SEQ ID NO: 3985546 - RNA, 21 nt, Human herpesvirus 6
gccucuacggcaacgcuccuc

SEQ ID NO: 3985547 - RNA, 16 nt, Human herpesvirus 6
gccuggcacggugcca

SEQ ID NO: 3985548 - RNA, 14 nt, Human herpesvirus 6
gcgacgugccaccg

SEQ ID NO: 3985549 - RNA, 19 nt, Human herpesvirus 6
gcgacucccggcccagaga

SEQ ID NO: 3985550 - RNA, 13 nt, Human herpesvirus 6
gcgauacccagcg

SEQ ID NO: 3985551 - RNA, 14 nt, Human herpesvirus 6
gcgccauaaaaaua

SEQ ID NO: 3985552 - RNA, 13 nt, Human herpesvirus 6
gcgcccauaccug

SEQ ID NO: 3985553 - RNA, 18 nt, Human herpesvirus 6
gcgccggugguaccuguc

SEQ ID NO: 3985554 - RNA, 20 nt, Human herpesvirus 6
gcgccugccuacacugcgaa

SEQ ID NO: 3985555 - RNA, 19 nt, Human herpesvirus 6
gcgcgagacagcggacagc

SEQ ID NO: 3985556 - RNA, 22 nt, Human herpesvirus 6
gcgcgaggugacggaggcgacg

SEQ ID NO: 3985557 - RNA, 23 nt, Human herpesvirus 6
gcgguauaaugcaugauggugcg

SEQ ID NO: 3985558 - RNA, 17 nt, Human herpesvirus 6
gcguggaauuuguggaa

SEQ ID NO: 3985559 - RNA, 13 nt, Human herpesvirus 6
gcguuccucucuc

SEQ ID NO: 3985560 - RNA, 15 nt, Human herpesvirus 6
gcuaauaugaacaau

SEQ ID NO: 3985561 - RNA, 14 nt, Human herpesvirus 6
gcuccgcgccccuc

SEQ ID NO: 3985562 - RNA, 18 nt, Human herpesvirus 6
gcuccgcgccccucgccc

SEQ ID NO: 3985563 - RNA, 23 nt, Human herpesvirus 6
gcuccguguuacugauggcaggu

SEQ ID NO: 3985564 - RNA, 15 nt, Human herpesvirus 6
gcucgaaucuaaauu

SEQ ID NO: 3985565 - RNA, 19 nt, Human herpesvirus 6
gcugacaacaaaggaguga

SEQ ID NO: 3985566 - RNA, 16 nt, Human herpesvirus 6
gcugauuuuguuuucu

SEQ ID NO: 3985567 - RNA, 15 nt, Human herpesvirus 6
gcuguccaucuucag

SEQ ID NO: 3985568 - RNA, 16 nt, Human herpesvirus 6
gcuguccaucuucaga

SEQ ID NO: 3985569 - RNA, 16 nt, Human herpesvirus 6
gcuguccgccuguucc

SEQ ID NO: 3985570 - RNA, 23 nt, Human herpesvirus 6
gcuuauacuguuguaaaauauag

SEQ ID NO: 3985571 - RNA, 22 nt, Human herpesvirus 6
gcuucgcaagacgccacgggca

SEQ ID NO: 3985572 - RNA, 22 nt, Human herpesvirus 6
ggaaaacuaaaagucagugggu

SEQ ID NO: 3985573 - RNA, 22 nt, Human herpesvirus 6
ggaaaauuaaaggucagugggu

SEQ ID NO: 3985574 - RNA, 16 nt, Human herpesvirus 6
ggaacgauaugcugcc

SEQ ID NO: 3985575 - RNA, 23 nt, Human herpesvirus 6
ggaagcgagcgggcuaauguaug

SEQ ID NO: 3985576 - RNA, 22 nt, Human herpesvirus 6
ggaaucaugucggccucugccg

SEQ ID NO: 3985577 - RNA, 14 nt, Human herpesvirus 6
ggaauugcauccaa

SEQ ID NO: 3985578 - RNA, 18 nt, Human herpesvirus 6
ggacaaaaaaaaaacguc

SEQ ID NO: 3985579 - RNA, 15 nt, Human herpesvirus 6
ggaccgagcggcgga

SEQ ID NO: 3985580 - RNA, 14 nt, Human herpesvirus 6
ggaccuggcggaca

SEQ ID NO: 3985581 - RNA, 14 nt, Human herpesvirus 6
ggacggacaggggg

SEQ ID NO: 3985582 - RNA, 13 nt, Human herpesvirus 6
ggacgggaagaac

SEQ ID NO: 3985583 - RNA, 18 nt, Human herpesvirus 6
ggacugugaaguaaaacu

SEQ ID NO: 3985584 - RNA, 18 nt, Human herpesvirus 6
ggagagacgcaccacggc

SEQ ID NO: 3985585 - RNA, 17 nt, Human herpesvirus 6
ggagcacacacgccgac

SEQ ID NO: 3985586 - RNA, 13 nt, Human herpesvirus 6
ggauccgcuccgc

SEQ ID NO: 3985587 - RNA, 14 nt, Human herpesvirus 6
ggaucgggcccggg

SEQ ID NO: 3985588 - RNA, 23 nt, Human herpesvirus 6
ggcaaccugaaacuccccagaga

SEQ ID NO: 3985589 - RNA, 18 nt, Human herpesvirus 6
ggcaccuaucuagaucaa

SEQ ID NO: 3985590 - RNA, 12 nt, Human herpesvirus 6
ggcacggugcca

SEQ ID NO: 3985591 - RNA, 24 nt, Human herpesvirus 6
ggcagcugcaugguccacagaugu

SEQ ID NO: 3985592 - RNA, 16 nt, Human herpesvirus 6
ggcaucugcggcucug

SEQ ID NO: 3985593 - RNA, 13 nt, Human herpesvirus 6
ggccagagacgug

SEQ ID NO: 3985594 - RNA, 23 nt, Human herpesvirus 6
ggccauauuaggcugcagcccca

SEQ ID NO: 3985595 - RNA, 15 nt, Human herpesvirus 6
ggccguucucucucc

SEQ ID NO: 3985596 - RNA, 20 nt, Human herpesvirus 6
ggccuccgccacugcgaggc

SEQ ID NO: 3985597 - RNA, 18 nt, Human herpesvirus 6
ggccugacacaaucagaa

SEQ ID NO: 3985598 - RNA, 22 nt, Human herpesvirus 6
ggcgaugaccgcuaaauugaua

SEQ ID NO: 3985599 - RNA, 20 nt, Human herpesvirus 6
ggcgcgagacagcggacagc

SEQ ID NO: 3985600 - RNA, 18 nt, Human herpesvirus 6
ggcgcgcauguugcaguu

SEQ ID NO: 3985601 - RNA, 15 nt, Human herpesvirus 6
ggcggauggagcccg

SEQ ID NO: 3985602 - RNA, 13 nt, Human herpesvirus 6
ccccucccauccc

SEQ ID NO: 3985603 - RNA, 15 nt, Human herpesvirus 6
ccccucccauccccc

SEQ ID NO: 3985604 - RNA, 15 nt, Human herpesvirus 6
cccgcagcuccuuuc

SEQ ID NO: 3985605 - RNA, 14 nt, Human herpesvirus 6
cccgcguccuccau

SEQ ID NO: 3985606 - RNA, 14 nt, Human herpesvirus 6
cccuacuacagugg

SEQ ID NO: 3985607 - RNA, 19 nt, Human herpesvirus 6
cccucgguccaaccccucc

SEQ ID NO: 3985608 - RNA, 14 nt, Human herpesvirus 6
ccgaacuagaaaaa

SEQ ID NO: 3985609 - RNA, 14 nt, Human herpesvirus 6
ccgaugaauucugg

SEQ ID NO: 3985610 - RNA, 20 nt, Human herpesvirus 6
ccgauuaauguguuuuucuu

SEQ ID NO: 3985611 - RNA, 15 nt, Human herpesvirus 6
ccgcaagauacuggu

SEQ ID NO: 3985612 - RNA, 23 nt, Human herpesvirus 6
ccgcaguuccuguucuucucaga

SEQ ID NO: 3985613 - RNA, 23 nt, Human herpesvirus 6
ccgcaguuccuguuuuucucgga

SEQ ID NO: 3985614 - RNA, 16 nt, Human herpesvirus 6
ccgcauaucgccccca

SEQ ID NO: 3985615 - RNA, 23 nt, Human herpesvirus 6
ccgccuuuucuuauauuuuucug

SEQ ID NO: 3985616 - RNA, 18 nt, Human herpesvirus 6
ccgguuuaagaagggcuu

SEQ ID NO: 3985617 - RNA, 12 nt, Human herpesvirus 6
ccguagaggcgu

SEQ ID NO: 3985618 - RNA, 19 nt, Human herpesvirus 6
ccguauagguguuuuugga

SEQ ID NO: 3985619 - RNA, 24 nt, Human herpesvirus 6
ccgucaaaucucgccgaacuagaa

SEQ ID NO: 3985620 - RNA, 16 nt, Human herpesvirus 6
ccgucucugaagcaaa

SEQ ID NO: 3985621 - RNA, 11 nt, Human herpesvirus 6
ccguuuaugcg

SEQ ID NO: 3985622 - RNA, 13 nt, Human herpesvirus 6
ccuccgccacugc

SEQ ID NO: 3985623 - RNA, 17 nt, Human herpesvirus 6
ccucgcgcaccgccucc

SEQ ID NO: 3985624 - RNA, 20 nt, Human herpesvirus 6
ccucuaaaacaagacagacc

SEQ ID NO: 3985625 - RNA, 17 nt, Human herpesvirus 6
ccucuaaacccagaccu

SEQ ID NO: 3985626 - RNA, 13 nt, Human herpesvirus 6
ccugaucacagag

SEQ ID NO: 3985627 - RNA, 11 nt, Human herpesvirus 6
ccugcacaggc

SEQ ID NO: 3985628 - RNA, 13 nt, Human herpesvirus 6
ccuucaccgucuc

SEQ ID NO: 3985629 - RNA, 20 nt, Human herpesvirus 6
ccuuguggaggauuucugag

SEQ ID NO: 3985630 - RNA, 19 nt, Human herpesvirus 6
ccuuuaacuuuuugcauuc

SEQ ID NO: 3985631 - RNA, 14 nt, Human herpesvirus 6
cgaaaagcaucuca

SEQ ID NO: 3985632 - RNA, 14 nt, Human herpesvirus 6
cgaaaucaaugagu

SEQ ID NO: 3985633 - RNA, 15 nt, Human herpesvirus 6
cgacagggugaguca

SEQ ID NO: 3985634 - RNA, 22 nt, Human herpesvirus 6
cgacaucgcgcgcgacgugcca

SEQ ID NO: 3985635 - RNA, 18 nt, Human herpesvirus 6
cgaccugaucacagagaa

SEQ ID NO: 3985636 - RNA, 16 nt, Human herpesvirus 6
cgacuauacgaaauaa

SEQ ID NO: 3985637 - RNA, 21 nt, Human herpesvirus 6
cgacuucaaacaccucacaau

SEQ ID NO: 3985638 - RNA, 18 nt, Human herpesvirus 6
cgagaacucuaaaagcug

SEQ ID NO: 3985639 - RNA, 20 nt, Human herpesvirus 6
cgagaacucuaaaagcugcu

SEQ ID NO: 3985640 - RNA, 14 nt, Human herpesvirus 6
cgauguacaguuuc

SEQ ID NO: 3985641 - RNA, 15 nt, Human herpesvirus 6
cgauuugcugguaaa

SEQ ID NO: 3985642 - RNA, 14 nt, Human herpesvirus 6
cgcaguggacggcg

SEQ ID NO: 3985643 - RNA, 15 nt, Human herpesvirus 6
cgcaguggacggcgg

SEQ ID NO: 3985644 - RNA, 16 nt, Human herpesvirus 6
cgcaguuucuguuuuu

SEQ ID NO: 3985645 - RNA, 14 nt, Human herpesvirus 6
cgcccuccccgagc

SEQ ID NO: 3985646 - RNA, 14 nt, Human herpesvirus 6
cgccuuguauuuca

SEQ ID NO: 3985647 - RNA, 17 nt, Human herpesvirus 6
cgcgacgugccaccguc

SEQ ID NO: 3985648 - RNA, 20 nt, Human herpesvirus 6
cgcgguuugggggucuuucc

SEQ ID NO: 3985649 - RNA, 14 nt, Human herpesvirus 6
cgcguacacgaaaa

SEQ ID NO: 3985650 - RNA, 21 nt, Human herpesvirus 6
cgcugggaauugcauccaaag

SEQ ID NO: 3985651 - RNA, 22 nt, Human herpesvirus 6
cggaaaaaaaaucuauccgcua

SEQ ID NO: 3985652 - RNA, 16 nt, Human herpesvirus 6
cggaaaauuaaaaguc

SEQ ID NO: 3985653 - RNA, 22 nt, Human herpesvirus 6
cggagaacguggccguuacagu

SEQ ID NO: 3985654 - RNA, 16 nt, Human herpesvirus 6
cggaggcgacgaaaga

SEQ ID NO: 3985655 - RNA, 18 nt, Human herpesvirus 6
cggauuuaaaauggauua

SEQ ID NO: 3985656 - RNA, 17 nt, Human herpesvirus 6
cggcagcuauauggcga

SEQ ID NO: 3985657 - RNA, 16 nt, Human herpesvirus 6
cggccauuuaacggaa

SEQ ID NO: 3985658 - RNA, 16 nt, Human herpesvirus 6
cggcccauccaccuuc

SEQ ID NO: 3985659 - RNA, 18 nt, Human herpesvirus 6
cggccggagugccguuga

SEQ ID NO: 3985660 - RNA, 20 nt, Human herpesvirus 6
cggcggauggagcccgcucg

SEQ ID NO: 3985661 - RNA, 20 nt, Human herpesvirus 6
cgggcccggggacggacagg

SEQ ID NO: 3985662 - RNA, 13 nt, Human herpesvirus 6
cgggcggggcgga

SEQ ID NO: 3985663 - RNA, 21 nt, Human herpesvirus 6
cggggcggacggggacgacac

SEQ ID NO: 3985664 - RNA, 13 nt, Human herpesvirus 6
cgguacucuuuuc

SEQ ID NO: 3985665 - RNA, 18 nt, Human herpesvirus 6
cgguccaaggauuaugau

SEQ ID NO: 3985666 - RNA, 20 nt, Human herpesvirus 6
cggucgagaauacgcugugu

SEQ ID NO: 3985667 - RNA, 20 nt, Human herpesvirus 6
cggugagaagaucugcguga

SEQ ID NO: 3985668 - RNA, 19 nt, Human herpesvirus 6
cgguggccuggcacggugc

SEQ ID NO: 3985669 - RNA, 13 nt, Human herpesvirus 6
cguaacgcggcaa

SEQ ID NO: 3985670 - RNA, 13 nt, Human herpesvirus 6
cguaaugugcaaa

SEQ ID NO: 3985671 - RNA, 14 nt, Human herpesvirus 6
cgucauguguggac

SEQ ID NO: 3985672 - RNA, 13 nt, Human herpesvirus 6
cgucgccgcuucg

SEQ ID NO: 3985673 - RNA, 16 nt, Human herpesvirus 6
cgucuauaacaauugu

SEQ ID NO: 3985674 - RNA, 18 nt, Human herpesvirus 6
cgugccaccgucugggac

SEQ ID NO: 3985675 - RNA, 21 nt, Human herpesvirus 6
cgugccaccgucugggaccca

SEQ ID NO: 3985676 - RNA, 14 nt, Human herpesvirus 6
cguuaaaaaaaaug

SEQ ID NO: 3985677 - RNA, 22 nt, Human herpesvirus 6
gguggccuggcacggugccaaa

SEQ ID NO: 3985678 - RNA, 13 nt, Human herpesvirus 6
gguuaaauuuauc

SEQ ID NO: 3985679 - RNA, 15 nt, Human herpesvirus 6
gguuggaugccugca

SEQ ID NO: 3985680 - RNA, 16 nt, Human herpesvirus 6
gguuggggucuuuccu

SEQ ID NO: 3985681 - RNA, 23 nt, Human herpesvirus 6
gguuugaaacacugcaagguuuc

SEQ ID NO: 3985682 - RNA, 19 nt, Human herpesvirus 6
gguuuuaagagcagacaag

SEQ ID NO: 3985683 - RNA, 19 nt, Human herpesvirus 6
guaaacuuauugaggaaau

SEQ ID NO: 3985684 - RNA, 14 nt, Human herpesvirus 6
guaacgcugucguu

SEQ ID NO: 3985685 - RNA, 12 nt, Human herpesvirus 6
guaauacaucau

SEQ ID NO: 3985686 - RNA, 15 nt, Human herpesvirus 6
guaauuuguguaauu

SEQ ID NO: 3985687 - RNA, 23 nt, Human herpesvirus 6
guagaacggaaaaaaaaucuauc

SEQ ID NO: 3985688 - RNA, 14 nt, Human herpesvirus 6
guagaguggaguug

SEQ ID NO: 3985689 - RNA, 23 nt, Human herpesvirus 6
guagccuaggccuucaccugucu

SEQ ID NO: 3985690 - RNA, 20 nt, Human herpesvirus 6
guauauuuuuuuuuauuuuu

SEQ ID NO: 3985691 - RNA, 12 nt, Human herpesvirus 6
guauugaagaaa

SEQ ID NO: 3985692 - RNA, 15 nt, Human herpesvirus 6
gucaccuguauagau

SEQ ID NO: 3985693 - RNA, 17 nt, Human herpesvirus 6
guccagaaguccuucau

SEQ ID NO: 3985694 - RNA, 22 nt, Human herpesvirus 6
gucccaucuauacacccugccg

SEQ ID NO: 3985695 - RNA, 20 nt, Human herpesvirus 6
gucgagaaccaccagagaca

SEQ ID NO: 3985696 - RNA, 13 nt, Human herpesvirus 6
gucgcccccccgc

SEQ ID NO: 3985697 - RNA, 19 nt, Human herpesvirus 6
gucgcccccccgcagcucc

SEQ ID NO: 3985698 - RNA, 22 nt, Human herpesvirus 6
gucgucgccuccccgggugcuc

SEQ ID NO: 3985699 - RNA, 15 nt, Human herpesvirus 6
gucuagauucuaaug

SEQ ID NO: 3985700 - RNA, 19 nt, Human herpesvirus 6
gucuaucgcaaauucucuc

SEQ ID NO: 3985701 - RNA, 22 nt, Human herpesvirus 6
gucuuuccccagcacaccccau

SEQ ID NO: 3985702 - RNA, 11 nt, Human herpesvirus 6
gucuuuccugc

SEQ ID NO: 3985703 - RNA, 12 nt, Human herpesvirus 6
gucuuuccugcc

SEQ ID NO: 3985704 - RNA, 15 nt, Human herpesvirus 6
gucuuuccugcccaa

SEQ ID NO: 3985705 - RNA, 13 nt, Human herpesvirus 6
gugcaaaagcuga

SEQ ID NO: 3985706 - RNA, 18 nt, Human herpesvirus 6
gugccaaaggaaaccacc

SEQ ID NO: 3985707 - RNA, 17 nt, Human herpesvirus 6
gugccaccgucugggac

SEQ ID NO: 3985708 - RNA, 18 nt, Human herpesvirus 6
gugccaccgucugggacc

SEQ ID NO: 3985709 - RNA, 22 nt, Human herpesvirus 6
gugccaccgucugggacccacg

SEQ ID NO: 3985710 - RNA, 19 nt, Human herpesvirus 6
guggacguucugucugcag

SEQ ID NO: 3985711 - RNA, 18 nt, Human herpesvirus 6
guggucaugaucugcuug

SEQ ID NO: 3985712 - RNA, 21 nt, Human herpesvirus 6
gugucaguucaacgcugucuu

SEQ ID NO: 3985713 - RNA, 17 nt, Human herpesvirus 6
gugucggcuacgacacg

SEQ ID NO: 3985714 - RNA, 23 nt, Human herpesvirus 6
guguuaaaggaugcggacucuga

SEQ ID NO: 3985715 - RNA, 16 nt, Human herpesvirus 6
guguuagcuuugcgau

SEQ ID NO: 3985716 - RNA, 18 nt, Human herpesvirus 6
guguuaugaucuagcuau

SEQ ID NO: 3985717 - RNA, 21 nt, Human herpesvirus 6
guguucguuaaaaaaaaugug

SEQ ID NO: 3985718 - RNA, 16 nt, Human herpesvirus 6
guguuuacauauacau

SEQ ID NO: 3985719 - RNA, 13 nt, Human herpesvirus 6
guguuuguucuuu

SEQ ID NO: 3985720 - RNA, 13 nt, Human herpesvirus 6
guuaaauaauauu

SEQ ID NO: 3985721 - RNA, 23 nt, Human herpesvirus 6
guuaauuguguuguuguauaugu

SEQ ID NO: 3985722 - RNA, 15 nt, Human herpesvirus 6
guuauacauaaggca

SEQ ID NO: 3985723 - RNA, 14 nt, Human herpesvirus 6
guucaauuacucaa

SEQ ID NO: 3985724 - RNA, 20 nt, Human herpesvirus 6
guucaccacugugauaugca

SEQ ID NO: 3985725 - RNA, 19 nt, Human herpesvirus 6
guucagaagagaugaaaga

SEQ ID NO: 3985726 - RNA, 14 nt, Human herpesvirus 6
guucaucagccauu

SEQ ID NO: 3985727 - RNA, 14 nt, Human herpesvirus 6
guucgauugccaaa

SEQ ID NO: 3985728 - RNA, 16 nt, Human herpesvirus 6
guugaaguauguacaa

SEQ ID NO: 3985729 - RNA, 21 nt, Human herpesvirus 6
guugagguguuuccugcccag

SEQ ID NO: 3985730 - RNA, 12 nt, Human herpesvirus 6
guugaguuucag

SEQ ID NO: 3985731 - RNA, 21 nt, Human herpesvirus 6
guugcuauagauuagaaauua

SEQ ID NO: 3985732 - RNA, 13 nt, Human herpesvirus 6
guuuccugcccag

SEQ ID NO: 3985733 - RNA, 13 nt, Human herpesvirus 6
guuucuguccaau

SEQ ID NO: 3985734 - RNA, 15 nt, Human herpesvirus 6
guuugaaacacugca

SEQ ID NO: 3985735 - RNA, 22 nt, Human herpesvirus 6
guuugaguugggacuuggaaac

SEQ ID NO: 3985736 - RNA, 12 nt, Human herpesvirus 6
guuuuuauuuua

SEQ ID NO: 3985737 - RNA, 22 nt, Human herpesvirus 6
guuuuucauaaaugguagcuau

SEQ ID NO: 3985738 - RNA, 12 nt, Human herpesvirus 6
guuuuuuaagag

SEQ ID NO: 3985739 - RNA, 19 nt, Human herpesvirus 6
uaaaaaaguguaacauccc

SEQ ID NO: 3985740 - RNA, 16 nt, Human herpesvirus 6
uaaaacaguaaauuca

SEQ ID NO: 3985741 - RNA, 16 nt, Human herpesvirus 6
uaaaagcuauguauga

SEQ ID NO: 3985742 - RNA, 16 nt, Human herpesvirus 6
uaaaagucagugggua

SEQ ID NO: 3985743 - RNA, 21 nt, Human herpesvirus 6
uaaaauaccgacaagaaaaua

SEQ ID NO: 3985744 - RNA, 22 nt, Human herpesvirus 6
uaaaauccacgaacguagacag

SEQ ID NO: 3985745 - RNA, 20 nt, Human herpesvirus 6
uaaaaucucguaacgcggca

SEQ ID NO: 3985746 - RNA, 18 nt, Human herpesvirus 6
uaaacauuuauaaaagga

SEQ ID NO: 3985747 - RNA, 22 nt, Human herpesvirus 6
uaaaccguuuaucgaugugcga

SEQ ID NO: 3985748 - RNA, 22 nt, Human herpesvirus 6
uaaacuaugcaaacgaaaccau

SEQ ID NO: 3985749 - RNA, 16 nt, Human herpesvirus 6
uaaagaacaugugaca

SEQ ID NO: 3985750 - RNA, 15 nt, Human herpesvirus 6
uaaagauagaauaau

SEQ ID NO: 3985751 - RNA, 14 nt, Human herpesvirus 6
uaaaguuauauucu

SEQ ID NO: 3985752 - RNA, 23 nt, Human herpesvirus 6
uaaauauaucaaagauguacuca

SEQ ID NO: 3985753 - RNA, 21 nt, Human herpesvirus 6
uaaaugaauagauaauaauca

SEQ ID NO: 3985754 - RNA, 22 nt, Human herpesvirus 6
uaaauguuuauuauccaaacau

SEQ ID NO: 3985755 - RNA, 20 nt, Human herpesvirus 6
uaacaucucguaacgcggca

SEQ ID NO: 3985756 - RNA, 22 nt, Human herpesvirus 6
uaaccauuuugaaaaaacaguu

SEQ ID NO: 3985757 - RNA, 18 nt, Human herpesvirus 6
uaaccucacuacugaaac

SEQ ID NO: 3985758 - RNA, 14 nt, Human herpesvirus 6
uaacgcagcaacaa

SEQ ID NO: 3985759 - RNA, 15 nt, Human herpesvirus 6
uaacuaagauugugc

SEQ ID NO: 3985760 - RNA, 16 nt, Human herpesvirus 6
uaacuaagauugugca

SEQ ID NO: 3985761 - RNA, 20 nt, Human herpesvirus 6
uaacucuuuuuguugcuaua

SEQ ID NO: 3985762 - RNA, 21 nt, Human herpesvirus 6
uaagaagaaaaaaacacaaau

SEQ ID NO: 3985763 - RNA, 14 nt, Human herpesvirus 6
uaagcaaaaacaga

SEQ ID NO: 3985764 - RNA, 23 nt, Human herpesvirus 6
uaagucuuugggaacauguaacu

SEQ ID NO: 3985765 - RNA, 15 nt, Human herpesvirus 6
uaauaaacuuuuaaa

SEQ ID NO: 3985766 - RNA, 20 nt, Human herpesvirus 6
uaauaaaucgcuuaaagcgu

SEQ ID NO: 3985767 - RNA, 19 nt, Human herpesvirus 6
uaauacauauaaaagcuaa

SEQ ID NO: 3985768 - RNA, 22 nt, Human herpesvirus 6
uaauacgcaguugucuggcagc

SEQ ID NO: 3985769 - RNA, 18 nt, Human herpesvirus 6
uaaugagaggacagucaa

SEQ ID NO: 3985770 - RNA, 16 nt, Human herpesvirus 6
uaauguaaaguuauau

SEQ ID NO: 3985771 - RNA, 12 nt, Human herpesvirus 6
uaauguccagug

SEQ ID NO: 3985772 - RNA, 19 nt, Human herpesvirus 6
uaauuguguuguuguauau

SEQ ID NO: 3985773 - RNA, 18 nt, Human herpesvirus 6
uacacgcauuugcaauug

SEQ ID NO: 3985774 - RNA, 13 nt, Human herpesvirus 6
uacauaaacaccc

SEQ ID NO: 3985775 - RNA, 12 nt, Human herpesvirus 6
uacauauaguca

SEQ ID NO: 3985776 - RNA, 17 nt, Human herpesvirus 6
uacaucguuuguugaau

SEQ ID NO: 3985777 - RNA, 19 nt, Human herpesvirus 6
uacauuuuguacaaacuuu

SEQ ID NO: 3985778 - RNA, 23 nt, Human herpesvirus 6
uacccuaagugaaauucaaaaua

SEQ ID NO: 3985779 - RNA, 21 nt, Human herpesvirus 6
uaccgcgguuugggggucuuu

SEQ ID NO: 3985780 - RNA, 23 nt, Human herpesvirus 6
uacgacacgcuggagcagcuucc

SEQ ID NO: 3985781 - RNA, 15 nt, Human herpesvirus 6
uacggagaacgggca

SEQ ID NO: 3985782 - RNA, 15 nt, Human herpesvirus 6
uacggcagcggacca

SEQ ID NO: 3985783 - RNA, 23 nt, Human herpesvirus 6
uacguuaaauaucuauuuaaaau

SEQ ID NO: 3985784 - RNA, 16 nt, Human herpesvirus 6
uacuauuuuagucaca

SEQ ID NO: 3985785 - RNA, 22 nt, Human herpesvirus 6
uacuguacaaaaucaaacucac

SEQ ID NO: 3985786 - RNA, 19 nt, Human herpesvirus 6
uacuuacaucgauccaaaa

SEQ ID NO: 3985787 - RNA, 20 nt, Human herpesvirus 6
uagacgaaaauuguaacuuc

SEQ ID NO: 3985788 - RNA, 13 nt, Human herpesvirus 6
uagacuuggugau

SEQ ID NO: 3985789 - RNA, 21 nt, Human herpesvirus 6
uagcaucuuaccuucaaagug

SEQ ID NO: 3985790 - RNA, 19 nt, Human herpesvirus 6
uagccuauuaagcagccgc

SEQ ID NO: 3985791 - RNA, 17 nt, Human herpesvirus 6
uugugcgucagcuuuga

SEQ ID NO: 3985792 - RNA, 18 nt, Human herpesvirus 6
uuguggacaauauaaaag

SEQ ID NO: 3985793 - RNA, 11 nt, Human herpesvirus 6
uuuaacauuuu

SEQ ID NO: 3985794 - RNA, 14 nt, Human herpesvirus 6
uuuaaccggaaaaa

SEQ ID NO: 3985795 - RNA, 16 nt, Human herpesvirus 6
uuuaacuauccauuuu

SEQ ID NO: 3985796 - RNA, 13 nt, Human herpesvirus 6
uuuaaggauaaga

SEQ ID NO: 3985797 - RNA, 15 nt, Human herpesvirus 6
uuuaaugcaaguuug

SEQ ID NO: 3985798 - RNA, 19 nt, Human herpesvirus 6
uuuaaugcaaguuugaauu

SEQ ID NO: 3985799 - RNA, 13 nt, Human herpesvirus 6
uuuaauuuugaaa

SEQ ID NO: 3985800 - RNA, 19 nt, Human herpesvirus 6
uuuacagucuuuaaaugag

SEQ ID NO: 3985801 - RNA, 23 nt, Human herpesvirus 6
uuuacauuaaacacuaaauuacc

SEQ ID NO: 3985802 - RNA, 15 nt, Human herpesvirus 6
uuuaccgguuuggug

SEQ ID NO: 3985803 - RNA, 14 nt, Human herpesvirus 6
uuuacugcaugcua

SEQ ID NO: 3985804 - RNA, 18 nt, Human herpesvirus 6
uuuagaaacauuugcuga

SEQ ID NO: 3985805 - RNA, 16 nt, Human herpesvirus 6
uuuagccuuuauucug

SEQ ID NO: 3985806 - RNA, 14 nt, Human herpesvirus 6
uuuauaugcaggua

SEQ ID NO: 3985807 - RNA, 20 nt, Human herpesvirus 6
uuuaucgcaacacacaguga

SEQ ID NO: 3985808 - RNA, 24 nt, Human herpesvirus 6
uuuauuuugucagucaacgcaauu

SEQ ID NO: 3985809 - RNA, 19 nt, Human herpesvirus 6
uuucaguauuaacuaguug

SEQ ID NO: 3985810 - RNA, 15 nt, Human herpesvirus 6
uuuccagguagaguu

SEQ ID NO: 3985811 - RNA, 16 nt, Human herpesvirus 6
uuucgccgugugugua

SEQ ID NO: 3985812 - RNA, 14 nt, Human herpesvirus 6
uuucgucuccuggg

SEQ ID NO: 3985813 - RNA, 24 nt, Human herpesvirus 6
uuucguuacgacgaacaauauaga

SEQ ID NO: 3985814 - RNA, 21 nt, Human herpesvirus 6
uuucguuuacgaauucaaugu

SEQ ID NO: 3985815 - RNA, 20 nt, Human herpesvirus 6
uuucuaacagaggguuuaga

SEQ ID NO: 3985816 - RNA, 12 nt, Human herpesvirus 6
uuucucugcaaa

SEQ ID NO: 3985817 - RNA, 14 nt, Human herpesvirus 6
uuucuguuuuaauu

SEQ ID NO: 3985818 - RNA, 18 nt, Human herpesvirus 6
uuugaaacugaggaacug

SEQ ID NO: 3985819 - RNA, 23 nt, Human herpesvirus 6
uuugaauuuauacugugugcgau

SEQ ID NO: 3985820 - RNA, 19 nt, Human herpesvirus 6
uuugacugauacuugaaac

SEQ ID NO: 3985821 - RNA, 17 nt, Human herpesvirus 6
uuugccaaaauaugcua

SEQ ID NO: 3985822 - RNA, 12 nt, Human herpesvirus 6
uuugccaaagcu

SEQ ID NO: 3985823 - RNA, 17 nt, Human herpesvirus 6
uuugcgucuucuauauu

SEQ ID NO: 3985824 - RNA, 14 nt, Human herpesvirus 6
uuugcgugugugua

SEQ ID NO: 3985825 - RNA, 16 nt, Human herpesvirus 6
uuuguacaaacuuuuu

SEQ ID NO: 3985826 - RNA, 21 nt, Human herpesvirus 6
uuuuaacaaaaugguuaugac

SEQ ID NO: 3985827 - RNA, 20 nt, Human herpesvirus 6
uuuuaaccggaaaaaugaaa

SEQ ID NO: 3985828 - RNA, 12 nt, Human herpesvirus 6
uuuuaauuccaa

SEQ ID NO: 3985829 - RNA, 18 nt, Human herpesvirus 6
uuuuaugaucgacauuug

SEQ ID NO: 3985830 - RNA, 20 nt, Human herpesvirus 6
uuuuauuuuuuggcuauuug

SEQ ID NO: 3985831 - RNA, 15 nt, Human herpesvirus 6
uuuucggauuuugaa

SEQ ID NO: 3985832 - RNA, 16 nt, Human herpesvirus 6
uuuuugucagguuuga

SEQ ID NO: 3985833 - RNA, 16 nt, Human herpesvirus 6
uuuuuuaacagugucu

SEQ ID NO: 3985834 - RNA, 13 nt, Human herpesvirus 6
uuuuuuuuucaua

SEQ ID NO: 3985835 - RNA, 20 nt, Human herpesvirus 6
auaacgauauauaaaaaacu

SEQ ID NO: 3985836 - RNA, 21 nt, Human herpesvirus 6
auaacgauauauaaaaaacug

SEQ ID NO: 3985837 - RNA, 15 nt, Human herpesvirus 6
auaagcagaagaguu

SEQ ID NO: 3985838 - RNA, 18 nt, Human herpesvirus 6
auaaguacauagaauuuc

SEQ ID NO: 3985839 - RNA, 22 nt, Human herpesvirus 6
auaaucugaucgaaauacuucu

SEQ ID NO: 3985840 - RNA, 14 nt, Human herpesvirus 6
auaauuaugcauuu

SEQ ID NO: 3985841 - RNA, 15 nt, Human herpesvirus 6
auaauuuauggaaau

SEQ ID NO: 3985842 - RNA, 23 nt, Human herpesvirus 6
auacacugcaagaacugcgacuc

SEQ ID NO: 3985843 - RNA, 21 nt, Human herpesvirus 6
auacagauguguauuauguaa

SEQ ID NO: 3985844 - RNA, 21 nt, Human herpesvirus 6
auacauuccuuaagaaugaaa

SEQ ID NO: 3985845 - RNA, 22 nt, Human herpesvirus 6
auacgaaccucaugaguguuua

SEQ ID NO: 3985846 - RNA, 23 nt, Human herpesvirus 6
auacgacaaauaaaagcauuuuu

SEQ ID NO: 3985847 - RNA, 17 nt, Human herpesvirus 6
auacggaagcugaaaaa

SEQ ID NO: 3985848 - RNA, 17 nt, Human herpesvirus 6
auacugaaguuaauagg

SEQ ID NO: 3985849 - RNA, 18 nt, Human herpesvirus 6
auacuguuguaaaauaua

SEQ ID NO: 3985850 - RNA, 20 nt, Human herpesvirus 6
auagaaaaaaauauuuugaa

SEQ ID NO: 3985851 - RNA, 22 nt, Human herpesvirus 6
auagaucuucggcgcugauucc

SEQ ID NO: 3985852 - RNA, 18 nt, Human herpesvirus 6
auauaaagagaccaauuu

SEQ ID NO: 3985853 - RNA, 15 nt, Human herpesvirus 6
auauauuugcauaca

SEQ ID NO: 3985854 - RNA, 22 nt, Human herpesvirus 6
auaucccgcguuagguguaaau

SEQ ID NO: 3985855 - RNA, 17 nt, Human herpesvirus 6
auauccuagcauuuccg

SEQ ID NO: 3985856 - RNA, 17 nt, Human herpesvirus 6
auaucguggaauggcug

SEQ ID NO: 3985857 - RNA, 22 nt, Human herpesvirus 6
auauuaaucguuacaaaauuga

SEQ ID NO: 3985858 - RNA, 22 nt, Human herpesvirus 6
auauuaauuacauauagucaau

SEQ ID NO: 3985859 - RNA, 18 nt, Human herpesvirus 6
auauuauuuucccacaga

SEQ ID NO: 3985860 - RNA, 16 nt, Human herpesvirus 6
auauuugccugccgac

SEQ ID NO: 3985861 - RNA, 20 nt, Human herpesvirus 6
aucaaaugauuuuacaaaga

SEQ ID NO: 3985862 - RNA, 19 nt, Human herpesvirus 6
aucacaccaauggucacac

SEQ ID NO: 3985863 - RNA, 18 nt, Human herpesvirus 6
aucaccaccaacacaccu

SEQ ID NO: 3985864 - RNA, 17 nt, Human herpesvirus 6
aucacuuagacacggcc

SEQ ID NO: 3985865 - RNA, 20 nt, Human herpesvirus 6
aucaucucgugcaaaagcug

SEQ ID NO: 3985866 - RNA, 18 nt, Human herpesvirus 6
aucaugcugugagagaau

SEQ ID NO: 3985867 - RNA, 14 nt, Human herpesvirus 6
aucauuguuugaau

SEQ ID NO: 3985868 - RNA, 15 nt, Human herpesvirus 6
auccaccuucccucc

SEQ ID NO: 3985869 - RNA, 18 nt, Human herpesvirus 6
aucgccccugucugugau

SEQ ID NO: 3985870 - RNA, 21 nt, Human herpesvirus 6
aucgcuuaaagcguuugcaaa

SEQ ID NO: 3985871 - RNA, 22 nt, Human herpesvirus 6
aucguuugagauucuuuaacuu

SEQ ID NO: 3985872 - RNA, 22 nt, Human herpesvirus 6
aucuaaauuucuacaaaaauac

SEQ ID NO: 3985873 - RNA, 19 nt, Human herpesvirus 6
aucuacugcaguccagaag

SEQ ID NO: 3985874 - RNA, 17 nt, Human herpesvirus 6
aucuauugucgaagaac

SEQ ID NO: 3985875 - RNA, 12 nt, Human herpesvirus 6
aucucuacuugu

SEQ ID NO: 3985876 - RNA, 24 nt, Human herpesvirus 6
aucuuauuaauuuccugaucacag

SEQ ID NO: 3985877 - RNA, 22 nt, Human herpesvirus 6
augaaaguccucaaacuuuuag

SEQ ID NO: 3985878 - RNA, 17 nt, Human herpesvirus 6
augacaccgauucagaa

SEQ ID NO: 3985879 - RNA, 15 nt, Human herpesvirus 6
augacgcggaaucua

SEQ ID NO: 3985880 - RNA, 22 nt, Human herpesvirus 6
augacuguacacaagagccgua

SEQ ID NO: 3985881 - RNA, 22 nt, Human herpesvirus 6
augagggggagggacccacagg

SEQ ID NO: 3985882 - RNA, 18 nt, Human herpesvirus 6
augaucgccgcuaggcag

SEQ ID NO: 3985883 - RNA, 21 nt, Human herpesvirus 6
augaucucacgucacaguuuu

SEQ ID NO: 3985884 - RNA, 21 nt, Human herpesvirus 6
augauuauaucgcaagcaaaa

SEQ ID NO: 3985885 - RNA, 18 nt, Human herpesvirus 6
augauuauucugucuuga

SEQ ID NO: 3985886 - RNA, 14 nt, Human herpesvirus 6
augcaauuuaaaag

SEQ ID NO: 3985887 - RNA, 13 nt, Human herpesvirus 6
augcauucacaag

SEQ ID NO: 3985888 - RNA, 19 nt, Human herpesvirus 6
augccccgguuaaaguaga

SEQ ID NO: 3985889 - RNA, 16 nt, Human herpesvirus 6
augccugcauaugcag

SEQ ID NO: 3985890 - RNA, 21 nt, Human herpesvirus 6
augcuacccacaugaaaucac

SEQ ID NO: 3985891 - RNA, 13 nt, Human herpesvirus 6
auggaaauucgcu

SEQ ID NO: 3985892 - RNA, 16 nt, Human herpesvirus 6
auggaauggaauuucu

SEQ ID NO: 3985893 - RNA, 16 nt, Human herpesvirus 6
auggcgucgaaguauu

SEQ ID NO: 3985894 - RNA, 16 nt, Human herpesvirus 6
augggugagugcauua

SEQ ID NO: 3985895 - RNA, 18 nt, Human herpesvirus 6
augguucgauugcgcgau

SEQ ID NO: 3985896 - RNA, 15 nt, Human herpesvirus 6
auguaaaaguuguga

SEQ ID NO: 3985897 - RNA, 20 nt, Human herpesvirus 6
auguaguuaaugcugcugcu

SEQ ID NO: 3985898 - RNA, 13 nt, Human herpesvirus 6
augucgguaaacu

SEQ ID NO: 3985899 - RNA, 13 nt, Human herpesvirus 6
augucuugccucu

SEQ ID NO: 3985900 - RNA, 22 nt, Human herpesvirus 6
auguucgaugauuauucugucu

SEQ ID NO: 3985901 - RNA, 18 nt, Human herpesvirus 6
auguugaaguauguacaa

SEQ ID NO: 3985902 - RNA, 17 nt, Human herpesvirus 6
auguuugggagaacuga

SEQ ID NO: 3985903 - RNA, 19 nt, Human herpesvirus 6
auguuuuucauaaauggua

SEQ ID NO: 3985904 - RNA, 14 nt, Human herpesvirus 6
auuaaaguuuacug

SEQ ID NO: 3985905 - RNA, 16 nt, Human herpesvirus 6
auuaaauauaccugaa

SEQ ID NO: 3985906 - RNA, 17 nt, Human herpesvirus 6
auuaaauguuacugaac

SEQ ID NO: 3985907 - RNA, 17 nt, Human herpesvirus 6
auuaacuguaaaaagug

SEQ ID NO: 3985908 - RNA, 14 nt, Human herpesvirus 6
auuaauaaaucgcu

SEQ ID NO: 3985909 - RNA, 13 nt, Human herpesvirus 6
auuacauuaucca

SEQ ID NO: 3985910 - RNA, 20 nt, Human herpesvirus 6
auuaccaccagaaaaguaua

SEQ ID NO: 3985911 - RNA, 19 nt, Human herpesvirus 6
auuaggggagagacaucca

SEQ ID NO: 3985912 - RNA, 22 nt, Human herpesvirus 6
auuauaaauguagcauacgaca

SEQ ID NO: 3985913 - RNA, 20 nt, Human herpesvirus 6
auuaucacaguugauaaaca

SEQ ID NO: 3985914 - RNA, 16 nt, Human herpesvirus 6
auucagagugaauucc

SEQ ID NO: 3985915 - RNA, 16 nt, Human herpesvirus 6
auucaggcuuuaacua

SEQ ID NO: 3985916 - RNA, 22 nt, Human herpesvirus 6
auucauauuauauuuaaaugaa

SEQ ID NO: 3985917 - RNA, 21 nt, Human herpesvirus 6
auuccacgugcuugucucaca

SEQ ID NO: 3985918 - RNA, 13 nt, Human herpesvirus 6
auucguuacaauc

SEQ ID NO: 3985919 - RNA, 16 nt, Human herpesvirus 6
auucguuuuuuuucuu

SEQ ID NO: 3985920 - RNA, 20 nt, Human herpesvirus 6
auucuaaauacgauauuaac

SEQ ID NO: 3985921 - RNA, 13 nt, Human herpesvirus 6
auucuaacgucug

SEQ ID NO: 3985922 - RNA, 19 nt, Human herpesvirus 6
auucugcauuuauaucaaa

SEQ ID NO: 3985923 - RNA, 19 nt, Human herpesvirus 6
auucuuaccaagaaaucau

SEQ ID NO: 3985924 - RNA, 15 nt, Human herpesvirus 6
auugguuaaaaggaa

SEQ ID NO: 3985925 - RNA, 14 nt, Human herpesvirus 6
auuguaaaagggaa

SEQ ID NO: 3985926 - RNA, 20 nt, Human herpesvirus 6
auuguacgauaauaaaaguu

SEQ ID NO: 3985927 - RNA, 17 nt, Human herpesvirus 6
auugucugauauggcaa

SEQ ID NO: 3985928 - RNA, 14 nt, Human herpesvirus 6
auugugacaaggaa

SEQ ID NO: 3985929 - RNA, 18 nt, Human herpesvirus 6
auuuaaacucgacuucuu

SEQ ID NO: 3985930 - RNA, 16 nt, Human herpesvirus 6
auuuaaccuuuucacu

SEQ ID NO: 3985931 - RNA, 18 nt, Human herpesvirus 6
auuucaagagaacaugau

SEQ ID NO: 3985932 - RNA, 17 nt, Human herpesvirus 6
auuucuuacuaggaaag

SEQ ID NO: 3985933 - RNA, 13 nt, Human herpesvirus 6
auuucuuguugag

SEQ ID NO: 3985934 - RNA, 16 nt, Human herpesvirus 6
auuuuaauuuugaaau

SEQ ID NO: 3985935 - RNA, 18 nt, Human herpesvirus 6
auuuuauaauacacuauu

SEQ ID NO: 3985936 - RNA, 18 nt, Human herpesvirus 6
auuuucaaauuuauuugu

SEQ ID NO: 3985937 - RNA, 15 nt, Human herpesvirus 6
auuuuuuauuuccac

SEQ ID NO: 3985938 - RNA, 23 nt, Human herpesvirus 6
auuuuuuuuuuauuuacaaaaaa

SEQ ID NO: 3985939 - RNA, 19 nt, Human herpesvirus 6
caaaacauaucgagccaaa

SEQ ID NO: 3985940 - RNA, 18 nt, Human herpesvirus 6
caaaagacacaaucuucg

SEQ ID NO: 3985941 - RNA, 21 nt, Human herpesvirus 6
caaaauugacuacagcugcag

SEQ ID NO: 3985942 - RNA, 14 nt, Human herpesvirus 6
caaaauugacuuac

SEQ ID NO: 3985943 - RNA, 11 nt, Human herpesvirus 6
uuucuuuggag

SEQ ID NO: 3985944 - RNA, 18 nt, Human herpesvirus 6
uuugaauaacaaacuaua

SEQ ID NO: 3985945 - RNA, 22 nt, Human herpesvirus 6
uuuguacacuuuaucgauguag

SEQ ID NO: 3985946 - RNA, 17 nt, Human herpesvirus 6
uuuguagcaaucuuaaa

SEQ ID NO: 3985947 - RNA, 19 nt, Human herpesvirus 6
uuuguguucagucuaugca

SEQ ID NO: 3985948 - RNA, 22 nt, Human herpesvirus 6
uuuuaagagugcaacaaaaagc

SEQ ID NO: 3985949 - RNA, 15 nt, Human herpesvirus 6
uuuuacaauacacag

SEQ ID NO: 3985950 - RNA, 17 nt, Human herpesvirus 6
uuuuaguuuuuagagaa

SEQ ID NO: 3985951 - RNA, 22 nt, Human herpesvirus 6
uuuuauuuccacguacuauuuu

SEQ ID NO: 3985952 - RNA, 12 nt, Human herpesvirus 6
uuuugaaaaggu

SEQ ID NO: 3985953 - RNA, 16 nt, Human herpesvirus 6
uuuugaagguaucaaa

SEQ ID NO: 3985954 - RNA, 22 nt, Human herpesvirus 6
uuuugugauuaacaaauuacaa

SEQ ID NO: 3985955 - RNA, 16 nt, Human herpesvirus 6
uuuuuaaucaugauug

SEQ ID NO: 3985956 - RNA, 19 nt, Human herpesvirus 6
uuuuuaaugcaaguuugaa

SEQ ID NO: 3985957 - RNA, 24 nt, Human herpesvirus 6
uuuuucucgagcuagagugacauc

SEQ ID NO: 3985958 - RNA, 21 nt, Human herpesvirus 6
uuuuucucguuccccaugucu

SEQ ID NO: 3985959 - RNA, 17 nt, Human herpesvirus 6
uuuuucuucaggugucu

SEQ ID NO: 3985960 - RNA, 17 nt, Human herpesvirus 6
uuuuugucggauuuaaa

SEQ ID NO: 3985961 - RNA, 15 nt, Human herpesvirus 6
uauuuacggacaaac

SEQ ID NO: 3985962 - RNA, 14 nt, Human herpesvirus 6
uauuuccugcccag

SEQ ID NO: 3985963 - RNA, 17 nt, Human herpesvirus 6
uauuuccugcccaggca

SEQ ID NO: 3985964 - RNA, 19 nt, Human herpesvirus 6
uauuuuuuuuuuauuuaca

SEQ ID NO: 3985965 - RNA, 17 nt, Human herpesvirus 6
ucaaagaaacaguaaau

SEQ ID NO: 3985966 - RNA, 17 nt, Human herpesvirus 6
ucaaaugaauuuauuuu

SEQ ID NO: 3985967 - RNA, 15 nt, Human herpesvirus 6
ucaaaugauuuuaca

SEQ ID NO: 3985968 - RNA, 21 nt, Human herpesvirus 6
ucaauaucaccuuacaaauaa

SEQ ID NO: 3985969 - RNA, 20 nt, Human herpesvirus 6
ucaaugcguuggagcaagcg

SEQ ID NO: 3985970 - RNA, 22 nt, Human herpesvirus 6
ucacaagcuguccaucuucaga

SEQ ID NO: 3985971 - RNA, 20 nt, Human herpesvirus 6
ucaccgauaaaaacucacac

SEQ ID NO: 3985972 - RNA, 16 nt, Human herpesvirus 6
ucacguauaccauucc

SEQ ID NO: 3985973 - RNA, 19 nt, Human herpesvirus 6
ucagaagagaugaaagaca

SEQ ID NO: 3985974 - RNA, 21 nt, Human herpesvirus 6
ucagaagagaugaaagacaga

SEQ ID NO: 3985975 - RNA, 13 nt, Human herpesvirus 6
ucagacauccaga

SEQ ID NO: 3985976 - RNA, 19 nt, Human herpesvirus 6
ucagauacugaucguuuuu

SEQ ID NO: 3985977 - RNA, 22 nt, Human herpesvirus 6
ucagauugcggacauggugaaa

SEQ ID NO: 3985978 - RNA, 18 nt, Human herpesvirus 6
ucagccugagaacgggca

SEQ ID NO: 3985979 - RNA, 20 nt, Human herpesvirus 6
ucauaaagauaaagaucagu

SEQ ID NO: 3985980 - RNA, 22 nt, Human herpesvirus 6
ucauaaucugcguuccucucuc

SEQ ID NO: 3985981 - RNA, 12 nt, Human herpesvirus 6
ucauaugucucg

SEQ ID NO: 3985982 - RNA, 15 nt, Human herpesvirus 6
ucaucacaaaguuua

SEQ ID NO: 3985983 - RNA, 15 nt, Human herpesvirus 6
ucaugauauuccaga

SEQ ID NO: 3985984 - RNA, 17 nt, Human herpesvirus 6
ucauuguuuuugcaugu

SEQ ID NO: 3985985 - RNA, 20 nt, Human herpesvirus 6
ucauuuguuuuuuaaagcac

SEQ ID NO: 3985986 - RNA, 15 nt, Human herpesvirus 6
uccaaccccucccau

SEQ ID NO: 3985987 - RNA, 17 nt, Human herpesvirus 6
uccagguagaguugcgu

SEQ ID NO: 3985988 - RNA, 14 nt, Human herpesvirus 6
uccaguauugaaga

SEQ ID NO: 3985989 - RNA, 17 nt, Human herpesvirus 6
uccaguauugaagaaaa

SEQ ID NO: 3985990 - RNA, 14 nt, Human herpesvirus 6
uccaucuucagaca

SEQ ID NO: 3985991 - RNA, 17 nt, Human herpesvirus 6
ucccccggaguacacgu

SEQ ID NO: 3985992 - RNA, 15 nt, Human herpesvirus 6
ucccggcccagagac

SEQ ID NO: 3985993 - RNA, 15 nt, Human herpesvirus 6
uccgacacgccccca

SEQ ID NO: 3985994 - RNA, 22 nt, Human herpesvirus 6
uccgcaucgggggaacuacaua

SEQ ID NO: 3985995 - RNA, 14 nt, Human herpesvirus 6
uccgcccuccccga

SEQ ID NO: 3985996 - RNA, 17 nt, Human herpesvirus 6
uccgccuuuucuuauau

SEQ ID NO: 3985997 - RNA, 16 nt, Human herpesvirus 6
uccgcgauacccagcg

SEQ ID NO: 3985998 - RNA, 14 nt, Human herpesvirus 6
uccggaguugcagu

SEQ ID NO: 3985999 - RNA, 16 nt, Human herpesvirus 6
uccgugacacacagaa

SEQ ID NO: 3986000 - RNA, 21 nt, Human herpesvirus 6
uccucaaacuuuuagagacuu

SEQ ID NO: 3986001 - RNA, 14 nt, Human herpesvirus 6
uccugagaguaaau

SEQ ID NO: 3986002 - RNA, 12 nt, Human herpesvirus 6
uccugcacaggc

SEQ ID NO: 3986003 - RNA, 13 nt, Human herpesvirus 6
uccugcacaggcg

SEQ ID NO: 3986004 - RNA, 18 nt, Human herpesvirus 6
uccuuaauucuaaauacg

SEQ ID NO: 3986005 - RNA, 15 nt, Human herpesvirus 6
ucgaaacgaaagcug

SEQ ID NO: 3986006 - RNA, 17 nt, Human herpesvirus 6
ucgaaacgaaagcugau

SEQ ID NO: 3986007 - RNA, 16 nt, Human herpesvirus 6
ucgaccauguguauau

SEQ ID NO: 3986008 - RNA, 19 nt, Human herpesvirus 6
ucgauuuaaccuuuucacu

SEQ ID NO: 3986009 - RNA, 22 nt, Human herpesvirus 6
ucgcccccauacacacccagca

SEQ ID NO: 3986010 - RNA, 22 nt, Human herpesvirus 6
ucgcgguccaacacagcaugca

SEQ ID NO: 3986011 - RNA, 20 nt, Human herpesvirus 6
ucgcuaaguguugacugauc

SEQ ID NO: 3986012 - RNA, 16 nt, Human herpesvirus 6
ucgggaacauagagaa

SEQ ID NO: 3986013 - RNA, 16 nt, Human herpesvirus 6
ucgguuaaaacaguaa

SEQ ID NO: 3986014 - RNA, 22 nt, Human herpesvirus 6
ucguacacgcauuugcaauugu

SEQ ID NO: 3986015 - RNA, 15 nt, Human herpesvirus 6
ucuaacaucucguaa

SEQ ID NO: 3986016 - RNA, 10 nt, Human herpesvirus 6
ucuacaaaaa

SEQ ID NO: 3986017 - RNA, 21 nt, Human herpesvirus 6
ucuacguaugaaaguccucaa

SEQ ID NO: 3986018 - RNA, 22 nt, Human herpesvirus 6
ucuacguaugaaaguccucaaa

SEQ ID NO: 3986019 - RNA, 14 nt, Human herpesvirus 6
ucuccauccucgaa

SEQ ID NO: 3986020 - RNA, 15 nt, Human herpesvirus 6
ucuccauucuucgaa

SEQ ID NO: 3986021 - RNA, 20 nt, Human herpesvirus 6
ucucgugguacaauaaaaac

SEQ ID NO: 3986022 - RNA, 22 nt, Human herpesvirus 6
ucucucaguaauuuguguaauu

SEQ ID NO: 3986023 - RNA, 14 nt, Human herpesvirus 6
ucucucgaugaaag

SEQ ID NO: 3986024 - RNA, 16 nt, Human herpesvirus 6
ucucugacuauuucaa

SEQ ID NO: 3986025 - RNA, 22 nt, Human herpesvirus 6
ucucuguguguguugugcgcua

SEQ ID NO: 3986026 - RNA, 16 nt, Human herpesvirus 6
ucugaagcaaaagucu

SEQ ID NO: 3986027 - RNA, 16 nt, Human herpesvirus 6
ucugaauuuaaugcaa

SEQ ID NO: 3986028 - RNA, 16 nt, Human herpesvirus 6
ucugacauggaagaca

SEQ ID NO: 3986029 - RNA, 21 nt, Human herpesvirus 6
ucugagguuuccgucucgccu

SEQ ID NO: 3986030 - RNA, 20 nt, Human herpesvirus 6
ucugcauaguguagaaaaca

SEQ ID NO: 3986031 - RNA, 22 nt, Human herpesvirus 6
ucugcauuuauaucaaacuuuu

SEQ ID NO: 3986032 - RNA, 21 nt, Human herpesvirus 6
ucugcuauuuuuuuuaauguu

SEQ ID NO: 3986033 - RNA, 16 nt, Human herpesvirus 6
ucuggugaauguuucu

SEQ ID NO: 3986034 - RNA, 19 nt, Human herpesvirus 6
ucuguauuuuucuuugcag

SEQ ID NO: 3986035 - RNA, 14 nt, Human herpesvirus 6
ucuuacaauguuuu

SEQ ID NO: 3986036 - RNA, 16 nt, Human herpesvirus 6
ucuucaagcaaagaca

SEQ ID NO: 3986037 - RNA, 18 nt, Human herpesvirus 6
ucuucguacguacuacag

SEQ ID NO: 3986038 - RNA, 16 nt, Human herpesvirus 6
ucuugguuguguauau

SEQ ID NO: 3986039 - RNA, 18 nt, Human herpesvirus 6
ucuuuauaaacuuaaaac

SEQ ID NO: 3986040 - RNA, 13 nt, Human herpesvirus 6
ugaaagcagucag

SEQ ID NO: 3986041 - RNA, 14 nt, Human herpesvirus 6
ugaaauaaaguuua

SEQ ID NO: 3986042 - RNA, 13 nt, Human herpesvirus 6
ugaagaugacagc

SEQ ID NO: 3986043 - RNA, 23 nt, Human herpesvirus 6
ugaauggaguaaauuaaaguuua

SEQ ID NO: 3986044 - RNA, 18 nt, Human herpesvirus 6
ugaauucucauuugaaag

SEQ ID NO: 3986045 - RNA, 18 nt, Human herpesvirus 6
ugacaacaaaggagugag

SEQ ID NO: 3986046 - RNA, 16 nt, Human herpesvirus 6
ugacacacagaauaca

SEQ ID NO: 3986047 - RNA, 21 nt, Human herpesvirus 6
ugacacgggucgggggucugc

SEQ ID NO: 3986048 - RNA, 14 nt, Human herpesvirus 6
ugacaguucgagcc

SEQ ID NO: 3986049 - RNA, 22 nt, Human herpesvirus 6
ugacggcgacaaccgccgccgc

SEQ ID NO: 3986050 - RNA, 22 nt, Human herpesvirus 6
ugacucuucucuaaaaacuaaa

SEQ ID NO: 3986051 - RNA, 23 nt, Human herpesvirus 6
ugauaccgaaaucuccugagaag

SEQ ID NO: 3986052 - RNA, 15 nt, Human herpesvirus 6
ugaucuuuacaaaag

SEQ ID NO: 3986053 - RNA, 17 nt, Human herpesvirus 6
ugauggcagguaaccaa

SEQ ID NO: 3986054 - RNA, 20 nt, Human herpesvirus 6
ugauguggacguucugucug

SEQ ID NO: 3986055 - RNA, 11 nt, Human herpesvirus 6
ugauuaacaaa

SEQ ID NO: 3986056 - RNA, 20 nt, Human herpesvirus 6
ugauuaacaaauuacaauca

SEQ ID NO: 3986057 - RNA, 17 nt, Human herpesvirus 6
ugauuauauauuugcau

SEQ ID NO: 3986058 - RNA, 15 nt, Human herpesvirus 6
ugauuauucugucuu

SEQ ID NO: 3986059 - RNA, 17 nt, Human herpesvirus 6
ugauugucuuuucugga

SEQ ID NO: 3986060 - RNA, 18 nt, Human herpesvirus 6
ugauugugacaaggaaug

SEQ ID NO: 3986061 - RNA, 21 nt, Human herpesvirus 6
ugcaagccaugacaagaaagg

SEQ ID NO: 3986062 - RNA, 10 nt, Human herpesvirus 6
ugcacaggcg

SEQ ID NO: 3986063 - RNA, 20 nt, Human herpesvirus 6
ugcauacauaaauuauuuuu

SEQ ID NO: 3986064 - RNA, 21 nt, Human herpesvirus 6
ugcauuauacgugucggugau

SEQ ID NO: 3986065 - RNA, 13 nt, Human herpesvirus 6
ugccaaaggaaac

SEQ ID NO: 3986066 - RNA, 16 nt, Human herpesvirus 6
ugccaccgucugggac

SEQ ID NO: 3986067 - RNA, 19 nt, Human herpesvirus 6
ugccauaauuucuguuuug

SEQ ID NO: 3986068 - RNA, 19 nt, Human herpesvirus 6
ugcccacaccaucuucagc

SEQ ID NO: 3986069 - RNA, 14 nt, Human herpesvirus 6
ugcuccggggaggg

SEQ ID NO: 3986070 - RNA, 18 nt, Human herpesvirus 6
ugcuccguuuccuccucg

SEQ ID NO: 3986071 - RNA, 13 nt, Human herpesvirus 6
ugcucgcauuucu

SEQ ID NO: 3986072 - RNA, 13 nt, Human herpesvirus 6
ugcuguuuucacc

SEQ ID NO: 3986073 - RNA, 23 nt, Human herpesvirus 6
uggaaaacgacacagaacacauc

SEQ ID NO: 3986074 - RNA, 23 nt, Human herpesvirus 6
uggagagaacugucuugcagcug

SEQ ID NO: 3986075 - RNA, 15 nt, Human herpesvirus 6
uggagggaauuguau

SEQ ID NO: 3986076 - RNA, 15 nt, Human herpesvirus 6
uggauaaaacggcgu

SEQ ID NO: 3986077 - RNA, 17 nt, Human herpesvirus 6
uggauggauaaaauuga

SEQ ID NO: 3986078 - RNA, 19 nt, Human herpesvirus 6
uggauggauaaaauugaug

SEQ ID NO: 3986079 - RNA, 16 nt, Human herpesvirus 6
uggaugugcacuuucu

SEQ ID NO: 3986080 - RNA, 18 nt, Human herpesvirus 6
uggcacggugccaaagga

SEQ ID NO: 3986081 - RNA, 13 nt, Human herpesvirus 6
uggcagguaacca

SEQ ID NO: 3986082 - RNA, 20 nt, Human herpesvirus 6
uggcggaaacgacggaacga

SEQ ID NO: 3986083 - RNA, 22 nt, Human herpesvirus 6
ugggacccacgguggccuggca

SEQ ID NO: 3986084 - RNA, 14 nt, Human herpesvirus 6
ugggggucuuuccu

SEQ ID NO: 3986085 - RNA, 13 nt, Human herpesvirus 6
uggggucuuuccu

SEQ ID NO: 3986086 - RNA, 15 nt, Human herpesvirus 6
uggguacaaugaaaa

SEQ ID NO: 3986087 - RNA, 14 nt, Human herpesvirus 6
uggugguaauuuag

SEQ ID NO: 3986088 - RNA, 18 nt, Human herpesvirus 6
uguaauaguauugucuga

SEQ ID NO: 3986089 - RNA, 19 nt, Human herpesvirus 6
uguacaauauaauuucuua

SEQ ID NO: 3986090 - RNA, 23 nt, Human herpesvirus 6
uguauauugaauuguauauauag

SEQ ID NO: 3986091 - RNA, 12 nt, Human herpesvirus 6
uguauuauguaa

SEQ ID NO: 3986092 - RNA, 13 nt, Human herpesvirus 6
ugucaaguuucac

SEQ ID NO: 3986093 - RNA, 23 nt, Human herpesvirus 6
ugucagauacugaucguuuuuua

SEQ ID NO: 3986094 - RNA, 16 nt, Human herpesvirus 6
ugucaucaugugugcc

SEQ ID NO: 3986095 - RNA, 14 nt, Human herpesvirus 6
uguccaucuucaga

SEQ ID NO: 3986096 - RNA, 16 nt, Human herpesvirus 6
ugucggccgugaugca

SEQ ID NO: 3986097 - RNA, 12 nt, Human herpesvirus 6
ugucuuagugua

SEQ ID NO: 3986098 - RNA, 18 nt, Human herpesvirus 6
ugugauucaguaucuguu

SEQ ID NO: 3986099 - RNA, 13 nt, Human herpesvirus 6
uguguauuguaaa

SEQ ID NO: 3986100 - RNA, 14 nt, Human herpesvirus 6
uguguuauaaggaa

SEQ ID NO: 3986101 - RNA, 13 nt, Human herpesvirus 6
uguguucaagaac

SEQ ID NO: 3986102 - RNA, 19 nt, Human herpesvirus 6
uguugaguaauugaacauu

SEQ ID NO: 3986103 - RNA, 14 nt, Human herpesvirus 6
uguuuccugcccag

SEQ ID NO: 3986104 - RNA, 20 nt, Human herpesvirus 6
uguuugggagaacugaggac

SEQ ID NO: 3986105 - RNA, 19 nt, Human herpesvirus 6
uuaaaagaauuuuuguagc

SEQ ID NO: 3986106 - RNA, 12 nt, Human herpesvirus 6
uuaaaagucagu

SEQ ID NO: 3986107 - RNA, 15 nt, Human herpesvirus 6
uuaaaauagaagucu

SEQ ID NO: 3986108 - RNA, 15 nt, Human herpesvirus 6
uuaaacaacacagca

SEQ ID NO: 3986109 - RNA, 15 nt, Human herpesvirus 6
uuaaauccuguuuug

SEQ ID NO: 3986110 - RNA, 20 nt, Human herpesvirus 6
uuaacuaagauugugcaguu

SEQ ID NO: 3986111 - RNA, 22 nt, Human herpesvirus 6
uuaacuagguagcguacaaguc

SEQ ID NO: 3986112 - RNA, 20 nt, Human herpesvirus 6
uuaagcaacugauuaagauu

SEQ ID NO: 3986113 - RNA, 17 nt, Human herpesvirus 6
uuaaguccguuuggaga

SEQ ID NO: 3986114 - RNA, 16 nt, Human herpesvirus 6
uuaauacaaaauuuga

SEQ ID NO: 3986115 - RNA, 15 nt, Human herpesvirus 6
uuaauccauauuugg

SEQ ID NO: 3986116 - RNA, 19 nt, Human herpesvirus 6
uuaaugaaugugcuuugga

SEQ ID NO: 3986117 - RNA, 16 nt, Human herpesvirus 6
uuaauucuuaaagcgu

SEQ ID NO: 3986118 - RNA, 15 nt, Human herpesvirus 6
uuacaauacacagaa

SEQ ID NO: 3986119 - RNA, 20 nt, Human herpesvirus 6
uuacacaccuuaaacaugua

SEQ ID NO: 3986120 - RNA, 13 nt, Human herpesvirus 6
uuacagauacaua

SEQ ID NO: 3986121 - RNA, 12 nt, Human herpesvirus 6
uuacauaacaua

SEQ ID NO: 3986122 - RNA, 15 nt, Human herpesvirus 6
uuacauauacauuug

SEQ ID NO: 3986123 - RNA, 19 nt, Human herpesvirus 6
uuaccuaucguccuuaaua

SEQ ID NO: 3986124 - RNA, 15 nt, Human herpesvirus 6
uuagaacaauuauca

SEQ ID NO: 3986125 - RNA, 19 nt, Human herpesvirus 6
uuagacuuggugaugauga

SEQ ID NO: 3986126 - RNA, 16 nt, Human herpesvirus 6
uuauaagauuuacaga

SEQ ID NO: 3986127 - RNA, 16 nt, Human herpesvirus 6
uuauauucuucuguaa

SEQ ID NO: 3986128 - RNA, 15 nt, Human herpesvirus 6
uuauuaacaaugaaa

SEQ ID NO: 3986129 - RNA, 20 nt, Human herpesvirus 6
uuauucggaguuuucaagau

SEQ ID NO: 3986130 - RNA, 21 nt, Human herpesvirus 6
uucaaaaaucgaaaucguaua

SEQ ID NO: 3986131 - RNA, 22 nt, Human herpesvirus 6
uucaaaagaguuacuagcaguu

SEQ ID NO: 3986132 - RNA, 23 nt, Human herpesvirus 6
uucaacauccuauugagauucuc

SEQ ID NO: 3986133 - RNA, 23 nt, Human herpesvirus 6
uucaagauuguguuucugucuuu

SEQ ID NO: 3986134 - RNA, 19 nt, Human herpesvirus 6
uucacugaccguuguaaga

SEQ ID NO: 3986135 - RNA, 19 nt, Human herpesvirus 6
uucagaagagaugaaagac

SEQ ID NO: 3986136 - RNA, 22 nt, Human herpesvirus 6
uucagaccucauauaagaacca

SEQ ID NO: 3986137 - RNA, 22 nt, Human herpesvirus 6
uucagguucuucaaaaaaagaa

SEQ ID NO: 3986138 - RNA, 13 nt, Human herpesvirus 6
uucaguaucuguu

SEQ ID NO: 3986139 - RNA, 17 nt, Human herpesvirus 6
uucaguaucuguuuuua

SEQ ID NO: 3986140 - RNA, 21 nt, Human herpesvirus 6
uucauaaagauaaagaucagu

SEQ ID NO: 3986141 - RNA, 23 nt, Human herpesvirus 6
uucaucaaucacucccuguuuuu

SEQ ID NO: 3986142 - RNA, 17 nt, Human herpesvirus 6
uuccacguacuauuuuu

SEQ ID NO: 3986143 - RNA, 18 nt, Human herpesvirus 6
uuccccacaauaagaaaa

SEQ ID NO: 3986144 - RNA, 11 nt, Human herpesvirus 6
uucccucccac

SEQ ID NO: 3986145 - RNA, 12 nt, Human herpesvirus 6
uuccgaaaucaa

SEQ ID NO: 3986146 - RNA, 12 nt, Human herpesvirus 6
uuccugcacagg

SEQ ID NO: 3986147 - RNA, 20 nt, Human herpesvirus 6
uuccuuauaacacacagcua

SEQ ID NO: 3986148 - RNA, 19 nt, Human herpesvirus 6
uucgaauucuuaccaagaa

SEQ ID NO: 3986149 - RNA, 16 nt, Human herpesvirus 6
uucgauguuuucaggu

SEQ ID NO: 3986150 - RNA, 17 nt, Human herpesvirus 6
uucgcaaaaacguuuuu

SEQ ID NO: 3986151 - RNA, 13 nt, Human herpesvirus 6
uucgcuucuuaua

SEQ ID NO: 3986152 - RNA, 15 nt, Human herpesvirus 6
uucuauguacuuauu

SEQ ID NO: 3986153 - RNA, 12 nt, Human herpesvirus 6
uucuaugucuag

SEQ ID NO: 3986154 - RNA, 18 nt, Human herpesvirus 6
uucuccuaccauguugcu

SEQ ID NO: 3986155 - RNA, 23 nt, Human herpesvirus 6
uucucggaaaauuaaaagucagu

SEQ ID NO: 3986156 - RNA, 13 nt, Human herpesvirus 6
uucugaccagcaa

SEQ ID NO: 3986157 - RNA, 16 nt, Human herpesvirus 6
uucuguaauuuugaaa

SEQ ID NO: 3986158 - RNA, 23 nt, Human herpesvirus 6
uucuuaacucaucgacuucuguc

SEQ ID NO: 3986159 - RNA, 13 nt, Human herpesvirus 6
uucuucugugacu

SEQ ID NO: 3986160 - RNA, 21 nt, Human herpesvirus 6
uucuuguugaguuucagcaga

SEQ ID NO: 3986161 - RNA, 12 nt, Human herpesvirus 6
aaaaaaacacag

SEQ ID NO: 3986162 - RNA, 16 nt, Human herpesvirus 6
aaaaacguuuuuguua

SEQ ID NO: 3986163 - RNA, 13 nt, Human herpesvirus 6
aaaaacucacaca

SEQ ID NO: 3986164 - RNA, 15 nt, Human herpesvirus 6
aaaaaguauccuaaa

SEQ ID NO: 3986165 - RNA, 13 nt, Human herpesvirus 6
aaaaaucagaauc

SEQ ID NO: 3986166 - RNA, 19 nt, Human herpesvirus 6
aaaacacagacggauucaa

SEQ ID NO: 3986167 - RNA, 20 nt, Human herpesvirus 6
aaaacuccccucauuuucaa

SEQ ID NO: 3986168 - RNA, 15 nt, Human herpesvirus 6
aaaauaaguacauag

SEQ ID NO: 3986169 - RNA, 23 nt, Human herpesvirus 6
aaaaucaucucgugcaaaagcug

SEQ ID NO: 3986170 - RNA, 12 nt, Human herpesvirus 6
aaaaucucaaac

SEQ ID NO: 3986171 - RNA, 17 nt, Human herpesvirus 6
aaaauuuuauaaugagu

SEQ ID NO: 3986172 - RNA, 23 nt, Human herpesvirus 6
aaacaccucuaaaacaagacaga

SEQ ID NO: 3986173 - RNA, 19 nt, Human herpesvirus 6
aaacagacuuuacuucuac

SEQ ID NO: 3986174 - RNA, 20 nt, Human herpesvirus 6
aaaccaaagcauacucaacc

SEQ ID NO: 3986175 - RNA, 13 nt, Human herpesvirus 6
aaacggccaaccu

SEQ ID NO: 3986176 - RNA, 12 nt, Human herpesvirus 6
aaagaacaugug

SEQ ID NO: 3986177 - RNA, 15 nt, Human herpesvirus 6
aaagaagauuuuccu

SEQ ID NO: 3986178 - RNA, 16 nt, Human herpesvirus 6
aaagaucgcuuuugaa

SEQ ID NO: 3986179 - RNA, 23 nt, Human herpesvirus 6
aaagauuagauuaggggagagac

SEQ ID NO: 3986180 - RNA, 14 nt, Human herpesvirus 6
aaagcagaucgagu

SEQ ID NO: 3986181 - RNA, 20 nt, Human herpesvirus 6
aaagcaucucaaaaaacaua

SEQ ID NO: 3986182 - RNA, 13 nt, Human herpesvirus 6
aaagcgccugccu

SEQ ID NO: 3986183 - RNA, 18 nt, Human herpesvirus 6
aaagcugacuauucaggc

SEQ ID NO: 3986184 - RNA, 12 nt, Human herpesvirus 6
aaaggauguuug

SEQ ID NO: 3986185 - RNA, 13 nt, Human herpesvirus 6
aaaguuuaaagau

SEQ ID NO: 3986186 - RNA, 15 nt, Human herpesvirus 6
aaauaacucagauuc

SEQ ID NO: 3986187 - RNA, 22 nt, Human herpesvirus 6
aaauaauuuuauuaacuguaaa

SEQ ID NO: 3986188 - RNA, 24 nt, Human herpesvirus 6
aaaucaaacucaccgcauauauca

SEQ ID NO: 3986189 - RNA, 13 nt, Human herpesvirus 6
aaaugaauguguu

SEQ ID NO: 3986190 - RNA, 13 nt, Human herpesvirus 6
aaaugcacuguuu

SEQ ID NO: 3986191 - RNA, 21 nt, Human herpesvirus 6
aacaacuuuuuagcuuuuuaa

SEQ ID NO: 3986192 - RNA, 11 nt, Human herpesvirus 6
aacaaguaaau

SEQ ID NO: 3986193 - RNA, 22 nt, Human herpesvirus 6
aacaauauagaagacgcaaaga

SEQ ID NO: 3986194 - RNA, 14 nt, Human herpesvirus 6
aacacagcacauaa

SEQ ID NO: 3986195 - RNA, 15 nt, Human herpesvirus 6
aacagauaguguuuu

SEQ ID NO: 3986196 - RNA, 19 nt, Human herpesvirus 6
aacagauaguguuuucuga

SEQ ID NO: 3986197 - RNA, 17 nt, Human herpesvirus 6
aacagucugacauggaa

SEQ ID NO: 3986198 - RNA, 14 nt, Human herpesvirus 6
aacaucugcuaacg

SEQ ID NO: 3986199 - RNA, 20 nt, Human herpesvirus 6
aaccgguacgcuuuuacuga

SEQ ID NO: 3986200 - RNA, 15 nt, Human herpesvirus 6
aaccuugacagauau

SEQ ID NO: 3986201 - RNA, 22 nt, Human herpesvirus 6
aacgagaacucuaaaaucucgu

SEQ ID NO: 3986202 - RNA, 22 nt, Human herpesvirus 6
aacgagaacucuaacaucucgu

SEQ ID NO: 3986203 - RNA, 15 nt, Human herpesvirus 6
aacgauaugucucug

SEQ ID NO: 3986204 - RNA, 17 nt, Human herpesvirus 6
aacgcaagucacgggca

SEQ ID NO: 3986205 - RNA, 18 nt, Human herpesvirus 6
aacgcagacuaauccaua

SEQ ID NO: 3986206 - RNA, 19 nt, Human herpesvirus 6
aacgcgucaacaaacaauu

SEQ ID NO: 3986207 - RNA, 15 nt, Human herpesvirus 6
aacggagagcuuguu

SEQ ID NO: 3986208 - RNA, 18 nt, Human herpesvirus 6
aacuaaaagucagugggu

SEQ ID NO: 3986209 - RNA, 17 nt, Human herpesvirus 6
aacuaagauugugcagu

SEQ ID NO: 3986210 - RNA, 21 nt, Human herpesvirus 6
aacuacugagugcgaccuguc

SEQ ID NO: 3986211 - RNA, 23 nt, Human herpesvirus 6
aacucauguugccucuggacacg

SEQ ID NO: 3986212 - RNA, 12 nt, Human herpesvirus 6
aacucuaccugg

SEQ ID NO: 3986213 - RNA, 14 nt, Human herpesvirus 6
aacugaauuugcau

SEQ ID NO: 3986214 - RNA, 19 nt, Human herpesvirus 6
aacugccaauuaccgguaa

SEQ ID NO: 3986215 - RNA, 15 nt, Human herpesvirus 6
aacugcuggcugaga

SEQ ID NO: 3986216 - RNA, 16 nt, Human herpesvirus 6
aacugugucuguucaa

SEQ ID NO: 3986217 - RNA, 13 nt, Human herpesvirus 6
aacuuuuaaaaca

SEQ ID NO: 3986218 - RNA, 21 nt, Human herpesvirus 6
aagaaaaagcagcagaugcuu

SEQ ID NO: 3986219 - RNA, 16 nt, Human herpesvirus 6
aagaaacauuauaccu

SEQ ID NO: 3986220 - RNA, 23 nt, Human herpesvirus 6
uagggauacguauauuguguacc

SEQ ID NO: 3986221 - RNA, 18 nt, Human herpesvirus 6
uaggugauugggagcuca

SEQ ID NO: 3986222 - RNA, 21 nt, Human herpesvirus 6
uauaaaaaaagcaaauacuau

SEQ ID NO: 3986223 - RNA, 12 nt, Human herpesvirus 6
uauaaaaacuaa

SEQ ID NO: 3986224 - RNA, 13 nt, Human herpesvirus 6
uauaaauacugaa

SEQ ID NO: 3986225 - RNA, 20 nt, Human herpesvirus 6
uauaaauccgauagccauac

SEQ ID NO: 3986226 - RNA, 19 nt, Human herpesvirus 6
uauaagaacuggugucugu

SEQ ID NO: 3986227 - RNA, 17 nt, Human herpesvirus 6
uauauucgaauguugaa

SEQ ID NO: 3986228 - RNA, 16 nt, Human herpesvirus 6
uauauuggaauuggga

SEQ ID NO: 3986229 - RNA, 18 nt, Human herpesvirus 6
uauauugggggaaaauac

SEQ ID NO: 3986230 - RNA, 14 nt, Human herpesvirus 6
uaucacucauacac

SEQ ID NO: 3986231 - RNA, 23 nt, Human herpesvirus 6
uaucagcacccuaugcaagcuca

SEQ ID NO: 3986232 - RNA, 23 nt, Human herpesvirus 6
uaucgcaagcaaaacacagacgg

SEQ ID NO: 3986233 - RNA, 21 nt, Human herpesvirus 6
uaucucaaauuuuccaaacau

SEQ ID NO: 3986234 - RNA, 17 nt, Human herpesvirus 6
uaucuuuuucuguguuu

SEQ ID NO: 3986235 - RNA, 20 nt, Human herpesvirus 6
uaugaacaggugcuucuuuu

SEQ ID NO: 3986236 - RNA, 20 nt, Human herpesvirus 6
uaugcuaagcagaacggcgg

SEQ ID NO: 3986237 - RNA, 18 nt, Human herpesvirus 6
uaugugcgcguguuagaa

SEQ ID NO: 3986238 - RNA, 16 nt, Human herpesvirus 6
uauucagaggugcuga

SEQ ID NO: 3986239 - RNA, 16 nt, Human herpesvirus 6
uauucucggucuugcu

SEQ ID NO: 3986240 - RNA, 23 nt, Human herpesvirus 6
uauugccgcuucuauauaucaua

SEQ ID NO: 3986241 - RNA, 20 nt, Human herpesvirus 6
uauuguuaacauguacaaac

SEQ ID NO: 3986242 - RNA, 18 nt, Human herpesvirus 6
uauuuucgguguguauuu

SEQ ID NO: 3986243 - RNA, 18 nt, Human herpesvirus 6
ucaaacaccucacaaucu

SEQ ID NO: 3986244 - RNA, 16 nt, Human herpesvirus 6
ucaaaccgcagagcaa

SEQ ID NO: 3986245 - RNA, 20 nt, Human herpesvirus 6
ucacacccauggcgagaaac

SEQ ID NO: 3986246 - RNA, 16 nt, Human herpesvirus 6
ucacauguucuuuauu

SEQ ID NO: 3986247 - RNA, 19 nt, Human herpesvirus 6
ucacguuuugggaaaucug

SEQ ID NO: 3986248 - RNA, 23 nt, Human herpesvirus 6
ucacuccaauccaacgaauacuu

SEQ ID NO: 3986249 - RNA, 18 nt, Human herpesvirus 6
ucagaaauaaaauuucga

SEQ ID NO: 3986250 - RNA, 14 nt, Human herpesvirus 6
ucagaauccaccaa

SEQ ID NO: 3986251 - RNA, 15 nt, Human herpesvirus 6
ucagaccucauauaa

SEQ ID NO: 3986252 - RNA, 15 nt, Human herpesvirus 6
ucagagugaauuccu

SEQ ID NO: 3986253 - RNA, 15 nt, Human herpesvirus 6
ucagauuuggagaaa

SEQ ID NO: 3986254 - RNA, 18 nt, Human herpesvirus 6
ucaucaaauccucuacgu

SEQ ID NO: 3986255 - RNA, 12 nt, Human herpesvirus 6
ucaucaguuucc

SEQ ID NO: 3986256 - RNA, 17 nt, Human herpesvirus 6
ucauuagcauacagaug

SEQ ID NO: 3986257 - RNA, 16 nt, Human herpesvirus 6
uccaauccaauauaac

SEQ ID NO: 3986258 - RNA, 11 nt, Human herpesvirus 6
uccaauccuau

SEQ ID NO: 3986259 - RNA, 13 nt, Human herpesvirus 6
uccaccccucuuc

SEQ ID NO: 3986260 - RNA, 20 nt, Human herpesvirus 6
uccagaggcguggaaagacg

SEQ ID NO: 3986261 - RNA, 20 nt, Human herpesvirus 6
uccaggucuuauauuucaga

SEQ ID NO: 3986262 - RNA, 19 nt, Human herpesvirus 6
uccagugagaacguauaaa

SEQ ID NO: 3986263 - RNA, 23 nt, Human herpesvirus 6
uccccucgguccaaccccuccca

SEQ ID NO: 3986264 - RNA, 17 nt, Human herpesvirus 6
uccgcauaucgccccca

SEQ ID NO: 3986265 - RNA, 18 nt, Human herpesvirus 6
uccgccuguuccacgcgc

SEQ ID NO: 3986266 - RNA, 15 nt, Human herpesvirus 6
uccggccccagagac

SEQ ID NO: 3986267 - RNA, 19 nt, Human herpesvirus 6
uccggcugagcggagugga

SEQ ID NO: 3986268 - RNA, 12 nt, Human herpesvirus 6
uccgucauacaa

SEQ ID NO: 3986269 - RNA, 19 nt, Human herpesvirus 6
uccguuuuucucugcaaaa

SEQ ID NO: 3986270 - RNA, 13 nt, Human herpesvirus 6
uccuauugguuug

SEQ ID NO: 3986271 - RNA, 18 nt, Human herpesvirus 6
uccuccccuguccccucg

SEQ ID NO: 3986272 - RNA, 17 nt, Human herpesvirus 6
uccugggagcucucccu

SEQ ID NO: 3986273 - RNA, 23 nt, Human herpesvirus 6
uccuguuuucccaccuaauaaac

SEQ ID NO: 3986274 - RNA, 23 nt, Human herpesvirus 6
uccuucaugauauuccagacaau

SEQ ID NO: 3986275 - RNA, 19 nt, Human herpesvirus 6
ucgaaaguucaucuuucaa

SEQ ID NO: 3986276 - RNA, 14 nt, Human herpesvirus 6
ucgcgauagucaug

SEQ ID NO: 3986277 - RNA, 16 nt, Human herpesvirus 6
ucgcgauagucaugca

SEQ ID NO: 3986278 - RNA, 22 nt, Human herpesvirus 6
ucgcgcgcgacgugccaccguc

SEQ ID NO: 3986279 - RNA, 22 nt, Human herpesvirus 6
ucgcgcgcgcgggcccuccucg

SEQ ID NO: 3986280 - RNA, 14 nt, Human herpesvirus 6
ucgcggaguggagu

SEQ ID NO: 3986281 - RNA, 14 nt, Human herpesvirus 6
ucgcugacucgccu

SEQ ID NO: 3986282 - RNA, 15 nt, Human herpesvirus 6
ucggccgugaugcac

SEQ ID NO: 3986283 - RNA, 15 nt, Human herpesvirus 6
ucggcugacaacaaa

SEQ ID NO: 3986284 - RNA, 23 nt, Human herpesvirus 6
ucgggaacauagagaaacgagag

SEQ ID NO: 3986285 - RNA, 14 nt, Human herpesvirus 6
ucgggagaggacca

SEQ ID NO: 3986286 - RNA, 18 nt, Human herpesvirus 6
ucguauaaauuuaacuaa

SEQ ID NO: 3986287 - RNA, 11 nt, Human herpesvirus 6
ucgucuccugg

SEQ ID NO: 3986288 - RNA, 15 nt, Human herpesvirus 6
ucuaaaaggcucugu

SEQ ID NO: 3986289 - RNA, 20 nt, Human herpesvirus 6
ucuaaaauuguaauuuugaa

SEQ ID NO: 3986290 - RNA, 16 nt, Human herpesvirus 6
ucuaaauuggucucuu

SEQ ID NO: 3986291 - RNA, 21 nt, Human herpesvirus 6
ucuaccgagagauuuacuguu

SEQ ID NO: 3986292 - RNA, 21 nt, Human herpesvirus 6
ucuacugcaguccagaagucc

SEQ ID NO: 3986293 - RNA, 16 nt, Human herpesvirus 6
ucucgaaaaaacaacg

SEQ ID NO: 3986294 - RNA, 23 nt, Human herpesvirus 6
ucucggcgccggugguaccuguc

SEQ ID NO: 3986295 - RNA, 17 nt, Human herpesvirus 6
ucuucgauccaauaaga

SEQ ID NO: 3986296 - RNA, 23 nt, Human herpesvirus 6
ucuugaaaaaccuuauacagaug

SEQ ID NO: 3986297 - RNA, 20 nt, Human herpesvirus 6
ucuugggacuaggaauacgu

SEQ ID NO: 3986298 - RNA, 23 nt, Human herpesvirus 6
ucuuuauagagcaacucaucaaa

SEQ ID NO: 3986299 - RNA, 15 nt, Human herpesvirus 6
ucuuuauuaaauguu

SEQ ID NO: 3986300 - RNA, 16 nt, Human herpesvirus 6
ugaaaauaucauuaaa

SEQ ID NO: 3986301 - RNA, 17 nt, Human herpesvirus 6
ugaaacuccccagagaa

SEQ ID NO: 3986302 - RNA, 19 nt, Human herpesvirus 6
ugaaagacagaggaaauaa

SEQ ID NO: 3986303 - RNA, 17 nt, Human herpesvirus 6
ugaacgcacuggacauc

SEQ ID NO: 3986304 - RNA, 16 nt, Human herpesvirus 6
ugaacuacugagugcg

SEQ ID NO: 3986305 - RNA, 21 nt, Human herpesvirus 6
ugaacuggcgcgcauguugca

SEQ ID NO: 3986306 - RNA, 18 nt, Human herpesvirus 6
ugaagaaccugaaaucug

SEQ ID NO: 3986307 - RNA, 20 nt, Human herpesvirus 6
ugaauacgaggaggggagac

SEQ ID NO: 3986308 - RNA, 22 nt, Human herpesvirus 6
ugaaugcauaccgccuccgcag

SEQ ID NO: 3986309 - RNA, 15 nt, Human herpesvirus 6
ugaauguguucacag

SEQ ID NO: 3986310 - RNA, 18 nt, Human herpesvirus 6
ugacgccuugauguuucc

SEQ ID NO: 3986311 - RNA, 19 nt, Human herpesvirus 6
ugacgccuugauguuuccu

SEQ ID NO: 3986312 - RNA, 20 nt, Human herpesvirus 6
ugacggcgacaaccgccgcc

SEQ ID NO: 3986313 - RNA, 16 nt, Human herpesvirus 6
ugacguauccucagaa

SEQ ID NO: 3986314 - RNA, 20 nt, Human herpesvirus 6
ugagaucgcauuagucacag

SEQ ID NO: 3986315 - RNA, 15 nt, Human herpesvirus 6
ugagguacaaaacau

SEQ ID NO: 3986316 - RNA, 21 nt, Human herpesvirus 6
ugaguaauugaacauuguaaa

SEQ ID NO: 3986317 - RNA, 20 nt, Human herpesvirus 6
ugauagcgucuuugcauauu

SEQ ID NO: 3986318 - RNA, 19 nt, Human herpesvirus 6
ugaucagcauucacucuuc

SEQ ID NO: 3986319 - RNA, 24 nt, Human herpesvirus 6
ugauccugacugguauccaauuaa

SEQ ID NO: 3986320 - RNA, 17 nt, Human herpesvirus 6
ugauguauggagauguu

SEQ ID NO: 3986321 - RNA, 21 nt, Human herpesvirus 6
ugcaaaacuguuaaaagagaa

SEQ ID NO: 3986322 - RNA, 15 nt, Human herpesvirus 6
ugcaaguuugaauuu

SEQ ID NO: 3986323 - RNA, 21 nt, Human herpesvirus 6
ugcaauuuaaaagaauuuuug

SEQ ID NO: 3986324 - RNA, 13 nt, Human herpesvirus 6
ugcaccuguuacu

SEQ ID NO: 3986325 - RNA, 22 nt, Human herpesvirus 6
ugcagaacaacagcauguaaua

SEQ ID NO: 3986326 - RNA, 22 nt, Human herpesvirus 6
ugcauaugcagacugcuucuua

SEQ ID NO: 3986327 - RNA, 15 nt, Human herpesvirus 6
ugccaaaggaaacca

SEQ ID NO: 3986328 - RNA, 18 nt, Human herpesvirus 6
ugccaaaggaaaccaccg

SEQ ID NO: 3986329 - RNA, 17 nt, Human herpesvirus 6
ugccaccgucugggacc

SEQ ID NO: 3986330 - RNA, 15 nt, Human herpesvirus 6
ugccgagccugugga

SEQ ID NO: 3986331 - RNA, 14 nt, Human herpesvirus 6
ugccgauuaaugug

SEQ ID NO: 3986332 - RNA, 12 nt, Human herpesvirus 6
ugccguaaaucu

SEQ ID NO: 3986333 - RNA, 22 nt, Human herpesvirus 6
ugcuaggacuucguucuugaca

SEQ ID NO: 3986334 - RNA, 16 nt, Human herpesvirus 6
uccucgugcucugccu

SEQ ID NO: 3986335 - RNA, 15 nt, Human herpesvirus 6
uccugaucacagagc

SEQ ID NO: 3986336 - RNA, 11 nt, Human herpesvirus 6
uccugcccagg

SEQ ID NO: 3986337 - RNA, 12 nt, Human herpesvirus 6
uccugcccaggc

SEQ ID NO: 3986338 - RNA, 14 nt, Human herpesvirus 6
uccugcguguuaau

SEQ ID NO: 3986339 - RNA, 20 nt, Human herpesvirus 6
uccugggcauuaguguauaa

SEQ ID NO: 3986340 - RNA, 20 nt, Human herpesvirus 6
ucgagccaaagaaacagaua

SEQ ID NO: 3986341 - RNA, 17 nt, Human herpesvirus 6
ucgaguaauuguggauu

SEQ ID NO: 3986342 - RNA, 16 nt, Human herpesvirus 6
ucgccaagaaaaagaa

SEQ ID NO: 3986343 - RNA, 18 nt, Human herpesvirus 6
ucgcccgauccgccccga

SEQ ID NO: 3986344 - RNA, 23 nt, Human herpesvirus 6
ucgccuggccucccauguaugca

SEQ ID NO: 3986345 - RNA, 22 nt, Human herpesvirus 6
ucgcugcuaucgucuauaacaa

SEQ ID NO: 3986346 - RNA, 20 nt, Human herpesvirus 6
ucggaaaauauuuccugccc

SEQ ID NO: 3986347 - RNA, 21 nt, Human herpesvirus 6
ucggcgcugauuccuguaagg

SEQ ID NO: 3986348 - RNA, 23 nt, Human herpesvirus 6
ucggcucuuugcugacuguacgc

SEQ ID NO: 3986349 - RNA, 19 nt, Human herpesvirus 6
ucggcugacaacaaaggag

SEQ ID NO: 3986350 - RNA, 17 nt, Human herpesvirus 6
ucgggagaggaccaaga

SEQ ID NO: 3986351 - RNA, 13 nt, Human herpesvirus 6
ucguaauggcauu

SEQ ID NO: 3986352 - RNA, 15 nt, Human herpesvirus 6
ucuaaaaucucguaa

SEQ ID NO: 3986353 - RNA, 14 nt, Human herpesvirus 6
ucuaaacacagaug

SEQ ID NO: 3986354 - RNA, 18 nt, Human herpesvirus 6
ucuaacaucucguaacgc

SEQ ID NO: 3986355 - RNA, 20 nt, Human herpesvirus 6
ucuaacucgcgagacaaauc

SEQ ID NO: 3986356 - RNA, 19 nt, Human herpesvirus 6
ucuagaauaucugcuaagu

SEQ ID NO: 3986357 - RNA, 15 nt, Human herpesvirus 6
ucuaugagacuguuu

SEQ ID NO: 3986358 - RNA, 21 nt, Human herpesvirus 6
ucucaagcacaaaaccaggaa

SEQ ID NO: 3986359 - RNA, 14 nt, Human herpesvirus 6
ucucagcuggcuga

SEQ ID NO: 3986360 - RNA, 20 nt, Human herpesvirus 6
ucuccaaaagcgccugccua

SEQ ID NO: 3986361 - RNA, 16 nt, Human herpesvirus 6
ucuccucauggagaau

SEQ ID NO: 3986362 - RNA, 16 nt, Human herpesvirus 6
ucuccugagaagcugg

SEQ ID NO: 3986363 - RNA, 22 nt, Human herpesvirus 6
ucucggaaaacuaaaagucagu

SEQ ID NO: 3986364 - RNA, 16 nt, Human herpesvirus 6
ucucggaaaauuaaag

SEQ ID NO: 3986365 - RNA, 16 nt, Human herpesvirus 6
ucucuguucugccacg

SEQ ID NO: 3986366 - RNA, 14 nt, Human herpesvirus 6
ucugaaaauaaagu

SEQ ID NO: 3986367 - RNA, 11 nt, Human herpesvirus 6
ucugaaagaca

SEQ ID NO: 3986368 - RNA, 14 nt, Human herpesvirus 6
ucugacgaaguuuu

SEQ ID NO: 3986369 - RNA, 18 nt, Human herpesvirus 6
ucugauauggcaaauuuu

SEQ ID NO: 3986370 - RNA, 18 nt, Human herpesvirus 6
ucugauucgacaaaucau

SEQ ID NO: 3986371 - RNA, 21 nt, Human herpesvirus 6
ucuggaugguugugugaguuu

SEQ ID NO: 3986372 - RNA, 14 nt, Human herpesvirus 6
ucuggcacaggcau

SEQ ID NO: 3986373 - RNA, 22 nt, Human herpesvirus 6
ucugggacccacgguggccugg

SEQ ID NO: 3986374 - RNA, 22 nt, Human herpesvirus 6
ucuuauuaauuuccugaucaca

SEQ ID NO: 3986375 - RNA, 16 nt, Human herpesvirus 6
ucuucaauaaaaacuc

SEQ ID NO: 3986376 - RNA, 21 nt, Human herpesvirus 6
ucuuccguacuguaaguaagc

SEQ ID NO: 3986377 - RNA, 19 nt, Human herpesvirus 6
ucuuuugucguuauaaaau

SEQ ID NO: 3986378 - RNA, 13 nt, Human herpesvirus 6
ucuuuuuaacuag

SEQ ID NO: 3986379 - RNA, 20 nt, Human herpesvirus 6
ugaaaaaaaaugaaggggaa

SEQ ID NO: 3986380 - RNA, 15 nt, Human herpesvirus 6
ugaacuacugagugc

SEQ ID NO: 3986381 - RNA, 13 nt, Human herpesvirus 6
ugaacuguuucca

SEQ ID NO: 3986382 - RNA, 16 nt, Human herpesvirus 6
ugaacuuuguaaagaa

SEQ ID NO: 3986383 - RNA, 21 nt, Human herpesvirus 6
ugaacuuuuuucggauuuuga

SEQ ID NO: 3986384 - RNA, 21 nt, Human herpesvirus 6
ugaagaucacgcccauauguu

SEQ ID NO: 3986385 - RNA, 14 nt, Human herpesvirus 6
ugaaguaaaacuau

SEQ ID NO: 3986386 - RNA, 12 nt, Human herpesvirus 6
ugaaugugcuuu

SEQ ID NO: 3986387 - RNA, 15 nt, Human herpesvirus 6
ugacuauuaaacuaa

SEQ ID NO: 3986388 - RNA, 23 nt, Human herpesvirus 6
ugacuguguguugaauguuacag

SEQ ID NO: 3986389 - RNA, 13 nt, Human herpesvirus 6
ugagcucuccugg

SEQ ID NO: 3986390 - RNA, 17 nt, Human herpesvirus 6
ugagguguuuccugccc

SEQ ID NO: 3986391 - RNA, 12 nt, Human herpesvirus 6
ugaguaauugaa

SEQ ID NO: 3986392 - RNA, 17 nt, Human herpesvirus 6
ugaguuuaucgugcaau

SEQ ID NO: 3986393 - RNA, 16 nt, Human herpesvirus 6
ugauacuauaaacaau

SEQ ID NO: 3986394 - RNA, 18 nt, Human herpesvirus 6
ugaucgacauuuguauuu

SEQ ID NO: 3986395 - RNA, 20 nt, Human herpesvirus 6
ugauggguuuggccaugccg

SEQ ID NO: 3986396 - RNA, 15 nt, Human herpesvirus 6
ugauuccuucaaugu

SEQ ID NO: 3986397 - RNA, 18 nt, Human herpesvirus 6
ugauuuuguuuucuacgu

SEQ ID NO: 3986398 - RNA, 14 nt, Human herpesvirus 6
ugcaaacccgacaa

SEQ ID NO: 3986399 - RNA, 18 nt, Human herpesvirus 6
ugcacuccguuaaucuaa

SEQ ID NO: 3986400 - RNA, 16 nt, Human herpesvirus 6
ugcagaacaucucaga

SEQ ID NO: 3986401 - RNA, 19 nt, Human herpesvirus 6
ugcagacgcugaaaucauu

SEQ ID NO: 3986402 - RNA, 17 nt, Human herpesvirus 6
ugcagacuucacuuugg

SEQ ID NO: 3986403 - RNA, 24 nt, Human herpesvirus 6
ugcagacuucacuuugggcgaugg

SEQ ID NO: 3986404 - RNA, 18 nt, Human herpesvirus 6
ugcaguuuaaggauaaga

SEQ ID NO: 3986405 - RNA, 11 nt, Human herpesvirus 6
ugcauacauaa

SEQ ID NO: 3986406 - RNA, 14 nt, Human herpesvirus 6
ugcauaugucuguu

SEQ ID NO: 3986407 - RNA, 18 nt, Human herpesvirus 6
ugcauuaacccuggguga

SEQ ID NO: 3986408 - RNA, 15 nt, Human herpesvirus 6
ugcauuuuguauuua

SEQ ID NO: 3986409 - RNA, 19 nt, Human herpesvirus 6
ugccaaaggaaaccaccgg

SEQ ID NO: 3986410 - RNA, 11 nt, Human herpesvirus 6
ugcgaccuggc

SEQ ID NO: 3986411 - RNA, 14 nt, Human herpesvirus 6
ugcuugucucacaa

SEQ ID NO: 3986412 - RNA, 16 nt, Human herpesvirus 6
uggaaaacuaugugca

SEQ ID NO: 3986413 - RNA, 23 nt, Human herpesvirus 6
uggaagcgagcgggcuaauguau

SEQ ID NO: 3986414 - RNA, 16 nt, Human herpesvirus 6
uggaccgaggggacag

SEQ ID NO: 3986415 - RNA, 22 nt, Human herpesvirus 6
uggacggcggggggacgggcgg

SEQ ID NO: 3986416 - RNA, 19 nt, Human herpesvirus 6
uggagcagcuuccacgcga

SEQ ID NO: 3986417 - RNA, 20 nt, Human herpesvirus 6
uggaugcugaugaauuuaug

SEQ ID NO: 3986418 - RNA, 17 nt, Human herpesvirus 6
uggcaaacguaugcagu

SEQ ID NO: 3986419 - RNA, 18 nt, Human herpesvirus 6
uggcagaggggaagggaa

SEQ ID NO: 3986420 - RNA, 14 nt, Human herpesvirus 6
uggcagucugcucg

SEQ ID NO: 3986421 - RNA, 17 nt, Human herpesvirus 6
uggcccuacuacagugg

SEQ ID NO: 3986422 - RNA, 13 nt, Human herpesvirus 6
uggcugugcuauc

SEQ ID NO: 3986423 - RNA, 23 nt, Human herpesvirus 6
ugggaucuucugcuaauucauag

SEQ ID NO: 3986424 - RNA, 20 nt, Human herpesvirus 6
ugggauguccauuucuucga

SEQ ID NO: 3986425 - RNA, 17 nt, Human herpesvirus 6
uggggucuuuccugcac

SEQ ID NO: 3986426 - RNA, 18 nt, Human herpesvirus 6
ugguagcuauuaugugaa

SEQ ID NO: 3986427 - RNA, 14 nt, Human herpesvirus 6
ugguuaugacaaag

SEQ ID NO: 3986428 - RNA, 15 nt, Human herpesvirus 6
ugguuuacagcacuu

SEQ ID NO: 3986429 - RNA, 19 nt, Human herpesvirus 6
uguaaauagguaaacuguu

SEQ ID NO: 3986430 - RNA, 18 nt, Human herpesvirus 6
uguaagauuaaaugugaa

SEQ ID NO: 3986431 - RNA, 12 nt, Human herpesvirus 6
uguaauaagaaa

SEQ ID NO: 3986432 - RNA, 13 nt, Human herpesvirus 6
uguaauaagaaaa

SEQ ID NO: 3986433 - RNA, 14 nt, Human herpesvirus 6
uguaauaauugaug

SEQ ID NO: 3986434 - RNA, 17 nt, Human herpesvirus 6
uguaauacaucaacaaa

SEQ ID NO: 3986435 - RNA, 15 nt, Human herpesvirus 6
uguaccuagcagcaa

SEQ ID NO: 3986436 - RNA, 19 nt, Human herpesvirus 6
uguaccuagcagcaaauaa

SEQ ID NO: 3986437 - RNA, 17 nt, Human herpesvirus 6
uguacgaugaacuacug

SEQ ID NO: 3986438 - RNA, 20 nt, Human herpesvirus 6
uguaguuuaguaugggugag

SEQ ID NO: 3986439 - RNA, 15 nt, Human herpesvirus 6
uguaucugugaacaa

SEQ ID NO: 3986440 - RNA, 17 nt, Human herpesvirus 6
uguauugaacuuuguaa

SEQ ID NO: 3986441 - RNA, 19 nt, Human herpesvirus 6
ugucggucagacagugagu

SEQ ID NO: 3986442 - RNA, 24 nt, Human herpesvirus 6
ugucgugguggucuuguuaucuua

SEQ ID NO: 3986443 - RNA, 17 nt, Human herpesvirus 6
ugucguuguaguuuuua

SEQ ID NO: 3986444 - RNA, 21 nt, Human herpesvirus 6
ugucugcaguggucaugaucu

SEQ ID NO: 3986445 - RNA, 20 nt, Human herpesvirus 6
ugugauuccuucggggacag

SEQ ID NO: 3986446 - RNA, 22 nt, Human herpesvirus 6
ugugauucugcauuuauaucaa

SEQ ID NO: 3986447 - RNA, 17 nt, Human herpesvirus 6
ugugcaugaaaauauca

SEQ ID NO: 3986448 - RNA, 15 nt, Human herpesvirus 6
ugugcgauuuacugg

SEQ ID NO: 3986449 - RNA, 10 nt, Human herpesvirus 6
uguggcucuc

SEQ ID NO: 3986450 - RNA, 14 nt, Human herpesvirus 6
uguguauuauguaa

SEQ ID NO: 3986451 - RNA, 14 nt, Human herpesvirus 6
uguguuucugucuu

SEQ ID NO: 3986452 - RNA, 18 nt, Human herpesvirus 6
uguugaguaauugaacau

SEQ ID NO: 3986453 - RNA, 13 nt, Human herpesvirus 6
uguuuccugccca

SEQ ID NO: 3986454 - RNA, 21 nt, Human herpesvirus 6
uguuucgccaagaaaaagaaa

SEQ ID NO: 3986455 - RNA, 20 nt, Human herpesvirus 6
uguuugaggcguugugcuga

SEQ ID NO: 3986456 - RNA, 15 nt, Human herpesvirus 6
uguuugcaucaguga

SEQ ID NO: 3986457 - RNA, 19 nt, Human herpesvirus 6
uguuuucgguuuucuuaca

SEQ ID NO: 3986458 - RNA, 16 nt, Human herpesvirus 6
uuaaaccucuguagau

SEQ ID NO: 3986459 - RNA, 15 nt, Human herpesvirus 6
uuaaacuaugcaaac

SEQ ID NO: 3986460 - RNA, 12 nt, Human herpesvirus 6
uuaaauauuaau

SEQ ID NO: 3986461 - RNA, 15 nt, Human herpesvirus 6
uuaacauccaaaaua

SEQ ID NO: 3986462 - RNA, 18 nt, Human herpesvirus 6
uuaacgcagcaacaaucc

SEQ ID NO: 3986463 - RNA, 17 nt, Human herpesvirus 6
uuaauaaaggauguuug

SEQ ID NO: 3986464 - RNA, 12 nt, Human herpesvirus 6
uuaauaagaaag

SEQ ID NO: 3986465 - RNA, 12 nt, Human herpesvirus 6
uuaaugcauuca

SEQ ID NO: 3986466 - RNA, 19 nt, Human herpesvirus 6
uuaaugucacugucgaaua

SEQ ID NO: 3986467 - RNA, 19 nt, Human herpesvirus 6
uuacaacccccgauucaga

SEQ ID NO: 3986468 - RNA, 19 nt, Human herpesvirus 6
uuacacuuucuuguaguau

SEQ ID NO: 3986469 - RNA, 23 nt, Human herpesvirus 6
uuacaucaacuauuuaacaucca

SEQ ID NO: 3986470 - RNA, 19 nt, Human herpesvirus 6
uuaccauauauuggcaugu

SEQ ID NO: 3986471 - RNA, 14 nt, Human herpesvirus 6
uuaccuauagucaa

SEQ ID NO: 3986472 - RNA, 20 nt, Human herpesvirus 6
uuacucaccugcgucaaugc

SEQ ID NO: 3986473 - RNA, 16 nt, Human herpesvirus 6
uuagaaauuacauaag

SEQ ID NO: 3986474 - RNA, 13 nt, Human herpesvirus 6
uuagaauguuugg

SEQ ID NO: 3986475 - RNA, 17 nt, Human herpesvirus 6
uuagagaaaagugcaag

SEQ ID NO: 3986476 - RNA, 14 nt, Human herpesvirus 6
uuauaaaaccgauc

SEQ ID NO: 3986477 - RNA, 12 nt, Human herpesvirus 6
uuauaauacacu

SEQ ID NO: 3986478 - RNA, 15 nt, Human herpesvirus 6
uuauacuguuguaaa

SEQ ID NO: 3986479 - RNA, 13 nt, Human herpesvirus 6
uuauuaacuguaa

SEQ ID NO: 3986480 - RNA, 21 nt, Human herpesvirus 6
uuauuagggauacguauauug

SEQ ID NO: 3986481 - RNA, 18 nt, Human herpesvirus 6
uucaacauuccaacuuuc

SEQ ID NO: 3986482 - RNA, 23 nt, Human herpesvirus 6
uucacugaccguuguaagaagaa

SEQ ID NO: 3986483 - RNA, 14 nt, Human herpesvirus 6
uucagucucagcaa

SEQ ID NO: 3986484 - RNA, 20 nt, Human herpesvirus 6
uuccaagacauguacaucaa

SEQ ID NO: 3986485 - RNA, 19 nt, Human herpesvirus 6
uuccacgcauagacaaacc

SEQ ID NO: 3986486 - RNA, 20 nt, Human herpesvirus 6
uuccaggcggcaugaauucc

SEQ ID NO: 3986487 - RNA, 16 nt, Human herpesvirus 6
uuccccagcuguguuu

SEQ ID NO: 3986488 - RNA, 22 nt, Human herpesvirus 6
uucccgccaaggcuaugugucu

SEQ ID NO: 3986489 - RNA, 20 nt, Human herpesvirus 6
uuccgauacagcaccaucaa

SEQ ID NO: 3986490 - RNA, 21 nt, Human herpesvirus 6
uuccucgcgguauaaugcaug

SEQ ID NO: 3986491 - RNA, 13 nt, Human herpesvirus 6
uuccugcccaggc

SEQ ID NO: 3986492 - RNA, 14 nt, Human herpesvirus 6
uuccugcccaggcg

SEQ ID NO: 3986493 - RNA, 17 nt, Human herpesvirus 6
uucgacuucaaacaccu

SEQ ID NO: 3986494 - RNA, 18 nt, Human herpesvirus 6
uucgauccaauaagaaac

SEQ ID NO: 3986495 - RNA, 20 nt, Human herpesvirus 6
uucgggacaaaaccgaggca

SEQ ID NO: 3986496 - RNA, 17 nt, Human herpesvirus 6
uucgucgaguuguauua

SEQ ID NO: 3986497 - RNA, 16 nt, Human herpesvirus 6
uucuauguaaacuucu

SEQ ID NO: 3986498 - RNA, 15 nt, Human herpesvirus 6
uucuauguuauguaa

SEQ ID NO: 3986499 - RNA, 15 nt, Human herpesvirus 6
uucucuaaaaacuaa

SEQ ID NO: 3986500 - RNA, 20 nt, Human herpesvirus 6
uucucugcaaaacaaaggua

SEQ ID NO: 3986501 - RNA, 23 nt, Human herpesvirus 6
uucuggcacaggcauagcagcaa

SEQ ID NO: 3986502 - RNA, 22 nt, Human herpesvirus 6
uucuuacaacaggcuugugaaa

SEQ ID NO: 3986503 - RNA, 18 nt, Human herpesvirus 6
uucuuacacaaauugacc

SEQ ID NO: 3986504 - RNA, 14 nt, Human herpesvirus 6
uucuuaucaaaucg

SEQ ID NO: 3986505 - RNA, 17 nt, Human herpesvirus 6
uucuuaucaaaucgagu

SEQ ID NO: 3986506 - RNA, 20 nt, Human herpesvirus 6
uucuuauuuaccuuccugag

SEQ ID NO: 3986507 - RNA, 17 nt, Human herpesvirus 6
uucuucaaaaaaagaag

SEQ ID NO: 3986508 - RNA, 20 nt, Human herpesvirus 6
uucuucgaguuuuuuuugaa

SEQ ID NO: 3986509 - RNA, 15 nt, Human herpesvirus 6
uugaaaucacaccaa

SEQ ID NO: 3986510 - RNA, 20 nt, Human herpesvirus 6
uugaauaacaaacuauauug

SEQ ID NO: 3986511 - RNA, 18 nt, Human herpesvirus 6
uugaauguuuaaaguuuu

SEQ ID NO: 3986512 - RNA, 19 nt, Human herpesvirus 6
uugauaaugauauaguuuu

SEQ ID NO: 3986513 - RNA, 16 nt, Human herpesvirus 6
uugaugccaaagcuuu

SEQ ID NO: 3986514 - RNA, 21 nt, Human herpesvirus 6
uugauguuuccugaauuaaaa

SEQ ID NO: 3986515 - RNA, 15 nt, Human herpesvirus 6
uugauuuacaaggca

SEQ ID NO: 3986516 - RNA, 19 nt, Human herpesvirus 6
uugcaauuuccugucaugu

SEQ ID NO: 3986517 - RNA, 19 nt, Human herpesvirus 6
uugcagacgcugaaaucau

SEQ ID NO: 3986518 - RNA, 13 nt, Human herpesvirus 6
uugcgauucuaau

SEQ ID NO: 3986519 - RNA, 19 nt, Human herpesvirus 6
uuggccuucgguacaguga

SEQ ID NO: 3986520 - RNA, 14 nt, Human herpesvirus 6
uugggacauguaua

SEQ ID NO: 3986521 - RNA, 19 nt, Human herpesvirus 6
uuguaaauagguaaacugu

SEQ ID NO: 3986522 - RNA, 20 nt, Human herpesvirus 6
uuguaagaagaaaaaaacac

SEQ ID NO: 3986523 - RNA, 17 nt, Human herpesvirus 6
uuguaaucaaucaaggu

SEQ ID NO: 3986524 - RNA, 22 nt, Human herpesvirus 6
uuguaguauaucuagauaaacg

SEQ ID NO: 3986525 - RNA, 16 nt, Human herpesvirus 6
uuguugaguuucagca

SEQ ID NO: 3986526 - RNA, 22 nt, Human herpesvirus 6
uuuaaccauucguuuuauugaa

SEQ ID NO: 3986527 - RNA, 18 nt, Human herpesvirus 6
uuuaaugagaggacaguc

SEQ ID NO: 3986528 - RNA, 22 nt, Human herpesvirus 6
uuuaauuacggaacaaggccaa

SEQ ID NO: 3986529 - RNA, 16 nt, Human herpesvirus 6
uuuacaauguucaauu

SEQ ID NO: 3986530 - RNA, 18 nt, Human herpesvirus 6
uuuacauagaaauuacaa

SEQ ID NO: 3986531 - RNA, 21 nt, Human herpesvirus 6
uuuaccaccagucaggaaaaa

SEQ ID NO: 3986532 - RNA, 20 nt, Human herpesvirus 6
uuuaguaugggugagugcau

SEQ ID NO: 3986533 - RNA, 21 nt, Human herpesvirus 6
uuuaguaugggugagugcauu

SEQ ID NO: 3986534 - RNA, 14 nt, Human herpesvirus 6
uuuaucgauguaga

SEQ ID NO: 3986535 - RNA, 16 nt, Human herpesvirus 6
uuucaaaauugaguuu

SEQ ID NO: 3986536 - RNA, 20 nt, Human herpesvirus 6
uuucacgugaaauaaaguuu

SEQ ID NO: 3986537 - RNA, 23 nt, Human herpesvirus 6
uuucacgugcacgagaucuguuc

SEQ ID NO: 3986538 - RNA, 14 nt, Human herpesvirus 6
uuuccugcccaggc

SEQ ID NO: 3986539 - RNA, 17 nt, Human herpesvirus 6
uuucgacaauccuaauu

SEQ ID NO: 3986540 - RNA, 16 nt, Human herpesvirus 6
uuucuaaaaucaaaaa

SEQ ID NO: 3986541 - RNA, 12 nt, Human herpesvirus 6
uuugaacuuuuu

SEQ ID NO: 3986542 - RNA, 13 nt, Human herpesvirus 6
uuuguacacuuua

SEQ ID NO: 3986543 - RNA, 14 nt, Human herpesvirus 6
uuuguguuuguaaa

SEQ ID NO: 3986544 - RNA, 20 nt, Human herpesvirus 6
uuuguuucagcguauucaga

SEQ ID NO: 3986545 - RNA, 19 nt, Human herpesvirus 6
uuuguuuucuacguagaua

SEQ ID NO: 3986546 - RNA, 15 nt, Human herpesvirus 6
uuuuagaaacauuug

SEQ ID NO: 3986547 - RNA, 20 nt, Human herpesvirus 6
uuuuaucaugcccgaaugug

SEQ ID NO: 3986548 - RNA, 22 nt, Human herpesvirus 6
uuuuccgaaaggugaaaugaau

SEQ ID NO: 3986549 - RNA, 14 nt, Human herpesvirus 6
uuuugaaaaaacag

SEQ ID NO: 3986550 - RNA, 16 nt, Human herpesvirus 6
uuuugggauacauaau

SEQ ID NO: 3986551 - RNA, 23 nt, Human herpesvirus 6
uuuuguauuauguaauacaucaa

SEQ ID NO: 3986552 - RNA, 20 nt, Human herpesvirus 6
uuuuuaaaaaaaaauaaaac

SEQ ID NO: 3986553 - RNA, 13 nt, Human herpesvirus 6
uuuuuaacuaggu

SEQ ID NO: 3986554 - RNA, 13 nt, Human herpesvirus 6
uuuuuaauuaaaa

SEQ ID NO: 3986555 - RNA, 20 nt, Human herpesvirus 6
uuuuuauuuuauaauacacu

SEQ ID NO: 3986556 - RNA, 17 nt, Human herpesvirus 6
uuuuugucagguuugaa

SEQ ID NO: 3986557 - RNA, 16 nt, Human herpesvirus 6
agaauuuuuguagcaa

SEQ ID NO: 3986558 - RNA, 20 nt, Human herpesvirus 6
agacauugcuuucucuuuuu

SEQ ID NO: 3986559 - RNA, 17 nt, Human herpesvirus 6
agaccguagcaaaauuc

SEQ ID NO: 3986560 - RNA, 14 nt, Human herpesvirus 6
agacgccacgggca

SEQ ID NO: 3986561 - RNA, 17 nt, Human herpesvirus 6
agacgggccuccgccac

SEQ ID NO: 3986562 - RNA, 17 nt, Human herpesvirus 6
agacuacagacucccca

SEQ ID NO: 3986563 - RNA, 22 nt, Human herpesvirus 6
agacuccuacaauacgguuugu

SEQ ID NO: 3986564 - RNA, 20 nt, Human herpesvirus 6
agacugguugaguuuccugc

SEQ ID NO: 3986565 - RNA, 20 nt, Human herpesvirus 6
agagaacugucuugcagcug

SEQ ID NO: 3986566 - RNA, 22 nt, Human herpesvirus 6
agagacgugauacuauaaacaa

SEQ ID NO: 3986567 - RNA, 13 nt, Human herpesvirus 6
agagacugguuga

SEQ ID NO: 3986568 - RNA, 14 nt, Human herpesvirus 6
agagauguuucccg

SEQ ID NO: 3986569 - RNA, 18 nt, Human herpesvirus 6
agaggaagauagcagaau

SEQ ID NO: 3986570 - RNA, 14 nt, Human herpesvirus 6
agauaagagaguuu

SEQ ID NO: 3986571 - RNA, 15 nt, Human herpesvirus 6
agauacauagauuuu

SEQ ID NO: 3986572 - RNA, 22 nt, Human herpesvirus 6
agauauauacuuucaaguguuu

SEQ ID NO: 3986573 - RNA, 12 nt, Human herpesvirus 6
agaucagugggu

SEQ ID NO: 3986574 - RNA, 21 nt, Human herpesvirus 6
agauccgucucucagcuggcu

SEQ ID NO: 3986575 - RNA, 21 nt, Human herpesvirus 6
agaucgcuuuugaaauugaaa

SEQ ID NO: 3986576 - RNA, 17 nt, Human herpesvirus 6
agaucuggugaauguuu

SEQ ID NO: 3986577 - RNA, 18 nt, Human herpesvirus 6
agaucuguucgaaaaagu

SEQ ID NO: 3986578 - RNA, 15 nt, Human herpesvirus 6
agaucuuuauggagg

SEQ ID NO: 3986579 - RNA, 21 nt, Human herpesvirus 6
agaugaauugugcguguaauu

SEQ ID NO: 3986580 - RNA, 19 nt, Human herpesvirus 6
agauguguauuauguaaau

SEQ ID NO: 3986581 - RNA, 13 nt, Human herpesvirus 6
aucaugcugugag

SEQ ID NO: 3986582 - RNA, 20 nt, Human herpesvirus 6
auccacgaacguagacaguc

SEQ ID NO: 3986583 - RNA, 12 nt, Human herpesvirus 6
aucccuaauaaa

SEQ ID NO: 3986584 - RNA, 15 nt, Human herpesvirus 6
auccgcuccgcgccc

SEQ ID NO: 3986585 - RNA, 20 nt, Human herpesvirus 6
auccuaaauaccaauuccuu

SEQ ID NO: 3986586 - RNA, 17 nt, Human herpesvirus 6
aucgagaaucuuccuuu

SEQ ID NO: 3986587 - RNA, 22 nt, Human herpesvirus 6
aucgauucuguaauuuugaaau

SEQ ID NO: 3986588 - RNA, 15 nt, Human herpesvirus 6
aucgcuuaaagaaaa

SEQ ID NO: 3986589 - RNA, 22 nt, Human herpesvirus 6
aucgggcccggggacggacagg

SEQ ID NO: 3986590 - RNA, 15 nt, Human herpesvirus 6
aucguccccuuggcu

SEQ ID NO: 3986591 - RNA, 12 nt, Human herpesvirus 6
aucuauaugcau

SEQ ID NO: 3986592 - RNA, 14 nt, Human herpesvirus 6
aucucuaugagacu

SEQ ID NO: 3986593 - RNA, 21 nt, Human herpesvirus 6
aucucuauugguuaaaaggaa

SEQ ID NO: 3986594 - RNA, 12 nt, Human herpesvirus 6
aucuguccagcu

SEQ ID NO: 3986595 - RNA, 22 nt, Human herpesvirus 6
aucuuaccguaaacaaauucuu

SEQ ID NO: 3986596 - RNA, 16 nt, Human herpesvirus 6
aucuuccacugaagca

SEQ ID NO: 3986597 - RNA, 16 nt, Human herpesvirus 6
aucuucccuuuuacaa

SEQ ID NO: 3986598 - RNA, 16 nt, Human herpesvirus 6
aucuuccguacuguaa

SEQ ID NO: 3986599 - RNA, 19 nt, Human herpesvirus 6
aucuucggauucgcaagcu

SEQ ID NO: 3986600 - RNA, 13 nt, Human herpesvirus 6
aucuucuuugugc

SEQ ID NO: 3986601 - RNA, 16 nt, Human herpesvirus 6
augaaacucuuugaac

SEQ ID NO: 3986602 - RNA, 15 nt, Human herpesvirus 6
augaacuacugagug

SEQ ID NO: 3986603 - RNA, 15 nt, Human herpesvirus 6
augaagauuugacau

SEQ ID NO: 3986604 - RNA, 12 nt, Human herpesvirus 6
augaauguguuc

SEQ ID NO: 3986605 - RNA, 14 nt, Human herpesvirus 6
augacaucugcaaa

SEQ ID NO: 3986606 - RNA, 20 nt, Human herpesvirus 6
augagggguaugucugugca

SEQ ID NO: 3986607 - RNA, 20 nt, Human herpesvirus 6
augauagggaauauguuguu

SEQ ID NO: 3986608 - RNA, 22 nt, Human herpesvirus 6
augcauucacaaggaaugugca

SEQ ID NO: 3986609 - RNA, 16 nt, Human herpesvirus 6
augccauaaagaacac

SEQ ID NO: 3986610 - RNA, 15 nt, Human herpesvirus 6
augcgaaucugccga

SEQ ID NO: 3986611 - RNA, 15 nt, Human herpesvirus 6
augcgagcaaaaaau

SEQ ID NO: 3986612 - RNA, 15 nt, Human herpesvirus 6
augcguugcauuuug

SEQ ID NO: 3986613 - RNA, 16 nt, Human herpesvirus 6
auggaggaauggaaaa

SEQ ID NO: 3986614 - RNA, 22 nt, Human herpesvirus 6
auggcgaugaccgcuaaauuga

SEQ ID NO: 3986615 - RNA, 19 nt, Human herpesvirus 6
augucguucuuaacucauc

SEQ ID NO: 3986616 - RNA, 10 nt, Human herpesvirus 6
augucucgcg

SEQ ID NO: 3986617 - RNA, 13 nt, Human herpesvirus 6
augugauugucuu

SEQ ID NO: 3986618 - RNA, 23 nt, Human herpesvirus 6
auguguauuauguaaauaugcuu

SEQ ID NO: 3986619 - RNA, 22 nt, Human herpesvirus 6
auguguuuuucuuuuacaggaa

SEQ ID NO: 3986620 - RNA, 23 nt, Human herpesvirus 6
auguguuuuucuuuuacaggaag

SEQ ID NO: 3986621 - RNA, 18 nt, Human herpesvirus 6
auguucuuuauuaaaugu

SEQ ID NO: 3986622 - RNA, 22 nt, Human herpesvirus 6
auguuggcgccaaaaaaauaca

SEQ ID NO: 3986623 - RNA, 16 nt, Human herpesvirus 6
auguuuuccuuuauga

SEQ ID NO: 3986624 - RNA, 15 nt, Human herpesvirus 6
auuaacaaauuacaa

SEQ ID NO: 3986625 - RNA, 16 nt, Human herpesvirus 6
auuaacaaauuacaau

SEQ ID NO: 3986626 - RNA, 18 nt, Human herpesvirus 6
auuaaucguuacaaaauu

SEQ ID NO: 3986627 - RNA, 13 nt, Human herpesvirus 6
auuaauuaagugc

SEQ ID NO: 3986628 - RNA, 20 nt, Human herpesvirus 6
auuacucaacauuaaaaaaa

SEQ ID NO: 3986629 - RNA, 18 nt, Human herpesvirus 6
auuagauaagagaguuuc

SEQ ID NO: 3986630 - RNA, 18 nt, Human herpesvirus 6
auuagucuuaaucaacug

SEQ ID NO: 3986631 - RNA, 12 nt, Human herpesvirus 6
auuauguaaaua

SEQ ID NO: 3986632 - RNA, 22 nt, Human herpesvirus 6
auuaugugacucggaacauaau

SEQ ID NO: 3986633 - RNA, 15 nt, Human herpesvirus 6
auucacauaagacuu

SEQ ID NO: 3986634 - RNA, 16 nt, Human herpesvirus 6
auucacauuaccucug

SEQ ID NO: 3986635 - RNA, 13 nt, Human herpesvirus 6
auuccuucaaugu

SEQ ID NO: 3986636 - RNA, 15 nt, Human herpesvirus 6
auugacuacagcugc

SEQ ID NO: 3986637 - RNA, 21 nt, Human herpesvirus 6
auugacuacagcugcaggggu

SEQ ID NO: 3986638 - RNA, 22 nt, Human herpesvirus 6
auuguauauauagcuguaaaua

SEQ ID NO: 3986639 - RNA, 20 nt, Human herpesvirus 6
auuucagguucuucaaaaaa

SEQ ID NO: 3986640 - RNA, 19 nt, Human herpesvirus 6
auuucgguuucgucgcaaa

SEQ ID NO: 3986641 - RNA, 16 nt, Human herpesvirus 6
auuucuaaacacagau

SEQ ID NO: 3986642 - RNA, 16 nt, Human herpesvirus 6
auuucuacaaaaauac

SEQ ID NO: 3986643 - RNA, 23 nt, Human herpesvirus 6
auuucuagcgaucauaaaacugc

SEQ ID NO: 3986644 - RNA, 23 nt, Human herpesvirus 6
auuucuguuacugcgagcccgua

SEQ ID NO: 3986645 - RNA, 20 nt, Human herpesvirus 6
auuucuuccuuucucugcgc

SEQ ID NO: 3986646 - RNA, 18 nt, Human herpesvirus 6
auuugacaauaaacauga

SEQ ID NO: 3986647 - RNA, 14 nt, Human herpesvirus 6
auuugcugaugcga

SEQ ID NO: 3986648 - RNA, 16 nt, Human herpesvirus 6
auuuuaccuuuggaaa

SEQ ID NO: 3986649 - RNA, 16 nt, Human herpesvirus 6
auuuuauaacgacaaa

SEQ ID NO: 3986650 - RNA, 17 nt, Human herpesvirus 6
auuuuauuggcaaccug

SEQ ID NO: 3986651 - RNA, 19 nt, Human herpesvirus 6
auuuucggugcacauggaa

SEQ ID NO: 3986652 - RNA, 13 nt, Human herpesvirus 6
auuuucuuaguaa

SEQ ID NO: 3986653 - RNA, 18 nt, Human herpesvirus 6
auuuugaugccaaagcuu

SEQ ID NO: 3986654 - RNA, 15 nt, Human herpesvirus 6
auuuugggacaagau

SEQ ID NO: 3986655 - RNA, 22 nt, Human herpesvirus 6
auuuuuauguugugaucaagug

SEQ ID NO: 3986656 - RNA, 14 nt, Human herpesvirus 6
caaaaauacugcag

SEQ ID NO: 3986657 - RNA, 18 nt, Human herpesvirus 6
caaaacauaucgagccaa

SEQ ID NO: 3986658 - RNA, 22 nt, Human herpesvirus 6
caaaauuugaaauaucagaaau

SEQ ID NO: 3986659 - RNA, 21 nt, Human herpesvirus 6
caaacuacggaaaaucucaaa

SEQ ID NO: 3986660 - RNA, 19 nt, Human herpesvirus 6
caaaggaaaccaccggcua

SEQ ID NO: 3986661 - RNA, 19 nt, Human herpesvirus 6
caaaguucaguaacauuua

SEQ ID NO: 3986662 - RNA, 20 nt, Human herpesvirus 6
caaauguaacuuuuuguauu

SEQ ID NO: 3986663 - RNA, 16 nt, Human herpesvirus 6
caaauuacaaucaugu

SEQ ID NO: 3986664 - RNA, 16 nt, Human herpesvirus 6
caacaacaauaacaac

SEQ ID NO: 3986665 - RNA, 20 nt, Human herpesvirus 6
caacacuuuuaccaugcgcc

SEQ ID NO: 3986666 - RNA, 20 nt, Human herpesvirus 6
caacaggcuugugaaagacc

SEQ ID NO: 3986667 - RNA, 23 nt, Human herpesvirus 6
caagaaaucauuuugaaaugucg

SEQ ID NO: 3986668 - RNA, 13 nt, Human herpesvirus 6
caagaacagagag

SEQ ID NO: 3986669 - RNA, 21 nt, Human herpesvirus 6
caagaaugccgugaauugugu

SEQ ID NO: 3986670 - RNA, 22 nt, Human herpesvirus 6
caagauuguguuucugucuuua

SEQ ID NO: 3986671 - RNA, 20 nt, Human herpesvirus 6
caagccaugacaagaaaggu

SEQ ID NO: 3986672 - RNA, 14 nt, Human herpesvirus 6
caagcuaacaagaa

SEQ ID NO: 3986673 - RNA, 19 nt, Human herpesvirus 6
caaggaaugugcagagugc

SEQ ID NO: 3986674 - RNA, 16 nt, Human herpesvirus 6
caaguuugugugccuu

SEQ ID NO: 3986675 - RNA, 14 nt, Human herpesvirus 6
caauauaaaagauu

SEQ ID NO: 3986676 - RNA, 20 nt, Human herpesvirus 6
caaucaaucuucuggguggg

SEQ ID NO: 3986677 - RNA, 21 nt, Human herpesvirus 6
caaucaugugcaugaaaauau

SEQ ID NO: 3986678 - RNA, 19 nt, Human herpesvirus 6
caauuccuuaauucuaaau

SEQ ID NO: 3986679 - RNA, 19 nt, Human herpesvirus 6
caauuuguguuuauuugcc

SEQ ID NO: 3986680 - RNA, 13 nt, Human herpesvirus 6
cacaaaaacaggg

SEQ ID NO: 3986681 - RNA, 13 nt, Human herpesvirus 6
cacauaacugcau

SEQ ID NO: 3986682 - RNA, 18 nt, Human herpesvirus 6
cacauaugccgaggcuua

SEQ ID NO: 3986683 - RNA, 15 nt, Human herpesvirus 6
cacaucuauguguau

SEQ ID NO: 3986684 - RNA, 12 nt, Human herpesvirus 6
caccagccggua

SEQ ID NO: 3986685 - RNA, 23 nt, Human herpesvirus 6
cacccuacaaucuguccagcuug

SEQ ID NO: 3986686 - RNA, 20 nt, Human herpesvirus 6
caccgcugacaaccuccgca

SEQ ID NO: 3986687 - RNA, 20 nt, Human herpesvirus 6
caccggaugucgacuccucc

SEQ ID NO: 3986688 - RNA, 15 nt, Human herpesvirus 6
caccucuaaaacaag

SEQ ID NO: 3986689 - RNA, 13 nt, Human herpesvirus 6
caccuuuaucgac

SEQ ID NO: 3986690 - RNA, 16 nt, Human herpesvirus 6
cacgaagacgaagagg

SEQ ID NO: 3986691 - RNA, 20 nt, Human herpesvirus 6
cacgacgugcugcaaggccg

SEQ ID NO: 3986692 - RNA, 22 nt, Human herpesvirus 6
cacgauguuaacauaaaacaac

SEQ ID NO: 3986693 - RNA, 20 nt, Human herpesvirus 6
cacuugaaccaagucaacaa

SEQ ID NO: 3986694 - RNA, 15 nt, Human herpesvirus 6
cagaaaagcaaacau

SEQ ID NO: 3986695 - RNA, 14 nt, Human herpesvirus 6
cagaacaacagcau

SEQ ID NO: 3986696 - RNA, 16 nt, Human herpesvirus 6
cgcccccauacacacc

SEQ ID NO: 3986697 - RNA, 14 nt, Human herpesvirus 6
cgcccgauccgccc

SEQ ID NO: 3986698 - RNA, 16 nt, Human herpesvirus 6
cgcgaccgaccccugc

SEQ ID NO: 3986699 - RNA, 13 nt, Human herpesvirus 6
cgcgagacagcgg

SEQ ID NO: 3986700 - RNA, 14 nt, Human herpesvirus 6
cgcgcgccggugcg

SEQ ID NO: 3986701 - RNA, 18 nt, Human herpesvirus 6
cgcggaguggaguccagu

SEQ ID NO: 3986702 - RNA, 19 nt, Human herpesvirus 6
cgcgguuuggggucuuucc

SEQ ID NO: 3986703 - RNA, 19 nt, Human herpesvirus 6
cgcuccgcgccccucgccc

SEQ ID NO: 3986704 - RNA, 14 nt, Human herpesvirus 6
cgcuccuccccugu

SEQ ID NO: 3986705 - RNA, 15 nt, Human herpesvirus 6
cgcuccuccccuguc

SEQ ID NO: 3986706 - RNA, 13 nt, Human herpesvirus 6
cgcuguccgccug

SEQ ID NO: 3986707 - RNA, 14 nt, Human herpesvirus 6
cggaaaacuaaaag

SEQ ID NO: 3986708 - RNA, 20 nt, Human herpesvirus 6
cggaaucaccggaugucgac

SEQ ID NO: 3986709 - RNA, 18 nt, Human herpesvirus 6
cggagaaaguugauagac

SEQ ID NO: 3986710 - RNA, 20 nt, Human herpesvirus 6
cggaggcgacgaaagaggac

SEQ ID NO: 3986711 - RNA, 17 nt, Human herpesvirus 6
cggauccaacucgacua

SEQ ID NO: 3986712 - RNA, 19 nt, Human herpesvirus 6
cggauucaaagaaaguuuc

SEQ ID NO: 3986713 - RNA, 17 nt, Human herpesvirus 6
cggccauuuaacggaac

SEQ ID NO: 3986714 - RNA, 15 nt, Human herpesvirus 6
cggcggauggagccc

SEQ ID NO: 3986715 - RNA, 13 nt, Human herpesvirus 6
cggcggggggacg

SEQ ID NO: 3986716 - RNA, 16 nt, Human herpesvirus 6
cggucagacagugagu

SEQ ID NO: 3986717 - RNA, 21 nt, Human herpesvirus 6
cgguccaaggauuaugaucau

SEQ ID NO: 3986718 - RNA, 20 nt, Human herpesvirus 6
cgguugagguguuuccugcc

SEQ ID NO: 3986719 - RNA, 16 nt, Human herpesvirus 6
cguaagaaaaaaaacg

SEQ ID NO: 3986720 - RNA, 18 nt, Human herpesvirus 6
cguagacaguaaaaugug

SEQ ID NO: 3986721 - RNA, 16 nt, Human herpesvirus 6
cgucaucgguggcaga

SEQ ID NO: 3986722 - RNA, 18 nt, Human herpesvirus 6
cguccgaguuagcagaag

SEQ ID NO: 3986723 - RNA, 20 nt, Human herpesvirus 6
cgucucucagcuggcugaca

SEQ ID NO: 3986724 - RNA, 13 nt, Human herpesvirus 6
cgucugggaccca

SEQ ID NO: 3986725 - RNA, 17 nt, Human herpesvirus 6
cgugcuucuggcacagg

SEQ ID NO: 3986726 - RNA, 21 nt, Human herpesvirus 6
cguggggcacacauguauuua

SEQ ID NO: 3986727 - RNA, 20 nt, Human herpesvirus 6
cguuacccggaagcuucaag

SEQ ID NO: 3986728 - RNA, 22 nt, Human herpesvirus 6
cguuccucucucggcugacaac

SEQ ID NO: 3986729 - RNA, 17 nt, Human herpesvirus 6
cuaaauuauuuuuaaug

SEQ ID NO: 3986730 - RNA, 14 nt, Human herpesvirus 6
cuaaauuggucucu

SEQ ID NO: 3986731 - RNA, 23 nt, Human herpesvirus 6
cuaacaucugcuaacgcggcaac

SEQ ID NO: 3986732 - RNA, 21 nt, Human herpesvirus 6
cuaacgcggcaaccgcaguuc

SEQ ID NO: 3986733 - RNA, 21 nt, Human herpesvirus 6
cuaacggggcaaccgcaguuc

SEQ ID NO: 3986734 - RNA, 14 nt, Human herpesvirus 6
cuaauaugaacaau

SEQ ID NO: 3986735 - RNA, 14 nt, Human herpesvirus 6
cuaaugauaaauug

SEQ ID NO: 3986736 - RNA, 16 nt, Human herpesvirus 6
cuacaacagaaaaugc

SEQ ID NO: 3986737 - RNA, 13 nt, Human herpesvirus 6
cuacggaaaaucu

SEQ ID NO: 3986738 - RNA, 16 nt, Human herpesvirus 6
cuacugcacuuucgau

SEQ ID NO: 3986739 - RNA, 20 nt, Human herpesvirus 6
cuaggacuucguucuugaca

SEQ ID NO: 3986740 - RNA, 18 nt, Human herpesvirus 6
cuaguguuucgcagagga

SEQ ID NO: 3986741 - RNA, 14 nt, Human herpesvirus 6
cuauggcuuccgga

SEQ ID NO: 3986742 - RNA, 17 nt, Human herpesvirus 6
cuaugugucuccgccuu

SEQ ID NO: 3986743 - RNA, 16 nt, Human herpesvirus 6
cuauguuauguaaaga

SEQ ID NO: 3986744 - RNA, 19 nt, Human herpesvirus 6
cucaacacucucaguguaa

SEQ ID NO: 3986745 - RNA, 14 nt, Human herpesvirus 6
cucacaagcugucc

SEQ ID NO: 3986746 - RNA, 18 nt, Human herpesvirus 6
cuccucaacacucucagu

SEQ ID NO: 3986747 - RNA, 19 nt, Human herpesvirus 6
cuccugggagcucucccuc

SEQ ID NO: 3986748 - RNA, 20 nt, Human herpesvirus 6
cuccugggagcucucccucg

SEQ ID NO: 3986749 - RNA, 20 nt, Human herpesvirus 6
cucgccgaacuagaaaaaca

SEQ ID NO: 3986750 - RNA, 22 nt, Human herpesvirus 6
cucgcucacaauauuucacaua

SEQ ID NO: 3986751 - RNA, 22 nt, Human herpesvirus 6
cucgcuuaccguucaucauucc

SEQ ID NO: 3986752 - RNA, 20 nt, Human herpesvirus 6
cucgguccaaccccucccau

SEQ ID NO: 3986753 - RNA, 16 nt, Human herpesvirus 6
cucguaacgcggcaac

SEQ ID NO: 3986754 - RNA, 15 nt, Human herpesvirus 6
cucgugcucugccuc

SEQ ID NO: 3986755 - RNA, 16 nt, Human herpesvirus 6
cucuauauccugucgc

SEQ ID NO: 3986756 - RNA, 17 nt, Human herpesvirus 6
cucuauugguuaaaagg

SEQ ID NO: 3986757 - RNA, 21 nt, Human herpesvirus 6
cucugaaauuugagaaaguug

SEQ ID NO: 3986758 - RNA, 16 nt, Human herpesvirus 6
cucuuuuuaauuccaa

SEQ ID NO: 3986759 - RNA, 17 nt, Human herpesvirus 6
cugaaacuccccagaga

SEQ ID NO: 3986760 - RNA, 20 nt, Human herpesvirus 6
cugaagaugagcagcuuugg

SEQ ID NO: 3986761 - RNA, 16 nt, Human herpesvirus 6
cugacaaauacgagag

SEQ ID NO: 3986762 - RNA, 23 nt, Human herpesvirus 6
cugacugguauccaauuaacaca

SEQ ID NO: 3986763 - RNA, 16 nt, Human herpesvirus 6
cugacuguaccauugu

SEQ ID NO: 3986764 - RNA, 18 nt, Human herpesvirus 6
cugagaguaaauauuucu

SEQ ID NO: 3986765 - RNA, 17 nt, Human herpesvirus 6
cugagaucauaaauaaa

SEQ ID NO: 3986766 - RNA, 17 nt, Human herpesvirus 6
cugaucacagagaaaaa

SEQ ID NO: 3986767 - RNA, 12 nt, Human herpesvirus 6
cugauggaaacc

SEQ ID NO: 3986768 - RNA, 13 nt, Human herpesvirus 6
cugcacuuucgau

SEQ ID NO: 3986769 - RNA, 15 nt, Human herpesvirus 6
cugccaucccuuccu

SEQ ID NO: 3986770 - RNA, 15 nt, Human herpesvirus 6
cugcggucgccgccu

SEQ ID NO: 3986771 - RNA, 16 nt, Human herpesvirus 6
cuggaaaacgacacag

SEQ ID NO: 3986772 - RNA, 19 nt, Human herpesvirus 6
cuggaucggacggugaugg

SEQ ID NO: 3986773 - RNA, 19 nt, Human herpesvirus 6
cuggcgcgcauguugcagu

SEQ ID NO: 3986774 - RNA, 18 nt, Human herpesvirus 6
cuggcggacaccgagggc

SEQ ID NO: 3986775 - RNA, 21 nt, Human herpesvirus 6
cuggcggacaccgagggcgga

SEQ ID NO: 3986776 - RNA, 19 nt, Human herpesvirus 6
cugggacccacgguggccu

SEQ ID NO: 3986777 - RNA, 13 nt, Human herpesvirus 6
cuguaaacugguc

SEQ ID NO: 3986778 - RNA, 20 nt, Human herpesvirus 6
cugucgaguaauuguggauu

SEQ ID NO: 3986779 - RNA, 16 nt, Human herpesvirus 6
cugugaauccagacua

SEQ ID NO: 3986780 - RNA, 21 nt, Human herpesvirus 6
cuguuauaacacaacaaguaa

SEQ ID NO: 3986781 - RNA, 21 nt, Human herpesvirus 6
cuguucgauguacaguuucuc

SEQ ID NO: 3986782 - RNA, 19 nt, Human herpesvirus 6
cuuaaaaaaacacaguauu

SEQ ID NO: 3986783 - RNA, 23 nt, Human herpesvirus 6
cuuacacaaauugaccagccaga

SEQ ID NO: 3986784 - RNA, 15 nt, Human herpesvirus 6
cuuaccauauauugg

SEQ ID NO: 3986785 - RNA, 16 nt, Human herpesvirus 6
cuuagacgaaaauugu

SEQ ID NO: 3986786 - RNA, 18 nt, Human herpesvirus 6
cuuagacuuggugaugau

SEQ ID NO: 3986787 - RNA, 20 nt, Human herpesvirus 6
cuuauuaacgcagcaacaau

SEQ ID NO: 3986788 - RNA, 22 nt, Human herpesvirus 6
cuucauacccgaaguucucuca

SEQ ID NO: 3986789 - RNA, 18 nt, Human herpesvirus 6
cuuccaguauugaagaaa

SEQ ID NO: 3986790 - RNA, 23 nt, Human herpesvirus 6
cuucccuuuuacaauacacagaa

SEQ ID NO: 3986791 - RNA, 14 nt, Human herpesvirus 6
cuucgacuucaaac

SEQ ID NO: 3986792 - RNA, 22 nt, Human herpesvirus 6
cuucugccugaaaaugaagaga

SEQ ID NO: 3986793 - RNA, 13 nt, Human herpesvirus 6
cuugcgaccuggc

SEQ ID NO: 3986794 - RNA, 13 nt, Human herpesvirus 6
cuugcgauacaug

SEQ ID NO: 3986795 - RNA, 20 nt, Human herpesvirus 6
cuugggugugcauugugaca

SEQ ID NO: 3986796 - RNA, 12 nt, Human herpesvirus 6
cuuuaaagcagc

SEQ ID NO: 3986797 - RNA, 21 nt, Human herpesvirus 6
cuuuccgagcggugugcaguu

SEQ ID NO: 3986798 - RNA, 10 nt, Human herpesvirus 6
cuuuccugcc

SEQ ID NO: 3986799 - RNA, 14 nt, Human herpesvirus 6
cuuuccugcccaag

SEQ ID NO: 3986800 - RNA, 13 nt, Human herpesvirus 6
cuuugacauuuau

SEQ ID NO: 3986801 - RNA, 14 nt, Human herpesvirus 6
cuuuucguacggcg

SEQ ID NO: 3986802 - RNA, 20 nt, Human herpesvirus 6
cuuuuguuguuuuuuggaau

SEQ ID NO: 3986803 - RNA, 15 nt, Human herpesvirus 6
cuuuuuaaucaugau

SEQ ID NO: 3986804 - RNA, 19 nt, Human herpesvirus 6
gaaaaaacaacgacuauca

SEQ ID NO: 3986805 - RNA, 11 nt, Human herpesvirus 6
gaaaacaaugc

SEQ ID NO: 3986806 - RNA, 13 nt, Human herpesvirus 6
gaaaacccagcgg

SEQ ID NO: 3986807 - RNA, 20 nt, Human herpesvirus 6
gaaaauugaugauguucuuc

SEQ ID NO: 3986808 - RNA, 21 nt, Human herpesvirus 6
gaaacaguucguagaacggaa

SEQ ID NO: 3986809 - RNA, 20 nt, Human herpesvirus 6
gaaacggcgcggagcccaag

SEQ ID NO: 3986810 - RNA, 22 nt, Human herpesvirus 6
gaaacggcgcggagcccaagaa

SEQ ID NO: 3986811 - RNA, 18 nt, Human herpesvirus 6
acgagagaguccauuucu

SEQ ID NO: 3986812 - RNA, 19 nt, Human herpesvirus 6
acgccguguuucgccaaga

SEQ ID NO: 3986813 - RNA, 22 nt, Human herpesvirus 6
acgccuccacaugacaccucaa

SEQ ID NO: 3986814 - RNA, 14 nt, Human herpesvirus 6
acggaccgagagcc

SEQ ID NO: 3986815 - RNA, 16 nt, Human herpesvirus 6
acggauucgaucgaga

SEQ ID NO: 3986816 - RNA, 19 nt, Human herpesvirus 6
acggcaacgcuccuccccu

SEQ ID NO: 3986817 - RNA, 22 nt, Human herpesvirus 6
acggccuuucuguuuuaauuaa

SEQ ID NO: 3986818 - RNA, 23 nt, Human herpesvirus 6
acgggcgucaucgguggcagagg

SEQ ID NO: 3986819 - RNA, 15 nt, Human herpesvirus 6
acguagcgaaccagg

SEQ ID NO: 3986820 - RNA, 20 nt, Human herpesvirus 6
acguaucccuaauaaauguc

SEQ ID NO: 3986821 - RNA, 14 nt, Human herpesvirus 6
acguauccucagaa

SEQ ID NO: 3986822 - RNA, 20 nt, Human herpesvirus 6
acgucgaaacgaaagcugau

SEQ ID NO: 3986823 - RNA, 11 nt, Human herpesvirus 6
acgucuucaaa

SEQ ID NO: 3986824 - RNA, 23 nt, Human herpesvirus 6
acgugccaccgucugggacccac

SEQ ID NO: 3986825 - RNA, 13 nt, Human herpesvirus 6
acguuaauguuua

SEQ ID NO: 3986826 - RNA, 18 nt, Human herpesvirus 6
acguugguaucaguggau

SEQ ID NO: 3986827 - RNA, 17 nt, Human herpesvirus 6
acuaagauugugcaguu

SEQ ID NO: 3986828 - RNA, 12 nt, Human herpesvirus 6
acuaauguggau

SEQ ID NO: 3986829 - RNA, 11 nt, Human herpesvirus 6
acuauacuuuu

SEQ ID NO: 3986830 - RNA, 20 nt, Human herpesvirus 6
acuaucguuuauaaaaauag

SEQ ID NO: 3986831 - RNA, 17 nt, Human herpesvirus 6
acuauugacauaggaau

SEQ ID NO: 3986832 - RNA, 19 nt, Human herpesvirus 6
acuauuuuagucacacauu

SEQ ID NO: 3986833 - RNA, 14 nt, Human herpesvirus 6
acucaauuuugaaa

SEQ ID NO: 3986834 - RNA, 16 nt, Human herpesvirus 6
acucauacacaggauu

SEQ ID NO: 3986835 - RNA, 15 nt, Human herpesvirus 6
acucgugugucuuug

SEQ ID NO: 3986836 - RNA, 17 nt, Human herpesvirus 6
acucguuuuccuucccu

SEQ ID NO: 3986837 - RNA, 14 nt, Human herpesvirus 6
acucuaaaagcugc

SEQ ID NO: 3986838 - RNA, 14 nt, Human herpesvirus 6
acucucucaguaau

SEQ ID NO: 3986839 - RNA, 16 nt, Human herpesvirus 6
acugaccguuguaaga

SEQ ID NO: 3986840 - RNA, 13 nt, Human herpesvirus 6
acugauggcaggu

SEQ ID NO: 3986841 - RNA, 15 nt, Human herpesvirus 6
acugauuaguuuuca

SEQ ID NO: 3986842 - RNA, 23 nt, Human herpesvirus 6
acuggccauauuaggcugcagcc

SEQ ID NO: 3986843 - RNA, 20 nt, Human herpesvirus 6
acuucacgaucuacacaccg

SEQ ID NO: 3986844 - RNA, 18 nt, Human herpesvirus 6
acuuucuucgccuguaaa

SEQ ID NO: 3986845 - RNA, 22 nt, Human herpesvirus 6
acuuuuugccgaagauagcucu

SEQ ID NO: 3986846 - RNA, 15 nt, Human herpesvirus 6
agaaaaaaacuguga

SEQ ID NO: 3986847 - RNA, 14 nt, Human herpesvirus 6
agaaaaaacgauau

SEQ ID NO: 3986848 - RNA, 16 nt, Human herpesvirus 6
agaaaauaaaaaaaag

SEQ ID NO: 3986849 - RNA, 17 nt, Human herpesvirus 6
agaaacguuaauguuua

SEQ ID NO: 3986850 - RNA, 20 nt, Human herpesvirus 6
agaaagagauaaaaagagag

SEQ ID NO: 3986851 - RNA, 20 nt, Human herpesvirus 6
agaaaguucuaugucuagau

SEQ ID NO: 3986852 - RNA, 21 nt, Human herpesvirus 6
agaaauuacauaagcaaaugu

SEQ ID NO: 3986853 - RNA, 14 nt, Human herpesvirus 6
agaacaacagcaug

SEQ ID NO: 3986854 - RNA, 22 nt, Human herpesvirus 6
agaacguggccguuacaguuuc

SEQ ID NO: 3986855 - RNA, 19 nt, Human herpesvirus 6
agaacucuaaaagcugcua

SEQ ID NO: 3986856 - RNA, 18 nt, Human herpesvirus 6
agaauaauuauggacaac

SEQ ID NO: 3986857 - RNA, 21 nt, Human herpesvirus 6
agaauucuucugugacuauau

SEQ ID NO: 3986858 - RNA, 17 nt, Human herpesvirus 6
agacaaaccagcaaguu

SEQ ID NO: 3986859 - RNA, 14 nt, Human herpesvirus 6
agacacacaaaaaa

SEQ ID NO: 3986860 - RNA, 22 nt, Human herpesvirus 6
agacaucacauuauaagacacu

SEQ ID NO: 3986861 - RNA, 22 nt, Human herpesvirus 6
agaccaauuuaugucauuucau

SEQ ID NO: 3986862 - RNA, 20 nt, Human herpesvirus 6
agacuggaaaacuaugugca

SEQ ID NO: 3986863 - RNA, 12 nt, Human herpesvirus 6
agagaaggaaaa

SEQ ID NO: 3986864 - RNA, 17 nt, Human herpesvirus 6
agagacguuguuugacc

SEQ ID NO: 3986865 - RNA, 19 nt, Human herpesvirus 6
agagcgagucuugugugaa

SEQ ID NO: 3986866 - RNA, 17 nt, Human herpesvirus 6
agagcgcaucuuuaaca

SEQ ID NO: 3986867 - RNA, 12 nt, Human herpesvirus 6
agaggaaagaau

SEQ ID NO: 3986868 - RNA, 13 nt, Human herpesvirus 6
agaggaauuggcg

SEQ ID NO: 3986869 - RNA, 23 nt, Human herpesvirus 6
agaucauaaauaaaugaauagau

SEQ ID NO: 3986870 - RNA, 23 nt, Human herpesvirus 6
agaucuauuucucguucuccguu

SEQ ID NO: 3986871 - RNA, 13 nt, Human herpesvirus 6
agaugccuguagg

SEQ ID NO: 3986872 - RNA, 16 nt, Human herpesvirus 6
agauuacggcaacaua

SEQ ID NO: 3986873 - RNA, 20 nt, Human herpesvirus 6
agauuuggcauuaaaggacu

SEQ ID NO: 3986874 - RNA, 18 nt, Human herpesvirus 6
agcaaguugcuaccgcug

SEQ ID NO: 3986875 - RNA, 17 nt, Human herpesvirus 6
agcaauaggcaccuauc

SEQ ID NO: 3986876 - RNA, 14 nt, Human herpesvirus 6
agcagcucugcaau

SEQ ID NO: 3986877 - RNA, 16 nt, Human herpesvirus 6
agcauauuuuggcaaa

SEQ ID NO: 3986878 - RNA, 16 nt, Human herpesvirus 6
agccaaugauucuuaa

SEQ ID NO: 3986879 - RNA, 23 nt, Human herpesvirus 6
agccucgacguccaccuggaaaa

SEQ ID NO: 3986880 - RNA, 20 nt, Human herpesvirus 6
agcgaucauaaaacugccaa

SEQ ID NO: 3986881 - RNA, 20 nt, Human herpesvirus 6
agcgcgucguucgcuucuua

SEQ ID NO: 3986882 - RNA, 17 nt, Human herpesvirus 6
agcgugugauucaguau

SEQ ID NO: 3986883 - RNA, 20 nt, Human herpesvirus 6
agcguuggaaagcuuuaugg

SEQ ID NO: 3986884 - RNA, 14 nt, Human herpesvirus 6
agcuagagugacau

SEQ ID NO: 3986885 - RNA, 18 nt, Human herpesvirus 6
aggaacaaaacuuucauc

SEQ ID NO: 3986886 - RNA, 14 nt, Human herpesvirus 6
aggaacgauaugcu

SEQ ID NO: 3986887 - RNA, 11 nt, Human herpesvirus 6
aggaauugcuu

SEQ ID NO: 3986888 - RNA, 15 nt, Human herpesvirus 6
aggaggaggaagaga

SEQ ID NO: 3986889 - RNA, 16 nt, Human herpesvirus 6
aggcaaacgagaacuc

SEQ ID NO: 3986890 - RNA, 13 nt, Human herpesvirus 6
agggacccacagg

SEQ ID NO: 3986891 - RNA, 16 nt, Human herpesvirus 6
agggacccacaggcgg

SEQ ID NO: 3986892 - RNA, 23 nt, Human herpesvirus 6
agggcagggggggucucuguucu

SEQ ID NO: 3986893 - RNA, 17 nt, Human herpesvirus 6
aggggagagacauccau

SEQ ID NO: 3986894 - RNA, 23 nt, Human herpesvirus 6
aggggcgcgagacagcggacagc

SEQ ID NO: 3986895 - RNA, 19 nt, Human herpesvirus 6
agggugcuuugcuucagug

SEQ ID NO: 3986896 - RNA, 22 nt, Human herpesvirus 6
agguacaaaacauggacaacuu

SEQ ID NO: 3986897 - RNA, 15 nt, Human herpesvirus 6
agguccgacacgccc

SEQ ID NO: 3986898 - RNA, 12 nt, Human herpesvirus 6
aggugaaaugaa

SEQ ID NO: 3986899 - RNA, 23 nt, Human herpesvirus 6
aggugacucuucucuaaaaacua

SEQ ID NO: 3986900 - RNA, 13 nt, Human herpesvirus 6
agguguuaaacga

SEQ ID NO: 3986901 - RNA, 12 nt, Human herpesvirus 6
agguuaucggaa

SEQ ID NO: 3986902 - RNA, 18 nt, Human herpesvirus 6
aguaauauaggauuuccc

SEQ ID NO: 3986903 - RNA, 20 nt, Human herpesvirus 6
aguagcacaaaccaaaauga

SEQ ID NO: 3986904 - RNA, 14 nt, Human herpesvirus 6
aguaucgagauuuu

SEQ ID NO: 3986905 - RNA, 22 nt, Human herpesvirus 6
agucaggaaaaaguuaagaaaa

SEQ ID NO: 3986906 - RNA, 23 nt, Human herpesvirus 6
agucaguaaugauauaaaagaaa

SEQ ID NO: 3986907 - RNA, 18 nt, Human herpesvirus 6
agucccaucuauacaccc

SEQ ID NO: 3986908 - RNA, 22 nt, Human herpesvirus 6
agucugucgcuuauuucguuug

SEQ ID NO: 3986909 - RNA, 19 nt, Human herpesvirus 6
agugauuauggugccucag

SEQ ID NO: 3986910 - RNA, 22 nt, Human herpesvirus 6
agugccguugagugccucagag

SEQ ID NO: 3986911 - RNA, 19 nt, Human herpesvirus 6
agugcgagacuggaaaacu

SEQ ID NO: 3986912 - RNA, 16 nt, Human herpesvirus 6
aguggucguuggauua

SEQ ID NO: 3986913 - RNA, 22 nt, Human herpesvirus 6
aguguaaaguucucgaauuguu

SEQ ID NO: 3986914 - RNA, 23 nt, Human herpesvirus 6
aguuaggauuacacuuucuugua

SEQ ID NO: 3986915 - RNA, 23 nt, Human herpesvirus 6
aguucagaagagaugaaagacag

SEQ ID NO: 3986916 - RNA, 20 nt, Human herpesvirus 6
aguuccaaaacuucuauaug

SEQ ID NO: 3986917 - RNA, 17 nt, Human herpesvirus 6
aguuuaccuauuuacaa

SEQ ID NO: 3986918 - RNA, 19 nt, Human herpesvirus 6
aguuucaccauguccagga

SEQ ID NO: 3986919 - RNA, 17 nt, Human herpesvirus 6
aguuuguguuuguaaau

SEQ ID NO: 3986920 - RNA, 18 nt, Human herpesvirus 6
aguuuuuccgauacagca

SEQ ID NO: 3986921 - RNA, 14 nt, Human herpesvirus 6
aguuuuugugcggc

SEQ ID NO: 3986922 - RNA, 13 nt, Human herpesvirus 6
auaaaaacucaca

SEQ ID NO: 3986923 - RNA, 16 nt, Human herpesvirus 6
auaaaauaucccgcgu

SEQ ID NO: 3986924 - RNA, 17 nt, Human herpesvirus 6
auaaacugugucuguuc

SEQ ID NO: 3986925 - RNA, 18 nt, Human herpesvirus 6
cccacgguggccuggcac

SEQ ID NO: 3986926 - RNA, 19 nt, Human herpesvirus 6
cccacuccuacuauccgcc

SEQ ID NO: 3986927 - RNA, 18 nt, Human herpesvirus 6
cccagauuuguguucaag

SEQ ID NO: 3986928 - RNA, 18 nt, Human herpesvirus 6
cccugccgagccugugga

SEQ ID NO: 3986929 - RNA, 17 nt, Human herpesvirus 6
cccugccuauacaggca

SEQ ID NO: 3986930 - RNA, 13 nt, Human herpesvirus 6
ccgagccugugga

SEQ ID NO: 3986931 - RNA, 15 nt, Human herpesvirus 6
ccgaucucucucaga

SEQ ID NO: 3986932 - RNA, 13 nt, Human herpesvirus 6
ccgccaccaccgc

SEQ ID NO: 3986933 - RNA, 21 nt, Human herpesvirus 6
ccgccgugcuucuggcacagg

SEQ ID NO: 3986934 - RNA, 20 nt, Human herpesvirus 6
ccgcgguuggggucuuuccu

SEQ ID NO: 3986935 - RNA, 23 nt, Human herpesvirus 6
ccgcgguuggggucuuuccugca

SEQ ID NO: 3986936 - RNA, 22 nt, Human herpesvirus 6
ccgcgguuugggggucuuuccu

SEQ ID NO: 3986937 - RNA, 21 nt, Human herpesvirus 6
ccgcgguuuggggucuuuccu

SEQ ID NO: 3986938 - RNA, 19 nt, Human herpesvirus 6
ccggcugagcggaguggag

SEQ ID NO: 3986939 - RNA, 22 nt, Human herpesvirus 6
ccgucgauaauaauucagucug

SEQ ID NO: 3986940 - RNA, 19 nt, Human herpesvirus 6
ccgucuccguuccaaccuc

SEQ ID NO: 3986941 - RNA, 14 nt, Human herpesvirus 6
ccguuacaguuucc

SEQ ID NO: 3986942 - RNA, 14 nt, Human herpesvirus 6
ccguuucaaauagu

SEQ ID NO: 3986943 - RNA, 15 nt, Human herpesvirus 6
ccucgugcucugccu

SEQ ID NO: 3986944 - RNA, 15 nt, Human herpesvirus 6
ccucuaaacccagac

SEQ ID NO: 3986945 - RNA, 12 nt, Human herpesvirus 6
ccugcacaggcg

SEQ ID NO: 3986946 - RNA, 17 nt, Human herpesvirus 6
ccuggcacggugccaaa

SEQ ID NO: 3986947 - RNA, 16 nt, Human herpesvirus 6
ccugggagcucucccu

SEQ ID NO: 3986948 - RNA, 22 nt, Human herpesvirus 6
ccuguccgugacacacagaaua

SEQ ID NO: 3986949 - RNA, 14 nt, Human herpesvirus 6
ccuucacuuuuuca

SEQ ID NO: 3986950 - RNA, 21 nt, Human herpesvirus 6
ccuugaauuauuuauauugga

SEQ ID NO: 3986951 - RNA, 16 nt, Human herpesvirus 6
ccuuguguaucuguga

SEQ ID NO: 3986952 - RNA, 11 nt, Human herpesvirus 6
ccuuguuuucu

SEQ ID NO: 3986953 - RNA, 12 nt, Human herpesvirus 6
cgaauauguuuu

SEQ ID NO: 3986954 - RNA, 15 nt, Human herpesvirus 6
cgaaucucaagcaca

SEQ ID NO: 3986955 - RNA, 15 nt, Human herpesvirus 6
cgacacgcuggagca

SEQ ID NO: 3986956 - RNA, 14 nt, Human herpesvirus 6
cgagaacucuaaaa

SEQ ID NO: 3986957 - RNA, 20 nt, Human herpesvirus 6
cgagacagcggacagcgggg

SEQ ID NO: 3986958 - RNA, 12 nt, Human herpesvirus 6
cgauacccagcg

SEQ ID NO: 3986959 - RNA, 18 nt, Human herpesvirus 6
cgaucuuauauuaaagau

SEQ ID NO: 3986960 - RNA, 15 nt, Human herpesvirus 6
cgauucagaccucau

SEQ ID NO: 3986961 - RNA, 17 nt, Human herpesvirus 6
cgauucuaauaaaagac

SEQ ID NO: 3986962 - RNA, 15 nt, Human herpesvirus 6
cgcaaaccaccccaa

SEQ ID NO: 3986963 - RNA, 21 nt, Human herpesvirus 6
cgcauuagucacagccuugau

SEQ ID NO: 3986964 - RNA, 16 nt, Human herpesvirus 6
cgccacugcgaggcca

SEQ ID NO: 3986965 - RNA, 19 nt, Human herpesvirus 6
cgccggaucguaaggcagu

SEQ ID NO: 3986966 - RNA, 11 nt, Human herpesvirus 6
cgccgugugug

SEQ ID NO: 3986967 - RNA, 19 nt, Human herpesvirus 6
cgcgacagggugagucaca

SEQ ID NO: 3986968 - RNA, 16 nt, Human herpesvirus 6
cgcgcauguugcaguu

SEQ ID NO: 3986969 - RNA, 16 nt, Human herpesvirus 6
cgcggccguucucucu

SEQ ID NO: 3986970 - RNA, 17 nt, Human herpesvirus 6
cgcgguaacgccacagc

SEQ ID NO: 3986971 - RNA, 17 nt, Human herpesvirus 6
cgcggucauaaacagac

SEQ ID NO: 3986972 - RNA, 18 nt, Human herpesvirus 6
cgcuaaggugagccagau

SEQ ID NO: 3986973 - RNA, 17 nt, Human herpesvirus 6
cgcuaucgcccugcucc

SEQ ID NO: 3986974 - RNA, 16 nt, Human herpesvirus 6
cgcuccuccccugucc

SEQ ID NO: 3986975 - RNA, 18 nt, Human herpesvirus 6
cgcugcggucgccgccuc

SEQ ID NO: 3986976 - RNA, 21 nt, Human herpesvirus 6
cggaaaaauuuuauaaugagu

SEQ ID NO: 3986977 - RNA, 15 nt, Human herpesvirus 6
cggacaaugcagaac

SEQ ID NO: 3986978 - RNA, 13 nt, Human herpesvirus 6
cggagaacgggca

SEQ ID NO: 3986979 - RNA, 17 nt, Human herpesvirus 6
cggagauuaaaacauca

SEQ ID NO: 3986980 - RNA, 18 nt, Human herpesvirus 6
cggagguaacggagcccg

SEQ ID NO: 3986981 - RNA, 13 nt, Human herpesvirus 6
cggaguugcagug

SEQ ID NO: 3986982 - RNA, 13 nt, Human herpesvirus 6
cggauggagcccg

SEQ ID NO: 3986983 - RNA, 16 nt, Human herpesvirus 6
cggccuggaguacaag

SEQ ID NO: 3986984 - RNA, 16 nt, Human herpesvirus 6
cggcggauggagcccg

SEQ ID NO: 3986985 - RNA, 19 nt, Human herpesvirus 6
cggcggggggacgggcgga

SEQ ID NO: 3986986 - RNA, 23 nt, Human herpesvirus 6
cgggacaaaaccgaggcagagca

SEQ ID NO: 3986987 - RNA, 14 nt, Human herpesvirus 6
cgggaccuggcgga

SEQ ID NO: 3986988 - RNA, 12 nt, Human herpesvirus 6
cgggcaggaauc

SEQ ID NO: 3986989 - RNA, 17 nt, Human herpesvirus 6
cgggccuccgccacugc

SEQ ID NO: 3986990 - RNA, 12 nt, Human herpesvirus 6
cgggcggggcgg

SEQ ID NO: 3986991 - RNA, 19 nt, Human herpesvirus 6
cggggaggaggaggaggaa

SEQ ID NO: 3986992 - RNA, 20 nt, Human herpesvirus 6
cggggaggaggaggaggaag

SEQ ID NO: 3986993 - RNA, 17 nt, Human herpesvirus 6
cggguaagcagcagaac

SEQ ID NO: 3986994 - RNA, 18 nt, Human herpesvirus 6
cgguccggcugagcggag

SEQ ID NO: 3986995 - RNA, 23 nt, Human herpesvirus 6
cggugccaaaggaaaccaccggc

SEQ ID NO: 3986996 - RNA, 22 nt, Human herpesvirus 6
cgguuugucucgcaaacagcuu

SEQ ID NO: 3986997 - RNA, 14 nt, Human herpesvirus 6
cguaaaucugcguc

SEQ ID NO: 3986998 - RNA, 22 nt, Human herpesvirus 6
cguaacgcggcaaccgcaguuc

SEQ ID NO: 3986999 - RNA, 21 nt, Human herpesvirus 6
cgucauaccgaucccagcuca

SEQ ID NO: 3987000 - RNA, 17 nt, Human herpesvirus 6
cguccauacaguugugu

SEQ ID NO: 3987001 - RNA, 17 nt, Human herpesvirus 6
cguccucgugcucugcc

SEQ ID NO: 3987002 - RNA, 20 nt, Human herpesvirus 6
cgucuccgucuccucgcaau

SEQ ID NO: 3987003 - RNA, 16 nt, Human herpesvirus 6
cgucuccucauggaga

SEQ ID NO: 3987004 - RNA, 19 nt, Human herpesvirus 6
cgucuccugggagcucucc

SEQ ID NO: 3987005 - RNA, 13 nt, Human herpesvirus 6
cgugauguuuucc

SEQ ID NO: 3987006 - RNA, 20 nt, Human herpesvirus 6
cgugccuguuuuggugaaca

SEQ ID NO: 3987007 - RNA, 18 nt, Human herpesvirus 6
cgugcugcaaggccgacu

SEQ ID NO: 3987008 - RNA, 17 nt, Human herpesvirus 6
cgugugcgauuuacugg

SEQ ID NO: 3987009 - RNA, 18 nt, Human herpesvirus 6
cguuaguuuuuuguuuca

SEQ ID NO: 3987010 - RNA, 17 nt, Human herpesvirus 6
cguuuuccaugugaauc

SEQ ID NO: 3987011 - RNA, 12 nt, Human herpesvirus 6
cuaaaagucagu

SEQ ID NO: 3987012 - RNA, 22 nt, Human herpesvirus 6
cuaaaaucaaaaaaauuuugau

SEQ ID NO: 3987013 - RNA, 17 nt, Human herpesvirus 6
cuaaaauuguaauuuug

SEQ ID NO: 3987014 - RNA, 13 nt, Human herpesvirus 6
cuaaauacauuca

SEQ ID NO: 3987015 - RNA, 19 nt, Human herpesvirus 6
cuaaauauaucaaagaugu

SEQ ID NO: 3987016 - RNA, 17 nt, Human herpesvirus 6
cuaaauuucuacaaaaa

SEQ ID NO: 3987017 - RNA, 12 nt, Human herpesvirus 6
cuaauaaauguc

SEQ ID NO: 3987018 - RNA, 20 nt, Human herpesvirus 6
cuacaauacgguuugucucg

SEQ ID NO: 3987019 - RNA, 18 nt, Human herpesvirus 6
cuacguccuuauacacga

SEQ ID NO: 3987020 - RNA, 13 nt, Human herpesvirus 6
cuacguucgccuc

SEQ ID NO: 3987021 - RNA, 11 nt, Human herpesvirus 6
cuagaggugcc

SEQ ID NO: 3987022 - RNA, 15 nt, Human herpesvirus 6
cuaggacguacagaa

SEQ ID NO: 3987023 - RNA, 23 nt, Human herpesvirus 6
cuaguagccuaggccuucaccug

SEQ ID NO: 3987024 - RNA, 17 nt, Human herpesvirus 6
cuaugucgauguggaua

SEQ ID NO: 3987025 - RNA, 19 nt, Human herpesvirus 6
cuauuauaagcaaacaugu

SEQ ID NO: 3987026 - RNA, 17 nt, Human herpesvirus 6
cuauugagauucuccgu

SEQ ID NO: 3987027 - RNA, 20 nt, Human herpesvirus 6
cucaaacuuuuagagacuuu

SEQ ID NO: 3987028 - RNA, 16 nt, Human herpesvirus 6
cucaaagaaaagaugu

SEQ ID NO: 3987029 - RNA, 20 nt, Human herpesvirus 6
cucaacauuaaaaaaaauag

SEQ ID NO: 3987030 - RNA, 18 nt, Human herpesvirus 6
cucccaucccccuccccg

SEQ ID NO: 3987031 - RNA, 22 nt, Human herpesvirus 6
cuccuacuauccgcccuccccg

SEQ ID NO: 3987032 - RNA, 21 nt, Human herpesvirus 6
cucgauuuugugaaugagaca

SEQ ID NO: 3987033 - RNA, 11 nt, Human herpesvirus 6
cucggaaaauu

SEQ ID NO: 3987034 - RNA, 23 nt, Human herpesvirus 6
cucggauauauacuuacuugagu

SEQ ID NO: 3987035 - RNA, 18 nt, Human herpesvirus 6
cucuaccuggaaacaacg

SEQ ID NO: 3987036 - RNA, 22 nt, Human herpesvirus 6
cucucucggcugacaacaaagg

SEQ ID NO: 3987037 - RNA, 12 nt, Human herpesvirus 6
cucugaaacacu

SEQ ID NO: 3987038 - RNA, 16 nt, Human herpesvirus 6
cucugcaaaacaaagg

SEQ ID NO: 3987039 - RNA, 13 nt, Human herpesvirus 6
cucuguucugcca

SEQ ID NO: 3987040 - RNA, 13 nt, Human herpesvirus 6
gaucauuauauca

SEQ ID NO: 3987041 - RNA, 22 nt, Human herpesvirus 6
gauccuguaauaguauugucug

SEQ ID NO: 3987042 - RNA, 14 nt, Human herpesvirus 6
gaucuucugcuaau

SEQ ID NO: 3987043 - RNA, 18 nt, Human herpesvirus 6
gaugaauuaccuguuuua

SEQ ID NO: 3987044 - RNA, 18 nt, Human herpesvirus 6
gaugauuauucugucuug

SEQ ID NO: 3987045 - RNA, 23 nt, Human herpesvirus 6
gauguaaauugauuagcaaucau

SEQ ID NO: 3987046 - RNA, 19 nt, Human herpesvirus 6
gauguagauaguuuugcgu

SEQ ID NO: 3987047 - RNA, 16 nt, Human herpesvirus 6
gauguauggagauguu

SEQ ID NO: 3987048 - RNA, 18 nt, Human herpesvirus 6
gauuauauauuugcauac

SEQ ID NO: 3987049 - RNA, 14 nt, Human herpesvirus 6
gauucuaauaaaag

SEQ ID NO: 3987050 - RNA, 21 nt, Human herpesvirus 6
gauucuuaauucuuaaagcgu

SEQ ID NO: 3987051 - RNA, 21 nt, Human herpesvirus 6
gauuucagguaauauuccgaa

SEQ ID NO: 3987052 - RNA, 15 nt, Human herpesvirus 6
gcaacaauccauguu

SEQ ID NO: 3987053 - RNA, 21 nt, Human herpesvirus 6
gcaacuacuuuuucaaguaag

SEQ ID NO: 3987054 - RNA, 20 nt, Human herpesvirus 6
gcaauuucuuuugagggaau

SEQ ID NO: 3987055 - RNA, 13 nt, Human herpesvirus 6
gcaccgcuguggc

SEQ ID NO: 3987056 - RNA, 15 nt, Human herpesvirus 6
gcacggugccaaagg

SEQ ID NO: 3987057 - RNA, 15 nt, Human herpesvirus 6
gcacuccgugucgcu

SEQ ID NO: 3987058 - RNA, 21 nt, Human herpesvirus 6
gcacuuccgcgauacccagcg

SEQ ID NO: 3987059 - RNA, 20 nt, Human herpesvirus 6
gcagacuaauccauaugaaa

SEQ ID NO: 3987060 - RNA, 23 nt, Human herpesvirus 6
gcagaggggaagggaauaacaga

SEQ ID NO: 3987061 - RNA, 13 nt, Human herpesvirus 6
gcagaucaucaaa

SEQ ID NO: 3987062 - RNA, 14 nt, Human herpesvirus 6
gcagcaaauaaaua

SEQ ID NO: 3987063 - RNA, 12 nt, Human herpesvirus 6
gcagguauaaga

SEQ ID NO: 3987064 - RNA, 15 nt, Human herpesvirus 6
gcauaauccuuuucu

SEQ ID NO: 3987065 - RNA, 12 nt, Human herpesvirus 6
gccaaaggaaac

SEQ ID NO: 3987066 - RNA, 17 nt, Human herpesvirus 6
gccaaaggaaaccaccg

SEQ ID NO: 3987067 - RNA, 16 nt, Human herpesvirus 6
gccaauagauggugcu

SEQ ID NO: 3987068 - RNA, 16 nt, Human herpesvirus 6
gccaccgucugggacc

SEQ ID NO: 3987069 - RNA, 20 nt, Human herpesvirus 6
gccaccgucugggacccacg

SEQ ID NO: 3987070 - RNA, 22 nt, Human herpesvirus 6
gccaccgucugggacccacggu

SEQ ID NO: 3987071 - RNA, 19 nt, Human herpesvirus 6
gccaugaaacaggaacagu

SEQ ID NO: 3987072 - RNA, 15 nt, Human herpesvirus 6
gccgccguuacuguc

SEQ ID NO: 3987073 - RNA, 16 nt, Human herpesvirus 6
gccgcugcagaaaaac

SEQ ID NO: 3987074 - RNA, 18 nt, Human herpesvirus 6
gccgcuucggacccgagg

SEQ ID NO: 3987075 - RNA, 19 nt, Human herpesvirus 6
gccgucacacucuuaacua

SEQ ID NO: 3987076 - RNA, 20 nt, Human herpesvirus 6
gccuccccgggugcuccgcc

SEQ ID NO: 3987077 - RNA, 20 nt, Human herpesvirus 6
gccuccgccacugcgaggcc

SEQ ID NO: 3987078 - RNA, 15 nt, Human herpesvirus 6
gccuguuccacgcgc

SEQ ID NO: 3987079 - RNA, 24 nt, Human herpesvirus 6
gccuguuccacgcgcgugucggcu

SEQ ID NO: 3987080 - RNA, 14 nt, Human herpesvirus 6
gcgaacgaaaacuc

SEQ ID NO: 3987081 - RNA, 16 nt, Human herpesvirus 6
gcgaccgaccccugcc

SEQ ID NO: 3987082 - RNA, 22 nt, Human herpesvirus 6
gcgacgugccaccgucugggac

SEQ ID NO: 3987083 - RNA, 15 nt, Human herpesvirus 6
gcgagccgcggggag

SEQ ID NO: 3987084 - RNA, 16 nt, Human herpesvirus 6
gcgaggugacggaggc

SEQ ID NO: 3987085 - RNA, 18 nt, Human herpesvirus 6
gcgauucuaauaaaagac

SEQ ID NO: 3987086 - RNA, 13 nt, Human herpesvirus 6
gcgauuuaaacaa

SEQ ID NO: 3987087 - RNA, 21 nt, Human herpesvirus 6
gcgccuuguguaucugugaac

SEQ ID NO: 3987088 - RNA, 15 nt, Human herpesvirus 6
gcgcgacgugccacc

SEQ ID NO: 3987089 - RNA, 17 nt, Human herpesvirus 6
gcgcggagcacgcacga

SEQ ID NO: 3987090 - RNA, 18 nt, Human herpesvirus 6
gcggagcggaggggcgcg

SEQ ID NO: 3987091 - RNA, 23 nt, Human herpesvirus 6
gcggcaaccgcaguuccuguucu

SEQ ID NO: 3987092 - RNA, 14 nt, Human herpesvirus 6
gcgggaugccauaa

SEQ ID NO: 3987093 - RNA, 16 nt, Human herpesvirus 6
gcgguauaaugcauga

SEQ ID NO: 3987094 - RNA, 18 nt, Human herpesvirus 6
gcuagacuauacuuuucu

SEQ ID NO: 3987095 - RNA, 17 nt, Human herpesvirus 6
gcuagauaauuaugcau

SEQ ID NO: 3987096 - RNA, 15 nt, Human herpesvirus 6
gcuaggcagaucauc

SEQ ID NO: 3987097 - RNA, 16 nt, Human herpesvirus 6
gcuauggcuuccggaa

SEQ ID NO: 3987098 - RNA, 18 nt, Human herpesvirus 6
gcucuacacccucucucg

SEQ ID NO: 3987099 - RNA, 20 nt, Human herpesvirus 6
gcugcgcugauccugacugg

SEQ ID NO: 3987100 - RNA, 15 nt, Human herpesvirus 6
gcugcggucgccgcc

SEQ ID NO: 3987101 - RNA, 18 nt, Human herpesvirus 6
gcuuccggaauaguucuu

SEQ ID NO: 3987102 - RNA, 19 nt, Human herpesvirus 6
ggaaaauauuuccugccca

SEQ ID NO: 3987103 - RNA, 19 nt, Human herpesvirus 6
ggaaccuccaguuuggauu

SEQ ID NO: 3987104 - RNA, 21 nt, Human herpesvirus 6
ggaagaacaggcggaagaaca

SEQ ID NO: 3987105 - RNA, 18 nt, Human herpesvirus 6
ggaagaggaagggauggc

SEQ ID NO: 3987106 - RNA, 19 nt, Human herpesvirus 6
ggaagauacacugcaagaa

SEQ ID NO: 3987107 - RNA, 12 nt, Human herpesvirus 6
ggaauuucuucc

SEQ ID NO: 3987108 - RNA, 23 nt, Human herpesvirus 6
ggacagggggaucgacgggcagg

SEQ ID NO: 3987109 - RNA, 18 nt, Human herpesvirus 6
ggacccacgguggccugg

SEQ ID NO: 3987110 - RNA, 22 nt, Human herpesvirus 6
ggacccgagguccgacacgccc

SEQ ID NO: 3987111 - RNA, 18 nt, Human herpesvirus 6
ggacggcggggggacggg

SEQ ID NO: 3987112 - RNA, 20 nt, Human herpesvirus 6
ggacgggaagaacaggcgga

SEQ ID NO: 3987113 - RNA, 17 nt, Human herpesvirus 6
ggagacggguuggaaau

SEQ ID NO: 3987114 - RNA, 12 nt, Human herpesvirus 6
ggagauuucagg

SEQ ID NO: 3987115 - RNA, 19 nt, Human herpesvirus 6
ggagcagcuuccacgcgac

SEQ ID NO: 3987116 - RNA, 14 nt, Human herpesvirus 6
ggaggaggaagaga

SEQ ID NO: 3987117 - RNA, 17 nt, Human herpesvirus 6
ggaggaggaggaagaga

SEQ ID NO: 3987118 - RNA, 17 nt, Human herpesvirus 6
ggagguaacggagcccg

SEQ ID NO: 3987119 - RNA, 23 nt, Human herpesvirus 6
ggagugccguugagugccucaga

SEQ ID NO: 3987120 - RNA, 14 nt, Human herpesvirus 6
ggauaagcagaaga

SEQ ID NO: 3987121 - RNA, 19 nt, Human herpesvirus 6
ggauagagagauagauaug

SEQ ID NO: 3987122 - RNA, 17 nt, Human herpesvirus 6
ggaugcugaugaauuua

SEQ ID NO: 3987123 - RNA, 22 nt, Human herpesvirus 6
ggcaaccugaaacuccccagag

SEQ ID NO: 3987124 - RNA, 23 nt, Human herpesvirus 6
ggcaacuccccauucaacauccu

SEQ ID NO: 3987125 - RNA, 17 nt, Human herpesvirus 6
ggcagaucuaucacagg

SEQ ID NO: 3987126 - RNA, 19 nt, Human herpesvirus 6
ggcagaucuaucacaggcg

SEQ ID NO: 3987127 - RNA, 22 nt, Human herpesvirus 6
ggcagguaaccaaaaaaacgua

SEQ ID NO: 3987128 - RNA, 20 nt, Human herpesvirus 6
ggcauagcagcaauaggcac

SEQ ID NO: 3987129 - RNA, 18 nt, Human herpesvirus 6
ggcccagagacgguguuu

SEQ ID NO: 3987130 - RNA, 19 nt, Human herpesvirus 6
ggcccggggacggacaggg

SEQ ID NO: 3987131 - RNA, 19 nt, Human herpesvirus 6
ggccuccgccacugcgagg

SEQ ID NO: 3987132 - RNA, 18 nt, Human herpesvirus 6
ggcgaaaagugcugugcu

SEQ ID NO: 3987133 - RNA, 17 nt, Human herpesvirus 6
ggcggacggggacgaca

SEQ ID NO: 3987134 - RNA, 11 nt, Human herpesvirus 6
ggcgggcagau

SEQ ID NO: 3987135 - RNA, 19 nt, Human herpesvirus 6
ggcgucaucgguggcagag

SEQ ID NO: 3987136 - RNA, 22 nt, Human herpesvirus 6
ggcgucaucgguggcagagggg

SEQ ID NO: 3987137 - RNA, 19 nt, Human herpesvirus 6
ggcuacgacacgcuggagc

SEQ ID NO: 3987138 - RNA, 13 nt, Human herpesvirus 6
ggcucgaaucuaa

SEQ ID NO: 3987139 - RNA, 18 nt, Human herpesvirus 6
gggaggaggaggaggaag

SEQ ID NO: 3987140 - RNA, 13 nt, Human herpesvirus 6
gggagggacccac

SEQ ID NO: 3987141 - RNA, 20 nt, Human herpesvirus 6
gggagugaagagauguuucc

SEQ ID NO: 3987142 - RNA, 15 nt, Human herpesvirus 6
gggcggaaguugguu

SEQ ID NO: 3987143 - RNA, 18 nt, Human herpesvirus 6
gggcucgcucugaaauuu

SEQ ID NO: 3987144 - RNA, 20 nt, Human herpesvirus 6
ggggaucgggcccggggacg

SEQ ID NO: 3987145 - RNA, 16 nt, Human herpesvirus 6
ggggcggacggggacg

SEQ ID NO: 3987146 - RNA, 23 nt, Human herpesvirus 6
gggguguguaugcguggggugcg

SEQ ID NO: 3987147 - RNA, 23 nt, Human herpesvirus 6
gggucguacacgcauuugcaauu

SEQ ID NO: 3987148 - RNA, 16 nt, Human herpesvirus 6
gggugucggacgacgg

SEQ ID NO: 3987149 - RNA, 20 nt, Human herpesvirus 6
gguaccgcgguuggggucuu

SEQ ID NO: 3987150 - RNA, 15 nt, Human herpesvirus 6
gguauuuuagauaua

SEQ ID NO: 3987151 - RNA, 17 nt, Human herpesvirus 6
gguccaaccccucccau

SEQ ID NO: 3987152 - RNA, 23 nt, Human herpesvirus 6
ggucgcguucuaacccaugaaaa

SEQ ID NO: 3987153 - RNA, 15 nt, Human herpesvirus 6
ggugaauguuucuga

SEQ ID NO: 3987154 - RNA, 12 nt, Human herpesvirus 6
aaaaaaaugaua

SEQ ID NO: 3987155 - RNA, 13 nt, Human herpesvirus 6
aaaaaaauuccca

SEQ ID NO: 3987156 - RNA, 16 nt, Human herpesvirus 6
aaaaaauagcagcaau

SEQ ID NO: 3987157 - RNA, 16 nt, Human herpesvirus 6
aaaaaaucagaaucca

SEQ ID NO: 3987158 - RNA, 18 nt, Human herpesvirus 6
aaaaauuuugaugccaaa

SEQ ID NO: 3987159 - RNA, 19 nt, Human herpesvirus 6
aaaacagacgaaucacauc

SEQ ID NO: 3987160 - RNA, 21 nt, Human herpesvirus 6
aaaacauaucgagccaaagaa

SEQ ID NO: 3987161 - RNA, 16 nt, Human herpesvirus 6
aaaacgacacagaaca

SEQ ID NO: 3987162 - RNA, 16 nt, Human herpesvirus 6
aaaacgacaucgcgcg

SEQ ID NO: 3987163 - RNA, 14 nt, Human herpesvirus 6
aaaacuaugugcau

SEQ ID NO: 3987164 - RNA, 16 nt, Human herpesvirus 6
aaaacucuaaaagcug

SEQ ID NO: 3987165 - RNA, 21 nt, Human herpesvirus 6
aaaaucauuaccaguagcaca

SEQ ID NO: 3987166 - RNA, 15 nt, Human herpesvirus 6
aaaaucuauugaaga

SEQ ID NO: 3987167 - RNA, 16 nt, Human herpesvirus 6
aaaauuaaaggucagu

SEQ ID NO: 3987168 - RNA, 12 nt, Human herpesvirus 6
aaaauuugaaau

SEQ ID NO: 3987169 - RNA, 14 nt, Human herpesvirus 6
aaaauuugcuaacg

SEQ ID NO: 3987170 - RNA, 17 nt, Human herpesvirus 6
aaacaaauggaaacugg

SEQ ID NO: 3987171 - RNA, 14 nt, Human herpesvirus 6
aaacacagaugguu

SEQ ID NO: 3987172 - RNA, 20 nt, Human herpesvirus 6
aaacaccucuaaaacaagac

SEQ ID NO: 3987173 - RNA, 15 nt, Human herpesvirus 6
aaacauaaaauguuu

SEQ ID NO: 3987174 - RNA, 20 nt, Human herpesvirus 6
aaacauguauauaaauuggu

SEQ ID NO: 3987175 - RNA, 15 nt, Human herpesvirus 6
aaaccauagguguuu

SEQ ID NO: 3987176 - RNA, 15 nt, Human herpesvirus 6
aaaccaucgcaaugc

SEQ ID NO: 3987177 - RNA, 13 nt, Human herpesvirus 6
aaaccucuguaga

SEQ ID NO: 3987178 - RNA, 15 nt, Human herpesvirus 6
aaacuaugcaaacga

SEQ ID NO: 3987179 - RNA, 18 nt, Human herpesvirus 6
aaacuuuuaaaacaggaa

SEQ ID NO: 3987180 - RNA, 19 nt, Human herpesvirus 6
aaagaguugacguuccaaa

SEQ ID NO: 3987181 - RNA, 16 nt, Human herpesvirus 6
aaagauguuugaagau

SEQ ID NO: 3987182 - RNA, 13 nt, Human herpesvirus 6
aaagcugcuaacg

SEQ ID NO: 3987183 - RNA, 14 nt, Human herpesvirus 6
aaagcugcuaacgc

SEQ ID NO: 3987184 - RNA, 13 nt, Human herpesvirus 6
aaagucagugggu

SEQ ID NO: 3987185 - RNA, 16 nt, Human herpesvirus 6
aaagucaguggguacc

SEQ ID NO: 3987186 - RNA, 19 nt, Human herpesvirus 6
aaagucguuuuggagaaau

SEQ ID NO: 3987187 - RNA, 14 nt, Human herpesvirus 6
caucucaaaaaaca

SEQ ID NO: 3987188 - RNA, 19 nt, Human herpesvirus 6
caucugcaaaaaacaaaug

SEQ ID NO: 3987189 - RNA, 14 nt, Human herpesvirus 6
caugagagagcaaa

SEQ ID NO: 3987190 - RNA, 22 nt, Human herpesvirus 6
caugcaacacaacaaacauccu

SEQ ID NO: 3987191 - RNA, 17 nt, Human herpesvirus 6
caugcauuuuguauuua

SEQ ID NO: 3987192 - RNA, 16 nt, Human herpesvirus 6
caugucggccucugcc

SEQ ID NO: 3987193 - RNA, 21 nt, Human herpesvirus 6
cauuguaaauagguaaacugu

SEQ ID NO: 3987194 - RNA, 23 nt, Human herpesvirus 6
cauuguucuaaagauuuuuauuc

SEQ ID NO: 3987195 - RNA, 20 nt, Human herpesvirus 6
cauuucaagagaacaugauu

SEQ ID NO: 3987196 - RNA, 15 nt, Human herpesvirus 6
cauuuccaugcauau

SEQ ID NO: 3987197 - RNA, 23 nt, Human herpesvirus 6
cauuugcugaugcgauguggagc

SEQ ID NO: 3987198 - RNA, 11 nt, Human herpesvirus 6
ccaaaggaaac

SEQ ID NO: 3987199 - RNA, 17 nt, Human herpesvirus 6
ccaaaugccucgugaga

SEQ ID NO: 3987200 - RNA, 17 nt, Human herpesvirus 6
ccaacgcgacaggguga

SEQ ID NO: 3987201 - RNA, 13 nt, Human herpesvirus 6
ccacaugaaauca

SEQ ID NO: 3987202 - RNA, 13 nt, Human herpesvirus 6
ccaccaacacacc

SEQ ID NO: 3987203 - RNA, 21 nt, Human herpesvirus 6
ccagcauaacuggaaucauga

SEQ ID NO: 3987204 - RNA, 16 nt, Human herpesvirus 6
ccagcuuucuuagaga

SEQ ID NO: 3987205 - RNA, 15 nt, Human herpesvirus 6
ccaggcgaacgagaa

SEQ ID NO: 3987206 - RNA, 21 nt, Human herpesvirus 6
ccagugcuuuaaucacaauga

SEQ ID NO: 3987207 - RNA, 14 nt, Human herpesvirus 6
ccaucuucagacau

SEQ ID NO: 3987208 - RNA, 15 nt, Human herpesvirus 6
ccaugugcggagaaa

SEQ ID NO: 3987209 - RNA, 23 nt, Human herpesvirus 6
cccacgaaaaauaaaauccacga

SEQ ID NO: 3987210 - RNA, 15 nt, Human herpesvirus 6
cccacgguggccugg

SEQ ID NO: 3987211 - RNA, 21 nt, Human herpesvirus 6
cccacgguggccuggcacggu

SEQ ID NO: 3987212 - RNA, 17 nt, Human herpesvirus 6
cccagcguggaauuugu

SEQ ID NO: 3987213 - RNA, 14 nt, Human herpesvirus 6
cccagcucaccacc

SEQ ID NO: 3987214 - RNA, 20 nt, Human herpesvirus 6
cccaggcaaacgagaacucu

SEQ ID NO: 3987215 - RNA, 20 nt, Human herpesvirus 6
cccaggcgaacgagaacucu

SEQ ID NO: 3987216 - RNA, 22 nt, Human herpesvirus 6
cccauccaccuucccucccacc

SEQ ID NO: 3987217 - RNA, 21 nt, Human herpesvirus 6
cccaucccccuccccggagca

SEQ ID NO: 3987218 - RNA, 15 nt, Human herpesvirus 6
cccaucgucuccucc

SEQ ID NO: 3987219 - RNA, 18 nt, Human herpesvirus 6
ccccucgcccgauccgcc

SEQ ID NO: 3987220 - RNA, 16 nt, Human herpesvirus 6
ccccugccgagccugu

SEQ ID NO: 3987221 - RNA, 20 nt, Human herpesvirus 6
cccgcucggucucgcacuuc

SEQ ID NO: 3987222 - RNA, 15 nt, Human herpesvirus 6
cccuaugcaagcuca

SEQ ID NO: 3987223 - RNA, 18 nt, Human herpesvirus 6
ccgaacuagaaaaacaac

SEQ ID NO: 3987224 - RNA, 15 nt, Human herpesvirus 6
ccgaauguucucaga

SEQ ID NO: 3987225 - RNA, 13 nt, Human herpesvirus 6
ccgagggcggacg

SEQ ID NO: 3987226 - RNA, 19 nt, Human herpesvirus 6
ccgaggggacaggggagga

SEQ ID NO: 3987227 - RNA, 13 nt, Human herpesvirus 6
ccgauucagaccu

SEQ ID NO: 3987228 - RNA, 23 nt, Human herpesvirus 6
ccgcagaggcggcgaccgcagcg

SEQ ID NO: 3987229 - RNA, 23 nt, Human herpesvirus 6
ccgcaguuccuguuuuucucaua

SEQ ID NO: 3987230 - RNA, 19 nt, Human herpesvirus 6
ccgcugcggucgccgccuc

SEQ ID NO: 3987231 - RNA, 15 nt, Human herpesvirus 6
ccggccggagugccg

SEQ ID NO: 3987232 - RNA, 20 nt, Human herpesvirus 6
ccggggacggacagggggau

SEQ ID NO: 3987233 - RNA, 15 nt, Human herpesvirus 6
ccgguaacgcugucg

SEQ ID NO: 3987234 - RNA, 13 nt, Human herpesvirus 6
ccgugacacacag

SEQ ID NO: 3987235 - RNA, 16 nt, Human herpesvirus 6
ccguucaucauuccag

SEQ ID NO: 3987236 - RNA, 15 nt, Human herpesvirus 6
ccguucucucuccuc

SEQ ID NO: 3987237 - RNA, 15 nt, Human herpesvirus 6
ccuaaauaccauuuu

SEQ ID NO: 3987238 - RNA, 14 nt, Human herpesvirus 6
ccuacaagggcagg

SEQ ID NO: 3987239 - RNA, 14 nt, Human herpesvirus 6
ccuaccauguugcu

SEQ ID NO: 3987240 - RNA, 17 nt, Human herpesvirus 6
ccuauagucaauguugu

SEQ ID NO: 3987241 - RNA, 14 nt, Human herpesvirus 6
ccucaauuaauaca

SEQ ID NO: 3987242 - RNA, 23 nt, Human herpesvirus 6
ccucacuacugaaaccaaagcau

SEQ ID NO: 3987243 - RNA, 16 nt, Human herpesvirus 6
ccucaugaguguuuaa

SEQ ID NO: 3987244 - RNA, 16 nt, Human herpesvirus 6
ccucauuguuucacuu

SEQ ID NO: 3987245 - RNA, 17 nt, Human herpesvirus 6
ccucgcccgauccgccc

SEQ ID NO: 3987246 - RNA, 15 nt, Human herpesvirus 6
ccucguuguuucaua

SEQ ID NO: 3987247 - RNA, 17 nt, Human herpesvirus 6
ccucugcaauagcagaa

SEQ ID NO: 3987248 - RNA, 14 nt, Human herpesvirus 6
ccugccuacacugc

SEQ ID NO: 3987249 - RNA, 14 nt, Human herpesvirus 6
ccugggaaaagggu

SEQ ID NO: 3987250 - RNA, 23 nt, Human herpesvirus 6
ccuucaccugucucugcuuuaug

SEQ ID NO: 3987251 - RNA, 17 nt, Human herpesvirus 6
ccuuguguaucugugaa

SEQ ID NO: 3987252 - RNA, 20 nt, Human herpesvirus 6
cgaaaacucuaaaagcugcu

SEQ ID NO: 3987253 - RNA, 18 nt, Human herpesvirus 6
cgaaaggugaaaugaaug

SEQ ID NO: 3987254 - RNA, 19 nt, Human herpesvirus 6
cgaaucucaagcacaaaac

SEQ ID NO: 3987255 - RNA, 15 nt, Human herpesvirus 6
cgaaugguuaaaagu

SEQ ID NO: 3987256 - RNA, 15 nt, Human herpesvirus 6
cgacaaccgccgccg

SEQ ID NO: 3987257 - RNA, 22 nt, Human herpesvirus 6
cgacacgugggggguuccuccg

SEQ ID NO: 3987258 - RNA, 23 nt, Human herpesvirus 6
cgacccacuccuacuauccgccc

SEQ ID NO: 3987259 - RNA, 15 nt, Human herpesvirus 6
cgacgauuguccugg

SEQ ID NO: 3987260 - RNA, 16 nt, Human herpesvirus 6
cgacuaccacaucacc

SEQ ID NO: 3987261 - RNA, 23 nt, Human herpesvirus 6
cgacuaucaaaauaaaaauuuua

SEQ ID NO: 3987262 - RNA, 14 nt, Human herpesvirus 6
cgagcggugugcag

SEQ ID NO: 3987263 - RNA, 13 nt, Human herpesvirus 6
cgagucgaagaga

SEQ ID NO: 3987264 - RNA, 19 nt, Human herpesvirus 6
cgaguucgccuugucauca

SEQ ID NO: 3987265 - RNA, 20 nt, Human herpesvirus 6
cgauacccagcgggcuccgu

SEQ ID NO: 3987266 - RNA, 16 nt, Human herpesvirus 6
cgauuaguuuguguag

SEQ ID NO: 3987267 - RNA, 15 nt, Human herpesvirus 6
cgcaaauucucucua

SEQ ID NO: 3987268 - RNA, 20 nt, Human herpesvirus 6
cgcaagucacgggcagcugc

SEQ ID NO: 3987269 - RNA, 15 nt, Human herpesvirus 6
cgcacaucgauaaac

SEQ ID NO: 3987270 - RNA, 16 nt, Human herpesvirus 6
cgcaguuccuguuuuu

SEQ ID NO: 3987271 - RNA, 18 nt, Human herpesvirus 6
cgccaaaaaaauacagua

SEQ ID NO: 3987272 - RNA, 21 nt, Human herpesvirus 6
cgccaagaaaaagaaauuaau

SEQ ID NO: 3987273 - RNA, 20 nt, Human herpesvirus 6
cgccgccguuacugucgcug

SEQ ID NO: 3987274 - RNA, 20 nt, Human herpesvirus 6
cgccggagguaacggagccc

SEQ ID NO: 3987275 - RNA, 17 nt, Human herpesvirus 6
cgccguccuauucagag

SEQ ID NO: 3987276 - RNA, 20 nt, Human herpesvirus 6
cgccuguuccacgcgcgugu

SEQ ID NO: 3987277 - RNA, 22 nt, Human herpesvirus 6
cgcgauuuaaacaacacagcac

SEQ ID NO: 3987278 - RNA, 18 nt, Human herpesvirus 6
cgcgguuggggucuuucc

SEQ ID NO: 3987279 - RNA, 23 nt, Human herpesvirus 6
cgcgguuggggucuuuccugcac

SEQ ID NO: 3987280 - RNA, 12 nt, Human herpesvirus 6
cgcuuuuacuga

SEQ ID NO: 3987281 - RNA, 16 nt, Human herpesvirus 6
cggaaaacuaaaaguc

SEQ ID NO: 3987282 - RNA, 17 nt, Human herpesvirus 6
cggaacaaggccaaacc

SEQ ID NO: 3987283 - RNA, 19 nt, Human herpesvirus 6
cggaauuuugagauuuaca

SEQ ID NO: 3987284 - RNA, 16 nt, Human herpesvirus 6
cggacaccgagggcgg

SEQ ID NO: 3987285 - RNA, 17 nt, Human herpesvirus 6
cggacgacgggcggggc

SEQ ID NO: 3987286 - RNA, 12 nt, Human herpesvirus 6
cggaguugcagu

SEQ ID NO: 3987287 - RNA, 14 nt, Human herpesvirus 6
cggcaacgcuccuc

SEQ ID NO: 3987288 - RNA, 20 nt, Human herpesvirus 6
cgggcagguuaucggaagca

SEQ ID NO: 3987289 - RNA, 21 nt, Human herpesvirus 6
cgggcccggggacggacaggg

SEQ ID NO: 3987290 - RNA, 13 nt, Human herpesvirus 6
cgggcuugcgaug

SEQ ID NO: 3987291 - RNA, 15 nt, Human herpesvirus 6
cggggacggacaggg

SEQ ID NO: 3987292 - RNA, 19 nt, Human herpesvirus 6
cggggagagaauugccgau

SEQ ID NO: 3987293 - RNA, 17 nt, Human herpesvirus 6
cggggcggacggggacg

SEQ ID NO: 3987294 - RNA, 18 nt, Human herpesvirus 6
cggggggacgggcggagc

SEQ ID NO: 3987295 - RNA, 21 nt, Human herpesvirus 6
cggguaaacgcgcgccggugc

SEQ ID NO: 3987296 - RNA, 17 nt, Human herpesvirus 6
cgguccaaccccuccca

SEQ ID NO: 3987297 - RNA, 18 nt, Human herpesvirus 6
cgguccacacgccagucc

SEQ ID NO: 3987298 - RNA, 19 nt, Human herpesvirus 6
cgguccacacgccaguccg

SEQ ID NO: 3987299 - RNA, 21 nt, Human herpesvirus 6
cgguuaaagaaucugcagauu

SEQ ID NO: 3987300 - RNA, 17 nt, Human herpesvirus 6
cguagacaguaaaaugu

SEQ ID NO: 3987301 - RNA, 14 nt, Human herpesvirus 6
cguagacagucaca

SEQ ID NO: 3987302 - RNA, 11 nt, Human herpesvirus 6
cguauauugug

SEQ ID NO: 3987303 - RNA, 16 nt, Human herpesvirus 6
cguaucuuaaaguugg

SEQ ID NO: 3987304 - RNA, 17 nt, Human herpesvirus 6
cgucaugcaaaacagac

SEQ ID NO: 3987305 - RNA, 23 nt, Human herpesvirus 6
cgucugggacccacgguggccug

SEQ ID NO: 3987306 - RNA, 17 nt, Human herpesvirus 6
cgugccgggaccccgac

SEQ ID NO: 3987307 - RNA, 22 nt, Human herpesvirus 6
cgugguuuuuuuuuucuuacac

SEQ ID NO: 3987308 - RNA, 17 nt, Human herpesvirus 6
cguuuagaaugacagag

SEQ ID NO: 3987309 - RNA, 22 nt, Human herpesvirus 6
cuaaaacgacuauacgaaauaa

SEQ ID NO: 3987310 - RNA, 14 nt, Human herpesvirus 6
cuaaaagcugcuaa

SEQ ID NO: 3987311 - RNA, 12 nt, Human herpesvirus 6
cuaaaaggcucu

SEQ ID NO: 3987312 - RNA, 17 nt, Human herpesvirus 6
cuaaaagucagugggua

SEQ ID NO: 3987313 - RNA, 16 nt, Human herpesvirus 6
cuaagauugugcaguu

SEQ ID NO: 3987314 - RNA, 21 nt, Human herpesvirus 6
cuaagucuuugggaacaugua

SEQ ID NO: 3987315 - RNA, 17 nt, Human herpesvirus 6
cuaauaugaacaaugac

SEQ ID NO: 3987316 - RNA, 15 nt, Human herpesvirus 6
cuagcuuuucauaug

SEQ ID NO: 3987317 - RNA, 16 nt, Human herpesvirus 6
cuauccgcccuccccg

SEQ ID NO: 3987318 - RNA, 12 nt, Human herpesvirus 6
cuaugcagcgcc

SEQ ID NO: 3987319 - RNA, 20 nt, Human herpesvirus 6
cuaugcgcuuuuauuucugg

SEQ ID NO: 3987320 - RNA, 14 nt, Human herpesvirus 6
cuauguaaacuucu

SEQ ID NO: 3987321 - RNA, 20 nt, Human herpesvirus 6
cuauuaaacuaacauagcga

SEQ ID NO: 3987322 - RNA, 14 nt, Human herpesvirus 6
cuauuaugugaaug

SEQ ID NO: 3987323 - RNA, 22 nt, Human herpesvirus 6
cuauuuacaauguucaauuacu

SEQ ID NO: 3987324 - RNA, 18 nt, Human herpesvirus 6
cuauuuguuuaaugcauu

SEQ ID NO: 3987325 - RNA, 19 nt, Human herpesvirus 6
cucacacccauggcgagaa

SEQ ID NO: 3987326 - RNA, 22 nt, Human herpesvirus 6
cucaguaauuuguguaauuuaa

SEQ ID NO: 3987327 - RNA, 19 nt, Human herpesvirus 6
cucauguugccucuggaca

SEQ ID NO: 3987328 - RNA, 23 nt, Human herpesvirus 6
cuccccgagcacgguccacacgc

SEQ ID NO: 3987329 - RNA, 15 nt, Human herpesvirus 6
cucccggcccagaga

SEQ ID NO: 3987330 - RNA, 14 nt, Human herpesvirus 6
cucgaagccucgac

SEQ ID NO: 3987331 - RNA, 22 nt, Human herpesvirus 6
cucgacuccagugcuuuaauca

SEQ ID NO: 3987332 - RNA, 14 nt, Human herpesvirus 6
cucggaaaauuaaa

SEQ ID NO: 3987333 - RNA, 18 nt, Human herpesvirus 6
cucggauucaaagaaagu

SEQ ID NO: 3987334 - RNA, 18 nt, Human herpesvirus 6
cucguucuaccaugugcg

SEQ ID NO: 3987335 - RNA, 19 nt, Human herpesvirus 6
cucuauuccccauuccuag

SEQ ID NO: 3987336 - RNA, 14 nt, Human herpesvirus 6
cucugcaaaacaaa

SEQ ID NO: 3987337 - RNA, 14 nt, Human herpesvirus 6
cucugcggacggag

SEQ ID NO: 3987338 - RNA, 23 nt, Human herpesvirus 6
cugaauggaguaaauuaaaguuu

SEQ ID NO: 3987339 - RNA, 15 nt, Human herpesvirus 6
cugacaaccuccgca

SEQ ID NO: 3987340 - RNA, 19 nt, Human herpesvirus 6
cugaccguuguaagaagaa

SEQ ID NO: 3987341 - RNA, 22 nt, Human herpesvirus 6
cugauuccuucaauguucuuca

SEQ ID NO: 3987342 - RNA, 14 nt, Human herpesvirus 6
cugcaaaaaacaaa

SEQ ID NO: 3987343 - RNA, 12 nt, Human herpesvirus 6
cugcaaaacaaa

SEQ ID NO: 3987344 - RNA, 22 nt, Human herpesvirus 6
cugcacaggcgaacgaaaacuc

SEQ ID NO: 3987345 - RNA, 22 nt, Human herpesvirus 6
cugccauuauugauagcauuau

SEQ ID NO: 3987346 - RNA, 22 nt, Human herpesvirus 6
cugcccaggcgaacgagaacuc

SEQ ID NO: 3987347 - RNA, 20 nt, Human herpesvirus 6
cuggcccgaggauuaucgau

SEQ ID NO: 3987348 - RNA, 18 nt, Human herpesvirus 6
cugguaaauuuuaucgaa

SEQ ID NO: 3987349 - RNA, 17 nt, Human herpesvirus 6
cuggugaauguuucuga

SEQ ID NO: 3987350 - RNA, 16 nt, Human herpesvirus 6
cuguaccauugucaac

SEQ ID NO: 3987351 - RNA, 20 nt, Human herpesvirus 6
cuguccccucgguccaaccc

SEQ ID NO: 3987352 - RNA, 22 nt, Human herpesvirus 6
cuguggcgcgaccgaccccugc

SEQ ID NO: 3987353 - RNA, 22 nt, Human herpesvirus 6
cugugucuguucaacgucuuca

SEQ ID NO: 3987354 - RNA, 14 nt, Human herpesvirus 6
cuguugaauuccag

SEQ ID NO: 3987355 - RNA, 15 nt, Human herpesvirus 6
cuguuugaaacugag

SEQ ID NO: 3987356 - RNA, 16 nt, Human herpesvirus 6
cuguuuuucucauaaa

SEQ ID NO: 3987357 - RNA, 16 nt, Human herpesvirus 6
cuguuuuucucggaaa

SEQ ID NO: 3987358 - RNA, 23 nt, Human herpesvirus 6
cuuaaucaacugguuuaguuugg

SEQ ID NO: 3987359 - RNA, 14 nt, Human herpesvirus 6
cuuacagagcuuuu

SEQ ID NO: 3987360 - RNA, 15 nt, Human herpesvirus 6
cuuagcauauuuugg

SEQ ID NO: 3987361 - RNA, 22 nt, Human herpesvirus 6
cuuauacacgaacuaaauaaga

SEQ ID NO: 3987362 - RNA, 20 nt, Human herpesvirus 6
cuuauugaggaaaugcagca

SEQ ID NO: 3987363 - RNA, 22 nt, Human herpesvirus 6
cuucacuuugggcgauggaugu

SEQ ID NO: 3987364 - RNA, 13 nt, Human herpesvirus 6
cuucaggugucuc

SEQ ID NO: 3987365 - RNA, 12 nt, Human herpesvirus 6
cuucccucuucc

SEQ ID NO: 3987366 - RNA, 19 nt, Human herpesvirus 6
cuucgaauacuuucaugau

SEQ ID NO: 3987367 - RNA, 18 nt, Human herpesvirus 6
cuucgauccaauaagaaa

SEQ ID NO: 3987368 - RNA, 18 nt, Human herpesvirus 6
cuucugccugaaaaugaa

SEQ ID NO: 3987369 - RNA, 12 nt, Human herpesvirus 6
cuugacagagau

SEQ ID NO: 3987370 - RNA, 17 nt, Human herpesvirus 6
cuugacguauccucaga

SEQ ID NO: 3987371 - RNA, 23 nt, Human herpesvirus 6
cuugauaaucugaucgaaauacu

SEQ ID NO: 3987372 - RNA, 23 nt, Human herpesvirus 6
cuuggacaccgguaaccucgcuc

SEQ ID NO: 3987373 - RNA, 17 nt, Human herpesvirus 6
cuuguguucuaucacau

SEQ ID NO: 3987374 - RNA, 17 nt, Human herpesvirus 6
cuuuauagagcaacuca

SEQ ID NO: 3987375 - RNA, 16 nt, Human herpesvirus 6
cuuuccugcacaggcg

SEQ ID NO: 3987376 - RNA, 22 nt, Human herpesvirus 6
cuuucuacgguaggcagggaaa

SEQ ID NO: 3987377 - RNA, 12 nt, Human herpesvirus 6
cuuuuuguauua

SEQ ID NO: 3987378 - RNA, 22 nt, Human herpesvirus 6
cuuuuuuaaaccucuguagauc

SEQ ID NO: 3987379 - RNA, 21 nt, Human herpesvirus 6
gaaaaaaaauugccuuguaaa

SEQ ID NO: 3987380 - RNA, 14 nt, Human herpesvirus 6
gaaaacuaaaaguc

SEQ ID NO: 3987381 - RNA, 17 nt, Human herpesvirus 6
gaaaagaucaagcaagu

SEQ ID NO: 3987382 - RNA, 14 nt, Human herpesvirus 6
gaaaagggugacac

SEQ ID NO: 3987383 - RNA, 22 nt, Human herpesvirus 6
gaaaauauuuccaugacuguga

SEQ ID NO: 3987384 - RNA, 19 nt, Human herpesvirus 6
gaaaauauuuccugcccag

SEQ ID NO: 3987385 - RNA, 17 nt, Human herpesvirus 6
gaaacaaccacaaacau

SEQ ID NO: 3987386 - RNA, 12 nt, Human herpesvirus 6
gaaacaagaaag

SEQ ID NO: 3987387 - RNA, 15 nt, Human herpesvirus 6
gaaacuccccagaga

SEQ ID NO: 3987388 - RNA, 14 nt, Human herpesvirus 6
gaaagaaaaauauu

SEQ ID NO: 3987389 - RNA, 16 nt, Human herpesvirus 6
gaaaguucaucuuuca

SEQ ID NO: 3987390 - RNA, 16 nt, Human herpesvirus 6
gaaauaucagaaauaa

SEQ ID NO: 3987391 - RNA, 16 nt, Human herpesvirus 6
gaaaugaucaauacau

SEQ ID NO: 3987392 - RNA, 18 nt, Human herpesvirus 6
gaaaugaugaguaauaca

SEQ ID NO: 3987393 - RNA, 20 nt, Human herpesvirus 6
gaacaaaaugaggggaacac

SEQ ID NO: 3987394 - RNA, 17 nt, Human herpesvirus 6
gaacaaaguaauaugau

SEQ ID NO: 3987395 - RNA, 16 nt, Human herpesvirus 6
gaacaggcggaagaac

SEQ ID NO: 3987396 - RNA, 21 nt, Human herpesvirus 6
gaacaggcggaagaacacgaa

SEQ ID NO: 3987397 - RNA, 15 nt, Human herpesvirus 6
gaacaucucagaucu

SEQ ID NO: 3987398 - RNA, 14 nt, Human herpesvirus 6
gaacccuagacaca

SEQ ID NO: 3987399 - RNA, 18 nt, Human herpesvirus 6
gaagaauuuauguucagc

SEQ ID NO: 3987400 - RNA, 20 nt, Human herpesvirus 6
gaagacauuaauacugguuu

SEQ ID NO: 3987401 - RNA, 17 nt, Human herpesvirus 6
gaagaccuauauguguu

SEQ ID NO: 3987402 - RNA, 21 nt, Human herpesvirus 6
gaagaucuuuauggagggaau

SEQ ID NO: 3987403 - RNA, 18 nt, Human herpesvirus 6
gaagauuuguaaggacaa

SEQ ID NO: 3987404 - RNA, 17 nt, Human herpesvirus 6
gaagucuugcuuggaaa

SEQ ID NO: 3987405 - RNA, 19 nt, Human herpesvirus 6
gaauaacgguguugaguuu

SEQ ID NO: 3987406 - RNA, 14 nt, Human herpesvirus 6
gaauauugaaacgg

SEQ ID NO: 3987407 - RNA, 20 nt, Human herpesvirus 6
gaaucaugagagccuucagu

SEQ ID NO: 3987408 - RNA, 15 nt, Human herpesvirus 6
gaaucauggugucuu

SEQ ID NO: 3987409 - RNA, 15 nt, Human herpesvirus 6
gaaugagauguucua

SEQ ID NO: 3987410 - RNA, 23 nt, Human herpesvirus 6
gaaugcuauucguuuuuuuucuu

SEQ ID NO: 3987411 - RNA, 15 nt, Human herpesvirus 6
gaauuguauauauag

SEQ ID NO: 3987412 - RNA, 17 nt, Human herpesvirus 6
gacaaaaccuaaauaca

SEQ ID NO: 3987413 - RNA, 18 nt, Human herpesvirus 6
gacaaaucaucacuacgu

SEQ ID NO: 3987414 - RNA, 20 nt, Human herpesvirus 6
gacaguccauuucuaaagau

SEQ ID NO: 3987415 - RNA, 18 nt, Human herpesvirus 6
gacauccagaaaagcaaa

SEQ ID NO: 3987416 - RNA, 16 nt, Human herpesvirus 6
gacaugcauuuuguau

SEQ ID NO: 3987417 - RNA, 12 nt, Human herpesvirus 6
gaccagccagau

SEQ ID NO: 3987418 - RNA, 13 nt, Human herpesvirus 6
gaccaggacaauc

SEQ ID NO: 3987419 - RNA, 15 nt, Human herpesvirus 6
gacccacgguggccu

SEQ ID NO: 3987420 - RNA, 20 nt, Human herpesvirus 6
gacccacgguggccuggcac

SEQ ID NO: 3987421 - RNA, 17 nt, Human herpesvirus 6
gaccccugccgagccug

SEQ ID NO: 3987422 - RNA, 13 nt, Human herpesvirus 6
gacccggccggag

SEQ ID NO: 3987423 - RNA, 15 nt, Human herpesvirus 6
gacgcaaagagacca

SEQ ID NO: 3987424 - RNA, 18 nt, Human herpesvirus 6
gacgcaccuccuuuguau

SEQ ID NO: 3987425 - RNA, 20 nt, Human herpesvirus 6
aagaaaguuucguacuggag

SEQ ID NO: 3987426 - RNA, 15 nt, Human herpesvirus 6
aagaauuuuuguagc

SEQ ID NO: 3987427 - RNA, 22 nt, Human herpesvirus 6
aagacguuugcuguuuucacca

SEQ ID NO: 3987428 - RNA, 17 nt, Human herpesvirus 6
aagaugagcagcuuugg

SEQ ID NO: 3987429 - RNA, 22 nt, Human herpesvirus 6
aagcgccugccuacacugcgaa

SEQ ID NO: 3987430 - RNA, 23 nt, Human herpesvirus 6
aaggacuaucugagacaguccau

SEQ ID NO: 3987431 - RNA, 16 nt, Human herpesvirus 6
aagguaucaaagaaca

SEQ ID NO: 3987432 - RNA, 16 nt, Human herpesvirus 6
aaggugaaaugaaugu

SEQ ID NO: 3987433 - RNA, 15 nt, Human herpesvirus 6
aaguaagcaccuuag

SEQ ID NO: 3987434 - RNA, 19 nt, Human herpesvirus 6
aaguagccaaugauucuua

SEQ ID NO: 3987435 - RNA, 16 nt, Human herpesvirus 6
aaguauccuaaauacc

SEQ ID NO: 3987436 - RNA, 23 nt, Human herpesvirus 6
aaguauguacaauauaauuucuu

SEQ ID NO: 3987437 - RNA, 18 nt, Human herpesvirus 6
aagucacgggcagcugca

SEQ ID NO: 3987438 - RNA, 17 nt, Human herpesvirus 6
aagucagagauuauuca

SEQ ID NO: 3987439 - RNA, 12 nt, Human herpesvirus 6
aagucagugggu

SEQ ID NO: 3987440 - RNA, 17 nt, Human herpesvirus 6
aagucuaaggugacucu

SEQ ID NO: 3987441 - RNA, 19 nt, Human herpesvirus 6
aaguuuacauagaaauuac

SEQ ID NO: 3987442 - RNA, 15 nt, Human herpesvirus 6
aauaaaucgcuuaaa

SEQ ID NO: 3987443 - RNA, 22 nt, Human herpesvirus 6
aauaacucagauucgcaagacu

SEQ ID NO: 3987444 - RNA, 15 nt, Human herpesvirus 6
aauaauuauccucuc

SEQ ID NO: 3987445 - RNA, 18 nt, Human herpesvirus 6
aauauaacaguaggagau

SEQ ID NO: 3987446 - RNA, 21 nt, Human herpesvirus 6
aauaucaccuuacaaauaaua

SEQ ID NO: 3987447 - RNA, 17 nt, Human herpesvirus 6
aauauguuuucaaaaau

SEQ ID NO: 3987448 - RNA, 16 nt, Human herpesvirus 6
aauauuuccugcccag

SEQ ID NO: 3987449 - RNA, 23 nt, Human herpesvirus 6
aaucagccugcucagagcugcgc

SEQ ID NO: 3987450 - RNA, 19 nt, Human herpesvirus 6
aaucauuagcauacagaug

SEQ ID NO: 3987451 - RNA, 17 nt, Human herpesvirus 6
aaucgauuacaaaacaa

SEQ ID NO: 3987452 - RNA, 23 nt, Human herpesvirus 6
aaucucaagcacaaaaccaggaa

SEQ ID NO: 3987453 - RNA, 21 nt, Human herpesvirus 6
aaucugaucgaaauacuucuc

SEQ ID NO: 3987454 - RNA, 16 nt, Human herpesvirus 6
aaugagauagaaguua

SEQ ID NO: 3987455 - RNA, 16 nt, Human herpesvirus 6
aaugagauguucuaaa

SEQ ID NO: 3987456 - RNA, 22 nt, Human herpesvirus 6
aaugccucuccuauaaauacug

SEQ ID NO: 3987457 - RNA, 10 nt, Human herpesvirus 6
aaugcugcug

SEQ ID NO: 3987458 - RNA, 21 nt, Human herpesvirus 6
aauguaacuuuuuguauuaug

SEQ ID NO: 3987459 - RNA, 14 nt, Human herpesvirus 6
aauguaauaauuga

SEQ ID NO: 3987460 - RNA, 20 nt, Human herpesvirus 6
aauguuuuucauaaauggua

SEQ ID NO: 3987461 - RNA, 20 nt, Human herpesvirus 6
aauuacgcuguccgccuguu

SEQ ID NO: 3987462 - RNA, 17 nt, Human herpesvirus 6
aauucgucgaguuguau

SEQ ID NO: 3987463 - RNA, 13 nt, Human herpesvirus 6
aauucuaaauacg

SEQ ID NO: 3987464 - RNA, 21 nt, Human herpesvirus 6
aauuguggauuuucagacaua

SEQ ID NO: 3987465 - RNA, 14 nt, Human herpesvirus 6
aauuucuuuugagg

SEQ ID NO: 3987466 - RNA, 19 nt, Human herpesvirus 6
aauuugaaauaucagaaau

SEQ ID NO: 3987467 - RNA, 20 nt, Human herpesvirus 6
aauuugaaauaucagaaaua

SEQ ID NO: 3987468 - RNA, 18 nt, Human herpesvirus 6
aauuuguaaaaaaacauu

SEQ ID NO: 3987469 - RNA, 17 nt, Human herpesvirus 6
aauuuuauuaacuguaa

SEQ ID NO: 3987470 - RNA, 13 nt, Human herpesvirus 6
acaaaacaaucua

SEQ ID NO: 3987471 - RNA, 16 nt, Human herpesvirus 6
acaaaacaaucuaucu

SEQ ID NO: 3987472 - RNA, 17 nt, Human herpesvirus 6
acaaacugucacuuucc

SEQ ID NO: 3987473 - RNA, 13 nt, Human herpesvirus 6
acaaagcuuuacu

SEQ ID NO: 3987474 - RNA, 21 nt, Human herpesvirus 6
acaaauucuuacauuuuguac

SEQ ID NO: 3987475 - RNA, 23 nt, Human herpesvirus 6
acaagggcagggggggucucugu

SEQ ID NO: 3987476 - RNA, 15 nt, Human herpesvirus 6
acaaugacugggaga

SEQ ID NO: 3987477 - RNA, 23 nt, Human herpesvirus 6
acacaccugccuagaauucuccc

SEQ ID NO: 3987478 - RNA, 16 nt, Human herpesvirus 6
acaccaucuucagcuc

SEQ ID NO: 3987479 - RNA, 18 nt, Human herpesvirus 6
acacgcgcaguggacggc

SEQ ID NO: 3987480 - RNA, 15 nt, Human herpesvirus 6
acacguguuaaauaa

SEQ ID NO: 3987481 - RNA, 21 nt, Human herpesvirus 6
acacugcaagguuucgaaugg

SEQ ID NO: 3987482 - RNA, 17 nt, Human herpesvirus 6
acacuugccaugcuagc

SEQ ID NO: 3987483 - RNA, 19 nt, Human herpesvirus 6
acacuuuaucgauguagau

SEQ ID NO: 3987484 - RNA, 19 nt, Human herpesvirus 6
acagaauucuucugugacu

SEQ ID NO: 3987485 - RNA, 15 nt, Human herpesvirus 6
acagacgaaucacau

SEQ ID NO: 3987486 - RNA, 15 nt, Human herpesvirus 6
acaggggaggagcgu

SEQ ID NO: 3987487 - RNA, 20 nt, Human herpesvirus 6
acagucguaguauccuuaac

SEQ ID NO: 3987488 - RNA, 14 nt, Human herpesvirus 6
acagucuuuaaaug

SEQ ID NO: 3987489 - RNA, 19 nt, Human herpesvirus 6
acagugauuagaauguuug

SEQ ID NO: 3987490 - RNA, 20 nt, Human herpesvirus 6
acaguuauacuggcaaagca

SEQ ID NO: 3987491 - RNA, 16 nt, Human herpesvirus 6
acaguuuccgcugccg

SEQ ID NO: 3987492 - RNA, 15 nt, Human herpesvirus 6
acauccuaacaagac

SEQ ID NO: 3987493 - RNA, 20 nt, Human herpesvirus 6
acaucgucuccuacauucuc

SEQ ID NO: 3987494 - RNA, 13 nt, Human herpesvirus 6
acaugcaauuuuu

SEQ ID NO: 3987495 - RNA, 21 nt, Human herpesvirus 6
acauguucuuuauuaaauguu

SEQ ID NO: 3987496 - RNA, 14 nt, Human herpesvirus 6
acauuaaacacuaa

SEQ ID NO: 3987497 - RNA, 21 nt, Human herpesvirus 6
acauugauuccaccuuuaucg

SEQ ID NO: 3987498 - RNA, 17 nt, Human herpesvirus 6
acauuuauaaaaggagu

SEQ ID NO: 3987499 - RNA, 18 nt, Human herpesvirus 6
acauuuauaauuaaaaua

SEQ ID NO: 3987500 - RNA, 14 nt, Human herpesvirus 6
acauuuauguuucu

SEQ ID NO: 3987501 - RNA, 21 nt, Human herpesvirus 6
acauuuauguuucuuauuagc

SEQ ID NO: 3987502 - RNA, 17 nt, Human herpesvirus 6
acauuuugguuucccuc

SEQ ID NO: 3987503 - RNA, 16 nt, Human herpesvirus 6
accaacacaccugccu

SEQ ID NO: 3987504 - RNA, 19 nt, Human herpesvirus 6
accaccaacacaccugccu

SEQ ID NO: 3987505 - RNA, 18 nt, Human herpesvirus 6
accaucaauaaaaaucua

SEQ ID NO: 3987506 - RNA, 20 nt, Human herpesvirus 6
acccaucuccucaacacucu

SEQ ID NO: 3987507 - RNA, 22 nt, Human herpesvirus 6
acccauuuccggaguugcagug

SEQ ID NO: 3987508 - RNA, 21 nt, Human herpesvirus 6
accccucccaucccccucccc

SEQ ID NO: 3987509 - RNA, 22 nt, Human herpesvirus 6
acccuacaaucuguccagcuug

SEQ ID NO: 3987510 - RNA, 22 nt, Human herpesvirus 6
accgaccccugccgagccugug

SEQ ID NO: 3987511 - RNA, 22 nt, Human herpesvirus 6
accgagagauuuacuguuucuu

SEQ ID NO: 3987512 - RNA, 20 nt, Human herpesvirus 6
accgagagccggaaaacaau

SEQ ID NO: 3987513 - RNA, 15 nt, Human herpesvirus 6
accgcaguuucuguu

SEQ ID NO: 3987514 - RNA, 20 nt, Human herpesvirus 6
accgcaguuucuguuuuucu

SEQ ID NO: 3987515 - RNA, 16 nt, Human herpesvirus 6
accgccguucugcuua

SEQ ID NO: 3987516 - RNA, 19 nt, Human herpesvirus 6
accgucuacugcacuuucg

SEQ ID NO: 3987517 - RNA, 18 nt, Human herpesvirus 6
accgucucugaagcaaaa

SEQ ID NO: 3987518 - RNA, 14 nt, Human herpesvirus 6
accuaauaaacugu

SEQ ID NO: 3987519 - RNA, 16 nt, Human herpesvirus 6
accucugaaacacugu

SEQ ID NO: 3987520 - RNA, 11 nt, Human herpesvirus 6
acgaaaaauuu

SEQ ID NO: 3987521 - RNA, 20 nt, Human herpesvirus 6
acgaauacuucucuuuauag

SEQ ID NO: 3987522 - RNA, 23 nt, Human herpesvirus 6
acgaugugugggaaugcugagcu

SEQ ID NO: 3987523 - RNA, 24 nt, Human herpesvirus 6
acgauuucugacucucucaguaau

SEQ ID NO: 3987524 - RNA, 21 nt, Human herpesvirus 6
acgcaacgcggagugaacuca

SEQ ID NO: 3987525 - RNA, 13 nt, Human herpesvirus 6
acgcauagacaaa

SEQ ID NO: 3987526 - RNA, 18 nt, Human herpesvirus 6
acgcccccaccucgcgca

SEQ ID NO: 3987527 - RNA, 22 nt, Human herpesvirus 6
acggaaaagaugagcgucagag

SEQ ID NO: 3987528 - RNA, 19 nt, Human herpesvirus 6
acggccaaccucuuccuag

SEQ ID NO: 3987529 - RNA, 20 nt, Human herpesvirus 6
acggcgacaaccgccgccgc

SEQ ID NO: 3987530 - RNA, 17 nt, Human herpesvirus 6
acggcgcggagcccaag

SEQ ID NO: 3987531 - RNA, 12 nt, Human herpesvirus 6
acgggaaaagau

SEQ ID NO: 3987532 - RNA, 17 nt, Human herpesvirus 6
acggugccaaaggaaac

SEQ ID NO: 3987533 - RNA, 13 nt, Human herpesvirus 6
acgguggccuggc

SEQ ID NO: 3987534 - RNA, 14 nt, Human herpesvirus 6
acgguuuauaugca

SEQ ID NO: 3987535 - RNA, 23 nt, Human herpesvirus 6
acguauauuguguaccuuguaau

SEQ ID NO: 3987536 - RNA, 17 nt, Human herpesvirus 6
acgucgacgaaauaauu

SEQ ID NO: 3987537 - RNA, 13 nt, Human herpesvirus 6
acgucugcgucgc

SEQ ID NO: 3987538 - RNA, 18 nt, Human herpesvirus 6
acgucugcgucgcccccc

SEQ ID NO: 3987539 - RNA, 21 nt, Human herpesvirus 6
acgucugcgucgcccccccgc

SEQ ID NO: 3987540 - RNA, 19 nt, Human herpesvirus 6
acgugauuccucaaaugaa

SEQ ID NO: 3987541 - RNA, 16 nt, Human herpesvirus 6
acgugcuugucucaca

SEQ ID NO: 3987542 - RNA, 19 nt, Human herpesvirus 6
acgugguuuuuuuuuucuu

SEQ ID NO: 3987543 - RNA, 23 nt, Human herpesvirus 6
acguuauaucuaaagucagagau

SEQ ID NO: 3987544 - RNA, 19 nt, Human herpesvirus 6
acuaaaaaaaaaaacacaa

SEQ ID NO: 3987545 - RNA, 13 nt, Human herpesvirus 6
acuacagcuaaga

SEQ ID NO: 3987546 - RNA, 18 nt, Human herpesvirus 6
acuacugaaaccaaagca

SEQ ID NO: 3987547 - RNA, 22 nt, Human herpesvirus 6
acucaacgcguaucgauuuaac

SEQ ID NO: 3987548 - RNA, 15 nt, Human herpesvirus 6
acucaauuuugaaau

SEQ ID NO: 3987549 - RNA, 17 nt, Human herpesvirus 6
acucauuuuaacauuuu

SEQ ID NO: 3987550 - RNA, 15 nt, Human herpesvirus 6
acucgacuaaaagac

SEQ ID NO: 3987551 - RNA, 21 nt, Human herpesvirus 6
acucuccacccaucuccucaa

SEQ ID NO: 3987552 - RNA, 22 nt, Human herpesvirus 6
acucuucggcauaaacagagac

SEQ ID NO: 3987553 - RNA, 21 nt, Human herpesvirus 6
acugaccguuguaagaagaaa

SEQ ID NO: 3987554 - RNA, 11 nt, Human herpesvirus 6
acugauggcag

SEQ ID NO: 3987555 - RNA, 15 nt, Human herpesvirus 6
acugcuaguuuuuuu

SEQ ID NO: 3987556 - RNA, 16 nt, Human herpesvirus 6
acuggagcuagagaaa

SEQ ID NO: 3987557 - RNA, 21 nt, Human herpesvirus 6
acuggcgcgcauguugcaguu

SEQ ID NO: 3987558 - RNA, 17 nt, Human herpesvirus 6
acugguuuacagcacuu

SEQ ID NO: 3987559 - RNA, 19 nt, Human herpesvirus 6
acuuauauauauaucagaa

SEQ ID NO: 3987560 - RNA, 17 nt, Human herpesvirus 6
acuuauuuuuuuuucug

SEQ ID NO: 3987561 - RNA, 19 nt, Human herpesvirus 6
acuuccgcgauacccagcg

SEQ ID NO: 3987562 - RNA, 21 nt, Human herpesvirus 6
acuuuaucgauguagauaaau

SEQ ID NO: 3987563 - RNA, 19 nt, Human herpesvirus 6
acuuucuaagacgagaugu

SEQ ID NO: 3987564 - RNA, 19 nt, Human herpesvirus 6
acuuuuugccgucacacuc

SEQ ID NO: 3987565 - RNA, 22 nt, Human herpesvirus 6
agaaaaauaaaggucagugggu

SEQ ID NO: 3987566 - RNA, 14 nt, Human herpesvirus 6
agaaaagaaacaau

SEQ ID NO: 3987567 - RNA, 12 nt, Human herpesvirus 6
agaaaugaccug

SEQ ID NO: 3987568 - RNA, 19 nt, Human herpesvirus 6
agaaaugcacuguuugaaa

SEQ ID NO: 3987569 - RNA, 14 nt, Human herpesvirus 6
agaaccaccagaga

SEQ ID NO: 3987570 - RNA, 17 nt, Human herpesvirus 6
agaagaaaagaaaaagc

SEQ ID NO: 3987571 - RNA, 20 nt, Human herpesvirus 6
agaagaucugcgugaacgug

SEQ ID NO: 3987572 - RNA, 22 nt, Human herpesvirus 6
agaagcgguagaguggaguugu

SEQ ID NO: 3987573 - RNA, 20 nt, Human herpesvirus 6
agaaguuuacauagaaauua

SEQ ID NO: 3987574 - RNA, 15 nt, Human herpesvirus 6
agaauuaagaugucu

SEQ ID NO: 3987575 - RNA, 16 nt, Human herpesvirus 6
agacacgucaacgugu

SEQ ID NO: 3987576 - RNA, 20 nt, Human herpesvirus 6
agacucgccgaugaaacugu

SEQ ID NO: 3987577 - RNA, 10 nt, Human herpesvirus 6
agagaggaag

SEQ ID NO: 3987578 - RNA, 14 nt, Human herpesvirus 6
agagaugaaagaca

SEQ ID NO: 3987579 - RNA, 14 nt, Human herpesvirus 6
agaggagaaaugau

SEQ ID NO: 3987580 - RNA, 22 nt, Human herpesvirus 6
agaguuggauuuuuuuaauugg

SEQ ID NO: 3987581 - RNA, 17 nt, Human herpesvirus 6
agauaaaaagagaggaa

SEQ ID NO: 3987582 - RNA, 20 nt, Human herpesvirus 6
agaucuggugaauguuucug

SEQ ID NO: 3987583 - RNA, 22 nt, Human herpesvirus 6
agaugaaaccuagauguaaauu

SEQ ID NO: 3987584 - RNA, 15 nt, Human herpesvirus 6
agaugacaucugcaa

SEQ ID NO: 3987585 - RNA, 15 nt, Human herpesvirus 6
agauguuucccguau

SEQ ID NO: 3987586 - RNA, 11 nt, Human herpesvirus 6
agauuaaaugu

SEQ ID NO: 3987587 - RNA, 11 nt, Human herpesvirus 6
agauuuacaga

SEQ ID NO: 3987588 - RNA, 22 nt, Human herpesvirus 6
agauuuauuagccgugauguuu

SEQ ID NO: 3987589 - RNA, 15 nt, Human herpesvirus 6
agauuucagguucuu

SEQ ID NO: 3987590 - RNA, 22 nt, Human herpesvirus 6
agcaaguugcuaccgcugggcc

SEQ ID NO: 3987591 - RNA, 20 nt, Human herpesvirus 6
uugagagcuaauaugaacaa

SEQ ID NO: 3987592 - RNA, 12 nt, Human herpesvirus 6
uugauagacggc

SEQ ID NO: 3987593 - RNA, 17 nt, Human herpesvirus 6
uugaugaaauugugacu

SEQ ID NO: 3987594 - RNA, 19 nt, Human herpesvirus 6
uugauuauauauuugcaua

SEQ ID NO: 3987595 - RNA, 17 nt, Human herpesvirus 6
uugcaauaaaaaaugga

SEQ ID NO: 3987596 - RNA, 15 nt, Human herpesvirus 6
uugcaguguguuuuu

SEQ ID NO: 3987597 - RNA, 17 nt, Human herpesvirus 6
uugcuaguuguaugacu

SEQ ID NO: 3987598 - RNA, 18 nt, Human herpesvirus 6
uugcuauagauuagaaau

SEQ ID NO: 3987599 - RNA, 20 nt, Human herpesvirus 6
uuggaugccugcauaugcag

SEQ ID NO: 3987600 - RNA, 19 nt, Human herpesvirus 6
uugguaucaguggauagga

SEQ ID NO: 3987601 - RNA, 20 nt, Human herpesvirus 6
uugguuaaaaggaauagcag

SEQ ID NO: 3987602 - RNA, 15 nt, Human herpesvirus 6
uugguucggagaggu

SEQ ID NO: 3987603 - RNA, 23 nt, Human herpesvirus 6
uugucagguuugaaacacugcaa

SEQ ID NO: 3987604 - RNA, 17 nt, Human herpesvirus 6
uugucagucaacgcaau

SEQ ID NO: 3987605 - RNA, 15 nt, Human herpesvirus 6
uuuacgguuucaggc

SEQ ID NO: 3987606 - RNA, 13 nt, Human herpesvirus 6
uuuacugugauuu

SEQ ID NO: 3987607 - RNA, 13 nt, Human herpesvirus 6
uuuauaaacuuaa

SEQ ID NO: 3987608 - RNA, 16 nt, Human herpesvirus 6
uuucaagauggaccuc

SEQ ID NO: 3987609 - RNA, 22 nt, Human herpesvirus 6
uuucaugauucuuugucuaauu

SEQ ID NO: 3987610 - RNA, 19 nt, Human herpesvirus 6
uuuccagguagaguugcgu

SEQ ID NO: 3987611 - RNA, 18 nt, Human herpesvirus 6
uuuccgaaaucaaugagu

SEQ ID NO: 3987612 - RNA, 11 nt, Human herpesvirus 6
uuuccugccca

SEQ ID NO: 3987613 - RNA, 23 nt, Human herpesvirus 6
uuuccugcccaggcgaacgagaa

SEQ ID NO: 3987614 - RNA, 17 nt, Human herpesvirus 6
uuucgccaagaaaaaga

SEQ ID NO: 3987615 - RNA, 21 nt, Human herpesvirus 6
uuucguauguuuggauaauaa

SEQ ID NO: 3987616 - RNA, 14 nt, Human herpesvirus 6
uuucuuacacaaau

SEQ ID NO: 3987617 - RNA, 21 nt, Human herpesvirus 6
agcagaacggcgguaacgugg

SEQ ID NO: 3987618 - RNA, 16 nt, Human herpesvirus 6
agcagcagaguccggc

SEQ ID NO: 3987619 - RNA, 14 nt, Human herpesvirus 6
agcagucaguaaug

SEQ ID NO: 3987620 - RNA, 12 nt, Human herpesvirus 6
agcaucucaaaa

SEQ ID NO: 3987621 - RNA, 18 nt, Human herpesvirus 6
agccacugcggaguuuua

SEQ ID NO: 3987622 - RNA, 16 nt, Human herpesvirus 6
agcccccagcugaaau

SEQ ID NO: 3987623 - RNA, 15 nt, Human herpesvirus 6
agcccuuacuugaaa

SEQ ID NO: 3987624 - RNA, 17 nt, Human herpesvirus 6
agcgaagugaagaauuu

SEQ ID NO: 3987625 - RNA, 14 nt, Human herpesvirus 6
agcucucccuuaaa

SEQ ID NO: 3987626 - RNA, 19 nt, Human herpesvirus 6
agcuuagcgauuaguuugu

SEQ ID NO: 3987627 - RNA, 16 nt, Human herpesvirus 6
agcuuguuaggacacu

SEQ ID NO: 3987628 - RNA, 21 nt, Human herpesvirus 6
agcuuugccacauacaggugg

SEQ ID NO: 3987629 - RNA, 23 nt, Human herpesvirus 6
aggaaaacucgcaccucugaaac

SEQ ID NO: 3987630 - RNA, 15 nt, Human herpesvirus 6
aggaaaccaccggcu

SEQ ID NO: 3987631 - RNA, 21 nt, Human herpesvirus 6
aggaaaguguguucuuacaau

SEQ ID NO: 3987632 - RNA, 20 nt, Human herpesvirus 6
aggaaauaaaaacaccucua

SEQ ID NO: 3987633 - RNA, 19 nt, Human herpesvirus 6
aggaacaacuauacgguga

SEQ ID NO: 3987634 - RNA, 20 nt, Human herpesvirus 6
aggaagaaacggacacgcgc

SEQ ID NO: 3987635 - RNA, 17 nt, Human herpesvirus 6
aggacgggaagaacagg

SEQ ID NO: 3987636 - RNA, 23 nt, Human herpesvirus 6
aggacuaucugagacaguccauu

SEQ ID NO: 3987637 - RNA, 19 nt, Human herpesvirus 6
aggaucguccccuuggcuc

SEQ ID NO: 3987638 - RNA, 15 nt, Human herpesvirus 6
aggcaugugauuguc

SEQ ID NO: 3987639 - RNA, 16 nt, Human herpesvirus 6
aggccuacggcgccac

SEQ ID NO: 3987640 - RNA, 22 nt, Human herpesvirus 6
aggcuaugugucuccgccuuuu

SEQ ID NO: 3987641 - RNA, 14 nt, Human herpesvirus 6
aggcugccaugaaa

SEQ ID NO: 3987642 - RNA, 16 nt, Human herpesvirus 6
agggcggacggacggc

SEQ ID NO: 3987643 - RNA, 16 nt, Human herpesvirus 6
aggggcgcgagacagc

SEQ ID NO: 3987644 - RNA, 14 nt, Human herpesvirus 6
agggucaaaaaacu

SEQ ID NO: 3987645 - RNA, 14 nt, Human herpesvirus 6
agguaacggagccc

SEQ ID NO: 3987646 - RNA, 13 nt, Human herpesvirus 6
aggucagugggua

SEQ ID NO: 3987647 - RNA, 14 nt, Human herpesvirus 6
agguguuuccugcc

SEQ ID NO: 3987648 - RNA, 18 nt, Human herpesvirus 6
aguaguugcuaaguguga

SEQ ID NO: 3987649 - RNA, 12 nt, Human herpesvirus 6
aguaugcuuugg

SEQ ID NO: 3987650 - RNA, 13 nt, Human herpesvirus 6
aguauuaacuagu

SEQ ID NO: 3987651 - RNA, 16 nt, Human herpesvirus 6
agucaaauugauuaug

SEQ ID NO: 3987652 - RNA, 19 nt, Human herpesvirus 6
agucaccuguauagauuua

SEQ ID NO: 3987653 - RNA, 14 nt, Human herpesvirus 6
agucauuaacgaga

SEQ ID NO: 3987654 - RNA, 19 nt, Human herpesvirus 6
agucccaucuauacacccu

SEQ ID NO: 3987655 - RNA, 15 nt, Human herpesvirus 6
agucgacaaauuaua

SEQ ID NO: 3987656 - RNA, 22 nt, Human herpesvirus 6
agucgcacacacaagaacagag

SEQ ID NO: 3987657 - RNA, 19 nt, Human herpesvirus 6
agucucacgcgaucuaaua

SEQ ID NO: 3987658 - RNA, 17 nt, Human herpesvirus 6
agucugcuaaaaaucau

SEQ ID NO: 3987659 - RNA, 13 nt, Human herpesvirus 6
agugaaauucaaa

SEQ ID NO: 3987660 - RNA, 16 nt, Human herpesvirus 6
agugauuauggugccu

SEQ ID NO: 3987661 - RNA, 22 nt, Human herpesvirus 6
aguuaccgugaugugggugugg

SEQ ID NO: 3987662 - RNA, 22 nt, Human herpesvirus 6
aguuauacuggcaaagcaaaga

SEQ ID NO: 3987663 - RNA, 15 nt, Human herpesvirus 6
aguuuacauagaaau

SEQ ID NO: 3987664 - RNA, 20 nt, Human herpesvirus 6
aguuucaccauguccaggaa

SEQ ID NO: 3987665 - RNA, 19 nt, Human herpesvirus 6
aguuucuguuuuucucgga

SEQ ID NO: 3987666 - RNA, 15 nt, Human herpesvirus 6
aguuugugugccuuu

SEQ ID NO: 3987667 - RNA, 13 nt, Human herpesvirus 6
aguuuucuaaaag

SEQ ID NO: 3987668 - RNA, 20 nt, Human herpesvirus 6
aguuuuuauugaagacugaa

SEQ ID NO: 3987669 - RNA, 13 nt, Human herpesvirus 6
auaaaaaaaagac

SEQ ID NO: 3987670 - RNA, 14 nt, Human herpesvirus 6
auaaaaaauauuaa

SEQ ID NO: 3987671 - RNA, 19 nt, Human herpesvirus 6
auaaacauuucauugaaua

SEQ ID NO: 3987672 - RNA, 15 nt, Human herpesvirus 6
auaaaguaagcaccu

SEQ ID NO: 3987673 - RNA, 16 nt, Human herpesvirus 6
auaaccucacuacuga

SEQ ID NO: 3987674 - RNA, 22 nt, Human herpesvirus 6
auaacgauagcagcucugcaau

SEQ ID NO: 3987675 - RNA, 18 nt, Human herpesvirus 6
gacgcacucggaagaaaa

SEQ ID NO: 3987676 - RNA, 12 nt, Human herpesvirus 6
gacgggcaggaa

SEQ ID NO: 3987677 - RNA, 16 nt, Human herpesvirus 6
gacgugccaccgucug

SEQ ID NO: 3987678 - RNA, 19 nt, Human herpesvirus 6
gacucagguuuagaugcuu

SEQ ID NO: 3987679 - RNA, 15 nt, Human herpesvirus 6
gacuuggagagaacu

SEQ ID NO: 3987680 - RNA, 20 nt, Human herpesvirus 6
gagaauaagaucuacagagu

SEQ ID NO: 3987681 - RNA, 15 nt, Human herpesvirus 6
gagacagcggacagc

SEQ ID NO: 3987682 - RNA, 23 nt, Human herpesvirus 6
gagaccaauuuaugucauuucau

SEQ ID NO: 3987683 - RNA, 13 nt, Human herpesvirus 6
gagacgaaagcag

SEQ ID NO: 3987684 - RNA, 23 nt, Human herpesvirus 6
gagacgcacccuacaaucugucc

SEQ ID NO: 3987685 - RNA, 21 nt, Human herpesvirus 6
gagacuuagcuagaugugucu

SEQ ID NO: 3987686 - RNA, 21 nt, Human herpesvirus 6
gagaggaagaaacggacacgc

SEQ ID NO: 3987687 - RNA, 17 nt, Human herpesvirus 6
gagaggcucuaugaaga

SEQ ID NO: 3987688 - RNA, 16 nt, Human herpesvirus 6
gagauaucauaaucug

SEQ ID NO: 3987689 - RNA, 21 nt, Human herpesvirus 6
gagaucuggugaauguuucug

SEQ ID NO: 3987690 - RNA, 14 nt, Human herpesvirus 6
gagaugacggaaua

SEQ ID NO: 3987691 - RNA, 21 nt, Human herpesvirus 6
gagcacgcacgacaacacgcc

SEQ ID NO: 3987692 - RNA, 15 nt, Human herpesvirus 6
gagcggugugcaguu

SEQ ID NO: 3987693 - RNA, 16 nt, Human herpesvirus 6
gaggacgggaagaaca

SEQ ID NO: 3987694 - RNA, 16 nt, Human herpesvirus 6
gaggacggugagaaga

SEQ ID NO: 3987695 - RNA, 21 nt, Human herpesvirus 6
gaggccaucuaucgcgcaccg

SEQ ID NO: 3987696 - RNA, 15 nt, Human herpesvirus 6
gagguguuuccugcc

SEQ ID NO: 3987697 - RNA, 20 nt, Human herpesvirus 6
gaguccggcgcacgcacacg

SEQ ID NO: 3987698 - RNA, 17 nt, Human herpesvirus 6
gauaaagaucagugggu

SEQ ID NO: 3987699 - RNA, 13 nt, Human herpesvirus 6
gauaacuuuuguu

SEQ ID NO: 3987700 - RNA, 17 nt, Human herpesvirus 6
gauacaucguuuguuga

SEQ ID NO: 3987701 - RNA, 15 nt, Human herpesvirus 6
gauagaggaauugcu

SEQ ID NO: 3987702 - RNA, 16 nt, Human herpesvirus 6
gauagguagaauuacu

SEQ ID NO: 3987703 - RNA, 13 nt, Human herpesvirus 6
gauauaaauaugg

SEQ ID NO: 3987704 - RNA, 18 nt, Human herpesvirus 6
gaucaacggccuggagua

SEQ ID NO: 3987705 - RNA, 16 nt, Human herpesvirus 6
gaucacaacauaaaaa

SEQ ID NO: 3987706 - RNA, 12 nt, Human herpesvirus 6
gaucagugggua

SEQ ID NO: 3987707 - RNA, 20 nt, Human herpesvirus 6
gaucaucgggaacauagaga

SEQ ID NO: 3987708 - RNA, 22 nt, Human herpesvirus 6
gauccgucucucagcuggcuga

SEQ ID NO: 3987709 - RNA, 21 nt, Human herpesvirus 6
gaucuaaauuucuacaaaaau

SEQ ID NO: 3987710 - RNA, 17 nt, Human herpesvirus 6
gaugauuauucugucuu

SEQ ID NO: 3987711 - RNA, 19 nt, Human herpesvirus 6
gaugcaaucgaugugacaa

SEQ ID NO: 3987712 - RNA, 16 nt, Human herpesvirus 6
gaugccugcauaugca

SEQ ID NO: 3987713 - RNA, 18 nt, Human herpesvirus 6
gauggaguauuuguuuua

SEQ ID NO: 3987714 - RNA, 15 nt, Human herpesvirus 6
gauguagguuucgau

SEQ ID NO: 3987715 - RNA, 15 nt, Human herpesvirus 6
gauguucuaaaggau

SEQ ID NO: 3987716 - RNA, 14 nt, Human herpesvirus 6
gauguuuccugaau

SEQ ID NO: 3987717 - RNA, 20 nt, Human herpesvirus 6
gauucgaucgagaaucuucc

SEQ ID NO: 3987718 - RNA, 14 nt, Human herpesvirus 6
gauucuuuaaagau

SEQ ID NO: 3987719 - RNA, 19 nt, Human herpesvirus 6
gauuucacuuaagccagcu

SEQ ID NO: 3987720 - RNA, 21 nt, Human herpesvirus 6
gcaaaccauaaaaaaucuugu

SEQ ID NO: 3987721 - RNA, 21 nt, Human herpesvirus 6
gcaaaucucacugucgaaauu

SEQ ID NO: 3987722 - RNA, 24 nt, Human herpesvirus 6
gcaacaaaaagcuuuaaagcagcu

SEQ ID NO: 3987723 - RNA, 17 nt, Human herpesvirus 6
gcaacucaucaaauccu

SEQ ID NO: 3987724 - RNA, 16 nt, Human herpesvirus 6
gcaagacgccacgggc

SEQ ID NO: 3987725 - RNA, 16 nt, Human herpesvirus 6
gcaagucacgggcagc

SEQ ID NO: 3987726 - RNA, 22 nt, Human herpesvirus 6
gcaaucgaugugacaaaucugu

SEQ ID NO: 3987727 - RNA, 16 nt, Human herpesvirus 6
gcacaucuauguguau

SEQ ID NO: 3987728 - RNA, 17 nt, Human herpesvirus 6
gcagaacaacagcaugu

SEQ ID NO: 3987729 - RNA, 17 nt, Human herpesvirus 6
gcagaauagagagaaag

SEQ ID NO: 3987730 - RNA, 16 nt, Human herpesvirus 6
gcagaucuaucacagg

SEQ ID NO: 3987731 - RNA, 16 nt, Human herpesvirus 6
gcagauuuuuaaaagu

SEQ ID NO: 3987732 - RNA, 23 nt, Human herpesvirus 6
gcagucaguaaugauauaaaaga

SEQ ID NO: 3987733 - RNA, 19 nt, Human herpesvirus 6
gcauugacuauuaaacuaa

SEQ ID NO: 3987734 - RNA, 21 nt, Human herpesvirus 6
gccaaacuuguugcaagcagc

SEQ ID NO: 3987735 - RNA, 20 nt, Human herpesvirus 6
gccaaaggaaaccaccggcu

SEQ ID NO: 3987736 - RNA, 14 nt, Human herpesvirus 6
gccacgacgugcug

SEQ ID NO: 3987737 - RNA, 21 nt, Human herpesvirus 6
gccacgacgugcugcaaggcc

SEQ ID NO: 3987738 - RNA, 16 nt, Human herpesvirus 6
gccagcgcaagauucu

SEQ ID NO: 3987739 - RNA, 15 nt, Human herpesvirus 6
gcccggggacggaca

SEQ ID NO: 3987740 - RNA, 21 nt, Human herpesvirus 6
gcccuaucuccgauaacgaaa

SEQ ID NO: 3987741 - RNA, 13 nt, Human herpesvirus 6
gccgacagcaagu

SEQ ID NO: 3987742 - RNA, 23 nt, Human herpesvirus 6
gccgccguccuauucagaggugc

SEQ ID NO: 3987743 - RNA, 18 nt, Human herpesvirus 6
gccggaucguaaggcagu

SEQ ID NO: 3987744 - RNA, 19 nt, Human herpesvirus 6
gccgguagagaguggggac

SEQ ID NO: 3987745 - RNA, 13 nt, Human herpesvirus 6
gccgucaaagaca

SEQ ID NO: 3987746 - RNA, 22 nt, Human herpesvirus 6
gccuaauuacgcuguccgccug

SEQ ID NO: 3987747 - RNA, 19 nt, Human herpesvirus 6
gccuugucaucaugugugc

SEQ ID NO: 3987748 - RNA, 23 nt, Human herpesvirus 6
gcgaccgaccccugccgagccug

SEQ ID NO: 3987749 - RNA, 14 nt, Human herpesvirus 6
gcgacuauuugaaa

SEQ ID NO: 3987750 - RNA, 20 nt, Human herpesvirus 6
gcgagucuugugugaaagua

SEQ ID NO: 3987751 - RNA, 13 nt, Human herpesvirus 6
gcgcgcgugugug

SEQ ID NO: 3987752 - RNA, 21 nt, Human herpesvirus 6
gcggaaauaaaaaauauuaau

SEQ ID NO: 3987753 - RNA, 11 nt, Human herpesvirus 6
gcggacggacg

SEQ ID NO: 3987754 - RNA, 16 nt, Human herpesvirus 6
gcggagcccaagaaga

SEQ ID NO: 3987755 - RNA, 22 nt, Human herpesvirus 6
gcggcaaccgcaguuccuguuu

SEQ ID NO: 3987756 - RNA, 12 nt, Human herpesvirus 6
gcgggaccuggc

SEQ ID NO: 3987757 - RNA, 15 nt, Human herpesvirus 6
gcggugcagaacauc

SEQ ID NO: 3987758 - RNA, 19 nt, Human herpesvirus 6
gcguuccgacucgauuuga

SEQ ID NO: 3987759 - RNA, 13 nt, Human herpesvirus 6
gcuaccgcugggc

SEQ ID NO: 3987760 - RNA, 18 nt, Human herpesvirus 6
gcucugaaauuugagaaa

SEQ ID NO: 3987761 - RNA, 21 nt, Human herpesvirus 6
gcugugacgaagauggaugug

SEQ ID NO: 3987762 - RNA, 20 nt, Human herpesvirus 6
gcuuaccguucaucauucca

SEQ ID NO: 3987763 - RNA, 18 nt, Human herpesvirus 6
gcuucaacuaaauauguu

SEQ ID NO: 3987764 - RNA, 12 nt, Human herpesvirus 6
gcuuuaaagcag

SEQ ID NO: 3987765 - RNA, 22 nt, Human herpesvirus 6
ggaaaauuaaaagucagugggu

SEQ ID NO: 3987766 - RNA, 20 nt, Human herpesvirus 6
ggaaagaagauuuuccuagu

SEQ ID NO: 3987767 - RNA, 15 nt, Human herpesvirus 6
ggaacgauuugcagu

SEQ ID NO: 3987768 - RNA, 16 nt, Human herpesvirus 6
ggaagagaggaagaaa

SEQ ID NO: 3987769 - RNA, 12 nt, Human herpesvirus 6
ggaaugugucag

SEQ ID NO: 3987770 - RNA, 17 nt, Human herpesvirus 6
ggaccgaggggacaggg

SEQ ID NO: 3987771 - RNA, 18 nt, Human herpesvirus 6
ggacgacgggcggggcgg

SEQ ID NO: 3987772 - RNA, 13 nt, Human herpesvirus 6
ggacgggcggagc

SEQ ID NO: 3987773 - RNA, 15 nt, Human herpesvirus 6
ggacguucugucugc

SEQ ID NO: 3987774 - RNA, 14 nt, Human herpesvirus 6
ggacucauagauuu

SEQ ID NO: 3987775 - RNA, 14 nt, Human herpesvirus 6
ggagacuccccgcu

SEQ ID NO: 3987776 - RNA, 19 nt, Human herpesvirus 6
ggagagacgcaccacggcu

SEQ ID NO: 3987777 - RNA, 13 nt, Human herpesvirus 6
ggagaggccggag

SEQ ID NO: 3987778 - RNA, 19 nt, Human herpesvirus 6
ggaggccuucaugagccag

SEQ ID NO: 3987779 - RNA, 13 nt, Human herpesvirus 6
ggagggacccaca

SEQ ID NO: 3987780 - RNA, 23 nt, Human herpesvirus 6
ggauaagcagaagaguuuuuuaa

SEQ ID NO: 3987781 - RNA, 15 nt, Human herpesvirus 6
ggauaucucaaauuu

SEQ ID NO: 3987782 - RNA, 20 nt, Human herpesvirus 6
ggaucgacgggcaggaauca

SEQ ID NO: 3987783 - RNA, 19 nt, Human herpesvirus 6
ggaugcaaucgaugugaca

SEQ ID NO: 3987784 - RNA, 17 nt, Human herpesvirus 6
ggauggcuagugugccu

SEQ ID NO: 3987785 - RNA, 22 nt, Human herpesvirus 6
ggauuucccuuguaaucaauca

SEQ ID NO: 3987786 - RNA, 16 nt, Human herpesvirus 6
ggcagaggggaaggga

SEQ ID NO: 3987787 - RNA, 21 nt, Human herpesvirus 6
ggccacguccucgugcucugc

SEQ ID NO: 3987788 - RNA, 16 nt, Human herpesvirus 6
ggccucccauguaugc

SEQ ID NO: 3987789 - RNA, 13 nt, Human herpesvirus 6
ggccuggcacggu

SEQ ID NO: 3987790 - RNA, 20 nt, Human herpesvirus 6
ggcgaugaucucggcgccgg

SEQ ID NO: 3987791 - RNA, 16 nt, Human herpesvirus 6
ggcgcugauuccugua

SEQ ID NO: 3987792 - RNA, 19 nt, Human herpesvirus 6
ggcggagccacuugcaaug

SEQ ID NO: 3987793 - RNA, 22 nt, Human herpesvirus 6
ggcuauuuuuccgaaaggugaa

SEQ ID NO: 3987794 - RNA, 19 nt, Human herpesvirus 6
ggcucgugauccuacaagg

SEQ ID NO: 3987795 - RNA, 19 nt, Human herpesvirus 6
ggcucuguuuucccaggua

SEQ ID NO: 3987796 - RNA, 18 nt, Human herpesvirus 6
ggcucuuugcugacugua

SEQ ID NO: 3987797 - RNA, 13 nt, Human herpesvirus 6
gggccuccgccac

SEQ ID NO: 3987798 - RNA, 17 nt, Human herpesvirus 6
gggcuggaaagagaacg

SEQ ID NO: 3987799 - RNA, 23 nt, Human herpesvirus 6
ggggacagugauuagaauguuug

SEQ ID NO: 3987800 - RNA, 16 nt, Human herpesvirus 6
gggucuuuccugcaca

SEQ ID NO: 3987801 - RNA, 17 nt, Human herpesvirus 6
gggucuuuccugcacag

SEQ ID NO: 3987802 - RNA, 21 nt, Human herpesvirus 6
gggucuuuccugcacaggcga

SEQ ID NO: 3987803 - RNA, 23 nt, Human herpesvirus 6
gguaaaauggcugugcuaucuga

SEQ ID NO: 3987804 - RNA, 13 nt, Human herpesvirus 6
gguaacgcugucg

SEQ ID NO: 3987805 - RNA, 22 nt, Human herpesvirus 6
gguaccgcgguuugggggucuu

SEQ ID NO: 3987806 - RNA, 20 nt, Human herpesvirus 6
gguauaucucggacucauag

SEQ ID NO: 3987807 - RNA, 11 nt, Human herpesvirus 6
ggucagugggu

SEQ ID NO: 3987808 - RNA, 19 nt, Human herpesvirus 6
ggucugcaaaaaugucugc

SEQ ID NO: 3987809 - RNA, 15 nt, Human herpesvirus 6
ggugagucacauaga

SEQ ID NO: 3987810 - RNA, 21 nt, Human herpesvirus 6
gguggccuggcacggugccaa

SEQ ID NO: 3987811 - RNA, 17 nt, Human herpesvirus 6
guaaaucaucaacguaa

SEQ ID NO: 3987812 - RNA, 23 nt, Human herpesvirus 6
guaaaugaauguguucacagagc

SEQ ID NO: 3987813 - RNA, 22 nt, Human herpesvirus 6
guaacgccacagccuguucuug

SEQ ID NO: 3987814 - RNA, 19 nt, Human herpesvirus 6
guaacggcaggcuuuuuaa

SEQ ID NO: 3987815 - RNA, 20 nt, Human herpesvirus 6
guaagauacgaaccucauga

SEQ ID NO: 3987816 - RNA, 17 nt, Human herpesvirus 6
guaauauagacauugcu

SEQ ID NO: 3987817 - RNA, 15 nt, Human herpesvirus 6
guaauuuugaaauug

SEQ ID NO: 3987818 - RNA, 16 nt, Human herpesvirus 6
guacguugguaucagu

SEQ ID NO: 3987819 - RNA, 16 nt, Human herpesvirus 6
guauaagucuaaugca

SEQ ID NO: 3987820 - RNA, 18 nt, Human herpesvirus 6
guauacagcuaaacgccg

SEQ ID NO: 3987821 - RNA, 14 nt, Human herpesvirus 6
guaugcaucaucaa

SEQ ID NO: 3987822 - RNA, 14 nt, Human herpesvirus 6
guauggagauguua

SEQ ID NO: 3987823 - RNA, 16 nt, Human herpesvirus 6
guauuauguaauacau

SEQ ID NO: 3987824 - RNA, 15 nt, Human herpesvirus 6
guauuuuuuaagagu

SEQ ID NO: 3987825 - RNA, 17 nt, Human herpesvirus 6
gucaaauugauuaugau

SEQ ID NO: 3987826 - RNA, 19 nt, Human herpesvirus 6
gucaguggguaccgcgguu

SEQ ID NO: 3987827 - RNA, 18 nt, Human herpesvirus 6
guccgugacacacagaau

SEQ ID NO: 3987828 - RNA, 17 nt, Human herpesvirus 6
guccucuuugaauuuua

SEQ ID NO: 3987829 - RNA, 15 nt, Human herpesvirus 6
gucuccauccucgaa

SEQ ID NO: 3987830 - RNA, 16 nt, Human herpesvirus 6
gucucuguucugccac

SEQ ID NO: 3987831 - RNA, 23 nt, Human herpesvirus 6
gucugggacccacgguggccugg

SEQ ID NO: 3987832 - RNA, 18 nt, Human herpesvirus 6
gucuucuugggcuccgcg

SEQ ID NO: 3987833 - RNA, 12 nt, Human herpesvirus 6
gucuuuccugca

SEQ ID NO: 3987834 - RNA, 18 nt, Human herpesvirus 6
gugaaagaccguagcaaa

SEQ ID NO: 3987835 - RNA, 13 nt, Human herpesvirus 6
gugaauauaucaa

SEQ ID NO: 3987836 - RNA, 20 nt, Human herpesvirus 6
gugauccuacaagggcaggg

SEQ ID NO: 3987837 - RNA, 20 nt, Human herpesvirus 6
gugaucugauucgacaaauc

SEQ ID NO: 3987838 - RNA, 21 nt, Human herpesvirus 6
gugaucuuuacaaaagacaca

SEQ ID NO: 3987839 - RNA, 21 nt, Human herpesvirus 6
gugauuccucaaaugaauuua

SEQ ID NO: 3987840 - RNA, 16 nt, Human herpesvirus 6
gugauugugacaagga

SEQ ID NO: 3987841 - RNA, 18 nt, Human herpesvirus 6
gugauuucacgugaaaua

SEQ ID NO: 3987842 - RNA, 19 nt, Human herpesvirus 6
gugcgaucgagcaacagcg

SEQ ID NO: 3987843 - RNA, 15 nt, Human herpesvirus 6
gugcugagacucuac

SEQ ID NO: 3987844 - RNA, 19 nt, Human herpesvirus 6
gugcuucuggcacaggcau

SEQ ID NO: 3987845 - RNA, 15 nt, Human herpesvirus 6
gugcuuuuaaaauua

SEQ ID NO: 3987846 - RNA, 19 nt, Human herpesvirus 6
guggaaaaaagucaccugu

SEQ ID NO: 3987847 - RNA, 21 nt, Human herpesvirus 6
guggugguuuugggcgcaauc

SEQ ID NO: 3987848 - RNA, 12 nt, Human herpesvirus 6
guguacaaugac

SEQ ID NO: 3987849 - RNA, 15 nt, Human herpesvirus 6
guguguguaauuuuu

SEQ ID NO: 3987850 - RNA, 11 nt, Human herpesvirus 6
guguuuccaau

SEQ ID NO: 3987851 - RNA, 13 nt, Human herpesvirus 6
guguuuucaucag

SEQ ID NO: 3987852 - RNA, 17 nt, Human herpesvirus 6
guuaaaaaaacggccaa

SEQ ID NO: 3987853 - RNA, 21 nt, Human herpesvirus 6
guuaauucaaaugcaguaaau

SEQ ID NO: 3987854 - RNA, 21 nt, Human herpesvirus 6
guuacaaguuucaauauauga

SEQ ID NO: 3987855 - RNA, 23 nt, Human herpesvirus 6
guuagaaauuuuaccuuuggaaa

SEQ ID NO: 3987856 - RNA, 14 nt, Human herpesvirus 6
guuauauuggauug

SEQ ID NO: 3987857 - RNA, 21 nt, Human herpesvirus 6
guuccuccgcgggaccuggcg

SEQ ID NO: 3987858 - RNA, 14 nt, Human herpesvirus 6
guucguaaugugca

SEQ ID NO: 3987859 - RNA, 13 nt, Human herpesvirus 6
guucguuaaaaac

SEQ ID NO: 3987860 - RNA, 17 nt, Human herpesvirus 6
guugagguguuuccugc

SEQ ID NO: 3987861 - RNA, 14 nt, Human herpesvirus 6
guugauuacgucaa

SEQ ID NO: 3987862 - RNA, 14 nt, Human herpesvirus 6
guugugauuggauc

SEQ ID NO: 3987863 - RNA, 12 nt, Human herpesvirus 6
guuguucuugga

SEQ ID NO: 3987864 - RNA, 16 nt, Human herpesvirus 6
guuuaaacuaugcaaa

SEQ ID NO: 3987865 - RNA, 21 nt, Human herpesvirus 6
guuuaagaagggcuuuaaaac

SEQ ID NO: 3987866 - RNA, 18 nt, Human herpesvirus 6
guuucauuucaucuuguu

SEQ ID NO: 3987867 - RNA, 14 nt, Human herpesvirus 6
guuuccugcccagg

SEQ ID NO: 3987868 - RNA, 13 nt, Human herpesvirus 6
guuucguacugga

SEQ ID NO: 3987869 - RNA, 23 nt, Human herpesvirus 6
guuugcaaaacuguuaaaagaga

SEQ ID NO: 3987870 - RNA, 20 nt, Human herpesvirus 6
guuuuaagagcagacaagga

SEQ ID NO: 3987871 - RNA, 13 nt, Human herpesvirus 6
guuuuucauaaau

SEQ ID NO: 3987872 - RNA, 20 nt, Human herpesvirus 6
guuuuuuggaauauauaaau

SEQ ID NO: 3987873 - RNA, 19 nt, Human herpesvirus 6
uaaaaaaugaaugugcuga

SEQ ID NO: 3987874 - RNA, 17 nt, Human herpesvirus 6
uaaaaacucacacaacc

SEQ ID NO: 3987875 - RNA, 11 nt, Human herpesvirus 6
uaaaaagagag

SEQ ID NO: 3987876 - RNA, 20 nt, Human herpesvirus 6
uaaaagaauuuuuguagcaa

SEQ ID NO: 3987877 - RNA, 20 nt, Human herpesvirus 6
uaaaauuugcuaacggggca

SEQ ID NO: 3987878 - RNA, 17 nt, Human herpesvirus 6
uaaacaauuauguguca

SEQ ID NO: 3987879 - RNA, 21 nt, Human herpesvirus 6
uaaagacgggccuccgccacu

SEQ ID NO: 3987880 - RNA, 14 nt, Human herpesvirus 6
uaaaguuuugugau

SEQ ID NO: 3987881 - RNA, 15 nt, Human herpesvirus 6
uaaaugguagcuauu

SEQ ID NO: 3987882 - RNA, 15 nt, Human herpesvirus 6
uaaauuauuuuguga

SEQ ID NO: 3987883 - RNA, 20 nt, Human herpesvirus 6
uaaauuauuuugugauuaac

SEQ ID NO: 3987884 - RNA, 16 nt, Human herpesvirus 6
uaacaacaaccacagc

SEQ ID NO: 3987885 - RNA, 15 nt, Human herpesvirus 6
uaacacgugugacac

SEQ ID NO: 3987886 - RNA, 19 nt, Human herpesvirus 6
uaacaggauucccuucaga

SEQ ID NO: 3987887 - RNA, 20 nt, Human herpesvirus 6
uaacaucugcuaacgcggca

SEQ ID NO: 3987888 - RNA, 14 nt, Human herpesvirus 6
uaaccggaaaagag

SEQ ID NO: 3987889 - RNA, 12 nt, Human herpesvirus 6
uaacggagcccg

SEQ ID NO: 3987890 - RNA, 15 nt, Human herpesvirus 6
uaacugguucagaau

SEQ ID NO: 3987891 - RNA, 13 nt, Human herpesvirus 6
uaacuuuuuguau

SEQ ID NO: 3987892 - RNA, 13 nt, Human herpesvirus 6
uaagauuaaaugu

SEQ ID NO: 3987893 - RNA, 15 nt, Human herpesvirus 6
uaagauugugcaguu

SEQ ID NO: 3987894 - RNA, 21 nt, Human herpesvirus 6
uaagcaaauguaacuuuuugu

SEQ ID NO: 3987895 - RNA, 23 nt, Human herpesvirus 6
uaagcaaauguaacuuuuuguau

SEQ ID NO: 3987896 - RNA, 16 nt, Human herpesvirus 6
uaagcgugacuuauau

SEQ ID NO: 3987897 - RNA, 18 nt, Human herpesvirus 6
uaaggaagauucagagug

SEQ ID NO: 3987898 - RNA, 21 nt, Human herpesvirus 6
uaaggaagauucagagugaau

SEQ ID NO: 3987899 - RNA, 13 nt, Human herpesvirus 6
uaaggucaaauau

SEQ ID NO: 3987900 - RNA, 22 nt, Human herpesvirus 6
uaauaaaggauguuugugacuc

SEQ ID NO: 3987901 - RNA, 13 nt, Human herpesvirus 6
uaauagccaaaca

SEQ ID NO: 3987902 - RNA, 17 nt, Human herpesvirus 6
uaauagccaaacaaggg

SEQ ID NO: 3987903 - RNA, 13 nt, Human herpesvirus 6
uaauaugaacaau

SEQ ID NO: 3987904 - RNA, 20 nt, Human herpesvirus 6
uaaugaguuuuucgcaauuu

SEQ ID NO: 3987905 - RNA, 15 nt, Human herpesvirus 6
uaaugauauaaaaga

SEQ ID NO: 3987906 - RNA, 15 nt, Human herpesvirus 6
uaaugcaaguuugaa

SEQ ID NO: 3987907 - RNA, 21 nt, Human herpesvirus 6
uaaugcgguucgacagagaua

SEQ ID NO: 3987908 - RNA, 20 nt, Human herpesvirus 6
uaauggcgcauaacggaaaa

SEQ ID NO: 3987909 - RNA, 15 nt, Human herpesvirus 6
gucacacguguuaaa

SEQ ID NO: 3987910 - RNA, 16 nt, Human herpesvirus 6
gucaucgguggcagag

SEQ ID NO: 3987911 - RNA, 15 nt, Human herpesvirus 6
gucauuucaucuauu

SEQ ID NO: 3987912 - RNA, 13 nt, Human herpesvirus 6
gucgcucuuucua

SEQ ID NO: 3987913 - RNA, 23 nt, Human herpesvirus 6
gucgggaaauaaaaaauauuaau

SEQ ID NO: 3987914 - RNA, 17 nt, Human herpesvirus 6
gucguuggauuaaauca

SEQ ID NO: 3987915 - RNA, 21 nt, Human herpesvirus 6
gucuaauuucgacaauccuaa

SEQ ID NO: 3987916 - RNA, 14 nt, Human herpesvirus 6
gucuagaugcaaau

SEQ ID NO: 3987917 - RNA, 18 nt, Human herpesvirus 6
gucuccugggagcucucc

SEQ ID NO: 3987918 - RNA, 14 nt, Human herpesvirus 6
gucucucagcuggc

SEQ ID NO: 3987919 - RNA, 19 nt, Human herpesvirus 6
gucugaucccuuagaagcu

SEQ ID NO: 3987920 - RNA, 14 nt, Human herpesvirus 6
gucugcaaaaaugu

SEQ ID NO: 3987921 - RNA, 13 nt, Human herpesvirus 6
gucugggacccac

SEQ ID NO: 3987922 - RNA, 13 nt, Human herpesvirus 6
gucugugauuuua

SEQ ID NO: 3987923 - RNA, 20 nt, Human herpesvirus 6
gucuucaauaaaaacucaau

SEQ ID NO: 3987924 - RNA, 22 nt, Human herpesvirus 6
gucuuuaccauuugacuccaac

SEQ ID NO: 3987925 - RNA, 16 nt, Human herpesvirus 6
gucuuuagaacagcuu

SEQ ID NO: 3987926 - RNA, 16 nt, Human herpesvirus 6
gucuuuccugcacagg

SEQ ID NO: 3987927 - RNA, 20 nt, Human herpesvirus 6
gugaacgcaagucacgggca

SEQ ID NO: 3987928 - RNA, 14 nt, Human herpesvirus 6
gugacucuucucua

SEQ ID NO: 3987929 - RNA, 18 nt, Human herpesvirus 6
gugacuuauauauauauc

SEQ ID NO: 3987930 - RNA, 14 nt, Human herpesvirus 6
gugagaagaucugc

SEQ ID NO: 3987931 - RNA, 21 nt, Human herpesvirus 6
gugaucugauucgacaaauca

SEQ ID NO: 3987932 - RNA, 15 nt, Human herpesvirus 6
gugauuccaguuaau

SEQ ID NO: 3987933 - RNA, 22 nt, Human herpesvirus 6
gugccucagaggugaguaggag

SEQ ID NO: 3987934 - RNA, 17 nt, Human herpesvirus 6
gugcuugucucacaagc

SEQ ID NO: 3987935 - RNA, 17 nt, Human herpesvirus 6
gugcuuuuaaaauuaug

SEQ ID NO: 3987936 - RNA, 14 nt, Human herpesvirus 6
guggacgugccggg

SEQ ID NO: 3987937 - RNA, 17 nt, Human herpesvirus 6
guggcagaggggaaggg

SEQ ID NO: 3987938 - RNA, 12 nt, Human herpesvirus 6
guggccuggcac

SEQ ID NO: 3987939 - RNA, 22 nt, Human herpesvirus 6
gugggaggcauuacauuaugaa

SEQ ID NO: 3987940 - RNA, 23 nt, Human herpesvirus 6
gugggggguuccuccgcgggacc

SEQ ID NO: 3987941 - RNA, 18 nt, Human herpesvirus 6
gugguuguuguuauuguu

SEQ ID NO: 3987942 - RNA, 13 nt, Human herpesvirus 6
guguuauucggag

SEQ ID NO: 3987943 - RNA, 12 nt, Human herpesvirus 6
guguuuguaaau

SEQ ID NO: 3987944 - RNA, 19 nt, Human herpesvirus 6
guuacauucguauacuucc

SEQ ID NO: 3987945 - RNA, 22 nt, Human herpesvirus 6
guuaggacaauuagauaaacaa

SEQ ID NO: 3987946 - RNA, 19 nt, Human herpesvirus 6
guuaggacacuuucaaaau

SEQ ID NO: 3987947 - RNA, 17 nt, Human herpesvirus 6
guuaugaaugagauguu

SEQ ID NO: 3987948 - RNA, 22 nt, Human herpesvirus 6
guuauugccgcuucuauauauc

SEQ ID NO: 3987949 - RNA, 20 nt, Human herpesvirus 6
guucagucuaugcagcgcca

SEQ ID NO: 3987950 - RNA, 14 nt, Human herpesvirus 6
guucaucauuccag

SEQ ID NO: 3987951 - RNA, 16 nt, Human herpesvirus 6
guucgaugauuauucu

SEQ ID NO: 3987952 - RNA, 20 nt, Human herpesvirus 6
guucggagauaucauaaucu

SEQ ID NO: 3987953 - RNA, 21 nt, Human herpesvirus 6
guucugccacgacgugcugca

SEQ ID NO: 3987954 - RNA, 19 nt, Human herpesvirus 6
guugagaaugauuuuaagu

SEQ ID NO: 3987955 - RNA, 21 nt, Human herpesvirus 6
guuguugaucguguuguggac

SEQ ID NO: 3987956 - RNA, 16 nt, Human herpesvirus 6
guuuaaagauguguua

SEQ ID NO: 3987957 - RNA, 17 nt, Human herpesvirus 6
guuuaauaguuugccau

SEQ ID NO: 3987958 - RNA, 14 nt, Human herpesvirus 6
guuuaauaguuuua

SEQ ID NO: 3987959 - RNA, 22 nt, Human herpesvirus 6
guuuacccgggcgaguagacuc

SEQ ID NO: 3987960 - RNA, 17 nt, Human herpesvirus 6
guuuaccuauuuacaau

SEQ ID NO: 3987961 - RNA, 18 nt, Human herpesvirus 6
guuucgccaagaaaaaga

SEQ ID NO: 3987962 - RNA, 23 nt, Human herpesvirus 6
guuugggauguccauuucuucga

SEQ ID NO: 3987963 - RNA, 20 nt, Human herpesvirus 6
guuugggggucuuuccugca

SEQ ID NO: 3987964 - RNA, 19 nt, Human herpesvirus 6
guuuggggucuuuccugca

SEQ ID NO: 3987965 - RNA, 14 nt, Human herpesvirus 6
guuuuguggcucuc

SEQ ID NO: 3987966 - RNA, 23 nt, Human herpesvirus 6
guuuuuuaauccauauuuggaag

SEQ ID NO: 3987967 - RNA, 17 nt, Human herpesvirus 6
uaaaaaccgacuuauau

SEQ ID NO: 3987968 - RNA, 11 nt, Human herpesvirus 6
uaaaauuaaag

SEQ ID NO: 3987969 - RNA, 14 nt, Human herpesvirus 6
uaaaauuguaauuu

SEQ ID NO: 3987970 - RNA, 21 nt, Human herpesvirus 6
uaaagaaacagauuuccgccu

SEQ ID NO: 3987971 - RNA, 16 nt, Human herpesvirus 6
uaaaggucagugggug

SEQ ID NO: 3987972 - RNA, 12 nt, Human herpesvirus 6
uaaaguuuucau

SEQ ID NO: 3987973 - RNA, 14 nt, Human herpesvirus 6
uaaaugugaacauu

SEQ ID NO: 3987974 - RNA, 13 nt, Human herpesvirus 6
uaaauuguuuuac

SEQ ID NO: 3987975 - RNA, 15 nt, Human herpesvirus 6
uaacgaacaaaucuc

SEQ ID NO: 3987976 - RNA, 18 nt, Human herpesvirus 6
uaacguggauaaaacggc

SEQ ID NO: 3987977 - RNA, 13 nt, Human herpesvirus 6
uaacucuuuuugu

SEQ ID NO: 3987978 - RNA, 13 nt, Human herpesvirus 6
uaacuuuacauua

SEQ ID NO: 3987979 - RNA, 13 nt, Human herpesvirus 6
uaagcgugacuua

SEQ ID NO: 3987980 - RNA, 16 nt, Human herpesvirus 6
uaauaaagugucacuc

SEQ ID NO: 3987981 - RNA, 17 nt, Human herpesvirus 6
uaauaaguccugugcuc

SEQ ID NO: 3987982 - RNA, 14 nt, Human herpesvirus 6
uaauauacgaaaua

SEQ ID NO: 3987983 - RNA, 21 nt, Human herpesvirus 6
uaaucgauuacaaaacaaucu

SEQ ID NO: 3987984 - RNA, 20 nt, Human herpesvirus 6
uaauuaccuauagucaaugu

SEQ ID NO: 3987985 - RNA, 19 nt, Human herpesvirus 6
uaauuccagcuuucuuaga

SEQ ID NO: 3987986 - RNA, 16 nt, Human herpesvirus 6
uacaagguacacaaua

SEQ ID NO: 3987987 - RNA, 19 nt, Human herpesvirus 6
uacaauagucauuaacgag

SEQ ID NO: 3987988 - RNA, 19 nt, Human herpesvirus 6
uacagaaccagauaucucu

SEQ ID NO: 3987989 - RNA, 13 nt, Human herpesvirus 6
uacauauagucaa

SEQ ID NO: 3987990 - RNA, 17 nt, Human herpesvirus 6
uacauauagucaauguu

SEQ ID NO: 3987991 - RNA, 24 nt, Human herpesvirus 6
uacaucaucgccuuuuacuuacau

SEQ ID NO: 3987992 - RNA, 13 nt, Human herpesvirus 6
uacccggaagcuu

SEQ ID NO: 3987993 - RNA, 11 nt, Human herpesvirus 6
uaccgcugggc

SEQ ID NO: 3987994 - RNA, 12 nt, Human herpesvirus 6
uaccuauaguca

SEQ ID NO: 3987995 - RNA, 15 nt, Human herpesvirus 6
uacgaauucaauguc

SEQ ID NO: 3987996 - RNA, 15 nt, Human herpesvirus 6
uacuacagugacuuu

SEQ ID NO: 3987997 - RNA, 19 nt, Human herpesvirus 6
uacugaaaccaaagcauac

SEQ ID NO: 3987998 - RNA, 21 nt, Human herpesvirus 6
uagcagaaguuuacauagaaa

SEQ ID NO: 3987999 - RNA, 23 nt, Human herpesvirus 6
uagcagaauagagagaaagagau

SEQ ID NO: 3988000 - RNA, 16 nt, Human herpesvirus 6
uagcuauuaugugaau

SEQ ID NO: 3988001 - RNA, 14 nt, Human herpesvirus 6
uagggaugguggau

SEQ ID NO: 3988002 - RNA, 22 nt, Human herpesvirus 6
uagguaucacccccccuucauc

SEQ ID NO: 3988003 - RNA, 14 nt, Human herpesvirus 6
uaguuuuugcuuac

SEQ ID NO: 3988004 - RNA, 22 nt, Human herpesvirus 6
uauacgaaaauaaaaaaaacaa

SEQ ID NO: 3988005 - RNA, 13 nt, Human herpesvirus 6
uauauauuugcau

SEQ ID NO: 3988006 - RNA, 15 nt, Human herpesvirus 6
uauaucaaacuuuuu

SEQ ID NO: 3988007 - RNA, 18 nt, Human herpesvirus 6
uauaucuucguaauggga

SEQ ID NO: 3988008 - RNA, 21 nt, Human herpesvirus 6
uauaugaggcgcuugaaacca

SEQ ID NO: 3988009 - RNA, 13 nt, Human herpesvirus 6
uauauuaaauugu

SEQ ID NO: 3988010 - RNA, 15 nt, Human herpesvirus 6
uaucaugagagagca

SEQ ID NO: 3988011 - RNA, 15 nt, Human herpesvirus 6
uaucauuaaauuguu

SEQ ID NO: 3988012 - RNA, 23 nt, Human herpesvirus 6
uaucccccguacaagcuuaauaa

SEQ ID NO: 3988013 - RNA, 16 nt, Human herpesvirus 6
uaucgauucuguaauu

SEQ ID NO: 3988014 - RNA, 12 nt, Human herpesvirus 6
uaucugaagacg

SEQ ID NO: 3988015 - RNA, 19 nt, Human herpesvirus 6
uaucuugaaaucuacugua

SEQ ID NO: 3988016 - RNA, 23 nt, Human herpesvirus 6
uaugaauucguuacaaucucugu

SEQ ID NO: 3988017 - RNA, 21 nt, Human herpesvirus 6
uaugcuuauacuguuguaaaa

SEQ ID NO: 3988018 - RNA, 12 nt, Human herpesvirus 6
uaugugcauucc

SEQ ID NO: 3988019 - RNA, 18 nt, Human herpesvirus 6
uauuaacacguacauaau

SEQ ID NO: 3988020 - RNA, 18 nt, Human herpesvirus 6
uauucaagcgaagugaag

SEQ ID NO: 3988021 - RNA, 21 nt, Human herpesvirus 6
uauuccaaacuacggaaaauc

SEQ ID NO: 3988022 - RNA, 14 nt, Human herpesvirus 6
uauugucgaagaac

SEQ ID NO: 3988023 - RNA, 16 nt, Human herpesvirus 6
uauuuaacauccaaaa

SEQ ID NO: 3988024 - RNA, 19 nt, Human herpesvirus 6
cguuauucguaagugggua

SEQ ID NO: 3988025 - RNA, 14 nt, Human herpesvirus 6
cguuuuccauguga

SEQ ID NO: 3988026 - RNA, 13 nt, Human herpesvirus 6
cuaaacuuuacau

SEQ ID NO: 3988027 - RNA, 17 nt, Human herpesvirus 6
cuaagauugugcaguua

SEQ ID NO: 3988028 - RNA, 21 nt, Human herpesvirus 6
cuaauaaaugucaaagaaaca

SEQ ID NO: 3988029 - RNA, 16 nt, Human herpesvirus 6
cuaauaauuacaauac

SEQ ID NO: 3988030 - RNA, 14 nt, Human herpesvirus 6
cuaaugcaaagaug

SEQ ID NO: 3988031 - RNA, 23 nt, Human herpesvirus 6
cuacauuaacagacgaggacgga

SEQ ID NO: 3988032 - RNA, 20 nt, Human herpesvirus 6
cuaccaugugcggagaaagu

SEQ ID NO: 3988033 - RNA, 18 nt, Human herpesvirus 6
cuacggcaacgcuccucc

SEQ ID NO: 3988034 - RNA, 13 nt, Human herpesvirus 6
cuacuauccgccc

SEQ ID NO: 3988035 - RNA, 17 nt, Human herpesvirus 6
cuacugaaaccaaagca

SEQ ID NO: 3988036 - RNA, 15 nt, Human herpesvirus 6
cuaggccuucaccug

SEQ ID NO: 3988037 - RNA, 14 nt, Human herpesvirus 6
cuaguuuucacacg

SEQ ID NO: 3988038 - RNA, 21 nt, Human herpesvirus 6
cuauaaaaaauuucaaacugg

SEQ ID NO: 3988039 - RNA, 18 nt, Human herpesvirus 6
cuauaaacaauuguauuc

SEQ ID NO: 3988040 - RNA, 14 nt, Human herpesvirus 6
cuauagucaauguu

SEQ ID NO: 3988041 - RNA, 20 nt, Human herpesvirus 6
cuaucauuuuuuugauuuac

SEQ ID NO: 3988042 - RNA, 12 nt, Human herpesvirus 6
cuauccaugaaa

SEQ ID NO: 3988043 - RNA, 13 nt, Human herpesvirus 6
cuauccgcccucc

SEQ ID NO: 3988044 - RNA, 16 nt, Human herpesvirus 6
cuaugaguucucugau

SEQ ID NO: 3988045 - RNA, 18 nt, Human herpesvirus 6
cuauuacuauauauugga

SEQ ID NO: 3988046 - RNA, 13 nt, Human herpesvirus 6
cuauuauauugua

SEQ ID NO: 3988047 - RNA, 16 nt, Human herpesvirus 6
cuauuuaaaauggacu

SEQ ID NO: 3988048 - RNA, 14 nt, Human herpesvirus 6
cucaaaaaacauau

SEQ ID NO: 3988049 - RNA, 15 nt, Human herpesvirus 6
cucacuacugaaacc

SEQ ID NO: 3988050 - RNA, 14 nt, Human herpesvirus 6
cucauaaaauuaaa

SEQ ID NO: 3988051 - RNA, 11 nt, Human herpesvirus 6
cuccaauaaaa

SEQ ID NO: 3988052 - RNA, 14 nt, Human herpesvirus 6
cuccacaugacacc

SEQ ID NO: 3988053 - RNA, 20 nt, Human herpesvirus 6
cuccccgggugcuccgccac

SEQ ID NO: 3988054 - RNA, 14 nt, Human herpesvirus 6
cuccgcgccccucg

SEQ ID NO: 3988055 - RNA, 15 nt, Human herpesvirus 6
cuccguuuccuccuc

SEQ ID NO: 3988056 - RNA, 18 nt, Human herpesvirus 6
cuccuacuauccgcccuc

SEQ ID NO: 3988057 - RNA, 15 nt, Human herpesvirus 6
cuccuauaaauacug

SEQ ID NO: 3988058 - RNA, 12 nt, Human herpesvirus 6
cuccucaacacu

SEQ ID NO: 3988059 - RNA, 15 nt, Human herpesvirus 6
cuccugagaagcugg

SEQ ID NO: 3988060 - RNA, 14 nt, Human herpesvirus 6
cucgaaaaaacaac

SEQ ID NO: 3988061 - RNA, 11 nt, Human herpesvirus 6
cucggaaaaua

SEQ ID NO: 3988062 - RNA, 14 nt, Human herpesvirus 6
cucggaacauaauu

SEQ ID NO: 3988063 - RNA, 19 nt, Human herpesvirus 6
cucgggaacgaccgcggcc

SEQ ID NO: 3988064 - RNA, 14 nt, Human herpesvirus 6
cucuaaaagcugcu

SEQ ID NO: 3988065 - RNA, 22 nt, Human herpesvirus 6
cucuaaccguuguucuuggaga

SEQ ID NO: 3988066 - RNA, 14 nt, Human herpesvirus 6
cugaacuguuucca

SEQ ID NO: 3988067 - RNA, 18 nt, Human herpesvirus 6
cugaagaugagcagcuuu

SEQ ID NO: 3988068 - RNA, 13 nt, Human herpesvirus 6
cugacacaaucag

SEQ ID NO: 3988069 - RNA, 13 nt, Human herpesvirus 6
cugagaacgggca

SEQ ID NO: 3988070 - RNA, 16 nt, Human herpesvirus 6
cugagaccuugucaau

SEQ ID NO: 3988071 - RNA, 16 nt, Human herpesvirus 6
cugagugcgaccuguc

SEQ ID NO: 3988072 - RNA, 20 nt, Human herpesvirus 6
cugaucacagagaaaaaaca

SEQ ID NO: 3988073 - RNA, 18 nt, Human herpesvirus 6
cugauggcagguaaccaa

SEQ ID NO: 3988074 - RNA, 17 nt, Human herpesvirus 6
cugauuccuucaauguu

SEQ ID NO: 3988075 - RNA, 13 nt, Human herpesvirus 6
cugcaaaaggugg

SEQ ID NO: 3988076 - RNA, 22 nt, Human herpesvirus 6
cugcacaggcgaacgagaacuc

SEQ ID NO: 3988077 - RNA, 15 nt, Human herpesvirus 6
cugccauaucacaca

SEQ ID NO: 3988078 - RNA, 22 nt, Human herpesvirus 6
cugcccaggcaaacgagaacuc

SEQ ID NO: 3988079 - RNA, 13 nt, Human herpesvirus 6
cugcgaggccauc

SEQ ID NO: 3988080 - RNA, 21 nt, Human herpesvirus 6
cugcuaaaagcuauguaugaa

SEQ ID NO: 3988081 - RNA, 20 nt, Human herpesvirus 6
cugcuaguuuuuuuucuuua

SEQ ID NO: 3988082 - RNA, 16 nt, Human herpesvirus 6
cugcuggaugcugaug

SEQ ID NO: 3988083 - RNA, 16 nt, Human herpesvirus 6
cugcuggcugagauuc

SEQ ID NO: 3988084 - RNA, 17 nt, Human herpesvirus 6
cuggagcagucugcugg

SEQ ID NO: 3988085 - RNA, 14 nt, Human herpesvirus 6
cuggaugcugauga

SEQ ID NO: 3988086 - RNA, 16 nt, Human herpesvirus 6
cugggacccacggugg

SEQ ID NO: 3988087 - RNA, 18 nt, Human herpesvirus 6
cugggacccacgguggcc

SEQ ID NO: 3988088 - RNA, 13 nt, Human herpesvirus 6
cugguuuacagca

SEQ ID NO: 3988089 - RNA, 18 nt, Human herpesvirus 6
cuguagaaacguuaaugu

SEQ ID NO: 3988090 - RNA, 14 nt, Human herpesvirus 6
cugucgaauauguu

SEQ ID NO: 3988091 - RNA, 19 nt, Human herpesvirus 6
cugucuauuaucuggccuc

SEQ ID NO: 3988092 - RNA, 14 nt, Human herpesvirus 6
cugugcucuuuaua

SEQ ID NO: 3988093 - RNA, 15 nt, Human herpesvirus 6
cuguguguuauaagg

SEQ ID NO: 3988094 - RNA, 17 nt, Human herpesvirus 6
cuguguuacaaacaugc

SEQ ID NO: 3988095 - RNA, 12 nt, Human herpesvirus 6
cuguuuuaaccg

SEQ ID NO: 3988096 - RNA, 14 nt, Human herpesvirus 6
cuguuuuucucgga

SEQ ID NO: 3988097 - RNA, 20 nt, Human herpesvirus 6
cuuacaauguuuuugacaaa

SEQ ID NO: 3988098 - RNA, 16 nt, Human herpesvirus 6
cuuacauuuuguacaa

SEQ ID NO: 3988099 - RNA, 12 nt, Human herpesvirus 6
cuuaccaagaaa

SEQ ID NO: 3988100 - RNA, 13 nt, Human herpesvirus 6
cuuauauaggcac

SEQ ID NO: 3988101 - RNA, 14 nt, Human herpesvirus 6
cuuauauaggcacc

SEQ ID NO: 3988102 - RNA, 21 nt, Human herpesvirus 6
cuucaacauaucacuuguauu

SEQ ID NO: 3988103 - RNA, 17 nt, Human herpesvirus 6
cuucaauaaaaacucaa

SEQ ID NO: 3988104 - RNA, 18 nt, Human herpesvirus 6
cuugaucaaauaucugaa

SEQ ID NO: 3988105 - RNA, 15 nt, Human herpesvirus 6
cuugauguuuccuga

SEQ ID NO: 3988106 - RNA, 20 nt, Human herpesvirus 6
cuuguccuuuuuuacuaguu

SEQ ID NO: 3988107 - RNA, 20 nt, Human herpesvirus 6
cuugucgggcuuugugaaau

SEQ ID NO: 3988108 - RNA, 19 nt, Human herpesvirus 6
cuugucuuacacucuccac

SEQ ID NO: 3988109 - RNA, 16 nt, Human herpesvirus 6
cuuguguaucugugaa

SEQ ID NO: 3988110 - RNA, 14 nt, Human herpesvirus 6
cuuuaaagcagcua

SEQ ID NO: 3988111 - RNA, 23 nt, Human herpesvirus 6
cuuuauauuuucgguguguauuu

SEQ ID NO: 3988112 - RNA, 21 nt, Human herpesvirus 6
cuuuauguacccuaagugaaa

SEQ ID NO: 3988113 - RNA, 14 nt, Human herpesvirus 6
cuuuauuaaauguu

SEQ ID NO: 3988114 - RNA, 15 nt, Human herpesvirus 6
cuuucaguauuaacu

SEQ ID NO: 3988115 - RNA, 10 nt, Human herpesvirus 6
cuuuccugca

SEQ ID NO: 3988116 - RNA, 18 nt, Human herpesvirus 6
cuuuccugcacaggcgaa

SEQ ID NO: 3988117 - RNA, 22 nt, Human herpesvirus 6
cuuucuguuuuaauuaaaaaaa

SEQ ID NO: 3988118 - RNA, 22 nt, Human herpesvirus 6
cuuugaaggacuaucugagaca

SEQ ID NO: 3988119 - RNA, 22 nt, Human herpesvirus 6
cuuugggaccuucaggaacaaa

SEQ ID NO: 3988120 - RNA, 20 nt, Human herpesvirus 6
cuuuuacaauacacagaaaa

SEQ ID NO: 3988121 - RNA, 19 nt, Human herpesvirus 6
cuuuuggaugcagcguugg

SEQ ID NO: 3988122 - RNA, 21 nt, Human herpesvirus 6
gaaaaaaacacaaaucuggau

SEQ ID NO: 3988123 - RNA, 13 nt, Human herpesvirus 6
gaaaaaaaucaga

SEQ ID NO: 3988124 - RNA, 15 nt, Human herpesvirus 6
gaaaaauucaaucag

SEQ ID NO: 3988125 - RNA, 15 nt, Human herpesvirus 6
gaaaauauuuccugc

SEQ ID NO: 3988126 - RNA, 20 nt, Human herpesvirus 6
gaaaaucucaaacgccgugu

SEQ ID NO: 3988127 - RNA, 20 nt, Human herpesvirus 6
gaaacacugaguucuguggc

SEQ ID NO: 3988128 - RNA, 19 nt, Human herpesvirus 6
gaaaccaccggcuaacccu

SEQ ID NO: 3988129 - RNA, 20 nt, Human herpesvirus 6
gaaagaguguuuggauaaug

SEQ ID NO: 3988130 - RNA, 15 nt, Human herpesvirus 6
gaaaucguauacguu

SEQ ID NO: 3988131 - RNA, 14 nt, Human herpesvirus 6
gaacaaaaugaggg

SEQ ID NO: 3988132 - RNA, 17 nt, Human herpesvirus 6
gaacuagaaaaacaacg

SEQ ID NO: 3988133 - RNA, 17 nt, Human herpesvirus 6
gaagaaggcuaucacuu

SEQ ID NO: 3988134 - RNA, 13 nt, Human herpesvirus 6
gaagaggaagaag

SEQ ID NO: 3988135 - RNA, 18 nt, Human herpesvirus 6
gaagaguuuuuuaagagu

SEQ ID NO: 3988136 - RNA, 15 nt, Human herpesvirus 6
gaagauaauaaaaca

SEQ ID NO: 3988137 - RNA, 16 nt, Human herpesvirus 6
gaagauaauaaaacaa

SEQ ID NO: 3988138 - RNA, 14 nt, Human herpesvirus 6
gaagauauggauga

SEQ ID NO: 3988139 - RNA, 13 nt, Human herpesvirus 6
gaagaucuaaauu

SEQ ID NO: 3988140 - RNA, 20 nt, Human herpesvirus 6
gaauacgaggaggggagacg

SEQ ID NO: 3988141 - RNA, 21 nt, Human herpesvirus 6
gaaucuacugagaucauaaau

SEQ ID NO: 3988142 - RNA, 12 nt, Human herpesvirus 6
gaaugagauguu

SEQ ID NO: 3988143 - RNA, 20 nt, Human herpesvirus 6
gaaugucgguaaacuuacca

SEQ ID NO: 3988144 - RNA, 23 nt, Human herpesvirus 6
gaauuuguggaacaauagacgaa

SEQ ID NO: 3988145 - RNA, 22 nt, Human herpesvirus 6
gacaaaccucucgccgaccugu

SEQ ID NO: 3988146 - RNA, 17 nt, Human herpesvirus 6
gacaaguaagauugcag

SEQ ID NO: 3988147 - RNA, 23 nt, Human herpesvirus 6
gacaaucgucggaucaacagaug

SEQ ID NO: 3988148 - RNA, 13 nt, Human herpesvirus 6
gacacacaaaaaa

SEQ ID NO: 3988149 - RNA, 19 nt, Human herpesvirus 6
gacaucgcgcgcgacgugc

SEQ ID NO: 3988150 - RNA, 20 nt, Human herpesvirus 6
gacccgagguccgacacgcc

SEQ ID NO: 3988151 - RNA, 16 nt, Human herpesvirus 6
gaccucauauaagaac

SEQ ID NO: 3988152 - RNA, 18 nt, Human herpesvirus 6
gaccugaucacagagaaa

SEQ ID NO: 3988153 - RNA, 22 nt, Human herpesvirus 6
gacgggcgucaucgguggcaga

SEQ ID NO: 3988154 - RNA, 17 nt, Human herpesvirus 6
gacgucauguguggaca

SEQ ID NO: 3988155 - RNA, 20 nt, Human herpesvirus 6
gacgugccaccgucugggac

SEQ ID NO: 3988156 - RNA, 18 nt, Human herpesvirus 6
gacguuagcucgggguga

SEQ ID NO: 3988157 - RNA, 17 nt, Human herpesvirus 6
gacuauauuaucuuuca

SEQ ID NO: 3988158 - RNA, 14 nt, Human herpesvirus 6
gacuauuucaaaag

SEQ ID NO: 3988159 - RNA, 20 nt, Human herpesvirus 6
gacucaaucccuuucaguuc

SEQ ID NO: 3988160 - RNA, 15 nt, Human herpesvirus 6
gacucauagauuuca

SEQ ID NO: 3988161 - RNA, 16 nt, Human herpesvirus 6
gagagacgcaccacgg

SEQ ID NO: 3988162 - RNA, 16 nt, Human herpesvirus 6
gagcauucacauaaga

SEQ ID NO: 3988163 - RNA, 17 nt, Human herpesvirus 6
gagcuuguuaggacacu

SEQ ID NO: 3988164 - RNA, 17 nt, Human herpesvirus 6
gagggggagggacccac

SEQ ID NO: 3988165 - RNA, 16 nt, Human herpesvirus 6
gagguuuuuguugguu

SEQ ID NO: 3988166 - RNA, 23 nt, Human herpesvirus 6
gagugguuuuuuggauaagcaga

SEQ ID NO: 3988167 - RNA, 21 nt, Human herpesvirus 6
gaguugggacuuggaaacgug

SEQ ID NO: 3988168 - RNA, 19 nt, Human herpesvirus 6
gaguuuuuaucggugaugu

SEQ ID NO: 3988169 - RNA, 19 nt, Human herpesvirus 6
gauaaaaaacucaacugcu

SEQ ID NO: 3988170 - RNA, 21 nt, Human herpesvirus 6
gauaaccguugcgauuuccuu

SEQ ID NO: 3988171 - RNA, 20 nt, Human herpesvirus 6
gaucaucuccaauaaaauau

SEQ ID NO: 3988172 - RNA, 20 nt, Human herpesvirus 6
gaucuuuacaaaagacacaa

SEQ ID NO: 3988173 - RNA, 12 nt, Human herpesvirus 6
gaugaaauugug

SEQ ID NO: 3988174 - RNA, 20 nt, Human herpesvirus 6
gaugaauuaccuguuuuaga

SEQ ID NO: 3988175 - RNA, 22 nt, Human herpesvirus 6
gaugacagcgauacaauaacaa

SEQ ID NO: 3988176 - RNA, 23 nt, Human herpesvirus 6
gauggccgguuacaauagucauu

SEQ ID NO: 3988177 - RNA, 13 nt, Human herpesvirus 6
gauguuugaagau

SEQ ID NO: 3988178 - RNA, 17 nt, Human herpesvirus 6
gauuaauguguuuuucu

SEQ ID NO: 3988179 - RNA, 14 nt, Human herpesvirus 6
gauuacaaaacaau

SEQ ID NO: 3988180 - RNA, 17 nt, Human herpesvirus 6
cauauagucaauguugu

SEQ ID NO: 3988181 - RNA, 14 nt, Human herpesvirus 6
cauaugaaaagcug

SEQ ID NO: 3988182 - RNA, 14 nt, Human herpesvirus 6
caucaaauccucua

SEQ ID NO: 3988183 - RNA, 14 nt, Human herpesvirus 6
caucaaaucggaca

SEQ ID NO: 3988184 - RNA, 22 nt, Human herpesvirus 6
cauccaaauacacuuucauagg

SEQ ID NO: 3988185 - RNA, 14 nt, Human herpesvirus 6
cauccaccuucccu

SEQ ID NO: 3988186 - RNA, 16 nt, Human herpesvirus 6
caucccuuaaaaaaac

SEQ ID NO: 3988187 - RNA, 24 nt, Human herpesvirus 6
caucgcgcgcgacgugccaccguc

SEQ ID NO: 3988188 - RNA, 17 nt, Human herpesvirus 6
caucucgugcaaaagcu

SEQ ID NO: 3988189 - RNA, 13 nt, Human herpesvirus 6
caucugcaaaaaa

SEQ ID NO: 3988190 - RNA, 16 nt, Human herpesvirus 6
caucugccauaucaca

SEQ ID NO: 3988191 - RNA, 13 nt, Human herpesvirus 6
caugaaaucacgu

SEQ ID NO: 3988192 - RNA, 20 nt, Human herpesvirus 6
caugagggacucggaaaagg

SEQ ID NO: 3988193 - RNA, 14 nt, Human herpesvirus 6
cauggugaaagacu

SEQ ID NO: 3988194 - RNA, 16 nt, Human herpesvirus 6
cauguauuuauucacu

SEQ ID NO: 3988195 - RNA, 17 nt, Human herpesvirus 6
caugucuugccucuccg

SEQ ID NO: 3988196 - RNA, 21 nt, Human herpesvirus 6
cauuaaauuguuuuacaaauu

SEQ ID NO: 3988197 - RNA, 16 nt, Human herpesvirus 6
cauucagucucagcaa

SEQ ID NO: 3988198 - RNA, 14 nt, Human herpesvirus 6
cauuguguggggug

SEQ ID NO: 3988199 - RNA, 23 nt, Human herpesvirus 6
cauuuccggagauuaaaacauca

SEQ ID NO: 3988200 - RNA, 15 nt, Human herpesvirus 6
cauuuugaaaaaaca

SEQ ID NO: 3988201 - RNA, 15 nt, Human herpesvirus 6
ccaaagaaacagaua

SEQ ID NO: 3988202 - RNA, 21 nt, Human herpesvirus 6
ccaaauguauugaacuuugua

SEQ ID NO: 3988203 - RNA, 13 nt, Human herpesvirus 6
ccaagaaaaagaa

SEQ ID NO: 3988204 - RNA, 12 nt, Human herpesvirus 6
ccaauauugugg

SEQ ID NO: 3988205 - RNA, 14 nt, Human herpesvirus 6
ccaaucacaacaaa

SEQ ID NO: 3988206 - RNA, 19 nt, Human herpesvirus 6
ccaaugauucuuaauucuu

SEQ ID NO: 3988207 - RNA, 12 nt, Human herpesvirus 6
ccacauguguau

SEQ ID NO: 3988208 - RNA, 13 nt, Human herpesvirus 6
ccaccaaaacgac

SEQ ID NO: 3988209 - RNA, 16 nt, Human herpesvirus 6
ccaccaacacaccugc

SEQ ID NO: 3988210 - RNA, 18 nt, Human herpesvirus 6
ccaccagaaaaguauagu

SEQ ID NO: 3988211 - RNA, 20 nt, Human herpesvirus 6
ccacgcgacagauccgucuc

SEQ ID NO: 3988212 - RNA, 14 nt, Human herpesvirus 6
ccagauaaccucac

SEQ ID NO: 3988213 - RNA, 20 nt, Human herpesvirus 6
ccagauacauaaacaccccg

SEQ ID NO: 3988214 - RNA, 17 nt, Human herpesvirus 6
ccagauacuacacaaac

SEQ ID NO: 3988215 - RNA, 23 nt, Human herpesvirus 6
ccagcgggcuccgucgccgcuuc

SEQ ID NO: 3988216 - RNA, 19 nt, Human herpesvirus 6
ccaggucuuauauuucaga

SEQ ID NO: 3988217 - RNA, 15 nt, Human herpesvirus 6
ccaguagacaagaaa

SEQ ID NO: 3988218 - RNA, 13 nt, Human herpesvirus 6
ccaucuguucaau

SEQ ID NO: 3988219 - RNA, 18 nt, Human herpesvirus 6
ccauguguauauugaauu

SEQ ID NO: 3988220 - RNA, 16 nt, Human herpesvirus 6
cccagcugaaauagac

SEQ ID NO: 3988221 - RNA, 13 nt, Human herpesvirus 6
ccccgcagcuccu

SEQ ID NO: 3988222 - RNA, 15 nt, Human herpesvirus 6
ccccggaguacacgu

SEQ ID NO: 3988223 - RNA, 19 nt, Human herpesvirus 6
ggcgggcagaucuaucaca

SEQ ID NO: 3988224 - RNA, 18 nt, Human herpesvirus 6
ggcgucaucgguggcaga

SEQ ID NO: 3988225 - RNA, 12 nt, Human herpesvirus 6
ggcuaacccuaa

SEQ ID NO: 3988226 - RNA, 18 nt, Human herpesvirus 6
ggcuaacccuaacccuaa

SEQ ID NO: 3988227 - RNA, 20 nt, Human herpesvirus 6
ggcuacgacacgcuggagca

SEQ ID NO: 3988228 - RNA, 18 nt, Human herpesvirus 6
gggacccacgguggccug

SEQ ID NO: 3988229 - RNA, 21 nt, Human herpesvirus 6
gggacccacgguggccuggca

SEQ ID NO: 3988230 - RNA, 19 nt, Human herpesvirus 6
gggcgcgagacagcggaca

SEQ ID NO: 3988231 - RNA, 23 nt, Human herpesvirus 6
gggcgucaucgguggcagagggg

SEQ ID NO: 3988232 - RNA, 18 nt, Human herpesvirus 6
ggggaucgacgggcagga

SEQ ID NO: 3988233 - RNA, 19 nt, Human herpesvirus 6
ggggucucuguucugccac

SEQ ID NO: 3988234 - RNA, 20 nt, Human herpesvirus 6
ggggucuuuccugcacaggc

SEQ ID NO: 3988235 - RNA, 16 nt, Human herpesvirus 6
gggucuuuccugccca

SEQ ID NO: 3988236 - RNA, 18 nt, Human herpesvirus 6
gggugaguuuuaucacuu

SEQ ID NO: 3988237 - RNA, 23 nt, Human herpesvirus 6
gggugucggacgacgggcggggc

SEQ ID NO: 3988238 - RNA, 16 nt, Human herpesvirus 6
ggguuggaaaucaguu

SEQ ID NO: 3988239 - RNA, 20 nt, Human herpesvirus 6
gguaauuuaguguuuaaugu

SEQ ID NO: 3988240 - RNA, 21 nt, Human herpesvirus 6
gguaccgcgguuuggggucuu

SEQ ID NO: 3988241 - RNA, 17 nt, Human herpesvirus 6
gguagagaguggggaca

SEQ ID NO: 3988242 - RNA, 23 nt, Human herpesvirus 6
gguccaacacagcaugcauuugg

SEQ ID NO: 3988243 - RNA, 14 nt, Human herpesvirus 6
ggugaguuugauuu

SEQ ID NO: 3988244 - RNA, 15 nt, Human herpesvirus 6
ggugccaaaggaaac

SEQ ID NO: 3988245 - RNA, 17 nt, Human herpesvirus 6
ggugccaaaggaaacca

SEQ ID NO: 3988246 - RNA, 22 nt, Human herpesvirus 6
gguuucuugauuagagacgcac

SEQ ID NO: 3988247 - RNA, 13 nt, Human herpesvirus 6
gguuugucucgca

SEQ ID NO: 3988248 - RNA, 16 nt, Human herpesvirus 6
guaaaaucacccgagg

SEQ ID NO: 3988249 - RNA, 19 nt, Human herpesvirus 6
guaaauauuucuaaacaca

SEQ ID NO: 3988250 - RNA, 21 nt, Human herpesvirus 6
guaacaacuaccgccauauua

SEQ ID NO: 3988251 - RNA, 12 nt, Human herpesvirus 6
guaauacaucaa

SEQ ID NO: 3988252 - RNA, 22 nt, Human herpesvirus 6
guaauuucuauguaaacuucug

SEQ ID NO: 3988253 - RNA, 13 nt, Human herpesvirus 6
guaccuguacaag

SEQ ID NO: 3988254 - RNA, 20 nt, Human herpesvirus 6
guacuaugauuuauagaauu

SEQ ID NO: 3988255 - RNA, 17 nt, Human herpesvirus 6
guaugaaaguccucaaa

SEQ ID NO: 3988256 - RNA, 14 nt, Human herpesvirus 6
guauugaagaaaau

SEQ ID NO: 3988257 - RNA, 18 nt, Human herpesvirus 6
guauuggugcaucaguga

SEQ ID NO: 3988258 - RNA, 23 nt, Human herpesvirus 6
gucaaauguucgaugauuauucu

SEQ ID NO: 3988259 - RNA, 17 nt, Human herpesvirus 6
auucuaaaauuguaauu

SEQ ID NO: 3988260 - RNA, 15 nt, Human herpesvirus 6
auucuaauaaaagac

SEQ ID NO: 3988261 - RNA, 22 nt, Human herpesvirus 6
auucuucgaauaaaaaguuugu

SEQ ID NO: 3988262 - RNA, 15 nt, Human herpesvirus 6
auucuucuguaaaua

SEQ ID NO: 3988263 - RNA, 16 nt, Human herpesvirus 6
auugaaagaguguuug

SEQ ID NO: 3988264 - RNA, 15 nt, Human herpesvirus 6
auugaauuguauaua

SEQ ID NO: 3988265 - RNA, 13 nt, Human herpesvirus 6
auugcgauucuaa

SEQ ID NO: 3988266 - RNA, 14 nt, Human herpesvirus 6
auugguuugcauaa

SEQ ID NO: 3988267 - RNA, 14 nt, Human herpesvirus 6
auuguaaacgauau

SEQ ID NO: 3988268 - RNA, 23 nt, Human herpesvirus 6
auuguaauuauuagguaaacuga

SEQ ID NO: 3988269 - RNA, 21 nt, Human herpesvirus 6
auuguauauauagcuguaaau

SEQ ID NO: 3988270 - RNA, 16 nt, Human herpesvirus 6
auuguuaacauguaca

SEQ ID NO: 3988271 - RNA, 15 nt, Human herpesvirus 6
auuuaacaacaucuu

SEQ ID NO: 3988272 - RNA, 22 nt, Human herpesvirus 6
auuuaacaacaucuuaaaagac

SEQ ID NO: 3988273 - RNA, 17 nt, Human herpesvirus 6
auuuacaaaacaaauau

SEQ ID NO: 3988274 - RNA, 22 nt, Human herpesvirus 6
auuuaccuuccugagaguaaau

SEQ ID NO: 3988275 - RNA, 18 nt, Human herpesvirus 6
auuucaaacugguguaaa

SEQ ID NO: 3988276 - RNA, 19 nt, Human herpesvirus 6
auuucaaacugguguaaau

SEQ ID NO: 3988277 - RNA, 23 nt, Human herpesvirus 6
auuucauuuguuuuuuaaagcac

SEQ ID NO: 3988278 - RNA, 13 nt, Human herpesvirus 6
auuuccugcccag

SEQ ID NO: 3988279 - RNA, 15 nt, Human herpesvirus 6
auuucuauguaaacu

SEQ ID NO: 3988280 - RNA, 22 nt, Human herpesvirus 6
auuugagagcuaauaugaacaa

SEQ ID NO: 3988281 - RNA, 13 nt, Human herpesvirus 6
auuugcccugagc

SEQ ID NO: 3988282 - RNA, 22 nt, Human herpesvirus 6
auuuggaagcgaaucgcuuaaa

SEQ ID NO: 3988283 - RNA, 17 nt, Human herpesvirus 6
auuuuaauuuugaaaua

SEQ ID NO: 3988284 - RNA, 21 nt, Human herpesvirus 6
auuuuuuggaagaaauugcaa

SEQ ID NO: 3988285 - RNA, 15 nt, Human herpesvirus 6
auuuuuuuaauaaau

SEQ ID NO: 3988286 - RNA, 16 nt, Human herpesvirus 6
caaaaaaaugauagac

SEQ ID NO: 3988287 - RNA, 21 nt, Human herpesvirus 6
caaaaaaccuuuaacuuuuug

SEQ ID NO: 3988288 - RNA, 21 nt, Human herpesvirus 6
caaaaaugcacaauuuagccu

SEQ ID NO: 3988289 - RNA, 21 nt, Human herpesvirus 6
caaaacuacaaagugaaagag

SEQ ID NO: 3988290 - RNA, 15 nt, Human herpesvirus 6
caaaagcgccugccu

SEQ ID NO: 3988291 - RNA, 16 nt, Human herpesvirus 6
caaacauguauccucg

SEQ ID NO: 3988292 - RNA, 21 nt, Human herpesvirus 6
caaagaacaaaaucuucuuug

SEQ ID NO: 3988293 - RNA, 18 nt, Human herpesvirus 6
caaagacauucaacauuc

SEQ ID NO: 3988294 - RNA, 23 nt, Human herpesvirus 6
caaagacgauugcuuuaguagug

SEQ ID NO: 3988295 - RNA, 23 nt, Human herpesvirus 6
caaaucuucccuuuuacaauaca

SEQ ID NO: 3988296 - RNA, 16 nt, Human herpesvirus 6
caaauguaacuuuuug

SEQ ID NO: 3988297 - RNA, 18 nt, Human herpesvirus 6
caacaucuuaaaagacca

SEQ ID NO: 3988298 - RNA, 15 nt, Human herpesvirus 6
caacauuuauguuuc

SEQ ID NO: 3988299 - RNA, 19 nt, Human herpesvirus 6
caaccugaaacuccccaga

SEQ ID NO: 3988300 - RNA, 14 nt, Human herpesvirus 6
caacgcaucacaca

SEQ ID NO: 3988301 - RNA, 23 nt, Human herpesvirus 6
caacgcugucuuuuuucccuaac

SEQ ID NO: 3988302 - RNA, 20 nt, Human herpesvirus 6
caacugguuuugagaaagcc

SEQ ID NO: 3988303 - RNA, 20 nt, Human herpesvirus 6
caaguguuuggugugacauu

SEQ ID NO: 3988304 - RNA, 23 nt, Human herpesvirus 6
caauaaaaaccgacuuauaucga

SEQ ID NO: 3988305 - RNA, 14 nt, Human herpesvirus 6
caauaauugcauuc

SEQ ID NO: 3988306 - RNA, 13 nt, Human herpesvirus 6
caauacacagaaa

SEQ ID NO: 3988307 - RNA, 18 nt, Human herpesvirus 6
caauaucaccuuacaaau

SEQ ID NO: 3988308 - RNA, 15 nt, Human herpesvirus 6
caaucacauaguuuc

SEQ ID NO: 3988309 - RNA, 18 nt, Human herpesvirus 6
caaucgcaaaaacauguu

SEQ ID NO: 3988310 - RNA, 13 nt, Human herpesvirus 6
caaucuuaaauau

SEQ ID NO: 3988311 - RNA, 18 nt, Human herpesvirus 6
caaugcagaacaacagca

SEQ ID NO: 3988312 - RNA, 16 nt, Human herpesvirus 6
caauguaauaauugau

SEQ ID NO: 3988313 - RNA, 19 nt, Human herpesvirus 6
caauuguaguuuguguccu

SEQ ID NO: 3988314 - RNA, 18 nt, Human herpesvirus 6
caauuuaggucuuuaucc

SEQ ID NO: 3988315 - RNA, 23 nt, Human herpesvirus 6
cacagcaugaacucucacggcca

SEQ ID NO: 3988316 - RNA, 13 nt, Human herpesvirus 6
cacaggcggggau

SEQ ID NO: 3988317 - RNA, 11 nt, Human herpesvirus 6
cacccaucucc

SEQ ID NO: 3988318 - RNA, 19 nt, Human herpesvirus 6
caccgagauccccaagagg

SEQ ID NO: 3988319 - RNA, 16 nt, Human herpesvirus 6
caccuacggccagaga

SEQ ID NO: 3988320 - RNA, 15 nt, Human herpesvirus 6
caccucgcgcaccgc

SEQ ID NO: 3988321 - RNA, 16 nt, Human herpesvirus 6
caccucuaaaacaaga

SEQ ID NO: 3988322 - RNA, 19 nt, Human herpesvirus 6
caccuggguuucgaagaau

SEQ ID NO: 3988323 - RNA, 21 nt, Human herpesvirus 6
cacgacaaaacaaucagccug

SEQ ID NO: 3988324 - RNA, 14 nt, Human herpesvirus 6
cacgacaacacgcc

SEQ ID NO: 3988325 - RNA, 15 nt, Human herpesvirus 6
cacgaucuacacacc

SEQ ID NO: 3988326 - RNA, 19 nt, Human herpesvirus 6
cacggggauuuaguacagu

SEQ ID NO: 3988327 - RNA, 14 nt, Human herpesvirus 6
cacguacuauuuuu

SEQ ID NO: 3988328 - RNA, 17 nt, Human herpesvirus 6
cacgugaaauaaaguuu

SEQ ID NO: 3988329 - RNA, 20 nt, Human herpesvirus 6
cacguuaccgaagauuacuu

SEQ ID NO: 3988330 - RNA, 21 nt, Human herpesvirus 6
cacuccgacucgccgcugcag

SEQ ID NO: 3988331 - RNA, 20 nt, Human herpesvirus 6
cacucggauucaaagaaagu

SEQ ID NO: 3988332 - RNA, 15 nt, Human herpesvirus 6
cacuguaccuuuagu

SEQ ID NO: 3988333 - RNA, 14 nt, Human herpesvirus 6
cacuguuugaaacu

SEQ ID NO: 3988334 - RNA, 16 nt, Human herpesvirus 6
cacuuagacacggccg

SEQ ID NO: 3988335 - RNA, 17 nt, Human herpesvirus 6
cacuuguauuaaaguuc

SEQ ID NO: 3988336 - RNA, 14 nt, Human herpesvirus 6
cagaaaaaaaucag

SEQ ID NO: 3988337 - RNA, 16 nt, Human herpesvirus 6
cagaagaacagcuaau

SEQ ID NO: 3988338 - RNA, 22 nt, Human herpesvirus 6
cagaauuuguaaaaaaacauuc

SEQ ID NO: 3988339 - RNA, 13 nt, Human herpesvirus 6
cagacagaggaag

SEQ ID NO: 3988340 - RNA, 15 nt, Human herpesvirus 6
cagaccacaccccug

SEQ ID NO: 3988341 - RNA, 17 nt, Human herpesvirus 6
cagaggaagauagcaga

SEQ ID NO: 3988342 - RNA, 14 nt, Human herpesvirus 6
cagauaaccucacu

SEQ ID NO: 3988343 - RNA, 22 nt, Human herpesvirus 6
cagauggugcgaucgagcaaca

SEQ ID NO: 3988344 - RNA, 13 nt, Human herpesvirus 6
cagcggaagugaa

SEQ ID NO: 3988345 - RNA, 21 nt, Human herpesvirus 6
cagcucaaacaaauggaaacu

SEQ ID NO: 3988346 - RNA, 19 nt, Human herpesvirus 6
cagcuuccguaucacacuu

SEQ ID NO: 3988347 - RNA, 18 nt, Human herpesvirus 6
caggaacagucugacaug

SEQ ID NO: 3988348 - RNA, 18 nt, Human herpesvirus 6
caggauuauaaaaacaca

SEQ ID NO: 3988349 - RNA, 22 nt, Human herpesvirus 6
caggcgaacgaaaacucuaaaa

SEQ ID NO: 3988350 - RNA, 21 nt, Human herpesvirus 6
cagggggaucgacgggcagga

SEQ ID NO: 3988351 - RNA, 19 nt, Human herpesvirus 6
cagggggggucucuguucu

SEQ ID NO: 3988352 - RNA, 20 nt, Human herpesvirus 6
cagggucaaaaaacucagcc

SEQ ID NO: 3988353 - RNA, 14 nt, Human herpesvirus 6
cagguggagcugug

SEQ ID NO: 3988354 - RNA, 13 nt, Human herpesvirus 6
cagguuugaaaca

SEQ ID NO: 3988355 - RNA, 19 nt, Human herpesvirus 6
cagucaaauugauuaugau

SEQ ID NO: 3988356 - RNA, 14 nt, Human herpesvirus 6
cagucaggaaaaag

SEQ ID NO: 3988357 - RNA, 20 nt, Human herpesvirus 6
caguuauuacauuuuuggau

SEQ ID NO: 3988358 - RNA, 17 nt, Human herpesvirus 6
caguucguagaacggaa

SEQ ID NO: 3988359 - RNA, 19 nt, Human herpesvirus 6
caguuuaccuauuuacaau

SEQ ID NO: 3988360 - RNA, 14 nt, Human herpesvirus 6
cauaaacaccccga

SEQ ID NO: 3988361 - RNA, 13 nt, Human herpesvirus 6
cauaaacagacag

SEQ ID NO: 3988362 - RNA, 15 nt, Human herpesvirus 6
cauaagcaaauguaa

SEQ ID NO: 3988363 - RNA, 21 nt, Human herpesvirus 6
cauacauuccuuaagaaugaa

SEQ ID NO: 3988364 - RNA, 18 nt, Human herpesvirus 6
cauaguugggaucuucug

SEQ ID NO: 3988365 - RNA, 13 nt, Human herpesvirus 6
cauauaugaugcu

SEQ ID NO: 3988366 - RNA, 18 nt, Human herpesvirus 6
cauauauuggcaugugaa

SEQ ID NO: 3988367 - RNA, 15 nt, Human herpesvirus 6
cauaugcagacugcu

SEQ ID NO: 3988368 - RNA, 15 nt, Human herpesvirus 6
cauaugucuguuaua

SEQ ID NO: 3988369 - RNA, 17 nt, Human herpesvirus 6
cauauuaggcugcagcc

SEQ ID NO: 3988370 - RNA, 18 nt, Human herpesvirus 6
cauauuauauuuaaauga

SEQ ID NO: 3988371 - RNA, 20 nt, Human herpesvirus 6
caucaauuccggccuaggac

SEQ ID NO: 3988372 - RNA, 19 nt, Human herpesvirus 6
caucagcccccagcugaaa

SEQ ID NO: 3988373 - RNA, 18 nt, Human herpesvirus 6
caucccccuccccggagc

SEQ ID NO: 3988374 - RNA, 20 nt, Human herpesvirus 6
uaauuuaguguuuaauguaa

SEQ ID NO: 3988375 - RNA, 14 nt, Human herpesvirus 6
uacaaagugaaaga

SEQ ID NO: 3988376 - RNA, 17 nt, Human herpesvirus 6
uacaaagugaaagagac

SEQ ID NO: 3988377 - RNA, 17 nt, Human herpesvirus 6
uacaagaaaagaaacaa

SEQ ID NO: 3988378 - RNA, 15 nt, Human herpesvirus 6
uacaauacacagaaa

SEQ ID NO: 3988379 - RNA, 18 nt, Human herpesvirus 6
uacaaugaaaaaaaaauc

SEQ ID NO: 3988380 - RNA, 13 nt, Human herpesvirus 6
uacacacccagca

SEQ ID NO: 3988381 - RNA, 12 nt, Human herpesvirus 6
uacacgaacuaa

SEQ ID NO: 3988382 - RNA, 18 nt, Human herpesvirus 6
uacagauacauagauuuu

SEQ ID NO: 3988383 - RNA, 15 nt, Human herpesvirus 6
uacauaagcaaaugu

SEQ ID NO: 3988384 - RNA, 16 nt, Human herpesvirus 6
uacauauagucaaugu

SEQ ID NO: 3988385 - RNA, 17 nt, Human herpesvirus 6
uaccacacgcuuacaca

SEQ ID NO: 3988386 - RNA, 21 nt, Human herpesvirus 6
uaccuaauaauuacaauacaa

SEQ ID NO: 3988387 - RNA, 13 nt, Human herpesvirus 6
uaccuauagucaa

SEQ ID NO: 3988388 - RNA, 21 nt, Human herpesvirus 6
uaccuguaaacuggucugcuu

SEQ ID NO: 3988389 - RNA, 12 nt, Human herpesvirus 6
uaccuguacaag

SEQ ID NO: 3988390 - RNA, 14 nt, Human herpesvirus 6
uacggaaaaaguau

SEQ ID NO: 3988391 - RNA, 18 nt, Human herpesvirus 6
uacggcacgcucguuuuu

SEQ ID NO: 3988392 - RNA, 11 nt, Human herpesvirus 6
uacuaggaaag

SEQ ID NO: 3988393 - RNA, 16 nt, Human herpesvirus 6
uacuauaaacaauugu

SEQ ID NO: 3988394 - RNA, 14 nt, Human herpesvirus 6
uacuauuuguuuaa

SEQ ID NO: 3988395 - RNA, 16 nt, Human herpesvirus 6
uacugagcaaagaaau

SEQ ID NO: 3988396 - RNA, 17 nt, Human herpesvirus 6
uagacauuuugugauuc

SEQ ID NO: 3988397 - RNA, 13 nt, Human herpesvirus 6
uagagauuuugga

SEQ ID NO: 3988398 - RNA, 14 nt, Human herpesvirus 6
uagagcaacucauc

SEQ ID NO: 3988399 - RNA, 18 nt, Human herpesvirus 6
uagaucaauauaucgucu

SEQ ID NO: 3988400 - RNA, 22 nt, Human herpesvirus 6
uagaugaaaccuagauguaaau

SEQ ID NO: 3988401 - RNA, 17 nt, Human herpesvirus 6
uagauggaaaauugcaa

SEQ ID NO: 3988402 - RNA, 17 nt, Human herpesvirus 6
uagauuuuaauuuugaa

SEQ ID NO: 3988403 - RNA, 19 nt, Human herpesvirus 6
uagauuuuauaacgacaaa

SEQ ID NO: 3988404 - RNA, 21 nt, Human herpesvirus 6
uagccauuuuuuucuuacacg

SEQ ID NO: 3988405 - RNA, 14 nt, Human herpesvirus 6
uagcgauaauuaag

SEQ ID NO: 3988406 - RNA, 14 nt, Human herpesvirus 6
uaggauuagaacaa

SEQ ID NO: 3988407 - RNA, 15 nt, Human herpesvirus 6
uaggauuagaacaau

SEQ ID NO: 3988408 - RNA, 20 nt, Human herpesvirus 6
uagguauuagaugaauuugu

SEQ ID NO: 3988409 - RNA, 18 nt, Human herpesvirus 6
uaggugggucagugcuua

SEQ ID NO: 3988410 - RNA, 20 nt, Human herpesvirus 6
uaguacaguaugucuccaaa

SEQ ID NO: 3988411 - RNA, 17 nt, Human herpesvirus 6
uaguuuucacacguuau

SEQ ID NO: 3988412 - RNA, 16 nt, Human herpesvirus 6
uaguuuuuuuucuuua

SEQ ID NO: 3988413 - RNA, 14 nt, Human herpesvirus 6
uauaaaaaacugca

SEQ ID NO: 3988414 - RNA, 19 nt, Human herpesvirus 6
uauaaacaauuguauucuu

SEQ ID NO: 3988415 - RNA, 14 nt, Human herpesvirus 6
uauaaauguagcau

SEQ ID NO: 3988416 - RNA, 19 nt, Human herpesvirus 6
uauaauguguuggucauuu

SEQ ID NO: 3988417 - RNA, 16 nt, Human herpesvirus 6
uauaauuaaaauagaa

SEQ ID NO: 3988418 - RNA, 17 nt, Human herpesvirus 6
uauacacgaacuaaaua

SEQ ID NO: 3988419 - RNA, 23 nt, Human herpesvirus 6
uauacgaaauaaucgauuacaaa

SEQ ID NO: 3988420 - RNA, 15 nt, Human herpesvirus 6
uauacggaaaagaug

SEQ ID NO: 3988421 - RNA, 14 nt, Human herpesvirus 6
uauaucuaaaguca

SEQ ID NO: 3988422 - RNA, 19 nt, Human herpesvirus 6
uauaucucggacucauaga

SEQ ID NO: 3988423 - RNA, 19 nt, Human herpesvirus 6
uauauuggauuggauggau

SEQ ID NO: 3988424 - RNA, 16 nt, Human herpesvirus 6
uaucacggaugguuug

SEQ ID NO: 3988425 - RNA, 15 nt, Human herpesvirus 6
uauccgcccuccccg

SEQ ID NO: 3988426 - RNA, 17 nt, Human herpesvirus 6
uaugaucauaugaggau

SEQ ID NO: 3988427 - RNA, 15 nt, Human herpesvirus 6
uaugauuuauagaau

SEQ ID NO: 3988428 - RNA, 17 nt, Human herpesvirus 6
uaugcuuauacuguugu

SEQ ID NO: 3988429 - RNA, 16 nt, Human herpesvirus 6
uauguaauacaucaac

SEQ ID NO: 3988430 - RNA, 15 nt, Human herpesvirus 6
uauguaugaacaggu

SEQ ID NO: 3988431 - RNA, 15 nt, Human herpesvirus 6
uauguuuucaaaaau

SEQ ID NO: 3988432 - RNA, 18 nt, Human herpesvirus 6
uauucacggcuaauauga

SEQ ID NO: 3988433 - RNA, 22 nt, Human herpesvirus 6
uauuccccauuccuagaggugc

SEQ ID NO: 3988434 - RNA, 18 nt, Human herpesvirus 6
uauuguguaccuuguaau

SEQ ID NO: 3988435 - RNA, 22 nt, Human herpesvirus 6
uauuuacugagcaaagaaauga

SEQ ID NO: 3988436 - RNA, 17 nt, Human herpesvirus 6
uauuuaugaaaauugcu

SEQ ID NO: 3988437 - RNA, 13 nt, Human herpesvirus 6
uauuuccugccca

SEQ ID NO: 3988438 - RNA, 17 nt, Human herpesvirus 6
uauuucguauguuugga

SEQ ID NO: 3988439 - RNA, 20 nt, Human herpesvirus 6
uauuucugguuguguuaauc

SEQ ID NO: 3988440 - RNA, 14 nt, Human herpesvirus 6
ucaaaaaaauuccc

SEQ ID NO: 3988441 - RNA, 16 nt, Human herpesvirus 6
ucaaacugguguaaau

SEQ ID NO: 3988442 - RNA, 23 nt, Human herpesvirus 6
ucaacauuaaaaaaaauagcaga

SEQ ID NO: 3988443 - RNA, 17 nt, Human herpesvirus 6
ucaagguggagguuucu

SEQ ID NO: 3988444 - RNA, 19 nt, Human herpesvirus 6
ucaaugaaaaaaaaugaag

SEQ ID NO: 3988445 - RNA, 19 nt, Human herpesvirus 6
ucacaguuuuuuuuuucau

SEQ ID NO: 3988446 - RNA, 15 nt, Human herpesvirus 6
ucacauauaugaugc

SEQ ID NO: 3988447 - RNA, 23 nt, Human herpesvirus 6
ucacauguucuuuauuaaauguu

SEQ ID NO: 3988448 - RNA, 12 nt, Human herpesvirus 6
ucacggauggag

SEQ ID NO: 3988449 - RNA, 14 nt, Human herpesvirus 6
ucacucagauuuca

SEQ ID NO: 3988450 - RNA, 12 nt, Human herpesvirus 6
ucacugucuauu

SEQ ID NO: 3988451 - RNA, 13 nt, Human herpesvirus 6
ucagagaaacgga

SEQ ID NO: 3988452 - RNA, 22 nt, Human herpesvirus 6
ucagcgacucccggcccagaga

SEQ ID NO: 3988453 - RNA, 22 nt, Human herpesvirus 6
ucagucuucaauaaaaacucaa

SEQ ID NO: 3988454 - RNA, 18 nt, Human herpesvirus 6
ucaugagccagcgcaaga

SEQ ID NO: 3988455 - RNA, 23 nt, Human herpesvirus 6
ucaugaucucacgucacaguuuu

SEQ ID NO: 3988456 - RNA, 22 nt, Human herpesvirus 6
uccaacggccuuucuguuuuaa

SEQ ID NO: 3988457 - RNA, 17 nt, Human herpesvirus 6
uccaccuucccucccac

SEQ ID NO: 3988458 - RNA, 14 nt, Human herpesvirus 6
uccagacaauaauc

SEQ ID NO: 3988459 - RNA, 18 nt, Human herpesvirus 6
uccauaaguuaauuccag

SEQ ID NO: 3988460 - RNA, 13 nt, Human herpesvirus 6
uccauccucgaau

SEQ ID NO: 3988461 - RNA, 15 nt, Human herpesvirus 6
uccaugcgaguagau

SEQ ID NO: 3988462 - RNA, 16 nt, Human herpesvirus 6
uccaugucuucuuggg

SEQ ID NO: 3988463 - RNA, 13 nt, Human herpesvirus 6
uccccacaauaag

SEQ ID NO: 3988464 - RNA, 15 nt, Human herpesvirus 6
uccccagagaaaauu

SEQ ID NO: 3988465 - RNA, 22 nt, Human herpesvirus 6
uccccuuggcucgugauccuac

SEQ ID NO: 3988466 - RNA, 14 nt, Human herpesvirus 6
ucccuaauaaaugu

SEQ ID NO: 3988467 - RNA, 21 nt, Human herpesvirus 6
uccgccccgauaaaaacaagu

SEQ ID NO: 3988468 - RNA, 15 nt, Human herpesvirus 6
uccgcgggaccuggc

SEQ ID NO: 3988469 - RNA, 21 nt, Human herpesvirus 6
acauuauaaauuauuuuguga

SEQ ID NO: 3988470 - RNA, 14 nt, Human herpesvirus 6
acauuguagaaaga

SEQ ID NO: 3988471 - RNA, 19 nt, Human herpesvirus 6
acauuuugguuucccucag

SEQ ID NO: 3988472 - RNA, 19 nt, Human herpesvirus 6
accaccagucaggaaaaag

SEQ ID NO: 3988473 - RNA, 21 nt, Human herpesvirus 6
accaccggcuaacccuaaccc

SEQ ID NO: 3988474 - RNA, 21 nt, Human herpesvirus 6
accagcauguuuucuccucaa

SEQ ID NO: 3988475 - RNA, 21 nt, Human herpesvirus 6
aaaucgcgucguucguuguau

SEQ ID NO: 3988476 - RNA, 12 nt, Human herpesvirus 6
aaaucuggcaac

SEQ ID NO: 3988477 - RNA, 18 nt, Human herpesvirus 6
aaaugaugaguaauacau

SEQ ID NO: 3988478 - RNA, 11 nt, Human herpesvirus 6
aaauggcucag

SEQ ID NO: 3988479 - RNA, 19 nt, Human herpesvirus 6
aaaugucaaagaaacagua

SEQ ID NO: 3988480 - RNA, 19 nt, Human herpesvirus 6
aaauuacaagguacacaau

SEQ ID NO: 3988481 - RNA, 16 nt, Human herpesvirus 6
aaauuguuuuacaaau

SEQ ID NO: 3988482 - RNA, 15 nt, Human herpesvirus 6
aacaaauggaaacug

SEQ ID NO: 3988483 - RNA, 13 nt, Human herpesvirus 6
aacaacaauaaca

SEQ ID NO: 3988484 - RNA, 22 nt, Human herpesvirus 6
aacaacaucuuaaaagaccacu

SEQ ID NO: 3988485 - RNA, 15 nt, Human herpesvirus 6
aacaaccacaaacau

SEQ ID NO: 3988486 - RNA, 15 nt, Human herpesvirus 6
aacaauccauguuca

SEQ ID NO: 3988487 - RNA, 17 nt, Human herpesvirus 6
aacacacaucauauccu

SEQ ID NO: 3988488 - RNA, 22 nt, Human herpesvirus 6
aacaccaauaaaauuuuuugca

SEQ ID NO: 3988489 - RNA, 18 nt, Human herpesvirus 6
aacacgaagacgaagagg

SEQ ID NO: 3988490 - RNA, 14 nt, Human herpesvirus 6
aacacgcuguugcu

SEQ ID NO: 3988491 - RNA, 22 nt, Human herpesvirus 6
aacaggauucccuucagacauc

SEQ ID NO: 3988492 - RNA, 17 nt, Human herpesvirus 6
aacaguuauacuggcaa

SEQ ID NO: 3988493 - RNA, 15 nt, Human herpesvirus 6
aacaucugcuaacgc

SEQ ID NO: 3988494 - RNA, 16 nt, Human herpesvirus 6
aaccaaguguuuuaug

SEQ ID NO: 3988495 - RNA, 17 nt, Human herpesvirus 6
aacccuaacccuaaccc

SEQ ID NO: 3988496 - RNA, 23 nt, Human herpesvirus 6
aaccgcaguuccuguuuuucuca

SEQ ID NO: 3988497 - RNA, 22 nt, Human herpesvirus 6
aaccgccgugcuucuggcacag

SEQ ID NO: 3988498 - RNA, 18 nt, Human herpesvirus 6
aaccucauuaugaauaac

SEQ ID NO: 3988499 - RNA, 15 nt, Human herpesvirus 6
aaccuuauacagaug

SEQ ID NO: 3988500 - RNA, 17 nt, Human herpesvirus 6
aaccuuuaacuuuuugc

SEQ ID NO: 3988501 - RNA, 23 nt, Human herpesvirus 6
aacgacuaccacaucaccgauaa

SEQ ID NO: 3988502 - RNA, 14 nt, Human herpesvirus 6
aacgauaugucucu

SEQ ID NO: 3988503 - RNA, 21 nt, Human herpesvirus 6
aacggcgguaacguggauaaa

SEQ ID NO: 3988504 - RNA, 15 nt, Human herpesvirus 6
aacggcuucaagaau

SEQ ID NO: 3988505 - RNA, 23 nt, Human herpesvirus 6
aacugguguaaauacccuggggu

SEQ ID NO: 3988506 - RNA, 16 nt, Human herpesvirus 6
aacuuacuaaugugga

SEQ ID NO: 3988507 - RNA, 12 nt, Human herpesvirus 6
aacuuuuaacuu

SEQ ID NO: 3988508 - RNA, 14 nt, Human herpesvirus 6
aagaauuauuuauc

SEQ ID NO: 3988509 - RNA, 18 nt, Human herpesvirus 6
aagacucagcgacucccg

SEQ ID NO: 3988510 - RNA, 22 nt, Human herpesvirus 6
aagauccaaucacaacaaaaau

SEQ ID NO: 3988511 - RNA, 12 nt, Human herpesvirus 6
aagauuaaaugu

SEQ ID NO: 3988512 - RNA, 21 nt, Human herpesvirus 6
aagauuguguuucugucuuua

SEQ ID NO: 3988513 - RNA, 22 nt, Human herpesvirus 6
aagcaaaaacagauuaaauaua

SEQ ID NO: 3988514 - RNA, 15 nt, Human herpesvirus 6
aagcaaguuccauuu

SEQ ID NO: 3988515 - RNA, 14 nt, Human herpesvirus 6
aagcacaaaaccag

SEQ ID NO: 3988516 - RNA, 13 nt, Human herpesvirus 6
aagcgccugccua

SEQ ID NO: 3988517 - RNA, 18 nt, Human herpesvirus 6
aaggaaagacaugcauuu

SEQ ID NO: 3988518 - RNA, 15 nt, Human herpesvirus 6
aaggacuaucugaga

SEQ ID NO: 3988519 - RNA, 24 nt, Human herpesvirus 6
aagggcuuuucaagaucugccauc

SEQ ID NO: 3988520 - RNA, 13 nt, Human herpesvirus 6
aaggucagugggu

SEQ ID NO: 3988521 - RNA, 19 nt, Human herpesvirus 6
aagguguuaaacgaaaacu

SEQ ID NO: 3988522 - RNA, 12 nt, Human herpesvirus 6
aaguauguacaa

SEQ ID NO: 3988523 - RNA, 19 nt, Human herpesvirus 6
aaguuggggucucaugacu

SEQ ID NO: 3988524 - RNA, 13 nt, Human herpesvirus 6
aaguuucacauau

SEQ ID NO: 3988525 - RNA, 14 nt, Human herpesvirus 6
aauaaaaaauucuu

SEQ ID NO: 3988526 - RNA, 19 nt, Human herpesvirus 6
aauaaacuuuuuuggcucg

SEQ ID NO: 3988527 - RNA, 13 nt, Human herpesvirus 6
aauaaaggucagu

SEQ ID NO: 3988528 - RNA, 19 nt, Human herpesvirus 6
aauaaugcccagaugugga

SEQ ID NO: 3988529 - RNA, 16 nt, Human herpesvirus 6
aauaauggcaugcauu

SEQ ID NO: 3988530 - RNA, 14 nt, Human herpesvirus 6
aauauaucuugaaa

SEQ ID NO: 3988531 - RNA, 18 nt, Human herpesvirus 6
aauauauuuauugaaaga

SEQ ID NO: 3988532 - RNA, 13 nt, Human herpesvirus 6
aauauuuccugcc

SEQ ID NO: 3988533 - RNA, 14 nt, Human herpesvirus 6
aauauuuccugccc

SEQ ID NO: 3988534 - RNA, 15 nt, Human herpesvirus 6
aauauuuugaaaagg

SEQ ID NO: 3988535 - RNA, 16 nt, Human herpesvirus 6
aaucaaaaaaaugaua

SEQ ID NO: 3988536 - RNA, 12 nt, Human herpesvirus 6
aaucacaaauau

SEQ ID NO: 3988537 - RNA, 12 nt, Human herpesvirus 6
aaucaugagagc

SEQ ID NO: 3988538 - RNA, 16 nt, Human herpesvirus 6
aaucauggugucuuug

SEQ ID NO: 3988539 - RNA, 20 nt, Human herpesvirus 6
aaucauuagcauacagaugu

SEQ ID NO: 3988540 - RNA, 20 nt, Human herpesvirus 6
aaucucgccgaacuagaaaa

SEQ ID NO: 3988541 - RNA, 23 nt, Human herpesvirus 6
aaucuuauucaaaaauguugcau

SEQ ID NO: 3988542 - RNA, 23 nt, Human herpesvirus 6
aauggaguaaauuaaaguuuacu

SEQ ID NO: 3988543 - RNA, 19 nt, Human herpesvirus 6
aauguaaacacgaaauugc

SEQ ID NO: 3988544 - RNA, 23 nt, Human herpesvirus 6
aauguaacugguucagaauuugu

SEQ ID NO: 3988545 - RNA, 17 nt, Human herpesvirus 6
aauguccgcaaguaaaa

SEQ ID NO: 3988546 - RNA, 16 nt, Human herpesvirus 6
aauguguucacagagc

SEQ ID NO: 3988547 - RNA, 19 nt, Human herpesvirus 6
aauguugaaguauguacaa

SEQ ID NO: 3988548 - RNA, 12 nt, Human herpesvirus 6
aauuaauacaaa

SEQ ID NO: 3988549 - RNA, 18 nt, Human herpesvirus 6
aauuacaagguacacaau

SEQ ID NO: 3988550 - RNA, 15 nt, Human herpesvirus 6
aauuacauuaaaaca

SEQ ID NO: 3988551 - RNA, 14 nt, Human herpesvirus 6
aauuauagcgauaa

SEQ ID NO: 3988552 - RNA, 22 nt, Human herpesvirus 6
aauuaucacaguugauaaacau

SEQ ID NO: 3988553 - RNA, 15 nt, Human herpesvirus 6
aauucuuaccaagaa

SEQ ID NO: 3988554 - RNA, 14 nt, Human herpesvirus 6
aauuguauucuuga

SEQ ID NO: 3988555 - RNA, 16 nt, Human herpesvirus 6
aauuucuacaaaaaua

SEQ ID NO: 3988556 - RNA, 13 nt, Human herpesvirus 6
aauuuuaaaaaga

SEQ ID NO: 3988557 - RNA, 15 nt, Human herpesvirus 6
aauuuuccaaacauu

SEQ ID NO: 3988558 - RNA, 16 nt, Human herpesvirus 6
aauuuuuuauuucuga

SEQ ID NO: 3988559 - RNA, 21 nt, Human herpesvirus 6
acaaauaaaaaauucuugaau

SEQ ID NO: 3988560 - RNA, 15 nt, Human herpesvirus 6
acaaauuuuuaacua

SEQ ID NO: 3988561 - RNA, 15 nt, Human herpesvirus 6
acaacaaguaaauuc

SEQ ID NO: 3988562 - RNA, 23 nt, Human herpesvirus 6
acaaccuccgcauaucgccccca

SEQ ID NO: 3988563 - RNA, 15 nt, Human herpesvirus 6
acaacgcuccauaac

SEQ ID NO: 3988564 - RNA, 18 nt, Human herpesvirus 6
acaacgguguggagacac

SEQ ID NO: 3988565 - RNA, 16 nt, Human herpesvirus 6
acaagguucgucgaga

SEQ ID NO: 3988566 - RNA, 14 nt, Human herpesvirus 6
acaauauuucacau

SEQ ID NO: 3988567 - RNA, 22 nt, Human herpesvirus 6
acaaucagccugcucagagcug

SEQ ID NO: 3988568 - RNA, 21 nt, Human herpesvirus 6
acaaugcagaacaacagcaug

SEQ ID NO: 3988569 - RNA, 13 nt, Human herpesvirus 6
acaccucaggguc

SEQ ID NO: 3988570 - RNA, 21 nt, Human herpesvirus 6
acagacuccccaccgagaucc

SEQ ID NO: 3988571 - RNA, 17 nt, Human herpesvirus 6
acagauuaaauauaccu

SEQ ID NO: 3988572 - RNA, 22 nt, Human herpesvirus 6
acagcacuuugcgcccauaccu

SEQ ID NO: 3988573 - RNA, 16 nt, Human herpesvirus 6
acagcagcagcauuaa

SEQ ID NO: 3988574 - RNA, 14 nt, Human herpesvirus 6
acaguaaaaugugu

SEQ ID NO: 3988575 - RNA, 22 nt, Human herpesvirus 6
acagucacacacagggugcuua

SEQ ID NO: 3988576 - RNA, 16 nt, Human herpesvirus 6
acagugauuagaaugu

SEQ ID NO: 3988577 - RNA, 16 nt, Human herpesvirus 6
acauaguggcuaugaa

SEQ ID NO: 3988578 - RNA, 20 nt, Human herpesvirus 6
acauauaaauccgauagcca

SEQ ID NO: 3988579 - RNA, 23 nt, Human herpesvirus 6
acaucaacuauuuaacauccaaa

SEQ ID NO: 3988580 - RNA, 19 nt, Human herpesvirus 6
acauccagaaaagcaaaca

SEQ ID NO: 3988581 - RNA, 15 nt, Human herpesvirus 6
acauggugaaagacu

SEQ ID NO: 3988582 - RNA, 13 nt, Human herpesvirus 6
acauguuaacaau

SEQ ID NO: 3988583 - RNA, 20 nt, Human herpesvirus 6
acauguucuuuauuaaaugu

SEQ ID NO: 3988584 - RNA, 17 nt, Human herpesvirus 6
guuuuuuucguauaaau

SEQ ID NO: 3988585 - RNA, 15 nt, Human herpesvirus 6
uaaaaacucacacaa

SEQ ID NO: 3988586 - RNA, 20 nt, Human herpesvirus 6
uaaaaagaaugggauuguga

SEQ ID NO: 3988587 - RNA, 23 nt, Human herpesvirus 6
uaaaagacguuugcuguuuucac

SEQ ID NO: 3988588 - RNA, 17 nt, Human herpesvirus 6
uaaaauguguagugguc

SEQ ID NO: 3988589 - RNA, 19 nt, Human herpesvirus 6
uaaaauuaugccacaccca

SEQ ID NO: 3988590 - RNA, 18 nt, Human herpesvirus 6
uaaaauuucgauguggag

SEQ ID NO: 3988591 - RNA, 17 nt, Human herpesvirus 6
uaaacaugauuguaaua

SEQ ID NO: 3988592 - RNA, 12 nt, Human herpesvirus 6
uaaagcagcuag

SEQ ID NO: 3988593 - RNA, 16 nt, Human herpesvirus 6
uaaaggucagugggua

SEQ ID NO: 3988594 - RNA, 19 nt, Human herpesvirus 6
uaaaguuuugugauccugu

SEQ ID NO: 3988595 - RNA, 15 nt, Human herpesvirus 6
uaaauacauucacau

SEQ ID NO: 3988596 - RNA, 17 nt, Human herpesvirus 6
uaaauauaucaaagaug

SEQ ID NO: 3988597 - RNA, 22 nt, Human herpesvirus 6
uaaauauguugaaucuuauuca

SEQ ID NO: 3988598 - RNA, 16 nt, Human herpesvirus 6
uaaaucugagguuucc

SEQ ID NO: 3988599 - RNA, 20 nt, Human herpesvirus 6
uaaaugaauguguucacaga

SEQ ID NO: 3988600 - RNA, 12 nt, Human herpesvirus 6
uaacaacaacaa

SEQ ID NO: 3988601 - RNA, 18 nt, Human herpesvirus 6
uaaccagauguguacaac

SEQ ID NO: 3988602 - RNA, 15 nt, Human herpesvirus 6
uaacccuaacccuaa

SEQ ID NO: 3988603 - RNA, 18 nt, Human herpesvirus 6
uaacccuaacccuaaccc

SEQ ID NO: 3988604 - RNA, 18 nt, Human herpesvirus 6
uaacgacuucgacuucaa

SEQ ID NO: 3988605 - RNA, 22 nt, Human herpesvirus 6
uaacgcaacucuaccuggaaac

SEQ ID NO: 3988606 - RNA, 17 nt, Human herpesvirus 6
uaacgcggcaaccgcag

SEQ ID NO: 3988607 - RNA, 19 nt, Human herpesvirus 6
uaacucuuuuuguugcuau

SEQ ID NO: 3988608 - RNA, 19 nt, Human herpesvirus 6
uaacuguaaaaagugcuuu

SEQ ID NO: 3988609 - RNA, 14 nt, Human herpesvirus 6
uaacuuauguuucu

SEQ ID NO: 3988610 - RNA, 20 nt, Human herpesvirus 6
uaacuuuuuguauuauguaa

SEQ ID NO: 3988611 - RNA, 15 nt, Human herpesvirus 6
uaagagugcaacaaa

SEQ ID NO: 3988612 - RNA, 17 nt, Human herpesvirus 6
uaagauaggcaaaccau

SEQ ID NO: 3988613 - RNA, 19 nt, Human herpesvirus 6
uaaguggguacaaugaaaa

SEQ ID NO: 3988614 - RNA, 16 nt, Human herpesvirus 6
uaaucaucccaauaaa

SEQ ID NO: 3988615 - RNA, 23 nt, Human herpesvirus 6
uaaucgcgguccaacacagcaug

SEQ ID NO: 3988616 - RNA, 18 nt, Human herpesvirus 6
uaaucguuacaaaauuga

SEQ ID NO: 3988617 - RNA, 20 nt, Human herpesvirus 6
uaauuacauauagucaaugu

SEQ ID NO: 3988618 - RNA, 19 nt, Human herpesvirus 6
uaauuaugcauuucuuggu

SEQ ID NO: 3988619 - RNA, 13 nt, Human herpesvirus 6
uaauucuuaaagc

SEQ ID NO: 3988620 - RNA, 13 nt, Human herpesvirus 6
uacaacaauaaaa

SEQ ID NO: 3988621 - RNA, 16 nt, Human herpesvirus 6
uacaacugaaacuuca

SEQ ID NO: 3988622 - RNA, 22 nt, Human herpesvirus 6
uacaagaaaagaaacaaugcuu

SEQ ID NO: 3988623 - RNA, 15 nt, Human herpesvirus 6
uacaaucaugugcau

SEQ ID NO: 3988624 - RNA, 17 nt, Human herpesvirus 6
uacacgaaaaacauuuc

SEQ ID NO: 3988625 - RNA, 14 nt, Human herpesvirus 6
uacacuuuaucgau

SEQ ID NO: 3988626 - RNA, 20 nt, Human herpesvirus 6
uacauguuuguugugaucuu

SEQ ID NO: 3988627 - RNA, 18 nt, Human herpesvirus 6
uacauuuauaauuaaaau

SEQ ID NO: 3988628 - RNA, 15 nt, Human herpesvirus 6
uacauuuucaaauuu

SEQ ID NO: 3988629 - RNA, 23 nt, Human herpesvirus 6
uaccacaucaccgauaaaaacuc

SEQ ID NO: 3988630 - RNA, 22 nt, Human herpesvirus 6
uaccacggggauuuaguacagu

SEQ ID NO: 3988631 - RNA, 19 nt, Human herpesvirus 6
uaccgcgguuggggucuuu

SEQ ID NO: 3988632 - RNA, 20 nt, Human herpesvirus 6
uaccgcgguuuggggucuuu

SEQ ID NO: 3988633 - RNA, 19 nt, Human herpesvirus 6
uaccgugucuuuaaugggu

SEQ ID NO: 3988634 - RNA, 16 nt, Human herpesvirus 6
uaccuauuuacaaugu

SEQ ID NO: 3988635 - RNA, 16 nt, Human herpesvirus 6
uacgaaauaaucgauu

SEQ ID NO: 3988636 - RNA, 16 nt, Human herpesvirus 6
uacgaacagaaauuuc

SEQ ID NO: 3988637 - RNA, 17 nt, Human herpesvirus 6
uacgacgaaaacuuuua

SEQ ID NO: 3988638 - RNA, 16 nt, Human herpesvirus 6
uacgccaguguggaua

SEQ ID NO: 3988639 - RNA, 23 nt, Human herpesvirus 6
uacggggaagaucuaugggagug

SEQ ID NO: 3988640 - RNA, 18 nt, Human herpesvirus 6
uacguuuuguguuaaaau

SEQ ID NO: 3988641 - RNA, 13 nt, Human herpesvirus 6
uacuaauguggau

SEQ ID NO: 3988642 - RNA, 13 nt, Human herpesvirus 6
uacuacacaaacg

SEQ ID NO: 3988643 - RNA, 11 nt, Human herpesvirus 6
uacuacaguga

SEQ ID NO: 3988644 - RNA, 16 nt, Human herpesvirus 6
uacuaguuuucacacg

SEQ ID NO: 3988645 - RNA, 23 nt, Human herpesvirus 6
uacuauauaugcaagccaugaca

SEQ ID NO: 3988646 - RNA, 14 nt, Human herpesvirus 6
uacuuucaugauuc

SEQ ID NO: 3988647 - RNA, 16 nt, Human herpesvirus 6
uagaaauuacaaggua

SEQ ID NO: 3988648 - RNA, 23 nt, Human herpesvirus 6
uagacacgcuaaaaacagacgaa

SEQ ID NO: 3988649 - RNA, 16 nt, Human herpesvirus 6
uagauggaaaauugca

SEQ ID NO: 3988650 - RNA, 14 nt, Human herpesvirus 6
uagcauacgacaaa

SEQ ID NO: 3988651 - RNA, 23 nt, Human herpesvirus 6
uagcgaaugaauuuacuguuuua

SEQ ID NO: 3988652 - RNA, 20 nt, Human herpesvirus 6
uagcguucauucccaguguc

SEQ ID NO: 3988653 - RNA, 15 nt, Human herpesvirus 6
uaggaaguaaauaca

SEQ ID NO: 3988654 - RNA, 19 nt, Human herpesvirus 6
uaggauuacacuuucuugu

SEQ ID NO: 3988655 - RNA, 15 nt, Human herpesvirus 6
uauaaaaaacuaaaa

SEQ ID NO: 3988656 - RNA, 20 nt, Human herpesvirus 6
uauaucaaacuuuuuuugaa

SEQ ID NO: 3988657 - RNA, 20 nt, Human herpesvirus 6
uauauucguggauaacgucg

SEQ ID NO: 3988658 - RNA, 19 nt, Human herpesvirus 6
uauauuuuuaccgaaccau

SEQ ID NO: 3988659 - RNA, 18 nt, Human herpesvirus 6
uaucaaacuuuuuuugaa

SEQ ID NO: 3988660 - RNA, 13 nt, Human herpesvirus 6
uaucaccuuacaa

SEQ ID NO: 3988661 - RNA, 15 nt, Human herpesvirus 6
uaucauagacaaacc

SEQ ID NO: 3988662 - RNA, 18 nt, Human herpesvirus 6
uaucccuaauaaauguca

SEQ ID NO: 3988663 - RNA, 21 nt, Human herpesvirus 6
uaucgccccugucugugauuu

SEQ ID NO: 3988664 - RNA, 15 nt, Human herpesvirus 6
uaugaaugagauguu

SEQ ID NO: 3988665 - RNA, 21 nt, Human herpesvirus 6
uaugacgggcagguuaucgga

SEQ ID NO: 3988666 - RNA, 18 nt, Human herpesvirus 6
uaugacuguguguugaau

SEQ ID NO: 3988667 - RNA, 22 nt, Human herpesvirus 6
uauggaaacacuuucuucgccu

SEQ ID NO: 3988668 - RNA, 18 nt, Human herpesvirus 6
uauuaacgcagcaacaau

SEQ ID NO: 3988669 - RNA, 20 nt, Human herpesvirus 6
uauuguguaacucuuuuugu

SEQ ID NO: 3988670 - RNA, 20 nt, Human herpesvirus 6
uauuguguguacaaugacug

SEQ ID NO: 3988671 - RNA, 22 nt, Human herpesvirus 6
uauuuuaagcgugacuuauaua

SEQ ID NO: 3988672 - RNA, 15 nt, Human herpesvirus 6
uauuuuuuauuucca

SEQ ID NO: 3988673 - RNA, 12 nt, Human herpesvirus 6
ucaaagaaaguu

SEQ ID NO: 3988674 - RNA, 14 nt, Human herpesvirus 6
ucaaauauggcaga

SEQ ID NO: 3988675 - RNA, 12 nt, Human herpesvirus 6
ucaaauccucua

SEQ ID NO: 3988676 - RNA, 19 nt, Human herpesvirus 6
ucaagacuacucuggcuga

SEQ ID NO: 3988677 - RNA, 14 nt, Human herpesvirus 6
ucaagcacaaaacc

SEQ ID NO: 3988678 - RNA, 19 nt, Human herpesvirus 6
ucaaugcggguacuauaga

SEQ ID NO: 3988679 - RNA, 14 nt, Human herpesvirus 6
ucaauugucacuuu

SEQ ID NO: 3988680 - RNA, 21 nt, Human herpesvirus 6
ucacaaaguuuaaguuuucac

SEQ ID NO: 3988681 - RNA, 16 nt, Human herpesvirus 6
ucacaaggaaugugca

SEQ ID NO: 3988682 - RNA, 17 nt, Human herpesvirus 6
ucacaauauuucacaua

SEQ ID NO: 3988683 - RNA, 18 nt, Human herpesvirus 6
ucaccgauaaaaacucac

SEQ ID NO: 3988684 - RNA, 17 nt, Human herpesvirus 6
ucacgaucuacacaccg

SEQ ID NO: 3988685 - RNA, 15 nt, Human herpesvirus 6
ucacucagauuucag

SEQ ID NO: 3988686 - RNA, 18 nt, Human herpesvirus 6
ucacugucgaaauucacc

SEQ ID NO: 3988687 - RNA, 20 nt, Human herpesvirus 6
ucacugucgaaauucaccag

SEQ ID NO: 3988688 - RNA, 16 nt, Human herpesvirus 6
ucagguuuagaugcuu

SEQ ID NO: 3988689 - RNA, 23 nt, Human herpesvirus 6
ucagucaauuuuacuaaaaaagc

SEQ ID NO: 3988690 - RNA, 22 nt, Human herpesvirus 6
ucauaaagauaaagaucagugg

SEQ ID NO: 3988691 - RNA, 22 nt, Human herpesvirus 6
ucauaaccucaucgcgacuaaa

SEQ ID NO: 3988692 - RNA, 13 nt, Human herpesvirus 6
ucaugucggccuc

SEQ ID NO: 3988693 - RNA, 19 nt, Human herpesvirus 6
ucauuuuuuugauuuacaa

SEQ ID NO: 3988694 - RNA, 20 nt, Human herpesvirus 6
uccaauccaauauaacuuua

SEQ ID NO: 3988695 - RNA, 22 nt, Human herpesvirus 6
uccacucggauucaaagaaagu

SEQ ID NO: 3988696 - RNA, 18 nt, Human herpesvirus 6
uccaugcaacacaacaaa

SEQ ID NO: 3988697 - RNA, 14 nt, Human herpesvirus 6
uccccacaauaaga

SEQ ID NO: 3988698 - RNA, 17 nt, Human herpesvirus 6
ugugaaaguauuuuacu

SEQ ID NO: 3988699 - RNA, 17 nt, Human herpesvirus 6
ugugacaaaucuguaag

SEQ ID NO: 3988700 - RNA, 12 nt, Human herpesvirus 6
ugugauaugcaa

SEQ ID NO: 3988701 - RNA, 19 nt, Human herpesvirus 6
ugugccguuuaugcgaauc

SEQ ID NO: 3988702 - RNA, 15 nt, Human herpesvirus 6
ugugcuaucugauuu

SEQ ID NO: 3988703 - RNA, 13 nt, Human herpesvirus 6
uguggaaaaacug

SEQ ID NO: 3988704 - RNA, 15 nt, Human herpesvirus 6
uguguauuauguaaa

SEQ ID NO: 3988705 - RNA, 19 nt, Human herpesvirus 6
uguuaacauaaaacaacaa

SEQ ID NO: 3988706 - RNA, 17 nt, Human herpesvirus 6
uguuaaccaguagacaa

SEQ ID NO: 3988707 - RNA, 16 nt, Human herpesvirus 6
uguuagaucacguuca

SEQ ID NO: 3988708 - RNA, 18 nt, Human herpesvirus 6
uguuauaacacaacaagu

SEQ ID NO: 3988709 - RNA, 13 nt, Human herpesvirus 6
uguuguguuugag

SEQ ID NO: 3988710 - RNA, 20 nt, Human herpesvirus 6
uguuucuaacagaggguuua

SEQ ID NO: 3988711 - RNA, 18 nt, Human herpesvirus 6
uguuuuauguauuaauuu

SEQ ID NO: 3988712 - RNA, 21 nt, Human herpesvirus 6
uguuuuauguuaacaucguga

SEQ ID NO: 3988713 - RNA, 18 nt, Human herpesvirus 6
uuaaaacaauggaaaagg

SEQ ID NO: 3988714 - RNA, 16 nt, Human herpesvirus 6
uuaaagaaucugcaga

SEQ ID NO: 3988715 - RNA, 23 nt, Human herpesvirus 6
uuaaagaguuuucucacacccau

SEQ ID NO: 3988716 - RNA, 23 nt, Human herpesvirus 6
uuaaagcagcuagagaaauugga

SEQ ID NO: 3988717 - RNA, 11 nt, Human herpesvirus 6
uuaaggcauug

SEQ ID NO: 3988718 - RNA, 13 nt, Human herpesvirus 6
uuaauccacugca

SEQ ID NO: 3988719 - RNA, 20 nt, Human herpesvirus 6
uuaauuccaagacauguaca

SEQ ID NO: 3988720 - RNA, 23 nt, Human herpesvirus 6
uuaauuuaucgcagcaucauguu

SEQ ID NO: 3988721 - RNA, 15 nt, Human herpesvirus 6
uuacaagguacacaa

SEQ ID NO: 3988722 - RNA, 17 nt, Human herpesvirus 6
uuacaagguacacaaua

SEQ ID NO: 3988723 - RNA, 23 nt, Human herpesvirus 6
uuacaauguucaauuacucaaca

SEQ ID NO: 3988724 - RNA, 17 nt, Human herpesvirus 6
uuacugacgguuagguu

SEQ ID NO: 3988725 - RNA, 18 nt, Human herpesvirus 6
uuacuguuuuaaccgaua

SEQ ID NO: 3988726 - RNA, 19 nt, Human herpesvirus 6
uuagccuuuauucuguuuu

SEQ ID NO: 3988727 - RNA, 21 nt, Human herpesvirus 6
uuaguaugggugagugcauua

SEQ ID NO: 3988728 - RNA, 11 nt, Human herpesvirus 6
uuagucaguuu

SEQ ID NO: 3988729 - RNA, 21 nt, Human herpesvirus 6
uuagucuauccaugaaacucu

SEQ ID NO: 3988730 - RNA, 22 nt, Human herpesvirus 6
uuauaacaagcacugaauuaga

SEQ ID NO: 3988731 - RNA, 17 nt, Human herpesvirus 6
uuauacgaaaauaaaaa

SEQ ID NO: 3988732 - RNA, 13 nt, Human herpesvirus 6
uuaugauuucgga

SEQ ID NO: 3988733 - RNA, 17 nt, Human herpesvirus 6
uuaugcgacugcaagag

SEQ ID NO: 3988734 - RNA, 13 nt, Human herpesvirus 6
uuauuaaauguua

SEQ ID NO: 3988735 - RNA, 21 nt, Human herpesvirus 6
uuauucggaguuuucaagaug

SEQ ID NO: 3988736 - RNA, 15 nt, Human herpesvirus 6
uucaacgucuucaaa

SEQ ID NO: 3988737 - RNA, 15 nt, Human herpesvirus 6
uucaaugcguuucuu

SEQ ID NO: 3988738 - RNA, 16 nt, Human herpesvirus 6
uucaaugcguuucuuc

SEQ ID NO: 3988739 - RNA, 23 nt, Human herpesvirus 6
uucacaguccccacccucuuuuu

SEQ ID NO: 3988740 - RNA, 12 nt, Human herpesvirus 6
uucagaggugcu

SEQ ID NO: 3988741 - RNA, 12 nt, Human herpesvirus 6
uucagagugaau

SEQ ID NO: 3988742 - RNA, 15 nt, Human herpesvirus 6
uucagagugaauucc

SEQ ID NO: 3988743 - RNA, 19 nt, Human herpesvirus 6
uucagccugagaacgggca

SEQ ID NO: 3988744 - RNA, 16 nt, Human herpesvirus 6
uucaggaugaagaaaa

SEQ ID NO: 3988745 - RNA, 22 nt, Human herpesvirus 6
uucaggcggaauguuuguuuuu

SEQ ID NO: 3988746 - RNA, 17 nt, Human herpesvirus 6
uucauaugaaaagcugg

SEQ ID NO: 3988747 - RNA, 19 nt, Human herpesvirus 6
uucaugcgcuucuguuuug

SEQ ID NO: 3988748 - RNA, 13 nt, Human herpesvirus 6
uucauuucaucuu

SEQ ID NO: 3988749 - RNA, 24 nt, Human herpesvirus 6
uuccacgaguggaucgaaugcuag

SEQ ID NO: 3988750 - RNA, 23 nt, Human herpesvirus 6
uuccaguuaauaagauguugcaa

SEQ ID NO: 3988751 - RNA, 20 nt, Human herpesvirus 6
uucgacaacggaccaggaca

SEQ ID NO: 3988752 - RNA, 12 nt, Human herpesvirus 6
uucgacagacga

SEQ ID NO: 3988753 - RNA, 18 nt, Human herpesvirus 6
uucggagugcguccguuu

SEQ ID NO: 3988754 - RNA, 23 nt, Human herpesvirus 6
uucggcagaugcgcuauuguacc

SEQ ID NO: 3988755 - RNA, 14 nt, Human herpesvirus 6
uucggccgacagca

SEQ ID NO: 3988756 - RNA, 22 nt, Human herpesvirus 6
uucuaccguagaccguuucuua

SEQ ID NO: 3988757 - RNA, 19 nt, Human herpesvirus 6
uucuuacaauguuuuugac

SEQ ID NO: 3988758 - RNA, 16 nt, Human herpesvirus 6
uucuuuauuaaauguu

SEQ ID NO: 3988759 - RNA, 20 nt, Human herpesvirus 6
uucuuuggagaugauuccaa

SEQ ID NO: 3988760 - RNA, 15 nt, Human herpesvirus 6
uucuuuuuaacuagg

SEQ ID NO: 3988761 - RNA, 17 nt, Human herpesvirus 6
uugaaaaaccuuauaca

SEQ ID NO: 3988762 - RNA, 22 nt, Human herpesvirus 6
uugaaaagguguuguguuugag

SEQ ID NO: 3988763 - RNA, 20 nt, Human herpesvirus 6
uugacauaggaauucuuauu

SEQ ID NO: 3988764 - RNA, 20 nt, Human herpesvirus 6
uugaucaaauaucugaaaca

SEQ ID NO: 3988765 - RNA, 19 nt, Human herpesvirus 6
uugcagaucuaauucacau

SEQ ID NO: 3988766 - RNA, 20 nt, Human herpesvirus 6
uugcauauuauuaacaauga

SEQ ID NO: 3988767 - RNA, 24 nt, Human herpesvirus 6
uugcauuuuggguugaguaugcuu

SEQ ID NO: 3988768 - RNA, 18 nt, Human herpesvirus 6
uugccgggaugagcuuua

SEQ ID NO: 3988769 - RNA, 15 nt, Human herpesvirus 6
uugccgucacacucu

SEQ ID NO: 3988770 - RNA, 14 nt, Human herpesvirus 6
uugccuuguaaauc

SEQ ID NO: 3988771 - RNA, 13 nt, Human herpesvirus 6
uuggaauauauaa

SEQ ID NO: 3988772 - RNA, 13 nt, Human herpesvirus 6
uugguuguguaua

SEQ ID NO: 3988773 - RNA, 16 nt, Human herpesvirus 6
uuguacaaacuuuuug

SEQ ID NO: 3988774 - RNA, 22 nt, Human herpesvirus 6
uugucauuacgaagcuucgcaa

SEQ ID NO: 3988775 - RNA, 16 nt, Human herpesvirus 6
uuguccaacacuuuua

SEQ ID NO: 3988776 - RNA, 22 nt, Human herpesvirus 6
uugucugauauggcaaauuuua

SEQ ID NO: 3988777 - RNA, 16 nt, Human herpesvirus 6
uugugauucugcauuu

SEQ ID NO: 3988778 - RNA, 16 nt, Human herpesvirus 6
uugugcgucagcuuug

SEQ ID NO: 3988779 - RNA, 19 nt, Human herpesvirus 6
uuguguuaaucggaauguc

SEQ ID NO: 3988780 - RNA, 16 nt, Human herpesvirus 6
uuguguuguuguauau

SEQ ID NO: 3988781 - RNA, 15 nt, Human herpesvirus 6
uuguguuucugucuu

SEQ ID NO: 3988782 - RNA, 20 nt, Human herpesvirus 6
uuguugcuauagauuagaaa

SEQ ID NO: 3988783 - RNA, 23 nt, Human herpesvirus 6
uuguugucucuuuauaaacuuaa

SEQ ID NO: 3988784 - RNA, 23 nt, Human herpesvirus 6
uuuaaaauggauuagugaaaaga

SEQ ID NO: 3988785 - RNA, 18 nt, Human herpesvirus 6
uuuaaaugaagauaaaag

SEQ ID NO: 3988786 - RNA, 15 nt, Human herpesvirus 6
uuuaauaaggaaaaa

SEQ ID NO: 3988787 - RNA, 16 nt, Human herpesvirus 6
uuuaauaguuugccau

SEQ ID NO: 3988788 - RNA, 17 nt, Human herpesvirus 6
uuuaccuuuggaaaaua

SEQ ID NO: 3988789 - RNA, 17 nt, Human herpesvirus 6
uuuagaaacauuugcug

SEQ ID NO: 3988790 - RNA, 22 nt, Human herpesvirus 6
uuuagccuauuaagcagccgcg

SEQ ID NO: 3988791 - RNA, 12 nt, Human herpesvirus 6
uuuauaaugagu

SEQ ID NO: 3988792 - RNA, 22 nt, Human herpesvirus 6
uuuaucccccguacaagcuuaa

SEQ ID NO: 3988793 - RNA, 19 nt, Human herpesvirus 6
uuuauuuucguauaaaaug

SEQ ID NO: 3988794 - RNA, 22 nt, Human herpesvirus 6
uuucaguauuaacuaguugcuu

SEQ ID NO: 3988795 - RNA, 23 nt, Human herpesvirus 6
uuuccuacccaggcgaacgagaa

SEQ ID NO: 3988796 - RNA, 15 nt, Human herpesvirus 6
uuuccugcacaggcg

SEQ ID NO: 3988797 - RNA, 16 nt, Human herpesvirus 6
uuuccugcacaggcga

SEQ ID NO: 3988798 - RNA, 23 nt, Human herpesvirus 6
uuuccugcccaggcaaacgagaa

SEQ ID NO: 3988799 - RNA, 13 nt, Human herpesvirus 6
uuucgcaauuugg

SEQ ID NO: 3988800 - RNA, 18 nt, Human herpesvirus 6
uuucguuuacgaauucaa

SEQ ID NO: 3988801 - RNA, 21 nt, Human herpesvirus 6
uuucuaacagaggguuuagaa

SEQ ID NO: 3988802 - RNA, 21 nt, Human herpesvirus 6
uuucuaugaguauauaaaaaa

SEQ ID NO: 3988803 - RNA, 16 nt, Human herpesvirus 6
uuucuuaaggugcuuu

SEQ ID NO: 3988804 - RNA, 13 nt, Human herpesvirus 6
uuugaaacggcgc

SEQ ID NO: 3988805 - RNA, 15 nt, Human herpesvirus 6
uuugauuuuguacag

SEQ ID NO: 3988806 - RNA, 20 nt, Human herpesvirus 6
uuuguguuaaaauaaaguuc

SEQ ID NO: 3988807 - RNA, 13 nt, Human herpesvirus 6
uuuguugguuaaa

SEQ ID NO: 3988808 - RNA, 19 nt, Human herpesvirus 6
uuuuggaauauauaaauag

SEQ ID NO: 3988809 - RNA, 17 nt, Human herpesvirus 6
uuuugggaaaucuggca

SEQ ID NO: 3988810 - RNA, 13 nt, Human herpesvirus 6
uuuuucauaaaug

SEQ ID NO: 3988811 - RNA, 17 nt, Human herpesvirus 6
gcgcgcauguugcaguu

SEQ ID NO: 3988812 - RNA, 21 nt, Human herpesvirus 6
gcggaauguuuguuuuuguca

SEQ ID NO: 3988813 - RNA, 17 nt, Human herpesvirus 6
gcggacgguuuauuuuu

SEQ ID NO: 3988814 - RNA, 13 nt, Human herpesvirus 6
gcggauggagccc

SEQ ID NO: 3988815 - RNA, 17 nt, Human herpesvirus 6
gcggcaaccgcaguucc

SEQ ID NO: 3988816 - RNA, 23 nt, Human herpesvirus 6
gcgucgcccccccgcagcuccuu

SEQ ID NO: 3988817 - RNA, 22 nt, Human herpesvirus 6
gcuaaaucaaaugauuuuacaa

SEQ ID NO: 3988818 - RNA, 13 nt, Human herpesvirus 6
gcuaagcucguuc

SEQ ID NO: 3988819 - RNA, 18 nt, Human herpesvirus 6
gcuacgacacgcuggagc

SEQ ID NO: 3988820 - RNA, 17 nt, Human herpesvirus 6
gcuauuuuuuuuaaugu

SEQ ID NO: 3988821 - RNA, 21 nt, Human herpesvirus 6
gcuccguguuacugauggcag

SEQ ID NO: 3988822 - RNA, 17 nt, Human herpesvirus 6
gcucgcucugaaauuug

SEQ ID NO: 3988823 - RNA, 18 nt, Human herpesvirus 6
gcugaugcgauguggagc

SEQ ID NO: 3988824 - RNA, 18 nt, Human herpesvirus 6
gcugcagucucgggagag

SEQ ID NO: 3988825 - RNA, 12 nt, Human herpesvirus 6
gcuggaaagaga

SEQ ID NO: 3988826 - RNA, 12 nt, Human herpesvirus 6
gcuggagcagcu

SEQ ID NO: 3988827 - RNA, 23 nt, Human herpesvirus 6
gcuuucaaaaccgucaaccgcca

SEQ ID NO: 3988828 - RNA, 14 nt, Human herpesvirus 6
ggaaaccaccggcu

SEQ ID NO: 3988829 - RNA, 19 nt, Human herpesvirus 6
ggaacaaaacuuucauccu

SEQ ID NO: 3988830 - RNA, 19 nt, Human herpesvirus 6
ggaagaagauacgagaaca

SEQ ID NO: 3988831 - RNA, 21 nt, Human herpesvirus 6
ggaauaacagaugagggggag

SEQ ID NO: 3988832 - RNA, 17 nt, Human herpesvirus 6
ggaaugcugagcugcag

SEQ ID NO: 3988833 - RNA, 15 nt, Human herpesvirus 6
ggaauuuugagauuu

SEQ ID NO: 3988834 - RNA, 20 nt, Human herpesvirus 6
ggacacgcgcaguggacggc

SEQ ID NO: 3988835 - RNA, 15 nt, Human herpesvirus 6
ggacgacacgugggg

SEQ ID NO: 3988836 - RNA, 18 nt, Human herpesvirus 6
ggagaauaggaaaagaua

SEQ ID NO: 3988837 - RNA, 22 nt, Human herpesvirus 6
ggagaugauuccaagugguggu

SEQ ID NO: 3988838 - RNA, 20 nt, Human herpesvirus 6
ggagcccgcucggucucgca

SEQ ID NO: 3988839 - RNA, 21 nt, Human herpesvirus 6
ggagcggaggggcgcgagaca

SEQ ID NO: 3988840 - RNA, 23 nt, Human herpesvirus 6
ggagggaugucggucagacagug

SEQ ID NO: 3988841 - RNA, 14 nt, Human herpesvirus 6
ggaggugagacauc

SEQ ID NO: 3988842 - RNA, 16 nt, Human herpesvirus 6
ggagucggcgugugug

SEQ ID NO: 3988843 - RNA, 12 nt, Human herpesvirus 6
ggaguugcagug

SEQ ID NO: 3988844 - RNA, 17 nt, Human herpesvirus 6
ggauaauuuauggaaau

SEQ ID NO: 3988845 - RNA, 13 nt, Human herpesvirus 6
ggaucaacagaug

SEQ ID NO: 3988846 - RNA, 18 nt, Human herpesvirus 6
ggaugccugcauaugcag

SEQ ID NO: 3988847 - RNA, 18 nt, Human herpesvirus 6
ggauucccuucagacauc

SEQ ID NO: 3988848 - RNA, 18 nt, Human herpesvirus 6
ggcaaccgcaguuccugu

SEQ ID NO: 3988849 - RNA, 14 nt, Human herpesvirus 6
ggcaacgcuccucc

SEQ ID NO: 3988850 - RNA, 22 nt, Human herpesvirus 6
ggccacguccucgugcucugcc

SEQ ID NO: 3988851 - RNA, 13 nt, Human herpesvirus 6
ggccccagagacg

SEQ ID NO: 3988852 - RNA, 20 nt, Human herpesvirus 6
ggccuggcacggugccaaag

SEQ ID NO: 3988853 - RNA, 17 nt, Human herpesvirus 6
ggcgacaaccgccgccg

SEQ ID NO: 3988854 - RNA, 16 nt, Human herpesvirus 6
ggcggacaccgagggc

SEQ ID NO: 3988855 - RNA, 22 nt, Human herpesvirus 6
ggcggcgaguaacggaaaacga

SEQ ID NO: 3988856 - RNA, 20 nt, Human herpesvirus 6
ggcgucaucgguggcagagg

SEQ ID NO: 3988857 - RNA, 20 nt, Human herpesvirus 6
gggaagaaaauccagcaaug

SEQ ID NO: 3988858 - RNA, 16 nt, Human herpesvirus 6
gggaccuucaggaaca

SEQ ID NO: 3988859 - RNA, 14 nt, Human herpesvirus 6
gggacgggcggagc

SEQ ID NO: 3988860 - RNA, 21 nt, Human herpesvirus 6
gggauuaauaaaggauguuug

SEQ ID NO: 3988861 - RNA, 19 nt, Human herpesvirus 6
gggcaaccgcaguuccugu

SEQ ID NO: 3988862 - RNA, 13 nt, Human herpesvirus 6
gggcacaaaacag

SEQ ID NO: 3988863 - RNA, 17 nt, Human herpesvirus 6
gggccuccgccacugcg

SEQ ID NO: 3988864 - RNA, 20 nt, Human herpesvirus 6
gggcgcgagacagcggacag

SEQ ID NO: 3988865 - RNA, 20 nt, Human herpesvirus 6
gggcuccgcgccguuucaaa

SEQ ID NO: 3988866 - RNA, 16 nt, Human herpesvirus 6
ggggagggacccacag

SEQ ID NO: 3988867 - RNA, 22 nt, Human herpesvirus 6
ggggaucgggcccggggacgga

SEQ ID NO: 3988868 - RNA, 21 nt, Human herpesvirus 6
gggggaucgacgggcaggaau

SEQ ID NO: 3988869 - RNA, 15 nt, Human herpesvirus 6
gggucuuuccugcac

SEQ ID NO: 3988870 - RNA, 20 nt, Human herpesvirus 6
ggguuggaccgaggggacag

SEQ ID NO: 3988871 - RNA, 23 nt, Human herpesvirus 6
ggguuggaccgaggggacagggg

SEQ ID NO: 3988872 - RNA, 20 nt, Human herpesvirus 6
ggucacguauaccauuccca

SEQ ID NO: 3988873 - RNA, 17 nt, Human herpesvirus 6
ggucuuuccugcacagg

SEQ ID NO: 3988874 - RNA, 15 nt, Human herpesvirus 6
ggucuuuccugccca

SEQ ID NO: 3988875 - RNA, 12 nt, Human herpesvirus 6
ggugaaaugaau

SEQ ID NO: 3988876 - RNA, 15 nt, Human herpesvirus 6
gguuagagcugggga

SEQ ID NO: 3988877 - RNA, 18 nt, Human herpesvirus 6
gguuugggggucuuuccu

SEQ ID NO: 3988878 - RNA, 17 nt, Human herpesvirus 6
gguuuggggucuuuccu

SEQ ID NO: 3988879 - RNA, 15 nt, Human herpesvirus 6
guaaaaaaacauucu

SEQ ID NO: 3988880 - RNA, 17 nt, Human herpesvirus 6
guaaacacgaaauugcu

SEQ ID NO: 3988881 - RNA, 20 nt, Human herpesvirus 6
guaaacuggucugcuugcaa

SEQ ID NO: 3988882 - RNA, 12 nt, Human herpesvirus 6
guaaacuucugc

SEQ ID NO: 3988883 - RNA, 20 nt, Human herpesvirus 6
guaauuucagucaauuuuac

SEQ ID NO: 3988884 - RNA, 16 nt, Human herpesvirus 6
guauaaauuuaacuaa

SEQ ID NO: 3988885 - RNA, 17 nt, Human herpesvirus 6
guauaaugcaugauggu

SEQ ID NO: 3988886 - RNA, 16 nt, Human herpesvirus 6
guauucagaguacuuu

SEQ ID NO: 3988887 - RNA, 11 nt, Human herpesvirus 6
guauuguaaaa

SEQ ID NO: 3988888 - RNA, 13 nt, Human herpesvirus 6
gucagguuugaaa

SEQ ID NO: 3988889 - RNA, 13 nt, Human herpesvirus 6
guccacacgccag

SEQ ID NO: 3988890 - RNA, 18 nt, Human herpesvirus 6
guccgacacgcccccacc

SEQ ID NO: 3988891 - RNA, 13 nt, Human herpesvirus 6
gucgaaauucacc

SEQ ID NO: 3988892 - RNA, 19 nt, Human herpesvirus 6
gucggacgacgggcggggc

SEQ ID NO: 3988893 - RNA, 22 nt, Human herpesvirus 6
gucggacgacgggcggggcgga

SEQ ID NO: 3988894 - RNA, 14 nt, Human herpesvirus 6
gucggcgugucugu

SEQ ID NO: 3988895 - RNA, 22 nt, Human herpesvirus 6
gucuauaacgagucgaagagag

SEQ ID NO: 3988896 - RNA, 20 nt, Human herpesvirus 6
gucuccgccuuuucuuauau

SEQ ID NO: 3988897 - RNA, 21 nt, Human herpesvirus 6
gucucuucuugcgaccuggcu

SEQ ID NO: 3988898 - RNA, 17 nt, Human herpesvirus 6
gucuucaagcaaagaca

SEQ ID NO: 3988899 - RNA, 15 nt, Human herpesvirus 6
gucuuuccugcacag

SEQ ID NO: 3988900 - RNA, 18 nt, Human herpesvirus 6
gucuuuccugcacaggcg

SEQ ID NO: 3988901 - RNA, 11 nt, Human herpesvirus 6
gugaagaucac

SEQ ID NO: 3988902 - RNA, 14 nt, Human herpesvirus 6
gugacaucuuuuau

SEQ ID NO: 3988903 - RNA, 21 nt, Human herpesvirus 6
gugacuacguuuuguguuaaa

SEQ ID NO: 3988904 - RNA, 16 nt, Human herpesvirus 6
gugccaccgucuggga

SEQ ID NO: 3988905 - RNA, 12 nt, Human herpesvirus 6
gugccuuuguau

SEQ ID NO: 3988906 - RNA, 12 nt, Human herpesvirus 6
guggacaaugau

SEQ ID NO: 3988907 - RNA, 19 nt, Human herpesvirus 6
guggauuaugaguaugaaa

SEQ ID NO: 3988908 - RNA, 14 nt, Human herpesvirus 6
gugucaaguuucac

SEQ ID NO: 3988909 - RNA, 16 nt, Human herpesvirus 6
guguuuuugaugugcc

SEQ ID NO: 3988910 - RNA, 15 nt, Human herpesvirus 6
guuaaaacaguaaau

SEQ ID NO: 3988911 - RNA, 16 nt, Human herpesvirus 6
guuaaauaacucagau

SEQ ID NO: 3988912 - RNA, 13 nt, Human herpesvirus 6
guuaaugcugcug

SEQ ID NO: 3988913 - RNA, 15 nt, Human herpesvirus 6
guuaaugcugcugcu

SEQ ID NO: 3988914 - RNA, 11 nt, Human herpesvirus 6
guuaauguuua

SEQ ID NO: 3988915 - RNA, 12 nt, Human herpesvirus 6
guuaauucucau

SEQ ID NO: 3988916 - RNA, 14 nt, Human herpesvirus 6
guuagcuuugcgau

SEQ ID NO: 3988917 - RNA, 10 nt, Human herpesvirus 6
guuaguaaau

SEQ ID NO: 3988918 - RNA, 21 nt, Human herpesvirus 6
guuauaacacaacaaguaaau

SEQ ID NO: 3988919 - RNA, 13 nt, Human herpesvirus 6
guuaucacgaugu

SEQ ID NO: 3988920 - RNA, 13 nt, Human herpesvirus 6
guucaguaacauu

SEQ ID NO: 3988921 - RNA, 14 nt, Human herpesvirus 6
guuccacgcgcgug

SEQ ID NO: 3988922 - RNA, 23 nt, Human herpesvirus 6
guuccccaugucuugccucuccg

SEQ ID NO: 3988923 - RNA, 15 nt, Human herpesvirus 6
guuuaacgcucauga

SEQ ID NO: 3988924 - RNA, 13 nt, Human herpesvirus 6
guuuagaaaugca

SEQ ID NO: 3988925 - RNA, 15 nt, Human herpesvirus 6
guuuauugucaaaua

SEQ ID NO: 3988926 - RNA, 22 nt, Human herpesvirus 6
guuuuagagaaaagugcaaggg

SEQ ID NO: 3988927 - RNA, 17 nt, Human herpesvirus 6
uccccgggugcuccgcc

SEQ ID NO: 3988928 - RNA, 15 nt, Human herpesvirus 6
uccggaguugcagug

SEQ ID NO: 3988929 - RNA, 14 nt, Human herpesvirus 6
uccguaucacacuu

SEQ ID NO: 3988930 - RNA, 14 nt, Human herpesvirus 6
uccguuuccuccuc

SEQ ID NO: 3988931 - RNA, 13 nt, Human herpesvirus 6
uccuagcauuucc

SEQ ID NO: 3988932 - RNA, 16 nt, Human herpesvirus 6
uccuauugguuugcau

SEQ ID NO: 3988933 - RNA, 22 nt, Human herpesvirus 6
uccugagaguaaauauuucuaa

SEQ ID NO: 3988934 - RNA, 22 nt, Human herpesvirus 6
ucgaaauucaccagauucacug

SEQ ID NO: 3988935 - RNA, 18 nt, Human herpesvirus 6
ucgaauaauuauccucuc

SEQ ID NO: 3988936 - RNA, 22 nt, Human herpesvirus 6
ucgaccuaaaaaaguguaacau

SEQ ID NO: 3988937 - RNA, 18 nt, Human herpesvirus 6
ucgacgaaauaauugaua

SEQ ID NO: 3988938 - RNA, 20 nt, Human herpesvirus 6
ucgauuugcugguaaauuuu

SEQ ID NO: 3988939 - RNA, 15 nt, Human herpesvirus 6
ucgcacacacaagaa

SEQ ID NO: 3988940 - RNA, 20 nt, Human herpesvirus 6
ucgcacacacaagaacagag

SEQ ID NO: 3988941 - RNA, 21 nt, Human herpesvirus 6
ucgcccugcuccguuuccucc

SEQ ID NO: 3988942 - RNA, 15 nt, Human herpesvirus 6
ucgcuggacuuagug

SEQ ID NO: 3988943 - RNA, 22 nt, Human herpesvirus 6
ucggaaaacuaaaagucagugg

SEQ ID NO: 3988944 - RNA, 22 nt, Human herpesvirus 6
ucggaaaauuaaaagucagugg

SEQ ID NO: 3988945 - RNA, 18 nt, Human herpesvirus 6
ucggacagcaaggaacaa

SEQ ID NO: 3988946 - RNA, 15 nt, Human herpesvirus 6
ucgggcuuugugaaa

SEQ ID NO: 3988947 - RNA, 17 nt, Human herpesvirus 6
ucggucaccuacauucg

SEQ ID NO: 3988948 - RNA, 17 nt, Human herpesvirus 6
ucgugauaacaaugcau

SEQ ID NO: 3988949 - RNA, 20 nt, Human herpesvirus 6
ucgugccaguucacacggac

SEQ ID NO: 3988950 - RNA, 20 nt, Human herpesvirus 6
ucguuauauuuuuuauuuuu

SEQ ID NO: 3988951 - RNA, 16 nt, Human herpesvirus 6
ucuaaaacaagacaga

SEQ ID NO: 3988952 - RNA, 18 nt, Human herpesvirus 6
ucuaaaaucucguaacgc

SEQ ID NO: 3988953 - RNA, 15 nt, Human herpesvirus 6
ucuaaccauuuugaa

SEQ ID NO: 3988954 - RNA, 14 nt, Human herpesvirus 6
ucuaaugguugaaa

SEQ ID NO: 3988955 - RNA, 22 nt, Human herpesvirus 6
ucuagcuauagcuaauguaaua

SEQ ID NO: 3988956 - RNA, 13 nt, Human herpesvirus 6
ucuauauccuguc

SEQ ID NO: 3988957 - RNA, 22 nt, Human herpesvirus 6
ucuauccaugaaacucuuugaa

SEQ ID NO: 3988958 - RNA, 13 nt, Human herpesvirus 6
ucuauggaucuga

SEQ ID NO: 3988959 - RNA, 16 nt, Human herpesvirus 6
ucuccuauaaauacug

SEQ ID NO: 3988960 - RNA, 22 nt, Human herpesvirus 6
ucuccucguggucauugguguu

SEQ ID NO: 3988961 - RNA, 22 nt, Human herpesvirus 6
ucucggaaaauuaaaagucagu

SEQ ID NO: 3988962 - RNA, 17 nt, Human herpesvirus 6
ucucgugguacaauaaa

SEQ ID NO: 3988963 - RNA, 11 nt, Human herpesvirus 6
ucucugcaaaa

SEQ ID NO: 3988964 - RNA, 21 nt, Human herpesvirus 6
ucucugcgccaaccuucuaau

SEQ ID NO: 3988965 - RNA, 15 nt, Human herpesvirus 6
ucucuucgaaauuuu

SEQ ID NO: 3988966 - RNA, 16 nt, Human herpesvirus 6
ucucuuuuuaauucca

SEQ ID NO: 3988967 - RNA, 15 nt, Human herpesvirus 6
ucugcauuuauauca

SEQ ID NO: 3988968 - RNA, 15 nt, Human herpesvirus 6
ucugucugcagcuua

SEQ ID NO: 3988969 - RNA, 14 nt, Human herpesvirus 6
ucuuauauuucaga

SEQ ID NO: 3988970 - RNA, 23 nt, Human herpesvirus 6
ucuuccaguauugaagaaaauug

SEQ ID NO: 3988971 - RNA, 16 nt, Human herpesvirus 6
ucuuguugaguuucag

SEQ ID NO: 3988972 - RNA, 13 nt, Human herpesvirus 6
ucuuuccugccca

SEQ ID NO: 3988973 - RNA, 20 nt, Human herpesvirus 6
ugaaaauaucauuaaauugu

SEQ ID NO: 3988974 - RNA, 20 nt, Human herpesvirus 6
ugaaagacuuaaaauuuaug

SEQ ID NO: 3988975 - RNA, 21 nt, Human herpesvirus 6
ugaaagagacucuauggugag

SEQ ID NO: 3988976 - RNA, 14 nt, Human herpesvirus 6
ugaaauaucagaaa

SEQ ID NO: 3988977 - RNA, 21 nt, Human herpesvirus 6
ugaaccaagucaacaacguca

SEQ ID NO: 3988978 - RNA, 23 nt, Human herpesvirus 6
ugaaccgcguauguuuuaucgag

SEQ ID NO: 3988979 - RNA, 15 nt, Human herpesvirus 6
ugaauguuacagaua

SEQ ID NO: 3988980 - RNA, 15 nt, Human herpesvirus 6
ugacaauaaacauga

SEQ ID NO: 3988981 - RNA, 14 nt, Human herpesvirus 6
ugacaucugcaaaa

SEQ ID NO: 3988982 - RNA, 14 nt, Human herpesvirus 6
ugacauucaaaguc

SEQ ID NO: 3988983 - RNA, 20 nt, Human herpesvirus 6
ugaccggagaaaaucaugca

SEQ ID NO: 3988984 - RNA, 20 nt, Human herpesvirus 6
ugacgccuugauguuuccug

SEQ ID NO: 3988985 - RNA, 22 nt, Human herpesvirus 6
ugacggaggcgacgaaagagga

SEQ ID NO: 3988986 - RNA, 20 nt, Human herpesvirus 6
ugacuguaccauugucaaca

SEQ ID NO: 3988987 - RNA, 20 nt, Human herpesvirus 6
ugacuguccgcaugagcgac

SEQ ID NO: 3988988 - RNA, 20 nt, Human herpesvirus 6
ugagagaaugcaacauccug

SEQ ID NO: 3988989 - RNA, 17 nt, Human herpesvirus 6
ugagauguucuaaagga

SEQ ID NO: 3988990 - RNA, 22 nt, Human herpesvirus 6
ugagauucacuccgcguaaaga

SEQ ID NO: 3988991 - RNA, 14 nt, Human herpesvirus 6
ugaguaggagaggc

SEQ ID NO: 3988992 - RNA, 21 nt, Human herpesvirus 6
ugaucugauucgacaaaucau

SEQ ID NO: 3988993 - RNA, 17 nt, Human herpesvirus 6
ugauuaugccaaaugua

SEQ ID NO: 3988994 - RNA, 16 nt, Human herpesvirus 6
ugauuauucugucuug

SEQ ID NO: 3988995 - RNA, 19 nt, Human herpesvirus 6
ugauugucuuuucuggaaa

SEQ ID NO: 3988996 - RNA, 13 nt, Human herpesvirus 6
ugcaaccaauaaa

SEQ ID NO: 3988997 - RNA, 17 nt, Human herpesvirus 6
ugcaauucgguucagcc

SEQ ID NO: 3988998 - RNA, 20 nt, Human herpesvirus 6
ugcaauuguuugugaugggu

SEQ ID NO: 3988999 - RNA, 13 nt, Human herpesvirus 6
ugcacuguuugaa

SEQ ID NO: 3989000 - RNA, 17 nt, Human herpesvirus 6
ugcagacgcugaaauca

SEQ ID NO: 3989001 - RNA, 18 nt, Human herpesvirus 6
ugcagacugcuucuuaga

SEQ ID NO: 3989002 - RNA, 17 nt, Human herpesvirus 6
ugcagaucuaauucaca

SEQ ID NO: 3989003 - RNA, 15 nt, Human herpesvirus 6
ugcaugguccacaga

SEQ ID NO: 3989004 - RNA, 15 nt, Human herpesvirus 6
ugcauuaacccuggg

SEQ ID NO: 3989005 - RNA, 19 nt, Human herpesvirus 6
ugcauugugacagaauucu

SEQ ID NO: 3989006 - RNA, 14 nt, Human herpesvirus 6
ugcauugugugggg

SEQ ID NO: 3989007 - RNA, 18 nt, Human herpesvirus 6
ugccaccgucugggaccc

SEQ ID NO: 3989008 - RNA, 13 nt, Human herpesvirus 6
ugccauaauuucu

SEQ ID NO: 3989009 - RNA, 15 nt, Human herpesvirus 6
ugcccagauguggaa

SEQ ID NO: 3989010 - RNA, 17 nt, Human herpesvirus 6
ugccuuguuuucuuaug

SEQ ID NO: 3989011 - RNA, 18 nt, Human herpesvirus 6
ugcgucgcccccccgcag

SEQ ID NO: 3989012 - RNA, 12 nt, Human herpesvirus 6
ugcguuaucgac

SEQ ID NO: 3989013 - RNA, 21 nt, Human herpesvirus 6
ugcuaagggugccguuauucc

SEQ ID NO: 3989014 - RNA, 19 nt, Human herpesvirus 6
ugcuacccacaugaaauca

SEQ ID NO: 3989015 - RNA, 16 nt, Human herpesvirus 6
ugcucgccguauaagu

SEQ ID NO: 3989016 - RNA, 19 nt, Human herpesvirus 6
ugcuucucucgaugaaagu

SEQ ID NO: 3989017 - RNA, 18 nt, Human herpesvirus 6
uggaaacacuuucuucgc

SEQ ID NO: 3989018 - RNA, 12 nt, Human herpesvirus 6
uggauguuuucg

SEQ ID NO: 3989019 - RNA, 12 nt, Human herpesvirus 6
uggcagagggga

SEQ ID NO: 3989020 - RNA, 21 nt, Human herpesvirus 6
uggccauauuaggcugcagcc

SEQ ID NO: 3989021 - RNA, 18 nt, Human herpesvirus 6
uggccuucgguacaguga

SEQ ID NO: 3989022 - RNA, 15 nt, Human herpesvirus 6
ugggaaucaugugua

SEQ ID NO: 3989023 - RNA, 18 nt, Human herpesvirus 6
ugggggucuuuccugcac

SEQ ID NO: 3989024 - RNA, 23 nt, Human herpesvirus 6
ugggggucuuuccugcacaggcg

SEQ ID NO: 3989025 - RNA, 22 nt, Human herpesvirus 6
uggggucuuuccugcacaggcg

SEQ ID NO: 3989026 - RNA, 17 nt, Human herpesvirus 6
uggggucuuuccugccc

SEQ ID NO: 3989027 - RNA, 17 nt, Human herpesvirus 6
uggucaugaucugcuug

SEQ ID NO: 3989028 - RNA, 15 nt, Human herpesvirus 6
uggucauuucauuug

SEQ ID NO: 3989029 - RNA, 17 nt, Human herpesvirus 6
uguaaauaaacaccagc

SEQ ID NO: 3989030 - RNA, 17 nt, Human herpesvirus 6
uguaagauuaaauguga

SEQ ID NO: 3989031 - RNA, 15 nt, Human herpesvirus 6
uguaauaaaguguca

SEQ ID NO: 3989032 - RNA, 21 nt, Human herpesvirus 6
uguacuuccgcauacuuuugu

SEQ ID NO: 3989033 - RNA, 22 nt, Human herpesvirus 6
uguaguuuaguaugggugagug

SEQ ID NO: 3989034 - RNA, 15 nt, Human herpesvirus 6
uguaguuuuuaaauc

SEQ ID NO: 3989035 - RNA, 22 nt, Human herpesvirus 6
uguaucggcaguguaaaguucu

SEQ ID NO: 3989036 - RNA, 22 nt, Human herpesvirus 6
uguauuguagcagcuggcgaaa

SEQ ID NO: 3989037 - RNA, 19 nt, Human herpesvirus 6
ugucacugucgaauauguu

SEQ ID NO: 3989038 - RNA, 18 nt, Human herpesvirus 6
uguccucuuugaauuuua

SEQ ID NO: 3989039 - RNA, 18 nt, Human herpesvirus 6
ugucgaagucuucuuggg

SEQ ID NO: 3989040 - RNA, 12 nt, Human herpesvirus 6
ugucggccucug

SEQ ID NO: 3989041 - RNA, 11 nt, Human herpesvirus 6
aaaaaaaaugu

SEQ ID NO: 3989042 - RNA, 13 nt, Human herpesvirus 6
aaaaaacaacuuu

SEQ ID NO: 3989043 - RNA, 21 nt, Human herpesvirus 6
aaaaacaccucuaaaacaaga

SEQ ID NO: 3989044 - RNA, 23 nt, Human herpesvirus 6
aaaaaguuuucuaaaaggcucug

SEQ ID NO: 3989045 - RNA, 23 nt, Human herpesvirus 6
aaaaauaaguacauagaauuucu

SEQ ID NO: 3989046 - RNA, 12 nt, Human herpesvirus 6
aaaaaucaacau

SEQ ID NO: 3989047 - RNA, 16 nt, Human herpesvirus 6
aaaacagcuccgcauc

SEQ ID NO: 3989048 - RNA, 17 nt, Human herpesvirus 6
aaaacguuuuuguuauu

SEQ ID NO: 3989049 - RNA, 20 nt, Human herpesvirus 6
aaaacuaauucggaacauug

SEQ ID NO: 3989050 - RNA, 14 nt, Human herpesvirus 6
aaaagcgccugccu

SEQ ID NO: 3989051 - RNA, 17 nt, Human herpesvirus 6
aaaagcuggaaaacuau

SEQ ID NO: 3989052 - RNA, 15 nt, Human herpesvirus 6
aaaagggaagauuug

SEQ ID NO: 3989053 - RNA, 13 nt, Human herpesvirus 6
aaaagggagauga

SEQ ID NO: 3989054 - RNA, 16 nt, Human herpesvirus 6
aaaaucuauugaagau

SEQ ID NO: 3989055 - RNA, 18 nt, Human herpesvirus 6
aaaaucuucuuugugcgu

SEQ ID NO: 3989056 - RNA, 15 nt, Human herpesvirus 6
aaaauuugcuaacgg

SEQ ID NO: 3989057 - RNA, 22 nt, Human herpesvirus 6
aaacaagauccaaucacaacaa

SEQ ID NO: 3989058 - RNA, 14 nt, Human herpesvirus 6
aaacaaucaaaugg

SEQ ID NO: 3989059 - RNA, 22 nt, Human herpesvirus 6
aaacacacaauuaguccauuac

SEQ ID NO: 3989060 - RNA, 21 nt, Human herpesvirus 6
aaacaguaauuuuagggaugg

SEQ ID NO: 3989061 - RNA, 12 nt, Human herpesvirus 6
aaacauguuguu

SEQ ID NO: 3989062 - RNA, 17 nt, Human herpesvirus 6
aaaccaccggcuaaccc

SEQ ID NO: 3989063 - RNA, 17 nt, Human herpesvirus 6
aaaccuagauguaaauu

SEQ ID NO: 3989064 - RNA, 19 nt, Human herpesvirus 6
aaacuaucggagagacgca

SEQ ID NO: 3989065 - RNA, 17 nt, Human herpesvirus 6
aaacucaauuuugaaau

SEQ ID NO: 3989066 - RNA, 23 nt, Human herpesvirus 6
aaagaaucgguaaacuucagacc

SEQ ID NO: 3989067 - RNA, 22 nt, Human herpesvirus 6
aaagacaucacauuauaagaca

SEQ ID NO: 3989068 - RNA, 19 nt, Human herpesvirus 6
aaagagaauacuacaguga

SEQ ID NO: 3989069 - RNA, 17 nt, Human herpesvirus 6
aaagaucaguggguacc

SEQ ID NO: 3989070 - RNA, 14 nt, Human herpesvirus 6
aaagcacauaaggc

SEQ ID NO: 3989071 - RNA, 16 nt, Human herpesvirus 6
aaagcagcagaugcuu

SEQ ID NO: 3989072 - RNA, 16 nt, Human herpesvirus 6
aaagggaagauuugua

SEQ ID NO: 3989073 - RNA, 18 nt, Human herpesvirus 6
aaaguuucggaaaaugua

SEQ ID NO: 3989074 - RNA, 18 nt, Human herpesvirus 6
aaauaaaaaauauuaauu

SEQ ID NO: 3989075 - RNA, 11 nt, Human herpesvirus 6
aaauaaaguuu

SEQ ID NO: 3989076 - RNA, 15 nt, Human herpesvirus 6
aaauagcagaaguuu

SEQ ID NO: 3989077 - RNA, 16 nt, Human herpesvirus 6
aaauauggcagagcug

SEQ ID NO: 3989078 - RNA, 21 nt, Human herpesvirus 6
aaauauguugaaucuuauuca

SEQ ID NO: 3989079 - RNA, 23 nt, Human herpesvirus 6
aaauauuuccaugacugugaggu

SEQ ID NO: 3989080 - RNA, 21 nt, Human herpesvirus 6
aaaucuauccgcuaaaacgac

SEQ ID NO: 3989081 - RNA, 15 nt, Human herpesvirus 6
aaaucucucgguaga

SEQ ID NO: 3989082 - RNA, 21 nt, Human herpesvirus 6
aaaucuggaucaucaagcauc

SEQ ID NO: 3989083 - RNA, 16 nt, Human herpesvirus 6
aaauggauuugguauu

SEQ ID NO: 3989084 - RNA, 10 nt, Human herpesvirus 6
aaaugugucu

SEQ ID NO: 3989085 - RNA, 12 nt, Human herpesvirus 6
aaauuacauaag

SEQ ID NO: 3989086 - RNA, 19 nt, Human herpesvirus 6
aacaaaaagcuuuaaagca

SEQ ID NO: 3989087 - RNA, 17 nt, Human herpesvirus 6
aacaacaucuuaaaaga

SEQ ID NO: 3989088 - RNA, 23 nt, Human herpesvirus 6
aacaaugaaaauucaguuuuuau

SEQ ID NO: 3989089 - RNA, 23 nt, Human herpesvirus 6
aacacgugggucagauaguugau

SEQ ID NO: 3989090 - RNA, 13 nt, Human herpesvirus 6
aacagacuuuacu

SEQ ID NO: 3989091 - RNA, 23 nt, Human herpesvirus 6
aacauaaaacaacaacaauaaca

SEQ ID NO: 3989092 - RNA, 22 nt, Human herpesvirus 6
aacauaucgagccaaagaaaca

SEQ ID NO: 3989093 - RNA, 22 nt, Human herpesvirus 6
aacauccuauugagauucuccg

SEQ ID NO: 3989094 - RNA, 13 nt, Human herpesvirus 6
aacaugaacauug

SEQ ID NO: 3989095 - RNA, 19 nt, Human herpesvirus 6
aacaugcguuguguuacac

SEQ ID NO: 3989096 - RNA, 19 nt, Human herpesvirus 6
aacauuuaauaaagaacau

SEQ ID NO: 3989097 - RNA, 18 nt, Human herpesvirus 6
aacccuaaaauuugcuaa

SEQ ID NO: 3989098 - RNA, 16 nt, Human herpesvirus 6
aaccuguuuccagaau

SEQ ID NO: 3989099 - RNA, 16 nt, Human herpesvirus 6
aacgaacaaaucucca

SEQ ID NO: 3989100 - RNA, 18 nt, Human herpesvirus 6
aacgcgguaacgccacag

SEQ ID NO: 3989101 - RNA, 14 nt, Human herpesvirus 6
aacgucgaaacgaa

SEQ ID NO: 3989102 - RNA, 22 nt, Human herpesvirus 6
aacuaauucggaacauuguucu

SEQ ID NO: 3989103 - RNA, 16 nt, Human herpesvirus 6
aacuacgguagaagcu

SEQ ID NO: 3989104 - RNA, 15 nt, Human herpesvirus 6
aacuagaaaaacaac

SEQ ID NO: 3989105 - RNA, 18 nt, Human herpesvirus 6
aacucuaaaagcugcuaa

SEQ ID NO: 3989106 - RNA, 16 nt, Human herpesvirus 6
aacugcuuaacuugca

SEQ ID NO: 3989107 - RNA, 20 nt, Human herpesvirus 6
aacuuuuugccgaagauagc

SEQ ID NO: 3989108 - RNA, 14 nt, Human herpesvirus 6
aagaauucaaaaac

SEQ ID NO: 3989109 - RNA, 15 nt, Human herpesvirus 6
aagacggaaccauga

SEQ ID NO: 3989110 - RNA, 23 nt, Human herpesvirus 6
aagagugauucaagguggagguu

SEQ ID NO: 3989111 - RNA, 15 nt, Human herpesvirus 6
aagaucuacagagua

SEQ ID NO: 3989112 - RNA, 14 nt, Human herpesvirus 6
aagauguagcugga

SEQ ID NO: 3989113 - RNA, 15 nt, Human herpesvirus 6
aagauguugcaauaa

SEQ ID NO: 3989114 - RNA, 11 nt, Human herpesvirus 6
aagcaaacaug

SEQ ID NO: 3989115 - RNA, 20 nt, Human herpesvirus 6
aagcacugaauuagaauaau

SEQ ID NO: 3989116 - RNA, 14 nt, Human herpesvirus 6
aagcaucugcugcu

SEQ ID NO: 3989117 - RNA, 20 nt, Human herpesvirus 6
aagccucgacguccaccugg

SEQ ID NO: 3989118 - RNA, 23 nt, Human herpesvirus 6
aagcuauguaugaacaggugcuu

SEQ ID NO: 3989119 - RNA, 17 nt, Human herpesvirus 6
aaggacuacaucccucu

SEQ ID NO: 3989120 - RNA, 17 nt, Human herpesvirus 6
aaguaauauagacauug

SEQ ID NO: 3989121 - RNA, 17 nt, Human herpesvirus 6
aagucacgggcagcugc

SEQ ID NO: 3989122 - RNA, 16 nt, Human herpesvirus 6
aagucgacaaauuaua

SEQ ID NO: 3989123 - RNA, 16 nt, Human herpesvirus 6
aauaaaaaguuugugc

SEQ ID NO: 3989124 - RNA, 23 nt, Human herpesvirus 6
aauaaaauuuacaguguuuccaa

SEQ ID NO: 3989125 - RNA, 23 nt, Human herpesvirus 6
aauaaggaaaaauaucgaaauaa

SEQ ID NO: 3989126 - RNA, 13 nt, Human herpesvirus 6
aauaauugcauuc

SEQ ID NO: 3989127 - RNA, 20 nt, Human herpesvirus 6
aauacauuuccaugcauauc

SEQ ID NO: 3989128 - RNA, 23 nt, Human herpesvirus 6
aauauucaagcgaagugaagaau

SEQ ID NO: 3989129 - RNA, 14 nt, Human herpesvirus 6
aaucaucaacguaa

SEQ ID NO: 3989130 - RNA, 21 nt, Human herpesvirus 6
aaucggacaaugcagaacaac

SEQ ID NO: 3989131 - RNA, 16 nt, Human herpesvirus 6
aaucuauugaagauaa

SEQ ID NO: 3989132 - RNA, 18 nt, Human herpesvirus 6
aaucugaauuuaaugcaa

SEQ ID NO: 3989133 - RNA, 14 nt, Human herpesvirus 6
aaucugagugaucu

SEQ ID NO: 3989134 - RNA, 23 nt, Human herpesvirus 6
aaucugcguuccucucucggcug

SEQ ID NO: 3989135 - RNA, 19 nt, Human herpesvirus 6
aaucuguaagauuaaaugu

SEQ ID NO: 3989136 - RNA, 20 nt, Human herpesvirus 6
aaucuguaagauuaaaugug

SEQ ID NO: 3989137 - RNA, 18 nt, Human herpesvirus 6
aaugacugggagaauaag

SEQ ID NO: 3989138 - RNA, 16 nt, Human herpesvirus 6
aaugcaauuuaaaaga

SEQ ID NO: 3989139 - RNA, 15 nt, Human herpesvirus 6
aaugcacuguuugaa

SEQ ID NO: 3989140 - RNA, 14 nt, Human herpesvirus 6
aauggaagaaggcu

SEQ ID NO: 3989141 - RNA, 24 nt, Human herpesvirus 6
aauguugaguaauugaacauugua

SEQ ID NO: 3989142 - RNA, 10 nt, Human herpesvirus 6
aauuaaaggu

SEQ ID NO: 3989143 - RNA, 19 nt, Human herpesvirus 6
aauuacucaacauuaaaaa

SEQ ID NO: 3989144 - RNA, 22 nt, Human herpesvirus 6
aauucaaaaaccgccaagagau

SEQ ID NO: 3989145 - RNA, 17 nt, Human herpesvirus 6
aauucaaaauaaauacu

SEQ ID NO: 3989146 - RNA, 22 nt, Human herpesvirus 6
aauucgauggguuagugaaaaa

SEQ ID NO: 3989147 - RNA, 16 nt, Human herpesvirus 6
aauucuaaaauuguaa

SEQ ID NO: 3989148 - RNA, 23 nt, Human herpesvirus 6
aauucucuggaugcuuuuagaug

SEQ ID NO: 3989149 - RNA, 21 nt, Human herpesvirus 6
aauuuuaucuucgccuuguau

SEQ ID NO: 3989150 - RNA, 23 nt, Human herpesvirus 6
aauuuuauuaacuguaaaaagug

SEQ ID NO: 3989151 - RNA, 15 nt, Human herpesvirus 6
acaaaccaaaaugac

SEQ ID NO: 3989152 - RNA, 20 nt, Human herpesvirus 6
acaaacgccuccacaugaca

SEQ ID NO: 3989153 - RNA, 14 nt, Human herpesvirus 6
acaaauaaaagcau

SEQ ID NO: 3989154 - RNA, 13 nt, Human herpesvirus 6
acaacaacaauaa

SEQ ID NO: 3989155 - RNA, 23 nt, Human herpesvirus 6
acaagcacugaauuagaauaauu

SEQ ID NO: 3989156 - RNA, 14 nt, Human herpesvirus 6
acaaguuucaauau

SEQ ID NO: 3989157 - RNA, 22 nt, Human herpesvirus 6
acaaucgucggaucaacagaug

SEQ ID NO: 3989158 - RNA, 17 nt, Human herpesvirus 6
acacaaaccaucaauuu

SEQ ID NO: 3989159 - RNA, 14 nt, Human herpesvirus 6
acacaauauacgua

SEQ ID NO: 3989160 - RNA, 12 nt, Human herpesvirus 6
acacacccagca

SEQ ID NO: 3989161 - RNA, 23 nt, Human herpesvirus 6
acacagaugguuuuaagagcaga

SEQ ID NO: 3989162 - RNA, 12 nt, Human herpesvirus 6
acacaggacacg

SEQ ID NO: 3989163 - RNA, 18 nt, Human herpesvirus 6
acaccucacaaucuaaua

SEQ ID NO: 3989164 - RNA, 15 nt, Human herpesvirus 6
acacgcuggagcagc

SEQ ID NO: 3989165 - RNA, 16 nt, Human herpesvirus 6
acagaccgucaaaucu

SEQ ID NO: 3989166 - RNA, 21 nt, Human herpesvirus 6
acagagaaggguaugaaacuu

SEQ ID NO: 3989167 - RNA, 18 nt, Human herpesvirus 6
acagagcgcaucuuuaac

SEQ ID NO: 3989168 - RNA, 20 nt, Human herpesvirus 6
acagagcgcaucuuuaacau

SEQ ID NO: 3989169 - RNA, 18 nt, Human herpesvirus 6
acaggaggcuauggcuuc

SEQ ID NO: 3989170 - RNA, 18 nt, Human herpesvirus 6
acaguuuaccuauuuaca

SEQ ID NO: 3989171 - RNA, 18 nt, Human herpesvirus 6
acauaagcaaauguaacu

SEQ ID NO: 3989172 - RNA, 17 nt, Human herpesvirus 6
acauaguggcuaugaag

SEQ ID NO: 3989173 - RNA, 22 nt, Human herpesvirus 6
acauaguggcuaugaagccuuc

SEQ ID NO: 3989174 - RNA, 21 nt, Human herpesvirus 6
acaucgagauucuuuaaagau

SEQ ID NO: 3989175 - RNA, 22 nt, Human herpesvirus 6
acaucgcgcgcgacgugccacc

SEQ ID NO: 3989176 - RNA, 15 nt, Human herpesvirus 6
acaugaacauugaaa

SEQ ID NO: 3989177 - RNA, 22 nt, Human herpesvirus 6
accaagaaucguuaaaugagau

SEQ ID NO: 3989178 - RNA, 16 nt, Human herpesvirus 6
accaccaacacaccug

SEQ ID NO: 3989179 - RNA, 22 nt, Human herpesvirus 6
accaucagcccccagcugaaau

SEQ ID NO: 3989180 - RNA, 17 nt, Human herpesvirus 6
accauuguauauguguu

SEQ ID NO: 3989181 - RNA, 15 nt, Human herpesvirus 6
acccacgguggccug

SEQ ID NO: 3989182 - RNA, 18 nt, Human herpesvirus 6
acccacgguggccuggca

SEQ ID NO: 3989183 - RNA, 13 nt, Human herpesvirus 6
acccuaacccuaa

SEQ ID NO: 3989184 - RNA, 19 nt, Human herpesvirus 6
acccuaccauccuucggcc

SEQ ID NO: 3989185 - RNA, 14 nt, Human herpesvirus 6
accgauucagaaag

SEQ ID NO: 3989186 - RNA, 20 nt, Human herpesvirus 6
accgcaguuccuguuuuucu

SEQ ID NO: 3989187 - RNA, 23 nt, Human herpesvirus 6
accgcaguuccuguuuuucucgg

SEQ ID NO: 3989188 - RNA, 17 nt, Human herpesvirus 6
accgcaguuucuguuuu

SEQ ID NO: 3989189 - RNA, 14 nt, Human herpesvirus 6
accgucucugaagc

SEQ ID NO: 3989190 - RNA, 20 nt, Human herpesvirus 6
accuaacgcgggauauuuua

SEQ ID NO: 3989191 - RNA, 21 nt, Human herpesvirus 6
accuagcagcaaauaaauaca

SEQ ID NO: 3989192 - RNA, 14 nt, Human herpesvirus 6
accucuaaaacaag

SEQ ID NO: 3989193 - RNA, 17 nt, Human herpesvirus 6
accuggaaaaacugacu

SEQ ID NO: 3989194 - RNA, 14 nt, Human herpesvirus 6
accuucccucccac

SEQ ID NO: 3989195 - RNA, 16 nt, Human herpesvirus 6
acgaaaacucuaaaag

SEQ ID NO: 3989196 - RNA, 15 nt, Human herpesvirus 6
acgagaaccugcagg

SEQ ID NO: 3989197 - RNA, 18 nt, Human herpesvirus 6
acgaucgcgaagccuguc

SEQ ID NO: 3989198 - RNA, 17 nt, Human herpesvirus 6
acgaucuacacaccguc

SEQ ID NO: 3989199 - RNA, 20 nt, Human herpesvirus 6
acgcacgacaacacgccaga

SEQ ID NO: 3989200 - RNA, 13 nt, Human herpesvirus 6
acgcacuggacau

SEQ ID NO: 3989201 - RNA, 13 nt, Human herpesvirus 6
acgcauuugcaau

SEQ ID NO: 3989202 - RNA, 15 nt, Human herpesvirus 6
acgcggcaaccgcag

SEQ ID NO: 3989203 - RNA, 13 nt, Human herpesvirus 6
acgcugaaaucau

SEQ ID NO: 3989204 - RNA, 14 nt, Human herpesvirus 6
acggacacgcgcag

SEQ ID NO: 3989205 - RNA, 19 nt, Human herpesvirus 6
acggguaagcagcagaaca

SEQ ID NO: 3989206 - RNA, 13 nt, Human herpesvirus 6
acguauaccuaga

SEQ ID NO: 3989207 - RNA, 15 nt, Human herpesvirus 6
acgugcuugucucac

SEQ ID NO: 3989208 - RNA, 16 nt, Human herpesvirus 6
acguggcagucugcuc

SEQ ID NO: 3989209 - RNA, 13 nt, Human herpesvirus 6
acguuuagaauga

SEQ ID NO: 3989210 - RNA, 15 nt, Human herpesvirus 6
acguuugccaaagcu

SEQ ID NO: 3989211 - RNA, 20 nt, Human herpesvirus 6
acuaaaaaaaaaaacacaaa

SEQ ID NO: 3989212 - RNA, 22 nt, Human herpesvirus 6
acuacguuuuguguuaaaauaa

SEQ ID NO: 3989213 - RNA, 14 nt, Human herpesvirus 6
acuaguuuucacac

SEQ ID NO: 3989214 - RNA, 16 nt, Human herpesvirus 6
acucaacccaaaaugc

SEQ ID NO: 3989215 - RNA, 18 nt, Human herpesvirus 6
acucaacugcuaguuuuu

SEQ ID NO: 3989216 - RNA, 19 nt, Human herpesvirus 6
acucgaccccuuuauaaga

SEQ ID NO: 3989217 - RNA, 15 nt, Human herpesvirus 6
acucgacuucuuuca

SEQ ID NO: 3989218 - RNA, 21 nt, Human herpesvirus 6
acucgugugucuuugugaaga

SEQ ID NO: 3989219 - RNA, 13 nt, Human herpesvirus 6
acugaauagguuu

SEQ ID NO: 3989220 - RNA, 11 nt, Human herpesvirus 6
acugaauuugc

SEQ ID NO: 3989221 - RNA, 22 nt, Human herpesvirus 6
acugcauacguuugccaaagcu

SEQ ID NO: 3989222 - RNA, 22 nt, Human herpesvirus 6
acugccgguaacgcugucguua

SEQ ID NO: 3989223 - RNA, 21 nt, Human herpesvirus 6
acugguguaaauacccugggg

SEQ ID NO: 3989224 - RNA, 14 nt, Human herpesvirus 6
acugugauaugcaa

SEQ ID NO: 3989225 - RNA, 15 nt, Human herpesvirus 6
acugugucuguucaa

SEQ ID NO: 3989226 - RNA, 15 nt, Human herpesvirus 6
acuguguguugaaug

SEQ ID NO: 3989227 - RNA, 14 nt, Human herpesvirus 6
acuucaaacaccuc

SEQ ID NO: 3989228 - RNA, 15 nt, Human herpesvirus 6
acuuccgauaaagau

SEQ ID NO: 3989229 - RNA, 23 nt, Human herpesvirus 6
acuuucguuuacgaauucaaugu

SEQ ID NO: 3989230 - RNA, 20 nt, Human herpesvirus 6
acuuugguucggagagguuu

SEQ ID NO: 3989231 - RNA, 20 nt, Human herpesvirus 6
acuuuguccuuacaaaucuu

SEQ ID NO: 3989232 - RNA, 18 nt, Human herpesvirus 6
acuuuugcuuagucugua

SEQ ID NO: 3989233 - RNA, 14 nt, Human herpesvirus 6
agaaaaguuuauuu

SEQ ID NO: 3989234 - RNA, 16 nt, Human herpesvirus 6
agaaaauccagcaaug

SEQ ID NO: 3989235 - RNA, 12 nt, Human herpesvirus 6
agaaaauugcag

SEQ ID NO: 3989236 - RNA, 14 nt, Human herpesvirus 6
agaacaaaaugagg

SEQ ID NO: 3989237 - RNA, 22 nt, Human herpesvirus 6
agaacaugugacacgauuucug

SEQ ID NO: 3989238 - RNA, 20 nt, Human herpesvirus 6
agaagaaaagaaaaagcagc

SEQ ID NO: 3989239 - RNA, 13 nt, Human herpesvirus 6
agaagaucuaaau

SEQ ID NO: 3989240 - RNA, 21 nt, Human herpesvirus 6
agaaucaaugaaaaaaaauga

SEQ ID NO: 3989241 - RNA, 20 nt, Human herpesvirus 6
agaaugcaacauccugcgug

SEQ ID NO: 3989242 - RNA, 13 nt, Human herpesvirus 6
agauuguuauuag

SEQ ID NO: 3989243 - RNA, 21 nt, Human herpesvirus 6
agauuuauugcgauucuaaua

SEQ ID NO: 3989244 - RNA, 19 nt, Human herpesvirus 6
agcaaguugcuaccgcugg

SEQ ID NO: 3989245 - RNA, 15 nt, Human herpesvirus 6
agcagaagaacagcu

SEQ ID NO: 3989246 - RNA, 19 nt, Human herpesvirus 6
agcagaaguuuacauagaa

SEQ ID NO: 3989247 - RNA, 11 nt, Human herpesvirus 6
agcagaugcuu

SEQ ID NO: 3989248 - RNA, 22 nt, Human herpesvirus 6
agcagcagaguccggcgcacgc

SEQ ID NO: 3989249 - RNA, 14 nt, Human herpesvirus 6
agcagcuagagaaa

SEQ ID NO: 3989250 - RNA, 21 nt, Human herpesvirus 6
agcauacagauguguauuaug

SEQ ID NO: 3989251 - RNA, 15 nt, Human herpesvirus 6
agcaucugcugcuuu

SEQ ID NO: 3989252 - RNA, 18 nt, Human herpesvirus 6
agcccuaauguuaaauaa

SEQ ID NO: 3989253 - RNA, 14 nt, Human herpesvirus 6
agccuaagaaauuu

SEQ ID NO: 3989254 - RNA, 22 nt, Human herpesvirus 6
agccucgacguccaccuggaaa

SEQ ID NO: 3989255 - RNA, 15 nt, Human herpesvirus 6
agccuuuauucuguu

SEQ ID NO: 3989256 - RNA, 21 nt, Human herpesvirus 6
agcgacucccggcccagagac

SEQ ID NO: 3989257 - RNA, 18 nt, Human herpesvirus 6
agcggaagugaaagcagu

SEQ ID NO: 3989258 - RNA, 19 nt, Human herpesvirus 6
agcgguagaguggaguugu

SEQ ID NO: 3989259 - RNA, 15 nt, Human herpesvirus 6
agcuaaaacuugaaa

SEQ ID NO: 3989260 - RNA, 20 nt, Human herpesvirus 6
agcuacgccaaaacuacaaa

SEQ ID NO: 3989261 - RNA, 22 nt, Human herpesvirus 6
agcucaagaggguuuuuuacaa

SEQ ID NO: 3989262 - RNA, 14 nt, Human herpesvirus 6
agcucuccugggca

SEQ ID NO: 3989263 - RNA, 16 nt, Human herpesvirus 6
agcugcgcugauccug

SEQ ID NO: 3989264 - RNA, 12 nt, Human herpesvirus 6
agcuggcugaca

SEQ ID NO: 3989265 - RNA, 15 nt, Human herpesvirus 6
agcuggggaguugcu

SEQ ID NO: 3989266 - RNA, 13 nt, Human herpesvirus 6
agcuuagggccaa

SEQ ID NO: 3989267 - RNA, 14 nt, Human herpesvirus 6
aggauaagaugauu

SEQ ID NO: 3989268 - RNA, 18 nt, Human herpesvirus 6
aggcaguaaagccgauga

SEQ ID NO: 3989269 - RNA, 16 nt, Human herpesvirus 6
aggcgaacgagaacuc

SEQ ID NO: 3989270 - RNA, 14 nt, Human herpesvirus 6
aggcuuaaugaaug

SEQ ID NO: 3989271 - RNA, 20 nt, Human herpesvirus 6
agggauggcagaucuugaaa

SEQ ID NO: 3989272 - RNA, 22 nt, Human herpesvirus 6
aggggaacacgccggggaccga

SEQ ID NO: 3989273 - RNA, 18 nt, Human herpesvirus 6
aggggagagacauccauu

SEQ ID NO: 3989274 - RNA, 22 nt, Human herpesvirus 6
aggggagagacauccauugagu

SEQ ID NO: 3989275 - RNA, 18 nt, Human herpesvirus 6
agguccgacacgccccca

SEQ ID NO: 3989276 - RNA, 19 nt, Human herpesvirus 6
aggugucucaaccuucauu

SEQ ID NO: 3989277 - RNA, 16 nt, Human herpesvirus 6
agguguuuccugccca

SEQ ID NO: 3989278 - RNA, 15 nt, Human herpesvirus 6
aguaaauauuucuaa

SEQ ID NO: 3989279 - RNA, 18 nt, Human herpesvirus 6
aguacauagaauuucuaa

SEQ ID NO: 3989280 - RNA, 13 nt, Human herpesvirus 6
agucacacacagg

SEQ ID NO: 3989281 - RNA, 19 nt, Human herpesvirus 6
aguccgcugggaauugcau

SEQ ID NO: 3989282 - RNA, 16 nt, Human herpesvirus 6
agugaaagcagucagu

SEQ ID NO: 3989283 - RNA, 17 nt, Human herpesvirus 6
aguguguucuuacaaug

SEQ ID NO: 3989284 - RNA, 19 nt, Human herpesvirus 6
aguuagaaauuuuaccuuu

SEQ ID NO: 3989285 - RNA, 20 nt, Human herpesvirus 6
aguuauauucuucuguaaau

SEQ ID NO: 3989286 - RNA, 13 nt, Human herpesvirus 6
aguuaugugcugu

SEQ ID NO: 3989287 - RNA, 15 nt, Human herpesvirus 6
aguucaacgcugucu

SEQ ID NO: 3989288 - RNA, 19 nt, Human herpesvirus 6
aguuccuguuuuucucgga

SEQ ID NO: 3989289 - RNA, 17 nt, Human herpesvirus 6
aguucuaugucuagaug

SEQ ID NO: 3989290 - RNA, 12 nt, Human herpesvirus 6
aguugguuuaaa

SEQ ID NO: 3989291 - RNA, 22 nt, Human herpesvirus 6
aguuucggcaacugaauuugca

SEQ ID NO: 3989292 - RNA, 23 nt, Human herpesvirus 6
aguuuuuccgauacagcaccauc

SEQ ID NO: 3989293 - RNA, 14 nt, Human herpesvirus 6
auaaaagaaucauu

SEQ ID NO: 3989294 - RNA, 18 nt, Human herpesvirus 6
auaaaaucuauugaagau

SEQ ID NO: 3989295 - RNA, 17 nt, Human herpesvirus 6
auaaaucgcuuaaagcg

SEQ ID NO: 3989296 - RNA, 18 nt, Human herpesvirus 6
auaaauugaugaaauugu

SEQ ID NO: 3989297 - RNA, 23 nt, Human herpesvirus 6
auaacaacaaccacagcagcagc

SEQ ID NO: 3989298 - RNA, 17 nt, Human herpesvirus 6
auaacgaugcuuuuauu

SEQ ID NO: 3989299 - RNA, 13 nt, Human herpesvirus 6
auaacugcauacg

SEQ ID NO: 3989300 - RNA, 14 nt, Human herpesvirus 6
auaaguacauagaa

SEQ ID NO: 3989301 - RNA, 13 nt, Human herpesvirus 6
auaauauuuccau

SEQ ID NO: 3989302 - RNA, 19 nt, Human herpesvirus 6
auaaucgauuacaaaacaa

SEQ ID NO: 3989303 - RNA, 17 nt, Human herpesvirus 6
auaauucagucugcuaa

SEQ ID NO: 3989304 - RNA, 13 nt, Human herpesvirus 6
auaauuuauggaa

SEQ ID NO: 3989305 - RNA, 14 nt, Human herpesvirus 6
auacagauguguau

SEQ ID NO: 3989306 - RNA, 19 nt, Human herpesvirus 6
auacauuuccaugcauauc

SEQ ID NO: 3989307 - RNA, 23 nt, Human herpesvirus 6
auacggcagcggaagugaaagca

SEQ ID NO: 3989308 - RNA, 16 nt, Human herpesvirus 6
auagauuagaaauuac

SEQ ID NO: 3989309 - RNA, 18 nt, Human herpesvirus 6
auagcucucccuuaaaga

SEQ ID NO: 3989310 - RNA, 15 nt, Human herpesvirus 6
auauaaaagcuaaau

SEQ ID NO: 3989311 - RNA, 23 nt, Human herpesvirus 6
auauaacgauauauaaaaaacug

SEQ ID NO: 3989312 - RNA, 20 nt, Human herpesvirus 6
auauaacgcuucuaacaaua

SEQ ID NO: 3989313 - RNA, 15 nt, Human herpesvirus 6
auauauauaucagaa

SEQ ID NO: 3989314 - RNA, 15 nt, Human herpesvirus 6
auaucgagccaaaga

SEQ ID NO: 3989315 - RNA, 17 nt, Human herpesvirus 6
auaucgagccaaagaaa

SEQ ID NO: 3989316 - RNA, 20 nt, Human herpesvirus 6
auaucugaaacacugaguuc

SEQ ID NO: 3989317 - RNA, 15 nt, Human herpesvirus 6
auaugcaaacugacu

SEQ ID NO: 3989318 - RNA, 14 nt, Human herpesvirus 6
auauuguguaacuc

SEQ ID NO: 3989319 - RNA, 12 nt, Human herpesvirus 6
auauuuccugcc

SEQ ID NO: 3989320 - RNA, 16 nt, Human herpesvirus 6
auauuuccugcccagg

SEQ ID NO: 3989321 - RNA, 21 nt, Human herpesvirus 6
aucaaauaucugaaacacuga

SEQ ID NO: 3989322 - RNA, 19 nt, Human herpesvirus 6
aucaaaucggacaaugcag

SEQ ID NO: 3989323 - RNA, 18 nt, Human herpesvirus 6
aucaacugacuuauaagu

SEQ ID NO: 3989324 - RNA, 12 nt, Human herpesvirus 6
aucacaaaauuu

SEQ ID NO: 3989325 - RNA, 18 nt, Human herpesvirus 6
aucacauuauaagacacu

SEQ ID NO: 3989326 - RNA, 18 nt, Human herpesvirus 6
aucaccuuacaaauaaua

SEQ ID NO: 3989327 - RNA, 18 nt, Human herpesvirus 6
aucagauuuggagaaaau

SEQ ID NO: 3989328 - RNA, 21 nt, Human herpesvirus 6
aucauauccugaaaauaaaca

SEQ ID NO: 3989329 - RNA, 15 nt, Human herpesvirus 6
cagaaguuuacauag

SEQ ID NO: 3989330 - RNA, 14 nt, Human herpesvirus 6
cagaccacaccccu

SEQ ID NO: 3989331 - RNA, 17 nt, Human herpesvirus 6
cagagacgacucgcgga

SEQ ID NO: 3989332 - RNA, 21 nt, Human herpesvirus 6
cagagagaggagcauucacau

SEQ ID NO: 3989333 - RNA, 12 nt, Human herpesvirus 6
cagaggaaauaa

SEQ ID NO: 3989334 - RNA, 23 nt, Human herpesvirus 6
cagaggaagauagcagaauagag

SEQ ID NO: 3989335 - RNA, 14 nt, Human herpesvirus 6
cagaggguuuagaa

SEQ ID NO: 3989336 - RNA, 16 nt, Human herpesvirus 6
cagcaauguaauaauu

SEQ ID NO: 3989337 - RNA, 16 nt, Human herpesvirus 6
cagcaucaccuggguu

SEQ ID NO: 3989338 - RNA, 18 nt, Human herpesvirus 6
cagccgguagagaguggg

SEQ ID NO: 3989339 - RNA, 11 nt, Human herpesvirus 6
cagcuggcuga

SEQ ID NO: 3989340 - RNA, 20 nt, Human herpesvirus 6
caggaucguccccuuggcuc

SEQ ID NO: 3989341 - RNA, 22 nt, Human herpesvirus 6
caggcaaccgccgugcuucugg

SEQ ID NO: 3989342 - RNA, 15 nt, Human herpesvirus 6
caggcgaacgaaaac

SEQ ID NO: 3989343 - RNA, 20 nt, Human herpesvirus 6
caggggaggagcguugccgu

SEQ ID NO: 3989344 - RNA, 15 nt, Human herpesvirus 6
cagguauaagaacug

SEQ ID NO: 3989345 - RNA, 18 nt, Human herpesvirus 6
caguaaaucuucauuaaa

SEQ ID NO: 3989346 - RNA, 20 nt, Human herpesvirus 6
caguaugucuccaaacagag

SEQ ID NO: 3989347 - RNA, 15 nt, Human herpesvirus 6
caguauuaauguuuu

SEQ ID NO: 3989348 - RNA, 14 nt, Human herpesvirus 6
cagucaguaaugau

SEQ ID NO: 3989349 - RNA, 22 nt, Human herpesvirus 6
cagucuacacacacgccgguua

SEQ ID NO: 3989350 - RNA, 16 nt, Human herpesvirus 6
cagugauauggaaaca

SEQ ID NO: 3989351 - RNA, 18 nt, Human herpesvirus 6
caguuucucgaaaaaaca

SEQ ID NO: 3989352 - RNA, 15 nt, Human herpesvirus 6
cauaacggaaaaaug

SEQ ID NO: 3989353 - RNA, 15 nt, Human herpesvirus 6
cauacacacccagca

SEQ ID NO: 3989354 - RNA, 22 nt, Human herpesvirus 6
cauacauuccuuaagaaugaaa

SEQ ID NO: 3989355 - RNA, 20 nt, Human herpesvirus 6
cauaggaauucuuauuuacc

SEQ ID NO: 3989356 - RNA, 13 nt, Human herpesvirus 6
cauaggugauuuc

SEQ ID NO: 3989357 - RNA, 18 nt, Human herpesvirus 6
caucaccgauaaaaacuc

SEQ ID NO: 3989358 - RNA, 17 nt, Human herpesvirus 6
caucagaauccagaaac

SEQ ID NO: 3989359 - RNA, 19 nt, Human herpesvirus 6
caucaugcugugagagaau

SEQ ID NO: 3989360 - RNA, 19 nt, Human herpesvirus 6
caucccuuaaaaaaacaca

SEQ ID NO: 3989361 - RNA, 20 nt, Human herpesvirus 6
caucgcgcgcgacgugccac

SEQ ID NO: 3989362 - RNA, 22 nt, Human herpesvirus 6
caucgcgcgcgacgugccaccg

SEQ ID NO: 3989363 - RNA, 22 nt, Human herpesvirus 6
caucucgugcaaaagcugacua

SEQ ID NO: 3989364 - RNA, 15 nt, Human herpesvirus 6
caucugcaaaaaaca

SEQ ID NO: 3989365 - RNA, 17 nt, Human herpesvirus 6
caucugcaaaaaacaaa

SEQ ID NO: 3989366 - RNA, 21 nt, Human herpesvirus 6
caugauuaucauagacaaacc

SEQ ID NO: 3989367 - RNA, 13 nt, Human herpesvirus 6
caugcaaaacaga

SEQ ID NO: 3989368 - RNA, 14 nt, Human herpesvirus 6
caugucggccucug

SEQ ID NO: 3989369 - RNA, 23 nt, Human herpesvirus 6
cauguguauauugaauuguauau

SEQ ID NO: 3989370 - RNA, 21 nt, Human herpesvirus 6
cauguucggagauaucauaau

SEQ ID NO: 3989371 - RNA, 17 nt, Human herpesvirus 6
cauucgguacucuuuuc

SEQ ID NO: 3989372 - RNA, 22 nt, Human herpesvirus 6
cauuuauuucguauguuuggau

SEQ ID NO: 3989373 - RNA, 11 nt, Human herpesvirus 6
ccaacacaccu

SEQ ID NO: 3989374 - RNA, 15 nt, Human herpesvirus 6
ccaacacaccugccu

SEQ ID NO: 3989375 - RNA, 12 nt, Human herpesvirus 6
ccaagugguggu

SEQ ID NO: 3989376 - RNA, 13 nt, Human herpesvirus 6
ccaauaaaauauc

SEQ ID NO: 3989377 - RNA, 16 nt, Human herpesvirus 6
ccacauguguauugga

SEQ ID NO: 3989378 - RNA, 14 nt, Human herpesvirus 6
ccacccccgcucga

SEQ ID NO: 3989379 - RNA, 17 nt, Human herpesvirus 6
ccaccgucugggaccca

SEQ ID NO: 3989380 - RNA, 16 nt, Human herpesvirus 6
ccacggaagaagagaa

SEQ ID NO: 3989381 - RNA, 21 nt, Human herpesvirus 6
ccacgugcuugucucacaagc

SEQ ID NO: 3989382 - RNA, 18 nt, Human herpesvirus 6
ccagauacauaaacaccc

SEQ ID NO: 3989383 - RNA, 17 nt, Human herpesvirus 6
ccauggaaaacaaagaa

SEQ ID NO: 3989384 - RNA, 12 nt, Human herpesvirus 6
ccauuauugugu

SEQ ID NO: 3989385 - RNA, 16 nt, Human herpesvirus 6
cccacaggcggggauc

SEQ ID NO: 3989386 - RNA, 16 nt, Human herpesvirus 6
cccagcgggcuccguc

SEQ ID NO: 3989387 - RNA, 15 nt, Human herpesvirus 6
cccaggcgaacgaga

SEQ ID NO: 3989388 - RNA, 19 nt, Human herpesvirus 6
cccauaccuguaaacuggu

SEQ ID NO: 3989389 - RNA, 14 nt, Human herpesvirus 6
cccauccaccuucc

SEQ ID NO: 3989390 - RNA, 14 nt, Human herpesvirus 6
cccauggcgagaaa

SEQ ID NO: 3989391 - RNA, 15 nt, Human herpesvirus 6
cccaugucuugccuc

SEQ ID NO: 3989392 - RNA, 23 nt, Human herpesvirus 6
ccccauacgauauaaaauuuaau

SEQ ID NO: 3989393 - RNA, 16 nt, Human herpesvirus 6
cccccggaguacacgu

SEQ ID NO: 3989394 - RNA, 19 nt, Human herpesvirus 6
ccccugccgagccugugga

SEQ ID NO: 3989395 - RNA, 14 nt, Human herpesvirus 6
cccggaguacacgu

SEQ ID NO: 3989396 - RNA, 19 nt, Human herpesvirus 6
cccucguccaaaucagacg

SEQ ID NO: 3989397 - RNA, 12 nt, Human herpesvirus 6
cccuguccccuc

SEQ ID NO: 3989398 - RNA, 21 nt, Human herpesvirus 6
ccgagcggcggauggagcccg

SEQ ID NO: 3989399 - RNA, 22 nt, Human herpesvirus 6
ccgaggggcggauccgcuccgc

SEQ ID NO: 3989400 - RNA, 14 nt, Human herpesvirus 6
ccgcaguuccuguu

SEQ ID NO: 3989401 - RNA, 15 nt, Human herpesvirus 6
ccgccggcccaucca

SEQ ID NO: 3989402 - RNA, 14 nt, Human herpesvirus 6
ccgcgggaccuggc

SEQ ID NO: 3989403 - RNA, 15 nt, Human herpesvirus 6
ccgcugacaaccucc

SEQ ID NO: 3989404 - RNA, 19 nt, Human herpesvirus 6
ccggagguaacggagcccg

SEQ ID NO: 3989405 - RNA, 14 nt, Human herpesvirus 6
ccggaguugcagug

SEQ ID NO: 3989406 - RNA, 16 nt, Human herpesvirus 6
ccggcuaacccuaacc

SEQ ID NO: 3989407 - RNA, 20 nt, Human herpesvirus 6
ccgguguuuagccuuuauuc

SEQ ID NO: 3989408 - RNA, 17 nt, Human herpesvirus 6
ccgguuacggaaaagau

SEQ ID NO: 3989409 - RNA, 20 nt, Human herpesvirus 6
ccgugcuucuggcacaggca

SEQ ID NO: 3989410 - RNA, 17 nt, Human herpesvirus 6
ccuaaauacauucacau

SEQ ID NO: 3989411 - RNA, 13 nt, Human herpesvirus 6
ccuaauaaauguc

SEQ ID NO: 3989412 - RNA, 23 nt, Human herpesvirus 6
ccuagacccugccuauacaggca

SEQ ID NO: 3989413 - RNA, 21 nt, Human herpesvirus 6
ccucaaacuuuuagagacuuu

SEQ ID NO: 3989414 - RNA, 21 nt, Human herpesvirus 6
ccucgcgcaccgccuccgcca

SEQ ID NO: 3989415 - RNA, 17 nt, Human herpesvirus 6
ccucgugcucugccucg

SEQ ID NO: 3989416 - RNA, 16 nt, Human herpesvirus 6
ccugaaacuccccaga

SEQ ID NO: 3989417 - RNA, 16 nt, Human herpesvirus 6
ccugaucacagagcag

SEQ ID NO: 3989418 - RNA, 10 nt, Human herpesvirus 6
ccugcccagg

SEQ ID NO: 3989419 - RNA, 21 nt, Human herpesvirus 6
ccuggcggacaccgagggcgg

SEQ ID NO: 3989420 - RNA, 15 nt, Human herpesvirus 6
ccuuacggggagcuu

SEQ ID NO: 3989421 - RNA, 13 nt, Human herpesvirus 6
ccuucggccgaca

SEQ ID NO: 3989422 - RNA, 14 nt, Human herpesvirus 6
ccuuuaaccauguu

SEQ ID NO: 3989423 - RNA, 23 nt, Human herpesvirus 6
ccuuucucugcgccaaccuucua

SEQ ID NO: 3989424 - RNA, 21 nt, Human herpesvirus 6
cgaaaacucuaaaagcugcua

SEQ ID NO: 3989425 - RNA, 14 nt, Human herpesvirus 6
cgaaaaucgccagg

SEQ ID NO: 3989426 - RNA, 22 nt, Human herpesvirus 6
cgaaaccaucgucauaaccuca

SEQ ID NO: 3989427 - RNA, 16 nt, Human herpesvirus 6
cgaaggagauuucagg

SEQ ID NO: 3989428 - RNA, 14 nt, Human herpesvirus 6
cgaagugcuucucu

SEQ ID NO: 3989429 - RNA, 18 nt, Human herpesvirus 6
cgacaagaaaauaaaaaa

SEQ ID NO: 3989430 - RNA, 14 nt, Human herpesvirus 6
cgacagaugugugu

SEQ ID NO: 3989431 - RNA, 11 nt, Human herpesvirus 6
cgacccacucc

SEQ ID NO: 3989432 - RNA, 20 nt, Human herpesvirus 6
cgagcggcggauggagcccg

SEQ ID NO: 3989433 - RNA, 21 nt, Human herpesvirus 6
cgaggggcggauccgcuccgc

SEQ ID NO: 3989434 - RNA, 21 nt, Human herpesvirus 6
cgaguuagcagaagaacagcu

SEQ ID NO: 3989435 - RNA, 20 nt, Human herpesvirus 6
cgaucucucucagaucgaga

SEQ ID NO: 3989436 - RNA, 22 nt, Human herpesvirus 6
cgaugacggcgauacguuucug

SEQ ID NO: 3989437 - RNA, 18 nt, Human herpesvirus 6
cgaugucggaaucuacug

SEQ ID NO: 3989438 - RNA, 21 nt, Human herpesvirus 6
cgauguggagcggaaacauga

SEQ ID NO: 3989439 - RNA, 11 nt, Human herpesvirus 6
cgauguuuuca

SEQ ID NO: 3989440 - RNA, 14 nt, Human herpesvirus 6
cgcauguugcaguu

SEQ ID NO: 3989441 - RNA, 14 nt, Human herpesvirus 6
cgccaguguggaua

SEQ ID NO: 3989442 - RNA, 13 nt, Human herpesvirus 6
cgccauaauggaa

SEQ ID NO: 3989443 - RNA, 12 nt, Human herpesvirus 6
cgcccccaccuc

SEQ ID NO: 3989444 - RNA, 16 nt, Human herpesvirus 6
gaaacuccccagagaa

SEQ ID NO: 3989445 - RNA, 13 nt, Human herpesvirus 6
gaaacucuuauaa

SEQ ID NO: 3989446 - RNA, 21 nt, Human herpesvirus 6
gaaacucuuauaacaagcacu

SEQ ID NO: 3989447 - RNA, 14 nt, Human herpesvirus 6
gaaagacagaggaa

SEQ ID NO: 3989448 - RNA, 16 nt, Human herpesvirus 6
gaaagaggacgggaag

SEQ ID NO: 3989449 - RNA, 15 nt, Human herpesvirus 6
gaaagccggugaccg

SEQ ID NO: 3989450 - RNA, 22 nt, Human herpesvirus 6
gaaauuacaagguacacaauau

SEQ ID NO: 3989451 - RNA, 20 nt, Human herpesvirus 6
gaaauuugagaaaguuguac

SEQ ID NO: 3989452 - RNA, 16 nt, Human herpesvirus 6
gaaauuuuugacugau

SEQ ID NO: 3989453 - RNA, 21 nt, Human herpesvirus 6
gaacauacaaaggaggugcgu

SEQ ID NO: 3989454 - RNA, 14 nt, Human herpesvirus 6
gaacucucacggcc

SEQ ID NO: 3989455 - RNA, 19 nt, Human herpesvirus 6
gaacuggugucugucuauu

SEQ ID NO: 3989456 - RNA, 16 nt, Human herpesvirus 6
gaagaaccugaaaucu

SEQ ID NO: 3989457 - RNA, 14 nt, Human herpesvirus 6
gaagacuuuaaagu

SEQ ID NO: 3989458 - RNA, 17 nt, Human herpesvirus 6
gaagcgguagaguggag

SEQ ID NO: 3989459 - RNA, 17 nt, Human herpesvirus 6
gaagucuucuugggcuc

SEQ ID NO: 3989460 - RNA, 14 nt, Human herpesvirus 6
gaagugaaagcagu

SEQ ID NO: 3989461 - RNA, 17 nt, Human herpesvirus 6
gaaguuagaaauuuuac

SEQ ID NO: 3989462 - RNA, 14 nt, Human herpesvirus 6
gaauaacagaugag

SEQ ID NO: 3989463 - RNA, 13 nt, Human herpesvirus 6
gaauagagauuuu

SEQ ID NO: 3989464 - RNA, 22 nt, Human herpesvirus 6
gaaucaaugaaaaaaaaugaag

SEQ ID NO: 3989465 - RNA, 22 nt, Human herpesvirus 6
gaaucagaucacucagauuuca

SEQ ID NO: 3989466 - RNA, 13 nt, Human herpesvirus 6
gaaugagauguuc

SEQ ID NO: 3989467 - RNA, 22 nt, Human herpesvirus 6
gaauuucgucuccugggagcuc

SEQ ID NO: 3989468 - RNA, 20 nt, Human herpesvirus 6
gaauuuguccguauacagcu

SEQ ID NO: 3989469 - RNA, 18 nt, Human herpesvirus 6
gacaaagaaccggcgugu

SEQ ID NO: 3989470 - RNA, 15 nt, Human herpesvirus 6
gacaaccuccgcaua

SEQ ID NO: 3989471 - RNA, 21 nt, Human herpesvirus 6
gacaauucaaaacgacaucgc

SEQ ID NO: 3989472 - RNA, 22 nt, Human herpesvirus 6
gacaccucaauuaauacaaaau

SEQ ID NO: 3989473 - RNA, 15 nt, Human herpesvirus 6
gacacgcuggagcag

SEQ ID NO: 3989474 - RNA, 19 nt, Human herpesvirus 6
gacaguauuuacugagcaa

SEQ ID NO: 3989475 - RNA, 20 nt, Human herpesvirus 6
gacaucgaccgccggaggua

SEQ ID NO: 3989476 - RNA, 17 nt, Human herpesvirus 6
gaccaauuuaugucauu

SEQ ID NO: 3989477 - RNA, 15 nt, Human herpesvirus 6
gacgacgggcggggc

SEQ ID NO: 3989478 - RNA, 22 nt, Human herpesvirus 6
gacggccuccggccccagagac

SEQ ID NO: 3989479 - RNA, 17 nt, Human herpesvirus 6
gacgggcggggcggacg

SEQ ID NO: 3989480 - RNA, 16 nt, Human herpesvirus 6
gacgucgacgaaauaa

SEQ ID NO: 3989481 - RNA, 19 nt, Human herpesvirus 6
gacgugccaccgucuggga

SEQ ID NO: 3989482 - RNA, 22 nt, Human herpesvirus 6
gacgugccaccgucugggaccc

SEQ ID NO: 3989483 - RNA, 23 nt, Human herpesvirus 6
gacuacagacuccccaccgagau

SEQ ID NO: 3989484 - RNA, 13 nt, Human herpesvirus 6
gacuacagcugca

SEQ ID NO: 3989485 - RNA, 19 nt, Human herpesvirus 6
gacuacucuggcugaaaga

SEQ ID NO: 3989486 - RNA, 19 nt, Human herpesvirus 6
gacuauacgaaauaaucga

SEQ ID NO: 3989487 - RNA, 16 nt, Human herpesvirus 6
gacucgccgaugaaac

SEQ ID NO: 3989488 - RNA, 22 nt, Human herpesvirus 6
gacucuaaauacggaccgagag

SEQ ID NO: 3989489 - RNA, 21 nt, Human herpesvirus 6
gacuggaaaacuaugugcauu

SEQ ID NO: 3989490 - RNA, 22 nt, Human herpesvirus 6
gacuguuuauuuucucgacauc

SEQ ID NO: 3989491 - RNA, 23 nt, Human herpesvirus 6
gacuuacagagcuuuuaaagaau

SEQ ID NO: 3989492 - RNA, 16 nt, Human herpesvirus 6
gacuuuuuaacaaaau

SEQ ID NO: 3989493 - RNA, 23 nt, Human herpesvirus 6
gagacaccagccgguagagagug

SEQ ID NO: 3989494 - RNA, 17 nt, Human herpesvirus 6
gagaccuacacuuuucc

SEQ ID NO: 3989495 - RNA, 15 nt, Human herpesvirus 6
gagacgaaacauagu

SEQ ID NO: 3989496 - RNA, 19 nt, Human herpesvirus 6
gagacgacucgcggagugg

SEQ ID NO: 3989497 - RNA, 23 nt, Human herpesvirus 6
gagagagcgugcacacaaacagu

SEQ ID NO: 3989498 - RNA, 14 nt, Human herpesvirus 6
gagaguggggacaa

SEQ ID NO: 3989499 - RNA, 13 nt, Human herpesvirus 6
gagcacacacgcc

SEQ ID NO: 3989500 - RNA, 23 nt, Human herpesvirus 6
gagcacgcacgacaacacgccag

SEQ ID NO: 3989501 - RNA, 18 nt, Human herpesvirus 6
gagcacgguccacacgcc

SEQ ID NO: 3989502 - RNA, 22 nt, Human herpesvirus 6
gagcgugccguaaaucugcguc

SEQ ID NO: 3989503 - RNA, 17 nt, Human herpesvirus 6
gagcuaauaugaacaau

SEQ ID NO: 3989504 - RNA, 16 nt, Human herpesvirus 6
gaggaaaugcagcagu

SEQ ID NO: 3989505 - RNA, 16 nt, Human herpesvirus 6
gaguuuccgggcaugg

SEQ ID NO: 3989506 - RNA, 19 nt, Human herpesvirus 6
gaucaguggguaccgcggu

SEQ ID NO: 3989507 - RNA, 23 nt, Human herpesvirus 6
gaucuaaauuucuacaaaaauac

SEQ ID NO: 3989508 - RNA, 20 nt, Human herpesvirus 6
gaucugauucgacaaaucau

SEQ ID NO: 3989509 - RNA, 14 nt, Human herpesvirus 6
gaucuugaucaaau

SEQ ID NO: 3989510 - RNA, 19 nt, Human herpesvirus 6
gaugaagcgguuagagcug

SEQ ID NO: 3989511 - RNA, 15 nt, Human herpesvirus 6
gauguuuuccuuuau

SEQ ID NO: 3989512 - RNA, 18 nt, Human herpesvirus 6
gauuagaaauuacauaag

SEQ ID NO: 3989513 - RNA, 19 nt, Human herpesvirus 6
gauuaugccgucuuauucc

SEQ ID NO: 3989514 - RNA, 19 nt, Human herpesvirus 6
gauugcaacauuuuccucu

SEQ ID NO: 3989515 - RNA, 23 nt, Human herpesvirus 6
gauuucacuuaagccagcuuucg

SEQ ID NO: 3989516 - RNA, 15 nt, Human herpesvirus 6
gauuuuuauucugcu

SEQ ID NO: 3989517 - RNA, 21 nt, Human herpesvirus 6
gcaaucaaucuucuggguggg

SEQ ID NO: 3989518 - RNA, 19 nt, Human herpesvirus 6
gcaaucauuagcauacaga

SEQ ID NO: 3989519 - RNA, 16 nt, Human herpesvirus 6
gcaauuuccugucaug

SEQ ID NO: 3989520 - RNA, 15 nt, Human herpesvirus 6
gcacacauguauuua

SEQ ID NO: 3989521 - RNA, 13 nt, Human herpesvirus 6
gcacaggcgaacg

SEQ ID NO: 3989522 - RNA, 14 nt, Human herpesvirus 6
gcacauaacugcau

SEQ ID NO: 3989523 - RNA, 16 nt, Human herpesvirus 6
gcaccucugaaacacu

SEQ ID NO: 3989524 - RNA, 19 nt, Human herpesvirus 6
gcacgcacgacaacacgcc

SEQ ID NO: 3989525 - RNA, 16 nt, Human herpesvirus 6
gcacuguuugaaacug

SEQ ID NO: 3989526 - RNA, 21 nt, Human herpesvirus 6
gcagaguccggcgcacgcaca

SEQ ID NO: 3989527 - RNA, 21 nt, Human herpesvirus 6
gcagcaucauguucggagaua

SEQ ID NO: 3989528 - RNA, 15 nt, Human herpesvirus 6
gcagcuuccacgcga

SEQ ID NO: 3989529 - RNA, 13 nt, Human herpesvirus 6
gcaggaaucaugu

SEQ ID NO: 3989530 - RNA, 17 nt, Human herpesvirus 6
gcaggauaauuuaugga

SEQ ID NO: 3989531 - RNA, 21 nt, Human herpesvirus 6
gcagggggggucucuguucug

SEQ ID NO: 3989532 - RNA, 14 nt, Human herpesvirus 6
gcaguggacggcgg

SEQ ID NO: 3989533 - RNA, 19 nt, Human herpesvirus 6
gcauacguuugccaaagcu

SEQ ID NO: 3989534 - RNA, 13 nt, Human herpesvirus 6
gcauucgguacuc

SEQ ID NO: 3989535 - RNA, 10 nt, Human herpesvirus 6
gccaaaauau

SEQ ID NO: 3989536 - RNA, 16 nt, Human herpesvirus 6
gccaaaggaaaccacc

SEQ ID NO: 3989537 - RNA, 18 nt, Human herpesvirus 6
gccaaaggaaaccaccgg

SEQ ID NO: 3989538 - RNA, 11 nt, Human herpesvirus 6
gccaaauguau

SEQ ID NO: 3989539 - RNA, 21 nt, Human herpesvirus 6
gccaucuaucgcgcaccgcug

SEQ ID NO: 3989540 - RNA, 20 nt, Human herpesvirus 6
gcccgccggcccauccaccu

SEQ ID NO: 3989541 - RNA, 11 nt, Human herpesvirus 6
gcccugcuccg

SEQ ID NO: 3989542 - RNA, 14 nt, Human herpesvirus 6
gccgagccugugga

SEQ ID NO: 3989543 - RNA, 15 nt, Human herpesvirus 6
gccgaugaaacuguc

SEQ ID NO: 3989544 - RNA, 23 nt, Human herpesvirus 6
gccgcugcagaaaaacggcagcu

SEQ ID NO: 3989545 - RNA, 16 nt, Human herpesvirus 6
gccgcugcggucgccg

SEQ ID NO: 3989546 - RNA, 14 nt, Human herpesvirus 6
gccugaaaaugaag

SEQ ID NO: 3989547 - RNA, 13 nt, Human herpesvirus 6
gccugcucagagc

SEQ ID NO: 3989548 - RNA, 15 nt, Human herpesvirus 6
gccugcucagagcug

SEQ ID NO: 3989549 - RNA, 19 nt, Human herpesvirus 6
gccuggcacggugccaaag

SEQ ID NO: 3989550 - RNA, 15 nt, Human herpesvirus 6
gccuguuuuagucua

SEQ ID NO: 3989551 - RNA, 17 nt, Human herpesvirus 6
gcgaaugcucaaccuaa

SEQ ID NO: 3989552 - RNA, 17 nt, Human herpesvirus 6
gcgaauuuguuaagcaa

SEQ ID NO: 3989553 - RNA, 13 nt, Human herpesvirus 6
gcgacaaccgccg

SEQ ID NO: 3989554 - RNA, 19 nt, Human herpesvirus 6
gcgaucauaaaacugccaa

SEQ ID NO: 3989555 - RNA, 20 nt, Human herpesvirus 6
gcgaucgcugacucgccuuu

SEQ ID NO: 3989556 - RNA, 22 nt, Human herpesvirus 6
gcgcaauucuucucuacaucga

SEQ ID NO: 3989557 - RNA, 17 nt, Human herpesvirus 6
gcgcgaggugacggagg

SEQ ID NO: 3989558 - RNA, 13 nt, Human herpesvirus 6
aaaaaaacacuag

SEQ ID NO: 3989559 - RNA, 13 nt, Human herpesvirus 6
aaaaaaucuaucc

SEQ ID NO: 3989560 - RNA, 21 nt, Human herpesvirus 6
aaaaacacuagccuacuauga

SEQ ID NO: 3989561 - RNA, 20 nt, Human herpesvirus 6
aaaaacaucguaauggcauu

SEQ ID NO: 3989562 - RNA, 11 nt, Human herpesvirus 6
aaaaacauuuc

SEQ ID NO: 3989563 - RNA, 15 nt, Human herpesvirus 6
aaaaacugacugaca

SEQ ID NO: 3989564 - RNA, 20 nt, Human herpesvirus 6
aaaaagagaggaaagaauua

SEQ ID NO: 3989565 - RNA, 23 nt, Human herpesvirus 6
aaaaaguuagcggggagucucca

SEQ ID NO: 3989566 - RNA, 15 nt, Human herpesvirus 6
aaaaauugacaauga

SEQ ID NO: 3989567 - RNA, 22 nt, Human herpesvirus 6
aaaacacaaaccaucaauuuua

SEQ ID NO: 3989568 - RNA, 15 nt, Human herpesvirus 6
aaaacaguauaacgg

SEQ ID NO: 3989569 - RNA, 22 nt, Human herpesvirus 6
aaaacaguuuaccuauuuacaa

SEQ ID NO: 3989570 - RNA, 19 nt, Human herpesvirus 6
aaaacauaccgacguaaua

SEQ ID NO: 3989571 - RNA, 18 nt, Human herpesvirus 6
aaaaccuuauacagaugu

SEQ ID NO: 3989572 - RNA, 16 nt, Human herpesvirus 6
aaaacucgcaccucug

SEQ ID NO: 3989573 - RNA, 22 nt, Human herpesvirus 6
aaaacugcauggugagcaaaau

SEQ ID NO: 3989574 - RNA, 16 nt, Human herpesvirus 6
aaaauagauggcuuug

SEQ ID NO: 3989575 - RNA, 17 nt, Human herpesvirus 6
aaaaugcguuugucauu

SEQ ID NO: 3989576 - RNA, 12 nt, Human herpesvirus 6
aaaauuaaaagu

SEQ ID NO: 3989577 - RNA, 14 nt, Human herpesvirus 6
aaacaaauggaaac

SEQ ID NO: 3989578 - RNA, 13 nt, Human herpesvirus 6
aaacacagauggu

SEQ ID NO: 3989579 - RNA, 22 nt, Human herpesvirus 6
aaacaccgguaagcaucugcug

SEQ ID NO: 3989580 - RNA, 14 nt, Human herpesvirus 6
aaacagagacuggu

SEQ ID NO: 3989581 - RNA, 13 nt, Human herpesvirus 6
aaacaguaaauuc

SEQ ID NO: 3989582 - RNA, 14 nt, Human herpesvirus 6
aaacauguuguucu

SEQ ID NO: 3989583 - RNA, 16 nt, Human herpesvirus 6
aaaccuuauacagaug

SEQ ID NO: 3989584 - RNA, 13 nt, Human herpesvirus 6
aaacucaccgcau

SEQ ID NO: 3989585 - RNA, 18 nt, Human herpesvirus 6
aaacucuaaaagcugcua

SEQ ID NO: 3989586 - RNA, 19 nt, Human herpesvirus 6
aaacuggucugcuugcaaa

SEQ ID NO: 3989587 - RNA, 15 nt, Human herpesvirus 6
aaagaaucaaugaaa

SEQ ID NO: 3989588 - RNA, 12 nt, Human herpesvirus 6
aaagcaaacaug

SEQ ID NO: 3989589 - RNA, 19 nt, Human herpesvirus 6
aaagcauuuuuguugugau

SEQ ID NO: 3989590 - RNA, 18 nt, Human herpesvirus 6
aaaguuaagaaaacauga

SEQ ID NO: 3989591 - RNA, 21 nt, Human herpesvirus 6
aaauaaaaacaccucuaaaac

SEQ ID NO: 3989592 - RNA, 18 nt, Human herpesvirus 6
aaauaaaguuaaauugau

SEQ ID NO: 3989593 - RNA, 15 nt, Human herpesvirus 6
aaauagcagcaauca

SEQ ID NO: 3989594 - RNA, 21 nt, Human herpesvirus 6
aaauauuaaucguuacaaaau

SEQ ID NO: 3989595 - RNA, 23 nt, Human herpesvirus 6
aaauccuccuagggaauuuaauc

SEQ ID NO: 3989596 - RNA, 19 nt, Human herpesvirus 6
aaaucgguuaaagaaucug

SEQ ID NO: 3989597 - RNA, 18 nt, Human herpesvirus 6
aaaucuacuguacaaaau

SEQ ID NO: 3989598 - RNA, 21 nt, Human herpesvirus 6
aaauuuugaugccaaagcuuu

SEQ ID NO: 3989599 - RNA, 23 nt, Human herpesvirus 6
aacaaagguaccacggggauuua

SEQ ID NO: 3989600 - RNA, 20 nt, Human herpesvirus 6
aacaagauccaaucacaaca

SEQ ID NO: 3989601 - RNA, 21 nt, Human herpesvirus 6
aacagggagugauugaugaaa

SEQ ID NO: 3989602 - RNA, 15 nt, Human herpesvirus 6
aacaguauaacggaa

SEQ ID NO: 3989603 - RNA, 23 nt, Human herpesvirus 6
aacaguuuaccuauuuacaaugu

SEQ ID NO: 3989604 - RNA, 15 nt, Human herpesvirus 6
aacauagaaaaauga

SEQ ID NO: 3989605 - RNA, 17 nt, Human herpesvirus 6
aacaucaguaacaccgu

SEQ ID NO: 3989606 - RNA, 14 nt, Human herpesvirus 6
aacaucccggaaau

SEQ ID NO: 3989607 - RNA, 21 nt, Human herpesvirus 6
aacaugagggacucggaaaag

SEQ ID NO: 3989608 - RNA, 22 nt, Human herpesvirus 6
aacaugagggacucggaaaagg

SEQ ID NO: 3989609 - RNA, 12 nt, Human herpesvirus 6
aacauuguaaau

SEQ ID NO: 3989610 - RNA, 14 nt, Human herpesvirus 6
aaccaccggcuaac

SEQ ID NO: 3989611 - RNA, 22 nt, Human herpesvirus 6
aaccaccggcuaacccuaaccc

SEQ ID NO: 3989612 - RNA, 15 nt, Human herpesvirus 6
aaccaugucuugcaa

SEQ ID NO: 3989613 - RNA, 12 nt, Human herpesvirus 6
aaccuaaauaca

SEQ ID NO: 3989614 - RNA, 12 nt, Human herpesvirus 6
aacgaaaaagaa

SEQ ID NO: 3989615 - RNA, 21 nt, Human herpesvirus 6
aacgagaacgcucuugccgaa

SEQ ID NO: 3989616 - RNA, 19 nt, Human herpesvirus 6
aacgcgucgguaaacaauu

SEQ ID NO: 3989617 - RNA, 13 nt, Human herpesvirus 6
aacgcuccucccc

SEQ ID NO: 3989618 - RNA, 17 nt, Human herpesvirus 6
aacuauauugcugcuag

SEQ ID NO: 3989619 - RNA, 15 nt, Human herpesvirus 6
aacuaucggagagac

SEQ ID NO: 3989620 - RNA, 22 nt, Human herpesvirus 6
aacucacacaaccauccagaua

SEQ ID NO: 3989621 - RNA, 21 nt, Human herpesvirus 6
aacuuuuuucggauuuugaau

SEQ ID NO: 3989622 - RNA, 21 nt, Human herpesvirus 6
aagaacacgaagacgaagagg

SEQ ID NO: 3989623 - RNA, 17 nt, Human herpesvirus 6
aagaaugggauugugau

SEQ ID NO: 3989624 - RNA, 17 nt, Human herpesvirus 6
aagacagaccacacccc

SEQ ID NO: 3989625 - RNA, 18 nt, Human herpesvirus 6
aagacgaaaaauuuuacg

SEQ ID NO: 3989626 - RNA, 21 nt, Human herpesvirus 6
aagagugggaugcauuauacu

SEQ ID NO: 3989627 - RNA, 13 nt, Human herpesvirus 6
aagaucagugggu

SEQ ID NO: 3989628 - RNA, 16 nt, Human herpesvirus 6
aagauuacggcaacau

SEQ ID NO: 3989629 - RNA, 15 nt, Human herpesvirus 6
aagcagucaguaaug

SEQ ID NO: 3989630 - RNA, 20 nt, Human herpesvirus 6
aagcgucaacggcuucaaga

SEQ ID NO: 3989631 - RNA, 14 nt, Human herpesvirus 6
aagcucauuuucuc

SEQ ID NO: 3989632 - RNA, 14 nt, Human herpesvirus 6
aagcuggaaaacua

SEQ ID NO: 3989633 - RNA, 19 nt, Human herpesvirus 6
aagcuuuaaagcagcuaga

SEQ ID NO: 3989634 - RNA, 17 nt, Human herpesvirus 6
aaggauuaugaucauau

SEQ ID NO: 3989635 - RNA, 20 nt, Human herpesvirus 6
aaguaauauagacauugcuu

SEQ ID NO: 3989636 - RNA, 20 nt, Human herpesvirus 6
aagugggccucguuguuuca

SEQ ID NO: 3989637 - RNA, 16 nt, Human herpesvirus 6
aaguucuacaaaaagu

SEQ ID NO: 3989638 - RNA, 16 nt, Human herpesvirus 6
aaguuuacauagaaau

SEQ ID NO: 3989639 - RNA, 15 nt, Human herpesvirus 6
aaguuucagagguuu

SEQ ID NO: 3989640 - RNA, 21 nt, Human herpesvirus 6
aauaaauacuagcuaaaacuu

SEQ ID NO: 3989641 - RNA, 12 nt, Human herpesvirus 6
aauaacagauga

SEQ ID NO: 3989642 - RNA, 12 nt, Human herpesvirus 6
aauaagauguug

SEQ ID NO: 3989643 - RNA, 13 nt, Human herpesvirus 6
aauaauaaaaagu

SEQ ID NO: 3989644 - RNA, 17 nt, Human herpesvirus 6
aauaaucgauuacaaaa

SEQ ID NO: 3989645 - RNA, 20 nt, Human herpesvirus 6
aauaaucgauuacaaaacaa

SEQ ID NO: 3989646 - RNA, 21 nt, Human herpesvirus 6
aauacuucucuuuauagagca

SEQ ID NO: 3989647 - RNA, 12 nt, Human herpesvirus 6
aauauagacuuu

SEQ ID NO: 3989648 - RNA, 15 nt, Human herpesvirus 6
aauaugauggacaaa

SEQ ID NO: 3989649 - RNA, 23 nt, Human herpesvirus 6
aauauuuccauaaguuaauucca

SEQ ID NO: 3989650 - RNA, 20 nt, Human herpesvirus 6
aaucaaaaaaauuuugaugc

SEQ ID NO: 3989651 - RNA, 14 nt, Human herpesvirus 6
aaucauuguuugaa

SEQ ID NO: 3989652 - RNA, 18 nt, Human herpesvirus 6
aaucauuguuugaauaac

SEQ ID NO: 3989653 - RNA, 20 nt, Human herpesvirus 6
aauccagaaacuugcuccug

SEQ ID NO: 3989654 - RNA, 21 nt, Human herpesvirus 6
aaucugagcucuccugggcau

SEQ ID NO: 3989655 - RNA, 16 nt, Human herpesvirus 6
aaucuguccagcuugc

SEQ ID NO: 3989656 - RNA, 17 nt, Human herpesvirus 6
aaugaauuuauuuucaa

SEQ ID NO: 3989657 - RNA, 18 nt, Human herpesvirus 6
aaugagcccgguuuaaga

SEQ ID NO: 3989658 - RNA, 14 nt, Human herpesvirus 6
aauguguuuuucuu

SEQ ID NO: 3989659 - RNA, 12 nt, Human herpesvirus 6
aauguugcaugg

SEQ ID NO: 3989660 - RNA, 15 nt, Human herpesvirus 6
aauguuuuguggcuc

SEQ ID NO: 3989661 - RNA, 18 nt, Human herpesvirus 6
aauguuuuugacaaauaa

SEQ ID NO: 3989662 - RNA, 19 nt, Human herpesvirus 6
aauuacauaagcaaaugua

SEQ ID NO: 3989663 - RNA, 21 nt, Human herpesvirus 6
aauuauccuauugguuugcau

SEQ ID NO: 3989664 - RNA, 14 nt, Human herpesvirus 6
aauuauuuugugau

SEQ ID NO: 3989665 - RNA, 18 nt, Human herpesvirus 6
aauucaaaauaaauacua

SEQ ID NO: 3989666 - RNA, 17 nt, Human herpesvirus 6
aauucauuguacgauaa

SEQ ID NO: 3989667 - RNA, 19 nt, Human herpesvirus 6
aauuccuuaauucuaaaua

SEQ ID NO: 3989668 - RNA, 14 nt, Human herpesvirus 6
aauucuuauuuacc

SEQ ID NO: 3989669 - RNA, 17 nt, Human herpesvirus 6
aauuguauucuugaaaa

SEQ ID NO: 3989670 - RNA, 19 nt, Human herpesvirus 6
aauuuaauaagaaagcagu

SEQ ID NO: 3989671 - RNA, 21 nt, Human herpesvirus 6
aauuucuaaccauuuugaaaa

SEQ ID NO: 3989672 - RNA, 12 nt, Human herpesvirus 6
aauuuuaaaugc

SEQ ID NO: 3989673 - RNA, 18 nt, Human herpesvirus 6
acaaaagacaaaacucau

SEQ ID NO: 3989674 - RNA, 18 nt, Human herpesvirus 6
acaaaaucuucuuugugc

SEQ ID NO: 3989675 - RNA, 17 nt, Human herpesvirus 6
acaaagaaucaaugaaa

SEQ ID NO: 3989676 - RNA, 15 nt, Human herpesvirus 6
acaaauaaaaaauuc

SEQ ID NO: 3989677 - RNA, 15 nt, Human herpesvirus 6
acaaauuuuaaaugc

SEQ ID NO: 3989678 - RNA, 16 nt, Human herpesvirus 6
acaaccgccgccgccg

SEQ ID NO: 3989679 - RNA, 16 nt, Human herpesvirus 6
acaauauuucacauau

SEQ ID NO: 3989680 - RNA, 14 nt, Human herpesvirus 6
acaaucaaaugggu

SEQ ID NO: 3989681 - RNA, 14 nt, Human herpesvirus 6
acaaucaugugcau

SEQ ID NO: 3989682 - RNA, 21 nt, Human herpesvirus 6
acaaugcaugucgaacagcuu

SEQ ID NO: 3989683 - RNA, 15 nt, Human herpesvirus 6
acacaaaaaauugac

SEQ ID NO: 3989684 - RNA, 11 nt, Human herpesvirus 6
acacacccagc

SEQ ID NO: 3989685 - RNA, 21 nt, Human herpesvirus 6
acaccacucuguuuuuuugca

SEQ ID NO: 3989686 - RNA, 21 nt, Human herpesvirus 6
acaccgauucagaaaguucua

SEQ ID NO: 3989687 - RNA, 22 nt, Human herpesvirus 6
acacgacaaaacaaucagccug

SEQ ID NO: 3989688 - RNA, 21 nt, Human herpesvirus 6
acacgcuggagcagcuuccac

SEQ ID NO: 3989689 - RNA, 19 nt, Human herpesvirus 6
acagaaaaaaaaauaagua

SEQ ID NO: 3989690 - RNA, 16 nt, Human herpesvirus 6
acagaagacgacauac

SEQ ID NO: 3989691 - RNA, 13 nt, Human herpesvirus 6
acagacagaggaa

SEQ ID NO: 3989692 - RNA, 11 nt, Human herpesvirus 6
acagauugcau

SEQ ID NO: 3989693 - RNA, 16 nt, Human herpesvirus 6
acagcaccaucaauaa

SEQ ID NO: 3989694 - RNA, 12 nt, Human herpesvirus 6
acagcggacagc

SEQ ID NO: 3989695 - RNA, 21 nt, Human herpesvirus 6
acaguaugucuccaaacagag

SEQ ID NO: 3989696 - RNA, 22 nt, Human herpesvirus 6
acaguuuaccuauuuacaaugu

SEQ ID NO: 3989697 - RNA, 16 nt, Human herpesvirus 6
acauaucgagccaaag

SEQ ID NO: 3989698 - RNA, 18 nt, Human herpesvirus 6
acaucaccgauaaaaacu

SEQ ID NO: 3989699 - RNA, 23 nt, Human herpesvirus 6
acauccagaaaagcaaacaugca

SEQ ID NO: 3989700 - RNA, 21 nt, Human herpesvirus 6
acauccugcguguuaaugaau

SEQ ID NO: 3989701 - RNA, 13 nt, Human herpesvirus 6
acaucgauccaaa

SEQ ID NO: 3989702 - RNA, 20 nt, Human herpesvirus 6
acauguuguucuugucuuuu

SEQ ID NO: 3989703 - RNA, 18 nt, Human herpesvirus 6
acauucguauacuuccuc

SEQ ID NO: 3989704 - RNA, 22 nt, Human herpesvirus 6
acauuguaaauagguaaacugu

SEQ ID NO: 3989705 - RNA, 20 nt, Human herpesvirus 6
acauuuaauaaagaacaugu

SEQ ID NO: 3989706 - RNA, 17 nt, Human herpesvirus 6
acauuuuguacaaacuu

SEQ ID NO: 3989707 - RNA, 19 nt, Human herpesvirus 6
accaauuccuuaauucuaa

SEQ ID NO: 3989708 - RNA, 15 nt, Human herpesvirus 6
acccaugaaaaucau

SEQ ID NO: 3989709 - RNA, 15 nt, Human herpesvirus 6
acccccgauucagac

SEQ ID NO: 3989710 - RNA, 22 nt, Human herpesvirus 6
accccguugauuggaugaucgc

SEQ ID NO: 3989711 - RNA, 14 nt, Human herpesvirus 6
acccgcguccucca

SEQ ID NO: 3989712 - RNA, 18 nt, Human herpesvirus 6
acccuacaaucuguccag

SEQ ID NO: 3989713 - RNA, 19 nt, Human herpesvirus 6
acccugccuauacaggcaa

SEQ ID NO: 3989714 - RNA, 16 nt, Human herpesvirus 6
accgauuuuucagugu

SEQ ID NO: 3989715 - RNA, 16 nt, Human herpesvirus 6
accgcagcagcuagau

SEQ ID NO: 3989716 - RNA, 23 nt, Human herpesvirus 6
accgcaguuucuguuuuucucgg

SEQ ID NO: 3989717 - RNA, 15 nt, Human herpesvirus 6
accggaaaagagaag

SEQ ID NO: 3989718 - RNA, 16 nt, Human herpesvirus 6
accuaaauacauucac

SEQ ID NO: 3989719 - RNA, 17 nt, Human herpesvirus 6
accuauuagguguccuu

SEQ ID NO: 3989720 - RNA, 18 nt, Human herpesvirus 6
accucaaaaaugcacaau

SEQ ID NO: 3989721 - RNA, 20 nt, Human herpesvirus 6
accuguuuuagaaacauuug

SEQ ID NO: 3989722 - RNA, 16 nt, Human herpesvirus 6
accuugucaauaaaca

SEQ ID NO: 3989723 - RNA, 11 nt, Human herpesvirus 6
acgaaaaccau

SEQ ID NO: 3989724 - RNA, 18 nt, Human herpesvirus 6
acgaaagcaguuuuacau

SEQ ID NO: 3989725 - RNA, 17 nt, Human herpesvirus 6
acgacuucgacuucaaa

SEQ ID NO: 3989726 - RNA, 16 nt, Human herpesvirus 6
acgagaacucuaaaag

SEQ ID NO: 3989727 - RNA, 23 nt, Human herpesvirus 6
auaaaugguagcuauuaugugaa

SEQ ID NO: 3989728 - RNA, 20 nt, Human herpesvirus 6
auaacuuuacauuaaacacu

SEQ ID NO: 3989729 - RNA, 13 nt, Human herpesvirus 6
auaagacacugau

SEQ ID NO: 3989730 - RNA, 22 nt, Human herpesvirus 6
auaaucuuauagcucaguguuu

SEQ ID NO: 3989731 - RNA, 20 nt, Human herpesvirus 6
auaaugauauaguuuuugcu

SEQ ID NO: 3989732 - RNA, 21 nt, Human herpesvirus 6
auaauuuuauuaacuguaaaa

SEQ ID NO: 3989733 - RNA, 16 nt, Human herpesvirus 6
auacaaaauuugaaau

SEQ ID NO: 3989734 - RNA, 14 nt, Human herpesvirus 6
auacacacccagca

SEQ ID NO: 3989735 - RNA, 15 nt, Human herpesvirus 6
auacaucguuuguug

SEQ ID NO: 3989736 - RNA, 18 nt, Human herpesvirus 6
auaccaacgugagggaaa

SEQ ID NO: 3989737 - RNA, 20 nt, Human herpesvirus 6
auacucaacccaaaaugcaa

SEQ ID NO: 3989738 - RNA, 17 nt, Human herpesvirus 6
auacuggcaaagcaaag

SEQ ID NO: 3989739 - RNA, 15 nt, Human herpesvirus 6
auacuuuugucucug

SEQ ID NO: 3989740 - RNA, 14 nt, Human herpesvirus 6
auagaggaauugcu

SEQ ID NO: 3989741 - RNA, 18 nt, Human herpesvirus 6
auaguguuuucugauugu

SEQ ID NO: 3989742 - RNA, 21 nt, Human herpesvirus 6
auauaacgauauauaaaaaac

SEQ ID NO: 3989743 - RNA, 19 nt, Human herpesvirus 6
auaucaaacuuuuuuugaa

SEQ ID NO: 3989744 - RNA, 13 nt, Human herpesvirus 6
auaucauuaaauu

SEQ ID NO: 3989745 - RNA, 15 nt, Human herpesvirus 6
auaucuugaaaucua

SEQ ID NO: 3989746 - RNA, 12 nt, Human herpesvirus 6
auaugaugcugu

SEQ ID NO: 3989747 - RNA, 14 nt, Human herpesvirus 6
auauuccagacaau

SEQ ID NO: 3989748 - RNA, 16 nt, Human herpesvirus 6
auauucuucuguaaau

SEQ ID NO: 3989749 - RNA, 23 nt, Human herpesvirus 6
auauuuaacaacaucuuaaaaga

SEQ ID NO: 3989750 - RNA, 15 nt, Human herpesvirus 6
aucaaaaaaaugaua

SEQ ID NO: 3989751 - RNA, 16 nt, Human herpesvirus 6
aucaacuauuuaacau

SEQ ID NO: 3989752 - RNA, 20 nt, Human herpesvirus 6
aucaagacuacucuggcuga

SEQ ID NO: 3989753 - RNA, 22 nt, Human herpesvirus 6
aucagugaaggcugccaugaaa

SEQ ID NO: 3989754 - RNA, 14 nt, Human herpesvirus 6
aucauauccugaaa

SEQ ID NO: 3989755 - RNA, 16 nt, Human herpesvirus 6
auccaccaaugacacc

SEQ ID NO: 3989756 - RNA, 13 nt, Human herpesvirus 6
aucccccuccccg

SEQ ID NO: 3989757 - RNA, 14 nt, Human herpesvirus 6
auccgcccuccccg

SEQ ID NO: 3989758 - RNA, 19 nt, Human herpesvirus 6
auccgcccuccccgagcac

SEQ ID NO: 3989759 - RNA, 14 nt, Human herpesvirus 6
auccucucuggaaa

SEQ ID NO: 3989760 - RNA, 15 nt, Human herpesvirus 6
aucgagaaaaggaca

SEQ ID NO: 3989761 - RNA, 14 nt, Human herpesvirus 6
aucgcccugcuccg

SEQ ID NO: 3989762 - RNA, 17 nt, Human herpesvirus 6
aucggacaaugcagaac

SEQ ID NO: 3989763 - RNA, 19 nt, Human herpesvirus 6
aucggagagacgcaccacg

SEQ ID NO: 3989764 - RNA, 14 nt, Human herpesvirus 6
aucgguggcagagg

SEQ ID NO: 3989765 - RNA, 19 nt, Human herpesvirus 6
aucguagguaauuuuuauu

SEQ ID NO: 3989766 - RNA, 12 nt, Human herpesvirus 6
aucuaauucaca

SEQ ID NO: 3989767 - RNA, 15 nt, Human herpesvirus 6
aucuaauucacauau

SEQ ID NO: 3989768 - RNA, 14 nt, Human herpesvirus 6
aucuauuauaagca

SEQ ID NO: 3989769 - RNA, 20 nt, Human herpesvirus 6
aucuccucaacacucucagu

SEQ ID NO: 3989770 - RNA, 17 nt, Human herpesvirus 6
aucuuccuuauaacaca

SEQ ID NO: 3989771 - RNA, 22 nt, Human herpesvirus 6
augaaaauaucauuaaauuguu

SEQ ID NO: 3989772 - RNA, 16 nt, Human herpesvirus 6
augaagaaguuaacua

SEQ ID NO: 3989773 - RNA, 16 nt, Human herpesvirus 6
augaauguaacugguu

SEQ ID NO: 3989774 - RNA, 16 nt, Human herpesvirus 6
augaaugugcugaugu

SEQ ID NO: 3989775 - RNA, 14 nt, Human herpesvirus 6
augacaagaaaggu

SEQ ID NO: 3989776 - RNA, 18 nt, Human herpesvirus 6
augacaccgauucagaaa

SEQ ID NO: 3989777 - RNA, 20 nt, Human herpesvirus 6
augaucaacggccuggagua

SEQ ID NO: 3989778 - RNA, 17 nt, Human herpesvirus 6
augaucagcauucacuc

SEQ ID NO: 3989779 - RNA, 14 nt, Human herpesvirus 6
augcaaaucucacu

SEQ ID NO: 3989780 - RNA, 15 nt, Human herpesvirus 6
augcaacgcaucaca

SEQ ID NO: 3989781 - RNA, 23 nt, Human herpesvirus 6
augcaagccaugacaagaaaggu

SEQ ID NO: 3989782 - RNA, 22 nt, Human herpesvirus 6
augcaguaaaugaauguguuca

SEQ ID NO: 3989783 - RNA, 14 nt, Human herpesvirus 6
augcgacugcaaga

SEQ ID NO: 3989784 - RNA, 18 nt, Human herpesvirus 6
augcgaguagauucuccg

SEQ ID NO: 3989785 - RNA, 17 nt, Human herpesvirus 6
augcggacucugacgaa

SEQ ID NO: 3989786 - RNA, 20 nt, Human herpesvirus 6
augcuuuuuaaaaaaacacu

SEQ ID NO: 3989787 - RNA, 20 nt, Human herpesvirus 6
auggacaacgguguggagac

SEQ ID NO: 3989788 - RNA, 16 nt, Human herpesvirus 6
auggauaaacgugucu

SEQ ID NO: 3989789 - RNA, 17 nt, Human herpesvirus 6
auggcagaucuugaaaa

SEQ ID NO: 3989790 - RNA, 17 nt, Human herpesvirus 6
auggugaguaccuguac

SEQ ID NO: 3989791 - RNA, 12 nt, Human herpesvirus 6
auguaaagaaau

SEQ ID NO: 3989792 - RNA, 21 nt, Human herpesvirus 6
auguaauaauugaugggaugc

SEQ ID NO: 3989793 - RNA, 17 nt, Human herpesvirus 6
auguagcauacgacaaa

SEQ ID NO: 3989794 - RNA, 16 nt, Human herpesvirus 6
augucggccucugccg

SEQ ID NO: 3989795 - RNA, 16 nt, Human herpesvirus 6
auguggagaagaucua

SEQ ID NO: 3989796 - RNA, 17 nt, Human herpesvirus 6
auguguauuauguaaau

SEQ ID NO: 3989797 - RNA, 13 nt, Human herpesvirus 6
augugucggccgu

SEQ ID NO: 3989798 - RNA, 15 nt, Human herpesvirus 6
auguguucacagagc

SEQ ID NO: 3989799 - RNA, 14 nt, Human herpesvirus 6
auguuauguaaaga

SEQ ID NO: 3989800 - RNA, 17 nt, Human herpesvirus 6
auguuuaaguaaaacaa

SEQ ID NO: 3989801 - RNA, 18 nt, Human herpesvirus 6
auguuucauccaaauaca

SEQ ID NO: 3989802 - RNA, 23 nt, Human herpesvirus 6
auuaaaguuuucauaaaaacgac

SEQ ID NO: 3989803 - RNA, 22 nt, Human herpesvirus 6
auuaaaugugaacauuauaaau

SEQ ID NO: 3989804 - RNA, 22 nt, Human herpesvirus 6
auuaauuaccuauagucaaugu

SEQ ID NO: 3989805 - RNA, 20 nt, Human herpesvirus 6
auuacacuuucuuguaguau

SEQ ID NO: 3989806 - RNA, 20 nt, Human herpesvirus 6
auuaccgguaaagaacccau

SEQ ID NO: 3989807 - RNA, 19 nt, Human herpesvirus 6
auuagaauaauuauggaca

SEQ ID NO: 3989808 - RNA, 16 nt, Human herpesvirus 6
auuaggggacagagcc

SEQ ID NO: 3989809 - RNA, 13 nt, Human herpesvirus 6
auuaucauagaca

SEQ ID NO: 3989810 - RNA, 15 nt, Human herpesvirus 6
auuaucauagacaaa

SEQ ID NO: 3989811 - RNA, 17 nt, Human herpesvirus 6
auuauguaauacaucaa

SEQ ID NO: 3989812 - RNA, 15 nt, Human herpesvirus 6
auuauuaacaaugaa

SEQ ID NO: 3989813 - RNA, 22 nt, Human herpesvirus 6
auuauuaaggccgucaaagaca

SEQ ID NO: 3989814 - RNA, 18 nt, Human herpesvirus 6
auucaaaacgacaucgcg

SEQ ID NO: 3989815 - RNA, 21 nt, Human herpesvirus 6
auuccaagacauguacaucaa

SEQ ID NO: 3989816 - RNA, 13 nt, Human herpesvirus 6
auucuauguacuu

SEQ ID NO: 3989817 - RNA, 20 nt, Human herpesvirus 6
auucugcauuuauaucaaac

SEQ ID NO: 3989818 - RNA, 13 nt, Human herpesvirus 6
auugaagaaaauu

SEQ ID NO: 3989819 - RNA, 14 nt, Human herpesvirus 6
auugcauucugggc

SEQ ID NO: 3989820 - RNA, 15 nt, Human herpesvirus 6
auugcucuauugugu

SEQ ID NO: 3989821 - RNA, 22 nt, Human herpesvirus 6
auuggcgucuaguaccuguagc

SEQ ID NO: 3989822 - RNA, 18 nt, Human herpesvirus 6
auuguaaauagguaaacu

SEQ ID NO: 3989823 - RNA, 16 nt, Human herpesvirus 6
auuguaauuuugaauu

SEQ ID NO: 3989824 - RNA, 16 nt, Human herpesvirus 6
auuguauauauagcug

SEQ ID NO: 3989825 - RNA, 12 nt, Human herpesvirus 6
auuuaaacaaca

SEQ ID NO: 3989826 - RNA, 13 nt, Human herpesvirus 6
auuucuaaacaca

SEQ ID NO: 3989827 - RNA, 16 nt, Human herpesvirus 6
auuucuauguaaacuu

SEQ ID NO: 3989828 - RNA, 21 nt, Human herpesvirus 6
auuucuuaccuuuuaagagug

SEQ ID NO: 3989829 - RNA, 19 nt, Human herpesvirus 6
auuugcucgcacgaaauga

SEQ ID NO: 3989830 - RNA, 20 nt, Human herpesvirus 6
auuuguaaaaaaacauucua

SEQ ID NO: 3989831 - RNA, 21 nt, Human herpesvirus 6
auuuuauaacgacaaaagaca

SEQ ID NO: 3989832 - RNA, 14 nt, Human herpesvirus 6
auuuuguacaguag

SEQ ID NO: 3989833 - RNA, 12 nt, Human herpesvirus 6
auuuuuuaagag

SEQ ID NO: 3989834 - RNA, 14 nt, Human herpesvirus 6
auuuuuuauuucca

SEQ ID NO: 3989835 - RNA, 21 nt, Human herpesvirus 6
caaaaagcuuuaaagcagcua

SEQ ID NO: 3989836 - RNA, 20 nt, Human herpesvirus 6
caaaacaccgguaagcaucu

SEQ ID NO: 3989837 - RNA, 14 nt, Human herpesvirus 6
caaaaccgaggcag

SEQ ID NO: 3989838 - RNA, 19 nt, Human herpesvirus 6
caaaagauuacggcaacau

SEQ ID NO: 3989839 - RNA, 20 nt, Human herpesvirus 6
caaaaugguuaugacaaagg

SEQ ID NO: 3989840 - RNA, 21 nt, Human herpesvirus 6
caaaauugggaaucaugugua

SEQ ID NO: 3989841 - RNA, 15 nt, Human herpesvirus 6
caaagaaaagaugua

SEQ ID NO: 3989842 - RNA, 13 nt, Human herpesvirus 6
caaagaaacagua

SEQ ID NO: 3989843 - RNA, 15 nt, Human herpesvirus 6
caaagaaacaguaaa

SEQ ID NO: 3989844 - RNA, 13 nt, Human herpesvirus 6
caaagagaccaau

SEQ ID NO: 3989845 - RNA, 17 nt, Human herpesvirus 6
caaauccugacuacgau

SEQ ID NO: 3989846 - RNA, 21 nt, Human herpesvirus 6
caaaucuguaagauuaaaugu

SEQ ID NO: 3989847 - RNA, 22 nt, Human herpesvirus 6
caaaugauuuuacaaagaccua

SEQ ID NO: 3989848 - RNA, 15 nt, Human herpesvirus 6
caaauugauuaugau

SEQ ID NO: 3989849 - RNA, 14 nt, Human herpesvirus 6
caacaaccacagca

SEQ ID NO: 3989850 - RNA, 15 nt, Human herpesvirus 6
caacacaccugccua

SEQ ID NO: 3989851 - RNA, 18 nt, Human herpesvirus 6
caaccugaaacuccccag

SEQ ID NO: 3989852 - RNA, 16 nt, Human herpesvirus 6
caagacgccacgggca

SEQ ID NO: 3989853 - RNA, 16 nt, Human herpesvirus 6
caagauacugguuuac

SEQ ID NO: 3989854 - RNA, 19 nt, Human herpesvirus 6
caagcacaaaaccaggaau

SEQ ID NO: 3989855 - RNA, 23 nt, Human herpesvirus 6
caaguuugaauuuauacugugug

SEQ ID NO: 3989856 - RNA, 12 nt, Human herpesvirus 6
caauaagaaaca

SEQ ID NO: 3989857 - RNA, 20 nt, Human herpesvirus 6
caaucauguuuauugucaaa

SEQ ID NO: 3989858 - RNA, 17 nt, Human herpesvirus 6
caauuacucaacauuaa

SEQ ID NO: 3989859 - RNA, 19 nt, Human herpesvirus 6
caauucauuguacgauaau

SEQ ID NO: 3989860 - RNA, 15 nt, Human herpesvirus 6
cacaagcguacacua

SEQ ID NO: 3989861 - RNA, 20 nt, Human herpesvirus 6
cacaauaagaaaacgagaga

SEQ ID NO: 3989862 - RNA, 12 nt, Human herpesvirus 6
cacaaucagaaa

SEQ ID NO: 3989863 - RNA, 16 nt, Human herpesvirus 6
cacacaauuaguccau

SEQ ID NO: 3989864 - RNA, 22 nt, Human herpesvirus 6
cacacccauggcgagaaacgcc

SEQ ID NO: 3989865 - RNA, 22 nt, Human herpesvirus 6
cacaggauuauaaaaacacacc

SEQ ID NO: 3989866 - RNA, 15 nt, Human herpesvirus 6
cacauaagacuuaua

SEQ ID NO: 3989867 - RNA, 13 nt, Human herpesvirus 6
cacaugaaaucac

SEQ ID NO: 3989868 - RNA, 19 nt, Human herpesvirus 6
caccaccgcugacaaccuc

SEQ ID NO: 3989869 - RNA, 14 nt, Human herpesvirus 6
caccaucuguugau

SEQ ID NO: 3989870 - RNA, 15 nt, Human herpesvirus 6
cacccauuuccggag

SEQ ID NO: 3989871 - RNA, 23 nt, Human herpesvirus 6
cacccauuuccggaguugcagug

SEQ ID NO: 3989872 - RNA, 15 nt, Human herpesvirus 6
caccgaaguacccau

SEQ ID NO: 3989873 - RNA, 19 nt, Human herpesvirus 6
caccgucugggacccacgg

SEQ ID NO: 3989874 - RNA, 22 nt, Human herpesvirus 6
caccgucugggacccacggugg

SEQ ID NO: 3989875 - RNA, 21 nt, Human herpesvirus 6
cacgcuuggaguuuuuuaugc

SEQ ID NO: 3989876 - RNA, 17 nt, Human herpesvirus 6
cacguuuugggaaaucu

SEQ ID NO: 3989877 - RNA, 17 nt, Human herpesvirus 6
cacucggaagaaaagcu

SEQ ID NO: 3989878 - RNA, 23 nt, Human herpesvirus 6
cacugcauuucauuccccgacca

SEQ ID NO: 3989879 - RNA, 15 nt, Human herpesvirus 6
cacuuccucacgcaa

SEQ ID NO: 3989880 - RNA, 16 nt, Human herpesvirus 6
cacuuuuaaaauaccg

SEQ ID NO: 3989881 - RNA, 20 nt, Human herpesvirus 6
cagaagagaugaaagacaga

SEQ ID NO: 3989882 - RNA, 20 nt, Human herpesvirus 6
cagaaguuucggcaacugaa

SEQ ID NO: 3989883 - RNA, 17 nt, Human herpesvirus 6
cagaccucauauaagaa

SEQ ID NO: 3989884 - RNA, 16 nt, Human herpesvirus 6
cagagaaaaaacaaag

SEQ ID NO: 3989885 - RNA, 17 nt, Human herpesvirus 6
cagaucuaucacaggcg

SEQ ID NO: 3989886 - RNA, 22 nt, Human herpesvirus 6
cagaugguuuuaagagcagaca

SEQ ID NO: 3989887 - RNA, 16 nt, Human herpesvirus 6
cagcacauaacugcau

SEQ ID NO: 3989888 - RNA, 19 nt, Human herpesvirus 6
cagcggaagugaaagcagu

SEQ ID NO: 3989889 - RNA, 20 nt, Human herpesvirus 6
cagcggaagugaaagcaguc

SEQ ID NO: 3989890 - RNA, 17 nt, Human herpesvirus 6
cagcggacagcggggug

SEQ ID NO: 3989891 - RNA, 20 nt, Human herpesvirus 6
cagcggaccaauccaugcaa

SEQ ID NO: 3989892 - RNA, 16 nt, Human herpesvirus 6
cagcuuuauucccaug

SEQ ID NO: 3989893 - RNA, 18 nt, Human herpesvirus 6
caggaucguccccuuggc

SEQ ID NO: 3989894 - RNA, 14 nt, Human herpesvirus 6
caggcaaacgagaa

SEQ ID NO: 3989895 - RNA, 20 nt, Human herpesvirus 6
caggcgguauaacuuccgga

SEQ ID NO: 3989896 - RNA, 14 nt, Human herpesvirus 6
cagggaacuugaug

SEQ ID NO: 3989897 - RNA, 21 nt, Human herpesvirus 6
cagguaauauuccgaacgaga

SEQ ID NO: 3989898 - RNA, 15 nt, Human herpesvirus 6
cagguuucuccgcac

SEQ ID NO: 3989899 - RNA, 18 nt, Human herpesvirus 6
cagucacacacagggugc

SEQ ID NO: 3989900 - RNA, 15 nt, Human herpesvirus 6
cagucugcuggaugc

SEQ ID NO: 3989901 - RNA, 17 nt, Human herpesvirus 6
cagugaaggcugccaug

SEQ ID NO: 3989902 - RNA, 23 nt, Human herpesvirus 6
caguuauacuggcaaagcaaaga

SEQ ID NO: 3989903 - RNA, 19 nt, Human herpesvirus 6
caguucaacgcugucuuuu

SEQ ID NO: 3989904 - RNA, 18 nt, Human herpesvirus 6
caguucguagaacggaaa

SEQ ID NO: 3989905 - RNA, 17 nt, Human herpesvirus 6
caguugucuggcagcua

SEQ ID NO: 3989906 - RNA, 19 nt, Human herpesvirus 6
caguuuuuuuuuucauaug

SEQ ID NO: 3989907 - RNA, 12 nt, Human herpesvirus 6
cauaaaauguuu

SEQ ID NO: 3989908 - RNA, 20 nt, Human herpesvirus 6
cauaaacagagacugguuga

SEQ ID NO: 3989909 - RNA, 14 nt, Human herpesvirus 6
cauaacgauagcag

SEQ ID NO: 3989910 - RNA, 23 nt, Human herpesvirus 6
cauaaguuaauuccagcuuucuu

SEQ ID NO: 3989911 - RNA, 17 nt, Human herpesvirus 6
cauacauuuugggcagu

SEQ ID NO: 3989912 - RNA, 16 nt, Human herpesvirus 6
cauagagcauggcgca

SEQ ID NO: 3989913 - RNA, 14 nt, Human herpesvirus 6
cauagcagcaauag

SEQ ID NO: 3989914 - RNA, 16 nt, Human herpesvirus 6
cauauaauauuuccau

SEQ ID NO: 3989915 - RNA, 20 nt, Human herpesvirus 6
cauauuguguaacucuuuuu

SEQ ID NO: 3989916 - RNA, 16 nt, Human herpesvirus 6
caucagaauccagaaa

SEQ ID NO: 3989917 - RNA, 18 nt, Human herpesvirus 6
caucauauaauauuucca

SEQ ID NO: 3989918 - RNA, 21 nt, Human herpesvirus 6
cauccaccuucccucccaccc

SEQ ID NO: 3989919 - RNA, 22 nt, Human herpesvirus 6
caucccagauacauaaacaccc

SEQ ID NO: 3989920 - RNA, 17 nt, Human herpesvirus 6
caucccuuaaaaaaaca

SEQ ID NO: 3989921 - RNA, 15 nt, Human herpesvirus 6
cauccguuaguaaau

SEQ ID NO: 3989922 - RNA, 19 nt, Human herpesvirus 6
cauccuaacaagacagaag

SEQ ID NO: 3989923 - RNA, 20 nt, Human herpesvirus 6
caucgguggcagaggggaag

SEQ ID NO: 3989924 - RNA, 23 nt, Human herpesvirus 6
caucuaucgcgcaccgcuguggc

SEQ ID NO: 3989925 - RNA, 12 nt, Human herpesvirus 6
caugaacucuca

SEQ ID NO: 3989926 - RNA, 14 nt, Human herpesvirus 6
caugacaagaaagg

SEQ ID NO: 3989927 - RNA, 19 nt, Human herpesvirus 6
caugaucugcuugauauuu

SEQ ID NO: 3989928 - RNA, 14 nt, Human herpesvirus 6
caugauugcaucaa

SEQ ID NO: 3989929 - RNA, 20 nt, Human herpesvirus 6
caugauuguaauaaaguguc

SEQ ID NO: 3989930 - RNA, 18 nt, Human herpesvirus 6
caugcauuuuguauuuau

SEQ ID NO: 3989931 - RNA, 13 nt, Human herpesvirus 6
cauguugcaguuu

SEQ ID NO: 3989932 - RNA, 22 nt, Human herpesvirus 6
cauguuuucuccucaacuaaac

SEQ ID NO: 3989933 - RNA, 20 nt, Human herpesvirus 6
cauuaacagacgaggacgga

SEQ ID NO: 3989934 - RNA, 16 nt, Human herpesvirus 6
cauuaacccuggguga

SEQ ID NO: 3989935 - RNA, 14 nt, Human herpesvirus 6
cauuauugucugca

SEQ ID NO: 3989936 - RNA, 13 nt, Human herpesvirus 6
cauucacauuacc

SEQ ID NO: 3989937 - RNA, 12 nt, Human herpesvirus 6
cauugcuuucuc

SEQ ID NO: 3989938 - RNA, 14 nt, Human herpesvirus 6
cauuuauguuucuu

SEQ ID NO: 3989939 - RNA, 20 nt, Human herpesvirus 6
cauuuguuuuuuaaagcaca

SEQ ID NO: 3989940 - RNA, 18 nt, Human herpesvirus 6
ccaaaggaaaccaccggc

SEQ ID NO: 3989941 - RNA, 16 nt, Human herpesvirus 6
ccaaccucuuccuaga

SEQ ID NO: 3989942 - RNA, 21 nt, Human herpesvirus 6
ccaaugacaccgauucagaaa

SEQ ID NO: 3989943 - RNA, 20 nt, Human herpesvirus 6
ccaauuuguguuuauuugcc

SEQ ID NO: 3989944 - RNA, 21 nt, Human herpesvirus 6
ccacagaugucccggggggaa

SEQ ID NO: 3989945 - RNA, 13 nt, Human herpesvirus 6
ccacagcagcagc

SEQ ID NO: 3989946 - RNA, 19 nt, Human herpesvirus 6
ccacaugacaccucaauua

SEQ ID NO: 3989947 - RNA, 20 nt, Human herpesvirus 6
ccacggggauuuaguacagu

SEQ ID NO: 3989948 - RNA, 13 nt, Human herpesvirus 6
ccacgguggccug

SEQ ID NO: 3989949 - RNA, 13 nt, Human herpesvirus 6
ccagaaaaguaua

SEQ ID NO: 3989950 - RNA, 20 nt, Human herpesvirus 6
ccagcauguuuucuccucaa

SEQ ID NO: 3989951 - RNA, 15 nt, Human herpesvirus 6
ccaguauugaagaaa

SEQ ID NO: 3989952 - RNA, 15 nt, Human herpesvirus 6
ccauccaccuucccu

SEQ ID NO: 3989953 - RNA, 14 nt, Human herpesvirus 6
ccaucuauacaccc

SEQ ID NO: 3989954 - RNA, 24 nt, Human herpesvirus 6
ccaucuaucgcgcaccgcuguggc

SEQ ID NO: 3989955 - RNA, 14 nt, Human herpesvirus 6
cccaccuaauaaac

SEQ ID NO: 3989956 - RNA, 16 nt, Human herpesvirus 6
cccacgguggccuggc

SEQ ID NO: 3989957 - RNA, 18 nt, Human herpesvirus 6
cucuuaacuacuucuuuc

SEQ ID NO: 3989958 - RNA, 14 nt, Human herpesvirus 6
cugaaaccaaagca

SEQ ID NO: 3989959 - RNA, 20 nt, Human herpesvirus 6
cugaaagaaaaauauuuugu

SEQ ID NO: 3989960 - RNA, 20 nt, Human herpesvirus 6
cugaaauuugagaaaguugu

SEQ ID NO: 3989961 - RNA, 13 nt, Human herpesvirus 6
cugagacagucca

SEQ ID NO: 3989962 - RNA, 20 nt, Human herpesvirus 6
cugagaugacaucugcaaaa

SEQ ID NO: 3989963 - RNA, 14 nt, Human herpesvirus 6
cugagauucacucc

SEQ ID NO: 3989964 - RNA, 24 nt, Human herpesvirus 6
cugaguucuguggccgaagaagag

SEQ ID NO: 3989965 - RNA, 19 nt, Human herpesvirus 6
cugaucacagagcagagag

SEQ ID NO: 3989966 - RNA, 19 nt, Human herpesvirus 6
cugauuuuguuuucuacgu

SEQ ID NO: 3989967 - RNA, 17 nt, Human herpesvirus 6
cugcaugguccacagau

SEQ ID NO: 3989968 - RNA, 12 nt, Human herpesvirus 6
cugccaucccuu

SEQ ID NO: 3989969 - RNA, 16 nt, Human herpesvirus 6
cugccuauacaggcaa

SEQ ID NO: 3989970 - RNA, 18 nt, Human herpesvirus 6
cugccucgguuuuguccc

SEQ ID NO: 3989971 - RNA, 12 nt, Human herpesvirus 6
cugcgucaaugc

SEQ ID NO: 3989972 - RNA, 12 nt, Human herpesvirus 6
cuggaaaacuau

SEQ ID NO: 3989973 - RNA, 18 nt, Human herpesvirus 6
cuggcaucugcggcucug

SEQ ID NO: 3989974 - RNA, 18 nt, Human herpesvirus 6
cuggccgaguuuggacau

SEQ ID NO: 3989975 - RNA, 15 nt, Human herpesvirus 6
cugggacccacggug

SEQ ID NO: 3989976 - RNA, 20 nt, Human herpesvirus 6
cugggacccacgguggccug

SEQ ID NO: 3989977 - RNA, 19 nt, Human herpesvirus 6
cuggguuucgaagaauccu

SEQ ID NO: 3989978 - RNA, 21 nt, Human herpesvirus 6
cuguacaaaaucaaacucacc

SEQ ID NO: 3989979 - RNA, 16 nt, Human herpesvirus 6
cuguauuaaugucacu

SEQ ID NO: 3989980 - RNA, 21 nt, Human herpesvirus 6
cuguggacgugccgggacccc

SEQ ID NO: 3989981 - RNA, 14 nt, Human herpesvirus 6
cugugucuguucaa

SEQ ID NO: 3989982 - RNA, 16 nt, Human herpesvirus 6
cuguguuuauguuuca

SEQ ID NO: 3989983 - RNA, 16 nt, Human herpesvirus 6
cuguucuucucagaaa

SEQ ID NO: 3989984 - RNA, 21 nt, Human herpesvirus 6
cuuaaagcguuugcaaaacug

SEQ ID NO: 3989985 - RNA, 14 nt, Human herpesvirus 6
cuuacguugaugau

SEQ ID NO: 3989986 - RNA, 17 nt, Human herpesvirus 6
cuuauaacaagcacuga

SEQ ID NO: 3989987 - RNA, 16 nt, Human herpesvirus 6
cuuaucguucacugac

SEQ ID NO: 3989988 - RNA, 18 nt, Human herpesvirus 6
cuuauguuucuaacagag

SEQ ID NO: 3989989 - RNA, 15 nt, Human herpesvirus 6
cuucaauaaaaacuc

SEQ ID NO: 3989990 - RNA, 14 nt, Human herpesvirus 6
cuucgguacaguga

SEQ ID NO: 3989991 - RNA, 18 nt, Human herpesvirus 6
cuucugcuaauucauagu

SEQ ID NO: 3989992 - RNA, 13 nt, Human herpesvirus 6
cuugaauguuuaa

SEQ ID NO: 3989993 - RNA, 23 nt, Human herpesvirus 6
cuugaauguuuaaaguuuuguga

SEQ ID NO: 3989994 - RNA, 23 nt, Human herpesvirus 6
cuugaucacaacauaaaaauaca

SEQ ID NO: 3989995 - RNA, 16 nt, Human herpesvirus 6
cuuuaacuuauguuuc

SEQ ID NO: 3989996 - RNA, 18 nt, Human herpesvirus 6
cuuuaacuuauguuucua

SEQ ID NO: 3989997 - RNA, 15 nt, Human herpesvirus 6
cuuuaacuuuuugca

SEQ ID NO: 3989998 - RNA, 20 nt, Human herpesvirus 6
cuuuaauggguuuguuuucu

SEQ ID NO: 3989999 - RNA, 15 nt, Human herpesvirus 6
cuuuacagucuuuaa

SEQ ID NO: 3990000 - RNA, 18 nt, Human herpesvirus 6
cuuucuaagacgagaugu

SEQ ID NO: 3990001 - RNA, 19 nt, Human herpesvirus 6
cuuucucuuuuuaauucca

SEQ ID NO: 3990002 - RNA, 13 nt, Human herpesvirus 6
cuuugaaggacua

SEQ ID NO: 3990003 - RNA, 21 nt, Human herpesvirus 6
cuuugucacgagucgcuucua

SEQ ID NO: 3990004 - RNA, 20 nt, Human herpesvirus 6
cuuuuauuuugggauacaua

SEQ ID NO: 3990005 - RNA, 18 nt, Human herpesvirus 6
cuuuucauaugaaaagcu

SEQ ID NO: 3990006 - RNA, 18 nt, Human herpesvirus 6
cuuuuuucggauuuugaa

SEQ ID NO: 3990007 - RNA, 13 nt, Human herpesvirus 6
gaaaaaaaaucua

SEQ ID NO: 3990008 - RNA, 18 nt, Human herpesvirus 6
gaaaaagguggcaucaga

SEQ ID NO: 3990009 - RNA, 19 nt, Human herpesvirus 6
gaaaacccagcaugaugau

SEQ ID NO: 3990010 - RNA, 21 nt, Human herpesvirus 6
gaaaacuaaaagucagugggu

SEQ ID NO: 3990011 - RNA, 17 nt, Human herpesvirus 6
gaaaacucuaaaagcug

SEQ ID NO: 3990012 - RNA, 20 nt, Human herpesvirus 6
gaaaacucuaaaagcugcua

SEQ ID NO: 3990013 - RNA, 17 nt, Human herpesvirus 6
gaaaagguguuguguuu

SEQ ID NO: 3990014 - RNA, 17 nt, Human herpesvirus 6
gaaaauguuuuucauaa

SEQ ID NO: 3990015 - RNA, 14 nt, Human herpesvirus 6
gaaaauuaaaaguc

SEQ ID NO: 3990016 - RNA, 21 nt, Human herpesvirus 6
gaaacggacacgcgcagugga

SEQ ID NO: 3990017 - RNA, 19 nt, Human herpesvirus 6
gaaaguugauacgccagaa

SEQ ID NO: 3990018 - RNA, 17 nt, Human herpesvirus 6
gaaauaaaguuuaaaga

SEQ ID NO: 3990019 - RNA, 19 nt, Human herpesvirus 6
gaaaucuacuguacaaaau

SEQ ID NO: 3990020 - RNA, 22 nt, Human herpesvirus 6
gaacaugugacacgauuucuga

SEQ ID NO: 3990021 - RNA, 14 nt, Human herpesvirus 6
gaaccaccagagac

SEQ ID NO: 3990022 - RNA, 15 nt, Human herpesvirus 6
gaacucuaaaagcug

SEQ ID NO: 3990023 - RNA, 21 nt, Human herpesvirus 6
gaacuuuguccuuacaaaucu

SEQ ID NO: 3990024 - RNA, 16 nt, Human herpesvirus 6
gaagauacgagaacaa

SEQ ID NO: 3990025 - RNA, 18 nt, Human herpesvirus 6
gaagauacgagaacaaaa

SEQ ID NO: 3990026 - RNA, 18 nt, Human herpesvirus 6
gaagcgguuagagcuggg

SEQ ID NO: 3990027 - RNA, 23 nt, Human herpesvirus 6
gaaguugguuuaaaauaucuguu

SEQ ID NO: 3990028 - RNA, 20 nt, Human herpesvirus 6
gaauaacaaacuauauugcu

SEQ ID NO: 3990029 - RNA, 19 nt, Human herpesvirus 6
gaauucguuacaaucucug

SEQ ID NO: 3990030 - RNA, 14 nt, Human herpesvirus 6
gaauugguuugcuu

SEQ ID NO: 3990031 - RNA, 17 nt, Human herpesvirus 6
gaauuuauuuucaauau

SEQ ID NO: 3990032 - RNA, 18 nt, Human herpesvirus 6
gacacgcuaaaaacagac

SEQ ID NO: 3990033 - RNA, 22 nt, Human herpesvirus 6
gacagauccgucucucagcugg

SEQ ID NO: 3990034 - RNA, 19 nt, Human herpesvirus 6
gacagcaaguugcuaccgc

SEQ ID NO: 3990035 - RNA, 22 nt, Human herpesvirus 6
gacagggggaucgacgggcagg

SEQ ID NO: 3990036 - RNA, 21 nt, Human herpesvirus 6
gacaucgagauucuuuaaaga

SEQ ID NO: 3990037 - RNA, 23 nt, Human herpesvirus 6
gaccacaccccuguacgcgcaua

SEQ ID NO: 3990038 - RNA, 17 nt, Human herpesvirus 6
gacccacgguggccugg

SEQ ID NO: 3990039 - RNA, 22 nt, Human herpesvirus 6
gacccacuccuacuauccgccc

SEQ ID NO: 3990040 - RNA, 22 nt, Human herpesvirus 6
gaccccugccgagccuguggac

SEQ ID NO: 3990041 - RNA, 20 nt, Human herpesvirus 6
gaccuggccgaguuuggaca

SEQ ID NO: 3990042 - RNA, 15 nt, Human herpesvirus 6
gaccuggcggacacc

SEQ ID NO: 3990043 - RNA, 22 nt, Human herpesvirus 6
gacgaaagcaguuuuacaucau

SEQ ID NO: 3990044 - RNA, 13 nt, Human herpesvirus 6
gacgaagaggaag

SEQ ID NO: 3990045 - RNA, 17 nt, Human herpesvirus 6
gacgcagauuuacggca

SEQ ID NO: 3990046 - RNA, 17 nt, Human herpesvirus 6
gacgccuugauguuucc

SEQ ID NO: 3990047 - RNA, 14 nt, Human herpesvirus 6
gacgugcugcaagg

SEQ ID NO: 3990048 - RNA, 21 nt, Human herpesvirus 6
gacucauagauuucauacugu

SEQ ID NO: 3990049 - RNA, 17 nt, Human herpesvirus 6
gacucccggcccagaga

SEQ ID NO: 3990050 - RNA, 23 nt, Human herpesvirus 6
gacucuauggugaguaccuguac

SEQ ID NO: 3990051 - RNA, 15 nt, Human herpesvirus 6
gacuguguguugaau

SEQ ID NO: 3990052 - RNA, 17 nt, Human herpesvirus 6
gagaacucuaaaagcug

SEQ ID NO: 3990053 - RNA, 20 nt, Human herpesvirus 6
gagaacucuaaaagcugcua

SEQ ID NO: 3990054 - RNA, 20 nt, Human herpesvirus 6
gagaauaggaaaagauaggc

SEQ ID NO: 3990055 - RNA, 20 nt, Human herpesvirus 6
gagacagcggacagcggggu

SEQ ID NO: 3990056 - RNA, 18 nt, Human herpesvirus 6
gagagacgcaccacggcu

SEQ ID NO: 3990057 - RNA, 22 nt, Human herpesvirus 6
gagauaaaaagagaggaaagaa

SEQ ID NO: 3990058 - RNA, 23 nt, Human herpesvirus 6
gagauacguguuuuugaugugcc

SEQ ID NO: 3990059 - RNA, 20 nt, Human herpesvirus 6
gagaucuggugaauguuucu

SEQ ID NO: 3990060 - RNA, 23 nt, Human herpesvirus 6
gagauucuuuaacuuauguuucu

SEQ ID NO: 3990061 - RNA, 11 nt, Human herpesvirus 6
gagauuucagg

SEQ ID NO: 3990062 - RNA, 20 nt, Human herpesvirus 6
gagccuguggacgugccggg

SEQ ID NO: 3990063 - RNA, 18 nt, Human herpesvirus 6
gagcgggcuaauguaugc

SEQ ID NO: 3990064 - RNA, 22 nt, Human herpesvirus 6
gaggcgacgaaagaggacggga

SEQ ID NO: 3990065 - RNA, 14 nt, Human herpesvirus 6
gaggggaacacgcc

SEQ ID NO: 3990066 - RNA, 18 nt, Human herpesvirus 6
gaguaacggaaaacgagu

SEQ ID NO: 3990067 - RNA, 20 nt, Human herpesvirus 6
gagucuggcaucugcggcuc

SEQ ID NO: 3990068 - RNA, 19 nt, Human herpesvirus 6
gauagcagaauagagagaa

SEQ ID NO: 3990069 - RNA, 14 nt, Human herpesvirus 6
gauauuaacacagu

SEQ ID NO: 3990070 - RNA, 11 nt, Human herpesvirus 6
gaucagugggu

SEQ ID NO: 3990071 - RNA, 17 nt, Human herpesvirus 6
ugcuuuacaucgaauuu

SEQ ID NO: 3990072 - RNA, 19 nt, Human herpesvirus 6
uggaaaacuaugugcauuc

SEQ ID NO: 3990073 - RNA, 19 nt, Human herpesvirus 6
uggaaaucaguucuccggg

SEQ ID NO: 3990074 - RNA, 17 nt, Human herpesvirus 6
uggaagaaccaaagaca

SEQ ID NO: 3990075 - RNA, 17 nt, Human herpesvirus 6
uggacacgguaccuguu

SEQ ID NO: 3990076 - RNA, 19 nt, Human herpesvirus 6
uggaggccuucaugagcca

SEQ ID NO: 3990077 - RNA, 14 nt, Human herpesvirus 6
uggaucgaaugcua

SEQ ID NO: 3990078 - RNA, 21 nt, Human herpesvirus 6
uggaugaucgccacaugugua

SEQ ID NO: 3990079 - RNA, 16 nt, Human herpesvirus 6
uggcacggugccaaag

SEQ ID NO: 3990080 - RNA, 20 nt, Human herpesvirus 6
uggccguuacaguuuccgcu

SEQ ID NO: 3990081 - RNA, 18 nt, Human herpesvirus 6
uggcgcgcauguugcagu

SEQ ID NO: 3990082 - RNA, 19 nt, Human herpesvirus 6
uggcgcgcauguugcaguu

SEQ ID NO: 3990083 - RNA, 15 nt, Human herpesvirus 6
ugggggguuccuccg

SEQ ID NO: 3990084 - RNA, 18 nt, Human herpesvirus 6
ugggugaguuuuaucacu

SEQ ID NO: 3990085 - RNA, 15 nt, Human herpesvirus 6
uggugcgaucgagca

SEQ ID NO: 3990086 - RNA, 12 nt, Human herpesvirus 6
ugguuugcuucg

SEQ ID NO: 3990087 - RNA, 22 nt, Human herpesvirus 6
uguaaagaaguaucgagauuuu

SEQ ID NO: 3990088 - RNA, 15 nt, Human herpesvirus 6
uguaaauacccuggg

SEQ ID NO: 3990089 - RNA, 20 nt, Human herpesvirus 6
uguaaauaugcuuauacugu

SEQ ID NO: 3990090 - RNA, 18 nt, Human herpesvirus 6
uguaaaucaaaaaaauga

SEQ ID NO: 3990091 - RNA, 17 nt, Human herpesvirus 6
uguaagaagaaaaaaac

SEQ ID NO: 3990092 - RNA, 19 nt, Human herpesvirus 6
uguaauacaucaacaaaca

SEQ ID NO: 3990093 - RNA, 17 nt, Human herpesvirus 6
uguacaauauaauuucu

SEQ ID NO: 3990094 - RNA, 22 nt, Human herpesvirus 6
uguagggugcuuugcuucagug

SEQ ID NO: 3990095 - RNA, 20 nt, Human herpesvirus 6
uguaguuuuuaaauccuguu

SEQ ID NO: 3990096 - RNA, 15 nt, Human herpesvirus 6
uguauauguaaauaa

SEQ ID NO: 3990097 - RNA, 15 nt, Human herpesvirus 6
uguaucguuugagau

SEQ ID NO: 3990098 - RNA, 16 nt, Human herpesvirus 6
uguccuuacaaaucuu

SEQ ID NO: 3990099 - RNA, 22 nt, Human herpesvirus 6
ugucggaggguuuuuucaucau

SEQ ID NO: 3990100 - RNA, 23 nt, Human herpesvirus 6
ugucgugcgccuuguguaucugu

SEQ ID NO: 3990101 - RNA, 22 nt, Human herpesvirus 6
ugucuauuuuuaaaccuguugu

SEQ ID NO: 3990102 - RNA, 19 nt, Human herpesvirus 6
ugucucacaagcuguccau

SEQ ID NO: 3990103 - RNA, 18 nt, Human herpesvirus 6
ugugacgaagauggaugu

SEQ ID NO: 3990104 - RNA, 19 nt, Human herpesvirus 6
ugugacuacguuuuguguu

SEQ ID NO: 3990105 - RNA, 20 nt, Human herpesvirus 6
ugugaugcguugcauuuugg

SEQ ID NO: 3990106 - RNA, 22 nt, Human herpesvirus 6
uguguauauugaauuguauaua

SEQ ID NO: 3990107 - RNA, 13 nt, Human herpesvirus 6
ugugucaugauua

SEQ ID NO: 3990108 - RNA, 17 nt, Human herpesvirus 6
uguguguuauaaggaag

SEQ ID NO: 3990109 - RNA, 17 nt, Human herpesvirus 6
uguguuagcuuugcgau

SEQ ID NO: 3990110 - RNA, 13 nt, Human herpesvirus 6
uguuagaauguau

SEQ ID NO: 3990111 - RNA, 16 nt, Human herpesvirus 6
uguucaacgucuucaa

SEQ ID NO: 3990112 - RNA, 19 nt, Human herpesvirus 6
uguucagucuaugcagcgc

SEQ ID NO: 3990113 - RNA, 16 nt, Human herpesvirus 6
uguucuagugcguauu

SEQ ID NO: 3990114 - RNA, 14 nt, Human herpesvirus 6
uguuguguuuacau

SEQ ID NO: 3990115 - RNA, 14 nt, Human herpesvirus 6
uguuguuuuuugga

SEQ ID NO: 3990116 - RNA, 13 nt, Human herpesvirus 6
uguuuccagaaua

SEQ ID NO: 3990117 - RNA, 18 nt, Human herpesvirus 6
uguuuccagagcauacau

SEQ ID NO: 3990118 - RNA, 12 nt, Human herpesvirus 6
uguuucugauuu

SEQ ID NO: 3990119 - RNA, 18 nt, Human herpesvirus 6
uguuucugauuuguucua

SEQ ID NO: 3990120 - RNA, 13 nt, Human herpesvirus 6
uguuuuguaugaa

SEQ ID NO: 3990121 - RNA, 15 nt, Human herpesvirus 6
uguuuuugcauguga

SEQ ID NO: 3990122 - RNA, 13 nt, Human herpesvirus 6
uguuuuuucaaaa

SEQ ID NO: 3990123 - RNA, 16 nt, Human herpesvirus 6
uuaaagauguguuaaa

SEQ ID NO: 3990124 - RNA, 17 nt, Human herpesvirus 6
uuaaauguuacugaacu

SEQ ID NO: 3990125 - RNA, 16 nt, Human herpesvirus 6
uuaacagugucuguuu

SEQ ID NO: 3990126 - RNA, 17 nt, Human herpesvirus 6
uuaacagugucuguuuu

SEQ ID NO: 3990127 - RNA, 22 nt, Human herpesvirus 6
uuaacaucgugauaacaaugca

SEQ ID NO: 3990128 - RNA, 19 nt, Human herpesvirus 6
uuaacgcgucaacaaacaa

SEQ ID NO: 3990129 - RNA, 13 nt, Human herpesvirus 6
uuaaucggaaugu

SEQ ID NO: 3990130 - RNA, 16 nt, Human herpesvirus 6
uuaaugagaggacagu

SEQ ID NO: 3990131 - RNA, 22 nt, Human herpesvirus 6
uuaaugcauucacaaggaaugu

SEQ ID NO: 3990132 - RNA, 17 nt, Human herpesvirus 6
uuaauguugaguaauug

SEQ ID NO: 3990133 - RNA, 14 nt, Human herpesvirus 6
uuacauauagucaa

SEQ ID NO: 3990134 - RNA, 12 nt, Human herpesvirus 6
uuacuaguuuuc

SEQ ID NO: 3990135 - RNA, 15 nt, Human herpesvirus 6
uuacuuaaacggaau

SEQ ID NO: 3990136 - RNA, 22 nt, Human herpesvirus 6
uuacuugaaaaaguaguugcua

SEQ ID NO: 3990137 - RNA, 17 nt, Human herpesvirus 6
uuauagcucaguguuug

SEQ ID NO: 3990138 - RNA, 20 nt, Human herpesvirus 6
uuaucgcaacacacagugaa

SEQ ID NO: 3990139 - RNA, 22 nt, Human herpesvirus 6
uuaucgcccgguaaauuacuag

SEQ ID NO: 3990140 - RNA, 23 nt, Human herpesvirus 6
uuauggacaacgguguggagaca

SEQ ID NO: 3990141 - RNA, 15 nt, Human herpesvirus 6
uuauuaaauguuacu

SEQ ID NO: 3990142 - RNA, 16 nt, Human herpesvirus 6
uucaaaauaaauacua

SEQ ID NO: 3990143 - RNA, 18 nt, Human herpesvirus 6
uucaaccuguuuccagaa

SEQ ID NO: 3990144 - RNA, 14 nt, Human herpesvirus 6
uucaacgucuucaa

SEQ ID NO: 3990145 - RNA, 20 nt, Human herpesvirus 6
uucaagguggagguuucuuu

SEQ ID NO: 3990146 - RNA, 16 nt, Human herpesvirus 6
uucaauaaaaacucaa

SEQ ID NO: 3990147 - RNA, 23 nt, Human herpesvirus 6
uucaauccggaguuaaguaaacu

SEQ ID NO: 3990148 - RNA, 15 nt, Human herpesvirus 6
uucaguaucuguuuu

SEQ ID NO: 3990149 - RNA, 15 nt, Human herpesvirus 6
uucaugauauuccag

SEQ ID NO: 3990150 - RNA, 15 nt, Human herpesvirus 6
uucauuuguuuuuua

SEQ ID NO: 3990151 - RNA, 22 nt, Human herpesvirus 6
uuccauugucgccucgaaacaa

SEQ ID NO: 3990152 - RNA, 19 nt, Human herpesvirus 6
uucccaccuaauaaacugu

SEQ ID NO: 3990153 - RNA, 21 nt, Human herpesvirus 6
uucccgugcuccguaagaaau

SEQ ID NO: 3990154 - RNA, 14 nt, Human herpesvirus 6
uucccuuuuacaau

SEQ ID NO: 3990155 - RNA, 16 nt, Human herpesvirus 6
uuccgauaguagauuu

SEQ ID NO: 3990156 - RNA, 17 nt, Human herpesvirus 6
uuccuuaauucuaaaua

SEQ ID NO: 3990157 - RNA, 15 nt, Human herpesvirus 6
uucgcagaggacagu

SEQ ID NO: 3990158 - RNA, 19 nt, Human herpesvirus 6
uucuaagacgagauguuuc

SEQ ID NO: 3990159 - RNA, 14 nt, Human herpesvirus 6
uucuacaaaaauac

SEQ ID NO: 3990160 - RNA, 21 nt, Human herpesvirus 6
uucuaccguagaccguuucuu

SEQ ID NO: 3990161 - RNA, 23 nt, Human herpesvirus 6
uucucggaaaacuaaaagucagu

SEQ ID NO: 3990162 - RNA, 21 nt, Human herpesvirus 6
uucucugacuauuucaaaaga

SEQ ID NO: 3990163 - RNA, 17 nt, Human herpesvirus 6
uucucugcaaaacaaag

SEQ ID NO: 3990164 - RNA, 20 nt, Human herpesvirus 6
uucucuuuuuuuuaaugcaa

SEQ ID NO: 3990165 - RNA, 17 nt, Human herpesvirus 6
uucuguuuugagagcua

SEQ ID NO: 3990166 - RNA, 13 nt, Human herpesvirus 6
uucuucuguaaau

SEQ ID NO: 3990167 - RNA, 22 nt, Human herpesvirus 6
uugaauaauaagccuaagaaau

SEQ ID NO: 3990168 - RNA, 17 nt, Human herpesvirus 6
uugacgguuuauaugca

SEQ ID NO: 3990169 - RNA, 13 nt, Human herpesvirus 6
uugauaguacuua

SEQ ID NO: 3990170 - RNA, 15 nt, Human herpesvirus 6
uugauguauggagau

SEQ ID NO: 3990171 - RNA, 14 nt, Human herpesvirus 6
uugcaaccaauaaa

SEQ ID NO: 3990172 - RNA, 16 nt, Human herpesvirus 6
uugcaagcagcggcga

SEQ ID NO: 3990173 - RNA, 14 nt, Human herpesvirus 6
uugcagaucuaauu

SEQ ID NO: 3990174 - RNA, 14 nt, Human herpesvirus 6
uugcaguucucgga

SEQ ID NO: 3990175 - RNA, 17 nt, Human herpesvirus 6
uuggauucaggcuuuaa

SEQ ID NO: 3990176 - RNA, 22 nt, Human herpesvirus 6
uuggcgccaaaaaaauacagua

SEQ ID NO: 3990177 - RNA, 19 nt, Human herpesvirus 6
uugggaccuucaggaacaa

SEQ ID NO: 3990178 - RNA, 15 nt, Human herpesvirus 6
uugggauguccauuu

SEQ ID NO: 3990179 - RNA, 21 nt, Human herpesvirus 6
uuguaaauagguaaacuguuu

SEQ ID NO: 3990180 - RNA, 23 nt, Human herpesvirus 6
uuguaaauagguaaacuguuuuu

SEQ ID NO: 3990181 - RNA, 18 nt, Human herpesvirus 6
uuguaauuucuauguaaa

SEQ ID NO: 3990182 - RNA, 14 nt, Human herpesvirus 6
uuguacaaacuuuu

SEQ ID NO: 3990183 - RNA, 21 nt, Human herpesvirus 6
uuguacaggaggcuauggcuu

SEQ ID NO: 3990184 - RNA, 21 nt, Human herpesvirus 6
uuguauauuuuuuuuuauuuu

SEQ ID NO: 3990185 - RNA, 15 nt, Human herpesvirus 6
uugugcgaauugugu

SEQ ID NO: 3990186 - RNA, 14 nt, Human herpesvirus 6B
acgccuauucuaau

SEQ ID NO: 3990187 - RNA, 18 nt, Human herpesvirus 6B
acgccuauucuaauuaua

SEQ ID NO: 3990188 - RNA, 21 nt, Human herpesvirus 6B
acgcgacacggugagucgcau

SEQ ID NO: 3990189 - RNA, 12 nt, Human herpesvirus 6B
acgcgccacagc

SEQ ID NO: 3990190 - RNA, 16 nt, Human herpesvirus 6B
acgcgccgacucucuc

SEQ ID NO: 3990191 - RNA, 15 nt, Human herpesvirus 6B
acgcggcaaccgcag

SEQ ID NO: 3990192 - RNA, 17 nt, Human herpesvirus 6B
acgcguguuuuggaauu

SEQ ID NO: 3990193 - RNA, 15 nt, Human herpesvirus 6B
acgcuugcuguaaag

SEQ ID NO: 3990194 - RNA, 20 nt, Human herpesvirus 6B
acgcuugcuguaaaguauug

SEQ ID NO: 3990195 - RNA, 16 nt, Human herpesvirus 6B
acggauucgaucgaga

SEQ ID NO: 3990196 - RNA, 16 nt, Human herpesvirus 6B
acggcagcggggaagg

SEQ ID NO: 3990197 - RNA, 15 nt, Human herpesvirus 6B
acggcgucacacagc

SEQ ID NO: 3990198 - RNA, 21 nt, Human herpesvirus 6B
acgucauguacggacagguuu

SEQ ID NO: 3990199 - RNA, 22 nt, Human herpesvirus 6B
acgucuccaucucuagaaucuu

SEQ ID NO: 3990200 - RNA, 14 nt, Human herpesvirus 6B
acgugaauuucaua

SEQ ID NO: 3990201 - RNA, 20 nt, Human herpesvirus 6B
acgugacuguaucaaauuua

SEQ ID NO: 3990202 - RNA, 19 nt, Human herpesvirus 6B
acguggccgucuccugcaa

SEQ ID NO: 3990203 - RNA, 19 nt, Human herpesvirus 6B
acgugggguaaaaauguua

SEQ ID NO: 3990204 - RNA, 14 nt, Human herpesvirus 6B
acuaaauuuuaugc

SEQ ID NO: 3990205 - RNA, 17 nt, Human herpesvirus 6B
acuaaugcgauuucacc

SEQ ID NO: 3990206 - RNA, 12 nt, Human herpesvirus 6B
acuaauguggau

SEQ ID NO: 3990207 - RNA, 12 nt, Human herpesvirus 6B
acuaccgaugcu

SEQ ID NO: 3990208 - RNA, 14 nt, Human herpesvirus 6B
acuaugagauuggu

SEQ ID NO: 3990209 - RNA, 12 nt, Human herpesvirus 6B
acuauguggaaa

SEQ ID NO: 3990210 - RNA, 18 nt, Human herpesvirus 6B
acucaagaauuacugcug

SEQ ID NO: 3990211 - RNA, 23 nt, Human herpesvirus 6B
acuccguauaugcuuuacuucug

SEQ ID NO: 3990212 - RNA, 14 nt, Human herpesvirus 6B
acucgauuugauaa

SEQ ID NO: 3990213 - RNA, 23 nt, Human herpesvirus 6B
acucucuacguuuacaucaacua

SEQ ID NO: 3990214 - RNA, 18 nt, Human herpesvirus 6B
acugaucgguauuugcga

SEQ ID NO: 3990215 - RNA, 19 nt, Human herpesvirus 6B
acugcacagaaucgagauc

SEQ ID NO: 3990216 - RNA, 22 nt, Human herpesvirus 6B
acugcuccagucauaggcacuu

SEQ ID NO: 3990217 - RNA, 16 nt, Human herpesvirus 6B
acugcugcgaucuuug

SEQ ID NO: 3990218 - RNA, 23 nt, Human herpesvirus 6B
acuggagcuagagaaaauuauag

SEQ ID NO: 3990219 - RNA, 20 nt, Human herpesvirus 6B
acuguaaaaaaaauucucug

SEQ ID NO: 3990220 - RNA, 18 nt, Human herpesvirus 6B
acuguauggcaaaaccaa

SEQ ID NO: 3990221 - RNA, 15 nt, Human herpesvirus 6B
acugugaaaagugcu

SEQ ID NO: 3990222 - RNA, 11 nt, Human herpesvirus 6B
acuucuaaaau

SEQ ID NO: 3990223 - RNA, 14 nt, Human herpesvirus 6B
acuuuaccucugcu

SEQ ID NO: 3990224 - RNA, 13 nt, Human herpesvirus 6B
acuuuuucaauug

SEQ ID NO: 3990225 - RNA, 16 nt, Human herpesvirus 6B
acuuuuuucuaaaacc

SEQ ID NO: 3990226 - RNA, 14 nt, Human herpesvirus 6B
agaaaaagaacugu

SEQ ID NO: 3990227 - RNA, 21 nt, Human herpesvirus 6B
agaaagcguguucaaaaaugu

SEQ ID NO: 3990228 - RNA, 13 nt, Human herpesvirus 6B
agaaaggcggaga

SEQ ID NO: 3990229 - RNA, 19 nt, Human herpesvirus 6B
agaaauguugccuuuguaa

SEQ ID NO: 3990230 - RNA, 11 nt, Human herpesvirus 6B
agaaauguuuu

SEQ ID NO: 3990231 - RNA, 19 nt, Human herpesvirus 6B
agaaauuuaauugcaauuu

SEQ ID NO: 3990232 - RNA, 17 nt, Human herpesvirus 6B
agaaauuuuuuagaaca

SEQ ID NO: 3990233 - RNA, 21 nt, Human herpesvirus 6B
agaacagaggaagaaaggagu

SEQ ID NO: 3990234 - RNA, 18 nt, Human herpesvirus 6B
agaacagcgcauaaauaa

SEQ ID NO: 3990235 - RNA, 17 nt, Human herpesvirus 6B
agaagaucuaaugaaug

SEQ ID NO: 3990236 - RNA, 22 nt, Human herpesvirus 6B
agaagccaccaauagugggaga

SEQ ID NO: 3990237 - RNA, 13 nt, Human herpesvirus 6B
agaaguuacaaga

SEQ ID NO: 3990238 - RNA, 16 nt, Human herpesvirus 6B
agaauacgcuguguuu

SEQ ID NO: 3990239 - RNA, 15 nt, Human herpesvirus 6B
agaaucuuaaaggau

SEQ ID NO: 3990240 - RNA, 19 nt, Human herpesvirus 6B
agaaugaauuugagaagau

SEQ ID NO: 3990241 - RNA, 14 nt, Human herpesvirus 6B
agaauuccaaggcu

SEQ ID NO: 3990242 - RNA, 17 nt, Human herpesvirus 6B
agacaaaaacaugugcu

SEQ ID NO: 3990243 - RNA, 22 nt, Human herpesvirus 6B
agacaagggugugaaacuauga

SEQ ID NO: 3990244 - RNA, 12 nt, Human herpesvirus 6B
agacagaaauuu

SEQ ID NO: 3990245 - RNA, 21 nt, Human herpesvirus 6B
agacagaguucgguccaagga

SEQ ID NO: 3990246 - RNA, 21 nt, Human herpesvirus 6B
agacaguuuacuaaaaaagau

SEQ ID NO: 3990247 - RNA, 19 nt, Human herpesvirus 6B
agaccgcuauggcagaaag

SEQ ID NO: 3990248 - RNA, 15 nt, Human herpesvirus 6B
agacgccuauucuaa

SEQ ID NO: 3990249 - RNA, 18 nt, Human herpesvirus 6B
agacuaaacuuaacuuau

SEQ ID NO: 3990250 - RNA, 17 nt, Human herpesvirus 6B
agacugcugcuguggag

SEQ ID NO: 3990251 - RNA, 19 nt, Human herpesvirus 6B
agacuuugcugauucuguu

SEQ ID NO: 3990252 - RNA, 20 nt, Human herpesvirus 6B
agagacuuugcugauucugu

SEQ ID NO: 3990253 - RNA, 22 nt, Human herpesvirus 6B
agagcugaugauuugaaauguu

SEQ ID NO: 3990254 - RNA, 22 nt, Human herpesvirus 6B
agagggagaaacggacacgcgc

SEQ ID NO: 3990255 - RNA, 20 nt, Human herpesvirus 6B
agaggguuccuccgcgggac

SEQ ID NO: 3990256 - RNA, 21 nt, Human herpesvirus 6B
agagguuuuaccuguugguua

SEQ ID NO: 3990257 - RNA, 14 nt, Human herpesvirus 6B
agaguacggaagug

SEQ ID NO: 3990258 - RNA, 22 nt, Human herpesvirus 6B
agaguacuuucguuuacgaauu

SEQ ID NO: 3990259 - RNA, 20 nt, Human herpesvirus 6B
agaguggcgauaauguuauc

SEQ ID NO: 3990260 - RNA, 14 nt, Human herpesvirus 6B
agaguuucauccug

SEQ ID NO: 3990261 - RNA, 12 nt, Human herpesvirus 6B
agauacagguuu

SEQ ID NO: 3990262 - RNA, 20 nt, Human herpesvirus 6B
agauauauugguagacagga

SEQ ID NO: 3990263 - RNA, 23 nt, Human herpesvirus 6B
agauaucugaaacacuaagugcc

SEQ ID NO: 3990264 - RNA, 18 nt, Human herpesvirus 6B
agaucacaacaaacaugu

SEQ ID NO: 3990265 - RNA, 12 nt, Human herpesvirus 6B
agaucaucgcca

SEQ ID NO: 3990266 - RNA, 13 nt, Human herpesvirus 6B
agaucauggugau

SEQ ID NO: 3990267 - RNA, 15 nt, Human herpesvirus 6B
agaucuggauaaaga

SEQ ID NO: 3990268 - RNA, 17 nt, Human herpesvirus 6B
agaucuggauaaagaua

SEQ ID NO: 3990269 - RNA, 15 nt, Human herpesvirus 6B
agaucuugaaaagcc

SEQ ID NO: 3990270 - RNA, 12 nt, Human herpesvirus 6B
agaugcaaaaua

SEQ ID NO: 3990271 - RNA, 14 nt, Human herpesvirus 6B
agauggcaaaacaa

SEQ ID NO: 3990272 - RNA, 18 nt, Human herpesvirus 6B
agauguguuaaagaaugc

SEQ ID NO: 3990273 - RNA, 20 nt, Human herpesvirus 6B
agauucauaauaggcaauuu

SEQ ID NO: 3990274 - RNA, 19 nt, Human herpesvirus 6B
agauuccgucaucuagaga

SEQ ID NO: 3990275 - RNA, 23 nt, Human herpesvirus 6B
agauuccgucaucuagagaauau

SEQ ID NO: 3990276 - RNA, 11 nt, Human herpesvirus 6B
agauuuacaga

SEQ ID NO: 3990277 - RNA, 21 nt, Human herpesvirus 6B
agcaaauuuaguuaauucucg

SEQ ID NO: 3990278 - RNA, 14 nt, Human herpesvirus 6B
agcaagaaaaagag

SEQ ID NO: 3990279 - RNA, 16 nt, Human herpesvirus 6B
agcaggagaaaaauuu

SEQ ID NO: 3990280 - RNA, 21 nt, Human herpesvirus 6B
agcauccacccugauucucuu

SEQ ID NO: 3990281 - RNA, 19 nt, Human herpesvirus 6B
agccccugcuugaaagagu

SEQ ID NO: 3990282 - RNA, 18 nt, Human herpesvirus 6B
agcccugagagcaggagc

SEQ ID NO: 3990283 - RNA, 15 nt, Human herpesvirus 6B
agccgacuauggaug

SEQ ID NO: 3990284 - RNA, 15 nt, Human herpesvirus 6B
agccggagcccugag

SEQ ID NO: 3990285 - RNA, 18 nt, Human herpesvirus 6B
agccgggagauuccucug

SEQ ID NO: 3990286 - RNA, 23 nt, Human herpesvirus 6B
agccguuucguucccucucaaac

SEQ ID NO: 3990287 - RNA, 19 nt, Human herpesvirus 6B
agcgcaucugccgaaagcu

SEQ ID NO: 3990288 - RNA, 17 nt, Human herpesvirus 6B
agcuagacgugucuuca

SEQ ID NO: 3990289 - RNA, 15 nt, Human herpesvirus 6B
agcuaucggacaggc

SEQ ID NO: 3990290 - RNA, 15 nt, Human herpesvirus 6B
agcucuacacagagu

SEQ ID NO: 3990291 - RNA, 20 nt, Human herpesvirus 6B
agcucuguucucucccacuc

SEQ ID NO: 3990292 - RNA, 14 nt, Human herpesvirus 6B
agcugacaucugca

SEQ ID NO: 3990293 - RNA, 14 nt, Human herpesvirus 6B
agcugaugauuuga

SEQ ID NO: 3990294 - RNA, 18 nt, Human herpesvirus 6B
agcugcuaacggagcaac

SEQ ID NO: 3990295 - RNA, 23 nt, Human herpesvirus 6B
agcugcuaacggagcaaccgcag

SEQ ID NO: 3990296 - RNA, 21 nt, Human herpesvirus 6B
agcuuguuaugacaaaaccau

SEQ ID NO: 3990297 - RNA, 16 nt, Human herpesvirus 6B
agcuuucauaagcucu

SEQ ID NO: 3990298 - RNA, 16 nt, Human herpesvirus 6B
aggaaauaccaaagaa

SEQ ID NO: 3990299 - RNA, 12 nt, Human herpesvirus 6B
aggaagaggagg

SEQ ID NO: 3990300 - RNA, 19 nt, Human herpesvirus 6B
aggagaaaaauuugauaua

SEQ ID NO: 3990301 - RNA, 13 nt, Human herpesvirus 6B
aggagaagaacag

SEQ ID NO: 3990302 - RNA, 9 nt, Human herpesvirus 6B
aggagaggg

SEQ ID NO: 3990303 - RNA, 17 nt, Human herpesvirus 6B
aggaggaggagagggag

SEQ ID NO: 3990304 - RNA, 15 nt, Human herpesvirus 6B
aggcgaacuaagaaa

SEQ ID NO: 3990305 - RNA, 19 nt, Human herpesvirus 6B
aggcgaagauacuuucaau

SEQ ID NO: 3990306 - RNA, 17 nt, Human herpesvirus 6B
aggcgagauuuggugga

SEQ ID NO: 3990307 - RNA, 20 nt, Human herpesvirus 6B
aggcgcagcagcagcuccaa

SEQ ID NO: 3990308 - RNA, 22 nt, Human herpesvirus 6B
aggcguagaccuuugcgcaggc

SEQ ID NO: 3990309 - RNA, 19 nt, Human herpesvirus 6B
aggcuuuauggagauuuga

SEQ ID NO: 3990310 - RNA, 18 nt, Human herpesvirus 6B
agggaagccagccgcccu

SEQ ID NO: 3990311 - RNA, 19 nt, Human herpesvirus 6B
agggaauaacagaugagga

SEQ ID NO: 3990312 - RNA, 21 nt, Human herpesvirus 6B
agggacccacacgcggggauc

SEQ ID NO: 3990313 - RNA, 22 nt, Human herpesvirus 6B
agggauucguaguuuaugaaau

SEQ ID NO: 3990314 - RNA, 15 nt, Human herpesvirus 6B
agggcagagagccgc

SEQ ID NO: 3990315 - RNA, 13 nt, Human herpesvirus 6B
agggcgggcggac

SEQ ID NO: 3990316 - RNA, 18 nt, Human herpesvirus 6B
aggggcuaccgucuugga

SEQ ID NO: 3990317 - RNA, 19 nt, Human herpesvirus 6B
aggguuccuccgcgggacc

SEQ ID NO: 3990318 - RNA, 23 nt, Human herpesvirus 6B
agguaucugccccccuucaucca

SEQ ID NO: 3990319 - RNA, 14 nt, Human herpesvirus 6B
aggucaaaaaacuc

SEQ ID NO: 3990320 - RNA, 15 nt, Human herpesvirus 6B
agguccgacacgccc

SEQ ID NO: 3990321 - RNA, 15 nt, Human herpesvirus 6B
aggugauuugaacag

SEQ ID NO: 3990322 - RNA, 18 nt, Human herpesvirus 6B
aggugauuugaacagaga

SEQ ID NO: 3990323 - RNA, 20 nt, Human herpesvirus 6B
aggugauuuuuauuguaaac

SEQ ID NO: 3990324 - RNA, 17 nt, Human herpesvirus 6B
agguuacaaaggggcua

SEQ ID NO: 3990325 - RNA, 16 nt, Human herpesvirus 6B
agguucagacugcugc

SEQ ID NO: 3990326 - RNA, 15 nt, Human herpesvirus 6B
agguuuuuucacccc

SEQ ID NO: 3990327 - RNA, 21 nt, Human herpesvirus 6B
aguaacggaaaaauuuuacaa

SEQ ID NO: 3990328 - RNA, 14 nt, Human herpesvirus 6B
aguaccgaauaaaa

SEQ ID NO: 3990329 - RNA, 19 nt, Human herpesvirus 6B
aguaccucuaugauacuuu

SEQ ID NO: 3990330 - RNA, 18 nt, Human herpesvirus 6B
aguaucagcuaaaaauau

SEQ ID NO: 3990331 - RNA, 16 nt, Human herpesvirus 6B
aguauguuuuguacaa

SEQ ID NO: 3990332 - RNA, 17 nt, Human herpesvirus 6B
aguauucgugugugaaa

SEQ ID NO: 3990333 - RNA, 21 nt, Human herpesvirus 6B
aguccaucgaguaucgugucu

SEQ ID NO: 3990334 - RNA, 19 nt, Human herpesvirus 6B
agucuagacaugauauucu

SEQ ID NO: 3990335 - RNA, 13 nt, Human herpesvirus 6B
agucucaaaaauu

SEQ ID NO: 3990336 - RNA, 14 nt, Human herpesvirus 6B
agucucaaaaauua

SEQ ID NO: 3990337 - RNA, 15 nt, Human herpesvirus 6B
agucuccacagggca

SEQ ID NO: 3990338 - RNA, 19 nt, Human herpesvirus 6B
agugacaguaacggcggcg

SEQ ID NO: 3990339 - RNA, 17 nt, Human herpesvirus 6B
agugcguaaucgcaaga

SEQ ID NO: 3990340 - RNA, 18 nt, Human herpesvirus 6B
aguggaaguguaaauguc

SEQ ID NO: 3990341 - RNA, 17 nt, Human herpesvirus 6B
aguggcgauaauguuau

SEQ ID NO: 3990342 - RNA, 20 nt, Human herpesvirus 6B
aguggcgcgcguuuuuggug

SEQ ID NO: 3990343 - RNA, 22 nt, Human herpesvirus 6B
aguggcgcgcguuuuuggugaa

SEQ ID NO: 3990344 - RNA, 17 nt, Human herpesvirus 6B
agugggagagcggaaga

SEQ ID NO: 3990345 - RNA, 16 nt, Human herpesvirus 6B
agugugcguuauuuuc

SEQ ID NO: 3990346 - RNA, 19 nt, Human herpesvirus 6B
aguucaaaauuuuucugua

SEQ ID NO: 3990347 - RNA, 14 nt, Human herpesvirus 6B
aguucuucaaaaaa

SEQ ID NO: 3990348 - RNA, 16 nt, Human herpesvirus 6B
aguugguucgaacaaa

SEQ ID NO: 3990349 - RNA, 15 nt, Human herpesvirus 6B
aguuucagaugauca

SEQ ID NO: 3990350 - RNA, 14 nt, Human herpesvirus 6B
aguuucuuuggaaa

SEQ ID NO: 3990351 - RNA, 15 nt, Human herpesvirus 6B
aguuuucaugugaaa

SEQ ID NO: 3990352 - RNA, 18 nt, Human herpesvirus 6B
aguuuugugauccuguaa

SEQ ID NO: 3990353 - RNA, 14 nt, Human herpesvirus 6B
auaaacaugauugu

SEQ ID NO: 3990354 - RNA, 20 nt, Human herpesvirus 6B
auaaacaugauuguaauaaa

SEQ ID NO: 3990355 - RNA, 17 nt, Human herpesvirus 6B
auaaaguuaaagaucag

SEQ ID NO: 3990356 - RNA, 15 nt, Human herpesvirus 6B
auaaaucgccauaau

SEQ ID NO: 3990357 - RNA, 14 nt, Human herpesvirus 6B
auaaauguagcaca

SEQ ID NO: 3990358 - RNA, 13 nt, Human herpesvirus 6B
auaaauuccucuc

SEQ ID NO: 3990359 - RNA, 18 nt, Human herpesvirus 6B
auaacucuuggauugcag

SEQ ID NO: 3990360 - RNA, 13 nt, Human herpesvirus 6B
auaagaguguaaa

SEQ ID NO: 3990361 - RNA, 15 nt, Human herpesvirus 6B
auaagauuuacagac

SEQ ID NO: 3990362 - RNA, 14 nt, Human herpesvirus 6B
auaagcagccgaau

SEQ ID NO: 3990363 - RNA, 16 nt, Human herpesvirus 6B
auaaugugaacuaaau

SEQ ID NO: 3990364 - RNA, 19 nt, Human herpesvirus 6B
auacaaaauuguauugagc

SEQ ID NO: 3990365 - RNA, 20 nt, Human herpesvirus 6B
auacacacgcgcggagcacg

SEQ ID NO: 3990366 - RNA, 14 nt, Human herpesvirus 6B
auacagguuugcuc

SEQ ID NO: 3990367 - RNA, 22 nt, Human herpesvirus 6B
auacauccagaaaagcaaacau

SEQ ID NO: 3990368 - RNA, 17 nt, Human herpesvirus 6B
auaccauuuuauacgaa

SEQ ID NO: 3990369 - RNA, 15 nt, Human herpesvirus 6B
auaccgugacagcaa

SEQ ID NO: 3990370 - RNA, 18 nt, Human herpesvirus 6B
auaccuaguacaaagaua

SEQ ID NO: 3990371 - RNA, 21 nt, Human herpesvirus 6B
auacuuccucgcgguauaaug

SEQ ID NO: 3990372 - RNA, 12 nt, Human herpesvirus 6B
auacuugaagag

SEQ ID NO: 3990373 - RNA, 14 nt, Human herpesvirus 6B
auagagcauccugu

SEQ ID NO: 3990374 - RNA, 14 nt, Human herpesvirus 6B
auagaggaauugcu

SEQ ID NO: 3990375 - RNA, 22 nt, Human herpesvirus 6B
auagaucuucggcgcugauucc

SEQ ID NO: 3990376 - RNA, 16 nt, Human herpesvirus 6B
auaggcucggcagggg

SEQ ID NO: 3990377 - RNA, 17 nt, Human herpesvirus 6B
auagguaaacuguucuu

SEQ ID NO: 3990378 - RNA, 18 nt, Human herpesvirus 6B
auagguuauuuacaaaag

SEQ ID NO: 3990379 - RNA, 22 nt, Human herpesvirus 6B
auauaaaaccaaaaaaaaagug

SEQ ID NO: 3990380 - RNA, 13 nt, Human herpesvirus 6B
auauauaugaauu

SEQ ID NO: 3990381 - RNA, 23 nt, Human herpesvirus 6B
auaucgagaguacggaagugccu

SEQ ID NO: 3990382 - RNA, 16 nt, Human herpesvirus 6B
auaucgauucuguaau

SEQ ID NO: 3990383 - RNA, 19 nt, Human herpesvirus 6B
auauuauaaggucauuuua

SEQ ID NO: 3990384 - RNA, 12 nt, Human herpesvirus 6B
auauucaguuuu

SEQ ID NO: 3990385 - RNA, 22 nt, Human herpesvirus 6B
auauuccucaagauaugggaaa

SEQ ID NO: 3990386 - RNA, 18 nt, Human herpesvirus 6B
auauuucuaucuggaaau

SEQ ID NO: 3990387 - RNA, 13 nt, Human herpesvirus 6B
auauuuuuacugc

SEQ ID NO: 3990388 - RNA, 17 nt, Human herpesvirus 6B
aucaaacuuuuuuugaa

SEQ ID NO: 3990389 - RNA, 16 nt, Human herpesvirus 6B
aucaacacaccugccu

SEQ ID NO: 3990390 - RNA, 14 nt, Human herpesvirus 6B
aucaacuauacuua

SEQ ID NO: 3990391 - RNA, 15 nt, Human herpesvirus 6B
aucaagacuacucug

SEQ ID NO: 3990392 - RNA, 22 nt, Human herpesvirus 6B
aucaccaucaacacaccugccu

SEQ ID NO: 3990393 - RNA, 14 nt, Human herpesvirus 6B
aucauauauugaaa

SEQ ID NO: 3990394 - RNA, 23 nt, Human herpesvirus 6B
aucaugauaaauuguuuccgaau

SEQ ID NO: 3990395 - RNA, 21 nt, Human herpesvirus 6B
auccaaugaugaaacuccuuc

SEQ ID NO: 3990396 - RNA, 13 nt, Human herpesvirus 6B
auccccagaagga

SEQ ID NO: 3990397 - RNA, 18 nt, Human herpesvirus 6B
auccuguuuucccaccua

SEQ ID NO: 3990398 - RNA, 11 nt, Human herpesvirus 6B
aucggaagagg

SEQ ID NO: 3990399 - RNA, 15 nt, Human herpesvirus 6B
aucggcccuugguga

SEQ ID NO: 3990400 - RNA, 18 nt, Human herpesvirus 6B
aucgugcuuguuuuggug

SEQ ID NO: 3990401 - RNA, 20 nt, Human herpesvirus 6B
aucucaagaaacaaguacua

SEQ ID NO: 3990402 - RNA, 22 nt, Human herpesvirus 6B
aucucgaaauauaaaaccaaaa

SEQ ID NO: 3990403 - RNA, 17 nt, Human herpesvirus 6B
aucucgaugccaaagcu

SEQ ID NO: 3990404 - RNA, 20 nt, Human herpesvirus 6B
aucugcuuuguuuucuuaug

SEQ ID NO: 3990405 - RNA, 23 nt, Human herpesvirus 6B
aucuggugagaaagacuucuugc

SEQ ID NO: 3990406 - RNA, 18 nt, Human herpesvirus 6B
aucuucaucccuguucag

SEQ ID NO: 3990407 - RNA, 18 nt, Human herpesvirus 6B
aucuuccuguacagaauu

SEQ ID NO: 3990408 - RNA, 22 nt, Human herpesvirus 6B
aucuuccuuuucaguauagaca

SEQ ID NO: 3990409 - RNA, 22 nt, Human herpesvirus 6B
aucuucgaaucaaauucaaacu

SEQ ID NO: 3990410 - RNA, 22 nt, Human herpesvirus 6B
augaaaauaucauuaaauuguu

SEQ ID NO: 3990411 - RNA, 14 nt, Human herpesvirus 6B
augaaauuuucaau

SEQ ID NO: 3990412 - RNA, 17 nt, Human herpesvirus 6B
uugacgguuuauaugca

SEQ ID NO: 3990413 - RNA, 17 nt, Human herpesvirus 6B
uugacgucugggaucau

SEQ ID NO: 3990414 - RNA, 22 nt, Human herpesvirus 6B
uugaggaaaugcagcaguuuuu

SEQ ID NO: 3990415 - RNA, 15 nt, Human herpesvirus 6B
uugauagcauuauua

SEQ ID NO: 3990416 - RNA, 14 nt, Human herpesvirus 6B
uugaugcuguugcu

SEQ ID NO: 3990417 - RNA, 13 nt, Human herpesvirus 6B
uugauuuguaaaa

SEQ ID NO: 3990418 - RNA, 19 nt, Human herpesvirus 6B
uugcaauuuggcugcguug

SEQ ID NO: 3990419 - RNA, 20 nt, Human herpesvirus 6B
uugcaguggcgcgcguuuuu

SEQ ID NO: 3990420 - RNA, 15 nt, Human herpesvirus 6B
uugcauuaaggaaaa

SEQ ID NO: 3990421 - RNA, 16 nt, Human herpesvirus 6B
uugcgaucuauauaaa

SEQ ID NO: 3990422 - RNA, 20 nt, Human herpesvirus 6B
uugcgucuaaaaauauggaa

SEQ ID NO: 3990423 - RNA, 11 nt, Human herpesvirus 6B
uugcugucaca

SEQ ID NO: 3990424 - RNA, 19 nt, Human herpesvirus 6B
uuggaugccuacauaugcc

SEQ ID NO: 3990425 - RNA, 19 nt, Human herpesvirus 6B
uugggaccuucaggaacaa

SEQ ID NO: 3990426 - RNA, 13 nt, Human herpesvirus 6B
uuggugugcauua

SEQ ID NO: 3990427 - RNA, 15 nt, Human herpesvirus 6B
uugucagauuuccca

SEQ ID NO: 3990428 - RNA, 13 nt, Human herpesvirus 6B
uugucauuucccu

SEQ ID NO: 3990429 - RNA, 21 nt, Human herpesvirus 6B
uuguggcuauuugacaauaaa

SEQ ID NO: 3990430 - RNA, 19 nt, Human herpesvirus 6B
uuguuaucuuauguauaua

SEQ ID NO: 3990431 - RNA, 23 nt, Human herpesvirus 6B
uuguucagagcugaugauuugaa

SEQ ID NO: 3990432 - RNA, 18 nt, Human herpesvirus 6B
uuuaaacuccggaaaaga

SEQ ID NO: 3990433 - RNA, 18 nt, Human herpesvirus 6B
uuuacaaucaucugguaa

SEQ ID NO: 3990434 - RNA, 20 nt, Human herpesvirus 6B
uuuagaugucgggccacauu

SEQ ID NO: 3990435 - RNA, 14 nt, Human herpesvirus 6B
uuuaggacaugugg

SEQ ID NO: 3990436 - RNA, 14 nt, Human herpesvirus 6B
uuuauauuaaugau

SEQ ID NO: 3990437 - RNA, 13 nt, Human herpesvirus 6B
uuuauccggccaa

SEQ ID NO: 3990438 - RNA, 22 nt, Human herpesvirus 6B
uuuauguaaacauagaaucucc

SEQ ID NO: 3990439 - RNA, 19 nt, Human herpesvirus 6B
uuuauguugugaucaagug

SEQ ID NO: 3990440 - RNA, 19 nt, Human herpesvirus 6B
uuuauuuucguauaaaaug

SEQ ID NO: 3990441 - RNA, 18 nt, Human herpesvirus 6B
uuucaccccccucuugca

SEQ ID NO: 3990442 - RNA, 23 nt, Human herpesvirus 6B
uuuccccccgccgccuucucugu

SEQ ID NO: 3990443 - RNA, 13 nt, Human herpesvirus 6B
uuuccuugacagu

SEQ ID NO: 3990444 - RNA, 17 nt, Human herpesvirus 6B
uuucuguuuuucucaua

SEQ ID NO: 3990445 - RNA, 16 nt, Human herpesvirus 6B
uuugaggcaacuuuuu

SEQ ID NO: 3990446 - RNA, 19 nt, Human herpesvirus 6B
uuugauccauuuucugaaa

SEQ ID NO: 3990447 - RNA, 15 nt, Human herpesvirus 6B
uuugcgucagaguuu

SEQ ID NO: 3990448 - RNA, 17 nt, Human herpesvirus 6B
uuugcguuauuugugca

SEQ ID NO: 3990449 - RNA, 23 nt, Human herpesvirus 6B
uuuguuccagauguagguuucaa

SEQ ID NO: 3990450 - RNA, 20 nt, Human herpesvirus 6B
uuuguuucagcguauucaga

SEQ ID NO: 3990451 - RNA, 18 nt, Human herpesvirus 6B
uuuuauuuuguggcuauu

SEQ ID NO: 3990452 - RNA, 11 nt, Human herpesvirus 6B
uuuucaagaau

SEQ ID NO: 3990453 - RNA, 19 nt, Human herpesvirus 6B
uuuucaccccccucuugca

SEQ ID NO: 3990454 - RNA, 13 nt, Human herpesvirus 6B
uuuucuauuaaaa

SEQ ID NO: 3990455 - RNA, 15 nt, Human herpesvirus 6B
uuuucugcaaaacaa

SEQ ID NO: 3990456 - RNA, 18 nt, Human herpesvirus 6B
uuuucugcucaacaaugu

SEQ ID NO: 3990457 - RNA, 13 nt, Human herpesvirus 6B
uuuugaaaucacu

SEQ ID NO: 3990458 - RNA, 18 nt, Human herpesvirus 6B
uuuugcgucgucugugca

SEQ ID NO: 3990459 - RNA, 19 nt, Human herpesvirus 6B
uuuuuaaauaauaguaaac

SEQ ID NO: 3990460 - RNA, 20 nt, Human herpesvirus 6B
uuuuucacagaauguauaua

SEQ ID NO: 3990461 - RNA, 11 nt, Human herpesvirus 6B
uuuuucacccc

SEQ ID NO: 3990462 - RNA, 19 nt, Human herpesvirus 6B
uuuuugaugacuuauaaua

SEQ ID NO: 3990463 - RNA, 15 nt, Human herpesvirus 6B
uuuuuugaaaucacu

SEQ ID NO: 3990464 - RNA, 13 nt, Human herpesvirus 6B
uuuuuuuuucaua

SEQ ID NO: 3990465 - RNA, 22 nt, Human herpesvirus 6B
ccgucgcgcucgccgucgucgc

SEQ ID NO: 3990466 - RNA, 17 nt, Human herpesvirus 6B
ccgucgucgcucucccu

SEQ ID NO: 3990467 - RNA, 16 nt, Human herpesvirus 6B
ccgucucagugucacu

SEQ ID NO: 3990468 - RNA, 13 nt, Human herpesvirus 6B
ccgucuccugcaa

SEQ ID NO: 3990469 - RNA, 13 nt, Human herpesvirus 6B
ccgugacacacag

SEQ ID NO: 3990470 - RNA, 18 nt, Human herpesvirus 6B
ccguguuggcggauuaca

SEQ ID NO: 3990471 - RNA, 15 nt, Human herpesvirus 6B
ccuaagcuggacaga

SEQ ID NO: 3990472 - RNA, 23 nt, Human herpesvirus 6B
ccuagguuuucgaaacgggagaa

SEQ ID NO: 3990473 - RNA, 13 nt, Human herpesvirus 6B
ccuauucaaaagu

SEQ ID NO: 3990474 - RNA, 19 nt, Human herpesvirus 6B
ccucaacuaaaucaugucu

SEQ ID NO: 3990475 - RNA, 19 nt, Human herpesvirus 6B
ccucccauagaggcgcgcg

SEQ ID NO: 3990476 - RNA, 14 nt, Human herpesvirus 6B
ccucccuccauccc

SEQ ID NO: 3990477 - RNA, 12 nt, Human herpesvirus 6B
ccucgcucuccu

SEQ ID NO: 3990478 - RNA, 15 nt, Human herpesvirus 6B
ccucgucuguugcug

SEQ ID NO: 3990479 - RNA, 15 nt, Human herpesvirus 6B
ccucucuccgccucc

SEQ ID NO: 3990480 - RNA, 17 nt, Human herpesvirus 6B
ccucugcggcucucugc

SEQ ID NO: 3990481 - RNA, 14 nt, Human herpesvirus 6B
ccucuugcaguggc

SEQ ID NO: 3990482 - RNA, 19 nt, Human herpesvirus 6B
ccugaaaccccacaaagcc

SEQ ID NO: 3990483 - RNA, 14 nt, Human herpesvirus 6B
ccugagaccgagag

SEQ ID NO: 3990484 - RNA, 13 nt, Human herpesvirus 6B
ccugaucacagag

SEQ ID NO: 3990485 - RNA, 14 nt, Human herpesvirus 6B
ccugauggauuaca

SEQ ID NO: 3990486 - RNA, 20 nt, Human herpesvirus 6B
ccugcaauuugaauucugcu

SEQ ID NO: 3990487 - RNA, 14 nt, Human herpesvirus 6B
ccugccuacacugc

SEQ ID NO: 3990488 - RNA, 15 nt, Human herpesvirus 6B
ccuggaagaaggaaa

SEQ ID NO: 3990489 - RNA, 18 nt, Human herpesvirus 6B
ccuggcgggcaccgaggg

SEQ ID NO: 3990490 - RNA, 22 nt, Human herpesvirus 6B
ccuguccgugacacacagaaua

SEQ ID NO: 3990491 - RNA, 19 nt, Human herpesvirus 6B
ccuuuggccuugauuguga

SEQ ID NO: 3990492 - RNA, 18 nt, Human herpesvirus 6B
cgaauuauguauguguua

SEQ ID NO: 3990493 - RNA, 21 nt, Human herpesvirus 6B
cgaauuauguauguguuaaua

SEQ ID NO: 3990494 - RNA, 16 nt, Human herpesvirus 6B
cgacagcgggugcuca

SEQ ID NO: 3990495 - RNA, 16 nt, Human herpesvirus 6B
cgacgcccauagaaga

SEQ ID NO: 3990496 - RNA, 20 nt, Human herpesvirus 6B
cgacucuuuccgaugugucu

SEQ ID NO: 3990497 - RNA, 16 nt, Human herpesvirus 6B
cgagccggacaggagg

SEQ ID NO: 3990498 - RNA, 20 nt, Human herpesvirus 6B
cgagccggacaggaggugcg

SEQ ID NO: 3990499 - RNA, 17 nt, Human herpesvirus 6B
cgaggaauguguuucua

SEQ ID NO: 3990500 - RNA, 17 nt, Human herpesvirus 6B
cgaggaguuaaaacuaa

SEQ ID NO: 3990501 - RNA, 11 nt, Human herpesvirus 6B
cgauaucucac

SEQ ID NO: 3990502 - RNA, 18 nt, Human herpesvirus 6B
cgauccgucaggaccagc

SEQ ID NO: 3990503 - RNA, 21 nt, Human herpesvirus 6B
cgaugcgaagggaguaaggag

SEQ ID NO: 3990504 - RNA, 14 nt, Human herpesvirus 6B
cgaugcgccacagg

SEQ ID NO: 3990505 - RNA, 13 nt, Human herpesvirus 6B
cgaugcuggccug

SEQ ID NO: 3990506 - RNA, 14 nt, Human herpesvirus 6B
cgauguacaguuuc

SEQ ID NO: 3990507 - RNA, 14 nt, Human herpesvirus 6B
cgauguuuccaggu

SEQ ID NO: 3990508 - RNA, 18 nt, Human herpesvirus 6B
cgauugcugcuucuguaa

SEQ ID NO: 3990509 - RNA, 23 nt, Human herpesvirus 6B
cgcaaagagagaccaauuuagau

SEQ ID NO: 3990510 - RNA, 17 nt, Human herpesvirus 6B
cgcaaagggaagccagc

SEQ ID NO: 3990511 - RNA, 20 nt, Human herpesvirus 6B
cgcagaaucaagaaacacuu

SEQ ID NO: 3990512 - RNA, 14 nt, Human herpesvirus 6B
cgcagcuccuuccg

SEQ ID NO: 3990513 - RNA, 22 nt, Human herpesvirus 6B
cgcagggaaagagcacgaagaa

SEQ ID NO: 3990514 - RNA, 16 nt, Human herpesvirus 6B
cgcaguuucuguuuuu

SEQ ID NO: 3990515 - RNA, 19 nt, Human herpesvirus 6B
cgcauguaugguugcgaaa

SEQ ID NO: 3990516 - RNA, 13 nt, Human herpesvirus 6B
cgccauaauggaa

SEQ ID NO: 3990517 - RNA, 19 nt, Human herpesvirus 6B
cgccauaauggaagaaggc

SEQ ID NO: 3990518 - RNA, 21 nt, Human herpesvirus 6B
cgcccgccucucuccgccucc

SEQ ID NO: 3990519 - RNA, 18 nt, Human herpesvirus 6B
cgccgccucgccgcuccc

SEQ ID NO: 3990520 - RNA, 21 nt, Human herpesvirus 6B
cgccuccgccaccaccgcuga

SEQ ID NO: 3990521 - RNA, 11 nt, Human herpesvirus 6B
cgccucucccg

SEQ ID NO: 3990522 - RNA, 14 nt, Human herpesvirus 6B
cgcgccgucagcgg

SEQ ID NO: 3990523 - RNA, 22 nt, Human herpesvirus 6B
cgcgcugggacuccgagccgga

SEQ ID NO: 3990524 - RNA, 19 nt, Human herpesvirus 6B
cgcggaccacucgggccgg

SEQ ID NO: 3990525 - RNA, 22 nt, Human herpesvirus 6B
cgcuaagagauuuacuguuucu

SEQ ID NO: 3990526 - RNA, 15 nt, Human herpesvirus 6B
cgcugggcuccucac

SEQ ID NO: 3990527 - RNA, 17 nt, Human herpesvirus 6B
cgcuggucgccguggcc

SEQ ID NO: 3990528 - RNA, 20 nt, Human herpesvirus 6B
cggaaaaauuauagacuugc

SEQ ID NO: 3990529 - RNA, 22 nt, Human herpesvirus 6B
cggaagacguuucuauggauau

SEQ ID NO: 3990530 - RNA, 15 nt, Human herpesvirus 6B
cggaagugcaugcga

SEQ ID NO: 3990531 - RNA, 12 nt, Human herpesvirus 6B
cggaauuuacug

SEQ ID NO: 3990532 - RNA, 18 nt, Human herpesvirus 6B
cggagcccugagagcagg

SEQ ID NO: 3990533 - RNA, 19 nt, Human herpesvirus 6B
cggagcccugagagcagga

SEQ ID NO: 3990534 - RNA, 21 nt, Human herpesvirus 6B
cggagcccugagagcaggagc

SEQ ID NO: 3990535 - RNA, 14 nt, Human herpesvirus 6B
cggcacgcgccguc

SEQ ID NO: 3990536 - RNA, 23 nt, Human herpesvirus 6B
cggcgaagggacacgagaagaac

SEQ ID NO: 3990537 - RNA, 22 nt, Human herpesvirus 6B
cggcgacacgcgcggaccacuc

SEQ ID NO: 3990538 - RNA, 15 nt, Human herpesvirus 6B
cggcgaggggacgga

SEQ ID NO: 3990539 - RNA, 17 nt, Human herpesvirus 6B
cggcgcugggcuccuca

SEQ ID NO: 3990540 - RNA, 15 nt, Human herpesvirus 6B
cggcgguuaacuguu

SEQ ID NO: 3990541 - RNA, 21 nt, Human herpesvirus 6B
cgggaccuggcgggcaccgag

SEQ ID NO: 3990542 - RNA, 15 nt, Human herpesvirus 6B
cgggaucacgcaggc

SEQ ID NO: 3990543 - RNA, 13 nt, Human herpesvirus 6B
cgggcgacgagag

SEQ ID NO: 3990544 - RNA, 17 nt, Human herpesvirus 6B
cgggcgcggggcgcacc

SEQ ID NO: 3990545 - RNA, 19 nt, Human herpesvirus 6B
cggggagagaauugccgau

SEQ ID NO: 3990546 - RNA, 18 nt, Human herpesvirus 6B
cggggcgcaccggcgaca

SEQ ID NO: 3990547 - RNA, 16 nt, Human herpesvirus 6B
cggguaaauaugugaa

SEQ ID NO: 3990548 - RNA, 10 nt, Human herpesvirus 6B
cgguaaaaug

SEQ ID NO: 3990549 - RNA, 18 nt, Human herpesvirus 6B
cgguguccucguccgucc

SEQ ID NO: 3990550 - RNA, 15 nt, Human herpesvirus 6B
cgguuugugugggua

SEQ ID NO: 3990551 - RNA, 20 nt, Human herpesvirus 6B
cguauacgaacaauauggcc

SEQ ID NO: 3990552 - RNA, 13 nt, Human herpesvirus 6B
cguauuauugugu

SEQ ID NO: 3990553 - RNA, 13 nt, Human herpesvirus 6B
cgucacacagcau

SEQ ID NO: 3990554 - RNA, 14 nt, Human herpesvirus 6B
cgucacacagcaug

SEQ ID NO: 3990555 - RNA, 17 nt, Human herpesvirus 6B
cgucauaauuuuccagc

SEQ ID NO: 3990556 - RNA, 17 nt, Human herpesvirus 6B
cguccauccaguugugu

SEQ ID NO: 3990557 - RNA, 14 nt, Human herpesvirus 6B
cgucccucucaccc

SEQ ID NO: 3990558 - RNA, 23 nt, Human herpesvirus 6B
cgucuacaucaaaauccaaagua

SEQ ID NO: 3990559 - RNA, 19 nt, Human herpesvirus 6B
cgucuccgauccgucagga

SEQ ID NO: 3990560 - RNA, 17 nt, Human herpesvirus 6B
cgugacacggaaaacca

SEQ ID NO: 3990561 - RNA, 21 nt, Human herpesvirus 6B
cgugaugagagacaucuguuu

SEQ ID NO: 3990562 - RNA, 23 nt, Human herpesvirus 6B
cguggcagaacagagacccuccu

SEQ ID NO: 3990563 - RNA, 16 nt, Human herpesvirus 6B
cguggcagaagaagag

SEQ ID NO: 3990564 - RNA, 19 nt, Human herpesvirus 6B
cgugguggccgucugucug

SEQ ID NO: 3990565 - RNA, 12 nt, Human herpesvirus 6B
cguggugugcac

SEQ ID NO: 3990566 - RNA, 19 nt, Human herpesvirus 6B
cguguucaaaaaugugguc

SEQ ID NO: 3990567 - RNA, 15 nt, Human herpesvirus 6B
cguuccgaauccugu

SEQ ID NO: 3990568 - RNA, 14 nt, Human herpesvirus 6B
cguugugacagaau

SEQ ID NO: 3990569 - RNA, 17 nt, Human herpesvirus 6B
cguuuuccaacuuaaua

SEQ ID NO: 3990570 - RNA, 22 nt, Human herpesvirus 6B
cguuuucugcucaacaauguuc

SEQ ID NO: 3990571 - RNA, 22 nt, Human herpesvirus 6B
cuaaaaauauugguauugauuu

SEQ ID NO: 3990572 - RNA, 14 nt, Human herpesvirus 6B
cuaaaagcugcuaa

SEQ ID NO: 3990573 - RNA, 14 nt, Human herpesvirus 6B
cuaaaaucugcuaa

SEQ ID NO: 3990574 - RNA, 15 nt, Human herpesvirus 6B
cuaauuauaaaugua

SEQ ID NO: 3990575 - RNA, 18 nt, Human herpesvirus 6B
cuacccaccuguccuuuc

SEQ ID NO: 3990576 - RNA, 14 nt, Human herpesvirus 6B
cuacguuagcuucc

SEQ ID NO: 3990577 - RNA, 19 nt, Human herpesvirus 6B
cuagaaugccagguccagu

SEQ ID NO: 3990578 - RNA, 17 nt, Human herpesvirus 6B
cuauguuaacauuguga

SEQ ID NO: 3990579 - RNA, 18 nt, Human herpesvirus 6B
uaaauguauaaaagagaa

SEQ ID NO: 3990580 - RNA, 18 nt, Human herpesvirus 6B
uaacaauguuaugcaguu

SEQ ID NO: 3990581 - RNA, 18 nt, Human herpesvirus 6B
uaacauccaaaauacacu

SEQ ID NO: 3990582 - RNA, 20 nt, Human herpesvirus 6B
uaacauugugagaacagcgc

SEQ ID NO: 3990583 - RNA, 23 nt, Human herpesvirus 6B
uaacggaacccuagacacacaga

SEQ ID NO: 3990584 - RNA, 14 nt, Human herpesvirus 6B
uaagaauuuccagg

SEQ ID NO: 3990585 - RNA, 17 nt, Human herpesvirus 6B
uaagccuauugacauga

SEQ ID NO: 3990586 - RNA, 17 nt, Human herpesvirus 6B
uaaggcucgguaguaua

SEQ ID NO: 3990587 - RNA, 14 nt, Human herpesvirus 6B
uaagguuguuuucg

SEQ ID NO: 3990588 - RNA, 23 nt, Human herpesvirus 6B
uaagugugcguuauuuucuguau

SEQ ID NO: 3990589 - RNA, 18 nt, Human herpesvirus 6B
uaauaguuaaaaaauuga

SEQ ID NO: 3990590 - RNA, 15 nt, Human herpesvirus 6B
uaauauaaauucuua

SEQ ID NO: 3990591 - RNA, 16 nt, Human herpesvirus 6B
uaauauuugcaagcag

SEQ ID NO: 3990592 - RNA, 22 nt, Human herpesvirus 6B
uaauauuugcaagcagaccagu

SEQ ID NO: 3990593 - RNA, 14 nt, Human herpesvirus 6B
uaauguaaauguua

SEQ ID NO: 3990594 - RNA, 18 nt, Human herpesvirus 6B
uaauugguauaagaaaga

SEQ ID NO: 3990595 - RNA, 12 nt, Human herpesvirus 6B
uaauuuuccagc

SEQ ID NO: 3990596 - RNA, 16 nt, Human herpesvirus 6B
uaauuuuuuguuucug

SEQ ID NO: 3990597 - RNA, 14 nt, Human herpesvirus 6B
uacagacuccucac

SEQ ID NO: 3990598 - RNA, 22 nt, Human herpesvirus 6B
uacagacuccucaccgaaaucc

SEQ ID NO: 3990599 - RNA, 19 nt, Human herpesvirus 6B
uacagcaaaaauuucaugc

SEQ ID NO: 3990600 - RNA, 20 nt, Human herpesvirus 6B
uacagcuaagauuaacaacu

SEQ ID NO: 3990601 - RNA, 16 nt, Human herpesvirus 6B
uacgaacagaaauuuc

SEQ ID NO: 3990602 - RNA, 17 nt, Human herpesvirus 6B
uacgagaccuguuugag

SEQ ID NO: 3990603 - RNA, 17 nt, Human herpesvirus 6B
uacgcauugacggguau

SEQ ID NO: 3990604 - RNA, 17 nt, Human herpesvirus 6B
uacgcuggaaacuaaac

SEQ ID NO: 3990605 - RNA, 13 nt, Human herpesvirus 6B
uacggcaggagca

SEQ ID NO: 3990606 - RNA, 13 nt, Human herpesvirus 6B
uacguauaaaagu

SEQ ID NO: 3990607 - RNA, 18 nt, Human herpesvirus 6B
uacguggccgucuccugc

SEQ ID NO: 3990608 - RNA, 23 nt, Human herpesvirus 6B
uacguggccgucuccugcaauuu

SEQ ID NO: 3990609 - RNA, 13 nt, Human herpesvirus 6B
uacguuagcuucc

SEQ ID NO: 3990610 - RNA, 15 nt, Human herpesvirus 6B
uacuaaaggacuggc

SEQ ID NO: 3990611 - RNA, 19 nt, Human herpesvirus 6B
uacuacguguaauguuucc

SEQ ID NO: 3990612 - RNA, 21 nt, Human herpesvirus 6B
uacugacaccacauaacaaaa

SEQ ID NO: 3990613 - RNA, 22 nt, Human herpesvirus 6B
uacuguaaacaaauucuuacaa

SEQ ID NO: 3990614 - RNA, 10 nt, Human herpesvirus 6B
uacuuccugu

SEQ ID NO: 3990615 - RNA, 21 nt, Human herpesvirus 6B
uacuuuuuucaauaaugcuca

SEQ ID NO: 3990616 - RNA, 17 nt, Human herpesvirus 6B
uagaacauaagggacag

SEQ ID NO: 3990617 - RNA, 20 nt, Human herpesvirus 6B
uagacgaaaauuguaacuuc

SEQ ID NO: 3990618 - RNA, 22 nt, Human herpesvirus 6B
uagacgugucuucauucuucga

SEQ ID NO: 3990619 - RNA, 12 nt, Human herpesvirus 6B
uagagaacagau

SEQ ID NO: 3990620 - RNA, 12 nt, Human herpesvirus 6B
uagagacuuugc

SEQ ID NO: 3990621 - RNA, 17 nt, Human herpesvirus 6B
uagagcauccuguuuuc

SEQ ID NO: 3990622 - RNA, 18 nt, Human herpesvirus 6B
uagcaauuuuaaauauua

SEQ ID NO: 3990623 - RNA, 23 nt, Human herpesvirus 6B
uagcauucugccgaaaagaaaga

SEQ ID NO: 3990624 - RNA, 14 nt, Human herpesvirus 6B
uagcgguuucuagg

SEQ ID NO: 3990625 - RNA, 23 nt, Human herpesvirus 6B
uagcuugcgauuccgaagauugc

SEQ ID NO: 3990626 - RNA, 22 nt, Human herpesvirus 6B
uauaacagacauaugcaaucug

SEQ ID NO: 3990627 - RNA, 21 nt, Human herpesvirus 6B
uauaagucuaaugcaaagaug

SEQ ID NO: 3990628 - RNA, 12 nt, Human herpesvirus 6B
uauaaugugaac

SEQ ID NO: 3990629 - RNA, 22 nt, Human herpesvirus 6B
uauauucaguuuuuuguuucug

SEQ ID NO: 3990630 - RNA, 21 nt, Human herpesvirus 6B
uauauugcucaaaauuggcau

SEQ ID NO: 3990631 - RNA, 15 nt, Human herpesvirus 6B
uaucauuaaauuguu

SEQ ID NO: 3990632 - RNA, 14 nt, Human herpesvirus 6B
uauccagaagacug

SEQ ID NO: 3990633 - RNA, 15 nt, Human herpesvirus 6B
uaucgacggcagcgg

SEQ ID NO: 3990634 - RNA, 22 nt, Human herpesvirus 6B
uaugaaaguguauuuggaugaa

SEQ ID NO: 3990635 - RNA, 21 nt, Human herpesvirus 6B
uaugagaauguucuucugaaa

SEQ ID NO: 3990636 - RNA, 15 nt, Human herpesvirus 6B
uaugauuuucaauau

SEQ ID NO: 3990637 - RNA, 16 nt, Human herpesvirus 6B
uaugauuuucaauauc

SEQ ID NO: 3990638 - RNA, 14 nt, Human herpesvirus 6B
uaugcgaauuaaaa

SEQ ID NO: 3990639 - RNA, 16 nt, Human herpesvirus 6B
uaugcggccagucucg

SEQ ID NO: 3990640 - RNA, 18 nt, Human herpesvirus 6B
uauggagaaaaacuuuua

SEQ ID NO: 3990641 - RNA, 20 nt, Human herpesvirus 6B
uauggugaugaauugaacau

SEQ ID NO: 3990642 - RNA, 19 nt, Human herpesvirus 6B
uauguauaauauaaauucu

SEQ ID NO: 3990643 - RNA, 14 nt, Human herpesvirus 6B
uauguuuuguacaa

SEQ ID NO: 3990644 - RNA, 16 nt, Human herpesvirus 6B
uauuaacaauuuugau

SEQ ID NO: 3990645 - RNA, 19 nt, Human herpesvirus 6B
uauucacaagaagaugcuu

SEQ ID NO: 3990646 - RNA, 14 nt, Human herpesvirus 6B
uauucauaacagau

SEQ ID NO: 3990647 - RNA, 14 nt, Human herpesvirus 6B
uauugugacaaggu

SEQ ID NO: 3990648 - RNA, 17 nt, Human herpesvirus 6B
uauuuaacauccaaaau

SEQ ID NO: 3990649 - RNA, 14 nt, Human herpesvirus 6B
uauuuuaaaugaca

SEQ ID NO: 3990650 - RNA, 16 nt, Human herpesvirus 6B
uauuuucguauaaaau

SEQ ID NO: 3990651 - RNA, 13 nt, Human herpesvirus 6B
ucaaauguagcaa

SEQ ID NO: 3990652 - RNA, 23 nt, Human herpesvirus 6B
ucaaauuuaccggugcaacgcau

SEQ ID NO: 3990653 - RNA, 22 nt, Human herpesvirus 6B
ucaagcucgaguucgagaagau

SEQ ID NO: 3990654 - RNA, 21 nt, Human herpesvirus 6B
ucaagcuucacgugauuugua

SEQ ID NO: 3990655 - RNA, 22 nt, Human herpesvirus 6B
ucacaagaagaugcuuuaaaaa

SEQ ID NO: 3990656 - RNA, 22 nt, Human herpesvirus 6B
ucacaauaauuacucccauaga

SEQ ID NO: 3990657 - RNA, 11 nt, Human herpesvirus 6B
ucacacagcau

SEQ ID NO: 3990658 - RNA, 15 nt, Human herpesvirus 6B
ucaccccccucuugc

SEQ ID NO: 3990659 - RNA, 19 nt, Human herpesvirus 6B
ucacuggacagggguaaau

SEQ ID NO: 3990660 - RNA, 12 nt, Human herpesvirus 6B
ucagauguggaa

SEQ ID NO: 3990661 - RNA, 22 nt, Human herpesvirus 6B
ucagcaagagagauacagguuu

SEQ ID NO: 3990662 - RNA, 21 nt, Human herpesvirus 6B
ucaggcauuaaacugaggcag

SEQ ID NO: 3990663 - RNA, 20 nt, Human herpesvirus 6B
ucaguguuugccaaccaaau

SEQ ID NO: 3990664 - RNA, 19 nt, Human herpesvirus 6B
ucauccugaccgacuuuga

SEQ ID NO: 3990665 - RNA, 13 nt, Human herpesvirus 6B
ucaugaauuuaug

SEQ ID NO: 3990666 - RNA, 21 nt, Human herpesvirus 6B
ucauuaccaguagcacgaacc

SEQ ID NO: 3990667 - RNA, 17 nt, Human herpesvirus 6B
ucauucgcguggcggcg

SEQ ID NO: 3990668 - RNA, 21 nt, Human herpesvirus 6B
ucauuuaugcagcucgggaaa

SEQ ID NO: 3990669 - RNA, 19 nt, Human herpesvirus 6B
uccaaagucguugaauucu

SEQ ID NO: 3990670 - RNA, 15 nt, Human herpesvirus 6B
uccaaugaugaaacu

SEQ ID NO: 3990671 - RNA, 14 nt, Human herpesvirus 6B
uccacucaugccgc

SEQ ID NO: 3990672 - RNA, 21 nt, Human herpesvirus 6B
uccagcagcggucugcaccuc

SEQ ID NO: 3990673 - RNA, 14 nt, Human herpesvirus 6B
uccagguuuuucau

SEQ ID NO: 3990674 - RNA, 16 nt, Human herpesvirus 6B
uccaucccccuccccg

SEQ ID NO: 3990675 - RNA, 15 nt, Human herpesvirus 6B
uccauugcucuuucc

SEQ ID NO: 3990676 - RNA, 17 nt, Human herpesvirus 6B
uccauuuucugaaaucu

SEQ ID NO: 3990677 - RNA, 15 nt, Human herpesvirus 6B
uccccccucccucca

SEQ ID NO: 3990678 - RNA, 13 nt, Human herpesvirus 6B
ucccgcagcuccu

SEQ ID NO: 3990679 - RNA, 23 nt, Human herpesvirus 6B
ucccggggggggggggcccgggc

SEQ ID NO: 3990680 - RNA, 16 nt, Human herpesvirus 6B
uccgaaaacuagauga

SEQ ID NO: 3990681 - RNA, 14 nt, Human herpesvirus 6B
uccgaccagcacca

SEQ ID NO: 3990682 - RNA, 23 nt, Human herpesvirus 6B
uccgcaaguuuucagcaagagag

SEQ ID NO: 3990683 - RNA, 21 nt, Human herpesvirus 6B
uccgcgaugcgccacagggag

SEQ ID NO: 3990684 - RNA, 15 nt, Human herpesvirus 6B
uccgcggcgcugggc

SEQ ID NO: 3990685 - RNA, 23 nt, Human herpesvirus 6B
uccgcuauggccuauugcauggc

SEQ ID NO: 3990686 - RNA, 21 nt, Human herpesvirus 6B
uccggccaauucauuguacga

SEQ ID NO: 3990687 - RNA, 22 nt, Human herpesvirus 6B
uccuauacaugcggagaaguau

SEQ ID NO: 3990688 - RNA, 14 nt, Human herpesvirus 6B
uccucacccugaag

SEQ ID NO: 3990689 - RNA, 17 nt, Human herpesvirus 6B
uccucccacgcccccuc

SEQ ID NO: 3990690 - RNA, 18 nt, Human herpesvirus 6B
uccuccgcaaguuuucag

SEQ ID NO: 3990691 - RNA, 18 nt, Human herpesvirus 6B
uccucgucauaauuuucc

SEQ ID NO: 3990692 - RNA, 17 nt, Human herpesvirus 6B
cagcggucgagaaagau

SEQ ID NO: 3990693 - RNA, 13 nt, Human herpesvirus 6B
cagcuggacagaa

SEQ ID NO: 3990694 - RNA, 22 nt, Human herpesvirus 6B
caggaacgaggauuuuuucugc

SEQ ID NO: 3990695 - RNA, 12 nt, Human herpesvirus 6B
caggagaagaac

SEQ ID NO: 3990696 - RNA, 16 nt, Human herpesvirus 6B
caggagaagaacagag

SEQ ID NO: 3990697 - RNA, 20 nt, Human herpesvirus 6B
caggagcaggcuccccaggc

SEQ ID NO: 3990698 - RNA, 15 nt, Human herpesvirus 6B
caggauuuguaaaaa

SEQ ID NO: 3990699 - RNA, 19 nt, Human herpesvirus 6B
caggccgaguuggccaagc

SEQ ID NO: 3990700 - RNA, 13 nt, Human herpesvirus 6B
caggcgcagcagc

SEQ ID NO: 3990701 - RNA, 17 nt, Human herpesvirus 6B
caggcgcgucggcggga

SEQ ID NO: 3990702 - RNA, 19 nt, Human herpesvirus 6B
caggcuccccaggcgcagc

SEQ ID NO: 3990703 - RNA, 22 nt, Human herpesvirus 6B
caggcuccccaggcgcagcagc

SEQ ID NO: 3990704 - RNA, 15 nt, Human herpesvirus 6B
cagggaaagagcacg

SEQ ID NO: 3990705 - RNA, 16 nt, Human herpesvirus 6B
cagggcauagaaagcg

SEQ ID NO: 3990706 - RNA, 23 nt, Human herpesvirus 6B
cagggcauagaaagcggccaggc

SEQ ID NO: 3990707 - RNA, 16 nt, Human herpesvirus 6B
cagggcgggcacggag

SEQ ID NO: 3990708 - RNA, 20 nt, Human herpesvirus 6B
caggguguaugcggccaguc

SEQ ID NO: 3990709 - RNA, 19 nt, Human herpesvirus 6B
caggguguggccggcacgc

SEQ ID NO: 3990710 - RNA, 21 nt, Human herpesvirus 6B
cagucgcggcggccccgcguc

SEQ ID NO: 3990711 - RNA, 16 nt, Human herpesvirus 6B
caguugcauggugaug

SEQ ID NO: 3990712 - RNA, 16 nt, Human herpesvirus 6B
cauaaacuauuguuua

SEQ ID NO: 3990713 - RNA, 20 nt, Human herpesvirus 6B
cauaagcucuacacagagug

SEQ ID NO: 3990714 - RNA, 15 nt, Human herpesvirus 6B
cauaagggacagcag

SEQ ID NO: 3990715 - RNA, 23 nt, Human herpesvirus 6B
cauaauugugauaguuauuuugu

SEQ ID NO: 3990716 - RNA, 17 nt, Human herpesvirus 6B
cauaccgggacagcacc

SEQ ID NO: 3990717 - RNA, 14 nt, Human herpesvirus 6B
cauagagcauccug

SEQ ID NO: 3990718 - RNA, 15 nt, Human herpesvirus 6B
cauauacccucgccc

SEQ ID NO: 3990719 - RNA, 15 nt, Human herpesvirus 6B
cauaucaaacaacug

SEQ ID NO: 3990720 - RNA, 15 nt, Human herpesvirus 6B
cauaugcaaucugug

SEQ ID NO: 3990721 - RNA, 21 nt, Human herpesvirus 6B
cauauuuaaaccagucuucua

SEQ ID NO: 3990722 - RNA, 17 nt, Human herpesvirus 6B
caucaacacaccugccu

SEQ ID NO: 3990723 - RNA, 15 nt, Human herpesvirus 6B
caucacguauggauc

SEQ ID NO: 3990724 - RNA, 18 nt, Human herpesvirus 6B
caucaucucucuuucaga

SEQ ID NO: 3990725 - RNA, 19 nt, Human herpesvirus 6B
caucgcgguguccucgucc

SEQ ID NO: 3990726 - RNA, 14 nt, Human herpesvirus 6B
caucuaugaugcug

SEQ ID NO: 3990727 - RNA, 14 nt, Human herpesvirus 6B
caucugcaaaaaca

SEQ ID NO: 3990728 - RNA, 15 nt, Human herpesvirus 6B
caucuuaaauuucua

SEQ ID NO: 3990729 - RNA, 22 nt, Human herpesvirus 6B
caucuugccguuuugaucuuug

SEQ ID NO: 3990730 - RNA, 19 nt, Human herpesvirus 6B
caugacugugaggugauuu

SEQ ID NO: 3990731 - RNA, 13 nt, Human herpesvirus 6B
caugcaaaacaga

SEQ ID NO: 3990732 - RNA, 23 nt, Human herpesvirus 6B
cauguguggcgcauguaugguug

SEQ ID NO: 3990733 - RNA, 17 nt, Human herpesvirus 6B
cauguucgccucucccg

SEQ ID NO: 3990734 - RNA, 14 nt, Human herpesvirus 6B
cauguucuauuuua

SEQ ID NO: 3990735 - RNA, 22 nt, Human herpesvirus 6B
cauguuuuuacuugauaaacug

SEQ ID NO: 3990736 - RNA, 19 nt, Human herpesvirus 6B
cauugagccggcugauaag

SEQ ID NO: 3990737 - RNA, 22 nt, Human herpesvirus 6B
cauuuuuuaauccauauuugga

SEQ ID NO: 3990738 - RNA, 16 nt, Human herpesvirus 6B
ccaaagcuuucuguac

SEQ ID NO: 3990739 - RNA, 12 nt, Human herpesvirus 6B
ccaacugagaga

SEQ ID NO: 3990740 - RNA, 20 nt, Human herpesvirus 6B
ccaaggcaacggcacgagag

SEQ ID NO: 3990741 - RNA, 15 nt, Human herpesvirus 6B
ccacagcggcagcgg

SEQ ID NO: 3990742 - RNA, 17 nt, Human herpesvirus 6B
ccaccuggcgcaccgcc

SEQ ID NO: 3990743 - RNA, 23 nt, Human herpesvirus 6B
ccacuccaacacggggugagaga

SEQ ID NO: 3990744 - RNA, 20 nt, Human herpesvirus 6B
ccacugcggaguuuuauggc

SEQ ID NO: 3990745 - RNA, 10 nt, Human herpesvirus 6B
ccacugugau

SEQ ID NO: 3990746 - RNA, 14 nt, Human herpesvirus 6B
ccagccgcccuccc

SEQ ID NO: 3990747 - RNA, 18 nt, Human herpesvirus 6B
ccagcucuguucucuccc

SEQ ID NO: 3990748 - RNA, 14 nt, Human herpesvirus 6B
ccaggaaaaugugu

SEQ ID NO: 3990749 - RNA, 22 nt, Human herpesvirus 6B
ccaggcaccauguucgccucuc

SEQ ID NO: 3990750 - RNA, 14 nt, Human herpesvirus 6B
ccaggcgcagcagc

SEQ ID NO: 3990751 - RNA, 17 nt, Human herpesvirus 6B
ccaguugaacuaugcau

SEQ ID NO: 3990752 - RNA, 13 nt, Human herpesvirus 6B
ccaugacugugag

SEQ ID NO: 3990753 - RNA, 14 nt, Human herpesvirus 6B
cccaaacucuugca

SEQ ID NO: 3990754 - RNA, 15 nt, Human herpesvirus 6B
cccagaguuaaugca

SEQ ID NO: 3990755 - RNA, 17 nt, Human herpesvirus 6B
cccaggcgcagcagcag

SEQ ID NO: 3990756 - RNA, 22 nt, Human herpesvirus 6B
ccccacucgaaucgcgcaggcg

SEQ ID NO: 3990757 - RNA, 12 nt, Human herpesvirus 6B
ccccccucuugc

SEQ ID NO: 3990758 - RNA, 13 nt, Human herpesvirus 6B
cccccucuugcag

SEQ ID NO: 3990759 - RNA, 17 nt, Human herpesvirus 6B
ccccggcuuucucgccg

SEQ ID NO: 3990760 - RNA, 22 nt, Human herpesvirus 6B
cccgcacaguucguccagcagc

SEQ ID NO: 3990761 - RNA, 13 nt, Human herpesvirus 6B
cccgccucucucc

SEQ ID NO: 3990762 - RNA, 22 nt, Human herpesvirus 6B
cccggcuuucucgccgccucgc

SEQ ID NO: 3990763 - RNA, 11 nt, Human herpesvirus 6B
cccggggaggc

SEQ ID NO: 3990764 - RNA, 15 nt, Human herpesvirus 6B
cccuccauguugcaa

SEQ ID NO: 3990765 - RNA, 12 nt, Human herpesvirus 6B
cccuccccgcac

SEQ ID NO: 3990766 - RNA, 23 nt, Human herpesvirus 6B
ccgaacgguauuuuuagaugucg

SEQ ID NO: 3990767 - RNA, 17 nt, Human herpesvirus 6B
ccgacuuauuaucucac

SEQ ID NO: 3990768 - RNA, 18 nt, Human herpesvirus 6B
ccgaucugugcgccuuua

SEQ ID NO: 3990769 - RNA, 13 nt, Human herpesvirus 6B
ccgcagaagacuu

SEQ ID NO: 3990770 - RNA, 23 nt, Human herpesvirus 6B
ccgcaguuccuguuuuucucaua

SEQ ID NO: 3990771 - RNA, 23 nt, Human herpesvirus 6B
ccgcaguuucuguuuuucucaua

SEQ ID NO: 3990772 - RNA, 17 nt, Human herpesvirus 6B
ccgcaucgcaccgcaga

SEQ ID NO: 3990773 - RNA, 23 nt, Human herpesvirus 6B
ccgcaucgcaccgcagaucacgu

SEQ ID NO: 3990774 - RNA, 23 nt, Human herpesvirus 6B
ccgcaucgcguucgacaaagaac

SEQ ID NO: 3990775 - RNA, 22 nt, Human herpesvirus 6B
ccgcggcgcugggcuccucacc

SEQ ID NO: 3990776 - RNA, 14 nt, Human herpesvirus 6B
ccgcgggaccuggc

SEQ ID NO: 3990777 - RNA, 12 nt, Human herpesvirus 6B
ccgcgggccagc

SEQ ID NO: 3990778 - RNA, 15 nt, Human herpesvirus 6B
ccgcugacagucacc

SEQ ID NO: 3990779 - RNA, 23 nt, Human herpesvirus 6B
ccgcuuaaaucaaaaaaaugaua

SEQ ID NO: 3990780 - RNA, 13 nt, Human herpesvirus 6B
ccgggcgacgaga

SEQ ID NO: 3990781 - RNA, 18 nt, Human herpesvirus 6B
ccguccucgugcucuccg

SEQ ID NO: 3990782 - RNA, 16 nt, Human herpesvirus 6B
ccgucgucgcucuccc

SEQ ID NO: 3990783 - RNA, 20 nt, Human herpesvirus 6B
ccgucugucuguuccucaga

SEQ ID NO: 3990784 - RNA, 14 nt, Human herpesvirus 6B
ccguggcagaagaa

SEQ ID NO: 3990785 - RNA, 20 nt, Human herpesvirus 6B
ccguuauuguguucugcucu

SEQ ID NO: 3990786 - RNA, 15 nt, Human herpesvirus 6B
ccguucaacaagucc

SEQ ID NO: 3990787 - RNA, 17 nt, Human herpesvirus 6B
ccguucccuucucgucu

SEQ ID NO: 3990788 - RNA, 18 nt, Human herpesvirus 6B
ccuaaauaccauuuuaua

SEQ ID NO: 3990789 - RNA, 16 nt, Human herpesvirus 6B
ccuacggccagagaca

SEQ ID NO: 3990790 - RNA, 20 nt, Human herpesvirus 6B
ccuacgggaagguguuugau

SEQ ID NO: 3990791 - RNA, 20 nt, Human herpesvirus 6B
ccuauucuaauuauaaaugu

SEQ ID NO: 3990792 - RNA, 13 nt, Human herpesvirus 6B
ccucacccugaag

SEQ ID NO: 3990793 - RNA, 17 nt, Human herpesvirus 6B
ccucacccugaagggac

SEQ ID NO: 3990794 - RNA, 20 nt, Human herpesvirus 6B
ccucauagauuucauacugu

SEQ ID NO: 3990795 - RNA, 23 nt, Human herpesvirus 6B
ccuccgcgagacgguacagcgcg

SEQ ID NO: 3990796 - RNA, 15 nt, Human herpesvirus 6B
ccuccguccaggacc

SEQ ID NO: 3990797 - RNA, 19 nt, Human herpesvirus 6B
ccucgaugguagcaauaac

SEQ ID NO: 3990798 - RNA, 19 nt, Human herpesvirus 6B
ccucuugcaguggcgcgcg

SEQ ID NO: 3990799 - RNA, 16 nt, Human herpesvirus 6B
ccugacgguuagauuu

SEQ ID NO: 3990800 - RNA, 21 nt, Human herpesvirus 6B
ccugagaauuuucgaaaagau

SEQ ID NO: 3990801 - RNA, 22 nt, Human herpesvirus 6B
ccugagagcaggagcaggcucc

SEQ ID NO: 3990802 - RNA, 18 nt, Human herpesvirus 6B
ccugagucggcuguccaa

SEQ ID NO: 3990803 - RNA, 13 nt, Human herpesvirus 6B
ccugauccaugag

SEQ ID NO: 3990804 - RNA, 18 nt, Human herpesvirus 6B
ccugaugguuaaggaaaa

SEQ ID NO: 3990805 - RNA, 21 nt, Human herpesvirus 6B
ccugcaauuugaauucugcuc

SEQ ID NO: 3990806 - RNA, 22 nt, Human herpesvirus 6B
ccugccauagaguuucgagaaa

SEQ ID NO: 3990807 - RNA, 18 nt, Human herpesvirus 6B
ccugcuccguucccuucu

SEQ ID NO: 3990808 - RNA, 15 nt, Human herpesvirus 6B
ccugugcguccuccu

SEQ ID NO: 3990809 - RNA, 20 nt, Human herpesvirus 6B
ccuguucgauguacaguuuc

SEQ ID NO: 3990810 - RNA, 16 nt, Human herpesvirus 6B
ccuguuucuacugcug

SEQ ID NO: 3990811 - RNA, 15 nt, Human herpesvirus 6B
ccuuccgcuaccgcc

SEQ ID NO: 3990812 - RNA, 16 nt, Human herpesvirus 6B
ccuuguguauuuguga

SEQ ID NO: 3990813 - RNA, 14 nt, Human herpesvirus 6B
ccuuuaaccauguu

SEQ ID NO: 3990814 - RNA, 16 nt, Human herpesvirus 6B
ccuuuguaaaauguuu

SEQ ID NO: 3990815 - RNA, 15 nt, Human herpesvirus 6B
cgaaaaucauauauu

SEQ ID NO: 3990816 - RNA, 23 nt, Human herpesvirus 6B
cgaaacgugggguaaaaauguua

SEQ ID NO: 3990817 - RNA, 17 nt, Human herpesvirus 6B
cgaacgcguccuccgcg

SEQ ID NO: 3990818 - RNA, 18 nt, Human herpesvirus 6B
cgaagacauucaacauuc

SEQ ID NO: 3990819 - RNA, 15 nt, Human herpesvirus 6B
cgaagucaugaauuu

SEQ ID NO: 3990820 - RNA, 15 nt, Human herpesvirus 6B
cgaaucucaagcaca

SEQ ID NO: 3990821 - RNA, 12 nt, Human herpesvirus 6B
cgacaaagaaca

SEQ ID NO: 3990822 - RNA, 22 nt, Human herpesvirus 6B
cgacacggagugcgacaggaga

SEQ ID NO: 3990823 - RNA, 12 nt, Human herpesvirus 6B
cgaccagcacca

SEQ ID NO: 3990824 - RNA, 12 nt, Human herpesvirus 6B
cgaccucgcucu

SEQ ID NO: 3990825 - RNA, 14 nt, Human herpesvirus 6B
cgaccucgcucucc

SEQ ID NO: 3990826 - RNA, 15 nt, Human herpesvirus 6B
cgaccucgcucuccu

SEQ ID NO: 3990827 - RNA, 20 nt, Human herpesvirus 6B
cgacgcagauuuacgacacg

SEQ ID NO: 3990828 - RNA, 23 nt, Human herpesvirus 6B
cgacgcagauuuacgacacgcuc

SEQ ID NO: 3990829 - RNA, 19 nt, Human herpesvirus 6B
cgagaaacggagagcgaca

SEQ ID NO: 3990830 - RNA, 18 nt, Human herpesvirus 6B
cgagacgguacagcgcgu

SEQ ID NO: 3990831 - RNA, 21 nt, Human herpesvirus 6B
cgagacuggccgcauacaccc

SEQ ID NO: 3990832 - RNA, 22 nt, Human herpesvirus 6B
cgagaguccgaacgaacgccgu

SEQ ID NO: 3990833 - RNA, 16 nt, Human herpesvirus 6B
cgagauucuuuaaaga

SEQ ID NO: 3990834 - RNA, 15 nt, Human herpesvirus 6B
cgagccggacaggag

SEQ ID NO: 3990835 - RNA, 23 nt, Human herpesvirus 6B
cgaggguuuuuuccgaaaacuag

SEQ ID NO: 3990836 - RNA, 18 nt, Human herpesvirus 6B
cgaggucgccagauuggc

SEQ ID NO: 3990837 - RNA, 19 nt, Human herpesvirus 6B
cgauaccgaaucggaagag

SEQ ID NO: 3990838 - RNA, 15 nt, Human herpesvirus 6B
cgauagcuucagggc

SEQ ID NO: 3990839 - RNA, 21 nt, Human herpesvirus 6B
cgauauaaaaaaagagaaguu

SEQ ID NO: 3990840 - RNA, 18 nt, Human herpesvirus 6B
cgauccaguggcaauaau

SEQ ID NO: 3990841 - RNA, 20 nt, Human herpesvirus 6B
cgauuuggguuaucuuagaa

SEQ ID NO: 3990842 - RNA, 15 nt, Human herpesvirus 6B
cgcacguaacaccag

SEQ ID NO: 3990843 - RNA, 21 nt, Human herpesvirus 6B
cgcacucuccgaccagcacca

SEQ ID NO: 3990844 - RNA, 16 nt, Human herpesvirus 6B
cgcagcagcagcucca

SEQ ID NO: 3990845 - RNA, 20 nt, Human herpesvirus 6B
cgcaguuccuguuuuucuca

SEQ ID NO: 3990846 - RNA, 20 nt, Human herpesvirus 6B
cgcauuucucuacaugccac

SEQ ID NO: 3990847 - RNA, 14 nt, Human herpesvirus 6B
cgccauggguguca

SEQ ID NO: 3990848 - RNA, 14 nt, Human herpesvirus 6B
cgccgccuucucug

SEQ ID NO: 3990849 - RNA, 16 nt, Human herpesvirus 6B
cgccgguuuccaugag

SEQ ID NO: 3990850 - RNA, 21 nt, Human herpesvirus 6B
cgccgucgucgcucucccucu

SEQ ID NO: 3990851 - RNA, 13 nt, Human herpesvirus 6B
cgccgugucuuuc

SEQ ID NO: 3990852 - RNA, 18 nt, Human herpesvirus 6B
cgcgacgccuccgccggg

SEQ ID NO: 3990853 - RNA, 15 nt, Human herpesvirus 6B
cgcgccgucagcggc

SEQ ID NO: 3990854 - RNA, 21 nt, Human herpesvirus 6B
cgcggagcacgcacgagaaca

SEQ ID NO: 3990855 - RNA, 18 nt, Human herpesvirus 6B
cgcggggaucgggccugg

SEQ ID NO: 3990856 - RNA, 19 nt, Human herpesvirus 6B
cgcguggcggcgcgcgccg

SEQ ID NO: 3990857 - RNA, 12 nt, Human herpesvirus 6B
cgcucauuuuga

SEQ ID NO: 3990858 - RNA, 22 nt, Human herpesvirus 6B
cgcucgggggacggagaggaag

SEQ ID NO: 3990859 - RNA, 22 nt, Human herpesvirus 6B
cgcugggcuccucacccugaag

SEQ ID NO: 3990860 - RNA, 21 nt, Human herpesvirus 6B
cgcugucgucugagcagaggu

SEQ ID NO: 3990861 - RNA, 21 nt, Human herpesvirus 6B
cggaagugcaugcgacagaca

SEQ ID NO: 3990862 - RNA, 13 nt, Human herpesvirus 6B
cggacagagcgga

SEQ ID NO: 3990863 - RNA, 20 nt, Human herpesvirus 6B
cggacagagcggagaggcgc

SEQ ID NO: 3990864 - RNA, 18 nt, Human herpesvirus 6B
cggacuugcgagucuguc

SEQ ID NO: 3990865 - RNA, 13 nt, Human herpesvirus 6B
cggagcacccggg

SEQ ID NO: 3990866 - RNA, 17 nt, Human herpesvirus 6B
cggagcccugagagcag

SEQ ID NO: 3990867 - RNA, 20 nt, Human herpesvirus 6B
cggaucugccgcguggaagc

SEQ ID NO: 3990868 - RNA, 17 nt, Human herpesvirus 6B
cggcaacgcuccuccca

SEQ ID NO: 3990869 - RNA, 13 nt, Human herpesvirus 6B
cggcacgcgccgu

SEQ ID NO: 3990870 - RNA, 16 nt, Human herpesvirus 6B
cggcagcggggaaggg

SEQ ID NO: 3990871 - RNA, 17 nt, Human herpesvirus 6B
cggcgaauuuaugugaa

SEQ ID NO: 3990872 - RNA, 13 nt, Human herpesvirus 6B
cgggacagcaccc

SEQ ID NO: 3990873 - RNA, 22 nt, Human herpesvirus 6B
cgggcagacgugagacauuuga

SEQ ID NO: 3990874 - RNA, 14 nt, Human herpesvirus 6B
cgggcagggcgggc

SEQ ID NO: 3990875 - RNA, 19 nt, Human herpesvirus 6B
cgggcagggcgggcacgga

SEQ ID NO: 3990876 - RNA, 13 nt, Human herpesvirus 6B
cgggccacgagag

SEQ ID NO: 3990877 - RNA, 14 nt, Human herpesvirus 6B
cgggccagcccuga

SEQ ID NO: 3990878 - RNA, 21 nt, Human herpesvirus 6B
cgggccuggggacagacaggg

SEQ ID NO: 3990879 - RNA, 15 nt, Human herpesvirus 6B
cgggcgacgggcagg

SEQ ID NO: 3990880 - RNA, 20 nt, Human herpesvirus 6B
cgggcucgaagcgacgcaag

SEQ ID NO: 3990881 - RNA, 15 nt, Human herpesvirus 6B
cggggccucccuccg

SEQ ID NO: 3990882 - RNA, 12 nt, Human herpesvirus 6B
cggggcgcaccg

SEQ ID NO: 3990883 - RNA, 17 nt, Human herpesvirus 6B
cgguauuuuuagauguc

SEQ ID NO: 3990884 - RNA, 23 nt, Human herpesvirus 6B
cgguccccccucccuccaucccc

SEQ ID NO: 3990885 - RNA, 13 nt, Human herpesvirus 6B
cggucucuggaag

SEQ ID NO: 3990886 - RNA, 16 nt, Human herpesvirus 6B
cgguuaacuguuucuu

SEQ ID NO: 3990887 - RNA, 17 nt, Human herpesvirus 6B
cguacacggccacccgc

SEQ ID NO: 3990888 - RNA, 15 nt, Human herpesvirus 6B
cgucauuccagucca

SEQ ID NO: 3990889 - RNA, 20 nt, Human herpesvirus 6B
cguccgcgaugcgccacagg

SEQ ID NO: 3990890 - RNA, 14 nt, Human herpesvirus 6B
cguccucagagaaa

SEQ ID NO: 3990891 - RNA, 15 nt, Human herpesvirus 6B
cgucgcucucccucu

SEQ ID NO: 3990892 - RNA, 22 nt, Human herpesvirus 6B
cgucuccgauccgucaggacca

SEQ ID NO: 3990893 - RNA, 15 nt, Human herpesvirus 6B
cgugcacgcgccugu

SEQ ID NO: 3990894 - RNA, 15 nt, Human herpesvirus 6B
cguggccgucuccug

SEQ ID NO: 3990895 - RNA, 18 nt, Human herpesvirus 6B
cguggccgucuccugcaa

SEQ ID NO: 3990896 - RNA, 20 nt, Human herpesvirus 6B
cgugggggcagaacugagau

SEQ ID NO: 3990897 - RNA, 14 nt, Human herpesvirus 6B
cgugguugucuuug

SEQ ID NO: 3990898 - RNA, 18 nt, Human herpesvirus 6B
cguguuauuagacaccuc

SEQ ID NO: 3990899 - RNA, 18 nt, Human herpesvirus 6B
cguuagacaaaaacaugu

SEQ ID NO: 3990900 - RNA, 14 nt, Human herpesvirus 6B
cguugaugaaauaa

SEQ ID NO: 3990901 - RNA, 20 nt, Human herpesvirus 6B
cguuugucuaugcaaugucu

SEQ ID NO: 3990902 - RNA, 16 nt, Human herpesvirus 6B
cguuuucgauuuagag

SEQ ID NO: 3990903 - RNA, 16 nt, Human herpesvirus 6B
cguuuuuucugcaaaa

SEQ ID NO: 3990904 - RNA, 14 nt, Human herpesvirus 6B
cuaaaaccugcuaa

SEQ ID NO: 3990905 - RNA, 17 nt, Human herpesvirus 6B
cuaaaagauuguuuuca

SEQ ID NO: 3990906 - RNA, 19 nt, Human herpesvirus 6B
cuaaacugaagaauggaaa

SEQ ID NO: 3990907 - RNA, 21 nt, Human herpesvirus 6B
cuaacaauaauugcauuuugg

SEQ ID NO: 3990908 - RNA, 21 nt, Human herpesvirus 6B
cuaacggagcaaccgcaguuc

SEQ ID NO: 3990909 - RNA, 16 nt, Human herpesvirus 6B
cuaagcuggacagaaa

SEQ ID NO: 3990910 - RNA, 20 nt, Human herpesvirus 6B
cuaagugugcguuauuuucu

SEQ ID NO: 3990911 - RNA, 17 nt, Human herpesvirus 6B
cuaauaaaauauaacgc

SEQ ID NO: 3990912 - RNA, 16 nt, Human herpesvirus 6B
cuaauuauaaauguag

SEQ ID NO: 3990913 - RNA, 16 nt, Human herpesvirus 6B
cuacaaaguucucaga

SEQ ID NO: 3990914 - RNA, 13 nt, Human herpesvirus 6B
cuacaaucauuua

SEQ ID NO: 3990915 - RNA, 13 nt, Human herpesvirus 6B
cuacgcggcaagu

SEQ ID NO: 3990916 - RNA, 18 nt, Human herpesvirus 6B
cuagagguuuucuuuccc

SEQ ID NO: 3990917 - RNA, 16 nt, Human herpesvirus 6B
cuagcaaugauacauc

SEQ ID NO: 3990918 - RNA, 22 nt, Human herpesvirus 6B
gcagaugcuuaccgguguuuua

SEQ ID NO: 3990919 - RNA, 17 nt, Human herpesvirus 6B
gcagcagaggccggcac

SEQ ID NO: 3990920 - RNA, 14 nt, Human herpesvirus 6B
gcagcggggaaggg

SEQ ID NO: 3990921 - RNA, 18 nt, Human herpesvirus 6B
gcaggcgcgucggcggga

SEQ ID NO: 3990922 - RNA, 13 nt, Human herpesvirus 6B
gcagggaaagagc

SEQ ID NO: 3990923 - RNA, 15 nt, Human herpesvirus 6B
gcaugaacgguaguu

SEQ ID NO: 3990924 - RNA, 23 nt, Human herpesvirus 6B
gcaugacacaucgugaguuuuca

SEQ ID NO: 3990925 - RNA, 18 nt, Human herpesvirus 6B
gcauucauaauugugaua

SEQ ID NO: 3990926 - RNA, 17 nt, Human herpesvirus 6B
gccaccucuucuccgcc

SEQ ID NO: 3990927 - RNA, 16 nt, Human herpesvirus 6B
gccagcccugaagaag

SEQ ID NO: 3990928 - RNA, 19 nt, Human herpesvirus 6B
gccaguaucgcgagcacca

SEQ ID NO: 3990929 - RNA, 23 nt, Human herpesvirus 6B
gccccuccguccaggacccgagg

SEQ ID NO: 3990930 - RNA, 15 nt, Human herpesvirus 6B
gcccgggcgcggggc

SEQ ID NO: 3990931 - RNA, 15 nt, Human herpesvirus 6B
gcccucccgcagcuc

SEQ ID NO: 3990932 - RNA, 22 nt, Human herpesvirus 6B
gcccuccuggguacggcaaacu

SEQ ID NO: 3990933 - RNA, 15 nt, Human herpesvirus 6B
gcccugagagcagga

SEQ ID NO: 3990934 - RNA, 19 nt, Human herpesvirus 6B
gcccugagagcaggagcag

SEQ ID NO: 3990935 - RNA, 20 nt, Human herpesvirus 6B
gcccugcuccguucccuucu

SEQ ID NO: 3990936 - RNA, 21 nt, Human herpesvirus 6B
gccgauagcggccgggcgacg

SEQ ID NO: 3990937 - RNA, 20 nt, Human herpesvirus 6B
gccgcguggaagccgcugca

SEQ ID NO: 3990938 - RNA, 16 nt, Human herpesvirus 6B
gccgucaccugcacug

SEQ ID NO: 3990939 - RNA, 20 nt, Human herpesvirus 6B
gccgucgucgcucucccucu

SEQ ID NO: 3990940 - RNA, 24 nt, Human herpesvirus 6B
gccgucugucuguuccucagauuc

SEQ ID NO: 3990941 - RNA, 20 nt, Human herpesvirus 6B
gccgugagaaacgcaaaggg

SEQ ID NO: 3990942 - RNA, 19 nt, Human herpesvirus 6B
gccguugccuuggccgcgc

SEQ ID NO: 3990943 - RNA, 23 nt, Human herpesvirus 6B
gccuauucuaauuauaaauguag

SEQ ID NO: 3990944 - RNA, 22 nt, Human herpesvirus 6B
gccuccucuuuuccccccgccg

SEQ ID NO: 3990945 - RNA, 19 nt, Human herpesvirus 6B
gccugcagcgauauggaaa

SEQ ID NO: 3990946 - RNA, 14 nt, Human herpesvirus 6B
gccuggggacagac

SEQ ID NO: 3990947 - RNA, 18 nt, Human herpesvirus 6B
gccuuguguauuugugaa

SEQ ID NO: 3990948 - RNA, 20 nt, Human herpesvirus 6B
gcgagucugucaguggcuug

SEQ ID NO: 3990949 - RNA, 17 nt, Human herpesvirus 6B
gcgcaaaccaagguguu

SEQ ID NO: 3990950 - RNA, 16 nt, Human herpesvirus 6B
gcgccucccauagagg

SEQ ID NO: 3990951 - RNA, 14 nt, Human herpesvirus 6B
gcgcgacggagaug

SEQ ID NO: 3990952 - RNA, 15 nt, Human herpesvirus 6B
gcgcgacggagaugc

SEQ ID NO: 3990953 - RNA, 17 nt, Human herpesvirus 6B
gcgcggagcacgcacga

SEQ ID NO: 3990954 - RNA, 13 nt, Human herpesvirus 6B
gcggccaggccgc

SEQ ID NO: 3990955 - RNA, 16 nt, Human herpesvirus 6B
gcggcucauacccggc

SEQ ID NO: 3990956 - RNA, 21 nt, Human herpesvirus 6B
gcggggcgcaccggcgacacg

SEQ ID NO: 3990957 - RNA, 14 nt, Human herpesvirus 6B
gcgguucgacagag

SEQ ID NO: 3990958 - RNA, 16 nt, Human herpesvirus 6B
gcguguuauggggaag

SEQ ID NO: 3990959 - RNA, 23 nt, Human herpesvirus 6B
gcguuucucgccaugggugucag

SEQ ID NO: 3990960 - RNA, 13 nt, Human herpesvirus 6B
gcuauguaugaac

SEQ ID NO: 3990961 - RNA, 21 nt, Human herpesvirus 6B
gcuauuugacaauaaacauga

SEQ ID NO: 3990962 - RNA, 14 nt, Human herpesvirus 6B
gcucagauguggaa

SEQ ID NO: 3990963 - RNA, 13 nt, Human herpesvirus 6B
gcucauggaucag

SEQ ID NO: 3990964 - RNA, 17 nt, Human herpesvirus 6B
gcuccgagcgggauccc

SEQ ID NO: 3990965 - RNA, 13 nt, Human herpesvirus 6B
gcuccgcgcggcc

SEQ ID NO: 3990966 - RNA, 16 nt, Human herpesvirus 6B
gcucuccguuucucgg

SEQ ID NO: 3990967 - RNA, 13 nt, Human herpesvirus 6B
gcucuguucucuc

SEQ ID NO: 3990968 - RNA, 19 nt, Human herpesvirus 6B
gcugcguuccaugugucuc

SEQ ID NO: 3990969 - RNA, 12 nt, Human herpesvirus 6B
gcugcuggguac

SEQ ID NO: 3990970 - RNA, 12 nt, Human herpesvirus 6B
gcugcugggugu

SEQ ID NO: 3990971 - RNA, 22 nt, Human herpesvirus 6B
gcugggacuccgagccggacag

SEQ ID NO: 3990972 - RNA, 14 nt, Human herpesvirus 6B
gcugguuugcuuug

SEQ ID NO: 3990973 - RNA, 14 nt, Human herpesvirus 6B
gcugucacacucug

SEQ ID NO: 3990974 - RNA, 23 nt, Human herpesvirus 6B
gcugugcuuuguauguaucugaa

SEQ ID NO: 3990975 - RNA, 22 nt, Human herpesvirus 6B
gcuuaggauguaaaugcagaca

SEQ ID NO: 3990976 - RNA, 23 nt, Human herpesvirus 6B
gcuucacguccagcgcauccuua

SEQ ID NO: 3990977 - RNA, 13 nt, Human herpesvirus 6B
gcuuccggagaag

SEQ ID NO: 3990978 - RNA, 12 nt, Human herpesvirus 6B
gcuuuaaagcag

SEQ ID NO: 3990979 - RNA, 14 nt, Human herpesvirus 6B
gcuuugguggaaaa

SEQ ID NO: 3990980 - RNA, 14 nt, Human herpesvirus 6B
gcuuuuaguuucaa

SEQ ID NO: 3990981 - RNA, 21 nt, Human herpesvirus 6B
ggaacacgucguggcagaaca

SEQ ID NO: 3990982 - RNA, 15 nt, Human herpesvirus 6B
ggaacggugaagcgg

SEQ ID NO: 3990983 - RNA, 16 nt, Human herpesvirus 6B
ggaagaaaggaguuug

SEQ ID NO: 3990984 - RNA, 19 nt, Human herpesvirus 6B
ggaagaucaugacaaggau

SEQ ID NO: 3990985 - RNA, 17 nt, Human herpesvirus 6B
ggaagauucugcagaau

SEQ ID NO: 3990986 - RNA, 16 nt, Human herpesvirus 6B
ggaauauauagaagaa

SEQ ID NO: 3990987 - RNA, 16 nt, Human herpesvirus 6B
ggacacgcgcggugga

SEQ ID NO: 3990988 - RNA, 20 nt, Human herpesvirus 6B
ggaccaugcagcugcccgug

SEQ ID NO: 3990989 - RNA, 15 nt, Human herpesvirus 6B
ggacccuccacgccc

SEQ ID NO: 3990990 - RNA, 13 nt, Human herpesvirus 6B
ggacggacagagc

SEQ ID NO: 3990991 - RNA, 14 nt, Human herpesvirus 6B
ggacuaccgaugcu

SEQ ID NO: 3990992 - RNA, 20 nt, Human herpesvirus 6B
ggacuccgagccggacagga

SEQ ID NO: 3990993 - RNA, 19 nt, Human herpesvirus 6B
ggacucucgucgcccggcc

SEQ ID NO: 3990994 - RNA, 15 nt, Human herpesvirus 6B
ggagaacgggcaacu

SEQ ID NO: 3990995 - RNA, 23 nt, Human herpesvirus 6B
ggagaaguauuucgaucagauua

SEQ ID NO: 3990996 - RNA, 15 nt, Human herpesvirus 6B
ggagaggaagccgga

SEQ ID NO: 3990997 - RNA, 14 nt, Human herpesvirus 6B
ggagaggcgcggga

SEQ ID NO: 3990998 - RNA, 18 nt, Human herpesvirus 6B
ggagagugcggggagaua

SEQ ID NO: 3990999 - RNA, 11 nt, Human herpesvirus 6B
ggagcacgagc

SEQ ID NO: 3991000 - RNA, 19 nt, Human herpesvirus 6B
ggagcuaguuacggggaag

SEQ ID NO: 3991001 - RNA, 11 nt, Human herpesvirus 6B
ggaggagaggg

SEQ ID NO: 3991002 - RNA, 22 nt, Human herpesvirus 6B
ggagggacccacacgcggggau

SEQ ID NO: 3991003 - RNA, 22 nt, Human herpesvirus 6B
ggaggggaauacaccggagacc

SEQ ID NO: 3991004 - RNA, 15 nt, Human herpesvirus 6B
ggagucggucuguuc

SEQ ID NO: 3991005 - RNA, 15 nt, Human herpesvirus 6B
ggagucuggccucug

SEQ ID NO: 3991006 - RNA, 21 nt, Human herpesvirus 6B
ggaucugccgcguggaagccg

SEQ ID NO: 3991007 - RNA, 15 nt, Human herpesvirus 6B
ggauuacaagggaaa

SEQ ID NO: 3991008 - RNA, 16 nt, Human herpesvirus 6B
ggauucgaucgagaau

SEQ ID NO: 3991009 - RNA, 20 nt, Human herpesvirus 6B
ggcaacuccccauucaacau

SEQ ID NO: 3991010 - RNA, 17 nt, Human herpesvirus 6B
ggcauguguaagaaaac

SEQ ID NO: 3991011 - RNA, 14 nt, Human herpesvirus 6B
ggccgaaggauggu

SEQ ID NO: 3991012 - RNA, 20 nt, Human herpesvirus 6B
ggccggucggggaggggagg

SEQ ID NO: 3991013 - RNA, 21 nt, Human herpesvirus 6B
ggcgacacgcgcggaccacuc

SEQ ID NO: 3991014 - RNA, 18 nt, Human herpesvirus 6B
ggcgaccgugaugagaga

SEQ ID NO: 3991015 - RNA, 12 nt, Human herpesvirus 6B
ggcgcagaauua

SEQ ID NO: 3991016 - RNA, 19 nt, Human herpesvirus 6B
ggcgcagggaacggugaag

SEQ ID NO: 3991017 - RNA, 22 nt, Human herpesvirus 6B
ggcggaggcgucgcggugguga

SEQ ID NO: 3991018 - RNA, 13 nt, Human herpesvirus 6B
ggcgggcacggag

SEQ ID NO: 3991019 - RNA, 19 nt, Human herpesvirus 6B
ggcuccucacccugaaggg

SEQ ID NO: 3991020 - RNA, 22 nt, Human herpesvirus 6B
ggcugauauacgauggacagaa

SEQ ID NO: 3991021 - RNA, 21 nt, Human herpesvirus 6B
ggcuugcugucgcccgccucu

SEQ ID NO: 3991022 - RNA, 19 nt, Human herpesvirus 6B
gggaagccagccgcccucc

SEQ ID NO: 3991023 - RNA, 18 nt, Human herpesvirus 6B
gggaauuucauguuuacu

SEQ ID NO: 3991024 - RNA, 9 nt, Human herpesvirus 6B
gggaggaga

SEQ ID NO: 3991025 - RNA, 13 nt, Human herpesvirus 6B
gggaggagaggga

SEQ ID NO: 3991026 - RNA, 19 nt, Human herpesvirus 6B
gggccggucggggagggga

SEQ ID NO: 3991027 - RNA, 21 nt, Human herpesvirus 6B
gggccuggggacagacagggg

SEQ ID NO: 3991028 - RNA, 16 nt, Human herpesvirus 6B
gggcgucgucaacucc

SEQ ID NO: 3991029 - RNA, 22 nt, Human herpesvirus 6B
gggcuacuacguuaguaaggaa

SEQ ID NO: 3991030 - RNA, 23 nt, Human herpesvirus 6B
gggcuccucacccugaagggacc

SEQ ID NO: 3991031 - RNA, 13 nt, Human herpesvirus 6B
uaaggucaaauau

SEQ ID NO: 3991032 - RNA, 22 nt, Human herpesvirus 6B
uaagugugcguuauuuucugua

SEQ ID NO: 3991033 - RNA, 17 nt, Human herpesvirus 6B
uaauaaaccuaacagag

SEQ ID NO: 3991034 - RNA, 19 nt, Human herpesvirus 6B
uaauagaaaaaucaucaaa

SEQ ID NO: 3991035 - RNA, 17 nt, Human herpesvirus 6B
uaauaucgaauucagcu

SEQ ID NO: 3991036 - RNA, 16 nt, Human herpesvirus 6B
uaaucaucccaauaaa

SEQ ID NO: 3991037 - RNA, 14 nt, Human herpesvirus 6B
uaaugaaauuuaag

SEQ ID NO: 3991038 - RNA, 22 nt, Human herpesvirus 6B
uaauguaucaaaguguauacau

SEQ ID NO: 3991039 - RNA, 23 nt, Human herpesvirus 6B
uaauucaaauguagcaaaugaau

SEQ ID NO: 3991040 - RNA, 23 nt, Human herpesvirus 6B
uaauuucagcuuugaacaucuau

SEQ ID NO: 3991041 - RNA, 17 nt, Human herpesvirus 6B
uacaguuucucgaaaau

SEQ ID NO: 3991042 - RNA, 22 nt, Human herpesvirus 6B
uacauaugccgacuguuucuua

SEQ ID NO: 3991043 - RNA, 20 nt, Human herpesvirus 6B
uacaucaacuauuuaacauc

SEQ ID NO: 3991044 - RNA, 16 nt, Human herpesvirus 6B
uacaucguuuguugaa

SEQ ID NO: 3991045 - RNA, 20 nt, Human herpesvirus 6B
uacauucaaucuguauaaga

SEQ ID NO: 3991046 - RNA, 15 nt, Human herpesvirus 6B
uacauuguuucucua

SEQ ID NO: 3991047 - RNA, 16 nt, Human herpesvirus 6B
uacauuguuucucuaa

SEQ ID NO: 3991048 - RNA, 22 nt, Human herpesvirus 6B
uaccauuuuauacgaaaauaaa

SEQ ID NO: 3991049 - RNA, 14 nt, Human herpesvirus 6B
uacgaagacaagcc

SEQ ID NO: 3991050 - RNA, 18 nt, Human herpesvirus 6B
uacgauuuucuaauacua

SEQ ID NO: 3991051 - RNA, 18 nt, Human herpesvirus 6B
uacgggaagguguuugau

SEQ ID NO: 3991052 - RNA, 16 nt, Human herpesvirus 6B
uacuacgagaaaaggu

SEQ ID NO: 3991053 - RNA, 17 nt, Human herpesvirus 6B
uacucuggcugaaggaa

SEQ ID NO: 3991054 - RNA, 13 nt, Human herpesvirus 6B
uacuguaaacaaa

SEQ ID NO: 3991055 - RNA, 18 nt, Human herpesvirus 6B
uacuguguauuguguacc

SEQ ID NO: 3991056 - RNA, 22 nt, Human herpesvirus 6B
uacuucucuuuauagagcaauu

SEQ ID NO: 3991057 - RNA, 20 nt, Human herpesvirus 6B
uacuuuugggauuuuucaua

SEQ ID NO: 3991058 - RNA, 22 nt, Human herpesvirus 6B
uagaaaaauaagacuuagcuag

SEQ ID NO: 3991059 - RNA, 15 nt, Human herpesvirus 6B
uagaaauuuuuugca

SEQ ID NO: 3991060 - RNA, 15 nt, Human herpesvirus 6B
uagaagaagaaauac

SEQ ID NO: 3991061 - RNA, 20 nt, Human herpesvirus 6B
uagacaauuuaucgugcuug

SEQ ID NO: 3991062 - RNA, 18 nt, Human herpesvirus 6B
uagacuaaacuuaacuua

SEQ ID NO: 3991063 - RNA, 13 nt, Human herpesvirus 6B
uagagauuuugga

SEQ ID NO: 3991064 - RNA, 13 nt, Human herpesvirus 6B
uaggacugaagga

SEQ ID NO: 3991065 - RNA, 16 nt, Human herpesvirus 6B
uaggacugaaggagau

SEQ ID NO: 3991066 - RNA, 14 nt, Human herpesvirus 6B
uaggaucagacaga

SEQ ID NO: 3991067 - RNA, 14 nt, Human herpesvirus 6B
uaggguuaggguua

SEQ ID NO: 3991068 - RNA, 12 nt, Human herpesvirus 6B
uaguaaggaaga

SEQ ID NO: 3991069 - RNA, 17 nt, Human herpesvirus 6B
uauaaaugugagcaguu

SEQ ID NO: 3991070 - RNA, 16 nt, Human herpesvirus 6B
uauaguaagaggcuua

SEQ ID NO: 3991071 - RNA, 22 nt, Human herpesvirus 6B
uauaguuauucagauuucugua

SEQ ID NO: 3991072 - RNA, 16 nt, Human herpesvirus 6B
uauauagaagaagaaa

SEQ ID NO: 3991073 - RNA, 15 nt, Human herpesvirus 6B
uauaucaaacuuuuu

SEQ ID NO: 3991074 - RNA, 14 nt, Human herpesvirus 6B
uauaugaaaugucu

SEQ ID NO: 3991075 - RNA, 15 nt, Human herpesvirus 6B
uauauugcucaaaau

SEQ ID NO: 3991076 - RNA, 15 nt, Human herpesvirus 6B
uaucaaacaacuguu

SEQ ID NO: 3991077 - RNA, 22 nt, Human herpesvirus 6B
uaucaagcucgaguucgagaag

SEQ ID NO: 3991078 - RNA, 17 nt, Human herpesvirus 6B
uaucacuuuauuucuaa

SEQ ID NO: 3991079 - RNA, 23 nt, Human herpesvirus 6B
uaucccucguacaagcuuaauaa

SEQ ID NO: 3991080 - RNA, 16 nt, Human herpesvirus 6B
uaucguccucagagaa

SEQ ID NO: 3991081 - RNA, 20 nt, Human herpesvirus 6B
uaucucaacguauugggaag

SEQ ID NO: 3991082 - RNA, 19 nt, Human herpesvirus 6B
uaucucgaaaccaagacuu

SEQ ID NO: 3991083 - RNA, 23 nt, Human herpesvirus 6B
uaucugaaaucgcauuucucuac

SEQ ID NO: 3991084 - RNA, 23 nt, Human herpesvirus 6B
uaucuuacuguaaacaaauucuu

SEQ ID NO: 3991085 - RNA, 18 nt, Human herpesvirus 6B
uaugaauggggcuacuac

SEQ ID NO: 3991086 - RNA, 13 nt, Human herpesvirus 6B
uaugaaugugaga

SEQ ID NO: 3991087 - RNA, 9 nt, Human herpesvirus 6B
uaugagaau

SEQ ID NO: 3991088 - RNA, 16 nt, Human herpesvirus 6B
uaugagacuuacaguu

SEQ ID NO: 3991089 - RNA, 15 nt, Human herpesvirus 6B
uaugcaacugcauuu

SEQ ID NO: 3991090 - RNA, 19 nt, Human herpesvirus 6B
uauguaaagaaacaaaauu

SEQ ID NO: 3991091 - RNA, 15 nt, Human herpesvirus 6B
uaugucgauacaaua

SEQ ID NO: 3991092 - RNA, 16 nt, Human herpesvirus 6B
uaugucguuucauggg

SEQ ID NO: 3991093 - RNA, 16 nt, Human herpesvirus 6B
uauguggaaauuaaaa

SEQ ID NO: 3991094 - RNA, 20 nt, Human herpesvirus 6B
uauguuaacauugugagaac

SEQ ID NO: 3991095 - RNA, 22 nt, Human herpesvirus 6B
uauuaagaaugaauuugagaag

SEQ ID NO: 3991096 - RNA, 20 nt, Human herpesvirus 6B
uauuaauuuuuuguuucuga

SEQ ID NO: 3991097 - RNA, 16 nt, Human herpesvirus 6B
uauuagaucuucuuca

SEQ ID NO: 3991098 - RNA, 19 nt, Human herpesvirus 6B
uauucuaauuauaaaugua

SEQ ID NO: 3991099 - RNA, 12 nt, Human herpesvirus 6B
uauugcuacaaa

SEQ ID NO: 3991100 - RNA, 20 nt, Human herpesvirus 6B
uauuguguguacaacgacug

SEQ ID NO: 3991101 - RNA, 20 nt, Human herpesvirus 6B
uauuucugguuguguuaauc

SEQ ID NO: 3991102 - RNA, 21 nt, Human herpesvirus 6B
uauuucuuuuuaaaaucaaaa

SEQ ID NO: 3991103 - RNA, 14 nt, Human herpesvirus 6B
uauuugaaacugaa

SEQ ID NO: 3991104 - RNA, 14 nt, Human herpesvirus 6B
uauuuuauuuugug

SEQ ID NO: 3991105 - RNA, 15 nt, Human herpesvirus 6B
ucaaaaaaaaaugac

SEQ ID NO: 3991106 - RNA, 13 nt, Human herpesvirus 6B
ucaaaaucugcua

SEQ ID NO: 3991107 - RNA, 21 nt, Human herpesvirus 6B
ucaaacaacuguuguguuuga

SEQ ID NO: 3991108 - RNA, 14 nt, Human herpesvirus 6B
ucaaauauggcaga

SEQ ID NO: 3991109 - RNA, 14 nt, Human herpesvirus 6B
ucaaauguagcaaa

SEQ ID NO: 3991110 - RNA, 15 nt, Human herpesvirus 6B
ucaacuauuuaacau

SEQ ID NO: 3991111 - RNA, 14 nt, Human herpesvirus 6B
ucaaggaaacguug

SEQ ID NO: 3991112 - RNA, 20 nt, Human herpesvirus 6B
ucaagggcaagguucucagc

SEQ ID NO: 3991113 - RNA, 19 nt, Human herpesvirus 6B
ucaaguuagaaauguugcc

SEQ ID NO: 3991114 - RNA, 23 nt, Human herpesvirus 6B
ucaauguaugcgaggcuuuugau

SEQ ID NO: 3991115 - RNA, 20 nt, Human herpesvirus 6B
ucacaaccaaacaguuucag

SEQ ID NO: 3991116 - RNA, 19 nt, Human herpesvirus 6B
ucacacagcaugaacucuc

SEQ ID NO: 3991117 - RNA, 17 nt, Human herpesvirus 6B
ucaccaugaaagcacag

SEQ ID NO: 3991118 - RNA, 17 nt, Human herpesvirus 6B
ucaccgaaauccccaga

SEQ ID NO: 3991119 - RNA, 20 nt, Human herpesvirus 6B
ucacgcggaccgacgacaaa

SEQ ID NO: 3991120 - RNA, 15 nt, Human herpesvirus 6B
ucacguacuuaugau

SEQ ID NO: 3991121 - RNA, 20 nt, Human herpesvirus 6B
ucacuaacuucaagaauucu

SEQ ID NO: 3991122 - RNA, 21 nt, Human herpesvirus 6B
ucacucacauagagaagaauc

SEQ ID NO: 3991123 - RNA, 23 nt, Human herpesvirus 6B
ucacucgaggaaacgcgcuggga

SEQ ID NO: 3991124 - RNA, 19 nt, Human herpesvirus 6B
ucagcggguaccgcgguug

SEQ ID NO: 3991125 - RNA, 19 nt, Human herpesvirus 6B
ucagcuucuucuacuuuau

SEQ ID NO: 3991126 - RNA, 16 nt, Human herpesvirus 6B
ucaguaaacuuacgua

SEQ ID NO: 3991127 - RNA, 16 nt, Human herpesvirus 6B
ucagugucagcauugu

SEQ ID NO: 3991128 - RNA, 17 nt, Human herpesvirus 6B
ucauaggcacuuaccca

SEQ ID NO: 3991129 - RNA, 15 nt, Human herpesvirus 6B
ucauauauugaaauu

SEQ ID NO: 3991130 - RNA, 19 nt, Human herpesvirus 6B
ucaugauaaauuguuuccg

SEQ ID NO: 3991131 - RNA, 19 nt, Human herpesvirus 6B
ucaugccgccgaagaaaga

SEQ ID NO: 3991132 - RNA, 13 nt, Human herpesvirus 6B
ucaugucuuacag

SEQ ID NO: 3991133 - RNA, 12 nt, Human herpesvirus 6B
ucaugugaaauu

SEQ ID NO: 3991134 - RNA, 21 nt, Human herpesvirus 6B
ucauucgauuaaugccacagg

SEQ ID NO: 3991135 - RNA, 16 nt, Human herpesvirus 6B
ucauucgcguggcggc

SEQ ID NO: 3991136 - RNA, 20 nt, Human herpesvirus 6B
ucauuucgaucuaacuacau

SEQ ID NO: 3991137 - RNA, 14 nt, Human herpesvirus 6B
ucauuuuuacucau

SEQ ID NO: 3991138 - RNA, 16 nt, Human herpesvirus 6B
uccaaacuauguguua

SEQ ID NO: 3991139 - RNA, 20 nt, Human herpesvirus 6B
uccaaagucguugaauucuc

SEQ ID NO: 3991140 - RNA, 18 nt, Human herpesvirus 6B
uccaauaguagauuuuca

SEQ ID NO: 3991141 - RNA, 13 nt, Human herpesvirus 6B
uccaaucacgaaa

SEQ ID NO: 3991142 - RNA, 15 nt, Human herpesvirus 6B
uccaaugaauacuuc

SEQ ID NO: 3991143 - RNA, 12 nt, Human herpesvirus 6B
uccacagggcau

SEQ ID NO: 3991144 - RNA, 18 nt, Human herpesvirus 6B
aaaaagaacugucgcauc

SEQ ID NO: 3991145 - RNA, 20 nt, Human herpesvirus 6B
aaaaauauugguauugauuu

SEQ ID NO: 3991146 - RNA, 21 nt, Human herpesvirus 6B
aaaaccccacggagaaaucuu

SEQ ID NO: 3991147 - RNA, 14 nt, Human herpesvirus 6B
aaaaccugcuaacg

SEQ ID NO: 3991148 - RNA, 16 nt, Human herpesvirus 6B
aaaacgugagguguau

SEQ ID NO: 3991149 - RNA, 20 nt, Human herpesvirus 6B
aaaacuauacuaugauagaa

SEQ ID NO: 3991150 - RNA, 13 nt, Human herpesvirus 6B
aaaagccccugcu

SEQ ID NO: 3991151 - RNA, 20 nt, Human herpesvirus 6B
aaaaguuaguuuuggauggc

SEQ ID NO: 3991152 - RNA, 21 nt, Human herpesvirus 6B
aaaauaauccucuuagacacu

SEQ ID NO: 3991153 - RNA, 18 nt, Human herpesvirus 6B
aaaauacuauguggaaau

SEQ ID NO: 3991154 - RNA, 19 nt, Human herpesvirus 6B
aaaauauggaaacgaaugu

SEQ ID NO: 3991155 - RNA, 14 nt, Human herpesvirus 6B
aaaauauuggauuu

SEQ ID NO: 3991156 - RNA, 15 nt, Human herpesvirus 6B
aaaaucaucaaaugu

SEQ ID NO: 3991157 - RNA, 17 nt, Human herpesvirus 6B
aaaaucucgaugccaaa

SEQ ID NO: 3991158 - RNA, 14 nt, Human herpesvirus 6B
aaaaucugcuaacg

SEQ ID NO: 3991159 - RNA, 17 nt, Human herpesvirus 6B
aaaauuacuaaugugga

SEQ ID NO: 3991160 - RNA, 21 nt, Human herpesvirus 6B
aaaauugucuacaaucauuua

SEQ ID NO: 3991161 - RNA, 19 nt, Human herpesvirus 6B
aaacagauuuuacuucuac

SEQ ID NO: 3991162 - RNA, 13 nt, Human herpesvirus 6B
aaacauaaaaugu

SEQ ID NO: 3991163 - RNA, 14 nt, Human herpesvirus 6B
aaacaugauuguaa

SEQ ID NO: 3991164 - RNA, 19 nt, Human herpesvirus 6B
aaaccaggaauccuauuca

SEQ ID NO: 3991165 - RNA, 22 nt, Human herpesvirus 6B
aaacgacuaucuccuugaugau

SEQ ID NO: 3991166 - RNA, 13 nt, Human herpesvirus 6B
aaacggagacugc

SEQ ID NO: 3991167 - RNA, 23 nt, Human herpesvirus 6B
aaacggagacugcacagaaucga

SEQ ID NO: 3991168 - RNA, 19 nt, Human herpesvirus 6B
aaacugaagaauggaaaga

SEQ ID NO: 3991169 - RNA, 15 nt, Human herpesvirus 6B
aaagaaaaaacagag

SEQ ID NO: 3991170 - RNA, 19 nt, Human herpesvirus 6B
aaagauguguuaaagaaug

SEQ ID NO: 3991171 - RNA, 13 nt, Human herpesvirus 6B
aaagcugcuaacg

SEQ ID NO: 3991172 - RNA, 23 nt, Human herpesvirus 6B
aaaggaguuugcauuuggugauu

SEQ ID NO: 3991173 - RNA, 11 nt, Human herpesvirus 6B
aaagggaaguc

SEQ ID NO: 3991174 - RNA, 19 nt, Human herpesvirus 6B
aaagggaagucaaggaaac

SEQ ID NO: 3991175 - RNA, 22 nt, Human herpesvirus 6B
aaaggggauacuuuguuuucuu

SEQ ID NO: 3991176 - RNA, 16 nt, Human herpesvirus 6B
aaaguuuuggaaaaug

SEQ ID NO: 3991177 - RNA, 16 nt, Human herpesvirus 6B
aaauaucgucucuaac

SEQ ID NO: 3991178 - RNA, 22 nt, Human herpesvirus 6B
aaaucaaggaagagaaugaauc

SEQ ID NO: 3991179 - RNA, 15 nt, Human herpesvirus 6B
aaaucauauauugaa

SEQ ID NO: 3991180 - RNA, 22 nt, Human herpesvirus 6B
aaaugacaaugugaaguucgau

SEQ ID NO: 3991181 - RNA, 14 nt, Human herpesvirus 6B
aaaugaccagagau

SEQ ID NO: 3991182 - RNA, 13 nt, Human herpesvirus 6B
aaauggaguuaug

SEQ ID NO: 3991183 - RNA, 21 nt, Human herpesvirus 6B
aaaugucacucacauagagaa

SEQ ID NO: 3991184 - RNA, 17 nt, Human herpesvirus 6B
aaauuucaaaaagaaug

SEQ ID NO: 3991185 - RNA, 16 nt, Human herpesvirus 6B
aacaaagaacuuugug

SEQ ID NO: 3991186 - RNA, 19 nt, Human herpesvirus 6B
aacaaagagcuuuaaagca

SEQ ID NO: 3991187 - RNA, 18 nt, Human herpesvirus 6B
aacaaagucuuuggcuug

SEQ ID NO: 3991188 - RNA, 18 nt, Human herpesvirus 6B
aacacacacggagaauac

SEQ ID NO: 3991189 - RNA, 22 nt, Human herpesvirus 6B
aacacuuucuucgccuguaaag

SEQ ID NO: 3991190 - RNA, 13 nt, Human herpesvirus 6B
aacagaaaggcca

SEQ ID NO: 3991191 - RNA, 15 nt, Human herpesvirus 6B
aacagaguuuucaua

SEQ ID NO: 3991192 - RNA, 15 nt, Human herpesvirus 6B
aacaugauuguaaua

SEQ ID NO: 3991193 - RNA, 15 nt, Human herpesvirus 6B
aacauguauucuccu

SEQ ID NO: 3991194 - RNA, 17 nt, Human herpesvirus 6B
aaccaugcaucuugcaa

SEQ ID NO: 3991195 - RNA, 22 nt, Human herpesvirus 6B
aaccgaaaacacccugauggau

SEQ ID NO: 3991196 - RNA, 23 nt, Human herpesvirus 6B
aaccgcaguuccuguuuuucuca

SEQ ID NO: 3991197 - RNA, 21 nt, Human herpesvirus 6B
aaccgcaguuucuguuuuucu

SEQ ID NO: 3991198 - RNA, 14 nt, Human herpesvirus 6B
aacgacugggagaa

SEQ ID NO: 3991199 - RNA, 19 nt, Human herpesvirus 6B
aacgagaagacaguuuacu

SEQ ID NO: 3991200 - RNA, 21 nt, Human herpesvirus 6B
aacgagaauuccaaggcucug

SEQ ID NO: 3991201 - RNA, 20 nt, Human herpesvirus 6B
aacgauuuaugacagcaaug

SEQ ID NO: 3991202 - RNA, 22 nt, Human herpesvirus 6B
aacgcaaagggaagccagccgc

SEQ ID NO: 3991203 - RNA, 17 nt, Human herpesvirus 6B
aacgcuccucccacgcc

SEQ ID NO: 3991204 - RNA, 21 nt, Human herpesvirus 6B
aacgcuuuuuuauuauguuuu

SEQ ID NO: 3991205 - RNA, 12 nt, Human herpesvirus 6B
aacguacauaaa

SEQ ID NO: 3991206 - RNA, 19 nt, Human herpesvirus 6B
aacuaaugcggaacauugu

SEQ ID NO: 3991207 - RNA, 19 nt, Human herpesvirus 6B
aacuacgaagcugaaaauc

SEQ ID NO: 3991208 - RNA, 21 nt, Human herpesvirus 6B
aacuagcuccuaaauaccauu

SEQ ID NO: 3991209 - RNA, 16 nt, Human herpesvirus 6B
aacuauuaaaaaaccc

SEQ ID NO: 3991210 - RNA, 23 nt, Human herpesvirus 6B
aacucgggggcagucggaaaauc

SEQ ID NO: 3991211 - RNA, 18 nt, Human herpesvirus 6B
aacugaucgguauuugcg

SEQ ID NO: 3991212 - RNA, 22 nt, Human herpesvirus 6B
aagaaagcguguucaaaaaugu

SEQ ID NO: 3991213 - RNA, 20 nt, Human herpesvirus 6B
aagaacaugcagaagaacau

SEQ ID NO: 3991214 - RNA, 14 nt, Human herpesvirus 6B
aagacuuagcuaga

SEQ ID NO: 3991215 - RNA, 19 nt, Human herpesvirus 6B
aagacuuagcuagacgugu

SEQ ID NO: 3991216 - RNA, 20 nt, Human herpesvirus 6B
aagagcacgaagaagggcag

SEQ ID NO: 3991217 - RNA, 14 nt, Human herpesvirus 6B
aagagcgagaucua

SEQ ID NO: 3991218 - RNA, 16 nt, Human herpesvirus 6B
aagauccaauggauuu

SEQ ID NO: 3991219 - RNA, 15 nt, Human herpesvirus 6B
aagaucuacagagua

SEQ ID NO: 3991220 - RNA, 15 nt, Human herpesvirus 6B
aagauuuuuggauuu

SEQ ID NO: 3991221 - RNA, 18 nt, Human herpesvirus 6B
aagccagccgcccucccc

SEQ ID NO: 3991222 - RNA, 12 nt, Human herpesvirus 6B
aaggaagagaau

SEQ ID NO: 3991223 - RNA, 12 nt, Human herpesvirus 6B
aaggacuggcug

SEQ ID NO: 3991224 - RNA, 17 nt, Human herpesvirus 6B
aaggagaauuugcaguu

SEQ ID NO: 3991225 - RNA, 15 nt, Human herpesvirus 6B
aaggcuuaggaugua

SEQ ID NO: 3991226 - RNA, 20 nt, Human herpesvirus 6B
aaguaugggcacaaagugcu

SEQ ID NO: 3991227 - RNA, 19 nt, Human herpesvirus 6B
aagucaaaguccuggaaag

SEQ ID NO: 3991228 - RNA, 16 nt, Human herpesvirus 6B
aagucgccucacugua

SEQ ID NO: 3991229 - RNA, 18 nt, Human herpesvirus 6B
aauaacgguguugaguuu

SEQ ID NO: 3991230 - RNA, 16 nt, Human herpesvirus 6B
aauaaguggugaugaa

SEQ ID NO: 3991231 - RNA, 21 nt, Human herpesvirus 6B
aauaaucucuggcuucauuuc

SEQ ID NO: 3991232 - RNA, 19 nt, Human herpesvirus 6B
aauaaugcucagaugugga

SEQ ID NO: 3991233 - RNA, 21 nt, Human herpesvirus 6B
aauaauuacaaagccacagcu

SEQ ID NO: 3991234 - RNA, 21 nt, Human herpesvirus 6B
aauaauucguuugauauagaa

SEQ ID NO: 3991235 - RNA, 16 nt, Human herpesvirus 6B
aauaauuuuauugacu

SEQ ID NO: 3991236 - RNA, 20 nt, Human herpesvirus 6B
aauaauuuuauugacuguga

SEQ ID NO: 3991237 - RNA, 12 nt, Human herpesvirus 6B
aauacagcugca

SEQ ID NO: 3991238 - RNA, 19 nt, Human herpesvirus 6B
aauaccaaaaaauguuaaa

SEQ ID NO: 3991239 - RNA, 21 nt, Human herpesvirus 6B
aauaccaaaaaauguuaaaaa

SEQ ID NO: 3991240 - RNA, 16 nt, Human herpesvirus 6B
aauacgaagacaagcc

SEQ ID NO: 3991241 - RNA, 13 nt, Human herpesvirus 6B
aauacgucagcuc

SEQ ID NO: 3991242 - RNA, 18 nt, Human herpesvirus 6B
aauauauuuguugaaaga

SEQ ID NO: 3991243 - RNA, 15 nt, Human herpesvirus 6B
aauaugauggacaaa

SEQ ID NO: 3991244 - RNA, 22 nt, Human herpesvirus 6B
aauauggccugaccaacaugcc

SEQ ID NO: 3991245 - RNA, 13 nt, Human herpesvirus 6B
aauauuuugaaaa

SEQ ID NO: 3991246 - RNA, 16 nt, Human herpesvirus 6B
aaucaaauucaaacuu

SEQ ID NO: 3991247 - RNA, 13 nt, Human herpesvirus 6B
aaucacaaaauga

SEQ ID NO: 3991248 - RNA, 12 nt, Human herpesvirus 6B
aaucaugagagc

SEQ ID NO: 3991249 - RNA, 18 nt, Human herpesvirus 6B
aauccuucauagccggga

SEQ ID NO: 3991250 - RNA, 17 nt, Human herpesvirus 6B
aaucuugagguggaaau

SEQ ID NO: 3991251 - RNA, 21 nt, Human herpesvirus 6B
aaugacuuggccgaguuuaga

SEQ ID NO: 3991252 - RNA, 16 nt, Human herpesvirus 6B
aaugagauagaaguua

SEQ ID NO: 3991253 - RNA, 12 nt, Human herpesvirus 6B
aaugauuaguua

SEQ ID NO: 3991254 - RNA, 19 nt, Human herpesvirus 6B
aauggauuuuagauucgac

SEQ ID NO: 3991255 - RNA, 20 nt, Human herpesvirus 6B
aauguagcacacgacaaaua

SEQ ID NO: 3991256 - RNA, 16 nt, Human herpesvirus 6B
aauguauuguucgcug

SEQ ID NO: 3991257 - RNA, 14 nt, Human herpesvirus 6B
agacugcacagaau

SEQ ID NO: 3991258 - RNA, 12 nt, Human herpesvirus 6B
agacuugcuaac

SEQ ID NO: 3991259 - RNA, 12 nt, Human herpesvirus 6B
agagaaggaaaa

SEQ ID NO: 3991260 - RNA, 18 nt, Human herpesvirus 6B
agagacccuccuggcgcu

SEQ ID NO: 3991261 - RNA, 13 nt, Human herpesvirus 6B
agagacgaagucc

SEQ ID NO: 3991262 - RNA, 15 nt, Human herpesvirus 6B
agagcaggagcaggc

SEQ ID NO: 3991263 - RNA, 12 nt, Human herpesvirus 6B
agagcgacacgg

SEQ ID NO: 3991264 - RNA, 14 nt, Human herpesvirus 6B
agagcggaagacga

SEQ ID NO: 3991265 - RNA, 15 nt, Human herpesvirus 6B
agaggaagccggagc

SEQ ID NO: 3991266 - RNA, 13 nt, Human herpesvirus 6B
agaggcgcgggac

SEQ ID NO: 3991267 - RNA, 14 nt, Human herpesvirus 6B
agaggucuuugcuu

SEQ ID NO: 3991268 - RNA, 20 nt, Human herpesvirus 6B
agaguaccgaauaaaacaag

SEQ ID NO: 3991269 - RNA, 20 nt, Human herpesvirus 6B
agauaacggcgcagaauuac

SEQ ID NO: 3991270 - RNA, 23 nt, Human herpesvirus 6B
agauauauggaucaaucuccaaa

SEQ ID NO: 3991271 - RNA, 19 nt, Human herpesvirus 6B
agauaucguagagcaguuu

SEQ ID NO: 3991272 - RNA, 23 nt, Human herpesvirus 6B
agauaugucguuucaugggagaa

SEQ ID NO: 3991273 - RNA, 14 nt, Human herpesvirus 6B
agaucgagaucuuu

SEQ ID NO: 3991274 - RNA, 18 nt, Human herpesvirus 6B
agaucuguuuaaugagaa

SEQ ID NO: 3991275 - RNA, 15 nt, Human herpesvirus 6B
agaucuuuauggagg

SEQ ID NO: 3991276 - RNA, 20 nt, Human herpesvirus 6B
agaugcagucuccacagggc

SEQ ID NO: 3991277 - RNA, 15 nt, Human herpesvirus 6B
agaugcgggaguuga

SEQ ID NO: 3991278 - RNA, 13 nt, Human herpesvirus 6B
agauguguggugu

SEQ ID NO: 3991279 - RNA, 16 nt, Human herpesvirus 6B
agauuccucuguaaaa

SEQ ID NO: 3991280 - RNA, 12 nt, Human herpesvirus 6B
agauuucuguag

SEQ ID NO: 3991281 - RNA, 16 nt, Human herpesvirus 6B
agcaaaccagacagaa

SEQ ID NO: 3991282 - RNA, 16 nt, Human herpesvirus 6B
agcaauaacucuugga

SEQ ID NO: 3991283 - RNA, 18 nt, Human herpesvirus 6B
agcaauaacucuuggauu

SEQ ID NO: 3991284 - RNA, 15 nt, Human herpesvirus 6B
agcaaugucaaguua

SEQ ID NO: 3991285 - RNA, 21 nt, Human herpesvirus 6B
agcaauucuuuugcgaagaau

SEQ ID NO: 3991286 - RNA, 18 nt, Human herpesvirus 6B
agcaccccacaaaacuua

SEQ ID NO: 3991287 - RNA, 21 nt, Human herpesvirus 6B
agcagaacggcgguaacgugg

SEQ ID NO: 3991288 - RNA, 19 nt, Human herpesvirus 6B
agcagcgcccgaugccaac

SEQ ID NO: 3991289 - RNA, 18 nt, Human herpesvirus 6B
agcaggcuccccaggcgc

SEQ ID NO: 3991290 - RNA, 19 nt, Human herpesvirus 6B
agcauaauccuuuucugug

SEQ ID NO: 3991291 - RNA, 21 nt, Human herpesvirus 6B
agcaucgauaccagaaaaugu

SEQ ID NO: 3991292 - RNA, 12 nt, Human herpesvirus 6B
agccaaggggac

SEQ ID NO: 3991293 - RNA, 14 nt, Human herpesvirus 6B
agccacagcuuugc

SEQ ID NO: 3991294 - RNA, 14 nt, Human herpesvirus 6B
agccgcccuccccg

SEQ ID NO: 3991295 - RNA, 19 nt, Human herpesvirus 6B
agccuugauuuuugagauu

SEQ ID NO: 3991296 - RNA, 16 nt, Human herpesvirus 6B
agcgaagucaugaauu

SEQ ID NO: 3991297 - RNA, 21 nt, Human herpesvirus 6B
agcgcaucaacuacuucuguu

SEQ ID NO: 3991298 - RNA, 14 nt, Human herpesvirus 6B
agcgccaggacggg

SEQ ID NO: 3991299 - RNA, 22 nt, Human herpesvirus 6B
agcgggguugcuauagcagcgc

SEQ ID NO: 3991300 - RNA, 21 nt, Human herpesvirus 6B
agcucguuaguaauuuggauu

SEQ ID NO: 3991301 - RNA, 17 nt, Human herpesvirus 6B
agcucuuuguucugcug

SEQ ID NO: 3991302 - RNA, 14 nt, Human herpesvirus 6B
agcugcuaaaugug

SEQ ID NO: 3991303 - RNA, 15 nt, Human herpesvirus 6B
agcugcuaaauguga

SEQ ID NO: 3991304 - RNA, 12 nt, Human herpesvirus 6B
agcuggacagaa

SEQ ID NO: 3991305 - RNA, 22 nt, Human herpesvirus 6B
agcuuuaucccaaaauauaauu

SEQ ID NO: 3991306 - RNA, 18 nt, Human herpesvirus 6B
agcuuugagcaugacaca

SEQ ID NO: 3991307 - RNA, 12 nt, Human herpesvirus 6B
aggaaaaagccu

SEQ ID NO: 3991308 - RNA, 16 nt, Human herpesvirus 6B
aggaaacgcgcuggga

SEQ ID NO: 3991309 - RNA, 13 nt, Human herpesvirus 6B
aggaagaggagga

SEQ ID NO: 3991310 - RNA, 19 nt, Human herpesvirus 6B
aggaagccggagcccugag

SEQ ID NO: 3991311 - RNA, 16 nt, Human herpesvirus 6B
aggaauguaaugaauu

SEQ ID NO: 3991312 - RNA, 22 nt, Human herpesvirus 6B
aggagaagaacagaggaagaaa

SEQ ID NO: 3991313 - RNA, 14 nt, Human herpesvirus 6B
aggagaauuugcag

SEQ ID NO: 3991314 - RNA, 18 nt, Human herpesvirus 6B
aggagcacgagccaaggg

SEQ ID NO: 3991315 - RNA, 20 nt, Human herpesvirus 6B
aggagccaacauacacacga

SEQ ID NO: 3991316 - RNA, 15 nt, Human herpesvirus 6B
aggaggaagaggagg

SEQ ID NO: 3991317 - RNA, 11 nt, Human herpesvirus 6B
aggagggaccc

SEQ ID NO: 3991318 - RNA, 17 nt, Human herpesvirus 6B
aggauauugagacguuu

SEQ ID NO: 3991319 - RNA, 17 nt, Human herpesvirus 6B
aggcaauuuaaacagaa

SEQ ID NO: 3991320 - RNA, 23 nt, Human herpesvirus 6B
aggcacaauucuaacuaaaauua

SEQ ID NO: 3991321 - RNA, 14 nt, Human herpesvirus 6B
aggcacugauuuga

SEQ ID NO: 3991322 - RNA, 15 nt, Human herpesvirus 6B
aggcaucuucauccc

SEQ ID NO: 3991323 - RNA, 19 nt, Human herpesvirus 6B
aggcaugugauugucuuuu

SEQ ID NO: 3991324 - RNA, 15 nt, Human herpesvirus 6B
aggcuacuauaaaca

SEQ ID NO: 3991325 - RNA, 16 nt, Human herpesvirus 6B
agggaagucaaggaaa

SEQ ID NO: 3991326 - RNA, 17 nt, Human herpesvirus 6B
agggaagucaaggaaac

SEQ ID NO: 3991327 - RNA, 20 nt, Human herpesvirus 6B
agggaauaacagaugaggag

SEQ ID NO: 3991328 - RNA, 18 nt, Human herpesvirus 6B
agggacgcuugcuguaaa

SEQ ID NO: 3991329 - RNA, 15 nt, Human herpesvirus 6B
agggaggagagggag

SEQ ID NO: 3991330 - RNA, 14 nt, Human herpesvirus 6B
aggggacggacaga

SEQ ID NO: 3991331 - RNA, 17 nt, Human herpesvirus 6B
aggggacggacagagcg

SEQ ID NO: 3991332 - RNA, 14 nt, Human herpesvirus 6B
aggucaagcgccag

SEQ ID NO: 3991333 - RNA, 15 nt, Human herpesvirus 6B
agguggcugcauaua

SEQ ID NO: 3991334 - RNA, 16 nt, Human herpesvirus 6B
agguguuaaacgaaaa

SEQ ID NO: 3991335 - RNA, 22 nt, Human herpesvirus 6B
agguucuauucguucagaaugu

SEQ ID NO: 3991336 - RNA, 12 nt, Human herpesvirus 6B
aguaaaaaagcc

SEQ ID NO: 3991337 - RNA, 15 nt, Human herpesvirus 6B
aguaaauuaaaguuu

SEQ ID NO: 3991338 - RNA, 15 nt, Human herpesvirus 6B
aguacaaagauauuu

SEQ ID NO: 3991339 - RNA, 13 nt, Human herpesvirus 6B
aguacaauacuuu

SEQ ID NO: 3991340 - RNA, 19 nt, Human herpesvirus 6B
aguaugggcacaaagugcu

SEQ ID NO: 3991341 - RNA, 21 nt, Human herpesvirus 6B
aguauggugucugaaaaaugg

SEQ ID NO: 3991342 - RNA, 23 nt, Human herpesvirus 6B
aguauguauaauauaaauucuua

SEQ ID NO: 3991343 - RNA, 15 nt, Human herpesvirus 6B
aguauucuucuuccc

SEQ ID NO: 3991344 - RNA, 12 nt, Human herpesvirus 6B
aguauuuacuga

SEQ ID NO: 3991345 - RNA, 23 nt, Human herpesvirus 6B
aguauuuaugcuucauaauguau

SEQ ID NO: 3991346 - RNA, 18 nt, Human herpesvirus 6B
agucaacaugauuuccga

SEQ ID NO: 3991347 - RNA, 20 nt, Human herpesvirus 6B
aguccaaugaauacuucucu

SEQ ID NO: 3991348 - RNA, 14 nt, Human herpesvirus 6B
agucguggcggagc

SEQ ID NO: 3991349 - RNA, 13 nt, Human herpesvirus 6B
agucuaaugcaaa

SEQ ID NO: 3991350 - RNA, 14 nt, Human herpesvirus 6B
agucugucaguggc

SEQ ID NO: 3991351 - RNA, 12 nt, Human herpesvirus 6B
agugaaagcagu

SEQ ID NO: 3991352 - RNA, 16 nt, Human herpesvirus 6B
agugaguuuuggaaau

SEQ ID NO: 3991353 - RNA, 19 nt, Human herpesvirus 6B
agugauuauggugccucag

SEQ ID NO: 3991354 - RNA, 14 nt, Human herpesvirus 6B
agugcuucugcucu

SEQ ID NO: 3991355 - RNA, 12 nt, Human herpesvirus 6B
aguggcagggcu

SEQ ID NO: 3991356 - RNA, 22 nt, Human herpesvirus 6B
aguggguaccgcgguugaaguc

SEQ ID NO: 3991357 - RNA, 22 nt, Human herpesvirus 6B
aguguauacauucaaucuguau

SEQ ID NO: 3991358 - RNA, 15 nt, Human herpesvirus 6B
aguguggaauuuaaa

SEQ ID NO: 3991359 - RNA, 20 nt, Human herpesvirus 6B
aguguuacggggaccacugu

SEQ ID NO: 3991360 - RNA, 17 nt, Human herpesvirus 6B
aguuaacggagagucuu

SEQ ID NO: 3991361 - RNA, 22 nt, Human herpesvirus 6B
aguuaccgugaugugggugugg

SEQ ID NO: 3991362 - RNA, 23 nt, Human herpesvirus 6B
aguuagaugcuuaacuuacuuaa

SEQ ID NO: 3991363 - RNA, 16 nt, Human herpesvirus 6B
aguuagugcaccgaga

SEQ ID NO: 3991364 - RNA, 22 nt, Human herpesvirus 6B
aguuagugcaccgagaaauagu

SEQ ID NO: 3991365 - RNA, 21 nt, Human herpesvirus 6B
aguucacuaacaaaaaaaucg

SEQ ID NO: 3991366 - RNA, 18 nt, Human herpesvirus 6B
aguugggacuuggaaacg

SEQ ID NO: 3991367 - RNA, 16 nt, Human herpesvirus 6B
aguuguugcuuccgau

SEQ ID NO: 3991368 - RNA, 20 nt, Human herpesvirus 6B
auaaaauuuugcgucgucug

SEQ ID NO: 3991369 - RNA, 22 nt, Human herpesvirus 6B
auaaaccuaacagaguuuucau

SEQ ID NO: 3991370 - RNA, 15 nt, Human herpesvirus 6B
auaaaguggccauaa

SEQ ID NO: 3991371 - RNA, 21 nt, Human herpesvirus 6B
uccagaagacugcuccaguca

SEQ ID NO: 3991372 - RNA, 14 nt, Human herpesvirus 6B
uccauauuuggaag

SEQ ID NO: 3991373 - RNA, 15 nt, Human herpesvirus 6B
uccauauuuggaagc

SEQ ID NO: 3991374 - RNA, 19 nt, Human herpesvirus 6B
ucccccgaacgccuccacg

SEQ ID NO: 3991375 - RNA, 13 nt, Human herpesvirus 6B
uccccucauacau

SEQ ID NO: 3991376 - RNA, 14 nt, Human herpesvirus 6B
ucccucuucccucu

SEQ ID NO: 3991377 - RNA, 15 nt, Human herpesvirus 6B
uccgcaaguuuucag

SEQ ID NO: 3991378 - RNA, 18 nt, Human herpesvirus 6B
uccgcucuggcaugcguu

SEQ ID NO: 3991379 - RNA, 22 nt, Human herpesvirus 6B
uccgucaggaccagcucuguuc

SEQ ID NO: 3991380 - RNA, 13 nt, Human herpesvirus 6B
uccguccccgccg

SEQ ID NO: 3991381 - RNA, 15 nt, Human herpesvirus 6B
uccuaaauaccauuu

SEQ ID NO: 3991382 - RNA, 18 nt, Human herpesvirus 6B
uccucccacgcccccucg

SEQ ID NO: 3991383 - RNA, 23 nt, Human herpesvirus 6B
uccugugaugccuugauguuucc

SEQ ID NO: 3991384 - RNA, 21 nt, Human herpesvirus 6B
uccuuaaaugacacagaaucu

SEQ ID NO: 3991385 - RNA, 16 nt, Human herpesvirus 6B
uccuuuucaguauaga

SEQ ID NO: 3991386 - RNA, 17 nt, Human herpesvirus 6B
ucgaaauauaaaaccaa

SEQ ID NO: 3991387 - RNA, 18 nt, Human herpesvirus 6B
ucgaaaugcauagaaguu

SEQ ID NO: 3991388 - RNA, 15 nt, Human herpesvirus 6B
ucgacauagaguguu

SEQ ID NO: 3991389 - RNA, 14 nt, Human herpesvirus 6B
ucgaugaaaguuuu

SEQ ID NO: 3991390 - RNA, 14 nt, Human herpesvirus 6B
ucgaugccaaagcu

SEQ ID NO: 3991391 - RNA, 13 nt, Human herpesvirus 6B
ucgauguagaugu

SEQ ID NO: 3991392 - RNA, 12 nt, Human herpesvirus 6B
ucgauguuucca

SEQ ID NO: 3991393 - RNA, 16 nt, Human herpesvirus 6B
ucgauuuagagaauau

SEQ ID NO: 3991394 - RNA, 23 nt, Human herpesvirus 6B
ucgcauuucucuacaugccacag

SEQ ID NO: 3991395 - RNA, 15 nt, Human herpesvirus 6B
ucgcccguucccggg

SEQ ID NO: 3991396 - RNA, 15 nt, Human herpesvirus 6B
ucgcgauauucagag

SEQ ID NO: 3991397 - RNA, 15 nt, Human herpesvirus 6B
ucgcggcggccccgc

SEQ ID NO: 3991398 - RNA, 16 nt, Human herpesvirus 6B
ucgcguggcggcgcgc

SEQ ID NO: 3991399 - RNA, 21 nt, Human herpesvirus 6B
ucggauccaacucuacuaaaa

SEQ ID NO: 3991400 - RNA, 20 nt, Human herpesvirus 6B
ucggcgaauguacacaguca

SEQ ID NO: 3991401 - RNA, 17 nt, Human herpesvirus 6B
ucgggccuggggacaga

SEQ ID NO: 3991402 - RNA, 15 nt, Human herpesvirus 6B
ucgggcgacgggcag

SEQ ID NO: 3991403 - RNA, 15 nt, Human herpesvirus 6B
ucguuuugcaacuua

SEQ ID NO: 3991404 - RNA, 13 nt, Human herpesvirus 6B
ucuaaaucugaaa

SEQ ID NO: 3991405 - RNA, 18 nt, Human herpesvirus 6B
ucuaaugcaaagaugucg

SEQ ID NO: 3991406 - RNA, 21 nt, Human herpesvirus 6B
ucuauucguucagaauguucc

SEQ ID NO: 3991407 - RNA, 23 nt, Human herpesvirus 6B
ucucacggccauuuaacggaacc

SEQ ID NO: 3991408 - RNA, 17 nt, Human herpesvirus 6B
ucucauaauuugccuga

SEQ ID NO: 3991409 - RNA, 16 nt, Human herpesvirus 6B
ucuccaucucuagaau

SEQ ID NO: 3991410 - RNA, 23 nt, Human herpesvirus 6B
ucucccaugguuccgggauguag

SEQ ID NO: 3991411 - RNA, 13 nt, Human herpesvirus 6B
ucuccgucucagu

SEQ ID NO: 3991412 - RNA, 13 nt, Human herpesvirus 6B
ucuccugcaauuu

SEQ ID NO: 3991413 - RNA, 21 nt, Human herpesvirus 6B
ucucgaaaaugcugauuuuaa

SEQ ID NO: 3991414 - RNA, 16 nt, Human herpesvirus 6B
ucucgaugccaaagcu

SEQ ID NO: 3991415 - RNA, 20 nt, Human herpesvirus 6B
ucucgauugugauguacgug

SEQ ID NO: 3991416 - RNA, 21 nt, Human herpesvirus 6B
ucucgccgccucgccgcuccc

SEQ ID NO: 3991417 - RNA, 16 nt, Human herpesvirus 6B
ucugccgaaaagaaag

SEQ ID NO: 3991418 - RNA, 18 nt, Human herpesvirus 6B
ucugccgucaccugcacu

SEQ ID NO: 3991419 - RNA, 16 nt, Human herpesvirus 6B
ucugcguugcccuccc

SEQ ID NO: 3991420 - RNA, 13 nt, Human herpesvirus 6B
ucuggcugaagga

SEQ ID NO: 3991421 - RNA, 20 nt, Human herpesvirus 6B
ucuuaaucagauaucugaaa

SEQ ID NO: 3991422 - RNA, 13 nt, Human herpesvirus 6B
ucuuagaaauuuu

SEQ ID NO: 3991423 - RNA, 23 nt, Human herpesvirus 6B
ucuuaggaaacuuucaaaauuuu

SEQ ID NO: 3991424 - RNA, 21 nt, Human herpesvirus 6B
ucuucacaaccaaacaguuuc

SEQ ID NO: 3991425 - RNA, 14 nt, Human herpesvirus 6B
ucuucauccucgaa

SEQ ID NO: 3991426 - RNA, 12 nt, Human herpesvirus 6B
ucuucggacgcg

SEQ ID NO: 3991427 - RNA, 18 nt, Human herpesvirus 6B
ucuuuauaaacuuaaaag

SEQ ID NO: 3991428 - RNA, 12 nt, Human herpesvirus 6B
ugaaaaacagaa

SEQ ID NO: 3991429 - RNA, 20 nt, Human herpesvirus 6B
ugaaaauaucauuaaauugu

SEQ ID NO: 3991430 - RNA, 13 nt, Human herpesvirus 6B
ugaaacguuuucu

SEQ ID NO: 3991431 - RNA, 18 nt, Human herpesvirus 6B
ugaacaguauaaauucuu

SEQ ID NO: 3991432 - RNA, 16 nt, Human herpesvirus 6B
ugaagaaacgauuucu

SEQ ID NO: 3991433 - RNA, 14 nt, Human herpesvirus 6B
ugaagucuuuccug

SEQ ID NO: 3991434 - RNA, 12 nt, Human herpesvirus 6B
ugaauguuucug

SEQ ID NO: 3991435 - RNA, 16 nt, Human herpesvirus 6B
ugaauuagcagaagau

SEQ ID NO: 3991436 - RNA, 15 nt, Human herpesvirus 6B
ugaauuugagaagau

SEQ ID NO: 3991437 - RNA, 19 nt, Human herpesvirus 6B
ugaauuugcgucagaguuu

SEQ ID NO: 3991438 - RNA, 17 nt, Human herpesvirus 6B
ugacauuuaccagagau

SEQ ID NO: 3991439 - RNA, 14 nt, Human herpesvirus 6B
ugacgcaaacacag

SEQ ID NO: 3991440 - RNA, 19 nt, Human herpesvirus 6B
ugacggcgaugaaaaagau

SEQ ID NO: 3991441 - RNA, 20 nt, Human herpesvirus 6B
ugacgggggcacaucuguug

SEQ ID NO: 3991442 - RNA, 13 nt, Human herpesvirus 6B
ugacguuugcaua

SEQ ID NO: 3991443 - RNA, 15 nt, Human herpesvirus 6B
ugacuacugugucca

SEQ ID NO: 3991444 - RNA, 16 nt, Human herpesvirus 6B
ugacugaggaugugua

SEQ ID NO: 3991445 - RNA, 20 nt, Human herpesvirus 6B
ugacugauauuaacaauccg

SEQ ID NO: 3991446 - RNA, 20 nt, Human herpesvirus 6B
ugagaagauuugugugaacg

SEQ ID NO: 3991447 - RNA, 22 nt, Human herpesvirus 6B
ugagcagaagcugucuguguuu

SEQ ID NO: 3991448 - RNA, 17 nt, Human herpesvirus 6B
ugagggagaugaagagu

SEQ ID NO: 3991449 - RNA, 14 nt, Human herpesvirus 6B
ugaguuaacagaua

SEQ ID NO: 3991450 - RNA, 13 nt, Human herpesvirus 6B
ugaguuuuggaaa

SEQ ID NO: 3991451 - RNA, 19 nt, Human herpesvirus 6B
ugauacgaguaaaauugaa

SEQ ID NO: 3991452 - RNA, 18 nt, Human herpesvirus 6B
ugauauacgauggacaga

SEQ ID NO: 3991453 - RNA, 14 nt, Human herpesvirus 6B
ugauauagaacaau

SEQ ID NO: 3991454 - RNA, 15 nt, Human herpesvirus 6B
ugaugacucaagaau

SEQ ID NO: 3991455 - RNA, 21 nt, Human herpesvirus 6B
ugauuccguugugacagaauu

SEQ ID NO: 3991456 - RNA, 15 nt, Human herpesvirus 6B
ugauuccuucaaugu

SEQ ID NO: 3991457 - RNA, 15 nt, Human herpesvirus 6B
ugauuuucagaguuu

SEQ ID NO: 3991458 - RNA, 16 nt, Human herpesvirus 6B
ugauuuuccaaagauu

SEQ ID NO: 3991459 - RNA, 15 nt, Human herpesvirus 6B
ugcaaaaacaaauga

SEQ ID NO: 3991460 - RNA, 15 nt, Human herpesvirus 6B
ugcacaguugcaugg

SEQ ID NO: 3991461 - RNA, 17 nt, Human herpesvirus 6B
ugcacgaauaaggagag

SEQ ID NO: 3991462 - RNA, 11 nt, Human herpesvirus 6B
ugcagaagaac

SEQ ID NO: 3991463 - RNA, 20 nt, Human herpesvirus 6B
ugcaguuugugaauauucag

SEQ ID NO: 3991464 - RNA, 20 nt, Human herpesvirus 6B
ugcauacaugggaggccagg

SEQ ID NO: 3991465 - RNA, 12 nt, Human herpesvirus 6B
ugcaucuugcaa

SEQ ID NO: 3991466 - RNA, 11 nt, Human herpesvirus 6B
ugcccaagaac

SEQ ID NO: 3991467 - RNA, 19 nt, Human herpesvirus 6B
ugccgaaaauuugggugau

SEQ ID NO: 3991468 - RNA, 16 nt, Human herpesvirus 6B
ugccuucuguucacau

SEQ ID NO: 3991469 - RNA, 21 nt, Human herpesvirus 6B
ugcgaauuaaaacucuaaaac

SEQ ID NO: 3991470 - RNA, 15 nt, Human herpesvirus 6B
ugcgucagaguuuga

SEQ ID NO: 3991471 - RNA, 19 nt, Human herpesvirus 6B
ugcgucucuuuaaacagau

SEQ ID NO: 3991472 - RNA, 22 nt, Human herpesvirus 6B
ugcuacccggcgguuuugcgau

SEQ ID NO: 3991473 - RNA, 18 nt, Human herpesvirus 6B
ugcuaccggaacucacac

SEQ ID NO: 3991474 - RNA, 16 nt, Human herpesvirus 6B
ugcucauggaucaggu

SEQ ID NO: 3991475 - RNA, 18 nt, Human herpesvirus 6B
ugcuccguucccuucucg

SEQ ID NO: 3991476 - RNA, 14 nt, Human herpesvirus 6B
ugcuccuguuucua

SEQ ID NO: 3991477 - RNA, 15 nt, Human herpesvirus 6B
ugcucgggaucacgc

SEQ ID NO: 3991478 - RNA, 19 nt, Human herpesvirus 6B
ugcucuccgcgcugcuggg

SEQ ID NO: 3991479 - RNA, 18 nt, Human herpesvirus 6B
ugcuggguguauguuucu

SEQ ID NO: 3991480 - RNA, 14 nt, Human herpesvirus 6B
ugcuguaaaccagu

SEQ ID NO: 3991481 - RNA, 18 nt, Human herpesvirus 6B
ugcugucacacucugaac

SEQ ID NO: 3991482 - RNA, 22 nt, Human herpesvirus 6B
ugcugucgcccgccucucuccg

SEQ ID NO: 3991483 - RNA, 15 nt, Human herpesvirus 6B
ugcugugcuuuguau

SEQ ID NO: 3991484 - RNA, 14 nt, Human herpesvirus 6B
uggaaaacugcaga

SEQ ID NO: 3991485 - RNA, 22 nt, Human herpesvirus 6B
uugguuguuuuucuaaacugaa

SEQ ID NO: 3991486 - RNA, 13 nt, Human herpesvirus 6B
uuguacauguuaa

SEQ ID NO: 3991487 - RNA, 17 nt, Human herpesvirus 6B
uuguagcucaguguuug

SEQ ID NO: 3991488 - RNA, 23 nt, Human herpesvirus 6B
uugucgcugacgcaauacguaaa

SEQ ID NO: 3991489 - RNA, 19 nt, Human herpesvirus 6B
uugucgguaaauauugucu

SEQ ID NO: 3991490 - RNA, 20 nt, Human herpesvirus 6B
uugucuuuguccuauguuaa

SEQ ID NO: 3991491 - RNA, 20 nt, Human herpesvirus 6B
uugugaacaaguuauuuaaa

SEQ ID NO: 3991492 - RNA, 12 nt, Human herpesvirus 6B
uugugagaacag

SEQ ID NO: 3991493 - RNA, 21 nt, Human herpesvirus 6B
uuguguagaagacaucuuaaa

SEQ ID NO: 3991494 - RNA, 18 nt, Human herpesvirus 6B
uuguuaguguuaauucca

SEQ ID NO: 3991495 - RNA, 19 nt, Human herpesvirus 6B
uuguuucugaacuauuaaa

SEQ ID NO: 3991496 - RNA, 21 nt, Human herpesvirus 6B
uuguuuuuuucugcgacaaaa

SEQ ID NO: 3991497 - RNA, 14 nt, Human herpesvirus 6B
uuuaaaaacacacu

SEQ ID NO: 3991498 - RNA, 20 nt, Human herpesvirus 6B
uuuaaaaaugauaacuguuu

SEQ ID NO: 3991499 - RNA, 18 nt, Human herpesvirus 6B
uuuacguuaaaagggaag

SEQ ID NO: 3991500 - RNA, 14 nt, Human herpesvirus 6B
uuuacugcaugcua

SEQ ID NO: 3991501 - RNA, 13 nt, Human herpesvirus 6B
uuuauaaacuuaa

SEQ ID NO: 3991502 - RNA, 22 nt, Human herpesvirus 6B
uuuaucccucguacaagcuuaa

SEQ ID NO: 3991503 - RNA, 12 nt, Human herpesvirus 6B
uuuaugcuucau

SEQ ID NO: 3991504 - RNA, 22 nt, Human herpesvirus 6B
uuuauggagggaauugugucuu

SEQ ID NO: 3991505 - RNA, 16 nt, Human herpesvirus 6B
uuuauucuauauggcc

SEQ ID NO: 3991506 - RNA, 12 nt, Human herpesvirus 6B
uuuauugacugu

SEQ ID NO: 3991507 - RNA, 20 nt, Human herpesvirus 6B
uuucgacgaucgcgaagccu

SEQ ID NO: 3991508 - RNA, 18 nt, Human herpesvirus 6B
uuucgugguugucuuugu

SEQ ID NO: 3991509 - RNA, 18 nt, Human herpesvirus 6B
uuucguuuacgaauucaa

SEQ ID NO: 3991510 - RNA, 19 nt, Human herpesvirus 6B
uuucuccuuuuuugacguu

SEQ ID NO: 3991511 - RNA, 19 nt, Human herpesvirus 6B
uuugauaucgauucuguaa

SEQ ID NO: 3991512 - RNA, 18 nt, Human herpesvirus 6B
uuugauguugucuucugu

SEQ ID NO: 3991513 - RNA, 17 nt, Human herpesvirus 6B
uuugauuuucagaguuu

SEQ ID NO: 3991514 - RNA, 16 nt, Human herpesvirus 6B
uuugcagucgguauuu

SEQ ID NO: 3991515 - RNA, 14 nt, Human herpesvirus 6B
uuugcgucgucugu

SEQ ID NO: 3991516 - RNA, 11 nt, Human herpesvirus 6B
uuugcugucac

SEQ ID NO: 3991517 - RNA, 20 nt, Human herpesvirus 6B
uuuguauccgagcauuauga

SEQ ID NO: 3991518 - RNA, 18 nt, Human herpesvirus 6B
uuuguggcuauuugacaa

SEQ ID NO: 3991519 - RNA, 17 nt, Human herpesvirus 6B
uuuuaaacauucuuaaa

SEQ ID NO: 3991520 - RNA, 19 nt, Human herpesvirus 6B
uuuuauagccggugucauc

SEQ ID NO: 3991521 - RNA, 17 nt, Human herpesvirus 6B
uuuuauugacugugaaa

SEQ ID NO: 3991522 - RNA, 20 nt, Human herpesvirus 6B
uuuugacaccucauaucaaa

SEQ ID NO: 3991523 - RNA, 22 nt, Human herpesvirus 6B
uuuuuaaacagauuuugaggau

SEQ ID NO: 3991524 - RNA, 12 nt, Human herpesvirus 6B
uuuuucauauuu

SEQ ID NO: 3991525 - RNA, 17 nt, Human herpesvirus 6B
uuuuucuccugaucuca

SEQ ID NO: 3991526 - RNA, 16 nt, Human herpesvirus 6B
aaaaaauagcagcaau

SEQ ID NO: 3991527 - RNA, 14 nt, Human herpesvirus 6B
aauguucuucugaa

SEQ ID NO: 3991528 - RNA, 17 nt, Human herpesvirus 6B
aauguugucaaucgugu

SEQ ID NO: 3991529 - RNA, 23 nt, Human herpesvirus 6B
aauucucugcaugucuuuagaug

SEQ ID NO: 3991530 - RNA, 21 nt, Human herpesvirus 6B
aauuucaagucuguuacuaau

SEQ ID NO: 3991531 - RNA, 22 nt, Human herpesvirus 6B
aauuucagcggucgagaaagau

SEQ ID NO: 3991532 - RNA, 19 nt, Human herpesvirus 6B
aauuuccggucaacuucua

SEQ ID NO: 3991533 - RNA, 21 nt, Human herpesvirus 6B
aauuugaauucugcucguuug

SEQ ID NO: 3991534 - RNA, 16 nt, Human herpesvirus 6B
aauuuggcagaaucuu

SEQ ID NO: 3991535 - RNA, 22 nt, Human herpesvirus 6B
aauuuguaucucagaucuucga

SEQ ID NO: 3991536 - RNA, 14 nt, Human herpesvirus 6B
aauuuuauugacug

SEQ ID NO: 3991537 - RNA, 18 nt, Human herpesvirus 6B
aauuuuauugacugugaa

SEQ ID NO: 3991538 - RNA, 14 nt, Human herpesvirus 6B
aauuuugaaauugg

SEQ ID NO: 3991539 - RNA, 18 nt, Human herpesvirus 6B
aauuuuuuguuucugaaa

SEQ ID NO: 3991540 - RNA, 21 nt, Human herpesvirus 6B
aauuuuuuguuucugaaaaua

SEQ ID NO: 3991541 - RNA, 16 nt, Human herpesvirus 6B
acaaagugcuguaaac

SEQ ID NO: 3991542 - RNA, 18 nt, Human herpesvirus 6B
acaaauaauuuuauugac

SEQ ID NO: 3991543 - RNA, 15 nt, Human herpesvirus 6B
acaacgacugggaga

SEQ ID NO: 3991544 - RNA, 19 nt, Human herpesvirus 6B
acaagaaaacgagagaguu

SEQ ID NO: 3991545 - RNA, 21 nt, Human herpesvirus 6B
acaagcagccuaaauuuucuu

SEQ ID NO: 3991546 - RNA, 14 nt, Human herpesvirus 6B
acaauguuccgaaa

SEQ ID NO: 3991547 - RNA, 17 nt, Human herpesvirus 6B
acaccaaugaucacaca

SEQ ID NO: 3991548 - RNA, 18 nt, Human herpesvirus 6B
acaccagagaucagcaug

SEQ ID NO: 3991549 - RNA, 19 nt, Human herpesvirus 6B
acaccguuguugaacgaga

SEQ ID NO: 3991550 - RNA, 22 nt, Human herpesvirus 6B
acacgccauccacccauauacc

SEQ ID NO: 3991551 - RNA, 16 nt, Human herpesvirus 6B
acacucauuugcaauu

SEQ ID NO: 3991552 - RNA, 14 nt, Human herpesvirus 6B
acagaaaaaaauuu

SEQ ID NO: 3991553 - RNA, 16 nt, Human herpesvirus 6B
acagaaaaaacaccag

SEQ ID NO: 3991554 - RNA, 12 nt, Human herpesvirus 6B
acagaaauuuca

SEQ ID NO: 3991555 - RNA, 22 nt, Human herpesvirus 6B
acagcaguuuuuuggggaagcg

SEQ ID NO: 3991556 - RNA, 17 nt, Human herpesvirus 6B
acagggcauagaaagcg

SEQ ID NO: 3991557 - RNA, 17 nt, Human herpesvirus 6B
acagggguaaauuugua

SEQ ID NO: 3991558 - RNA, 21 nt, Human herpesvirus 6B
acaguauuuacugagcaaaga

SEQ ID NO: 3991559 - RNA, 14 nt, Human herpesvirus 6B
acauagaaaaauaa

SEQ ID NO: 3991560 - RNA, 18 nt, Human herpesvirus 6B
acauagaaaaauaagacu

SEQ ID NO: 3991561 - RNA, 14 nt, Human herpesvirus 6B
acauagaguguuug

SEQ ID NO: 3991562 - RNA, 23 nt, Human herpesvirus 6B
acauccagaaaagcaaacaugca

SEQ ID NO: 3991563 - RNA, 18 nt, Human herpesvirus 6B
acaucucauaauuugccu

SEQ ID NO: 3991564 - RNA, 13 nt, Human herpesvirus 6B
acauguuaacaau

SEQ ID NO: 3991565 - RNA, 16 nt, Human herpesvirus 6B
acauucguauacuucc

SEQ ID NO: 3991566 - RNA, 15 nt, Human herpesvirus 6B
acauugugagaacag

SEQ ID NO: 3991567 - RNA, 15 nt, Human herpesvirus 6B
accacucgggccggu

SEQ ID NO: 3991568 - RNA, 14 nt, Human herpesvirus 6B
accagcucuguucu

SEQ ID NO: 3991569 - RNA, 13 nt, Human herpesvirus 6B
acccauuuaucug

SEQ ID NO: 3991570 - RNA, 18 nt, Human herpesvirus 6B
accccccucuugcagugg

SEQ ID NO: 3991571 - RNA, 16 nt, Human herpesvirus 6B
acccgcguccuccauc

SEQ ID NO: 3991572 - RNA, 15 nt, Human herpesvirus 6B
accgacuuugaaauc

SEQ ID NO: 3991573 - RNA, 23 nt, Human herpesvirus 6B
accggagcuuauuuaugaaaauu

SEQ ID NO: 3991574 - RNA, 18 nt, Human herpesvirus 6B
accgguacgauuucuguu

SEQ ID NO: 3991575 - RNA, 18 nt, Human herpesvirus 6B
accgguuauaauauuaac

SEQ ID NO: 3991576 - RNA, 14 nt, Human herpesvirus 6B
accuaagcuggaca

SEQ ID NO: 3991577 - RNA, 13 nt, Human herpesvirus 6B
accucaucccuua

SEQ ID NO: 3991578 - RNA, 15 nt, Human herpesvirus 6B
acgaaaacuuuuugc

SEQ ID NO: 3991579 - RNA, 16 nt, Human herpesvirus 6B
acgacgaggaguuaaa

SEQ ID NO: 3991580 - RNA, 17 nt, Human herpesvirus 6B
acgacgcagauuuacga

SEQ ID NO: 3991581 - RNA, 15 nt, Human herpesvirus 6B
acgacuaucuccuug

SEQ ID NO: 3991582 - RNA, 20 nt, Human herpesvirus 6B
acgauggacagaaaaaacac

SEQ ID NO: 3991583 - RNA, 15 nt, Human herpesvirus 6B
acgcacgagaacacg

SEQ ID NO: 3991584 - RNA, 23 nt, Human herpesvirus 6B
acgccuccacggcaacgcuccuc

SEQ ID NO: 3991585 - RNA, 19 nt, Human herpesvirus 6B
acggaauauauagaagaag

SEQ ID NO: 3991586 - RNA, 16 nt, Human herpesvirus 6B
acggacagagcggaga

SEQ ID NO: 3991587 - RNA, 13 nt, Human herpesvirus 6B
acggagaggaagc

SEQ ID NO: 3991588 - RNA, 15 nt, Human herpesvirus 6B
acggagagucuucau

SEQ ID NO: 3991589 - RNA, 14 nt, Human herpesvirus 6B
acggagaguuuaua

SEQ ID NO: 3991590 - RNA, 16 nt, Human herpesvirus 6B
acggcaaacucaaaga

SEQ ID NO: 3991591 - RNA, 23 nt, Human herpesvirus 6B
acggccacccgcgucuccgaucc

SEQ ID NO: 3991592 - RNA, 16 nt, Human herpesvirus 6B
acggcgagacuuugug

SEQ ID NO: 3991593 - RNA, 20 nt, Human herpesvirus 6B
acggcucucuucaggagaag

SEQ ID NO: 3991594 - RNA, 15 nt, Human herpesvirus 6B
acgguaaagaugaga

SEQ ID NO: 3991595 - RNA, 13 nt, Human herpesvirus 6B
acgguggauuaug

SEQ ID NO: 3991596 - RNA, 20 nt, Human herpesvirus 6B
acgucccuucuccgucaccc

SEQ ID NO: 3991597 - RNA, 19 nt, Human herpesvirus 6B
acgucuccaucucuagaau

SEQ ID NO: 3991598 - RNA, 17 nt, Human herpesvirus 6B
acgucuccuucuaauau

SEQ ID NO: 3991599 - RNA, 18 nt, Human herpesvirus 6B
acguggccgucuccugca

SEQ ID NO: 3991600 - RNA, 15 nt, Human herpesvirus 6B
acguuaguaaggaag

SEQ ID NO: 3991601 - RNA, 22 nt, Human herpesvirus 6B
acuaaaauuacgucuuuuaugc

SEQ ID NO: 3991602 - RNA, 18 nt, Human herpesvirus 6B
acuaagugugcguuauuu

SEQ ID NO: 3991603 - RNA, 19 nt, Human herpesvirus 6B
acuaucaaaauaaaaauuu

SEQ ID NO: 3991604 - RNA, 16 nt, Human herpesvirus 6B
acucacauagagaaga

SEQ ID NO: 3991605 - RNA, 20 nt, Human herpesvirus 6B
acucaguagaaugaaugaaa

SEQ ID NO: 3991606 - RNA, 15 nt, Human herpesvirus 6B
acuccaaaaucuuua

SEQ ID NO: 3991607 - RNA, 18 nt, Human herpesvirus 6B
acucuauuauaaaaaugc

SEQ ID NO: 3991608 - RNA, 15 nt, Human herpesvirus 6B
acucugcuaaaauug

SEQ ID NO: 3991609 - RNA, 17 nt, Human herpesvirus 6B
acucuuggauugcagau

SEQ ID NO: 3991610 - RNA, 19 nt, Human herpesvirus 6B
acuggagcuagagaaaauu

SEQ ID NO: 3991611 - RNA, 19 nt, Human herpesvirus 6B
acugugaaaagugcuuuau

SEQ ID NO: 3991612 - RNA, 22 nt, Human herpesvirus 6B
acugugaggugauuugaacaga

SEQ ID NO: 3991613 - RNA, 12 nt, Human herpesvirus 6B
acuuagcuagac

SEQ ID NO: 3991614 - RNA, 23 nt, Human herpesvirus 6B
acuuaguugauaugaaugugaga

SEQ ID NO: 3991615 - RNA, 13 nt, Human herpesvirus 6B
acuucuaaaaugc

SEQ ID NO: 3991616 - RNA, 14 nt, Human herpesvirus 6B
acuucuucugcaga

SEQ ID NO: 3991617 - RNA, 21 nt, Human herpesvirus 6B
acuucuugcgauuuugugaaa

SEQ ID NO: 3991618 - RNA, 16 nt, Human herpesvirus 6B
acuuuauuugaaacug

SEQ ID NO: 3991619 - RNA, 13 nt, Human herpesvirus 6B
acuuuuugaagag

SEQ ID NO: 3991620 - RNA, 15 nt, Human herpesvirus 6B
acuuuuuucuaaaac

SEQ ID NO: 3991621 - RNA, 23 nt, Human herpesvirus 6B
agaacugucgcaucaauuacucg

SEQ ID NO: 3991622 - RNA, 22 nt, Human herpesvirus 6B
agaagaaacaaguugcggaagg

SEQ ID NO: 3991623 - RNA, 14 nt, Human herpesvirus 6B
agaagaagauauuu

SEQ ID NO: 3991624 - RNA, 15 nt, Human herpesvirus 6B
agaagauauuucccu

SEQ ID NO: 3991625 - RNA, 12 nt, Human herpesvirus 6B
agaagcugucug

SEQ ID NO: 3991626 - RNA, 19 nt, Human herpesvirus 6B
agaagggcagagagccgca

SEQ ID NO: 3991627 - RNA, 18 nt, Human herpesvirus 6B
agaaguauuucgaucaga

SEQ ID NO: 3991628 - RNA, 22 nt, Human herpesvirus 6B
agaaguuacuauuguauuuacu

SEQ ID NO: 3991629 - RNA, 22 nt, Human herpesvirus 6B
agaaucuaaaucgcgagacaga

SEQ ID NO: 3991630 - RNA, 16 nt, Human herpesvirus 6B
agaaucuccaaauggu

SEQ ID NO: 3991631 - RNA, 20 nt, Human herpesvirus 6B
agaaucuuccuuuucaguau

SEQ ID NO: 3991632 - RNA, 13 nt, Human herpesvirus 6B
agaaugacagaua

SEQ ID NO: 3991633 - RNA, 16 nt, Human herpesvirus 6B
agacaagggugugaaa

SEQ ID NO: 3991634 - RNA, 23 nt, Human herpesvirus 6B
agacaugauauucuuuaugugca

SEQ ID NO: 3991635 - RNA, 22 nt, Human herpesvirus 6B
agacauuugauguugucuucug

SEQ ID NO: 3991636 - RNA, 13 nt, Human herpesvirus 6B
agacauuuucuau

SEQ ID NO: 3991637 - RNA, 12 nt, Human herpesvirus 6B
agacgccucagg

SEQ ID NO: 3991638 - RNA, 14 nt, Human herpesvirus 6B
agacguuguuugac

SEQ ID NO: 3991639 - RNA, 14 nt, Human herpesvirus 6B
agacuaaauguucu

SEQ ID NO: 3991640 - RNA, 22 nt, Human herpesvirus 6B
auaacaugugacacaauuucug

SEQ ID NO: 3991641 - RNA, 21 nt, Human herpesvirus 6B
auaacgauaucguuuuugcuu

SEQ ID NO: 3991642 - RNA, 15 nt, Human herpesvirus 6B
auaacggcgcagaau

SEQ ID NO: 3991643 - RNA, 13 nt, Human herpesvirus 6B
auaacuaugaauu

SEQ ID NO: 3991644 - RNA, 11 nt, Human herpesvirus 6B
auaagaaugcu

SEQ ID NO: 3991645 - RNA, 13 nt, Human herpesvirus 6B
auaagacuuagcu

SEQ ID NO: 3991646 - RNA, 15 nt, Human herpesvirus 6B
auaagcagaagaguu

SEQ ID NO: 3991647 - RNA, 15 nt, Human herpesvirus 6B
auaagggacagcagu

SEQ ID NO: 3991648 - RNA, 16 nt, Human herpesvirus 6B
auaagucgugggaauu

SEQ ID NO: 3991649 - RNA, 18 nt, Human herpesvirus 6B
auaauaucauucugauaa

SEQ ID NO: 3991650 - RNA, 22 nt, Human herpesvirus 6B
auaaucuuguagcucaguguuu

SEQ ID NO: 3991651 - RNA, 16 nt, Human herpesvirus 6B
auaauuacagaugucu

SEQ ID NO: 3991652 - RNA, 16 nt, Human herpesvirus 6B
auaauuuuauugacug

SEQ ID NO: 3991653 - RNA, 20 nt, Human herpesvirus 6B
auaauuuuauugacugugaa

SEQ ID NO: 3991654 - RNA, 23 nt, Human herpesvirus 6B
auacggcggcggaagugaaagca

SEQ ID NO: 3991655 - RNA, 18 nt, Human herpesvirus 6B
auacgucagcucuucacu

SEQ ID NO: 3991656 - RNA, 18 nt, Human herpesvirus 6B
auacgugaauuucauaga

SEQ ID NO: 3991657 - RNA, 22 nt, Human herpesvirus 6B
auacuacguguaauguuuccuu

SEQ ID NO: 3991658 - RNA, 14 nt, Human herpesvirus 6B
auagacgacgcaga

SEQ ID NO: 3991659 - RNA, 13 nt, Human herpesvirus 6B
auagagccggccu

SEQ ID NO: 3991660 - RNA, 16 nt, Human herpesvirus 6B
auagauugcacgcugg

SEQ ID NO: 3991661 - RNA, 15 nt, Human herpesvirus 6B
auaggacagaggaau

SEQ ID NO: 3991662 - RNA, 16 nt, Human herpesvirus 6B
auaguaguugucguua

SEQ ID NO: 3991663 - RNA, 14 nt, Human herpesvirus 6B
auaguuauucagau

SEQ ID NO: 3991664 - RNA, 14 nt, Human herpesvirus 6B
auauaaaaaaagag

SEQ ID NO: 3991665 - RNA, 17 nt, Human herpesvirus 6B
auauaaagacuuacaga

SEQ ID NO: 3991666 - RNA, 16 nt, Human herpesvirus 6B
auaucuggauauguau

SEQ ID NO: 3991667 - RNA, 23 nt, Human herpesvirus 6B
auaugcuuuuuuuuguggauggu

SEQ ID NO: 3991668 - RNA, 23 nt, Human herpesvirus 6B
auauggaucaaucuccaaaacac

SEQ ID NO: 3991669 - RNA, 18 nt, Human herpesvirus 6B
auaugucagauuauaaug

SEQ ID NO: 3991670 - RNA, 23 nt, Human herpesvirus 6B
auaugucguuucaugggagaaau

SEQ ID NO: 3991671 - RNA, 16 nt, Human herpesvirus 6B
auauuauuaacaauga

SEQ ID NO: 3991672 - RNA, 22 nt, Human herpesvirus 6B
aucaauauagaggacgcaaaga

SEQ ID NO: 3991673 - RNA, 21 nt, Human herpesvirus 6B
aucacuuaguugauaugaaug

SEQ ID NO: 3991674 - RNA, 20 nt, Human herpesvirus 6B
aucacuuuauuucuaaggag

SEQ ID NO: 3991675 - RNA, 20 nt, Human herpesvirus 6B
aucaucgccauagugaaaga

SEQ ID NO: 3991676 - RNA, 11 nt, Human herpesvirus 6B
aucaugagaga

SEQ ID NO: 3991677 - RNA, 18 nt, Human herpesvirus 6B
aucauuucgauaucucac

SEQ ID NO: 3991678 - RNA, 11 nt, Human herpesvirus 6B
auccuuuguuu

SEQ ID NO: 3991679 - RNA, 17 nt, Human herpesvirus 6B
aucgacgaccaggcacc

SEQ ID NO: 3991680 - RNA, 17 nt, Human herpesvirus 6B
aucgagaaucuuccuuu

SEQ ID NO: 3991681 - RNA, 17 nt, Human herpesvirus 6B
aucgcgaagccuguccg

SEQ ID NO: 3991682 - RNA, 19 nt, Human herpesvirus 6B
aucgcgguguccucguccg

SEQ ID NO: 3991683 - RNA, 14 nt, Human herpesvirus 6B
aucggaagaggaag

SEQ ID NO: 3991684 - RNA, 19 nt, Human herpesvirus 6B
aucggaauguugguaaacu

SEQ ID NO: 3991685 - RNA, 12 nt, Human herpesvirus 6B
aucgggccuggg

SEQ ID NO: 3991686 - RNA, 18 nt, Human herpesvirus 6B
aucuacugguaauaaaca

SEQ ID NO: 3991687 - RNA, 14 nt, Human herpesvirus 6B
aucuaugaugcugu

SEQ ID NO: 3991688 - RNA, 15 nt, Human herpesvirus 6B
aucuauuaucauuua

SEQ ID NO: 3991689 - RNA, 14 nt, Human herpesvirus 6B
aucuccaaaagcgc

SEQ ID NO: 3991690 - RNA, 19 nt, Human herpesvirus 6B
aucuccggacagaaaauuu

SEQ ID NO: 3991691 - RNA, 17 nt, Human herpesvirus 6B
aucuuauuccaguggag

SEQ ID NO: 3991692 - RNA, 17 nt, Human herpesvirus 6B
aucuuugauaaaaccau

SEQ ID NO: 3991693 - RNA, 12 nt, Human herpesvirus 6B
augaaaacauuc

SEQ ID NO: 3991694 - RNA, 17 nt, Human herpesvirus 6B
augaaaacauucagaaa

SEQ ID NO: 3991695 - RNA, 17 nt, Human herpesvirus 6B
augaaacggaaaccgaa

SEQ ID NO: 3991696 - RNA, 22 nt, Human herpesvirus 6B
augaaaucgauguagauguuuu

SEQ ID NO: 3991697 - RNA, 22 nt, Human herpesvirus 6B
augaaaucucuuuuaacacaca

SEQ ID NO: 3991698 - RNA, 22 nt, Human herpesvirus 6B
augaagagguucagacugcugc

SEQ ID NO: 3991699 - RNA, 23 nt, Human herpesvirus 6B
augaaugugagagauuuuucaau

SEQ ID NO: 3991700 - RNA, 14 nt, Human herpesvirus 6B
augacuaucaaaau

SEQ ID NO: 3991701 - RNA, 13 nt, Human herpesvirus 6B
augacugugaggu

SEQ ID NO: 3991702 - RNA, 20 nt, Human herpesvirus 6B
augacugugaggugauuuga

SEQ ID NO: 3991703 - RNA, 14 nt, Human herpesvirus 6B
augacuuuucugau

SEQ ID NO: 3991704 - RNA, 11 nt, Human herpesvirus 6B
augagagagca

SEQ ID NO: 3991705 - RNA, 12 nt, Human herpesvirus 6B
augauaacuguu

SEQ ID NO: 3991706 - RNA, 21 nt, Human herpesvirus 6B
augauagaagaucuaaugaau

SEQ ID NO: 3991707 - RNA, 23 nt, Human herpesvirus 6B
augcaacgucgguucaauaacug

SEQ ID NO: 3991708 - RNA, 17 nt, Human herpesvirus 6B
augcaagucgcgaagug

SEQ ID NO: 3991709 - RNA, 16 nt, Human herpesvirus 6B
augcaaucugugggaa

SEQ ID NO: 3991710 - RNA, 18 nt, Human herpesvirus 6B
augcagaucgagaauaau

SEQ ID NO: 3991711 - RNA, 19 nt, Human herpesvirus 6B
augcagucuccacagggca

SEQ ID NO: 3991712 - RNA, 12 nt, Human herpesvirus 6B
augcauagaagu

SEQ ID NO: 3991713 - RNA, 18 nt, Human herpesvirus 6B
augcgccacagggaggug

SEQ ID NO: 3991714 - RNA, 23 nt, Human herpesvirus 6B
augcgguugucuuguuagacaag

SEQ ID NO: 3991715 - RNA, 12 nt, Human herpesvirus 6B
augcuaaagcac

SEQ ID NO: 3991716 - RNA, 16 nt, Human herpesvirus 6B
auggaagacagucaaa

SEQ ID NO: 3991717 - RNA, 17 nt, Human herpesvirus 6B
auggaucaaucuccaaa

SEQ ID NO: 3991718 - RNA, 22 nt, Human herpesvirus 6B
auggaucaaucuccaaaacacu

SEQ ID NO: 3991719 - RNA, 17 nt, Human herpesvirus 6B
auggauuacaagggaaa

SEQ ID NO: 3991720 - RNA, 18 nt, Human herpesvirus 6B
augggaaauguugucaau

SEQ ID NO: 3991721 - RNA, 13 nt, Human herpesvirus 6B
auggggcuacuac

SEQ ID NO: 3991722 - RNA, 22 nt, Human herpesvirus 6B
auggguacaaugccaacacugu

SEQ ID NO: 3991723 - RNA, 13 nt, Human herpesvirus 6B
augguauggaaaa

SEQ ID NO: 3991724 - RNA, 14 nt, Human herpesvirus 6B
augguuaaggaaaa

SEQ ID NO: 3991725 - RNA, 18 nt, Human herpesvirus 6B
augguucgauugcgcgau

SEQ ID NO: 3991726 - RNA, 20 nt, Human herpesvirus 6B
auguaaacacgaaacugcuu

SEQ ID NO: 3991727 - RNA, 19 nt, Human herpesvirus 6B
auguaaagaaacaaaauua

SEQ ID NO: 3991728 - RNA, 22 nt, Human herpesvirus 6B
auguacguggccgucuccugca

SEQ ID NO: 3991729 - RNA, 12 nt, Human herpesvirus 6B
auguagcacacg

SEQ ID NO: 3991730 - RNA, 19 nt, Human herpesvirus 6B
auguagcacacgacaaaua

SEQ ID NO: 3991731 - RNA, 14 nt, Human herpesvirus 6B
auguaguguggaau

SEQ ID NO: 3991732 - RNA, 13 nt, Human herpesvirus 6B
auguaucugaaaa

SEQ ID NO: 3991733 - RNA, 12 nt, Human herpesvirus 6B
augucaaaauuu

SEQ ID NO: 3991734 - RNA, 14 nt, Human herpesvirus 6B
augucgaaucucaa

SEQ ID NO: 3991735 - RNA, 15 nt, Human herpesvirus 6B
auguucgccucuccc

SEQ ID NO: 3991736 - RNA, 19 nt, Human herpesvirus 6B
auuaaacuaacaugacaaa

SEQ ID NO: 3991737 - RNA, 20 nt, Human herpesvirus 6B
auuaaagauugcaucgcugg

SEQ ID NO: 3991738 - RNA, 13 nt, Human herpesvirus 6B
auuaauuaucauu

SEQ ID NO: 3991739 - RNA, 20 nt, Human herpesvirus 6B
auuaccgguaaagaacccau

SEQ ID NO: 3991740 - RNA, 13 nt, Human herpesvirus 6B
auuagaucuucuu

SEQ ID NO: 3991741 - RNA, 18 nt, Human herpesvirus 6B
auuagcauucaaguccaa

SEQ ID NO: 3991742 - RNA, 12 nt, Human herpesvirus 6B
auuauaaaugua

SEQ ID NO: 3991743 - RNA, 14 nt, Human herpesvirus 6B
auuauaaugaugca

SEQ ID NO: 3991744 - RNA, 18 nt, Human herpesvirus 6B
auuauauguugauugcug

SEQ ID NO: 3991745 - RNA, 20 nt, Human herpesvirus 6B
auuauggaaguagaauacug

SEQ ID NO: 3991746 - RNA, 19 nt, Human herpesvirus 6B
auucaaguccaaugcucug

SEQ ID NO: 3991747 - RNA, 15 nt, Human herpesvirus 6B
auuccaauugcugcu

SEQ ID NO: 3991748 - RNA, 22 nt, Human herpesvirus 6B
auuccauguggccuuuuuguaa

SEQ ID NO: 3991749 - RNA, 20 nt, Human herpesvirus 6B
auuccguugugacagaauua

SEQ ID NO: 3991750 - RNA, 17 nt, Human herpesvirus 6B
auucgaucgagaaucuu

SEQ ID NO: 3991751 - RNA, 18 nt, Human herpesvirus 6B
auucugauuauuaucaca

SEQ ID NO: 3991752 - RNA, 13 nt, Human herpesvirus 6B
auucuuaaauuca

SEQ ID NO: 3991753 - RNA, 19 nt, Human herpesvirus 6B
auucuuguucgggccaagg

SEQ ID NO: 3991754 - RNA, 17 nt, Human herpesvirus 6B
uggaaaagaucaacaaa

SEQ ID NO: 3991755 - RNA, 19 nt, Human herpesvirus 6B
uggaaacacuuucuucgcc

SEQ ID NO: 3991756 - RNA, 19 nt, Human herpesvirus 6B
uggaaaucuauuaauuuug

SEQ ID NO: 3991757 - RNA, 16 nt, Human herpesvirus 6B
uggaagacgucgggaa

SEQ ID NO: 3991758 - RNA, 14 nt, Human herpesvirus 6B
uggacaccaauaaa

SEQ ID NO: 3991759 - RNA, 12 nt, Human herpesvirus 6B
uggacaggagca

SEQ ID NO: 3991760 - RNA, 15 nt, Human herpesvirus 6B
uggacggcgagggga

SEQ ID NO: 3991761 - RNA, 16 nt, Human herpesvirus 6B
uggagauugauuccag

SEQ ID NO: 3991762 - RNA, 17 nt, Human herpesvirus 6B
uggagucuggccucugc

SEQ ID NO: 3991763 - RNA, 23 nt, Human herpesvirus 6B
uggagucuggccucugcggcucu

SEQ ID NO: 3991764 - RNA, 23 nt, Human herpesvirus 6B
uggauauguauccagucuauucu

SEQ ID NO: 3991765 - RNA, 18 nt, Human herpesvirus 6B
uggauuacgcuaggaaaa

SEQ ID NO: 3991766 - RNA, 20 nt, Human herpesvirus 6B
uggcacugaaucagaaacug

SEQ ID NO: 3991767 - RNA, 21 nt, Human herpesvirus 6B
uggccaaucauaagaaacuca

SEQ ID NO: 3991768 - RNA, 20 nt, Human herpesvirus 6B
uggccgcuuucuuggcgccc

SEQ ID NO: 3991769 - RNA, 22 nt, Human herpesvirus 6B
uggccuauugcauggcauguga

SEQ ID NO: 3991770 - RNA, 12 nt, Human herpesvirus 6B
uggcugaaggaa

SEQ ID NO: 3991771 - RNA, 16 nt, Human herpesvirus 6B
ugggaaccugugaaca

SEQ ID NO: 3991772 - RNA, 13 nt, Human herpesvirus 6B
ugggacuccgagc

SEQ ID NO: 3991773 - RNA, 17 nt, Human herpesvirus 6B
ugggcaauuguuuucca

SEQ ID NO: 3991774 - RNA, 14 nt, Human herpesvirus 6B
uggggacagacagg

SEQ ID NO: 3991775 - RNA, 22 nt, Human herpesvirus 6B
ugggucuaacggcaucagauuu

SEQ ID NO: 3991776 - RNA, 16 nt, Human herpesvirus 6B
uggguuaucuuagaaa

SEQ ID NO: 3991777 - RNA, 16 nt, Human herpesvirus 6B
uggugaccgaauuaug

SEQ ID NO: 3991778 - RNA, 14 nt, Human herpesvirus 6B
ugguucuugagcag

SEQ ID NO: 3991779 - RNA, 16 nt, Human herpesvirus 6B
ugguuugcuuuggauc

SEQ ID NO: 3991780 - RNA, 19 nt, Human herpesvirus 6B
uguaaaaaaaauucucuga

SEQ ID NO: 3991781 - RNA, 13 nt, Human herpesvirus 6B
uguaaaaaaagau

SEQ ID NO: 3991782 - RNA, 15 nt, Human herpesvirus 6B
uguaaaauguuucca

SEQ ID NO: 3991783 - RNA, 16 nt, Human herpesvirus 6B
uguaauuguugaaauu

SEQ ID NO: 3991784 - RNA, 23 nt, Human herpesvirus 6B
uguacugguaauucaauuucuaa

SEQ ID NO: 3991785 - RNA, 17 nt, Human herpesvirus 6B
uguaucgauuuaaccuu

SEQ ID NO: 3991786 - RNA, 17 nt, Human herpesvirus 6B
uguauuaaaaugugaug

SEQ ID NO: 3991787 - RNA, 16 nt, Human herpesvirus 6B
uguauuguguaccuug

SEQ ID NO: 3991788 - RNA, 14 nt, Human herpesvirus 6B
ugucaggaauguaa

SEQ ID NO: 3991789 - RNA, 12 nt, Human herpesvirus 6B
ugucgaaucuca

SEQ ID NO: 3991790 - RNA, 22 nt, Human herpesvirus 6B
ugucgcagaaucaagaaacacu

SEQ ID NO: 3991791 - RNA, 17 nt, Human herpesvirus 6B
ugucgcaucaauuacuc

SEQ ID NO: 3991792 - RNA, 19 nt, Human herpesvirus 6B
ugucugagcauuguguauu

SEQ ID NO: 3991793 - RNA, 22 nt, Human herpesvirus 6B
ugugaaaagugcuuuauccggc

SEQ ID NO: 3991794 - RNA, 16 nt, Human herpesvirus 6B
ugugaaguucgauguu

SEQ ID NO: 3991795 - RNA, 14 nt, Human herpesvirus 6B
ugugcaaaucagga

SEQ ID NO: 3991796 - RNA, 13 nt, Human herpesvirus 6B
ugugcuuggaagu

SEQ ID NO: 3991797 - RNA, 13 nt, Human herpesvirus 6B
uguggaguuuucu

SEQ ID NO: 3991798 - RNA, 15 nt, Human herpesvirus 6B
uguguauuugugaac

SEQ ID NO: 3991799 - RNA, 13 nt, Human herpesvirus 6B
uguguuguuuccu

SEQ ID NO: 3991800 - RNA, 16 nt, Human herpesvirus 6B
uguuagauaaaaugaa

SEQ ID NO: 3991801 - RNA, 16 nt, Human herpesvirus 6B
uguucagcuucuucua

SEQ ID NO: 3991802 - RNA, 14 nt, Human herpesvirus 6B
uguucauagagcau

SEQ ID NO: 3991803 - RNA, 15 nt, Human herpesvirus 6B
uguucgccucucccg

SEQ ID NO: 3991804 - RNA, 13 nt, Human herpesvirus 6B
uguucguucucua

SEQ ID NO: 3991805 - RNA, 14 nt, Human herpesvirus 6B
uguucguugucuga

SEQ ID NO: 3991806 - RNA, 11 nt, Human herpesvirus 6B
uguuguagugg

SEQ ID NO: 3991807 - RNA, 13 nt, Human herpesvirus 6B
uguuguguuugaa

SEQ ID NO: 3991808 - RNA, 21 nt, Human herpesvirus 6B
uguuuucaaugguauucgaaa

SEQ ID NO: 3991809 - RNA, 15 nt, Human herpesvirus 6B
uguuuuuaguaauaa

SEQ ID NO: 3991810 - RNA, 14 nt, Human herpesvirus 6B
uuaaaauguguuaa

SEQ ID NO: 3991811 - RNA, 23 nt, Human herpesvirus 6B
uuaacaaugaaaauucaguuuuu

SEQ ID NO: 3991812 - RNA, 22 nt, Human herpesvirus 6B
uuaaggagcggacacgacaugu

SEQ ID NO: 3991813 - RNA, 17 nt, Human herpesvirus 6B
uuaauaaaggauguuug

SEQ ID NO: 3991814 - RNA, 13 nt, Human herpesvirus 6B
uuacgacacgcuc

SEQ ID NO: 3991815 - RNA, 20 nt, Human herpesvirus 6B
uuacgacacgcucguauuuu

SEQ ID NO: 3991816 - RNA, 13 nt, Human herpesvirus 6B
uuacucauacaga

SEQ ID NO: 3991817 - RNA, 15 nt, Human herpesvirus 6B
uuagagaaauuugug

SEQ ID NO: 3991818 - RNA, 22 nt, Human herpesvirus 6B
uuagaugucgggccacauuucg

SEQ ID NO: 3991819 - RNA, 12 nt, Human herpesvirus 6B
uuaggacaauug

SEQ ID NO: 3991820 - RNA, 14 nt, Human herpesvirus 6B
uuaggauguaaaug

SEQ ID NO: 3991821 - RNA, 23 nt, Human herpesvirus 6B
uuauaaaaaugcgcauaugacuc

SEQ ID NO: 3991822 - RNA, 23 nt, Human herpesvirus 6B
uuauaaaugugagcaguuuuuua

SEQ ID NO: 3991823 - RNA, 13 nt, Human herpesvirus 6B
uuauaaguguuac

SEQ ID NO: 3991824 - RNA, 18 nt, Human herpesvirus 6B
uuaucaaauuugcauuca

SEQ ID NO: 3991825 - RNA, 19 nt, Human herpesvirus 6B
uuauccccaaacucuugca

SEQ ID NO: 3991826 - RNA, 17 nt, Human herpesvirus 6B
uuaugaucggcauuugu

SEQ ID NO: 3991827 - RNA, 17 nt, Human herpesvirus 6B
uuaugcaagacguuuuu

SEQ ID NO: 3991828 - RNA, 23 nt, Human herpesvirus 6B
uuauggacaacgguguggagaca

SEQ ID NO: 3991829 - RNA, 21 nt, Human herpesvirus 6B
uuauguuaauuccaagaugca

SEQ ID NO: 3991830 - RNA, 11 nt, Human herpesvirus 6B
uuauguuugau

SEQ ID NO: 3991831 - RNA, 20 nt, Human herpesvirus 6B
uuauuagcauucaaguccaa

SEQ ID NO: 3991832 - RNA, 14 nt, Human herpesvirus 6B
uuauugacugugaa

SEQ ID NO: 3991833 - RNA, 14 nt, Human herpesvirus 6B
uuauuguguucugc

SEQ ID NO: 3991834 - RNA, 15 nt, Human herpesvirus 6B
uuauuucauuggaua

SEQ ID NO: 3991835 - RNA, 20 nt, Human herpesvirus 6B
uucacagcaguuaucucaaa

SEQ ID NO: 3991836 - RNA, 15 nt, Human herpesvirus 6B
uucacguuuacauaa

SEQ ID NO: 3991837 - RNA, 20 nt, Human herpesvirus 6B
uucacuaacaaaaaaaucgu

SEQ ID NO: 3991838 - RNA, 17 nt, Human herpesvirus 6B
uucagaaggcuguguuu

SEQ ID NO: 3991839 - RNA, 15 nt, Human herpesvirus 6B
uucagcuaaucacuu

SEQ ID NO: 3991840 - RNA, 19 nt, Human herpesvirus 6B
uucaggcggcaugaauucc

SEQ ID NO: 3991841 - RNA, 17 nt, Human herpesvirus 6B
uucauaagcucuacaca

SEQ ID NO: 3991842 - RNA, 13 nt, Human herpesvirus 6B
uuccaaagauucu

SEQ ID NO: 3991843 - RNA, 12 nt, Human herpesvirus 6B
uuccagauguag

SEQ ID NO: 3991844 - RNA, 15 nt, Human herpesvirus 6B
uuccagggugaagac

SEQ ID NO: 3991845 - RNA, 21 nt, Human herpesvirus 6B
uuccucgcgguauaaugcaug

SEQ ID NO: 3991846 - RNA, 20 nt, Human herpesvirus 6B
uuccuucaggcgcaaaccaa

SEQ ID NO: 3991847 - RNA, 18 nt, Human herpesvirus 6B
uucgacaaagaacauuug

SEQ ID NO: 3991848 - RNA, 13 nt, Human herpesvirus 6B
uucgagaaagagg

SEQ ID NO: 3991849 - RNA, 14 nt, Human herpesvirus 6B
uucgauuaugugag

SEQ ID NO: 3991850 - RNA, 20 nt, Human herpesvirus 6B
uucgggaugugcggagaaag

SEQ ID NO: 3991851 - RNA, 20 nt, Human herpesvirus 6B
uucguccggggugaaaucua

SEQ ID NO: 3991852 - RNA, 16 nt, Human herpesvirus 6B
uucuaaaaguuuauua

SEQ ID NO: 3991853 - RNA, 20 nt, Human herpesvirus 6B
uucuauauggcccucucacg

SEQ ID NO: 3991854 - RNA, 16 nt, Human herpesvirus 6B
uucucagcauuguuga

SEQ ID NO: 3991855 - RNA, 15 nt, Human herpesvirus 6B
uucuccacacuguuu

SEQ ID NO: 3991856 - RNA, 21 nt, Human herpesvirus 6B
uucuuaggaaacuuucaaaau

SEQ ID NO: 3991857 - RNA, 15 nt, Human herpesvirus 6B
uucuuugaacaguga

SEQ ID NO: 3991858 - RNA, 18 nt, Human herpesvirus 6B
uugaauacgacuuuggaa

SEQ ID NO: 3991859 - RNA, 13 nt, Human herpesvirus 6B
uugaauucugcuc

SEQ ID NO: 3991860 - RNA, 13 nt, Human herpesvirus 6B
uugagacguuuuu

SEQ ID NO: 3991861 - RNA, 19 nt, Human herpesvirus 6B
uugaguuuaucgugcaauu

SEQ ID NO: 3991862 - RNA, 15 nt, Human herpesvirus 6B
uugauguugguugau

SEQ ID NO: 3991863 - RNA, 20 nt, Human herpesvirus 6B
uugauguugucuucugugcu

SEQ ID NO: 3991864 - RNA, 20 nt, Human herpesvirus 6B
uugcacuauuuuaaaugaca

SEQ ID NO: 3991865 - RNA, 18 nt, Human herpesvirus 6B
uugcauucaguauuacga

SEQ ID NO: 3991866 - RNA, 19 nt, Human herpesvirus 6B
uugcuacaaaguucucaga

SEQ ID NO: 3991867 - RNA, 13 nt, Human herpesvirus 6B
uugcugucgcccg

SEQ ID NO: 3991868 - RNA, 14 nt, Human herpesvirus 6B
ccaugacugugagg

SEQ ID NO: 3991869 - RNA, 14 nt, Human herpesvirus 6B
ccaugcagcugccc

SEQ ID NO: 3991870 - RNA, 18 nt, Human herpesvirus 6B
ccaugcagcugcccguga

SEQ ID NO: 3991871 - RNA, 13 nt, Human herpesvirus 6B
ccaugcgaguaga

SEQ ID NO: 3991872 - RNA, 14 nt, Human herpesvirus 6B
ccauggcgacucaa

SEQ ID NO: 3991873 - RNA, 23 nt, Human herpesvirus 6B
ccauugaauacacguguggcagc

SEQ ID NO: 3991874 - RNA, 13 nt, Human herpesvirus 6B
cccacgcccccuc

SEQ ID NO: 3991875 - RNA, 14 nt, Human herpesvirus 6B
cccagaugcagucu

SEQ ID NO: 3991876 - RNA, 13 nt, Human herpesvirus 6B
cccaggcgcagca

SEQ ID NO: 3991877 - RNA, 16 nt, Human herpesvirus 6B
cccaggcgcagcagca

SEQ ID NO: 3991878 - RNA, 20 nt, Human herpesvirus 6B
cccaggcgcagcagcagcuc

SEQ ID NO: 3991879 - RNA, 24 nt, Human herpesvirus 6B
cccagucagauaaugaauuucaau

SEQ ID NO: 3991880 - RNA, 21 nt, Human herpesvirus 6B
cccccucuugcaguggcgcgc

SEQ ID NO: 3991881 - RNA, 17 nt, Human herpesvirus 6B
ccccucuugcaguggcg

SEQ ID NO: 3991882 - RNA, 14 nt, Human herpesvirus 6B
cccgcgucaggugc

SEQ ID NO: 3991883 - RNA, 22 nt, Human herpesvirus 6B
cccgcgucuccgauccgucagg

SEQ ID NO: 3991884 - RNA, 22 nt, Human herpesvirus 6B
cccgggcgcggggcgcaccggc

SEQ ID NO: 3991885 - RNA, 16 nt, Human herpesvirus 6B
cccggggagugggagg

SEQ ID NO: 3991886 - RNA, 16 nt, Human herpesvirus 6B
cccgguauggaucuca

SEQ ID NO: 3991887 - RNA, 18 nt, Human herpesvirus 6B
cccguccucgugcucucc

SEQ ID NO: 3991888 - RNA, 13 nt, Human herpesvirus 6B
cccucccgcagcu

SEQ ID NO: 3991889 - RNA, 13 nt, Human herpesvirus 6B
cccuccguccagg

SEQ ID NO: 3991890 - RNA, 14 nt, Human herpesvirus 6B
cccucgcccguucc

SEQ ID NO: 3991891 - RNA, 14 nt, Human herpesvirus 6B
cccucuugcagugg

SEQ ID NO: 3991892 - RNA, 14 nt, Human herpesvirus 6B
ccgaaccacaucuu

SEQ ID NO: 3991893 - RNA, 23 nt, Human herpesvirus 6B
ccgagagaauagagauaaaugua

SEQ ID NO: 3991894 - RNA, 21 nt, Human herpesvirus 6B
ccgcacaguucguccagcagc

SEQ ID NO: 3991895 - RNA, 15 nt, Human herpesvirus 6B
ccgcagaggcggcga

SEQ ID NO: 3991896 - RNA, 13 nt, Human herpesvirus 6B
ccgcagcuccuuc

SEQ ID NO: 3991897 - RNA, 21 nt, Human herpesvirus 6B
ccgccucucuccgccuccucu

SEQ ID NO: 3991898 - RNA, 19 nt, Human herpesvirus 6B
ccgccuucucugucgcugc

SEQ ID NO: 3991899 - RNA, 17 nt, Human herpesvirus 6B
ccgcgaugcgccacagg

SEQ ID NO: 3991900 - RNA, 23 nt, Human herpesvirus 6B
ccgcgguugaagucuuuccuguu

SEQ ID NO: 3991901 - RNA, 23 nt, Human herpesvirus 6B
ccgcugcagugugucggcuccga

SEQ ID NO: 3991902 - RNA, 19 nt, Human herpesvirus 6B
ccggagcccugagagcagg

SEQ ID NO: 3991903 - RNA, 19 nt, Human herpesvirus 6B
ccggcccguccaccguccc

SEQ ID NO: 3991904 - RNA, 23 nt, Human herpesvirus 6B
ccggcgacacgcgcggaccacuc

SEQ ID NO: 3991905 - RNA, 21 nt, Human herpesvirus 6B
ccgggcgcggggcgcaccggc

SEQ ID NO: 3991906 - RNA, 19 nt, Human herpesvirus 6B
ccggggagugggaggagcc

SEQ ID NO: 3991907 - RNA, 16 nt, Human herpesvirus 6B
ccguacgcgccacagc

SEQ ID NO: 3991908 - RNA, 12 nt, Human herpesvirus 6B
ccgugaaggaau

SEQ ID NO: 3991909 - RNA, 23 nt, Human herpesvirus 6B
ccuauguuaacauugugagaaca

SEQ ID NO: 3991910 - RNA, 18 nt, Human herpesvirus 6B
ccuccaucccccuccccg

SEQ ID NO: 3991911 - RNA, 17 nt, Human herpesvirus 6B
ccucccgcagcuccuuc

SEQ ID NO: 3991912 - RNA, 16 nt, Human herpesvirus 6B
ccuccggcacugccgc

SEQ ID NO: 3991913 - RNA, 21 nt, Human herpesvirus 6B
ccucgguccccccucccucca

SEQ ID NO: 3991914 - RNA, 15 nt, Human herpesvirus 6B
ccucgugcucuccgc

SEQ ID NO: 3991915 - RNA, 11 nt, Human herpesvirus 6B
ccugaaaagac

SEQ ID NO: 3991916 - RNA, 15 nt, Human herpesvirus 6B
ccugaaaccccacaa

SEQ ID NO: 3991917 - RNA, 18 nt, Human herpesvirus 6B
ccugauccaugagcaccc

SEQ ID NO: 3991918 - RNA, 20 nt, Human herpesvirus 6B
ccugaugguuaaggaaaaag

SEQ ID NO: 3991919 - RNA, 14 nt, Human herpesvirus 6B
ccuguuuucccacc

SEQ ID NO: 3991920 - RNA, 21 nt, Human herpesvirus 6B
cgaaaacacccugauggauua

SEQ ID NO: 3991921 - RNA, 20 nt, Human herpesvirus 6B
cgaaagcaguuuugcagcau

SEQ ID NO: 3991922 - RNA, 17 nt, Human herpesvirus 6B
cgaaauuauuuuuaaug

SEQ ID NO: 3991923 - RNA, 20 nt, Human herpesvirus 6B
cgaaguacacuucaugggca

SEQ ID NO: 3991924 - RNA, 15 nt, Human herpesvirus 6B
cgaauaagccuuugc

SEQ ID NO: 3991925 - RNA, 15 nt, Human herpesvirus 6B
cgaaucggaagagga

SEQ ID NO: 3991926 - RNA, 18 nt, Human herpesvirus 6B
cgacacgcgcggaccacu

SEQ ID NO: 3991927 - RNA, 16 nt, Human herpesvirus 6B
cuguaaaaaaaauucu

SEQ ID NO: 3991928 - RNA, 14 nt, Human herpesvirus 6B
cuguaaaagggcuc

SEQ ID NO: 3991929 - RNA, 18 nt, Human herpesvirus 6B
cuguaguuuuuuucugau

SEQ ID NO: 3991930 - RNA, 18 nt, Human herpesvirus 6B
cuguauaucuaugcuuuu

SEQ ID NO: 3991931 - RNA, 13 nt, Human herpesvirus 6B
cuguauuaauuuu

SEQ ID NO: 3991932 - RNA, 17 nt, Human herpesvirus 6B
cugucuccagcaagaaa

SEQ ID NO: 3991933 - RNA, 21 nt, Human herpesvirus 6B
cugugaggugauuugaacaga

SEQ ID NO: 3991934 - RNA, 20 nt, Human herpesvirus 6B
cugugauaaaucuaccugcc

SEQ ID NO: 3991935 - RNA, 18 nt, Human herpesvirus 6B
cugugaugggaaauguug

SEQ ID NO: 3991936 - RNA, 15 nt, Human herpesvirus 6B
cuguucacauuguga

SEQ ID NO: 3991937 - RNA, 21 nt, Human herpesvirus 6B
cuguucgauguacaguuucuc

SEQ ID NO: 3991938 - RNA, 12 nt, Human herpesvirus 6B
cuguuguggauu

SEQ ID NO: 3991939 - RNA, 17 nt, Human herpesvirus 6B
cuuaaaugacacagaau

SEQ ID NO: 3991940 - RNA, 15 nt, Human herpesvirus 6B
cuuaaucagauaucu

SEQ ID NO: 3991941 - RNA, 12 nt, Human herpesvirus 6B
cuuaccaagaaa

SEQ ID NO: 3991942 - RNA, 22 nt, Human herpesvirus 6B
cuuacccaucuaugcgugugaa

SEQ ID NO: 3991943 - RNA, 14 nt, Human herpesvirus 6B
cuuaccuuuuaaga

SEQ ID NO: 3991944 - RNA, 16 nt, Human herpesvirus 6B
cuuagaaccaaucugu

SEQ ID NO: 3991945 - RNA, 19 nt, Human herpesvirus 6B
cuuagacacuguaauuugg

SEQ ID NO: 3991946 - RNA, 23 nt, Human herpesvirus 6B
cuucaggagaagaacagaggaag

SEQ ID NO: 3991947 - RNA, 19 nt, Human herpesvirus 6B
cuucauccucgaagaauug

SEQ ID NO: 3991948 - RNA, 17 nt, Human herpesvirus 6B
cuuccgcggcgcugggc

SEQ ID NO: 3991949 - RNA, 23 nt, Human herpesvirus 6B
cuucuuggagucuggccucugcg

SEQ ID NO: 3991950 - RNA, 19 nt, Human herpesvirus 6B
cuugaucacuucuucugca

SEQ ID NO: 3991951 - RNA, 10 nt, Human herpesvirus 6B
cuugcagugg

SEQ ID NO: 3991952 - RNA, 12 nt, Human herpesvirus 6B
cuuggaaaaggu

SEQ ID NO: 3991953 - RNA, 20 nt, Human herpesvirus 6B
cuugguguaccagacaaaac

SEQ ID NO: 3991954 - RNA, 12 nt, Human herpesvirus 6B
cuuuaaaaauua

SEQ ID NO: 3991955 - RNA, 12 nt, Human herpesvirus 6B
cuuuaaagcagc

SEQ ID NO: 3991956 - RNA, 20 nt, Human herpesvirus 6B
cuuuacauaacauagaaaaa

SEQ ID NO: 3991957 - RNA, 20 nt, Human herpesvirus 6B
cuuuagauggaaaacugcag

SEQ ID NO: 3991958 - RNA, 19 nt, Human herpesvirus 6B
cuuuccauugcucuuucca

SEQ ID NO: 3991959 - RNA, 19 nt, Human herpesvirus 6B
cuuuccgcccuccguuuca

SEQ ID NO: 3991960 - RNA, 15 nt, Human herpesvirus 6B
cuuugaacagugaca

SEQ ID NO: 3991961 - RNA, 19 nt, Human herpesvirus 6B
cuuugacauuuaccagaga

SEQ ID NO: 3991962 - RNA, 14 nt, Human herpesvirus 6B
cuuuggaaaguuuu

SEQ ID NO: 3991963 - RNA, 24 nt, Human herpesvirus 6B
cuuuuauagauuguuacuuucaua

SEQ ID NO: 3991964 - RNA, 23 nt, Human herpesvirus 6B
cuuuucaguauagacauuuugug

SEQ ID NO: 3991965 - RNA, 23 nt, Human herpesvirus 6B
cuuuugcaaagcuuugcacggcg

SEQ ID NO: 3991966 - RNA, 17 nt, Human herpesvirus 6B
cuuuuugaugacuuaua

SEQ ID NO: 3991967 - RNA, 23 nt, Human herpesvirus 6B
gaaaacacccugauggauuacaa

SEQ ID NO: 3991968 - RNA, 20 nt, Human herpesvirus 6B
gaaaaggugaucguggacag

SEQ ID NO: 3991969 - RNA, 14 nt, Human herpesvirus 6B
gaaaagugcuuuau

SEQ ID NO: 3991970 - RNA, 22 nt, Human herpesvirus 6B
gaaaauaaaguugaauugauag

SEQ ID NO: 3991971 - RNA, 19 nt, Human herpesvirus 6B
gaaaauacgucagcucuuc

SEQ ID NO: 3991972 - RNA, 21 nt, Human herpesvirus 6B
gaaaauuguuuuugauaugau

SEQ ID NO: 3991973 - RNA, 16 nt, Human herpesvirus 6B
gaaacauaaacgcaaa

SEQ ID NO: 3991974 - RNA, 14 nt, Human herpesvirus 6B
gaaagaaccaguga

SEQ ID NO: 3991975 - RNA, 16 nt, Human herpesvirus 6B
gaaagaggggaauuug

SEQ ID NO: 3991976 - RNA, 13 nt, Human herpesvirus 6B
gaaagcacagaaa

SEQ ID NO: 3991977 - RNA, 15 nt, Human herpesvirus 6B
gaaagcgcgccacau

SEQ ID NO: 3991978 - RNA, 16 nt, Human herpesvirus 6B
gaaaggcggagacaca

SEQ ID NO: 3991979 - RNA, 16 nt, Human herpesvirus 6B
gaaauaccaaagaaau

SEQ ID NO: 3991980 - RNA, 17 nt, Human herpesvirus 6B
gaaauauccguuuaguu

SEQ ID NO: 3991981 - RNA, 16 nt, Human herpesvirus 6B
gaaaucuuuccugcua

SEQ ID NO: 3991982 - RNA, 19 nt, Human herpesvirus 6B
gaaauguugccuuuguaaa

SEQ ID NO: 3991983 - RNA, 17 nt, Human herpesvirus 6B
gaacaaaguaauaugau

SEQ ID NO: 3991984 - RNA, 19 nt, Human herpesvirus 6B
gaacagagacccuccuggc

SEQ ID NO: 3991985 - RNA, 14 nt, Human herpesvirus 6B
gagggaaugaugaa

SEQ ID NO: 3991986 - RNA, 16 nt, Human herpesvirus 6B
gagguagcaacuugcu

SEQ ID NO: 3991987 - RNA, 17 nt, Human herpesvirus 6B
gaggugauuugaacaga

SEQ ID NO: 3991988 - RNA, 20 nt, Human herpesvirus 6B
gaguaccgaauaaaacaagu

SEQ ID NO: 3991989 - RNA, 18 nt, Human herpesvirus 6B
gaguauucgugugugaaa

SEQ ID NO: 3991990 - RNA, 21 nt, Human herpesvirus 6B
gagugaauugugcaagcugua

SEQ ID NO: 3991991 - RNA, 16 nt, Human herpesvirus 6B
gagugcgacaggagau

SEQ ID NO: 3991992 - RNA, 23 nt, Human herpesvirus 6B
gagugguuuuuuggauaagcaga

SEQ ID NO: 3991993 - RNA, 11 nt, Human herpesvirus 6B
gauaaacugua

SEQ ID NO: 3991994 - RNA, 22 nt, Human herpesvirus 6B
gauaacucagauucgcaagacu

SEQ ID NO: 3991995 - RNA, 20 nt, Human herpesvirus 6B
gauaagaauuuccaggguga

SEQ ID NO: 3991996 - RNA, 20 nt, Human herpesvirus 6B
gauacuacguguaauguuuc

SEQ ID NO: 3991997 - RNA, 19 nt, Human herpesvirus 6B
gauagaggaauugcuuugu

SEQ ID NO: 3991998 - RNA, 18 nt, Human herpesvirus 6B
gauaugggaaaagggagu

SEQ ID NO: 3991999 - RNA, 21 nt, Human herpesvirus 6B
gauaugucguuucaugggaga

SEQ ID NO: 3992000 - RNA, 20 nt, Human herpesvirus 6B
gaucaaucuccaaaacacuc

SEQ ID NO: 3992001 - RNA, 13 nt, Human herpesvirus 6B
gaucacgcaggcc

SEQ ID NO: 3992002 - RNA, 20 nt, Human herpesvirus 6B
gaucagguauagagguuaua

SEQ ID NO: 3992003 - RNA, 15 nt, Human herpesvirus 6B
gauccauuuucugaa

SEQ ID NO: 3992004 - RNA, 20 nt, Human herpesvirus 6B
gaucccaaacaaacguguau

SEQ ID NO: 3992005 - RNA, 15 nt, Human herpesvirus 6B
gauccgucaggacca

SEQ ID NO: 3992006 - RNA, 16 nt, Human herpesvirus 6B
gauccgucaggaccag

SEQ ID NO: 3992007 - RNA, 22 nt, Human herpesvirus 6B
gauccuguaauaguauugucug

SEQ ID NO: 3992008 - RNA, 14 nt, Human herpesvirus 6B
gaucugauuuugau

SEQ ID NO: 3992009 - RNA, 15 nt, Human herpesvirus 6B
gaucuuauaaaugug

SEQ ID NO: 3992010 - RNA, 18 nt, Human herpesvirus 6B
gaucuucuucagaaagau

SEQ ID NO: 3992011 - RNA, 17 nt, Human herpesvirus 6B
gaugaaaguuuuggaaa

SEQ ID NO: 3992012 - RNA, 15 nt, Human herpesvirus 6B
gaugacuuuucugau

SEQ ID NO: 3992013 - RNA, 19 nt, Human herpesvirus 6B
gaugagcuucaauuguuuu

SEQ ID NO: 3992014 - RNA, 15 nt, Human herpesvirus 6B
gaugaggaggaggga

SEQ ID NO: 3992015 - RNA, 12 nt, Human herpesvirus 6B
gaugccaaagcu

SEQ ID NO: 3992016 - RNA, 18 nt, Human herpesvirus 6B
gaugcgccacagggaggu

SEQ ID NO: 3992017 - RNA, 17 nt, Human herpesvirus 6B
gaugucgcgaagcucag

SEQ ID NO: 3992018 - RNA, 15 nt, Human herpesvirus 6B
gaugucgggccacau

SEQ ID NO: 3992019 - RNA, 19 nt, Human herpesvirus 6B
gauguugucuucugugcuu

SEQ ID NO: 3992020 - RNA, 13 nt, Human herpesvirus 6B
gauuaauuaucau

SEQ ID NO: 3992021 - RNA, 16 nt, Human herpesvirus 6B
gauucuguugggugau

SEQ ID NO: 3992022 - RNA, 14 nt, Human herpesvirus 6B
gauugggaugucag

SEQ ID NO: 3992023 - RNA, 21 nt, Human herpesvirus 6B
gauugucauucugcauuuaua

SEQ ID NO: 3992024 - RNA, 13 nt, Human herpesvirus 6B
gauuuagugcagu

SEQ ID NO: 3992025 - RNA, 20 nt, Human herpesvirus 6B
gauuuuucugccuauuucuc

SEQ ID NO: 3992026 - RNA, 14 nt, Human herpesvirus 6B
gcaaagggaagcca

SEQ ID NO: 3992027 - RNA, 16 nt, Human herpesvirus 6B
gcaacggcacgagagc

SEQ ID NO: 3992028 - RNA, 21 nt, Human herpesvirus 6B
gcaagaaagcguguucaaaaa

SEQ ID NO: 3992029 - RNA, 23 nt, Human herpesvirus 6B
gcaagauuuuagauuuaugaggc

SEQ ID NO: 3992030 - RNA, 20 nt, Human herpesvirus 6B
gcaagucgcgaagugcuucu

SEQ ID NO: 3992031 - RNA, 21 nt, Human herpesvirus 6B
gcaaguuuucagcaagagaga

SEQ ID NO: 3992032 - RNA, 18 nt, Human herpesvirus 6B
gcaaucgucuuugauuua

SEQ ID NO: 3992033 - RNA, 18 nt, Human herpesvirus 6B
gcaauuuaaacagaaauu

SEQ ID NO: 3992034 - RNA, 20 nt, Human herpesvirus 6B
gcacaguucguccagcagcg

SEQ ID NO: 3992035 - RNA, 22 nt, Human herpesvirus 6B
gcacccguauccgcgagacagc

SEQ ID NO: 3992036 - RNA, 19 nt, Human herpesvirus 6B
gcaccgccuccgccaccac

SEQ ID NO: 3992037 - RNA, 20 nt, Human herpesvirus 6B
gcaccggcgacacgcgcgga

SEQ ID NO: 3992038 - RNA, 16 nt, Human herpesvirus 6B
gcacgucacgggcagc

SEQ ID NO: 3992039 - RNA, 22 nt, Human herpesvirus 6B
gcacuuguagagacgaaagcag

SEQ ID NO: 3992040 - RNA, 22 nt, Human herpesvirus 6B
gcagaaaacgauuauugcuaca

SEQ ID NO: 3992041 - RNA, 14 nt, Human herpesvirus 6B
gcagaggccagacu

SEQ ID NO: 3992042 - RNA, 22 nt, Human herpesvirus 6B
gcagaucuugaaaagccccugc

SEQ ID NO: 3992043 - RNA, 18 nt, Human herpesvirus 6B
gcagauuuacgacacgcu

SEQ ID NO: 3992044 - RNA, 15 nt, Human herpesvirus 6B
gcagauuuuaaugau

SEQ ID NO: 3992045 - RNA, 14 nt, Human herpesvirus 6B
gcagcagcagcucc

SEQ ID NO: 3992046 - RNA, 19 nt, Human herpesvirus 6B
gcaggggccguacgcgcca

SEQ ID NO: 3992047 - RNA, 14 nt, Human herpesvirus 6B
gcaguaucaaucac

SEQ ID NO: 3992048 - RNA, 19 nt, Human herpesvirus 6B
agaaagaacuuuuggaugu

SEQ ID NO: 3992049 - RNA, 16 nt, Human herpesvirus 6B
agaaagcguguucaaa

SEQ ID NO: 3992050 - RNA, 16 nt, Human herpesvirus 6B
agaaauucuccuguag

SEQ ID NO: 3992051 - RNA, 15 nt, Human herpesvirus 6B
agaauacgaagacaa

SEQ ID NO: 3992052 - RNA, 21 nt, Human herpesvirus 6B
agaauagagauaaauguauaa

SEQ ID NO: 3992053 - RNA, 19 nt, Human herpesvirus 6B
agaaucaagaaacacuucu

SEQ ID NO: 3992054 - RNA, 12 nt, Human herpesvirus 6B
agaaucuccaaa

SEQ ID NO: 3992055 - RNA, 23 nt, Human herpesvirus 6B
agaauuccaaggcucuggcaaag

SEQ ID NO: 3992056 - RNA, 23 nt, Human herpesvirus 6B
agaauuuccagggugaagacaga

SEQ ID NO: 3992057 - RNA, 15 nt, Human herpesvirus 6B
agaauuugcaguuug

SEQ ID NO: 3992058 - RNA, 18 nt, Human herpesvirus 6B
agacacggcgaaagccag

SEQ ID NO: 3992059 - RNA, 15 nt, Human herpesvirus 6B
agacagauugaucau

SEQ ID NO: 3992060 - RNA, 16 nt, Human herpesvirus 6B
agacaguuuacuaaaa

SEQ ID NO: 3992061 - RNA, 22 nt, Human herpesvirus 6B
agacaugagcgagaauguugaa

SEQ ID NO: 3992062 - RNA, 17 nt, Human herpesvirus 6B
agacauucaacauuccc

SEQ ID NO: 3992063 - RNA, 22 nt, Human herpesvirus 6B
agacguuucuauggauaugagu

SEQ ID NO: 3992064 - RNA, 17 nt, Human herpesvirus 6B
agacuggacaguguuuu

SEQ ID NO: 3992065 - RNA, 20 nt, Human herpesvirus 6B
agagaaguggaacugcuugg

SEQ ID NO: 3992066 - RNA, 16 nt, Human herpesvirus 6B
agagauuuuggaagca

SEQ ID NO: 3992067 - RNA, 11 nt, Human herpesvirus 6B
agagcauugag

SEQ ID NO: 3992068 - RNA, 15 nt, Human herpesvirus 6B
agagcggagaggcgc

SEQ ID NO: 3992069 - RNA, 18 nt, Human herpesvirus 6B
agaggaagggauggcaga

SEQ ID NO: 3992070 - RNA, 16 nt, Human herpesvirus 6B
agaggcgcgggacagc

SEQ ID NO: 3992071 - RNA, 20 nt, Human herpesvirus 6B
agagggagaaacggacacgc

SEQ ID NO: 3992072 - RNA, 23 nt, Human herpesvirus 6B
agaggguuccuccgcgggaccug

SEQ ID NO: 3992073 - RNA, 19 nt, Human herpesvirus 6B
agaguauuuuaaagauuuu

SEQ ID NO: 3992074 - RNA, 14 nt, Human herpesvirus 6B
agaguuugaauuac

SEQ ID NO: 3992075 - RNA, 14 nt, Human herpesvirus 6B
agauaauuacagau

SEQ ID NO: 3992076 - RNA, 14 nt, Human herpesvirus 6B
agauagaaaauugu

SEQ ID NO: 3992077 - RNA, 20 nt, Human herpesvirus 6B
agaucacaacaaacauguau

SEQ ID NO: 3992078 - RNA, 13 nt, Human herpesvirus 6B
agaucacucagau

SEQ ID NO: 3992079 - RNA, 13 nt, Human herpesvirus 6B
agauccaauggau

SEQ ID NO: 3992080 - RNA, 16 nt, Human herpesvirus 6B
agaucgcuuuucugga

SEQ ID NO: 3992081 - RNA, 14 nt, Human herpesvirus 6B
agaucuaaugaaug

SEQ ID NO: 3992082 - RNA, 20 nt, Human herpesvirus 6B
agaucuucuucagaaagauu

SEQ ID NO: 3992083 - RNA, 16 nt, Human herpesvirus 6B
agaucuugaaaagccc

SEQ ID NO: 3992084 - RNA, 15 nt, Human herpesvirus 6B
agaucuuucuagaca

SEQ ID NO: 3992085 - RNA, 12 nt, Human herpesvirus 6B
agaugaggagga

SEQ ID NO: 3992086 - RNA, 15 nt, Human herpesvirus 6B
agaugcaaaacuguu

SEQ ID NO: 3992087 - RNA, 18 nt, Human herpesvirus 6B
agaugcaaccgaugacaa

SEQ ID NO: 3992088 - RNA, 18 nt, Human herpesvirus 6B
agaugcauuguugaaaug

SEQ ID NO: 3992089 - RNA, 21 nt, Human herpesvirus 6B
agaugcugaauaauuacaaag

SEQ ID NO: 3992090 - RNA, 13 nt, Human herpesvirus 6B
agauuacauguau

SEQ ID NO: 3992091 - RNA, 21 nt, Human herpesvirus 6B
agauuauggcaacauacccuu

SEQ ID NO: 3992092 - RNA, 20 nt, Human herpesvirus 6B
agauucgggaugugcggaga

SEQ ID NO: 3992093 - RNA, 22 nt, Human herpesvirus 6B
agauugauuccagguggugguu

SEQ ID NO: 3992094 - RNA, 14 nt, Human herpesvirus 6B
agauuuaaaaauga

SEQ ID NO: 3992095 - RNA, 20 nt, Human herpesvirus 6B
agcaauuucggcaagaaagc

SEQ ID NO: 3992096 - RNA, 19 nt, Human herpesvirus 6B
agcagaugcuuaccggugu

SEQ ID NO: 3992097 - RNA, 21 nt, Human herpesvirus 6B
agcauccuguuuucccaccua

SEQ ID NO: 3992098 - RNA, 20 nt, Human herpesvirus 6B
agcaugggugaguguauuau

SEQ ID NO: 3992099 - RNA, 17 nt, Human herpesvirus 6B
agcauuauaaaacgcuu

SEQ ID NO: 3992100 - RNA, 14 nt, Human herpesvirus 6B
agcauuaugauggc

SEQ ID NO: 3992101 - RNA, 18 nt, Human herpesvirus 6B
agccuaaacggagacugc

SEQ ID NO: 3992102 - RNA, 13 nt, Human herpesvirus 6B
agccucuugugca

SEQ ID NO: 3992103 - RNA, 17 nt, Human herpesvirus 6B
agccugaaggcuacuau

SEQ ID NO: 3992104 - RNA, 20 nt, Human herpesvirus 6B
agcgaucauaaaacugccaa

SEQ ID NO: 3992105 - RNA, 23 nt, Human herpesvirus 6B
agcgcacuauauacuauagaagc

SEQ ID NO: 3992106 - RNA, 20 nt, Human herpesvirus 6B
agcgcccgaugccaacgcga

SEQ ID NO: 3992107 - RNA, 15 nt, Human herpesvirus 6B
agcguguucagcauc

SEQ ID NO: 3992108 - RNA, 18 nt, Human herpesvirus 6B
agcuaaaauugcuacuaa

SEQ ID NO: 3992109 - RNA, 22 nt, Human herpesvirus 6B
agcucaagaggguuuuuuacaa

SEQ ID NO: 3992110 - RNA, 23 nt, Human herpesvirus 6B
agcuccauguucuauuuuagaga

SEQ ID NO: 3992111 - RNA, 17 nt, Human herpesvirus 6B
agcugacaucugcaaaa

SEQ ID NO: 3992112 - RNA, 18 nt, Human herpesvirus 6B
agcugaugauuugaaaug

SEQ ID NO: 3992113 - RNA, 16 nt, Human herpesvirus 6B
agcuguucgguuuaau

SEQ ID NO: 3992114 - RNA, 14 nt, Human herpesvirus 6B
aggaacaaaaggaa

SEQ ID NO: 3992115 - RNA, 16 nt, Human herpesvirus 6B
aggacggggccucccu

SEQ ID NO: 3992116 - RNA, 22 nt, Human herpesvirus 6B
aggagaauuugcaguuugugaa

SEQ ID NO: 3992117 - RNA, 13 nt, Human herpesvirus 6B
aggauuuguaaaa

SEQ ID NO: 3992118 - RNA, 15 nt, Human herpesvirus 6B
aggcaaaguauucuu

SEQ ID NO: 3992119 - RNA, 19 nt, Human herpesvirus 6B
aggcaacggcacgagagcc

SEQ ID NO: 3992120 - RNA, 13 nt, Human herpesvirus 6B
aggcggacagcgu

SEQ ID NO: 3992121 - RNA, 18 nt, Human herpesvirus 6B
aggcggacagcgugauga

SEQ ID NO: 3992122 - RNA, 17 nt, Human herpesvirus 6B
aggcggcgaccacagcg

SEQ ID NO: 3992123 - RNA, 19 nt, Human herpesvirus 6B
aggcuaucacuuagacacg

SEQ ID NO: 3992124 - RNA, 20 nt, Human herpesvirus 6B
agggaggagagggagaaacg

SEQ ID NO: 3992125 - RNA, 22 nt, Human herpesvirus 6B
agggcauagaaagcggccaggc

SEQ ID NO: 3992126 - RNA, 15 nt, Human herpesvirus 6B
agggucgaacccuga

SEQ ID NO: 3992127 - RNA, 14 nt, Human herpesvirus 6B
agguggaaacuguu

SEQ ID NO: 3992128 - RNA, 19 nt, Human herpesvirus 6B
agguguuguguuugaaacg

SEQ ID NO: 3992129 - RNA, 15 nt, Human herpesvirus 6B
agguguuugcagaua

SEQ ID NO: 3992130 - RNA, 20 nt, Human herpesvirus 6B
agguuggcgcagagaaagga

SEQ ID NO: 3992131 - RNA, 16 nt, Human herpesvirus 6B
agguuucucucucacc

SEQ ID NO: 3992132 - RNA, 20 nt, Human herpesvirus 6B
aguaagccuauugacaugau

SEQ ID NO: 3992133 - RNA, 21 nt, Human herpesvirus 6B
aguaccucuaugauacuuuga

SEQ ID NO: 3992134 - RNA, 14 nt, Human herpesvirus 6B
aguauaaauucuuu

SEQ ID NO: 3992135 - RNA, 12 nt, Human herpesvirus 6B
aguauggaaacg

SEQ ID NO: 3992136 - RNA, 19 nt, Human herpesvirus 6B
aguaugucucgaaaaagac

SEQ ID NO: 3992137 - RNA, 17 nt, Human herpesvirus 6B
aguauuacgaauaccua

SEQ ID NO: 3992138 - RNA, 21 nt, Human herpesvirus 6B
agucaccgcauaucaccccca

SEQ ID NO: 3992139 - RNA, 19 nt, Human herpesvirus 6B
aguccaaugaauacuucuc

SEQ ID NO: 3992140 - RNA, 23 nt, Human herpesvirus 6B
aguccaaugaauacuucucuuua

SEQ ID NO: 3992141 - RNA, 20 nt, Human herpesvirus 6B
aguccuuaucagucucaaaa

SEQ ID NO: 3992142 - RNA, 18 nt, Human herpesvirus 6B
agucgccucacuguaaaa

SEQ ID NO: 3992143 - RNA, 14 nt, Human herpesvirus 6B
agucgcgaagugcu

SEQ ID NO: 3992144 - RNA, 14 nt, Human herpesvirus 6B
agucggucuguucc

SEQ ID NO: 3992145 - RNA, 18 nt, Human herpesvirus 6B
agucguggcggagcaccc

SEQ ID NO: 3992146 - RNA, 22 nt, Human herpesvirus 6B
agucguuacaguaaaaaagccg

SEQ ID NO: 3992147 - RNA, 22 nt, Human herpesvirus 6B
agucuggccucugcggcucucu

SEQ ID NO: 3992148 - RNA, 14 nt, Human herpesvirus 6B
agugcaagcucuuc

SEQ ID NO: 3992149 - RNA, 16 nt, Human herpesvirus 6B
agugcugugcucuuua

SEQ ID NO: 3992150 - RNA, 13 nt, Human herpesvirus 6B
agugcuucugcuc

SEQ ID NO: 3992151 - RNA, 21 nt, Human herpesvirus 6B
aguggcgcgcguuuuugguga

SEQ ID NO: 3992152 - RNA, 23 nt, Human herpesvirus 6B
aguggcuugcugucgcccgccuc

SEQ ID NO: 3992153 - RNA, 17 nt, Human herpesvirus 6B
aguguuaaagaugcuga

SEQ ID NO: 3992154 - RNA, 17 nt, Human herpesvirus 6B
aguugcacauguuucug

SEQ ID NO: 3992155 - RNA, 13 nt, Human herpesvirus 6B
aguuucauccuga

SEQ ID NO: 3992156 - RNA, 19 nt, Human herpesvirus 6B
aguuuugcagcaucgccuu

SEQ ID NO: 3992157 - RNA, 15 nt, Human herpesvirus 6B
aguuuuggaaaaugu

SEQ ID NO: 3992158 - RNA, 16 nt, Human herpesvirus 6B
aguuuugugauccugu

SEQ ID NO: 3992159 - RNA, 16 nt, Human herpesvirus 6B
aguuuuuuucugauga

SEQ ID NO: 3992160 - RNA, 14 nt, Human herpesvirus 6B
auaaagaagaucac

SEQ ID NO: 3992161 - RNA, 13 nt, Human herpesvirus 6B
auuucgguuuaau

SEQ ID NO: 3992162 - RNA, 19 nt, Human herpesvirus 6B
auuucguauguuuaacuaa

SEQ ID NO: 3992163 - RNA, 22 nt, Human herpesvirus 6B
auuucguguaucggcagugcaa

SEQ ID NO: 3992164 - RNA, 23 nt, Human herpesvirus 6B
auuucuagcgaucauaaaacugc

SEQ ID NO: 3992165 - RNA, 15 nt, Human herpesvirus 6B
auuucuaucuacaaa

SEQ ID NO: 3992166 - RNA, 14 nt, Human herpesvirus 6B
auuucuuguagcuu

SEQ ID NO: 3992167 - RNA, 20 nt, Human herpesvirus 6B
auuugaaauguucguucucu

SEQ ID NO: 3992168 - RNA, 14 nt, Human herpesvirus 6B
auuugaacagagau

SEQ ID NO: 3992169 - RNA, 15 nt, Human herpesvirus 6B
auuugaacagagauu

SEQ ID NO: 3992170 - RNA, 19 nt, Human herpesvirus 6B
auuugacaauaaacaugau

SEQ ID NO: 3992171 - RNA, 17 nt, Human herpesvirus 6B
auuugguggaugucaag

SEQ ID NO: 3992172 - RNA, 14 nt, Human herpesvirus 6B
auuugugcaaaaug

SEQ ID NO: 3992173 - RNA, 10 nt, Human herpesvirus 6B
auuuuacugg

SEQ ID NO: 3992174 - RNA, 20 nt, Human herpesvirus 6B
auuuuaguauuuaugcuuca

SEQ ID NO: 3992175 - RNA, 14 nt, Human herpesvirus 6B
auuuuauuuugugg

SEQ ID NO: 3992176 - RNA, 11 nt, Human herpesvirus 6B
auuuucuguau

SEQ ID NO: 3992177 - RNA, 20 nt, Human herpesvirus 6B
auuuugacaccucauaucaa

SEQ ID NO: 3992178 - RNA, 23 nt, Human herpesvirus 6B
auuuugcgucgucugugcaaagc

SEQ ID NO: 3992179 - RNA, 15 nt, Human herpesvirus 6B
auuuuuaaggauuga

SEQ ID NO: 3992180 - RNA, 19 nt, Human herpesvirus 6B
caaaaaaaaaugacugaua

SEQ ID NO: 3992181 - RNA, 15 nt, Human herpesvirus 6B
caaaaaaauauugga

SEQ ID NO: 3992182 - RNA, 16 nt, Human herpesvirus 6B
caaaaaaauauuggau

SEQ ID NO: 3992183 - RNA, 15 nt, Human herpesvirus 6B
caaaaaauguuaaaa

SEQ ID NO: 3992184 - RNA, 13 nt, Human herpesvirus 6B
caaacaguuucag

SEQ ID NO: 3992185 - RNA, 17 nt, Human herpesvirus 6B
caaagggaagccagccg

SEQ ID NO: 3992186 - RNA, 15 nt, Human herpesvirus 6B
caaaugagggagaug

SEQ ID NO: 3992187 - RNA, 15 nt, Human herpesvirus 6B
caacgcauagaagcc

SEQ ID NO: 3992188 - RNA, 12 nt, Human herpesvirus 6B
caacggagaaaa

SEQ ID NO: 3992189 - RNA, 23 nt, Human herpesvirus 6B
caacgugugaaaacuaguaaaaa

SEQ ID NO: 3992190 - RNA, 13 nt, Human herpesvirus 6B
caacuugcugucg

SEQ ID NO: 3992191 - RNA, 18 nt, Human herpesvirus 6B
caacuugugccaaucagu

SEQ ID NO: 3992192 - RNA, 18 nt, Human herpesvirus 6B
caagaaaagaaaaaacag

SEQ ID NO: 3992193 - RNA, 16 nt, Human herpesvirus 6B
caagggaaauccuaua

SEQ ID NO: 3992194 - RNA, 19 nt, Human herpesvirus 6B
caaggguaacgcaggagaa

SEQ ID NO: 3992195 - RNA, 18 nt, Human herpesvirus 6B
caaggguaccaaauguuc

SEQ ID NO: 3992196 - RNA, 16 nt, Human herpesvirus 6B
caagucuagacaugau

SEQ ID NO: 3992197 - RNA, 18 nt, Human herpesvirus 6B
caaguugcggaagggcuc

SEQ ID NO: 3992198 - RNA, 14 nt, Human herpesvirus 6B
caaguuuuuaugca

SEQ ID NO: 3992199 - RNA, 21 nt, Human herpesvirus 6B
caauaacucuuggauugcaga

SEQ ID NO: 3992200 - RNA, 17 nt, Human herpesvirus 6B
caauaccaaaaaauguu

SEQ ID NO: 3992201 - RNA, 16 nt, Human herpesvirus 6B
caauagcuaauuugca

SEQ ID NO: 3992202 - RNA, 16 nt, Human herpesvirus 6B
caauccaauaauugau

SEQ ID NO: 3992203 - RNA, 17 nt, Human herpesvirus 6B
caaugaguuuuuugcaa

SEQ ID NO: 3992204 - RNA, 19 nt, Human herpesvirus 6B
caaugauacuacguguaau

SEQ ID NO: 3992205 - RNA, 16 nt, Human herpesvirus 6B
caauguucuugacaaa

SEQ ID NO: 3992206 - RNA, 19 nt, Human herpesvirus 6B
caauuggcgauuuggguua

SEQ ID NO: 3992207 - RNA, 18 nt, Human herpesvirus 6B
caauuucccaguuaauuu

SEQ ID NO: 3992208 - RNA, 15 nt, Human herpesvirus 6B
caauuuugauuuaaa

SEQ ID NO: 3992209 - RNA, 13 nt, Human herpesvirus 6B
cacaaaaacaggg

SEQ ID NO: 3992210 - RNA, 17 nt, Human herpesvirus 6B
cacaaagugcuguaaac

SEQ ID NO: 3992211 - RNA, 12 nt, Human herpesvirus 6B
cacaccaccgca

SEQ ID NO: 3992212 - RNA, 13 nt, Human herpesvirus 6B
cacacgacaaaua

SEQ ID NO: 3992213 - RNA, 13 nt, Human herpesvirus 6B
cacauagagaaga

SEQ ID NO: 3992214 - RNA, 16 nt, Human herpesvirus 6B
caccagauaggaaaag

SEQ ID NO: 3992215 - RNA, 18 nt, Human herpesvirus 6B
cacccauauacccucgcc

SEQ ID NO: 3992216 - RNA, 16 nt, Human herpesvirus 6B
cacccccauacacacc

SEQ ID NO: 3992217 - RNA, 14 nt, Human herpesvirus 6B
caccccccucuugc

SEQ ID NO: 3992218 - RNA, 18 nt, Human herpesvirus 6B
caccccccucuugcagug

SEQ ID NO: 3992219 - RNA, 20 nt, Human herpesvirus 6B
cacccgcugucgucugagca

SEQ ID NO: 3992220 - RNA, 22 nt, Human herpesvirus 6B
caccgagggcgggcggacggcu

SEQ ID NO: 3992221 - RNA, 17 nt, Human herpesvirus 6B
cacgagccaaggggacg

SEQ ID NO: 3992222 - RNA, 15 nt, Human herpesvirus 6B
cacgcgcggagcacg

SEQ ID NO: 3992223 - RNA, 14 nt, Human herpesvirus 6B
cacggcgaaagcca

SEQ ID NO: 3992224 - RNA, 16 nt, Human herpesvirus 6B
cacgggccacgagagc

SEQ ID NO: 3992225 - RNA, 14 nt, Human herpesvirus 6B
cacgucguggcaga

SEQ ID NO: 3992226 - RNA, 17 nt, Human herpesvirus 6B
cacgugaaauaaaguuu

SEQ ID NO: 3992227 - RNA, 13 nt, Human herpesvirus 6B
cacuaacaaaaaa

SEQ ID NO: 3992228 - RNA, 22 nt, Human herpesvirus 6B
cacucgggccggucggggaggg

SEQ ID NO: 3992229 - RNA, 14 nt, Human herpesvirus 6B
cacugaaauuuaca

SEQ ID NO: 3992230 - RNA, 14 nt, Human herpesvirus 6B
cacugaaucagaaa

SEQ ID NO: 3992231 - RNA, 16 nt, Human herpesvirus 6B
cacuguaaaagggcuc

SEQ ID NO: 3992232 - RNA, 18 nt, Human herpesvirus 6B
cacugugauaugcaaacu

SEQ ID NO: 3992233 - RNA, 19 nt, Human herpesvirus 6B
cacuuaguugauaugaaug

SEQ ID NO: 3992234 - RNA, 12 nt, Human herpesvirus 6B
cagaaaauguuc

SEQ ID NO: 3992235 - RNA, 16 nt, Human herpesvirus 6B
cagaaaugagcaacau

SEQ ID NO: 3992236 - RNA, 19 nt, Human herpesvirus 6B
cagaaguuauagugaaaaa

SEQ ID NO: 3992237 - RNA, 18 nt, Human herpesvirus 6B
cagacaaauggaaacugg

SEQ ID NO: 3992238 - RNA, 17 nt, Human herpesvirus 6B
cagacgugcggagaugc

SEQ ID NO: 3992239 - RNA, 13 nt, Human herpesvirus 6B
cagagagccgcag

SEQ ID NO: 3992240 - RNA, 14 nt, Human herpesvirus 6B
cagagugucucuca

SEQ ID NO: 3992241 - RNA, 19 nt, Human herpesvirus 6B
cagaucaucgccauaguga

SEQ ID NO: 3992242 - RNA, 21 nt, Human herpesvirus 6B
cagaucaucgccauagugaaa

SEQ ID NO: 3992243 - RNA, 22 nt, Human herpesvirus 6B
cagaucuucgauuacuguaaaa

SEQ ID NO: 3992244 - RNA, 19 nt, Human herpesvirus 6B
cagaucuugaaaagccccu

SEQ ID NO: 3992245 - RNA, 14 nt, Human herpesvirus 6B
cagaugaggaggag

SEQ ID NO: 3992246 - RNA, 17 nt, Human herpesvirus 6B
cagaugcagucuccaca

SEQ ID NO: 3992247 - RNA, 19 nt, Human herpesvirus 6B
cagaugcagucuccacagg

SEQ ID NO: 3992248 - RNA, 18 nt, Human herpesvirus 6B
cagauuucccaaaacgug

SEQ ID NO: 3992249 - RNA, 13 nt, Human herpesvirus 6B
cagcaaucagcag

SEQ ID NO: 3992250 - RNA, 22 nt, Human herpesvirus 6B
cagcaauuucggcaagaaagcc

SEQ ID NO: 3992251 - RNA, 19 nt, Human herpesvirus 6B
cagcuaagauuaacaacug

SEQ ID NO: 3992252 - RNA, 18 nt, Human herpesvirus 6B
cagcuauacuacgagaaa

SEQ ID NO: 3992253 - RNA, 24 nt, Human herpesvirus 6B
caggaaauuaauaagauagauauu

SEQ ID NO: 3992254 - RNA, 16 nt, Human herpesvirus 6B
caggaaguucuucaaa

SEQ ID NO: 3992255 - RNA, 22 nt, Human herpesvirus 6B
caggagaaacuuguaaggcuua

SEQ ID NO: 3992256 - RNA, 14 nt, Human herpesvirus 6B
caggauuuguaaaa

SEQ ID NO: 3992257 - RNA, 17 nt, Human herpesvirus 6B
cagggcauagaaagcgg

SEQ ID NO: 3992258 - RNA, 22 nt, Human herpesvirus 6B
caggggccguacgcgccacagc

SEQ ID NO: 3992259 - RNA, 17 nt, Human herpesvirus 6B
caggucaagcgccagga

SEQ ID NO: 3992260 - RNA, 15 nt, Human herpesvirus 6B
caguaaaacauguag

SEQ ID NO: 3992261 - RNA, 15 nt, Human herpesvirus 6B
caguauagacauuuu

SEQ ID NO: 3992262 - RNA, 15 nt, Human herpesvirus 6B
ucuucauccucgaag

SEQ ID NO: 3992263 - RNA, 15 nt, Human herpesvirus 6B
ucuucauucuucgaa

SEQ ID NO: 3992264 - RNA, 23 nt, Human herpesvirus 6B
ucuuccgcggcgcugggcuccuc

SEQ ID NO: 3992265 - RNA, 21 nt, Human herpesvirus 6B
ucuuccggaauuuugagacuu

SEQ ID NO: 3992266 - RNA, 17 nt, Human herpesvirus 6B
ucuucgugcaauaacga

SEQ ID NO: 3992267 - RNA, 19 nt, Human herpesvirus 6B
ucuucuuggagucuggccu

SEQ ID NO: 3992268 - RNA, 17 nt, Human herpesvirus 6B
ucuugcacggaaucucu

SEQ ID NO: 3992269 - RNA, 10 nt, Human herpesvirus 6B
ucuugcagug

SEQ ID NO: 3992270 - RNA, 19 nt, Human herpesvirus 6B
ucuuggauugcagauaaga

SEQ ID NO: 3992271 - RNA, 19 nt, Human herpesvirus 6B
ucuuuaugucugucagaaa

SEQ ID NO: 3992272 - RNA, 22 nt, Human herpesvirus 6B
ucuuuaugucugucagaaauau

SEQ ID NO: 3992273 - RNA, 19 nt, Human herpesvirus 6B
ucuuucaaaaugaccagag

SEQ ID NO: 3992274 - RNA, 19 nt, Human herpesvirus 6B
ucuuuccgaugugucugaa

SEQ ID NO: 3992275 - RNA, 16 nt, Human herpesvirus 6B
ucuuugacuauuucga

SEQ ID NO: 3992276 - RNA, 13 nt, Human herpesvirus 6B
ugaaaaaaaacug

SEQ ID NO: 3992277 - RNA, 12 nt, Human herpesvirus 6B
ugaaaacuagua

SEQ ID NO: 3992278 - RNA, 16 nt, Human herpesvirus 6B
ugaaaagccccugcuu

SEQ ID NO: 3992279 - RNA, 23 nt, Human herpesvirus 6B
ugaaacuaugaggaacugaugag

SEQ ID NO: 3992280 - RNA, 14 nt, Human herpesvirus 6B
ugaaacugaagaaa

SEQ ID NO: 3992281 - RNA, 13 nt, Human herpesvirus 6B
ugaaagcagucag

SEQ ID NO: 3992282 - RNA, 21 nt, Human herpesvirus 6B
ugaaagguguggugaaagaca

SEQ ID NO: 3992283 - RNA, 13 nt, Human herpesvirus 6B
ugaaauacuguga

SEQ ID NO: 3992284 - RNA, 14 nt, Human herpesvirus 6B
ugaaauacugugag

SEQ ID NO: 3992285 - RNA, 18 nt, Human herpesvirus 6B
ugaaauuuucaauucgga

SEQ ID NO: 3992286 - RNA, 11 nt, Human herpesvirus 6B
ugaacagagau

SEQ ID NO: 3992287 - RNA, 15 nt, Human herpesvirus 6B
ugaaggguguuucca

SEQ ID NO: 3992288 - RNA, 13 nt, Human herpesvirus 6B
ugaagucuuuccu

SEQ ID NO: 3992289 - RNA, 21 nt, Human herpesvirus 6B
ugaauacgacuuuggaaaguu

SEQ ID NO: 3992290 - RNA, 12 nt, Human herpesvirus 6B
ugaaugugcuuu

SEQ ID NO: 3992291 - RNA, 14 nt, Human herpesvirus 6B
ugaauucugcucgu

SEQ ID NO: 3992292 - RNA, 16 nt, Human herpesvirus 6B
ugaauugugcaagcug

SEQ ID NO: 3992293 - RNA, 15 nt, Human herpesvirus 6B
ugacaauaaacauga

SEQ ID NO: 3992294 - RNA, 16 nt, Human herpesvirus 6B
ugacaauaaacaugau

SEQ ID NO: 3992295 - RNA, 16 nt, Human herpesvirus 6B
ugacacacagaauaca

SEQ ID NO: 3992296 - RNA, 16 nt, Human herpesvirus 6B
ugacaugauguuuccu

SEQ ID NO: 3992297 - RNA, 22 nt, Human herpesvirus 6B
ugacuacggcgguuaacuguuu

SEQ ID NO: 3992298 - RNA, 20 nt, Human herpesvirus 6B
ugacuauuucuuuaagcaag

SEQ ID NO: 3992299 - RNA, 14 nt, Human herpesvirus 6B
ugacugacaaggua

SEQ ID NO: 3992300 - RNA, 21 nt, Human herpesvirus 6B
ugacuguagaaaacgauuucu

SEQ ID NO: 3992301 - RNA, 13 nt, Human herpesvirus 6B
ugacugugaggug

SEQ ID NO: 3992302 - RNA, 15 nt, Human herpesvirus 6B
ugacugugaggugau

SEQ ID NO: 3992303 - RNA, 13 nt, Human herpesvirus 6B
ugagcaacauuua

SEQ ID NO: 3992304 - RNA, 16 nt, Human herpesvirus 6B
ugaggcggugucuuca

SEQ ID NO: 3992305 - RNA, 21 nt, Human herpesvirus 6B
ugaggugauuugaacagagau

SEQ ID NO: 3992306 - RNA, 15 nt, Human herpesvirus 6B
ugaguuuuuugcaau

SEQ ID NO: 3992307 - RNA, 16 nt, Human herpesvirus 6B
ugauaaaacucaccca

SEQ ID NO: 3992308 - RNA, 15 nt, Human herpesvirus 6B
ugauaaguugucauu

SEQ ID NO: 3992309 - RNA, 18 nt, Human herpesvirus 6B
ugauacgaguaaaauuga

SEQ ID NO: 3992310 - RNA, 14 nt, Human herpesvirus 6B
ugauacuuugaaag

SEQ ID NO: 3992311 - RNA, 13 nt, Human herpesvirus 6B
ugauccagaauua

SEQ ID NO: 3992312 - RNA, 19 nt, Human herpesvirus 6B
ugaugccuugauguuuccu

SEQ ID NO: 3992313 - RNA, 23 nt, Human herpesvirus 6B
ugauuccguugugacagaauuau

SEQ ID NO: 3992314 - RNA, 18 nt, Human herpesvirus 6B
ugauuggaaucacaaaau

SEQ ID NO: 3992315 - RNA, 23 nt, Human herpesvirus 6B
ugcaaaaguaugcuuugaaaucu

SEQ ID NO: 3992316 - RNA, 19 nt, Human herpesvirus 6B
ugcaaaauagguuaaaucu

SEQ ID NO: 3992317 - RNA, 20 nt, Human herpesvirus 6B
ugcaaaaucguguuuucuua

SEQ ID NO: 3992318 - RNA, 16 nt, Human herpesvirus 6B
ugcaagcagaccaguu

SEQ ID NO: 3992319 - RNA, 19 nt, Human herpesvirus 6B
ugcaauuugaauucugcuc

SEQ ID NO: 3992320 - RNA, 15 nt, Human herpesvirus 6B
ugcacgaauaaggag

SEQ ID NO: 3992321 - RNA, 13 nt, Human herpesvirus 6B
ugcagauucuguu

SEQ ID NO: 3992322 - RNA, 13 nt, Human herpesvirus 6B
ugcaugcauugcg

SEQ ID NO: 3992323 - RNA, 14 nt, Human herpesvirus 6B
ugcauuaaggaaaa

SEQ ID NO: 3992324 - RNA, 16 nt, Human herpesvirus 6B
ugcauugcaagauuuu

SEQ ID NO: 3992325 - RNA, 15 nt, Human herpesvirus 6B
ugccagguccaguca

SEQ ID NO: 3992326 - RNA, 18 nt, Human herpesvirus 6B
ugccgcguggaagccgcu

SEQ ID NO: 3992327 - RNA, 11 nt, Human herpesvirus 6B
ugccgugagaa

SEQ ID NO: 3992328 - RNA, 16 nt, Human herpesvirus 6B
ugccuugauguuuccu

SEQ ID NO: 3992329 - RNA, 15 nt, Human herpesvirus 6B
ugccuuuguaaaaug

SEQ ID NO: 3992330 - RNA, 20 nt, Human herpesvirus 6B
ugcgaccucgcucuccugug

SEQ ID NO: 3992331 - RNA, 15 nt, Human herpesvirus 6B
ugcgccacagggagg

SEQ ID NO: 3992332 - RNA, 13 nt, Human herpesvirus 6B
ugcgucuuuugua

SEQ ID NO: 3992333 - RNA, 20 nt, Human herpesvirus 6B
ugcguguaauuguugaaauu

SEQ ID NO: 3992334 - RNA, 12 nt, Human herpesvirus 6B
ugcguguagagu

SEQ ID NO: 3992335 - RNA, 14 nt, Human herpesvirus 6B
ugcuaaaugugaua

SEQ ID NO: 3992336 - RNA, 15 nt, Human herpesvirus 6B
ugcuguaaaccagua

SEQ ID NO: 3992337 - RNA, 17 nt, Human herpesvirus 6B
ugcuguaaaccaguauc

SEQ ID NO: 3992338 - RNA, 19 nt, Human herpesvirus 6B
ugcugucacacucugaacu

SEQ ID NO: 3992339 - RNA, 20 nt, Human herpesvirus 6B
ugcuuaaacugaaucacuua

SEQ ID NO: 3992340 - RNA, 17 nt, Human herpesvirus 6B
ugcuuuggauccuuugu

SEQ ID NO: 3992341 - RNA, 17 nt, Human herpesvirus 6B
uggaaagauuggaaucu

SEQ ID NO: 3992342 - RNA, 23 nt, Human herpesvirus 6B
uggaaguggcguggauaggaacu

SEQ ID NO: 3992343 - RNA, 15 nt, Human herpesvirus 6B
uggagguaaucuaug

SEQ ID NO: 3992344 - RNA, 14 nt, Human herpesvirus 6B
uggauaugagugaa

SEQ ID NO: 3992345 - RNA, 18 nt, Human herpesvirus 6B
uggaucuauguuuuucca

SEQ ID NO: 3992346 - RNA, 18 nt, Human herpesvirus 6B
uggcauucuugcagauuu

SEQ ID NO: 3992347 - RNA, 19 nt, Human herpesvirus 6B
uggccgaguuuagacagag

SEQ ID NO: 3992348 - RNA, 15 nt, Human herpesvirus 6B
uggcgcuuguaggag

SEQ ID NO: 3992349 - RNA, 15 nt, Human herpesvirus 6B
uggcuaauagggaau

SEQ ID NO: 3992350 - RNA, 20 nt, Human herpesvirus 6B
ugggaagauucugcagaaug

SEQ ID NO: 3992351 - RNA, 17 nt, Human herpesvirus 6B
ugggcgcagaaggagaa

SEQ ID NO: 3992352 - RNA, 21 nt, Human herpesvirus 6B
ugggcuccucacccugaaggg

SEQ ID NO: 3992353 - RNA, 11 nt, Human herpesvirus 6B
ugggggauggg

SEQ ID NO: 3992354 - RNA, 13 nt, Human herpesvirus 6B
ugggggauggguu

SEQ ID NO: 3992355 - RNA, 13 nt, Human herpesvirus 6B
uggggucuuuccu

SEQ ID NO: 3992356 - RNA, 13 nt, Human herpesvirus 6B
ugguagcaauaac

SEQ ID NO: 3992357 - RNA, 13 nt, Human herpesvirus 6B
uggugauguguua

SEQ ID NO: 3992358 - RNA, 17 nt, Human herpesvirus 6B
ugguggccgucugucug

SEQ ID NO: 3992359 - RNA, 14 nt, Human herpesvirus 6B
cauauaaacagauu

SEQ ID NO: 3992360 - RNA, 17 nt, Human herpesvirus 6B
cauauacgucuuuguuu

SEQ ID NO: 3992361 - RNA, 22 nt, Human herpesvirus 6B
cauauauugaaauuuguaacaa

SEQ ID NO: 3992362 - RNA, 19 nt, Human herpesvirus 6B
caucgcaagcccggagaac

SEQ ID NO: 3992363 - RNA, 16 nt, Human herpesvirus 6B
caugaaaacauucaga

SEQ ID NO: 3992364 - RNA, 23 nt, Human herpesvirus 6B
caugaauuuauguucagccuugc

SEQ ID NO: 3992365 - RNA, 20 nt, Human herpesvirus 6B
caugacggacuuggaaaagg

SEQ ID NO: 3992366 - RNA, 16 nt, Human herpesvirus 6B
caugcgacagacaguc

SEQ ID NO: 3992367 - RNA, 16 nt, Human herpesvirus 6B
cauggaauucaugccg

SEQ ID NO: 3992368 - RNA, 18 nt, Human herpesvirus 6B
caugugaacaaguggaag

SEQ ID NO: 3992369 - RNA, 16 nt, Human herpesvirus 6B
cauguucgccucuccc

SEQ ID NO: 3992370 - RNA, 11 nt, Human herpesvirus 6B
cauguuuacug

SEQ ID NO: 3992371 - RNA, 18 nt, Human herpesvirus 6B
cauuagcugcuaaaugug

SEQ ID NO: 3992372 - RNA, 16 nt, Human herpesvirus 6B
cauugagguauuggau

SEQ ID NO: 3992373 - RNA, 23 nt, Human herpesvirus 6B
cauuuauuucguauguuuaacua

SEQ ID NO: 3992374 - RNA, 13 nt, Human herpesvirus 6B
cauuucucuacau

SEQ ID NO: 3992375 - RNA, 21 nt, Human herpesvirus 6B
cauuucucuacaugccacaga

SEQ ID NO: 3992376 - RNA, 21 nt, Human herpesvirus 6B
cauuugauguugucuucugug

SEQ ID NO: 3992377 - RNA, 23 nt, Human herpesvirus 6B
cauuugcugacccgauguggaac

SEQ ID NO: 3992378 - RNA, 12 nt, Human herpesvirus 6B
cauuuucugaaa

SEQ ID NO: 3992379 - RNA, 14 nt, Human herpesvirus 6B
cauuuucugaaauc

SEQ ID NO: 3992380 - RNA, 13 nt, Human herpesvirus 6B
ccaaaaaauguua

SEQ ID NO: 3992381 - RNA, 18 nt, Human herpesvirus 6B
ccaaaguaggcacacaug

SEQ ID NO: 3992382 - RNA, 13 nt, Human herpesvirus 6B
ccaacuuaauaaa

SEQ ID NO: 3992383 - RNA, 14 nt, Human herpesvirus 6B
ccaacuuguuuucu

SEQ ID NO: 3992384 - RNA, 19 nt, Human herpesvirus 6B
ccacaucuuuuccugcucu

SEQ ID NO: 3992385 - RNA, 16 nt, Human herpesvirus 6B
ccacgggccacgagag

SEQ ID NO: 3992386 - RNA, 20 nt, Human herpesvirus 6B
ccagaguuaaugcauacaug

SEQ ID NO: 3992387 - RNA, 16 nt, Human herpesvirus 6B
ccagauaggaaaaggu

SEQ ID NO: 3992388 - RNA, 23 nt, Human herpesvirus 6B
ccagcaauuucggcaagaaagcc

SEQ ID NO: 3992389 - RNA, 21 nt, Human herpesvirus 6B
ccagcucuguucucucccacu

SEQ ID NO: 3992390 - RNA, 21 nt, Human herpesvirus 6B
ccauagaguuucgagaaagag

SEQ ID NO: 3992391 - RNA, 18 nt, Human herpesvirus 6B
ccauaggcucggcagggg

SEQ ID NO: 3992392 - RNA, 22 nt, Human herpesvirus 6B
ccaugccauugaauacacgugu

SEQ ID NO: 3992393 - RNA, 13 nt, Human herpesvirus 6B
ccauguucgccuc

SEQ ID NO: 3992394 - RNA, 16 nt, Human herpesvirus 6B
cccacacgcggggauc

SEQ ID NO: 3992395 - RNA, 16 nt, Human herpesvirus 6B
cccacuccaacacggg

SEQ ID NO: 3992396 - RNA, 22 nt, Human herpesvirus 6B
cccagaugcagucuccacaggg

SEQ ID NO: 3992397 - RNA, 23 nt, Human herpesvirus 6B
ccccaggcgcagcagcagcucca

SEQ ID NO: 3992398 - RNA, 17 nt, Human herpesvirus 6B
ccccauacacacccagc

SEQ ID NO: 3992399 - RNA, 19 nt, Human herpesvirus 6B
ccccggagcauacgcgccg

SEQ ID NO: 3992400 - RNA, 14 nt, Human herpesvirus 6B
ccccucuugcagug

SEQ ID NO: 3992401 - RNA, 21 nt, Human herpesvirus 6B
cccgccucucuccgccuccuc

SEQ ID NO: 3992402 - RNA, 20 nt, Human herpesvirus 6B
cccggcuuucucgccgccuc

SEQ ID NO: 3992403 - RNA, 14 nt, Human herpesvirus 6B
cccgggcgcggggc

SEQ ID NO: 3992404 - RNA, 20 nt, Human herpesvirus 6B
cccguccucgugcucuccgc

SEQ ID NO: 3992405 - RNA, 15 nt, Human herpesvirus 6B
cccuccaucccccuc

SEQ ID NO: 3992406 - RNA, 20 nt, Human herpesvirus 6B
cccuccguuaggaucagaca

SEQ ID NO: 3992407 - RNA, 15 nt, Human herpesvirus 6B
cccucgucuguugcu

SEQ ID NO: 3992408 - RNA, 23 nt, Human herpesvirus 6B
cccugagagcaggagcaggcucc

SEQ ID NO: 3992409 - RNA, 14 nt, Human herpesvirus 6B
ccgaaaagaaagaa

SEQ ID NO: 3992410 - RNA, 16 nt, Human herpesvirus 6B
ccgaagaaagaggcgc

SEQ ID NO: 3992411 - RNA, 22 nt, Human herpesvirus 6B
ccgaagaaucugccgaucacca

SEQ ID NO: 3992412 - RNA, 21 nt, Human herpesvirus 6B
ccgagacggugauguugcgau

SEQ ID NO: 3992413 - RNA, 17 nt, Human herpesvirus 6B
ccgaugacuaagaaaaa

SEQ ID NO: 3992414 - RNA, 23 nt, Human herpesvirus 6B
ccgcagaggcggcgaccacagcg

SEQ ID NO: 3992415 - RNA, 19 nt, Human herpesvirus 6B
ccgcagggaaagagcacga

SEQ ID NO: 3992416 - RNA, 14 nt, Human herpesvirus 6B
ccgcaguuccuguu

SEQ ID NO: 3992417 - RNA, 18 nt, Human herpesvirus 6B
ccgcauacacccugccga

SEQ ID NO: 3992418 - RNA, 14 nt, Human herpesvirus 6B
ccgccucucuccgc

SEQ ID NO: 3992419 - RNA, 21 nt, Human herpesvirus 6B
ccgcgaugcgccacagggagg

SEQ ID NO: 3992420 - RNA, 20 nt, Human herpesvirus 6B
ccgcgcugcuggggcucugu

SEQ ID NO: 3992421 - RNA, 13 nt, Human herpesvirus 6B
ccggccaauucau

SEQ ID NO: 3992422 - RNA, 17 nt, Human herpesvirus 6B
ccggcccguccaccguc

SEQ ID NO: 3992423 - RNA, 22 nt, Human herpesvirus 6B
ccggcgacacgcgcggaccacu

SEQ ID NO: 3992424 - RNA, 22 nt, Human herpesvirus 6B
ccgguugucacacgucccuucu

SEQ ID NO: 3992425 - RNA, 15 nt, Human herpesvirus 6B
ccguccucgugcucu

SEQ ID NO: 3992426 - RNA, 22 nt, Human herpesvirus 6B
ccguucccggggggggggggcc

SEQ ID NO: 3992427 - RNA, 15 nt, Human herpesvirus 6B
ccuaaaaucugcuaa

SEQ ID NO: 3992428 - RNA, 15 nt, Human herpesvirus 6B
ccuaaauaccauuuu

SEQ ID NO: 3992429 - RNA, 16 nt, Human herpesvirus 6B
ccuaacagaguuuuca

SEQ ID NO: 3992430 - RNA, 13 nt, Human herpesvirus 6B
ccuagacacacag

SEQ ID NO: 3992431 - RNA, 20 nt, Human herpesvirus 6B
ccuaugaaaguguauuugga

SEQ ID NO: 3992432 - RNA, 16 nt, Human herpesvirus 6B
ccuauguuaacauugu

SEQ ID NO: 3992433 - RNA, 21 nt, Human herpesvirus 6B
ccuauucuaauuauaaaugua

SEQ ID NO: 3992434 - RNA, 21 nt, Human herpesvirus 6B
ccucaaacuuuuagagacuuu

SEQ ID NO: 3992435 - RNA, 19 nt, Human herpesvirus 6B
ccucagaaccaucuuuuca

SEQ ID NO: 3992436 - RNA, 20 nt, Human herpesvirus 6B
ccuccucuuuuccccccgcc

SEQ ID NO: 3992437 - RNA, 16 nt, Human herpesvirus 6B
ccucgaagaauugucu

SEQ ID NO: 3992438 - RNA, 16 nt, Human herpesvirus 6B
ccucgccgcucccgcu

SEQ ID NO: 3992439 - RNA, 13 nt, Human herpesvirus 6B
ccucuauacucug

SEQ ID NO: 3992440 - RNA, 13 nt, Human herpesvirus 6B
ccucuugcagugg

SEQ ID NO: 3992441 - RNA, 13 nt, Human herpesvirus 6B
ccugaaaccccac

SEQ ID NO: 3992442 - RNA, 14 nt, Human herpesvirus 6B
ccugagagcaggag

SEQ ID NO: 3992443 - RNA, 22 nt, Human herpesvirus 6B
ccugcaauuugaauucugcucg

SEQ ID NO: 3992444 - RNA, 16 nt, Human herpesvirus 6B
ccuggaagaaggaaaa

SEQ ID NO: 3992445 - RNA, 10 nt, Human herpesvirus 6B
ccuguuucua

SEQ ID NO: 3992446 - RNA, 19 nt, Human herpesvirus 6B
cgaaaacuagaugacuauu

SEQ ID NO: 3992447 - RNA, 16 nt, Human herpesvirus 6B
cgaaaccaagacuugc

SEQ ID NO: 3992448 - RNA, 16 nt, Human herpesvirus 6B
cgaaauauaaaaccaa

SEQ ID NO: 3992449 - RNA, 18 nt, Human herpesvirus 6B
cgaagcgacgcaagccgu

SEQ ID NO: 3992450 - RNA, 13 nt, Human herpesvirus 6B
cgaauaaggagag

SEQ ID NO: 3992451 - RNA, 15 nt, Human herpesvirus 6B
cgacaaaaaaauaaa

SEQ ID NO: 3992452 - RNA, 13 nt, Human herpesvirus 6B
cgaccaggcacca

SEQ ID NO: 3992453 - RNA, 15 nt, Human herpesvirus 6B
cgaguuuagacagag

SEQ ID NO: 3992454 - RNA, 13 nt, Human herpesvirus 6B
cgaugaaacuguc

SEQ ID NO: 3992455 - RNA, 13 nt, Human herpesvirus 6B
cgauuaaugccac

SEQ ID NO: 3992456 - RNA, 16 nt, Human herpesvirus 6B
cgauucccuccgggac

SEQ ID NO: 3992457 - RNA, 17 nt, Human herpesvirus 6B
cgcagauuuacgacacg

SEQ ID NO: 3992458 - RNA, 14 nt, Human herpesvirus 6B
cgcagcagcagcuc

SEQ ID NO: 3992459 - RNA, 23 nt, Human herpesvirus 6B
cgcauccuuaaaugacacagaau

SEQ ID NO: 3992460 - RNA, 23 nt, Human herpesvirus 6B
cgcauguuuauuucaaugcguuu

SEQ ID NO: 3992461 - RNA, 15 nt, Human herpesvirus 6B
cgccaggacggggcc

SEQ ID NO: 3992462 - RNA, 18 nt, Human herpesvirus 6B
cgccauccacccauauac

SEQ ID NO: 3992463 - RNA, 17 nt, Human herpesvirus 6B
uuuuggaauuucauuca

SEQ ID NO: 3992464 - RNA, 22 nt, Human herpesvirus 6B
uuuugugcuuaucaaauuacaa

SEQ ID NO: 3992465 - RNA, 16 nt, Human herpesvirus 6B
uuuuuaaaaacacacu

SEQ ID NO: 3992466 - RNA, 12 nt, Human herpesvirus 6B
uuuuucuguaag

SEQ ID NO: 3992467 - RNA, 17 nt, Human herpesvirus 6B
gcucgggggacggagag

SEQ ID NO: 3992468 - RNA, 17 nt, Human herpesvirus 6B
gcucuccgcgcugcugg

SEQ ID NO: 3992469 - RNA, 23 nt, Human herpesvirus 6B
gcucuccguuaaagaaacagauc

SEQ ID NO: 3992470 - RNA, 22 nt, Human herpesvirus 6B
gcugacgggggcacaucuguug

SEQ ID NO: 3992471 - RNA, 21 nt, Human herpesvirus 6B
gcugccauuauugauagcauu

SEQ ID NO: 3992472 - RNA, 11 nt, Human herpesvirus 6B
gcuggacagaa

SEQ ID NO: 3992473 - RNA, 10 nt, Human herpesvirus 6B
gcuguaguug

SEQ ID NO: 3992474 - RNA, 22 nt, Human herpesvirus 6B
gcuguaguugaugcuguugcug

SEQ ID NO: 3992475 - RNA, 22 nt, Human herpesvirus 6B
gcuuaaaucaaaaaaaugauag

SEQ ID NO: 3992476 - RNA, 20 nt, Human herpesvirus 6B
gcuuucucgccgccucgccg

SEQ ID NO: 3992477 - RNA, 18 nt, Human herpesvirus 6B
ggaaagauuuuuggauuu

SEQ ID NO: 3992478 - RNA, 22 nt, Human herpesvirus 6B
ggaacccuagacacacagaaaa

SEQ ID NO: 3992479 - RNA, 14 nt, Human herpesvirus 6B
ggaagagaaugaau

SEQ ID NO: 3992480 - RNA, 21 nt, Human herpesvirus 6B
ggaagcauacgucuguggcga

SEQ ID NO: 3992481 - RNA, 13 nt, Human herpesvirus 6B
ggaagggcucugu

SEQ ID NO: 3992482 - RNA, 15 nt, Human herpesvirus 6B
ggaauacaccggaga

SEQ ID NO: 3992483 - RNA, 17 nt, Human herpesvirus 6B
ggacaaaaauucaucag

SEQ ID NO: 3992484 - RNA, 17 nt, Human herpesvirus 6B
ggacaauaaauugauuc

SEQ ID NO: 3992485 - RNA, 21 nt, Human herpesvirus 6B
ggacacgagaagaacaugcag

SEQ ID NO: 3992486 - RNA, 22 nt, Human herpesvirus 6B
ggacccgagguccgacacgccc

SEQ ID NO: 3992487 - RNA, 16 nt, Human herpesvirus 6B
ggacggacagagcgga

SEQ ID NO: 3992488 - RNA, 23 nt, Human herpesvirus 6B
ggacggcguucguucggacucuc

SEQ ID NO: 3992489 - RNA, 12 nt, Human herpesvirus 6B
ggacucugucuu

SEQ ID NO: 3992490 - RNA, 13 nt, Human herpesvirus 6B
ggagaccaugcca

SEQ ID NO: 3992491 - RNA, 16 nt, Human herpesvirus 6B
ggagaggaagccggag

SEQ ID NO: 3992492 - RNA, 17 nt, Human herpesvirus 6B
ggagaggaagccggagc

SEQ ID NO: 3992493 - RNA, 14 nt, Human herpesvirus 6B
ggagcaggcucccc

SEQ ID NO: 3992494 - RNA, 20 nt, Human herpesvirus 6B
ggagcccugagagcaggagc

SEQ ID NO: 3992495 - RNA, 17 nt, Human herpesvirus 6B
ggaggagagggaggaga

SEQ ID NO: 3992496 - RNA, 16 nt, Human herpesvirus 6B
ggaggaggaagaggag

SEQ ID NO: 3992497 - RNA, 14 nt, Human herpesvirus 6B
ggagggcggagaag

SEQ ID NO: 3992498 - RNA, 22 nt, Human herpesvirus 6B
ggagucggucuguuccccgucc

SEQ ID NO: 3992499 - RNA, 14 nt, Human herpesvirus 6B
ggagugcgacagga

SEQ ID NO: 3992500 - RNA, 21 nt, Human herpesvirus 6B
ggagugcguaaucgcaagaaa

SEQ ID NO: 3992501 - RNA, 17 nt, Human herpesvirus 6B
ggaucgacgaccaggca

SEQ ID NO: 3992502 - RNA, 22 nt, Human herpesvirus 6B
ggaucucgacacguccauaggc

SEQ ID NO: 3992503 - RNA, 11 nt, Human herpesvirus 6B
ggaugaagaga

SEQ ID NO: 3992504 - RNA, 18 nt, Human herpesvirus 6B
ggaugcagcguuggaaag

SEQ ID NO: 3992505 - RNA, 17 nt, Human herpesvirus 6B
ggauguaaaugcagaca

SEQ ID NO: 3992506 - RNA, 16 nt, Human herpesvirus 6B
ggcagcggggaaggga

SEQ ID NO: 3992507 - RNA, 19 nt, Human herpesvirus 6B
ggccgaguuggccaagcug

SEQ ID NO: 3992508 - RNA, 17 nt, Human herpesvirus 6B
ggccgucgcgcucgccg

SEQ ID NO: 3992509 - RNA, 18 nt, Human herpesvirus 6B
ggcgcaccacggcucccc

SEQ ID NO: 3992510 - RNA, 13 nt, Human herpesvirus 6B
ggcgcagaaggag

SEQ ID NO: 3992511 - RNA, 12 nt, Human herpesvirus 6B
ggcgcuagugau

SEQ ID NO: 3992512 - RNA, 22 nt, Human herpesvirus 6B
ggcggagcacccggggaggcga

SEQ ID NO: 3992513 - RNA, 15 nt, Human herpesvirus 6B
ggcggccccgcguca

SEQ ID NO: 3992514 - RNA, 14 nt, Human herpesvirus 6B
ggcggcgcgcgccg

SEQ ID NO: 3992515 - RNA, 13 nt, Human herpesvirus 6B
ggcgucgggcgac

SEQ ID NO: 3992516 - RNA, 20 nt, Human herpesvirus 6B
ggcguuaucgacggcagcgg

SEQ ID NO: 3992517 - RNA, 23 nt, Human herpesvirus 6B
ggcuccucacccugaagggaccg

SEQ ID NO: 3992518 - RNA, 16 nt, Human herpesvirus 6B
ggcucucgugccguug

SEQ ID NO: 3992519 - RNA, 15 nt, Human herpesvirus 6B
ggcugggcgcagaag

SEQ ID NO: 3992520 - RNA, 17 nt, Human herpesvirus 6B
ggcuuacugcggagaac

SEQ ID NO: 3992521 - RNA, 13 nt, Human herpesvirus 6B
ggcuuagcuacca

SEQ ID NO: 3992522 - RNA, 14 nt, Human herpesvirus 6B
gggaaaucaaggaa

SEQ ID NO: 3992523 - RNA, 20 nt, Human herpesvirus 6B
gggacuccgagccggacagg

SEQ ID NO: 3992524 - RNA, 21 nt, Human herpesvirus 6B
gggacuccgagccggacagga

SEQ ID NO: 3992525 - RNA, 13 nt, Human herpesvirus 6B
gggaggaggagga

SEQ ID NO: 3992526 - RNA, 13 nt, Human herpesvirus 6B
gggaucgggccug

SEQ ID NO: 3992527 - RNA, 14 nt, Human herpesvirus 6B
gggaucgggccugg

SEQ ID NO: 3992528 - RNA, 20 nt, Human herpesvirus 6B
gggaugugcggagaaaggga

SEQ ID NO: 3992529 - RNA, 14 nt, Human herpesvirus 6B
gggcacggagaaca

SEQ ID NO: 3992530 - RNA, 19 nt, Human herpesvirus 6B
gggcauagaaagcggccag

SEQ ID NO: 3992531 - RNA, 15 nt, Human herpesvirus 6B
gggcauuuuuuugaa

SEQ ID NO: 3992532 - RNA, 16 nt, Human herpesvirus 6B
gggccagcccugaaga

SEQ ID NO: 3992533 - RNA, 16 nt, Human herpesvirus 6B
gggcgacgggcagggc

SEQ ID NO: 3992534 - RNA, 19 nt, Human herpesvirus 6B
gggcgcaccggcgacacgc

SEQ ID NO: 3992535 - RNA, 21 nt, Human herpesvirus 6B
gggcuuaauaaaggauguuug

SEQ ID NO: 3992536 - RNA, 19 nt, Human herpesvirus 6B
ggggaggaggaggaagagg

SEQ ID NO: 3992537 - RNA, 22 nt, Human herpesvirus 6B
gggggcccgggcgcggggcgca

SEQ ID NO: 3992538 - RNA, 11 nt, Human herpesvirus 6B
ggggggggccc

SEQ ID NO: 3992539 - RNA, 13 nt, Human herpesvirus 6B
ggggggggggccc

SEQ ID NO: 3992540 - RNA, 22 nt, Human herpesvirus 6B
gggucuugguuuuauaagcuca

SEQ ID NO: 3992541 - RNA, 14 nt, Human herpesvirus 6B
ggucgccguggccg

SEQ ID NO: 3992542 - RNA, 23 nt, Human herpesvirus 6B
ggucgcguucuaacccaugaaaa

SEQ ID NO: 3992543 - RNA, 15 nt, Human herpesvirus 6B
ggugacuacuguguc

SEQ ID NO: 3992544 - RNA, 13 nt, Human herpesvirus 6B
ggugauuuuccaa

SEQ ID NO: 3992545 - RNA, 15 nt, Human herpesvirus 6B
gguguaccagacaaa

SEQ ID NO: 3992546 - RNA, 19 nt, Human herpesvirus 6B
gguucaaagauagacagug

SEQ ID NO: 3992547 - RNA, 13 nt, Human herpesvirus 6B
gguucgacagaga

SEQ ID NO: 3992548 - RNA, 17 nt, Human herpesvirus 6B
gguuuaccuuuuugcug

SEQ ID NO: 3992549 - RNA, 19 nt, Human herpesvirus 6B
gguuuugucguuuguacau

SEQ ID NO: 3992550 - RNA, 16 nt, Human herpesvirus 6B
guaaauccgaaacaca

SEQ ID NO: 3992551 - RNA, 21 nt, Human herpesvirus 6B
guaaccugagaauuuucgaaa

SEQ ID NO: 3992552 - RNA, 15 nt, Human herpesvirus 6B
guaaccugucuugga

SEQ ID NO: 3992553 - RNA, 19 nt, Human herpesvirus 6B
guaagccuauugacaugau

SEQ ID NO: 3992554 - RNA, 20 nt, Human herpesvirus 6B
guaauuauugugacaaggua

SEQ ID NO: 3992555 - RNA, 17 nt, Human herpesvirus 6B
guacaaagguuuuugcu

SEQ ID NO: 3992556 - RNA, 14 nt, Human herpesvirus 6B
guacauguuaacaa

SEQ ID NO: 3992557 - RNA, 15 nt, Human herpesvirus 6B
guaccgcgguugaag

SEQ ID NO: 3992558 - RNA, 19 nt, Human herpesvirus 6B
guacguggccgucuccugc

SEQ ID NO: 3992559 - RNA, 19 nt, Human herpesvirus 6B
guagaaacguuaauguuua

SEQ ID NO: 3992560 - RNA, 22 nt, Human herpesvirus 6B
guaguggucguuuucgugguug

SEQ ID NO: 3992561 - RNA, 15 nt, Human herpesvirus 6B
guauguuuuguacaa

SEQ ID NO: 3992562 - RNA, 17 nt, Human herpesvirus 6B
guauucuucuuccccaa

SEQ ID NO: 3992563 - RNA, 23 nt, Human herpesvirus 6B
guauuggggaugaagguggaaac

SEQ ID NO: 3992564 - RNA, 11 nt, Human herpesvirus 6B
guauuuccugu

SEQ ID NO: 3992565 - RNA, 16 nt, Human herpesvirus 6B
gucaacgaaaaaauga

SEQ ID NO: 3992566 - RNA, 15 nt, Human herpesvirus 6B
gucaagcgccaggac

SEQ ID NO: 3992567 - RNA, 18 nt, Human herpesvirus 6B
gucacacgucccuucucc

SEQ ID NO: 3992568 - RNA, 17 nt, Human herpesvirus 6B
gucacuuauauaaaaua

SEQ ID NO: 3992569 - RNA, 17 nt, Human herpesvirus 6B
guccaguaagacagcac

SEQ ID NO: 3992570 - RNA, 16 nt, Human herpesvirus 6B
guccccgccgcgcugg

SEQ ID NO: 3992571 - RNA, 22 nt, Human herpesvirus 6B
guccuauguuaacauugugaga

SEQ ID NO: 3992572 - RNA, 21 nt, Human herpesvirus 6B
guccuccgcaaguuuucagca

SEQ ID NO: 3992573 - RNA, 18 nt, Human herpesvirus 6B
guccucguccguccccgc

SEQ ID NO: 3992574 - RNA, 15 nt, Human herpesvirus 6B
gucgcauagaucggg

SEQ ID NO: 3992575 - RNA, 17 nt, Human herpesvirus 6B
gucucauguugauuuua

SEQ ID NO: 3992576 - RNA, 16 nt, Human herpesvirus 6B
gucuccgauccgucag

SEQ ID NO: 3992577 - RNA, 22 nt, Human herpesvirus 6B
acugcggagaacgggcaacucc

SEQ ID NO: 3992578 - RNA, 23 nt, Human herpesvirus 6B
acugcuugguggcggauggcuag

SEQ ID NO: 3992579 - RNA, 16 nt, Human herpesvirus 6B
acuguacacaaaaacc

SEQ ID NO: 3992580 - RNA, 23 nt, Human herpesvirus 6B
acuguucggauccaaugaugaaa

SEQ ID NO: 3992581 - RNA, 14 nt, Human herpesvirus 6B
acuuacaucuuggu

SEQ ID NO: 3992582 - RNA, 22 nt, Human herpesvirus 6B
acuuccucgcgguauaaugcau

SEQ ID NO: 3992583 - RNA, 14 nt, Human herpesvirus 6B
acuugaagagaguu

SEQ ID NO: 3992584 - RNA, 19 nt, Human herpesvirus 6B
acuugcuaacuaucaugug

SEQ ID NO: 3992585 - RNA, 23 nt, Human herpesvirus 6B
acuuucguuuacgaauucaaugu

SEQ ID NO: 3992586 - RNA, 19 nt, Human herpesvirus 6B
acuuucuaagacgagaugu

SEQ ID NO: 3992587 - RNA, 22 nt, Human herpesvirus 6B
acuuuuugccgaagauagcucu

SEQ ID NO: 3992588 - RNA, 23 nt, Human herpesvirus 6B
agaaaaagaacugucgcaucaau

SEQ ID NO: 3992589 - RNA, 16 nt, Human herpesvirus 6B
agaaaacuauauugcc

SEQ ID NO: 3992590 - RNA, 14 nt, Human herpesvirus 6B
agaaaagaaacaau

SEQ ID NO: 3992591 - RNA, 16 nt, Human herpesvirus 6B
agaaaauugacaauga

SEQ ID NO: 3992592 - RNA, 19 nt, Human herpesvirus 6B
agaaacaaaauuaauucaa

SEQ ID NO: 3992593 - RNA, 22 nt, Human herpesvirus 6B
agaaacgcaaagggaagccagc

SEQ ID NO: 3992594 - RNA, 16 nt, Human herpesvirus 6B
agaaacguuaauguuu

SEQ ID NO: 3992595 - RNA, 14 nt, Human herpesvirus 6B
aauuuaaaauaauu

SEQ ID NO: 3992596 - RNA, 22 nt, Human herpesvirus 6B
aauuuaaaguuacaucugucua

SEQ ID NO: 3992597 - RNA, 18 nt, Human herpesvirus 6B
aauuuaugugaauucugu

SEQ ID NO: 3992598 - RNA, 22 nt, Human herpesvirus 6B
aauuuauucacguuuacauaag

SEQ ID NO: 3992599 - RNA, 21 nt, Human herpesvirus 6B
aauuuccggucaacuucuaua

SEQ ID NO: 3992600 - RNA, 22 nt, Human herpesvirus 6B
aauuuguggaacaagagacgaa

SEQ ID NO: 3992601 - RNA, 17 nt, Human herpesvirus 6B
aauuuuaccuauuucua

SEQ ID NO: 3992602 - RNA, 19 nt, Human herpesvirus 6B
aauuuuuuguuucugaaaa

SEQ ID NO: 3992603 - RNA, 21 nt, Human herpesvirus 6B
aauuuuuuucuccugaucuca

SEQ ID NO: 3992604 - RNA, 17 nt, Human herpesvirus 6B
acaaaaaaaaaaaacau

SEQ ID NO: 3992605 - RNA, 14 nt, Human herpesvirus 6B
acaaagccacagcu

SEQ ID NO: 3992606 - RNA, 21 nt, Human herpesvirus 6B
acaaauaaguggugaugaaua

SEQ ID NO: 3992607 - RNA, 14 nt, Human herpesvirus 6B
acaaccaaguguuu

SEQ ID NO: 3992608 - RNA, 18 nt, Human herpesvirus 6B
acaaccuauguacagaua

SEQ ID NO: 3992609 - RNA, 15 nt, Human herpesvirus 6B
acaacgguguggaga

SEQ ID NO: 3992610 - RNA, 21 nt, Human herpesvirus 6B
acaagcaggagaaaaauuuga

SEQ ID NO: 3992611 - RNA, 19 nt, Human herpesvirus 6B
acaagccuuuuuauaugca

SEQ ID NO: 3992612 - RNA, 12 nt, Human herpesvirus 6B
acaauaauuacu

SEQ ID NO: 3992613 - RNA, 14 nt, Human herpesvirus 6B
acaauaauuacucc

SEQ ID NO: 3992614 - RNA, 17 nt, Human herpesvirus 6B
acaauauaugaaauacu

SEQ ID NO: 3992615 - RNA, 15 nt, Human herpesvirus 6B
acacaaaaagacucu

SEQ ID NO: 3992616 - RNA, 17 nt, Human herpesvirus 6B
acacaacuguuaccgaa

SEQ ID NO: 3992617 - RNA, 16 nt, Human herpesvirus 6B
acaccggagaccgagc

SEQ ID NO: 3992618 - RNA, 20 nt, Human herpesvirus 6B
acaccucauaucaaacaacu

SEQ ID NO: 3992619 - RNA, 14 nt, Human herpesvirus 6B
acacgcccccaccu

SEQ ID NO: 3992620 - RNA, 14 nt, Human herpesvirus 6B
acacggcgaaagcc

SEQ ID NO: 3992621 - RNA, 16 nt, Human herpesvirus 6B
acacggggugagagag

SEQ ID NO: 3992622 - RNA, 15 nt, Human herpesvirus 6B
acacgucccuucucc

SEQ ID NO: 3992623 - RNA, 19 nt, Human herpesvirus 6B
acacgucguggcagaacag

SEQ ID NO: 3992624 - RNA, 20 nt, Human herpesvirus 6B
acacucuauuauaaaaaugc

SEQ ID NO: 3992625 - RNA, 17 nt, Human herpesvirus 6B
acagaaaugagcaacau

SEQ ID NO: 3992626 - RNA, 22 nt, Human herpesvirus 6B
acagaacaccugcuuuugguua

SEQ ID NO: 3992627 - RNA, 16 nt, Human herpesvirus 6B
acagaauacaaaaacg

SEQ ID NO: 3992628 - RNA, 18 nt, Human herpesvirus 6B
acagagugcaucuuuaac

SEQ ID NO: 3992629 - RNA, 16 nt, Human herpesvirus 6B
acagauagaucuguuu

SEQ ID NO: 3992630 - RNA, 13 nt, Human herpesvirus 6B
acagcaguuuuuu

SEQ ID NO: 3992631 - RNA, 22 nt, Human herpesvirus 6B
acagcgugaugaggcccagagg

SEQ ID NO: 3992632 - RNA, 14 nt, Human herpesvirus 6B
acaguuugaucccu

SEQ ID NO: 3992633 - RNA, 12 nt, Human herpesvirus 6B
acaguuuugugg

SEQ ID NO: 3992634 - RNA, 13 nt, Human herpesvirus 6B
acauaacauagaa

SEQ ID NO: 3992635 - RNA, 17 nt, Human herpesvirus 6B
acauacaacuuucacug

SEQ ID NO: 3992636 - RNA, 21 nt, Human herpesvirus 6B
acaucaccaugaaagcacaga

SEQ ID NO: 3992637 - RNA, 19 nt, Human herpesvirus 6B
acauccagaaaagcaaaca

SEQ ID NO: 3992638 - RNA, 20 nt, Human herpesvirus 6B
acauccagaaaagcaaacau

SEQ ID NO: 3992639 - RNA, 16 nt, Human herpesvirus 6B
acauguauucuccuca

SEQ ID NO: 3992640 - RNA, 18 nt, Human herpesvirus 6B
acauucguauacuuccuc

SEQ ID NO: 3992641 - RNA, 22 nt, Human herpesvirus 6B
acauucuuguucgggccaaggu

SEQ ID NO: 3992642 - RNA, 18 nt, Human herpesvirus 6B
acauuucgguuuaauaga

SEQ ID NO: 3992643 - RNA, 17 nt, Human herpesvirus 6B
acauuuggcagcgcuug

SEQ ID NO: 3992644 - RNA, 14 nt, Human herpesvirus 6B
accaacugagagac

SEQ ID NO: 3992645 - RNA, 19 nt, Human herpesvirus 6B
accagcucuguucucuccc

SEQ ID NO: 3992646 - RNA, 20 nt, Human herpesvirus 6B
acccaauuuugguacaauuu

SEQ ID NO: 3992647 - RNA, 22 nt, Human herpesvirus 6B
accccuuaugcaacugcauuuu

SEQ ID NO: 3992648 - RNA, 16 nt, Human herpesvirus 6B
acccuagacacacaga

SEQ ID NO: 3992649 - RNA, 12 nt, Human herpesvirus 6B
accgaaaugugc

SEQ ID NO: 3992650 - RNA, 20 nt, Human herpesvirus 6B
accgagagccggaaaacaau

SEQ ID NO: 3992651 - RNA, 19 nt, Human herpesvirus 6B
accgcuauggcagaaagcu

SEQ ID NO: 3992652 - RNA, 15 nt, Human herpesvirus 6B
accuaagcuggacag

SEQ ID NO: 3992653 - RNA, 14 nt, Human herpesvirus 6B
acgacucaguagaa

SEQ ID NO: 3992654 - RNA, 22 nt, Human herpesvirus 6B
acgacugacgauuucauuagaa

SEQ ID NO: 3992655 - RNA, 19 nt, Human herpesvirus 6B
acgauagcagcucugcaau

SEQ ID NO: 3992656 - RNA, 16 nt, Human herpesvirus 6B
acgaucaauauagagg

SEQ ID NO: 3992657 - RNA, 16 nt, Human herpesvirus 6B
acgaugugucggagac

SEQ ID NO: 3992658 - RNA, 15 nt, Human herpesvirus 6B
acgcaaagggaagcc

SEQ ID NO: 3992659 - RNA, 17 nt, Human herpesvirus 6B
acgcaaagggaagccag

SEQ ID NO: 3992660 - RNA, 20 nt, Human herpesvirus 6B
acgcaggauuauaaaaacac

SEQ ID NO: 3992661 - RNA, 16 nt, Human herpesvirus 6B
acgcgcggaccacucg

SEQ ID NO: 3992662 - RNA, 16 nt, Human herpesvirus 6B
acgcuccucccacgcc

SEQ ID NO: 3992663 - RNA, 13 nt, Human herpesvirus 6B
acggcagcgggga

SEQ ID NO: 3992664 - RNA, 20 nt, Human herpesvirus 6B
acggcagcggggaagggaau

SEQ ID NO: 3992665 - RNA, 12 nt, Human herpesvirus 6B
acgggaaaagau

SEQ ID NO: 3992666 - RNA, 20 nt, Human herpesvirus 6B
acguacauaaacuauuguuu

SEQ ID NO: 3992667 - RNA, 22 nt, Human herpesvirus 6B
acgucccucacaacaaagaacu

SEQ ID NO: 3992668 - RNA, 19 nt, Human herpesvirus 6B
acgugaaauaaaguuuaaa

SEQ ID NO: 3992669 - RNA, 19 nt, Human herpesvirus 6B
acuaagugccguggcagaa

SEQ ID NO: 3992670 - RNA, 13 nt, Human herpesvirus 6B
acuacagcuaaga

SEQ ID NO: 3992671 - RNA, 18 nt, Human herpesvirus 6B
acuaccgaugcucucaga

SEQ ID NO: 3992672 - RNA, 20 nt, Human herpesvirus 6B
acuacuguguccaguguuac

SEQ ID NO: 3992673 - RNA, 23 nt, Human herpesvirus 6B
acuagugauuauggugccucagg

SEQ ID NO: 3992674 - RNA, 22 nt, Human herpesvirus 6B
acuaucuccuugaugauacuuu

SEQ ID NO: 3992675 - RNA, 13 nt, Human herpesvirus 6B
acucaaagaaagc

SEQ ID NO: 3992676 - RNA, 19 nt, Human herpesvirus 6B
acucagauuucaggaaguu

SEQ ID NO: 3992677 - RNA, 22 nt, Human herpesvirus 6B
acucgacguguaucgauuuaac

SEQ ID NO: 3992678 - RNA, 15 nt, Human herpesvirus 6B
acucgacuucuuuca

SEQ ID NO: 3992679 - RNA, 23 nt, Human herpesvirus 6B
acucgaggaaacgcgcugggacu

SEQ ID NO: 3992680 - RNA, 15 nt, Human herpesvirus 6B
acucuacuaaaagac

SEQ ID NO: 3992681 - RNA, 16 nt, Human herpesvirus 6B
acucucuuucaguaau

SEQ ID NO: 3992682 - RNA, 15 nt, Human herpesvirus 6B
acucuuggauugcag

SEQ ID NO: 3992683 - RNA, 14 nt, Human herpesvirus 6B
acugaaucagaaac

SEQ ID NO: 3992684 - RNA, 12 nt, Human herpesvirus 6B
acugacaaggua

SEQ ID NO: 3992685 - RNA, 18 nt, Human herpesvirus 6B
acugcgaauccgucuccg

SEQ ID NO: 3992686 - RNA, 18 nt, Human herpesvirus 6B
acugugaaaagugcuuua

SEQ ID NO: 3992687 - RNA, 21 nt, Human herpesvirus 6B
acugugaggugauuugaacag

SEQ ID NO: 3992688 - RNA, 23 nt, Human herpesvirus 6B
acugugguguuugauuuucagag

SEQ ID NO: 3992689 - RNA, 14 nt, Human herpesvirus 6B
acuguucuuucaaa

SEQ ID NO: 3992690 - RNA, 14 nt, Human herpesvirus 6B
acuuaguugauaug

SEQ ID NO: 3992691 - RNA, 12 nt, Human herpesvirus 6B
acuuauuucauu

SEQ ID NO: 3992692 - RNA, 22 nt, Human herpesvirus 6B
acuucuucugcagaucuggaua

SEQ ID NO: 3992693 - RNA, 18 nt, Human herpesvirus 6B
acuuuaucuuuugcaaag

SEQ ID NO: 3992694 - RNA, 19 nt, Human herpesvirus 6B
acuuucuucgccuguaaag

SEQ ID NO: 3992695 - RNA, 21 nt, Human herpesvirus 6B
acuuuguguaaccugagaauu

SEQ ID NO: 3992696 - RNA, 13 nt, Human herpesvirus 6B
acuuuucugauga

SEQ ID NO: 3992697 - RNA, 22 nt, Human herpesvirus 6B
agaaaauuggugugcauuaucg

SEQ ID NO: 3992698 - RNA, 18 nt, Human herpesvirus 6B
agaaauuuaauugcaauu

SEQ ID NO: 3992699 - RNA, 17 nt, Human herpesvirus 6B
agaacgagacuggacag

SEQ ID NO: 3992700 - RNA, 23 nt, Human herpesvirus 6B
agaacuaggcaaaguauucuucu

SEQ ID NO: 3992701 - RNA, 17 nt, Human herpesvirus 6B
agaagcagcagaugcuu

SEQ ID NO: 3992702 - RNA, 21 nt, Human herpesvirus 6B
agaauaaaccggaugugcaaa

SEQ ID NO: 3992703 - RNA, 16 nt, Human herpesvirus 6B
agaauaagaucuacag

SEQ ID NO: 3992704 - RNA, 15 nt, Human herpesvirus 6B
agaauacgaacagaa

SEQ ID NO: 3992705 - RNA, 18 nt, Human herpesvirus 6B
agaauagagauaaaugua

SEQ ID NO: 3992706 - RNA, 16 nt, Human herpesvirus 6B
agaaucgagaucguuu

SEQ ID NO: 3992707 - RNA, 17 nt, Human herpesvirus 6B
agaaucguaguuuuguu

SEQ ID NO: 3992708 - RNA, 16 nt, Human herpesvirus 6B
agaaucugcagauuuu

SEQ ID NO: 3992709 - RNA, 20 nt, Human herpesvirus 6B
agaauuuucgaaaagaucag

SEQ ID NO: 3992710 - RNA, 18 nt, Human herpesvirus 6B
agacaaaaacaugugcuu

SEQ ID NO: 3992711 - RNA, 15 nt, Human herpesvirus 6B
agacaauuauguuug

SEQ ID NO: 3992712 - RNA, 13 nt, Human herpesvirus 6B
agacaucguggac

SEQ ID NO: 3992713 - RNA, 22 nt, Human herpesvirus 6B
agacauugguugauuuuuguaa

SEQ ID NO: 3992714 - RNA, 18 nt, Human herpesvirus 6B
agaccaauuuagauucga

SEQ ID NO: 3992715 - RNA, 19 nt, Human herpesvirus 6B
agaccgguacgauuucugu

SEQ ID NO: 3992716 - RNA, 13 nt, Human herpesvirus 6B
agacgagauguuu

SEQ ID NO: 3992717 - RNA, 21 nt, Human herpesvirus 6B
agacgaguccuacagaagaaa

SEQ ID NO: 3992718 - RNA, 21 nt, Human herpesvirus 6B
agacggaucugccgcguggaa

SEQ ID NO: 3992719 - RNA, 12 nt, Human herpesvirus 6B
agacguuugcuu

SEQ ID NO: 3992720 - RNA, 15 nt, Human herpesvirus 6B
agacugcacagaauc

SEQ ID NO: 3992721 - RNA, 16 nt, Human herpesvirus 6B
agacuggacaguguuu

SEQ ID NO: 3992722 - RNA, 20 nt, Human herpesvirus 6B
agagaauagagauaaaugua

SEQ ID NO: 3992723 - RNA, 24 nt, Human herpesvirus 6B
agagaggaugcuuuuaguuucaaa

SEQ ID NO: 3992724 - RNA, 19 nt, Human herpesvirus 6B
agagucuguuacaacaaua

SEQ ID NO: 3992725 - RNA, 14 nt, Human herpesvirus 6B
agauaagagaguuu

SEQ ID NO: 3992726 - RNA, 22 nt, Human herpesvirus 6B
agauaaucgucgaaaacaauuu

SEQ ID NO: 3992727 - RNA, 17 nt, Human herpesvirus 6B
agaucaagcaaguucca

SEQ ID NO: 3992728 - RNA, 19 nt, Human herpesvirus 6B
agaucaucgccauagugaa

SEQ ID NO: 3992729 - RNA, 15 nt, Human herpesvirus 6B
agaugucgggccaca

SEQ ID NO: 3992730 - RNA, 16 nt, Human herpesvirus 6B
agauuaaauucagaua

SEQ ID NO: 3992731 - RNA, 17 nt, Human herpesvirus 6B
agauuaauuaucauuau

SEQ ID NO: 3992732 - RNA, 21 nt, Human herpesvirus 6B
agauucuccgucucaguguca

SEQ ID NO: 3992733 - RNA, 20 nt, Human herpesvirus 6B
agcaaaugaauguguucaua

SEQ ID NO: 3992734 - RNA, 14 nt, Human herpesvirus 6B
agcaaauuuuacca

SEQ ID NO: 3992735 - RNA, 24 nt, Human herpesvirus 6B
agcaacuugcugucggccgaagga

SEQ ID NO: 3992736 - RNA, 19 nt, Human herpesvirus 6B
agcaauucuuuugcgaaga

SEQ ID NO: 3992737 - RNA, 15 nt, Human herpesvirus 6B
agcagagguaaagua

SEQ ID NO: 3992738 - RNA, 16 nt, Human herpesvirus 6B
agcagcuagagaaauu

SEQ ID NO: 3992739 - RNA, 14 nt, Human herpesvirus 6B
agcaggagaaaaau

SEQ ID NO: 3992740 - RNA, 21 nt, Human herpesvirus 6B
agcaggcuccccaggcgcagc

SEQ ID NO: 3992741 - RNA, 23 nt, Human herpesvirus 6B
agcaucgguuguguuagcuucgc

SEQ ID NO: 3992742 - RNA, 16 nt, Human herpesvirus 6B
agcauucguuuagaga

SEQ ID NO: 3992743 - RNA, 22 nt, Human herpesvirus 6B
agccacuugagugagcagaagc

SEQ ID NO: 3992744 - RNA, 14 nt, Human herpesvirus 6B
agccagccaguauc

SEQ ID NO: 3992745 - RNA, 22 nt, Human herpesvirus 6B
agcccgcucggucucgcacguc

SEQ ID NO: 3992746 - RNA, 17 nt, Human herpesvirus 6B
agcccugaagaagaugc

SEQ ID NO: 3992747 - RNA, 19 nt, Human herpesvirus 6B
agcccugagagcaggagca

SEQ ID NO: 3992748 - RNA, 16 nt, Human herpesvirus 6B
agccggagcccugaga

SEQ ID NO: 3992749 - RNA, 14 nt, Human herpesvirus 6B
agccggccuuggaa

SEQ ID NO: 3992750 - RNA, 23 nt, Human herpesvirus 6B
agccuguccgugacacacagaau

SEQ ID NO: 3992751 - RNA, 16 nt, Human herpesvirus 6B
agcgcauccuuaaaug

SEQ ID NO: 3992752 - RNA, 16 nt, Human herpesvirus 6B
agcgcuguauguuaug

SEQ ID NO: 3992753 - RNA, 12 nt, Human herpesvirus 6B
agcggccaggcc

SEQ ID NO: 3992754 - RNA, 14 nt, Human herpesvirus 6B
agcgucaaacacuc

SEQ ID NO: 3992755 - RNA, 19 nt, Human herpesvirus 6B
agcucgaguucgagaagau

SEQ ID NO: 3992756 - RNA, 16 nt, Human herpesvirus 6B
agcugacaucugcaaa

SEQ ID NO: 3992757 - RNA, 16 nt, Human herpesvirus 6B
agcuuguuaugacaaa

SEQ ID NO: 3992758 - RNA, 14 nt, Human herpesvirus 6B
aggaaaauguguuc

SEQ ID NO: 3992759 - RNA, 16 nt, Human herpesvirus 6B
aggaacugaugagaaa

SEQ ID NO: 3992760 - RNA, 17 nt, Human herpesvirus 6B
aggaagaucaugacaag

SEQ ID NO: 3992761 - RNA, 23 nt, Human herpesvirus 6B
aggacaagccgacuauggaugau

SEQ ID NO: 3992762 - RNA, 15 nt, Human herpesvirus 6B
aggagagggagaaac

SEQ ID NO: 3992763 - RNA, 17 nt, Human herpesvirus 6B
aggaggaaaagaagaag

SEQ ID NO: 3992764 - RNA, 14 nt, Human herpesvirus 6B
aggaggaagaggag

SEQ ID NO: 3992765 - RNA, 16 nt, Human herpesvirus 6B
aggaggaagaggagga

SEQ ID NO: 3992766 - RNA, 20 nt, Human herpesvirus 6B
aggagugaaacgauguguua

SEQ ID NO: 3992767 - RNA, 19 nt, Human herpesvirus 6B
aggauguuugugacucuga

SEQ ID NO: 3992768 - RNA, 20 nt, Human herpesvirus 6B
aggccaggcgauacaacauc

SEQ ID NO: 3992769 - RNA, 16 nt, Human herpesvirus 6B
aggccggcacauacac

SEQ ID NO: 3992770 - RNA, 13 nt, Human herpesvirus 6B
aggcgcagcagca

SEQ ID NO: 3992771 - RNA, 15 nt, Human herpesvirus 6B
aggcggagacacaua

SEQ ID NO: 3992772 - RNA, 16 nt, Human herpesvirus 6B
aggcucggcaggggcc

SEQ ID NO: 3992773 - RNA, 12 nt, Human herpesvirus 6B
aggcucuggcaa

SEQ ID NO: 3992774 - RNA, 21 nt, Human herpesvirus 6B
agggaagccagccgcccuccc

SEQ ID NO: 3992775 - RNA, 19 nt, Human herpesvirus 6B
agggacccacacgcgggga

SEQ ID NO: 3992776 - RNA, 13 nt, Human herpesvirus 6B
agggacgcuugcu

SEQ ID NO: 3992777 - RNA, 16 nt, Human herpesvirus 6B
agggcgggcggacggc

SEQ ID NO: 3992778 - RNA, 14 nt, Human herpesvirus 6B
agggcguuucucgc

SEQ ID NO: 3992779 - RNA, 15 nt, Human herpesvirus 6B
aggggacggacagag

SEQ ID NO: 3992780 - RNA, 16 nt, Human herpesvirus 6B
aggguaacgcaggaga

SEQ ID NO: 3992781 - RNA, 21 nt, Human herpesvirus 6B
aggguaacgcaggagaaacuu

SEQ ID NO: 3992782 - RNA, 17 nt, Human herpesvirus 6B
agggucagcagaagaag

SEQ ID NO: 3992783 - RNA, 17 nt, Human herpesvirus 6B
agggucgaacccugaga

SEQ ID NO: 3992784 - RNA, 17 nt, Human herpesvirus 6B
aggugauuugaacagag

SEQ ID NO: 3992785 - RNA, 17 nt, Human herpesvirus 6B
aggugcguacacggcca

SEQ ID NO: 3992786 - RNA, 16 nt, Human herpesvirus 6B
agguguauuugaaaug

SEQ ID NO: 3992787 - RNA, 12 nt, Human herpesvirus 6B
agguuguccuug

SEQ ID NO: 3992788 - RNA, 18 nt, Human herpesvirus 6B
agguuucuaaaucugaaa

SEQ ID NO: 3992789 - RNA, 21 nt, Human herpesvirus 6B
agguuucuaaaucugaaaugu

SEQ ID NO: 3992790 - RNA, 16 nt, Human herpesvirus 6B
aguaacggaaaaauuu

SEQ ID NO: 3992791 - RNA, 17 nt, Human herpesvirus 6B
aguagugcaaccaugca

SEQ ID NO: 3992792 - RNA, 18 nt, Human herpesvirus 6B
aguauggugucugaaaaa

SEQ ID NO: 3992793 - RNA, 19 nt, Human herpesvirus 6B
aguauuuaugcuucauaau

SEQ ID NO: 3992794 - RNA, 21 nt, Human herpesvirus 6B
agucuagagguuuucuuuccc

SEQ ID NO: 3992795 - RNA, 15 nt, Human herpesvirus 6B
agucuggccucugcg

SEQ ID NO: 3992796 - RNA, 13 nt, Human herpesvirus 6B
agucugucagugg

SEQ ID NO: 3992797 - RNA, 23 nt, Human herpesvirus 6B
agucuucauccucgaagaauugu

SEQ ID NO: 3992798 - RNA, 15 nt, Human herpesvirus 6B
agugaauugugcaag

SEQ ID NO: 3992799 - RNA, 15 nt, Human herpesvirus 6B
agugacaaaauuuuu

SEQ ID NO: 3992800 - RNA, 13 nt, Human herpesvirus 6B
agugcuuuauccg

SEQ ID NO: 3992801 - RNA, 15 nt, Human herpesvirus 6B
agugcuuuauccggc

SEQ ID NO: 3992802 - RNA, 19 nt, Human herpesvirus 6B
aguguaaauguagaagaag

SEQ ID NO: 3992803 - RNA, 22 nt, Human herpesvirus 6B
aguguuauaucuggauauguau

SEQ ID NO: 3992804 - RNA, 15 nt, Human herpesvirus 6B
aguguuaugaagaau

SEQ ID NO: 3992805 - RNA, 19 nt, Human herpesvirus 6B
aguguuugccaaccaaaug

SEQ ID NO: 3992806 - RNA, 16 nt, Human herpesvirus 6B
aguuacuuugcuuuga

SEQ ID NO: 3992807 - RNA, 15 nt, Human herpesvirus 6B
aguugaugcuguugc

SEQ ID NO: 3992808 - RNA, 16 nt, Human herpesvirus 6B
aguugcggaagggcuc

SEQ ID NO: 3992809 - RNA, 16 nt, Human herpesvirus 6B
auaaaaaaaaauacua

SEQ ID NO: 3992810 - RNA, 12 nt, Human herpesvirus 6B
auaaacuauugu

SEQ ID NO: 3992811 - RNA, 14 nt, Human herpesvirus 6B
auaaacuuaaaaga

SEQ ID NO: 3992812 - RNA, 22 nt, Human herpesvirus 6B
auaacagaugaggaggagggac

SEQ ID NO: 3992813 - RNA, 15 nt, Human herpesvirus 6B
auaacaucucagauc

SEQ ID NO: 3992814 - RNA, 22 nt, Human herpesvirus 6B
auaacgauagcagcucugcaau

SEQ ID NO: 3992815 - RNA, 17 nt, Human herpesvirus 6B
auaaguugucauuguau

SEQ ID NO: 3992816 - RNA, 17 nt, Human herpesvirus 6B
auaauuuuauugacugu

SEQ ID NO: 3992817 - RNA, 22 nt, Human herpesvirus 6B
auacaccggagaccgagcggcg

SEQ ID NO: 3992818 - RNA, 23 nt, Human herpesvirus 6B
auaccauuuuauacgaaaauaaa

SEQ ID NO: 3992819 - RNA, 15 nt, Human herpesvirus 6B
auacggaaguugaaa

SEQ ID NO: 3992820 - RNA, 17 nt, Human herpesvirus 6B
auacggaaguugaaaaa

SEQ ID NO: 3992821 - RNA, 17 nt, Human herpesvirus 6B
auacgggaaaagaucaa

SEQ ID NO: 3992822 - RNA, 19 nt, Human herpesvirus 6B
auacuacguguaauguuuc

SEQ ID NO: 3992823 - RNA, 16 nt, Human herpesvirus 6B
auagaaagaaccagug

SEQ ID NO: 3992824 - RNA, 20 nt, Human herpesvirus 6B
auagagaagaauccgcgggc

SEQ ID NO: 3992825 - RNA, 14 nt, Human herpesvirus 6B
aaggucaaaaaacu

SEQ ID NO: 3992826 - RNA, 14 nt, Human herpesvirus 6B
aagguuuugugaau

SEQ ID NO: 3992827 - RNA, 17 nt, Human herpesvirus 6B
aaguauucuucuucccc

SEQ ID NO: 3992828 - RNA, 23 nt, Human herpesvirus 6B
aagucguuacaguaaaaaagccg

SEQ ID NO: 3992829 - RNA, 20 nt, Human herpesvirus 6B
aagucuuccgcggcgcuggg

SEQ ID NO: 3992830 - RNA, 19 nt, Human herpesvirus 6B
aagugaaggcggagaugca

SEQ ID NO: 3992831 - RNA, 22 nt, Human herpesvirus 6B
aagugaaggcggagaugcaaaa

SEQ ID NO: 3992832 - RNA, 17 nt, Human herpesvirus 6B
aaguuagaguuggauuu

SEQ ID NO: 3992833 - RNA, 21 nt, Human herpesvirus 6B
aaguuccacaucuaugaugcu

SEQ ID NO: 3992834 - RNA, 20 nt, Human herpesvirus 6B
aauaagccgaguuugauaau

SEQ ID NO: 3992835 - RNA, 13 nt, Human herpesvirus 6B
aauaauugcauuu

SEQ ID NO: 3992836 - RNA, 18 nt, Human herpesvirus 6B
aauaauugcauuuugggc

SEQ ID NO: 3992837 - RNA, 15 nt, Human herpesvirus 6B
aauaauuuuuguagc

SEQ ID NO: 3992838 - RNA, 21 nt, Human herpesvirus 6B
aauagucccauaaagcuuuca

SEQ ID NO: 3992839 - RNA, 12 nt, Human herpesvirus 6B
aaucaaggaaga

SEQ ID NO: 3992840 - RNA, 12 nt, Human herpesvirus 6B
aaucacaaauau

SEQ ID NO: 3992841 - RNA, 16 nt, Human herpesvirus 6B
aauccuggauuucgac

SEQ ID NO: 3992842 - RNA, 17 nt, Human herpesvirus 6B
aaucgaugcuggccuga

SEQ ID NO: 3992843 - RNA, 19 nt, Human herpesvirus 6B
aaucuccugagaggcugga

SEQ ID NO: 3992844 - RNA, 21 nt, Human herpesvirus 6B
aaucuguaagauuaaauguga

SEQ ID NO: 3992845 - RNA, 16 nt, Human herpesvirus 6B
aaucugugggaaaaua

SEQ ID NO: 3992846 - RNA, 22 nt, Human herpesvirus 6B
aaugagaaucguaguuuuguuc

SEQ ID NO: 3992847 - RNA, 14 nt, Human herpesvirus 6B
aauggaagaaggcu

SEQ ID NO: 3992848 - RNA, 18 nt, Human herpesvirus 6B
aaugggaugcauuauacu

SEQ ID NO: 3992849 - RNA, 14 nt, Human herpesvirus 6B
aaugugagcaguuu

SEQ ID NO: 3992850 - RNA, 23 nt, Human herpesvirus 6B
aauguguucuuacaauguucuug

SEQ ID NO: 3992851 - RNA, 16 nt, Human herpesvirus 6B
aauguuccaauugauu

SEQ ID NO: 3992852 - RNA, 19 nt, Human herpesvirus 6B
aauguugucaaucguguau

SEQ ID NO: 3992853 - RNA, 13 nt, Human herpesvirus 6B
aauguuucuguau

SEQ ID NO: 3992854 - RNA, 16 nt, Human herpesvirus 6B
aauuaaaguuuacugu

SEQ ID NO: 3992855 - RNA, 23 nt, Human herpesvirus 6B
aauuacucccauagaucuucccc

SEQ ID NO: 3992856 - RNA, 20 nt, Human herpesvirus 6B
aauuccauacggucgaauga

SEQ ID NO: 3992857 - RNA, 19 nt, Human herpesvirus 6B
aauuccauaugucgaaugc

SEQ ID NO: 3992858 - RNA, 17 nt, Human herpesvirus 6B
aauuccucuauacucug

SEQ ID NO: 3992859 - RNA, 24 nt, Human herpesvirus 6B
aauucugugaugggaaauguuguc

SEQ ID NO: 3992860 - RNA, 14 nt, Human herpesvirus 6B
auagagauaaaugu

SEQ ID NO: 3992861 - RNA, 14 nt, Human herpesvirus 6B
auagcuggauuauc

SEQ ID NO: 3992862 - RNA, 14 nt, Human herpesvirus 6B
auauacccucgccc

SEQ ID NO: 3992863 - RNA, 11 nt, Human herpesvirus 6B
auauagacacc

SEQ ID NO: 3992864 - RNA, 17 nt, Human herpesvirus 6B
auaucaugauaaauugu

SEQ ID NO: 3992865 - RNA, 15 nt, Human herpesvirus 6B
auaucugaaacacua

SEQ ID NO: 3992866 - RNA, 18 nt, Human herpesvirus 6B
auaugcuuuuuuuugugg

SEQ ID NO: 3992867 - RNA, 17 nt, Human herpesvirus 6B
auauggaucaaucucca

SEQ ID NO: 3992868 - RNA, 20 nt, Human herpesvirus 6B
auauucacaagaagaugcuu

SEQ ID NO: 3992869 - RNA, 22 nt, Human herpesvirus 6B
auauugagacguuuuucacagu

SEQ ID NO: 3992870 - RNA, 15 nt, Human herpesvirus 6B
auauugcaugcauug

SEQ ID NO: 3992871 - RNA, 16 nt, Human herpesvirus 6B
auauuggucaauguau

SEQ ID NO: 3992872 - RNA, 15 nt, Human herpesvirus 6B
aucaaaaaaaugaua

SEQ ID NO: 3992873 - RNA, 16 nt, Human herpesvirus 6B
aucaaacaacuguugu

SEQ ID NO: 3992874 - RNA, 13 nt, Human herpesvirus 6B
aucaaauucaaac

SEQ ID NO: 3992875 - RNA, 20 nt, Human herpesvirus 6B
aucaagacuacucuggcuga

SEQ ID NO: 3992876 - RNA, 15 nt, Human herpesvirus 6B
aucacgaaagaaugu

SEQ ID NO: 3992877 - RNA, 16 nt, Human herpesvirus 6B
aucacuacgaaagaac

SEQ ID NO: 3992878 - RNA, 17 nt, Human herpesvirus 6B
aucacuuagacacggcc

SEQ ID NO: 3992879 - RNA, 11 nt, Human herpesvirus 6B
aucacuuuguu

SEQ ID NO: 3992880 - RNA, 16 nt, Human herpesvirus 6B
aucagauaucugaaac

SEQ ID NO: 3992881 - RNA, 20 nt, Human herpesvirus 6B
auccaaaguaggcacacaug

SEQ ID NO: 3992882 - RNA, 15 nt, Human herpesvirus 6B
auccaucguuuguaa

SEQ ID NO: 3992883 - RNA, 22 nt, Human herpesvirus 6B
auccgcuaagagauuuacuguu

SEQ ID NO: 3992884 - RNA, 17 nt, Human herpesvirus 6B
auccggccaauucauug

SEQ ID NO: 3992885 - RNA, 21 nt, Human herpesvirus 6B
auccuguaguuuuuuucugau

SEQ ID NO: 3992886 - RNA, 23 nt, Human herpesvirus 6B
auccuuagcgcgaucguagacgu

SEQ ID NO: 3992887 - RNA, 16 nt, Human herpesvirus 6B
auccuuauaucugaaa

SEQ ID NO: 3992888 - RNA, 13 nt, Human herpesvirus 6B
aucuacaaaauag

SEQ ID NO: 3992889 - RNA, 11 nt, Human herpesvirus 6B
aucuauguuuu

SEQ ID NO: 3992890 - RNA, 23 nt, Human herpesvirus 6B
aucucaaaaaggguuuucugaau

SEQ ID NO: 3992891 - RNA, 15 nt, Human herpesvirus 6B
aucucgaugccaaag

SEQ ID NO: 3992892 - RNA, 15 nt, Human herpesvirus 6B
aucucuacaacguga

SEQ ID NO: 3992893 - RNA, 15 nt, Human herpesvirus 6B
aucucuagguaaacu

SEQ ID NO: 3992894 - RNA, 18 nt, Human herpesvirus 6B
aucugcuaacggagcaac

SEQ ID NO: 3992895 - RNA, 21 nt, Human herpesvirus 6B
aucuuaaucagauaucugaaa

SEQ ID NO: 3992896 - RNA, 22 nt, Human herpesvirus 6B
aucuugaaaagccccugcuuga

SEQ ID NO: 3992897 - RNA, 21 nt, Human herpesvirus 6B
augaauguguucauagagcau

SEQ ID NO: 3992898 - RNA, 22 nt, Human herpesvirus 6B
augaauuugagaagauaauuac

SEQ ID NO: 3992899 - RNA, 20 nt, Human herpesvirus 6B
augacaaggugaacucaucg

SEQ ID NO: 3992900 - RNA, 15 nt, Human herpesvirus 6B
augacgaagggagug

SEQ ID NO: 3992901 - RNA, 15 nt, Human herpesvirus 6B
augacucaagaauua

SEQ ID NO: 3992902 - RNA, 12 nt, Human herpesvirus 6B
augacuuuucug

SEQ ID NO: 3992903 - RNA, 14 nt, Human herpesvirus 6B
augaguggaguuga

SEQ ID NO: 3992904 - RNA, 23 nt, Human herpesvirus 6B
augcaaucugugggaaaauaaua

SEQ ID NO: 3992905 - RNA, 15 nt, Human herpesvirus 6B
augcaggugcugcua

SEQ ID NO: 3992906 - RNA, 14 nt, Human herpesvirus 6B
augccacagguaca

SEQ ID NO: 3992907 - RNA, 19 nt, Human herpesvirus 6B
augccgccugaaaccccac

SEQ ID NO: 3992908 - RNA, 12 nt, Human herpesvirus 6B
augccuugggga

SEQ ID NO: 3992909 - RNA, 13 nt, Human herpesvirus 6B
augcggagaagua

SEQ ID NO: 3992910 - RNA, 14 nt, Human herpesvirus 6B
auggaacuucauag

SEQ ID NO: 3992911 - RNA, 23 nt, Human herpesvirus 6B
auggaagaaggcuaucacuuaga

SEQ ID NO: 3992912 - RNA, 14 nt, Human herpesvirus 6B
auggagaaaaacuu

SEQ ID NO: 3992913 - RNA, 19 nt, Human herpesvirus 6B
auggaucauaaagugucuu

SEQ ID NO: 3992914 - RNA, 21 nt, Human herpesvirus 6B
auggaucggaagacguuucua

SEQ ID NO: 3992915 - RNA, 22 nt, Human herpesvirus 6B
auggauuacaagggaaauccua

SEQ ID NO: 3992916 - RNA, 13 nt, Human herpesvirus 6B
augguuaaggaaa

SEQ ID NO: 3992917 - RNA, 20 nt, Human herpesvirus 6B
auguaaacauagaaucucca

SEQ ID NO: 3992918 - RNA, 12 nt, Human herpesvirus 6B
auguaaauguua

SEQ ID NO: 3992919 - RNA, 21 nt, Human herpesvirus 6B
auguacguggccgucuccugc

SEQ ID NO: 3992920 - RNA, 16 nt, Human herpesvirus 6B
auguaucaaaguguau

SEQ ID NO: 3992921 - RNA, 19 nt, Human herpesvirus 6B
augucaacgaaaaaaugac

SEQ ID NO: 3992922 - RNA, 20 nt, Human herpesvirus 6B
augucaagucuagacaugau

SEQ ID NO: 3992923 - RNA, 13 nt, Human herpesvirus 6B
augucguuucaug

SEQ ID NO: 3992924 - RNA, 17 nt, Human herpesvirus 6B
augucucgaaaaagaca

SEQ ID NO: 3992925 - RNA, 16 nt, Human herpesvirus 6B
auguggucauggaaaa

SEQ ID NO: 3992926 - RNA, 16 nt, Human herpesvirus 6B
auguguucuuacaaug

SEQ ID NO: 3992927 - RNA, 13 nt, Human herpesvirus 6B
auguuauguaaag

SEQ ID NO: 3992928 - RNA, 19 nt, Human herpesvirus 6B
auguucuucugaaaugguu

SEQ ID NO: 3992929 - RNA, 15 nt, Human herpesvirus 6B
auguuuacugcaugc

SEQ ID NO: 3992930 - RNA, 14 nt, Human herpesvirus 6B
auuaaaguuuacug

SEQ ID NO: 3992931 - RNA, 14 nt, Human herpesvirus 6B
auuaaaguuuucau

SEQ ID NO: 3992932 - RNA, 20 nt, Human herpesvirus 6B
auuaauuuuuuguuucugaa

SEQ ID NO: 3992933 - RNA, 23 nt, Human herpesvirus 6B
auuacagaugucuauaugucaga

SEQ ID NO: 3992934 - RNA, 19 nt, Human herpesvirus 6B
auuacagcuuguccgaaau

SEQ ID NO: 3992935 - RNA, 16 nt, Human herpesvirus 6B
auuaggggacagagcc

SEQ ID NO: 3992936 - RNA, 15 nt, Human herpesvirus 6B
auuauaaugaugcau

SEQ ID NO: 3992937 - RNA, 21 nt, Human herpesvirus 6B
auuauuguguguccugagaau

SEQ ID NO: 3992938 - RNA, 19 nt, Human herpesvirus 6B
auucaauggagucuucaca

SEQ ID NO: 3992939 - RNA, 15 nt, Human herpesvirus 6B
auucaauuucuaaau

SEQ ID NO: 3992940 - RNA, 23 nt, Human herpesvirus 6B
auucagaaaauuggugugcauua

SEQ ID NO: 3992941 - RNA, 20 nt, Human herpesvirus 6B
auucagcuggacagaaauga

SEQ ID NO: 3992942 - RNA, 19 nt, Human herpesvirus 6B
auucgauuaaugccacagg

SEQ ID NO: 3992943 - RNA, 17 nt, Human herpesvirus 6B
auucgcaagacuacaga

SEQ ID NO: 3992944 - RNA, 22 nt, Human herpesvirus 6B
auucuuuugugcuuaucaaauu

SEQ ID NO: 3992945 - RNA, 22 nt, Human herpesvirus 6B
auugaaggguguuuccacacag

SEQ ID NO: 3992946 - RNA, 14 nt, Human herpesvirus 6B
auugagcucuugga

SEQ ID NO: 3992947 - RNA, 17 nt, Human herpesvirus 6B
auugaguagagcuuuga

SEQ ID NO: 3992948 - RNA, 20 nt, Human herpesvirus 6B
auugcagagguaaugugaac

SEQ ID NO: 3992949 - RNA, 16 nt, Human herpesvirus 6B
auugcugaguggacau

SEQ ID NO: 3992950 - RNA, 23 nt, Human herpesvirus 6B
auuggcccuuauauggaugcugg

SEQ ID NO: 3992951 - RNA, 15 nt, Human herpesvirus 6B
auuguagcucucgca

SEQ ID NO: 3992952 - RNA, 14 nt, Human herpesvirus 6B
auugucauucugca

SEQ ID NO: 3992953 - RNA, 15 nt, Human herpesvirus 6B
auugugacaagguau

SEQ ID NO: 3992954 - RNA, 14 nt, Human herpesvirus 6B
auuguguucugcuc

SEQ ID NO: 3992955 - RNA, 22 nt, Human herpesvirus 6B
auuuaacgauccuuuucucaca

SEQ ID NO: 3992956 - RNA, 13 nt, Human herpesvirus 6B
auuuaaguaaacu

SEQ ID NO: 3992957 - RNA, 17 nt, Human herpesvirus 6B
auuuacaaaacaaauau

SEQ ID NO: 3992958 - RNA, 18 nt, Human herpesvirus 6B
auuuauaccaaacgugaa

SEQ ID NO: 3992959 - RNA, 14 nt, Human herpesvirus 6B
auuuauguaaacau

SEQ ID NO: 3992960 - RNA, 16 nt, Human herpesvirus 6B
auuugacuguagaaaa

SEQ ID NO: 3992961 - RNA, 17 nt, Human herpesvirus 6B
auuugcaauuguuugug

SEQ ID NO: 3992962 - RNA, 14 nt, Human herpesvirus 6B
auuugcaguuugug

SEQ ID NO: 3992963 - RNA, 17 nt, Human herpesvirus 6B
auuugcauuaaggaaaa

SEQ ID NO: 3992964 - RNA, 18 nt, Human herpesvirus 6B
auuuguucgcacaaaaug

SEQ ID NO: 3992965 - RNA, 19 nt, Human herpesvirus 6B
auuuuaaaaagaacgugaa

SEQ ID NO: 3992966 - RNA, 16 nt, Human herpesvirus 6B
auuuuaacgguuuugc

SEQ ID NO: 3992967 - RNA, 21 nt, Human herpesvirus 6B
auuuuagaauaaaaaauagac

SEQ ID NO: 3992968 - RNA, 14 nt, Human herpesvirus 6B
auuuucagugucag

SEQ ID NO: 3992969 - RNA, 18 nt, Human herpesvirus 6B
auuuucuccuuuuuugac

SEQ ID NO: 3992970 - RNA, 20 nt, Human herpesvirus 6B
auuuuggaagcauacgucug

SEQ ID NO: 3992971 - RNA, 21 nt, Human herpesvirus 6B
auuuuguggcuauuugacaau

SEQ ID NO: 3992972 - RNA, 20 nt, Human herpesvirus 6B
auuuuucugccuauuucucu

SEQ ID NO: 3992973 - RNA, 23 nt, Human herpesvirus 6B
auuuuuguagcaauuuuaaauau

SEQ ID NO: 3992974 - RNA, 17 nt, Human herpesvirus 6B
auuuuuuugaaaucacu

SEQ ID NO: 3992975 - RNA, 18 nt, Human herpesvirus 6B
caaaagccugcauaugau

SEQ ID NO: 3992976 - RNA, 16 nt, Human herpesvirus 6B
caaaaucguguuuucu

SEQ ID NO: 3992977 - RNA, 19 nt, Human herpesvirus 6B
caaaauuaauucaaaugua

SEQ ID NO: 3992978 - RNA, 12 nt, Human herpesvirus 6B
caaacagagaua

SEQ ID NO: 3992979 - RNA, 16 nt, Human herpesvirus 6B
caaagaugacaaauuu

SEQ ID NO: 3992980 - RNA, 14 nt, Human herpesvirus 6B
caaagguuuuguga

SEQ ID NO: 3992981 - RNA, 17 nt, Human herpesvirus 6B
caaagucuuccgcggcg

SEQ ID NO: 3992982 - RNA, 18 nt, Human herpesvirus 6B
caaauaauuuuauugacu

SEQ ID NO: 3992983 - RNA, 16 nt, Human herpesvirus 6B
caaauguagcaaauga

SEQ ID NO: 3992984 - RNA, 17 nt, Human herpesvirus 6B
caacacuguuguuaauc

SEQ ID NO: 3992985 - RNA, 18 nt, Human herpesvirus 6B
caaccuauguacagauag

SEQ ID NO: 3992986 - RNA, 23 nt, Human herpesvirus 6B
caacgcagauuuuaaugaugugu

SEQ ID NO: 3992987 - RNA, 14 nt, Human herpesvirus 6B
caacgcuccuccca

SEQ ID NO: 3992988 - RNA, 17 nt, Human herpesvirus 6B
caacggcacgagagccu

SEQ ID NO: 3992989 - RNA, 15 nt, Human herpesvirus 6B
caacguuuucugcuc

SEQ ID NO: 3992990 - RNA, 23 nt, Human herpesvirus 6B
caacuuaaaauuuuuaaacagau

SEQ ID NO: 3992991 - RNA, 15 nt, Human herpesvirus 6B
caacuuuauuugaaa

SEQ ID NO: 3992992 - RNA, 23 nt, Human herpesvirus 6B
caagaaaagaaaaaacagagccg

SEQ ID NO: 3992993 - RNA, 19 nt, Human herpesvirus 6B
caagcacaaaaccaggaau

SEQ ID NO: 3992994 - RNA, 13 nt, Human herpesvirus 6B
caagcccggagaa

SEQ ID NO: 3992995 - RNA, 21 nt, Human herpesvirus 6B
caagucgccucacuguaaaag

SEQ ID NO: 3992996 - RNA, 16 nt, Human herpesvirus 6B
caauaucguccucaga

SEQ ID NO: 3992997 - RNA, 15 nt, Human herpesvirus 6B
caaugaauacuucuc

SEQ ID NO: 3992998 - RNA, 18 nt, Human herpesvirus 6B
caaugacuggccaaucau

SEQ ID NO: 3992999 - RNA, 23 nt, Human herpesvirus 6B
caaugauuuuguuuauugcuuuu

SEQ ID NO: 3993000 - RNA, 15 nt, Human herpesvirus 6B
caaugcggaacacca

SEQ ID NO: 3993001 - RNA, 14 nt, Human herpesvirus 6B
caauuguauuguga

SEQ ID NO: 3993002 - RNA, 19 nt, Human herpesvirus 6B
caauuucggcaagaaagcc

SEQ ID NO: 3993003 - RNA, 23 nt, Human herpesvirus 6B
cacagcaugaacucucacggcca

SEQ ID NO: 3993004 - RNA, 15 nt, Human herpesvirus 6B
cacagcggcagcgga

SEQ ID NO: 3993005 - RNA, 20 nt, Human herpesvirus 6B
cacaguugcgugagcaagga

SEQ ID NO: 3993006 - RNA, 18 nt, Human herpesvirus 6B
cacaucgugaguuuucau

SEQ ID NO: 3993007 - RNA, 17 nt, Human herpesvirus 6B
cacauuagcugcuaaau

SEQ ID NO: 3993008 - RNA, 15 nt, Human herpesvirus 6B
caccagauaggaaaa

SEQ ID NO: 3993009 - RNA, 17 nt, Human herpesvirus 6B
caccccccucuugcagu

SEQ ID NO: 3993010 - RNA, 19 nt, Human herpesvirus 6B
caccccccucuugcagugg

SEQ ID NO: 3993011 - RNA, 19 nt, Human herpesvirus 6B
caccgaaauccccagaagg

SEQ ID NO: 3993012 - RNA, 19 nt, Human herpesvirus 6B
caccgucccucucaccccc

SEQ ID NO: 3993013 - RNA, 21 nt, Human herpesvirus 6B
cacgagagccuuaucgaaaga

SEQ ID NO: 3993014 - RNA, 21 nt, Human herpesvirus 6B
cacgcucguauuuuauuuugu

SEQ ID NO: 3993015 - RNA, 23 nt, Human herpesvirus 6B
cacggcgccucccauagaggcgc

SEQ ID NO: 3993016 - RNA, 19 nt, Human herpesvirus 6B
cacggggauuuagugcagu

SEQ ID NO: 3993017 - RNA, 20 nt, Human herpesvirus 6B
cacggggauuuagugcagua

SEQ ID NO: 3993018 - RNA, 22 nt, Human herpesvirus 6B
cacguccauaggcucggcaggg

SEQ ID NO: 3993019 - RNA, 16 nt, Human herpesvirus 6B
cacgucguggcagaac

SEQ ID NO: 3993020 - RNA, 20 nt, Human herpesvirus 6B
cacucgaggaaacgcgcugg

SEQ ID NO: 3993021 - RNA, 16 nt, Human herpesvirus 6B
cacuuagacacggcca

SEQ ID NO: 3993022 - RNA, 15 nt, Human herpesvirus 6B
cacuucuucugcaga

SEQ ID NO: 3993023 - RNA, 19 nt, Human herpesvirus 6B
cacuugucgccaaugcaau

SEQ ID NO: 3993024 - RNA, 15 nt, Human herpesvirus 6B
cagaaaagcaaacau

SEQ ID NO: 3993025 - RNA, 15 nt, Human herpesvirus 6B
cagaaaugagcaaca

SEQ ID NO: 3993026 - RNA, 18 nt, Human herpesvirus 6B
cagaagauccaaacuaug

SEQ ID NO: 3993027 - RNA, 14 nt, Human herpesvirus 6B
cagaaucuucuuug

SEQ ID NO: 3993028 - RNA, 17 nt, Human herpesvirus 6B
cagacgugagacauuug

SEQ ID NO: 3993029 - RNA, 19 nt, Human herpesvirus 6B
cagagccuagaccaagaau

SEQ ID NO: 3993030 - RNA, 16 nt, Human herpesvirus 6B
cagaggaagaaaggag

SEQ ID NO: 3993031 - RNA, 21 nt, Human herpesvirus 6B
cagauuaauuaucauuaugag

SEQ ID NO: 3993032 - RNA, 13 nt, Human herpesvirus 6B
cagauuucccaaa

SEQ ID NO: 3993033 - RNA, 13 nt, Human herpesvirus 6B
cagauuuuacugg

SEQ ID NO: 3993034 - RNA, 16 nt, Human herpesvirus 6B
cagcaauccaauaauu

SEQ ID NO: 3993035 - RNA, 21 nt, Human herpesvirus 6B
cagcgugaugaggcccagagg

SEQ ID NO: 3993036 - RNA, 16 nt, Human herpesvirus 6B
cagcuuuauucccaug

SEQ ID NO: 3993037 - RNA, 18 nt, Human herpesvirus 6B
caggaccagcucuguucu

SEQ ID NO: 3993038 - RNA, 18 nt, Human herpesvirus 6B
caggauuauaaaaacaca

SEQ ID NO: 3993039 - RNA, 13 nt, Human herpesvirus 6B
guuucuuuggaaa

SEQ ID NO: 3993040 - RNA, 14 nt, Human herpesvirus 6B
guuucuuuggaaaa

SEQ ID NO: 3993041 - RNA, 14 nt, Human herpesvirus 6B
guuugaucuagaua

SEQ ID NO: 3993042 - RNA, 19 nt, Human herpesvirus 6B
guuuguggacaaugauacu

SEQ ID NO: 3993043 - RNA, 22 nt, Human herpesvirus 6B
uaaaaaaaaauacuauguggaa

SEQ ID NO: 3993044 - RNA, 21 nt, Human herpesvirus 6B
uaaaaaagagauaaucuuuga

SEQ ID NO: 3993045 - RNA, 20 nt, Human herpesvirus 6B
uaaaaaagauuuuguuucua

SEQ ID NO: 3993046 - RNA, 18 nt, Human herpesvirus 6B
uaaaagcugcuaacggag

SEQ ID NO: 3993047 - RNA, 22 nt, Human herpesvirus 6B
uaaaagugcaacaaagagcuuu

SEQ ID NO: 3993048 - RNA, 16 nt, Human herpesvirus 6B
uaaaaguggagguaau

SEQ ID NO: 3993049 - RNA, 18 nt, Human herpesvirus 6B
uaaaaucugcuaacggag

SEQ ID NO: 3993050 - RNA, 20 nt, Human herpesvirus 6B
uaaacggagacugcacagaa

SEQ ID NO: 3993051 - RNA, 19 nt, Human herpesvirus 6B
uaaacuuaacuuaucaacu

SEQ ID NO: 3993052 - RNA, 19 nt, Human herpesvirus 6B
uaaagaucacaacaaacau

SEQ ID NO: 3993053 - RNA, 21 nt, Human herpesvirus 6B
uaaagucgcuucgaauguuga

SEQ ID NO: 3993054 - RNA, 14 nt, Human herpesvirus 6B
uaaaguuuugugau

SEQ ID NO: 3993055 - RNA, 18 nt, Human herpesvirus 6B
uaaaucaaaaaaaugaua

SEQ ID NO: 3993056 - RNA, 21 nt, Human herpesvirus 6B
uaaauccuagaguuguuuuua

SEQ ID NO: 3993057 - RNA, 12 nt, Human herpesvirus 6B
uaaaucugaaau

SEQ ID NO: 3993058 - RNA, 13 nt, Human herpesvirus 6B
uaaauggacggcg

SEQ ID NO: 3993059 - RNA, 21 nt, Human herpesvirus 6B
uaacauagaaaaauaagacuu

SEQ ID NO: 3993060 - RNA, 23 nt, Human herpesvirus 6B
uaaccggcgagguuaagaugucg

SEQ ID NO: 3993061 - RNA, 12 nt, Human herpesvirus 6B
uaaccuucugau

SEQ ID NO: 3993062 - RNA, 13 nt, Human herpesvirus 6B
uaacgcgguauau

SEQ ID NO: 3993063 - RNA, 20 nt, Human herpesvirus 6B
uaacucuuggauugcagaua

SEQ ID NO: 3993064 - RNA, 18 nt, Human herpesvirus 6B
uaagaaaaccgaaaacac

SEQ ID NO: 3993065 - RNA, 20 nt, Human herpesvirus 6B
uaagagauuuacuguuucuu

SEQ ID NO: 3993066 - RNA, 19 nt, Human herpesvirus 6B
uaaggaagaucgcuuuucu

SEQ ID NO: 3993067 - RNA, 23 nt, Human herpesvirus 6B
uaauaaaaacgaaacucuagaau

SEQ ID NO: 3993068 - RNA, 11 nt, Human herpesvirus 6B
uaauauuugca

SEQ ID NO: 3993069 - RNA, 17 nt, Human herpesvirus 6B
uaauccauauuuggaag

SEQ ID NO: 3993070 - RNA, 14 nt, Human herpesvirus 6B
uaaugaauuucaau

SEQ ID NO: 3993071 - RNA, 13 nt, Human herpesvirus 6B
uaaugcaaagaug

SEQ ID NO: 3993072 - RNA, 12 nt, Human herpesvirus 6B
uaaugccacagg

SEQ ID NO: 3993073 - RNA, 14 nt, Human herpesvirus 6B
uaauggagagaaau

SEQ ID NO: 3993074 - RNA, 17 nt, Human herpesvirus 6B
uaauggagagaaauucu

SEQ ID NO: 3993075 - RNA, 15 nt, Human herpesvirus 6B
uaauuacauuaucca

SEQ ID NO: 3993076 - RNA, 12 nt, Human herpesvirus 6B
uaauuuacuguc

SEQ ID NO: 3993077 - RNA, 21 nt, Human herpesvirus 6B
uaauuuuuuguuucugaaaau

SEQ ID NO: 3993078 - RNA, 21 nt, Human herpesvirus 6B
uacaagggcuuggggcuauag

SEQ ID NO: 3993079 - RNA, 15 nt, Human herpesvirus 6B
ucgaaacgaaagcug

SEQ ID NO: 3993080 - RNA, 19 nt, Human herpesvirus 6B
ucgaagacauucaacauuc

SEQ ID NO: 3993081 - RNA, 17 nt, Human herpesvirus 6B
ucgauaaggcucucgug

SEQ ID NO: 3993082 - RNA, 21 nt, Human herpesvirus 6B
ucgauacaacgugugaaaacu

SEQ ID NO: 3993083 - RNA, 15 nt, Human herpesvirus 6B
ucgauccaaaagauu

SEQ ID NO: 3993084 - RNA, 17 nt, Human herpesvirus 6B
ucgauuaaugccacagg

SEQ ID NO: 3993085 - RNA, 21 nt, Human herpesvirus 6B
ucgcaagaaaagaaaaaacag

SEQ ID NO: 3993086 - RNA, 20 nt, Human herpesvirus 6B
ucgcaagcccggagaacuga

SEQ ID NO: 3993087 - RNA, 19 nt, Human herpesvirus 6B
ucgcagaaucaagaaacac

SEQ ID NO: 3993088 - RNA, 16 nt, Human herpesvirus 6B
ucgcauggaauucaug

SEQ ID NO: 3993089 - RNA, 18 nt, Human herpesvirus 6B
ucgccauagugaaagagu

SEQ ID NO: 3993090 - RNA, 20 nt, Human herpesvirus 6B
ucggaugguauaauguaaaa

SEQ ID NO: 3993091 - RNA, 17 nt, Human herpesvirus 6B
ucggcauuuguguuuuu

SEQ ID NO: 3993092 - RNA, 21 nt, Human herpesvirus 6B
ucgggccuggggacagacagg

SEQ ID NO: 3993093 - RNA, 15 nt, Human herpesvirus 6B
ucgguaaacuucaga

SEQ ID NO: 3993094 - RNA, 13 nt, Human herpesvirus 6B
ucgucauuccagu

SEQ ID NO: 3993095 - RNA, 13 nt, Human herpesvirus 6B
ucguccuccgcaa

SEQ ID NO: 3993096 - RNA, 21 nt, Human herpesvirus 6B
ucgugcgaaaaaacaguuucc

SEQ ID NO: 3993097 - RNA, 18 nt, Human herpesvirus 6B
ucgugggaauuauauguu

SEQ ID NO: 3993098 - RNA, 16 nt, Human herpesvirus 6B
ucguucuuaacauauu

SEQ ID NO: 3993099 - RNA, 13 nt, Human herpesvirus 6B
ucguucuuugcac

SEQ ID NO: 3993100 - RNA, 13 nt, Human herpesvirus 6B
ucguugcagaccg

SEQ ID NO: 3993101 - RNA, 23 nt, Human herpesvirus 6B
ucuaaauggcucguucagcagua

SEQ ID NO: 3993102 - RNA, 20 nt, Human herpesvirus 6B
ucuaacuacauuuuaguauu

SEQ ID NO: 3993103 - RNA, 18 nt, Human herpesvirus 6B
ucuaaucaagaaaccugu

SEQ ID NO: 3993104 - RNA, 19 nt, Human herpesvirus 6B
ucuaauuauaaauguagca

SEQ ID NO: 3993105 - RNA, 16 nt, Human herpesvirus 6B
ucuacccaccuguccu

SEQ ID NO: 3993106 - RNA, 15 nt, Human herpesvirus 6B
ucuagaugaaagagg

SEQ ID NO: 3993107 - RNA, 20 nt, Human herpesvirus 6B
ucuauauaaaucggguaaau

SEQ ID NO: 3993108 - RNA, 15 nt, Human herpesvirus 6B
ucuaugagacuguuu

SEQ ID NO: 3993109 - RNA, 13 nt, Human herpesvirus 6B
ucuauucaggaau

SEQ ID NO: 3993110 - RNA, 14 nt, Human herpesvirus 6B
ucuccggcgucacu

SEQ ID NO: 3993111 - RNA, 22 nt, Human herpesvirus 6B
ucucgauugugauguacguggc

SEQ ID NO: 3993112 - RNA, 15 nt, Human herpesvirus 6B
ucucuaaucaagaaa

SEQ ID NO: 3993113 - RNA, 13 nt, Human herpesvirus 6B
ucucuacaucacc

SEQ ID NO: 3993114 - RNA, 15 nt, Human herpesvirus 6B
ucucuacguuuacau

SEQ ID NO: 3993115 - RNA, 18 nt, Human herpesvirus 6B
ucucuauaaccaccugca

SEQ ID NO: 3993116 - RNA, 14 nt, Human herpesvirus 6B
ucugagacagucaa

SEQ ID NO: 3993117 - RNA, 16 nt, Human herpesvirus 6B
ucugauaaacuccaaa

SEQ ID NO: 3993118 - RNA, 15 nt, Human herpesvirus 6B
ucugcauuuauauca

SEQ ID NO: 3993119 - RNA, 16 nt, Human herpesvirus 6B
ucuggugaauguuucu

SEQ ID NO: 3993120 - RNA, 12 nt, Human herpesvirus 6B
ucuggugagaaa

SEQ ID NO: 3993121 - RNA, 16 nt, Human herpesvirus 6B
ucuggugagaaagacu

SEQ ID NO: 3993122 - RNA, 13 nt, Human herpesvirus 6B
ucuguaaaaggau

SEQ ID NO: 3993123 - RNA, 21 nt, Human herpesvirus 6B
ucuguggcauauuuaaaccag

SEQ ID NO: 3993124 - RNA, 13 nt, Human herpesvirus 6B
ucuguuaauuccu

SEQ ID NO: 3993125 - RNA, 17 nt, Human herpesvirus 6B
ucuuacuuuguggaaau

SEQ ID NO: 3993126 - RNA, 13 nt, Human herpesvirus 6B
ucuuccuucucgu

SEQ ID NO: 3993127 - RNA, 23 nt, Human herpesvirus 6B
ucuucuacuuuaucuuuugcaaa

SEQ ID NO: 3993128 - RNA, 11 nt, Human herpesvirus 6B
ucuugcaagaa

SEQ ID NO: 3993129 - RNA, 23 nt, Human herpesvirus 6B
ucuuuauagagcaauucaucaaa

SEQ ID NO: 3993130 - RNA, 16 nt, Human herpesvirus 6B
ucuuugaugaagaggu

SEQ ID NO: 3993131 - RNA, 18 nt, Human herpesvirus 6B
ucuuuuacguuaaaaggg

SEQ ID NO: 3993132 - RNA, 16 nt, Human herpesvirus 6B
ugaaaaacagaauaag

SEQ ID NO: 3993133 - RNA, 14 nt, Human herpesvirus 6B
ugaaauaaaguuua

SEQ ID NO: 3993134 - RNA, 16 nt, Human herpesvirus 6B
ugaaaucacuccgcau

SEQ ID NO: 3993135 - RNA, 19 nt, Human herpesvirus 6B
ugaaaucucuuuuaacaca

SEQ ID NO: 3993136 - RNA, 17 nt, Human herpesvirus 6B
ugaaaucuuuccugcua

SEQ ID NO: 3993137 - RNA, 16 nt, Human herpesvirus 6B
ugaacaaguggaagug

SEQ ID NO: 3993138 - RNA, 24 nt, Human herpesvirus 6B
ugaacaucuauuaucauuuaugca

SEQ ID NO: 3993139 - RNA, 23 nt, Human herpesvirus 6B
ugaacauguuuuugauguuuuca

SEQ ID NO: 3993140 - RNA, 17 nt, Human herpesvirus 6B
ugaacucucacggccau

SEQ ID NO: 3993141 - RNA, 13 nt, Human herpesvirus 6B
ugaaggcuacuau

SEQ ID NO: 3993142 - RNA, 20 nt, Human herpesvirus 6B
ugaauaucuuuauaaaucau

SEQ ID NO: 3993143 - RNA, 21 nt, Human herpesvirus 6B
ugaauccagauaaacaaaaau

SEQ ID NO: 3993144 - RNA, 22 nt, Human herpesvirus 6B
ugaaugcuuaccgccuccgcag

SEQ ID NO: 3993145 - RNA, 23 nt, Human herpesvirus 6B
ugaauggaguaaauuaaaguuua

SEQ ID NO: 3993146 - RNA, 15 nt, Human herpesvirus 6B
ugacaaguagagaga

SEQ ID NO: 3993147 - RNA, 13 nt, Human herpesvirus 6B
ugacagaaaucuu

SEQ ID NO: 3993148 - RNA, 14 nt, Human herpesvirus 6B
ugaccagagauucu

SEQ ID NO: 3993149 - RNA, 18 nt, Human herpesvirus 6B
ugaccgaauuauguaugu

SEQ ID NO: 3993150 - RNA, 15 nt, Human herpesvirus 6B
ugacgccugugugcc

SEQ ID NO: 3993151 - RNA, 18 nt, Human herpesvirus 6B
ugacggacuuggaaaagg

SEQ ID NO: 3993152 - RNA, 21 nt, Human herpesvirus 6B
ugacguuuagcuuugugaacu

SEQ ID NO: 3993153 - RNA, 20 nt, Human herpesvirus 6B
ugacugcguuacaagcaugc

SEQ ID NO: 3993154 - RNA, 19 nt, Human herpesvirus 6B
ugacugugaaaagugcuuu

SEQ ID NO: 3993155 - RNA, 15 nt, Human herpesvirus 6B
ugacuuuucugauga

SEQ ID NO: 3993156 - RNA, 16 nt, Human herpesvirus 6B
ugagacauuugauguu

SEQ ID NO: 3993157 - RNA, 18 nt, Human herpesvirus 6B
ugagagcaggagcaggcu

SEQ ID NO: 3993158 - RNA, 13 nt, Human herpesvirus 6B
ugagauacauguu

SEQ ID NO: 3993159 - RNA, 13 nt, Human herpesvirus 6B
ugaggauggauuc

SEQ ID NO: 3993160 - RNA, 16 nt, Human herpesvirus 6B
ugauaaguugucauug

SEQ ID NO: 3993161 - RNA, 23 nt, Human herpesvirus 6B
ugauacuacguguaauguuuccu

SEQ ID NO: 3993162 - RNA, 22 nt, Human herpesvirus 6B
ugauaugcuuuuuuuuguggau

SEQ ID NO: 3993163 - RNA, 15 nt, Human herpesvirus 6B
ugauauggagcagau

SEQ ID NO: 3993164 - RNA, 12 nt, Human herpesvirus 6B
ggcgccucccau

SEQ ID NO: 3993165 - RNA, 22 nt, Human herpesvirus 6B
ggcgcgaaaaggggucggauuu

SEQ ID NO: 3993166 - RNA, 13 nt, Human herpesvirus 6B
ggcgcgggacagc

SEQ ID NO: 3993167 - RNA, 16 nt, Human herpesvirus 6B
ggcgggcacggagaac

SEQ ID NO: 3993168 - RNA, 20 nt, Human herpesvirus 6B
ggcgggcggacggcucgucu

SEQ ID NO: 3993169 - RNA, 16 nt, Human herpesvirus 6B
ggcuccccaggcgcag

SEQ ID NO: 3993170 - RNA, 21 nt, Human herpesvirus 6B
ggcugauauacgauggacaga

SEQ ID NO: 3993171 - RNA, 22 nt, Human herpesvirus 6B
gggaagaucuaugagaauuaug

SEQ ID NO: 3993172 - RNA, 20 nt, Human herpesvirus 6B
gggacggacagagcggagag

SEQ ID NO: 3993173 - RNA, 13 nt, Human herpesvirus 6B
gggacggagagga

SEQ ID NO: 3993174 - RNA, 15 nt, Human herpesvirus 6B
gggacuuauuucauu

SEQ ID NO: 3993175 - RNA, 19 nt, Human herpesvirus 6B
gggagccguggugcgccug

SEQ ID NO: 3993176 - RNA, 18 nt, Human herpesvirus 6B
gggagcggcgcacggguu

SEQ ID NO: 3993177 - RNA, 22 nt, Human herpesvirus 6B
ggggacggacagagcggagagg

SEQ ID NO: 3993178 - RNA, 20 nt, Human herpesvirus 6B
ggggagguuuuuucaccccc

SEQ ID NO: 3993179 - RNA, 17 nt, Human herpesvirus 6B
ggggaucgacgaccagg

SEQ ID NO: 3993180 - RNA, 22 nt, Human herpesvirus 6B
ggggcgucgggcgacgggcagg

SEQ ID NO: 3993181 - RNA, 20 nt, Human herpesvirus 6B
gggucgucgaugcgaaggga

SEQ ID NO: 3993182 - RNA, 21 nt, Human herpesvirus 6B
gggugaucauaggacagagga

SEQ ID NO: 3993183 - RNA, 14 nt, Human herpesvirus 6B
ggguguauguuucu

SEQ ID NO: 3993184 - RNA, 12 nt, Human herpesvirus 6B
ggguguggccgg

SEQ ID NO: 3993185 - RNA, 17 nt, Human herpesvirus 6B
ggucgaacccugagacc

SEQ ID NO: 3993186 - RNA, 15 nt, Human herpesvirus 6B
ggucuuuuugccaaa

SEQ ID NO: 3993187 - RNA, 23 nt, Human herpesvirus 6B
gguguccucguccguccccgccg

SEQ ID NO: 3993188 - RNA, 13 nt, Human herpesvirus 6B
gguguggccggca

SEQ ID NO: 3993189 - RNA, 15 nt, Human herpesvirus 6B
gguuagaucugggga

SEQ ID NO: 3993190 - RNA, 15 nt, Human herpesvirus 6B
gguucagacugcugc

SEQ ID NO: 3993191 - RNA, 22 nt, Human herpesvirus 6B
gguugagaaaacaugacggacu

SEQ ID NO: 3993192 - RNA, 18 nt, Human herpesvirus 6B
gguugucagauuucccaa

SEQ ID NO: 3993193 - RNA, 14 nt, Human herpesvirus 6B
gguuuucagacaug

SEQ ID NO: 3993194 - RNA, 17 nt, Human herpesvirus 6B
gguuuuucgauguuucc

SEQ ID NO: 3993195 - RNA, 15 nt, Human herpesvirus 6B
gguuuuugcugucac

SEQ ID NO: 3993196 - RNA, 12 nt, Human herpesvirus 6B
guaaaagggcuc

SEQ ID NO: 3993197 - RNA, 17 nt, Human herpesvirus 6B
guaaacuguucuuucaa

SEQ ID NO: 3993198 - RNA, 18 nt, Human herpesvirus 6B
guaaauuuguaucucaga

SEQ ID NO: 3993199 - RNA, 13 nt, Human herpesvirus 6B
guaacaccagaga

SEQ ID NO: 3993200 - RNA, 13 nt, Human herpesvirus 6B
guaaggcuuagga

SEQ ID NO: 3993201 - RNA, 19 nt, Human herpesvirus 6B
guaaucguuuuugauugua

SEQ ID NO: 3993202 - RNA, 20 nt, Human herpesvirus 6B
guaaucucuagguaaacuuc

SEQ ID NO: 3993203 - RNA, 20 nt, Human herpesvirus 6B
guaaugcguacacugaaauu

SEQ ID NO: 3993204 - RNA, 15 nt, Human herpesvirus 6B
guaauuauugugaca

SEQ ID NO: 3993205 - RNA, 12 nt, Human herpesvirus 6B
guaauuguuaac

SEQ ID NO: 3993206 - RNA, 18 nt, Human herpesvirus 6B
guaccccaagugaaauuc

SEQ ID NO: 3993207 - RNA, 22 nt, Human herpesvirus 6B
guaccccggcuuucucgccgcc

SEQ ID NO: 3993208 - RNA, 17 nt, Human herpesvirus 6B
guaccgcgguugaaguc

SEQ ID NO: 3993209 - RNA, 21 nt, Human herpesvirus 6B
guacguggccgucuccugcaa

SEQ ID NO: 3993210 - RNA, 18 nt, Human herpesvirus 6B
guacuacguguugcuuuu

SEQ ID NO: 3993211 - RNA, 14 nt, Human herpesvirus 6B
guaguugaugcugu

SEQ ID NO: 3993212 - RNA, 13 nt, Human herpesvirus 6B
guauaagaaagac

SEQ ID NO: 3993213 - RNA, 15 nt, Human herpesvirus 6B
guauaauauaaauuc

SEQ ID NO: 3993214 - RNA, 19 nt, Human herpesvirus 6B
guauucgaaaaauauuuua

SEQ ID NO: 3993215 - RNA, 13 nt, Human herpesvirus 6B
guauucuacggga

SEQ ID NO: 3993216 - RNA, 15 nt, Human herpesvirus 6B
gucacacgucccuuc

SEQ ID NO: 3993217 - RNA, 23 nt, Human herpesvirus 6B
gucacgcggaccgacgacaaagg

SEQ ID NO: 3993218 - RNA, 16 nt, Human herpesvirus 6B
gucacucacauagaga

SEQ ID NO: 3993219 - RNA, 15 nt, Human herpesvirus 6B
gucauggaaaaauga

SEQ ID NO: 3993220 - RNA, 19 nt, Human herpesvirus 6B
gucccaacuuguuuucugu

SEQ ID NO: 3993221 - RNA, 19 nt, Human herpesvirus 6B
guccgcgaugcgccacagg

SEQ ID NO: 3993222 - RNA, 18 nt, Human herpesvirus 6B
guccgugacacacagaau

SEQ ID NO: 3993223 - RNA, 17 nt, Human herpesvirus 6B
gucgcagaaucaagaaa

SEQ ID NO: 3993224 - RNA, 21 nt, Human herpesvirus 6B
gucuccgauccgucaggacca

SEQ ID NO: 3993225 - RNA, 18 nt, Human herpesvirus 6B
gucuccugcaauuugaau

SEQ ID NO: 3993226 - RNA, 13 nt, Human herpesvirus 6B
gucuucugugcuu

SEQ ID NO: 3993227 - RNA, 17 nt, Human herpesvirus 6B
gucuugcaaacagcuuu

SEQ ID NO: 3993228 - RNA, 23 nt, Human herpesvirus 6B
gucuugcaaacagcuuuauuccc

SEQ ID NO: 3993229 - RNA, 11 nt, Human herpesvirus 6B
gucuuuccugu

SEQ ID NO: 3993230 - RNA, 21 nt, Human herpesvirus 6B
gucuuugaucuuacuuaaccu

SEQ ID NO: 3993231 - RNA, 13 nt, Human herpesvirus 6B
gucuuugcuuugg

SEQ ID NO: 3993232 - RNA, 13 nt, Human herpesvirus 6B
gugaaaagugcuu

SEQ ID NO: 3993233 - RNA, 18 nt, Human herpesvirus 6B
gugaaacucgggggcagu

SEQ ID NO: 3993234 - RNA, 17 nt, Human herpesvirus 6B
gugaaccuuauguucau

SEQ ID NO: 3993235 - RNA, 18 nt, Human herpesvirus 6B
gugaauugugcaagcugu

SEQ ID NO: 3993236 - RNA, 21 nt, Human herpesvirus 6B
gugaggugauuugaacagaga

SEQ ID NO: 3993237 - RNA, 22 nt, Human herpesvirus 6B
gugaggugauuugaacagagau

SEQ ID NO: 3993238 - RNA, 19 nt, Human herpesvirus 6B
gugauaaaucuaccugccg

SEQ ID NO: 3993239 - RNA, 15 nt, Human herpesvirus 6B
gugaucguggacagu

SEQ ID NO: 3993240 - RNA, 21 nt, Human herpesvirus 6B
gugcaacaaagagcuuuaaag

SEQ ID NO: 3993241 - RNA, 18 nt, Human herpesvirus 6B
gugcaccgagaaauagug

SEQ ID NO: 3993242 - RNA, 18 nt, Human herpesvirus 6B
gugcaguaucuggcuggu

SEQ ID NO: 3993243 - RNA, 13 nt, Human herpesvirus 6B
gugccguggcaga

SEQ ID NO: 3993244 - RNA, 20 nt, Human herpesvirus 6B
gugcguacacggccacccgc

SEQ ID NO: 3993245 - RNA, 23 nt, Human herpesvirus 6B
gugcuuuggaccuugaauguuua

SEQ ID NO: 3993246 - RNA, 21 nt, Human herpesvirus 6B
guggaaacgguuucaaagagu

SEQ ID NO: 3993247 - RNA, 22 nt, Human herpesvirus 6B
guggaaaucuauuaauuuugaa

SEQ ID NO: 3993248 - RNA, 22 nt, Human herpesvirus 6B
guggcaccgaauccggaauuua

SEQ ID NO: 3993249 - RNA, 13 nt, Human herpesvirus 6B
guggcagaagaag

SEQ ID NO: 3993250 - RNA, 22 nt, Human herpesvirus 6B
guggcgcgcguuuuuggugaaa

SEQ ID NO: 3993251 - RNA, 18 nt, Human herpesvirus 6B
gugggcgguagguucacu

SEQ ID NO: 3993252 - RNA, 22 nt, Human herpesvirus 6B
gugguaauacgugaauuucaua

SEQ ID NO: 3993253 - RNA, 18 nt, Human herpesvirus 6B
gugguggccgucugucug

SEQ ID NO: 3993254 - RNA, 15 nt, Human herpesvirus 6B
guguccugagaauga

SEQ ID NO: 3993255 - RNA, 13 nt, Human herpesvirus 6B
guguggcagcaau

SEQ ID NO: 3993256 - RNA, 21 nt, Human herpesvirus 6B
guguuauaacagacauaugca

SEQ ID NO: 3993257 - RNA, 12 nt, Human herpesvirus 6B
guguugaagaac

SEQ ID NO: 3993258 - RNA, 16 nt, Human herpesvirus 6B
guguuguguuugaaac

SEQ ID NO: 3993259 - RNA, 21 nt, Human herpesvirus 6B
guuaaaguccuaucugaguug

SEQ ID NO: 3993260 - RNA, 16 nt, Human herpesvirus 6B
guuaauggagagaaau

SEQ ID NO: 3993261 - RNA, 11 nt, Human herpesvirus 6B
guuaauguuua

SEQ ID NO: 3993262 - RNA, 19 nt, Human herpesvirus 6B
guuaauuccaagaugcagu

SEQ ID NO: 3993263 - RNA, 22 nt, Human herpesvirus 6B
guuacaagcaugcauuguguua

SEQ ID NO: 3993264 - RNA, 12 nt, Human herpesvirus 6B
guuacaguaaaa

SEQ ID NO: 3993265 - RNA, 20 nt, Human herpesvirus 6B
guuagauaaugagauucugu

SEQ ID NO: 3993266 - RNA, 14 nt, Human herpesvirus 6B
guuaggaucagaca

SEQ ID NO: 3993267 - RNA, 12 nt, Human herpesvirus 6B
guuauaugaaug

SEQ ID NO: 3993268 - RNA, 22 nt, Human herpesvirus 6B
guuauuguguucugcucugugu

SEQ ID NO: 3993269 - RNA, 15 nt, Human herpesvirus 6B
guuccaugugucucc

SEQ ID NO: 3993270 - RNA, 18 nt, Human herpesvirus 6B
guucgcgagucugugcuu

SEQ ID NO: 3993271 - RNA, 13 nt, Human herpesvirus 6B
guucuugagcagg

SEQ ID NO: 3993272 - RNA, 22 nt, Human herpesvirus 6B
guucuuucaaaaugaccagaga

SEQ ID NO: 3993273 - RNA, 21 nt, Human herpesvirus 6B
guugccuuuguaaaauguuuc

SEQ ID NO: 3993274 - RNA, 16 nt, Human herpesvirus 6B
guugcgguuucggaaa

SEQ ID NO: 3993275 - RNA, 15 nt, Human herpesvirus 6B
guuguguuuguggac

SEQ ID NO: 3993276 - RNA, 22 nt, Human herpesvirus 6B
guuuaaagugaguuuuggaaau

SEQ ID NO: 3993277 - RNA, 21 nt, Human herpesvirus 6B
guuuagggucgaacccugaga

SEQ ID NO: 3993278 - RNA, 15 nt, Human herpesvirus 6B
guuucuacugcugcu

SEQ ID NO: 3993279 - RNA, 20 nt, Human herpesvirus 6B
aauguuuccaugacugugag

SEQ ID NO: 3993280 - RNA, 13 nt, Human herpesvirus 6B
aauuauaaaugua

SEQ ID NO: 3993281 - RNA, 20 nt, Human herpesvirus 6B
aauucaugccgccugaaacc

SEQ ID NO: 3993282 - RNA, 20 nt, Human herpesvirus 6B
aauucucugauugauccugu

SEQ ID NO: 3993283 - RNA, 15 nt, Human herpesvirus 6B
aauucuuaccaagaa

SEQ ID NO: 3993284 - RNA, 21 nt, Human herpesvirus 6B
aauucuuaccuuuuaagagug

SEQ ID NO: 3993285 - RNA, 16 nt, Human herpesvirus 6B
aauugacaaucuugga

SEQ ID NO: 3993286 - RNA, 13 nt, Human herpesvirus 6B
aauugugucuuug

SEQ ID NO: 3993287 - RNA, 22 nt, Human herpesvirus 6B
aauuuguucgcacaaaaugauu

SEQ ID NO: 3993288 - RNA, 23 nt, Human herpesvirus 6B
aauuuuauugacugugaaaagug

SEQ ID NO: 3993289 - RNA, 16 nt, Human herpesvirus 6B
aauuuuuuguuucuga

SEQ ID NO: 3993290 - RNA, 13 nt, Human herpesvirus 6B
acaaaaccaggaa

SEQ ID NO: 3993291 - RNA, 20 nt, Human herpesvirus 6B
acaaaauuuuuuauggucug

SEQ ID NO: 3993292 - RNA, 11 nt, Human herpesvirus 6B
acaaagguuuu

SEQ ID NO: 3993293 - RNA, 15 nt, Human herpesvirus 6B
acaaauaaaaaauuc

SEQ ID NO: 3993294 - RNA, 22 nt, Human herpesvirus 6B
acaaccaaacaguuucagauga

SEQ ID NO: 3993295 - RNA, 18 nt, Human herpesvirus 6B
acaacgguguggagacac

SEQ ID NO: 3993296 - RNA, 23 nt, Human herpesvirus 6B
acaacugccgccauauuaaaacc

SEQ ID NO: 3993297 - RNA, 15 nt, Human herpesvirus 6B
acaagcuuaauaagu

SEQ ID NO: 3993298 - RNA, 15 nt, Human herpesvirus 6B
acaagggcuuggggc

SEQ ID NO: 3993299 - RNA, 20 nt, Human herpesvirus 6B
acaaguacuacguguugcuu

SEQ ID NO: 3993300 - RNA, 16 nt, Human herpesvirus 6B
acaauaauuacuccca

SEQ ID NO: 3993301 - RNA, 21 nt, Human herpesvirus 6B
acaaugcaugucgaacagcuu

SEQ ID NO: 3993302 - RNA, 21 nt, Human herpesvirus 6B
acaccaucuucagcucagaca

SEQ ID NO: 3993303 - RNA, 21 nt, Human herpesvirus 6B
acaccucguagcgaucuuuua

SEQ ID NO: 3993304 - RNA, 19 nt, Human herpesvirus 6B
acacguuauuuauuuaacg

SEQ ID NO: 3993305 - RNA, 13 nt, Human herpesvirus 6B
acacguuuaucca

SEQ ID NO: 3993306 - RNA, 14 nt, Human herpesvirus 6B
acacuggcgaaggc

SEQ ID NO: 3993307 - RNA, 23 nt, Human herpesvirus 6B
acagaaaaaacaccagaagagcc

SEQ ID NO: 3993308 - RNA, 15 nt, Human herpesvirus 6B
acagaaaaagaacug

SEQ ID NO: 3993309 - RNA, 13 nt, Human herpesvirus 6B
acagaaaauuuca

SEQ ID NO: 3993310 - RNA, 18 nt, Human herpesvirus 6B
acagaaucuucuuugugc

SEQ ID NO: 3993311 - RNA, 15 nt, Human herpesvirus 6B
acagacagggggauc

SEQ ID NO: 3993312 - RNA, 21 nt, Human herpesvirus 6B
acaguauaaauucuuuugugc

SEQ ID NO: 3993313 - RNA, 17 nt, Human herpesvirus 6B
acaguucguccagcagc

SEQ ID NO: 3993314 - RNA, 14 nt, Human herpesvirus 6B
acauagaaucucca

SEQ ID NO: 3993315 - RNA, 17 nt, Human herpesvirus 6B
acauccaaaauacacua

SEQ ID NO: 3993316 - RNA, 14 nt, Human herpesvirus 6B
acaucgcuccauaa

SEQ ID NO: 3993317 - RNA, 23 nt, Human herpesvirus 6B
acaucgugaguuuucaugugaaa

SEQ ID NO: 3993318 - RNA, 13 nt, Human herpesvirus 6B
acaucuaugaugc

SEQ ID NO: 3993319 - RNA, 22 nt, Human herpesvirus 6B
acaugcaacccgccacucuaca

SEQ ID NO: 3993320 - RNA, 20 nt, Human herpesvirus 6B
acauguuuuugauguuuuca

SEQ ID NO: 3993321 - RNA, 20 nt, Human herpesvirus 6B
acauuucgguuuaauagauu

SEQ ID NO: 3993322 - RNA, 20 nt, Human herpesvirus 6B
accaaacaguuucagaugau

SEQ ID NO: 3993323 - RNA, 16 nt, Human herpesvirus 6B
accaaauuuuuaacuc

SEQ ID NO: 3993324 - RNA, 13 nt, Human herpesvirus 6B
accaagaaaucac

SEQ ID NO: 3993325 - RNA, 18 nt, Human herpesvirus 6B
accagcucuguucucucc

SEQ ID NO: 3993326 - RNA, 16 nt, Human herpesvirus 6B
accaucuauuugcaag

SEQ ID NO: 3993327 - RNA, 22 nt, Human herpesvirus 6B
acccaauggcggacaaaaauuc

SEQ ID NO: 3993328 - RNA, 14 nt, Human herpesvirus 6B
accccccucuugca

SEQ ID NO: 3993329 - RNA, 19 nt, Human herpesvirus 6B
accccccucuugcaguggc

SEQ ID NO: 3993330 - RNA, 21 nt, Human herpesvirus 6B
accggagcuuauuuaugaaaa

SEQ ID NO: 3993331 - RNA, 14 nt, Human herpesvirus 6B
accucgcucuccug

SEQ ID NO: 3993332 - RNA, 21 nt, Human herpesvirus 6B
accucgcucuccugugcgucc

SEQ ID NO: 3993333 - RNA, 18 nt, Human herpesvirus 6B
accugcuaacggagcaac

SEQ ID NO: 3993334 - RNA, 23 nt, Human herpesvirus 6B
accugcuaacggagcaaccgcag

SEQ ID NO: 3993335 - RNA, 14 nt, Human herpesvirus 6B
accuggcgcaccgc

SEQ ID NO: 3993336 - RNA, 18 nt, Human herpesvirus 6B
acgaaagacguuugcuuu

SEQ ID NO: 3993337 - RNA, 22 nt, Human herpesvirus 6B
acgaaagacguuugcuuuuuua

SEQ ID NO: 3993338 - RNA, 22 nt, Human herpesvirus 6B
acgacaucaaugcgcuaugcca

SEQ ID NO: 3993339 - RNA, 20 nt, Human herpesvirus 6B
acgaggauuuuuucugccug

SEQ ID NO: 3993340 - RNA, 22 nt, Human herpesvirus 6B
acgauuuucuauuaaaaagacu

SEQ ID NO: 3993341 - RNA, 17 nt, Human herpesvirus 6B
acgccauacgggaaaag

SEQ ID NO: 3993342 - RNA, 15 nt, Human herpesvirus 6B
acgcccccaccuggc

SEQ ID NO: 3993343 - RNA, 22 nt, Human herpesvirus 6B
acgcgcggaccacucgggccgg

SEQ ID NO: 3993344 - RNA, 22 nt, Human herpesvirus 6B
acggaauauauagaagaagaaa

SEQ ID NO: 3993345 - RNA, 16 nt, Human herpesvirus 6B
acggauugacacaaug

SEQ ID NO: 3993346 - RNA, 12 nt, Human herpesvirus 6B
acggcaggagca

SEQ ID NO: 3993347 - RNA, 22 nt, Human herpesvirus 6B
acggcgaggggacggacagagc

SEQ ID NO: 3993348 - RNA, 14 nt, Human herpesvirus 6B
acggcgccucccau

SEQ ID NO: 3993349 - RNA, 12 nt, Human herpesvirus 6B
acgggauaaaga

SEQ ID NO: 3993350 - RNA, 11 nt, Human herpesvirus 6B
acgggcagggc

SEQ ID NO: 3993351 - RNA, 12 nt, Human herpesvirus 6B
acgggcagggcg

SEQ ID NO: 3993352 - RNA, 16 nt, Human herpesvirus 6B
acggugauguugcgau

SEQ ID NO: 3993353 - RNA, 20 nt, Human herpesvirus 6B
acgucauauccagaaaauac

SEQ ID NO: 3993354 - RNA, 20 nt, Human herpesvirus 6B
acguccgugaugauucaaua

SEQ ID NO: 3993355 - RNA, 13 nt, Human herpesvirus 6B
acgucugcguugc

SEQ ID NO: 3993356 - RNA, 21 nt, Human herpesvirus 6B
acgucugcguugcccucccgc

SEQ ID NO: 3993357 - RNA, 16 nt, Human herpesvirus 6B
acgucuuuggacugaa

SEQ ID NO: 3993358 - RNA, 11 nt, Human herpesvirus 6B
acguuaaaagg

SEQ ID NO: 3993359 - RNA, 20 nt, Human herpesvirus 6B
acguugggauugcugcuuga

SEQ ID NO: 3993360 - RNA, 18 nt, Human herpesvirus 6B
acuacagcuaagauuaac

SEQ ID NO: 3993361 - RNA, 19 nt, Human herpesvirus 6B
acuacauccuuuagaauac

SEQ ID NO: 3993362 - RNA, 22 nt, Human herpesvirus 6B
acuacauuuuaguauuuaugcu

SEQ ID NO: 3993363 - RNA, 18 nt, Human herpesvirus 6B
acucauuugcaauuguuu

SEQ ID NO: 3993364 - RNA, 18 nt, Human herpesvirus 6B
acuccgagccggacagga

SEQ ID NO: 3993365 - RNA, 15 nt, Human herpesvirus 6B
acucgcaagaacuag

SEQ ID NO: 3993366 - RNA, 20 nt, Human herpesvirus 6B
acucgcuuacgaucuuuacg

SEQ ID NO: 3993367 - RNA, 12 nt, Human herpesvirus 6B
acucucuuucag

SEQ ID NO: 3993368 - RNA, 21 nt, Human herpesvirus 6B
acucugcaacuuuauuugaaa

SEQ ID NO: 3993369 - RNA, 21 nt, Human herpesvirus 6B
acugcaugcuaauaaaauaua

SEQ ID NO: 3993370 - RNA, 20 nt, Human herpesvirus 6B
acugccgcaucgcaccgcag

SEQ ID NO: 3993371 - RNA, 16 nt, Human herpesvirus 6B
gagccggacaggaggu

SEQ ID NO: 3993372 - RNA, 17 nt, Human herpesvirus 6B
gagccuuuaaccauguu

SEQ ID NO: 3993373 - RNA, 19 nt, Human herpesvirus 6B
gagccuuuaaccauguuuu

SEQ ID NO: 3993374 - RNA, 20 nt, Human herpesvirus 6B
gagcggagaggcgcgggaca

SEQ ID NO: 3993375 - RNA, 19 nt, Human herpesvirus 6B
gaggaaacgcgcugggacu

SEQ ID NO: 3993376 - RNA, 16 nt, Human herpesvirus 6B
gaggaaaugcagcagu

SEQ ID NO: 3993377 - RNA, 18 nt, Human herpesvirus 6B
gaggacgcaaagagagac

SEQ ID NO: 3993378 - RNA, 14 nt, Human herpesvirus 6B
gaggaugcuuugcu

SEQ ID NO: 3993379 - RNA, 13 nt, Human herpesvirus 6B
gaggcccagaggu

SEQ ID NO: 3993380 - RNA, 21 nt, Human herpesvirus 6B
gaggugauugcuucauuucug

SEQ ID NO: 3993381 - RNA, 14 nt, Human herpesvirus 6B
gagguuuuuucacc

SEQ ID NO: 3993382 - RNA, 22 nt, Human herpesvirus 6B
gagguuuuuucaccccccucuu

SEQ ID NO: 3993383 - RNA, 16 nt, Human herpesvirus 6B
gaguaugacagaaauc

SEQ ID NO: 3993384 - RNA, 16 nt, Human herpesvirus 6B
gaguauggagaaaaac

SEQ ID NO: 3993385 - RNA, 18 nt, Human herpesvirus 6B
gaguauggugucugaaaa

SEQ ID NO: 3993386 - RNA, 21 nt, Human herpesvirus 6B
gagugcgacaggagauagagc

SEQ ID NO: 3993387 - RNA, 17 nt, Human herpesvirus 6B
gaguugcacauguuucu

SEQ ID NO: 3993388 - RNA, 17 nt, Human herpesvirus 6B
gauaacggcgcagaauu

SEQ ID NO: 3993389 - RNA, 21 nt, Human herpesvirus 6B
gauaauuucuuuggagggaau

SEQ ID NO: 3993390 - RNA, 21 nt, Human herpesvirus 6B
gauagcauaauccuuuucugu

SEQ ID NO: 3993391 - RNA, 18 nt, Human herpesvirus 6B
gauauacgauggacagaa

SEQ ID NO: 3993392 - RNA, 19 nt, Human herpesvirus 6B
gauauaguuauucagauuu

SEQ ID NO: 3993393 - RNA, 13 nt, Human herpesvirus 6B
gaucacucagauu

SEQ ID NO: 3993394 - RNA, 18 nt, Human herpesvirus 6B
gaucagauuaucaaggcu

SEQ ID NO: 3993395 - RNA, 16 nt, Human herpesvirus 6B
gaucauaggacagagg

SEQ ID NO: 3993396 - RNA, 21 nt, Human herpesvirus 6B
gaucugugcgccuuugcucag

SEQ ID NO: 3993397 - RNA, 13 nt, Human herpesvirus 6B
gaugaaguuccac

SEQ ID NO: 3993398 - RNA, 15 nt, Human herpesvirus 6B
gaugaggcccagagg

SEQ ID NO: 3993399 - RNA, 16 nt, Human herpesvirus 6B
gaugcagcguuggaaa

SEQ ID NO: 3993400 - RNA, 14 nt, Human herpesvirus 6B
gaugccuguaggga

SEQ ID NO: 3993401 - RNA, 14 nt, Human herpesvirus 6B
gaugcgaagggagu

SEQ ID NO: 3993402 - RNA, 19 nt, Human herpesvirus 6B
gauggauaagauuuaccac

SEQ ID NO: 3993403 - RNA, 22 nt, Human herpesvirus 6B
gauguauaauuuacacaauccu

SEQ ID NO: 3993404 - RNA, 19 nt, Human herpesvirus 6B
gauuaugcgaauuaaaacu

SEQ ID NO: 3993405 - RNA, 12 nt, Human herpesvirus 6B
gauucaaaggau

SEQ ID NO: 3993406 - RNA, 14 nt, Human herpesvirus 6B
gauucuuuaaagau

SEQ ID NO: 3993407 - RNA, 22 nt, Human herpesvirus 6B
gauugagucuccggaguuuauu

SEQ ID NO: 3993408 - RNA, 16 nt, Human herpesvirus 6B
gauuguuacuagugau

SEQ ID NO: 3993409 - RNA, 11 nt, Human herpesvirus 6B
gauuguucgcu

SEQ ID NO: 3993410 - RNA, 19 nt, Human herpesvirus 6B
gauuuucagugucagcauu

SEQ ID NO: 3993411 - RNA, 21 nt, Human herpesvirus 6B
gauuuuugcgcaauucuucuc

SEQ ID NO: 3993412 - RNA, 19 nt, Human herpesvirus 6B
gcaaaaaaauauuggauuu

SEQ ID NO: 3993413 - RNA, 15 nt, Human herpesvirus 6B
gcaaaagagaaggaa

SEQ ID NO: 3993414 - RNA, 22 nt, Human herpesvirus 6B
gcaaaaugaaguacaauacuuu

SEQ ID NO: 3993415 - RNA, 16 nt, Human herpesvirus 6B
gcaaacucaaagaaag

SEQ ID NO: 3993416 - RNA, 23 nt, Human herpesvirus 6B
gcaaaugaauguguucauagagc

SEQ ID NO: 3993417 - RNA, 14 nt, Human herpesvirus 6B
gcaacuaagcugua

SEQ ID NO: 3993418 - RNA, 22 nt, Human herpesvirus 6B
gcaacuaagcuguaugacaucu

SEQ ID NO: 3993419 - RNA, 14 nt, Human herpesvirus 6B
gcaacuugcugucg

SEQ ID NO: 3993420 - RNA, 20 nt, Human herpesvirus 6B
gcaagcccggagaacugauc

SEQ ID NO: 3993421 - RNA, 22 nt, Human herpesvirus 6B
gcaccgagggcgggcggacggc

SEQ ID NO: 3993422 - RNA, 15 nt, Human herpesvirus 6B
gcacgaaccaaaaug

SEQ ID NO: 3993423 - RNA, 12 nt, Human herpesvirus 6B
gcagaagcuguc

SEQ ID NO: 3993424 - RNA, 18 nt, Human herpesvirus 6B
gcagaaucaagaaacacu

SEQ ID NO: 3993425 - RNA, 22 nt, Human herpesvirus 6B
gcagacauucuuguucgggcca

SEQ ID NO: 3993426 - RNA, 14 nt, Human herpesvirus 6B
gcagacgugagaca

SEQ ID NO: 3993427 - RNA, 19 nt, Human herpesvirus 6B
gcagagccguuagaaaaau

SEQ ID NO: 3993428 - RNA, 18 nt, Human herpesvirus 6B
gcagaggucuuugcuuug

SEQ ID NO: 3993429 - RNA, 20 nt, Human herpesvirus 6B
gcagauaagaauuuccaggg

SEQ ID NO: 3993430 - RNA, 16 nt, Human herpesvirus 6B
gcagauauauggauca

SEQ ID NO: 3993431 - RNA, 19 nt, Human herpesvirus 6B
gcagauuuacgacacgcuc

SEQ ID NO: 3993432 - RNA, 23 nt, Human herpesvirus 6B
gcaggcuccccaggcgcagcagc

SEQ ID NO: 3993433 - RNA, 23 nt, Human herpesvirus 6B
gcagucaguaauaauauaaaaga

SEQ ID NO: 3993434 - RNA, 15 nt, Human herpesvirus 6B
gcagucgcggcggcc

SEQ ID NO: 3993435 - RNA, 12 nt, Human herpesvirus 6B
gcaguugucugg

SEQ ID NO: 3993436 - RNA, 12 nt, Human herpesvirus 6B
gcaguuugugaa

SEQ ID NO: 3993437 - RNA, 15 nt, Human herpesvirus 6B
gcauaacuaugaauu

SEQ ID NO: 3993438 - RNA, 18 nt, Human herpesvirus 6B
gcauagacugaacacaaa

SEQ ID NO: 3993439 - RNA, 14 nt, Human herpesvirus 6B
gcauauauaugaau

SEQ ID NO: 3993440 - RNA, 13 nt, Human herpesvirus 6B
gcauggaaaaggc

SEQ ID NO: 3993441 - RNA, 16 nt, Human herpesvirus 6B
gccaaucauaagaaac

SEQ ID NO: 3993442 - RNA, 12 nt, Human herpesvirus 6B
gccaauucauug

SEQ ID NO: 3993443 - RNA, 12 nt, Human herpesvirus 6B
gccacauuagcu

SEQ ID NO: 3993444 - RNA, 22 nt, Human herpesvirus 6B
gccagcaauuucggcaagaaag

SEQ ID NO: 3993445 - RNA, 16 nt, Human herpesvirus 6B
gcccgggcgcggggcg

SEQ ID NO: 3993446 - RNA, 21 nt, Human herpesvirus 6B
gcccucccgcagcuccuuccg

SEQ ID NO: 3993447 - RNA, 15 nt, Human herpesvirus 6B
gcccucgucuguugc

SEQ ID NO: 3993448 - RNA, 14 nt, Human herpesvirus 6B
gcccugcuccguuc

SEQ ID NO: 3993449 - RNA, 19 nt, Human herpesvirus 6B
gccgaagaaagaggcgccg

SEQ ID NO: 3993450 - RNA, 16 nt, Human herpesvirus 6B
gccgcgcuggucgccg

SEQ ID NO: 3993451 - RNA, 14 nt, Human herpesvirus 6B
gccgcuuaaaucaa

SEQ ID NO: 3993452 - RNA, 15 nt, Human herpesvirus 6B
gccggagcccugaga

SEQ ID NO: 3993453 - RNA, 21 nt, Human herpesvirus 6B
gccgucgucgcucucccucuu

SEQ ID NO: 3993454 - RNA, 16 nt, Human herpesvirus 6B
gccguuguuaaugaau

SEQ ID NO: 3993455 - RNA, 13 nt, Human herpesvirus 6B
gccuauuucucuu

SEQ ID NO: 3993456 - RNA, 23 nt, Human herpesvirus 6B
gccuccgccggguaugagccgcc

SEQ ID NO: 3993457 - RNA, 22 nt, Human herpesvirus 6B
gccucucuccgccuccucuuuu

SEQ ID NO: 3993458 - RNA, 22 nt, Human herpesvirus 6B
gccugaaggcuacuauaaacaa

SEQ ID NO: 3993459 - RNA, 17 nt, Human herpesvirus 6B
gcgaaucgcuuaaagaa

SEQ ID NO: 3993460 - RNA, 14 nt, Human herpesvirus 6B
gcgacaaaaaaaua

SEQ ID NO: 3993461 - RNA, 20 nt, Human herpesvirus 6B
gcgacuauuuaacugggaaa

SEQ ID NO: 3993462 - RNA, 18 nt, Human herpesvirus 6B
gcgaggggacggacagag

SEQ ID NO: 3993463 - RNA, 16 nt, Human herpesvirus 6B
gcgauauggaaacacu

SEQ ID NO: 3993464 - RNA, 19 nt, Human herpesvirus 6B
gcgaucauaaaacugccaa

SEQ ID NO: 3993465 - RNA, 15 nt, Human herpesvirus 6B
gcgccgucagcggca

SEQ ID NO: 3993466 - RNA, 20 nt, Human herpesvirus 6B
gcgccugccuacacugcgaa

SEQ ID NO: 3993467 - RNA, 13 nt, Human herpesvirus 6B
gcgcgcguugggg

SEQ ID NO: 3993468 - RNA, 14 nt, Human herpesvirus 6B
gcgcggggcgcacc

SEQ ID NO: 3993469 - RNA, 16 nt, Human herpesvirus 6B
gcgcggggcgcaccgg

SEQ ID NO: 3993470 - RNA, 19 nt, Human herpesvirus 6B
gcgcguuuaucaugagaga

SEQ ID NO: 3993471 - RNA, 14 nt, Human herpesvirus 6B
gcgcugcuggggcu

SEQ ID NO: 3993472 - RNA, 23 nt, Human herpesvirus 6B
gcgcugggacuccgagccggaca

SEQ ID NO: 3993473 - RNA, 19 nt, Human herpesvirus 6B
gcggcaugaguggaguuga

SEQ ID NO: 3993474 - RNA, 21 nt, Human herpesvirus 6B
gcggcugauauacgauggaca

SEQ ID NO: 3993475 - RNA, 12 nt, Human herpesvirus 6B
gcgggaccuggc

SEQ ID NO: 3993476 - RNA, 18 nt, Human herpesvirus 6B
gcgggacgugaucugcgg

SEQ ID NO: 3993477 - RNA, 17 nt, Human herpesvirus 6B
gcgguuagaucugggga

SEQ ID NO: 3993478 - RNA, 23 nt, Human herpesvirus 6B
gcgucuuaacguucguccggggu

SEQ ID NO: 3993479 - RNA, 17 nt, Human herpesvirus 6B
gcguguaauuguugaaa

SEQ ID NO: 3993480 - RNA, 17 nt, Human herpesvirus 6B
gcguguuuuggaauuuc

SEQ ID NO: 3993481 - RNA, 18 nt, Human herpesvirus 6B
gcguuaucgacggcagcg

SEQ ID NO: 3993482 - RNA, 17 nt, Human herpesvirus 6B
gcuaaacuuuacaucaa

SEQ ID NO: 3993483 - RNA, 14 nt, Human herpesvirus 6B
gcuauacuacgaga

SEQ ID NO: 3993484 - RNA, 16 nt, Human herpesvirus 6B
cacccugaagggaccg

SEQ ID NO: 3993485 - RNA, 22 nt, Human herpesvirus 6B
caccggcgacacgcgcggacca

SEQ ID NO: 3993486 - RNA, 20 nt, Human herpesvirus 6B
caccgucccucucaccccca

SEQ ID NO: 3993487 - RNA, 22 nt, Human herpesvirus 6B
caccgucccucucacccccacu

SEQ ID NO: 3993488 - RNA, 15 nt, Human herpesvirus 6B
caccucgcaaagucu

SEQ ID NO: 3993489 - RNA, 21 nt, Human herpesvirus 6B
cacgacauggaacuucauagc

SEQ ID NO: 3993490 - RNA, 21 nt, Human herpesvirus 6B
cacgcccccaccuggcgcacc

SEQ ID NO: 3993491 - RNA, 15 nt, Human herpesvirus 6B
cacgcgagacaucgg

SEQ ID NO: 3993492 - RNA, 19 nt, Human herpesvirus 6B
cacgcgcggaccacucggg

SEQ ID NO: 3993493 - RNA, 21 nt, Human herpesvirus 6B
cacggagaacacuuagagggu

SEQ ID NO: 3993494 - RNA, 20 nt, Human herpesvirus 6B
cacggagugcgacaggagau

SEQ ID NO: 3993495 - RNA, 14 nt, Human herpesvirus 6B
cacggcgccuccca

SEQ ID NO: 3993496 - RNA, 19 nt, Human herpesvirus 6B
cacguucuuugaacaguga

SEQ ID NO: 3993497 - RNA, 16 nt, Human herpesvirus 6B
cacucacauagagaag

SEQ ID NO: 3993498 - RNA, 13 nt, Human herpesvirus 6B
cacucauuugcaa

SEQ ID NO: 3993499 - RNA, 22 nt, Human herpesvirus 6B
cacugaaauuuacaaucaucug

SEQ ID NO: 3993500 - RNA, 14 nt, Human herpesvirus 6B
cagaaaaagaacug

SEQ ID NO: 3993501 - RNA, 14 nt, Human herpesvirus 6B
cagaaaagcaaaca

SEQ ID NO: 3993502 - RNA, 20 nt, Human herpesvirus 6B
cagaacagagacccuccugg

SEQ ID NO: 3993503 - RNA, 14 nt, Human herpesvirus 6B
cagaagagccaaca

SEQ ID NO: 3993504 - RNA, 15 nt, Human herpesvirus 6B
cagaauacaaaaacg

SEQ ID NO: 3993505 - RNA, 15 nt, Human herpesvirus 6B
cagaaucaagaaaca

SEQ ID NO: 3993506 - RNA, 23 nt, Human herpesvirus 6B
cagaaucuaaaucgcgagacaga

SEQ ID NO: 3993507 - RNA, 18 nt, Human herpesvirus 6B
cagacaaaacacaauaaa

SEQ ID NO: 3993508 - RNA, 12 nt, Human herpesvirus 6B
cagacgacagcg

SEQ ID NO: 3993509 - RNA, 17 nt, Human herpesvirus 6B
cagagagccgcagaggc

SEQ ID NO: 3993510 - RNA, 18 nt, Human herpesvirus 6B
cagagaucagcaugggca

SEQ ID NO: 3993511 - RNA, 18 nt, Human herpesvirus 6B
cagagauuuuuuaaauaa

SEQ ID NO: 3993512 - RNA, 11 nt, Human herpesvirus 6B
cagagcacaca

SEQ ID NO: 3993513 - RNA, 15 nt, Human herpesvirus 6B
cagaggaagaaagga

SEQ ID NO: 3993514 - RNA, 16 nt, Human herpesvirus 6B
cagauaauaaauaucc

SEQ ID NO: 3993515 - RNA, 13 nt, Human herpesvirus 6B
cagaugaggagga

SEQ ID NO: 3993516 - RNA, 13 nt, Human herpesvirus 6B
cagcagcagcucc

SEQ ID NO: 3993517 - RNA, 11 nt, Human herpesvirus 6B
cagcaugucau

SEQ ID NO: 3993518 - RNA, 15 nt, Human herpesvirus 6B
cagcccugaagaaga

SEQ ID NO: 3993519 - RNA, 13 nt, Human herpesvirus 6B
cagcuaaucacuu

SEQ ID NO: 3993520 - RNA, 19 nt, Human herpesvirus 6B
cagcugcaugguccacaga

SEQ ID NO: 3993521 - RNA, 18 nt, Human herpesvirus 6B
caggacggggccucccuc

SEQ ID NO: 3993522 - RNA, 17 nt, Human herpesvirus 6B
caggagcaggcucccca

SEQ ID NO: 3993523 - RNA, 22 nt, Human herpesvirus 6B
caggcaccauguucgccucucc

SEQ ID NO: 3993524 - RNA, 18 nt, Human herpesvirus 6B
caggcuagcaugguguga

SEQ ID NO: 3993525 - RNA, 13 nt, Human herpesvirus 6B
caggcuccccagg

SEQ ID NO: 3993526 - RNA, 20 nt, Human herpesvirus 6B
cagggacgcuugcuguaaag

SEQ ID NO: 3993527 - RNA, 21 nt, Human herpesvirus 6B
cagggggaucgacgaccaggc

SEQ ID NO: 3993528 - RNA, 15 nt, Human herpesvirus 6B
cagguuucuccgcac

SEQ ID NO: 3993529 - RNA, 15 nt, Human herpesvirus 6B
caguaaaaaagccga

SEQ ID NO: 3993530 - RNA, 14 nt, Human herpesvirus 6B
caguaaaacaugua

SEQ ID NO: 3993531 - RNA, 18 nt, Human herpesvirus 6B
caguaaaacauguagugg

SEQ ID NO: 3993532 - RNA, 13 nt, Human herpesvirus 6B
caguauaaauucu

SEQ ID NO: 3993533 - RNA, 18 nt, Human herpesvirus 6B
caguuguacucaaaguau

SEQ ID NO: 3993534 - RNA, 16 nt, Human herpesvirus 6B
caguuucagaugauca

SEQ ID NO: 3993535 - RNA, 22 nt, Human herpesvirus 6B
cauaacuaugaauuagcagaag

SEQ ID NO: 3993536 - RNA, 14 nt, Human herpesvirus 6B
cauacauccagaaa

SEQ ID NO: 3993537 - RNA, 19 nt, Human herpesvirus 6B
cauacgacugacgauuuca

SEQ ID NO: 3993538 - RNA, 21 nt, Human herpesvirus 6B
cauacgacugacgauuucauu

SEQ ID NO: 3993539 - RNA, 15 nt, Human herpesvirus 6B
cauacgaggaugaag

SEQ ID NO: 3993540 - RNA, 20 nt, Human herpesvirus 6B
cauagagcauccuguuuucc

SEQ ID NO: 3993541 - RNA, 21 nt, Human herpesvirus 6B
caucgaugauuuuucugccua

SEQ ID NO: 3993542 - RNA, 19 nt, Human herpesvirus 6B
caucgucuccuauauuuuc

SEQ ID NO: 3993543 - RNA, 19 nt, Human herpesvirus 6B
caucuaugcgugugaaagu

SEQ ID NO: 3993544 - RNA, 15 nt, Human herpesvirus 6B
caugaaaacauucag

SEQ ID NO: 3993545 - RNA, 17 nt, Human herpesvirus 6B
caugacugugaggugau

SEQ ID NO: 3993546 - RNA, 20 nt, Human herpesvirus 6B
caugaugaucugcuuuguuu

SEQ ID NO: 3993547 - RNA, 14 nt, Human herpesvirus 6B
caugggagaaauaa

SEQ ID NO: 3993548 - RNA, 22 nt, Human herpesvirus 6B
cauguaaaauuaccucaucccu

SEQ ID NO: 3993549 - RNA, 14 nt, Human herpesvirus 6B
caugucuuacagcu

SEQ ID NO: 3993550 - RNA, 15 nt, Human herpesvirus 6B
cauguuaacaauaaa

SEQ ID NO: 3993551 - RNA, 20 nt, Human herpesvirus 6B
cauucgauuaaugccacagg

SEQ ID NO: 3993552 - RNA, 20 nt, Human herpesvirus 6B
cauucuugcagauuucacuu

SEQ ID NO: 3993553 - RNA, 15 nt, Human herpesvirus 6B
cauugagguauugga

SEQ ID NO: 3993554 - RNA, 17 nt, Human herpesvirus 6B
cauugauaguggcuuca

SEQ ID NO: 3993555 - RNA, 18 nt, Human herpesvirus 6B
cauugugagaacagcgca

SEQ ID NO: 3993556 - RNA, 15 nt, Human herpesvirus 6B
cauuuaccagagaua

SEQ ID NO: 3993557 - RNA, 19 nt, Human herpesvirus 6B
cauuucuaucuacaaaaua

SEQ ID NO: 3993558 - RNA, 23 nt, Human herpesvirus 6B
cauuuugauaucgauucuguaau

SEQ ID NO: 3993559 - RNA, 12 nt, Human herpesvirus 6B
ccaaaagacuau

SEQ ID NO: 3993560 - RNA, 14 nt, Human herpesvirus 6B
ccaaaagagaaaga

SEQ ID NO: 3993561 - RNA, 23 nt, Human herpesvirus 6B
ccaacacuguuguuaaucuguuu

SEQ ID NO: 3993562 - RNA, 19 nt, Human herpesvirus 6B
ccaaccaaaugccucgugg

SEQ ID NO: 3993563 - RNA, 18 nt, Human herpesvirus 6B
ccaagugucucauggaaa

SEQ ID NO: 3993564 - RNA, 21 nt, Human herpesvirus 6B
ccacauuagcugcuaaaugug

SEQ ID NO: 3993565 - RNA, 22 nt, Human herpesvirus 6B
ccacauuagcugcuaaauguga

SEQ ID NO: 3993566 - RNA, 22 nt, Human herpesvirus 6B
ccacggcaacgcuccucccacg

SEQ ID NO: 3993567 - RNA, 15 nt, Human herpesvirus 6B
ccagaugcagucucc

SEQ ID NO: 3993568 - RNA, 19 nt, Human herpesvirus 6B
ccagcucuguucucuccca

SEQ ID NO: 3993569 - RNA, 14 nt, Human herpesvirus 6B
ccaggauagaaaaa

SEQ ID NO: 3993570 - RNA, 17 nt, Human herpesvirus 6B
ccagucagauaaugaau

SEQ ID NO: 3993571 - RNA, 19 nt, Human herpesvirus 6B
ccauaccgggacagcaccc

SEQ ID NO: 3993572 - RNA, 18 nt, Human herpesvirus 6B
ccauguucgccucucccg

SEQ ID NO: 3993573 - RNA, 17 nt, Human herpesvirus 6B
cccaacagaagccacca

SEQ ID NO: 3993574 - RNA, 16 nt, Human herpesvirus 6B
ccccaggcgcagcagc

SEQ ID NO: 3993575 - RNA, 14 nt, Human herpesvirus 6B
cccggaguacacgu

SEQ ID NO: 3993576 - RNA, 22 nt, Human herpesvirus 6B
cccggggaggcgacgacgggga

SEQ ID NO: 3993577 - RNA, 12 nt, Human herpesvirus 6B
cccuccaucccc

SEQ ID NO: 3993578 - RNA, 14 nt, Human herpesvirus 6B
cccucccgcagcuc

SEQ ID NO: 3993579 - RNA, 20 nt, Human herpesvirus 6B
cccugcgggacgugaucugc

SEQ ID NO: 3993580 - RNA, 11 nt, Human herpesvirus 6B
ccgaacccggc

SEQ ID NO: 3993581 - RNA, 16 nt, Human herpesvirus 6B
ccgaacgccuccacgg

SEQ ID NO: 3993582 - RNA, 16 nt, Human herpesvirus 6B
ccgagcgggcuccguc

SEQ ID NO: 3993583 - RNA, 23 nt, Human herpesvirus 6B
ccgcacaguucguccagcagcgg

SEQ ID NO: 3993584 - RNA, 11 nt, Human herpesvirus 6B
ccgccuucucu

SEQ ID NO: 3993585 - RNA, 19 nt, Human herpesvirus 6B
ccgcggcgcugggcuccuc

SEQ ID NO: 3993586 - RNA, 14 nt, Human herpesvirus 6B
ccgcgggccagccc

SEQ ID NO: 3993587 - RNA, 18 nt, Human herpesvirus 6B
ccgcgucuccgauccguc

SEQ ID NO: 3993588 - RNA, 19 nt, Human herpesvirus 6B
ccgcguggaagccgcugca

SEQ ID NO: 3993589 - RNA, 21 nt, Human herpesvirus 6B
ccgcuccggacccuccacgcc

SEQ ID NO: 3993590 - RNA, 10 nt, Human herpesvirus 6B
ccggccaauu

SEQ ID NO: 3993591 - RNA, 22 nt, Human herpesvirus 6B
ccggcccguccaccgucccucu

SEQ ID NO: 3993592 - RNA, 15 nt, Human herpesvirus 6B
ccgggacagcacccg

SEQ ID NO: 3993593 - RNA, 14 nt, Human herpesvirus 6B
ccgggcgacgagag

SEQ ID NO: 3993594 - RNA, 16 nt, Human herpesvirus 6B
ccgggcgcggggcgca

SEQ ID NO: 3993595 - RNA, 12 nt, Human herpesvirus 6B
ccguacccagga

SEQ ID NO: 3993596 - RNA, 22 nt, Human herpesvirus 6B
ccguccccgccgcgcuggucgc

SEQ ID NO: 3993597 - RNA, 20 nt, Human herpesvirus 6B
gaaagguguggugaaagaca

SEQ ID NO: 3993598 - RNA, 14 nt, Human herpesvirus 6B
gaaaguuuuggaaa

SEQ ID NO: 3993599 - RNA, 20 nt, Human herpesvirus 6B
gaaaguuuuggaaaauguaa

SEQ ID NO: 3993600 - RNA, 21 nt, Human herpesvirus 6B
gaaauaccaaagaaauuuauu

SEQ ID NO: 3993601 - RNA, 20 nt, Human herpesvirus 6B
gaaaucuuuuucggauuuua

SEQ ID NO: 3993602 - RNA, 15 nt, Human herpesvirus 6B
gaaaugcagcaguuu

SEQ ID NO: 3993603 - RNA, 17 nt, Human herpesvirus 6B
gaaauguugucaaucgu

SEQ ID NO: 3993604 - RNA, 15 nt, Human herpesvirus 6B
gaaauuuacaaucau

SEQ ID NO: 3993605 - RNA, 22 nt, Human herpesvirus 6B
gaacaaaaggucagaugcaaaa

SEQ ID NO: 3993606 - RNA, 14 nt, Human herpesvirus 6B
gaacagaaauuucu

SEQ ID NO: 3993607 - RNA, 13 nt, Human herpesvirus 6B
gaacagagauuuu

SEQ ID NO: 3993608 - RNA, 22 nt, Human herpesvirus 6B
gaaccauagguguuugcagaua

SEQ ID NO: 3993609 - RNA, 12 nt, Human herpesvirus 6B
gaacuauuucuu

SEQ ID NO: 3993610 - RNA, 15 nt, Human herpesvirus 6B
gaagaagacgaagaa

SEQ ID NO: 3993611 - RNA, 22 nt, Human herpesvirus 6B
gaagacaucuuaaauuucuaug

SEQ ID NO: 3993612 - RNA, 17 nt, Human herpesvirus 6B
gaagagguggcggcuca

SEQ ID NO: 3993613 - RNA, 22 nt, Human herpesvirus 6B
gaagagguucagacugcugcug

SEQ ID NO: 3993614 - RNA, 17 nt, Human herpesvirus 6B
gaagccgcugcagugug

SEQ ID NO: 3993615 - RNA, 22 nt, Human herpesvirus 6B
gaagggauggcagaucuugaaa

SEQ ID NO: 3993616 - RNA, 15 nt, Human herpesvirus 6B
gaagguaucaaagaa

SEQ ID NO: 3993617 - RNA, 14 nt, Human herpesvirus 6B
gaagucuuuccugu

SEQ ID NO: 3993618 - RNA, 21 nt, Human herpesvirus 6B
gaauaacagaugaggaggagg

SEQ ID NO: 3993619 - RNA, 22 nt, Human herpesvirus 6B
gaauauuuaaugacguaugauu

SEQ ID NO: 3993620 - RNA, 20 nt, Human herpesvirus 6B
gaaucagaucacucagauuu

SEQ ID NO: 3993621 - RNA, 22 nt, Human herpesvirus 6B
gaaucagaucacucagauuuca

SEQ ID NO: 3993622 - RNA, 15 nt, Human herpesvirus 6B
gaaucccuugucugg

SEQ ID NO: 3993623 - RNA, 15 nt, Human herpesvirus 6B
gaauccgcgggccag

SEQ ID NO: 3993624 - RNA, 23 nt, Human herpesvirus 6B
gaaugagggauucguaguuuaug

SEQ ID NO: 3993625 - RNA, 19 nt, Human herpesvirus 6B
gaauguguucauagagcau

SEQ ID NO: 3993626 - RNA, 15 nt, Human herpesvirus 6B
gaauuaugacugaca

SEQ ID NO: 3993627 - RNA, 17 nt, Human herpesvirus 6B
gaauucagcuggacaga

SEQ ID NO: 3993628 - RNA, 19 nt, Human herpesvirus 6B
gaauucucauuuaaaagcg

SEQ ID NO: 3993629 - RNA, 14 nt, Human herpesvirus 6B
gaauugguuugcuu

SEQ ID NO: 3993630 - RNA, 18 nt, Human herpesvirus 6B
gaauuucauagauugcac

SEQ ID NO: 3993631 - RNA, 16 nt, Human herpesvirus 6B
gacaauuuaucgugcu

SEQ ID NO: 3993632 - RNA, 19 nt, Human herpesvirus 6B
gacaccacauaacaaaaaa

SEQ ID NO: 3993633 - RNA, 21 nt, Human herpesvirus 6B
gacagaguucgguccaaggau

SEQ ID NO: 3993634 - RNA, 15 nt, Human herpesvirus 6B
gacagcgggugcuca

SEQ ID NO: 3993635 - RNA, 20 nt, Human herpesvirus 6B
gacagcgugaugaggcccag

SEQ ID NO: 3993636 - RNA, 23 nt, Human herpesvirus 6B
gacagggggaucgacgaccaggc

SEQ ID NO: 3993637 - RNA, 16 nt, Human herpesvirus 6B
gacaucaaugcgcuau

SEQ ID NO: 3993638 - RNA, 22 nt, Human herpesvirus 6B
gacauugguugauuuuuguaaa

SEQ ID NO: 3993639 - RNA, 15 nt, Human herpesvirus 6B
gaccaacaugccgau

SEQ ID NO: 3993640 - RNA, 20 nt, Human herpesvirus 6B
gaccacucgggccggucggg

SEQ ID NO: 3993641 - RNA, 13 nt, Human herpesvirus 6B
gaccagcucuguu

SEQ ID NO: 3993642 - RNA, 19 nt, Human herpesvirus 6B
gacccuccacgccccuccg

SEQ ID NO: 3993643 - RNA, 15 nt, Human herpesvirus 6B
gaccgaauuauguau

SEQ ID NO: 3993644 - RNA, 23 nt, Human herpesvirus 6B
gaccgcagucgcggcggccccgc

SEQ ID NO: 3993645 - RNA, 18 nt, Human herpesvirus 6B
gaccugaucacagagaaa

SEQ ID NO: 3993646 - RNA, 15 nt, Human herpesvirus 6B
gacgaauugaguaga

SEQ ID NO: 3993647 - RNA, 12 nt, Human herpesvirus 6B
gacgauuucauu

SEQ ID NO: 3993648 - RNA, 19 nt, Human herpesvirus 6B
gacgccuaguguuaaagau

SEQ ID NO: 3993649 - RNA, 22 nt, Human herpesvirus 6B
gacggaauauauagaagaagaa

SEQ ID NO: 3993650 - RNA, 14 nt, Human herpesvirus 6B
gacgggucggucug

SEQ ID NO: 3993651 - RNA, 19 nt, Human herpesvirus 6B
gacgucaguggacaaauaa

SEQ ID NO: 3993652 - RNA, 19 nt, Human herpesvirus 6B
gacuacucuggcugaagga

SEQ ID NO: 3993653 - RNA, 19 nt, Human herpesvirus 6B
gacuccgagccggacagga

SEQ ID NO: 3993654 - RNA, 24 nt, Human herpesvirus 6B
gacugcggggcgucgggcgacggg

SEQ ID NO: 3993655 - RNA, 20 nt, Human herpesvirus 6B
gacuuuucugaugacaauau

SEQ ID NO: 3993656 - RNA, 18 nt, Human herpesvirus 6B
gagaaaccgaaaugugcu

SEQ ID NO: 3993657 - RNA, 18 nt, Human herpesvirus 6B
gagaaacggagagcgaca

SEQ ID NO: 3993658 - RNA, 17 nt, Human herpesvirus 6B
gagaaaggaagaaauuc

SEQ ID NO: 3993659 - RNA, 20 nt, Human herpesvirus 6B
gagaacuucaaaaucugcua

SEQ ID NO: 3993660 - RNA, 17 nt, Human herpesvirus 6B
gagaagaacagaggaag

SEQ ID NO: 3993661 - RNA, 20 nt, Human herpesvirus 6B
gagaauaagaucuacagagu

SEQ ID NO: 3993662 - RNA, 15 nt, Human herpesvirus 6B
gagaauuccaaggcu

SEQ ID NO: 3993663 - RNA, 24 nt, Human herpesvirus 6B
gagacggaauauauagaagaagaa

SEQ ID NO: 3993664 - RNA, 22 nt, Human herpesvirus 6B
gagacugccgguaacgcugccg

SEQ ID NO: 3993665 - RNA, 13 nt, Human herpesvirus 6B
gagagcuccgagc

SEQ ID NO: 3993666 - RNA, 21 nt, Human herpesvirus 6B
gagaguacggaagugccuucu

SEQ ID NO: 3993667 - RNA, 16 nt, Human herpesvirus 6B
gagauuuuuuaaauaa

SEQ ID NO: 3993668 - RNA, 16 nt, Human herpesvirus 6B
gagccacuugagugag

SEQ ID NO: 3993669 - RNA, 21 nt, Human herpesvirus 6B
gagcucaaagagauuggaaaa

SEQ ID NO: 3993670 - RNA, 20 nt, Human herpesvirus 6B
gaggaagucugaauuuaaug

SEQ ID NO: 3993671 - RNA, 9 nt, Human herpesvirus 6B
gaggaggag

SEQ ID NO: 3993672 - RNA, 19 nt, Human herpesvirus 6B
gagggagaaacggacacgc

SEQ ID NO: 3993673 - RNA, 20 nt, Human herpesvirus 6B
gaguauuuuaaagauuuucu

SEQ ID NO: 3993674 - RNA, 23 nt, Human herpesvirus 6B
gauaaacuguacgccauacggga

SEQ ID NO: 3993675 - RNA, 19 nt, Human herpesvirus 6B
gauaccgaaucggaagagg

SEQ ID NO: 3993676 - RNA, 21 nt, Human herpesvirus 6B
gauacuauugcuaagaucugu

SEQ ID NO: 3993677 - RNA, 15 nt, Human herpesvirus 6B
gauauaguuauucag

SEQ ID NO: 3993678 - RNA, 19 nt, Human herpesvirus 6B
gauaucucaccuaugaaua

SEQ ID NO: 3993679 - RNA, 20 nt, Human herpesvirus 6B
gauaugagugaauugugcaa

SEQ ID NO: 3993680 - RNA, 15 nt, Human herpesvirus 6B
gaucacuuuguuucu

SEQ ID NO: 3993681 - RNA, 14 nt, Human herpesvirus 6B
gauccaaugaugaa

SEQ ID NO: 3993682 - RNA, 20 nt, Human herpesvirus 6B
gaucgggccuggggacagac

SEQ ID NO: 3993683 - RNA, 14 nt, Human herpesvirus 6B
gaucuauuucccgu

SEQ ID NO: 3993684 - RNA, 14 nt, Human herpesvirus 6B
gaucucauaugcau

SEQ ID NO: 3993685 - RNA, 21 nt, Human herpesvirus 6B
gaucucauaugcaucagaccu

SEQ ID NO: 3993686 - RNA, 12 nt, Human herpesvirus 6B
gaucugcuuugu

SEQ ID NO: 3993687 - RNA, 16 nt, Human herpesvirus 6B
gaugaauugugcgugu

SEQ ID NO: 3993688 - RNA, 15 nt, Human herpesvirus 6B
gaugcauuguugaaa

SEQ ID NO: 3993689 - RNA, 16 nt, Human herpesvirus 6B
gaugccaaagcuuucu

SEQ ID NO: 3993690 - RNA, 12 nt, Human herpesvirus 6B
gaugcucucaga

SEQ ID NO: 3993691 - RNA, 16 nt, Human herpesvirus 6B
gaugcuuuuaguuuca

SEQ ID NO: 3993692 - RNA, 16 nt, Human herpesvirus 6B
gauguacguggccguc

SEQ ID NO: 3993693 - RNA, 14 nt, Human herpesvirus 6B
gaugugcggagaaa

SEQ ID NO: 3993694 - RNA, 23 nt, Human herpesvirus 6B
gaugugucccucgauaacuauac

SEQ ID NO: 3993695 - RNA, 15 nt, Human herpesvirus 6B
gauguguuaaagaau

SEQ ID NO: 3993696 - RNA, 12 nt, Human herpesvirus 6B
gauguuuccagg

SEQ ID NO: 3993697 - RNA, 20 nt, Human herpesvirus 6B
gauuccguugugacagaauu

SEQ ID NO: 3993698 - RNA, 12 nt, Human herpesvirus 6B
gauucgacauca

SEQ ID NO: 3993699 - RNA, 14 nt, Human herpesvirus 6B
gauugauccuguaa

SEQ ID NO: 3993700 - RNA, 13 nt, Human herpesvirus 6B
gauuuucuagaug

SEQ ID NO: 3993701 - RNA, 16 nt, Human herpesvirus 6B
gauuuuuguaaaaaug

SEQ ID NO: 3993702 - RNA, 17 nt, Human herpesvirus 6B
gauuuuuguaaaaaugg

SEQ ID NO: 3993703 - RNA, 16 nt, Human herpesvirus 6B
gcaaaugaauguguuc

SEQ ID NO: 3993704 - RNA, 21 nt, Human herpesvirus 6B
gcacaaaaccaggaauccuau

SEQ ID NO: 3993705 - RNA, 15 nt, Human herpesvirus 6B
gcacacgacaaauaa

SEQ ID NO: 3993706 - RNA, 19 nt, Human herpesvirus 6B
gcacagaaucgagaucguu

SEQ ID NO: 3993707 - RNA, 20 nt, Human herpesvirus 6B
gcaccgagggcgggcggacg

SEQ ID NO: 3993708 - RNA, 21 nt, Human herpesvirus 6B
gcaccgcagaucacgucccgc

SEQ ID NO: 3993709 - RNA, 14 nt, Human herpesvirus 6B
gcacguaacaccag

SEQ ID NO: 3993710 - RNA, 19 nt, Human herpesvirus 6B
uccucuuuuccccccgccg

SEQ ID NO: 3993711 - RNA, 13 nt, Human herpesvirus 6B
uccugcaauuuga

SEQ ID NO: 3993712 - RNA, 22 nt, Human herpesvirus 6B
uccugcaauuugaauucugcuc

SEQ ID NO: 3993713 - RNA, 22 nt, Human herpesvirus 6B
uccuguaguuuuuuucugauga

SEQ ID NO: 3993714 - RNA, 17 nt, Human herpesvirus 6B
uccuguuuucccaccua

SEQ ID NO: 3993715 - RNA, 20 nt, Human herpesvirus 6B
uccuuaucagucucaaaaau

SEQ ID NO: 3993716 - RNA, 23 nt, Human herpesvirus 6B
uccuuuguggcucuauucuacau

SEQ ID NO: 3993717 - RNA, 14 nt, Human herpesvirus 6B
ucgagacuagauuu

SEQ ID NO: 3993718 - RNA, 24 nt, Human herpesvirus 6B
ucgauaucucaccuaugaauaucu

SEQ ID NO: 3993719 - RNA, 16 nt, Human herpesvirus 6B
ucgaugccaaagcuuu

SEQ ID NO: 3993720 - RNA, 13 nt, Human herpesvirus 6B
ucgcaaaagagaa

SEQ ID NO: 3993721 - RNA, 19 nt, Human herpesvirus 6B
ucgcaaaagagaaggaaaa

SEQ ID NO: 3993722 - RNA, 13 nt, Human herpesvirus 6B
ucggcaagaaagc

SEQ ID NO: 3993723 - RNA, 20 nt, Human herpesvirus 6B
ucgggaugugcggagaaagg

SEQ ID NO: 3993724 - RNA, 14 nt, Human herpesvirus 6B
ucggggggagacag

SEQ ID NO: 3993725 - RNA, 15 nt, Human herpesvirus 6B
ucgucaacaauaaua

SEQ ID NO: 3993726 - RNA, 23 nt, Human herpesvirus 6B
ucguccgcgaugcgccacaggga

SEQ ID NO: 3993727 - RNA, 13 nt, Human herpesvirus 6B
ucguggaagacgu

SEQ ID NO: 3993728 - RNA, 16 nt, Human herpesvirus 6B
ucguuaaaaacguuuu

SEQ ID NO: 3993729 - RNA, 22 nt, Human herpesvirus 6B
ucguuaugacgaucaauauaga

SEQ ID NO: 3993730 - RNA, 14 nt, Human herpesvirus 6B
ucguuucauaccuu

SEQ ID NO: 3993731 - RNA, 19 nt, Human herpesvirus 6B
ucuaaaucugaaauguaga

SEQ ID NO: 3993732 - RNA, 15 nt, Human herpesvirus 6B
ucuacaugccacaga

SEQ ID NO: 3993733 - RNA, 21 nt, Human herpesvirus 6B
ucuacguauaaaaguccucaa

SEQ ID NO: 3993734 - RNA, 14 nt, Human herpesvirus 6B
ucuagaaugccagg

SEQ ID NO: 3993735 - RNA, 14 nt, Human herpesvirus 6B
ucuaugggaguaau

SEQ ID NO: 3993736 - RNA, 18 nt, Human herpesvirus 6B
ucuauucaggaauauuua

SEQ ID NO: 3993737 - RNA, 15 nt, Human herpesvirus 6B
ucuauuugcaagaau

SEQ ID NO: 3993738 - RNA, 20 nt, Human herpesvirus 6B
ucucaaaaaggguuuucuga

SEQ ID NO: 3993739 - RNA, 15 nt, Human herpesvirus 6B
ucucacgaaaguuuu

SEQ ID NO: 3993740 - RNA, 21 nt, Human herpesvirus 6B
ucucagcauuguugagaauuu

SEQ ID NO: 3993741 - RNA, 15 nt, Human herpesvirus 6B
ucucauaauuugccu

SEQ ID NO: 3993742 - RNA, 13 nt, Human herpesvirus 6B
ucuccaaaacacu

SEQ ID NO: 3993743 - RNA, 20 nt, Human herpesvirus 6B
ucuccaaaagcgccugccua

SEQ ID NO: 3993744 - RNA, 20 nt, Human herpesvirus 6B
ucuccacagggcauagaaag

SEQ ID NO: 3993745 - RNA, 14 nt, Human herpesvirus 6B
ucuccgccuccucu

SEQ ID NO: 3993746 - RNA, 23 nt, Human herpesvirus 6B
ucuccgucaccguguccacggca

SEQ ID NO: 3993747 - RNA, 15 nt, Human herpesvirus 6B
ucuccugaucucacg

SEQ ID NO: 3993748 - RNA, 20 nt, Human herpesvirus 6B
ucuccugugcguccuccucg

SEQ ID NO: 3993749 - RNA, 15 nt, Human herpesvirus 6B
ucucgaaaauacaau

SEQ ID NO: 3993750 - RNA, 14 nt, Human herpesvirus 6B
ucucgaaaaugcug

SEQ ID NO: 3993751 - RNA, 20 nt, Human herpesvirus 6B
ucucgguuuauacuugaaga

SEQ ID NO: 3993752 - RNA, 22 nt, Human herpesvirus 6B
ucucgugccguugccuuggccg

SEQ ID NO: 3993753 - RNA, 19 nt, Human herpesvirus 6B
ucucuacaucaccaugaaa

SEQ ID NO: 3993754 - RNA, 17 nt, Human herpesvirus 6B
ucucuacaugccacaga

SEQ ID NO: 3993755 - RNA, 14 nt, Human herpesvirus 6B
ucucucaacuuuua

SEQ ID NO: 3993756 - RNA, 16 nt, Human herpesvirus 6B
ucugaaaauaaaguug

SEQ ID NO: 3993757 - RNA, 15 nt, Human herpesvirus 6B
ucugagacagucaau

SEQ ID NO: 3993758 - RNA, 17 nt, Human herpesvirus 6B
ucugccgaaaagaaaga

SEQ ID NO: 3993759 - RNA, 21 nt, Human herpesvirus 6B
ucugcgcgauauuuuuauggc

SEQ ID NO: 3993760 - RNA, 17 nt, Human herpesvirus 6B
ucugcguugcccucccg

SEQ ID NO: 3993761 - RNA, 21 nt, Human herpesvirus 6B
ucuguaaaaggauaaauuccu

SEQ ID NO: 3993762 - RNA, 22 nt, Human herpesvirus 6B
ucuuaaauucaauuuaaaauaa

SEQ ID NO: 3993763 - RNA, 18 nt, Human herpesvirus 6B
ucuuccuguacagaauuu

SEQ ID NO: 3993764 - RNA, 16 nt, Human herpesvirus 6B
ucuugcggcaugugua

SEQ ID NO: 3993765 - RNA, 21 nt, Human herpesvirus 6B
ucuuggcgguuuuuuaauucu

SEQ ID NO: 3993766 - RNA, 14 nt, Human herpesvirus 6B
ucuuuggaaaacgu

SEQ ID NO: 3993767 - RNA, 14 nt, Human herpesvirus 6B
ucuuuguccuaugu

SEQ ID NO: 3993768 - RNA, 13 nt, Human herpesvirus 6B
ugaaaaagguucg

SEQ ID NO: 3993769 - RNA, 22 nt, Human herpesvirus 6B
ugaaaucgauguagauguuuug

SEQ ID NO: 3993770 - RNA, 14 nt, Human herpesvirus 6B
ugaaaucuuuccug

SEQ ID NO: 3993771 - RNA, 22 nt, Human herpesvirus 6B
ugaacaaguggaaguguaaaug

SEQ ID NO: 3993772 - RNA, 14 nt, Human herpesvirus 6B
ugaacagagauuuu

SEQ ID NO: 3993773 - RNA, 13 nt, Human herpesvirus 6B
ugaacuguuucca

SEQ ID NO: 3993774 - RNA, 21 nt, Human herpesvirus 6B
ugaagagguucagacugcugc

SEQ ID NO: 3993775 - RNA, 18 nt, Human herpesvirus 6B
ugaaguguuaugaagaau

SEQ ID NO: 3993776 - RNA, 17 nt, Human herpesvirus 6B
ugaaguuccacaucuau

SEQ ID NO: 3993777 - RNA, 19 nt, Human herpesvirus 6B
ugaauauucacaagaagau

SEQ ID NO: 3993778 - RNA, 17 nt, Human herpesvirus 6B
ugaaucccgugaaggaa

SEQ ID NO: 3993779 - RNA, 13 nt, Human herpesvirus 6B
ugacacaauuucu

SEQ ID NO: 3993780 - RNA, 15 nt, Human herpesvirus 6B
ugacauuagagaaau

SEQ ID NO: 3993781 - RNA, 11 nt, Human herpesvirus 6B
ugaccuuuucc

SEQ ID NO: 3993782 - RNA, 23 nt, Human herpesvirus 6B
ugacuacggcgguuaacuguuuc

SEQ ID NO: 3993783 - RNA, 20 nt, Human herpesvirus 6B
ugacuguaccauugucaaca

SEQ ID NO: 3993784 - RNA, 19 nt, Human herpesvirus 6B
ugacuuggccgaguuuaga

SEQ ID NO: 3993785 - RNA, 23 nt, Human herpesvirus 6B
ugagacaucgagauucuuuaaag

SEQ ID NO: 3993786 - RNA, 23 nt, Human herpesvirus 6B
ugagacgccuauucuaauuauaa

SEQ ID NO: 3993787 - RNA, 11 nt, Human herpesvirus 6B
ugagcaaagaa

SEQ ID NO: 3993788 - RNA, 23 nt, Human herpesvirus 6B
ugagcaugacacaucgugaguuu

SEQ ID NO: 3993789 - RNA, 16 nt, Human herpesvirus 6B
ugauaaacuguacgcc

SEQ ID NO: 3993790 - RNA, 17 nt, Human herpesvirus 6B
ugauaccgucuuugcau

SEQ ID NO: 3993791 - RNA, 17 nt, Human herpesvirus 6B
ugauaguuauuuuguau

SEQ ID NO: 3993792 - RNA, 16 nt, Human herpesvirus 6B
ugaugaucugcuuugu

SEQ ID NO: 3993793 - RNA, 15 nt, Human herpesvirus 6B
ugauguugucuucug

SEQ ID NO: 3993794 - RNA, 18 nt, Human herpesvirus 6B
ugauucuguuuucuacgu

SEQ ID NO: 3993795 - RNA, 19 nt, Human herpesvirus 6B
ugauugucuuuucuggaaa

SEQ ID NO: 3993796 - RNA, 14 nt, Human herpesvirus 6B
ugauuugaacagag

SEQ ID NO: 3993797 - RNA, 15 nt, Human herpesvirus 6B
ugcaaaacagauuuu

SEQ ID NO: 3993798 - RNA, 20 nt, Human herpesvirus 6B
ugcaacccgccacucuacaa

SEQ ID NO: 3993799 - RNA, 20 nt, Human herpesvirus 6B
ugcaaugucuucgagauuuu

SEQ ID NO: 3993800 - RNA, 18 nt, Human herpesvirus 6B
ugcaauuugaauucugcu

SEQ ID NO: 3993801 - RNA, 20 nt, Human herpesvirus 6B
ugcagaaccucgcauugaua

SEQ ID NO: 3993802 - RNA, 19 nt, Human herpesvirus 6B
ugcagcgauauggaaacac

SEQ ID NO: 3993803 - RNA, 22 nt, Human herpesvirus 6B
ugcccacaccaucuucagcuca

SEQ ID NO: 3993804 - RNA, 23 nt, Human herpesvirus 6B
ugcccacauuuccuucaaaguga

SEQ ID NO: 3993805 - RNA, 17 nt, Human herpesvirus 6B
ugccccccuucauccag

SEQ ID NO: 3993806 - RNA, 18 nt, Human herpesvirus 6B
ugccgccgaagaaagagg

SEQ ID NO: 3993807 - RNA, 14 nt, Human herpesvirus 6B
ugccgucaccugca

SEQ ID NO: 3993808 - RNA, 21 nt, Human herpesvirus 6B
ugcgaauuaaaacucuaaaag

SEQ ID NO: 3993809 - RNA, 14 nt, Human herpesvirus 6B
ugcucuggaucuaa

SEQ ID NO: 3993810 - RNA, 22 nt, Human herpesvirus 6B
ugcugcuucuguaaccugucuu

SEQ ID NO: 3993811 - RNA, 21 nt, Human herpesvirus 6B
ugcuguaagguuucuaaaucu

SEQ ID NO: 3993812 - RNA, 13 nt, Human herpesvirus 6B
ugcuuaaacugaa

SEQ ID NO: 3993813 - RNA, 14 nt, Human herpesvirus 6B
ugcuucguuucuuc

SEQ ID NO: 3993814 - RNA, 16 nt, Human herpesvirus 6B
ugcuuuaaaaaugcuc

SEQ ID NO: 3993815 - RNA, 13 nt, Human herpesvirus 6B
uggaaaauuuaua

SEQ ID NO: 3993816 - RNA, 22 nt, Human herpesvirus 6B
uggaaacguguuugucuguaug

SEQ ID NO: 3993817 - RNA, 12 nt, Human herpesvirus 6B
uggaacugcuug

SEQ ID NO: 3993818 - RNA, 16 nt, Human herpesvirus 6B
uggaaguguaaauguc

SEQ ID NO: 3993819 - RNA, 19 nt, Human herpesvirus 6B
uggacagaaaaaacaccag

SEQ ID NO: 3993820 - RNA, 13 nt, Human herpesvirus 6B
uggauaaacaucg

SEQ ID NO: 3993821 - RNA, 17 nt, Human herpesvirus 6B
uggaugucaagucuaga

SEQ ID NO: 3993822 - RNA, 21 nt, Human herpesvirus 6B
uggauuacaagggaaauccua

SEQ ID NO: 3993823 - RNA, 20 nt, Human herpesvirus 6B
cugucaguggcuugcugucg

SEQ ID NO: 3993824 - RNA, 13 nt, Human herpesvirus 6B
cuguccgugagac

SEQ ID NO: 3993825 - RNA, 21 nt, Human herpesvirus 6B
cugucgcccgccucucuccgc

SEQ ID NO: 3993826 - RNA, 14 nt, Human herpesvirus 6B
cugugcucuuuaua

SEQ ID NO: 3993827 - RNA, 13 nt, Human herpesvirus 6B
cuguguauuguga

SEQ ID NO: 3993828 - RNA, 21 nt, Human herpesvirus 6B
cuguucaugcgaauuaaaacu

SEQ ID NO: 3993829 - RNA, 11 nt, Human herpesvirus 6B
cuauucagagg

SEQ ID NO: 3993830 - RNA, 15 nt, Human herpesvirus 6B
cuauuuugacaccuc

SEQ ID NO: 3993831 - RNA, 20 nt, Human herpesvirus 6B
cucaaacuuuuagagacuuu

SEQ ID NO: 3993832 - RNA, 18 nt, Human herpesvirus 6B
cucaaagaaagcuccgcg

SEQ ID NO: 3993833 - RNA, 13 nt, Human herpesvirus 6B
cucaagaggguuu

SEQ ID NO: 3993834 - RNA, 22 nt, Human herpesvirus 6B
cucaagaugaaguuuggggaga

SEQ ID NO: 3993835 - RNA, 20 nt, Human herpesvirus 6B
cucaaggucaaaaaacucag

SEQ ID NO: 3993836 - RNA, 13 nt, Human herpesvirus 6B
cucacccccacuc

SEQ ID NO: 3993837 - RNA, 23 nt, Human herpesvirus 6B
cucagcauuguugagaauuuaac

SEQ ID NO: 3993838 - RNA, 21 nt, Human herpesvirus 6B
cucaguagaaugaaugaaaca

SEQ ID NO: 3993839 - RNA, 18 nt, Human herpesvirus 6B
cuccaaauggucccguaa

SEQ ID NO: 3993840 - RNA, 13 nt, Human herpesvirus 6B
cuccacgccccuc

SEQ ID NO: 3993841 - RNA, 14 nt, Human herpesvirus 6B
cucccgcagcuccu

SEQ ID NO: 3993842 - RNA, 22 nt, Human herpesvirus 6B
cucccguccguggaaaaacacu

SEQ ID NO: 3993843 - RNA, 14 nt, Human herpesvirus 6B
cuccgcgcugcugg

SEQ ID NO: 3993844 - RNA, 16 nt, Human herpesvirus 6B
cuccguucccuucucg

SEQ ID NO: 3993845 - RNA, 14 nt, Human herpesvirus 6B
cuccuggguacggc

SEQ ID NO: 3993846 - RNA, 22 nt, Human herpesvirus 6B
cucgccgucgucgcucucccuc

SEQ ID NO: 3993847 - RNA, 18 nt, Human herpesvirus 6B
cucggcgacgagccuugu

SEQ ID NO: 3993848 - RNA, 14 nt, Human herpesvirus 6B
cucguggcccgugg

SEQ ID NO: 3993849 - RNA, 17 nt, Human herpesvirus 6B
cucucacccccacucga

SEQ ID NO: 3993850 - RNA, 14 nt, Human herpesvirus 6B
cucucccucuuccc

SEQ ID NO: 3993851 - RNA, 23 nt, Human herpesvirus 6B
cucucgugccguugccuuggccg

SEQ ID NO: 3993852 - RNA, 12 nt, Human herpesvirus 6B
cucucucaccug

SEQ ID NO: 3993853 - RNA, 19 nt, Human herpesvirus 6B
cucugcaacuuuauuugaa

SEQ ID NO: 3993854 - RNA, 20 nt, Human herpesvirus 6B
cucugcaauuugguucagcu

SEQ ID NO: 3993855 - RNA, 15 nt, Human herpesvirus 6B
cucugcccuucuucg

SEQ ID NO: 3993856 - RNA, 23 nt, Human herpesvirus 6B
cucuuaacaagagaggaugcuuu

SEQ ID NO: 3993857 - RNA, 15 nt, Human herpesvirus 6B
cucuugcaguggcgc

SEQ ID NO: 3993858 - RNA, 21 nt, Human herpesvirus 6B
cugaacuguuuccagagcaca

SEQ ID NO: 3993859 - RNA, 15 nt, Human herpesvirus 6B
cugaaucagaaacug

SEQ ID NO: 3993860 - RNA, 15 nt, Human herpesvirus 6B
cugagaccgagagaa

SEQ ID NO: 3993861 - RNA, 15 nt, Human herpesvirus 6B
cugagagcaggagca

SEQ ID NO: 3993862 - RNA, 20 nt, Human herpesvirus 6B
cugagagcaggagcaggcuc

SEQ ID NO: 3993863 - RNA, 12 nt, Human herpesvirus 6B
cugauaaacucc

SEQ ID NO: 3993864 - RNA, 18 nt, Human herpesvirus 6B
cugauccaugagcacccg

SEQ ID NO: 3993865 - RNA, 19 nt, Human herpesvirus 6B
cugaugauuugaaauguuc

SEQ ID NO: 3993866 - RNA, 13 nt, Human herpesvirus 6B
cugcaaaaacaaa

SEQ ID NO: 3993867 - RNA, 21 nt, Human herpesvirus 6B
cugcaauuugaauucugcucg

SEQ ID NO: 3993868 - RNA, 22 nt, Human herpesvirus 6B
cugcagauucggggggagacag

SEQ ID NO: 3993869 - RNA, 16 nt, Human herpesvirus 6B
cugcauacagaaauug

SEQ ID NO: 3993870 - RNA, 16 nt, Human herpesvirus 6B
cugccgcaucgcaccg

SEQ ID NO: 3993871 - RNA, 21 nt, Human herpesvirus 6B
cugccuuuaacccgaugagaa

SEQ ID NO: 3993872 - RNA, 12 nt, Human herpesvirus 6B
cugccuuuggac

SEQ ID NO: 3993873 - RNA, 17 nt, Human herpesvirus 6B
cugcgcagacggaaaga

SEQ ID NO: 3993874 - RNA, 20 nt, Human herpesvirus 6B
cugcgguugaaaucuuuccu

SEQ ID NO: 3993875 - RNA, 14 nt, Human herpesvirus 6B
cugcguuaagugaa

SEQ ID NO: 3993876 - RNA, 21 nt, Human herpesvirus 6B
cugcguuccaugugucuccgg

SEQ ID NO: 3993877 - RNA, 20 nt, Human herpesvirus 6B
cuggaagaaggaaaaaauuc

SEQ ID NO: 3993878 - RNA, 13 nt, Human herpesvirus 6B
cuggauacuauug

SEQ ID NO: 3993879 - RNA, 18 nt, Human herpesvirus 6B
cuggcaugcguuacggag

SEQ ID NO: 3993880 - RNA, 18 nt, Human herpesvirus 6B
cugggcgcagaaggagaa

SEQ ID NO: 3993881 - RNA, 20 nt, Human herpesvirus 6B
cugguucaggauuuguaaaa

SEQ ID NO: 3993882 - RNA, 16 nt, Human herpesvirus 6B
cugguuugcuuuggau

SEQ ID NO: 3993883 - RNA, 13 nt, Human herpesvirus 6B
cuguaaacaaauu

SEQ ID NO: 3993884 - RNA, 16 nt, Human herpesvirus 6B
cuguaaaccaguaucu

SEQ ID NO: 3993885 - RNA, 14 nt, Human herpesvirus 6B
cuguacacaaaaac

SEQ ID NO: 3993886 - RNA, 16 nt, Human herpesvirus 6B
cuguaccccaagugaa

SEQ ID NO: 3993887 - RNA, 22 nt, Human herpesvirus 6B
cuguaguuuuuuucugaugacu

SEQ ID NO: 3993888 - RNA, 12 nt, Human herpesvirus 6B
cugucacacucu

SEQ ID NO: 3993889 - RNA, 14 nt, Human herpesvirus 6B
cuguccgugacaca

SEQ ID NO: 3993890 - RNA, 20 nt, Human herpesvirus 6B
cugucgcccgccucucuccg

SEQ ID NO: 3993891 - RNA, 20 nt, Human herpesvirus 6B
cugucuguguuucagaaggc

SEQ ID NO: 3993892 - RNA, 11 nt, Human herpesvirus 6B
cugucuguucc

SEQ ID NO: 3993893 - RNA, 22 nt, Human herpesvirus 6B
cugugaucaggaaauuaauaag

SEQ ID NO: 3993894 - RNA, 11 nt, Human herpesvirus 6B
cugugcaaagc

SEQ ID NO: 3993895 - RNA, 20 nt, Human herpesvirus 6B
cuguggaccaugcagcugcc

SEQ ID NO: 3993896 - RNA, 22 nt, Human herpesvirus 6B
cuguucggauccaaugaugaaa

SEQ ID NO: 3993897 - RNA, 13 nt, Human herpesvirus 6B
cuguuguuguagu

SEQ ID NO: 3993898 - RNA, 14 nt, Human herpesvirus 6B
cuuaacaagagagg

SEQ ID NO: 3993899 - RNA, 15 nt, Human herpesvirus 6B
cuuaacauacaacuu

SEQ ID NO: 3993900 - RNA, 13 nt, Human herpesvirus 6B
cuuacgaucuuua

SEQ ID NO: 3993901 - RNA, 22 nt, Human herpesvirus 6B
cuuagacgaaaauuguaacuuc

SEQ ID NO: 3993902 - RNA, 19 nt, Human herpesvirus 6B
cuuagauaugucguuucau

SEQ ID NO: 3993903 - RNA, 16 nt, Human herpesvirus 6B
cuuaggauguaaaugc

SEQ ID NO: 3993904 - RNA, 17 nt, Human herpesvirus 6B
cuuauggcaagcacuga

SEQ ID NO: 3993905 - RNA, 22 nt, Human herpesvirus 6B
cuuauguaguguggaauuuaaa

SEQ ID NO: 3993906 - RNA, 19 nt, Human herpesvirus 6B
cuuauugaggaaaugcagc

SEQ ID NO: 3993907 - RNA, 15 nt, Human herpesvirus 6B
cuucaauguuuuuca

SEQ ID NO: 3993908 - RNA, 13 nt, Human herpesvirus 6B
cuucacgugauuu

SEQ ID NO: 3993909 - RNA, 14 nt, Human herpesvirus 6B
cuuccccaagcaaa

SEQ ID NO: 3993910 - RNA, 20 nt, Human herpesvirus 6B
cuucgagauuuuagaauaaa

SEQ ID NO: 3993911 - RNA, 18 nt, Human herpesvirus 6B
cuucuuggagucuggccu

SEQ ID NO: 3993912 - RNA, 16 nt, Human herpesvirus 6B
cuugaaagaguacagg

SEQ ID NO: 3993913 - RNA, 15 nt, Human herpesvirus 6B
cuugauuuuugagau

SEQ ID NO: 3993914 - RNA, 21 nt, Human herpesvirus 6B
cuugcaaacagcuuuauuccc

SEQ ID NO: 3993915 - RNA, 13 nt, Human herpesvirus 6B
cuugcaagaaagc

SEQ ID NO: 3993916 - RNA, 16 nt, Human herpesvirus 6B
cuugcacggaaucucu

SEQ ID NO: 3993917 - RNA, 23 nt, Human herpesvirus 6B
cuugugcaaaaaucucuuauggu

SEQ ID NO: 3993918 - RNA, 16 nt, Human herpesvirus 6B
cuuuauuucuaaggag

SEQ ID NO: 3993919 - RNA, 12 nt, Human herpesvirus 6B
cuuucaaugucc

SEQ ID NO: 3993920 - RNA, 11 nt, Human herpesvirus 6B
cuuuccaagga

SEQ ID NO: 3993921 - RNA, 18 nt, Human herpesvirus 6B
cuuugaacaucuauuauc

SEQ ID NO: 3993922 - RNA, 22 nt, Human herpesvirus 6B
cuuugaaggacuaucugagaca

SEQ ID NO: 3993923 - RNA, 14 nt, Human herpesvirus 6B
cuuugauaaaacca

SEQ ID NO: 3993924 - RNA, 23 nt, Human herpesvirus 6B
cuuugauaaaaccaucuauuugc

SEQ ID NO: 3993925 - RNA, 22 nt, Human herpesvirus 6B
cuuugggaccuucaggaacaaa

SEQ ID NO: 3993926 - RNA, 19 nt, Human herpesvirus 6B
cuuuuuuccucgaugguag

SEQ ID NO: 3993927 - RNA, 15 nt, Human herpesvirus 6B
cuuuuuuucccgaaa

SEQ ID NO: 3993928 - RNA, 20 nt, Human herpesvirus 6B
gaaaaagccugaaggcuacu

SEQ ID NO: 3993929 - RNA, 11 nt, Human herpesvirus 6B
gaaaacaaugc

SEQ ID NO: 3993930 - RNA, 22 nt, Human herpesvirus 6B
gaaaacaugacggacuuggaaa

SEQ ID NO: 3993931 - RNA, 19 nt, Human herpesvirus 6B
gaaaacgcagcaugaugau

SEQ ID NO: 3993932 - RNA, 20 nt, Human herpesvirus 6B
gaaaacgguaaagaugagau

SEQ ID NO: 3993933 - RNA, 16 nt, Human herpesvirus 6B
gaaaacuucuguuuua

SEQ ID NO: 3993934 - RNA, 17 nt, Human herpesvirus 6B
gaaaagaucaagcaagu

SEQ ID NO: 3993935 - RNA, 13 nt, Human herpesvirus 6B
gaaaagugcuuua

SEQ ID NO: 3993936 - RNA, 20 nt, Human herpesvirus 6B
gaaaauacgucagcucuuca

SEQ ID NO: 3993937 - RNA, 23 nt, Human herpesvirus 6B
gaaacacuuucuucgccuguaaa

SEQ ID NO: 3993938 - RNA, 17 nt, Human herpesvirus 6B
gaaaccccacaaagccu

SEQ ID NO: 3993939 - RNA, 12 nt, Human herpesvirus 6B
gaaagagggaag

SEQ ID NO: 3993940 - RNA, 17 nt, Human herpesvirus 6B
gaaaggcggagacacau

SEQ ID NO: 3993941 - RNA, 17 nt, Human herpesvirus 6B
gaaagggacguccccgg

SEQ ID NO: 3993942 - RNA, 15 nt, Human herpesvirus 6B
gggauaaauauuucu

SEQ ID NO: 3993943 - RNA, 18 nt, Human herpesvirus 6B
gggaucgacgaccaggca

SEQ ID NO: 3993944 - RNA, 22 nt, Human herpesvirus 6B
gggcauagaaagcggccaggcc

SEQ ID NO: 3993945 - RNA, 12 nt, Human herpesvirus 6B
gggccagcccug

SEQ ID NO: 3993946 - RNA, 12 nt, Human herpesvirus 6B
gggccucccucc

SEQ ID NO: 3993947 - RNA, 16 nt, Human herpesvirus 6B
gggcuuaauaaaggau

SEQ ID NO: 3993948 - RNA, 16 nt, Human herpesvirus 6B
ggggaccacugucguc

SEQ ID NO: 3993949 - RNA, 12 nt, Human herpesvirus 6B
ggucagaugcaa

SEQ ID NO: 3993950 - RNA, 15 nt, Human herpesvirus 6B
ggugauuugaacaga

SEQ ID NO: 3993951 - RNA, 16 nt, Human herpesvirus 6B
gguggacaccaauaaa

SEQ ID NO: 3993952 - RNA, 20 nt, Human herpesvirus 6B
gguugucacacgucccuucu

SEQ ID NO: 3993953 - RNA, 14 nt, Human herpesvirus 6B
gguuguccuugguc

SEQ ID NO: 3993954 - RNA, 19 nt, Human herpesvirus 6B
gguugucuuguuagacaag

SEQ ID NO: 3993955 - RNA, 15 nt, Human herpesvirus 6B
gguuguuuuucuaaa

SEQ ID NO: 3993956 - RNA, 12 nt, Human herpesvirus 6B
gguuugcuuugg

SEQ ID NO: 3993957 - RNA, 20 nt, Human herpesvirus 6B
gguuuugucguuuguacaug

SEQ ID NO: 3993958 - RNA, 15 nt, Human herpesvirus 6B
guaagauuaaaugug

SEQ ID NO: 3993959 - RNA, 19 nt, Human herpesvirus 6B
guacaaagguuuuugcugu

SEQ ID NO: 3993960 - RNA, 16 nt, Human herpesvirus 6B
guaccgaauaaaacaa

SEQ ID NO: 3993961 - RNA, 22 nt, Human herpesvirus 6B
guaccucuaugauacuuugaaa

SEQ ID NO: 3993962 - RNA, 13 nt, Human herpesvirus 6B
guacgauuucugu

SEQ ID NO: 3993963 - RNA, 14 nt, Human herpesvirus 6B
guacgcgccacagc

SEQ ID NO: 3993964 - RNA, 12 nt, Human herpesvirus 6B
guauaauguaaa

SEQ ID NO: 3993965 - RNA, 16 nt, Human herpesvirus 6B
guauauggugaugaau

SEQ ID NO: 3993966 - RNA, 23 nt, Human herpesvirus 6B
guaucugccccccuucauccagc

SEQ ID NO: 3993967 - RNA, 16 nt, Human herpesvirus 6B
guaucuggcuggucaa

SEQ ID NO: 3993968 - RNA, 19 nt, Human herpesvirus 6B
guaucuuacaacacaauau

SEQ ID NO: 3993969 - RNA, 23 nt, Human herpesvirus 6B
guaucuugcggcauguguaagaa

SEQ ID NO: 3993970 - RNA, 15 nt, Human herpesvirus 6B
guaugagcguuuaua

SEQ ID NO: 3993971 - RNA, 22 nt, Human herpesvirus 6B
guauuaauuuuuuguuucugaa

SEQ ID NO: 3993972 - RNA, 22 nt, Human herpesvirus 6B
gucaagggcaagguucucagca

SEQ ID NO: 3993973 - RNA, 18 nt, Human herpesvirus 6B
gucacucacauagagaag

SEQ ID NO: 3993974 - RNA, 18 nt, Human herpesvirus 6B
gucauauccagaaaauac

SEQ ID NO: 3993975 - RNA, 17 nt, Human herpesvirus 6B
gucaugcaaaacagauu

SEQ ID NO: 3993976 - RNA, 19 nt, Human herpesvirus 6B
gucaugugcuauuguaaga

SEQ ID NO: 3993977 - RNA, 19 nt, Human herpesvirus 6B
gucauucgcguggcggcgc

SEQ ID NO: 3993978 - RNA, 14 nt, Human herpesvirus 6B
guccaaggauuaug

SEQ ID NO: 3993979 - RNA, 16 nt, Human herpesvirus 6B
guccaaugaauacuuc

SEQ ID NO: 3993980 - RNA, 19 nt, Human herpesvirus 6B
gucccgguauggaucucac

SEQ ID NO: 3993981 - RNA, 18 nt, Human herpesvirus 6B
gucccuucuccgucaccc

SEQ ID NO: 3993982 - RNA, 18 nt, Human herpesvirus 6B
guccgacacgcccccacc

SEQ ID NO: 3993983 - RNA, 12 nt, Human herpesvirus 6B
guccguggaaaa

SEQ ID NO: 3993984 - RNA, 15 nt, Human herpesvirus 6B
guccuacagaagaaa

SEQ ID NO: 3993985 - RNA, 23 nt, Human herpesvirus 6B
guccuauucagaggugcugauga

SEQ ID NO: 3993986 - RNA, 23 nt, Human herpesvirus 6B
gucgcccgccucucuccgccucc

SEQ ID NO: 3993987 - RNA, 21 nt, Human herpesvirus 6B
gucgcggccgucgcgcucgcc

SEQ ID NO: 3993988 - RNA, 23 nt, Human herpesvirus 6B
gucuaugacuuuucugaaauucu

SEQ ID NO: 3993989 - RNA, 14 nt, Human herpesvirus 6B
gucucuuuaaacag

SEQ ID NO: 3993990 - RNA, 14 nt, Human herpesvirus 6B
gucugagcagaggu

SEQ ID NO: 3993991 - RNA, 14 nt, Human herpesvirus 6B
gucuguugcuguag

SEQ ID NO: 3993992 - RNA, 16 nt, Human herpesvirus 6B
gucuguugcuguaguu

SEQ ID NO: 3993993 - RNA, 17 nt, Human herpesvirus 6B
gucuuacaucuaagcug

SEQ ID NO: 3993994 - RNA, 17 nt, Human herpesvirus 6B
gucuucauucuucgaau

SEQ ID NO: 3993995 - RNA, 16 nt, Human herpesvirus 6B
gugaaacgauguguua

SEQ ID NO: 3993996 - RNA, 19 nt, Human herpesvirus 6B
gugaauugugcaagcugua

SEQ ID NO: 3993997 - RNA, 11 nt, Human herpesvirus 6B
gugacaaggua

SEQ ID NO: 3993998 - RNA, 19 nt, Human herpesvirus 6B
gugacagcaacuaagcugu

SEQ ID NO: 3993999 - RNA, 20 nt, Human herpesvirus 6B
gugaccguaucccucccugc

SEQ ID NO: 3994000 - RNA, 19 nt, Human herpesvirus 6B
gugacuaaugcgauuucac

SEQ ID NO: 3994001 - RNA, 12 nt, Human herpesvirus 6B
gugagugcuauu

SEQ ID NO: 3994002 - RNA, 21 nt, Human herpesvirus 6B
gugaguuuucaugugaaauua

SEQ ID NO: 3994003 - RNA, 13 nt, Human herpesvirus 6B
gugaguuuuggaa

SEQ ID NO: 3994004 - RNA, 17 nt, Human herpesvirus 6B
gugaucauaggacagag

SEQ ID NO: 3994005 - RNA, 22 nt, Human herpesvirus 6B
gugaucgcaaaagagaaggaaa

SEQ ID NO: 3994006 - RNA, 18 nt, Human herpesvirus 6B
gugauuucacgugaaaua

SEQ ID NO: 3994007 - RNA, 15 nt, Human herpesvirus 6B
gugcacauagaaaac

SEQ ID NO: 3994008 - RNA, 20 nt, Human herpesvirus 6B
gugcacgcacgucacgggca

SEQ ID NO: 3994009 - RNA, 15 nt, Human herpesvirus 6B
gugccggcgcgcaaa

SEQ ID NO: 3994010 - RNA, 19 nt, Human herpesvirus 6B
gugcguuauuuucuguauu

SEQ ID NO: 3994011 - RNA, 17 nt, Human herpesvirus 6B
gugcuuguuuuggugga

SEQ ID NO: 3994012 - RNA, 12 nt, Human herpesvirus 6B
guggaaauuaaa

SEQ ID NO: 3994013 - RNA, 14 nt, Human herpesvirus 6B
guggaaauuaaaaa

SEQ ID NO: 3994014 - RNA, 17 nt, Human herpesvirus 6B
guggaaguguaaauguc

SEQ ID NO: 3994015 - RNA, 22 nt, Human herpesvirus 6B
guggaaguguaaaugucacuca

SEQ ID NO: 3994016 - RNA, 17 nt, Human herpesvirus 6B
guggcagggcuguuguc

SEQ ID NO: 3994017 - RNA, 16 nt, Human herpesvirus 6B
guggccgucuccugca

SEQ ID NO: 3994018 - RNA, 13 nt, Human herpesvirus 6B
guguucauagagc

SEQ ID NO: 3994019 - RNA, 19 nt, Human herpesvirus 6B
guguugcgauugcugcuuc

SEQ ID NO: 3994020 - RNA, 18 nt, Human herpesvirus 6B
guguuuguuuuuagaagc

SEQ ID NO: 3994021 - RNA, 14 nt, Human herpesvirus 6B
guuaaagaugcuga

SEQ ID NO: 3994022 - RNA, 21 nt, Human herpesvirus 6B
guuacauuugguuugacauua

SEQ ID NO: 3994023 - RNA, 16 nt, Human herpesvirus 6B
guuagcccgugcagag

SEQ ID NO: 3994024 - RNA, 13 nt, Human herpesvirus 6B
guuauuagacacc

SEQ ID NO: 3994025 - RNA, 18 nt, Human herpesvirus 6B
guucaugcgaauuaaaac

SEQ ID NO: 3994026 - RNA, 19 nt, Human herpesvirus 6B
guuccuccgcgggaccugg

SEQ ID NO: 3994027 - RNA, 15 nt, Human herpesvirus 6B
guucggacucucguc

SEQ ID NO: 3994028 - RNA, 21 nt, Human herpesvirus 6B
guucuugauguuagauaaaau

SEQ ID NO: 3994029 - RNA, 15 nt, Human herpesvirus 6B
guugaaaucuuuccu

SEQ ID NO: 3994030 - RNA, 19 nt, Human herpesvirus 6B
guugcccucccgcagcucc

SEQ ID NO: 3994031 - RNA, 14 nt, Human herpesvirus 6B
guugggggaugggu

SEQ ID NO: 3994032 - RNA, 21 nt, Human herpesvirus 6B
guugucuucugugcuuuccaa

SEQ ID NO: 3994033 - RNA, 21 nt, Human herpesvirus 6B
guuuaaagugaguuuuggaaa

SEQ ID NO: 3994034 - RNA, 18 nt, Human herpesvirus 6B
guuuagcaugggugagug

SEQ ID NO: 3994035 - RNA, 20 nt, Human herpesvirus 6B
guuuaucaugagagagcaaa

SEQ ID NO: 3994036 - RNA, 14 nt, Human herpesvirus 6B
guuuuauggcuggg

SEQ ID NO: 3994037 - RNA, 20 nt, Human herpesvirus 6B
guuuucaaugguauucgaaa

SEQ ID NO: 3994038 - RNA, 16 nt, Human herpesvirus 6B
guuuuguaggacugaa

SEQ ID NO: 3994039 - RNA, 15 nt, Human herpesvirus 6B
guuuuucacagaaug

SEQ ID NO: 3994040 - RNA, 18 nt, Human herpesvirus 6B
uaaaaccaucuauuugca

SEQ ID NO: 3994041 - RNA, 18 nt, Human herpesvirus 6B
uaaaaccugcuaacggag

SEQ ID NO: 3994042 - RNA, 22 nt, Human herpesvirus 6B
uaaaacggauaguuaaaaguug

SEQ ID NO: 3994043 - RNA, 16 nt, Human herpesvirus 6B
uaaaagcuauguauga

SEQ ID NO: 3994044 - RNA, 12 nt, Human herpesvirus 6B
uaaaauguuucc

SEQ ID NO: 3994045 - RNA, 15 nt, Human herpesvirus 6B
uaaaauugcuacuaa

SEQ ID NO: 3994046 - RNA, 22 nt, Human herpesvirus 6B
uaaaauuuugcgucgucugugc

SEQ ID NO: 3994047 - RNA, 15 nt, Human herpesvirus 6B
uaaagguuagugggu

SEQ ID NO: 3994048 - RNA, 16 nt, Human herpesvirus 6B
uaaagguuagugggua

SEQ ID NO: 3994049 - RNA, 22 nt, Human herpesvirus 6B
uaaagugccgugagugcuauuu

SEQ ID NO: 3994050 - RNA, 14 nt, Human herpesvirus 6B
uaaaguuuacugug

SEQ ID NO: 3994051 - RNA, 13 nt, Human herpesvirus 6B
uaaauaaucaacu

SEQ ID NO: 3994052 - RNA, 22 nt, Human herpesvirus 6B
uaaauaccauuuuauacgaaaa

SEQ ID NO: 3994053 - RNA, 17 nt, Human herpesvirus 6B
uaaaucgcgagacagau

SEQ ID NO: 3994054 - RNA, 20 nt, Human herpesvirus 6B
uaaaucggguaaauauguga

SEQ ID NO: 3994055 - RNA, 19 nt, Human herpesvirus 6B
auugacggguauuuuacau

SEQ ID NO: 3994056 - RNA, 21 nt, Human herpesvirus 6B
auugaugggauguaaucaaug

SEQ ID NO: 3994057 - RNA, 20 nt, Human herpesvirus 6B
auugcuaagaucugucucca

SEQ ID NO: 3994058 - RNA, 14 nt, Human herpesvirus 6B
auugcucaaaauug

SEQ ID NO: 3994059 - RNA, 17 nt, Human herpesvirus 6B
auuggaaucacaaaaug

SEQ ID NO: 3994060 - RNA, 16 nt, Human herpesvirus 6B
auuguaagacuaaaug

SEQ ID NO: 3994061 - RNA, 19 nt, Human herpesvirus 6B
auuguaauuccaauugcug

SEQ ID NO: 3994062 - RNA, 14 nt, Human herpesvirus 6B
auugugacaaggua

SEQ ID NO: 3994063 - RNA, 19 nt, Human herpesvirus 6B
auuguguguccugagaaug

SEQ ID NO: 3994064 - RNA, 16 nt, Human herpesvirus 6B
auuguguucugcucug

SEQ ID NO: 3994065 - RNA, 18 nt, Human herpesvirus 6B
auuguugauagguaaacu

SEQ ID NO: 3994066 - RNA, 23 nt, Human herpesvirus 6B
auuuaaaaagcaaggugaaacau

SEQ ID NO: 3994067 - RNA, 20 nt, Human herpesvirus 6B
auuuaaaaaugauaacuguu

SEQ ID NO: 3994068 - RNA, 17 nt, Human herpesvirus 6B
auuuaacauccaaaaua

SEQ ID NO: 3994069 - RNA, 15 nt, Human herpesvirus 6B
auuuacuguuuugac

SEQ ID NO: 3994070 - RNA, 20 nt, Human herpesvirus 6B
auuuagccuauuaagcagcc

SEQ ID NO: 3994071 - RNA, 19 nt, Human herpesvirus 6B
auuuaguuuauguuaaaaa

SEQ ID NO: 3994072 - RNA, 19 nt, Human herpesvirus 6B
auuucauagauugcacgcu

SEQ ID NO: 3994073 - RNA, 19 nt, Human herpesvirus 6B
auuucucuacaugccacag

SEQ ID NO: 3994074 - RNA, 17 nt, Human herpesvirus 6B
auuugauguugucuucu

SEQ ID NO: 3994075 - RNA, 13 nt, Human herpesvirus 6B
auuuuaaaaagaa

SEQ ID NO: 3994076 - RNA, 16 nt, Human herpesvirus 6B
auuuuaaacuuaacuu

SEQ ID NO: 3994077 - RNA, 20 nt, Human herpesvirus 6B
auuuuaaaugacaaugugaa

SEQ ID NO: 3994078 - RNA, 17 nt, Human herpesvirus 6B
auuuuauuuuguggcua

SEQ ID NO: 3994079 - RNA, 19 nt, Human herpesvirus 6B
auuuucguugaagaauaag

SEQ ID NO: 3994080 - RNA, 15 nt, Human herpesvirus 6B
auuuucugaaaucuu

SEQ ID NO: 3994081 - RNA, 17 nt, Human herpesvirus 6B
auuuucuguauuaauuu

SEQ ID NO: 3994082 - RNA, 22 nt, Human herpesvirus 6B
auuuugauggucgauuguaauu

SEQ ID NO: 3994083 - RNA, 22 nt, Human herpesvirus 6B
auuuugggccguaaacuuauug

SEQ ID NO: 3994084 - RNA, 23 nt, Human herpesvirus 6B
auuuuuuaauccauauuuggaag

SEQ ID NO: 3994085 - RNA, 22 nt, Human herpesvirus 6B
auuuuuuauuaguauccuucuc

SEQ ID NO: 3994086 - RNA, 13 nt, Human herpesvirus 6B
caaaaagaaaaca

SEQ ID NO: 3994087 - RNA, 21 nt, Human herpesvirus 6B
caaaaauccaggaguaaugau

SEQ ID NO: 3994088 - RNA, 19 nt, Human herpesvirus 6B
caaaagauuauggcaacau

SEQ ID NO: 3994089 - RNA, 15 nt, Human herpesvirus 6B
caaaagcgccugccu

SEQ ID NO: 3994090 - RNA, 17 nt, Human herpesvirus 6B
caaaaugaccagagauu

SEQ ID NO: 3994091 - RNA, 21 nt, Human herpesvirus 6B
caaacaacuguuguguuugaa

SEQ ID NO: 3994092 - RNA, 11 nt, Human herpesvirus 6B
caaacagagau

SEQ ID NO: 3994093 - RNA, 17 nt, Human herpesvirus 6B
caaacucaaagaaagcu

SEQ ID NO: 3994094 - RNA, 15 nt, Human herpesvirus 6B
caaagauagacagug

SEQ ID NO: 3994095 - RNA, 20 nt, Human herpesvirus 6B
caaagauagacagugaaaaa

SEQ ID NO: 3994096 - RNA, 21 nt, Human herpesvirus 6B
caaagauauuucuaucuggaa

SEQ ID NO: 3994097 - RNA, 16 nt, Human herpesvirus 6B
caaagggaagccagcc

SEQ ID NO: 3994098 - RNA, 18 nt, Human herpesvirus 6B
caaagguuuuugcuguca

SEQ ID NO: 3994099 - RNA, 20 nt, Human herpesvirus 6B
caaaguccuggaaagcaucc

SEQ ID NO: 3994100 - RNA, 17 nt, Human herpesvirus 6B
caaauaaguggugauga

SEQ ID NO: 3994101 - RNA, 21 nt, Human herpesvirus 6B
caaaucuguaagauuaaaugu

SEQ ID NO: 3994102 - RNA, 17 nt, Human herpesvirus 6B
caacaacccuuauuuua

SEQ ID NO: 3994103 - RNA, 11 nt, Human herpesvirus 6B
caacaauaaua

SEQ ID NO: 3994104 - RNA, 20 nt, Human herpesvirus 6B
caacacggggugagagagcu

SEQ ID NO: 3994105 - RNA, 12 nt, Human herpesvirus 6B
caacaucucaua

SEQ ID NO: 3994106 - RNA, 14 nt, Human herpesvirus 6B
caacauguauucuc

SEQ ID NO: 3994107 - RNA, 16 nt, Human herpesvirus 6B
caaccaaacaguuuca

SEQ ID NO: 3994108 - RNA, 19 nt, Human herpesvirus 6B
caacgcuaaauuuaucaaa

SEQ ID NO: 3994109 - RNA, 17 nt, Human herpesvirus 6B
caacgugugaaaacuag

SEQ ID NO: 3994110 - RNA, 18 nt, Human herpesvirus 6B
caacguuacgauuuucua

SEQ ID NO: 3994111 - RNA, 20 nt, Human herpesvirus 6B
caacuaacuucacagggaaa

SEQ ID NO: 3994112 - RNA, 23 nt, Human herpesvirus 6B
caacugagagacggaucugccgc

SEQ ID NO: 3994113 - RNA, 23 nt, Human herpesvirus 6B
caagaaaucacguugaaaugucg

SEQ ID NO: 3994114 - RNA, 17 nt, Human herpesvirus 6B
caagccugcgcguggaa

SEQ ID NO: 3994115 - RNA, 14 nt, Human herpesvirus 6B
caagcgccaggacg

SEQ ID NO: 3994116 - RNA, 20 nt, Human herpesvirus 6B
caagcugggaaagaucgaga

SEQ ID NO: 3994117 - RNA, 17 nt, Human herpesvirus 6B
caaggaagagaaugaau

SEQ ID NO: 3994118 - RNA, 13 nt, Human herpesvirus 6B
caagguucucagc

SEQ ID NO: 3994119 - RNA, 20 nt, Human herpesvirus 6B
caagucgccucacuguaaaa

SEQ ID NO: 3994120 - RNA, 19 nt, Human herpesvirus 6B
caaguggaaguguaaaugu

SEQ ID NO: 3994121 - RNA, 19 nt, Human herpesvirus 6B
caaguuaaauuucguugua

SEQ ID NO: 3994122 - RNA, 19 nt, Human herpesvirus 6B
caauaaaaaacuuauaauu

SEQ ID NO: 3994123 - RNA, 23 nt, Human herpesvirus 6B
caauaaaaaacuuauaauuggaa

SEQ ID NO: 3994124 - RNA, 12 nt, Human herpesvirus 6B
caauaaacauga

SEQ ID NO: 3994125 - RNA, 16 nt, Human herpesvirus 6B
caauauaugaaauacu

SEQ ID NO: 3994126 - RNA, 16 nt, Human herpesvirus 6B
caaucaucugguaaau

SEQ ID NO: 3994127 - RNA, 21 nt, Human herpesvirus 6B
caaugcgguuugucuugcaaa

SEQ ID NO: 3994128 - RNA, 21 nt, Human herpesvirus 6B
caaugucgcagaaucaagaaa

SEQ ID NO: 3994129 - RNA, 21 nt, Human herpesvirus 6B
caauugcugcuggguguaugu

SEQ ID NO: 3994130 - RNA, 20 nt, Human herpesvirus 6B
caauuucugacucucuuuca

SEQ ID NO: 3994131 - RNA, 15 nt, Human herpesvirus 6B
caauuugaauucugc

SEQ ID NO: 3994132 - RNA, 12 nt, Human herpesvirus 6B
cacaaaucugua

SEQ ID NO: 3994133 - RNA, 13 nt, Human herpesvirus 6B
cacaacacaucua

SEQ ID NO: 3994134 - RNA, 23 nt, Human herpesvirus 6B
cacaaugucgcagaaucaagaaa

SEQ ID NO: 3994135 - RNA, 20 nt, Human herpesvirus 6B
cacaguucguccagcagcgg

SEQ ID NO: 3994136 - RNA, 17 nt, Human herpesvirus 6B
caccagauaggaaaagg

SEQ ID NO: 3994137 - RNA, 21 nt, Human herpesvirus 6B
caccccccucuugcaguggcg

SEQ ID NO: 3994138 - RNA, 16 nt, Human herpesvirus 6B
cacccgaugaggaaaa

SEQ ID NO: 3994139 - RNA, 15 nt, Human herpesvirus 6B
caccgaauuuauuca

SEQ ID NO: 3994140 - RNA, 22 nt, Human herpesvirus 6B
caccugccuagaauucucuccc

SEQ ID NO: 3994141 - RNA, 15 nt, Human herpesvirus 6B
caccuggcgcaccgc

SEQ ID NO: 3994142 - RNA, 19 nt, Human herpesvirus 6B
cacgccauccacccauaua

SEQ ID NO: 3994143 - RNA, 23 nt, Human herpesvirus 6B
cacgcccccucgguccccccucc

SEQ ID NO: 3994144 - RNA, 13 nt, Human herpesvirus 6B
cacgcgcggacca

SEQ ID NO: 3994145 - RNA, 16 nt, Human herpesvirus 6B
cacgcgcggaccacuc

SEQ ID NO: 3994146 - RNA, 19 nt, Human herpesvirus 6B
cacgcggggaucgggccug

SEQ ID NO: 3994147 - RNA, 21 nt, Human herpesvirus 6B
cacggagaauaccgacaagcc

SEQ ID NO: 3994148 - RNA, 18 nt, Human herpesvirus 6B
cacggcaacgcuccuccc

SEQ ID NO: 3994149 - RNA, 23 nt, Human herpesvirus 6B
cacggcaacgcuccucccacgcc

SEQ ID NO: 3994150 - RNA, 20 nt, Human herpesvirus 6B
cacggcgaaagccagggcgu

SEQ ID NO: 3994151 - RNA, 15 nt, Human herpesvirus 6B
cacggcgccucccau

SEQ ID NO: 3994152 - RNA, 20 nt, Human herpesvirus 6B
cacgguagucguggcggagc

SEQ ID NO: 3994153 - RNA, 18 nt, Human herpesvirus 6B
cacguccagcgcauccuu

SEQ ID NO: 3994154 - RNA, 17 nt, Human herpesvirus 6B
cacuggcgaaggcccgu

SEQ ID NO: 3994155 - RNA, 23 nt, Human herpesvirus 6B
cagaagcugucuguguuucagaa

SEQ ID NO: 3994156 - RNA, 16 nt, Human herpesvirus 6B
cagaauuacaaacugg

SEQ ID NO: 3994157 - RNA, 20 nt, Human herpesvirus 6B
cagaccguuaucggcauuga

SEQ ID NO: 3994158 - RNA, 14 nt, Human herpesvirus 6B
cagagagccgcaga

SEQ ID NO: 3994159 - RNA, 14 nt, Human herpesvirus 6B
cagagcggagaggc

SEQ ID NO: 3994160 - RNA, 19 nt, Human herpesvirus 6B
cagagcugaugauuugaaa

SEQ ID NO: 3994161 - RNA, 20 nt, Human herpesvirus 6B
cagauagaaaauugucuaca

SEQ ID NO: 3994162 - RNA, 15 nt, Human herpesvirus 6B
cagaucgagaauaau

SEQ ID NO: 3994163 - RNA, 14 nt, Human herpesvirus 6B
cagaucuuucuaga

SEQ ID NO: 3994164 - RNA, 13 nt, Human herpesvirus 6B
cagauuucuguag

SEQ ID NO: 3994165 - RNA, 22 nt, Human herpesvirus 6B
cagauuuuacuggugauuuaaa

SEQ ID NO: 3994166 - RNA, 18 nt, Human herpesvirus 6B
cagcaguaucaaucacug

SEQ ID NO: 3994167 - RNA, 13 nt, Human herpesvirus 6B
cuaggaaaacuac

SEQ ID NO: 3994168 - RNA, 20 nt, Human herpesvirus 6B
cuaguuacggggaagaucua

SEQ ID NO: 3994169 - RNA, 23 nt, Human herpesvirus 6B
cuauaugucagauuauaaugaug

SEQ ID NO: 3994170 - RNA, 20 nt, Human herpesvirus 6B
cuaucaacuuucuccgcaca

SEQ ID NO: 3994171 - RNA, 21 nt, Human herpesvirus 6B
cuaucacuuagacacggccag

SEQ ID NO: 3994172 - RNA, 13 nt, Human herpesvirus 6B
cuauguuaacauu

SEQ ID NO: 3994173 - RNA, 14 nt, Human herpesvirus 6B
cuauguuaacauug

SEQ ID NO: 3994174 - RNA, 16 nt, Human herpesvirus 6B
cuauuugacaauaaac

SEQ ID NO: 3994175 - RNA, 16 nt, Human herpesvirus 6B
cucaaagaaagcuccg

SEQ ID NO: 3994176 - RNA, 13 nt, Human herpesvirus 6B
cucacccagaguu

SEQ ID NO: 3994177 - RNA, 15 nt, Human herpesvirus 6B
cucacgucguccgcc

SEQ ID NO: 3994178 - RNA, 19 nt, Human herpesvirus 6B
cucauacccggcggaggcg

SEQ ID NO: 3994179 - RNA, 14 nt, Human herpesvirus 6B
cucauuugcaauug

SEQ ID NO: 3994180 - RNA, 14 nt, Human herpesvirus 6B
cuccagcuauuuug

SEQ ID NO: 3994181 - RNA, 22 nt, Human herpesvirus 6B
cuccauacccauuuaucugccg

SEQ ID NO: 3994182 - RNA, 16 nt, Human herpesvirus 6B
cucccgcagcuccuuc

SEQ ID NO: 3994183 - RNA, 18 nt, Human herpesvirus 6B
cuccgcgcugcuggggcu

SEQ ID NO: 3994184 - RNA, 20 nt, Human herpesvirus 6B
cuccgcgggaccuggcgggc

SEQ ID NO: 3994185 - RNA, 23 nt, Human herpesvirus 6B
cuccgcgggaccuggcgggcacc

SEQ ID NO: 3994186 - RNA, 21 nt, Human herpesvirus 6B
cuccguuacccgggagcuuca

SEQ ID NO: 3994187 - RNA, 19 nt, Human herpesvirus 6B
cuccguuaggaucagacag

SEQ ID NO: 3994188 - RNA, 23 nt, Human herpesvirus 6B
cuccugagaggcuggaaaaauuu

SEQ ID NO: 3994189 - RNA, 12 nt, Human herpesvirus 6B
cuccugcaauuu

SEQ ID NO: 3994190 - RNA, 19 nt, Human herpesvirus 6B
cuccugugcguccuccucg

SEQ ID NO: 3994191 - RNA, 23 nt, Human herpesvirus 6B
cucgccgccucgccgcucccgcu

SEQ ID NO: 3994192 - RNA, 21 nt, Human herpesvirus 6B
cucgccgucgucgcucucccu

SEQ ID NO: 3994193 - RNA, 16 nt, Human herpesvirus 6B
cucgccuaucuguauu

SEQ ID NO: 3994194 - RNA, 15 nt, Human herpesvirus 6B
cucggauuccgcaca

SEQ ID NO: 3994195 - RNA, 23 nt, Human herpesvirus 6B
cucgggggacggagaggaagccg

SEQ ID NO: 3994196 - RNA, 20 nt, Human herpesvirus 6B
cucgguccccccucccucca

SEQ ID NO: 3994197 - RNA, 17 nt, Human herpesvirus 6B
cucgucuguugcuguag

SEQ ID NO: 3994198 - RNA, 22 nt, Human herpesvirus 6B
cucgugugucucugugaagagg

SEQ ID NO: 3994199 - RNA, 15 nt, Human herpesvirus 6B
cucuaaucaagaaac

SEQ ID NO: 3994200 - RNA, 17 nt, Human herpesvirus 6B
cucuauuguuuaaaagg

SEQ ID NO: 3994201 - RNA, 13 nt, Human herpesvirus 6B
cucucuccgccuc

SEQ ID NO: 3994202 - RNA, 20 nt, Human herpesvirus 6B
cucuuaugguucuugagcag

SEQ ID NO: 3994203 - RNA, 13 nt, Human herpesvirus 6B
cucuuccuucucg

SEQ ID NO: 3994204 - RNA, 21 nt, Human herpesvirus 6B
cucuuuccacacuaucuucga

SEQ ID NO: 3994205 - RNA, 15 nt, Human herpesvirus 6B
cucuuuuccccccgc

SEQ ID NO: 3994206 - RNA, 22 nt, Human herpesvirus 6B
cugaaaaguuagaguuggauuu

SEQ ID NO: 3994207 - RNA, 22 nt, Human herpesvirus 6B
cugaacggggugauuuuccaaa

SEQ ID NO: 3994208 - RNA, 23 nt, Human herpesvirus 6B
cugaauggaguaaauuaaaguuu

SEQ ID NO: 3994209 - RNA, 15 nt, Human herpesvirus 6B
cugacaucugcaaaa

SEQ ID NO: 3994210 - RNA, 13 nt, Human herpesvirus 6B
cugaccccccaca

SEQ ID NO: 3994211 - RNA, 16 nt, Human herpesvirus 6B
cugagagcaggagcag

SEQ ID NO: 3994212 - RNA, 21 nt, Human herpesvirus 6B
cugagauucgccaccuccgac

SEQ ID NO: 3994213 - RNA, 16 nt, Human herpesvirus 6B
cugagcaaagaaauga

SEQ ID NO: 3994214 - RNA, 19 nt, Human herpesvirus 6B
cugauaaacuccaaaaucu

SEQ ID NO: 3994215 - RNA, 17 nt, Human herpesvirus 6B
cugaucacagagaaaaa

SEQ ID NO: 3994216 - RNA, 20 nt, Human herpesvirus 6B
cugaucacagagaaaaaaca

SEQ ID NO: 3994217 - RNA, 16 nt, Human herpesvirus 6B
cugaugacuuuucuga

SEQ ID NO: 3994218 - RNA, 15 nt, Human herpesvirus 6B
cugaugguuaaggaa

SEQ ID NO: 3994219 - RNA, 17 nt, Human herpesvirus 6B
cugauuuguucuagugc

SEQ ID NO: 3994220 - RNA, 23 nt, Human herpesvirus 6B
cugcaacuuuauuugaaacugaa

SEQ ID NO: 3994221 - RNA, 21 nt, Human herpesvirus 6B
cugccgaccugauccaugagc

SEQ ID NO: 3994222 - RNA, 13 nt, Human herpesvirus 6B
cugccgcguggaa

SEQ ID NO: 3994223 - RNA, 19 nt, Human herpesvirus 6B
cugcguuccaugugucucc

SEQ ID NO: 3994224 - RNA, 22 nt, Human herpesvirus 6B
cugcucguuuguuuuuuucugc

SEQ ID NO: 3994225 - RNA, 11 nt, Human herpesvirus 6B
cuggacagaaa

SEQ ID NO: 3994226 - RNA, 14 nt, Human herpesvirus 6B
cuggagcuagagaa

SEQ ID NO: 3994227 - RNA, 19 nt, Human herpesvirus 6B
cuggaucggacggugaugg

SEQ ID NO: 3994228 - RNA, 15 nt, Human herpesvirus 6B
cuggcgaaaauuguu

SEQ ID NO: 3994229 - RNA, 15 nt, Human herpesvirus 6B
cuggcgaugcagaug

SEQ ID NO: 3994230 - RNA, 21 nt, Human herpesvirus 6B
cuggguaucuccggacagaaa

SEQ ID NO: 3994231 - RNA, 14 nt, Human herpesvirus 6B
cugguaguucuuga

SEQ ID NO: 3994232 - RNA, 17 nt, Human herpesvirus 6B
cuggugaauguuucuga

SEQ ID NO: 3994233 - RNA, 20 nt, Human herpesvirus 6B
cuguaaacaaauucuuacaa

SEQ ID NO: 3994234 - RNA, 13 nt, Human herpesvirus 6B
cuguaagauuaaa

SEQ ID NO: 3994235 - RNA, 20 nt, Human herpesvirus 6B
cuguaguuuuuuucugauga

SEQ ID NO: 3994236 - RNA, 17 nt, Human herpesvirus 6B
cuguauaucuaugcuuu

SEQ ID NO: 3994237 - RNA, 22 nt, Human herpesvirus 6B
cugugaggugauuugaacagag

SEQ ID NO: 3994238 - RNA, 23 nt, Human herpesvirus 6B
cugugaggugauuugaacagaga

SEQ ID NO: 3994239 - RNA, 21 nt, Human herpesvirus 6B
cuguuaauuccuuguguugaa

SEQ ID NO: 3994240 - RNA, 19 nt, Human herpesvirus 6B
cuguuauucuacugugcau

SEQ ID NO: 3994241 - RNA, 20 nt, Human herpesvirus 6B
cuguucacauugugacggcu

SEQ ID NO: 3994242 - RNA, 23 nt, Human herpesvirus 6B
cuguuuaaagugaguuuuggaaa

SEQ ID NO: 3994243 - RNA, 16 nt, Human herpesvirus 6B
cuguuuuucucauaaa

SEQ ID NO: 3994244 - RNA, 15 nt, Human herpesvirus 6B
cuuaaaggcagcugg

SEQ ID NO: 3994245 - RNA, 23 nt, Human herpesvirus 6B
cuuaaauucaauuuaaaauaauu

SEQ ID NO: 3994246 - RNA, 15 nt, Human herpesvirus 6B
cuuaagaagggcuuu

SEQ ID NO: 3994247 - RNA, 17 nt, Human herpesvirus 6B
cuuaagaagggcuuuaa

SEQ ID NO: 3994248 - RNA, 16 nt, Human herpesvirus 6B
cuuacaaguauguuuu

SEQ ID NO: 3994249 - RNA, 23 nt, Human herpesvirus 6B
cuuacaaguauguuuuguacaaa

SEQ ID NO: 3994250 - RNA, 14 nt, Human herpesvirus 6B
cuuacguguguauu

SEQ ID NO: 3994251 - RNA, 13 nt, Human herpesvirus 6B
cuuaguuuuggau

SEQ ID NO: 3994252 - RNA, 12 nt, Human herpesvirus 6B
cuuauaaaugug

SEQ ID NO: 3994253 - RNA, 16 nt, Human herpesvirus 6B
cuuauauuaaagauug

SEQ ID NO: 3994254 - RNA, 16 nt, Human herpesvirus 6B
cuucaaaaucugcuaa

SEQ ID NO: 3994255 - RNA, 13 nt, Human herpesvirus 6B
cuucaucuggagu

SEQ ID NO: 3994256 - RNA, 18 nt, Human herpesvirus 6B
cuuccgcggcgcugggcu

SEQ ID NO: 3994257 - RNA, 17 nt, Human herpesvirus 6B
cuuccgcuaccgcccug

SEQ ID NO: 3994258 - RNA, 21 nt, Human herpesvirus 6B
cuuccgcuaccgcccugcucc

SEQ ID NO: 3994259 - RNA, 14 nt, Human herpesvirus 6B
cuucgugcaauaac

SEQ ID NO: 3994260 - RNA, 16 nt, Human herpesvirus 6B
cuugaaccaagucacc

SEQ ID NO: 3994261 - RNA, 15 nt, Human herpesvirus 6B
cuugauguuuccuga

SEQ ID NO: 3994262 - RNA, 17 nt, Human herpesvirus 6B
cuugcacuuuuuucuaa

SEQ ID NO: 3994263 - RNA, 11 nt, Human herpesvirus 6B
cuugcaguggc

SEQ ID NO: 3994264 - RNA, 18 nt, Human herpesvirus 6B
cuugcgauuguucugcga

SEQ ID NO: 3994265 - RNA, 15 nt, Human herpesvirus 6B
cuuguuaugacaaaa

SEQ ID NO: 3994266 - RNA, 23 nt, Human herpesvirus 6B
cuuguucgggccaagguaaagga

SEQ ID NO: 3994267 - RNA, 16 nt, Human herpesvirus 6B
cuuucuuuuauuuaaa

SEQ ID NO: 3994268 - RNA, 13 nt, Human herpesvirus 6B
cuuugaaggacua

SEQ ID NO: 3994269 - RNA, 22 nt, Human herpesvirus 6B
cuuugagugguuuuuuggauaa

SEQ ID NO: 3994270 - RNA, 20 nt, Human herpesvirus 6B
cuuuguuuaauaugugggcg

SEQ ID NO: 3994271 - RNA, 14 nt, Human herpesvirus 6B
cuuuucugaugacu

SEQ ID NO: 3994272 - RNA, 13 nt, Human herpesvirus 6B
cuuuuuaacaaaa

SEQ ID NO: 3994273 - RNA, 14 nt, Human herpesvirus 6B
gaaaaaaagcagau

SEQ ID NO: 3994274 - RNA, 19 nt, Human herpesvirus 6B
gaaaaaucucuauuguuua

SEQ ID NO: 3994275 - RNA, 19 nt, Human herpesvirus 6B
gaaaagccccugcuugaaa

SEQ ID NO: 3994276 - RNA, 17 nt, Human herpesvirus 6B
gaaaagguguuguguuu

SEQ ID NO: 3994277 - RNA, 15 nt, Human herpesvirus 6B
gaaaauguguucuua

SEQ ID NO: 3994278 - RNA, 14 nt, Human herpesvirus 6B
gaaacaaaauuaau

SEQ ID NO: 3994279 - RNA, 19 nt, Human herpesvirus 6B
gaaaccaagacuugcauga

SEQ ID NO: 3994280 - RNA, 23 nt, Human herpesvirus 6B
ggggacagugauuaggauguuug

SEQ ID NO: 3994281 - RNA, 16 nt, Human herpesvirus 6B
ggggagccguggugcg

SEQ ID NO: 3994282 - RNA, 23 nt, Human herpesvirus 6B
ggggaggcgacgacggggacuac

SEQ ID NO: 3994283 - RNA, 18 nt, Human herpesvirus 6B
ggggcuucuaccguaguc

SEQ ID NO: 3994284 - RNA, 21 nt, Human herpesvirus 6B
gggucacuaucuucgcagaag

SEQ ID NO: 3994285 - RNA, 16 nt, Human herpesvirus 6B
gggucgaacccugaga

SEQ ID NO: 3994286 - RNA, 15 nt, Human herpesvirus 6B
gguaacgcaggagaa

SEQ ID NO: 3994287 - RNA, 20 nt, Human herpesvirus 6B
gguaauaaaccuaacagagu

SEQ ID NO: 3994288 - RNA, 18 nt, Human herpesvirus 6B
gguauucauaaaauuuug

SEQ ID NO: 3994289 - RNA, 16 nt, Human herpesvirus 6B
gguguuugcagauaag

SEQ ID NO: 3994290 - RNA, 22 nt, Human herpesvirus 6B
gguucaccacugugauaugcaa

SEQ ID NO: 3994291 - RNA, 14 nt, Human herpesvirus 6B
gguuucuuuauccc

SEQ ID NO: 3994292 - RNA, 23 nt, Human herpesvirus 6B
guaaacuucugcuauuuuuuuaa

SEQ ID NO: 3994293 - RNA, 13 nt, Human herpesvirus 6B
guaaccugagaau

SEQ ID NO: 3994294 - RNA, 18 nt, Human herpesvirus 6B
guaaccugucuuggaaga

SEQ ID NO: 3994295 - RNA, 22 nt, Human herpesvirus 6B
guaaucucuagguaaacuucug

SEQ ID NO: 3994296 - RNA, 14 nt, Human herpesvirus 6B
guaauuggacauug

SEQ ID NO: 3994297 - RNA, 15 nt, Human herpesvirus 6B
guaauuuugaaauug

SEQ ID NO: 3994298 - RNA, 11 nt, Human herpesvirus 6B
guaccaacaug

SEQ ID NO: 3994299 - RNA, 21 nt, Human herpesvirus 6B
guagaagacaucuuaaauuuc

SEQ ID NO: 3994300 - RNA, 21 nt, Human herpesvirus 6B
guagauacgaccccuuaugca

SEQ ID NO: 3994301 - RNA, 13 nt, Human herpesvirus 6B
guagcaaaugaau

SEQ ID NO: 3994302 - RNA, 16 nt, Human herpesvirus 6B
guagcaagggagaaag

SEQ ID NO: 3994303 - RNA, 19 nt, Human herpesvirus 6B
guagugcggcgguaaacaa

SEQ ID NO: 3994304 - RNA, 17 nt, Human herpesvirus 6B
guauauaguuuucugau

SEQ ID NO: 3994305 - RNA, 13 nt, Human herpesvirus 6B
guauuggaugcuu

SEQ ID NO: 3994306 - RNA, 17 nt, Human herpesvirus 6B
guauuguagcagcuggc

SEQ ID NO: 3994307 - RNA, 19 nt, Human herpesvirus 6B
gucaagacgccuaguguua

SEQ ID NO: 3994308 - RNA, 17 nt, Human herpesvirus 6B
gucaagguugucagauu

SEQ ID NO: 3994309 - RNA, 18 nt, Human herpesvirus 6B
gucaagguugucagauuu

SEQ ID NO: 3994310 - RNA, 14 nt, Human herpesvirus 6B
gucacuaucuucgc

SEQ ID NO: 3994311 - RNA, 17 nt, Human herpesvirus 6B
gucacucacauagagaa

SEQ ID NO: 3994312 - RNA, 16 nt, Human herpesvirus 6B
gucauaauuuuccagc

SEQ ID NO: 3994313 - RNA, 24 nt, Human herpesvirus 6B
gucauucgcguggcggcgcgcgcc

SEQ ID NO: 3994314 - RNA, 12 nt, Human herpesvirus 6B
guccaaugcucu

SEQ ID NO: 3994315 - RNA, 23 nt, Human herpesvirus 6B
guccgcucauuuugauuuguaaa

SEQ ID NO: 3994316 - RNA, 20 nt, Human herpesvirus 6B
guccuuggggucuuuuugcc

SEQ ID NO: 3994317 - RNA, 22 nt, Human herpesvirus 6B
gucgacucuuuccgaugugucu

SEQ ID NO: 3994318 - RNA, 15 nt, Human herpesvirus 6B
gucguaacaugauuc

SEQ ID NO: 3994319 - RNA, 17 nt, Human herpesvirus 6B
gucuaugacuuuucuga

SEQ ID NO: 3994320 - RNA, 18 nt, Human herpesvirus 6B
gucucaaaaauuagaccg

SEQ ID NO: 3994321 - RNA, 15 nt, Human herpesvirus 6B
gucucaguucaaaau

SEQ ID NO: 3994322 - RNA, 18 nt, Human herpesvirus 6B
gucucuggaagcacggcu

SEQ ID NO: 3994323 - RNA, 15 nt, Human herpesvirus 6B
gucucugugaagagg

SEQ ID NO: 3994324 - RNA, 15 nt, Human herpesvirus 6B
gucugucagaaauau

SEQ ID NO: 3994325 - RNA, 13 nt, Human herpesvirus 6B
gucugucuguucc

SEQ ID NO: 3994326 - RNA, 18 nt, Human herpesvirus 6B
gucuucgcauaauagaca

SEQ ID NO: 3994327 - RNA, 23 nt, Human herpesvirus 6B
gucuuuccuacccaggcuaacga

SEQ ID NO: 3994328 - RNA, 11 nt, Human herpesvirus 6B
gucuuuguccu

SEQ ID NO: 3994329 - RNA, 20 nt, Human herpesvirus 6B
gugacgugcgugcacgcgcc

SEQ ID NO: 3994330 - RNA, 15 nt, Human herpesvirus 6B
gugagcagaagcugu

SEQ ID NO: 3994331 - RNA, 16 nt, Human herpesvirus 6B
gugagcagaagcuguc

SEQ ID NO: 3994332 - RNA, 19 nt, Human herpesvirus 6B
gugauaccgucuuugcaua

SEQ ID NO: 3994333 - RNA, 13 nt, Human herpesvirus 6B
gugcaaaugcuca

SEQ ID NO: 3994334 - RNA, 12 nt, Human herpesvirus 6B
gugccuacggga

SEQ ID NO: 3994335 - RNA, 17 nt, Human herpesvirus 6B
gugccuauuaaugcuua

SEQ ID NO: 3994336 - RNA, 22 nt, Human herpesvirus 6B
guggccgcuuucuuggcgcccg

SEQ ID NO: 3994337 - RNA, 19 nt, Human herpesvirus 6B
gugguuaaccguuaguaaa

SEQ ID NO: 3994338 - RNA, 22 nt, Human herpesvirus 6B
guguauaacgauaauagaaaaa

SEQ ID NO: 3994339 - RNA, 13 nt, Human herpesvirus 6B
guguauuaaaaug

SEQ ID NO: 3994340 - RNA, 16 nt, Human herpesvirus 6B
guguccucguccgucc

SEQ ID NO: 3994341 - RNA, 15 nt, Human herpesvirus 6B
gugucguucagguca

SEQ ID NO: 3994342 - RNA, 13 nt, Human herpesvirus 6B
gugucucaaccuu

SEQ ID NO: 3994343 - RNA, 24 nt, Human herpesvirus 6B
guguuaaucggaauguugguaaac

SEQ ID NO: 3994344 - RNA, 14 nt, Human herpesvirus 6B
guguuuggacagga

SEQ ID NO: 3994345 - RNA, 13 nt, Human herpesvirus 6B
guuaaaagggaag

SEQ ID NO: 3994346 - RNA, 14 nt, Human herpesvirus 6B
guuaaaauguguua

SEQ ID NO: 3994347 - RNA, 22 nt, Human herpesvirus 6B
guuaauaguuacuuugauguua

SEQ ID NO: 3994348 - RNA, 17 nt, Human herpesvirus 6B
guuacccgggagcuuca

SEQ ID NO: 3994349 - RNA, 15 nt, Human herpesvirus 6B
guuagauucggaaac

SEQ ID NO: 3994350 - RNA, 20 nt, Human herpesvirus 6B
guuaguggguaccgcgguug

SEQ ID NO: 3994351 - RNA, 16 nt, Human herpesvirus 6B
guuauaauauuaacaa

SEQ ID NO: 3994352 - RNA, 15 nt, Human herpesvirus 6B
guuauggggaagauc

SEQ ID NO: 3994353 - RNA, 15 nt, Human herpesvirus 6B
guucacacagaugca

SEQ ID NO: 3994354 - RNA, 15 nt, Human herpesvirus 6B
guucgacuauguuag

SEQ ID NO: 3994355 - RNA, 20 nt, Human herpesvirus 6B
guugacgacgcccuggcuuu

SEQ ID NO: 3994356 - RNA, 14 nt, Human herpesvirus 6B
guugcguguggaaa

SEQ ID NO: 3994357 - RNA, 20 nt, Human herpesvirus 6B
guugcuguaguugaugcugu

SEQ ID NO: 3994358 - RNA, 17 nt, Human herpesvirus 6B
guuggccaagcugucuc

SEQ ID NO: 3994359 - RNA, 15 nt, Human herpesvirus 6B
guuggcgcucucgug

SEQ ID NO: 3994360 - RNA, 17 nt, Human herpesvirus 6B
guuguucuuugaugaag

SEQ ID NO: 3994361 - RNA, 21 nt, Human herpesvirus 6B
guuuauuuucucgacaucgcu

SEQ ID NO: 3994362 - RNA, 22 nt, Human herpesvirus 6B
guuugaguugggacuuggaaac

SEQ ID NO: 3994363 - RNA, 14 nt, Human herpesvirus 6B
guuugcuuuggauc

SEQ ID NO: 3994364 - RNA, 15 nt, Human herpesvirus 6B
guuuggacaggagca

SEQ ID NO: 3994365 - RNA, 22 nt, Human herpesvirus 6B
guuuggugacggcgaugaaaaa

SEQ ID NO: 3994366 - RNA, 17 nt, Human herpesvirus 6B
guuuuugauuguaagag

SEQ ID NO: 3994367 - RNA, 10 nt, Human herpesvirus 6B
guuuuuugca

SEQ ID NO: 3994368 - RNA, 16 nt, Human herpesvirus 6B
uaaaacaucagaugaa

SEQ ID NO: 3994369 - RNA, 17 nt, Human herpesvirus 6B
uaaaauaacaugugaca

SEQ ID NO: 3994370 - RNA, 16 nt, Human herpesvirus 6B
uaaaauugcuacuaau

SEQ ID NO: 3994371 - RNA, 18 nt, Human herpesvirus 6B
uaaaauuuuuaaacagau

SEQ ID NO: 3994372 - RNA, 14 nt, Human herpesvirus 6B
uaaacagauuuuga

SEQ ID NO: 3994373 - RNA, 17 nt, Human herpesvirus 6B
uaaacaugauuguaaua

SEQ ID NO: 3994374 - RNA, 18 nt, Human herpesvirus 6B
uaaacuccaaaaucuuua

SEQ ID NO: 3994375 - RNA, 24 nt, Human herpesvirus 6B
uaaacuguucuuucaaaaugacca

SEQ ID NO: 3994376 - RNA, 20 nt, Human herpesvirus 6B
uaaaguccuaucugaguugu

SEQ ID NO: 3994377 - RNA, 16 nt, Human herpesvirus 6B
uaaagugaguuuugga

SEQ ID NO: 3994378 - RNA, 17 nt, Human herpesvirus 6B
uaaauaucaugauaaau

SEQ ID NO: 3994379 - RNA, 15 nt, Human herpesvirus 6B
uaacaauucucucaa

SEQ ID NO: 3994380 - RNA, 21 nt, Human herpesvirus 6B
uaacagacauaugcaaucugu

SEQ ID NO: 3994381 - RNA, 23 nt, Human herpesvirus 6B
uaaccugagaauuuucgaaaaga

SEQ ID NO: 3994382 - RNA, 20 nt, Human herpesvirus 6B
uaacgauauugauccagaau

SEQ ID NO: 3994383 - RNA, 16 nt, Human herpesvirus 6B
uaacgauguugcacga

SEQ ID NO: 3994384 - RNA, 17 nt, Human herpesvirus 6B
uaacgcggcaaccgcag

SEQ ID NO: 3994385 - RNA, 15 nt, Human herpesvirus 6B
uaacgguuuugcaga

SEQ ID NO: 3994386 - RNA, 16 nt, Human herpesvirus 6B
uaacuaucaugugugg

SEQ ID NO: 3994387 - RNA, 21 nt, Human herpesvirus 6B
uaacugguucaggauuuguaa

SEQ ID NO: 3994388 - RNA, 17 nt, Human herpesvirus 6B
uaagacgagauguuucu

SEQ ID NO: 3994389 - RNA, 18 nt, Human herpesvirus 6B
uaagacgagauguuucug

SEQ ID NO: 3994390 - RNA, 14 nt, Human herpesvirus 6B
uaagcgugugguaa

SEQ ID NO: 3994391 - RNA, 21 nt, Human herpesvirus 6B
uaaggaguuuaucguuuuuau

SEQ ID NO: 3994392 - RNA, 11 nt, Human herpesvirus 6B
uaagggacagc

SEQ ID NO: 3994393 - RNA, 13 nt, Human herpesvirus 6B
aaaaaccuauuca

SEQ ID NO: 3994394 - RNA, 13 nt, Human herpesvirus 6B
aaaaaguuaguuu

SEQ ID NO: 3994395 - RNA, 20 nt, Human herpesvirus 6B
aaaaauugacaaucuuggaa

SEQ ID NO: 3994396 - RNA, 13 nt, Human herpesvirus 6B
aaaacuacagaga

SEQ ID NO: 3994397 - RNA, 15 nt, Human herpesvirus 6B
aaaagucguuacagu

SEQ ID NO: 3994398 - RNA, 17 nt, Human herpesvirus 6B
aaaagucguuacaguaa

SEQ ID NO: 3994399 - RNA, 23 nt, Human herpesvirus 6B
aaaauaagaaaggcggagacaca

SEQ ID NO: 3994400 - RNA, 15 nt, Human herpesvirus 6B
aaaauaagacuuagc

SEQ ID NO: 3994401 - RNA, 12 nt, Human herpesvirus 6B
aaaauaagcaag

SEQ ID NO: 3994402 - RNA, 14 nt, Human herpesvirus 6B
aaaauaauccucuu

SEQ ID NO: 3994403 - RNA, 18 nt, Human herpesvirus 6B
aaaauauuggauuuuacg

SEQ ID NO: 3994404 - RNA, 15 nt, Human herpesvirus 6B
aaaaucugcuaacgc

SEQ ID NO: 3994405 - RNA, 14 nt, Human herpesvirus 6B
aaaauguguuaauu

SEQ ID NO: 3994406 - RNA, 21 nt, Human herpesvirus 6B
aaaauguuuccaugacuguga

SEQ ID NO: 3994407 - RNA, 22 nt, Human herpesvirus 6B
aaaauguuuccaugacugugag

SEQ ID NO: 3994408 - RNA, 14 nt, Human herpesvirus 6B
aaaauuggcauuua

SEQ ID NO: 3994409 - RNA, 14 nt, Human herpesvirus 6B
aaaauuuuucugua

SEQ ID NO: 3994410 - RNA, 20 nt, Human herpesvirus 6B
aaacaaacguguauuaagaa

SEQ ID NO: 3994411 - RNA, 14 nt, Human herpesvirus 6B
aaacauagaaucuc

SEQ ID NO: 3994412 - RNA, 17 nt, Human herpesvirus 6B
aaacauagaaucuccaa

SEQ ID NO: 3994413 - RNA, 18 nt, Human herpesvirus 6B
aaacgauuauugcuacaa

SEQ ID NO: 3994414 - RNA, 15 nt, Human herpesvirus 6B
aaacucuagaauuau

SEQ ID NO: 3994415 - RNA, 17 nt, Human herpesvirus 6B
aaacugcuugcgauugu

SEQ ID NO: 3994416 - RNA, 12 nt, Human herpesvirus 6B
aaacuuaacaua

SEQ ID NO: 3994417 - RNA, 15 nt, Human herpesvirus 6B
aaagaaacaaagucu

SEQ ID NO: 3994418 - RNA, 11 nt, Human herpesvirus 6B
aaagaacagaa

SEQ ID NO: 3994419 - RNA, 13 nt, Human herpesvirus 6B
aaagaacagaauc

SEQ ID NO: 3994420 - RNA, 19 nt, Human herpesvirus 6B
aaagauauauugguagaca

SEQ ID NO: 3994421 - RNA, 17 nt, Human herpesvirus 6B
aaagauccaauggauuu

SEQ ID NO: 3994422 - RNA, 22 nt, Human herpesvirus 6B
aaagauggaaaauuuauaaaaa

SEQ ID NO: 3994423 - RNA, 21 nt, Human herpesvirus 6B
aaagcaaucgucuuugauuua

SEQ ID NO: 3994424 - RNA, 19 nt, Human herpesvirus 6B
aaagcaguuuugcagcauc

SEQ ID NO: 3994425 - RNA, 15 nt, Human herpesvirus 6B
aaagggaagccagcc

SEQ ID NO: 3994426 - RNA, 17 nt, Human herpesvirus 6B
aaagguguggugaaaga

SEQ ID NO: 3994427 - RNA, 17 nt, Human herpesvirus 6B
aaagucaaaguccugga

SEQ ID NO: 3994428 - RNA, 14 nt, Human herpesvirus 6B
aaagugcuuuaucc

SEQ ID NO: 3994429 - RNA, 13 nt, Human herpesvirus 6B
aaaguucaguaag

SEQ ID NO: 3994430 - RNA, 15 nt, Human herpesvirus 6B
aaaguuuacugugau

SEQ ID NO: 3994431 - RNA, 15 nt, Human herpesvirus 6B
aaauaaaguugaauu

SEQ ID NO: 3994432 - RNA, 11 nt, Human herpesvirus 6B
aaauaaaguuu

SEQ ID NO: 3994433 - RNA, 14 nt, Human herpesvirus 6B
aaauaauauuugca

SEQ ID NO: 3994434 - RNA, 16 nt, Human herpesvirus 6B
aaauauaauucugacu

SEQ ID NO: 3994435 - RNA, 16 nt, Human herpesvirus 6B
aaauauggcagagcug

SEQ ID NO: 3994436 - RNA, 13 nt, Human herpesvirus 6B
aaauauuggauuu

SEQ ID NO: 3994437 - RNA, 17 nt, Human herpesvirus 6B
aaaucgauguagauguu

SEQ ID NO: 3994438 - RNA, 19 nt, Human herpesvirus 6B
aaaucucgaugccaaagcu

SEQ ID NO: 3994439 - RNA, 13 nt, Human herpesvirus 6B
aaaucucuauugu

SEQ ID NO: 3994440 - RNA, 18 nt, Human herpesvirus 6B
aaaucugcuaacggagca

SEQ ID NO: 3994441 - RNA, 14 nt, Human herpesvirus 6B
aaaugaauguguuc

SEQ ID NO: 3994442 - RNA, 14 nt, Human herpesvirus 6B
aaaugacacagaau

SEQ ID NO: 3994443 - RNA, 17 nt, Human herpesvirus 6B
aaaugacacagaaucua

SEQ ID NO: 3994444 - RNA, 13 nt, Human herpesvirus 6B
aaauguagcaaau

SEQ ID NO: 3994445 - RNA, 15 nt, Human herpesvirus 6B
aaauuuguaacaaug

SEQ ID NO: 3994446 - RNA, 20 nt, Human herpesvirus 6B
aaauuuguucgcacaaaaug

SEQ ID NO: 3994447 - RNA, 20 nt, Human herpesvirus 6B
aacaaugaaaauucaguuuu

SEQ ID NO: 3994448 - RNA, 13 nt, Human herpesvirus 6B
aacaaugcuuugg

SEQ ID NO: 3994449 - RNA, 11 nt, Human herpesvirus 6B
aacaauuuccc

SEQ ID NO: 3994450 - RNA, 22 nt, Human herpesvirus 6B
aacacccgaugaggaaaaacgu

SEQ ID NO: 3994451 - RNA, 14 nt, Human herpesvirus 6B
aacagaggaagaaa

SEQ ID NO: 3994452 - RNA, 16 nt, Human herpesvirus 6B
aacaucaaaaacaccg

SEQ ID NO: 3994453 - RNA, 21 nt, Human herpesvirus 6B
aacaugacggacuuggaaaag

SEQ ID NO: 3994454 - RNA, 13 nt, Human herpesvirus 6B
aaccaaguguuuu

SEQ ID NO: 3994455 - RNA, 15 nt, Human herpesvirus 6B
aaccaucuauuugca

SEQ ID NO: 3994456 - RNA, 18 nt, Human herpesvirus 6B
aaccaucuauuugcaaga

SEQ ID NO: 3994457 - RNA, 15 nt, Human herpesvirus 6B
aaccauguuuuuacu

SEQ ID NO: 3994458 - RNA, 21 nt, Human herpesvirus 6B
aacgaagguucgacuauguua

SEQ ID NO: 3994459 - RNA, 16 nt, Human herpesvirus 6B
aacgaugccuugggga

SEQ ID NO: 3994460 - RNA, 13 nt, Human herpesvirus 6B
aacgcaaagggaa

SEQ ID NO: 3994461 - RNA, 15 nt, Human herpesvirus 6B
aacgcaggagaaacu

SEQ ID NO: 3994462 - RNA, 16 nt, Human herpesvirus 6B
aacgcuucuaacaaua

SEQ ID NO: 3994463 - RNA, 20 nt, Human herpesvirus 6B
aacggcggcggcggcugucg

SEQ ID NO: 3994464 - RNA, 18 nt, Human herpesvirus 6B
aacgugggguaaaaaugu

SEQ ID NO: 3994465 - RNA, 18 nt, Human herpesvirus 6B
aacguugaaaaaucucua

SEQ ID NO: 3994466 - RNA, 19 nt, Human herpesvirus 6B
aacuacuucuguuacagca

SEQ ID NO: 3994467 - RNA, 15 nt, Human herpesvirus 6B
aacucaaagaaagcu

SEQ ID NO: 3994468 - RNA, 22 nt, Human herpesvirus 6B
aacuccggaaaagaaaaguugu

SEQ ID NO: 3994469 - RNA, 14 nt, Human herpesvirus 6B
aacucucacggcca

SEQ ID NO: 3994470 - RNA, 21 nt, Human herpesvirus 6B
aacucuugcacggaaucucua

SEQ ID NO: 3994471 - RNA, 16 nt, Human herpesvirus 6B
aacugauacuguucaa

SEQ ID NO: 3994472 - RNA, 15 nt, Human herpesvirus 6B
aacuguuguucuugg

SEQ ID NO: 3994473 - RNA, 22 nt, Human herpesvirus 6B
aacuucauacccgauguucucu

SEQ ID NO: 3994474 - RNA, 17 nt, Human herpesvirus 6B
aacuuuuuuaaauaaua

SEQ ID NO: 3994475 - RNA, 20 nt, Human herpesvirus 6B
aagaaagaagacgcuuuuua

SEQ ID NO: 3994476 - RNA, 23 nt, Human herpesvirus 6B
aagaagaucacuuuguuucugaa

SEQ ID NO: 3994477 - RNA, 16 nt, Human herpesvirus 6B
aagaagaugcuuuaaa

SEQ ID NO: 3994478 - RNA, 17 nt, Human herpesvirus 6B
aagaagcagcagaugcu

SEQ ID NO: 3994479 - RNA, 17 nt, Human herpesvirus 6B
aagacauugguugauuu

SEQ ID NO: 3994480 - RNA, 19 nt, Human herpesvirus 6B
aagacguuuuuguguagaa

SEQ ID NO: 3994481 - RNA, 15 nt, Human herpesvirus 6B
aagacuugcagauga

SEQ ID NO: 3994482 - RNA, 21 nt, Human herpesvirus 6B
aagacuuuuaucaaauuugca

SEQ ID NO: 3994483 - RNA, 16 nt, Human herpesvirus 6B
aagagacgagaaguga

SEQ ID NO: 3994484 - RNA, 23 nt, Human herpesvirus 6B
aagagugauucaagguggagguu

SEQ ID NO: 3994485 - RNA, 18 nt, Human herpesvirus 6B
aagaguguaaauguagaa

SEQ ID NO: 3994486 - RNA, 21 nt, Human herpesvirus 6B
aagauaacggcgcagaauuac

SEQ ID NO: 3994487 - RNA, 21 nt, Human herpesvirus 6B
aagauauuaugucgauacaau

SEQ ID NO: 3994488 - RNA, 16 nt, Human herpesvirus 6B
aagaugacaaauuuuc

SEQ ID NO: 3994489 - RNA, 17 nt, Human herpesvirus 6B
aagaugagauuggagua

SEQ ID NO: 3994490 - RNA, 19 nt, Human herpesvirus 6B
aagaugucgcuguuuuuca

SEQ ID NO: 3994491 - RNA, 16 nt, Human herpesvirus 6B
aagauucugcagaaug

SEQ ID NO: 3994492 - RNA, 15 nt, Human herpesvirus 6B
aagcaaguuccauuu

SEQ ID NO: 3994493 - RNA, 19 nt, Human herpesvirus 6B
aagcagaggucuuugcuuu

SEQ ID NO: 3994494 - RNA, 16 nt, Human herpesvirus 6B
aagcccggagaacuga

SEQ ID NO: 3994495 - RNA, 15 nt, Human herpesvirus 6B
aagccggagcccuga

SEQ ID NO: 3994496 - RNA, 21 nt, Human herpesvirus 6B
aagcgacuuuuuaacaaaaug

SEQ ID NO: 3994497 - RNA, 17 nt, Human herpesvirus 6B
aagcugcuaacggagca

SEQ ID NO: 3994498 - RNA, 19 nt, Human herpesvirus 6B
aaggaaaaagccuugauuu

SEQ ID NO: 3994499 - RNA, 15 nt, Human herpesvirus 6B
aaggacuaucugaga

SEQ ID NO: 3994500 - RNA, 13 nt, Human herpesvirus 6B
aaggcaacggcac

SEQ ID NO: 3994501 - RNA, 10 nt, Human herpesvirus 6B
aaggcucucg

SEQ ID NO: 3994502 - RNA, 17 nt, Human herpesvirus 6B
aaggcuuaggauguaaa

SEQ ID NO: 3994503 - RNA, 15 nt, Human herpesvirus 6B
aagggacagcaguuu

SEQ ID NO: 3994504 - RNA, 19 nt, Human herpesvirus 6B
aagggucgaagacauucaa

SEQ ID NO: 3994505 - RNA, 19 nt, Human herpesvirus 6B
aagguaugaaacgaaugcc

SEQ ID NO: 3994506 - RNA, 17 nt, Human herpesvirus 6B
caggcgcagcagcagcu

SEQ ID NO: 3994507 - RNA, 14 nt, Human herpesvirus 6B
caggcuccccaggc

SEQ ID NO: 3994508 - RNA, 15 nt, Human herpesvirus 6B
caggguguggccggc

SEQ ID NO: 3994509 - RNA, 22 nt, Human herpesvirus 6B
caguaugucucaguucaaaauu

SEQ ID NO: 3994510 - RNA, 13 nt, Human herpesvirus 6B
caguauuuacuga

SEQ ID NO: 3994511 - RNA, 15 nt, Human herpesvirus 6B
cagucuccacagggc

SEQ ID NO: 3994512 - RNA, 18 nt, Human herpesvirus 6B
caguuaaucauucgauua

SEQ ID NO: 3994513 - RNA, 12 nt, Human herpesvirus 6B
caguuagugcac

SEQ ID NO: 3994514 - RNA, 17 nt, Human herpesvirus 6B
caguucacacagaugca

SEQ ID NO: 3994515 - RNA, 23 nt, Human herpesvirus 6B
caguuuuugaccggaauaaugaa

SEQ ID NO: 3994516 - RNA, 18 nt, Human herpesvirus 6B
caguuuuuuuuucauaug

SEQ ID NO: 3994517 - RNA, 10 nt, Human herpesvirus 6B
cauaaaguua

SEQ ID NO: 3994518 - RNA, 17 nt, Human herpesvirus 6B
cauaacaaguuuuuguc

SEQ ID NO: 3994519 - RNA, 18 nt, Human herpesvirus 6B
cauaagcucuacacagag

SEQ ID NO: 3994520 - RNA, 22 nt, Human herpesvirus 6B
cauagccgggagauuccucugu

SEQ ID NO: 3994521 - RNA, 18 nt, Human herpesvirus 6B
caucaacuacuucuguua

SEQ ID NO: 3994522 - RNA, 20 nt, Human herpesvirus 6B
caucagaugaauugugcgug

SEQ ID NO: 3994523 - RNA, 19 nt, Human herpesvirus 6B
caucccuuaaaaaaacaca

SEQ ID NO: 3994524 - RNA, 15 nt, Human herpesvirus 6B
caucuauuaucauuu

SEQ ID NO: 3994525 - RNA, 21 nt, Human herpesvirus 6B
caucucauaauuugccugagu

SEQ ID NO: 3994526 - RNA, 23 nt, Human herpesvirus 6B
caugaaaucucuuuuaacacaca

SEQ ID NO: 3994527 - RNA, 14 nt, Human herpesvirus 6B
caugacgaagggag

SEQ ID NO: 3994528 - RNA, 14 nt, Human herpesvirus 6B
caugauuguaauaa

SEQ ID NO: 3994529 - RNA, 21 nt, Human herpesvirus 6B
caugccgccugaaaccccaca

SEQ ID NO: 3994530 - RNA, 13 nt, Human herpesvirus 6B
cauggugaaacuu

SEQ ID NO: 3994531 - RNA, 18 nt, Human herpesvirus 6B
caugugguaauacgugaa

SEQ ID NO: 3994532 - RNA, 21 nt, Human herpesvirus 6B
cauucagucucagcaaucacc

SEQ ID NO: 3994533 - RNA, 13 nt, Human herpesvirus 6B
cauucugcauuua

SEQ ID NO: 3994534 - RNA, 20 nt, Human herpesvirus 6B
cauucugcauuuauaucaaa

SEQ ID NO: 3994535 - RNA, 21 nt, Human herpesvirus 6B
cauugaguagagcuuugagca

SEQ ID NO: 3994536 - RNA, 19 nt, Human herpesvirus 6B
cauuuauuucguauguuua

SEQ ID NO: 3994537 - RNA, 16 nt, Human herpesvirus 6B
cauuucuccacacugu

SEQ ID NO: 3994538 - RNA, 13 nt, Human herpesvirus 6B
cauuuuauacgaa

SEQ ID NO: 3994539 - RNA, 17 nt, Human herpesvirus 6B
cauuuuuuugaaaucac

SEQ ID NO: 3994540 - RNA, 13 nt, Human herpesvirus 6B
ccaaaagagaaag

SEQ ID NO: 3994541 - RNA, 13 nt, Human herpesvirus 6B
ccaaagcuuucug

SEQ ID NO: 3994542 - RNA, 22 nt, Human herpesvirus 6B
ccaacggucaagggugaugagg

SEQ ID NO: 3994543 - RNA, 11 nt, Human herpesvirus 6B
ccaacugagag

SEQ ID NO: 3994544 - RNA, 12 nt, Human herpesvirus 6B
ccaacuuaauaa

SEQ ID NO: 3994545 - RNA, 23 nt, Human herpesvirus 6B
ccaaggauuaugaucauacgagg

SEQ ID NO: 3994546 - RNA, 14 nt, Human herpesvirus 6B
ccagaauauaucga

SEQ ID NO: 3994547 - RNA, 23 nt, Human herpesvirus 6B
ccagauaggaaaagguugagaaa

SEQ ID NO: 3994548 - RNA, 12 nt, Human herpesvirus 6B
ccagcccugaag

SEQ ID NO: 3994549 - RNA, 16 nt, Human herpesvirus 6B
ccagcucuguucucuc

SEQ ID NO: 3994550 - RNA, 15 nt, Human herpesvirus 6B
ccaggcgcagcagca

SEQ ID NO: 3994551 - RNA, 14 nt, Human herpesvirus 6B
ccagggugaagaca

SEQ ID NO: 3994552 - RNA, 19 nt, Human herpesvirus 6B
ccagugauucugcuaugau

SEQ ID NO: 3994553 - RNA, 18 nt, Human herpesvirus 6B
ccauagaguuucgagaaa

SEQ ID NO: 3994554 - RNA, 11 nt, Human herpesvirus 6B
ccauauuugcc

SEQ ID NO: 3994555 - RNA, 16 nt, Human herpesvirus 6B
ccaucaacacaccugc

SEQ ID NO: 3994556 - RNA, 15 nt, Human herpesvirus 6B
ccaucaaucucuaug

SEQ ID NO: 3994557 - RNA, 15 nt, Human herpesvirus 6B
cgacauagaguguuu

SEQ ID NO: 3994558 - RNA, 16 nt, Human herpesvirus 6B
cgacccaacagaagcc

SEQ ID NO: 3994559 - RNA, 18 nt, Human herpesvirus 6B
cgaccugaucacagagaa

SEQ ID NO: 3994560 - RNA, 15 nt, Human herpesvirus 6B
cgacgggcagggcgg

SEQ ID NO: 3994561 - RNA, 21 nt, Human herpesvirus 6B
cgagaacccuaaaaucugcua

SEQ ID NO: 3994562 - RNA, 15 nt, Human herpesvirus 6B
cgagacggugauguu

SEQ ID NO: 3994563 - RNA, 13 nt, Human herpesvirus 6B
cgagccggacagg

SEQ ID NO: 3994564 - RNA, 11 nt, Human herpesvirus 6B
cgaucuguaua

SEQ ID NO: 3994565 - RNA, 22 nt, Human herpesvirus 6B
cgauuacuguccguuauugugu

SEQ ID NO: 3994566 - RNA, 15 nt, Human herpesvirus 6B
cgcagacagauaucu

SEQ ID NO: 3994567 - RNA, 19 nt, Human herpesvirus 6B
cgcagggaacggugaagcg

SEQ ID NO: 3994568 - RNA, 16 nt, Human herpesvirus 6B
cgcaguuccuguuuuu

SEQ ID NO: 3994569 - RNA, 20 nt, Human herpesvirus 6B
cgcaguuucuguuuuucuca

SEQ ID NO: 3994570 - RNA, 17 nt, Human herpesvirus 6B
cgcauucacuggaggcg

SEQ ID NO: 3994571 - RNA, 23 nt, Human herpesvirus 6B
cgcauuucucuacaugccacaga

SEQ ID NO: 3994572 - RNA, 20 nt, Human herpesvirus 6B
cgccaacgcuaaauuuauca

SEQ ID NO: 3994573 - RNA, 18 nt, Human herpesvirus 6B
cgcccuccccgcacaguu

SEQ ID NO: 3994574 - RNA, 21 nt, Human herpesvirus 6B
cgccuagagaacagauagaaa

SEQ ID NO: 3994575 - RNA, 21 nt, Human herpesvirus 6B
cgcgcggaccacucgggccgg

SEQ ID NO: 3994576 - RNA, 14 nt, Human herpesvirus 6B
cgcgguggacggcg

SEQ ID NO: 3994577 - RNA, 22 nt, Human herpesvirus 6B
cgcgguggacggcgaggggacg

SEQ ID NO: 3994578 - RNA, 18 nt, Human herpesvirus 6B
cgcuaucggcggacgacg

SEQ ID NO: 3994579 - RNA, 17 nt, Human herpesvirus 6B
cgcucuccugugcgucc

SEQ ID NO: 3994580 - RNA, 17 nt, Human herpesvirus 6B
cgcugggcuccucaccc

SEQ ID NO: 3994581 - RNA, 20 nt, Human herpesvirus 6B
cggagcccugagagcaggag

SEQ ID NO: 3994582 - RNA, 17 nt, Human herpesvirus 6B
cggauucauuuauucuc

SEQ ID NO: 3994583 - RNA, 21 nt, Human herpesvirus 6B
cggcagauucuucggacgcgg

SEQ ID NO: 3994584 - RNA, 16 nt, Human herpesvirus 6B
cggccauuuaacggaa

SEQ ID NO: 3994585 - RNA, 18 nt, Human herpesvirus 6B
cggcgaagggacacgaga

SEQ ID NO: 3994586 - RNA, 14 nt, Human herpesvirus 6B
cggcgcgcgccguc

SEQ ID NO: 3994587 - RNA, 18 nt, Human herpesvirus 6B
cggcgcugggcuccucac

SEQ ID NO: 3994588 - RNA, 20 nt, Human herpesvirus 6B
cggcggaagugaaagcaguc

SEQ ID NO: 3994589 - RNA, 20 nt, Human herpesvirus 6B
cggcguuacuuuaccucugc

SEQ ID NO: 3994590 - RNA, 17 nt, Human herpesvirus 6B
cgggaucccagaugcag

SEQ ID NO: 3994591 - RNA, 16 nt, Human herpesvirus 6B
cgggcgacgggcaggg

SEQ ID NO: 3994592 - RNA, 18 nt, Human herpesvirus 6B
cgggcgguucucgccagc

SEQ ID NO: 3994593 - RNA, 17 nt, Human herpesvirus 6B
cggggaggaggaggaag

SEQ ID NO: 3994594 - RNA, 15 nt, Human herpesvirus 6B
cggucgaaugagcuu

SEQ ID NO: 3994595 - RNA, 20 nt, Human herpesvirus 6B
cggucgagaauacgcugugu

SEQ ID NO: 3994596 - RNA, 15 nt, Human herpesvirus 6B
cggugguuucugcuc

SEQ ID NO: 3994597 - RNA, 20 nt, Human herpesvirus 6B
cgguuagaucuggggagaug

SEQ ID NO: 3994598 - RNA, 22 nt, Human herpesvirus 6B
cgguuugucuugcaaacagcuu

SEQ ID NO: 3994599 - RNA, 15 nt, Human herpesvirus 6B
cguagggacugcgag

SEQ ID NO: 3994600 - RNA, 21 nt, Human herpesvirus 6B
cgucagcucuucacuuucuaa

SEQ ID NO: 3994601 - RNA, 14 nt, Human herpesvirus 6B
cgucccuucuccgu

SEQ ID NO: 3994602 - RNA, 14 nt, Human herpesvirus 6B
cguccguccccgcc

SEQ ID NO: 3994603 - RNA, 18 nt, Human herpesvirus 6B
cguccguggaaaaacacu

SEQ ID NO: 3994604 - RNA, 17 nt, Human herpesvirus 6B
cguccucgugcucuccg

SEQ ID NO: 3994605 - RNA, 18 nt, Human herpesvirus 6B
cguccucgugcucuccgc

SEQ ID NO: 3994606 - RNA, 16 nt, Human herpesvirus 6B
cgucgccuccaaggag

SEQ ID NO: 3994607 - RNA, 15 nt, Human herpesvirus 6B
cgucugucuguuccu

SEQ ID NO: 3994608 - RNA, 19 nt, Human herpesvirus 6B
cgugaaacacaagaagaau

SEQ ID NO: 3994609 - RNA, 16 nt, Human herpesvirus 6B
cguggccgucuccugc

SEQ ID NO: 3994610 - RNA, 20 nt, Human herpesvirus 6B
cguggccgucuccugcaauu

SEQ ID NO: 3994611 - RNA, 14 nt, Human herpesvirus 6B
cgugucuucauucu

SEQ ID NO: 3994612 - RNA, 16 nt, Human herpesvirus 6B
cgugugucucugugaa

SEQ ID NO: 3994613 - RNA, 15 nt, Human herpesvirus 6B
ugaucggaacaaauu

SEQ ID NO: 3994614 - RNA, 17 nt, Human herpesvirus 6B
ugaugauuugaaauguu

SEQ ID NO: 3994615 - RNA, 20 nt, Human herpesvirus 6B
ugaugccuugauguuuccug

SEQ ID NO: 3994616 - RNA, 18 nt, Human herpesvirus 6B
ugaugcuguugcuguugu

SEQ ID NO: 3994617 - RNA, 20 nt, Human herpesvirus 6B
ugauggguuuggccaugccg

SEQ ID NO: 3994618 - RNA, 15 nt, Human herpesvirus 6B
ugauguugcgauaua

SEQ ID NO: 3994619 - RNA, 18 nt, Human herpesvirus 6B
ugauuugaacagagauuu

SEQ ID NO: 3994620 - RNA, 19 nt, Human herpesvirus 6B
ugcaaaaacaaaugaaagu

SEQ ID NO: 3994621 - RNA, 21 nt, Human herpesvirus 6B
ugcaaaaacaaaugaaagucu

SEQ ID NO: 3994622 - RNA, 15 nt, Human herpesvirus 6B
ugcaauuugaauucu

SEQ ID NO: 3994623 - RNA, 19 nt, Human herpesvirus 6B
ugcagagguaaugugaacg

SEQ ID NO: 3994624 - RNA, 17 nt, Human herpesvirus 6B
ugcagccuaccauggcc

SEQ ID NO: 3994625 - RNA, 16 nt, Human herpesvirus 6B
ugcauaacaucucaga

SEQ ID NO: 3994626 - RNA, 20 nt, Human herpesvirus 6B
ugcaucucgguuuaccuuuu

SEQ ID NO: 3994627 - RNA, 18 nt, Human herpesvirus 6B
ugcaucuugcaagaaagc

SEQ ID NO: 3994628 - RNA, 15 nt, Human herpesvirus 6B
ugcccucccgcagcu

SEQ ID NO: 3994629 - RNA, 16 nt, Human herpesvirus 6B
ugccgcguggaagccg

SEQ ID NO: 3994630 - RNA, 14 nt, Human herpesvirus 6B
ugccggcgcgcaaa

SEQ ID NO: 3994631 - RNA, 17 nt, Human herpesvirus 6B
ugccguggcagaagaag

SEQ ID NO: 3994632 - RNA, 14 nt, Human herpesvirus 6B
ugccguguaugaga

SEQ ID NO: 3994633 - RNA, 21 nt, Human herpesvirus 6B
ugccucaggguuggaguuuag

SEQ ID NO: 3994634 - RNA, 21 nt, Human herpesvirus 6B
ugccuuuguaaaauguuucca

SEQ ID NO: 3994635 - RNA, 16 nt, Human herpesvirus 6B
ugcuaagaucugucuc

SEQ ID NO: 3994636 - RNA, 16 nt, Human herpesvirus 6B
ugcucaugucaguauu

SEQ ID NO: 3994637 - RNA, 14 nt, Human herpesvirus 6B
ugcucuuagagaua

SEQ ID NO: 3994638 - RNA, 22 nt, Human herpesvirus 6B
ugcugcuggguguauguuucua

SEQ ID NO: 3994639 - RNA, 13 nt, Human herpesvirus 6B
ugcugucggccga

SEQ ID NO: 3994640 - RNA, 12 nt, Human herpesvirus 6B
ugcuucugcucu

SEQ ID NO: 3994641 - RNA, 15 nt, Human herpesvirus 6B
uucaauuguuuuuua

SEQ ID NO: 3994642 - RNA, 19 nt, Human herpesvirus 6B
uucaccccccucuugcagu

SEQ ID NO: 3994643 - RNA, 20 nt, Human herpesvirus 6B
uucaccccccucuugcagug

SEQ ID NO: 3994644 - RNA, 15 nt, Human herpesvirus 6B
uucagauuucuguag

SEQ ID NO: 3994645 - RNA, 15 nt, Human herpesvirus 6B
uucaggagaagaaca

SEQ ID NO: 3994646 - RNA, 20 nt, Human herpesvirus 6B
uucauaagcucuacacagag

SEQ ID NO: 3994647 - RNA, 17 nt, Human herpesvirus 6B
uucauaguuguuuuuua

SEQ ID NO: 3994648 - RNA, 14 nt, Human herpesvirus 6B
uucauuguacgaua

SEQ ID NO: 3994649 - RNA, 13 nt, Human herpesvirus 6B
uucauuucuguag

SEQ ID NO: 3994650 - RNA, 23 nt, Human herpesvirus 6B
uuccaaaagagaaagaacuuuug

SEQ ID NO: 3994651 - RNA, 15 nt, Human herpesvirus 6B
uucgacauagagugu

SEQ ID NO: 3994652 - RNA, 16 nt, Human herpesvirus 6B
uucuaauuauaaaugu

SEQ ID NO: 3994653 - RNA, 14 nt, Human herpesvirus 6B
uucuaucuacaaaa

SEQ ID NO: 3994654 - RNA, 20 nt, Human herpesvirus 6B
uucuauuaaaaagacuaaag

SEQ ID NO: 3994655 - RNA, 13 nt, Human herpesvirus 6B
uucuguaccccaa

SEQ ID NO: 3994656 - RNA, 22 nt, Human herpesvirus 6B
uucuucaaaaaaagaggaggaa

SEQ ID NO: 3994657 - RNA, 23 nt, Human herpesvirus 6B
uucuucaagggccguaccuuucu

SEQ ID NO: 3994658 - RNA, 19 nt, Human herpesvirus 6B
uucuugcgauuuugugaaa

SEQ ID NO: 3994659 - RNA, 15 nt, Human herpesvirus 6B
uucuugggaaaucaa

SEQ ID NO: 3994660 - RNA, 18 nt, Human herpesvirus 6B
uucuuuggaaaacgucaa

SEQ ID NO: 3994661 - RNA, 17 nt, Human herpesvirus 6B
uugaacaucuauuauca

SEQ ID NO: 3994662 - RNA, 22 nt, Human herpesvirus 6B
uugacggcgugcauauauauga

SEQ ID NO: 3994663 - RNA, 13 nt, Human herpesvirus 6B
caguggcaauaau

SEQ ID NO: 3994664 - RNA, 23 nt, Human herpesvirus 6B
caguggcgcgcguuuuuggugaa

SEQ ID NO: 3994665 - RNA, 16 nt, Human herpesvirus 6B
caguucguccagcagc

SEQ ID NO: 3994666 - RNA, 21 nt, Human herpesvirus 6B
caguugucugcggaaauaauu

SEQ ID NO: 3994667 - RNA, 20 nt, Human herpesvirus 6B
caguuuuuuguuucuggggg

SEQ ID NO: 3994668 - RNA, 19 nt, Human herpesvirus 6B
cauaaaaaagagauaaucu

SEQ ID NO: 3994669 - RNA, 23 nt, Human herpesvirus 6B
cauaagggacagcaguuuuuugg

SEQ ID NO: 3994670 - RNA, 20 nt, Human herpesvirus 6B
cauacauccagaaaagcaaa

SEQ ID NO: 3994671 - RNA, 20 nt, Human herpesvirus 6B
cauagacugaacacaaaaac

SEQ ID NO: 3994672 - RNA, 16 nt, Human herpesvirus 6B
cauagaguuucgagaa

SEQ ID NO: 3994673 - RNA, 20 nt, Human herpesvirus 6B
cauagaguuucgagaaagag

SEQ ID NO: 3994674 - RNA, 18 nt, Human herpesvirus 6B
cgcggcgcugggcuccuc

SEQ ID NO: 3994675 - RNA, 13 nt, Human herpesvirus 6B
cgcgggacagcgg

SEQ ID NO: 3994676 - RNA, 19 nt, Human herpesvirus 6B
cgcgggaccuggcgggcac

SEQ ID NO: 3994677 - RNA, 18 nt, Human herpesvirus 6B
cgcgguggacggcgaggg

SEQ ID NO: 3994678 - RNA, 16 nt, Human herpesvirus 6B
cgcgguugaagucuuu

SEQ ID NO: 3994679 - RNA, 18 nt, Human herpesvirus 6B
cgcguuuuuggugaaaaa

SEQ ID NO: 3994680 - RNA, 20 nt, Human herpesvirus 6B
cgcucgggggacggagagga

SEQ ID NO: 3994681 - RNA, 18 nt, Human herpesvirus 6B
cggaagacgaugcagggu

SEQ ID NO: 3994682 - RNA, 22 nt, Human herpesvirus 6B
cggaauaaugaaauuuaagaag

SEQ ID NO: 3994683 - RNA, 18 nt, Human herpesvirus 6B
cggacagagcggagaggc

SEQ ID NO: 3994684 - RNA, 22 nt, Human herpesvirus 6B
cggagauauaccgugacagcaa

SEQ ID NO: 3994685 - RNA, 17 nt, Human herpesvirus 6B
cggagcaaccgcaguuc

SEQ ID NO: 3994686 - RNA, 20 nt, Human herpesvirus 6B
cggaggcuacggcuaaggcg

SEQ ID NO: 3994687 - RNA, 16 nt, Human herpesvirus 6B
cggagucggucuguuc

SEQ ID NO: 3994688 - RNA, 19 nt, Human herpesvirus 6B
cggauacgggugcuguccc

SEQ ID NO: 3994689 - RNA, 20 nt, Human herpesvirus 6B
cggauuuuauuuuaucucau

SEQ ID NO: 3994690 - RNA, 15 nt, Human herpesvirus 6B
cggcaaccgcaguuc

SEQ ID NO: 3994691 - RNA, 16 nt, Human herpesvirus 6B
cggcacauacacacgc

SEQ ID NO: 3994692 - RNA, 18 nt, Human herpesvirus 6B
cggcagcggggaagggaa

SEQ ID NO: 3994693 - RNA, 14 nt, Human herpesvirus 6B
cggcauuuguguuu

SEQ ID NO: 3994694 - RNA, 13 nt, Human herpesvirus 6B
cggcgcgcgccgu

SEQ ID NO: 3994695 - RNA, 15 nt, Human herpesvirus 6B
cggcggauggagccc

SEQ ID NO: 3994696 - RNA, 15 nt, Human herpesvirus 6B
cggcggcugucgccg

SEQ ID NO: 3994697 - RNA, 13 nt, Human herpesvirus 6B
cgggaagacgaua

SEQ ID NO: 3994698 - RNA, 16 nt, Human herpesvirus 6B
cgggcagggcgggcac

SEQ ID NO: 3994699 - RNA, 20 nt, Human herpesvirus 6B
cgggccuggggacagacagg

SEQ ID NO: 3994700 - RNA, 20 nt, Human herpesvirus 6B
cgggcguuaucgacggcagc

SEQ ID NO: 3994701 - RNA, 16 nt, Human herpesvirus 6B
cggggaggaggaggaa

SEQ ID NO: 3994702 - RNA, 14 nt, Human herpesvirus 6B
cgguccccccuccc

SEQ ID NO: 3994703 - RNA, 17 nt, Human herpesvirus 6B
cgguggugaucggcaga

SEQ ID NO: 3994704 - RNA, 21 nt, Human herpesvirus 6B
cgguuaaagaaucugcagauu

SEQ ID NO: 3994705 - RNA, 17 nt, Human herpesvirus 6B
cgucaggaccagcucug

SEQ ID NO: 3994706 - RNA, 16 nt, Human herpesvirus 6B
cguccauaggcucggc

SEQ ID NO: 3994707 - RNA, 14 nt, Human herpesvirus 6B
cgucguggcagaac

SEQ ID NO: 3994708 - RNA, 20 nt, Human herpesvirus 6B
cgugaaaacgcuucagauuc

SEQ ID NO: 3994709 - RNA, 17 nt, Human herpesvirus 6B
cgugcucuccgcgcugc

SEQ ID NO: 3994710 - RNA, 15 nt, Human herpesvirus 6B
cguggaagccgcugc

SEQ ID NO: 3994711 - RNA, 17 nt, Human herpesvirus 6B
cgugguggccgucuguc

SEQ ID NO: 3994712 - RNA, 19 nt, Human herpesvirus 6B
cguuacaguaaaaaagccg

SEQ ID NO: 3994713 - RNA, 20 nt, Human herpesvirus 6B
cguucaggucaagcgccagg

SEQ ID NO: 3994714 - RNA, 18 nt, Human herpesvirus 6B
cguuuguacauguuaaca

SEQ ID NO: 3994715 - RNA, 22 nt, Human herpesvirus 6B
cuaaagaguaugacagaaaucu

SEQ ID NO: 3994716 - RNA, 20 nt, Human herpesvirus 6B
cuaacuguuguucuuggaga

SEQ ID NO: 3994717 - RNA, 19 nt, Human herpesvirus 6B
cuaagaaaccgauuuacca

SEQ ID NO: 3994718 - RNA, 21 nt, Human herpesvirus 6B
cuaagcucguuaguaauuugg

SEQ ID NO: 3994719 - RNA, 19 nt, Human herpesvirus 6B
cuaagcuguaugacaucua

SEQ ID NO: 3994720 - RNA, 18 nt, Human herpesvirus 6B
cuaaucaagaaaccuguu

SEQ ID NO: 3994721 - RNA, 14 nt, Human herpesvirus 6B
cuacaucaaaaucc

SEQ ID NO: 3994722 - RNA, 17 nt, Human herpesvirus 6B
cuaccgcccugcuccgu

SEQ ID NO: 3994723 - RNA, 13 nt, Human herpesvirus 6B
cuagacacacaga

SEQ ID NO: 3994724 - RNA, 15 nt, Human herpesvirus 6B
cuagacgugucuuca

SEQ ID NO: 3994725 - RNA, 14 nt, Human herpesvirus 6B
cuagauaacucaga

SEQ ID NO: 3994726 - RNA, 23 nt, Human herpesvirus 6B
cuauauuuucguugaagaauaag

SEQ ID NO: 3994727 - RNA, 19 nt, Human herpesvirus 6B
cuaugagaaccacagccag

SEQ ID NO: 3994728 - RNA, 18 nt, Human herpesvirus 6B
cuauguuaacauugugag

SEQ ID NO: 3994729 - RNA, 16 nt, Human herpesvirus 6B
cuauguuauguaaaga

SEQ ID NO: 3994730 - RNA, 22 nt, Human herpesvirus 6B
cuauucaggaauauuuaguuua

SEQ ID NO: 3994731 - RNA, 11 nt, Human herpesvirus 6B
cuauucuaauu

SEQ ID NO: 3994732 - RNA, 16 nt, Human herpesvirus 6B
cuauuuaacugggaaa

SEQ ID NO: 3994733 - RNA, 14 nt, Human herpesvirus 6B
cucacauagagaag

SEQ ID NO: 3994734 - RNA, 15 nt, Human herpesvirus 6B
cucaccuucagacuc

SEQ ID NO: 3994735 - RNA, 14 nt, Human herpesvirus 6B
cucacgaauuuaaa

SEQ ID NO: 3994736 - RNA, 21 nt, Human herpesvirus 6B
cucauggaucaggucggcagg

SEQ ID NO: 3994737 - RNA, 16 nt, Human herpesvirus 6B
cucauguugauuuuag

SEQ ID NO: 3994738 - RNA, 15 nt, Human herpesvirus 6B
cucccauagaggcgc

SEQ ID NO: 3994739 - RNA, 15 nt, Human herpesvirus 6B
cucccguccguggaa

SEQ ID NO: 3994740 - RNA, 17 nt, Human herpesvirus 6B
cuccgccggguaugagc

SEQ ID NO: 3994741 - RNA, 19 nt, Human herpesvirus 6B
cuccgcgagacgguacagc

SEQ ID NO: 3994742 - RNA, 13 nt, Human herpesvirus 6B
cuccucccacgcc

SEQ ID NO: 3994743 - RNA, 20 nt, Human herpesvirus 6B
cucgacaaccaacgugauaa

SEQ ID NO: 3994744 - RNA, 13 nt, Human herpesvirus 6B
cucgaugccaaag

SEQ ID NO: 3994745 - RNA, 15 nt, Human herpesvirus 6B
cucgaugccaaagcu

SEQ ID NO: 3994746 - RNA, 16 nt, Human herpesvirus 6B
cucgggggacggagag

SEQ ID NO: 3994747 - RNA, 20 nt, Human herpesvirus 6B
cucgggggacggagaggaag

SEQ ID NO: 3994748 - RNA, 17 nt, Human herpesvirus 6B
cucgguauaucuucuug

SEQ ID NO: 3994749 - RNA, 19 nt, Human herpesvirus 6B
cucguaccccggcuuucuc

SEQ ID NO: 3994750 - RNA, 13 nt, Human herpesvirus 6B
cucguugggaugg

SEQ ID NO: 3994751 - RNA, 18 nt, Human herpesvirus 6B
cucuaccgucagaggcuu

SEQ ID NO: 3994752 - RNA, 15 nt, Human herpesvirus 6B
cucucacccccacuc

SEQ ID NO: 3994753 - RNA, 13 nt, Human herpesvirus 6B
cucucacggccau

SEQ ID NO: 3994754 - RNA, 13 nt, Human herpesvirus 6B
cucucuucaggag

SEQ ID NO: 3994755 - RNA, 22 nt, Human herpesvirus 6B
cucugcggcucucugcccuucu

SEQ ID NO: 3994756 - RNA, 16 nt, Human herpesvirus 6B
cucuggcugaaggaau

SEQ ID NO: 3994757 - RNA, 12 nt, Human herpesvirus 6B
cucuugcagugg

SEQ ID NO: 3994758 - RNA, 23 nt, Human herpesvirus 6B
cucuuuguuuuuuuuuuucugug

SEQ ID NO: 3994759 - RNA, 19 nt, Human herpesvirus 6B
cugagaccgagagaauaga

SEQ ID NO: 3994760 - RNA, 19 nt, Human herpesvirus 6B
cugauauggcaaauuucaa

SEQ ID NO: 3994761 - RNA, 16 nt, Human herpesvirus 6B
cugaucgguauuugcg

SEQ ID NO: 3994762 - RNA, 19 nt, Human herpesvirus 6B
cugaugacuuuucugauga

SEQ ID NO: 3994763 - RNA, 19 nt, Human herpesvirus 6B
cugauuccuucaauguuuu

SEQ ID NO: 3994764 - RNA, 23 nt, Human herpesvirus 6B
cugauuuucagugucagcauugu

SEQ ID NO: 3994765 - RNA, 12 nt, Human herpesvirus 6B
cugcaaaacaaa

SEQ ID NO: 3994766 - RNA, 18 nt, Human herpesvirus 6B
cugcaauuugguucagcu

SEQ ID NO: 3994767 - RNA, 23 nt, Human herpesvirus 6B
cugcagggaugugguaugagcug

SEQ ID NO: 3994768 - RNA, 15 nt, Human herpesvirus 6B
cugcccccacgggcc

SEQ ID NO: 3994769 - RNA, 21 nt, Human herpesvirus 6B
cugcucaugucaguauuucgc

SEQ ID NO: 3994770 - RNA, 14 nt, Human herpesvirus 6B
cugcuuuguuuucu

SEQ ID NO: 3994771 - RNA, 14 nt, Human herpesvirus 6B
cuggacagaaaguc

SEQ ID NO: 3994772 - RNA, 14 nt, Human herpesvirus 6B
cuggauuaucagag

SEQ ID NO: 3994773 - RNA, 18 nt, Human herpesvirus 6B
cuggccaaucauaagaaa

SEQ ID NO: 3994774 - RNA, 22 nt, Human herpesvirus 6B
cuggcgcuuguaggagcacgag

SEQ ID NO: 3994775 - RNA, 22 nt, Human herpesvirus 6B
cuggcgggcaccgagggcgggc

SEQ ID NO: 3994776 - RNA, 14 nt, Human herpesvirus 6B
cuggggacagacag

SEQ ID NO: 3994777 - RNA, 20 nt, Human herpesvirus 6B
cugguuacgcagaauccugu

SEQ ID NO: 3994778 - RNA, 12 nt, Human herpesvirus 6B
cuguaaaguuug

SEQ ID NO: 3994779 - RNA, 16 nt, Human herpesvirus 6B
cuguacacaaaaaccg

SEQ ID NO: 3994780 - RNA, 19 nt, Human herpesvirus 6B
cuguacgauuacuguccgu

SEQ ID NO: 3994781 - RNA, 13 nt, Human herpesvirus 6B
uuuauaugcauuu

SEQ ID NO: 3994782 - RNA, 24 nt, Human herpesvirus 6B
uuuaugaaaucgauguagauguuu

SEQ ID NO: 3994783 - RNA, 23 nt, Human herpesvirus 6B
uuuaugcagcucgggaaagauuu

SEQ ID NO: 3994784 - RNA, 13 nt, Human herpesvirus 6B
uuuaugucuguca

SEQ ID NO: 3994785 - RNA, 17 nt, Human herpesvirus 6B
uuucaccccccucuugc

SEQ ID NO: 3994786 - RNA, 13 nt, Human herpesvirus 6B
uuucauacuguau

SEQ ID NO: 3994787 - RNA, 14 nt, Human herpesvirus 6B
uuucauauuuuuaa

SEQ ID NO: 3994788 - RNA, 19 nt, Human herpesvirus 6B
uuucgugcgaaaaaacagu

SEQ ID NO: 3994789 - RNA, 16 nt, Human herpesvirus 6B
uuucugcgacaaaaaa

SEQ ID NO: 3994790 - RNA, 12 nt, Human herpesvirus 6B
uuucuuugacau

SEQ ID NO: 3994791 - RNA, 15 nt, Human herpesvirus 6B
uuugacaauaaacau

SEQ ID NO: 3994792 - RNA, 17 nt, Human herpesvirus 6B
uuugacaccucauauca

SEQ ID NO: 3994793 - RNA, 18 nt, Human herpesvirus 6B
uuugcgcaauucuucucu

SEQ ID NO: 3994794 - RNA, 15 nt, Human herpesvirus 6B
uuuggcauauacaaa

SEQ ID NO: 3994795 - RNA, 22 nt, Human herpesvirus 6B
uuuguacucgcuuacgaucuuu

SEQ ID NO: 3994796 - RNA, 16 nt, Human herpesvirus 6B
uuugucguuuguacau

SEQ ID NO: 3994797 - RNA, 21 nt, Human herpesvirus 6B
uuugucguuuguacauguuaa

SEQ ID NO: 3994798 - RNA, 22 nt, Human herpesvirus 6B
uuuuaaaagugcaacaaagagc

SEQ ID NO: 3994799 - RNA, 15 nt, Human herpesvirus 6B
uuuuauuuuaucuca

SEQ ID NO: 3994800 - RNA, 11 nt, Human herpesvirus 6B
uuuucugcaaa

SEQ ID NO: 3994801 - RNA, 17 nt, Human herpesvirus 6B
uuuucugccugcguuaa

SEQ ID NO: 3994802 - RNA, 22 nt, Human herpesvirus 6B
uuuucugccugcguuaagugaa

SEQ ID NO: 3994803 - RNA, 12 nt, Human herpesvirus 6B
uuuugaaaaggu

SEQ ID NO: 3994804 - RNA, 16 nt, Human herpesvirus 6B
uuuugaagguaucaaa

SEQ ID NO: 3994805 - RNA, 16 nt, Human herpesvirus 6B
uuuugcgaagaauugg

SEQ ID NO: 3994806 - RNA, 19 nt, Human herpesvirus 6B
aagaaguuguuuagaaagc

SEQ ID NO: 3994807 - RNA, 23 nt, Human herpesvirus 6B
aagaauccgcgggccagcccuga

SEQ ID NO: 3994808 - RNA, 17 nt, Human herpesvirus 6B
aagaaugggauugucau

SEQ ID NO: 3994809 - RNA, 15 nt, Human herpesvirus 6B
aagacguuuuugugu

SEQ ID NO: 3994810 - RNA, 18 nt, Human herpesvirus 6B
aagacuuagcuagacgug

SEQ ID NO: 3994811 - RNA, 15 nt, Human herpesvirus 6B
aagagagauacaggu

SEQ ID NO: 3994812 - RNA, 21 nt, Human herpesvirus 6B
aagagcuuuaaagcagcuaga

SEQ ID NO: 3994813 - RNA, 15 nt, Human herpesvirus 6B
aagaggaagggaugg

SEQ ID NO: 3994814 - RNA, 21 nt, Human herpesvirus 6B
aagauugcgucuuuuguaaag

SEQ ID NO: 3994815 - RNA, 22 nt, Human herpesvirus 6B
aagauugcgucuuuuguaaaga

SEQ ID NO: 3994816 - RNA, 15 nt, Human herpesvirus 6B
aagauuguucagagc

SEQ ID NO: 3994817 - RNA, 18 nt, Human herpesvirus 6B
aagauuuaaaaaugauaa

SEQ ID NO: 3994818 - RNA, 22 nt, Human herpesvirus 6B
aagcgccugccuacacugcgaa

SEQ ID NO: 3994819 - RNA, 22 nt, Human herpesvirus 6B
aagcuauguaugaacaggugcu

SEQ ID NO: 3994820 - RNA, 13 nt, Human herpesvirus 6B
aagcuuucuguac

SEQ ID NO: 3994821 - RNA, 22 nt, Human herpesvirus 6B
aaggcagcuggcaaugcaaagc

SEQ ID NO: 3994822 - RNA, 12 nt, Human herpesvirus 6B
aaggcggacagc

SEQ ID NO: 3994823 - RNA, 19 nt, Human herpesvirus 6B
aagguguuaaacgaaaacu

SEQ ID NO: 3994824 - RNA, 23 nt, Human herpesvirus 6B
aagguguuugaucuagauaaagu

SEQ ID NO: 3994825 - RNA, 18 nt, Human herpesvirus 6B
aaguauacggaagugcau

SEQ ID NO: 3994826 - RNA, 22 nt, Human herpesvirus 6B
aaguccgauauugaagaacugg

SEQ ID NO: 3994827 - RNA, 23 nt, Human herpesvirus 6B
aagucuuauuuuucuauguuaug

SEQ ID NO: 3994828 - RNA, 18 nt, Human herpesvirus 6B
aaguggaaguguaaaugu

SEQ ID NO: 3994829 - RNA, 17 nt, Human herpesvirus 6B
aaguuucggcaacugaa

SEQ ID NO: 3994830 - RNA, 14 nt, Human herpesvirus 6B
aauaaacaugauug

SEQ ID NO: 3994831 - RNA, 15 nt, Human herpesvirus 6B
aauaaaucaugugaa

SEQ ID NO: 3994832 - RNA, 21 nt, Human herpesvirus 6B
aauaacgguguugaguuuauc

SEQ ID NO: 3994833 - RNA, 16 nt, Human herpesvirus 6B
aauaauagguuauuua

SEQ ID NO: 3994834 - RNA, 21 nt, Human herpesvirus 6B
aauaauauaaaagaaacucuu

SEQ ID NO: 3994835 - RNA, 12 nt, Human herpesvirus 6B
aauaauuacaaa

SEQ ID NO: 3994836 - RNA, 15 nt, Human herpesvirus 6B
aauagagaaaaauaa

SEQ ID NO: 3994837 - RNA, 21 nt, Human herpesvirus 6B
aauaucaugauaaauuguuuc

SEQ ID NO: 3994838 - RNA, 17 nt, Human herpesvirus 6B
aauauugguauugauuu

SEQ ID NO: 3994839 - RNA, 19 nt, Human herpesvirus 6B
aauauuuuuucagcuuuca

SEQ ID NO: 3994840 - RNA, 21 nt, Human herpesvirus 6B
aauauuuuuucagcuuucaua

SEQ ID NO: 3994841 - RNA, 16 nt, Human herpesvirus 6B
aaucaaaaaaaugaua

SEQ ID NO: 3994842 - RNA, 15 nt, Human herpesvirus 6B
aaucaagaaacacuu

SEQ ID NO: 3994843 - RNA, 21 nt, Human herpesvirus 6B
aaucauccguucagcuuuaua

SEQ ID NO: 3994844 - RNA, 22 nt, Human herpesvirus 6B
aauccgcgggccagcccugaag

SEQ ID NO: 3994845 - RNA, 20 nt, Human herpesvirus 6B
aaucggguaaauaugugaaa

SEQ ID NO: 3994846 - RNA, 17 nt, Human herpesvirus 6B
aaucguguuuucuuaug

SEQ ID NO: 3994847 - RNA, 20 nt, Human herpesvirus 6B
aaucuauuaauuuugaagac

SEQ ID NO: 3994848 - RNA, 17 nt, Human herpesvirus 6B
aaucucaagaaacaagu

SEQ ID NO: 3994849 - RNA, 16 nt, Human herpesvirus 6B
aaucuccaaaacacuc

SEQ ID NO: 3994850 - RNA, 18 nt, Human herpesvirus 6B
aaucucgaugccaaagcu

SEQ ID NO: 3994851 - RNA, 20 nt, Human herpesvirus 6B
aaucuguaagauuaaaugug

SEQ ID NO: 3994852 - RNA, 22 nt, Human herpesvirus 6B
aaugacgaccauacguggugau

SEQ ID NO: 3994853 - RNA, 17 nt, Human herpesvirus 6B
aaugacuaucaaaauaa

SEQ ID NO: 3994854 - RNA, 12 nt, Human herpesvirus 6B
aaugagccuggc

SEQ ID NO: 3994855 - RNA, 21 nt, Human herpesvirus 6B
aaugaguugcacauguuucug

SEQ ID NO: 3994856 - RNA, 19 nt, Human herpesvirus 6B
aaugauaacuguuuuuguc

SEQ ID NO: 3994857 - RNA, 18 nt, Human herpesvirus 6B
aaugaugcauacagcaug

SEQ ID NO: 3994858 - RNA, 15 nt, Human herpesvirus 6B
aauggaaagauugga

SEQ ID NO: 3994859 - RNA, 16 nt, Human herpesvirus 6B
aaugguuucaaagucg

SEQ ID NO: 3994860 - RNA, 23 nt, Human herpesvirus 6B
aauguguucauagagcauccugu

SEQ ID NO: 3994861 - RNA, 16 nt, Human herpesvirus 6B
aauuaaucauuucgau

SEQ ID NO: 3994862 - RNA, 19 nt, Human herpesvirus 6B
aauuaugacugacaaggua

SEQ ID NO: 3994863 - RNA, 18 nt, Human herpesvirus 6B
aauuauugugacaaggua

SEQ ID NO: 3994864 - RNA, 21 nt, Human herpesvirus 6B
aauugauugggucuuucccgu

SEQ ID NO: 3994865 - RNA, 17 nt, Human herpesvirus 6B
aauuuaaacagaaauuu

SEQ ID NO: 3994866 - RNA, 12 nt, Human herpesvirus 6B
aauuuagacgaa

SEQ ID NO: 3994867 - RNA, 14 nt, Human herpesvirus 6B
aauuuauauucgac

SEQ ID NO: 3994868 - RNA, 22 nt, Human herpesvirus 6B
aauuuccagggugaagacagaa

SEQ ID NO: 3994869 - RNA, 14 nt, Human herpesvirus 6B
aauuucuuuggagg

SEQ ID NO: 3994870 - RNA, 20 nt, Human herpesvirus 6B
aauuuuaaauauuaauaguu

SEQ ID NO: 3994871 - RNA, 23 nt, Human herpesvirus 6B
acaaauaauuuuauugacuguga

SEQ ID NO: 3994872 - RNA, 14 nt, Human herpesvirus 6B
acaaaucugaaugu

SEQ ID NO: 3994873 - RNA, 18 nt, Human herpesvirus 6B
acaacacaauauaugaaa

SEQ ID NO: 3994874 - RNA, 14 nt, Human herpesvirus 6B
acaacaucucauaa

SEQ ID NO: 3994875 - RNA, 13 nt, Human herpesvirus 6B
acaacgugugaaa

SEQ ID NO: 3994876 - RNA, 16 nt, Human herpesvirus 6B
acaaggaucucgaaau

SEQ ID NO: 3994877 - RNA, 22 nt, Human herpesvirus 6B
acaaggguaacgcaggagaaac

SEQ ID NO: 3994878 - RNA, 22 nt, Human herpesvirus 6B
acaaguggaaguguaaauguca

SEQ ID NO: 3994879 - RNA, 20 nt, Human herpesvirus 6B
acaaugccaacacuguuguu

SEQ ID NO: 3994880 - RNA, 17 nt, Human herpesvirus 6B
acaauuuacacaggaug

SEQ ID NO: 3994881 - RNA, 13 nt, Human herpesvirus 6B
acacaacacaucu

SEQ ID NO: 3994882 - RNA, 16 nt, Human herpesvirus 6B
acaccgaauuuauuca

SEQ ID NO: 3994883 - RNA, 17 nt, Human herpesvirus 6B
acaccgacacgucucca

SEQ ID NO: 3994884 - RNA, 18 nt, Human herpesvirus 6B
acaccgcagacaucacaa

SEQ ID NO: 3994885 - RNA, 22 nt, Human herpesvirus 6B
acaccgugucaaaaaaaaauga

SEQ ID NO: 3994886 - RNA, 18 nt, Human herpesvirus 6B
acacggccacccgcgucu

SEQ ID NO: 3994887 - RNA, 20 nt, Human herpesvirus 6B
acacuguuguuaaucuguuu

SEQ ID NO: 3994888 - RNA, 21 nt, Human herpesvirus 6B
acacuguuguuaaucuguuua

SEQ ID NO: 3994889 - RNA, 21 nt, Human herpesvirus 6B
acacuuucuucgccuguaaag

SEQ ID NO: 3994890 - RNA, 22 nt, Human herpesvirus 6B
acagaaaaaaaaauguuuuguc

SEQ ID NO: 3994891 - RNA, 16 nt, Human herpesvirus 6B
acagcgcauaaauaaa

SEQ ID NO: 3994892 - RNA, 19 nt, Human herpesvirus 6B
acagcuuguccgaaauaca

SEQ ID NO: 3994893 - RNA, 19 nt, Human herpesvirus 6B
acagcuuugcagaacgaga

SEQ ID NO: 3994894 - RNA, 23 nt, Human herpesvirus 6B
acaguacaagaagggguuccuuc

SEQ ID NO: 3994895 - RNA, 15 nt, Human herpesvirus 6B
acaguucguccagca

SEQ ID NO: 3994896 - RNA, 18 nt, Human herpesvirus 6B
acaguucguccagcagcg

SEQ ID NO: 3994897 - RNA, 20 nt, Human herpesvirus 6B
acauaugcaaucugugggaa

SEQ ID NO: 3994898 - RNA, 13 nt, Human herpesvirus 6B
acauccaaaauac

SEQ ID NO: 3994899 - RNA, 12 nt, Human herpesvirus 6B
acaucuaugaug

SEQ ID NO: 3994900 - RNA, 18 nt, Human herpesvirus 6B
acaugacggacuuggaaa

SEQ ID NO: 3994901 - RNA, 17 nt, Human herpesvirus 6B
acaugagcgagaauguu

SEQ ID NO: 3994902 - RNA, 15 nt, Human herpesvirus 6B
acauuagagaaauuu

SEQ ID NO: 3994903 - RNA, 22 nt, Human herpesvirus 6B
accaagaaucguuaaaugagau

SEQ ID NO: 3994904 - RNA, 18 nt, Human herpesvirus 6B
accauguucgccucuccc

SEQ ID NO: 3994905 - RNA, 15 nt, Human herpesvirus 6B
acccaugaaaaucau

SEQ ID NO: 3994906 - RNA, 17 nt, Human herpesvirus 6B
accccccucuugcagug

SEQ ID NO: 3994907 - RNA, 22 nt, Human herpesvirus 6B
accgcccugcuccguucccuuc

SEQ ID NO: 3994908 - RNA, 16 nt, Human herpesvirus 6B
accgucaagaaguugu

SEQ ID NO: 3994909 - RNA, 18 nt, Human herpesvirus 6B
accucaaaaaugcacaau

SEQ ID NO: 3994910 - RNA, 13 nt, Human herpesvirus 6B
accuuagcucuaa

SEQ ID NO: 3994911 - RNA, 21 nt, Human herpesvirus 6B
accuugucacaauaauuacuc

SEQ ID NO: 3994912 - RNA, 15 nt, Human herpesvirus 6B
acgaacauucaaugg

SEQ ID NO: 3994913 - RNA, 13 nt, Human herpesvirus 6B
acgacaugugguu

SEQ ID NO: 3994914 - RNA, 16 nt, Human herpesvirus 6B
acgaucucauaugcau

SEQ ID NO: 3994915 - RNA, 19 nt, Human herpesvirus 6B
acgauguuacgucuuugga

SEQ ID NO: 3994916 - RNA, 13 nt, Human herpesvirus 6B
acgcaaagggaag

SEQ ID NO: 3994917 - RNA, 15 nt, Human herpesvirus 6B
acgccauccacccau

SEQ ID NO: 3994918 - RNA, 23 nt, Human herpesvirus 6B
uggauuaucagagagugacaucu

SEQ ID NO: 3994919 - RNA, 15 nt, Human herpesvirus 6B
uggauuauguuaauu

SEQ ID NO: 3994920 - RNA, 23 nt, Human herpesvirus 6B
uggauuccauccgcuaagagauu

SEQ ID NO: 3994921 - RNA, 17 nt, Human herpesvirus 6B
uggcagccuaaacggag

SEQ ID NO: 3994922 - RNA, 15 nt, Human herpesvirus 6B
uggccgucuccugca

SEQ ID NO: 3994923 - RNA, 17 nt, Human herpesvirus 6B
uggcgcuuguaggagca

SEQ ID NO: 3994924 - RNA, 14 nt, Human herpesvirus 6B
uggcgggcaccgag

SEQ ID NO: 3994925 - RNA, 19 nt, Human herpesvirus 6B
uggcguuccgaauccugug

SEQ ID NO: 3994926 - RNA, 16 nt, Human herpesvirus 6B
uggcuuggccagccac

SEQ ID NO: 3994927 - RNA, 20 nt, Human herpesvirus 6B
ugggggauggguuaggguua

SEQ ID NO: 3994928 - RNA, 21 nt, Human herpesvirus 6B
uggguacaaugccaacacugu

SEQ ID NO: 3994929 - RNA, 15 nt, Human herpesvirus 6B
ugguaauaaacagac

SEQ ID NO: 3994930 - RNA, 20 nt, Human herpesvirus 6B
ugguaauccaugaacuacag

SEQ ID NO: 3994931 - RNA, 16 nt, Human herpesvirus 6B
ugguauugauuucuau

SEQ ID NO: 3994932 - RNA, 23 nt, Human herpesvirus 6B
uggucaagggcaagguucucagc

SEQ ID NO: 3994933 - RNA, 18 nt, Human herpesvirus 6B
ugguggcgaucuguauau

SEQ ID NO: 3994934 - RNA, 21 nt, Human herpesvirus 6B
uguaagcgaauugguuugcuu

SEQ ID NO: 3994935 - RNA, 18 nt, Human herpesvirus 6B
uguacaacgacugggaga

SEQ ID NO: 3994936 - RNA, 19 nt, Human herpesvirus 6B
uguacauguuaacaauaaa

SEQ ID NO: 3994937 - RNA, 21 nt, Human herpesvirus 6B
uguacgccauacgggaaaaga

SEQ ID NO: 3994938 - RNA, 11 nt, Human herpesvirus 6B
uguagaagaag

SEQ ID NO: 3994939 - RNA, 12 nt, Human herpesvirus 6B
uguagcagcugg

SEQ ID NO: 3994940 - RNA, 17 nt, Human herpesvirus 6B
uguaguuaguuuugaua

SEQ ID NO: 3994941 - RNA, 16 nt, Human herpesvirus 6B
uguaguugaugcuguu

SEQ ID NO: 3994942 - RNA, 20 nt, Human herpesvirus 6B
uguauaagagucugcaucaa

SEQ ID NO: 3994943 - RNA, 18 nt, Human herpesvirus 6B
uguauaauauaaauucuu

SEQ ID NO: 3994944 - RNA, 22 nt, Human herpesvirus 6B
uguaucgaggaauguguuucua

SEQ ID NO: 3994945 - RNA, 14 nt, Human herpesvirus 6B
uguaugaggcuauu

SEQ ID NO: 3994946 - RNA, 12 nt, Human herpesvirus 6B
uguauguuucua

SEQ ID NO: 3994947 - RNA, 13 nt, Human herpesvirus 6B
uguauguuucuau

SEQ ID NO: 3994948 - RNA, 22 nt, Human herpesvirus 6B
uguauuguagcagcuggcgaaa

SEQ ID NO: 3994949 - RNA, 16 nt, Human herpesvirus 6B
uguauuugaaaugacg

SEQ ID NO: 3994950 - RNA, 12 nt, Human herpesvirus 6B
uguauuuggaug

SEQ ID NO: 3994951 - RNA, 11 nt, Human herpesvirus 6B
uguccugagaa

SEQ ID NO: 3994952 - RNA, 15 nt, Human herpesvirus 6B
ugucgcccgccucuc

SEQ ID NO: 3994953 - RNA, 15 nt, Human herpesvirus 6B
ugucgggccacauuu

SEQ ID NO: 3994954 - RNA, 15 nt, Human herpesvirus 6B
ugucguuuguacaug

SEQ ID NO: 3994955 - RNA, 15 nt, Human herpesvirus 6B
ugucuggcuguaucu

SEQ ID NO: 3994956 - RNA, 21 nt, Human herpesvirus 6B
ugucuuggaagagagaugcuu

SEQ ID NO: 3994957 - RNA, 18 nt, Human herpesvirus 6B
ugugaacguguuuggaca

SEQ ID NO: 3994958 - RNA, 16 nt, Human herpesvirus 6B
ugugaggugauuugaa

SEQ ID NO: 3994959 - RNA, 20 nt, Human herpesvirus 6B
ugugauaguuauuuuguaua

SEQ ID NO: 3994960 - RNA, 13 nt, Human herpesvirus 6B
ugugaucaagugg

SEQ ID NO: 3994961 - RNA, 23 nt, Human herpesvirus 6B
uguggcuauuugacaauaaacau

SEQ ID NO: 3994962 - RNA, 22 nt, Human herpesvirus 6B
ugugggaaaauaauauuugcaa

SEQ ID NO: 3994963 - RNA, 18 nt, Human herpesvirus 6B
uguuagcaagcugggaaa

SEQ ID NO: 3994964 - RNA, 21 nt, Human herpesvirus 6B
uguuaugcaguuguacucaaa

SEQ ID NO: 3994965 - RNA, 12 nt, Human herpesvirus 6B
uguucucuccca

SEQ ID NO: 3994966 - RNA, 16 nt, Human herpesvirus 6B
uguucuuuugucauug

SEQ ID NO: 3994967 - RNA, 18 nt, Human herpesvirus 6B
uguugaguaauuggacau

SEQ ID NO: 3994968 - RNA, 16 nt, Human herpesvirus 6B
uguuguucuuggagac

SEQ ID NO: 3994969 - RNA, 15 nt, Human herpesvirus 6B
uguuuaacuaauaaa

SEQ ID NO: 3994970 - RNA, 13 nt, Human herpesvirus 6B
uguuuccagaaua

SEQ ID NO: 3994971 - RNA, 12 nt, Human herpesvirus 6B
uguuucuuagaa

SEQ ID NO: 3994972 - RNA, 20 nt, Human herpesvirus 6B
uguuuucaaugguauucgaa

SEQ ID NO: 3994973 - RNA, 19 nt, Human herpesvirus 6B
uguuuuguacaaagguuuu

SEQ ID NO: 3994974 - RNA, 21 nt, Human herpesvirus 6B
uuaaaacucuaaaaccugcua

SEQ ID NO: 3994975 - RNA, 13 nt, Human herpesvirus 6B
uuaaaagugcaac

SEQ ID NO: 3994976 - RNA, 19 nt, Human herpesvirus 6B
uuaaaaucaaaaaaaucuc

SEQ ID NO: 3994977 - RNA, 17 nt, Human herpesvirus 6B
uuaaacgaaaacuuuuu

SEQ ID NO: 3994978 - RNA, 15 nt, Human herpesvirus 6B
uuaaauccuagaguu

SEQ ID NO: 3994979 - RNA, 15 nt, Human herpesvirus 6B
uuaaaugacacagaa

SEQ ID NO: 3994980 - RNA, 20 nt, Human herpesvirus 6B
uuaaauuguuuuaaacauuc

SEQ ID NO: 3994981 - RNA, 13 nt, Human herpesvirus 6B
uuaacugucaugu

SEQ ID NO: 3994982 - RNA, 14 nt, Human herpesvirus 6B
uuaagaagaaacaa

SEQ ID NO: 3994983 - RNA, 15 nt, Human herpesvirus 6B
uuaauccauauuugg

SEQ ID NO: 3994984 - RNA, 13 nt, Human herpesvirus 6B
uuaaucggaaugu

SEQ ID NO: 3994985 - RNA, 11 nt, Human herpesvirus 6B
uuacaaguaug

SEQ ID NO: 3994986 - RNA, 16 nt, Human herpesvirus 6B
uuacaugaaaacauuc

SEQ ID NO: 3994987 - RNA, 20 nt, Human herpesvirus 6B
uuaccagagauacgugauac

SEQ ID NO: 3994988 - RNA, 18 nt, Human herpesvirus 6B
uuacgagaccuguuugag

SEQ ID NO: 3994989 - RNA, 16 nt, Human herpesvirus 6B
uuacgugccguguuac

SEQ ID NO: 3994990 - RNA, 19 nt, Human herpesvirus 6B
uuacuguccgcuucccagc

SEQ ID NO: 3994991 - RNA, 20 nt, Human herpesvirus 6B
uuacuguccguuauuguguu

SEQ ID NO: 3994992 - RNA, 14 nt, Human herpesvirus 6B
uuagaagcauuugc

SEQ ID NO: 3994993 - RNA, 16 nt, Human herpesvirus 6B
uuaggacaugugguaa

SEQ ID NO: 3994994 - RNA, 14 nt, Human herpesvirus 6B
uuagguaucugccc

SEQ ID NO: 3994995 - RNA, 16 nt, Human herpesvirus 6B
uuaguuucuuuggaaa

SEQ ID NO: 3994996 - RNA, 13 nt, Human herpesvirus 6B
uuaguuuuggaug

SEQ ID NO: 3994997 - RNA, 21 nt, Human herpesvirus 6B
uuaucagagagugacaucuua

SEQ ID NO: 3994998 - RNA, 14 nt, Human herpesvirus 6B
uuauccggccaauu

SEQ ID NO: 3994999 - RNA, 13 nt, Human herpesvirus 6B
uuauuugugcaaa

SEQ ID NO: 3995000 - RNA, 11 nt, Human herpesvirus 6B
uucaaaaugac

SEQ ID NO: 3995001 - RNA, 23 nt, Human herpesvirus 6B
uucaacauccuauuaagauucuc

SEQ ID NO: 3995002 - RNA, 17 nt, Human herpesvirus 6B
uucaauaaaaaacuuau

SEQ ID NO: 3995003 - RNA, 17 nt, Human herpesvirus 6B
uucacacgguucugauu

SEQ ID NO: 3995004 - RNA, 18 nt, Human herpesvirus 6B
uucaggcauuaaacugag

SEQ ID NO: 3995005 - RNA, 14 nt, Human herpesvirus 6B
uucagucucagcaa

SEQ ID NO: 3995006 - RNA, 20 nt, Human herpesvirus 6B
uucagugucagcauugucag

SEQ ID NO: 3995007 - RNA, 17 nt, Human herpesvirus 6B
uucauagcguucaaaac

SEQ ID NO: 3995008 - RNA, 14 nt, Human herpesvirus 6B
uucaucgaauccaa

SEQ ID NO: 3995009 - RNA, 18 nt, Human herpesvirus 6B
uuccagguuuuucauaac

SEQ ID NO: 3995010 - RNA, 15 nt, Human herpesvirus 6B
uuccaugacugugag

SEQ ID NO: 3995011 - RNA, 17 nt, Human herpesvirus 6B
uuccuguuuuucucaua

SEQ ID NO: 3995012 - RNA, 12 nt, Human herpesvirus 6B
uucgauguuucc

SEQ ID NO: 3995013 - RNA, 18 nt, Human herpesvirus 6B
uucguaaauccgaaacac

SEQ ID NO: 3995014 - RNA, 13 nt, Human herpesvirus 6B
uucguuuucccgc

SEQ ID NO: 3995015 - RNA, 19 nt, Human herpesvirus 6B
uucuaagacgagauguuuc

SEQ ID NO: 3995016 - RNA, 18 nt, Human herpesvirus 6B
uucuagaugcauuguuga

SEQ ID NO: 3995017 - RNA, 19 nt, Human herpesvirus 6B
uucuccucaacuaaaucau

SEQ ID NO: 3995018 - RNA, 13 nt, Human herpesvirus 6B
uucuccuguaguu

SEQ ID NO: 3995019 - RNA, 17 nt, Human herpesvirus 6B
uucucgaccacgguuaa

SEQ ID NO: 3995020 - RNA, 15 nt, Human herpesvirus 6B
uucucugcaugucuu

SEQ ID NO: 3995021 - RNA, 13 nt, Human herpesvirus 6B
uucucugucgcug

SEQ ID NO: 3995022 - RNA, 12 nt, Human herpesvirus 6B
uucugaaaucuu

SEQ ID NO: 3995023 - RNA, 22 nt, Human herpesvirus 6B
uucugaauacgagaacgguuaa

SEQ ID NO: 3995024 - RNA, 21 nt, Human herpesvirus 6B
uucuggguauuuccuguuuug

SEQ ID NO: 3995025 - RNA, 17 nt, Human herpesvirus 6B
uucuuugacuauuucga

SEQ ID NO: 3995026 - RNA, 22 nt, Human herpesvirus 6B
uucuuugugcgucagcuuugac

SEQ ID NO: 3995027 - RNA, 22 nt, Human herpesvirus 6B
uugaaaagguguuguguuugaa

SEQ ID NO: 3995028 - RNA, 12 nt, Human herpesvirus 6B
uugaagaacugg

SEQ ID NO: 3995029 - RNA, 20 nt, Human herpesvirus 6B
uugaauccucuuagauaucc

SEQ ID NO: 3995030 - RNA, 16 nt, Human herpesvirus 6B
uugacaauaaacauga

SEQ ID NO: 3995031 - RNA, 17 nt, Human herpesvirus 6B
uugacaaucuuggaaaa

SEQ ID NO: 3995032 - RNA, 19 nt, Human herpesvirus 6B
ucuccgucucagugucacu

SEQ ID NO: 3995033 - RNA, 23 nt, Human herpesvirus 6B
ucuccguuacccgggagcuucac

SEQ ID NO: 3995034 - RNA, 16 nt, Human herpesvirus 6B
ucuccugugcguccuc

SEQ ID NO: 3995035 - RNA, 12 nt, Human herpesvirus 6B
ucucucccuacg

SEQ ID NO: 3995036 - RNA, 14 nt, Human herpesvirus 6B
ucucugcaugucuu

SEQ ID NO: 3995037 - RNA, 17 nt, Human herpesvirus 6B
ucugaaaaguuagaguu

SEQ ID NO: 3995038 - RNA, 22 nt, Human herpesvirus 6B
ucugauuauuaucacaaaguuu

SEQ ID NO: 3995039 - RNA, 23 nt, Human herpesvirus 6B
ucugauuuucagugucagcauug

SEQ ID NO: 3995040 - RNA, 22 nt, Human herpesvirus 6B
ucugcaucaagcuucacgugau

SEQ ID NO: 3995041 - RNA, 22 nt, Human herpesvirus 6B
ucugcauuuauaucaaacuuuu

SEQ ID NO: 3995042 - RNA, 20 nt, Human herpesvirus 6B
ucugccccccuucauccagc

SEQ ID NO: 3995043 - RNA, 20 nt, Human herpesvirus 6B
ucuguuacaacaauauguaa

SEQ ID NO: 3995044 - RNA, 15 nt, Human herpesvirus 6B
ucuuaccaagaaauc

SEQ ID NO: 3995045 - RNA, 21 nt, Human herpesvirus 6B
ucuuacgggcgcuuuugacgu

SEQ ID NO: 3995046 - RNA, 20 nt, Human herpesvirus 6B
gcggauuagguaucugcccc

SEQ ID NO: 3995047 - RNA, 18 nt, Human herpesvirus 6B
gcggcauguguaagaaaa

SEQ ID NO: 3995048 - RNA, 13 nt, Human herpesvirus 6B
gcggcgcugggcu

SEQ ID NO: 3995049 - RNA, 20 nt, Human herpesvirus 6B
gcggggcgcaccggcgacac

SEQ ID NO: 3995050 - RNA, 14 nt, Human herpesvirus 6B
gcgucgggcgguuc

SEQ ID NO: 3995051 - RNA, 24 nt, Human herpesvirus 6B
gcgucuccgauccgucaggaccag

SEQ ID NO: 3995052 - RNA, 17 nt, Human herpesvirus 6B
gcgucuuuuguaaagau

SEQ ID NO: 3995053 - RNA, 20 nt, Human herpesvirus 6B
gcguucggucucuggaagca

SEQ ID NO: 3995054 - RNA, 22 nt, Human herpesvirus 6B
gcuaagauuaacaacugccgcc

SEQ ID NO: 3995055 - RNA, 16 nt, Human herpesvirus 6B
gcuaggcuuaaugaau

SEQ ID NO: 3995056 - RNA, 12 nt, Human herpesvirus 6B
gcuauuugacaa

SEQ ID NO: 3995057 - RNA, 18 nt, Human herpesvirus 6B
gcuauuugacaauaaaca

SEQ ID NO: 3995058 - RNA, 12 nt, Human herpesvirus 6B
gcucaagaugaa

SEQ ID NO: 3995059 - RNA, 23 nt, Human herpesvirus 6B
gcuccauaaugguaugccugagc

SEQ ID NO: 3995060 - RNA, 16 nt, Human herpesvirus 6B
gcuccccaggcgcagc

SEQ ID NO: 3995061 - RNA, 14 nt, Human herpesvirus 6B
gcucucccucuucc

SEQ ID NO: 3995062 - RNA, 23 nt, Human herpesvirus 6B
gcucucgaugaaaguuuuggaaa

SEQ ID NO: 3995063 - RNA, 22 nt, Human herpesvirus 6B
gcucucguggcccgugggggca

SEQ ID NO: 3995064 - RNA, 16 nt, Human herpesvirus 6B
gcugauucuguuuucu

SEQ ID NO: 3995065 - RNA, 21 nt, Human herpesvirus 6B
gcugcgggcuuaauaaaggau

SEQ ID NO: 3995066 - RNA, 18 nt, Human herpesvirus 6B
gcugguccuucgacauag

SEQ ID NO: 3995067 - RNA, 21 nt, Human herpesvirus 6B
gcugucgcccgccucucuccg

SEQ ID NO: 3995068 - RNA, 16 nt, Human herpesvirus 6B
gcugucggccgaagga

SEQ ID NO: 3995069 - RNA, 20 nt, Human herpesvirus 6B
gcuucaguaugucucaguuc

SEQ ID NO: 3995070 - RNA, 17 nt, Human herpesvirus 6B
gcuugguguaccagaca

SEQ ID NO: 3995071 - RNA, 22 nt, Human herpesvirus 6B
gcuuguuuugguggacaccaau

SEQ ID NO: 3995072 - RNA, 20 nt, Human herpesvirus 6B
gcuuuauggagauuugacuu

SEQ ID NO: 3995073 - RNA, 18 nt, Human herpesvirus 6B
ggaagaggaagggauggc

SEQ ID NO: 3995074 - RNA, 15 nt, Human herpesvirus 6B
ggaauaaugaaauuu

SEQ ID NO: 3995075 - RNA, 14 nt, Human herpesvirus 6B
ggaauggacaugac

SEQ ID NO: 3995076 - RNA, 21 nt, Human herpesvirus 6B
ggaauggacaugacgaaggga

SEQ ID NO: 3995077 - RNA, 18 nt, Human herpesvirus 6B
ggaauuauauguugauug

SEQ ID NO: 3995078 - RNA, 20 nt, Human herpesvirus 6B
ggaauuuaaaucguaugagc

SEQ ID NO: 3995079 - RNA, 16 nt, Human herpesvirus 6B
ggacacgagaagaaca

SEQ ID NO: 3995080 - RNA, 18 nt, Human herpesvirus 6B
ggacgcguucggucucug

SEQ ID NO: 3995081 - RNA, 17 nt, Human herpesvirus 6B
ggacggacagagcggag

SEQ ID NO: 3995082 - RNA, 12 nt, Human herpesvirus 6B
ggacugaaggag

SEQ ID NO: 3995083 - RNA, 16 nt, Human herpesvirus 6B
ggagacugcacagaau

SEQ ID NO: 3995084 - RNA, 19 nt, Human herpesvirus 6B
ggagcacgagccaagggga

SEQ ID NO: 3995085 - RNA, 18 nt, Human herpesvirus 6B
ggagcacgcacgagaaca

SEQ ID NO: 3995086 - RNA, 20 nt, Human herpesvirus 6B
ggagcaggcuccccaggcgc

SEQ ID NO: 3995087 - RNA, 14 nt, Human herpesvirus 6B
ggagcuuuuucaaa

SEQ ID NO: 3995088 - RNA, 17 nt, Human herpesvirus 6B
ggaggaggaggaagagg

SEQ ID NO: 3995089 - RNA, 16 nt, Human herpesvirus 6B
ggaggaggaggagagg

SEQ ID NO: 3995090 - RNA, 21 nt, Human herpesvirus 6B
ggagguuuuuucaccccccuc

SEQ ID NO: 3995091 - RNA, 23 nt, Human herpesvirus 6B
ggaguaauuauugugacaaggua

SEQ ID NO: 3995092 - RNA, 12 nt, Human herpesvirus 6B
ggaguauucgug

SEQ ID NO: 3995093 - RNA, 15 nt, Human herpesvirus 6B
ggagugcgacaggag

SEQ ID NO: 3995094 - RNA, 14 nt, Human herpesvirus 6B
ggagugggaggagc

SEQ ID NO: 3995095 - RNA, 14 nt, Human herpesvirus 6B
ggauaaauuccucu

SEQ ID NO: 3995096 - RNA, 14 nt, Human herpesvirus 6B
ggaucaaucuccaa

SEQ ID NO: 3995097 - RNA, 22 nt, Human herpesvirus 6B
ggaucagacagacgugcggaga

SEQ ID NO: 3995098 - RNA, 18 nt, Human herpesvirus 6B
ggaucgggccuggggaca

SEQ ID NO: 3995099 - RNA, 18 nt, Human herpesvirus 6B
ggcaaccgcaguuccugu

SEQ ID NO: 3995100 - RNA, 23 nt, Human herpesvirus 6B
ggcaacguuuucugcucaacaau

SEQ ID NO: 3995101 - RNA, 13 nt, Human herpesvirus 6B
ggcacgagagccu

SEQ ID NO: 3995102 - RNA, 15 nt, Human herpesvirus 6B
ggcacgcgccgucag

SEQ ID NO: 3995103 - RNA, 17 nt, Human herpesvirus 6B
ggcagggcgggcacgga

SEQ ID NO: 3995104 - RNA, 20 nt, Human herpesvirus 6B
ggcccgugggggcagaacug

SEQ ID NO: 3995105 - RNA, 11 nt, Human herpesvirus 6B
ggcccuuggug

SEQ ID NO: 3995106 - RNA, 19 nt, Human herpesvirus 6B
ggccgaguuuagacagagu

SEQ ID NO: 3995107 - RNA, 21 nt, Human herpesvirus 6B
ggccgcuuucuuggcgcccgu

SEQ ID NO: 3995108 - RNA, 15 nt, Human herpesvirus 6B
ggccgucuccugcaa

SEQ ID NO: 3995109 - RNA, 15 nt, Human herpesvirus 6B
ggccuggggacagac

SEQ ID NO: 3995110 - RNA, 14 nt, Human herpesvirus 6B
ggcgacguaaggau

SEQ ID NO: 3995111 - RNA, 12 nt, Human herpesvirus 6B
ggcgcaccgccu

SEQ ID NO: 3995112 - RNA, 19 nt, Human herpesvirus 6B
ggcgcccgugguggccguc

SEQ ID NO: 3995113 - RNA, 17 nt, Human herpesvirus 6B
ucauaauuugccugagu

SEQ ID NO: 3995114 - RNA, 15 nt, Human herpesvirus 6B
ucaucucccaugguu

SEQ ID NO: 3995115 - RNA, 16 nt, Human herpesvirus 6B
ucauguaaaauuaccu

SEQ ID NO: 3995116 - RNA, 14 nt, Human herpesvirus 6B
ucauuguaauucca

SEQ ID NO: 3995117 - RNA, 19 nt, Human herpesvirus 6B
uccaaguuuuuaugcaacg

SEQ ID NO: 3995118 - RNA, 21 nt, Human herpesvirus 6B
uccaauguccauuuuuuccca

SEQ ID NO: 3995119 - RNA, 22 nt, Human herpesvirus 6B
uccacggcaacgcuccucccac

SEQ ID NO: 3995120 - RNA, 17 nt, Human herpesvirus 6B
uccagcaagaaaaagag

SEQ ID NO: 3995121 - RNA, 17 nt, Human herpesvirus 6B
uccaguuguauuuugcg

SEQ ID NO: 3995122 - RNA, 13 nt, Human herpesvirus 6B
uccauaaugguau

SEQ ID NO: 3995123 - RNA, 20 nt, Human herpesvirus 6B
uccaucucuagaaucuuacu

SEQ ID NO: 3995124 - RNA, 15 nt, Human herpesvirus 6B
uccaugcgaguagau

SEQ ID NO: 3995125 - RNA, 18 nt, Human herpesvirus 6B
uccccccgccgccuucuc

SEQ ID NO: 3995126 - RNA, 22 nt, Human herpesvirus 6B
uccccccgccgccuucucuguc

SEQ ID NO: 3995127 - RNA, 17 nt, Human herpesvirus 6B
uccccucauacauccag

SEQ ID NO: 3995128 - RNA, 23 nt, Human herpesvirus 6B
ucccgcucgggggacggagagga

SEQ ID NO: 3995129 - RNA, 17 nt, Human herpesvirus 6B
ucccuccaucccccucc

SEQ ID NO: 3995130 - RNA, 14 nt, Human herpesvirus 6B
uccgaguauggaga

SEQ ID NO: 3995131 - RNA, 12 nt, Human herpesvirus 6B
uccgcagucucu

SEQ ID NO: 3995132 - RNA, 20 nt, Human herpesvirus 6B
uccgccuccucuuuuccccc

SEQ ID NO: 3995133 - RNA, 15 nt, Human herpesvirus 6B
uccgucaucuagaga

SEQ ID NO: 3995134 - RNA, 21 nt, Human herpesvirus 6B
uccguuauuguguucugcucu

SEQ ID NO: 3995135 - RNA, 23 nt, Human herpesvirus 6B
uccuauguuaacauugugagaac

SEQ ID NO: 3995136 - RNA, 13 nt, Human herpesvirus 6B
uccucgaagaauu

SEQ ID NO: 3995137 - RNA, 15 nt, Human herpesvirus 6B
uccucugaauuucaa

SEQ ID NO: 3995138 - RNA, 20 nt, Human herpesvirus 6B
uccucuuuuccccccgccgc

SEQ ID NO: 3995139 - RNA, 23 nt, Human herpesvirus 6B
uccugcaauuugaauucugcucg

SEQ ID NO: 3995140 - RNA, 19 nt, Human herpesvirus 6B
uccuuaaaugacacagaau

SEQ ID NO: 3995141 - RNA, 19 nt, Human herpesvirus 6B
uccuuaucagucucaaaaa

SEQ ID NO: 3995142 - RNA, 23 nt, Human herpesvirus 6B
ucgaaaaugcugauuuuaaacua

SEQ ID NO: 3995143 - RNA, 17 nt, Human herpesvirus 6B
uacaauacuuucacaca

SEQ ID NO: 3995144 - RNA, 15 nt, Human herpesvirus 6B
uacaaugagccuggc

SEQ ID NO: 3995145 - RNA, 22 nt, Human herpesvirus 6B
uacaaugaguuuuuugcaauuu

SEQ ID NO: 3995146 - RNA, 16 nt, Human herpesvirus 6B
uacacacgaggucggu

SEQ ID NO: 3995147 - RNA, 19 nt, Human herpesvirus 6B
uacacagagugcaucuuua

SEQ ID NO: 3995148 - RNA, 23 nt, Human herpesvirus 6B
uacagguuugcucgucuguacag

SEQ ID NO: 3995149 - RNA, 17 nt, Human herpesvirus 6B
uacauaagcaugaaucu

SEQ ID NO: 3995150 - RNA, 17 nt, Human herpesvirus 6B
uacaucccgaguauaac

SEQ ID NO: 3995151 - RNA, 21 nt, Human herpesvirus 6B
uaccauuuuauacgaaaauaa

SEQ ID NO: 3995152 - RNA, 20 nt, Human herpesvirus 6B
uacccaucguucuuaacaua

SEQ ID NO: 3995153 - RNA, 12 nt, Human herpesvirus 6B
uaccgacaagcc

SEQ ID NO: 3995154 - RNA, 22 nt, Human herpesvirus 6B
uacggagauauaccgugacagc

SEQ ID NO: 3995155 - RNA, 11 nt, Human herpesvirus 6B
uacguuuucaa

SEQ ID NO: 3995156 - RNA, 13 nt, Human herpesvirus 6B
uacuaaagcaauc

SEQ ID NO: 3995157 - RNA, 16 nt, Human herpesvirus 6B
uacuaugauagaagau

SEQ ID NO: 3995158 - RNA, 18 nt, Human herpesvirus 6B
uacucugcaacuuuauuu

SEQ ID NO: 3995159 - RNA, 21 nt, Human herpesvirus 6B
uagaacauaagggacagcagu

SEQ ID NO: 3995160 - RNA, 14 nt, Human herpesvirus 6B
uagaaguuaaucaa

SEQ ID NO: 3995161 - RNA, 13 nt, Human herpesvirus 6B
uagacacacagaa

SEQ ID NO: 3995162 - RNA, 13 nt, Human herpesvirus 6B
uagaguuggauuu

SEQ ID NO: 3995163 - RNA, 17 nt, Human herpesvirus 6B
uagaucuggaagacugu

SEQ ID NO: 3995164 - RNA, 14 nt, Human herpesvirus 6B
uagcacacgacaaa

SEQ ID NO: 3995165 - RNA, 19 nt, Human herpesvirus 6B
uagcaccccacaaaacuua

SEQ ID NO: 3995166 - RNA, 17 nt, Human herpesvirus 6B
uagcuagacgugucuuc

SEQ ID NO: 3995167 - RNA, 22 nt, Human herpesvirus 6B
uaggacaauuggauaaacaucg

SEQ ID NO: 3995168 - RNA, 19 nt, Human herpesvirus 6B
uagucaggauucggaucac

SEQ ID NO: 3995169 - RNA, 17 nt, Human herpesvirus 6B
uagucguggcggagcac

SEQ ID NO: 3995170 - RNA, 17 nt, Human herpesvirus 6B
uaguugaugcuguugcu

SEQ ID NO: 3995171 - RNA, 14 nt, Human herpesvirus 6B
uaguuuuggaugaa

SEQ ID NO: 3995172 - RNA, 14 nt, Human herpesvirus 6B
uauaaauguagcac

SEQ ID NO: 3995173 - RNA, 14 nt, Human herpesvirus 6B
uauaacagacauau

SEQ ID NO: 3995174 - RNA, 18 nt, Human herpesvirus 6B
uauaccgugacagcaacu

SEQ ID NO: 3995175 - RNA, 23 nt, Human herpesvirus 6B
uauacucugcaacuuuauuugaa

SEQ ID NO: 3995176 - RNA, 22 nt, Human herpesvirus 6B
uauagauuauacgaaauuccga

SEQ ID NO: 3995177 - RNA, 13 nt, Human herpesvirus 6B
uauauagaagaag

SEQ ID NO: 3995178 - RNA, 13 nt, Human herpesvirus 6B
uauaucuggauau

SEQ ID NO: 3995179 - RNA, 17 nt, Human herpesvirus 6B
uauauuggcacguguac

SEQ ID NO: 3995180 - RNA, 19 nt, Human herpesvirus 6B
uauauuuucguugaagaau

SEQ ID NO: 3995181 - RNA, 20 nt, Human herpesvirus 6B
uaucacuuagacacggccag

SEQ ID NO: 3995182 - RNA, 16 nt, Human herpesvirus 6B
uaucuaugcuuuugua

SEQ ID NO: 3995183 - RNA, 21 nt, Human herpesvirus 6B
uaucucaaauuuuccaaacau

SEQ ID NO: 3995184 - RNA, 15 nt, Human herpesvirus 6B
uaucucgaaaugcau

SEQ ID NO: 3995185 - RNA, 21 nt, Human herpesvirus 6B
uaugagauugguuguuuuucu

SEQ ID NO: 3995186 - RNA, 21 nt, Human herpesvirus 6B
uaugaucgcuucauaguuguu

SEQ ID NO: 3995187 - RNA, 13 nt, Human herpesvirus 6B
uauguaucugaaa

SEQ ID NO: 3995188 - RNA, 15 nt, Human herpesvirus 6B
uauguaugaacaggu

SEQ ID NO: 3995189 - RNA, 23 nt, Human herpesvirus 6B
uauuaaaaugugaugaaacggaa

SEQ ID NO: 3995190 - RNA, 14 nt, Human herpesvirus 6B
uauuaagaaugaau

SEQ ID NO: 3995191 - RNA, 22 nt, Human herpesvirus 6B
uauuaauuuuuuguuucugaaa

SEQ ID NO: 3995192 - RNA, 19 nt, Human herpesvirus 6B
uauugcuaaagaguaugac

SEQ ID NO: 3995193 - RNA, 18 nt, Human herpesvirus 6B
uauugcuaagaucugucu

SEQ ID NO: 3995194 - RNA, 19 nt, Human herpesvirus 6B
uauuuaaaccagucuucua

SEQ ID NO: 3995195 - RNA, 16 nt, Human herpesvirus 6B
uauuuaacauccaaaa

SEQ ID NO: 3995196 - RNA, 22 nt, Human herpesvirus 6B
uauuuaacauccaaaauacacu

SEQ ID NO: 3995197 - RNA, 22 nt, Human herpesvirus 6B
uauuuacugagcaaagaaauga

SEQ ID NO: 3995198 - RNA, 20 nt, Human herpesvirus 6B
uauuucgaucagauuaucaa

SEQ ID NO: 3995199 - RNA, 16 nt, Human herpesvirus 6B
uauuucguauguuuaa

SEQ ID NO: 3995200 - RNA, 18 nt, Human herpesvirus 6B
uauuugaaacugaagaaa

SEQ ID NO: 3995201 - RNA, 22 nt, Human herpesvirus 6B
uauuugacaauaaacaugauug

SEQ ID NO: 3995202 - RNA, 18 nt, Human herpesvirus 6B
uauuuuaaagauuuucua

SEQ ID NO: 3995203 - RNA, 17 nt, Human herpesvirus 6B
ucaaaaugaccagagau

SEQ ID NO: 3995204 - RNA, 15 nt, Human herpesvirus 6B
ucaaacacucaugag

SEQ ID NO: 3995205 - RNA, 18 nt, Human herpesvirus 6B
ucaaacagcgacaugaaa

SEQ ID NO: 3995206 - RNA, 16 nt, Human herpesvirus 6B
ucaacacaccugccua

SEQ ID NO: 3995207 - RNA, 17 nt, Human herpesvirus 6B
ucaagacgccuaguguu

SEQ ID NO: 3995208 - RNA, 18 nt, Human herpesvirus 6B
ucaagcgaagucaugaau

SEQ ID NO: 3995209 - RNA, 10 nt, Human herpesvirus 6B
ucaaggaaac

SEQ ID NO: 3995210 - RNA, 16 nt, Human herpesvirus 6B
ucaagggcaagguucu

SEQ ID NO: 3995211 - RNA, 17 nt, Human herpesvirus 6B
ucaauuucuaaagauuu

SEQ ID NO: 3995212 - RNA, 21 nt, Human herpesvirus 6B
ucacaaccaaacaguuucaga

SEQ ID NO: 3995213 - RNA, 15 nt, Human herpesvirus 6B
ucacuuuuugaagag

SEQ ID NO: 3995214 - RNA, 18 nt, Human herpesvirus 6B
ucagauaucugaaacacu

SEQ ID NO: 3995215 - RNA, 16 nt, Human herpesvirus 6B
ucagcucgccguuuuu

SEQ ID NO: 3995216 - RNA, 22 nt, Human herpesvirus 6B
ucaggaauguaaugaauuauua

SEQ ID NO: 3995217 - RNA, 17 nt, Human herpesvirus 6B
ucauaauugugauaguu

SEQ ID NO: 3995218 - RNA, 17 nt, Human herpesvirus 6B
aaaaaagauauauuggu

SEQ ID NO: 3995219 - RNA, 10 nt, Human herpesvirus 6B
aaaaacacuc

SEQ ID NO: 3995220 - RNA, 16 nt, Human herpesvirus 6B
aaaaaccguugcacuu

SEQ ID NO: 3995221 - RNA, 23 nt, Human herpesvirus 6B
aaaaagaauggaagcgugguaga

SEQ ID NO: 3995222 - RNA, 22 nt, Human herpesvirus 6B
aaaacagagccgcgguggaaau

SEQ ID NO: 3995223 - RNA, 14 nt, Human herpesvirus 6B
aaaacaugugcuua

SEQ ID NO: 3995224 - RNA, 18 nt, Human herpesvirus 6B
aaaaccaaaaaaaaagug

SEQ ID NO: 3995225 - RNA, 17 nt, Human herpesvirus 6B
aaaacccggagaaucua

SEQ ID NO: 3995226 - RNA, 19 nt, Human herpesvirus 6B
aaaaccugcuaacggagca

SEQ ID NO: 3995227 - RNA, 21 nt, Human herpesvirus 6B
aaaacgagcgacgguuuccaa

SEQ ID NO: 3995228 - RNA, 15 nt, Human herpesvirus 6B
aaaacggguuuauuu

SEQ ID NO: 3995229 - RNA, 20 nt, Human herpesvirus 6B
aaaacuaaaacaucagauga

SEQ ID NO: 3995230 - RNA, 14 nt, Human herpesvirus 6B
aaaagcgccugccu

SEQ ID NO: 3995231 - RNA, 15 nt, Human herpesvirus 6B
aaaaggguuuucuga

SEQ ID NO: 3995232 - RNA, 19 nt, Human herpesvirus 6B
aaaaguuagaguuggauuu

SEQ ID NO: 3995233 - RNA, 12 nt, Human herpesvirus 6B
aaaauaaaguug

SEQ ID NO: 3995234 - RNA, 15 nt, Human herpesvirus 6B
aaaaucugcuaacgg

SEQ ID NO: 3995235 - RNA, 15 nt, Human herpesvirus 6B
aaaaugacugauauu

SEQ ID NO: 3995236 - RNA, 17 nt, Human herpesvirus 6B
aaaauuggugugcauua

SEQ ID NO: 3995237 - RNA, 16 nt, Human herpesvirus 6B
aaacaaaauuaauuca

SEQ ID NO: 3995238 - RNA, 17 nt, Human herpesvirus 6B
aaacagauuuugaggau

SEQ ID NO: 3995239 - RNA, 16 nt, Human herpesvirus 6B
aaacagcgacaugaaa

SEQ ID NO: 3995240 - RNA, 14 nt, Human herpesvirus 6B
aaaccaagguguuu

SEQ ID NO: 3995241 - RNA, 14 nt, Human herpesvirus 6B
aaacuaacaugaca

SEQ ID NO: 3995242 - RNA, 22 nt, Human herpesvirus 6B
aaacuggauacuauugcuaaga

SEQ ID NO: 3995243 - RNA, 12 nt, Human herpesvirus 6B
aaagagaaguua

SEQ ID NO: 3995244 - RNA, 11 nt, Human herpesvirus 6B
aaagauugcau

SEQ ID NO: 3995245 - RNA, 13 nt, Human herpesvirus 6B
aaaggugugguga

SEQ ID NO: 3995246 - RNA, 12 nt, Human herpesvirus 6B
aaagguguuaaa

SEQ ID NO: 3995247 - RNA, 14 nt, Human herpesvirus 6B
aaagguuuuugcug

SEQ ID NO: 3995248 - RNA, 19 nt, Human herpesvirus 6B
aaagguuuuugcugucaca

SEQ ID NO: 3995249 - RNA, 14 nt, Human herpesvirus 6B
aaagucggucgaga

SEQ ID NO: 3995250 - RNA, 19 nt, Human herpesvirus 6B
aaagucguuuuggagaaau

SEQ ID NO: 3995251 - RNA, 13 nt, Human herpesvirus 6B
aaagugcuguaaa

SEQ ID NO: 3995252 - RNA, 22 nt, Human herpesvirus 6B
aaauauggcuaaugagucucug

SEQ ID NO: 3995253 - RNA, 21 nt, Human herpesvirus 6B
aaauauuggauuuuacgcaaa

SEQ ID NO: 3995254 - RNA, 20 nt, Human herpesvirus 6B
aaauauuuugaaaagguguu

SEQ ID NO: 3995255 - RNA, 22 nt, Human herpesvirus 6B
aaauccuagaguuguuuuuagu

SEQ ID NO: 3995256 - RNA, 12 nt, Human herpesvirus 6B
aaaugacucuaa

SEQ ID NO: 3995257 - RNA, 17 nt, Human herpesvirus 6B
aaaugagaaggacacaa

SEQ ID NO: 3995258 - RNA, 16 nt, Human herpesvirus 6B
aaaugagcaacauuua

SEQ ID NO: 3995259 - RNA, 13 nt, Human herpesvirus 6B
aaauuacaugaaa

SEQ ID NO: 3995260 - RNA, 13 nt, Human herpesvirus 6B
aaauugucuacaa

SEQ ID NO: 3995261 - RNA, 14 nt, Human herpesvirus 6B
aaauuuuuauguau

SEQ ID NO: 3995262 - RNA, 21 nt, Human herpesvirus 6B
aacaaaucucaagaaacaagu

SEQ ID NO: 3995263 - RNA, 17 nt, Human herpesvirus 6B
aacaaguuauuuaaaau

SEQ ID NO: 3995264 - RNA, 23 nt, Human herpesvirus 6B
aacaaugaaaauucaguuuuuau

SEQ ID NO: 3995265 - RNA, 18 nt, Human herpesvirus 6B
aacagaaauuuaauugca

SEQ ID NO: 3995266 - RNA, 12 nt, Human herpesvirus 6B
aacaguuguagc

SEQ ID NO: 3995267 - RNA, 13 nt, Human herpesvirus 6B
aacaguuucagau

SEQ ID NO: 3995268 - RNA, 18 nt, Human herpesvirus 6B
aacauucggcggcauuua

SEQ ID NO: 3995269 - RNA, 20 nt, Human herpesvirus 6B
aaccacagccagaagcaauu

SEQ ID NO: 3995270 - RNA, 23 nt, Human herpesvirus 6B
aaccgcaguuucuguuuuucuca

SEQ ID NO: 3995271 - RNA, 16 nt, Human herpesvirus 6B
aaccuguuuccagaau

SEQ ID NO: 3995272 - RNA, 19 nt, Human herpesvirus 6B
aacgauuuucuauuaaaaa

SEQ ID NO: 3995273 - RNA, 15 nt, Human herpesvirus 6B
aacggaaacaugaac

SEQ ID NO: 3995274 - RNA, 21 nt, Human herpesvirus 6B
aacuaucuuacuguaaacaaa

SEQ ID NO: 3995275 - RNA, 19 nt, Human herpesvirus 6B
aacugagauauuuuaaaug

SEQ ID NO: 3995276 - RNA, 16 nt, Human herpesvirus 6B
aacugcuuaacuugca

SEQ ID NO: 3995277 - RNA, 22 nt, Human herpesvirus 6B
aacuguucggauccaaugauga

SEQ ID NO: 3995278 - RNA, 11 nt, Human herpesvirus 6B
aagaaggaaaa

SEQ ID NO: 3995279 - RNA, 14 nt, Human herpesvirus 6B
aagaaucugccgau

SEQ ID NO: 3995280 - RNA, 17 nt, Human herpesvirus 6B
aagaaugggaugcauua

SEQ ID NO: 3995281 - RNA, 16 nt, Human herpesvirus 6B
aagaggaagggauggc

SEQ ID NO: 3995282 - RNA, 20 nt, Human herpesvirus 6B
aagcagaccaguuuacaagu

SEQ ID NO: 3995283 - RNA, 13 nt, Human herpesvirus 6B
aagcgccugccua

SEQ ID NO: 3995284 - RNA, 15 nt, Human herpesvirus 6B
aagcuggacagaaag

SEQ ID NO: 3995285 - RNA, 20 nt, Human herpesvirus 6B
aaggaaucgguaaacuucag

SEQ ID NO: 3995286 - RNA, 14 nt, Human herpesvirus 6B
aaggaugguagggu

SEQ ID NO: 3995287 - RNA, 18 nt, Human herpesvirus 6B
aaguauguuuuguacaaa

SEQ ID NO: 3995288 - RNA, 15 nt, Human herpesvirus 6B
aagucguuacaguaa

SEQ ID NO: 3995289 - RNA, 23 nt, Human herpesvirus 6B
aagugccgugagugcuauuugca

SEQ ID NO: 3995290 - RNA, 11 nt, Human herpesvirus 6B
aaguugucauu

SEQ ID NO: 3995291 - RNA, 15 nt, Human herpesvirus 6B
aaguuuaaguucuca

SEQ ID NO: 3995292 - RNA, 17 nt, Human herpesvirus 6B
aaguuuuggaaaaugua

SEQ ID NO: 3995293 - RNA, 13 nt, Human herpesvirus 6B
aauaauuuacugu

SEQ ID NO: 3995294 - RNA, 21 nt, Human herpesvirus 6B
aauacgccgucguaugucaau

SEQ ID NO: 3995295 - RNA, 21 nt, Human herpesvirus 6B
aauacuauguggaaauuaaaa

SEQ ID NO: 3995296 - RNA, 22 nt, Human herpesvirus 6B
aauacuauguggaaauuaaaaa

SEQ ID NO: 3995297 - RNA, 14 nt, Human herpesvirus 6B
aauauuuuuacugc

SEQ ID NO: 3995298 - RNA, 13 nt, Human herpesvirus 6B
aaucaaucuuucu

SEQ ID NO: 3995299 - RNA, 21 nt, Human herpesvirus 6B
aaucacuguacggaacguuuc

SEQ ID NO: 3995300 - RNA, 18 nt, Human herpesvirus 6B
aaucaucugguaaauugu

SEQ ID NO: 3995301 - RNA, 21 nt, Human herpesvirus 6B
aauccaaaguaggcacacaug

SEQ ID NO: 3995302 - RNA, 19 nt, Human herpesvirus 6B
aauccacggauugacacaa

SEQ ID NO: 3995303 - RNA, 23 nt, Human herpesvirus 6B
aaucucaagcacaaaaccaggaa

SEQ ID NO: 3995304 - RNA, 14 nt, Human herpesvirus 6B
aaugacacagaauc

SEQ ID NO: 3995305 - RNA, 21 nt, Human herpesvirus 6B
aaugacauuuauuagcauuca

SEQ ID NO: 3995306 - RNA, 13 nt, Human herpesvirus 6B
aaugagcaacauu

SEQ ID NO: 3995307 - RNA, 17 nt, Human herpesvirus 6B
aaugcagcaguuuuugu

SEQ ID NO: 3995308 - RNA, 19 nt, Human herpesvirus 6B
aaugcagcaguuuuugugc

SEQ ID NO: 3995309 - RNA, 20 nt, Human herpesvirus 6B
aaugucugagcauuguguau

SEQ ID NO: 3995310 - RNA, 23 nt, Human herpesvirus 6B
aaugucuucgagauuuuagaaua

SEQ ID NO: 3995311 - RNA, 15 nt, Human herpesvirus 6B
aauguucuucugaaa

SEQ ID NO: 3995312 - RNA, 24 nt, Human herpesvirus 6B
cuguuccccguccucgugcucucc

SEQ ID NO: 3995313 - RNA, 15 nt, Human herpesvirus 6B
cuguucuaaaaguuu

SEQ ID NO: 3995314 - RNA, 22 nt, Human herpesvirus 6B
cuguuuacucugggaaccugug

SEQ ID NO: 3995315 - RNA, 21 nt, Human herpesvirus 6B
cuguuuuguaggacugaagga

SEQ ID NO: 3995316 - RNA, 20 nt, Human herpesvirus 6B
cuguuuuucucauaaaguua

SEQ ID NO: 3995317 - RNA, 20 nt, Human herpesvirus 6B
cuuaaagaaaaaaagcagau

SEQ ID NO: 3995318 - RNA, 15 nt, Human herpesvirus 6B
cuuacgagaggcuuu

SEQ ID NO: 3995319 - RNA, 20 nt, Human herpesvirus 6B
cuuagauaugucguuucaug

SEQ ID NO: 3995320 - RNA, 15 nt, Human herpesvirus 6B
cuuaucaacuauacu

SEQ ID NO: 3995321 - RNA, 20 nt, Human herpesvirus 6B
cuuaucagucucaaaaauua

SEQ ID NO: 3995322 - RNA, 20 nt, Human herpesvirus 6B
cuuauugaggaaaugcagca

SEQ ID NO: 3995323 - RNA, 14 nt, Human herpesvirus 6B
cuucagaaagauug

SEQ ID NO: 3995324 - RNA, 19 nt, Human herpesvirus 6B
cuuccgaguauggugucuu

SEQ ID NO: 3995325 - RNA, 15 nt, Human herpesvirus 6B
cuucucgucucuucu

SEQ ID NO: 3995326 - RNA, 13 nt, Human herpesvirus 6B
cuucuuuuggaug

SEQ ID NO: 3995327 - RNA, 13 nt, Human herpesvirus 6B
cuugaauguuuaa

SEQ ID NO: 3995328 - RNA, 23 nt, Human herpesvirus 6B
cuugaauguuuaaaguuuuguga

SEQ ID NO: 3995329 - RNA, 22 nt, Human herpesvirus 6B
cuugauaucuucgugcaauaac

SEQ ID NO: 3995330 - RNA, 12 nt, Human herpesvirus 6B
cuugcuguaaag

SEQ ID NO: 3995331 - RNA, 16 nt, Human herpesvirus 6B
cuuggggauauugugg

SEQ ID NO: 3995332 - RNA, 22 nt, Human herpesvirus 6B
cuuuacauaacauagaaaaaua

SEQ ID NO: 3995333 - RNA, 14 nt, Human herpesvirus 6B
cuuuauacgucaua

SEQ ID NO: 3995334 - RNA, 13 nt, Human herpesvirus 6B
cuuuauccggcca

SEQ ID NO: 3995335 - RNA, 13 nt, Human herpesvirus 6B
cuuuaugugcaau

SEQ ID NO: 3995336 - RNA, 21 nt, Human herpesvirus 6B
cuuucaauguccgaaguaaaa

SEQ ID NO: 3995337 - RNA, 14 nt, Human herpesvirus 6B
cuuugaacagugac

SEQ ID NO: 3995338 - RNA, 15 nt, Human herpesvirus 6B
cuuugauccauuuuc

SEQ ID NO: 3995339 - RNA, 13 nt, Human herpesvirus 6B
cuuugcggugcau

SEQ ID NO: 3995340 - RNA, 16 nt, Human herpesvirus 6B
cuuugggaugaagaga

SEQ ID NO: 3995341 - RNA, 16 nt, Human herpesvirus 6B
cuuuguccuauguuaa

SEQ ID NO: 3995342 - RNA, 18 nt, Human herpesvirus 6B
cuuuguccuauguuaaca

SEQ ID NO: 3995343 - RNA, 13 nt, Human herpesvirus 6B
cuuuguucugcug

SEQ ID NO: 3995344 - RNA, 22 nt, Human herpesvirus 6B
cuuuucaguauagacauuuugu

SEQ ID NO: 3995345 - RNA, 19 nt, Human herpesvirus 6B
cuuuuggcaggaagccugu

SEQ ID NO: 3995346 - RNA, 13 nt, Human herpesvirus 6B
cuuuuugccaaaa

SEQ ID NO: 3995347 - RNA, 20 nt, Human herpesvirus 6B
cuuuuuuucccgaaaaacuu

SEQ ID NO: 3995348 - RNA, 19 nt, Human herpesvirus 6B
gaaaagugcuuuauccggc

SEQ ID NO: 3995349 - RNA, 16 nt, Human herpesvirus 6B
gaaaaugcugauuuua

SEQ ID NO: 3995350 - RNA, 21 nt, Human herpesvirus 6B
gaaacucuuauggcaagcacu

SEQ ID NO: 3995351 - RNA, 13 nt, Human herpesvirus 6B
gaaacugaagaaa

SEQ ID NO: 3995352 - RNA, 14 nt, Human herpesvirus 6B
gaaagcgcgccaca

SEQ ID NO: 3995353 - RNA, 14 nt, Human herpesvirus 6B
gaaaucuuuccugc

SEQ ID NO: 3995354 - RNA, 19 nt, Human herpesvirus 6B
gaaaugagcaacauuuaug

SEQ ID NO: 3995355 - RNA, 17 nt, Human herpesvirus 6B
gaaauucuccuguaguu

SEQ ID NO: 3995356 - RNA, 14 nt, Human herpesvirus 6B
gaacaccagcaugu

SEQ ID NO: 3995357 - RNA, 19 nt, Human herpesvirus 6B
gaacauaagggacagcagu

SEQ ID NO: 3995358 - RNA, 19 nt, Human herpesvirus 6B
gaaccacaucuuuuccugc

SEQ ID NO: 3995359 - RNA, 17 nt, Human herpesvirus 6B
gaaccgaaauuuccggu

SEQ ID NO: 3995360 - RNA, 17 nt, Human herpesvirus 6B
gaaccugugaacaaauu

SEQ ID NO: 3995361 - RNA, 14 nt, Human herpesvirus 6B
gaacucucacggcc

SEQ ID NO: 3995362 - RNA, 22 nt, Human herpesvirus 6B
gaacuggaccagugauucugcu

SEQ ID NO: 3995363 - RNA, 18 nt, Human herpesvirus 6B
gaacuguuuccagagcac

SEQ ID NO: 3995364 - RNA, 21 nt, Human herpesvirus 6B
gaagaaauaccuuuggccuug

SEQ ID NO: 3995365 - RNA, 18 nt, Human herpesvirus 6B
gaagaacagaggaagaaa

SEQ ID NO: 3995366 - RNA, 20 nt, Human herpesvirus 6B
gaagacauuaauacugguuu

SEQ ID NO: 3995367 - RNA, 21 nt, Human herpesvirus 6B
gaagaucuuuauggagggaau

SEQ ID NO: 3995368 - RNA, 15 nt, Human herpesvirus 6B
gaagccggagcccug

SEQ ID NO: 3995369 - RNA, 16 nt, Human herpesvirus 6B
gaagccggagcccuga

SEQ ID NO: 3995370 - RNA, 14 nt, Human herpesvirus 6B
gaagugaaagcagu

SEQ ID NO: 3995371 - RNA, 17 nt, Human herpesvirus 6B
gaaguguuaugaagaau

SEQ ID NO: 3995372 - RNA, 22 nt, Human herpesvirus 6B
gaauauauagaagaagaaauac

SEQ ID NO: 3995373 - RNA, 17 nt, Human herpesvirus 6B
gaauauucuucgugaau

SEQ ID NO: 3995374 - RNA, 16 nt, Human herpesvirus 6B
gaauauuuaguuuaug

SEQ ID NO: 3995375 - RNA, 14 nt, Human herpesvirus 6B
gaauccgcgggcca

SEQ ID NO: 3995376 - RNA, 21 nt, Human herpesvirus 6B
gaauccgcgggccagcccuga

SEQ ID NO: 3995377 - RNA, 19 nt, Human herpesvirus 6B
gaaucgucgaaaaaaauga

SEQ ID NO: 3995378 - RNA, 17 nt, Human herpesvirus 6B
gaauguugauauggagc

SEQ ID NO: 3995379 - RNA, 20 nt, Human herpesvirus 6B
gaauuaaagauuuaaaaaug

SEQ ID NO: 3995380 - RNA, 14 nt, Human herpesvirus 6B
gaauuacugcugcg

SEQ ID NO: 3995381 - RNA, 20 nt, Human herpesvirus 6B
gaauuaugacugacaaggua

SEQ ID NO: 3995382 - RNA, 18 nt, Human herpesvirus 6B
gaauucagcuggacagaa

SEQ ID NO: 3995383 - RNA, 23 nt, Human herpesvirus 6B
gaauucuuucuacguuagcuucc

SEQ ID NO: 3995384 - RNA, 21 nt, Human herpesvirus 6B
gacaaauaaguggugaugaau

SEQ ID NO: 3995385 - RNA, 12 nt, Human herpesvirus 6B
gacaggcgcacc

SEQ ID NO: 3995386 - RNA, 19 nt, Human herpesvirus 6B
gacaguauuuacugagcaa

SEQ ID NO: 3995387 - RNA, 20 nt, Human herpesvirus 6B
gacagucaauuucuaaagau

SEQ ID NO: 3995388 - RNA, 17 nt, Human herpesvirus 6B
gacaucaggcaaagaug

SEQ ID NO: 3995389 - RNA, 18 nt, Human herpesvirus 6B
gacaucuuaaauuucuau

SEQ ID NO: 3995390 - RNA, 22 nt, Human herpesvirus 6B
gacaugcucgggaucacgcagg

SEQ ID NO: 3995391 - RNA, 16 nt, Human herpesvirus 6B
gacauuuaccagagau

SEQ ID NO: 3995392 - RNA, 14 nt, Human herpesvirus 6B
gaccagcucuguuc

SEQ ID NO: 3995393 - RNA, 16 nt, Human herpesvirus 6B
gaccaggauagaaaaa

SEQ ID NO: 3995394 - RNA, 14 nt, Human herpesvirus 6B
gaccgagacgguga

SEQ ID NO: 3995395 - RNA, 14 nt, Human herpesvirus 6B
gaccucgcgggaag

SEQ ID NO: 3995396 - RNA, 21 nt, Human herpesvirus 6B
gacgguucaaacgguaaacau

SEQ ID NO: 3995397 - RNA, 23 nt, Human herpesvirus 6B
gacgguucaggcucuuugggaaa

SEQ ID NO: 3995398 - RNA, 14 nt, Human herpesvirus 6B
gacgugcggagaug

SEQ ID NO: 3995399 - RNA, 15 nt, Human herpesvirus 6B
gacucugucuuaguu

SEQ ID NO: 3995400 - RNA, 13 nt, Human herpesvirus 6B
gacugacaaggua

SEQ ID NO: 3995401 - RNA, 22 nt, Human herpesvirus 6B
gacugcccuggggucuaagaua

SEQ ID NO: 3995402 - RNA, 15 nt, Human herpesvirus 6B
gacugugaggugauu

SEQ ID NO: 3995403 - RNA, 19 nt, Human herpesvirus 6B
gacuuagcuagacgugucu

SEQ ID NO: 3995404 - RNA, 16 nt, Human herpesvirus 6B
gacuugcccacagcug

SEQ ID NO: 3995405 - RNA, 14 nt, Human herpesvirus 6B
gagaaagagggaag

SEQ ID NO: 3995406 - RNA, 16 nt, Human herpesvirus 6B
gagacugcccuggggu

SEQ ID NO: 3995407 - RNA, 16 nt, Human herpesvirus 6B
gagacuggacaguguu

SEQ ID NO: 3995408 - RNA, 22 nt, Human herpesvirus 6B
gagacuuuguguaaccugagaa

SEQ ID NO: 3995409 - RNA, 13 nt, Human herpesvirus 6B
gagagcaggagca

SEQ ID NO: 3995410 - RNA, 13 nt, Human herpesvirus 6B
gagagcgggcaca

SEQ ID NO: 3995411 - RNA, 14 nt, Human herpesvirus 6B
gagauagagccggc

SEQ ID NO: 3995412 - RNA, 20 nt, Human herpesvirus 6B
gagaucuggugaauguuucu

SEQ ID NO: 3995413 - RNA, 21 nt, Human herpesvirus 6B
gagaucuggugaauguuucug

SEQ ID NO: 3995414 - RNA, 13 nt, Human herpesvirus 6B
gagcaaccgcagu

SEQ ID NO: 3995415 - RNA, 14 nt, Human herpesvirus 6B
gagcaauucaucaa

SEQ ID NO: 3995416 - RNA, 21 nt, Human herpesvirus 6B
gagcauaauaaucuaguaccu

SEQ ID NO: 3995417 - RNA, 14 nt, Human herpesvirus 6B
gagcauugaguaga

SEQ ID NO: 3995418 - RNA, 20 nt, Human herpesvirus 6B
gagcauugaguagagcuuug

SEQ ID NO: 3995419 - RNA, 23 nt, Human herpesvirus 6B
gagcccauaacgauagcagcucu

SEQ ID NO: 3995420 - RNA, 18 nt, Human herpesvirus 6B
gagccgcagaggccagac

SEQ ID NO: 3995421 - RNA, 16 nt, Human herpesvirus 6B
gucugugcuuggaagu

SEQ ID NO: 3995422 - RNA, 11 nt, Human herpesvirus 6B
gucuuuccuga

SEQ ID NO: 3995423 - RNA, 18 nt, Human herpesvirus 6B
gugaaaaacacggcgccu

SEQ ID NO: 3995424 - RNA, 17 nt, Human herpesvirus 6B
gugagggacuucgucuc

SEQ ID NO: 3995425 - RNA, 13 nt, Human herpesvirus 6B
gugaggugauuug

SEQ ID NO: 3995426 - RNA, 16 nt, Human herpesvirus 6B
gugauauaguuauuca

SEQ ID NO: 3995427 - RNA, 15 nt, Human herpesvirus 6B
gugaucaggaaauua

SEQ ID NO: 3995428 - RNA, 22 nt, Human herpesvirus 6B
gugauuccuucggggacaguga

SEQ ID NO: 3995429 - RNA, 19 nt, Human herpesvirus 6B
gugauugaugagacggaau

SEQ ID NO: 3995430 - RNA, 16 nt, Human herpesvirus 6B
gugcccacuguggugu

SEQ ID NO: 3995431 - RNA, 18 nt, Human herpesvirus 6B
gugcccacugugguguuu

SEQ ID NO: 3995432 - RNA, 19 nt, Human herpesvirus 6B
gugcuuguuuugguggaca

SEQ ID NO: 3995433 - RNA, 19 nt, Human herpesvirus 6B
guggaaauuaacugucaug

SEQ ID NO: 3995434 - RNA, 19 nt, Human herpesvirus 6B
guggaguauggugucugaa

SEQ ID NO: 3995435 - RNA, 19 nt, Human herpesvirus 6B
guggccggcacgcgccguc

SEQ ID NO: 3995436 - RNA, 18 nt, Human herpesvirus 6B
gugucuccggcgucacuc

SEQ ID NO: 3995437 - RNA, 17 nt, Human herpesvirus 6B
gugucugaaaaauggug

SEQ ID NO: 3995438 - RNA, 14 nt, Human herpesvirus 6B
gugugucggcuccg

SEQ ID NO: 3995439 - RNA, 11 nt, Human herpesvirus 6B
guguuauucag

SEQ ID NO: 3995440 - RNA, 13 nt, Human herpesvirus 6B
guguuuuguaagu

SEQ ID NO: 3995441 - RNA, 22 nt, Human herpesvirus 6B
guuaacggagagucuucauccu

SEQ ID NO: 3995442 - RNA, 20 nt, Human herpesvirus 6B
guuacaguaaaaaagccgaa

SEQ ID NO: 3995443 - RNA, 20 nt, Human herpesvirus 6B
guuacccgucaugugcuauu

SEQ ID NO: 3995444 - RNA, 15 nt, Human herpesvirus 6B
guuacggggaagauc

SEQ ID NO: 3995445 - RNA, 17 nt, Human herpesvirus 6B
guuacgucuuuggacug

SEQ ID NO: 3995446 - RNA, 18 nt, Human herpesvirus 6B
guuacuuuaccucugcuc

SEQ ID NO: 3995447 - RNA, 18 nt, Human herpesvirus 6B
guuagagauuuuggaagc

SEQ ID NO: 3995448 - RNA, 17 nt, Human herpesvirus 6B
guuagcaagcugggaaa

SEQ ID NO: 3995449 - RNA, 13 nt, Human herpesvirus 6B
guuauuaugcugu

SEQ ID NO: 3995450 - RNA, 15 nt, Human herpesvirus 6B
guucagagcugauga

SEQ ID NO: 3995451 - RNA, 20 nt, Human herpesvirus 6B
guucaggucaagcgccagga

SEQ ID NO: 3995452 - RNA, 13 nt, Human herpesvirus 6B
guucguuaaaaac

SEQ ID NO: 3995453 - RNA, 18 nt, Human herpesvirus 6B
guucuuugaacagugaca

SEQ ID NO: 3995454 - RNA, 15 nt, Human herpesvirus 6B
guugaagucuuuccu

SEQ ID NO: 3995455 - RNA, 18 nt, Human herpesvirus 6B
guugcagauuugcggaaa

SEQ ID NO: 3995456 - RNA, 19 nt, Human herpesvirus 6B
guugcauggugauguguua

SEQ ID NO: 3995457 - RNA, 14 nt, Human herpesvirus 6B
guugccuuggccgc

SEQ ID NO: 3995458 - RNA, 22 nt, Human herpesvirus 6B
guugccuuuguaaaauguuucc

SEQ ID NO: 3995459 - RNA, 12 nt, Human herpesvirus 6B
guugcuguaguu

SEQ ID NO: 3995460 - RNA, 21 nt, Human herpesvirus 6B
guugggauggcagauugcaaa

SEQ ID NO: 3995461 - RNA, 16 nt, Human herpesvirus 6B
guuuaaagauguguua

SEQ ID NO: 3995462 - RNA, 13 nt, Human herpesvirus 6B
uaaaaacacacug

SEQ ID NO: 3995463 - RNA, 21 nt, Human herpesvirus 6B
uaaaaauguuaccgaaauauc

SEQ ID NO: 3995464 - RNA, 18 nt, Human herpesvirus 6B
uaaaaauuauucuggcga

SEQ ID NO: 3995465 - RNA, 20 nt, Human herpesvirus 6B
uaaaacucuaaaagcugcua

SEQ ID NO: 3995466 - RNA, 17 nt, Human herpesvirus 6B
uaaaagauuguuuucau

SEQ ID NO: 3995467 - RNA, 23 nt, Human herpesvirus 6B
uaaaauaauuuuuguagcaauuu

SEQ ID NO: 3995468 - RNA, 12 nt, Human herpesvirus 6B
uaaaaucugcua

SEQ ID NO: 3995469 - RNA, 16 nt, Human herpesvirus 6B
uaaaauugaauuuaua

SEQ ID NO: 3995470 - RNA, 17 nt, Human herpesvirus 6B
uaaacagauuuuaugcc

SEQ ID NO: 3995471 - RNA, 22 nt, Human herpesvirus 6B
uaaacauucuuaaauucaauuu

SEQ ID NO: 3995472 - RNA, 19 nt, Human herpesvirus 6B
uaaagauguguuaaagaau

SEQ ID NO: 3995473 - RNA, 12 nt, Human herpesvirus 6B
uaaagcagcuag

SEQ ID NO: 3995474 - RNA, 13 nt, Human herpesvirus 6B
uaaaguauuggcu

SEQ ID NO: 3995475 - RNA, 12 nt, Human herpesvirus 6B
uaaaguuuucau

SEQ ID NO: 3995476 - RNA, 17 nt, Human herpesvirus 6B
uaaauaauaguaaacuu

SEQ ID NO: 3995477 - RNA, 15 nt, Human herpesvirus 6B
uaacagaguuuucau

SEQ ID NO: 3995478 - RNA, 22 nt, Human herpesvirus 6B
uaacauagaaaaauaagacuua

SEQ ID NO: 3995479 - RNA, 11 nt, Human herpesvirus 6B
uaacauauucg

SEQ ID NO: 3995480 - RNA, 21 nt, Human herpesvirus 6B
uaacaucucagaucuagaucu

SEQ ID NO: 3995481 - RNA, 15 nt, Human herpesvirus 6B
uaacauugugagaac

SEQ ID NO: 3995482 - RNA, 18 nt, Human herpesvirus 6B
uaaccuaagcuggacaga

SEQ ID NO: 3995483 - RNA, 15 nt, Human herpesvirus 6B
uaacgaacaaaucuc

SEQ ID NO: 3995484 - RNA, 17 nt, Human herpesvirus 6B
uaacuguggguuuucag

SEQ ID NO: 3995485 - RNA, 13 nt, Human herpesvirus 6B
uaacuucaagaau

SEQ ID NO: 3995486 - RNA, 13 nt, Human herpesvirus 6B
uaagacuuagcua

SEQ ID NO: 3995487 - RNA, 18 nt, Human herpesvirus 6B
uaagauagauauuaugua

SEQ ID NO: 3995488 - RNA, 13 nt, Human herpesvirus 6B
uaagcugcagaca

SEQ ID NO: 3995489 - RNA, 14 nt, Human herpesvirus 6B
uaaucuauggugau

SEQ ID NO: 3995490 - RNA, 18 nt, Human herpesvirus 6B
uaaugacguaugauuuuc

SEQ ID NO: 3995491 - RNA, 16 nt, Human herpesvirus 6B
uaaugagauucuguug

SEQ ID NO: 3995492 - RNA, 17 nt, Human herpesvirus 6B
uaaugguaugccugagc

SEQ ID NO: 3995493 - RNA, 14 nt, Human herpesvirus 6B
uaauucaaauguag

SEQ ID NO: 3995494 - RNA, 17 nt, Human herpesvirus 6B
uaauuccuuguguugaa

SEQ ID NO: 3995495 - RNA, 23 nt, Human herpesvirus 6B
uaauucggugaugacucaagaau

SEQ ID NO: 3995496 - RNA, 23 nt, Human herpesvirus 6B
uaauuuuuuguuucugaaaauaa

SEQ ID NO: 3995497 - RNA, 15 nt, Human herpesvirus 6B
uacaaaguucucaga

SEQ ID NO: 3995498 - RNA, 17 nt, Human herpesvirus 6B
uacaagaaaagaaacaa

SEQ ID NO: 3995499 - RNA, 18 nt, Human herpesvirus 6B
uacaugaaaacauucaga

SEQ ID NO: 3995500 - RNA, 14 nt, Human herpesvirus 6B
uaccaagaaaucac

SEQ ID NO: 3995501 - RNA, 23 nt, Human herpesvirus 6B
uaccccggcuuucucgccgccuc

SEQ ID NO: 3995502 - RNA, 17 nt, Human herpesvirus 6B
uacguggccgucuccug

SEQ ID NO: 3995503 - RNA, 13 nt, Human herpesvirus 6B
uacuaauguggau

SEQ ID NO: 3995504 - RNA, 19 nt, Human herpesvirus 6B
uacuuacaucgauccaaaa

SEQ ID NO: 3995505 - RNA, 17 nt, Human herpesvirus 6B
uacuuuguuuucuuggg

SEQ ID NO: 3995506 - RNA, 18 nt, Human herpesvirus 6B
uagaaaauugucuacaau

SEQ ID NO: 3995507 - RNA, 22 nt, Human herpesvirus 6B
uagaauuuaacgauccuuuucu

SEQ ID NO: 3995508 - RNA, 16 nt, Human herpesvirus 6B
uagaccguucaacaag

SEQ ID NO: 3995509 - RNA, 19 nt, Human herpesvirus 6B
uagagaacagauagaaaau

SEQ ID NO: 3995510 - RNA, 13 nt, Human herpesvirus 6B
uagagccggccuu

SEQ ID NO: 3995511 - RNA, 11 nt, Human herpesvirus 6B
uagauaugucg

SEQ ID NO: 3995512 - RNA, 13 nt, Human herpesvirus 6B
uagaucuguuuaa

SEQ ID NO: 3995513 - RNA, 14 nt, Human herpesvirus 6B
uagcaaaugaaugu

SEQ ID NO: 3995514 - RNA, 20 nt, Human herpesvirus 6B
uagguuucagacacguuuau

SEQ ID NO: 3995515 - RNA, 14 nt, Human herpesvirus 6B
uaguaagaggcuua

SEQ ID NO: 3995516 - RNA, 13 nt, Human herpesvirus 6B
uaguacaaagaua

SEQ ID NO: 3995517 - RNA, 17 nt, Human herpesvirus 6B
uaguguuaaagaugcug

SEQ ID NO: 3995518 - RNA, 13 nt, Human herpesvirus 6B
uauaaaucauaaa

SEQ ID NO: 3995519 - RNA, 20 nt, Human herpesvirus 6B
uauaagucuaaugcaaagau

SEQ ID NO: 3995520 - RNA, 16 nt, Human herpesvirus 6B
uauaccaaacgugaaa

SEQ ID NO: 3995521 - RNA, 17 nt, Human herpesvirus 6B
uauagcuauccuuauau

SEQ ID NO: 3995522 - RNA, 20 nt, Human herpesvirus 6B
uauaucaaacuuuuuuugaa

SEQ ID NO: 3995523 - RNA, 19 nt, Human herpesvirus 6B
uauaugaaaugucugagca

SEQ ID NO: 3995524 - RNA, 13 nt, Human herpesvirus 6B
uauauggugaugu

SEQ ID NO: 3995525 - RNA, 19 nt, Human herpesvirus 6B
uauauuaaugaucauagua

SEQ ID NO: 3995526 - RNA, 18 nt, Human herpesvirus 6B
uaucaaacuuuuuuugaa

SEQ ID NO: 3995527 - RNA, 16 nt, Human herpesvirus 6B
uaucaacuauacuuaa

SEQ ID NO: 3995528 - RNA, 15 nt, Human herpesvirus 6B
uaucaugagagagca

SEQ ID NO: 3995529 - RNA, 20 nt, Human herpesvirus 6B
uaucguagagcaguuucuuu

SEQ ID NO: 3995530 - RNA, 22 nt, Human herpesvirus 6B
uaucugaaaucgcauuucucua

SEQ ID NO: 3995531 - RNA, 17 nt, Human herpesvirus 6B
uaugaaaucgauguaga

SEQ ID NO: 3995532 - RNA, 20 nt, Human herpesvirus 6B
uaugaacaggugcuucuuuu

SEQ ID NO: 3995533 - RNA, 16 nt, Human herpesvirus 6B
uaugaagaauugacuu

SEQ ID NO: 3995534 - RNA, 20 nt, Human herpesvirus 6B
uaugacuuuucugaaauucu

SEQ ID NO: 3995535 - RNA, 16 nt, Human herpesvirus 6B
uaugaugcuguagaaa

SEQ ID NO: 3995536 - RNA, 22 nt, Human herpesvirus 6B
uaugcuuuuuuuuguggauggu

SEQ ID NO: 3995537 - RNA, 23 nt, Human herpesvirus 6B
gcucgccgucgucgcucucccuc

SEQ ID NO: 3995538 - RNA, 12 nt, Human herpesvirus 6B
gcucggcagggg

SEQ ID NO: 3995539 - RNA, 18 nt, Human herpesvirus 6B
gucuccgauccgucagga

SEQ ID NO: 3995540 - RNA, 23 nt, Human herpesvirus 6B
gucuccgauccgucaggaccagc

SEQ ID NO: 3995541 - RNA, 11 nt, Human herpesvirus 6B
gucucuagacg

SEQ ID NO: 3995542 - RNA, 12 nt, Human herpesvirus 6B
gucugcaggacu

SEQ ID NO: 3995543 - RNA, 13 nt, Human herpesvirus 6B
gucuggccucugc

SEQ ID NO: 3995544 - RNA, 16 nt, Human herpesvirus 6B
gaaacgcaaagggaag

SEQ ID NO: 3995545 - RNA, 20 nt, Human herpesvirus 6B
gaaacggugguuucugcucc

SEQ ID NO: 3995546 - RNA, 17 nt, Human herpesvirus 6B
gaaagacguuugcuuuu

SEQ ID NO: 3995547 - RNA, 14 nt, Human herpesvirus 6B
gaaauauggcuaau

SEQ ID NO: 3995548 - RNA, 15 nt, Human herpesvirus 6B
gaaaucuuuccugcu

SEQ ID NO: 3995549 - RNA, 22 nt, Human herpesvirus 6B
gaaauguugccuuuguaaaaug

SEQ ID NO: 3995550 - RNA, 14 nt, Human herpesvirus 6B
gaaauuaauaagau

SEQ ID NO: 3995551 - RNA, 22 nt, Human herpesvirus 6B
gaacaagagacgaaagacguuu

SEQ ID NO: 3995552 - RNA, 16 nt, Human herpesvirus 6B
gaacacgucguggcag

SEQ ID NO: 3995553 - RNA, 24 nt, Human herpesvirus 6B
gaacauuguucuaaaagauuguuu

SEQ ID NO: 3995554 - RNA, 18 nt, Human herpesvirus 6B
gaaccacagccagaagca

SEQ ID NO: 3995555 - RNA, 20 nt, Human herpesvirus 6B
gaaccacaucuuuuccugcu

SEQ ID NO: 3995556 - RNA, 22 nt, Human herpesvirus 6B
gaacgauaugcugccauuauug

SEQ ID NO: 3995557 - RNA, 17 nt, Human herpesvirus 6B
gaagaacagaggaagaa

SEQ ID NO: 3995558 - RNA, 15 nt, Human herpesvirus 6B
gaagaacaugcagaa

SEQ ID NO: 3995559 - RNA, 18 nt, Human herpesvirus 6B
gaagaauccgcgggccag

SEQ ID NO: 3995560 - RNA, 18 nt, Human herpesvirus 6B
gaagccggagcccugaga

SEQ ID NO: 3995561 - RNA, 13 nt, Human herpesvirus 6B
gaaggguugcaga

SEQ ID NO: 3995562 - RNA, 20 nt, Human herpesvirus 6B
gaagguaucaaagaacagaa

SEQ ID NO: 3995563 - RNA, 17 nt, Human herpesvirus 6B
gaagugcuucugcucuc

SEQ ID NO: 3995564 - RNA, 20 nt, Human herpesvirus 6B
gaauaaaacaaguuaaauuu

SEQ ID NO: 3995565 - RNA, 12 nt, Human herpesvirus 6B
gaauaagaguuu

SEQ ID NO: 3995566 - RNA, 17 nt, Human herpesvirus 6B
gaauagagauaaaugua

SEQ ID NO: 3995567 - RNA, 19 nt, Human herpesvirus 6B
gaauaugaauaugccguau

SEQ ID NO: 3995568 - RNA, 12 nt, Human herpesvirus 6B
gaaucacaaaau

SEQ ID NO: 3995569 - RNA, 20 nt, Human herpesvirus 6B
gaauccagauaaacaaaaau

SEQ ID NO: 3995570 - RNA, 14 nt, Human herpesvirus 6B
gaaucggaagagga

SEQ ID NO: 3995571 - RNA, 21 nt, Human herpesvirus 6B
gaaucucuguuccucaugaac

SEQ ID NO: 3995572 - RNA, 19 nt, Human herpesvirus 6B
gaaugagggauucguaguu

SEQ ID NO: 3995573 - RNA, 20 nt, Human herpesvirus 6B
gaauguugguaaacuuacca

SEQ ID NO: 3995574 - RNA, 18 nt, Human herpesvirus 6B
gaauuauuuccucugaau

SEQ ID NO: 3995575 - RNA, 19 nt, Human herpesvirus 6B
gaauucguuacaaucucug

SEQ ID NO: 3995576 - RNA, 18 nt, Human herpesvirus 6B
gacaaaaacaugugcuua

SEQ ID NO: 3995577 - RNA, 19 nt, Human herpesvirus 6B
gacaauaaacaugauugua

SEQ ID NO: 3995578 - RNA, 22 nt, Human herpesvirus 6B
gacacaucgugaguuuucaugu

SEQ ID NO: 3995579 - RNA, 19 nt, Human herpesvirus 6B
gacacggagugcgacagga

SEQ ID NO: 3995580 - RNA, 20 nt, Human herpesvirus 6B
gacagaucagcauuuggcag

SEQ ID NO: 3995581 - RNA, 21 nt, Human herpesvirus 6B
gacagcaguuuuuuggggaag

SEQ ID NO: 3995582 - RNA, 15 nt, Human herpesvirus 6B
gacagcuuggccaac

SEQ ID NO: 3995583 - RNA, 23 nt, Human herpesvirus 6B
gacaguaacggcggcggcggcug

SEQ ID NO: 3995584 - RNA, 13 nt, Human herpesvirus 6B
gacccaacagaag

SEQ ID NO: 3995585 - RNA, 16 nt, Human herpesvirus 6B
gaccguaucccucccu

SEQ ID NO: 3995586 - RNA, 18 nt, Human herpesvirus 6B
gacgaagaaacgaggacg

SEQ ID NO: 3995587 - RNA, 14 nt, Human herpesvirus 6B
gacgagauguuucu

SEQ ID NO: 3995588 - RNA, 14 nt, Human herpesvirus 6B
gacgcaaagagaga

SEQ ID NO: 3995589 - RNA, 14 nt, Human herpesvirus 6B
gacggcagcgggga

SEQ ID NO: 3995590 - RNA, 14 nt, Human herpesvirus 6B
gacgucugggauca

SEQ ID NO: 3995591 - RNA, 19 nt, Human herpesvirus 6B
gacuaucaaaauaaaaauu

SEQ ID NO: 3995592 - RNA, 16 nt, Human herpesvirus 6B
gacucgccgaugaaac

SEQ ID NO: 3995593 - RNA, 20 nt, Human herpesvirus 6B
gacugaucuguagcgaauuu

SEQ ID NO: 3995594 - RNA, 17 nt, Human herpesvirus 6B
gacugcguuacaagcau

SEQ ID NO: 3995595 - RNA, 13 nt, Human herpesvirus 6B
gacuguagaaaac

SEQ ID NO: 3995596 - RNA, 23 nt, Human herpesvirus 6B
gacuuagcuagacgugucuucau

SEQ ID NO: 3995597 - RNA, 15 nt, Human herpesvirus 6B
gacuuauuaucucac

SEQ ID NO: 3995598 - RNA, 18 nt, Human herpesvirus 6B
gacuuuucugaugacaau

SEQ ID NO: 3995599 - RNA, 12 nt, Human herpesvirus 6B
gagaauagagau

SEQ ID NO: 3995600 - RNA, 22 nt, Human herpesvirus 6B
gagaauuaugacugacaaggua

SEQ ID NO: 3995601 - RNA, 19 nt, Human herpesvirus 6B
gagacuuugcugauucugu

SEQ ID NO: 3995602 - RNA, 18 nt, Human herpesvirus 6B
gagaguucauuuguuccg

SEQ ID NO: 3995603 - RNA, 13 nt, Human herpesvirus 6B
gagaucugaggac

SEQ ID NO: 3995604 - RNA, 13 nt, Human herpesvirus 6B
gagcacuugggga

SEQ ID NO: 3995605 - RNA, 18 nt, Human herpesvirus 6B
gagcccugagagcaggag

SEQ ID NO: 3995606 - RNA, 13 nt, Human herpesvirus 6B
gagcucaaagaga

SEQ ID NO: 3995607 - RNA, 14 nt, Human herpesvirus 6B
gagcuccauguucu

SEQ ID NO: 3995608 - RNA, 17 nt, Human herpesvirus 6B
gaggacgcaaagagaga

SEQ ID NO: 3995609 - RNA, 17 nt, Human herpesvirus 6B
gaggacggugagaagau

SEQ ID NO: 3995610 - RNA, 10 nt, Human herpesvirus 6B
gaggaggagg

SEQ ID NO: 3995611 - RNA, 19 nt, Human herpesvirus 6B
gaggugauuugaacagaga

SEQ ID NO: 3995612 - RNA, 22 nt, Human herpesvirus 6B
gagucggcuguccaaacagaga

SEQ ID NO: 3995613 - RNA, 13 nt, Human herpesvirus 6B
gagucuguuacaa

SEQ ID NO: 3995614 - RNA, 17 nt, Human herpesvirus 6B
gaguuuagcauggguga

SEQ ID NO: 3995615 - RNA, 13 nt, Human herpesvirus 6B
gauaaacaucgcu

SEQ ID NO: 3995616 - RNA, 21 nt, Human herpesvirus 6B
gauaaauguauaaaagagaaa

SEQ ID NO: 3995617 - RNA, 14 nt, Human herpesvirus 6B
gauacaaaugaggg

SEQ ID NO: 3995618 - RNA, 21 nt, Human herpesvirus 6B
gauacuacguguaauguuucc

SEQ ID NO: 3995619 - RNA, 19 nt, Human herpesvirus 6B
gauauaaauauuuacggga

SEQ ID NO: 3995620 - RNA, 13 nt, Human herpesvirus 6B
gauaucaaagcuc

SEQ ID NO: 3995621 - RNA, 17 nt, Human herpesvirus 6B
gauaucaauuccuguga

SEQ ID NO: 3995622 - RNA, 16 nt, Human herpesvirus 6B
gauaucguuuuugcuu

SEQ ID NO: 3995623 - RNA, 19 nt, Human herpesvirus 6B
gaucaacuccguauaugcu

SEQ ID NO: 3995624 - RNA, 19 nt, Human herpesvirus 6B
gaucgaguuacauucguau

SEQ ID NO: 3995625 - RNA, 21 nt, Human herpesvirus 6B
gaucuuauaaaugugagcagu

SEQ ID NO: 3995626 - RNA, 20 nt, Human herpesvirus 6B
gaugacaaggugaacucauc

SEQ ID NO: 3995627 - RNA, 17 nt, Human herpesvirus 6B
gaugagaacuucaaaau

SEQ ID NO: 3995628 - RNA, 20 nt, Human herpesvirus 6B
gaugcaagucgcgaagugcu

SEQ ID NO: 3995629 - RNA, 21 nt, Human herpesvirus 6B
gaugcagucuccacagggcau

SEQ ID NO: 3995630 - RNA, 14 nt, Human herpesvirus 6B
gaugcauacagcau

SEQ ID NO: 3995631 - RNA, 13 nt, Human herpesvirus 6B
gaugccaaagcuu

SEQ ID NO: 3995632 - RNA, 18 nt, Human herpesvirus 6B
gaugccaaagcuuucugu

SEQ ID NO: 3995633 - RNA, 17 nt, Human herpesvirus 6B
gaugccuugauguuucc

SEQ ID NO: 3995634 - RNA, 21 nt, Human herpesvirus 6B
gauggaucggaagacguuucu

SEQ ID NO: 3995635 - RNA, 17 nt, Human herpesvirus 6B
gauugaugaaagcuuca

SEQ ID NO: 3995636 - RNA, 22 nt, Human herpesvirus 6B
gauugcgucacuguccaaagaa

SEQ ID NO: 3995637 - RNA, 16 nt, Human herpesvirus 6B
gauuguucgcuugugu

SEQ ID NO: 3995638 - RNA, 13 nt, Human herpesvirus 6B
gauuucuguaguu

SEQ ID NO: 3995639 - RNA, 21 nt, Human herpesvirus 6B
gauuucuuuaucuuccuguac

SEQ ID NO: 3995640 - RNA, 12 nt, Human herpesvirus 6B
gauuugaacaga

SEQ ID NO: 3995641 - RNA, 17 nt, Human herpesvirus 6B
gcaaagaugcagauucu

SEQ ID NO: 3995642 - RNA, 24 nt, Human herpesvirus 6B
gcaacaaagagcuuuaaagcagcu

SEQ ID NO: 3995643 - RNA, 15 nt, Human herpesvirus 6B
gcaacgcagauuuua

SEQ ID NO: 3995644 - RNA, 18 nt, Human herpesvirus 6B
gcaagcaaacgcucgccg

SEQ ID NO: 3995645 - RNA, 20 nt, Human herpesvirus 6B
gcaagucgccucacuguaaa

SEQ ID NO: 3995646 - RNA, 18 nt, Human herpesvirus 6B
gcaauuugaauucugcuc

SEQ ID NO: 3995647 - RNA, 20 nt, Human herpesvirus 6B
gcacaauucuaacuaaaauu

SEQ ID NO: 3995648 - RNA, 17 nt, Human herpesvirus 6B
gcacacgucccuaugau

SEQ ID NO: 3995649 - RNA, 19 nt, Human herpesvirus 6B
gcacaguucguccagcagc

SEQ ID NO: 3995650 - RNA, 18 nt, Human herpesvirus 6B
gcacccguauccgcgaga

SEQ ID NO: 3995651 - RNA, 15 nt, Human herpesvirus 6B
gcaccgagggcgggc

SEQ ID NO: 3995652 - RNA, 23 nt, Human herpesvirus 6B
gcacgaagaagggcagagagccg

SEQ ID NO: 3995653 - RNA, 20 nt, Human herpesvirus 6B
gcacgagaacacgcgagaca

SEQ ID NO: 3995654 - RNA, 14 nt, Human herpesvirus 6B
gcacgagccaaggg

SEQ ID NO: 3995655 - RNA, 22 nt, Human herpesvirus 6B
gcacuuuuuucuaaaacccgga

SEQ ID NO: 3995656 - RNA, 12 nt, Human herpesvirus 6B
gcagacaucaca

SEQ ID NO: 3995657 - RNA, 16 nt, Human herpesvirus 6B
gcacucuccgaccagc

SEQ ID NO: 3995658 - RNA, 19 nt, Human herpesvirus 6B
gcacucuccgaccagcacc

SEQ ID NO: 3995659 - RNA, 19 nt, Human herpesvirus 6B
gcagaaguuuccgcgcugg

SEQ ID NO: 3995660 - RNA, 15 nt, Human herpesvirus 6B
gcagcggggaaggga

SEQ ID NO: 3995661 - RNA, 17 nt, Human herpesvirus 6B
gcaggcuccccaggcgc

SEQ ID NO: 3995662 - RNA, 19 nt, Human herpesvirus 6B
gcaggcuccccaggcgcag

SEQ ID NO: 3995663 - RNA, 14 nt, Human herpesvirus 6B
gcagggcgggcacg

SEQ ID NO: 3995664 - RNA, 14 nt, Human herpesvirus 6B
gcaggguguggccg

SEQ ID NO: 3995665 - RNA, 15 nt, Human herpesvirus 6B
gcaggugcugcuaaa

SEQ ID NO: 3995666 - RNA, 17 nt, Human herpesvirus 6B
gcagucuccacagggca

SEQ ID NO: 3995667 - RNA, 15 nt, Human herpesvirus 6B
gcauaauccuuuucu

SEQ ID NO: 3995668 - RNA, 17 nt, Human herpesvirus 6B
gcauacacccugccgac

SEQ ID NO: 3995669 - RNA, 19 nt, Human herpesvirus 6B
gcauccuguuuucccaccu

SEQ ID NO: 3995670 - RNA, 17 nt, Human herpesvirus 6B
gcaugcgacagacaguc

SEQ ID NO: 3995671 - RNA, 16 nt, Human herpesvirus 6B
gcauggaaaaggcgga

SEQ ID NO: 3995672 - RNA, 18 nt, Human herpesvirus 6B
gccaaacauaucacagau

SEQ ID NO: 3995673 - RNA, 16 nt, Human herpesvirus 6B
gccaaagcuuucugua

SEQ ID NO: 3995674 - RNA, 17 nt, Human herpesvirus 6B
gccaaagcuuucuguac

SEQ ID NO: 3995675 - RNA, 15 nt, Human herpesvirus 6B
gccaacgcgacacgg

SEQ ID NO: 3995676 - RNA, 22 nt, Human herpesvirus 6B
gccacauuagcugcuaaaugug

SEQ ID NO: 3995677 - RNA, 10 nt, Human herpesvirus 6B
gccagccgcc

SEQ ID NO: 3995678 - RNA, 13 nt, Human herpesvirus 6B
gccauccacccau

SEQ ID NO: 3995679 - RNA, 19 nt, Human herpesvirus 6B
gccauccacccauauaccc

SEQ ID NO: 3995680 - RNA, 13 nt, Human herpesvirus 6B
gccauggguguca

SEQ ID NO: 3995681 - RNA, 17 nt, Human herpesvirus 6B
gcccucgucuguugcug

SEQ ID NO: 3995682 - RNA, 20 nt, Human herpesvirus 6B
gcccucucacgcgcauuaaa

SEQ ID NO: 3995683 - RNA, 21 nt, Human herpesvirus 6B
gccgccauauuaaaacccggc

SEQ ID NO: 3995684 - RNA, 16 nt, Human herpesvirus 6B
gccgccuucucugucg

SEQ ID NO: 3995685 - RNA, 16 nt, Human herpesvirus 6B
gccggucggggagggg

SEQ ID NO: 3995686 - RNA, 21 nt, Human herpesvirus 6B
gccucccuccguuaggaucag

SEQ ID NO: 3995687 - RNA, 18 nt, Human herpesvirus 6B
gccucgccgcucccgcuc

SEQ ID NO: 3995688 - RNA, 16 nt, Human herpesvirus 6B
gccuggggacagacag

SEQ ID NO: 3995689 - RNA, 12 nt, Human herpesvirus 6B
gccuugauuuuu

SEQ ID NO: 3995690 - RNA, 22 nt, Human herpesvirus 6B
gcgaagguaggaauggacauga

SEQ ID NO: 3995691 - RNA, 16 nt, Human herpesvirus 6B
gcgaagugcuucugcu

SEQ ID NO: 3995692 - RNA, 13 nt, Human herpesvirus 6B
gcgacacgcgcgg

SEQ ID NO: 3995693 - RNA, 15 nt, Human herpesvirus 6B
gcgaccacagcggca

SEQ ID NO: 3995694 - RNA, 15 nt, Human herpesvirus 6B
gcgaccucgcucucc

SEQ ID NO: 3995695 - RNA, 19 nt, Human herpesvirus 6B
gcgacgacggggacuaccg

SEQ ID NO: 3995696 - RNA, 18 nt, Human herpesvirus 6B
gcgacgggcagggcgggc

SEQ ID NO: 3995697 - RNA, 14 nt, Human herpesvirus 6B
gcgagucugugcuu

SEQ ID NO: 3995698 - RNA, 17 nt, Human herpesvirus 6B
gcgaugcgccacaggga

SEQ ID NO: 3995699 - RNA, 18 nt, Human herpesvirus 6B
gcgaugcgccacagggag

SEQ ID NO: 3995700 - RNA, 19 nt, Human herpesvirus 6B
gcgauugcugcuucuguaa

SEQ ID NO: 3995701 - RNA, 14 nt, Human herpesvirus 6B
gcgcaccggcgaca

SEQ ID NO: 3995702 - RNA, 20 nt, Human herpesvirus 6B
gcgcauggaaaaggcggaca

SEQ ID NO: 3995703 - RNA, 13 nt, Human herpesvirus 6B
gcgcccggagucg

SEQ ID NO: 3995704 - RNA, 18 nt, Human herpesvirus 6B
gcgccgguuuccaugaga

SEQ ID NO: 3995705 - RNA, 19 nt, Human herpesvirus 6B
gcgcgugaccguaucccuc

SEQ ID NO: 3995706 - RNA, 17 nt, Human herpesvirus 6B
gcgcguugggggauggg

SEQ ID NO: 3995707 - RNA, 12 nt, Human herpesvirus 6B
gcggaagggcuc

SEQ ID NO: 3995708 - RNA, 20 nt, Human herpesvirus 6B
gcggaagggcucuguuacua

SEQ ID NO: 3995709 - RNA, 22 nt, Human herpesvirus 6B
gcggaugucgcgaagcucagcu

SEQ ID NO: 3995710 - RNA, 14 nt, Human herpesvirus 6B
gcggcucucugccc

SEQ ID NO: 3995711 - RNA, 16 nt, Human herpesvirus 6B
gcggggaucgggccug

SEQ ID NO: 3995712 - RNA, 19 nt, Human herpesvirus 6B
gcgguggugaucggcagau

SEQ ID NO: 3995713 - RNA, 17 nt, Human herpesvirus 6B
gcgucauuagaagguug

SEQ ID NO: 3995714 - RNA, 15 nt, Human herpesvirus 6B
gcguccuccgcgaga

SEQ ID NO: 3995715 - RNA, 14 nt, Human herpesvirus 6B
gcguguuuuggaau

SEQ ID NO: 3995716 - RNA, 19 nt, Human herpesvirus 6B
gcguugcccucccgcagcu

SEQ ID NO: 3995717 - RNA, 16 nt, Human herpesvirus 6B
gcuaaguguugacuga

SEQ ID NO: 3995718 - RNA, 14 nt, Human herpesvirus 6B
gcuccguucccuuc

SEQ ID NO: 3995719 - RNA, 13 nt, Human herpesvirus 6B
gcucgggaucacg

SEQ ID NO: 3995720 - RNA, 23 nt, Human herpesvirus 6B
gcucgggggacggagaggaagcc

SEQ ID NO: 3995721 - RNA, 17 nt, Human herpesvirus 6B
gcucucccucuucccuc

SEQ ID NO: 3995722 - RNA, 20 nt, Human herpesvirus 6B
gcucuccgcgcugcuggggc

SEQ ID NO: 3995723 - RNA, 14 nt, Human herpesvirus 6B
gcucucgaugaaag

SEQ ID NO: 3995724 - RNA, 15 nt, Human herpesvirus 6B
gcucucgcaagccag

SEQ ID NO: 3995725 - RNA, 16 nt, Human herpesvirus 6B
gcucuggcaaaggugu

SEQ ID NO: 3995726 - RNA, 20 nt, Human herpesvirus 6B
gcugaguggacauuggacuu

SEQ ID NO: 3995727 - RNA, 12 nt, Human herpesvirus 6B
gcuggucgccgu

SEQ ID NO: 3995728 - RNA, 20 nt, Human herpesvirus 6B
gcugucgcccgccucucucc

SEQ ID NO: 3995729 - RNA, 12 nt, Human herpesvirus 6B
gcuuggccaacu

SEQ ID NO: 3995730 - RNA, 18 nt, Human herpesvirus 6B
gcuuucuguaccccaagu

SEQ ID NO: 3995731 - RNA, 15 nt, Human herpesvirus 6B
ggaaguguaaauguc

SEQ ID NO: 3995732 - RNA, 22 nt, Human herpesvirus 6B
ggacaaauaaguggugaugaau

SEQ ID NO: 3995733 - RNA, 19 nt, Human herpesvirus 6B
ggacagaaaaaacaccaga

SEQ ID NO: 3995734 - RNA, 18 nt, Human herpesvirus 6B
ggacagaaaugagcaaca

SEQ ID NO: 3995735 - RNA, 15 nt, Human herpesvirus 6B
ggacagacaggggga

SEQ ID NO: 3995736 - RNA, 22 nt, Human herpesvirus 6B
ggacagagcggagaggcgcggg

SEQ ID NO: 3995737 - RNA, 14 nt, Human herpesvirus 6B
ggacggggccuccc

SEQ ID NO: 3995738 - RNA, 19 nt, Human herpesvirus 6B
ggacuugcgagucugucag

SEQ ID NO: 3995739 - RNA, 19 nt, Human herpesvirus 6B
ggagugaaacgauguguua

SEQ ID NO: 3995740 - RNA, 17 nt, Human herpesvirus 6B
ggagugcgacaggagau

SEQ ID NO: 3995741 - RNA, 18 nt, Human herpesvirus 6B
ggaucagcucagcucuga

SEQ ID NO: 3995742 - RNA, 17 nt, Human herpesvirus 6B
ggaucccagaugcaguc

SEQ ID NO: 3995743 - RNA, 22 nt, Human herpesvirus 6B
ggauuccccucauacauccaga

SEQ ID NO: 3995744 - RNA, 19 nt, Human herpesvirus 6B
ggauuuaguuucuuuggaa

SEQ ID NO: 3995745 - RNA, 19 nt, Human herpesvirus 6B
ggauuuuauuuuaucucau

SEQ ID NO: 3995746 - RNA, 12 nt, Human herpesvirus 6B
ggcaaccgcagu

SEQ ID NO: 3995747 - RNA, 12 nt, Human herpesvirus 6B
ggcaucagauuu

SEQ ID NO: 3995748 - RNA, 22 nt, Human herpesvirus 6B
ggcaugcguuacggagauauac

SEQ ID NO: 3995749 - RNA, 16 nt, Human herpesvirus 6B
ggccagcccugaagaa

SEQ ID NO: 3995750 - RNA, 14 nt, Human herpesvirus 6B
ggccgucuccugca

SEQ ID NO: 3995751 - RNA, 24 nt, Human herpesvirus 6B
ggccucccuccguuaggaucagac

SEQ ID NO: 3995752 - RNA, 23 nt, Human herpesvirus 6B
ggcgaagggacacgagaagaaca

SEQ ID NO: 3995753 - RNA, 19 nt, Human herpesvirus 6B
ggcgaggggacggacagag

SEQ ID NO: 3995754 - RNA, 19 nt, Human herpesvirus 6B
ggcgcaaaccaagguguuu

SEQ ID NO: 3995755 - RNA, 17 nt, Human herpesvirus 6B
ggcgcccgugguggccg

SEQ ID NO: 3995756 - RNA, 14 nt, Human herpesvirus 6B
ggcgcugggcuccu

SEQ ID NO: 3995757 - RNA, 16 nt, Human herpesvirus 6B
ggcgcuuccuguucua

SEQ ID NO: 3995758 - RNA, 23 nt, Human herpesvirus 6B
ggcggagcacccggggaggcgac

SEQ ID NO: 3995759 - RNA, 22 nt, Human herpesvirus 6B
ggcggcgaccacagcggcagcg

SEQ ID NO: 3995760 - RNA, 14 nt, Human herpesvirus 6B
ggcggcggcggcug

SEQ ID NO: 3995761 - RNA, 14 nt, Human herpesvirus 6B
ggcggcugucgccg

SEQ ID NO: 3995762 - RNA, 12 nt, Human herpesvirus 6B
ggcgggcacgga

SEQ ID NO: 3995763 - RNA, 15 nt, Human herpesvirus 6B
ggcgucaccaagaaa

SEQ ID NO: 3995764 - RNA, 21 nt, Human herpesvirus 6B
ggcuauuugacaauaaacaug

SEQ ID NO: 3995765 - RNA, 12 nt, Human herpesvirus 6B
ggcucggcaggg

SEQ ID NO: 3995766 - RNA, 15 nt, Human herpesvirus 6B
ggcucucugcccuuc

SEQ ID NO: 3995767 - RNA, 18 nt, Human herpesvirus 6B
ggcugauaaguugucauu

SEQ ID NO: 3995768 - RNA, 18 nt, Human herpesvirus 6B
ggcuuaaaggcagcuggc

SEQ ID NO: 3995769 - RNA, 16 nt, Human herpesvirus 6B
gggaauuuggcagaau

SEQ ID NO: 3995770 - RNA, 15 nt, Human herpesvirus 6B
gggacuccgagccgg

SEQ ID NO: 3995771 - RNA, 13 nt, Human herpesvirus 6B
aaaaaacaguuuc

SEQ ID NO: 3995772 - RNA, 12 nt, Human herpesvirus 6B
aaaaacagaaua

SEQ ID NO: 3995773 - RNA, 14 nt, Human herpesvirus 6B
aaaaauaagacuua

SEQ ID NO: 3995774 - RNA, 15 nt, Human herpesvirus 6B
aaaaauauuggauuu

SEQ ID NO: 3995775 - RNA, 13 nt, Human herpesvirus 6B
aaaacccggagaa

SEQ ID NO: 3995776 - RNA, 20 nt, Human herpesvirus 6B
aaaacgaaacucuagaauua

SEQ ID NO: 3995777 - RNA, 16 nt, Human herpesvirus 6B
aaaacgguaaagauga

SEQ ID NO: 3995778 - RNA, 12 nt, Human herpesvirus 6B
aaaacuacagag

SEQ ID NO: 3995779 - RNA, 18 nt, Human herpesvirus 6B
aaaagauuauggcaacau

SEQ ID NO: 3995780 - RNA, 13 nt, Human herpesvirus 6B
aaaagguugagaa

SEQ ID NO: 3995781 - RNA, 13 nt, Human herpesvirus 6B
aaaauaagacuua

SEQ ID NO: 3995782 - RNA, 18 nt, Human herpesvirus 6B
aaaauaccugacuguucu

SEQ ID NO: 3995783 - RNA, 13 nt, Human herpesvirus 6B
aaaauauuuugaa

SEQ ID NO: 3995784 - RNA, 21 nt, Human herpesvirus 6B
aaaaucgauacgacucaguag

SEQ ID NO: 3995785 - RNA, 23 nt, Human herpesvirus 6B
aaaauguuuccaugacugugagg

SEQ ID NO: 3995786 - RNA, 15 nt, Human herpesvirus 6B
aaaauucuaccguag

SEQ ID NO: 3995787 - RNA, 15 nt, Human herpesvirus 6B
aaacacggcgccucc

SEQ ID NO: 3995788 - RNA, 16 nt, Human herpesvirus 6B
aaacacggcgccuccc

SEQ ID NO: 3995789 - RNA, 15 nt, Human herpesvirus 6B
aaacacuaagugccg

SEQ ID NO: 3995790 - RNA, 12 nt, Human herpesvirus 6B
aaacagaauaag

SEQ ID NO: 3995791 - RNA, 15 nt, Human herpesvirus 6B
aaacauaaaauguuu

SEQ ID NO: 3995792 - RNA, 16 nt, Human herpesvirus 6B
aaacauagaaucucca

SEQ ID NO: 3995793 - RNA, 12 nt, Human herpesvirus 6B
aaacauucuuaa

SEQ ID NO: 3995794 - RNA, 18 nt, Human herpesvirus 6B
aaacgauuucuuuaucuu

SEQ ID NO: 3995795 - RNA, 12 nt, Human herpesvirus 6B
aaacgcuuuuuu

SEQ ID NO: 3995796 - RNA, 22 nt, Human herpesvirus 6B
aaacgugagguguauuugaaau

SEQ ID NO: 3995797 - RNA, 15 nt, Human herpesvirus 6B
aaacuaaauuuuaug

SEQ ID NO: 3995798 - RNA, 22 nt, Human herpesvirus 6B
aaacuagaugacuauuucuuua

SEQ ID NO: 3995799 - RNA, 20 nt, Human herpesvirus 6B
aaacuaugaggaacugauga

SEQ ID NO: 3995800 - RNA, 16 nt, Human herpesvirus 6B
aaacucaaagaaagcu

SEQ ID NO: 3995801 - RNA, 16 nt, Human herpesvirus 6B
aaacugccgcuuaaau

SEQ ID NO: 3995802 - RNA, 12 nt, Human herpesvirus 6B
aaagaacauuug

SEQ ID NO: 3995803 - RNA, 14 nt, Human herpesvirus 6B
aaagagaaggaaaa

SEQ ID NO: 3995804 - RNA, 23 nt, Human herpesvirus 6B
aaagauuagauuaggggagagac

SEQ ID NO: 3995805 - RNA, 14 nt, Human herpesvirus 6B
aaagcagaucgagu

SEQ ID NO: 3995806 - RNA, 13 nt, Human herpesvirus 6B
aaagcgccugccu

SEQ ID NO: 3995807 - RNA, 18 nt, Human herpesvirus 6B
aaaggucagaugcaaaaa

SEQ ID NO: 3995808 - RNA, 17 nt, Human herpesvirus 6B
aaaguaugcuuugaaau

SEQ ID NO: 3995809 - RNA, 18 nt, Human herpesvirus 6B
aaagucgcuucgaauguu

SEQ ID NO: 3995810 - RNA, 19 nt, Human herpesvirus 6B
aaagucguuacaguaaaaa

SEQ ID NO: 3995811 - RNA, 13 nt, Human herpesvirus 6B
aaaguuuuugguu

SEQ ID NO: 3995812 - RNA, 23 nt, Human herpesvirus 6B
aaaucaaugaguugcacauguuu

SEQ ID NO: 3995813 - RNA, 15 nt, Human herpesvirus 6B
aaaucacuccgcauc

SEQ ID NO: 3995814 - RNA, 19 nt, Human herpesvirus 6B
aaaucgguuaaagaaucug

SEQ ID NO: 3995815 - RNA, 18 nt, Human herpesvirus 6B
aaaucguaggcaucuuca

SEQ ID NO: 3995816 - RNA, 15 nt, Human herpesvirus 6B
aaauguggucaugga

SEQ ID NO: 3995817 - RNA, 21 nt, Human herpesvirus 6B
aaauguuuccaugacugugag

SEQ ID NO: 3995818 - RNA, 18 nt, Human herpesvirus 6B
aaauuaacugucaugucu

SEQ ID NO: 3995819 - RNA, 21 nt, Human herpesvirus 6B
aacaaaaggucagaugcaaaa

SEQ ID NO: 3995820 - RNA, 19 nt, Human herpesvirus 6B
aacaacugccgccauauua

SEQ ID NO: 3995821 - RNA, 18 nt, Human herpesvirus 6B
aacaaguuauuuaaaauc

SEQ ID NO: 3995822 - RNA, 13 nt, Human herpesvirus 6B
aacaauaauugca

SEQ ID NO: 3995823 - RNA, 15 nt, Human herpesvirus 6B
aacaauuuugauuua

SEQ ID NO: 3995824 - RNA, 21 nt, Human herpesvirus 6B
aacacaauauaugaaauacug

SEQ ID NO: 3995825 - RNA, 14 nt, Human herpesvirus 6B
aacagaaucuucuu

SEQ ID NO: 3995826 - RNA, 15 nt, Human herpesvirus 6B
aacagaugaggagga

SEQ ID NO: 3995827 - RNA, 18 nt, Human herpesvirus 6B
aacagauuuugaggauca

SEQ ID NO: 3995828 - RNA, 11 nt, Human herpesvirus 6B
aacagugacag

SEQ ID NO: 3995829 - RNA, 14 nt, Human herpesvirus 6B
aaccacguuuuucc

SEQ ID NO: 3995830 - RNA, 21 nt, Human herpesvirus 6B
aaccgcaguuccuguuuuucu

SEQ ID NO: 3995831 - RNA, 22 nt, Human herpesvirus 6B
aacgaagguucgacuauguuag

SEQ ID NO: 3995832 - RNA, 23 nt, Human herpesvirus 6B
aacgcaaagggaagccagccgcc

SEQ ID NO: 3995833 - RNA, 18 nt, Human herpesvirus 6B
aacguccgugaugauuca

SEQ ID NO: 3995834 - RNA, 16 nt, Human herpesvirus 6B
aacgugacuguaucaa

SEQ ID NO: 3995835 - RNA, 12 nt, Human herpesvirus 6B
aacuauguguua

SEQ ID NO: 3995836 - RNA, 21 nt, Human herpesvirus 6B
aacugaggacguccuguucga

SEQ ID NO: 3995837 - RNA, 18 nt, Human herpesvirus 6B
aacugauacuguucaagu

SEQ ID NO: 3995838 - RNA, 20 nt, Human herpesvirus 6B
aacuuuagacagcugcauua

SEQ ID NO: 3995839 - RNA, 19 nt, Human herpesvirus 6B
aagaaaggaguuugcauuu

SEQ ID NO: 3995840 - RNA, 13 nt, Human herpesvirus 6B
aagaacuucauuu

SEQ ID NO: 3995841 - RNA, 17 nt, Human herpesvirus 6B
aagaagggcagagagcc

SEQ ID NO: 3995842 - RNA, 22 nt, Human herpesvirus 6B
augaauuugcgucagaguuuga

SEQ ID NO: 3995843 - RNA, 18 nt, Human herpesvirus 6B
augacaaauuuucagcua

SEQ ID NO: 3995844 - RNA, 16 nt, Human herpesvirus 6B
augacucaagaauuac

SEQ ID NO: 3995845 - RNA, 15 nt, Human herpesvirus 6B
augacugacaaggua

SEQ ID NO: 3995846 - RNA, 14 nt, Human herpesvirus 6B
augacuuuucugaa

SEQ ID NO: 3995847 - RNA, 21 nt, Human herpesvirus 6B
augagaauauauaaaaaaaac

SEQ ID NO: 3995848 - RNA, 21 nt, Human herpesvirus 6B
augagaauguucuucugaaau

SEQ ID NO: 3995849 - RNA, 23 nt, Human herpesvirus 6B
augaggauggauuccugaugguu

SEQ ID NO: 3995850 - RNA, 11 nt, Human herpesvirus 6B
augauagaaga

SEQ ID NO: 3995851 - RNA, 18 nt, Human herpesvirus 6B
augauccaauguuucugu

SEQ ID NO: 3995852 - RNA, 16 nt, Human herpesvirus 6B
augaugaucugcuuug

SEQ ID NO: 3995853 - RNA, 15 nt, Human herpesvirus 6B
augauucaauagcag

SEQ ID NO: 3995854 - RNA, 18 nt, Human herpesvirus 6B
augauuccacucugcaga

SEQ ID NO: 3995855 - RNA, 13 nt, Human herpesvirus 6B
augcgaauuaaaa

SEQ ID NO: 3995856 - RNA, 18 nt, Human herpesvirus 6B
augcgaccuacggccaga

SEQ ID NO: 3995857 - RNA, 16 nt, Human herpesvirus 6B
augcuaauaaaauaua

SEQ ID NO: 3995858 - RNA, 20 nt, Human herpesvirus 6B
augcuuaaacugaaucacuu

SEQ ID NO: 3995859 - RNA, 17 nt, Human herpesvirus 6B
auggaaaacugcagauu

SEQ ID NO: 3995860 - RNA, 20 nt, Human herpesvirus 6B
auggaaaauuuauaaaaaac

SEQ ID NO: 3995861 - RNA, 15 nt, Human herpesvirus 6B
auggacagaaaaaac

SEQ ID NO: 3995862 - RNA, 14 nt, Human herpesvirus 6B
auggcguuccgaau

SEQ ID NO: 3995863 - RNA, 14 nt, Human herpesvirus 6B
auggguuaggguua

SEQ ID NO: 3995864 - RNA, 14 nt, Human herpesvirus 6B
auggugucugaaaa

SEQ ID NO: 3995865 - RNA, 21 nt, Human herpesvirus 6B
auguaaacacgaaacugcuug

SEQ ID NO: 3995866 - RNA, 20 nt, Human herpesvirus 6B
auguaauguauuguucgcug

SEQ ID NO: 3995867 - RNA, 15 nt, Human herpesvirus 6B
auguagcacacgaca

SEQ ID NO: 3995868 - RNA, 20 nt, Human herpesvirus 6B
auguaucccgagaaaaaagc

SEQ ID NO: 3995869 - RNA, 20 nt, Human herpesvirus 6B
auguccgaaguaaaaaagau

SEQ ID NO: 3995870 - RNA, 19 nt, Human herpesvirus 6B
augucguuucaugggagaa

SEQ ID NO: 3995871 - RNA, 15 nt, Human herpesvirus 6B
augucucaguucaaa

SEQ ID NO: 3995872 - RNA, 18 nt, Human herpesvirus 6B
augugcggagaaagggac

SEQ ID NO: 3995873 - RNA, 13 nt, Human herpesvirus 6B
auguguaagaaaa

SEQ ID NO: 3995874 - RNA, 13 nt, Human herpesvirus 6B
auguguucauaga

SEQ ID NO: 3995875 - RNA, 20 nt, Human herpesvirus 6B
auuaaaaauaaaaaaaauga

SEQ ID NO: 3995876 - RNA, 13 nt, Human herpesvirus 6B
auuaaaugugaac

SEQ ID NO: 3995877 - RNA, 22 nt, Human herpesvirus 6B
auuaauucaaauguagcaaaug

SEQ ID NO: 3995878 - RNA, 13 nt, Human herpesvirus 6B
auuacaagggaaa

SEQ ID NO: 3995879 - RNA, 14 nt, Human herpesvirus 6B
auuacuuuugggau

SEQ ID NO: 3995880 - RNA, 16 nt, Human herpesvirus 6B
auuagauaagagaguu

SEQ ID NO: 3995881 - RNA, 18 nt, Human herpesvirus 6B
auuagauaagagaguuuc

SEQ ID NO: 3995882 - RNA, 16 nt, Human herpesvirus 6B
auuauaaaaacacacc

SEQ ID NO: 3995883 - RNA, 12 nt, Human herpesvirus 6B
auuauaaaaaug

SEQ ID NO: 3995884 - RNA, 13 nt, Human herpesvirus 6B
auucagcuggaca

SEQ ID NO: 3995885 - RNA, 16 nt, Human herpesvirus 6B
auucauuuauucucca

SEQ ID NO: 3995886 - RNA, 20 nt, Human herpesvirus 6B
auuccugaugguuaaggaaa

SEQ ID NO: 3995887 - RNA, 19 nt, Human herpesvirus 6B
auucugcauuuauaucaaa

SEQ ID NO: 3995888 - RNA, 15 nt, Human herpesvirus 6B
auucugugacauguu

SEQ ID NO: 3995889 - RNA, 23 nt, Human herpesvirus 6B
auucuguugggugaucauaggac

SEQ ID NO: 3995890 - RNA, 23 nt, Human herpesvirus 6B
auucuuguucgggccaagguaaa

SEQ ID NO: 3995891 - RNA, 17 nt, Human herpesvirus 6B
auugaauacgacuuugg

SEQ ID NO: 3995892 - RNA, 16 nt, Human herpesvirus 6B
auugacaugauguuuc

SEQ ID NO: 3995893 - RNA, 23 nt, Human herpesvirus 6B
auugacuacggcgguuaacuguu

SEQ ID NO: 3995894 - RNA, 21 nt, Human herpesvirus 6B
auugcacgcugggcuucagua

SEQ ID NO: 3995895 - RNA, 17 nt, Human herpesvirus 6B
auugcagguuggcgcuc

SEQ ID NO: 3995896 - RNA, 22 nt, Human herpesvirus 6B
auugcugcuggguguauguuuc

SEQ ID NO: 3995897 - RNA, 13 nt, Human herpesvirus 6B
auuguacgauaau

SEQ ID NO: 3995898 - RNA, 18 nt, Human herpesvirus 6B
auuuaauaaauugcagcu

SEQ ID NO: 3995899 - RNA, 12 nt, Human herpesvirus 6B
auuuaccagaga

SEQ ID NO: 3995900 - RNA, 16 nt, Human herpesvirus 6B
auuucccaaaacguga

SEQ ID NO: 3995901 - RNA, 22 nt, Human herpesvirus 6B
auuucuuuuuaaaaucaaaaaa

SEQ ID NO: 3995902 - RNA, 22 nt, Human herpesvirus 6B
auuuggaagcgaaucgcuuaaa

SEQ ID NO: 3995903 - RNA, 15 nt, Human herpesvirus 6B
auuuggaugaaacgu

SEQ ID NO: 3995904 - RNA, 21 nt, Human herpesvirus 6B
auuuggcagccucuugugcaa

SEQ ID NO: 3995905 - RNA, 16 nt, Human herpesvirus 6B
auuugguacccuugca

SEQ ID NO: 3995906 - RNA, 15 nt, Human herpesvirus 6B
auuugguuugacauu

SEQ ID NO: 3995907 - RNA, 17 nt, Human herpesvirus 6B
auuugugcaaaaugugg

SEQ ID NO: 3995908 - RNA, 22 nt, Human herpesvirus 6B
auuuugaggaucacuaacuuca

SEQ ID NO: 3995909 - RNA, 15 nt, Human herpesvirus 6B
auuuuucuuuacaga

SEQ ID NO: 3995910 - RNA, 13 nt, Human herpesvirus 6B
auuuuuuaaauaa

SEQ ID NO: 3995911 - RNA, 18 nt, Human herpesvirus 6B
auuuuuuugaaaucacuc

SEQ ID NO: 3995912 - RNA, 21 nt, Human herpesvirus 6B
caaaaaaaaaugacugauauu

SEQ ID NO: 3995913 - RNA, 16 nt, Human herpesvirus 6B
caaaaaaaugauagac

SEQ ID NO: 3995914 - RNA, 12 nt, Human herpesvirus 6B
caaaaaauguua

SEQ ID NO: 3995915 - RNA, 21 nt, Human herpesvirus 6B
caaaaaugcacaauuuagccu

SEQ ID NO: 3995916 - RNA, 17 nt, Human herpesvirus 6B
caaaagacuauguagua

SEQ ID NO: 3995917 - RNA, 19 nt, Human herpesvirus 6B
caaaaggaaaagucaaagu

SEQ ID NO: 3995918 - RNA, 13 nt, Human herpesvirus 6B
caaaaucugcuaa

SEQ ID NO: 3995919 - RNA, 15 nt, Human herpesvirus 6B
caaaaugaccagaga

SEQ ID NO: 3995920 - RNA, 15 nt, Human herpesvirus 6B
caaaaugggaauuuc

SEQ ID NO: 3995921 - RNA, 23 nt, Human herpesvirus 6B
caaacguguauuaagaaugaauu

SEQ ID NO: 3995922 - RNA, 19 nt, Human herpesvirus 6B
caaagaugacaaauuuuca

SEQ ID NO: 3995923 - RNA, 23 nt, Human herpesvirus 6B
caaauaauuuuauugacugugaa

SEQ ID NO: 3995924 - RNA, 16 nt, Human herpesvirus 6B
caaaucucaagaaaca

SEQ ID NO: 3995925 - RNA, 19 nt, Human herpesvirus 6B
caaauguagcaaaugaaug

SEQ ID NO: 3995926 - RNA, 16 nt, Human herpesvirus 6B
caaauucuaucuuaua

SEQ ID NO: 3995927 - RNA, 14 nt, Human herpesvirus 6B
caacacggggugag

SEQ ID NO: 3995928 - RNA, 20 nt, Human herpesvirus 6B
caaccuaacgacuacagaag

SEQ ID NO: 3995929 - RNA, 20 nt, Human herpesvirus 6B
caacgguguggagacaccuc

SEQ ID NO: 3995930 - RNA, 13 nt, Human herpesvirus 6B
caacuguuguguu

SEQ ID NO: 3995931 - RNA, 18 nt, Human herpesvirus 6B
caagaaugggaugcauua

SEQ ID NO: 3995932 - RNA, 19 nt, Human herpesvirus 6B
caagccgugcuuccagaga

SEQ ID NO: 3995933 - RNA, 17 nt, Human herpesvirus 6B
caagcucgaguucgaga

SEQ ID NO: 3995934 - RNA, 19 nt, Human herpesvirus 6B
caagguaaaggaaggcgua

SEQ ID NO: 3995935 - RNA, 15 nt, Human herpesvirus 6B
caagguaugaaacga

SEQ ID NO: 3995936 - RNA, 14 nt, Human herpesvirus 6B
caauaaacaugauu

SEQ ID NO: 3995937 - RNA, 12 nt, Human herpesvirus 6B
caauagcaguug

SEQ ID NO: 3995938 - RNA, 20 nt, Human herpesvirus 6B
caauaucguccucagagaaa

SEQ ID NO: 3995939 - RNA, 20 nt, Human herpesvirus 6B
caauccggaguuaaucucuu

SEQ ID NO: 3995940 - RNA, 16 nt, Human herpesvirus 6B
caaugaauacuucucu

SEQ ID NO: 3995941 - RNA, 14 nt, Human herpesvirus 6B
caaugagccuggcu

SEQ ID NO: 3995942 - RNA, 22 nt, Human herpesvirus 6B
caaugucaaguuagaaauguug

SEQ ID NO: 3995943 - RNA, 18 nt, Human herpesvirus 6B
caauguccgaaguaaaaa

SEQ ID NO: 3995944 - RNA, 13 nt, Human herpesvirus 6B
caauucauuguac

SEQ ID NO: 3995945 - RNA, 19 nt, Human herpesvirus 6B
caauucauuguacgauaau

SEQ ID NO: 3995946 - RNA, 11 nt, Human herpesvirus 6B
caauuccugug

SEQ ID NO: 3995947 - RNA, 22 nt, Human herpesvirus 6B
cacaaacgccuagagaacagau

SEQ ID NO: 3995948 - RNA, 18 nt, Human herpesvirus 6B
cacacagaauacaaaaac

SEQ ID NO: 3995949 - RNA, 23 nt, Human herpesvirus 6B
cacacgcggggaucgggccuggg

SEQ ID NO: 3995950 - RNA, 18 nt, Human herpesvirus 6B
cacacuggcgaaggcccg

SEQ ID NO: 3995951 - RNA, 22 nt, Human herpesvirus 6B
cacagaauguauauagagguuu

SEQ ID NO: 3995952 - RNA, 18 nt, Human herpesvirus 6B
cacauaugccgaggcuua

SEQ ID NO: 3995953 - RNA, 23 nt, Human herpesvirus 6B
cacaucgugaaaacgcuucagau

SEQ ID NO: 3995954 - RNA, 15 nt, Human herpesvirus 6B
caccaugaaagcaca

SEQ ID NO: 3995955 - RNA, 16 nt, Human herpesvirus 6B
auaaagcuuucauuuc

SEQ ID NO: 3995956 - RNA, 15 nt, Human herpesvirus 6B
auaaccuucugauuu

SEQ ID NO: 3995957 - RNA, 15 nt, Human herpesvirus 6B
auaauccuuuucugu

SEQ ID NO: 3995958 - RNA, 19 nt, Human herpesvirus 6B
auaaugugaacuaaauaau

SEQ ID NO: 3995959 - RNA, 13 nt, Human herpesvirus 6B
auaauuacagaug

SEQ ID NO: 3995960 - RNA, 20 nt, Human herpesvirus 6B
auaccuuuggccuugauugu

SEQ ID NO: 3995961 - RNA, 17 nt, Human herpesvirus 6B
auagaaagcggccaggc

SEQ ID NO: 3995962 - RNA, 23 nt, Human herpesvirus 6B
auagguucuauucguucagaaug

SEQ ID NO: 3995963 - RNA, 12 nt, Human herpesvirus 6B
auauacaaaauu

SEQ ID NO: 3995964 - RNA, 17 nt, Human herpesvirus 6B
auauacgauggacagaa

SEQ ID NO: 3995965 - RNA, 23 nt, Human herpesvirus 6B
auauccguuuaguuacuuugcuu

SEQ ID NO: 3995966 - RNA, 15 nt, Human herpesvirus 6B
auaucgauucuguaa

SEQ ID NO: 3995967 - RNA, 21 nt, Human herpesvirus 6B
auaucugaaaucgcauuucuc

SEQ ID NO: 3995968 - RNA, 16 nt, Human herpesvirus 6B
auaugcgaauguuaaa

SEQ ID NO: 3995969 - RNA, 14 nt, Human herpesvirus 6B
auauggcgaaugcc

SEQ ID NO: 3995970 - RNA, 22 nt, Human herpesvirus 6B
auauuuguuaguguuaauucca

SEQ ID NO: 3995971 - RNA, 14 nt, Human herpesvirus 6B
aucaaagaacagaa

SEQ ID NO: 3995972 - RNA, 20 nt, Human herpesvirus 6B
aucaaggucuaucucuuggc

SEQ ID NO: 3995973 - RNA, 21 nt, Human herpesvirus 6B
aucaaugucacaaaucuguaa

SEQ ID NO: 3995974 - RNA, 22 nt, Human herpesvirus 6B
aucaugauaaauuguuuccgaa

SEQ ID NO: 3995975 - RNA, 17 nt, Human herpesvirus 6B
aucaugcacacguguau

SEQ ID NO: 3995976 - RNA, 14 nt, Human herpesvirus 6B
auccauuuucugaa

SEQ ID NO: 3995977 - RNA, 16 nt, Human herpesvirus 6B
auccauuuucugaaau

SEQ ID NO: 3995978 - RNA, 23 nt, Human herpesvirus 6B
aucccagaugcagucuccacagg

SEQ ID NO: 3995979 - RNA, 14 nt, Human herpesvirus 6B
auccgcgggccagc

SEQ ID NO: 3995980 - RNA, 19 nt, Human herpesvirus 6B
aucgaauucagcuggacag

SEQ ID NO: 3995981 - RNA, 17 nt, Human herpesvirus 6B
aucgagaauaauuuacu

SEQ ID NO: 3995982 - RNA, 15 nt, Human herpesvirus 6B
aucgagacugcccug

SEQ ID NO: 3995983 - RNA, 15 nt, Human herpesvirus 6B
aucgauucuguaauu

SEQ ID NO: 3995984 - RNA, 20 nt, Human herpesvirus 6B
aucgcgguguccucguccgu

SEQ ID NO: 3995985 - RNA, 13 nt, Human herpesvirus 6B
aucggaagaggaa

SEQ ID NO: 3995986 - RNA, 23 nt, Human herpesvirus 6B
aucggaagaggaagggauggcag

SEQ ID NO: 3995987 - RNA, 17 nt, Human herpesvirus 6B
aucgucgaaaacaauuu

SEQ ID NO: 3995988 - RNA, 22 nt, Human herpesvirus 6B
aucuaugaugcuguagaaacgu

SEQ ID NO: 3995989 - RNA, 14 nt, Human herpesvirus 6B
aucuccaaaacacu

SEQ ID NO: 3995990 - RNA, 18 nt, Human herpesvirus 6B
aucucgaugccaaagcuu

SEQ ID NO: 3995991 - RNA, 17 nt, Human herpesvirus 6B
aucuggauauguaucca

SEQ ID NO: 3995992 - RNA, 19 nt, Human herpesvirus 6B
aucuguauaucuaugcuuu

SEQ ID NO: 3995993 - RNA, 21 nt, Human herpesvirus 6B
aucuucuuggagucuggccuc

SEQ ID NO: 3995994 - RNA, 16 nt, Human herpesvirus 6B
aucuugccguuuugau

SEQ ID NO: 3995995 - RNA, 20 nt, Human herpesvirus 6B
augaaagcacagaaaaagaa

SEQ ID NO: 3995996 - RNA, 17 nt, Human herpesvirus 6B
augaaaucgauguagau

SEQ ID NO: 3995997 - RNA, 18 nt, Human herpesvirus 6B
augaaguuccacaucuau

SEQ ID NO: 3995998 - RNA, 19 nt, Human herpesvirus 6B
augaauuaccugucuuaga

SEQ ID NO: 3995999 - RNA, 12 nt, Human herpesvirus 6B
augaauuucaau

SEQ ID NO: 3996000 - RNA, 17 nt, Human herpesvirus 6B
augaauuucaaugacug

SEQ ID NO: 3996001 - RNA, 20 nt, Human herpesvirus 6B
augacacaucgugaguuuuc

SEQ ID NO: 3996002 - RNA, 23 nt, Human herpesvirus 6B
augacauuuauuagcauucaagu

SEQ ID NO: 3996003 - RNA, 15 nt, Human herpesvirus 6B
augacuaucaaaaua

SEQ ID NO: 3996004 - RNA, 22 nt, Human herpesvirus 6B
augagaucguccggugcauaua

SEQ ID NO: 3996005 - RNA, 17 nt, Human herpesvirus 6B
augaguuuuuugcaauu

SEQ ID NO: 3996006 - RNA, 11 nt, Human herpesvirus 6B
augauagcuug

SEQ ID NO: 3996007 - RNA, 17 nt, Human herpesvirus 6B
augaugaaacuccuucu

SEQ ID NO: 3996008 - RNA, 14 nt, Human herpesvirus 6B
augcacacguguau

SEQ ID NO: 3996009 - RNA, 18 nt, Human herpesvirus 6B
augcaggguguggccggc

SEQ ID NO: 3996010 - RNA, 13 nt, Human herpesvirus 6B
augccacagaaca

SEQ ID NO: 3996011 - RNA, 18 nt, Human herpesvirus 6B
augcuggcgcugcauaga

SEQ ID NO: 3996012 - RNA, 21 nt, Human herpesvirus 6B
augcuguugcuguuguuguag

SEQ ID NO: 3996013 - RNA, 16 nt, Human herpesvirus 6B
augcuuuaaaaaugcu

SEQ ID NO: 3996014 - RNA, 18 nt, Human herpesvirus 6B
auggaaaaggcggacagc

SEQ ID NO: 3996015 - RNA, 16 nt, Human herpesvirus 6B
auggaaacacuuucuu

SEQ ID NO: 3996016 - RNA, 18 nt, Human herpesvirus 6B
auggacagaaaaaacacc

SEQ ID NO: 3996017 - RNA, 15 nt, Human herpesvirus 6B
auggauaagauuuac

SEQ ID NO: 3996018 - RNA, 19 nt, Human herpesvirus 6B
auggcaaauuucaaaaaga

SEQ ID NO: 3996019 - RNA, 20 nt, Human herpesvirus 6B
auggcaaauuucaaaaagaa

SEQ ID NO: 3996020 - RNA, 18 nt, Human herpesvirus 6B
auggcagaucuugaaaag

SEQ ID NO: 3996021 - RNA, 15 nt, Human herpesvirus 6B
augguagcaauaacu

SEQ ID NO: 3996022 - RNA, 19 nt, Human herpesvirus 6B
augguauuuaggagcuagu

SEQ ID NO: 3996023 - RNA, 12 nt, Human herpesvirus 6B
auggugaaaaua

SEQ ID NO: 3996024 - RNA, 19 nt, Human herpesvirus 6B
auguaaacacgaaacugcu

SEQ ID NO: 3996025 - RNA, 17 nt, Human herpesvirus 6B
auguagcacacgacaaa

SEQ ID NO: 3996026 - RNA, 17 nt, Human herpesvirus 6B
auguauauaguuuucug

SEQ ID NO: 3996027 - RNA, 19 nt, Human herpesvirus 6B
auguauuggaauugggaag

SEQ ID NO: 3996028 - RNA, 18 nt, Human herpesvirus 6B
augucacaaaucuguaag

SEQ ID NO: 3996029 - RNA, 14 nt, Human herpesvirus 6B
augucgggccacau

SEQ ID NO: 3996030 - RNA, 21 nt, Human herpesvirus 6B
augucguguucuuuugucauu

SEQ ID NO: 3996031 - RNA, 21 nt, Human herpesvirus 6B
augugaacaguauaaauucuu

SEQ ID NO: 3996032 - RNA, 15 nt, Human herpesvirus 6B
auguuauuguuccuu

SEQ ID NO: 3996033 - RNA, 17 nt, Human herpesvirus 6B
auguucuugacaaauaa

SEQ ID NO: 3996034 - RNA, 16 nt, Human herpesvirus 6B
auguuuauuucaaugc

SEQ ID NO: 3996035 - RNA, 21 nt, Human herpesvirus 6B
auuaaaaauaaaaaaaaugaa

SEQ ID NO: 3996036 - RNA, 23 nt, Human herpesvirus 6B
auuaaaguuuucauaaaaacgac

SEQ ID NO: 3996037 - RNA, 18 nt, Human herpesvirus 6B
auuaauuuuuuguuucug

SEQ ID NO: 3996038 - RNA, 22 nt, Human herpesvirus 6B
auuaauuuuuuguuucugaaaa

SEQ ID NO: 3996039 - RNA, 23 nt, Human herpesvirus 6B
auuaauuuuuuguuucugaaaau

SEQ ID NO: 3996040 - RNA, 14 nt, Human herpesvirus 6B
auuaucgacauaca

SEQ ID NO: 3996041 - RNA, 20 nt, Human herpesvirus 6B
auucagaaaauuggugugca

SEQ ID NO: 3996042 - RNA, 19 nt, Human herpesvirus 6B
auucaguuuuuuguuucug

SEQ ID NO: 3996043 - RNA, 16 nt, Human herpesvirus 6B
auucuaauuauaaaug

SEQ ID NO: 3996044 - RNA, 20 nt, Human herpesvirus 6B
auucuccucaacuaaaucau

SEQ ID NO: 3996045 - RNA, 18 nt, Human herpesvirus 6B
auucucugcaugucuuua

SEQ ID NO: 3996046 - RNA, 15 nt, Human herpesvirus 6B
auucugauaaacucc

SEQ ID NO: 3996047 - RNA, 14 nt, Human herpesvirus 6B
auucugcuaugaug

SEQ ID NO: 3996048 - RNA, 20 nt, Human herpesvirus 6B
auucugcuugcacuauuuua

SEQ ID NO: 3996049 - RNA, 23 nt, Human herpesvirus 6B
auucuuacaaguauguuuuguac

SEQ ID NO: 3996050 - RNA, 20 nt, Human herpesvirus 6B
auucuuaccaagaaaucacg

SEQ ID NO: 3996051 - RNA, 13 nt, Human herpesvirus 6B
auugaauccucuu

SEQ ID NO: 3996052 - RNA, 17 nt, Human herpesvirus 6B
auugaauuuauaucaca

SEQ ID NO: 3996053 - RNA, 18 nt, Human herpesvirus 6B
auugacggcgugcauaua

SEQ ID NO: 3996054 - RNA, 13 nt, Human herpesvirus 6B
auugacugugaaa

SEQ ID NO: 3996055 - RNA, 16 nt, Human herpesvirus 6B
auugauccagaauuau

SEQ ID NO: 3996056 - RNA, 19 nt, Human herpesvirus 6B
auugcucaaaauuggcauu

SEQ ID NO: 3996057 - RNA, 16 nt, Human herpesvirus 6B
auugggaagauucugc

SEQ ID NO: 3996058 - RNA, 19 nt, Human herpesvirus 6B
auugucuuuucuggaaaca

SEQ ID NO: 3996059 - RNA, 18 nt, Human herpesvirus 6B
auugugagaacagcgcau

SEQ ID NO: 3996060 - RNA, 18 nt, Human herpesvirus 6B
auuuaacauccaaaauac

SEQ ID NO: 3996061 - RNA, 15 nt, Human herpesvirus 6B
auuuaauaaaauaac

SEQ ID NO: 3996062 - RNA, 12 nt, Human herpesvirus 6B
auuuaaugcaaa

SEQ ID NO: 3996063 - RNA, 13 nt, Human herpesvirus 6B
auuuaccagagau

SEQ ID NO: 3996064 - RNA, 12 nt, Human herpesvirus 6B
auuuaugugaau

SEQ ID NO: 3996065 - RNA, 18 nt, Human herpesvirus 6B
auuuauuagcauucaagu

SEQ ID NO: 3996066 - RNA, 21 nt, Human herpesvirus 6B
auuucaggaaguucuucaaaa

SEQ ID NO: 3996067 - RNA, 16 nt, Human herpesvirus 6B
auuucccaguuaauuu

SEQ ID NO: 3996068 - RNA, 20 nt, Human herpesvirus 6B
uauggcuaaugagucucugc

SEQ ID NO: 3996069 - RNA, 12 nt, Human herpesvirus 6B
uauggggaagau

SEQ ID NO: 3996070 - RNA, 22 nt, Human herpesvirus 6B
uauggugccgagcaaaccugaa

SEQ ID NO: 3996071 - RNA, 17 nt, Human herpesvirus 6B
uauguaagaaauguuuu

SEQ ID NO: 3996072 - RNA, 12 nt, Human herpesvirus 6B
uauguacagaua

SEQ ID NO: 3996073 - RNA, 15 nt, Human herpesvirus 6B
uauguauauaguuuu

SEQ ID NO: 3996074 - RNA, 19 nt, Human herpesvirus 6B
uauguccgcucauuuugau

SEQ ID NO: 3996075 - RNA, 17 nt, Human herpesvirus 6B
uaugugcaauuacagua

SEQ ID NO: 3996076 - RNA, 10 nt, Human herpesvirus 6B
uauguuucua

SEQ ID NO: 3996077 - RNA, 18 nt, Human herpesvirus 6B
uauuaaugcuuauuucga

SEQ ID NO: 3996078 - RNA, 20 nt, Human herpesvirus 6B
uauuaugucgauacaauaaa

SEQ ID NO: 3996079 - RNA, 23 nt, Human herpesvirus 6B
uauucgccggacgaauugaguag

SEQ ID NO: 3996080 - RNA, 15 nt, Human herpesvirus 6B
uauugacugugaaaa

SEQ ID NO: 3996081 - RNA, 18 nt, Human herpesvirus 6B
uauuguguaccuuguaau

SEQ ID NO: 3996082 - RNA, 22 nt, Human herpesvirus 6B
uauuugaggcggugucuucaaa

SEQ ID NO: 3996083 - RNA, 11 nt, Human herpesvirus 6B
uauuuggaagc

SEQ ID NO: 3996084 - RNA, 14 nt, Human herpesvirus 6B
uauuuucuguauua

SEQ ID NO: 3996085 - RNA, 19 nt, Human herpesvirus 6B
uauuuuuucagcuuucaua

SEQ ID NO: 3996086 - RNA, 22 nt, Human herpesvirus 6B
ucaaacagcgacaugaaaucuc

SEQ ID NO: 3996087 - RNA, 14 nt, Human herpesvirus 6B
ucaaccugaaaaga

SEQ ID NO: 3996088 - RNA, 14 nt, Human herpesvirus 6B
ucaagaaacacuuc

SEQ ID NO: 3996089 - RNA, 17 nt, Human herpesvirus 6B
ucaagaaaccuguuuuu

SEQ ID NO: 3996090 - RNA, 20 nt, Human herpesvirus 6B
ucaagaaaccuguuuuugcu

SEQ ID NO: 3996091 - RNA, 18 nt, Human herpesvirus 6B
ucaaggucaaaaaacuca

SEQ ID NO: 3996092 - RNA, 19 nt, Human herpesvirus 6B
ucaagguugucagauuucc

SEQ ID NO: 3996093 - RNA, 22 nt, Human herpesvirus 6B
ucaaucuccaaaacacuccgcu

SEQ ID NO: 3996094 - RNA, 20 nt, Human herpesvirus 6B
ucaaugcguuggagcaagcg

SEQ ID NO: 3996095 - RNA, 14 nt, Human herpesvirus 6B
ucaauuucuaaaga

SEQ ID NO: 3996096 - RNA, 13 nt, Human herpesvirus 6B
ucacauagagaag

SEQ ID NO: 3996097 - RNA, 19 nt, Human herpesvirus 6B
ucaccccccucuugcagug

SEQ ID NO: 3996098 - RNA, 19 nt, Human herpesvirus 6B
ucaccuaugaauaucuuua

SEQ ID NO: 3996099 - RNA, 15 nt, Human herpesvirus 6B
ucacggcuagaugug

SEQ ID NO: 3996100 - RNA, 14 nt, Human herpesvirus 6B
ucacucagauuuca

SEQ ID NO: 3996101 - RNA, 12 nt, Human herpesvirus 6B
ucagaugugaua

SEQ ID NO: 3996102 - RNA, 16 nt, Human herpesvirus 6B
ucagauuucuguaguu

SEQ ID NO: 3996103 - RNA, 10 nt, Human herpesvirus 6B
ucagcagaag

SEQ ID NO: 3996104 - RNA, 13 nt, Human herpesvirus 6B
ucagcuggacaga

SEQ ID NO: 3996105 - RNA, 22 nt, Human herpesvirus 6B
ucaguaugucucaguucaaaau

SEQ ID NO: 3996106 - RNA, 13 nt, Human herpesvirus 6B
ucauacauccaga

SEQ ID NO: 3996107 - RNA, 21 nt, Human herpesvirus 6B
ucauacgacugacgauuucau

SEQ ID NO: 3996108 - RNA, 18 nt, Human herpesvirus 6B
ucaucaaauccucuacgu

SEQ ID NO: 3996109 - RNA, 15 nt, Human herpesvirus 6B
ucaucaaaugugauu

SEQ ID NO: 3996110 - RNA, 23 nt, Human herpesvirus 6B
ucauuccaguccaaugaauacuu

SEQ ID NO: 3996111 - RNA, 22 nt, Human herpesvirus 6B
ucauuucgaucuaacuacauuu

SEQ ID NO: 3996112 - RNA, 12 nt, Human herpesvirus 6B
ucauuucuguag

SEQ ID NO: 3996113 - RNA, 20 nt, Human herpesvirus 6B
uccaaaagcgccugccuaca

SEQ ID NO: 3996114 - RNA, 13 nt, Human herpesvirus 6B
uccaaaauacacu

SEQ ID NO: 3996115 - RNA, 16 nt, Human herpesvirus 6B
uccaaguuuuuaugca

SEQ ID NO: 3996116 - RNA, 22 nt, Human herpesvirus 6B
uccacaccaaaaaagacgguuc

SEQ ID NO: 3996117 - RNA, 15 nt, Human herpesvirus 6B
uccaggaguaaugau

SEQ ID NO: 3996118 - RNA, 16 nt, Human herpesvirus 6B
uccagggugaagacag

SEQ ID NO: 3996119 - RNA, 20 nt, Human herpesvirus 6B
uccauaccgggacagcaccc

SEQ ID NO: 3996120 - RNA, 14 nt, Human herpesvirus 6B
uccaugacugugag

SEQ ID NO: 3996121 - RNA, 22 nt, Human herpesvirus 6B
uccauuuucugaaaucuuugau

SEQ ID NO: 3996122 - RNA, 18 nt, Human herpesvirus 6B
uccccaggcgcagcagca

SEQ ID NO: 3996123 - RNA, 18 nt, Human herpesvirus 6B
ucccccgaacgccuccac

SEQ ID NO: 3996124 - RNA, 15 nt, Human herpesvirus 6B
uccccguccucgugc

SEQ ID NO: 3996125 - RNA, 23 nt, Human herpesvirus 6B
ucccuccguuaggaucagacaga

SEQ ID NO: 3996126 - RNA, 24 nt, Human herpesvirus 6B
ucccuccguuaggaucagacagac

SEQ ID NO: 3996127 - RNA, 14 nt, Human herpesvirus 6B
ucccucucaaacag

SEQ ID NO: 3996128 - RNA, 21 nt, Human herpesvirus 6B
ucccugcgggacgugaucugc

SEQ ID NO: 3996129 - RNA, 18 nt, Human herpesvirus 6B
uccgcgaugcgccacagg

SEQ ID NO: 3996130 - RNA, 23 nt, Human herpesvirus 6B
uccgcggcgcugggcuccucacc

SEQ ID NO: 3996131 - RNA, 16 nt, Human herpesvirus 6B
uccggucaacuucuau

SEQ ID NO: 3996132 - RNA, 16 nt, Human herpesvirus 6B
uccgucaucuagagaa

SEQ ID NO: 3996133 - RNA, 16 nt, Human herpesvirus 6B
uccgugacacacagaa

SEQ ID NO: 3996134 - RNA, 16 nt, Human herpesvirus 6B
uccguucccuucucgu

SEQ ID NO: 3996135 - RNA, 18 nt, Human herpesvirus 6B
uccguuuuuucugcaaaa

SEQ ID NO: 3996136 - RNA, 21 nt, Human herpesvirus 6B
uccucaaacuuuuagagacuu

SEQ ID NO: 3996137 - RNA, 20 nt, Human herpesvirus 6B
uccucguccguccccgccgc

SEQ ID NO: 3996138 - RNA, 15 nt, Human herpesvirus 6B
uccugagaggcugga

SEQ ID NO: 3996139 - RNA, 13 nt, Human herpesvirus 6B
uccuguuuuccca

SEQ ID NO: 3996140 - RNA, 21 nt, Human herpesvirus 6B
uccuuauaaugugaacuaaau

SEQ ID NO: 3996141 - RNA, 18 nt, Human herpesvirus 6B
ucgaaaagucuauucaga

SEQ ID NO: 3996142 - RNA, 11 nt, Human herpesvirus 6B
ucgaaagagau

SEQ ID NO: 3996143 - RNA, 18 nt, Human herpesvirus 6B
ucgacauagaguguuugg

SEQ ID NO: 3996144 - RNA, 17 nt, Human herpesvirus 6B
ucgacuaacaauuuaua

SEQ ID NO: 3996145 - RNA, 23 nt, Human herpesvirus 6B
ucgaguuguauuauaaaaacuaa

SEQ ID NO: 3996146 - RNA, 18 nt, Human herpesvirus 6B
ucgauucuguaauuuuga

SEQ ID NO: 3996147 - RNA, 15 nt, Human herpesvirus 6B
ucgccggcccgucca

SEQ ID NO: 3996148 - RNA, 20 nt, Human herpesvirus 6B
ucgcuaaguguugacugauc

SEQ ID NO: 3996149 - RNA, 19 nt, Human herpesvirus 6B
ucggaacaaauucugcuug

SEQ ID NO: 3996150 - RNA, 17 nt, Human herpesvirus 6B
ucggcgugagacaauua

SEQ ID NO: 3996151 - RNA, 21 nt, Human herpesvirus 6B
ucgggccaagguaaaggaagg

SEQ ID NO: 3996152 - RNA, 20 nt, Human herpesvirus 6B
ucgggccuggggacagacag

SEQ ID NO: 3996153 - RNA, 23 nt, Human herpesvirus 6B
ucggggacagugauuaggauguu

SEQ ID NO: 3996154 - RNA, 23 nt, Human herpesvirus 6B
ucgguccccccucccuccauccc

SEQ ID NO: 3996155 - RNA, 18 nt, Human herpesvirus 6B
ucguaguuuaugaaaucg

SEQ ID NO: 3996156 - RNA, 20 nt, Human herpesvirus 6B
ucgucgaaaacaauuuccca

SEQ ID NO: 3996157 - RNA, 14 nt, Human herpesvirus 6B
ucgucgcucucccu

SEQ ID NO: 3996158 - RNA, 18 nt, Human herpesvirus 6B
ucgugugugaaaauuccu

SEQ ID NO: 3996159 - RNA, 20 nt, Human herpesvirus 6B
ucguuucgaaugauagcguu

SEQ ID NO: 3996160 - RNA, 15 nt, Human herpesvirus 6B
ucguuuguacauguu

SEQ ID NO: 3996161 - RNA, 14 nt, Human herpesvirus 6B
ucuaagcugguuac

SEQ ID NO: 3996162 - RNA, 13 nt, Human herpesvirus 6B
ucuaaucaagaaa

SEQ ID NO: 3996163 - RNA, 17 nt, Human herpesvirus 6B
ucuaauuauaaauguag

SEQ ID NO: 3996164 - RNA, 22 nt, Human herpesvirus 6B
ucuacguauaaaaguccucaaa

SEQ ID NO: 3996165 - RNA, 14 nt, Human herpesvirus 6B
ucuaggacaguucc

SEQ ID NO: 3996166 - RNA, 17 nt, Human herpesvirus 6B
ucuauuuuuuauuagua

SEQ ID NO: 3996167 - RNA, 23 nt, Human herpesvirus 6B
ucucagcaaucaccaucaacaca

SEQ ID NO: 3996168 - RNA, 19 nt, Human herpesvirus 6B
uguaaacaaauucuuacaa

SEQ ID NO: 3996169 - RNA, 13 nt, Human herpesvirus 6B
uguaauguuuccu

SEQ ID NO: 3996170 - RNA, 21 nt, Human herpesvirus 6B
uguaauuuggaucugugcgcc

SEQ ID NO: 3996171 - RNA, 17 nt, Human herpesvirus 6B
uguaauuuuuagcaguc

SEQ ID NO: 3996172 - RNA, 14 nt, Human herpesvirus 6B
uguacgaaaacgac

SEQ ID NO: 3996173 - RNA, 20 nt, Human herpesvirus 6B
uguacguggccgucuccugc

SEQ ID NO: 3996174 - RNA, 21 nt, Human herpesvirus 6B
uguacugguaauucaauuucu

SEQ ID NO: 3996175 - RNA, 16 nt, Human herpesvirus 6B
uguaggacugaaggag

SEQ ID NO: 3996176 - RNA, 18 nt, Human herpesvirus 6B
uguaggacugaaggagau

SEQ ID NO: 3996177 - RNA, 22 nt, Human herpesvirus 6B
uguaucaaaguguauacauuca

SEQ ID NO: 3996178 - RNA, 22 nt, Human herpesvirus 6B
uguauuaauuuuuuguuucuga

SEQ ID NO: 3996179 - RNA, 13 nt, Human herpesvirus 6B
uguauuuggauga

SEQ ID NO: 3996180 - RNA, 21 nt, Human herpesvirus 6B
ugucacaauaauuacucccau

SEQ ID NO: 3996181 - RNA, 14 nt, Human herpesvirus 6B
ugucacacucugaa

SEQ ID NO: 3996182 - RNA, 14 nt, Human herpesvirus 6B
ugucugagcauugu

SEQ ID NO: 3996183 - RNA, 23 nt, Human herpesvirus 6B
ugucuucgagauuuuagaauaaa

SEQ ID NO: 3996184 - RNA, 15 nt, Human herpesvirus 6B
ugugaaaagugcuuu

SEQ ID NO: 3996185 - RNA, 12 nt, Human herpesvirus 6B
ugugauaugcaa

SEQ ID NO: 3996186 - RNA, 17 nt, Human herpesvirus 6B
ugugucggcuccgaaac

SEQ ID NO: 3996187 - RNA, 19 nt, Human herpesvirus 6B
uguuaacauugugagaaca

SEQ ID NO: 3996188 - RNA, 15 nt, Human herpesvirus 6B
uguuagauaaaauga

SEQ ID NO: 3996189 - RNA, 15 nt, Human herpesvirus 6B
uguuauaucuggaua

SEQ ID NO: 3996190 - RNA, 21 nt, Human herpesvirus 6B
uguucagacacaugucuucaa

SEQ ID NO: 3996191 - RNA, 18 nt, Human herpesvirus 6B
uguuccgaauucuuacca

SEQ ID NO: 3996192 - RNA, 19 nt, Human herpesvirus 6B
uguugcgauugcugcuucu

SEQ ID NO: 3996193 - RNA, 19 nt, Human herpesvirus 6B
uguugcuguaguugaugcu

SEQ ID NO: 3996194 - RNA, 13 nt, Human herpesvirus 6B
uguuguucuugga

SEQ ID NO: 3996195 - RNA, 19 nt, Human herpesvirus 6B
uguuuccagagcacacaua

SEQ ID NO: 3996196 - RNA, 19 nt, Human herpesvirus 6B
uguuucugaacuauuaaaa

SEQ ID NO: 3996197 - RNA, 14 nt, Human herpesvirus 6B
uguuucuguaugaa

SEQ ID NO: 3996198 - RNA, 19 nt, Human herpesvirus 6B
uguuuucccaccuaauaaa

SEQ ID NO: 3996199 - RNA, 13 nt, Human herpesvirus 6B
uguuuugcuacgu

SEQ ID NO: 3996200 - RNA, 18 nt, Human herpesvirus 6B
uguuuuuuucaagaaugg

SEQ ID NO: 3996201 - RNA, 17 nt, Human herpesvirus 6B
uuaaacucgacuucuuu

SEQ ID NO: 3996202 - RNA, 15 nt, Human herpesvirus 6B
uuaaagauguguuaa

SEQ ID NO: 3996203 - RNA, 20 nt, Human herpesvirus 6B
uuaaaggauucgagaaacuc

SEQ ID NO: 3996204 - RNA, 23 nt, Human herpesvirus 6B
uuaaaggauucgagaaacucugu

SEQ ID NO: 3996205 - RNA, 19 nt, Human herpesvirus 6B
uuaacauacaacuuucacu

SEQ ID NO: 3996206 - RNA, 16 nt, Human herpesvirus 6B
uuaagagugauucaag

SEQ ID NO: 3996207 - RNA, 14 nt, Human herpesvirus 6B
uuaagaugucgugu

SEQ ID NO: 3996208 - RNA, 18 nt, Human herpesvirus 6B
uuaauaguuaaaaaauug

SEQ ID NO: 3996209 - RNA, 12 nt, Human herpesvirus 6B
uuaaucauucga

SEQ ID NO: 3996210 - RNA, 16 nt, Human herpesvirus 6B
uuaaugagaggacagu

SEQ ID NO: 3996211 - RNA, 14 nt, Human herpesvirus 6B
uuacaaguauguuu

SEQ ID NO: 3996212 - RNA, 9 nt, Human herpesvirus 6B
uuacuauug

SEQ ID NO: 3996213 - RNA, 22 nt, Human herpesvirus 6B
uuacuuacaucgauccaaaaga

SEQ ID NO: 3996214 - RNA, 16 nt, Human herpesvirus 6B
uuagaaccgaaauuuc

SEQ ID NO: 3996215 - RNA, 17 nt, Human herpesvirus 6B
uuagagauuuuggaagc

SEQ ID NO: 3996216 - RNA, 17 nt, Human herpesvirus 6B
uuaguugugcgucucuu

SEQ ID NO: 3996217 - RNA, 14 nt, Human herpesvirus 6B
uuaguuuuggauga

SEQ ID NO: 3996218 - RNA, 14 nt, Human herpesvirus 6B
uuauaucaacgaug

SEQ ID NO: 3996219 - RNA, 15 nt, Human herpesvirus 6B
uuauauggaugcugg

SEQ ID NO: 3996220 - RNA, 19 nt, Human herpesvirus 6B
uuaugacaaaaccaucuuu

SEQ ID NO: 3996221 - RNA, 22 nt, Human herpesvirus 6B
uuauugacugugaaaagugcuu

SEQ ID NO: 3996222 - RNA, 21 nt, Human herpesvirus 6B
uuauuuacaaaagccugcaua

SEQ ID NO: 3996223 - RNA, 15 nt, Human herpesvirus 6B
uuauuuccucugaau

SEQ ID NO: 3996224 - RNA, 23 nt, Human herpesvirus 6B
uucaaaaaaagaggaggaaaaga

SEQ ID NO: 3996225 - RNA, 18 nt, Human herpesvirus 6B
uucaaccuguuuccagaa

SEQ ID NO: 3996226 - RNA, 16 nt, Human herpesvirus 6B
uucaaugcguuucuuc

SEQ ID NO: 3996227 - RNA, 12 nt, Human herpesvirus 6B
uucacagcaguu

SEQ ID NO: 3996228 - RNA, 13 nt, Human herpesvirus 6B
uucacuaacaaaa

SEQ ID NO: 3996229 - RNA, 20 nt, Human herpesvirus 6B
uucagaaaauuggugugcau

SEQ ID NO: 3996230 - RNA, 18 nt, Human herpesvirus 6B
uucagacucgacguguau

SEQ ID NO: 3996231 - RNA, 20 nt, Human herpesvirus 6B
uucagagcugaugauuugaa

SEQ ID NO: 3996232 - RNA, 13 nt, Human herpesvirus 6B
uucagagucuguu

SEQ ID NO: 3996233 - RNA, 14 nt, Human herpesvirus 6B
uucagcaguaucaa

SEQ ID NO: 3996234 - RNA, 17 nt, Human herpesvirus 6B
uucaguauagacauuuu

SEQ ID NO: 3996235 - RNA, 22 nt, Human herpesvirus 6B
uucauagccgggagauuccucu

SEQ ID NO: 3996236 - RNA, 15 nt, Human herpesvirus 6B
uucauuguaauucca

SEQ ID NO: 3996237 - RNA, 13 nt, Human herpesvirus 6B
uuccaguuguauu

SEQ ID NO: 3996238 - RNA, 13 nt, Human herpesvirus 6B
uuccccguccucg

SEQ ID NO: 3996239 - RNA, 16 nt, Human herpesvirus 6B
uucccuccauguugca

SEQ ID NO: 3996240 - RNA, 17 nt, Human herpesvirus 6B
uucccucuuccuucucg

SEQ ID NO: 3996241 - RNA, 20 nt, Human herpesvirus 6B
uuccugaugguuaaggaaaa

SEQ ID NO: 3996242 - RNA, 16 nt, Human herpesvirus 6B
uuccuguccgugagac

SEQ ID NO: 3996243 - RNA, 21 nt, Human herpesvirus 6B
uuccuuguguugaagaacaaa

SEQ ID NO: 3996244 - RNA, 16 nt, Human herpesvirus 6B
uucgguuuugucguuu

SEQ ID NO: 3996245 - RNA, 18 nt, Human herpesvirus 6B
uucuaauuauaaauguag

SEQ ID NO: 3996246 - RNA, 22 nt, Human herpesvirus 6B
uucuaccguagaccguuuuuua

SEQ ID NO: 3996247 - RNA, 15 nt, Human herpesvirus 6B
uucuccgcccuccug

SEQ ID NO: 3996248 - RNA, 19 nt, Human herpesvirus 6B
uucuccgucaccccccucg

SEQ ID NO: 3996249 - RNA, 14 nt, Human herpesvirus 6B
uucucgccgccucg

SEQ ID NO: 3996250 - RNA, 19 nt, Human herpesvirus 6B
uucucgccgccucgccgcu

SEQ ID NO: 3996251 - RNA, 18 nt, Human herpesvirus 6B
uucugcucguuuguuuuu

SEQ ID NO: 3996252 - RNA, 22 nt, Human herpesvirus 6B
uucuguaaccugucuuggaaga

SEQ ID NO: 3996253 - RNA, 13 nt, Human herpesvirus 6B
uucuuaaauucaa

SEQ ID NO: 3996254 - RNA, 20 nt, Human herpesvirus 6B
uucuuaccaagaaaucacgu

SEQ ID NO: 3996255 - RNA, 18 nt, Human herpesvirus 6B
uugaauguuuaaaguuuu

SEQ ID NO: 3996256 - RNA, 14 nt, Human herpesvirus 6B
uugaauucugcucg

SEQ ID NO: 3996257 - RNA, 16 nt, Human herpesvirus 6B
uugaggcaacuuuuuu

SEQ ID NO: 3996258 - RNA, 15 nt, Human herpesvirus 6B
uugauaaaaccaucu

SEQ ID NO: 3996259 - RNA, 17 nt, Human herpesvirus 6B
uugauguuuccugaauu

SEQ ID NO: 3996260 - RNA, 21 nt, Human herpesvirus 6B
uugcagaacgagacuggacag

SEQ ID NO: 3996261 - RNA, 14 nt, Human herpesvirus 6B
uugcagcaucgccu

SEQ ID NO: 3996262 - RNA, 14 nt, Human herpesvirus 6B
uugcaguuugugaa

SEQ ID NO: 3996263 - RNA, 21 nt, Human herpesvirus 6B
uugcauauuauaaggucauuu

SEQ ID NO: 3996264 - RNA, 16 nt, Human herpesvirus 6B
uugcgagucugucagu

SEQ ID NO: 3996265 - RNA, 15 nt, Human herpesvirus 6B
uugcugucacacucu

SEQ ID NO: 3996266 - RNA, 13 nt, Human herpesvirus 6B
uugcuguuuacga

SEQ ID NO: 3996267 - RNA, 15 nt, Human herpesvirus 6B
uugguacaauuuuua

SEQ ID NO: 3996268 - RNA, 20 nt, Human herpesvirus 6B
uuggugacguuuagcuuugu

SEQ ID NO: 3996269 - RNA, 14 nt, Human herpesvirus 6B
uuguacaaagguuu

SEQ ID NO: 3996270 - RNA, 20 nt, Human herpesvirus 6B
uuguacauguuaacaauaaa

SEQ ID NO: 3996271 - RNA, 17 nt, Human herpesvirus 6B
uuguuuauugcuuuugu

SEQ ID NO: 3996272 - RNA, 21 nt, Human herpesvirus 6B
uuguuuucuguaggcaacuua

SEQ ID NO: 3996273 - RNA, 14 nt, Human herpesvirus 6B
uuuaacgcagauau

SEQ ID NO: 3996274 - RNA, 21 nt, Human herpesvirus 6B
uuuaacgcagauauauggauc

SEQ ID NO: 3996275 - RNA, 15 nt, Human herpesvirus 6B
uuuaccgguuuggug

SEQ ID NO: 3996276 - RNA, 14 nt, Human herpesvirus 6B
uuuacuugucgugu

SEQ ID NO: 3996277 - RNA, 22 nt, Human herpesvirus 6B
uuuagccuauuaagcagccgcg

SEQ ID NO: 3996278 - RNA, 20 nt, Human herpesvirus 6B
cguguuauggggaagaucua

SEQ ID NO: 3996279 - RNA, 20 nt, Human herpesvirus 6B
cguguucaaaaaugugguca

SEQ ID NO: 3996280 - RNA, 18 nt, Human herpesvirus 6B
cguuacaagcaugcauug

SEQ ID NO: 3996281 - RNA, 20 nt, Human herpesvirus 6B
cguuauuugugcaaaaugug

SEQ ID NO: 3996282 - RNA, 19 nt, Human herpesvirus 6B
cguugcccucccgcagcuc

SEQ ID NO: 3996283 - RNA, 20 nt, Human herpesvirus 6B
cguugcccucccgcagcucc

SEQ ID NO: 3996284 - RNA, 14 nt, Human herpesvirus 6B
cguugucuauuuuu

SEQ ID NO: 3996285 - RNA, 17 nt, Human herpesvirus 6B
cguuuucaaugugaauc

SEQ ID NO: 3996286 - RNA, 20 nt, Human herpesvirus 6B
cguuuuuggugaaaaacacg

SEQ ID NO: 3996287 - RNA, 23 nt, Human herpesvirus 6B
cuaaaagacgcuugcuguuuucg

SEQ ID NO: 3996288 - RNA, 22 nt, Human herpesvirus 6B
cuaaacggagacugcacagaau

SEQ ID NO: 3996289 - RNA, 17 nt, Human herpesvirus 6B
cuaaaucugaaauguag

SEQ ID NO: 3996290 - RNA, 21 nt, Human herpesvirus 6B
cuaacgacggaauuuacuguu

SEQ ID NO: 3996291 - RNA, 21 nt, Human herpesvirus 6B
cuaacgcggcaaccgcaguuc

SEQ ID NO: 3996292 - RNA, 21 nt, Human herpesvirus 6B
cuaagaaauauugcaugcauu

SEQ ID NO: 3996293 - RNA, 12 nt, Human herpesvirus 6B
cuaagcuggaca

SEQ ID NO: 3996294 - RNA, 15 nt, Human herpesvirus 6B
cuaagcuggacagaa

SEQ ID NO: 3996295 - RNA, 14 nt, Human herpesvirus 6B
cuacaugccacaga

SEQ ID NO: 3996296 - RNA, 21 nt, Human herpesvirus 6B
cuacauuuuaguauuuaugcu

SEQ ID NO: 3996297 - RNA, 14 nt, Human herpesvirus 6B
cuacgguaaucguu

SEQ ID NO: 3996298 - RNA, 16 nt, Human herpesvirus 6B
cuacuguguauugugu

SEQ ID NO: 3996299 - RNA, 21 nt, Human herpesvirus 6B
cuaguacaaagauauuucuau

SEQ ID NO: 3996300 - RNA, 16 nt, Human herpesvirus 6B
cuaugcaaugucuucg

SEQ ID NO: 3996301 - RNA, 13 nt, Human herpesvirus 6B
cuauguauuggaa

SEQ ID NO: 3996302 - RNA, 13 nt, Human herpesvirus 6B
cucagagaaaguu

SEQ ID NO: 3996303 - RNA, 17 nt, Human herpesvirus 6B
cucaggucguauuauug

SEQ ID NO: 3996304 - RNA, 9 nt, Human herpesvirus 6B
cuccaagga

SEQ ID NO: 3996305 - RNA, 20 nt, Human herpesvirus 6B
cuccgaaccacaucuuuucc

SEQ ID NO: 3996306 - RNA, 13 nt, Human herpesvirus 6B
cuccgccuccucu

SEQ ID NO: 3996307 - RNA, 17 nt, Human herpesvirus 6B
cuccgucgccgcuccgg

SEQ ID NO: 3996308 - RNA, 18 nt, Human herpesvirus 6B
cuccguuccaaccuccuc

SEQ ID NO: 3996309 - RNA, 19 nt, Human herpesvirus 6B
cuccugucauuuuuacuca

SEQ ID NO: 3996310 - RNA, 18 nt, Human herpesvirus 6B
cuccugugcguccuccuc

SEQ ID NO: 3996311 - RNA, 16 nt, Human herpesvirus 6B
cucgcccguucccggg

SEQ ID NO: 3996312 - RNA, 17 nt, Human herpesvirus 6B
cucgccgucgucgcucu

SEQ ID NO: 3996313 - RNA, 19 nt, Human herpesvirus 6B
cucgccguuuuuguuugac

SEQ ID NO: 3996314 - RNA, 13 nt, Human herpesvirus 6B
cucgcucuccugu

SEQ ID NO: 3996315 - RNA, 14 nt, Human herpesvirus 6B
cucggcaggggccg

SEQ ID NO: 3996316 - RNA, 19 nt, Human herpesvirus 6B
cucucuucaggagaagaac

SEQ ID NO: 3996317 - RNA, 14 nt, Human herpesvirus 6B
cucuguucucuccc

SEQ ID NO: 3996318 - RNA, 20 nt, Human herpesvirus 6B
cucuuagauauccauuugcu

SEQ ID NO: 3996319 - RNA, 20 nt, Human herpesvirus 6B
cucuucuugcgaccucgcuc

SEQ ID NO: 3996320 - RNA, 14 nt, Human herpesvirus 6B
cucuugcaguggcg

SEQ ID NO: 3996321 - RNA, 12 nt, Human herpesvirus 6B
cucuugugcaaa

SEQ ID NO: 3996322 - RNA, 15 nt, Human herpesvirus 6B
cugacugcguuacaa

SEQ ID NO: 3996323 - RNA, 14 nt, Human herpesvirus 6B
cugacuuagauaug

SEQ ID NO: 3996324 - RNA, 21 nt, Human herpesvirus 6B
cugauauacgauggacagaaa

SEQ ID NO: 3996325 - RNA, 21 nt, Human herpesvirus 6B
cugaucucacgucacaguuuu

SEQ ID NO: 3996326 - RNA, 15 nt, Human herpesvirus 6B
cugcagaucuggaua

SEQ ID NO: 3996327 - RNA, 18 nt, Human herpesvirus 6B
cugcguuacaagcaugca

SEQ ID NO: 3996328 - RNA, 20 nt, Human herpesvirus 6B
cugcguuacaagcaugcauu

SEQ ID NO: 3996329 - RNA, 21 nt, Human herpesvirus 6B
cugcuaaaagcuauguaugaa

SEQ ID NO: 3996330 - RNA, 19 nt, Human herpesvirus 6B
cugcuccguucccuucucg

SEQ ID NO: 3996331 - RNA, 16 nt, Human herpesvirus 6B
cuggaagcacggcuug

SEQ ID NO: 3996332 - RNA, 13 nt, Human herpesvirus 6B
cuggccucugcgg

SEQ ID NO: 3996333 - RNA, 22 nt, Human herpesvirus 6B
cugggacuccgagccggacagg

SEQ ID NO: 3996334 - RNA, 12 nt, Human herpesvirus 6B
cuggggacagac

SEQ ID NO: 3996335 - RNA, 15 nt, Human herpesvirus 6B
gaacagauagaaaau

SEQ ID NO: 3996336 - RNA, 15 nt, Human herpesvirus 6B
gaacagcgcauaaau

SEQ ID NO: 3996337 - RNA, 15 nt, Human herpesvirus 6B
gaaccauagguguuu

SEQ ID NO: 3996338 - RNA, 14 nt, Human herpesvirus 6B
gaacccuagacaca

SEQ ID NO: 3996339 - RNA, 15 nt, Human herpesvirus 6B
gaacgcguccuccgc

SEQ ID NO: 3996340 - RNA, 17 nt, Human herpesvirus 6B
gaagaauugucuuuucg

SEQ ID NO: 3996341 - RNA, 13 nt, Human herpesvirus 6B
gaagauauuuccc

SEQ ID NO: 3996342 - RNA, 18 nt, Human herpesvirus 6B
gaagccuggaagaaggaa

SEQ ID NO: 3996343 - RNA, 15 nt, Human herpesvirus 6B
gaagucuuuccugau

SEQ ID NO: 3996344 - RNA, 13 nt, Human herpesvirus 6B
gaauaaugaaauu

SEQ ID NO: 3996345 - RNA, 13 nt, Human herpesvirus 6B
gaauacagcugca

SEQ ID NO: 3996346 - RNA, 17 nt, Human herpesvirus 6B
gaaucacuuaguugaua

SEQ ID NO: 3996347 - RNA, 18 nt, Human herpesvirus 6B
gaaucccuugucuggcug

SEQ ID NO: 3996348 - RNA, 13 nt, Human herpesvirus 6B
gaaugguaugaau

SEQ ID NO: 3996349 - RNA, 15 nt, Human herpesvirus 6B
gaauucagcuggaca

SEQ ID NO: 3996350 - RNA, 20 nt, Human herpesvirus 6B
gacaaggguaacgcaggaga

SEQ ID NO: 3996351 - RNA, 15 nt, Human herpesvirus 6B
gacaagggugugaaa

SEQ ID NO: 3996352 - RNA, 19 nt, Human herpesvirus 6B
gacacagacgucuacggua

SEQ ID NO: 3996353 - RNA, 13 nt, Human herpesvirus 6B
gacagaaaugagc

SEQ ID NO: 3996354 - RNA, 12 nt, Human herpesvirus 6B
gacaucuguuua

SEQ ID NO: 3996355 - RNA, 14 nt, Human herpesvirus 6B
gacauuagagaaau

SEQ ID NO: 3996356 - RNA, 15 nt, Human herpesvirus 6B
gaccacucgggccgg

SEQ ID NO: 3996357 - RNA, 17 nt, Human herpesvirus 6B
gacccaacagaagccac

SEQ ID NO: 3996358 - RNA, 18 nt, Human herpesvirus 6B
gacccuccuggcgcuugu

SEQ ID NO: 3996359 - RNA, 11 nt, Human herpesvirus 6B
gacggaauuua

SEQ ID NO: 3996360 - RNA, 15 nt, Human herpesvirus 6B
gacggcagcggggaa

SEQ ID NO: 3996361 - RNA, 22 nt, Human herpesvirus 6B
gacggcgaggggacggacagag

SEQ ID NO: 3996362 - RNA, 22 nt, Human herpesvirus 6B
gacggcgugcauauauaugaau

SEQ ID NO: 3996363 - RNA, 12 nt, Human herpesvirus 6B
gacgggcagggc

SEQ ID NO: 3996364 - RNA, 22 nt, Human herpesvirus 6B
gacgggcguuaucgacggcagc

SEQ ID NO: 3996365 - RNA, 19 nt, Human herpesvirus 6B
gacgugcggagaugccgug

SEQ ID NO: 3996366 - RNA, 21 nt, Human herpesvirus 6B
gacgugcggagaugccgugag

SEQ ID NO: 3996367 - RNA, 16 nt, Human herpesvirus 6B
gacuguucuaaaggau

SEQ ID NO: 3996368 - RNA, 20 nt, Human herpesvirus 6B
gacuuagcuagacgugucuu

SEQ ID NO: 3996369 - RNA, 15 nt, Human herpesvirus 6B
gacuuuucugaaauu

SEQ ID NO: 3996370 - RNA, 15 nt, Human herpesvirus 6B
gagaaaggaagaaau

SEQ ID NO: 3996371 - RNA, 19 nt, Human herpesvirus 6B
gagaauguucuucugaaau

SEQ ID NO: 3996372 - RNA, 15 nt, Human herpesvirus 6B
gagagccgcagaggc

SEQ ID NO: 3996373 - RNA, 21 nt, Human herpesvirus 6B
gagaguuuccgggcauguuuu

SEQ ID NO: 3996374 - RNA, 16 nt, Human herpesvirus 6B
gagaucagcaugggca

SEQ ID NO: 3996375 - RNA, 20 nt, Human herpesvirus 6B
gagauccauaccgggacagc

SEQ ID NO: 3996376 - RNA, 12 nt, Human herpesvirus 6B
gagaugaagagu

SEQ ID NO: 3996377 - RNA, 15 nt, Human herpesvirus 6B
gagcaaagaaaugac

SEQ ID NO: 3996378 - RNA, 19 nt, Human herpesvirus 6B
gagcaaccgcaguuccugu

SEQ ID NO: 3996379 - RNA, 14 nt, Human herpesvirus 6B
gagcacgcacgaga

SEQ ID NO: 3996380 - RNA, 22 nt, Human herpesvirus 6B
gagcaugucggagguggcgaau

SEQ ID NO: 3996381 - RNA, 22 nt, Human herpesvirus 6B
gagcggagaggcgcgggacagc

SEQ ID NO: 3996382 - RNA, 20 nt, Human herpesvirus 6B
gagcucaaagagauuggaaa

SEQ ID NO: 3996383 - RNA, 17 nt, Human herpesvirus 6B
gagcuuuaaagcagcua

SEQ ID NO: 3996384 - RNA, 11 nt, Human herpesvirus 6B
gaggaagagga

SEQ ID NO: 3996385 - RNA, 16 nt, Human herpesvirus 6B
gaggacggugagaaga

SEQ ID NO: 3996386 - RNA, 14 nt, Human herpesvirus 6B
gaggagagggagga

SEQ ID NO: 3996387 - RNA, 21 nt, Human herpesvirus 6B
gcaguuacaauuacuaaauca

SEQ ID NO: 3996388 - RNA, 15 nt, Human herpesvirus 6B
gcauacagcaugaac

SEQ ID NO: 3996389 - RNA, 20 nt, Human herpesvirus 6B
gcauagaucgggacugcuug

SEQ ID NO: 3996390 - RNA, 15 nt, Human herpesvirus 6B
gcauauauaugaauu

SEQ ID NO: 3996391 - RNA, 23 nt, Human herpesvirus 6B
gcauauuauuaacaaugaaaauu

SEQ ID NO: 3996392 - RNA, 19 nt, Human herpesvirus 6B
gcaugaaguguuaugaaga

SEQ ID NO: 3996393 - RNA, 24 nt, Human herpesvirus 6B
gcaugacacaucgugaguuuucau

SEQ ID NO: 3996394 - RNA, 16 nt, Human herpesvirus 6B
gcauggugauguguua

SEQ ID NO: 3996395 - RNA, 20 nt, Human herpesvirus 6B
gcauucuuacggaagcaaaa

SEQ ID NO: 3996396 - RNA, 16 nt, Human herpesvirus 6B
gcauuguugagaauuu

SEQ ID NO: 3996397 - RNA, 16 nt, Human herpesvirus 6B
gcauuucuaucuacaa

SEQ ID NO: 3996398 - RNA, 21 nt, Human herpesvirus 6B
gcauuuggcagccuaaacgga

SEQ ID NO: 3996399 - RNA, 15 nt, Human herpesvirus 6B
gccaaucauaagaaa

SEQ ID NO: 3996400 - RNA, 19 nt, Human herpesvirus 6B
gccacguucuuugaacagu

SEQ ID NO: 3996401 - RNA, 14 nt, Human herpesvirus 6B
gccagcccugaaga

SEQ ID NO: 3996402 - RNA, 14 nt, Human herpesvirus 6B
gccaggccgcgucg

SEQ ID NO: 3996403 - RNA, 19 nt, Human herpesvirus 6B
gccaguucacacagaugca

SEQ ID NO: 3996404 - RNA, 12 nt, Human herpesvirus 6B
gccaugauuuug

SEQ ID NO: 3996405 - RNA, 16 nt, Human herpesvirus 6B
gccccgcgucaggugc

SEQ ID NO: 3996406 - RNA, 14 nt, Human herpesvirus 6B
gcccuccuggguac

SEQ ID NO: 3996407 - RNA, 11 nt, Human herpesvirus 6B
gcccugagagc

SEQ ID NO: 3996408 - RNA, 23 nt, Human herpesvirus 6B
gccgaccugauccaugagcaccc

SEQ ID NO: 3996409 - RNA, 13 nt, Human herpesvirus 6B
gccgccuucucug

SEQ ID NO: 3996410 - RNA, 18 nt, Human herpesvirus 6B
gccgccuucucugucgcu

SEQ ID NO: 3996411 - RNA, 13 nt, Human herpesvirus 6B
gccgcgcggagcu

SEQ ID NO: 3996412 - RNA, 20 nt, Human herpesvirus 6B
gccgcgugaggugacggagg

SEQ ID NO: 3996413 - RNA, 12 nt, Human herpesvirus 6B
gccgguuauuag

SEQ ID NO: 3996414 - RNA, 13 nt, Human herpesvirus 6B
gccgucuccugca

SEQ ID NO: 3996415 - RNA, 20 nt, Human herpesvirus 6B
gccgucugucuguuccucag

SEQ ID NO: 3996416 - RNA, 16 nt, Human herpesvirus 6B
gccguggugcgccugu

SEQ ID NO: 3996417 - RNA, 20 nt, Human herpesvirus 6B
gccgugucuuucgauaaggc

SEQ ID NO: 3996418 - RNA, 20 nt, Human herpesvirus 6B
gccucacuguaaaagggcuc

SEQ ID NO: 3996419 - RNA, 17 nt, Human herpesvirus 6B
gccucaggguuggaguu

SEQ ID NO: 3996420 - RNA, 14 nt, Human herpesvirus 6B
gccucccauagagg

SEQ ID NO: 3996421 - RNA, 20 nt, Human herpesvirus 6B
gccuccucuuuuccccccgc

SEQ ID NO: 3996422 - RNA, 14 nt, Human herpesvirus 6B
gccugaccaacaug

SEQ ID NO: 3996423 - RNA, 16 nt, Human herpesvirus 6B
gccugcgcguggaaac

SEQ ID NO: 3996424 - RNA, 13 nt, Human herpesvirus 6B
gcgacaggagaua

SEQ ID NO: 3996425 - RNA, 12 nt, Human herpesvirus 6B
gcgacgagaguc

SEQ ID NO: 3996426 - RNA, 11 nt, Human herpesvirus 6B
gcgagaugcag

SEQ ID NO: 3996427 - RNA, 13 nt, Human herpesvirus 6B
gcgaugcggcagu

SEQ ID NO: 3996428 - RNA, 20 nt, Human herpesvirus 6B
gcgauuuugugaaaggugug

SEQ ID NO: 3996429 - RNA, 12 nt, Human herpesvirus 6B
gcgcagaaggag

SEQ ID NO: 3996430 - RNA, 14 nt, Human herpesvirus 6B
gcgcagcagcagcu

SEQ ID NO: 3996431 - RNA, 18 nt, Human herpesvirus 6B
gcgcaggcgaagguagga

SEQ ID NO: 3996432 - RNA, 14 nt, Human herpesvirus 6B
gcgcgcgcgcguug

SEQ ID NO: 3996433 - RNA, 16 nt, Human herpesvirus 6B
gcggacacgacaugug

SEQ ID NO: 3996434 - RNA, 17 nt, Human herpesvirus 6B
gcggagaggcgcgggac

SEQ ID NO: 3996435 - RNA, 22 nt, Human herpesvirus 6B
gcggaguuuuauggcuggguau

SEQ ID NO: 3996436 - RNA, 13 nt, Human herpesvirus 6B
ugcuugaaagagu

SEQ ID NO: 3996437 - RNA, 15 nt, Human herpesvirus 6B
ugcuuguuuuggugg

SEQ ID NO: 3996438 - RNA, 15 nt, Human herpesvirus 6B
ugcuuuuaguuucaa

SEQ ID NO: 3996439 - RNA, 14 nt, Human herpesvirus 6B
uggaagaaggaaaa

SEQ ID NO: 3996440 - RNA, 14 nt, Human herpesvirus 6B
uggauauguaucca

SEQ ID NO: 3996441 - RNA, 20 nt, Human herpesvirus 6B
uggaugucaagucuagacau

SEQ ID NO: 3996442 - RNA, 24 nt, Human herpesvirus 6B
uggcagccuaaacggagacugcac

SEQ ID NO: 3996443 - RNA, 21 nt, Human herpesvirus 6B
uggcgcuuguaggagcacgag

SEQ ID NO: 3996444 - RNA, 18 nt, Human herpesvirus 6B
uggcugggcgcagaagga

SEQ ID NO: 3996445 - RNA, 21 nt, Human herpesvirus 6B
ugggacuccgagccggacagg

SEQ ID NO: 3996446 - RNA, 15 nt, Human herpesvirus 6B
ugggaguaauuauug

SEQ ID NO: 3996447 - RNA, 21 nt, Human herpesvirus 6B
ugggcauuuuuuugaaaucac

SEQ ID NO: 3996448 - RNA, 20 nt, Human herpesvirus 6B
ugguguuguguuuguggaca

SEQ ID NO: 3996449 - RNA, 20 nt, Human herpesvirus 6B
ugguuugcuucgucaacaau

SEQ ID NO: 3996450 - RNA, 19 nt, Human herpesvirus 6B
ugguuuuucgauguuucca

SEQ ID NO: 3996451 - RNA, 21 nt, Human herpesvirus 6B
ugguuuuucgauguuuccagg

SEQ ID NO: 3996452 - RNA, 23 nt, Human herpesvirus 6B
uguaaagaucacaacaaacaugu

SEQ ID NO: 3996453 - RNA, 19 nt, Human herpesvirus 6B
uguaagguuucuaaaucug

SEQ ID NO: 3996454 - RNA, 18 nt, Human herpesvirus 6B
uguaauaguauugucuga

SEQ ID NO: 3996455 - RNA, 15 nt, Human herpesvirus 6B
uguaauuuugaaauu

SEQ ID NO: 3996456 - RNA, 18 nt, Human herpesvirus 6B
uguagauccuguuauucu

SEQ ID NO: 3996457 - RNA, 15 nt, Human herpesvirus 6B
uguaguuaguuuuga

SEQ ID NO: 3996458 - RNA, 16 nt, Human herpesvirus 6B
uguauaaggauggaua

SEQ ID NO: 3996459 - RNA, 14 nt, Human herpesvirus 6B
ugucacaauaauua

SEQ ID NO: 3996460 - RNA, 21 nt, Human herpesvirus 6B
ugucgcugacgcaauacguaa

SEQ ID NO: 3996461 - RNA, 19 nt, Human herpesvirus 6B
ugucgguaaauauugucug

SEQ ID NO: 3996462 - RNA, 17 nt, Human herpesvirus 6B
ugucuucauucuucgaa

SEQ ID NO: 3996463 - RNA, 21 nt, Human herpesvirus 6B
ugugaaguucgauguuauugu

SEQ ID NO: 3996464 - RNA, 19 nt, Human herpesvirus 6B
ugugaggugauuugaacag

SEQ ID NO: 3996465 - RNA, 20 nt, Human herpesvirus 6B
ugugaggugauuugaacaga

SEQ ID NO: 3996466 - RNA, 20 nt, Human herpesvirus 6B
ugugauuccuucggggacag

SEQ ID NO: 3996467 - RNA, 16 nt, Human herpesvirus 6B
ugugcacgaauaagga

SEQ ID NO: 3996468 - RNA, 13 nt, Human herpesvirus 6B
uguguugaagaac

SEQ ID NO: 3996469 - RNA, 17 nt, Human herpesvirus 6B
uguuaugcaguuguacu

SEQ ID NO: 3996470 - RNA, 16 nt, Human herpesvirus 6B
uguuccgaaaacuuua

SEQ ID NO: 3996471 - RNA, 16 nt, Human herpesvirus 6B
uguucgagcaacaguu

SEQ ID NO: 3996472 - RNA, 18 nt, Human herpesvirus 6B
uguucgcuugugucaugu

SEQ ID NO: 3996473 - RNA, 15 nt, Human herpesvirus 6B
uguucuuugaugaag

SEQ ID NO: 3996474 - RNA, 15 nt, Human herpesvirus 6B
uguuguucuuggaga

SEQ ID NO: 3996475 - RNA, 19 nt, Human herpesvirus 6B
uguuuauugcuuuuguuau

SEQ ID NO: 3996476 - RNA, 23 nt, Human herpesvirus 6B
uguuucuuugacauuuaccagag

SEQ ID NO: 3996477 - RNA, 20 nt, Human herpesvirus 6B
uguuugaaacguugugcuga

SEQ ID NO: 3996478 - RNA, 14 nt, Human herpesvirus 6B
uguuugauuuucag

SEQ ID NO: 3996479 - RNA, 16 nt, Human herpesvirus 6B
uguuuucauucugcua

SEQ ID NO: 3996480 - RNA, 21 nt, Human herpesvirus 6B
uguuuuguaggacugaaggag

SEQ ID NO: 3996481 - RNA, 12 nt, Human herpesvirus 6B
uguuuuugcuac

SEQ ID NO: 3996482 - RNA, 21 nt, Human herpesvirus 6B
uuaaaaaugauaacuguuuuu

SEQ ID NO: 3996483 - RNA, 22 nt, Human herpesvirus 6B
uuaaaagggaagucaaggaaac

SEQ ID NO: 3996484 - RNA, 16 nt, Human herpesvirus 6B
uuaaagaaucugcaga

SEQ ID NO: 3996485 - RNA, 16 nt, Human herpesvirus 6B
uuaacugggaaaucug

SEQ ID NO: 3996486 - RNA, 14 nt, Human herpesvirus 6B
uuaacuguuucuuc

SEQ ID NO: 3996487 - RNA, 19 nt, Human herpesvirus 6B
uuaagaugucgcuguuuuu

SEQ ID NO: 3996488 - RNA, 20 nt, Human herpesvirus 6B
uuaagcaacugauuaagauu

SEQ ID NO: 3996489 - RNA, 14 nt, Human herpesvirus 6B
uuaauaucugucaa

SEQ ID NO: 3996490 - RNA, 15 nt, Human herpesvirus 6B
uuacaacugaaacuc

SEQ ID NO: 3996491 - RNA, 15 nt, Human herpesvirus 6B
uuacaagggaaaucc

SEQ ID NO: 3996492 - RNA, 12 nt, Human herpesvirus 6B
uuacagaugucu

SEQ ID NO: 3996493 - RNA, 14 nt, Human herpesvirus 6B
uuacauaacauaga

SEQ ID NO: 3996494 - RNA, 23 nt, Human herpesvirus 6B
uuacauaacauagaaaaauaaga

SEQ ID NO: 3996495 - RNA, 23 nt, Human herpesvirus 6B
uuacaucaacuauuuaacaucca

SEQ ID NO: 3996496 - RNA, 17 nt, Human herpesvirus 6B
uuacaugaaaacauuca

SEQ ID NO: 3996497 - RNA, 15 nt, Human herpesvirus 6B
uuaccaagaaaucac

SEQ ID NO: 3996498 - RNA, 17 nt, Human herpesvirus 6B
uuacggcgcgaaacaug

SEQ ID NO: 3996499 - RNA, 13 nt, Human herpesvirus 6B
uuacggggaagau

SEQ ID NO: 3996500 - RNA, 14 nt, Human herpesvirus 6B
uuacgucuuuggac

SEQ ID NO: 3996501 - RNA, 11 nt, Human herpesvirus 6B
uuacuguuuug

SEQ ID NO: 3996502 - RNA, 18 nt, Human herpesvirus 6B
uuacuuuguggaaaucua

SEQ ID NO: 3996503 - RNA, 22 nt, Human herpesvirus 6B
uuagaaauguugccuuuguaaa

SEQ ID NO: 3996504 - RNA, 19 nt, Human herpesvirus 6B
uuagacagcugcauuauua

SEQ ID NO: 3996505 - RNA, 15 nt, Human herpesvirus 6B
uuagaucuucuucag

SEQ ID NO: 3996506 - RNA, 13 nt, Human herpesvirus 6B
uuaggauguuugg

SEQ ID NO: 3996507 - RNA, 15 nt, Human herpesvirus 6B
uuaguaauuuggauu

SEQ ID NO: 3996508 - RNA, 19 nt, Human herpesvirus 6B
uuauaaauucucugcaugu

SEQ ID NO: 3996509 - RNA, 16 nt, Human herpesvirus 6B
uuauaagauuuacaga

SEQ ID NO: 3996510 - RNA, 14 nt, Human herpesvirus 6B
uuauacgaaaauaa

SEQ ID NO: 3996511 - RNA, 16 nt, Human herpesvirus 6B
uuaugacugacaaggu

SEQ ID NO: 3996512 - RNA, 19 nt, Human herpesvirus 6B
uuaugcaacugcauuuucu

SEQ ID NO: 3996513 - RNA, 14 nt, Human herpesvirus 6B
uuauguauguguua

SEQ ID NO: 3996514 - RNA, 16 nt, Human herpesvirus 6B
uuaugugaauucugug

SEQ ID NO: 3996515 - RNA, 15 nt, Human herpesvirus 6B
uuauuauguuuuuac

SEQ ID NO: 3996516 - RNA, 15 nt, Human herpesvirus 6B
uuauucuacugugca

SEQ ID NO: 3996517 - RNA, 14 nt, Human herpesvirus 6B
uuauuuucuguauu

SEQ ID NO: 3996518 - RNA, 15 nt, Human herpesvirus 6B
uucaaaaucugcuaa

SEQ ID NO: 3996519 - RNA, 19 nt, Human herpesvirus 6B
uucaaaauuuuucuguaag

SEQ ID NO: 3996520 - RNA, 15 nt, Human herpesvirus 6B
uucaaagugaauucc

SEQ ID NO: 3996521 - RNA, 13 nt, Human herpesvirus 6B
uucaauagcaguu

SEQ ID NO: 3996522 - RNA, 19 nt, Human herpesvirus 6B
uucaauagcaguugucugc

SEQ ID NO: 3996523 - RNA, 20 nt, Human herpesvirus 6B
uugacugugaaaagugcuuu

SEQ ID NO: 3996524 - RNA, 13 nt, Human herpesvirus 6B
uugagaaaacaug

SEQ ID NO: 3996525 - RNA, 22 nt, Human herpesvirus 6B
uugcagaacgagacuggacagu

SEQ ID NO: 3996526 - RNA, 9 nt, Human herpesvirus 6B
uugcagugg

SEQ ID NO: 3996527 - RNA, 13 nt, Human herpesvirus 6B
uugcauggcaugu

SEQ ID NO: 3996528 - RNA, 14 nt, Human herpesvirus 6B
uugcugguuugcuu

SEQ ID NO: 3996529 - RNA, 15 nt, Human herpesvirus 6B
uugguauaagaaaga

SEQ ID NO: 3996530 - RNA, 16 nt, Human herpesvirus 6B
uugucauucugcauuu

SEQ ID NO: 3996531 - RNA, 18 nt, Human herpesvirus 6B
uuguccuauguuaacauu

SEQ ID NO: 3996532 - RNA, 20 nt, Human herpesvirus 6B
uuguuacuuucauaacaagu

SEQ ID NO: 3996533 - RNA, 19 nt, Human herpesvirus 6B
uuguuccacgguggauuau

SEQ ID NO: 3996534 - RNA, 12 nt, Human herpesvirus 6B
uuguucuuggag

SEQ ID NO: 3996535 - RNA, 22 nt, Human herpesvirus 6B
uuuaaugacguaugauuuucaa

SEQ ID NO: 3996536 - RNA, 15 nt, Human herpesvirus 6B
uuuaccuuuuugcug

SEQ ID NO: 3996537 - RNA, 16 nt, Human herpesvirus 6B
uuuacgcggcugauau

SEQ ID NO: 3996538 - RNA, 15 nt, Human herpesvirus 6B
uuuacgggauaaaga

SEQ ID NO: 3996539 - RNA, 19 nt, Human herpesvirus 6B
uuuacucgugugucucugu

SEQ ID NO: 3996540 - RNA, 13 nt, Human herpesvirus 6B
uuuacuguuuuga

SEQ ID NO: 3996541 - RNA, 23 nt, Human herpesvirus 6B
uuuaucccaaaauauaauucuga

SEQ ID NO: 3996542 - RNA, 14 nt, Human herpesvirus 6B
uuuaucgugcuugu

SEQ ID NO: 3996543 - RNA, 19 nt, Human herpesvirus 6B
uuucaaaaugaccagagau

SEQ ID NO: 3996544 - RNA, 14 nt, Human herpesvirus 6B
uuucauucaaugag

SEQ ID NO: 3996545 - RNA, 23 nt, Human herpesvirus 6B
uuuccauugcucuuuccacacua

SEQ ID NO: 3996546 - RNA, 14 nt, Human herpesvirus 6B
uuucguccauccag

SEQ ID NO: 3996547 - RNA, 22 nt, Human herpesvirus 6B
uuucuaaaacccggagaaucua

SEQ ID NO: 3996548 - RNA, 20 nt, Human herpesvirus 6B
uuucuaaaucugaaauguag

SEQ ID NO: 3996549 - RNA, 23 nt, Human herpesvirus 6B
uuucuagacaugagcgagaaugu

SEQ ID NO: 3996550 - RNA, 16 nt, Human herpesvirus 6B
uuugaucccuaauacu

SEQ ID NO: 3996551 - RNA, 22 nt, Human herpesvirus 6B
uuugccaccagauaggaaaagg

SEQ ID NO: 3996552 - RNA, 23 nt, Human herpesvirus 6B
uuugcccauugcagguuggcgcu

SEQ ID NO: 3996553 - RNA, 12 nt, Human herpesvirus 6B
uuuggcagaauc

SEQ ID NO: 3996554 - RNA, 19 nt, Human herpesvirus 6B
uuuguccuauguuaacauu

SEQ ID NO: 3996555 - RNA, 13 nt, Human herpesvirus 6B
uuuguuucugaaa

SEQ ID NO: 3996556 - RNA, 21 nt, Human herpesvirus 6B
uuuuacggaggaauggaagac

SEQ ID NO: 3996557 - RNA, 13 nt, Human herpesvirus 6B
uuuuaugcaagac

SEQ ID NO: 3996558 - RNA, 19 nt, Human herpesvirus 6B
uuuucacggaacaucaaaa

SEQ ID NO: 3996559 - RNA, 16 nt, Human herpesvirus 6B
uuuuccaacuuaauaa

SEQ ID NO: 3996560 - RNA, 23 nt, Human herpesvirus 6B
uuuucugcaaaacaaaaguagca

SEQ ID NO: 3996561 - RNA, 22 nt, Human herpesvirus 6B
uuuugcagaaugaauguaacug

SEQ ID NO: 3996562 - RNA, 19 nt, Human herpesvirus 6B
uuuuggaaaauguaaacac

SEQ ID NO: 3996563 - RNA, 12 nt, Human herpesvirus 6B
uuuuggugaaaa

SEQ ID NO: 3996564 - RNA, 16 nt, Human herpesvirus 6B
uuuuuaauccauauuu

SEQ ID NO: 3996565 - RNA, 17 nt, Human herpesvirus 6B
uuuuucuucaggugucu

SEQ ID NO: 3996566 - RNA, 17 nt, Human herpesvirus 6B
uuuuuggcauauacaaa

SEQ ID NO: 3996567 - RNA, 18 nt, Human herpesvirus 6B
uuuuuggcauauacaaaa

SEQ ID NO: 3996568 - RNA, 12 nt, Human herpesvirus 6B
uuuuuguuugac

SEQ ID NO: 3996569 - RNA, 12 nt, Human herpesvirus 6B
cgcccguucccg

SEQ ID NO: 3996570 - RNA, 19 nt, Human herpesvirus 6B
cgccgccuucucugucgcu

SEQ ID NO: 3996571 - RNA, 22 nt, Human herpesvirus 6B
cgccguccauuuaaccuccggc

SEQ ID NO: 3996572 - RNA, 18 nt, Human herpesvirus 6B
cgccgucgucgcucuccc

SEQ ID NO: 3996573 - RNA, 13 nt, Human herpesvirus 6B
cgcgccacagcgg

SEQ ID NO: 3996574 - RNA, 15 nt, Human herpesvirus 6B
cgcgccgugacacgg

SEQ ID NO: 3996575 - RNA, 20 nt, Human herpesvirus 6B
cgcggccgucgcgcucgccg

SEQ ID NO: 3996576 - RNA, 18 nt, Human herpesvirus 6B
cgcggcgacgucgcggcc

SEQ ID NO: 3996577 - RNA, 17 nt, Human herpesvirus 7
gauacauuuuugcaaua

SEQ ID NO: 3996578 - RNA, 20 nt, Human herpesvirus 7
gauagcauuagagcauauuc

SEQ ID NO: 3996579 - RNA, 23 nt, Human herpesvirus 7
gauauaaaguuuauauuuucuau

SEQ ID NO: 3996580 - RNA, 17 nt, Human herpesvirus 7
gauauaguuuguuucaa

SEQ ID NO: 3996581 - RNA, 16 nt, Human herpesvirus 7
gauaucuuaaaauaug

SEQ ID NO: 3996582 - RNA, 15 nt, Human herpesvirus 7
gauaugaauuugaaa

SEQ ID NO: 3996583 - RNA, 13 nt, Human herpesvirus 7
gauauuaguuuca

SEQ ID NO: 3996584 - RNA, 14 nt, Human herpesvirus 7
gauauuauuaaaaa

SEQ ID NO: 3996585 - RNA, 16 nt, Human herpesvirus 7
gauauuguacuucugu

SEQ ID NO: 3996586 - RNA, 19 nt, Human herpesvirus 7
gauauuguacuucuguguu

SEQ ID NO: 3996587 - RNA, 18 nt, Human herpesvirus 7
gaucaaaagcugcagcug

SEQ ID NO: 3996588 - RNA, 20 nt, Human herpesvirus 7
gauccaucuguaacagaccu

SEQ ID NO: 3996589 - RNA, 17 nt, Human herpesvirus 7
gaucguagcaacagaga

SEQ ID NO: 3996590 - RNA, 23 nt, Human herpesvirus 7
gaucguguguuacuauuugacug

SEQ ID NO: 3996591 - RNA, 16 nt, Human herpesvirus 7
gaucuacauauacuuu

SEQ ID NO: 3996592 - RNA, 20 nt, Human herpesvirus 7
gaugacaacaaagcaugaaa

SEQ ID NO: 3996593 - RNA, 17 nt, Human herpesvirus 7
gaugcauccaaagaaaa

SEQ ID NO: 3996594 - RNA, 17 nt, Human herpesvirus 7
gauguauaaaucagaau

SEQ ID NO: 3996595 - RNA, 15 nt, Human herpesvirus 7
gaugucaaccuuuua

SEQ ID NO: 3996596 - RNA, 13 nt, Human herpesvirus 7
gauguguuggaaa

SEQ ID NO: 3996597 - RNA, 15 nt, Human herpesvirus 7
gauguuacccaaaau

SEQ ID NO: 3996598 - RNA, 21 nt, Human herpesvirus 7
gauuaaaaacccuuuauucau

SEQ ID NO: 3996599 - RNA, 14 nt, Human herpesvirus 7
gauuagcuuucagc

SEQ ID NO: 3996600 - RNA, 19 nt, Human herpesvirus 7
gauucacauugucacugca

SEQ ID NO: 3996601 - RNA, 13 nt, Human herpesvirus 7
gauuccaaagagc

SEQ ID NO: 3996602 - RNA, 17 nt, Human herpesvirus 7
gauugaucacuuugcau

SEQ ID NO: 3996603 - RNA, 17 nt, Human herpesvirus 7
gauuucagaauuuccag

SEQ ID NO: 3996604 - RNA, 20 nt, Human herpesvirus 7
gauuuuaaaagguugacauc

SEQ ID NO: 3996605 - RNA, 23 nt, Human herpesvirus 7
gauuuuuuaaaugugucuuacaa

SEQ ID NO: 3996606 - RNA, 17 nt, Human herpesvirus 7
gcaaauccuauaaaagc

SEQ ID NO: 3996607 - RNA, 18 nt, Human herpesvirus 7
gcaaauccuauaaaagca

SEQ ID NO: 3996608 - RNA, 14 nt, Human herpesvirus 7
gcaaaucugaaaau

SEQ ID NO: 3996609 - RNA, 16 nt, Human herpesvirus 7
gcaaauuaaaaauauu

SEQ ID NO: 3996610 - RNA, 14 nt, Human herpesvirus 7
gcaacaaacaaaua

SEQ ID NO: 3996611 - RNA, 22 nt, Human herpesvirus 7
gcaacaaacaaauaauucaaaa

SEQ ID NO: 3996612 - RNA, 14 nt, Human herpesvirus 7
gcaacaaauguuua

SEQ ID NO: 3996613 - RNA, 15 nt, Human herpesvirus 7
gcaacagagaacacc

SEQ ID NO: 3996614 - RNA, 14 nt, Human herpesvirus 7
gcaacauuaauaaa

SEQ ID NO: 3996615 - RNA, 21 nt, Human herpesvirus 7
gcaacuggcauuccuuggaaa

SEQ ID NO: 3996616 - RNA, 19 nt, Human herpesvirus 7
gcaacugugcaugaaaucu

SEQ ID NO: 3996617 - RNA, 19 nt, Human herpesvirus 7
gcaacuuugugccugaaau

SEQ ID NO: 3996618 - RNA, 15 nt, Human herpesvirus 7
gcaauuaauucaguu

SEQ ID NO: 3996619 - RNA, 15 nt, Human herpesvirus 7
gcacacuaaaaaaga

SEQ ID NO: 3996620 - RNA, 20 nt, Human herpesvirus 7
gcacugggagcaaugcauga

SEQ ID NO: 3996621 - RNA, 14 nt, Human herpesvirus 7
gcagacaccgucau

SEQ ID NO: 3996622 - RNA, 16 nt, Human herpesvirus 7
gcagacauugaagauu

SEQ ID NO: 3996623 - RNA, 16 nt, Human herpesvirus 7
gcagaccguaaaacaa

SEQ ID NO: 3996624 - RNA, 16 nt, Human herpesvirus 7
gcagauuguagagaau

SEQ ID NO: 3996625 - RNA, 21 nt, Human herpesvirus 7
gcaguacuacuaaucaugaaa

SEQ ID NO: 3996626 - RNA, 18 nt, Human herpesvirus 7
gcaguauucuuaugccag

SEQ ID NO: 3996627 - RNA, 13 nt, Human herpesvirus 7
gcauaaagcacca

SEQ ID NO: 3996628 - RNA, 13 nt, Human herpesvirus 7
gcauauaugaauc

SEQ ID NO: 3996629 - RNA, 15 nt, Human herpesvirus 7
gcauauaugaaucaa

SEQ ID NO: 3996630 - RNA, 16 nt, Human herpesvirus 7
gcauaucaugauuaua

SEQ ID NO: 3996631 - RNA, 13 nt, Human herpesvirus 7
gcauauugaagau

SEQ ID NO: 3996632 - RNA, 21 nt, Human herpesvirus 7
gcauauugaagaucaacaaau

SEQ ID NO: 3996633 - RNA, 23 nt, Human herpesvirus 7
gcaucaaaacauaucagauuuua

SEQ ID NO: 3996634 - RNA, 16 nt, Human herpesvirus 7
gcaugaaaucuugaau

SEQ ID NO: 3996635 - RNA, 15 nt, Human herpesvirus 7
gcaugcuuacaguga

SEQ ID NO: 3996636 - RNA, 21 nt, Human herpesvirus 7
gcauugcuuuuagaaaaucaa

SEQ ID NO: 3996637 - RNA, 21 nt, Human herpesvirus 7
gcauuugguaaaaaaaaugga

SEQ ID NO: 3996638 - RNA, 13 nt, Human herpesvirus 7
gcauuuguuacag

SEQ ID NO: 3996639 - RNA, 19 nt, Human herpesvirus 7
gcauuuuguauuaaaggaa

SEQ ID NO: 3996640 - RNA, 17 nt, Human herpesvirus 7
gccaacguugagaaaac

SEQ ID NO: 3996641 - RNA, 13 nt, Human herpesvirus 7
gccaauaaaaauc

SEQ ID NO: 3996642 - RNA, 16 nt, Human herpesvirus 7
gccaauaaaucuucau

SEQ ID NO: 3996643 - RNA, 12 nt, Human herpesvirus 7
gccaauugaaga

SEQ ID NO: 3996644 - RNA, 22 nt, Human herpesvirus 7
gccacagauauucuaacaaaua

SEQ ID NO: 3996645 - RNA, 15 nt, Human herpesvirus 7
gccauaaaugcuuaa

SEQ ID NO: 3996646 - RNA, 13 nt, Human herpesvirus 7
gccgacaagaaac

SEQ ID NO: 3996647 - RNA, 19 nt, Human herpesvirus 7
gccgcugccuucgcucugu

SEQ ID NO: 3996648 - RNA, 15 nt, Human herpesvirus 7
gccuguuaaaaguga

SEQ ID NO: 3996649 - RNA, 22 nt, Human herpesvirus 7
gcuaaaauuuugaaauaaagga

SEQ ID NO: 3996650 - RNA, 21 nt, Human herpesvirus 7
gcuaagaaagaacauuuuucu

SEQ ID NO: 3996651 - RNA, 21 nt, Human herpesvirus 7
gcuaauugagaaauuuuacag

SEQ ID NO: 3996652 - RNA, 18 nt, Human herpesvirus 7
gcuaugacuuugaaucaa

SEQ ID NO: 3996653 - RNA, 20 nt, Human herpesvirus 7
gcucaaaacuugccauccaa

SEQ ID NO: 3996654 - RNA, 22 nt, Human herpesvirus 7
gcucagcuagaauguguagauu

SEQ ID NO: 3996655 - RNA, 15 nt, Human herpesvirus 7
gcucugaaaaaaucu

SEQ ID NO: 3996656 - RNA, 19 nt, Human herpesvirus 7
gcucugucuccaaaucaaa

SEQ ID NO: 3996657 - RNA, 20 nt, Human herpesvirus 7
gcugaaacucaucauugaag

SEQ ID NO: 3996658 - RNA, 18 nt, Human herpesvirus 7
gcugauuauucaugcaga

SEQ ID NO: 3996659 - RNA, 20 nt, Human herpesvirus 7
gcugauuccuucuaaauucu

SEQ ID NO: 3996660 - RNA, 16 nt, Human herpesvirus 7
gcuuacucuuucugac

SEQ ID NO: 3996661 - RNA, 21 nt, Human herpesvirus 7
gcuugcauugcauaucaugau

SEQ ID NO: 3996662 - RNA, 17 nt, Human herpesvirus 7
gcuuguuaaagaaaagc

SEQ ID NO: 3996663 - RNA, 19 nt, Human herpesvirus 7
gcuuuagaguaugaguuug

SEQ ID NO: 3996664 - RNA, 19 nt, Human herpesvirus 7
gcuuugaucuacauauacu

SEQ ID NO: 3996665 - RNA, 16 nt, Human herpesvirus 7
ggaaaauuucauuuaa

SEQ ID NO: 3996666 - RNA, 16 nt, Human herpesvirus 7
ggaaagcucauuucau

SEQ ID NO: 3996667 - RNA, 18 nt, Human herpesvirus 7
ggaaaugagauuucugaa

SEQ ID NO: 3996668 - RNA, 14 nt, Human herpesvirus 7
ggaaccgagaaugu

SEQ ID NO: 3996669 - RNA, 16 nt, Human herpesvirus 7
ggaaccguuugcagcc

SEQ ID NO: 3996670 - RNA, 14 nt, Human herpesvirus 7
ggaaugcaucugaa

SEQ ID NO: 3996671 - RNA, 14 nt, Human herpesvirus 7
ggacauuuguugug

SEQ ID NO: 3996672 - RNA, 17 nt, Human herpesvirus 7
ggagaaggaaaauuaua

SEQ ID NO: 3996673 - RNA, 13 nt, Human herpesvirus 7
ggagagauucaaa

SEQ ID NO: 3996674 - RNA, 23 nt, Human herpesvirus 7
ggaucaaaagcugcagcugaaag

SEQ ID NO: 3996675 - RNA, 13 nt, Human herpesvirus 7
ggcaaaaaacgua

SEQ ID NO: 3996676 - RNA, 12 nt, Human herpesvirus 7
ggcuucuucuaa

SEQ ID NO: 3996677 - RNA, 18 nt, Human herpesvirus 7
gggaaaaagcauaaagca

SEQ ID NO: 3996678 - RNA, 13 nt, Human herpesvirus 7
gggaaacaucuuu

SEQ ID NO: 3996679 - RNA, 18 nt, Human herpesvirus 7
gguaaagaaccuaucaaa

SEQ ID NO: 3996680 - RNA, 15 nt, Human herpesvirus 7
gguaauagcuuuaaa

SEQ ID NO: 3996681 - RNA, 21 nt, Human herpesvirus 7
gguaauuuuaaaacugaagca

SEQ ID NO: 3996682 - RNA, 13 nt, Human herpesvirus 7
gguuauuggaaau

SEQ ID NO: 3996683 - RNA, 21 nt, Human herpesvirus 7
guaaagauuuaacugauaauu

SEQ ID NO: 3996684 - RNA, 15 nt, Human herpesvirus 7
guaaaggaaauuagu

SEQ ID NO: 3996685 - RNA, 20 nt, Human herpesvirus 7
guaaauauuuuuaaaaucua

SEQ ID NO: 3996686 - RNA, 23 nt, Human herpesvirus 7
guaaaugaucagagaugaucuua

SEQ ID NO: 3996687 - RNA, 13 nt, Human herpesvirus 7
guaacagauuuua

SEQ ID NO: 3996688 - RNA, 17 nt, Human herpesvirus 7
guaaguuguuauagcca

SEQ ID NO: 3996689 - RNA, 15 nt, Human herpesvirus 7
guaaucauauaugca

SEQ ID NO: 3996690 - RNA, 16 nt, Human herpesvirus 7
guaauuuaugauuuuu

SEQ ID NO: 3996691 - RNA, 13 nt, Human herpesvirus 7
guacaaauguuuu

SEQ ID NO: 3996692 - RNA, 15 nt, Human herpesvirus 7
guacaacgacauuga

SEQ ID NO: 3996693 - RNA, 13 nt, Human herpesvirus 7
guacuaaagccaa

SEQ ID NO: 3996694 - RNA, 13 nt, Human herpesvirus 7
aaaaaaacaauga

SEQ ID NO: 3996695 - RNA, 19 nt, Human herpesvirus 7
aaaaacaugggauuucugu

SEQ ID NO: 3996696 - RNA, 11 nt, Human herpesvirus 7
aaaaaggaaaa

SEQ ID NO: 3996697 - RNA, 14 nt, Human herpesvirus 7
aaaaauaaacaaua

SEQ ID NO: 3996698 - RNA, 20 nt, Human herpesvirus 7
aaaaaucaguguaacucugc

SEQ ID NO: 3996699 - RNA, 14 nt, Human herpesvirus 7
aaaacgauccuaaa

SEQ ID NO: 3996700 - RNA, 15 nt, Human herpesvirus 7
aaaacgguauguaaa

SEQ ID NO: 3996701 - RNA, 14 nt, Human herpesvirus 7
aaaacguaaaacug

SEQ ID NO: 3996702 - RNA, 22 nt, Human herpesvirus 7
aaaacgugugaaaacaauuaag

SEQ ID NO: 3996703 - RNA, 13 nt, Human herpesvirus 7
aaaagaaaaucuc

SEQ ID NO: 3996704 - RNA, 22 nt, Human herpesvirus 7
aaaagaauggcgguuguacugu

SEQ ID NO: 3996705 - RNA, 23 nt, Human herpesvirus 7
aaaaggccguuuaugaacaaggu

SEQ ID NO: 3996706 - RNA, 17 nt, Human herpesvirus 7
aaaauaacuuuaaauua

SEQ ID NO: 3996707 - RNA, 22 nt, Human herpesvirus 7
aaaauacaauagugaacaugug

SEQ ID NO: 3996708 - RNA, 13 nt, Human herpesvirus 7
aaaauaugcaaaa

SEQ ID NO: 3996709 - RNA, 22 nt, Human herpesvirus 7
aaaauauguucagauugaaauu

SEQ ID NO: 3996710 - RNA, 18 nt, Human herpesvirus 7
aaaaucucagcucuguaa

SEQ ID NO: 3996711 - RNA, 20 nt, Human herpesvirus 7
aaaaucuuuaugugggauuu

SEQ ID NO: 3996712 - RNA, 19 nt, Human herpesvirus 7
aaaaugcccucagaacugu

SEQ ID NO: 3996713 - RNA, 17 nt, Human herpesvirus 7
aaaauguaaaauucgcu

SEQ ID NO: 3996714 - RNA, 18 nt, Human herpesvirus 7
aaaauuccaaaauguaaa

SEQ ID NO: 3996715 - RNA, 15 nt, Human herpesvirus 7
aaaauuugacauuug

SEQ ID NO: 3996716 - RNA, 13 nt, Human herpesvirus 7
aaacaaacaauga

SEQ ID NO: 3996717 - RNA, 14 nt, Human herpesvirus 7
aaacaauacaugaa

SEQ ID NO: 3996718 - RNA, 19 nt, Human herpesvirus 7
aaacacuugcuagcuguga

SEQ ID NO: 3996719 - RNA, 23 nt, Human herpesvirus 7
aaacagcgugucaaaaaaaaaac

SEQ ID NO: 3996720 - RNA, 15 nt, Human herpesvirus 7
aaacauguugaaaga

SEQ ID NO: 3996721 - RNA, 20 nt, Human herpesvirus 7
aaacauuguguuuuuuguaa

SEQ ID NO: 3996722 - RNA, 19 nt, Human herpesvirus 7
aaaccaaguuuuuugagau

SEQ ID NO: 3996723 - RNA, 16 nt, Human herpesvirus 7
aaacgguauguaaauu

SEQ ID NO: 3996724 - RNA, 15 nt, Human herpesvirus 7
aaacuguuuuuacuu

SEQ ID NO: 3996725 - RNA, 23 nt, Human herpesvirus 7
aaagaaaaaaucuuuauguggga

SEQ ID NO: 3996726 - RNA, 12 nt, Human herpesvirus 7
aaagaaaagcuu

SEQ ID NO: 3996727 - RNA, 14 nt, Human herpesvirus 7
aaagaccuguacug

SEQ ID NO: 3996728 - RNA, 22 nt, Human herpesvirus 7
aaagaccuguacuguugcuaau

SEQ ID NO: 3996729 - RNA, 22 nt, Human herpesvirus 7
aaagagaacgaugaauuuuucu

SEQ ID NO: 3996730 - RNA, 16 nt, Human herpesvirus 7
aaagcaacaaauguuu

SEQ ID NO: 3996731 - RNA, 16 nt, Human herpesvirus 7
aaagcugcauguguac

SEQ ID NO: 3996732 - RNA, 17 nt, Human herpesvirus 7
aaagcuuacucuuucug

SEQ ID NO: 3996733 - RNA, 13 nt, Human herpesvirus 7
aaagggggaaaga

SEQ ID NO: 3996734 - RNA, 18 nt, Human herpesvirus 7
aaaguaaaaacuuuucuu

SEQ ID NO: 3996735 - RNA, 22 nt, Human herpesvirus 7
aaaguauaacauugcuucagaa

SEQ ID NO: 3996736 - RNA, 21 nt, Human herpesvirus 7
aaaguauggaaaaauguuaug

SEQ ID NO: 3996737 - RNA, 23 nt, Human herpesvirus 7
aaauaaaaccauuuauugauguc

SEQ ID NO: 3996738 - RNA, 21 nt, Human herpesvirus 7
aaauaaaggaucucucuuucu

SEQ ID NO: 3996739 - RNA, 20 nt, Human herpesvirus 7
aaauaauaacaauuauagaa

SEQ ID NO: 3996740 - RNA, 15 nt, Human herpesvirus 7
aaauaauagaugucu

SEQ ID NO: 3996741 - RNA, 15 nt, Human herpesvirus 7
aaauauuuauuugcu

SEQ ID NO: 3996742 - RNA, 14 nt, Human herpesvirus 7
aaaucacuuagacu

SEQ ID NO: 3996743 - RNA, 18 nt, Human herpesvirus 7
aaaucagaaauguuacuu

SEQ ID NO: 3996744 - RNA, 13 nt, Human herpesvirus 7
aaauccaaaauca

SEQ ID NO: 3996745 - RNA, 12 nt, Human herpesvirus 7
aaaucuguaaaa

SEQ ID NO: 3996746 - RNA, 17 nt, Human herpesvirus 7
aaaugagauuucugaaa

SEQ ID NO: 3996747 - RNA, 14 nt, Human herpesvirus 7
aaaugaugauguau

SEQ ID NO: 3996748 - RNA, 19 nt, Human herpesvirus 7
aaaugggcguaacugugac

SEQ ID NO: 3996749 - RNA, 14 nt, Human herpesvirus 7
aaaugguugugcaa

SEQ ID NO: 3996750 - RNA, 16 nt, Human herpesvirus 7
aaauuaaaaauauuca

SEQ ID NO: 3996751 - RNA, 18 nt, Human herpesvirus 7
aaauuacacucuguuacu

SEQ ID NO: 3996752 - RNA, 14 nt, Human herpesvirus 7
aaauuaucggaaau

SEQ ID NO: 3996753 - RNA, 20 nt, Human herpesvirus 7
aaauuauuagauuccauuua

SEQ ID NO: 3996754 - RNA, 22 nt, Human herpesvirus 7
aaauucgcugaugaaaauauga

SEQ ID NO: 3996755 - RNA, 17 nt, Human herpesvirus 7
aaauucugcuugucucu

SEQ ID NO: 3996756 - RNA, 22 nt, Human herpesvirus 7
aaauucuggcucuuuacaaaau

SEQ ID NO: 3996757 - RNA, 13 nt, Human herpesvirus 7
aaauugaauagau

SEQ ID NO: 3996758 - RNA, 23 nt, Human herpesvirus 7
aaauugauccugcuauucauuuc

SEQ ID NO: 3996759 - RNA, 15 nt, Human herpesvirus 7
aaauuguaaguaaau

SEQ ID NO: 3996760 - RNA, 20 nt, Human herpesvirus 7
aaauuuuucgaucuguaaaa

SEQ ID NO: 3996761 - RNA, 14 nt, Human herpesvirus 7
aaauuuuuuacugu

SEQ ID NO: 3996762 - RNA, 11 nt, Human herpesvirus 7
gaaauuucaug

SEQ ID NO: 3996763 - RNA, 17 nt, Human herpesvirus 7
gaacaucccuggacaga

SEQ ID NO: 3996764 - RNA, 20 nt, Human herpesvirus 7
gaacaugacuucagaaaaac

SEQ ID NO: 3996765 - RNA, 14 nt, Human herpesvirus 7
gaaccugaaucaaa

SEQ ID NO: 3996766 - RNA, 21 nt, Human herpesvirus 7
gaacgacuccaacugaccaga

SEQ ID NO: 3996767 - RNA, 13 nt, Human herpesvirus 7
gaacuuuuaaaaa

SEQ ID NO: 3996768 - RNA, 19 nt, Human herpesvirus 7
gaacuuuuaaauuaaaaga

SEQ ID NO: 3996769 - RNA, 18 nt, Human herpesvirus 7
gaagaaucaagacgcugu

SEQ ID NO: 3996770 - RNA, 14 nt, Human herpesvirus 7
gaagauuugacaaa

SEQ ID NO: 3996771 - RNA, 21 nt, Human herpesvirus 7
gaagcgcugagaucuuccaau

SEQ ID NO: 3996772 - RNA, 18 nt, Human herpesvirus 7
gaaggcaucaagaaacaa

SEQ ID NO: 3996773 - RNA, 18 nt, Human herpesvirus 7
gaagguugucuguucuca

SEQ ID NO: 3996774 - RNA, 20 nt, Human herpesvirus 7
gaauagacacauuuauccau

SEQ ID NO: 3996775 - RNA, 20 nt, Human herpesvirus 7
gaauauuuauguucaaauau

SEQ ID NO: 3996776 - RNA, 14 nt, Human herpesvirus 7
gaaugcaucugaau

SEQ ID NO: 3996777 - RNA, 21 nt, Human herpesvirus 7
gaaugccaucuauaaacauuc

SEQ ID NO: 3996778 - RNA, 22 nt, Human herpesvirus 7
gaauggcgguuguacuguaauu

SEQ ID NO: 3996779 - RNA, 20 nt, Human herpesvirus 7
gaauucaacaccagucucug

SEQ ID NO: 3996780 - RNA, 15 nt, Human herpesvirus 7
gacaaacagaaaaac

SEQ ID NO: 3996781 - RNA, 17 nt, Human herpesvirus 7
gacaaauuaaacaaucu

SEQ ID NO: 3996782 - RNA, 15 nt, Human herpesvirus 7
gacaacgacuacagg

SEQ ID NO: 3996783 - RNA, 19 nt, Human herpesvirus 7
gacacuauuggacaaaaga

SEQ ID NO: 3996784 - RNA, 16 nt, Human herpesvirus 7
gacagcuguauaucua

SEQ ID NO: 3996785 - RNA, 18 nt, Human herpesvirus 7
gaccuaacaaaaaaauac

SEQ ID NO: 3996786 - RNA, 23 nt, Human herpesvirus 7
gaccucgacauucuccaguggca

SEQ ID NO: 3996787 - RNA, 18 nt, Human herpesvirus 7
gacgcuguaugcaagaaa

SEQ ID NO: 3996788 - RNA, 21 nt, Human herpesvirus 7
gacuuaucaccauaugccaau

SEQ ID NO: 3996789 - RNA, 14 nt, Human herpesvirus 7
gagcgcuuugcuua

SEQ ID NO: 3996790 - RNA, 19 nt, Human herpesvirus 7
gagcuugguuuuacaaauu

SEQ ID NO: 3996791 - RNA, 18 nt, Human herpesvirus 7
gaggauucggaaguaaac

SEQ ID NO: 3996792 - RNA, 15 nt, Human herpesvirus 7
gaguaaagauuuaac

SEQ ID NO: 3996793 - RNA, 22 nt, Human herpesvirus 7
gaguaucuccgugacaaagcau

SEQ ID NO: 3996794 - RNA, 15 nt, Human herpesvirus 7
gauaaugaaacuguu

SEQ ID NO: 3996795 - RNA, 19 nt, Human herpesvirus 7
gauacguuaguugcagcug

SEQ ID NO: 3996796 - RNA, 18 nt, Human herpesvirus 7
gauauauguguacagauu

SEQ ID NO: 3996797 - RNA, 17 nt, Human herpesvirus 7
gauauucuaacaaauac

SEQ ID NO: 3996798 - RNA, 20 nt, Human herpesvirus 7
gaucauagagaaaacauugu

SEQ ID NO: 3996799 - RNA, 18 nt, Human herpesvirus 7
gaucuaagucuacaucau

SEQ ID NO: 3996800 - RNA, 11 nt, Human herpesvirus 7
gaucuuguaau

SEQ ID NO: 3996801 - RNA, 20 nt, Human herpesvirus 7
gaugaauuaauucuuuccac

SEQ ID NO: 3996802 - RNA, 14 nt, Human herpesvirus 7
gaugacuuccaagu

SEQ ID NO: 3996803 - RNA, 15 nt, Human herpesvirus 7
gaugcauccaaagaa

SEQ ID NO: 3996804 - RNA, 21 nt, Human herpesvirus 7
gaugcauuuuuauugcaguuu

SEQ ID NO: 3996805 - RNA, 16 nt, Human herpesvirus 7
gauguauaaaucagaa

SEQ ID NO: 3996806 - RNA, 15 nt, Human herpesvirus 7
gauguuaaagaacaa

SEQ ID NO: 3996807 - RNA, 23 nt, Human herpesvirus 7
gauguuuggcaacaaacaaauaa

SEQ ID NO: 3996808 - RNA, 14 nt, Human herpesvirus 7
gauuagaaucagac

SEQ ID NO: 3996809 - RNA, 13 nt, Human herpesvirus 7
gauuauucaaaag

SEQ ID NO: 3996810 - RNA, 15 nt, Human herpesvirus 7
gauuccaaaccuauc

SEQ ID NO: 3996811 - RNA, 17 nt, Human herpesvirus 7
gauuccaaagagccucc

SEQ ID NO: 3996812 - RNA, 21 nt, Human herpesvirus 7
gauuguagagaauauuuauca

SEQ ID NO: 3996813 - RNA, 23 nt, Human herpesvirus 7
gauuguauuugucucugugcauu

SEQ ID NO: 3996814 - RNA, 17 nt, Human herpesvirus 7
gauuguuuaauuaacca

SEQ ID NO: 3996815 - RNA, 15 nt, Human herpesvirus 7
gauuuacauuucauu

SEQ ID NO: 3996816 - RNA, 17 nt, Human herpesvirus 7
gauuuagauuuaaaaca

SEQ ID NO: 3996817 - RNA, 16 nt, Human herpesvirus 7
gauuucagaauuucca

SEQ ID NO: 3996818 - RNA, 22 nt, Human herpesvirus 7
gauuucauguuuuaugacucag

SEQ ID NO: 3996819 - RNA, 23 nt, Human herpesvirus 7
gauuuuaguuccacgucaaucac

SEQ ID NO: 3996820 - RNA, 15 nt, Human herpesvirus 7
gcaaaagccacugau

SEQ ID NO: 3996821 - RNA, 20 nt, Human herpesvirus 7
gcaaagcuuuugcgagaaaa

SEQ ID NO: 3996822 - RNA, 21 nt, Human herpesvirus 7
gcaaagucucauucaugcaca

SEQ ID NO: 3996823 - RNA, 11 nt, Human herpesvirus 7
gcaacuucuga

SEQ ID NO: 3996824 - RNA, 17 nt, Human herpesvirus 7
gcaauaugcuagaagac

SEQ ID NO: 3996825 - RNA, 16 nt, Human herpesvirus 7
gcaauuuuagauuuua

SEQ ID NO: 3996826 - RNA, 22 nt, Human herpesvirus 7
gcacuugcucugugaaacaaug

SEQ ID NO: 3996827 - RNA, 15 nt, Human herpesvirus 7
gcagaaugcguaacu

SEQ ID NO: 3996828 - RNA, 17 nt, Human herpesvirus 7
gcagauuuggggucuga

SEQ ID NO: 3996829 - RNA, 18 nt, Human herpesvirus 7
gcagcaucccuauugcau

SEQ ID NO: 3996830 - RNA, 15 nt, Human herpesvirus 7
gcagguaaguauaaa

SEQ ID NO: 3996831 - RNA, 17 nt, Human herpesvirus 7
gcaguacuacuaaucau

SEQ ID NO: 3996832 - RNA, 16 nt, Human herpesvirus 7
gcaucaaaacauauca

SEQ ID NO: 3996833 - RNA, 15 nt, Human herpesvirus 7
gcaucaagaaacaag

SEQ ID NO: 3996834 - RNA, 22 nt, Human herpesvirus 7
gcaugcaaaaaacaguggaaaa

SEQ ID NO: 3996835 - RNA, 15 nt, Human herpesvirus 7
gcaugcuugcuuugc

SEQ ID NO: 3996836 - RNA, 20 nt, Human herpesvirus 7
gcauggaucguagcaacaga

SEQ ID NO: 3996837 - RNA, 12 nt, Human herpesvirus 7
gccaaugaacaa

SEQ ID NO: 3996838 - RNA, 13 nt, Human herpesvirus 7
gccacugauuuuu

SEQ ID NO: 3996839 - RNA, 23 nt, Human herpesvirus 7
gccacuguugaugauuuaauaua

SEQ ID NO: 3996840 - RNA, 22 nt, Human herpesvirus 7
gccagaucguucauugauuaua

SEQ ID NO: 3996841 - RNA, 20 nt, Human herpesvirus 7
gccaguucuaucucaaaaca

SEQ ID NO: 3996842 - RNA, 16 nt, Human herpesvirus 7
gcccugaauuuuacac

SEQ ID NO: 3996843 - RNA, 15 nt, Human herpesvirus 7
gccgccaaacuaugu

SEQ ID NO: 3996844 - RNA, 20 nt, Human herpesvirus 7
gccugaagagauuaagguga

SEQ ID NO: 3996845 - RNA, 22 nt, Human herpesvirus 7
gcgaaaaacacuuuaaccgcaa

SEQ ID NO: 3996846 - RNA, 19 nt, Human herpesvirus 7
gcgaaagccacuguugaug

SEQ ID NO: 3996847 - RNA, 21 nt, Human herpesvirus 7
gcgacauuauaaaagauggaa

SEQ ID NO: 3996848 - RNA, 18 nt, Human herpesvirus 7
gcgcuuggcaaacagucu

SEQ ID NO: 3996849 - RNA, 13 nt, Human herpesvirus 7
gcggcucucuguu

SEQ ID NO: 3996850 - RNA, 14 nt, Human herpesvirus 7
gcuaugacuuugaa

SEQ ID NO: 3996851 - RNA, 15 nt, Human herpesvirus 7
gcucucagauuagcu

SEQ ID NO: 3996852 - RNA, 22 nt, Human herpesvirus 7
gcugaaacucaucauugaagaa

SEQ ID NO: 3996853 - RNA, 13 nt, Human herpesvirus 7
gcugaaauuucau

SEQ ID NO: 3996854 - RNA, 14 nt, Human herpesvirus 7
gcugcaucuuuuca

SEQ ID NO: 3996855 - RNA, 17 nt, Human herpesvirus 7
gcuguguccacuacaga

SEQ ID NO: 3996856 - RNA, 12 nt, Human herpesvirus 7
gcuguucaaaau

SEQ ID NO: 3996857 - RNA, 18 nt, Human herpesvirus 7
gcuucagaaauaacaaaa

SEQ ID NO: 3996858 - RNA, 20 nt, Human herpesvirus 7
gcuucauuuuaaaaaagaca

SEQ ID NO: 3996859 - RNA, 16 nt, Human herpesvirus 7
gcuucuauuauagaag

SEQ ID NO: 3996860 - RNA, 14 nt, Human herpesvirus 7
gcuugaugaaucaa

SEQ ID NO: 3996861 - RNA, 20 nt, Human herpesvirus 7
gcuugguuuuacaaauuaaa

SEQ ID NO: 3996862 - RNA, 15 nt, Human herpesvirus 7
gcuugucucugucca

SEQ ID NO: 3996863 - RNA, 23 nt, Human herpesvirus 7
gcuuucuaaguacuucuggcuua

SEQ ID NO: 3996864 - RNA, 20 nt, Human herpesvirus 7
ggaaacaaauuguggagaga

SEQ ID NO: 3996865 - RNA, 19 nt, Human herpesvirus 7
ggaaacauugaaaaagcag

SEQ ID NO: 3996866 - RNA, 15 nt, Human herpesvirus 7
ggaaugauauaaagu

SEQ ID NO: 3996867 - RNA, 17 nt, Human herpesvirus 7
ggacuugauaauguuuc

SEQ ID NO: 3996868 - RNA, 23 nt, Human herpesvirus 7
ggaugcacugauaaucaagaaac

SEQ ID NO: 3996869 - RNA, 18 nt, Human herpesvirus 7
ggauuucuucuucuaaau

SEQ ID NO: 3996870 - RNA, 23 nt, Human herpesvirus 7
ggauuugaaugaacaaauaauga

SEQ ID NO: 3996871 - RNA, 14 nt, Human herpesvirus 7
ucucuaugauccag

SEQ ID NO: 3996872 - RNA, 13 nt, Human herpesvirus 7
ucucucacacuca

SEQ ID NO: 3996873 - RNA, 19 nt, Human herpesvirus 7
ucugaaauaaacauuucaa

SEQ ID NO: 3996874 - RNA, 13 nt, Human herpesvirus 7
ucugaauaaaagu

SEQ ID NO: 3996875 - RNA, 17 nt, Human herpesvirus 7
ucugauuuauauagcaa

SEQ ID NO: 3996876 - RNA, 15 nt, Human herpesvirus 7
ucugccucuuggccu

SEQ ID NO: 3996877 - RNA, 16 nt, Human herpesvirus 7
ucuggaucugccucug

SEQ ID NO: 3996878 - RNA, 16 nt, Human herpesvirus 7
ucuguggagugagaaa

SEQ ID NO: 3996879 - RNA, 12 nt, Human herpesvirus 7
ucuuaaaauaug

SEQ ID NO: 3996880 - RNA, 13 nt, Human herpesvirus 7
ucuuaaaugucaa

SEQ ID NO: 3996881 - RNA, 17 nt, Human herpesvirus 7
ucuuacggcucuaacau

SEQ ID NO: 3996882 - RNA, 17 nt, Human herpesvirus 7
ucuucugaaucugcaaa

SEQ ID NO: 3996883 - RNA, 21 nt, Human herpesvirus 7
ucuugcuugcgaucaucauug

SEQ ID NO: 3996884 - RNA, 17 nt, Human herpesvirus 7
ucuuucuaguucccauu

SEQ ID NO: 3996885 - RNA, 16 nt, Human herpesvirus 7
ucuuuuucauuaacuu

SEQ ID NO: 3996886 - RNA, 20 nt, Human herpesvirus 7
ccguugaguugcugcugucu

SEQ ID NO: 3996887 - RNA, 18 nt, Human herpesvirus 7
ccuaaaaaaaaaggaaaa

SEQ ID NO: 3996888 - RNA, 11 nt, Human herpesvirus 7
ccuaacaaaaa

SEQ ID NO: 3996889 - RNA, 16 nt, Human herpesvirus 7
ccucagaacuguuuua

SEQ ID NO: 3996890 - RNA, 21 nt, Human herpesvirus 7
ccugaaaaaauaaauucugaa

SEQ ID NO: 3996891 - RNA, 15 nt, Human herpesvirus 7
ccuucccaacuaaaa

SEQ ID NO: 3996892 - RNA, 14 nt, Human herpesvirus 7
cgaaagccacuguu

SEQ ID NO: 3996893 - RNA, 19 nt, Human herpesvirus 7
cgaacaucgagauuccaaa

SEQ ID NO: 3996894 - RNA, 18 nt, Human herpesvirus 7
cgaacugauauuaaauca

SEQ ID NO: 3996895 - RNA, 15 nt, Human herpesvirus 7
cgacaaacagaaaaa

SEQ ID NO: 3996896 - RNA, 20 nt, Human herpesvirus 7
cgauaugaauuugaaacugg

SEQ ID NO: 3996897 - RNA, 23 nt, Human herpesvirus 7
cgcaaugguauaaagugcugucu

SEQ ID NO: 3996898 - RNA, 14 nt, Human herpesvirus 7
cgcagacacaaugg

SEQ ID NO: 3996899 - RNA, 22 nt, Human herpesvirus 7
cgcuucguaaauauaaucaaaa

SEQ ID NO: 3996900 - RNA, 14 nt, Human herpesvirus 7
cggagguuugcuau

SEQ ID NO: 3996901 - RNA, 12 nt, Human herpesvirus 7
cggaucuucauu

SEQ ID NO: 3996902 - RNA, 13 nt, Human herpesvirus 7
cguaucugugacu

SEQ ID NO: 3996903 - RNA, 13 nt, Human herpesvirus 7
cgucaacuaaaau

SEQ ID NO: 3996904 - RNA, 16 nt, Human herpesvirus 7
cguugaguugcugcug

SEQ ID NO: 3996905 - RNA, 16 nt, Human herpesvirus 7
cguuugaauguauguc

SEQ ID NO: 3996906 - RNA, 20 nt, Human herpesvirus 7
cguuuucuaaacgugcccuc

SEQ ID NO: 3996907 - RNA, 21 nt, Human herpesvirus 7
cuaaaguauggaaaaauguua

SEQ ID NO: 3996908 - RNA, 23 nt, Human herpesvirus 7
cuaaccccgcucuuuuauuuuca

SEQ ID NO: 3996909 - RNA, 20 nt, Human herpesvirus 7
cuaagaaaaaaacaaaaucu

SEQ ID NO: 3996910 - RNA, 20 nt, Human herpesvirus 7
cuaagacggaacuucuuucu

SEQ ID NO: 3996911 - RNA, 23 nt, Human herpesvirus 7
cuaauauguaugaaauaauagau

SEQ ID NO: 3996912 - RNA, 15 nt, Human herpesvirus 7
cuacaaaaguucugu

SEQ ID NO: 3996913 - RNA, 21 nt, Human herpesvirus 7
cuacaauuucuggcaauaaag

SEQ ID NO: 3996914 - RNA, 16 nt, Human herpesvirus 7
cuacaccaauaguugu

SEQ ID NO: 3996915 - RNA, 14 nt, Human herpesvirus 7
cuacuguuaagaau

SEQ ID NO: 3996916 - RNA, 15 nt, Human herpesvirus 7
cuagaaguuuagaga

SEQ ID NO: 3996917 - RNA, 16 nt, Human herpesvirus 7
cuagaguaucuuuuca

SEQ ID NO: 3996918 - RNA, 18 nt, Human herpesvirus 7
cuagcucaguccauuagu

SEQ ID NO: 3996919 - RNA, 20 nt, Human herpesvirus 7
cuaguugcaacucuucuuca

SEQ ID NO: 3996920 - RNA, 15 nt, Human herpesvirus 7
cuauagaaaacaucc

SEQ ID NO: 3996921 - RNA, 15 nt, Human herpesvirus 7
cuauaguuuguauuu

SEQ ID NO: 3996922 - RNA, 18 nt, Human herpesvirus 7
cuauaucaucaucuuuuu

SEQ ID NO: 3996923 - RNA, 20 nt, Human herpesvirus 7
cuauccagaacauuuauuuu

SEQ ID NO: 3996924 - RNA, 11 nt, Human herpesvirus 7
cuaugauacaa

SEQ ID NO: 3996925 - RNA, 20 nt, Human herpesvirus 7
cuaugauugcaguaaauuug

SEQ ID NO: 3996926 - RNA, 17 nt, Human herpesvirus 7
cuauguccaaaaauuua

SEQ ID NO: 3996927 - RNA, 21 nt, Human herpesvirus 7
cuauuaagcguucguaacaaa

SEQ ID NO: 3996928 - RNA, 14 nt, Human herpesvirus 7
cuauuacacaggaa

SEQ ID NO: 3996929 - RNA, 15 nt, Human herpesvirus 7
cuauuuaaaauauua

SEQ ID NO: 3996930 - RNA, 19 nt, Human herpesvirus 7
cuauuucugucaucuuaua

SEQ ID NO: 3996931 - RNA, 19 nt, Human herpesvirus 7
cucaauuuuucgcugaaga

SEQ ID NO: 3996932 - RNA, 18 nt, Human herpesvirus 7
cucagauucgacuucuaa

SEQ ID NO: 3996933 - RNA, 19 nt, Human herpesvirus 7
cucauggccagugaaugau

SEQ ID NO: 3996934 - RNA, 14 nt, Human herpesvirus 7
cuccaaucauaauu

SEQ ID NO: 3996935 - RNA, 21 nt, Human herpesvirus 7
cuccacuaugccacaaaaaac

SEQ ID NO: 3996936 - RNA, 19 nt, Human herpesvirus 7
cuccccaguaaauaaaaug

SEQ ID NO: 3996937 - RNA, 12 nt, Human herpesvirus 7
cucuaguuuaau

SEQ ID NO: 3996938 - RNA, 14 nt, Human herpesvirus 7
cucuguaaaacguu

SEQ ID NO: 3996939 - RNA, 21 nt, Human herpesvirus 7
aaaucauuuuuaaaaauaaua

SEQ ID NO: 3996940 - RNA, 12 nt, Human herpesvirus 7
aaauccuggauu

SEQ ID NO: 3996941 - RNA, 22 nt, Human herpesvirus 7
aaaucguuuuuggcaaaauauc

SEQ ID NO: 3996942 - RNA, 14 nt, Human herpesvirus 7
aaaucuacuguaau

SEQ ID NO: 3996943 - RNA, 19 nt, Human herpesvirus 7
aaaucuguagaaaauguuu

SEQ ID NO: 3996944 - RNA, 16 nt, Human herpesvirus 7
aaaucuuuauugguaa

SEQ ID NO: 3996945 - RNA, 18 nt, Human herpesvirus 7
aaaugggaauguuaacca

SEQ ID NO: 3996946 - RNA, 17 nt, Human herpesvirus 7
aaauggguuugggaaac

SEQ ID NO: 3996947 - RNA, 22 nt, Human herpesvirus 7
aaauguaucuuaaaauacuaau

SEQ ID NO: 3996948 - RNA, 21 nt, Human herpesvirus 7
aaaugucuuugucaugaugaa

SEQ ID NO: 3996949 - RNA, 19 nt, Human herpesvirus 7
aaauuaaguuuuucaugua

SEQ ID NO: 3996950 - RNA, 15 nt, Human herpesvirus 7
aaauuaauaauauua

SEQ ID NO: 3996951 - RNA, 15 nt, Human herpesvirus 7
aaauuauuaauauua

SEQ ID NO: 3996952 - RNA, 19 nt, Human herpesvirus 7
aaauuauuaauauuaguau

SEQ ID NO: 3996953 - RNA, 20 nt, Human herpesvirus 7
aaauucaaggaauucugacu

SEQ ID NO: 3996954 - RNA, 9 nt, Human herpesvirus 7
aaauuuaaa

SEQ ID NO: 3996955 - RNA, 14 nt, Human herpesvirus 7
aaauuucaaacgua

SEQ ID NO: 3996956 - RNA, 17 nt, Human herpesvirus 7
aacaaaaugacaaaaag

SEQ ID NO: 3996957 - RNA, 14 nt, Human herpesvirus 7
aacaaacaaauaau

SEQ ID NO: 3996958 - RNA, 15 nt, Human herpesvirus 7
aacaaguagugcuaa

SEQ ID NO: 3996959 - RNA, 13 nt, Human herpesvirus 7
aacaauguguuaa

SEQ ID NO: 3996960 - RNA, 19 nt, Human herpesvirus 7
aacacauucugucuuggaa

SEQ ID NO: 3996961 - RNA, 19 nt, Human herpesvirus 7
aacacugcaagcugauuca

SEQ ID NO: 3996962 - RNA, 11 nt, Human herpesvirus 7
aacagaccucc

SEQ ID NO: 3996963 - RNA, 18 nt, Human herpesvirus 7
aacagccaucuaauugca

SEQ ID NO: 3996964 - RNA, 14 nt, Human herpesvirus 7
aacagugggaaagu

SEQ ID NO: 3996965 - RNA, 16 nt, Human herpesvirus 7
aacauacugauguaaa

SEQ ID NO: 3996966 - RNA, 19 nt, Human herpesvirus 7
aacauacuuaaaaaaauga

SEQ ID NO: 3996967 - RNA, 18 nt, Human herpesvirus 7
aacaucuuuauauguguu

SEQ ID NO: 3996968 - RNA, 22 nt, Human herpesvirus 7
aacaugucuuuuaguuuucauu

SEQ ID NO: 3996969 - RNA, 20 nt, Human herpesvirus 7
aacauguuuucuuagaugca

SEQ ID NO: 3996970 - RNA, 14 nt, Human herpesvirus 7
aacauuaaaacuac

SEQ ID NO: 3996971 - RNA, 23 nt, Human herpesvirus 7
aacauuccucauggccagugaau

SEQ ID NO: 3996972 - RNA, 17 nt, Human herpesvirus 7
aacccagaagaaacuug

SEQ ID NO: 3996973 - RNA, 21 nt, Human herpesvirus 7
aaccuacuguuaagaauucca

SEQ ID NO: 3996974 - RNA, 13 nt, Human herpesvirus 7
aaccuaucaaaau

SEQ ID NO: 3996975 - RNA, 17 nt, Human herpesvirus 7
aacggaauaaacaaugu

SEQ ID NO: 3996976 - RNA, 15 nt, Human herpesvirus 7
aacuagcaaacagug

SEQ ID NO: 3996977 - RNA, 23 nt, Human herpesvirus 7
aacuauaucaucaucuuuuugaa

SEQ ID NO: 3996978 - RNA, 16 nt, Human herpesvirus 7
aacuauucgaaaauau

SEQ ID NO: 3996979 - RNA, 14 nt, Human herpesvirus 7
aacucuaucuccua

SEQ ID NO: 3996980 - RNA, 21 nt, Human herpesvirus 7
aacugaauuaagguggaaauc

SEQ ID NO: 3996981 - RNA, 15 nt, Human herpesvirus 7
aacugagaaaaauga

SEQ ID NO: 3996982 - RNA, 17 nt, Human herpesvirus 7
aacugauauaaaugcuu

SEQ ID NO: 3996983 - RNA, 22 nt, Human herpesvirus 7
aacuggaauuauacacugugaa

SEQ ID NO: 3996984 - RNA, 18 nt, Human herpesvirus 7
aacuuacauuucaaacaa

SEQ ID NO: 3996985 - RNA, 19 nt, Human herpesvirus 7
aacuuugcaacaaaaucua

SEQ ID NO: 3996986 - RNA, 16 nt, Human herpesvirus 7
aacuuuucuuaaacau

SEQ ID NO: 3996987 - RNA, 22 nt, Human herpesvirus 7
aagaauuaauaaaaguaucauu

SEQ ID NO: 3996988 - RNA, 12 nt, Human herpesvirus 7
aagaauuuggau

SEQ ID NO: 3996989 - RNA, 20 nt, Human herpesvirus 7
aagaauuuuguaagaaacau

SEQ ID NO: 3996990 - RNA, 20 nt, Human herpesvirus 7
aagacacguuucucuguaga

SEQ ID NO: 3996991 - RNA, 14 nt, Human herpesvirus 7
aagacagaaaugaa

SEQ ID NO: 3996992 - RNA, 18 nt, Human herpesvirus 7
aagacgugagcaauacac

SEQ ID NO: 3996993 - RNA, 17 nt, Human herpesvirus 7
aagaugcguagcuacag

SEQ ID NO: 3996994 - RNA, 15 nt, Human herpesvirus 7
aagauuaaaugggcu

SEQ ID NO: 3996995 - RNA, 16 nt, Human herpesvirus 7
aagcaacaaauguuua

SEQ ID NO: 3996996 - RNA, 20 nt, Human herpesvirus 7
aagcagacauugaagauugu

SEQ ID NO: 3996997 - RNA, 16 nt, Human herpesvirus 7
aagcauauugaagauc

SEQ ID NO: 3996998 - RNA, 18 nt, Human herpesvirus 7
aagcccaaacuguuuuua

SEQ ID NO: 3996999 - RNA, 23 nt, Human herpesvirus 7
aagcgagauuuauuuuuaaaaau

SEQ ID NO: 3997000 - RNA, 24 nt, Human herpesvirus 7
aagcuaaacuuuuaacuguuaaag

SEQ ID NO: 3997001 - RNA, 18 nt, Human herpesvirus 7
aagcuugcuuaaaacuuu

SEQ ID NO: 3997002 - RNA, 20 nt, Human herpesvirus 7
aaggaagcuuuacagcagcc

SEQ ID NO: 3997003 - RNA, 13 nt, Human herpesvirus 7
aaggaagguacau

SEQ ID NO: 3997004 - RNA, 15 nt, Human herpesvirus 7
aaggugguuacauau

SEQ ID NO: 3997005 - RNA, 16 nt, Human herpesvirus 7
aagguugaguugacaa

SEQ ID NO: 3997006 - RNA, 22 nt, Human herpesvirus 7
aaguguaagcuuuuucuuccgc

SEQ ID NO: 3997007 - RNA, 22 nt, Human herpesvirus 7
aaguucuccuuguuguguuuua

SEQ ID NO: 3997008 - RNA, 11 nt, Human herpesvirus 7
aaguugaacaa

SEQ ID NO: 3997009 - RNA, 21 nt, Human herpesvirus 7
aaguuuccauaaauaaaaaca

SEQ ID NO: 3997010 - RNA, 12 nt, Human herpesvirus 7
aauaaaaugguu

SEQ ID NO: 3997011 - RNA, 15 nt, Human herpesvirus 7
aauaaaauuuaaaau

SEQ ID NO: 3997012 - RNA, 16 nt, Human herpesvirus 7
aauaaagauuacauuu

SEQ ID NO: 3997013 - RNA, 23 nt, Human herpesvirus 7
aauaaauuuuucgaucuguaaaa

SEQ ID NO: 3997014 - RNA, 20 nt, Human herpesvirus 7
aauaacaauuauagaaacau

SEQ ID NO: 3997015 - RNA, 12 nt, Human herpesvirus 7
aauaacaggaaa

SEQ ID NO: 3997016 - RNA, 17 nt, Human herpesvirus 7
aauaagauguguuggaa

SEQ ID NO: 3997017 - RNA, 13 nt, Human herpesvirus 7
aauaauuuaaaau

SEQ ID NO: 3997018 - RNA, 17 nt, Human herpesvirus 7
aauacugagagaauaag

SEQ ID NO: 3997019 - RNA, 14 nt, Human herpesvirus 7
aauaucucugugau

SEQ ID NO: 3997020 - RNA, 19 nt, Human herpesvirus 7
aauaucuuuuucaaaugga

SEQ ID NO: 3997021 - RNA, 19 nt, Human herpesvirus 7
aauaugaugaaacuuccaa

SEQ ID NO: 3997022 - RNA, 19 nt, Human herpesvirus 7
aauauuuggcuuagaauau

SEQ ID NO: 3997023 - RNA, 14 nt, Human herpesvirus 7
aaucaaaaacugaa

SEQ ID NO: 3997024 - RNA, 19 nt, Human herpesvirus 7
aaucaaccaacauucuugu

SEQ ID NO: 3997025 - RNA, 22 nt, Human herpesvirus 7
aaucaaccaacauucuugucaa

SEQ ID NO: 3997026 - RNA, 22 nt, Human herpesvirus 7
aaucauaauucaaucugcaaaa

SEQ ID NO: 3997027 - RNA, 15 nt, Human herpesvirus 7
aauccaacagaauac

SEQ ID NO: 3997028 - RNA, 20 nt, Human herpesvirus 7
aaucuguaaaauuuaaauac

SEQ ID NO: 3997029 - RNA, 20 nt, Human herpesvirus 7
aaucuuggcauugaaauucu

SEQ ID NO: 3997030 - RNA, 19 nt, Human herpesvirus 7
aaucuuuauuauuuacuga

SEQ ID NO: 3997031 - RNA, 20 nt, Human herpesvirus 7
aaucuuugacuguaucucca

SEQ ID NO: 3997032 - RNA, 14 nt, Human herpesvirus 7
aaugaaaaagccau

SEQ ID NO: 3997033 - RNA, 13 nt, Human herpesvirus 7
aaugaaguuuauc

SEQ ID NO: 3997034 - RNA, 21 nt, Human herpesvirus 7
aaugaauaaaaucuauuuuau

SEQ ID NO: 3997035 - RNA, 16 nt, Human herpesvirus 7
aaugaauuagcuaaau

SEQ ID NO: 3997036 - RNA, 15 nt, Human herpesvirus 7
aaugauuucagaaaa

SEQ ID NO: 3997037 - RNA, 19 nt, Human herpesvirus 7
aaugcaacaucuuaaaugu

SEQ ID NO: 3997038 - RNA, 21 nt, Human herpesvirus 7
aaugcagccuacuuuuaaaau

SEQ ID NO: 3997039 - RNA, 20 nt, Human herpesvirus 7
aaugccaucuauaaacauuc

SEQ ID NO: 3997040 - RNA, 16 nt, Human herpesvirus 7
aauggauuuaaucgau

SEQ ID NO: 3997041 - RNA, 21 nt, Human herpesvirus 7
aaugugguaaauuugcuugcu

SEQ ID NO: 3997042 - RNA, 12 nt, Human herpesvirus 7
aauguuucugag

SEQ ID NO: 3997043 - RNA, 11 nt, Human herpesvirus 7
aauuaaauacu

SEQ ID NO: 3997044 - RNA, 14 nt, Human herpesvirus 7
aauuaacagcucua

SEQ ID NO: 3997045 - RNA, 18 nt, Human herpesvirus 7
aauuaagaaucauuugua

SEQ ID NO: 3997046 - RNA, 14 nt, Human herpesvirus 7
aauuaaucaaacaa

SEQ ID NO: 3997047 - RNA, 15 nt, Human herpesvirus 7
aauuauuagauucca

SEQ ID NO: 3997048 - RNA, 20 nt, Human herpesvirus 7
aauuauuuaaacagcguuca

SEQ ID NO: 3997049 - RNA, 21 nt, Human herpesvirus 7
aauuccugcuugcacaaagau

SEQ ID NO: 3997050 - RNA, 19 nt, Human herpesvirus 7
aauucucgcuucaaagaua

SEQ ID NO: 3997051 - RNA, 22 nt, Human herpesvirus 7
aauucuguggagugagaaauua

SEQ ID NO: 3997052 - RNA, 22 nt, Human herpesvirus 7
aauuguaaguaaauuuacuuga

SEQ ID NO: 3997053 - RNA, 13 nt, Human herpesvirus 7
auucaguuucuuu

SEQ ID NO: 3997054 - RNA, 21 nt, Human herpesvirus 7
auucauuuccucccaaaaauu

SEQ ID NO: 3997055 - RNA, 16 nt, Human herpesvirus 7
auuccgauuuaaguga

SEQ ID NO: 3997056 - RNA, 13 nt, Human herpesvirus 7
auucgacacuauu

SEQ ID NO: 3997057 - RNA, 17 nt, Human herpesvirus 7
auucgacacuauuggac

SEQ ID NO: 3997058 - RNA, 15 nt, Human herpesvirus 7
auucguuaagcaccg

SEQ ID NO: 3997059 - RNA, 23 nt, Human herpesvirus 7
auucuauaaaacgugugaaaaca

SEQ ID NO: 3997060 - RNA, 14 nt, Human herpesvirus 7
auucucuacuuaau

SEQ ID NO: 3997061 - RNA, 16 nt, Human herpesvirus 7
auucugaaauaaacau

SEQ ID NO: 3997062 - RNA, 23 nt, Human herpesvirus 7
auucugacuccuuuuuuucugcu

SEQ ID NO: 3997063 - RNA, 15 nt, Human herpesvirus 7
auucuuuguacuugu

SEQ ID NO: 3997064 - RNA, 18 nt, Human herpesvirus 7
auugaaaaugcauugcuu

SEQ ID NO: 3997065 - RNA, 14 nt, Human herpesvirus 7
auugacagcaccaa

SEQ ID NO: 3997066 - RNA, 15 nt, Human herpesvirus 7
auugcuucagaaaua

SEQ ID NO: 3997067 - RNA, 14 nt, Human herpesvirus 7
auugcuuucuaagu

SEQ ID NO: 3997068 - RNA, 18 nt, Human herpesvirus 7
auuguaaauauuauuaac

SEQ ID NO: 3997069 - RNA, 21 nt, Human herpesvirus 7
auuguagagguccaauagaaa

SEQ ID NO: 3997070 - RNA, 21 nt, Human herpesvirus 7
auuguaugggaaaaauaagaa

SEQ ID NO: 3997071 - RNA, 19 nt, Human herpesvirus 7
auugugcaucuccuguaac

SEQ ID NO: 3997072 - RNA, 16 nt, Human herpesvirus 7
auuguuaccgguuaaa

SEQ ID NO: 3997073 - RNA, 18 nt, Human herpesvirus 7
auuuaaaguagcugaauu

SEQ ID NO: 3997074 - RNA, 19 nt, Human herpesvirus 7
auuuaacauguguauauuu

SEQ ID NO: 3997075 - RNA, 18 nt, Human herpesvirus 7
auuuaaugguuuuaaaau

SEQ ID NO: 3997076 - RNA, 19 nt, Human herpesvirus 7
auuuagcaccaacugaauu

SEQ ID NO: 3997077 - RNA, 22 nt, Human herpesvirus 7
auuuagucggcacacguacaau

SEQ ID NO: 3997078 - RNA, 13 nt, Human herpesvirus 7
auuuaugcuuuaa

SEQ ID NO: 3997079 - RNA, 21 nt, Human herpesvirus 7
auuuauuuguguuuuguaaau

SEQ ID NO: 3997080 - RNA, 23 nt, Human herpesvirus 7
auuuauuuguguuuuguaaauaa

SEQ ID NO: 3997081 - RNA, 22 nt, Human herpesvirus 7
auuucaaacguaaugcaaaaua

SEQ ID NO: 3997082 - RNA, 13 nt, Human herpesvirus 7
auuucaaaggaag

SEQ ID NO: 3997083 - RNA, 17 nt, Human herpesvirus 7
auuucaaaggaagacau

SEQ ID NO: 3997084 - RNA, 16 nt, Human herpesvirus 7
auuucaauaaucaaug

SEQ ID NO: 3997085 - RNA, 18 nt, Human herpesvirus 7
auuucaauaaucaaugca

SEQ ID NO: 3997086 - RNA, 21 nt, Human herpesvirus 7
auuucagaaaauaaaaguaaa

SEQ ID NO: 3997087 - RNA, 17 nt, Human herpesvirus 7
auuuccguuguuaaaaa

SEQ ID NO: 3997088 - RNA, 20 nt, Human herpesvirus 7
auuucgcaggggguucuaaa

SEQ ID NO: 3997089 - RNA, 20 nt, Human herpesvirus 7
auuucuauuagauaaugaca

SEQ ID NO: 3997090 - RNA, 14 nt, Human herpesvirus 7
auuucucaaaucuu

SEQ ID NO: 3997091 - RNA, 17 nt, Human herpesvirus 7
auuucuggaugaaaacu

SEQ ID NO: 3997092 - RNA, 22 nt, Human herpesvirus 7
auuucuuaaagaugucuuaauu

SEQ ID NO: 3997093 - RNA, 19 nt, Human herpesvirus 7
auuucuuauaauuaugaug

SEQ ID NO: 3997094 - RNA, 21 nt, Human herpesvirus 7
auuugacuuuuucuguagaca

SEQ ID NO: 3997095 - RNA, 18 nt, Human herpesvirus 7
auuugaugaaauuguuaa

SEQ ID NO: 3997096 - RNA, 14 nt, Human herpesvirus 7
auuugcuucuucua

SEQ ID NO: 3997097 - RNA, 14 nt, Human herpesvirus 7
auuugcuugcugaa

SEQ ID NO: 3997098 - RNA, 13 nt, Human herpesvirus 7
auuuguaugucua

SEQ ID NO: 3997099 - RNA, 18 nt, Human herpesvirus 7
auuuuaaaacugaagcau

SEQ ID NO: 3997100 - RNA, 22 nt, Human herpesvirus 7
auuuuacauauuaguuuaacuu

SEQ ID NO: 3997101 - RNA, 15 nt, Human herpesvirus 7
auuuuccaacgaaau

SEQ ID NO: 3997102 - RNA, 20 nt, Human herpesvirus 7
auuuugaucuugucaaaaaa

SEQ ID NO: 3997103 - RNA, 18 nt, Human herpesvirus 7
auuuugucuuuagauaga

SEQ ID NO: 3997104 - RNA, 17 nt, Human herpesvirus 7
caaaaaacguaaaacug

SEQ ID NO: 3997105 - RNA, 21 nt, Human herpesvirus 7
caaaacgccuugggcacacca

SEQ ID NO: 3997106 - RNA, 18 nt, Human herpesvirus 7
caaaagacauaacaaaaa

SEQ ID NO: 3997107 - RNA, 20 nt, Human herpesvirus 7
caaaccaugauguuaaagaa

SEQ ID NO: 3997108 - RNA, 20 nt, Human herpesvirus 7
caaagaacauguaguacaau

SEQ ID NO: 3997109 - RNA, 12 nt, Human herpesvirus 7
caaagcaagcau

SEQ ID NO: 3997110 - RNA, 19 nt, Human herpesvirus 7
caaaggaaaaaugcugcuc

SEQ ID NO: 3997111 - RNA, 19 nt, Human herpesvirus 7
caaauagaguuuaauugua

SEQ ID NO: 3997112 - RNA, 21 nt, Human herpesvirus 7
caaauagaguuuaauuguacu

SEQ ID NO: 3997113 - RNA, 14 nt, Human herpesvirus 7
caaauccacucugg

SEQ ID NO: 3997114 - RNA, 16 nt, Human herpesvirus 7
caaaucugauaaauua

SEQ ID NO: 3997115 - RNA, 17 nt, Human herpesvirus 7
caaauuaaacaaucugg

SEQ ID NO: 3997116 - RNA, 22 nt, Human herpesvirus 7
caaauugaaccuuaacauacug

SEQ ID NO: 3997117 - RNA, 19 nt, Human herpesvirus 7
caaauuguaaauucuccaa

SEQ ID NO: 3997118 - RNA, 12 nt, Human herpesvirus 7
caacaaauguuu

SEQ ID NO: 3997119 - RNA, 16 nt, Human herpesvirus 7
caacaucuuaaauguc

SEQ ID NO: 3997120 - RNA, 16 nt, Human herpesvirus 7
caacgguauacauuaa

SEQ ID NO: 3997121 - RNA, 22 nt, Human herpesvirus 7
caacuaaaacuacauuuaaaaa

SEQ ID NO: 3997122 - RNA, 12 nt, Human herpesvirus 7
caacugugcaug

SEQ ID NO: 3997123 - RNA, 22 nt, Human herpesvirus 7
caaggucuuucaugcauugcau

SEQ ID NO: 3997124 - RNA, 23 nt, Human herpesvirus 7
caagucugaaggcugcuuuuuca

SEQ ID NO: 3997125 - RNA, 17 nt, Human herpesvirus 7
caaguguuucuuugaau

SEQ ID NO: 3997126 - RNA, 18 nt, Human herpesvirus 7
caauagcauaugcuggau

SEQ ID NO: 3997127 - RNA, 16 nt, Human herpesvirus 7
caauagugaacaugug

SEQ ID NO: 3997128 - RNA, 18 nt, Human herpesvirus 7
caauaugcauguguaaag

SEQ ID NO: 3997129 - RNA, 17 nt, Human herpesvirus 7
caaugauuuuucugcuu

SEQ ID NO: 3997130 - RNA, 14 nt, Human herpesvirus 7
caauggaacagcaa

SEQ ID NO: 3997131 - RNA, 14 nt, Human herpesvirus 7
caauuauagaaaca

SEQ ID NO: 3997132 - RNA, 20 nt, Human herpesvirus 7
caauuauuuuaaauucuaau

SEQ ID NO: 3997133 - RNA, 16 nt, Human herpesvirus 7
caauuuuaaugugcuu

SEQ ID NO: 3997134 - RNA, 16 nt, Human herpesvirus 7
cacaagguacauuuug

SEQ ID NO: 3997135 - RNA, 17 nt, Human herpesvirus 7
cacaauuguauuucagu

SEQ ID NO: 3997136 - RNA, 23 nt, Human herpesvirus 7
cacauacucuagaacaaacugua

SEQ ID NO: 3997137 - RNA, 23 nt, Human herpesvirus 7
cacauguacagacagaaugccag

SEQ ID NO: 3997138 - RNA, 23 nt, Human herpesvirus 7
caccgaugaauuuuuuuugguaa

SEQ ID NO: 3997139 - RNA, 16 nt, Human herpesvirus 7
cacguagaacaaacug

SEQ ID NO: 3997140 - RNA, 23 nt, Human herpesvirus 7
cacucugcauuccacuaaaagag

SEQ ID NO: 3997141 - RNA, 22 nt, Human herpesvirus 7
cacugagccaucaaaaaauuua

SEQ ID NO: 3997142 - RNA, 22 nt, Human herpesvirus 7
cacuguuguagguaauuucuua

SEQ ID NO: 3997143 - RNA, 20 nt, Human herpesvirus 7
cacuugaauagguaucuuua

SEQ ID NO: 3997144 - RNA, 22 nt, Human herpesvirus 7
cagaaagaucaaugcacacauu

SEQ ID NO: 3997145 - RNA, 21 nt, Human herpesvirus 7
cagaacaucccuggacagaga

SEQ ID NO: 3997146 - RNA, 19 nt, Human herpesvirus 7
cagaagcugacuuugucau

SEQ ID NO: 3997147 - RNA, 19 nt, Human herpesvirus 7
cagacacaccauuguucaa

SEQ ID NO: 3997148 - RNA, 16 nt, Human herpesvirus 7
cagaguauuuaagaac

SEQ ID NO: 3997149 - RNA, 15 nt, Human herpesvirus 7
cagauucgacuucua

SEQ ID NO: 3997150 - RNA, 15 nt, Human herpesvirus 7
cagauucuccagaaa

SEQ ID NO: 3997151 - RNA, 16 nt, Human herpesvirus 7
cagauuuucuguuuca

SEQ ID NO: 3997152 - RNA, 22 nt, Human herpesvirus 7
cagcuagauugacuaugaauuu

SEQ ID NO: 3997153 - RNA, 16 nt, Human herpesvirus 7
cagcuggaguuauuua

SEQ ID NO: 3997154 - RNA, 13 nt, Human herpesvirus 7
caggauuugggaa

SEQ ID NO: 3997155 - RNA, 13 nt, Human herpesvirus 7
caggcaaugcaag

SEQ ID NO: 3997156 - RNA, 23 nt, Human herpesvirus 7
caggcauuuaagaauuuaaucau

SEQ ID NO: 3997157 - RNA, 16 nt, Human herpesvirus 7
caggcugcaucuuuuc

SEQ ID NO: 3997158 - RNA, 17 nt, Human herpesvirus 7
caguauauaaugguuug

SEQ ID NO: 3997159 - RNA, 17 nt, Human herpesvirus 7
caguaucacuuaaagca

SEQ ID NO: 3997160 - RNA, 23 nt, Human herpesvirus 7
caguuauuucuuauuggagaugu

SEQ ID NO: 3997161 - RNA, 18 nt, Human herpesvirus 7
cauaauucaaucugcaaa

SEQ ID NO: 3997162 - RNA, 12 nt, Human herpesvirus 7
cauaauuucagc

SEQ ID NO: 3997163 - RNA, 20 nt, Human herpesvirus 7
cauaauuuuaauaaacggug

SEQ ID NO: 3997164 - RNA, 20 nt, Human herpesvirus 7
cauacuaaauuucuuaaaga

SEQ ID NO: 3997165 - RNA, 22 nt, Human herpesvirus 7
cauacuuuuuugguuauuggaa

SEQ ID NO: 3997166 - RNA, 22 nt, Human herpesvirus 7
cauagacauuauuagacagaua

SEQ ID NO: 3997167 - RNA, 11 nt, Human herpesvirus 7
cuguuuaagua

SEQ ID NO: 3997168 - RNA, 15 nt, Human herpesvirus 7
cuuaacaauuauuuu

SEQ ID NO: 3997169 - RNA, 24 nt, Human herpesvirus 7
cuuaaggcggacaaauauacgaau

SEQ ID NO: 3997170 - RNA, 15 nt, Human herpesvirus 7
cuuaauuuguucaau

SEQ ID NO: 3997171 - RNA, 12 nt, Human herpesvirus 7
cuuagaaucuuu

SEQ ID NO: 3997172 - RNA, 19 nt, Human herpesvirus 7
cuuagaucgaacuguuaca

SEQ ID NO: 3997173 - RNA, 18 nt, Human herpesvirus 7
cuuagcguucgacagcaa

SEQ ID NO: 3997174 - RNA, 14 nt, Human herpesvirus 7
cuuauaacuucgua

SEQ ID NO: 3997175 - RNA, 17 nt, Human herpesvirus 7
cuuauacuccacauuca

SEQ ID NO: 3997176 - RNA, 22 nt, Human herpesvirus 7
cuuaucugucauggacggcauu

SEQ ID NO: 3997177 - RNA, 21 nt, Human herpesvirus 7
cuuauuccagauaugacaaau

SEQ ID NO: 3997178 - RNA, 22 nt, Human herpesvirus 7
cuuauuuauauauggcaauaaa

SEQ ID NO: 3997179 - RNA, 14 nt, Human herpesvirus 7
cuucaaagauaccu

SEQ ID NO: 3997180 - RNA, 17 nt, Human herpesvirus 7
cuucaacuucucuugga

SEQ ID NO: 3997181 - RNA, 17 nt, Human herpesvirus 7
cuuccgcauuuuguauu

SEQ ID NO: 3997182 - RNA, 13 nt, Human herpesvirus 7
cuuccuaaaaaaa

SEQ ID NO: 3997183 - RNA, 14 nt, Human herpesvirus 7
cuucgcugcuguga

SEQ ID NO: 3997184 - RNA, 22 nt, Human herpesvirus 7
cuucuagaaacuaaagaaaaaa

SEQ ID NO: 3997185 - RNA, 18 nt, Human herpesvirus 7
cuucucuauaccgcuucu

SEQ ID NO: 3997186 - RNA, 15 nt, Human herpesvirus 7
cuucugcuaacucau

SEQ ID NO: 3997187 - RNA, 14 nt, Human herpesvirus 7
cuucuugcauuucc

SEQ ID NO: 3997188 - RNA, 16 nt, Human herpesvirus 7
cuucuugcauuuccga

SEQ ID NO: 3997189 - RNA, 20 nt, Human herpesvirus 7
cuucuuugacaaaaauguua

SEQ ID NO: 3997190 - RNA, 22 nt, Human herpesvirus 7
cuucuuuuuuugaacuguugcc

SEQ ID NO: 3997191 - RNA, 13 nt, Human herpesvirus 7
cuugaaaaaaucu

SEQ ID NO: 3997192 - RNA, 22 nt, Human herpesvirus 7
cuugaaaaagaauuuucugcuu

SEQ ID NO: 3997193 - RNA, 21 nt, Human herpesvirus 7
cuugcauacaguuuauuugaa

SEQ ID NO: 3997194 - RNA, 16 nt, Human herpesvirus 7
cuugcuagcugugaua

SEQ ID NO: 3997195 - RNA, 19 nt, Human herpesvirus 7
cuugcuuguaggcagaaau

SEQ ID NO: 3997196 - RNA, 16 nt, Human herpesvirus 7
cuuggaguuugucuca

SEQ ID NO: 3997197 - RNA, 17 nt, Human herpesvirus 7
cuugugaaaauaacagg

SEQ ID NO: 3997198 - RNA, 20 nt, Human herpesvirus 7
cuuuacgaaacaauuucaca

SEQ ID NO: 3997199 - RNA, 18 nt, Human herpesvirus 7
cuuuacuuucauagcuua

SEQ ID NO: 3997200 - RNA, 22 nt, Human herpesvirus 7
cuuuaucagucaagaacuguga

SEQ ID NO: 3997201 - RNA, 19 nt, Human herpesvirus 7
cuuucggagacguugcuca

SEQ ID NO: 3997202 - RNA, 14 nt, Human herpesvirus 7
cuuucguuuucaaa

SEQ ID NO: 3997203 - RNA, 19 nt, Human herpesvirus 7
cuuucuggaguucaguaaa

SEQ ID NO: 3997204 - RNA, 21 nt, Human herpesvirus 7
cuuucuuuaccgauucuaaau

SEQ ID NO: 3997205 - RNA, 22 nt, Human herpesvirus 7
cuuucuuugagcuaaccuuuua

SEQ ID NO: 3997206 - RNA, 16 nt, Human herpesvirus 7
cuuugaaaucauucug

SEQ ID NO: 3997207 - RNA, 23 nt, Human herpesvirus 7
cuuugagcccauauuuuuaaauu

SEQ ID NO: 3997208 - RNA, 19 nt, Human herpesvirus 7
cuuugauagggauucuuug

SEQ ID NO: 3997209 - RNA, 15 nt, Human herpesvirus 7
cuuuuacagaagaac

SEQ ID NO: 3997210 - RNA, 16 nt, Human herpesvirus 7
cuuuuauuacucgaaa

SEQ ID NO: 3997211 - RNA, 19 nt, Human herpesvirus 7
cuuuuuucaguguguauuu

SEQ ID NO: 3997212 - RNA, 20 nt, Human herpesvirus 7
gaaaaaaaaaguuaaaagau

SEQ ID NO: 3997213 - RNA, 15 nt, Human herpesvirus 7
gaaaaauguacaaua

SEQ ID NO: 3997214 - RNA, 16 nt, Human herpesvirus 7
gaaaagaaaaagcaac

SEQ ID NO: 3997215 - RNA, 14 nt, Human herpesvirus 7
gaaaagcuuguaua

SEQ ID NO: 3997216 - RNA, 17 nt, Human herpesvirus 7
gaaaaguugcuuuucau

SEQ ID NO: 3997217 - RNA, 13 nt, Human herpesvirus 7
gaaaauaaaagag

SEQ ID NO: 3997218 - RNA, 14 nt, Human herpesvirus 7
gaaaauaaacagga

SEQ ID NO: 3997219 - RNA, 21 nt, Human herpesvirus 7
gaaaauauauuaaucuugaaa

SEQ ID NO: 3997220 - RNA, 16 nt, Human herpesvirus 7
gaaaauaucuucugaa

SEQ ID NO: 3997221 - RNA, 22 nt, Human herpesvirus 7
gaaaaugaugguugcaauacaa

SEQ ID NO: 3997222 - RNA, 20 nt, Human herpesvirus 7
gaaaauuuauauuugcuugc

SEQ ID NO: 3997223 - RNA, 18 nt, Human herpesvirus 7
gaaacaagguuuaaaaca

SEQ ID NO: 3997224 - RNA, 14 nt, Human herpesvirus 7
gaaagcuguuucca

SEQ ID NO: 3997225 - RNA, 14 nt, Human herpesvirus 7
gaaagcuugugaag

SEQ ID NO: 3997226 - RNA, 16 nt, Human herpesvirus 7
gaaagggauuuauuau

SEQ ID NO: 3997227 - RNA, 15 nt, Human herpesvirus 7
gaaagugaaaauauu

SEQ ID NO: 3997228 - RNA, 14 nt, Human herpesvirus 7
gaaauaaugaagga

SEQ ID NO: 3997229 - RNA, 16 nt, Human herpesvirus 7
gaaaucauucugaaua

SEQ ID NO: 3997230 - RNA, 21 nt, Human herpesvirus 7
gaaauccgucaccgacaauau

SEQ ID NO: 3997231 - RNA, 22 nt, Human herpesvirus 7
gaaaugcacuugcucugugaaa

SEQ ID NO: 3997232 - RNA, 19 nt, Human herpesvirus 7
gaacaaaagucgagaaaac

SEQ ID NO: 3997233 - RNA, 14 nt, Human herpesvirus 7
gaacaaauaaugag

SEQ ID NO: 3997234 - RNA, 19 nt, Human herpesvirus 7
gaacaauggugugucugug

SEQ ID NO: 3997235 - RNA, 16 nt, Human herpesvirus 7
gaacagucccagauaa

SEQ ID NO: 3997236 - RNA, 12 nt, Human herpesvirus 7
gaacauaaaaaa

SEQ ID NO: 3997237 - RNA, 15 nt, Human herpesvirus 7
gaacaucuugagaaa

SEQ ID NO: 3997238 - RNA, 18 nt, Human herpesvirus 7
gaacauuaauaucaauuu

SEQ ID NO: 3997239 - RNA, 19 nt, Human herpesvirus 7
gaaccaguuuuacuuuuga

SEQ ID NO: 3997240 - RNA, 21 nt, Human herpesvirus 7
gaacuguuacaacuuugccaa

SEQ ID NO: 3997241 - RNA, 16 nt, Human herpesvirus 7
gaacuguugccagaaa

SEQ ID NO: 3997242 - RNA, 15 nt, Human herpesvirus 7
gaagagguugcuucu

SEQ ID NO: 3997243 - RNA, 19 nt, Human herpesvirus 7
gaauaagcaaauaaauugu

SEQ ID NO: 3997244 - RNA, 20 nt, Human herpesvirus 7
gaaucaagacgcuguaugca

SEQ ID NO: 3997245 - RNA, 23 nt, Human herpesvirus 7
gaaucagacuaaauauggagcag

SEQ ID NO: 3997246 - RNA, 19 nt, Human herpesvirus 7
gaaucauagcaggaagcac

SEQ ID NO: 3997247 - RNA, 20 nt, Human herpesvirus 7
gaaucaucuuaaaaguacaa

SEQ ID NO: 3997248 - RNA, 14 nt, Human herpesvirus 7
gaaucuauuaaaga

SEQ ID NO: 3997249 - RNA, 20 nt, Human herpesvirus 7
gaauuaauaaaacaaacuau

SEQ ID NO: 3997250 - RNA, 12 nt, Human herpesvirus 7
gaauuacagaua

SEQ ID NO: 3997251 - RNA, 22 nt, Human herpesvirus 7
gaauucaucuuaaguaaggaag

SEQ ID NO: 3997252 - RNA, 12 nt, Human herpesvirus 7
gacauugaagau

SEQ ID NO: 3997253 - RNA, 23 nt, Human herpesvirus 7
gacauuguacaauuacaaaaugu

SEQ ID NO: 3997254 - RNA, 14 nt, Human herpesvirus 7
gacgacgucuucuu

SEQ ID NO: 3997255 - RNA, 14 nt, Human herpesvirus 7
gacgaugagcauga

SEQ ID NO: 3997256 - RNA, 14 nt, Human herpesvirus 7
gacggaauuuguau

SEQ ID NO: 3997257 - RNA, 23 nt, Human herpesvirus 7
gacguuaucuaauauuauaucua

SEQ ID NO: 3997258 - RNA, 19 nt, Human herpesvirus 7
gacguuucuagcaaaauau

SEQ ID NO: 3997259 - RNA, 18 nt, Human herpesvirus 7
gagauggauugagugcau

SEQ ID NO: 3997260 - RNA, 13 nt, Human herpesvirus 7
gagauuccaaaga

SEQ ID NO: 3997261 - RNA, 23 nt, Human herpesvirus 7
gagcauauuccauuaagccagau

SEQ ID NO: 3997262 - RNA, 22 nt, Human herpesvirus 7
gagcuguguccacuacagauau

SEQ ID NO: 3997263 - RNA, 15 nt, Human herpesvirus 7
gagcuuuugcaaagc

SEQ ID NO: 3997264 - RNA, 16 nt, Human herpesvirus 7
gaggucuacuggacca

SEQ ID NO: 3997265 - RNA, 14 nt, Human herpesvirus 7
gaguauguugcaua

SEQ ID NO: 3997266 - RNA, 20 nt, Human herpesvirus 7
gaguuguuaaaauuaaaacu

SEQ ID NO: 3997267 - RNA, 15 nt, Human herpesvirus 7
gaguuuaaaguaaaa

SEQ ID NO: 3997268 - RNA, 17 nt, Human herpesvirus 7
gauaauguuuuuuucau

SEQ ID NO: 3997269 - RNA, 17 nt, Human herpesvirus 7
gauaucuuaaaauaugu

SEQ ID NO: 3997270 - RNA, 16 nt, Human herpesvirus 7
gauaugguuugaaaac

SEQ ID NO: 3997271 - RNA, 13 nt, Human herpesvirus 7
gauauuuugacaa

SEQ ID NO: 3997272 - RNA, 13 nt, Human herpesvirus 7
gaugcucucuaau

SEQ ID NO: 3997273 - RNA, 23 nt, Human herpesvirus 7
gauuacgcacaaauuucuuguaa

SEQ ID NO: 3997274 - RNA, 21 nt, Human herpesvirus 7
gauuauauucaaauaagggau

SEQ ID NO: 3997275 - RNA, 19 nt, Human herpesvirus 7
gauuauguuuucugcuaau

SEQ ID NO: 3997276 - RNA, 16 nt, Human herpesvirus 7
gauucuauaaaacgug

SEQ ID NO: 3997277 - RNA, 18 nt, Human herpesvirus 7
gauuucauggacuucaga

SEQ ID NO: 3997278 - RNA, 13 nt, Human herpesvirus 7
gauuuuaaaggaa

SEQ ID NO: 3997279 - RNA, 21 nt, Human herpesvirus 7
gauuuugacauuaguucuggc

SEQ ID NO: 3997280 - RNA, 19 nt, Human herpesvirus 7
gauuuuuaaacuugugaaa

SEQ ID NO: 3997281 - RNA, 23 nt, Human herpesvirus 7
gcaacaaacaaauaauucaaaaa

SEQ ID NO: 3997282 - RNA, 16 nt, Human herpesvirus 7
uuuaagagacauugaa

SEQ ID NO: 3997283 - RNA, 20 nt, Human herpesvirus 7
uuuaagauacauuuuugcaa

SEQ ID NO: 3997284 - RNA, 14 nt, Human herpesvirus 7
uuuaauacaacaua

SEQ ID NO: 3997285 - RNA, 13 nt, Human herpesvirus 7
uuuaauaugugaa

SEQ ID NO: 3997286 - RNA, 17 nt, Human herpesvirus 7
uuuaaugcuuugucuua

SEQ ID NO: 3997287 - RNA, 21 nt, Human herpesvirus 7
uuuaauuuggaaauuguuuga

SEQ ID NO: 3997288 - RNA, 16 nt, Human herpesvirus 7
uuuaccccaaacgccu

SEQ ID NO: 3997289 - RNA, 15 nt, Human herpesvirus 7
uuuaccgguacauuu

SEQ ID NO: 3997290 - RNA, 22 nt, Human herpesvirus 7
uuuagaaguggcuucucuaguu

SEQ ID NO: 3997291 - RNA, 21 nt, Human herpesvirus 7
uuuagcuaauucauuguauga

SEQ ID NO: 3997292 - RNA, 21 nt, Human herpesvirus 7
uuuauuauuuguuuguucugu

SEQ ID NO: 3997293 - RNA, 13 nt, Human herpesvirus 7
uuuauugccuugu

SEQ ID NO: 3997294 - RNA, 23 nt, Human herpesvirus 7
uuuauugguaauuagugaaaacu

SEQ ID NO: 3997295 - RNA, 21 nt, Human herpesvirus 7
uuucaaaauuuuauugucuaa

SEQ ID NO: 3997296 - RNA, 15 nt, Human herpesvirus 7
uuucauaucuaugau

SEQ ID NO: 3997297 - RNA, 20 nt, Human herpesvirus 7
uuuccaucuaccgcgaugaa

SEQ ID NO: 3997298 - RNA, 18 nt, Human herpesvirus 7
uuuccuacaaaaguucug

SEQ ID NO: 3997299 - RNA, 15 nt, Human herpesvirus 7
uuuccucacagauuu

SEQ ID NO: 3997300 - RNA, 16 nt, Human herpesvirus 7
uuucguaucugugacu

SEQ ID NO: 3997301 - RNA, 16 nt, Human herpesvirus 7
uuucuguagacauuuc

SEQ ID NO: 3997302 - RNA, 12 nt, Human herpesvirus 7
uuucuguugacu

SEQ ID NO: 3997303 - RNA, 20 nt, Human herpesvirus 7
uuucuuuaccgauucuaaau

SEQ ID NO: 3997304 - RNA, 17 nt, Human herpesvirus 7
uuugaaaaaaacacuuu

SEQ ID NO: 3997305 - RNA, 16 nt, Human herpesvirus 7
uuugaacuuguuuuga

SEQ ID NO: 3997306 - RNA, 19 nt, Human herpesvirus 7
uuugaagagcguguuuuga

SEQ ID NO: 3997307 - RNA, 18 nt, Human herpesvirus 7
uuugacaagcgcauuugu

SEQ ID NO: 3997308 - RNA, 21 nt, Human herpesvirus 7
uuugauacagauauuuuaauu

SEQ ID NO: 3997309 - RNA, 19 nt, Human herpesvirus 7
uuugaucaaaaucuguaga

SEQ ID NO: 3997310 - RNA, 15 nt, Human herpesvirus 7
uuugaucuacauaua

SEQ ID NO: 3997311 - RNA, 20 nt, Human herpesvirus 7
uuugauuccaucucacuuau

SEQ ID NO: 3997312 - RNA, 23 nt, Human herpesvirus 7
uuugcaaucaugauccugguuaa

SEQ ID NO: 3997313 - RNA, 17 nt, Human herpesvirus 7
uuuggauaguucguaaa

SEQ ID NO: 3997314 - RNA, 18 nt, Human herpesvirus 7
uuuguaaacauuuuugaa

SEQ ID NO: 3997315 - RNA, 19 nt, Human herpesvirus 7
uuuguagcucuagauguuu

SEQ ID NO: 3997316 - RNA, 15 nt, Human herpesvirus 7
uuuguauacaacuuu

SEQ ID NO: 3997317 - RNA, 17 nt, Human herpesvirus 7
uuuuaaacuugugaaaa

SEQ ID NO: 3997318 - RNA, 22 nt, Human herpesvirus 7
uuuuacuucgagaaaauuuagc

SEQ ID NO: 3997319 - RNA, 14 nt, Human herpesvirus 7
uuuucaggaaaauc

SEQ ID NO: 3997320 - RNA, 18 nt, Human herpesvirus 7
uuuucuuaaacaugauuu

SEQ ID NO: 3997321 - RNA, 21 nt, Human herpesvirus 7
uuuucuuagcuuucaugauuu

SEQ ID NO: 3997322 - RNA, 16 nt, Human herpesvirus 7
uuuugaauguuuacau

SEQ ID NO: 3997323 - RNA, 14 nt, Human herpesvirus 7
uuuuggaagguuua

SEQ ID NO: 3997324 - RNA, 20 nt, Human herpesvirus 7
uuuuguacauuuaauaaggu

SEQ ID NO: 3997325 - RNA, 22 nt, Human herpesvirus 7
uuuuugcauauggacuuaucaa

SEQ ID NO: 3997326 - RNA, 21 nt, Human herpesvirus 7
ccagagucucuaaaauuuucu

SEQ ID NO: 3997327 - RNA, 22 nt, Human herpesvirus 7
ccaguucuaucucaaaacaaac

SEQ ID NO: 3997328 - RNA, 22 nt, Human herpesvirus 7
ccauguauugucuuacagcacu

SEQ ID NO: 3997329 - RNA, 18 nt, Human herpesvirus 7
ccauuccguuuuaaauag

SEQ ID NO: 3997330 - RNA, 19 nt, Human herpesvirus 7
ccccuggaacguccucugg

SEQ ID NO: 3997331 - RNA, 18 nt, Human herpesvirus 7
ccgcucuuuuauuuucag

SEQ ID NO: 3997332 - RNA, 18 nt, Human herpesvirus 7
ccguuggcgaucacaaaa

SEQ ID NO: 3997333 - RNA, 21 nt, Human herpesvirus 7
ccuacaaaaguucuguuuuga

SEQ ID NO: 3997334 - RNA, 20 nt, Human herpesvirus 7
ccuaggauaccaaacaaaau

SEQ ID NO: 3997335 - RNA, 13 nt, Human herpesvirus 7
ccucacagauuuu

SEQ ID NO: 3997336 - RNA, 15 nt, Human herpesvirus 7
ccucugccucuuggc

SEQ ID NO: 3997337 - RNA, 19 nt, Human herpesvirus 7
ccugcaauaugcaugugua

SEQ ID NO: 3997338 - RNA, 23 nt, Human herpesvirus 7
ccuuauauuaaaaaccacagagg

SEQ ID NO: 3997339 - RNA, 11 nt, Human herpesvirus 7
ccuugggcaca

SEQ ID NO: 3997340 - RNA, 13 nt, Human herpesvirus 7
cgaacccuggaga

SEQ ID NO: 3997341 - RNA, 14 nt, Human herpesvirus 7
cgaaugacagacac

SEQ ID NO: 3997342 - RNA, 15 nt, Human herpesvirus 7
cgacaauauaaaaga

SEQ ID NO: 3997343 - RNA, 14 nt, Human herpesvirus 7
cgacauaauuuuaa

SEQ ID NO: 3997344 - RNA, 18 nt, Human herpesvirus 7
cgagaaaauuuagcacca

SEQ ID NO: 3997345 - RNA, 20 nt, Human herpesvirus 7
cgauccucagaauguacaca

SEQ ID NO: 3997346 - RNA, 13 nt, Human herpesvirus 7
cgaugauauuguc

SEQ ID NO: 3997347 - RNA, 20 nt, Human herpesvirus 7
cgcauuuuguauuaaaggaa

SEQ ID NO: 3997348 - RNA, 18 nt, Human herpesvirus 7
cgccaaaucuaauuuaug

SEQ ID NO: 3997349 - RNA, 15 nt, Human herpesvirus 7
cgcguuuucaugcuc

SEQ ID NO: 3997350 - RNA, 22 nt, Human herpesvirus 7
cgcuguacaaugcugucucuga

SEQ ID NO: 3997351 - RNA, 11 nt, Human herpesvirus 7
cgcugucuuua

SEQ ID NO: 3997352 - RNA, 13 nt, Human herpesvirus 7
cggauuaagagaa

SEQ ID NO: 3997353 - RNA, 18 nt, Human herpesvirus 7
cgggaggugcuguuucca

SEQ ID NO: 3997354 - RNA, 20 nt, Human herpesvirus 7
cgguacauuuauguauuuua

SEQ ID NO: 3997355 - RNA, 16 nt, Human herpesvirus 7
cggugaauguagaagu

SEQ ID NO: 3997356 - RNA, 13 nt, Human herpesvirus 7
cgucucuuugccu

SEQ ID NO: 3997357 - RNA, 12 nt, Human herpesvirus 7
cguuacuucugu

SEQ ID NO: 3997358 - RNA, 18 nt, Human herpesvirus 7
cguuucuagcaaaauaug

SEQ ID NO: 3997359 - RNA, 12 nt, Human herpesvirus 7
cuaaaaaaauuc

SEQ ID NO: 3997360 - RNA, 18 nt, Human herpesvirus 7
cuaaaaauccuaaauuuc

SEQ ID NO: 3997361 - RNA, 19 nt, Human herpesvirus 7
cuaaagacacuuauuugau

SEQ ID NO: 3997362 - RNA, 12 nt, Human herpesvirus 7
cuaaauuuccuu

SEQ ID NO: 3997363 - RNA, 23 nt, Human herpesvirus 7
cuaaccaucugcuggaaauuugu

SEQ ID NO: 3997364 - RNA, 22 nt, Human herpesvirus 7
cuaagguuuaggaaauugcuuu

SEQ ID NO: 3997365 - RNA, 15 nt, Human herpesvirus 7
cuaaugguuggauuu

SEQ ID NO: 3997366 - RNA, 19 nt, Human herpesvirus 7
cuaauucuggaaaauguga

SEQ ID NO: 3997367 - RNA, 19 nt, Human herpesvirus 7
cuaauugcgcaguguuuaa

SEQ ID NO: 3997368 - RNA, 16 nt, Human herpesvirus 7
cuacaugaauggaucu

SEQ ID NO: 3997369 - RNA, 13 nt, Human herpesvirus 7
cuacuaugggcug

SEQ ID NO: 3997370 - RNA, 13 nt, Human herpesvirus 7
cuagaaaaacacu

SEQ ID NO: 3997371 - RNA, 21 nt, Human herpesvirus 7
cuagcaccgaaaaugguauuu

SEQ ID NO: 3997372 - RNA, 17 nt, Human herpesvirus 7
cuaggucuuccacuguu

SEQ ID NO: 3997373 - RNA, 17 nt, Human herpesvirus 7
cuagugaaacacauucu

SEQ ID NO: 3997374 - RNA, 17 nt, Human herpesvirus 7
cuaguucccauuuucag

SEQ ID NO: 3997375 - RNA, 15 nt, Human herpesvirus 7
cuauauuuuguuaag

SEQ ID NO: 3997376 - RNA, 17 nt, Human herpesvirus 7
cuauucggguaaugucu

SEQ ID NO: 3997377 - RNA, 16 nt, Human herpesvirus 7
cucaauuaaaacaucu

SEQ ID NO: 3997378 - RNA, 16 nt, Human herpesvirus 7
cucagaacuguuuuaa

SEQ ID NO: 3997379 - RNA, 11 nt, Human herpesvirus 7
cucauagcuua

SEQ ID NO: 3997380 - RNA, 17 nt, Human herpesvirus 7
cuccaugcauauuugaa

SEQ ID NO: 3997381 - RNA, 16 nt, Human herpesvirus 7
cucccauucaauaaug

SEQ ID NO: 3997382 - RNA, 13 nt, Human herpesvirus 7
cuccuucuaccuc

SEQ ID NO: 3997383 - RNA, 13 nt, Human herpesvirus 7
cugaaaaaauaaa

SEQ ID NO: 3997384 - RNA, 17 nt, Human herpesvirus 7
cugaaaucaaaaaugug

SEQ ID NO: 3997385 - RNA, 18 nt, Human herpesvirus 7
cugaauagacacauuuau

SEQ ID NO: 3997386 - RNA, 17 nt, Human herpesvirus 7
cugaauccgcauuugag

SEQ ID NO: 3997387 - RNA, 19 nt, Human herpesvirus 7
cugaauugguaauguuacu

SEQ ID NO: 3997388 - RNA, 20 nt, Human herpesvirus 7
cugacauuggaacuuuaugc

SEQ ID NO: 3997389 - RNA, 15 nt, Human herpesvirus 7
cugacauuguacaau

SEQ ID NO: 3997390 - RNA, 17 nt, Human herpesvirus 7
cugagaaaaacagacuu

SEQ ID NO: 3997391 - RNA, 20 nt, Human herpesvirus 7
cugaguaaaacucaauguaa

SEQ ID NO: 3997392 - RNA, 20 nt, Human herpesvirus 7
cugauaaucaagaaacaugu

SEQ ID NO: 3997393 - RNA, 20 nt, Human herpesvirus 7
cugaugauaaucgagaauaa

SEQ ID NO: 3997394 - RNA, 17 nt, Human herpesvirus 7
cugcaaagaaaaaaaug

SEQ ID NO: 3997395 - RNA, 21 nt, Human herpesvirus 7
cugcaaccugauaaauacuca

SEQ ID NO: 3997396 - RNA, 19 nt, Human herpesvirus 7
cugcaacuuugugccugaa

SEQ ID NO: 3997397 - RNA, 12 nt, Human herpesvirus 7
cugccaauuuuu

SEQ ID NO: 3997398 - RNA, 17 nt, Human herpesvirus 7
cugccaccauuucugaa

SEQ ID NO: 3997399 - RNA, 16 nt, Human herpesvirus 7
cugcuaacucauaauu

SEQ ID NO: 3997400 - RNA, 22 nt, Human herpesvirus 7
cugcuaauucuggaaaauguga

SEQ ID NO: 3997401 - RNA, 19 nt, Human herpesvirus 7
cugcuggaaagcuugugaa

SEQ ID NO: 3997402 - RNA, 12 nt, Human herpesvirus 7
cuggaauuguaa

SEQ ID NO: 3997403 - RNA, 17 nt, Human herpesvirus 7
cuggaugauguuauaca

SEQ ID NO: 3997404 - RNA, 14 nt, Human herpesvirus 7
cuggcaauauccca

SEQ ID NO: 3997405 - RNA, 12 nt, Human herpesvirus 7
cugguauguuuu

SEQ ID NO: 3997406 - RNA, 15 nt, Human herpesvirus 7
cuguagaaaauguuu

SEQ ID NO: 3997407 - RNA, 15 nt, Human herpesvirus 7
cuguagauauuuuga

SEQ ID NO: 3997408 - RNA, 22 nt, Human herpesvirus 7
cugucagucaacuuuuuguuca

SEQ ID NO: 3997409 - RNA, 15 nt, Human herpesvirus 7
cuguuaaaaucuguu

SEQ ID NO: 3997410 - RNA, 20 nt, Human herpesvirus 7
cuguuaagaauuccagauuu

SEQ ID NO: 3997411 - RNA, 21 nt, Human herpesvirus 7
cuguugaaacauagcuagaaa

SEQ ID NO: 3997412 - RNA, 18 nt, Human herpesvirus 7
cuguugagucgaaugcau

SEQ ID NO: 3997413 - RNA, 18 nt, Human herpesvirus 7
cuguuuuucaaaaacguu

SEQ ID NO: 3997414 - RNA, 15 nt, Human herpesvirus 7
cuuaaaaaaaggccu

SEQ ID NO: 3997415 - RNA, 23 nt, Human herpesvirus 7
cuuaaauaaagaguguuuucaaa

SEQ ID NO: 3997416 - RNA, 20 nt, Human herpesvirus 7
cuuaauaaaguuuaauucuc

SEQ ID NO: 3997417 - RNA, 22 nt, Human herpesvirus 7
cuuaaugcccguuuucggaaau

SEQ ID NO: 3997418 - RNA, 20 nt, Human herpesvirus 7
cuuauaaccgauauaguuug

SEQ ID NO: 3997419 - RNA, 14 nt, Human herpesvirus 7
cuucaaaaauguuu

SEQ ID NO: 3997420 - RNA, 22 nt, Human herpesvirus 7
cuucagguuguugucauugaaa

SEQ ID NO: 3997421 - RNA, 18 nt, Human herpesvirus 7
cuucauaucugacauuca

SEQ ID NO: 3997422 - RNA, 19 nt, Human herpesvirus 7
cuucuagaaacuaaagaaa

SEQ ID NO: 3997423 - RNA, 21 nt, Human herpesvirus 7
cuucugauaucuuaaaauaug

SEQ ID NO: 3997424 - RNA, 16 nt, Human herpesvirus 7
cuucuuuauaagcagu

SEQ ID NO: 3997425 - RNA, 15 nt, Human herpesvirus 7
cuugacucagauucg

SEQ ID NO: 3997426 - RNA, 23 nt, Human herpesvirus 7
cuugauacaggccuguuucuuga

SEQ ID NO: 3997427 - RNA, 16 nt, Human herpesvirus 7
cuugauuuucuuacac

SEQ ID NO: 3997428 - RNA, 13 nt, Human herpesvirus 7
cuuggcuguucaa

SEQ ID NO: 3997429 - RNA, 20 nt, Human herpesvirus 7
cuugugaaaauaacaggaaa

SEQ ID NO: 3997430 - RNA, 20 nt, Human herpesvirus 7
cuuuaccccaaacgccuuau

SEQ ID NO: 3997431 - RNA, 13 nt, Human herpesvirus 7
cuuuaccgauucu

SEQ ID NO: 3997432 - RNA, 14 nt, Human herpesvirus 7
cuuuauuuaauaac

SEQ ID NO: 3997433 - RNA, 23 nt, Human herpesvirus 7
cuuucacuacuacaugaauggau

SEQ ID NO: 3997434 - RNA, 18 nt, Human herpesvirus 7
cuuugacuguaucuccaa

SEQ ID NO: 3997435 - RNA, 12 nt, Human herpesvirus 7
cuuugucaugau

SEQ ID NO: 3997436 - RNA, 19 nt, Human herpesvirus 7
cuuugucugcugguaauaa

SEQ ID NO: 3997437 - RNA, 13 nt, Human herpesvirus 7
cuuuguuugagac

SEQ ID NO: 3997438 - RNA, 13 nt, Human herpesvirus 7
cuuuucagugaag

SEQ ID NO: 3997439 - RNA, 14 nt, Human herpesvirus 7
cuuuucaugcuuug

SEQ ID NO: 3997440 - RNA, 21 nt, Human herpesvirus 7
cuuuucucuccccaguaaaua

SEQ ID NO: 3997441 - RNA, 16 nt, Human herpesvirus 7
uaacuuuaaauuauua

SEQ ID NO: 3997442 - RNA, 21 nt, Human herpesvirus 7
uaagaaauuuucuuuuggaag

SEQ ID NO: 3997443 - RNA, 12 nt, Human herpesvirus 7
uaagccaaauau

SEQ ID NO: 3997444 - RNA, 16 nt, Human herpesvirus 7
uaauaacaauuugaag

SEQ ID NO: 3997445 - RNA, 19 nt, Human herpesvirus 7
uaauaauuuaaaauuauua

SEQ ID NO: 3997446 - RNA, 14 nt, Human herpesvirus 7
uaauaucaauuuga

SEQ ID NO: 3997447 - RNA, 17 nt, Human herpesvirus 7
uaaucauaguacaucuu

SEQ ID NO: 3997448 - RNA, 17 nt, Human herpesvirus 7
uaaucauggaaaaugga

SEQ ID NO: 3997449 - RNA, 21 nt, Human herpesvirus 7
uaaucgauuaugauguuugua

SEQ ID NO: 3997450 - RNA, 17 nt, Human herpesvirus 7
uaaugaaaaagccauaa

SEQ ID NO: 3997451 - RNA, 19 nt, Human herpesvirus 7
uaaugaaguuuaucuugga

SEQ ID NO: 3997452 - RNA, 15 nt, Human herpesvirus 7
uaaugaauaaaaucu

SEQ ID NO: 3997453 - RNA, 12 nt, Human herpesvirus 7
uaaugucucugu

SEQ ID NO: 3997454 - RNA, 13 nt, Human herpesvirus 7
uaauguuacuaua

SEQ ID NO: 3997455 - RNA, 20 nt, Human herpesvirus 7
uaauucucgcuucaaagaua

SEQ ID NO: 3997456 - RNA, 21 nt, Human herpesvirus 7
uaauuguuuuuuauuuagcua

SEQ ID NO: 3997457 - RNA, 16 nt, Human herpesvirus 7
uaauuucucaaaucaa

SEQ ID NO: 3997458 - RNA, 20 nt, Human herpesvirus 7
uacaaaacaaagauugaagc

SEQ ID NO: 3997459 - RNA, 14 nt, Human herpesvirus 7
uacaaaagacauaa

SEQ ID NO: 3997460 - RNA, 14 nt, Human herpesvirus 7
uacaaaaguucugu

SEQ ID NO: 3997461 - RNA, 19 nt, Human herpesvirus 7
uacaacgacauugaaacuc

SEQ ID NO: 3997462 - RNA, 17 nt, Human herpesvirus 7
uacaaugcugucucuga

SEQ ID NO: 3997463 - RNA, 16 nt, Human herpesvirus 7
uacaauuacaaaaugu

SEQ ID NO: 3997464 - RNA, 20 nt, Human herpesvirus 7
uacagauacgcgcagauuuu

SEQ ID NO: 3997465 - RNA, 13 nt, Human herpesvirus 7
uacagcacuuuga

SEQ ID NO: 3997466 - RNA, 22 nt, Human herpesvirus 7
uaccguuuaaugaaaaagccau

SEQ ID NO: 3997467 - RNA, 14 nt, Human herpesvirus 7
uacuaaucaugaaa

SEQ ID NO: 3997468 - RNA, 18 nt, Human herpesvirus 7
uacucuagaacaaacugu

SEQ ID NO: 3997469 - RNA, 23 nt, Human herpesvirus 7
uacuggaccacguuuuugcagag

SEQ ID NO: 3997470 - RNA, 21 nt, Human herpesvirus 7
uacuuaaggcggacaaauaua

SEQ ID NO: 3997471 - RNA, 18 nt, Human herpesvirus 7
uacuugauuuucuuacac

SEQ ID NO: 3997472 - RNA, 15 nt, Human herpesvirus 7
uacuuggaaacaaau

SEQ ID NO: 3997473 - RNA, 15 nt, Human herpesvirus 7
uacuuuuacuccuca

SEQ ID NO: 3997474 - RNA, 14 nt, Human herpesvirus 7
uagaaaccaaguuu

SEQ ID NO: 3997475 - RNA, 17 nt, Human herpesvirus 7
uagaaacgucccuguga

SEQ ID NO: 3997476 - RNA, 18 nt, Human herpesvirus 7
uagaacaaacuguaccca

SEQ ID NO: 3997477 - RNA, 17 nt, Human herpesvirus 7
uagacguagugucauca

SEQ ID NO: 3997478 - RNA, 12 nt, Human herpesvirus 7
uagagcugaaua

SEQ ID NO: 3997479 - RNA, 12 nt, Human herpesvirus 7
uagaugcaucca

SEQ ID NO: 3997480 - RNA, 17 nt, Human herpesvirus 7
uagauguuuuugauauu

SEQ ID NO: 3997481 - RNA, 19 nt, Human herpesvirus 7
uagcauaugcuggaucuuc

SEQ ID NO: 3997482 - RNA, 15 nt, Human herpesvirus 7
uagccauaaaugcuu

SEQ ID NO: 3997483 - RNA, 15 nt, Human herpesvirus 7
uagccuuucggacac

SEQ ID NO: 3997484 - RNA, 13 nt, Human herpesvirus 7
uaggauaccaaac

SEQ ID NO: 3997485 - RNA, 22 nt, Human herpesvirus 7
uaguauuguaauaauuuaaaau

SEQ ID NO: 3997486 - RNA, 21 nt, Human herpesvirus 7
uagugauagaguacauguguc

SEQ ID NO: 3997487 - RNA, 13 nt, Human herpesvirus 7
uaguuaauugugu

SEQ ID NO: 3997488 - RNA, 19 nt, Human herpesvirus 7
uaguugcaacucuucuuca

SEQ ID NO: 3997489 - RNA, 23 nt, Human herpesvirus 7
uauaauaaaggaaagacaaacua

SEQ ID NO: 3997490 - RNA, 22 nt, Human herpesvirus 7
uauacauacuaaauuucuuaaa

SEQ ID NO: 3997491 - RNA, 15 nt, Human herpesvirus 7
uauacgcuuaaaauu

SEQ ID NO: 3997492 - RNA, 15 nt, Human herpesvirus 7
uauagaucuugacuc

SEQ ID NO: 3997493 - RNA, 17 nt, Human herpesvirus 7
uauauccaauaaugcau

SEQ ID NO: 3997494 - RNA, 14 nt, Human herpesvirus 7
uauaugaaauuuca

SEQ ID NO: 3997495 - RNA, 19 nt, Human herpesvirus 7
uauaugaagaauguaugaa

SEQ ID NO: 3997496 - RNA, 20 nt, Human herpesvirus 7
uauccacgcgggguuaaaaa

SEQ ID NO: 3997497 - RNA, 14 nt, Human herpesvirus 7
uaucgcguuuucau

SEQ ID NO: 3997498 - RNA, 15 nt, Human herpesvirus 7
uaucuccauucuaaa

SEQ ID NO: 3997499 - RNA, 20 nt, Human herpesvirus 7
uaucuccuaaaugaauuuua

SEQ ID NO: 3997500 - RNA, 18 nt, Human herpesvirus 7
uaucucuguaaaacguuc

SEQ ID NO: 3997501 - RNA, 16 nt, Human herpesvirus 7
uaucuuuucaaaggaa

SEQ ID NO: 3997502 - RNA, 21 nt, Human herpesvirus 7
uaugaaaagcccaaacuguuu

SEQ ID NO: 3997503 - RNA, 15 nt, Human herpesvirus 7
uaugaguuugauugu

SEQ ID NO: 3997504 - RNA, 16 nt, Human herpesvirus 7
uauguauuuuacugga

SEQ ID NO: 3997505 - RNA, 21 nt, Human herpesvirus 7
uauuaacaagcacacuaaaaa

SEQ ID NO: 3997506 - RNA, 21 nt, Human herpesvirus 7
uauuaaguguuugcucugaaa

SEQ ID NO: 3997507 - RNA, 18 nt, Human herpesvirus 7
uauuagauuauacaaauc

SEQ ID NO: 3997508 - RNA, 19 nt, Human herpesvirus 7
uauucaaauuccuccugaa

SEQ ID NO: 3997509 - RNA, 16 nt, Human herpesvirus 7
uauugaaaauuuauug

SEQ ID NO: 3997510 - RNA, 19 nt, Human herpesvirus 7
uauuuaaugguuuuaaaau

SEQ ID NO: 3997511 - RNA, 23 nt, Human herpesvirus 7
uauuuagacuuuuuucuuuaaau

SEQ ID NO: 3997512 - RNA, 22 nt, Human herpesvirus 7
uauuucgguuggaaaugaugau

SEQ ID NO: 3997513 - RNA, 20 nt, Human herpesvirus 7
uauuuuuuaaagaaaagcuu

SEQ ID NO: 3997514 - RNA, 14 nt, Human herpesvirus 7
ucaaaucaauguga

SEQ ID NO: 3997515 - RNA, 23 nt, Human herpesvirus 7
ucaaauuccuccugaaaauuugu

SEQ ID NO: 3997516 - RNA, 19 nt, Human herpesvirus 7
ucaaauuuaucucauagcu

SEQ ID NO: 3997517 - RNA, 22 nt, Human herpesvirus 7
ucaacagagcgcuuugcuuauu

SEQ ID NO: 3997518 - RNA, 22 nt, Human herpesvirus 7
ucaagaaauaaugaaggauggc

SEQ ID NO: 3997519 - RNA, 14 nt, Human herpesvirus 7
ucaagcacaaucac

SEQ ID NO: 3997520 - RNA, 16 nt, Human herpesvirus 7
ucaauaaaugguuuua

SEQ ID NO: 3997521 - RNA, 15 nt, Human herpesvirus 7
ucaaugcaucuuuaa

SEQ ID NO: 3997522 - RNA, 13 nt, Human herpesvirus 7
ucacaauggaaag

SEQ ID NO: 3997523 - RNA, 14 nt, Human herpesvirus 7
ucacagacgcauca

SEQ ID NO: 3997524 - RNA, 15 nt, Human herpesvirus 7
ucacauugucacugc

SEQ ID NO: 3997525 - RNA, 21 nt, Human herpesvirus 7
ucaccaaagaguauacaaaag

SEQ ID NO: 3997526 - RNA, 20 nt, Human herpesvirus 7
ucagaaaaaaucaaaacauu

SEQ ID NO: 3997527 - RNA, 17 nt, Human herpesvirus 7
ucagaaauguuacuuaa

SEQ ID NO: 3997528 - RNA, 14 nt, Human herpesvirus 7
ucagaauuuccaga

SEQ ID NO: 3997529 - RNA, 23 nt, Human herpesvirus 7
ucaguacaacgacauugaaacuc

SEQ ID NO: 3997530 - RNA, 13 nt, Human herpesvirus 7
ucauaccauaaau

SEQ ID NO: 3997531 - RNA, 16 nt, Human herpesvirus 7
ucauagagaaaacauu

SEQ ID NO: 3997532 - RNA, 14 nt, Human herpesvirus 7
ucauagguugcuau

SEQ ID NO: 3997533 - RNA, 20 nt, Human herpesvirus 7
ucauccaaaaagaaacuuuc

SEQ ID NO: 3997534 - RNA, 18 nt, Human herpesvirus 7
ucaugcgauaucugacug

SEQ ID NO: 3997535 - RNA, 19 nt, Human herpesvirus 7
ucaugcggaagaacaagca

SEQ ID NO: 3997536 - RNA, 14 nt, Human herpesvirus 7
ucauuguacauuuu

SEQ ID NO: 3997537 - RNA, 22 nt, Human herpesvirus 7
ucauuuaucaggugcucuaaau

SEQ ID NO: 3997538 - RNA, 21 nt, Human herpesvirus 7
uccaaucauaauuuucaugaa

SEQ ID NO: 3997539 - RNA, 15 nt, Human herpesvirus 7
uccacucuccugaaa

SEQ ID NO: 3997540 - RNA, 17 nt, Human herpesvirus 7
uccagauaugacaaauu

SEQ ID NO: 3997541 - RNA, 22 nt, Human herpesvirus 7
uccaucuuaugauaaagaaaac

SEQ ID NO: 3997542 - RNA, 17 nt, Human herpesvirus 7
ucccaugccuauucaaa

SEQ ID NO: 3997543 - RNA, 24 nt, Human herpesvirus 7
uccugcaauaauaaacauuguguu

SEQ ID NO: 3997544 - RNA, 19 nt, Human herpesvirus 7
uccuuauauuaaaaaccac

SEQ ID NO: 3997545 - RNA, 23 nt, Human herpesvirus 7
uccuuugauagggauucuuugaa

SEQ ID NO: 3997546 - RNA, 23 nt, Human herpesvirus 7
ucgauguuuuaucuaacacugca

SEQ ID NO: 3997547 - RNA, 13 nt, Human herpesvirus 7
ucgcugaugaaaa

SEQ ID NO: 3997548 - RNA, 19 nt, Human herpesvirus 7
ucgcuuggguuugaucgag

SEQ ID NO: 3997549 - RNA, 21 nt, Human herpesvirus 7
ucguaacgaauaaaaaguuuu

SEQ ID NO: 3997550 - RNA, 15 nt, Human herpesvirus 7
ucuaaaaaacaaaaa

SEQ ID NO: 3997551 - RNA, 17 nt, Human herpesvirus 7
ucuaacacugcaagcug

SEQ ID NO: 3997552 - RNA, 22 nt, Human herpesvirus 7
ucuaaccccgcucuuuuauuuu

SEQ ID NO: 3997553 - RNA, 15 nt, Human herpesvirus 7
ucuaauugcagacua

SEQ ID NO: 3997554 - RNA, 23 nt, Human herpesvirus 7
ucuaccucuuacauuugauuuua

SEQ ID NO: 3997555 - RNA, 17 nt, Human herpesvirus 7
uuuuuguuguuuucaua

SEQ ID NO: 3997556 - RNA, 19 nt, Human herpesvirus 7
ugaauuuuaaguggaaucu

SEQ ID NO: 3997557 - RNA, 19 nt, Human herpesvirus 7
ugacagauuuaagugcaca

SEQ ID NO: 3997558 - RNA, 22 nt, Human herpesvirus 7
ugacauuguacaauuacaaaau

SEQ ID NO: 3997559 - RNA, 13 nt, Human herpesvirus 7
ugacccugucaca

SEQ ID NO: 3997560 - RNA, 16 nt, Human herpesvirus 7
ugacgaagcuaaacuu

SEQ ID NO: 3997561 - RNA, 22 nt, Human herpesvirus 7
ugacucagauucgacuucuaaa

SEQ ID NO: 3997562 - RNA, 21 nt, Human herpesvirus 7
ugacuccuuuuuuucugcucg

SEQ ID NO: 3997563 - RNA, 14 nt, Human herpesvirus 7
ugacuguaucucca

SEQ ID NO: 3997564 - RNA, 21 nt, Human herpesvirus 7
ugagaaucauagcaggaagca

SEQ ID NO: 3997565 - RNA, 17 nt, Human herpesvirus 7
ugagacucacuccuugc

SEQ ID NO: 3997566 - RNA, 22 nt, Human herpesvirus 7
ugaggaaaugucuuugucauga

SEQ ID NO: 3997567 - RNA, 18 nt, Human herpesvirus 7
ugaguauaacucaaaaga

SEQ ID NO: 3997568 - RNA, 16 nt, Human herpesvirus 7
ugauaaugaaacuguu

SEQ ID NO: 3997569 - RNA, 18 nt, Human herpesvirus 7
ugauagccauaaaugcuu

SEQ ID NO: 3997570 - RNA, 15 nt, Human herpesvirus 7
ugauccugcuauuca

SEQ ID NO: 3997571 - RNA, 23 nt, Human herpesvirus 7
ugaucuugucaaaaaaaauuaaa

SEQ ID NO: 3997572 - RNA, 17 nt, Human herpesvirus 7
ugauuguggggcauuca

SEQ ID NO: 3997573 - RNA, 19 nt, Human herpesvirus 7
ugcaacauaaccaaugcug

SEQ ID NO: 3997574 - RNA, 21 nt, Human herpesvirus 7
ugcaauaugcuagaagacugc

SEQ ID NO: 3997575 - RNA, 19 nt, Human herpesvirus 7
ugcaauuuucacaauggaa

SEQ ID NO: 3997576 - RNA, 22 nt, Human herpesvirus 7
ugcaguuauuucuuauuggaga

SEQ ID NO: 3997577 - RNA, 15 nt, Human herpesvirus 7
ugcauauuugaacau

SEQ ID NO: 3997578 - RNA, 12 nt, Human herpesvirus 7
ugcaugaaaucu

SEQ ID NO: 3997579 - RNA, 18 nt, Human herpesvirus 7
ugcaugcuaauauuucca

SEQ ID NO: 3997580 - RNA, 17 nt, Human herpesvirus 7
ugcgaauacuuguugag

SEQ ID NO: 3997581 - RNA, 15 nt, Human herpesvirus 7
ugcgcggauuaagag

SEQ ID NO: 3997582 - RNA, 13 nt, Human herpesvirus 7
ugcggaagaacaa

SEQ ID NO: 3997583 - RNA, 12 nt, Human herpesvirus 7
ugcgucucuuug

SEQ ID NO: 3997584 - RNA, 13 nt, Human herpesvirus 7
ugcuaugaaaauu

SEQ ID NO: 3997585 - RNA, 17 nt, Human herpesvirus 7
ugcuauuauuaaagcuu

SEQ ID NO: 3997586 - RNA, 12 nt, Human herpesvirus 7
ugcucaaaucaa

SEQ ID NO: 3997587 - RNA, 21 nt, Human herpesvirus 7
ugcuggcucaagcacaaucac

SEQ ID NO: 3997588 - RNA, 21 nt, Human herpesvirus 7
ugcugucuuggaguauuacca

SEQ ID NO: 3997589 - RNA, 22 nt, Human herpesvirus 7
ugcuuacgugaugccauaauuu

SEQ ID NO: 3997590 - RNA, 23 nt, Human herpesvirus 7
ugcuuccuaaaaaaaaaggaaaa

SEQ ID NO: 3997591 - RNA, 21 nt, Human herpesvirus 7
ugcuuuagaauuagagugcuu

SEQ ID NO: 3997592 - RNA, 14 nt, Human herpesvirus 7
uggaacaugaaaac

SEQ ID NO: 3997593 - RNA, 17 nt, Human herpesvirus 7
uggagaccgcacaggcu

SEQ ID NO: 3997594 - RNA, 21 nt, Human herpesvirus 7
uggauaaccaaacuauauuga

SEQ ID NO: 3997595 - RNA, 21 nt, Human herpesvirus 7
uggaucuucugcuaacucaua

SEQ ID NO: 3997596 - RNA, 17 nt, Human herpesvirus 7
ugggcguaacugugacg

SEQ ID NO: 3997597 - RNA, 19 nt, Human herpesvirus 7
uggguaauuuuaaaacuga

SEQ ID NO: 3997598 - RNA, 15 nt, Human herpesvirus 7
ugguaaaaaaguuug

SEQ ID NO: 3997599 - RNA, 15 nt, Human herpesvirus 7
ugguaauaauagugg

SEQ ID NO: 3997600 - RNA, 21 nt, Human herpesvirus 7
uggugcucaaacguucuuggu

SEQ ID NO: 3997601 - RNA, 18 nt, Human herpesvirus 7
ugguugauuugagcagug

SEQ ID NO: 3997602 - RNA, 16 nt, Human herpesvirus 7
uguaaaaaaaaguugu

SEQ ID NO: 3997603 - RNA, 19 nt, Human herpesvirus 7
uguaaccuuggcuguucaa

SEQ ID NO: 3997604 - RNA, 17 nt, Human herpesvirus 7
uguaacuguuuuucaaa

SEQ ID NO: 3997605 - RNA, 13 nt, Human herpesvirus 7
uguaaguaaauuu

SEQ ID NO: 3997606 - RNA, 17 nt, Human herpesvirus 7
uguacgauuuauaucug

SEQ ID NO: 3997607 - RNA, 17 nt, Human herpesvirus 7
uguagacguagugucau

SEQ ID NO: 3997608 - RNA, 15 nt, Human herpesvirus 7
uguaguuuuugcaua

SEQ ID NO: 3997609 - RNA, 22 nt, Human herpesvirus 7
uguauaaucuuaauguuucuga

SEQ ID NO: 3997610 - RNA, 19 nt, Human herpesvirus 7
uguaucaauauucgaauuu

SEQ ID NO: 3997611 - RNA, 13 nt, Human herpesvirus 7
uguauuugucucu

SEQ ID NO: 3997612 - RNA, 23 nt, Human herpesvirus 7
ugucagaguuuaaaguaaaauua

SEQ ID NO: 3997613 - RNA, 21 nt, Human herpesvirus 7
ugucucuugaagaacaacaug

SEQ ID NO: 3997614 - RNA, 13 nt, Human herpesvirus 7
ugucugauucuua

SEQ ID NO: 3997615 - RNA, 22 nt, Human herpesvirus 7
ugucuucggccuugcugaagau

SEQ ID NO: 3997616 - RNA, 15 nt, Human herpesvirus 7
ugugaaaauaaacag

SEQ ID NO: 3997617 - RNA, 18 nt, Human herpesvirus 7
ugugaaaauaaacaggaa

SEQ ID NO: 3997618 - RNA, 20 nt, Human herpesvirus 7
ugugaagucuuuauaaagga

SEQ ID NO: 3997619 - RNA, 16 nt, Human herpesvirus 7
ugugaaguuugcugaa

SEQ ID NO: 3997620 - RNA, 15 nt, Human herpesvirus 7
ugugacccugucaca

SEQ ID NO: 3997621 - RNA, 16 nt, Human herpesvirus 7
ugugagugaacauuug

SEQ ID NO: 3997622 - RNA, 17 nt, Human herpesvirus 7
uguguacuaaagccaau

SEQ ID NO: 3997623 - RNA, 12 nt, Human herpesvirus 7
uguguuggaaac

SEQ ID NO: 3997624 - RNA, 23 nt, Human herpesvirus 7
uguuaaaacuuggauaaccaaac

SEQ ID NO: 3997625 - RNA, 20 nt, Human herpesvirus 7
uguuacagcuuucauuauuu

SEQ ID NO: 3997626 - RNA, 19 nt, Human herpesvirus 7
uguuacaucauguuaaaaa

SEQ ID NO: 3997627 - RNA, 15 nt, Human herpesvirus 7
uguuacaugaucuug

SEQ ID NO: 3997628 - RNA, 14 nt, Human herpesvirus 7
uguuccauucaaua

SEQ ID NO: 3997629 - RNA, 18 nt, Human herpesvirus 7
uguuccuuauauuaaaaa

SEQ ID NO: 3997630 - RNA, 17 nt, Human herpesvirus 7
uguugaaguugaacaau

SEQ ID NO: 3997631 - RNA, 13 nt, Human herpesvirus 7
uguuuaaaauguu

SEQ ID NO: 3997632 - RNA, 20 nt, Human herpesvirus 7
uguuuaaauuacaguaaauu

SEQ ID NO: 3997633 - RNA, 16 nt, Human herpesvirus 7
uguuuaagacauuauu

SEQ ID NO: 3997634 - RNA, 12 nt, Human herpesvirus 7
uguuuacacauu

SEQ ID NO: 3997635 - RNA, 15 nt, Human herpesvirus 7
uguuuggcaacucuu

SEQ ID NO: 3997636 - RNA, 22 nt, Human herpesvirus 7
uguuuucaaauaucucuguuuu

SEQ ID NO: 3997637 - RNA, 13 nt, Human herpesvirus 7
uuaaaaauauuca

SEQ ID NO: 3997638 - RNA, 18 nt, Human herpesvirus 7
uuaaaacauuuacaaaaa

SEQ ID NO: 3997639 - RNA, 15 nt, Human herpesvirus 7
uuaaaaguucauaau

SEQ ID NO: 3997640 - RNA, 17 nt, Human herpesvirus 7
uuaaaauuaaaacuugg

SEQ ID NO: 3997641 - RNA, 14 nt, Human herpesvirus 7
uuaaaauuauuaau

SEQ ID NO: 3997642 - RNA, 22 nt, Human herpesvirus 7
uuaaaauucucuauuguucuuu

SEQ ID NO: 3997643 - RNA, 13 nt, Human herpesvirus 7
uuaaacuuaucag

SEQ ID NO: 3997644 - RNA, 22 nt, Human herpesvirus 7
uuaaaucaguuguuggaaauac

SEQ ID NO: 3997645 - RNA, 18 nt, Human herpesvirus 7
uuaaauccgugaaugcug

SEQ ID NO: 3997646 - RNA, 20 nt, Human herpesvirus 7
uuaacaugaguacuguuucu

SEQ ID NO: 3997647 - RNA, 14 nt, Human herpesvirus 7
uuaacgaaugacag

SEQ ID NO: 3997648 - RNA, 14 nt, Human herpesvirus 7
uuaagaaauaaaag

SEQ ID NO: 3997649 - RNA, 20 nt, Human herpesvirus 7
uuaagcuuuuguaaacauga

SEQ ID NO: 3997650 - RNA, 19 nt, Human herpesvirus 7
uuaaucauaucuugcuuag

SEQ ID NO: 3997651 - RNA, 22 nt, Human herpesvirus 7
uuaauuauucggugucuucuug

SEQ ID NO: 3997652 - RNA, 20 nt, Human herpesvirus 7
uuacaacuuugccaaugcca

SEQ ID NO: 3997653 - RNA, 13 nt, Human herpesvirus 7
uuacacugauuuu

SEQ ID NO: 3997654 - RNA, 20 nt, Human herpesvirus 7
uuacagccuguacaaauuuc

SEQ ID NO: 3997655 - RNA, 21 nt, Human herpesvirus 7
uuacgaaacaauuucacagac

SEQ ID NO: 3997656 - RNA, 17 nt, Human herpesvirus 7
uuacuuacgugaguguu

SEQ ID NO: 3997657 - RNA, 14 nt, Human herpesvirus 7
uuacuuauuuuaaa

SEQ ID NO: 3997658 - RNA, 17 nt, Human herpesvirus 7
uuagaaaaaaaacauua

SEQ ID NO: 3997659 - RNA, 20 nt, Human herpesvirus 7
uuagaugcauccaaagaaaa

SEQ ID NO: 3997660 - RNA, 21 nt, Human herpesvirus 7
uuaguacuuuuucuggaaugu

SEQ ID NO: 3997661 - RNA, 21 nt, Human herpesvirus 7
uuagucggcacacguacaaua

SEQ ID NO: 3997662 - RNA, 17 nt, Human herpesvirus 7
uuauaagaauuuggaua

SEQ ID NO: 3997663 - RNA, 17 nt, Human herpesvirus 7
uuauaauacuggcaugu

SEQ ID NO: 3997664 - RNA, 22 nt, Human herpesvirus 7
uuaucauacguuuacaguuuuu

SEQ ID NO: 3997665 - RNA, 16 nt, Human herpesvirus 7
uuaucugcauugauuu

SEQ ID NO: 3997666 - RNA, 17 nt, Human herpesvirus 7
uuaucuggagaacaauu

SEQ ID NO: 3997667 - RNA, 18 nt, Human herpesvirus 7
uuauggauacaaggaaaa

SEQ ID NO: 3997668 - RNA, 20 nt, Human herpesvirus 7
uuauguccgcuuacaagaug

SEQ ID NO: 3997669 - RNA, 15 nt, Human herpesvirus 7
uuauguguacacuuu

SEQ ID NO: 3997670 - RNA, 19 nt, Human herpesvirus 7
uuauuaauuuuuaauucuu

SEQ ID NO: 3997671 - RNA, 20 nt, Human herpesvirus 7
uucaaaaaccgggcuuuuuu

SEQ ID NO: 3997672 - RNA, 17 nt, Human herpesvirus 7
augaugacaaaaaauuu

SEQ ID NO: 3997673 - RNA, 14 nt, Human herpesvirus 7
augauggaaagcaa

SEQ ID NO: 3997674 - RNA, 20 nt, Human herpesvirus 7
augauugguaaaaaauuacu

SEQ ID NO: 3997675 - RNA, 18 nt, Human herpesvirus 7
augauuuaauauagaaau

SEQ ID NO: 3997676 - RNA, 21 nt, Human herpesvirus 7
augcaagaaaguccaaaguga

SEQ ID NO: 3997677 - RNA, 20 nt, Human herpesvirus 7
augcagaccguaaaacaauc

SEQ ID NO: 3997678 - RNA, 15 nt, Human herpesvirus 7
augcagacugcgcuu

SEQ ID NO: 3997679 - RNA, 14 nt, Human herpesvirus 7
augcauccaaagaa

SEQ ID NO: 3997680 - RNA, 19 nt, Human herpesvirus 7
augccacaaaaaacuuuga

SEQ ID NO: 3997681 - RNA, 15 nt, Human herpesvirus 7
augccagaaauuaaa

SEQ ID NO: 3997682 - RNA, 17 nt, Human herpesvirus 7
augccugcaauaugcau

SEQ ID NO: 3997683 - RNA, 18 nt, Human herpesvirus 7
augccuugccaaaagcuu

SEQ ID NO: 3997684 - RNA, 15 nt, Human herpesvirus 7
augcuuuaacuggaa

SEQ ID NO: 3997685 - RNA, 14 nt, Human herpesvirus 7
auggauacaaggaa

SEQ ID NO: 3997686 - RNA, 16 nt, Human herpesvirus 7
auggauacaaggaaaa

SEQ ID NO: 3997687 - RNA, 13 nt, Human herpesvirus 7
auggaugugcaca

SEQ ID NO: 3997688 - RNA, 22 nt, Human herpesvirus 7
auggggcauuaauucuuucagu

SEQ ID NO: 3997689 - RNA, 13 nt, Human herpesvirus 7
augguaagcaaaa

SEQ ID NO: 3997690 - RNA, 20 nt, Human herpesvirus 7
augguaagcaaaaaaaggua

SEQ ID NO: 3997691 - RNA, 17 nt, Human herpesvirus 7
auguacaauuugcauaa

SEQ ID NO: 3997692 - RNA, 20 nt, Human herpesvirus 7
auguaugaaaaaaacauuau

SEQ ID NO: 3997693 - RNA, 21 nt, Human herpesvirus 7
augucuaaaaguacaguguau

SEQ ID NO: 3997694 - RNA, 16 nt, Human herpesvirus 7
augucugauucuuauu

SEQ ID NO: 3997695 - RNA, 12 nt, Human herpesvirus 7
augugaaaagaa

SEQ ID NO: 3997696 - RNA, 17 nt, Human herpesvirus 7
augugaaaauaaacagg

SEQ ID NO: 3997697 - RNA, 15 nt, Human herpesvirus 7
auguuacccaaaaug

SEQ ID NO: 3997698 - RNA, 14 nt, Human herpesvirus 7
auguugcaaauguu

SEQ ID NO: 3997699 - RNA, 21 nt, Human herpesvirus 7
auguuuuagaccuaucaaauu

SEQ ID NO: 3997700 - RNA, 18 nt, Human herpesvirus 7
auuaaaauguacauaacu

SEQ ID NO: 3997701 - RNA, 15 nt, Human herpesvirus 7
auuaaacgaacucuu

SEQ ID NO: 3997702 - RNA, 12 nt, Human herpesvirus 7
auuaaguguuug

SEQ ID NO: 3997703 - RNA, 18 nt, Human herpesvirus 7
auuaauguaauuuaugau

SEQ ID NO: 3997704 - RNA, 16 nt, Human herpesvirus 7
auuaauucuagcagcu

SEQ ID NO: 3997705 - RNA, 13 nt, Human herpesvirus 7
auuaauugcagcu

SEQ ID NO: 3997706 - RNA, 19 nt, Human herpesvirus 7
auuacauugcagucaaaga

SEQ ID NO: 3997707 - RNA, 18 nt, Human herpesvirus 7
auuagauuccauuuaaau

SEQ ID NO: 3997708 - RNA, 17 nt, Human herpesvirus 7
auuagcgcgugaacaaa

SEQ ID NO: 3997709 - RNA, 14 nt, Human herpesvirus 7
auuauaagaaucug

SEQ ID NO: 3997710 - RNA, 19 nt, Human herpesvirus 7
auuauauccaauaaugcau

SEQ ID NO: 3997711 - RNA, 17 nt, Human herpesvirus 7
auuauaucuaaagugga

SEQ ID NO: 3997712 - RNA, 19 nt, Human herpesvirus 7
auuauaucuuaauaaaguu

SEQ ID NO: 3997713 - RNA, 16 nt, Human herpesvirus 7
auuauauucaaauaag

SEQ ID NO: 3997714 - RNA, 16 nt, Human herpesvirus 7
auuauuaaagcuuuca

SEQ ID NO: 3997715 - RNA, 20 nt, Human herpesvirus 7
auucaaucaccaaagaguau

SEQ ID NO: 3997716 - RNA, 14 nt, Human herpesvirus 7
auucaaucugcaaa

SEQ ID NO: 3997717 - RNA, 17 nt, Human herpesvirus 7
auucaaugcuaguguuc

SEQ ID NO: 3997718 - RNA, 18 nt, Human herpesvirus 7
auucauuugugaaauuga

SEQ ID NO: 3997719 - RNA, 16 nt, Human herpesvirus 7
auuccaaaauguaaac

SEQ ID NO: 3997720 - RNA, 17 nt, Human herpesvirus 7
auuccuucuaaauucuu

SEQ ID NO: 3997721 - RNA, 15 nt, Human herpesvirus 7
auucuaauauguaug

SEQ ID NO: 3997722 - RNA, 18 nt, Human herpesvirus 7
auucuacauagaaaucuu

SEQ ID NO: 3997723 - RNA, 16 nt, Human herpesvirus 7
auucugaauaaaagua

SEQ ID NO: 3997724 - RNA, 14 nt, Human herpesvirus 7
auucuugucaacuu

SEQ ID NO: 3997725 - RNA, 12 nt, Human herpesvirus 7
auucuuucaguu

SEQ ID NO: 3997726 - RNA, 13 nt, Human herpesvirus 7
auucuuuguacuu

SEQ ID NO: 3997727 - RNA, 21 nt, Human herpesvirus 7
auucuuuugcgggaaaaaacg

SEQ ID NO: 3997728 - RNA, 12 nt, Human herpesvirus 7
auugaaaguaaa

SEQ ID NO: 3997729 - RNA, 23 nt, Human herpesvirus 7
auugaauggaacauguuuguaaa

SEQ ID NO: 3997730 - RNA, 14 nt, Human herpesvirus 7
auugauuauaugca

SEQ ID NO: 3997731 - RNA, 14 nt, Human herpesvirus 7
auugcagucaaaga

SEQ ID NO: 3997732 - RNA, 14 nt, Human herpesvirus 7
auugccgauuccua

SEQ ID NO: 3997733 - RNA, 14 nt, Human herpesvirus 7
auugcuuuuagaaa

SEQ ID NO: 3997734 - RNA, 19 nt, Human herpesvirus 7
auuggcaugcuuacaguga

SEQ ID NO: 3997735 - RNA, 14 nt, Human herpesvirus 7
auugguaauuagug

SEQ ID NO: 3997736 - RNA, 15 nt, Human herpesvirus 7
auuguaaauggcaaa

SEQ ID NO: 3997737 - RNA, 23 nt, Human herpesvirus 7
auuguagauggcaccaauagaaa

SEQ ID NO: 3997738 - RNA, 16 nt, Human herpesvirus 7
auuguccuuucaacga

SEQ ID NO: 3997739 - RNA, 23 nt, Human herpesvirus 7
auuuacuaucgacaaacagaaaa

SEQ ID NO: 3997740 - RNA, 18 nt, Human herpesvirus 7
auuuauauuugcuugcug

SEQ ID NO: 3997741 - RNA, 18 nt, Human herpesvirus 7
auuucagaauuuccagaa

SEQ ID NO: 3997742 - RNA, 19 nt, Human herpesvirus 7
uaacauggaaauucagaau

SEQ ID NO: 3997743 - RNA, 22 nt, Human herpesvirus 7
uaagaaaaaucauuuuuaaaaa

SEQ ID NO: 3997744 - RNA, 16 nt, Human herpesvirus 7
uaagaaagaacauuuu

SEQ ID NO: 3997745 - RNA, 12 nt, Human herpesvirus 7
uaagaaucuauu

SEQ ID NO: 3997746 - RNA, 20 nt, Human herpesvirus 7
uaagcaguuauaugaaauuu

SEQ ID NO: 3997747 - RNA, 18 nt, Human herpesvirus 7
uaaguauuuuacaacaau

SEQ ID NO: 3997748 - RNA, 23 nt, Human herpesvirus 7
uaagugaacuguuacaguuaaag

SEQ ID NO: 3997749 - RNA, 17 nt, Human herpesvirus 7
uaagugauacugaaucu

SEQ ID NO: 3997750 - RNA, 20 nt, Human herpesvirus 7
uaauaaaaauuacucaugaa

SEQ ID NO: 3997751 - RNA, 18 nt, Human herpesvirus 7
uaauaaaacaaacuaugu

SEQ ID NO: 3997752 - RNA, 19 nt, Human herpesvirus 7
uaauaaaaguaucauuaaa

SEQ ID NO: 3997753 - RNA, 23 nt, Human herpesvirus 7
uaauacauggggcauuaauucuu

SEQ ID NO: 3997754 - RNA, 17 nt, Human herpesvirus 7
uaauacucagaugugga

SEQ ID NO: 3997755 - RNA, 22 nt, Human herpesvirus 7
uaauaucaauuugaauauugcu

SEQ ID NO: 3997756 - RNA, 16 nt, Human herpesvirus 7
uaauaugugaaaauaa

SEQ ID NO: 3997757 - RNA, 22 nt, Human herpesvirus 7
uaauauuuuaccgguacauuua

SEQ ID NO: 3997758 - RNA, 15 nt, Human herpesvirus 7
uaaugaaaaagccau

SEQ ID NO: 3997759 - RNA, 16 nt, Human herpesvirus 7
uaaugauguaauguug

SEQ ID NO: 3997760 - RNA, 14 nt, Human herpesvirus 7
uaauguaauuuaug

SEQ ID NO: 3997761 - RNA, 13 nt, Human herpesvirus 7
uaauuaaaguugc

SEQ ID NO: 3997762 - RNA, 23 nt, Human herpesvirus 7
uaauuuccacguuuuuuagcuuu

SEQ ID NO: 3997763 - RNA, 23 nt, Human herpesvirus 7
uaauuucucaaaucuuuaagaau

SEQ ID NO: 3997764 - RNA, 20 nt, Human herpesvirus 7
uaauuuggaaauuguuugau

SEQ ID NO: 3997765 - RNA, 13 nt, Human herpesvirus 7
uacaauaaugcug

SEQ ID NO: 3997766 - RNA, 13 nt, Human herpesvirus 7
uacaaugcagccu

SEQ ID NO: 3997767 - RNA, 21 nt, Human herpesvirus 7
uacaaugcugucucugaggag

SEQ ID NO: 3997768 - RNA, 20 nt, Human herpesvirus 7
uacacaaauugauccugcua

SEQ ID NO: 3997769 - RNA, 15 nt, Human herpesvirus 7
uacacuuuuguccug

SEQ ID NO: 3997770 - RNA, 19 nt, Human herpesvirus 7
uacagaucauuuuucgacu

SEQ ID NO: 3997771 - RNA, 18 nt, Human herpesvirus 7
uacauaaguuaaaucagu

SEQ ID NO: 3997772 - RNA, 14 nt, Human herpesvirus 7
uacauccuuaaauu

SEQ ID NO: 3997773 - RNA, 17 nt, Human herpesvirus 7
uacauggacauaagaau

SEQ ID NO: 3997774 - RNA, 12 nt, Human herpesvirus 7
uacauucucaaa

SEQ ID NO: 3997775 - RNA, 20 nt, Human herpesvirus 7
uacauugcagucaaagauuu

SEQ ID NO: 3997776 - RNA, 13 nt, Human herpesvirus 7
uacauuuuucuau

SEQ ID NO: 3997777 - RNA, 17 nt, Human herpesvirus 7
uaccaaaaaccugaaaa

SEQ ID NO: 3997778 - RNA, 19 nt, Human herpesvirus 7
uaccgauucuaaauuaaaa

SEQ ID NO: 3997779 - RNA, 17 nt, Human herpesvirus 7
uacgguggcaauuaaau

SEQ ID NO: 3997780 - RNA, 16 nt, Human herpesvirus 7
uacguucugaaacagu

SEQ ID NO: 3997781 - RNA, 15 nt, Human herpesvirus 7
uacuacgguuuucag

SEQ ID NO: 3997782 - RNA, 19 nt, Human herpesvirus 7
uacucuucucgaagaauuc

SEQ ID NO: 3997783 - RNA, 14 nt, Human herpesvirus 7
uacuuguaugcuau

SEQ ID NO: 3997784 - RNA, 14 nt, Human herpesvirus 7
uacuuucguuuucu

SEQ ID NO: 3997785 - RNA, 22 nt, Human herpesvirus 7
uagaaaaucuaccaauaaaagg

SEQ ID NO: 3997786 - RNA, 15 nt, Human herpesvirus 7
uagaaauuaugaaaa

SEQ ID NO: 3997787 - RNA, 20 nt, Human herpesvirus 7
uagauacauuauaaauguaa

SEQ ID NO: 3997788 - RNA, 18 nt, Human herpesvirus 7
uagauuacgcacaaauuu

SEQ ID NO: 3997789 - RNA, 22 nt, Human herpesvirus 7
uagauuacgcacaaauuucuug

SEQ ID NO: 3997790 - RNA, 16 nt, Human herpesvirus 7
uagauuuaaaacaauu

SEQ ID NO: 3997791 - RNA, 19 nt, Human herpesvirus 7
uagcagcuuuuauuccuuc

SEQ ID NO: 3997792 - RNA, 17 nt, Human herpesvirus 7
uaggaaucagaccagca

SEQ ID NO: 3997793 - RNA, 19 nt, Human herpesvirus 7
uaggauaccaaacaaaauu

SEQ ID NO: 3997794 - RNA, 21 nt, Human herpesvirus 7
uaggcaagaaggccacgcugu

SEQ ID NO: 3997795 - RNA, 19 nt, Human herpesvirus 7
uaguaaucacauuaucuug

SEQ ID NO: 3997796 - RNA, 19 nt, Human herpesvirus 7
uagucaggaucuccuggaa

SEQ ID NO: 3997797 - RNA, 22 nt, Human herpesvirus 7
uauaaaggaccaugggaaaaga

SEQ ID NO: 3997798 - RNA, 15 nt, Human herpesvirus 7
uauaacuuguaauuu

SEQ ID NO: 3997799 - RNA, 13 nt, Human herpesvirus 7
uauaauaaaucgu

SEQ ID NO: 3997800 - RNA, 12 nt, Human herpesvirus 7
uauaauagccuu

SEQ ID NO: 3997801 - RNA, 16 nt, Human herpesvirus 7
uauauagcaauauuua

SEQ ID NO: 3997802 - RNA, 16 nt, Human herpesvirus 7
uauaugaugacaacaa

SEQ ID NO: 3997803 - RNA, 15 nt, Human herpesvirus 7
uauauggcaauaaau

SEQ ID NO: 3997804 - RNA, 15 nt, Human herpesvirus 7
uauauguguacagau

SEQ ID NO: 3997805 - RNA, 19 nt, Human herpesvirus 7
uucaacacauaauguguau

SEQ ID NO: 3997806 - RNA, 13 nt, Human herpesvirus 7
uucaagaaaucag

SEQ ID NO: 3997807 - RNA, 21 nt, Human herpesvirus 7
uucaagaaggaaaauuucauu

SEQ ID NO: 3997808 - RNA, 18 nt, Human herpesvirus 7
uucaauugguuguucaaa

SEQ ID NO: 3997809 - RNA, 15 nt, Human herpesvirus 7
uucaauuucugucuu

SEQ ID NO: 3997810 - RNA, 12 nt, Human herpesvirus 7
uucacagaaauc

SEQ ID NO: 3997811 - RNA, 20 nt, Human herpesvirus 7
uucacaucuagaguaucuuu

SEQ ID NO: 3997812 - RNA, 18 nt, Human herpesvirus 7
uucagaauagacaucuuc

SEQ ID NO: 3997813 - RNA, 15 nt, Human herpesvirus 7
uucaggcaacauuaa

SEQ ID NO: 3997814 - RNA, 23 nt, Human herpesvirus 7
uucaggucucuuucuaaaaagag

SEQ ID NO: 3997815 - RNA, 18 nt, Human herpesvirus 7
uucauuuauauuaauuug

SEQ ID NO: 3997816 - RNA, 14 nt, Human herpesvirus 7
uuccgguauuuugu

SEQ ID NO: 3997817 - RNA, 17 nt, Human herpesvirus 7
uuccugcaauaauaaac

SEQ ID NO: 3997818 - RNA, 18 nt, Human herpesvirus 7
uuccugugugcaaugaug

SEQ ID NO: 3997819 - RNA, 16 nt, Human herpesvirus 7
uucgaucuguaaaaac

SEQ ID NO: 3997820 - RNA, 18 nt, Human herpesvirus 7
uucgcuaacuuugcuauu

SEQ ID NO: 3997821 - RNA, 20 nt, Human herpesvirus 7
uucggcugaguaaaacucaa

SEQ ID NO: 3997822 - RNA, 12 nt, Human herpesvirus 7
uucuaaaaauuc

SEQ ID NO: 3997823 - RNA, 15 nt, Human herpesvirus 7
uucuaaaaauucugg

SEQ ID NO: 3997824 - RNA, 18 nt, Human herpesvirus 7
uucuaccggaaguuuuua

SEQ ID NO: 3997825 - RNA, 21 nt, Human herpesvirus 7
uucuagcaaaauaugcaaaac

SEQ ID NO: 3997826 - RNA, 17 nt, Human herpesvirus 7
uucuauucaguuucuuu

SEQ ID NO: 3997827 - RNA, 22 nt, Human herpesvirus 7
uucucccgcagagauuaccugc

SEQ ID NO: 3997828 - RNA, 12 nt, Human herpesvirus 7
uucugaaaaucu

SEQ ID NO: 3997829 - RNA, 14 nt, Human herpesvirus 7
uucugaauaaaagu

SEQ ID NO: 3997830 - RNA, 16 nt, Human herpesvirus 7
uucugacuccuuuuuu

SEQ ID NO: 3997831 - RNA, 23 nt, Human herpesvirus 7
uucuggaucugccucugccucuu

SEQ ID NO: 3997832 - RNA, 16 nt, Human herpesvirus 7
uucuguaaaaacuugu

SEQ ID NO: 3997833 - RNA, 21 nt, Human herpesvirus 7
uucuucuaauugcgcaguguu

SEQ ID NO: 3997834 - RNA, 14 nt, Human herpesvirus 7
uucuuguuuggaaa

SEQ ID NO: 3997835 - RNA, 16 nt, Human herpesvirus 7
uucuuguuuggaaaac

SEQ ID NO: 3997836 - RNA, 18 nt, Human herpesvirus 7
uucuuugacaaaaauguu

SEQ ID NO: 3997837 - RNA, 15 nt, Human herpesvirus 7
uucuuugcaaucauu

SEQ ID NO: 3997838 - RNA, 12 nt, Human herpesvirus 7
uucuuugucugc

SEQ ID NO: 3997839 - RNA, 13 nt, Human herpesvirus 7
uugaaaagaaugg

SEQ ID NO: 3997840 - RNA, 18 nt, Human herpesvirus 7
uugaaauagugucuguug

SEQ ID NO: 3997841 - RNA, 16 nt, Human herpesvirus 7
uugaaccuuaacauac

SEQ ID NO: 3997842 - RNA, 22 nt, Human herpesvirus 7
uugaagaaauugugaagucuuu

SEQ ID NO: 3997843 - RNA, 18 nt, Human herpesvirus 7
uugaagaacaacaugaaa

SEQ ID NO: 3997844 - RNA, 20 nt, Human herpesvirus 7
uugaagauaaguauaaacag

SEQ ID NO: 3997845 - RNA, 19 nt, Human herpesvirus 7
uugacaggugauauucuuu

SEQ ID NO: 3997846 - RNA, 16 nt, Human herpesvirus 7
uugcaauuuuagauuu

SEQ ID NO: 3997847 - RNA, 14 nt, Human herpesvirus 7
uugcauacuuuuuu

SEQ ID NO: 3997848 - RNA, 14 nt, Human herpesvirus 7
uugcauaucaugau

SEQ ID NO: 3997849 - RNA, 16 nt, Human herpesvirus 7
uugcuuuagaacaauu

SEQ ID NO: 3997850 - RNA, 20 nt, Human herpesvirus 7
uuggaaagggauuuauuauu

SEQ ID NO: 3997851 - RNA, 16 nt, Human herpesvirus 7
uuggauuuucuguaau

SEQ ID NO: 3997852 - RNA, 13 nt, Human herpesvirus 7
uugggaaacaucu

SEQ ID NO: 3997853 - RNA, 22 nt, Human herpesvirus 7
uuguaacagauuuuauuucagc

SEQ ID NO: 3997854 - RNA, 13 nt, Human herpesvirus 7
uuguaacuuuuug

SEQ ID NO: 3997855 - RNA, 16 nt, Human herpesvirus 7
uugugaguuucuacau

SEQ ID NO: 3997856 - RNA, 13 nt, Human herpesvirus 7
uugugcaauuugg

SEQ ID NO: 3997857 - RNA, 18 nt, Human herpesvirus 7
uuguuuggucuauugaaa

SEQ ID NO: 3997858 - RNA, 21 nt, Human herpesvirus 7
uuuaaaaaaaaaaccacaaaa

SEQ ID NO: 3997859 - RNA, 19 nt, Human herpesvirus 7
uuuaaaaaugauuuuucuu

SEQ ID NO: 3997860 - RNA, 23 nt, Human herpesvirus 7
uuuaaaacaagacagaaaugaau

SEQ ID NO: 3997861 - RNA, 19 nt, Human herpesvirus 7
uuuaaagaaaagcuuguau

SEQ ID NO: 3997862 - RNA, 15 nt, Human herpesvirus 7
uuuaaauuugucugu

SEQ ID NO: 3997863 - RNA, 19 nt, Human herpesvirus 7
uuuaacugauaauuucuac

SEQ ID NO: 3997864 - RNA, 16 nt, Human herpesvirus 7
uuuaagugauacugaa

SEQ ID NO: 3997865 - RNA, 23 nt, Human herpesvirus 7
uuuacagaagaacauuuauuauu

SEQ ID NO: 3997866 - RNA, 20 nt, Human herpesvirus 7
uuuacaguuuuuuaauacaa

SEQ ID NO: 3997867 - RNA, 23 nt, Human herpesvirus 7
uuuacuuuugagcgcugaaauaa

SEQ ID NO: 3997868 - RNA, 22 nt, Human herpesvirus 7
uuuaggaaauugcuuucuaagu

SEQ ID NO: 3997869 - RNA, 16 nt, Human herpesvirus 7
uuuauaaaauauggac

SEQ ID NO: 3997870 - RNA, 14 nt, Human herpesvirus 7
uuuauauuaauuug

SEQ ID NO: 3997871 - RNA, 13 nt, Human herpesvirus 7
uuuaucuaacacu

SEQ ID NO: 3997872 - RNA, 18 nt, Human herpesvirus 7
uuuaugaaaaacaaaaug

SEQ ID NO: 3997873 - RNA, 12 nt, Human herpesvirus 7
uuuaugaacaag

SEQ ID NO: 3997874 - RNA, 19 nt, Human herpesvirus 7
uuuauguucaaauaugcau

SEQ ID NO: 3997875 - RNA, 23 nt, Human herpesvirus 7
uuuauugaauggaacauguuugu

SEQ ID NO: 3997876 - RNA, 17 nt, Human herpesvirus 7
uuucaaacaacauaucg

SEQ ID NO: 3997877 - RNA, 14 nt, Human herpesvirus 7
uuucaaauagaguu

SEQ ID NO: 3997878 - RNA, 17 nt, Human herpesvirus 7
uuucacccuuuguuuga

SEQ ID NO: 3997879 - RNA, 18 nt, Human herpesvirus 7
uuucagugaguggaagca

SEQ ID NO: 3997880 - RNA, 12 nt, Human herpesvirus 7
uuucauuuaauu

SEQ ID NO: 3997881 - RNA, 21 nt, Human herpesvirus 7
uuucuaggcuucauuggcauu

SEQ ID NO: 3997882 - RNA, 20 nt, Human herpesvirus 7
uuucuggcaacaguucaaaa

SEQ ID NO: 3997883 - RNA, 20 nt, Human herpesvirus 7
uuucuucgggguauguaugg

SEQ ID NO: 3997884 - RNA, 19 nt, Human herpesvirus 7
uuucuuuaccgauucuaaa

SEQ ID NO: 3997885 - RNA, 22 nt, Human herpesvirus 7
uuugcagcuucuaaaugugcua

SEQ ID NO: 3997886 - RNA, 16 nt, Human herpesvirus 7
uuugguuauccaaguu

SEQ ID NO: 3997887 - RNA, 14 nt, Human herpesvirus 7
uuuguaaacauuuu

SEQ ID NO: 3997888 - RNA, 16 nt, Human herpesvirus 7
uuuguauacaacuuua

SEQ ID NO: 3997889 - RNA, 12 nt, Human herpesvirus 7
uuuuaacuuuuu

SEQ ID NO: 3997890 - RNA, 12 nt, Human herpesvirus 7
uuuuaauaaacg

SEQ ID NO: 3997891 - RNA, 21 nt, Human herpesvirus 7
uuuuauaauacuggcaugucu

SEQ ID NO: 3997892 - RNA, 14 nt, Human herpesvirus 7
uuuucaaacaugau

SEQ ID NO: 3997893 - RNA, 21 nt, Human herpesvirus 7
uuuucauuuuuuucuuauaaa

SEQ ID NO: 3997894 - RNA, 21 nt, Human herpesvirus 7
uuuucuccaugcauauuugaa

SEQ ID NO: 3997895 - RNA, 21 nt, Human herpesvirus 7
uuuucuuccuagcauuaauuu

SEQ ID NO: 3997896 - RNA, 16 nt, Human herpesvirus 7
uuuuuaaaaaugauuu

SEQ ID NO: 3997897 - RNA, 18 nt, Human herpesvirus 7
aaccacagacacaccauu

SEQ ID NO: 3997898 - RNA, 22 nt, Human herpesvirus 7
aaccacgcauaugcuaagaaag

SEQ ID NO: 3997899 - RNA, 18 nt, Human herpesvirus 7
aaccaguuuuacuuuuga

SEQ ID NO: 3997900 - RNA, 21 nt, Human herpesvirus 7
aaccaugaaaaauaaauacua

SEQ ID NO: 3997901 - RNA, 17 nt, Human herpesvirus 7
aacccacuaacauuuua

SEQ ID NO: 3997902 - RNA, 18 nt, Human herpesvirus 7
aacgauccaguacuugca

SEQ ID NO: 3997903 - RNA, 17 nt, Human herpesvirus 7
aacuaaaacuacauuua

SEQ ID NO: 3997904 - RNA, 13 nt, Human herpesvirus 7
aacuaacaucuuu

SEQ ID NO: 3997905 - RNA, 22 nt, Human herpesvirus 7
aacuacauuuaaaaaaucugaa

SEQ ID NO: 3997906 - RNA, 16 nt, Human herpesvirus 7
aacuagaaaaacacua

SEQ ID NO: 3997907 - RNA, 20 nt, Human herpesvirus 7
aacucaauaaagauugauca

SEQ ID NO: 3997908 - RNA, 12 nt, Human herpesvirus 7
aacucuucuuua

SEQ ID NO: 3997909 - RNA, 13 nt, Human herpesvirus 7
aacugaaaacaau

SEQ ID NO: 3997910 - RNA, 16 nt, Human herpesvirus 7
aacugaauuaaggugg

SEQ ID NO: 3997911 - RNA, 17 nt, Human herpesvirus 7
aacugagaaaaaugaca

SEQ ID NO: 3997912 - RNA, 15 nt, Human herpesvirus 7
aacugauaauuucuu

SEQ ID NO: 3997913 - RNA, 17 nt, Human herpesvirus 7
aacuuugauuugagaaa

SEQ ID NO: 3997914 - RNA, 19 nt, Human herpesvirus 7
aagaaaagcaaaccuuaca

SEQ ID NO: 3997915 - RNA, 17 nt, Human herpesvirus 7
aagaacuuacauuucaa

SEQ ID NO: 3997916 - RNA, 19 nt, Human herpesvirus 7
aagaacuucagauuuuagu

SEQ ID NO: 3997917 - RNA, 20 nt, Human herpesvirus 7
aagaaugaacaccgcaaaca

SEQ ID NO: 3997918 - RNA, 19 nt, Human herpesvirus 7
aagaauuuucugcuuuaag

SEQ ID NO: 3997919 - RNA, 19 nt, Human herpesvirus 7
aagaauuuuguaagaaaca

SEQ ID NO: 3997920 - RNA, 21 nt, Human herpesvirus 7
aagacagcucaaaaguauaac

SEQ ID NO: 3997921 - RNA, 13 nt, Human herpesvirus 7
aagacaucgaaga

SEQ ID NO: 3997922 - RNA, 18 nt, Human herpesvirus 7
aagagaaaguaaaagcua

SEQ ID NO: 3997923 - RNA, 23 nt, Human herpesvirus 7
aagagccucccaccauggcuuuu

SEQ ID NO: 3997924 - RNA, 17 nt, Human herpesvirus 7
aagagcuuuugcaaagc

SEQ ID NO: 3997925 - RNA, 17 nt, Human herpesvirus 7
aagaggagaauucugua

SEQ ID NO: 3997926 - RNA, 17 nt, Human herpesvirus 7
aagagucuauugacaua

SEQ ID NO: 3997927 - RNA, 22 nt, Human herpesvirus 7
aagaugauagccauaaaugcuu

SEQ ID NO: 3997928 - RNA, 20 nt, Human herpesvirus 7
aagaugucuaaaaguacagu

SEQ ID NO: 3997929 - RNA, 20 nt, Human herpesvirus 7
aagauguuacccaaaaugua

SEQ ID NO: 3997930 - RNA, 16 nt, Human herpesvirus 7
aagauugaagcacaca

SEQ ID NO: 3997931 - RNA, 21 nt, Human herpesvirus 7
aagauuuguuccaaacucgag

SEQ ID NO: 3997932 - RNA, 21 nt, Human herpesvirus 7
aagauuuuaacauaccuaaag

SEQ ID NO: 3997933 - RNA, 16 nt, Human herpesvirus 7
aagcaaaagccacaga

SEQ ID NO: 3997934 - RNA, 18 nt, Human herpesvirus 7
aagcacaaaucaaaacga

SEQ ID NO: 3997935 - RNA, 16 nt, Human herpesvirus 7
aagcaucgauguuuua

SEQ ID NO: 3997936 - RNA, 19 nt, Human herpesvirus 7
aagccacgaugacuuccaa

SEQ ID NO: 3997937 - RNA, 15 nt, Human herpesvirus 7
aagccauaaaaugua

SEQ ID NO: 3997938 - RNA, 17 nt, Human herpesvirus 7
aagccauaaaauguaca

SEQ ID NO: 3997939 - RNA, 19 nt, Human herpesvirus 7
aagcgcugagaucuuccaa

SEQ ID NO: 3997940 - RNA, 18 nt, Human herpesvirus 7
aagcuauguauaaucaag

SEQ ID NO: 3997941 - RNA, 19 nt, Human herpesvirus 7
aaggaaaaaugcugcucag

SEQ ID NO: 3997942 - RNA, 15 nt, Human herpesvirus 7
aaggaaaaauuucuu

SEQ ID NO: 3997943 - RNA, 14 nt, Human herpesvirus 7
aaggaagacacgga

SEQ ID NO: 3997944 - RNA, 15 nt, Human herpesvirus 7
aaggaucaaaagcug

SEQ ID NO: 3997945 - RNA, 18 nt, Human herpesvirus 7
aaggaucaaaagcugcag

SEQ ID NO: 3997946 - RNA, 17 nt, Human herpesvirus 7
aaggucuuucaugcauu

SEQ ID NO: 3997947 - RNA, 20 nt, Human herpesvirus 7
aagguuaagugaaugugcuu

SEQ ID NO: 3997948 - RNA, 15 nt, Human herpesvirus 7
aagguugucuguucu

SEQ ID NO: 3997949 - RNA, 15 nt, Human herpesvirus 7
aaguaaacaaaacag

SEQ ID NO: 3997950 - RNA, 16 nt, Human herpesvirus 7
aaguacacguagacug

SEQ ID NO: 3997951 - RNA, 22 nt, Human herpesvirus 7
aaguagguaaaaaauaaauaua

SEQ ID NO: 3997952 - RNA, 16 nt, Human herpesvirus 7
aaguguuucuuugaau

SEQ ID NO: 3997953 - RNA, 16 nt, Human herpesvirus 7
aaguuuuuugagauau

SEQ ID NO: 3997954 - RNA, 19 nt, Human herpesvirus 7
aauaaaaagcccaugaaca

SEQ ID NO: 3997955 - RNA, 13 nt, Human herpesvirus 7
aauaaaacaaacu

SEQ ID NO: 3997956 - RNA, 13 nt, Human herpesvirus 7
aauaaacaaaauu

SEQ ID NO: 3997957 - RNA, 16 nt, Human herpesvirus 7
aauaaauuaauuccuu

SEQ ID NO: 3997958 - RNA, 14 nt, Human herpesvirus 7
aauaaauuuaaaau

SEQ ID NO: 3997959 - RNA, 22 nt, Human herpesvirus 7
aauaacauuuuguaugaaaagc

SEQ ID NO: 3997960 - RNA, 13 nt, Human herpesvirus 7
aauaagcaaauaa

SEQ ID NO: 3997961 - RNA, 14 nt, Human herpesvirus 7
aauaagcaaauaaa

SEQ ID NO: 3997962 - RNA, 16 nt, Human herpesvirus 7
aauacaucuaggucuu

SEQ ID NO: 3997963 - RNA, 19 nt, Human herpesvirus 7
aauagauacguuaguugca

SEQ ID NO: 3997964 - RNA, 22 nt, Human herpesvirus 7
aauagguaucuuuacuuucaua

SEQ ID NO: 3997965 - RNA, 16 nt, Human herpesvirus 7
aauauaaaaaauuuga

SEQ ID NO: 3997966 - RNA, 13 nt, Human herpesvirus 7
aauauaacaaaaa

SEQ ID NO: 3997967 - RNA, 18 nt, Human herpesvirus 7
aauauauuccaacucaau

SEQ ID NO: 3997968 - RNA, 16 nt, Human herpesvirus 7
aauaucccagaauauc

SEQ ID NO: 3997969 - RNA, 14 nt, Human herpesvirus 7
aauaugcauggaga

SEQ ID NO: 3997970 - RNA, 12 nt, Human herpesvirus 7
aauauuuagagu

SEQ ID NO: 3997971 - RNA, 18 nt, Human herpesvirus 7
aauauuuauuugcuuuua

SEQ ID NO: 3997972 - RNA, 13 nt, Human herpesvirus 7
aaucaaauuucaa

SEQ ID NO: 3997973 - RNA, 21 nt, Human herpesvirus 7
aaucauaccauaaauaccaaa

SEQ ID NO: 3997974 - RNA, 21 nt, Human herpesvirus 7
aauccgucaccgacaauauaa

SEQ ID NO: 3997975 - RNA, 17 nt, Human herpesvirus 7
aaucuaauuaaucugca

SEQ ID NO: 3997976 - RNA, 16 nt, Human herpesvirus 7
aaucuauuucuauuca

SEQ ID NO: 3997977 - RNA, 16 nt, Human herpesvirus 7
aaucuguagaaaaugu

SEQ ID NO: 3997978 - RNA, 19 nt, Human herpesvirus 7
aaucuguagaaaauguuuu

SEQ ID NO: 3997979 - RNA, 17 nt, Human herpesvirus 7
aaugaguguaauugguu

SEQ ID NO: 3997980 - RNA, 12 nt, Human herpesvirus 7
aaugaugaugua

SEQ ID NO: 3997981 - RNA, 13 nt, Human herpesvirus 7
aaugcaugaugca

SEQ ID NO: 3997982 - RNA, 14 nt, Human herpesvirus 7
aaugcaugaugcac

SEQ ID NO: 3997983 - RNA, 13 nt, Human herpesvirus 7
aauguaacuuuca

SEQ ID NO: 3997984 - RNA, 15 nt, Human herpesvirus 7
aaugucucuugaaga

SEQ ID NO: 3997985 - RNA, 19 nt, Human herpesvirus 7
aaugucuuugucaugauga

SEQ ID NO: 3997986 - RNA, 18 nt, Human herpesvirus 7
aaugugguaaauuugcuu

SEQ ID NO: 3997987 - RNA, 17 nt, Human herpesvirus 7
aauguuuaaauuacagu

SEQ ID NO: 3997988 - RNA, 15 nt, Human herpesvirus 7
aauguuuuuuucaua

SEQ ID NO: 3997989 - RNA, 12 nt, Human herpesvirus 7
aauuaaauacuu

SEQ ID NO: 3997990 - RNA, 12 nt, Human herpesvirus 7
aauuaacagcuc

SEQ ID NO: 3997991 - RNA, 16 nt, Human herpesvirus 7
aauuaaugcauuggaa

SEQ ID NO: 3997992 - RNA, 15 nt, Human herpesvirus 7
aauuacacaaauuga

SEQ ID NO: 3997993 - RNA, 23 nt, Human herpesvirus 7
aauuaccgauggaacugaaaaca

SEQ ID NO: 3997994 - RNA, 17 nt, Human herpesvirus 7
aauuaucuagacccuuu

SEQ ID NO: 3997995 - RNA, 14 nt, Human herpesvirus 7
aauuaugaguaaag

SEQ ID NO: 3997996 - RNA, 22 nt, Human herpesvirus 7
aauuauuuccagaguaugaauu

SEQ ID NO: 3997997 - RNA, 18 nt, Human herpesvirus 7
aauucgcugaugaaaaua

SEQ ID NO: 3997998 - RNA, 17 nt, Human herpesvirus 7
aauucuucuacuucuag

SEQ ID NO: 3997999 - RNA, 21 nt, Human herpesvirus 7
aauugaaauauuuaugccuuu

SEQ ID NO: 3998000 - RNA, 21 nt, Human herpesvirus 7
aauugugguacaacaaacauu

SEQ ID NO: 3998001 - RNA, 20 nt, Human herpesvirus 7
aauuguuuuucuuucuugca

SEQ ID NO: 3998002 - RNA, 16 nt, Human herpesvirus 7
aauuuacccugaaaag

SEQ ID NO: 3998003 - RNA, 19 nt, Human herpesvirus 7
aauuucaaacguaaugcaa

SEQ ID NO: 3998004 - RNA, 20 nt, Human herpesvirus 7
aauuuggugaagauucuuaa

SEQ ID NO: 3998005 - RNA, 12 nt, Human herpesvirus 7
aauuuuaaaacu

SEQ ID NO: 3998006 - RNA, 23 nt, Human herpesvirus 7
aauuuuauuccgugcuguacuga

SEQ ID NO: 3998007 - RNA, 12 nt, Human herpesvirus 7
aauuuugaagag

SEQ ID NO: 3998008 - RNA, 18 nt, Human herpesvirus 7
aauuuuuuacugucuuua

SEQ ID NO: 3998009 - RNA, 20 nt, Human herpesvirus 7
acaaauuuaagagacauuga

SEQ ID NO: 3998010 - RNA, 17 nt, Human herpesvirus 7
acaaccuggauguaaug

SEQ ID NO: 3998011 - RNA, 21 nt, Human herpesvirus 7
acaacuaaaauugacagcacc

SEQ ID NO: 3998012 - RNA, 17 nt, Human herpesvirus 7
acaacuaaagagaaugu

SEQ ID NO: 3998013 - RNA, 13 nt, Human herpesvirus 7
acaacuagcaaac

SEQ ID NO: 3998014 - RNA, 18 nt, Human herpesvirus 7
acaagacagaaaugaauc

SEQ ID NO: 3998015 - RNA, 22 nt, Human herpesvirus 7
acaauaaugcugugauuuuccu

SEQ ID NO: 3998016 - RNA, 19 nt, Human herpesvirus 7
acaauacccaauacauaag

SEQ ID NO: 3998017 - RNA, 14 nt, Human herpesvirus 7
acaaucaaacaugu

SEQ ID NO: 3998018 - RNA, 17 nt, Human herpesvirus 7
acaaucgauaaacuuug

SEQ ID NO: 3998019 - RNA, 21 nt, Human herpesvirus 7
acaaucgcggggaaaaaauga

SEQ ID NO: 3998020 - RNA, 20 nt, Human herpesvirus 7
acaauggugugucugugguu

SEQ ID NO: 3998021 - RNA, 16 nt, Human herpesvirus 7
acaauuguauuucagu

SEQ ID NO: 3998022 - RNA, 21 nt, Human herpesvirus 7
acacagggaagaaacagcuga

SEQ ID NO: 3998023 - RNA, 20 nt, Human herpesvirus 7
acacaguugaauaaagauua

SEQ ID NO: 3998024 - RNA, 12 nt, Human herpesvirus 7
acacuuauucca

SEQ ID NO: 3998025 - RNA, 16 nt, Human herpesvirus 7
acacuuauuccagaua

SEQ ID NO: 3998026 - RNA, 15 nt, Human herpesvirus 7
acacuuauuugauua

SEQ ID NO: 3998027 - RNA, 12 nt, Human herpesvirus 7
acagaaacaugu

SEQ ID NO: 3998028 - RNA, 14 nt, Human herpesvirus 7
acagaaaucccaaa

SEQ ID NO: 3998029 - RNA, 17 nt, Human herpesvirus 7
acagagucaaucuguga

SEQ ID NO: 3998030 - RNA, 15 nt, Human herpesvirus 7
acagcaacugugcau

SEQ ID NO: 3998031 - RNA, 17 nt, Human herpesvirus 7
acagcaacugugcauga

SEQ ID NO: 3998032 - RNA, 20 nt, Human herpesvirus 7
acagcauauaucuuugauua

SEQ ID NO: 3998033 - RNA, 22 nt, Human herpesvirus 7
acagcuagauugacuaugaauu

SEQ ID NO: 3998034 - RNA, 16 nt, Human herpesvirus 7
acagguaaauuguaaa

SEQ ID NO: 3998035 - RNA, 12 nt, Human herpesvirus 7
acauaaaaauuu

SEQ ID NO: 3998036 - RNA, 13 nt, Human herpesvirus 7
acauaaaaauuuc

SEQ ID NO: 3998037 - RNA, 18 nt, Human herpesvirus 7
acauauaaauagccauua

SEQ ID NO: 3998038 - RNA, 19 nt, Human herpesvirus 7
acauauaggaacaaaucua

SEQ ID NO: 3998039 - RNA, 13 nt, Human herpesvirus 7
acauauuaguuua

SEQ ID NO: 3998040 - RNA, 17 nt, Human herpesvirus 7
acauauuaguuuaacuu

SEQ ID NO: 3998041 - RNA, 20 nt, Human herpesvirus 7
acaucagaccuaacaaaaaa

SEQ ID NO: 3998042 - RNA, 14 nt, Human herpesvirus 7
acaucgaagaaauu

SEQ ID NO: 3998043 - RNA, 22 nt, Human herpesvirus 7
acaugagauaaacuuuuauuca

SEQ ID NO: 3998044 - RNA, 15 nt, Human herpesvirus 7
uaucuuaaaauacua

SEQ ID NO: 3998045 - RNA, 20 nt, Human herpesvirus 7
uaucuuaucuggagaacaau

SEQ ID NO: 3998046 - RNA, 15 nt, Human herpesvirus 7
uaugaaaaaaacauu

SEQ ID NO: 3998047 - RNA, 13 nt, Human herpesvirus 7
uaugaaaacagcu

SEQ ID NO: 3998048 - RNA, 17 nt, Human herpesvirus 7
uaugaaauaauagaugu

SEQ ID NO: 3998049 - RNA, 21 nt, Human herpesvirus 7
uaugacgaagcuaaacuuuua

SEQ ID NO: 3998050 - RNA, 18 nt, Human herpesvirus 7
uaugauacuuguucaauu

SEQ ID NO: 3998051 - RNA, 19 nt, Human herpesvirus 7
uaugccacaaaaaacuuug

SEQ ID NO: 3998052 - RNA, 20 nt, Human herpesvirus 7
uaugccacaaaaaacuuuga

SEQ ID NO: 3998053 - RNA, 17 nt, Human herpesvirus 7
uaugugaaaauaaacag

SEQ ID NO: 3998054 - RNA, 14 nt, Human herpesvirus 7
uauguguacagauu

SEQ ID NO: 3998055 - RNA, 12 nt, Human herpesvirus 7
uauguuaucauu

SEQ ID NO: 3998056 - RNA, 14 nt, Human herpesvirus 7
uauguugcauauca

SEQ ID NO: 3998057 - RNA, 13 nt, Human herpesvirus 7
uauuagaauuggg

SEQ ID NO: 3998058 - RNA, 18 nt, Human herpesvirus 7
uauuagauaaugacaaac

SEQ ID NO: 3998059 - RNA, 22 nt, Human herpesvirus 7
uauucaaacgcuugaacaaauu

SEQ ID NO: 3998060 - RNA, 20 nt, Human herpesvirus 7
uauuccagauaugacaaauu

SEQ ID NO: 3998061 - RNA, 21 nt, Human herpesvirus 7
uauucuacacaucuucaaugu

SEQ ID NO: 3998062 - RNA, 15 nt, Human herpesvirus 7
uauugacagaaugau

SEQ ID NO: 3998063 - RNA, 11 nt, Human herpesvirus 7
uauugcaauuu

SEQ ID NO: 3998064 - RNA, 20 nt, Human herpesvirus 7
uauuggagaugucagcaaau

SEQ ID NO: 3998065 - RNA, 16 nt, Human herpesvirus 7
uauuuagagucgucuu

SEQ ID NO: 3998066 - RNA, 18 nt, Human herpesvirus 7
uauuucagcuccaugucu

SEQ ID NO: 3998067 - RNA, 14 nt, Human herpesvirus 7
uauuuuacauauua

SEQ ID NO: 3998068 - RNA, 19 nt, Human herpesvirus 7
ucaaaagacgcuugcuauu

SEQ ID NO: 3998069 - RNA, 19 nt, Human herpesvirus 7
ucaaaaguagaggccgaaa

SEQ ID NO: 3998070 - RNA, 13 nt, Human herpesvirus 7
ucaaaaucagaaa

SEQ ID NO: 3998071 - RNA, 14 nt, Human herpesvirus 7
ucaaacauuauucg

SEQ ID NO: 3998072 - RNA, 16 nt, Human herpesvirus 7
ucaaauuauuuccaga

SEQ ID NO: 3998073 - RNA, 17 nt, Human herpesvirus 7
ucaacaaaaugacaaaa

SEQ ID NO: 3998074 - RNA, 16 nt, Human herpesvirus 7
ucaacgacaaacuuug

SEQ ID NO: 3998075 - RNA, 17 nt, Human herpesvirus 7
ucaacuugaaugagcug

SEQ ID NO: 3998076 - RNA, 15 nt, Human herpesvirus 7
ucaacuugcagagga

SEQ ID NO: 3998077 - RNA, 18 nt, Human herpesvirus 7
ucaaggucuuucaugcau

SEQ ID NO: 3998078 - RNA, 15 nt, Human herpesvirus 7
ucaaguagaauacca

SEQ ID NO: 3998079 - RNA, 15 nt, Human herpesvirus 7
ucaauaaaaaguuug

SEQ ID NO: 3998080 - RNA, 17 nt, Human herpesvirus 7
ucaauagcagagaauau

SEQ ID NO: 3998081 - RNA, 13 nt, Human herpesvirus 7
ucaauguuuucau

SEQ ID NO: 3998082 - RNA, 14 nt, Human herpesvirus 7
ucacauuuaugaaa

SEQ ID NO: 3998083 - RNA, 20 nt, Human herpesvirus 7
ucaccgcagauccaucuuug

SEQ ID NO: 3998084 - RNA, 19 nt, Human herpesvirus 7
ucacugacgaaaacugcaa

SEQ ID NO: 3998085 - RNA, 21 nt, Human herpesvirus 7
ucacuuagacucguaguaaga

SEQ ID NO: 3998086 - RNA, 20 nt, Human herpesvirus 7
ucagaaaaaccauuguauga

SEQ ID NO: 3998087 - RNA, 23 nt, Human herpesvirus 7
ucagacaauuucacacaaugccu

SEQ ID NO: 3998088 - RNA, 15 nt, Human herpesvirus 7
ucagaguuuaaagua

SEQ ID NO: 3998089 - RNA, 21 nt, Human herpesvirus 7
ucagcacugggagcaaugcau

SEQ ID NO: 3998090 - RNA, 19 nt, Human herpesvirus 7
ucaggacaaucaaacaugu

SEQ ID NO: 3998091 - RNA, 14 nt, Human herpesvirus 7
ucaguuguuggaaa

SEQ ID NO: 3998092 - RNA, 22 nt, Human herpesvirus 7
ucauguuuuaugacucagacga

SEQ ID NO: 3998093 - RNA, 22 nt, Human herpesvirus 7
uccaaaaucagacaauuucaca

SEQ ID NO: 3998094 - RNA, 15 nt, Human herpesvirus 7
uccaaagugaugaaa

SEQ ID NO: 3998095 - RNA, 17 nt, Human herpesvirus 7
uccaaagugaugaaagu

SEQ ID NO: 3998096 - RNA, 14 nt, Human herpesvirus 7
uccagacagcugua

SEQ ID NO: 3998097 - RNA, 14 nt, Human herpesvirus 7
uccagcacuuuuuu

SEQ ID NO: 3998098 - RNA, 21 nt, Human herpesvirus 7
uccauaaaacaugcaacauaa

SEQ ID NO: 3998099 - RNA, 20 nt, Human herpesvirus 7
uccaugcauauuugaacaua

SEQ ID NO: 3998100 - RNA, 15 nt, Human herpesvirus 7
uccauucauuuccuc

SEQ ID NO: 3998101 - RNA, 14 nt, Human herpesvirus 7
uccgaaaagacaac

SEQ ID NO: 3998102 - RNA, 19 nt, Human herpesvirus 7
uccgaaaagacaacaaggg

SEQ ID NO: 3998103 - RNA, 16 nt, Human herpesvirus 7
uccgagacagagucaa

SEQ ID NO: 3998104 - RNA, 11 nt, Human herpesvirus 7
uccguaacugc

SEQ ID NO: 3998105 - RNA, 17 nt, Human herpesvirus 7
uccuaagcuuuucaggc

SEQ ID NO: 3998106 - RNA, 17 nt, Human herpesvirus 7
uccuucuaccucuuaca

SEQ ID NO: 3998107 - RNA, 21 nt, Human herpesvirus 7
uccuuucaacgaucucaaaau

SEQ ID NO: 3998108 - RNA, 22 nt, Human herpesvirus 7
ucgaaaccgucagcaucucaga

SEQ ID NO: 3998109 - RNA, 19 nt, Human herpesvirus 7
ucgaaagauuuaaaguuuu

SEQ ID NO: 3998110 - RNA, 15 nt, Human herpesvirus 7
ucgaucuaagagauu

SEQ ID NO: 3998111 - RNA, 16 nt, Human herpesvirus 7
ucggaaccgagaaugu

SEQ ID NO: 3998112 - RNA, 14 nt, Human herpesvirus 7
ucguaucugugacu

SEQ ID NO: 3998113 - RNA, 17 nt, Human herpesvirus 7
ucguucuauguaugaaa

SEQ ID NO: 3998114 - RNA, 15 nt, Human herpesvirus 7
ucguuuucaaagugu

SEQ ID NO: 3998115 - RNA, 12 nt, Human herpesvirus 7
ucuaaacaaaca

SEQ ID NO: 3998116 - RNA, 13 nt, Human herpesvirus 7
ucuaaauaaacaa

SEQ ID NO: 3998117 - RNA, 23 nt, Human herpesvirus 7
ucuaacacugcaagcugauucaa

SEQ ID NO: 3998118 - RNA, 19 nt, Human herpesvirus 7
ucuaauuuaugauacuugu

SEQ ID NO: 3998119 - RNA, 20 nt, Human herpesvirus 7
ucuacacaaacgaguuucaa

SEQ ID NO: 3998120 - RNA, 15 nt, Human herpesvirus 7
ucuacacaucuucaa

SEQ ID NO: 3998121 - RNA, 15 nt, Human herpesvirus 7
ucuaccaauaaaagg

SEQ ID NO: 3998122 - RNA, 23 nt, Human herpesvirus 7
ucuaugaaauaaaauuuuucauu

SEQ ID NO: 3998123 - RNA, 20 nt, Human herpesvirus 7
ucuauuagauaaugacaaac

SEQ ID NO: 3998124 - RNA, 14 nt, Human herpesvirus 7
ucuauuauuucuac

SEQ ID NO: 3998125 - RNA, 17 nt, Human herpesvirus 7
ucucuuauuuugucugg

SEQ ID NO: 3998126 - RNA, 21 nt, Human herpesvirus 7
ucucuuggaguuugucucauu

SEQ ID NO: 3998127 - RNA, 17 nt, Human herpesvirus 7
ucugaaaaucuccuuga

SEQ ID NO: 3998128 - RNA, 15 nt, Human herpesvirus 7
ucugagaauuuaaag

SEQ ID NO: 3998129 - RNA, 16 nt, Human herpesvirus 7
ucugauucuuauucua

SEQ ID NO: 3998130 - RNA, 12 nt, Human herpesvirus 7
ucugcuaauucu

SEQ ID NO: 3998131 - RNA, 21 nt, Human herpesvirus 7
ucuggagaacaauuagaauuu

SEQ ID NO: 3998132 - RNA, 23 nt, Human herpesvirus 7
ucugguaaugucauaaaacuuuu

SEQ ID NO: 3998133 - RNA, 23 nt, Human herpesvirus 7
ucuguacccaugggcacauuugu

SEQ ID NO: 3998134 - RNA, 14 nt, Human herpesvirus 7
ucuuagcaguaaac

SEQ ID NO: 3998135 - RNA, 20 nt, Human herpesvirus 7
ucuuauaaauaaaauguuuu

SEQ ID NO: 3998136 - RNA, 23 nt, Human herpesvirus 7
ucuuauaacaaaguucaaguuuu

SEQ ID NO: 3998137 - RNA, 17 nt, Human herpesvirus 7
ucuucaacuucucuugg

SEQ ID NO: 3998138 - RNA, 14 nt, Human herpesvirus 7
ucuucuaauacauc

SEQ ID NO: 3998139 - RNA, 22 nt, Human herpesvirus 7
ucuuuaucgccauuuucuugag

SEQ ID NO: 3998140 - RNA, 14 nt, Human herpesvirus 7
ucuuucuauuggag

SEQ ID NO: 3998141 - RNA, 18 nt, Human herpesvirus 7
ucuuuuugaacagaauuu

SEQ ID NO: 3998142 - RNA, 19 nt, Human herpesvirus 7
ugaaaaaaauuauguguau

SEQ ID NO: 3998143 - RNA, 18 nt, Human herpesvirus 7
ugaaaaauaaauacuauu

SEQ ID NO: 3998144 - RNA, 22 nt, Human herpesvirus 7
ugaaaaauuuuuuacugucuuu

SEQ ID NO: 3998145 - RNA, 19 nt, Human herpesvirus 7
ugaaaaucaauccaaauaa

SEQ ID NO: 3998146 - RNA, 21 nt, Human herpesvirus 7
ugaaacucaucauugaagaaa

SEQ ID NO: 3998147 - RNA, 17 nt, Human herpesvirus 7
ugaaauaaaauuuuuca

SEQ ID NO: 3998148 - RNA, 14 nt, Human herpesvirus 7
ugaaauaaacauuu

SEQ ID NO: 3998149 - RNA, 17 nt, Human herpesvirus 7
ugaaaucauuuugcugu

SEQ ID NO: 3998150 - RNA, 19 nt, Human herpesvirus 7
ugaaauuguaguuuuugca

SEQ ID NO: 3998151 - RNA, 19 nt, Human herpesvirus 7
ugaacaauggugugucugu

SEQ ID NO: 3998152 - RNA, 19 nt, Human herpesvirus 7
ugaacaccgcaaacauuuu

SEQ ID NO: 3998153 - RNA, 13 nt, Human herpesvirus 7
ugaagaacaacau

SEQ ID NO: 3998154 - RNA, 14 nt, Human herpesvirus 7
ugaauaaaaguaaa

SEQ ID NO: 3998155 - RNA, 22 nt, Human herpesvirus 7
ugaauaaucucaauuaaaacau

SEQ ID NO: 3998156 - RNA, 18 nt, Human herpesvirus 7
ugaauauaaguuuucuua

SEQ ID NO: 3998157 - RNA, 19 nt, Human herpesvirus 7
ugaauauugcuagucucaa

SEQ ID NO: 3998158 - RNA, 13 nt, Human herpesvirus 7
ugaauuaauucuu

SEQ ID NO: 3998159 - RNA, 17 nt, Human herpesvirus 7
ugaauuaauucuuucca

SEQ ID NO: 3998160 - RNA, 18 nt, Human herpesvirus 7
ugaauuauguauaucuuu

SEQ ID NO: 3998161 - RNA, 20 nt, Human herpesvirus 7
acaugauugguaaaaaauua

SEQ ID NO: 3998162 - RNA, 16 nt, Human herpesvirus 7
acaugggauuucugua

SEQ ID NO: 3998163 - RNA, 19 nt, Human herpesvirus 7
acaugggauuucuguaaaa

SEQ ID NO: 3998164 - RNA, 20 nt, Human herpesvirus 7
acaugucuuuuaguuuucau

SEQ ID NO: 3998165 - RNA, 16 nt, Human herpesvirus 7
acauuaguucuggccg

SEQ ID NO: 3998166 - RNA, 17 nt, Human herpesvirus 7
acauuauaaauguaacu

SEQ ID NO: 3998167 - RNA, 22 nt, Human herpesvirus 7
acauucagaaaaaaucaaaaca

SEQ ID NO: 3998168 - RNA, 22 nt, Human herpesvirus 7
acauucucaaaaaugauaugac

SEQ ID NO: 3998169 - RNA, 16 nt, Human herpesvirus 7
acauugaaaaugcauu

SEQ ID NO: 3998170 - RNA, 22 nt, Human herpesvirus 7
acauugcuucagaaauaacaaa

SEQ ID NO: 3998171 - RNA, 22 nt, Human herpesvirus 7
acauuuaaaaaaucugaauaga

SEQ ID NO: 3998172 - RNA, 20 nt, Human herpesvirus 7
acauuuacaaaaaaaagcuu

SEQ ID NO: 3998173 - RNA, 23 nt, Human herpesvirus 7
acauuuauuauuuuuaaaaauga

SEQ ID NO: 3998174 - RNA, 22 nt, Human herpesvirus 7
accaagagccggaaagcaaugu

SEQ ID NO: 3998175 - RNA, 22 nt, Human herpesvirus 7
accaaugauaauaagauguguu

SEQ ID NO: 3998176 - RNA, 19 nt, Human herpesvirus 7
accaaugcugauuccuucu

SEQ ID NO: 3998177 - RNA, 23 nt, Human herpesvirus 7
accacaaccgauaaaagguguuu

SEQ ID NO: 3998178 - RNA, 16 nt, Human herpesvirus 7
accaguaugaaaucaa

SEQ ID NO: 3998179 - RNA, 16 nt, Human herpesvirus 7
accaugauguuaaaga

SEQ ID NO: 3998180 - RNA, 15 nt, Human herpesvirus 7
acccagaagaaacuu

SEQ ID NO: 3998181 - RNA, 21 nt, Human herpesvirus 7
accccaugcaagaaaaaaaug

SEQ ID NO: 3998182 - RNA, 20 nt, Human herpesvirus 7
accgucauuuaauuggcaac

SEQ ID NO: 3998183 - RNA, 18 nt, Human herpesvirus 7
accuaaagugaacaugac

SEQ ID NO: 3998184 - RNA, 14 nt, Human herpesvirus 7
accuauguguuuac

SEQ ID NO: 3998185 - RNA, 23 nt, Human herpesvirus 7
acgaauauucuaggcuugcauuc

SEQ ID NO: 3998186 - RNA, 21 nt, Human herpesvirus 7
acgauaugguuugaaaaccau

SEQ ID NO: 3998187 - RNA, 16 nt, Human herpesvirus 7
acgcagucuaaaagua

SEQ ID NO: 3998188 - RNA, 15 nt, Human herpesvirus 7
acgcucucaaucaaa

SEQ ID NO: 3998189 - RNA, 20 nt, Human herpesvirus 7
acggaaaauuuccgaccuga

SEQ ID NO: 3998190 - RNA, 18 nt, Human herpesvirus 7
acggauuuacauuucauu

SEQ ID NO: 3998191 - RNA, 20 nt, Human herpesvirus 7
acgguaacggauuuacauuu

SEQ ID NO: 3998192 - RNA, 12 nt, Human herpesvirus 7
acguccaaaaau

SEQ ID NO: 3998193 - RNA, 16 nt, Human herpesvirus 7
acgucuucuucugagu

SEQ ID NO: 3998194 - RNA, 19 nt, Human herpesvirus 7
acguguuuuugaugugcaa

SEQ ID NO: 3998195 - RNA, 20 nt, Human herpesvirus 7
acguucugaaacagucugaa

SEQ ID NO: 3998196 - RNA, 14 nt, Human herpesvirus 7
acuaaaaaaaauua

SEQ ID NO: 3998197 - RNA, 19 nt, Human herpesvirus 7
acuaaauauggagcagcuu

SEQ ID NO: 3998198 - RNA, 23 nt, Human herpesvirus 7
acuaauaaaaauuacucaugaag

SEQ ID NO: 3998199 - RNA, 14 nt, Human herpesvirus 7
acuauaugaaaaca

SEQ ID NO: 3998200 - RNA, 18 nt, Human herpesvirus 7
acuauuuacgauaauaau

SEQ ID NO: 3998201 - RNA, 16 nt, Human herpesvirus 7
acucaaaacagaacuu

SEQ ID NO: 3998202 - RNA, 21 nt, Human herpesvirus 7
acucauacuaauagaaaaaug

SEQ ID NO: 3998203 - RNA, 19 nt, Human herpesvirus 7
acuccauucgguuuucaaa

SEQ ID NO: 3998204 - RNA, 17 nt, Human herpesvirus 7
acucgauuagguaauag

SEQ ID NO: 3998205 - RNA, 15 nt, Human herpesvirus 7
acugagaaaaaugac

SEQ ID NO: 3998206 - RNA, 18 nt, Human herpesvirus 7
acugauuuuuuuaauaau

SEQ ID NO: 3998207 - RNA, 18 nt, Human herpesvirus 7
acugcaaauccaacagaa

SEQ ID NO: 3998208 - RNA, 16 nt, Human herpesvirus 7
acugcaaauuguaaau

SEQ ID NO: 3998209 - RNA, 20 nt, Human herpesvirus 7
acuggagagaauaagcaaau

SEQ ID NO: 3998210 - RNA, 22 nt, Human herpesvirus 7
acuggcaaucguccgaaaagac

SEQ ID NO: 3998211 - RNA, 23 nt, Human herpesvirus 7
acuguuguagguaauuucuuaua

SEQ ID NO: 3998212 - RNA, 14 nt, Human herpesvirus 7
acuuaaauauuuua

SEQ ID NO: 3998213 - RNA, 18 nt, Human herpesvirus 7
acuuaaauauuuuacaua

SEQ ID NO: 3998214 - RNA, 21 nt, Human herpesvirus 7
acuuaguucgaaugaauuuug

SEQ ID NO: 3998215 - RNA, 16 nt, Human herpesvirus 7
acuucagaaaaaccau

SEQ ID NO: 3998216 - RNA, 17 nt, Human herpesvirus 7
acuucuaguucugaaau

SEQ ID NO: 3998217 - RNA, 19 nt, Human herpesvirus 7
acuucugauaucuuaaaau

SEQ ID NO: 3998218 - RNA, 16 nt, Human herpesvirus 7
acuugcaaagacagaa

SEQ ID NO: 3998219 - RNA, 18 nt, Human herpesvirus 7
acuuguuuguagcucuag

SEQ ID NO: 3998220 - RNA, 13 nt, Human herpesvirus 7
acuuuuaaaauug

SEQ ID NO: 3998221 - RNA, 15 nt, Human herpesvirus 7
agaaaaaaacaauga

SEQ ID NO: 3998222 - RNA, 14 nt, Human herpesvirus 7
agaaaaacagacuu

SEQ ID NO: 3998223 - RNA, 15 nt, Human herpesvirus 7
agaaaacauuauauu

SEQ ID NO: 3998224 - RNA, 22 nt, Human herpesvirus 7
agaaaaguugcuuuucaugcuu

SEQ ID NO: 3998225 - RNA, 15 nt, Human herpesvirus 7
agaaaaucucucaac

SEQ ID NO: 3998226 - RNA, 12 nt, Human herpesvirus 7
agaaacaagguu

SEQ ID NO: 3998227 - RNA, 22 nt, Human herpesvirus 7
agaaacuaaagaaaaaaaaagu

SEQ ID NO: 3998228 - RNA, 18 nt, Human herpesvirus 7
agaaacucacaauguuuu

SEQ ID NO: 3998229 - RNA, 15 nt, Human herpesvirus 7
agaaauugaugaaga

SEQ ID NO: 3998230 - RNA, 23 nt, Human herpesvirus 7
agaaauuguuccugugugcaaug

SEQ ID NO: 3998231 - RNA, 22 nt, Human herpesvirus 7
agaaauuuuacagccuguacaa

SEQ ID NO: 3998232 - RNA, 21 nt, Human herpesvirus 7
agaacaucuugagaaauauga

SEQ ID NO: 3998233 - RNA, 16 nt, Human herpesvirus 7
agaacauguaguacaa

SEQ ID NO: 3998234 - RNA, 16 nt, Human herpesvirus 7
agaacauuaauaucaa

SEQ ID NO: 3998235 - RNA, 17 nt, Human herpesvirus 7
agaaccuaucaaaauuc

SEQ ID NO: 3998236 - RNA, 13 nt, Human herpesvirus 7
agaagaagauuuu

SEQ ID NO: 3998237 - RNA, 18 nt, Human herpesvirus 7
agaagacauauuagauua

SEQ ID NO: 3998238 - RNA, 20 nt, Human herpesvirus 7
agaagugaguuuuucaguga

SEQ ID NO: 3998239 - RNA, 18 nt, Human herpesvirus 7
agaaucagacuaaauaug

SEQ ID NO: 3998240 - RNA, 23 nt, Human herpesvirus 7
agaaucauagcaggaagcacaaa

SEQ ID NO: 3998241 - RNA, 20 nt, Human herpesvirus 7
agaaucauuuguauauucua

SEQ ID NO: 3998242 - RNA, 16 nt, Human herpesvirus 7
agaaugggugucagcu

SEQ ID NO: 3998243 - RNA, 19 nt, Human herpesvirus 7
agaaugggugucagcuucu

SEQ ID NO: 3998244 - RNA, 14 nt, Human herpesvirus 7
agaauuuucaagau

SEQ ID NO: 3998245 - RNA, 15 nt, Human herpesvirus 7
agacaaaaccaaacu

SEQ ID NO: 3998246 - RNA, 13 nt, Human herpesvirus 7
agacauugaagau

SEQ ID NO: 3998247 - RNA, 17 nt, Human herpesvirus 7
agacguugcucauuuug

SEQ ID NO: 3998248 - RNA, 22 nt, Human herpesvirus 7
agacuaaucacgagaaaaauau

SEQ ID NO: 3998249 - RNA, 20 nt, Human herpesvirus 7
agacuauaaaaagugcucug

SEQ ID NO: 3998250 - RNA, 21 nt, Human herpesvirus 7
agagaaaaaauuaugaguaaa

SEQ ID NO: 3998251 - RNA, 14 nt, Human herpesvirus 7
agagaaaauguuua

SEQ ID NO: 3998252 - RNA, 18 nt, Human herpesvirus 7
agagaacuagaacagcug

SEQ ID NO: 3998253 - RNA, 23 nt, Human herpesvirus 7
agagaugauguuuuuugucuuuu

SEQ ID NO: 3998254 - RNA, 13 nt, Human herpesvirus 7
agauaaugacaaa

SEQ ID NO: 3998255 - RNA, 18 nt, Human herpesvirus 7
agauacauuuuugcaaua

SEQ ID NO: 3998256 - RNA, 17 nt, Human herpesvirus 7
agauacgcgcagauuuu

SEQ ID NO: 3998257 - RNA, 19 nt, Human herpesvirus 7
agaucaauugaguuuacug

SEQ ID NO: 3998258 - RNA, 20 nt, Human herpesvirus 7
agaucauaauuacauugcag

SEQ ID NO: 3998259 - RNA, 17 nt, Human herpesvirus 7
agauuaaauagcaaagu

SEQ ID NO: 3998260 - RNA, 20 nt, Human herpesvirus 7
agauuuaaaacaauuuccuu

SEQ ID NO: 3998261 - RNA, 21 nt, Human herpesvirus 7
agauuuccauuucaaaagaaa

SEQ ID NO: 3998262 - RNA, 16 nt, Human herpesvirus 7
agauuuguuccaaacu

SEQ ID NO: 3998263 - RNA, 19 nt, Human herpesvirus 7
agauuuuccaacgaaauuu

SEQ ID NO: 3998264 - RNA, 21 nt, Human herpesvirus 7
agcaaauucacgcucucaauc

SEQ ID NO: 3998265 - RNA, 16 nt, Human herpesvirus 7
agcaauacacccaguc

SEQ ID NO: 3998266 - RNA, 15 nt, Human herpesvirus 7
agcaaugcaugaugc

SEQ ID NO: 3998267 - RNA, 16 nt, Human herpesvirus 7
agcacauguacagaca

SEQ ID NO: 3998268 - RNA, 18 nt, Human herpesvirus 7
agcacccggcuuaaugaa

SEQ ID NO: 3998269 - RNA, 16 nt, Human herpesvirus 7
agcagacaaggggcau

SEQ ID NO: 3998270 - RNA, 22 nt, Human herpesvirus 7
agcagcuuaagacaccccaaaa

SEQ ID NO: 3998271 - RNA, 16 nt, Human herpesvirus 7
agcaguuauaugaaau

SEQ ID NO: 3998272 - RNA, 14 nt, Human herpesvirus 7
agcauaaagcacca

SEQ ID NO: 3998273 - RNA, 16 nt, Human herpesvirus 7
agcauacuuucgcaac

SEQ ID NO: 3998274 - RNA, 19 nt, Human herpesvirus 7
agcaugcguaaaaaaucaa

SEQ ID NO: 3998275 - RNA, 23 nt, Human herpesvirus 7
agcauggaucguagcaacagaga

SEQ ID NO: 3998276 - RNA, 14 nt, Human herpesvirus 7
agccauaaaugcuu

SEQ ID NO: 3998277 - RNA, 22 nt, Human herpesvirus 7
agcccauauuuuuaaauuuguc

SEQ ID NO: 3998278 - RNA, 18 nt, Human herpesvirus 7
agcgcugagaucuuccaa

SEQ ID NO: 3998279 - RNA, 22 nt, Human herpesvirus 7
agcuaacgauccaguacuugca

SEQ ID NO: 3998280 - RNA, 17 nt, Human herpesvirus 7
agcuaauugagaaauuu

SEQ ID NO: 3998281 - RNA, 15 nt, Human herpesvirus 7
agcuagccuauaauu

SEQ ID NO: 3998282 - RNA, 21 nt, Human herpesvirus 7
agcuggaauuguaauugaaag

SEQ ID NO: 3998283 - RNA, 20 nt, Human herpesvirus 7
agcuucaaaaauguuuacaa

SEQ ID NO: 3998284 - RNA, 21 nt, Human herpesvirus 7
agcuugaaaacuuagugauga

SEQ ID NO: 3998285 - RNA, 23 nt, Human herpesvirus 7
agcuugcuuaaaacuuugaaaau

SEQ ID NO: 3998286 - RNA, 14 nt, Human herpesvirus 7
agcuuucuuucuca

SEQ ID NO: 3998287 - RNA, 20 nt, Human herpesvirus 7
aggaaaccaauuaauauuaa

SEQ ID NO: 3998288 - RNA, 12 nt, Human herpesvirus 7
aggaaauugcuu

SEQ ID NO: 3998289 - RNA, 23 nt, Human herpesvirus 7
aggaagaggaguauguugcauau

SEQ ID NO: 3998290 - RNA, 17 nt, Human herpesvirus 7
aggaagcuuuacagcag

SEQ ID NO: 3998291 - RNA, 19 nt, Human herpesvirus 7
aggaaucgcaguguucauu

SEQ ID NO: 3998292 - RNA, 17 nt, Human herpesvirus 7
aggacaugauuggccag

SEQ ID NO: 3998293 - RNA, 20 nt, Human herpesvirus 7
aggaucaaaagcugcagcug

SEQ ID NO: 3998294 - RNA, 15 nt, Human herpesvirus 7
aggaugaaagugcau

SEQ ID NO: 3998295 - RNA, 17 nt, Human herpesvirus 7
agggauuucuucuucua

SEQ ID NO: 3998296 - RNA, 20 nt, Human herpesvirus 7
agggggacaauuauuuaaac

SEQ ID NO: 3998297 - RNA, 17 nt, Human herpesvirus 7
aggggguucuaaaugua

SEQ ID NO: 3998298 - RNA, 21 nt, Human herpesvirus 7
aggguauuguucacagcaauu

SEQ ID NO: 3998299 - RNA, 16 nt, Human herpesvirus 7
aggucacaaaagcuuu

SEQ ID NO: 3998300 - RNA, 23 nt, Human herpesvirus 7
aggucacaaaagcuuugaucuac

SEQ ID NO: 3998301 - RNA, 16 nt, Human herpesvirus 7
aggugacagagggcau

SEQ ID NO: 3998302 - RNA, 19 nt, Human herpesvirus 7
agguugaguugacaauauu

SEQ ID NO: 3998303 - RNA, 18 nt, Human herpesvirus 7
aguaaaacucaauguaaa

SEQ ID NO: 3998304 - RNA, 17 nt, Human herpesvirus 7
aguaacagguaaauugu

SEQ ID NO: 3998305 - RNA, 21 nt, Human herpesvirus 7
aguaauguuauuuuucaugcc

SEQ ID NO: 3998306 - RNA, 15 nt, Human herpesvirus 7
aguacaucuuucuag

SEQ ID NO: 3998307 - RNA, 11 nt, Human herpesvirus 7
aguacaugugu

SEQ ID NO: 3998308 - RNA, 14 nt, Human herpesvirus 7
aguagaaaaugcug

SEQ ID NO: 3998309 - RNA, 17 nt, Human herpesvirus 7
aguaucacuuaaagcag

SEQ ID NO: 3998310 - RNA, 19 nt, Human herpesvirus 7
aguauuguaauaauuuaaa

SEQ ID NO: 3998311 - RNA, 15 nt, Human herpesvirus 7
agucgagaaaacacg

SEQ ID NO: 3998312 - RNA, 13 nt, Human herpesvirus 7
agucuaaaaaugu

SEQ ID NO: 3998313 - RNA, 15 nt, Human herpesvirus 7
agucuacaucaucaa

SEQ ID NO: 3998314 - RNA, 19 nt, Human herpesvirus 7
agucuauugacauaaucau

SEQ ID NO: 3998315 - RNA, 14 nt, Human herpesvirus 7
agucucuaaacuuc

SEQ ID NO: 3998316 - RNA, 23 nt, Human herpesvirus 7
agucucuaaacuucuagccugca

SEQ ID NO: 3998317 - RNA, 22 nt, Human herpesvirus 7
agucugaaagccgcugccuucg

SEQ ID NO: 3998318 - RNA, 13 nt, Human herpesvirus 7
aguggcuucucua

SEQ ID NO: 3998319 - RNA, 22 nt, Human herpesvirus 7
aguuauuuguuccaguugaaug

SEQ ID NO: 3998320 - RNA, 21 nt, Human herpesvirus 7
aguucauaaugacacgacacu

SEQ ID NO: 3998321 - RNA, 16 nt, Human herpesvirus 7
aguucugacuaaagcu

SEQ ID NO: 3998322 - RNA, 14 nt, Human herpesvirus 7
aguugaaaauguuu

SEQ ID NO: 3998323 - RNA, 16 nt, Human herpesvirus 7
aguugacaaugucaau

SEQ ID NO: 3998324 - RNA, 16 nt, Human herpesvirus 7
aguugggcaaacaguu

SEQ ID NO: 3998325 - RNA, 16 nt, Human herpesvirus 7
aguuucuuuuucauua

SEQ ID NO: 3998326 - RNA, 23 nt, Human herpesvirus 7
aguuuguuucaauaugcaugcaa

SEQ ID NO: 3998327 - RNA, 17 nt, Human herpesvirus 7
aguuuuacagaaauuga

SEQ ID NO: 3998328 - RNA, 22 nt, Human herpesvirus 7
aguuuuuaaacuuaucagauuc

SEQ ID NO: 3998329 - RNA, 12 nt, Human herpesvirus 7
auaaaaaaagaa

SEQ ID NO: 3998330 - RNA, 15 nt, Human herpesvirus 7
auaaaaauuacucau

SEQ ID NO: 3998331 - RNA, 23 nt, Human herpesvirus 7
auaaaacaaacuauguccaaaaa

SEQ ID NO: 3998332 - RNA, 18 nt, Human herpesvirus 7
auaaaaccauuuauugau

SEQ ID NO: 3998333 - RNA, 18 nt, Human herpesvirus 7
auaaaagggcagacacua

SEQ ID NO: 3998334 - RNA, 14 nt, Human herpesvirus 7
auaaaauuuuucau

SEQ ID NO: 3998335 - RNA, 22 nt, Human herpesvirus 7
auaaagagucuauugacauaau

SEQ ID NO: 3998336 - RNA, 23 nt, Human herpesvirus 7
auaaagaguguuuucaaauaucu

SEQ ID NO: 3998337 - RNA, 20 nt, Human herpesvirus 7
auaaaggaaagacaaacuau

SEQ ID NO: 3998338 - RNA, 23 nt, Human herpesvirus 7
auaaaggaucucucuuucuggag

SEQ ID NO: 3998339 - RNA, 14 nt, Human herpesvirus 7
auaaaguuuuguaa

SEQ ID NO: 3998340 - RNA, 19 nt, Human herpesvirus 7
auaaauguaacuuucaucu

SEQ ID NO: 3998341 - RNA, 20 nt, Human herpesvirus 7
auaacaaaaaagguguugau

SEQ ID NO: 3998342 - RNA, 20 nt, Human herpesvirus 7
auaacaauuauagaaacauu

SEQ ID NO: 3998343 - RNA, 22 nt, Human herpesvirus 7
auaacaauuugaagaggagaau

SEQ ID NO: 3998344 - RNA, 18 nt, Human herpesvirus 7
auaacccacuaacauuuu

SEQ ID NO: 3998345 - RNA, 17 nt, Human herpesvirus 7
auaagcaaauaaauugu

SEQ ID NO: 3998346 - RNA, 20 nt, Human herpesvirus 7
auaauguuuccguguuuaug

SEQ ID NO: 3998347 - RNA, 13 nt, Human herpesvirus 7
auacaaaagacau

SEQ ID NO: 3998348 - RNA, 22 nt, Human herpesvirus 7
auacaacugcagaaauuuuuaa

SEQ ID NO: 3998349 - RNA, 13 nt, Human herpesvirus 7
auacacuauuuua

SEQ ID NO: 3998350 - RNA, 16 nt, Human herpesvirus 7
auacagauauuuuaau

SEQ ID NO: 3998351 - RNA, 19 nt, Human herpesvirus 7
auacauaaguuaaaucagu

SEQ ID NO: 3998352 - RNA, 17 nt, Human herpesvirus 7
auacguuaguugcagcu

SEQ ID NO: 3998353 - RNA, 12 nt, Human herpesvirus 7
auacuaauagaa

SEQ ID NO: 3998354 - RNA, 21 nt, Human herpesvirus 7
auacuaauagaaaaauguaca

SEQ ID NO: 3998355 - RNA, 14 nt, Human herpesvirus 7
auacuuguugagcu

SEQ ID NO: 3998356 - RNA, 14 nt, Human herpesvirus 7
auacuuuuuugguu

SEQ ID NO: 3998357 - RNA, 17 nt, Human herpesvirus 7
auagauuucagaauuuc

SEQ ID NO: 3998358 - RNA, 20 nt, Human herpesvirus 7
auagugaaucauauuuuagu

SEQ ID NO: 3998359 - RNA, 14 nt, Human herpesvirus 7
auauaaacaaaauu

SEQ ID NO: 3998360 - RNA, 13 nt, Human herpesvirus 7
auauaugcuuuau

SEQ ID NO: 3998361 - RNA, 22 nt, Human herpesvirus 7
auaugcuaagaaagaacauuuu

SEQ ID NO: 3998362 - RNA, 11 nt, Human herpesvirus 7
auauggcaaua

SEQ ID NO: 3998363 - RNA, 22 nt, Human herpesvirus 7
auauuuaaggcuguaaaagaaa

SEQ ID NO: 3998364 - RNA, 12 nt, Human herpesvirus 7
aucaaaaaauuc

SEQ ID NO: 3998365 - RNA, 12 nt, Human herpesvirus 7
aucaaaauccug

SEQ ID NO: 3998366 - RNA, 15 nt, Human herpesvirus 7
aucaagaaacaaggu

SEQ ID NO: 3998367 - RNA, 17 nt, Human herpesvirus 7
aucaauuuuaaugugcu

SEQ ID NO: 3998368 - RNA, 14 nt, Human herpesvirus 7
aucauagagaaaac

SEQ ID NO: 3998369 - RNA, 18 nt, Human herpesvirus 7
aucauagagaaaacauug

SEQ ID NO: 3998370 - RNA, 20 nt, Human herpesvirus 7
aucauguuuaagaaaaguug

SEQ ID NO: 3998371 - RNA, 13 nt, Human herpesvirus 7
aucauugaagaaa

SEQ ID NO: 3998372 - RNA, 15 nt, Human herpesvirus 7
auccagcaaagacuu

SEQ ID NO: 3998373 - RNA, 16 nt, Human herpesvirus 7
aucccugcugauacaa

SEQ ID NO: 3998374 - RNA, 17 nt, Human herpesvirus 7
auccguuaauggauaac

SEQ ID NO: 3998375 - RNA, 14 nt, Human herpesvirus 7
aucgaugagaaugu

SEQ ID NO: 3998376 - RNA, 23 nt, Human herpesvirus 7
aucgauguuuuaucuaacacugc

SEQ ID NO: 3998377 - RNA, 14 nt, Human herpesvirus 7
aucuagauaaagua

SEQ ID NO: 3998378 - RNA, 12 nt, Human herpesvirus 7
aucuauaaacau

SEQ ID NO: 3998379 - RNA, 17 nt, Human herpesvirus 7
aucuaugugcucugaau

SEQ ID NO: 3998380 - RNA, 19 nt, Human herpesvirus 7
aucucagaaguuucaauug

SEQ ID NO: 3998381 - RNA, 13 nt, Human herpesvirus 7
aucucauagcuua

SEQ ID NO: 3998382 - RNA, 15 nt, Human herpesvirus 7
aucucucaacgacaa

SEQ ID NO: 3998383 - RNA, 22 nt, Human herpesvirus 7
aucugucaggucacaaaagcuu

SEQ ID NO: 3998384 - RNA, 22 nt, Human herpesvirus 7
aucuucugaaucugcaaagaaa

SEQ ID NO: 3998385 - RNA, 22 nt, Human herpesvirus 7
aucuuuaugugggauuugaaug

SEQ ID NO: 3998386 - RNA, 15 nt, Human herpesvirus 7
aucuuucauaacaaa

SEQ ID NO: 3998387 - RNA, 17 nt, Human herpesvirus 7
aucuuuuucaaauggau

SEQ ID NO: 3998388 - RNA, 14 nt, Human herpesvirus 7
aucuuuuuucagug

SEQ ID NO: 3998389 - RNA, 15 nt, Human herpesvirus 7
augaaggaugcgugu

SEQ ID NO: 3998390 - RNA, 22 nt, Human herpesvirus 7
augaaggaugcguguguucaaa

SEQ ID NO: 3998391 - RNA, 14 nt, Human herpesvirus 7
augaauaucuguuu

SEQ ID NO: 3998392 - RNA, 16 nt, Human herpesvirus 7
augacaaacaaaaaua

SEQ ID NO: 3998393 - RNA, 15 nt, Human herpesvirus 7
caaugguaagcaaaa

SEQ ID NO: 3998394 - RNA, 17 nt, Human herpesvirus 7
caaugguauaaagugcu

SEQ ID NO: 3998395 - RNA, 15 nt, Human herpesvirus 7
caauuaaaguauuua

SEQ ID NO: 3998396 - RNA, 13 nt, Human herpesvirus 7
caauuaaugcauu

SEQ ID NO: 3998397 - RNA, 17 nt, Human herpesvirus 7
uuaccuuuguuaacaug

SEQ ID NO: 3998398 - RNA, 21 nt, Human herpesvirus 7
uuacucaugaagcuguacaac

SEQ ID NO: 3998399 - RNA, 22 nt, Human herpesvirus 7
uuacugccaccauuucugaaac

SEQ ID NO: 3998400 - RNA, 16 nt, Human herpesvirus 7
uuacuugcuaugcuug

SEQ ID NO: 3998401 - RNA, 16 nt, Human herpesvirus 7
uuacuuucauagcuua

SEQ ID NO: 3998402 - RNA, 17 nt, Human herpesvirus 7
uuagaaacaucuguuuu

SEQ ID NO: 3998403 - RNA, 21 nt, Human herpesvirus 7
uuagaaucacaacauauagau

SEQ ID NO: 3998404 - RNA, 14 nt, Human herpesvirus 7
uuagcgaaucaucu

SEQ ID NO: 3998405 - RNA, 18 nt, Human herpesvirus 7
uuagcgaauuugugcugu

SEQ ID NO: 3998406 - RNA, 17 nt, Human herpesvirus 7
uuaguuccacgucaauc

SEQ ID NO: 3998407 - RNA, 21 nt, Human herpesvirus 7
uuauaaaagauggaaaguuua

SEQ ID NO: 3998408 - RNA, 12 nt, Human herpesvirus 7
uuauagaaguac

SEQ ID NO: 3998409 - RNA, 18 nt, Human herpesvirus 7
uuauauuugcuugcugaa

SEQ ID NO: 3998410 - RNA, 19 nt, Human herpesvirus 7
uuaucaaguagaauaccag

SEQ ID NO: 3998411 - RNA, 14 nt, Human herpesvirus 7
uuauccaaguuuua

SEQ ID NO: 3998412 - RNA, 15 nt, Human herpesvirus 7
uuaucucagaugcua

SEQ ID NO: 3998413 - RNA, 16 nt, Human herpesvirus 7
uuaugugguuaaagau

SEQ ID NO: 3998414 - RNA, 15 nt, Human herpesvirus 7
uuauucauacguaag

SEQ ID NO: 3998415 - RNA, 15 nt, Human herpesvirus 7
uuauucccaugccua

SEQ ID NO: 3998416 - RNA, 13 nt, Human herpesvirus 7
uucaacaucuuuc

SEQ ID NO: 3998417 - RNA, 13 nt, Human herpesvirus 7
uucaacuguguuu

SEQ ID NO: 3998418 - RNA, 18 nt, Human herpesvirus 7
uucaacuucuaguucuga

SEQ ID NO: 3998419 - RNA, 14 nt, Human herpesvirus 7
uucaagaaaucaga

SEQ ID NO: 3998420 - RNA, 13 nt, Human herpesvirus 7
uucaaucaaauua

SEQ ID NO: 3998421 - RNA, 19 nt, Human herpesvirus 7
uucacaauggaaagaagaa

SEQ ID NO: 3998422 - RNA, 15 nt, Human herpesvirus 7
uucacacaaugccuu

SEQ ID NO: 3998423 - RNA, 13 nt, Human herpesvirus 7
uucacagaaaucc

SEQ ID NO: 3998424 - RNA, 19 nt, Human herpesvirus 7
uucacagacgcaucauucc

SEQ ID NO: 3998425 - RNA, 20 nt, Human herpesvirus 7
uucagaaaauaaaaguaaaa

SEQ ID NO: 3998426 - RNA, 20 nt, Human herpesvirus 7
uucagucuuacagugcucuu

SEQ ID NO: 3998427 - RNA, 19 nt, Human herpesvirus 7
uucauauggagaaggcaug

SEQ ID NO: 3998428 - RNA, 23 nt, Human herpesvirus 7
uucauccaaaaagaaacuuucua

SEQ ID NO: 3998429 - RNA, 16 nt, Human herpesvirus 7
uucaucuucugaaucu

SEQ ID NO: 3998430 - RNA, 17 nt, Human herpesvirus 7
uucauuggcauuauucu

SEQ ID NO: 3998431 - RNA, 22 nt, Human herpesvirus 7
uuccagagggguuugaacuugu

SEQ ID NO: 3998432 - RNA, 21 nt, Human herpesvirus 7
uuccagauaugacaaauuuca

SEQ ID NO: 3998433 - RNA, 16 nt, Human herpesvirus 7
uuccaucacaaaacuc

SEQ ID NO: 3998434 - RNA, 14 nt, Human herpesvirus 7
uuccauuucaaaag

SEQ ID NO: 3998435 - RNA, 20 nt, Human herpesvirus 7
uuccgcgcgguauaaugcac

SEQ ID NO: 3998436 - RNA, 14 nt, Human herpesvirus 7
uuccgguguggaaa

SEQ ID NO: 3998437 - RNA, 15 nt, Human herpesvirus 7
uuccuguuaauaucu

SEQ ID NO: 3998438 - RNA, 21 nt, Human herpesvirus 7
uucgaauuuguucaauugcca

SEQ ID NO: 3998439 - RNA, 15 nt, Human herpesvirus 7
uucgcaaauguacaa

SEQ ID NO: 3998440 - RNA, 14 nt, Human herpesvirus 7
uucguaaacauuug

SEQ ID NO: 3998441 - RNA, 20 nt, Human herpesvirus 7
uucguuaacccagaagaaac

SEQ ID NO: 3998442 - RNA, 19 nt, Human herpesvirus 7
uucuagaaacuaaagaaaa

SEQ ID NO: 3998443 - RNA, 16 nt, Human herpesvirus 7
uucuauucaguuucuu

SEQ ID NO: 3998444 - RNA, 12 nt, Human herpesvirus 7
uucucaaaucuu

SEQ ID NO: 3998445 - RNA, 15 nt, Human herpesvirus 7
uucugaaauaaacau

SEQ ID NO: 3998446 - RNA, 20 nt, Human herpesvirus 7
uucuggcaacaguucaaaaa

SEQ ID NO: 3998447 - RNA, 11 nt, Human herpesvirus 7
uugaaaaccau

SEQ ID NO: 3998448 - RNA, 14 nt, Human herpesvirus 7
uugaaagaccaaau

SEQ ID NO: 3998449 - RNA, 21 nt, Human herpesvirus 7
uugaaagcguuucacugggaa

SEQ ID NO: 3998450 - RNA, 13 nt, Human herpesvirus 7
uugaaauaaagga

SEQ ID NO: 3998451 - RNA, 16 nt, Human herpesvirus 7
uugaacauaaauauuc

SEQ ID NO: 3998452 - RNA, 16 nt, Human herpesvirus 7
uugaagauaaguauaa

SEQ ID NO: 3998453 - RNA, 19 nt, Human herpesvirus 7
uugaauuauguauaucuuu

SEQ ID NO: 3998454 - RNA, 15 nt, Human herpesvirus 7
uugagcaauugauuc

SEQ ID NO: 3998455 - RNA, 22 nt, Human herpesvirus 7
uugauucacauugucacugcaa

SEQ ID NO: 3998456 - RNA, 23 nt, Human herpesvirus 7
uugauuuuuaaguuguucucaau

SEQ ID NO: 3998457 - RNA, 23 nt, Human herpesvirus 7
uugcaauacaaauuccugcuugc

SEQ ID NO: 3998458 - RNA, 15 nt, Human herpesvirus 7
uugcagauuguagag

SEQ ID NO: 3998459 - RNA, 19 nt, Human herpesvirus 7
uugcagcccaauguugccu

SEQ ID NO: 3998460 - RNA, 13 nt, Human herpesvirus 7
uugcauacaguuu

SEQ ID NO: 3998461 - RNA, 20 nt, Human herpesvirus 7
uugcuauuuaaucuaugcaa

SEQ ID NO: 3998462 - RNA, 18 nt, Human herpesvirus 7
uugcugaaagaacuuuuc

SEQ ID NO: 3998463 - RNA, 14 nt, Human herpesvirus 7
uugcugucuuggag

SEQ ID NO: 3998464 - RNA, 16 nt, Human herpesvirus 7
uugcuguucuugcugg

SEQ ID NO: 3998465 - RNA, 17 nt, Human herpesvirus 7
uugcuuaaaacuuugaa

SEQ ID NO: 3998466 - RNA, 21 nt, Human herpesvirus 7
uuggagucguucuauguauga

SEQ ID NO: 3998467 - RNA, 19 nt, Human herpesvirus 7
uuggguagguuaagccuag

SEQ ID NO: 3998468 - RNA, 20 nt, Human herpesvirus 7
uugguggauccguaacugca

SEQ ID NO: 3998469 - RNA, 19 nt, Human herpesvirus 7
uugguuuuacaaauuaaag

SEQ ID NO: 3998470 - RNA, 19 nt, Human herpesvirus 7
uuguaauuuggcuucuauu

SEQ ID NO: 3998471 - RNA, 21 nt, Human herpesvirus 7
uuguaguuuuugcauauggac

SEQ ID NO: 3998472 - RNA, 23 nt, Human herpesvirus 7
uuguaguuuuugcauauggacuu

SEQ ID NO: 3998473 - RNA, 16 nt, Human herpesvirus 7
uugucauacaaugaau

SEQ ID NO: 3998474 - RNA, 16 nt, Human herpesvirus 7
uugugaaguuugcuga

SEQ ID NO: 3998475 - RNA, 24 nt, Human herpesvirus 7
uuguggaauccuaugacugagaaa

SEQ ID NO: 3998476 - RNA, 23 nt, Human herpesvirus 7
uugugguacaacaaacauuccaa

SEQ ID NO: 3998477 - RNA, 12 nt, Human herpesvirus 7
uuguuaacauga

SEQ ID NO: 3998478 - RNA, 14 nt, Human herpesvirus 7
uuguucaaacucaa

SEQ ID NO: 3998479 - RNA, 12 nt, Human herpesvirus 7
uuuaaaaguuug

SEQ ID NO: 3998480 - RNA, 17 nt, Human herpesvirus 7
uuuaaagaaaagcuugu

SEQ ID NO: 3998481 - RNA, 18 nt, Human herpesvirus 7
uuuaaagaaaagcuugua

SEQ ID NO: 3998482 - RNA, 16 nt, Human herpesvirus 7
uuuaacgauuccaaac

SEQ ID NO: 3998483 - RNA, 14 nt, Human herpesvirus 7
uuuaaguaaauuuc

SEQ ID NO: 3998484 - RNA, 17 nt, Human herpesvirus 7
uuuaaguaaauuucuca

SEQ ID NO: 3998485 - RNA, 21 nt, Human herpesvirus 7
uuuaaucaauggacguuuauu

SEQ ID NO: 3998486 - RNA, 19 nt, Human herpesvirus 7
uuuacaaacauguuccauu

SEQ ID NO: 3998487 - RNA, 16 nt, Human herpesvirus 7
uuuacaaugcagccua

SEQ ID NO: 3998488 - RNA, 22 nt, Human herpesvirus 7
uuuaccgauucuaaauuaaaaa

SEQ ID NO: 3998489 - RNA, 12 nt, Human herpesvirus 7
uuuacuuaaaua

SEQ ID NO: 3998490 - RNA, 14 nt, Human herpesvirus 7
uuuagaccuaucaa

SEQ ID NO: 3998491 - RNA, 21 nt, Human herpesvirus 7
uuuagauuccagucuacauau

SEQ ID NO: 3998492 - RNA, 18 nt, Human herpesvirus 7
uuuauauauggcaauaaa

SEQ ID NO: 3998493 - RNA, 13 nt, Human herpesvirus 7
uuuauccaucaaa

SEQ ID NO: 3998494 - RNA, 21 nt, Human herpesvirus 7
uuuauccaucaaaagucuugu

SEQ ID NO: 3998495 - RNA, 18 nt, Human herpesvirus 7
uuuauuuucuuaacaauu

SEQ ID NO: 3998496 - RNA, 19 nt, Human herpesvirus 7
uuucaagaaggaaaauuuc

SEQ ID NO: 3998497 - RNA, 16 nt, Human herpesvirus 7
uuucauagcacucaua

SEQ ID NO: 3998498 - RNA, 17 nt, Human herpesvirus 7
uuucauauuuagacuuu

SEQ ID NO: 3998499 - RNA, 22 nt, Human herpesvirus 7
uuuccaauagcacuacuagaaa

SEQ ID NO: 3998500 - RNA, 23 nt, Human herpesvirus 7
uuuccaauagcacuacuagaaau

SEQ ID NO: 3998501 - RNA, 14 nt, Human herpesvirus 7
uuuccaugucuugu

SEQ ID NO: 3998502 - RNA, 21 nt, Human herpesvirus 7
uuucgcaacaaucaacauuug

SEQ ID NO: 3998503 - RNA, 20 nt, Human herpesvirus 7
uuucggacacaaauaucacu

SEQ ID NO: 3998504 - RNA, 22 nt, Human herpesvirus 7
uuucuccacuaugccacaaaaa

SEQ ID NO: 3998505 - RNA, 20 nt, Human herpesvirus 7
uuucucgcguuucuucaaag

SEQ ID NO: 3998506 - RNA, 14 nt, Human herpesvirus 7
uuucuggcaauaaa

SEQ ID NO: 3998507 - RNA, 13 nt, Human herpesvirus 7
uuucuuucucauc

SEQ ID NO: 3998508 - RNA, 21 nt, Human herpesvirus 7
uuugaaauaaaggaucucucu

SEQ ID NO: 3998509 - RNA, 18 nt, Human herpesvirus 7
uuugaacggaauaaacaa

SEQ ID NO: 3998510 - RNA, 13 nt, Human herpesvirus 7
uuugaaucuguaa

SEQ ID NO: 3998511 - RNA, 13 nt, Human herpesvirus 7
uuugaauguaugu

SEQ ID NO: 3998512 - RNA, 18 nt, Human herpesvirus 7
uuugacaaucuuggcauu

SEQ ID NO: 3998513 - RNA, 17 nt, Human herpesvirus 7
uuugagcuaaccuuuua

SEQ ID NO: 3998514 - RNA, 21 nt, Human herpesvirus 7
uuaacaugccugcaauaugca

SEQ ID NO: 3998515 - RNA, 24 nt, Human herpesvirus 7
uuaagaaaaguugcuuuucaugcu

SEQ ID NO: 3998516 - RNA, 16 nt, Human herpesvirus 7
uuaagguggaaaucuu

SEQ ID NO: 3998517 - RNA, 14 nt, Human herpesvirus 7
uuaaguagugucug

SEQ ID NO: 3998518 - RNA, 11 nt, Human herpesvirus 7
uuaauaaaagu

SEQ ID NO: 3998519 - RNA, 12 nt, Human herpesvirus 7
uuaauaacagca

SEQ ID NO: 3998520 - RNA, 15 nt, Human herpesvirus 7
uuaauaauauuagua

SEQ ID NO: 3998521 - RNA, 19 nt, Human herpesvirus 7
uuaauacguccaaaaauug

SEQ ID NO: 3998522 - RNA, 16 nt, Human herpesvirus 7
uuaauagaaauuauug

SEQ ID NO: 3998523 - RNA, 12 nt, Human herpesvirus 7
uuaauauuagua

SEQ ID NO: 3998524 - RNA, 20 nt, Human herpesvirus 7
uuaauggaggauucggaagu

SEQ ID NO: 3998525 - RNA, 20 nt, Human herpesvirus 7
uuaauucuaaaaauuauuua

SEQ ID NO: 3998526 - RNA, 22 nt, Human herpesvirus 7
uuaauugagauuauucaaaagc

SEQ ID NO: 3998527 - RNA, 21 nt, Human herpesvirus 7
uuaauuguuuuuuauuuagcu

SEQ ID NO: 3998528 - RNA, 21 nt, Human herpesvirus 7
uuaauuuggaaauuguuugau

SEQ ID NO: 3998529 - RNA, 14 nt, Human herpesvirus 7
uuacaaaaaguaga

SEQ ID NO: 3998530 - RNA, 13 nt, Human herpesvirus 7
uuacaaagaacau

SEQ ID NO: 3998531 - RNA, 23 nt, Human herpesvirus 7
uuacaaauuuuucggauaaaagg

SEQ ID NO: 3998532 - RNA, 15 nt, Human herpesvirus 7
uuacacucuguuacu

SEQ ID NO: 3998533 - RNA, 19 nt, Human herpesvirus 7
uuacacuuggaguuguguu

SEQ ID NO: 3998534 - RNA, 17 nt, Human herpesvirus 7
uuacaugaucuuguaau

SEQ ID NO: 3998535 - RNA, 20 nt, Human herpesvirus 7
acuuuuuguucaguuaauaa

SEQ ID NO: 3998536 - RNA, 19 nt, Human herpesvirus 7
acuuuuuuuacuuaaauau

SEQ ID NO: 3998537 - RNA, 12 nt, Human herpesvirus 7
agaaaaaaaugg

SEQ ID NO: 3998538 - RNA, 12 nt, Human herpesvirus 7
agaaaagcaagu

SEQ ID NO: 3998539 - RNA, 19 nt, Human herpesvirus 7
agaaaaguugaaaauguuu

SEQ ID NO: 3998540 - RNA, 17 nt, Human herpesvirus 7
agaaacaaucccagaaa

SEQ ID NO: 3998541 - RNA, 13 nt, Human herpesvirus 7
agaaacuaauaaa

SEQ ID NO: 3998542 - RNA, 18 nt, Human herpesvirus 7
agaaacuuucuaugauuu

SEQ ID NO: 3998543 - RNA, 17 nt, Human herpesvirus 7
agaaaguccaaagugau

SEQ ID NO: 3998544 - RNA, 20 nt, Human herpesvirus 7
agaaauggaaaccuggagaa

SEQ ID NO: 3998545 - RNA, 15 nt, Human herpesvirus 7
agaaauguuacuuaa

SEQ ID NO: 3998546 - RNA, 13 nt, Human herpesvirus 7
agaacaaguagaa

SEQ ID NO: 3998547 - RNA, 17 nt, Human herpesvirus 7
agaacuuuuguaggaaa

SEQ ID NO: 3998548 - RNA, 16 nt, Human herpesvirus 7
agaaguuuagagacug

SEQ ID NO: 3998549 - RNA, 15 nt, Human herpesvirus 7
agaauacacauuuag

SEQ ID NO: 3998550 - RNA, 17 nt, Human herpesvirus 7
agaaucacauuuuugcu

SEQ ID NO: 3998551 - RNA, 23 nt, Human herpesvirus 7
agaauggcgguuguacuguaauu

SEQ ID NO: 3998552 - RNA, 21 nt, Human herpesvirus 7
agaauguucgcaaauguacaa

SEQ ID NO: 3998553 - RNA, 16 nt, Human herpesvirus 7
agacaccccaaaauca

SEQ ID NO: 3998554 - RNA, 15 nt, Human herpesvirus 7
agacggaacuucuuu

SEQ ID NO: 3998555 - RNA, 22 nt, Human herpesvirus 7
agacuacauaaagguaaaaauu

SEQ ID NO: 3998556 - RNA, 14 nt, Human herpesvirus 7
agagaacuagaaca

SEQ ID NO: 3998557 - RNA, 17 nt, Human herpesvirus 7
agagaauauguuaucau

SEQ ID NO: 3998558 - RNA, 15 nt, Human herpesvirus 7
agagaauuuagauua

SEQ ID NO: 3998559 - RNA, 18 nt, Human herpesvirus 7
agagaucauaauuacauu

SEQ ID NO: 3998560 - RNA, 15 nt, Human herpesvirus 7
agagaugaucuuacu

SEQ ID NO: 3998561 - RNA, 14 nt, Human herpesvirus 7
agagauuaagguga

SEQ ID NO: 3998562 - RNA, 15 nt, Human herpesvirus 7
agagcuuuugcaaag

SEQ ID NO: 3998563 - RNA, 20 nt, Human herpesvirus 7
agaggacuugaaaaauuuuu

SEQ ID NO: 3998564 - RNA, 15 nt, Human herpesvirus 7
agaguauuuaagaac

SEQ ID NO: 3998565 - RNA, 23 nt, Human herpesvirus 7
agagucugugugugcaguguuuu

SEQ ID NO: 3998566 - RNA, 14 nt, Human herpesvirus 7
agauauuauuaaaa

SEQ ID NO: 3998567 - RNA, 17 nt, Human herpesvirus 7
agauauucuaacaaaua

SEQ ID NO: 3998568 - RNA, 14 nt, Human herpesvirus 7
agauauuuugacaa

SEQ ID NO: 3998569 - RNA, 15 nt, Human herpesvirus 7
agaucuugacucaga

SEQ ID NO: 3998570 - RNA, 17 nt, Human herpesvirus 7
agaucuugacucagauu

SEQ ID NO: 3998571 - RNA, 20 nt, Human herpesvirus 7
agaugacauuuuuaccucca

SEQ ID NO: 3998572 - RNA, 17 nt, Human herpesvirus 7
agaugucuaaaaguaca

SEQ ID NO: 3998573 - RNA, 18 nt, Human herpesvirus 7
agauuaccugcauacuuu

SEQ ID NO: 3998574 - RNA, 13 nt, Human herpesvirus 7
agauucuccagaa

SEQ ID NO: 3998575 - RNA, 13 nt, Human herpesvirus 7
agauucuuaauuu

SEQ ID NO: 3998576 - RNA, 19 nt, Human herpesvirus 7
agauucuuaauuuguucaa

SEQ ID NO: 3998577 - RNA, 21 nt, Human herpesvirus 7
agauugaucacuuugcaucaa

SEQ ID NO: 3998578 - RNA, 12 nt, Human herpesvirus 7
agauuucagaau

SEQ ID NO: 3998579 - RNA, 19 nt, Human herpesvirus 7
agauuuuuugaaaaagauu

SEQ ID NO: 3998580 - RNA, 12 nt, Human herpesvirus 7
agcaaaauaugc

SEQ ID NO: 3998581 - RNA, 18 nt, Human herpesvirus 7
agcaacagagaacaccau

SEQ ID NO: 3998582 - RNA, 13 nt, Human herpesvirus 7
agcaauugauuca

SEQ ID NO: 3998583 - RNA, 15 nt, Human herpesvirus 7
agcaccgaaaauggu

SEQ ID NO: 3998584 - RNA, 19 nt, Human herpesvirus 7
agcaucccuauugcaucaa

SEQ ID NO: 3998585 - RNA, 23 nt, Human herpesvirus 7
agcauuugguaaaaaaaauggag

SEQ ID NO: 3998586 - RNA, 18 nt, Human herpesvirus 7
agccacgaugacuuccaa

SEQ ID NO: 3998587 - RNA, 15 nt, Human herpesvirus 7
agccagguauucaaa

SEQ ID NO: 3998588 - RNA, 14 nt, Human herpesvirus 7
agccauaaaaugua

SEQ ID NO: 3998589 - RNA, 16 nt, Human herpesvirus 7
agccauaaaugcuuaa

SEQ ID NO: 3998590 - RNA, 22 nt, Human herpesvirus 7
agccucuaagagcuuuugcaaa

SEQ ID NO: 3998591 - RNA, 22 nt, Human herpesvirus 7
agcgugucaaaaaaaaaacaau

SEQ ID NO: 3998592 - RNA, 13 nt, Human herpesvirus 7
agcuagaaauuga

SEQ ID NO: 3998593 - RNA, 15 nt, Human herpesvirus 7
agcuauguuuaaaug

SEQ ID NO: 3998594 - RNA, 21 nt, Human herpesvirus 7
agcuauuuuuaauaaaaugau

SEQ ID NO: 3998595 - RNA, 15 nt, Human herpesvirus 7
agcuucaaaaauguu

SEQ ID NO: 3998596 - RNA, 17 nt, Human herpesvirus 7
agcuucaaaaauguuua

SEQ ID NO: 3998597 - RNA, 22 nt, Human herpesvirus 7
agcuucuaaaugugcuaaauaa

SEQ ID NO: 3998598 - RNA, 16 nt, Human herpesvirus 7
agcuugaugaaucaaa

SEQ ID NO: 3998599 - RNA, 15 nt, Human herpesvirus 7
agcuugguuuuacaa

SEQ ID NO: 3998600 - RNA, 16 nt, Human herpesvirus 7
agcuuguuaaagaaaa

SEQ ID NO: 3998601 - RNA, 15 nt, Human herpesvirus 7
agcuuucuuuaccga

SEQ ID NO: 3998602 - RNA, 16 nt, Human herpesvirus 7
aggaaauugcuuucua

SEQ ID NO: 3998603 - RNA, 17 nt, Human herpesvirus 7
aggaauucugacuccuu

SEQ ID NO: 3998604 - RNA, 22 nt, Human herpesvirus 7
aggaauugcugucuauuucaau

SEQ ID NO: 3998605 - RNA, 16 nt, Human herpesvirus 7
aggaucuccuggaaag

SEQ ID NO: 3998606 - RNA, 16 nt, Human herpesvirus 7
aggauucggaaguaaa

SEQ ID NO: 3998607 - RNA, 12 nt, Human herpesvirus 7
aggcagaaaugu

SEQ ID NO: 3998608 - RNA, 14 nt, Human herpesvirus 7
aggcagaaaugucu

SEQ ID NO: 3998609 - RNA, 22 nt, Human herpesvirus 7
aggcaucgcauauagcgcuuuu

SEQ ID NO: 3998610 - RNA, 15 nt, Human herpesvirus 7
aggcggacaaauaua

SEQ ID NO: 3998611 - RNA, 23 nt, Human herpesvirus 7
agggauacaaaugcaaauuaaaa

SEQ ID NO: 3998612 - RNA, 13 nt, Human herpesvirus 7
agguacuaucuau

SEQ ID NO: 3998613 - RNA, 16 nt, Human herpesvirus 7
agguugucuguucuca

SEQ ID NO: 3998614 - RNA, 18 nt, Human herpesvirus 7
agguuuaggaaauugcuu

SEQ ID NO: 3998615 - RNA, 16 nt, Human herpesvirus 7
aguauguccaaucaaa

SEQ ID NO: 3998616 - RNA, 12 nt, Human herpesvirus 7
aguauuuaagaa

SEQ ID NO: 3998617 - RNA, 18 nt, Human herpesvirus 7
aguauuuuuuaugaagag

SEQ ID NO: 3998618 - RNA, 14 nt, Human herpesvirus 7
agucaaucugugaa

SEQ ID NO: 3998619 - RNA, 23 nt, Human herpesvirus 7
agucaaucugugaacugauguuu

SEQ ID NO: 3998620 - RNA, 16 nt, Human herpesvirus 7
aguccaauaguaaugu

SEQ ID NO: 3998621 - RNA, 23 nt, Human herpesvirus 7
agucuguagaugcaugcuaauau

SEQ ID NO: 3998622 - RNA, 12 nt, Human herpesvirus 7
agugaacauuug

SEQ ID NO: 3998623 - RNA, 23 nt, Human herpesvirus 7
aguggcuuaaguuuuuaaacuua

SEQ ID NO: 3998624 - RNA, 22 nt, Human herpesvirus 7
aguguaggcaagaaggccacgc

SEQ ID NO: 3998625 - RNA, 15 nt, Human herpesvirus 7
agugucugcccuuuu

SEQ ID NO: 3998626 - RNA, 20 nt, Human herpesvirus 7
agugucuguuguaacagauu

SEQ ID NO: 3998627 - RNA, 13 nt, Human herpesvirus 7
aguguguuaaaug

SEQ ID NO: 3998628 - RNA, 17 nt, Human herpesvirus 7
aguucuuugaaauagug

SEQ ID NO: 3998629 - RNA, 15 nt, Human herpesvirus 7
aguugaaaauguuuu

SEQ ID NO: 3998630 - RNA, 21 nt, Human herpesvirus 7
aguugagcgcauggagcacaa

SEQ ID NO: 3998631 - RNA, 15 nt, Human herpesvirus 7
aguuguacucagaga

SEQ ID NO: 3998632 - RNA, 15 nt, Human herpesvirus 7
aguuuguuucaauau

SEQ ID NO: 3998633 - RNA, 21 nt, Human herpesvirus 7
aguuuuacuuuugagcgcuga

SEQ ID NO: 3998634 - RNA, 13 nt, Human herpesvirus 7
auaaaauguacaa

SEQ ID NO: 3998635 - RNA, 22 nt, Human herpesvirus 7
auaaacuuacucuucucgaaga

SEQ ID NO: 3998636 - RNA, 18 nt, Human herpesvirus 7
auaaauacgcguggaagu

SEQ ID NO: 3998637 - RNA, 12 nt, Human herpesvirus 7
auaaauucugaa

SEQ ID NO: 3998638 - RNA, 14 nt, Human herpesvirus 7
auaaauucugaaau

SEQ ID NO: 3998639 - RNA, 13 nt, Human herpesvirus 7
auaaccaaugcug

SEQ ID NO: 3998640 - RNA, 17 nt, Human herpesvirus 7
auaagcucaaaaaguac

SEQ ID NO: 3998641 - RNA, 19 nt, Human herpesvirus 7
auaaucaaaaaauucuucu

SEQ ID NO: 3998642 - RNA, 21 nt, Human herpesvirus 7
auaaucuuaauguuucugagu

SEQ ID NO: 3998643 - RNA, 13 nt, Human herpesvirus 7
auaaugaaacugu

SEQ ID NO: 3998644 - RNA, 23 nt, Human herpesvirus 7
auaaugucauucguguuaguaga

SEQ ID NO: 3998645 - RNA, 15 nt, Human herpesvirus 7
auaauucacauuuau

SEQ ID NO: 3998646 - RNA, 17 nt, Human herpesvirus 7
auacaggccuguuucuu

SEQ ID NO: 3998647 - RNA, 20 nt, Human herpesvirus 7
auaccucuggcuucagacgu

SEQ ID NO: 3998648 - RNA, 15 nt, Human herpesvirus 7
auacguccaaaaauu

SEQ ID NO: 3998649 - RNA, 18 nt, Human herpesvirus 7
auacuaauagaaaaaugu

SEQ ID NO: 3998650 - RNA, 13 nt, Human herpesvirus 7
cauauuaacaagc

SEQ ID NO: 3998651 - RNA, 17 nt, Human herpesvirus 7
cauauuagaauugggau

SEQ ID NO: 3998652 - RNA, 22 nt, Human herpesvirus 7
caucauguuaaaaaaucaacuu

SEQ ID NO: 3998653 - RNA, 17 nt, Human herpesvirus 7
caucauucuucucggag

SEQ ID NO: 3998654 - RNA, 18 nt, Human herpesvirus 7
cauccugcuaaggcgaaa

SEQ ID NO: 3998655 - RNA, 16 nt, Human herpesvirus 7
caucgguagugucugg

SEQ ID NO: 3998656 - RNA, 20 nt, Human herpesvirus 7
caucuaauugcagacuaauu

SEQ ID NO: 3998657 - RNA, 17 nt, Human herpesvirus 7
caucuuaaaaguacaaa

SEQ ID NO: 3998658 - RNA, 22 nt, Human herpesvirus 7
caucuuaaaaguacaaauguuu

SEQ ID NO: 3998659 - RNA, 19 nt, Human herpesvirus 7
caugaacacugcuucuccc

SEQ ID NO: 3998660 - RNA, 21 nt, Human herpesvirus 7
caugaugaauauaacaaaaaa

SEQ ID NO: 3998661 - RNA, 17 nt, Human herpesvirus 7
caugcaagaaaaaaaug

SEQ ID NO: 3998662 - RNA, 14 nt, Human herpesvirus 7
cauggcuuuucaca

SEQ ID NO: 3998663 - RNA, 18 nt, Human herpesvirus 7
cauggggcauuaauucuu

SEQ ID NO: 3998664 - RNA, 13 nt, Human herpesvirus 7
cauuaauaucaau

SEQ ID NO: 3998665 - RNA, 14 nt, Human herpesvirus 7
cauuauuuguuaaa

SEQ ID NO: 3998666 - RNA, 19 nt, Human herpesvirus 7
cauuccuauuaagcagcuu

SEQ ID NO: 3998667 - RNA, 17 nt, Human herpesvirus 7
cauucuuuucaaugcaa

SEQ ID NO: 3998668 - RNA, 15 nt, Human herpesvirus 7
cauuguacaauuaca

SEQ ID NO: 3998669 - RNA, 12 nt, Human herpesvirus 7
cauuuacaaaaa

SEQ ID NO: 3998670 - RNA, 18 nt, Human herpesvirus 7
cauuuauggaaauaggcg

SEQ ID NO: 3998671 - RNA, 12 nt, Human herpesvirus 7
cauuuguugcuu

SEQ ID NO: 3998672 - RNA, 15 nt, Human herpesvirus 7
cauuuguuguggauu

SEQ ID NO: 3998673 - RNA, 16 nt, Human herpesvirus 7
cauuuuaccaaauaug

SEQ ID NO: 3998674 - RNA, 22 nt, Human herpesvirus 7
cauuuuuacucaauauaaagaa

SEQ ID NO: 3998675 - RNA, 13 nt, Human herpesvirus 7
cauuuuuucugau

SEQ ID NO: 3998676 - RNA, 18 nt, Human herpesvirus 7
ccaaaaucuauauuugau

SEQ ID NO: 3998677 - RNA, 17 nt, Human herpesvirus 7
ccaaaccggccaaugau

SEQ ID NO: 3998678 - RNA, 18 nt, Human herpesvirus 7
ccaagagccggaaagcaa

SEQ ID NO: 3998679 - RNA, 22 nt, Human herpesvirus 7
ccacagauauucuaacaaauac

SEQ ID NO: 3998680 - RNA, 13 nt, Human herpesvirus 7
ccacauuuaaaaa

SEQ ID NO: 3998681 - RNA, 15 nt, Human herpesvirus 7
ccagauuucuggcaa

SEQ ID NO: 3998682 - RNA, 20 nt, Human herpesvirus 7
ccaggaacagauucuccaga

SEQ ID NO: 3998683 - RNA, 13 nt, Human herpesvirus 7
ccauaaaugcuua

SEQ ID NO: 3998684 - RNA, 19 nt, Human herpesvirus 7
ccaugaaaaauaaauacua

SEQ ID NO: 3998685 - RNA, 12 nt, Human herpesvirus 7
cccccagaacuu

SEQ ID NO: 3998686 - RNA, 19 nt, Human herpesvirus 7
cccuggaacguccucugga

SEQ ID NO: 3998687 - RNA, 19 nt, Human herpesvirus 7
ccgcuguacaaugcugucu

SEQ ID NO: 3998688 - RNA, 15 nt, Human herpesvirus 7
ccuguacaaauuucu

SEQ ID NO: 3998689 - RNA, 13 nt, Human herpesvirus 7
ccuuguuugcugg

SEQ ID NO: 3998690 - RNA, 14 nt, Human herpesvirus 7
cgaaaagacaacaa

SEQ ID NO: 3998691 - RNA, 22 nt, Human herpesvirus 7
cgaaagccacuguugaugauuu

SEQ ID NO: 3998692 - RNA, 18 nt, Human herpesvirus 7
cgaaauaauuagaaagcu

SEQ ID NO: 3998693 - RNA, 17 nt, Human herpesvirus 7
cgaaaugaaaagucugu

SEQ ID NO: 3998694 - RNA, 22 nt, Human herpesvirus 7
cgaaucuuuauuauuuacugau

SEQ ID NO: 3998695 - RNA, 17 nt, Human herpesvirus 7
cgaauuggaaaaaaaac

SEQ ID NO: 3998696 - RNA, 23 nt, Human herpesvirus 7
cgagaauaaaucaaccaacauuc

SEQ ID NO: 3998697 - RNA, 18 nt, Human herpesvirus 7
cgauaaaagguguuuuug

SEQ ID NO: 3998698 - RNA, 20 nt, Human herpesvirus 7
cgauagcauuagagcauauu

SEQ ID NO: 3998699 - RNA, 19 nt, Human herpesvirus 7
cgauccucagaauguacac

SEQ ID NO: 3998700 - RNA, 22 nt, Human herpesvirus 7
cgaucuaaagacacuuauuuga

SEQ ID NO: 3998701 - RNA, 17 nt, Human herpesvirus 7
cgcaaggaauaugaaga

SEQ ID NO: 3998702 - RNA, 17 nt, Human herpesvirus 7
cgccuacgcagcaaugu

SEQ ID NO: 3998703 - RNA, 15 nt, Human herpesvirus 7
cgcugaaauuucaug

SEQ ID NO: 3998704 - RNA, 21 nt, Human herpesvirus 7
cggaauggacaaaaauaaagu

SEQ ID NO: 3998705 - RNA, 13 nt, Human herpesvirus 7
cggauaagaacaa

SEQ ID NO: 3998706 - RNA, 23 nt, Human herpesvirus 7
cggauagcggucaucucacuuca

SEQ ID NO: 3998707 - RNA, 13 nt, Human herpesvirus 7
cgggacagauuua

SEQ ID NO: 3998708 - RNA, 15 nt, Human herpesvirus 7
cgggguauguauggc

SEQ ID NO: 3998709 - RNA, 18 nt, Human herpesvirus 7
cgguaacaugucuucaac

SEQ ID NO: 3998710 - RNA, 17 nt, Human herpesvirus 7
cgucuuuugauuuugcc

SEQ ID NO: 3998711 - RNA, 15 nt, Human herpesvirus 7
cguuuauaaacucua

SEQ ID NO: 3998712 - RNA, 21 nt, Human herpesvirus 7
cguuuuaaggaauacaaacug

SEQ ID NO: 3998713 - RNA, 16 nt, Human herpesvirus 7
cuaaaauugacagcac

SEQ ID NO: 3998714 - RNA, 22 nt, Human herpesvirus 7
cuaaagugaacaugacuucaga

SEQ ID NO: 3998715 - RNA, 13 nt, Human herpesvirus 7
cuaaaguggagac

SEQ ID NO: 3998716 - RNA, 17 nt, Human herpesvirus 7
cuaaaugugcuaaauaa

SEQ ID NO: 3998717 - RNA, 14 nt, Human herpesvirus 7
cuaaccaucugcug

SEQ ID NO: 3998718 - RNA, 17 nt, Human herpesvirus 7
cuaagagcuuuugcaaa

SEQ ID NO: 3998719 - RNA, 16 nt, Human herpesvirus 7
cuaagguuugaagagu

SEQ ID NO: 3998720 - RNA, 22 nt, Human herpesvirus 7
cuacguguuuauacaaauuuua

SEQ ID NO: 3998721 - RNA, 14 nt, Human herpesvirus 7
cuagaaaauaguug

SEQ ID NO: 3998722 - RNA, 15 nt, Human herpesvirus 7
cuagaaaauaguugu

SEQ ID NO: 3998723 - RNA, 18 nt, Human herpesvirus 7
cuagaacuguuaaaaucu

SEQ ID NO: 3998724 - RNA, 23 nt, Human herpesvirus 7
cuagacauuuguuuuggauauaa

SEQ ID NO: 3998725 - RNA, 18 nt, Human herpesvirus 7
cuagaguaucuuuucaaa

SEQ ID NO: 3998726 - RNA, 19 nt, Human herpesvirus 7
cuagauugacuaugaauuu

SEQ ID NO: 3998727 - RNA, 23 nt, Human herpesvirus 7
cuagccuauaauucucacagcuu

SEQ ID NO: 3998728 - RNA, 18 nt, Human herpesvirus 7
cuauaaauggaauuuaac

SEQ ID NO: 3998729 - RNA, 22 nt, Human herpesvirus 7
cuaucaaauuuaucucauagcu

SEQ ID NO: 3998730 - RNA, 22 nt, Human herpesvirus 7
cuauccacucuccugaaauaaa

SEQ ID NO: 3998731 - RNA, 20 nt, Human herpesvirus 7
cuauuagauaaugacaaaca

SEQ ID NO: 3998732 - RNA, 18 nt, Human herpesvirus 7
cuauucucauagauuuca

SEQ ID NO: 3998733 - RNA, 14 nt, Human herpesvirus 7
cuauuguucuuuca

SEQ ID NO: 3998734 - RNA, 15 nt, Human herpesvirus 7
cucaaaucaaaguuu

SEQ ID NO: 3998735 - RNA, 14 nt, Human herpesvirus 7
cucguguggccuuc

SEQ ID NO: 3998736 - RNA, 13 nt, Human herpesvirus 7
cucuagaaaaucu

SEQ ID NO: 3998737 - RNA, 16 nt, Human herpesvirus 7
cucuagaacaaacugu

SEQ ID NO: 3998738 - RNA, 21 nt, Human herpesvirus 7
cucuuuuuuuuuauugccuug

SEQ ID NO: 3998739 - RNA, 15 nt, Human herpesvirus 7
cugaaaauaaaagag

SEQ ID NO: 3998740 - RNA, 14 nt, Human herpesvirus 7
cugaaaauugcgua

SEQ ID NO: 3998741 - RNA, 15 nt, Human herpesvirus 7
cugaaauaaacauuu

SEQ ID NO: 3998742 - RNA, 15 nt, Human herpesvirus 7
cugaagcauggauuu

SEQ ID NO: 3998743 - RNA, 20 nt, Human herpesvirus 7
cugaauaauaugcuuucacu

SEQ ID NO: 3998744 - RNA, 19 nt, Human herpesvirus 7
cugaaucaaaauccuggau

SEQ ID NO: 3998745 - RNA, 21 nt, Human herpesvirus 7
cugaaucaaaauccuggauuu

SEQ ID NO: 3998746 - RNA, 21 nt, Human herpesvirus 7
cugacauacgaaucaguucaa

SEQ ID NO: 3998747 - RNA, 17 nt, Human herpesvirus 7
cugacgaaaacugcaac

SEQ ID NO: 3998748 - RNA, 17 nt, Human herpesvirus 7
cugacuucaauuuugaa

SEQ ID NO: 3998749 - RNA, 23 nt, Human herpesvirus 7
cugagaagugggauuaaaaaucu

SEQ ID NO: 3998750 - RNA, 15 nt, Human herpesvirus 7
cugauacgcuuucug

SEQ ID NO: 3998751 - RNA, 12 nt, Human herpesvirus 7
cugcaaagaaaa

SEQ ID NO: 3998752 - RNA, 20 nt, Human herpesvirus 7
cugcaacaaauuaaauacuu

SEQ ID NO: 3998753 - RNA, 21 nt, Human herpesvirus 7
cugcaauaugcauguguaaag

SEQ ID NO: 3998754 - RNA, 23 nt, Human herpesvirus 7
cugcagaaauuuuuaaagagaaa

SEQ ID NO: 3998755 - RNA, 22 nt, Human herpesvirus 7
cugcauuccacuaaaagagaac

SEQ ID NO: 3998756 - RNA, 17 nt, Human herpesvirus 7
cugccucugccucuugg

SEQ ID NO: 3998757 - RNA, 21 nt, Human herpesvirus 7
cugcuggaaagcuugugaaga

SEQ ID NO: 3998758 - RNA, 14 nt, Human herpesvirus 7
cugcuugucucugu

SEQ ID NO: 3998759 - RNA, 13 nt, Human herpesvirus 7
cuggaaagcucau

SEQ ID NO: 3998760 - RNA, 20 nt, Human herpesvirus 7
cuggacacaaucagcauuua

SEQ ID NO: 3998761 - RNA, 17 nt, Human herpesvirus 7
cuggacauuucaagaag

SEQ ID NO: 3998762 - RNA, 23 nt, Human herpesvirus 7
cuggaugaaaacugaauugguaa

SEQ ID NO: 3998763 - RNA, 19 nt, Human herpesvirus 7
cuguugauaaauuuaaaga

SEQ ID NO: 3998764 - RNA, 13 nt, Human herpesvirus 7
auuucuuugcgcu

SEQ ID NO: 3998765 - RNA, 22 nt, Human herpesvirus 7
auuugcagccagaacucaauuu

SEQ ID NO: 3998766 - RNA, 20 nt, Human herpesvirus 7
auuugguauacacuauuuua

SEQ ID NO: 3998767 - RNA, 19 nt, Human herpesvirus 7
auuugguguacuacauauu

SEQ ID NO: 3998768 - RNA, 24 nt, Human herpesvirus 7
auuuguacuucaaaguagccuuca

SEQ ID NO: 3998769 - RNA, 19 nt, Human herpesvirus 7
auuuuaaaagguugacauc

SEQ ID NO: 3998770 - RNA, 13 nt, Human herpesvirus 7
auuuuacaaaaag

SEQ ID NO: 3998771 - RNA, 19 nt, Human herpesvirus 7
auuuuauugcgaaaaugau

SEQ ID NO: 3998772 - RNA, 13 nt, Human herpesvirus 7
auuuuauuuuccc

SEQ ID NO: 3998773 - RNA, 16 nt, Human herpesvirus 7
auuuucuuacacuaug

SEQ ID NO: 3998774 - RNA, 19 nt, Human herpesvirus 7
auuuugugacccugucaca

SEQ ID NO: 3998775 - RNA, 21 nt, Human herpesvirus 7
auuuuucauuuuuuucuuaua

SEQ ID NO: 3998776 - RNA, 14 nt, Human herpesvirus 7
auuuuuuaaagaaa

SEQ ID NO: 3998777 - RNA, 23 nt, Human herpesvirus 7
caaaaaagauuccugaugauaau

SEQ ID NO: 3998778 - RNA, 19 nt, Human herpesvirus 7
caaaaaagguguugauaga

SEQ ID NO: 3998779 - RNA, 23 nt, Human herpesvirus 7
caaaaacguuaccguuuaaugaa

SEQ ID NO: 3998780 - RNA, 12 nt, Human herpesvirus 7
caaaacauuuca

SEQ ID NO: 3998781 - RNA, 19 nt, Human herpesvirus 7
caaaaccguuggaugcacu

SEQ ID NO: 3998782 - RNA, 15 nt, Human herpesvirus 7
caaaagcugcagcug

SEQ ID NO: 3998783 - RNA, 16 nt, Human herpesvirus 7
caaaaucagaaauguu

SEQ ID NO: 3998784 - RNA, 20 nt, Human herpesvirus 7
caaaaucuguagaaaauguu

SEQ ID NO: 3998785 - RNA, 19 nt, Human herpesvirus 7
caaacaaugagcaauucau

SEQ ID NO: 3998786 - RNA, 14 nt, Human herpesvirus 7
caaagaaaaaacua

SEQ ID NO: 3998787 - RNA, 20 nt, Human herpesvirus 7
caaagcuucuacaaacaauu

SEQ ID NO: 3998788 - RNA, 16 nt, Human herpesvirus 7
caaaggaaaaaugcug

SEQ ID NO: 3998789 - RNA, 21 nt, Human herpesvirus 7
caaaggaaaaaugcugcucag

SEQ ID NO: 3998790 - RNA, 21 nt, Human herpesvirus 7
caaauaaacguccauugauua

SEQ ID NO: 3998791 - RNA, 23 nt, Human herpesvirus 7
caaaugugguaaauuugcuugcu

SEQ ID NO: 3998792 - RNA, 17 nt, Human herpesvirus 7
caaauucaaccacagac

SEQ ID NO: 3998793 - RNA, 22 nt, Human herpesvirus 7
caacaacuaaaacuacauuuaa

SEQ ID NO: 3998794 - RNA, 16 nt, Human herpesvirus 7
caacuugaaugagcug

SEQ ID NO: 3998795 - RNA, 18 nt, Human herpesvirus 7
caacuuugugccugaaau

SEQ ID NO: 3998796 - RNA, 15 nt, Human herpesvirus 7
caagaagaugacauu

SEQ ID NO: 3998797 - RNA, 16 nt, Human herpesvirus 7
caagauagcagaauau

SEQ ID NO: 3998798 - RNA, 20 nt, Human herpesvirus 7
caaggaaaaucguguuaagu

SEQ ID NO: 3998799 - RNA, 19 nt, Human herpesvirus 7
caaggggucgcauauugca

SEQ ID NO: 3998800 - RNA, 16 nt, Human herpesvirus 7
caaguagaaaaugcug

SEQ ID NO: 3998801 - RNA, 14 nt, Human herpesvirus 7
caauagaaaacaaa

SEQ ID NO: 3998802 - RNA, 21 nt, Human herpesvirus 7
caauauuuaaaguagcugaau

SEQ ID NO: 3998803 - RNA, 13 nt, Human herpesvirus 7
caaucaaaaacug

SEQ ID NO: 3998804 - RNA, 13 nt, Human herpesvirus 7
caauguaaacgaa

SEQ ID NO: 3998805 - RNA, 17 nt, Human herpesvirus 7
caauguuagaaacaucu

SEQ ID NO: 3998806 - RNA, 20 nt, Human herpesvirus 7
caauuaauucaguuuacugu

SEQ ID NO: 3998807 - RNA, 18 nt, Human herpesvirus 7
caauuuuuaacauuacgu

SEQ ID NO: 3998808 - RNA, 20 nt, Human herpesvirus 7
cacaggauuugggaaaauau

SEQ ID NO: 3998809 - RNA, 19 nt, Human herpesvirus 7
cacagggacguuucuagca

SEQ ID NO: 3998810 - RNA, 15 nt, Human herpesvirus 7
cacaucuucaauguu

SEQ ID NO: 3998811 - RNA, 22 nt, Human herpesvirus 7
cucuugcacaggauuugggaaa

SEQ ID NO: 3998812 - RNA, 18 nt, Human herpesvirus 7
cugaaaacauugcuguuc

SEQ ID NO: 3998813 - RNA, 22 nt, Human herpesvirus 7
cugaaagcgcaaaggaaaaaug

SEQ ID NO: 3998814 - RNA, 16 nt, Human herpesvirus 7
cugaauaauaugcuuu

SEQ ID NO: 3998815 - RNA, 21 nt, Human herpesvirus 7
cugagacggacuuauguccag

SEQ ID NO: 3998816 - RNA, 18 nt, Human herpesvirus 7
cugcaaagaaaaaaaugc

SEQ ID NO: 3998817 - RNA, 22 nt, Human herpesvirus 7
cugcaaagaaaaaaaugcuuag

SEQ ID NO: 3998818 - RNA, 19 nt, Human herpesvirus 7
cugcaaauccaacagaaua

SEQ ID NO: 3998819 - RNA, 20 nt, Human herpesvirus 7
cugcaaauuguaaauucucc

SEQ ID NO: 3998820 - RNA, 22 nt, Human herpesvirus 7
cugcaacuuugugccugaaaua

SEQ ID NO: 3998821 - RNA, 15 nt, Human herpesvirus 7
cugcuugucucuguc

SEQ ID NO: 3998822 - RNA, 16 nt, Human herpesvirus 7
cuggaacguccucugg

SEQ ID NO: 3998823 - RNA, 14 nt, Human herpesvirus 7
cuggaauauuugcu

SEQ ID NO: 3998824 - RNA, 17 nt, Human herpesvirus 7
cugggagcaaugcauga

SEQ ID NO: 3998825 - RNA, 14 nt, Human herpesvirus 7
cugggauagaaaug

SEQ ID NO: 3998826 - RNA, 17 nt, Human herpesvirus 7
cugggauagaaauguaa

SEQ ID NO: 3998827 - RNA, 14 nt, Human herpesvirus 7
cugguugauuugag

SEQ ID NO: 3998828 - RNA, 14 nt, Human herpesvirus 7
cuguaaaauuuaaa

SEQ ID NO: 3998829 - RNA, 21 nt, Human herpesvirus 7
cuguaaccauuuauuuacaga

SEQ ID NO: 3998830 - RNA, 21 nt, Human herpesvirus 7
cuguaaucauauaugcauuau

SEQ ID NO: 3998831 - RNA, 14 nt, Human herpesvirus 7
cuguagacauuucu

SEQ ID NO: 3998832 - RNA, 16 nt, Human herpesvirus 7
cugugaaguacauucc

SEQ ID NO: 3998833 - RNA, 17 nt, Human herpesvirus 7
cugugucaauaaacuua

SEQ ID NO: 3998834 - RNA, 17 nt, Human herpesvirus 7
cuguucccacugggaca

SEQ ID NO: 3998835 - RNA, 15 nt, Human herpesvirus 7
cuuaaaugucaauga

SEQ ID NO: 3998836 - RNA, 21 nt, Human herpesvirus 7
cuuaacuuuuggaaugauaua

SEQ ID NO: 3998837 - RNA, 20 nt, Human herpesvirus 7
cuuaaguuuuuuauacuuuu

SEQ ID NO: 3998838 - RNA, 19 nt, Human herpesvirus 7
cuuacaacuagaaaauaac

SEQ ID NO: 3998839 - RNA, 16 nt, Human herpesvirus 7
cuuacacuauucucua

SEQ ID NO: 3998840 - RNA, 19 nt, Human herpesvirus 7
cuuacagugcucuuugucu

SEQ ID NO: 3998841 - RNA, 15 nt, Human herpesvirus 7
cuuacauuugauuuu

SEQ ID NO: 3998842 - RNA, 22 nt, Human herpesvirus 7
cuuaccgcauaaaucauguuua

SEQ ID NO: 3998843 - RNA, 21 nt, Human herpesvirus 7
cuuagaauauuuauguucaaa

SEQ ID NO: 3998844 - RNA, 18 nt, Human herpesvirus 7
cuuagaugcugaaacauc

SEQ ID NO: 3998845 - RNA, 19 nt, Human herpesvirus 7
cuuagaugcugaaacauca

SEQ ID NO: 3998846 - RNA, 18 nt, Human herpesvirus 7
cuuauaacugugaaaaca

SEQ ID NO: 3998847 - RNA, 23 nt, Human herpesvirus 7
cuucugggaacuagaaaaacacu

SEQ ID NO: 3998848 - RNA, 20 nt, Human herpesvirus 7
cuucuuugugagaaauggaa

SEQ ID NO: 3998849 - RNA, 16 nt, Human herpesvirus 7
cuugacaccaacaucu

SEQ ID NO: 3998850 - RNA, 15 nt, Human herpesvirus 7
cuugcgguagcacua

SEQ ID NO: 3998851 - RNA, 13 nt, Human herpesvirus 7
cuugcuagauucu

SEQ ID NO: 3998852 - RNA, 12 nt, Human herpesvirus 7
cuuguauauacg

SEQ ID NO: 3998853 - RNA, 21 nt, Human herpesvirus 7
cuugugaaaauaacaggaaac

SEQ ID NO: 3998854 - RNA, 14 nt, Human herpesvirus 7
cuuguguugucaua

SEQ ID NO: 3998855 - RNA, 21 nt, Human herpesvirus 7
cuuuaacuggaauuauacacu

SEQ ID NO: 3998856 - RNA, 23 nt, Human herpesvirus 7
cuuuaauggaagaacaacaacua

SEQ ID NO: 3998857 - RNA, 20 nt, Human herpesvirus 7
cuuuagagucugugugugca

SEQ ID NO: 3998858 - RNA, 19 nt, Human herpesvirus 7
cuuuagauagaaauaguug

SEQ ID NO: 3998859 - RNA, 16 nt, Human herpesvirus 7
cuuuauaagcaguuau

SEQ ID NO: 3998860 - RNA, 20 nt, Human herpesvirus 7
cuuucacuacuacaugaaug

SEQ ID NO: 3998861 - RNA, 16 nt, Human herpesvirus 7
cuuucauaacaaagug

SEQ ID NO: 3998862 - RNA, 17 nt, Human herpesvirus 7
cuuucaugcauugcauu

SEQ ID NO: 3998863 - RNA, 14 nt, Human herpesvirus 7
cuuucgcaacaauc

SEQ ID NO: 3998864 - RNA, 18 nt, Human herpesvirus 7
cuuucuauuguaugggaa

SEQ ID NO: 3998865 - RNA, 21 nt, Human herpesvirus 7
cuuucuguuuaaguauguuua

SEQ ID NO: 3998866 - RNA, 11 nt, Human herpesvirus 7
cuuucuuuacc

SEQ ID NO: 3998867 - RNA, 20 nt, Human herpesvirus 7
cuuugaaucuauuaaagaca

SEQ ID NO: 3998868 - RNA, 20 nt, Human herpesvirus 7
cuuugcuaaccacuguguca

SEQ ID NO: 3998869 - RNA, 15 nt, Human herpesvirus 7
cuuuuagaaaucuuu

SEQ ID NO: 3998870 - RNA, 23 nt, Human herpesvirus 7
cuuuucaggcuaugacuuugaau

SEQ ID NO: 3998871 - RNA, 15 nt, Human herpesvirus 7
cuuuucuuucuuaau

SEQ ID NO: 3998872 - RNA, 13 nt, Human herpesvirus 7
cuuuuucuggaau

SEQ ID NO: 3998873 - RNA, 20 nt, Human herpesvirus 7
gaaaaagcaacaaauguuua

SEQ ID NO: 3998874 - RNA, 13 nt, Human herpesvirus 7
gaaaaauuuguua

SEQ ID NO: 3998875 - RNA, 23 nt, Human herpesvirus 7
gaaaacaaaucugauaaauuaca

SEQ ID NO: 3998876 - RNA, 15 nt, Human herpesvirus 7
gaaaacaucagaccu

SEQ ID NO: 3998877 - RNA, 14 nt, Human herpesvirus 7
gaaaacuugauaaa

SEQ ID NO: 3998878 - RNA, 13 nt, Human herpesvirus 7
gaaaagaacuuaa

SEQ ID NO: 3998879 - RNA, 16 nt, Human herpesvirus 7
gaaaauaacaggaaac

SEQ ID NO: 3998880 - RNA, 15 nt, Human herpesvirus 7
gaaaauaacuuuaaa

SEQ ID NO: 3998881 - RNA, 16 nt, Human herpesvirus 7
gaaaauacuacaguua

SEQ ID NO: 3998882 - RNA, 17 nt, Human herpesvirus 7
gaaaaugcauugcuuuu

SEQ ID NO: 3998883 - RNA, 24 nt, Human herpesvirus 7
gaaaauuuauauuugcuugcugaa

SEQ ID NO: 3998884 - RNA, 18 nt, Human herpesvirus 7
gaaacgucccugugacag

SEQ ID NO: 3998885 - RNA, 15 nt, Human herpesvirus 7
gaaagaaaagaugua

SEQ ID NO: 3998886 - RNA, 19 nt, Human herpesvirus 7
gaaagcguuucacugggaa

SEQ ID NO: 3998887 - RNA, 13 nt, Human herpesvirus 7
gaaaguccaaagu

SEQ ID NO: 3998888 - RNA, 17 nt, Human herpesvirus 7
gaaaucaaaaauaccgg

SEQ ID NO: 3998889 - RNA, 21 nt, Human herpesvirus 7
gaaaucuuucaucuucugaau

SEQ ID NO: 3998890 - RNA, 18 nt, Human herpesvirus 7
gaaaugagauuucugaaa

SEQ ID NO: 3998891 - RNA, 21 nt, Human herpesvirus 7
gaaauuaaguuuuucauguau

SEQ ID NO: 3998892 - RNA, 12 nt, Human herpesvirus 7
gaaauuacagua

SEQ ID NO: 3998893 - RNA, 14 nt, Human herpesvirus 7
gaaauuguuaaaaa

SEQ ID NO: 3998894 - RNA, 16 nt, Human herpesvirus 7
gaagaaugcaagccua

SEQ ID NO: 3998895 - RNA, 19 nt, Human herpesvirus 7
gaagacauauuagauuaua

SEQ ID NO: 3998896 - RNA, 16 nt, Human herpesvirus 7
gaaguaauuuaugcuu

SEQ ID NO: 3998897 - RNA, 23 nt, Human herpesvirus 7
gaaguugaucgucuguugaaaca

SEQ ID NO: 3998898 - RNA, 21 nt, Human herpesvirus 7
gaauaucuguggcuuuugcuu

SEQ ID NO: 3998899 - RNA, 21 nt, Human herpesvirus 7
gaauauggaacguuugaaucu

SEQ ID NO: 3998900 - RNA, 16 nt, Human herpesvirus 7
gaaucauuuauuugau

SEQ ID NO: 3998901 - RNA, 16 nt, Human herpesvirus 7
gaaugcucuuuugaaa

SEQ ID NO: 3998902 - RNA, 18 nt, Human herpesvirus 7
gaauuaagguggaaaucu

SEQ ID NO: 3998903 - RNA, 14 nt, Human herpesvirus 7
gaauuaauaaaaca

SEQ ID NO: 3998904 - RNA, 17 nt, Human herpesvirus 7
gaauuaauaaaaguauc

SEQ ID NO: 3998905 - RNA, 15 nt, Human herpesvirus 7
gaauucauuugugaa

SEQ ID NO: 3998906 - RNA, 17 nt, Human herpesvirus 7
gaauuccagauuuucug

SEQ ID NO: 3998907 - RNA, 14 nt, Human herpesvirus 7
gaauuccaggguaa

SEQ ID NO: 3998908 - RNA, 18 nt, Human herpesvirus 7
gacaacaaagcaugaaaa

SEQ ID NO: 3998909 - RNA, 19 nt, Human herpesvirus 7
gacaaggaaccguuugcag

SEQ ID NO: 3998910 - RNA, 20 nt, Human herpesvirus 7
gacaaucuauauaaaauauc

SEQ ID NO: 3998911 - RNA, 18 nt, Human herpesvirus 7
gacacaugcuuacagauc

SEQ ID NO: 3998912 - RNA, 16 nt, Human herpesvirus 7
gacaccaguaugaaau

SEQ ID NO: 3998913 - RNA, 19 nt, Human herpesvirus 7
gacaugcccuuucucguga

SEQ ID NO: 3998914 - RNA, 18 nt, Human herpesvirus 7
gacauuauuagacagaua

SEQ ID NO: 3998915 - RNA, 18 nt, Human herpesvirus 7
gacauuugaaauggguuu

SEQ ID NO: 3998916 - RNA, 20 nt, Human herpesvirus 7
gaccucgacauucuccagug

SEQ ID NO: 3998917 - RNA, 22 nt, Human herpesvirus 7
gacucuuuuuuuuuauugccuu

SEQ ID NO: 3998918 - RNA, 21 nt, Human herpesvirus 7
gacuuaucaaucuauuucuau

SEQ ID NO: 3998919 - RNA, 23 nt, Human herpesvirus 7
gagaauguugagcuaucugauuu

SEQ ID NO: 3998920 - RNA, 17 nt, Human herpesvirus 7
gagauauuauuaaaaaa

SEQ ID NO: 3998921 - RNA, 18 nt, Human herpesvirus 7
gagauuucugaaaaucuc

SEQ ID NO: 3998922 - RNA, 18 nt, Human herpesvirus 7
gaggaaaaccgcacauac

SEQ ID NO: 3998923 - RNA, 12 nt, Human herpesvirus 7
gaggacuugaaa

SEQ ID NO: 3998924 - RNA, 17 nt, Human herpesvirus 7
gagguccaauagaaaac

SEQ ID NO: 3998925 - RNA, 15 nt, Human herpesvirus 7
gaguacaugugucgu

SEQ ID NO: 3998926 - RNA, 14 nt, Human herpesvirus 7
gaguauuuaagaac

SEQ ID NO: 3998927 - RNA, 20 nt, Human herpesvirus 7
guagaauguguuucagcuuu

SEQ ID NO: 3998928 - RNA, 11 nt, Human herpesvirus 7
guagugucugc

SEQ ID NO: 3998929 - RNA, 18 nt, Human herpesvirus 7
guaugguuucauuuggaa

SEQ ID NO: 3998930 - RNA, 23 nt, Human herpesvirus 7
guauuuauuuuuuccaugucaca

SEQ ID NO: 3998931 - RNA, 17 nt, Human herpesvirus 7
gucaaauuuauauuuua

SEQ ID NO: 3998932 - RNA, 17 nt, Human herpesvirus 7
guccaaagugaugaaag

SEQ ID NO: 3998933 - RNA, 23 nt, Human herpesvirus 7
gucggcacacguacaauauuaaa

SEQ ID NO: 3998934 - RNA, 20 nt, Human herpesvirus 7
gucuauuucaauuaaugcau

SEQ ID NO: 3998935 - RNA, 19 nt, Human herpesvirus 7
gucugaaggcugcuuuuuc

SEQ ID NO: 3998936 - RNA, 20 nt, Human herpesvirus 7
gucugauucuuauucuacac

SEQ ID NO: 3998937 - RNA, 17 nt, Human herpesvirus 7
gugaaaacaguguugag

SEQ ID NO: 3998938 - RNA, 14 nt, Human herpesvirus 7
gugaaaauaacagg

SEQ ID NO: 3998939 - RNA, 14 nt, Human herpesvirus 7
gugacuuagaaaaa

SEQ ID NO: 3998940 - RNA, 14 nt, Human herpesvirus 7
gugauugguagaaa

SEQ ID NO: 3998941 - RNA, 14 nt, Human herpesvirus 7
gugauuuuaaauaa

SEQ ID NO: 3998942 - RNA, 23 nt, Human herpesvirus 7
gugcaauuaaaauguacauaacu

SEQ ID NO: 3998943 - RNA, 19 nt, Human herpesvirus 7
gugcagagaugaaggaagc

SEQ ID NO: 3998944 - RNA, 13 nt, Human herpesvirus 7
gugcaucacgaaa

SEQ ID NO: 3998945 - RNA, 19 nt, Human herpesvirus 7
gugccccaaacuguauuug

SEQ ID NO: 3998946 - RNA, 15 nt, Human herpesvirus 7
guggaaauuaaucaa

SEQ ID NO: 3998947 - RNA, 23 nt, Human herpesvirus 7
guuaacaaucuuacaaaaaguag

SEQ ID NO: 3998948 - RNA, 22 nt, Human herpesvirus 7
guuaacccagaagaaacuugaa

SEQ ID NO: 3998949 - RNA, 13 nt, Human herpesvirus 7
guuacauuauuau

SEQ ID NO: 3998950 - RNA, 16 nt, Human herpesvirus 7
guuacccaaaauguaa

SEQ ID NO: 3998951 - RNA, 19 nt, Human herpesvirus 7
guuacccaaaauguaaaau

SEQ ID NO: 3998952 - RNA, 20 nt, Human herpesvirus 7
guucaaccuuuuucugaaaa

SEQ ID NO: 3998953 - RNA, 13 nt, Human herpesvirus 7
guucauaaaccug

SEQ ID NO: 3998954 - RNA, 21 nt, Human herpesvirus 7
guucuaaaaaacaaaaaagug

SEQ ID NO: 3998955 - RNA, 15 nt, Human herpesvirus 7
guugcagcugugaua

SEQ ID NO: 3998956 - RNA, 18 nt, Human herpesvirus 7
guugggaugacaacggua

SEQ ID NO: 3998957 - RNA, 12 nt, Human herpesvirus 7
guuguuaagaau

SEQ ID NO: 3998958 - RNA, 22 nt, Human herpesvirus 7
guuuauuugaacggaauaaaca

SEQ ID NO: 3998959 - RNA, 12 nt, Human herpesvirus 7
guuuccauugcu

SEQ ID NO: 3998960 - RNA, 22 nt, Human herpesvirus 7
guuucuagcaaaauaugcaaaa

SEQ ID NO: 3998961 - RNA, 13 nt, Human herpesvirus 7
guuuuaaaguaug

SEQ ID NO: 3998962 - RNA, 12 nt, Human herpesvirus 7
guuuuauuccca

SEQ ID NO: 3998963 - RNA, 12 nt, Human herpesvirus 7
guuuuucaaaaa

SEQ ID NO: 3998964 - RNA, 13 nt, Human herpesvirus 7
uaaaaaaaaguug

SEQ ID NO: 3998965 - RNA, 11 nt, Human herpesvirus 7
uaaaaacagua

SEQ ID NO: 3998966 - RNA, 19 nt, Human herpesvirus 7
uaaaaacuuuucuuucuua

SEQ ID NO: 3998967 - RNA, 22 nt, Human herpesvirus 7
uaaaaaucucagcucuguaaua

SEQ ID NO: 3998968 - RNA, 14 nt, Human herpesvirus 7
uaaaagcauaugug

SEQ ID NO: 3998969 - RNA, 14 nt, Human herpesvirus 7
uaaaaucaaaugua

SEQ ID NO: 3998970 - RNA, 20 nt, Human herpesvirus 7
uaaaauguacaauuccugaa

SEQ ID NO: 3998971 - RNA, 17 nt, Human herpesvirus 7
uaaaauuaauguaauuu

SEQ ID NO: 3998972 - RNA, 19 nt, Human herpesvirus 7
uaaaauuuauauuaaauga

SEQ ID NO: 3998973 - RNA, 14 nt, Human herpesvirus 7
uaaagaacaucuug

SEQ ID NO: 3998974 - RNA, 17 nt, Human herpesvirus 7
uaaauaccaaaaaccug

SEQ ID NO: 3998975 - RNA, 14 nt, Human herpesvirus 7
uaaaugcuuaaauu

SEQ ID NO: 3998976 - RNA, 16 nt, Human herpesvirus 7
uaaauggcaaauccua

SEQ ID NO: 3998977 - RNA, 17 nt, Human herpesvirus 7
uaaauuaaaaagaaugc

SEQ ID NO: 3998978 - RNA, 14 nt, Human herpesvirus 7
uaaauucugaaaua

SEQ ID NO: 3998979 - RNA, 23 nt, Human herpesvirus 7
uaaauuuugaauguuuacaugua

SEQ ID NO: 3998980 - RNA, 15 nt, Human herpesvirus 7
uaacaagcacacuaa

SEQ ID NO: 3998981 - RNA, 16 nt, Human herpesvirus 7
gaaauaaaagcuuucu

SEQ ID NO: 3998982 - RNA, 17 nt, Human herpesvirus 7
gaaauauaugaauaucu

SEQ ID NO: 3998983 - RNA, 15 nt, Human herpesvirus 7
gaaauggcucuaguu

SEQ ID NO: 3998984 - RNA, 17 nt, Human herpesvirus 7
gaaauucgcaaaauuuc

SEQ ID NO: 3998985 - RNA, 16 nt, Human herpesvirus 7
gaaauuucaaaaauuc

SEQ ID NO: 3998986 - RNA, 14 nt, Human herpesvirus 7
aacaaacauuccaa

SEQ ID NO: 3998987 - RNA, 13 nt, Human herpesvirus 7
aacaaauugugga

SEQ ID NO: 3998988 - RNA, 19 nt, Human herpesvirus 7
aacaaguagaaaaugcugu

SEQ ID NO: 3998989 - RNA, 16 nt, Human herpesvirus 7
aacacucaaaacagaa

SEQ ID NO: 3998990 - RNA, 18 nt, Human herpesvirus 7
aacacuguuuucaguuau

SEQ ID NO: 3998991 - RNA, 16 nt, Human herpesvirus 7
aacagccaaauguggu

SEQ ID NO: 3998992 - RNA, 13 nt, Human herpesvirus 7
aacagcgugucaa

SEQ ID NO: 3998993 - RNA, 21 nt, Human herpesvirus 7
aacagcucuaucgucaucauc

SEQ ID NO: 3998994 - RNA, 14 nt, Human herpesvirus 7
aacaguuaaugugu

SEQ ID NO: 3998995 - RNA, 19 nt, Human herpesvirus 7
aacaucgagauuccaaaga

SEQ ID NO: 3998996 - RNA, 19 nt, Human herpesvirus 7
aacauuaauaucaauuuga

SEQ ID NO: 3998997 - RNA, 17 nt, Human herpesvirus 7
aacauugcuucagaaau

SEQ ID NO: 3998998 - RNA, 15 nt, Human herpesvirus 7
aaccauuuauuuaca

SEQ ID NO: 3998999 - RNA, 12 nt, Human herpesvirus 7
aacuaaguugaa

SEQ ID NO: 3999000 - RNA, 15 nt, Human herpesvirus 7
aacuagaaaauaacu

SEQ ID NO: 3999001 - RNA, 14 nt, Human herpesvirus 7
aacuaggaaacaca

SEQ ID NO: 3999002 - RNA, 16 nt, Human herpesvirus 7
aacucaauaaaaaugu

SEQ ID NO: 3999003 - RNA, 17 nt, Human herpesvirus 7
aacucugucaucaaaau

SEQ ID NO: 3999004 - RNA, 19 nt, Human herpesvirus 7
aacuguacccaaaaauaag

SEQ ID NO: 3999005 - RNA, 16 nt, Human herpesvirus 7
aacugugcaugaaauc

SEQ ID NO: 3999006 - RNA, 14 nt, Human herpesvirus 7
aacuugugaaaaua

SEQ ID NO: 3999007 - RNA, 11 nt, Human herpesvirus 7
aacuuugcuau

SEQ ID NO: 3999008 - RNA, 14 nt, Human herpesvirus 7
aagaauuuggauuu

SEQ ID NO: 3999009 - RNA, 17 nt, Human herpesvirus 7
aagaauuuucugcuuua

SEQ ID NO: 3999010 - RNA, 15 nt, Human herpesvirus 7
aagacacuuauuuga

SEQ ID NO: 3999011 - RNA, 22 nt, Human herpesvirus 7
aagacauaacaaaaaagguguu

SEQ ID NO: 3999012 - RNA, 16 nt, Human herpesvirus 7
aagagcucgauuuacu

SEQ ID NO: 3999013 - RNA, 18 nt, Human herpesvirus 7
aagagucuauugacauaa

SEQ ID NO: 3999014 - RNA, 15 nt, Human herpesvirus 7
aagauuuaacaugug

SEQ ID NO: 3999015 - RNA, 16 nt, Human herpesvirus 7
aagcaauguaugucaa

SEQ ID NO: 3999016 - RNA, 13 nt, Human herpesvirus 7
aagcacauguaca

SEQ ID NO: 3999017 - RNA, 15 nt, Human herpesvirus 7
aagcauaugugagaa

SEQ ID NO: 3999018 - RNA, 14 nt, Human herpesvirus 7
aagcugcagcugaa

SEQ ID NO: 3999019 - RNA, 12 nt, Human herpesvirus 7
aagcuuaaauaa

SEQ ID NO: 3999020 - RNA, 13 nt, Human herpesvirus 7
aagcuugaaaacu

SEQ ID NO: 3999021 - RNA, 19 nt, Human herpesvirus 7
aaggaucauaguaaacacg

SEQ ID NO: 3999022 - RNA, 18 nt, Human herpesvirus 7
aagggaucuuuuuucagu

SEQ ID NO: 3999023 - RNA, 22 nt, Human herpesvirus 7
aaguaaaagagaaaaaauagug

SEQ ID NO: 3999024 - RNA, 18 nt, Human herpesvirus 7
aaguauggaaaaauguua

SEQ ID NO: 3999025 - RNA, 23 nt, Human herpesvirus 7
aagucacaauuacacaaauugau

SEQ ID NO: 3999026 - RNA, 22 nt, Human herpesvirus 7
aagucugugacagauuuaagug

SEQ ID NO: 3999027 - RNA, 22 nt, Human herpesvirus 7
aaguuuuguaacuauaaaugga

SEQ ID NO: 3999028 - RNA, 11 nt, Human herpesvirus 7
aauaaauacua

SEQ ID NO: 3999029 - RNA, 14 nt, Human herpesvirus 7
aauaaauguucuuc

SEQ ID NO: 3999030 - RNA, 13 nt, Human herpesvirus 7
aauaauauaaaag

SEQ ID NO: 3999031 - RNA, 22 nt, Human herpesvirus 7
aauaauuuuuuuuugagugugc

SEQ ID NO: 3999032 - RNA, 23 nt, Human herpesvirus 7
aauagaugucugcauagacagua

SEQ ID NO: 3999033 - RNA, 17 nt, Human herpesvirus 7
aauagcagagaauaugu

SEQ ID NO: 3999034 - RNA, 22 nt, Human herpesvirus 7
aauaguuguguuuuaaaagcua

SEQ ID NO: 3999035 - RNA, 21 nt, Human herpesvirus 7
aauauacuuuagcgcugaaau

SEQ ID NO: 3999036 - RNA, 15 nt, Human herpesvirus 7
aauaucgauuuaaca

SEQ ID NO: 3999037 - RNA, 18 nt, Human herpesvirus 7
aauauggagcagcuuaag

SEQ ID NO: 3999038 - RNA, 22 nt, Human herpesvirus 7
aauauuuugaaaauauauucca

SEQ ID NO: 3999039 - RNA, 22 nt, Human herpesvirus 7
aaucaacagccaucuaauugca

SEQ ID NO: 3999040 - RNA, 15 nt, Human herpesvirus 7
aaucaauccaaauaa

SEQ ID NO: 3999041 - RNA, 14 nt, Human herpesvirus 7
aaucagaaauguua

SEQ ID NO: 3999042 - RNA, 22 nt, Human herpesvirus 7
aaucagcauuuaccauuucgaa

SEQ ID NO: 3999043 - RNA, 13 nt, Human herpesvirus 7
aauccaaguuuua

SEQ ID NO: 3999044 - RNA, 17 nt, Human herpesvirus 7
aauccaaguuuuacaga

SEQ ID NO: 3999045 - RNA, 22 nt, Human herpesvirus 7
aauccaaguuuuacagaaauug

SEQ ID NO: 3999046 - RNA, 16 nt, Human herpesvirus 7
aauccaugacagagaa

SEQ ID NO: 3999047 - RNA, 22 nt, Human herpesvirus 7
aauccguaucuagagaauguac

SEQ ID NO: 3999048 - RNA, 18 nt, Human herpesvirus 7
aaucucagcucuguaaua

SEQ ID NO: 3999049 - RNA, 21 nt, Human herpesvirus 7
aaugaauucuuugcaaucauu

SEQ ID NO: 3999050 - RNA, 14 nt, Human herpesvirus 7
aaugaccacaaccg

SEQ ID NO: 3999051 - RNA, 13 nt, Human herpesvirus 7
aaugagccugaca

SEQ ID NO: 3999052 - RNA, 17 nt, Human herpesvirus 7
aaugcugcucagcuaga

SEQ ID NO: 3999053 - RNA, 21 nt, Human herpesvirus 7
aaugguuuuaaaauagaaaau

SEQ ID NO: 3999054 - RNA, 23 nt, Human herpesvirus 7
aauguaaacgaagaaucauuuau

SEQ ID NO: 3999055 - RNA, 14 nt, Human herpesvirus 7
aauguaugaaaaug

SEQ ID NO: 3999056 - RNA, 16 nt, Human herpesvirus 7
aaugucucuguuccca

SEQ ID NO: 3999057 - RNA, 18 nt, Human herpesvirus 7
aauguuagaaacaucugu

SEQ ID NO: 3999058 - RNA, 16 nt, Human herpesvirus 7
aauguuauuuggaauu

SEQ ID NO: 3999059 - RNA, 16 nt, Human herpesvirus 7
aauguucgcaaaugua

SEQ ID NO: 3999060 - RNA, 15 nt, Human herpesvirus 7
aauuaaauacaaauu

SEQ ID NO: 3999061 - RNA, 18 nt, Human herpesvirus 7
aauuaauguaauuuauga

SEQ ID NO: 3999062 - RNA, 14 nt, Human herpesvirus 7
aauuagcuaaauaa

SEQ ID NO: 3999063 - RNA, 13 nt, Human herpesvirus 7
aauuagugaaaac

SEQ ID NO: 3999064 - RNA, 23 nt, Human herpesvirus 7
aauuauguauaucuuuuuauuga

SEQ ID NO: 3999065 - RNA, 18 nt, Human herpesvirus 7
aauuauguguauaagaau

SEQ ID NO: 3999066 - RNA, 21 nt, Human herpesvirus 7
aauuauuaaucuuuuugccuu

SEQ ID NO: 3999067 - RNA, 19 nt, Human herpesvirus 7
aauuauuagauuccauuua

SEQ ID NO: 3999068 - RNA, 15 nt, Human herpesvirus 7
aauuauuuccagagu

SEQ ID NO: 3999069 - RNA, 14 nt, Human herpesvirus 7
aauucauuguauga

SEQ ID NO: 3999070 - RNA, 20 nt, Human herpesvirus 7
aauuguuugaucaaaaucug

SEQ ID NO: 3999071 - RNA, 23 nt, Human herpesvirus 7
aauuguuuuucuuucuugcauac

SEQ ID NO: 3999072 - RNA, 15 nt, Human herpesvirus 7
aauuucuauuagaua

SEQ ID NO: 3999073 - RNA, 17 nt, Human herpesvirus 7
aauuuucuuagcuuuca

SEQ ID NO: 3999074 - RNA, 13 nt, Human herpesvirus 7
aauuuuuuacugu

SEQ ID NO: 3999075 - RNA, 20 nt, Human herpesvirus 7
acaaaacugcucauauuaac

SEQ ID NO: 3999076 - RNA, 19 nt, Human herpesvirus 7
acaaacauuccaacagcuu

SEQ ID NO: 3999077 - RNA, 21 nt, Human herpesvirus 7
acaaacauuccaacagcuuca

SEQ ID NO: 3999078 - RNA, 19 nt, Human herpesvirus 7
acaaauuggaaauuacugg

SEQ ID NO: 3999079 - RNA, 19 nt, Human herpesvirus 7
acaacaacuaaaacuacau

SEQ ID NO: 3999080 - RNA, 15 nt, Human herpesvirus 7
acaacgacauugaaa

SEQ ID NO: 3999081 - RNA, 19 nt, Human herpesvirus 7
acaagggcaauuguuugau

SEQ ID NO: 3999082 - RNA, 22 nt, Human herpesvirus 7
acaaucgcggggaaaaaaugag

SEQ ID NO: 3999083 - RNA, 17 nt, Human herpesvirus 7
acauauagauaaugaag

SEQ ID NO: 3999084 - RNA, 13 nt, Human herpesvirus 7
acauaucagauuu

SEQ ID NO: 3999085 - RNA, 19 nt, Human herpesvirus 7
acauauuuaauuucucguu

SEQ ID NO: 3999086 - RNA, 19 nt, Human herpesvirus 7
acaucaauuuuaaugugcu

SEQ ID NO: 3999087 - RNA, 13 nt, Human herpesvirus 7
acaucuaugugcu

SEQ ID NO: 3999088 - RNA, 17 nt, Human herpesvirus 7
acaugggauuucuguaa

SEQ ID NO: 3999089 - RNA, 13 nt, Human herpesvirus 7
acauguuuguaaa

SEQ ID NO: 3999090 - RNA, 15 nt, Human herpesvirus 7
acauuaaacagcauu

SEQ ID NO: 3999091 - RNA, 16 nt, Human herpesvirus 7
acauucaacaaagaca

SEQ ID NO: 3999092 - RNA, 15 nt, Human herpesvirus 7
acauuccuugagaaa

SEQ ID NO: 3999093 - RNA, 22 nt, Human herpesvirus 7
acauugugaguuucuacauguu

SEQ ID NO: 3999094 - RNA, 23 nt, Human herpesvirus 7
acauuuaaaaaaaaaaccacaaa

SEQ ID NO: 3999095 - RNA, 18 nt, Human herpesvirus 7
acauuuaugaaaaacaaa

SEQ ID NO: 3999096 - RNA, 20 nt, Human herpesvirus 7
acauuuauuauuuuuaaaaa

SEQ ID NO: 3999097 - RNA, 21 nt, Human herpesvirus 7
acauuucacucauuagaaaca

SEQ ID NO: 3999098 - RNA, 12 nt, Human herpesvirus 7
accaaaaugugg

SEQ ID NO: 3999099 - RNA, 18 nt, Human herpesvirus 7
accaaacuauauugaauu

SEQ ID NO: 3999100 - RNA, 12 nt, Human herpesvirus 7
accauuucugaa

SEQ ID NO: 3999101 - RNA, 17 nt, Human herpesvirus 7
acccagaccgcauaacc

SEQ ID NO: 3999102 - RNA, 18 nt, Human herpesvirus 7
acccuggagagacauaga

SEQ ID NO: 3999103 - RNA, 22 nt, Human herpesvirus 7
accucgacauucuccaguggca

SEQ ID NO: 3999104 - RNA, 22 nt, Human herpesvirus 7
accuguauggaaccuacugaag

SEQ ID NO: 3999105 - RNA, 18 nt, Human herpesvirus 7
accuuacaacaaagaaaa

SEQ ID NO: 3999106 - RNA, 14 nt, Human herpesvirus 7
acgaugauauuguc

SEQ ID NO: 3999107 - RNA, 21 nt, Human herpesvirus 7
acgauuugguguacuacauau

SEQ ID NO: 3999108 - RNA, 22 nt, Human herpesvirus 7
acgcaugcuugcuuugcauaga

SEQ ID NO: 3999109 - RNA, 19 nt, Human herpesvirus 7
acgcuuaauagaaauuauu

SEQ ID NO: 3999110 - RNA, 21 nt, Human herpesvirus 7
acggacaauaacauuuuguau

SEQ ID NO: 3999111 - RNA, 15 nt, Human herpesvirus 7
acggacuuaugucca

SEQ ID NO: 3999112 - RNA, 18 nt, Human herpesvirus 7
acgucuagacauuuguuu

SEQ ID NO: 3999113 - RNA, 14 nt, Human herpesvirus 7
acuaaguugaaauu

SEQ ID NO: 3999114 - RNA, 15 nt, Human herpesvirus 7
acuaauaaaaauuac

SEQ ID NO: 3999115 - RNA, 14 nt, Human herpesvirus 7
acuacauuuaaaaa

SEQ ID NO: 3999116 - RNA, 21 nt, Human herpesvirus 7
acuacuaaucaugaaaacagu

SEQ ID NO: 3999117 - RNA, 21 nt, Human herpesvirus 7
acuagaaaauaacuuuaaauu

SEQ ID NO: 3999118 - RNA, 15 nt, Human herpesvirus 7
acuauguccaaaaau

SEQ ID NO: 3999119 - RNA, 17 nt, Human herpesvirus 7
acuauguccaaaaauuu

SEQ ID NO: 3999120 - RNA, 17 nt, Human herpesvirus 7
acucauacuaauagaaa

SEQ ID NO: 3999121 - RNA, 13 nt, Human herpesvirus 7
acucauugggagu

SEQ ID NO: 3999122 - RNA, 17 nt, Human herpesvirus 7
acuccguuucauuuaaa

SEQ ID NO: 3999123 - RNA, 17 nt, Human herpesvirus 7
acuccuugcauacuuuu

SEQ ID NO: 3999124 - RNA, 18 nt, Human herpesvirus 7
acucggaaccgagaaugu

SEQ ID NO: 3999125 - RNA, 19 nt, Human herpesvirus 7
acucggaaccgagaauguu

SEQ ID NO: 3999126 - RNA, 15 nt, Human herpesvirus 7
acucugaauacguua

SEQ ID NO: 3999127 - RNA, 21 nt, Human herpesvirus 7
acucuucguuugaagagggaa

SEQ ID NO: 3999128 - RNA, 16 nt, Human herpesvirus 7
acugaagcauggauuu

SEQ ID NO: 3999129 - RNA, 20 nt, Human herpesvirus 7
acugaaucugaagaagaguu

SEQ ID NO: 3999130 - RNA, 12 nt, Human herpesvirus 7
acugauguaaaa

SEQ ID NO: 3999131 - RNA, 18 nt, Human herpesvirus 7
acuguaauauaauuauuu

SEQ ID NO: 3999132 - RNA, 15 nt, Human herpesvirus 7
acuguauaaucuuaa

SEQ ID NO: 3999133 - RNA, 15 nt, Human herpesvirus 7
acuguauuuguugau

SEQ ID NO: 3999134 - RNA, 15 nt, Human herpesvirus 7
acugucacuguccaa

SEQ ID NO: 3999135 - RNA, 17 nt, Human herpesvirus 7
acuuaaauauuuuacau

SEQ ID NO: 3999136 - RNA, 16 nt, Human herpesvirus 7
acuuaugauuggagua

SEQ ID NO: 3999137 - RNA, 14 nt, Human herpesvirus 7
acuuuaaauuauua

SEQ ID NO: 3999138 - RNA, 20 nt, Human herpesvirus 7
acuuucuauuguaugggaaa

SEQ ID NO: 3999139 - RNA, 17 nt, Human herpesvirus 7
acuuuuaaauuaaaaga

SEQ ID NO: 3999140 - RNA, 14 nt, Human herpesvirus 7
acuuuuaacuguua

SEQ ID NO: 3999141 - RNA, 15 nt, Human herpesvirus 7
agaaaaucuaccaau

SEQ ID NO: 3999142 - RNA, 14 nt, Human herpesvirus 7
agaaaaucucgaac

SEQ ID NO: 3999143 - RNA, 17 nt, Human herpesvirus 7
agaaaauguuuugauuu

SEQ ID NO: 3999144 - RNA, 15 nt, Human herpesvirus 7
agaaacagcugaaaa

SEQ ID NO: 3999145 - RNA, 17 nt, Human herpesvirus 7
agaaacuaauaaaaauu

SEQ ID NO: 3999146 - RNA, 15 nt, Human herpesvirus 7
agaaaguccaaagug

SEQ ID NO: 3999147 - RNA, 17 nt, Human herpesvirus 7
agaaauaacaaaauugu

SEQ ID NO: 3999148 - RNA, 22 nt, Human herpesvirus 7
agaaaucccaaaaaaaauuagu

SEQ ID NO: 3999149 - RNA, 23 nt, Human herpesvirus 7
agaacaacaacuaaaacuacauu

SEQ ID NO: 3999150 - RNA, 16 nt, Human herpesvirus 7
agaacagaaugauaau

SEQ ID NO: 3999151 - RNA, 19 nt, Human herpesvirus 7
agaacauuuauuuucuuaa

SEQ ID NO: 3999152 - RNA, 17 nt, Human herpesvirus 7
agaacauuuuucuugcu

SEQ ID NO: 3999153 - RNA, 19 nt, Human herpesvirus 7
agaagccacuucuaaauaa

SEQ ID NO: 3999154 - RNA, 18 nt, Human herpesvirus 7
agaauacuacucagaaga

SEQ ID NO: 3999155 - RNA, 23 nt, Human herpesvirus 7
agaauauuuauguucaaauaugc

SEQ ID NO: 3999156 - RNA, 16 nt, Human herpesvirus 7
agaaugcguaacuuug

SEQ ID NO: 3999157 - RNA, 16 nt, Human herpesvirus 7
agaaugcucuuuugaa

SEQ ID NO: 3999158 - RNA, 18 nt, Human herpesvirus 7
agaaugugguaaaaaagu

SEQ ID NO: 3999159 - RNA, 20 nt, Human herpesvirus 7
agaauguugagcuaucugau

SEQ ID NO: 3999160 - RNA, 23 nt, Human herpesvirus 7
agaauguuuauauauaaccgaua

SEQ ID NO: 3999161 - RNA, 20 nt, Human herpesvirus 7
agaauuccaggguaaagaua

SEQ ID NO: 3999162 - RNA, 15 nt, Human herpesvirus 7
agaauugauugaauu

SEQ ID NO: 3999163 - RNA, 14 nt, Human herpesvirus 7
agacagaaugccag

SEQ ID NO: 3999164 - RNA, 16 nt, Human herpesvirus 7
agaccaaauucaucca

SEQ ID NO: 3999165 - RNA, 21 nt, Human herpesvirus 7
agaccaggugacgucuagaca

SEQ ID NO: 3999166 - RNA, 22 nt, Human herpesvirus 7
agacucacuccuugcauacuuu

SEQ ID NO: 3999167 - RNA, 14 nt, Human herpesvirus 7
agagacaagaggac

SEQ ID NO: 3999168 - RNA, 16 nt, Human herpesvirus 7
agagaugaaaaaaauu

SEQ ID NO: 3999169 - RNA, 13 nt, Human herpesvirus 7
agagcauauacaa

SEQ ID NO: 3999170 - RNA, 18 nt, Human herpesvirus 7
agauaaguauaaacaguc

SEQ ID NO: 3999171 - RNA, 22 nt, Human herpesvirus 7
agauagcauuuguuacagcuuu

SEQ ID NO: 3999172 - RNA, 22 nt, Human herpesvirus 7
agauauugaugacguuaucuaa

SEQ ID NO: 3999173 - RNA, 15 nt, Human herpesvirus 7
agaugauaaaaacuu

SEQ ID NO: 3999174 - RNA, 17 nt, Human herpesvirus 7
agauggcacaauuguaa

SEQ ID NO: 3999175 - RNA, 19 nt, Human herpesvirus 7
agauguuuuugauauugua

SEQ ID NO: 3999176 - RNA, 18 nt, Human herpesvirus 7
agauuaauauauuuuccu

SEQ ID NO: 3999177 - RNA, 18 nt, Human herpesvirus 7
agauucggcugaguaaaa

SEQ ID NO: 3999178 - RNA, 17 nt, Human herpesvirus 7
agauuuaauaacaauuu

SEQ ID NO: 3999179 - RNA, 22 nt, Human herpesvirus 7
agcaagugucuuuuauuacucg

SEQ ID NO: 3999180 - RNA, 22 nt, Human herpesvirus 7
agcaauuuuaacgauuccaaac

SEQ ID NO: 3999181 - RNA, 14 nt, Human herpesvirus 7
agcacauguacaga

SEQ ID NO: 3999182 - RNA, 22 nt, Human herpesvirus 7
agcacauguacagacagaaugc

SEQ ID NO: 3999183 - RNA, 21 nt, Human herpesvirus 7
agcacccggcuuaaugaagac

SEQ ID NO: 3999184 - RNA, 17 nt, Human herpesvirus 7
agcagaucucgaacuuc

SEQ ID NO: 3999185 - RNA, 19 nt, Human herpesvirus 7
agcauaugcuggaucuucu

SEQ ID NO: 3999186 - RNA, 16 nt, Human herpesvirus 7
ggugauuguggggcau

SEQ ID NO: 3999187 - RNA, 21 nt, Human herpesvirus 7
gguuaaaaaaaugaauaacua

SEQ ID NO: 3999188 - RNA, 18 nt, Human herpesvirus 7
gguuuugaaauugacaug

SEQ ID NO: 3999189 - RNA, 17 nt, Human herpesvirus 7
guaaaaaaucaagucug

SEQ ID NO: 3999190 - RNA, 17 nt, Human herpesvirus 7
guaaaaaauuacuugcu

SEQ ID NO: 3999191 - RNA, 19 nt, Human herpesvirus 7
guaaaauucgcugaugaaa

SEQ ID NO: 3999192 - RNA, 14 nt, Human herpesvirus 7
guaaagauaauguu

SEQ ID NO: 3999193 - RNA, 15 nt, Human herpesvirus 7
guaagaaaagcaagu

SEQ ID NO: 3999194 - RNA, 17 nt, Human herpesvirus 7
guaaggcagugauuggu

SEQ ID NO: 3999195 - RNA, 14 nt, Human herpesvirus 7
guaauagcuuuaaa

SEQ ID NO: 3999196 - RNA, 20 nt, Human herpesvirus 7
guaauguaagaaaagcaagu

SEQ ID NO: 3999197 - RNA, 13 nt, Human herpesvirus 7
guaauuauuggau

SEQ ID NO: 3999198 - RNA, 17 nt, Human herpesvirus 7
guacaagguguuccuua

SEQ ID NO: 3999199 - RNA, 18 nt, Human herpesvirus 7
guacaauaauuucuauua

SEQ ID NO: 3999200 - RNA, 15 nt, Human herpesvirus 7
guacauuccuugaga

SEQ ID NO: 3999201 - RNA, 13 nt, Human herpesvirus 7
guagaaaugugcg

SEQ ID NO: 3999202 - RNA, 15 nt, Human herpesvirus 7
guauacaacuuuaug

SEQ ID NO: 3999203 - RNA, 20 nt, Human herpesvirus 7
guauuaaaggaaacauuucu

SEQ ID NO: 3999204 - RNA, 17 nt, Human herpesvirus 7
gucacaaaagcuuugau

SEQ ID NO: 3999205 - RNA, 17 nt, Human herpesvirus 7
gucagaacuuuuaaaaa

SEQ ID NO: 3999206 - RNA, 14 nt, Human herpesvirus 7
gucauaaaauuauc

SEQ ID NO: 3999207 - RNA, 22 nt, Human herpesvirus 7
gucaucuuauauuccuuugaaa

SEQ ID NO: 3999208 - RNA, 22 nt, Human herpesvirus 7
gucauugucgugagauuugaaa

SEQ ID NO: 3999209 - RNA, 21 nt, Human herpesvirus 7
gucauuugcaguuauuucuua

SEQ ID NO: 3999210 - RNA, 13 nt, Human herpesvirus 7
guccaagaaauau

SEQ ID NO: 3999211 - RNA, 19 nt, Human herpesvirus 7
gucuaaccccgcucuuuua

SEQ ID NO: 3999212 - RNA, 16 nt, Human herpesvirus 7
gucuaaggaauguggc

SEQ ID NO: 3999213 - RNA, 20 nt, Human herpesvirus 7
gucuacuaugggcuguuuua

SEQ ID NO: 3999214 - RNA, 23 nt, Human herpesvirus 7
gucuguugaaacauagcuagaaa

SEQ ID NO: 3999215 - RNA, 15 nt, Human herpesvirus 7
gugaaaauaaacagg

SEQ ID NO: 3999216 - RNA, 19 nt, Human herpesvirus 7
gugaaacacauucugucuu

SEQ ID NO: 3999217 - RNA, 20 nt, Human herpesvirus 7
gugaagacuacauaaaggua

SEQ ID NO: 3999218 - RNA, 18 nt, Human herpesvirus 7
gugcguacacuguaagcu

SEQ ID NO: 3999219 - RNA, 21 nt, Human herpesvirus 7
guggagcuauacguuuggagc

SEQ ID NO: 3999220 - RNA, 22 nt, Human herpesvirus 7
gugggauuugaaugaacaaaua

SEQ ID NO: 3999221 - RNA, 22 nt, Human herpesvirus 7
guguauuuuuuaaagaaaagcu

SEQ ID NO: 3999222 - RNA, 11 nt, Human herpesvirus 7
gugucuuacaa

SEQ ID NO: 3999223 - RNA, 15 nt, Human herpesvirus 7
gugugucucuagaaa

SEQ ID NO: 3999224 - RNA, 17 nt, Human herpesvirus 7
guuaagaauuccagauu

SEQ ID NO: 3999225 - RNA, 23 nt, Human herpesvirus 7
guuacaucauguuaaaaaaucaa

SEQ ID NO: 3999226 - RNA, 15 nt, Human herpesvirus 7
guuagaauaucugug

SEQ ID NO: 3999227 - RNA, 22 nt, Human herpesvirus 7
guuaucuuaugucugauucuua

SEQ ID NO: 3999228 - RNA, 22 nt, Human herpesvirus 7
guucauauacuucuugccccca

SEQ ID NO: 3999229 - RNA, 17 nt, Human herpesvirus 7
guuccuauaugugaaau

SEQ ID NO: 3999230 - RNA, 13 nt, Human herpesvirus 7
guucuaaauguac

SEQ ID NO: 3999231 - RNA, 15 nt, Human herpesvirus 7
guucuuguuuggaaa

SEQ ID NO: 3999232 - RNA, 14 nt, Human herpesvirus 7
guugaaaauguuuu

SEQ ID NO: 3999233 - RNA, 19 nt, Human herpesvirus 7
guugaaugaggacugcagu

SEQ ID NO: 3999234 - RNA, 14 nt, Human herpesvirus 7
guugaauucguuaa

SEQ ID NO: 3999235 - RNA, 14 nt, Human herpesvirus 7
guugauucucucuc

SEQ ID NO: 3999236 - RNA, 15 nt, Human herpesvirus 7
guugcacuccuagaa

SEQ ID NO: 3999237 - RNA, 15 nt, Human herpesvirus 7
guuuaaguauguuua

SEQ ID NO: 3999238 - RNA, 17 nt, Human herpesvirus 7
guuuauauauaaccgau

SEQ ID NO: 3999239 - RNA, 22 nt, Human herpesvirus 7
guuuccacauccgcaccgacag

SEQ ID NO: 3999240 - RNA, 15 nt, Human herpesvirus 7
guuugcucugaaaaa

SEQ ID NO: 3999241 - RNA, 22 nt, Human herpesvirus 7
guuuggcaacaaacaaauaauu

SEQ ID NO: 3999242 - RNA, 17 nt, Human herpesvirus 7
guuuucugagugcuaaa

SEQ ID NO: 3999243 - RNA, 20 nt, Human herpesvirus 7
guuuugagaguuguggcaaa

SEQ ID NO: 3999244 - RNA, 18 nt, Human herpesvirus 7
guuuuuuauuuagcuaau

SEQ ID NO: 3999245 - RNA, 15 nt, Human herpesvirus 7
uaaaaaaaaaaccac

SEQ ID NO: 3999246 - RNA, 20 nt, Human herpesvirus 7
uaaaaaaaccaggaacagau

SEQ ID NO: 3999247 - RNA, 11 nt, Human herpesvirus 7
uaaaacuguuu

SEQ ID NO: 3999248 - RNA, 17 nt, Human herpesvirus 7
uaaaaucuacuguaauc

SEQ ID NO: 3999249 - RNA, 19 nt, Human herpesvirus 7
uaaaauugacagcaccaau

SEQ ID NO: 3999250 - RNA, 13 nt, Human herpesvirus 7
uaaacauuucaaa

SEQ ID NO: 3999251 - RNA, 16 nt, Human herpesvirus 7
uaaacucacuucuaaa

SEQ ID NO: 3999252 - RNA, 13 nt, Human herpesvirus 7
uaaagcuuucaau

SEQ ID NO: 3999253 - RNA, 23 nt, Human herpesvirus 7
uaaaggaucaaaagcugcagcug

SEQ ID NO: 3999254 - RNA, 13 nt, Human herpesvirus 7
uaaaguuuacuua

SEQ ID NO: 3999255 - RNA, 17 nt, Human herpesvirus 7
uaaaguuuauauuuucu

SEQ ID NO: 3999256 - RNA, 14 nt, Human herpesvirus 7
uaaauaaaaauuug

SEQ ID NO: 3999257 - RNA, 15 nt, Human herpesvirus 7
uaaauaaaaugguug

SEQ ID NO: 3999258 - RNA, 18 nt, Human herpesvirus 7
uaaauauuuuuaaaaucu

SEQ ID NO: 3999259 - RNA, 22 nt, Human herpesvirus 7
uaaaucaguuguuggaaauacc

SEQ ID NO: 3999260 - RNA, 14 nt, Human herpesvirus 7
uaaaucauguuuaa

SEQ ID NO: 3999261 - RNA, 19 nt, Human herpesvirus 7
uaaauuaaaaagaaugcua

SEQ ID NO: 3999262 - RNA, 20 nt, Human herpesvirus 7
uaaauuacgagauauuauua

SEQ ID NO: 3999263 - RNA, 15 nt, Human herpesvirus 7
uaaauucaacaucuu

SEQ ID NO: 3999264 - RNA, 13 nt, Human herpesvirus 7
uaaauuuaaaauu

SEQ ID NO: 3999265 - RNA, 15 nt, Human herpesvirus 7
uaacagguaaauugu

SEQ ID NO: 3999266 - RNA, 13 nt, Human herpesvirus 7
uaacauauguuga

SEQ ID NO: 3999267 - RNA, 17 nt, Human herpesvirus 7
uaacaugccugcaauau

SEQ ID NO: 3999268 - RNA, 18 nt, Human herpesvirus 7
uaacgauuccaaaccuau

SEQ ID NO: 3999269 - RNA, 18 nt, Human herpesvirus 7
uaacggauuuacauuuca

SEQ ID NO: 3999270 - RNA, 18 nt, Human herpesvirus 7
uaacugagaaaaaugaca

SEQ ID NO: 3999271 - RNA, 22 nt, Human herpesvirus 7
uaacugagaaaaaugacaaaac

SEQ ID NO: 3999272 - RNA, 22 nt, Human herpesvirus 7
uaacuuuuuuuuucuuuaguuu

SEQ ID NO: 3999273 - RNA, 12 nt, Human herpesvirus 7
uaagaaacaucu

SEQ ID NO: 3999274 - RNA, 20 nt, Human herpesvirus 7
uaagagacauugaaaaugca

SEQ ID NO: 3999275 - RNA, 17 nt, Human herpesvirus 7
uaagcaaauaaauugug

SEQ ID NO: 3999276 - RNA, 14 nt, Human herpesvirus 7
uaagccagauuuca

SEQ ID NO: 3999277 - RNA, 13 nt, Human herpesvirus 7
uaagcuuuuucuu

SEQ ID NO: 3999278 - RNA, 18 nt, Human herpesvirus 7
uaaggcuguaaaagaaaa

SEQ ID NO: 3999279 - RNA, 22 nt, Human herpesvirus 7
uaaguucaucauguuuguugag

SEQ ID NO: 3999280 - RNA, 14 nt, Human herpesvirus 7
uaauaacaauuuga

SEQ ID NO: 3999281 - RNA, 16 nt, Human herpesvirus 7
uaauaguggugaaauu

SEQ ID NO: 3999282 - RNA, 18 nt, Human herpesvirus 7
uaaucaaggacaugauug

SEQ ID NO: 3999283 - RNA, 15 nt, Human herpesvirus 7
uaauuacuucuuuga

SEQ ID NO: 3999284 - RNA, 23 nt, Human herpesvirus 7
uaauugcagacuaauuacagcua

SEQ ID NO: 3999285 - RNA, 19 nt, Human herpesvirus 7
uaauuugaauuaauucuag

SEQ ID NO: 3999286 - RNA, 18 nt, Human herpesvirus 7
uacaaaaguucuguuuug

SEQ ID NO: 3999287 - RNA, 19 nt, Human herpesvirus 7
uacaauaugacgacuuuga

SEQ ID NO: 3999288 - RNA, 16 nt, Human herpesvirus 7
uacaauuucuggcaau

SEQ ID NO: 3999289 - RNA, 23 nt, Human herpesvirus 7
uacacuaugagauauuuaauggu

SEQ ID NO: 3999290 - RNA, 17 nt, Human herpesvirus 7
cuuuuuccaauagcacu

SEQ ID NO: 3999291 - RNA, 16 nt, Human herpesvirus 7
cuuuuucuggaauguu

SEQ ID NO: 3999292 - RNA, 21 nt, Human herpesvirus 7
gaaaacaaucaauaagccucu

SEQ ID NO: 3999293 - RNA, 20 nt, Human herpesvirus 7
gaaaagaaaaagcaacaaau

SEQ ID NO: 3999294 - RNA, 12 nt, Human herpesvirus 7
gaaaagagaaaa

SEQ ID NO: 3999295 - RNA, 13 nt, Human herpesvirus 7
gaaaauaacagga

SEQ ID NO: 3999296 - RNA, 19 nt, Human herpesvirus 7
gaaaaucuaucaccaagaa

SEQ ID NO: 3999297 - RNA, 16 nt, Human herpesvirus 7
gaaacaaucccagaaa

SEQ ID NO: 3999298 - RNA, 15 nt, Human herpesvirus 7
gaaacgucaggaaaa

SEQ ID NO: 3999299 - RNA, 16 nt, Human herpesvirus 7
gaaacuuccaauaacc

SEQ ID NO: 3999300 - RNA, 15 nt, Human herpesvirus 7
gaaagacaaacuaug

SEQ ID NO: 3999301 - RNA, 21 nt, Human herpesvirus 7
gaaagucagaacauugucaaa

SEQ ID NO: 3999302 - RNA, 17 nt, Human herpesvirus 7
gaaauaaauucaaggaa

SEQ ID NO: 3999303 - RNA, 14 nt, Human herpesvirus 7
gaaaucaaaaaugu

SEQ ID NO: 3999304 - RNA, 22 nt, Human herpesvirus 7
gaaaucugguugauuugagcag

SEQ ID NO: 3999305 - RNA, 17 nt, Human herpesvirus 7
gaaauggguuugggaaa

SEQ ID NO: 3999306 - RNA, 17 nt, Human herpesvirus 7
gaaaugucaagaacuuc

SEQ ID NO: 3999307 - RNA, 17 nt, Human herpesvirus 7
gaaauuaaauacaaauu

SEQ ID NO: 3999308 - RNA, 14 nt, Human herpesvirus 7
gaaauucuguggag

SEQ ID NO: 3999309 - RNA, 17 nt, Human herpesvirus 7
gaacauuugaagauaag

SEQ ID NO: 3999310 - RNA, 13 nt, Human herpesvirus 7
gaacccuggagag

SEQ ID NO: 3999311 - RNA, 22 nt, Human herpesvirus 7
gaacuguuuuaauguauuuuuc

SEQ ID NO: 3999312 - RNA, 18 nt, Human herpesvirus 7
gaacuucagauuuuaguu

SEQ ID NO: 3999313 - RNA, 22 nt, Human herpesvirus 7
gaacuuuuaaaaaagaacuuac

SEQ ID NO: 3999314 - RNA, 13 nt, Human herpesvirus 7
gaagaaaagaaaa

SEQ ID NO: 3999315 - RNA, 15 nt, Human herpesvirus 7
gaagaaugcaagccu

SEQ ID NO: 3999316 - RNA, 20 nt, Human herpesvirus 7
gaagagcuuuuuaaguaaau

SEQ ID NO: 3999317 - RNA, 20 nt, Human herpesvirus 7
gaagaggaguauguugcaua

SEQ ID NO: 3999318 - RNA, 22 nt, Human herpesvirus 7
gaagauuuguuccaaacucgag

SEQ ID NO: 3999319 - RNA, 13 nt, Human herpesvirus 7
gaagcgagauuua

SEQ ID NO: 3999320 - RNA, 19 nt, Human herpesvirus 7
gaagcugacuuugucauga

SEQ ID NO: 3999321 - RNA, 20 nt, Human herpesvirus 7
gaauaaucucaauuaaaaca

SEQ ID NO: 3999322 - RNA, 14 nt, Human herpesvirus 7
gaauagacaucuuc

SEQ ID NO: 3999323 - RNA, 21 nt, Human herpesvirus 7
gaauagguaucuuuacuuuca

SEQ ID NO: 3999324 - RNA, 20 nt, Human herpesvirus 7
gaauaugaagaguucuuguu

SEQ ID NO: 3999325 - RNA, 15 nt, Human herpesvirus 7
gaaucacaacauaua

SEQ ID NO: 3999326 - RNA, 16 nt, Human herpesvirus 7
gaaucagacuaaauau

SEQ ID NO: 3999327 - RNA, 21 nt, Human herpesvirus 7
gaaucauuuguauauucuagu

SEQ ID NO: 3999328 - RNA, 16 nt, Human herpesvirus 7
gaauccgcauuugagg

SEQ ID NO: 3999329 - RNA, 18 nt, Human herpesvirus 7
gaaucuauuuaaaauauu

SEQ ID NO: 3999330 - RNA, 14 nt, Human herpesvirus 7
gaaugaacaaauaa

SEQ ID NO: 3999331 - RNA, 19 nt, Human herpesvirus 7
gaaugauauaaaguuuaua

SEQ ID NO: 3999332 - RNA, 15 nt, Human herpesvirus 7
gaauuguacguucug

SEQ ID NO: 3999333 - RNA, 13 nt, Human herpesvirus 7
gaauuuccagaag

SEQ ID NO: 3999334 - RNA, 21 nt, Human herpesvirus 7
gaauuuuaacacuguuuucag

SEQ ID NO: 3999335 - RNA, 20 nt, Human herpesvirus 7
gaauuuuacaaugcagccua

SEQ ID NO: 3999336 - RNA, 22 nt, Human herpesvirus 7
gacaaagcauacuuuaaaacuu

SEQ ID NO: 3999337 - RNA, 17 nt, Human herpesvirus 7
gacauaacaaaaaaggu

SEQ ID NO: 3999338 - RNA, 11 nt, Human herpesvirus 7
gacauguuucu

SEQ ID NO: 3999339 - RNA, 16 nt, Human herpesvirus 7
gacauuauuagacaga

SEQ ID NO: 3999340 - RNA, 23 nt, Human herpesvirus 7
gacauuucaagaaggaaaauuuc

SEQ ID NO: 3999341 - RNA, 16 nt, Human herpesvirus 7
gacgcuguaugcaaga

SEQ ID NO: 3999342 - RNA, 17 nt, Human herpesvirus 7
gacgcuugcuauuuucu

SEQ ID NO: 3999343 - RNA, 18 nt, Human herpesvirus 7
gacggcauuuaacucaug

SEQ ID NO: 3999344 - RNA, 22 nt, Human herpesvirus 7
gacuaaucacgagaaaaauauu

SEQ ID NO: 3999345 - RNA, 20 nt, Human herpesvirus 7
gacuuaucaaucuauuucua

SEQ ID NO: 3999346 - RNA, 21 nt, Human herpesvirus 7
gacuuccucucguguggccuu

SEQ ID NO: 3999347 - RNA, 16 nt, Human herpesvirus 7
gagaaaguaaaagcua

SEQ ID NO: 3999348 - RNA, 14 nt, Human herpesvirus 7
gagaauuuaaagcu

SEQ ID NO: 3999349 - RNA, 16 nt, Human herpesvirus 7
gagagaauaagcaaau

SEQ ID NO: 3999350 - RNA, 14 nt, Human herpesvirus 7
gagagacaagagga

SEQ ID NO: 3999351 - RNA, 15 nt, Human herpesvirus 7
gagauuccaaagagc

SEQ ID NO: 3999352 - RNA, 11 nt, Human herpesvirus 7
gagguggaaaa

SEQ ID NO: 3999353 - RNA, 16 nt, Human herpesvirus 7
gagucaacacauaucu

SEQ ID NO: 3999354 - RNA, 18 nt, Human herpesvirus 7
gagucucuaaaauuuucu

SEQ ID NO: 3999355 - RNA, 14 nt, Human herpesvirus 7
gauaaaauuuggag

SEQ ID NO: 3999356 - RNA, 13 nt, Human herpesvirus 7
gaucauuugcaug

SEQ ID NO: 3999357 - RNA, 14 nt, Human herpesvirus 7
gauccguaacugca

SEQ ID NO: 3999358 - RNA, 17 nt, Human herpesvirus 7
gaugacuuccaaguuuu

SEQ ID NO: 3999359 - RNA, 17 nt, Human herpesvirus 7
gaugcauuuuuauugca

SEQ ID NO: 3999360 - RNA, 23 nt, Human herpesvirus 7
gauuauaugcaucaaaacauauc

SEQ ID NO: 3999361 - RNA, 14 nt, Human herpesvirus 7
gauuauauucaaau

SEQ ID NO: 3999362 - RNA, 14 nt, Human herpesvirus 7
gauucuaaauuaaa

SEQ ID NO: 3999363 - RNA, 13 nt, Human herpesvirus 7
gauucuccagaaa

SEQ ID NO: 3999364 - RNA, 19 nt, Human herpesvirus 7
gauuucacccuuuguuuga

SEQ ID NO: 3999365 - RNA, 12 nt, Human herpesvirus 7
gauuucuacaau

SEQ ID NO: 3999366 - RNA, 14 nt, Human herpesvirus 7
gcaaauaaauugug

SEQ ID NO: 3999367 - RNA, 19 nt, Human herpesvirus 7
gcaacaaacaaauaauuca

SEQ ID NO: 3999368 - RNA, 15 nt, Human herpesvirus 7
gcaacaaugacuuua

SEQ ID NO: 3999369 - RNA, 16 nt, Human herpesvirus 7
gcaacuuugugccuga

SEQ ID NO: 3999370 - RNA, 10 nt, Human herpesvirus 7
gcaacuuuuc

SEQ ID NO: 3999371 - RNA, 13 nt, Human herpesvirus 7
gcaauaugcucac

SEQ ID NO: 3999372 - RNA, 18 nt, Human herpesvirus 7
gcaauguauauaagcaga

SEQ ID NO: 3999373 - RNA, 20 nt, Human herpesvirus 7
gcacaguauaaucuugugaa

SEQ ID NO: 3999374 - RNA, 22 nt, Human herpesvirus 7
gcacugauaaucaagaaacaug

SEQ ID NO: 3999375 - RNA, 20 nt, Human herpesvirus 7
gcagccagaacucaauuuuu

SEQ ID NO: 3999376 - RNA, 23 nt, Human herpesvirus 7
gcauaaaaaaucuaauuaaucug

SEQ ID NO: 3999377 - RNA, 15 nt, Human herpesvirus 7
gcauauaauaaagga

SEQ ID NO: 3999378 - RNA, 12 nt, Human herpesvirus 7
gcauccaaagaa

SEQ ID NO: 3999379 - RNA, 20 nt, Human herpesvirus 7
gcaugcguaaaaaaucaagu

SEQ ID NO: 3999380 - RNA, 21 nt, Human herpesvirus 7
gcauuauauccaauaaugcau

SEQ ID NO: 3999381 - RNA, 14 nt, Human herpesvirus 7
gcauuccuuggaaa

SEQ ID NO: 3999382 - RNA, 19 nt, Human herpesvirus 7
gcauuccuuggaaaaauga

SEQ ID NO: 3999383 - RNA, 13 nt, Human herpesvirus 7
gccaaugauuuuu

SEQ ID NO: 3999384 - RNA, 13 nt, Human herpesvirus 7
gccaauugaagaa

SEQ ID NO: 3999385 - RNA, 13 nt, Human herpesvirus 7
gccagaaauuaaa

SEQ ID NO: 3999386 - RNA, 17 nt, Human herpesvirus 7
gccagagaaccacguga

SEQ ID NO: 3999387 - RNA, 19 nt, Human herpesvirus 7
gccagauuucauguuuuau

SEQ ID NO: 3999388 - RNA, 16 nt, Human herpesvirus 7
gccagguauucaaaca

SEQ ID NO: 3999389 - RNA, 15 nt, Human herpesvirus 7
gccauaauuugaauu

SEQ ID NO: 3999390 - RNA, 13 nt, Human herpesvirus 7
gccauucuuuuca

SEQ ID NO: 3999391 - RNA, 12 nt, Human herpesvirus 7
gcgaaaaugaua

SEQ ID NO: 3999392 - RNA, 11 nt, Human herpesvirus 7
gcgcugaaaua

SEQ ID NO: 3999393 - RNA, 14 nt, Human herpesvirus 7
gcuagaaucuuguu

SEQ ID NO: 3999394 - RNA, 18 nt, Human herpesvirus 7
gcuauuauaauguaagaa

SEQ ID NO: 3999395 - RNA, 15 nt, Human herpesvirus 7
gcuauucauuucacg

SEQ ID NO: 3999396 - RNA, 12 nt, Human herpesvirus 7
gcucuaaacaaa

SEQ ID NO: 3999397 - RNA, 13 nt, Human herpesvirus 7
gcucucaaucaaa

SEQ ID NO: 3999398 - RNA, 12 nt, Human herpesvirus 7
gcugaagaacau

SEQ ID NO: 3999399 - RNA, 13 nt, Human herpesvirus 7
gcugcaucuuuuc

SEQ ID NO: 3999400 - RNA, 21 nt, Human herpesvirus 7
gcuguucuugcuggcucaagc

SEQ ID NO: 3999401 - RNA, 13 nt, Human herpesvirus 7
gcuuaaaaacagu

SEQ ID NO: 3999402 - RNA, 21 nt, Human herpesvirus 7
gcuuagaauauuuauguucaa

SEQ ID NO: 3999403 - RNA, 14 nt, Human herpesvirus 7
gcuucagaugcuau

SEQ ID NO: 3999404 - RNA, 13 nt, Human herpesvirus 7
gcuuguuaaagaa

SEQ ID NO: 3999405 - RNA, 23 nt, Human herpesvirus 7
gcuuugaucuacauauacuuuua

SEQ ID NO: 3999406 - RNA, 16 nt, Human herpesvirus 7
ucuauuuaaaauauua

SEQ ID NO: 3999407 - RNA, 16 nt, Human herpesvirus 7
ucucagaaguuucaau

SEQ ID NO: 3999408 - RNA, 22 nt, Human herpesvirus 7
ucucauaauaucgguuaucuua

SEQ ID NO: 3999409 - RNA, 14 nt, Human herpesvirus 7
ucucguaauuuaag

SEQ ID NO: 3999410 - RNA, 18 nt, Human herpesvirus 7
ucucuugaggaaaugucu

SEQ ID NO: 3999411 - RNA, 20 nt, Human herpesvirus 7
ucugaguguguuaaaugcga

SEQ ID NO: 3999412 - RNA, 23 nt, Human herpesvirus 7
ucugcacuaucuccuaaaugaau

SEQ ID NO: 3999413 - RNA, 15 nt, Human herpesvirus 7
ucugcuugucucugu

SEQ ID NO: 3999414 - RNA, 18 nt, Human herpesvirus 7
ucuggaaucgaauacagu

SEQ ID NO: 3999415 - RNA, 16 nt, Human herpesvirus 7
ucuggauucaagaaau

SEQ ID NO: 3999416 - RNA, 18 nt, Human herpesvirus 7
ucuguaaaaacuuguuug

SEQ ID NO: 3999417 - RNA, 17 nt, Human herpesvirus 7
ucuguagaaaauguuuu

SEQ ID NO: 3999418 - RNA, 21 nt, Human herpesvirus 7
ucuuaaaaguacaaauguuuu

SEQ ID NO: 3999419 - RNA, 18 nt, Human herpesvirus 7
ucuuaauaaaguuuaauu

SEQ ID NO: 3999420 - RNA, 15 nt, Human herpesvirus 7
ucuuaauuuguucaa

SEQ ID NO: 3999421 - RNA, 17 nt, Human herpesvirus 7
ucuuacagugcucuuug

SEQ ID NO: 3999422 - RNA, 22 nt, Human herpesvirus 7
ucuuacgucuuuucuaccaaca

SEQ ID NO: 3999423 - RNA, 14 nt, Human herpesvirus 7
ucuuauaacaaagu

SEQ ID NO: 3999424 - RNA, 17 nt, Human herpesvirus 7
ucuuaucuccauucuaa

SEQ ID NO: 3999425 - RNA, 23 nt, Human herpesvirus 7
ucuucauaaaaaaaaagggagaa

SEQ ID NO: 3999426 - RNA, 12 nt, Human herpesvirus 7
ucuucuucugag

SEQ ID NO: 3999427 - RNA, 16 nt, Human herpesvirus 7
ucuuggguaauuuuaa

SEQ ID NO: 3999428 - RNA, 22 nt, Human herpesvirus 7
ucuuuaauccguaucuagagaa

SEQ ID NO: 3999429 - RNA, 22 nt, Human herpesvirus 7
ucuuuauaaaggaccaugggaa

SEQ ID NO: 3999430 - RNA, 18 nt, Human herpesvirus 7
ucuuuauuuaagcuucaa

SEQ ID NO: 3999431 - RNA, 20 nt, Human herpesvirus 7
ucuuuauuuaagcuucaaaa

SEQ ID NO: 3999432 - RNA, 20 nt, Human herpesvirus 7
ugaaaaaaucuugcaagcag

SEQ ID NO: 3999433 - RNA, 18 nt, Human herpesvirus 7
ugaaaauguuuuugcuag

SEQ ID NO: 3999434 - RNA, 23 nt, Human herpesvirus 7
ugaaaauuuccuacaaaaguucu

SEQ ID NO: 3999435 - RNA, 18 nt, Human herpesvirus 7
ugaaacauagcuagaaau

SEQ ID NO: 3999436 - RNA, 16 nt, Human herpesvirus 7
ugaaagccgcugccuu

SEQ ID NO: 3999437 - RNA, 13 nt, Human herpesvirus 7
ugaaaucaaaaau

SEQ ID NO: 3999438 - RNA, 15 nt, Human herpesvirus 7
ugaacagaauuuuca

SEQ ID NO: 3999439 - RNA, 23 nt, Human herpesvirus 7
ugaagaagaguugcaacuagaga

SEQ ID NO: 3999440 - RNA, 17 nt, Human herpesvirus 7
ugaagcuaaaauuuuga

SEQ ID NO: 3999441 - RNA, 13 nt, Human herpesvirus 7
ugaauaaaaucua

SEQ ID NO: 3999442 - RNA, 16 nt, Human herpesvirus 7
ugaaucaaauuucaaa

SEQ ID NO: 3999443 - RNA, 14 nt, Human herpesvirus 7
ugacaaauuucagg

SEQ ID NO: 3999444 - RNA, 21 nt, Human herpesvirus 7
ugaguguggugacagaaguaa

SEQ ID NO: 3999445 - RNA, 13 nt, Human herpesvirus 7
ugauaagauuucc

SEQ ID NO: 3999446 - RNA, 13 nt, Human herpesvirus 7
ugauaauuucuau

SEQ ID NO: 3999447 - RNA, 16 nt, Human herpesvirus 7
ugaucuggauucaaga

SEQ ID NO: 3999448 - RNA, 22 nt, Human herpesvirus 7
ugauucuuauucuacacaucuu

SEQ ID NO: 3999449 - RNA, 15 nt, Human herpesvirus 7
ugauuuauauagcaa

SEQ ID NO: 3999450 - RNA, 18 nt, Human herpesvirus 7
ugauuugagcagugauuu

SEQ ID NO: 3999451 - RNA, 17 nt, Human herpesvirus 7
ugcaacucuucuucaga

SEQ ID NO: 3999452 - RNA, 19 nt, Human herpesvirus 7
ugcaacuggcauuccuugg

SEQ ID NO: 3999453 - RNA, 18 nt, Human herpesvirus 7
ugcaauaugcauguguaa

SEQ ID NO: 3999454 - RNA, 18 nt, Human herpesvirus 7
ugcaauuaaaauguacau

SEQ ID NO: 3999455 - RNA, 18 nt, Human herpesvirus 7
ugcagacuaauuacagcu

SEQ ID NO: 3999456 - RNA, 22 nt, Human herpesvirus 7
ugcaucaaaacauaucagauuu

SEQ ID NO: 3999457 - RNA, 13 nt, Human herpesvirus 7
ugcaugaaaucuu

SEQ ID NO: 3999458 - RNA, 23 nt, Human herpesvirus 7
ugcauuuuuauugcaguuuuuua

SEQ ID NO: 3999459 - RNA, 14 nt, Human herpesvirus 7
ugccaaaagcuuga

SEQ ID NO: 3999460 - RNA, 21 nt, Human herpesvirus 7
ugccacguuuuuuucuucaau

SEQ ID NO: 3999461 - RNA, 17 nt, Human herpesvirus 7
ugcguuaaugucucugu

SEQ ID NO: 3999462 - RNA, 21 nt, Human herpesvirus 7
ugcuauuauuaaagcuuucaa

SEQ ID NO: 3999463 - RNA, 19 nt, Human herpesvirus 7
ugcucauguugacgggaaa

SEQ ID NO: 3999464 - RNA, 22 nt, Human herpesvirus 7
ugcuggaucauagagaaaacau

SEQ ID NO: 3999465 - RNA, 13 nt, Human herpesvirus 7
ugcugugagugaa

SEQ ID NO: 3999466 - RNA, 15 nt, Human herpesvirus 7
ugcuuuucaugcuuu

SEQ ID NO: 3999467 - RNA, 16 nt, Human herpesvirus 7
uggaaaaacagaaugu

SEQ ID NO: 3999468 - RNA, 18 nt, Human herpesvirus 7
uggaaaaauaaacaauau

SEQ ID NO: 3999469 - RNA, 17 nt, Human herpesvirus 7
uggaaccuacugaagag

SEQ ID NO: 3999470 - RNA, 18 nt, Human herpesvirus 7
uggaagacgccaauaaau

SEQ ID NO: 3999471 - RNA, 24 nt, Human herpesvirus 7
uggaguauuaccauuuauggaaau

SEQ ID NO: 3999472 - RNA, 19 nt, Human herpesvirus 7
uggaguuagcgaggcauuu

SEQ ID NO: 3999473 - RNA, 15 nt, Human herpesvirus 7
uggauacaaggaaaa

SEQ ID NO: 3999474 - RNA, 14 nt, Human herpesvirus 7
uggauacggcagcg

SEQ ID NO: 3999475 - RNA, 15 nt, Human herpesvirus 7
uggauuucagcauuu

SEQ ID NO: 3999476 - RNA, 23 nt, Human herpesvirus 7
uggcauugaaauucuguggagug

SEQ ID NO: 3999477 - RNA, 22 nt, Human herpesvirus 7
uggguuaacgaaacgcuagaau

SEQ ID NO: 3999478 - RNA, 16 nt, Human herpesvirus 7
uggucagaacaucccu

SEQ ID NO: 3999479 - RNA, 14 nt, Human herpesvirus 7
uggucgagaauaca

SEQ ID NO: 3999480 - RNA, 17 nt, Human herpesvirus 7
ugguguacuacauauua

SEQ ID NO: 3999481 - RNA, 14 nt, Human herpesvirus 7
ugguugugcaauuu

SEQ ID NO: 3999482 - RNA, 21 nt, Human herpesvirus 7
uguaacaacuagcaaacagug

SEQ ID NO: 3999483 - RNA, 18 nt, Human herpesvirus 7
uguaauuucucaaaucuu

SEQ ID NO: 3999484 - RNA, 19 nt, Human herpesvirus 7
uguacaauuacaaaaugua

SEQ ID NO: 3999485 - RNA, 22 nt, Human herpesvirus 7
uguacaauuugcauaauccucu

SEQ ID NO: 3999486 - RNA, 16 nt, Human herpesvirus 7
uguacuuuuuauuguu

SEQ ID NO: 3999487 - RNA, 14 nt, Human herpesvirus 7
uguauacaacuuua

SEQ ID NO: 3999488 - RNA, 22 nt, Human herpesvirus 7
uguauaugcucuagaaaaucua

SEQ ID NO: 3999489 - RNA, 16 nt, Human herpesvirus 7
uguaugaaaaaaacau

SEQ ID NO: 3999490 - RNA, 22 nt, Human herpesvirus 7
uguaugcaagaaaguccaaagu

SEQ ID NO: 3999491 - RNA, 19 nt, Human herpesvirus 7
uguauuaaguguuugcucu

SEQ ID NO: 3999492 - RNA, 23 nt, Human herpesvirus 7
ugucacguguucaggcaacauua

SEQ ID NO: 3999493 - RNA, 13 nt, Human herpesvirus 7
ugucauaaaauua

SEQ ID NO: 3999494 - RNA, 14 nt, Human herpesvirus 7
ugucuauuucaauu

SEQ ID NO: 3999495 - RNA, 21 nt, Human herpesvirus 7
ugucuuaauugccgauuccua

SEQ ID NO: 3999496 - RNA, 18 nt, Human herpesvirus 7
ugucuucggccuugcuga

SEQ ID NO: 3999497 - RNA, 21 nt, Human herpesvirus 7
ugugaacugauguuuggcaac

SEQ ID NO: 3999498 - RNA, 18 nt, Human herpesvirus 7
uguguaaaaaaaaguugu

SEQ ID NO: 3999499 - RNA, 21 nt, Human herpesvirus 7
uguuacaaucgcggggaaaaa

SEQ ID NO: 3999500 - RNA, 23 nt, Human herpesvirus 7
uguuaucauacguuuacaguuuu

SEQ ID NO: 3999501 - RNA, 18 nt, Human herpesvirus 7
uguuauuuuucaugccuu

SEQ ID NO: 3999502 - RNA, 15 nt, Human herpesvirus 7
uguuccacgaucauu

SEQ ID NO: 3999503 - RNA, 11 nt, Human herpesvirus 7
uguugaaauug

SEQ ID NO: 3999504 - RNA, 13 nt, Human herpesvirus 7
uguuugaucaaaa

SEQ ID NO: 3999505 - RNA, 17 nt, Human herpesvirus 7
uuaaaggaaauaaacaa

SEQ ID NO: 3999506 - RNA, 16 nt, Human herpesvirus 7
uuaaaguagcugaauu

SEQ ID NO: 3999507 - RNA, 16 nt, Human herpesvirus 7
uuaaaguauuuauuuu

SEQ ID NO: 3999508 - RNA, 12 nt, Human herpesvirus 7
uuaaauuauuau

SEQ ID NO: 3999509 - RNA, 14 nt, Human herpesvirus 7
uuaaauuauuauua

SEQ ID NO: 3999510 - RNA, 23 nt, Human herpesvirus 7
uuaacaacagccaaaugugguaa

SEQ ID NO: 3999511 - RNA, 21 nt, Human herpesvirus 7
uuaacacguagaaaaaaacaa

SEQ ID NO: 3999512 - RNA, 23 nt, Human herpesvirus 7
uuaacacguagaaaaaaacaaug

SEQ ID NO: 3999513 - RNA, 22 nt, Human herpesvirus 7
uuaacgaaacgcuagaaucuug

SEQ ID NO: 3999514 - RNA, 23 nt, Human herpesvirus 7
uuaacgaaggcaucaagaaacaa

SEQ ID NO: 3999515 - RNA, 20 nt, Human herpesvirus 7
uuaacuauaucaucaucuuu

SEQ ID NO: 3999516 - RNA, 18 nt, Human herpesvirus 7
uuaaguauuuuacaacaa

SEQ ID NO: 3999517 - RNA, 14 nt, Human herpesvirus 7
uuaagugaacuguu

SEQ ID NO: 3999518 - RNA, 23 nt, Human herpesvirus 7
uuaauaaaaagcccaugaacacu

SEQ ID NO: 3999519 - RNA, 17 nt, Human herpesvirus 7
uuaauaauauuaguauu

SEQ ID NO: 3999520 - RNA, 15 nt, Human herpesvirus 7
gcaacacaaauuuag

SEQ ID NO: 3999521 - RNA, 22 nt, Human herpesvirus 7
gcaacuuuaauuaacacucaaa

SEQ ID NO: 3999522 - RNA, 18 nt, Human herpesvirus 7
gcaacuuuucuuaaacau

SEQ ID NO: 3999523 - RNA, 13 nt, Human herpesvirus 7
gcaagccuagaau

SEQ ID NO: 3999524 - RNA, 21 nt, Human herpesvirus 7
gcaauuuucacaauggaaaga

SEQ ID NO: 3999525 - RNA, 17 nt, Human herpesvirus 7
gcaauuuucauaaagau

SEQ ID NO: 3999526 - RNA, 14 nt, Human herpesvirus 7
gcacaaucacguga

SEQ ID NO: 3999527 - RNA, 13 nt, Human herpesvirus 7
gcacuccuagaaa

SEQ ID NO: 3999528 - RNA, 18 nt, Human herpesvirus 7
gcagaaaugucuuuugau

SEQ ID NO: 3999529 - RNA, 21 nt, Human herpesvirus 7
gcagacauugaagauuguuua

SEQ ID NO: 3999530 - RNA, 14 nt, Human herpesvirus 7
gcauacaguuuauu

SEQ ID NO: 3999531 - RNA, 19 nt, Human herpesvirus 7
gcaugaauuaauaaaacaa

SEQ ID NO: 3999532 - RNA, 14 nt, Human herpesvirus 7
gcaugucucauaau

SEQ ID NO: 3999533 - RNA, 17 nt, Human herpesvirus 7
gcauuauuggauaauau

SEQ ID NO: 3999534 - RNA, 18 nt, Human herpesvirus 7
gcauuauuggauaauauc

SEQ ID NO: 3999535 - RNA, 17 nt, Human herpesvirus 7
gcauuauuguauaugau

SEQ ID NO: 3999536 - RNA, 17 nt, Human herpesvirus 7
gcauugcauaucaugau

SEQ ID NO: 3999537 - RNA, 20 nt, Human herpesvirus 7
gccaaaucuaauuuaugaua

SEQ ID NO: 3999538 - RNA, 18 nt, Human herpesvirus 7
gccacgaugacuuccaag

SEQ ID NO: 3999539 - RNA, 19 nt, Human herpesvirus 7
gccagaaauuaaauacaaa

SEQ ID NO: 3999540 - RNA, 17 nt, Human herpesvirus 7
gccuaggauaccaaaca

SEQ ID NO: 3999541 - RNA, 16 nt, Human herpesvirus 7
gccucugccucuuggc

SEQ ID NO: 3999542 - RNA, 22 nt, Human herpesvirus 7
gcgcaaaggaaaaaugcugcuc

SEQ ID NO: 3999543 - RNA, 14 nt, Human herpesvirus 7
gcgcaguguuuaaa

SEQ ID NO: 3999544 - RNA, 16 nt, Human herpesvirus 7
gcgccaaaaaaacaca

SEQ ID NO: 3999545 - RNA, 17 nt, Human herpesvirus 7
gcggaguuugaguuucu

SEQ ID NO: 3999546 - RNA, 15 nt, Human herpesvirus 7
gcggauuaagagaaa

SEQ ID NO: 3999547 - RNA, 22 nt, Human herpesvirus 7
gcuaacgauccaguacuugcau

SEQ ID NO: 3999548 - RNA, 13 nt, Human herpesvirus 7
gcuaucugauuua

SEQ ID NO: 3999549 - RNA, 23 nt, Human herpesvirus 7
gcuauuuaaucuaugcaaagcaa

SEQ ID NO: 3999550 - RNA, 16 nt, Human herpesvirus 7
gcucagcuagaaugug

SEQ ID NO: 3999551 - RNA, 18 nt, Human herpesvirus 7
gcucauuucaucauccga

SEQ ID NO: 3999552 - RNA, 19 nt, Human herpesvirus 7
gcugaauuguacguucuga

SEQ ID NO: 3999553 - RNA, 21 nt, Human herpesvirus 7
gcugguaauaauaguggugaa

SEQ ID NO: 3999554 - RNA, 12 nt, Human herpesvirus 7
gcuguuuggaaa

SEQ ID NO: 3999555 - RNA, 16 nt, Human herpesvirus 7
gcuucaaaaauguuua

SEQ ID NO: 3999556 - RNA, 23 nt, Human herpesvirus 7
gcuugaugaaucaaaauuagacg

SEQ ID NO: 3999557 - RNA, 20 nt, Human herpesvirus 7
gcuugcuuaaaacuuugaaa

SEQ ID NO: 3999558 - RNA, 15 nt, Human herpesvirus 7
gcuuuagaauuagag

SEQ ID NO: 3999559 - RNA, 19 nt, Human herpesvirus 7
gcuuucguuuauaaacucu

SEQ ID NO: 3999560 - RNA, 17 nt, Human herpesvirus 7
ggaaaaaggauuugaag

SEQ ID NO: 3999561 - RNA, 22 nt, Human herpesvirus 7
ggaaauuuucauagcacucaua

SEQ ID NO: 3999562 - RNA, 15 nt, Human herpesvirus 7
ggaagaacaagcaaa

SEQ ID NO: 3999563 - RNA, 16 nt, Human herpesvirus 7
ggacaauuauuuaaac

SEQ ID NO: 3999564 - RNA, 19 nt, Human herpesvirus 7
ggacacaaucagcauuuac

SEQ ID NO: 3999565 - RNA, 14 nt, Human herpesvirus 7
ggacagucaacaaa

SEQ ID NO: 3999566 - RNA, 19 nt, Human herpesvirus 7
ggagacgaugagcaugaaa

SEQ ID NO: 3999567 - RNA, 23 nt, Human herpesvirus 7
ggagcuucauuuuaaaaaagaca

SEQ ID NO: 3999568 - RNA, 16 nt, Human herpesvirus 7
ggaggugcuguuucca

SEQ ID NO: 3999569 - RNA, 23 nt, Human herpesvirus 7
ggagugcgcggauuaagagaaaa

SEQ ID NO: 3999570 - RNA, 12 nt, Human herpesvirus 7
ggcaacaucuuc

SEQ ID NO: 3999571 - RNA, 12 nt, Human herpesvirus 7
ggcgccaaaaaa

SEQ ID NO: 3999572 - RNA, 14 nt, Human herpesvirus 7
ggcucuuaauaauu

SEQ ID NO: 3999573 - RNA, 13 nt, Human herpesvirus 7
gggacaauuauuu

SEQ ID NO: 3999574 - RNA, 16 nt, Human herpesvirus 7
gggcuggagcuuuaaa

SEQ ID NO: 3999575 - RNA, 10 nt, Human herpesvirus 7
ggugaagauc

SEQ ID NO: 3999576 - RNA, 18 nt, Human herpesvirus 7
gguuuuaaaauagaaaau

SEQ ID NO: 3999577 - RNA, 16 nt, Human herpesvirus 7
guaaaagaucuuuuaa

SEQ ID NO: 3999578 - RNA, 19 nt, Human herpesvirus 7
guaaauuuacuugauuuuc

SEQ ID NO: 3999579 - RNA, 23 nt, Human herpesvirus 7
guaacaaaggaucgaucucuguc

SEQ ID NO: 3999580 - RNA, 17 nt, Human herpesvirus 7
guaauauaauuauuuua

SEQ ID NO: 3999581 - RNA, 16 nt, Human herpesvirus 7
guacgagcgauuuaau

SEQ ID NO: 3999582 - RNA, 14 nt, Human herpesvirus 7
guagaaaauguuuu

SEQ ID NO: 3999583 - RNA, 22 nt, Human herpesvirus 7
guagauggcaccaauagaaaac

SEQ ID NO: 3999584 - RNA, 17 nt, Human herpesvirus 7
guagauuuagauuuaaa

SEQ ID NO: 3999585 - RNA, 14 nt, Human herpesvirus 7
guaugaaaaaaaca

SEQ ID NO: 3999586 - RNA, 19 nt, Human herpesvirus 7
guauugccuuucccagaag

SEQ ID NO: 3999587 - RNA, 15 nt, Human herpesvirus 7
gucaaaaaaaauuaa

SEQ ID NO: 3999588 - RNA, 20 nt, Human herpesvirus 7
gucagaacaucccuggacag

SEQ ID NO: 3999589 - RNA, 22 nt, Human herpesvirus 7
gucagaacaucccuggacagag

SEQ ID NO: 3999590 - RNA, 15 nt, Human herpesvirus 7
gucaucacuuaugau

SEQ ID NO: 3999591 - RNA, 15 nt, Human herpesvirus 7
gucaugcuguauguu

SEQ ID NO: 3999592 - RNA, 16 nt, Human herpesvirus 7
gucauuauuuguuaaa

SEQ ID NO: 3999593 - RNA, 18 nt, Human herpesvirus 7
guccagauccaucuguaa

SEQ ID NO: 3999594 - RNA, 20 nt, Human herpesvirus 7
guccuucaauagcagagaau

SEQ ID NO: 3999595 - RNA, 15 nt, Human herpesvirus 7
gucuaaaaauguuuu

SEQ ID NO: 3999596 - RNA, 23 nt, Human herpesvirus 7
gucucagagaacuagaacagcug

SEQ ID NO: 3999597 - RNA, 23 nt, Human herpesvirus 7
gugaacccauagaagaaugcaag

SEQ ID NO: 3999598 - RNA, 18 nt, Human herpesvirus 7
gugaagacuacauaaagg

SEQ ID NO: 3999599 - RNA, 19 nt, Human herpesvirus 7
gugauuguagauggcacca

SEQ ID NO: 3999600 - RNA, 22 nt, Human herpesvirus 7
guggaaaucuuuaauaaaaaca

SEQ ID NO: 3999601 - RNA, 15 nt, Human herpesvirus 7
gugucucuagaaaau

SEQ ID NO: 3999602 - RNA, 12 nt, Human herpesvirus 7
gugugcaaugau

SEQ ID NO: 3999603 - RNA, 15 nt, Human herpesvirus 7
guguguuaaaugcga

SEQ ID NO: 3999604 - RNA, 14 nt, Human herpesvirus 7
guguuguaauaauu

SEQ ID NO: 3999605 - RNA, 15 nt, Human herpesvirus 7
guuaaugucucuguu

SEQ ID NO: 3999606 - RNA, 19 nt, Human herpesvirus 7
guuaauugugguacaacaa

SEQ ID NO: 3999607 - RNA, 15 nt, Human herpesvirus 7
guucuaucucaaaac

SEQ ID NO: 3999608 - RNA, 12 nt, Human herpesvirus 7
guugaaauuaag

SEQ ID NO: 3999609 - RNA, 14 nt, Human herpesvirus 7
guugcugcugucuu

SEQ ID NO: 3999610 - RNA, 12 nt, Human herpesvirus 7
guuguuggaaau

SEQ ID NO: 3999611 - RNA, 15 nt, Human herpesvirus 7
guuuaaaggugguua

SEQ ID NO: 3999612 - RNA, 16 nt, Human herpesvirus 7
guuuacuuauguguua

SEQ ID NO: 3999613 - RNA, 13 nt, Human herpesvirus 7
guuuaugaacaag

SEQ ID NO: 3999614 - RNA, 12 nt, Human herpesvirus 7
guuucaaaaagu

SEQ ID NO: 3999615 - RNA, 17 nt, Human herpesvirus 7
guuuccgcauaaaaaau

SEQ ID NO: 3999616 - RNA, 14 nt, Human herpesvirus 7
guuucuuucuuuua

SEQ ID NO: 3999617 - RNA, 18 nt, Human herpesvirus 7
guuugcgagccugugauc

SEQ ID NO: 3999618 - RNA, 20 nt, Human herpesvirus 7
guuuggaaaaguugaagaaa

SEQ ID NO: 3999619 - RNA, 16 nt, Human herpesvirus 7
guuuuaugacucagac

SEQ ID NO: 3999620 - RNA, 14 nt, Human herpesvirus 7
guuuucuuuguaaa

SEQ ID NO: 3999621 - RNA, 18 nt, Human herpesvirus 7
guuuucuuuguaaaaaug

SEQ ID NO: 3999622 - RNA, 20 nt, Human herpesvirus 7
guuuugaaaagucauuauuu

SEQ ID NO: 3999623 - RNA, 16 nt, Human herpesvirus 7
uaaaaauccuaaauuu

SEQ ID NO: 3999624 - RNA, 14 nt, Human herpesvirus 7
uaaaagguguuuuu

SEQ ID NO: 3999625 - RNA, 15 nt, Human herpesvirus 7
uaaaauagaaaaugu

SEQ ID NO: 3999626 - RNA, 17 nt, Human herpesvirus 7
uaaaccaaauauaugcu

SEQ ID NO: 3999627 - RNA, 17 nt, Human herpesvirus 7
uaaacuugugaaaauaa

SEQ ID NO: 3999628 - RNA, 21 nt, Human herpesvirus 7
uaaagagaaaguaaaagcuau

SEQ ID NO: 3999629 - RNA, 14 nt, Human herpesvirus 7
uaaaggaaacauuu

SEQ ID NO: 3999630 - RNA, 22 nt, Human herpesvirus 7
uaaaguacccgcuuauuaguga

SEQ ID NO: 3999631 - RNA, 14 nt, Human herpesvirus 7
uaaauaauaacaau

SEQ ID NO: 3999632 - RNA, 18 nt, Human herpesvirus 7
uaaauaucccuagaagau

SEQ ID NO: 3999633 - RNA, 19 nt, Human herpesvirus 7
uaaauauuuuuaaaaucua

SEQ ID NO: 3999634 - RNA, 15 nt, Human herpesvirus 7
uaacaaaauuguaag

SEQ ID NO: 3999635 - RNA, 21 nt, Human herpesvirus 7
uguguuggaaacuauucgaaa

SEQ ID NO: 3999636 - RNA, 19 nt, Human herpesvirus 7
uguguuuuaucuaccauca

SEQ ID NO: 3999637 - RNA, 17 nt, Human herpesvirus 7
uguuaaccaaaaugugg

SEQ ID NO: 3999638 - RNA, 20 nt, Human herpesvirus 7
uguucaaucacauacucuau

SEQ ID NO: 3999639 - RNA, 14 nt, Human herpesvirus 7
uguucuaucaagau

SEQ ID NO: 3999640 - RNA, 13 nt, Human herpesvirus 7
uguucuguuuauu

SEQ ID NO: 3999641 - RNA, 18 nt, Human herpesvirus 7
uguugaguacgaaagaau

SEQ ID NO: 3999642 - RNA, 16 nt, Human herpesvirus 7
uguugccuucuaaaac

SEQ ID NO: 3999643 - RNA, 12 nt, Human herpesvirus 7
uguugcuuuuuc

SEQ ID NO: 3999644 - RNA, 19 nt, Human herpesvirus 7
uguuguagguaauuucuua

SEQ ID NO: 3999645 - RNA, 15 nt, Human herpesvirus 7
uguuucuuucuuuua

SEQ ID NO: 3999646 - RNA, 22 nt, Human herpesvirus 7
uguuugaacaaguagugcuaau

SEQ ID NO: 3999647 - RNA, 14 nt, Human herpesvirus 7
uguuuguaaacauu

SEQ ID NO: 3999648 - RNA, 15 nt, Human herpesvirus 7
uguuuuuauuaauuu

SEQ ID NO: 3999649 - RNA, 19 nt, Human herpesvirus 7
uuaaaaaagugauugcaga

SEQ ID NO: 3999650 - RNA, 15 nt, Human herpesvirus 7
uuaaaaugggaaugu

SEQ ID NO: 3999651 - RNA, 16 nt, Human herpesvirus 7
uuaaaauuaaaacuug

SEQ ID NO: 3999652 - RNA, 12 nt, Human herpesvirus 7
uuaaaauuauua

SEQ ID NO: 3999653 - RNA, 22 nt, Human herpesvirus 7
uuaaacaaucuggacauuucaa

SEQ ID NO: 3999654 - RNA, 18 nt, Human herpesvirus 7
uuaaacuugugaaaauaa

SEQ ID NO: 3999655 - RNA, 13 nt, Human herpesvirus 7
uuaaaggaaauaa

SEQ ID NO: 3999656 - RNA, 17 nt, Human herpesvirus 7
uuaaauuauuauuagua

SEQ ID NO: 3999657 - RNA, 19 nt, Human herpesvirus 7
uuaaauuauuauuaguauu

SEQ ID NO: 3999658 - RNA, 18 nt, Human herpesvirus 7
uuaaccagauauuaguuu

SEQ ID NO: 3999659 - RNA, 14 nt, Human herpesvirus 7
uuaagauacauuuu

SEQ ID NO: 3999660 - RNA, 17 nt, Human herpesvirus 7
uuaaggagcuucauuuu

SEQ ID NO: 3999661 - RNA, 23 nt, Human herpesvirus 7
uuaaguaaggaagguacaucuuu

SEQ ID NO: 3999662 - RNA, 21 nt, Human herpesvirus 7
uuaauaaaaaacaaauaacug

SEQ ID NO: 3999663 - RNA, 21 nt, Human herpesvirus 7
uuaauacguccaaaaauugga

SEQ ID NO: 3999664 - RNA, 14 nt, Human herpesvirus 7
uuaauauuaguauu

SEQ ID NO: 3999665 - RNA, 15 nt, Human herpesvirus 7
uuaauggaagaacaa

SEQ ID NO: 3999666 - RNA, 13 nt, Human herpesvirus 7
uuaaugucucugu

SEQ ID NO: 3999667 - RNA, 19 nt, Human herpesvirus 7
uuacaaggugacagagggc

SEQ ID NO: 3999668 - RNA, 21 nt, Human herpesvirus 7
uuacaagucaucgguuuucug

SEQ ID NO: 3999669 - RNA, 21 nt, Human herpesvirus 7
uuacacaaauugauccugcua

SEQ ID NO: 3999670 - RNA, 18 nt, Human herpesvirus 7
uuacacaggaauugcugu

SEQ ID NO: 3999671 - RNA, 16 nt, Human herpesvirus 7
uuacacugauuucuac

SEQ ID NO: 3999672 - RNA, 17 nt, Human herpesvirus 7
uuacagaagaacauuua

SEQ ID NO: 3999673 - RNA, 16 nt, Human herpesvirus 7
uuacauuacuggaugu

SEQ ID NO: 3999674 - RNA, 13 nt, Human herpesvirus 7
uuacauugcaguc

SEQ ID NO: 3999675 - RNA, 23 nt, Human herpesvirus 7
uuacguacauggacauaagaauc

SEQ ID NO: 3999676 - RNA, 14 nt, Human herpesvirus 7
uuacuuucauagcu

SEQ ID NO: 3999677 - RNA, 14 nt, Human herpesvirus 7
uuagaauuuuuucu

SEQ ID NO: 3999678 - RNA, 17 nt, Human herpesvirus 7
uuagacgacgucuucuu

SEQ ID NO: 3999679 - RNA, 18 nt, Human herpesvirus 7
uuagaugcugaaacauca

SEQ ID NO: 3999680 - RNA, 17 nt, Human herpesvirus 7
uuauaaugauguaaugu

SEQ ID NO: 3999681 - RNA, 22 nt, Human herpesvirus 7
uuauaauguaagaaauuuucuu

SEQ ID NO: 3999682 - RNA, 14 nt, Human herpesvirus 7
uuauauuuuaagua

SEQ ID NO: 3999683 - RNA, 17 nt, Human herpesvirus 7
uuaucaaugccuguuuu

SEQ ID NO: 3999684 - RNA, 18 nt, Human herpesvirus 7
uuaucauuucaaauguag

SEQ ID NO: 3999685 - RNA, 14 nt, Human herpesvirus 7
uuaugaugcauuuu

SEQ ID NO: 3999686 - RNA, 18 nt, Human herpesvirus 7
uuauuagugaauuacaga

SEQ ID NO: 3999687 - RNA, 13 nt, Human herpesvirus 7
uuauuauguguac

SEQ ID NO: 3999688 - RNA, 16 nt, Human herpesvirus 7
uucaaaggaaaaauuu

SEQ ID NO: 3999689 - RNA, 12 nt, Human herpesvirus 7
uucaaguuucuu

SEQ ID NO: 3999690 - RNA, 16 nt, Human herpesvirus 7
uucaaucaaauuauac

SEQ ID NO: 3999691 - RNA, 23 nt, Human herpesvirus 7
uucaaucaaauuauaccucagcu

SEQ ID NO: 3999692 - RNA, 14 nt, Human herpesvirus 7
uucaaucuacugua

SEQ ID NO: 3999693 - RNA, 12 nt, Human herpesvirus 7
uucaauugccac

SEQ ID NO: 3999694 - RNA, 15 nt, Human herpesvirus 7
uucagaaaaaccauu

SEQ ID NO: 3999695 - RNA, 14 nt, Human herpesvirus 7
uucagcgugacaga

SEQ ID NO: 3999696 - RNA, 16 nt, Human herpesvirus 7
uucaguaucacuuaaa

SEQ ID NO: 3999697 - RNA, 22 nt, Human herpesvirus 7
uucaucaggacaaucaaacaug

SEQ ID NO: 3999698 - RNA, 15 nt, Human herpesvirus 7
uucauuuuuuucuua

SEQ ID NO: 3999699 - RNA, 15 nt, Human herpesvirus 7
uuccauuucaaaaga

SEQ ID NO: 3999700 - RNA, 20 nt, Human herpesvirus 7
uuccuaaaaaaaaaggaaaa

SEQ ID NO: 3999701 - RNA, 16 nt, Human herpesvirus 7
uuccuucuaaauucuu

SEQ ID NO: 3999702 - RNA, 18 nt, Human herpesvirus 7
uuccuuggaaaaaugaug

SEQ ID NO: 3999703 - RNA, 21 nt, Human herpesvirus 7
uucgagaaaauuuagcaccaa

SEQ ID NO: 3999704 - RNA, 13 nt, Human herpesvirus 7
uucgaucuguaaa

SEQ ID NO: 3999705 - RNA, 14 nt, Human herpesvirus 7
uucgccugaagaga

SEQ ID NO: 3999706 - RNA, 21 nt, Human herpesvirus 7
uucgcuuaccuuuuuguuuuu

SEQ ID NO: 3999707 - RNA, 16 nt, Human herpesvirus 7
uucuagcguuucguua

SEQ ID NO: 3999708 - RNA, 14 nt, Human herpesvirus 7
uucuaggcuucauu

SEQ ID NO: 3999709 - RNA, 23 nt, Human herpesvirus 7
uucugaaauaaacauuucaaaau

SEQ ID NO: 3999710 - RNA, 19 nt, Human herpesvirus 7
uucugagugauuuuucauu

SEQ ID NO: 3999711 - RNA, 20 nt, Human herpesvirus 7
uucuggaucugccucugccu

SEQ ID NO: 3999712 - RNA, 17 nt, Human herpesvirus 7
uucuugauguaacaaag

SEQ ID NO: 3999713 - RNA, 18 nt, Human herpesvirus 7
uucuuugaaauagugucu

SEQ ID NO: 3999714 - RNA, 14 nt, Human herpesvirus 7
uucuuuuucaagau

SEQ ID NO: 3999715 - RNA, 22 nt, Human herpesvirus 7
uugaaaaagcguugguugcuug

SEQ ID NO: 3999716 - RNA, 19 nt, Human herpesvirus 7
uugaaaguaaaaacuuuuc

SEQ ID NO: 3999717 - RNA, 16 nt, Human herpesvirus 7
uugaaauagugucugu

SEQ ID NO: 3999718 - RNA, 15 nt, Human herpesvirus 7
uugaaauucugugga

SEQ ID NO: 3999719 - RNA, 15 nt, Human herpesvirus 7
uugaacagaauuuuc

SEQ ID NO: 3999720 - RNA, 17 nt, Human herpesvirus 7
uugaacuuguuuugacu

SEQ ID NO: 3999721 - RNA, 19 nt, Human herpesvirus 7
uugaauucguuaagcaccg

SEQ ID NO: 3999722 - RNA, 17 nt, Human herpesvirus 7
uugauaaaauuuggaga

SEQ ID NO: 3999723 - RNA, 14 nt, Human herpesvirus 7
uugaucgucuguug

SEQ ID NO: 3999724 - RNA, 16 nt, Human herpesvirus 7
uugaucguguguuacu

SEQ ID NO: 3999725 - RNA, 18 nt, Human herpesvirus 7
uugauuuucaaguuucuu

SEQ ID NO: 3999726 - RNA, 16 nt, Human herpesvirus 7
uugcaguuauuucuua

SEQ ID NO: 3999727 - RNA, 23 nt, Human herpesvirus 7
uugcauauuuugcuagaaacguc

SEQ ID NO: 3999728 - RNA, 9 nt, Human herpesvirus 7
uugccuuca

SEQ ID NO: 3999729 - RNA, 15 nt, Human herpesvirus 7
uugcucauguugacg

SEQ ID NO: 3999730 - RNA, 17 nt, Human herpesvirus 7
uugcugaacucugucau

SEQ ID NO: 3999731 - RNA, 19 nt, Human herpesvirus 7
uugcugguggguuuugaaa

SEQ ID NO: 3999732 - RNA, 16 nt, Human herpesvirus 7
uugcuuaaaaacagua

SEQ ID NO: 3999733 - RNA, 14 nt, Human herpesvirus 7
uugcuuaacuuuug

SEQ ID NO: 3999734 - RNA, 17 nt, Human herpesvirus 7
uuggacuguuagacuuu

SEQ ID NO: 3999735 - RNA, 23 nt, Human herpesvirus 7
uuggaguaaucaauaaaauuaaa

SEQ ID NO: 3999736 - RNA, 19 nt, Human herpesvirus 7
uuggauugauuuucaaguu

SEQ ID NO: 3999737 - RNA, 18 nt, Human herpesvirus 7
uuguaaauucuccaauca

SEQ ID NO: 3999738 - RNA, 22 nt, Human herpesvirus 7
uuguaggaaauuuucauagcac

SEQ ID NO: 3999739 - RNA, 22 nt, Human herpesvirus 7
uuguagguaauuucuuauaauu

SEQ ID NO: 3999740 - RNA, 23 nt, Human herpesvirus 7
uuguaucuaugaaauaaaauuuu

SEQ ID NO: 3999741 - RNA, 20 nt, Human herpesvirus 7
uugucacugcaaauuguaaa

SEQ ID NO: 3999742 - RNA, 18 nt, Human herpesvirus 7
uuguccauuuuauucaaa

SEQ ID NO: 3999743 - RNA, 18 nt, Human herpesvirus 7
uugugaagacuacauaaa

SEQ ID NO: 3999744 - RNA, 18 nt, Human herpesvirus 7
uuguguggcaacaucuuc

SEQ ID NO: 3999745 - RNA, 20 nt, Human herpesvirus 7
uuguuuccgaucuaaagaca

SEQ ID NO: 3999746 - RNA, 18 nt, Human herpesvirus 7
uuguuugcuauuauuaaa

SEQ ID NO: 3999747 - RNA, 17 nt, Human herpesvirus 7
uuuaaaaaagaauuugg

SEQ ID NO: 3999748 - RNA, 16 nt, Human herpesvirus 7
uuuaaagggggaaaga

SEQ ID NO: 3999749 - RNA, 21 nt, Human herpesvirus 7
uuuaaauaaaccuuaaguuuu

SEQ ID NO: 3999750 - RNA, 14 nt, Human herpesvirus 7
ucguuuguguagaa

SEQ ID NO: 3999751 - RNA, 14 nt, Human herpesvirus 7
ucuaaaauuuucuu

SEQ ID NO: 3999752 - RNA, 20 nt, Human herpesvirus 7
ucuaaaguggagacaaucua

SEQ ID NO: 3999753 - RNA, 22 nt, Human herpesvirus 7
ucuacacaucuucaauguucga

SEQ ID NO: 3999754 - RNA, 16 nt, Human herpesvirus 7
ucuacuaaggugucuu

SEQ ID NO: 3999755 - RNA, 17 nt, Human herpesvirus 7
ucuauuagauaaugaca

SEQ ID NO: 3999756 - RNA, 16 nt, Human herpesvirus 7
ucuauuguucuuucaa

SEQ ID NO: 3999757 - RNA, 21 nt, Human herpesvirus 7
ucuauuucaauuaaugcauug

SEQ ID NO: 3999758 - RNA, 17 nt, Human herpesvirus 7
ucucuaaaauuuucuua

SEQ ID NO: 3999759 - RNA, 18 nt, Human herpesvirus 7
ucugccucugccucuugg

SEQ ID NO: 3999760 - RNA, 21 nt, Human herpesvirus 7
ucuggaacuuuuaaauuaaaa

SEQ ID NO: 3999761 - RNA, 14 nt, Human herpesvirus 7
ucuggaucugccuc

SEQ ID NO: 3999762 - RNA, 15 nt, Human herpesvirus 7
ucuggaugaaaacug

SEQ ID NO: 3999763 - RNA, 15 nt, Human herpesvirus 7
ucugugacuuagaaa

SEQ ID NO: 3999764 - RNA, 21 nt, Human herpesvirus 7
ucuguuaguugggcaaacagu

SEQ ID NO: 3999765 - RNA, 18 nt, Human herpesvirus 7
ucuuaaaauauguucaga

SEQ ID NO: 3999766 - RNA, 20 nt, Human herpesvirus 7
ucuuagccagaucguucauu

SEQ ID NO: 3999767 - RNA, 21 nt, Human herpesvirus 7
ucuuaugccagguuuuucaaa

SEQ ID NO: 3999768 - RNA, 14 nt, Human herpesvirus 7
ucuuccgcauuuug

SEQ ID NO: 3999769 - RNA, 17 nt, Human herpesvirus 7
ucuuggaguuugucuca

SEQ ID NO: 3999770 - RNA, 22 nt, Human herpesvirus 7
ucuuucaacugauauaaaugcu

SEQ ID NO: 3999771 - RNA, 17 nt, Human herpesvirus 7
ucuuugacaaaaauguu

SEQ ID NO: 3999772 - RNA, 17 nt, Human herpesvirus 7
ugaaaaaaacacuuugc

SEQ ID NO: 3999773 - RNA, 18 nt, Human herpesvirus 7
ugaaaacuuagugaugac

SEQ ID NO: 3999774 - RNA, 18 nt, Human herpesvirus 7
ugaaaagcccaaacuguu

SEQ ID NO: 3999775 - RNA, 18 nt, Human herpesvirus 7
ugaaaccuucgcaacaau

SEQ ID NO: 3999776 - RNA, 20 nt, Human herpesvirus 7
ugaaaccuucgcaacaauua

SEQ ID NO: 3999777 - RNA, 18 nt, Human herpesvirus 7
ugaaauaaacauuucaaa

SEQ ID NO: 3999778 - RNA, 11 nt, Human herpesvirus 7
ugaaauuguag

SEQ ID NO: 3999779 - RNA, 14 nt, Human herpesvirus 7
ugaacaaauaauga

SEQ ID NO: 3999780 - RNA, 16 nt, Human herpesvirus 7
ugaacaaauaaugagu

SEQ ID NO: 3999781 - RNA, 22 nt, Human herpesvirus 7
ugaacacuuuuacgugacuguc

SEQ ID NO: 3999782 - RNA, 15 nt, Human herpesvirus 7
ugaacucugucauca

SEQ ID NO: 3999783 - RNA, 21 nt, Human herpesvirus 7
ugaagagcuuuuuaaguaaau

SEQ ID NO: 3999784 - RNA, 12 nt, Human herpesvirus 7
ugaaugugcuuu

SEQ ID NO: 3999785 - RNA, 19 nt, Human herpesvirus 7
ugaauuaagguggaaaucu

SEQ ID NO: 3999786 - RNA, 13 nt, Human herpesvirus 7
ugaauuugaaacu

SEQ ID NO: 3999787 - RNA, 14 nt, Human herpesvirus 7
ugacacgacacuga

SEQ ID NO: 3999788 - RNA, 23 nt, Human herpesvirus 7
ugacagacacaugcuuacagauc

SEQ ID NO: 3999789 - RNA, 19 nt, Human herpesvirus 7
ugacauuaguucuggccgu

SEQ ID NO: 3999790 - RNA, 23 nt, Human herpesvirus 7
ugagaauguugagcuaucugauu

SEQ ID NO: 3999791 - RNA, 14 nt, Human herpesvirus 7
ugagcgcugaaaua

SEQ ID NO: 3999792 - RNA, 18 nt, Human herpesvirus 7
ugaggauuuugacaagcg

SEQ ID NO: 3999793 - RNA, 16 nt, Human herpesvirus 7
ugaguguguuaaaugc

SEQ ID NO: 3999794 - RNA, 16 nt, Human herpesvirus 7
ugauaauaagaugugu

SEQ ID NO: 3999795 - RNA, 14 nt, Human herpesvirus 7
ugauaaucaagaaa

SEQ ID NO: 3999796 - RNA, 15 nt, Human herpesvirus 7
ugauaugauuuccug

SEQ ID NO: 3999797 - RNA, 13 nt, Human herpesvirus 7
ugauccuccuugc

SEQ ID NO: 3999798 - RNA, 17 nt, Human herpesvirus 7
ugaugacaacaaagcau

SEQ ID NO: 3999799 - RNA, 22 nt, Human herpesvirus 7
ugaugauuauuauaacuuguaa

SEQ ID NO: 3999800 - RNA, 23 nt, Human herpesvirus 7
ugauguuauacauaaagagaaag

SEQ ID NO: 3999801 - RNA, 14 nt, Human herpesvirus 7
ugauucaacacucg

SEQ ID NO: 3999802 - RNA, 20 nt, Human herpesvirus 7
ugauucgcuaacuuugcuau

SEQ ID NO: 3999803 - RNA, 18 nt, Human herpesvirus 7
ugauugcgaccaaagauc

SEQ ID NO: 3999804 - RNA, 17 nt, Human herpesvirus 7
ugauuuuaaauuuacuu

SEQ ID NO: 3999805 - RNA, 14 nt, Human herpesvirus 7
ugauuuucuuacac

SEQ ID NO: 3999806 - RNA, 19 nt, Human herpesvirus 7
ugauuuuuuaguauucuca

SEQ ID NO: 3999807 - RNA, 18 nt, Human herpesvirus 7
ugcaauuuucacaaugga

SEQ ID NO: 3999808 - RNA, 21 nt, Human herpesvirus 7
ugcacuuagcuaauugagaaa

SEQ ID NO: 3999809 - RNA, 18 nt, Human herpesvirus 7
ugcagaaaaauccaaaau

SEQ ID NO: 3999810 - RNA, 16 nt, Human herpesvirus 7
ugcagucaaagauuuu

SEQ ID NO: 3999811 - RNA, 13 nt, Human herpesvirus 7
ugcaucugaauuu

SEQ ID NO: 3999812 - RNA, 17 nt, Human herpesvirus 7
ugccagguuuuucaaag

SEQ ID NO: 3999813 - RNA, 15 nt, Human herpesvirus 7
ugcccucagaacugu

SEQ ID NO: 3999814 - RNA, 18 nt, Human herpesvirus 7
ugcuaaggcgaaaaacac

SEQ ID NO: 3999815 - RNA, 18 nt, Human herpesvirus 7
ugcuaaggcuaaacucgu

SEQ ID NO: 3999816 - RNA, 19 nt, Human herpesvirus 7
ugcucuuugucuuugcucu

SEQ ID NO: 3999817 - RNA, 23 nt, Human herpesvirus 7
ugcuuacagaucuugcuuuagaa

SEQ ID NO: 3999818 - RNA, 13 nt, Human herpesvirus 7
ugcuucggaauuu

SEQ ID NO: 3999819 - RNA, 18 nt, Human herpesvirus 7
ugcuuguaggcagaaaug

SEQ ID NO: 3999820 - RNA, 14 nt, Human herpesvirus 7
ugcuugugaaggag

SEQ ID NO: 3999821 - RNA, 19 nt, Human herpesvirus 7
ugcuuuuagaaaaucaaaa

SEQ ID NO: 3999822 - RNA, 13 nt, Human herpesvirus 7
uggaaaaacagaa

SEQ ID NO: 3999823 - RNA, 20 nt, Human herpesvirus 7
uggaaaaacagaauguggua

SEQ ID NO: 3999824 - RNA, 16 nt, Human herpesvirus 7
uggaaagcuugugaag

SEQ ID NO: 3999825 - RNA, 16 nt, Human herpesvirus 7
uggaaaugagauuucu

SEQ ID NO: 3999826 - RNA, 21 nt, Human herpesvirus 7
uggaacugaaaacaaugcaga

SEQ ID NO: 3999827 - RNA, 19 nt, Human herpesvirus 7
uggacaaaaauaaaguuua

SEQ ID NO: 3999828 - RNA, 22 nt, Human herpesvirus 7
uggacggcauuuaacucaugcg

SEQ ID NO: 3999829 - RNA, 19 nt, Human herpesvirus 7
uggagauaguucgcaaugg

SEQ ID NO: 3999830 - RNA, 18 nt, Human herpesvirus 7
uggaucguagcaacagag

SEQ ID NO: 3999831 - RNA, 21 nt, Human herpesvirus 7
uggcacauaaguugacaaugu

SEQ ID NO: 3999832 - RNA, 13 nt, Human herpesvirus 7
uggcaccaauaga

SEQ ID NO: 3999833 - RNA, 20 nt, Human herpesvirus 7
uggcagcgauauauuggaaa

SEQ ID NO: 3999834 - RNA, 12 nt, Human herpesvirus 7
ugguaaaaagac

SEQ ID NO: 3999835 - RNA, 13 nt, Human herpesvirus 7
ugguaaugucaua

SEQ ID NO: 3999836 - RNA, 19 nt, Human herpesvirus 7
ugguaauuaauaaacagcg

SEQ ID NO: 3999837 - RNA, 16 nt, Human herpesvirus 7
ugguaccuuagaauca

SEQ ID NO: 3999838 - RNA, 16 nt, Human herpesvirus 7
ugguauugucuacaau

SEQ ID NO: 3999839 - RNA, 16 nt, Human herpesvirus 7
ugguugauuugagcag

SEQ ID NO: 3999840 - RNA, 15 nt, Human herpesvirus 7
ugguuggauuucaau

SEQ ID NO: 3999841 - RNA, 12 nt, Human herpesvirus 7
ugguugugcaau

SEQ ID NO: 3999842 - RNA, 22 nt, Human herpesvirus 7
uguaaccuuggcuguucaaaau

SEQ ID NO: 3999843 - RNA, 20 nt, Human herpesvirus 7
uguaaucaaaauuuuggauu

SEQ ID NO: 3999844 - RNA, 17 nt, Human herpesvirus 7
uguaaugaauaaaaucu

SEQ ID NO: 3999845 - RNA, 17 nt, Human herpesvirus 7
uguacuuuugaucaaaa

SEQ ID NO: 3999846 - RNA, 17 nt, Human herpesvirus 7
uguagaugcaugcuaau

SEQ ID NO: 3999847 - RNA, 24 nt, Human herpesvirus 7
uguauaaaucagaauauuuccagc

SEQ ID NO: 3999848 - RNA, 13 nt, Human herpesvirus 7
uguauaugccugu

SEQ ID NO: 3999849 - RNA, 21 nt, Human herpesvirus 7
uguaugaaauaauagaugucu

SEQ ID NO: 3999850 - RNA, 17 nt, Human herpesvirus 7
uguauugucuuacagca

SEQ ID NO: 3999851 - RNA, 20 nt, Human herpesvirus 7
uguauuuguugaucuucaau

SEQ ID NO: 3999852 - RNA, 10 nt, Human herpesvirus 7
ugucauacaa

SEQ ID NO: 3999853 - RNA, 17 nt, Human herpesvirus 7
uguccaaucaaaaacug

SEQ ID NO: 3999854 - RNA, 17 nt, Human herpesvirus 7
uguccauuuuauucaaa

SEQ ID NO: 3999855 - RNA, 15 nt, Human herpesvirus 7
ugucuaagguuuuua

SEQ ID NO: 3999856 - RNA, 15 nt, Human herpesvirus 7
ugucucauugacaug

SEQ ID NO: 3999857 - RNA, 15 nt, Human herpesvirus 7
ugucuggaacuuuua

SEQ ID NO: 3999858 - RNA, 14 nt, Human herpesvirus 7
ugugaaaauaacag

SEQ ID NO: 3999859 - RNA, 17 nt, Human herpesvirus 7
ugugaaaauaacaggaa

SEQ ID NO: 3999860 - RNA, 14 nt, Human herpesvirus 7
ugugaacugauguu

SEQ ID NO: 3999861 - RNA, 19 nt, Human herpesvirus 7
ugugcaauuuggcucugau

SEQ ID NO: 3999862 - RNA, 17 nt, Human herpesvirus 7
ugugcgaagguugucug

SEQ ID NO: 3999863 - RNA, 17 nt, Human herpesvirus 7
uguggagagauucaaac

SEQ ID NO: 3999864 - RNA, 22 nt, Human herpesvirus 7
uguguuacaugaucuuguaauu

SEQ ID NO: 3999865 - RNA, 21 nt, Human herpesvirus 7
agcauaugugagaaaacauua

SEQ ID NO: 3999866 - RNA, 21 nt, Human herpesvirus 7
agcauuauuguauaugaugac

SEQ ID NO: 3999867 - RNA, 17 nt, Human herpesvirus 7
agccacagauauucuaa

SEQ ID NO: 3999868 - RNA, 22 nt, Human herpesvirus 7
agccugguuuuguucccugcuc

SEQ ID NO: 3999869 - RNA, 18 nt, Human herpesvirus 7
agcgcaaaggaaaaaugc

SEQ ID NO: 3999870 - RNA, 20 nt, Human herpesvirus 7
agcgcaaaggaaaaaugcug

SEQ ID NO: 3999871 - RNA, 18 nt, Human herpesvirus 7
agcuaaaauuuugaaaua

SEQ ID NO: 3999872 - RNA, 13 nt, Human herpesvirus 7
agcucauuucauc

SEQ ID NO: 3999873 - RNA, 20 nt, Human herpesvirus 7
agcuugguuuuacaaauuaa

SEQ ID NO: 3999874 - RNA, 19 nt, Human herpesvirus 7
aggaaacacaauuguauuu

SEQ ID NO: 3999875 - RNA, 23 nt, Human herpesvirus 7
aggaauuucgcgagcugugucca

SEQ ID NO: 3999876 - RNA, 16 nt, Human herpesvirus 7
aggaccaauucuuuua

SEQ ID NO: 3999877 - RNA, 23 nt, Human herpesvirus 7
aggacuuuacacggucuuaucua

SEQ ID NO: 3999878 - RNA, 14 nt, Human herpesvirus 7
aggaucucucuuuc

SEQ ID NO: 3999879 - RNA, 11 nt, Human herpesvirus 7
aggaugaaagu

SEQ ID NO: 3999880 - RNA, 17 nt, Human herpesvirus 7
aggcagcgcuugauaca

SEQ ID NO: 3999881 - RNA, 16 nt, Human herpesvirus 7
aggccuuguaaaguaa

SEQ ID NO: 3999882 - RNA, 17 nt, Human herpesvirus 7
aggcuuuuagaaaucuu

SEQ ID NO: 3999883 - RNA, 18 nt, Human herpesvirus 7
agguaaaaaauaaauaua

SEQ ID NO: 3999884 - RNA, 15 nt, Human herpesvirus 7
agguaagaaaaauuu

SEQ ID NO: 3999885 - RNA, 14 nt, Human herpesvirus 7
aggucacaaaagcu

SEQ ID NO: 3999886 - RNA, 15 nt, Human herpesvirus 7
agguugcuucuucga

SEQ ID NO: 3999887 - RNA, 21 nt, Human herpesvirus 7
agguugcuucuucgagucagu

SEQ ID NO: 3999888 - RNA, 20 nt, Human herpesvirus 7
aguaaagggcugucugaagu

SEQ ID NO: 3999889 - RNA, 22 nt, Human herpesvirus 7
aguaagaagugaguuuuucagu

SEQ ID NO: 3999890 - RNA, 14 nt, Human herpesvirus 7
aguacaaauguuuu

SEQ ID NO: 3999891 - RNA, 14 nt, Human herpesvirus 7
aguacaucuuucua

SEQ ID NO: 3999892 - RNA, 17 nt, Human herpesvirus 7
agucaacacauaucuag

SEQ ID NO: 3999893 - RNA, 18 nt, Human herpesvirus 7
agucaaucacaguugcuu

SEQ ID NO: 3999894 - RNA, 22 nt, Human herpesvirus 7
agucgaaaugaaaagucuguga

SEQ ID NO: 3999895 - RNA, 15 nt, Human herpesvirus 7
agucuaaaaauguuu

SEQ ID NO: 3999896 - RNA, 16 nt, Human herpesvirus 7
agucucaauaguuuua

SEQ ID NO: 3999897 - RNA, 20 nt, Human herpesvirus 7
agugaacaugacuucagaaa

SEQ ID NO: 3999898 - RNA, 16 nt, Human herpesvirus 7
agugauugguagaaau

SEQ ID NO: 3999899 - RNA, 15 nt, Human herpesvirus 7
agugcuaugaaaauu

SEQ ID NO: 3999900 - RNA, 17 nt, Human herpesvirus 7
aguggcuuaaguuuuua

SEQ ID NO: 3999901 - RNA, 21 nt, Human herpesvirus 7
agugucuuuuauuacucgaaa

SEQ ID NO: 3999902 - RNA, 13 nt, Human herpesvirus 7
aguguuuaaaaug

SEQ ID NO: 3999903 - RNA, 16 nt, Human herpesvirus 7
aguguuuaaaauguua

SEQ ID NO: 3999904 - RNA, 15 nt, Human herpesvirus 7
aguuaauuuugcaga

SEQ ID NO: 3999905 - RNA, 23 nt, Human herpesvirus 7
aguuacacugauuuuuuuaauaa

SEQ ID NO: 3999906 - RNA, 16 nt, Human herpesvirus 7
aguucccauuuucaga

SEQ ID NO: 3999907 - RNA, 15 nt, Human herpesvirus 7
aguucguaaaaagaa

SEQ ID NO: 3999908 - RNA, 18 nt, Human herpesvirus 7
aguucuccgcacuaaaac

SEQ ID NO: 3999909 - RNA, 19 nt, Human herpesvirus 7
aguuucugcauacucuugu

SEQ ID NO: 3999910 - RNA, 21 nt, Human herpesvirus 7
aguuugucucauugacauguu

SEQ ID NO: 3999911 - RNA, 20 nt, Human herpesvirus 7
aguuuuggguuuaugaugca

SEQ ID NO: 3999912 - RNA, 19 nt, Human herpesvirus 7
auaaaccguuagagcaguu

SEQ ID NO: 3999913 - RNA, 23 nt, Human herpesvirus 7
auaaauacgcguggaaguguuaa

SEQ ID NO: 3999914 - RNA, 20 nt, Human herpesvirus 7
auaaauuuuucgaucuguaa

SEQ ID NO: 3999915 - RNA, 18 nt, Human herpesvirus 7
auaacaauauuuaaagua

SEQ ID NO: 3999916 - RNA, 16 nt, Human herpesvirus 7
auaacucaaaagacag

SEQ ID NO: 3999917 - RNA, 12 nt, Human herpesvirus 7
auaacugugaaa

SEQ ID NO: 3999918 - RNA, 18 nt, Human herpesvirus 7
auaacuucguaguguaga

SEQ ID NO: 3999919 - RNA, 18 nt, Human herpesvirus 7
auaauaaaaaagauguua

SEQ ID NO: 3999920 - RNA, 12 nt, Human herpesvirus 7
auaauagagcug

SEQ ID NO: 3999921 - RNA, 16 nt, Human herpesvirus 7
auaauagccuuucacu

SEQ ID NO: 3999922 - RNA, 14 nt, Human herpesvirus 7
auaaucaaaaaauu

SEQ ID NO: 3999923 - RNA, 18 nt, Human herpesvirus 7
auaauccucugacauuug

SEQ ID NO: 3999924 - RNA, 21 nt, Human herpesvirus 7
auaaucuugugaaguuugcug

SEQ ID NO: 3999925 - RNA, 15 nt, Human herpesvirus 7
auaauuaugaaaugu

SEQ ID NO: 3999926 - RNA, 16 nt, Human herpesvirus 7
auaauucaaucugcaa

SEQ ID NO: 3999927 - RNA, 14 nt, Human herpesvirus 7
auacagauauuuua

SEQ ID NO: 3999928 - RNA, 14 nt, Human herpesvirus 7
auacauuauaaaug

SEQ ID NO: 3999929 - RNA, 15 nt, Human herpesvirus 7
auacauuauaaaugu

SEQ ID NO: 3999930 - RNA, 15 nt, Human herpesvirus 7
auaccaaacaaaauu

SEQ ID NO: 3999931 - RNA, 13 nt, Human herpesvirus 7
auacgaaaacggu

SEQ ID NO: 3999932 - RNA, 21 nt, Human herpesvirus 7
auacguuauuuuuauuguaaa

SEQ ID NO: 3999933 - RNA, 22 nt, Human herpesvirus 7
auauaaacacuugcuagcugug

SEQ ID NO: 3999934 - RNA, 15 nt, Human herpesvirus 7
auauagaaauuguua

SEQ ID NO: 3999935 - RNA, 15 nt, Human herpesvirus 7
auauaucugauguag

SEQ ID NO: 3999936 - RNA, 22 nt, Human herpesvirus 7
auauauggcaauaaaucuguaa

SEQ ID NO: 3999937 - RNA, 14 nt, Human herpesvirus 7
auaucuaaagugga

SEQ ID NO: 3999938 - RNA, 12 nt, Human herpesvirus 7
auaucuaugaug

SEQ ID NO: 3999939 - RNA, 20 nt, Human herpesvirus 7
auaucuguuuuuuuucucgu

SEQ ID NO: 3999940 - RNA, 21 nt, Human herpesvirus 7
auaucuugcuuagaugcugaa

SEQ ID NO: 3999941 - RNA, 22 nt, Human herpesvirus 7
auaugaaucaaauuucaaacgu

SEQ ID NO: 3999942 - RNA, 16 nt, Human herpesvirus 7
auaugccaaugaacaa

SEQ ID NO: 3999943 - RNA, 19 nt, Human herpesvirus 7
auaugcuggaucuucugcu

SEQ ID NO: 3999944 - RNA, 19 nt, Human herpesvirus 7
auauuagaacgagagacaa

SEQ ID NO: 3999945 - RNA, 16 nt, Human herpesvirus 7
auauuccauuaagcca

SEQ ID NO: 3999946 - RNA, 23 nt, Human herpesvirus 7
auauuuucuacaacuaaaauuga

SEQ ID NO: 3999947 - RNA, 16 nt, Human herpesvirus 7
aucaaauuuaucucau

SEQ ID NO: 3999948 - RNA, 15 nt, Human herpesvirus 7
aucacaaaacucuuc

SEQ ID NO: 3999949 - RNA, 21 nt, Human herpesvirus 7
aucaguacaacgacauugaaa

SEQ ID NO: 3999950 - RNA, 18 nt, Human herpesvirus 7
aucagucaagaacuguga

SEQ ID NO: 3999951 - RNA, 13 nt, Human herpesvirus 7
aucauauaugcau

SEQ ID NO: 3999952 - RNA, 18 nt, Human herpesvirus 7
aucauuagucauacuuua

SEQ ID NO: 3999953 - RNA, 18 nt, Human herpesvirus 7
aucgacaaacagaaaaac

SEQ ID NO: 3999954 - RNA, 13 nt, Human herpesvirus 7
aucuaauugcaga

SEQ ID NO: 3999955 - RNA, 20 nt, Human herpesvirus 7
aucucucuuucuggaguuca

SEQ ID NO: 3999956 - RNA, 12 nt, Human herpesvirus 7
aucugagagaac

SEQ ID NO: 3999957 - RNA, 17 nt, Human herpesvirus 7
aucugauaaaaaaagaa

SEQ ID NO: 3999958 - RNA, 18 nt, Human herpesvirus 7
aucugauuuauauagcaa

SEQ ID NO: 3999959 - RNA, 19 nt, Human herpesvirus 7
aucuggaaucgaauacagu

SEQ ID NO: 3999960 - RNA, 14 nt, Human herpesvirus 7
aucuuaaaauacua

SEQ ID NO: 3999961 - RNA, 18 nt, Human herpesvirus 7
aucuucugaaucugcaaa

SEQ ID NO: 3999962 - RNA, 15 nt, Human herpesvirus 7
aucuuguaauuucuc

SEQ ID NO: 3999963 - RNA, 20 nt, Human herpesvirus 7
aucuuuacuuucauagcuua

SEQ ID NO: 3999964 - RNA, 15 nt, Human herpesvirus 7
aucuuugaaaaucuu

SEQ ID NO: 3999965 - RNA, 22 nt, Human herpesvirus 7
aucuuugaaaaucuugaauaaa

SEQ ID NO: 3999966 - RNA, 22 nt, Human herpesvirus 7
augaaaacuuggaaaacaauca

SEQ ID NO: 3999967 - RNA, 13 nt, Human herpesvirus 7
augaacaaauaau

SEQ ID NO: 3999968 - RNA, 16 nt, Human herpesvirus 7
augaacaaguuucaaa

SEQ ID NO: 3999969 - RNA, 9 nt, Human herpesvirus 7
augaagaua

SEQ ID NO: 3999970 - RNA, 19 nt, Human herpesvirus 7
augaugauuauuauaacuu

SEQ ID NO: 3999971 - RNA, 12 nt, Human herpesvirus 7
augcaaaacaaa

SEQ ID NO: 3999972 - RNA, 20 nt, Human herpesvirus 7
augcaagaaaguccaaagug

SEQ ID NO: 3999973 - RNA, 19 nt, Human herpesvirus 7
augcaaucaacaaaaugac

SEQ ID NO: 3999974 - RNA, 16 nt, Human herpesvirus 7
augcauuggaaaaaug

SEQ ID NO: 3999975 - RNA, 18 nt, Human herpesvirus 7
augccagaaauuaaauac

SEQ ID NO: 3999976 - RNA, 13 nt, Human herpesvirus 7
augcuaaaguuaa

SEQ ID NO: 3999977 - RNA, 22 nt, Human herpesvirus 7
augcuuccuaaaaaaaaaggaa

SEQ ID NO: 3999978 - RNA, 16 nt, Human herpesvirus 7
auggacaaaaauaaag

SEQ ID NO: 3999979 - RNA, 15 nt, Human herpesvirus 7
auggagcagcuuaag

SEQ ID NO: 3999980 - RNA, 15 nt, Human herpesvirus 7
augguugugcaauuu

SEQ ID NO: 3999981 - RNA, 17 nt, Human herpesvirus 7
auguaauuuaaauaauu

SEQ ID NO: 3999982 - RNA, 16 nt, Human herpesvirus 7
caauucaucaggacaa

SEQ ID NO: 3999983 - RNA, 16 nt, Human herpesvirus 7
caauugaguuuacugc

SEQ ID NO: 3999984 - RNA, 17 nt, Human herpesvirus 7
caauuuuaaugugcuua

SEQ ID NO: 3999985 - RNA, 13 nt, Human herpesvirus 7
cacaaauuucuug

SEQ ID NO: 3999986 - RNA, 22 nt, Human herpesvirus 7
cacaacauccagagucucuaaa

SEQ ID NO: 3999987 - RNA, 16 nt, Human herpesvirus 7
cacaauuacacaaauu

SEQ ID NO: 3999988 - RNA, 19 nt, Human herpesvirus 7
cacagaaacgucaggaaaa

SEQ ID NO: 3999989 - RNA, 14 nt, Human herpesvirus 7
cacagaaaucccaa

SEQ ID NO: 3999990 - RNA, 18 nt, Human herpesvirus 7
cacaguugaauaaagauu

SEQ ID NO: 3999991 - RNA, 22 nt, Human herpesvirus 7
cacauuccaaaaucaaguguuu

SEQ ID NO: 3999992 - RNA, 20 nt, Human herpesvirus 7
caccaaaaaauaaaaacaag

SEQ ID NO: 3999993 - RNA, 14 nt, Human herpesvirus 7
caccauuguucaac

SEQ ID NO: 3999994 - RNA, 19 nt, Human herpesvirus 7
cacccagucgucugcucaa

SEQ ID NO: 3999995 - RNA, 23 nt, Human herpesvirus 7
caccgaagcagggaaaaagcaua

SEQ ID NO: 3999996 - RNA, 18 nt, Human herpesvirus 7
cacgaucgucaucuucuc

SEQ ID NO: 3999997 - RNA, 14 nt, Human herpesvirus 7
cacgaugacuucca

SEQ ID NO: 3999998 - RNA, 19 nt, Human herpesvirus 7
cacgcucccauaaaacaag

SEQ ID NO: 3999999 - RNA, 16 nt, Human herpesvirus 7
cacuaauccaugacag

SEQ ID NO: 4000000 - RNA, 22 nt, Human herpesvirus 7
cacuaugccacaaaaaacuuug

SEQ ID NO: 4000001 - RNA, 15 nt, Human herpesvirus 7
cacuauuggacaaaa

SEQ ID NO: 4000002 - RNA, 16 nt, Human herpesvirus 7
cacugcaaauuguaaa

SEQ ID NO: 4000003 - RNA, 17 nt, Human herpesvirus 7
cacugggagcaaugcau

SEQ ID NO: 4000004 - RNA, 15 nt, Human herpesvirus 7
cacuguugaugauuu

SEQ ID NO: 4000005 - RNA, 16 nt, Human herpesvirus 7
cagaaacaccccuugc

SEQ ID NO: 4000006 - RNA, 15 nt, Human herpesvirus 7
cagaacaucugucag

SEQ ID NO: 4000007 - RNA, 20 nt, Human herpesvirus 7
cagaaguaacgcagacuaau

SEQ ID NO: 4000008 - RNA, 18 nt, Human herpesvirus 7
cagaauacuacucagaag

SEQ ID NO: 4000009 - RNA, 19 nt, Human herpesvirus 7
cagaauauuuccagcauca

SEQ ID NO: 4000010 - RNA, 16 nt, Human herpesvirus 7
cagagaacuagaacag

SEQ ID NO: 4000011 - RNA, 14 nt, Human herpesvirus 7
cagauucuccagaa

SEQ ID NO: 4000012 - RNA, 23 nt, Human herpesvirus 7
cagauuucauguuuuaugacuca

SEQ ID NO: 4000013 - RNA, 15 nt, Human herpesvirus 7
cagcguucaaucaaa

SEQ ID NO: 4000014 - RNA, 18 nt, Human herpesvirus 7
cagcuaucucuacaaaca

SEQ ID NO: 4000015 - RNA, 20 nt, Human herpesvirus 7
cagcuucagaugcuauggug

SEQ ID NO: 4000016 - RNA, 15 nt, Human herpesvirus 7
caggcugcaucuuuu

SEQ ID NO: 4000017 - RNA, 17 nt, Human herpesvirus 7
cagggaagaaacagcug

SEQ ID NO: 4000018 - RNA, 21 nt, Human herpesvirus 7
cagggaagaaacagcugaaaa

SEQ ID NO: 4000019 - RNA, 21 nt, Human herpesvirus 7
caggugacgucuagacauuug

SEQ ID NO: 4000020 - RNA, 20 nt, Human herpesvirus 7
caguucaagaaauaaugaag

SEQ ID NO: 4000021 - RNA, 14 nt, Human herpesvirus 7
caguuguuggaaau

SEQ ID NO: 4000022 - RNA, 18 nt, Human herpesvirus 7
caguuucugcauacucuu

SEQ ID NO: 4000023 - RNA, 20 nt, Human herpesvirus 7
cauaaaacaugcaacauaau

SEQ ID NO: 4000024 - RNA, 15 nt, Human herpesvirus 7
cauaaaauguacaau

SEQ ID NO: 4000025 - RNA, 16 nt, Human herpesvirus 7
cauaaauaaaaacaug

SEQ ID NO: 4000026 - RNA, 16 nt, Human herpesvirus 7
cauaauuaugaaaugu

SEQ ID NO: 4000027 - RNA, 19 nt, Human herpesvirus 7
cauacaugcaaucaacaaa

SEQ ID NO: 4000028 - RNA, 14 nt, Human herpesvirus 7
cauacgaaucaguu

SEQ ID NO: 4000029 - RNA, 13 nt, Human herpesvirus 7
cauacuuuacagc

SEQ ID NO: 4000030 - RNA, 18 nt, Human herpesvirus 7
cauagcacucauacuaau

SEQ ID NO: 4000031 - RNA, 15 nt, Human herpesvirus 7
cauauagauaaugaa

SEQ ID NO: 4000032 - RNA, 15 nt, Human herpesvirus 7
cauauauaagagaau

SEQ ID NO: 4000033 - RNA, 17 nt, Human herpesvirus 7
cauccaaaaagaaacuu

SEQ ID NO: 4000034 - RNA, 17 nt, Human herpesvirus 7
caucccugcugauacaa

SEQ ID NO: 4000035 - RNA, 17 nt, Human herpesvirus 7
caugaguacuguuucua

SEQ ID NO: 4000036 - RNA, 22 nt, Human herpesvirus 7
caugauccugguuaaaaaaaug

SEQ ID NO: 4000037 - RNA, 15 nt, Human herpesvirus 7
caugauguuaaagaa

SEQ ID NO: 4000038 - RNA, 13 nt, Human herpesvirus 7
caugcaaaaaaca

SEQ ID NO: 4000039 - RNA, 24 nt, Human herpesvirus 7
caugcgaguuagacgucaacuuga

SEQ ID NO: 4000040 - RNA, 18 nt, Human herpesvirus 7
caugggauuucuguaaaa

SEQ ID NO: 4000041 - RNA, 14 nt, Human herpesvirus 7
caugucacauaaug

SEQ ID NO: 4000042 - RNA, 20 nt, Human herpesvirus 7
cauguuaaaaaaucaacuug

SEQ ID NO: 4000043 - RNA, 19 nt, Human herpesvirus 7
cauuacuggauguauaaau

SEQ ID NO: 4000044 - RNA, 13 nt, Human herpesvirus 7
cauuaugagauuu

SEQ ID NO: 4000045 - RNA, 19 nt, Human herpesvirus 7
cauuaugagauuugccugc

SEQ ID NO: 4000046 - RNA, 13 nt, Human herpesvirus 7
cauuauuauuuga

SEQ ID NO: 4000047 - RNA, 19 nt, Human herpesvirus 7
cauuccguuuuaaauagug

SEQ ID NO: 4000048 - RNA, 15 nt, Human herpesvirus 7
cauugaaaaugcauu

SEQ ID NO: 4000049 - RNA, 16 nt, Human herpesvirus 7
cauugaaaaugcauug

SEQ ID NO: 4000050 - RNA, 16 nt, Human herpesvirus 7
cauugaaaucauuuug

SEQ ID NO: 4000051 - RNA, 14 nt, Human herpesvirus 7
cauugaaauucugu

SEQ ID NO: 4000052 - RNA, 19 nt, Human herpesvirus 7
cauugcagucaaagauuuu

SEQ ID NO: 4000053 - RNA, 18 nt, Human herpesvirus 7
cauuuaaaaaaucugaau

SEQ ID NO: 4000054 - RNA, 19 nt, Human herpesvirus 7
cauuuauuuucuuaacaau

SEQ ID NO: 4000055 - RNA, 22 nt, Human herpesvirus 7
cauuucaaaaucagaaauguua

SEQ ID NO: 4000056 - RNA, 19 nt, Human herpesvirus 7
cauuucauuccaaaauaca

SEQ ID NO: 4000057 - RNA, 14 nt, Human herpesvirus 7
cauuuccgagacag

SEQ ID NO: 4000058 - RNA, 20 nt, Human herpesvirus 7
cauuuguacuucaaaguagc

SEQ ID NO: 4000059 - RNA, 16 nt, Human herpesvirus 7
cauuuuguuuugcaau

SEQ ID NO: 4000060 - RNA, 20 nt, Human herpesvirus 7
ccaaaaguuguuaagaaucu

SEQ ID NO: 4000061 - RNA, 14 nt, Human herpesvirus 7
ccaagcuuaaauaa

SEQ ID NO: 4000062 - RNA, 16 nt, Human herpesvirus 7
ccaccauuucugaaac

SEQ ID NO: 4000063 - RNA, 13 nt, Human herpesvirus 7
ccaccguugggaa

SEQ ID NO: 4000064 - RNA, 19 nt, Human herpesvirus 7
ccacuaugccacaaaaaac

SEQ ID NO: 4000065 - RNA, 22 nt, Human herpesvirus 7
ccaggaacagauucuccagaaa

SEQ ID NO: 4000066 - RNA, 20 nt, Human herpesvirus 7
ccauuguguuaaaaauauca

SEQ ID NO: 4000067 - RNA, 17 nt, Human herpesvirus 7
ccauuuccucuggaaaa

SEQ ID NO: 4000068 - RNA, 19 nt, Human herpesvirus 7
ccgaagagggacuuuuaua

SEQ ID NO: 4000069 - RNA, 14 nt, Human herpesvirus 7
ccgcguuggugugu

SEQ ID NO: 4000070 - RNA, 20 nt, Human herpesvirus 7
ccgguuaaaaugggaauguu

SEQ ID NO: 4000071 - RNA, 18 nt, Human herpesvirus 7
ccguuuugaaaagucauu

SEQ ID NO: 4000072 - RNA, 20 nt, Human herpesvirus 7
ccuacgcagcaauguauaua

SEQ ID NO: 4000073 - RNA, 21 nt, Human herpesvirus 7
ccucagaacuguuuuaaugua

SEQ ID NO: 4000074 - RNA, 21 nt, Human herpesvirus 7
ccugguuuuguucccugcucg

SEQ ID NO: 4000075 - RNA, 17 nt, Human herpesvirus 7
ccugucuugaccuggag

SEQ ID NO: 4000076 - RNA, 18 nt, Human herpesvirus 7
ccuuauauuaaaaaccac

SEQ ID NO: 4000077 - RNA, 16 nt, Human herpesvirus 7
ccuucuaaauucuuua

SEQ ID NO: 4000078 - RNA, 22 nt, Human herpesvirus 7
ccuuuuauugguagauuuucua

SEQ ID NO: 4000079 - RNA, 18 nt, Human herpesvirus 7
cgaaaaugguauuuugcg

SEQ ID NO: 4000080 - RNA, 16 nt, Human herpesvirus 7
cgacauuauaaaagau

SEQ ID NO: 4000081 - RNA, 15 nt, Human herpesvirus 7
cgagaaaacacgaca

SEQ ID NO: 4000082 - RNA, 13 nt, Human herpesvirus 7
cgagauuccaaag

SEQ ID NO: 4000083 - RNA, 23 nt, Human herpesvirus 7
cgaggaagcuuucguaaucauuc

SEQ ID NO: 4000084 - RNA, 22 nt, Human herpesvirus 7
cgaguguaaucuagaacuguua

SEQ ID NO: 4000085 - RNA, 23 nt, Human herpesvirus 7
cgauguauuacuacuaacaugga

SEQ ID NO: 4000086 - RNA, 23 nt, Human herpesvirus 7
cgcagucuaaaaguaaagggaaa

SEQ ID NO: 4000087 - RNA, 20 nt, Human herpesvirus 7
cgcuguugguuaugcacauc

SEQ ID NO: 4000088 - RNA, 12 nt, Human herpesvirus 7
cgcuuucucaag

SEQ ID NO: 4000089 - RNA, 14 nt, Human herpesvirus 7
cggacuuaugucca

SEQ ID NO: 4000090 - RNA, 16 nt, Human herpesvirus 7
cgguaacaugucuuca

SEQ ID NO: 4000091 - RNA, 11 nt, Human herpesvirus 7
cgguuaaucuu

SEQ ID NO: 4000092 - RNA, 19 nt, Human herpesvirus 7
cguaacgaauaaaaaguuu

SEQ ID NO: 4000093 - RNA, 13 nt, Human herpesvirus 7
cguaacugugacg

SEQ ID NO: 4000094 - RNA, 14 nt, Human herpesvirus 7
cguaaguuguuaua

SEQ ID NO: 4000095 - RNA, 22 nt, Human herpesvirus 7
auguacgaacuaagaaaaaaac

SEQ ID NO: 4000096 - RNA, 17 nt, Human herpesvirus 7
auguaugguuucauuug

SEQ ID NO: 4000097 - RNA, 16 nt, Human herpesvirus 7
augucuaaaaguacag

SEQ ID NO: 4000098 - RNA, 22 nt, Human herpesvirus 7
augucugcauagacaguaaugc

SEQ ID NO: 4000099 - RNA, 18 nt, Human herpesvirus 7
augucuuguuaucuccac

SEQ ID NO: 4000100 - RNA, 15 nt, Human herpesvirus 7
augugcacauuccaa

SEQ ID NO: 4000101 - RNA, 18 nt, Human herpesvirus 7
augugcuuauaucuuaua

SEQ ID NO: 4000102 - RNA, 19 nt, Human herpesvirus 7
auguugacgggaaaaagga

SEQ ID NO: 4000103 - RNA, 21 nt, Human herpesvirus 7
auuaaacaaucuggacauuuc

SEQ ID NO: 4000104 - RNA, 19 nt, Human herpesvirus 7
auuaaacagcauuuucucu

SEQ ID NO: 4000105 - RNA, 22 nt, Human herpesvirus 7
auuaacagcuccaagcuuaaau

SEQ ID NO: 4000106 - RNA, 23 nt, Human herpesvirus 7
auuaauuuccacguuuuuuagcu

SEQ ID NO: 4000107 - RNA, 14 nt, Human herpesvirus 7
auuacauugcaguc

SEQ ID NO: 4000108 - RNA, 17 nt, Human herpesvirus 7
auuagagcauauuccau

SEQ ID NO: 4000109 - RNA, 16 nt, Human herpesvirus 7
auuauaacuuguaauu

SEQ ID NO: 4000110 - RNA, 18 nt, Human herpesvirus 7
auuauauucaaauaaggg

SEQ ID NO: 4000111 - RNA, 22 nt, Human herpesvirus 7
auuaucgcaauuaauucaguuu

SEQ ID NO: 4000112 - RNA, 19 nt, Human herpesvirus 7
auuaucgcguuuucaugcu

SEQ ID NO: 4000113 - RNA, 13 nt, Human herpesvirus 7
auuaugauguuuc

SEQ ID NO: 4000114 - RNA, 14 nt, Human herpesvirus 7
auuauuuuuaaaaa

SEQ ID NO: 4000115 - RNA, 18 nt, Human herpesvirus 7
auuccuauuaagcagcuu

SEQ ID NO: 4000116 - RNA, 21 nt, Human herpesvirus 7
auuccugcuugcacaaagauc

SEQ ID NO: 4000117 - RNA, 16 nt, Human herpesvirus 7
auuccuuggaaaaaug

SEQ ID NO: 4000118 - RNA, 12 nt, Human herpesvirus 7
auucgaugucag

SEQ ID NO: 4000119 - RNA, 16 nt, Human herpesvirus 7
auucuaaaaauuauuu

SEQ ID NO: 4000120 - RNA, 15 nt, Human herpesvirus 7
auucuaaauuaaaaa

SEQ ID NO: 4000121 - RNA, 23 nt, Human herpesvirus 7
auucucaaaaaugauaugacaug

SEQ ID NO: 4000122 - RNA, 16 nt, Human herpesvirus 7
auucuuuucaaugcaa

SEQ ID NO: 4000123 - RNA, 22 nt, Human herpesvirus 7
auugcaguaaauuugagcuuug

SEQ ID NO: 4000124 - RNA, 20 nt, Human herpesvirus 7
auuggauaauaucaguacaa

SEQ ID NO: 4000125 - RNA, 16 nt, Human herpesvirus 7
auuggcauuauucuuc

SEQ ID NO: 4000126 - RNA, 19 nt, Human herpesvirus 7
auuguacaauuacaaaaug

SEQ ID NO: 4000127 - RNA, 14 nt, Human herpesvirus 7
auugucuacaauuu

SEQ ID NO: 4000128 - RNA, 15 nt, Human herpesvirus 7
auuuaaaauuaauaa

SEQ ID NO: 4000129 - RNA, 20 nt, Human herpesvirus 7
auuuaccuuuaauugauauu

SEQ ID NO: 4000130 - RNA, 12 nt, Human herpesvirus 7
auuuacuugauu

SEQ ID NO: 4000131 - RNA, 21 nt, Human herpesvirus 7
auuuaguacuuuuucuggaau

SEQ ID NO: 4000132 - RNA, 21 nt, Human herpesvirus 7
auuuaugcgguaagaaaaauc

SEQ ID NO: 4000133 - RNA, 15 nt, Human herpesvirus 7
auuuauugaugucaa

SEQ ID NO: 4000134 - RNA, 19 nt, Human herpesvirus 7
auuucaaaaucagaaaugu

SEQ ID NO: 4000135 - RNA, 15 nt, Human herpesvirus 7
auuucagcuggaauu

SEQ ID NO: 4000136 - RNA, 18 nt, Human herpesvirus 7
auuuccucuggaaaaggg

SEQ ID NO: 4000137 - RNA, 21 nt, Human herpesvirus 7
auuuccucuggaaaagggaga

SEQ ID NO: 4000138 - RNA, 23 nt, Human herpesvirus 7
auuuccugcaauaauaaacauug

SEQ ID NO: 4000139 - RNA, 16 nt, Human herpesvirus 7
auuucuaaauaugaug

SEQ ID NO: 4000140 - RNA, 22 nt, Human herpesvirus 7
auuucuaaauaugaugaaacuu

SEQ ID NO: 4000141 - RNA, 11 nt, Human herpesvirus 7
auuucuguaaa

SEQ ID NO: 4000142 - RNA, 13 nt, Human herpesvirus 7
auuucugucaucu

SEQ ID NO: 4000143 - RNA, 21 nt, Human herpesvirus 7
auuuggauugauuuucaaguu

SEQ ID NO: 4000144 - RNA, 19 nt, Human herpesvirus 7
auuuggcuucuauuauaga

SEQ ID NO: 4000145 - RNA, 14 nt, Human herpesvirus 7
auuuguucaaaaua

SEQ ID NO: 4000146 - RNA, 19 nt, Human herpesvirus 7
auuuguuuaagacauuauu

SEQ ID NO: 4000147 - RNA, 16 nt, Human herpesvirus 7
auuuuaaauuuacuua

SEQ ID NO: 4000148 - RNA, 14 nt, Human herpesvirus 7
auuuuaacacuguu

SEQ ID NO: 4000149 - RNA, 19 nt, Human herpesvirus 7
auuuuacaaaaagaauuga

SEQ ID NO: 4000150 - RNA, 13 nt, Human herpesvirus 7
auuuucagaaaag

SEQ ID NO: 4000151 - RNA, 15 nt, Human herpesvirus 7
auuuuccauucauuu

SEQ ID NO: 4000152 - RNA, 14 nt, Human herpesvirus 7
auuuucguaucugu

SEQ ID NO: 4000153 - RNA, 22 nt, Human herpesvirus 7
auuuugccguugaguugcugcu

SEQ ID NO: 4000154 - RNA, 21 nt, Human herpesvirus 7
auuuugggcugacuuaauuga

SEQ ID NO: 4000155 - RNA, 12 nt, Human herpesvirus 7
auuuuguuuugc

SEQ ID NO: 4000156 - RNA, 14 nt, Human herpesvirus 7
auuuuuaaagagaa

SEQ ID NO: 4000157 - RNA, 22 nt, Human herpesvirus 7
auuuuuagcucuaaacaaacaa

SEQ ID NO: 4000158 - RNA, 17 nt, Human herpesvirus 7
auuuuuauuguaaagga

SEQ ID NO: 4000159 - RNA, 19 nt, Human herpesvirus 7
auuuuuuaaagaaaagcuu

SEQ ID NO: 4000160 - RNA, 23 nt, Human herpesvirus 7
auuuuuuucuuauaaauaaaaug

SEQ ID NO: 4000161 - RNA, 19 nt, Human herpesvirus 7
auuuuuuuuagaaaugguu

SEQ ID NO: 4000162 - RNA, 11 nt, Human herpesvirus 7
caaaaaaccau

SEQ ID NO: 4000163 - RNA, 15 nt, Human herpesvirus 7
caaaaaauucuucua

SEQ ID NO: 4000164 - RNA, 22 nt, Human herpesvirus 7
caaaacugcaaauccaacagaa

SEQ ID NO: 4000165 - RNA, 14 nt, Human herpesvirus 7
caaaagccacagau

SEQ ID NO: 4000166 - RNA, 12 nt, Human herpesvirus 7
caaaagcuuacu

SEQ ID NO: 4000167 - RNA, 21 nt, Human herpesvirus 7
caaaaguauaacauugcuuca

SEQ ID NO: 4000168 - RNA, 18 nt, Human herpesvirus 7
caaaagucgagaaaacac

SEQ ID NO: 4000169 - RNA, 12 nt, Human herpesvirus 7
caaaauagcaca

SEQ ID NO: 4000170 - RNA, 18 nt, Human herpesvirus 7
caaaauauuuaucugcau

SEQ ID NO: 4000171 - RNA, 19 nt, Human herpesvirus 7
caaaaugacaaaaagguug

SEQ ID NO: 4000172 - RNA, 15 nt, Human herpesvirus 7
caaaauuauaacuuu

SEQ ID NO: 4000173 - RNA, 24 nt, Human herpesvirus 7
caaaauucaacgucuuacuuggaa

SEQ ID NO: 4000174 - RNA, 21 nt, Human herpesvirus 7
caaaauucugcuugucucugu

SEQ ID NO: 4000175 - RNA, 22 nt, Human herpesvirus 7
caaaccuauccacucuccugaa

SEQ ID NO: 4000176 - RNA, 17 nt, Human herpesvirus 7
caaacucaauaaagauu

SEQ ID NO: 4000177 - RNA, 22 nt, Human herpesvirus 7
caaagaaaaaaggaugaaagug

SEQ ID NO: 4000178 - RNA, 12 nt, Human herpesvirus 7
caaaguagccuu

SEQ ID NO: 4000179 - RNA, 22 nt, Human herpesvirus 7
caaaucaaaaugagauuuuucc

SEQ ID NO: 4000180 - RNA, 19 nt, Human herpesvirus 7
caaauguuuuaauuuggaa

SEQ ID NO: 4000181 - RNA, 14 nt, Human herpesvirus 7
caaauuaaagcgag

SEQ ID NO: 4000182 - RNA, 16 nt, Human herpesvirus 7
caaauucaaccacaga

SEQ ID NO: 4000183 - RNA, 22 nt, Human herpesvirus 7
caacauuuguguguaugugcag

SEQ ID NO: 4000184 - RNA, 21 nt, Human herpesvirus 7
caaccuguacucgacucugaa

SEQ ID NO: 4000185 - RNA, 23 nt, Human herpesvirus 7
caaccuuuuaaaaucaaauguaa

SEQ ID NO: 4000186 - RNA, 23 nt, Human herpesvirus 7
caacgauaugguuugaaaaccau

SEQ ID NO: 4000187 - RNA, 20 nt, Human herpesvirus 7
caacgucuuacuuggaaaca

SEQ ID NO: 4000188 - RNA, 21 nt, Human herpesvirus 7
caacuagagaagccacuucua

SEQ ID NO: 4000189 - RNA, 13 nt, Human herpesvirus 7
caacucuuccuuu

SEQ ID NO: 4000190 - RNA, 13 nt, Human herpesvirus 7
caagaaacauguu

SEQ ID NO: 4000191 - RNA, 19 nt, Human herpesvirus 7
caagaaggaaaauuucauu

SEQ ID NO: 4000192 - RNA, 18 nt, Human herpesvirus 7
caagaaggccacgcugua

SEQ ID NO: 4000193 - RNA, 16 nt, Human herpesvirus 7
caagauaagcaauaca

SEQ ID NO: 4000194 - RNA, 20 nt, Human herpesvirus 7
caagguuuaaaacauuuaca

SEQ ID NO: 4000195 - RNA, 22 nt, Human herpesvirus 7
caaguagugcuaauauuccuuu

SEQ ID NO: 4000196 - RNA, 20 nt, Human herpesvirus 7
caagucaucgguuuucugag

SEQ ID NO: 4000197 - RNA, 14 nt, Human herpesvirus 7
caaguuuuacagaa

SEQ ID NO: 4000198 - RNA, 16 nt, Human herpesvirus 7
caauaaaagauuuaaa

SEQ ID NO: 4000199 - RNA, 20 nt, Human herpesvirus 7
caauaaaguuuuguaacuau

SEQ ID NO: 4000200 - RNA, 17 nt, Human herpesvirus 7
caauaaaucuguaaaau

SEQ ID NO: 4000201 - RNA, 12 nt, Human herpesvirus 7
caauacaugaau

SEQ ID NO: 4000202 - RNA, 17 nt, Human herpesvirus 7
caauagaaaacauuaua

SEQ ID NO: 4000203 - RNA, 17 nt, Human herpesvirus 7
caauauagaguaccaau

SEQ ID NO: 4000204 - RNA, 12 nt, Human herpesvirus 7
caauauauugaa

SEQ ID NO: 4000205 - RNA, 22 nt, Human herpesvirus 7
caaucaacaaaaugacaaaaag

SEQ ID NO: 4000206 - RNA, 15 nt, Human herpesvirus 7
caaucccagaaauuu

SEQ ID NO: 4000207 - RNA, 13 nt, Human herpesvirus 7
caaucuauuucua

SEQ ID NO: 4000208 - RNA, 22 nt, Human herpesvirus 7
caaugagacagcaacugugcau

SEQ ID NO: 4000209 - RNA, 19 nt, Human herpesvirus 7
caaugauaauaagaugugu

SEQ ID NO: 4000210 - RNA, 16 nt, Human herpesvirus 7
caaugcauuggaaaaa

SEQ ID NO: 4000211 - RNA, 21 nt, Human herpesvirus 7
uuugaucuacauauacuuuua

SEQ ID NO: 4000212 - RNA, 16 nt, Human herpesvirus 7
uuugcugagucucugg

SEQ ID NO: 4000213 - RNA, 22 nt, Human herpesvirus 7
uuuggaaaacaacauacauauu

SEQ ID NO: 4000214 - RNA, 16 nt, Human herpesvirus 7
uuuggcaacucuuccu

SEQ ID NO: 4000215 - RNA, 16 nt, Human herpesvirus 7
uuugggaaacaucuuu

SEQ ID NO: 4000216 - RNA, 21 nt, Human herpesvirus 7
uuugggaugucuuaggaguuu

SEQ ID NO: 4000217 - RNA, 19 nt, Human herpesvirus 7
uuugucuuacgucuuuucu

SEQ ID NO: 4000218 - RNA, 15 nt, Human herpesvirus 7
uuugugcugugucaa

SEQ ID NO: 4000219 - RNA, 13 nt, Human herpesvirus 7
uuuuaaacuaagu

SEQ ID NO: 4000220 - RNA, 16 nt, Human herpesvirus 7
uuuuaauaugugaaaa

SEQ ID NO: 4000221 - RNA, 22 nt, Human herpesvirus 7
uuuuauucagacaaguaaaagc

SEQ ID NO: 4000222 - RNA, 13 nt, Human herpesvirus 7
uuuuauuucuaau

SEQ ID NO: 4000223 - RNA, 23 nt, Human herpesvirus 7
uuuucaaguuucuucuggguuaa

SEQ ID NO: 4000224 - RNA, 21 nt, Human herpesvirus 7
uuuucaugguauuuguuagaa

SEQ ID NO: 4000225 - RNA, 14 nt, Human herpesvirus 7
uuuucggauaaaag

SEQ ID NO: 4000226 - RNA, 23 nt, Human herpesvirus 7
uuuucuucuucuuuuuuugaacu

SEQ ID NO: 4000227 - RNA, 19 nt, Human herpesvirus 7
uuuugauccgauuuaucaa

SEQ ID NO: 4000228 - RNA, 11 nt, Human herpesvirus 7
uuuugccuuca

SEQ ID NO: 4000229 - RNA, 13 nt, Human herpesvirus 7
uuuuuaugaagau

SEQ ID NO: 4000230 - RNA, 16 nt, Human herpesvirus 7
uuuuuaugugguuaaa

SEQ ID NO: 4000231 - RNA, 13 nt, Human herpesvirus 7
uuuuuuguucaaa

SEQ ID NO: 4000232 - RNA, 12 nt, Human herpesvirus 7
aaaaaaacacag

SEQ ID NO: 4000233 - RNA, 11 nt, Human herpesvirus 7
aaaaaacacuu

SEQ ID NO: 4000234 - RNA, 11 nt, Human herpesvirus 7
aaaaaauggag

SEQ ID NO: 4000235 - RNA, 13 nt, Human herpesvirus 7
aaaaacaaaaaag

SEQ ID NO: 4000236 - RNA, 18 nt, Human herpesvirus 7
aaaaaccugaaaaacaug

SEQ ID NO: 4000237 - RNA, 18 nt, Human herpesvirus 7
aaaaaggccuuguaaagu

SEQ ID NO: 4000238 - RNA, 12 nt, Human herpesvirus 7
aaaaauaauaaa

SEQ ID NO: 4000239 - RNA, 20 nt, Human herpesvirus 7
aaaaauguuuacaaacaugu

SEQ ID NO: 4000240 - RNA, 16 nt, Human herpesvirus 7
aaaacaaacuaugucc

SEQ ID NO: 4000241 - RNA, 13 nt, Human herpesvirus 7
aaaacacaguaua

SEQ ID NO: 4000242 - RNA, 13 nt, Human herpesvirus 7
aaaacuugccauc

SEQ ID NO: 4000243 - RNA, 19 nt, Human herpesvirus 7
aaaagaauugauugaauuu

SEQ ID NO: 4000244 - RNA, 17 nt, Human herpesvirus 7
aaaagcuaaaaaacgug

SEQ ID NO: 4000245 - RNA, 18 nt, Human herpesvirus 7
aaaaguuguuaagaaucu

SEQ ID NO: 4000246 - RNA, 15 nt, Human herpesvirus 7
aaaauaaacauguug

SEQ ID NO: 4000247 - RNA, 17 nt, Human herpesvirus 7
aaaauaaauucugaaau

SEQ ID NO: 4000248 - RNA, 23 nt, Human herpesvirus 7
aaaauacaauagugaacaugugc

SEQ ID NO: 4000249 - RNA, 15 nt, Human herpesvirus 7
aaaauaucuucugaa

SEQ ID NO: 4000250 - RNA, 16 nt, Human herpesvirus 7
aaaaucaaaacauuuc

SEQ ID NO: 4000251 - RNA, 17 nt, Human herpesvirus 7
aaaaucaagucugaagg

SEQ ID NO: 4000252 - RNA, 22 nt, Human herpesvirus 7
aaaaucagaaauguuacuuaag

SEQ ID NO: 4000253 - RNA, 20 nt, Human herpesvirus 7
aaaauccuggauuucagcau

SEQ ID NO: 4000254 - RNA, 17 nt, Human herpesvirus 7
aaaaucucgaacagucc

SEQ ID NO: 4000255 - RNA, 19 nt, Human herpesvirus 7
aaaauguuuuuguuucuga

SEQ ID NO: 4000256 - RNA, 13 nt, Human herpesvirus 7
aaacaaacucugc

SEQ ID NO: 4000257 - RNA, 16 nt, Human herpesvirus 7
aaacacuugcuagcug

SEQ ID NO: 4000258 - RNA, 17 nt, Human herpesvirus 7
aaacaggcauuuaagaa

SEQ ID NO: 4000259 - RNA, 18 nt, Human herpesvirus 7
aaacaugggauuucugua

SEQ ID NO: 4000260 - RNA, 22 nt, Human herpesvirus 7
aaacgcuaaccaucugcuggaa

SEQ ID NO: 4000261 - RNA, 19 nt, Human herpesvirus 7
aaacuaaagaaaaaaaaag

SEQ ID NO: 4000262 - RNA, 22 nt, Human herpesvirus 7
aaacuauucgaaaauaucuucu

SEQ ID NO: 4000263 - RNA, 18 nt, Human herpesvirus 7
aaacuuagugaugaccac

SEQ ID NO: 4000264 - RNA, 21 nt, Human herpesvirus 7
aaacuugugaaaauaacagga

SEQ ID NO: 4000265 - RNA, 22 nt, Human herpesvirus 7
aaagaaaaagcaacaaauguuu

SEQ ID NO: 4000266 - RNA, 21 nt, Human herpesvirus 7
aaagacgcuugcuauuuucuu

SEQ ID NO: 4000267 - RNA, 20 nt, Human herpesvirus 7
aaagauuaaaaaaaaaagaa

SEQ ID NO: 4000268 - RNA, 21 nt, Human herpesvirus 7
aaagcauacuuuaaaacuuug

SEQ ID NO: 4000269 - RNA, 14 nt, Human herpesvirus 7
aaagcgagcuuucu

SEQ ID NO: 4000270 - RNA, 20 nt, Human herpesvirus 7
aaaggaucucucuuucugga

SEQ ID NO: 4000271 - RNA, 21 nt, Human herpesvirus 7
aaaguagaggccgaaaaucua

SEQ ID NO: 4000272 - RNA, 14 nt, Human herpesvirus 7
aaaguccaaaguga

SEQ ID NO: 4000273 - RNA, 17 nt, Human herpesvirus 7
aaagucuaagguuugaa

SEQ ID NO: 4000274 - RNA, 20 nt, Human herpesvirus 7
aaagugaucaaaauuaaugu

SEQ ID NO: 4000275 - RNA, 13 nt, Human herpesvirus 7
aaaguugaaaaug

SEQ ID NO: 4000276 - RNA, 16 nt, Human herpesvirus 7
aaaguugaaaauguuu

SEQ ID NO: 4000277 - RNA, 19 nt, Human herpesvirus 7
aaaguuuauagaacaagua

SEQ ID NO: 4000278 - RNA, 22 nt, Human herpesvirus 7
aaauaauccauuccuguguucu

SEQ ID NO: 4000279 - RNA, 20 nt, Human herpesvirus 7
aaauagaguuuaauuguacu

SEQ ID NO: 4000280 - RNA, 18 nt, Human herpesvirus 7
aaauauaugcuuuauuua

SEQ ID NO: 4000281 - RNA, 23 nt, Human herpesvirus 7
aaauauguggcacauaaguugac

SEQ ID NO: 4000282 - RNA, 17 nt, Human herpesvirus 7
aaaucuguagaaaaugu

SEQ ID NO: 4000283 - RNA, 15 nt, Human herpesvirus 7
aaaucuuuaagaaug

SEQ ID NO: 4000284 - RNA, 14 nt, Human herpesvirus 7
aaaugcauugcuuu

SEQ ID NO: 4000285 - RNA, 16 nt, Human herpesvirus 7
aaaugguauuuugcgu

SEQ ID NO: 4000286 - RNA, 18 nt, Human herpesvirus 7
aaauguaauuuaaauaau

SEQ ID NO: 4000287 - RNA, 18 nt, Human herpesvirus 7
aaauguguaacaauugag

SEQ ID NO: 4000288 - RNA, 14 nt, Human herpesvirus 7
aaauguuuuugcua

SEQ ID NO: 4000289 - RNA, 15 nt, Human herpesvirus 7
aaauuaaauacaaau

SEQ ID NO: 4000290 - RNA, 12 nt, Human herpesvirus 7
aaauuaaauacu

SEQ ID NO: 4000291 - RNA, 14 nt, Human herpesvirus 7
aaauuaauguaauu

SEQ ID NO: 4000292 - RNA, 22 nt, Human herpesvirus 7
aaauuauuaauauuaguauugu

SEQ ID NO: 4000293 - RNA, 16 nt, Human herpesvirus 7
aaauuauuauuaguau

SEQ ID NO: 4000294 - RNA, 20 nt, Human herpesvirus 7
aaauuccuccugaaaauuug

SEQ ID NO: 4000295 - RNA, 19 nt, Human herpesvirus 7
aaauucgcaaaauuucauu

SEQ ID NO: 4000296 - RNA, 20 nt, Human herpesvirus 7
aaauucuuuaauaaaaaaca

SEQ ID NO: 4000297 - RNA, 15 nt, Human herpesvirus 7
aaauugaaauauuua

SEQ ID NO: 4000298 - RNA, 21 nt, Human herpesvirus 7
aaauuuagcaccaacugaauu

SEQ ID NO: 4000299 - RNA, 18 nt, Human herpesvirus 7
aaauuuuggauuguguaa

SEQ ID NO: 4000300 - RNA, 14 nt, Human herpesvirus 7
aaauuuuuagcucu

SEQ ID NO: 4000301 - RNA, 18 nt, Human herpesvirus 7
aacaacuagcaaacagug

SEQ ID NO: 4000302 - RNA, 17 nt, Human herpesvirus 7
aacaaucuuacaaaaag

SEQ ID NO: 4000303 - RNA, 11 nt, Human herpesvirus 7
aacaaugacuu

SEQ ID NO: 4000304 - RNA, 21 nt, Human herpesvirus 7
aacacguagaaaaaaacaaug

SEQ ID NO: 4000305 - RNA, 20 nt, Human herpesvirus 7
aacagauuuuauuucagcuc

SEQ ID NO: 4000306 - RNA, 23 nt, Human herpesvirus 7
aacagauuuuauuucagcuccau

SEQ ID NO: 4000307 - RNA, 15 nt, Human herpesvirus 7
aacaguuuuuaaaau

SEQ ID NO: 4000308 - RNA, 13 nt, Human herpesvirus 7
aacauauguugau

SEQ ID NO: 4000309 - RNA, 19 nt, Human herpesvirus 7
aacaucuuucauaacaaag

SEQ ID NO: 4000310 - RNA, 20 nt, Human herpesvirus 7
aacaugauugguaaaaaauu

SEQ ID NO: 4000311 - RNA, 21 nt, Human herpesvirus 7
aacauuccaacagcuucagau

SEQ ID NO: 4000312 - RNA, 12 nt, Human herpesvirus 7
aacauugugagu

SEQ ID NO: 4000313 - RNA, 12 nt, Human herpesvirus 7
aacauuucagau

SEQ ID NO: 4000314 - RNA, 17 nt, Human herpesvirus 7
aaccaauuaauauuaau

SEQ ID NO: 4000315 - RNA, 15 nt, Human herpesvirus 7
cgugaacaaauacug

SEQ ID NO: 4000316 - RNA, 21 nt, Human herpesvirus 7
cgugagggggacaauuauuua

SEQ ID NO: 4000317 - RNA, 22 nt, Human herpesvirus 7
cguuauuauguguacacuuuug

SEQ ID NO: 4000318 - RNA, 20 nt, Human herpesvirus 7
cguucuauguaugaaaaaaa

SEQ ID NO: 4000319 - RNA, 19 nt, Human herpesvirus 7
cguuggggauguucuauuc

SEQ ID NO: 4000320 - RNA, 19 nt, Human herpesvirus 7
cguuggucgagaauacaca

SEQ ID NO: 4000321 - RNA, 13 nt, Human herpesvirus 7
cguuguuuguccu

SEQ ID NO: 4000322 - RNA, 23 nt, Human herpesvirus 7
cguuucucuguagauauuuugac

SEQ ID NO: 4000323 - RNA, 17 nt, Human herpesvirus 7
cuaacaaaaaaauaccu

SEQ ID NO: 4000324 - RNA, 22 nt, Human herpesvirus 7
cuaaccaucugcuggaaauuug

SEQ ID NO: 4000325 - RNA, 22 nt, Human herpesvirus 7
cuaacuauaauagccuuucacu

SEQ ID NO: 4000326 - RNA, 20 nt, Human herpesvirus 7
cuaauagaaaaauguacaau

SEQ ID NO: 4000327 - RNA, 19 nt, Human herpesvirus 7
cuaaugguuggauuucaau

SEQ ID NO: 4000328 - RNA, 21 nt, Human herpesvirus 7
cuaauuuuggcgaaacaauac

SEQ ID NO: 4000329 - RNA, 18 nt, Human herpesvirus 7
cuacaauuucuggcaaua

SEQ ID NO: 4000330 - RNA, 20 nt, Human herpesvirus 7
cuacaauuucuggcaauaaa

SEQ ID NO: 4000331 - RNA, 19 nt, Human herpesvirus 7
cuacauauggacaaauuug

SEQ ID NO: 4000332 - RNA, 16 nt, Human herpesvirus 7
cuagaaaaacacuagc

SEQ ID NO: 4000333 - RNA, 23 nt, Human herpesvirus 7
cuagauguuuuugauauuguacu

SEQ ID NO: 4000334 - RNA, 17 nt, Human herpesvirus 7
cuagcaccgaaaauggu

SEQ ID NO: 4000335 - RNA, 20 nt, Human herpesvirus 7
cuagcguuucguuaacccag

SEQ ID NO: 4000336 - RNA, 16 nt, Human herpesvirus 7
cuaggauaccaaacaa

SEQ ID NO: 4000337 - RNA, 14 nt, Human herpesvirus 7
cuauaaauggaauu

SEQ ID NO: 4000338 - RNA, 22 nt, Human herpesvirus 7
cuaucacaaccuggauguaaug

SEQ ID NO: 4000339 - RNA, 23 nt, Human herpesvirus 7
cuaucuccuaaaugaauuuuaag

SEQ ID NO: 4000340 - RNA, 24 nt, Human herpesvirus 7
cuauuaaauauuuagagucgucuu

SEQ ID NO: 4000341 - RNA, 14 nt, Human herpesvirus 7
cuauucuauuucaa

SEQ ID NO: 4000342 - RNA, 18 nt, Human herpesvirus 7
cuauugaaaauuuauuga

SEQ ID NO: 4000343 - RNA, 15 nt, Human herpesvirus 7
cucaaaacaaacucu

SEQ ID NO: 4000344 - RNA, 21 nt, Human herpesvirus 7
cucaacgacaaacuuugcaac

SEQ ID NO: 4000345 - RNA, 20 nt, Human herpesvirus 7
cucaaguagccgaaaaagaa

SEQ ID NO: 4000346 - RNA, 22 nt, Human herpesvirus 7
cucaauaguuuuacaaagaaca

SEQ ID NO: 4000347 - RNA, 22 nt, Human herpesvirus 7
cucaauuuuucgcugaagaaca

SEQ ID NO: 4000348 - RNA, 22 nt, Human herpesvirus 7
cucgaauuacguuauauauuua

SEQ ID NO: 4000349 - RNA, 15 nt, Human herpesvirus 7
cucuacuuaauggag

SEQ ID NO: 4000350 - RNA, 14 nt, Human herpesvirus 7
cucucucuauuaca

SEQ ID NO: 4000351 - RNA, 14 nt, Human herpesvirus 7
cucucuuucuggag

SEQ ID NO: 4000352 - RNA, 22 nt, Human herpesvirus 7
cucugccagucucuaaacuucu

SEQ ID NO: 4000353 - RNA, 20 nt, Human herpesvirus 7
cucuugaggaaaugucuuug

SEQ ID NO: 4000354 - RNA, 15 nt, Human herpesvirus 7
cugaaaaacaugagu

SEQ ID NO: 4000355 - RNA, 22 nt, Human herpesvirus 7
cugaacgcagacacaauggaac

SEQ ID NO: 4000356 - RNA, 14 nt, Human herpesvirus 7
cugaaucaaaaucc

SEQ ID NO: 4000357 - RNA, 19 nt, Human herpesvirus 7
cugaauuguacguucugaa

SEQ ID NO: 4000358 - RNA, 21 nt, Human herpesvirus 7
cugacagucacguaaaagugu

SEQ ID NO: 4000359 - RNA, 21 nt, Human herpesvirus 7
cugacuccuuuuuuucugcuc

SEQ ID NO: 4000360 - RNA, 20 nt, Human herpesvirus 7
cugacuuaauugauugcacu

SEQ ID NO: 4000361 - RNA, 18 nt, Human herpesvirus 7
cugagacgauaugaauuu

SEQ ID NO: 4000362 - RNA, 19 nt, Human herpesvirus 7
cugagagaaccugaaagaa

SEQ ID NO: 4000363 - RNA, 22 nt, Human herpesvirus 7
cugagagaauaaguucaucaug

SEQ ID NO: 4000364 - RNA, 19 nt, Human herpesvirus 7
cugauaaauacucaugaag

SEQ ID NO: 4000365 - RNA, 14 nt, Human herpesvirus 7
cugauauaaaugcu

SEQ ID NO: 4000366 - RNA, 23 nt, Human herpesvirus 7
cugaucuaaaguauggaaaaaug

SEQ ID NO: 4000367 - RNA, 18 nt, Human herpesvirus 7
cugcagcugaaagcgcaa

SEQ ID NO: 4000368 - RNA, 19 nt, Human herpesvirus 7
cugccagucucuaaacuuc

SEQ ID NO: 4000369 - RNA, 16 nt, Human herpesvirus 7
cugccucugccucuug

SEQ ID NO: 4000370 - RNA, 16 nt, Human herpesvirus 7
cugcuggaaagcuugu

SEQ ID NO: 4000371 - RNA, 17 nt, Human herpesvirus 7
cuggauucaagaaauca

SEQ ID NO: 4000372 - RNA, 14 nt, Human herpesvirus 7
cuggcucaagcaca

SEQ ID NO: 4000373 - RNA, 22 nt, Human herpesvirus 7
cuggcucuuuacaaaauucaac

SEQ ID NO: 4000374 - RNA, 18 nt, Human herpesvirus 7
cugggaaaaaaaaaucac

SEQ ID NO: 4000375 - RNA, 15 nt, Human herpesvirus 7
cugggaacuagaaaa

SEQ ID NO: 4000376 - RNA, 17 nt, Human herpesvirus 7
cuguaucuccaaaguuu

SEQ ID NO: 4000377 - RNA, 14 nt, Human herpesvirus 7
cugucuauuucaau

SEQ ID NO: 4000378 - RNA, 14 nt, Human herpesvirus 7
cuguguauuucuua

SEQ ID NO: 4000379 - RNA, 11 nt, Human herpesvirus 7
cuguuaagaau

SEQ ID NO: 4000380 - RNA, 20 nt, Human herpesvirus 7
cuguuagaggauuaaaacaa

SEQ ID NO: 4000381 - RNA, 23 nt, Human herpesvirus 7
cuguuaguugggcaaacaguuuu

SEQ ID NO: 4000382 - RNA, 13 nt, Human herpesvirus 7
cuguugccagaaa

SEQ ID NO: 4000383 - RNA, 11 nt, Human herpesvirus 7
cuuacagugaa

SEQ ID NO: 4000384 - RNA, 12 nt, Human herpesvirus 7
cuuacagugaag

SEQ ID NO: 4000385 - RNA, 19 nt, Human herpesvirus 7
cuuacuuuuaauucuucua

SEQ ID NO: 4000386 - RNA, 22 nt, Human herpesvirus 7
cuuagaaaaacgcuaaccaucu

SEQ ID NO: 4000387 - RNA, 22 nt, Human herpesvirus 7
cuucaauagcagagaauauguu

SEQ ID NO: 4000388 - RNA, 19 nt, Human herpesvirus 7
cuucaauaugcuuaguuuu

SEQ ID NO: 4000389 - RNA, 20 nt, Human herpesvirus 7
cuucaauucaccaauuucua

SEQ ID NO: 4000390 - RNA, 20 nt, Human herpesvirus 7
cuugaaugagcugacagagg

SEQ ID NO: 4000391 - RNA, 22 nt, Human herpesvirus 7
cuugaauuccgauuuaagugaa

SEQ ID NO: 4000392 - RNA, 17 nt, Human herpesvirus 7
cuugccaaaagcuugaa

SEQ ID NO: 4000393 - RNA, 14 nt, Human herpesvirus 7
cuugcuuugaaaaa

SEQ ID NO: 4000394 - RNA, 16 nt, Human herpesvirus 7
cuugcuuugcauagau

SEQ ID NO: 4000395 - RNA, 23 nt, Human herpesvirus 7
cuuuaauaaaaaacaaauaacug

SEQ ID NO: 4000396 - RNA, 24 nt, Human herpesvirus 7
cuuuacagcugagacgauaugaau

SEQ ID NO: 4000397 - RNA, 16 nt, Human herpesvirus 7
cuuuacuuucauagcu

SEQ ID NO: 4000398 - RNA, 14 nt, Human herpesvirus 7
cuuuauaugucaaa

SEQ ID NO: 4000399 - RNA, 15 nt, Human herpesvirus 7
cuuucguuuucuaaa

SEQ ID NO: 4000400 - RNA, 16 nt, Human herpesvirus 7
cuuugaaaaaaacacu

SEQ ID NO: 4000401 - RNA, 18 nt, Human herpesvirus 7
cuuugaaucuauuaaaga

SEQ ID NO: 4000402 - RNA, 17 nt, Human herpesvirus 7
cuuugacaaaaauguua

SEQ ID NO: 4000403 - RNA, 11 nt, Human herpesvirus 7
cuuugacaaag

SEQ ID NO: 4000404 - RNA, 17 nt, Human herpesvirus 7
cuuugucacuuaaagaa

SEQ ID NO: 4000405 - RNA, 18 nt, Human herpesvirus 7
cuuugucaugacuggaca

SEQ ID NO: 4000406 - RNA, 18 nt, Human herpesvirus 7
cuuuucaaugcaacuuua

SEQ ID NO: 4000407 - RNA, 20 nt, Human herpesvirus 7
cuuuucuuaaacaugauuua

SEQ ID NO: 4000408 - RNA, 22 nt, Human herpesvirus 7
cuuuugcgggaaaaaacgucua

SEQ ID NO: 4000409 - RNA, 17 nt, Human herpesvirus 7
gaaaaaaacaaaaucua

SEQ ID NO: 4000410 - RNA, 17 nt, Human herpesvirus 7
gaaaaaaauuaugugua

SEQ ID NO: 4000411 - RNA, 15 nt, Human herpesvirus 7
gaaaaaauaaauucu

SEQ ID NO: 4000412 - RNA, 16 nt, Human herpesvirus 7
gaaaacgcgauaaugu

SEQ ID NO: 4000413 - RNA, 18 nt, Human herpesvirus 7
gaaaacugcaacuuugug

SEQ ID NO: 4000414 - RNA, 18 nt, Human herpesvirus 7
gaaaagcaacuuuucuua

SEQ ID NO: 4000415 - RNA, 19 nt, Human herpesvirus 7
gaaaaguugaagaaaucuu

SEQ ID NO: 4000416 - RNA, 21 nt, Human herpesvirus 7
gaaaauauauuccaacucaau

SEQ ID NO: 4000417 - RNA, 20 nt, Human herpesvirus 7
gaaaaucuccuugauaagau

SEQ ID NO: 4000418 - RNA, 23 nt, Human herpesvirus 7
gaaaauggagcauuauuggauaa

SEQ ID NO: 4000419 - RNA, 12 nt, Human herpesvirus 7
gaaacaaauugu

SEQ ID NO: 4000420 - RNA, 21 nt, Human herpesvirus 7
gaaacaucuuuauauguguuc

SEQ ID NO: 4000421 - RNA, 16 nt, Human herpesvirus 7
gaaacgucccugugac

SEQ ID NO: 4000422 - RNA, 18 nt, Human herpesvirus 7
gaaacuacgucaccaccg

SEQ ID NO: 4000423 - RNA, 20 nt, Human herpesvirus 7
gaaacucaucauugaagaaa

SEQ ID NO: 4000424 - RNA, 22 nt, Human herpesvirus 7
gaaaguaaaaacuuuucuuucu

SEQ ID NO: 4000425 - RNA, 19 nt, Human herpesvirus 7
ggcaacaaacaaauaauuc

SEQ ID NO: 4000426 - RNA, 22 nt, Human herpesvirus 7
ggcaacaguucaaaaaaagaag

SEQ ID NO: 4000427 - RNA, 16 nt, Human herpesvirus 7
gggcuacgaaugggaa

SEQ ID NO: 4000428 - RNA, 22 nt, Human herpesvirus 7
gguaaacucacuucuaaaagcu

SEQ ID NO: 4000429 - RNA, 17 nt, Human herpesvirus 7
gguaaauccuucguaac

SEQ ID NO: 4000430 - RNA, 11 nt, Human herpesvirus 7
gguaaauugua

SEQ ID NO: 4000431 - RNA, 17 nt, Human herpesvirus 7
ggucucuuucuaaaaag

SEQ ID NO: 4000432 - RNA, 16 nt, Human herpesvirus 7
cacauuaucuugacag

SEQ ID NO: 4000433 - RNA, 15 nt, Human herpesvirus 7
caccgugagaaauuu

SEQ ID NO: 4000434 - RNA, 21 nt, Human herpesvirus 7
cacguguucaggcaacauuaa

SEQ ID NO: 4000435 - RNA, 21 nt, Human herpesvirus 7
cacuaacuacagcuuuuggaa

SEQ ID NO: 4000436 - RNA, 21 nt, Human herpesvirus 7
cacuaucuccuaaaugaauuu

SEQ ID NO: 4000437 - RNA, 12 nt, Human herpesvirus 7
cacuguuguagg

SEQ ID NO: 4000438 - RNA, 13 nt, Human herpesvirus 7
cagaaaucccaaa

SEQ ID NO: 4000439 - RNA, 20 nt, Human herpesvirus 7
cagaaauuauacuagcagau

SEQ ID NO: 4000440 - RNA, 15 nt, Human herpesvirus 7
cagaauuuccagaag

SEQ ID NO: 4000441 - RNA, 16 nt, Human herpesvirus 7
cagacaccgucauuuc

SEQ ID NO: 4000442 - RNA, 13 nt, Human herpesvirus 7
cagacagcuguau

SEQ ID NO: 4000443 - RNA, 16 nt, Human herpesvirus 7
cagaccuaacaaaaaa

SEQ ID NO: 4000444 - RNA, 22 nt, Human herpesvirus 7
cagagaucauaauuacauugca

SEQ ID NO: 4000445 - RNA, 16 nt, Human herpesvirus 7
cagauacccacggacg

SEQ ID NO: 4000446 - RNA, 18 nt, Human herpesvirus 7
cagauucuccagaaauua

SEQ ID NO: 4000447 - RNA, 20 nt, Human herpesvirus 7
cagauucuccgcuuuuggau

SEQ ID NO: 4000448 - RNA, 24 nt, Human herpesvirus 7
cagauugaaauuccauacaaagaa

SEQ ID NO: 4000449 - RNA, 16 nt, Human herpesvirus 7
cagcaacugugcauga

SEQ ID NO: 4000450 - RNA, 24 nt, Human herpesvirus 7
cagcaauguauauaagcagacacc

SEQ ID NO: 4000451 - RNA, 16 nt, Human herpesvirus 7
cagcaauuuuaacgau

SEQ ID NO: 4000452 - RNA, 16 nt, Human herpesvirus 7
cagcacaaaugucuua

SEQ ID NO: 4000453 - RNA, 16 nt, Human herpesvirus 7
cagcagccuacuuuac

SEQ ID NO: 4000454 - RNA, 17 nt, Human herpesvirus 7
cagccaucuaauugcag

SEQ ID NO: 4000455 - RNA, 15 nt, Human herpesvirus 7
cagcuagauugacua

SEQ ID NO: 4000456 - RNA, 18 nt, Human herpesvirus 7
caggaaaaagcagacauu

SEQ ID NO: 4000457 - RNA, 16 nt, Human herpesvirus 7
cagucccagauaauua

SEQ ID NO: 4000458 - RNA, 21 nt, Human herpesvirus 7
cagucugaaagccgcugccuu

SEQ ID NO: 4000459 - RNA, 17 nt, Human herpesvirus 7
caguguuuaaaauguua

SEQ ID NO: 4000460 - RNA, 19 nt, Human herpesvirus 7
caguuauuucuuauuggag

SEQ ID NO: 4000461 - RNA, 17 nt, Human herpesvirus 7
cauaauuaugaaauguu

SEQ ID NO: 4000462 - RNA, 13 nt, Human herpesvirus 7
cauacaaugaauu

SEQ ID NO: 4000463 - RNA, 15 nt, Human herpesvirus 7
cauaguaaacacgua

SEQ ID NO: 4000464 - RNA, 23 nt, Human herpesvirus 7
cauauuaacaagcacacuaaaaa

SEQ ID NO: 4000465 - RNA, 13 nt, Human herpesvirus 7
cauauuuugcuag

SEQ ID NO: 4000466 - RNA, 16 nt, Human herpesvirus 7
cauauuuugcuagaaa

SEQ ID NO: 4000467 - RNA, 19 nt, Human herpesvirus 7
cauauuuuuaaauuugucu

SEQ ID NO: 4000468 - RNA, 23 nt, Human herpesvirus 7
caucaaaagucuuguuuuuugga

SEQ ID NO: 4000469 - RNA, 14 nt, Human herpesvirus 7
caucaggaaucuuu

SEQ ID NO: 4000470 - RNA, 23 nt, Human herpesvirus 7
caucgaagaaauucgaaacacuu

SEQ ID NO: 4000471 - RNA, 13 nt, Human herpesvirus 7
caucuaugugcuc

SEQ ID NO: 4000472 - RNA, 15 nt, Human herpesvirus 7
caucucuguggcugu

SEQ ID NO: 4000473 - RNA, 17 nt, Human herpesvirus 7
caucuuuuugaacagaa

SEQ ID NO: 4000474 - RNA, 18 nt, Human herpesvirus 7
caugaucuuguaauuucu

SEQ ID NO: 4000475 - RNA, 16 nt, Human herpesvirus 7
caugauuucaauaauc

SEQ ID NO: 4000476 - RNA, 14 nt, Human herpesvirus 7
caugcaaaaaacag

SEQ ID NO: 4000477 - RNA, 16 nt, Human herpesvirus 7
cauggagcacaauuac

SEQ ID NO: 4000478 - RNA, 17 nt, Human herpesvirus 7
cauuagagcauauucca

SEQ ID NO: 4000479 - RNA, 20 nt, Human herpesvirus 7
cauuagcauugaaaucauuu

SEQ ID NO: 4000480 - RNA, 16 nt, Human herpesvirus 7
cauuccacuaaaagag

SEQ ID NO: 4000481 - RNA, 16 nt, Human herpesvirus 7
cauugcuucagaaaua

SEQ ID NO: 4000482 - RNA, 15 nt, Human herpesvirus 7
cauuuaaaaaaucug

SEQ ID NO: 4000483 - RNA, 24 nt, Human herpesvirus 7
cauuucaaaaucagaaauguuacu

SEQ ID NO: 4000484 - RNA, 15 nt, Human herpesvirus 7
cauuugcuucuucua

SEQ ID NO: 4000485 - RNA, 20 nt, Human herpesvirus 7
cauuuuauucaaagcuucua

SEQ ID NO: 4000486 - RNA, 15 nt, Human herpesvirus 7
ccaaaaucaaaaaac

SEQ ID NO: 4000487 - RNA, 22 nt, Human herpesvirus 7
ccaaaaucaaguguuucuuuga

SEQ ID NO: 4000488 - RNA, 21 nt, Human herpesvirus 7
ccaaauaaacguccauugauu

SEQ ID NO: 4000489 - RNA, 13 nt, Human herpesvirus 7
ccaaauauaugcu

SEQ ID NO: 4000490 - RNA, 22 nt, Human herpesvirus 7
ccaacugaccagagauguuuua

SEQ ID NO: 4000491 - RNA, 17 nt, Human herpesvirus 7
ccaauagaaaacaaauc

SEQ ID NO: 4000492 - RNA, 17 nt, Human herpesvirus 7
ccacucuggaaauguca

SEQ ID NO: 4000493 - RNA, 17 nt, Human herpesvirus 7
ccagaaauuaaauacaa

SEQ ID NO: 4000494 - RNA, 15 nt, Human herpesvirus 7
ccaucacaaaacucu

SEQ ID NO: 4000495 - RNA, 17 nt, Human herpesvirus 7
cccuggaacguccucug

SEQ ID NO: 4000496 - RNA, 21 nt, Human herpesvirus 7
acaauguguuaaauaaagagu

SEQ ID NO: 4000497 - RNA, 14 nt, Human herpesvirus 7
acaauuguauuuca

SEQ ID NO: 4000498 - RNA, 14 nt, Human herpesvirus 7
acaauuugcauaau

SEQ ID NO: 4000499 - RNA, 19 nt, Human herpesvirus 7
acacaagguacauuuugca

SEQ ID NO: 4000500 - RNA, 17 nt, Human herpesvirus 7
acacguagacugagacg

SEQ ID NO: 4000501 - RNA, 16 nt, Human herpesvirus 7
acacuagcuuucuguu

SEQ ID NO: 4000502 - RNA, 22 nt, Human herpesvirus 7
acacuauuggacaaaagacugu

SEQ ID NO: 4000503 - RNA, 19 nt, Human herpesvirus 7
acagaaauugaugaagaca

SEQ ID NO: 4000504 - RNA, 12 nt, Human herpesvirus 7
acagcugagacg

SEQ ID NO: 4000505 - RNA, 16 nt, Human herpesvirus 7
acagucauuugcaguu

SEQ ID NO: 4000506 - RNA, 14 nt, Human herpesvirus 7
acagucugaaagcc

SEQ ID NO: 4000507 - RNA, 16 nt, Human herpesvirus 7
acaguuuuuuaauaca

SEQ ID NO: 4000508 - RNA, 20 nt, Human herpesvirus 7
acaguuuuuuaauacaaaau

SEQ ID NO: 4000509 - RNA, 16 nt, Human herpesvirus 7
acauaauccaaaccgg

SEQ ID NO: 4000510 - RNA, 20 nt, Human herpesvirus 7
ugaaaaagccauaaaaugua

SEQ ID NO: 4000511 - RNA, 23 nt, Human herpesvirus 7
ugaaaacauuagcauugaaauca

SEQ ID NO: 4000512 - RNA, 20 nt, Human herpesvirus 7
ugaaaaucuugaauaaauuu

SEQ ID NO: 4000513 - RNA, 17 nt, Human herpesvirus 7
ugaaauaagaugcuuaa

SEQ ID NO: 4000514 - RNA, 20 nt, Human herpesvirus 7
ugaaauuguaguuuuugcau

SEQ ID NO: 4000515 - RNA, 18 nt, Human herpesvirus 7
ugaacaaguagugcuaau

SEQ ID NO: 4000516 - RNA, 15 nt, Human herpesvirus 7
ugaacaaguuucaaa

SEQ ID NO: 4000517 - RNA, 20 nt, Human herpesvirus 7
ugaaggugucuauuaaaugc

SEQ ID NO: 4000518 - RNA, 14 nt, Human herpesvirus 7
ugaaguuugcugaa

SEQ ID NO: 4000519 - RNA, 13 nt, Human herpesvirus 7
ugaaugaacaaau

SEQ ID NO: 4000520 - RNA, 23 nt, Human herpesvirus 7
ugaauuaucgcaauuaauucagu

SEQ ID NO: 4000521 - RNA, 18 nt, Human herpesvirus 7
ugacaccguuuugaaaag

SEQ ID NO: 4000522 - RNA, 14 nt, Human herpesvirus 7
ugacaucaauaaau

SEQ ID NO: 4000523 - RNA, 21 nt, Human herpesvirus 7
ugauaaauacucaugaaggau

SEQ ID NO: 4000524 - RNA, 20 nt, Human herpesvirus 7
ugauacaggccuguuucuug

SEQ ID NO: 4000525 - RNA, 14 nt, Human herpesvirus 7
ugauauaaaugcuu

SEQ ID NO: 4000526 - RNA, 21 nt, Human herpesvirus 7
ugaucaaaaucuguagaaaau

SEQ ID NO: 4000527 - RNA, 20 nt, Human herpesvirus 7
ugauuguauuugucucugug

SEQ ID NO: 4000528 - RNA, 15 nt, Human herpesvirus 7
ugauuuuuuaaaugu

SEQ ID NO: 4000529 - RNA, 16 nt, Human herpesvirus 7
ugauuuuuuauuccca

SEQ ID NO: 4000530 - RNA, 13 nt, Human herpesvirus 7
ugcaaaacaaaau

SEQ ID NO: 4000531 - RNA, 19 nt, Human herpesvirus 7
ugcaacuuuaauuaacacu

SEQ ID NO: 4000532 - RNA, 20 nt, Human herpesvirus 7
ugcaacuuugugccugaaau

SEQ ID NO: 4000533 - RNA, 17 nt, Human herpesvirus 7
ugcagaccguaaaacaa

SEQ ID NO: 4000534 - RNA, 20 nt, Human herpesvirus 7
ugcaggcuagaaguuuagag

SEQ ID NO: 4000535 - RNA, 22 nt, Human herpesvirus 7
ugcaguguuuuuuucugguaaa

SEQ ID NO: 4000536 - RNA, 18 nt, Human herpesvirus 7
ugcauacucuuguugacu

SEQ ID NO: 4000537 - RNA, 15 nt, Human herpesvirus 7
ugcauauuuugcuag

SEQ ID NO: 4000538 - RNA, 12 nt, Human herpesvirus 7
ugcaucgaauuu

SEQ ID NO: 4000539 - RNA, 20 nt, Human herpesvirus 7
ugccaccgggacagauuuag

SEQ ID NO: 4000540 - RNA, 14 nt, Human herpesvirus 7
ugccauuacugauc

SEQ ID NO: 4000541 - RNA, 24 nt, Human herpesvirus 7
ugccgccauguauugucuuacagc

SEQ ID NO: 4000542 - RNA, 20 nt, Human herpesvirus 7
ugccuuucccagaagaaugg

SEQ ID NO: 4000543 - RNA, 15 nt, Human herpesvirus 7
ugcguuacuucuguc

SEQ ID NO: 4000544 - RNA, 15 nt, Human herpesvirus 7
ugcucaucaaauaag

SEQ ID NO: 4000545 - RNA, 16 nt, Human herpesvirus 7
ugcugauccgccgaca

SEQ ID NO: 4000546 - RNA, 13 nt, Human herpesvirus 7
ugcuggaaaacau

SEQ ID NO: 4000547 - RNA, 19 nt, Human herpesvirus 7
ugcuggaaaacauuucaga

SEQ ID NO: 4000548 - RNA, 15 nt, Human herpesvirus 7
ugcugucuauuucaa

SEQ ID NO: 4000549 - RNA, 19 nt, Human herpesvirus 7
ugcuuaaaaacaguaauuu

SEQ ID NO: 4000550 - RNA, 14 nt, Human herpesvirus 7
ugcuuaaggacagg

SEQ ID NO: 4000551 - RNA, 22 nt, Human herpesvirus 7
ugcuuguaggcagaaaugucuu

SEQ ID NO: 4000552 - RNA, 14 nt, Human herpesvirus 7
ugcuuuguugucau

SEQ ID NO: 4000553 - RNA, 13 nt, Human herpesvirus 7
uggaaaacaacau

SEQ ID NO: 4000554 - RNA, 18 nt, Human herpesvirus 7
uggaaagaagaagauuuu

SEQ ID NO: 4000555 - RNA, 15 nt, Human herpesvirus 7
uggaaaucaaaauuc

SEQ ID NO: 4000556 - RNA, 19 nt, Human herpesvirus 7
uggacagagacaaccaucg

SEQ ID NO: 4000557 - RNA, 17 nt, Human herpesvirus 7
uggacauuucaagaagg

SEQ ID NO: 4000558 - RNA, 20 nt, Human herpesvirus 7
uggauucaagaaaucagauu

SEQ ID NO: 4000559 - RNA, 16 nt, Human herpesvirus 7
uggauuuucuguaauc

SEQ ID NO: 4000560 - RNA, 19 nt, Human herpesvirus 7
uggcaaauccuauaaaagc

SEQ ID NO: 4000561 - RNA, 19 nt, Human herpesvirus 7
uggcgccaaaaaaacacag

SEQ ID NO: 4000562 - RNA, 22 nt, Human herpesvirus 7
uggucagaacaucccuggacag

SEQ ID NO: 4000563 - RNA, 15 nt, Human herpesvirus 7
ugguuauccaaguuu

SEQ ID NO: 4000564 - RNA, 22 nt, Human herpesvirus 7
uguacagauuucauauuuagac

SEQ ID NO: 4000565 - RNA, 19 nt, Human herpesvirus 7
uguaccacgaauaucguug

SEQ ID NO: 4000566 - RNA, 22 nt, Human herpesvirus 7
uguaucuucaagcucuugaaga

SEQ ID NO: 4000567 - RNA, 14 nt, Human herpesvirus 7
uguaugguuucauu

SEQ ID NO: 4000568 - RNA, 13 nt, Human herpesvirus 7
uguauguugaagu

SEQ ID NO: 4000569 - RNA, 14 nt, Human herpesvirus 7
uguauguugaaguu

SEQ ID NO: 4000570 - RNA, 13 nt, Human herpesvirus 7
uguauuaaagaag

SEQ ID NO: 4000571 - RNA, 19 nt, Human herpesvirus 7
uguauuuguugaucuucaa

SEQ ID NO: 4000572 - RNA, 12 nt, Human herpesvirus 7
ugucaggaagca

SEQ ID NO: 4000573 - RNA, 17 nt, Human herpesvirus 7
ugucaggcucauuucaa

SEQ ID NO: 4000574 - RNA, 14 nt, Human herpesvirus 7
ugucaucaaaauuu

SEQ ID NO: 4000575 - RNA, 17 nt, Human herpesvirus 7
uguccagccaaaaucua

SEQ ID NO: 4000576 - RNA, 16 nt, Human herpesvirus 7
ugucuauuaaaugcgu

SEQ ID NO: 4000577 - RNA, 18 nt, Human herpesvirus 7
ugucugauucuuauucua

SEQ ID NO: 4000578 - RNA, 17 nt, Human herpesvirus 7
ugucuuacaacuagaaa

SEQ ID NO: 4000579 - RNA, 12 nt, Human herpesvirus 7
ugucuuggaaga

SEQ ID NO: 4000580 - RNA, 14 nt, Human herpesvirus 7
ugugacccugucac

SEQ ID NO: 4000581 - RNA, 16 nt, Human herpesvirus 7
ugugacuucauaucug

SEQ ID NO: 4000582 - RNA, 17 nt, Human herpesvirus 7
ugugcagagaugaagga

SEQ ID NO: 4000583 - RNA, 21 nt, Human herpesvirus 7
uguguauuuuuuaaagaaaag

SEQ ID NO: 4000584 - RNA, 12 nt, Human herpesvirus 7
ugugucuuacaa

SEQ ID NO: 4000585 - RNA, 14 nt, Human herpesvirus 7
uguuaaauaaagag

SEQ ID NO: 4000586 - RNA, 17 nt, Human herpesvirus 7
uguuaaggagcuucauu

SEQ ID NO: 4000587 - RNA, 17 nt, Human herpesvirus 7
uguuacaugaucuugua

SEQ ID NO: 4000588 - RNA, 13 nt, Human herpesvirus 7
uguuacccaaaau

SEQ ID NO: 4000589 - RNA, 20 nt, Human herpesvirus 7
uguucuaucaagauaagcaa

SEQ ID NO: 4000590 - RNA, 17 nt, Human herpesvirus 7
uguugagucgaaugcau

SEQ ID NO: 4000591 - RNA, 21 nt, Human herpesvirus 7
uguuguagguaauuucuuaua

SEQ ID NO: 4000592 - RNA, 20 nt, Human herpesvirus 7
uguuucuuugaaucuauuaa

SEQ ID NO: 4000593 - RNA, 22 nt, Human herpesvirus 7
uguuugaucaaaaucuguagaa

SEQ ID NO: 4000594 - RNA, 14 nt, Human herpesvirus 7
uguuuugcauauuu

SEQ ID NO: 4000595 - RNA, 13 nt, Human herpesvirus 7
uuaaaaaaaugaa

SEQ ID NO: 4000596 - RNA, 15 nt, Human herpesvirus 7
uuaaaaaccacagag

SEQ ID NO: 4000597 - RNA, 20 nt, Human herpesvirus 7
uuaaaaguacaaauguuuua

SEQ ID NO: 4000598 - RNA, 15 nt, Human herpesvirus 7
uuaaaauacuaauca

SEQ ID NO: 4000599 - RNA, 12 nt, Human herpesvirus 7
uuaaaauauguu

SEQ ID NO: 4000600 - RNA, 15 nt, Human herpesvirus 7
uuaaaauauuagaac

SEQ ID NO: 4000601 - RNA, 16 nt, Human herpesvirus 7
uuaaagauguuucuuu

SEQ ID NO: 4000602 - RNA, 19 nt, Human herpesvirus 7
uuaaaggaaacauuucuaa

SEQ ID NO: 4000603 - RNA, 15 nt, Human herpesvirus 7
uuaaauagugaauca

SEQ ID NO: 4000604 - RNA, 12 nt, Human herpesvirus 7
uuaaaugucaau

SEQ ID NO: 4000605 - RNA, 20 nt, Human herpesvirus 7
uuaaauuuuucgcugucuuu

SEQ ID NO: 4000606 - RNA, 17 nt, Human herpesvirus 7
uacagaaauugaugaag

SEQ ID NO: 4000607 - RNA, 13 nt, Human herpesvirus 7
uacagaagaacau

SEQ ID NO: 4000608 - RNA, 16 nt, Human herpesvirus 7
uacagacagaaugcca

SEQ ID NO: 4000609 - RNA, 18 nt, Human herpesvirus 7
uacagcauauaucuuuga

SEQ ID NO: 4000610 - RNA, 13 nt, Human herpesvirus 7
uaccaauaaaagg

SEQ ID NO: 4000611 - RNA, 12 nt, Human herpesvirus 7
uacgguuuucag

SEQ ID NO: 4000612 - RNA, 13 nt, Human herpesvirus 7
uacgucaucccug

SEQ ID NO: 4000613 - RNA, 24 nt, Human herpesvirus 7
uacgugaguguuguaacaacuagc

SEQ ID NO: 4000614 - RNA, 16 nt, Human herpesvirus 7
uacucagaagacauau

SEQ ID NO: 4000615 - RNA, 18 nt, Human herpesvirus 7
uagaaaaacacuagcuuu

SEQ ID NO: 4000616 - RNA, 17 nt, Human herpesvirus 7
uagaaaaugcuguuuuu

SEQ ID NO: 4000617 - RNA, 20 nt, Human herpesvirus 7
uagaacagcugaaacucauc

SEQ ID NO: 4000618 - RNA, 19 nt, Human herpesvirus 7
uagaacuugcgaauacuug

SEQ ID NO: 4000619 - RNA, 16 nt, Human herpesvirus 7
uagaugcauccaaaga

SEQ ID NO: 4000620 - RNA, 22 nt, Human herpesvirus 7
uagauuuggaugacauuuugga

SEQ ID NO: 4000621 - RNA, 22 nt, Human herpesvirus 7
uagauuuuuugaaaaagauuua

SEQ ID NO: 4000622 - RNA, 13 nt, Human herpesvirus 7
uaggauagcuuga

SEQ ID NO: 4000623 - RNA, 13 nt, Human herpesvirus 7
uaggcuucuucua

SEQ ID NO: 4000624 - RNA, 12 nt, Human herpesvirus 7
uaggggaagaau

SEQ ID NO: 4000625 - RNA, 15 nt, Human herpesvirus 7
uaggggaagaaucaa

SEQ ID NO: 4000626 - RNA, 16 nt, Human herpesvirus 7
uagucauccaauauca

SEQ ID NO: 4000627 - RNA, 19 nt, Human herpesvirus 7
uaguucugaaaucaaaaau

SEQ ID NO: 4000628 - RNA, 20 nt, Human herpesvirus 7
uauaaaacgugugaaaacaa

SEQ ID NO: 4000629 - RNA, 12 nt, Human herpesvirus 7
uauacaacuuua

SEQ ID NO: 4000630 - RNA, 17 nt, Human herpesvirus 7
uauacauguaacuguuu

SEQ ID NO: 4000631 - RNA, 16 nt, Human herpesvirus 7
uauauaaguccuucaa

SEQ ID NO: 4000632 - RNA, 15 nt, Human herpesvirus 7
uauaugaaauuucaa

SEQ ID NO: 4000633 - RNA, 19 nt, Human herpesvirus 7
uauaugaaucaaauuucaa

SEQ ID NO: 4000634 - RNA, 12 nt, Human herpesvirus 7
uauauuaaucuu

SEQ ID NO: 4000635 - RNA, 21 nt, Human herpesvirus 7
uauauuacuacgguuuucaga

SEQ ID NO: 4000636 - RNA, 13 nt, Human herpesvirus 7
uaucaaaauucca

SEQ ID NO: 4000637 - RNA, 14 nt, Human herpesvirus 7
uaucaucaucuuuu

SEQ ID NO: 4000638 - RNA, 15 nt, Human herpesvirus 7
uaucaugauuauaua

SEQ ID NO: 4000639 - RNA, 16 nt, Human herpesvirus 7
uaucgcgaaacagcgu

SEQ ID NO: 4000640 - RNA, 17 nt, Human herpesvirus 7
uaucucauagcuuaaaa

SEQ ID NO: 4000641 - RNA, 12 nt, Human herpesvirus 7
uaucugugacuu

SEQ ID NO: 4000642 - RNA, 16 nt, Human herpesvirus 7
uaucuguggcuuuugc

SEQ ID NO: 4000643 - RNA, 12 nt, Human herpesvirus 7
uaugacucagac

SEQ ID NO: 4000644 - RNA, 18 nt, Human herpesvirus 7
uaugauuuuuuaaaugug

SEQ ID NO: 4000645 - RNA, 14 nt, Human herpesvirus 7
uaugcaugcaauuu

SEQ ID NO: 4000646 - RNA, 13 nt, Human herpesvirus 7
uaugcuaagaaag

SEQ ID NO: 4000647 - RNA, 14 nt, Human herpesvirus 7
uauggacuccugua

SEQ ID NO: 4000648 - RNA, 17 nt, Human herpesvirus 7
uauggauacaaggaaaa

SEQ ID NO: 4000649 - RNA, 20 nt, Human herpesvirus 7
uaugguuucauuuggaagau

SEQ ID NO: 4000650 - RNA, 14 nt, Human herpesvirus 7
uaugguuugaaaac

SEQ ID NO: 4000651 - RNA, 13 nt, Human herpesvirus 7
uauuaaaaaccac

SEQ ID NO: 4000652 - RNA, 20 nt, Human herpesvirus 7
uauuacucgaaauuuaaaaa

SEQ ID NO: 4000653 - RNA, 14 nt, Human herpesvirus 7
uauuauuaaagcuu

SEQ ID NO: 4000654 - RNA, 20 nt, Human herpesvirus 7
uauugaauguggaauuaaau

SEQ ID NO: 4000655 - RNA, 16 nt, Human herpesvirus 7
uauuguaucuaugaaa

SEQ ID NO: 4000656 - RNA, 21 nt, Human herpesvirus 7
uauuuaagcuucaaaaauguu

SEQ ID NO: 4000657 - RNA, 22 nt, Human herpesvirus 7
uauuugucggugaauguagaag

SEQ ID NO: 4000658 - RNA, 13 nt, Human herpesvirus 7
uauuuuacauauu

SEQ ID NO: 4000659 - RNA, 17 nt, Human herpesvirus 7
uauuuugauaauuuaca

SEQ ID NO: 4000660 - RNA, 20 nt, Human herpesvirus 7
ucaaaaaaaaaacaauccac

SEQ ID NO: 4000661 - RNA, 15 nt, Human herpesvirus 7
ucaaaacauaucaga

SEQ ID NO: 4000662 - RNA, 21 nt, Human herpesvirus 7
ucaaacaauugcccuuguguu

SEQ ID NO: 4000663 - RNA, 14 nt, Human herpesvirus 7
ucaaagugugcccg

SEQ ID NO: 4000664 - RNA, 22 nt, Human herpesvirus 7
ucaaauauauauuaagaaauaa

SEQ ID NO: 4000665 - RNA, 20 nt, Human herpesvirus 7
ucaacacaauuuucacaucu

SEQ ID NO: 4000666 - RNA, 17 nt, Human herpesvirus 7
ucaacuugcagaggacc

SEQ ID NO: 4000667 - RNA, 23 nt, Human herpesvirus 7
ucaaggggucgcauauugcaauu

SEQ ID NO: 4000668 - RNA, 23 nt, Human herpesvirus 7
ucaauaaaugguuuuauuucaca

SEQ ID NO: 4000669 - RNA, 18 nt, Human herpesvirus 7
ucaauaacgaauuauuua

SEQ ID NO: 4000670 - RNA, 22 nt, Human herpesvirus 7
ucaauaguuuuacaaagaacau

SEQ ID NO: 4000671 - RNA, 19 nt, Human herpesvirus 7
ucaauuuauccuaagcuuu

SEQ ID NO: 4000672 - RNA, 23 nt, Human herpesvirus 7
ucacagauaaaaauuuauuuucu

SEQ ID NO: 4000673 - RNA, 21 nt, Human herpesvirus 7
ucacagcuagauugacuauga

SEQ ID NO: 4000674 - RNA, 21 nt, Human herpesvirus 7
ucacaguugcuugugaaggag

SEQ ID NO: 4000675 - RNA, 13 nt, Human herpesvirus 7
ucacauugucacu

SEQ ID NO: 4000676 - RNA, 14 nt, Human herpesvirus 7
ucagaacuguuuua

SEQ ID NO: 4000677 - RNA, 15 nt, Human herpesvirus 7
ucagaauagacaucu

SEQ ID NO: 4000678 - RNA, 14 nt, Human herpesvirus 7
ucagauugaaauuc

SEQ ID NO: 4000679 - RNA, 13 nt, Human herpesvirus 7
ucagcucuguaau

SEQ ID NO: 4000680 - RNA, 14 nt, Human herpesvirus 7
ucaggaucuccugg

SEQ ID NO: 4000681 - RNA, 13 nt, Human herpesvirus 7
ucaguuaucaagu

SEQ ID NO: 4000682 - RNA, 15 nt, Human herpesvirus 7
ucauaaucaucuuuc

SEQ ID NO: 4000683 - RNA, 15 nt, Human herpesvirus 7
ucaucaaaauuuuaa

SEQ ID NO: 4000684 - RNA, 21 nt, Human herpesvirus 7
ucaucccaaaccaugauguua

SEQ ID NO: 4000685 - RNA, 17 nt, Human herpesvirus 7
ucaucucacuucagaag

SEQ ID NO: 4000686 - RNA, 15 nt, Human herpesvirus 7
ucaugaaaacagugg

SEQ ID NO: 4000687 - RNA, 20 nt, Human herpesvirus 7
ucaugaacacaacauccaga

SEQ ID NO: 4000688 - RNA, 19 nt, Human herpesvirus 7
ucaugacuggacacaauca

SEQ ID NO: 4000689 - RNA, 18 nt, Human herpesvirus 7
ucauuaucaccacaauuu

SEQ ID NO: 4000690 - RNA, 14 nt, Human herpesvirus 7
ucauugugugucuu

SEQ ID NO: 4000691 - RNA, 22 nt, Human herpesvirus 7
ucauuuaauuggcaacacaaau

SEQ ID NO: 4000692 - RNA, 15 nt, Human herpesvirus 7
ucauuuguauauucu

SEQ ID NO: 4000693 - RNA, 22 nt, Human herpesvirus 7
uccaaagaaaaaaggaugaaag

SEQ ID NO: 4000694 - RNA, 16 nt, Human herpesvirus 7
uccaaucauaauuuuc

SEQ ID NO: 4000695 - RNA, 20 nt, Human herpesvirus 7
uccagcaaagacuugcaaag

SEQ ID NO: 4000696 - RNA, 22 nt, Human herpesvirus 7
uccaguacgucuugcuguuugu

SEQ ID NO: 4000697 - RNA, 17 nt, Human herpesvirus 7
uccauuuccucaauuuu

SEQ ID NO: 4000698 - RNA, 19 nt, Human herpesvirus 7
uccuaacuauaauagccuu

SEQ ID NO: 4000699 - RNA, 15 nt, Human herpesvirus 7
uccuuucguuuucaa

SEQ ID NO: 4000700 - RNA, 17 nt, Human herpesvirus 7
ucgaacccuggagagac

SEQ ID NO: 4000701 - RNA, 21 nt, Human herpesvirus 7
ucgaacccuggagagacauag

SEQ ID NO: 4000702 - RNA, 16 nt, Human herpesvirus 7
ucgacuuccucucgug

SEQ ID NO: 4000703 - RNA, 15 nt, Human herpesvirus 7
ucgauauacauguaa

SEQ ID NO: 4000704 - RNA, 18 nt, Human herpesvirus 7
ucgauuagguaauagcuu

SEQ ID NO: 4000705 - RNA, 23 nt, Human herpesvirus 7
ucguuuuuauuuuuuucugaaau

SEQ ID NO: 4000706 - RNA, 15 nt, Human herpesvirus 7
ucguuuuuggcaaaa

SEQ ID NO: 4000707 - RNA, 23 nt, Human herpesvirus 7
ucuaaaaauguuuuuguuucuga

SEQ ID NO: 4000708 - RNA, 16 nt, Human herpesvirus 7
ucuaaauaugaugaaa

SEQ ID NO: 4000709 - RNA, 20 nt, Human herpesvirus 7
ucuaauuaaucugcauauaa

SEQ ID NO: 4000710 - RNA, 23 nt, Human herpesvirus 7
ucuacacaaacgaguuucaaaau

SEQ ID NO: 4000711 - RNA, 20 nt, Human herpesvirus 7
ucuaucaaggucuuucaugc

SEQ ID NO: 4000712 - RNA, 15 nt, Human herpesvirus 7
ucuauuaaauauuua

SEQ ID NO: 4000713 - RNA, 18 nt, Human herpesvirus 7
ucuauuaaauauuuagag

SEQ ID NO: 4000714 - RNA, 15 nt, Human herpesvirus 7
ucuauuacacaggaa

SEQ ID NO: 4000715 - RNA, 22 nt, Human herpesvirus 7
ucuauuauuucuacacaaacga

SEQ ID NO: 4000716 - RNA, 15 nt, Human herpesvirus 7
ucucaaaacaaacuc

SEQ ID NO: 4000717 - RNA, 18 nt, Human herpesvirus 7
ucucaaucaaaaucuugu

SEQ ID NO: 4000718 - RNA, 18 nt, Human herpesvirus 7
ucucaauuaaaacaucuc

SEQ ID NO: 4000719 - RNA, 19 nt, Human herpesvirus 7
ucuccgugucacugucacu

SEQ ID NO: 4000720 - RNA, 19 nt, Human herpesvirus 7
ucuccuugauaagauuucc

SEQ ID NO: 4000721 - RNA, 15 nt, Human herpesvirus 7
aaauuacuugcuaug

SEQ ID NO: 4000722 - RNA, 19 nt, Human herpesvirus 7
aaauuauuauuaguauugu

SEQ ID NO: 4000723 - RNA, 21 nt, Human herpesvirus 7
aaauuauuauuaguauuguaa

SEQ ID NO: 4000724 - RNA, 23 nt, Human herpesvirus 7
aaauucuucagguuguugucauu

SEQ ID NO: 4000725 - RNA, 15 nt, Human herpesvirus 7
aaauugguucagcgu

SEQ ID NO: 4000726 - RNA, 15 nt, Human herpesvirus 7
aaauuuaaauacuga

SEQ ID NO: 4000727 - RNA, 15 nt, Human herpesvirus 7
aacaaacuguaccca

SEQ ID NO: 4000728 - RNA, 22 nt, Human herpesvirus 7
aacaaagauugaagcacacacg

SEQ ID NO: 4000729 - RNA, 22 nt, Human herpesvirus 7
aacaaagugcauaaauaauaac

SEQ ID NO: 4000730 - RNA, 18 nt, Human herpesvirus 7
aacaacagcagcugcuaa

SEQ ID NO: 4000731 - RNA, 14 nt, Human herpesvirus 7
aacaauauagagua

SEQ ID NO: 4000732 - RNA, 15 nt, Human herpesvirus 7
aacaauauuuaaagu

SEQ ID NO: 4000733 - RNA, 19 nt, Human herpesvirus 7
aacaccccuugcagaaacu

SEQ ID NO: 4000734 - RNA, 16 nt, Human herpesvirus 7
aacagagaacaccaua

SEQ ID NO: 4000735 - RNA, 14 nt, Human herpesvirus 7
aacaguucaaaaaa

SEQ ID NO: 4000736 - RNA, 22 nt, Human herpesvirus 7
aacauaaaaacuaaguuuugca

SEQ ID NO: 4000737 - RNA, 18 nt, Human herpesvirus 7
aacaugaguacuguuucu

SEQ ID NO: 4000738 - RNA, 13 nt, Human herpesvirus 7
aacauugcuucag

SEQ ID NO: 4000739 - RNA, 14 nt, Human herpesvirus 7
aacauugucaaaga

SEQ ID NO: 4000740 - RNA, 13 nt, Human herpesvirus 7
aacauuuguugcu

SEQ ID NO: 4000741 - RNA, 16 nt, Human herpesvirus 7
aaccacaaaaaucaaa

SEQ ID NO: 4000742 - RNA, 20 nt, Human herpesvirus 7
aaccaugaaaaauaaauacu

SEQ ID NO: 4000743 - RNA, 14 nt, Human herpesvirus 7
aaccgauacagauc

SEQ ID NO: 4000744 - RNA, 18 nt, Human herpesvirus 7
aaccgccauucuuuucaa

SEQ ID NO: 4000745 - RNA, 21 nt, Human herpesvirus 7
aaccuggauguaaugaauaaa

SEQ ID NO: 4000746 - RNA, 21 nt, Human herpesvirus 7
aaccuguacucgacucugaau

SEQ ID NO: 4000747 - RNA, 19 nt, Human herpesvirus 7
aacgauaugguuugaaaac

SEQ ID NO: 4000748 - RNA, 19 nt, Human herpesvirus 7
aacgucaggaaaaaaacgu

SEQ ID NO: 4000749 - RNA, 16 nt, Human herpesvirus 7
aacgugugaaaacaau

SEQ ID NO: 4000750 - RNA, 22 nt, Human herpesvirus 7
aacguuaccguuuaaugaaaaa

SEQ ID NO: 4000751 - RNA, 20 nt, Human herpesvirus 7
aacuaagcauauugaagauc

SEQ ID NO: 4000752 - RNA, 18 nt, Human herpesvirus 7
aacuaaguuuugcauuuu

SEQ ID NO: 4000753 - RNA, 16 nt, Human herpesvirus 7
aacucuuccuguuaau

SEQ ID NO: 4000754 - RNA, 19 nt, Human herpesvirus 7
aacugagaaaaaugacaaa

SEQ ID NO: 4000755 - RNA, 15 nt, Human herpesvirus 7
aacugcaaauccaac

SEQ ID NO: 4000756 - RNA, 22 nt, Human herpesvirus 7
aacugugcaugaaaucuugaau

SEQ ID NO: 4000757 - RNA, 21 nt, Human herpesvirus 7
aacuguuaaaaucuguucccc

SEQ ID NO: 4000758 - RNA, 23 nt, Human herpesvirus 7
aacuguuacaguuaaagacggaa

SEQ ID NO: 4000759 - RNA, 14 nt, Human herpesvirus 7
aacuuugcaacaaa

SEQ ID NO: 4000760 - RNA, 16 nt, Human herpesvirus 7
aacuuugcaacaaaau

SEQ ID NO: 4000761 - RNA, 12 nt, Human herpesvirus 7
aagaaauuuucu

SEQ ID NO: 4000762 - RNA, 21 nt, Human herpesvirus 7
aagaacauuaauaucaauuug

SEQ ID NO: 4000763 - RNA, 13 nt, Human herpesvirus 7
aagaacugugaag

SEQ ID NO: 4000764 - RNA, 14 nt, Human herpesvirus 7
aagaacuuacauuu

SEQ ID NO: 4000765 - RNA, 15 nt, Human herpesvirus 7
aagaaugcucuuuug

SEQ ID NO: 4000766 - RNA, 19 nt, Human herpesvirus 7
aagaauuuggauagauaca

SEQ ID NO: 4000767 - RNA, 19 nt, Human herpesvirus 7
aagacaccccaaaaucaaa

SEQ ID NO: 4000768 - RNA, 19 nt, Human herpesvirus 7
aagacacuuauuugauuau

SEQ ID NO: 4000769 - RNA, 15 nt, Human herpesvirus 7
aagacauuauuugcu

SEQ ID NO: 4000770 - RNA, 16 nt, Human herpesvirus 7
aagagacugucauaau

SEQ ID NO: 4000771 - RNA, 19 nt, Human herpesvirus 7
aagagccaaauauggagac

SEQ ID NO: 4000772 - RNA, 18 nt, Human herpesvirus 7
aagagguaaguguaagcu

SEQ ID NO: 4000773 - RNA, 19 nt, Human herpesvirus 7
aagauucuagcguuucguu

SEQ ID NO: 4000774 - RNA, 15 nt, Human herpesvirus 7
aagauugcuugcacu

SEQ ID NO: 4000775 - RNA, 16 nt, Human herpesvirus 7
aagauuuaacaugugu

SEQ ID NO: 4000776 - RNA, 21 nt, Human herpesvirus 7
aagcaacuuuucuuaaacaug

SEQ ID NO: 4000777 - RNA, 13 nt, Human herpesvirus 7
aagcacaaaucaa

SEQ ID NO: 4000778 - RNA, 16 nt, Human herpesvirus 7
aagcugcagcugaaag

SEQ ID NO: 4000779 - RNA, 23 nt, Human herpesvirus 7
aagcugcauguguacuaaagcca

SEQ ID NO: 4000780 - RNA, 22 nt, Human herpesvirus 7
aagcuugugaagacuacauaaa

SEQ ID NO: 4000781 - RNA, 22 nt, Human herpesvirus 7
aagcuuuugcgagaaaauacua

SEQ ID NO: 4000782 - RNA, 16 nt, Human herpesvirus 7
aaggaaaauuucauuu

SEQ ID NO: 4000783 - RNA, 22 nt, Human herpesvirus 7
aaggaaauuaguucuugugacg

SEQ ID NO: 4000784 - RNA, 22 nt, Human herpesvirus 7
aaggauuugcguaauggauuua

SEQ ID NO: 4000785 - RNA, 16 nt, Human herpesvirus 7
aagguuuaaaacauuu

SEQ ID NO: 4000786 - RNA, 18 nt, Human herpesvirus 7
aagugaacaugacuucag

SEQ ID NO: 4000787 - RNA, 11 nt, Human herpesvirus 7
aagugugcccg

SEQ ID NO: 4000788 - RNA, 22 nt, Human herpesvirus 7
aaguuaaaagaucuuuuacaga

SEQ ID NO: 4000789 - RNA, 15 nt, Human herpesvirus 7
aaguuagcgaaucau

SEQ ID NO: 4000790 - RNA, 16 nt, Human herpesvirus 7
aaguuuuacagaaauu

SEQ ID NO: 4000791 - RNA, 13 nt, Human herpesvirus 7
aaguuuucuuaua

SEQ ID NO: 4000792 - RNA, 13 nt, Human herpesvirus 7
aauaaacaggaac

SEQ ID NO: 4000793 - RNA, 19 nt, Human herpesvirus 7
aauaaaggaaagacaaacu

SEQ ID NO: 4000794 - RNA, 22 nt, Human herpesvirus 7
aauaaauuuuucgaucuguaaa

SEQ ID NO: 4000795 - RNA, 17 nt, Human herpesvirus 7
aauaaguccgugugcaa

SEQ ID NO: 4000796 - RNA, 15 nt, Human herpesvirus 7
aauacaugaauuauc

SEQ ID NO: 4000797 - RNA, 19 nt, Human herpesvirus 7
aauaccaugaaaaauauga

SEQ ID NO: 4000798 - RNA, 23 nt, Human herpesvirus 7
aauaguuuuacaaagaacaugua

SEQ ID NO: 4000799 - RNA, 20 nt, Human herpesvirus 7
aauaucuuuuucaaauggau

SEQ ID NO: 4000800 - RNA, 16 nt, Human herpesvirus 7
aauaugcaugcaauuu

SEQ ID NO: 4000801 - RNA, 16 nt, Human herpesvirus 7
aauaugcauguguaaa

SEQ ID NO: 4000802 - RNA, 19 nt, Human herpesvirus 7
aauauguagcaucucugug

SEQ ID NO: 4000803 - RNA, 14 nt, Human herpesvirus 7
aauaugugaaaaua

SEQ ID NO: 4000804 - RNA, 14 nt, Human herpesvirus 7
aauauuauaucuaa

SEQ ID NO: 4000805 - RNA, 19 nt, Human herpesvirus 7
aauauuuaaaguagcugaa

SEQ ID NO: 4000806 - RNA, 13 nt, Human herpesvirus 7
aauauuuaugccu

SEQ ID NO: 4000807 - RNA, 19 nt, Human herpesvirus 7
aaucaaaaaauaauuccuu

SEQ ID NO: 4000808 - RNA, 14 nt, Human herpesvirus 7
aaucaacaaaauga

SEQ ID NO: 4000809 - RNA, 16 nt, Human herpesvirus 7
aaucaacaaaaugaca

SEQ ID NO: 4000810 - RNA, 20 nt, Human herpesvirus 7
aaucaagacgcuguaugcaa

SEQ ID NO: 4000811 - RNA, 17 nt, Human herpesvirus 7
aaucaagucugaaggcu

SEQ ID NO: 4000812 - RNA, 16 nt, Human herpesvirus 7
aaucaugaaaacagug

SEQ ID NO: 4000813 - RNA, 17 nt, Human herpesvirus 7
aaucauguuuaagaaaa

SEQ ID NO: 4000814 - RNA, 18 nt, Human herpesvirus 7
aaucauuuuuaaaaauaa

SEQ ID NO: 4000815 - RNA, 13 nt, Human herpesvirus 7
aaucgagaauaaa

SEQ ID NO: 4000816 - RNA, 17 nt, Human herpesvirus 7
aaucgauaaacuuuguc

SEQ ID NO: 4000817 - RNA, 16 nt, Human herpesvirus 7
aaucuauauaaaauau

SEQ ID NO: 4000818 - RNA, 21 nt, Human herpesvirus 7
aaucuauauuugauugaucgu

SEQ ID NO: 4000819 - RNA, 17 nt, Human herpesvirus 7
aaucuaugcaaagcaag

SEQ ID NO: 4000820 - RNA, 18 nt, Human herpesvirus 7
aaucuggacauuucaaga

SEQ ID NO: 4000821 - RNA, 20 nt, Human herpesvirus 7
aaucuuuuauaaauaguuuc

SEQ ID NO: 4000822 - RNA, 14 nt, Human herpesvirus 7
aaucuuuuuugaac

SEQ ID NO: 4000823 - RNA, 19 nt, Human herpesvirus 7
aaugaauuuuaaguggaau

SEQ ID NO: 4000824 - RNA, 19 nt, Human herpesvirus 7
aaugaccgcaugugaaaau

SEQ ID NO: 4000825 - RNA, 14 nt, Human herpesvirus 7
aaugagauuucuga

SEQ ID NO: 4000826 - RNA, 21 nt, Human herpesvirus 7
aaugagauuuuucccaaaaua

SEQ ID NO: 4000827 - RNA, 14 nt, Human herpesvirus 7
aaugcaucugaauu

SEQ ID NO: 4000828 - RNA, 17 nt, Human herpesvirus 7
aauguagacguaguguc

SEQ ID NO: 4000829 - RNA, 15 nt, Human herpesvirus 7
aaugucagaguuuaa

SEQ ID NO: 4000830 - RNA, 14 nt, Human herpesvirus 7
aaugucucuguucc

SEQ ID NO: 4000831 - RNA, 20 nt, Human herpesvirus 7
aaugugucuuacaacuagaa

SEQ ID NO: 4000832 - RNA, 23 nt, Human herpesvirus 7
aaugugucuuacaacuagaaaau

SEQ ID NO: 4000833 - RNA, 15 nt, Human herpesvirus 7
aauguugcaaauguu

SEQ ID NO: 4000834 - RNA, 14 nt, Human herpesvirus 7
aauuaauaaaagua

SEQ ID NO: 4000835 - RNA, 21 nt, Human herpesvirus 7
aauuacaguacaaccgccauu

SEQ ID NO: 4000836 - RNA, 19 nt, Human herpesvirus 7
acuucuuugacaaaaaugu

SEQ ID NO: 4000837 - RNA, 13 nt, Human herpesvirus 7
acuugaaaaauuu

SEQ ID NO: 4000838 - RNA, 19 nt, Human herpesvirus 7
acuugaauagguaucuuua

SEQ ID NO: 4000839 - RNA, 21 nt, Human herpesvirus 7
acuugaauagguaucuuuacu

SEQ ID NO: 4000840 - RNA, 14 nt, Human herpesvirus 7
acuuguaauuuuug

SEQ ID NO: 4000841 - RNA, 23 nt, Human herpesvirus 7
acuuguuuugacuuauggugugg

SEQ ID NO: 4000842 - RNA, 18 nt, Human herpesvirus 7
acuuucuugaagaaauug

SEQ ID NO: 4000843 - RNA, 16 nt, Human herpesvirus 7
acuuugccaaugccaa

SEQ ID NO: 4000844 - RNA, 16 nt, Human herpesvirus 7
agaaaaaaacaaugaa

SEQ ID NO: 4000845 - RNA, 14 nt, Human herpesvirus 7
agaaaaauauuuaa

SEQ ID NO: 4000846 - RNA, 17 nt, Human herpesvirus 7
agaaaaguugaaaaugu

SEQ ID NO: 4000847 - RNA, 18 nt, Human herpesvirus 7
agaaauuaugaaaagcuu

SEQ ID NO: 4000848 - RNA, 19 nt, Human herpesvirus 7
agaacagcugaaacucauc

SEQ ID NO: 4000849 - RNA, 18 nt, Human herpesvirus 7
agaacuaggaaacacaau

SEQ ID NO: 4000850 - RNA, 19 nt, Human herpesvirus 7
agaacuugcgaauacuugu

SEQ ID NO: 4000851 - RNA, 20 nt, Human herpesvirus 7
agaacuuuuguaggaaauuu

SEQ ID NO: 4000852 - RNA, 19 nt, Human herpesvirus 7
agaagcuugcuagauucua

SEQ ID NO: 4000853 - RNA, 15 nt, Human herpesvirus 7
agaauauaaaaaauu

SEQ ID NO: 4000854 - RNA, 19 nt, Human herpesvirus 7
agaaucagacuaaauaugg

SEQ ID NO: 4000855 - RNA, 19 nt, Human herpesvirus 7
agaaucauuuguauauucu

SEQ ID NO: 4000856 - RNA, 23 nt, Human herpesvirus 7
agaauggcgaguuacauuucacu

SEQ ID NO: 4000857 - RNA, 15 nt, Human herpesvirus 7
agaauuagagugcuu

SEQ ID NO: 4000858 - RNA, 22 nt, Human herpesvirus 7
agaauuuggauagauacauuau

SEQ ID NO: 4000859 - RNA, 23 nt, Human herpesvirus 7
agacacggaguuuuuacucugug

SEQ ID NO: 4000860 - RNA, 20 nt, Human herpesvirus 7
agacaucuuccacaaaaauu

SEQ ID NO: 4000861 - RNA, 17 nt, Human herpesvirus 7
agacauugaaaaugcau

SEQ ID NO: 4000862 - RNA, 16 nt, Human herpesvirus 7
agacauugaagauugu

SEQ ID NO: 4000863 - RNA, 20 nt, Human herpesvirus 7
agacuaaauauggagcagcu

SEQ ID NO: 4000864 - RNA, 21 nt, Human herpesvirus 7
agacuaaauauggagcagcuu

SEQ ID NO: 4000865 - RNA, 14 nt, Human herpesvirus 7
agaguauacaaaag

SEQ ID NO: 4000866 - RNA, 22 nt, Human herpesvirus 7
agagucugugugugcaguguuu

SEQ ID NO: 4000867 - RNA, 21 nt, Human herpesvirus 7
agauaaaaauuuauuuucuaa

SEQ ID NO: 4000868 - RNA, 17 nt, Human herpesvirus 7
agauaauauagaugcag

SEQ ID NO: 4000869 - RNA, 22 nt, Human herpesvirus 7
agauauuuuaauucuaaaaauu

SEQ ID NO: 4000870 - RNA, 21 nt, Human herpesvirus 7
agaucauaauuacauugcagu

SEQ ID NO: 4000871 - RNA, 13 nt, Human herpesvirus 7
agaugcaugcuaa

SEQ ID NO: 4000872 - RNA, 19 nt, Human herpesvirus 7
agauguguuggaaacuauu

SEQ ID NO: 4000873 - RNA, 18 nt, Human herpesvirus 7
agauuauacaaauccaag

SEQ ID NO: 4000874 - RNA, 20 nt, Human herpesvirus 7
agauuauucaaaagcuaaaa

SEQ ID NO: 4000875 - RNA, 18 nt, Human herpesvirus 7
agauucuccagaaauuau

SEQ ID NO: 4000876 - RNA, 20 nt, Human herpesvirus 7
agauuuaaaguaagaaugga

SEQ ID NO: 4000877 - RNA, 16 nt, Human herpesvirus 7
agauuugacaaaacaa

SEQ ID NO: 4000878 - RNA, 14 nt, Human herpesvirus 7
agcaaaucugaaaa

SEQ ID NO: 4000879 - RNA, 17 nt, Human herpesvirus 7
agcaauacauucucaaa

SEQ ID NO: 4000880 - RNA, 18 nt, Human herpesvirus 7
agcaauacauucucaaaa

SEQ ID NO: 4000881 - RNA, 22 nt, Human herpesvirus 7
agcaccaaaaaauaaaaacaag

SEQ ID NO: 4000882 - RNA, 14 nt, Human herpesvirus 7
agcacuacuagaaa

SEQ ID NO: 4000883 - RNA, 22 nt, Human herpesvirus 7
agcauauaucuuugauuacucg

SEQ ID NO: 4000884 - RNA, 21 nt, Human herpesvirus 7
agcauugaaaucauuuugcug

SEQ ID NO: 4000885 - RNA, 20 nt, Human herpesvirus 7
agcgcuuuuuaaaaaaucua

SEQ ID NO: 4000886 - RNA, 23 nt, Human herpesvirus 7
agcuauuauaauguaagaaauuu

SEQ ID NO: 4000887 - RNA, 12 nt, Human herpesvirus 7
agcucaaaaagu

SEQ ID NO: 4000888 - RNA, 18 nt, Human herpesvirus 7
agcuccaagcuuaaauaa

SEQ ID NO: 4000889 - RNA, 18 nt, Human herpesvirus 7
agcucuaaacaaacaaug

SEQ ID NO: 4000890 - RNA, 23 nt, Human herpesvirus 7
agcugcauguguacuaaagccaa

SEQ ID NO: 4000891 - RNA, 15 nt, Human herpesvirus 7
agcuuaaaaaauaca

SEQ ID NO: 4000892 - RNA, 16 nt, Human herpesvirus 7
agcuucaaaaauguuu

SEQ ID NO: 4000893 - RNA, 14 nt, Human herpesvirus 7
agcuucuaaaugug

SEQ ID NO: 4000894 - RNA, 17 nt, Human herpesvirus 7
aggaaauugcuuucuaa

SEQ ID NO: 4000895 - RNA, 20 nt, Human herpesvirus 7
aggaagguacaucuuucgua

SEQ ID NO: 4000896 - RNA, 11 nt, Human herpesvirus 7
aggaauugcug

SEQ ID NO: 4000897 - RNA, 18 nt, Human herpesvirus 7
aggccguuuaugaacaag

SEQ ID NO: 4000898 - RNA, 14 nt, Human herpesvirus 7
agggauuucuucuu

SEQ ID NO: 4000899 - RNA, 19 nt, Human herpesvirus 7
aggggucgcauauugcaau

SEQ ID NO: 4000900 - RNA, 17 nt, Human herpesvirus 7
agguuacguguucauuu

SEQ ID NO: 4000901 - RNA, 20 nt, Human herpesvirus 7
agguuuguuuuuuggcauua

SEQ ID NO: 4000902 - RNA, 20 nt, Human herpesvirus 7
aguaaagauuuaacugauaa

SEQ ID NO: 4000903 - RNA, 17 nt, Human herpesvirus 7
aguaaagggaaaaacuu

SEQ ID NO: 4000904 - RNA, 16 nt, Human herpesvirus 7
aguagccgaaaaagaa

SEQ ID NO: 4000905 - RNA, 14 nt, Human herpesvirus 7
aguagugcuaauau

SEQ ID NO: 4000906 - RNA, 16 nt, Human herpesvirus 7
aguauuuaagaacaga

SEQ ID NO: 4000907 - RNA, 16 nt, Human herpesvirus 7
agucaagaacugugaa

SEQ ID NO: 4000908 - RNA, 19 nt, Human herpesvirus 7
agucacaauuacacaaauu

SEQ ID NO: 4000909 - RNA, 18 nt, Human herpesvirus 7
agucagaacauugucaaa

SEQ ID NO: 4000910 - RNA, 20 nt, Human herpesvirus 7
agugaagcuugcuuaaaacu

SEQ ID NO: 4000911 - RNA, 18 nt, Human herpesvirus 7
agugaaugauuuugacau

SEQ ID NO: 4000912 - RNA, 14 nt, Human herpesvirus 7
agugaauuacagau

SEQ ID NO: 4000913 - RNA, 12 nt, Human herpesvirus 7
agugaugaaagu

SEQ ID NO: 4000914 - RNA, 17 nt, Human herpesvirus 7
agugauugguagaaaug

SEQ ID NO: 4000915 - RNA, 20 nt, Human herpesvirus 7
agugcgcggauuaagagaaa

SEQ ID NO: 4000916 - RNA, 15 nt, Human herpesvirus 7
agugucuaagguuuu

SEQ ID NO: 4000917 - RNA, 11 nt, Human herpesvirus 7
aguuaaaagau

SEQ ID NO: 4000918 - RNA, 19 nt, Human herpesvirus 7
aguuauaugaaauuucaaa

SEQ ID NO: 4000919 - RNA, 15 nt, Human herpesvirus 7
aguucaaaaaaagaa

SEQ ID NO: 4000920 - RNA, 14 nt, Human herpesvirus 7
aguuccacgucaau

SEQ ID NO: 4000921 - RNA, 21 nt, Human herpesvirus 7
aguuuuacaaagaacauguag

SEQ ID NO: 4000922 - RNA, 18 nt, Human herpesvirus 7
auaaaaagauauacauaa

SEQ ID NO: 4000923 - RNA, 23 nt, Human herpesvirus 7
auaaaaauuacucaugaagcugu

SEQ ID NO: 4000924 - RNA, 22 nt, Human herpesvirus 7
auaaaacgugugaaaacaauua

SEQ ID NO: 4000925 - RNA, 13 nt, Human herpesvirus 7
auaaauaaaaugu

SEQ ID NO: 4000926 - RNA, 18 nt, Human herpesvirus 7
auaaauguucuucuguaa

SEQ ID NO: 4000927 - RNA, 20 nt, Human herpesvirus 7
auaacaaagugcgaaacgug

SEQ ID NO: 4000928 - RNA, 13 nt, Human herpesvirus 7
auaacuuuaaauu

SEQ ID NO: 4000929 - RNA, 18 nt, Human herpesvirus 7
auaauaaaggaaagacaa

SEQ ID NO: 4000930 - RNA, 14 nt, Human herpesvirus 7
auaauaagaugugu

SEQ ID NO: 4000931 - RNA, 17 nt, Human herpesvirus 7
auaaucaagaaacaugu

SEQ ID NO: 4000932 - RNA, 15 nt, Human herpesvirus 7
auaaucaucuuucuu

SEQ ID NO: 4000933 - RNA, 13 nt, Human herpesvirus 7
auaauuuaaaauu

SEQ ID NO: 4000934 - RNA, 14 nt, Human herpesvirus 7
auaauuuaaaauua

SEQ ID NO: 4000935 - RNA, 22 nt, Human herpesvirus 7
auacaaauuuaagagacauuga

SEQ ID NO: 4000936 - RNA, 18 nt, Human herpesvirus 7
auacauucucaaaaauga

SEQ ID NO: 4000937 - RNA, 13 nt, Human herpesvirus 7
auaccuguaugga

SEQ ID NO: 4000938 - RNA, 12 nt, Human herpesvirus 7
auagaagaggac

SEQ ID NO: 4000939 - RNA, 12 nt, Human herpesvirus 7
auagaguuuaau

SEQ ID NO: 4000940 - RNA, 17 nt, Human herpesvirus 7
auagcuuaaaaaauaca

SEQ ID NO: 4000941 - RNA, 15 nt, Human herpesvirus 7
auaguugguuaauaa

SEQ ID NO: 4000942 - RNA, 15 nt, Human herpesvirus 7
auauaaaagaaacuu

SEQ ID NO: 4000943 - RNA, 14 nt, Human herpesvirus 7
auauaacaaaaaac

SEQ ID NO: 4000944 - RNA, 18 nt, Human herpesvirus 7
auauaugcauuauaucca

SEQ ID NO: 4000945 - RNA, 20 nt, Human herpesvirus 7
auauaugucauagugggaac

SEQ ID NO: 4000946 - RNA, 13 nt, Human herpesvirus 7
auaucuaugaugc

SEQ ID NO: 4000947 - RNA, 22 nt, Human herpesvirus 7
auaucucuguuuugucucuuua

SEQ ID NO: 4000948 - RNA, 17 nt, Human herpesvirus 7
auaugcaaaacaaaaua

SEQ ID NO: 4000949 - RNA, 11 nt, Human herpesvirus 7
auauuaaauga

SEQ ID NO: 4000950 - RNA, 18 nt, Human herpesvirus 7
auauugaaggugucuauu

SEQ ID NO: 4000951 - RNA, 15 nt, Human herpesvirus 7
caaacgaguuucaaa

SEQ ID NO: 4000952 - RNA, 22 nt, Human herpesvirus 7
caaacguaaugcaaaauagauu

SEQ ID NO: 4000953 - RNA, 14 nt, Human herpesvirus 7
caaagacuugcaaa

SEQ ID NO: 4000954 - RNA, 15 nt, Human herpesvirus 7
caaagauugaagcac

SEQ ID NO: 4000955 - RNA, 22 nt, Human herpesvirus 7
caaaggaucgaucucugucaaa

SEQ ID NO: 4000956 - RNA, 13 nt, Human herpesvirus 7
caaagugaugaaa

SEQ ID NO: 4000957 - RNA, 17 nt, Human herpesvirus 7
caaauaugcauggagaa

SEQ ID NO: 4000958 - RNA, 12 nt, Human herpesvirus 7
caaaucaaaguu

SEQ ID NO: 4000959 - RNA, 16 nt, Human herpesvirus 7
caaaucaaugugaagu

SEQ ID NO: 4000960 - RNA, 18 nt, Human herpesvirus 7
caaaucugauaaauuaca

SEQ ID NO: 4000961 - RNA, 20 nt, Human herpesvirus 7
caaauguuuuaauuuggaaa

SEQ ID NO: 4000962 - RNA, 14 nt, Human herpesvirus 7
caaauuaaauacuu

SEQ ID NO: 4000963 - RNA, 18 nt, Human herpesvirus 7
caaauuccuccugaaaau

SEQ ID NO: 4000964 - RNA, 18 nt, Human herpesvirus 7
caaauugauccugcuauu

SEQ ID NO: 4000965 - RNA, 15 nt, Human herpesvirus 7
caaauuuauauuuua

SEQ ID NO: 4000966 - RNA, 14 nt, Human herpesvirus 7
caacagccaaaugu

SEQ ID NO: 4000967 - RNA, 10 nt, Human herpesvirus 7
caacaucuuu

SEQ ID NO: 4000968 - RNA, 16 nt, Human herpesvirus 7
caacauucuugucaac

SEQ ID NO: 4000969 - RNA, 15 nt, Human herpesvirus 7
caaccacagacacac

SEQ ID NO: 4000970 - RNA, 14 nt, Human herpesvirus 7
caacuucaacauac

SEQ ID NO: 4000971 - RNA, 13 nt, Human herpesvirus 7
caagaacugugaa

SEQ ID NO: 4000972 - RNA, 14 nt, Human herpesvirus 7
caagauccuuaucc

SEQ ID NO: 4000973 - RNA, 14 nt, Human herpesvirus 7
caaggggcauuuuu

SEQ ID NO: 4000974 - RNA, 16 nt, Human herpesvirus 7
caaggugacagagggc

SEQ ID NO: 4000975 - RNA, 19 nt, Human herpesvirus 7
caagguucuaaaaauucug

SEQ ID NO: 4000976 - RNA, 15 nt, Human herpesvirus 7
caaguuaauuuugca

SEQ ID NO: 4000977 - RNA, 14 nt, Human herpesvirus 7
caauaaauuuugaa

SEQ ID NO: 4000978 - RNA, 18 nt, Human herpesvirus 7
caauagguuccacacagg

SEQ ID NO: 4000979 - RNA, 20 nt, Human herpesvirus 7
caauauauugaaggugucua

SEQ ID NO: 4000980 - RNA, 23 nt, Human herpesvirus 7
caauauguagcaucucuguggcu

SEQ ID NO: 4000981 - RNA, 22 nt, Human herpesvirus 7
caauauuuaaaguagcugaauu

SEQ ID NO: 4000982 - RNA, 22 nt, Human herpesvirus 7
caaucaaacauguaaucaaaau

SEQ ID NO: 4000983 - RNA, 20 nt, Human herpesvirus 7
caaucacgugauuaagauuc

SEQ ID NO: 4000984 - RNA, 19 nt, Human herpesvirus 7
caaucugugaacugauguu

SEQ ID NO: 4000985 - RNA, 14 nt, Human herpesvirus 7
caaugcaaacuucu

SEQ ID NO: 4000986 - RNA, 22 nt, Human herpesvirus 7
caauugcccuuguguugucaua

SEQ ID NO: 4000987 - RNA, 18 nt, Human herpesvirus 7
caauuguuaguuaugacg

SEQ ID NO: 4000988 - RNA, 12 nt, Human herpesvirus 7
caauuuaucaau

SEQ ID NO: 4000989 - RNA, 13 nt, Human herpesvirus 7
caauuucacagac

SEQ ID NO: 4000990 - RNA, 14 nt, Human herpesvirus 7
cacaauuacacaaa

SEQ ID NO: 4000991 - RNA, 23 nt, Human herpesvirus 7
caccaaaaaauaaaaacaagcuu

SEQ ID NO: 4000992 - RNA, 15 nt, Human herpesvirus 7
caccacaauuuuaac

SEQ ID NO: 4000993 - RNA, 19 nt, Human herpesvirus 7
caccccaaaaucaaaaaac

SEQ ID NO: 4000994 - RNA, 20 nt, Human herpesvirus 7
cacccuuuguuugagacaau

SEQ ID NO: 4000995 - RNA, 15 nt, Human herpesvirus 7
cacguccaagaaaua

SEQ ID NO: 4000996 - RNA, 22 nt, Human herpesvirus 7
cacgugccgcguuuuaaaauug

SEQ ID NO: 4000997 - RNA, 18 nt, Human herpesvirus 7
cacguucuaaaaaacaaa

SEQ ID NO: 4000998 - RNA, 15 nt, Human herpesvirus 7
cacguuuugcaaagu

SEQ ID NO: 4000999 - RNA, 14 nt, Human herpesvirus 7
cacuaaaagagaac

SEQ ID NO: 4001000 - RNA, 13 nt, Human herpesvirus 7
cacuagcuuucug

SEQ ID NO: 4001001 - RNA, 15 nt, Human herpesvirus 7
cacucuccugaaaua

SEQ ID NO: 4001002 - RNA, 19 nt, Human herpesvirus 7
cagaaauaacaaaauugua

SEQ ID NO: 4001003 - RNA, 17 nt, Human herpesvirus 7
cagaacauugucaaaga

SEQ ID NO: 4001004 - RNA, 19 nt, Human herpesvirus 7
cagacagcuguauaucuau

SEQ ID NO: 4001005 - RNA, 16 nt, Human herpesvirus 7
cagaccguaaaacaau

SEQ ID NO: 4001006 - RNA, 21 nt, Human herpesvirus 7
cagacgaauuucuuugcgcug

SEQ ID NO: 4001007 - RNA, 12 nt, Human herpesvirus 7
cagagaugaaaa

SEQ ID NO: 4001008 - RNA, 15 nt, Human herpesvirus 7
cagagggcauuugua

SEQ ID NO: 4001009 - RNA, 13 nt, Human herpesvirus 7
cagaguuuaaagu

SEQ ID NO: 4001010 - RNA, 15 nt, Human herpesvirus 7
cagaguuuaaaguaa

SEQ ID NO: 4001011 - RNA, 22 nt, Human herpesvirus 7
cagaguuuaaaguaaaauuaau

SEQ ID NO: 4001012 - RNA, 21 nt, Human herpesvirus 7
cagauaaaaauuuauuuucua

SEQ ID NO: 4001013 - RNA, 13 nt, Human herpesvirus 7
cagaucucgaacu

SEQ ID NO: 4001014 - RNA, 14 nt, Human herpesvirus 7
cagaucuugcuuua

SEQ ID NO: 4001015 - RNA, 20 nt, Human herpesvirus 7
cagcacuuuuuugcguugcu

SEQ ID NO: 4001016 - RNA, 17 nt, Human herpesvirus 7
cagcugugauauuuggu

SEQ ID NO: 4001017 - RNA, 10 nt, Human herpesvirus 7
caggaagcaa

SEQ ID NO: 4001018 - RNA, 17 nt, Human herpesvirus 7
caggaagcacaaaucaa

SEQ ID NO: 4001019 - RNA, 20 nt, Human herpesvirus 7
caggcauuuaagaauuuaau

SEQ ID NO: 4001020 - RNA, 16 nt, Human herpesvirus 7
cagggagguuucuugc

SEQ ID NO: 4001021 - RNA, 23 nt, Human herpesvirus 7
caguaacuacaggcuuacacuau

SEQ ID NO: 4001022 - RNA, 17 nt, Human herpesvirus 7
caguauuuuuuaugaag

SEQ ID NO: 4001023 - RNA, 15 nt, Human herpesvirus 7
cagucaagaacugug

SEQ ID NO: 4001024 - RNA, 23 nt, Human herpesvirus 7
cagucugaaagccgcugccuucg

SEQ ID NO: 4001025 - RNA, 12 nt, Human herpesvirus 7
cagucuguaaac

SEQ ID NO: 4001026 - RNA, 16 nt, Human herpesvirus 7
cagugaguggaagcag

SEQ ID NO: 4001027 - RNA, 15 nt, Human herpesvirus 7
caguguuuaaaaugu

SEQ ID NO: 4001028 - RNA, 18 nt, Human herpesvirus 7
caguuguuggaaauaccg

SEQ ID NO: 4001029 - RNA, 23 nt, Human herpesvirus 7
caguuuguuguaugugaaaagaa

SEQ ID NO: 4001030 - RNA, 13 nt, Human herpesvirus 7
cauaaaauguaca

SEQ ID NO: 4001031 - RNA, 15 nt, Human herpesvirus 7
cauagcuagaaauug

SEQ ID NO: 4001032 - RNA, 21 nt, Human herpesvirus 7
cauaggaaucgcaguguucau

SEQ ID NO: 4001033 - RNA, 18 nt, Human herpesvirus 7
cauaugcuggaucuucug

SEQ ID NO: 4001034 - RNA, 16 nt, Human herpesvirus 7
cauauuaacaagcaca

SEQ ID NO: 4001035 - RNA, 13 nt, Human herpesvirus 7
caucccuggacag

SEQ ID NO: 4001036 - RNA, 14 nt, Human herpesvirus 7
caucgaagaaauuc

SEQ ID NO: 4001037 - RNA, 20 nt, Human herpesvirus 7
caucgaauuuuacaaugcag

SEQ ID NO: 4001038 - RNA, 16 nt, Human herpesvirus 7
caucguaaaaaaugua

SEQ ID NO: 4001039 - RNA, 15 nt, Human herpesvirus 7
caucuucucuauacc

SEQ ID NO: 4001040 - RNA, 16 nt, Human herpesvirus 7
caucuugagaaauaug

SEQ ID NO: 4001041 - RNA, 19 nt, Human herpesvirus 7
caugaauuaauaaaacaaa

SEQ ID NO: 4001042 - RNA, 19 nt, Human herpesvirus 7
caugacuucagaaaaacca

SEQ ID NO: 4001043 - RNA, 18 nt, Human herpesvirus 7
caugauguuaaagaacaa

SEQ ID NO: 4001044 - RNA, 18 nt, Human herpesvirus 7
caugauuauguuuucugc

SEQ ID NO: 4001045 - RNA, 22 nt, Human herpesvirus 7
caugauugguaaaaaauuacuu

SEQ ID NO: 4001046 - RNA, 19 nt, Human herpesvirus 7
caugcgauaucugacuggu

SEQ ID NO: 4001047 - RNA, 22 nt, Human herpesvirus 7
caugggauuucuguaaaaacuu

SEQ ID NO: 4001048 - RNA, 14 nt, Human herpesvirus 7
cauguauugucuua

SEQ ID NO: 4001049 - RNA, 23 nt, Human herpesvirus 7
caugucucucgcaacuucugaua

SEQ ID NO: 4001050 - RNA, 18 nt, Human herpesvirus 7
cauguguacuaaagccaa

SEQ ID NO: 4001051 - RNA, 21 nt, Human herpesvirus 7
cauguuucaagaauggcugau

SEQ ID NO: 4001052 - RNA, 16 nt, Human herpesvirus 7
cauuaaacagcauuuu

SEQ ID NO: 4001053 - RNA, 19 nt, Human herpesvirus 7
cauuaauaucaauuugaau

SEQ ID NO: 4001054 - RNA, 17 nt, Human herpesvirus 7
cauugaauauaaguuuu

SEQ ID NO: 4001055 - RNA, 20 nt, Human herpesvirus 7
cauuuaaaaaaaaaaccaca

SEQ ID NO: 4001056 - RNA, 18 nt, Human herpesvirus 7
cauuuaaaugugucuucc

SEQ ID NO: 4001057 - RNA, 22 nt, Human herpesvirus 7
cauuucaagaaggaaaauuuca

SEQ ID NO: 4001058 - RNA, 21 nt, Human herpesvirus 7
cauuucaucauccgaaucugu

SEQ ID NO: 4001059 - RNA, 22 nt, Human herpesvirus 7
cauuuccucuggaaaagggaga

SEQ ID NO: 4001060 - RNA, 14 nt, Human herpesvirus 7
cauuuguuuuggau

SEQ ID NO: 4001061 - RNA, 19 nt, Human herpesvirus 7
ccaaaaucaaguguuucuu

SEQ ID NO: 4001062 - RNA, 17 nt, Human herpesvirus 7
ccaaaaucuauauuuga

SEQ ID NO: 4001063 - RNA, 19 nt, Human herpesvirus 7
ccaaaauguaaaccaaauu

SEQ ID NO: 4001064 - RNA, 18 nt, Human herpesvirus 7
ccacacucauauuuuuca

SEQ ID NO: 4001065 - RNA, 14 nt, Human herpesvirus 7
ccacuucuaaauaa

SEQ ID NO: 4001066 - RNA, 12 nt, Human herpesvirus 7
aaaaaaaaccac

SEQ ID NO: 4001067 - RNA, 21 nt, Human herpesvirus 7
aaaaaagugauugcagauugu

SEQ ID NO: 4001068 - RNA, 22 nt, Human herpesvirus 7
aaaaaccuuuuuuccauauucc

SEQ ID NO: 4001069 - RNA, 23 nt, Human herpesvirus 7
aaaaagauuuaauaacaauuuga

SEQ ID NO: 4001070 - RNA, 14 nt, Human herpesvirus 7
aaaaagcagacauu

SEQ ID NO: 4001071 - RNA, 18 nt, Human herpesvirus 7
aaaaagugauugcagauu

SEQ ID NO: 4001072 - RNA, 18 nt, Human herpesvirus 7
aaaaaugaggauaauaaa

SEQ ID NO: 4001073 - RNA, 14 nt, Human herpesvirus 7
aaaacaacauacau

SEQ ID NO: 4001074 - RNA, 21 nt, Human herpesvirus 7
aaaacaauuaagaaucauuug

SEQ ID NO: 4001075 - RNA, 16 nt, Human herpesvirus 7
aaaacacguccaagaa

SEQ ID NO: 4001076 - RNA, 22 nt, Human herpesvirus 7
aaaacacguccaagaaauaugc

SEQ ID NO: 4001077 - RNA, 15 nt, Human herpesvirus 7
aaaacaucagaccua

SEQ ID NO: 4001078 - RNA, 23 nt, Human herpesvirus 7
aaaacggucugagacggacuuau

SEQ ID NO: 4001079 - RNA, 15 nt, Human herpesvirus 7
aaaacucaauguaaa

SEQ ID NO: 4001080 - RNA, 18 nt, Human herpesvirus 7
aaaacuccguuucauuua

SEQ ID NO: 4001081 - RNA, 19 nt, Human herpesvirus 7
aaaacuuugauuugagaaa

SEQ ID NO: 4001082 - RNA, 18 nt, Human herpesvirus 7
aaaagacaccuuucuuaa

SEQ ID NO: 4001083 - RNA, 16 nt, Human herpesvirus 7
aaaagcaacaaauguu

SEQ ID NO: 4001084 - RNA, 15 nt, Human herpesvirus 7
aaaagccauaaaaug

SEQ ID NO: 4001085 - RNA, 14 nt, Human herpesvirus 7
aaaagcugcagcug

SEQ ID NO: 4001086 - RNA, 12 nt, Human herpesvirus 7
aaaaguguucaa

SEQ ID NO: 4001087 - RNA, 18 nt, Human herpesvirus 7
aaaauaaauucugaaaua

SEQ ID NO: 4001088 - RNA, 14 nt, Human herpesvirus 7
aaaauacuaaucaa

SEQ ID NO: 4001089 - RNA, 12 nt, Human herpesvirus 7
aaaauagccgau

SEQ ID NO: 4001090 - RNA, 23 nt, Human herpesvirus 7
aaaauaugaguguggugacagaa

SEQ ID NO: 4001091 - RNA, 19 nt, Human herpesvirus 7
aaaaucaaaaaacacgucc

SEQ ID NO: 4001092 - RNA, 12 nt, Human herpesvirus 7
aaaaucaaaugu

SEQ ID NO: 4001093 - RNA, 13 nt, Human herpesvirus 7
aaaaucagaaaug

SEQ ID NO: 4001094 - RNA, 18 nt, Human herpesvirus 7
aaaaucuguagaaaaugu

SEQ ID NO: 4001095 - RNA, 20 nt, Human herpesvirus 7
aaaaugauaugacauggcca

SEQ ID NO: 4001096 - RNA, 13 nt, Human herpesvirus 7
aaaauguaucuua

SEQ ID NO: 4001097 - RNA, 24 nt, Human herpesvirus 7
aaaauuauaauaacaaacgauuug

SEQ ID NO: 4001098 - RNA, 22 nt, Human herpesvirus 7
aaaauucaacgucuuacuugga

SEQ ID NO: 4001099 - RNA, 15 nt, Human herpesvirus 7
aaaauuuuagacgca

SEQ ID NO: 4001100 - RNA, 13 nt, Human herpesvirus 7
aaacaacauaucg

SEQ ID NO: 4001101 - RNA, 14 nt, Human herpesvirus 7
aaacagcauuuucu

SEQ ID NO: 4001102 - RNA, 13 nt, Human herpesvirus 7
aaacagcugaaaa

SEQ ID NO: 4001103 - RNA, 13 nt, Human herpesvirus 7
aaacauucuaaau

SEQ ID NO: 4001104 - RNA, 22 nt, Human herpesvirus 7
aaacauuucaaaaucagaaaug

SEQ ID NO: 4001105 - RNA, 16 nt, Human herpesvirus 7
aaacucacaauguuuu

SEQ ID NO: 4001106 - RNA, 20 nt, Human herpesvirus 7
aaacucacuucuaaaagcug

SEQ ID NO: 4001107 - RNA, 22 nt, Human herpesvirus 7
aaacugaauugguaauguuacu

SEQ ID NO: 4001108 - RNA, 13 nt, Human herpesvirus 7
aaacuguuuguaa

SEQ ID NO: 4001109 - RNA, 18 nt, Human herpesvirus 7
aaacuguuuguaaggcca

SEQ ID NO: 4001110 - RNA, 12 nt, Human herpesvirus 7
aaacuuugaaau

SEQ ID NO: 4001111 - RNA, 19 nt, Human herpesvirus 7
aaagaaaaagcaacaaaug

SEQ ID NO: 4001112 - RNA, 22 nt, Human herpesvirus 7
aaagaugauuggauuuucugua

SEQ ID NO: 4001113 - RNA, 16 nt, Human herpesvirus 7
aaagauguuucuuucu

SEQ ID NO: 4001114 - RNA, 20 nt, Human herpesvirus 7
aaagauuuaaaguaagaaug

SEQ ID NO: 4001115 - RNA, 15 nt, Human herpesvirus 7
aaagccgcugccuuc

SEQ ID NO: 4001116 - RNA, 20 nt, Human herpesvirus 7
aaagcuuuggcagcuagccu

SEQ ID NO: 4001117 - RNA, 17 nt, Human herpesvirus 7
aaaggaaaaauuucuuc

SEQ ID NO: 4001118 - RNA, 15 nt, Human herpesvirus 7
aaaggaugaaagugc

SEQ ID NO: 4001119 - RNA, 22 nt, Human herpesvirus 7
aaaggugguuacauauccaaug

SEQ ID NO: 4001120 - RNA, 22 nt, Human herpesvirus 7
aaagucagaacauugucaaaga

SEQ ID NO: 4001121 - RNA, 15 nt, Human herpesvirus 7
aaagugauugcagau

SEQ ID NO: 4001122 - RNA, 13 nt, Human herpesvirus 7
aaauaaacaauau

SEQ ID NO: 4001123 - RNA, 18 nt, Human herpesvirus 7
aaauaagaaaccagcuuu

SEQ ID NO: 4001124 - RNA, 15 nt, Human herpesvirus 7
aaauaauauuuuacc

SEQ ID NO: 4001125 - RNA, 11 nt, Human herpesvirus 7
aaauagcaaag

SEQ ID NO: 4001126 - RNA, 14 nt, Human herpesvirus 7
aaauaucuucugaa

SEQ ID NO: 4001127 - RNA, 15 nt, Human herpesvirus 7
aaauaucuucugaac

SEQ ID NO: 4001128 - RNA, 14 nt, Human herpesvirus 7
aaauaugaauugau

SEQ ID NO: 4001129 - RNA, 20 nt, Human herpesvirus 7
aaaucacagcauuauuguau

SEQ ID NO: 4001130 - RNA, 16 nt, Human herpesvirus 7
aaaucaguuguuggaa

SEQ ID NO: 4001131 - RNA, 22 nt, Human herpesvirus 7
aaaucuauuuuauccguuaaug

SEQ ID NO: 4001132 - RNA, 20 nt, Human herpesvirus 7
aaaugcgauacuaguuuauu

SEQ ID NO: 4001133 - RNA, 18 nt, Human herpesvirus 7
aaauguacaauuugcaua

SEQ ID NO: 4001134 - RNA, 16 nt, Human herpesvirus 7
aaauguguaacaauug

SEQ ID NO: 4001135 - RNA, 13 nt, Human herpesvirus 7
aaauguuuugauu

SEQ ID NO: 4001136 - RNA, 15 nt, Human herpesvirus 7
aaauuaaaaagaaug

SEQ ID NO: 4001137 - RNA, 22 nt, Human herpesvirus 7
aaauuaaagcgagcuuucuuua

SEQ ID NO: 4001138 - RNA, 19 nt, Human herpesvirus 7
aaauuaauaauauuaguau

SEQ ID NO: 4001139 - RNA, 12 nt, Human herpesvirus 7
aauuauuuccag

SEQ ID NO: 4001140 - RNA, 19 nt, Human herpesvirus 7
aauucauuugugaaauuga

SEQ ID NO: 4001141 - RNA, 14 nt, Human herpesvirus 7
aauuccugcuugca

SEQ ID NO: 4001142 - RNA, 13 nt, Human herpesvirus 7
aauucgaaaugaa

SEQ ID NO: 4001143 - RNA, 14 nt, Human herpesvirus 7
aauucgcugaugaa

SEQ ID NO: 4001144 - RNA, 23 nt, Human herpesvirus 7
aauucuauuuuaaaaaccaugaa

SEQ ID NO: 4001145 - RNA, 20 nt, Human herpesvirus 7
aauucuuuaauaaaaaacaa

SEQ ID NO: 4001146 - RNA, 13 nt, Human herpesvirus 7
aauugagaaauuu

SEQ ID NO: 4001147 - RNA, 21 nt, Human herpesvirus 7
aauugguuuucgguguguaaa

SEQ ID NO: 4001148 - RNA, 12 nt, Human herpesvirus 7
aauuuaaauacu

SEQ ID NO: 4001149 - RNA, 17 nt, Human herpesvirus 7
aauuuaagagacauuga

SEQ ID NO: 4001150 - RNA, 20 nt, Human herpesvirus 7
aauuuaagagacauugaaaa

SEQ ID NO: 4001151 - RNA, 21 nt, Human herpesvirus 7
aauuuacuugauuuucuuaca

SEQ ID NO: 4001152 - RNA, 21 nt, Human herpesvirus 7
aauuucaaacguaaugcaaaa

SEQ ID NO: 4001153 - RNA, 22 nt, Human herpesvirus 7
aauuuccgaccugagaugauaa

SEQ ID NO: 4001154 - RNA, 18 nt, Human herpesvirus 7
aauuugagcuuugacaaa

SEQ ID NO: 4001155 - RNA, 16 nt, Human herpesvirus 7
aauuugaugaaauugu

SEQ ID NO: 4001156 - RNA, 13 nt, Human herpesvirus 7
aauuuuaaaacug

SEQ ID NO: 4001157 - RNA, 16 nt, Human herpesvirus 7
aauuuuagauuuuacg

SEQ ID NO: 4001158 - RNA, 17 nt, Human herpesvirus 7
aauuuuccauucauuuc

SEQ ID NO: 4001159 - RNA, 15 nt, Human herpesvirus 7
aauuuugauuccugu

SEQ ID NO: 4001160 - RNA, 20 nt, Human herpesvirus 7
aauuuuguaagaaacaucua

SEQ ID NO: 4001161 - RNA, 17 nt, Human herpesvirus 7
aauuuuucgaucuguaa

SEQ ID NO: 4001162 - RNA, 22 nt, Human herpesvirus 7
acaaaaaaauaccucuggcuuc

SEQ ID NO: 4001163 - RNA, 10 nt, Human herpesvirus 7
acaaaacaag

SEQ ID NO: 4001164 - RNA, 14 nt, Human herpesvirus 7
acaaaagucgagaa

SEQ ID NO: 4001165 - RNA, 11 nt, Human herpesvirus 7
acaaagaacau

SEQ ID NO: 4001166 - RNA, 21 nt, Human herpesvirus 7
acaaagaacauguaguacaau

SEQ ID NO: 4001167 - RNA, 18 nt, Human herpesvirus 7
acaaagauccucugagaa

SEQ ID NO: 4001168 - RNA, 21 nt, Human herpesvirus 7
acaaauaccaugaaaaauaug

SEQ ID NO: 4001169 - RNA, 18 nt, Human herpesvirus 7
acaaauaucacuggcaau

SEQ ID NO: 4001170 - RNA, 17 nt, Human herpesvirus 7
acaagacagaaaugaau

SEQ ID NO: 4001171 - RNA, 22 nt, Human herpesvirus 7
acaagaugcgaguccaaaaguu

SEQ ID NO: 4001172 - RNA, 20 nt, Human herpesvirus 7
acaagcacacuaaaaaagag

SEQ ID NO: 4001173 - RNA, 15 nt, Human herpesvirus 7
acaaggacgaaucua

SEQ ID NO: 4001174 - RNA, 17 nt, Human herpesvirus 7
acaaucuuacaaaaagu

SEQ ID NO: 4001175 - RNA, 23 nt, Human herpesvirus 7
acaaugguguuaacaaucuuaca

SEQ ID NO: 4001176 - RNA, 20 nt, Human herpesvirus 7
acacuauuggacaaaagacu

SEQ ID NO: 4001177 - RNA, 22 nt, Human herpesvirus 7
acacuuggaguuguguucuuua

SEQ ID NO: 4001178 - RNA, 22 nt, Human herpesvirus 7
acagaauacuacucagaagaca

SEQ ID NO: 4001179 - RNA, 21 nt, Human herpesvirus 7
acagaaugugguaaaaaaguu

SEQ ID NO: 4001180 - RNA, 12 nt, Human herpesvirus 7
acagacagaaug

SEQ ID NO: 4001181 - RNA, 14 nt, Human herpesvirus 7
acagacagaaugcc

SEQ ID NO: 4001182 - RNA, 14 nt, Human herpesvirus 7
acagagacaaccau

SEQ ID NO: 4001183 - RNA, 18 nt, Human herpesvirus 7
acagauucuccagaaauu

SEQ ID NO: 4001184 - RNA, 20 nt, Human herpesvirus 7
acaggcugcaucuuuucagu

SEQ ID NO: 4001185 - RNA, 14 nt, Human herpesvirus 7
acagugcuguacuu

SEQ ID NO: 4001186 - RNA, 15 nt, Human herpesvirus 7
acaguugcuugugaa

SEQ ID NO: 4001187 - RNA, 20 nt, Human herpesvirus 7
acaguuuggggcacaaaaua

SEQ ID NO: 4001188 - RNA, 17 nt, Human herpesvirus 7
acauacgugcuuagacu

SEQ ID NO: 4001189 - RNA, 16 nt, Human herpesvirus 7
acaucaauuuuaaugu

SEQ ID NO: 4001190 - RNA, 19 nt, Human herpesvirus 7
acaucuuccacaaaaauuu

SEQ ID NO: 4001191 - RNA, 16 nt, Human herpesvirus 7
acauuccucauggcca

SEQ ID NO: 4001192 - RNA, 20 nt, Human herpesvirus 7
accaaaaaccugaaaaacau

SEQ ID NO: 4001193 - RNA, 17 nt, Human herpesvirus 7
accaaauauaugcuuua

SEQ ID NO: 4001194 - RNA, 15 nt, Human herpesvirus 7
accagauuucuggca

SEQ ID NO: 4001195 - RNA, 16 nt, Human herpesvirus 7
accaucugcuggaaau

SEQ ID NO: 4001196 - RNA, 22 nt, Human herpesvirus 7
accauguuuuaccgugucuucu

SEQ ID NO: 4001197 - RNA, 18 nt, Human herpesvirus 7
acccaugggcacauuugu

SEQ ID NO: 4001198 - RNA, 12 nt, Human herpesvirus 7
accgauaaaagg

SEQ ID NO: 4001199 - RNA, 19 nt, Human herpesvirus 7
accgauuauauucaaauaa

SEQ ID NO: 4001200 - RNA, 20 nt, Human herpesvirus 7
accgcagauccaucuuugaa

SEQ ID NO: 4001201 - RNA, 17 nt, Human herpesvirus 7
accgccaccuucuuaua

SEQ ID NO: 4001202 - RNA, 16 nt, Human herpesvirus 7
accguggacuuucuug

SEQ ID NO: 4001203 - RNA, 17 nt, Human herpesvirus 7
accgugucuucugggaa

SEQ ID NO: 4001204 - RNA, 20 nt, Human herpesvirus 7
accuuuuaaaaucaaaugua

SEQ ID NO: 4001205 - RNA, 15 nt, Human herpesvirus 7
acgaaauaauuagaa

SEQ ID NO: 4001206 - RNA, 11 nt, Human herpesvirus 7
acgaauuauuu

SEQ ID NO: 4001207 - RNA, 21 nt, Human herpesvirus 7
acgcagacuaaucacgagaaa

SEQ ID NO: 4001208 - RNA, 19 nt, Human herpesvirus 7
acgcccacucuggaaaugu

SEQ ID NO: 4001209 - RNA, 15 nt, Human herpesvirus 7
acgcgggguuaaaaa

SEQ ID NO: 4001210 - RNA, 20 nt, Human herpesvirus 7
acgcucucaaucaaaaucuu

SEQ ID NO: 4001211 - RNA, 19 nt, Human herpesvirus 7
acgcuuucugaauugcauc

SEQ ID NO: 4001212 - RNA, 13 nt, Human herpesvirus 7
acggaacuucuuu

SEQ ID NO: 4001213 - RNA, 20 nt, Human herpesvirus 7
acggcucuaacauuaaaacu

SEQ ID NO: 4001214 - RNA, 14 nt, Human herpesvirus 7
acguagaaaaaaac

SEQ ID NO: 4001215 - RNA, 16 nt, Human herpesvirus 7
acguccauugauuaaa

SEQ ID NO: 4001216 - RNA, 21 nt, Human herpesvirus 7
acguccauuuccucaauuuuu

SEQ ID NO: 4001217 - RNA, 15 nt, Human herpesvirus 7
acgucuacauuuaaa

SEQ ID NO: 4001218 - RNA, 23 nt, Human herpesvirus 7
acgucuuacuuggaaacaaauug

SEQ ID NO: 4001219 - RNA, 21 nt, Human herpesvirus 7
acgucuugcuguuugucaucg

SEQ ID NO: 4001220 - RNA, 19 nt, Human herpesvirus 7
acgucuuuuaagcuucgcu

SEQ ID NO: 4001221 - RNA, 15 nt, Human herpesvirus 7
acgugcuuagacuua

SEQ ID NO: 4001222 - RNA, 20 nt, Human herpesvirus 7
acguucuuggucauuaaaaa

SEQ ID NO: 4001223 - RNA, 14 nt, Human herpesvirus 7
acguuucaaaucaa

SEQ ID NO: 4001224 - RNA, 16 nt, Human herpesvirus 7
acguuuccauuaaaaa

SEQ ID NO: 4001225 - RNA, 15 nt, Human herpesvirus 7
acguuucuagcaaaa

SEQ ID NO: 4001226 - RNA, 14 nt, Human herpesvirus 7
acguuuuugcagag

SEQ ID NO: 4001227 - RNA, 16 nt, Human herpesvirus 7
acuaagcauauugaag

SEQ ID NO: 4001228 - RNA, 19 nt, Human herpesvirus 7
acuaauccaugacagagaa

SEQ ID NO: 4001229 - RNA, 15 nt, Human herpesvirus 7
acuacaugaauggau

SEQ ID NO: 4001230 - RNA, 17 nt, Human herpesvirus 7
acuacuaacauggaaau

SEQ ID NO: 4001231 - RNA, 16 nt, Human herpesvirus 7
acuauucgaaaauauc

SEQ ID NO: 4001232 - RNA, 21 nt, Human herpesvirus 7
acuauuuaaguauuuuacaac

SEQ ID NO: 4001233 - RNA, 14 nt, Human herpesvirus 7
acuauuugacuggg

SEQ ID NO: 4001234 - RNA, 22 nt, Human herpesvirus 7
acuauuugacuggguaggaaaa

SEQ ID NO: 4001235 - RNA, 19 nt, Human herpesvirus 7
acucagagaucauaauuac

SEQ ID NO: 4001236 - RNA, 16 nt, Human herpesvirus 7
acucgaggcuuaaaau

SEQ ID NO: 4001237 - RNA, 22 nt, Human herpesvirus 7
acugauuuuuaaacuugugaaa

SEQ ID NO: 4001238 - RNA, 21 nt, Human herpesvirus 7
acugcaaauccaacagaauac

SEQ ID NO: 4001239 - RNA, 20 nt, Human herpesvirus 7
acugcgcuuggcaaacaguc

SEQ ID NO: 4001240 - RNA, 21 nt, Human herpesvirus 7
acugcuucucccauucaauaa

SEQ ID NO: 4001241 - RNA, 22 nt, Human herpesvirus 7
acugcuucucccauucaauaau

SEQ ID NO: 4001242 - RNA, 21 nt, Human herpesvirus 7
acuggaauuauacacugugaa

SEQ ID NO: 4001243 - RNA, 22 nt, Human herpesvirus 7
acuggauguauaaaucagaaua

SEQ ID NO: 4001244 - RNA, 20 nt, Human herpesvirus 7
acugugcaugaaaucuugaa

SEQ ID NO: 4001245 - RNA, 20 nt, Human herpesvirus 7
acuguuagaggauuaaaaca

SEQ ID NO: 4001246 - RNA, 15 nt, Human herpesvirus 7
acuguuguagguaau

SEQ ID NO: 4001247 - RNA, 20 nt, Human herpesvirus 7
acuguuuuucaaaaacguua

SEQ ID NO: 4001248 - RNA, 17 nt, Human herpesvirus 7
acuuacuguuuacacau

SEQ ID NO: 4001249 - RNA, 19 nt, Human herpesvirus 7
acuuacuuguguugugaaa

SEQ ID NO: 4001250 - RNA, 16 nt, Human herpesvirus 7
acuuauuauaucuuaa

SEQ ID NO: 4001251 - RNA, 19 nt, Human herpesvirus 7
acuuauuccagauaugaca

SEQ ID NO: 4001252 - RNA, 16 nt, Human herpesvirus 7
acuucugauaucuuaa

SEQ ID NO: 4001253 - RNA, 14 nt, Human herpesvirus 7
auauuuaauuucuc

SEQ ID NO: 4001254 - RNA, 13 nt, Human herpesvirus 7
auauuuuacauau

SEQ ID NO: 4001255 - RNA, 13 nt, Human herpesvirus 7
aucaaauuucaaa

SEQ ID NO: 4001256 - RNA, 18 nt, Human herpesvirus 7
aucaagccacgaugacuu

SEQ ID NO: 4001257 - RNA, 21 nt, Human herpesvirus 7
aucagaauauuuccagcauca

SEQ ID NO: 4001258 - RNA, 16 nt, Human herpesvirus 7
aucagacaauuucaca

SEQ ID NO: 4001259 - RNA, 16 nt, Human herpesvirus 7
aucaggaaucuuuuuu

SEQ ID NO: 4001260 - RNA, 18 nt, Human herpesvirus 7
aucauaauuacauugcag

SEQ ID NO: 4001261 - RNA, 20 nt, Human herpesvirus 7
auccaaaaagaaacuuucua

SEQ ID NO: 4001262 - RNA, 20 nt, Human herpesvirus 7
auccaaguuuuacagaaauu

SEQ ID NO: 4001263 - RNA, 19 nt, Human herpesvirus 7
auccacgcgggguuaaaaa

SEQ ID NO: 4001264 - RNA, 23 nt, Human herpesvirus 7
auccagaacauuuauuuucuuaa

SEQ ID NO: 4001265 - RNA, 19 nt, Human herpesvirus 7
auccaucuuugaaaaucuu

SEQ ID NO: 4001266 - RNA, 15 nt, Human herpesvirus 7
aucccuggacagaga

SEQ ID NO: 4001267 - RNA, 14 nt, Human herpesvirus 7
aucgacaaacagaa

SEQ ID NO: 4001268 - RNA, 14 nt, Human herpesvirus 7
aucgauuaaaucuu

SEQ ID NO: 4001269 - RNA, 13 nt, Human herpesvirus 7
aucgcucaacuua

SEQ ID NO: 4001270 - RNA, 14 nt, Human herpesvirus 7
aucgguuuucugag

SEQ ID NO: 4001271 - RNA, 14 nt, Human herpesvirus 7
aucguguuaagucg

SEQ ID NO: 4001272 - RNA, 20 nt, Human herpesvirus 7
aucuaauuaaucugcauaua

SEQ ID NO: 4001273 - RNA, 21 nt, Human herpesvirus 7
aucuaccccgauccucagaau

SEQ ID NO: 4001274 - RNA, 18 nt, Human herpesvirus 7
aucuaccgcgaugaaaac

SEQ ID NO: 4001275 - RNA, 17 nt, Human herpesvirus 7
aucucauagcuuaaaaa

SEQ ID NO: 4001276 - RNA, 15 nt, Human herpesvirus 7
aucucucuuucugga

SEQ ID NO: 4001277 - RNA, 22 nt, Human herpesvirus 7
aucugcaaagaaaaaaaugcuu

SEQ ID NO: 4001278 - RNA, 18 nt, Human herpesvirus 7
aucuggagaacaauuaga

SEQ ID NO: 4001279 - RNA, 18 nt, Human herpesvirus 7
aucuguaaaauuuaaaua

SEQ ID NO: 4001280 - RNA, 16 nt, Human herpesvirus 7
aucuguagaaaauguu

SEQ ID NO: 4001281 - RNA, 15 nt, Human herpesvirus 7
aucugucuucuuauu

SEQ ID NO: 4001282 - RNA, 22 nt, Human herpesvirus 7
aucuuguaauuucucaaaucuu

SEQ ID NO: 4001283 - RNA, 15 nt, Human herpesvirus 7
augaacaaauaauga

SEQ ID NO: 4001284 - RNA, 21 nt, Human herpesvirus 7
augaacaaguuucaaaaagug

SEQ ID NO: 4001285 - RNA, 21 nt, Human herpesvirus 7
augaagauaucuuaucuggag

SEQ ID NO: 4001286 - RNA, 19 nt, Human herpesvirus 7
augaagcuguacaacaguc

SEQ ID NO: 4001287 - RNA, 14 nt, Human herpesvirus 7
augagauuucugaa

SEQ ID NO: 4001288 - RNA, 21 nt, Human herpesvirus 7
augauugguaaaaaauuacuu

SEQ ID NO: 4001289 - RNA, 22 nt, Human herpesvirus 7
augauuuuucugcuuaaaugua

SEQ ID NO: 4001290 - RNA, 22 nt, Human herpesvirus 7
augauuuuuuaaaugugucuua

SEQ ID NO: 4001291 - RNA, 17 nt, Human herpesvirus 7
augcagaaaaauccaaa

SEQ ID NO: 4001292 - RNA, 16 nt, Human herpesvirus 7
augcuauuaaaugauu

SEQ ID NO: 4001293 - RNA, 14 nt, Human herpesvirus 7
augcucgauauaca

SEQ ID NO: 4001294 - RNA, 15 nt, Human herpesvirus 7
augcucgauauacau

SEQ ID NO: 4001295 - RNA, 18 nt, Human herpesvirus 7
auggaaaguuuauagaac

SEQ ID NO: 4001296 - RNA, 16 nt, Human herpesvirus 7
auggacggcauuuaac

SEQ ID NO: 4001297 - RNA, 22 nt, Human herpesvirus 7
auggauucaaucuacuguacuu

SEQ ID NO: 4001298 - RNA, 23 nt, Human herpesvirus 7
auggcauuacuacaguggaugcu

SEQ ID NO: 4001299 - RNA, 13 nt, Human herpesvirus 7
augggaauuacag

SEQ ID NO: 4001300 - RNA, 16 nt, Human herpesvirus 7
augggauuucuguaaa

SEQ ID NO: 4001301 - RNA, 13 nt, Human herpesvirus 7
augguuugaaaac

SEQ ID NO: 4001302 - RNA, 21 nt, Human herpesvirus 7
augguuuuaaaauagaaaaug

SEQ ID NO: 4001303 - RNA, 18 nt, Human herpesvirus 7
auguaaccugaauuaaaa

SEQ ID NO: 4001304 - RNA, 17 nt, Human herpesvirus 7
auguaauguugcaaaug

SEQ ID NO: 4001305 - RNA, 19 nt, Human herpesvirus 7
auguacugcucaucaaaua

SEQ ID NO: 4001306 - RNA, 13 nt, Human herpesvirus 7
auguauauaagca

SEQ ID NO: 4001307 - RNA, 21 nt, Human herpesvirus 7
augucaggaaaaaauugaaaa

SEQ ID NO: 4001308 - RNA, 13 nt, Human herpesvirus 7
augucuucaacuu

SEQ ID NO: 4001309 - RNA, 14 nt, Human herpesvirus 7
augugaaaaugaug

SEQ ID NO: 4001310 - RNA, 15 nt, Human herpesvirus 7
auguucaaauaugca

SEQ ID NO: 4001311 - RNA, 14 nt, Human herpesvirus 7
auguuuacauguaa

SEQ ID NO: 4001312 - RNA, 14 nt, Human herpesvirus 7
auuaaauacaaauu

SEQ ID NO: 4001313 - RNA, 23 nt, Human herpesvirus 7
auuaacauuaaccacaacuguga

SEQ ID NO: 4001314 - RNA, 22 nt, Human herpesvirus 7
auuagaaacaaucccagaaauu

SEQ ID NO: 4001315 - RNA, 17 nt, Human herpesvirus 7
auuauguccauaaaaca

SEQ ID NO: 4001316 - RNA, 15 nt, Human herpesvirus 7
auuauguuuucugcu

SEQ ID NO: 4001317 - RNA, 21 nt, Human herpesvirus 7
auuauuuccagaguaugaauu

SEQ ID NO: 4001318 - RNA, 18 nt, Human herpesvirus 7
auuauuuugauuggaaau

SEQ ID NO: 4001319 - RNA, 16 nt, Human herpesvirus 7
auuauuuuuaaaaaug

SEQ ID NO: 4001320 - RNA, 16 nt, Human herpesvirus 7
auucaaauaagggaua

SEQ ID NO: 4001321 - RNA, 16 nt, Human herpesvirus 7
auucaauaaaaagaua

SEQ ID NO: 4001322 - RNA, 21 nt, Human herpesvirus 7
auucacauaccuguauggaac

SEQ ID NO: 4001323 - RNA, 18 nt, Human herpesvirus 7
auucauuuguuuaagaca

SEQ ID NO: 4001324 - RNA, 23 nt, Human herpesvirus 7
auuccaaaaucaaguguuucuuu

SEQ ID NO: 4001325 - RNA, 15 nt, Human herpesvirus 7
auuccaacucaauga

SEQ ID NO: 4001326 - RNA, 14 nt, Human herpesvirus 7
auuccauuuaaaug

SEQ ID NO: 4001327 - RNA, 13 nt, Human herpesvirus 7
auucuaaaaauua

SEQ ID NO: 4001328 - RNA, 13 nt, Human herpesvirus 7
auucuagcguuuc

SEQ ID NO: 4001329 - RNA, 15 nt, Human herpesvirus 7
auucucgcuucaaag

SEQ ID NO: 4001330 - RNA, 16 nt, Human herpesvirus 7
auugaagauuguuuaa

SEQ ID NO: 4001331 - RNA, 15 nt, Human herpesvirus 7
auugcgaaaaugaua

SEQ ID NO: 4001332 - RNA, 23 nt, Human herpesvirus 7
auugcugauccgccgacaagaaa

SEQ ID NO: 4001333 - RNA, 23 nt, Human herpesvirus 7
auugcuucagaaauaacaaaauu

SEQ ID NO: 4001334 - RNA, 16 nt, Human herpesvirus 7
auugcuugcacuguaa

SEQ ID NO: 4001335 - RNA, 19 nt, Human herpesvirus 7
auuguaaaaauaaagacau

SEQ ID NO: 4001336 - RNA, 16 nt, Human herpesvirus 7
auuguaauaauuuaaa

SEQ ID NO: 4001337 - RNA, 15 nt, Human herpesvirus 7
auuguacauuuuacc

SEQ ID NO: 4001338 - RNA, 20 nt, Human herpesvirus 7
auugugaguuucuacauguu

SEQ ID NO: 4001339 - RNA, 14 nt, Human herpesvirus 7
auuuaaaaaaggaa

SEQ ID NO: 4001340 - RNA, 15 nt, Human herpesvirus 7
auuuaaaaaaggaaa

SEQ ID NO: 4001341 - RNA, 21 nt, Human herpesvirus 7
auuuaaacagcguucaaucaa

SEQ ID NO: 4001342 - RNA, 22 nt, Human herpesvirus 7
auuuaacaaagugcauaaauaa

SEQ ID NO: 4001343 - RNA, 22 nt, Human herpesvirus 7
auuuaggacuuuacacggucuu

SEQ ID NO: 4001344 - RNA, 15 nt, Human herpesvirus 7
auuuauauuaaauga

SEQ ID NO: 4001345 - RNA, 20 nt, Human herpesvirus 7
auuuaucaggugcucuaaau

SEQ ID NO: 4001346 - RNA, 20 nt, Human herpesvirus 7
auuuaugcuuuaacuggaau

SEQ ID NO: 4001347 - RNA, 14 nt, Human herpesvirus 7
auuuauugcuuaac

SEQ ID NO: 4001348 - RNA, 22 nt, Human herpesvirus 7
auuucaaaagaaaaaaucuuua

SEQ ID NO: 4001349 - RNA, 19 nt, Human herpesvirus 7
auuucaagaaggaaaauuu

SEQ ID NO: 4001350 - RNA, 19 nt, Human herpesvirus 7
auuucacccuuuguuugag

SEQ ID NO: 4001351 - RNA, 20 nt, Human herpesvirus 7
auuuccguuguuaaaaauua

SEQ ID NO: 4001352 - RNA, 21 nt, Human herpesvirus 7
auuucguuuucuuuggguaca

SEQ ID NO: 4001353 - RNA, 18 nt, Human herpesvirus 7
auuucuaauagacaaauu

SEQ ID NO: 4001354 - RNA, 17 nt, Human herpesvirus 7
auuucuguaaaaacuug

SEQ ID NO: 4001355 - RNA, 17 nt, Human herpesvirus 7
auuucugucuuugcaag

SEQ ID NO: 4001356 - RNA, 18 nt, Human herpesvirus 7
auuugaagauaaguauaa

SEQ ID NO: 4001357 - RNA, 24 nt, Human herpesvirus 7
auuugcagcuucuaaaugugcuaa

SEQ ID NO: 4001358 - RNA, 13 nt, Human herpesvirus 7
auuuguguaaaua

SEQ ID NO: 4001359 - RNA, 19 nt, Human herpesvirus 7
auuuuaaugugcuuauuua

SEQ ID NO: 4001360 - RNA, 15 nt, Human herpesvirus 7
auuuuacaaaaagaa

SEQ ID NO: 4001361 - RNA, 14 nt, Human herpesvirus 7
auuuuacaaugcag

SEQ ID NO: 4001362 - RNA, 14 nt, Human herpesvirus 7
auuuuauuucagcu

SEQ ID NO: 4001363 - RNA, 22 nt, Human herpesvirus 7
auuuugaagagcguguuuugag

SEQ ID NO: 4001364 - RNA, 22 nt, Human herpesvirus 7
auuuuggauuguguaauuauug

SEQ ID NO: 4001365 - RNA, 21 nt, Human herpesvirus 7
auuuugugccccaaacuguau

SEQ ID NO: 4001366 - RNA, 12 nt, Human herpesvirus 7
auuuuucauuua

SEQ ID NO: 4001367 - RNA, 23 nt, Human herpesvirus 7
ggaaacuauucgaaaauaucuuc

SEQ ID NO: 4001368 - RNA, 19 nt, Human herpesvirus 7
ggaaaugucuuugucauga

SEQ ID NO: 4001369 - RNA, 14 nt, Human herpesvirus 7
ggaacguuggggau

SEQ ID NO: 4001370 - RNA, 16 nt, Human herpesvirus 7
ggaagacaucgaagaa

SEQ ID NO: 4001371 - RNA, 17 nt, Human herpesvirus 7
ggagaaagcuguuucca

SEQ ID NO: 4001372 - RNA, 18 nt, Human herpesvirus 7
ggagaauucuguacccau

SEQ ID NO: 4001373 - RNA, 20 nt, Human herpesvirus 7
ggagacgaugagcaugaaaa

SEQ ID NO: 4001374 - RNA, 17 nt, Human herpesvirus 7
ggagauaguucgcaaug

SEQ ID NO: 4001375 - RNA, 21 nt, Human herpesvirus 7
ggaguuugucucauugacaug

SEQ ID NO: 4001376 - RNA, 17 nt, Human herpesvirus 7
ggauacggcagcggaag

SEQ ID NO: 4001377 - RNA, 11 nt, Human herpesvirus 7
ggaucucucuu

SEQ ID NO: 4001378 - RNA, 14 nt, Human herpesvirus 7
ggcaaaagauuuaa

SEQ ID NO: 4001379 - RNA, 20 nt, Human herpesvirus 7
ggcaauagauuacgcacaaa

SEQ ID NO: 4001380 - RNA, 15 nt, Human herpesvirus 7
ggcuaacagugggaa

SEQ ID NO: 4001381 - RNA, 18 nt, Human herpesvirus 7
ggcuagaaguuuagagac

SEQ ID NO: 4001382 - RNA, 19 nt, Human herpesvirus 7
ggcucuaacauuaaaacua

SEQ ID NO: 4001383 - RNA, 19 nt, Human herpesvirus 7
ggcuuaagcagcagacaag

SEQ ID NO: 4001384 - RNA, 13 nt, Human herpesvirus 7
ggcuuagaauauu

SEQ ID NO: 4001385 - RNA, 17 nt, Human herpesvirus 7
gggaaaaaggauuugaa

SEQ ID NO: 4001386 - RNA, 19 nt, Human herpesvirus 7
gggcacaccaagauuuuaa

SEQ ID NO: 4001387 - RNA, 20 nt, Human herpesvirus 7
ggggucugacuucaauuuug

SEQ ID NO: 4001388 - RNA, 21 nt, Human herpesvirus 7
gguaagaaaaaucauuuuuaa

SEQ ID NO: 4001389 - RNA, 19 nt, Human herpesvirus 7
gguaucacuuccuguccaa

SEQ ID NO: 4001390 - RNA, 14 nt, Human herpesvirus 7
ggucacguucuaaa

SEQ ID NO: 4001391 - RNA, 13 nt, Human herpesvirus 7
gguugucuguucu

SEQ ID NO: 4001392 - RNA, 22 nt, Human herpesvirus 7
guaaacucacuucuaaaagcug

SEQ ID NO: 4001393 - RNA, 14 nt, Human herpesvirus 7
guaacuuucaucug

SEQ ID NO: 4001394 - RNA, 20 nt, Human herpesvirus 7
guaagaaacaucuaugugcu

SEQ ID NO: 4001395 - RNA, 19 nt, Human herpesvirus 7
guaauaauuuaaaauuaau

SEQ ID NO: 4001396 - RNA, 22 nt, Human herpesvirus 7
guaaugaauaaaaucuauuuua

SEQ ID NO: 4001397 - RNA, 20 nt, Human herpesvirus 7
guacauuuuaccaaauaugu

SEQ ID NO: 4001398 - RNA, 15 nt, Human herpesvirus 7
guacuguaauuucuc

SEQ ID NO: 4001399 - RNA, 14 nt, Human herpesvirus 7
guacuguugcuaau

SEQ ID NO: 4001400 - RNA, 15 nt, Human herpesvirus 7
guacuguuucuagua

SEQ ID NO: 4001401 - RNA, 17 nt, Human herpesvirus 7
guagaaaaaaacaauga

SEQ ID NO: 4001402 - RNA, 15 nt, Human herpesvirus 7
guaggauugaaagua

SEQ ID NO: 4001403 - RNA, 20 nt, Human herpesvirus 7
guaucaugaaccauguuuua

SEQ ID NO: 4001404 - RNA, 15 nt, Human herpesvirus 7
guaucuagagaaugu

SEQ ID NO: 4001405 - RNA, 14 nt, Human herpesvirus 7
guaucuaugaaaua

SEQ ID NO: 4001406 - RNA, 18 nt, Human herpesvirus 7
guauuuguugaucuucaa

SEQ ID NO: 4001407 - RNA, 19 nt, Human herpesvirus 7
gucagaacaucccuggaca

SEQ ID NO: 4001408 - RNA, 18 nt, Human herpesvirus 7
gucaggaucuccuggaaa

SEQ ID NO: 4001409 - RNA, 16 nt, Human herpesvirus 7
gucaucccaauaccgu

SEQ ID NO: 4001410 - RNA, 17 nt, Human herpesvirus 7
guccccuucgcugcugu

SEQ ID NO: 4001411 - RNA, 16 nt, Human herpesvirus 7
gucuaagucaauuaaa

SEQ ID NO: 4001412 - RNA, 14 nt, Human herpesvirus 7
gucuacaauuucug

SEQ ID NO: 4001413 - RNA, 16 nt, Human herpesvirus 7
gucuacaauuucuggc

SEQ ID NO: 4001414 - RNA, 13 nt, Human herpesvirus 7
gucuuacagugcu

SEQ ID NO: 4001415 - RNA, 15 nt, Human herpesvirus 7
gucuuacuuggaaac

SEQ ID NO: 4001416 - RNA, 17 nt, Human herpesvirus 7
gucuuugucaugaugaa

SEQ ID NO: 4001417 - RNA, 15 nt, Human herpesvirus 7
gugaaacaauguuua

SEQ ID NO: 4001418 - RNA, 23 nt, Human herpesvirus 7
gugaacuguuacaguuaaagacg

SEQ ID NO: 4001419 - RNA, 22 nt, Human herpesvirus 7
gugagaaauggaaaccuggaga

SEQ ID NO: 4001420 - RNA, 17 nt, Human herpesvirus 7
gugauguacugcucauc

SEQ ID NO: 4001421 - RNA, 14 nt, Human herpesvirus 7
gugcugucuugcuu

SEQ ID NO: 4001422 - RNA, 15 nt, Human herpesvirus 7
gugcuuccucuggau

SEQ ID NO: 4001423 - RNA, 13 nt, Human herpesvirus 7
guggaaacggcug

SEQ ID NO: 4001424 - RNA, 16 nt, Human herpesvirus 7
guggcuuuugcuuucc

SEQ ID NO: 4001425 - RNA, 20 nt, Human herpesvirus 7
gugggacuugauaauguuuc

SEQ ID NO: 4001426 - RNA, 22 nt, Human herpesvirus 7
guguccagauaauauagaugca

SEQ ID NO: 4001427 - RNA, 20 nt, Human herpesvirus 7
gugucuuacaacuagaaaau

SEQ ID NO: 4001428 - RNA, 18 nt, Human herpesvirus 7
guuaaaaagaauguauua

SEQ ID NO: 4001429 - RNA, 13 nt, Human herpesvirus 7
guuaaagauguuu

SEQ ID NO: 4001430 - RNA, 12 nt, Human herpesvirus 7
guuaacauaugu

SEQ ID NO: 4001431 - RNA, 20 nt, Human herpesvirus 7
guuauaugaaauuucaaaaa

SEQ ID NO: 4001432 - RNA, 19 nt, Human herpesvirus 7
guucaggucucuuucuaaa

SEQ ID NO: 4001433 - RNA, 14 nt, Human herpesvirus 7
guuccuaaauaauu

SEQ ID NO: 4001434 - RNA, 14 nt, Human herpesvirus 7
guucguaacaaauu

SEQ ID NO: 4001435 - RNA, 22 nt, Human herpesvirus 7
guugaucgucuguugaaacaua

SEQ ID NO: 4001436 - RNA, 20 nt, Human herpesvirus 7
guugcacuccuagaaacacg

SEQ ID NO: 4001437 - RNA, 17 nt, Human herpesvirus 7
guugccagaaaucuggu

SEQ ID NO: 4001438 - RNA, 16 nt, Human herpesvirus 7
guugcuaguaugucag

SEQ ID NO: 4001439 - RNA, 21 nt, Human herpesvirus 7
guugcuucuucgagucaguua

SEQ ID NO: 4001440 - RNA, 21 nt, Human herpesvirus 7
guuggcaauuguaaaaauaaa

SEQ ID NO: 4001441 - RNA, 13 nt, Human herpesvirus 7
guuguacucagag

SEQ ID NO: 4001442 - RNA, 17 nt, Human herpesvirus 7
guuuagugauagaguac

SEQ ID NO: 4001443 - RNA, 18 nt, Human herpesvirus 7
guuucuuuuucauuaacu

SEQ ID NO: 4001444 - RNA, 12 nt, Human herpesvirus 7
guuugaauaucu

SEQ ID NO: 4001445 - RNA, 14 nt, Human herpesvirus 7
guuuuaaagcugau

SEQ ID NO: 4001446 - RNA, 21 nt, Human herpesvirus 7
guuuuaauugagauuauucaa

SEQ ID NO: 4001447 - RNA, 14 nt, Human herpesvirus 7
guuuucaugcucau

SEQ ID NO: 4001448 - RNA, 16 nt, Human herpesvirus 7
guuuucugagugcuaa

SEQ ID NO: 4001449 - RNA, 16 nt, Human herpesvirus 7
uaaaaaaaauaaauuu

SEQ ID NO: 4001450 - RNA, 12 nt, Human herpesvirus 7
uaaaaacaaugg

SEQ ID NO: 4001451 - RNA, 20 nt, Human herpesvirus 7
uaaaaacuaaguuuugcauu

SEQ ID NO: 4001452 - RNA, 14 nt, Human herpesvirus 7
uaaaaaugauuuuu

SEQ ID NO: 4001453 - RNA, 22 nt, Human herpesvirus 7
uaaaacuuugauuugagaaauu

SEQ ID NO: 4001454 - RNA, 17 nt, Human herpesvirus 7
uaaaaguacaaauguuu

SEQ ID NO: 4001455 - RNA, 16 nt, Human herpesvirus 7
uaaaauagaaaauguc

SEQ ID NO: 4001456 - RNA, 17 nt, Human herpesvirus 7
uaaaauagaaaauguca

SEQ ID NO: 4001457 - RNA, 19 nt, Human herpesvirus 7
uaaaaugguugugcaauuu

SEQ ID NO: 4001458 - RNA, 21 nt, Human herpesvirus 7
uaaaauguacauaacucuauc

SEQ ID NO: 4001459 - RNA, 20 nt, Human herpesvirus 7
uaaaauuaucggaaauuuug

SEQ ID NO: 4001460 - RNA, 14 nt, Human herpesvirus 7
uaaacaaacaauga

SEQ ID NO: 4001461 - RNA, 20 nt, Human herpesvirus 7
uaaacacuugcuagcuguga

SEQ ID NO: 4001462 - RNA, 22 nt, Human herpesvirus 7
uaaacacuugcuagcugugaua

SEQ ID NO: 4001463 - RNA, 18 nt, Human herpesvirus 7
uaaacguuuaguuaacau

SEQ ID NO: 4001464 - RNA, 13 nt, Human herpesvirus 7
uaaacuugugaaa

SEQ ID NO: 4001465 - RNA, 15 nt, Human herpesvirus 7
uaaagacaugaauca

SEQ ID NO: 4001466 - RNA, 18 nt, Human herpesvirus 7
uaaauaaaaaaaauugaa

SEQ ID NO: 4001467 - RNA, 17 nt, Human herpesvirus 7
uaaaucagaauauuucc

SEQ ID NO: 4001468 - RNA, 12 nt, Human herpesvirus 7
uaaaugauuuua

SEQ ID NO: 4001469 - RNA, 17 nt, Human herpesvirus 7
uaaaugauuuuaaauuu

SEQ ID NO: 4001470 - RNA, 16 nt, Human herpesvirus 7
uaaauucaacaucuuu

SEQ ID NO: 4001471 - RNA, 19 nt, Human herpesvirus 7
uaaauucuaauauguauga

SEQ ID NO: 4001472 - RNA, 17 nt, Human herpesvirus 7
uaaauuuaaaauuuaua

SEQ ID NO: 4001473 - RNA, 20 nt, Human herpesvirus 7
uaacaaaaaagguguugaua

SEQ ID NO: 4001474 - RNA, 22 nt, Human herpesvirus 7
uaacaacuagcaaacagugcug

SEQ ID NO: 4001475 - RNA, 22 nt, Human herpesvirus 7
uaacacuguuuucaguuaugau

SEQ ID NO: 4001476 - RNA, 19 nt, Human herpesvirus 7
uaacauauguugauucucu

SEQ ID NO: 4001477 - RNA, 23 nt, Human herpesvirus 7
uaaccaaaaugugggauguaucc

SEQ ID NO: 4001478 - RNA, 19 nt, Human herpesvirus 7
uaacgaauuuuuccaugug

SEQ ID NO: 4001479 - RNA, 23 nt, Human herpesvirus 7
uaacgugagggggacaauuauuu

SEQ ID NO: 4001480 - RNA, 22 nt, Human herpesvirus 7
uaacucauaauuaugaaauguu

SEQ ID NO: 4001481 - RNA, 17 nt, Human herpesvirus 7
uaacucugccagucucu

SEQ ID NO: 4001482 - RNA, 16 nt, Human herpesvirus 7
uuaauagucauuuuca

SEQ ID NO: 4001483 - RNA, 23 nt, Human herpesvirus 7
uuaaugcuuugucuuacgucuuu

SEQ ID NO: 4001484 - RNA, 21 nt, Human herpesvirus 7
uuaaugguaccuuagaaucac

SEQ ID NO: 4001485 - RNA, 12 nt, Human herpesvirus 7
uuaauuaucuac

SEQ ID NO: 4001486 - RNA, 13 nt, Human herpesvirus 7
uuaauuccuuugg

SEQ ID NO: 4001487 - RNA, 14 nt, Human herpesvirus 7
uuaauugugcaucu

SEQ ID NO: 4001488 - RNA, 11 nt, Human herpesvirus 7
uuacaacaaua

SEQ ID NO: 4001489 - RNA, 14 nt, Human herpesvirus 7
uuacagauugcuug

SEQ ID NO: 4001490 - RNA, 19 nt, Human herpesvirus 7
uuacagauuuuauuaaaag

SEQ ID NO: 4001491 - RNA, 16 nt, Human herpesvirus 7
uuaccccaaacgccuu

SEQ ID NO: 4001492 - RNA, 15 nt, Human herpesvirus 7
uuaccgguacauuua

SEQ ID NO: 4001493 - RNA, 23 nt, Human herpesvirus 7
uuacuauuugacuggguaggaaa

SEQ ID NO: 4001494 - RNA, 19 nt, Human herpesvirus 7
uuagaacaauuaucucaga

SEQ ID NO: 4001495 - RNA, 19 nt, Human herpesvirus 7
uuagacgacgucuucuucu

SEQ ID NO: 4001496 - RNA, 14 nt, Human herpesvirus 7
uuagacuuuuuucu

SEQ ID NO: 4001497 - RNA, 15 nt, Human herpesvirus 7
uuagauuuaaaacaa

SEQ ID NO: 4001498 - RNA, 16 nt, Human herpesvirus 7
uuaggggaagaaucaa

SEQ ID NO: 4001499 - RNA, 14 nt, Human herpesvirus 7
uuagugaaaacuug

SEQ ID NO: 4001500 - RNA, 16 nt, Human herpesvirus 7
uuauaauagaaauuaa

SEQ ID NO: 4001501 - RNA, 15 nt, Human herpesvirus 7
uuauacacugugaaa

SEQ ID NO: 4001502 - RNA, 17 nt, Human herpesvirus 7
uuauaugaaauuucaaa

SEQ ID NO: 4001503 - RNA, 19 nt, Human herpesvirus 7
uuauccaaguuuuaacaau

SEQ ID NO: 4001504 - RNA, 15 nt, Human herpesvirus 7
uuaucucauagcuua

SEQ ID NO: 4001505 - RNA, 17 nt, Human herpesvirus 7
uuaugagauuugccugc

SEQ ID NO: 4001506 - RNA, 18 nt, Human herpesvirus 7
uuaugcaaacucacuaau

SEQ ID NO: 4001507 - RNA, 14 nt, Human herpesvirus 7
uuauguauaucuuu

SEQ ID NO: 4001508 - RNA, 17 nt, Human herpesvirus 7
uuauguccgcuuacaag

SEQ ID NO: 4001509 - RNA, 23 nt, Human herpesvirus 7
uuauguccgcuuacaagaugcga

SEQ ID NO: 4001510 - RNA, 17 nt, Human herpesvirus 7
uuauuuacccacauuuu

SEQ ID NO: 4001511 - RNA, 14 nt, Human herpesvirus 7
uuauuuugauugga

SEQ ID NO: 4001512 - RNA, 20 nt, Human herpesvirus 7
uucaacugauauaaaugcuu

SEQ ID NO: 4001513 - RNA, 15 nt, Human herpesvirus 7
uucaauuaaugcauu

SEQ ID NO: 4001514 - RNA, 15 nt, Human herpesvirus 7
uucaauuguccauuu

SEQ ID NO: 4001515 - RNA, 16 nt, Human herpesvirus 7
uucaauuucugucuuu

SEQ ID NO: 4001516 - RNA, 17 nt, Human herpesvirus 7
uucacccuuuguuugag

SEQ ID NO: 4001517 - RNA, 22 nt, Human herpesvirus 7
uucagaaaauaaaaguaaaaac

SEQ ID NO: 4001518 - RNA, 19 nt, Human herpesvirus 7
uucagaaauaacaaaauug

SEQ ID NO: 4001519 - RNA, 15 nt, Human herpesvirus 7
uucaguaaauucuuc

SEQ ID NO: 4001520 - RNA, 19 nt, Human herpesvirus 7
uuccaaaaucaaguguuuc

SEQ ID NO: 4001521 - RNA, 21 nt, Human herpesvirus 7
uuccacgaucauuccguuuuu

SEQ ID NO: 4001522 - RNA, 20 nt, Human herpesvirus 7
uuccagauaugacaaauuuc

SEQ ID NO: 4001523 - RNA, 23 nt, Human herpesvirus 7
uuccauauuccugcaaaacuugg

SEQ ID NO: 4001524 - RNA, 23 nt, Human herpesvirus 7
uuccaucaucacgucaugcugua

SEQ ID NO: 4001525 - RNA, 15 nt, Human herpesvirus 7
uuccaucucacuuau

SEQ ID NO: 4001526 - RNA, 13 nt, Human herpesvirus 7
uuccucuggaaaa

SEQ ID NO: 4001527 - RNA, 22 nt, Human herpesvirus 7
uucgcaaauguacaauuugcau

SEQ ID NO: 4001528 - RNA, 15 nt, Human herpesvirus 7
uucgcugaagaacau

SEQ ID NO: 4001529 - RNA, 14 nt, Human herpesvirus 7
uucuaaaucacuag

SEQ ID NO: 4001530 - RNA, 18 nt, Human herpesvirus 7
uucuacuugggaguguuu

SEQ ID NO: 4001531 - RNA, 13 nt, Human herpesvirus 7
uucuccaugcaua

SEQ ID NO: 4001532 - RNA, 13 nt, Human herpesvirus 7
uucugaauaaaag

SEQ ID NO: 4001533 - RNA, 18 nt, Human herpesvirus 7
uucugcuaauucuggaaa

SEQ ID NO: 4001534 - RNA, 18 nt, Human herpesvirus 7
uucugguuucuguugacu

SEQ ID NO: 4001535 - RNA, 11 nt, Human herpesvirus 7
uucuuaauuug

SEQ ID NO: 4001536 - RNA, 23 nt, Human herpesvirus 7
uucuucaaagucuaagguuugaa

SEQ ID NO: 4001537 - RNA, 23 nt, Human herpesvirus 7
uucuucgucuaagucaauuaaag

SEQ ID NO: 4001538 - RNA, 15 nt, Human herpesvirus 7
uucuucuguaaaaga

SEQ ID NO: 4001539 - RNA, 16 nt, Human herpesvirus 7
uugaaauuguaguuuu

SEQ ID NO: 4001540 - RNA, 15 nt, Human herpesvirus 7
uugaagaaauuguga

SEQ ID NO: 4001541 - RNA, 13 nt, Human herpesvirus 7
uugaauaaauuuu

SEQ ID NO: 4001542 - RNA, 16 nt, Human herpesvirus 7
uugaauagguaucuuu

SEQ ID NO: 4001543 - RNA, 15 nt, Human herpesvirus 7
uugaauauaaguuuu

SEQ ID NO: 4001544 - RNA, 17 nt, Human herpesvirus 7
uugacaaugucaauaau

SEQ ID NO: 4001545 - RNA, 14 nt, Human herpesvirus 7
uugauaaaauuugg

SEQ ID NO: 4001546 - RNA, 13 nt, Human herpesvirus 7
uugaucaaaaucu

SEQ ID NO: 4001547 - RNA, 12 nt, Human herpesvirus 7
uugccagaaauc

SEQ ID NO: 4001548 - RNA, 19 nt, Human herpesvirus 7
uugcgcuguugguuaugca

SEQ ID NO: 4001549 - RNA, 22 nt, Human herpesvirus 7
uugcuauuauuaaagcuuucaa

SEQ ID NO: 4001550 - RNA, 11 nt, Human herpesvirus 7
uugcuguuuuu

SEQ ID NO: 4001551 - RNA, 16 nt, Human herpesvirus 7
uuggaaaaaaaacggg

SEQ ID NO: 4001552 - RNA, 16 nt, Human herpesvirus 7
uuggaaacaaauugug

SEQ ID NO: 4001553 - RNA, 19 nt, Human herpesvirus 7
uuggagagauagcauuugu

SEQ ID NO: 4001554 - RNA, 16 nt, Human herpesvirus 7
uuggauuguguaauua

SEQ ID NO: 4001555 - RNA, 15 nt, Human herpesvirus 7
uugguaaucugcucg

SEQ ID NO: 4001556 - RNA, 22 nt, Human herpesvirus 7
uugguguguuacaucauguuaa

SEQ ID NO: 4001557 - RNA, 17 nt, Human herpesvirus 7
uuguacauuuuaccaaa

SEQ ID NO: 4001558 - RNA, 13 nt, Human herpesvirus 7
uuguacuucugug

SEQ ID NO: 4001559 - RNA, 15 nt, Human herpesvirus 7
uugugaaaauaacag

SEQ ID NO: 4001560 - RNA, 22 nt, Human herpesvirus 7
uugugacccugucacacuuauu

SEQ ID NO: 4001561 - RNA, 17 nt, Human herpesvirus 7
uuguguggcaacaucuu

SEQ ID NO: 4001562 - RNA, 24 nt, Human herpesvirus 7
uuguuaggccaguucuaucucaaa

SEQ ID NO: 4001563 - RNA, 16 nt, Human herpesvirus 7
uuguuccugugugcaa

SEQ ID NO: 4001564 - RNA, 12 nt, Human herpesvirus 7
uuguuuaagaca

SEQ ID NO: 4001565 - RNA, 22 nt, Human herpesvirus 7
uuguuugcugguggguuuugaa

SEQ ID NO: 4001566 - RNA, 24 nt, Human herpesvirus 7
uuguuuugcauauuuugcuagaaa

SEQ ID NO: 4001567 - RNA, 15 nt, Human herpesvirus 7
uuuaaaaaaucugaa

SEQ ID NO: 4001568 - RNA, 14 nt, Human herpesvirus 7
uuuaaaacaauuuc

SEQ ID NO: 4001569 - RNA, 18 nt, Human herpesvirus 7
uuuaaaacuuauguacuc

SEQ ID NO: 4001570 - RNA, 23 nt, Human herpesvirus 7
uuuaaacagcguucaaucaaauu

SEQ ID NO: 4001571 - RNA, 13 nt, Human herpesvirus 7
uuuaacaugugua

SEQ ID NO: 4001572 - RNA, 15 nt, Human herpesvirus 7
uuuaacgauuccaaa

SEQ ID NO: 4001573 - RNA, 18 nt, Human herpesvirus 7
uuuaacuuuuuuuuucuu

SEQ ID NO: 4001574 - RNA, 16 nt, Human herpesvirus 7
uuuaagugaacuguua

SEQ ID NO: 4001575 - RNA, 19 nt, Human herpesvirus 7
uuuacaaagaacauguagu

SEQ ID NO: 4001576 - RNA, 23 nt, Human herpesvirus 7
uuuacaaagaacauguaguacaa

SEQ ID NO: 4001577 - RNA, 16 nt, Human herpesvirus 7
uuuacuugaucuaauu

SEQ ID NO: 4001578 - RNA, 19 nt, Human herpesvirus 7
uuuagagucugugugugca

SEQ ID NO: 4001579 - RNA, 14 nt, Human herpesvirus 7
uuuagauuuaaaac

SEQ ID NO: 4001580 - RNA, 16 nt, Human herpesvirus 7
uuuaucauuucaaaug

SEQ ID NO: 4001581 - RNA, 18 nt, Human herpesvirus 7
uuuauuuagaaguggcuu

SEQ ID NO: 4001582 - RNA, 19 nt, Human herpesvirus 7
uuucaaauagaguuuaauu

SEQ ID NO: 4001583 - RNA, 18 nt, Human herpesvirus 7
uuucaauugguuguucaa

SEQ ID NO: 4001584 - RNA, 16 nt, Human herpesvirus 7
uuucagaaaauaaaag

SEQ ID NO: 4001585 - RNA, 20 nt, Human herpesvirus 7
uuucgaacuugucaccuauu

SEQ ID NO: 4001586 - RNA, 21 nt, Human herpesvirus 7
uuucuggaauguugguuuaua

SEQ ID NO: 4001587 - RNA, 20 nt, Human herpesvirus 7
uuucuuagaucgaacuguua

SEQ ID NO: 4001588 - RNA, 23 nt, Human herpesvirus 7
uuugacaaucuuggcauugaaau

SEQ ID NO: 4001589 - RNA, 20 nt, Human herpesvirus 7
uuugauaagacugaagacaa

SEQ ID NO: 4001590 - RNA, 15 nt, Human herpesvirus 7
uuugcuucuucuaau

SEQ ID NO: 4001591 - RNA, 12 nt, Human herpesvirus 7
uuugcuugcuga

SEQ ID NO: 4001592 - RNA, 15 nt, Human herpesvirus 7
uuuguaugucuacaa

SEQ ID NO: 4001593 - RNA, 23 nt, Human herpesvirus 7
uuuuaauaugugaaaauaaacag

SEQ ID NO: 4001594 - RNA, 17 nt, Human herpesvirus 7
uuuucaaguuucuucug

SEQ ID NO: 4001595 - RNA, 17 nt, Human herpesvirus 7
uuuucaaugcaacuuua

SEQ ID NO: 4001596 - RNA, 21 nt, Human herpesvirus 7
uuuugcuacuauacucuugca

SEQ ID NO: 4001597 - RNA, 13 nt, Human herpesvirus 7
uaacaaauuggaa

SEQ ID NO: 4001598 - RNA, 21 nt, Human herpesvirus 7
uaacaucuuuuuuauauuucu

SEQ ID NO: 4001599 - RNA, 15 nt, Human herpesvirus 7
uaacaugucuucaac

SEQ ID NO: 4001600 - RNA, 16 nt, Human herpesvirus 7
uaaccaaaauguggga

SEQ ID NO: 4001601 - RNA, 15 nt, Human herpesvirus 7
uaacuguuuuucaaa

SEQ ID NO: 4001602 - RNA, 13 nt, Human herpesvirus 7
uaagaaaaauuug

SEQ ID NO: 4001603 - RNA, 15 nt, Human herpesvirus 7
uaagaugcuuaagga

SEQ ID NO: 4001604 - RNA, 21 nt, Human herpesvirus 7
uaagcauacuuucgcaacaau

SEQ ID NO: 4001605 - RNA, 16 nt, Human herpesvirus 7
uaaggccaaagguaaa

SEQ ID NO: 4001606 - RNA, 23 nt, Human herpesvirus 7
uaagggauaucuuaaaaacaaug

SEQ ID NO: 4001607 - RNA, 15 nt, Human herpesvirus 7
uaaguaaauuuacuu

SEQ ID NO: 4001608 - RNA, 16 nt, Human herpesvirus 7
uaaguagguaagaaaa

SEQ ID NO: 4001609 - RNA, 19 nt, Human herpesvirus 7
uaauaaaggaaagacaaac

SEQ ID NO: 4001610 - RNA, 17 nt, Human herpesvirus 7
uaauacaaaauaaagcc

SEQ ID NO: 4001611 - RNA, 16 nt, Human herpesvirus 7
uaauacuccuuuccug

SEQ ID NO: 4001612 - RNA, 13 nt, Human herpesvirus 7
uaauccauuccug

SEQ ID NO: 4001613 - RNA, 15 nt, Human herpesvirus 7
uaaucuuaauguuuc

SEQ ID NO: 4001614 - RNA, 15 nt, Human herpesvirus 7
uaaugcgguuuugua

SEQ ID NO: 4001615 - RNA, 16 nt, Human herpesvirus 7
uaaugcugugauuuuc

SEQ ID NO: 4001616 - RNA, 19 nt, Human herpesvirus 7
uaauguuuuuuucauacau

SEQ ID NO: 4001617 - RNA, 23 nt, Human herpesvirus 7
uaauuauucggugucuucuugca

SEQ ID NO: 4001618 - RNA, 17 nt, Human herpesvirus 7
uaauuccgggagaaagc

SEQ ID NO: 4001619 - RNA, 14 nt, Human herpesvirus 7
uaauugcagcuucg

SEQ ID NO: 4001620 - RNA, 17 nt, Human herpesvirus 7
uaauuucucaaaucuuu

SEQ ID NO: 4001621 - RNA, 15 nt, Human herpesvirus 7
uaauuuuuuuuugag

SEQ ID NO: 4001622 - RNA, 23 nt, Human herpesvirus 7
uacaaauguuuuaauuuggaaau

SEQ ID NO: 4001623 - RNA, 22 nt, Human herpesvirus 7
uacaaauuuuucggauaaaagg

SEQ ID NO: 4001624 - RNA, 22 nt, Human herpesvirus 7
uacaacuuuauggaacaugaaa

SEQ ID NO: 4001625 - RNA, 14 nt, Human herpesvirus 7
uacaauuccugaaa

SEQ ID NO: 4001626 - RNA, 20 nt, Human herpesvirus 7
uacacaggaauugcugucua

SEQ ID NO: 4001627 - RNA, 14 nt, Human herpesvirus 7
uacacucuguuacu

SEQ ID NO: 4001628 - RNA, 16 nt, Human herpesvirus 7
uacagcauauaucuuu

SEQ ID NO: 4001629 - RNA, 13 nt, Human herpesvirus 7
uacaguaaauugc

SEQ ID NO: 4001630 - RNA, 18 nt, Human herpesvirus 7
uacauguuuaacaaacaa

SEQ ID NO: 4001631 - RNA, 17 nt, Human herpesvirus 7
uacauuaaacagcauuu

SEQ ID NO: 4001632 - RNA, 13 nt, Human herpesvirus 7
uacauuuugcaau

SEQ ID NO: 4001633 - RNA, 18 nt, Human herpesvirus 7
uaccgguuaaaaugggaa

SEQ ID NO: 4001634 - RNA, 15 nt, Human herpesvirus 7
uacgaacgcuuaaua

SEQ ID NO: 4001635 - RNA, 22 nt, Human herpesvirus 7
uacgaaugccaucuauaaacau

SEQ ID NO: 4001636 - RNA, 18 nt, Human herpesvirus 7
uacuacgguuuucagaaa

SEQ ID NO: 4001637 - RNA, 18 nt, Human herpesvirus 7
uacuuauguguuacauga

SEQ ID NO: 4001638 - RNA, 14 nt, Human herpesvirus 7
uacuuucauagcuu

SEQ ID NO: 4001639 - RNA, 14 nt, Human herpesvirus 7
uacuuuuaaaauug

SEQ ID NO: 4001640 - RNA, 23 nt, Human herpesvirus 7
uagaaaauaacuuuaaauuauua

SEQ ID NO: 4001641 - RNA, 12 nt, Human herpesvirus 7
uagaaauuaaaa

SEQ ID NO: 4001642 - RNA, 19 nt, Human herpesvirus 7
uagaacaaguagaaaaugc

SEQ ID NO: 4001643 - RNA, 21 nt, Human herpesvirus 7
uagaacaaguagaaaaugcug

SEQ ID NO: 4001644 - RNA, 17 nt, Human herpesvirus 7
uagaagaaugcaagccu

SEQ ID NO: 4001645 - RNA, 14 nt, Human herpesvirus 7
uagagaaaacauug

SEQ ID NO: 4001646 - RNA, 13 nt, Human herpesvirus 7
uagagagaaacua

SEQ ID NO: 4001647 - RNA, 19 nt, Human herpesvirus 7
uagcuuucaugauuucaau

SEQ ID NO: 4001648 - RNA, 21 nt, Human herpesvirus 7
uaguaaaccuucgugugucuc

SEQ ID NO: 4001649 - RNA, 14 nt, Human herpesvirus 7
uagucugcguuacu

SEQ ID NO: 4001650 - RNA, 17 nt, Human herpesvirus 7
uaguuaguguucuucua

SEQ ID NO: 4001651 - RNA, 15 nt, Human herpesvirus 7
uauaaaagaaacuuu

SEQ ID NO: 4001652 - RNA, 13 nt, Human herpesvirus 7
uauaaucacgaaa

SEQ ID NO: 4001653 - RNA, 15 nt, Human herpesvirus 7
uauacaaaagacaua

SEQ ID NO: 4001654 - RNA, 18 nt, Human herpesvirus 7
uauacuuauuauaucuua

SEQ ID NO: 4001655 - RNA, 23 nt, Human herpesvirus 7
uauagaacaaguagaaaaugcug

SEQ ID NO: 4001656 - RNA, 20 nt, Human herpesvirus 7
uauauuccaacucaaugaau

SEQ ID NO: 4001657 - RNA, 19 nt, Human herpesvirus 7
uauccacucuccugaaaua

SEQ ID NO: 4001658 - RNA, 15 nt, Human herpesvirus 7
uauccaguacgucuu

SEQ ID NO: 4001659 - RNA, 19 nt, Human herpesvirus 7
uaucuccgugacaaagcau

SEQ ID NO: 4001660 - RNA, 16 nt, Human herpesvirus 7
uaucuuuacuuucaua

SEQ ID NO: 4001661 - RNA, 17 nt, Human herpesvirus 7
uaugaauugaaauuucu

SEQ ID NO: 4001662 - RNA, 14 nt, Human herpesvirus 7
uaugcaagaaaguc

SEQ ID NO: 4001663 - RNA, 22 nt, Human herpesvirus 7
uaugcuuccuaaaaaaaaagga

SEQ ID NO: 4001664 - RNA, 15 nt, Human herpesvirus 7
uauggacaaauuugg

SEQ ID NO: 4001665 - RNA, 22 nt, Human herpesvirus 7
uaugugaaaauaaacaggaacu

SEQ ID NO: 4001666 - RNA, 13 nt, Human herpesvirus 7
uauguucaaauau

SEQ ID NO: 4001667 - RNA, 19 nt, Human herpesvirus 7
uauuaauacguccaaaaau

SEQ ID NO: 4001668 - RNA, 16 nt, Human herpesvirus 7
uauuaauuuggugaag

SEQ ID NO: 4001669 - RNA, 14 nt, Human herpesvirus 7
uauucuauuucaac

SEQ ID NO: 4001670 - RNA, 16 nt, Human herpesvirus 7
uauuucuaauagacaa

SEQ ID NO: 4001671 - RNA, 22 nt, Human herpesvirus 7
uauuuugauuggaaaucaaaau

SEQ ID NO: 4001672 - RNA, 20 nt, Human herpesvirus 7
ucaaaaaauaauuccuucua

SEQ ID NO: 4001673 - RNA, 17 nt, Human herpesvirus 7
ucaaaacagaacuuuug

SEQ ID NO: 4001674 - RNA, 13 nt, Human herpesvirus 7
ucaaaaguauaac

SEQ ID NO: 4001675 - RNA, 18 nt, Human herpesvirus 7
ucaaaaucagaaauguua

SEQ ID NO: 4001676 - RNA, 19 nt, Human herpesvirus 7
ucaaaaucuguagaaaaug

SEQ ID NO: 4001677 - RNA, 12 nt, Human herpesvirus 7
ucaaaauuccau

SEQ ID NO: 4001678 - RNA, 22 nt, Human herpesvirus 7
ucaaaauucugcuugucucugu

SEQ ID NO: 4001679 - RNA, 17 nt, Human herpesvirus 7
ucaagaucgauuaaauc

SEQ ID NO: 4001680 - RNA, 18 nt, Human herpesvirus 7
ucaauaaaugguuuuauu

SEQ ID NO: 4001681 - RNA, 19 nt, Human herpesvirus 7
ucaauaugcaugcaauuuu

SEQ ID NO: 4001682 - RNA, 18 nt, Human herpesvirus 7
ucaauuaaugcauuggaa

SEQ ID NO: 4001683 - RNA, 20 nt, Human herpesvirus 7
ucaauuugaauauugcuagu

SEQ ID NO: 4001684 - RNA, 19 nt, Human herpesvirus 7
ucaauuuuucgcugaagaa

SEQ ID NO: 4001685 - RNA, 22 nt, Human herpesvirus 7
ucacaacauauagauaaugaag

SEQ ID NO: 4001686 - RNA, 13 nt, Human herpesvirus 7
ucacacaaugccu

SEQ ID NO: 4001687 - RNA, 15 nt, Human herpesvirus 7
ucacaucuagaguau

SEQ ID NO: 4001688 - RNA, 21 nt, Human herpesvirus 7
ucacugggaaguauguuucau

SEQ ID NO: 4001689 - RNA, 15 nt, Human herpesvirus 7
ucagaacauugucaa

SEQ ID NO: 4001690 - RNA, 13 nt, Human herpesvirus 7
ucagcauuuacca

SEQ ID NO: 4001691 - RNA, 15 nt, Human herpesvirus 7
ucaggaaucuuuuuu

SEQ ID NO: 4001692 - RNA, 18 nt, Human herpesvirus 7
ucaggacaaucaaacaug

SEQ ID NO: 4001693 - RNA, 14 nt, Human herpesvirus 7
ucagucaacuuuuu

SEQ ID NO: 4001694 - RNA, 18 nt, Human herpesvirus 7
ucauaauuaugaaauguu

SEQ ID NO: 4001695 - RNA, 16 nt, Human herpesvirus 7
ucauaucugacauuca

SEQ ID NO: 4001696 - RNA, 17 nt, Human herpesvirus 7
ucaucaauguuuucauu

SEQ ID NO: 4001697 - RNA, 13 nt, Human herpesvirus 7
ucauccaaaaaga

SEQ ID NO: 4001698 - RNA, 16 nt, Human herpesvirus 7
ucaucgguuuucugag

SEQ ID NO: 4001699 - RNA, 11 nt, Human herpesvirus 7
ucaugaaggau

SEQ ID NO: 4001700 - RNA, 14 nt, Human herpesvirus 7
uccagagucucuaa

SEQ ID NO: 4001701 - RNA, 21 nt, Human herpesvirus 7
uccaucaaaagucuuguuuuu

SEQ ID NO: 4001702 - RNA, 17 nt, Human herpesvirus 7
uccauuaagccagauuu

SEQ ID NO: 4001703 - RNA, 16 nt, Human herpesvirus 7
uccauucgguuuucaa

SEQ ID NO: 4001704 - RNA, 16 nt, Human herpesvirus 7
uccauugauuaaaaac

SEQ ID NO: 4001705 - RNA, 15 nt, Human herpesvirus 7
ucccagaaauuucaa

SEQ ID NO: 4001706 - RNA, 16 nt, Human herpesvirus 7
uccgaaucuguuggag

SEQ ID NO: 4001707 - RNA, 12 nt, Human herpesvirus 7
uccuauaaaagc

SEQ ID NO: 4001708 - RNA, 18 nt, Human herpesvirus 7
uccuguccagucuguaaa

SEQ ID NO: 4001709 - RNA, 14 nt, Human herpesvirus 7
uccuguucauguuu

SEQ ID NO: 4001710 - RNA, 14 nt, Human herpesvirus 7
uccuucuaccucuu

SEQ ID NO: 4001711 - RNA, 19 nt, Human herpesvirus 7
ucguaucugugacuuagaa

SEQ ID NO: 4001712 - RNA, 16 nt, Human herpesvirus 7
ucgugugucucuagaa

SEQ ID NO: 4001713 - RNA, 12 nt, Human herpesvirus 7
aaaaaaaaaaca

SEQ ID NO: 4001714 - RNA, 12 nt, Human herpesvirus 7
aaaaagaaugcu

SEQ ID NO: 4001715 - RNA, 17 nt, Human herpesvirus 7
aaaaagccauaaaaugu

SEQ ID NO: 4001716 - RNA, 15 nt, Human herpesvirus 7
aaaacagaacuuuug

SEQ ID NO: 4001717 - RNA, 20 nt, Human herpesvirus 7
aaaacguggaaauuaaucaa

SEQ ID NO: 4001718 - RNA, 13 nt, Human herpesvirus 7
aaaagaauuuucu

SEQ ID NO: 4001719 - RNA, 14 nt, Human herpesvirus 7
aaaagagaaaaugu

SEQ ID NO: 4001720 - RNA, 21 nt, Human herpesvirus 7
aaaagauguuacccaaaaugu

SEQ ID NO: 4001721 - RNA, 18 nt, Human herpesvirus 7
aaaagccauaaaauguac

SEQ ID NO: 4001722 - RNA, 22 nt, Human herpesvirus 7
aaaagcugcauguguacuaaag

SEQ ID NO: 4001723 - RNA, 20 nt, Human herpesvirus 7
aaaagcuuacucuuucugac

SEQ ID NO: 4001724 - RNA, 19 nt, Human herpesvirus 7
aaaaguucuuugaaauagu

SEQ ID NO: 4001725 - RNA, 15 nt, Human herpesvirus 7
aaaaguugaaaaugu

SEQ ID NO: 4001726 - RNA, 15 nt, Human herpesvirus 7
aaaauacaacuucua

SEQ ID NO: 4001727 - RNA, 12 nt, Human herpesvirus 7
aaaauccuggau

SEQ ID NO: 4001728 - RNA, 13 nt, Human herpesvirus 7
aaaaugauaugac

SEQ ID NO: 4001729 - RNA, 15 nt, Human herpesvirus 7
aaaauguuuaaauua

SEQ ID NO: 4001730 - RNA, 13 nt, Human herpesvirus 7
aaaauugaaaaga

SEQ ID NO: 4001731 - RNA, 15 nt, Human herpesvirus 7
aaaauuucauaucua

SEQ ID NO: 4001732 - RNA, 19 nt, Human herpesvirus 7
aaaauuuccuacaaaaguu

SEQ ID NO: 4001733 - RNA, 23 nt, Human herpesvirus 7
aaaauuuccuacaaaaguucugu

SEQ ID NO: 4001734 - RNA, 14 nt, Human herpesvirus 7
aaacaaacaaugag

SEQ ID NO: 4001735 - RNA, 17 nt, Human herpesvirus 7
aaacaagacagaaauga

SEQ ID NO: 4001736 - RNA, 19 nt, Human herpesvirus 7
aaacaaucuggacauuuca

SEQ ID NO: 4001737 - RNA, 24 nt, Human herpesvirus 7
aaacaauugcccuuguguugucau

SEQ ID NO: 4001738 - RNA, 22 nt, Human herpesvirus 7
aaacaccccuugcagaaacugg

SEQ ID NO: 4001739 - RNA, 21 nt, Human herpesvirus 7
aaacaguagaacgagaaaacu

SEQ ID NO: 4001740 - RNA, 12 nt, Human herpesvirus 7
aaacaucuguuu

SEQ ID NO: 4001741 - RNA, 14 nt, Human herpesvirus 7
aaacauguaaucaa

SEQ ID NO: 4001742 - RNA, 18 nt, Human herpesvirus 7
aaacauuagcauugaaau

SEQ ID NO: 4001743 - RNA, 16 nt, Human herpesvirus 7
aaacauuauauuccca

SEQ ID NO: 4001744 - RNA, 20 nt, Human herpesvirus 7
aaaccacaaaaaucaaagua

SEQ ID NO: 4001745 - RNA, 23 nt, Human herpesvirus 7
aaaccuauccacucuccugaaau

SEQ ID NO: 4001746 - RNA, 17 nt, Human herpesvirus 7
aaacgaagaaucauuua

SEQ ID NO: 4001747 - RNA, 17 nt, Human herpesvirus 7
aaacggugauuguagau

SEQ ID NO: 4001748 - RNA, 22 nt, Human herpesvirus 7
aaacuucugauuggucguugcu

SEQ ID NO: 4001749 - RNA, 21 nt, Human herpesvirus 7
aaagacagagucaaucuguga

SEQ ID NO: 4001750 - RNA, 12 nt, Human herpesvirus 7
aaagacggaauu

SEQ ID NO: 4001751 - RNA, 18 nt, Human herpesvirus 7
aaagauuaaaaaaaaaag

SEQ ID NO: 4001752 - RNA, 16 nt, Human herpesvirus 7
aaagcaaaagccacag

SEQ ID NO: 4001753 - RNA, 15 nt, Human herpesvirus 7
aaagcucauuucauc

SEQ ID NO: 4001754 - RNA, 21 nt, Human herpesvirus 7
aaagcuuguauauacggaaug

SEQ ID NO: 4001755 - RNA, 23 nt, Human herpesvirus 7
aaaggaucucucuuucuggaguu

SEQ ID NO: 4001756 - RNA, 15 nt, Human herpesvirus 7
aaaggauuugaaggu

SEQ ID NO: 4001757 - RNA, 12 nt, Human herpesvirus 7
aaaguacaaaug

SEQ ID NO: 4001758 - RNA, 13 nt, Human herpesvirus 7
aaaguacaaaugu

SEQ ID NO: 4001759 - RNA, 14 nt, Human herpesvirus 7
aaaguacaaauguu

SEQ ID NO: 4001760 - RNA, 14 nt, Human herpesvirus 7
aaaguaugcuuugu

SEQ ID NO: 4001761 - RNA, 15 nt, Human herpesvirus 7
aaagucagaacauug

SEQ ID NO: 4001762 - RNA, 21 nt, Human herpesvirus 7
aaagugaacaugacuucagaa

SEQ ID NO: 4001763 - RNA, 17 nt, Human herpesvirus 7
aaagugacggaaguacu

SEQ ID NO: 4001764 - RNA, 14 nt, Human herpesvirus 7
aaaguugggaugac

SEQ ID NO: 4001765 - RNA, 13 nt, Human herpesvirus 7
aaauaaacaggaa

SEQ ID NO: 4001766 - RNA, 19 nt, Human herpesvirus 7
aaauaaacauguugaaaga

SEQ ID NO: 4001767 - RNA, 14 nt, Human herpesvirus 7
aaauaaaguuuacu

SEQ ID NO: 4001768 - RNA, 13 nt, Human herpesvirus 7
aaauaauaacaau

SEQ ID NO: 4001769 - RNA, 13 nt, Human herpesvirus 7
aaauaccaugaaa

SEQ ID NO: 4001770 - RNA, 15 nt, Human herpesvirus 7
aaauauuuagagucg

SEQ ID NO: 4001771 - RNA, 17 nt, Human herpesvirus 7
aaauauuuuacauauua

SEQ ID NO: 4001772 - RNA, 16 nt, Human herpesvirus 7
aaaucaaaacauuuca

SEQ ID NO: 4001773 - RNA, 18 nt, Human herpesvirus 7
aaaucacugcucaaauca

SEQ ID NO: 4001774 - RNA, 16 nt, Human herpesvirus 7
aaaucauguuuaagaa

SEQ ID NO: 4001775 - RNA, 22 nt, Human herpesvirus 7
aauuguacguucugaaacaguc

SEQ ID NO: 4001776 - RNA, 18 nt, Human herpesvirus 7
aauuguaguuuuugcaua

SEQ ID NO: 4001777 - RNA, 11 nt, Human herpesvirus 7
aauuguuugau

SEQ ID NO: 4001778 - RNA, 20 nt, Human herpesvirus 7
aauuguuugauuaauuucca

SEQ ID NO: 4001779 - RNA, 22 nt, Human herpesvirus 7
aauuguuuuucuuucuugcaua

SEQ ID NO: 4001780 - RNA, 16 nt, Human herpesvirus 7
aauuuaaagauugcuu

SEQ ID NO: 4001781 - RNA, 18 nt, Human herpesvirus 7
aauuuagcaccaacugaa

SEQ ID NO: 4001782 - RNA, 22 nt, Human herpesvirus 7
aauuuaugcuuuaacuggaauu

SEQ ID NO: 4001783 - RNA, 17 nt, Human herpesvirus 7
aauuucacacaaugccu

SEQ ID NO: 4001784 - RNA, 19 nt, Human herpesvirus 7
aauuucuaaauaugaugaa

SEQ ID NO: 4001785 - RNA, 21 nt, Human herpesvirus 7
aauuugcagcuucuaaaugug

SEQ ID NO: 4001786 - RNA, 14 nt, Human herpesvirus 7
aauuuggaaauugu

SEQ ID NO: 4001787 - RNA, 22 nt, Human herpesvirus 7
aauuuugauuccugucuugacc

SEQ ID NO: 4001788 - RNA, 23 nt, Human herpesvirus 7
aauuuuucgcugucuuuaacuga

SEQ ID NO: 4001789 - RNA, 18 nt, Human herpesvirus 7
aauuuuucggauaaaagg

SEQ ID NO: 4001790 - RNA, 15 nt, Human herpesvirus 7
acaaaauguauacaa

SEQ ID NO: 4001791 - RNA, 13 nt, Human herpesvirus 7
acaaacuggauau

SEQ ID NO: 4001792 - RNA, 21 nt, Human herpesvirus 7
acaaauaauucaaaaacuauc

SEQ ID NO: 4001793 - RNA, 12 nt, Human herpesvirus 7
acaaauacaguu

SEQ ID NO: 4001794 - RNA, 23 nt, Human herpesvirus 7
acaaauuaugcguuaaugucucu

SEQ ID NO: 4001795 - RNA, 15 nt, Human herpesvirus 7
acaacagccaaaugu

SEQ ID NO: 4001796 - RNA, 21 nt, Human herpesvirus 7
acaaccauuuuuucccagaga

SEQ ID NO: 4001797 - RNA, 12 nt, Human herpesvirus 7
acaacucaauaa

SEQ ID NO: 4001798 - RNA, 20 nt, Human herpesvirus 7
acaacuuuauggaacaugaa

SEQ ID NO: 4001799 - RNA, 16 nt, Human herpesvirus 7
acaagguuuaaaacau

SEQ ID NO: 4001800 - RNA, 18 nt, Human herpesvirus 7
acaagguuuaaaacauuu

SEQ ID NO: 4001801 - RNA, 19 nt, Human herpesvirus 7
acaagguuuaaaacauuua

SEQ ID NO: 4001802 - RNA, 21 nt, Human herpesvirus 7
acaaucgauugcaguugaauu

SEQ ID NO: 4001803 - RNA, 21 nt, Human herpesvirus 7
acaauuugaagaggagaauuc

SEQ ID NO: 4001804 - RNA, 18 nt, Human herpesvirus 7
acaccccaugcaagaaaa

SEQ ID NO: 4001805 - RNA, 18 nt, Human herpesvirus 7
acaccgcaaacauuuuga

SEQ ID NO: 4001806 - RNA, 18 nt, Human herpesvirus 7
acacuauuggacaaaaga

SEQ ID NO: 4001807 - RNA, 21 nt, Human herpesvirus 7
acacuuuaaccgcaaaagcca

SEQ ID NO: 4001808 - RNA, 17 nt, Human herpesvirus 7
acagaccuauguguuua

SEQ ID NO: 4001809 - RNA, 14 nt, Human herpesvirus 7
acagagaacaccau

SEQ ID NO: 4001810 - RNA, 14 nt, Human herpesvirus 7
acagauaaaaauuu

SEQ ID NO: 4001811 - RNA, 20 nt, Human herpesvirus 7
acagaucuugcuuuagaaca

SEQ ID NO: 4001812 - RNA, 22 nt, Human herpesvirus 7
acagaucuugcuuuagaacaau

SEQ ID NO: 4001813 - RNA, 21 nt, Human herpesvirus 7
acagcaaauucacgcucucaa

SEQ ID NO: 4001814 - RNA, 23 nt, Human herpesvirus 7
acagcaccaauccuuuuaaaacc

SEQ ID NO: 4001815 - RNA, 14 nt, Human herpesvirus 7
acagcucaaaagua

SEQ ID NO: 4001816 - RNA, 20 nt, Human herpesvirus 7
acauaaagguaaaaauuuga

SEQ ID NO: 4001817 - RNA, 15 nt, Human herpesvirus 7
acauaaucauggaaa

SEQ ID NO: 4001818 - RNA, 15 nt, Human herpesvirus 7
acauagcuagaaauu

SEQ ID NO: 4001819 - RNA, 16 nt, Human herpesvirus 7
acauauagauaaugaa

SEQ ID NO: 4001820 - RNA, 13 nt, Human herpesvirus 7
acaucauguuaaa

SEQ ID NO: 4001821 - RNA, 13 nt, Human herpesvirus 7
acaugaucuugua

SEQ ID NO: 4001822 - RNA, 16 nt, Human herpesvirus 7
acauucagaaaaaauc

SEQ ID NO: 4001823 - RNA, 23 nt, Human herpesvirus 7
acauucuccaguggcaguacuac

SEQ ID NO: 4001824 - RNA, 14 nt, Human herpesvirus 7
acauuuaaaaaauc

SEQ ID NO: 4001825 - RNA, 21 nt, Human herpesvirus 7
acauuucagaugacaacucaa

SEQ ID NO: 4001826 - RNA, 19 nt, Human herpesvirus 7
acauuucauuccaaaauac

SEQ ID NO: 4001827 - RNA, 21 nt, Human herpesvirus 7
acauuucauuccaaaauacaa

SEQ ID NO: 4001828 - RNA, 18 nt, Human herpesvirus 7
acauuuuaauaugugaaa

SEQ ID NO: 4001829 - RNA, 15 nt, Human herpesvirus 7
accacaacugugaca

SEQ ID NO: 4001830 - RNA, 19 nt, Human herpesvirus 7
accaugaaaaauaaauacu

SEQ ID NO: 4001831 - RNA, 15 nt, Human herpesvirus 7
accaugaaaaauaug

SEQ ID NO: 4001832 - RNA, 15 nt, Human herpesvirus 7
accauugcugauccg

SEQ ID NO: 4001833 - RNA, 14 nt, Human herpesvirus 7
accauuucugaaac

SEQ ID NO: 4001834 - RNA, 23 nt, Human herpesvirus 7
accauuucugaaaccuucgcaac

SEQ ID NO: 4001835 - RNA, 21 nt, Human herpesvirus 7
accgaagcagggaaaaagcau

SEQ ID NO: 4001836 - RNA, 18 nt, Human herpesvirus 7
accgacaauauaaaagaa

SEQ ID NO: 4001837 - RNA, 12 nt, Human herpesvirus 7
accgauuacugu

SEQ ID NO: 4001838 - RNA, 16 nt, Human herpesvirus 7
accgcaugugaaaaug

SEQ ID NO: 4001839 - RNA, 16 nt, Human herpesvirus 7
accgguuaaaauggga

SEQ ID NO: 4001840 - RNA, 17 nt, Human herpesvirus 7
accgguuaaaaugggaa

SEQ ID NO: 4001841 - RNA, 15 nt, Human herpesvirus 7
accgucauuuaauug

SEQ ID NO: 4001842 - RNA, 13 nt, Human herpesvirus 7
accguuugcagcc

SEQ ID NO: 4001843 - RNA, 14 nt, Human herpesvirus 7
accuguauggaacc

SEQ ID NO: 4001844 - RNA, 22 nt, Human herpesvirus 7
acgaauaaaaaguuuuugagua

SEQ ID NO: 4001845 - RNA, 16 nt, Human herpesvirus 7
acgagcgauuuaaugu

SEQ ID NO: 4001846 - RNA, 13 nt, Human herpesvirus 7
acgcauucaaugg

SEQ ID NO: 4001847 - RNA, 19 nt, Human herpesvirus 7
acgccaaaucuaauuuaug

SEQ ID NO: 4001848 - RNA, 19 nt, Human herpesvirus 7
acgcucucaaucaaaaucu

SEQ ID NO: 4001849 - RNA, 16 nt, Human herpesvirus 7
acgucaggaaaaaaac

SEQ ID NO: 4001850 - RNA, 19 nt, Human herpesvirus 7
acgucaugcggaagaacaa

SEQ ID NO: 4001851 - RNA, 21 nt, Human herpesvirus 7
acguccaagaaauaugcuucc

SEQ ID NO: 4001852 - RNA, 20 nt, Human herpesvirus 7
acgugagggggacaauuauu

SEQ ID NO: 4001853 - RNA, 16 nt, Human herpesvirus 7
acguuuauuuggauug

SEQ ID NO: 4001854 - RNA, 18 nt, Human herpesvirus 7
acuaaaacuacauuuaaa

SEQ ID NO: 4001855 - RNA, 16 nt, Human herpesvirus 7
acuaaagcuacagcuu

SEQ ID NO: 4001856 - RNA, 22 nt, Human herpesvirus 7
acuaacauuuuaauaugugaaa

SEQ ID NO: 4001857 - RNA, 17 nt, Human herpesvirus 7
acuaagaaaaaaacaaa

SEQ ID NO: 4001858 - RNA, 16 nt, Human herpesvirus 7
acuaauaaaaauuacu

SEQ ID NO: 4001859 - RNA, 19 nt, Human herpesvirus 7
acuacauuuaaaaaaucug

SEQ ID NO: 4001860 - RNA, 21 nt, Human herpesvirus 7
acuacauuuaaaaaaucugaa

SEQ ID NO: 4001861 - RNA, 13 nt, Human herpesvirus 7
acuauaaauggaa

SEQ ID NO: 4001862 - RNA, 18 nt, Human herpesvirus 7
acuaucuccuaaaugaau

SEQ ID NO: 4001863 - RNA, 19 nt, Human herpesvirus 7
acuaucuccuaaaugaauu

SEQ ID NO: 4001864 - RNA, 16 nt, Human herpesvirus 7
acucauaauagagcug

SEQ ID NO: 4001865 - RNA, 18 nt, Human herpesvirus 7
acuccauucgguuuucaa

SEQ ID NO: 4001866 - RNA, 20 nt, Human herpesvirus 7
acuccguuucauuuaaaagg

SEQ ID NO: 4001867 - RNA, 23 nt, Human herpesvirus 7
acucggucuuuuuauuucuaaua

SEQ ID NO: 4001868 - RNA, 13 nt, Human herpesvirus 7
acucuccugaaau

SEQ ID NO: 4001869 - RNA, 21 nt, Human herpesvirus 7
acucuggguccggaaguugag

SEQ ID NO: 4001870 - RNA, 23 nt, Human herpesvirus 7
acucuucuuugugagaaauggaa

SEQ ID NO: 4001871 - RNA, 17 nt, Human herpesvirus 7
acugagacgagcaucua

SEQ ID NO: 4001872 - RNA, 16 nt, Human herpesvirus 7
acugauauaaaugcuu

SEQ ID NO: 4001873 - RNA, 22 nt, Human herpesvirus 7
acuguaauauaauuauuuuaaa

SEQ ID NO: 4001874 - RNA, 22 nt, Human herpesvirus 7
acuguauuuguugaucuucaau

SEQ ID NO: 4001875 - RNA, 15 nt, Human herpesvirus 7
acuguccaacacaag

SEQ ID NO: 4001876 - RNA, 19 nt, Human herpesvirus 7
acuuaaggcggacaaauau

SEQ ID NO: 4001877 - RNA, 14 nt, Human herpesvirus 7
acuuacuguuuaca

SEQ ID NO: 4001878 - RNA, 16 nt, Human herpesvirus 7
acuuacuguuuacaca

SEQ ID NO: 4001879 - RNA, 19 nt, Human herpesvirus 7
acuuauuauaucuuaauaa

SEQ ID NO: 4001880 - RNA, 21 nt, Human herpesvirus 7
acuuauuccagauaugacaaa

SEQ ID NO: 4001881 - RNA, 17 nt, Human herpesvirus 7
acuucaacauacagcau

SEQ ID NO: 4001882 - RNA, 18 nt, Human herpesvirus 7
acuucuuugacaaaaaug

SEQ ID NO: 4001883 - RNA, 13 nt, Human herpesvirus 7
acuuguugaaaua

SEQ ID NO: 4001884 - RNA, 12 nt, Human herpesvirus 7
acuuguuuugac

SEQ ID NO: 4001885 - RNA, 11 nt, Human herpesvirus 7
acuuugaaauc

SEQ ID NO: 4001886 - RNA, 12 nt, Human herpesvirus 7
acuuuuaaauaa

SEQ ID NO: 4001887 - RNA, 17 nt, Human herpesvirus 7
acuuuuaacuguuaaag

SEQ ID NO: 4001888 - RNA, 15 nt, Human herpesvirus 7
acuuuuuauaauaau

SEQ ID NO: 4001889 - RNA, 22 nt, Human herpesvirus 7
auacugauguaaaauuaauuca

SEQ ID NO: 4001890 - RNA, 18 nt, Human herpesvirus 7
auagaaauuauuguacau

SEQ ID NO: 4001891 - RNA, 22 nt, Human herpesvirus 7
auagaacgcuuauucgacacua

SEQ ID NO: 4001892 - RNA, 15 nt, Human herpesvirus 7
auagacacauuuauc

SEQ ID NO: 4001893 - RNA, 22 nt, Human herpesvirus 7
auagacugauacgcuuucugaa

SEQ ID NO: 4001894 - RNA, 16 nt, Human herpesvirus 7
auagcaggaagcacaa

SEQ ID NO: 4001895 - RNA, 22 nt, Human herpesvirus 7
auagucuacuaaggugucuucg

SEQ ID NO: 4001896 - RNA, 20 nt, Human herpesvirus 7
auaguuugguuauccaaguu

SEQ ID NO: 4001897 - RNA, 13 nt, Human herpesvirus 7
auauaaaaaauuu

SEQ ID NO: 4001898 - RNA, 15 nt, Human herpesvirus 7
auauaacaaaaaacg

SEQ ID NO: 4001899 - RNA, 15 nt, Human herpesvirus 7
auauaauaaaucguu

SEQ ID NO: 4001900 - RNA, 15 nt, Human herpesvirus 7
auauacauguaacug

SEQ ID NO: 4001901 - RNA, 22 nt, Human herpesvirus 7
auauacggaauggacaaaaaua

SEQ ID NO: 4001902 - RNA, 17 nt, Human herpesvirus 7
auauauaagagaauugc

SEQ ID NO: 4001903 - RNA, 11 nt, Human herpesvirus 7
auauaugaauc

SEQ ID NO: 4001904 - RNA, 20 nt, Human herpesvirus 7
auaugacuuguugaauuuuu

SEQ ID NO: 4001905 - RNA, 17 nt, Human herpesvirus 7
auaugcaucaaaacaua

SEQ ID NO: 4001906 - RNA, 20 nt, Human herpesvirus 7
auaugcauguguaaagccaa

SEQ ID NO: 4001907 - RNA, 21 nt, Human herpesvirus 7
auaugcuagaagacugcaacc

SEQ ID NO: 4001908 - RNA, 16 nt, Human herpesvirus 7
auaugcuuccuaaaaa

SEQ ID NO: 4001909 - RNA, 19 nt, Human herpesvirus 7
auauuaaaaaccacagagg

SEQ ID NO: 4001910 - RNA, 19 nt, Human herpesvirus 7
auauugucauaaaauuauc

SEQ ID NO: 4001911 - RNA, 18 nt, Human herpesvirus 7
auauuuaaggcuguaaaa

SEQ ID NO: 4001912 - RNA, 16 nt, Human herpesvirus 7
auauuugcuugcugaa

SEQ ID NO: 4001913 - RNA, 14 nt, Human herpesvirus 7
aucaaaaaauaauu

SEQ ID NO: 4001914 - RNA, 12 nt, Human herpesvirus 7
aucaaaaaauuu

SEQ ID NO: 4001915 - RNA, 13 nt, Human herpesvirus 7
aucaaaaacugaa

SEQ ID NO: 4001916 - RNA, 14 nt, Human herpesvirus 7
aucaaaacauauca

SEQ ID NO: 4001917 - RNA, 19 nt, Human herpesvirus 7
aucaaaauccuggauuuca

SEQ ID NO: 4001918 - RNA, 15 nt, Human herpesvirus 7
aucaaauuauaccuc

SEQ ID NO: 4001919 - RNA, 16 nt, Human herpesvirus 7
aucaaauuuugauucc

SEQ ID NO: 4001920 - RNA, 15 nt, Human herpesvirus 7
aucaaggucuuucau

SEQ ID NO: 4001921 - RNA, 21 nt, Human herpesvirus 7
aucaccaaagaguauacaaaa

SEQ ID NO: 4001922 - RNA, 22 nt, Human herpesvirus 7
aucaucuuaaaaguacaaaugu

SEQ ID NO: 4001923 - RNA, 18 nt, Human herpesvirus 7
aucaugaaaacaguggga

SEQ ID NO: 4001924 - RNA, 14 nt, Human herpesvirus 7
aucauuaaaaugau

SEQ ID NO: 4001925 - RNA, 23 nt, Human herpesvirus 7
auccaaguuuuaacaaucuaagg

SEQ ID NO: 4001926 - RNA, 16 nt, Human herpesvirus 7
auccgcugaacgcaga

SEQ ID NO: 4001927 - RNA, 13 nt, Human herpesvirus 7
aucgaguucugac

SEQ ID NO: 4001928 - RNA, 14 nt, Human herpesvirus 7
aucgcuuucucaag

SEQ ID NO: 4001929 - RNA, 13 nt, Human herpesvirus 7
aucggaaauuuug

SEQ ID NO: 4001930 - RNA, 11 nt, Human herpesvirus 7
aucuaauuaau

SEQ ID NO: 4001931 - RNA, 22 nt, Human herpesvirus 7
aucuacauccuuaaauuuuaca

SEQ ID NO: 4001932 - RNA, 22 nt, Human herpesvirus 7
aucuaccccgauccucagaaug

SEQ ID NO: 4001933 - RNA, 18 nt, Human herpesvirus 7
aucuagcuuguuaaagaa

SEQ ID NO: 4001934 - RNA, 23 nt, Human herpesvirus 7
aucuaggucuuccacuguuguag

SEQ ID NO: 4001935 - RNA, 13 nt, Human herpesvirus 7
aucuaugaaauaa

SEQ ID NO: 4001936 - RNA, 12 nt, Human herpesvirus 7
aucuauuaaaua

SEQ ID NO: 4001937 - RNA, 14 nt, Human herpesvirus 7
aucuguagaaaaug

SEQ ID NO: 4001938 - RNA, 20 nt, Human herpesvirus 7
aucuuaaaaguacaaauguu

SEQ ID NO: 4001939 - RNA, 23 nt, Human herpesvirus 7
aucuuccacaaaaauuuaauagu

SEQ ID NO: 4001940 - RNA, 21 nt, Human herpesvirus 7
aucuugagaaauaugaauuga

SEQ ID NO: 4001941 - RNA, 20 nt, Human herpesvirus 7
aucuugugaaguuugcugaa

SEQ ID NO: 4001942 - RNA, 14 nt, Human herpesvirus 7
aucuuuaacgguaa

SEQ ID NO: 4001943 - RNA, 19 nt, Human herpesvirus 7
aucuuuaucuuugucacuu

SEQ ID NO: 4001944 - RNA, 17 nt, Human herpesvirus 7
aucuuuauugguaauua

SEQ ID NO: 4001945 - RNA, 16 nt, Human herpesvirus 7
aucuuucguauugccu

SEQ ID NO: 4001946 - RNA, 19 nt, Human herpesvirus 7
aucuuugucacuuaaagaa

SEQ ID NO: 4001947 - RNA, 13 nt, Human herpesvirus 7
augaaaaaaauua

SEQ ID NO: 4001948 - RNA, 17 nt, Human herpesvirus 7
augaaaaaaauuaugug

SEQ ID NO: 4001949 - RNA, 14 nt, Human herpesvirus 7
augaaacuuccaau

SEQ ID NO: 4001950 - RNA, 15 nt, Human herpesvirus 7
augaaaucuugaauu

SEQ ID NO: 4001951 - RNA, 16 nt, Human herpesvirus 7
augaagacagcucaaa

SEQ ID NO: 4001952 - RNA, 17 nt, Human herpesvirus 7
augaaucaaauuucaaa

SEQ ID NO: 4001953 - RNA, 18 nt, Human herpesvirus 7
augaauuaauaaaacaaa

SEQ ID NO: 4001954 - RNA, 20 nt, Human herpesvirus 7
augaauugaaauuucuaaau

SEQ ID NO: 4001955 - RNA, 21 nt, Human herpesvirus 7
augacaacucaauaaaaaugu

SEQ ID NO: 4001956 - RNA, 23 nt, Human herpesvirus 7
augacacgacacugaaugucaac

SEQ ID NO: 4001957 - RNA, 20 nt, Human herpesvirus 7
augaguauaccuacgacuau

SEQ ID NO: 4001958 - RNA, 24 nt, Human herpesvirus 7
augaucuccguugaaagcguuuca

SEQ ID NO: 4001959 - RNA, 22 nt, Human herpesvirus 7
augauuagcgcgugaacaaaua

SEQ ID NO: 4001960 - RNA, 16 nt, Human herpesvirus 7
augauuuuuuaaaugu

SEQ ID NO: 4001961 - RNA, 16 nt, Human herpesvirus 7
augcauauuugaacau

SEQ ID NO: 4001962 - RNA, 16 nt, Human herpesvirus 7
augccagaaauuaaau

SEQ ID NO: 4001963 - RNA, 19 nt, Human herpesvirus 7
augccaucuauaaacauuc

SEQ ID NO: 4001964 - RNA, 15 nt, Human herpesvirus 7
augcugauuccuucu

SEQ ID NO: 4001965 - RNA, 23 nt, Human herpesvirus 7
augcuuccuaaaaaaaaaggaaa

SEQ ID NO: 4001966 - RNA, 13 nt, Human herpesvirus 7
augcuuuaacugg

SEQ ID NO: 4001967 - RNA, 16 nt, Human herpesvirus 7
augcuuuaacuggaau

SEQ ID NO: 4001968 - RNA, 19 nt, Human herpesvirus 7
auggaacugaaaacaaugc

SEQ ID NO: 4001969 - RNA, 12 nt, Human herpesvirus 7
auggaagaacaa

SEQ ID NO: 4001970 - RNA, 20 nt, Human herpesvirus 7
auggacggcauuuaacucau

SEQ ID NO: 4001971 - RNA, 20 nt, Human herpesvirus 7
auggccaucgcuuucucaag

SEQ ID NO: 4001972 - RNA, 18 nt, Human herpesvirus 7
auguaaucaaaauuuugg

SEQ ID NO: 4001973 - RNA, 15 nt, Human herpesvirus 7
augucagaguuuaaa

SEQ ID NO: 4001974 - RNA, 18 nt, Human herpesvirus 7
auguccaaucaaaaacug

SEQ ID NO: 4001975 - RNA, 22 nt, Human herpesvirus 7
augucucuugaagaacaacaug

SEQ ID NO: 4001976 - RNA, 13 nt, Human herpesvirus 7
augugcuuuuuuc

SEQ ID NO: 4001977 - RNA, 22 nt, Human herpesvirus 7
auguggucuggucuucauauuu

SEQ ID NO: 4001978 - RNA, 17 nt, Human herpesvirus 7
augugugugguaaggca

SEQ ID NO: 4001979 - RNA, 18 nt, Human herpesvirus 7
augugugugguaaggcag

SEQ ID NO: 4001980 - RNA, 21 nt, Human herpesvirus 7
auguuaaaggaucaaaagcug

SEQ ID NO: 4001981 - RNA, 21 nt, Human herpesvirus 7
auguuacuauaugaaaacagc

SEQ ID NO: 4001982 - RNA, 17 nt, Human herpesvirus 7
auguuauacauaaagag

SEQ ID NO: 4001983 - RNA, 19 nt, Human herpesvirus 7
auguuccuuauauuaaaaa

SEQ ID NO: 4001984 - RNA, 15 nt, Human herpesvirus 7
auguugcaaauguuc

SEQ ID NO: 4001985 - RNA, 19 nt, Human herpesvirus 7
auguugccuucuaaaacag

SEQ ID NO: 4001986 - RNA, 20 nt, Human herpesvirus 7
auguuucaucaauguuuuca

SEQ ID NO: 4001987 - RNA, 22 nt, Human herpesvirus 7
auguuucuggaucugccucugc

SEQ ID NO: 4001988 - RNA, 19 nt, Human herpesvirus 7
auguuuuaccgugucuucu

SEQ ID NO: 4001989 - RNA, 20 nt, Human herpesvirus 7
auguuuuuccuaugauacaa

SEQ ID NO: 4001990 - RNA, 17 nt, Human herpesvirus 7
auuaaaugauuuuaaau

SEQ ID NO: 4001991 - RNA, 16 nt, Human herpesvirus 7
auuaauauauuuuccu

SEQ ID NO: 4001992 - RNA, 12 nt, Human herpesvirus 7
auuacacaggaa

SEQ ID NO: 4001993 - RNA, 14 nt, Human herpesvirus 7
auuacauccugcua

SEQ ID NO: 4001994 - RNA, 15 nt, Human herpesvirus 7
auuaguauuguaaua

SEQ ID NO: 4001995 - RNA, 20 nt, Human herpesvirus 7
auuagucauacuuuacagcu

SEQ ID NO: 4001996 - RNA, 13 nt, Human herpesvirus 7
auuagugccugca

SEQ ID NO: 4001997 - RNA, 16 nt, Human herpesvirus 7
auuauaaauguaacuu

SEQ ID NO: 4001998 - RNA, 17 nt, Human herpesvirus 7
auuauaaauguaacuuu

SEQ ID NO: 4001999 - RNA, 14 nt, Human herpesvirus 7
auuaucaccacaau

SEQ ID NO: 4002000 - RNA, 23 nt, Human herpesvirus 7
auuauguauaucuuuuuauugaa

SEQ ID NO: 4002001 - RNA, 16 nt, Human herpesvirus 7
auuauguguacacuuu

SEQ ID NO: 4002002 - RNA, 22 nt, Human herpesvirus 7
auucaaauaagggauaucuuaa

SEQ ID NO: 4002003 - RNA, 23 nt, Human herpesvirus 8 [Kaposi`s sarcoma-associated h
cagguaugaccggcuuguuuaua

SEQ ID NO: 4002004 - RNA, 18 nt, Human herpesvirus 8 [Kaposi`s sarcoma-associated h
caggucgcagagaccucu

SEQ ID NO: 4002005 - RNA, 16 nt, Human herpesvirus 8 [Kaposi`s sarcoma-associated h
caguauuaugccaggg

SEQ ID NO: 4002006 - RNA, 21 nt, Human herpesvirus 8 [Kaposi`s sarcoma-associated h
cauauacagguguccaagacu

SEQ ID NO: 4002007 - RNA, 21 nt, Human herpesvirus 8 [Kaposi`s sarcoma-associated h
caucaacaggagggcagcugu

SEQ ID NO: 4002008 - RNA, 16 nt, Human herpesvirus 8 [Kaposi`s sarcoma-associated h
caucccgccugcgguc

SEQ ID NO: 4002009 - RNA, 20 nt, Human herpesvirus 8 [Kaposi`s sarcoma-associated h
cauccgcgagccauucaucg

SEQ ID NO: 4002010 - RNA, 15 nt, Human herpesvirus 8 [Kaposi`s sarcoma-associated h
cauccuaggugacug

SEQ ID NO: 4002011 - RNA, 23 nt, Human herpesvirus 8 [Kaposi`s sarcoma-associated h
caucugcugucuaguggagaggg

SEQ ID NO: 4002012 - RNA, 20 nt, Human herpesvirus 8 [Kaposi`s sarcoma-associated h
caugcaggcaguccaagguc

SEQ ID NO: 4002013 - RNA, 21 nt, Human herpesvirus 8 [Kaposi`s sarcoma-associated h
caugccaucuuugggcuagug

SEQ ID NO: 4002014 - RNA, 17 nt, Human herpesvirus 8 [Kaposi`s sarcoma-associated h
caugcgucgccguagug

SEQ ID NO: 4002015 - RNA, 20 nt, Human herpesvirus 8 [Kaposi`s sarcoma-associated h
cauugccacccagcuacugg

SEQ ID NO: 4002016 - RNA, 24 nt, Human herpesvirus 8 [Kaposi`s sarcoma-associated h
cauugugugguuuggcagucacuu

SEQ ID NO: 4002017 - RNA, 24 nt, Human herpesvirus 8 [Kaposi`s sarcoma-associated h
cauuugcgugcaaaaugugcuuug

SEQ ID NO: 4002018 - RNA, 19 nt, Human herpesvirus 8 [Kaposi`s sarcoma-associated h
ccaagagcgagugugccuc

SEQ ID NO: 4002019 - RNA, 19 nt, Human herpesvirus 8 [Kaposi`s sarcoma-associated h
ccaauuaauuggagcucuu

SEQ ID NO: 4002020 - RNA, 15 nt, Human herpesvirus 8 [Kaposi`s sarcoma-associated h
ccacaucggugccuu

SEQ ID NO: 4002021 - RNA, 19 nt, Human herpesvirus 8 [Kaposi`s sarcoma-associated h
ccaccguggaguugccugu

SEQ ID NO: 4002022 - RNA, 17 nt, Human herpesvirus 8 [Kaposi`s sarcoma-associated h
ccacggcgcuguacagu

SEQ ID NO: 4002023 - RNA, 14 nt, Human herpesvirus 8 [Kaposi`s sarcoma-associated h
ccagaggacagggu

SEQ ID NO: 4002024 - RNA, 18 nt, Human herpesvirus 8 [Kaposi`s sarcoma-associated h
ccagauaccccugcaccu

SEQ ID NO: 4002025 - RNA, 23 nt, Human herpesvirus 8 [Kaposi`s sarcoma-associated h
ccagccugaaacgucgcccaaau

SEQ ID NO: 4002026 - RNA, 17 nt, Human herpesvirus 8 [Kaposi`s sarcoma-associated h
ccagcuccuauugcaac

SEQ ID NO: 4002027 - RNA, 23 nt, Human herpesvirus 8 [Kaposi`s sarcoma-associated h
ccagggaagaugaaggacacggg

SEQ ID NO: 4002028 - RNA, 16 nt, Human herpesvirus 8 [Kaposi`s sarcoma-associated h
ccaguguguuucugug

SEQ ID NO: 4002029 - RNA, 14 nt, Human herpesvirus 8 [Kaposi`s sarcoma-associated h
ccaugaaagguggu

SEQ ID NO: 4002030 - RNA, 15 nt, Human herpesvirus 8 [Kaposi`s sarcoma-associated h
ccaugagccucccuu

SEQ ID NO: 4002031 - RNA, 19 nt, Human herpesvirus 8 [Kaposi`s sarcoma-associated h
ccauggcagcccagccucu

SEQ ID NO: 4002032 - RNA, 20 nt, Human herpesvirus 8 [Kaposi`s sarcoma-associated h
ccauggcagcccagccucug

SEQ ID NO: 4002033 - RNA, 17 nt, Human herpesvirus 8 [Kaposi`s sarcoma-associated h
ccauuuuuuacggacaa

SEQ ID NO: 4002034 - RNA, 18 nt, Human herpesvirus 8 [Kaposi`s sarcoma-associated h
cccaauguuaauguucuc

SEQ ID NO: 4002035 - RNA, 21 nt, Human herpesvirus 8 [Kaposi`s sarcoma-associated h
cccacguggugcugccuagga

SEQ ID NO: 4002036 - RNA, 14 nt, Human herpesvirus 8 [Kaposi`s sarcoma-associated h
cccagacgacccca

SEQ ID NO: 4002037 - RNA, 17 nt, Human herpesvirus 8 [Kaposi`s sarcoma-associated h
ccccaagcggggagaag

SEQ ID NO: 4002038 - RNA, 24 nt, Human herpesvirus 8 [Kaposi`s sarcoma-associated h
ccccgggcguggugccggaugcag

SEQ ID NO: 4002039 - RNA, 12 nt, Human herpesvirus 8 [Kaposi`s sarcoma-associated h
cccgccucugaa

SEQ ID NO: 4002040 - RNA, 13 nt, Human herpesvirus 8 [Kaposi`s sarcoma-associated h
cccggauuccucc

SEQ ID NO: 4002041 - RNA, 15 nt, Human herpesvirus 8 [Kaposi`s sarcoma-associated h
cccggcaacacugga

SEQ ID NO: 4002042 - RNA, 13 nt, Human herpesvirus 8 [Kaposi`s sarcoma-associated h
cccuagccaugga

SEQ ID NO: 4002043 - RNA, 19 nt, Human herpesvirus 8 [Kaposi`s sarcoma-associated h
cccucuucuguugccaggc

SEQ ID NO: 4002044 - RNA, 23 nt, Human herpesvirus 8 [Kaposi`s sarcoma-associated h
cccucuuggcuguuacaauaaag

SEQ ID NO: 4002045 - RNA, 19 nt, Human herpesvirus 8 [Kaposi`s sarcoma-associated h
cccuuacgccccugguggg

SEQ ID NO: 4002046 - RNA, 18 nt, Human herpesvirus 8 [Kaposi`s sarcoma-associated h
cccuuaucagcucacugu

SEQ ID NO: 4002047 - RNA, 15 nt, Human herpesvirus 8 [Kaposi`s sarcoma-associated h
ccgacaaccggcugg

SEQ ID NO: 4002048 - RNA, 19 nt, Human herpesvirus 8 [Kaposi`s sarcoma-associated h
ccgacugugccccuggaaa

SEQ ID NO: 4002049 - RNA, 11 nt, Human herpesvirus 8 [Kaposi`s sarcoma-associated h
ccgagccacaa

SEQ ID NO: 4002050 - RNA, 18 nt, Human herpesvirus 8 [Kaposi`s sarcoma-associated h
ccgagccacaaaguacau

SEQ ID NO: 4002051 - RNA, 16 nt, Human herpesvirus 8 [Kaposi`s sarcoma-associated h
ccgcaggccagccacc

SEQ ID NO: 4002052 - RNA, 14 nt, Human herpesvirus 8 [Kaposi`s sarcoma-associated h
ccgcauuaaagcac

SEQ ID NO: 4002053 - RNA, 23 nt, Human herpesvirus 8 [Kaposi`s sarcoma-associated h
ccggacucgucuacccugccacu

SEQ ID NO: 4002054 - RNA, 18 nt, Human herpesvirus 8 [Kaposi`s sarcoma-associated h
ccggaugcagggccuggc

SEQ ID NO: 4002055 - RNA, 22 nt, Human herpesvirus 8 [Kaposi`s sarcoma-associated h
ccggcgacugcgcagaacagua

SEQ ID NO: 4002056 - RNA, 12 nt, Human herpesvirus 8 [Kaposi`s sarcoma-associated h
ccguggucauug

SEQ ID NO: 4002057 - RNA, 18 nt, Human herpesvirus 8 [Kaposi`s sarcoma-associated h
ccgugguucaucagccuc

SEQ ID NO: 4002058 - RNA, 21 nt, Human herpesvirus 8 [Kaposi`s sarcoma-associated h
ccguguuuuucuggucgcugc

SEQ ID NO: 4002059 - RNA, 19 nt, Human herpesvirus 8 [Kaposi`s sarcoma-associated h
ccuaggugggugugcauuu

SEQ ID NO: 4002060 - RNA, 15 nt, Human herpesvirus 8 [Kaposi`s sarcoma-associated h
ccugcugcagcugga

SEQ ID NO: 4002061 - RNA, 12 nt, Human herpesvirus 8 [Kaposi`s sarcoma-associated h
ccugggccaggc

SEQ ID NO: 4002062 - RNA, 13 nt, Human herpesvirus 8 [Kaposi`s sarcoma-associated h
ccuggugaggaag

SEQ ID NO: 4002063 - RNA, 13 nt, Human herpesvirus 8 [Kaposi`s sarcoma-associated h
ccugucgaggaag

SEQ ID NO: 4002064 - RNA, 20 nt, Human herpesvirus 8 [Kaposi`s sarcoma-associated h
ccugucgaggaagaaauggg

SEQ ID NO: 4002065 - RNA, 18 nt, Human herpesvirus 8 [Kaposi`s sarcoma-associated h
ccuuaagaaaguggauaa

SEQ ID NO: 4002066 - RNA, 21 nt, Human herpesvirus 8 [Kaposi`s sarcoma-associated h
cgaacagaagacccagaaaau

SEQ ID NO: 4002067 - RNA, 16 nt, Human herpesvirus 8 [Kaposi`s sarcoma-associated h
cgaauaaaacaggaag

SEQ ID NO: 4002068 - RNA, 14 nt, Human herpesvirus 8 [Kaposi`s sarcoma-associated h
cgacagcucgggcg

SEQ ID NO: 4002069 - RNA, 13 nt, Human herpesvirus 8 [Kaposi`s sarcoma-associated h
cgacaugugcuuu

SEQ ID NO: 4002070 - RNA, 18 nt, Human herpesvirus 8 [Kaposi`s sarcoma-associated h
cgaccccagccccuuggu

SEQ ID NO: 4002071 - RNA, 18 nt, Human herpesvirus 8 [Kaposi`s sarcoma-associated h
cgagcaccucagaaagug

SEQ ID NO: 4002072 - RNA, 20 nt, Human herpesvirus 8 [Kaposi`s sarcoma-associated h
cgagcucaugcccacccugu

SEQ ID NO: 4002073 - RNA, 18 nt, Human herpesvirus 8 [Kaposi`s sarcoma-associated h
cgcaugguugcaacagac

SEQ ID NO: 4002074 - RNA, 21 nt, Human herpesvirus 8 [Kaposi`s sarcoma-associated h
cgccauuuuuguggcugccug

SEQ ID NO: 4002075 - RNA, 16 nt, Human herpesvirus 8 [Kaposi`s sarcoma-associated h
cgccccuggugggaca

SEQ ID NO: 4002076 - RNA, 16 nt, Human herpesvirus 8 [Kaposi`s sarcoma-associated h
cgccgcaaggagcagc

SEQ ID NO: 4002077 - RNA, 22 nt, Human herpesvirus 8 [Kaposi`s sarcoma-associated h
cgccuggagcagcgccagugga

SEQ ID NO: 4002078 - RNA, 16 nt, Human herpesvirus 8 [Kaposi`s sarcoma-associated h
cgcgaccucccacggg

SEQ ID NO: 4002079 - RNA, 16 nt, Human herpesvirus 8 [Kaposi`s sarcoma-associated h
cgcggauaggcugggg

SEQ ID NO: 4002080 - RNA, 19 nt, Human herpesvirus 8 [Kaposi`s sarcoma-associated h
cggaaguuggccuccagca

SEQ ID NO: 4002081 - RNA, 12 nt, Human herpesvirus 8 [Kaposi`s sarcoma-associated h
cggacauuuugu

SEQ ID NO: 4002082 - RNA, 15 nt, Human herpesvirus 8 [Kaposi`s sarcoma-associated h
cggagccggaagaua

SEQ ID NO: 4002083 - RNA, 20 nt, Human herpesvirus 8 [Kaposi`s sarcoma-associated h
cggauccggagggaaggaag

SEQ ID NO: 4002084 - RNA, 21 nt, Human herpesvirus 8 [Kaposi`s sarcoma-associated h
cggccgcaaucaugccugugg

SEQ ID NO: 4002085 - RNA, 17 nt, Human herpesvirus 8 [Kaposi`s sarcoma-associated h
cgggacguuggcggcga

SEQ ID NO: 4002086 - RNA, 14 nt, Human herpesvirus 8 [Kaposi`s sarcoma-associated h
cgggcugcgccagc

SEQ ID NO: 4002087 - RNA, 21 nt, Human herpesvirus 8 [Kaposi`s sarcoma-associated h
cggguugggucgcugcaccug

SEQ ID NO: 4002088 - RNA, 14 nt, Human herpesvirus 8 [Kaposi`s sarcoma-associated h
cgguggugugccug

SEQ ID NO: 4002089 - RNA, 17 nt, Human herpesvirus 8 [Kaposi`s sarcoma-associated h
cguaagaggacccaggg

SEQ ID NO: 4002090 - RNA, 14 nt, Human herpesvirus 8 [Kaposi`s sarcoma-associated h
cguacaaggccaug

SEQ ID NO: 4002091 - RNA, 14 nt, Human herpesvirus 8 [Kaposi`s sarcoma-associated h
cguaggcgaagaga

SEQ ID NO: 4002092 - RNA, 14 nt, Human herpesvirus 8 [Kaposi`s sarcoma-associated h
cguccgacaugugc

SEQ ID NO: 4002093 - RNA, 14 nt, Human herpesvirus 8 [Kaposi`s sarcoma-associated h
cgucgacagagcca

SEQ ID NO: 4002094 - RNA, 20 nt, Human herpesvirus 8 [Kaposi`s sarcoma-associated h
cgucugugaagucucccugc

SEQ ID NO: 4002095 - RNA, 11 nt, Human herpesvirus 8 [Kaposi`s sarcoma-associated h
cgucuucccac

SEQ ID NO: 4002096 - RNA, 16 nt, Human herpesvirus 8 [Kaposi`s sarcoma-associated h
cgugcuacuuacagca

SEQ ID NO: 4002097 - RNA, 15 nt, Human herpesvirus 8 [Kaposi`s sarcoma-associated h
cgugucuagacaaua

SEQ ID NO: 4002098 - RNA, 19 nt, Human herpesvirus 8 [Kaposi`s sarcoma-associated h
cguguguuuggugguguca

SEQ ID NO: 4002099 - RNA, 16 nt, Human herpesvirus 8 [Kaposi`s sarcoma-associated h
cguugacauguggagc

SEQ ID NO: 4002100 - RNA, 15 nt, Human herpesvirus 8 [Kaposi`s sarcoma-associated h
cguuuaguguggauc

SEQ ID NO: 4002101 - RNA, 16 nt, Human herpesvirus 8 [Kaposi`s sarcoma-associated h
cguuuuuuuauuuggg

SEQ ID NO: 4002102 - RNA, 14 nt, Human herpesvirus 8 [Kaposi`s sarcoma-associated h
cuaaucaggguaga

SEQ ID NO: 4002103 - RNA, 15 nt, Human herpesvirus 8 [Kaposi`s sarcoma-associated h
cuaaucuggcaugua

SEQ ID NO: 4002104 - RNA, 22 nt, Human herpesvirus 8 [Kaposi`s sarcoma-associated h
cuacagggaaguuucagagccu

SEQ ID NO: 4002105 - RNA, 15 nt, Human herpesvirus 8 [Kaposi`s sarcoma-associated h
cuacggaucaugcuc

SEQ ID NO: 4002106 - RNA, 22 nt, Human herpesvirus 8 [Kaposi`s sarcoma-associated h
cuagcggcgagauuggaggcac

SEQ ID NO: 4002107 - RNA, 17 nt, Human herpesvirus 8 [Kaposi`s sarcoma-associated h
cuaugggaaugugccua

SEQ ID NO: 4002108 - RNA, 14 nt, Human herpesvirus 8 [Kaposi`s sarcoma-associated h
cuaugggugaccac

SEQ ID NO: 4002109 - RNA, 20 nt, Human herpesvirus 8 [Kaposi`s sarcoma-associated h
cuauuugccguccuguggac

SEQ ID NO: 4002110 - RNA, 18 nt, Human herpesvirus 8 [Kaposi`s sarcoma-associated h
cucaaccggucgcagugg

SEQ ID NO: 4002111 - RNA, 19 nt, Human herpesvirus 8 [Kaposi`s sarcoma-associated h
cucaagcaacaugcccuuu

SEQ ID NO: 4002112 - RNA, 18 nt, Human herpesvirus 8 [Kaposi`s sarcoma-associated h
cucaugauuacagaguca

SEQ ID NO: 4002113 - RNA, 17 nt, Human herpesvirus 8 [Kaposi`s sarcoma-associated h
cucgaaagcuucaucgu

SEQ ID NO: 4002114 - RNA, 16 nt, Human herpesvirus 8 [Kaposi`s sarcoma-associated h
cucgcaugaauacccu

SEQ ID NO: 4002115 - RNA, 18 nt, Human herpesvirus 8 [Kaposi`s sarcoma-associated h
cucgccucccaacaugua

SEQ ID NO: 4002116 - RNA, 14 nt, Human herpesvirus 8 [Kaposi`s sarcoma-associated h
cucgcuacacggag

SEQ ID NO: 4002117 - RNA, 18 nt, Human herpesvirus 8 [Kaposi`s sarcoma-associated h
cucgggcgcggcgagccc

SEQ ID NO: 4002118 - RNA, 14 nt, Human herpesvirus 8 [Kaposi`s sarcoma-associated h
cucgugugcccuuc

SEQ ID NO: 4002119 - RNA, 17 nt, Human herpesvirus 8 [Kaposi`s sarcoma-associated h
cucuacagguaggccac

SEQ ID NO: 4002120 - RNA, 21 nt, Human herpesvirus 8 [Kaposi`s sarcoma-associated h
cucuaucagcugcagccagga

SEQ ID NO: 4002121 - RNA, 21 nt, Human herpesvirus 8 [Kaposi`s sarcoma-associated h
cucuccggcgguggcggccau

SEQ ID NO: 4002122 - RNA, 17 nt, Human herpesvirus 8 [Kaposi`s sarcoma-associated h
cucuuggcuguuacaau

SEQ ID NO: 4002123 - RNA, 16 nt, Human herpesvirus 8 [Kaposi`s sarcoma-associated h
cugaucucagaggccc

SEQ ID NO: 4002124 - RNA, 21 nt, Human herpesvirus 8 [Kaposi`s sarcoma-associated h
cugaugcucuggccacguugg

SEQ ID NO: 4002125 - RNA, 19 nt, Human herpesvirus 8 [Kaposi`s sarcoma-associated h
cugcaauguacugccauga

SEQ ID NO: 4002126 - RNA, 12 nt, Human herpesvirus 8 [Kaposi`s sarcoma-associated h
cugcagccagga

SEQ ID NO: 4002127 - RNA, 16 nt, Human herpesvirus 8 [Kaposi`s sarcoma-associated h
cugcccugguucuaau

SEQ ID NO: 4002128 - RNA, 17 nt, Human herpesvirus 8 [Kaposi`s sarcoma-associated h
cugcuauuuuucaucug

SEQ ID NO: 4002129 - RNA, 19 nt, Human herpesvirus 8 [Kaposi`s sarcoma-associated h
cugcucuaaauagaacagg

SEQ ID NO: 4002130 - RNA, 23 nt, Human herpesvirus 8 [Kaposi`s sarcoma-associated h
cuggacaaugggaucgaacagaa

SEQ ID NO: 4002131 - RNA, 19 nt, Human herpesvirus 8 [Kaposi`s sarcoma-associated h
cuggauggguuaacagugg

SEQ ID NO: 4002132 - RNA, 12 nt, Human herpesvirus 8 [Kaposi`s sarcoma-associated h
cuggcagggugg

SEQ ID NO: 4002133 - RNA, 19 nt, Human herpesvirus 8 [Kaposi`s sarcoma-associated h
cuggcagggugggaggaag

SEQ ID NO: 4002134 - RNA, 18 nt, Human herpesvirus 8 [Kaposi`s sarcoma-associated h
cuggccugugcccaaauc

SEQ ID NO: 4002135 - RNA, 12 nt, Human herpesvirus 8 [Kaposi`s sarcoma-associated h
cuggcuggcgcu

SEQ ID NO: 4002136 - RNA, 19 nt, Human herpesvirus 8 [Kaposi`s sarcoma-associated h
cugggcgaagaagcgcacc

SEQ ID NO: 4002137 - RNA, 15 nt, Human herpesvirus 8 [Kaposi`s sarcoma-associated h
cuggugggacacacg

SEQ ID NO: 4002138 - RNA, 17 nt, Human herpesvirus 8 [Kaposi`s sarcoma-associated h
cugucagauuucucuau

SEQ ID NO: 4002139 - RNA, 16 nt, Human herpesvirus 8 [Kaposi`s sarcoma-associated h
cugucuacagucacua

SEQ ID NO: 4002140 - RNA, 15 nt, Human herpesvirus 8 [Kaposi`s sarcoma-associated h
cuguucucgccugga

SEQ ID NO: 4002141 - RNA, 15 nt, Human herpesvirus 8 [Kaposi`s sarcoma-associated h
cuguugaaugugauc

SEQ ID NO: 4002142 - RNA, 15 nt, Human herpesvirus 8 [Kaposi`s sarcoma-associated h
cuguuuccagugacc

SEQ ID NO: 4002143 - RNA, 17 nt, Human herpesvirus 8 [Kaposi`s sarcoma-associated h
cuuaguuacgcagaccc

SEQ ID NO: 4002144 - RNA, 19 nt, Human herpesvirus 8 [Kaposi`s sarcoma-associated h
cuucaucguggugcccugc

SEQ ID NO: 4002145 - RNA, 12 nt, Human herpesvirus 8 [Kaposi`s sarcoma-associated h
cuucuguuugaa

SEQ ID NO: 4002146 - RNA, 17 nt, Human herpesvirus 8 [Kaposi`s sarcoma-associated h
cuugauaaucuccugga

SEQ ID NO: 4002147 - RNA, 23 nt, Human herpesvirus 8 [Kaposi`s sarcoma-associated h
cuugcgucuucaccuucuggcuu

SEQ ID NO: 4002148 - RNA, 21 nt, Human herpesvirus 8 [Kaposi`s sarcoma-associated h
cuuggcgcuuagccugccucu

SEQ ID NO: 4002149 - RNA, 20 nt, Human herpesvirus 8 [Kaposi`s sarcoma-associated h
cuuggugugcugauguugua

SEQ ID NO: 4002150 - RNA, 23 nt, Human herpesvirus 8 [Kaposi`s sarcoma-associated h
cuuuacagaucuagcggcgacua

SEQ ID NO: 4002151 - RNA, 23 nt, Human herpesvirus 8 [Kaposi`s sarcoma-associated h
gaaaauggcacacgguuacuagc

SEQ ID NO: 4002152 - RNA, 18 nt, Human herpesvirus 8 [Kaposi`s sarcoma-associated h
gaaacaaagcacuggcug

SEQ ID NO: 4002153 - RNA, 20 nt, Human herpesvirus 8 [Kaposi`s sarcoma-associated h
gaaacuggguguaagcugua

SEQ ID NO: 4002154 - RNA, 23 nt, Human herpesvirus 8 [Kaposi`s sarcoma-associated h
gaacggacaauucugagaaagau

SEQ ID NO: 4002155 - RNA, 20 nt, Human herpesvirus 8 [Kaposi`s sarcoma-associated h
gaacugucgagacaugucac

SEQ ID NO: 4002156 - RNA, 16 nt, Human herpesvirus 8 [Kaposi`s sarcoma-associated h
gaagcaguuucaggac

SEQ ID NO: 4002157 - RNA, 17 nt, Human herpesvirus 8 [Kaposi`s sarcoma-associated h
gaagucucuuggacaag

SEQ ID NO: 4002158 - RNA, 21 nt, Human herpesvirus 8 [Kaposi`s sarcoma-associated h
gaaguucauauucccaccucc

SEQ ID NO: 4002159 - RNA, 22 nt, Human herpesvirus 8 [Kaposi`s sarcoma-associated h
gaauaaaauacguacagaaaac

SEQ ID NO: 4002160 - RNA, 22 nt, Human herpesvirus 8 [Kaposi`s sarcoma-associated h
guuuugcacuauaaauaucauu

SEQ ID NO: 4002161 - RNA, 13 nt, Human herpesvirus 8 [Kaposi`s sarcoma-associated h
guuuugcccugcc

SEQ ID NO: 4002162 - RNA, 19 nt, Human herpesvirus 8 [Kaposi`s sarcoma-associated h
uaaaacggccaaagcaaag

SEQ ID NO: 4002163 - RNA, 16 nt, Human herpesvirus 8 [Kaposi`s sarcoma-associated h
uaaacccacagcccau

SEQ ID NO: 4002164 - RNA, 18 nt, Human herpesvirus 8 [Kaposi`s sarcoma-associated h
uaacaugcaacccucuac

SEQ ID NO: 4002165 - RNA, 17 nt, Human herpesvirus 8 [Kaposi`s sarcoma-associated h
uaacccgcccucgggac

SEQ ID NO: 4002166 - RNA, 20 nt, Human herpesvirus 8 [Kaposi`s sarcoma-associated h
uaacgagguuacugccagac

SEQ ID NO: 4002167 - RNA, 18 nt, Human herpesvirus 8 [Kaposi`s sarcoma-associated h
uaacuguuuacugcuguu

SEQ ID NO: 4002168 - RNA, 17 nt, Human herpesvirus 8 [Kaposi`s sarcoma-associated h
uaacuuuauuacaggua

SEQ ID NO: 4002169 - RNA, 19 nt, Human herpesvirus 8 [Kaposi`s sarcoma-associated h
uaagacaaacaugugggcu

SEQ ID NO: 4002170 - RNA, 18 nt, Human herpesvirus 8 [Kaposi`s sarcoma-associated h
uaauguguuuuauguuua

SEQ ID NO: 4002171 - RNA, 21 nt, Human herpesvirus 8 [Kaposi`s sarcoma-associated h
uacaaauguuuuaugcaaaau

SEQ ID NO: 4002172 - RNA, 21 nt, Human herpesvirus 8 [Kaposi`s sarcoma-associated h
uacaauaaagccgagccacaa

SEQ ID NO: 4002173 - RNA, 14 nt, Human herpesvirus 8 [Kaposi`s sarcoma-associated h
uacaugugucuauc

SEQ ID NO: 4002174 - RNA, 13 nt, Human herpesvirus 8 [Kaposi`s sarcoma-associated h
uacgcguguggga

SEQ ID NO: 4002175 - RNA, 14 nt, Human herpesvirus 8 [Kaposi`s sarcoma-associated h
uacgucccucuugg

SEQ ID NO: 4002176 - RNA, 12 nt, Human herpesvirus 8 [Kaposi`s sarcoma-associated h
uacuagcaccac

SEQ ID NO: 4002177 - RNA, 14 nt, Human herpesvirus 8 [Kaposi`s sarcoma-associated h
uacucaaaugggaa

SEQ ID NO: 4002178 - RNA, 13 nt, Human herpesvirus 8 [Kaposi`s sarcoma-associated h
uacugcuguuacc

SEQ ID NO: 4002179 - RNA, 21 nt, Human herpesvirus 8 [Kaposi`s sarcoma-associated h
uagaucuggauacacuacuua

SEQ ID NO: 4002180 - RNA, 17 nt, Human herpesvirus 8 [Kaposi`s sarcoma-associated h
uagcuaugcccaccguc

SEQ ID NO: 4002181 - RNA, 19 nt, Human herpesvirus 8 [Kaposi`s sarcoma-associated h
uaggccaauacugcccaag

SEQ ID NO: 4002182 - RNA, 16 nt, Human herpesvirus 8 [Kaposi`s sarcoma-associated h
uaggcccaugugggcu

SEQ ID NO: 4002183 - RNA, 13 nt, Human herpesvirus 8 [Kaposi`s sarcoma-associated h
uaguagucagagu

SEQ ID NO: 4002184 - RNA, 18 nt, Human herpesvirus 8 [Kaposi`s sarcoma-associated h
uagucagagucugaaccc

SEQ ID NO: 4002185 - RNA, 23 nt, Human herpesvirus 8 [Kaposi`s sarcoma-associated h
uagugggguggcgcgccacaguc

SEQ ID NO: 4002186 - RNA, 14 nt, Human herpesvirus 8 [Kaposi`s sarcoma-associated h
uaugaaaauacagg

SEQ ID NO: 4002187 - RNA, 19 nt, Human herpesvirus 8 [Kaposi`s sarcoma-associated h
uaugucauuuuuacuuuua

SEQ ID NO: 4002188 - RNA, 21 nt, Human herpesvirus 8 [Kaposi`s sarcoma-associated h
uauuuugaugguguuggacac

SEQ ID NO: 4002189 - RNA, 21 nt, Human herpesvirus 8 [Kaposi`s sarcoma-associated h
ucaaccgucuccgccagggac

SEQ ID NO: 4002190 - RNA, 16 nt, Human herpesvirus 8 [Kaposi`s sarcoma-associated h
ucacccgagccacauc

SEQ ID NO: 4002191 - RNA, 20 nt, Human herpesvirus 8 [Kaposi`s sarcoma-associated h
ucaccggaggaaugguggac

SEQ ID NO: 4002192 - RNA, 14 nt, Human herpesvirus 8 [Kaposi`s sarcoma-associated h
ucaccggggagcuu

SEQ ID NO: 4002193 - RNA, 17 nt, Human herpesvirus 8 [Kaposi`s sarcoma-associated h
ucacgcacuuggcccug

SEQ ID NO: 4002194 - RNA, 16 nt, Human herpesvirus 8 [Kaposi`s sarcoma-associated h
ucacuaguauuguguu

SEQ ID NO: 4002195 - RNA, 14 nt, Human herpesvirus 8 [Kaposi`s sarcoma-associated h
ucacuccauucccg

SEQ ID NO: 4002196 - RNA, 22 nt, Human herpesvirus 8 [Kaposi`s sarcoma-associated h
uccaccgccgcgcaugguguau

SEQ ID NO: 4002197 - RNA, 17 nt, Human herpesvirus 8 [Kaposi`s sarcoma-associated h
uccaccucuuucaucac

SEQ ID NO: 4002198 - RNA, 13 nt, Human herpesvirus 8 [Kaposi`s sarcoma-associated h
uccaugcaggcag

SEQ ID NO: 4002199 - RNA, 21 nt, Human herpesvirus 8 [Kaposi`s sarcoma-associated h
uccgcggaaguaugucguggg

SEQ ID NO: 4002200 - RNA, 22 nt, Human herpesvirus 8 [Kaposi`s sarcoma-associated h
uccuccgggcucacuaguauug

SEQ ID NO: 4002201 - RNA, 19 nt, Human herpesvirus 8 [Kaposi`s sarcoma-associated h
uccuccuaaacguguucau

SEQ ID NO: 4002202 - RNA, 20 nt, Human herpesvirus 8 [Kaposi`s sarcoma-associated h
uccucuaguuuucgggugau

SEQ ID NO: 4002203 - RNA, 22 nt, Human herpesvirus 8 [Kaposi`s sarcoma-associated h
uccucuaucagcugcagccagg

SEQ ID NO: 4002204 - RNA, 19 nt, Human herpesvirus 8 [Kaposi`s sarcoma-associated h
uccuggaugguuccccaga

SEQ ID NO: 4002205 - RNA, 18 nt, Human herpesvirus 8 [Kaposi`s sarcoma-associated h
uccugugauuucucugug

SEQ ID NO: 4002206 - RNA, 13 nt, Human herpesvirus 8 [Kaposi`s sarcoma-associated h
uccugugggcuaa

SEQ ID NO: 4002207 - RNA, 17 nt, Human herpesvirus 8 [Kaposi`s sarcoma-associated h
ucggaaggcacaacucu

SEQ ID NO: 4002208 - RNA, 24 nt, Human herpesvirus 8 [Kaposi`s sarcoma-associated h
ucggauuuugauaugugugcccaa

SEQ ID NO: 4002209 - RNA, 15 nt, Human herpesvirus 8 [Kaposi`s sarcoma-associated h
ucgguucaaccugga

SEQ ID NO: 4002210 - RNA, 23 nt, Human herpesvirus 8 [Kaposi`s sarcoma-associated h
ucguaggccaauacugcccaagu

SEQ ID NO: 4002211 - RNA, 20 nt, Human herpesvirus 8 [Kaposi`s sarcoma-associated h
ucguguucaucgcugcccca

SEQ ID NO: 4002212 - RNA, 20 nt, Human herpesvirus 8 [Kaposi`s sarcoma-associated h
ucuauccaagugcacacucg

SEQ ID NO: 4002213 - RNA, 12 nt, Human herpesvirus 8 [Kaposi`s sarcoma-associated h
ucuccugcucau

SEQ ID NO: 4002214 - RNA, 14 nt, Human herpesvirus 8 [Kaposi`s sarcoma-associated h
ucucgccuggagca

SEQ ID NO: 4002215 - RNA, 19 nt, Human herpesvirus 8 [Kaposi`s sarcoma-associated h
ucugaaacuaccagccauc

SEQ ID NO: 4002216 - RNA, 11 nt, Human herpesvirus 8 [Kaposi`s sarcoma-associated h
ucugguggugg

SEQ ID NO: 4002217 - RNA, 19 nt, Human herpesvirus 8 [Kaposi`s sarcoma-associated h
ucuuacuaagagaacagca

SEQ ID NO: 4002218 - RNA, 22 nt, Human herpesvirus 8 [Kaposi`s sarcoma-associated h
ucuugcgccauuuuuguggcug

SEQ ID NO: 4002219 - RNA, 14 nt, Human herpesvirus 8 [Kaposi`s sarcoma-associated h
ugaaagcaauaaag

SEQ ID NO: 4002220 - RNA, 16 nt, Human herpesvirus 8 [Kaposi`s sarcoma-associated h
ugaaccccguguggga

SEQ ID NO: 4002221 - RNA, 21 nt, Human herpesvirus 8 [Kaposi`s sarcoma-associated h
ugacgcgugucccuuauuuca

SEQ ID NO: 4002222 - RNA, 23 nt, Human herpesvirus 8 [Kaposi`s sarcoma-associated h
ugacgggguaucgccgccagagg

SEQ ID NO: 4002223 - RNA, 22 nt, Human herpesvirus 8 [Kaposi`s sarcoma-associated h
ugacuaggaggaagagcacugu

SEQ ID NO: 4002224 - RNA, 11 nt, Human herpesvirus 8 [Kaposi`s sarcoma-associated h
ugagccagaau

SEQ ID NO: 4002225 - RNA, 12 nt, Human herpesvirus 8 [Kaposi`s sarcoma-associated h
ugagggugagug

SEQ ID NO: 4002226 - RNA, 17 nt, Human herpesvirus 8 [Kaposi`s sarcoma-associated h
ugaguuccacacagauu

SEQ ID NO: 4002227 - RNA, 18 nt, Human herpesvirus 8 [Kaposi`s sarcoma-associated h
ugcaaccugcugcagcug

SEQ ID NO: 4002228 - RNA, 12 nt, Human herpesvirus 8 [Kaposi`s sarcoma-associated h
ugcagccaggaa

SEQ ID NO: 4002229 - RNA, 16 nt, Human herpesvirus 8 [Kaposi`s sarcoma-associated h
ugcaugcucggcaaca

SEQ ID NO: 4002230 - RNA, 22 nt, Human herpesvirus 8 [Kaposi`s sarcoma-associated h
ugccagugggguugggguccag

SEQ ID NO: 4002231 - RNA, 18 nt, Human herpesvirus 8 [Kaposi`s sarcoma-associated h
ugcccuccugggccaggc

SEQ ID NO: 4002232 - RNA, 21 nt, Human herpesvirus 8 [Kaposi`s sarcoma-associated h
ugccgucgucgagcacuccug

SEQ ID NO: 4002233 - RNA, 20 nt, Human herpesvirus 8 [Kaposi`s sarcoma-associated h
ugcgauagggggaugagcca

SEQ ID NO: 4002234 - RNA, 22 nt, Human herpesvirus 8 [Kaposi`s sarcoma-associated h
ugcggguugggucgcugcaccu

SEQ ID NO: 4002235 - RNA, 15 nt, Human herpesvirus 8 [Kaposi`s sarcoma-associated h
ugcgugaacccucac

SEQ ID NO: 4002236 - RNA, 19 nt, Human herpesvirus 8 [Kaposi`s sarcoma-associated h
ugcuaggauucgugcagcc

SEQ ID NO: 4002237 - RNA, 15 nt, Human herpesvirus 8 [Kaposi`s sarcoma-associated h
ugcugaccacggcac

SEQ ID NO: 4002238 - RNA, 18 nt, Human herpesvirus 8 [Kaposi`s sarcoma-associated h
ugcuuccaauugaaggag

SEQ ID NO: 4002239 - RNA, 19 nt, Human herpesvirus 8 [Kaposi`s sarcoma-associated h
acgccaggagcuagcuucc

SEQ ID NO: 4002240 - RNA, 17 nt, Human herpesvirus 8 [Kaposi`s sarcoma-associated h
acgccgauagggcggcc

SEQ ID NO: 4002241 - RNA, 17 nt, Human herpesvirus 8 [Kaposi`s sarcoma-associated h
acgccggcaucguggaa

SEQ ID NO: 4002242 - RNA, 16 nt, Human herpesvirus 8 [Kaposi`s sarcoma-associated h
acgcggauaggcuggg

SEQ ID NO: 4002243 - RNA, 15 nt, Human herpesvirus 8 [Kaposi`s sarcoma-associated h
acgcguuaagaagcc

SEQ ID NO: 4002244 - RNA, 23 nt, Human herpesvirus 8 [Kaposi`s sarcoma-associated h
acgcucaccauccccugguggcu

SEQ ID NO: 4002245 - RNA, 23 nt, Human herpesvirus 8 [Kaposi`s sarcoma-associated h
acgcugucccgugcccaggccgc

SEQ ID NO: 4002246 - RNA, 14 nt, Human herpesvirus 8 [Kaposi`s sarcoma-associated h
acggaucaggcggg

SEQ ID NO: 4002247 - RNA, 21 nt, Human herpesvirus 8 [Kaposi`s sarcoma-associated h
acguggcugaugcucuggcca

SEQ ID NO: 4002248 - RNA, 13 nt, Human herpesvirus 8 [Kaposi`s sarcoma-associated h
acguggugcugcc

SEQ ID NO: 4002249 - RNA, 15 nt, Human herpesvirus 8 [Kaposi`s sarcoma-associated h
acguuagcuucagcu

SEQ ID NO: 4002250 - RNA, 19 nt, Human herpesvirus 8 [Kaposi`s sarcoma-associated h
acguuagcuucagcuucag

SEQ ID NO: 4002251 - RNA, 14 nt, Human herpesvirus 8 [Kaposi`s sarcoma-associated h
acuaaaaaggccac

SEQ ID NO: 4002252 - RNA, 13 nt, Human herpesvirus 8 [Kaposi`s sarcoma-associated h
acuaccagccauc

SEQ ID NO: 4002253 - RNA, 19 nt, Human herpesvirus 8 [Kaposi`s sarcoma-associated h
acuagaauuggagcacuuu

SEQ ID NO: 4002254 - RNA, 18 nt, Human herpesvirus 8 [Kaposi`s sarcoma-associated h
acuaguagucagagucug

SEQ ID NO: 4002255 - RNA, 17 nt, Human herpesvirus 8 [Kaposi`s sarcoma-associated h
acucagcugccaaggca

SEQ ID NO: 4002256 - RNA, 13 nt, Human herpesvirus 8 [Kaposi`s sarcoma-associated h
acucccucaagca

SEQ ID NO: 4002257 - RNA, 17 nt, Human herpesvirus 8 [Kaposi`s sarcoma-associated h
acucguucacacucuuu

SEQ ID NO: 4002258 - RNA, 15 nt, Human herpesvirus 8 [Kaposi`s sarcoma-associated h
acucuucgcugauga

SEQ ID NO: 4002259 - RNA, 21 nt, Human herpesvirus 8 [Kaposi`s sarcoma-associated h
acugcuaggauucgugcagcc

SEQ ID NO: 4002260 - RNA, 18 nt, Human herpesvirus 8 [Kaposi`s sarcoma-associated h
acugcuuguucaggagcu

SEQ ID NO: 4002261 - RNA, 17 nt, Human herpesvirus 8 [Kaposi`s sarcoma-associated h
acugugaaguuuacauu

SEQ ID NO: 4002262 - RNA, 15 nt, Human herpesvirus 8 [Kaposi`s sarcoma-associated h
acuguucuccacgua

SEQ ID NO: 4002263 - RNA, 20 nt, Human herpesvirus 8 [Kaposi`s sarcoma-associated h
acuuaacgugucugaaugug

SEQ ID NO: 4002264 - RNA, 18 nt, Human herpesvirus 8 [Kaposi`s sarcoma-associated h
acuucaccuccagacucu

SEQ ID NO: 4002265 - RNA, 13 nt, Human herpesvirus 8 [Kaposi`s sarcoma-associated h
acuuuauuacagg

SEQ ID NO: 4002266 - RNA, 13 nt, Human herpesvirus 8 [Kaposi`s sarcoma-associated h
agaaaacugucuc

SEQ ID NO: 4002267 - RNA, 12 nt, Human herpesvirus 8 [Kaposi`s sarcoma-associated h
agaacaugcugg

SEQ ID NO: 4002268 - RNA, 22 nt, Human herpesvirus 8 [Kaposi`s sarcoma-associated h
agaaggguggguggggaugggu

SEQ ID NO: 4002269 - RNA, 14 nt, Human herpesvirus 8 [Kaposi`s sarcoma-associated h
agaauggcgugcca

SEQ ID NO: 4002270 - RNA, 13 nt, Human herpesvirus 8 [Kaposi`s sarcoma-associated h
agacaaacacugu

SEQ ID NO: 4002271 - RNA, 18 nt, Human herpesvirus 8 [Kaposi`s sarcoma-associated h
agacuaaaaaggccaccg

SEQ ID NO: 4002272 - RNA, 13 nt, Human herpesvirus 8 [Kaposi`s sarcoma-associated h
agacuuucuaaag

SEQ ID NO: 4002273 - RNA, 12 nt, Human herpesvirus 8 [Kaposi`s sarcoma-associated h
agagccagccug

SEQ ID NO: 4002274 - RNA, 13 nt, Human herpesvirus 8 [Kaposi`s sarcoma-associated h
agagguuggucug

SEQ ID NO: 4002275 - RNA, 20 nt, Human herpesvirus 8 [Kaposi`s sarcoma-associated h
agauaacggugucuaacugc

SEQ ID NO: 4002276 - RNA, 22 nt, Human herpesvirus 8 [Kaposi`s sarcoma-associated h
agauaaucuaaauauucucuau

SEQ ID NO: 4002277 - RNA, 14 nt, Human herpesvirus 8 [Kaposi`s sarcoma-associated h
agauaggagaaauc

SEQ ID NO: 4002278 - RNA, 20 nt, Human herpesvirus 8 [Kaposi`s sarcoma-associated h
agaugaauaugauccuguag

SEQ ID NO: 4002279 - RNA, 14 nt, Human herpesvirus 8 [Kaposi`s sarcoma-associated h
agaugagcaugacu

SEQ ID NO: 4002280 - RNA, 23 nt, Human herpesvirus 8 [Kaposi`s sarcoma-associated h
agcacacugugugguugguggug

SEQ ID NO: 4002281 - RNA, 16 nt, Human herpesvirus 8 [Kaposi`s sarcoma-associated h
agcauaugcugccaag

SEQ ID NO: 4002282 - RNA, 17 nt, Human herpesvirus 8 [Kaposi`s sarcoma-associated h
agcauugucuuaaguac

SEQ ID NO: 4002283 - RNA, 15 nt, Human herpesvirus 8 [Kaposi`s sarcoma-associated h
agccacaaaguacau

SEQ ID NO: 4002284 - RNA, 22 nt, Human herpesvirus 8 [Kaposi`s sarcoma-associated h
agccuaacccacgucacaucac

SEQ ID NO: 4002285 - RNA, 22 nt, Human herpesvirus 8 [Kaposi`s sarcoma-associated h
agccugcaguguggggauuaug

SEQ ID NO: 4002286 - RNA, 20 nt, Human herpesvirus 8 [Kaposi`s sarcoma-associated h
agcgcgcucugucgcucuuc

SEQ ID NO: 4002287 - RNA, 20 nt, Human herpesvirus 8 [Kaposi`s sarcoma-associated h
agcgugucgcccgucacugg

SEQ ID NO: 4002288 - RNA, 22 nt, Human herpesvirus 8 [Kaposi`s sarcoma-associated h
agcguucguguucaucgcugcc

SEQ ID NO: 4002289 - RNA, 15 nt, Human herpesvirus 8 [Kaposi`s sarcoma-associated h
agcuauaggacagaa

SEQ ID NO: 4002290 - RNA, 21 nt, Human herpesvirus 8 [Kaposi`s sarcoma-associated h
agcuccuauugcaacugacca

SEQ ID NO: 4002291 - RNA, 19 nt, Human herpesvirus 8 [Kaposi`s sarcoma-associated h
agcuuaccgcuacuguggg

SEQ ID NO: 4002292 - RNA, 15 nt, Human herpesvirus 8 [Kaposi`s sarcoma-associated h
aggaccuuucugcug

SEQ ID NO: 4002293 - RNA, 16 nt, Human herpesvirus 8 [Kaposi`s sarcoma-associated h
aggacucacugggggu

SEQ ID NO: 4002294 - RNA, 22 nt, Human herpesvirus 8 [Kaposi`s sarcoma-associated h
aggagaaaucccauuugauaua

SEQ ID NO: 4002295 - RNA, 13 nt, Human herpesvirus 8 [Kaposi`s sarcoma-associated h
aggaggagggcag

SEQ ID NO: 4002296 - RNA, 20 nt, Human herpesvirus 8 [Kaposi`s sarcoma-associated h
aggaguggacuuucuccgug

SEQ ID NO: 4002297 - RNA, 16 nt, Human herpesvirus 8 [Kaposi`s sarcoma-associated h
aggauguguguaacuu

SEQ ID NO: 4002298 - RNA, 12 nt, Human herpesvirus 8 [Kaposi`s sarcoma-associated h
aggauuucucgc

SEQ ID NO: 4002299 - RNA, 18 nt, Human herpesvirus 8 [Kaposi`s sarcoma-associated h
aggccaccauuccucucc

SEQ ID NO: 4002300 - RNA, 12 nt, Human herpesvirus 8 [Kaposi`s sarcoma-associated h
aggccugugccc

SEQ ID NO: 4002301 - RNA, 14 nt, Human herpesvirus 8 [Kaposi`s sarcoma-associated h
aggcgccugcgucu

SEQ ID NO: 4002302 - RNA, 18 nt, Human herpesvirus 8 [Kaposi`s sarcoma-associated h
aggcggggaggagggggu

SEQ ID NO: 4002303 - RNA, 13 nt, Human herpesvirus 8 [Kaposi`s sarcoma-associated h
agggaauggccuc

SEQ ID NO: 4002304 - RNA, 16 nt, Human herpesvirus 8 [Kaposi`s sarcoma-associated h
agggcuaugauugcuu

SEQ ID NO: 4002305 - RNA, 16 nt, Human herpesvirus 8 [Kaposi`s sarcoma-associated h
agggucgggugggacg

SEQ ID NO: 4002306 - RNA, 17 nt, Human herpesvirus 8 [Kaposi`s sarcoma-associated h
agggugcggugcugccc

SEQ ID NO: 4002307 - RNA, 16 nt, Human herpesvirus 8 [Kaposi`s sarcoma-associated h
agguccccggaagagu

SEQ ID NO: 4002308 - RNA, 16 nt, Human herpesvirus 8 [Kaposi`s sarcoma-associated h
aggucuccgagcacug

SEQ ID NO: 4002309 - RNA, 17 nt, Human herpesvirus 8 [Kaposi`s sarcoma-associated h
agguugaaagccggggu

SEQ ID NO: 4002310 - RNA, 23 nt, Human herpesvirus 8 [Kaposi`s sarcoma-associated h
aguaagacaaacaugugggcuuc

SEQ ID NO: 4002311 - RNA, 16 nt, Human herpesvirus 8 [Kaposi`s sarcoma-associated h
aguauuaugccaggga

SEQ ID NO: 4002312 - RNA, 20 nt, Human herpesvirus 8 [Kaposi`s sarcoma-associated h
agucugaaccccguguggga

SEQ ID NO: 4002313 - RNA, 13 nt, Human herpesvirus 8 [Kaposi`s sarcoma-associated h
agucuucuuguca

SEQ ID NO: 4002314 - RNA, 16 nt, Human herpesvirus 8 [Kaposi`s sarcoma-associated h
agugcucuuccuccua

SEQ ID NO: 4002315 - RNA, 12 nt, Human herpesvirus 8 [Kaposi`s sarcoma-associated h
auaaaacaggaa

SEQ ID NO: 4002316 - RNA, 17 nt, Human herpesvirus 8 [Kaposi`s sarcoma-associated h
auaaagcgcgaacaaga

SEQ ID NO: 4002317 - RNA, 14 nt, Human herpesvirus 8 [Kaposi`s sarcoma-associated h
auaacauuuuguaa

SEQ ID NO: 4002318 - RNA, 19 nt, Human herpesvirus 8 [Kaposi`s sarcoma-associated h
caagcuugagcuuuucaaa

SEQ ID NO: 4002319 - RNA, 20 nt, Human herpesvirus 8 [Kaposi`s sarcoma-associated h
caagcuugagcuuuucaaag

SEQ ID NO: 4002320 - RNA, 10 nt, Human herpesvirus 8 [Kaposi`s sarcoma-associated h
caaggcccug

SEQ ID NO: 4002321 - RNA, 13 nt, Human herpesvirus 8 [Kaposi`s sarcoma-associated h
caaggcgggccag

SEQ ID NO: 4002322 - RNA, 15 nt, Human herpesvirus 8 [Kaposi`s sarcoma-associated h
caauaaacccacagc

SEQ ID NO: 4002323 - RNA, 20 nt, Human herpesvirus 8 [Kaposi`s sarcoma-associated h
caauacuuaagucccugaag

SEQ ID NO: 4002324 - RNA, 15 nt, Human herpesvirus 8 [Kaposi`s sarcoma-associated h
caauagcgcugucau

SEQ ID NO: 4002325 - RNA, 14 nt, Human herpesvirus 8 [Kaposi`s sarcoma-associated h
cacaaaacugccaa

SEQ ID NO: 4002326 - RNA, 22 nt, Human herpesvirus 8 [Kaposi`s sarcoma-associated h
cacagagucuacgugccagugg

SEQ ID NO: 4002327 - RNA, 16 nt, Human herpesvirus 8 [Kaposi`s sarcoma-associated h
cacagucgagccgcca

SEQ ID NO: 4002328 - RNA, 22 nt, Human herpesvirus 8 [Kaposi`s sarcoma-associated h
cacauuuccacccaccuacuuc

SEQ ID NO: 4002329 - RNA, 16 nt, Human herpesvirus 8 [Kaposi`s sarcoma-associated h
caccgaaccaggcaac

SEQ ID NO: 4002330 - RNA, 20 nt, Human herpesvirus 8 [Kaposi`s sarcoma-associated h
cacgacauuucgccaauuau

SEQ ID NO: 4002331 - RNA, 18 nt, Human herpesvirus 8 [Kaposi`s sarcoma-associated h
cacgcccgggggccagga

SEQ ID NO: 4002332 - RNA, 17 nt, Human herpesvirus 8 [Kaposi`s sarcoma-associated h
cacggaaggcaguggag

SEQ ID NO: 4002333 - RNA, 17 nt, Human herpesvirus 8 [Kaposi`s sarcoma-associated h
cacggugcacugaagcg

SEQ ID NO: 4002334 - RNA, 20 nt, Human herpesvirus 8 [Kaposi`s sarcoma-associated h
cacgguggcccugccuagug

SEQ ID NO: 4002335 - RNA, 15 nt, Human herpesvirus 8 [Kaposi`s sarcoma-associated h
cagaagagcauuuuu

SEQ ID NO: 4002336 - RNA, 17 nt, Human herpesvirus 8 [Kaposi`s sarcoma-associated h
cagaguccgccaucacc

SEQ ID NO: 4002337 - RNA, 16 nt, Human herpesvirus 8 [Kaposi`s sarcoma-associated h
cagaugaucccgccuu

SEQ ID NO: 4002338 - RNA, 14 nt, Human herpesvirus 8 [Kaposi`s sarcoma-associated h
caggccaagaucca

SEQ ID NO: 4002339 - RNA, 18 nt, Human herpesvirus 8 [Kaposi`s sarcoma-associated h
caggccaagauccaaccc

SEQ ID NO: 4002340 - RNA, 22 nt, Human herpesvirus 8 [Kaposi`s sarcoma-associated h
caggccaagauccaacccagca

SEQ ID NO: 4002341 - RNA, 19 nt, Human herpesvirus 8 [Kaposi`s sarcoma-associated h
caggcccucuucuguugcc

SEQ ID NO: 4002342 - RNA, 14 nt, Human herpesvirus 8 [Kaposi`s sarcoma-associated h
caguaaugcugccc

SEQ ID NO: 4002343 - RNA, 17 nt, Human herpesvirus 8 [Kaposi`s sarcoma-associated h
caguauuaugccaggga

SEQ ID NO: 4002344 - RNA, 19 nt, Human herpesvirus 8 [Kaposi`s sarcoma-associated h
cagucuaucgucuccagau

SEQ ID NO: 4002345 - RNA, 16 nt, Human herpesvirus 8 [Kaposi`s sarcoma-associated h
cagugaguccuggccc

SEQ ID NO: 4002346 - RNA, 17 nt, Human herpesvirus 8 [Kaposi`s sarcoma-associated h
cagugaguccuggcccc

SEQ ID NO: 4002347 - RNA, 17 nt, Human herpesvirus 8 [Kaposi`s sarcoma-associated h
cauauggcgcaggaguc

SEQ ID NO: 4002348 - RNA, 11 nt, Human herpesvirus 8 [Kaposi`s sarcoma-associated h
caucagagaug

SEQ ID NO: 4002349 - RNA, 11 nt, Human herpesvirus 8 [Kaposi`s sarcoma-associated h
caucagcggca

SEQ ID NO: 4002350 - RNA, 16 nt, Human herpesvirus 8 [Kaposi`s sarcoma-associated h
caucgcucaaacucau

SEQ ID NO: 4002351 - RNA, 14 nt, Human herpesvirus 8 [Kaposi`s sarcoma-associated h
caugaugcagagag

SEQ ID NO: 4002352 - RNA, 14 nt, Human herpesvirus 8 [Kaposi`s sarcoma-associated h
caugccgucagggc

SEQ ID NO: 4002353 - RNA, 19 nt, Human herpesvirus 8 [Kaposi`s sarcoma-associated h
caugcucucaccgcacccc

SEQ ID NO: 4002354 - RNA, 16 nt, Human herpesvirus 8 [Kaposi`s sarcoma-associated h
cauggcaaaaaacacu

SEQ ID NO: 4002355 - RNA, 19 nt, Human herpesvirus 8 [Kaposi`s sarcoma-associated h
cauggcuuacaacuauuuc

SEQ ID NO: 4002356 - RNA, 21 nt, Human herpesvirus 8 [Kaposi`s sarcoma-associated h
caugggaccguguguggcugu

SEQ ID NO: 4002357 - RNA, 20 nt, Human herpesvirus 8 [Kaposi`s sarcoma-associated h
caugucuguccggacauuuu

SEQ ID NO: 4002358 - RNA, 14 nt, Human herpesvirus 8 [Kaposi`s sarcoma-associated h
cauuaaaaggacau

SEQ ID NO: 4002359 - RNA, 19 nt, Human herpesvirus 8 [Kaposi`s sarcoma-associated h
ccaagaucuuccagucucc

SEQ ID NO: 4002360 - RNA, 17 nt, Human herpesvirus 8 [Kaposi`s sarcoma-associated h
ccaaucacgggaggcuu

SEQ ID NO: 4002361 - RNA, 13 nt, Human herpesvirus 8 [Kaposi`s sarcoma-associated h
ccacagcaucccc

SEQ ID NO: 4002362 - RNA, 20 nt, Human herpesvirus 8 [Kaposi`s sarcoma-associated h
ccacaggacaagcugaugug

SEQ ID NO: 4002363 - RNA, 18 nt, Human herpesvirus 8 [Kaposi`s sarcoma-associated h
ccacauaauuggaugggg

SEQ ID NO: 4002364 - RNA, 19 nt, Human herpesvirus 8 [Kaposi`s sarcoma-associated h
ccacauuucccccaucguc

SEQ ID NO: 4002365 - RNA, 12 nt, Human herpesvirus 8 [Kaposi`s sarcoma-associated h
ccacgcuaugug

SEQ ID NO: 4002366 - RNA, 16 nt, Human herpesvirus 8 [Kaposi`s sarcoma-associated h
ccacggugcacugaag

SEQ ID NO: 4002367 - RNA, 13 nt, Human herpesvirus 8 [Kaposi`s sarcoma-associated h
ccacgguggcccu

SEQ ID NO: 4002368 - RNA, 17 nt, Human herpesvirus 8 [Kaposi`s sarcoma-associated h
ccacguggugcugccua

SEQ ID NO: 4002369 - RNA, 15 nt, Human herpesvirus 8 [Kaposi`s sarcoma-associated h
ccagaaugaaggaca

SEQ ID NO: 4002370 - RNA, 17 nt, Human herpesvirus 8 [Kaposi`s sarcoma-associated h
ccagauuuaagauuaag

SEQ ID NO: 4002371 - RNA, 13 nt, Human herpesvirus 8 [Kaposi`s sarcoma-associated h
ccagcaaagcaca

SEQ ID NO: 4002372 - RNA, 17 nt, Human herpesvirus 8 [Kaposi`s sarcoma-associated h
ccagccgcgcgaccucc

SEQ ID NO: 4002373 - RNA, 15 nt, Human herpesvirus 8 [Kaposi`s sarcoma-associated h
ccaggaaguucaaug

SEQ ID NO: 4002374 - RNA, 23 nt, Human herpesvirus 8 [Kaposi`s sarcoma-associated h
ccaggccaccauuccucuccgca

SEQ ID NO: 4002375 - RNA, 17 nt, Human herpesvirus 8 [Kaposi`s sarcoma-associated h
ccaguauuaugccaggg

SEQ ID NO: 4002376 - RNA, 18 nt, Human herpesvirus 8 [Kaposi`s sarcoma-associated h
ccagugccucagcaacug

SEQ ID NO: 4002377 - RNA, 15 nt, Human herpesvirus 8 [Kaposi`s sarcoma-associated h
ccagugggguugggg

SEQ ID NO: 4002378 - RNA, 19 nt, Human herpesvirus 8 [Kaposi`s sarcoma-associated h
ccauccccccaccccucau

SEQ ID NO: 4002379 - RNA, 14 nt, Human herpesvirus 8 [Kaposi`s sarcoma-associated h
ccauccgcgagcca

SEQ ID NO: 4002380 - RNA, 17 nt, Human herpesvirus 8 [Kaposi`s sarcoma-associated h
ccaugggugcuggugug

SEQ ID NO: 4002381 - RNA, 12 nt, Human herpesvirus 8 [Kaposi`s sarcoma-associated h
ccaugguaccau

SEQ ID NO: 4002382 - RNA, 22 nt, Human herpesvirus 8 [Kaposi`s sarcoma-associated h
ccauuuuccaaggccugugccc

SEQ ID NO: 4002383 - RNA, 22 nt, Human herpesvirus 8 [Kaposi`s sarcoma-associated h
cccagugaguccuggcccccgg

SEQ ID NO: 4002384 - RNA, 14 nt, Human herpesvirus 8 [Kaposi`s sarcoma-associated h
cccauagccaucca

SEQ ID NO: 4002385 - RNA, 13 nt, Human herpesvirus 8 [Kaposi`s sarcoma-associated h
cccaugugggcuu

SEQ ID NO: 4002386 - RNA, 15 nt, Human herpesvirus 8 [Kaposi`s sarcoma-associated h
cccgauggcccuuca

SEQ ID NO: 4002387 - RNA, 16 nt, Human herpesvirus 8 [Kaposi`s sarcoma-associated h
cccgugauccaggagc

SEQ ID NO: 4002388 - RNA, 17 nt, Human herpesvirus 8 [Kaposi`s sarcoma-associated h
cccgugcguuugcagug

SEQ ID NO: 4002389 - RNA, 18 nt, Human herpesvirus 8 [Kaposi`s sarcoma-associated h
cccguuguggcaccugag

SEQ ID NO: 4002390 - RNA, 13 nt, Human herpesvirus 8 [Kaposi`s sarcoma-associated h
cccuagaagccac

SEQ ID NO: 4002391 - RNA, 22 nt, Human herpesvirus 8 [Kaposi`s sarcoma-associated h
cccugaaaugaucguccacgga

SEQ ID NO: 4002392 - RNA, 21 nt, Human herpesvirus 8 [Kaposi`s sarcoma-associated h
cccuucauaccgggucugugc

SEQ ID NO: 4002393 - RNA, 16 nt, Human herpesvirus 8 [Kaposi`s sarcoma-associated h
ccgaggacacgccauc

SEQ ID NO: 4002394 - RNA, 23 nt, Human herpesvirus 8 [Kaposi`s sarcoma-associated h
ccggguuguuugugggacacggu

SEQ ID NO: 4002395 - RNA, 18 nt, Human herpesvirus 8 [Kaposi`s sarcoma-associated h
ccgucagggcccacggug

SEQ ID NO: 4002396 - RNA, 17 nt, Human herpesvirus 8 [Kaposi`s sarcoma-associated h
ccuaaguggauuuccuu

SEQ ID NO: 4002397 - RNA, 21 nt, Human herpesvirus 8 [Kaposi`s sarcoma-associated h
cuggugaggaagcaucugguc

SEQ ID NO: 4002398 - RNA, 18 nt, Human herpesvirus 8 [Kaposi`s sarcoma-associated h
cugguggaacaugcugcc

SEQ ID NO: 4002399 - RNA, 18 nt, Human herpesvirus 8 [Kaposi`s sarcoma-associated h
cugucaaccuccuccggg

SEQ ID NO: 4002400 - RNA, 16 nt, Human herpesvirus 8 [Kaposi`s sarcoma-associated h
cugugaagucucccug

SEQ ID NO: 4002401 - RNA, 15 nt, Human herpesvirus 8 [Kaposi`s sarcoma-associated h
cugugaaguuuacau

SEQ ID NO: 4002402 - RNA, 16 nt, Human herpesvirus 8 [Kaposi`s sarcoma-associated h
cuguucuaccagguag

SEQ ID NO: 4002403 - RNA, 16 nt, Human herpesvirus 8 [Kaposi`s sarcoma-associated h
cuuacaacuauuuccu

SEQ ID NO: 4002404 - RNA, 19 nt, Human herpesvirus 8 [Kaposi`s sarcoma-associated h
cuucauucucuccacuaga

SEQ ID NO: 4002405 - RNA, 21 nt, Human herpesvirus 8 [Kaposi`s sarcoma-associated h
cuuccucuaaggcccccacca

SEQ ID NO: 4002406 - RNA, 18 nt, Human herpesvirus 8 [Kaposi`s sarcoma-associated h
cuugauaaucuccuggag

SEQ ID NO: 4002407 - RNA, 22 nt, Human herpesvirus 8 [Kaposi`s sarcoma-associated h
cuuuaucaugugaacaauaaac

SEQ ID NO: 4002408 - RNA, 14 nt, Human herpesvirus 8 [Kaposi`s sarcoma-associated h
cuuugcagccaggu

SEQ ID NO: 4002409 - RNA, 15 nt, Human herpesvirus 8 [Kaposi`s sarcoma-associated h
cuuugcagugucuau

SEQ ID NO: 4002410 - RNA, 12 nt, Human herpesvirus 8 [Kaposi`s sarcoma-associated h
cuuuuauugugg

SEQ ID NO: 4002411 - RNA, 21 nt, Human herpesvirus 8 [Kaposi`s sarcoma-associated h
gaaaacagucuguaaagaaag

SEQ ID NO: 4002412 - RNA, 17 nt, Human herpesvirus 8 [Kaposi`s sarcoma-associated h
gaaccagaaucaguggu

SEQ ID NO: 4002413 - RNA, 12 nt, Human herpesvirus 8 [Kaposi`s sarcoma-associated h
gaacggacaauu

SEQ ID NO: 4002414 - RNA, 18 nt, Human herpesvirus 8 [Kaposi`s sarcoma-associated h
gaagcaaagugucucacc

SEQ ID NO: 4002415 - RNA, 12 nt, Human herpesvirus 8 [Kaposi`s sarcoma-associated h
gaagcccuugag

SEQ ID NO: 4002416 - RNA, 17 nt, Human herpesvirus 8 [Kaposi`s sarcoma-associated h
gaagccgagcucgggac

SEQ ID NO: 4002417 - RNA, 13 nt, Human herpesvirus 8 [Kaposi`s sarcoma-associated h
gaagcgaaaagcc

SEQ ID NO: 4002418 - RNA, 20 nt, Human herpesvirus 8 [Kaposi`s sarcoma-associated h
gaagcggguuggacuggcag

SEQ ID NO: 4002419 - RNA, 15 nt, Human herpesvirus 8 [Kaposi`s sarcoma-associated h
gaaucaaugugguuc

SEQ ID NO: 4002420 - RNA, 23 nt, Human herpesvirus 8 [Kaposi`s sarcoma-associated h
gaaugaagugcaaccugcugcag

SEQ ID NO: 4002421 - RNA, 23 nt, Human herpesvirus 8 [Kaposi`s sarcoma-associated h
gaaugguaccauggcaaaaaaca

SEQ ID NO: 4002422 - RNA, 20 nt, Human herpesvirus 8 [Kaposi`s sarcoma-associated h
gaauuguuauccggcagcaa

SEQ ID NO: 4002423 - RNA, 15 nt, Human herpesvirus 8 [Kaposi`s sarcoma-associated h
gacaaaugugugggu

SEQ ID NO: 4002424 - RNA, 19 nt, Human herpesvirus 8 [Kaposi`s sarcoma-associated h
gacacugauguguuuggga

SEQ ID NO: 4002425 - RNA, 21 nt, Human herpesvirus 8 [Kaposi`s sarcoma-associated h
gacagggcuaugauugcuucu

SEQ ID NO: 4002426 - RNA, 15 nt, Human herpesvirus 8 [Kaposi`s sarcoma-associated h
gacccuagucacucc

SEQ ID NO: 4002427 - RNA, 13 nt, Human herpesvirus 8 [Kaposi`s sarcoma-associated h
gaccucccacggg

SEQ ID NO: 4002428 - RNA, 15 nt, Human herpesvirus 8 [Kaposi`s sarcoma-associated h
gaccugucgaggaag

SEQ ID NO: 4002429 - RNA, 19 nt, Human herpesvirus 8 [Kaposi`s sarcoma-associated h
gacgauguucaggaggaag

SEQ ID NO: 4002430 - RNA, 21 nt, Human herpesvirus 8 [Kaposi`s sarcoma-associated h
gacgcaucgucgcgccuggcg

SEQ ID NO: 4002431 - RNA, 13 nt, Human herpesvirus 8 [Kaposi`s sarcoma-associated h
gacucucaagcag

SEQ ID NO: 4002432 - RNA, 18 nt, Human herpesvirus 8 [Kaposi`s sarcoma-associated h
gacuggugcgcacaggcc

SEQ ID NO: 4002433 - RNA, 13 nt, Human herpesvirus 8 [Kaposi`s sarcoma-associated h
gagaacagcacau

SEQ ID NO: 4002434 - RNA, 18 nt, Human herpesvirus 8 [Kaposi`s sarcoma-associated h
gagagcuggagggcacag

SEQ ID NO: 4002435 - RNA, 20 nt, Human herpesvirus 8 [Kaposi`s sarcoma-associated h
gagcauuuuucccuccugca

SEQ ID NO: 4002436 - RNA, 23 nt, Human herpesvirus 8 [Kaposi`s sarcoma-associated h
gagccgcgcuuuuuaacuucuga

SEQ ID NO: 4002437 - RNA, 14 nt, Human herpesvirus 8 [Kaposi`s sarcoma-associated h
gagccuucacggca

SEQ ID NO: 4002438 - RNA, 15 nt, Human herpesvirus 8 [Kaposi`s sarcoma-associated h
gagcgagugugccuc

SEQ ID NO: 4002439 - RNA, 16 nt, Human herpesvirus 8 [Kaposi`s sarcoma-associated h
gagcggacgccauuug

SEQ ID NO: 4002440 - RNA, 12 nt, Human herpesvirus 8 [Kaposi`s sarcoma-associated h
gaggauggugcu

SEQ ID NO: 4002441 - RNA, 15 nt, Human herpesvirus 8 [Kaposi`s sarcoma-associated h
gaggcuaggugccca

SEQ ID NO: 4002442 - RNA, 12 nt, Human herpesvirus 8 [Kaposi`s sarcoma-associated h
gagggaucccag

SEQ ID NO: 4002443 - RNA, 21 nt, Human herpesvirus 8 [Kaposi`s sarcoma-associated h
gagggcuccucgucuguguca

SEQ ID NO: 4002444 - RNA, 18 nt, Human herpesvirus 8 [Kaposi`s sarcoma-associated h
gaguccauggcaguggac

SEQ ID NO: 4002445 - RNA, 23 nt, Human herpesvirus 8 [Kaposi`s sarcoma-associated h
gagugucaguaaaauaaaauaca

SEQ ID NO: 4002446 - RNA, 16 nt, Human herpesvirus 8 [Kaposi`s sarcoma-associated h
gauaaucuccuggaga

SEQ ID NO: 4002447 - RNA, 21 nt, Human herpesvirus 8 [Kaposi`s sarcoma-associated h
gaucucagaggcccauauuac

SEQ ID NO: 4002448 - RNA, 19 nt, Human herpesvirus 8 [Kaposi`s sarcoma-associated h
gauuugccccauggggauc

SEQ ID NO: 4002449 - RNA, 16 nt, Human herpesvirus 8 [Kaposi`s sarcoma-associated h
gcaaccugcugcagcu

SEQ ID NO: 4002450 - RNA, 14 nt, Human herpesvirus 8 [Kaposi`s sarcoma-associated h
gcaaggcgggccag

SEQ ID NO: 4002451 - RNA, 14 nt, Human herpesvirus 8 [Kaposi`s sarcoma-associated h
gcaauaaagacaaa

SEQ ID NO: 4002452 - RNA, 14 nt, Human herpesvirus 8 [Kaposi`s sarcoma-associated h
gcacacagacacaa

SEQ ID NO: 4002453 - RNA, 21 nt, Human herpesvirus 8 [Kaposi`s sarcoma-associated h
gcaccaagguaggccagcugc

SEQ ID NO: 4002454 - RNA, 17 nt, Human herpesvirus 8 [Kaposi`s sarcoma-associated h
gcacuauaaauaucauu

SEQ ID NO: 4002455 - RNA, 13 nt, Human herpesvirus 8 [Kaposi`s sarcoma-associated h
gcacuuuuggaaa

SEQ ID NO: 4002456 - RNA, 15 nt, Human herpesvirus 8 [Kaposi`s sarcoma-associated h
gcagacgaccccccg

SEQ ID NO: 4002457 - RNA, 18 nt, Human herpesvirus 8 [Kaposi`s sarcoma-associated h
gcagcaguagacgcaggc

SEQ ID NO: 4002458 - RNA, 19 nt, Human herpesvirus 8 [Kaposi`s sarcoma-associated h
gcagccagguaacaaagcc

SEQ ID NO: 4002459 - RNA, 23 nt, Human herpesvirus 8 [Kaposi`s sarcoma-associated h
gcagugcacgcaccaggauccag

SEQ ID NO: 4002460 - RNA, 14 nt, Human herpesvirus 8 [Kaposi`s sarcoma-associated h
gcaguggacacagu

SEQ ID NO: 4002461 - RNA, 13 nt, Human herpesvirus 8 [Kaposi`s sarcoma-associated h
gcagugugcagua

SEQ ID NO: 4002462 - RNA, 18 nt, Human herpesvirus 8 [Kaposi`s sarcoma-associated h
gcaguguuugcugcugua

SEQ ID NO: 4002463 - RNA, 23 nt, Human herpesvirus 8 [Kaposi`s sarcoma-associated h
gcauccuaucgcacagacacgag

SEQ ID NO: 4002464 - RNA, 22 nt, Human herpesvirus 8 [Kaposi`s sarcoma-associated h
gcaucgucgcgccuggcgugau

SEQ ID NO: 4002465 - RNA, 20 nt, Human herpesvirus 8 [Kaposi`s sarcoma-associated h
gcaugugguuaagcuuugca

SEQ ID NO: 4002466 - RNA, 17 nt, Human herpesvirus 8 [Kaposi`s sarcoma-associated h
gcauuuuucccuccugc

SEQ ID NO: 4002467 - RNA, 15 nt, Human herpesvirus 8 [Kaposi`s sarcoma-associated h
gccaacccucagugu

SEQ ID NO: 4002468 - RNA, 23 nt, Human herpesvirus 8 [Kaposi`s sarcoma-associated h
gccacagucgagccgccaggaac

SEQ ID NO: 4002469 - RNA, 16 nt, Human herpesvirus 8 [Kaposi`s sarcoma-associated h
gccaccgagaaggaag

SEQ ID NO: 4002470 - RNA, 16 nt, Human herpesvirus 8 [Kaposi`s sarcoma-associated h
gccacguggagccaac

SEQ ID NO: 4002471 - RNA, 19 nt, Human herpesvirus 8 [Kaposi`s sarcoma-associated h
gccagaaagacacaugaga

SEQ ID NO: 4002472 - RNA, 14 nt, Human herpesvirus 8 [Kaposi`s sarcoma-associated h
gccagauccuccac

SEQ ID NO: 4002473 - RNA, 19 nt, Human herpesvirus 8 [Kaposi`s sarcoma-associated h
gccagcaaccccucuggau

SEQ ID NO: 4002474 - RNA, 21 nt, Human herpesvirus 8 [Kaposi`s sarcoma-associated h
gccauggcggggcggcugugg

SEQ ID NO: 4002475 - RNA, 17 nt, Human herpesvirus 8 [Kaposi`s sarcoma-associated h
gccauucgcaccaggac

SEQ ID NO: 4002476 - RNA, 20 nt, Human herpesvirus 8 [Kaposi`s sarcoma-associated h
gucgccgguagcugccuggu

SEQ ID NO: 4002477 - RNA, 15 nt, Human herpesvirus 8 [Kaposi`s sarcoma-associated h
gucgcuggcgcaggc

SEQ ID NO: 4002478 - RNA, 14 nt, Human herpesvirus 8 [Kaposi`s sarcoma-associated h
gucuaccugccgga

SEQ ID NO: 4002479 - RNA, 21 nt, Human herpesvirus 8 [Kaposi`s sarcoma-associated h
gucuagcacacacgaugaaga

SEQ ID NO: 4002480 - RNA, 17 nt, Human herpesvirus 8 [Kaposi`s sarcoma-associated h
gugacggugacauugca

SEQ ID NO: 4002481 - RNA, 13 nt, Human herpesvirus 8 [Kaposi`s sarcoma-associated h
gugagagaccccg

SEQ ID NO: 4002482 - RNA, 17 nt, Human herpesvirus 8 [Kaposi`s sarcoma-associated h
gugagagaccccgugau

SEQ ID NO: 4002483 - RNA, 20 nt, Human herpesvirus 8 [Kaposi`s sarcoma-associated h
gugagccuaacccacgucac

SEQ ID NO: 4002484 - RNA, 13 nt, Human herpesvirus 8 [Kaposi`s sarcoma-associated h
gugaucucuggag

SEQ ID NO: 4002485 - RNA, 16 nt, Human herpesvirus 8 [Kaposi`s sarcoma-associated h
guggagcacgaagaca

SEQ ID NO: 4002486 - RNA, 15 nt, Human herpesvirus 8 [Kaposi`s sarcoma-associated h
guggaugagaggguu

SEQ ID NO: 4002487 - RNA, 18 nt, Human herpesvirus 8 [Kaposi`s sarcoma-associated h
guggauuuccuuucugag

SEQ ID NO: 4002488 - RNA, 14 nt, Human herpesvirus 8 [Kaposi`s sarcoma-associated h
guggauuuuaugga

SEQ ID NO: 4002489 - RNA, 23 nt, Human herpesvirus 8 [Kaposi`s sarcoma-associated h
gugguagagaccgacgccaucaa

SEQ ID NO: 4002490 - RNA, 23 nt, Human herpesvirus 8 [Kaposi`s sarcoma-associated h
gugucauugccacccagcuacug

SEQ ID NO: 4002491 - RNA, 22 nt, Human herpesvirus 8 [Kaposi`s sarcoma-associated h
guuagcgccaccguguggcugc

SEQ ID NO: 4002492 - RNA, 13 nt, Human herpesvirus 8 [Kaposi`s sarcoma-associated h
guucaucagccuc

SEQ ID NO: 4002493 - RNA, 15 nt, Human herpesvirus 8 [Kaposi`s sarcoma-associated h
guucccaugagccuc

SEQ ID NO: 4002494 - RNA, 21 nt, Human herpesvirus 8 [Kaposi`s sarcoma-associated h
guugagagucagagaauacag

SEQ ID NO: 4002495 - RNA, 18 nt, Human herpesvirus 8 [Kaposi`s sarcoma-associated h
guugcugauuacgaaaag

SEQ ID NO: 4002496 - RNA, 21 nt, Human herpesvirus 8 [Kaposi`s sarcoma-associated h
guuguagugguggcagaaaau

SEQ ID NO: 4002497 - RNA, 16 nt, Human herpesvirus 8 [Kaposi`s sarcoma-associated h
guuucgucgauuucac

SEQ ID NO: 4002498 - RNA, 17 nt, Human herpesvirus 8 [Kaposi`s sarcoma-associated h
uaaaagagagaauuaga

SEQ ID NO: 4002499 - RNA, 18 nt, Human herpesvirus 8 [Kaposi`s sarcoma-associated h
uaaaagccugguccaggc

SEQ ID NO: 4002500 - RNA, 21 nt, Human herpesvirus 8 [Kaposi`s sarcoma-associated h
uaaacagccuuggugcuaggc

SEQ ID NO: 4002501 - RNA, 22 nt, Human herpesvirus 8 [Kaposi`s sarcoma-associated h
uaaacauacguuuugaacaaug

SEQ ID NO: 4002502 - RNA, 18 nt, Human herpesvirus 8 [Kaposi`s sarcoma-associated h
uaaagauuaacugucuac

SEQ ID NO: 4002503 - RNA, 21 nt, Human herpesvirus 8 [Kaposi`s sarcoma-associated h
uaacauaauuguaauguguuu

SEQ ID NO: 4002504 - RNA, 19 nt, Human herpesvirus 8 [Kaposi`s sarcoma-associated h
uaaccagcuacgcacugag

SEQ ID NO: 4002505 - RNA, 20 nt, Human herpesvirus 8 [Kaposi`s sarcoma-associated h
uaacccgcuccgccacgcag

SEQ ID NO: 4002506 - RNA, 23 nt, Human herpesvirus 8 [Kaposi`s sarcoma-associated h
uaagaguuccccgggaacggaca

SEQ ID NO: 4002507 - RNA, 15 nt, Human herpesvirus 8 [Kaposi`s sarcoma-associated h
uaagauaaucuaaau

SEQ ID NO: 4002508 - RNA, 16 nt, Human herpesvirus 8 [Kaposi`s sarcoma-associated h
uaagauuauaaugggu

SEQ ID NO: 4002509 - RNA, 17 nt, Human herpesvirus 8 [Kaposi`s sarcoma-associated h
uaaucuaaauauucucu

SEQ ID NO: 4002510 - RNA, 13 nt, Human herpesvirus 8 [Kaposi`s sarcoma-associated h
uaaugcagacaga

SEQ ID NO: 4002511 - RNA, 23 nt, Human herpesvirus 8 [Kaposi`s sarcoma-associated h
uacauccaaauuaugcaguaucu

SEQ ID NO: 4002512 - RNA, 16 nt, Human herpesvirus 8 [Kaposi`s sarcoma-associated h
uacgaggcaauugcca

SEQ ID NO: 4002513 - RNA, 16 nt, Human herpesvirus 8 [Kaposi`s sarcoma-associated h
uacguauuagacguac

SEQ ID NO: 4002514 - RNA, 19 nt, Human herpesvirus 8 [Kaposi`s sarcoma-associated h
uacgucccucuuggcuguu

SEQ ID NO: 4002515 - RNA, 21 nt, Human herpesvirus 8 [Kaposi`s sarcoma-associated h
uacuagugagcccggaggagg

SEQ ID NO: 4002516 - RNA, 15 nt, Human herpesvirus 8 [Kaposi`s sarcoma-associated h
uacugguaccagaga

SEQ ID NO: 4002517 - RNA, 13 nt, Human herpesvirus 8 [Kaposi`s sarcoma-associated h
uacuguccauuac

SEQ ID NO: 4002518 - RNA, 19 nt, Human herpesvirus 8 [Kaposi`s sarcoma-associated h
uacugugaaguuuacauua

SEQ ID NO: 4002519 - RNA, 20 nt, Human herpesvirus 8 [Kaposi`s sarcoma-associated h
uagaugcgcuggaagagaau

SEQ ID NO: 4002520 - RNA, 15 nt, Human herpesvirus 8 [Kaposi`s sarcoma-associated h
uagcagaguguccag

SEQ ID NO: 4002521 - RNA, 21 nt, Human herpesvirus 8 [Kaposi`s sarcoma-associated h
uagcagcugucccggauccag

SEQ ID NO: 4002522 - RNA, 18 nt, Human herpesvirus 8 [Kaposi`s sarcoma-associated h
uagcagucgccaguuuuu

SEQ ID NO: 4002523 - RNA, 16 nt, Human herpesvirus 8 [Kaposi`s sarcoma-associated h
uaggauucgugcagcc

SEQ ID NO: 4002524 - RNA, 11 nt, Human herpesvirus 8 [Kaposi`s sarcoma-associated h
uaggugucaag

SEQ ID NO: 4002525 - RNA, 15 nt, Human herpesvirus 8 [Kaposi`s sarcoma-associated h
uaucagcugcagcca

SEQ ID NO: 4002526 - RNA, 18 nt, Human herpesvirus 8 [Kaposi`s sarcoma-associated h
uaugcaugugucugugcc

SEQ ID NO: 4002527 - RNA, 19 nt, Human herpesvirus 8 [Kaposi`s sarcoma-associated h
uaugucuguguuuuguaaa

SEQ ID NO: 4002528 - RNA, 12 nt, Human herpesvirus 8 [Kaposi`s sarcoma-associated h
uauuaaagggac

SEQ ID NO: 4002529 - RNA, 16 nt, Human herpesvirus 8 [Kaposi`s sarcoma-associated h
uauuaggguggauagg

SEQ ID NO: 4002530 - RNA, 22 nt, Human herpesvirus 8 [Kaposi`s sarcoma-associated h
uauuuauuuuuuacuacaggua

SEQ ID NO: 4002531 - RNA, 17 nt, Human herpesvirus 8 [Kaposi`s sarcoma-associated h
ucaccgcgguccauuag

SEQ ID NO: 4002532 - RNA, 22 nt, Human herpesvirus 8 [Kaposi`s sarcoma-associated h
ucacggacuuuauuauagaugc

SEQ ID NO: 4002533 - RNA, 21 nt, Human herpesvirus 8 [Kaposi`s sarcoma-associated h
ucagcaguguuugcugcugua

SEQ ID NO: 4002534 - RNA, 13 nt, Human herpesvirus 8 [Kaposi`s sarcoma-associated h
ucagcugcagcca

SEQ ID NO: 4002535 - RNA, 14 nt, Human herpesvirus 8 [Kaposi`s sarcoma-associated h
ucaggucugucacu

SEQ ID NO: 4002536 - RNA, 14 nt, Human herpesvirus 8 [Kaposi`s sarcoma-associated h
ucaguguccagcca

SEQ ID NO: 4002537 - RNA, 18 nt, Human herpesvirus 8 [Kaposi`s sarcoma-associated h
ucaucgccgccgccaaac

SEQ ID NO: 4002538 - RNA, 13 nt, Human herpesvirus 8 [Kaposi`s sarcoma-associated h
uccaggagcgacu

SEQ ID NO: 4002539 - RNA, 22 nt, Human herpesvirus 8 [Kaposi`s sarcoma-associated h
uccaguagauuuaguacguggu

SEQ ID NO: 4002540 - RNA, 16 nt, Human herpesvirus 8 [Kaposi`s sarcoma-associated h
ucccacgaugggaacu

SEQ ID NO: 4002541 - RNA, 13 nt, Human herpesvirus 8 [Kaposi`s sarcoma-associated h
uccccaauuucag

SEQ ID NO: 4002542 - RNA, 23 nt, Human herpesvirus 8 [Kaposi`s sarcoma-associated h
uccgaggaucugugugugaagca

SEQ ID NO: 4002543 - RNA, 19 nt, Human herpesvirus 8 [Kaposi`s sarcoma-associated h
uccuacccuacuccccugu

SEQ ID NO: 4002544 - RNA, 14 nt, Human herpesvirus 8 [Kaposi`s sarcoma-associated h
uccuucgcacuucu

SEQ ID NO: 4002545 - RNA, 22 nt, Human herpesvirus 8 [Kaposi`s sarcoma-associated h
ucgagggcauacccguggcuca

SEQ ID NO: 4002546 - RNA, 21 nt, Human herpesvirus 8 [Kaposi`s sarcoma-associated h
ucgcaggccgaauaccucgug

SEQ ID NO: 4002547 - RNA, 15 nt, Human herpesvirus 8 [Kaposi`s sarcoma-associated h
ucgcccgccugugug

SEQ ID NO: 4002548 - RNA, 18 nt, Human herpesvirus 8 [Kaposi`s sarcoma-associated h
ucgcgacagacugccucc

SEQ ID NO: 4002549 - RNA, 21 nt, Human herpesvirus 8 [Kaposi`s sarcoma-associated h
ucgcugcaccuggaccccgcg

SEQ ID NO: 4002550 - RNA, 16 nt, Human herpesvirus 8 [Kaposi`s sarcoma-associated h
ucggcagccucuaccc

SEQ ID NO: 4002551 - RNA, 20 nt, Human herpesvirus 8 [Kaposi`s sarcoma-associated h
ucuagcauaugcugccaaga

SEQ ID NO: 4002552 - RNA, 12 nt, Human herpesvirus 8 [Kaposi`s sarcoma-associated h
ucucuucucuac

SEQ ID NO: 4002553 - RNA, 21 nt, Human herpesvirus 8 [Kaposi`s sarcoma-associated h
ucugggauagugucuggcugg

SEQ ID NO: 4002554 - RNA, 14 nt, Human herpesvirus 8 [Kaposi`s sarcoma-associated h
ccuagaugcgcugg

SEQ ID NO: 4002555 - RNA, 13 nt, Human herpesvirus 8 [Kaposi`s sarcoma-associated h
ccuaucgcacaga

SEQ ID NO: 4002556 - RNA, 14 nt, Human herpesvirus 8 [Kaposi`s sarcoma-associated h
ccuaucgcacagac

SEQ ID NO: 4002557 - RNA, 20 nt, Human herpesvirus 8 [Kaposi`s sarcoma-associated h
ccuauggcgcaagcacuuuu

SEQ ID NO: 4002558 - RNA, 17 nt, Human herpesvirus 8 [Kaposi`s sarcoma-associated h
ccucagaaaguggauug

SEQ ID NO: 4002559 - RNA, 19 nt, Human herpesvirus 8 [Kaposi`s sarcoma-associated h
ccucccaacauguaaauug

SEQ ID NO: 4002560 - RNA, 15 nt, Human herpesvirus 8 [Kaposi`s sarcoma-associated h
ccuccugggccaggc

SEQ ID NO: 4002561 - RNA, 13 nt, Human herpesvirus 8 [Kaposi`s sarcoma-associated h
ccucgcaagcuug

SEQ ID NO: 4002562 - RNA, 17 nt, Human herpesvirus 8 [Kaposi`s sarcoma-associated h
ccucgucgacagagcca

SEQ ID NO: 4002563 - RNA, 20 nt, Human herpesvirus 8 [Kaposi`s sarcoma-associated h
ccugaggugcucuucccaca

SEQ ID NO: 4002564 - RNA, 11 nt, Human herpesvirus 8 [Kaposi`s sarcoma-associated h
ccugccagggg

SEQ ID NO: 4002565 - RNA, 14 nt, Human herpesvirus 8 [Kaposi`s sarcoma-associated h
ccugcugcagcugg

SEQ ID NO: 4002566 - RNA, 21 nt, Human herpesvirus 8 [Kaposi`s sarcoma-associated h
ccuggagcagacgugcccaga

SEQ ID NO: 4002567 - RNA, 12 nt, Human herpesvirus 8 [Kaposi`s sarcoma-associated h
ccuucacagugc

SEQ ID NO: 4002568 - RNA, 15 nt, Human herpesvirus 8 [Kaposi`s sarcoma-associated h
ccuucgaggccaggc

SEQ ID NO: 4002569 - RNA, 22 nt, Human herpesvirus 8 [Kaposi`s sarcoma-associated h
ccuucuggcuuggcgcuuagcc

SEQ ID NO: 4002570 - RNA, 17 nt, Human herpesvirus 8 [Kaposi`s sarcoma-associated h
cgaaugguaccauggca

SEQ ID NO: 4002571 - RNA, 11 nt, Human herpesvirus 8 [Kaposi`s sarcoma-associated h
cgacaaaguga

SEQ ID NO: 4002572 - RNA, 19 nt, Human herpesvirus 8 [Kaposi`s sarcoma-associated h
cgacugggccaccaagauc

SEQ ID NO: 4002573 - RNA, 14 nt, Human herpesvirus 8 [Kaposi`s sarcoma-associated h
cgagacuuggcaga

SEQ ID NO: 4002574 - RNA, 14 nt, Human herpesvirus 8 [Kaposi`s sarcoma-associated h
cgagcuaggagugg

SEQ ID NO: 4002575 - RNA, 13 nt, Human herpesvirus 8 [Kaposi`s sarcoma-associated h
cgauuacaggaaa

SEQ ID NO: 4002576 - RNA, 21 nt, Human herpesvirus 8 [Kaposi`s sarcoma-associated h
cgcaccugguaagcagggcgg

SEQ ID NO: 4002577 - RNA, 22 nt, Human herpesvirus 8 [Kaposi`s sarcoma-associated h
cgcagaacaguacccacgaaau

SEQ ID NO: 4002578 - RNA, 17 nt, Human herpesvirus 8 [Kaposi`s sarcoma-associated h
cgccaccuagcgggcac

SEQ ID NO: 4002579 - RNA, 12 nt, Human herpesvirus 8 [Kaposi`s sarcoma-associated h
cgccccucuugg

SEQ ID NO: 4002580 - RNA, 21 nt, Human herpesvirus 8 [Kaposi`s sarcoma-associated h
cgccgaggacacgccaucgcc

SEQ ID NO: 4002581 - RNA, 20 nt, Human herpesvirus 8 [Kaposi`s sarcoma-associated h
cgccggagagcgucaucugc

SEQ ID NO: 4002582 - RNA, 12 nt, Human herpesvirus 8 [Kaposi`s sarcoma-associated h
cgcggaccucaa

SEQ ID NO: 4002583 - RNA, 19 nt, Human herpesvirus 8 [Kaposi`s sarcoma-associated h
cgcggaccucaaagaagag

SEQ ID NO: 4002584 - RNA, 22 nt, Human herpesvirus 8 [Kaposi`s sarcoma-associated h
cgcgguuguuuacgcagggugc

SEQ ID NO: 4002585 - RNA, 21 nt, Human herpesvirus 8 [Kaposi`s sarcoma-associated h
cgcugccagucacgcacuugg

SEQ ID NO: 4002586 - RNA, 15 nt, Human herpesvirus 8 [Kaposi`s sarcoma-associated h
cggaaacugggcacg

SEQ ID NO: 4002587 - RNA, 21 nt, Human herpesvirus 8 [Kaposi`s sarcoma-associated h
cggaagauugguguccagaca

SEQ ID NO: 4002588 - RNA, 12 nt, Human herpesvirus 8 [Kaposi`s sarcoma-associated h
cggacgccagga

SEQ ID NO: 4002589 - RNA, 13 nt, Human herpesvirus 8 [Kaposi`s sarcoma-associated h
cggacggagccgg

SEQ ID NO: 4002590 - RNA, 23 nt, Human herpesvirus 8 [Kaposi`s sarcoma-associated h
cggcacacuacucccccuccuca

SEQ ID NO: 4002591 - RNA, 14 nt, Human herpesvirus 8 [Kaposi`s sarcoma-associated h
cggcgagcccgugu

SEQ ID NO: 4002592 - RNA, 16 nt, Human herpesvirus 8 [Kaposi`s sarcoma-associated h
cggcuccguccuggug

SEQ ID NO: 4002593 - RNA, 12 nt, Human herpesvirus 8 [Kaposi`s sarcoma-associated h
cgggacuucugg

SEQ ID NO: 4002594 - RNA, 13 nt, Human herpesvirus 8 [Kaposi`s sarcoma-associated h
cgggcuacguggu

SEQ ID NO: 4002595 - RNA, 14 nt, Human herpesvirus 8 [Kaposi`s sarcoma-associated h
cggugaaacagaua

SEQ ID NO: 4002596 - RNA, 19 nt, Human herpesvirus 8 [Kaposi`s sarcoma-associated h
cggugaacguccccgcguc

SEQ ID NO: 4002597 - RNA, 18 nt, Human herpesvirus 8 [Kaposi`s sarcoma-associated h
cggugcaugugacccggc

SEQ ID NO: 4002598 - RNA, 15 nt, Human herpesvirus 8 [Kaposi`s sarcoma-associated h
cguaaaccucgggcc

SEQ ID NO: 4002599 - RNA, 16 nt, Human herpesvirus 8 [Kaposi`s sarcoma-associated h
cgugacacuacuaaug

SEQ ID NO: 4002600 - RNA, 17 nt, Human herpesvirus 8 [Kaposi`s sarcoma-associated h
cgugcaggucgcagaga

SEQ ID NO: 4002601 - RNA, 12 nt, Human herpesvirus 8 [Kaposi`s sarcoma-associated h
cguguccaggaa

SEQ ID NO: 4002602 - RNA, 20 nt, Human herpesvirus 8 [Kaposi`s sarcoma-associated h
cuaagaauccccuucucucu

SEQ ID NO: 4002603 - RNA, 19 nt, Human herpesvirus 8 [Kaposi`s sarcoma-associated h
cuaauauuaaccauagugu

SEQ ID NO: 4002604 - RNA, 21 nt, Human herpesvirus 8 [Kaposi`s sarcoma-associated h
cuacgaaaaucuggcaugcug

SEQ ID NO: 4002605 - RNA, 13 nt, Human herpesvirus 8 [Kaposi`s sarcoma-associated h
cuacgagguuggg

SEQ ID NO: 4002606 - RNA, 18 nt, Human herpesvirus 8 [Kaposi`s sarcoma-associated h
cuacuaauguaaccuaaa

SEQ ID NO: 4002607 - RNA, 16 nt, Human herpesvirus 8 [Kaposi`s sarcoma-associated h
cuacuaugucccaaag

SEQ ID NO: 4002608 - RNA, 18 nt, Human herpesvirus 8 [Kaposi`s sarcoma-associated h
cuacucccccuccucaga

SEQ ID NO: 4002609 - RNA, 19 nt, Human herpesvirus 8 [Kaposi`s sarcoma-associated h
cuagaacuaaccacucaua

SEQ ID NO: 4002610 - RNA, 13 nt, Human herpesvirus 8 [Kaposi`s sarcoma-associated h
cuagacaauaaag

SEQ ID NO: 4002611 - RNA, 19 nt, Human herpesvirus 8 [Kaposi`s sarcoma-associated h
cuaucagcugcagccagga

SEQ ID NO: 4002612 - RNA, 15 nt, Human herpesvirus 8 [Kaposi`s sarcoma-associated h
cucaucauuucugaa

SEQ ID NO: 4002613 - RNA, 21 nt, Human herpesvirus 8 [Kaposi`s sarcoma-associated h
cuccacguagacggggagcug

SEQ ID NO: 4002614 - RNA, 18 nt, Human herpesvirus 8 [Kaposi`s sarcoma-associated h
cucccccuuuuuccuccc

SEQ ID NO: 4002615 - RNA, 13 nt, Human herpesvirus 8 [Kaposi`s sarcoma-associated h
cucccucacaaug

SEQ ID NO: 4002616 - RNA, 14 nt, Human herpesvirus 8 [Kaposi`s sarcoma-associated h
cuccgccagggacg

SEQ ID NO: 4002617 - RNA, 21 nt, Human herpesvirus 8 [Kaposi`s sarcoma-associated h
cuccggacucgucuacccugc

SEQ ID NO: 4002618 - RNA, 17 nt, Human herpesvirus 8 [Kaposi`s sarcoma-associated h
cucgcuguccuggagga

SEQ ID NO: 4002619 - RNA, 22 nt, Human herpesvirus 8 [Kaposi`s sarcoma-associated h
cugcaaaauaaagucugagugg

SEQ ID NO: 4002620 - RNA, 18 nt, Human herpesvirus 8 [Kaposi`s sarcoma-associated h
cugcaccucgccgcaaag

SEQ ID NO: 4002621 - RNA, 16 nt, Human herpesvirus 8 [Kaposi`s sarcoma-associated h
cugcaggggagcacac

SEQ ID NO: 4002622 - RNA, 21 nt, Human herpesvirus 8 [Kaposi`s sarcoma-associated h
cugcaguuaucaacccuacuc

SEQ ID NO: 4002623 - RNA, 17 nt, Human herpesvirus 8 [Kaposi`s sarcoma-associated h
cugcccucaaauucuca

SEQ ID NO: 4002624 - RNA, 19 nt, Human herpesvirus 8 [Kaposi`s sarcoma-associated h
cugcgcagaacaguaccca

SEQ ID NO: 4002625 - RNA, 22 nt, Human herpesvirus 8 [Kaposi`s sarcoma-associated h
cugcgcagaacaguacccacga

SEQ ID NO: 4002626 - RNA, 22 nt, Human herpesvirus 8 [Kaposi`s sarcoma-associated h
cugcgcauuuccugcccugguu

SEQ ID NO: 4002627 - RNA, 13 nt, Human herpesvirus 8 [Kaposi`s sarcoma-associated h
cugcugcagcugg

SEQ ID NO: 4002628 - RNA, 12 nt, Human herpesvirus 8 [Kaposi`s sarcoma-associated h
cuggacacuaaa

SEQ ID NO: 4002629 - RNA, 20 nt, Human herpesvirus 8 [Kaposi`s sarcoma-associated h
cuggcaugcugggauuuaga

SEQ ID NO: 4002630 - RNA, 21 nt, Human herpesvirus 8 [Kaposi`s sarcoma-associated h
cugggacuugauaaucuccug

SEQ ID NO: 4002631 - RNA, 23 nt, Human herpesvirus 8 [Kaposi`s sarcoma-associated h
cugggcguccacauggcagcuga

SEQ ID NO: 4002632 - RNA, 20 nt, Human herpesvirus 8 [Kaposi`s sarcoma-associated h
cugggguccgauugcuucau

SEQ ID NO: 4002633 - RNA, 22 nt, Human herpesvirus 8 [Kaposi`s sarcoma-associated h
gcccacuauuaugccgaacagg

SEQ ID NO: 4002634 - RNA, 17 nt, Human herpesvirus 8 [Kaposi`s sarcoma-associated h
gcccggagacuaucagg

SEQ ID NO: 4002635 - RNA, 21 nt, Human herpesvirus 8 [Kaposi`s sarcoma-associated h
gcccugguucuaaucuuaguc

SEQ ID NO: 4002636 - RNA, 15 nt, Human herpesvirus 8 [Kaposi`s sarcoma-associated h
gccguacauggagcg

SEQ ID NO: 4002637 - RNA, 17 nt, Human herpesvirus 8 [Kaposi`s sarcoma-associated h
gccguguugcgcgcugg

SEQ ID NO: 4002638 - RNA, 23 nt, Human herpesvirus 8 [Kaposi`s sarcoma-associated h
gccguguugcgcgcuggcucaga

SEQ ID NO: 4002639 - RNA, 21 nt, Human herpesvirus 8 [Kaposi`s sarcoma-associated h
gccuagugggguggcgcgcca

SEQ ID NO: 4002640 - RNA, 18 nt, Human herpesvirus 8 [Kaposi`s sarcoma-associated h
gccucgagggcggccagu

SEQ ID NO: 4002641 - RNA, 18 nt, Human herpesvirus 8 [Kaposi`s sarcoma-associated h
gccuggagcagcgccagu

SEQ ID NO: 4002642 - RNA, 14 nt, Human herpesvirus 8 [Kaposi`s sarcoma-associated h
gccuucgcacccca

SEQ ID NO: 4002643 - RNA, 23 nt, Human herpesvirus 8 [Kaposi`s sarcoma-associated h
gcgaugcauaucguugacaugug

SEQ ID NO: 4002644 - RNA, 17 nt, Human herpesvirus 8 [Kaposi`s sarcoma-associated h
gcgcagcuuuccuguga

SEQ ID NO: 4002645 - RNA, 20 nt, Human herpesvirus 8 [Kaposi`s sarcoma-associated h
gcgcaggagucagagcagug

SEQ ID NO: 4002646 - RNA, 13 nt, Human herpesvirus 8 [Kaposi`s sarcoma-associated h
gcgcggaccuguu

SEQ ID NO: 4002647 - RNA, 19 nt, Human herpesvirus 8 [Kaposi`s sarcoma-associated h
gcgcguaugggaacacaau

SEQ ID NO: 4002648 - RNA, 14 nt, Human herpesvirus 8 [Kaposi`s sarcoma-associated h
gcgcuggcucagac

SEQ ID NO: 4002649 - RNA, 20 nt, Human herpesvirus 8 [Kaposi`s sarcoma-associated h
gcggaccuguucuaccaggu

SEQ ID NO: 4002650 - RNA, 20 nt, Human herpesvirus 8 [Kaposi`s sarcoma-associated h
gcggagaggggguggugcga

SEQ ID NO: 4002651 - RNA, 18 nt, Human herpesvirus 8 [Kaposi`s sarcoma-associated h
gcggggacggggggugag

SEQ ID NO: 4002652 - RNA, 15 nt, Human herpesvirus 8 [Kaposi`s sarcoma-associated h
gcggugcugcccagg

SEQ ID NO: 4002653 - RNA, 18 nt, Human herpesvirus 8 [Kaposi`s sarcoma-associated h
gcgucuucuauacaugcc

SEQ ID NO: 4002654 - RNA, 12 nt, Human herpesvirus 8 [Kaposi`s sarcoma-associated h
gcgugcuucugu

SEQ ID NO: 4002655 - RNA, 15 nt, Human herpesvirus 8 [Kaposi`s sarcoma-associated h
gcuaaccaccacagu

SEQ ID NO: 4002656 - RNA, 17 nt, Human herpesvirus 8 [Kaposi`s sarcoma-associated h
gcuaacuugccggacag

SEQ ID NO: 4002657 - RNA, 15 nt, Human herpesvirus 8 [Kaposi`s sarcoma-associated h
gcuacaaauguuuua

SEQ ID NO: 4002658 - RNA, 21 nt, Human herpesvirus 8 [Kaposi`s sarcoma-associated h
gcuacguacccaauguuaaug

SEQ ID NO: 4002659 - RNA, 15 nt, Human herpesvirus 8 [Kaposi`s sarcoma-associated h
gcuagauuaaauuaa

SEQ ID NO: 4002660 - RNA, 20 nt, Human herpesvirus 8 [Kaposi`s sarcoma-associated h
gcucagcgaugccgacaagg

SEQ ID NO: 4002661 - RNA, 17 nt, Human herpesvirus 8 [Kaposi`s sarcoma-associated h
gcucaucggacaggacg

SEQ ID NO: 4002662 - RNA, 14 nt, Human herpesvirus 8 [Kaposi`s sarcoma-associated h
gcuccucgagcgug

SEQ ID NO: 4002663 - RNA, 18 nt, Human herpesvirus 8 [Kaposi`s sarcoma-associated h
gcucgagaacugucgaga

SEQ ID NO: 4002664 - RNA, 20 nt, Human herpesvirus 8 [Kaposi`s sarcoma-associated h
gcucgagaacugucgagaca

SEQ ID NO: 4002665 - RNA, 14 nt, Human herpesvirus 8 [Kaposi`s sarcoma-associated h
gcucucgcugcuca

SEQ ID NO: 4002666 - RNA, 13 nt, Human herpesvirus 8 [Kaposi`s sarcoma-associated h
gcugcagccagga

SEQ ID NO: 4002667 - RNA, 17 nt, Human herpesvirus 8 [Kaposi`s sarcoma-associated h
gcugccacugccacgga

SEQ ID NO: 4002668 - RNA, 20 nt, Human herpesvirus 8 [Kaposi`s sarcoma-associated h
gcugccccaaaaggcgaggc

SEQ ID NO: 4002669 - RNA, 18 nt, Human herpesvirus 8 [Kaposi`s sarcoma-associated h
gcugucccgugcccaggc

SEQ ID NO: 4002670 - RNA, 18 nt, Human herpesvirus 8 [Kaposi`s sarcoma-associated h
gcuguucucgccuggagc

SEQ ID NO: 4002671 - RNA, 14 nt, Human herpesvirus 8 [Kaposi`s sarcoma-associated h
gcuuauaccggccu

SEQ ID NO: 4002672 - RNA, 18 nt, Human herpesvirus 8 [Kaposi`s sarcoma-associated h
ggaagcauccggacugag

SEQ ID NO: 4002673 - RNA, 12 nt, Human herpesvirus 8 [Kaposi`s sarcoma-associated h
ggacaccacauu

SEQ ID NO: 4002674 - RNA, 22 nt, Human herpesvirus 8 [Kaposi`s sarcoma-associated h
ggacgcggccuucgucaugcac

SEQ ID NO: 4002675 - RNA, 13 nt, Human herpesvirus 8 [Kaposi`s sarcoma-associated h
ggacuggcagggu

SEQ ID NO: 4002676 - RNA, 14 nt, Human herpesvirus 8 [Kaposi`s sarcoma-associated h
ggagaacaugcugg

SEQ ID NO: 4002677 - RNA, 14 nt, Human herpesvirus 8 [Kaposi`s sarcoma-associated h
ggagccguccacca

SEQ ID NO: 4002678 - RNA, 15 nt, Human herpesvirus 8 [Kaposi`s sarcoma-associated h
ggagcuguggggcag

SEQ ID NO: 4002679 - RNA, 12 nt, Human herpesvirus 8 [Kaposi`s sarcoma-associated h
ggagggcagcug

SEQ ID NO: 4002680 - RNA, 19 nt, Human herpesvirus 8 [Kaposi`s sarcoma-associated h
ggaucaucugcagacccuu

SEQ ID NO: 4002681 - RNA, 20 nt, Human herpesvirus 8 [Kaposi`s sarcoma-associated h
ggaucuucucauucagagac

SEQ ID NO: 4002682 - RNA, 14 nt, Human herpesvirus 8 [Kaposi`s sarcoma-associated h
ggauucgugcagcc

SEQ ID NO: 4002683 - RNA, 23 nt, Human herpesvirus 8 [Kaposi`s sarcoma-associated h
ggauuuaucuaccuuagaagacc

SEQ ID NO: 4002684 - RNA, 22 nt, Human herpesvirus 8 [Kaposi`s sarcoma-associated h
ggcaucguggaacgcacaggua

SEQ ID NO: 4002685 - RNA, 16 nt, Human herpesvirus 8 [Kaposi`s sarcoma-associated h
ggccaggcaccuguug

SEQ ID NO: 4002686 - RNA, 21 nt, Human herpesvirus 8 [Kaposi`s sarcoma-associated h
ggccauccgcgagccauucau

SEQ ID NO: 4002687 - RNA, 17 nt, Human herpesvirus 8 [Kaposi`s sarcoma-associated h
ggcgcagcagcugcuug

SEQ ID NO: 4002688 - RNA, 18 nt, Human herpesvirus 8 [Kaposi`s sarcoma-associated h
ggcggugcaugugacccg

SEQ ID NO: 4002689 - RNA, 22 nt, Human herpesvirus 8 [Kaposi`s sarcoma-associated h
ggcuagauuaaauuaaggggga

SEQ ID NO: 4002690 - RNA, 17 nt, Human herpesvirus 8 [Kaposi`s sarcoma-associated h
ggcucaucggacaggac

SEQ ID NO: 4002691 - RNA, 23 nt, Human herpesvirus 8 [Kaposi`s sarcoma-associated h
ggcuguuacaauaaagcugagcc

SEQ ID NO: 4002692 - RNA, 15 nt, Human herpesvirus 8 [Kaposi`s sarcoma-associated h
gggaaggaagggcgg

SEQ ID NO: 4002693 - RNA, 17 nt, Human herpesvirus 8 [Kaposi`s sarcoma-associated h
gggacagucuaaaaaag

SEQ ID NO: 4002694 - RNA, 21 nt, Human herpesvirus 8 [Kaposi`s sarcoma-associated h
gggaggcauguuuagggcucg

SEQ ID NO: 4002695 - RNA, 19 nt, Human herpesvirus 8 [Kaposi`s sarcoma-associated h
gggauggaggaagagggau

SEQ ID NO: 4002696 - RNA, 17 nt, Human herpesvirus 8 [Kaposi`s sarcoma-associated h
gggccaugacaacugcc

SEQ ID NO: 4002697 - RNA, 16 nt, Human herpesvirus 8 [Kaposi`s sarcoma-associated h
gggggaugagccagaa

SEQ ID NO: 4002698 - RNA, 22 nt, Human herpesvirus 8 [Kaposi`s sarcoma-associated h
gguagcaaaugaaaagcuucug

SEQ ID NO: 4002699 - RNA, 15 nt, Human herpesvirus 8 [Kaposi`s sarcoma-associated h
ggucgguucacugcu

SEQ ID NO: 4002700 - RNA, 13 nt, Human herpesvirus 8 [Kaposi`s sarcoma-associated h
gguuacugccaga

SEQ ID NO: 4002701 - RNA, 20 nt, Human herpesvirus 8 [Kaposi`s sarcoma-associated h
gguuagggucgggugggacg

SEQ ID NO: 4002702 - RNA, 18 nt, Human herpesvirus 8 [Kaposi`s sarcoma-associated h
gguugcauagggcuuuga

SEQ ID NO: 4002703 - RNA, 17 nt, Human herpesvirus 8 [Kaposi`s sarcoma-associated h
guaccaccaagaaggaa

SEQ ID NO: 4002704 - RNA, 17 nt, Human herpesvirus 8 [Kaposi`s sarcoma-associated h
guagaggggguggaaaa

SEQ ID NO: 4002705 - RNA, 22 nt, Human herpesvirus 8 [Kaposi`s sarcoma-associated h
guagggcuuuacccucuggccu

SEQ ID NO: 4002706 - RNA, 15 nt, Human herpesvirus 8 [Kaposi`s sarcoma-associated h
guauaugacuacugu

SEQ ID NO: 4002707 - RNA, 13 nt, Human herpesvirus 8 [Kaposi`s sarcoma-associated h
guaucuuaaagcg

SEQ ID NO: 4002708 - RNA, 23 nt, Human herpesvirus 8 [Kaposi`s sarcoma-associated h
guauuagaggguggacagugccu

SEQ ID NO: 4002709 - RNA, 16 nt, Human herpesvirus 8 [Kaposi`s sarcoma-associated h
guauuaugccagggaa

SEQ ID NO: 4002710 - RNA, 19 nt, Human herpesvirus 8 [Kaposi`s sarcoma-associated h
gucaugcacgguauagaga

SEQ ID NO: 4002711 - RNA, 15 nt, Human herpesvirus 8 [Kaposi`s sarcoma-associated h
guccgauugcuucau

SEQ ID NO: 4002712 - RNA, 15 nt, Human herpesvirus 8 [Kaposi`s sarcoma-associated h
ucuguguccuccucu

SEQ ID NO: 4002713 - RNA, 13 nt, Human herpesvirus 8 [Kaposi`s sarcoma-associated h
ucuguuacuggca

SEQ ID NO: 4002714 - RNA, 17 nt, Human herpesvirus 8 [Kaposi`s sarcoma-associated h
ucuguuacuggcaccua

SEQ ID NO: 4002715 - RNA, 17 nt, Human herpesvirus 8 [Kaposi`s sarcoma-associated h
ucuuagucuuacuguca

SEQ ID NO: 4002716 - RNA, 14 nt, Human herpesvirus 8 [Kaposi`s sarcoma-associated h
ucuuggcuguuaca

SEQ ID NO: 4002717 - RNA, 14 nt, Human herpesvirus 8 [Kaposi`s sarcoma-associated h
ucuuuauugcuuuc

SEQ ID NO: 4002718 - RNA, 15 nt, Human herpesvirus 8 [Kaposi`s sarcoma-associated h
ugaacguccccgcgu

SEQ ID NO: 4002719 - RNA, 16 nt, Human herpesvirus 8 [Kaposi`s sarcoma-associated h
ugaaugcuuccgcgac

SEQ ID NO: 4002720 - RNA, 14 nt, Human herpesvirus 8 [Kaposi`s sarcoma-associated h
ugaccaacaggcug

SEQ ID NO: 4002721 - RNA, 15 nt, Human herpesvirus 8 [Kaposi`s sarcoma-associated h
ugacgcccugggugu

SEQ ID NO: 4002722 - RNA, 19 nt, Human herpesvirus 8 [Kaposi`s sarcoma-associated h
ugagagcuggagggcacag

SEQ ID NO: 4002723 - RNA, 15 nt, Human herpesvirus 8 [Kaposi`s sarcoma-associated h
ugagauagccacaua

SEQ ID NO: 4002724 - RNA, 16 nt, Human herpesvirus 8 [Kaposi`s sarcoma-associated h
ugagugggacaucauu

SEQ ID NO: 4002725 - RNA, 21 nt, Human herpesvirus 8 [Kaposi`s sarcoma-associated h
ugauuugauacagggacagau

SEQ ID NO: 4002726 - RNA, 12 nt, Human herpesvirus 8 [Kaposi`s sarcoma-associated h
ugauuuuccagg

SEQ ID NO: 4002727 - RNA, 18 nt, Human herpesvirus 8 [Kaposi`s sarcoma-associated h
ugcaaagcuuaaccacau

SEQ ID NO: 4002728 - RNA, 15 nt, Human herpesvirus 8 [Kaposi`s sarcoma-associated h
ugcaaccugcugcag

SEQ ID NO: 4002729 - RNA, 17 nt, Human herpesvirus 8 [Kaposi`s sarcoma-associated h
ugcaauacccuguuuca

SEQ ID NO: 4002730 - RNA, 13 nt, Human herpesvirus 8 [Kaposi`s sarcoma-associated h
ugcagccagguaa

SEQ ID NO: 4002731 - RNA, 14 nt, Human herpesvirus 8 [Kaposi`s sarcoma-associated h
ugcagugugcagua

SEQ ID NO: 4002732 - RNA, 13 nt, Human herpesvirus 8 [Kaposi`s sarcoma-associated h
ugcauauggacug

SEQ ID NO: 4002733 - RNA, 21 nt, Human herpesvirus 8 [Kaposi`s sarcoma-associated h
ugcaugcaauacccuguuuca

SEQ ID NO: 4002734 - RNA, 19 nt, Human herpesvirus 8 [Kaposi`s sarcoma-associated h
ugccaccguuuacaaaaua

SEQ ID NO: 4002735 - RNA, 23 nt, Human herpesvirus 8 [Kaposi`s sarcoma-associated h
ugcccacuguuguggaaagcucc

SEQ ID NO: 4002736 - RNA, 17 nt, Human herpesvirus 8 [Kaposi`s sarcoma-associated h
ugccuucgaggccaggc

SEQ ID NO: 4002737 - RNA, 22 nt, Human herpesvirus 8 [Kaposi`s sarcoma-associated h
uggaggcacauaaggaacagau

SEQ ID NO: 4002738 - RNA, 14 nt, Human herpesvirus 8 [Kaposi`s sarcoma-associated h
uggauggggcaugg

SEQ ID NO: 4002739 - RNA, 21 nt, Human herpesvirus 8 [Kaposi`s sarcoma-associated h
uggcaagaaauccgagcaccu

SEQ ID NO: 4002740 - RNA, 11 nt, Human herpesvirus 8 [Kaposi`s sarcoma-associated h
uggcaugcugg

SEQ ID NO: 4002741 - RNA, 12 nt, Human herpesvirus 8 [Kaposi`s sarcoma-associated h
uggcgccaccuu

SEQ ID NO: 4002742 - RNA, 19 nt, Human herpesvirus 8 [Kaposi`s sarcoma-associated h
uggcgcggaaacugggcac

SEQ ID NO: 4002743 - RNA, 13 nt, Human herpesvirus 8 [Kaposi`s sarcoma-associated h
uggcgucaucuga

SEQ ID NO: 4002744 - RNA, 14 nt, Human herpesvirus 8 [Kaposi`s sarcoma-associated h
uggcgugccagugg

SEQ ID NO: 4002745 - RNA, 12 nt, Human herpesvirus 8 [Kaposi`s sarcoma-associated h
uggcuguuacaa

SEQ ID NO: 4002746 - RNA, 22 nt, Human herpesvirus 8 [Kaposi`s sarcoma-associated h
ugggcuucauuaugcaugcaau

SEQ ID NO: 4002747 - RNA, 15 nt, Human herpesvirus 8 [Kaposi`s sarcoma-associated h
ugggggauccacuca

SEQ ID NO: 4002748 - RNA, 19 nt, Human herpesvirus 8 [Kaposi`s sarcoma-associated h
ugggucuaucuggaaaaca

SEQ ID NO: 4002749 - RNA, 22 nt, Human herpesvirus 8 [Kaposi`s sarcoma-associated h
uggguguuaugcaccgugcagg

SEQ ID NO: 4002750 - RNA, 20 nt, Human herpesvirus 8 [Kaposi`s sarcoma-associated h
ugguggacggcuccguccug

SEQ ID NO: 4002751 - RNA, 12 nt, Human herpesvirus 8 [Kaposi`s sarcoma-associated h
uguaaaaaacuu

SEQ ID NO: 4002752 - RNA, 21 nt, Human herpesvirus 8 [Kaposi`s sarcoma-associated h
ugucacaaauuuuaacagcca

SEQ ID NO: 4002753 - RNA, 16 nt, Human herpesvirus 8 [Kaposi`s sarcoma-associated h
ugucccgugcccaggc

SEQ ID NO: 4002754 - RNA, 19 nt, Human herpesvirus 8 [Kaposi`s sarcoma-associated h
ugucgcaggccgaauaccu

SEQ ID NO: 4002755 - RNA, 13 nt, Human herpesvirus 8 [Kaposi`s sarcoma-associated h
ugucugauucuua

SEQ ID NO: 4002756 - RNA, 13 nt, Human herpesvirus 8 [Kaposi`s sarcoma-associated h
ugugugaagcagu

SEQ ID NO: 4002757 - RNA, 21 nt, Human herpesvirus 8 [Kaposi`s sarcoma-associated h
uuaacgugucugaauguggaa

SEQ ID NO: 4002758 - RNA, 21 nt, Human herpesvirus 8 [Kaposi`s sarcoma-associated h
uuaacuucaccuccagacucu

SEQ ID NO: 4002759 - RNA, 13 nt, Human herpesvirus 8 [Kaposi`s sarcoma-associated h
uuaggggcacccu

SEQ ID NO: 4002760 - RNA, 17 nt, Human herpesvirus 8 [Kaposi`s sarcoma-associated h
uuaucuuugcagugucu

SEQ ID NO: 4002761 - RNA, 21 nt, Human herpesvirus 8 [Kaposi`s sarcoma-associated h
uuccaagagcgagugugccuc

SEQ ID NO: 4002762 - RNA, 13 nt, Human herpesvirus 8 [Kaposi`s sarcoma-associated h
uuccucuugcgcu

SEQ ID NO: 4002763 - RNA, 22 nt, Human herpesvirus 8 [Kaposi`s sarcoma-associated h
uucuaaucuuagucuuacuguc

SEQ ID NO: 4002764 - RNA, 20 nt, Human herpesvirus 8 [Kaposi`s sarcoma-associated h
uugaaaaaaaauaaacauac

SEQ ID NO: 4002765 - RNA, 19 nt, Human herpesvirus 8 [Kaposi`s sarcoma-associated h
uugagaagcaguuucagga

SEQ ID NO: 4002766 - RNA, 17 nt, Human herpesvirus 8 [Kaposi`s sarcoma-associated h
uugcacucagaacauaa

SEQ ID NO: 4002767 - RNA, 13 nt, Human herpesvirus 8 [Kaposi`s sarcoma-associated h
uugcagugugcag

SEQ ID NO: 4002768 - RNA, 14 nt, Human herpesvirus 8 [Kaposi`s sarcoma-associated h
uuggagaaacagug

SEQ ID NO: 4002769 - RNA, 18 nt, Human herpesvirus 8 [Kaposi`s sarcoma-associated h
uuggcguuuaccugcacu

SEQ ID NO: 4002770 - RNA, 17 nt, Human herpesvirus 8 [Kaposi`s sarcoma-associated h
uuggcuguuacaauaaa

SEQ ID NO: 4002771 - RNA, 16 nt, Human herpesvirus 8 [Kaposi`s sarcoma-associated h
uugggauucacucagc

SEQ ID NO: 4002772 - RNA, 14 nt, Human herpesvirus 8 [Kaposi`s sarcoma-associated h
uugugaagcauuuu

SEQ ID NO: 4002773 - RNA, 19 nt, Human herpesvirus 8 [Kaposi`s sarcoma-associated h
uugugcucgacggagacac

SEQ ID NO: 4002774 - RNA, 20 nt, Human herpesvirus 8 [Kaposi`s sarcoma-associated h
uuguuaugggagggaguaua

SEQ ID NO: 4002775 - RNA, 13 nt, Human herpesvirus 8 [Kaposi`s sarcoma-associated h
uuuacuugcagca

SEQ ID NO: 4002776 - RNA, 12 nt, Human herpesvirus 8 [Kaposi`s sarcoma-associated h
cgccccuggugg

SEQ ID NO: 4002777 - RNA, 15 nt, Human herpesvirus 8 [Kaposi`s sarcoma-associated h
cgcggauaggcuggg

SEQ ID NO: 4002778 - RNA, 18 nt, Human herpesvirus 8 [Kaposi`s sarcoma-associated h
cgcggugucaaccaggcc

SEQ ID NO: 4002779 - RNA, 14 nt, Human herpesvirus 8 [Kaposi`s sarcoma-associated h
cgcugcgcauggcu

SEQ ID NO: 4002780 - RNA, 15 nt, Human herpesvirus 8 [Kaposi`s sarcoma-associated h
cgcugcgucucccuc

SEQ ID NO: 4002781 - RNA, 19 nt, Human herpesvirus 8 [Kaposi`s sarcoma-associated h
cgcugucccgugcccaggc

SEQ ID NO: 4002782 - RNA, 17 nt, Human herpesvirus 8 [Kaposi`s sarcoma-associated h
cggaaacugggcacgga

SEQ ID NO: 4002783 - RNA, 19 nt, Human herpesvirus 8 [Kaposi`s sarcoma-associated h
cggaucaugcucucaccgc

SEQ ID NO: 4002784 - RNA, 11 nt, Human herpesvirus 8 [Kaposi`s sarcoma-associated h
cggcagcaccu

SEQ ID NO: 4002785 - RNA, 19 nt, Human herpesvirus 8 [Kaposi`s sarcoma-associated h
cggcgcaaaaacagcugga

SEQ ID NO: 4002786 - RNA, 12 nt, Human herpesvirus 8 [Kaposi`s sarcoma-associated h
cggcgcgccugu

SEQ ID NO: 4002787 - RNA, 21 nt, Human herpesvirus 8 [Kaposi`s sarcoma-associated h
cggcgucaccgacaccaucuc

SEQ ID NO: 4002788 - RNA, 15 nt, Human herpesvirus 8 [Kaposi`s sarcoma-associated h
cgggagaaccaugcc

SEQ ID NO: 4002789 - RNA, 22 nt, Human herpesvirus 8 [Kaposi`s sarcoma-associated h
cgggagcuucggaaagcacugg

SEQ ID NO: 4002790 - RNA, 19 nt, Human herpesvirus 8 [Kaposi`s sarcoma-associated h
cggggauggacgcggccuu

SEQ ID NO: 4002791 - RNA, 12 nt, Human herpesvirus 8 [Kaposi`s sarcoma-associated h
cgggggccagga

SEQ ID NO: 4002792 - RNA, 14 nt, Human herpesvirus 8 [Kaposi`s sarcoma-associated h
cgggguuuccaggg

SEQ ID NO: 4002793 - RNA, 13 nt, Human herpesvirus 8 [Kaposi`s sarcoma-associated h
cgguagcugccug

SEQ ID NO: 4002794 - RNA, 18 nt, Human herpesvirus 8 [Kaposi`s sarcoma-associated h
cgguaguugugcuuccug

SEQ ID NO: 4002795 - RNA, 13 nt, Human herpesvirus 8 [Kaposi`s sarcoma-associated h
cggucgccagggu

SEQ ID NO: 4002796 - RNA, 21 nt, Human herpesvirus 8 [Kaposi`s sarcoma-associated h
cggugaccacgcacuauagug

SEQ ID NO: 4002797 - RNA, 15 nt, Human herpesvirus 8 [Kaposi`s sarcoma-associated h
cggugcugcccagga

SEQ ID NO: 4002798 - RNA, 16 nt, Human herpesvirus 8 [Kaposi`s sarcoma-associated h
gcggucagaguggugg

SEQ ID NO: 4002799 - RNA, 17 nt, Human herpesvirus 8 [Kaposi`s sarcoma-associated h
gcguccacauggcagcu

SEQ ID NO: 4002800 - RNA, 12 nt, Human herpesvirus 8 [Kaposi`s sarcoma-associated h
gcgucuuggggg

SEQ ID NO: 4002801 - RNA, 16 nt, Human herpesvirus 8 [Kaposi`s sarcoma-associated h
gcuaggauucgugcag

SEQ ID NO: 4002802 - RNA, 14 nt, Human herpesvirus 8 [Kaposi`s sarcoma-associated h
gcuauaggacagaa

SEQ ID NO: 4002803 - RNA, 13 nt, Human herpesvirus 8 [Kaposi`s sarcoma-associated h
gcucccgugcguu

SEQ ID NO: 4002804 - RNA, 15 nt, Human herpesvirus 8 [Kaposi`s sarcoma-associated h
gcucucgcugcucag

SEQ ID NO: 4002805 - RNA, 12 nt, Human herpesvirus 8 [Kaposi`s sarcoma-associated h
gcugcagccagg

SEQ ID NO: 4002806 - RNA, 14 nt, Human herpesvirus 8 [Kaposi`s sarcoma-associated h
gcugcagccaggaa

SEQ ID NO: 4002807 - RNA, 15 nt, Human herpesvirus 8 [Kaposi`s sarcoma-associated h
gcugcagccaggaag

SEQ ID NO: 4002808 - RNA, 16 nt, Human herpesvirus 8 [Kaposi`s sarcoma-associated h
gcugcagcuggacugg

SEQ ID NO: 4002809 - RNA, 13 nt, Human herpesvirus 8 [Kaposi`s sarcoma-associated h
gcugcucagacag

SEQ ID NO: 4002810 - RNA, 16 nt, Human herpesvirus 8 [Kaposi`s sarcoma-associated h
gcugucccgugcccag

SEQ ID NO: 4002811 - RNA, 13 nt, Human herpesvirus 8 [Kaposi`s sarcoma-associated h
gcuguggcaccaa

SEQ ID NO: 4002812 - RNA, 16 nt, Human herpesvirus 8 [Kaposi`s sarcoma-associated h
ggaagucgguggggau

SEQ ID NO: 4002813 - RNA, 20 nt, Human herpesvirus 8 [Kaposi`s sarcoma-associated h
ggaauacguccgucgguagc

SEQ ID NO: 4002814 - RNA, 17 nt, Human herpesvirus 8 [Kaposi`s sarcoma-associated h
ggacaauugucggauuu

SEQ ID NO: 4002815 - RNA, 17 nt, Human herpesvirus 8 [Kaposi`s sarcoma-associated h
ggacacugaacccuggg

SEQ ID NO: 4002816 - RNA, 20 nt, Human herpesvirus 8 [Kaposi`s sarcoma-associated h
ggacccagggugccuuggac

SEQ ID NO: 4002817 - RNA, 23 nt, Human herpesvirus 8 [Kaposi`s sarcoma-associated h
ggacuugauaaucuccuggagaa

SEQ ID NO: 4002818 - RNA, 23 nt, Human herpesvirus 8 [Kaposi`s sarcoma-associated h
ggagugcugaccacggcacagga

SEQ ID NO: 4002819 - RNA, 13 nt, Human herpesvirus 8 [Kaposi`s sarcoma-associated h
ggauccacucagg

SEQ ID NO: 4002820 - RNA, 20 nt, Human herpesvirus 8 [Kaposi`s sarcoma-associated h
ggaucgaacagaagacccag

SEQ ID NO: 4002821 - RNA, 21 nt, Human herpesvirus 8 [Kaposi`s sarcoma-associated h
ggaucucuaacgauacccaug

SEQ ID NO: 4002822 - RNA, 19 nt, Human herpesvirus 8 [Kaposi`s sarcoma-associated h
ggaugcacaguauagggau

SEQ ID NO: 4002823 - RNA, 13 nt, Human herpesvirus 8 [Kaposi`s sarcoma-associated h
ggcaccauggcca

SEQ ID NO: 4002824 - RNA, 18 nt, Human herpesvirus 8 [Kaposi`s sarcoma-associated h
aaaauaacgggggaugga

SEQ ID NO: 4002825 - RNA, 18 nt, Human herpesvirus 8 [Kaposi`s sarcoma-associated h
aaacguguccugccaggg

SEQ ID NO: 4002826 - RNA, 16 nt, Human herpesvirus 8 [Kaposi`s sarcoma-associated h
aaacuaaucaguguua

SEQ ID NO: 4002827 - RNA, 22 nt, Human herpesvirus 8 [Kaposi`s sarcoma-associated h
aaagcagcgcccacugguguau

SEQ ID NO: 4002828 - RNA, 14 nt, Human herpesvirus 8 [Kaposi`s sarcoma-associated h
aaagcugagccaca

SEQ ID NO: 4002829 - RNA, 15 nt, Human herpesvirus 8 [Kaposi`s sarcoma-associated h
aaagcugagccacaa

SEQ ID NO: 4002830 - RNA, 20 nt, Human herpesvirus 8 [Kaposi`s sarcoma-associated h
aacauauguuaaacacgucg

SEQ ID NO: 4002831 - RNA, 15 nt, Human herpesvirus 8 [Kaposi`s sarcoma-associated h
aacaugcaacaagca

SEQ ID NO: 4002832 - RNA, 18 nt, Human herpesvirus 8 [Kaposi`s sarcoma-associated h
aacggcuagcguacucuc

SEQ ID NO: 4002833 - RNA, 17 nt, Human herpesvirus 8 [Kaposi`s sarcoma-associated h
aacuaaacauuaccaau

SEQ ID NO: 4002834 - RNA, 21 nt, Human herpesvirus 8 [Kaposi`s sarcoma-associated h
aacugucuccagaagagcauu

SEQ ID NO: 4002835 - RNA, 17 nt, Human herpesvirus 8 [Kaposi`s sarcoma-associated h
aagaggacccagggugc

SEQ ID NO: 4002836 - RNA, 21 nt, Human herpesvirus 8 [Kaposi`s sarcoma-associated h
aagcauccggacugagauuuc

SEQ ID NO: 4002837 - RNA, 14 nt, Human herpesvirus 8 [Kaposi`s sarcoma-associated h
aagccgagccacaa

SEQ ID NO: 4002838 - RNA, 16 nt, Human herpesvirus 8 [Kaposi`s sarcoma-associated h
aaggacauuguauaac

SEQ ID NO: 4002839 - RNA, 22 nt, Human herpesvirus 8 [Kaposi`s sarcoma-associated h
aaggcuacgugaguuacaugga

SEQ ID NO: 4002840 - RNA, 23 nt, Human herpesvirus 8 [Kaposi`s sarcoma-associated h
aagggccaagcuacuggccuggc

SEQ ID NO: 4002841 - RNA, 17 nt, Human herpesvirus 8 [Kaposi`s sarcoma-associated h
aagguaggccagcugcg

SEQ ID NO: 4002842 - RNA, 16 nt, Human herpesvirus 8 [Kaposi`s sarcoma-associated h
aaggucaccuggccca

SEQ ID NO: 4002843 - RNA, 18 nt, Human herpesvirus 8 [Kaposi`s sarcoma-associated h
aauauaacagcaacaugu

SEQ ID NO: 4002844 - RNA, 13 nt, Human herpesvirus 8 [Kaposi`s sarcoma-associated h
aaucuccuggaga

SEQ ID NO: 4002845 - RNA, 17 nt, Human herpesvirus 8 [Kaposi`s sarcoma-associated h
aaucuggcaugcuggga

SEQ ID NO: 4002846 - RNA, 10 nt, Human herpesvirus 8 [Kaposi`s sarcoma-associated h
aaugugacaa

SEQ ID NO: 4002847 - RNA, 15 nt, Human herpesvirus 8 [Kaposi`s sarcoma-associated h
aauguuuuggucucu

SEQ ID NO: 4002848 - RNA, 12 nt, Human herpesvirus 8 [Kaposi`s sarcoma-associated h
acaaaccaaauu

SEQ ID NO: 4002849 - RNA, 19 nt, Human herpesvirus 8 [Kaposi`s sarcoma-associated h
acaacuuguccggagcugc

SEQ ID NO: 4002850 - RNA, 11 nt, Human herpesvirus 8 [Kaposi`s sarcoma-associated h
acaauaaagcu

SEQ ID NO: 4002851 - RNA, 16 nt, Human herpesvirus 8 [Kaposi`s sarcoma-associated h
acaauagggauacugu

SEQ ID NO: 4002852 - RNA, 15 nt, Human herpesvirus 8 [Kaposi`s sarcoma-associated h
acacacacaaagaca

SEQ ID NO: 4002853 - RNA, 17 nt, Human herpesvirus 8 [Kaposi`s sarcoma-associated h
acacauuugucuuuauu

SEQ ID NO: 4002854 - RNA, 21 nt, Human herpesvirus 8 [Kaposi`s sarcoma-associated h
acaccauucuuuuauuuauca

SEQ ID NO: 4002855 - RNA, 15 nt, Human herpesvirus 8 [Kaposi`s sarcoma-associated h
acacggaaggcagug

SEQ ID NO: 4002856 - RNA, 17 nt, Human herpesvirus 8 [Kaposi`s sarcoma-associated h
acacuaaaagucuggcc

SEQ ID NO: 4002857 - RNA, 19 nt, Human herpesvirus 8 [Kaposi`s sarcoma-associated h
acacuguggauuuuaugga

SEQ ID NO: 4002858 - RNA, 17 nt, Human herpesvirus 8 [Kaposi`s sarcoma-associated h
acacuuccaccuccccu

SEQ ID NO: 4002859 - RNA, 15 nt, Human herpesvirus 8 [Kaposi`s sarcoma-associated h
acagacgacugggcc

SEQ ID NO: 4002860 - RNA, 22 nt, Human herpesvirus 8 [Kaposi`s sarcoma-associated h
acagccuuggugcuaggcaguc

SEQ ID NO: 4002861 - RNA, 19 nt, Human herpesvirus 8 [Kaposi`s sarcoma-associated h
acagucuguaaagaaagua

SEQ ID NO: 4002862 - RNA, 19 nt, Human herpesvirus 8 [Kaposi`s sarcoma-associated h
acauaauccccggcagcac

SEQ ID NO: 4002863 - RNA, 21 nt, Human herpesvirus 8 [Kaposi`s sarcoma-associated h
acauagugacuguagacaguu

SEQ ID NO: 4002864 - RNA, 23 nt, Human herpesvirus 8 [Kaposi`s sarcoma-associated h
acauauugguauaugacuacugu

SEQ ID NO: 4002865 - RNA, 20 nt, Human herpesvirus 8 [Kaposi`s sarcoma-associated h
acaucuguguacaaaccaaa

SEQ ID NO: 4002866 - RNA, 20 nt, Human herpesvirus 8 [Kaposi`s sarcoma-associated h
acauugaggaccuugucaca

SEQ ID NO: 4002867 - RNA, 12 nt, Human herpesvirus 8 [Kaposi`s sarcoma-associated h
accaaaccuggu

SEQ ID NO: 4002868 - RNA, 20 nt, Human herpesvirus 8 [Kaposi`s sarcoma-associated h
accacauuuccacccaccua

SEQ ID NO: 4002869 - RNA, 21 nt, Human herpesvirus 8 [Kaposi`s sarcoma-associated h
accacucuuuaucaugugaac

SEQ ID NO: 4002870 - RNA, 21 nt, Human herpesvirus 8 [Kaposi`s sarcoma-associated h
accagagcgacgcgggucuca

SEQ ID NO: 4002871 - RNA, 21 nt, Human herpesvirus 8 [Kaposi`s sarcoma-associated h
accaggcaacacaagggugaa

SEQ ID NO: 4002872 - RNA, 10 nt, Human herpesvirus 8 [Kaposi`s sarcoma-associated h
accaguaaag

SEQ ID NO: 4002873 - RNA, 19 nt, Human herpesvirus 8 [Kaposi`s sarcoma-associated h
accccagccccuugguucc

SEQ ID NO: 4002874 - RNA, 13 nt, Human herpesvirus 8 [Kaposi`s sarcoma-associated h
acccgagccacau

SEQ ID NO: 4002875 - RNA, 16 nt, Human herpesvirus 8 [Kaposi`s sarcoma-associated h
acccuacuuagugaaa

SEQ ID NO: 4002876 - RNA, 14 nt, Human herpesvirus 8 [Kaposi`s sarcoma-associated h
acccugauuagcac

SEQ ID NO: 4002877 - RNA, 17 nt, Human herpesvirus 8 [Kaposi`s sarcoma-associated h
acccugccaaaugccca

SEQ ID NO: 4002878 - RNA, 18 nt, Human herpesvirus 8 [Kaposi`s sarcoma-associated h
accggaguagugcaagug

SEQ ID NO: 4002879 - RNA, 15 nt, Human herpesvirus 8 [Kaposi`s sarcoma-associated h
accggcaucugcaag

SEQ ID NO: 4002880 - RNA, 18 nt, Human herpesvirus 8 [Kaposi`s sarcoma-associated h
accgucgcacccggccgc

SEQ ID NO: 4002881 - RNA, 21 nt, Human herpesvirus 8 [Kaposi`s sarcoma-associated h
accugccggacacugaacccu

SEQ ID NO: 4002882 - RNA, 17 nt, Human herpesvirus 8 [Kaposi`s sarcoma-associated h
acgagguugggaagagg

SEQ ID NO: 4002883 - RNA, 21 nt, Human herpesvirus 8 [Kaposi`s sarcoma-associated h
acgauguacuugaacagggca

SEQ ID NO: 4002884 - RNA, 17 nt, Human herpesvirus 8 [Kaposi`s sarcoma-associated h
acgcguuaagaagccac

SEQ ID NO: 4002885 - RNA, 20 nt, Human herpesvirus 8 [Kaposi`s sarcoma-associated h
acgcguuaucuccugcucau

SEQ ID NO: 4002886 - RNA, 17 nt, Human herpesvirus 8 [Kaposi`s sarcoma-associated h
acggccaccgagaagga

SEQ ID NO: 4002887 - RNA, 20 nt, Human herpesvirus 8 [Kaposi`s sarcoma-associated h
acggugucguguaugccaau

SEQ ID NO: 4002888 - RNA, 16 nt, Human herpesvirus 8 [Kaposi`s sarcoma-associated h
acgugcaccagcucag

SEQ ID NO: 4002889 - RNA, 13 nt, Human herpesvirus 8 [Kaposi`s sarcoma-associated h
acuacagguauac

SEQ ID NO: 4002890 - RNA, 21 nt, Human herpesvirus 8 [Kaposi`s sarcoma-associated h
acuaugggugaccacauaauu

SEQ ID NO: 4002891 - RNA, 23 nt, Human herpesvirus 8 [Kaposi`s sarcoma-associated h
acucuguguccuccucugaguuu

SEQ ID NO: 4002892 - RNA, 15 nt, Human herpesvirus 8 [Kaposi`s sarcoma-associated h
acugaacccugggug

SEQ ID NO: 4002893 - RNA, 13 nt, Human herpesvirus 8 [Kaposi`s sarcoma-associated h
acugaucacugcg

SEQ ID NO: 4002894 - RNA, 13 nt, Human herpesvirus 8 [Kaposi`s sarcoma-associated h
acugcccuccauc

SEQ ID NO: 4002895 - RNA, 16 nt, Human herpesvirus 8 [Kaposi`s sarcoma-associated h
acuuaacuguuuacug

SEQ ID NO: 4002896 - RNA, 14 nt, Human herpesvirus 8 [Kaposi`s sarcoma-associated h
agaauacagugcua

SEQ ID NO: 4002897 - RNA, 17 nt, Human herpesvirus 8 [Kaposi`s sarcoma-associated h
agacaaacaugugggcu

SEQ ID NO: 4002898 - RNA, 20 nt, Human herpesvirus 8 [Kaposi`s sarcoma-associated h
agacauagugacuguagaca

SEQ ID NO: 4002899 - RNA, 19 nt, Human herpesvirus 8 [Kaposi`s sarcoma-associated h
agacggucuuuaggggcac

SEQ ID NO: 4002900 - RNA, 14 nt, Human herpesvirus 8 [Kaposi`s sarcoma-associated h
agagaagagaccac

SEQ ID NO: 4002901 - RNA, 14 nt, Human herpesvirus 8 [Kaposi`s sarcoma-associated h
agagacccugggcg

SEQ ID NO: 4002902 - RNA, 13 nt, Human herpesvirus 8 [Kaposi`s sarcoma-associated h
agagccagccugg

SEQ ID NO: 4002903 - RNA, 12 nt, Human herpesvirus 8 [Kaposi`s sarcoma-associated h
agauagccacau

SEQ ID NO: 4002904 - RNA, 14 nt, Human herpesvirus 8 [Kaposi`s sarcoma-associated h
agauggguccguau

SEQ ID NO: 4002905 - RNA, 18 nt, Human herpesvirus 8 [Kaposi`s sarcoma-associated h
agcacuuuuugaagcccu

SEQ ID NO: 4002906 - RNA, 15 nt, Human herpesvirus 8 [Kaposi`s sarcoma-associated h
agcagacgugcccag

SEQ ID NO: 4002907 - RNA, 19 nt, Human herpesvirus 8 [Kaposi`s sarcoma-associated h
agccagguaacaaagccgc

SEQ ID NO: 4002908 - RNA, 13 nt, Human herpesvirus 8 [Kaposi`s sarcoma-associated h
agccgccaggaac

SEQ ID NO: 4002909 - RNA, 19 nt, Human herpesvirus 8 [Kaposi`s sarcoma-associated h
agccgcgcuuuuuaacuuc

SEQ ID NO: 4002910 - RNA, 17 nt, Human herpesvirus 8 [Kaposi`s sarcoma-associated h
agccgcuugcugauaua

SEQ ID NO: 4002911 - RNA, 18 nt, Human herpesvirus 8 [Kaposi`s sarcoma-associated h
agcgggguuuccagggaa

SEQ ID NO: 4002912 - RNA, 14 nt, Human herpesvirus 8 [Kaposi`s sarcoma-associated h
agcugcagccagga

SEQ ID NO: 4002913 - RNA, 14 nt, Human herpesvirus 8 [Kaposi`s sarcoma-associated h
aggaagcauccgga

SEQ ID NO: 4002914 - RNA, 18 nt, Human herpesvirus 8 [Kaposi`s sarcoma-associated h
aggcgcugaaaagggaac

SEQ ID NO: 4002915 - RNA, 22 nt, Human herpesvirus 8 [Kaposi`s sarcoma-associated h
agggaaguuucagagccuucac

SEQ ID NO: 4002916 - RNA, 19 nt, Human herpesvirus 8 [Kaposi`s sarcoma-associated h
agggcaugaggcuggaccu

SEQ ID NO: 4002917 - RNA, 21 nt, Human herpesvirus 8 [Kaposi`s sarcoma-associated h
aggggaguaggguaggaaggg

SEQ ID NO: 4002918 - RNA, 14 nt, Human herpesvirus 8 [Kaposi`s sarcoma-associated h
aggguaacucugaa

SEQ ID NO: 4002919 - RNA, 23 nt, Human herpesvirus 8 [Kaposi`s sarcoma-associated h
agggugccuuggacggacggcac

SEQ ID NO: 4002920 - RNA, 19 nt, Human herpesvirus 8 [Kaposi`s sarcoma-associated h
agggugcgaaggaccugau

SEQ ID NO: 4002921 - RNA, 18 nt, Human herpesvirus 8 [Kaposi`s sarcoma-associated h
agguucacuugggagcug

SEQ ID NO: 4002922 - RNA, 20 nt, Human herpesvirus 8 [Kaposi`s sarcoma-associated h
agguuguaacacaaaagcaa

SEQ ID NO: 4002923 - RNA, 20 nt, Human herpesvirus 8 [Kaposi`s sarcoma-associated h
agucacgcacuuggcccuga

SEQ ID NO: 4002924 - RNA, 20 nt, Human herpesvirus 8 [Kaposi`s sarcoma-associated h
agucgccgguagcugccugg

SEQ ID NO: 4002925 - RNA, 24 nt, Human herpesvirus 8 [Kaposi`s sarcoma-associated h
agucgggacucgcgcaugcgugaa

SEQ ID NO: 4002926 - RNA, 19 nt, Human herpesvirus 8 [Kaposi`s sarcoma-associated h
agugcacacucgcuguccu

SEQ ID NO: 4002927 - RNA, 12 nt, Human herpesvirus 8 [Kaposi`s sarcoma-associated h
agugccuggcau

SEQ ID NO: 4002928 - RNA, 13 nt, Human herpesvirus 8 [Kaposi`s sarcoma-associated h
aguggaguggugu

SEQ ID NO: 4002929 - RNA, 23 nt, Human herpesvirus 8 [Kaposi`s sarcoma-associated h
agugguuauuuuuuuccuaggcg

SEQ ID NO: 4002930 - RNA, 16 nt, Human herpesvirus 8 [Kaposi`s sarcoma-associated h
aguuaaagcugucacu

SEQ ID NO: 4002931 - RNA, 22 nt, Human herpesvirus 8 [Kaposi`s sarcoma-associated h
aguugaucgauuucuguauaca

SEQ ID NO: 4002932 - RNA, 16 nt, Human herpesvirus 8 [Kaposi`s sarcoma-associated h
aguuucagagccuuca

SEQ ID NO: 4002933 - RNA, 15 nt, Human herpesvirus 8 [Kaposi`s sarcoma-associated h
auaaaaugggccaug

SEQ ID NO: 4002934 - RNA, 23 nt, Human herpesvirus 8 [Kaposi`s sarcoma-associated h
auaaacagccuuggugcuaggca

SEQ ID NO: 4002935 - RNA, 13 nt, Human herpesvirus 8 [Kaposi`s sarcoma-associated h
auacaaaaacaca

SEQ ID NO: 4002936 - RNA, 17 nt, Human herpesvirus 8 [Kaposi`s sarcoma-associated h
auacccuggaucaggga

SEQ ID NO: 4002937 - RNA, 12 nt, Human herpesvirus 8 [Kaposi`s sarcoma-associated h
auacuuggcaag

SEQ ID NO: 4002938 - RNA, 13 nt, Human herpesvirus 8 [Kaposi`s sarcoma-associated h
auagcgcucugcc

SEQ ID NO: 4002939 - RNA, 18 nt, Human herpesvirus 8 [Kaposi`s sarcoma-associated h
auagggggaugagccaga

SEQ ID NO: 4002940 - RNA, 12 nt, Human herpesvirus 8 [Kaposi`s sarcoma-associated h
auauaaugugaa

SEQ ID NO: 4002941 - RNA, 17 nt, Human herpesvirus 8 [Kaposi`s sarcoma-associated h
aucacgccauaccccug

SEQ ID NO: 4002942 - RNA, 14 nt, Human herpesvirus 8 [Kaposi`s sarcoma-associated h
aucagaacaguggu

SEQ ID NO: 4002943 - RNA, 16 nt, Human herpesvirus 8 [Kaposi`s sarcoma-associated h
aucaggagggucaaug

SEQ ID NO: 4002944 - RNA, 12 nt, Human herpesvirus 8 [Kaposi`s sarcoma-associated h
aucaucgguagc

SEQ ID NO: 4002945 - RNA, 19 nt, Human herpesvirus 8 [Kaposi`s sarcoma-associated h
aucugcugucuaguggaga

SEQ ID NO: 4002946 - RNA, 19 nt, Human herpesvirus 8 [Kaposi`s sarcoma-associated h
aucugguugacacccugga

SEQ ID NO: 4002947 - RNA, 18 nt, Human herpesvirus 8 [Kaposi`s sarcoma-associated h
aucuuugcagugucuaug

SEQ ID NO: 4002948 - RNA, 15 nt, Human herpesvirus 8 [Kaposi`s sarcoma-associated h
augacaacugccaca

SEQ ID NO: 4002949 - RNA, 18 nt, Human herpesvirus 8 [Kaposi`s sarcoma-associated h
augacaccccucccucgc

SEQ ID NO: 4002950 - RNA, 14 nt, Human herpesvirus 8 [Kaposi`s sarcoma-associated h
augacagggaagug

SEQ ID NO: 4002951 - RNA, 20 nt, Human herpesvirus 8 [Kaposi`s sarcoma-associated h
augcagcagcgugacacuac

SEQ ID NO: 4002952 - RNA, 19 nt, Human herpesvirus 8 [Kaposi`s sarcoma-associated h
augcccaacuucaucacau

SEQ ID NO: 4002953 - RNA, 22 nt, Human herpesvirus 8 [Kaposi`s sarcoma-associated h
augccuacaccguauuguuaug

SEQ ID NO: 4002954 - RNA, 17 nt, Human herpesvirus 8 [Kaposi`s sarcoma-associated h
augcucaggucugucac

SEQ ID NO: 4002955 - RNA, 17 nt, Human herpesvirus 8 [Kaposi`s sarcoma-associated h
auggccggcacgcggug

SEQ ID NO: 4002956 - RNA, 15 nt, Human herpesvirus 8 [Kaposi`s sarcoma-associated h
augggugugugccag

SEQ ID NO: 4002957 - RNA, 11 nt, Human herpesvirus 8 [Kaposi`s sarcoma-associated h
auguaaauugg

SEQ ID NO: 4002958 - RNA, 21 nt, Human herpesvirus 8 [Kaposi`s sarcoma-associated h
augucucgugacggugacauu

SEQ ID NO: 4002959 - RNA, 21 nt, Human herpesvirus 8 [Kaposi`s sarcoma-associated h
augucuuuccgugucuccuug

SEQ ID NO: 4002960 - RNA, 14 nt, Human herpesvirus 8 [Kaposi`s sarcoma-associated h
augugacugaacau

SEQ ID NO: 4002961 - RNA, 16 nt, Human herpesvirus 8 [Kaposi`s sarcoma-associated h
auuaaagcacucggug

SEQ ID NO: 4002962 - RNA, 14 nt, Human herpesvirus 8 [Kaposi`s sarcoma-associated h
auuaacaaacaagg

SEQ ID NO: 4002963 - RNA, 14 nt, Human herpesvirus 8 [Kaposi`s sarcoma-associated h
auuaagggggaagg

SEQ ID NO: 4002964 - RNA, 21 nt, Human herpesvirus 8 [Kaposi`s sarcoma-associated h
auuaugguuccguucuccuuc

SEQ ID NO: 4002965 - RNA, 14 nt, Human herpesvirus 8 [Kaposi`s sarcoma-associated h
auugacuguggaga

SEQ ID NO: 4002966 - RNA, 13 nt, Human herpesvirus 8 [Kaposi`s sarcoma-associated h
auugccaccucug

SEQ ID NO: 4002967 - RNA, 11 nt, Human herpesvirus 8 [Kaposi`s sarcoma-associated h
ugauagcugga

SEQ ID NO: 4002968 - RNA, 20 nt, Human herpesvirus 8 [Kaposi`s sarcoma-associated h
ugauuaaagggggugguauu

SEQ ID NO: 4002969 - RNA, 22 nt, Human herpesvirus 8 [Kaposi`s sarcoma-associated h
ugcaacccucuacucuuccggg

SEQ ID NO: 4002970 - RNA, 17 nt, Human herpesvirus 8 [Kaposi`s sarcoma-associated h
ugcacauuuucagauau

SEQ ID NO: 4002971 - RNA, 21 nt, Human herpesvirus 8 [Kaposi`s sarcoma-associated h
ugcagggcgcugcucuuguca

SEQ ID NO: 4002972 - RNA, 19 nt, Human herpesvirus 8 [Kaposi`s sarcoma-associated h
ugccaacgaccugaugcag

SEQ ID NO: 4002973 - RNA, 18 nt, Human herpesvirus 8 [Kaposi`s sarcoma-associated h
ugccauggagaauaucca

SEQ ID NO: 4002974 - RNA, 19 nt, Human herpesvirus 8 [Kaposi`s sarcoma-associated h
ugcccucccaaagaguguc

SEQ ID NO: 4002975 - RNA, 19 nt, Human herpesvirus 8 [Kaposi`s sarcoma-associated h
ugcccugguugacacaaug

SEQ ID NO: 4002976 - RNA, 13 nt, Human herpesvirus 8 [Kaposi`s sarcoma-associated h
ugccugggugcug

SEQ ID NO: 4002977 - RNA, 14 nt, Human herpesvirus 8 [Kaposi`s sarcoma-associated h
ugccugguggagca

SEQ ID NO: 4002978 - RNA, 17 nt, Human herpesvirus 8 [Kaposi`s sarcoma-associated h
ugcgcgucagcaguguu

SEQ ID NO: 4002979 - RNA, 17 nt, Human herpesvirus 8 [Kaposi`s sarcoma-associated h
ugcgguauuugcagaca

SEQ ID NO: 4002980 - RNA, 15 nt, Human herpesvirus 8 [Kaposi`s sarcoma-associated h
ugcucagacagauuc

SEQ ID NO: 4002981 - RNA, 17 nt, Human herpesvirus 8 [Kaposi`s sarcoma-associated h
ugcucuuccuccuaguc

SEQ ID NO: 4002982 - RNA, 22 nt, Human herpesvirus 8 [Kaposi`s sarcoma-associated h
uggaggaagcauccggacugag

SEQ ID NO: 4002983 - RNA, 21 nt, Human herpesvirus 8 [Kaposi`s sarcoma-associated h
uggaugaccaacaggcugucc

SEQ ID NO: 4002984 - RNA, 23 nt, Human herpesvirus 8 [Kaposi`s sarcoma-associated h
uggcaccugaggugcucuuccca

SEQ ID NO: 4002985 - RNA, 13 nt, Human herpesvirus 8 [Kaposi`s sarcoma-associated h
uggcagcgcacca

SEQ ID NO: 4002986 - RNA, 12 nt, Human herpesvirus 8 [Kaposi`s sarcoma-associated h
uggcaugcuggg

SEQ ID NO: 4002987 - RNA, 18 nt, Human herpesvirus 8 [Kaposi`s sarcoma-associated h
uggcauuugucagaaguu

SEQ ID NO: 4002988 - RNA, 18 nt, Human herpesvirus 8 [Kaposi`s sarcoma-associated h
uggcccgucuguauacgu

SEQ ID NO: 4002989 - RNA, 21 nt, Human herpesvirus 8 [Kaposi`s sarcoma-associated h
uggcccugauaugcauguguc

SEQ ID NO: 4002990 - RNA, 12 nt, Human herpesvirus 8 [Kaposi`s sarcoma-associated h
uggcggccaugg

SEQ ID NO: 4002991 - RNA, 17 nt, Human herpesvirus 8 [Kaposi`s sarcoma-associated h
uggcguggaggccagga

SEQ ID NO: 4002992 - RNA, 18 nt, Human herpesvirus 8 [Kaposi`s sarcoma-associated h
uggcuucuauaagcaccu

SEQ ID NO: 4002993 - RNA, 20 nt, Human herpesvirus 8 [Kaposi`s sarcoma-associated h
ugggagcggguugucuacau

SEQ ID NO: 4002994 - RNA, 23 nt, Human herpesvirus 8 [Kaposi`s sarcoma-associated h
ugggccgugguucaucagccuca

SEQ ID NO: 4002995 - RNA, 22 nt, Human herpesvirus 8 [Kaposi`s sarcoma-associated h
uggggcuacacaucauaaagua

SEQ ID NO: 4002996 - RNA, 21 nt, Human herpesvirus 8 [Kaposi`s sarcoma-associated h
uggguguaagcuguacauaau

SEQ ID NO: 4002997 - RNA, 13 nt, Human herpesvirus 8 [Kaposi`s sarcoma-associated h
auuggagcucuua

SEQ ID NO: 4002998 - RNA, 14 nt, Human herpesvirus 8 [Kaposi`s sarcoma-associated h
auuuaauaaacacu

SEQ ID NO: 4002999 - RNA, 23 nt, Human herpesvirus 8 [Kaposi`s sarcoma-associated h
auuuacgguggugugccuggugg

SEQ ID NO: 4003000 - RNA, 19 nt, Human herpesvirus 8 [Kaposi`s sarcoma-associated h
auuuauuuuuuacuacagg

SEQ ID NO: 4003001 - RNA, 19 nt, Human herpesvirus 8 [Kaposi`s sarcoma-associated h
auuucucuaucuaucucug

SEQ ID NO: 4003002 - RNA, 17 nt, Human herpesvirus 8 [Kaposi`s sarcoma-associated h
caaaauucgcagggaga

SEQ ID NO: 4003003 - RNA, 18 nt, Human herpesvirus 8 [Kaposi`s sarcoma-associated h
caaacacaggcggagagc

SEQ ID NO: 4003004 - RNA, 15 nt, Human herpesvirus 8 [Kaposi`s sarcoma-associated h
caaaccccauggcag

SEQ ID NO: 4003005 - RNA, 17 nt, Human herpesvirus 8 [Kaposi`s sarcoma-associated h
caaaguauauuaguguu

SEQ ID NO: 4003006 - RNA, 15 nt, Human herpesvirus 8 [Kaposi`s sarcoma-associated h
caaaugauauuuuga

SEQ ID NO: 4003007 - RNA, 21 nt, Human herpesvirus 8 [Kaposi`s sarcoma-associated h
caaauggcguccgcucuccca

SEQ ID NO: 4003008 - RNA, 18 nt, Human herpesvirus 8 [Kaposi`s sarcoma-associated h
caacccacacuggcccaa

SEQ ID NO: 4003009 - RNA, 19 nt, Human herpesvirus 8 [Kaposi`s sarcoma-associated h
caaccgucuccgccaggga

SEQ ID NO: 4003010 - RNA, 22 nt, Human herpesvirus 8 [Kaposi`s sarcoma-associated h
caagccagucguacgcggccac

SEQ ID NO: 4003011 - RNA, 17 nt, Human herpesvirus 8 [Kaposi`s sarcoma-associated h
caaggcgcggacaggca

SEQ ID NO: 4003012 - RNA, 22 nt, Human herpesvirus 8 [Kaposi`s sarcoma-associated h
caauauaacagcaacauguuua

SEQ ID NO: 4003013 - RNA, 19 nt, Human herpesvirus 8 [Kaposi`s sarcoma-associated h
caaucucucauagacuuuc

SEQ ID NO: 4003014 - RNA, 14 nt, Human herpesvirus 8 [Kaposi`s sarcoma-associated h
caauugacugugga

SEQ ID NO: 4003015 - RNA, 15 nt, Human herpesvirus 8 [Kaposi`s sarcoma-associated h
cacagauuguggcau

SEQ ID NO: 4003016 - RNA, 23 nt, Human herpesvirus 8 [Kaposi`s sarcoma-associated h
cacagcaugccgucagggcccac

SEQ ID NO: 4003017 - RNA, 14 nt, Human herpesvirus 8 [Kaposi`s sarcoma-associated h
caccaagaaggaau

SEQ ID NO: 4003018 - RNA, 14 nt, Human herpesvirus 8 [Kaposi`s sarcoma-associated h
caccacgccacaac

SEQ ID NO: 4003019 - RNA, 21 nt, Human herpesvirus 8 [Kaposi`s sarcoma-associated h
cacccaccuacuuccagggcc

SEQ ID NO: 4003020 - RNA, 20 nt, Human herpesvirus 8 [Kaposi`s sarcoma-associated h
cacccuauccaucagucagg

SEQ ID NO: 4003021 - RNA, 20 nt, Human herpesvirus 8 [Kaposi`s sarcoma-associated h
caccgucgccaaacaggcgc

SEQ ID NO: 4003022 - RNA, 16 nt, Human herpesvirus 8 [Kaposi`s sarcoma-associated h
caccucuacagagggc

SEQ ID NO: 4003023 - RNA, 14 nt, Human herpesvirus 8 [Kaposi`s sarcoma-associated h
caccuggcccaaac

SEQ ID NO: 4003024 - RNA, 23 nt, Human herpesvirus 8 [Kaposi`s sarcoma-associated h
cacuauauaaccuggcugccagg

SEQ ID NO: 4003025 - RNA, 22 nt, Human herpesvirus 8 [Kaposi`s sarcoma-associated h
cacucgaggggugacaccuuuc

SEQ ID NO: 4003026 - RNA, 19 nt, Human herpesvirus 8 [Kaposi`s sarcoma-associated h
cacucgcuguccuggagga

SEQ ID NO: 4003027 - RNA, 19 nt, Human herpesvirus 8 [Kaposi`s sarcoma-associated h
cacuuccucuaucagcugc

SEQ ID NO: 4003028 - RNA, 22 nt, Human herpesvirus 8 [Kaposi`s sarcoma-associated h
cagaagagcauuuuucccuccu

SEQ ID NO: 4003029 - RNA, 23 nt, Human herpesvirus 8 [Kaposi`s sarcoma-associated h
cagacgacaaaacgcacacgaau

SEQ ID NO: 4003030 - RNA, 19 nt, Human herpesvirus 8 [Kaposi`s sarcoma-associated h
cagacgugcccagacacca

SEQ ID NO: 4003031 - RNA, 14 nt, Human herpesvirus 8 [Kaposi`s sarcoma-associated h
cagagucugaaccc

SEQ ID NO: 4003032 - RNA, 18 nt, Human herpesvirus 8 [Kaposi`s sarcoma-associated h
cagaguuuuaugggcuca

SEQ ID NO: 4003033 - RNA, 12 nt, Human herpesvirus 8 [Kaposi`s sarcoma-associated h
cagcaaagcaca

SEQ ID NO: 4003034 - RNA, 13 nt, Human herpesvirus 8 [Kaposi`s sarcoma-associated h
cagcaacugcguc

SEQ ID NO: 4003035 - RNA, 17 nt, Human herpesvirus 8 [Kaposi`s sarcoma-associated h
cagcagcaagcacagaa

SEQ ID NO: 4003036 - RNA, 13 nt, Human herpesvirus 8 [Kaposi`s sarcoma-associated h
cagcaucccccaa

SEQ ID NO: 4003037 - RNA, 23 nt, Human herpesvirus 8 [Kaposi`s sarcoma-associated h
cagccacaucagcuuggcgaccu

SEQ ID NO: 4003038 - RNA, 21 nt, Human herpesvirus 8 [Kaposi`s sarcoma-associated h
cagccgcgcgaccucccacgg

SEQ ID NO: 4003039 - RNA, 15 nt, Human herpesvirus 8 [Kaposi`s sarcoma-associated h
cagcgaaaccccccu

SEQ ID NO: 4003040 - RNA, 24 nt, Human herpesvirus 8 [Kaposi`s sarcoma-associated h
cagcgcgacggaaguuggccucca

SEQ ID NO: 4003041 - RNA, 17 nt, Human herpesvirus 8 [Kaposi`s sarcoma-associated h
cagcugcagccaggaag

SEQ ID NO: 4003042 - RNA, 20 nt, Human herpesvirus 8 [Kaposi`s sarcoma-associated h
caggcgccuaugacuaggag

SEQ ID NO: 4003043 - RNA, 18 nt, Human herpesvirus 8 [Kaposi`s sarcoma-associated h
caggcuguccucgcaagc

SEQ ID NO: 4003044 - RNA, 17 nt, Human herpesvirus 8 [Kaposi`s sarcoma-associated h
cagggcacccuccccca

SEQ ID NO: 4003045 - RNA, 14 nt, Human herpesvirus 8 [Kaposi`s sarcoma-associated h
cagggccuggccuc

SEQ ID NO: 4003046 - RNA, 17 nt, Human herpesvirus 8 [Kaposi`s sarcoma-associated h
cagucgagccgccagga

SEQ ID NO: 4003047 - RNA, 21 nt, Human herpesvirus 8 [Kaposi`s sarcoma-associated h
caguguaucccccacaggaca

SEQ ID NO: 4003048 - RNA, 16 nt, Human herpesvirus 8 [Kaposi`s sarcoma-associated h
caguuaaucuuuauug

SEQ ID NO: 4003049 - RNA, 12 nt, Human herpesvirus 8 [Kaposi`s sarcoma-associated h
cauaauccccgg

SEQ ID NO: 4003050 - RNA, 23 nt, Human herpesvirus 8 [Kaposi`s sarcoma-associated h
cauaauuggauggggcaugggca

SEQ ID NO: 4003051 - RNA, 15 nt, Human herpesvirus 8 [Kaposi`s sarcoma-associated h
cauauugguauauga

SEQ ID NO: 4003052 - RNA, 16 nt, Human herpesvirus 8 [Kaposi`s sarcoma-associated h
caucauaaaguacuuu

SEQ ID NO: 4003053 - RNA, 24 nt, Human herpesvirus 8 [Kaposi`s sarcoma-associated h
caucauaaaguacuuuuccauggc

SEQ ID NO: 4003054 - RNA, 20 nt, Human herpesvirus 8 [Kaposi`s sarcoma-associated h
guguacaaaaaaaacauagu

SEQ ID NO: 4003055 - RNA, 16 nt, Human herpesvirus 8 [Kaposi`s sarcoma-associated h
gugucgccagugccug

SEQ ID NO: 4003056 - RNA, 17 nt, Human herpesvirus 8 [Kaposi`s sarcoma-associated h
guuaagcuuugcagcca

SEQ ID NO: 4003057 - RNA, 15 nt, Human herpesvirus 8 [Kaposi`s sarcoma-associated h
guucacuugggagcu

SEQ ID NO: 4003058 - RNA, 20 nt, Human herpesvirus 8 [Kaposi`s sarcoma-associated h
guucgaccaccccugcaccu

SEQ ID NO: 4003059 - RNA, 16 nt, Human herpesvirus 8 [Kaposi`s sarcoma-associated h
guuuaccugcacucca

SEQ ID NO: 4003060 - RNA, 23 nt, Human herpesvirus 8 [Kaposi`s sarcoma-associated h
guuuauaaugccaauauaucagc

SEQ ID NO: 4003061 - RNA, 17 nt, Human herpesvirus 8 [Kaposi`s sarcoma-associated h
guuucuaaagcacgcca

SEQ ID NO: 4003062 - RNA, 20 nt, Human herpesvirus 8 [Kaposi`s sarcoma-associated h
guuucugaucccuaaggguc

SEQ ID NO: 4003063 - RNA, 14 nt, Human herpesvirus 8 [Kaposi`s sarcoma-associated h
uaaacgacagcucg

SEQ ID NO: 4003064 - RNA, 18 nt, Human herpesvirus 8 [Kaposi`s sarcoma-associated h
uaaagagggaucccaggc

SEQ ID NO: 4003065 - RNA, 20 nt, Human herpesvirus 8 [Kaposi`s sarcoma-associated h
uaaagagggaucccaggcag

SEQ ID NO: 4003066 - RNA, 16 nt, Human herpesvirus 8 [Kaposi`s sarcoma-associated h
uaaaguacuuuuccau

SEQ ID NO: 4003067 - RNA, 17 nt, Human herpesvirus 8 [Kaposi`s sarcoma-associated h
uaaaguacuuuuccaug

SEQ ID NO: 4003068 - RNA, 20 nt, Human herpesvirus 8 [Kaposi`s sarcoma-associated h
uaaccgcaaagauaagccaa

SEQ ID NO: 4003069 - RNA, 21 nt, Human herpesvirus 8 [Kaposi`s sarcoma-associated h
uaacgagcgucgauggcccug

SEQ ID NO: 4003070 - RNA, 23 nt, Human herpesvirus 8 [Kaposi`s sarcoma-associated h
uaacucacguagccuuucucuaa

SEQ ID NO: 4003071 - RNA, 15 nt, Human herpesvirus 8 [Kaposi`s sarcoma-associated h
uaagcuuugcagcca

SEQ ID NO: 4003072 - RNA, 15 nt, Human herpesvirus 8 [Kaposi`s sarcoma-associated h
uaaugguguguuuau

SEQ ID NO: 4003073 - RNA, 22 nt, Human herpesvirus 8 [Kaposi`s sarcoma-associated h
uacaagcgaucacgacggauuu

SEQ ID NO: 4003074 - RNA, 14 nt, Human herpesvirus 8 [Kaposi`s sarcoma-associated h
uacauaacacacac

SEQ ID NO: 4003075 - RNA, 16 nt, Human herpesvirus 8 [Kaposi`s sarcoma-associated h
uacucguugcacacag

SEQ ID NO: 4003076 - RNA, 21 nt, Human herpesvirus 8 [Kaposi`s sarcoma-associated h
uagagacuggcggguggcuca

SEQ ID NO: 4003077 - RNA, 20 nt, Human herpesvirus 8 [Kaposi`s sarcoma-associated h
uagagcgacugcuggcuuca

SEQ ID NO: 4003078 - RNA, 19 nt, Human herpesvirus 8 [Kaposi`s sarcoma-associated h
uagcacacacgaugaagag

SEQ ID NO: 4003079 - RNA, 15 nt, Human herpesvirus 8 [Kaposi`s sarcoma-associated h
uagcuucagcuucag

SEQ ID NO: 4003080 - RNA, 15 nt, Human herpesvirus 8 [Kaposi`s sarcoma-associated h
uauagugguuuacau

SEQ ID NO: 4003081 - RNA, 13 nt, Human herpesvirus 8 [Kaposi`s sarcoma-associated h
uaucaaagaaagg

SEQ ID NO: 4003082 - RNA, 18 nt, Human herpesvirus 8 [Kaposi`s sarcoma-associated h
uaucaggcuagugcugua

SEQ ID NO: 4003083 - RNA, 17 nt, Human herpesvirus 8 [Kaposi`s sarcoma-associated h
ucucgcugcucagacag

SEQ ID NO: 4003084 - RNA, 15 nt, Human herpesvirus 8 [Kaposi`s sarcoma-associated h
ucucgguacugcgca

SEQ ID NO: 4003085 - RNA, 20 nt, Human herpesvirus 8 [Kaposi`s sarcoma-associated h
ucugccgaagucagugccac

SEQ ID NO: 4003086 - RNA, 19 nt, Human herpesvirus 8 [Kaposi`s sarcoma-associated h
ucugcgcgucagcaguguu

SEQ ID NO: 4003087 - RNA, 17 nt, Human herpesvirus 8 [Kaposi`s sarcoma-associated h
ucuggccugugcccaaa

SEQ ID NO: 4003088 - RNA, 14 nt, Human herpesvirus 8 [Kaposi`s sarcoma-associated h
ucuuccuccauccc

SEQ ID NO: 4003089 - RNA, 16 nt, Human herpesvirus 8 [Kaposi`s sarcoma-associated h
ucuucuguugccaggc

SEQ ID NO: 4003090 - RNA, 17 nt, Human herpesvirus 8 [Kaposi`s sarcoma-associated h
ugaaugugaucacggag

SEQ ID NO: 4003091 - RNA, 23 nt, Human herpesvirus 8 [Kaposi`s sarcoma-associated h
ugacaaucuggauguguaucuua

SEQ ID NO: 4003092 - RNA, 19 nt, Human herpesvirus 8 [Kaposi`s sarcoma-associated h
ugacuuuuuaaaggggacg

SEQ ID NO: 4003093 - RNA, 17 nt, Human herpesvirus 8 [Kaposi`s sarcoma-associated h
ugagagacugcaggcca

SEQ ID NO: 4003094 - RNA, 16 nt, Human herpesvirus 8 [Kaposi`s sarcoma-associated h
ugagcgcgcucugucg

SEQ ID NO: 4003095 - RNA, 16 nt, Human herpesvirus 8 [Kaposi`s sarcoma-associated h
ugaggccaagugcauu

SEQ ID NO: 4003096 - RNA, 16 nt, Human herpesvirus 8 [Kaposi`s sarcoma-associated h
ugaggccaauggauuc

SEQ ID NO: 4003097 - RNA, 23 nt, Human herpesvirus 8 [Kaposi`s sarcoma-associated h
ugagggaguguuuuuugccaugg

SEQ ID NO: 4003098 - RNA, 23 nt, Human herpesvirus 8 [Kaposi`s sarcoma-associated h
ugagguggcgcggaaacugggca

SEQ ID NO: 4003099 - RNA, 17 nt, Human herpesvirus 8 [Kaposi`s sarcoma-associated h
ugauaugcaugugucug

SEQ ID NO: 4003100 - RNA, 23 nt, Human herpesvirus 8 [Kaposi`s sarcoma-associated h
ugaugguguuggacaccaccguc

SEQ ID NO: 4003101 - RNA, 15 nt, Human herpesvirus 8 [Kaposi`s sarcoma-associated h
ugauuuuccagggac

SEQ ID NO: 4003102 - RNA, 13 nt, Human herpesvirus 8 [Kaposi`s sarcoma-associated h
ugcagugugcagu

SEQ ID NO: 4003103 - RNA, 16 nt, Human herpesvirus 8 [Kaposi`s sarcoma-associated h
ugcauagggcuuugau

SEQ ID NO: 4003104 - RNA, 17 nt, Human herpesvirus 8 [Kaposi`s sarcoma-associated h
ugccaauaacccgcccu

SEQ ID NO: 4003105 - RNA, 19 nt, Human herpesvirus 8 [Kaposi`s sarcoma-associated h
ugcgaacuugcucuuuuca

SEQ ID NO: 4003106 - RNA, 19 nt, Human herpesvirus 8 [Kaposi`s sarcoma-associated h
ugcgcgcuggcucagacac

SEQ ID NO: 4003107 - RNA, 18 nt, Human herpesvirus 8 [Kaposi`s sarcoma-associated h
ugcggugcugcccaggac

SEQ ID NO: 4003108 - RNA, 15 nt, Human herpesvirus 8 [Kaposi`s sarcoma-associated h
ugcugccacugccac

SEQ ID NO: 4003109 - RNA, 18 nt, Human herpesvirus 8 [Kaposi`s sarcoma-associated h
ugcuggaucccagugccu

SEQ ID NO: 4003110 - RNA, 14 nt, Human herpesvirus 8 [Kaposi`s sarcoma-associated h
ugcuucuguuugaa

SEQ ID NO: 4003111 - RNA, 16 nt, Human herpesvirus 8 [Kaposi`s sarcoma-associated h
uggaaagcuccucgag

SEQ ID NO: 4003112 - RNA, 16 nt, Human herpesvirus 8 [Kaposi`s sarcoma-associated h
uggaauauaaugugaa

SEQ ID NO: 4003113 - RNA, 17 nt, Human herpesvirus 8 [Kaposi`s sarcoma-associated h
uggaggaagagggaugg

SEQ ID NO: 4003114 - RNA, 22 nt, Human herpesvirus 8 [Kaposi`s sarcoma-associated h
uggauuuucacuauggggucag

SEQ ID NO: 4003115 - RNA, 18 nt, Human herpesvirus 8 [Kaposi`s sarcoma-associated h
uggccacccuggggacug

SEQ ID NO: 4003116 - RNA, 20 nt, Human herpesvirus 8 [Kaposi`s sarcoma-associated h
uggcccaaacuagcagagac

SEQ ID NO: 4003117 - RNA, 18 nt, Human herpesvirus 8 [Kaposi`s sarcoma-associated h
uggccggcacgcgguguc

SEQ ID NO: 4003118 - RNA, 15 nt, Human herpesvirus 8 [Kaposi`s sarcoma-associated h
uggccugugcccaaa

SEQ ID NO: 4003119 - RNA, 21 nt, Human herpesvirus 8 [Kaposi`s sarcoma-associated h
uggcgcaggagucagagcagu

SEQ ID NO: 4003120 - RNA, 13 nt, Human herpesvirus 8 [Kaposi`s sarcoma-associated h
uggcgccaugggu

SEQ ID NO: 4003121 - RNA, 14 nt, Human herpesvirus 8 [Kaposi`s sarcoma-associated h
uggcgcgccacagu

SEQ ID NO: 4003122 - RNA, 15 nt, Human herpesvirus 8 [Kaposi`s sarcoma-associated h
uggcucagacaccgu

SEQ ID NO: 4003123 - RNA, 15 nt, Human herpesvirus 8 [Kaposi`s sarcoma-associated h
uggcugccuggacag

SEQ ID NO: 4003124 - RNA, 15 nt, Human herpesvirus 8 [Kaposi`s sarcoma-associated h
ugggagcugucccac

SEQ ID NO: 4003125 - RNA, 20 nt, Human herpesvirus 8 [Kaposi`s sarcoma-associated h
ugggccaugacaacugccac

SEQ ID NO: 4003126 - RNA, 21 nt, Human herpesvirus 8 [Kaposi`s sarcoma-associated h
uggggguggggggaggaggaa

SEQ ID NO: 4003127 - RNA, 19 nt, Human herpesvirus 8 [Kaposi`s sarcoma-associated h
uggggguuggguggggaga

SEQ ID NO: 4003128 - RNA, 14 nt, Human herpesvirus 8 [Kaposi`s sarcoma-associated h
uguaagcugcuggu

SEQ ID NO: 4003129 - RNA, 13 nt, Human herpesvirus 8 [Kaposi`s sarcoma-associated h
uguagauaauuga

SEQ ID NO: 4003130 - RNA, 20 nt, Human herpesvirus 8 [Kaposi`s sarcoma-associated h
uguccucauuagucgggacu

SEQ ID NO: 4003131 - RNA, 21 nt, Human herpesvirus 8 [Kaposi`s sarcoma-associated h
ugugggaaacguguccugcca

SEQ ID NO: 4003132 - RNA, 13 nt, Human herpesvirus 8 [Kaposi`s sarcoma-associated h
uguguagguuguu

SEQ ID NO: 4003133 - RNA, 16 nt, Human herpesvirus 8 [Kaposi`s sarcoma-associated h
uguuaucuuugcagug

SEQ ID NO: 4003134 - RNA, 18 nt, Human herpesvirus 8 [Kaposi`s sarcoma-associated h
uguuaucuuugcaguguc

SEQ ID NO: 4003135 - RNA, 23 nt, Human herpesvirus 8 [Kaposi`s sarcoma-associated h
uuaacagccacgacguggcccac

SEQ ID NO: 4003136 - RNA, 20 nt, Human herpesvirus 8 [Kaposi`s sarcoma-associated h
uuaaccggcuuguacaguga

SEQ ID NO: 4003137 - RNA, 21 nt, Human herpesvirus 8 [Kaposi`s sarcoma-associated h
uuaagagugccacuaaaaccg

SEQ ID NO: 4003138 - RNA, 22 nt, Human herpesvirus 8 [Kaposi`s sarcoma-associated h
uuacauuuucucgugugcccuu

SEQ ID NO: 4003139 - RNA, 20 nt, Human herpesvirus 8 [Kaposi`s sarcoma-associated h
uuaccgcuacugugggugca

SEQ ID NO: 4003140 - RNA, 17 nt, Human herpesvirus 8 [Kaposi`s sarcoma-associated h
uuacuaagagaacagca

SEQ ID NO: 4003141 - RNA, 17 nt, Human herpesvirus 8 [Kaposi`s sarcoma-associated h
uuagauggcacagaguc

SEQ ID NO: 4003142 - RNA, 20 nt, Human herpesvirus 8 [Kaposi`s sarcoma-associated h
uuagccugcaguguggggau

SEQ ID NO: 4003143 - RNA, 23 nt, Human herpesvirus 8 [Kaposi`s sarcoma-associated h
uuauacaaacaacauaaacauua

SEQ ID NO: 4003144 - RNA, 18 nt, Human herpesvirus 8 [Kaposi`s sarcoma-associated h
uuauuaaaagcauugucu

SEQ ID NO: 4003145 - RNA, 17 nt, Human herpesvirus 8 [Kaposi`s sarcoma-associated h
uuccuuuuuucaaaagu

SEQ ID NO: 4003146 - RNA, 16 nt, Human herpesvirus 8 [Kaposi`s sarcoma-associated h
uucuuuauucugucaa

SEQ ID NO: 4003147 - RNA, 12 nt, Human herpesvirus 8 [Kaposi`s sarcoma-associated h
uugauugugacu

SEQ ID NO: 4003148 - RNA, 13 nt, Human herpesvirus 8 [Kaposi`s sarcoma-associated h
uugcgauugcuca

SEQ ID NO: 4003149 - RNA, 19 nt, Human herpesvirus 8 [Kaposi`s sarcoma-associated h
uuggaguuaaagcugucac

SEQ ID NO: 4003150 - RNA, 20 nt, Human herpesvirus 8 [Kaposi`s sarcoma-associated h
uuguauaaccgugcuacuua

SEQ ID NO: 4003151 - RNA, 19 nt, Human herpesvirus 8 [Kaposi`s sarcoma-associated h
uuuaaaagacucuagauaa

SEQ ID NO: 4003152 - RNA, 12 nt, Human herpesvirus 8 [Kaposi`s sarcoma-associated h
uuuaauaaacac

SEQ ID NO: 4003153 - RNA, 16 nt, Human herpesvirus 8 [Kaposi`s sarcoma-associated h
uuuagacugcgugcau

SEQ ID NO: 4003154 - RNA, 19 nt, Human herpesvirus 8 [Kaposi`s sarcoma-associated h
uuuguaaugaauaacuuua

SEQ ID NO: 4003155 - RNA, 14 nt, Human herpesvirus 8 [Kaposi`s sarcoma-associated h
uuuuguugugagca

SEQ ID NO: 4003156 - RNA, 21 nt, Human herpesvirus 8 [Kaposi`s sarcoma-associated h
gauucuuuuaaucuguuuauu

SEQ ID NO: 4003157 - RNA, 12 nt, Human herpesvirus 8 [Kaposi`s sarcoma-associated h
gcaaaacacaaa

SEQ ID NO: 4003158 - RNA, 12 nt, Human herpesvirus 8 [Kaposi`s sarcoma-associated h
gcaagcacagaa

SEQ ID NO: 4003159 - RNA, 19 nt, Human herpesvirus 8 [Kaposi`s sarcoma-associated h
gcacaacauuaaacacaua

SEQ ID NO: 4003160 - RNA, 23 nt, Human herpesvirus 8 [Kaposi`s sarcoma-associated h
gcaccuguguacaauacgccuuc

SEQ ID NO: 4003161 - RNA, 16 nt, Human herpesvirus 8 [Kaposi`s sarcoma-associated h
gcaccuuaaacacaac

SEQ ID NO: 4003162 - RNA, 14 nt, Human herpesvirus 8 [Kaposi`s sarcoma-associated h
gcacgguauagaga

SEQ ID NO: 4003163 - RNA, 21 nt, Human herpesvirus 8 [Kaposi`s sarcoma-associated h
gcacggugaacguccccgcgu

SEQ ID NO: 4003164 - RNA, 14 nt, Human herpesvirus 8 [Kaposi`s sarcoma-associated h
gcacuccaagccag

SEQ ID NO: 4003165 - RNA, 17 nt, Human herpesvirus 8 [Kaposi`s sarcoma-associated h
gcagccucuacccugcc

SEQ ID NO: 4003166 - RNA, 15 nt, Human herpesvirus 8 [Kaposi`s sarcoma-associated h
gcagcgccaguggau

SEQ ID NO: 4003167 - RNA, 23 nt, Human herpesvirus 8 [Kaposi`s sarcoma-associated h
gcaguagcccgccgcaaggagca

SEQ ID NO: 4003168 - RNA, 18 nt, Human herpesvirus 8 [Kaposi`s sarcoma-associated h
gcaguaguaaacgacagc

SEQ ID NO: 4003169 - RNA, 22 nt, Human herpesvirus 8 [Kaposi`s sarcoma-associated h
gcaguggaccgcgagacaucag

SEQ ID NO: 4003170 - RNA, 15 nt, Human herpesvirus 8 [Kaposi`s sarcoma-associated h
gcauaauaaaacaaa

SEQ ID NO: 4003171 - RNA, 17 nt, Human herpesvirus 8 [Kaposi`s sarcoma-associated h
gcauaauaaaacaaaua

SEQ ID NO: 4003172 - RNA, 15 nt, Human herpesvirus 8 [Kaposi`s sarcoma-associated h
gcaugccgucagggc

SEQ ID NO: 4003173 - RNA, 15 nt, Human herpesvirus 8 [Kaposi`s sarcoma-associated h
gcaugguugcaacag

SEQ ID NO: 4003174 - RNA, 20 nt, Human herpesvirus 8 [Kaposi`s sarcoma-associated h
gcauuuggacacaacaugca

SEQ ID NO: 4003175 - RNA, 20 nt, Human herpesvirus 8 [Kaposi`s sarcoma-associated h
gccaccgucgccgcuccgca

SEQ ID NO: 4003176 - RNA, 15 nt, Human herpesvirus 8 [Kaposi`s sarcoma-associated h
gccaggacucacugg

SEQ ID NO: 4003177 - RNA, 16 nt, Human herpesvirus 8 [Kaposi`s sarcoma-associated h
gccaugacaacugcca

SEQ ID NO: 4003178 - RNA, 22 nt, Human herpesvirus 8 [Kaposi`s sarcoma-associated h
gccauuuuuguggcugccugga

SEQ ID NO: 4003179 - RNA, 24 nt, Human herpesvirus 8 [Kaposi`s sarcoma-associated h
gcccgccgcaaggagcagccugca

SEQ ID NO: 4003180 - RNA, 18 nt, Human herpesvirus 8 [Kaposi`s sarcoma-associated h
gcccucgggacuucugga

SEQ ID NO: 4003181 - RNA, 15 nt, Human herpesvirus 8 [Kaposi`s sarcoma-associated h
gccggcaccauggcc

SEQ ID NO: 4003182 - RNA, 14 nt, Human herpesvirus 8 [Kaposi`s sarcoma-associated h
gccgggugaggcca

SEQ ID NO: 4003183 - RNA, 13 nt, Human herpesvirus 8 [Kaposi`s sarcoma-associated h
gccucccaacaug

SEQ ID NO: 4003184 - RNA, 17 nt, Human herpesvirus 8 [Kaposi`s sarcoma-associated h
gccucucaucauuucug

SEQ ID NO: 4003185 - RNA, 18 nt, Human herpesvirus 8 [Kaposi`s sarcoma-associated h
gccugcgucuacugcugc

SEQ ID NO: 4003186 - RNA, 22 nt, Human herpesvirus 8 [Kaposi`s sarcoma-associated h
gccuuggaagauauguugugcg

SEQ ID NO: 4003187 - RNA, 23 nt, Human herpesvirus 8 [Kaposi`s sarcoma-associated h
gcgacggaaguuggccuccagca

SEQ ID NO: 4003188 - RNA, 23 nt, Human herpesvirus 8 [Kaposi`s sarcoma-associated h
gcgcagauuugugcggcgcagca

SEQ ID NO: 4003189 - RNA, 17 nt, Human herpesvirus 8 [Kaposi`s sarcoma-associated h
gcgccacagucgagccg

SEQ ID NO: 4003190 - RNA, 23 nt, Human herpesvirus 8 [Kaposi`s sarcoma-associated h
gcggcccagcgucgucgauggga

SEQ ID NO: 4003191 - RNA, 14 nt, Human herpesvirus 8 [Kaposi`s sarcoma-associated h
gcggccuuuucugg

SEQ ID NO: 4003192 - RNA, 17 nt, Human herpesvirus 8 [Kaposi`s sarcoma-associated h
gcggcuaggcacccgga

SEQ ID NO: 4003193 - RNA, 17 nt, Human herpesvirus 8 [Kaposi`s sarcoma-associated h
gcguaugggaacacaau

SEQ ID NO: 4003194 - RNA, 17 nt, Human herpesvirus 8 [Kaposi`s sarcoma-associated h
gcgugucucagggagca

SEQ ID NO: 4003195 - RNA, 16 nt, Human herpesvirus 8 [Kaposi`s sarcoma-associated h
gcguuuaccugcacuc

SEQ ID NO: 4003196 - RNA, 19 nt, Human herpesvirus 8 [Kaposi`s sarcoma-associated h
gcuacugcuuguucaggag

SEQ ID NO: 4003197 - RNA, 16 nt, Human herpesvirus 8 [Kaposi`s sarcoma-associated h
gcugaugaucgccacc

SEQ ID NO: 4003198 - RNA, 18 nt, Human herpesvirus 8 [Kaposi`s sarcoma-associated h
gcugcaauguacugccau

SEQ ID NO: 4003199 - RNA, 16 nt, Human herpesvirus 8 [Kaposi`s sarcoma-associated h
gcuggucccgugguca

SEQ ID NO: 4003200 - RNA, 15 nt, Human herpesvirus 8 [Kaposi`s sarcoma-associated h
gcuucauuaugcaug

SEQ ID NO: 4003201 - RNA, 22 nt, Human herpesvirus 8 [Kaposi`s sarcoma-associated h
gcuugcacgccaacccucagug

SEQ ID NO: 4003202 - RNA, 15 nt, Human herpesvirus 8 [Kaposi`s sarcoma-associated h
gcuuugcagccaggu

SEQ ID NO: 4003203 - RNA, 19 nt, Human herpesvirus 8 [Kaposi`s sarcoma-associated h
ggaaauggggaacacagaa

SEQ ID NO: 4003204 - RNA, 20 nt, Human herpesvirus 8 [Kaposi`s sarcoma-associated h
ggaagggggcucccugggga

SEQ ID NO: 4003205 - RNA, 17 nt, Human herpesvirus 8 [Kaposi`s sarcoma-associated h
ggaaguaugucguggga

SEQ ID NO: 4003206 - RNA, 20 nt, Human herpesvirus 8 [Kaposi`s sarcoma-associated h
ggaccucaaagaagaggugg

SEQ ID NO: 4003207 - RNA, 19 nt, Human herpesvirus 8 [Kaposi`s sarcoma-associated h
ggaccucgucuagcacaca

SEQ ID NO: 4003208 - RNA, 22 nt, Human herpesvirus 8 [Kaposi`s sarcoma-associated h
ggaccuuacgauggaagaccua

SEQ ID NO: 4003209 - RNA, 20 nt, Human herpesvirus 8 [Kaposi`s sarcoma-associated h
ggacuuucuccgugagaugg

SEQ ID NO: 4003210 - RNA, 19 nt, Human herpesvirus 8 [Kaposi`s sarcoma-associated h
ggagccggcccugacagag

SEQ ID NO: 4003211 - RNA, 14 nt, Human herpesvirus 8 [Kaposi`s sarcoma-associated h
ggaggagggcaggu

SEQ ID NO: 4003212 - RNA, 15 nt, Human herpesvirus 8 [Kaposi`s sarcoma-associated h
ggagucagagcagug

SEQ ID NO: 4003213 - RNA, 14 nt, Human herpesvirus 8 [Kaposi`s sarcoma-associated h
ggauaggcuggggg

SEQ ID NO: 4003214 - RNA, 18 nt, Human herpesvirus 8 [Kaposi`s sarcoma-associated h
ggauagugucuggcuggc

SEQ ID NO: 4003215 - RNA, 19 nt, Human herpesvirus 8 [Kaposi`s sarcoma-associated h
ggauguaaguccggccacc

SEQ ID NO: 4003216 - RNA, 17 nt, Human herpesvirus 8 [Kaposi`s sarcoma-associated h
ggcagcaauauuaaagg

SEQ ID NO: 4003217 - RNA, 13 nt, Human herpesvirus 8 [Kaposi`s sarcoma-associated h
ggcagucaaaugg

SEQ ID NO: 4003218 - RNA, 19 nt, Human herpesvirus 8 [Kaposi`s sarcoma-associated h
ggccagagguuugaggcgc

SEQ ID NO: 4003219 - RNA, 21 nt, Human herpesvirus 8 [Kaposi`s sarcoma-associated h
ggccagagguuugaggcgcug

SEQ ID NO: 4003220 - RNA, 22 nt, Human herpesvirus 8 [Kaposi`s sarcoma-associated h
ggccagagguuugaggcgcuga

SEQ ID NO: 4003221 - RNA, 21 nt, Human herpesvirus 8 [Kaposi`s sarcoma-associated h
ggccaggcccugcauccggca

SEQ ID NO: 4003222 - RNA, 17 nt, Human herpesvirus 8 [Kaposi`s sarcoma-associated h
ggcgagcccguguggga

SEQ ID NO: 4003223 - RNA, 16 nt, Human herpesvirus 8 [Kaposi`s sarcoma-associated h
ggcggccgcuaagaaa

SEQ ID NO: 4003224 - RNA, 23 nt, Human herpesvirus 8 [Kaposi`s sarcoma-associated h
ggcuacacaucauaaaguacuuu

SEQ ID NO: 4003225 - RNA, 17 nt, Human herpesvirus 8 [Kaposi`s sarcoma-associated h
ggcugaugcucuggcca

SEQ ID NO: 4003226 - RNA, 15 nt, Human herpesvirus 8 [Kaposi`s sarcoma-associated h
ggcugccuggacagu

SEQ ID NO: 4003227 - RNA, 21 nt, Human herpesvirus 8 [Kaposi`s sarcoma-associated h
gggacuugauaaucuccugga

SEQ ID NO: 4003228 - RNA, 14 nt, Human herpesvirus 8 [Kaposi`s sarcoma-associated h
gggccuggccucga

SEQ ID NO: 4003229 - RNA, 16 nt, Human herpesvirus 8 [Kaposi`s sarcoma-associated h
gggccuucgcacccca

SEQ ID NO: 4003230 - RNA, 22 nt, Human herpesvirus 8 [Kaposi`s sarcoma-associated h
gggcguccacauggcagcugaa

SEQ ID NO: 4003231 - RNA, 18 nt, Human herpesvirus 8 [Kaposi`s sarcoma-associated h
gggcuguucucgccugga

SEQ ID NO: 4003232 - RNA, 12 nt, Human herpesvirus 8 [Kaposi`s sarcoma-associated h
gggugcacugag

SEQ ID NO: 4003233 - RNA, 12 nt, Human herpesvirus 8 [Kaposi`s sarcoma-associated h
gguggcauuugu

SEQ ID NO: 4003234 - RNA, 12 nt, Human herpesvirus 8 [Kaposi`s sarcoma-associated h
ggugggugggga

SEQ ID NO: 4003235 - RNA, 11 nt, Human herpesvirus 8 [Kaposi`s sarcoma-associated h
gguugguggug

SEQ ID NO: 4003236 - RNA, 16 nt, Human herpesvirus 8 [Kaposi`s sarcoma-associated h
gguuuccuagccagau

SEQ ID NO: 4003237 - RNA, 15 nt, Human herpesvirus 8 [Kaposi`s sarcoma-associated h
guaagaggacccagg

SEQ ID NO: 4003238 - RNA, 21 nt, Human herpesvirus 8 [Kaposi`s sarcoma-associated h
guaaugcugccccuagaccug

SEQ ID NO: 4003239 - RNA, 13 nt, Human herpesvirus 8 [Kaposi`s sarcoma-associated h
guaauguguuuua

SEQ ID NO: 4003240 - RNA, 16 nt, Human herpesvirus 8 [Kaposi`s sarcoma-associated h
guacacagaugugacu

SEQ ID NO: 4003241 - RNA, 16 nt, Human herpesvirus 8 [Kaposi`s sarcoma-associated h
guagcuaugcccaccg

SEQ ID NO: 4003242 - RNA, 18 nt, Human herpesvirus 8 [Kaposi`s sarcoma-associated h
gucagagaauacagugcu

SEQ ID NO: 4003243 - RNA, 21 nt, Human herpesvirus 8 [Kaposi`s sarcoma-associated h
gucagguucacuugggagcug

SEQ ID NO: 4003244 - RNA, 20 nt, Human herpesvirus 8 [Kaposi`s sarcoma-associated h
guccaaagcuuacgaggaca

SEQ ID NO: 4003245 - RNA, 17 nt, Human herpesvirus 8 [Kaposi`s sarcoma-associated h
guccauggcaguggaca

SEQ ID NO: 4003246 - RNA, 13 nt, Human herpesvirus 8 [Kaposi`s sarcoma-associated h
gucccacugcugc

SEQ ID NO: 4003247 - RNA, 15 nt, Human herpesvirus 8 [Kaposi`s sarcoma-associated h
guccgacaugugcuu

SEQ ID NO: 4003248 - RNA, 13 nt, Human herpesvirus 8 [Kaposi`s sarcoma-associated h
gucgacagagcca

SEQ ID NO: 4003249 - RNA, 16 nt, Human herpesvirus 8 [Kaposi`s sarcoma-associated h
gucgccgaggaccuca

SEQ ID NO: 4003250 - RNA, 19 nt, Human herpesvirus 8 [Kaposi`s sarcoma-associated h
gucuacuucgcuaacugua

SEQ ID NO: 4003251 - RNA, 17 nt, Human herpesvirus 8 [Kaposi`s sarcoma-associated h
gucucccuucgugcccc

SEQ ID NO: 4003252 - RNA, 15 nt, Human herpesvirus 8 [Kaposi`s sarcoma-associated h
gucuccgccagggac

SEQ ID NO: 4003253 - RNA, 17 nt, Human herpesvirus 8 [Kaposi`s sarcoma-associated h
gucugcuuuugcgcagg

SEQ ID NO: 4003254 - RNA, 13 nt, Human herpesvirus 8 [Kaposi`s sarcoma-associated h
gugacccggccug

SEQ ID NO: 4003255 - RNA, 23 nt, Human herpesvirus 8 [Kaposi`s sarcoma-associated h
gugcaggaaauagcccuggggga

SEQ ID NO: 4003256 - RNA, 17 nt, Human herpesvirus 8 [Kaposi`s sarcoma-associated h
gugccugggugcugucc

SEQ ID NO: 4003257 - RNA, 13 nt, Human herpesvirus 8 [Kaposi`s sarcoma-associated h
guggaccgugugu

SEQ ID NO: 4003258 - RNA, 18 nt, Human herpesvirus 8 [Kaposi`s sarcoma-associated h
guggauccgcaaugucag

SEQ ID NO: 4003259 - RNA, 21 nt, Human herpesvirus 8 [Kaposi`s sarcoma-associated h
guguugguuacacuaaccaca

SEQ ID NO: 4003260 - RNA, 19 nt, Human herpesvirus 8 [Kaposi`s sarcoma-associated h
guuaagcuuugcagccagg

SEQ ID NO: 4003261 - RNA, 16 nt, Human herpesvirus 8 [Kaposi`s sarcoma-associated h
guuaugggugugugcc

SEQ ID NO: 4003262 - RNA, 22 nt, Human herpesvirus 8 [Kaposi`s sarcoma-associated h
guucauauucccaccuccaccu

SEQ ID NO: 4003263 - RNA, 21 nt, Human herpesvirus 8 [Kaposi`s sarcoma-associated h
guuuauaacaaugaaacgaca

SEQ ID NO: 4003264 - RNA, 12 nt, Human herpesvirus 8 [Kaposi`s sarcoma-associated h
guuugagucuuu

SEQ ID NO: 4003265 - RNA, 23 nt, Human herpesvirus 8 [Kaposi`s sarcoma-associated h
uaaaagacucuagauaaaugggu

SEQ ID NO: 4003266 - RNA, 19 nt, Human herpesvirus 8 [Kaposi`s sarcoma-associated h
uaaaagcauugucuuaagu

SEQ ID NO: 4003267 - RNA, 15 nt, Human herpesvirus 8 [Kaposi`s sarcoma-associated h
uaaaagguuuccugu

SEQ ID NO: 4003268 - RNA, 14 nt, Human herpesvirus 8 [Kaposi`s sarcoma-associated h
uaaaggagggauuu

SEQ ID NO: 4003269 - RNA, 16 nt, Human herpesvirus 8 [Kaposi`s sarcoma-associated h
uaagccucaacgggca

SEQ ID NO: 4003270 - RNA, 21 nt, Human herpesvirus 8 [Kaposi`s sarcoma-associated h
uacaauaaagcugagccacaa

SEQ ID NO: 4003271 - RNA, 18 nt, Human herpesvirus 8 [Kaposi`s sarcoma-associated h
uacacagccaauguuuuu

SEQ ID NO: 4003272 - RNA, 17 nt, Human herpesvirus 8 [Kaposi`s sarcoma-associated h
uacagugaguggcugua

SEQ ID NO: 4003273 - RNA, 20 nt, Human herpesvirus 8 [Kaposi`s sarcoma-associated h
uacccuuccuacccuacucc

SEQ ID NO: 4003274 - RNA, 15 nt, Human herpesvirus 8 [Kaposi`s sarcoma-associated h
uaccucccuuugucu

SEQ ID NO: 4003275 - RNA, 21 nt, Human herpesvirus 8 [Kaposi`s sarcoma-associated h
uacggaagggggcucccuggg

SEQ ID NO: 4003276 - RNA, 23 nt, Human herpesvirus 8 [Kaposi`s sarcoma-associated h
uacgucccucuuggcuguuacaa

SEQ ID NO: 4003277 - RNA, 13 nt, Human herpesvirus 8 [Kaposi`s sarcoma-associated h
uagaccucacccc

SEQ ID NO: 4003278 - RNA, 17 nt, Human herpesvirus 8 [Kaposi`s sarcoma-associated h
uagcguuggcuagucau

SEQ ID NO: 4003279 - RNA, 20 nt, Human herpesvirus 8 [Kaposi`s sarcoma-associated h
uaggaaacacggcccgccuc

SEQ ID NO: 4003280 - RNA, 15 nt, Human herpesvirus 8 [Kaposi`s sarcoma-associated h
uaguucaacugcauu

SEQ ID NO: 4003281 - RNA, 17 nt, Human herpesvirus 8 [Kaposi`s sarcoma-associated h
uauaauggauggcuaug

SEQ ID NO: 4003282 - RNA, 16 nt, Human herpesvirus 8 [Kaposi`s sarcoma-associated h
uauagcagcugucccg

SEQ ID NO: 4003283 - RNA, 15 nt, Human herpesvirus 8 [Kaposi`s sarcoma-associated h
uaugggcuuguacau

SEQ ID NO: 4003284 - RNA, 23 nt, Human herpesvirus 8 [Kaposi`s sarcoma-associated h
ucaccgugccuucgaggccaggc

SEQ ID NO: 4003285 - RNA, 20 nt, Human herpesvirus 8 [Kaposi`s sarcoma-associated h
ucacggccguguuuuucugg

SEQ ID NO: 4003286 - RNA, 16 nt, Human herpesvirus 8 [Kaposi`s sarcoma-associated h
ucagaaaagggcaugu

SEQ ID NO: 4003287 - RNA, 17 nt, Human herpesvirus 8 [Kaposi`s sarcoma-associated h
ucagagagacccugggc

SEQ ID NO: 4003288 - RNA, 18 nt, Human herpesvirus 8 [Kaposi`s sarcoma-associated h
ucagggugccggaguuca

SEQ ID NO: 4003289 - RNA, 19 nt, Human herpesvirus 8 [Kaposi`s sarcoma-associated h
ucaucguggugcccugccc

SEQ ID NO: 4003290 - RNA, 17 nt, Human herpesvirus 8 [Kaposi`s sarcoma-associated h
ucaucuacuuuggacag

SEQ ID NO: 4003291 - RNA, 18 nt, Human herpesvirus 8 [Kaposi`s sarcoma-associated h
uccacccauccuccucag

SEQ ID NO: 4003292 - RNA, 14 nt, Human herpesvirus 8 [Kaposi`s sarcoma-associated h
ucccacccacacau

SEQ ID NO: 4003293 - RNA, 14 nt, Human herpesvirus 8 [Kaposi`s sarcoma-associated h
ucccagcaauaaac

SEQ ID NO: 4003294 - RNA, 15 nt, Human herpesvirus 8 [Kaposi`s sarcoma-associated h
ucccagugccucagc

SEQ ID NO: 4003295 - RNA, 15 nt, Human herpesvirus 8 [Kaposi`s sarcoma-associated h
uccccggcagcaccu

SEQ ID NO: 4003296 - RNA, 15 nt, Human herpesvirus 8 [Kaposi`s sarcoma-associated h
ucccgagacccccag

SEQ ID NO: 4003297 - RNA, 14 nt, Human herpesvirus 8 [Kaposi`s sarcoma-associated h
ucccgugcccaggc

SEQ ID NO: 4003298 - RNA, 18 nt, Human herpesvirus 8 [Kaposi`s sarcoma-associated h
ucccuucgugccccagcg

SEQ ID NO: 4003299 - RNA, 17 nt, Human herpesvirus 8 [Kaposi`s sarcoma-associated h
uccgcaaugucagguuc

SEQ ID NO: 4003300 - RNA, 19 nt, Human herpesvirus 8 [Kaposi`s sarcoma-associated h
uccgcacagacgacugggc

SEQ ID NO: 4003301 - RNA, 14 nt, Human herpesvirus 8 [Kaposi`s sarcoma-associated h
uccucaaacauggg

SEQ ID NO: 4003302 - RNA, 13 nt, Human herpesvirus 8 [Kaposi`s sarcoma-associated h
uccucuugcgcua

SEQ ID NO: 4003303 - RNA, 15 nt, Human herpesvirus 8 [Kaposi`s sarcoma-associated h
uccugcauuuggaca

SEQ ID NO: 4003304 - RNA, 16 nt, Human herpesvirus 8 [Kaposi`s sarcoma-associated h
uccugucuaaaaucag

SEQ ID NO: 4003305 - RNA, 23 nt, Human herpesvirus 8 [Kaposi`s sarcoma-associated h
ucgaaaaaaauaaugcagacaga

SEQ ID NO: 4003306 - RNA, 20 nt, Human herpesvirus 8 [Kaposi`s sarcoma-associated h
ucgcaagggcgucugugccu

SEQ ID NO: 4003307 - RNA, 18 nt, Human herpesvirus 8 [Kaposi`s sarcoma-associated h
ucgcacguuagaaacccc

SEQ ID NO: 4003308 - RNA, 22 nt, Human herpesvirus 8 [Kaposi`s sarcoma-associated h
ucgcgcgaacacguaccugacc

SEQ ID NO: 4003309 - RNA, 22 nt, Human herpesvirus 8 [Kaposi`s sarcoma-associated h
ucgugcuuacccacccccuucu

SEQ ID NO: 4003310 - RNA, 23 nt, Human herpesvirus 8 [Kaposi`s sarcoma-associated h
ucguugacauguggagccacugg

SEQ ID NO: 4003311 - RNA, 13 nt, Human herpesvirus 8 [Kaposi`s sarcoma-associated h
ucuacgugcccuu

SEQ ID NO: 4003312 - RNA, 17 nt, Human herpesvirus 8 [Kaposi`s sarcoma-associated h
ucucacccaauacuuaa

SEQ ID NO: 4003313 - RNA, 15 nt, Human herpesvirus 8 [Kaposi`s sarcoma-associated h
cuggagacggggaag

SEQ ID NO: 4003314 - RNA, 19 nt, Human herpesvirus 8 [Kaposi`s sarcoma-associated h
cugggagauuggguuggga

SEQ ID NO: 4003315 - RNA, 20 nt, Human herpesvirus 8 [Kaposi`s sarcoma-associated h
cugggccacaaaacugccaa

SEQ ID NO: 4003316 - RNA, 13 nt, Human herpesvirus 8 [Kaposi`s sarcoma-associated h
cugguaccagaga

SEQ ID NO: 4003317 - RNA, 20 nt, Human herpesvirus 8 [Kaposi`s sarcoma-associated h
cugguggaacaugcugccac

SEQ ID NO: 4003318 - RNA, 17 nt, Human herpesvirus 8 [Kaposi`s sarcoma-associated h
cugguucaggauuucga

SEQ ID NO: 4003319 - RNA, 13 nt, Human herpesvirus 8 [Kaposi`s sarcoma-associated h
cuguaaaacacug

SEQ ID NO: 4003320 - RNA, 15 nt, Human herpesvirus 8 [Kaposi`s sarcoma-associated h
cuguaugacugcccu

SEQ ID NO: 4003321 - RNA, 14 nt, Human herpesvirus 8 [Kaposi`s sarcoma-associated h
cugucagauuuaca

SEQ ID NO: 4003322 - RNA, 11 nt, Human herpesvirus 8 [Kaposi`s sarcoma-associated h
cugugcccaaa

SEQ ID NO: 4003323 - RNA, 20 nt, Human herpesvirus 8 [Kaposi`s sarcoma-associated h
cugugcccccuuaauccuua

SEQ ID NO: 4003324 - RNA, 16 nt, Human herpesvirus 8 [Kaposi`s sarcoma-associated h
cuguuacaauaaagcc

SEQ ID NO: 4003325 - RNA, 19 nt, Human herpesvirus 8 [Kaposi`s sarcoma-associated h
cuguuugcuuaauaaauug

SEQ ID NO: 4003326 - RNA, 20 nt, Human herpesvirus 8 [Kaposi`s sarcoma-associated h
cuuacuaagagaacagcaca

SEQ ID NO: 4003327 - RNA, 15 nt, Human herpesvirus 8 [Kaposi`s sarcoma-associated h
cuuauaacagugcuc

SEQ ID NO: 4003328 - RNA, 13 nt, Human herpesvirus 8 [Kaposi`s sarcoma-associated h
cuuauuaaaagca

SEQ ID NO: 4003329 - RNA, 18 nt, Human herpesvirus 8 [Kaposi`s sarcoma-associated h
cuuggcguuuaccugcac

SEQ ID NO: 4003330 - RNA, 16 nt, Human herpesvirus 8 [Kaposi`s sarcoma-associated h
cuuucaucacuuccag

SEQ ID NO: 4003331 - RNA, 15 nt, Human herpesvirus 8 [Kaposi`s sarcoma-associated h
cuuuuuaacuucuga

SEQ ID NO: 4003332 - RNA, 21 nt, Human herpesvirus 8 [Kaposi`s sarcoma-associated h
gaaacugcucucgcugcucag

SEQ ID NO: 4003333 - RNA, 14 nt, Human herpesvirus 8 [Kaposi`s sarcoma-associated h
gaacaucagagaug

SEQ ID NO: 4003334 - RNA, 19 nt, Human herpesvirus 8 [Kaposi`s sarcoma-associated h
gaagaaaaggaugcacaac

SEQ ID NO: 4003335 - RNA, 13 nt, Human herpesvirus 8 [Kaposi`s sarcoma-associated h
gaagaugaagaug

SEQ ID NO: 4003336 - RNA, 23 nt, Human herpesvirus 8 [Kaposi`s sarcoma-associated h
gaaucgaacaauaauaaaaacau

SEQ ID NO: 4003337 - RNA, 22 nt, Human herpesvirus 8 [Kaposi`s sarcoma-associated h
gaauguggaauauaaugugaaa

SEQ ID NO: 4003338 - RNA, 20 nt, Human herpesvirus 8 [Kaposi`s sarcoma-associated h
gacaaacacuguggauuuua

SEQ ID NO: 4003339 - RNA, 20 nt, Human herpesvirus 8 [Kaposi`s sarcoma-associated h
gacaaaugugugggugggaa

SEQ ID NO: 4003340 - RNA, 16 nt, Human herpesvirus 8 [Kaposi`s sarcoma-associated h
gacaccauucuuuuau

SEQ ID NO: 4003341 - RNA, 20 nt, Human herpesvirus 8 [Kaposi`s sarcoma-associated h
gacaccgucgccaaacaggc

SEQ ID NO: 4003342 - RNA, 23 nt, Human herpesvirus 8 [Kaposi`s sarcoma-associated h
gacagggguguuaggucuggugg

SEQ ID NO: 4003343 - RNA, 14 nt, Human herpesvirus 8 [Kaposi`s sarcoma-associated h
gacauguggagcca

SEQ ID NO: 4003344 - RNA, 23 nt, Human herpesvirus 8 [Kaposi`s sarcoma-associated h
gaccacauaauuggauggggcau

SEQ ID NO: 4003345 - RNA, 18 nt, Human herpesvirus 8 [Kaposi`s sarcoma-associated h
gaccccgauaugcaccuc

SEQ ID NO: 4003346 - RNA, 20 nt, Human herpesvirus 8 [Kaposi`s sarcoma-associated h
gaccccgauaugcaccucca

SEQ ID NO: 4003347 - RNA, 13 nt, Human herpesvirus 8 [Kaposi`s sarcoma-associated h
gacccuagucacu

SEQ ID NO: 4003348 - RNA, 20 nt, Human herpesvirus 8 [Kaposi`s sarcoma-associated h
gaccuaaccgcaaagauaag

SEQ ID NO: 4003349 - RNA, 15 nt, Human herpesvirus 8 [Kaposi`s sarcoma-associated h
gaccugaugcaggcc

SEQ ID NO: 4003350 - RNA, 16 nt, Human herpesvirus 8 [Kaposi`s sarcoma-associated h
gacgaggaugaggaag

SEQ ID NO: 4003351 - RNA, 23 nt, Human herpesvirus 8 [Kaposi`s sarcoma-associated h
gacgccauuugcgugcaaaaugu

SEQ ID NO: 4003352 - RNA, 17 nt, Human herpesvirus 8 [Kaposi`s sarcoma-associated h
gacugggucuaucugga

SEQ ID NO: 4003353 - RNA, 12 nt, Human herpesvirus 8 [Kaposi`s sarcoma-associated h
gagagacugcag

SEQ ID NO: 4003354 - RNA, 16 nt, Human herpesvirus 8 [Kaposi`s sarcoma-associated h
gagcacacuguguggu

SEQ ID NO: 4003355 - RNA, 17 nt, Human herpesvirus 8 [Kaposi`s sarcoma-associated h
gagcgagugugccuccu

SEQ ID NO: 4003356 - RNA, 22 nt, Human herpesvirus 8 [Kaposi`s sarcoma-associated h
gagcuguuacccugcucuggac

SEQ ID NO: 4003357 - RNA, 15 nt, Human herpesvirus 8 [Kaposi`s sarcoma-associated h
gagggaauggccucc

SEQ ID NO: 4003358 - RNA, 20 nt, Human herpesvirus 8 [Kaposi`s sarcoma-associated h
gagggcuguucucgccugga

SEQ ID NO: 4003359 - RNA, 24 nt, Human herpesvirus 8 [Kaposi`s sarcoma-associated h
gagggcuguucucgccuggagcag

SEQ ID NO: 4003360 - RNA, 17 nt, Human herpesvirus 8 [Kaposi`s sarcoma-associated h
gaguccauggcagugga

SEQ ID NO: 4003361 - RNA, 21 nt, Human herpesvirus 8 [Kaposi`s sarcoma-associated h
gagugggcggaaguacuggga

SEQ ID NO: 4003362 - RNA, 20 nt, Human herpesvirus 8 [Kaposi`s sarcoma-associated h
gauaauugagcgcugugcuu

SEQ ID NO: 4003363 - RNA, 22 nt, Human herpesvirus 8 [Kaposi`s sarcoma-associated h
gauaauugagcgcugugcuuuu

SEQ ID NO: 4003364 - RNA, 14 nt, Human herpesvirus 8 [Kaposi`s sarcoma-associated h
gauacacuacuuau

SEQ ID NO: 4003365 - RNA, 16 nt, Human herpesvirus 8 [Kaposi`s sarcoma-associated h
gauacugaucacugcg

SEQ ID NO: 4003366 - RNA, 17 nt, Human herpesvirus 8 [Kaposi`s sarcoma-associated h
gaucaacacuucguccc

SEQ ID NO: 4003367 - RNA, 20 nt, Human herpesvirus 8 [Kaposi`s sarcoma-associated h
gaucucccaauuacaggaga

SEQ ID NO: 4003368 - RNA, 12 nt, Human herpesvirus 8 [Kaposi`s sarcoma-associated h
gaugagccagaa

SEQ ID NO: 4003369 - RNA, 13 nt, Human herpesvirus 8 [Kaposi`s sarcoma-associated h
gauguuuuccagc

SEQ ID NO: 4003370 - RNA, 13 nt, Human herpesvirus 8 [Kaposi`s sarcoma-associated h
gauucugacagac

SEQ ID NO: 4003371 - RNA, 12 nt, Human herpesvirus 8 [Kaposi`s sarcoma-associated h
auaauggauggc

SEQ ID NO: 4003372 - RNA, 16 nt, Human herpesvirus 8 [Kaposi`s sarcoma-associated h
auaauggauggcuaug

SEQ ID NO: 4003373 - RNA, 15 nt, Human herpesvirus 8 [Kaposi`s sarcoma-associated h
auacaagacaacuaa

SEQ ID NO: 4003374 - RNA, 13 nt, Human herpesvirus 8 [Kaposi`s sarcoma-associated h
auacaugagagac

SEQ ID NO: 4003375 - RNA, 15 nt, Human herpesvirus 8 [Kaposi`s sarcoma-associated h
auagcuacaaauguu

SEQ ID NO: 4003376 - RNA, 24 nt, Human herpesvirus 8 [Kaposi`s sarcoma-associated h
auccacaggaagcgaaaagccugc

SEQ ID NO: 4003377 - RNA, 17 nt, Human herpesvirus 8 [Kaposi`s sarcoma-associated h
auccuuugggccguggu

SEQ ID NO: 4003378 - RNA, 20 nt, Human herpesvirus 8 [Kaposi`s sarcoma-associated h
aucgccguguugcgcgcugg

SEQ ID NO: 4003379 - RNA, 12 nt, Human herpesvirus 8 [Kaposi`s sarcoma-associated h
aucggcuugcac

SEQ ID NO: 4003380 - RNA, 14 nt, Human herpesvirus 8 [Kaposi`s sarcoma-associated h
aucuagacugcuag

SEQ ID NO: 4003381 - RNA, 16 nt, Human herpesvirus 8 [Kaposi`s sarcoma-associated h
aucuaucucugguggu

SEQ ID NO: 4003382 - RNA, 17 nt, Human herpesvirus 8 [Kaposi`s sarcoma-associated h
aucuaucucugguggug

SEQ ID NO: 4003383 - RNA, 14 nt, Human herpesvirus 8 [Kaposi`s sarcoma-associated h
aucuggcaugcugg

SEQ ID NO: 4003384 - RNA, 22 nt, Human herpesvirus 8 [Kaposi`s sarcoma-associated h
augaaaaguguucccaaaaaac

SEQ ID NO: 4003385 - RNA, 15 nt, Human herpesvirus 8 [Kaposi`s sarcoma-associated h
augaguuccacacag

SEQ ID NO: 4003386 - RNA, 18 nt, Human herpesvirus 8 [Kaposi`s sarcoma-associated h
augcuagcgugucugaaa

SEQ ID NO: 4003387 - RNA, 15 nt, Human herpesvirus 8 [Kaposi`s sarcoma-associated h
auggaccucugucuu

SEQ ID NO: 4003388 - RNA, 22 nt, Human herpesvirus 8 [Kaposi`s sarcoma-associated h
auggcaguggacacagucuggg

SEQ ID NO: 4003389 - RNA, 20 nt, Human herpesvirus 8 [Kaposi`s sarcoma-associated h
auggcccacggggacaugga

SEQ ID NO: 4003390 - RNA, 16 nt, Human herpesvirus 8 [Kaposi`s sarcoma-associated h
auggguuaacagugga

SEQ ID NO: 4003391 - RNA, 13 nt, Human herpesvirus 8 [Kaposi`s sarcoma-associated h
augguauggcgcu

SEQ ID NO: 4003392 - RNA, 22 nt, Human herpesvirus 8 [Kaposi`s sarcoma-associated h
augucauuuuuacuuuuacaag

SEQ ID NO: 4003393 - RNA, 23 nt, Human herpesvirus 8 [Kaposi`s sarcoma-associated h
auuccucuccgcauuaaagcacu

SEQ ID NO: 4003394 - RNA, 18 nt, Human herpesvirus 8 [Kaposi`s sarcoma-associated h
auucggagaacaugcugg

SEQ ID NO: 4003395 - RNA, 19 nt, Human herpesvirus 8 [Kaposi`s sarcoma-associated h
auucuacuuaaaauagcuc

SEQ ID NO: 4003396 - RNA, 19 nt, Human herpesvirus 8 [Kaposi`s sarcoma-associated h
auuggaggcacauaaggaa

SEQ ID NO: 4003397 - RNA, 17 nt, Human herpesvirus 8 [Kaposi`s sarcoma-associated h
auuuccugcugucuauc

SEQ ID NO: 4003398 - RNA, 17 nt, Human herpesvirus 8 [Kaposi`s sarcoma-associated h
auuucuuuuugccagag

SEQ ID NO: 4003399 - RNA, 15 nt, Human herpesvirus 8 [Kaposi`s sarcoma-associated h
auuuuucaucugaaa

SEQ ID NO: 4003400 - RNA, 16 nt, Human herpesvirus 8 [Kaposi`s sarcoma-associated h
auuuuuuuccuaggcg

SEQ ID NO: 4003401 - RNA, 16 nt, Human herpesvirus 8 [Kaposi`s sarcoma-associated h
caaaauaccugucgcu

SEQ ID NO: 4003402 - RNA, 19 nt, Human herpesvirus 8 [Kaposi`s sarcoma-associated h
caaacuucggaauuuccua

SEQ ID NO: 4003403 - RNA, 23 nt, Human herpesvirus 8 [Kaposi`s sarcoma-associated h
caacauguaaauuggccacugca

SEQ ID NO: 4003404 - RNA, 23 nt, Human herpesvirus 8 [Kaposi`s sarcoma-associated h
caacccacgccgucacagucgcc

SEQ ID NO: 4003405 - RNA, 21 nt, Human herpesvirus 8 [Kaposi`s sarcoma-associated h
caacuauuuccuuuuuucaaa

SEQ ID NO: 4003406 - RNA, 23 nt, Human herpesvirus 8 [Kaposi`s sarcoma-associated h
caacuauuuccuuuuuucaaaag

SEQ ID NO: 4003407 - RNA, 16 nt, Human herpesvirus 8 [Kaposi`s sarcoma-associated h
caagaucuuccagucu

SEQ ID NO: 4003408 - RNA, 18 nt, Human herpesvirus 8 [Kaposi`s sarcoma-associated h
caagcagcaaacggagac

SEQ ID NO: 4003409 - RNA, 20 nt, Human herpesvirus 8 [Kaposi`s sarcoma-associated h
caauagggauacuguuuaua

SEQ ID NO: 4003410 - RNA, 21 nt, Human herpesvirus 8 [Kaposi`s sarcoma-associated h
caauuuauuaagcaaacagua

SEQ ID NO: 4003411 - RNA, 23 nt, Human herpesvirus 8 [Kaposi`s sarcoma-associated h
cacacguagggcuuuacccucug

SEQ ID NO: 4003412 - RNA, 11 nt, Human herpesvirus 8 [Kaposi`s sarcoma-associated h
cacacuggccc

SEQ ID NO: 4003413 - RNA, 21 nt, Human herpesvirus 8 [Kaposi`s sarcoma-associated h
cacagaaacucccccaaccuc

SEQ ID NO: 4003414 - RNA, 22 nt, Human herpesvirus 8 [Kaposi`s sarcoma-associated h
cacaguguaucccccacaggac

SEQ ID NO: 4003415 - RNA, 22 nt, Human herpesvirus 8 [Kaposi`s sarcoma-associated h
cacauacacuagacuggcucug

SEQ ID NO: 4003416 - RNA, 20 nt, Human herpesvirus 8 [Kaposi`s sarcoma-associated h
cacauccgcugccaccugcg

SEQ ID NO: 4003417 - RNA, 14 nt, Human herpesvirus 8 [Kaposi`s sarcoma-associated h
cacaucugcugucu

SEQ ID NO: 4003418 - RNA, 20 nt, Human herpesvirus 8 [Kaposi`s sarcoma-associated h
caccaagguaggccagcugc

SEQ ID NO: 4003419 - RNA, 14 nt, Human herpesvirus 8 [Kaposi`s sarcoma-associated h
caccacaucugcug

SEQ ID NO: 4003420 - RNA, 14 nt, Human herpesvirus 8 [Kaposi`s sarcoma-associated h
caccgucuggcugg

SEQ ID NO: 4003421 - RNA, 16 nt, Human herpesvirus 8 [Kaposi`s sarcoma-associated h
caccuagcgggcacaa

SEQ ID NO: 4003422 - RNA, 15 nt, Human herpesvirus 8 [Kaposi`s sarcoma-associated h
caccugaggugcucu

SEQ ID NO: 4003423 - RNA, 13 nt, Human herpesvirus 8 [Kaposi`s sarcoma-associated h
caccuucuggcuu

SEQ ID NO: 4003424 - RNA, 16 nt, Human herpesvirus 8 [Kaposi`s sarcoma-associated h
cacgucgcucuuuacu

SEQ ID NO: 4003425 - RNA, 22 nt, Human herpesvirus 8 [Kaposi`s sarcoma-associated h
cacuauggggucaggguggacg

SEQ ID NO: 4003426 - RNA, 17 nt, Human herpesvirus 8 [Kaposi`s sarcoma-associated h
cacucagguguuuucca

SEQ ID NO: 4003427 - RNA, 20 nt, Human herpesvirus 8 [Kaposi`s sarcoma-associated h
cagacucuguguccuccucu

SEQ ID NO: 4003428 - RNA, 21 nt, Human herpesvirus 8 [Kaposi`s sarcoma-associated h
cagagcacccugaaacuccag

SEQ ID NO: 4003429 - RNA, 17 nt, Human herpesvirus 8 [Kaposi`s sarcoma-associated h
cagagcagugcucccgu

SEQ ID NO: 4003430 - RNA, 23 nt, Human herpesvirus 8 [Kaposi`s sarcoma-associated h
cagagccuucacggcacacuacu

SEQ ID NO: 4003431 - RNA, 16 nt, Human herpesvirus 8 [Kaposi`s sarcoma-associated h
cagagucuacgugcca

SEQ ID NO: 4003432 - RNA, 19 nt, Human herpesvirus 8 [Kaposi`s sarcoma-associated h
cagauccuccacagagccu

SEQ ID NO: 4003433 - RNA, 18 nt, Human herpesvirus 8 [Kaposi`s sarcoma-associated h
cagcaauaaacccacagc

SEQ ID NO: 4003434 - RNA, 19 nt, Human herpesvirus 8 [Kaposi`s sarcoma-associated h
cagcacauaugucucccuu

SEQ ID NO: 4003435 - RNA, 15 nt, Human herpesvirus 8 [Kaposi`s sarcoma-associated h
cagcaguagacgcag

SEQ ID NO: 4003436 - RNA, 17 nt, Human herpesvirus 8 [Kaposi`s sarcoma-associated h
cagcaguagacgcaggc

SEQ ID NO: 4003437 - RNA, 20 nt, Human herpesvirus 8 [Kaposi`s sarcoma-associated h
cagcauggccuuuuuaagac

SEQ ID NO: 4003438 - RNA, 22 nt, Human herpesvirus 8 [Kaposi`s sarcoma-associated h
cagccaccguaacuucaccgug

SEQ ID NO: 4003439 - RNA, 16 nt, Human herpesvirus 8 [Kaposi`s sarcoma-associated h
cagccggucgccaggg

SEQ ID NO: 4003440 - RNA, 17 nt, Human herpesvirus 8 [Kaposi`s sarcoma-associated h
cagccggucgccagggu

SEQ ID NO: 4003441 - RNA, 20 nt, Human herpesvirus 8 [Kaposi`s sarcoma-associated h
cagccucacggacaacgcca

SEQ ID NO: 4003442 - RNA, 21 nt, Human herpesvirus 8 [Kaposi`s sarcoma-associated h
cagccucacggacaacgccau

SEQ ID NO: 4003443 - RNA, 15 nt, Human herpesvirus 8 [Kaposi`s sarcoma-associated h
cagcugcagccagga

SEQ ID NO: 4003444 - RNA, 13 nt, Human herpesvirus 8 [Kaposi`s sarcoma-associated h
caggcgccuauga

SEQ ID NO: 4003445 - RNA, 17 nt, Human herpesvirus 8 [Kaposi`s sarcoma-associated h
cagggcagcgugucgcc

SEQ ID NO: 4003446 - RNA, 17 nt, Human herpesvirus 8 [Kaposi`s sarcoma-associated h
cagggcaugaggcugga

SEQ ID NO: 4003447 - RNA, 21 nt, Human herpesvirus 8 [Kaposi`s sarcoma-associated h
cagggcaugaggcuggaccuc

SEQ ID NO: 4003448 - RNA, 18 nt, Human herpesvirus 8 [Kaposi`s sarcoma-associated h
cagggugcggugcugccc

SEQ ID NO: 4003449 - RNA, 17 nt, Human herpesvirus 8 [Kaposi`s sarcoma-associated h
agcgccaccguguggcu

SEQ ID NO: 4003450 - RNA, 22 nt, Human herpesvirus 8 [Kaposi`s sarcoma-associated h
agcgccuagaaaguuuccucuu

SEQ ID NO: 4003451 - RNA, 22 nt, Human herpesvirus 8 [Kaposi`s sarcoma-associated h
agcguagaugaaugucucaaac

SEQ ID NO: 4003452 - RNA, 17 nt, Human herpesvirus 8 [Kaposi`s sarcoma-associated h
agcucaucaaugggaga

SEQ ID NO: 4003453 - RNA, 18 nt, Human herpesvirus 8 [Kaposi`s sarcoma-associated h
agcucaucaaugggagaa

SEQ ID NO: 4003454 - RNA, 16 nt, Human herpesvirus 8 [Kaposi`s sarcoma-associated h
agcuuugcagccaggu

SEQ ID NO: 4003455 - RNA, 21 nt, Human herpesvirus 8 [Kaposi`s sarcoma-associated h
aggaacagauuauuuuccuuc

SEQ ID NO: 4003456 - RNA, 19 nt, Human herpesvirus 8 [Kaposi`s sarcoma-associated h
aggaccuuacgauggaaga

SEQ ID NO: 4003457 - RNA, 22 nt, Human herpesvirus 8 [Kaposi`s sarcoma-associated h
aggaccuuucugcugcaucacg

SEQ ID NO: 4003458 - RNA, 20 nt, Human herpesvirus 8 [Kaposi`s sarcoma-associated h
aggaucugugugugaagcag

SEQ ID NO: 4003459 - RNA, 14 nt, Human herpesvirus 8 [Kaposi`s sarcoma-associated h
aggcuggaccuccu

SEQ ID NO: 4003460 - RNA, 22 nt, Human herpesvirus 8 [Kaposi`s sarcoma-associated h
agggcggaaaaauaaauuuucc

SEQ ID NO: 4003461 - RNA, 20 nt, Human herpesvirus 8 [Kaposi`s sarcoma-associated h
agggcucguucaaugcaugu

SEQ ID NO: 4003462 - RNA, 21 nt, Human herpesvirus 8 [Kaposi`s sarcoma-associated h
aggggcagacccaaaaaggac

SEQ ID NO: 4003463 - RNA, 16 nt, Human herpesvirus 8 [Kaposi`s sarcoma-associated h
agggggaugagccaga

SEQ ID NO: 4003464 - RNA, 20 nt, Human herpesvirus 8 [Kaposi`s sarcoma-associated h
aggguuuauagaagagccug

SEQ ID NO: 4003465 - RNA, 19 nt, Human herpesvirus 8 [Kaposi`s sarcoma-associated h
aggucgcagagaccucuug

SEQ ID NO: 4003466 - RNA, 19 nt, Human herpesvirus 8 [Kaposi`s sarcoma-associated h
aggugccgucgucgagcac

SEQ ID NO: 4003467 - RNA, 15 nt, Human herpesvirus 8 [Kaposi`s sarcoma-associated h
aguccagccacggcc

SEQ ID NO: 4003468 - RNA, 18 nt, Human herpesvirus 8 [Kaposi`s sarcoma-associated h
agucuaaggccagcgaga

SEQ ID NO: 4003469 - RNA, 18 nt, Human herpesvirus 8 [Kaposi`s sarcoma-associated h
agucugaaccccgugugg

SEQ ID NO: 4003470 - RNA, 18 nt, Human herpesvirus 8 [Kaposi`s sarcoma-associated h
aguguuaucuuugcagug

SEQ ID NO: 4003471 - RNA, 14 nt, Human herpesvirus 8 [Kaposi`s sarcoma-associated h
auaaaagagagaau

SEQ ID NO: 4003472 - RNA, 20 nt, Human herpesvirus 8 [Kaposi`s sarcoma-associated h
auaaaauacgcgugugggaa

SEQ ID NO: 4003473 - RNA, 16 nt, Human herpesvirus 8 [Kaposi`s sarcoma-associated h
auaaagccgagccaca

SEQ ID NO: 4003474 - RNA, 16 nt, Human herpesvirus 8 [Kaposi`s sarcoma-associated h
auaaagcugagccaca

SEQ ID NO: 4003475 - RNA, 18 nt, Human herpesvirus 8 [Kaposi`s sarcoma-associated h
auaaucuaaauauucucu

SEQ ID NO: 4003476 - RNA, 19 nt, Human herpesvirus 8 [Kaposi`s sarcoma-associated h
auacaaacaacauaaacau

SEQ ID NO: 4003477 - RNA, 22 nt, Human herpesvirus 8 [Kaposi`s sarcoma-associated h
auacauugugagggaguguuuu

SEQ ID NO: 4003478 - RNA, 21 nt, Human herpesvirus 8 [Kaposi`s sarcoma-associated h
auacgguguaggcauuuugua

SEQ ID NO: 4003479 - RNA, 17 nt, Human herpesvirus 8 [Kaposi`s sarcoma-associated h
auacuuugcgugucuag

SEQ ID NO: 4003480 - RNA, 14 nt, Human herpesvirus 8 [Kaposi`s sarcoma-associated h
auagccgccgggag

SEQ ID NO: 4003481 - RNA, 13 nt, Human herpesvirus 8 [Kaposi`s sarcoma-associated h
aucaaagaaaggu

SEQ ID NO: 4003482 - RNA, 17 nt, Human herpesvirus 8 [Kaposi`s sarcoma-associated h
aucaauaaagagaccaa

SEQ ID NO: 4003483 - RNA, 18 nt, Human herpesvirus 8 [Kaposi`s sarcoma-associated h
aucaaucugagaaaaguu

SEQ ID NO: 4003484 - RNA, 17 nt, Human herpesvirus 8 [Kaposi`s sarcoma-associated h
aucagcugcagccagga

SEQ ID NO: 4003485 - RNA, 18 nt, Human herpesvirus 8 [Kaposi`s sarcoma-associated h
aucccccacaggacaagc

SEQ ID NO: 4003486 - RNA, 14 nt, Human herpesvirus 8 [Kaposi`s sarcoma-associated h
aucgccgccagcaa

SEQ ID NO: 4003487 - RNA, 23 nt, Human herpesvirus 8 [Kaposi`s sarcoma-associated h
aucuccggacuacauccaaauua

SEQ ID NO: 4003488 - RNA, 16 nt, Human herpesvirus 8 [Kaposi`s sarcoma-associated h
aucucgguacugcgca

SEQ ID NO: 4003489 - RNA, 15 nt, Human herpesvirus 8 [Kaposi`s sarcoma-associated h
aucugguccuaagag

SEQ ID NO: 4003490 - RNA, 18 nt, Human herpesvirus 8 [Kaposi`s sarcoma-associated h
aucuuagucuuacuguca

SEQ ID NO: 4003491 - RNA, 23 nt, Human herpesvirus 8 [Kaposi`s sarcoma-associated h
augaauaacuuuauuacagguau

SEQ ID NO: 4003492 - RNA, 19 nt, Human herpesvirus 8 [Kaposi`s sarcoma-associated h
augaccaacaggcuguccu

SEQ ID NO: 4003493 - RNA, 17 nt, Human herpesvirus 8 [Kaposi`s sarcoma-associated h
augagugaaaaggaagc

SEQ ID NO: 4003494 - RNA, 16 nt, Human herpesvirus 8 [Kaposi`s sarcoma-associated h
augcucaggucuguca

SEQ ID NO: 4003495 - RNA, 21 nt, Human herpesvirus 8 [Kaposi`s sarcoma-associated h
auggccuccacccaccaagcu

SEQ ID NO: 4003496 - RNA, 13 nt, Human herpesvirus 8 [Kaposi`s sarcoma-associated h
auggcguccgcuc

SEQ ID NO: 4003497 - RNA, 19 nt, Human herpesvirus 8 [Kaposi`s sarcoma-associated h
auggcuucuauaagcaccu

SEQ ID NO: 4003498 - RNA, 16 nt, Human herpesvirus 8 [Kaposi`s sarcoma-associated h
augggucaugcgucgc

SEQ ID NO: 4003499 - RNA, 19 nt, Human herpesvirus 8 [Kaposi`s sarcoma-associated h
auguaccuggcguccagcu

SEQ ID NO: 4003500 - RNA, 19 nt, Human herpesvirus 8 [Kaposi`s sarcoma-associated h
auguccugauuuuccaggg

SEQ ID NO: 4003501 - RNA, 19 nt, Human herpesvirus 8 [Kaposi`s sarcoma-associated h
augucuguguuuuguaaac

SEQ ID NO: 4003502 - RNA, 13 nt, Human herpesvirus 8 [Kaposi`s sarcoma-associated h
auguguguaacuu

SEQ ID NO: 4003503 - RNA, 22 nt, Human herpesvirus 8 [Kaposi`s sarcoma-associated h
auguuuauuuuuuuucaaacag

SEQ ID NO: 4003504 - RNA, 15 nt, Human herpesvirus 8 [Kaposi`s sarcoma-associated h
auuaacauccacagg

SEQ ID NO: 4003505 - RNA, 14 nt, Human herpesvirus 8 [Kaposi`s sarcoma-associated h
auuaauaaccauga

SEQ ID NO: 4003506 - RNA, 16 nt, Human herpesvirus 8 [Kaposi`s sarcoma-associated h
auuagaagaaaaggau

SEQ ID NO: 4003507 - RNA, 19 nt, Human herpesvirus 8 [Kaposi`s sarcoma-associated h
auuaguguuauaagaaauu

SEQ ID NO: 4003508 - RNA, 14 nt, Human herpesvirus 8 [Kaposi`s sarcoma-associated h
auuauugcaccauu

SEQ ID NO: 4003509 - RNA, 18 nt, Human herpesvirus 8 [Kaposi`s sarcoma-associated h
auucaugccuuucuguaa

SEQ ID NO: 4003510 - RNA, 16 nt, Human herpesvirus 8 [Kaposi`s sarcoma-associated h
auucccaaacacauca

SEQ ID NO: 4003511 - RNA, 16 nt, Human herpesvirus 8 [Kaposi`s sarcoma-associated h
auugugucaaccaggg

SEQ ID NO: 4003512 - RNA, 22 nt, Human herpesvirus 8 [Kaposi`s sarcoma-associated h
auuuauuuuuuacuacagguau

SEQ ID NO: 4003513 - RNA, 23 nt, Human herpesvirus 8 [Kaposi`s sarcoma-associated h
auuucucgccucccaacauguaa

SEQ ID NO: 4003514 - RNA, 14 nt, Human herpesvirus 8 [Kaposi`s sarcoma-associated h
auuuuauggacauu

SEQ ID NO: 4003515 - RNA, 12 nt, Human herpesvirus 8 [Kaposi`s sarcoma-associated h
caaaaacacaau

SEQ ID NO: 4003516 - RNA, 16 nt, Human herpesvirus 8 [Kaposi`s sarcoma-associated h
caaacuucggaauuuc

SEQ ID NO: 4003517 - RNA, 14 nt, Human herpesvirus 8 [Kaposi`s sarcoma-associated h
caaagccguuccca

SEQ ID NO: 4003518 - RNA, 20 nt, Human herpesvirus 8 [Kaposi`s sarcoma-associated h
caaagugagguggcauuugu

SEQ ID NO: 4003519 - RNA, 19 nt, Human herpesvirus 8 [Kaposi`s sarcoma-associated h
caaaugauauuuugauggu

SEQ ID NO: 4003520 - RNA, 21 nt, Human herpesvirus 8 [Kaposi`s sarcoma-associated h
caacaauagggauacuguuua

SEQ ID NO: 4003521 - RNA, 14 nt, Human herpesvirus 8 [Kaposi`s sarcoma-associated h
caacauuaaacaca

SEQ ID NO: 4003522 - RNA, 16 nt, Human herpesvirus 8 [Kaposi`s sarcoma-associated h
caaccuggcaagcagu

SEQ ID NO: 4003523 - RNA, 16 nt, Human herpesvirus 8 [Kaposi`s sarcoma-associated h
caacgccaugcagcgg

SEQ ID NO: 4003524 - RNA, 19 nt, Human herpesvirus 8 [Kaposi`s sarcoma-associated h
caacuucaucacauccccg

SEQ ID NO: 4003525 - RNA, 17 nt, Human herpesvirus 8 [Kaposi`s sarcoma-associated h
caagcuacuggccuggc

SEQ ID NO: 4003526 - RNA, 20 nt, Human herpesvirus 8 [Kaposi`s sarcoma-associated h
caagcuguuggcgcuuugcu

SEQ ID NO: 4003527 - RNA, 22 nt, Human herpesvirus 8 [Kaposi`s sarcoma-associated h
cauccacgcggauaggcugggg

SEQ ID NO: 4003528 - RNA, 15 nt, Human herpesvirus 8 [Kaposi`s sarcoma-associated h
cauccauuauagcac

SEQ ID NO: 4003529 - RNA, 14 nt, Human herpesvirus 8 [Kaposi`s sarcoma-associated h
caucgccgccagca

SEQ ID NO: 4003530 - RNA, 16 nt, Human herpesvirus 8 [Kaposi`s sarcoma-associated h
caucguggugcccugc

SEQ ID NO: 4003531 - RNA, 16 nt, Human herpesvirus 8 [Kaposi`s sarcoma-associated h
caucucgguacugcgc

SEQ ID NO: 4003532 - RNA, 18 nt, Human herpesvirus 8 [Kaposi`s sarcoma-associated h
caucucgguacugcgcau

SEQ ID NO: 4003533 - RNA, 22 nt, Human herpesvirus 8 [Kaposi`s sarcoma-associated h
caugcccuccugggccaggcac

SEQ ID NO: 4003534 - RNA, 12 nt, Human herpesvirus 8 [Kaposi`s sarcoma-associated h
caugccugugga

SEQ ID NO: 4003535 - RNA, 13 nt, Human herpesvirus 8 [Kaposi`s sarcoma-associated h
caugccuguggau

SEQ ID NO: 4003536 - RNA, 20 nt, Human herpesvirus 8 [Kaposi`s sarcoma-associated h
caugcugccacugccacgga

SEQ ID NO: 4003537 - RNA, 23 nt, Human herpesvirus 8 [Kaposi`s sarcoma-associated h
caugcuggaucccagugccucag

SEQ ID NO: 4003538 - RNA, 16 nt, Human herpesvirus 8 [Kaposi`s sarcoma-associated h
cauguaaauuggccac

SEQ ID NO: 4003539 - RNA, 21 nt, Human herpesvirus 8 [Kaposi`s sarcoma-associated h
caugugcuuuugcuuggcgcu

SEQ ID NO: 4003540 - RNA, 14 nt, Human herpesvirus 8 [Kaposi`s sarcoma-associated h
cauucccgguccca

SEQ ID NO: 4003541 - RNA, 18 nt, Human herpesvirus 8 [Kaposi`s sarcoma-associated h
cauucguaagaggaccca

SEQ ID NO: 4003542 - RNA, 13 nt, Human herpesvirus 8 [Kaposi`s sarcoma-associated h
cauuuuguaauga

SEQ ID NO: 4003543 - RNA, 23 nt, Human herpesvirus 8 [Kaposi`s sarcoma-associated h
ccaacauguaaauuggccacugc

SEQ ID NO: 4003544 - RNA, 19 nt, Human herpesvirus 8 [Kaposi`s sarcoma-associated h
ccaacuucaucacaucccc

SEQ ID NO: 4003545 - RNA, 22 nt, Human herpesvirus 8 [Kaposi`s sarcoma-associated h
ccaagaucuuccagucuccaga

SEQ ID NO: 4003546 - RNA, 16 nt, Human herpesvirus 8 [Kaposi`s sarcoma-associated h
ccaaggccugugccca

SEQ ID NO: 4003547 - RNA, 13 nt, Human herpesvirus 8 [Kaposi`s sarcoma-associated h
ccacaaaguacau

SEQ ID NO: 4003548 - RNA, 22 nt, Human herpesvirus 8 [Kaposi`s sarcoma-associated h
accauccccccaccccucauuu

SEQ ID NO: 4003549 - RNA, 21 nt, Human herpesvirus 8 [Kaposi`s sarcoma-associated h
acccugcucuggacaauggga

SEQ ID NO: 4003550 - RNA, 15 nt, Human herpesvirus 8 [Kaposi`s sarcoma-associated h
accggcuuguacagu

SEQ ID NO: 4003551 - RNA, 22 nt, Human herpesvirus 8 [Kaposi`s sarcoma-associated h
accguuuggcccacguggugcu

SEQ ID NO: 4003552 - RNA, 22 nt, Human herpesvirus 8 [Kaposi`s sarcoma-associated h
accuaacugcguccgguggcaa

SEQ ID NO: 4003553 - RNA, 20 nt, Human herpesvirus 8 [Kaposi`s sarcoma-associated h
accucgaugggauauuuccu

SEQ ID NO: 4003554 - RNA, 21 nt, Human herpesvirus 8 [Kaposi`s sarcoma-associated h
accugaggugcucuucccaca

SEQ ID NO: 4003555 - RNA, 17 nt, Human herpesvirus 8 [Kaposi`s sarcoma-associated h
acgcaccgcaagcagca

SEQ ID NO: 4003556 - RNA, 12 nt, Human herpesvirus 8 [Kaposi`s sarcoma-associated h
acgcacugagcg

SEQ ID NO: 4003557 - RNA, 21 nt, Human herpesvirus 8 [Kaposi`s sarcoma-associated h
acgcagacccggcaacacugg

SEQ ID NO: 4003558 - RNA, 19 nt, Human herpesvirus 8 [Kaposi`s sarcoma-associated h
acgcugcaauguacugcca

SEQ ID NO: 4003559 - RNA, 19 nt, Human herpesvirus 8 [Kaposi`s sarcoma-associated h
acggaggauccuagguggg

SEQ ID NO: 4003560 - RNA, 17 nt, Human herpesvirus 8 [Kaposi`s sarcoma-associated h
acggccaguuauaugca

SEQ ID NO: 4003561 - RNA, 17 nt, Human herpesvirus 8 [Kaposi`s sarcoma-associated h
acggcguguuuugccug

SEQ ID NO: 4003562 - RNA, 14 nt, Human herpesvirus 8 [Kaposi`s sarcoma-associated h
acgucccucuuggc

SEQ ID NO: 4003563 - RNA, 22 nt, Human herpesvirus 8 [Kaposi`s sarcoma-associated h
acgugcguggggguuggguggc

SEQ ID NO: 4003564 - RNA, 19 nt, Human herpesvirus 8 [Kaposi`s sarcoma-associated h
acuagaguccaaccuggca

SEQ ID NO: 4003565 - RNA, 17 nt, Human herpesvirus 8 [Kaposi`s sarcoma-associated h
acucugcaagcuguugg

SEQ ID NO: 4003566 - RNA, 12 nt, Human herpesvirus 8 [Kaposi`s sarcoma-associated h
acugcagcacua

SEQ ID NO: 4003567 - RNA, 14 nt, Human herpesvirus 8 [Kaposi`s sarcoma-associated h
acuggaacgccaug

SEQ ID NO: 4003568 - RNA, 15 nt, Human herpesvirus 8 [Kaposi`s sarcoma-associated h
acugggccaccaaga

SEQ ID NO: 4003569 - RNA, 12 nt, Human herpesvirus 8 [Kaposi`s sarcoma-associated h
acuuacagcaug

SEQ ID NO: 4003570 - RNA, 14 nt, Human herpesvirus 8 [Kaposi`s sarcoma-associated h
acuucgcuaacugu

SEQ ID NO: 4003571 - RNA, 17 nt, Human herpesvirus 8 [Kaposi`s sarcoma-associated h
acuuugcccuaaaugug

SEQ ID NO: 4003572 - RNA, 14 nt, Human herpesvirus 8 [Kaposi`s sarcoma-associated h
agaaaugaucaugu

SEQ ID NO: 4003573 - RNA, 20 nt, Human herpesvirus 8 [Kaposi`s sarcoma-associated h
agaauggcgugccaguggag

SEQ ID NO: 4003574 - RNA, 22 nt, Human herpesvirus 8 [Kaposi`s sarcoma-associated h
agacauucguaagaggacccag

SEQ ID NO: 4003575 - RNA, 21 nt, Human herpesvirus 8 [Kaposi`s sarcoma-associated h
agaccccgauaugcaccucca

SEQ ID NO: 4003576 - RNA, 15 nt, Human herpesvirus 8 [Kaposi`s sarcoma-associated h
agacgcgcaaagggg

SEQ ID NO: 4003577 - RNA, 17 nt, Human herpesvirus 8 [Kaposi`s sarcoma-associated h
agagcguagaugaaugu

SEQ ID NO: 4003578 - RNA, 22 nt, Human herpesvirus 8 [Kaposi`s sarcoma-associated h
agaguuccccgggaacggacaa

SEQ ID NO: 4003579 - RNA, 23 nt, Human herpesvirus 8 [Kaposi`s sarcoma-associated h
agauuggguugggaggugacccu

SEQ ID NO: 4003580 - RNA, 13 nt, Human herpesvirus 8 [Kaposi`s sarcoma-associated h
agauuuaagauua

SEQ ID NO: 4003581 - RNA, 22 nt, Human herpesvirus 8 [Kaposi`s sarcoma-associated h
agcaaucggguuugauagcaga

SEQ ID NO: 4003582 - RNA, 18 nt, Human herpesvirus 8 [Kaposi`s sarcoma-associated h
agcacgaagacaugguga

SEQ ID NO: 4003583 - RNA, 18 nt, Human herpesvirus 8 [Kaposi`s sarcoma-associated h
agcacuccuguuagcaca

SEQ ID NO: 4003584 - RNA, 20 nt, Human herpesvirus 8 [Kaposi`s sarcoma-associated h
agcacuccuguuagcacauu

SEQ ID NO: 4003585 - RNA, 17 nt, Human herpesvirus 8 [Kaposi`s sarcoma-associated h
agcauccggacugagau

SEQ ID NO: 4003586 - RNA, 18 nt, Human herpesvirus 8 [Kaposi`s sarcoma-associated h
agcaugacuuccccgucu

SEQ ID NO: 4003587 - RNA, 19 nt, Human herpesvirus 8 [Kaposi`s sarcoma-associated h
agcauuuuaaaaugcguuu

SEQ ID NO: 4003588 - RNA, 17 nt, Human herpesvirus 8 [Kaposi`s sarcoma-associated h
agcccgauggcccuuca

SEQ ID NO: 4003589 - RNA, 20 nt, Human herpesvirus 8 [Kaposi`s sarcoma-associated h
agcccuguuucugugccccc

SEQ ID NO: 4003590 - RNA, 16 nt, Human herpesvirus 8 [Kaposi`s sarcoma-associated h
agccucuguacaugga

SEQ ID NO: 4003591 - RNA, 22 nt, Human herpesvirus 8 [Kaposi`s sarcoma-associated h
agcggcaccacaucugcugucu

SEQ ID NO: 4003592 - RNA, 15 nt, Human herpesvirus 8 [Kaposi`s sarcoma-associated h
agcgucaucugcgaa

SEQ ID NO: 4003593 - RNA, 19 nt, Human herpesvirus 8 [Kaposi`s sarcoma-associated h
agcguuggcuagucauggc

SEQ ID NO: 4003594 - RNA, 20 nt, Human herpesvirus 8 [Kaposi`s sarcoma-associated h
agcugcugguucaggauuuc

SEQ ID NO: 4003595 - RNA, 20 nt, Human herpesvirus 8 [Kaposi`s sarcoma-associated h
agcuguuacccugcucugga

SEQ ID NO: 4003596 - RNA, 17 nt, Human herpesvirus 8 [Kaposi`s sarcoma-associated h
agcuuaaccacaugcau

SEQ ID NO: 4003597 - RNA, 17 nt, Human herpesvirus 8 [Kaposi`s sarcoma-associated h
agcuuugcagccaggua

SEQ ID NO: 4003598 - RNA, 19 nt, Human herpesvirus 8 [Kaposi`s sarcoma-associated h
aggaagcauccggacugag

SEQ ID NO: 4003599 - RNA, 21 nt, Human herpesvirus 8 [Kaposi`s sarcoma-associated h
aggaagugucgggaggcaugu

SEQ ID NO: 4003600 - RNA, 15 nt, Human herpesvirus 8 [Kaposi`s sarcoma-associated h
aggaaugcauaugga

SEQ ID NO: 4003601 - RNA, 20 nt, Human herpesvirus 8 [Kaposi`s sarcoma-associated h
caccaagccucccgugauug

SEQ ID NO: 4003602 - RNA, 16 nt, Human herpesvirus 8 [Kaposi`s sarcoma-associated h
caccacaucugcuguc

SEQ ID NO: 4003603 - RNA, 21 nt, Human herpesvirus 8 [Kaposi`s sarcoma-associated h
caccacgcccgggggccagga

SEQ ID NO: 4003604 - RNA, 17 nt, Human herpesvirus 8 [Kaposi`s sarcoma-associated h
caccauuccucuccgca

SEQ ID NO: 4003605 - RNA, 20 nt, Human herpesvirus 8 [Kaposi`s sarcoma-associated h
cacccuauuggucacaucuc

SEQ ID NO: 4003606 - RNA, 16 nt, Human herpesvirus 8 [Kaposi`s sarcoma-associated h
cacgcacuuggcccug

SEQ ID NO: 4003607 - RNA, 16 nt, Human herpesvirus 8 [Kaposi`s sarcoma-associated h
cacgccauaccccugg

SEQ ID NO: 4003608 - RNA, 17 nt, Human herpesvirus 8 [Kaposi`s sarcoma-associated h
cacuagcagaaaacugu

SEQ ID NO: 4003609 - RNA, 16 nt, Human herpesvirus 8 [Kaposi`s sarcoma-associated h
cacucuacgcggcuag

SEQ ID NO: 4003610 - RNA, 15 nt, Human herpesvirus 8 [Kaposi`s sarcoma-associated h
cagaaccgaugguuu

SEQ ID NO: 4003611 - RNA, 14 nt, Human herpesvirus 8 [Kaposi`s sarcoma-associated h
cagacaccaaagac

SEQ ID NO: 4003612 - RNA, 18 nt, Human herpesvirus 8 [Kaposi`s sarcoma-associated h
cagacaguuaccauucau

SEQ ID NO: 4003613 - RNA, 22 nt, Human herpesvirus 8 [Kaposi`s sarcoma-associated h
cagacccggcaacacuggacac

SEQ ID NO: 4003614 - RNA, 18 nt, Human herpesvirus 8 [Kaposi`s sarcoma-associated h
cagacgaccccagccccu

SEQ ID NO: 4003615 - RNA, 14 nt, Human herpesvirus 8 [Kaposi`s sarcoma-associated h
cagacgguccaaag

SEQ ID NO: 4003616 - RNA, 18 nt, Human herpesvirus 8 [Kaposi`s sarcoma-associated h
cagagguuugaggcgcug

SEQ ID NO: 4003617 - RNA, 18 nt, Human herpesvirus 8 [Kaposi`s sarcoma-associated h
cagaguccgccaucacca

SEQ ID NO: 4003618 - RNA, 20 nt, Human herpesvirus 8 [Kaposi`s sarcoma-associated h
cagcagcugcuuggcgccca

SEQ ID NO: 4003619 - RNA, 21 nt, Human herpesvirus 8 [Kaposi`s sarcoma-associated h
cagcccagccucuguacaugg

SEQ ID NO: 4003620 - RNA, 15 nt, Human herpesvirus 8 [Kaposi`s sarcoma-associated h
cagcuacgcacugag

SEQ ID NO: 4003621 - RNA, 24 nt, Human herpesvirus 8 [Kaposi`s sarcoma-associated h
cagcuccuauugcaacugaccaug

SEQ ID NO: 4003622 - RNA, 14 nt, Human herpesvirus 8 [Kaposi`s sarcoma-associated h
caggagucagagca

SEQ ID NO: 4003623 - RNA, 14 nt, Human herpesvirus 8 [Kaposi`s sarcoma-associated h
caggcaucggcagc

SEQ ID NO: 4003624 - RNA, 19 nt, Human herpesvirus 8 [Kaposi`s sarcoma-associated h
cagggucucauccgcggca

SEQ ID NO: 4003625 - RNA, 16 nt, Human herpesvirus 8 [Kaposi`s sarcoma-associated h
cagguaaaacggccaa

SEQ ID NO: 4003626 - RNA, 18 nt, Human herpesvirus 8 [Kaposi`s sarcoma-associated h
caggucugucacuagaau

SEQ ID NO: 4003627 - RNA, 14 nt, Human herpesvirus 8 [Kaposi`s sarcoma-associated h
cagguggaggcuug

SEQ ID NO: 4003628 - RNA, 19 nt, Human herpesvirus 8 [Kaposi`s sarcoma-associated h
cagucgagccgccaggaac

SEQ ID NO: 4003629 - RNA, 12 nt, Human herpesvirus 8 [Kaposi`s sarcoma-associated h
cagugugcagua

SEQ ID NO: 4003630 - RNA, 19 nt, Human herpesvirus 8 [Kaposi`s sarcoma-associated h
caguguuaucuuugcagug

SEQ ID NO: 4003631 - RNA, 16 nt, Human herpesvirus 8 [Kaposi`s sarcoma-associated h
cauacgucccucuugg

SEQ ID NO: 4003632 - RNA, 14 nt, Human herpesvirus 8 [Kaposi`s sarcoma-associated h
cauccgcugccacc

SEQ ID NO: 4003633 - RNA, 22 nt, Human herpesvirus 8 [Kaposi`s sarcoma-associated h
caucuacccugauuagcacugu

SEQ ID NO: 4003634 - RNA, 16 nt, Human herpesvirus 8 [Kaposi`s sarcoma-associated h
caucucucacacccug

SEQ ID NO: 4003635 - RNA, 19 nt, Human herpesvirus 8 [Kaposi`s sarcoma-associated h
caugauuugauacagggac

SEQ ID NO: 4003636 - RNA, 21 nt, Human herpesvirus 8 [Kaposi`s sarcoma-associated h
caugcucaucuacccugauua

SEQ ID NO: 4003637 - RNA, 16 nt, Human herpesvirus 8 [Kaposi`s sarcoma-associated h
cauggaauuguauaga

SEQ ID NO: 4003638 - RNA, 23 nt, Human herpesvirus 8 [Kaposi`s sarcoma-associated h
caugucgcacacuuccaccuccc

SEQ ID NO: 4003639 - RNA, 13 nt, Human herpesvirus 8 [Kaposi`s sarcoma-associated h
caugugggcuuca

SEQ ID NO: 4003640 - RNA, 11 nt, Human herpesvirus 8 [Kaposi`s sarcoma-associated h
caugugucuau

SEQ ID NO: 4003641 - RNA, 13 nt, Human herpesvirus 8 [Kaposi`s sarcoma-associated h
cauuccucuccgc

SEQ ID NO: 4003642 - RNA, 15 nt, Human herpesvirus 8 [Kaposi`s sarcoma-associated h
cauucgugugguuug

SEQ ID NO: 4003643 - RNA, 23 nt, Human herpesvirus 8 [Kaposi`s sarcoma-associated h
cauucgugugguuugggagagcg

SEQ ID NO: 4003644 - RNA, 15 nt, Human herpesvirus 8 [Kaposi`s sarcoma-associated h
cauuuccacccaccu

SEQ ID NO: 4003645 - RNA, 21 nt, Human herpesvirus 8 [Kaposi`s sarcoma-associated h
cauuugcgugcaaaaugugcu

SEQ ID NO: 4003646 - RNA, 19 nt, Human herpesvirus 8 [Kaposi`s sarcoma-associated h
ccaaacucgggaucggaaa

SEQ ID NO: 4003647 - RNA, 18 nt, Human herpesvirus 8 [Kaposi`s sarcoma-associated h
ccaaaugcccagaaugaa

SEQ ID NO: 4003648 - RNA, 13 nt, Human herpesvirus 8 [Kaposi`s sarcoma-associated h
ccaacuugcgucu

SEQ ID NO: 4003649 - RNA, 15 nt, Human herpesvirus 8 [Kaposi`s sarcoma-associated h
ccacaaaacugccaa

SEQ ID NO: 4003650 - RNA, 15 nt, Human herpesvirus 8 [Kaposi`s sarcoma-associated h
ccacauggcagcuga

SEQ ID NO: 4003651 - RNA, 15 nt, Human herpesvirus 8 [Kaposi`s sarcoma-associated h
ccaccacgccacaac

SEQ ID NO: 4003652 - RNA, 15 nt, Human herpesvirus 8 [Kaposi`s sarcoma-associated h
ccacccagcuacugg

SEQ ID NO: 4003653 - RNA, 18 nt, Human herpesvirus 8 [Kaposi`s sarcoma-associated h
ccaccgcaacggcggugu

SEQ ID NO: 4003654 - RNA, 14 nt, Human herpesvirus 8 [Kaposi`s sarcoma-associated h
ccaccuacacccgg

SEQ ID NO: 4003655 - RNA, 23 nt, Human herpesvirus 8 [Kaposi`s sarcoma-associated h
ccacuacggucccguugucccuc

SEQ ID NO: 4003656 - RNA, 19 nt, Human herpesvirus 8 [Kaposi`s sarcoma-associated h
ccagaguuuuaugggcuca

SEQ ID NO: 4003657 - RNA, 20 nt, Human herpesvirus 8 [Kaposi`s sarcoma-associated h
ccagauccuccacagagccu

SEQ ID NO: 4003658 - RNA, 19 nt, Human herpesvirus 8 [Kaposi`s sarcoma-associated h
ccagcaauaaacccacagc

SEQ ID NO: 4003659 - RNA, 15 nt, Human herpesvirus 8 [Kaposi`s sarcoma-associated h
ccaggacggagccgu

SEQ ID NO: 4003660 - RNA, 14 nt, Human herpesvirus 8 [Kaposi`s sarcoma-associated h
ccaggauccagacu

SEQ ID NO: 4003661 - RNA, 14 nt, Human herpesvirus 8 [Kaposi`s sarcoma-associated h
ccagggaaacaugc

SEQ ID NO: 4003662 - RNA, 21 nt, Human herpesvirus 8 [Kaposi`s sarcoma-associated h
ccagguaggucaccgggucaa

SEQ ID NO: 4003663 - RNA, 18 nt, Human herpesvirus 8 [Kaposi`s sarcoma-associated h
ccaguagauuuaguacgu

SEQ ID NO: 4003664 - RNA, 21 nt, Human herpesvirus 8 [Kaposi`s sarcoma-associated h
ccagucacgcacuuggcccug

SEQ ID NO: 4003665 - RNA, 15 nt, Human herpesvirus 8 [Kaposi`s sarcoma-associated h
ccagugaguccuggc

SEQ ID NO: 4003666 - RNA, 17 nt, Human herpesvirus 8 [Kaposi`s sarcoma-associated h
ccagugccucagcaacu

SEQ ID NO: 4003667 - RNA, 14 nt, Human herpesvirus 8 [Kaposi`s sarcoma-associated h
ccauagcagucgcc

SEQ ID NO: 4003668 - RNA, 22 nt, Human herpesvirus 8 [Kaposi`s sarcoma-associated h
ccauccccggcguccucucaug

SEQ ID NO: 4003669 - RNA, 18 nt, Human herpesvirus 8 [Kaposi`s sarcoma-associated h
ccauggcagcccagccuc

SEQ ID NO: 4003670 - RNA, 18 nt, Human herpesvirus 8 [Kaposi`s sarcoma-associated h
ccauuugauauauggaaa

SEQ ID NO: 4003671 - RNA, 21 nt, Human herpesvirus 8 [Kaposi`s sarcoma-associated h
ccauuuuuguggcugccugga

SEQ ID NO: 4003672 - RNA, 18 nt, Human herpesvirus 8 [Kaposi`s sarcoma-associated h
cccaauuaauuggagcuc

SEQ ID NO: 4003673 - RNA, 17 nt, Human herpesvirus 8 [Kaposi`s sarcoma-associated h
cccacguggugcugccu

SEQ ID NO: 4003674 - RNA, 14 nt, Human herpesvirus 8 [Kaposi`s sarcoma-associated h
cccagcgacucuca

SEQ ID NO: 4003675 - RNA, 12 nt, Human herpesvirus 8 [Kaposi`s sarcoma-associated h
ccccgugaaguu

SEQ ID NO: 4003676 - RNA, 19 nt, Human herpesvirus 8 [Kaposi`s sarcoma-associated h
cccguacaaggccauggcg

SEQ ID NO: 4003677 - RNA, 17 nt, Human herpesvirus 8 [Kaposi`s sarcoma-associated h
cccucuacucuuccggg

SEQ ID NO: 4003678 - RNA, 22 nt, Human herpesvirus 8 [Kaposi`s sarcoma-associated h
ccgaaugcguucuccugcauac

SEQ ID NO: 4003679 - RNA, 21 nt, Human herpesvirus 8 [Kaposi`s sarcoma-associated h
ccgagaaacacugugaggcaa

SEQ ID NO: 4003680 - RNA, 17 nt, Human herpesvirus 8 [Kaposi`s sarcoma-associated h
aggaccaccggcaggca

SEQ ID NO: 4003681 - RNA, 18 nt, Human herpesvirus 8 [Kaposi`s sarcoma-associated h
aggaccucgucuagcaca

SEQ ID NO: 4003682 - RNA, 13 nt, Human herpesvirus 8 [Kaposi`s sarcoma-associated h
aggagggcagcug

SEQ ID NO: 4003683 - RNA, 22 nt, Human herpesvirus 8 [Kaposi`s sarcoma-associated h
aggagggcagguuaacguuucc

SEQ ID NO: 4003684 - RNA, 13 nt, Human herpesvirus 8 [Kaposi`s sarcoma-associated h
aggagucagagca

SEQ ID NO: 4003685 - RNA, 12 nt, Human herpesvirus 8 [Kaposi`s sarcoma-associated h
aggaguggcuga

SEQ ID NO: 4003686 - RNA, 20 nt, Human herpesvirus 8 [Kaposi`s sarcoma-associated h
aggaucggaucuuuuacaau

SEQ ID NO: 4003687 - RNA, 17 nt, Human herpesvirus 8 [Kaposi`s sarcoma-associated h
aggcaucggcagccucu

SEQ ID NO: 4003688 - RNA, 12 nt, Human herpesvirus 8 [Kaposi`s sarcoma-associated h
aggccaggaccc

SEQ ID NO: 4003689 - RNA, 23 nt, Human herpesvirus 8 [Kaposi`s sarcoma-associated h
aggcccucuucuguugccaggcg

SEQ ID NO: 4003690 - RNA, 17 nt, Human herpesvirus 8 [Kaposi`s sarcoma-associated h
aggggcagacccaaaaa

SEQ ID NO: 4003691 - RNA, 20 nt, Human herpesvirus 8 [Kaposi`s sarcoma-associated h
aggggcagacccaaaaagga

SEQ ID NO: 4003692 - RNA, 18 nt, Human herpesvirus 8 [Kaposi`s sarcoma-associated h
agguauguuuuuaccagu

SEQ ID NO: 4003693 - RNA, 22 nt, Human herpesvirus 8 [Kaposi`s sarcoma-associated h
aggugccgucgucgagcacucc

SEQ ID NO: 4003694 - RNA, 20 nt, Human herpesvirus 8 [Kaposi`s sarcoma-associated h
aggugguucuauauccacca

SEQ ID NO: 4003695 - RNA, 17 nt, Human herpesvirus 8 [Kaposi`s sarcoma-associated h
aggugucugcgggacaa

SEQ ID NO: 4003696 - RNA, 14 nt, Human herpesvirus 8 [Kaposi`s sarcoma-associated h
aguacgugguaagg

SEQ ID NO: 4003697 - RNA, 17 nt, Human herpesvirus 8 [Kaposi`s sarcoma-associated h
aguauagugguuuacau

SEQ ID NO: 4003698 - RNA, 18 nt, Human herpesvirus 8 [Kaposi`s sarcoma-associated h
agucgccgguagcugccu

SEQ ID NO: 4003699 - RNA, 13 nt, Human herpesvirus 8 [Kaposi`s sarcoma-associated h
agugaccugcugu

SEQ ID NO: 4003700 - RNA, 18 nt, Human herpesvirus 8 [Kaposi`s sarcoma-associated h
aguggcugaucucagagg

SEQ ID NO: 4003701 - RNA, 18 nt, Human herpesvirus 8 [Kaposi`s sarcoma-associated h
agugggguugggguccag

SEQ ID NO: 4003702 - RNA, 17 nt, Human herpesvirus 8 [Kaposi`s sarcoma-associated h
aguguuaucuuugcagu

SEQ ID NO: 4003703 - RNA, 23 nt, Human herpesvirus 8 [Kaposi`s sarcoma-associated h
aguugccugugggguuucuggga

SEQ ID NO: 4003704 - RNA, 13 nt, Human herpesvirus 8 [Kaposi`s sarcoma-associated h
auaacagcaacau

SEQ ID NO: 4003705 - RNA, 12 nt, Human herpesvirus 8 [Kaposi`s sarcoma-associated h
auaacagugcuc

SEQ ID NO: 4003706 - RNA, 12 nt, Human herpesvirus 8 [Kaposi`s sarcoma-associated h
auaacuucuggg

SEQ ID NO: 4003707 - RNA, 18 nt, Human herpesvirus 8 [Kaposi`s sarcoma-associated h
auaagagcacacugugug

SEQ ID NO: 4003708 - RNA, 19 nt, Human herpesvirus 8 [Kaposi`s sarcoma-associated h
auagacuuaaaaugucucg

SEQ ID NO: 4003709 - RNA, 15 nt, Human herpesvirus 8 [Kaposi`s sarcoma-associated h
auagugugcguuucu

SEQ ID NO: 4003710 - RNA, 15 nt, Human herpesvirus 8 [Kaposi`s sarcoma-associated h
auauaauuaucacgg

SEQ ID NO: 4003711 - RNA, 22 nt, Human herpesvirus 8 [Kaposi`s sarcoma-associated h
auaugcaccguuuccacacagg

SEQ ID NO: 4003712 - RNA, 20 nt, Human herpesvirus 8 [Kaposi`s sarcoma-associated h
auaugggcuuguacaugugu

SEQ ID NO: 4003713 - RNA, 19 nt, Human herpesvirus 8 [Kaposi`s sarcoma-associated h
aucaggcuagugcuguaau

SEQ ID NO: 4003714 - RNA, 23 nt, Human herpesvirus 8 [Kaposi`s sarcoma-associated h
aucccccccgcaggccagccacc

SEQ ID NO: 4003715 - RNA, 23 nt, Human herpesvirus 8 [Kaposi`s sarcoma-associated h
aucguaggccaauacugcccaag

SEQ ID NO: 4003716 - RNA, 18 nt, Human herpesvirus 8 [Kaposi`s sarcoma-associated h
aucguugacauguggagc

SEQ ID NO: 4003717 - RNA, 12 nt, Human herpesvirus 8 [Kaposi`s sarcoma-associated h
aucuccuggaga

SEQ ID NO: 4003718 - RNA, 22 nt, Human herpesvirus 8 [Kaposi`s sarcoma-associated h
aucucgaaaaaaauaaugcaga

SEQ ID NO: 4003719 - RNA, 15 nt, Human herpesvirus 8 [Kaposi`s sarcoma-associated h
augaauacccuggau

SEQ ID NO: 4003720 - RNA, 17 nt, Human herpesvirus 8 [Kaposi`s sarcoma-associated h
augaggccaagugcauu

SEQ ID NO: 4003721 - RNA, 20 nt, Human herpesvirus 8 [Kaposi`s sarcoma-associated h
augcaugugucugugcccug

SEQ ID NO: 4003722 - RNA, 20 nt, Human herpesvirus 8 [Kaposi`s sarcoma-associated h
augccgcguuagcagccaug

SEQ ID NO: 4003723 - RNA, 18 nt, Human herpesvirus 8 [Kaposi`s sarcoma-associated h
augcucaggucugucacu

SEQ ID NO: 4003724 - RNA, 18 nt, Human herpesvirus 8 [Kaposi`s sarcoma-associated h
augcucaucuacccugau

SEQ ID NO: 4003725 - RNA, 11 nt, Human herpesvirus 8 [Kaposi`s sarcoma-associated h
augcucucacc

SEQ ID NO: 4003726 - RNA, 14 nt, Human herpesvirus 8 [Kaposi`s sarcoma-associated h
auggcaacugccaa

SEQ ID NO: 4003727 - RNA, 15 nt, Human herpesvirus 8 [Kaposi`s sarcoma-associated h
auggcgucaucugau

SEQ ID NO: 4003728 - RNA, 23 nt, Human herpesvirus 8 [Kaposi`s sarcoma-associated h
augguaccauggcaaaaaacacu

SEQ ID NO: 4003729 - RNA, 17 nt, Human herpesvirus 8 [Kaposi`s sarcoma-associated h
auguaaauuggccacug

SEQ ID NO: 4003730 - RNA, 18 nt, Human herpesvirus 8 [Kaposi`s sarcoma-associated h
auguacuugaacagggca

SEQ ID NO: 4003731 - RNA, 19 nt, Human herpesvirus 8 [Kaposi`s sarcoma-associated h
augucacgucgcucuuuac

SEQ ID NO: 4003732 - RNA, 16 nt, Human herpesvirus 8 [Kaposi`s sarcoma-associated h
auguccugauuuucca

SEQ ID NO: 4003733 - RNA, 17 nt, Human herpesvirus 8 [Kaposi`s sarcoma-associated h
auguguguaacuuuuuc

SEQ ID NO: 4003734 - RNA, 20 nt, Human herpesvirus 8 [Kaposi`s sarcoma-associated h
auuaaacgacaaagugauuc

SEQ ID NO: 4003735 - RNA, 18 nt, Human herpesvirus 8 [Kaposi`s sarcoma-associated h
auuagugacauacaugag

SEQ ID NO: 4003736 - RNA, 19 nt, Human herpesvirus 8 [Kaposi`s sarcoma-associated h
auugcaacugaccauguuc

SEQ ID NO: 4003737 - RNA, 15 nt, Human herpesvirus 8 [Kaposi`s sarcoma-associated h
auuggagcacuuuug

SEQ ID NO: 4003738 - RNA, 16 nt, Human herpesvirus 8 [Kaposi`s sarcoma-associated h
auuuauugcauggcau

SEQ ID NO: 4003739 - RNA, 23 nt, Human herpesvirus 8 [Kaposi`s sarcoma-associated h
auuuuccaaggccugugcccaac

SEQ ID NO: 4003740 - RNA, 17 nt, Human herpesvirus 8 [Kaposi`s sarcoma-associated h
auuuuuuacuacaggua

SEQ ID NO: 4003741 - RNA, 19 nt, Human herpesvirus 8 [Kaposi`s sarcoma-associated h
caaaccuggugaggaagca

SEQ ID NO: 4003742 - RNA, 15 nt, Human herpesvirus 8 [Kaposi`s sarcoma-associated h
caaauaaaccagaca

SEQ ID NO: 4003743 - RNA, 20 nt, Human herpesvirus 8 [Kaposi`s sarcoma-associated h
caacaugcccuuuucugaaa

SEQ ID NO: 4003744 - RNA, 21 nt, Human herpesvirus 8 [Kaposi`s sarcoma-associated h
caacccagcaugccugcgcug

SEQ ID NO: 4003745 - RNA, 23 nt, Human herpesvirus 8 [Kaposi`s sarcoma-associated h
caacgaccugaugcaggccaccc

SEQ ID NO: 4003746 - RNA, 20 nt, Human herpesvirus 8 [Kaposi`s sarcoma-associated h
caagauccaacccagcaugc

SEQ ID NO: 4003747 - RNA, 17 nt, Human herpesvirus 8 [Kaposi`s sarcoma-associated h
caagcaaccggagcguu

SEQ ID NO: 4003748 - RNA, 20 nt, Human herpesvirus 8 [Kaposi`s sarcoma-associated h
caauaacgaagguauguuuu

SEQ ID NO: 4003749 - RNA, 14 nt, Human herpesvirus 8 [Kaposi`s sarcoma-associated h
caauacugcccaag

SEQ ID NO: 4003750 - RNA, 20 nt, Human herpesvirus 8 [Kaposi`s sarcoma-associated h
caauauaacagcaacauguu

SEQ ID NO: 4003751 - RNA, 18 nt, Human herpesvirus 8 [Kaposi`s sarcoma-associated h
caaucucuuacuucgcau

SEQ ID NO: 4003752 - RNA, 18 nt, Human herpesvirus 8 [Kaposi`s sarcoma-associated h
caaucuggauguguaucu

SEQ ID NO: 4003753 - RNA, 21 nt, Human herpesvirus 8 [Kaposi`s sarcoma-associated h
caaugggaucgaacagaagac

SEQ ID NO: 4003754 - RNA, 15 nt, Human herpesvirus 8 [Kaposi`s sarcoma-associated h
caauguacugccaug

SEQ ID NO: 4003755 - RNA, 17 nt, Human herpesvirus 8 [Kaposi`s sarcoma-associated h
cacagacgacugggcca

SEQ ID NO: 4003756 - RNA, 16 nt, Human herpesvirus 8 [Kaposi`s sarcoma-associated h
cacauauggcgcagga

SEQ ID NO: 4003757 - RNA, 22 nt, Human herpesvirus 8 [Kaposi`s sarcoma-associated h
cacauccccggauuccuccgca

SEQ ID NO: 4003758 - RNA, 22 nt, Human herpesvirus 8 [Kaposi`s sarcoma-associated h
cuagcagaaaacugucuccaga

SEQ ID NO: 4003759 - RNA, 18 nt, Human herpesvirus 8 [Kaposi`s sarcoma-associated h
cuagcguacaugugacug

SEQ ID NO: 4003760 - RNA, 22 nt, Human herpesvirus 8 [Kaposi`s sarcoma-associated h
cuauaaacagccuuggugcuag

SEQ ID NO: 4003761 - RNA, 23 nt, Human herpesvirus 8 [Kaposi`s sarcoma-associated h
cucaagcauugaguuugccgagc

SEQ ID NO: 4003762 - RNA, 12 nt, Human herpesvirus 8 [Kaposi`s sarcoma-associated h
cucacugagugg

SEQ ID NO: 4003763 - RNA, 17 nt, Human herpesvirus 8 [Kaposi`s sarcoma-associated h
cucagacaccgucgcca

SEQ ID NO: 4003764 - RNA, 21 nt, Human herpesvirus 8 [Kaposi`s sarcoma-associated h
cuccagacucuucgcugauga

SEQ ID NO: 4003765 - RNA, 19 nt, Human herpesvirus 8 [Kaposi`s sarcoma-associated h
cucccggaaacggacgcca

SEQ ID NO: 4003766 - RNA, 18 nt, Human herpesvirus 8 [Kaposi`s sarcoma-associated h
cucccuucgugccccagc

SEQ ID NO: 4003767 - RNA, 22 nt, Human herpesvirus 8 [Kaposi`s sarcoma-associated h
cucuaucagcugcagccaggaa

SEQ ID NO: 4003768 - RNA, 18 nt, Human herpesvirus 8 [Kaposi`s sarcoma-associated h
cucuuggcguuuaccugc

SEQ ID NO: 4003769 - RNA, 15 nt, Human herpesvirus 8 [Kaposi`s sarcoma-associated h
cucuuggcuguuaca

SEQ ID NO: 4003770 - RNA, 19 nt, Human herpesvirus 8 [Kaposi`s sarcoma-associated h
cugaaacgucgcccaaauc

SEQ ID NO: 4003771 - RNA, 11 nt, Human herpesvirus 8 [Kaposi`s sarcoma-associated h
cugagccacaa

SEQ ID NO: 4003772 - RNA, 14 nt, Human herpesvirus 8 [Kaposi`s sarcoma-associated h
cugauuagcacugu

SEQ ID NO: 4003773 - RNA, 21 nt, Human herpesvirus 8 [Kaposi`s sarcoma-associated h
cugcagcuggacuggagucag

SEQ ID NO: 4003774 - RNA, 23 nt, Human herpesvirus 8 [Kaposi`s sarcoma-associated h
cugccgcucggagauugccaccg

SEQ ID NO: 4003775 - RNA, 13 nt, Human herpesvirus 8 [Kaposi`s sarcoma-associated h
cugccuaggaccu

SEQ ID NO: 4003776 - RNA, 14 nt, Human herpesvirus 8 [Kaposi`s sarcoma-associated h
cuggaauggaucug

SEQ ID NO: 4003777 - RNA, 22 nt, Human herpesvirus 8 [Kaposi`s sarcoma-associated h
cuggagaaggguggguggggau

SEQ ID NO: 4003778 - RNA, 18 nt, Human herpesvirus 8 [Kaposi`s sarcoma-associated h
ccgcaaggagcagccugc

SEQ ID NO: 4003779 - RNA, 17 nt, Human herpesvirus 8 [Kaposi`s sarcoma-associated h
ccgcguuagcagccaug

SEQ ID NO: 4003780 - RNA, 19 nt, Human herpesvirus 8 [Kaposi`s sarcoma-associated h
ccggacugagauuucccua

SEQ ID NO: 4003781 - RNA, 20 nt, Human herpesvirus 8 [Kaposi`s sarcoma-associated h
ccggaugcagggccuggccu

SEQ ID NO: 4003782 - RNA, 21 nt, Human herpesvirus 8 [Kaposi`s sarcoma-associated h
ccgucgccaaacaggcgcaga

SEQ ID NO: 4003783 - RNA, 13 nt, Human herpesvirus 8 [Kaposi`s sarcoma-associated h
ccgugaugggcca

SEQ ID NO: 4003784 - RNA, 13 nt, Human herpesvirus 8 [Kaposi`s sarcoma-associated h
ccguguggcugca

SEQ ID NO: 4003785 - RNA, 18 nt, Human herpesvirus 8 [Kaposi`s sarcoma-associated h
ccguucccaugagccucc

SEQ ID NO: 4003786 - RNA, 22 nt, Human herpesvirus 8 [Kaposi`s sarcoma-associated h
ccuaauaaacuggccgcauuug

SEQ ID NO: 4003787 - RNA, 20 nt, Human herpesvirus 8 [Kaposi`s sarcoma-associated h
ccuacgcguuaagaagccac

SEQ ID NO: 4003788 - RNA, 21 nt, Human herpesvirus 8 [Kaposi`s sarcoma-associated h
ccuacgcguuaagaagccacu

SEQ ID NO: 4003789 - RNA, 17 nt, Human herpesvirus 8 [Kaposi`s sarcoma-associated h
ccuagaaaguuuccucu

SEQ ID NO: 4003790 - RNA, 16 nt, Human herpesvirus 8 [Kaposi`s sarcoma-associated h
ccucaacccacacugg

SEQ ID NO: 4003791 - RNA, 22 nt, Human herpesvirus 8 [Kaposi`s sarcoma-associated h
ccucgucgacagagccagccug

SEQ ID NO: 4003792 - RNA, 16 nt, Human herpesvirus 8 [Kaposi`s sarcoma-associated h
ccucgucuagcacaca

SEQ ID NO: 4003793 - RNA, 21 nt, Human herpesvirus 8 [Kaposi`s sarcoma-associated h
ccucuaucagcugcagccagg

SEQ ID NO: 4003794 - RNA, 20 nt, Human herpesvirus 8 [Kaposi`s sarcoma-associated h
ccucuggccugugcccaaau

SEQ ID NO: 4003795 - RNA, 19 nt, Human herpesvirus 8 [Kaposi`s sarcoma-associated h
ccugaagucccgaugccac

SEQ ID NO: 4003796 - RNA, 16 nt, Human herpesvirus 8 [Kaposi`s sarcoma-associated h
ccugauaugcaugugu

SEQ ID NO: 4003797 - RNA, 20 nt, Human herpesvirus 8 [Kaposi`s sarcoma-associated h
ccugcccucaaauucucaca

SEQ ID NO: 4003798 - RNA, 11 nt, Human herpesvirus 8 [Kaposi`s sarcoma-associated h
ccugugcauuc

SEQ ID NO: 4003799 - RNA, 20 nt, Human herpesvirus 8 [Kaposi`s sarcoma-associated h
ccuucgcaccccauccaccg

SEQ ID NO: 4003800 - RNA, 15 nt, Human herpesvirus 8 [Kaposi`s sarcoma-associated h
cgaaagcuaugguuu

SEQ ID NO: 4003801 - RNA, 23 nt, Human herpesvirus 8 [Kaposi`s sarcoma-associated h
cgaaagcuucaucguggugcccu

SEQ ID NO: 4003802 - RNA, 20 nt, Human herpesvirus 8 [Kaposi`s sarcoma-associated h
cgaacagguugccauggaga

SEQ ID NO: 4003803 - RNA, 12 nt, Human herpesvirus 8 [Kaposi`s sarcoma-associated h
cgaagcaaagug

SEQ ID NO: 4003804 - RNA, 21 nt, Human herpesvirus 8 [Kaposi`s sarcoma-associated h
cgaaguguugauccuggggcg

SEQ ID NO: 4003805 - RNA, 15 nt, Human herpesvirus 8 [Kaposi`s sarcoma-associated h
cgaaugugccagcag

SEQ ID NO: 4003806 - RNA, 22 nt, Human herpesvirus 8 [Kaposi`s sarcoma-associated h
cgacaaggacuuuuauagauuu

SEQ ID NO: 4003807 - RNA, 16 nt, Human herpesvirus 8 [Kaposi`s sarcoma-associated h
cgacacgauguuuucc

SEQ ID NO: 4003808 - RNA, 19 nt, Human herpesvirus 8 [Kaposi`s sarcoma-associated h
cgacacgauguuuuccagc

SEQ ID NO: 4003809 - RNA, 19 nt, Human herpesvirus 8 [Kaposi`s sarcoma-associated h
cgagcucaugcccacccug

SEQ ID NO: 4003810 - RNA, 12 nt, Human herpesvirus 8 [Kaposi`s sarcoma-associated h
cgagcucgggac

SEQ ID NO: 4003811 - RNA, 19 nt, Human herpesvirus 8 [Kaposi`s sarcoma-associated h
cgauauguccuucacuuug

SEQ ID NO: 4003812 - RNA, 23 nt, Human herpesvirus 8 [Kaposi`s sarcoma-associated h
cgaugaagagagaaugcuuccaa

SEQ ID NO: 4003813 - RNA, 22 nt, Human herpesvirus 8 [Kaposi`s sarcoma-associated h
cgauguccugauuuuccaggga

SEQ ID NO: 4003814 - RNA, 17 nt, Human herpesvirus 8 [Kaposi`s sarcoma-associated h
cgcaccgcaagcagcaa

SEQ ID NO: 4003815 - RNA, 17 nt, Human herpesvirus 8 [Kaposi`s sarcoma-associated h
cgcagauaucgacgcgg

SEQ ID NO: 4003816 - RNA, 11 nt, Human herpesvirus 8 [Kaposi`s sarcoma-associated h
cgccagacagc

SEQ ID NO: 4003817 - RNA, 16 nt, Human herpesvirus 8 [Kaposi`s sarcoma-associated h
cgccagcgucgccucc

SEQ ID NO: 4003818 - RNA, 16 nt, Human herpesvirus 8 [Kaposi`s sarcoma-associated h
cgccauuuuuguggcu

SEQ ID NO: 4003819 - RNA, 22 nt, Human herpesvirus 8 [Kaposi`s sarcoma-associated h
cgccauuuuuguggcugccugg

SEQ ID NO: 4003820 - RNA, 20 nt, Human herpesvirus 8 [Kaposi`s sarcoma-associated h
cgccgcggaaacucggucag

SEQ ID NO: 4003821 - RNA, 17 nt, Human herpesvirus 8 [Kaposi`s sarcoma-associated h
cgccgguagcugccugg

SEQ ID NO: 4003822 - RNA, 22 nt, Human herpesvirus 8 [Kaposi`s sarcoma-associated h
cgccgguguaugacccugagcu

SEQ ID NO: 4003823 - RNA, 13 nt, Human herpesvirus 8 [Kaposi`s sarcoma-associated h
cgcuccgccacgc

SEQ ID NO: 4003824 - RNA, 12 nt, Human herpesvirus 8 [Kaposi`s sarcoma-associated h
cgcucugugccc

SEQ ID NO: 4003825 - RNA, 23 nt, Human herpesvirus 8 [Kaposi`s sarcoma-associated h
cgcuggaagagaauggagaggag

SEQ ID NO: 4003826 - RNA, 18 nt, Human herpesvirus 8 [Kaposi`s sarcoma-associated h
cggaauggcucacggacu

SEQ ID NO: 4003827 - RNA, 17 nt, Human herpesvirus 8 [Kaposi`s sarcoma-associated h
cggagugccggcuggcc

SEQ ID NO: 4003828 - RNA, 13 nt, Human herpesvirus 8 [Kaposi`s sarcoma-associated h
cggaugacaggga

SEQ ID NO: 4003829 - RNA, 15 nt, Human herpesvirus 8 [Kaposi`s sarcoma-associated h
cggaugacagggaag

SEQ ID NO: 4003830 - RNA, 21 nt, Human herpesvirus 8 [Kaposi`s sarcoma-associated h
cggcaacacuggacacuaaaa

SEQ ID NO: 4003831 - RNA, 21 nt, Human herpesvirus 8 [Kaposi`s sarcoma-associated h
cggcacacuacucccccuccu

SEQ ID NO: 4003832 - RNA, 18 nt, Human herpesvirus 8 [Kaposi`s sarcoma-associated h
cggcaggcgugagaggca

SEQ ID NO: 4003833 - RNA, 22 nt, Human herpesvirus 8 [Kaposi`s sarcoma-associated h
cggcccaccgcguguucgaggg

SEQ ID NO: 4003834 - RNA, 22 nt, Human herpesvirus 8 [Kaposi`s sarcoma-associated h
cgggacaauugucggauuuuga

SEQ ID NO: 4003835 - RNA, 21 nt, Human herpesvirus 8 [Kaposi`s sarcoma-associated h
cggggagcgggguuuccaggg

SEQ ID NO: 4003836 - RNA, 19 nt, Human herpesvirus 8 [Kaposi`s sarcoma-associated h
cgggguccacggcgauguc

SEQ ID NO: 4003837 - RNA, 15 nt, Human herpesvirus 8 [Kaposi`s sarcoma-associated h
cgguggguggcuugg

SEQ ID NO: 4003838 - RNA, 17 nt, Human herpesvirus 8 [Kaposi`s sarcoma-associated h
cgguuuacuugcagcag

SEQ ID NO: 4003839 - RNA, 22 nt, Human herpesvirus 8 [Kaposi`s sarcoma-associated h
cgucaagaccgagcguauucuc

SEQ ID NO: 4003840 - RNA, 15 nt, Human herpesvirus 8 [Kaposi`s sarcoma-associated h
cgucagcagcaagca

SEQ ID NO: 4003841 - RNA, 17 nt, Human herpesvirus 8 [Kaposi`s sarcoma-associated h
cguccaguucccccaca

SEQ ID NO: 4003842 - RNA, 14 nt, Human herpesvirus 8 [Kaposi`s sarcoma-associated h
cgucgccuuaccau

SEQ ID NO: 4003843 - RNA, 21 nt, Human herpesvirus 8 [Kaposi`s sarcoma-associated h
cgucugccgaagucagugcca

SEQ ID NO: 4003844 - RNA, 17 nt, Human herpesvirus 8 [Kaposi`s sarcoma-associated h
cgucuugaccucuccgg

SEQ ID NO: 4003845 - RNA, 19 nt, Human herpesvirus 8 [Kaposi`s sarcoma-associated h
cgugccuucgaggccaggc

SEQ ID NO: 4003846 - RNA, 17 nt, Human herpesvirus 8 [Kaposi`s sarcoma-associated h
cguggaguugccugugg

SEQ ID NO: 4003847 - RNA, 15 nt, Human herpesvirus 8 [Kaposi`s sarcoma-associated h
cguggaugagagggu

SEQ ID NO: 4003848 - RNA, 16 nt, Human herpesvirus 8 [Kaposi`s sarcoma-associated h
cguggcgaucgucccc

SEQ ID NO: 4003849 - RNA, 19 nt, Human herpesvirus 8 [Kaposi`s sarcoma-associated h
cguguuugggcaaaacaca

SEQ ID NO: 4003850 - RNA, 13 nt, Human herpesvirus 8 [Kaposi`s sarcoma-associated h
cguuuccauauga

SEQ ID NO: 4003851 - RNA, 20 nt, Human herpesvirus 8 [Kaposi`s sarcoma-associated h
cuaaacguguucauaccuca

SEQ ID NO: 4003852 - RNA, 19 nt, Human herpesvirus 8 [Kaposi`s sarcoma-associated h
cuaacggguaacugcaugc

SEQ ID NO: 4003853 - RNA, 14 nt, Human herpesvirus 8 [Kaposi`s sarcoma-associated h
cuaccgucuaccug

SEQ ID NO: 4003854 - RNA, 17 nt, Human herpesvirus 8 [Kaposi`s sarcoma-associated h
cuagaauuggagcacuu

SEQ ID NO: 4003855 - RNA, 20 nt, Human herpesvirus 8 [Kaposi`s sarcoma-associated h
cuagaauuggagcacuuuug

SEQ ID NO: 4003856 - RNA, 14 nt, Human herpesvirus 8 [Kaposi`s sarcoma-associated h
gcggauaggcuggg

SEQ ID NO: 4003857 - RNA, 21 nt, Human herpesvirus 8 [Kaposi`s sarcoma-associated h
gcggccacgaauucgaggaca

SEQ ID NO: 4003858 - RNA, 18 nt, Human herpesvirus 8 [Kaposi`s sarcoma-associated h
gcggggacguucaccgug

SEQ ID NO: 4003859 - RNA, 12 nt, Human herpesvirus 8 [Kaposi`s sarcoma-associated h
gcggugcugccc

SEQ ID NO: 4003860 - RNA, 13 nt, Human herpesvirus 8 [Kaposi`s sarcoma-associated h
gcguguugggaca

SEQ ID NO: 4003861 - RNA, 11 nt, Human herpesvirus 8 [Kaposi`s sarcoma-associated h
gcguugugaag

SEQ ID NO: 4003862 - RNA, 15 nt, Human herpesvirus 8 [Kaposi`s sarcoma-associated h
gcucugcgugcugga

SEQ ID NO: 4003863 - RNA, 16 nt, Human herpesvirus 8 [Kaposi`s sarcoma-associated h
gcucugcgugcuggag

SEQ ID NO: 4003864 - RNA, 13 nt, Human herpesvirus 8 [Kaposi`s sarcoma-associated h
gcucugcugccug

SEQ ID NO: 4003865 - RNA, 14 nt, Human herpesvirus 8 [Kaposi`s sarcoma-associated h
gcugaucucagagg

SEQ ID NO: 4003866 - RNA, 13 nt, Human herpesvirus 8 [Kaposi`s sarcoma-associated h
gcugcagcuggac

SEQ ID NO: 4003867 - RNA, 12 nt, Human herpesvirus 8 [Kaposi`s sarcoma-associated h
gcuggacccacg

SEQ ID NO: 4003868 - RNA, 16 nt, Human herpesvirus 8 [Kaposi`s sarcoma-associated h
gcuggagggcacagau

SEQ ID NO: 4003869 - RNA, 16 nt, Human herpesvirus 8 [Kaposi`s sarcoma-associated h
gcugucauugaggaag

SEQ ID NO: 4003870 - RNA, 14 nt, Human herpesvirus 8 [Kaposi`s sarcoma-associated h
gcuguccaccuuaa

SEQ ID NO: 4003871 - RNA, 21 nt, Human herpesvirus 8 [Kaposi`s sarcoma-associated h
gcugucuaguggagagggcca

SEQ ID NO: 4003872 - RNA, 15 nt, Human herpesvirus 8 [Kaposi`s sarcoma-associated h
gcuuggcgaccucaa

SEQ ID NO: 4003873 - RNA, 23 nt, Human herpesvirus 8 [Kaposi`s sarcoma-associated h
gcuuuccugugauuucucugugc

SEQ ID NO: 4003874 - RNA, 14 nt, Human herpesvirus 8 [Kaposi`s sarcoma-associated h
gcuuugcagccagg

SEQ ID NO: 4003875 - RNA, 19 nt, Human herpesvirus 8 [Kaposi`s sarcoma-associated h
ggaagaugaagaugaagaa

SEQ ID NO: 4003876 - RNA, 20 nt, Human herpesvirus 8 [Kaposi`s sarcoma-associated h
ggacacuaaaagucuggccc

SEQ ID NO: 4003877 - RNA, 23 nt, Human herpesvirus 8 [Kaposi`s sarcoma-associated h
ggacagcaacacccagcuagcag

SEQ ID NO: 4003878 - RNA, 12 nt, Human herpesvirus 8 [Kaposi`s sarcoma-associated h
ggacagcuuuca

SEQ ID NO: 4003879 - RNA, 17 nt, Human herpesvirus 8 [Kaposi`s sarcoma-associated h
ggacauggacaggggug

SEQ ID NO: 4003880 - RNA, 18 nt, Human herpesvirus 8 [Kaposi`s sarcoma-associated h
ggacucugguacgcaagg

SEQ ID NO: 4003881 - RNA, 16 nt, Human herpesvirus 8 [Kaposi`s sarcoma-associated h
ggaguccauggcagug

SEQ ID NO: 4003882 - RNA, 12 nt, Human herpesvirus 8 [Kaposi`s sarcoma-associated h
ggcaugggcacc

SEQ ID NO: 4003883 - RNA, 17 nt, Human herpesvirus 8 [Kaposi`s sarcoma-associated h
ggccauucuaggagacg

SEQ ID NO: 4003884 - RNA, 14 nt, Human herpesvirus 8 [Kaposi`s sarcoma-associated h
ggcccgagaaacac

SEQ ID NO: 4003885 - RNA, 13 nt, Human herpesvirus 8 [Kaposi`s sarcoma-associated h
ggccgcauuuggc

SEQ ID NO: 4003886 - RNA, 14 nt, Human herpesvirus 8 [Kaposi`s sarcoma-associated h
ggcgagauuggagg

SEQ ID NO: 4003887 - RNA, 17 nt, Human herpesvirus 8 [Kaposi`s sarcoma-associated h
ggcgcaggcgaucgccg

SEQ ID NO: 4003888 - RNA, 17 nt, Human herpesvirus 8 [Kaposi`s sarcoma-associated h
ggcgcggaaacugggca

SEQ ID NO: 4003889 - RNA, 13 nt, Human herpesvirus 8 [Kaposi`s sarcoma-associated h
ggcgcucagggug

SEQ ID NO: 4003890 - RNA, 16 nt, Human herpesvirus 8 [Kaposi`s sarcoma-associated h
ggcggguggcucacau

SEQ ID NO: 4003891 - RNA, 11 nt, Human herpesvirus 8 [Kaposi`s sarcoma-associated h
ggcguguccag

SEQ ID NO: 4003892 - RNA, 20 nt, Human herpesvirus 8 [Kaposi`s sarcoma-associated h
ggcuccuggguagcuaugcc

SEQ ID NO: 4003893 - RNA, 12 nt, Human herpesvirus 8 [Kaposi`s sarcoma-associated h
ggcuguggcacc

SEQ ID NO: 4003894 - RNA, 11 nt, Human herpesvirus 8 [Kaposi`s sarcoma-associated h
ggcuguuacaa

SEQ ID NO: 4003895 - RNA, 23 nt, Human herpesvirus 8 [Kaposi`s sarcoma-associated h
ggcuguuacaauaaagccgagcc

SEQ ID NO: 4003896 - RNA, 22 nt, Human herpesvirus 8 [Kaposi`s sarcoma-associated h
gggccagagguuugaggcgcug

SEQ ID NO: 4003897 - RNA, 23 nt, Human herpesvirus 8 [Kaposi`s sarcoma-associated h
gggccuuggaguuaaagcuguca

SEQ ID NO: 4003898 - RNA, 16 nt, Human herpesvirus 8 [Kaposi`s sarcoma-associated h
ggggaagucaugcuca

SEQ ID NO: 4003899 - RNA, 14 nt, Human herpesvirus 8 [Kaposi`s sarcoma-associated h
ggguggacagugcc

SEQ ID NO: 4003900 - RNA, 21 nt, Human herpesvirus 8 [Kaposi`s sarcoma-associated h
gguaaccagcuacgcacugag

SEQ ID NO: 4003901 - RNA, 15 nt, Human herpesvirus 8 [Kaposi`s sarcoma-associated h
gguagauugacugga

SEQ ID NO: 4003902 - RNA, 15 nt, Human herpesvirus 8 [Kaposi`s sarcoma-associated h
gguaggccagcugcg

SEQ ID NO: 4003903 - RNA, 23 nt, Human herpesvirus 8 [Kaposi`s sarcoma-associated h
ggucccacugcugcgauccagag

SEQ ID NO: 4003904 - RNA, 18 nt, Human herpesvirus 8 [Kaposi`s sarcoma-associated h
ggugaucuuaggccagga

SEQ ID NO: 4003905 - RNA, 21 nt, Human herpesvirus 8 [Kaposi`s sarcoma-associated h
ggugucaagucucaugcuuua

SEQ ID NO: 4003906 - RNA, 19 nt, Human herpesvirus 8 [Kaposi`s sarcoma-associated h
gguguguugaaggacggau

SEQ ID NO: 4003907 - RNA, 15 nt, Human herpesvirus 8 [Kaposi`s sarcoma-associated h
gguuccagugcgcuc

SEQ ID NO: 4003908 - RNA, 16 nt, Human herpesvirus 8 [Kaposi`s sarcoma-associated h
gguuccguucuccuuc

SEQ ID NO: 4003909 - RNA, 22 nt, Human herpesvirus 8 [Kaposi`s sarcoma-associated h
gguugacuuuuuaaaggggacg

SEQ ID NO: 4003910 - RNA, 20 nt, Human herpesvirus 8 [Kaposi`s sarcoma-associated h
guacauuaaaaggacauugu

SEQ ID NO: 4003911 - RNA, 16 nt, Human herpesvirus 8 [Kaposi`s sarcoma-associated h
guacgacgcaggcguc

SEQ ID NO: 4003912 - RNA, 18 nt, Human herpesvirus 8 [Kaposi`s sarcoma-associated h
gucaaccagauuuaagau

SEQ ID NO: 4003913 - RNA, 23 nt, Human herpesvirus 8 [Kaposi`s sarcoma-associated h
gucagguuacuggacguggccag

SEQ ID NO: 4003914 - RNA, 22 nt, Human herpesvirus 8 [Kaposi`s sarcoma-associated h
gucaucucuaaucgaguacccc

SEQ ID NO: 4003915 - RNA, 14 nt, Human herpesvirus 8 [Kaposi`s sarcoma-associated h
gucuacccugccac

SEQ ID NO: 4003916 - RNA, 15 nt, Human herpesvirus 8 [Kaposi`s sarcoma-associated h
gucucccugcgugga

SEQ ID NO: 4003917 - RNA, 15 nt, Human herpesvirus 8 [Kaposi`s sarcoma-associated h
gucugaaacgggaca

SEQ ID NO: 4003918 - RNA, 14 nt, Human herpesvirus 8 [Kaposi`s sarcoma-associated h
gucugugcccugcg

SEQ ID NO: 4003919 - RNA, 22 nt, Human herpesvirus 8 [Kaposi`s sarcoma-associated h
gucuguguuuuguaaacugaug

SEQ ID NO: 4003920 - RNA, 19 nt, Human herpesvirus 8 [Kaposi`s sarcoma-associated h
gucuuuccgugucuccuug

SEQ ID NO: 4003921 - RNA, 13 nt, Human herpesvirus 8 [Kaposi`s sarcoma-associated h
gugaaguucauau

SEQ ID NO: 4003922 - RNA, 23 nt, Human herpesvirus 8 [Kaposi`s sarcoma-associated h
gugauuggucuuauaacagugcu

SEQ ID NO: 4003923 - RNA, 21 nt, Human herpesvirus 8 [Kaposi`s sarcoma-associated h
gugcguuugcagugugcagua

SEQ ID NO: 4003924 - RNA, 16 nt, Human herpesvirus 8 [Kaposi`s sarcoma-associated h
gugcuuuaaugcggag

SEQ ID NO: 4003925 - RNA, 14 nt, Human herpesvirus 8 [Kaposi`s sarcoma-associated h
gugcuuugcuggag

SEQ ID NO: 4003926 - RNA, 23 nt, Human herpesvirus 8 [Kaposi`s sarcoma-associated h
guggcaacauacauuuuucugaa

SEQ ID NO: 4003927 - RNA, 12 nt, Human herpesvirus 8 [Kaposi`s sarcoma-associated h
guggugugccug

SEQ ID NO: 4003928 - RNA, 20 nt, Human herpesvirus 8 [Kaposi`s sarcoma-associated h
guguaucccccacaggacaa

SEQ ID NO: 4003929 - RNA, 18 nt, Human herpesvirus 8 [Kaposi`s sarcoma-associated h
guguuuuuugccauggua

SEQ ID NO: 4003930 - RNA, 15 nt, Human herpesvirus 8 [Kaposi`s sarcoma-associated h
guuaucuuugcagug

SEQ ID NO: 4003931 - RNA, 13 nt, Human herpesvirus 8 [Kaposi`s sarcoma-associated h
guuccacggcgug

SEQ ID NO: 4003932 - RNA, 13 nt, Human herpesvirus 8 [Kaposi`s sarcoma-associated h
guugacagggacg

SEQ ID NO: 4003933 - RNA, 19 nt, Human herpesvirus 8 [Kaposi`s sarcoma-associated h
guuguaaacuauauauaag

SEQ ID NO: 4003934 - RNA, 15 nt, Human herpesvirus 8 [Kaposi`s sarcoma-associated h
guuuaccugcacucc

SEQ ID NO: 4003935 - RNA, 19 nt, Human herpesvirus 8 [Kaposi`s sarcoma-associated h
uaucaggggaaccacggcg

SEQ ID NO: 4003936 - RNA, 20 nt, Human herpesvirus 8 [Kaposi`s sarcoma-associated h
uaucuucaaggcccuguacu

SEQ ID NO: 4003937 - RNA, 22 nt, Human herpesvirus 8 [Kaposi`s sarcoma-associated h
uauugcuuucaaauaaaacggu

SEQ ID NO: 4003938 - RNA, 23 nt, Human herpesvirus 8 [Kaposi`s sarcoma-associated h
ucaaggucuuuaacgccugcacc

SEQ ID NO: 4003939 - RNA, 23 nt, Human herpesvirus 8 [Kaposi`s sarcoma-associated h
ucaaugggagaaccaaccucucc

SEQ ID NO: 4003940 - RNA, 22 nt, Human herpesvirus 8 [Kaposi`s sarcoma-associated h
ucacaaauuuuaacagccacga

SEQ ID NO: 4003941 - RNA, 14 nt, Human herpesvirus 8 [Kaposi`s sarcoma-associated h
ucagagucugaacc

SEQ ID NO: 4003942 - RNA, 22 nt, Human herpesvirus 8 [Kaposi`s sarcoma-associated h
ucagcauauacagguguccaag

SEQ ID NO: 4003943 - RNA, 13 nt, Human herpesvirus 8 [Kaposi`s sarcoma-associated h
ucaggucugucac

SEQ ID NO: 4003944 - RNA, 22 nt, Human herpesvirus 8 [Kaposi`s sarcoma-associated h
ucauccuaggugacugggagau

SEQ ID NO: 4003945 - RNA, 17 nt, Human herpesvirus 8 [Kaposi`s sarcoma-associated h
ucaucguggugcccugc

SEQ ID NO: 4003946 - RNA, 21 nt, Human herpesvirus 8 [Kaposi`s sarcoma-associated h
ucauguaccuggcguccagcu

SEQ ID NO: 4003947 - RNA, 19 nt, Human herpesvirus 8 [Kaposi`s sarcoma-associated h
uccaagacuaaaaaggcca

SEQ ID NO: 4003948 - RNA, 21 nt, Human herpesvirus 8 [Kaposi`s sarcoma-associated h
uccacagagccuaccccaacu

SEQ ID NO: 4003949 - RNA, 15 nt, Human herpesvirus 8 [Kaposi`s sarcoma-associated h
uccacccaguuugag

SEQ ID NO: 4003950 - RNA, 17 nt, Human herpesvirus 8 [Kaposi`s sarcoma-associated h
uccacccuaauacauaa

SEQ ID NO: 4003951 - RNA, 14 nt, Human herpesvirus 8 [Kaposi`s sarcoma-associated h
ucccacgugcacca

SEQ ID NO: 4003952 - RNA, 11 nt, Human herpesvirus 8 [Kaposi`s sarcoma-associated h
ucccacugcug

SEQ ID NO: 4003953 - RNA, 22 nt, Human herpesvirus 8 [Kaposi`s sarcoma-associated h
ucccagggugcgaaggaccuga

SEQ ID NO: 4003954 - RNA, 19 nt, Human herpesvirus 8 [Kaposi`s sarcoma-associated h
ucccccacacccccaggau

SEQ ID NO: 4003955 - RNA, 15 nt, Human herpesvirus 8 [Kaposi`s sarcoma-associated h
ucccgaugccacugu

SEQ ID NO: 4003956 - RNA, 18 nt, Human herpesvirus 8 [Kaposi`s sarcoma-associated h
ucccgugcguuugcagug

SEQ ID NO: 4003957 - RNA, 22 nt, Human herpesvirus 8 [Kaposi`s sarcoma-associated h
uccgucauucacccgagccaca

SEQ ID NO: 4003958 - RNA, 16 nt, Human herpesvirus 8 [Kaposi`s sarcoma-associated h
uccuccggugacugga

SEQ ID NO: 4003959 - RNA, 21 nt, Human herpesvirus 8 [Kaposi`s sarcoma-associated h
uccucgcgucggccaccgcgg

SEQ ID NO: 4003960 - RNA, 22 nt, Human herpesvirus 8 [Kaposi`s sarcoma-associated h
uccuuacuugguaacucccuca

SEQ ID NO: 4003961 - RNA, 21 nt, Human herpesvirus 8 [Kaposi`s sarcoma-associated h
ucgccaacggacgcgccacuc

SEQ ID NO: 4003962 - RNA, 12 nt, Human herpesvirus 8 [Kaposi`s sarcoma-associated h
ucgcccacggaa

SEQ ID NO: 4003963 - RNA, 18 nt, Human herpesvirus 8 [Kaposi`s sarcoma-associated h
ucgcccgucacuggaugu

SEQ ID NO: 4003964 - RNA, 14 nt, Human herpesvirus 8 [Kaposi`s sarcoma-associated h
ucgccgcuccgcac

SEQ ID NO: 4003965 - RNA, 23 nt, Human herpesvirus 8 [Kaposi`s sarcoma-associated h
ucggacaggacgcggccauccgc

SEQ ID NO: 4003966 - RNA, 15 nt, Human herpesvirus 8 [Kaposi`s sarcoma-associated h
ucgggggaucuugua

SEQ ID NO: 4003967 - RNA, 16 nt, Human herpesvirus 8 [Kaposi`s sarcoma-associated h
ucguugaucuucuuga

SEQ ID NO: 4003968 - RNA, 14 nt, Human herpesvirus 8 [Kaposi`s sarcoma-associated h
ucuacccugccacu

SEQ ID NO: 4003969 - RNA, 16 nt, Human herpesvirus 8 [Kaposi`s sarcoma-associated h
ucuaguggagagggcc

SEQ ID NO: 4003970 - RNA, 12 nt, Human herpesvirus 8 [Kaposi`s sarcoma-associated h
ucuauguuuccu

SEQ ID NO: 4003971 - RNA, 17 nt, Human herpesvirus 8 [Kaposi`s sarcoma-associated h
ucucccuucgugcccca

SEQ ID NO: 4003972 - RNA, 18 nt, Human herpesvirus 8 [Kaposi`s sarcoma-associated h
ucugugucacuccccgag

SEQ ID NO: 4003973 - RNA, 21 nt, Human herpesvirus 8 [Kaposi`s sarcoma-associated h
ucuugauguuuaaauuuuugg

SEQ ID NO: 4003974 - RNA, 20 nt, Human herpesvirus 8 [Kaposi`s sarcoma-associated h
ugaaagcaggacguccaggc

SEQ ID NO: 4003975 - RNA, 14 nt, Human herpesvirus 8 [Kaposi`s sarcoma-associated h
ugaacagggcauga

SEQ ID NO: 4003976 - RNA, 16 nt, Human herpesvirus 8 [Kaposi`s sarcoma-associated h
ugacuccggggagcug

SEQ ID NO: 4003977 - RNA, 18 nt, Human herpesvirus 8 [Kaposi`s sarcoma-associated h
ugacucuguauuugggac

SEQ ID NO: 4003978 - RNA, 22 nt, Human herpesvirus 8 [Kaposi`s sarcoma-associated h
ugacugccacggccgccuuugu

SEQ ID NO: 4003979 - RNA, 23 nt, Human herpesvirus 8 [Kaposi`s sarcoma-associated h
ugagccacaaacgccccucuugg

SEQ ID NO: 4003980 - RNA, 13 nt, Human herpesvirus 8 [Kaposi`s sarcoma-associated h
ugagccagaauga

SEQ ID NO: 4003981 - RNA, 15 nt, Human herpesvirus 8 [Kaposi`s sarcoma-associated h
ugagcgcugugcuuu

SEQ ID NO: 4003982 - RNA, 17 nt, Human herpesvirus 8 [Kaposi`s sarcoma-associated h
ugauaccguaguccccu

SEQ ID NO: 4003983 - RNA, 22 nt, Human herpesvirus 8 [Kaposi`s sarcoma-associated h
ggcagaaaauggcacacgguua

SEQ ID NO: 4003984 - RNA, 21 nt, Human herpesvirus 8 [Kaposi`s sarcoma-associated h
ggccaacaucaacaggagggc

SEQ ID NO: 4003985 - RNA, 17 nt, Human herpesvirus 8 [Kaposi`s sarcoma-associated h
ggccacauacgcucgcc

SEQ ID NO: 4003986 - RNA, 22 nt, Human herpesvirus 8 [Kaposi`s sarcoma-associated h
ggccacgaauucgaggacacgc

SEQ ID NO: 4003987 - RNA, 20 nt, Human herpesvirus 8 [Kaposi`s sarcoma-associated h
ggcgacaggcgcguauggga

SEQ ID NO: 4003988 - RNA, 21 nt, Human herpesvirus 8 [Kaposi`s sarcoma-associated h
ggcgagauuggaggcacauaa

SEQ ID NO: 4003989 - RNA, 20 nt, Human herpesvirus 8 [Kaposi`s sarcoma-associated h
ggcgcgccacagucgagccg

SEQ ID NO: 4003990 - RNA, 19 nt, Human herpesvirus 8 [Kaposi`s sarcoma-associated h
ggcgcgccugucgacaggc

SEQ ID NO: 4003991 - RNA, 17 nt, Human herpesvirus 8 [Kaposi`s sarcoma-associated h
ggcggcuguggcaccaa

SEQ ID NO: 4003992 - RNA, 13 nt, Human herpesvirus 8 [Kaposi`s sarcoma-associated h
ggcggggcggcug

SEQ ID NO: 4003993 - RNA, 15 nt, Human herpesvirus 8 [Kaposi`s sarcoma-associated h
ggcguccgcucuccc

SEQ ID NO: 4003994 - RNA, 21 nt, Human herpesvirus 8 [Kaposi`s sarcoma-associated h
ggcuugcacgccaacccucag

SEQ ID NO: 4003995 - RNA, 16 nt, Human herpesvirus 8 [Kaposi`s sarcoma-associated h
gggacgugcgggccaa

SEQ ID NO: 4003996 - RNA, 11 nt, Human herpesvirus 8 [Kaposi`s sarcoma-associated h
gggcaaaacac

SEQ ID NO: 4003997 - RNA, 18 nt, Human herpesvirus 8 [Kaposi`s sarcoma-associated h
gggcacccuauccaucag

SEQ ID NO: 4003998 - RNA, 19 nt, Human herpesvirus 8 [Kaposi`s sarcoma-associated h
gggcgauucgaucccgcaa

SEQ ID NO: 4003999 - RNA, 18 nt, Human herpesvirus 8 [Kaposi`s sarcoma-associated h
gggcuuguacaugugucu

SEQ ID NO: 4004000 - RNA, 21 nt, Human herpesvirus 8 [Kaposi`s sarcoma-associated h
gggugacaccuuucagacguc

SEQ ID NO: 4004001 - RNA, 17 nt, Human herpesvirus 8 [Kaposi`s sarcoma-associated h
ggucucucuugcugguc

SEQ ID NO: 4004002 - RNA, 14 nt, Human herpesvirus 8 [Kaposi`s sarcoma-associated h
ggugcguugugaag

SEQ ID NO: 4004003 - RNA, 22 nt, Human herpesvirus 8 [Kaposi`s sarcoma-associated h
gguggcucgcaugaauacccug

SEQ ID NO: 4004004 - RNA, 12 nt, Human herpesvirus 8 [Kaposi`s sarcoma-associated h
ggugggugugca

SEQ ID NO: 4004005 - RNA, 13 nt, Human herpesvirus 8 [Kaposi`s sarcoma-associated h
gguguucugucaa

SEQ ID NO: 4004006 - RNA, 14 nt, Human herpesvirus 8 [Kaposi`s sarcoma-associated h
gguuccccguccac

SEQ ID NO: 4004007 - RNA, 14 nt, Human herpesvirus 8 [Kaposi`s sarcoma-associated h
guaaagaaaguaga

SEQ ID NO: 4004008 - RNA, 18 nt, Human herpesvirus 8 [Kaposi`s sarcoma-associated h
guaaauuuaggaaacacg

SEQ ID NO: 4004009 - RNA, 14 nt, Human herpesvirus 8 [Kaposi`s sarcoma-associated h
guaagaggacccag

SEQ ID NO: 4004010 - RNA, 20 nt, Human herpesvirus 8 [Kaposi`s sarcoma-associated h
guacugcgcauuuccugccc

SEQ ID NO: 4004011 - RNA, 15 nt, Human herpesvirus 8 [Kaposi`s sarcoma-associated h
guagacggggagcug

SEQ ID NO: 4004012 - RNA, 16 nt, Human herpesvirus 8 [Kaposi`s sarcoma-associated h
gucaaccagauuuaag

SEQ ID NO: 4004013 - RNA, 17 nt, Human herpesvirus 8 [Kaposi`s sarcoma-associated h
gucacaguucagauggc

SEQ ID NO: 4004014 - RNA, 22 nt, Human herpesvirus 8 [Kaposi`s sarcoma-associated h
gucaugggaccguguguggcug

SEQ ID NO: 4004015 - RNA, 12 nt, Human herpesvirus 8 [Kaposi`s sarcoma-associated h
guccaggccucu

SEQ ID NO: 4004016 - RNA, 23 nt, Human herpesvirus 8 [Kaposi`s sarcoma-associated h
guccccaauuucaguacuccuuc

SEQ ID NO: 4004017 - RNA, 20 nt, Human herpesvirus 8 [Kaposi`s sarcoma-associated h
guccugauuuuccagggaca

SEQ ID NO: 4004018 - RNA, 18 nt, Human herpesvirus 8 [Kaposi`s sarcoma-associated h
gucgacagagccagccug

SEQ ID NO: 4004019 - RNA, 16 nt, Human herpesvirus 8 [Kaposi`s sarcoma-associated h
gucgcucuucaguuau

SEQ ID NO: 4004020 - RNA, 22 nt, Human herpesvirus 8 [Kaposi`s sarcoma-associated h
gucuacaggggcuugacagagu

SEQ ID NO: 4004021 - RNA, 21 nt, Human herpesvirus 8 [Kaposi`s sarcoma-associated h
gucucaggugucugcgggaca

SEQ ID NO: 4004022 - RNA, 15 nt, Human herpesvirus 8 [Kaposi`s sarcoma-associated h
gucuuauaacagugc

SEQ ID NO: 4004023 - RNA, 17 nt, Human herpesvirus 8 [Kaposi`s sarcoma-associated h
gucuuuauugcuuucaa

SEQ ID NO: 4004024 - RNA, 16 nt, Human herpesvirus 8 [Kaposi`s sarcoma-associated h
gugacgugacgcccug

SEQ ID NO: 4004025 - RNA, 17 nt, Human herpesvirus 8 [Kaposi`s sarcoma-associated h
gugcccaaaucuguccu

SEQ ID NO: 4004026 - RNA, 15 nt, Human herpesvirus 8 [Kaposi`s sarcoma-associated h
gugcgcgguguggca

SEQ ID NO: 4004027 - RNA, 20 nt, Human herpesvirus 8 [Kaposi`s sarcoma-associated h
gugcucuucccacacccggc

SEQ ID NO: 4004028 - RNA, 13 nt, Human herpesvirus 8 [Kaposi`s sarcoma-associated h
guggacaccacau

SEQ ID NO: 4004029 - RNA, 12 nt, Human herpesvirus 8 [Kaposi`s sarcoma-associated h
guggcaccugag

SEQ ID NO: 4004030 - RNA, 21 nt, Human herpesvirus 8 [Kaposi`s sarcoma-associated h
guggcccgucuguauacguga

SEQ ID NO: 4004031 - RNA, 23 nt, Human herpesvirus 8 [Kaposi`s sarcoma-associated h
guggcuuuugccuaaaaagaugc

SEQ ID NO: 4004032 - RNA, 16 nt, Human herpesvirus 8 [Kaposi`s sarcoma-associated h
ugguauauugguccag

SEQ ID NO: 4004033 - RNA, 18 nt, Human herpesvirus 8 [Kaposi`s sarcoma-associated h
ugguugauugugacuauu

SEQ ID NO: 4004034 - RNA, 17 nt, Human herpesvirus 8 [Kaposi`s sarcoma-associated h
uguaaaacacuguuugg

SEQ ID NO: 4004035 - RNA, 20 nt, Human herpesvirus 8 [Kaposi`s sarcoma-associated h
uguaaaucgggccacuuugc

SEQ ID NO: 4004036 - RNA, 15 nt, Human herpesvirus 8 [Kaposi`s sarcoma-associated h
uguaccuagcccugu

SEQ ID NO: 4004037 - RNA, 14 nt, Human herpesvirus 8 [Kaposi`s sarcoma-associated h
uguaugacugcccu

SEQ ID NO: 4004038 - RNA, 19 nt, Human herpesvirus 8 [Kaposi`s sarcoma-associated h
uguccccugcaaugcaagg

SEQ ID NO: 4004039 - RNA, 20 nt, Human herpesvirus 8 [Kaposi`s sarcoma-associated h
ugucugcguuccacaaacac

SEQ ID NO: 4004040 - RNA, 21 nt, Human herpesvirus 8 [Kaposi`s sarcoma-associated h
ugugaaugucagacacacacu

SEQ ID NO: 4004041 - RNA, 16 nt, Human herpesvirus 8 [Kaposi`s sarcoma-associated h
ugugcggcgcagcagc

SEQ ID NO: 4004042 - RNA, 15 nt, Human herpesvirus 8 [Kaposi`s sarcoma-associated h
ugugguaagaaggaa

SEQ ID NO: 4004043 - RNA, 20 nt, Human herpesvirus 8 [Kaposi`s sarcoma-associated h
uguguauccuagaaugaagu

SEQ ID NO: 4004044 - RNA, 16 nt, Human herpesvirus 8 [Kaposi`s sarcoma-associated h
uuaagaagccacuugu

SEQ ID NO: 4004045 - RNA, 15 nt, Human herpesvirus 8 [Kaposi`s sarcoma-associated h
uuaagacaaacacug

SEQ ID NO: 4004046 - RNA, 17 nt, Human herpesvirus 8 [Kaposi`s sarcoma-associated h
uuaagcgccaagccauu

SEQ ID NO: 4004047 - RNA, 19 nt, Human herpesvirus 8 [Kaposi`s sarcoma-associated h
uuaaguacauuaaaaggac

SEQ ID NO: 4004048 - RNA, 14 nt, Human herpesvirus 8 [Kaposi`s sarcoma-associated h
uuaauaaauugcuu

SEQ ID NO: 4004049 - RNA, 13 nt, Human herpesvirus 8 [Kaposi`s sarcoma-associated h
uuaauuggagcuc

SEQ ID NO: 4004050 - RNA, 19 nt, Human herpesvirus 8 [Kaposi`s sarcoma-associated h
uuacauuugacaacacgca

SEQ ID NO: 4004051 - RNA, 12 nt, Human herpesvirus 8 [Kaposi`s sarcoma-associated h
uuacuugcagca

SEQ ID NO: 4004052 - RNA, 19 nt, Human herpesvirus 8 [Kaposi`s sarcoma-associated h
uuagauaguguugagguaa

SEQ ID NO: 4004053 - RNA, 15 nt, Human herpesvirus 8 [Kaposi`s sarcoma-associated h
uuauaacagugcucu

SEQ ID NO: 4004054 - RNA, 21 nt, Human herpesvirus 8 [Kaposi`s sarcoma-associated h
uuaugaggucggauacuuauu

SEQ ID NO: 4004055 - RNA, 17 nt, Human herpesvirus 8 [Kaposi`s sarcoma-associated h
uucaagagggccaguuu

SEQ ID NO: 4004056 - RNA, 20 nt, Human herpesvirus 8 [Kaposi`s sarcoma-associated h
uucacccgagccacaucguc

SEQ ID NO: 4004057 - RNA, 22 nt, Human herpesvirus 8 [Kaposi`s sarcoma-associated h
uucccaaacacaucaguguccu

SEQ ID NO: 4004058 - RNA, 13 nt, Human herpesvirus 8 [Kaposi`s sarcoma-associated h
uucccccaucguc

SEQ ID NO: 4004059 - RNA, 16 nt, Human herpesvirus 8 [Kaposi`s sarcoma-associated h
uucggacgcuauuugu

SEQ ID NO: 4004060 - RNA, 16 nt, Human herpesvirus 8 [Kaposi`s sarcoma-associated h
uucguaagaggaccca

SEQ ID NO: 4004061 - RNA, 20 nt, Human herpesvirus 8 [Kaposi`s sarcoma-associated h
uucugaaacagaaacugcuc

SEQ ID NO: 4004062 - RNA, 22 nt, Human herpesvirus 8 [Kaposi`s sarcoma-associated h
uugcaccaagcacaacauuaaa

SEQ ID NO: 4004063 - RNA, 12 nt, Human herpesvirus 8 [Kaposi`s sarcoma-associated h
uugcauugcucu

SEQ ID NO: 4004064 - RNA, 20 nt, Human herpesvirus 8 [Kaposi`s sarcoma-associated h
uugccgagcccguuguggca

SEQ ID NO: 4004065 - RNA, 20 nt, Human herpesvirus 8 [Kaposi`s sarcoma-associated h
uuggaguuaaagcugucacu

SEQ ID NO: 4004066 - RNA, 14 nt, Human herpesvirus 8 [Kaposi`s sarcoma-associated h
uuggcgagaagccc

SEQ ID NO: 4004067 - RNA, 15 nt, Human herpesvirus 8 [Kaposi`s sarcoma-associated h
uuguggaccuccgcc

SEQ ID NO: 4004068 - RNA, 14 nt, Human herpesvirus 8 [Kaposi`s sarcoma-associated h
uuguggcugccugg

SEQ ID NO: 4004069 - RNA, 16 nt, Human herpesvirus 8 [Kaposi`s sarcoma-associated h
uuuacggacaauacug

SEQ ID NO: 4004070 - RNA, 18 nt, Human herpesvirus 8 [Kaposi`s sarcoma-associated h
uuuucaaaugagugaaaa

SEQ ID NO: 4004071 - RNA, 16 nt, Human herpesvirus 8 [Kaposi`s sarcoma-associated h
aaaauguuuacugggu

SEQ ID NO: 4004072 - RNA, 16 nt, Human herpesvirus 8 [Kaposi`s sarcoma-associated h
aaacaugcccuccugg

SEQ ID NO: 4004073 - RNA, 20 nt, Human herpesvirus 8 [Kaposi`s sarcoma-associated h
aaacgccccucuuggcuguu

SEQ ID NO: 4004074 - RNA, 14 nt, Human herpesvirus 8 [Kaposi`s sarcoma-associated h
aaagccgagccaca

SEQ ID NO: 4004075 - RNA, 15 nt, Human herpesvirus 8 [Kaposi`s sarcoma-associated h
aaagccgagccacaa

SEQ ID NO: 4004076 - RNA, 19 nt, Human herpesvirus 8 [Kaposi`s sarcoma-associated h
aacacagucacaguucaga

SEQ ID NO: 4004077 - RNA, 14 nt, Human herpesvirus 8 [Kaposi`s sarcoma-associated h
aacagaagacccag

SEQ ID NO: 4004078 - RNA, 22 nt, Human herpesvirus 8 [Kaposi`s sarcoma-associated h
aacccgcccucgggacuucugg

SEQ ID NO: 4004079 - RNA, 18 nt, Human herpesvirus 8 [Kaposi`s sarcoma-associated h
aacgcacaucagcggcac

SEQ ID NO: 4004080 - RNA, 16 nt, Human herpesvirus 8 [Kaposi`s sarcoma-associated h
aacuuuauuacaggua

SEQ ID NO: 4004081 - RNA, 17 nt, Human herpesvirus 8 [Kaposi`s sarcoma-associated h
aagaaauccgagcaccu

SEQ ID NO: 4004082 - RNA, 16 nt, Human herpesvirus 8 [Kaposi`s sarcoma-associated h
aagcacauuuugcacg

SEQ ID NO: 4004083 - RNA, 17 nt, Human herpesvirus 8 [Kaposi`s sarcoma-associated h
aagcuuugcagccaggu

SEQ ID NO: 4004084 - RNA, 14 nt, Human herpesvirus 8 [Kaposi`s sarcoma-associated h
aaggcaacaccggc

SEQ ID NO: 4004085 - RNA, 23 nt, Human herpesvirus 8 [Kaposi`s sarcoma-associated h
aaggcacaacucuacugcacaaa

SEQ ID NO: 4004086 - RNA, 22 nt, Human herpesvirus 8 [Kaposi`s sarcoma-associated h
aagucagugccacaauuucauu

SEQ ID NO: 4004087 - RNA, 17 nt, Human herpesvirus 8 [Kaposi`s sarcoma-associated h
aaguccgucaaccagau

SEQ ID NO: 4004088 - RNA, 13 nt, Human herpesvirus 8 [Kaposi`s sarcoma-associated h
aagucggcucugg

SEQ ID NO: 4004089 - RNA, 16 nt, Human herpesvirus 8 [Kaposi`s sarcoma-associated h
aagucucccugcgugg

SEQ ID NO: 4004090 - RNA, 15 nt, Human herpesvirus 8 [Kaposi`s sarcoma-associated h
aagucucuuggacaa

SEQ ID NO: 4004091 - RNA, 22 nt, Human herpesvirus 8 [Kaposi`s sarcoma-associated h
aaguggugaucuuaggccagga

SEQ ID NO: 4004092 - RNA, 14 nt, Human herpesvirus 8 [Kaposi`s sarcoma-associated h
aaguuucaaagucg

SEQ ID NO: 4004093 - RNA, 18 nt, Human herpesvirus 8 [Kaposi`s sarcoma-associated h
aauacccccaaaaugucc

SEQ ID NO: 4004094 - RNA, 22 nt, Human herpesvirus 8 [Kaposi`s sarcoma-associated h
aaucuguuuauuguuuuugaac

SEQ ID NO: 4004095 - RNA, 15 nt, Human herpesvirus 8 [Kaposi`s sarcoma-associated h
aaugcagcaguagac

SEQ ID NO: 4004096 - RNA, 13 nt, Human herpesvirus 8 [Kaposi`s sarcoma-associated h
aaugugccagcag

SEQ ID NO: 4004097 - RNA, 17 nt, Human herpesvirus 8 [Kaposi`s sarcoma-associated h
aauguuuguaauuuccu

SEQ ID NO: 4004098 - RNA, 13 nt, Human herpesvirus 8 [Kaposi`s sarcoma-associated h
acaaaaacacaau

SEQ ID NO: 4004099 - RNA, 16 nt, Human herpesvirus 8 [Kaposi`s sarcoma-associated h
acaaauguuuuaugca

SEQ ID NO: 4004100 - RNA, 18 nt, Human herpesvirus 8 [Kaposi`s sarcoma-associated h
acaaugugucuguggcua

SEQ ID NO: 4004101 - RNA, 15 nt, Human herpesvirus 8 [Kaposi`s sarcoma-associated h
acacccuggaugggu

SEQ ID NO: 4004102 - RNA, 21 nt, Human herpesvirus 8 [Kaposi`s sarcoma-associated h
acaggacccauuaacuuuccu

SEQ ID NO: 4004103 - RNA, 15 nt, Human herpesvirus 8 [Kaposi`s sarcoma-associated h
acagguaugaccggc

SEQ ID NO: 4004104 - RNA, 17 nt, Human herpesvirus 8 [Kaposi`s sarcoma-associated h
acagugccugggugcug

SEQ ID NO: 4004105 - RNA, 21 nt, Human herpesvirus 8 [Kaposi`s sarcoma-associated h
acaguugugaucucuggagac

SEQ ID NO: 4004106 - RNA, 13 nt, Human herpesvirus 8 [Kaposi`s sarcoma-associated h
acauaaaauuucu

SEQ ID NO: 4004107 - RNA, 14 nt, Human herpesvirus 8 [Kaposi`s sarcoma-associated h
acauccgcugccac

SEQ ID NO: 4004108 - RNA, 22 nt, Human herpesvirus 8 [Kaposi`s sarcoma-associated h
acaugagagacugcaggccauc

SEQ ID NO: 4004109 - RNA, 14 nt, Human herpesvirus 8 [Kaposi`s sarcoma-associated h
acaugcugccacug

SEQ ID NO: 4004110 - RNA, 20 nt, Human herpesvirus 8 [Kaposi`s sarcoma-associated h
acauugugucaaccagggca

SEQ ID NO: 4004111 - RNA, 20 nt, Human herpesvirus 8 [Kaposi`s sarcoma-associated h
acauuuucucgugugcccuu

SEQ ID NO: 4004112 - RNA, 19 nt, Human herpesvirus 8 [Kaposi`s sarcoma-associated h
accaauaacgaagguaugu

SEQ ID NO: 4004113 - RNA, 17 nt, Human herpesvirus 8 [Kaposi`s sarcoma-associated h
aaaacauagugccucau

SEQ ID NO: 4004114 - RNA, 22 nt, Human herpesvirus 8 [Kaposi`s sarcoma-associated h
aaaaucuggcaugcugggauuu

SEQ ID NO: 4004115 - RNA, 22 nt, Human herpesvirus 8 [Kaposi`s sarcoma-associated h
aaacauuggcgggugugucuug

SEQ ID NO: 4004116 - RNA, 19 nt, Human herpesvirus 8 [Kaposi`s sarcoma-associated h
aaagccugguccaggccuc

SEQ ID NO: 4004117 - RNA, 16 nt, Human herpesvirus 8 [Kaposi`s sarcoma-associated h
aacaaggaaugcauau

SEQ ID NO: 4004118 - RNA, 15 nt, Human herpesvirus 8 [Kaposi`s sarcoma-associated h
aacagaagacccaga

SEQ ID NO: 4004119 - RNA, 21 nt, Human herpesvirus 8 [Kaposi`s sarcoma-associated h
aaccauuuuuuacggacaaua

SEQ ID NO: 4004120 - RNA, 14 nt, Human herpesvirus 8 [Kaposi`s sarcoma-associated h
aacugcgucaugua

SEQ ID NO: 4004121 - RNA, 17 nt, Human herpesvirus 8 [Kaposi`s sarcoma-associated h
aacuguuuacugcuguu

SEQ ID NO: 4004122 - RNA, 16 nt, Human herpesvirus 8 [Kaposi`s sarcoma-associated h
aagaaccaaaggacau

SEQ ID NO: 4004123 - RNA, 12 nt, Human herpesvirus 8 [Kaposi`s sarcoma-associated h
aagagggauggg

SEQ ID NO: 4004124 - RNA, 14 nt, Human herpesvirus 8 [Kaposi`s sarcoma-associated h
aagccgagcucggg

SEQ ID NO: 4004125 - RNA, 18 nt, Human herpesvirus 8 [Kaposi`s sarcoma-associated h
aagcggauugaguguaaa

SEQ ID NO: 4004126 - RNA, 21 nt, Human herpesvirus 8 [Kaposi`s sarcoma-associated h
aagcgucugggucguggcgcc

SEQ ID NO: 4004127 - RNA, 20 nt, Human herpesvirus 8 [Kaposi`s sarcoma-associated h
aagcuucaucguggugcccu

SEQ ID NO: 4004128 - RNA, 16 nt, Human herpesvirus 8 [Kaposi`s sarcoma-associated h
aagcuuugcagccagg

SEQ ID NO: 4004129 - RNA, 11 nt, Human herpesvirus 8 [Kaposi`s sarcoma-associated h
aauaaauguga

SEQ ID NO: 4004130 - RNA, 16 nt, Human herpesvirus 8 [Kaposi`s sarcoma-associated h
aauaacccgcuccgcc

SEQ ID NO: 4004131 - RNA, 13 nt, Human herpesvirus 8 [Kaposi`s sarcoma-associated h
aaucgaagccagg

SEQ ID NO: 4004132 - RNA, 22 nt, Human herpesvirus 8 [Kaposi`s sarcoma-associated h
aaugaagugcaaccugcugcag

SEQ ID NO: 4004133 - RNA, 13 nt, Human herpesvirus 8 [Kaposi`s sarcoma-associated h
aaugcggagagga

SEQ ID NO: 4004134 - RNA, 23 nt, Human herpesvirus 8 [Kaposi`s sarcoma-associated h
aauggccuccacccaccaagcua

SEQ ID NO: 4004135 - RNA, 12 nt, Human herpesvirus 8 [Kaposi`s sarcoma-associated h
aauguuuugguc

SEQ ID NO: 4004136 - RNA, 12 nt, Human herpesvirus 8 [Kaposi`s sarcoma-associated h
aauuggagcacu

SEQ ID NO: 4004137 - RNA, 18 nt, Human herpesvirus 8 [Kaposi`s sarcoma-associated h
aauuucuuauaacacuaa

SEQ ID NO: 4004138 - RNA, 18 nt, Human herpesvirus 8 [Kaposi`s sarcoma-associated h
acaacuauguuuccuagc

SEQ ID NO: 4004139 - RNA, 17 nt, Human herpesvirus 8 [Kaposi`s sarcoma-associated h
acaaucuggauguguau

SEQ ID NO: 4004140 - RNA, 20 nt, Human herpesvirus 8 [Kaposi`s sarcoma-associated h
acaaugaauggggaccagag

SEQ ID NO: 4004141 - RNA, 17 nt, Human herpesvirus 8 [Kaposi`s sarcoma-associated h
acacacggaaggcagug

SEQ ID NO: 4004142 - RNA, 18 nt, Human herpesvirus 8 [Kaposi`s sarcoma-associated h
acacuaaaagucuggccc

SEQ ID NO: 4004143 - RNA, 19 nt, Human herpesvirus 8 [Kaposi`s sarcoma-associated h
acagcccauaguauguaaa

SEQ ID NO: 4004144 - RNA, 21 nt, Human herpesvirus 8 [Kaposi`s sarcoma-associated h
acaggaagcggguuggacugg

SEQ ID NO: 4004145 - RNA, 16 nt, Human herpesvirus 8 [Kaposi`s sarcoma-associated h
acagucgagccgccag

SEQ ID NO: 4004146 - RNA, 18 nt, Human herpesvirus 8 [Kaposi`s sarcoma-associated h
acagucuguaaagaaagu

SEQ ID NO: 4004147 - RNA, 19 nt, Human herpesvirus 8 [Kaposi`s sarcoma-associated h
acaucccccccgcaggcca

SEQ ID NO: 4004148 - RNA, 16 nt, Human herpesvirus 8 [Kaposi`s sarcoma-associated h
accagacacugaggga

SEQ ID NO: 4004149 - RNA, 17 nt, Human herpesvirus 8 [Kaposi`s sarcoma-associated h
accagcgguaaaggcgc

SEQ ID NO: 4004150 - RNA, 16 nt, Human herpesvirus 8 [Kaposi`s sarcoma-associated h
acccaauaaaagagag

SEQ ID NO: 4004151 - RNA, 21 nt, Human herpesvirus 8 [Kaposi`s sarcoma-associated h
acccuuccuacccuacucccc

SEQ ID NO: 4004152 - RNA, 18 nt, Human herpesvirus 8 [Kaposi`s sarcoma-associated h
accgagcucugcugccug

SEQ ID NO: 4004153 - RNA, 16 nt, Human herpesvirus 8 [Kaposi`s sarcoma-associated h
accggaguagugcaag

SEQ ID NO: 4004154 - RNA, 16 nt, Human herpesvirus 8 [Kaposi`s sarcoma-associated h
accgucuaccugccgg

SEQ ID NO: 4004155 - RNA, 16 nt, Human herpesvirus 8 [Kaposi`s sarcoma-associated h
accugaugcaggccac

SEQ ID NO: 4004156 - RNA, 15 nt, Human herpesvirus 8 [Kaposi`s sarcoma-associated h
acgcaggcgccuaug

SEQ ID NO: 4004157 - RNA, 14 nt, Human herpesvirus 8 [Kaposi`s sarcoma-associated h
acgcagggugcggu

SEQ ID NO: 4004158 - RNA, 19 nt, Human herpesvirus 8 [Kaposi`s sarcoma-associated h
acgcccgggggccaggacu

SEQ ID NO: 4004159 - RNA, 19 nt, Human herpesvirus 8 [Kaposi`s sarcoma-associated h
acgcgcgacgcaucgucgc

SEQ ID NO: 4004160 - RNA, 20 nt, Human herpesvirus 8 [Kaposi`s sarcoma-associated h
acgggaggcuugguggccau

SEQ ID NO: 4004161 - RNA, 17 nt, Human herpesvirus 8 [Kaposi`s sarcoma-associated h
acgucuugaccucuccg

SEQ ID NO: 4004162 - RNA, 13 nt, Human herpesvirus 8 [Kaposi`s sarcoma-associated h
acuaaucaguguu

SEQ ID NO: 4004163 - RNA, 22 nt, Human herpesvirus 8 [Kaposi`s sarcoma-associated h
acuacagggaaguuucagagcc

SEQ ID NO: 4004164 - RNA, 21 nt, Human herpesvirus 8 [Kaposi`s sarcoma-associated h
acuaggaggaagagcacuguu

SEQ ID NO: 4004165 - RNA, 24 nt, Human herpesvirus 8 [Kaposi`s sarcoma-associated h
acuauagugcgcgguguggcagaa

SEQ ID NO: 4004166 - RNA, 20 nt, Human herpesvirus 8 [Kaposi`s sarcoma-associated h
acucacugggggucucggga

SEQ ID NO: 4004167 - RNA, 15 nt, Human herpesvirus 8 [Kaposi`s sarcoma-associated h
acucgcuguccugga

SEQ ID NO: 4004168 - RNA, 21 nt, Human herpesvirus 8 [Kaposi`s sarcoma-associated h
acugucuccagaagagcauuu

SEQ ID NO: 4004169 - RNA, 23 nt, Human herpesvirus 8 [Kaposi`s sarcoma-associated h
acuuaacgugucugaauguggaa

SEQ ID NO: 4004170 - RNA, 16 nt, Human herpesvirus 8 [Kaposi`s sarcoma-associated h
acuuauuaaaagcauu

SEQ ID NO: 4004171 - RNA, 20 nt, Human herpesvirus 8 [Kaposi`s sarcoma-associated h
acuuugcccuaaaugugaca

SEQ ID NO: 4004172 - RNA, 21 nt, Human herpesvirus 8 [Kaposi`s sarcoma-associated h
agaaaauuucuguuuccagug

SEQ ID NO: 4004173 - RNA, 20 nt, Human herpesvirus 8 [Kaposi`s sarcoma-associated h
agaacugucgagacauguca

SEQ ID NO: 4004174 - RNA, 14 nt, Human herpesvirus 8 [Kaposi`s sarcoma-associated h
agacacgcaaagua

SEQ ID NO: 4004175 - RNA, 18 nt, Human herpesvirus 8 [Kaposi`s sarcoma-associated h
agacaguuaaucuuuauu

SEQ ID NO: 4004176 - RNA, 18 nt, Human herpesvirus 8 [Kaposi`s sarcoma-associated h
agacuggugcgcacaggc

SEQ ID NO: 4004177 - RNA, 15 nt, Human herpesvirus 8 [Kaposi`s sarcoma-associated h
agagaauacagugcu

SEQ ID NO: 4004178 - RNA, 17 nt, Human herpesvirus 8 [Kaposi`s sarcoma-associated h
agagccagccuggacga

SEQ ID NO: 4004179 - RNA, 18 nt, Human herpesvirus 8 [Kaposi`s sarcoma-associated h
agauccuccacagagccu

SEQ ID NO: 4004180 - RNA, 15 nt, Human herpesvirus 8 [Kaposi`s sarcoma-associated h
agauuucgcaccagc

SEQ ID NO: 4004181 - RNA, 13 nt, Human herpesvirus 8 [Kaposi`s sarcoma-associated h
agcaaaacacaaa

SEQ ID NO: 4004182 - RNA, 15 nt, Human herpesvirus 8 [Kaposi`s sarcoma-associated h
agcaauaaagacaaa

SEQ ID NO: 4004183 - RNA, 17 nt, Human herpesvirus 8 [Kaposi`s sarcoma-associated h
agcacuagguuagguug

SEQ ID NO: 4004184 - RNA, 19 nt, Human herpesvirus 8 [Kaposi`s sarcoma-associated h
agcagggcggccacucuug

SEQ ID NO: 4004185 - RNA, 14 nt, Human herpesvirus 8 [Kaposi`s sarcoma-associated h
agcaguguuugcug

SEQ ID NO: 4004186 - RNA, 23 nt, Human herpesvirus 8 [Kaposi`s sarcoma-associated h
agcaugccugcgcugcgcauggc

SEQ ID NO: 4004187 - RNA, 13 nt, Human herpesvirus 8 [Kaposi`s sarcoma-associated h
agcaugcugauga

SEQ ID NO: 4004188 - RNA, 22 nt, Human herpesvirus 8 [Kaposi`s sarcoma-associated h
agccacaaacgccccucuuggc

SEQ ID NO: 4004189 - RNA, 15 nt, Human herpesvirus 8 [Kaposi`s sarcoma-associated h
agccaugugcugguu

SEQ ID NO: 4004190 - RNA, 19 nt, Human herpesvirus 8 [Kaposi`s sarcoma-associated h
agcccgagaucaucuuuuc

SEQ ID NO: 4004191 - RNA, 21 nt, Human herpesvirus 8 [Kaposi`s sarcoma-associated h
aaaacugucuccagaagagca

SEQ ID NO: 4004192 - RNA, 16 nt, Human herpesvirus 8 [Kaposi`s sarcoma-associated h
aaaaugggccaugaca

SEQ ID NO: 4004193 - RNA, 15 nt, Human herpesvirus 8 [Kaposi`s sarcoma-associated h
aaacagccuuggugc

SEQ ID NO: 4004194 - RNA, 23 nt, Human herpesvirus 8 [Kaposi`s sarcoma-associated h
aaaccccccucgucgacagagcc

SEQ ID NO: 4004195 - RNA, 21 nt, Human herpesvirus 8 [Kaposi`s sarcoma-associated h
aaagcagcgcccacuggugua

SEQ ID NO: 4004196 - RNA, 12 nt, Human herpesvirus 8 [Kaposi`s sarcoma-associated h
aaagcugucacu

SEQ ID NO: 4004197 - RNA, 22 nt, Human herpesvirus 8 [Kaposi`s sarcoma-associated h
aaaugaggggucugaucccaaa

SEQ ID NO: 4004198 - RNA, 21 nt, Human herpesvirus 8 [Kaposi`s sarcoma-associated h
aaauuguguguaccuagcccu

SEQ ID NO: 4004199 - RNA, 16 nt, Human herpesvirus 8 [Kaposi`s sarcoma-associated h
aacacguaccugaccu

SEQ ID NO: 4004200 - RNA, 19 nt, Human herpesvirus 8 [Kaposi`s sarcoma-associated h
aacaugcccuccugggcca

SEQ ID NO: 4004201 - RNA, 16 nt, Human herpesvirus 8 [Kaposi`s sarcoma-associated h
aacaugcugccacugc

SEQ ID NO: 4004202 - RNA, 13 nt, Human herpesvirus 8 [Kaposi`s sarcoma-associated h
aacaugugggcuu

SEQ ID NO: 4004203 - RNA, 16 nt, Human herpesvirus 8 [Kaposi`s sarcoma-associated h
aacccucuacucuucc

SEQ ID NO: 4004204 - RNA, 15 nt, Human herpesvirus 8 [Kaposi`s sarcoma-associated h
aacgugccugccaag

SEQ ID NO: 4004205 - RNA, 13 nt, Human herpesvirus 8 [Kaposi`s sarcoma-associated h
aagaggacccagg

SEQ ID NO: 4004206 - RNA, 12 nt, Human herpesvirus 8 [Kaposi`s sarcoma-associated h
aagcacuggcug

SEQ ID NO: 4004207 - RNA, 22 nt, Human herpesvirus 8 [Kaposi`s sarcoma-associated h
aagcacugggauccacugccga

SEQ ID NO: 4004208 - RNA, 13 nt, Human herpesvirus 8 [Kaposi`s sarcoma-associated h
aagcgcugacgaa

SEQ ID NO: 4004209 - RNA, 14 nt, Human herpesvirus 8 [Kaposi`s sarcoma-associated h
aagcuguacauaau

SEQ ID NO: 4004210 - RNA, 15 nt, Human herpesvirus 8 [Kaposi`s sarcoma-associated h
aaguagucagacauu

SEQ ID NO: 4004211 - RNA, 18 nt, Human herpesvirus 8 [Kaposi`s sarcoma-associated h
aaguccggccaccgugga

SEQ ID NO: 4004212 - RNA, 21 nt, Human herpesvirus 8 [Kaposi`s sarcoma-associated h
aagucguguaagaacauugga

SEQ ID NO: 4004213 - RNA, 12 nt, Human herpesvirus 8 [Kaposi`s sarcoma-associated h
aauacagugcua

SEQ ID NO: 4004214 - RNA, 18 nt, Human herpesvirus 8 [Kaposi`s sarcoma-associated h
aauccuuaagaaagugga

SEQ ID NO: 4004215 - RNA, 19 nt, Human herpesvirus 8 [Kaposi`s sarcoma-associated h
aaucuuuauugucuagaca

SEQ ID NO: 4004216 - RNA, 18 nt, Human herpesvirus 8 [Kaposi`s sarcoma-associated h
aaugaaauuguggcacug

SEQ ID NO: 4004217 - RNA, 22 nt, Human herpesvirus 8 [Kaposi`s sarcoma-associated h
aaugacauaggcgacaaaguga

SEQ ID NO: 4004218 - RNA, 21 nt, Human herpesvirus 8 [Kaposi`s sarcoma-associated h
aaugagucaggcguggucucu

SEQ ID NO: 4004219 - RNA, 15 nt, Human herpesvirus 8 [Kaposi`s sarcoma-associated h
acaacauauguuaaa

SEQ ID NO: 4004220 - RNA, 11 nt, Human herpesvirus 8 [Kaposi`s sarcoma-associated h
acaauaaagcc

SEQ ID NO: 4004221 - RNA, 13 nt, Human herpesvirus 8 [Kaposi`s sarcoma-associated h
acacacacaaaga

SEQ ID NO: 4004222 - RNA, 15 nt, Human herpesvirus 8 [Kaposi`s sarcoma-associated h
acacuuuacugugua

SEQ ID NO: 4004223 - RNA, 19 nt, Human herpesvirus 8 [Kaposi`s sarcoma-associated h
acauaaaacgaagcaaagu

SEQ ID NO: 4004224 - RNA, 20 nt, Human herpesvirus 8 [Kaposi`s sarcoma-associated h
acauaauccccggcagcacc

SEQ ID NO: 4004225 - RNA, 16 nt, Human herpesvirus 8 [Kaposi`s sarcoma-associated h
acaugugcuuuugcuu

SEQ ID NO: 4004226 - RNA, 14 nt, Human herpesvirus 8 [Kaposi`s sarcoma-associated h
acauuaaacacaua

SEQ ID NO: 4004227 - RNA, 16 nt, Human herpesvirus 8 [Kaposi`s sarcoma-associated h
accacggcacaggacc

SEQ ID NO: 4004228 - RNA, 16 nt, Human herpesvirus 8 [Kaposi`s sarcoma-associated h
accauguucagguggu

SEQ ID NO: 4004229 - RNA, 16 nt, Human herpesvirus 8 [Kaposi`s sarcoma-associated h
acccacgccgucacag

SEQ ID NO: 4004230 - RNA, 22 nt, Human herpesvirus 8 [Kaposi`s sarcoma-associated h
acccacgucacaucaccggacc

SEQ ID NO: 4004231 - RNA, 22 nt, Human herpesvirus 8 [Kaposi`s sarcoma-associated h
acccguaccacaagggccaagc

SEQ ID NO: 4004232 - RNA, 16 nt, Human herpesvirus 8 [Kaposi`s sarcoma-associated h
accgugggaacuguga

SEQ ID NO: 4004233 - RNA, 14 nt, Human herpesvirus 8 [Kaposi`s sarcoma-associated h
accuagcgggcaca

SEQ ID NO: 4004234 - RNA, 22 nt, Human herpesvirus 8 [Kaposi`s sarcoma-associated h
accucgggccuugggugcgaug

SEQ ID NO: 4004235 - RNA, 16 nt, Human herpesvirus 8 [Kaposi`s sarcoma-associated h
accugauacgccacgg

SEQ ID NO: 4004236 - RNA, 11 nt, Human herpesvirus 8 [Kaposi`s sarcoma-associated h
accugcacucc

SEQ ID NO: 4004237 - RNA, 20 nt, Human herpesvirus 8 [Kaposi`s sarcoma-associated h
accuguccaugucgcacacu

SEQ ID NO: 4004238 - RNA, 22 nt, Human herpesvirus 8 [Kaposi`s sarcoma-associated h
acgaaugcucaggucugucacu

SEQ ID NO: 4004239 - RNA, 22 nt, Human herpesvirus 8 [Kaposi`s sarcoma-associated h
gaauguauguaucugauuuaau

SEQ ID NO: 4004240 - RNA, 23 nt, Human herpesvirus 8 [Kaposi`s sarcoma-associated h
gaauuccacccauccuccucaga

SEQ ID NO: 4004241 - RNA, 21 nt, Human herpesvirus 8 [Kaposi`s sarcoma-associated h
gacaccuauaauggucuguau

SEQ ID NO: 4004242 - RNA, 16 nt, Human herpesvirus 8 [Kaposi`s sarcoma-associated h
gacagagccagccugg

SEQ ID NO: 4004243 - RNA, 17 nt, Human herpesvirus 8 [Kaposi`s sarcoma-associated h
gacagaguuguggaccu

SEQ ID NO: 4004244 - RNA, 15 nt, Human herpesvirus 8 [Kaposi`s sarcoma-associated h
gacaucagaagaugc

SEQ ID NO: 4004245 - RNA, 15 nt, Human herpesvirus 8 [Kaposi`s sarcoma-associated h
gacauguggagccac

SEQ ID NO: 4004246 - RNA, 12 nt, Human herpesvirus 8 [Kaposi`s sarcoma-associated h
gaccugcuucac

SEQ ID NO: 4004247 - RNA, 15 nt, Human herpesvirus 8 [Kaposi`s sarcoma-associated h
gaccugcuucacuua

SEQ ID NO: 4004248 - RNA, 12 nt, Human herpesvirus 8 [Kaposi`s sarcoma-associated h
gacgccacugcu

SEQ ID NO: 4004249 - RNA, 21 nt, Human herpesvirus 8 [Kaposi`s sarcoma-associated h
gacgcggccauccgcgagcca

SEQ ID NO: 4004250 - RNA, 16 nt, Human herpesvirus 8 [Kaposi`s sarcoma-associated h
gacuacgcucaccauc

SEQ ID NO: 4004251 - RNA, 17 nt, Human herpesvirus 8 [Kaposi`s sarcoma-associated h
gacugccacggccgccu

SEQ ID NO: 4004252 - RNA, 14 nt, Human herpesvirus 8 [Kaposi`s sarcoma-associated h
gagaccucuguggc

SEQ ID NO: 4004253 - RNA, 17 nt, Human herpesvirus 8 [Kaposi`s sarcoma-associated h
gagacgcgcaaaggggg

SEQ ID NO: 4004254 - RNA, 13 nt, Human herpesvirus 8 [Kaposi`s sarcoma-associated h
gagauagccacau

SEQ ID NO: 4004255 - RNA, 15 nt, Human herpesvirus 8 [Kaposi`s sarcoma-associated h
gagauggagaccccg

SEQ ID NO: 4004256 - RNA, 19 nt, Human herpesvirus 8 [Kaposi`s sarcoma-associated h
gagcaagacgccagacagc

SEQ ID NO: 4004257 - RNA, 13 nt, Human herpesvirus 8 [Kaposi`s sarcoma-associated h
gagccggcccuga

SEQ ID NO: 4004258 - RNA, 23 nt, Human herpesvirus 8 [Kaposi`s sarcoma-associated h
gagcguuucgugaaacgugccug

SEQ ID NO: 4004259 - RNA, 14 nt, Human herpesvirus 8 [Kaposi`s sarcoma-associated h
gagcucugcugccu

SEQ ID NO: 4004260 - RNA, 19 nt, Human herpesvirus 8 [Kaposi`s sarcoma-associated h
gagcugucccaccagagcg

SEQ ID NO: 4004261 - RNA, 20 nt, Human herpesvirus 8 [Kaposi`s sarcoma-associated h
gagggcauacccguggcuca

SEQ ID NO: 4004262 - RNA, 16 nt, Human herpesvirus 8 [Kaposi`s sarcoma-associated h
gaggggguggugcgag

SEQ ID NO: 4004263 - RNA, 18 nt, Human herpesvirus 8 [Kaposi`s sarcoma-associated h
gaggguggacagugccug

SEQ ID NO: 4004264 - RNA, 13 nt, Human herpesvirus 8 [Kaposi`s sarcoma-associated h
gagguuugaggcg

SEQ ID NO: 4004265 - RNA, 16 nt, Human herpesvirus 8 [Kaposi`s sarcoma-associated h
gaguauaucaggggaa

SEQ ID NO: 4004266 - RNA, 12 nt, Human herpesvirus 8 [Kaposi`s sarcoma-associated h
gagucaggcgug

SEQ ID NO: 4004267 - RNA, 19 nt, Human herpesvirus 8 [Kaposi`s sarcoma-associated h
gagucgccgguagcugccu

SEQ ID NO: 4004268 - RNA, 17 nt, Human herpesvirus 8 [Kaposi`s sarcoma-associated h
gagucuuucuagcagag

SEQ ID NO: 4004269 - RNA, 23 nt, Human herpesvirus 8 [Kaposi`s sarcoma-associated h
gagugucuucccguacuggggga

SEQ ID NO: 4004270 - RNA, 15 nt, Human herpesvirus 8 [Kaposi`s sarcoma-associated h
gauacacuacuuaug

SEQ ID NO: 4004271 - RNA, 16 nt, Human herpesvirus 8 [Kaposi`s sarcoma-associated h
gaucacggagccggcc

SEQ ID NO: 4004272 - RNA, 17 nt, Human herpesvirus 8 [Kaposi`s sarcoma-associated h
gauccaggagcgacugg

SEQ ID NO: 4004273 - RNA, 15 nt, Human herpesvirus 8 [Kaposi`s sarcoma-associated h
gauccgcaaugucag

SEQ ID NO: 4004274 - RNA, 20 nt, Human herpesvirus 8 [Kaposi`s sarcoma-associated h
gauuagccugcagugugggg

SEQ ID NO: 4004275 - RNA, 17 nt, Human herpesvirus 8 [Kaposi`s sarcoma-associated h
gauuccuccgcacagac

SEQ ID NO: 4004276 - RNA, 20 nt, Human herpesvirus 8 [Kaposi`s sarcoma-associated h
gauuuacgguggugugccug

SEQ ID NO: 4004277 - RNA, 17 nt, Human herpesvirus 8 [Kaposi`s sarcoma-associated h
gauuugauacagggaca

SEQ ID NO: 4004278 - RNA, 20 nt, Human herpesvirus 8 [Kaposi`s sarcoma-associated h
gauuuugauaugugugccca

SEQ ID NO: 4004279 - RNA, 20 nt, Human herpesvirus 8 [Kaposi`s sarcoma-associated h
gcaaaauacauuuuaugagg

SEQ ID NO: 4004280 - RNA, 17 nt, Human herpesvirus 8 [Kaposi`s sarcoma-associated h
gcaaccugcugcagcug

SEQ ID NO: 4004281 - RNA, 15 nt, Human herpesvirus 8 [Kaposi`s sarcoma-associated h
gcaacugaccauguu

SEQ ID NO: 4004282 - RNA, 21 nt, Human herpesvirus 8 [Kaposi`s sarcoma-associated h
gcaagccgggugaggccaaug

SEQ ID NO: 4004283 - RNA, 19 nt, Human herpesvirus 8 [Kaposi`s sarcoma-associated h
gcaccacggauggaauccg

SEQ ID NO: 4004284 - RNA, 14 nt, Human herpesvirus 8 [Kaposi`s sarcoma-associated h
gcaccgcaagcagc

SEQ ID NO: 4004285 - RNA, 23 nt, Human herpesvirus 8 [Kaposi`s sarcoma-associated h
gcacgugaaaucucgccuguccu

SEQ ID NO: 4004286 - RNA, 16 nt, Human herpesvirus 8 [Kaposi`s sarcoma-associated h
gcacuccuguuagcac

SEQ ID NO: 4004287 - RNA, 23 nt, Human herpesvirus 8 [Kaposi`s sarcoma-associated h
gcagaagaccgcguccuccaccc

SEQ ID NO: 4004288 - RNA, 18 nt, Human herpesvirus 8 [Kaposi`s sarcoma-associated h
gcagacgugcccagacac

SEQ ID NO: 4004289 - RNA, 13 nt, Human herpesvirus 8 [Kaposi`s sarcoma-associated h
gcaguggacacag

SEQ ID NO: 4004290 - RNA, 18 nt, Human herpesvirus 8 [Kaposi`s sarcoma-associated h
gcauccuaucgcacagac

SEQ ID NO: 4004291 - RNA, 18 nt, Human herpesvirus 8 [Kaposi`s sarcoma-associated h
gcaugugucugugcccug

SEQ ID NO: 4004292 - RNA, 13 nt, Human herpesvirus 8 [Kaposi`s sarcoma-associated h
gcauuaaagcacu

SEQ ID NO: 4004293 - RNA, 15 nt, Human herpesvirus 8 [Kaposi`s sarcoma-associated h
gccaagcuacuggcc

SEQ ID NO: 4004294 - RNA, 19 nt, Human herpesvirus 8 [Kaposi`s sarcoma-associated h
gccaauaaugcaaugcuuc

SEQ ID NO: 4004295 - RNA, 17 nt, Human herpesvirus 8 [Kaposi`s sarcoma-associated h
gccacgguggcccugcc

SEQ ID NO: 4004296 - RNA, 20 nt, Human herpesvirus 8 [Kaposi`s sarcoma-associated h
gccaggacccguaccacaag

SEQ ID NO: 4004297 - RNA, 17 nt, Human herpesvirus 8 [Kaposi`s sarcoma-associated h
gccaggcaccuguugga

SEQ ID NO: 4004298 - RNA, 15 nt, Human herpesvirus 8 [Kaposi`s sarcoma-associated h
gccaugaaagguggu

SEQ ID NO: 4004299 - RNA, 19 nt, Human herpesvirus 8 [Kaposi`s sarcoma-associated h
gccauggcagcccagccuc

SEQ ID NO: 4004300 - RNA, 13 nt, Human herpesvirus 8 [Kaposi`s sarcoma-associated h
gccauucgcacca

SEQ ID NO: 4004301 - RNA, 17 nt, Human herpesvirus 8 [Kaposi`s sarcoma-associated h
gcccgggggccaggacu

SEQ ID NO: 4004302 - RNA, 14 nt, Human herpesvirus 8 [Kaposi`s sarcoma-associated h
gcccuccugggcca

SEQ ID NO: 4004303 - RNA, 17 nt, Human herpesvirus 8 [Kaposi`s sarcoma-associated h
gcccuccugggccaggc

SEQ ID NO: 4004304 - RNA, 24 nt, Human herpesvirus 8 [Kaposi`s sarcoma-associated h
gccucacggacaacgccaugcagc

SEQ ID NO: 4004305 - RNA, 22 nt, Human herpesvirus 8 [Kaposi`s sarcoma-associated h
gccucccguucccaugaugcag

SEQ ID NO: 4004306 - RNA, 17 nt, Human herpesvirus 8 [Kaposi`s sarcoma-associated h
gccucgagggcggccag

SEQ ID NO: 4004307 - RNA, 13 nt, Human herpesvirus 8 [Kaposi`s sarcoma-associated h
gccucugaagcac

SEQ ID NO: 4004308 - RNA, 18 nt, Human herpesvirus 8 [Kaposi`s sarcoma-associated h
gccucugaagcaccacau

SEQ ID NO: 4004309 - RNA, 18 nt, Human herpesvirus 8 [Kaposi`s sarcoma-associated h
gccugcguuaacuuccca

SEQ ID NO: 4004310 - RNA, 15 nt, Human herpesvirus 8 [Kaposi`s sarcoma-associated h
gccuugggugcgaug

SEQ ID NO: 4004311 - RNA, 19 nt, Human herpesvirus 8 [Kaposi`s sarcoma-associated h
gcgacggaaguuggccucc

SEQ ID NO: 4004312 - RNA, 13 nt, Human herpesvirus 8 [Kaposi`s sarcoma-associated h
gcgacugcuggcu

SEQ ID NO: 4004313 - RNA, 22 nt, Human herpesvirus 8 [Kaposi`s sarcoma-associated h
gcgagaauggcgugccagugga

SEQ ID NO: 4004314 - RNA, 13 nt, Human herpesvirus 8 [Kaposi`s sarcoma-associated h
gcgcacccagcgu

SEQ ID NO: 4004315 - RNA, 20 nt, Human herpesvirus 8 [Kaposi`s sarcoma-associated h
gcgccucgcagacgaccccc

SEQ ID NO: 4004316 - RNA, 21 nt, Human herpesvirus 8 [Kaposi`s sarcoma-associated h
gcgcuguacagugccugcagu

SEQ ID NO: 4004317 - RNA, 19 nt, Human herpesvirus 8 [Kaposi`s sarcoma-associated h
gcggaagauugguguccag

SEQ ID NO: 4004318 - RNA, 14 nt, Human herpesvirus 8 [Kaposi`s sarcoma-associated h
uggacguggccagc

SEQ ID NO: 4004319 - RNA, 23 nt, Human herpesvirus 8 [Kaposi`s sarcoma-associated h
uggcacacgguuacuagcaccac

SEQ ID NO: 4004320 - RNA, 15 nt, Human herpesvirus 8 [Kaposi`s sarcoma-associated h
uggcagcccagccuc

SEQ ID NO: 4004321 - RNA, 19 nt, Human herpesvirus 8 [Kaposi`s sarcoma-associated h
uggcagcuuggugaagcag

SEQ ID NO: 4004322 - RNA, 20 nt, Human herpesvirus 8 [Kaposi`s sarcoma-associated h
uggcauuauaaacccauccc

SEQ ID NO: 4004323 - RNA, 18 nt, Human herpesvirus 8 [Kaposi`s sarcoma-associated h
uggccaaacucacugagu

SEQ ID NO: 4004324 - RNA, 19 nt, Human herpesvirus 8 [Kaposi`s sarcoma-associated h
uggccauucgcaccaggac

SEQ ID NO: 4004325 - RNA, 13 nt, Human herpesvirus 8 [Kaposi`s sarcoma-associated h
uggccgcauuugg

SEQ ID NO: 4004326 - RNA, 22 nt, Human herpesvirus 8 [Kaposi`s sarcoma-associated h
uggcgcggaaacugggcacgga

SEQ ID NO: 4004327 - RNA, 18 nt, Human herpesvirus 8 [Kaposi`s sarcoma-associated h
uggcucacggacuuuauu

SEQ ID NO: 4004328 - RNA, 14 nt, Human herpesvirus 8 [Kaposi`s sarcoma-associated h
uggcuguuacaaua

SEQ ID NO: 4004329 - RNA, 15 nt, Human herpesvirus 8 [Kaposi`s sarcoma-associated h
ugggaucgaacagaa

SEQ ID NO: 4004330 - RNA, 16 nt, Human herpesvirus 8 [Kaposi`s sarcoma-associated h
uggggggaggaggaaa

SEQ ID NO: 4004331 - RNA, 19 nt, Human herpesvirus 8 [Kaposi`s sarcoma-associated h
uggguuguggugacgcugu

SEQ ID NO: 4004332 - RNA, 18 nt, Human herpesvirus 8 [Kaposi`s sarcoma-associated h
uguacauggagggaaugg

SEQ ID NO: 4004333 - RNA, 19 nt, Human herpesvirus 8 [Kaposi`s sarcoma-associated h
uguccucgcccaacuuugu

SEQ ID NO: 4004334 - RNA, 17 nt, Human herpesvirus 8 [Kaposi`s sarcoma-associated h
ugucugaaacgggacau

SEQ ID NO: 4004335 - RNA, 14 nt, Human herpesvirus 8 [Kaposi`s sarcoma-associated h
ugugaaguuuacau

SEQ ID NO: 4004336 - RNA, 20 nt, Human herpesvirus 8 [Kaposi`s sarcoma-associated h
ugugacaaucuggaugugua

SEQ ID NO: 4004337 - RNA, 21 nt, Human herpesvirus 8 [Kaposi`s sarcoma-associated h
ugugagggacguuugcagaua

SEQ ID NO: 4004338 - RNA, 23 nt, Human herpesvirus 8 [Kaposi`s sarcoma-associated h
ugugcuguccagcguggggacag

SEQ ID NO: 4004339 - RNA, 21 nt, Human herpesvirus 8 [Kaposi`s sarcoma-associated h
ugugguuaagcuuugcagcca

SEQ ID NO: 4004340 - RNA, 21 nt, Human herpesvirus 8 [Kaposi`s sarcoma-associated h
uguucuuaauugcccaucauu

SEQ ID NO: 4004341 - RNA, 15 nt, Human herpesvirus 8 [Kaposi`s sarcoma-associated h
uguuuauaacaauga

SEQ ID NO: 4004342 - RNA, 11 nt, Human herpesvirus 8 [Kaposi`s sarcoma-associated h
uguuuccugca

SEQ ID NO: 4004343 - RNA, 14 nt, Human herpesvirus 8 [Kaposi`s sarcoma-associated h
uuaaaugaacauug

SEQ ID NO: 4004344 - RNA, 19 nt, Human herpesvirus 8 [Kaposi`s sarcoma-associated h
uuaacaguggaugaccaac

SEQ ID NO: 4004345 - RNA, 13 nt, Human herpesvirus 8 [Kaposi`s sarcoma-associated h
uuacauggaauac

SEQ ID NO: 4004346 - RNA, 22 nt, Human herpesvirus 8 [Kaposi`s sarcoma-associated h
uuaccaguauagugguuuacau

SEQ ID NO: 4004347 - RNA, 22 nt, Human herpesvirus 8 [Kaposi`s sarcoma-associated h
uuaccugcacuccaagccaguc

SEQ ID NO: 4004348 - RNA, 17 nt, Human herpesvirus 8 [Kaposi`s sarcoma-associated h
uuacgguggugugccug

SEQ ID NO: 4004349 - RNA, 21 nt, Human herpesvirus 8 [Kaposi`s sarcoma-associated h
uuacuugcaaaauugugugua

SEQ ID NO: 4004350 - RNA, 12 nt, Human herpesvirus 8 [Kaposi`s sarcoma-associated h
uuaugucaguuc

SEQ ID NO: 4004351 - RNA, 18 nt, Human herpesvirus 8 [Kaposi`s sarcoma-associated h
uucaaaacguauguuuau

SEQ ID NO: 4004352 - RNA, 19 nt, Human herpesvirus 8 [Kaposi`s sarcoma-associated h
uucauaccgggucugugcg

SEQ ID NO: 4004353 - RNA, 14 nt, Human herpesvirus 8 [Kaposi`s sarcoma-associated h
uucauuuguguaua

SEQ ID NO: 4004354 - RNA, 21 nt, Human herpesvirus 8 [Kaposi`s sarcoma-associated h
uucccuccugcauuuggacac

SEQ ID NO: 4004355 - RNA, 16 nt, Human herpesvirus 8 [Kaposi`s sarcoma-associated h
uuccggguauuggaga

SEQ ID NO: 4004356 - RNA, 17 nt, Human herpesvirus 8 [Kaposi`s sarcoma-associated h
uuccuccguugucgacu

SEQ ID NO: 4004357 - RNA, 19 nt, Human herpesvirus 8 [Kaposi`s sarcoma-associated h
uugaggaagaucuaagccu

SEQ ID NO: 4004358 - RNA, 22 nt, Human herpesvirus 8 [Kaposi`s sarcoma-associated h
uugcacucagaacauaaaacga

SEQ ID NO: 4004359 - RNA, 21 nt, Human herpesvirus 8 [Kaposi`s sarcoma-associated h
uuggacuagagcgacugcugg

SEQ ID NO: 4004360 - RNA, 20 nt, Human herpesvirus 8 [Kaposi`s sarcoma-associated h
uuggaugcucugcgugcugg

SEQ ID NO: 4004361 - RNA, 16 nt, Human herpesvirus 8 [Kaposi`s sarcoma-associated h
uugggaauggccgaac

SEQ ID NO: 4004362 - RNA, 19 nt, Human herpesvirus 8 [Kaposi`s sarcoma-associated h
uuggguugggaggugaccc

SEQ ID NO: 4004363 - RNA, 19 nt, Human herpesvirus 8 [Kaposi`s sarcoma-associated h
uuguggcaccugaggugcu

SEQ ID NO: 4004364 - RNA, 21 nt, Human herpesvirus 8 [Kaposi`s sarcoma-associated h
uuucagacguccaguuccccc

SEQ ID NO: 4004365 - RNA, 20 nt, Human herpesvirus 8 [Kaposi`s sarcoma-associated h
uuugaaggcgaauaaaacag

SEQ ID NO: 4004366 - RNA, 16 nt, Human herpesvirus 8 [Kaposi`s sarcoma-associated h
uuugggcaaaacacau

SEQ ID NO: 4004367 - RNA, 19 nt, Human herpesvirus 8 [Kaposi`s sarcoma-associated h
ccacaugauuugauacagg

SEQ ID NO: 4004368 - RNA, 18 nt, Human herpesvirus 8 [Kaposi`s sarcoma-associated h
ccacccuaauacauaaca

SEQ ID NO: 4004369 - RNA, 21 nt, Human herpesvirus 8 [Kaposi`s sarcoma-associated h
ccacccuauuggucacaucuc

SEQ ID NO: 4004370 - RNA, 21 nt, Human herpesvirus 8 [Kaposi`s sarcoma-associated h
ccaccggcaggcagccaagaa

SEQ ID NO: 4004371 - RNA, 21 nt, Human herpesvirus 8 [Kaposi`s sarcoma-associated h
ccaccuacacccgguucagcc

SEQ ID NO: 4004372 - RNA, 19 nt, Human herpesvirus 8 [Kaposi`s sarcoma-associated h
ccacgcccgggggccagga

SEQ ID NO: 4004373 - RNA, 20 nt, Human herpesvirus 8 [Kaposi`s sarcoma-associated h
ccacgcccgggggccaggac

SEQ ID NO: 4004374 - RNA, 23 nt, Human herpesvirus 8 [Kaposi`s sarcoma-associated h
ccacggugucguguaugccaaua

SEQ ID NO: 4004375 - RNA, 18 nt, Human herpesvirus 8 [Kaposi`s sarcoma-associated h
ccacuuugcccuaaaugu

SEQ ID NO: 4004376 - RNA, 14 nt, Human herpesvirus 8 [Kaposi`s sarcoma-associated h
ccagaagagcauuu

SEQ ID NO: 4004377 - RNA, 15 nt, Human herpesvirus 8 [Kaposi`s sarcoma-associated h
ccagacugguccaag

SEQ ID NO: 4004378 - RNA, 16 nt, Human herpesvirus 8 [Kaposi`s sarcoma-associated h
ccagaucacccagugu

SEQ ID NO: 4004379 - RNA, 16 nt, Human herpesvirus 8 [Kaposi`s sarcoma-associated h
ccagcaauaaacccac

SEQ ID NO: 4004380 - RNA, 23 nt, Human herpesvirus 8 [Kaposi`s sarcoma-associated h
ccagcaauaaacccacagcccau

SEQ ID NO: 4004381 - RNA, 13 nt, Human herpesvirus 8 [Kaposi`s sarcoma-associated h
ccagcaugccugc

SEQ ID NO: 4004382 - RNA, 15 nt, Human herpesvirus 8 [Kaposi`s sarcoma-associated h
ccagcgucggccaga

SEQ ID NO: 4004383 - RNA, 17 nt, Human herpesvirus 8 [Kaposi`s sarcoma-associated h
ccaggaugcggguuggg

SEQ ID NO: 4004384 - RNA, 14 nt, Human herpesvirus 8 [Kaposi`s sarcoma-associated h
ccagugccucagca

SEQ ID NO: 4004385 - RNA, 16 nt, Human herpesvirus 8 [Kaposi`s sarcoma-associated h
ccaguucccccacacc

SEQ ID NO: 4004386 - RNA, 22 nt, Human herpesvirus 8 [Kaposi`s sarcoma-associated h
ccaugguuauuggccaggacaa

SEQ ID NO: 4004387 - RNA, 15 nt, Human herpesvirus 8 [Kaposi`s sarcoma-associated h
ccauguucagguggu

SEQ ID NO: 4004388 - RNA, 21 nt, Human herpesvirus 8 [Kaposi`s sarcoma-associated h
cccacacauuugucuuuauug

SEQ ID NO: 4004389 - RNA, 16 nt, Human herpesvirus 8 [Kaposi`s sarcoma-associated h
cccaggccgccgacca

SEQ ID NO: 4004390 - RNA, 15 nt, Human herpesvirus 8 [Kaposi`s sarcoma-associated h
cccagugccucagca

SEQ ID NO: 4004391 - RNA, 23 nt, Human herpesvirus 8 [Kaposi`s sarcoma-associated h
cccaguuaaccggcuuguacagu

SEQ ID NO: 4004392 - RNA, 13 nt, Human herpesvirus 8 [Kaposi`s sarcoma-associated h
ccccuucuucugg

SEQ ID NO: 4004393 - RNA, 18 nt, Human herpesvirus 8 [Kaposi`s sarcoma-associated h
cccgacaaccggcugggg

SEQ ID NO: 4004394 - RNA, 14 nt, Human herpesvirus 8 [Kaposi`s sarcoma-associated h
cccgcccggggcgc

SEQ ID NO: 4004395 - RNA, 16 nt, Human herpesvirus 8 [Kaposi`s sarcoma-associated h
cccgugcccaggccgc

SEQ ID NO: 4004396 - RNA, 21 nt, Human herpesvirus 8 [Kaposi`s sarcoma-associated h
cccuggauggguuaacagugg

SEQ ID NO: 4004397 - RNA, 10 nt, Human herpesvirus 8 [Kaposi`s sarcoma-associated h
ccgcaucucu

SEQ ID NO: 4004398 - RNA, 16 nt, Human herpesvirus 8 [Kaposi`s sarcoma-associated h
ccgcccccuggugcuc

SEQ ID NO: 4004399 - RNA, 20 nt, Human herpesvirus 8 [Kaposi`s sarcoma-associated h
ccggaugcgggcgauuacag

SEQ ID NO: 4004400 - RNA, 17 nt, Human herpesvirus 8 [Kaposi`s sarcoma-associated h
ccgggccuucgcacccc

SEQ ID NO: 4004401 - RNA, 16 nt, Human herpesvirus 8 [Kaposi`s sarcoma-associated h
ccgguagcugccuggu

SEQ ID NO: 4004402 - RNA, 12 nt, Human herpesvirus 8 [Kaposi`s sarcoma-associated h
ccgucgcacccg

SEQ ID NO: 4004403 - RNA, 16 nt, Human herpesvirus 8 [Kaposi`s sarcoma-associated h
ccgucuccgccaggga

SEQ ID NO: 4004404 - RNA, 22 nt, Human herpesvirus 8 [Kaposi`s sarcoma-associated h
ccgucugugaagucucccugcg

SEQ ID NO: 4004405 - RNA, 21 nt, Human herpesvirus 8 [Kaposi`s sarcoma-associated h
ccucagugugcuguccagcgu

SEQ ID NO: 4004406 - RNA, 16 nt, Human herpesvirus 8 [Kaposi`s sarcoma-associated h
ccuccacccaccaagc

SEQ ID NO: 4004407 - RNA, 15 nt, Human herpesvirus 8 [Kaposi`s sarcoma-associated h
ccuccagcaaagcac

SEQ ID NO: 4004408 - RNA, 17 nt, Human herpesvirus 8 [Kaposi`s sarcoma-associated h
ccugccaaaugcccaga

SEQ ID NO: 4004409 - RNA, 23 nt, Human herpesvirus 8 [Kaposi`s sarcoma-associated h
ccugccaaaugcccagaaugaag

SEQ ID NO: 4004410 - RNA, 12 nt, Human herpesvirus 8 [Kaposi`s sarcoma-associated h
ccugcugucuau

SEQ ID NO: 4004411 - RNA, 22 nt, Human herpesvirus 8 [Kaposi`s sarcoma-associated h
ccuggauggguuaacaguggau

SEQ ID NO: 4004412 - RNA, 13 nt, Human herpesvirus 8 [Kaposi`s sarcoma-associated h
ccuuccucagcga

SEQ ID NO: 4004413 - RNA, 15 nt, Human herpesvirus 8 [Kaposi`s sarcoma-associated h
cgaacaucgccgugg

SEQ ID NO: 4004414 - RNA, 16 nt, Human herpesvirus 8 [Kaposi`s sarcoma-associated h
cgacagagccagccug

SEQ ID NO: 4004415 - RNA, 20 nt, Human herpesvirus 8 [Kaposi`s sarcoma-associated h
cgagaaagucgcccacggaa

SEQ ID NO: 4004416 - RNA, 22 nt, Human herpesvirus 8 [Kaposi`s sarcoma-associated h
cgauagggggaugagccagaau

SEQ ID NO: 4004417 - RNA, 11 nt, Human herpesvirus 8 [Kaposi`s sarcoma-associated h
cgauguccuga

SEQ ID NO: 4004418 - RNA, 19 nt, Human herpesvirus 8 [Kaposi`s sarcoma-associated h
cgauuucacugucacuuuc

SEQ ID NO: 4004419 - RNA, 13 nt, Human herpesvirus 8 [Kaposi`s sarcoma-associated h
cgcaagcacuuuu

SEQ ID NO: 4004420 - RNA, 19 nt, Human herpesvirus 8 [Kaposi`s sarcoma-associated h
cgcacccggccgcugcguc

SEQ ID NO: 4004421 - RNA, 14 nt, Human herpesvirus 8 [Kaposi`s sarcoma-associated h
cgcagaacaguacc

SEQ ID NO: 4004422 - RNA, 19 nt, Human herpesvirus 8 [Kaposi`s sarcoma-associated h
cgcaggagucagagcagug

SEQ ID NO: 4004423 - RNA, 20 nt, Human herpesvirus 8 [Kaposi`s sarcoma-associated h
cgccaacuguccccucggag

SEQ ID NO: 4004424 - RNA, 15 nt, Human herpesvirus 8 [Kaposi`s sarcoma-associated h
gauagacauggacau

SEQ ID NO: 4004425 - RNA, 19 nt, Human herpesvirus 8 [Kaposi`s sarcoma-associated h
gaucacgcccgugugcaug

SEQ ID NO: 4004426 - RNA, 13 nt, Human herpesvirus 8 [Kaposi`s sarcoma-associated h
gaucacggagccg

SEQ ID NO: 4004427 - RNA, 19 nt, Human herpesvirus 8 [Kaposi`s sarcoma-associated h
gauccaacccagcaugccu

SEQ ID NO: 4004428 - RNA, 14 nt, Human herpesvirus 8 [Kaposi`s sarcoma-associated h
gauccggagggaag

SEQ ID NO: 4004429 - RNA, 22 nt, Human herpesvirus 8 [Kaposi`s sarcoma-associated h
gaucuauuauuugucgcgccag

SEQ ID NO: 4004430 - RNA, 17 nt, Human herpesvirus 8 [Kaposi`s sarcoma-associated h
gaucucuggagacggcc

SEQ ID NO: 4004431 - RNA, 21 nt, Human herpesvirus 8 [Kaposi`s sarcoma-associated h
gaugccaguagcaugcugaug

SEQ ID NO: 4004432 - RNA, 16 nt, Human herpesvirus 8 [Kaposi`s sarcoma-associated h
gaugccgcgcuugggu

SEQ ID NO: 4004433 - RNA, 23 nt, Human herpesvirus 8 [Kaposi`s sarcoma-associated h
gauggguuaacaguggaugacca

SEQ ID NO: 4004434 - RNA, 10 nt, Human herpesvirus 8 [Kaposi`s sarcoma-associated h
gauuaagcaa

SEQ ID NO: 4004435 - RNA, 22 nt, Human herpesvirus 8 [Kaposi`s sarcoma-associated h
gauuuccuuucugagccucuca

SEQ ID NO: 4004436 - RNA, 14 nt, Human herpesvirus 8 [Kaposi`s sarcoma-associated h
gauuuuccagggac

SEQ ID NO: 4004437 - RNA, 16 nt, Human herpesvirus 8 [Kaposi`s sarcoma-associated h
gauuuuccagggacau

SEQ ID NO: 4004438 - RNA, 16 nt, Human herpesvirus 8 [Kaposi`s sarcoma-associated h
gcaaacuauacacaaa

SEQ ID NO: 4004439 - RNA, 19 nt, Human herpesvirus 8 [Kaposi`s sarcoma-associated h
gcaaggagcagccugcagg

SEQ ID NO: 4004440 - RNA, 22 nt, Human herpesvirus 8 [Kaposi`s sarcoma-associated h
gcacaagcgcugacgaaagcua

SEQ ID NO: 4004441 - RNA, 22 nt, Human herpesvirus 8 [Kaposi`s sarcoma-associated h
gcaccaagguaggccagcugcg

SEQ ID NO: 4004442 - RNA, 13 nt, Human herpesvirus 8 [Kaposi`s sarcoma-associated h
gcaccgcaagcag

SEQ ID NO: 4004443 - RNA, 13 nt, Human herpesvirus 8 [Kaposi`s sarcoma-associated h
gcaccuggacccc

SEQ ID NO: 4004444 - RNA, 16 nt, Human herpesvirus 8 [Kaposi`s sarcoma-associated h
gcaggagucagagcag

SEQ ID NO: 4004445 - RNA, 21 nt, Human herpesvirus 8 [Kaposi`s sarcoma-associated h
gcagggugcggugcugcccag

SEQ ID NO: 4004446 - RNA, 21 nt, Human herpesvirus 8 [Kaposi`s sarcoma-associated h
gcaguguuugcugcuguaguu

SEQ ID NO: 4004447 - RNA, 16 nt, Human herpesvirus 8 [Kaposi`s sarcoma-associated h
gcauaccacgugugug

SEQ ID NO: 4004448 - RNA, 20 nt, Human herpesvirus 8 [Kaposi`s sarcoma-associated h
gccaccagguggcacccaac

SEQ ID NO: 4004449 - RNA, 23 nt, Human herpesvirus 8 [Kaposi`s sarcoma-associated h
gccaggaacacgcgaaugcagca

SEQ ID NO: 4004450 - RNA, 16 nt, Human herpesvirus 8 [Kaposi`s sarcoma-associated h
gccaggaaguucaaug

SEQ ID NO: 4004451 - RNA, 18 nt, Human herpesvirus 8 [Kaposi`s sarcoma-associated h
gccauucgcaccaggacg

SEQ ID NO: 4004452 - RNA, 21 nt, Human herpesvirus 8 [Kaposi`s sarcoma-associated h
gcccaacucugcaagcuguug

SEQ ID NO: 4004453 - RNA, 14 nt, Human herpesvirus 8 [Kaposi`s sarcoma-associated h
gcccaggggcagac

SEQ ID NO: 4004454 - RNA, 18 nt, Human herpesvirus 8 [Kaposi`s sarcoma-associated h
gcccuccugggccaggca

SEQ ID NO: 4004455 - RNA, 18 nt, Human herpesvirus 8 [Kaposi`s sarcoma-associated h
gcccucuucuguugccag

SEQ ID NO: 4004456 - RNA, 19 nt, Human herpesvirus 8 [Kaposi`s sarcoma-associated h
gccgagccacaaaguacau

SEQ ID NO: 4004457 - RNA, 20 nt, Human herpesvirus 8 [Kaposi`s sarcoma-associated h
gccgcaaucaugccugugga

SEQ ID NO: 4004458 - RNA, 15 nt, Human herpesvirus 8 [Kaposi`s sarcoma-associated h
gccgguugguggugu

SEQ ID NO: 4004459 - RNA, 18 nt, Human herpesvirus 8 [Kaposi`s sarcoma-associated h
gccgucagggcccacggu

SEQ ID NO: 4004460 - RNA, 15 nt, Human herpesvirus 8 [Kaposi`s sarcoma-associated h
gccguucccaugagc

SEQ ID NO: 4004461 - RNA, 21 nt, Human herpesvirus 8 [Kaposi`s sarcoma-associated h
gccuaucaaucugagaaaagu

SEQ ID NO: 4004462 - RNA, 18 nt, Human herpesvirus 8 [Kaposi`s sarcoma-associated h
gccucccaacauguaaau

SEQ ID NO: 4004463 - RNA, 19 nt, Human herpesvirus 8 [Kaposi`s sarcoma-associated h
gccucugaagcaccacaua

SEQ ID NO: 4004464 - RNA, 20 nt, Human herpesvirus 8 [Kaposi`s sarcoma-associated h
gccugcguuaacuucccagg

SEQ ID NO: 4004465 - RNA, 13 nt, Human herpesvirus 8 [Kaposi`s sarcoma-associated h
gccugguggagca

SEQ ID NO: 4004466 - RNA, 22 nt, Human herpesvirus 8 [Kaposi`s sarcoma-associated h
gccuucgcaaguuuaucucaga

SEQ ID NO: 4004467 - RNA, 22 nt, Human herpesvirus 8 [Kaposi`s sarcoma-associated h
gcgaauucgcgugguccuggau

SEQ ID NO: 4004468 - RNA, 14 nt, Human herpesvirus 8 [Kaposi`s sarcoma-associated h
gcgacaugcugaug

SEQ ID NO: 4004469 - RNA, 19 nt, Human herpesvirus 8 [Kaposi`s sarcoma-associated h
gcgcaggagucagagcagu

SEQ ID NO: 4004470 - RNA, 23 nt, Human herpesvirus 8 [Kaposi`s sarcoma-associated h
gcgccacucccaccauguugaag

SEQ ID NO: 4004471 - RNA, 21 nt, Human herpesvirus 8 [Kaposi`s sarcoma-associated h
gcgccauuuuuguggcugccu

SEQ ID NO: 4004472 - RNA, 18 nt, Human herpesvirus 8 [Kaposi`s sarcoma-associated h
gcgcuguaugacugcccu

SEQ ID NO: 4004473 - RNA, 11 nt, Human herpesvirus 8 [Kaposi`s sarcoma-associated h
gcgcugugcuu

SEQ ID NO: 4004474 - RNA, 20 nt, Human herpesvirus 8 [Kaposi`s sarcoma-associated h
gcggaggcccgagaaacacu

SEQ ID NO: 4004475 - RNA, 16 nt, Human herpesvirus 8 [Kaposi`s sarcoma-associated h
gcggagggcuguucuc

SEQ ID NO: 4004476 - RNA, 18 nt, Human herpesvirus 8 [Kaposi`s sarcoma-associated h
gcggcuaagaauccccuu

SEQ ID NO: 4004477 - RNA, 14 nt, Human herpesvirus 8 [Kaposi`s sarcoma-associated h
cgucuaccugccgg

SEQ ID NO: 4004478 - RNA, 18 nt, Human herpesvirus 8 [Kaposi`s sarcoma-associated h
cgugaaugggggcagugc

SEQ ID NO: 4004479 - RNA, 21 nt, Human herpesvirus 8 [Kaposi`s sarcoma-associated h
cgugccuucgaggccaggccc

SEQ ID NO: 4004480 - RNA, 13 nt, Human herpesvirus 8 [Kaposi`s sarcoma-associated h
cuacccugccacu

SEQ ID NO: 4004481 - RNA, 14 nt, Human herpesvirus 8 [Kaposi`s sarcoma-associated h
cuacccugccacuc

SEQ ID NO: 4004482 - RNA, 12 nt, Human herpesvirus 8 [Kaposi`s sarcoma-associated h
cuaccugcaaac

SEQ ID NO: 4004483 - RNA, 18 nt, Human herpesvirus 8 [Kaposi`s sarcoma-associated h
cuagaauuggagcacuuu

SEQ ID NO: 4004484 - RNA, 16 nt, Human herpesvirus 8 [Kaposi`s sarcoma-associated h
cuagacacgcaaagua

SEQ ID NO: 4004485 - RNA, 16 nt, Human herpesvirus 8 [Kaposi`s sarcoma-associated h
cuagacuggcucugau

SEQ ID NO: 4004486 - RNA, 19 nt, Human herpesvirus 8 [Kaposi`s sarcoma-associated h
cuaggaggaagagcacugu

SEQ ID NO: 4004487 - RNA, 18 nt, Human herpesvirus 8 [Kaposi`s sarcoma-associated h
cuaucagcugcagccagg

SEQ ID NO: 4004488 - RNA, 17 nt, Human herpesvirus 8 [Kaposi`s sarcoma-associated h
cuaugacuaggaggaag

SEQ ID NO: 4004489 - RNA, 14 nt, Human herpesvirus 8 [Kaposi`s sarcoma-associated h
cuaugaucagggca

SEQ ID NO: 4004490 - RNA, 17 nt, Human herpesvirus 8 [Kaposi`s sarcoma-associated h
cuauugcaacugaccau

SEQ ID NO: 4004491 - RNA, 19 nt, Human herpesvirus 8 [Kaposi`s sarcoma-associated h
cucaucauuucugaaacag

SEQ ID NO: 4004492 - RNA, 13 nt, Human herpesvirus 8 [Kaposi`s sarcoma-associated h
cucggagacaaga

SEQ ID NO: 4004493 - RNA, 14 nt, Human herpesvirus 8 [Kaposi`s sarcoma-associated h
cucguguguuuucg

SEQ ID NO: 4004494 - RNA, 13 nt, Human herpesvirus 8 [Kaposi`s sarcoma-associated h
cucucacacccug

SEQ ID NO: 4004495 - RNA, 22 nt, Human herpesvirus 8 [Kaposi`s sarcoma-associated h
cucugcggcuuuguuaccuggc

SEQ ID NO: 4004496 - RNA, 24 nt, Human herpesvirus 8 [Kaposi`s sarcoma-associated h
cugaagucccgaugccacuguugu

SEQ ID NO: 4004497 - RNA, 17 nt, Human herpesvirus 8 [Kaposi`s sarcoma-associated h
cugacgacggucgccuc

SEQ ID NO: 4004498 - RNA, 22 nt, Human herpesvirus 8 [Kaposi`s sarcoma-associated h
cugaugaaaucgagugggcgga

SEQ ID NO: 4004499 - RNA, 15 nt, Human herpesvirus 8 [Kaposi`s sarcoma-associated h
cugauuagcacugua

SEQ ID NO: 4004500 - RNA, 12 nt, Human herpesvirus 8 [Kaposi`s sarcoma-associated h
cugcaauguacu

SEQ ID NO: 4004501 - RNA, 21 nt, Human herpesvirus 8 [Kaposi`s sarcoma-associated h
cugccuagaacuaaccacuca

SEQ ID NO: 4004502 - RNA, 19 nt, Human herpesvirus 8 [Kaposi`s sarcoma-associated h
cugccuggacaguauucuc

SEQ ID NO: 4004503 - RNA, 19 nt, Human herpesvirus 8 [Kaposi`s sarcoma-associated h
cugccugucagauuuacaa

SEQ ID NO: 4004504 - RNA, 17 nt, Human herpesvirus 8 [Kaposi`s sarcoma-associated h
cugcgcauuuccugccc

SEQ ID NO: 4004505 - RNA, 21 nt, Human herpesvirus 8 [Kaposi`s sarcoma-associated h
cugcggcgcaaaaacagcugg

SEQ ID NO: 4004506 - RNA, 13 nt, Human herpesvirus 8 [Kaposi`s sarcoma-associated h
cuggcaugcuggg

SEQ ID NO: 4004507 - RNA, 23 nt, Human herpesvirus 8 [Kaposi`s sarcoma-associated h
cugggacuugauaaucuccugga

SEQ ID NO: 4004508 - RNA, 15 nt, Human herpesvirus 8 [Kaposi`s sarcoma-associated h
cuggucgguucacug

SEQ ID NO: 4004509 - RNA, 17 nt, Human herpesvirus 8 [Kaposi`s sarcoma-associated h
cuggucgguucacugcu

SEQ ID NO: 4004510 - RNA, 18 nt, Human herpesvirus 8 [Kaposi`s sarcoma-associated h
cugguucaggauuucgaa

SEQ ID NO: 4004511 - RNA, 16 nt, Human herpesvirus 8 [Kaposi`s sarcoma-associated h
cuguuacaauaaagcu

SEQ ID NO: 4004512 - RNA, 16 nt, Human herpesvirus 8 [Kaposi`s sarcoma-associated h
cuguucucgccuggag

SEQ ID NO: 4004513 - RNA, 18 nt, Human herpesvirus 8 [Kaposi`s sarcoma-associated h
cuuaacgugucugaaugu

SEQ ID NO: 4004514 - RNA, 20 nt, Human herpesvirus 8 [Kaposi`s sarcoma-associated h
cuuaacuguuuacugcuguu

SEQ ID NO: 4004515 - RNA, 20 nt, Human herpesvirus 8 [Kaposi`s sarcoma-associated h
cuuacugucagauuucucua

SEQ ID NO: 4004516 - RNA, 20 nt, Human herpesvirus 8 [Kaposi`s sarcoma-associated h
cuuauugaagcauguugcgc

SEQ ID NO: 4004517 - RNA, 17 nt, Human herpesvirus 8 [Kaposi`s sarcoma-associated h
cuuccauuuuccaaggc

SEQ ID NO: 4004518 - RNA, 16 nt, Human herpesvirus 8 [Kaposi`s sarcoma-associated h
cuucuauaagcaccuu

SEQ ID NO: 4004519 - RNA, 18 nt, Human herpesvirus 8 [Kaposi`s sarcoma-associated h
cuucuugaccaaaaguug

SEQ ID NO: 4004520 - RNA, 15 nt, Human herpesvirus 8 [Kaposi`s sarcoma-associated h
cuugaggauggugcu

SEQ ID NO: 4004521 - RNA, 22 nt, Human herpesvirus 8 [Kaposi`s sarcoma-associated h
cuuggguuggcgagaagcccag

SEQ ID NO: 4004522 - RNA, 17 nt, Human herpesvirus 8 [Kaposi`s sarcoma-associated h
cuugguaacucccucaa

SEQ ID NO: 4004523 - RNA, 13 nt, Human herpesvirus 8 [Kaposi`s sarcoma-associated h
cuuguacaugugu

SEQ ID NO: 4004524 - RNA, 18 nt, Human herpesvirus 8 [Kaposi`s sarcoma-associated h
cuuuaacauugaggaccu

SEQ ID NO: 4004525 - RNA, 21 nt, Human herpesvirus 8 [Kaposi`s sarcoma-associated h
cuuugcagugucuaugucugu

SEQ ID NO: 4004526 - RNA, 19 nt, Human herpesvirus 8 [Kaposi`s sarcoma-associated h
cuuuggacaguuucuggag

SEQ ID NO: 4004527 - RNA, 18 nt, Human herpesvirus 8 [Kaposi`s sarcoma-associated h
gaaaaucuggcaugcugg

SEQ ID NO: 4004528 - RNA, 21 nt, Human herpesvirus 8 [Kaposi`s sarcoma-associated h
gaaagcuucaucguggugccc

SEQ ID NO: 4004529 - RNA, 16 nt, Human herpesvirus 8 [Kaposi`s sarcoma-associated h
gaacagaagacccaga

SEQ ID NO: 4004530 - RNA, 12 nt, Human herpesvirus 8 [Kaposi`s sarcoma-associated h
gaacaugcugga

SEQ ID NO: 4004531 - RNA, 19 nt, Human herpesvirus 8 [Kaposi`s sarcoma-associated h
gaacgccauggcccacggg

SEQ ID NO: 4004532 - RNA, 19 nt, Human herpesvirus 8 [Kaposi`s sarcoma-associated h
gaacuggccgcccuucagu

SEQ ID NO: 4004533 - RNA, 19 nt, Human herpesvirus 8 [Kaposi`s sarcoma-associated h
gaagagaauggagaggaga

SEQ ID NO: 4004534 - RNA, 13 nt, Human herpesvirus 8 [Kaposi`s sarcoma-associated h
gaagagguggccg

SEQ ID NO: 4004535 - RNA, 22 nt, Human herpesvirus 8 [Kaposi`s sarcoma-associated h
gaaucggugacuuuuugugaga

SEQ ID NO: 4004536 - RNA, 13 nt, Human herpesvirus 8 [Kaposi`s sarcoma-associated h
gaauggugucaau

SEQ ID NO: 4004537 - RNA, 13 nt, Human herpesvirus 8 [Kaposi`s sarcoma-associated h
gacaaccuucaga

SEQ ID NO: 4004538 - RNA, 15 nt, Human herpesvirus 8 [Kaposi`s sarcoma-associated h
gacaccaaagacaag

SEQ ID NO: 4004539 - RNA, 18 nt, Human herpesvirus 8 [Kaposi`s sarcoma-associated h
gacaccaccgucuggcug

SEQ ID NO: 4004540 - RNA, 23 nt, Human herpesvirus 8 [Kaposi`s sarcoma-associated h
gacagauguuagauagacccggc

SEQ ID NO: 4004541 - RNA, 17 nt, Human herpesvirus 8 [Kaposi`s sarcoma-associated h
gacagcaacacccagcu

SEQ ID NO: 4004542 - RNA, 15 nt, Human herpesvirus 8 [Kaposi`s sarcoma-associated h
gacauacaugagaga

SEQ ID NO: 4004543 - RNA, 13 nt, Human herpesvirus 8 [Kaposi`s sarcoma-associated h
gacaugugcuuuu

SEQ ID NO: 4004544 - RNA, 12 nt, Human herpesvirus 8 [Kaposi`s sarcoma-associated h
gacccagggugc

SEQ ID NO: 4004545 - RNA, 21 nt, Human herpesvirus 8 [Kaposi`s sarcoma-associated h
gacgcccuggguguuaugcac

SEQ ID NO: 4004546 - RNA, 17 nt, Human herpesvirus 8 [Kaposi`s sarcoma-associated h
gacggacggcaccaagg

SEQ ID NO: 4004547 - RNA, 21 nt, Human herpesvirus 8 [Kaposi`s sarcoma-associated h
gacgucuucgccgaggacacg

SEQ ID NO: 4004548 - RNA, 16 nt, Human herpesvirus 8 [Kaposi`s sarcoma-associated h
gacucuguauuuggga

SEQ ID NO: 4004549 - RNA, 19 nt, Human herpesvirus 8 [Kaposi`s sarcoma-associated h
gacuugauaaucuccugga

SEQ ID NO: 4004550 - RNA, 14 nt, Human herpesvirus 8 [Kaposi`s sarcoma-associated h
gaggaagaugaaga

SEQ ID NO: 4004551 - RNA, 14 nt, Human herpesvirus 8 [Kaposi`s sarcoma-associated h
gaggaaggaugugg

SEQ ID NO: 4004552 - RNA, 20 nt, Human herpesvirus 8 [Kaposi`s sarcoma-associated h
gaggagggggugggggagac

SEQ ID NO: 4004553 - RNA, 20 nt, Human herpesvirus 8 [Kaposi`s sarcoma-associated h
gaggugacccuuugugcucg

SEQ ID NO: 4004554 - RNA, 20 nt, Human herpesvirus 8 [Kaposi`s sarcoma-associated h
gaguccaaccuggcaagcag

SEQ ID NO: 4004555 - RNA, 20 nt, Human herpesvirus 8 [Kaposi`s sarcoma-associated h
gagucgccgguagcugccug

SEQ ID NO: 4004556 - RNA, 17 nt, Human immunodeficiency virus 1 (HIV-1)
aaaauaaccacagaaag

SEQ ID NO: 4004557 - RNA, 22 nt, Human immunodeficiency virus 1 (HIV-1)
aaacaauggccauugacagaag

SEQ ID NO: 4004558 - RNA, 19 nt, Human immunodeficiency virus 1 (HIV-1)
aaagcuugccuugagugcu

SEQ ID NO: 4004559 - RNA, 12 nt, Human immunodeficiency virus 1 (HIV-1)
aaauagaggagc

SEQ ID NO: 4004560 - RNA, 18 nt, Human immunodeficiency virus 1 (HIV-1)
aaauuaaagccaggaaug

SEQ ID NO: 4004561 - RNA, 14 nt, Human immunodeficiency virus 1 (HIV-1)
aaauuagcaggaag

SEQ ID NO: 4004562 - RNA, 22 nt, Human immunodeficiency virus 1 (HIV-1)
aaauuaggaaaagcaggauaug

SEQ ID NO: 4004563 - RNA, 15 nt, Human immunodeficiency virus 1 (HIV-1)
aacauggagcaauca

SEQ ID NO: 4004564 - RNA, 15 nt, Human immunodeficiency virus 1 (HIV-1)
aaccccgaggggacc

SEQ ID NO: 4004565 - RNA, 17 nt, Human immunodeficiency virus 1 (HIV-1)
aacuagggaacccacug

SEQ ID NO: 4004566 - RNA, 15 nt, Human immunodeficiency virus 1 (HIV-1)
aacugacagaggaua

SEQ ID NO: 4004567 - RNA, 13 nt, Human immunodeficiency virus 1 (HIV-1)
aagauagaagagg

SEQ ID NO: 4004568 - RNA, 22 nt, Human immunodeficiency virus 1 (HIV-1)
aagcaguaaguaguacauguaa

SEQ ID NO: 4004569 - RNA, 18 nt, Human immunodeficiency virus 1 (HIV-1)
aaguaguacaaggagcuu

SEQ ID NO: 4004570 - RNA, 19 nt, Human immunodeficiency virus 1 (HIV-1)
aauaacaccaaaaaagaua

SEQ ID NO: 4004571 - RNA, 20 nt, Human immunodeficiency virus 1 (HIV-1)
aauaccaauagauaaugaua

SEQ ID NO: 4004572 - RNA, 14 nt, Human immunodeficiency virus 1 (HIV-1)
aauagcaacaauga

SEQ ID NO: 4004573 - RNA, 16 nt, Human immunodeficiency virus 1 (HIV-1)
aaucuguggacauaaa

SEQ ID NO: 4004574 - RNA, 15 nt, Human immunodeficiency virus 1 (HIV-1)
aauuauauaaauaua

SEQ ID NO: 4004575 - RNA, 15 nt, Human immunodeficiency virus 1 (HIV-1)
acaagccccagaaga

SEQ ID NO: 4004576 - RNA, 21 nt, Human immunodeficiency virus 1 (HIV-1)
acaaucacccucccaugcaga

SEQ ID NO: 4004577 - RNA, 23 nt, Human immunodeficiency virus 1 (HIV-1)
acaauggccauugacagaagaaa

SEQ ID NO: 4004578 - RNA, 21 nt, Human immunodeficiency virus 1 (HIV-1)
acaguacuaaauggagaaaau

SEQ ID NO: 4004579 - RNA, 18 nt, Human immunodeficiency virus 1 (HIV-1)
accaaagcacuaacagaa

SEQ ID NO: 4004580 - RNA, 16 nt, Human immunodeficiency virus 1 (HIV-1)
accaaggcaaagagaa

SEQ ID NO: 4004581 - RNA, 22 nt, Human immunodeficiency virus 1 (HIV-1)
accagaucugagccugggagcu

SEQ ID NO: 4004582 - RNA, 21 nt, Human immunodeficiency virus 1 (HIV-1)
accuggauggagugggacaga

SEQ ID NO: 4004583 - RNA, 22 nt, Human immunodeficiency virus 1 (HIV-1)
acuuaauagcagaaauacagaa

SEQ ID NO: 4004584 - RNA, 19 nt, Human immunodeficiency virus 1 (HIV-1)
agacagggcuuggaaagga

SEQ ID NO: 4004585 - RNA, 20 nt, Human immunodeficiency virus 1 (HIV-1)
agagggagccacacaaugaa

SEQ ID NO: 4004586 - RNA, 15 nt, Human immunodeficiency virus 1 (HIV-1)
agauccuagacuaga

SEQ ID NO: 4004587 - RNA, 12 nt, Human immunodeficiency virus 1 (HIV-1)
agaucugagccu

SEQ ID NO: 4004588 - RNA, 14 nt, Human immunodeficiency virus 1 (HIV-1)
agauucuaaaagaa

SEQ ID NO: 4004589 - RNA, 19 nt, Human immunodeficiency virus 1 (HIV-1)
aaaaucugaaaacaggaaa

SEQ ID NO: 4004590 - RNA, 16 nt, Human immunodeficiency virus 1 (HIV-1)
aaagcacuaacagaag

SEQ ID NO: 4004591 - RNA, 15 nt, Human immunodeficiency virus 1 (HIV-1)
aaauaugcaagaaug

SEQ ID NO: 4004592 - RNA, 18 nt, Human immunodeficiency virus 1 (HIV-1)
aacaaauuauaaacaugu

SEQ ID NO: 4004593 - RNA, 13 nt, Human immunodeficiency virus 1 (HIV-1)
aacccacaagaag

SEQ ID NO: 4004594 - RNA, 23 nt, Human immunodeficiency virus 1 (HIV-1)
aacugcuuguaccaauugcuauu

SEQ ID NO: 4004595 - RNA, 20 nt, Human immunodeficiency virus 1 (HIV-1)
aagaaugagacgagcugagc

SEQ ID NO: 4004596 - RNA, 20 nt, Human immunodeficiency virus 1 (HIV-1)
aagauaauagugacauaaaa

SEQ ID NO: 4004597 - RNA, 15 nt, Human immunodeficiency virus 1 (HIV-1)
aagcacaagaggagg

SEQ ID NO: 4004598 - RNA, 19 nt, Human immunodeficiency virus 1 (HIV-1)
aagcuugccuugagugcuu

SEQ ID NO: 4004599 - RNA, 15 nt, Human immunodeficiency virus 1 (HIV-1)
aaggaguaguagaau

SEQ ID NO: 4004600 - RNA, 14 nt, Human immunodeficiency virus 1 (HIV-1)
aaggcagcuguaga

SEQ ID NO: 4004601 - RNA, 16 nt, Human immunodeficiency virus 1 (HIV-1)
aaguaagacaguauga

SEQ ID NO: 4004602 - RNA, 19 nt, Human immunodeficiency virus 1 (HIV-1)
aaguaguauugguaaaugu

SEQ ID NO: 4004603 - RNA, 15 nt, Human immunodeficiency virus 1 (HIV-1)
aaguuuaguaaaaca

SEQ ID NO: 4004604 - RNA, 16 nt, Human immunodeficiency virus 1 (HIV-1)
aauaaguucagaagua

SEQ ID NO: 4004605 - RNA, 22 nt, Human immunodeficiency virus 1 (HIV-1)
aaucuuagagccuuuuagaaaa

SEQ ID NO: 4004606 - RNA, 19 nt, Human immunodeficiency virus 1 (HIV-1)
aauuaggaaaagcaggaua

SEQ ID NO: 4004607 - RNA, 22 nt, Human immunodeficiency virus 1 (HIV-1)
aauuaugguaccaguuagagaa

SEQ ID NO: 4004608 - RNA, 16 nt, Human immunodeficiency virus 1 (HIV-1)
aauuauucauaaugau

SEQ ID NO: 4004609 - RNA, 17 nt, Human immunodeficiency virus 1 (HIV-1)
acaaaucagaagacuga

SEQ ID NO: 4004610 - RNA, 16 nt, Human immunodeficiency virus 1 (HIV-1)
acacaacaaaucagaa

SEQ ID NO: 4004611 - RNA, 18 nt, Human immunodeficiency virus 1 (HIV-1)
acaggagaaagagacugg

SEQ ID NO: 4004612 - RNA, 12 nt, Human immunodeficiency virus 1 (HIV-1)
acagggagacua

SEQ ID NO: 4004613 - RNA, 17 nt, Human immunodeficiency virus 1 (HIV-1)
acauaccuagaagaaua

SEQ ID NO: 4004614 - RNA, 18 nt, Human immunodeficiency virus 1 (HIV-1)
accaaugacuuacaaggc

SEQ ID NO: 4004615 - RNA, 18 nt, Human immunodeficiency virus 1 (HIV-1)
acgcagggggugggaagc

SEQ ID NO: 4004616 - RNA, 15 nt, Human immunodeficiency virus 1 (HIV-1)
acugcuguuaaaugg

SEQ ID NO: 4004617 - RNA, 20 nt, Human immunodeficiency virus 1 (HIV-1)
acugucaaugacauacagaa

SEQ ID NO: 4004618 - RNA, 14 nt, Human immunodeficiency virus 1 (HIV-1)
acuuuaaaacagau

SEQ ID NO: 4004619 - RNA, 15 nt, Human immunodeficiency virus 1 (HIV-1)
agaaaagaaugaaca

SEQ ID NO: 4004620 - RNA, 18 nt, Human immunodeficiency virus 1 (HIV-1)
agaacagucagacucauc

SEQ ID NO: 4004621 - RNA, 19 nt, Human immunodeficiency virus 1 (HIV-1)
agaagaggccaauaaagga

SEQ ID NO: 4004622 - RNA, 17 nt, Human immunodeficiency virus 1 (HIV-1)
agacauacaaacuaaag

SEQ ID NO: 4004623 - RNA, 15 nt, Human immunodeficiency virus 1 (HIV-1)
agacgagcugagcca

SEQ ID NO: 4004624 - RNA, 15 nt, Human immunodeficiency virus 1 (HIV-1)
agauaaaaaacugcu

SEQ ID NO: 4004625 - RNA, 19 nt, Human immunodeficiency virus 1 (HIV-1)
agcaaaauggaauaacacu

SEQ ID NO: 4004626 - RNA, 12 nt, Human immunodeficiency virus 1 (HIV-1)
agcaacaaugag

SEQ ID NO: 4004627 - RNA, 16 nt, Human immunodeficiency virus 1 (HIV-1)
agcaagaaaagaauga

SEQ ID NO: 4004628 - RNA, 14 nt, Human immunodeficiency virus 1 (HIV-1)
agccuaaaacugcu

SEQ ID NO: 4004629 - RNA, 14 nt, Human immunodeficiency virus 1 (HIV-1)
agcuaguaccaguu

SEQ ID NO: 4004630 - RNA, 16 nt, Human immunodeficiency virus 1 (HIV-1)
agcucaucagaacagu

SEQ ID NO: 4004631 - RNA, 13 nt, Human immunodeficiency virus 1 (HIV-1)
agcuuaagaauga

SEQ ID NO: 4004632 - RNA, 11 nt, Human immunodeficiency virus 1 (HIV-1)
aggaggggacc

SEQ ID NO: 4004633 - RNA, 19 nt, Human immunodeficiency virus 1 (HIV-1)
aggauauguuacuaauaga

SEQ ID NO: 4004634 - RNA, 19 nt, Human immunodeficiency virus 1 (HIV-1)
aggauuagaacauggaaaa

SEQ ID NO: 4004635 - RNA, 23 nt, Human immunodeficiency virus 1 (HIV-1)
aggccaauaaaggagagaacacc

SEQ ID NO: 4004636 - RNA, 13 nt, Human immunodeficiency virus 1 (HIV-1)
aggcguggccugg

SEQ ID NO: 4004637 - RNA, 21 nt, Human immunodeficiency virus 1 (HIV-1)
agggagacuaaauuaggaaaa

SEQ ID NO: 4004638 - RNA, 17 nt, Human immunodeficiency virus 1 (HIV-1)
aggguuaaaaaagaaaa

SEQ ID NO: 4004639 - RNA, 17 nt, Human immunodeficiency virus 1 (HIV-1)
aguaccaguugagccag

SEQ ID NO: 4004640 - RNA, 18 nt, Human immunodeficiency virus 1 (HIV-1)
aguaucaacucaacugcu

SEQ ID NO: 4004641 - RNA, 23 nt, Human immunodeficiency virus 1 (HIV-1)
agugccaagaagaaaagcaaaga

SEQ ID NO: 4004642 - RNA, 17 nt, Human immunodeficiency virus 1 (HIV-1)
auacuugggcaggagug

SEQ ID NO: 4004643 - RNA, 22 nt, Human immunodeficiency virus 1 (HIV-1)
aucaagcuucucuaucaaagca

SEQ ID NO: 4004644 - RNA, 15 nt, Human immunodeficiency virus 1 (HIV-1)
aucugacuuagaaau

SEQ ID NO: 4004645 - RNA, 17 nt, Human immunodeficiency virus 1 (HIV-1)
augcagaauaaaacaaa

SEQ ID NO: 4004646 - RNA, 22 nt, Human immunodeficiency virus 1 (HIV-1)
augcagaauaaaacaaauuaua

SEQ ID NO: 4004647 - RNA, 18 nt, Human immunodeficiency virus 1 (HIV-1)
auggaaaaggaagggaaa

SEQ ID NO: 4004648 - RNA, 13 nt, Human immunodeficiency virus 1 (HIV-1)
auuugaagaauga

SEQ ID NO: 4004649 - RNA, 14 nt, Human immunodeficiency virus 1 (HIV-1)
auuuucagaauugg

SEQ ID NO: 4004650 - RNA, 12 nt, Human immunodeficiency virus 1 (HIV-1)
caagaauuauug

SEQ ID NO: 4004651 - RNA, 13 nt, Human immunodeficiency virus 1 (HIV-1)
caagcauaagagg

SEQ ID NO: 4004652 - RNA, 15 nt, Human immunodeficiency virus 1 (HIV-1)
caauaguagcaauag

SEQ ID NO: 4004653 - RNA, 18 nt, Human immunodeficiency virus 1 (HIV-1)
caaugagagugaaggaga

SEQ ID NO: 4004654 - RNA, 21 nt, Human immunodeficiency virus 1 (HIV-1)
caaugcugcuugugccuggcu

SEQ ID NO: 4004655 - RNA, 17 nt, Human immunodeficiency virus 1 (HIV-1)
cacaaucacccucccau

SEQ ID NO: 4004656 - RNA, 12 nt, Human immunodeficiency virus 1 (HIV-1)
cagaaauuguaa

SEQ ID NO: 4004657 - RNA, 12 nt, Human immunodeficiency virus 1 (HIV-1)
cagaagaagagg

SEQ ID NO: 4004658 - RNA, 20 nt, Human immunodeficiency virus 1 (HIV-1)
cagaauaaaacaaauuauaa

SEQ ID NO: 4004659 - RNA, 16 nt, Human immunodeficiency virus 1 (HIV-1)
cagaccuggaggagga

SEQ ID NO: 4004660 - RNA, 19 nt, Human immunodeficiency virus 1 (HIV-1)
cagauaagauagaagaggc

SEQ ID NO: 4004661 - RNA, 17 nt, Human immunodeficiency virus 1 (HIV-1)
cagauagggugggagca

SEQ ID NO: 4004662 - RNA, 23 nt, Human immunodeficiency virus 1 (HIV-1)
cagcagcuaccaaugcugcuugu

SEQ ID NO: 4004663 - RNA, 16 nt, Human immunodeficiency virus 1 (HIV-1)
cagcuuguuacacccu

SEQ ID NO: 4004664 - RNA, 24 nt, Human immunodeficiency virus 1 (HIV-1)
caggaguggaagccauaauaagaa

SEQ ID NO: 4004665 - RNA, 21 nt, Human immunodeficiency virus 1 (HIV-1)
ccagggaggcguggccugggc

SEQ ID NO: 4004666 - RNA, 14 nt, Human immunodeficiency virus 1 (HIV-1)
cccauaguaggagc

SEQ ID NO: 4004667 - RNA, 11 nt, Human immunodeficiency virus 1 (HIV-1)
cccucagaucc

SEQ ID NO: 4004668 - RNA, 16 nt, Human immunodeficiency virus 1 (HIV-1)
ccugggagcucucugg

SEQ ID NO: 4004669 - RNA, 13 nt, Human immunodeficiency virus 1 (HIV-1)
ccugggcgggacu

SEQ ID NO: 4004670 - RNA, 12 nt, Human immunodeficiency virus 1 (HIV-1)
cgacagaggaga

SEQ ID NO: 4004671 - RNA, 11 nt, Human immunodeficiency virus 1 (HIV-1)
cgagcccucag

SEQ ID NO: 4004672 - RNA, 14 nt, Human immunodeficiency virus 1 (HIV-1)
cgagcugagccagc

SEQ ID NO: 4004673 - RNA, 19 nt, Human immunodeficiency virus 1 (HIV-1)
cuagagcuuuuagaggagc

SEQ ID NO: 4004674 - RNA, 14 nt, Human immunodeficiency virus 1 (HIV-1)
cucagauccugcau

SEQ ID NO: 4004675 - RNA, 15 nt, Human immunodeficiency virus 1 (HIV-1)
cucauccaagaauaa

SEQ ID NO: 4004676 - RNA, 13 nt, Human immunodeficiency virus 1 (HIV-1)
cugagccagcagc

SEQ ID NO: 4004677 - RNA, 21 nt, Human immunodeficiency virus 1 (HIV-1)
cuggcuagaagcacaagagga

SEQ ID NO: 4004678 - RNA, 21 nt, Human immunodeficiency virus 1 (HIV-1)
cugggacgaucugcggagccu

SEQ ID NO: 4004679 - RNA, 15 nt, Human immunodeficiency virus 1 (HIV-1)
cuggggcaucaagca

SEQ ID NO: 4004680 - RNA, 14 nt, Human immunodeficiency virus 1 (HIV-1)
cugggucucucugg

SEQ ID NO: 4004681 - RNA, 17 nt, Human immunodeficiency virus 1 (HIV-1)
cuguagaaauuaauugu

SEQ ID NO: 4004682 - RNA, 18 nt, Human immunodeficiency virus 1 (HIV-1)
cuguagaaauuaauugua

SEQ ID NO: 4004683 - RNA, 16 nt, Human immunodeficiency virus 1 (HIV-1)
aggcguggccugggcg

SEQ ID NO: 4004684 - RNA, 18 nt, Human immunodeficiency virus 1 (HIV-1)
aggcuugguagguuuaag

SEQ ID NO: 4004685 - RNA, 17 nt, Human immunodeficiency virus 1 (HIV-1)
agggacaauuggagaag

SEQ ID NO: 4004686 - RNA, 20 nt, Human immunodeficiency virus 1 (HIV-1)
agggcugcuauuaacaagag

SEQ ID NO: 4004687 - RNA, 15 nt, Human immunodeficiency virus 1 (HIV-1)
aguacuugguuuaau

SEQ ID NO: 4004688 - RNA, 19 nt, Human immunodeficiency virus 1 (HIV-1)
aguagugccaagaagaaaa

SEQ ID NO: 4004689 - RNA, 21 nt, Human immunodeficiency virus 1 (HIV-1)
agucacaccucagguaccuuu

SEQ ID NO: 4004690 - RNA, 20 nt, Human immunodeficiency virus 1 (HIV-1)
agucuccauagaauggagga

SEQ ID NO: 4004691 - RNA, 18 nt, Human immunodeficiency virus 1 (HIV-1)
aguugucacccuaacuga

SEQ ID NO: 4004692 - RNA, 21 nt, Human immunodeficiency virus 1 (HIV-1)
auaaaauuauucauaaugaua

SEQ ID NO: 4004693 - RNA, 14 nt, Human immunodeficiency virus 1 (HIV-1)
auacaaaaggaaac

SEQ ID NO: 4004694 - RNA, 14 nt, Human immunodeficiency virus 1 (HIV-1)
auaccacuaacaga

SEQ ID NO: 4004695 - RNA, 17 nt, Human immunodeficiency virus 1 (HIV-1)
auaggguuauagaagua

SEQ ID NO: 4004696 - RNA, 21 nt, Human immunodeficiency virus 1 (HIV-1)
auauaaaguaguaaaaauuga

SEQ ID NO: 4004697 - RNA, 20 nt, Human immunodeficiency virus 1 (HIV-1)
auaucagcacaagcauaaga

SEQ ID NO: 4004698 - RNA, 15 nt, Human immunodeficiency virus 1 (HIV-1)
aucacacgaccugga

SEQ ID NO: 4004699 - RNA, 10 nt, Human immunodeficiency virus 1 (HIV-1)
aucucuggaa

SEQ ID NO: 4004700 - RNA, 22 nt, Human immunodeficiency virus 1 (HIV-1)
augaauaaagaauuaaagaaaa

SEQ ID NO: 4004701 - RNA, 23 nt, Human immunodeficiency virus 1 (HIV-1)
augagggacaauuggagaaguga

SEQ ID NO: 4004702 - RNA, 20 nt, Human immunodeficiency virus 1 (HIV-1)
auggccuacuguaagggaaa

SEQ ID NO: 4004703 - RNA, 13 nt, Human immunodeficiency virus 1 (HIV-1)
auucauaaugaua

SEQ ID NO: 4004704 - RNA, 19 nt, Human immunodeficiency virus 1 (HIV-1)
auuugggguugcucuggaa

SEQ ID NO: 4004705 - RNA, 22 nt, Human immunodeficiency virus 1 (HIV-1)
cacaagaggaggaggagguggg

SEQ ID NO: 4004706 - RNA, 18 nt, Human immunodeficiency virus 1 (HIV-1)
cagaccuggaggaggaga

SEQ ID NO: 4004707 - RNA, 18 nt, Human immunodeficiency virus 1 (HIV-1)
cagacucugcuauaagaa

SEQ ID NO: 4004708 - RNA, 21 nt, Human immunodeficiency virus 1 (HIV-1)
cagacucugcuauaagaaagg

SEQ ID NO: 4004709 - RNA, 13 nt, Human immunodeficiency virus 1 (HIV-1)
cagaggagagcaa

SEQ ID NO: 4004710 - RNA, 12 nt, Human immunodeficiency virus 1 (HIV-1)
cagggacagcag

SEQ ID NO: 4004711 - RNA, 14 nt, Human immunodeficiency virus 1 (HIV-1)
caguauuagaagaa

SEQ ID NO: 4004712 - RNA, 20 nt, Human immunodeficiency virus 1 (HIV-1)
caguauuggagucaggaacu

SEQ ID NO: 4004713 - RNA, 19 nt, Human immunodeficiency virus 1 (HIV-1)
caguauuugccauaaagaa

SEQ ID NO: 4004714 - RNA, 21 nt, Human immunodeficiency virus 1 (HIV-1)
cagucuagcagaagaagaggu

SEQ ID NO: 4004715 - RNA, 20 nt, Human immunodeficiency virus 1 (HIV-1)
caguggauauauagaagcag

SEQ ID NO: 4004716 - RNA, 13 nt, Human immunodeficiency virus 1 (HIV-1)
caguugagccaga

SEQ ID NO: 4004717 - RNA, 15 nt, Human immunodeficiency virus 1 (HIV-1)
caucaagcagcucca

SEQ ID NO: 4004718 - RNA, 19 nt, Human immunodeficiency virus 1 (HIV-1)
cauuaucguuucagaccca

SEQ ID NO: 4004719 - RNA, 13 nt, Human immunodeficiency virus 1 (HIV-1)
ccaaugacuuaca

SEQ ID NO: 4004720 - RNA, 23 nt, Human immunodeficiency virus 1 (HIV-1)
ccagcaagaaaagaaugaacaag

SEQ ID NO: 4004721 - RNA, 23 nt, Human immunodeficiency virus 1 (HIV-1)
ccagcuuguuacacccugugagc

SEQ ID NO: 4004722 - RNA, 19 nt, Human immunodeficiency virus 1 (HIV-1)
ccggaguacuucaagaacu

SEQ ID NO: 4004723 - RNA, 13 nt, Human immunodeficiency virus 1 (HIV-1)
ccugagugggagu

SEQ ID NO: 4004724 - RNA, 16 nt, Human immunodeficiency virus 1 (HIV-1)
ccugauuagcagaacu

SEQ ID NO: 4004725 - RNA, 16 nt, Human immunodeficiency virus 1 (HIV-1)
cgagaucuucagaccu

SEQ ID NO: 4004726 - RNA, 23 nt, Human immunodeficiency virus 1 (HIV-1)
cgcagggggugggaagcccucaa

SEQ ID NO: 4004727 - RNA, 13 nt, Human immunodeficiency virus 1 (HIV-1)
cugggagcucucu

SEQ ID NO: 4004728 - RNA, 19 nt, Human immunodeficiency virus 1 (HIV-1)
cuggggaguggcgagcccu

SEQ ID NO: 4004729 - RNA, 10 nt, Human immunodeficiency virus 1 (HIV-1)
cuucugggac

SEQ ID NO: 4004730 - RNA, 22 nt, Human immunodeficiency virus 1 (HIV-1)
cuuuccagggaggcguggccug

SEQ ID NO: 4004731 - RNA, 14 nt, Human immunodeficiency virus 1 (HIV-1)
gaaacugacagagg

SEQ ID NO: 4004732 - RNA, 23 nt, Human immunodeficiency virus 1 (HIV-1)
gaagaaucgcaaaaccagcaaga

SEQ ID NO: 4004733 - RNA, 16 nt, Human immunodeficiency virus 1 (HIV-1)
gaauaaguucagaagu

SEQ ID NO: 4004734 - RNA, 15 nt, Human immunodeficiency virus 1 (HIV-1)
gacaauggcagcaau

SEQ ID NO: 4004735 - RNA, 18 nt, Human immunodeficiency virus 1 (HIV-1)
gaccagaucugagccugg

SEQ ID NO: 4004736 - RNA, 16 nt, Human immunodeficiency virus 1 (HIV-1)
gacccggagagagaag

SEQ ID NO: 4004737 - RNA, 10 nt, Human immunodeficiency virus 1 (HIV-1)
gacuggaagg

SEQ ID NO: 4004738 - RNA, 12 nt, Human immunodeficiency virus 1 (HIV-1)
gagaacaccagc

SEQ ID NO: 4004739 - RNA, 17 nt, Human immunodeficiency virus 1 (HIV-1)
gagagauucuaaaagaa

SEQ ID NO: 4004740 - RNA, 12 nt, Human immunodeficiency virus 1 (HIV-1)
gagcagcaucuc

SEQ ID NO: 4004741 - RNA, 19 nt, Human immunodeficiency virus 1 (HIV-1)
gagccagcagcagauaggg

SEQ ID NO: 4004742 - RNA, 19 nt, Human immunodeficiency virus 1 (HIV-1)
gaguaauaaaucucuggaa

SEQ ID NO: 4004743 - RNA, 22 nt, Human immunodeficiency virus 1 (HIV-1)
gauggaaaggaucaccagcaau

SEQ ID NO: 4004744 - RNA, 23 nt, Human immunodeficiency virus 1 (HIV-1)
gcacaagaggaggaggagguggg

SEQ ID NO: 4004745 - RNA, 14 nt, Human immunodeficiency virus 1 (HIV-1)
gcagaauaaaacaa

SEQ ID NO: 4004746 - RNA, 18 nt, Human immunodeficiency virus 1 (HIV-1)
gcagucuagcagaagaag

SEQ ID NO: 4004747 - RNA, 18 nt, Human immunodeficiency virus 1 (HIV-1)
gccacauaccuagaagaa

SEQ ID NO: 4004748 - RNA, 12 nt, Human immunodeficiency virus 1 (HIV-1)
ggaaggaagcaa

SEQ ID NO: 4004749 - RNA, 17 nt, Human immunodeficiency virus 1 (HIV-1)
ggagagagagacagaga

SEQ ID NO: 4004750 - RNA, 23 nt, Human immunodeficiency virus 1 (HIV-1)
ggaguagcacccaccaaggcaaa

SEQ ID NO: 4004751 - RNA, 12 nt, Human immunodeficiency virus 1 (HIV-1)
gggacuggaagg

SEQ ID NO: 4004752 - RNA, 23 nt, Human immunodeficiency virus 1 (HIV-1)
guaacgcacaguuuuaauugugg

SEQ ID NO: 4004753 - RNA, 18 nt, Human immunodeficiency virus 1 (HIV-1)
guacugggucucucuggu

SEQ ID NO: 4004754 - RNA, 14 nt, Human immunodeficiency virus 1 (HIV-1)
gugaacggauccuu

SEQ ID NO: 4004755 - RNA, 19 nt, Human immunodeficiency virus 1 (HIV-1)
gugggacagagaaauuaac

SEQ ID NO: 4004756 - RNA, 11 nt, Human immunodeficiency virus 1 (HIV-1)
uaaaauuauuc

SEQ ID NO: 4004757 - RNA, 17 nt, Human immunodeficiency virus 1 (HIV-1)
uacagagguacauaaug

SEQ ID NO: 4004758 - RNA, 17 nt, Human immunodeficiency virus 1 (HIV-1)
uacagcagcuaccaaug

SEQ ID NO: 4004759 - RNA, 21 nt, Human immunodeficiency virus 1 (HIV-1)
uagaaauagggcagcauagaa

SEQ ID NO: 4004760 - RNA, 21 nt, Human immunodeficiency virus 1 (HIV-1)
uagaaaucuguggacauaaag

SEQ ID NO: 4004761 - RNA, 21 nt, Human immunodeficiency virus 1 (HIV-1)
uagaccagaucugagccuggg

SEQ ID NO: 4004762 - RNA, 21 nt, Human immunodeficiency virus 1 (HIV-1)
uagcagaccaacuaauucauc

SEQ ID NO: 4004763 - RNA, 19 nt, Human immunodeficiency virus 1 (HIV-1)
ugagacaagcacauuguaa

SEQ ID NO: 4004764 - RNA, 13 nt, Human immunodeficiency virus 1 (HIV-1)
ugagccagcagca

SEQ ID NO: 4004765 - RNA, 16 nt, Human immunodeficiency virus 1 (HIV-1)
ugcagcagcagaacaa

SEQ ID NO: 4004766 - RNA, 11 nt, Human immunodeficiency virus 1 (HIV-1)
ugccaggaaga

SEQ ID NO: 4004767 - RNA, 12 nt, Human immunodeficiency virus 1 (HIV-1)
ugccccucccau

SEQ ID NO: 4004768 - RNA, 15 nt, Human immunodeficiency virus 1 (HIV-1)
ugcugcuugugccug

SEQ ID NO: 4004769 - RNA, 19 nt, Human immunodeficiency virus 1 (HIV-1)
uggaacagauuuggaauca

SEQ ID NO: 4004770 - RNA, 22 nt, Human immunodeficiency virus 1 (HIV-1)
uggcgagcccucagauccugca

SEQ ID NO: 4004771 - RNA, 17 nt, Human immunodeficiency virus 1 (HIV-1)
ugggguaccugugugga

SEQ ID NO: 4004772 - RNA, 23 nt, Human immunodeficiency virus 1 (HIV-1)
ugguuagaccagaucugagccug

SEQ ID NO: 4004773 - RNA, 21 nt, Human immunodeficiency virus 1 (HIV-1)
aacuggcagaaaacagagaga

SEQ ID NO: 4004774 - RNA, 20 nt, Human immunodeficiency virus 1 (HIV-1)
aagaauaguagacauaauag

SEQ ID NO: 4004775 - RNA, 15 nt, Human immunodeficiency virus 1 (HIV-1)
aagagaucaggcuga

SEQ ID NO: 4004776 - RNA, 23 nt, Human immunodeficiency virus 1 (HIV-1)
aagcauaagagguaaggugcaga

SEQ ID NO: 4004777 - RNA, 10 nt, Human immunodeficiency virus 1 (HIV-1)
aagcccucaa

SEQ ID NO: 4004778 - RNA, 15 nt, Human immunodeficiency virus 1 (HIV-1)
aaggaauagaagaag

SEQ ID NO: 4004779 - RNA, 15 nt, Human immunodeficiency virus 1 (HIV-1)
aaguagacaggauga

SEQ ID NO: 4004780 - RNA, 14 nt, Human immunodeficiency virus 1 (HIV-1)
aauagugacauaaa

SEQ ID NO: 4004781 - RNA, 19 nt, Human immunodeficiency virus 1 (HIV-1)
aauaucagcacaagcauaa

SEQ ID NO: 4004782 - RNA, 15 nt, Human immunodeficiency virus 1 (HIV-1)
aaugaacaagaauua

SEQ ID NO: 4004783 - RNA, 23 nt, Human immunodeficiency virus 1 (HIV-1)
aauuacaaaaacaaauuacaaaa

SEQ ID NO: 4004784 - RNA, 23 nt, Human immunodeficiency virus 1 (HIV-1)
aauucacucccaaagaagacaag

SEQ ID NO: 4004785 - RNA, 16 nt, Human immunodeficiency virus 1 (HIV-1)
aauuguggaggggaau

SEQ ID NO: 4004786 - RNA, 16 nt, Human immunodeficiency virus 1 (HIV-1)
acaaucacccucccau

SEQ ID NO: 4004787 - RNA, 22 nt, Human immunodeficiency virus 1 (HIV-1)
acaauuuggaaauaauaaaaca

SEQ ID NO: 4004788 - RNA, 17 nt, Human immunodeficiency virus 1 (HIV-1)
acagagaaauuaacaau

SEQ ID NO: 4004789 - RNA, 18 nt, Human immunodeficiency virus 1 (HIV-1)
acagagaaauuaacaauu

SEQ ID NO: 4004790 - RNA, 20 nt, Human immunodeficiency virus 1 (HIV-1)
acagagggagccacacaaug

SEQ ID NO: 4004791 - RNA, 14 nt, Human immunodeficiency virus 1 (HIV-1)
acaggagcagauga

SEQ ID NO: 4004792 - RNA, 19 nt, Human immunodeficiency virus 1 (HIV-1)
acaguggcaaugagaguga

SEQ ID NO: 4004793 - RNA, 14 nt, Human immunodeficiency virus 1 (HIV-1)
acaguuuuaauugu

SEQ ID NO: 4004794 - RNA, 18 nt, Human immunodeficiency virus 1 (HIV-1)
acauaccuagaagaauaa

SEQ ID NO: 4004795 - RNA, 17 nt, Human immunodeficiency virus 1 (HIV-1)
acauuaguagagcaaaa

SEQ ID NO: 4004796 - RNA, 19 nt, Human immunodeficiency virus 1 (HIV-1)
acccucccaugcagaauaa

SEQ ID NO: 4004797 - RNA, 16 nt, Human immunodeficiency virus 1 (HIV-1)
acgaucugcggagccu

SEQ ID NO: 4004798 - RNA, 13 nt, Human immunodeficiency virus 1 (HIV-1)
acuaauagaaaga

SEQ ID NO: 4004799 - RNA, 21 nt, Human immunodeficiency virus 1 (HIV-1)
acugaaggaagugacacaauc

SEQ ID NO: 4004800 - RNA, 23 nt, Human immunodeficiency virus 1 (HIV-1)
acuuuggaaaggaccagcaaagc

SEQ ID NO: 4004801 - RNA, 14 nt, Human immunodeficiency virus 1 (HIV-1)
agaaaagcaaagau

SEQ ID NO: 4004802 - RNA, 20 nt, Human immunodeficiency virus 1 (HIV-1)
agaacaauuuggaaauaaua

SEQ ID NO: 4004803 - RNA, 17 nt, Human immunodeficiency virus 1 (HIV-1)
agaaguaguacaaggag

SEQ ID NO: 4004804 - RNA, 22 nt, Human immunodeficiency virus 1 (HIV-1)
agaaucgcaaaaccagcaagaa

SEQ ID NO: 4004805 - RNA, 20 nt, Human immunodeficiency virus 1 (HIV-1)
agaauucugcaacaacugcu

SEQ ID NO: 4004806 - RNA, 16 nt, Human immunodeficiency virus 1 (HIV-1)
agacaucacuaugaaa

SEQ ID NO: 4004807 - RNA, 13 nt, Human immunodeficiency virus 1 (HIV-1)
agaccuggaggag

SEQ ID NO: 4004808 - RNA, 19 nt, Human immunodeficiency virus 1 (HIV-1)
agcaauacagcagcuacca

SEQ ID NO: 4004809 - RNA, 15 nt, Human immunodeficiency virus 1 (HIV-1)
agcacaagcauaaga

SEQ ID NO: 4004810 - RNA, 18 nt, Human immunodeficiency virus 1 (HIV-1)
agcacuaacagaaguaau

SEQ ID NO: 4004811 - RNA, 21 nt, Human immunodeficiency virus 1 (HIV-1)
agcagaacuacacaccagggc

SEQ ID NO: 4004812 - RNA, 14 nt, Human immunodeficiency virus 1 (HIV-1)
agcaguagcugagg

SEQ ID NO: 4004813 - RNA, 21 nt, Human immunodeficiency virus 1 (HIV-1)
agcaguuaauaaaaaaggaaa

SEQ ID NO: 4004814 - RNA, 14 nt, Human immunodeficiency virus 1 (HIV-1)
agcccucagauccu

SEQ ID NO: 4004815 - RNA, 14 nt, Human immunodeficiency virus 1 (HIV-1)
agcucaucagaaca

SEQ ID NO: 4004816 - RNA, 13 nt, Human immunodeficiency virus 1 (HIV-1)
agcugaggggaca

SEQ ID NO: 4004817 - RNA, 22 nt, Human immunodeficiency virus 1 (HIV-1)
aggaaccaaagcacuaacagaa

SEQ ID NO: 4004818 - RNA, 15 nt, Human immunodeficiency virus 1 (HIV-1)
agggauuauggaaaa

SEQ ID NO: 4004819 - RNA, 18 nt, Human immunodeficiency virus 1 (HIV-1)
aguacuucaagaacugcu

SEQ ID NO: 4004820 - RNA, 18 nt, Human immunodeficiency virus 1 (HIV-1)
agucaggaacuaaagaau

SEQ ID NO: 4004821 - RNA, 23 nt, Human immunodeficiency virus 1 (HIV-1)
aguccaggaauauggcaacuaga

SEQ ID NO: 4004822 - RNA, 21 nt, Human immunodeficiency virus 1 (HIV-1)
aguggaagccauaauaagaau

SEQ ID NO: 4004823 - RNA, 16 nt, Human immunodeficiency virus 1 (HIV-1)
aguggcgagcccucag

SEQ ID NO: 4004824 - RNA, 18 nt, Human immunodeficiency virus 1 (HIV-1)
agugggacagagaaauua

SEQ ID NO: 4004825 - RNA, 16 nt, Human immunodeficiency virus 1 (HIV-1)
auagaauauaggaaaa

SEQ ID NO: 4004826 - RNA, 13 nt, Human immunodeficiency virus 1 (HIV-1)
auagaggagcuga

SEQ ID NO: 4004827 - RNA, 21 nt, Human immunodeficiency virus 1 (HIV-1)
auaguaguagcgggagaauga

SEQ ID NO: 4004828 - RNA, 13 nt, Human immunodeficiency virus 1 (HIV-1)
aucaacagcuccu

SEQ ID NO: 4004829 - RNA, 14 nt, Human immunodeficiency virus 1 (HIV-1)
aucaagcagcucca

SEQ ID NO: 4004830 - RNA, 14 nt, Human immunodeficiency virus 1 (HIV-1)
aucaagcaggaauu

SEQ ID NO: 4004831 - RNA, 16 nt, Human immunodeficiency virus 1 (HIV-1)
aucagaugcuaaagca

SEQ ID NO: 4004832 - RNA, 15 nt, Human immunodeficiency virus 1 (HIV-1)
augacaugguagaac

SEQ ID NO: 4004833 - RNA, 18 nt, Human immunodeficiency virus 1 (HIV-1)
augagacgagcugagcca

SEQ ID NO: 4004834 - RNA, 23 nt, Human immunodeficiency virus 1 (HIV-1)
augcuccuugggauguugaugau

SEQ ID NO: 4004835 - RNA, 17 nt, Human immunodeficiency virus 1 (HIV-1)
auguaugccccucccau

SEQ ID NO: 4004836 - RNA, 14 nt, Human immunodeficiency virus 1 (HIV-1)
auuacaaaaacaaa

SEQ ID NO: 4004837 - RNA, 14 nt, Human immunodeficiency virus 1 (HIV-1)
auuuagaaggaaaa

SEQ ID NO: 4004838 - RNA, 14 nt, Human immunodeficiency virus 1 (HIV-1)
caacaauacaagaa

SEQ ID NO: 4004839 - RNA, 17 nt, Human immunodeficiency virus 1 (HIV-1)
caaggcaaagagaagag

SEQ ID NO: 4004840 - RNA, 14 nt, Human immunodeficiency virus 1 (HIV-1)
caauagauaaugau

SEQ ID NO: 4004841 - RNA, 20 nt, Human immunodeficiency virus 1 (HIV-1)
caaugcugcuugugccuggc

SEQ ID NO: 4004842 - RNA, 19 nt, Human immunodeficiency virus 1 (HIV-1)
caccaaggcaaagagaaga

SEQ ID NO: 4004843 - RNA, 23 nt, Human immunodeficiency virus 1 (HIV-1)
cacccugugagccugcaugggau

SEQ ID NO: 4004844 - RNA, 23 nt, Human immunodeficiency virus 1 (HIV-1)
cagaacuacacaccagggccagg

SEQ ID NO: 4004845 - RNA, 20 nt, Human immunodeficiency virus 1 (HIV-1)
cagacauacaaacuaaagaa

SEQ ID NO: 4004846 - RNA, 14 nt, Human immunodeficiency virus 1 (HIV-1)
cagagacagaucca

SEQ ID NO: 4004847 - RNA, 13 nt, Human immunodeficiency virus 1 (HIV-1)
cagauauccacug

SEQ ID NO: 4004848 - RNA, 18 nt, Human immunodeficiency virus 1 (HIV-1)
cagaucugagccugggag

SEQ ID NO: 4004849 - RNA, 18 nt, Human immunodeficiency virus 1 (HIV-1)
cagccuaaaacugcuugu

SEQ ID NO: 4004850 - RNA, 13 nt, Human immunodeficiency virus 1 (HIV-1)
caggaagaagcgg

SEQ ID NO: 4004851 - RNA, 21 nt, Human immunodeficiency virus 1 (HIV-1)
caggaagaagcggagacagcg

SEQ ID NO: 4004852 - RNA, 15 nt, Human immunodeficiency virus 1 (HIV-1)
cagggaggcguggcc

SEQ ID NO: 4004853 - RNA, 18 nt, Human immunodeficiency virus 1 (HIV-1)
cagggggugggaagcccu

SEQ ID NO: 4004854 - RNA, 13 nt, Human immunodeficiency virus 1 (HIV-1)
caggguuaaaaaa

SEQ ID NO: 4004855 - RNA, 21 nt, Human immunodeficiency virus 1 (HIV-1)
cauuagcccuauugagacugu

SEQ ID NO: 4004856 - RNA, 13 nt, Human immunodeficiency virus 1 (HIV-1)
ccagggagagcau

SEQ ID NO: 4004857 - RNA, 13 nt, Human immunodeficiency virus 1 (HIV-1)
ccuggcuagaagc

SEQ ID NO: 4004858 - RNA, 18 nt, Human immunodeficiency virus 1 (HIV-1)
cugagccugggagcucuc

SEQ ID NO: 4004859 - RNA, 22 nt, Human immunodeficiency virus 1 (HIV-1)
cuuaauacacuccuuaauugaa

SEQ ID NO: 4004860 - RNA, 22 nt, Human immunodeficiency virus 1 (HIV-1)
gaaccaaagcacuaacagaagu

SEQ ID NO: 4004861 - RNA, 16 nt, Human immunodeficiency virus 1 (HIV-1)
gaagcauccaggaagu

SEQ ID NO: 4004862 - RNA, 17 nt, Human immunodeficiency virus 1 (HIV-1)
gaaguaguacaaggagc

SEQ ID NO: 4004863 - RNA, 13 nt, Human immunodeficiency virus 1 (HIV-1)
gacaccagggauu

SEQ ID NO: 4004864 - RNA, 15 nt, Human immunodeficiency virus 1 (HIV-1)
gaccagaucugagcc

SEQ ID NO: 4004865 - RNA, 16 nt, Human immunodeficiency virus 1 (HIV-1)
gagcugagccagcagc

SEQ ID NO: 4004866 - RNA, 16 nt, Human immunodeficiency virus 1 (HIV-1)
gauggggcaccaugcu

SEQ ID NO: 4004867 - RNA, 14 nt, Human immunodeficiency virus 1 (HIV-1)
gcaaauuaagagaa

SEQ ID NO: 4004868 - RNA, 14 nt, Human immunodeficiency virus 1 (HIV-1)
gcaauacagcagcu

SEQ ID NO: 4004869 - RNA, 16 nt, Human immunodeficiency virus 1 (HIV-1)
gcagucuagcagaaga

SEQ ID NO: 4004870 - RNA, 21 nt, Human immunodeficiency virus 1 (HIV-1)
gcaucuccuauggcaggaaga

SEQ ID NO: 4004871 - RNA, 18 nt, Human immunodeficiency virus 1 (HIV-1)
gccucuucagcuaccacc

SEQ ID NO: 4004872 - RNA, 21 nt, Human immunodeficiency virus 1 (HIV-1)
gcuauugaggcgcaacagcau

SEQ ID NO: 4004873 - RNA, 12 nt, Human immunodeficiency virus 1 (HIV-1)
ggacagauaggg

SEQ ID NO: 4004874 - RNA, 21 nt, Human immunodeficiency virus 1 (HIV-1)
ggcuaacuagggaacccacug

SEQ ID NO: 4004875 - RNA, 9 nt, Human immunodeficiency virus 1 (HIV-1)
ggggggacu

SEQ ID NO: 4004876 - RNA, 16 nt, Human immunodeficiency virus 1 (HIV-1)
guaauaaaucucugga

SEQ ID NO: 4004877 - RNA, 15 nt, Human immunodeficiency virus 1 (HIV-1)
guaauaccacuaaca

SEQ ID NO: 4004878 - RNA, 14 nt, Human immunodeficiency virus 1 (HIV-1)
guaccaguugagcc

SEQ ID NO: 4004879 - RNA, 17 nt, Human immunodeficiency virus 1 (HIV-1)
guuacacccugugagcc

SEQ ID NO: 4004880 - RNA, 17 nt, Human immunodeficiency virus 1 (HIV-1)
uaaaauuagcaggaaga

SEQ ID NO: 4004881 - RNA, 20 nt, Human immunodeficiency virus 1 (HIV-1)
uaacaccaaaaaagauaaag

SEQ ID NO: 4004882 - RNA, 18 nt, Human immunodeficiency virus 1 (HIV-1)
uacaagacccaacaacaa

SEQ ID NO: 4004883 - RNA, 15 nt, Human immunodeficiency virus 1 (HIV-1)
uacaauguacacaug

SEQ ID NO: 4004884 - RNA, 18 nt, Human immunodeficiency virus 1 (HIV-1)
uagaaucuaugaauaaag

SEQ ID NO: 4004885 - RNA, 22 nt, Human immunodeficiency virus 1 (HIV-1)
uagaggaaccaaagcacuaaca

SEQ ID NO: 4004886 - RNA, 16 nt, Human immunodeficiency virus 1 (HIV-1)
uagcaauacagcagcu

SEQ ID NO: 4004887 - RNA, 22 nt, Human immunodeficiency virus 1 (HIV-1)
uagcagaacuacacaccagggc

SEQ ID NO: 4004888 - RNA, 22 nt, Human immunodeficiency virus 1 (HIV-1)
uagcaguagcugaggggacaga

SEQ ID NO: 4004889 - RNA, 19 nt, Human immunodeficiency virus 1 (HIV-1)
uaggaaaauauuaagacaa

SEQ ID NO: 4004890 - RNA, 23 nt, Human immunodeficiency virus 1 (HIV-1)
uaggaaaauauuaagacaaagaa

SEQ ID NO: 4004891 - RNA, 14 nt, Human immunodeficiency virus 1 (HIV-1)
uagggugggagcag

SEQ ID NO: 4004892 - RNA, 19 nt, Human immunodeficiency virus 1 (HIV-1)
uaguacagcugaacacauc

SEQ ID NO: 4004893 - RNA, 15 nt, Human immunodeficiency virus 1 (HIV-1)
uaguaucaacucaac

SEQ ID NO: 4004894 - RNA, 20 nt, Human immunodeficiency virus 1 (HIV-1)
ucaaugccacagccauagca

SEQ ID NO: 4004895 - RNA, 22 nt, Human immunodeficiency virus 1 (HIV-1)
uccagagaggaccagggagagc

SEQ ID NO: 4004896 - RNA, 16 nt, Human immunodeficiency virus 1 (HIV-1)
uccggaguacuucaag

SEQ ID NO: 4004897 - RNA, 23 nt, Human immunodeficiency virus 1 (HIV-1)
ugagccugcaugggauggaugac

SEQ ID NO: 4004898 - RNA, 18 nt, Human immunodeficiency virus 1 (HIV-1)
ugaggcgcaacagcaucu

SEQ ID NO: 4004899 - RNA, 15 nt, Human immunodeficiency virus 1 (HIV-1)
ugcagaauaaaacaa

SEQ ID NO: 4004900 - RNA, 21 nt, Human immunodeficiency virus 1 (HIV-1)
ugcagagagaaaaaagagcag

SEQ ID NO: 4004901 - RNA, 22 nt, Human immunodeficiency virus 1 (HIV-1)
ugccucuucagcuaccaccgcu

SEQ ID NO: 4004902 - RNA, 18 nt, Human immunodeficiency virus 1 (HIV-1)
ugccuggcuagaagcaca

SEQ ID NO: 4004903 - RNA, 21 nt, Human immunodeficiency virus 1 (HIV-1)
uggaaaaacauggagcaauca

SEQ ID NO: 4004904 - RNA, 13 nt, Human immunodeficiency virus 1 (HIV-1)
uggaaaacucauu

SEQ ID NO: 4004905 - RNA, 22 nt, Human immunodeficiency virus 1 (HIV-1)
uggaaagauaccuaaaggauca

SEQ ID NO: 4004906 - RNA, 22 nt, Human immunodeficiency virus 1 (HIV-1)
uggggaguggcgagcccucaga

SEQ ID NO: 4004907 - RNA, 19 nt, Human immunodeficiency virus 1 (HIV-1)
uguacagagauggaaaagg

SEQ ID NO: 4004908 - RNA, 15 nt, Human immunodeficiency virus 1 (HIV-1)
uguaguccaggaaua

SEQ ID NO: 4004909 - RNA, 18 nt, Human immunodeficiency virus 1 (HIV-1)
uuggaaauaauaaaacaa

SEQ ID NO: 4004910 - RNA, 15 nt, Human immunodeficiency virus 1 (HIV-1)
uuggcacuagcagca

SEQ ID NO: 4004911 - RNA, 21 nt, Human immunodeficiency virus 1 (HIV-1)
guaccaguugagccagauaag

SEQ ID NO: 4004912 - RNA, 12 nt, Human immunodeficiency virus 1 (HIV-1)
guagaaauuaau

SEQ ID NO: 4004913 - RNA, 13 nt, Human immunodeficiency virus 1 (HIV-1)
guguaaaauuaac

SEQ ID NO: 4004914 - RNA, 16 nt, Human immunodeficiency virus 1 (HIV-1)
uaaaaaguguugcuuu

SEQ ID NO: 4004915 - RNA, 15 nt, Human immunodeficiency virus 1 (HIV-1)
uaacaaauuggcugu

SEQ ID NO: 4004916 - RNA, 19 nt, Human immunodeficiency virus 1 (HIV-1)
uaagaauaguuuuugcugu

SEQ ID NO: 4004917 - RNA, 16 nt, Human immunodeficiency virus 1 (HIV-1)
uaauucaacacaacug

SEQ ID NO: 4004918 - RNA, 20 nt, Human immunodeficiency virus 1 (HIV-1)
uacaggccagacaauuauug

SEQ ID NO: 4004919 - RNA, 13 nt, Human immunodeficiency virus 1 (HIV-1)
uaccaaugcugcu

SEQ ID NO: 4004920 - RNA, 14 nt, Human immunodeficiency virus 1 (HIV-1)
uaccacacacaagg

SEQ ID NO: 4004921 - RNA, 15 nt, Human immunodeficiency virus 1 (HIV-1)
uaccacacacaaggc

SEQ ID NO: 4004922 - RNA, 20 nt, Human immunodeficiency virus 1 (HIV-1)
uacuguaagggaaagaauga

SEQ ID NO: 4004923 - RNA, 16 nt, Human immunodeficiency virus 1 (HIV-1)
uagaacauggaaaagu

SEQ ID NO: 4004924 - RNA, 17 nt, Human immunodeficiency virus 1 (HIV-1)
uagagcuauucgccaca

SEQ ID NO: 4004925 - RNA, 19 nt, Human immunodeficiency virus 1 (HIV-1)
uagcuugcucaaugccaca

SEQ ID NO: 4004926 - RNA, 22 nt, Human immunodeficiency virus 1 (HIV-1)
uauucgccacauaccuagaaga

SEQ ID NO: 4004927 - RNA, 20 nt, Human immunodeficiency virus 1 (HIV-1)
ucagguaccuuuaagaccaa

SEQ ID NO: 4004928 - RNA, 21 nt, Human immunodeficiency virus 1 (HIV-1)
uccuuggguucuugggagcag

SEQ ID NO: 4004929 - RNA, 18 nt, Human immunodeficiency virus 1 (HIV-1)
ucuccuauggcaggaaga

SEQ ID NO: 4004930 - RNA, 20 nt, Human immunodeficiency virus 1 (HIV-1)
ucucugguuagaccagaucu

SEQ ID NO: 4004931 - RNA, 22 nt, Human immunodeficiency virus 1 (HIV-1)
ucugagccugggagcucucugg

SEQ ID NO: 4004932 - RNA, 20 nt, Human immunodeficiency virus 1 (HIV-1)
ugcacugauuugaagaauga

SEQ ID NO: 4004933 - RNA, 18 nt, Human immunodeficiency virus 1 (HIV-1)
ugcgauucuaaaauguaa

SEQ ID NO: 4004934 - RNA, 16 nt, Human immunodeficiency virus 1 (HIV-1)
uggcccgagagcugca

SEQ ID NO: 4004935 - RNA, 11 nt, Human immunodeficiency virus 1 (HIV-1)
ugggaagcccu

SEQ ID NO: 4004936 - RNA, 16 nt, Human immunodeficiency virus 1 (HIV-1)
ugggcaaguuugugga

SEQ ID NO: 4004937 - RNA, 22 nt, Human immunodeficiency virus 1 (HIV-1)
uggggcaccaugcuccuuggga

SEQ ID NO: 4004938 - RNA, 19 nt, Human immunodeficiency virus 1 (HIV-1)
uuaauaaaaaaggaaaagg

SEQ ID NO: 4004939 - RNA, 23 nt, Human immunodeficiency virus 1 (HIV-1)
uugccuguacugggucucucugg

SEQ ID NO: 4004940 - RNA, 18 nt, Human immunodeficiency virus 1 (HIV-1)
uugugccuggcuagaagc

SEQ ID NO: 4004941 - RNA, 21 nt, Human immunodeficiency virus 1 (HIV-1)
uuuccagggaggcguggccug

SEQ ID NO: 4004942 - RNA, 13 nt, Human immunodeficiency virus 1 (HIV-1)
uuugacagccgcc

SEQ ID NO: 4004943 - RNA, 19 nt, Human immunodeficiency virus 1 (HIV-1)
uuuguggaauugguuuaac

SEQ ID NO: 4004944 - RNA, 16 nt, Human immunodeficiency virus 1 (HIV-1)
aaaauaaccacagaaa

SEQ ID NO: 4004945 - RNA, 16 nt, Human immunodeficiency virus 1 (HIV-1)
aaaggauuuugcuaua

SEQ ID NO: 4004946 - RNA, 16 nt, Human immunodeficiency virus 1 (HIV-1)
aaaguaagacaguaug

SEQ ID NO: 4004947 - RNA, 20 nt, Human immunodeficiency virus 1 (HIV-1)
aaaugucagcuaaaaggaga

SEQ ID NO: 4004948 - RNA, 17 nt, Human immunodeficiency virus 1 (HIV-1)
aaauuuguacagagaug

SEQ ID NO: 4004949 - RNA, 18 nt, Human immunodeficiency virus 1 (HIV-1)
aacauuaguagagcaaaa

SEQ ID NO: 4004950 - RNA, 20 nt, Human immunodeficiency virus 1 (HIV-1)
gaacaucuuaagacagcagu

SEQ ID NO: 4004951 - RNA, 21 nt, Human immunodeficiency virus 1 (HIV-1)
gaacccacugcuuaagccuca

SEQ ID NO: 4004952 - RNA, 14 nt, Human immunodeficiency virus 1 (HIV-1)
gaacuacacaccag

SEQ ID NO: 4004953 - RNA, 21 nt, Human immunodeficiency virus 1 (HIV-1)
gaacuacacaccagggccagg

SEQ ID NO: 4004954 - RNA, 16 nt, Human immunodeficiency virus 1 (HIV-1)
gaagacuucaggaagu

SEQ ID NO: 4004955 - RNA, 18 nt, Human immunodeficiency virus 1 (HIV-1)
gaauccguauccagagag

SEQ ID NO: 4004956 - RNA, 10 nt, Human immunodeficiency virus 1 (HIV-1)
gacagagaaa

SEQ ID NO: 4004957 - RNA, 13 nt, Human immunodeficiency virus 1 (HIV-1)
gagagauaaaaaa

SEQ ID NO: 4004958 - RNA, 14 nt, Human immunodeficiency virus 1 (HIV-1)
gagcaaucacaagu

SEQ ID NO: 4004959 - RNA, 18 nt, Human immunodeficiency virus 1 (HIV-1)
gagucaggaacuaaagaa

SEQ ID NO: 4004960 - RNA, 22 nt, Human immunodeficiency virus 1 (HIV-1)
gcaaucacaaguagcaauacag

SEQ ID NO: 4004961 - RNA, 22 nt, Human immunodeficiency virus 1 (HIV-1)
gcagcaucucgagaccuggaaa

SEQ ID NO: 4004962 - RNA, 16 nt, Human immunodeficiency virus 1 (HIV-1)
gccacuuuuuaaaaga

SEQ ID NO: 4004963 - RNA, 14 nt, Human immunodeficiency virus 1 (HIV-1)
gcuagcaaauuaag

SEQ ID NO: 4004964 - RNA, 19 nt, Human immunodeficiency virus 1 (HIV-1)
ggaacagauuuggaaucac

SEQ ID NO: 4004965 - RNA, 23 nt, Human immunodeficiency virus 1 (HIV-1)
ggagaaauaucagcacuugugga

SEQ ID NO: 4004966 - RNA, 19 nt, Human immunodeficiency virus 1 (HIV-1)
ggauggagugggacagaga

SEQ ID NO: 4004967 - RNA, 14 nt, Human immunodeficiency virus 1 (HIV-1)
gguucuugggagca

SEQ ID NO: 4004968 - RNA, 15 nt, Human immunodeficiency virus 1 (HIV-1)
gucagauauccacug

SEQ ID NO: 4004969 - RNA, 22 nt, Human immunodeficiency virus 1 (HIV-1)
guccaaagguauccuuugagcc

SEQ ID NO: 4004970 - RNA, 18 nt, Human immunodeficiency virus 1 (HIV-1)
gugccucuucagcuacca

SEQ ID NO: 4004971 - RNA, 14 nt, Human immunodeficiency virus 1 (HIV-1)
guggaucuaccaca

SEQ ID NO: 4004972 - RNA, 17 nt, Human immunodeficiency virus 1 (HIV-1)
guuacucgacagaggag

SEQ ID NO: 4004973 - RNA, 12 nt, Human immunodeficiency virus 1 (HIV-1)
guugcucuggaa

SEQ ID NO: 4004974 - RNA, 19 nt, Human immunodeficiency virus 1 (HIV-1)
uaaacugcccauacaaaag

SEQ ID NO: 4004975 - RNA, 15 nt, Human immunodeficiency virus 1 (HIV-1)
uaacaauuacacaag

SEQ ID NO: 4004976 - RNA, 20 nt, Human immunodeficiency virus 1 (HIV-1)
uaauagaggaagacaaaaag

SEQ ID NO: 4004977 - RNA, 17 nt, Human immunodeficiency virus 1 (HIV-1)
uacacccugugagccug

SEQ ID NO: 4004978 - RNA, 22 nt, Human immunodeficiency virus 1 (HIV-1)
uacacuccuuaauugaagaauc

SEQ ID NO: 4004979 - RNA, 16 nt, Human immunodeficiency virus 1 (HIV-1)
uagcacccaccaaggc

SEQ ID NO: 4004980 - RNA, 13 nt, Human immunodeficiency virus 1 (HIV-1)
uagugcagcagca

SEQ ID NO: 4004981 - RNA, 19 nt, Human immunodeficiency virus 1 (HIV-1)
uaucagcacuuguggagau

SEQ ID NO: 4004982 - RNA, 23 nt, Human immunodeficiency virus 1 (HIV-1)
ucaaauauuacagggcugcuauu

SEQ ID NO: 4004983 - RNA, 23 nt, Human immunodeficiency virus 1 (HIV-1)
uggcaggaagaagcggagacagc

SEQ ID NO: 4004984 - RNA, 11 nt, Human immunodeficiency virus 1 (HIV-1)
ugggagcagca

SEQ ID NO: 4004985 - RNA, 21 nt, Human immunodeficiency virus 1 (HIV-1)
uuaagaccaaugacuuacaag

SEQ ID NO: 4004986 - RNA, 20 nt, Human immunodeficiency virus 1 (HIV-1)
uuacucgacagaggagagca

SEQ ID NO: 4004987 - RNA, 11 nt, Human immunodeficiency virus 1 (HIV-1)
uuaggaaaagc

SEQ ID NO: 4004988 - RNA, 12 nt, Human immunodeficiency virus 1 (HIV-1)
uugggagcagca

SEQ ID NO: 4004989 - RNA, 20 nt, Human immunodeficiency virus 1 (HIV-1)
uugucugguauagugcagca

SEQ ID NO: 4004990 - RNA, 23 nt, Human immunodeficiency virus 1 (HIV-1)
aaaaguagugugauuggauggcc

SEQ ID NO: 4004991 - RNA, 22 nt, Human immunodeficiency virus 1 (HIV-1)
aaaguaggaaaagcaauguaug

SEQ ID NO: 4004992 - RNA, 16 nt, Human immunodeficiency virus 1 (HIV-1)
aacagauggcagguga

SEQ ID NO: 4004993 - RNA, 18 nt, Human immunodeficiency virus 1 (HIV-1)
aagaauaagacagggcuu

SEQ ID NO: 4004994 - RNA, 22 nt, Human immunodeficiency virus 1 (HIV-1)
aagggacuuuccgcuggggacu

SEQ ID NO: 4004995 - RNA, 20 nt, Human immunodeficiency virus 1 (HIV-1)
aauagacagguuaauugaua

SEQ ID NO: 4004996 - RNA, 14 nt, Human immunodeficiency virus 1 (HIV-1)
aaucaaauaauaga

SEQ ID NO: 4004997 - RNA, 22 nt, Human immunodeficiency virus 1 (HIV-1)
acaauuacacaagcuuaauaca

SEQ ID NO: 4004998 - RNA, 12 nt, Human immunodeficiency virus 1 (HIV-1)
acacaaugaaug

SEQ ID NO: 4004999 - RNA, 16 nt, Human immunodeficiency virus 1 (HIV-1)
acacaccagggccagg

SEQ ID NO: 4005000 - RNA, 13 nt, Human immunodeficiency virus 1 (HIV-1)
acacuuuaaaaca

SEQ ID NO: 4005001 - RNA, 19 nt, Human immunodeficiency virus 1 (HIV-1)
acagaaaauuuuaacaugu

SEQ ID NO: 4005002 - RNA, 22 nt, Human immunodeficiency virus 1 (HIV-1)
acagacauacaaacuaaagaau

SEQ ID NO: 4005003 - RNA, 16 nt, Human immunodeficiency virus 1 (HIV-1)
acaguauuagaagaaa

SEQ ID NO: 4005004 - RNA, 16 nt, Human immunodeficiency virus 1 (HIV-1)
acauaccuagaagaau

SEQ ID NO: 4005005 - RNA, 17 nt, Human immunodeficiency virus 1 (HIV-1)
accaauagauaaugaua

SEQ ID NO: 4005006 - RNA, 20 nt, Human immunodeficiency virus 1 (HIV-1)
accagcuauaaguugacaag

SEQ ID NO: 4005007 - RNA, 20 nt, Human immunodeficiency virus 1 (HIV-1)
gagccugggagcucucuggc

SEQ ID NO: 4005008 - RNA, 17 nt, Human immunodeficiency virus 1 (HIV-1)
gcaagaauccuggcugu

SEQ ID NO: 4005009 - RNA, 11 nt, Human immunodeficiency virus 1 (HIV-1)
gcaccacugcu

SEQ ID NO: 4005010 - RNA, 23 nt, Human immunodeficiency virus 1 (HIV-1)
gcacccaccaaggcaaagagaag

SEQ ID NO: 4005011 - RNA, 14 nt, Human immunodeficiency virus 1 (HIV-1)
gcaggggaaagaau

SEQ ID NO: 4005012 - RNA, 17 nt, Human immunodeficiency virus 1 (HIV-1)
gccacuuuuuaaaagaa

SEQ ID NO: 4005013 - RNA, 17 nt, Human immunodeficiency virus 1 (HIV-1)
gcuauaagauggguggc

SEQ ID NO: 4005014 - RNA, 22 nt, Human immunodeficiency virus 1 (HIV-1)
ggaaggaagcaaccaccacucu

SEQ ID NO: 4005015 - RNA, 17 nt, Human immunodeficiency virus 1 (HIV-1)
ggagcagcaggaagcac

SEQ ID NO: 4005016 - RNA, 23 nt, Human immunodeficiency virus 1 (HIV-1)
ggcuaacuagggaacccacugcu

SEQ ID NO: 4005017 - RNA, 21 nt, Human immunodeficiency virus 1 (HIV-1)
gggacgaucugcggagccugu

SEQ ID NO: 4005018 - RNA, 16 nt, Human immunodeficiency virus 1 (HIV-1)
acccugugagccugca

SEQ ID NO: 4005019 - RNA, 15 nt, Human immunodeficiency virus 1 (HIV-1)
acgagcugagccagc

SEQ ID NO: 4005020 - RNA, 16 nt, Human immunodeficiency virus 1 (HIV-1)
acuggcagaaaacaga

SEQ ID NO: 4005021 - RNA, 13 nt, Human immunodeficiency virus 1 (HIV-1)
agaaaaauugugg

SEQ ID NO: 4005022 - RNA, 18 nt, Human immunodeficiency virus 1 (HIV-1)
agaacagaugcaugagga

SEQ ID NO: 4005023 - RNA, 13 nt, Human immunodeficiency virus 1 (HIV-1)
agaagcacaagag

SEQ ID NO: 4005024 - RNA, 19 nt, Human immunodeficiency virus 1 (HIV-1)
agaaucuaugaauaaagaa

SEQ ID NO: 4005025 - RNA, 16 nt, Human immunodeficiency virus 1 (HIV-1)
agacaguggcaaugag

SEQ ID NO: 4005026 - RNA, 13 nt, Human immunodeficiency virus 1 (HIV-1)
agacuucaggaag

SEQ ID NO: 4005027 - RNA, 15 nt, Human immunodeficiency virus 1 (HIV-1)
agaucugagccuggg

SEQ ID NO: 4005028 - RNA, 19 nt, Human immunodeficiency virus 1 (HIV-1)
agcaaauuaagagaacaau

SEQ ID NO: 4005029 - RNA, 13 nt, Human immunodeficiency virus 1 (HIV-1)
agcaagaaaagaa

SEQ ID NO: 4005030 - RNA, 18 nt, Human immunodeficiency virus 1 (HIV-1)
agcaagaaauggagccag

SEQ ID NO: 4005031 - RNA, 18 nt, Human immunodeficiency virus 1 (HIV-1)
agcaggacauaacaaggu

SEQ ID NO: 4005032 - RNA, 21 nt, Human immunodeficiency virus 1 (HIV-1)
agcccucaaauauugguggaa

SEQ ID NO: 4005033 - RNA, 13 nt, Human immunodeficiency virus 1 (HIV-1)
agccucaauaaag

SEQ ID NO: 4005034 - RNA, 17 nt, Human immunodeficiency virus 1 (HIV-1)
aggaaaauaugcaagaa

SEQ ID NO: 4005035 - RNA, 14 nt, Human immunodeficiency virus 1 (HIV-1)
aggcguggccuggg

SEQ ID NO: 4005036 - RNA, 21 nt, Human immunodeficiency virus 1 (HIV-1)
agggauuauggaaaacagaug

SEQ ID NO: 4005037 - RNA, 23 nt, Human immunodeficiency virus 1 (HIV-1)
agggucaaauaacacugaaggaa

SEQ ID NO: 4005038 - RNA, 18 nt, Human immunodeficiency virus 1 (HIV-1)
aguaaacauaguaacaga

SEQ ID NO: 4005039 - RNA, 17 nt, Human immunodeficiency virus 1 (HIV-1)
aguacuucaagaacugc

SEQ ID NO: 4005040 - RNA, 18 nt, Human immunodeficiency virus 1 (HIV-1)
aguagugccaagaagaaa

SEQ ID NO: 4005041 - RNA, 23 nt, Human immunodeficiency virus 1 (HIV-1)
aguccgagaucuucagaccugga

SEQ ID NO: 4005042 - RNA, 19 nt, Human immunodeficiency virus 1 (HIV-1)
agugugauuggauggccua

SEQ ID NO: 4005043 - RNA, 13 nt, Human immunodeficiency virus 1 (HIV-1)
auaauagcaauag

SEQ ID NO: 4005044 - RNA, 15 nt, Human immunodeficiency virus 1 (HIV-1)
auacaagaaaaagaa

SEQ ID NO: 4005045 - RNA, 16 nt, Human immunodeficiency virus 1 (HIV-1)
auagaauggaggaaaa

SEQ ID NO: 4005046 - RNA, 14 nt, Human immunodeficiency virus 1 (HIV-1)
auauccacugaccu

SEQ ID NO: 4005047 - RNA, 23 nt, Human immunodeficiency virus 1 (HIV-1)
auauccacugaccuuuggauggu

SEQ ID NO: 4005048 - RNA, 15 nt, Human immunodeficiency virus 1 (HIV-1)
auauuaagacaaaga

SEQ ID NO: 4005049 - RNA, 17 nt, Human immunodeficiency virus 1 (HIV-1)
aucuccuauggcaggaa

SEQ ID NO: 4005050 - RNA, 15 nt, Human immunodeficiency virus 1 (HIV-1)
aucucgagaccugga

SEQ ID NO: 4005051 - RNA, 17 nt, Human immunodeficiency virus 1 (HIV-1)
augagagugaaggagaa

SEQ ID NO: 4005052 - RNA, 17 nt, Human immunodeficiency virus 1 (HIV-1)
augaguuugccaggaag

SEQ ID NO: 4005053 - RNA, 15 nt, Human immunodeficiency virus 1 (HIV-1)
augauaauggagaaa

SEQ ID NO: 4005054 - RNA, 16 nt, Human immunodeficiency virus 1 (HIV-1)
augcuaguuggaguaa

SEQ ID NO: 4005055 - RNA, 13 nt, Human immunodeficiency virus 1 (HIV-1)
auggaaaacagau

SEQ ID NO: 4005056 - RNA, 19 nt, Human immunodeficiency virus 1 (HIV-1)
augggauggaugacccgga

SEQ ID NO: 4005057 - RNA, 15 nt, Human immunodeficiency virus 1 (HIV-1)
auuaagagaacaauu

SEQ ID NO: 4005058 - RNA, 18 nt, Human immunodeficiency virus 1 (HIV-1)
caaggcaaagagaagagu

SEQ ID NO: 4005059 - RNA, 14 nt, Human immunodeficiency virus 1 (HIV-1)
caauuuuaaaagaa

SEQ ID NO: 4005060 - RNA, 12 nt, Human immunodeficiency virus 1 (HIV-1)
cacaagaggagg

SEQ ID NO: 4005061 - RNA, 16 nt, Human immunodeficiency virus 1 (HIV-1)
cacaauuuuaaaagaa

SEQ ID NO: 4005062 - RNA, 12 nt, Human immunodeficiency virus 1 (HIV-1)
caccagcaauau

SEQ ID NO: 4005063 - RNA, 14 nt, Human immunodeficiency virus 1 (HIV-1)
cacccugugagccu

SEQ ID NO: 4005064 - RNA, 16 nt, Human immunodeficiency virus 1 (HIV-1)
cagacccaccucccaa

SEQ ID NO: 4005065 - RNA, 20 nt, Human immunodeficiency virus 1 (HIV-1)
cagagaacuuaauaagagaa

SEQ ID NO: 4005066 - RNA, 14 nt, Human immunodeficiency virus 1 (HIV-1)
cagagaggaccagg

SEQ ID NO: 4005067 - RNA, 13 nt, Human immunodeficiency virus 1 (HIV-1)
cagaucugagccu

SEQ ID NO: 4005068 - RNA, 14 nt, Human immunodeficiency virus 1 (HIV-1)
cagcaagaaaagaa

SEQ ID NO: 4005069 - RNA, 17 nt, Human immunodeficiency virus 1 (HIV-1)
cagcuaccaccgcuuga

SEQ ID NO: 4005070 - RNA, 20 nt, Human immunodeficiency virus 1 (HIV-1)
cagggaggcguggccugggc

SEQ ID NO: 4005071 - RNA, 16 nt, Human immunodeficiency virus 1 (HIV-1)
cagggcuuggaaagga

SEQ ID NO: 4005072 - RNA, 16 nt, Human immunodeficiency virus 1 (HIV-1)
caguauuggagucagg

SEQ ID NO: 4005073 - RNA, 19 nt, Human immunodeficiency virus 1 (HIV-1)
caguggacaaauuagaugu

SEQ ID NO: 4005074 - RNA, 13 nt, Human immunodeficiency virus 1 (HIV-1)
ccagaucugagcc

SEQ ID NO: 4005075 - RNA, 20 nt, Human immunodeficiency virus 1 (HIV-1)
ccagcagcagauaggguggg

SEQ ID NO: 4005076 - RNA, 13 nt, Human immunodeficiency virus 1 (HIV-1)
ccauuuucagaau

SEQ ID NO: 4005077 - RNA, 18 nt, Human immunodeficiency virus 1 (HIV-1)
ccgcuugagagacuuacu

SEQ ID NO: 4005078 - RNA, 21 nt, Human immunodeficiency virus 1 (HIV-1)
cugaacaucuuaagacagcag

SEQ ID NO: 4005079 - RNA, 12 nt, Human immunodeficiency virus 1 (HIV-1)
cugagccuggga

SEQ ID NO: 4005080 - RNA, 14 nt, Human immunodeficiency virus 1 (HIV-1)
cugagccugggagc

SEQ ID NO: 4005081 - RNA, 14 nt, Human immunodeficiency virus 1 (HIV-1)
cugcuauuaacaag

SEQ ID NO: 4005082 - RNA, 16 nt, Human immunodeficiency virus 1 (HIV-1)
cugcugacaucgagcu

SEQ ID NO: 4005083 - RNA, 12 nt, Human immunodeficiency virus 1 (HIV-1)
cugcuuaagccu

SEQ ID NO: 4005084 - RNA, 20 nt, Human immunodeficiency virus 1 (HIV-1)
cugggacgaucugcggagcc

SEQ ID NO: 4005085 - RNA, 22 nt, Human immunodeficiency virus 1 (HIV-1)
cugguuagaccagaucugagcc

SEQ ID NO: 4005086 - RNA, 15 nt, Human immunodeficiency virus 1 (HIV-1)
cuguacugggucucu

SEQ ID NO: 4005087 - RNA, 19 nt, Human immunodeficiency virus 1 (HIV-1)
cuuggcacuuaucugggac

SEQ ID NO: 4005088 - RNA, 22 nt, Human immunodeficiency virus 1 (HIV-1)
gaaaaggggggacuggaagggc

SEQ ID NO: 4005089 - RNA, 16 nt, Human immunodeficiency virus 1 (HIV-1)
gaagccauaauaagaa

SEQ ID NO: 4005090 - RNA, 23 nt, Human immunodeficiency virus 1 (HIV-1)
gaauaggcguuacucgacagagg

SEQ ID NO: 4005091 - RNA, 16 nt, Human immunodeficiency virus 1 (HIV-1)
gaccagaucugagccu

SEQ ID NO: 4005092 - RNA, 20 nt, Human immunodeficiency virus 1 (HIV-1)
gacuagagcccuggaagcau

SEQ ID NO: 4005093 - RNA, 17 nt, Human immunodeficiency virus 1 (HIV-1)
gagcccucagauccugc

SEQ ID NO: 4005094 - RNA, 18 nt, Human immunodeficiency virus 1 (HIV-1)
ugugcuuccacagggaug

SEQ ID NO: 4005095 - RNA, 13 nt, Human immunodeficiency virus 1 (HIV-1)
uuacccagggauu

SEQ ID NO: 4005096 - RNA, 18 nt, Human immunodeficiency virus 1 (HIV-1)
uuguaacgaggauugugg

SEQ ID NO: 4005097 - RNA, 15 nt, Human immunodeficiency virus 1 (HIV-1)
uuuagaaggaaaagu

SEQ ID NO: 4005098 - RNA, 22 nt, Human immunodeficiency virus 1 (HIV-1)
uuuuagaggagcuuaagaauga

SEQ ID NO: 4005099 - RNA, 13 nt, Human immunodeficiency virus 1 [HIV-1]
aaaaagagcagug

SEQ ID NO: 4005100 - RNA, 17 nt, Human immunodeficiency virus 1 [HIV-1]
aaaaagagcagugggaa

SEQ ID NO: 4005101 - RNA, 12 nt, Human immunodeficiency virus 1 [HIV-1]
aaacaauacaua

SEQ ID NO: 4005102 - RNA, 20 nt, Human immunodeficiency virus 1 [HIV-1]
aaacagauagcuagcaaauu

SEQ ID NO: 4005103 - RNA, 20 nt, Human immunodeficiency virus 1 [HIV-1]
aaaccauaauaguacagcug

SEQ ID NO: 4005104 - RNA, 17 nt, Human immunodeficiency virus 1 [HIV-1]
aaagaaaaaagacagua

SEQ ID NO: 4005105 - RNA, 16 nt, Human immunodeficiency virus 1 [HIV-1]
aaagaaaaaaucagua

SEQ ID NO: 4005106 - RNA, 18 nt, Human immunodeficiency virus 1 [HIV-1]
aaagcuauagguacagua

SEQ ID NO: 4005107 - RNA, 15 nt, Human immunodeficiency virus 1 [HIV-1]
aaauaugcaagaaug

SEQ ID NO: 4005108 - RNA, 16 nt, Human immunodeficiency virus 1 [HIV-1]
aacacaucuguagaaa

SEQ ID NO: 4005109 - RNA, 16 nt, Human immunodeficiency virus 1 [HIV-1]
aacaccaaaaaagaua

SEQ ID NO: 4005110 - RNA, 20 nt, Human immunodeficiency virus 1 [HIV-1]
aacagacauacaaacuaaag

SEQ ID NO: 4005111 - RNA, 15 nt, Human immunodeficiency virus 1 [HIV-1]
aaccagcaagaaaag

SEQ ID NO: 4005112 - RNA, 13 nt, Human immunodeficiency virus 1 [HIV-1]
aacuaaagaauag

SEQ ID NO: 4005113 - RNA, 12 nt, Human immunodeficiency virus 1 [HIV-1]
aagaacugcuga

SEQ ID NO: 4005114 - RNA, 13 nt, Human immunodeficiency virus 1 [HIV-1]
aagaagguggaga

SEQ ID NO: 4005115 - RNA, 17 nt, Human immunodeficiency virus 1 [HIV-1]
aagacaagauauccuug

SEQ ID NO: 4005116 - RNA, 15 nt, Human immunodeficiency virus 1 [HIV-1]
aaggaucaacagcuc

SEQ ID NO: 4005117 - RNA, 19 nt, Human immunodeficiency virus 1 [HIV-1]
aaguuuguuucauaacaaa

SEQ ID NO: 4005118 - RNA, 16 nt, Human immunodeficiency virus 1 [HIV-1]
aauagugcuguuagcu

SEQ ID NO: 4005119 - RNA, 14 nt, Human immunodeficiency virus 1 [HIV-1]
aauuacaaaaacaa

SEQ ID NO: 4005120 - RNA, 14 nt, Human immunodeficiency virus 1 [HIV-1]
acaaauuauaaaca

SEQ ID NO: 4005121 - RNA, 24 nt, Human immunodeficiency virus 1 [HIV-1]
acaaauuauaaacauguggcagaa

SEQ ID NO: 4005122 - RNA, 16 nt, Human immunodeficiency virus 1 [HIV-1]
acaacuguuuaauagu

SEQ ID NO: 4005123 - RNA, 16 nt, Human immunodeficiency virus 1 [HIV-1]
acacauuuagaaggaa

SEQ ID NO: 4005124 - RNA, 23 nt, Human immunodeficiency virus 1 [HIV-1]
acaccagggauuagauaucagua

SEQ ID NO: 4005125 - RNA, 13 nt, Human immunodeficiency virus 1 [HIV-1]
acacccugugagc

SEQ ID NO: 4005126 - RNA, 14 nt, Human immunodeficiency virus 1 [HIV-1]
acacccugugagcc

SEQ ID NO: 4005127 - RNA, 22 nt, Human immunodeficiency virus 1 [HIV-1]
acaccucagguaccuuuaagac

SEQ ID NO: 4005128 - RNA, 21 nt, Human immunodeficiency virus 1 [HIV-1]
acagaagaaaaaauaaaagca

SEQ ID NO: 4005129 - RNA, 17 nt, Human immunodeficiency virus 1 [HIV-1]
acagauccauucgauua

SEQ ID NO: 4005130 - RNA, 20 nt, Human immunodeficiency virus 1 [HIV-1]
acaucagaaagaaccuccau

SEQ ID NO: 4005131 - RNA, 18 nt, Human immunodeficiency virus 1 [HIV-1]
accaaaaaagauaaagcc

SEQ ID NO: 4005132 - RNA, 21 nt, Human immunodeficiency virus 1 [HIV-1]
accaaugcugcuugugccugg

SEQ ID NO: 4005133 - RNA, 13 nt, Human immunodeficiency virus 1 [HIV-1]
accagcaagaaaa

SEQ ID NO: 4005134 - RNA, 23 nt, Human immunodeficiency virus 1 [HIV-1]
accagcuuguuacacccugugag

SEQ ID NO: 4005135 - RNA, 12 nt, Human immunodeficiency virus 1 [HIV-1]
accaguugagcc

SEQ ID NO: 4005136 - RNA, 18 nt, Human immunodeficiency virus 1 [HIV-1]
accauaauaguacagcug

SEQ ID NO: 4005137 - RNA, 14 nt, Human immunodeficiency virus 1 [HIV-1]
acccauaguaggag

SEQ ID NO: 4005138 - RNA, 19 nt, Human immunodeficiency virus 1 [HIV-1]
accuggauggagugggaca

SEQ ID NO: 4005139 - RNA, 23 nt, Human immunodeficiency virus 1 [HIV-1]
acuaaauggagaaaauuaguaga

SEQ ID NO: 4005140 - RNA, 20 nt, Human immunodeficiency virus 1 [HIV-1]
acuagagcuuuuagaggagc

SEQ ID NO: 4005141 - RNA, 17 nt, Human immunodeficiency virus 1 [HIV-1]
acucgacagaggagagc

SEQ ID NO: 4005142 - RNA, 20 nt, Human immunodeficiency virus 1 [HIV-1]
acugcccauacaaaaggaaa

SEQ ID NO: 4005143 - RNA, 14 nt, Human immunodeficiency virus 1 [HIV-1]
acugcugacaucga

SEQ ID NO: 4005144 - RNA, 23 nt, Human immunodeficiency virus 1 [HIV-1]
acugcuuaagccucaauaaagcu

SEQ ID NO: 4005145 - RNA, 19 nt, Human immunodeficiency virus 1 [HIV-1]
acuuucuauagugaauaga

SEQ ID NO: 4005146 - RNA, 13 nt, Human immunodeficiency virus 1 [HIV-1]
agaagaauaagac

SEQ ID NO: 4005147 - RNA, 16 nt, Human immunodeficiency virus 1 [HIV-1]
agaagaguggugcaga

SEQ ID NO: 4005148 - RNA, 21 nt, Human immunodeficiency virus 1 [HIV-1]
agaauggaggaaaaagagaua

SEQ ID NO: 4005149 - RNA, 16 nt, Human immunodeficiency virus 1 [HIV-1]
agaccagaucugagcc

SEQ ID NO: 4005150 - RNA, 20 nt, Human immunodeficiency virus 1 [HIV-1]
agaccagaucugagccuggg

SEQ ID NO: 4005151 - RNA, 15 nt, Human immunodeficiency virus 1 [HIV-1]
agacuaauagaaaga

SEQ ID NO: 4005152 - RNA, 22 nt, Human immunodeficiency virus 1 [HIV-1]
agacuguaccaguaaaauuaaa

SEQ ID NO: 4005153 - RNA, 18 nt, Human immunodeficiency virus 1 [HIV-1]
agagaaaaaagagcagug

SEQ ID NO: 4005154 - RNA, 16 nt, Human immunodeficiency virus 1 [HIV-1]
agagagaaaaaagagc

SEQ ID NO: 4005155 - RNA, 15 nt, Human immunodeficiency virus 1 [HIV-1]
agagcaagaaaugga

SEQ ID NO: 4005156 - RNA, 21 nt, Human immunodeficiency virus 1 [HIV-1]
agagcaguuaauaaaaaagga

SEQ ID NO: 4005157 - RNA, 18 nt, Human immunodeficiency virus 1 [HIV-1]
agaggccaauaaaggaga

SEQ ID NO: 4005158 - RNA, 21 nt, Human immunodeficiency virus 1 [HIV-1]
agaggccaauaaaggagagaa

SEQ ID NO: 4005159 - RNA, 13 nt, Human immunodeficiency virus 1 [HIV-1]
agaucugagccug

SEQ ID NO: 4005160 - RNA, 17 nt, Human immunodeficiency virus 1 [HIV-1]
agauuuacccagggauu

SEQ ID NO: 4005161 - RNA, 19 nt, Human immunodeficiency virus 1 [HIV-1]
agcaagaaauggagccagu

SEQ ID NO: 4005162 - RNA, 16 nt, Human immunodeficiency virus 1 [HIV-1]
agcaauaauaauagca

SEQ ID NO: 4005163 - RNA, 21 nt, Human immunodeficiency virus 1 [HIV-1]
agcaauacagcagcuaccaau

SEQ ID NO: 4005164 - RNA, 17 nt, Human immunodeficiency virus 1 [HIV-1]
agcagaagacaguggca

SEQ ID NO: 4005165 - RNA, 15 nt, Human immunodeficiency virus 1 [HIV-1]
agcagauaggguggg

SEQ ID NO: 4005166 - RNA, 21 nt, Human immunodeficiency virus 1 [HIV-1]
agcagcaucucgagaccugga

SEQ ID NO: 4005167 - RNA, 19 nt, Human immunodeficiency virus 1 [HIV-1]
agccucaauaaagcuugcc

SEQ ID NO: 4005168 - RNA, 17 nt, Human immunodeficiency virus 1 [HIV-1]
agccugggagcucucug

SEQ ID NO: 4005169 - RNA, 19 nt, Human immunodeficiency virus 1 [HIV-1]
agccugggagcucucuggc

SEQ ID NO: 4005170 - RNA, 20 nt, Human immunodeficiency virus 1 [HIV-1]
agccugggagcucucuggcu

SEQ ID NO: 4005171 - RNA, 22 nt, Human immunodeficiency virus 1 [HIV-1]
agccugugccucuucagcuacc

SEQ ID NO: 4005172 - RNA, 15 nt, Human immunodeficiency virus 1 [HIV-1]
agcuaguaccaguug

SEQ ID NO: 4005173 - RNA, 21 nt, Human immunodeficiency virus 1 [HIV-1]
agcuaguaccaguugagccag

SEQ ID NO: 4005174 - RNA, 20 nt, Human immunodeficiency virus 1 [HIV-1]
aggaaaauaugcaagaauga

SEQ ID NO: 4005175 - RNA, 14 nt, Human immunodeficiency virus 1 [HIV-1]
aggccaauaaagga

SEQ ID NO: 4005176 - RNA, 14 nt, Human immunodeficiency virus 1 [HIV-1]
agggauggaaagga

SEQ ID NO: 4005177 - RNA, 15 nt, Human immunodeficiency virus 1 [HIV-1]
agggcuuggaaagga

SEQ ID NO: 4005178 - RNA, 19 nt, Human immunodeficiency virus 1 [HIV-1]
aggggcaguaguaauacaa

SEQ ID NO: 4005179 - RNA, 13 nt, Human immunodeficiency virus 1 [HIV-1]
aguaaaaacaaua

SEQ ID NO: 4005180 - RNA, 16 nt, Human immunodeficiency virus 1 [HIV-1]
aguacauguaaugcaa

SEQ ID NO: 4005181 - RNA, 24 nt, Human immunodeficiency virus 1 [HIV-1]
agucaggaacuaaagaauagugcu

SEQ ID NO: 4005182 - RNA, 11 nt, Human immunodeficiency virus 1 [HIV-1]
agugaauagag

SEQ ID NO: 4005183 - RNA, 14 nt, Human immunodeficiency virus 1 [HIV-1]
aguggcgagcccuc

SEQ ID NO: 4005184 - RNA, 21 nt, Human immunodeficiency virus 1 [HIV-1]
aaaauaggaaauaugagacaa

SEQ ID NO: 4005185 - RNA, 22 nt, Human immunodeficiency virus 1 [HIV-1]
aaagaauagugcuguuagcuug

SEQ ID NO: 4005186 - RNA, 14 nt, Human immunodeficiency virus 1 [HIV-1]
auaaaaaaggaaaa

SEQ ID NO: 4005187 - RNA, 18 nt, Human immunodeficiency virus 1 [HIV-1]
auaaagaauuaaagaaaa

SEQ ID NO: 4005188 - RNA, 23 nt, Human immunodeficiency virus 1 [HIV-1]
auaaaugucagcuaaaaggagaa

SEQ ID NO: 4005189 - RNA, 13 nt, Human immunodeficiency virus 1 [HIV-1]
auaagcagcugcu

SEQ ID NO: 4005190 - RNA, 14 nt, Human immunodeficiency virus 1 [HIV-1]
auaauaaaacaaua

SEQ ID NO: 4005191 - RNA, 23 nt, Human immunodeficiency virus 1 [HIV-1]
auacagcagcuaccaaugcugcu

SEQ ID NO: 4005192 - RNA, 22 nt, Human immunodeficiency virus 1 [HIV-1]
auagacuaauagaaagagcaga

SEQ ID NO: 4005193 - RNA, 14 nt, Human immunodeficiency virus 1 [HIV-1]
auagugcagcagca

SEQ ID NO: 4005194 - RNA, 20 nt, Human immunodeficiency virus 1 [HIV-1]
auaucagcacuuguggagau

SEQ ID NO: 4005195 - RNA, 11 nt, Human immunodeficiency virus 1 [HIV-1]
aucaaaguaag

SEQ ID NO: 4005196 - RNA, 22 nt, Human immunodeficiency virus 1 [HIV-1]
auccugcauauaagcagcugcu

SEQ ID NO: 4005197 - RNA, 18 nt, Human immunodeficiency virus 1 [HIV-1]
aucuccuauggcaggaag

SEQ ID NO: 4005198 - RNA, 18 nt, Human immunodeficiency virus 1 [HIV-1]
aucuguggacauaaagcu

SEQ ID NO: 4005199 - RNA, 18 nt, Human immunodeficiency virus 1 [HIV-1]
aucuucagaccuggagga

SEQ ID NO: 4005200 - RNA, 18 nt, Human immunodeficiency virus 1 [HIV-1]
augacccggagagagaag

SEQ ID NO: 4005201 - RNA, 16 nt, Human immunodeficiency virus 1 [HIV-1]
augacuuacaaggcag

SEQ ID NO: 4005202 - RNA, 18 nt, Human immunodeficiency virus 1 [HIV-1]
augagagugaaggagaaa

SEQ ID NO: 4005203 - RNA, 16 nt, Human immunodeficiency virus 1 [HIV-1]
auggagaaaggagaga

SEQ ID NO: 4005204 - RNA, 14 nt, Human immunodeficiency virus 1 [HIV-1]
auggagccaguaga

SEQ ID NO: 4005205 - RNA, 15 nt, Human immunodeficiency virus 1 [HIV-1]
auggaggaaaaagag

SEQ ID NO: 4005206 - RNA, 19 nt, Human immunodeficiency virus 1 [HIV-1]
auggagugggacagagaaa

SEQ ID NO: 4005207 - RNA, 21 nt, Human immunodeficiency virus 1 [HIV-1]
auggcagucuagcagaagaag

SEQ ID NO: 4005208 - RNA, 23 nt, Human immunodeficiency virus 1 [HIV-1]
auggguaccagcacacaaaggaa

SEQ ID NO: 4005209 - RNA, 15 nt, Human immunodeficiency virus 1 [HIV-1]
auguggaaaaaugac

SEQ ID NO: 4005210 - RNA, 15 nt, Human immunodeficiency virus 1 [HIV-1]
auguggcagaaagua

SEQ ID NO: 4005211 - RNA, 23 nt, Human immunodeficiency virus 1 [HIV-1]
auucgauuagugaacggauccuu

SEQ ID NO: 4005212 - RNA, 15 nt, Human immunodeficiency virus 1 [HIV-1]
auugacagaagaaaa

SEQ ID NO: 4005213 - RNA, 13 nt, Human immunodeficiency virus 1 [HIV-1]
auuuuaaaagaaa

SEQ ID NO: 4005214 - RNA, 20 nt, Human immunodeficiency virus 1 [HIV-1]
caaaaccagcaagaaaagaa

SEQ ID NO: 4005215 - RNA, 22 nt, Human immunodeficiency virus 1 [HIV-1]
caaacuaaagaauuacaaaaac

SEQ ID NO: 4005216 - RNA, 21 nt, Human immunodeficiency virus 1 [HIV-1]
caaaugucagcacaguacaau

SEQ ID NO: 4005217 - RNA, 14 nt, Human immunodeficiency virus 1 [HIV-1]
caagagaugguggu

SEQ ID NO: 4005218 - RNA, 13 nt, Human immunodeficiency virus 1 [HIV-1]
caaguagacagga

SEQ ID NO: 4005219 - RNA, 17 nt, Human immunodeficiency virus 1 [HIV-1]
caaucacaaguagcaau

SEQ ID NO: 4005220 - RNA, 15 nt, Human immunodeficiency virus 1 [HIV-1]
cacaaguagcaauac

SEQ ID NO: 4005221 - RNA, 22 nt, Human immunodeficiency virus 1 [HIV-1]
cacacgaccuggauggaguggg

SEQ ID NO: 4005222 - RNA, 18 nt, Human immunodeficiency virus 1 [HIV-1]
caccaaggcaaagagaag

SEQ ID NO: 4005223 - RNA, 18 nt, Human immunodeficiency virus 1 [HIV-1]
cacccugugagccugcau

SEQ ID NO: 4005224 - RNA, 16 nt, Human immunodeficiency virus 1 [HIV-1]
cacuaugggcgcagcc

SEQ ID NO: 4005225 - RNA, 14 nt, Human immunodeficiency virus 1 [HIV-1]
cagaaauacagaag

SEQ ID NO: 4005226 - RNA, 18 nt, Human immunodeficiency virus 1 [HIV-1]
cagaacuacacaccaggg

SEQ ID NO: 4005227 - RNA, 22 nt, Human immunodeficiency virus 1 [HIV-1]
cagacaaaaaacaucagaaaga

SEQ ID NO: 4005228 - RNA, 21 nt, Human immunodeficiency virus 1 [HIV-1]
cagaggagagcaagaaaugga

SEQ ID NO: 4005229 - RNA, 19 nt, Human immunodeficiency virus 1 [HIV-1]
cagauagggugggagcagc

SEQ ID NO: 4005230 - RNA, 19 nt, Human immunodeficiency virus 1 [HIV-1]
cagauccugcauauaagca

SEQ ID NO: 4005231 - RNA, 21 nt, Human immunodeficiency virus 1 [HIV-1]
cagcagauagggugggagcag

SEQ ID NO: 4005232 - RNA, 12 nt, Human immunodeficiency virus 1 [HIV-1]
cagcagcagaac

SEQ ID NO: 4005233 - RNA, 19 nt, Human immunodeficiency virus 1 [HIV-1]
cagcuaccaccgcuugaga

SEQ ID NO: 4005234 - RNA, 23 nt, Human immunodeficiency virus 1 [HIV-1]
cagcuuguuacacccugugagcc

SEQ ID NO: 4005235 - RNA, 19 nt, Human immunodeficiency virus 1 [HIV-1]
caggaacuaaagaauagug

SEQ ID NO: 4005236 - RNA, 14 nt, Human immunodeficiency virus 1 [HIV-1]
caggaguggaagcc

SEQ ID NO: 4005237 - RNA, 21 nt, Human immunodeficiency virus 1 [HIV-1]
caggauauguuacuaauagag

SEQ ID NO: 4005238 - RNA, 20 nt, Human immunodeficiency virus 1 [HIV-1]
cagggaggcguggccugggc

SEQ ID NO: 4005239 - RNA, 22 nt, Human immunodeficiency virus 1 [HIV-1]
cagggagucuccauagaaugga

SEQ ID NO: 4005240 - RNA, 18 nt, Human immunodeficiency virus 1 [HIV-1]
caguaaguaguacaugua

SEQ ID NO: 4005241 - RNA, 21 nt, Human immunodeficiency virus 1 [HIV-1]
caguauuugccauaaagaaaa

SEQ ID NO: 4005242 - RNA, 17 nt, Human immunodeficiency virus 1 [HIV-1]
cagucuagcagaagaag

SEQ ID NO: 4005243 - RNA, 15 nt, Human immunodeficiency virus 1 [HIV-1]
caguugagccagaua

SEQ ID NO: 4005244 - RNA, 15 nt, Human immunodeficiency virus 1 [HIV-1]
cauaccuagaagaau

SEQ ID NO: 4005245 - RNA, 17 nt, Human immunodeficiency virus 1 [HIV-1]
caucacguggcccgaga

SEQ ID NO: 4005246 - RNA, 18 nt, Human immunodeficiency virus 1 [HIV-1]
ccaaagcacuaacagaag

SEQ ID NO: 4005247 - RNA, 18 nt, Human immunodeficiency virus 1 [HIV-1]
ccaaccccgaggggaccc

SEQ ID NO: 4005248 - RNA, 19 nt, Human immunodeficiency virus 1 [HIV-1]
ccaaugcugcuugugccug

SEQ ID NO: 4005249 - RNA, 16 nt, Human immunodeficiency virus 1 [HIV-1]
ccacagagggagccac

SEQ ID NO: 4005250 - RNA, 15 nt, Human immunodeficiency virus 1 [HIV-1]
ccagaucugagccug

SEQ ID NO: 4005251 - RNA, 22 nt, Human immunodeficiency virus 1 [HIV-1]
ccagcuuguuacacccugugag

SEQ ID NO: 4005252 - RNA, 15 nt, Human immunodeficiency virus 1 [HIV-1]
cccugauuagcagaa

SEQ ID NO: 4005253 - RNA, 21 nt, Human immunodeficiency virus 1 [HIV-1]
ccuaaaggaucaacagcuccu

SEQ ID NO: 4005254 - RNA, 15 nt, Human immunodeficiency virus 1 [HIV-1]
ccuugaucuguggau

SEQ ID NO: 4005255 - RNA, 12 nt, Human immunodeficiency virus 1 [HIV-1]
cgagaccuggaa

SEQ ID NO: 4005256 - RNA, 24 nt, Human immunodeficiency virus 1 [HIV-1]
cgccuagcauuucaucacguggcc

SEQ ID NO: 4005257 - RNA, 17 nt, Human immunodeficiency virus 1 [HIV-1]
cuaaagaauuacaaaaa

SEQ ID NO: 4005258 - RNA, 18 nt, Human immunodeficiency virus 1 [HIV-1]
cuaauaccaauaguagua

SEQ ID NO: 4005259 - RNA, 20 nt, Human immunodeficiency virus 1 [HIV-1]
cuaauagaggaagacaaaaa

SEQ ID NO: 4005260 - RNA, 21 nt, Human immunodeficiency virus 1 [HIV-1]
cuaauagaggaagacaaaaag

SEQ ID NO: 4005261 - RNA, 22 nt, Human immunodeficiency virus 1 [HIV-1]
cuacuucccugauuagcagaac

SEQ ID NO: 4005262 - RNA, 15 nt, Human immunodeficiency virus 1 [HIV-1]
cuauggcaggaagaa

SEQ ID NO: 4005263 - RNA, 21 nt, Human immunodeficiency virus 1 [HIV-1]
cucaauaaagcuugccuugag

SEQ ID NO: 4005264 - RNA, 16 nt, Human immunodeficiency virus 1 [HIV-1]
cucauccaagaauaag

SEQ ID NO: 4005265 - RNA, 15 nt, Human immunodeficiency virus 1 [HIV-1]
cuccauagaauggag

SEQ ID NO: 4005266 - RNA, 15 nt, Human immunodeficiency virus 1 [HIV-1]
cugagccagcagcag

SEQ ID NO: 4005267 - RNA, 18 nt, Human immunodeficiency virus 1 [HIV-1]
cugagccugggagcucuc

SEQ ID NO: 4005268 - RNA, 16 nt, Human immunodeficiency virus 1 [HIV-1]
cugcauacaggagaaa

SEQ ID NO: 4005269 - RNA, 17 nt, Human immunodeficiency virus 1 [HIV-1]
cugcauauaagcagcug

SEQ ID NO: 4005270 - RNA, 18 nt, Human immunodeficiency virus 1 [HIV-1]
cugcauauaagcagcugc

SEQ ID NO: 4005271 - RNA, 17 nt, Human immunodeficiency virus 1 [HIV-1]
cuggggacuuuccaggg

SEQ ID NO: 4005272 - RNA, 22 nt, Human immunodeficiency virus 1 [HIV-1]
cuguagugcuacagaaaaauug

SEQ ID NO: 4005273 - RNA, 14 nt, Human immunodeficiency virus 1 [HIV-1]
cuguguggaaggaa

SEQ ID NO: 4005274 - RNA, 19 nt, Human immunodeficiency virus 1 [HIV-1]
cuuaagccucaauaaagcu

SEQ ID NO: 4005275 - RNA, 16 nt, Human immunodeficiency virus 1 [HIV-1]
aaagcuugccuugagu

SEQ ID NO: 4005276 - RNA, 14 nt, Human immunodeficiency virus 1 [HIV-1]
aaaguaagacagua

SEQ ID NO: 4005277 - RNA, 14 nt, Human immunodeficiency virus 1 [HIV-1]
aaaguaguaaaaau

SEQ ID NO: 4005278 - RNA, 21 nt, Human immunodeficiency virus 1 [HIV-1]
aaagugcacugauuugaagaa

SEQ ID NO: 4005279 - RNA, 15 nt, Human immunodeficiency virus 1 [HIV-1]
aaauauuacagggcu

SEQ ID NO: 4005280 - RNA, 13 nt, Human immunodeficiency virus 1 [HIV-1]
aaaucucuggaac

SEQ ID NO: 4005281 - RNA, 15 nt, Human immunodeficiency virus 1 [HIV-1]
aaaugucagcuaaaa

SEQ ID NO: 4005282 - RNA, 16 nt, Human immunodeficiency virus 1 [HIV-1]
aaauuaagagaacaau

SEQ ID NO: 4005283 - RNA, 17 nt, Human immunodeficiency virus 1 [HIV-1]
aacaagaauuauuggaa

SEQ ID NO: 4005284 - RNA, 14 nt, Human immunodeficiency virus 1 [HIV-1]
aacacugaaggaag

SEQ ID NO: 4005285 - RNA, 18 nt, Human immunodeficiency virus 1 [HIV-1]
aacacuuuaaaacagaua

SEQ ID NO: 4005286 - RNA, 16 nt, Human immunodeficiency virus 1 [HIV-1]
aacauguggcagaaag

SEQ ID NO: 4005287 - RNA, 19 nt, Human immunodeficiency virus 1 [HIV-1]
aagaguggugcagagagaa

SEQ ID NO: 4005288 - RNA, 12 nt, Human immunodeficiency virus 1 [HIV-1]
aagcagcugcuu

SEQ ID NO: 4005289 - RNA, 16 nt, Human immunodeficiency virus 1 [HIV-1]
aagcauccaggaaguc

SEQ ID NO: 4005290 - RNA, 20 nt, Human immunodeficiency virus 1 [HIV-1]
aaguuuguggaauugguuua

SEQ ID NO: 4005291 - RNA, 16 nt, Human immunodeficiency virus 1 [HIV-1]
aauacuuggcacuagc

SEQ ID NO: 4005292 - RNA, 17 nt, Human immunodeficiency virus 1 [HIV-1]
aauagcagaaauacaga

SEQ ID NO: 4005293 - RNA, 21 nt, Human immunodeficiency virus 1 [HIV-1]
aauuaagagaacaauuuggaa

SEQ ID NO: 4005294 - RNA, 12 nt, Human immunodeficiency virus 1 [HIV-1]
acaauuggagaa

SEQ ID NO: 4005295 - RNA, 13 nt, Human immunodeficiency virus 1 [HIV-1]
acaccagcuuguu

SEQ ID NO: 4005296 - RNA, 18 nt, Human immunodeficiency virus 1 [HIV-1]
acacccugugagccugca

SEQ ID NO: 4005297 - RNA, 13 nt, Human immunodeficiency virus 1 [HIV-1]
acagauagcuagc

SEQ ID NO: 4005298 - RNA, 22 nt, Human immunodeficiency virus 1 [HIV-1]
acagauaggguuauagaaguag

SEQ ID NO: 4005299 - RNA, 23 nt, Human immunodeficiency virus 1 [HIV-1]
acagggagacuaaauuaggaaaa

SEQ ID NO: 4005300 - RNA, 14 nt, Human immunodeficiency virus 1 [HIV-1]
acauagcagaauag

SEQ ID NO: 4005301 - RNA, 14 nt, Human immunodeficiency virus 1 [HIV-1]
acaugguagaacag

SEQ ID NO: 4005302 - RNA, 19 nt, Human immunodeficiency virus 1 [HIV-1]
acauuguaacauuaguaga

SEQ ID NO: 4005303 - RNA, 18 nt, Human immunodeficiency virus 1 [HIV-1]
accagaucugagccuggg

SEQ ID NO: 4005304 - RNA, 14 nt, Human immunodeficiency virus 1 [HIV-1]
accuaguauaaaca

SEQ ID NO: 4005305 - RNA, 19 nt, Human immunodeficiency virus 1 [HIV-1]
accuguguggaaggaagca

SEQ ID NO: 4005306 - RNA, 17 nt, Human immunodeficiency virus 1 [HIV-1]
acgaucugcggagccug

SEQ ID NO: 4005307 - RNA, 17 nt, Human immunodeficiency virus 1 [HIV-1]
acuaaauggagaaaauu

SEQ ID NO: 4005308 - RNA, 19 nt, Human immunodeficiency virus 1 [HIV-1]
acuaacagaaguaauacca

SEQ ID NO: 4005309 - RNA, 16 nt, Human immunodeficiency virus 1 [HIV-1]
acuacacaccagggcc

SEQ ID NO: 4005310 - RNA, 19 nt, Human immunodeficiency virus 1 [HIV-1]
acucccaaagaagacaaga

SEQ ID NO: 4005311 - RNA, 20 nt, Human immunodeficiency virus 1 [HIV-1]
acuguaagggaaagaaugag

SEQ ID NO: 4005312 - RNA, 13 nt, Human immunodeficiency virus 1 [HIV-1]
acuuuuuaaaaga

SEQ ID NO: 4005313 - RNA, 22 nt, Human immunodeficiency virus 1 [HIV-1]
agaaaauuuuaacauguggaaa

SEQ ID NO: 4005314 - RNA, 14 nt, Human immunodeficiency virus 1 [HIV-1]
agaaagagcagaag

SEQ ID NO: 4005315 - RNA, 20 nt, Human immunodeficiency virus 1 [HIV-1]
agaaaggagagauaaaaaac

SEQ ID NO: 4005316 - RNA, 19 nt, Human immunodeficiency virus 1 [HIV-1]
agaaauuguaacgcacagu

SEQ ID NO: 4005317 - RNA, 18 nt, Human immunodeficiency virus 1 [HIV-1]
agaaauuuguacagagau

SEQ ID NO: 4005318 - RNA, 13 nt, Human immunodeficiency virus 1 [HIV-1]
agaacaccagcuu

SEQ ID NO: 4005319 - RNA, 16 nt, Human immunodeficiency virus 1 [HIV-1]
agaacaccagcuuguu

SEQ ID NO: 4005320 - RNA, 17 nt, Human immunodeficiency virus 1 [HIV-1]
agaaucuaugaauaaag

SEQ ID NO: 4005321 - RNA, 20 nt, Human immunodeficiency virus 1 [HIV-1]
agaaugagacgagcugagcc

SEQ ID NO: 4005322 - RNA, 18 nt, Human immunodeficiency virus 1 [HIV-1]
agaaugauacuaauacca

SEQ ID NO: 4005323 - RNA, 18 nt, Human immunodeficiency virus 1 [HIV-1]
agacaguaugaucagaua

SEQ ID NO: 4005324 - RNA, 17 nt, Human immunodeficiency virus 1 [HIV-1]
agaccagaucugagccu

SEQ ID NO: 4005325 - RNA, 19 nt, Human immunodeficiency virus 1 [HIV-1]
agacccaacaacaauacaa

SEQ ID NO: 4005326 - RNA, 14 nt, Human immunodeficiency virus 1 [HIV-1]
agacuuaauagcag

SEQ ID NO: 4005327 - RNA, 16 nt, Human immunodeficiency virus 1 [HIV-1]
agagaggaccagggag

SEQ ID NO: 4005328 - RNA, 15 nt, Human immunodeficiency virus 1 [HIV-1]
agagcaguuaauaaa

SEQ ID NO: 4005329 - RNA, 16 nt, Human immunodeficiency virus 1 [HIV-1]
agagguaaggugcaga

SEQ ID NO: 4005330 - RNA, 23 nt, Human immunodeficiency virus 1 [HIV-1]
agauagaagaggccaauaaagga

SEQ ID NO: 4005331 - RNA, 19 nt, Human immunodeficiency virus 1 [HIV-1]
agauccugcauauaagcag

SEQ ID NO: 4005332 - RNA, 14 nt, Human immunodeficiency virus 1 [HIV-1]
agcaaaagaaauag

SEQ ID NO: 4005333 - RNA, 17 nt, Human immunodeficiency virus 1 [HIV-1]
agcaauaauaauagcaa

SEQ ID NO: 4005334 - RNA, 15 nt, Human immunodeficiency virus 1 [HIV-1]
agcaauacagcagcu

SEQ ID NO: 4005335 - RNA, 18 nt, Human immunodeficiency virus 1 [HIV-1]
agcaauacagcagcuacc

SEQ ID NO: 4005336 - RNA, 13 nt, Human immunodeficiency virus 1 [HIV-1]
agcacuaacagaa

SEQ ID NO: 4005337 - RNA, 14 nt, Human immunodeficiency virus 1 [HIV-1]
agcagaacuacaca

SEQ ID NO: 4005338 - RNA, 16 nt, Human immunodeficiency virus 1 [HIV-1]
agcagaugauacagua

SEQ ID NO: 4005339 - RNA, 21 nt, Human immunodeficiency virus 1 [HIV-1]
agcaguuaauaaaaaaggaaa

SEQ ID NO: 4005340 - RNA, 18 nt, Human immunodeficiency virus 1 [HIV-1]
agccuuuuagaaaacaaa

SEQ ID NO: 4005341 - RNA, 16 nt, Human immunodeficiency virus 1 [HIV-1]
agcugagccagcagca

SEQ ID NO: 4005342 - RNA, 18 nt, Human immunodeficiency virus 1 [HIV-1]
agcugcuuuuugccugua

SEQ ID NO: 4005343 - RNA, 17 nt, Human immunodeficiency virus 1 [HIV-1]
aggaaauaugagacaag

SEQ ID NO: 4005344 - RNA, 18 nt, Human immunodeficiency virus 1 [HIV-1]
aggaagaagcggagacag

SEQ ID NO: 4005345 - RNA, 18 nt, Human immunodeficiency virus 1 [HIV-1]
aggagauaugagggacaa

SEQ ID NO: 4005346 - RNA, 15 nt, Human immunodeficiency virus 1 [HIV-1]
aggaggagauaugag

SEQ ID NO: 4005347 - RNA, 16 nt, Human immunodeficiency virus 1 [HIV-1]
aggaggaggagguggg

SEQ ID NO: 4005348 - RNA, 15 nt, Human immunodeficiency virus 1 [HIV-1]
aggaggggacccaga

SEQ ID NO: 4005349 - RNA, 17 nt, Human immunodeficiency virus 1 [HIV-1]
aggaucaacagcuccug

SEQ ID NO: 4005350 - RNA, 18 nt, Human immunodeficiency virus 1 [HIV-1]
aggccaauaaaggagaga

SEQ ID NO: 4005351 - RNA, 19 nt, Human immunodeficiency virus 1 [HIV-1]
agggaaagaaugagacgag

SEQ ID NO: 4005352 - RNA, 21 nt, Human immunodeficiency virus 1 [HIV-1]
agggagucuccauagaaugga

SEQ ID NO: 4005353 - RNA, 16 nt, Human immunodeficiency virus 1 [HIV-1]
agggccacagagggag

SEQ ID NO: 4005354 - RNA, 14 nt, Human immunodeficiency virus 1 [HIV-1]
aggguuauagaagu

SEQ ID NO: 4005355 - RNA, 18 nt, Human immunodeficiency virus 1 [HIV-1]
agguaaggugcagaaaga

SEQ ID NO: 4005356 - RNA, 21 nt, Human immunodeficiency virus 1 [HIV-1]
aggugcagaaagaauaugcau

SEQ ID NO: 4005357 - RNA, 18 nt, Human immunodeficiency virus 1 [HIV-1]
aguaauaaaucucuggaa

SEQ ID NO: 4005358 - RNA, 18 nt, Human immunodeficiency virus 1 [HIV-1]
aguaaucauagaauauag

SEQ ID NO: 4005359 - RNA, 18 nt, Human immunodeficiency virus 1 [HIV-1]
aguaccaguugagccaga

SEQ ID NO: 4005360 - RNA, 16 nt, Human immunodeficiency virus 1 [HIV-1]
aguagcaauacagcag

SEQ ID NO: 4005361 - RNA, 23 nt, Human immunodeficiency virus 1 [HIV-1]
agugccaagaagaaaagcaaaga

SEQ ID NO: 4005362 - RNA, 16 nt, Human immunodeficiency virus 1 [HIV-1]
aguggaagccauaaua

SEQ ID NO: 4005363 - RNA, 22 nt, Human immunodeficiency virus 1 [HIV-1]
aguggcaaugagagugaaggag

SEQ ID NO: 4005364 - RNA, 22 nt, Human immunodeficiency virus 1 [HIV-1]
aguggcgagcccucagauccug

SEQ ID NO: 4005365 - RNA, 13 nt, Human immunodeficiency virus 1 [HIV-1]
caugguggacaga

SEQ ID NO: 4005366 - RNA, 14 nt, Human immunodeficiency virus 1 [HIV-1]
cauguggaaaaaug

SEQ ID NO: 4005367 - RNA, 16 nt, Human immunodeficiency virus 1 [HIV-1]
ccaagaugaacaugag

SEQ ID NO: 4005368 - RNA, 21 nt, Human immunodeficiency virus 1 [HIV-1]
ccagaucugagccugggagcu

SEQ ID NO: 4005369 - RNA, 23 nt, Human immunodeficiency virus 1 [HIV-1]
ccagaucugagccugggagcucu

SEQ ID NO: 4005370 - RNA, 20 nt, Human immunodeficiency virus 1 [HIV-1]
ccaguggauauauagaagca

SEQ ID NO: 4005371 - RNA, 21 nt, Human immunodeficiency virus 1 [HIV-1]
ccauccugauaaauggacagu

SEQ ID NO: 4005372 - RNA, 18 nt, Human immunodeficiency virus 1 [HIV-1]
cccugugagccugcaugg

SEQ ID NO: 4005373 - RNA, 17 nt, Human immunodeficiency virus 1 [HIV-1]
ccgaaggaauagaagaa

SEQ ID NO: 4005374 - RNA, 19 nt, Human immunodeficiency virus 1 [HIV-1]
ccgcaggguuaaaaaagaa

SEQ ID NO: 4005375 - RNA, 18 nt, Human immunodeficiency virus 1 [HIV-1]
ccucaggaggggacccag

SEQ ID NO: 4005376 - RNA, 23 nt, Human immunodeficiency virus 1 [HIV-1]
ccuggggauuugggguugcucug

SEQ ID NO: 4005377 - RNA, 13 nt, Human immunodeficiency virus 1 [HIV-1]
ccugugagccugc

SEQ ID NO: 4005378 - RNA, 16 nt, Human immunodeficiency virus 1 [HIV-1]
ccugugagccugcaug

SEQ ID NO: 4005379 - RNA, 21 nt, Human immunodeficiency virus 1 [HIV-1]
ccuuggguucuugggagcagc

SEQ ID NO: 4005380 - RNA, 20 nt, Human immunodeficiency virus 1 [HIV-1]
cgaagagcucaucagaacag

SEQ ID NO: 4005381 - RNA, 22 nt, Human immunodeficiency virus 1 [HIV-1]
cgaucugcggagccugugccuc

SEQ ID NO: 4005382 - RNA, 17 nt, Human immunodeficiency virus 1 [HIV-1]
cgggaaucaagcaggaa

SEQ ID NO: 4005383 - RNA, 17 nt, Human immunodeficiency virus 1 [HIV-1]
cguggcccgagagcugc

SEQ ID NO: 4005384 - RNA, 13 nt, Human immunodeficiency virus 1 [HIV-1]
cguggccugggcg

SEQ ID NO: 4005385 - RNA, 17 nt, Human immunodeficiency virus 1 [HIV-1]
cuaaugauguaaaacaa

SEQ ID NO: 4005386 - RNA, 14 nt, Human immunodeficiency virus 1 [HIV-1]
cuacaguauuggag

SEQ ID NO: 4005387 - RNA, 22 nt, Human immunodeficiency virus 1 [HIV-1]
cuaccaaugcugcuugugccug

SEQ ID NO: 4005388 - RNA, 19 nt, Human immunodeficiency virus 1 [HIV-1]
cuauugaggcgcaacagca

SEQ ID NO: 4005389 - RNA, 21 nt, Human immunodeficiency virus 1 [HIV-1]
cucagauccugcauauaagca

SEQ ID NO: 4005390 - RNA, 15 nt, Human immunodeficiency virus 1 [HIV-1]
cucccaucaguggac

SEQ ID NO: 4005391 - RNA, 14 nt, Human immunodeficiency virus 1 [HIV-1]
cugacaauggcagc

SEQ ID NO: 4005392 - RNA, 20 nt, Human immunodeficiency virus 1 [HIV-1]
cugacacaacaaaucagaag

SEQ ID NO: 4005393 - RNA, 15 nt, Human immunodeficiency virus 1 [HIV-1]
cugaggggacagaua

SEQ ID NO: 4005394 - RNA, 13 nt, Human immunodeficiency virus 1 [HIV-1]
cugcuauaagaaa

SEQ ID NO: 4005395 - RNA, 18 nt, Human immunodeficiency virus 1 [HIV-1]
cuggauggagugggacag

SEQ ID NO: 4005396 - RNA, 15 nt, Human immunodeficiency virus 1 [HIV-1]
cuggcuagaagcaca

SEQ ID NO: 4005397 - RNA, 16 nt, Human immunodeficiency virus 1 [HIV-1]
cuggcuguggaaagau

SEQ ID NO: 4005398 - RNA, 17 nt, Human immunodeficiency virus 1 [HIV-1]
cuguagaucuuagccac

SEQ ID NO: 4005399 - RNA, 18 nt, Human immunodeficiency virus 1 [HIV-1]
cuguaguagcaaaagaaa

SEQ ID NO: 4005400 - RNA, 17 nt, Human immunodeficiency virus 1 [HIV-1]
cuuaagccucaauaaag

SEQ ID NO: 4005401 - RNA, 19 nt, Human immunodeficiency virus 1 [HIV-1]
cuuaccacaccagacaaaa

SEQ ID NO: 4005402 - RNA, 21 nt, Human immunodeficiency virus 1 [HIV-1]
cuuaccacaccagacaaaaaa

SEQ ID NO: 4005403 - RNA, 17 nt, Human immunodeficiency virus 1 [HIV-1]
cuuggcacuagcagcau

SEQ ID NO: 4005404 - RNA, 19 nt, Human immunodeficiency virus 1 [HIV-1]
cuuuuaaaauuagcaggaa

SEQ ID NO: 4005405 - RNA, 20 nt, Human immunodeficiency virus 1 [HIV-1]
cuuuuaaaauuagcaggaag

SEQ ID NO: 4005406 - RNA, 17 nt, Human immunodeficiency virus 1 [HIV-1]
gaaaaggggggacugga

SEQ ID NO: 4005407 - RNA, 18 nt, Human immunodeficiency virus 1 [HIV-1]
gaaaaguuuaguaaaaca

SEQ ID NO: 4005408 - RNA, 18 nt, Human immunodeficiency virus 1 [HIV-1]
gaaaguaggaaaagcaau

SEQ ID NO: 4005409 - RNA, 20 nt, Human immunodeficiency virus 1 [HIV-1]
gaaauaugagacaagcacau

SEQ ID NO: 4005410 - RNA, 13 nt, Human immunodeficiency virus 1 [HIV-1]
gaacccacugcuu

SEQ ID NO: 4005411 - RNA, 18 nt, Human immunodeficiency virus 1 [HIV-1]
gaacccacugcuuaagcc

SEQ ID NO: 4005412 - RNA, 16 nt, Human immunodeficiency virus 1 [HIV-1]
gaagacaguggcaaug

SEQ ID NO: 4005413 - RNA, 24 nt, Human immunodeficiency virus 1 [HIV-1]
gaagucagccuaaaacugcuugua

SEQ ID NO: 4005414 - RNA, 20 nt, Human immunodeficiency virus 1 [HIV-1]
gacaggaugaggauuagaac

SEQ ID NO: 4005415 - RNA, 16 nt, Human immunodeficiency virus 1 [HIV-1]
gacuuacaaggcagcu

SEQ ID NO: 4005416 - RNA, 20 nt, Human immunodeficiency virus 1 [HIV-1]
gacuuacucuugauuguaac

SEQ ID NO: 4005417 - RNA, 16 nt, Human immunodeficiency virus 1 [HIV-1]
gacuuuccgcugggga

SEQ ID NO: 4005418 - RNA, 14 nt, Human immunodeficiency virus 1 [HIV-1]
gagaaaggagagau

SEQ ID NO: 4005419 - RNA, 13 nt, Human immunodeficiency virus 1 [HIV-1]
gagacgagcugag

SEQ ID NO: 4005420 - RNA, 20 nt, Human immunodeficiency virus 1 [HIV-1]
gagcagcaucucgagaccug

SEQ ID NO: 4005421 - RNA, 15 nt, Human immunodeficiency virus 1 [HIV-1]
gagcauuuguuacaa

SEQ ID NO: 4005422 - RNA, 16 nt, Human immunodeficiency virus 1 [HIV-1]
gagccugcaugggaug

SEQ ID NO: 4005423 - RNA, 13 nt, Human immunodeficiency virus 1 [HIV-1]
gagcugagccagc

SEQ ID NO: 4005424 - RNA, 13 nt, Human immunodeficiency virus 1 [HIV-1]
gaggcguggccug

SEQ ID NO: 4005425 - RNA, 22 nt, Human immunodeficiency virus 1 [HIV-1]
gauaaagccaccuuugccuagu

SEQ ID NO: 4005426 - RNA, 20 nt, Human immunodeficiency virus 1 [HIV-1]
gauccugcauauaagcagcu

SEQ ID NO: 4005427 - RNA, 22 nt, Human immunodeficiency virus 1 [HIV-1]
gauccuuggcacuuaucuggga

SEQ ID NO: 4005428 - RNA, 15 nt, Human immunodeficiency virus 1 [HIV-1]
gaucugagccuggga

SEQ ID NO: 4005429 - RNA, 17 nt, Human immunodeficiency virus 1 [HIV-1]
gauggaugacccggaga

SEQ ID NO: 4005430 - RNA, 13 nt, Human immunodeficiency virus 1 [HIV-1]
gauuagcagaacu

SEQ ID NO: 4005431 - RNA, 18 nt, Human immunodeficiency virus 1 [HIV-1]
gcaaaaccagcaagaaaa

SEQ ID NO: 4005432 - RNA, 15 nt, Human immunodeficiency virus 1 [HIV-1]
gcaaauuaagagaac

SEQ ID NO: 4005433 - RNA, 16 nt, Human immunodeficiency virus 1 [HIV-1]
gcaauaauaauagcaa

SEQ ID NO: 4005434 - RNA, 20 nt, Human immunodeficiency virus 1 [HIV-1]
gcacaagaggaggaggaggu

SEQ ID NO: 4005435 - RNA, 13 nt, Human immunodeficiency virus 1 [HIV-1]
gcaccacugcugu

SEQ ID NO: 4005436 - RNA, 22 nt, Human immunodeficiency virus 1 [HIV-1]
gcacugauuugaagaaugauac

SEQ ID NO: 4005437 - RNA, 17 nt, Human immunodeficiency virus 1 [HIV-1]
gcacuuaucugggacga

SEQ ID NO: 4005438 - RNA, 16 nt, Human immunodeficiency virus 1 [HIV-1]
gcaggaagaagcggag

SEQ ID NO: 4005439 - RNA, 15 nt, Human immunodeficiency virus 1 [HIV-1]
gccaugcauggacaa

SEQ ID NO: 4005440 - RNA, 13 nt, Human immunodeficiency virus 1 [HIV-1]
gccucaauaaagc

SEQ ID NO: 4005441 - RNA, 20 nt, Human immunodeficiency virus 1 [HIV-1]
gccucaauaaagcuugccuu

SEQ ID NO: 4005442 - RNA, 16 nt, Human immunodeficiency virus 1 [HIV-1]
gccugggagcucucug

SEQ ID NO: 4005443 - RNA, 20 nt, Human immunodeficiency virus 1 [HIV-1]
gcugcuuuuugccuguacug

SEQ ID NO: 4005444 - RNA, 22 nt, Human immunodeficiency virus 1 [HIV-1]
gcuugcucaaugccacagccau

SEQ ID NO: 4005445 - RNA, 22 nt, Human immunodeficiency virus 1 [HIV-1]
ggaaaggugaaggggcaguagu

SEQ ID NO: 4005446 - RNA, 14 nt, Human immunodeficiency virus 1 [HIV-1]
ggaacaagccccag

SEQ ID NO: 4005447 - RNA, 23 nt, Human immunodeficiency virus 1 [HIV-1]
ggaauaacacuuuaaaacagaua

SEQ ID NO: 4005448 - RNA, 16 nt, Human immunodeficiency virus 1 [HIV-1]
ggagaaaggagagaua

SEQ ID NO: 4005449 - RNA, 12 nt, Human immunodeficiency virus 1 [HIV-1]
ggagucaggaac

SEQ ID NO: 4005450 - RNA, 14 nt, Human immunodeficiency virus 1 [HIV-1]
ggagugggacagag

SEQ ID NO: 4005451 - RNA, 22 nt, Human immunodeficiency virus 1 [HIV-1]
ggaucuaccacacacaaggcua

SEQ ID NO: 4005452 - RNA, 16 nt, Human immunodeficiency virus 1 [HIV-1]
ggcaaugagagugaag

SEQ ID NO: 4005453 - RNA, 14 nt, Human immunodeficiency virus 1 [HIV-1]
ggccaauggacaua

SEQ ID NO: 4005454 - RNA, 13 nt, Human immunodeficiency virus 1 [HIV-1]
ggccauugacaga

SEQ ID NO: 4005455 - RNA, 15 nt, Human immunodeficiency virus 1 [HIV-1]
ggcccgagagcugca

SEQ ID NO: 4005456 - RNA, 16 nt, Human immunodeficiency virus 1 [HIV-1]
ggcgcagccucaauga

SEQ ID NO: 4005457 - RNA, 22 nt, Human immunodeficiency virus 1 [HIV-1]
gggacgaucugcggagccugug

SEQ ID NO: 4005458 - RNA, 13 nt, Human immunodeficiency virus 1 [HIV-1]
ggugggagcagca

SEQ ID NO: 4005459 - RNA, 17 nt, Human immunodeficiency virus 1 [HIV-1]
guaccaguugagccaga

SEQ ID NO: 4005460 - RNA, 20 nt, Human immunodeficiency virus 1 [HIV-1]
guagacauaauagcaacaga

SEQ ID NO: 4005461 - RNA, 13 nt, Human immunodeficiency virus 1 [HIV-1]
guagacuguaguc

SEQ ID NO: 4005462 - RNA, 19 nt, Human immunodeficiency virus 1 [HIV-1]
guagcaauacagcagcuac

SEQ ID NO: 4005463 - RNA, 17 nt, Human immunodeficiency virus 1 [HIV-1]
guagcugaggggacaga

SEQ ID NO: 4005464 - RNA, 15 nt, Human immunodeficiency virus 1 [HIV-1]
guaugccccucccau

SEQ ID NO: 4005465 - RNA, 16 nt, Human immunodeficiency virus 1 [HIV-1]
guggaacuucugggac

SEQ ID NO: 4005466 - RNA, 23 nt, Human immunodeficiency virus 1 [HIV-1]
guggccugggcgggacuggggag

SEQ ID NO: 4005467 - RNA, 13 nt, Human immunodeficiency virus 1 [HIV-1]
gugguccauagua

SEQ ID NO: 4005468 - RNA, 17 nt, Human immunodeficiency virus 1 [HIV-1]
guuagcuugcucaaugc

SEQ ID NO: 4005469 - RNA, 18 nt, Human immunodeficiency virus 1 [HIV-1]
uaaaaaagaaaaaaucag

SEQ ID NO: 4005470 - RNA, 15 nt, Human immunodeficiency virus 1 [HIV-1]
uaaaauuaaagccag

SEQ ID NO: 4005471 - RNA, 23 nt, Human immunodeficiency virus 1 [HIV-1]
uaaaauuauucauaaugauagua

SEQ ID NO: 4005472 - RNA, 18 nt, Human immunodeficiency virus 1 [HIV-1]
uaaaguaguaaaaauuga

SEQ ID NO: 4005473 - RNA, 18 nt, Human immunodeficiency virus 1 [HIV-1]
uaaaucucuggaacagau

SEQ ID NO: 4005474 - RNA, 20 nt, Human immunodeficiency virus 1 [HIV-1]
uaacaaauuggcugugguau

SEQ ID NO: 4005475 - RNA, 16 nt, Human immunodeficiency virus 1 [HIV-1]
uaacauuaguagagca

SEQ ID NO: 4005476 - RNA, 15 nt, Human immunodeficiency virus 1 [HIV-1]
uaaccacagaaagca

SEQ ID NO: 4005477 - RNA, 12 nt, Human immunodeficiency virus 1 [HIV-1]
uaauaauagcaa

SEQ ID NO: 4005478 - RNA, 16 nt, Human immunodeficiency virus 1 [HIV-1]
uaauuggagagcaaug

SEQ ID NO: 4005479 - RNA, 18 nt, Human immunodeficiency virus 1 [HIV-1]
uacuaauaccaauaguag

SEQ ID NO: 4005480 - RNA, 21 nt, Human immunodeficiency virus 1 [HIV-1]
uacuucaagaacugcugacau

SEQ ID NO: 4005481 - RNA, 15 nt, Human immunodeficiency virus 1 [HIV-1]
uagaauauaggaaaa

SEQ ID NO: 4005482 - RNA, 13 nt, Human immunodeficiency virus 1 [HIV-1]
uagaucuuagcca

SEQ ID NO: 4005483 - RNA, 15 nt, Human immunodeficiency virus 1 [HIV-1]
uagcaauacagcagc

SEQ ID NO: 4005484 - RNA, 19 nt, Human immunodeficiency virus 1 [HIV-1]
uagcagaaauacagaagca

SEQ ID NO: 4005485 - RNA, 18 nt, Human immunodeficiency virus 1 [HIV-1]
uaguacaaggagcuugua

SEQ ID NO: 4005486 - RNA, 16 nt, Human immunodeficiency virus 1 [HIV-1]
uaguagcaaaagaaau

SEQ ID NO: 4005487 - RNA, 13 nt, Human immunodeficiency virus 1 [HIV-1]
uauaaaauuauuc

SEQ ID NO: 4005488 - RNA, 18 nt, Human immunodeficiency virus 1 [HIV-1]
uauaaauauaaaguagua

SEQ ID NO: 4005489 - RNA, 22 nt, Human immunodeficiency virus 1 [HIV-1]
uauccagagaggaccagggaga

SEQ ID NO: 4005490 - RNA, 18 nt, Human immunodeficiency virus 1 [HIV-1]
ucaaagcaguaaguagua

SEQ ID NO: 4005491 - RNA, 18 nt, Human immunodeficiency virus 1 [HIV-1]
ucaagcaggacauaacaa

SEQ ID NO: 4005492 - RNA, 12 nt, Human immunodeficiency virus 1 [HIV-1]
ucacccucccau

SEQ ID NO: 4005493 - RNA, 13 nt, Human immunodeficiency virus 1 [HIV-1]
ucagaacagucag

SEQ ID NO: 4005494 - RNA, 23 nt, Human immunodeficiency virus 1 [HIV-1]
ucagaagacugaguuacaagcaa

SEQ ID NO: 4005495 - RNA, 16 nt, Human immunodeficiency virus 1 [HIV-1]
ucagcacuuguggaga

SEQ ID NO: 4005496 - RNA, 21 nt, Human immunodeficiency virus 1 [HIV-1]
ucaucacguggcccgagagcu

SEQ ID NO: 4005497 - RNA, 13 nt, Human immunodeficiency virus 1 [HIV-1]
uccagucacaccu

SEQ ID NO: 4005498 - RNA, 15 nt, Human immunodeficiency virus 1 [HIV-1]
uccauuuucagaauu

SEQ ID NO: 4005499 - RNA, 20 nt, Human immunodeficiency virus 1 [HIV-1]
ucguuucagacccaccuccc

SEQ ID NO: 4005500 - RNA, 16 nt, Human immunodeficiency virus 1 [HIV-1]
ucucugguuagaccag

SEQ ID NO: 4005501 - RNA, 21 nt, Human immunodeficiency virus 1 [HIV-1]
ugaauugggcaagucagauuu

SEQ ID NO: 4005502 - RNA, 13 nt, Human immunodeficiency virus 1 [HIV-1]
ugagacaagcaca

SEQ ID NO: 4005503 - RNA, 22 nt, Human immunodeficiency virus 1 [HIV-1]
ugagacaagcacauuguaacau

SEQ ID NO: 4005504 - RNA, 14 nt, Human immunodeficiency virus 1 [HIV-1]
ugaggcgcaacagc

SEQ ID NO: 4005505 - RNA, 16 nt, Human immunodeficiency virus 1 [HIV-1]
ugaguuacaagcaauu

SEQ ID NO: 4005506 - RNA, 23 nt, Human immunodeficiency virus 1 [HIV-1]
ugauacuaccagcuauaaguuga

SEQ ID NO: 4005507 - RNA, 22 nt, Human immunodeficiency virus 1 [HIV-1]
ugauagacuaauagaaagagca

SEQ ID NO: 4005508 - RNA, 14 nt, Human immunodeficiency virus 1 [HIV-1]
ugccagaaaaagac

SEQ ID NO: 4005509 - RNA, 14 nt, Human immunodeficiency virus 1 [HIV-1]
ugcuuaagccucaa

SEQ ID NO: 4005510 - RNA, 16 nt, Human immunodeficiency virus 1 [HIV-1]
uggaacuucugggacg

SEQ ID NO: 4005511 - RNA, 20 nt, Human immunodeficiency virus 1 [HIV-1]
uggacaaauuagauguucau

SEQ ID NO: 4005512 - RNA, 16 nt, Human immunodeficiency virus 1 [HIV-1]
uggacauaucaaauuu

SEQ ID NO: 4005513 - RNA, 18 nt, Human immunodeficiency virus 1 [HIV-1]
uggauggugcuacaagcu

SEQ ID NO: 4005514 - RNA, 18 nt, Human immunodeficiency virus 1 [HIV-1]
uggcagaaaacagagaga

SEQ ID NO: 4005515 - RNA, 19 nt, Human immunodeficiency virus 1 [HIV-1]
uggccauugacagaagaaa

SEQ ID NO: 4005516 - RNA, 18 nt, Human immunodeficiency virus 1 [HIV-1]
uggggacuuuccagggag

SEQ ID NO: 4005517 - RNA, 20 nt, Human immunodeficiency virus 1 [HIV-1]
uuaacaagagauggugguaa

SEQ ID NO: 4005518 - RNA, 13 nt, Human immunodeficiency virus 1 [HIV-1]
uuaacauguggaa

SEQ ID NO: 4005519 - RNA, 14 nt, Human immunodeficiency virus 1 [HIV-1]
uuaauaacaccaaa

SEQ ID NO: 4005520 - RNA, 20 nt, Human immunodeficiency virus 1 [HIV-1]
uacagcagcuaccaaugcug

SEQ ID NO: 4005521 - RNA, 21 nt, Human immunodeficiency virus 1 [HIV-1]
uaccaauaguagcaauaguag

SEQ ID NO: 4005522 - RNA, 16 nt, Human immunodeficiency virus 1 [HIV-1]
uaccaguugagccaga

SEQ ID NO: 4005523 - RNA, 20 nt, Human immunodeficiency virus 1 [HIV-1]
uacccagggauuaaaguaag

SEQ ID NO: 4005524 - RNA, 19 nt, Human immunodeficiency virus 1 [HIV-1]
uagaacuggcagaaaacag

SEQ ID NO: 4005525 - RNA, 15 nt, Human immunodeficiency virus 1 [HIV-1]
uagacauaauagcaa

SEQ ID NO: 4005526 - RNA, 18 nt, Human immunodeficiency virus 1 [HIV-1]
uagaccagaucugagccu

SEQ ID NO: 4005527 - RNA, 18 nt, Human immunodeficiency virus 1 [HIV-1]
uagcaaauuaagagaaca

SEQ ID NO: 4005528 - RNA, 13 nt, Human immunodeficiency virus 1 [HIV-1]
uagcagaaauaca

SEQ ID NO: 4005529 - RNA, 15 nt, Human immunodeficiency virus 1 [HIV-1]
uaguaguagcaauaa

SEQ ID NO: 4005530 - RNA, 14 nt, Human immunodeficiency virus 1 [HIV-1]
ucaagcagcuccag

SEQ ID NO: 4005531 - RNA, 19 nt, Human immunodeficiency virus 1 [HIV-1]
ucaaucaaauaauagagca

SEQ ID NO: 4005532 - RNA, 17 nt, Human immunodeficiency virus 1 [HIV-1]
ucaaugacauacagaag

SEQ ID NO: 4005533 - RNA, 17 nt, Human immunodeficiency virus 1 [HIV-1]
ucagacccaccucccaa

SEQ ID NO: 4005534 - RNA, 14 nt, Human immunodeficiency virus 1 [HIV-1]
ucccacuaggggau

SEQ ID NO: 4005535 - RNA, 14 nt, Human immunodeficiency virus 1 [HIV-1]
ucuaaaagaaccag

SEQ ID NO: 4005536 - RNA, 18 nt, Human immunodeficiency virus 1 [HIV-1]
ucuuuaagcaauccucag

SEQ ID NO: 4005537 - RNA, 16 nt, Human immunodeficiency virus 1 [HIV-1]
ugaacaagaauuauug

SEQ ID NO: 4005538 - RNA, 21 nt, Human immunodeficiency virus 1 [HIV-1]
ugacaaguuguaacaccucag

SEQ ID NO: 4005539 - RNA, 17 nt, Human immunodeficiency virus 1 [HIV-1]
ugagacgagcugagcca

SEQ ID NO: 4005540 - RNA, 22 nt, Human immunodeficiency virus 1 [HIV-1]
ugagacgagcugagccagcagc

SEQ ID NO: 4005541 - RNA, 15 nt, Human immunodeficiency virus 1 [HIV-1]
ugagccugggagcuc

SEQ ID NO: 4005542 - RNA, 18 nt, Human immunodeficiency virus 1 [HIV-1]
ugauaauggagaaaggag

SEQ ID NO: 4005543 - RNA, 14 nt, Human immunodeficiency virus 1 [HIV-1]
ugccaccuguagua

SEQ ID NO: 4005544 - RNA, 16 nt, Human immunodeficiency virus 1 [HIV-1]
ugccuggcuagaagca

SEQ ID NO: 4005545 - RNA, 23 nt, Human immunodeficiency virus 1 [HIV-1]
ugcugacaucgagcuugcuacaa

SEQ ID NO: 4005546 - RNA, 11 nt, Human immunodeficiency virus 1 [HIV-1]
ugcugugccuu

SEQ ID NO: 4005547 - RNA, 16 nt, Human immunodeficiency virus 1 [HIV-1]
uggaggaaaaagagau

SEQ ID NO: 4005548 - RNA, 18 nt, Human immunodeficiency virus 1 [HIV-1]
uggcacuuaucugggacg

SEQ ID NO: 4005549 - RNA, 12 nt, Human immunodeficiency virus 1 [HIV-1]
uggccugggcgg

SEQ ID NO: 4005550 - RNA, 15 nt, Human immunodeficiency virus 1 [HIV-1]
uggcgagcccucaga

SEQ ID NO: 4005551 - RNA, 20 nt, Human immunodeficiency virus 1 [HIV-1]
ugggaagcccucaaauauug

SEQ ID NO: 4005552 - RNA, 16 nt, Human immunodeficiency virus 1 [HIV-1]
uguagaucuuagccac

SEQ ID NO: 4005553 - RNA, 15 nt, Human immunodeficiency virus 1 [HIV-1]
uguuagcuugcucaa

SEQ ID NO: 4005554 - RNA, 22 nt, Human immunodeficiency virus 1 [HIV-1]
uguuucauaacaaaagccuuag

SEQ ID NO: 4005555 - RNA, 22 nt, Human immunodeficiency virus 1 [HIV-1]
uuagaacauggaaaaguuuagu

SEQ ID NO: 4005556 - RNA, 20 nt, Human immunodeficiency virus 1 [HIV-1]
aaaacagauagcuagcaaau

SEQ ID NO: 4005557 - RNA, 21 nt, Human immunodeficiency virus 1 [HIV-1]
aaaaccauaauaguacagcug

SEQ ID NO: 4005558 - RNA, 16 nt, Human immunodeficiency virus 1 [HIV-1]
aaaaguuaaacaaugg

SEQ ID NO: 4005559 - RNA, 16 nt, Human immunodeficiency virus 1 [HIV-1]
aaacugcuuguaccaa

SEQ ID NO: 4005560 - RNA, 13 nt, Human immunodeficiency virus 1 [HIV-1]
aaagcuugccuug

SEQ ID NO: 4005561 - RNA, 16 nt, Human immunodeficiency virus 1 [HIV-1]
aagaagaaaagcaaag

SEQ ID NO: 4005562 - RNA, 14 nt, Human immunodeficiency virus 1 [HIV-1]
aaggaccagcaaag

SEQ ID NO: 4005563 - RNA, 16 nt, Human immunodeficiency virus 1 [HIV-1]
aauacaagaaaaagaa

SEQ ID NO: 4005564 - RNA, 14 nt, Human immunodeficiency virus 1 [HIV-1]
aauagaggaagaca

SEQ ID NO: 4005565 - RNA, 18 nt, Human immunodeficiency virus 1 [HIV-1]
aauugauagacuaauaga

SEQ ID NO: 4005566 - RNA, 14 nt, Human immunodeficiency virus 1 [HIV-1]
aauuuuaacaugug

SEQ ID NO: 4005567 - RNA, 15 nt, Human immunodeficiency virus 1 [HIV-1]
acaagcuuaauacac

SEQ ID NO: 4005568 - RNA, 22 nt, Human immunodeficiency virus 1 [HIV-1]
acaauuuggaaauaauaaaaca

SEQ ID NO: 4005569 - RNA, 17 nt, Human immunodeficiency virus 1 [HIV-1]
acaauuuuaaaagaaaa

SEQ ID NO: 4005570 - RNA, 22 nt, Human immunodeficiency virus 1 [HIV-1]
acacaaguagacccugaacuag

SEQ ID NO: 4005571 - RNA, 22 nt, Human immunodeficiency virus 1 [HIV-1]
acacgaccuggauggaguggga

SEQ ID NO: 4005572 - RNA, 15 nt, Human immunodeficiency virus 1 [HIV-1]
acagccauagcagua

SEQ ID NO: 4005573 - RNA, 13 nt, Human immunodeficiency virus 1 [HIV-1]
acaggaccaugua

SEQ ID NO: 4005574 - RNA, 19 nt, Human immunodeficiency virus 1 [HIV-1]
acaggccagacaauuauug

SEQ ID NO: 4005575 - RNA, 16 nt, Human immunodeficiency virus 1 [HIV-1]
acaguacaauguacac

SEQ ID NO: 4005576 - RNA, 22 nt, Human immunodeficiency virus 1 [HIV-1]
acauggaauuaggccaguagua

SEQ ID NO: 4005577 - RNA, 11 nt, Human immunodeficiency virus 1 [HIV-1]
acauguggaaa

SEQ ID NO: 4005578 - RNA, 17 nt, Human immunodeficiency virus 1 [HIV-1]
accaccgcuugagagac

SEQ ID NO: 4005579 - RNA, 20 nt, Human immunodeficiency virus 1 [HIV-1]
accagacaaaaaacaucaga

SEQ ID NO: 4005580 - RNA, 14 nt, Human immunodeficiency virus 1 [HIV-1]
accaguuagagaaa

SEQ ID NO: 4005581 - RNA, 17 nt, Human immunodeficiency virus 1 [HIV-1]
accugccaccuguagua

SEQ ID NO: 4005582 - RNA, 18 nt, Human immunodeficiency virus 1 [HIV-1]
acuaaauuaggaaaagca

SEQ ID NO: 4005583 - RNA, 14 nt, Human immunodeficiency virus 1 [HIV-1]
acucgacagaggag

SEQ ID NO: 4005584 - RNA, 23 nt, Human immunodeficiency virus 1 [HIV-1]
acuguuuaauaguacuugguuua

SEQ ID NO: 4005585 - RNA, 15 nt, Human immunodeficiency virus 1 [HIV-1]
acuuaauaagagaac

SEQ ID NO: 4005586 - RNA, 18 nt, Human immunodeficiency virus 1 [HIV-1]
agaaaagaaugaacaaga

SEQ ID NO: 4005587 - RNA, 22 nt, Human immunodeficiency virus 1 [HIV-1]
agaaaggagagauaaaaaacug

SEQ ID NO: 4005588 - RNA, 15 nt, Human immunodeficiency virus 1 [HIV-1]
agaagaagagguagu

SEQ ID NO: 4005589 - RNA, 20 nt, Human immunodeficiency virus 1 [HIV-1]
agaaguguuagaguggaggu

SEQ ID NO: 4005590 - RNA, 16 nt, Human immunodeficiency virus 1 [HIV-1]
agaauuauuggaauua

SEQ ID NO: 4005591 - RNA, 13 nt, Human immunodeficiency virus 1 [HIV-1]
agacaagcacauu

SEQ ID NO: 4005592 - RNA, 14 nt, Human immunodeficiency virus 1 [HIV-1]
agacauaauagcaa

SEQ ID NO: 4005593 - RNA, 20 nt, Human immunodeficiency virus 1 [HIV-1]
agacauaauagcaacagaca

SEQ ID NO: 4005594 - RNA, 16 nt, Human immunodeficiency virus 1 [HIV-1]
agacauacaaacuaaa

SEQ ID NO: 4005595 - RNA, 15 nt, Human immunodeficiency virus 1 [HIV-1]
agaccagaucugagc

SEQ ID NO: 4005596 - RNA, 22 nt, Human immunodeficiency virus 1 [HIV-1]
agaccagaucugagccugggag

SEQ ID NO: 4005597 - RNA, 16 nt, Human immunodeficiency virus 1 [HIV-1]
agacccaacaacaaua

SEQ ID NO: 4005598 - RNA, 21 nt, Human immunodeficiency virus 1 [HIV-1]
agacgagcugagccagcagca

SEQ ID NO: 4005599 - RNA, 13 nt, Human immunodeficiency virus 1 [HIV-1]
agagaaaaaagag

SEQ ID NO: 4005600 - RNA, 15 nt, Human immunodeficiency virus 1 [HIV-1]
agagaacaccagcuu

SEQ ID NO: 4005601 - RNA, 19 nt, Human immunodeficiency virus 1 [HIV-1]
agaggccaauaaaggagag

SEQ ID NO: 4005602 - RNA, 14 nt, Human immunodeficiency virus 1 [HIV-1]
agagguacauaaug

SEQ ID NO: 4005603 - RNA, 20 nt, Human immunodeficiency virus 1 [HIV-1]
agauauccuugaucugugga

SEQ ID NO: 4005604 - RNA, 16 nt, Human immunodeficiency virus 1 [HIV-1]
agauccuagacuagag

SEQ ID NO: 4005605 - RNA, 22 nt, Human immunodeficiency virus 1 [HIV-1]
agauccugcauauaagcagcug

SEQ ID NO: 4005606 - RNA, 13 nt, Human immunodeficiency virus 1 [HIV-1]
agauggaauagau

SEQ ID NO: 4005607 - RNA, 18 nt, Human immunodeficiency virus 1 [HIV-1]
agauggggcagcuaacag

SEQ ID NO: 4005608 - RNA, 16 nt, Human immunodeficiency virus 1 [HIV-1]
agcaaauuaagagaac

SEQ ID NO: 4005609 - RNA, 18 nt, Human immunodeficiency virus 1 [HIV-1]
agcaagaaauggagccag

SEQ ID NO: 4005610 - RNA, 21 nt, Human immunodeficiency virus 1 [HIV-1]
agcagcagauagggugggagc

SEQ ID NO: 4005611 - RNA, 12 nt, Human immunodeficiency virus 1 [HIV-1]
agcagcaggaag

SEQ ID NO: 4005612 - RNA, 13 nt, Human immunodeficiency virus 1 [HIV-1]
agcagcaggaagc

SEQ ID NO: 4005613 - RNA, 23 nt, Human immunodeficiency virus 1 [HIV-1]
uaccuaaaggaucaacagcuccu

SEQ ID NO: 4005614 - RNA, 13 nt, Human immunodeficiency virus 1 [HIV-1]
uaccuagaagaau

SEQ ID NO: 4005615 - RNA, 11 nt, Human immunodeficiency virus 1 [HIV-1]
uagaaggaaaa

SEQ ID NO: 4005616 - RNA, 13 nt, Human immunodeficiency virus 1 [HIV-1]
uagacuaauagaa

SEQ ID NO: 4005617 - RNA, 14 nt, Human immunodeficiency virus 1 [HIV-1]
uaguauaaacaaug

SEQ ID NO: 4005618 - RNA, 16 nt, Human immunodeficiency virus 1 [HIV-1]
uggcaaguagacagga

SEQ ID NO: 4005619 - RNA, 18 nt, Human immunodeficiency virus 1 [HIV-1]
uggcagaaaguaggaaaa

SEQ ID NO: 4005620 - RNA, 22 nt, Human immunodeficiency virus 1 [HIV-1]
uggcaguauucauccacaauuu

SEQ ID NO: 4005621 - RNA, 22 nt, Human immunodeficiency virus 1 [HIV-1]
ugguuagaccagaucugagccu

SEQ ID NO: 4005622 - RNA, 19 nt, Human immunodeficiency virus 1 [HIV-1]
uguaacauuaguagagcaa

SEQ ID NO: 4005623 - RNA, 19 nt, Human immunodeficiency virus 1 [HIV-1]
uuaaacugcccauacaaaa

SEQ ID NO: 4005624 - RNA, 13 nt, Human immunodeficiency virus 1 [HIV-1]
uuaagacaaagaa

SEQ ID NO: 4005625 - RNA, 13 nt, Human immunodeficiency virus 1 [HIV-1]
uuaagaccaauga

SEQ ID NO: 4005626 - RNA, 13 nt, Human immunodeficiency virus 1 [HIV-1]
uuaauuguggagg

SEQ ID NO: 4005627 - RNA, 21 nt, Human immunodeficiency virus 1 [HIV-1]
uuagagccuuuuagaaaacaa

SEQ ID NO: 4005628 - RNA, 22 nt, Human immunodeficiency virus 1 [HIV-1]
uuaguaguagcaauaauaauag

SEQ ID NO: 4005629 - RNA, 20 nt, Human immunodeficiency virus 1 [HIV-1]
uuguuacacccugugagccu

SEQ ID NO: 4005630 - RNA, 14 nt, Human immunodeficiency virus 1 [HIV-1]
aaaacaaaauccag

SEQ ID NO: 4005631 - RNA, 22 nt, Human immunodeficiency virus 1 [HIV-1]
aaaaguagugugauuggauggc

SEQ ID NO: 4005632 - RNA, 15 nt, Human immunodeficiency virus 1 [HIV-1]
aaaauauuaagacaa

SEQ ID NO: 4005633 - RNA, 15 nt, Human immunodeficiency virus 1 [HIV-1]
aaaauuagcaggaag

SEQ ID NO: 4005634 - RNA, 21 nt, Human immunodeficiency virus 1 [HIV-1]
aaacaauaaucuuuaagcaau

SEQ ID NO: 4005635 - RNA, 19 nt, Human immunodeficiency virus 1 [HIV-1]
aaacagauagcuagcaaau

SEQ ID NO: 4005636 - RNA, 15 nt, Human immunodeficiency virus 1 [HIV-1]
aaacagggcaggaaa

SEQ ID NO: 4005637 - RNA, 23 nt, Human immunodeficiency virus 1 [HIV-1]
aaacugcccauacaaaaggaaac

SEQ ID NO: 4005638 - RNA, 13 nt, Human immunodeficiency virus 1 [HIV-1]
aaagaaaaaagac

SEQ ID NO: 4005639 - RNA, 19 nt, Human immunodeficiency virus 1 [HIV-1]
aaagcauaugauacagagg

SEQ ID NO: 4005640 - RNA, 13 nt, Human immunodeficiency virus 1 [HIV-1]
aaaggaagggaaa

SEQ ID NO: 4005641 - RNA, 12 nt, Human immunodeficiency virus 1 [HIV-1]
aaaucucuggaa

SEQ ID NO: 4005642 - RNA, 13 nt, Human immunodeficiency virus 1 [HIV-1]
aacaacugcuguu

SEQ ID NO: 4005643 - RNA, 13 nt, Human immunodeficiency virus 1 [HIV-1]
aacagauuuggaa

SEQ ID NO: 4005644 - RNA, 21 nt, Human immunodeficiency virus 1 [HIV-1]
aacaugagaaauaucacagua

SEQ ID NO: 4005645 - RNA, 13 nt, Human immunodeficiency virus 1 [HIV-1]
aagacuuaauagc

SEQ ID NO: 4005646 - RNA, 15 nt, Human immunodeficiency virus 1 [HIV-1]
aaggugcagaaagaa

SEQ ID NO: 4005647 - RNA, 21 nt, Human immunodeficiency virus 1 [HIV-1]
aaguuuguuucauaacaaaag

SEQ ID NO: 4005648 - RNA, 13 nt, Human immunodeficiency virus 1 [HIV-1]
aauacagcagcua

SEQ ID NO: 4005649 - RNA, 18 nt, Human immunodeficiency virus 1 [HIV-1]
aauagacagguuaauuga

SEQ ID NO: 4005650 - RNA, 16 nt, Human immunodeficiency virus 1 [HIV-1]
aauggaggaaaaagag

SEQ ID NO: 4005651 - RNA, 18 nt, Human immunodeficiency virus 1 [HIV-1]
aauugugggucacagucu

SEQ ID NO: 4005652 - RNA, 11 nt, Human immunodeficiency virus 1 [HIV-1]
acaaaaacaaa

SEQ ID NO: 4005653 - RNA, 23 nt, Human immunodeficiency virus 1 [HIV-1]
acaaauuauaaacauguggcaga

SEQ ID NO: 4005654 - RNA, 17 nt, Human immunodeficiency virus 1 [HIV-1]
acaacaauacaagaaaa

SEQ ID NO: 4005655 - RNA, 13 nt, Human immunodeficiency virus 1 [HIV-1]
acaagaauuauug

SEQ ID NO: 4005656 - RNA, 18 nt, Human immunodeficiency virus 1 [HIV-1]
acaaguagcaauacagca

SEQ ID NO: 4005657 - RNA, 22 nt, Human immunodeficiency virus 1 [HIV-1]
acaauuacacaagcuuaauaca

SEQ ID NO: 4005658 - RNA, 14 nt, Human immunodeficiency virus 1 [HIV-1]
acaauuuuaaaaga

SEQ ID NO: 4005659 - RNA, 14 nt, Human immunodeficiency virus 1 [HIV-1]
acaccaaaaaagau

SEQ ID NO: 4005660 - RNA, 21 nt, Human immunodeficiency virus 1 [HIV-1]
acacccugugagccugcaugg

SEQ ID NO: 4005661 - RNA, 19 nt, Human immunodeficiency virus 1 [HIV-1]
acagccauagcaguagcug

SEQ ID NO: 4005662 - RNA, 20 nt, Human immunodeficiency virus 1 [HIV-1]
acagucuggggcaucaagca

SEQ ID NO: 4005663 - RNA, 15 nt, Human immunodeficiency virus 1 [HIV-1]
accacuaacagaaga

SEQ ID NO: 4005664 - RNA, 21 nt, Human immunodeficiency virus 1 [HIV-1]
accagaucugagccugggagc

SEQ ID NO: 4005665 - RNA, 22 nt, Human immunodeficiency virus 1 [HIV-1]
accagaucugagccugggagcu

SEQ ID NO: 4005666 - RNA, 15 nt, Human immunodeficiency virus 1 [HIV-1]
acccacaagaaguag

SEQ ID NO: 4005667 - RNA, 13 nt, Human immunodeficiency virus 1 [HIV-1]
acccggagagaga

SEQ ID NO: 4005668 - RNA, 13 nt, Human immunodeficiency virus 1 [HIV-1]
acccugugagccu

SEQ ID NO: 4005669 - RNA, 16 nt, Human immunodeficiency virus 1 [HIV-1]
acccugugagccugca

SEQ ID NO: 4005670 - RNA, 14 nt, Human immunodeficiency virus 1 [HIV-1]
accgcuugagagac

SEQ ID NO: 4005671 - RNA, 19 nt, Human immunodeficiency virus 1 [HIV-1]
acgagcugagccagcagca

SEQ ID NO: 4005672 - RNA, 19 nt, Human immunodeficiency virus 1 [HIV-1]
acgaucugcggagccugug

SEQ ID NO: 4005673 - RNA, 18 nt, Human immunodeficiency virus 1 [HIV-1]
acgcagggggugggaagc

SEQ ID NO: 4005674 - RNA, 19 nt, Human immunodeficiency virus 1 [HIV-1]
acgcagggggugggaagcc

SEQ ID NO: 4005675 - RNA, 17 nt, Human immunodeficiency virus 1 [HIV-1]
acuagcagcauuaauaa

SEQ ID NO: 4005676 - RNA, 19 nt, Human immunodeficiency virus 1 [HIV-1]
acugcccauacaaaaggaa

SEQ ID NO: 4005677 - RNA, 19 nt, Human immunodeficiency virus 1 [HIV-1]
acugcuuaagccucaauaa

SEQ ID NO: 4005678 - RNA, 15 nt, Human immunodeficiency virus 1 [HIV-1]
uucaagaacugcuga

SEQ ID NO: 4005679 - RNA, 11 nt, Human immunodeficiency virus 1 [HIV-1]
uuccagggagg

SEQ ID NO: 4005680 - RNA, 17 nt, Human immunodeficiency virus 1 [HIV-1]
uugcucaaugccacagc

SEQ ID NO: 4005681 - RNA, 22 nt, Human immunodeficiency virus 1 [HIV-1]
uauagugcagcagcagaacaau

SEQ ID NO: 4005682 - RNA, 14 nt, Human immunodeficiency virus 1 [HIV-1]
ucaagcacaaccag

SEQ ID NO: 4005683 - RNA, 18 nt, Human immunodeficiency virus 1 [HIV-1]
ucacucccaaagaagaca

SEQ ID NO: 4005684 - RNA, 22 nt, Human immunodeficiency virus 1 [HIV-1]
ucagguaccuuuaagaccaaug

SEQ ID NO: 4005685 - RNA, 13 nt, Human immunodeficiency virus 1 [HIV-1]
ucauagaaaucug

SEQ ID NO: 4005686 - RNA, 23 nt, Human immunodeficiency virus 1 [HIV-1]
uccaagaauaaguucagaaguac

SEQ ID NO: 4005687 - RNA, 14 nt, Human immunodeficiency virus 1 [HIV-1]
ucuaaaauguaaua

SEQ ID NO: 4005688 - RNA, 22 nt, Human immunodeficiency virus 1 [HIV-1]
ucugcauacaggagaaagagac

SEQ ID NO: 4005689 - RNA, 17 nt, Human immunodeficiency virus 1 [HIV-1]
ucuggcuaacuagggaa

SEQ ID NO: 4005690 - RNA, 19 nt, Human immunodeficiency virus 1 [HIV-1]
ugaacacaucuguagaaau

SEQ ID NO: 4005691 - RNA, 18 nt, Human immunodeficiency virus 1 [HIV-1]
ugacaauggcagcaauuu

SEQ ID NO: 4005692 - RNA, 18 nt, Human immunodeficiency virus 1 [HIV-1]
ugacaugguagaacagau

SEQ ID NO: 4005693 - RNA, 17 nt, Human immunodeficiency virus 1 [HIV-1]
ugagggacaauuggaga

SEQ ID NO: 4005694 - RNA, 23 nt, Human immunodeficiency virus 1 [HIV-1]
uggcaggaagaagcggagacagc

SEQ ID NO: 4005695 - RNA, 14 nt, Human immunodeficiency virus 1 [HIV-1]
uggcccgagagcug

SEQ ID NO: 4005696 - RNA, 15 nt, Human immunodeficiency virus 1 [HIV-1]
uggggacuuuccagg

SEQ ID NO: 4005697 - RNA, 18 nt, Human immunodeficiency virus 1 [HIV-1]
ugggguaccuguguggaa

SEQ ID NO: 4005698 - RNA, 13 nt, Human immunodeficiency virus 1 [HIV-1]
uggguuuuccagu

SEQ ID NO: 4005699 - RNA, 16 nt, Human immunodeficiency virus 1 [HIV-1]
uguaugccccucccau

SEQ ID NO: 4005700 - RNA, 20 nt, Human immunodeficiency virus 1 [HIV-1]
ugugagccugcaugggaugg

SEQ ID NO: 4005701 - RNA, 21 nt, Human immunodeficiency virus 1 [HIV-1]
ugugccuggcuagaagcacaa

SEQ ID NO: 4005702 - RNA, 20 nt, Human immunodeficiency virus 1 [HIV-1]
uuagaccagaucugagccug

SEQ ID NO: 4005703 - RNA, 15 nt, Human immunodeficiency virus 1 [HIV-1]
uuaucugggacgauc

SEQ ID NO: 4005704 - RNA, 18 nt, Human immunodeficiency virus 1 [HIV-1]
uucugcaacaacugcugu

SEQ ID NO: 4005705 - RNA, 14 nt, Human immunodeficiency virus 1 [HIV-1]
uuggaagaaaucug

SEQ ID NO: 4005706 - RNA, 19 nt, Human immunodeficiency virus 1 [HIV-1]
uuuagaaggaaaaguuauc

SEQ ID NO: 4005707 - RNA, 15 nt, Human immunodeficiency virus 1 [HIV-1]
cuaacugacacaaca

SEQ ID NO: 4005708 - RNA, 18 nt, Human immunodeficiency virus 1 [HIV-1]
cuacaguauuggagucag

SEQ ID NO: 4005709 - RNA, 19 nt, Human immunodeficiency virus 1 [HIV-1]
cuacuucccugauuagcag

SEQ ID NO: 4005710 - RNA, 18 nt, Human immunodeficiency virus 1 [HIV-1]
cuauaccaauaguagcaa

SEQ ID NO: 4005711 - RNA, 14 nt, Human immunodeficiency virus 1 [HIV-1]
cuauagugaauaga

SEQ ID NO: 4005712 - RNA, 21 nt, Human immunodeficiency virus 1 [HIV-1]
cuaugaauaaagaauuaaaga

SEQ ID NO: 4005713 - RNA, 15 nt, Human immunodeficiency virus 1 [HIV-1]
cucaggaggggaccc

SEQ ID NO: 4005714 - RNA, 23 nt, Human immunodeficiency virus 1 [HIV-1]
cuccaggcaagaauccuggcugu

SEQ ID NO: 4005715 - RNA, 17 nt, Human immunodeficiency virus 1 [HIV-1]
cucccaugcagaauaaa

SEQ ID NO: 4005716 - RNA, 17 nt, Human immunodeficiency virus 1 [HIV-1]
cucucugguuagaccag

SEQ ID NO: 4005717 - RNA, 16 nt, Human immunodeficiency virus 1 [HIV-1]
cugaccuuuggauggu

SEQ ID NO: 4005718 - RNA, 12 nt, Human immunodeficiency virus 1 [HIV-1]
cugagccuggga

SEQ ID NO: 4005719 - RNA, 19 nt, Human immunodeficiency virus 1 [HIV-1]
cugcauacaggagaaagag

SEQ ID NO: 4005720 - RNA, 22 nt, Human immunodeficiency virus 1 [HIV-1]
cugcucuuucaauaucagcaca

SEQ ID NO: 4005721 - RNA, 19 nt, Human immunodeficiency virus 1 [HIV-1]
cuguacugggucucucugg

SEQ ID NO: 4005722 - RNA, 19 nt, Human immunodeficiency virus 1 [HIV-1]
cuguagugcuacagaaaaa

SEQ ID NO: 4005723 - RNA, 19 nt, Human immunodeficiency virus 1 [HIV-1]
cuguuagcuugcucaaugc

SEQ ID NO: 4005724 - RNA, 16 nt, Human immunodeficiency virus 1 [HIV-1]
cuucccugauuagcag

SEQ ID NO: 4005725 - RNA, 18 nt, Human immunodeficiency virus 1 [HIV-1]
cuucccugauuagcagaa

SEQ ID NO: 4005726 - RNA, 12 nt, Human immunodeficiency virus 1 [HIV-1]
cuuggaaaggau

SEQ ID NO: 4005727 - RNA, 13 nt, Human immunodeficiency virus 1 [HIV-1]
gaaaaaagagcag

SEQ ID NO: 4005728 - RNA, 20 nt, Human immunodeficiency virus 1 [HIV-1]
gaaaaaauaaaagcauuagu

SEQ ID NO: 4005729 - RNA, 13 nt, Human immunodeficiency virus 1 [HIV-1]
gaaauggagccag

SEQ ID NO: 4005730 - RNA, 15 nt, Human immunodeficiency virus 1 [HIV-1]
gaacaauuuggaaau

SEQ ID NO: 4005731 - RNA, 20 nt, Human immunodeficiency virus 1 [HIV-1]
gaacuacacaccagggccag

SEQ ID NO: 4005732 - RNA, 17 nt, Human immunodeficiency virus 1 [HIV-1]
gaaugagacgagcugag

SEQ ID NO: 4005733 - RNA, 18 nt, Human immunodeficiency virus 1 [HIV-1]
gacaaguagacuguaguc

SEQ ID NO: 4005734 - RNA, 22 nt, Human immunodeficiency virus 1 [HIV-1]
gacagagaaauuaacaauuaca

SEQ ID NO: 4005735 - RNA, 13 nt, Human immunodeficiency virus 1 [HIV-1]
gacagguaagaga

SEQ ID NO: 4005736 - RNA, 22 nt, Human immunodeficiency virus 1 [HIV-1]
gacauaauagcaacagacauac

SEQ ID NO: 4005737 - RNA, 11 nt, Human immunodeficiency virus 1 [HIV-1]
gaccaaugacu

SEQ ID NO: 4005738 - RNA, 19 nt, Human immunodeficiency virus 1 [HIV-1]
gaccagaucugagccuggg

SEQ ID NO: 4005739 - RNA, 16 nt, Human immunodeficiency virus 1 [HIV-1]
gacccggagagagaag

SEQ ID NO: 4005740 - RNA, 13 nt, Human immunodeficiency virus 1 [HIV-1]
gacuagagcccug

SEQ ID NO: 4005741 - RNA, 10 nt, Human immunodeficiency virus 1 [HIV-1]
gacuggggag

SEQ ID NO: 4005742 - RNA, 19 nt, Human immunodeficiency virus 1 [HIV-1]
gacuuaauagcagaaauac

SEQ ID NO: 4005743 - RNA, 14 nt, Human immunodeficiency virus 1 [HIV-1]
gacuuuccagggag

SEQ ID NO: 4005744 - RNA, 21 nt, Human immunodeficiency virus 1 [HIV-1]
gagagaaguguuagaguggag

SEQ ID NO: 4005745 - RNA, 14 nt, Human immunodeficiency virus 1 [HIV-1]
gagccagcagcaga

SEQ ID NO: 4005746 - RNA, 19 nt, Human immunodeficiency virus 1 [HIV-1]
gagcuugcuacaagggacu

SEQ ID NO: 4005747 - RNA, 22 nt, Human immunodeficiency virus 1 [HIV-1]
gaggccaauaaaggagagaaca

SEQ ID NO: 4005748 - RNA, 15 nt, Human immunodeficiency virus 1 [HIV-1]
gaggcguggccuggg

SEQ ID NO: 4005749 - RNA, 14 nt, Human immunodeficiency virus 1 [HIV-1]
gagugggacagaga

SEQ ID NO: 4005750 - RNA, 15 nt, Human immunodeficiency virus 1 [HIV-1]
gauauccacugaccu

SEQ ID NO: 4005751 - RNA, 14 nt, Human immunodeficiency virus 1 [HIV-1]
gaucaacagcuccu

SEQ ID NO: 4005752 - RNA, 16 nt, Human immunodeficiency virus 1 [HIV-1]
gaugacccggagagag

SEQ ID NO: 4005753 - RNA, 21 nt, Human immunodeficiency virus 1 [HIV-1]
gauggaacaagccccagaaga

SEQ ID NO: 4005754 - RNA, 14 nt, Human immunodeficiency virus 1 [HIV-1]
gcaaauuaagagaa

SEQ ID NO: 4005755 - RNA, 18 nt, Human immunodeficiency virus 1 [HIV-1]
gcacaagcauaagaggua

SEQ ID NO: 4005756 - RNA, 12 nt, Human immunodeficiency virus 1 [HIV-1]
gcacauuguaac

SEQ ID NO: 4005757 - RNA, 12 nt, Human immunodeficiency virus 1 [HIV-1]
gcagaaguuauu

SEQ ID NO: 4005758 - RNA, 14 nt, Human immunodeficiency virus 1 [HIV-1]
gcagauaggguggg

SEQ ID NO: 4005759 - RNA, 21 nt, Human immunodeficiency virus 1 [HIV-1]
gcagcagauagggugggagca

SEQ ID NO: 4005760 - RNA, 14 nt, Human immunodeficiency virus 1 [HIV-1]
gcagcagcagaaca

SEQ ID NO: 4005761 - RNA, 14 nt, Human immunodeficiency virus 1 [HIV-1]
gcaucaagcagcuc

SEQ ID NO: 4005762 - RNA, 14 nt, Human immunodeficiency virus 1 [HIV-1]
gcaucucgagaccu

SEQ ID NO: 4005763 - RNA, 17 nt, Human immunodeficiency virus 1 [HIV-1]
gccaagaagaaaagcaa

SEQ ID NO: 4005764 - RNA, 18 nt, Human immunodeficiency virus 1 [HIV-1]
gcccgagagcugcauccg

SEQ ID NO: 4005765 - RNA, 18 nt, Human immunodeficiency virus 1 [HIV-1]
gcccucagauccugcaua

SEQ ID NO: 4005766 - RNA, 15 nt, Human immunodeficiency virus 1 [HIV-1]
gcuaccaaugcugcu

SEQ ID NO: 4005767 - RNA, 22 nt, Human immunodeficiency virus 1 [HIV-1]
gcugacaucgagcuugcuacaa

SEQ ID NO: 4005768 - RNA, 14 nt, Human immunodeficiency virus 1 [HIV-1]
gcugcuugugccug

SEQ ID NO: 4005769 - RNA, 17 nt, Human immunodeficiency virus 1 [HIV-1]
gcugcuugugccuggcu

SEQ ID NO: 4005770 - RNA, 14 nt, Human immunodeficiency virus 1 [HIV-1]
gcuugugccuggcu

SEQ ID NO: 4005771 - RNA, 14 nt, Human immunodeficiency virus 1 [HIV-1]
ggaacuucugggac

SEQ ID NO: 4005772 - RNA, 20 nt, Human immunodeficiency virus 1 [HIV-1]
ggacgaucugcggagccugu

SEQ ID NO: 4005773 - RNA, 12 nt, Human immunodeficiency virus 1 [HIV-1]
ggacuuuccagg

SEQ ID NO: 4005774 - RNA, 17 nt, Human immunodeficiency virus 1 [HIV-1]
ggagagagagacagaga

SEQ ID NO: 4005775 - RNA, 16 nt, Human immunodeficiency virus 1 [HIV-1]
ggaguacuucaagaac

SEQ ID NO: 4005776 - RNA, 21 nt, Human immunodeficiency virus 1 [HIV-1]
ggcaucuccuauggcaggaag

SEQ ID NO: 4005777 - RNA, 16 nt, Human immunodeficiency virus 1 [HIV-1]
gggaggcguggccugg

SEQ ID NO: 4005778 - RNA, 17 nt, Human immunodeficiency virus 1 [HIV-1]
gggaggcguggccuggg

SEQ ID NO: 4005779 - RNA, 17 nt, Human immunodeficiency virus 1 [HIV-1]
gggcaaguuuguggaau

SEQ ID NO: 4005780 - RNA, 16 nt, Human immunodeficiency virus 1 [HIV-1]
gguaccuguguggaag

SEQ ID NO: 4005781 - RNA, 21 nt, Human immunodeficiency virus 1 [HIV-1]
gguauagugcagcagcagaac

SEQ ID NO: 4005782 - RNA, 21 nt, Human immunodeficiency virus 1 [HIV-1]
gguggagagagagacagagac

SEQ ID NO: 4005783 - RNA, 13 nt, Human immunodeficiency virus 1 [HIV-1]
gguugcucuggaa

SEQ ID NO: 4005784 - RNA, 21 nt, Human immunodeficiency virus 1 [HIV-1]
gguuuuccagucacaccucag

SEQ ID NO: 4005785 - RNA, 15 nt, Human immunodeficiency virus 1 [HIV-1]
guacacauuuagaag

SEQ ID NO: 4005786 - RNA, 17 nt, Human immunodeficiency virus 1 [HIV-1]
guacacauuuagaagga

SEQ ID NO: 4005787 - RNA, 16 nt, Human immunodeficiency virus 1 [HIV-1]
guacuucaagaacugc

SEQ ID NO: 4005788 - RNA, 20 nt, Human immunodeficiency virus 1 [HIV-1]
guagacccugaacuagcaga

SEQ ID NO: 4005789 - RNA, 16 nt, Human immunodeficiency virus 1 [HIV-1]
gugaauaucaagcagg

SEQ ID NO: 4005790 - RNA, 13 nt, Human immunodeficiency virus 1 [HIV-1]
guucuugggagca

SEQ ID NO: 4005791 - RNA, 16 nt, Human immunodeficiency virus 1 [HIV-1]
uaaagaauuacaaaaa

SEQ ID NO: 4005792 - RNA, 15 nt, Human immunodeficiency virus 1 [HIV-1]
uaaagccauguguaa

SEQ ID NO: 4005793 - RNA, 18 nt, Human immunodeficiency virus 1 [HIV-1]
uaacacuuuaaaacagau

SEQ ID NO: 4005794 - RNA, 14 nt, Human immunodeficiency virus 1 [HIV-1]
uaacagaagaagca

SEQ ID NO: 4005795 - RNA, 18 nt, Human immunodeficiency virus 1 [HIV-1]
uaagagaacaauuuggaa

SEQ ID NO: 4005796 - RNA, 21 nt, Human immunodeficiency virus 1 [HIV-1]
uaauaguacagcugaacacau

SEQ ID NO: 4005797 - RNA, 16 nt, Human immunodeficiency virus 1 [HIV-1]
uaaucauagaauauag

SEQ ID NO: 4005798 - RNA, 23 nt, Human immunodeficiency virus 1 [HIV-1]
agcaguagcugaggggacagaua

SEQ ID NO: 4005799 - RNA, 13 nt, Human immunodeficiency virus 1 [HIV-1]
agcauccaggaag

SEQ ID NO: 4005800 - RNA, 16 nt, Human immunodeficiency virus 1 [HIV-1]
agcaucucgagaccug

SEQ ID NO: 4005801 - RNA, 23 nt, Human immunodeficiency virus 1 [HIV-1]
agccaguggauauauagaagcag

SEQ ID NO: 4005802 - RNA, 17 nt, Human immunodeficiency virus 1 [HIV-1]
agccugcaugggaugga

SEQ ID NO: 4005803 - RNA, 21 nt, Human immunodeficiency virus 1 [HIV-1]
agccugcaugggauggaugac

SEQ ID NO: 4005804 - RNA, 14 nt, Human immunodeficiency virus 1 [HIV-1]
aggaccauguacaa

SEQ ID NO: 4005805 - RNA, 17 nt, Human immunodeficiency virus 1 [HIV-1]
aggccagacaauuauug

SEQ ID NO: 4005806 - RNA, 16 nt, Human immunodeficiency virus 1 [HIV-1]
agggagucuccauaga

SEQ ID NO: 4005807 - RNA, 18 nt, Human immunodeficiency virus 1 [HIV-1]
agggcuaauucacuccca

SEQ ID NO: 4005808 - RNA, 18 nt, Human immunodeficiency virus 1 [HIV-1]
agguauccuuugagccaa

SEQ ID NO: 4005809 - RNA, 14 nt, Human immunodeficiency virus 1 [HIV-1]
aguauaaacaauga

SEQ ID NO: 4005810 - RNA, 18 nt, Human immunodeficiency virus 1 [HIV-1]
aguauugguaaaugugac

SEQ ID NO: 4005811 - RNA, 19 nt, Human immunodeficiency virus 1 [HIV-1]
agugcugccagaaaaagac

SEQ ID NO: 4005812 - RNA, 20 nt, Human immunodeficiency virus 1 [HIV-1]
auaaacuugauauaauacca

SEQ ID NO: 4005813 - RNA, 21 nt, Human immunodeficiency virus 1 [HIV-1]
auaagacagggcuuggaaagg

SEQ ID NO: 4005814 - RNA, 19 nt, Human immunodeficiency virus 1 [HIV-1]
auaccacuaacagaagaag

SEQ ID NO: 4005815 - RNA, 20 nt, Human immunodeficiency virus 1 [HIV-1]
aucaaauuuaucaagagcca

SEQ ID NO: 4005816 - RNA, 16 nt, Human immunodeficiency virus 1 [HIV-1]
aucuuaagacagcagu

SEQ ID NO: 4005817 - RNA, 11 nt, Human immunodeficiency virus 1 [HIV-1]
augaacuccau

SEQ ID NO: 4005818 - RNA, 13 nt, Human immunodeficiency virus 1 [HIV-1]
augcaagaaugag

SEQ ID NO: 4005819 - RNA, 12 nt, Human immunodeficiency virus 1 [HIV-1]
auggaaaaggaa

SEQ ID NO: 4005820 - RNA, 17 nt, Human immunodeficiency virus 1 [HIV-1]
auggaaaccaaaaauga

SEQ ID NO: 4005821 - RNA, 16 nt, Human immunodeficiency virus 1 [HIV-1]
auggcccaaaaguuaa

SEQ ID NO: 4005822 - RNA, 15 nt, Human immunodeficiency virus 1 [HIV-1]
auguaauaauaagac

SEQ ID NO: 4005823 - RNA, 17 nt, Human immunodeficiency virus 1 [HIV-1]
augucagcuaaaaggag

SEQ ID NO: 4005824 - RNA, 13 nt, Human immunodeficiency virus 1 [HIV-1]
auuaaagaaaauu

SEQ ID NO: 4005825 - RNA, 22 nt, Human immunodeficiency virus 1 [HIV-1]
auuaagacaaagaaaaauagac

SEQ ID NO: 4005826 - RNA, 19 nt, Human immunodeficiency virus 1 [HIV-1]
auuagaacauggaaaaguu

SEQ ID NO: 4005827 - RNA, 18 nt, Human immunodeficiency virus 1 [HIV-1]
auuagggauuauggaaaa

SEQ ID NO: 4005828 - RNA, 13 nt, Human immunodeficiency virus 1 [HIV-1]
auuaguagaaauu

SEQ ID NO: 4005829 - RNA, 18 nt, Human immunodeficiency virus 1 [HIV-1]
auugggugucgacauagc

SEQ ID NO: 4005830 - RNA, 22 nt, Human immunodeficiency virus 1 [HIV-1]
auugguuuaacauaacaaauug

SEQ ID NO: 4005831 - RNA, 17 nt, Human immunodeficiency virus 1 [HIV-1]
auuuagaaggaaaaguu

SEQ ID NO: 4005832 - RNA, 16 nt, Human immunodeficiency virus 1 [HIV-1]
auuugccauaaagaaa

SEQ ID NO: 4005833 - RNA, 19 nt, Human immunodeficiency virus 1 [HIV-1]
auuugggguugcucuggaa

SEQ ID NO: 4005834 - RNA, 14 nt, Human immunodeficiency virus 1 [HIV-1]
caaauuacaaaaau

SEQ ID NO: 4005835 - RNA, 16 nt, Human immunodeficiency virus 1 [HIV-1]
caagaauaaguucaga

SEQ ID NO: 4005836 - RNA, 14 nt, Human immunodeficiency virus 1 [HIV-1]
caagaauuauugga

SEQ ID NO: 4005837 - RNA, 13 nt, Human immunodeficiency virus 1 [HIV-1]
caauaguagcaau

SEQ ID NO: 4005838 - RNA, 15 nt, Human immunodeficiency virus 1 [HIV-1]
caauaguagcaauag

SEQ ID NO: 4005839 - RNA, 21 nt, Human immunodeficiency virus 1 [HIV-1]
cacaaguagcaauacagcagc

SEQ ID NO: 4005840 - RNA, 17 nt, Human immunodeficiency virus 1 [HIV-1]
cacaccagacaaaaaac

SEQ ID NO: 4005841 - RNA, 13 nt, Human immunodeficiency virus 1 [HIV-1]
cacagagggagcc

SEQ ID NO: 4005842 - RNA, 13 nt, Human immunodeficiency virus 1 [HIV-1]
cacauuguaacau

SEQ ID NO: 4005843 - RNA, 15 nt, Human immunodeficiency virus 1 [HIV-1]
cacugaccuuuggau

SEQ ID NO: 4005844 - RNA, 15 nt, Human immunodeficiency virus 1 [HIV-1]
cacuuguggagaugg

SEQ ID NO: 4005845 - RNA, 14 nt, Human immunodeficiency virus 1 [HIV-1]
cagaaacagggcag

SEQ ID NO: 4005846 - RNA, 15 nt, Human immunodeficiency virus 1 [HIV-1]
cagaagacaguggca

SEQ ID NO: 4005847 - RNA, 22 nt, Human immunodeficiency virus 1 [HIV-1]
cagacucugcuauaagaaaggc

SEQ ID NO: 4005848 - RNA, 20 nt, Human immunodeficiency virus 1 [HIV-1]
cagaucaaagugaaucagag

SEQ ID NO: 4005849 - RNA, 17 nt, Human immunodeficiency virus 1 [HIV-1]
cagaucugagccuggga

SEQ ID NO: 4005850 - RNA, 21 nt, Human immunodeficiency virus 1 [HIV-1]
caggaagucagccuaaaacug

SEQ ID NO: 4005851 - RNA, 12 nt, Human immunodeficiency virus 1 [HIV-1]
caggagaaagag

SEQ ID NO: 4005852 - RNA, 19 nt, Human immunodeficiency virus 1 [HIV-1]
caggcccgaaggaauagaa

SEQ ID NO: 4005853 - RNA, 15 nt, Human immunodeficiency virus 1 [HIV-1]
cagggacagcagaaa

SEQ ID NO: 4005854 - RNA, 18 nt, Human immunodeficiency virus 1 [HIV-1]
caguauuagaagaaauga

SEQ ID NO: 4005855 - RNA, 20 nt, Human immunodeficiency virus 1 [HIV-1]
cagucacaccucagguaccu

SEQ ID NO: 4005856 - RNA, 16 nt, Human immunodeficiency virus 1 [HIV-1]
cagucuagcagaagaa

SEQ ID NO: 4005857 - RNA, 14 nt, Human immunodeficiency virus 1 [HIV-1]
caguuagagaaaga

SEQ ID NO: 4005858 - RNA, 11 nt, Human immunodeficiency virus 1 [HIV-1]
cauagcagaau

SEQ ID NO: 4005859 - RNA, 17 nt, Human immunodeficiency virus 1 [HIV-1]
cauaguaggagcagaaa

SEQ ID NO: 4005860 - RNA, 15 nt, Human immunodeficiency virus 1 [HIV-1]
caucaagcagcucca

SEQ ID NO: 4005861 - RNA, 12 nt, Human immunodeficiency virus 1 [HIV-1]
caugacaaaaau

SEQ ID NO: 4005862 - RNA, 23 nt, Human immunodeficiency virus 1 [HIV-1]
cauggguaccagcacacaaagga

SEQ ID NO: 4005863 - RNA, 20 nt, Human immunodeficiency virus 1 [HIV-1]
ccaaagaagacaagauaucc

SEQ ID NO: 4005864 - RNA, 13 nt, Human immunodeficiency virus 1 [HIV-1]
ccacuaacagaag

SEQ ID NO: 4005865 - RNA, 18 nt, Human immunodeficiency virus 1 [HIV-1]
ccacugcuuaagccucaa

SEQ ID NO: 4005866 - RNA, 20 nt, Human immunodeficiency virus 1 [HIV-1]
ccacugcuuaagccucaaua

SEQ ID NO: 4005867 - RNA, 18 nt, Human immunodeficiency virus 1 [HIV-1]
ccagggaggcguggccug

SEQ ID NO: 4005868 - RNA, 16 nt, Human immunodeficiency virus 1 [HIV-1]
ccaguuagagaaagaa

SEQ ID NO: 4005869 - RNA, 15 nt, Human immunodeficiency virus 1 [HIV-1]
ccauagcaguagcug

SEQ ID NO: 4005870 - RNA, 15 nt, Human immunodeficiency virus 1 [HIV-1]
cccgagagcugcauc

SEQ ID NO: 4005871 - RNA, 20 nt, Human immunodeficiency virus 1 [HIV-1]
ccguauccagagaggaccag

SEQ ID NO: 4005872 - RNA, 18 nt, Human immunodeficiency virus 1 [HIV-1]
ccugauuagcagaacuac

SEQ ID NO: 4005873 - RNA, 22 nt, Human immunodeficiency virus 1 [HIV-1]
ccuggaaaaacauggagcaauc

SEQ ID NO: 4005874 - RNA, 16 nt, Human immunodeficiency virus 1 [HIV-1]
ccuguguggaaggaag

SEQ ID NO: 4005875 - RNA, 13 nt, Human immunodeficiency virus 1 [HIV-1]
cgaaggaauagaa

SEQ ID NO: 4005876 - RNA, 23 nt, Human immunodeficiency virus 1 [HIV-1]
cgccacauaccuagaagaauaag

SEQ ID NO: 4005877 - RNA, 15 nt, Human immunodeficiency virus 1 [HIV-1]
auaaagaaaaaagac

SEQ ID NO: 4005878 - RNA, 14 nt, Human immunodeficiency virus 1 [HIV-1]
auaaaggagagaac

SEQ ID NO: 4005879 - RNA, 20 nt, Human immunodeficiency virus 1 [HIV-1]
auaagagguaaggugcagaa

SEQ ID NO: 4005880 - RNA, 13 nt, Human immunodeficiency virus 1 [HIV-1]
auacuaccagcua

SEQ ID NO: 4005881 - RNA, 13 nt, Human immunodeficiency virus 1 [HIV-1]
auagaagcagaag

SEQ ID NO: 4005882 - RNA, 20 nt, Human immunodeficiency virus 1 [HIV-1]
auauaaaguaguaaaaauug

SEQ ID NO: 4005883 - RNA, 16 nt, Human immunodeficiency virus 1 [HIV-1]
auauguuacuaauaga

SEQ ID NO: 4005884 - RNA, 17 nt, Human immunodeficiency virus 1 [HIV-1]
auauuaagacaaagaaa

SEQ ID NO: 4005885 - RNA, 14 nt, Human immunodeficiency virus 1 [HIV-1]
aucaaaguaagaca

SEQ ID NO: 4005886 - RNA, 16 nt, Human immunodeficiency virus 1 [HIV-1]
aucaaauaauagagca

SEQ ID NO: 4005887 - RNA, 16 nt, Human immunodeficiency virus 1 [HIV-1]
aucagaugcuaaagca

SEQ ID NO: 4005888 - RNA, 22 nt, Human immunodeficiency virus 1 [HIV-1]
aucccgcaggguuaaaaaagaa

SEQ ID NO: 4005889 - RNA, 13 nt, Human immunodeficiency virus 1 [HIV-1]
auccuagacuaga

SEQ ID NO: 4005890 - RNA, 23 nt, Human immunodeficiency virus 1 [HIV-1]
aucgcaaaaccagcaagaaaaga

SEQ ID NO: 4005891 - RNA, 15 nt, Human immunodeficiency virus 1 [HIV-1]
augagacaccaggga

SEQ ID NO: 4005892 - RNA, 17 nt, Human immunodeficiency virus 1 [HIV-1]
augagagugaaggagaa

SEQ ID NO: 4005893 - RNA, 16 nt, Human immunodeficiency virus 1 [HIV-1]
augaguuugccaggaa

SEQ ID NO: 4005894 - RNA, 14 nt, Human immunodeficiency virus 1 [HIV-1]
auggagaaaggaga

SEQ ID NO: 4005895 - RNA, 23 nt, Human immunodeficiency virus 1 [HIV-1]
auggccuacuguaagggaaagaa

SEQ ID NO: 4005896 - RNA, 16 nt, Human immunodeficiency virus 1 [HIV-1]
auggugguaauagcaa

SEQ ID NO: 4005897 - RNA, 16 nt, Human immunodeficiency virus 1 [HIV-1]
augucagcuaaaagga

SEQ ID NO: 4005898 - RNA, 13 nt, Human immunodeficiency virus 1 [HIV-1]
auguggaaaaaug

SEQ ID NO: 4005899 - RNA, 23 nt, Human immunodeficiency virus 1 [HIV-1]
auguuacuaauagaggaagacaa

SEQ ID NO: 4005900 - RNA, 16 nt, Human immunodeficiency virus 1 [HIV-1]
auuaagacaaagaaaa

SEQ ID NO: 4005901 - RNA, 20 nt, Human immunodeficiency virus 1 [HIV-1]
auuugggguugcucuggaaa

SEQ ID NO: 4005902 - RNA, 19 nt, Human immunodeficiency virus 1 [HIV-1]
caaaaaacaucagaaagaa

SEQ ID NO: 4005903 - RNA, 17 nt, Human immunodeficiency virus 1 [HIV-1]
caaauuaagagaacaau

SEQ ID NO: 4005904 - RNA, 18 nt, Human immunodeficiency virus 1 [HIV-1]
caagaaguaguauuggua

SEQ ID NO: 4005905 - RNA, 20 nt, Human immunodeficiency virus 1 [HIV-1]
caagcagcuccaggcaagaa

SEQ ID NO: 4005906 - RNA, 20 nt, Human immunodeficiency virus 1 [HIV-1]
caauaguaguagcgggagaa

SEQ ID NO: 4005907 - RNA, 16 nt, Human immunodeficiency virus 1 [HIV-1]
caaucaaauaauagag

SEQ ID NO: 4005908 - RNA, 16 nt, Human immunodeficiency virus 1 [HIV-1]
caauccucaggagggg

SEQ ID NO: 4005909 - RNA, 12 nt, Human immunodeficiency virus 1 [HIV-1]
cacaagaaguag

SEQ ID NO: 4005910 - RNA, 23 nt, Human immunodeficiency virus 1 [HIV-1]
cacaaguagcaauacagcagcua

SEQ ID NO: 4005911 - RNA, 17 nt, Human immunodeficiency virus 1 [HIV-1]
cacaaucacccucccau

SEQ ID NO: 4005912 - RNA, 22 nt, Human immunodeficiency virus 1 [HIV-1]
cacacuaaugauguaaaacaau

SEQ ID NO: 4005913 - RNA, 14 nt, Human immunodeficiency virus 1 [HIV-1]
caccagcuuguuac

SEQ ID NO: 4005914 - RNA, 20 nt, Human immunodeficiency virus 1 [HIV-1]
cacuagagcuuuuagaggag

SEQ ID NO: 4005915 - RNA, 14 nt, Human immunodeficiency virus 1 [HIV-1]
cacugcuuaagccu

SEQ ID NO: 4005916 - RNA, 14 nt, Human immunodeficiency virus 1 [HIV-1]
cagaaaacagagag

SEQ ID NO: 4005917 - RNA, 15 nt, Human immunodeficiency virus 1 [HIV-1]
cagaacuacacacca

SEQ ID NO: 4005918 - RNA, 22 nt, Human immunodeficiency virus 1 [HIV-1]
cagaacuacacaccagggccag

SEQ ID NO: 4005919 - RNA, 19 nt, Human immunodeficiency virus 1 [HIV-1]
cagagaggaccagggagag

SEQ ID NO: 4005920 - RNA, 16 nt, Human immunodeficiency virus 1 [HIV-1]
cagagauggaaaagga

SEQ ID NO: 4005921 - RNA, 19 nt, Human immunodeficiency virus 1 [HIV-1]
cagagcuagaacuggcaga

SEQ ID NO: 4005922 - RNA, 21 nt, Human immunodeficiency virus 1 [HIV-1]
caggcccgaaggaauagaaga

SEQ ID NO: 4005923 - RNA, 23 nt, Human immunodeficiency virus 1 [HIV-1]
caggcccgaaggaauagaagaag

SEQ ID NO: 4005924 - RNA, 18 nt, Human immunodeficiency virus 1 [HIV-1]
cagggaaagcuaggggau

SEQ ID NO: 4005925 - RNA, 16 nt, Human immunodeficiency virus 1 [HIV-1]
cagggcuuggaaagga

SEQ ID NO: 4005926 - RNA, 18 nt, Human immunodeficiency virus 1 [HIV-1]
caguagcugaggggacag

SEQ ID NO: 4005927 - RNA, 15 nt, Human immunodeficiency virus 1 [HIV-1]
caguauuagaagaaa

SEQ ID NO: 4005928 - RNA, 14 nt, Human immunodeficiency virus 1 [HIV-1]
caguugagccagau

SEQ ID NO: 4005929 - RNA, 14 nt, Human immunodeficiency virus 1 [HIV-1]
cauagaaaucugug

SEQ ID NO: 4005930 - RNA, 15 nt, Human immunodeficiency virus 1 [HIV-1]
cauagaauauaggaa

SEQ ID NO: 4005931 - RNA, 13 nt, Human immunodeficiency virus 1 [HIV-1]
caucaagcagcuc

SEQ ID NO: 4005932 - RNA, 13 nt, Human immunodeficiency virus 1 [HIV-1]
cauuguaacauua

SEQ ID NO: 4005933 - RNA, 23 nt, Human immunodeficiency virus 1 [HIV-1]
ccaaguuuguuucauaacaaaag

SEQ ID NO: 4005934 - RNA, 18 nt, Human immunodeficiency virus 1 [HIV-1]
ccaccaaggcaaagagaa

SEQ ID NO: 4005935 - RNA, 15 nt, Human immunodeficiency virus 1 [HIV-1]
ccacugcugugccuu

SEQ ID NO: 4005936 - RNA, 10 nt, Human immunodeficiency virus 1 [HIV-1]
ccagggaggc

SEQ ID NO: 4005937 - RNA, 17 nt, Human immunodeficiency virus 1 [HIV-1]
ccaggggucagauaucc

SEQ ID NO: 4005938 - RNA, 19 nt, Human immunodeficiency virus 1 [HIV-1]
ccaguauuugccauaaaga

SEQ ID NO: 4005939 - RNA, 13 nt, Human immunodeficiency virus 1 [HIV-1]
ccaguugagccag

SEQ ID NO: 4005940 - RNA, 12 nt, Human immunodeficiency virus 1 [HIV-1]
cccaccucccaa

SEQ ID NO: 4005941 - RNA, 16 nt, Human immunodeficiency virus 1 [HIV-1]
cccucagauccugcau

SEQ ID NO: 4005942 - RNA, 19 nt, Human immunodeficiency virus 1 [HIV-1]
ccugggcgggacuggggag

SEQ ID NO: 4005943 - RNA, 18 nt, Human immunodeficiency virus 1 [HIV-1]
ccuuuuagaaaacaaaau

SEQ ID NO: 4005944 - RNA, 19 nt, Human immunodeficiency virus 1 [HIV-1]
cgcaggguuaaaaaagaaa

SEQ ID NO: 4005945 - RNA, 14 nt, Human immunodeficiency virus 1 [HIV-1]
cgggaaucaagcag

SEQ ID NO: 4005946 - RNA, 15 nt, Human immunodeficiency virus 1 [HIV-1]
cuaaagccaugugua

SEQ ID NO: 4005947 - RNA, 13 nt, Human immunodeficiency virus 1 [HIV-1]
cuaauagaaagag

SEQ ID NO: 4005948 - RNA, 16 nt, Human immunodeficiency virus 1 [HIV-1]
cuaauagaaagagcag

SEQ ID NO: 4005949 - RNA, 19 nt, Human immunodeficiency virus 1 [HIV-1]
cuaauagaggaagacaaaa

SEQ ID NO: 4005950 - RNA, 15 nt, Human immunodeficiency virus 1 [HIV-1]
cuacacaccagggcc

SEQ ID NO: 4005951 - RNA, 18 nt, Human immunodeficiency virus 1 [HIV-1]
cuacuguaagggaaagaa

SEQ ID NO: 4005952 - RNA, 19 nt, Human immunodeficiency virus 1 [HIV-1]
cuagaacuggcagaaaaca

SEQ ID NO: 4005953 - RNA, 13 nt, Human immunodeficiency virus 1 [HIV-1]
cucuucagcuacc

SEQ ID NO: 4005954 - RNA, 23 nt, Human immunodeficiency virus 1 [HIV-1]
cugaccuuuggauggugcuacaa

SEQ ID NO: 4005955 - RNA, 14 nt, Human immunodeficiency virus 1 [HIV-1]
cugagccagcagca

SEQ ID NO: 4005956 - RNA, 16 nt, Human immunodeficiency virus 1 [HIV-1]
cugagccagcagcaga

SEQ ID NO: 4005957 - RNA, 21 nt, Human immunodeficiency virus 1 [HIV-1]
cugagccugggagcucucugg

SEQ ID NO: 4005958 - RNA, 21 nt, Human immunodeficiency virus 1 [HIV-1]
cuggcuaacuagggaacccac

SEQ ID NO: 4005959 - RNA, 17 nt, Human immunodeficiency virus 1 [HIV-1]
cugggcgggacugggga

SEQ ID NO: 4005960 - RNA, 18 nt, Human immunodeficiency virus 1 [HIV-1]
cugguauagugcagcagc

SEQ ID NO: 4005961 - RNA, 20 nt, Human immunodeficiency virus 1 [HIV-1]
cugguauagugcagcagcag

SEQ ID NO: 4005962 - RNA, 21 nt, Human immunodeficiency virus 1 [HIV-1]
cugugguauauaaaauuauuc

SEQ ID NO: 4005963 - RNA, 20 nt, Human immunodeficiency virus 1 [HIV-1]
cuucccugauuagcagaacu

SEQ ID NO: 4005964 - RNA, 14 nt, Human immunodeficiency virus 1 [HIV-1]
cuugggagcagcag

SEQ ID NO: 4005965 - RNA, 18 nt, Human immunodeficiency virus 1 [HIV-1]
cuuguuacacccugugag

SEQ ID NO: 4005966 - RNA, 17 nt, Human immunodeficiency virus 1 [HIV-1]
cuuuaaaacagauagcu

SEQ ID NO: 4005967 - RNA, 23 nt, Human immunodeficiency virus 1 [HIV-1]
gaaaaagaauccguauccagaga

SEQ ID NO: 4005968 - RNA, 15 nt, Human immunodeficiency virus 1 [HIV-1]
gaaaauauuaagaca

SEQ ID NO: 4005969 - RNA, 19 nt, Human immunodeficiency virus 1 [HIV-1]
gaacaccagcuuguuacac

SEQ ID NO: 4005970 - RNA, 15 nt, Human immunodeficiency virus 1 [HIV-1]
gaacaucuuaagaca

SEQ ID NO: 4005971 - RNA, 13 nt, Human immunodeficiency virus 1 [HIV-1]
gaacuucugggac

SEQ ID NO: 4005972 - RNA, 17 nt, Human immunodeficiency virus 1 [HIV-1]
gaagaagguggagagag

SEQ ID NO: 4005973 - RNA, 23 nt, Human immunodeficiency virus 1 [HIV-1]
gaagcagaaguuauuccagcaga

SEQ ID NO: 4005974 - RNA, 22 nt, Human immunodeficiency virus 1 [HIV-1]
gaaguaguauugguaaauguga

SEQ ID NO: 4005975 - RNA, 18 nt, Human immunodeficiency virus 1 [HIV-1]
gaauccuggcuguggaaa

SEQ ID NO: 4005976 - RNA, 16 nt, Human immunodeficiency virus 1 [HIV-1]
gacaguggcaaugaga

SEQ ID NO: 4005977 - RNA, 22 nt, Human immunodeficiency virus 1 [HIV-1]
gaccagggagagcauuuguuac

SEQ ID NO: 4005978 - RNA, 14 nt, Human immunodeficiency virus 1 [HIV-1]
gacgagcugagcca

SEQ ID NO: 4005979 - RNA, 17 nt, Human immunodeficiency virus 1 [HIV-1]
gacuaauagaaagagca

SEQ ID NO: 4005980 - RNA, 19 nt, Human immunodeficiency virus 1 [HIV-1]
gagaaauaucagcacuugu

SEQ ID NO: 4005981 - RNA, 21 nt, Human immunodeficiency virus 1 [HIV-1]
gagaacaccagcuuguuacac

SEQ ID NO: 4005982 - RNA, 19 nt, Human immunodeficiency virus 1 [HIV-1]
gagaagaguggugcagaga

SEQ ID NO: 4005983 - RNA, 14 nt, Human immunodeficiency virus 1 [HIV-1]
gagagagacagaga

SEQ ID NO: 4005984 - RNA, 20 nt, Human immunodeficiency virus 1 [HIV-1]
gagcaagaaauggagccagu

SEQ ID NO: 4005985 - RNA, 10 nt, Human immunodeficiency virus 1 [HIV-1]
gagcagcagg

SEQ ID NO: 4005986 - RNA, 21 nt, Human immunodeficiency virus 1 [HIV-1]
gaggagauaugagggacaauu

SEQ ID NO: 4005987 - RNA, 17 nt, Human immunodeficiency virus 1 [HIV-1]
gaggaggaggagguggg

SEQ ID NO: 4005988 - RNA, 14 nt, Human immunodeficiency virus 1 [HIV-1]
gaggauuguggaac

SEQ ID NO: 4005989 - RNA, 17 nt, Human immunodeficiency virus 1 [HIV-1]
gagguaaggugcagaaa

SEQ ID NO: 4005990 - RNA, 15 nt, Human immunodeficiency virus 1 [HIV-1]
gaguggcgagcccuc

SEQ ID NO: 4005991 - RNA, 23 nt, Human immunodeficiency virus 1 [HIV-1]
gauagcuagcaaauuaagagaac

SEQ ID NO: 4005992 - RNA, 13 nt, Human immunodeficiency virus 1 [HIV-1]
gaucugagccugg

SEQ ID NO: 4005993 - RNA, 21 nt, Human immunodeficiency virus 1 [HIV-1]
gaucugcggagccugugccuc

SEQ ID NO: 4005994 - RNA, 16 nt, Human immunodeficiency virus 1 [HIV-1]
gauucgggauuagaag

SEQ ID NO: 4005995 - RNA, 19 nt, Human immunodeficiency virus 1 [HIV-1]
gcaacagcaucuguugcaa

SEQ ID NO: 4005996 - RNA, 23 nt, Human immunodeficiency virus 1 [HIV-1]
gcaaucacaaguagcaauacagc

SEQ ID NO: 4005997 - RNA, 17 nt, Human immunodeficiency virus 1 [HIV-1]
gcacaguacaauguaca

SEQ ID NO: 4005998 - RNA, 20 nt, Human immunodeficiency virus 1 [HIV-1]
gcagaaaguaggaaaagcaa

SEQ ID NO: 4005999 - RNA, 17 nt, Human immunodeficiency virus 1 [HIV-1]
gcagaagacaguggcaa

SEQ ID NO: 4006000 - RNA, 17 nt, Human immunodeficiency virus 1 [HIV-1]
gcagcagauaggguggg

SEQ ID NO: 4006001 - RNA, 17 nt, Human immunodeficiency virus 1 [HIV-1]
gcaucaagcagcuccag

SEQ ID NO: 4006002 - RNA, 23 nt, Human immunodeficiency virus 1 [HIV-1]
gcauuucaucacguggcccgaga

SEQ ID NO: 4006003 - RNA, 17 nt, Human immunodeficiency virus 1 [HIV-1]
gccucuucagcuaccac

SEQ ID NO: 4006004 - RNA, 17 nt, Human immunodeficiency virus 1 [HIV-1]
gcgcagccucaaugacg

SEQ ID NO: 4006005 - RNA, 15 nt, Human immunodeficiency virus 1 [HIV-1]
gcuuaagccucaaua

SEQ ID NO: 4006006 - RNA, 23 nt, Human immunodeficiency virus 1 [HIV-1]
ggacuggggaguggcgagcccuc

SEQ ID NO: 4006007 - RNA, 15 nt, Human immunodeficiency virus 1 [HIV-1]
ggacuuuccagggag

SEQ ID NO: 4006008 - RNA, 15 nt, Human immunodeficiency virus 1 [HIV-1]
ggagagagagacaga

SEQ ID NO: 4006009 - RNA, 21 nt, Human immunodeficiency virus 1 [HIV-1]
ggaguacuucaagaacugcug

SEQ ID NO: 4006010 - RNA, 17 nt, Human immunodeficiency virus 1 [HIV-1]
ggagugggacagagaaa

SEQ ID NO: 4006011 - RNA, 21 nt, Human immunodeficiency virus 1 [HIV-1]
ggcgagcccucagauccugca

SEQ ID NO: 4006012 - RNA, 16 nt, Human immunodeficiency virus 1 [HIV-1]
ggcguuacucgacaga

SEQ ID NO: 4006013 - RNA, 14 nt, Human immunodeficiency virus 1 [HIV-1]
gggaacccacugcu

SEQ ID NO: 4006014 - RNA, 21 nt, Human immunodeficiency virus 1 [HIV-1]
ggugugaauaucaagcaggac

SEQ ID NO: 4006015 - RNA, 21 nt, Human immunodeficiency virus 1 [HIV-1]
gguuagaccagaucugagccu

SEQ ID NO: 4006016 - RNA, 18 nt, Human immunodeficiency virus 1 [HIV-1]
guaaacuccuuagaggaa

SEQ ID NO: 4006017 - RNA, 21 nt, Human immunodeficiency virus 1 [HIV-1]
guaauaccacuaacagaagaa

SEQ ID NO: 4006018 - RNA, 15 nt, Human immunodeficiency virus 1 [HIV-1]
guacaguauuaguag

SEQ ID NO: 4006019 - RNA, 19 nt, Human immunodeficiency virus 1 [HIV-1]
guagacuguaguccaggaa

SEQ ID NO: 4006020 - RNA, 23 nt, Human immunodeficiency virus 1 [HIV-1]
guaguaucaacucaacugcuguu

SEQ ID NO: 4006021 - RNA, 21 nt, Human immunodeficiency virus 1 [HIV-1]
gugacacaaucacccucccau

SEQ ID NO: 4006022 - RNA, 15 nt, Human immunodeficiency virus 1 [HIV-1]
guggaacuucuggga

SEQ ID NO: 4006023 - RNA, 16 nt, Human immunodeficiency virus 1 [HIV-1]
guucuugggagcagca

SEQ ID NO: 4006024 - RNA, 20 nt, Human immunodeficiency virus 1 [HIV-1]
guuucagacccaccucccaa

SEQ ID NO: 4006025 - RNA, 17 nt, Human immunodeficiency virus 1 [HIV-1]
uaaaaaucugaaaacag

SEQ ID NO: 4006026 - RNA, 20 nt, Human immunodeficiency virus 1 [HIV-1]
uaaaacaauuaacagaggca

SEQ ID NO: 4006027 - RNA, 12 nt, Human immunodeficiency virus 1 [HIV-1]
uaacauguggaa

SEQ ID NO: 4006028 - RNA, 17 nt, Human immunodeficiency virus 1 [HIV-1]
uaacgaggauuguggaa

SEQ ID NO: 4006029 - RNA, 19 nt, Human immunodeficiency virus 1 [HIV-1]
uaauacacuccuuaauuga

SEQ ID NO: 4006030 - RNA, 17 nt, Human immunodeficiency virus 1 [HIV-1]
uacacaccagggccagg

SEQ ID NO: 4006031 - RNA, 20 nt, Human immunodeficiency virus 1 [HIV-1]
uacacccugugagccugcau

SEQ ID NO: 4006032 - RNA, 19 nt, Human immunodeficiency virus 1 [HIV-1]
uacaguauuagaagaaaug

SEQ ID NO: 4006033 - RNA, 15 nt, Human immunodeficiency virus 1 [HIV-1]
uaccagcacacaaag

SEQ ID NO: 4006034 - RNA, 15 nt, Human immunodeficiency virus 1 [HIV-1]
uagaagaggccaaua

SEQ ID NO: 4006035 - RNA, 18 nt, Human immunodeficiency virus 1 [HIV-1]
uagaagaggccaauaaag

SEQ ID NO: 4006036 - RNA, 22 nt, Human immunodeficiency virus 1 [HIV-1]
uauccacugaccuuuggauggu

SEQ ID NO: 4006037 - RNA, 14 nt, Human immunodeficiency virus 1 [HIV-1]
uaugccccucccau

SEQ ID NO: 4006038 - RNA, 21 nt, Human immunodeficiency virus 1 [HIV-1]
uccaaaguagcaugacaaaaa

SEQ ID NO: 4006039 - RNA, 16 nt, Human immunodeficiency virus 1 [HIV-1]
uccagucacaccucag

SEQ ID NO: 4006040 - RNA, 23 nt, Human immunodeficiency virus 1 [HIV-1]
ucccgcaggguuaaaaaagaaaa

SEQ ID NO: 4006041 - RNA, 23 nt, Human immunodeficiency virus 1 [HIV-1]
ucuaaaagaaccaguacauggag

SEQ ID NO: 4006042 - RNA, 14 nt, Human immunodeficiency virus 1 [HIV-1]
ucugagccugggag

SEQ ID NO: 4006043 - RNA, 19 nt, Human immunodeficiency virus 1 [HIV-1]
ucugcggagccugugccuc

SEQ ID NO: 4006044 - RNA, 19 nt, Human immunodeficiency virus 1 [HIV-1]
ugaacaucuuaagacagca

SEQ ID NO: 4006045 - RNA, 15 nt, Human immunodeficiency virus 1 [HIV-1]
ugacauacagaaguu

SEQ ID NO: 4006046 - RNA, 13 nt, Human immunodeficiency virus 1 [HIV-1]
ugagccugggagc

SEQ ID NO: 4006047 - RNA, 12 nt, Human immunodeficiency virus 1 [HIV-1]
ugcagagagaaa

SEQ ID NO: 4006048 - RNA, 19 nt, Human immunodeficiency virus 1 [HIV-1]
ugcauccggaguacuucaa

SEQ ID NO: 4006049 - RNA, 14 nt, Human immunodeficiency virus 1 [HIV-1]
ugcaugggauggau

SEQ ID NO: 4006050 - RNA, 13 nt, Human immunodeficiency virus 1 [HIV-1]
ugccaagaagaaa

SEQ ID NO: 4006051 - RNA, 12 nt, Human immunodeficiency virus 1 [HIV-1]
ugccccucccau

SEQ ID NO: 4006052 - RNA, 16 nt, Human immunodeficiency virus 1 [HIV-1]
uggaagcauccaggaa

SEQ ID NO: 4006053 - RNA, 16 nt, Human immunodeficiency virus 1 [HIV-1]
uggaaucuccuacagu

SEQ ID NO: 4006054 - RNA, 14 nt, Human immunodeficiency virus 1 [HIV-1]
uggagugggacaga

SEQ ID NO: 4006055 - RNA, 22 nt, Human immunodeficiency virus 1 [HIV-1]
uggauauauagaagcagaaguu

SEQ ID NO: 4006056 - RNA, 16 nt, Human immunodeficiency virus 1 [HIV-1]
cuuacaaggcagcugu

SEQ ID NO: 4006057 - RNA, 20 nt, Human immunodeficiency virus 1 [HIV-1]
cuugugccuggcuagaagca

SEQ ID NO: 4006058 - RNA, 20 nt, Human immunodeficiency virus 1 [HIV-1]
cuuuccagggaggcguggcc

SEQ ID NO: 4006059 - RNA, 16 nt, Human immunodeficiency virus 1 [HIV-1]
gaaaagcaaagaucau

SEQ ID NO: 4006060 - RNA, 16 nt, Human immunodeficiency virus 1 [HIV-1]
gaaagaauaguagaca

SEQ ID NO: 4006061 - RNA, 16 nt, Human immunodeficiency virus 1 [HIV-1]
gaaagagcagaagaca

SEQ ID NO: 4006062 - RNA, 21 nt, Human immunodeficiency virus 1 [HIV-1]
gaacaagccccagaagaccaa

SEQ ID NO: 4006063 - RNA, 15 nt, Human immunodeficiency virus 1 [HIV-1]
gaacaugagaaauau

SEQ ID NO: 4006064 - RNA, 14 nt, Human immunodeficiency virus 1 [HIV-1]
gaagaagguggaga

SEQ ID NO: 4006065 - RNA, 18 nt, Human immunodeficiency virus 1 [HIV-1]
gaagaagguggagagaga

SEQ ID NO: 4006066 - RNA, 13 nt, Human immunodeficiency virus 1 [HIV-1]
gaagaauaagaca

SEQ ID NO: 4006067 - RNA, 19 nt, Human immunodeficiency virus 1 [HIV-1]
gaagaguggugcagagaga

SEQ ID NO: 4006068 - RNA, 15 nt, Human immunodeficiency virus 1 [HIV-1]
gaagcacaagaggag

SEQ ID NO: 4006069 - RNA, 15 nt, Human immunodeficiency virus 1 [HIV-1]
gaauaagacagggcu

SEQ ID NO: 4006070 - RNA, 17 nt, Human immunodeficiency virus 1 [HIV-1]
gaauaguuuuugcugua

SEQ ID NO: 4006071 - RNA, 18 nt, Human immunodeficiency virus 1 [HIV-1]
gaaugaagcuguuagaca

SEQ ID NO: 4006072 - RNA, 14 nt, Human immunodeficiency virus 1 [HIV-1]
gacagagacagauc

SEQ ID NO: 4006073 - RNA, 15 nt, Human immunodeficiency virus 1 [HIV-1]
gacagccgccuagca

SEQ ID NO: 4006074 - RNA, 18 nt, Human immunodeficiency virus 1 [HIV-1]
gacagcgacgaagagcuc

SEQ ID NO: 4006075 - RNA, 18 nt, Human immunodeficiency virus 1 [HIV-1]
gacaugguagaacagaug

SEQ ID NO: 4006076 - RNA, 17 nt, Human immunodeficiency virus 1 [HIV-1]
gaccagaucugagccug

SEQ ID NO: 4006077 - RNA, 17 nt, Human immunodeficiency virus 1 [HIV-1]
gacccagaaauuguaac

SEQ ID NO: 4006078 - RNA, 18 nt, Human immunodeficiency virus 1 [HIV-1]
gacgaucugcggagccug

SEQ ID NO: 4006079 - RNA, 15 nt, Human immunodeficiency virus 1 [HIV-1]
gagacaccagggauu

SEQ ID NO: 4006080 - RNA, 15 nt, Human immunodeficiency virus 1 [HIV-1]
gagagaacaccagcu

SEQ ID NO: 4006081 - RNA, 19 nt, Human immunodeficiency virus 1 [HIV-1]
gagaucuucagaccuggag

SEQ ID NO: 4006082 - RNA, 13 nt, Human immunodeficiency virus 1 [HIV-1]
gagcagcaggaag

SEQ ID NO: 4006083 - RNA, 19 nt, Human immunodeficiency virus 1 [HIV-1]
gagcagcaggaagcacuau

SEQ ID NO: 4006084 - RNA, 13 nt, Human immunodeficiency virus 1 [HIV-1]
gagccagcagcag

SEQ ID NO: 4006085 - RNA, 21 nt, Human immunodeficiency virus 1 [HIV-1]
gagcuagaacuggcagaaaac

SEQ ID NO: 4006086 - RNA, 13 nt, Human immunodeficiency virus 1 [HIV-1]
gaggaccagggag

SEQ ID NO: 4006087 - RNA, 15 nt, Human immunodeficiency virus 1 [HIV-1]
gaggccaauaaagga

SEQ ID NO: 4006088 - RNA, 17 nt, Human immunodeficiency virus 1 [HIV-1]
gauaaaaaacugcucuu

SEQ ID NO: 4006089 - RNA, 16 nt, Human immunodeficiency virus 1 [HIV-1]
gauaauggagaaagga

SEQ ID NO: 4006090 - RNA, 16 nt, Human immunodeficiency virus 1 [HIV-1]
gauacaguauuagaag

SEQ ID NO: 4006091 - RNA, 20 nt, Human immunodeficiency virus 1 [HIV-1]
gauauccuugaucuguggau

SEQ ID NO: 4006092 - RNA, 20 nt, Human immunodeficiency virus 1 [HIV-1]
gaucugcggagccugugccu

SEQ ID NO: 4006093 - RNA, 14 nt, Human immunodeficiency virus 1 [HIV-1]
gaugacccggagag

SEQ ID NO: 4006094 - RNA, 16 nt, Human immunodeficiency virus 1 [HIV-1]
gauuaaaguaaggcaa

SEQ ID NO: 4006095 - RNA, 15 nt, Human immunodeficiency virus 1 [HIV-1]
gauuagaaguaaaca

SEQ ID NO: 4006096 - RNA, 15 nt, Human immunodeficiency virus 1 [HIV-1]
gauuagcagaacuac

SEQ ID NO: 4006097 - RNA, 17 nt, Human immunodeficiency virus 1 [HIV-1]
gcaaucacaaguagcaa

SEQ ID NO: 4006098 - RNA, 21 nt, Human immunodeficiency virus 1 [HIV-1]
gcaaucacaaguagcaauaca

SEQ ID NO: 4006099 - RNA, 14 nt, Human immunodeficiency virus 1 [HIV-1]
gcaccacugcugug

SEQ ID NO: 4006100 - RNA, 16 nt, Human immunodeficiency virus 1 [HIV-1]
gcacccaccaaggcaa

SEQ ID NO: 4006101 - RNA, 14 nt, Human immunodeficiency virus 1 [HIV-1]
gcagcuccaggcaa

SEQ ID NO: 4006102 - RNA, 16 nt, Human immunodeficiency virus 1 [HIV-1]
gcaucaagcagcucca

SEQ ID NO: 4006103 - RNA, 15 nt, Human immunodeficiency virus 1 [HIV-1]
gcauggacaaguaga

SEQ ID NO: 4006104 - RNA, 23 nt, Human immunodeficiency virus 1 [HIV-1]
gcauuaguagaaauuuguacaga

SEQ ID NO: 4006105 - RNA, 13 nt, Human immunodeficiency virus 1 [HIV-1]
gcauuuguuacaa

SEQ ID NO: 4006106 - RNA, 16 nt, Human immunodeficiency virus 1 [HIV-1]
gccaaguuuguuucau

SEQ ID NO: 4006107 - RNA, 17 nt, Human immunodeficiency virus 1 [HIV-1]
gccaauaaaggagagaa

SEQ ID NO: 4006108 - RNA, 17 nt, Human immunodeficiency virus 1 [HIV-1]
gccaggggucagauauc

SEQ ID NO: 4006109 - RNA, 20 nt, Human immunodeficiency virus 1 [HIV-1]
gccuguacugggucucucug

SEQ ID NO: 4006110 - RNA, 13 nt, Human immunodeficiency virus 1 [HIV-1]
gcgagcccucaga

SEQ ID NO: 4006111 - RNA, 16 nt, Human immunodeficiency virus 1 [HIV-1]
gcgggaaucaagcagg

SEQ ID NO: 4006112 - RNA, 15 nt, Human immunodeficiency virus 1 [HIV-1]
gcugaggggacagau

SEQ ID NO: 4006113 - RNA, 14 nt, Human immunodeficiency virus 1 [HIV-1]
gcuuguagagcuau

SEQ ID NO: 4006114 - RNA, 13 nt, Human immunodeficiency virus 1 [HIV-1]
ggaaaagcaggau

SEQ ID NO: 4006115 - RNA, 20 nt, Human immunodeficiency virus 1 [HIV-1]
ggaacuaaagaauagugcug

SEQ ID NO: 4006116 - RNA, 18 nt, Human immunodeficiency virus 1 [HIV-1]
ggacuuuccgcuggggac

SEQ ID NO: 4006117 - RNA, 14 nt, Human immunodeficiency virus 1 [HIV-1]
ggagagaacaccag

SEQ ID NO: 4006118 - RNA, 14 nt, Human immunodeficiency virus 1 [HIV-1]
ggagagcaagaaau

SEQ ID NO: 4006119 - RNA, 15 nt, Human immunodeficiency virus 1 [HIV-1]
ggaggaggagguggg

SEQ ID NO: 4006120 - RNA, 20 nt, Human immunodeficiency virus 1 [HIV-1]
ggaguaauaaaucucuggaa

SEQ ID NO: 4006121 - RNA, 16 nt, Human immunodeficiency virus 1 [HIV-1]
ggcacuuaucugggac

SEQ ID NO: 4006122 - RNA, 13 nt, Human immunodeficiency virus 1 [HIV-1]
ggcgcagccucaa

SEQ ID NO: 4006123 - RNA, 14 nt, Human immunodeficiency virus 1 [HIV-1]
ggcuguggaaagau

SEQ ID NO: 4006124 - RNA, 15 nt, Human immunodeficiency virus 1 [HIV-1]
gggaggcguggccug

SEQ ID NO: 4006125 - RNA, 22 nt, Human immunodeficiency virus 1 [HIV-1]
gggcaguaguaauacaagauaa

SEQ ID NO: 4006126 - RNA, 18 nt, Human immunodeficiency virus 1 [HIV-1]
gggcaucaagcagcucca

SEQ ID NO: 4006127 - RNA, 21 nt, Human immunodeficiency virus 1 [HIV-1]
gggcgggaaucaagcaggaau

SEQ ID NO: 4006128 - RNA, 13 nt, Human immunodeficiency virus 1 [HIV-1]
gggcgggacuggg

SEQ ID NO: 4006129 - RNA, 23 nt, Human immunodeficiency virus 1 [HIV-1]
ggggauuugggguugcucuggaa

SEQ ID NO: 4006130 - RNA, 20 nt, Human immunodeficiency virus 1 [HIV-1]
ggggcaucaagcagcuccag

SEQ ID NO: 4006131 - RNA, 16 nt, Human immunodeficiency virus 1 [HIV-1]
gggugggagcagcauc

SEQ ID NO: 4006132 - RNA, 22 nt, Human immunodeficiency virus 1 [HIV-1]
guacaaggagcuuguagagcua

SEQ ID NO: 4006133 - RNA, 19 nt, Human immunodeficiency virus 1 [HIV-1]
guagcugaggggacagaua

SEQ ID NO: 4006134 - RNA, 19 nt, Human immunodeficiency virus 1 [HIV-1]
guaucaacucaacugcugu

SEQ ID NO: 4006135 - RNA, 11 nt, Human immunodeficiency virus 1 [HIV-1]
gucucucuggu

SEQ ID NO: 4006136 - RNA, 17 nt, Human immunodeficiency virus 1 [HIV-1]
gugcuuccacagggaug

SEQ ID NO: 4006137 - RNA, 19 nt, Human immunodeficiency virus 1 [HIV-1]
guggauauauagaagcaga

SEQ ID NO: 4006138 - RNA, 14 nt, Human immunodeficiency virus 1 [HIV-1]
guggguuuuccagu

SEQ ID NO: 4006139 - RNA, 17 nt, Human immunodeficiency virus 1 [HIV-1]
guuagaccagaucugag

SEQ ID NO: 4006140 - RNA, 22 nt, Human immunodeficiency virus 1 [HIV-1]
guuagaccagaucugagccugg

SEQ ID NO: 4006141 - RNA, 17 nt, Human immunodeficiency virus 1 [HIV-1]
uaaaaggagaagccaug

SEQ ID NO: 4006142 - RNA, 21 nt, Human immunodeficiency virus 1 [HIV-1]
uaaauggcagucuagcagaag

SEQ ID NO: 4006143 - RNA, 15 nt, Human immunodeficiency virus 1 [HIV-1]
uaauagcaacaauga

SEQ ID NO: 4006144 - RNA, 20 nt, Human immunodeficiency virus 1 [HIV-1]
uaauagcagaaauacagaag

SEQ ID NO: 4006145 - RNA, 17 nt, Human immunodeficiency virus 1 [HIV-1]
uacaaaugucagcacag

SEQ ID NO: 4006146 - RNA, 13 nt, Human immunodeficiency virus 1 [HIV-1]
uacaauaggaaaa

SEQ ID NO: 4006147 - RNA, 21 nt, Human immunodeficiency virus 1 [HIV-1]
acuuacaaggcagcuguagau

SEQ ID NO: 4006148 - RNA, 19 nt, Human immunodeficiency virus 1 [HIV-1]
acuugggcaggaguggaag

SEQ ID NO: 4006149 - RNA, 12 nt, Human immunodeficiency virus 1 [HIV-1]
agaaagcauagu

SEQ ID NO: 4006150 - RNA, 15 nt, Human immunodeficiency virus 1 [HIV-1]
agaaauuaacaauua

SEQ ID NO: 4006151 - RNA, 15 nt, Human immunodeficiency virus 1 [HIV-1]
agaacaaaaauagag

SEQ ID NO: 4006152 - RNA, 22 nt, Human immunodeficiency virus 1 [HIV-1]
agaacaauuuggaaauaauaaa

SEQ ID NO: 4006153 - RNA, 21 nt, Human immunodeficiency virus 1 [HIV-1]
agaacuggcagaaaacagaga

SEQ ID NO: 4006154 - RNA, 21 nt, Human immunodeficiency virus 1 [HIV-1]
agaagguggagagagagacag

SEQ ID NO: 4006155 - RNA, 17 nt, Human immunodeficiency virus 1 [HIV-1]
agacgagcugagccagc

SEQ ID NO: 4006156 - RNA, 14 nt, Human immunodeficiency virus 1 [HIV-1]
agacuagagcccug

SEQ ID NO: 4006157 - RNA, 21 nt, Human immunodeficiency virus 1 [HIV-1]
agagaaaaaagagcaguggga

SEQ ID NO: 4006158 - RNA, 23 nt, Human immunodeficiency virus 1 [HIV-1]
agagagaaaaaagagcaguggga

SEQ ID NO: 4006159 - RNA, 20 nt, Human immunodeficiency virus 1 [HIV-1]
agauaggggggcaacuaaag

SEQ ID NO: 4006160 - RNA, 14 nt, Human immunodeficiency virus 1 [HIV-1]
agauagggugggag

SEQ ID NO: 4006161 - RNA, 14 nt, Human immunodeficiency virus 1 [HIV-1]
agauccugcauaua

SEQ ID NO: 4006162 - RNA, 17 nt, Human immunodeficiency virus 1 [HIV-1]
agaucugagccugggag

SEQ ID NO: 4006163 - RNA, 24 nt, Human immunodeficiency virus 1 [HIV-1]
agaucugagccugggagcucucug

SEQ ID NO: 4006164 - RNA, 19 nt, Human immunodeficiency virus 1 [HIV-1]
agcagcaucucgagaccug

SEQ ID NO: 4006165 - RNA, 12 nt, Human immunodeficiency virus 1 [HIV-1]
agcauaugauac

SEQ ID NO: 4006166 - RNA, 14 nt, Human immunodeficiency virus 1 [HIV-1]
aggaccagcaaagc

SEQ ID NO: 4006167 - RNA, 14 nt, Human immunodeficiency virus 1 [HIV-1]
aggagaaauaucag

SEQ ID NO: 4006168 - RNA, 20 nt, Human immunodeficiency virus 1 [HIV-1]
aggagagcaagaaauggagc

SEQ ID NO: 4006169 - RNA, 22 nt, Human immunodeficiency virus 1 [HIV-1]
aggaucaacagcuccuggggau

SEQ ID NO: 4006170 - RNA, 13 nt, Human immunodeficiency virus 1 [HIV-1]
aggcaaagagaag

SEQ ID NO: 4006171 - RNA, 19 nt, Human immunodeficiency virus 1 [HIV-1]
aggcaucuccuauggcagg

SEQ ID NO: 4006172 - RNA, 16 nt, Human immunodeficiency virus 1 [HIV-1]
aggcguggccugggcg

SEQ ID NO: 4006173 - RNA, 20 nt, Human immunodeficiency virus 1 [HIV-1]
agggacuuuccgcuggggac

SEQ ID NO: 4006174 - RNA, 19 nt, Human immunodeficiency virus 1 [HIV-1]
agguggagagagagacaga

SEQ ID NO: 4006175 - RNA, 17 nt, Human immunodeficiency virus 1 [HIV-1]
aguacaaggagcuugua

SEQ ID NO: 4006176 - RNA, 17 nt, Human immunodeficiency virus 1 [HIV-1]
aguuaauaaaaaaggaa

SEQ ID NO: 4006177 - RNA, 23 nt, Human immunodeficiency virus 1 [HIV-1]
aguuggaguaauaaaucucugga

SEQ ID NO: 4006178 - RNA, 11 nt, Human immunodeficiency virus 1 [HIV-1]
auaagaaaggc

SEQ ID NO: 4006179 - RNA, 15 nt, Human immunodeficiency virus 1 [HIV-1]
auacaagaaaaagaa

SEQ ID NO: 4006180 - RNA, 12 nt, Human immunodeficiency virus 1 [HIV-1]
auacagcagcua

SEQ ID NO: 4006181 - RNA, 16 nt, Human immunodeficiency virus 1 [HIV-1]
auacagcagcuaccaa

SEQ ID NO: 4006182 - RNA, 15 nt, Human immunodeficiency virus 1 [HIV-1]
auagaagcagaaguu

SEQ ID NO: 4006183 - RNA, 20 nt, Human immunodeficiency virus 1 [HIV-1]
auagaggaagacaaaaaguu

SEQ ID NO: 4006184 - RNA, 22 nt, Human immunodeficiency virus 1 [HIV-1]
auagugcugccagaaaaagaca

SEQ ID NO: 4006185 - RNA, 21 nt, Human immunodeficiency virus 1 [HIV-1]
aucaaaagacuuaauagcaga

SEQ ID NO: 4006186 - RNA, 15 nt, Human immunodeficiency virus 1 [HIV-1]
aucagaacagucaga

SEQ ID NO: 4006187 - RNA, 16 nt, Human immunodeficiency virus 1 [HIV-1]
aucucuggaacagauu

SEQ ID NO: 4006188 - RNA, 14 nt, Human immunodeficiency virus 1 [HIV-1]
aucugcggagccug

SEQ ID NO: 4006189 - RNA, 21 nt, Human immunodeficiency virus 1 [HIV-1]
augaauaaagaauuaaagaaa

SEQ ID NO: 4006190 - RNA, 18 nt, Human immunodeficiency virus 1 [HIV-1]
augagacgagcugagcca

SEQ ID NO: 4006191 - RNA, 22 nt, Human immunodeficiency virus 1 [HIV-1]
augaggauuagaacauggaaaa

SEQ ID NO: 4006192 - RNA, 12 nt, Human immunodeficiency virus 1 [HIV-1]
auggagaaagga

SEQ ID NO: 4006193 - RNA, 15 nt, Human immunodeficiency virus 1 [HIV-1]
auggagaaaggagag

SEQ ID NO: 4006194 - RNA, 18 nt, Human immunodeficiency virus 1 [HIV-1]
auggaggaaaaagagaua

SEQ ID NO: 4006195 - RNA, 22 nt, Human immunodeficiency virus 1 [HIV-1]
auggguaccagcacacaaagga

SEQ ID NO: 4006196 - RNA, 21 nt, Human immunodeficiency virus 1 [HIV-1]
augguaccaguuagagaaaga

SEQ ID NO: 4006197 - RNA, 14 nt, Human immunodeficiency virus 1 [HIV-1]
auguaaaacaauua

SEQ ID NO: 4006198 - RNA, 21 nt, Human immunodeficiency virus 1 [HIV-1]
auuaauaacaccaaaaaagau

SEQ ID NO: 4006199 - RNA, 17 nt, Human immunodeficiency virus 1 [HIV-1]
auuacagggacagcaga

SEQ ID NO: 4006200 - RNA, 15 nt, Human immunodeficiency virus 1 [HIV-1]
auuucacggacaaug

SEQ ID NO: 4006201 - RNA, 21 nt, Human immunodeficiency virus 1 [HIV-1]
caaaagacuuaauagcagaaa

SEQ ID NO: 4006202 - RNA, 16 nt, Human immunodeficiency virus 1 [HIV-1]
caaagaagacaagaua

SEQ ID NO: 4006203 - RNA, 13 nt, Human immunodeficiency virus 1 [HIV-1]
caaauuaagagaa

SEQ ID NO: 4006204 - RNA, 17 nt, Human immunodeficiency virus 1 [HIV-1]
caaauuauaaacaugug

SEQ ID NO: 4006205 - RNA, 13 nt, Human immunodeficiency virus 1 [HIV-1]
caacucacagucu

SEQ ID NO: 4006206 - RNA, 14 nt, Human immunodeficiency virus 1 [HIV-1]
caauacagcagcua

SEQ ID NO: 4006207 - RNA, 13 nt, Human immunodeficiency virus 1 [HIV-1]
caaugccacagcc

SEQ ID NO: 4006208 - RNA, 20 nt, Human immunodeficiency virus 1 [HIV-1]
caauggaacaggaccaugua

SEQ ID NO: 4006209 - RNA, 22 nt, Human immunodeficiency virus 1 [HIV-1]
cacaaguagcaauacagcagcu

SEQ ID NO: 4006210 - RNA, 17 nt, Human immunodeficiency virus 1 [HIV-1]
cacacgaccuggaugga

SEQ ID NO: 4006211 - RNA, 22 nt, Human immunodeficiency virus 1 [HIV-1]
cacaguuuuaauuguggagggg

SEQ ID NO: 4006212 - RNA, 12 nt, Human immunodeficiency virus 1 [HIV-1]
caccagcaauau

SEQ ID NO: 4006213 - RNA, 12 nt, Human immunodeficiency virus 1 [HIV-1]
cacugaaggaag

SEQ ID NO: 4006214 - RNA, 16 nt, Human immunodeficiency virus 1 [HIV-1]
cacuuuaaaacagaua

SEQ ID NO: 4006215 - RNA, 17 nt, Human immunodeficiency virus 1 [HIV-1]
cagaaauacagaagcag

SEQ ID NO: 4006216 - RNA, 22 nt, Human immunodeficiency virus 1 [HIV-1]
cagaaauccacuuuggaaagga

SEQ ID NO: 4006217 - RNA, 18 nt, Human immunodeficiency virus 1 [HIV-1]
cagaagaagcagagcuag

SEQ ID NO: 4006218 - RNA, 16 nt, Human immunodeficiency virus 1 [HIV-1]
cagacccaccucccaa

SEQ ID NO: 4006219 - RNA, 16 nt, Human immunodeficiency virus 1 [HIV-1]
cagauaagauagaaga

SEQ ID NO: 4006220 - RNA, 21 nt, Human immunodeficiency virus 1 [HIV-1]
cagauaggguuauagaaguag

SEQ ID NO: 4006221 - RNA, 23 nt, Human immunodeficiency virus 1 [HIV-1]
cagauccugcauauaagcagcug

SEQ ID NO: 4006222 - RNA, 16 nt, Human immunodeficiency virus 1 [HIV-1]
cagaucugagccuggg

SEQ ID NO: 4006223 - RNA, 15 nt, Human immunodeficiency virus 1 [HIV-1]
cagggauggaaagga

SEQ ID NO: 4006224 - RNA, 13 nt, Human immunodeficiency virus 1 [HIV-1]
caguaaaaacaau

SEQ ID NO: 4006225 - RNA, 16 nt, Human immunodeficiency virus 1 [HIV-1]
caguacaaauggcagu

SEQ ID NO: 4006226 - RNA, 17 nt, Human immunodeficiency virus 1 [HIV-1]
caguuaauaaaaaagga

SEQ ID NO: 4006227 - RNA, 21 nt, Human immunodeficiency virus 1 [HIV-1]
cauaauuggaagaaaucuguu

SEQ ID NO: 4006228 - RNA, 13 nt, Human immunodeficiency virus 1 [HIV-1]
cauagaacaaaaa

SEQ ID NO: 4006229 - RNA, 14 nt, Human immunodeficiency virus 1 [HIV-1]
cauagaacaaaaau

SEQ ID NO: 4006230 - RNA, 16 nt, Human immunodeficiency virus 1 [HIV-1]
cauagcaguagcugag

SEQ ID NO: 4006231 - RNA, 19 nt, Human immunodeficiency virus 2 (HIV-2)
ucacucuguacccagaaga

SEQ ID NO: 4006232 - RNA, 15 nt, Human immunodeficiency virus 2 (HIV-2)
ucaggcagggagcag

SEQ ID NO: 4006233 - RNA, 16 nt, Human immunodeficiency virus 2 (HIV-2)
ucccugcuggacucuc

SEQ ID NO: 4006234 - RNA, 15 nt, Human immunodeficiency virus 2 (HIV-2)
uccuguuacaccaag

SEQ ID NO: 4006235 - RNA, 20 nt, Human immunodeficiency virus 2 (HIV-2)
uccuugcccagcugcaccga

SEQ ID NO: 4006236 - RNA, 11 nt, Human immunodeficiency virus 2 (HIV-2)
ucuaacagcaa

SEQ ID NO: 4006237 - RNA, 21 nt, Human immunodeficiency virus 2 (HIV-2)
ucuaacagcaaucagggacug

SEQ ID NO: 4006238 - RNA, 20 nt, Human immunodeficiency virus 2 (HIV-2)
ugacuuaaccuccuggguca

SEQ ID NO: 4006239 - RNA, 12 nt, Human immunodeficiency virus 2 (HIV-2)
ugcggagaggcu

SEQ ID NO: 4006240 - RNA, 17 nt, Human immunodeficiency virus 2 (HIV-2)
uggcaauagauauguca

SEQ ID NO: 4006241 - RNA, 14 nt, Human immunodeficiency virus 2 (HIV-2)
uucccaucucuccu

SEQ ID NO: 4006242 - RNA, 12 nt, Human immunodeficiency virus 2 (HIV-2)
aaaaccuccagg

SEQ ID NO: 4006243 - RNA, 14 nt, Human immunodeficiency virus 2 (HIV-2)
aaaagggggacugc

SEQ ID NO: 4006244 - RNA, 18 nt, Human immunodeficiency virus 2 (HIV-2)
aaaaugacagaccccaga

SEQ ID NO: 4006245 - RNA, 17 nt, Human immunodeficiency virus 2 (HIV-2)
aaagcagauaauuaaua

SEQ ID NO: 4006246 - RNA, 19 nt, Human immunodeficiency virus 2 (HIV-2)
aacaagcagacaugaugau

SEQ ID NO: 4006247 - RNA, 12 nt, Human immunodeficiency virus 2 (HIV-2)
aaggagaagaac

SEQ ID NO: 4006248 - RNA, 14 nt, Human immunodeficiency virus 2 (HIV-2)
aaggcaaaacugaa

SEQ ID NO: 4006249 - RNA, 23 nt, Human immunodeficiency virus 2 (HIV-2)
aauaucagucaaaguuuagaaga

SEQ ID NO: 4006250 - RNA, 14 nt, Human immunodeficiency virus 2 (HIV-2)
acaacaagaaaugu

SEQ ID NO: 4006251 - RNA, 14 nt, Human immunodeficiency virus 2 (HIV-2)
acaagaaaagaaua

SEQ ID NO: 4006252 - RNA, 20 nt, Human immunodeficiency virus 2 (HIV-2)
acaagacccuggucuguuag

SEQ ID NO: 4006253 - RNA, 18 nt, Human immunodeficiency virus 2 (HIV-2)
acagaaagauuuguauag

SEQ ID NO: 4006254 - RNA, 19 nt, Human immunodeficiency virus 2 (HIV-2)
acagaggcuuuugaugcau

SEQ ID NO: 4006255 - RNA, 17 nt, Human immunodeficiency virus 2 (HIV-2)
acagcccauggagaaac

SEQ ID NO: 4006256 - RNA, 15 nt, Human immunodeficiency virus 2 (HIV-2)
acagcugaggcugca

SEQ ID NO: 4006257 - RNA, 16 nt, Human immunodeficiency virus 2 (HIV-2)
acguagucaagagaca

SEQ ID NO: 4006258 - RNA, 14 nt, Human immunodeficiency virus 2 (HIV-2)
acuacaaauuaaua

SEQ ID NO: 4006259 - RNA, 20 nt, Human immunodeficiency virus 2 (HIV-2)
acuucuaacugcauagaaaa

SEQ ID NO: 4006260 - RNA, 14 nt, Human immunodeficiency virus 2 (HIV-2)
agaaaagaauaugu

SEQ ID NO: 4006261 - RNA, 19 nt, Human immunodeficiency virus 2 (HIV-2)
agauuuguauaggcagcaa

SEQ ID NO: 4006262 - RNA, 23 nt, Human immunodeficiency virus 2 (HIV-2)
aggcucagacccggaaguggcau

SEQ ID NO: 4006263 - RNA, 24 nt, Human immunodeficiency virus 2 (HIV-2)
agucaggauugccagagaaagaau

SEQ ID NO: 4006264 - RNA, 21 nt, Human immunodeficiency virus 2 (HIV-2)
auaaauuggcaauagauaugu

SEQ ID NO: 4006265 - RNA, 13 nt, Human immunodeficiency virus 2 (HIV-2)
aucaaugauacag

SEQ ID NO: 4006266 - RNA, 20 nt, Human immunodeficiency virus 2 (HIV-2)
augaacagcccauggagaaa

SEQ ID NO: 4006267 - RNA, 15 nt, Human immunodeficiency virus 2 (HIV-2)
auggagaaacccagc

SEQ ID NO: 4006268 - RNA, 14 nt, Human immunodeficiency virus 2 (HIV-2)
caacaagaaaagaa

SEQ ID NO: 4006269 - RNA, 15 nt, Human immunodeficiency virus 2 (HIV-2)
caacagcaacagcug

SEQ ID NO: 4006270 - RNA, 22 nt, Human immunodeficiency virus 2 (HIV-2)
caagucaggauugccagagaaa

SEQ ID NO: 4006271 - RNA, 17 nt, Human immunodeficiency virus 2 (HIV-2)
caauaaacuaugugcag

SEQ ID NO: 4006272 - RNA, 15 nt, Human immunodeficiency virus 2 (HIV-2)
caaucaacacaaggc

SEQ ID NO: 4006273 - RNA, 16 nt, Human immunodeficiency virus 2 (HIV-2)
cagaucgagcccugag

SEQ ID NO: 4006274 - RNA, 21 nt, Human immunodeficiency virus 2 (HIV-2)
cagcaaucagggacuggcuga

SEQ ID NO: 4006275 - RNA, 22 nt, Human immunodeficiency virus 2 (HIV-2)
cagcaaucagggacuggcugag

SEQ ID NO: 4006276 - RNA, 17 nt, Human immunodeficiency virus 2 (HIV-2)
cagcaguaucagcaggg

SEQ ID NO: 4006277 - RNA, 19 nt, Human immunodeficiency virus 2 (HIV-2)
cagucaaaguuuagaagaa

SEQ ID NO: 4006278 - RNA, 15 nt, Human immunodeficiency virus 2 (HIV-2)
caucugcagagacuu

SEQ ID NO: 4006279 - RNA, 18 nt, Human immunodeficiency virus 2 (HIV-2)
caugaugaugagcauggg

SEQ ID NO: 4006280 - RNA, 21 nt, Human immunodeficiency virus 2 (HIV-2)
caugcuggccuauaacuacaa

SEQ ID NO: 4006281 - RNA, 22 nt, Human immunodeficiency virus 2 (HIV-2)
cccauggagaaacccagcaaca

SEQ ID NO: 4006282 - RNA, 20 nt, Human immunodeficiency virus 2 (HIV-2)
ccccgguuaucuccaacaga

SEQ ID NO: 4006283 - RNA, 21 nt, Human immunodeficiency virus 2 (HIV-2)
cccuaguaguaguacaacaaa

SEQ ID NO: 4006284 - RNA, 13 nt, Human immunodeficiency virus 2 (HIV-2)
ccuagaaaaagag

SEQ ID NO: 4006285 - RNA, 19 nt, Human immunodeficiency virus 2 (HIV-2)
cuaugagguuuagauacug

SEQ ID NO: 4006286 - RNA, 17 nt, Human immunodeficiency virus 2 (HIV-2)
cucgcaguuccaagaag

SEQ ID NO: 4006287 - RNA, 23 nt, Human immunodeficiency virus 2 (HIV-2)
cugcagggacuuuccagaagggg

SEQ ID NO: 4006288 - RNA, 19 nt, Human immunodeficiency virus 2 (HIV-2)
cugcggagaggcuggcaga

SEQ ID NO: 4006289 - RNA, 16 nt, Human immunodeficiency virus 2 (HIV-2)
cugugagggacagcag

SEQ ID NO: 4006290 - RNA, 17 nt, Human immunodeficiency virus 2 (HIV-2)
cuucugcaccagacaag

SEQ ID NO: 4006291 - RNA, 23 nt, Human immunodeficiency virus 2 (HIV-2)
cuuggguuuucucgcgacagcag

SEQ ID NO: 4006292 - RNA, 11 nt, Human immunodeficiency virus 2 (HIV-2)
gaaaaauauga

SEQ ID NO: 4006293 - RNA, 13 nt, Human immunodeficiency virus 2 (HIV-2)
gaaaccgggagca

SEQ ID NO: 4006294 - RNA, 21 nt, Human immunodeficiency virus 2 (HIV-2)
gaagcuaguaucaguagaacu

SEQ ID NO: 4006295 - RNA, 23 nt, Human immunodeficiency virus 2 (HIV-2)
gcaaugugaguucaauaugaagg

SEQ ID NO: 4006296 - RNA, 19 nt, Human immunodeficiency virus 2 (HIV-2)
gcagagacuuacuauccaa

SEQ ID NO: 4006297 - RNA, 15 nt, Human immunodeficiency virus 2 (HIV-2)
gcagggacuuuccag

SEQ ID NO: 4006298 - RNA, 17 nt, Human immunodeficiency virus 2 (HIV-2)
gcaguuccaagaagaau

SEQ ID NO: 4006299 - RNA, 22 nt, Human immunodeficiency virus 2 (HIV-2)
gcauuguauucagucgcucugc

SEQ ID NO: 4006300 - RNA, 13 nt, Human immunodeficiency virus 2 (HIV-2)
gccccgagagcuc

SEQ ID NO: 4006301 - RNA, 17 nt, Human immunodeficiency virus 2 (HIV-2)
gcuaaacaaggagaaga

SEQ ID NO: 4006302 - RNA, 22 nt, Human immunodeficiency virus 2 (HIV-2)
gcuacuaagaaacagcugaggc

SEQ ID NO: 4006303 - RNA, 18 nt, Human immunodeficiency virus 2 (HIV-2)
gcuauacaacaucugcag

SEQ ID NO: 4006304 - RNA, 14 nt, Human immunodeficiency virus 2 (HIV-2)
gcugaggcugcagg

SEQ ID NO: 4006305 - RNA, 14 nt, Human immunodeficiency virus 2 (HIV-2)
aaacaguggagaag

SEQ ID NO: 4006306 - RNA, 13 nt, Human immunodeficiency virus 2 (HIV-2)
aaguaagaagagc

SEQ ID NO: 4006307 - RNA, 20 nt, Human immunodeficiency virus 2 (HIV-2)
aauaugaagggguuagaaca

SEQ ID NO: 4006308 - RNA, 20 nt, Human immunodeficiency virus 2 (HIV-2)
aauauguaugaauuacaaaa

SEQ ID NO: 4006309 - RNA, 18 nt, Human immunodeficiency virus 2 (HIV-2)
acaaaggaaucaaugaua

SEQ ID NO: 4006310 - RNA, 20 nt, Human immunodeficiency virus 2 (HIV-2)
acuaagaaacagcugaggcu

SEQ ID NO: 4006311 - RNA, 18 nt, Human immunodeficiency virus 2 (HIV-2)
acuagcagguagagccug

SEQ ID NO: 4006312 - RNA, 22 nt, Human immunodeficiency virus 2 (HIV-2)
agaaacaaguccgcuaccuaga

SEQ ID NO: 4006313 - RNA, 16 nt, Human immunodeficiency virus 2 (HIV-2)
agaauauguaugaauu

SEQ ID NO: 4006314 - RNA, 13 nt, Human immunodeficiency virus 2 (HIV-2)
agaguacaugaac

SEQ ID NO: 4006315 - RNA, 15 nt, Human immunodeficiency virus 2 (HIV-2)
agaucgagcccugag

SEQ ID NO: 4006316 - RNA, 17 nt, Human immunodeficiency virus 2 (HIV-2)
aggcagggagcagaacu

SEQ ID NO: 4006317 - RNA, 15 nt, Human immunodeficiency virus 2 (HIV-2)
aggcgccagagagcu

SEQ ID NO: 4006318 - RNA, 14 nt, Human immunodeficiency virus 2 (HIV-2)
agggguuagaacaa

SEQ ID NO: 4006319 - RNA, 23 nt, Human immunodeficiency virus 2 (HIV-2)
caacagauccauauccacaagga

SEQ ID NO: 4006320 - RNA, 16 nt, Human immunodeficiency virus 2 (HIV-2)
caagcaguagaagaug

SEQ ID NO: 4006321 - RNA, 12 nt, Human immunodeficiency virus 2 (HIV-2)
cagcaaucaggg

SEQ ID NO: 4006322 - RNA, 15 nt, Human immunodeficiency virus 2 (HIV-2)
cagccagccaacgaa

SEQ ID NO: 4006323 - RNA, 21 nt, Human immunodeficiency virus 2 (HIV-2)
cagcuguguuucucgaaaaag

SEQ ID NO: 4006324 - RNA, 19 nt, Human immunodeficiency virus 2 (HIV-2)
cagggacuuuccagaaggg

SEQ ID NO: 4006325 - RNA, 20 nt, Human immunodeficiency virus 2 (HIV-2)
cauaugagcgaaagggcaga

SEQ ID NO: 4006326 - RNA, 20 nt, Human immunodeficiency virus 2 (HIV-2)
cccugacgcugucagcccag

SEQ ID NO: 4006327 - RNA, 12 nt, Human immunodeficiency virus 2 (HIV-2)
ccuagggaaggg

SEQ ID NO: 4006328 - RNA, 19 nt, Human immunodeficiency virus 2 (HIV-2)
ccugagagguucucuccag

SEQ ID NO: 4006329 - RNA, 14 nt, Human immunodeficiency virus 2 (HIV-2)
cuaccuagaggcaa

SEQ ID NO: 4006330 - RNA, 17 nt, Human immunodeficiency virus 2 (HIV-2)
cugagagguucucucca

SEQ ID NO: 4006331 - RNA, 16 nt, Human immunodeficiency virus 2 (HIV-2)
cugaggcugcagggac

SEQ ID NO: 4006332 - RNA, 14 nt, Human immunodeficiency virus 2 (HIV-2)
cugcagaggagaau

SEQ ID NO: 4006333 - RNA, 21 nt, Human immunodeficiency virus 2 (HIV-2)
cugcagggacuuuccagaagg

SEQ ID NO: 4006334 - RNA, 21 nt, Human immunodeficiency virus 2 (HIV-2)
gaagccuuaaacagggaggca

SEQ ID NO: 4006335 - RNA, 12 nt, Human immunodeficiency virus 2 (HIV-2)
gacaaugaugau

SEQ ID NO: 4006336 - RNA, 14 nt, Human immunodeficiency virus 2 (HIV-2)
gacugaucucccag

SEQ ID NO: 4006337 - RNA, 19 nt, Human immunodeficiency virus 2 (HIV-2)
gacuuacuauccaagaacu

SEQ ID NO: 4006338 - RNA, 21 nt, Human immunodeficiency virus 2 (HIV-2)
gagacuuacuauccaagaacu

SEQ ID NO: 4006339 - RNA, 16 nt, Human immunodeficiency virus 2 (HIV-2)
gagggacaugggagga

SEQ ID NO: 4006340 - RNA, 14 nt, Human immunodeficiency virus 2 (HIV-2)
gauugccagagaaa

SEQ ID NO: 4006341 - RNA, 15 nt, Human immunodeficiency virus 2 (HIV-2)
gcagaaguggcagaa

SEQ ID NO: 4006342 - RNA, 13 nt, Human immunodeficiency virus 2 (HIV-2)
gcagagacuuacu

SEQ ID NO: 4006343 - RNA, 14 nt, Human immunodeficiency virus 2 (HIV-2)
gcagaggaagauga

SEQ ID NO: 4006344 - RNA, 15 nt, Human immunodeficiency virus 2 (HIV-2)
gcagaucgagcccug

SEQ ID NO: 4006345 - RNA, 21 nt, Human immunodeficiency virus 2 (HIV-2)
gcaguuuccauugccagcugu

SEQ ID NO: 4006346 - RNA, 21 nt, Human immunodeficiency virus 2 (HIV-2)
gcccugagagguucucuccag

SEQ ID NO: 4006347 - RNA, 21 nt, Human immunodeficiency virus 2 (HIV-2)
gcuggccuauaacuacaaggc

SEQ ID NO: 4006348 - RNA, 17 nt, Human immunodeficiency virus 2 (HIV-2)
ggaaacaguggagaaga

SEQ ID NO: 4006349 - RNA, 15 nt, Human immunodeficiency virus 2 (HIV-2)
ggacuacgagagaga

SEQ ID NO: 4006350 - RNA, 18 nt, Human immunodeficiency virus 2 (HIV-2)
ggcagacggcuccacgcu

SEQ ID NO: 4006351 - RNA, 19 nt, Human immunodeficiency virus 2 (HIV-2)
ggcaguuugacuccaugcu

SEQ ID NO: 4006352 - RNA, 12 nt, Human immunodeficiency virus 2 (HIV-2)
ggcauggcagag

SEQ ID NO: 4006353 - RNA, 15 nt, Human immunodeficiency virus 2 (HIV-2)
ggcgccagagagcuc

SEQ ID NO: 4006354 - RNA, 20 nt, Human immunodeficiency virus 2 (HIV-2)
guagcugcuucaugcacaag

SEQ ID NO: 4006355 - RNA, 19 nt, Human immunodeficiency virus 2 (HIV-2)
guuccaagaagaaucaggc

SEQ ID NO: 4006356 - RNA, 14 nt, Human immunodeficiency virus 2 (HIV-2)
aaaugugacagagg

SEQ ID NO: 4006357 - RNA, 17 nt, Human immunodeficiency virus 2 (HIV-2)
aacagcccauggagaaa

SEQ ID NO: 4006358 - RNA, 15 nt, Human immunodeficiency virus 2 (HIV-2)
aacagcugaggcugc

SEQ ID NO: 4006359 - RNA, 18 nt, Human immunodeficiency virus 2 (HIV-2)
aacccagcaacagaaaga

SEQ ID NO: 4006360 - RNA, 20 nt, Human immunodeficiency virus 2 (HIV-2)
aagaauggaaggcaaaacug

SEQ ID NO: 4006361 - RNA, 18 nt, Human immunodeficiency virus 2 (HIV-2)
aagcaguagaagaugucu

SEQ ID NO: 4006362 - RNA, 17 nt, Human immunodeficiency virus 2 (HIV-2)
acaagaaaagaauaugu

SEQ ID NO: 4006363 - RNA, 18 nt, Human immunodeficiency virus 2 (HIV-2)
acaaggaccggggacagc

SEQ ID NO: 4006364 - RNA, 15 nt, Human immunodeficiency virus 2 (HIV-2)
acaagucaggauugc

SEQ ID NO: 4006365 - RNA, 15 nt, Human immunodeficiency virus 2 (HIV-2)
acaucccagauacaa

SEQ ID NO: 4006366 - RNA, 22 nt, Human immunodeficiency virus 2 (HIV-2)
acauggcaggagugggagaaac

SEQ ID NO: 4006367 - RNA, 20 nt, Human immunodeficiency virus 2 (HIV-2)
accggggacagccagccaac

SEQ ID NO: 4006368 - RNA, 16 nt, Human immunodeficiency virus 2 (HIV-2)
acuacaaauuaauaga

SEQ ID NO: 4006369 - RNA, 16 nt, Human immunodeficiency virus 2 (HIV-2)
acuacgagagagacuc

SEQ ID NO: 4006370 - RNA, 17 nt, Human immunodeficiency virus 2 (HIV-2)
acugcaauaugggugcg

SEQ ID NO: 4006371 - RNA, 18 nt, Human immunodeficiency virus 2 (HIV-2)
acuuaaccuccuggguca

SEQ ID NO: 4006372 - RNA, 16 nt, Human immunodeficiency virus 2 (HIV-2)
acuuagggagugacug

SEQ ID NO: 4006373 - RNA, 15 nt, Human immunodeficiency virus 2 (HIV-2)
agaguuugggcacaa

SEQ ID NO: 4006374 - RNA, 22 nt, Human immunodeficiency virus 2 (HIV-2)
agcugguggggaacgcccucau

SEQ ID NO: 4006375 - RNA, 16 nt, Human immunodeficiency virus 2 (HIV-2)
aggcagcaaaauaugg

SEQ ID NO: 4006376 - RNA, 12 nt, Human immunodeficiency virus 2 (HIV-2)
agggacagcagu

SEQ ID NO: 4006377 - RNA, 15 nt, Human immunodeficiency virus 2 (HIV-2)
agucgcucugcggag

SEQ ID NO: 4006378 - RNA, 19 nt, Human immunodeficiency virus 2 (HIV-2)
agugcaauuguuaaguaga

SEQ ID NO: 4006379 - RNA, 14 nt, Human immunodeficiency virus 2 (HIV-2)
aucugcagagacuu

SEQ ID NO: 4006380 - RNA, 17 nt, Human immunodeficiency virus 2 (HIV-2)
auucaauauggagugca

SEQ ID NO: 4006381 - RNA, 18 nt, Human immunodeficiency virus 2 (HIV-2)
auuucaagagagggugca

SEQ ID NO: 4006382 - RNA, 19 nt, Human immunodeficiency virus 2 (HIV-2)
caaaacugaaagcaagagg

SEQ ID NO: 4006383 - RNA, 19 nt, Human immunodeficiency virus 2 (HIV-2)
caaaauauggaugauguag

SEQ ID NO: 4006384 - RNA, 21 nt, Human immunodeficiency virus 2 (HIV-2)
caagaguaccacggagagaaa

SEQ ID NO: 4006385 - RNA, 15 nt, Human immunodeficiency virus 2 (HIV-2)
caagauaagaaaagg

SEQ ID NO: 4006386 - RNA, 14 nt, Human immunodeficiency virus 2 (HIV-2)
cacuagagcagaaa

SEQ ID NO: 4006387 - RNA, 15 nt, Human immunodeficiency virus 2 (HIV-2)
cagaggaagaugagg

SEQ ID NO: 4006388 - RNA, 20 nt, Human immunodeficiency virus 2 (HIV-2)
caggaaacaguggagaagag

SEQ ID NO: 4006389 - RNA, 18 nt, Human immunodeficiency virus 2 (HIV-2)
cagugaggaacaaaagag

SEQ ID NO: 4006390 - RNA, 18 nt, Human immunodeficiency virus 2 (HIV-2)
cauggcaggagugggaga

SEQ ID NO: 4006391 - RNA, 23 nt, Human immunodeficiency virus 2 (HIV-2)
cccuagagccaugcacuaacaaa

SEQ ID NO: 4006392 - RNA, 22 nt, Human immunodeficiency virus 2 (HIV-2)
ccuggguguucccugcuggacu

SEQ ID NO: 4006393 - RNA, 17 nt, Human immunodeficiency virus 2 (HIV-2)
cgaguggauccaagaag

SEQ ID NO: 4006394 - RNA, 24 nt, Human immunodeficiency virus 2 (HIV-2)
cggagaggcuggcagaucgagccc

SEQ ID NO: 4006395 - RNA, 14 nt, Human immunodeficiency virus 2 (HIV-2)
cgguacugggcaga

SEQ ID NO: 4006396 - RNA, 16 nt, Human immunodeficiency virus 2 (HIV-2)
cuaaugcaaaaagcua

SEQ ID NO: 4006397 - RNA, 22 nt, Human immunodeficiency virus 2 (HIV-2)
cuagcagguagagccugggugu

SEQ ID NO: 4006398 - RNA, 12 nt, Human immunodeficiency virus 2 (HIV-2)
cucucagccaau

SEQ ID NO: 4006399 - RNA, 14 nt, Human immunodeficiency virus 2 (HIV-2)
cuguacccagaaga

SEQ ID NO: 4006400 - RNA, 16 nt, Human immunodeficiency virus 2 (HIV-2)
cuguacccagaagagu

SEQ ID NO: 4006401 - RNA, 23 nt, Human immunodeficiency virus 2 (HIV-2)
cuguaccgauuagaacugggaga

SEQ ID NO: 4006402 - RNA, 16 nt, Human immunodeficiency virus 2 (HIV-2)
cuuaguacacccagca

SEQ ID NO: 4006403 - RNA, 23 nt, Human immunodeficiency virus 2 (HIV-2)
gaacucucacaagaggcagagga

SEQ ID NO: 4006404 - RNA, 13 nt, Human immunodeficiency virus 2 (HIV-2)
gaacugggagacu

SEQ ID NO: 4006405 - RNA, 14 nt, Human immunodeficiency virus 2 (HIV-2)
gaaguggcagaacu

SEQ ID NO: 4006406 - RNA, 18 nt, Human immunodeficiency virus 2 (HIV-2)
gacaagugaguauggagc

SEQ ID NO: 4006407 - RNA, 17 nt, Human immunodeficiency virus 2 (HIV-2)
gacagaaagauuuguau

SEQ ID NO: 4006408 - RNA, 22 nt, Human immunodeficiency virus 2 (HIV-2)
gacagcaguaucagcagggaga

SEQ ID NO: 4006409 - RNA, 18 nt, Human immunodeficiency virus 2 (HIV-2)
gacaugggaggagcuggu

SEQ ID NO: 4006410 - RNA, 18 nt, Human immunodeficiency virus 2 (HIV-2)
gacuggguaauagaaacu

SEQ ID NO: 4006411 - RNA, 18 nt, Human immunodeficiency virus 2 (HIV-2)
gagguucucuccagcacu

SEQ ID NO: 4006412 - RNA, 14 nt, Human immunodeficiency virus 2 (HIV-2)
gauagugcagcaac

SEQ ID NO: 4006413 - RNA, 15 nt, Human immunodeficiency virus 2 (HIV-2)
gauguagauucugau

SEQ ID NO: 4006414 - RNA, 15 nt, Human immunodeficiency virus 2 (HIV-2)
gauucugaugaugau

SEQ ID NO: 4006415 - RNA, 18 nt, Human immunodeficiency virus 2 (HIV-2)
gcaaugugaguucaauau

SEQ ID NO: 4006416 - RNA, 20 nt, Human immunodeficiency virus 2 (HIV-2)
gcaccuacagaucagagaag

SEQ ID NO: 4006417 - RNA, 13 nt, Human immunodeficiency virus 2 (HIV-2)
gcagacggcucca

SEQ ID NO: 4006418 - RNA, 18 nt, Human immunodeficiency virus 2 (HIV-2)
gccuggguguucccugcu

SEQ ID NO: 4006419 - RNA, 16 nt, Human immunodeficiency virus 2 (HIV-2)
gccuucugcaccagac

SEQ ID NO: 4006420 - RNA, 19 nt, Human immunodeficiency virus 2 (HIV-2)
gcucugcggagaggcuggc

SEQ ID NO: 4006421 - RNA, 16 nt, Human immunodeficiency virus 2 (HIV-2)
gcugcaccgaccccua

SEQ ID NO: 4006422 - RNA, 16 nt, Human immunodeficiency virus 2 (HIV-2)
ggaauaucauaugagc

SEQ ID NO: 4006423 - RNA, 23 nt, Human immunodeficiency virus 2 (HIV-2)
ggcacaagucaggauugccagag

SEQ ID NO: 4006424 - RNA, 22 nt, Human immunodeficiency virus 2 (HIV-2)
ggcuagagaggaccauagaagc

SEQ ID NO: 4006425 - RNA, 20 nt, Human immunodeficiency virus 2 (HIV-2)
gggacagcaguaucagcagg

SEQ ID NO: 4006426 - RNA, 20 nt, Human immunodeficiency virus 2 (HIV-2)
guacuuggccgguacugggc

SEQ ID NO: 4006427 - RNA, 16 nt, Human immunodeficiency virus 2 (HIV-2)
gugggagaaacaaguc

SEQ ID NO: 4006428 - RNA, 19 nt, Human immunodeficiency virus 2 (HIV-2)
guucaucugaguaacaaga

SEQ ID NO: 4006429 - RNA, 13 nt, Human immunodeficiency virus 2 (HIV-2)
uaaacagggaggc

SEQ ID NO: 4006430 - RNA, 16 nt, Human immunodeficiency virus 2 (HIV-2)
uacagugacagaacaa

SEQ ID NO: 4006431 - RNA, 19 nt, Human immunodeficiency virus 2 (HIV-2)
uagaacucucacaagaggc

SEQ ID NO: 4006432 - RNA, 15 nt, Human immunodeficiency virus 2 (HIV-2)
uaguacaacaaaaug

SEQ ID NO: 4006433 - RNA, 19 nt, Human immunodeficiency virus 2 (HIV-2)
ggaaacaguggagaagaga

SEQ ID NO: 4006434 - RNA, 18 nt, Human immunodeficiency virus 2 (HIV-2)
ggaagccaugcaggaggu

SEQ ID NO: 4006435 - RNA, 20 nt, Human immunodeficiency virus 2 (HIV-2)
ggaauaauacagugacagaa

SEQ ID NO: 4006436 - RNA, 21 nt, Human immunodeficiency virus 2 (HIV-2)
ggacagcaguaucagcaggga

SEQ ID NO: 4006437 - RNA, 16 nt, Human immunodeficiency virus 2 (HIV-2)
ggagaggcuggcagau

SEQ ID NO: 4006438 - RNA, 19 nt, Human immunodeficiency virus 2 (HIV-2)
ggcagacgaagaaggacuc

SEQ ID NO: 4006439 - RNA, 16 nt, Human immunodeficiency virus 2 (HIV-2)
gggacuuagggaguga

SEQ ID NO: 4006440 - RNA, 14 nt, Human immunodeficiency virus 2 (HIV-2)
guauaggcagcaaa

SEQ ID NO: 4006441 - RNA, 15 nt, Human immunodeficiency virus 2 (HIV-2)
gucuguuaggacccu

SEQ ID NO: 4006442 - RNA, 23 nt, Human immunodeficiency virus 2 (HIV-2)
guggcaaugaauuguagcagggu

SEQ ID NO: 4006443 - RNA, 16 nt, Human immunodeficiency virus 2 (HIV-2)
guggggaacgcccuca

SEQ ID NO: 4006444 - RNA, 18 nt, Human immunodeficiency virus 2 (HIV-2)
uaccacggagagaaauga

SEQ ID NO: 4006445 - RNA, 21 nt, Human immunodeficiency virus 2 (HIV-2)
uacuuggccgguacugggcag

SEQ ID NO: 4006446 - RNA, 22 nt, Human immunodeficiency virus 2 (HIV-2)
uaggcagcaaaauauggaugau

SEQ ID NO: 4006447 - RNA, 14 nt, Human immunodeficiency virus 2 (HIV-2)
uagugcagcaacag

SEQ ID NO: 4006448 - RNA, 14 nt, Human immunodeficiency virus 2 (HIV-2)
uauaaggacacaug

SEQ ID NO: 4006449 - RNA, 16 nt, Human immunodeficiency virus 2 (HIV-2)
uauaccuagaaaaaga

SEQ ID NO: 4006450 - RNA, 14 nt, Human immunodeficiency virus 2 (HIV-2)
uauaggcagcaaaa

SEQ ID NO: 4006451 - RNA, 12 nt, Human immunodeficiency virus 2 (HIV-2)
ucaggcagggag

SEQ ID NO: 4006452 - RNA, 13 nt, Human immunodeficiency virus 2 (HIV-2)
ucaggcagggagc

SEQ ID NO: 4006453 - RNA, 15 nt, Human immunodeficiency virus 2 (HIV-2)
ucgccuucugcacca

SEQ ID NO: 4006454 - RNA, 14 nt, Human immunodeficiency virus 2 (HIV-2)
ugaaagcaagaggg

SEQ ID NO: 4006455 - RNA, 19 nt, Human immunodeficiency virus 2 (HIV-2)
ugaacagcccauggagaaa

SEQ ID NO: 4006456 - RNA, 17 nt, Human immunodeficiency virus 2 (HIV-2)
ugcuggacucucaccag

SEQ ID NO: 4006457 - RNA, 23 nt, Human immunodeficiency virus 2 (HIV-2)
uggacguagucaagagacaacaa

SEQ ID NO: 4006458 - RNA, 18 nt, Human immunodeficiency virus 2 (HIV-2)
uggcaggagugggagaaa

SEQ ID NO: 4006459 - RNA, 20 nt, Human immunodeficiency virus 2 (HIV-2)
uggcauaaaguagggaaaaa

SEQ ID NO: 4006460 - RNA, 21 nt, Human immunodeficiency virus 2 (HIV-2)
uggcauacccgcguggaaaaa

SEQ ID NO: 4006461 - RNA, 15 nt, Human immunodeficiency virus 2 (HIV-2)
uucaacaagaaaaga

SEQ ID NO: 4006462 - RNA, 15 nt, Human immunodeficiency virus 2 (HIV-2)
uucucuccagcacua

SEQ ID NO: 4006463 - RNA, 21 nt, Human immunodeficiency virus 2 (HIV-2)
uuuaucgccugacuggaaaaa

SEQ ID NO: 4006464 - RNA, 16 nt, Human immunodeficiency virus 2 (HIV-2)
uacuuggucaaggcag

SEQ ID NO: 4006465 - RNA, 21 nt, Human immunodeficiency virus 2 (HIV-2)
uagaagccuuaaacagggagg

SEQ ID NO: 4006466 - RNA, 14 nt, Human immunodeficiency virus 2 (HIV-2)
uagauucugaugau

SEQ ID NO: 4006467 - RNA, 14 nt, Human immunodeficiency virus 2 (HIV-2)
uaguaguacaacaa

SEQ ID NO: 4006468 - RNA, 21 nt, Human immunodeficiency virus 2 (HIV-2)
uauagugaauaacaggaacaa

SEQ ID NO: 4006469 - RNA, 20 nt, Human immunodeficiency virus 2 (HIV-2)
ucccuuauuuugugcaacua

SEQ ID NO: 4006470 - RNA, 14 nt, Human immunodeficiency virus 2 (HIV-2)
uccugcugcaacua

SEQ ID NO: 4006471 - RNA, 20 nt, Human immunodeficiency virus 2 (HIV-2)
ucucagccaaucaacacaag

SEQ ID NO: 4006472 - RNA, 12 nt, Human immunodeficiency virus 2 (HIV-2)
ugggcacaaguc

SEQ ID NO: 4006473 - RNA, 14 nt, Human immunodeficiency virus 2 (HIV-2)
uuacaguaggagga

SEQ ID NO: 4006474 - RNA, 22 nt, Human immunodeficiency virus 2 (HIV-2)
uuauacucaugggccaggagua

SEQ ID NO: 4006475 - RNA, 19 nt, Human immunodeficiency virus 2 (HIV-2)
uucgaguggcuagagagga

SEQ ID NO: 4006476 - RNA, 15 nt, Human immunodeficiency virus 2 (HIV-2)
uugcuggggggagga

SEQ ID NO: 4006477 - RNA, 13 nt, Human immunodeficiency virus 2 (HIV-2)
aaagaauauguau

SEQ ID NO: 4006478 - RNA, 12 nt, Human immunodeficiency virus 2 (HIV-2)
aacaaggagaag

SEQ ID NO: 4006479 - RNA, 16 nt, Human immunodeficiency virus 2 (HIV-2)
aacagaaagacagaaa

SEQ ID NO: 4006480 - RNA, 15 nt, Human immunodeficiency virus 2 (HIV-2)
aaggaacagaagaag

SEQ ID NO: 4006481 - RNA, 23 nt, Human immunodeficiency virus 2 (HIV-2)
aaguagcuacuaagaaacagcug

SEQ ID NO: 4006482 - RNA, 22 nt, Human immunodeficiency virus 2 (HIV-2)
aauuguuaaguagauuuagaaa

SEQ ID NO: 4006483 - RNA, 21 nt, Human immunodeficiency virus 2 (HIV-2)
acagaguuucccccagaagau

SEQ ID NO: 4006484 - RNA, 23 nt, Human immunodeficiency virus 2 (HIV-2)
accucuauguguggcaaugaauu

SEQ ID NO: 4006485 - RNA, 17 nt, Human immunodeficiency virus 2 (HIV-2)
acuaaaaauagagacac

SEQ ID NO: 4006486 - RNA, 22 nt, Human immunodeficiency virus 2 (HIV-2)
acugcauagaaaacaacacaug

SEQ ID NO: 4006487 - RNA, 13 nt, Human immunodeficiency virus 2 (HIV-2)
acuuacuguauaa

SEQ ID NO: 4006488 - RNA, 21 nt, Human immunodeficiency virus 2 (HIV-2)
agaacaagcaguagaagaugu

SEQ ID NO: 4006489 - RNA, 23 nt, Human immunodeficiency virus 2 (HIV-2)
agaagaacuccuugcccagcugc

SEQ ID NO: 4006490 - RNA, 16 nt, Human immunodeficiency virus 2 (HIV-2)
agaagaaucaggcagg

SEQ ID NO: 4006491 - RNA, 15 nt, Human immunodeficiency virus 2 (HIV-2)
agacauauaccuaga

SEQ ID NO: 4006492 - RNA, 15 nt, Human immunodeficiency virus 2 (HIV-2)
agaguuucccccaga

SEQ ID NO: 4006493 - RNA, 13 nt, Human immunodeficiency virus 2 (HIV-2)
agcaguagaagau

SEQ ID NO: 4006494 - RNA, 20 nt, Human immunodeficiency virus 2 (HIV-2)
agccaucagaggggaaaagu

SEQ ID NO: 4006495 - RNA, 14 nt, Human immunodeficiency virus 2 (HIV-2)
aggagaugaugcaa

SEQ ID NO: 4006496 - RNA, 23 nt, Human immunodeficiency virus 2 (HIV-2)
agggauaauaccagauuggcaga

SEQ ID NO: 4006497 - RNA, 12 nt, Human immunodeficiency virus 2 (HIV-2)
aguacacccagc

SEQ ID NO: 4006498 - RNA, 17 nt, Human immunodeficiency virus 2 (HIV-2)
aguaccacggagagaaa

SEQ ID NO: 4006499 - RNA, 19 nt, Human immunodeficiency virus 2 (HIV-2)
agucaaaguuuagaagaag

SEQ ID NO: 4006500 - RNA, 19 nt, Human immunodeficiency virus 2 (HIV-2)
auaaaguagggaaaaaugu

SEQ ID NO: 4006501 - RNA, 22 nt, Human immunodeficiency virus 2 (HIV-2)
auacagugcuugccagacaaug

SEQ ID NO: 4006502 - RNA, 14 nt, Human immunodeficiency virus 2 (HIV-2)
auauccauaauaga

SEQ ID NO: 4006503 - RNA, 21 nt, Human immunodeficiency virus 2 (HIV-2)
augcacaaggaugauggaaac

SEQ ID NO: 4006504 - RNA, 17 nt, Human immunodeficiency virus 2 (HIV-2)
caaaaauuaaauagcug

SEQ ID NO: 4006505 - RNA, 21 nt, Human immunodeficiency virus 2 (HIV-2)
caacaucccagauacaaagga

SEQ ID NO: 4006506 - RNA, 12 nt, Human immunodeficiency virus 2 (HIV-2)
caacgagcccuc

SEQ ID NO: 4006507 - RNA, 11 nt, Human immunodeficiency virus 2 (HIV-2)
caagaaaagaa

SEQ ID NO: 4006508 - RNA, 17 nt, Human immunodeficiency virus 2 (HIV-2)
cacauuuuauaaaagaa

SEQ ID NO: 4006509 - RNA, 18 nt, Human immunodeficiency virus 2 (HIV-2)
cacuagagcagaaaauag

SEQ ID NO: 4006510 - RNA, 22 nt, Human immunodeficiency virus 2 (HIV-2)
cacuagcagguagagccugggu

SEQ ID NO: 4006511 - RNA, 17 nt, Human immunodeficiency virus 2 (HIV-2)
cagaccccagagaaagg

SEQ ID NO: 4006512 - RNA, 22 nt, Human immunodeficiency virus 2 (HIV-2)
cagagacuuacuauccaagaac

SEQ ID NO: 4006513 - RNA, 13 nt, Human immunodeficiency virus 2 (HIV-2)
cagauuggcagaa

SEQ ID NO: 4006514 - RNA, 19 nt, Human immunodeficiency virus 2 (HIV-2)
cagcaguaucagcagggag

SEQ ID NO: 4006515 - RNA, 14 nt, Human immunodeficiency virus 2 (HIV-2)
caucagaggggaaa

SEQ ID NO: 4006516 - RNA, 20 nt, Human immunodeficiency virus 2 (HIV-2)
caucugaguaacaagacccu

SEQ ID NO: 4006517 - RNA, 22 nt, Human immunodeficiency virus 2 (HIV-2)
caugaugaugagcauggggaga

SEQ ID NO: 4006518 - RNA, 17 nt, Human immunodeficiency virus 2 (HIV-2)
cauggagaaacccagca

SEQ ID NO: 4006519 - RNA, 22 nt, Human immunodeficiency virus 2 (HIV-2)
ccaagcauucgcgaggacuacg

SEQ ID NO: 4006520 - RNA, 18 nt, Human immunodeficiency virus 2 (HIV-2)
cccuagagccaugcacua

SEQ ID NO: 4006521 - RNA, 19 nt, Human immunodeficiency virus 2 (HIV-2)
ccugcuggacucucaccag

SEQ ID NO: 4006522 - RNA, 21 nt, Human immunodeficiency virus 2 (HIV-2)
cuccugugagggacagcagua

SEQ ID NO: 4006523 - RNA, 15 nt, Human immunodeficiency virus 2 (HIV-2)
cugaccgucugggga

SEQ ID NO: 4006524 - RNA, 15 nt, Human immunodeficiency virus 2 (HIV-2)
cuucaugcacaagga

SEQ ID NO: 4006525 - RNA, 19 nt, Human immunodeficiency virus 2 (HIV-2)
gaaacccagcaacagaaag

SEQ ID NO: 4006526 - RNA, 20 nt, Human immunodeficiency virus 2 (HIV-2)
gaagaaucaggcagggagca

SEQ ID NO: 4006527 - RNA, 12 nt, Human immunodeficiency virus 2 (HIV-2)
gaagcuuuccaa

SEQ ID NO: 4006528 - RNA, 14 nt, Human immunodeficiency virus 2 (HIV-2)
gaaucaggcaggga

SEQ ID NO: 4006529 - RNA, 23 nt, Human immunodeficiency virus 2 (HIV-2)
gacacccuugaaggcgccagaga

SEQ ID NO: 4006530 - RNA, 20 nt, Human immunodeficiency virus 2 (HIV-2)
gacagcaguaucagcaggga

SEQ ID NO: 4006531 - RNA, 17 nt, Human immunodeficiency virus 2 (HIV-2)
gaccauuggagaggccu

SEQ ID NO: 4006532 - RNA, 13 nt, Human immunodeficiency virus 2 (HIV-2)
gaccccagagaaa

SEQ ID NO: 4006533 - RNA, 17 nt, Human immunodeficiency virus 2 (HIV-2)
gacuacgagagagacuc

SEQ ID NO: 4006534 - RNA, 16 nt, Human immunodeficiency virus 2 (HIV-2)
gacucucaccaguacu

SEQ ID NO: 4006535 - RNA, 18 nt, Human immunodeficiency virus 2 (HIV-2)
gacuggcugagacuuaag

SEQ ID NO: 4006536 - RNA, 20 nt, Human immunodeficiency virus 2 (HIV-2)
gagacuacaaauuaauagaa

SEQ ID NO: 4006537 - RNA, 15 nt, Human immunodeficiency virus 2 (HIV-2)
gagcauggggagaca

SEQ ID NO: 4006538 - RNA, 19 nt, Human immunodeficiency virus 2 (HIV-2)
gaggacuacgagagagacu

SEQ ID NO: 4006539 - RNA, 20 nt, Human immunodeficiency virus 2 (HIV-2)
gaugugcguuuagacagguc

SEQ ID NO: 4006540 - RNA, 17 nt, Human immunodeficiency virus 2 (HIV-2)
gcaacagaaagacagaa

SEQ ID NO: 4006541 - RNA, 23 nt, Human immunodeficiency virus 2 (HIV-2)
gcacaagucaggauugccagaga

SEQ ID NO: 4006542 - RNA, 21 nt, Human immunodeficiency virus 2 (HIV-2)
gcagccuccauaauaaaugaa

SEQ ID NO: 4006543 - RNA, 23 nt, Human immunodeficiency virus 2 (HIV-2)
gcgacugaccgucuggggaacga

SEQ ID NO: 4006544 - RNA, 18 nt, Human immunodeficiency virus 2 (HIV-2)
ggacuacgagagagacuc

SEQ ID NO: 4006545 - RNA, 21 nt, Human immunodeficiency virus 2 (HIV-2)
ggagaagagaccauuggagag

SEQ ID NO: 4006546 - RNA, 19 nt, Human immunodeficiency virus 2 (HIV-2)
ggagcagaacucgcccucc

SEQ ID NO: 4006547 - RNA, 16 nt, Human immunodeficiency virus 2 (HIV-2)
ggcaagagucacugcu

SEQ ID NO: 4006548 - RNA, 14 nt, Human immunodeficiency virus 2 (HIV-2)
ggcagacggcucca

SEQ ID NO: 4006549 - RNA, 17 nt, Human immunodeficiency virus 2 (HIV-2)
gggaaauaaaggaagaa

SEQ ID NO: 4006550 - RNA, 13 nt, Human immunodeficiency virus 2 (HIV-2)
gggccgggaagga

SEQ ID NO: 4006551 - RNA, 20 nt, Human immunodeficiency virus 2 (HIV-2)
ggggaugguuaugggaagca

SEQ ID NO: 4006552 - RNA, 17 nt, Human immunodeficiency virus 2 (HIV-2)
guacugggcagacggcu

SEQ ID NO: 4006553 - RNA, 14 nt, Human immunodeficiency virus 2 (HIV-2)
guaugaggagauga

SEQ ID NO: 4006554 - RNA, 17 nt, Human immunodeficiency virus 2 (HIV-2)
guggcuagagaggacca

SEQ ID NO: 4006555 - RNA, 13 nt, Human immunodeficiency virus 2 (HIV-2)
guuugggcacaag

SEQ ID NO: 4006556 - RNA, 19 nt, Human immunodeficiency virus 2 (HIV-2)
uaaauagcugggauauucu

SEQ ID NO: 4006557 - RNA, 20 nt, Human immunodeficiency virus 2 (HIV-2)
uacaacaucugcagagacuu

SEQ ID NO: 4006558 - RNA, 15 nt, Human immunodeficiency virus 2 (HIV-2)
uauaaucucacaaug

SEQ ID NO: 4006559 - RNA, 14 nt, Human immunodeficiency virus 2 (HIV-2)
ucaaggcaggaagu

SEQ ID NO: 4006560 - RNA, 17 nt, Human immunodeficiency virus 2 (HIV-2)
ucaguagaacucucaca

SEQ ID NO: 4006561 - RNA, 12 nt, Human immunodeficiency virus 2 (HIV-2)
ucccccuccagg

SEQ ID NO: 4006562 - RNA, 12 nt, Human immunodeficiency virus 2 (HIV-2)
ucccugcuggac

SEQ ID NO: 4006563 - RNA, 14 nt, Human immunodeficiency virus 2 (HIV-2)
uccugauccaccua

SEQ ID NO: 4006564 - RNA, 16 nt, Human immunodeficiency virus 2 (HIV-2)
uccugugagggacagc

SEQ ID NO: 4006565 - RNA, 18 nt, Human immunodeficiency virus 2 (HIV-2)
uccugugagggacagcag

SEQ ID NO: 4006566 - RNA, 14 nt, Human immunodeficiency virus 2 (HIV-2)
ugcagcaacagcaa

SEQ ID NO: 4006567 - RNA, 21 nt, Human immunodeficiency virus 2 (HIV-2)
ugcuucaugcacaaggaugau

SEQ ID NO: 4006568 - RNA, 19 nt, Human immunodeficiency virus 2 (HIV-2)
uggagaaacccagcaacag

SEQ ID NO: 4006569 - RNA, 18 nt, Human immunodeficiency virus 2 (HIV-2)
ugggaauccaaggcagga

SEQ ID NO: 4006570 - RNA, 14 nt, Human immunodeficiency virus 2 (HIV-2)
uggucaaggcagga

SEQ ID NO: 4006571 - RNA, 17 nt, Human immunodeficiency virus 2 (HIV-2)
uguaccgauuagaacug

SEQ ID NO: 4006572 - RNA, 22 nt, Human immunodeficiency virus 2 (HIV-2)
uguguguucccaucucuccuag

SEQ ID NO: 4006573 - RNA, 18 nt, Human immunodeficiency virus 2 (HIV-2)
uguucccaucucuccuag

SEQ ID NO: 4006574 - RNA, 20 nt, Human immunodeficiency virus 2 (HIV-2)
uucccugcuggacucucacc

SEQ ID NO: 4006575 - RNA, 17 nt, Human immunodeficiency virus 2 (HIV-2)
uuggucaaggcaggaag

SEQ ID NO: 4006576 - RNA, 16 nt, Human immunodeficiency virus 2 [HIV-2]
aaaauaugacauggca

SEQ ID NO: 4006577 - RNA, 20 nt, Human immunodeficiency virus 2 [HIV-2]
aaaauaugacauggcaggag

SEQ ID NO: 4006578 - RNA, 11 nt, Human immunodeficiency virus 2 [HIV-2]
aaagcugccag

SEQ ID NO: 4006579 - RNA, 19 nt, Human immunodeficiency virus 2 [HIV-2]
aacagcaaucagggacugg

SEQ ID NO: 4006580 - RNA, 20 nt, Human immunodeficiency virus 2 [HIV-2]
aacagcaaucagggacuggc

SEQ ID NO: 4006581 - RNA, 18 nt, Human immunodeficiency virus 2 [HIV-2]
aacaucugcagagacuua

SEQ ID NO: 4006582 - RNA, 12 nt, Human immunodeficiency virus 2 [HIV-2]
aaccaagggagg

SEQ ID NO: 4006583 - RNA, 16 nt, Human immunodeficiency virus 2 [HIV-2]
aacgcccucauacuua

SEQ ID NO: 4006584 - RNA, 21 nt, Human immunodeficiency virus 2 [HIV-2]
aagaauuggcuaaacaaggag

SEQ ID NO: 4006585 - RNA, 20 nt, Human immunodeficiency virus 2 [HIV-2]
aagcugccaguuagaagcaa

SEQ ID NO: 4006586 - RNA, 14 nt, Human immunodeficiency virus 2 [HIV-2]
aaguaagaagagcc

SEQ ID NO: 4006587 - RNA, 14 nt, Human immunodeficiency virus 2 [HIV-2]
aauaaagcugccag

SEQ ID NO: 4006588 - RNA, 22 nt, Human immunodeficiency virus 2 [HIV-2]
aaucagggacuggcugagacuu

SEQ ID NO: 4006589 - RNA, 13 nt, Human immunodeficiency virus 2 [HIV-2]
acaacgagcccuc

SEQ ID NO: 4006590 - RNA, 17 nt, Human immunodeficiency virus 2 [HIV-2]
acaaggccuaggcaggc

SEQ ID NO: 4006591 - RNA, 18 nt, Human immunodeficiency virus 2 [HIV-2]
acaaguccgcuaccuaga

SEQ ID NO: 4006592 - RNA, 19 nt, Human immunodeficiency virus 2 [HIV-2]
aaaaaccuccaggcaagag

SEQ ID NO: 4006593 - RNA, 20 nt, Human immunodeficiency virus 2 [HIV-2]
aaaaagggggacugcaaggg

SEQ ID NO: 4006594 - RNA, 22 nt, Human immunodeficiency virus 2 [HIV-2]
aaagcagauaauuaauaccugg

SEQ ID NO: 4006595 - RNA, 19 nt, Human immunodeficiency virus 2 [HIV-2]
aaagcuauauuuacacauu

SEQ ID NO: 4006596 - RNA, 21 nt, Human immunodeficiency virus 2 [HIV-2]
aacaacacaugcgcaggauua

SEQ ID NO: 4006597 - RNA, 20 nt, Human immunodeficiency virus 2 [HIV-2]
aacacaucaaucaucaaaga

SEQ ID NO: 4006598 - RNA, 18 nt, Human immunodeficiency virus 2 [HIV-2]
aagaagccuuaagacauu

SEQ ID NO: 4006599 - RNA, 15 nt, Human immunodeficiency virus 2 [HIV-2]
aagaauauguaugaa

SEQ ID NO: 4006600 - RNA, 20 nt, Human immunodeficiency virus 2 [HIV-2]
aagaauggaaggcaaaacug

SEQ ID NO: 4006601 - RNA, 13 nt, Human immunodeficiency virus 2 [HIV-2]
aagagaccaggaa

SEQ ID NO: 4006602 - RNA, 16 nt, Human immunodeficiency virus 2 [HIV-2]
aagaguaccacggaga

SEQ ID NO: 4006603 - RNA, 16 nt, Human immunodeficiency virus 2 [HIV-2]
aauaaaggaagaagcc

SEQ ID NO: 4006604 - RNA, 22 nt, Human immunodeficiency virus 2 [HIV-2]
aauaacacuuaugucaggauua

SEQ ID NO: 4006605 - RNA, 13 nt, Human immunodeficiency virus 2 [HIV-2]
aauagaacauaua

SEQ ID NO: 4006606 - RNA, 15 nt, Human immunodeficiency virus 2 [HIV-2]
acaccaauuggcuuc

SEQ ID NO: 4006607 - RNA, 15 nt, Human immunodeficiency virus 2 [HIV-2]
acagcaaucagggac

SEQ ID NO: 4006608 - RNA, 21 nt, Human immunodeficiency virus 2 [HIV-2]
acagcaaucagggacuggcug

SEQ ID NO: 4006609 - RNA, 21 nt, Human immunodeficiency virus 2 [HIV-2]
acagcaguaucagcagggaga

SEQ ID NO: 4006610 - RNA, 14 nt, Human immunodeficiency virus 2 [HIV-2]
acagcugaggcugc

SEQ ID NO: 4006611 - RNA, 16 nt, Human immunodeficiency virus 2 [HIV-2]
acauguuacaugagac

SEQ ID NO: 4006612 - RNA, 13 nt, Human immunodeficiency virus 2 [HIV-2]
acauugacauaga

SEQ ID NO: 4006613 - RNA, 22 nt, Human immunodeficiency virus 2 [HIV-2]
accauacuuggucaaggcagga

SEQ ID NO: 4006614 - RNA, 19 nt, Human immunodeficiency virus 2 [HIV-2]
acggcgcaacuauugccau

SEQ ID NO: 4006615 - RNA, 17 nt, Human immunodeficiency virus 2 [HIV-2]
acggcuccacgcuugcu

SEQ ID NO: 4006616 - RNA, 13 nt, Human immunodeficiency virus 2 [HIV-2]
acuaacugcagag

SEQ ID NO: 4006617 - RNA, 17 nt, Human immunodeficiency virus 2 [HIV-2]
acuaacugcagaggaga

SEQ ID NO: 4006618 - RNA, 18 nt, Human immunodeficiency virus 2 [HIV-2]
acuuacuguauaaaugua

SEQ ID NO: 4006619 - RNA, 22 nt, Human immunodeficiency virus 2 [HIV-2]
agaacucucacaagaggcagag

SEQ ID NO: 4006620 - RNA, 16 nt, Human immunodeficiency virus 2 [HIV-2]
agaagagccaucagag

SEQ ID NO: 4006621 - RNA, 22 nt, Human immunodeficiency virus 2 [HIV-2]
agaaguaccuaaagcaucaggc

SEQ ID NO: 4006622 - RNA, 13 nt, Human immunodeficiency virus 2 [HIV-2]
agaggcuggcaga

SEQ ID NO: 4006623 - RNA, 16 nt, Human immunodeficiency virus 2 [HIV-2]
agagggauaccauaua

SEQ ID NO: 4006624 - RNA, 14 nt, Human immunodeficiency virus 2 [HIV-2]
agauguaaugauac

SEQ ID NO: 4006625 - RNA, 14 nt, Human immunodeficiency virus 2 [HIV-2]
agcaaucagggacu

SEQ ID NO: 4006626 - RNA, 21 nt, Human immunodeficiency virus 2 [HIV-2]
agcacuagcagguagagccug

SEQ ID NO: 4006627 - RNA, 15 nt, Human immunodeficiency virus 2 [HIV-2]
agcagguagagccug

SEQ ID NO: 4006628 - RNA, 19 nt, Human immunodeficiency virus 2 [HIV-2]
agcuacuaagaaacagcug

SEQ ID NO: 4006629 - RNA, 21 nt, Human immunodeficiency virus 2 [HIV-2]
agcuacuaagaaacagcugag

SEQ ID NO: 4006630 - RNA, 13 nt, Human immunodeficiency virus 2 [HIV-2]
aggaaauaagaca

SEQ ID NO: 4006631 - RNA, 12 nt, Human immunodeficiency virus 2 [HIV-2]
aggacaugggcc

SEQ ID NO: 4006632 - RNA, 21 nt, Human immunodeficiency virus 2 [HIV-2]
aggaccggggacagccagcca

SEQ ID NO: 4006633 - RNA, 14 nt, Human immunodeficiency virus 2 [HIV-2]
aggcaaaacugaaa

SEQ ID NO: 4006634 - RNA, 21 nt, Human immunodeficiency virus 2 [HIV-2]
aggcuggcagaucgagcccug

SEQ ID NO: 4006635 - RNA, 23 nt, Human immunodeficiency virus 2 [HIV-2]
aggcuuugaaccuaagugcacua

SEQ ID NO: 4006636 - RNA, 23 nt, Human immunodeficiency virus 2 [HIV-2]
agguacuccucaacuccagugag

SEQ ID NO: 4006637 - RNA, 13 nt, Human immunodeficiency virus 2 [HIV-2]
agguagagccugg

SEQ ID NO: 4006638 - RNA, 15 nt, Human immunodeficiency virus 2 [HIV-2]
aguacacccagcaca

SEQ ID NO: 4006639 - RNA, 16 nt, Human immunodeficiency virus 2 [HIV-2]
aguaccacggagagaa

SEQ ID NO: 4006640 - RNA, 14 nt, Human immunodeficiency virus 2 [HIV-2]
aguggauccaagaa

SEQ ID NO: 4006641 - RNA, 17 nt, Human immunodeficiency virus 2 [HIV-2]
aguguuucacucucagc

SEQ ID NO: 4006642 - RNA, 14 nt, Human immunodeficiency virus 2 [HIV-2]
auaauacagugaca

SEQ ID NO: 4006643 - RNA, 12 nt, Human immunodeficiency virus 2 [HIV-2]
auaauaggacua

SEQ ID NO: 4006644 - RNA, 19 nt, Human immunodeficiency virus 2 [HIV-2]
auacagugcuugccagaca

SEQ ID NO: 4006645 - RNA, 17 nt, Human immunodeficiency virus 2 [HIV-2]
auacuuggucaaggcag

SEQ ID NO: 4006646 - RNA, 21 nt, Human immunodeficiency virus 2 [HIV-2]
auagcaaucuauguagugcaa

SEQ ID NO: 4006647 - RNA, 14 nt, Human immunodeficiency virus 2 [HIV-2]
aucaggcagggagc

SEQ ID NO: 4006648 - RNA, 18 nt, Human immunodeficiency virus 2 [HIV-2]
auccauaauagacaugga

SEQ ID NO: 4006649 - RNA, 14 nt, Human immunodeficiency virus 2 [HIV-2]
auccuagacauaua

SEQ ID NO: 4006650 - RNA, 12 nt, Human immunodeficiency virus 2 [HIV-2]
aucucccagagu

SEQ ID NO: 4006651 - RNA, 20 nt, Human immunodeficiency virus 2 [HIV-2]
aucugaguaacaagacccug

SEQ ID NO: 4006652 - RNA, 13 nt, Human immunodeficiency virus 2 [HIV-2]
augacauggcagg

SEQ ID NO: 4006653 - RNA, 18 nt, Human immunodeficiency virus 2 [HIV-2]
auggagggaagccaugca

SEQ ID NO: 4006654 - RNA, 13 nt, Human immunodeficiency virus 2 [HIV-2]
augggccaggagu

SEQ ID NO: 4006655 - RNA, 21 nt, Human immunodeficiency virus 2 [HIV-2]
auuacaaaaauuaaauagcug

SEQ ID NO: 4006656 - RNA, 20 nt, Human immunodeficiency virus 2 [HIV-2]
auuggcaugaugaacaaggg

SEQ ID NO: 4006657 - RNA, 14 nt, Human immunodeficiency virus 2 [HIV-2]
caaacaagcagaca

SEQ ID NO: 4006658 - RNA, 19 nt, Human immunodeficiency virus 2 [HIV-2]
caagaagaaucaggcaggg

SEQ ID NO: 4006659 - RNA, 17 nt, Human immunodeficiency virus 2 [HIV-2]
caagagacaacaagaaa

SEQ ID NO: 4006660 - RNA, 16 nt, Human immunodeficiency virus 2 [HIV-2]
caagcagacaugauga

SEQ ID NO: 4006661 - RNA, 12 nt, Human immunodeficiency virus 2 [HIV-2]
caaggcaggaag

SEQ ID NO: 4006662 - RNA, 19 nt, Human immunodeficiency virus 2 [HIV-2]
caaucaucaaagagucaug

SEQ ID NO: 4006663 - RNA, 21 nt, Human immunodeficiency virus 2 [HIV-2]
cacccuugaaggcgccagaga

SEQ ID NO: 4006664 - RNA, 16 nt, Human immunodeficiency virus 2 [HIV-2]
cagaaagacagaaaga

SEQ ID NO: 4006665 - RNA, 13 nt, Human immunodeficiency virus 2 [HIV-2]
cagaaguggcaga

SEQ ID NO: 4006666 - RNA, 21 nt, Human immunodeficiency virus 2 [HIV-2]
cagacaagugaguauggagcc

SEQ ID NO: 4006667 - RNA, 18 nt, Human immunodeficiency virus 2 [HIV-2]
cagaccccagagaaaggg

SEQ ID NO: 4006668 - RNA, 14 nt, Human immunodeficiency virus 2 [HIV-2]
cagacgaagaagga

SEQ ID NO: 4006669 - RNA, 14 nt, Human immunodeficiency virus 2 [HIV-2]
cagaggaagaugag

SEQ ID NO: 4006670 - RNA, 13 nt, Human immunodeficiency virus 2 [HIV-2]
cagauacaaagga

SEQ ID NO: 4006671 - RNA, 14 nt, Human immunodeficiency virus 2 [HIV-2]
cagaucgagcccug

SEQ ID NO: 4006672 - RNA, 22 nt, Human immunodeficiency virus 2 [HIV-2]
cagcacaaacaagcagacauga

SEQ ID NO: 4006673 - RNA, 18 nt, Human immunodeficiency virus 2 [HIV-2]
cagcaguaucagcaggga

SEQ ID NO: 4006674 - RNA, 20 nt, Human immunodeficiency virus 2 [HIV-2]
cagcaguaucagcagggaga

SEQ ID NO: 4006675 - RNA, 21 nt, Human immunodeficiency virus 2 [HIV-2]
cagcaguaucagcagggagag

SEQ ID NO: 4006676 - RNA, 13 nt, Human immunodeficiency virus 2 [HIV-2]
caggaacaaccau

SEQ ID NO: 4006677 - RNA, 20 nt, Human immunodeficiency virus 2 [HIV-2]
caggauuaguguuucacucu

SEQ ID NO: 4006678 - RNA, 15 nt, Human immunodeficiency virus 2 [HIV-2]
caggauugccagaga

SEQ ID NO: 4006679 - RNA, 19 nt, Human immunodeficiency virus 2 [HIV-2]
caggauugccagagaaaga

SEQ ID NO: 4006680 - RNA, 16 nt, Human immunodeficiency virus 2 [HIV-2]
caguaaccagcauaau

SEQ ID NO: 4006681 - RNA, 24 nt, Human immunodeficiency virus 2 [HIV-2]
caguagaacucucacaagaggcag

SEQ ID NO: 4006682 - RNA, 13 nt, Human immunodeficiency virus 2 [HIV-2]
caguaugugacug

SEQ ID NO: 4006683 - RNA, 21 nt, Human immunodeficiency virus 2 [HIV-2]
cagugaggaacaaaagaggug

SEQ ID NO: 4006684 - RNA, 15 nt, Human immunodeficiency virus 2 [HIV-2]
cauaccaacauuacc

SEQ ID NO: 4006685 - RNA, 23 nt, Human immunodeficiency virus 2 [HIV-2]
cauauaucuauuggcauggcaga

SEQ ID NO: 4006686 - RNA, 18 nt, Human immunodeficiency virus 2 [HIV-2]
cauuuuacuaacaagugc

SEQ ID NO: 4006687 - RNA, 14 nt, Human immunodeficiency virus 2 [HIV-2]
ccaccuacugacuc

SEQ ID NO: 4006688 - RNA, 16 nt, Human immunodeficiency virus 2 [HIV-2]
ccgccgacugaucucc

SEQ ID NO: 4006689 - RNA, 16 nt, Human immunodeficiency virus 2 [HIV-2]
ccuagaaaaagaggaa

SEQ ID NO: 4006690 - RNA, 16 nt, Human immunodeficiency virus 2 [HIV-2]
cgaaggaacagaagaa

SEQ ID NO: 4006691 - RNA, 22 nt, Human immunodeficiency virus 2 [HIV-2]
cgcaggauuaggguaugaggag

SEQ ID NO: 4006692 - RNA, 18 nt, Human immunodeficiency virus 2 [HIV-2]
cggcaggugaaguaagaa

SEQ ID NO: 4006693 - RNA, 18 nt, Human immunodeficiency virus 2 [HIV-2]
cgggauagugcagcaaca

SEQ ID NO: 4006694 - RNA, 21 nt, Human immunodeficiency virus 2 [HIV-2]
cuaagaaacagcugaggcugc

SEQ ID NO: 4006695 - RNA, 14 nt, Human immunodeficiency virus 2 [HIV-2]
cucacaagaggcag

SEQ ID NO: 4006696 - RNA, 18 nt, Human immunodeficiency virus 2 [HIV-2]
cucgcaguuccaagaaga

SEQ ID NO: 4006697 - RNA, 22 nt, Human immunodeficiency virus 2 [HIV-2]
cucgcccuccugugagggacag

SEQ ID NO: 4006698 - RNA, 17 nt, Human immunodeficiency virus 2 [HIV-2]
cucuucaauaaagcugc

SEQ ID NO: 4006699 - RNA, 17 nt, Human immunodeficiency virus 2 [HIV-2]
cugagagguucucucca

SEQ ID NO: 4006700 - RNA, 13 nt, Human immunodeficiency virus 2 [HIV-2]
cugugagggacag

SEQ ID NO: 4006701 - RNA, 20 nt, Human immunodeficiency virus 2 [HIV-2]
cuguuacaccaagaguacca

SEQ ID NO: 4006702 - RNA, 17 nt, Human immunodeficiency virus 2 [HIV-2]
cuuaguacacccagcac

SEQ ID NO: 4006703 - RNA, 16 nt, Human immunodeficiency virus 2 [HIV-2]
cuuggucaaggcagga

SEQ ID NO: 4006704 - RNA, 17 nt, Human immunodeficiency virus 2 [HIV-2]
gaagaagccuuaagaca

SEQ ID NO: 4006705 - RNA, 16 nt, Human immunodeficiency virus 2 [HIV-2]
gaaggcgccagagagc

SEQ ID NO: 4006706 - RNA, 18 nt, Human immunodeficiency virus 2 [HIV-2]
gaauaauacagugacaga

SEQ ID NO: 4006707 - RNA, 16 nt, Human immunodeficiency virus 2 [HIV-2]
gaaucaggcagggagc

SEQ ID NO: 4006708 - RNA, 15 nt, Human immunodeficiency virus 2 [HIV-2]
gaauccaaggcagga

SEQ ID NO: 4006709 - RNA, 15 nt, Human immunodeficiency virus 2 [HIV-2]
gacaacacaacagcu

SEQ ID NO: 4006710 - RNA, 22 nt, Human immunodeficiency virus 2 [HIV-2]
gagccuggguguucccugcugg

SEQ ID NO: 4006711 - RNA, 13 nt, Human immunodeficiency virus 2 [HIV-2]
gaggcuggcagau

SEQ ID NO: 4006712 - RNA, 13 nt, Human immunodeficiency virus 2 [HIV-2]
gagucaugugaua

SEQ ID NO: 4006713 - RNA, 23 nt, Human immunodeficiency virus 2 [HIV-2]
gagugcauauaguagugggaaua

SEQ ID NO: 4006714 - RNA, 17 nt, Human immunodeficiency virus 2 [HIV-2]
gaguuggccugugaauc

SEQ ID NO: 4006715 - RNA, 21 nt, Human immunodeficiency virus 2 [HIV-2]
gauaauaccagauuggcagaa

SEQ ID NO: 4006716 - RNA, 11 nt, Human immunodeficiency virus 2 [HIV-2]
gaucagagaag

SEQ ID NO: 4006717 - RNA, 17 nt, Human immunodeficiency virus 2 [HIV-2]
gaugauuaucaggaaau

SEQ ID NO: 4006718 - RNA, 13 nt, Human immunodeficiency virus 2 [HIV-2]
gaugcauggaaua

SEQ ID NO: 4006719 - RNA, 15 nt, Human immunodeficiency virus 2 [HIV-2]
gcacaaacaagcaga

SEQ ID NO: 4006720 - RNA, 14 nt, Human immunodeficiency virus 2 [HIV-2]
gcagaaguggcaga

SEQ ID NO: 4006721 - RNA, 16 nt, Human immunodeficiency virus 2 [HIV-2]
gcaggaggugaagcaa

SEQ ID NO: 4006722 - RNA, 14 nt, Human immunodeficiency virus 2 [HIV-2]
gcaggagugggaga

SEQ ID NO: 4006723 - RNA, 23 nt, Human immunodeficiency virus 2 [HIV-2]
gccagccaacgaaggaacagaag

SEQ ID NO: 4006724 - RNA, 18 nt, Human immunodeficiency virus 2 [HIV-2]
gccaggaaacaguggaga

SEQ ID NO: 4006725 - RNA, 18 nt, Human immunodeficiency virus 2 [HIV-2]
gccgggauagugcagcaa

SEQ ID NO: 4006726 - RNA, 17 nt, Human immunodeficiency virus 2 [HIV-2]
gccgguacugggcagac

SEQ ID NO: 4006727 - RNA, 13 nt, Human immunodeficiency virus 2 [HIV-2]
gcgaaagggcaga

SEQ ID NO: 4006728 - RNA, 14 nt, Human immunodeficiency virus 2 [HIV-2]
gcgaaagggcagac

SEQ ID NO: 4006729 - RNA, 21 nt, Human immunodeficiency virus 2 [HIV-2]
gcucugcggagaggcuggcag

SEQ ID NO: 4006730 - RNA, 12 nt, Human immunodeficiency virus 2 [HIV-2]
gcugcagggacu

SEQ ID NO: 4006731 - RNA, 20 nt, Human immunodeficiency virus 2 [HIV-2]
gcuggacucucaccaguacu

SEQ ID NO: 4006732 - RNA, 22 nt, Human immunodeficiency virus 2 [HIV-2]
ggaaaaauaugacauggcagga

SEQ ID NO: 4006733 - RNA, 15 nt, Human immunodeficiency virus 2 [HIV-2]
ggaagccaugcagga

SEQ ID NO: 4006734 - RNA, 16 nt, Human immunodeficiency virus 2 [HIV-2]
ggaauccaaggcagga

SEQ ID NO: 4006735 - RNA, 12 nt, Human immunodeficiency virus 2 [HIV-2]
ggaggacauggg

SEQ ID NO: 4006736 - RNA, 22 nt, Human immunodeficiency virus 2 [HIV-2]
ggauaauaccagauuggcagaa

SEQ ID NO: 4006737 - RNA, 19 nt, Human immunodeficiency virus 2 [HIV-2]
ggaugguuaugggaagcag

SEQ ID NO: 4006738 - RNA, 22 nt, Human immunodeficiency virus 2 [HIV-2]
ggcagcaaaauauggaugaugu

SEQ ID NO: 4006739 - RNA, 19 nt, Human immunodeficiency virus 2 [HIV-2]
ggcaugaugaacaagggau

SEQ ID NO: 4006740 - RNA, 13 nt, Human immunodeficiency virus 2 [HIV-2]
ggcauggcagaga

SEQ ID NO: 4006741 - RNA, 17 nt, Human immunodeficiency virus 2 [HIV-2]
gggaagccaugcaggag

SEQ ID NO: 4006742 - RNA, 17 nt, Human immunodeficiency virus 2 [HIV-2]
gggaauccaaggcagga

SEQ ID NO: 4006743 - RNA, 13 nt, Human immunodeficiency virus 2 [HIV-2]
gggaggcagugaa

SEQ ID NO: 4006744 - RNA, 13 nt, Human immunodeficiency virus 2 [HIV-2]
gggcgcgugggga

SEQ ID NO: 4006745 - RNA, 23 nt, Human immunodeficiency virus 2 [HIV-2]
ggggaauacucgcaguuccaaga

SEQ ID NO: 4006746 - RNA, 15 nt, Human immunodeficiency virus 2 [HIV-2]
ggucaaggcaggaag

SEQ ID NO: 4006747 - RNA, 14 nt, Human immunodeficiency virus 2 [HIV-2]
guacccaauguacu

SEQ ID NO: 4006748 - RNA, 19 nt, Human immunodeficiency virus 2 [HIV-2]
guagagccuggguguuccc

SEQ ID NO: 4006749 - RNA, 21 nt, Human immunodeficiency virus 2 [HIV-2]
guagcuacuaagaaacagcug

SEQ ID NO: 4006750 - RNA, 16 nt, Human immunodeficiency virus 2 [HIV-2]
gucaggauugccagag

SEQ ID NO: 4006751 - RNA, 17 nt, Human immunodeficiency virus 2 [HIV-2]
gucaggauugccagaga

SEQ ID NO: 4006752 - RNA, 18 nt, Human immunodeficiency virus 2 [HIV-2]
gugacaacacaacagcug

SEQ ID NO: 4006753 - RNA, 17 nt, Human immunodeficiency virus 2 [HIV-2]
gugacagaacaagcagu

SEQ ID NO: 4006754 - RNA, 11 nt, Human immunodeficiency virus 2 [HIV-2]
gugagggacag

SEQ ID NO: 4006755 - RNA, 17 nt, Human immunodeficiency virus 2 [HIV-2]
guggacuaacugcagag

SEQ ID NO: 4006756 - RNA, 21 nt, Human immunodeficiency virus 2 [HIV-2]
guggggaugguuaugggaagc

SEQ ID NO: 4006757 - RNA, 24 nt, Human immunodeficiency virus 2 [HIV-2]
uaaccaagggagggacaugggagg

SEQ ID NO: 4006758 - RNA, 16 nt, Human immunodeficiency virus 2 [HIV-2]
uacaaggccuucacuc

SEQ ID NO: 4006759 - RNA, 21 nt, Human immunodeficiency virus 2 [HIV-2]
uacuccucaacuccagugagg

SEQ ID NO: 4006760 - RNA, 14 nt, Human immunodeficiency virus 2 [HIV-2]
uaugugacuguuuu

SEQ ID NO: 4006761 - RNA, 13 nt, Human immunodeficiency virus 2 [HIV-2]
uauucccuuauuu

SEQ ID NO: 4006762 - RNA, 22 nt, Human immunodeficiency virus 2 [HIV-2]
ucaauaccuagcccuaguagua

SEQ ID NO: 4006763 - RNA, 15 nt, Human immunodeficiency virus 2 [HIV-2]
uccauugccagcugu

SEQ ID NO: 4006764 - RNA, 19 nt, Human immunodeficiency virus 2 [HIV-2]
uccugugagggacagcagu

SEQ ID NO: 4006765 - RNA, 16 nt, Human immunodeficiency virus 2 [HIV-2]
ugaaggcgccagagag

SEQ ID NO: 4006766 - RNA, 14 nt, Human immunodeficiency virus 2 [HIV-2]
ugacuccaugcugg

SEQ ID NO: 4006767 - RNA, 19 nt, Human immunodeficiency virus 2 [HIV-2]
ugcauagaaaacaacacau

SEQ ID NO: 4006768 - RNA, 19 nt, Human immunodeficiency virus 2 [HIV-2]
uggaaaaauaugacauggc

SEQ ID NO: 4006769 - RNA, 15 nt, Human immunodeficiency virus 2 [HIV-2]
uggagaaacccagca

SEQ ID NO: 4006770 - RNA, 18 nt, Human immunodeficiency virus 2 [HIV-2]
ugggggaccauacagugc

SEQ ID NO: 4006771 - RNA, 17 nt, Human immunodeficiency virus 2 [HIV-2]
uggguguucccugcugg

SEQ ID NO: 4006772 - RNA, 16 nt, Human immunodeficiency virus 2 [HIV-2]
uguggacuaacugcag

SEQ ID NO: 4006773 - RNA, 13 nt, Human immunodeficiency virus 2 [HIV-2]
uuccaagaagaau

SEQ ID NO: 4006774 - RNA, 22 nt, Human immunodeficiency virus 2 [HIV-2]
uuccucaauuggguagaagaca

SEQ ID NO: 4006775 - RNA, 19 nt, Human immunodeficiency virus 2 [HIV-2]
uuguaagagaccaggaaau

SEQ ID NO: 4006776 - RNA, 15 nt, Human immunodeficiency virus 2 [HIV-2]
uugugccuaaugcaa

SEQ ID NO: 4006777 - RNA, 23 nt, Human immunodeficiency virus 2 [HIV-2]
uuuccagaaggggcuguaaccaa

SEQ ID NO: 4006778 - RNA, 14 nt, Human immunodeficiency virus 2 [HIV-2]
ggagcuggugggga

SEQ ID NO: 4006779 - RNA, 13 nt, Human immunodeficiency virus 2 [HIV-2]
ggcaauagauaug

SEQ ID NO: 4006780 - RNA, 16 nt, Human immunodeficiency virus 2 [HIV-2]
ggcagaucgagcccug

SEQ ID NO: 4006781 - RNA, 18 nt, Human immunodeficiency virus 2 [HIV-2]
ggccgguacugggcagac

SEQ ID NO: 4006782 - RNA, 13 nt, Human immunodeficiency virus 2 [HIV-2]
gggaagccaugca

SEQ ID NO: 4006783 - RNA, 22 nt, Human immunodeficiency virus 2 [HIV-2]
gggaauacucgcaguuccaaga

SEQ ID NO: 4006784 - RNA, 19 nt, Human immunodeficiency virus 2 [HIV-2]
gggaauccaaggcaggaaa

SEQ ID NO: 4006785 - RNA, 14 nt, Human immunodeficiency virus 2 [HIV-2]
ggguaccgccagga

SEQ ID NO: 4006786 - RNA, 12 nt, Human immunodeficiency virus 2 [HIV-2]
guacacccagca

SEQ ID NO: 4006787 - RNA, 23 nt, Human immunodeficiency virus 2 [HIV-2]
guagaacucucacaagaggcaga

SEQ ID NO: 4006788 - RNA, 17 nt, Human immunodeficiency virus 2 [HIV-2]
guauaaauguacccgcu

SEQ ID NO: 4006789 - RNA, 15 nt, Human immunodeficiency virus 2 [HIV-2]
guauuuagaagaugu

SEQ ID NO: 4006790 - RNA, 12 nt, Human immunodeficiency virus 2 [HIV-2]
gucaaggcagga

SEQ ID NO: 4006791 - RNA, 21 nt, Human immunodeficiency virus 2 [HIV-2]
gugcaacuaaaaauagagaca

SEQ ID NO: 4006792 - RNA, 17 nt, Human immunodeficiency virus 2 [HIV-2]
gugcagaaguggcagaa

SEQ ID NO: 4006793 - RNA, 23 nt, Human immunodeficiency virus 2 [HIV-2]
guguucccugcuggacucucacc

SEQ ID NO: 4006794 - RNA, 13 nt, Human immunodeficiency virus 2 [HIV-2]
guuuggaggcaga

SEQ ID NO: 4006795 - RNA, 23 nt, Human immunodeficiency virus 2 [HIV-2]
guuugugacaacacaacagcugg

SEQ ID NO: 4006796 - RNA, 16 nt, Human immunodeficiency virus 2 [HIV-2]
uaaacagggaggcagu

SEQ ID NO: 4006797 - RNA, 21 nt, Human immunodeficiency virus 2 [HIV-2]
uaaccaagggagggacauggg

SEQ ID NO: 4006798 - RNA, 20 nt, Human immunodeficiency virus 2 [HIV-2]
uaaugcaaaaagcuauauuu

SEQ ID NO: 4006799 - RNA, 21 nt, Human immunodeficiency virus 2 [HIV-2]
uagaacucucacaagaggcag

SEQ ID NO: 4006800 - RNA, 14 nt, Human immunodeficiency virus 2 [HIV-2]
uaggcagcaaaaua

SEQ ID NO: 4006801 - RNA, 21 nt, Human immunodeficiency virus 2 [HIV-2]
uaguacacccagcacaaacaa

SEQ ID NO: 4006802 - RNA, 14 nt, Human immunodeficiency virus 2 [HIV-2]
ucaagagacaacaa

SEQ ID NO: 4006803 - RNA, 22 nt, Human immunodeficiency virus 2 [HIV-2]
ucaauauggagugcauauagua

SEQ ID NO: 4006804 - RNA, 20 nt, Human immunodeficiency virus 2 [HIV-2]
ucagucaaaguuuagaagaa

SEQ ID NO: 4006805 - RNA, 15 nt, Human immunodeficiency virus 2 [HIV-2]
ucaucugaguaacaa

SEQ ID NO: 4006806 - RNA, 14 nt, Human immunodeficiency virus 2 [HIV-2]
ucgguguucaucug

SEQ ID NO: 4006807 - RNA, 15 nt, Human immunodeficiency virus 2 [HIV-2]
ucucacaagaggcag

SEQ ID NO: 4006808 - RNA, 13 nt, Human immunodeficiency virus 2 [HIV-2]
ucuccagcacuag

SEQ ID NO: 4006809 - RNA, 14 nt, Human immunodeficiency virus 2 [HIV-2]
ucucgcgacagcag

SEQ ID NO: 4006810 - RNA, 15 nt, Human immunodeficiency virus 2 [HIV-2]
ucucgcgacagcagg

SEQ ID NO: 4006811 - RNA, 12 nt, Human immunodeficiency virus 2 [HIV-2]
ucugcggagagg

SEQ ID NO: 4006812 - RNA, 16 nt, Human immunodeficiency virus 2 [HIV-2]
ucugcggagaggcugg

SEQ ID NO: 4006813 - RNA, 18 nt, Human immunodeficiency virus 2 [HIV-2]
ucuugcauuguauucagu

SEQ ID NO: 4006814 - RNA, 20 nt, Human immunodeficiency virus 2 [HIV-2]
ugaaccaucugccccgagag

SEQ ID NO: 4006815 - RNA, 20 nt, Human immunodeficiency virus 2 [HIV-2]
ugaauaacaggaacaaccau

SEQ ID NO: 4006816 - RNA, 20 nt, Human immunodeficiency virus 2 [HIV-2]
ugcgggcgcguggggauggu

SEQ ID NO: 4006817 - RNA, 13 nt, Human immunodeficiency virus 2 [HIV-2]
uggacuaacugca

SEQ ID NO: 4006818 - RNA, 16 nt, Human immunodeficiency virus 2 [HIV-2]
uggccuauaacuacaa

SEQ ID NO: 4006819 - RNA, 20 nt, Human immunodeficiency virus 2 [HIV-2]
uguaagagaccaggaaauaa

SEQ ID NO: 4006820 - RNA, 22 nt, Human immunodeficiency virus 2 [HIV-2]
ugugcaacuaaaaauagagaca

SEQ ID NO: 4006821 - RNA, 14 nt, Human immunodeficiency virus 2 [HIV-2]
ugugccuaaugcaa

SEQ ID NO: 4006822 - RNA, 14 nt, Human immunodeficiency virus 2 [HIV-2]
uguucccugcugga

SEQ ID NO: 4006823 - RNA, 22 nt, Human immunodeficiency virus 2 [HIV-2]
uuaguacacccagcacaaacaa

SEQ ID NO: 4006824 - RNA, 12 nt, Human immunodeficiency virus 2 [HIV-2]
uuaucaggaaau

SEQ ID NO: 4006825 - RNA, 12 nt, Human immunodeficiency virus 2 [HIV-2]
uucuaacugcau

SEQ ID NO: 4006826 - RNA, 22 nt, Human immunodeficiency virus 2 [HIV-2]
uuguauucagucgcucugcgga

SEQ ID NO: 4006827 - RNA, 16 nt, Human immunodeficiency virus 2 [HIV-2]
uuuacaguaggaggag

SEQ ID NO: 4006828 - RNA, 21 nt, Human immunodeficiency virus 2 [HIV-2]
auaauaccagauuggcagaau

SEQ ID NO: 4006829 - RNA, 14 nt, Human immunodeficiency virus 2 [HIV-2]
aucugcagagacuu

SEQ ID NO: 4006830 - RNA, 12 nt, Human immunodeficiency virus 2 [HIV-2]
augacauggcag

SEQ ID NO: 4006831 - RNA, 18 nt, Human immunodeficiency virus 2 [HIV-2]
augcaguuuccauugcca

SEQ ID NO: 4006832 - RNA, 22 nt, Human immunodeficiency virus 2 [HIV-2]
auuaacuuuacgaaaccgggag

SEQ ID NO: 4006833 - RNA, 16 nt, Human immunodeficiency virus 2 [HIV-2]
auuaccuuuagugcag

SEQ ID NO: 4006834 - RNA, 16 nt, Human immunodeficiency virus 2 [HIV-2]
auugccagcuguguuu

SEQ ID NO: 4006835 - RNA, 16 nt, Human immunodeficiency virus 2 [HIV-2]
auuggcuaaacaagga

SEQ ID NO: 4006836 - RNA, 17 nt, Human immunodeficiency virus 2 [HIV-2]
caaaacugaaagcaaga

SEQ ID NO: 4006837 - RNA, 17 nt, Human immunodeficiency virus 2 [HIV-2]
caaacaagcagacauga

SEQ ID NO: 4006838 - RNA, 14 nt, Human immunodeficiency virus 2 [HIV-2]
caaaugcuauugua

SEQ ID NO: 4006839 - RNA, 17 nt, Human immunodeficiency virus 2 [HIV-2]
caagagagggugcacuu

SEQ ID NO: 4006840 - RNA, 12 nt, Human immunodeficiency virus 2 [HIV-2]
caaggagaagaa

SEQ ID NO: 4006841 - RNA, 16 nt, Human immunodeficiency virus 2 [HIV-2]
caaggccuaggcaggc

SEQ ID NO: 4006842 - RNA, 21 nt, Human immunodeficiency virus 2 [HIV-2]
caauauggagugcauauagua

SEQ ID NO: 4006843 - RNA, 14 nt, Human immunodeficiency virus 2 [HIV-2]
caaucuauguagug

SEQ ID NO: 4006844 - RNA, 23 nt, Human immunodeficiency virus 2 [HIV-2]
cacaaggaugauggaaacgcaaa

SEQ ID NO: 4006845 - RNA, 20 nt, Human immunodeficiency virus 2 [HIV-2]
cacaagucaggauugccaga

SEQ ID NO: 4006846 - RNA, 14 nt, Human immunodeficiency virus 2 [HIV-2]
cagaaagacagaaa

SEQ ID NO: 4006847 - RNA, 19 nt, Human immunodeficiency virus 2 [HIV-2]
cagaaguggcagaacugua

SEQ ID NO: 4006848 - RNA, 18 nt, Human immunodeficiency virus 2 [HIV-2]
cagauggagggaagccau

SEQ ID NO: 4006849 - RNA, 14 nt, Human immunodeficiency virus 2 [HIV-2]
cagcaaucagggac

SEQ ID NO: 4006850 - RNA, 16 nt, Human immunodeficiency virus 2 [HIV-2]
cagcaaucagggacug

SEQ ID NO: 4006851 - RNA, 19 nt, Human immunodeficiency virus 2 [HIV-2]
cagcagggagaguacauga

SEQ ID NO: 4006852 - RNA, 21 nt, Human immunodeficiency virus 2 [HIV-2]
caggagugggagaaacaaguc

SEQ ID NO: 4006853 - RNA, 16 nt, Human immunodeficiency virus 2 [HIV-2]
caggcaagagucacug

SEQ ID NO: 4006854 - RNA, 16 nt, Human immunodeficiency virus 2 [HIV-2]
caggcagggagcagaa

SEQ ID NO: 4006855 - RNA, 21 nt, Human immunodeficiency virus 2 [HIV-2]
cauacuuacuguauaaaugua

SEQ ID NO: 4006856 - RNA, 17 nt, Human immunodeficiency virus 2 [HIV-2]
caucccagauacaaagg

SEQ ID NO: 4006857 - RNA, 17 nt, Human immunodeficiency virus 2 [HIV-2]
caugcacuaacaaaugc

SEQ ID NO: 4006858 - RNA, 21 nt, Human immunodeficiency virus 2 [HIV-2]
cauguuacaugagacauugca

SEQ ID NO: 4006859 - RNA, 22 nt, Human immunodeficiency virus 2 [HIV-2]
ccaacagaguuucccccagaag

SEQ ID NO: 4006860 - RNA, 13 nt, Human immunodeficiency virus 2 [HIV-2]
ccaaggcaggaaa

SEQ ID NO: 4006861 - RNA, 12 nt, Human immunodeficiency virus 2 [HIV-2]
ccagagaaagaa

SEQ ID NO: 4006862 - RNA, 20 nt, Human immunodeficiency virus 2 [HIV-2]
ccagccaacgaaggaacaga

SEQ ID NO: 4006863 - RNA, 21 nt, Human immunodeficiency virus 2 [HIV-2]
ccauauagugaauaacaggaa

SEQ ID NO: 4006864 - RNA, 20 nt, Human immunodeficiency virus 2 [HIV-2]
ccaucacuucaauaccuagc

SEQ ID NO: 4006865 - RNA, 19 nt, Human immunodeficiency virus 2 [HIV-2]
ccauggagaaacccagcaa

SEQ ID NO: 4006866 - RNA, 15 nt, Human immunodeficiency virus 2 [HIV-2]
ccgccgacugaucuc

SEQ ID NO: 4006867 - RNA, 21 nt, Human immunodeficiency virus 2 [HIV-2]
cgaagaaggacuccaaggaaa

SEQ ID NO: 4006868 - RNA, 17 nt, Human immunodeficiency virus 2 [HIV-2]
cgaguggcuagagagga

SEQ ID NO: 4006869 - RNA, 13 nt, Human immunodeficiency virus 2 [HIV-2]
cggagaggcuggc

SEQ ID NO: 4006870 - RNA, 16 nt, Human immunodeficiency virus 2 [HIV-2]
cggagaggcuggcaga

SEQ ID NO: 4006871 - RNA, 17 nt, Human immunodeficiency virus 2 [HIV-2]
cuagacauauaccuaga

SEQ ID NO: 4006872 - RNA, 13 nt, Human immunodeficiency virus 2 [HIV-2]
cuagagaggacca

SEQ ID NO: 4006873 - RNA, 19 nt, Human immunodeficiency virus 2 [HIV-2]
cuagcagguagagccuggg

SEQ ID NO: 4006874 - RNA, 16 nt, Human immunodeficiency virus 2 [HIV-2]
cugcagggacuuucca

SEQ ID NO: 4006875 - RNA, 15 nt, Human immunodeficiency virus 2 [HIV-2]
cugcggagaggcugg

SEQ ID NO: 4006876 - RNA, 23 nt, Human immunodeficiency virus 2 [HIV-2]
cuggaaaaauaugacauggcagg

SEQ ID NO: 4006877 - RNA, 22 nt, Human immunodeficiency virus 2 [HIV-2]
cuggggaacgaaaaaccuccag

SEQ ID NO: 4006878 - RNA, 22 nt, Human immunodeficiency virus 2 [HIV-2]
cuggucauucgguguucaucug

SEQ ID NO: 4006879 - RNA, 21 nt, Human immunodeficiency virus 2 [HIV-2]
cuuaaggcggcccaacugcaa

SEQ ID NO: 4006880 - RNA, 19 nt, Human immunodeficiency virus 2 [HIV-2]
cuuacuguauaaauguacc

SEQ ID NO: 4006881 - RNA, 13 nt, Human immunodeficiency virus 2 [HIV-2]
cuugcccagcugc

SEQ ID NO: 4006882 - RNA, 19 nt, Human immunodeficiency virus 2 [HIV-2]
cuugcgggcgcguggggau

SEQ ID NO: 4006883 - RNA, 23 nt, Human immunodeficiency virus 2 [HIV-2]
cuuuaauggcacuagagcagaaa

SEQ ID NO: 4006884 - RNA, 20 nt, Human immunodeficiency virus 2 [HIV-2]
gaaaauagaacauauaucua

SEQ ID NO: 4006885 - RNA, 23 nt, Human immunodeficiency virus 2 [HIV-2]
gaaauaauuuuaaaugugacaga

SEQ ID NO: 4006886 - RNA, 15 nt, Human immunodeficiency virus 2 [HIV-2]
gaacaaccauacuug

SEQ ID NO: 4006887 - RNA, 17 nt, Human immunodeficiency virus 2 [HIV-2]
gaacaagauaagaaaag

SEQ ID NO: 4006888 - RNA, 16 nt, Human immunodeficiency virus 2 [HIV-2]
gaacagcccauggaga

SEQ ID NO: 4006889 - RNA, 20 nt, Human immunodeficiency virus 2 [HIV-2]
gaagaugugguuugugacaa

SEQ ID NO: 4006890 - RNA, 18 nt, Human immunodeficiency virus 2 [HIV-2]
gaagccuuaaacagggag

SEQ ID NO: 4006891 - RNA, 14 nt, Human immunodeficiency virus 2 [HIV-2]
gaagcuuuccaagc

SEQ ID NO: 4006892 - RNA, 24 nt, Human immunodeficiency virus 2 [HIV-2]
gaagggguuagaacaagauaagaa

SEQ ID NO: 4006893 - RNA, 13 nt, Human immunodeficiency virus 2 [HIV-2]
gaauccaaggcag

SEQ ID NO: 4006894 - RNA, 13 nt, Human immunodeficiency virus 2 [HIV-2]
gaauggaaggcaa

SEQ ID NO: 4006895 - RNA, 13 nt, Human immunodeficiency virus 2 [HIV-2]
gacaacaagaaau

SEQ ID NO: 4006896 - RNA, 17 nt, Human immunodeficiency virus 2 [HIV-2]
gacagaccccagagaaa

SEQ ID NO: 4006897 - RNA, 18 nt, Human immunodeficiency virus 2 [HIV-2]
gagacuuacuauccaaga

SEQ ID NO: 4006898 - RNA, 13 nt, Human immunodeficiency virus 2 [HIV-2]
gagaggcuggcag

SEQ ID NO: 4006899 - RNA, 14 nt, Human immunodeficiency virus 2 [HIV-2]
gagaggcuggcaga

SEQ ID NO: 4006900 - RNA, 16 nt, Human immunodeficiency virus 2 [HIV-2]
gaggaccauagaagcc

SEQ ID NO: 4006901 - RNA, 19 nt, Human immunodeficiency virus 2 [HIV-2]
gaugugcguuuagacaggu

SEQ ID NO: 4006902 - RNA, 16 nt, Human immunodeficiency virus 2 [HIV-2]
gcaacagaaagacaga

SEQ ID NO: 4006903 - RNA, 21 nt, Human immunodeficiency virus 2 [HIV-2]
gcaaguuaaguguguguuccc

SEQ ID NO: 4006904 - RNA, 15 nt, Human immunodeficiency virus 2 [HIV-2]
gcacaaggaugaugg

SEQ ID NO: 4006905 - RNA, 16 nt, Human immunodeficiency virus 2 [HIV-2]
gcagacaugaugauga

SEQ ID NO: 4006906 - RNA, 13 nt, Human immunodeficiency virus 2 [HIV-2]
gcaugaugaacaa

SEQ ID NO: 4006907 - RNA, 14 nt, Human immunodeficiency virus 2 [HIV-2]
gccaaucaacacaa

SEQ ID NO: 4006908 - RNA, 24 nt, Human immunodeficiency virus 2 [HIV-2]
gccaaucaacacaaggccuaggca

SEQ ID NO: 4006909 - RNA, 12 nt, Human immunodeficiency virus 2 [HIV-2]
gccuaggcaggc

SEQ ID NO: 4006910 - RNA, 20 nt, Human immunodeficiency virus 2 [HIV-2]
gcuacacaaaguauagauau

SEQ ID NO: 4006911 - RNA, 17 nt, Human immunodeficiency virus 2 [HIV-2]
gcuaguaucaguagaac

SEQ ID NO: 4006912 - RNA, 19 nt, Human immunodeficiency virus 2 [HIV-2]
gcugccaguuagaagcaag

SEQ ID NO: 4006913 - RNA, 16 nt, Human immunodeficiency virus 2 [HIV-2]
gcuugcuuaguauauu

SEQ ID NO: 4006914 - RNA, 17 nt, Human immunodeficiency virus 2 [HIV-2]
ggaccggggacagccag

SEQ ID NO: 4006915 - RNA, 14 nt, Human immunodeficiency virus 2 [HIV-2]
ggacuccaaggaaa

SEQ ID NO: 4006916 - RNA, 14 nt, Human immunodeficiency virus 2 [HIV-2]
ggagaaacccagca

SEQ ID NO: 4006917 - RNA, 19 nt, Human immunodeficiency virus 2 [HIV-2]
ggagacauuaguguggcag

SEQ ID NO: 4006918 - RNA, 19 nt, Human immunodeficiency virus 2 [HIV-2]
aaaauauggaugauguaga

SEQ ID NO: 4006919 - RNA, 23 nt, Human immunodeficiency virus 2 [HIV-2]
aaagaauggaaggcaaaacugaa

SEQ ID NO: 4006920 - RNA, 18 nt, Human immunodeficiency virus 2 [HIV-2]
aaaguagggaaaaaugua

SEQ ID NO: 4006921 - RNA, 23 nt, Human immunodeficiency virus 2 [HIV-2]
aaauauggaugauguagauucug

SEQ ID NO: 4006922 - RNA, 18 nt, Human immunodeficiency virus 2 [HIV-2]
aaauucauggggaugugc

SEQ ID NO: 4006923 - RNA, 17 nt, Human immunodeficiency virus 2 [HIV-2]
aacaagacccuggucug

SEQ ID NO: 4006924 - RNA, 15 nt, Human immunodeficiency virus 2 [HIV-2]
aaccaagggagggac

SEQ ID NO: 4006925 - RNA, 21 nt, Human immunodeficiency virus 2 [HIV-2]
aagaaacagcugaggcugcag

SEQ ID NO: 4006926 - RNA, 17 nt, Human immunodeficiency virus 2 [HIV-2]
aagaaucaggcagggag

SEQ ID NO: 4006927 - RNA, 18 nt, Human immunodeficiency virus 2 [HIV-2]
aagcuaguaucaguagaa

SEQ ID NO: 4006928 - RNA, 21 nt, Human immunodeficiency virus 2 [HIV-2]
aaggacacaugguauuuagaa

SEQ ID NO: 4006929 - RNA, 14 nt, Human immunodeficiency virus 2 [HIV-2]
aaggauuggaagac

SEQ ID NO: 4006930 - RNA, 20 nt, Human immunodeficiency virus 2 [HIV-2]
aaggcgccagagagcucauu

SEQ ID NO: 4006931 - RNA, 19 nt, Human immunodeficiency virus 2 [HIV-2]
aaguagcuacuaagaaaca

SEQ ID NO: 4006932 - RNA, 23 nt, Human immunodeficiency virus 2 [HIV-2]
aagugcuugcuuaguauauugua

SEQ ID NO: 4006933 - RNA, 17 nt, Human immunodeficiency virus 2 [HIV-2]
aauauguaugaauuaca

SEQ ID NO: 4006934 - RNA, 14 nt, Human immunodeficiency virus 2 [HIV-2]
aaucaggcagggag

SEQ ID NO: 4006935 - RNA, 16 nt, Human immunodeficiency virus 2 [HIV-2]
acacauuucaagagag

SEQ ID NO: 4006936 - RNA, 20 nt, Human immunodeficiency virus 2 [HIV-2]
acaguaggaggagacauaga

SEQ ID NO: 4006937 - RNA, 16 nt, Human immunodeficiency virus 2 [HIV-2]
acaugagacauugcaa

SEQ ID NO: 4006938 - RNA, 14 nt, Human immunodeficiency virus 2 [HIV-2]
accacggagagaaa

SEQ ID NO: 4006939 - RNA, 20 nt, Human immunodeficiency virus 2 [HIV-2]
accauacagugcuugccaga

SEQ ID NO: 4006940 - RNA, 20 nt, Human immunodeficiency virus 2 [HIV-2]
accgauuagaacugggagac

SEQ ID NO: 4006941 - RNA, 21 nt, Human immunodeficiency virus 2 [HIV-2]
acgcuugcuugcuuaaagacc

SEQ ID NO: 4006942 - RNA, 18 nt, Human immunodeficiency virus 2 [HIV-2]
acuacaaauuaauagaaa

SEQ ID NO: 4006943 - RNA, 18 nt, Human immunodeficiency virus 2 [HIV-2]
acuagcagguagagccug

SEQ ID NO: 4006944 - RNA, 20 nt, Human immunodeficiency virus 2 [HIV-2]
acuccagugaggaacaaaag

SEQ ID NO: 4006945 - RNA, 14 nt, Human immunodeficiency virus 2 [HIV-2]
acugaaagcaagag

SEQ ID NO: 4006946 - RNA, 19 nt, Human immunodeficiency virus 2 [HIV-2]
acuggccgggauagugcag

SEQ ID NO: 4006947 - RNA, 15 nt, Human immunodeficiency virus 2 [HIV-2]
agaaauaacaccaau

SEQ ID NO: 4006948 - RNA, 13 nt, Human immunodeficiency virus 2 [HIV-2]
agaagaugucugg

SEQ ID NO: 4006949 - RNA, 19 nt, Human immunodeficiency virus 2 [HIV-2]
agaagccuuaaacagggag

SEQ ID NO: 4006950 - RNA, 13 nt, Human immunodeficiency virus 2 [HIV-2]
agaaucaggcagg

SEQ ID NO: 4006951 - RNA, 14 nt, Human immunodeficiency virus 2 [HIV-2]
agaaucaggcaggg

SEQ ID NO: 4006952 - RNA, 22 nt, Human immunodeficiency virus 2 [HIV-2]
agaaucaggcagggagcagaac

SEQ ID NO: 4006953 - RNA, 13 nt, Human immunodeficiency virus 2 [HIV-2]
agacaaugaugau

SEQ ID NO: 4006954 - RNA, 19 nt, Human immunodeficiency virus 2 [HIV-2]
agacuuacuauccaagaac

SEQ ID NO: 4006955 - RNA, 21 nt, Human immunodeficiency virus 2 [HIV-2]
agagaaaggguaccgccagga

SEQ ID NO: 4006956 - RNA, 18 nt, Human immunodeficiency virus 2 [HIV-2]
agagccaucagaggggaa

SEQ ID NO: 4006957 - RNA, 20 nt, Human immunodeficiency virus 2 [HIV-2]
agaguacaugaacagcccau

SEQ ID NO: 4006958 - RNA, 13 nt, Human immunodeficiency virus 2 [HIV-2]
agcaagcuacaca

SEQ ID NO: 4006959 - RNA, 22 nt, Human immunodeficiency virus 2 [HIV-2]
agcccauggagaaacccagcaa

SEQ ID NO: 4006960 - RNA, 18 nt, Human immunodeficiency virus 2 [HIV-2]
agcccucuucgugcacuu

SEQ ID NO: 4006961 - RNA, 23 nt, Human immunodeficiency virus 2 [HIV-2]
agcgcgacgcaucgggaggggaa

SEQ ID NO: 4006962 - RNA, 14 nt, Human immunodeficiency virus 2 [HIV-2]
agcugaggcugcag

SEQ ID NO: 4006963 - RNA, 14 nt, Human immunodeficiency virus 2 [HIV-2]
aggaaucaaugaua

SEQ ID NO: 4006964 - RNA, 12 nt, Human immunodeficiency virus 2 [HIV-2]
agggagggacau

SEQ ID NO: 4006965 - RNA, 23 nt, Human immunodeficiency virus 2 [HIV-2]
agggagugacuggguaauagaaa

SEQ ID NO: 4006966 - RNA, 15 nt, Human immunodeficiency virus 2 [HIV-2]
agggcuauaggccug

SEQ ID NO: 4006967 - RNA, 14 nt, Human immunodeficiency virus 2 [HIV-2]
aguagaacucucac

SEQ ID NO: 4006968 - RNA, 14 nt, Human immunodeficiency virus 2 [HIV-2]
agucaggauugcca

SEQ ID NO: 4006969 - RNA, 20 nt, Human immunodeficiency virus 2 [HIV-2]
agucaggauugccagagaaa

SEQ ID NO: 4006970 - RNA, 17 nt, Human immunodeficiency virus 2 [HIV-2]
agucgccgccuggucau

SEQ ID NO: 4006971 - RNA, 17 nt, Human immunodeficiency virus 2 [HIV-2]
agugcagaaguggcaga

SEQ ID NO: 4006972 - RNA, 19 nt, Human immunodeficiency virus 2 [HIV-2]
auaagcacuauugggaugc

SEQ ID NO: 4006973 - RNA, 12 nt, Human immunodeficiency virus 2 [HIV-2]
caaugaauugua

SEQ ID NO: 4006974 - RNA, 15 nt, Human immunodeficiency virus 2 [HIV-2]
cacaagaggcagagg

SEQ ID NO: 4006975 - RNA, 20 nt, Human immunodeficiency virus 2 [HIV-2]
cacgaccccgaaucccagga

SEQ ID NO: 4006976 - RNA, 15 nt, Human immunodeficiency virus 2 [HIV-2]
cacuagcagguagag

SEQ ID NO: 4006977 - RNA, 24 nt, Human immunodeficiency virus 2 [HIV-2]
cacucucagccaaucaacacaagg

SEQ ID NO: 4006978 - RNA, 17 nt, Human immunodeficiency virus 2 [HIV-2]
cagagucuaacagcaau

SEQ ID NO: 4006979 - RNA, 14 nt, Human immunodeficiency virus 2 [HIV-2]
cagauggagggaag

SEQ ID NO: 4006980 - RNA, 18 nt, Human immunodeficiency virus 2 [HIV-2]
cagcugaggcugcaggga

SEQ ID NO: 4006981 - RNA, 21 nt, Human immunodeficiency virus 2 [HIV-2]
caggaaguagcuacuaagaaa

SEQ ID NO: 4006982 - RNA, 18 nt, Human immunodeficiency virus 2 [HIV-2]
caggaggugaagcaaacc

SEQ ID NO: 4006983 - RNA, 18 nt, Human immunodeficiency virus 2 [HIV-2]
cagggaggcagugaacca

SEQ ID NO: 4006984 - RNA, 17 nt, Human immunodeficiency virus 2 [HIV-2]
caguaucagcagggaga

SEQ ID NO: 4006985 - RNA, 20 nt, Human immunodeficiency virus 2 [HIV-2]
cagucaaaguuuagaagaag

SEQ ID NO: 4006986 - RNA, 13 nt, Human immunodeficiency virus 2 [HIV-2]
cagucgcucugcg

SEQ ID NO: 4006987 - RNA, 15 nt, Human immunodeficiency virus 2 [HIV-2]
caguuagaagcaagu

SEQ ID NO: 4006988 - RNA, 19 nt, Human immunodeficiency virus 2 [HIV-2]
cauauagugaauaacagga

SEQ ID NO: 4006989 - RNA, 21 nt, Human immunodeficiency virus 2 [HIV-2]
cauauaucuauuggcauggca

SEQ ID NO: 4006990 - RNA, 22 nt, Human immunodeficiency virus 2 [HIV-2]
cauauaucuauuggcauggcag

SEQ ID NO: 4006991 - RNA, 21 nt, Human immunodeficiency virus 2 [HIV-2]
cauaugagcgaaagggcagac

SEQ ID NO: 4006992 - RNA, 18 nt, Human immunodeficiency virus 2 [HIV-2]
cauggaauaauacaguga

SEQ ID NO: 4006993 - RNA, 21 nt, Human immunodeficiency virus 2 [HIV-2]
cauggaauaauacagugacag

SEQ ID NO: 4006994 - RNA, 13 nt, Human immunodeficiency virus 2 [HIV-2]
cauugccagcugu

SEQ ID NO: 4006995 - RNA, 19 nt, Human immunodeficiency virus 2 [HIV-2]
ccaacgaaggaacagaaga

SEQ ID NO: 4006996 - RNA, 20 nt, Human immunodeficiency virus 2 [HIV-2]
ccaagaagaaucaggcaggg

SEQ ID NO: 4006997 - RNA, 14 nt, Human immunodeficiency virus 2 [HIV-2]
ccaaggcaggaaaa

SEQ ID NO: 4006998 - RNA, 14 nt, Human immunodeficiency virus 2 [HIV-2]
ccagaaggggcugu

SEQ ID NO: 4006999 - RNA, 13 nt, Human immunodeficiency virus 2 [HIV-2]
ccagcaacagaaa

SEQ ID NO: 4007000 - RNA, 18 nt, Human immunodeficiency virus 2 [HIV-2]
ccagcaacagaaagacag

SEQ ID NO: 4007001 - RNA, 20 nt, Human immunodeficiency virus 2 [HIV-2]
ccagcaacagaaagacagaa

SEQ ID NO: 4007002 - RNA, 11 nt, Human immunodeficiency virus 2 [HIV-2]
ccauacagugc

SEQ ID NO: 4007003 - RNA, 18 nt, Human immunodeficiency virus 2 [HIV-2]
cccagcaacagaaagaca

SEQ ID NO: 4007004 - RNA, 18 nt, Human immunodeficiency virus 2 [HIV-2]
ccuaaagcaucaggcaca

SEQ ID NO: 4007005 - RNA, 17 nt, Human immunodeficiency virus 2 [HIV-2]
ccuagaaaaagaggaag

SEQ ID NO: 4007006 - RNA, 19 nt, Human immunodeficiency virus 2 [HIV-2]
cggacuuuacuggccggga

SEQ ID NO: 4007007 - RNA, 12 nt, Human immunodeficiency virus 2 [HIV-2]
cggagaggcugg

SEQ ID NO: 4007008 - RNA, 13 nt, Human immunodeficiency virus 2 [HIV-2]
cgguuaucuccaa

SEQ ID NO: 4007009 - RNA, 18 nt, Human immunodeficiency virus 2 [HIV-2]
cuaacugcagaggagaau

SEQ ID NO: 4007010 - RNA, 20 nt, Human immunodeficiency virus 2 [HIV-2]
cuaagugcacuaaaguagua

SEQ ID NO: 4007011 - RNA, 18 nt, Human immunodeficiency virus 2 [HIV-2]
cuacaaggccuucacucu

SEQ ID NO: 4007012 - RNA, 15 nt, Human immunodeficiency virus 2 [HIV-2]
cuccugugagggaca

SEQ ID NO: 4007013 - RNA, 16 nt, Human immunodeficiency virus 2 [HIV-2]
cuccuugcccagcugc

SEQ ID NO: 4007014 - RNA, 19 nt, Human immunodeficiency virus 2 [HIV-2]
cucugcggagaggcuggca

SEQ ID NO: 4007015 - RNA, 19 nt, Human immunodeficiency virus 2 [HIV-2]
cucuucaauaaagcugcca

SEQ ID NO: 4007016 - RNA, 18 nt, Human immunodeficiency virus 2 [HIV-2]
cugagagguucucuccag

SEQ ID NO: 4007017 - RNA, 17 nt, Human immunodeficiency virus 2 [HIV-2]
cugcaccagacaaguga

SEQ ID NO: 4007018 - RNA, 17 nt, Human immunodeficiency virus 2 [HIV-2]
cugccaguuagaagcaa

SEQ ID NO: 4007019 - RNA, 15 nt, Human immunodeficiency virus 2 [HIV-2]
cugggagacuacaaa

SEQ ID NO: 4007020 - RNA, 11 nt, Human immunodeficiency virus 2 [HIV-2]
cugguggggaa

SEQ ID NO: 4007021 - RNA, 23 nt, Human immunodeficiency virus 2 [HIV-2]
cuucgaguggcuagagaggacca

SEQ ID NO: 4007022 - RNA, 16 nt, Human immunodeficiency virus 2 [HIV-2]
cuuuccagaaggggcu

SEQ ID NO: 4007023 - RNA, 23 nt, Human immunodeficiency virus 2 [HIV-2]
gaaacagcugaggcugcagggac

SEQ ID NO: 4007024 - RNA, 23 nt, Human immunodeficiency virus 2 [HIV-2]
gaacucgcccuccugugagggac

SEQ ID NO: 4007025 - RNA, 17 nt, Human immunodeficiency virus 2 [HIV-2]
gaagaaucaggcaggga

SEQ ID NO: 4007026 - RNA, 22 nt, Human immunodeficiency virus 2 [HIV-2]
gaagcccaaauucaacaagaaa

SEQ ID NO: 4007027 - RNA, 19 nt, Human immunodeficiency virus 2 [HIV-2]
gaaucaacaguaaccagca

SEQ ID NO: 4007028 - RNA, 15 nt, Human immunodeficiency virus 2 [HIV-2]
gaaucaggcagggag

SEQ ID NO: 4007029 - RNA, 13 nt, Human immunodeficiency virus 2 [HIV-2]
gacaagaaccaaa

SEQ ID NO: 4007030 - RNA, 17 nt, Human immunodeficiency virus 2 [HIV-2]
gacagaacaagcaguag

SEQ ID NO: 4007031 - RNA, 22 nt, Human immunodeficiency virus 2 [HIV-2]
gacagcaguaucagcagggaga

SEQ ID NO: 4007032 - RNA, 20 nt, Human immunodeficiency virus 2 [HIV-2]
gacaugggaggagcuggugg

SEQ ID NO: 4007033 - RNA, 17 nt, Human immunodeficiency virus 2 [HIV-2]
gacauuaguguggcagu

SEQ ID NO: 4007034 - RNA, 23 nt, Human immunodeficiency virus 2 [HIV-2]
gaccucuucaauaaagcugccag

SEQ ID NO: 4007035 - RNA, 15 nt, Human immunodeficiency virus 2 [HIV-2]
gagaccauuggagag

SEQ ID NO: 4007036 - RNA, 17 nt, Human immunodeficiency virus 2 [HIV-2]
gaggcagaggaagauga

SEQ ID NO: 4007037 - RNA, 22 nt, Human immunodeficiency virus 2 [HIV-2]
gaguaccacggagagaaaugac

SEQ ID NO: 4007038 - RNA, 19 nt, Human immunodeficiency virus 2 [HIV-2]
gaguuucccccagaagaug

SEQ ID NO: 4007039 - RNA, 22 nt, Human immunodeficiency virus 2 [HIV-2]
gaugcuaugagguuuagauacu

SEQ ID NO: 4007040 - RNA, 14 nt, Human immunodeficiency virus 2 [HIV-2]
gcaagcuacacaaa

SEQ ID NO: 4007041 - RNA, 17 nt, Human immunodeficiency virus 2 [HIV-2]
gcaauagauaugucaca

SEQ ID NO: 4007042 - RNA, 21 nt, Human immunodeficiency virus 2 [HIV-2]
gcacagcuaaauucaugggga

SEQ ID NO: 4007043 - RNA, 19 nt, Human immunodeficiency virus 2 [HIV-2]
gcagacaugaugaugagca

SEQ ID NO: 4007044 - RNA, 18 nt, Human immunodeficiency virus 2 [HIV-2]
gcagcaacagcaacagcu

SEQ ID NO: 4007045 - RNA, 19 nt, Human immunodeficiency virus 2 [HIV-2]
gcagcaacagcaacagcug

SEQ ID NO: 4007046 - RNA, 22 nt, Human immunodeficiency virus 2 [HIV-2]
gcaggcucagacccggaagugg

SEQ ID NO: 4007047 - RNA, 21 nt, Human immunodeficiency virus 2 [HIV-2]
gcccaaauucaacaagaaaag

SEQ ID NO: 4007048 - RNA, 20 nt, Human immunodeficiency virus 2 [HIV-2]
gcccauggagaaacccagca

SEQ ID NO: 4007049 - RNA, 16 nt, Human immunodeficiency virus 2 [HIV-2]
gcgaaagggcagacga

SEQ ID NO: 4007050 - RNA, 17 nt, Human immunodeficiency virus 2 [HIV-2]
gcugccaguuagaagca

SEQ ID NO: 4007051 - RNA, 13 nt, Human immunodeficiency virus 2 [HIV-2]
gcuggacucucac

SEQ ID NO: 4007052 - RNA, 23 nt, Human immunodeficiency virus 2 [HIV-2]
ggaaauaauuuuaaaugugacag

SEQ ID NO: 4007053 - RNA, 22 nt, Human immunodeficiency virus 2 [HIV-2]
ggacagcaguaucagcagggag

SEQ ID NO: 4007054 - RNA, 23 nt, Human immunodeficiency virus 2 [HIV-2]
ggaggcagauggagggaagccau

SEQ ID NO: 4007055 - RNA, 20 nt, Human immunodeficiency virus 2 [HIV-2]
ggagggacaugggaggagcu

SEQ ID NO: 4007056 - RNA, 14 nt, Human immunodeficiency virus 2 [HIV-2]
ggcaggaaguagcu

SEQ ID NO: 4007057 - RNA, 13 nt, Human immunodeficiency virus 2 [HIV-2]
ggcagggagcaga

SEQ ID NO: 4007058 - RNA, 20 nt, Human immunodeficiency virus 2 [HIV-2]
ggcuggcagaucgagcccug

SEQ ID NO: 4007059 - RNA, 14 nt, Human immunodeficiency virus 2 [HIV-2]
gggacagccagcca

SEQ ID NO: 4007060 - RNA, 15 nt, Human immunodeficiency virus 2 [HIV-2]
gggacugcaagggau

SEQ ID NO: 4007061 - RNA, 16 nt, Human immunodeficiency virus 2 [HIV-2]
gguagaagacaagaac

SEQ ID NO: 4007062 - RNA, 21 nt, Human immunodeficiency virus 2 [HIV-2]
guacuucggguggcuguggaa

SEQ ID NO: 4007063 - RNA, 21 nt, Human immunodeficiency virus 2 [HIV-2]
gucuaacagcaaucagggacu

SEQ ID NO: 4007064 - RNA, 15 nt, Human immunodeficiency virus 2 [HIV-2]
guucucuccagcacu

SEQ ID NO: 4007065 - RNA, 19 nt, Human immunodeficiency virus 2 [HIV-2]
guuggacguagucaagaga

SEQ ID NO: 4007066 - RNA, 19 nt, Human immunodeficiency virus 2 [HIV-2]
guuugggcacaagucagga

SEQ ID NO: 4007067 - RNA, 19 nt, Human immunodeficiency virus 2 [HIV-2]
uacaaauuaauagaaauaa

SEQ ID NO: 4007068 - RNA, 12 nt, Human immunodeficiency virus 2 [HIV-2]
uagaacaagaua

SEQ ID NO: 4007069 - RNA, 15 nt, Human immunodeficiency virus 2 [HIV-2]
uagaagccuuaaaca

SEQ ID NO: 4007070 - RNA, 21 nt, Human immunodeficiency virus 2 [HIV-2]
uaguaucaguagaacucucac

SEQ ID NO: 4007071 - RNA, 19 nt, Human immunodeficiency virus 2 [HIV-2]
uauaaauuggcaauagaua

SEQ ID NO: 4007072 - RNA, 22 nt, Human immunodeficiency virus 2 [HIV-2]
uauaccuagaaaaagaggaagg

SEQ ID NO: 4007073 - RNA, 14 nt, Human immunodeficiency virus 2 [HIV-2]
uaucagcagggaga

SEQ ID NO: 4007074 - RNA, 14 nt, Human immunodeficiency virus 2 [HIV-2]
ucaacuccagugag

SEQ ID NO: 4007075 - RNA, 23 nt, Human immunodeficiency virus 2 [HIV-2]
ucaaggcaggaaguagcuacuaa

SEQ ID NO: 4007076 - RNA, 12 nt, Human immunodeficiency virus 2 [HIV-2]
uccaaggcagga

SEQ ID NO: 4007077 - RNA, 17 nt, Human immunodeficiency virus 2 [HIV-2]
uccauaauagacaugga

SEQ ID NO: 4007078 - RNA, 20 nt, Human immunodeficiency virus 2 [HIV-2]
ucuaacugcauagaaaacaa

SEQ ID NO: 4007079 - RNA, 17 nt, Human immunodeficiency virus 2 [HIV-2]
ugacagaccccagagaa

SEQ ID NO: 4007080 - RNA, 14 nt, Human immunodeficiency virus 2 [HIV-2]
ugaggagaugaugc

SEQ ID NO: 4007081 - RNA, 23 nt, Human immunodeficiency virus 2 [HIV-2]
ugaugcauggaauaauacaguga

SEQ ID NO: 4007082 - RNA, 21 nt, Human immunodeficiency virus 2 [HIV-2]
ugauggaaacgcaaacuucua

SEQ ID NO: 4007083 - RNA, 22 nt, Human immunodeficiency virus 2 [HIV-2]
ugcaguuuccauugccagcugu

SEQ ID NO: 4007084 - RNA, 18 nt, Human immunodeficiency virus 2 [HIV-2]
ugcuuaguacacccagca

SEQ ID NO: 4007085 - RNA, 21 nt, Human immunodeficiency virus 2 [HIV-2]
uggcuaaacaaggagaagaac

SEQ ID NO: 4007086 - RNA, 13 nt, Human immunodeficiency virus 2 [HIV-2]
uggguagaagaca

SEQ ID NO: 4007087 - RNA, 23 nt, Human immunodeficiency virus 2 [HIV-2]
ugugcaacuaaaaauagagacac

SEQ ID NO: 4007088 - RNA, 19 nt, Human immunodeficiency virus 2 [HIV-2]
uguggaagcuaguaucagu

SEQ ID NO: 4007089 - RNA, 17 nt, Human immunodeficiency virus 2 [HIV-2]
uuagaagcaaguuaagu

SEQ ID NO: 4007090 - RNA, 21 nt, Human immunodeficiency virus 2 [HIV-2]
gaacucucacaagaggcagag

SEQ ID NO: 4007091 - RNA, 14 nt, Human immunodeficiency virus 2 [HIV-2]
gaaggcgccagaga

SEQ ID NO: 4007092 - RNA, 11 nt, Human immunodeficiency virus 2 [HIV-2]
gacaacacaac

SEQ ID NO: 4007093 - RNA, 15 nt, Human immunodeficiency virus 2 [HIV-2]
gacagaccccagaga

SEQ ID NO: 4007094 - RNA, 17 nt, Human immunodeficiency virus 2 [HIV-2]
gagaaguaccuaaagca

SEQ ID NO: 4007095 - RNA, 18 nt, Human immunodeficiency virus 2 [HIV-2]
gagaccauuggagaggcc

SEQ ID NO: 4007096 - RNA, 20 nt, Human immunodeficiency virus 2 [HIV-2]
gagagguucucuccagcacu

SEQ ID NO: 4007097 - RNA, 23 nt, Human immunodeficiency virus 2 [HIV-2]
gagccuggguguucccugcugga

SEQ ID NO: 4007098 - RNA, 24 nt, Human immunodeficiency virus 2 [HIV-2]
gagccuggguguucccugcuggac

SEQ ID NO: 4007099 - RNA, 18 nt, Human immunodeficiency virus 2 [HIV-2]
gaggacuacgagagagac

SEQ ID NO: 4007100 - RNA, 22 nt, Human immunodeficiency virus 2 [HIV-2]
gagggauaccauauagugaaua

SEQ ID NO: 4007101 - RNA, 22 nt, Human immunodeficiency virus 2 [HIV-2]
aaaagggggacugcaagggaug

SEQ ID NO: 4007102 - RNA, 17 nt, Human immunodeficiency virus 2 [HIV-2]
aaacaguggagaagaga

SEQ ID NO: 4007103 - RNA, 14 nt, Human immunodeficiency virus 2 [HIV-2]
aaagcaagagggau

SEQ ID NO: 4007104 - RNA, 24 nt, Human immunodeficiency virus 2 [HIV-2]
aagagucaugugauaagcacuauu

SEQ ID NO: 4007105 - RNA, 22 nt, Human immunodeficiency virus 2 [HIV-2]
aagauuuguauaggcagcaaaa

SEQ ID NO: 4007106 - RNA, 23 nt, Human immunodeficiency virus 2 [HIV-2]
aagccuuaaacagggaggcagug

SEQ ID NO: 4007107 - RNA, 18 nt, Human immunodeficiency virus 2 [HIV-2]
aaguagauuuagaaaggg

SEQ ID NO: 4007108 - RNA, 17 nt, Human immunodeficiency virus 2 [HIV-2]
aauugcuaacauugaca

SEQ ID NO: 4007109 - RNA, 16 nt, Human immunodeficiency virus 2 [HIV-2]
acaagaggcagaggaa

SEQ ID NO: 4007110 - RNA, 17 nt, Human immunodeficiency virus 2 [HIV-2]
acaagaggcagaggaag

SEQ ID NO: 4007111 - RNA, 21 nt, Human immunodeficiency virus 2 [HIV-2]
acaagcaguagaagaugucug

SEQ ID NO: 4007112 - RNA, 17 nt, Human immunodeficiency virus 2 [HIV-2]
acaaguauuauaaucuc

SEQ ID NO: 4007113 - RNA, 22 nt, Human immunodeficiency virus 2 [HIV-2]
acacuugggggaccauacagug

SEQ ID NO: 4007114 - RNA, 20 nt, Human immunodeficiency virus 2 [HIV-2]
acagaguuucccccagaaga

SEQ ID NO: 4007115 - RNA, 20 nt, Human immunodeficiency virus 2 [HIV-2]
acagcaguaucagcagggag

SEQ ID NO: 4007116 - RNA, 18 nt, Human immunodeficiency virus 2 [HIV-2]
acagcugaggcugcaggg

SEQ ID NO: 4007117 - RNA, 17 nt, Human immunodeficiency virus 2 [HIV-2]
acaugggaggagcuggu

SEQ ID NO: 4007118 - RNA, 14 nt, Human immunodeficiency virus 2 [HIV-2]
accagauuggcaga

SEQ ID NO: 4007119 - RNA, 17 nt, Human immunodeficiency virus 2 [HIV-2]
accagcauaauugcuaa

SEQ ID NO: 4007120 - RNA, 15 nt, Human immunodeficiency virus 2 [HIV-2]
acccagcaacagaaa

SEQ ID NO: 4007121 - RNA, 22 nt, Human immunodeficiency virus 2 [HIV-2]
accgccaggaaacaguggagaa

SEQ ID NO: 4007122 - RNA, 16 nt, Human immunodeficiency virus 2 [HIV-2]
acguagucaagagaca

SEQ ID NO: 4007123 - RNA, 13 nt, Human immunodeficiency virus 2 [HIV-2]
acuacgagagaga

SEQ ID NO: 4007124 - RNA, 17 nt, Human immunodeficiency virus 2 [HIV-2]
acucaugggccaggagu

SEQ ID NO: 4007125 - RNA, 18 nt, Human immunodeficiency virus 2 [HIV-2]
acucgcaguuccaagaag

SEQ ID NO: 4007126 - RNA, 23 nt, Human immunodeficiency virus 2 [HIV-2]
acucucacaagaggcagaggaag

SEQ ID NO: 4007127 - RNA, 19 nt, Human immunodeficiency virus 2 [HIV-2]
acugaucucccagagucua

SEQ ID NO: 4007128 - RNA, 13 nt, Human immunodeficiency virus 2 [HIV-2]
acugcagaggaga

SEQ ID NO: 4007129 - RNA, 15 nt, Human immunodeficiency virus 2 [HIV-2]
acuggguaauagaaa

SEQ ID NO: 4007130 - RNA, 16 nt, Human immunodeficiency virus 2 [HIV-2]
agaaaaagaggaaggg

SEQ ID NO: 4007131 - RNA, 14 nt, Human immunodeficiency virus 2 [HIV-2]
agaaaaagggggac

SEQ ID NO: 4007132 - RNA, 19 nt, Human immunodeficiency virus 2 [HIV-2]
agaaaacaacacaugcgca

SEQ ID NO: 4007133 - RNA, 19 nt, Human immunodeficiency virus 2 [HIV-2]
agaacuguaccgauuagaa

SEQ ID NO: 4007134 - RNA, 16 nt, Human immunodeficiency virus 2 [HIV-2]
agaaucaggcagggag

SEQ ID NO: 4007135 - RNA, 20 nt, Human immunodeficiency virus 2 [HIV-2]
agaauuggcuaaacaaggag

SEQ ID NO: 4007136 - RNA, 21 nt, Human immunodeficiency virus 2 [HIV-2]
agaauuggcuaaacaaggaga

SEQ ID NO: 4007137 - RNA, 12 nt, Human immunodeficiency virus 2 [HIV-2]
agaggcuggcag

SEQ ID NO: 4007138 - RNA, 23 nt, Human immunodeficiency virus 2 [HIV-2]
agaggcuggcagaucgagcccug

SEQ ID NO: 4007139 - RNA, 22 nt, Human immunodeficiency virus 2 [HIV-2]
agaguaccacggagagaaauga

SEQ ID NO: 4007140 - RNA, 18 nt, Human immunodeficiency virus 2 [HIV-2]
agauauuggcaugaugaa

SEQ ID NO: 4007141 - RNA, 18 nt, Human immunodeficiency virus 2 [HIV-2]
agaucgagcccugagagg

SEQ ID NO: 4007142 - RNA, 16 nt, Human immunodeficiency virus 2 [HIV-2]
agauucugaugaugau

SEQ ID NO: 4007143 - RNA, 14 nt, Human immunodeficiency virus 2 [HIV-2]
agcaacagaaagac

SEQ ID NO: 4007144 - RNA, 15 nt, Human immunodeficiency virus 2 [HIV-2]
agcaacagaaagaca

SEQ ID NO: 4007145 - RNA, 16 nt, Human immunodeficiency virus 2 [HIV-2]
agcacaaacaagcaga

SEQ ID NO: 4007146 - RNA, 18 nt, Human immunodeficiency virus 2 [HIV-2]
agcaguaucagcagggag

SEQ ID NO: 4007147 - RNA, 14 nt, Human immunodeficiency virus 2 [HIV-2]
agccaugcaggagg

SEQ ID NO: 4007148 - RNA, 17 nt, Human immunodeficiency virus 2 [HIV-2]
agccuuaaacagggagg

SEQ ID NO: 4007149 - RNA, 16 nt, Human immunodeficiency virus 2 [HIV-2]
agcgcgacgcaucggg

SEQ ID NO: 4007150 - RNA, 17 nt, Human immunodeficiency virus 2 [HIV-2]
aggacuacgagagagac

SEQ ID NO: 4007151 - RNA, 13 nt, Human immunodeficiency virus 2 [HIV-2]
aggagugggagaa

SEQ ID NO: 4007152 - RNA, 14 nt, Human immunodeficiency virus 2 [HIV-2]
aggauugccagaga

SEQ ID NO: 4007153 - RNA, 23 nt, Human immunodeficiency virus 2 [HIV-2]
aggcucagacccggaaguggcau

SEQ ID NO: 4007154 - RNA, 14 nt, Human immunodeficiency virus 2 [HIV-2]
agggacaugggagg

SEQ ID NO: 4007155 - RNA, 14 nt, Human immunodeficiency virus 2 [HIV-2]
agggagggacaugg

SEQ ID NO: 4007156 - RNA, 15 nt, Human immunodeficiency virus 2 [HIV-2]
aggguaugaggagau

SEQ ID NO: 4007157 - RNA, 15 nt, Human immunodeficiency virus 2 [HIV-2]
aguaacaagacccug

SEQ ID NO: 4007158 - RNA, 21 nt, Human immunodeficiency virus 2 [HIV-2]
aguaucaguagaacucucaca

SEQ ID NO: 4007159 - RNA, 20 nt, Human immunodeficiency virus 2 [HIV-2]
agucaaaguuuagaagaagc

SEQ ID NO: 4007160 - RNA, 21 nt, Human immunodeficiency virus 2 [HIV-2]
agucaaaguuuagaagaagcc

SEQ ID NO: 4007161 - RNA, 22 nt, Human immunodeficiency virus 2 [HIV-2]
agucgcucugcggagaggcugg

SEQ ID NO: 4007162 - RNA, 17 nt, Human immunodeficiency virus 2 [HIV-2]
agugaguauggagccug

SEQ ID NO: 4007163 - RNA, 17 nt, Human immunodeficiency virus 2 [HIV-2]
aguggauccaagaagcu

SEQ ID NO: 4007164 - RNA, 15 nt, Human immunodeficiency virus 2 [HIV-2]
auaccauauagugaa

SEQ ID NO: 4007165 - RNA, 18 nt, Human immunodeficiency virus 2 [HIV-2]
auacuuggucaaggcagg

SEQ ID NO: 4007166 - RNA, 19 nt, Human immunodeficiency virus 2 [HIV-2]
auagagacacuugggggac

SEQ ID NO: 4007167 - RNA, 19 nt, Human immunodeficiency virus 2 [HIV-2]
auaucuauuggcauggcag

SEQ ID NO: 4007168 - RNA, 20 nt, Human immunodeficiency virus 2 [HIV-2]
aucaacacaaggccuaggca

SEQ ID NO: 4007169 - RNA, 21 nt, Human immunodeficiency virus 2 [HIV-2]
aucaacacaaggccuaggcag

SEQ ID NO: 4007170 - RNA, 19 nt, Human immunodeficiency virus 2 [HIV-2]
aucaacaguaaccagcaua

SEQ ID NO: 4007171 - RNA, 19 nt, Human immunodeficiency virus 2 [HIV-2]
aucuauuggcauggcagag

SEQ ID NO: 4007172 - RNA, 16 nt, Human immunodeficiency virus 2 [HIV-2]
auggcacuagagcaga

SEQ ID NO: 4007173 - RNA, 17 nt, Human immunodeficiency virus 2 [HIV-2]
auggcaggagugggaga

SEQ ID NO: 4007174 - RNA, 14 nt, Human immunodeficiency virus 2 [HIV-2]
auuggcauggcaga

SEQ ID NO: 4007175 - RNA, 20 nt, Human immunodeficiency virus 2 [HIV-2]
caaaauauggaugauguaga

SEQ ID NO: 4007176 - RNA, 14 nt, Human immunodeficiency virus 2 [HIV-2]
caacaucugcagag

SEQ ID NO: 4007177 - RNA, 20 nt, Human immunodeficiency virus 2 [HIV-2]
caagggagggacaugggagg

SEQ ID NO: 4007178 - RNA, 20 nt, Human immunodeficiency virus 2 [HIV-2]
caauaacacuuaugucagga

SEQ ID NO: 4007179 - RNA, 19 nt, Human immunodeficiency virus 2 [HIV-2]
acagcaguaucagcaggga

SEQ ID NO: 4007180 - RNA, 22 nt, Human immunodeficiency virus 2 [HIV-2]
acagcaguaucagcagggagag

SEQ ID NO: 4007181 - RNA, 17 nt, Human immunodeficiency virus 2 [HIV-2]
accuagaaaaagaggaa

SEQ ID NO: 4007182 - RNA, 22 nt, Human immunodeficiency virus 2 [HIV-2]
acgaagaaggacuccaaggaaa

SEQ ID NO: 4007183 - RNA, 19 nt, Human immunodeficiency virus 2 [HIV-2]
acucugagggaaauaaagg

SEQ ID NO: 4007184 - RNA, 22 nt, Human immunodeficiency virus 2 [HIV-2]
acucugagggaaauaaaggaag

SEQ ID NO: 4007185 - RNA, 17 nt, Human immunodeficiency virus 2 [HIV-2]
acucuguacccagaaga

SEQ ID NO: 4007186 - RNA, 17 nt, Human immunodeficiency virus 2 [HIV-2]
acuucuaacugcauaga

SEQ ID NO: 4007187 - RNA, 16 nt, Human immunodeficiency virus 2 [HIV-2]
agaacaagcaguagaa

SEQ ID NO: 4007188 - RNA, 21 nt, Human immunodeficiency virus 2 [HIV-2]
agaagaugggaccccacggag

SEQ ID NO: 4007189 - RNA, 21 nt, Human immunodeficiency virus 2 [HIV-2]
agaagccuuaaacagggaggc

SEQ ID NO: 4007190 - RNA, 12 nt, Human immunodeficiency virus 2 [HIV-2]
agaaucaggcag

SEQ ID NO: 4007191 - RNA, 17 nt, Human immunodeficiency virus 2 [HIV-2]
agaaucaggcagggagc

SEQ ID NO: 4007192 - RNA, 12 nt, Human immunodeficiency virus 2 [HIV-2]
agacaugaugau

SEQ ID NO: 4007193 - RNA, 23 nt, Human immunodeficiency virus 2 [HIV-2]
agacaugaugaugagcaugggga

SEQ ID NO: 4007194 - RNA, 14 nt, Human immunodeficiency virus 2 [HIV-2]
agacgaagaaggac

SEQ ID NO: 4007195 - RNA, 19 nt, Human immunodeficiency virus 2 [HIV-2]
agaggcuuuugaugcaugg

SEQ ID NO: 4007196 - RNA, 14 nt, Human immunodeficiency virus 2 [HIV-2]
agauaagaaaagga

SEQ ID NO: 4007197 - RNA, 17 nt, Human immunodeficiency virus 2 [HIV-2]
agcagguagagccuggg

SEQ ID NO: 4007198 - RNA, 16 nt, Human immunodeficiency virus 2 [HIV-2]
agcaguaucagcaggg

SEQ ID NO: 4007199 - RNA, 19 nt, Human immunodeficiency virus 2 [HIV-2]
agcugaggcugcagggacu

SEQ ID NO: 4007200 - RNA, 23 nt, Human immunodeficiency virus 2 [HIV-2]
aguacuuggccgguacugggcag

SEQ ID NO: 4007201 - RNA, 13 nt, Human immunodeficiency virus 2 [HIV-2]
aguaggaggagac

SEQ ID NO: 4007202 - RNA, 22 nt, Human immunodeficiency virus 2 [HIV-2]
aguuagaagcaaguuaagugug

SEQ ID NO: 4007203 - RNA, 21 nt, Human immunodeficiency virus 2 [HIV-2]
aguuccuguuacaccaagagu

SEQ ID NO: 4007204 - RNA, 22 nt, Human immunodeficiency virus 2 [HIV-2]
auaguagugggaauaauagcuu

SEQ ID NO: 4007205 - RNA, 17 nt, Human immunodeficiency virus 2 [HIV-2]
aucagcagggagaguac

SEQ ID NO: 4007206 - RNA, 12 nt, Human immunodeficiency virus 2 [HIV-2]
aucaggcaggga

SEQ ID NO: 4007207 - RNA, 22 nt, Human immunodeficiency virus 2 [HIV-2]
aucucccagagucuaacagcaa

SEQ ID NO: 4007208 - RNA, 19 nt, Human immunodeficiency virus 2 [HIV-2]
augaacagcccauggagaa

SEQ ID NO: 4007209 - RNA, 19 nt, Human immunodeficiency virus 2 [HIV-2]
augacagaccccagagaaa

SEQ ID NO: 4007210 - RNA, 19 nt, Human immunodeficiency virus 2 [HIV-2]
augaugagcauggggagac

SEQ ID NO: 4007211 - RNA, 23 nt, Human immunodeficiency virus 2 [HIV-2]
augcaaaaagcuauauuuacaca

SEQ ID NO: 4007212 - RNA, 20 nt, Human immunodeficiency virus 2 [HIV-2]
augcauggaauaauacagug

SEQ ID NO: 4007213 - RNA, 16 nt, Human immunodeficiency virus 2 [HIV-2]
auuuuacuaacaagug

SEQ ID NO: 4007214 - RNA, 16 nt, Human immunodeficiency virus 2 [HIV-2]
caaaaagcuauauuua

SEQ ID NO: 4007215 - RNA, 15 nt, Human immunodeficiency virus 2 [HIV-2]
caacaaaaugacaga

SEQ ID NO: 4007216 - RNA, 16 nt, Human immunodeficiency virus 2 [HIV-2]
caacacaugcgcagga

SEQ ID NO: 4007217 - RNA, 13 nt, Human immunodeficiency virus 2 [HIV-2]
caagaaccaaaca

SEQ ID NO: 4007218 - RNA, 12 nt, Human immunodeficiency virus 2 [HIV-2]
caagaggcagag

SEQ ID NO: 4007219 - RNA, 20 nt, Human immunodeficiency virus 2 [HIV-2]
caaggaccggggacagccag

SEQ ID NO: 4007220 - RNA, 12 nt, Human immunodeficiency virus 2 [HIV-2]
caaggcaggaaa

SEQ ID NO: 4007221 - RNA, 15 nt, Human immunodeficiency virus 2 [HIV-2]
caaggccuaggcagg

SEQ ID NO: 4007222 - RNA, 17 nt, Human immunodeficiency virus 2 [HIV-2]
cacaaacaagcagacau

SEQ ID NO: 4007223 - RNA, 17 nt, Human immunodeficiency virus 2 [HIV-2]
cagaaagacagaaagau

SEQ ID NO: 4007224 - RNA, 12 nt, Human immunodeficiency virus 2 [HIV-2]
cagaagaagacg

SEQ ID NO: 4007225 - RNA, 22 nt, Human immunodeficiency virus 2 [HIV-2]
cagaagaguuugggcacaaguc

SEQ ID NO: 4007226 - RNA, 20 nt, Human immunodeficiency virus 2 [HIV-2]
cagaauuauacucaugggcc

SEQ ID NO: 4007227 - RNA, 13 nt, Human immunodeficiency virus 2 [HIV-2]
caggcagggagca

SEQ ID NO: 4007228 - RNA, 18 nt, Human immunodeficiency virus 2 [HIV-2]
caggugaaguaagaagag

SEQ ID NO: 4007229 - RNA, 22 nt, Human immunodeficiency virus 2 [HIV-2]
caggugaaguaagaagagccau

SEQ ID NO: 4007230 - RNA, 17 nt, Human immunodeficiency virus 2 [HIV-2]
caguggagaagagacca

SEQ ID NO: 4007231 - RNA, 20 nt, Human immunodeficiency virus 2 [HIV-2]
cauaauaaaugaaacuucua

SEQ ID NO: 4007232 - RNA, 14 nt, Human immunodeficiency virus 2 [HIV-2]
cauauaaagcagau

SEQ ID NO: 4007233 - RNA, 19 nt, Human immunodeficiency virus 2 [HIV-2]
caugaacagcccauggaga

SEQ ID NO: 4007234 - RNA, 18 nt, Human immunodeficiency virus 2 [HIV-2]
cauuagcuuaaacaagua

SEQ ID NO: 4007235 - RNA, 17 nt, Human immunodeficiency virus 2 [HIV-2]
ccaaauucaacaagaaa

SEQ ID NO: 4007236 - RNA, 23 nt, Human immunodeficiency virus 2 [HIV-2]
ccaagaguaccacggagagaaau

SEQ ID NO: 4007237 - RNA, 16 nt, Human immunodeficiency virus 2 [HIV-2]
ccagcaacagaaagac

SEQ ID NO: 4007238 - RNA, 17 nt, Human immunodeficiency virus 2 [HIV-2]
ccagcacaaacaagcag

SEQ ID NO: 4007239 - RNA, 15 nt, Human immunodeficiency virus 2 [HIV-2]
ccagugaggaacaaa

SEQ ID NO: 4007240 - RNA, 14 nt, Human immunodeficiency virus 2 [HIV-2]
ccauugccagcugu

SEQ ID NO: 4007241 - RNA, 23 nt, Human immunodeficiency virus 2 [HIV-2]
cccaauguacuucggguggcugu

SEQ ID NO: 4007242 - RNA, 21 nt, Human immunodeficiency virus 2 [HIV-2]
cccagcacaaacaagcagaca

SEQ ID NO: 4007243 - RNA, 17 nt, Human immunodeficiency virus 2 [HIV-2]
ccgguuuggaggcagau

SEQ ID NO: 4007244 - RNA, 16 nt, Human immunodeficiency virus 2 [HIV-2]
ccgucuggggaacgaa

SEQ ID NO: 4007245 - RNA, 14 nt, Human immunodeficiency virus 2 [HIV-2]
ccuugcccagcugc

SEQ ID NO: 4007246 - RNA, 21 nt, Human immunodeficiency virus 2 [HIV-2]
cgggcuauacaacaucugcag

SEQ ID NO: 4007247 - RNA, 15 nt, Human immunodeficiency virus 2 [HIV-2]
cuaaauucaugggga

SEQ ID NO: 4007248 - RNA, 20 nt, Human immunodeficiency virus 2 [HIV-2]
cuagagccaugcacuaacaa

SEQ ID NO: 4007249 - RNA, 14 nt, Human immunodeficiency virus 2 [HIV-2]
cuagaggcaaauau

SEQ ID NO: 4007250 - RNA, 23 nt, Human immunodeficiency virus 2 [HIV-2]
cucuccagcacuagcagguagag

SEQ ID NO: 4007251 - RNA, 15 nt, Human immunodeficiency virus 2 [HIV-2]
cugaggcugcaggga

SEQ ID NO: 4007252 - RNA, 21 nt, Human immunodeficiency virus 2 [HIV-2]
cugagggaaauaaaggaagaa

SEQ ID NO: 4007253 - RNA, 16 nt, Human immunodeficiency virus 2 [HIV-2]
cugcggagaggcuggc

SEQ ID NO: 4007254 - RNA, 23 nt, Human immunodeficiency virus 2 [HIV-2]
cuguguuucucgaaaaaggggcu

SEQ ID NO: 4007255 - RNA, 14 nt, Human immunodeficiency virus 2 [HIV-2]
cuuaaacagggagg

SEQ ID NO: 4007256 - RNA, 17 nt, Human immunodeficiency virus 2 [HIV-2]
cuuguacaacaucccag

SEQ ID NO: 4007257 - RNA, 17 nt, Human immunodeficiency virus 2 [HIV-2]
gaggggaauacucgcag

SEQ ID NO: 4007258 - RNA, 14 nt, Human immunodeficiency virus 2 [HIV-2]
gagguauaaggaca

SEQ ID NO: 4007259 - RNA, 15 nt, Human immunodeficiency virus 2 [HIV-2]
gaguaccacggagag

SEQ ID NO: 4007260 - RNA, 15 nt, Human immunodeficiency virus 2 [HIV-2]
gaguauggagccugg

SEQ ID NO: 4007261 - RNA, 17 nt, Human immunodeficiency virus 2 [HIV-2]
gcaacagcaacagcugu

SEQ ID NO: 4007262 - RNA, 20 nt, Human immunodeficiency virus 2 [HIV-2]
gcaccuacagaucagagaag

SEQ ID NO: 4007263 - RNA, 15 nt, Human immunodeficiency virus 2 [HIV-2]
gcagaaguggcagaa

SEQ ID NO: 4007264 - RNA, 14 nt, Human immunodeficiency virus 2 [HIV-2]
gcaguagaagaugu

SEQ ID NO: 4007265 - RNA, 22 nt, Human immunodeficiency virus 2 [HIV-2]
gccaacgaaggaacagaagaag

SEQ ID NO: 4007266 - RNA, 13 nt, Human immunodeficiency virus 2 [HIV-2]
gcccucauacuua

SEQ ID NO: 4007267 - RNA, 20 nt, Human immunodeficiency virus 2 [HIV-2]
gccgguuuggaggcagaugg

SEQ ID NO: 4007268 - RNA, 13 nt, Human immunodeficiency virus 2 [HIV-2]
gccugugaaucaa

SEQ ID NO: 4007269 - RNA, 19 nt, Human immunodeficiency virus 2 [HIV-2]
gcuacuaagaaacagcuga

SEQ ID NO: 4007270 - RNA, 16 nt, Human immunodeficiency virus 2 [HIV-2]
gcuauacaacaucugc

SEQ ID NO: 4007271 - RNA, 23 nt, Human immunodeficiency virus 2 [HIV-2]
gcuauacaacaucugcagagacu

SEQ ID NO: 4007272 - RNA, 18 nt, Human immunodeficiency virus 2 [HIV-2]
gcugagacuuaaggcggc

SEQ ID NO: 4007273 - RNA, 19 nt, Human immunodeficiency virus 2 [HIV-2]
gcuuaguacacccagcaca

SEQ ID NO: 4007274 - RNA, 22 nt, Human immunodeficiency virus 2 [HIV-2]
gcuuugggaauccaaggcagga

SEQ ID NO: 4007275 - RNA, 20 nt, Human immunodeficiency virus 2 [HIV-2]
ggaaucaaugauacagggaa

SEQ ID NO: 4007276 - RNA, 19 nt, Human immunodeficiency virus 2 [HIV-2]
ggaauccaaggcaggaaaa

SEQ ID NO: 4007277 - RNA, 15 nt, Human immunodeficiency virus 2 [HIV-2]
ggacuaacugcagag

SEQ ID NO: 4007278 - RNA, 18 nt, Human immunodeficiency virus 2 [HIV-2]
ggacuuagggagugacug

SEQ ID NO: 4007279 - RNA, 18 nt, Human immunodeficiency virus 2 [HIV-2]
ggagacauuaguguggca

SEQ ID NO: 4007280 - RNA, 13 nt, Human immunodeficiency virus 2 [HIV-2]
ggaggcagugaac

SEQ ID NO: 4007281 - RNA, 17 nt, Human immunodeficiency virus 2 [HIV-2]
ggcacuagagcagaaaa

SEQ ID NO: 4007282 - RNA, 13 nt, Human immunodeficiency virus 2 [HIV-2]
ggcccaacugcaa

SEQ ID NO: 4007283 - RNA, 13 nt, Human immunodeficiency virus 2 [HIV-2]
ggccuaggcaggc

SEQ ID NO: 4007284 - RNA, 15 nt, Human immunodeficiency virus 2 [HIV-2]
ggcuguggaagcuag

SEQ ID NO: 4007285 - RNA, 22 nt, Human immunodeficiency virus 2 [HIV-2]
gggaacgaaaaaccuccaggca

SEQ ID NO: 4007286 - RNA, 12 nt, Human immunodeficiency virus 2 [HIV-2]
gguagagccugg

SEQ ID NO: 4007287 - RNA, 13 nt, Human immunodeficiency virus 2 [HIV-2]
ggucaaggcagga

SEQ ID NO: 4007288 - RNA, 17 nt, Human immunodeficiency virus 2 [HIV-2]
guaagagaccaggaaau

SEQ ID NO: 4007289 - RNA, 14 nt, Human immunodeficiency virus 2 [HIV-2]
guacacccagcaca

SEQ ID NO: 4007290 - RNA, 15 nt, Human immunodeficiency virus 2 [HIV-2]
guaccacggagagaa

SEQ ID NO: 4007291 - RNA, 17 nt, Human immunodeficiency virus 2 [HIV-2]
guagauucugaugauga

SEQ ID NO: 4007292 - RNA, 20 nt, Human immunodeficiency virus 2 [HIV-2]
gucaggauugccagagaaag

SEQ ID NO: 4007293 - RNA, 17 nt, Human immunodeficiency virus 2 [HIV-2]
gucuaaugacugaagca

SEQ ID NO: 4007294 - RNA, 21 nt, Human immunodeficiency virus 2 [HIV-2]
gugcaauuguuaaguagauuu

SEQ ID NO: 4007295 - RNA, 20 nt, Human immunodeficiency virus 2 [HIV-2]
guggcaaagguccuggagau

SEQ ID NO: 4007296 - RNA, 23 nt, Human immunodeficiency virus 2 [HIV-2]
guuccaagaagaaucaggcaggg

SEQ ID NO: 4007297 - RNA, 21 nt, Human immunodeficiency virus 2 [HIV-2]
uaacaggaacaaccauacuug

SEQ ID NO: 4007298 - RNA, 18 nt, Human immunodeficiency virus 2 [HIV-2]
uaagguacccaauguacu

SEQ ID NO: 4007299 - RNA, 14 nt, Human immunodeficiency virus 2 [HIV-2]
uauaaagcagauaa

SEQ ID NO: 4007300 - RNA, 12 nt, Human immunodeficiency virus 2 [HIV-2]
uauaaggacaca

SEQ ID NO: 4007301 - RNA, 14 nt, Human immunodeficiency virus 2 [HIV-2]
uauaggccuguuuu

SEQ ID NO: 4007302 - RNA, 13 nt, Human immunodeficiency virus 2 [HIV-2]
uaucagcagggag

SEQ ID NO: 4007303 - RNA, 17 nt, Human immunodeficiency virus 2 [HIV-2]
uaucauuagcuuaaaca

SEQ ID NO: 4007304 - RNA, 13 nt, Human immunodeficiency virus 2 [HIV-2]
ucagcagggagag

SEQ ID NO: 4007305 - RNA, 23 nt, Human immunodeficiency virus 2 [HIV-2]
ucagcagggagaguacaugaaca

SEQ ID NO: 4007306 - RNA, 20 nt, Human immunodeficiency virus 2 [HIV-2]
ucgggcuauacaacaucugc

SEQ ID NO: 4007307 - RNA, 13 nt, Human immunodeficiency virus 2 [HIV-2]
ucucuccagcacu

SEQ ID NO: 4007308 - RNA, 16 nt, Human immunodeficiency virus 2 [HIV-2]
ucuugcuuuacggcag

SEQ ID NO: 4007309 - RNA, 14 nt, Human immunodeficiency virus 2 [HIV-2]
ugaauuacaaaaau

SEQ ID NO: 4007310 - RNA, 17 nt, Human immunodeficiency virus 2 [HIV-2]
ugaguaacaagacccug

SEQ ID NO: 4007311 - RNA, 19 nt, Human immunodeficiency virus 2 [HIV-2]
ugaucgggcuauacaacau

SEQ ID NO: 4007312 - RNA, 20 nt, Human immunodeficiency virus 2 [HIV-2]
ugcagggacuuuccagaagg

SEQ ID NO: 4007313 - RNA, 11 nt, Human immunodeficiency virus 2 [HIV-2]
ugcccagcugc

SEQ ID NO: 4007314 - RNA, 15 nt, Human immunodeficiency virus 2 [HIV-2]
ugccuaaugcaaaaa

SEQ ID NO: 4007315 - RNA, 17 nt, Human immunodeficiency virus 2 [HIV-2]
ugcgaguggauccaaga

SEQ ID NO: 4007316 - RNA, 14 nt, Human immunodeficiency virus 2 [HIV-2]
ugcuggacucucac

SEQ ID NO: 4007317 - RNA, 20 nt, Human immunodeficiency virus 2 [HIV-2]
uggacguagucaagagacaa

SEQ ID NO: 4007318 - RNA, 18 nt, Human immunodeficiency virus 2 [HIV-2]
uggccgguacugggcaga

SEQ ID NO: 4007319 - RNA, 15 nt, Human immunodeficiency virus 2 [HIV-2]
ugggaauccaaggca

SEQ ID NO: 4007320 - RNA, 13 nt, Human immunodeficiency virus 2 [HIV-2]
uguacccagaaga

SEQ ID NO: 4007321 - RNA, 17 nt, Human immunodeficiency virus 2 [HIV-2]
uguaugaauuacaaaaa

SEQ ID NO: 4007322 - RNA, 23 nt, Human immunodeficiency virus 2 [HIV-2]
uuauacucaugggccaggaguaa

SEQ ID NO: 4007323 - RNA, 21 nt, Human immunodeficiency virus 2 [HIV-2]
uuccaagaagaaucaggcagg

SEQ ID NO: 4007324 - RNA, 12 nt, Human immunodeficiency virus 2 [HIV-2]
uuuggaggcaga

SEQ ID NO: 4007325 - RNA, 12 nt, Human metapneumovirus
aaaaacagaauu

SEQ ID NO: 4007326 - RNA, 22 nt, Human metapneumovirus
aaaaacugaaucagacaaaaag

SEQ ID NO: 4007327 - RNA, 14 nt, Human metapneumovirus
aaaaagaccaauga

SEQ ID NO: 4007328 - RNA, 19 nt, Human metapneumovirus
aaaacugaaauaaagcaag

SEQ ID NO: 4007329 - RNA, 17 nt, Human metapneumovirus
aaaagaccaaugaagca

SEQ ID NO: 4007330 - RNA, 17 nt, Human metapneumovirus
aaaagacugugaaacaa

SEQ ID NO: 4007331 - RNA, 22 nt, Human metapneumovirus
aaaagcugcagccuguuacagu

SEQ ID NO: 4007332 - RNA, 14 nt, Human metapneumovirus
aaaauaaaaauuug

SEQ ID NO: 4007333 - RNA, 19 nt, Human metapneumovirus
aaaaugacucuucauaugc

SEQ ID NO: 4007334 - RNA, 16 nt, Human metapneumovirus
aggacccacagcagca

SEQ ID NO: 4007335 - RNA, 20 nt, Human metapneumovirus
aggagcaccuccagagcuga

SEQ ID NO: 4007336 - RNA, 20 nt, Human metapneumovirus
agggaaagcagcagaaauga

SEQ ID NO: 4007337 - RNA, 19 nt, Human metapneumovirus
agggaucaucaagcaacug

SEQ ID NO: 4007338 - RNA, 21 nt, Human metapneumovirus
agucaaaggagugcaacauaa

SEQ ID NO: 4007339 - RNA, 14 nt, Human metapneumovirus
agucaagaagauga

SEQ ID NO: 4007340 - RNA, 21 nt, Human metapneumovirus
agucaaguuuccugaagauca

SEQ ID NO: 4007341 - RNA, 18 nt, Human metapneumovirus
agugcacuaagagagcuc

SEQ ID NO: 4007342 - RNA, 11 nt, Human metapneumovirus
agugcagugag

SEQ ID NO: 4007343 - RNA, 13 nt, Human metapneumovirus
aguggaaaacaau

SEQ ID NO: 4007344 - RNA, 15 nt, Human metapneumovirus
auaaacagugacaca

SEQ ID NO: 4007345 - RNA, 16 nt, Human metapneumovirus
auaaagaaaacaaaga

SEQ ID NO: 4007346 - RNA, 18 nt, Human metapneumovirus
auaacaaacuaucugaca

SEQ ID NO: 4007347 - RNA, 22 nt, Human metapneumovirus
auaagcaaaauaugcaagacuu

SEQ ID NO: 4007348 - RNA, 17 nt, Human metapneumovirus
auagaaaaggaccuguu

SEQ ID NO: 4007349 - RNA, 15 nt, Human metapneumovirus
auaugcaagacuugg

SEQ ID NO: 4007350 - RNA, 16 nt, Human metapneumovirus
auauuuugaaaacaag

SEQ ID NO: 4007351 - RNA, 11 nt, Human metapneumovirus
aucacaaaaau

SEQ ID NO: 4007352 - RNA, 16 nt, Human metapneumovirus
aucauaauaaagaaaa

SEQ ID NO: 4007353 - RNA, 18 nt, Human metapneumovirus
aucaucaagcaacugaac

SEQ ID NO: 4007354 - RNA, 18 nt, Human metapneumovirus
auccggcuugaaagugaa

SEQ ID NO: 4007355 - RNA, 18 nt, Human metapneumovirus
aucugaagacacaaaaac

SEQ ID NO: 4007356 - RNA, 20 nt, Human metapneumovirus
augauaaccaaagcauaaca

SEQ ID NO: 4007357 - RNA, 19 nt, Human metapneumovirus
augcagacaccaacaaugg

SEQ ID NO: 4007358 - RNA, 20 nt, Human metapneumovirus
augcccucaaaaagaccaau

SEQ ID NO: 4007359 - RNA, 22 nt, Human metapneumovirus
auggaucccauugaagaagaag

SEQ ID NO: 4007360 - RNA, 17 nt, Human metapneumovirus
auggaucuagaaaagaa

SEQ ID NO: 4007361 - RNA, 21 nt, Human metapneumovirus
auggaugcugucaaauuaaac

SEQ ID NO: 4007362 - RNA, 17 nt, Human metapneumovirus
auggcccaaaauuaaaa

SEQ ID NO: 4007363 - RNA, 21 nt, Human metapneumovirus
augggaaaaccccugcagaaa

SEQ ID NO: 4007364 - RNA, 17 nt, Human metapneumovirus
augggucuucaaaaaca

SEQ ID NO: 4007365 - RNA, 14 nt, Human metapneumovirus
augguauuaaauga

SEQ ID NO: 4007366 - RNA, 19 nt, Human metapneumovirus
augucauucccugaaggaa

SEQ ID NO: 4007367 - RNA, 15 nt, Human metapneumovirus
auuaacagaaaaagc

SEQ ID NO: 4007368 - RNA, 19 nt, Human metapneumovirus
auuagaugucauuaaaagu

SEQ ID NO: 4007369 - RNA, 21 nt, Human metapneumovirus
auuaguuaauuaaaaauaaag

SEQ ID NO: 4007370 - RNA, 19 nt, Human metapneumovirus
auuccuuacacagcagcug

SEQ ID NO: 4007371 - RNA, 19 nt, Human metapneumovirus
auuggcguaagagaggaau

SEQ ID NO: 4007372 - RNA, 21 nt, Human metapneumovirus
auuugcucucagauaaugaag

SEQ ID NO: 4007373 - RNA, 18 nt, Human metapneumovirus
caaaaaauuugaagucaa

SEQ ID NO: 4007374 - RNA, 12 nt, Human metapneumovirus
caaaacaacacc

SEQ ID NO: 4007375 - RNA, 12 nt, Human metapneumovirus
caaaauugcacc

SEQ ID NO: 4007376 - RNA, 21 nt, Human metapneumovirus
caaacucacagucugugaagu

SEQ ID NO: 4007377 - RNA, 21 nt, Human metapneumovirus
caacacggucuuaaagagagc

SEQ ID NO: 4007378 - RNA, 23 nt, Human metapneumovirus
caacagaagguuccuaaauguug

SEQ ID NO: 4007379 - RNA, 20 nt, Human metapneumovirus
caacaugccaacaucugcag

SEQ ID NO: 4007380 - RNA, 14 nt, Human metapneumovirus
caacccacaaaaac

SEQ ID NO: 4007381 - RNA, 18 nt, Human metapneumovirus
caacugaacaaaggcugc

SEQ ID NO: 4007382 - RNA, 16 nt, Human metapneumovirus
caacugcagcugcagu

SEQ ID NO: 4007383 - RNA, 20 nt, Human metapneumovirus
caagaauuaaaucaaucaag

SEQ ID NO: 4007384 - RNA, 12 nt, Human metapneumovirus
caagcaccuugg

SEQ ID NO: 4007385 - RNA, 21 nt, Human metapneumovirus
caagucauaguagaacuagga

SEQ ID NO: 4007386 - RNA, 23 nt, Human metapneumovirus
caaguugaucuaauagaaaagga

SEQ ID NO: 4007387 - RNA, 23 nt, Human metapneumovirus
caauagacaacacuguauaccag

SEQ ID NO: 4007388 - RNA, 12 nt, Human metapneumovirus
caauagaggaga

SEQ ID NO: 4007389 - RNA, 14 nt, Human metapneumovirus
caauuauauaaaag

SEQ ID NO: 4007390 - RNA, 15 nt, Human metapneumovirus
cacacaaaaaacaac

SEQ ID NO: 4007391 - RNA, 21 nt, Human metapneumovirus
cacaugcuggaaaauaaacag

SEQ ID NO: 4007392 - RNA, 12 nt, Human metapneumovirus
cacuaagagagc

SEQ ID NO: 4007393 - RNA, 22 nt, Human metapneumovirus
cacucgguguugcaacugcagc

SEQ ID NO: 4007394 - RNA, 17 nt, Human metapneumovirus
cacuggcuucaucauug

SEQ ID NO: 4007395 - RNA, 14 nt, Human metapneumovirus
cagaaaaagcaaaa

SEQ ID NO: 4007396 - RNA, 18 nt, Human metapneumovirus
cagaauccuaagcagugc

SEQ ID NO: 4007397 - RNA, 21 nt, Human metapneumovirus
cagaauccuaagcagugcaga

SEQ ID NO: 4007398 - RNA, 23 nt, Human metapneumovirus
cagaccaagcucuaacacaggcc

SEQ ID NO: 4007399 - RNA, 16 nt, Human metapneumovirus
cagagaugcaaugauu

SEQ ID NO: 4007400 - RNA, 16 nt, Human metapneumovirus
cagcaggugcugaaaa

SEQ ID NO: 4007401 - RNA, 19 nt, Human metapneumovirus
cagcuuaauaaaaacagaa

SEQ ID NO: 4007402 - RNA, 23 nt, Human metapneumovirus
caggaaucaauguugcugagcag

SEQ ID NO: 4007403 - RNA, 18 nt, Human metapneumovirus
caggacccacagcagcaa

SEQ ID NO: 4007404 - RNA, 21 nt, Human metapneumovirus
caggccaacacaccaccagca

SEQ ID NO: 4007405 - RNA, 16 nt, Human metapneumovirus
cagguguugcaauugc

SEQ ID NO: 4007406 - RNA, 12 nt, Human metapneumovirus
cagucaaaaacu

SEQ ID NO: 4007407 - RNA, 13 nt, Human metapneumovirus
cagucaaaaacug

SEQ ID NO: 4007408 - RNA, 14 nt, Human metapneumovirus
cagucuacauaaua

SEQ ID NO: 4007409 - RNA, 20 nt, Human metapneumovirus
caguuucaaucaaagagagu

SEQ ID NO: 4007410 - RNA, 14 nt, Human metapneumovirus
cauaccacauaauu

SEQ ID NO: 4007411 - RNA, 22 nt, Human metapneumovirus
cauauguccaggcugaaagcau

SEQ ID NO: 4007412 - RNA, 13 nt, Human metapneumovirus
caucaaaucaguu

SEQ ID NO: 4007413 - RNA, 21 nt, Human metapneumovirus
caucagcccaaggugcagcaa

SEQ ID NO: 4007414 - RNA, 17 nt, Human metapneumovirus
caugaucuaaucgcacu

SEQ ID NO: 4007415 - RNA, 19 nt, Human metapneumovirus
cauguuagacucaaaaaug

SEQ ID NO: 4007416 - RNA, 14 nt, Human metapneumovirus
ccaauacucaaagu

SEQ ID NO: 4007417 - RNA, 12 nt, Human metapneumovirus
ccaaugaagcag

SEQ ID NO: 4007418 - RNA, 21 nt, Human metapneumovirus
ccacaggagcaccuccagagc

SEQ ID NO: 4007419 - RNA, 23 nt, Human metapneumovirus
ccagagcugaguggugucacaaa

SEQ ID NO: 4007420 - RNA, 19 nt, Human metapneumovirus
ccagcuuaauaaaaacaga

SEQ ID NO: 4007421 - RNA, 17 nt, Human metapneumovirus
ccagugucaagcagcuu

SEQ ID NO: 4007422 - RNA, 21 nt, Human metapneumovirus
ccaugcaaaguuagcacagga

SEQ ID NO: 4007423 - RNA, 14 nt, Human metapneumovirus
ccucuuaagagaag

SEQ ID NO: 4007424 - RNA, 13 nt, Human metapneumovirus
ccuuacacagcag

SEQ ID NO: 4007425 - RNA, 17 nt, Human metapneumovirus
ccuuacacagcagcugu

SEQ ID NO: 4007426 - RNA, 22 nt, Human metapneumovirus
ccuucuuguucaggaaaaaagg

SEQ ID NO: 4007427 - RNA, 20 nt, Human metapneumovirus
cgacacacacacaacaccac

SEQ ID NO: 4007428 - RNA, 19 nt, Human metapneumovirus
cgacacagcagcaggaauc

SEQ ID NO: 4007429 - RNA, 18 nt, Human metapneumovirus
cgagagcauugagaacag

SEQ ID NO: 4007430 - RNA, 19 nt, Human metapneumovirus
cguguguuggcaacugcag

SEQ ID NO: 4007431 - RNA, 18 nt, Human metapneumovirus
cuaaagggaaagcagcag

SEQ ID NO: 4007432 - RNA, 14 nt, Human metapneumovirus
cuacucuaaaucau

SEQ ID NO: 4007433 - RNA, 14 nt, Human metapneumovirus
cuaggagcaauagc

SEQ ID NO: 4007434 - RNA, 18 nt, Human metapneumovirus
cuaggagcaauagcacuc

SEQ ID NO: 4007435 - RNA, 21 nt, Human metapneumovirus
cuaucugacagcaaacaugua

SEQ ID NO: 4007436 - RNA, 22 nt, Human metapneumovirus
cucaaaaagaccaaugaagcag

SEQ ID NO: 4007437 - RNA, 23 nt, Human metapneumovirus
cucaaagugaaugcaucagccca

SEQ ID NO: 4007438 - RNA, 15 nt, Human metapneumovirus
cucagccaaaucagu

SEQ ID NO: 4007439 - RNA, 20 nt, Human metapneumovirus
cugaagaucaauucaauguu

SEQ ID NO: 4007440 - RNA, 13 nt, Human metapneumovirus
cugcagaaaagaa

SEQ ID NO: 4007441 - RNA, 20 nt, Human metapneumovirus
cugcagaaaagaaacugaaa

SEQ ID NO: 4007442 - RNA, 17 nt, Human metapneumovirus
cuguuacaauaccagca

SEQ ID NO: 4007443 - RNA, 23 nt, Human metapneumovirus
cuguuccauuggcagcaacagag

SEQ ID NO: 4007444 - RNA, 19 nt, Human metapneumovirus
cuuuucauggguaaugaag

SEQ ID NO: 4007445 - RNA, 18 nt, Human metapneumovirus
gaaaaucccagacaaucu

SEQ ID NO: 4007446 - RNA, 22 nt, Human metapneumovirus
gaaacaaaccaaaaccagcagu

SEQ ID NO: 4007447 - RNA, 17 nt, Human metapneumovirus
gaaagugaaguaacagc

SEQ ID NO: 4007448 - RNA, 15 nt, Human metapneumovirus
gaagaagaagaagaa

SEQ ID NO: 4007449 - RNA, 14 nt, Human metapneumovirus
gaagaagaagaugc

SEQ ID NO: 4007450 - RNA, 17 nt, Human metapneumovirus
gaaggcgaacagcaugu

SEQ ID NO: 4007451 - RNA, 17 nt, Human metapneumovirus
gaaucaauagaggagaa

SEQ ID NO: 4007452 - RNA, 13 nt, Human metapneumovirus
gaauccuaagcag

SEQ ID NO: 4007453 - RNA, 20 nt, Human metapneumovirus
gacaacacuguauaccagcu

SEQ ID NO: 4007454 - RNA, 23 nt, Human metapneumovirus
gacaacucagacaccaacucaag

SEQ ID NO: 4007455 - RNA, 21 nt, Human metapneumovirus
gaccaaaagugcacuaagaga

SEQ ID NO: 4007456 - RNA, 22 nt, Human metapneumovirus
gaccaaaagugcacuaagagag

SEQ ID NO: 4007457 - RNA, 21 nt, Human metapneumovirus
gaccaagcucuaacacaggcc

SEQ ID NO: 4007458 - RNA, 21 nt, Human metapneumovirus
gacccacagcagcaagagaug

SEQ ID NO: 4007459 - RNA, 14 nt, Human metapneumovirus
gagcagucaaagga

SEQ ID NO: 4007460 - RNA, 12 nt, Human metapneumovirus
gauaaugaagaa

SEQ ID NO: 4007461 - RNA, 13 nt, Human metapneumovirus
gauaaugaagaag

SEQ ID NO: 4007462 - RNA, 15 nt, Human metapneumovirus
gauaaugaagaagaa

SEQ ID NO: 4007463 - RNA, 20 nt, Human metapneumovirus
gauacuucaucauuaagcau

SEQ ID NO: 4007464 - RNA, 17 nt, Human metapneumovirus
gaucaacuggcaagaga

SEQ ID NO: 4007465 - RNA, 16 nt, Human metapneumovirus
gaucaaucaaacagaa

SEQ ID NO: 4007466 - RNA, 16 nt, Human metapneumovirus
gaucagagaugcaaug

SEQ ID NO: 4007467 - RNA, 16 nt, Human metapneumovirus
gaucuaauagaaaagg

SEQ ID NO: 4007468 - RNA, 19 nt, Human metapneumovirus
gcaaaaaaacacaugaucu

SEQ ID NO: 4007469 - RNA, 13 nt, Human metapneumovirus
gcaacugcaguga

SEQ ID NO: 4007470 - RNA, 20 nt, Human metapneumovirus
gcaggacccacagcagcaag

SEQ ID NO: 4007471 - RNA, 15 nt, Human metapneumovirus
gccucuuaagagaag

SEQ ID NO: 4007472 - RNA, 19 nt, Human metapneumovirus
gccuugguggaucaaucaa

SEQ ID NO: 4007473 - RNA, 18 nt, Human metapneumovirus
gcuauaagcagugaagca

SEQ ID NO: 4007474 - RNA, 21 nt, Human metapneumovirus
gcuauuaagaacacucaacau

SEQ ID NO: 4007475 - RNA, 19 nt, Human metapneumovirus
gcucucagauaaugaagaa

SEQ ID NO: 4007476 - RNA, 21 nt, Human metapneumovirus
gcugaaagauuuugugagcaa

SEQ ID NO: 4007477 - RNA, 17 nt, Human metapneumovirus
gcugaaagcauaagcaa

SEQ ID NO: 4007478 - RNA, 20 nt, Human metapneumovirus
gcugaucaacuggcaagaga

SEQ ID NO: 4007479 - RNA, 14 nt, Human metapneumovirus
gcugucaaauuaaa

SEQ ID NO: 4007480 - RNA, 14 nt, Human metapneumovirus
gcuucauaccacau

SEQ ID NO: 4007481 - RNA, 22 nt, Human metapneumovirus
gcuugaaagugaaguaacagca

SEQ ID NO: 4007482 - RNA, 17 nt, Human metapneumovirus
ggacggcacgcagaacc

SEQ ID NO: 4007483 - RNA, 18 nt, Human metapneumovirus
ggagaaauuaagcaugau

SEQ ID NO: 4007484 - RNA, 13 nt, Human metapneumovirus
ggaucuagaaaag

SEQ ID NO: 4007485 - RNA, 15 nt, Human metapneumovirus
ggaucuagaaaagaa

SEQ ID NO: 4007486 - RNA, 14 nt, Human metapneumovirus
ggcaacaacaccau

SEQ ID NO: 4007487 - RNA, 12 nt, Human metapneumovirus
ggccaacacacc

SEQ ID NO: 4007488 - RNA, 21 nt, Human metapneumovirus
ggccagugucaagcagcuuug

SEQ ID NO: 4007489 - RNA, 22 nt, Human metapneumovirus
guaaagugcuuauuguacuuaa

SEQ ID NO: 4007490 - RNA, 19 nt, Human metapneumovirus
guaaauuaaaauaaauuaa

SEQ ID NO: 4007491 - RNA, 16 nt, Human metapneumovirus
guaauaauuaauugcu

SEQ ID NO: 4007492 - RNA, 12 nt, Human metapneumovirus
guaaugaagcag

SEQ ID NO: 4007493 - RNA, 16 nt, Human metapneumovirus
guaaugaagcagcaaa

SEQ ID NO: 4007494 - RNA, 16 nt, Human metapneumovirus
guagcacucgaugaau

SEQ ID NO: 4007495 - RNA, 14 nt, Human metapneumovirus
guauuuuaaaaguu

SEQ ID NO: 4007496 - RNA, 16 nt, Human metapneumovirus
gucaaggcuuacuuaa

SEQ ID NO: 4007497 - RNA, 21 nt, Human metapneumovirus
guccaauacucaaagugaaug

SEQ ID NO: 4007498 - RNA, 15 nt, Human metapneumovirus
gucucauacuaacau

SEQ ID NO: 4007499 - RNA, 17 nt, Human metapneumovirus
gugagagagcugaaaga

SEQ ID NO: 4007500 - RNA, 11 nt, Human metapneumovirus
gugcaaucaac

SEQ ID NO: 4007501 - RNA, 16 nt, Human metapneumovirus
gugcacuaagagagcu

SEQ ID NO: 4007502 - RNA, 17 nt, Human metapneumovirus
gugcacuaagagagcuc

SEQ ID NO: 4007503 - RNA, 18 nt, Human metapneumovirus
guggaucaaucaaacaga

SEQ ID NO: 4007504 - RNA, 20 nt, Human metapneumovirus
guguuggcaacugcagugag

SEQ ID NO: 4007505 - RNA, 19 nt, Human metapneumovirus
guuacagcagguguugcaa

SEQ ID NO: 4007506 - RNA, 19 nt, Human metapneumovirus
guuauauaaaaaucaaguu

SEQ ID NO: 4007507 - RNA, 11 nt, Human metapneumovirus
guugaagauga

SEQ ID NO: 4007508 - RNA, 19 nt, Human metapneumovirus
guuggagaaccgugcaaug

SEQ ID NO: 4007509 - RNA, 14 nt, Human metapneumovirus
guuuccaacaugcc

SEQ ID NO: 4007510 - RNA, 14 nt, Human metapneumovirus
uaacaaaauuaaaa

SEQ ID NO: 4007511 - RNA, 14 nt, Human metapneumovirus
uaagaucaaauuau

SEQ ID NO: 4007512 - RNA, 14 nt, Human metapneumovirus
uaagcagugaagca

SEQ ID NO: 4007513 - RNA, 14 nt, Human metapneumovirus
uaauaaaaacagaa

SEQ ID NO: 4007514 - RNA, 17 nt, Human metapneumovirus
uaauaaaaauaaacaau

SEQ ID NO: 4007515 - RNA, 12 nt, Human metapneumovirus
uacacagcagcu

SEQ ID NO: 4007516 - RNA, 23 nt, Human metapneumovirus
uagauacuuauuaauaagaucaa

SEQ ID NO: 4007517 - RNA, 15 nt, Human metapneumovirus
uagaucauaaaguca

SEQ ID NO: 4007518 - RNA, 19 nt, Human metapneumovirus
uagcacucgguguugcaac

SEQ ID NO: 4007519 - RNA, 15 nt, Human metapneumovirus
uaggagcauaugucc

SEQ ID NO: 4007520 - RNA, 18 nt, Human metapneumovirus
uauaaaaguggaaaacaa

SEQ ID NO: 4007521 - RNA, 23 nt, Human metapneumovirus
uauacaaacucugcaauaaacag

SEQ ID NO: 4007522 - RNA, 20 nt, Human metapneumovirus
uaucaaaauuugugagcuca

SEQ ID NO: 4007523 - RNA, 15 nt, Human metapneumovirus
uauugucaaaaugca

SEQ ID NO: 4007524 - RNA, 12 nt, Human metapneumovirus
uauuuugaaaac

SEQ ID NO: 4007525 - RNA, 15 nt, Human metapneumovirus
ucaaaaacugaauca

SEQ ID NO: 4007526 - RNA, 15 nt, Human metapneumovirus
ucaaaaagcuuggag

SEQ ID NO: 4007527 - RNA, 23 nt, Human metapneumovirus
ucaacaccagauacaacaaaccg

SEQ ID NO: 4007528 - RNA, 22 nt, Human metapneumovirus
ucaacuggcaagagaggagcaa

SEQ ID NO: 4007529 - RNA, 19 nt, Human metapneumovirus
ucaagaacgggacaaauaa

SEQ ID NO: 4007530 - RNA, 20 nt, Human metapneumovirus
ucaaucaaacagaauccuaa

SEQ ID NO: 4007531 - RNA, 15 nt, Human metapneumovirus
ucaaugcacaaauau

SEQ ID NO: 4007532 - RNA, 17 nt, Human metapneumovirus
ucaauguugcugagcag

SEQ ID NO: 4007533 - RNA, 13 nt, Human metapneumovirus
ucacaaacaaugg

SEQ ID NO: 4007534 - RNA, 15 nt, Human metapneumovirus
ucacagucugugaag

SEQ ID NO: 4007535 - RNA, 18 nt, Human metapneumovirus
ucagauaaugaagaagaa

SEQ ID NO: 4007536 - RNA, 18 nt, Human metapneumovirus
ucaucaagcaacugaaca

SEQ ID NO: 4007537 - RNA, 23 nt, Human metapneumovirus
ucauggaucccauugaagaagaa

SEQ ID NO: 4007538 - RNA, 14 nt, Human metapneumovirus
uccauuggcagcaa

SEQ ID NO: 4007539 - RNA, 13 nt, Human metapneumovirus
uccgaagaagaag

SEQ ID NO: 4007540 - RNA, 16 nt, Human metapneumovirus
uccuaagcagugcaga

SEQ ID NO: 4007541 - RNA, 19 nt, Human metapneumovirus
ucuagaaaagaacacaccu

SEQ ID NO: 4007542 - RNA, 18 nt, Human metapneumovirus
ucucagauaaugaagaag

SEQ ID NO: 4007543 - RNA, 20 nt, Human metapneumovirus
ucugaagacacaaaaaccaa

SEQ ID NO: 4007544 - RNA, 19 nt, Human metapneumovirus
ucugugaaguaaaaacagu

SEQ ID NO: 4007545 - RNA, 23 nt, Human metapneumovirus
ucugugaaguaaaaacaguuuac

SEQ ID NO: 4007546 - RNA, 22 nt, Human metapneumovirus
ugaaaaagacugugaaacaaga

SEQ ID NO: 4007547 - RNA, 14 nt, Human metapneumovirus
ugaagcagaccaag

SEQ ID NO: 4007548 - RNA, 21 nt, Human metapneumovirus
ugaagcugcuauaagcaguga

SEQ ID NO: 4007549 - RNA, 21 nt, Human metapneumovirus
ugaaguccagauaacaaccaa

SEQ ID NO: 4007550 - RNA, 19 nt, Human metapneumovirus
ugaagucucauacuaacau

SEQ ID NO: 4007551 - RNA, 17 nt, Human metapneumovirus
ugacaaacucacagucu

SEQ ID NO: 4007552 - RNA, 14 nt, Human metapneumovirus
ugacacaugcugga

SEQ ID NO: 4007553 - RNA, 16 nt, Human metapneumovirus
ugagagagcugaaaga

SEQ ID NO: 4007554 - RNA, 19 nt, Human metapneumovirus
ugaguggugucacaaacaa

SEQ ID NO: 4007555 - RNA, 16 nt, Human metapneumovirus
ugcaacugcagcugca

SEQ ID NO: 4007556 - RNA, 22 nt, Human metapneumovirus
ugcagcugcaguuacagcaggu

SEQ ID NO: 4007557 - RNA, 23 nt, Human metapneumovirus
ugccucuuaagagaagaccaagg

SEQ ID NO: 4007558 - RNA, 14 nt, Human metapneumovirus
uggcagcaacagag

SEQ ID NO: 4007559 - RNA, 17 nt, Human metapneumovirus
aaacaagaggagaccau

SEQ ID NO: 4007560 - RNA, 13 nt, Human metapneumovirus
aaacaaucugcaa

SEQ ID NO: 4007561 - RNA, 12 nt, Human metapneumovirus
aaacccugacaa

SEQ ID NO: 4007562 - RNA, 17 nt, Human metapneumovirus
aaagcagcagaaaugau

SEQ ID NO: 4007563 - RNA, 19 nt, Human metapneumovirus
aaaggcauauucaaaaagc

SEQ ID NO: 4007564 - RNA, 13 nt, Human metapneumovirus
aaagugaaguaac

SEQ ID NO: 4007565 - RNA, 22 nt, Human metapneumovirus
aaaguugaaggcgaacagcaug

SEQ ID NO: 4007566 - RNA, 20 nt, Human metapneumovirus
aaauuagcaaagcucauaau

SEQ ID NO: 4007567 - RNA, 12 nt, Human metapneumovirus
aaauuugaaguc

SEQ ID NO: 4007568 - RNA, 15 nt, Human metapneumovirus
aaauuugaagucaau

SEQ ID NO: 4007569 - RNA, 13 nt, Human metapneumovirus
aacaaaaacaagu

SEQ ID NO: 4007570 - RNA, 17 nt, Human metapneumovirus
aacaaucugcaaauaug

SEQ ID NO: 4007571 - RNA, 16 nt, Human metapneumovirus
aacaugccaacaucug

SEQ ID NO: 4007572 - RNA, 23 nt, Human metapneumovirus
aaccgugcaaugguaagaagaaa

SEQ ID NO: 4007573 - RNA, 20 nt, Human metapneumovirus
aacgaucaaaaauaggaaau

SEQ ID NO: 4007574 - RNA, 23 nt, Human metapneumovirus
aacuauucaauuuaaaaaguaaa

SEQ ID NO: 4007575 - RNA, 12 nt, Human metapneumovirus
aacuuaaaagug

SEQ ID NO: 4007576 - RNA, 19 nt, Human metapneumovirus
aacuuuuaaggaacacuga

SEQ ID NO: 4007577 - RNA, 16 nt, Human metapneumovirus
aagaagaagaagaacc

SEQ ID NO: 4007578 - RNA, 17 nt, Human metapneumovirus
aagagcucaacaaaauu

SEQ ID NO: 4007579 - RNA, 18 nt, Human metapneumovirus
aagauaugucuugaaguc

SEQ ID NO: 4007580 - RNA, 18 nt, Human metapneumovirus
aagaucaauucaauguug

SEQ ID NO: 4007581 - RNA, 22 nt, Human metapneumovirus
aagcacuaaucaagugcaguga

SEQ ID NO: 4007582 - RNA, 14 nt, Human metapneumovirus
aagcagcagaaaug

SEQ ID NO: 4007583 - RNA, 16 nt, Human metapneumovirus
aagcagugcagagaaa

SEQ ID NO: 4007584 - RNA, 14 nt, Human metapneumovirus
aagcauaagcaaaa

SEQ ID NO: 4007585 - RNA, 22 nt, Human metapneumovirus
aaggaagcuaaagggaaagcag

SEQ ID NO: 4007586 - RNA, 22 nt, Human metapneumovirus
aaggcauuccuuacacagcagc

SEQ ID NO: 4007587 - RNA, 18 nt, Human metapneumovirus
aagggacaagauaugucu

SEQ ID NO: 4007588 - RNA, 16 nt, Human metapneumovirus
aagggagugagcuguu

SEQ ID NO: 4007589 - RNA, 19 nt, Human metapneumovirus
aaguaauaauuaauugcuu

SEQ ID NO: 4007590 - RNA, 16 nt, Human metapneumovirus
aagucucauacuaaca

SEQ ID NO: 4007591 - RNA, 20 nt, Human metapneumovirus
aagucucauacuaacauuua

SEQ ID NO: 4007592 - RNA, 22 nt, Human metapneumovirus
aagugcacuaagagagcucaga

SEQ ID NO: 4007593 - RNA, 11 nt, Human metapneumovirus
aagugcaguga

SEQ ID NO: 4007594 - RNA, 14 nt, Human metapneumovirus
aaguggaaaacaau

SEQ ID NO: 4007595 - RNA, 15 nt, Human metapneumovirus
aaguuggaaaaagau

SEQ ID NO: 4007596 - RNA, 15 nt, Human metapneumovirus
aauaaaggaagcuaa

SEQ ID NO: 4007597 - RNA, 14 nt, Human metapneumovirus
aauauaaucaaaca

SEQ ID NO: 4007598 - RNA, 14 nt, Human metapneumovirus
aaucaaacagaauc

SEQ ID NO: 4007599 - RNA, 19 nt, Human metapneumovirus
aaucaaugcacaaauauaa

SEQ ID NO: 4007600 - RNA, 17 nt, Human metapneumovirus
aaucaguuggcaaaaaa

SEQ ID NO: 4007601 - RNA, 19 nt, Human metapneumovirus
aaucucccuggaaaaaaca

SEQ ID NO: 4007602 - RNA, 20 nt, Human metapneumovirus
aauuaguuaauuaaaaauaa

SEQ ID NO: 4007603 - RNA, 20 nt, Human metapneumovirus
acaaaaaggacucaucauca

SEQ ID NO: 4007604 - RNA, 15 nt, Human metapneumovirus
acaaaccaaaaccag

SEQ ID NO: 4007605 - RNA, 20 nt, Human metapneumovirus
acaaacucugcaauaaacag

SEQ ID NO: 4007606 - RNA, 19 nt, Human metapneumovirus
acaagggagugagcuguuc

SEQ ID NO: 4007607 - RNA, 16 nt, Human metapneumovirus
acaaguaaaaauggag

SEQ ID NO: 4007608 - RNA, 15 nt, Human metapneumovirus
acaaucugcaaauau

SEQ ID NO: 4007609 - RNA, 19 nt, Human metapneumovirus
acacacaagacaauaguca

SEQ ID NO: 4007610 - RNA, 14 nt, Human metapneumovirus
acagaaaaagcaaa

SEQ ID NO: 4007611 - RNA, 18 nt, Human metapneumovirus
acagaauccuaagcagug

SEQ ID NO: 4007612 - RNA, 16 nt, Human metapneumovirus
acaguauuuuaaaagu

SEQ ID NO: 4007613 - RNA, 18 nt, Human metapneumovirus
acagucugugaaguaaaa

SEQ ID NO: 4007614 - RNA, 19 nt, Human metapneumovirus
acaucugcaggacaaauaa

SEQ ID NO: 4007615 - RNA, 22 nt, Human metapneumovirus
accaagacgcagacacagugac

SEQ ID NO: 4007616 - RNA, 23 nt, Human metapneumovirus
accaugucuuuugcgacacagca

SEQ ID NO: 4007617 - RNA, 20 nt, Human metapneumovirus
acccaaaugaaaaagacugu

SEQ ID NO: 4007618 - RNA, 20 nt, Human metapneumovirus
accucaaaaaaauaauuaaa

SEQ ID NO: 4007619 - RNA, 15 nt, Human metapneumovirus
acggcacgcagaacc

SEQ ID NO: 4007620 - RNA, 18 nt, Human metapneumovirus
acggucuuaaagagagcu

SEQ ID NO: 4007621 - RNA, 21 nt, Human metapneumovirus
acugaaucagacaaaaaggac

SEQ ID NO: 4007622 - RNA, 22 nt, Human metapneumovirus
acugccgagagagaaacugaaa

SEQ ID NO: 4007623 - RNA, 16 nt, Human metapneumovirus
acuguugaagcugcua

SEQ ID NO: 4007624 - RNA, 20 nt, Human metapneumovirus
agaaaucaaugcacaaauau

SEQ ID NO: 4007625 - RNA, 15 nt, Human metapneumovirus
agaacgggacaaaua

SEQ ID NO: 4007626 - RNA, 16 nt, Human metapneumovirus
agaacgggacaaauaa

SEQ ID NO: 4007627 - RNA, 21 nt, Human metapneumovirus
agacacagugacaauagacaa

SEQ ID NO: 4007628 - RNA, 18 nt, Human metapneumovirus
agaccugaccaaaagugc

SEQ ID NO: 4007629 - RNA, 14 nt, Human metapneumovirus
agauagauacuuau

SEQ ID NO: 4007630 - RNA, 19 nt, Human metapneumovirus
agcaaaagagcucaacaaa

SEQ ID NO: 4007631 - RNA, 15 nt, Human metapneumovirus
agcaccuccagagcu

SEQ ID NO: 4007632 - RNA, 21 nt, Human metapneumovirus
agcacuaaucaagugcaguga

SEQ ID NO: 4007633 - RNA, 22 nt, Human metapneumovirus
agcacuaaucaagugcagugag

SEQ ID NO: 4007634 - RNA, 15 nt, Human metapneumovirus
agcagucaaaggagu

SEQ ID NO: 4007635 - RNA, 22 nt, Human metapneumovirus
agcauauguccaggcugaaagc

SEQ ID NO: 4007636 - RNA, 18 nt, Human metapneumovirus
agcauucaucaaaucagu

SEQ ID NO: 4007637 - RNA, 17 nt, Human metapneumovirus
agcucagccaaaucagu

SEQ ID NO: 4007638 - RNA, 16 nt, Human metapneumovirus
agcugcuauaagcagu

SEQ ID NO: 4007639 - RNA, 15 nt, Human metapneumovirus
agcugggacucaagu

SEQ ID NO: 4007640 - RNA, 21 nt, Human metapneumovirus
agcuuugacccagucaaguuu

SEQ ID NO: 4007641 - RNA, 22 nt, Human metapneumovirus
aggaaucaauguugcugagcag

SEQ ID NO: 4007642 - RNA, 21 nt, Human metapneumovirus
acuguuuacuacccaaaugaa

SEQ ID NO: 4007643 - RNA, 22 nt, Human metapneumovirus
acuuaaguuaguaaaaacacau

SEQ ID NO: 4007644 - RNA, 14 nt, Human metapneumovirus
acuuuauuaaaugg

SEQ ID NO: 4007645 - RNA, 12 nt, Human metapneumovirus
agaaacugaaaa

SEQ ID NO: 4007646 - RNA, 17 nt, Human metapneumovirus
agaauuaaaucaaucaa

SEQ ID NO: 4007647 - RNA, 17 nt, Human metapneumovirus
agaauuagaccugacca

SEQ ID NO: 4007648 - RNA, 14 nt, Human metapneumovirus
agacucaaaaaugc

SEQ ID NO: 4007649 - RNA, 16 nt, Human metapneumovirus
agagagcucagaacag

SEQ ID NO: 4007650 - RNA, 16 nt, Human metapneumovirus
agagcucaacaaaauu

SEQ ID NO: 4007651 - RNA, 19 nt, Human metapneumovirus
agaggaagugagugcaagu

SEQ ID NO: 4007652 - RNA, 14 nt, Human metapneumovirus
agauaaugaagaag

SEQ ID NO: 4007653 - RNA, 18 nt, Human metapneumovirus
agaugacauuuaccaguu

SEQ ID NO: 4007654 - RNA, 22 nt, Human metapneumovirus
agcaacagaguagggaucauca

SEQ ID NO: 4007655 - RNA, 15 nt, Human metapneumovirus
agcaagaaucuaaca

SEQ ID NO: 4007656 - RNA, 16 nt, Human metapneumovirus
agcaccuccagagcug

SEQ ID NO: 4007657 - RNA, 21 nt, Human metapneumovirus
agcacucgguguugcaacugc

SEQ ID NO: 4007658 - RNA, 16 nt, Human metapneumovirus
agcagcaaaauuagca

SEQ ID NO: 4007659 - RNA, 22 nt, Human metapneumovirus
agcagcaaaauuagcagaagcu

SEQ ID NO: 4007660 - RNA, 17 nt, Human metapneumovirus
agcagcuuugacccagu

SEQ ID NO: 4007661 - RNA, 19 nt, Human metapneumovirus
agcauguuauaaaaggaag

SEQ ID NO: 4007662 - RNA, 16 nt, Human metapneumovirus
agcauucaucaaauca

SEQ ID NO: 4007663 - RNA, 17 nt, Human metapneumovirus
agcuucagucaauucaa

SEQ ID NO: 4007664 - RNA, 17 nt, Human metapneumovirus
aggaaacacuggcuuca

SEQ ID NO: 4007665 - RNA, 16 nt, Human metapneumovirus
aggagaaaaagugaau

SEQ ID NO: 4007666 - RNA, 23 nt, Human metapneumovirus
aggagcaccuccagagcugagug

SEQ ID NO: 4007667 - RNA, 12 nt, Human metapneumovirus
aggugcagcaau

SEQ ID NO: 4007668 - RNA, 22 nt, Human metapneumovirus
aguaaguuucuaugauacuuca

SEQ ID NO: 4007669 - RNA, 17 nt, Human metapneumovirus
aguccacacaaaaaaca

SEQ ID NO: 4007670 - RNA, 14 nt, Human metapneumovirus
agugagagagcuga

SEQ ID NO: 4007671 - RNA, 23 nt, Human metapneumovirus
agugaguguuuuuaucauaauaa

SEQ ID NO: 4007672 - RNA, 10 nt, Human metapneumovirus
agugcaguga

SEQ ID NO: 4007673 - RNA, 18 nt, Human metapneumovirus
aguguaaaauuaacagaa

SEQ ID NO: 4007674 - RNA, 15 nt, Human metapneumovirus
agugucaagcagcuu

SEQ ID NO: 4007675 - RNA, 17 nt, Human metapneumovirus
aguuagcauggacagau

SEQ ID NO: 4007676 - RNA, 19 nt, Human metapneumovirus
aguuggcaaaaaaacacau

SEQ ID NO: 4007677 - RNA, 22 nt, Human metapneumovirus
aguuuucgagagcauugagaac

SEQ ID NO: 4007678 - RNA, 13 nt, Human metapneumovirus
auaacaccagcaa

SEQ ID NO: 4007679 - RNA, 16 nt, Human metapneumovirus
auaagcagugaagcag

SEQ ID NO: 4007680 - RNA, 10 nt, Human metapneumovirus
auaauuaaag

SEQ ID NO: 4007681 - RNA, 19 nt, Human metapneumovirus
auagaaauuauauauguca

SEQ ID NO: 4007682 - RNA, 17 nt, Human metapneumovirus
auauaaaaaucaaguua

SEQ ID NO: 4007683 - RNA, 19 nt, Human metapneumovirus
auauaacaacauacaaauu

SEQ ID NO: 4007684 - RNA, 17 nt, Human metapneumovirus
aucaagggacaagauau

SEQ ID NO: 4007685 - RNA, 23 nt, Human metapneumovirus
aucaauagaggagaaauuaagca

SEQ ID NO: 4007686 - RNA, 21 nt, Human metapneumovirus
aucaguuucaaucaaagagag

SEQ ID NO: 4007687 - RNA, 16 nt, Human metapneumovirus
aucaucaagcaacuga

SEQ ID NO: 4007688 - RNA, 19 nt, Human metapneumovirus
aucuagaaaagaacacacc

SEQ ID NO: 4007689 - RNA, 11 nt, Human metapneumovirus
augaaaaagac

SEQ ID NO: 4007690 - RNA, 14 nt, Human metapneumovirus
augauggaagagga

SEQ ID NO: 4007691 - RNA, 22 nt, Human metapneumovirus
augcugaacuagccagagcugu

SEQ ID NO: 4007692 - RNA, 13 nt, Human metapneumovirus
auggaagaggaaa

SEQ ID NO: 4007693 - RNA, 20 nt, Human metapneumovirus
auggguaaugaagcagcaaa

SEQ ID NO: 4007694 - RNA, 14 nt, Human metapneumovirus
augguaagaagaaa

SEQ ID NO: 4007695 - RNA, 15 nt, Human metapneumovirus
augguaucaaaauuu

SEQ ID NO: 4007696 - RNA, 23 nt, Human metapneumovirus
auuaaaacaguuuuuaacaagga

SEQ ID NO: 4007697 - RNA, 23 nt, Human metapneumovirus
auuaagaaugcccucaaaaagac

SEQ ID NO: 4007698 - RNA, 20 nt, Human metapneumovirus
auuagcuuuacuaacauuuc

SEQ ID NO: 4007699 - RNA, 18 nt, Human metapneumovirus
auuauaggagaaaaagug

SEQ ID NO: 4007700 - RNA, 20 nt, Human metapneumovirus
auucaaagguauacaaacuc

SEQ ID NO: 4007701 - RNA, 22 nt, Human metapneumovirus
auucuuuucauggguaaugaag

SEQ ID NO: 4007702 - RNA, 17 nt, Human metapneumovirus
auuggcguaagagagga

SEQ ID NO: 4007703 - RNA, 14 nt, Human metapneumovirus
auuuugaaaacaag

SEQ ID NO: 4007704 - RNA, 12 nt, Human metapneumovirus
caaaaacaugua

SEQ ID NO: 4007705 - RNA, 19 nt, Human metapneumovirus
caaaacugaaauaaagcaa

SEQ ID NO: 4007706 - RNA, 21 nt, Human metapneumovirus
caaaauaugcaagacuuggag

SEQ ID NO: 4007707 - RNA, 19 nt, Human metapneumovirus
caaacuaguuaacaaaaaa

SEQ ID NO: 4007708 - RNA, 17 nt, Human metapneumovirus
caaagaaacccacagga

SEQ ID NO: 4007709 - RNA, 20 nt, Human metapneumovirus
caaauuauuuauuaaaucaa

SEQ ID NO: 4007710 - RNA, 13 nt, Human metapneumovirus
caacaaaaacaag

SEQ ID NO: 4007711 - RNA, 17 nt, Human metapneumovirus
caacacggucuuaaaga

SEQ ID NO: 4007712 - RNA, 18 nt, Human metapneumovirus
caacaucugcaggacaaa

SEQ ID NO: 4007713 - RNA, 22 nt, Human metapneumovirus
caacaugccaacaucugcagga

SEQ ID NO: 4007714 - RNA, 19 nt, Human metapneumovirus
caacucaagcccacagcau

SEQ ID NO: 4007715 - RNA, 18 nt, Human metapneumovirus
caacugcagugagagagc

SEQ ID NO: 4007716 - RNA, 18 nt, Human metapneumovirus
caacuggcaagagaggag

SEQ ID NO: 4007717 - RNA, 19 nt, Human metapneumovirus
caacuggcaagagaggagc

SEQ ID NO: 4007718 - RNA, 18 nt, Human metapneumovirus
caagaaucuaacacgugc

SEQ ID NO: 4007719 - RNA, 22 nt, Human metapneumovirus
caagaaucuaacacgugcaauc

SEQ ID NO: 4007720 - RNA, 15 nt, Human metapneumovirus
caagagcaacaaaag

SEQ ID NO: 4007721 - RNA, 16 nt, Human metapneumovirus
caagcucuaacacagg

SEQ ID NO: 4007722 - RNA, 19 nt, Human metapneumovirus
caaggaugguauugucaaa

SEQ ID NO: 4007723 - RNA, 21 nt, Human metapneumovirus
caaggcauuccuuacacagca

SEQ ID NO: 4007724 - RNA, 22 nt, Human metapneumovirus
caaggcauuccuuacacagcag

SEQ ID NO: 4007725 - RNA, 23 nt, Human metapneumovirus
caaggcauuccuuacacagcagc

SEQ ID NO: 4007726 - RNA, 17 nt, Human metapneumovirus
caaggcuccgugcaaau

SEQ ID NO: 4007727 - RNA, 17 nt, Human metapneumovirus
caaggugcagcaauguc

SEQ ID NO: 4007728 - RNA, 21 nt, Human metapneumovirus
caaguaguuauggaggugaaa

SEQ ID NO: 4007729 - RNA, 12 nt, Human metapneumovirus
caagugcaguga

SEQ ID NO: 4007730 - RNA, 18 nt, Human metapneumovirus
caaguugaucuaauagaa

SEQ ID NO: 4007731 - RNA, 14 nt, Human metapneumovirus
caauagaggagaaa

SEQ ID NO: 4007732 - RNA, 12 nt, Human metapneumovirus
caaucaaagaga

SEQ ID NO: 4007733 - RNA, 19 nt, Human metapneumovirus
caaucuauuauaggagaaa

SEQ ID NO: 4007734 - RNA, 21 nt, Human metapneumovirus
caauguuuuuacacuggaggu

SEQ ID NO: 4007735 - RNA, 16 nt, Human metapneumovirus
caauucaauguugcac

SEQ ID NO: 4007736 - RNA, 23 nt, Human metapneumovirus
caauuuaaaaaguaaaaaacaau

SEQ ID NO: 4007737 - RNA, 22 nt, Human metapneumovirus
cacaggagcaccuccagagcug

SEQ ID NO: 4007738 - RNA, 16 nt, Human metapneumovirus
caccagcagugcugcu

SEQ ID NO: 4007739 - RNA, 15 nt, Human metapneumovirus
cacucgguguugcaa

SEQ ID NO: 4007740 - RNA, 20 nt, Human metapneumovirus
cagaauccuaagcagugcag

SEQ ID NO: 4007741 - RNA, 15 nt, Human metapneumovirus
cagagaaaggaaaca

SEQ ID NO: 4007742 - RNA, 16 nt, Human metapneumovirus
cagauaaugaagaaga

SEQ ID NO: 4007743 - RNA, 18 nt, Human metapneumovirus
cagauuuaugcagaaaca

SEQ ID NO: 4007744 - RNA, 21 nt, Human metapneumovirus
cagcaagagaugggaucagag

SEQ ID NO: 4007745 - RNA, 12 nt, Human metapneumovirus
cagcagcuguuc

SEQ ID NO: 4007746 - RNA, 13 nt, Human metapneumovirus
caggagcaggcag

SEQ ID NO: 4007747 - RNA, 14 nt, Human metapneumovirus
cagguguugcaauu

SEQ ID NO: 4007748 - RNA, 20 nt, Human metapneumovirus
cagucugugaaguaaaaaca

SEQ ID NO: 4007749 - RNA, 16 nt, Human metapneumovirus
cagugcagagaaagga

SEQ ID NO: 4007750 - RNA, 16 nt, Human metapneumovirus
cauaauaaagaaaaca

SEQ ID NO: 4007751 - RNA, 14 nt, Human metapneumovirus
cauacuaacauuua

SEQ ID NO: 4007752 - RNA, 16 nt, Human metapneumovirus
cauauguccaggcuga

SEQ ID NO: 4007753 - RNA, 14 nt, Human metapneumovirus
aaaaaaacacauga

SEQ ID NO: 4007754 - RNA, 19 nt, Human metapneumovirus
aaaaagugggacaagucaa

SEQ ID NO: 4007755 - RNA, 15 nt, Human metapneumovirus
aaaaggcaacaacac

SEQ ID NO: 4007756 - RNA, 16 nt, Human metapneumovirus
aaaaguaaaaaacaau

SEQ ID NO: 4007757 - RNA, 14 nt, Human metapneumovirus
aaaauaaacaaugg

SEQ ID NO: 4007758 - RNA, 15 nt, Human metapneumovirus
aaaauuguugaagau

SEQ ID NO: 4007759 - RNA, 17 nt, Human metapneumovirus
aaacaaaccaaaaccag

SEQ ID NO: 4007760 - RNA, 20 nt, Human metapneumovirus
aaacaaugggacaaguaaaa

SEQ ID NO: 4007761 - RNA, 22 nt, Human metapneumovirus
aaacaguuuacuuaacaaccau

SEQ ID NO: 4007762 - RNA, 20 nt, Human metapneumovirus
aaacugaaaaaauuagcaaa

SEQ ID NO: 4007763 - RNA, 12 nt, Human metapneumovirus
aaauaaagcaag

SEQ ID NO: 4007764 - RNA, 14 nt, Human metapneumovirus
aaauaaagcaagca

SEQ ID NO: 4007765 - RNA, 20 nt, Human metapneumovirus
aaauaauuaaagaccacucu

SEQ ID NO: 4007766 - RNA, 18 nt, Human metapneumovirus
aaaucaguuucaaucaaa

SEQ ID NO: 4007767 - RNA, 19 nt, Human metapneumovirus
aaaugaaaaagacugugaa

SEQ ID NO: 4007768 - RNA, 18 nt, Human metapneumovirus
aaauuguugaagaugaaa

SEQ ID NO: 4007769 - RNA, 14 nt, Human metapneumovirus
aacacaccaccagc

SEQ ID NO: 4007770 - RNA, 16 nt, Human metapneumovirus
aacaguuuacuuaaca

SEQ ID NO: 4007771 - RNA, 18 nt, Human metapneumovirus
aaccaacaucaacaccag

SEQ ID NO: 4007772 - RNA, 21 nt, Human metapneumovirus
aaccauaccgucagaaccaaa

SEQ ID NO: 4007773 - RNA, 23 nt, Human metapneumovirus
aaccauccggcuugaaagugaag

SEQ ID NO: 4007774 - RNA, 22 nt, Human metapneumovirus
aacuaucugacagcaaacaugu

SEQ ID NO: 4007775 - RNA, 11 nt, Human metapneumovirus
aagaaaacaaa

SEQ ID NO: 4007776 - RNA, 15 nt, Human metapneumovirus
aagaacacaccuguu

SEQ ID NO: 4007777 - RNA, 14 nt, Human metapneumovirus
aagacacaaaaacc

SEQ ID NO: 4007778 - RNA, 18 nt, Human metapneumovirus
aagacuacucuaaaucau

SEQ ID NO: 4007779 - RNA, 13 nt, Human metapneumovirus
aagaugaaagcac

SEQ ID NO: 4007780 - RNA, 22 nt, Human metapneumovirus
aagaugaaagcacaaguggaga

SEQ ID NO: 4007781 - RNA, 23 nt, Human metapneumovirus
aagauuuugugagcaagaaucua

SEQ ID NO: 4007782 - RNA, 17 nt, Human metapneumovirus
aagcaaaauaugcaaga

SEQ ID NO: 4007783 - RNA, 22 nt, Human metapneumovirus
aagcagcaaaauuagcagaagc

SEQ ID NO: 4007784 - RNA, 17 nt, Human metapneumovirus
aagcagugaagcagacc

SEQ ID NO: 4007785 - RNA, 13 nt, Human metapneumovirus
aaggaaacacugg

SEQ ID NO: 4007786 - RNA, 18 nt, Human metapneumovirus
aaggcuccgugcaaauau

SEQ ID NO: 4007787 - RNA, 22 nt, Human metapneumovirus
aaguuagcauggacagauaaag

SEQ ID NO: 4007788 - RNA, 23 nt, Human metapneumovirus
aaguuucuaugauacuucauaau

SEQ ID NO: 4007789 - RNA, 15 nt, Human metapneumovirus
aauaaaaaugucuug

SEQ ID NO: 4007790 - RNA, 11 nt, Human metapneumovirus
aauaaaguaaa

SEQ ID NO: 4007791 - RNA, 14 nt, Human metapneumovirus
aauacucaaaguga

SEQ ID NO: 4007792 - RNA, 18 nt, Human metapneumovirus
aauagaaaaggaccuguu

SEQ ID NO: 4007793 - RNA, 21 nt, Human metapneumovirus
aauaggaaaugguaguguaaa

SEQ ID NO: 4007794 - RNA, 13 nt, Human metapneumovirus
aauauagcaaacu

SEQ ID NO: 4007795 - RNA, 15 nt, Human metapneumovirus
aaucaugauaucaca

SEQ ID NO: 4007796 - RNA, 13 nt, Human metapneumovirus
aaucccaaaggca

SEQ ID NO: 4007797 - RNA, 19 nt, Human metapneumovirus
aauuacccaugcaaaguua

SEQ ID NO: 4007798 - RNA, 19 nt, Human metapneumovirus
aauuacuuaccugagaaaa

SEQ ID NO: 4007799 - RNA, 15 nt, Human metapneumovirus
aauuauauaaaagug

SEQ ID NO: 4007800 - RNA, 24 nt, Human metapneumovirus
acaaaauuguugaagaugaaagca

SEQ ID NO: 4007801 - RNA, 11 nt, Human metapneumovirus
acaaacaaugg

SEQ ID NO: 4007802 - RNA, 15 nt, Human metapneumovirus
acaaacuaucugaca

SEQ ID NO: 4007803 - RNA, 19 nt, Human metapneumovirus
acaagaauuaaaucaauca

SEQ ID NO: 4007804 - RNA, 16 nt, Human metapneumovirus
acaaggacuuaaaaga

SEQ ID NO: 4007805 - RNA, 17 nt, Human metapneumovirus
acaagugcgacauugcu

SEQ ID NO: 4007806 - RNA, 17 nt, Human metapneumovirus
acaauagacaacacugu

SEQ ID NO: 4007807 - RNA, 19 nt, Human metapneumovirus
acaauggcuucauaccaca

SEQ ID NO: 4007808 - RNA, 14 nt, Human metapneumovirus
acacacaacaccac

SEQ ID NO: 4007809 - RNA, 15 nt, Human metapneumovirus
acacaccaccagcag

SEQ ID NO: 4007810 - RNA, 16 nt, Human metapneumovirus
acacaggccaaaauug

SEQ ID NO: 4007811 - RNA, 14 nt, Human metapneumovirus
acacaucugaauca

SEQ ID NO: 4007812 - RNA, 13 nt, Human metapneumovirus
acaccaaaaagaa

SEQ ID NO: 4007813 - RNA, 14 nt, Human metapneumovirus
acaccaaaaagaag

SEQ ID NO: 4007814 - RNA, 22 nt, Human metapneumovirus
acacgugcaaucaacaaaaaca

SEQ ID NO: 4007815 - RNA, 11 nt, Human metapneumovirus
acagaaaucaa

SEQ ID NO: 4007816 - RNA, 13 nt, Human metapneumovirus
acagcagcuguuc

SEQ ID NO: 4007817 - RNA, 21 nt, Human metapneumovirus
acagcauguuauaaaaggaag

SEQ ID NO: 4007818 - RNA, 14 nt, Human metapneumovirus
acagucuacauaau

SEQ ID NO: 4007819 - RNA, 16 nt, Human metapneumovirus
acagugacaauagaca

SEQ ID NO: 4007820 - RNA, 17 nt, Human metapneumovirus
acauaucuacuacuaau

SEQ ID NO: 4007821 - RNA, 15 nt, Human metapneumovirus
acauggugcaacugc

SEQ ID NO: 4007822 - RNA, 21 nt, Human metapneumovirus
acauuagaugucauuaaaagu

SEQ ID NO: 4007823 - RNA, 17 nt, Human metapneumovirus
acccaaaugaaaaagac

SEQ ID NO: 4007824 - RNA, 18 nt, Human metapneumovirus
acccaugcaaaguuagca

SEQ ID NO: 4007825 - RNA, 14 nt, Human metapneumovirus
accugcaaaaccaa

SEQ ID NO: 4007826 - RNA, 16 nt, Human metapneumovirus
acgcagacacagugac

SEQ ID NO: 4007827 - RNA, 13 nt, Human metapneumovirus
acuauaacugaag

SEQ ID NO: 4007828 - RNA, 16 nt, Human metapneumovirus
acucugguaaagugcu

SEQ ID NO: 4007829 - RNA, 18 nt, Human metapneumovirus
acuguaucagaaacauug

SEQ ID NO: 4007830 - RNA, 16 nt, Human metapneumovirus
aaaaugcaaaaaaaca

SEQ ID NO: 4007831 - RNA, 14 nt, Human metapneumovirus
aaaauuaacagaaa

SEQ ID NO: 4007832 - RNA, 23 nt, Human metapneumovirus
aaacucacagucugugaaguaaa

SEQ ID NO: 4007833 - RNA, 23 nt, Human metapneumovirus
aaagaccaaugaagcaguaucua

SEQ ID NO: 4007834 - RNA, 16 nt, Human metapneumovirus
aaagauuuugugagca

SEQ ID NO: 4007835 - RNA, 16 nt, Human metapneumovirus
aaaguuagcacaggaa

SEQ ID NO: 4007836 - RNA, 13 nt, Human metapneumovirus
aaaugaaaaagac

SEQ ID NO: 4007837 - RNA, 17 nt, Human metapneumovirus
aaaugauggaagaggaa

SEQ ID NO: 4007838 - RNA, 12 nt, Human metapneumovirus
aaauuaagcaug

SEQ ID NO: 4007839 - RNA, 16 nt, Human metapneumovirus
aaauuugaagucaaug

SEQ ID NO: 4007840 - RNA, 21 nt, Human metapneumovirus
aaauuugggacaaaucauaau

SEQ ID NO: 4007841 - RNA, 23 nt, Human metapneumovirus
aacaauugugauaaacugacaga

SEQ ID NO: 4007842 - RNA, 19 nt, Human metapneumovirus
aacucugcaauaaacagug

SEQ ID NO: 4007843 - RNA, 16 nt, Human metapneumovirus
aacugggcaaaacaac

SEQ ID NO: 4007844 - RNA, 16 nt, Human metapneumovirus
aagaaacugaaaccau

SEQ ID NO: 4007845 - RNA, 18 nt, Human metapneumovirus
aagaacgggacaaauaaa

SEQ ID NO: 4007846 - RNA, 16 nt, Human metapneumovirus
aagaagaugcagaauc

SEQ ID NO: 4007847 - RNA, 15 nt, Human metapneumovirus
aagacuuggagccau

SEQ ID NO: 4007848 - RNA, 22 nt, Human metapneumovirus
aagaucaauucaauguugcacu

SEQ ID NO: 4007849 - RNA, 16 nt, Human metapneumovirus
uggaaaacaaucugca

SEQ ID NO: 4007850 - RNA, 17 nt, Human metapneumovirus
uggaucccauugaagaa

SEQ ID NO: 4007851 - RNA, 13 nt, Human metapneumovirus
uggggaauggagu

SEQ ID NO: 4007852 - RNA, 12 nt, Human metapneumovirus
ugguaucaaaau

SEQ ID NO: 4007853 - RNA, 14 nt, Human metapneumovirus
ugucaaaaugcagg

SEQ ID NO: 4007854 - RNA, 16 nt, Human metapneumovirus
ugucaagcagcuuuga

SEQ ID NO: 4007855 - RNA, 17 nt, Human metapneumovirus
uguccaggcugaaagca

SEQ ID NO: 4007856 - RNA, 22 nt, Human metapneumovirus
uguugaagcugcuauaagcagu

SEQ ID NO: 4007857 - RNA, 17 nt, Human metapneumovirus
uuacuuaaguuaguaaa

SEQ ID NO: 4007858 - RNA, 21 nt, Human metapneumovirus
uuauggaucuagaaaagaaca

SEQ ID NO: 4007859 - RNA, 17 nt, Human metapneumovirus
uucaaaaagcuuggagc

SEQ ID NO: 4007860 - RNA, 15 nt, Human metapneumovirus
uugaagaugaaagca

SEQ ID NO: 4007861 - RNA, 18 nt, Human metapneumovirus
uugaagaugaaagcacaa

SEQ ID NO: 4007862 - RNA, 18 nt, Human metapneumovirus
uuuucauggguaaugaag

SEQ ID NO: 4007863 - RNA, 16 nt, Human metapneumovirus
cauauucaaaaagcuu

SEQ ID NO: 4007864 - RNA, 15 nt, Human metapneumovirus
cauuguauauacaca

SEQ ID NO: 4007865 - RNA, 12 nt, Human metapneumovirus
cauuguuaauaa

SEQ ID NO: 4007866 - RNA, 19 nt, Human metapneumovirus
ccaaacuaguuaacaaaaa

SEQ ID NO: 4007867 - RNA, 15 nt, Human metapneumovirus
ccaaaugaaaaagac

SEQ ID NO: 4007868 - RNA, 18 nt, Human metapneumovirus
ccaagcucuaacacaggc

SEQ ID NO: 4007869 - RNA, 14 nt, Human metapneumovirus
ccagucaaguuucc

SEQ ID NO: 4007870 - RNA, 18 nt, Human metapneumovirus
ccggcuugaaagugaagu

SEQ ID NO: 4007871 - RNA, 18 nt, Human metapneumovirus
ccuaaauguuaacaccag

SEQ ID NO: 4007872 - RNA, 15 nt, Human metapneumovirus
ccugaaggaaaagau

SEQ ID NO: 4007873 - RNA, 13 nt, Human metapneumovirus
ccugcaaaaccaa

SEQ ID NO: 4007874 - RNA, 14 nt, Human metapneumovirus
ccuuacacagcagc

SEQ ID NO: 4007875 - RNA, 20 nt, Human metapneumovirus
cgacauugcugaccugaaaa

SEQ ID NO: 4007876 - RNA, 15 nt, Human metapneumovirus
cuaagcagugcagag

SEQ ID NO: 4007877 - RNA, 19 nt, Human metapneumovirus
cuaagcagugcagagaaag

SEQ ID NO: 4007878 - RNA, 17 nt, Human metapneumovirus
cuaaucaagugcaguga

SEQ ID NO: 4007879 - RNA, 14 nt, Human metapneumovirus
cucagauaaugaag

SEQ ID NO: 4007880 - RNA, 17 nt, Human metapneumovirus
cucagccaaaucaguug

SEQ ID NO: 4007881 - RNA, 23 nt, Human metapneumovirus
cuccguaauuuacauggugcaac

SEQ ID NO: 4007882 - RNA, 21 nt, Human metapneumovirus
cucgguguugcaacugcagcu

SEQ ID NO: 4007883 - RNA, 16 nt, Human metapneumovirus
cucuguaugcugcauc

SEQ ID NO: 4007884 - RNA, 15 nt, Human metapneumovirus
cugcucgaucagcua

SEQ ID NO: 4007885 - RNA, 19 nt, Human metapneumovirus
cugcugaucaacuggcaag

SEQ ID NO: 4007886 - RNA, 16 nt, Human metapneumovirus
cuggauaguaaaagca

SEQ ID NO: 4007887 - RNA, 17 nt, Human metapneumovirus
cuguuaguucaacaauu

SEQ ID NO: 4007888 - RNA, 14 nt, Human metapneumovirus
cuguuuccaacaug

SEQ ID NO: 4007889 - RNA, 22 nt, Human metapneumovirus
cuugaaagugaaguaacagcaa

SEQ ID NO: 4007890 - RNA, 14 nt, Human metapneumovirus
gaaaagaaacugaa

SEQ ID NO: 4007891 - RNA, 18 nt, Human metapneumovirus
gaaagauuuugugagcaa

SEQ ID NO: 4007892 - RNA, 12 nt, Human metapneumovirus
gaaauuaagcau

SEQ ID NO: 4007893 - RNA, 16 nt, Human metapneumovirus
gaacuagccagagcug

SEQ ID NO: 4007894 - RNA, 20 nt, Human metapneumovirus
gaagagucuaccgagaagaa

SEQ ID NO: 4007895 - RNA, 14 nt, Human metapneumovirus
gaaguaacagcaau

SEQ ID NO: 4007896 - RNA, 13 nt, Human metapneumovirus
gaaucuucaaucu

SEQ ID NO: 4007897 - RNA, 16 nt, Human metapneumovirus
gaauuaaaucaaucaa

SEQ ID NO: 4007898 - RNA, 22 nt, Human metapneumovirus
gaauuagaccugaccaaaagug

SEQ ID NO: 4007899 - RNA, 16 nt, Human metapneumovirus
gacaaacucacagucu

SEQ ID NO: 4007900 - RNA, 15 nt, Human metapneumovirus
gagaaccgugcaaug

SEQ ID NO: 4007901 - RNA, 23 nt, Human metapneumovirus
gauauggacucacaaggacuuaa

SEQ ID NO: 4007902 - RNA, 19 nt, Human metapneumovirus
gaucccauugaagaagaag

SEQ ID NO: 4007903 - RNA, 16 nt, Human metapneumovirus
gaugucauuaaaagug

SEQ ID NO: 4007904 - RNA, 16 nt, Human metapneumovirus
gauguuggagaaccgu

SEQ ID NO: 4007905 - RNA, 12 nt, Human metapneumovirus
gcaaaacaacac

SEQ ID NO: 4007906 - RNA, 16 nt, Human metapneumovirus
gcaaaguuagcacagg

SEQ ID NO: 4007907 - RNA, 18 nt, Human metapneumovirus
gcaaaguuagcacaggaa

SEQ ID NO: 4007908 - RNA, 15 nt, Human metapneumovirus
gcaaccaaaacugaa

SEQ ID NO: 4007909 - RNA, 20 nt, Human metapneumovirus
gcacuaaucaagugcaguga

SEQ ID NO: 4007910 - RNA, 17 nt, Human metapneumovirus
gcagcaggaaucaaugu

SEQ ID NO: 4007911 - RNA, 15 nt, Human metapneumovirus
gcagugagagagcug

SEQ ID NO: 4007912 - RNA, 18 nt, Human metapneumovirus
gcauucaucaaaucaguu

SEQ ID NO: 4007913 - RNA, 18 nt, Human metapneumovirus
gcauuccuuacacagcag

SEQ ID NO: 4007914 - RNA, 16 nt, Human metapneumovirus
gcccaaggugcagcaa

SEQ ID NO: 4007915 - RNA, 18 nt, Human metapneumovirus
gcgaacagcauguuauaa

SEQ ID NO: 4007916 - RNA, 12 nt, Human metapneumovirus
gcggcaauuuuc

SEQ ID NO: 4007917 - RNA, 22 nt, Human metapneumovirus
gcugaucaacuggcaagagagg

SEQ ID NO: 4007918 - RNA, 23 nt, Human metapneumovirus
gcuggaaaauaaacagaaaucaa

SEQ ID NO: 4007919 - RNA, 23 nt, Human metapneumovirus
gcuugaaagugaaguaacagcaa

SEQ ID NO: 4007920 - RNA, 18 nt, Human metapneumovirus
ggaauaacaccagcaaua

SEQ ID NO: 4007921 - RNA, 21 nt, Human metapneumovirus
ggaauaacaccagcaauaucu

SEQ ID NO: 4007922 - RNA, 23 nt, Human metapneumovirus
ggagcauauguccaggcugaaag

SEQ ID NO: 4007923 - RNA, 19 nt, Human metapneumovirus
ggaucccauugaagaagaa

SEQ ID NO: 4007924 - RNA, 18 nt, Human metapneumovirus
ggcaacugcagugagaga

SEQ ID NO: 4007925 - RNA, 21 nt, Human metapneumovirus
ggcaauuuucagacaacgcug

SEQ ID NO: 4007926 - RNA, 11 nt, Human metapneumovirus
ggugcagcaau

SEQ ID NO: 4007927 - RNA, 18 nt, Human metapneumovirus
guaauaauucuaauugcu

SEQ ID NO: 4007928 - RNA, 17 nt, Human metapneumovirus
gucaaguuuccugaaga

SEQ ID NO: 4007929 - RNA, 17 nt, Human metapneumovirus
gugaagcagaccaagcu

SEQ ID NO: 4007930 - RNA, 19 nt, Human metapneumovirus
gugacaauagacaacacug

SEQ ID NO: 4007931 - RNA, 13 nt, Human metapneumovirus
gugcacuaagaga

SEQ ID NO: 4007932 - RNA, 21 nt, Human metapneumovirus
gugcagagaaaggaaacacug

SEQ ID NO: 4007933 - RNA, 14 nt, Human metapneumovirus
guggaucaaucaaa

SEQ ID NO: 4007934 - RNA, 16 nt, Human metapneumovirus
guuucaaucaaagaga

SEQ ID NO: 4007935 - RNA, 23 nt, Human metapneumovirus
guuucugcugaucaacuggcaag

SEQ ID NO: 4007936 - RNA, 12 nt, Human metapneumovirus
uaaaaaacaaua

SEQ ID NO: 4007937 - RNA, 15 nt, Human metapneumovirus
uaaaaauaaacaaug

SEQ ID NO: 4007938 - RNA, 11 nt, Human metapneumovirus
uaaaaaugucu

SEQ ID NO: 4007939 - RNA, 11 nt, Human metapneumovirus
uaaaauuaaaa

SEQ ID NO: 4007940 - RNA, 16 nt, Human metapneumovirus
uaaagggaaagcagca

SEQ ID NO: 4007941 - RNA, 22 nt, Human metapneumovirus
uaaccacucuguaugcugcauc

SEQ ID NO: 4007942 - RNA, 15 nt, Human metapneumovirus
uaaccuuugaagaaa

SEQ ID NO: 4007943 - RNA, 16 nt, Human metapneumovirus
uaagaacacucaacau

SEQ ID NO: 4007944 - RNA, 14 nt, Human metapneumovirus
uaaucaagugcagu

SEQ ID NO: 4007945 - RNA, 21 nt, Human metapneumovirus
uacagcaggacccacagcagc

SEQ ID NO: 4007946 - RNA, 16 nt, Human metapneumovirus
uacuacccaaaugaaa

SEQ ID NO: 4007947 - RNA, 22 nt, Human metapneumovirus
uacuuaacaaccaugaaaccau

SEQ ID NO: 4007948 - RNA, 17 nt, Human metapneumovirus
uagaacaagaauuaaau

SEQ ID NO: 4007949 - RNA, 20 nt, Human metapneumovirus
uagauucguucuaggagcaa

SEQ ID NO: 4007950 - RNA, 12 nt, Human metapneumovirus
uaguucaacaau

SEQ ID NO: 4007951 - RNA, 15 nt, Human metapneumovirus
uaucaggagcaggca

SEQ ID NO: 4007952 - RNA, 23 nt, Human metapneumovirus
uaugugauuggcugcaguuaaag

SEQ ID NO: 4007953 - RNA, 21 nt, Human metapneumovirus
uauuauaggagaaaaagugaa

SEQ ID NO: 4007954 - RNA, 21 nt, Human metapneumovirus
ucaaaaagcuuggagcuggga

SEQ ID NO: 4007955 - RNA, 16 nt, Human metapneumovirus
ucaaauuaaacaauga

SEQ ID NO: 4007956 - RNA, 21 nt, Human metapneumovirus
ucaagcaacugaacaaaggcu

SEQ ID NO: 4007957 - RNA, 17 nt, Human metapneumovirus
ucacaguaacaaucacc

SEQ ID NO: 4007958 - RNA, 18 nt, Human metapneumovirus
ucagcccaaggugcagca

SEQ ID NO: 4007959 - RNA, 15 nt, Human metapneumovirus
ucaguguucugagga

SEQ ID NO: 4007960 - RNA, 15 nt, Human metapneumovirus
ucaguuucaaucaaa

SEQ ID NO: 4007961 - RNA, 12 nt, Human metapneumovirus
ucaucaaaucag

SEQ ID NO: 4007962 - RNA, 18 nt, Human metapneumovirus
ucauuuacaccaaaugaa

SEQ ID NO: 4007963 - RNA, 19 nt, Human metapneumovirus
uccacacaaaaaacaaccc

SEQ ID NO: 4007964 - RNA, 19 nt, Human metapneumovirus
uccggcuugaaagugaagu

SEQ ID NO: 4007965 - RNA, 19 nt, Human metapneumovirus
uccuaaauguuaacaccag

SEQ ID NO: 4007966 - RNA, 16 nt, Human metapneumovirus
ucugaagacacaaaaa

SEQ ID NO: 4007967 - RNA, 22 nt, Human metapneumovirus
ugaaacccaauccuaaauguua

SEQ ID NO: 4007968 - RNA, 18 nt, Human metapneumovirus
ugacaauagacaacacug

SEQ ID NO: 4007969 - RNA, 12 nt, Human metapneumovirus
ugauaaacugac

SEQ ID NO: 4007970 - RNA, 14 nt, Human metapneumovirus
ugauguuggagaac

SEQ ID NO: 4007971 - RNA, 14 nt, Human metapneumovirus
ugcaauaaacagug

SEQ ID NO: 4007972 - RNA, 19 nt, Human metapneumovirus
ugcagaaaagaaacugaaa

SEQ ID NO: 4007973 - RNA, 15 nt, Human metapneumovirus
ugcaguuacagcagg

SEQ ID NO: 4007974 - RNA, 21 nt, Human metapneumovirus
ugcucucagauaaugaagaag

SEQ ID NO: 4007975 - RNA, 14 nt, Human metapneumovirus
aaaaaccaacaauu

SEQ ID NO: 4007976 - RNA, 16 nt, Human metapneumovirus
aaaaauuugaagucaa

SEQ ID NO: 4007977 - RNA, 18 nt, Human metapneumovirus
aaaagcaaaagagcucaa

SEQ ID NO: 4007978 - RNA, 16 nt, Human metapneumovirus
aaaaguggaaaacaau

SEQ ID NO: 4007979 - RNA, 18 nt, Human metapneumovirus
aaaaguggaaaacaaucu

SEQ ID NO: 4007980 - RNA, 20 nt, Human metapneumovirus
aaaauauuuugaaaacaagu

SEQ ID NO: 4007981 - RNA, 17 nt, Human metapneumovirus
aaaaucaaguuagaaca

SEQ ID NO: 4007982 - RNA, 14 nt, Human metapneumovirus
aaaauuugugagcu

SEQ ID NO: 4007983 - RNA, 13 nt, Human metapneumovirus
aaaccagcaguug

SEQ ID NO: 4007984 - RNA, 19 nt, Human metapneumovirus
aaacccugacaauaaccac

SEQ ID NO: 4007985 - RNA, 20 nt, Human metapneumovirus
aaagcaagcaaucaaaguca

SEQ ID NO: 4007986 - RNA, 14 nt, Human metapneumovirus
aaaggcaacaacac

SEQ ID NO: 4007987 - RNA, 13 nt, Human metapneumovirus
aaaguaaaaaaca

SEQ ID NO: 4007988 - RNA, 20 nt, Human metapneumovirus
aaaguuggaaaaagaugcuc

SEQ ID NO: 4007989 - RNA, 20 nt, Human metapneumovirus
aaauauaacaacauacaaau

SEQ ID NO: 4007990 - RNA, 20 nt, Human metapneumovirus
aaaucaguuggcaaaaaaac

SEQ ID NO: 4007991 - RNA, 13 nt, Human metapneumovirus
aaaucccagacaa

SEQ ID NO: 4007992 - RNA, 17 nt, Human metapneumovirus
aacaaccaugaaaccau

SEQ ID NO: 4007993 - RNA, 12 nt, Human metapneumovirus
aacaagaggaga

SEQ ID NO: 4007994 - RNA, 18 nt, Human metapneumovirus
aacacaccaccagcagug

SEQ ID NO: 4007995 - RNA, 17 nt, Human metapneumovirus
aacagaaaaagcaaaag

SEQ ID NO: 4007996 - RNA, 21 nt, Human metapneumovirus
aacaucugcaggacaaauaaa

SEQ ID NO: 4007997 - RNA, 21 nt, Human metapneumovirus
aaccaccccaagaaaaaaacu

SEQ ID NO: 4007998 - RNA, 13 nt, Human metapneumovirus
aaccuuugaagaa

SEQ ID NO: 4007999 - RNA, 18 nt, Human metapneumovirus
aacuauucaauuuaaaaa

SEQ ID NO: 4008000 - RNA, 11 nt, Human metapneumovirus
aacugaacaaa

SEQ ID NO: 4008001 - RNA, 13 nt, Human metapneumovirus
aacugcagugaga

SEQ ID NO: 4008002 - RNA, 15 nt, Human metapneumovirus
aacugccaaucuuug

SEQ ID NO: 4008003 - RNA, 17 nt, Human metapneumovirus
aacuggaauuugacaaa

SEQ ID NO: 4008004 - RNA, 23 nt, Human metapneumovirus
aagaaaaaaacugggcaaaacaa

SEQ ID NO: 4008005 - RNA, 23 nt, Human metapneumovirus
aagagaggaauuaauagcagaca

SEQ ID NO: 4008006 - RNA, 17 nt, Human metapneumovirus
aagcaccuuggccaaga

SEQ ID NO: 4008007 - RNA, 23 nt, Human metapneumovirus
aagccuaacaauaugguucccuu

SEQ ID NO: 4008008 - RNA, 19 nt, Human metapneumovirus
aagcuaaagggaaagcagc

SEQ ID NO: 4008009 - RNA, 16 nt, Human metapneumovirus
aagcuuuccagaaauc

SEQ ID NO: 4008010 - RNA, 22 nt, Human metapneumovirus
aaggaaggccagugucaagcag

SEQ ID NO: 4008011 - RNA, 16 nt, Human metapneumovirus
aaggcaacaacaccau

SEQ ID NO: 4008012 - RNA, 21 nt, Human metapneumovirus
aaggccagugucaagcagcuu

SEQ ID NO: 4008013 - RNA, 17 nt, Human metapneumovirus
aaggcgaacagcauguu

SEQ ID NO: 4008014 - RNA, 18 nt, Human metapneumovirus
aauaaaguaaauuaaaau

SEQ ID NO: 4008015 - RNA, 22 nt, Human metapneumovirus
aauaccagcauucaucaaauca

SEQ ID NO: 4008016 - RNA, 20 nt, Human metapneumovirus
aauacucaaagugaaugcau

SEQ ID NO: 4008017 - RNA, 15 nt, Human metapneumovirus
aauagacaacacugu

SEQ ID NO: 4008018 - RNA, 13 nt, Human metapneumovirus
aauaggaaauggu

SEQ ID NO: 4008019 - RNA, 19 nt, Human metapneumovirus
aauauuuugaaaacaagua

SEQ ID NO: 4008020 - RNA, 16 nt, Human metapneumovirus
aaucaacaaaaacaag

SEQ ID NO: 4008021 - RNA, 21 nt, Human metapneumovirus
aauccuaaauguuaacaccag

SEQ ID NO: 4008022 - RNA, 13 nt, Human metapneumovirus
aaugaagaagaag

SEQ ID NO: 4008023 - RNA, 22 nt, Human metapneumovirus
aaugagucaacgaucaaaaaua

SEQ ID NO: 4008024 - RNA, 18 nt, Human metapneumovirus
aaugauggaagaggaaau

SEQ ID NO: 4008025 - RNA, 15 nt, Human metapneumovirus
aauuaaaauuaaaaa

SEQ ID NO: 4008026 - RNA, 23 nt, Human metapneumovirus
aauuauacuauauauuuagaaua

SEQ ID NO: 4008027 - RNA, 15 nt, Human metapneumovirus
aauugccaaaaccau

SEQ ID NO: 4008028 - RNA, 16 nt, Human metapneumovirus
aauuguuauuuagaaa

SEQ ID NO: 4008029 - RNA, 13 nt, Human metapneumovirus
acaauaccagcau

SEQ ID NO: 4008030 - RNA, 17 nt, Human metapneumovirus
acacaccaccagcagug

SEQ ID NO: 4008031 - RNA, 12 nt, Human metapneumovirus
acacagcagcug

SEQ ID NO: 4008032 - RNA, 21 nt, Human metapneumovirus
acaccuaucaaggcauuccuu

SEQ ID NO: 4008033 - RNA, 17 nt, Human metapneumovirus
acagaauccuaagcagu

SEQ ID NO: 4008034 - RNA, 17 nt, Human metapneumovirus
acagcaauuaagaaugc

SEQ ID NO: 4008035 - RNA, 17 nt, Human metapneumovirus
acagcaggacccacagc

SEQ ID NO: 4008036 - RNA, 17 nt, Human metapneumovirus
acagcauccaacucaac

SEQ ID NO: 4008037 - RNA, 13 nt, Human metapneumovirus
acaggccaaaauu

SEQ ID NO: 4008038 - RNA, 13 nt, Human metapneumovirus
accaaaacugaaa

SEQ ID NO: 4008039 - RNA, 23 nt, Human metapneumovirus
accaacaauugugauaaacugac

SEQ ID NO: 4008040 - RNA, 21 nt, Human metapneumovirus
accaaugaagcaguaucuaca

SEQ ID NO: 4008041 - RNA, 22 nt, Human metapneumovirus
accacauaauuaguuaauuaaa

SEQ ID NO: 4008042 - RNA, 14 nt, Human metapneumovirus
accaccagcagugc

SEQ ID NO: 4008043 - RNA, 13 nt, Human metapneumovirus
accuuugaagaaa

SEQ ID NO: 4008044 - RNA, 17 nt, Human metapneumovirus
acuaacaccaaaaagaa

SEQ ID NO: 4008045 - RNA, 22 nt, Human metapneumovirus
acuaugcuugccucuuaagaga

SEQ ID NO: 4008046 - RNA, 15 nt, Human metapneumovirus
acucaagcccacagc

SEQ ID NO: 4008047 - RNA, 20 nt, Human metapneumovirus
acuccaacgguccccacaga

SEQ ID NO: 4008048 - RNA, 20 nt, Human metapneumovirus
acucuaaaucaugauaucac

SEQ ID NO: 4008049 - RNA, 16 nt, Human metapneumovirus
acugaaauaaagcaag

SEQ ID NO: 4008050 - RNA, 15 nt, Human metapneumovirus
acuguauaccagcua

SEQ ID NO: 4008051 - RNA, 23 nt, Human metapneumovirus
acuuauuaauaagaucaaauuau

SEQ ID NO: 4008052 - RNA, 16 nt, Human metapneumovirus
acuucccaaaaaauuu

SEQ ID NO: 4008053 - RNA, 16 nt, Human metapneumovirus
agaaaauaaaaaaucg

SEQ ID NO: 4008054 - RNA, 15 nt, Human metapneumovirus
agaaacccacaggag

SEQ ID NO: 4008055 - RNA, 16 nt, Human metapneumovirus
agaaccuuacaugugc

SEQ ID NO: 4008056 - RNA, 14 nt, Human metapneumovirus
agaacuaggagcau

SEQ ID NO: 4008057 - RNA, 17 nt, Human metapneumovirus
agaauccuaagcagugc

SEQ ID NO: 4008058 - RNA, 16 nt, Human metapneumovirus
agacaaauaacaaugg

SEQ ID NO: 4008059 - RNA, 15 nt, Human metapneumovirus
agagagaaacugaaa

SEQ ID NO: 4008060 - RNA, 15 nt, Human metapneumovirus
agagagcuacuuaga

SEQ ID NO: 4008061 - RNA, 11 nt, Human metapneumovirus
agagagcucag

SEQ ID NO: 4008062 - RNA, 13 nt, Human metapneumovirus
agagagcugaaag

SEQ ID NO: 4008063 - RNA, 14 nt, Human metapneumovirus
agagagcugaaaga

SEQ ID NO: 4008064 - RNA, 23 nt, Human metapneumovirus
agauuuaugcagaaacaaaccaa

SEQ ID NO: 4008065 - RNA, 20 nt, Human metapneumovirus
agcagacauaauaaaggaag

SEQ ID NO: 4008066 - RNA, 13 nt, Human metapneumovirus
agcagcaaaauua

SEQ ID NO: 4008067 - RNA, 15 nt, Human metapneumovirus
agcagcagaaaugau

SEQ ID NO: 4008068 - RNA, 17 nt, Human metapneumovirus
agcagcuguucaaguug

SEQ ID NO: 4008069 - RNA, 21 nt, Human metapneumovirus
agcaggacccacagcagcaag

SEQ ID NO: 4008070 - RNA, 15 nt, Human metapneumovirus
agcaggugcugaaaa

SEQ ID NO: 4008071 - RNA, 14 nt, Human metapneumovirus
agcagugaagcaga

SEQ ID NO: 4008072 - RNA, 16 nt, Human metapneumovirus
agcagugcagagaaag

SEQ ID NO: 4008073 - RNA, 15 nt, Human metapneumovirus
agcucaacaaaauug

SEQ ID NO: 4008074 - RNA, 19 nt, Human metapneumovirus
aggaacacugauagagcug

SEQ ID NO: 4008075 - RNA, 17 nt, Human metapneumovirus
aggagcaccuccagagc

SEQ ID NO: 4008076 - RNA, 22 nt, Human metapneumovirus
aggagcaccuccagagcugagu

SEQ ID NO: 4008077 - RNA, 23 nt, Human metapneumovirus
aggcauuccuuacacagcagcug

SEQ ID NO: 4008078 - RNA, 20 nt, Human metapneumovirus
aggccagugucaagcagcuu

SEQ ID NO: 4008079 - RNA, 13 nt, Human metapneumovirus
aguaaaaaacaau

SEQ ID NO: 4008080 - RNA, 15 nt, Human metapneumovirus
agucaaaaacugaau

SEQ ID NO: 4008081 - RNA, 19 nt, Human metapneumovirus
agucaaugcgacuguagca

SEQ ID NO: 4008082 - RNA, 22 nt, Human metapneumovirus
agucagcuacuguugaagcugc

SEQ ID NO: 4008083 - RNA, 19 nt, Human metapneumovirus
aguccacacaaaaaacaac

SEQ ID NO: 4008084 - RNA, 20 nt, Human metapneumovirus
aguccuaccuaguagacacc

SEQ ID NO: 4008085 - RNA, 18 nt, Human metapneumovirus
agugaaguaacagcaauu

SEQ ID NO: 4008086 - RNA, 18 nt, Human metapneumovirus
agugaagucucauacuaa

SEQ ID NO: 4008087 - RNA, 19 nt, Human metapneumovirus
agugcacuaagagagcuca

SEQ ID NO: 4008088 - RNA, 21 nt, Human metapneumovirus
aguucguguguuggcaacugc

SEQ ID NO: 4008089 - RNA, 14 nt, Human metapneumovirus
aguuggaaaaagau

SEQ ID NO: 4008090 - RNA, 17 nt, Human metapneumovirus
auaaaaauaaacaaugg

SEQ ID NO: 4008091 - RNA, 14 nt, Human metapneumovirus
auaaaugacaauga

SEQ ID NO: 4008092 - RNA, 15 nt, Human metapneumovirus
auaaaugacaaugau

SEQ ID NO: 4008093 - RNA, 11 nt, Human metapneumovirus
auaaauuaaaa

SEQ ID NO: 4008094 - RNA, 15 nt, Human metapneumovirus
auaacaccagcaaua

SEQ ID NO: 4008095 - RNA, 18 nt, Human metapneumovirus
auauuagcuuuacuaaca

SEQ ID NO: 4008096 - RNA, 22 nt, Human metapneumovirus
aucaacuaacaccaaaaagaag

SEQ ID NO: 4008097 - RNA, 15 nt, Human metapneumovirus
aucaaucaaacagaa

SEQ ID NO: 4008098 - RNA, 19 nt, Human metapneumovirus
aucaauguugcugagcagu

SEQ ID NO: 4008099 - RNA, 18 nt, Human metapneumovirus
aucaugacuaugaacaau

SEQ ID NO: 4008100 - RNA, 14 nt, Human metapneumovirus
aucuacuacuaauu

SEQ ID NO: 4008101 - RNA, 16 nt, Human metapneumovirus
aucucaagagacugcc

SEQ ID NO: 4008102 - RNA, 16 nt, Human metapneumovirus
aucugcaggacaaaua

SEQ ID NO: 4008103 - RNA, 21 nt, Human metapneumovirus
augaagaagaagaugcagaau

SEQ ID NO: 4008104 - RNA, 16 nt, Human metapneumovirus
augcacaaauauaaca

SEQ ID NO: 4008105 - RNA, 18 nt, Human metapneumovirus
auggaucccauugaagaa

SEQ ID NO: 4008106 - RNA, 20 nt, Human metapneumovirus
auggaucuagaaaagaacac

SEQ ID NO: 4008107 - RNA, 14 nt, Human metapneumovirus
augggacaaguaaa

SEQ ID NO: 4008108 - RNA, 19 nt, Human metapneumovirus
auguugcacuugaccaagu

SEQ ID NO: 4008109 - RNA, 12 nt, Human metapneumovirus
auuaaaagugau

SEQ ID NO: 4008110 - RNA, 18 nt, Human metapneumovirus
auuaaacaaugaaaucac

SEQ ID NO: 4008111 - RNA, 18 nt, Human metapneumovirus
auuaaucaauaaaaacuu

SEQ ID NO: 4008112 - RNA, 17 nt, Human metapneumovirus
auuccuuacacagcagc

SEQ ID NO: 4008113 - RNA, 20 nt, Human metapneumovirus
auugaaaaucccagacaauc

SEQ ID NO: 4008114 - RNA, 17 nt, Human metapneumovirus
auugaugauaaccaaag

SEQ ID NO: 4008115 - RNA, 12 nt, Human metapneumovirus
auuguugaagau

SEQ ID NO: 4008116 - RNA, 17 nt, Human metapneumovirus
auuuacaccaaaugaac

SEQ ID NO: 4008117 - RNA, 13 nt, Human metapneumovirus
caaaaacaagugc

SEQ ID NO: 4008118 - RNA, 23 nt, Human metapneumovirus
caaaaugucauucccugaaggaa

SEQ ID NO: 4008119 - RNA, 19 nt, Human metapneumovirus
caaacuggaauuugacaaa

SEQ ID NO: 4008120 - RNA, 16 nt, Human metapneumovirus
caaaguuagcacagga

SEQ ID NO: 4008121 - RNA, 20 nt, Human metapneumovirus
caaauaaaaaugucuuggaa

SEQ ID NO: 4008122 - RNA, 12 nt, Human metapneumovirus
caacaacaaaag

SEQ ID NO: 4008123 - RNA, 14 nt, Human metapneumovirus
caacugaacaaagg

SEQ ID NO: 4008124 - RNA, 17 nt, Human metapneumovirus
caacuggcaagagagga

SEQ ID NO: 4008125 - RNA, 16 nt, Human metapneumovirus
caaguuagaacaagaa

SEQ ID NO: 4008126 - RNA, 18 nt, Human metapneumovirus
caaguuuucgagagcauu

SEQ ID NO: 4008127 - RNA, 13 nt, Human metapneumovirus
caaucaaacagaa

SEQ ID NO: 4008128 - RNA, 21 nt, Human metapneumovirus
caaucuuaaccuuugaagaaa

SEQ ID NO: 4008129 - RNA, 14 nt, Human metapneumovirus
caaugauaacauua

SEQ ID NO: 4008130 - RNA, 13 nt, Human metapneumovirus
caauuaacaaaau

SEQ ID NO: 4008131 - RNA, 13 nt, Human metapneumovirus
caauucaacagaa

SEQ ID NO: 4008132 - RNA, 15 nt, Human metapneumovirus
caauucaacagaagg

SEQ ID NO: 4008133 - RNA, 16 nt, Human metapneumovirus
cacaaaaaacaaccca

SEQ ID NO: 4008134 - RNA, 14 nt, Human metapneumovirus
cacaaauauaacaa

SEQ ID NO: 4008135 - RNA, 23 nt, Human metapneumovirus
cacaugcuggaaaauaaacagaa

SEQ ID NO: 4008136 - RNA, 17 nt, Human metapneumovirus
caccagcagugcugcuc

SEQ ID NO: 4008137 - RNA, 16 nt, Human metapneumovirus
caccuaucaaggcauu

SEQ ID NO: 4008138 - RNA, 14 nt, Human metapneumovirus
caccuccagagcug

SEQ ID NO: 4008139 - RNA, 21 nt, Human metapneumovirus
cacgugcaaucaacaaaaaca

SEQ ID NO: 4008140 - RNA, 13 nt, Human metapneumovirus
cagaaacaaacca

SEQ ID NO: 4008141 - RNA, 19 nt, Human metapneumovirus
cagaaaugauggaagagga

SEQ ID NO: 4008142 - RNA, 16 nt, Human metapneumovirus
cagacacagugacaau

SEQ ID NO: 4008143 - RNA, 20 nt, Human metapneumovirus
cagcccaaggugcagcaaug

SEQ ID NO: 4008144 - RNA, 15 nt, Human metapneumovirus
caggacccacagcag

SEQ ID NO: 4008145 - RNA, 14 nt, Human metapneumovirus
caguguucugagga

SEQ ID NO: 4008146 - RNA, 17 nt, Human metapneumovirus
cauaacaaaagcugcag

SEQ ID NO: 4008147 - RNA, 18 nt, Human metapneumovirus
cauauucaaaaagcuugg

SEQ ID NO: 4008148 - RNA, 14 nt, Human metapneumovirus
cauugaagaagaag

SEQ ID NO: 4008149 - RNA, 17 nt, Human metapneumovirus
ccaaagcauaacaaaag

SEQ ID NO: 4008150 - RNA, 16 nt, Human metapneumovirus
ccaacaucaacaccag

SEQ ID NO: 4008151 - RNA, 19 nt, Human metapneumovirus
ccaacaucugcaggacaaa

SEQ ID NO: 4008152 - RNA, 17 nt, Human metapneumovirus
ccaagacgcagacacag

SEQ ID NO: 4008153 - RNA, 13 nt, Human metapneumovirus
ccaccagcagugc

SEQ ID NO: 4008154 - RNA, 17 nt, Human metapneumovirus
ccagcagugcugcucga

SEQ ID NO: 4008155 - RNA, 16 nt, Human metapneumovirus
ccauggaauccagcag

SEQ ID NO: 4008156 - RNA, 23 nt, Human metapneumovirus
ccaugucuuuugcgacacagcag

SEQ ID NO: 4008157 - RNA, 11 nt, Human metapneumovirus
cccaauccuaa

SEQ ID NO: 4008158 - RNA, 21 nt, Human metapneumovirus
cccacaaacaucugcaagcac

SEQ ID NO: 4008159 - RNA, 11 nt, Human metapneumovirus
cccugcagaaa

SEQ ID NO: 4008160 - RNA, 17 nt, Human metapneumovirus
ccuaagcagugcagaga

SEQ ID NO: 4008161 - RNA, 16 nt, Human metapneumovirus
ccucaaaaagaccaau

SEQ ID NO: 4008162 - RNA, 13 nt, Human metapneumovirus
ccugcagaaaaga

SEQ ID NO: 4008163 - RNA, 14 nt, Human metapneumovirus
ccugcagaaaagaa

SEQ ID NO: 4008164 - RNA, 14 nt, Human metapneumovirus
ccuuggccaagagc

SEQ ID NO: 4008165 - RNA, 11 nt, Human metapneumovirus
cgugcaauggu

SEQ ID NO: 4008166 - RNA, 17 nt, Human metapneumovirus
cguguguuggcaacugc

SEQ ID NO: 4008167 - RNA, 14 nt, Human metapneumovirus
cuaagcagugcaga

SEQ ID NO: 4008168 - RNA, 17 nt, Human metapneumovirus
cuacauaauauaaucaa

SEQ ID NO: 4008169 - RNA, 22 nt, Human metapneumovirus
cuacauaauauaaucaaacaac

SEQ ID NO: 4008170 - RNA, 17 nt, Human metapneumovirus
cuagagauaacaaacua

SEQ ID NO: 4008171 - RNA, 19 nt, Human metapneumovirus
cuaggagcauauguccagg

SEQ ID NO: 4008172 - RNA, 20 nt, Human metapneumovirus
cuaucaguagaccugcaaaa

SEQ ID NO: 4008173 - RNA, 21 nt, Human metapneumovirus
cuaugaacaaucccaaaggca

SEQ ID NO: 4008174 - RNA, 14 nt, Human metapneumovirus
cucaaaaagaccaa

SEQ ID NO: 4008175 - RNA, 19 nt, Human metapneumovirus
cucaguguucugaggacag

SEQ ID NO: 4008176 - RNA, 19 nt, Human metapneumovirus
cucgguguugcaacugcag

SEQ ID NO: 4008177 - RNA, 22 nt, Human metapneumovirus
cucucagauaaugaagaagaag

SEQ ID NO: 4008178 - RNA, 13 nt, Human metapneumovirus
cugaaaaaaccaa

SEQ ID NO: 4008179 - RNA, 13 nt, Human metapneumovirus
cugaccaaaagug

SEQ ID NO: 4008180 - RNA, 22 nt, Human metapneumovirus
cugaucaauuaacaaaauuaaa

SEQ ID NO: 4008181 - RNA, 21 nt, Human metapneumovirus
cugcaucuuuaaucaacaauc

SEQ ID NO: 4008182 - RNA, 17 nt, Human metapneumovirus
cuggaaaauaaacagaa

SEQ ID NO: 4008183 - RNA, 14 nt, Human metapneumovirus
cugggacucaaguc

SEQ ID NO: 4008184 - RNA, 21 nt, Human metapneumovirus
cugugaaacaagaggagacca

SEQ ID NO: 4008185 - RNA, 21 nt, Human metapneumovirus
cuguugaagcugcuauaagca

SEQ ID NO: 4008186 - RNA, 18 nt, Human metapneumovirus
cuuaauaaaaacagaauu

SEQ ID NO: 4008187 - RNA, 16 nt, Human metapneumovirus
cuuacacagcagcugu

SEQ ID NO: 4008188 - RNA, 20 nt, Human metapneumovirus
cuuacacagcagcuguucaa

SEQ ID NO: 4008189 - RNA, 14 nt, Human metapneumovirus
cuugaaguccagau

SEQ ID NO: 4008190 - RNA, 15 nt, Human metapneumovirus
cuuugggguuauaga

SEQ ID NO: 4008191 - RNA, 15 nt, Human metapneumovirus
cuuuguuucaggcca

SEQ ID NO: 4008192 - RNA, 21 nt, Human metapneumovirus
cuuuugcgacacagcagcagg

SEQ ID NO: 4008193 - RNA, 16 nt, Human metapneumovirus
gaaagugaaguaacag

SEQ ID NO: 4008194 - RNA, 16 nt, Human metapneumovirus
gaagaagaugcagaau

SEQ ID NO: 4008195 - RNA, 20 nt, Human metapneumovirus
gaagcuuuccagaaaucauu

SEQ ID NO: 4008196 - RNA, 20 nt, Human metapneumovirus
gaaggccagugucaagcagc

SEQ ID NO: 4008197 - RNA, 16 nt, Human metapneumovirus
gaauaacaccagcaau

SEQ ID NO: 4008198 - RNA, 17 nt, Human metapneumovirus
gaauaacaccagcaaua

SEQ ID NO: 4008199 - RNA, 15 nt, Human metapneumovirus
gaauccgaagaagaa

SEQ ID NO: 4008200 - RNA, 19 nt, Human metapneumovirus
gacacaaaaaccaacaauu

SEQ ID NO: 4008201 - RNA, 22 nt, Human metapneumovirus
gacagugaaagcacuaaucaag

SEQ ID NO: 4008202 - RNA, 16 nt, Human metapneumovirus
gacauaauaaaggaag

SEQ ID NO: 4008203 - RNA, 14 nt, Human metapneumovirus
gagaccaugucuuu

SEQ ID NO: 4008204 - RNA, 13 nt, Human metapneumovirus
gagagaaacugaa

SEQ ID NO: 4008205 - RNA, 17 nt, Human metapneumovirus
gagcaccuccagagcug

SEQ ID NO: 4008206 - RNA, 17 nt, Human metapneumovirus
gagcauauguccaggcu

SEQ ID NO: 4008207 - RNA, 14 nt, Human metapneumovirus
gagcucagaacagu

SEQ ID NO: 4008208 - RNA, 21 nt, Human metapneumovirus
gauacuuauuaauaagaucaa

SEQ ID NO: 4008209 - RNA, 15 nt, Human metapneumovirus
gauauggacucacaa

SEQ ID NO: 4008210 - RNA, 17 nt, Human metapneumovirus
gaucaauuaacaaaauu

SEQ ID NO: 4008211 - RNA, 17 nt, Human metapneumovirus
gauggcccaaaauuaaa

SEQ ID NO: 4008212 - RNA, 23 nt, Human metapneumovirus
gcaacugcagcugcaguuacagc

SEQ ID NO: 4008213 - RNA, 23 nt, Human metapneumovirus
gcaagaaucuaacacgugcaauc

SEQ ID NO: 4008214 - RNA, 22 nt, Human metapneumovirus
gccaacacaccaccagcagugc

SEQ ID NO: 4008215 - RNA, 13 nt, Human metapneumovirus
gccagagcuguuu

SEQ ID NO: 4008216 - RNA, 20 nt, Human metapneumovirus
ggaagcuaaagggaaagcag

SEQ ID NO: 4008217 - RNA, 16 nt, Human metapneumovirus
ggaauaacaccagcaa

SEQ ID NO: 4008218 - RNA, 18 nt, Human metapneumovirus
ggagaauccgaagaagaa

SEQ ID NO: 4008219 - RNA, 17 nt, Human metapneumovirus
ggaucccauugaagaag

SEQ ID NO: 4008220 - RNA, 16 nt, Human metapneumovirus
ggcaacugcagugaga

SEQ ID NO: 4008221 - RNA, 18 nt, Human metapneumovirus
ggcauuccuuacacagca

SEQ ID NO: 4008222 - RNA, 16 nt, Human metapneumovirus
gggcuauuaagaacac

SEQ ID NO: 4008223 - RNA, 13 nt, Human metapneumovirus
ggguaaugaagca

SEQ ID NO: 4008224 - RNA, 23 nt, Human metapneumovirus
gguaucaaaauuugugagcucag

SEQ ID NO: 4008225 - RNA, 12 nt, Human metapneumovirus
ggugcagcaaug

SEQ ID NO: 4008226 - RNA, 10 nt, Human metapneumovirus
guaaauuaaa

SEQ ID NO: 4008227 - RNA, 13 nt, Human metapneumovirus
gucaaaaacugaa

SEQ ID NO: 4008228 - RNA, 21 nt, Human metapneumovirus
gucaaguuuccugaagaucaa

SEQ ID NO: 4008229 - RNA, 15 nt, Human metapneumovirus
gucccugaaaaaacc

SEQ ID NO: 4008230 - RNA, 16 nt, Human metapneumovirus
gucuuaaagagagcua

SEQ ID NO: 4008231 - RNA, 15 nt, Human metapneumovirus
gugggacaagucaaa

SEQ ID NO: 4008232 - RNA, 19 nt, Human metapneumovirus
guguuggcaacugcaguga

SEQ ID NO: 4008233 - RNA, 11 nt, Human metapneumovirus
guuagcacagg

SEQ ID NO: 4008234 - RNA, 15 nt, Human metapneumovirus
guuagcacaggaaga

SEQ ID NO: 4008235 - RNA, 12 nt, Human metapneumovirus
guuauagacacg

SEQ ID NO: 4008236 - RNA, 19 nt, Human metapneumovirus
guugaaggcgaacagcaug

SEQ ID NO: 4008237 - RNA, 17 nt, Human metapneumovirus
guugcaacugcagcugc

SEQ ID NO: 4008238 - RNA, 13 nt, Human metapneumovirus
guuggcaacugca

SEQ ID NO: 4008239 - RNA, 16 nt, Human metapneumovirus
uaaaaauaaaaauuug

SEQ ID NO: 4008240 - RNA, 19 nt, Human metapneumovirus
uaaagggaaagcagcagaa

SEQ ID NO: 4008241 - RNA, 15 nt, Human metapneumovirus
uaaaguaaauuaaaa

SEQ ID NO: 4008242 - RNA, 17 nt, Human metapneumovirus
uaacaaccaugaaacca

SEQ ID NO: 4008243 - RNA, 13 nt, Human metapneumovirus
uaagaaaaccagg

SEQ ID NO: 4008244 - RNA, 13 nt, Human metapneumovirus
uaagcagugcaga

SEQ ID NO: 4008245 - RNA, 21 nt, Human metapneumovirus
uagaaugccauuguauauaca

SEQ ID NO: 4008246 - RNA, 16 nt, Human metapneumovirus
uagaggagaaauuaag

SEQ ID NO: 4008247 - RNA, 13 nt, Human metapneumovirus
uaguuaauuaaaa

SEQ ID NO: 4008248 - RNA, 21 nt, Human metapneumovirus
uaucaaggcauuccuuacaca

SEQ ID NO: 4008249 - RNA, 17 nt, Human metapneumovirus
uaucugacagcaaacau

SEQ ID NO: 4008250 - RNA, 23 nt, Human metapneumovirus
ucaaaggagugcaacauaaacau

SEQ ID NO: 4008251 - RNA, 21 nt, Human metapneumovirus
ucaagagacugccgagagaga

SEQ ID NO: 4008252 - RNA, 22 nt, Human metapneumovirus
ucaaucuuaaccuuugaagaaa

SEQ ID NO: 4008253 - RNA, 18 nt, Human metapneumovirus
ucagacaacgcuggaaua

SEQ ID NO: 4008254 - RNA, 17 nt, Human metapneumovirus
ucaggccaacacaccac

SEQ ID NO: 4008255 - RNA, 18 nt, Human metapneumovirus
ucauaauaaagaaaacaa

SEQ ID NO: 4008256 - RNA, 16 nt, Human metapneumovirus
ucaucaagcaacugaa

SEQ ID NO: 4008257 - RNA, 16 nt, Human metapneumovirus
uccagauaacaaccaa

SEQ ID NO: 4008258 - RNA, 22 nt, Human metapneumovirus
uccccaaaaaggcaacaacacc

SEQ ID NO: 4008259 - RNA, 15 nt, Human metapneumovirus
uccuuacacagcagc

SEQ ID NO: 4008260 - RNA, 22 nt, Human metapneumovirus
ucuacauaauauaaucaaacaa

SEQ ID NO: 4008261 - RNA, 15 nt, Human metapneumovirus
ucucagauaaugaag

SEQ ID NO: 4008262 - RNA, 15 nt, Human metapneumovirus
ugaaaaagacuguga

SEQ ID NO: 4008263 - RNA, 15 nt, Human metapneumovirus
ugaagcagaccaagc

SEQ ID NO: 4008264 - RNA, 11 nt, Human metapneumovirus
ugaagcagcaa

SEQ ID NO: 4008265 - RNA, 18 nt, Human metapneumovirus
ugaauauagcaaacugga

SEQ ID NO: 4008266 - RNA, 21 nt, Human metapneumovirus
ugacaaacucacagucuguga

SEQ ID NO: 4008267 - RNA, 13 nt, Human metapneumovirus
ugacagaugcuga

SEQ ID NO: 4008268 - RNA, 16 nt, Human metapneumovirus
ugaccaaaagugcacu

SEQ ID NO: 4008269 - RNA, 20 nt, Human metapneumovirus
ugaccaaguuuucgagagca

SEQ ID NO: 4008270 - RNA, 14 nt, Human metapneumovirus
ugacuaugaacaau

SEQ ID NO: 4008271 - RNA, 18 nt, Human metapneumovirus
ugagcucagccaaaucag

SEQ ID NO: 4008272 - RNA, 20 nt, Human metapneumovirus
ugauggaagaggaaaugagu

SEQ ID NO: 4008273 - RNA, 17 nt, Human metapneumovirus
ugaugggauagugaagu

SEQ ID NO: 4008274 - RNA, 20 nt, Human metapneumovirus
ugaugggucuucaaaaacau

SEQ ID NO: 4008275 - RNA, 15 nt, Human metapneumovirus
ugcaaaaaaacacau

SEQ ID NO: 4008276 - RNA, 15 nt, Human metapneumovirus
ugcaagacuuggagc

SEQ ID NO: 4008277 - RNA, 13 nt, Human metapneumovirus
ugcaaucaacaaa

SEQ ID NO: 4008278 - RNA, 19 nt, Human metapneumovirus
ugcacaaauauaacaacau

SEQ ID NO: 4008279 - RNA, 22 nt, Human metapneumovirus
ugcagaaacaaaccaaaaccag

SEQ ID NO: 4008280 - RNA, 23 nt, Human metapneumovirus
ugcagagaaaggaaacacuggcu

SEQ ID NO: 4008281 - RNA, 14 nt, Human metapneumovirus
ugccaacaucugca

SEQ ID NO: 4008282 - RNA, 15 nt, Human metapneumovirus
ugcgacacagcagca

SEQ ID NO: 4008283 - RNA, 17 nt, Human metapneumovirus
ugcuggaaaauaaacag

SEQ ID NO: 4008284 - RNA, 18 nt, Human metapneumovirus
uggaucccauugaagaag

SEQ ID NO: 4008285 - RNA, 22 nt, Human metapneumovirus
uggcaacugcagugagagagcu

SEQ ID NO: 4008286 - RNA, 13 nt, Human metapneumovirus
uggcaagagagga

SEQ ID NO: 4008287 - RNA, 14 nt, Human metapneumovirus
uggggcaaccaaaa

SEQ ID NO: 4008288 - RNA, 12 nt, Human metapneumovirus
uguagagaaccu

SEQ ID NO: 4008289 - RNA, 19 nt, Human metapneumovirus
uguuuacuacccaaaugaa

SEQ ID NO: 4008290 - RNA, 18 nt, Human metapneumovirus
uuaaaaaguaaaaaacaa

SEQ ID NO: 4008291 - RNA, 13 nt, Human metapneumovirus
uuaagaaaaccag

SEQ ID NO: 4008292 - RNA, 14 nt, Human metapneumovirus
uucaucaaaucagu

SEQ ID NO: 4008293 - RNA, 18 nt, Human metapneumovirus
uugagaacagucaggccu

SEQ ID NO: 4008294 - RNA, 13 nt, Human metapneumovirus
uuggcaacugcag

SEQ ID NO: 4008295 - RNA, 19 nt, Human metapneumovirus
uugugagcucagccaaauc

SEQ ID NO: 4008296 - RNA, 21 nt, Human metapneumovirus
uuucugcugaucaacuggcaa

SEQ ID NO: 4008297 - RNA, 23 nt, Human metapneumovirus
uuuucauggguaaugaagcagca

SEQ ID NO: 4008298 - RNA, 13 nt, Human metapneumovirus
aaaaacagaauua

SEQ ID NO: 4008299 - RNA, 21 nt, Human metapneumovirus
aaaaaucaaguuagaacaaga

SEQ ID NO: 4008300 - RNA, 22 nt, Human metapneumovirus
aaaacaaucugcaaauaugcca

SEQ ID NO: 4008301 - RNA, 14 nt, Human metapneumovirus
aaaaccaacaauug

SEQ ID NO: 4008302 - RNA, 14 nt, Human metapneumovirus
aaaagaaacugaaa

SEQ ID NO: 4008303 - RNA, 19 nt, Human metapneumovirus
aaaauuugggacaaaucau

SEQ ID NO: 4008304 - RNA, 21 nt, Human metapneumovirus
uggccguuagcuucagucaau

SEQ ID NO: 4008305 - RNA, 21 nt, Human metapneumovirus
ugggacaaguaaaaauggagu

SEQ ID NO: 4008306 - RNA, 20 nt, Human metapneumovirus
uguccuagguuccaccaaug

SEQ ID NO: 4008307 - RNA, 21 nt, Human metapneumovirus
ugugagcucagccaaaucagu

SEQ ID NO: 4008308 - RNA, 16 nt, Human metapneumovirus
uguuggcaacugcagu

SEQ ID NO: 4008309 - RNA, 15 nt, Human metapneumovirus
uguuuuaaaucugaa

SEQ ID NO: 4008310 - RNA, 18 nt, Human metapneumovirus
uguuuuaaaucugaagac

SEQ ID NO: 4008311 - RNA, 21 nt, Human metapneumovirus
uuagagaaugcugcugaauua

SEQ ID NO: 4008312 - RNA, 18 nt, Human metapneumovirus
uuagggcuauuaagaaca

SEQ ID NO: 4008313 - RNA, 13 nt, Human metapneumovirus
uugcaacugcagc

SEQ ID NO: 4008314 - RNA, 12 nt, Human metapneumovirus
uuggcaacugca

SEQ ID NO: 4008315 - RNA, 14 nt, Human metapneumovirus
uugucaaaaugcag

SEQ ID NO: 4008316 - RNA, 16 nt, Human metapneumovirus
uuuacaccaaaugaac

SEQ ID NO: 4008317 - RNA, 13 nt, Human metapneumovirus
uaaugaagcagca

SEQ ID NO: 4008318 - RNA, 20 nt, Human metapneumovirus
uacacuggagguaggcgaug

SEQ ID NO: 4008319 - RNA, 22 nt, Human metapneumovirus
uacagcaggacccacagcagca

SEQ ID NO: 4008320 - RNA, 16 nt, Human metapneumovirus
uaccagcuaagcaaag

SEQ ID NO: 4008321 - RNA, 15 nt, Human metapneumovirus
uaccguguuagaaaa

SEQ ID NO: 4008322 - RNA, 17 nt, Human metapneumovirus
uacucaaagugaaugca

SEQ ID NO: 4008323 - RNA, 17 nt, Human metapneumovirus
uagaccugcaaaaccaa

SEQ ID NO: 4008324 - RNA, 19 nt, Human metapneumovirus
uagcacuauaacugaagga

SEQ ID NO: 4008325 - RNA, 19 nt, Human metapneumovirus
uagcacucucaaauuaaau

SEQ ID NO: 4008326 - RNA, 20 nt, Human metapneumovirus
uaggaguuuacggaagcucc

SEQ ID NO: 4008327 - RNA, 15 nt, Human metapneumovirus
uauaacaacauacaa

SEQ ID NO: 4008328 - RNA, 16 nt, Human metapneumovirus
uauaagcagugaagca

SEQ ID NO: 4008329 - RNA, 17 nt, Human metapneumovirus
uauaagcagugaagcag

SEQ ID NO: 4008330 - RNA, 11 nt, Human metapneumovirus
uaucaggagca

SEQ ID NO: 4008331 - RNA, 16 nt, Human metapneumovirus
ucaaaaaaauaauuaa

SEQ ID NO: 4008332 - RNA, 16 nt, Human metapneumovirus
ucaaaggagugcaaca

SEQ ID NO: 4008333 - RNA, 17 nt, Human metapneumovirus
ucaaagguauacaaacu

SEQ ID NO: 4008334 - RNA, 14 nt, Human metapneumovirus
ucaaaucaguuuca

SEQ ID NO: 4008335 - RNA, 21 nt, Human metapneumovirus
ucaacacggucuuaaagagag

SEQ ID NO: 4008336 - RNA, 23 nt, Human metapneumovirus
ucaacacggucuuaaagagagcu

SEQ ID NO: 4008337 - RNA, 18 nt, Human metapneumovirus
ucaagaacgggacaaaua

SEQ ID NO: 4008338 - RNA, 14 nt, Human metapneumovirus
ucaaucaaagagag

SEQ ID NO: 4008339 - RNA, 21 nt, Human metapneumovirus
ucaaucuuaaccuuugaagaa

SEQ ID NO: 4008340 - RNA, 16 nt, Human metapneumovirus
ucagauaaugaagaag

SEQ ID NO: 4008341 - RNA, 16 nt, Human metapneumovirus
ucaucaaauaccacau

SEQ ID NO: 4008342 - RNA, 16 nt, Human metapneumovirus
ucaugacuaugaacaa

SEQ ID NO: 4008343 - RNA, 16 nt, Human metapneumovirus
ucauuaagaaaaccag

SEQ ID NO: 4008344 - RNA, 20 nt, Human metapneumovirus
uccagaaaucauuaagaaaa

SEQ ID NO: 4008345 - RNA, 22 nt, Human metapneumovirus
ucccaaaaaauuugaagucaau

SEQ ID NO: 4008346 - RNA, 13 nt, Human metapneumovirus
uccuaagcagugc

SEQ ID NO: 4008347 - RNA, 19 nt, Human metapneumovirus
ucgacacacacacaacacc

SEQ ID NO: 4008348 - RNA, 17 nt, Human metapneumovirus
ucgguguugcaacugca

SEQ ID NO: 4008349 - RNA, 23 nt, Human metapneumovirus
ucuucaaaaacauguacucaccu

SEQ ID NO: 4008350 - RNA, 16 nt, Human metapneumovirus
ugaacaaaggcugcuc

SEQ ID NO: 4008351 - RNA, 17 nt, Human metapneumovirus
ugaacuagccagagcug

SEQ ID NO: 4008352 - RNA, 18 nt, Human metapneumovirus
ugaagacacaaaaaccaa

SEQ ID NO: 4008353 - RNA, 22 nt, Human metapneumovirus
ugagcagucaaaggagugcaac

SEQ ID NO: 4008354 - RNA, 21 nt, Human metapneumovirus
ugagcuguuccauuggcagca

SEQ ID NO: 4008355 - RNA, 15 nt, Human metapneumovirus
ugcacuaagagagcu

SEQ ID NO: 4008356 - RNA, 15 nt, Human metapneumovirus
ugcuauaagcaguga

SEQ ID NO: 4008357 - RNA, 16 nt, Human metapneumovirus
uggaaaauaaacagaa

SEQ ID NO: 4008358 - RNA, 21 nt, Human metapneumovirus
uggaauuugacaaacucacag

SEQ ID NO: 4008359 - RNA, 18 nt, Human metapneumovirus
uggaucaaucaaacagaa

SEQ ID NO: 4008360 - RNA, 23 nt, Human metapneumovirus
ugggaaaaccccugcagaaaaga

SEQ ID NO: 4008361 - RNA, 15 nt, Human metapneumovirus
ugguauugucaaaau

SEQ ID NO: 4008362 - RNA, 15 nt, Human metapneumovirus
uguagacaacaacaa

SEQ ID NO: 4008363 - RNA, 14 nt, Human metapneumovirus
ugucacaaacaaug

SEQ ID NO: 4008364 - RNA, 13 nt, Human metapneumovirus
uguuggagaaccg

SEQ ID NO: 4008365 - RNA, 21 nt, Human metapneumovirus
uuaaaaauauuuugaaaacaa

SEQ ID NO: 4008366 - RNA, 12 nt, Human metapneumovirus
uuaaucaacaau

SEQ ID NO: 4008367 - RNA, 19 nt, Human metapneumovirus
uuacauggugcaacugcca

SEQ ID NO: 4008368 - RNA, 21 nt, Human metapneumovirus
uuaugaucaugacuaugaaca

SEQ ID NO: 4008369 - RNA, 19 nt, Human metapneumovirus
uucauggguaaugaagcag

SEQ ID NO: 4008370 - RNA, 15 nt, Human metapneumovirus
uucccugaaggaaaa

SEQ ID NO: 4008371 - RNA, 22 nt, Human metapneumovirus
uucuaguuauauaaaaaucaag

SEQ ID NO: 4008372 - RNA, 14 nt, Human metapneumovirus
uuggcaacugcagu

SEQ ID NO: 4008373 - RNA, 17 nt, Human metapneumovirus
uuucaggccaacacacc

SEQ ID NO: 4008374 - RNA, 15 nt, Human metapneumovirus
aagcaagcaaucaaa

SEQ ID NO: 4008375 - RNA, 22 nt, Human metapneumovirus
aagcacaaguggagaauccgaa

SEQ ID NO: 4008376 - RNA, 13 nt, Human metapneumovirus
aagcagcaaaauu

SEQ ID NO: 4008377 - RNA, 23 nt, Human metapneumovirus
aagcagcuuugacccagucaagu

SEQ ID NO: 4008378 - RNA, 16 nt, Human metapneumovirus
aagcgcaagcagaaca

SEQ ID NO: 4008379 - RNA, 16 nt, Human metapneumovirus
aagcuuggagcuggga

SEQ ID NO: 4008380 - RNA, 13 nt, Human metapneumovirus
aaggaagcuaaag

SEQ ID NO: 4008381 - RNA, 20 nt, Human metapneumovirus
aagggaaagcagcagaaaug

SEQ ID NO: 4008382 - RNA, 22 nt, Human metapneumovirus
aagguuucauuuacaccaaaug

SEQ ID NO: 4008383 - RNA, 17 nt, Human metapneumovirus
aaguaacagcaauuaag

SEQ ID NO: 4008384 - RNA, 12 nt, Human metapneumovirus
aagugcagugag

SEQ ID NO: 4008385 - RNA, 20 nt, Human metapneumovirus
aagugggacaagucaaaaug

SEQ ID NO: 4008386 - RNA, 19 nt, Human metapneumovirus
aauacuguaucagaaacau

SEQ ID NO: 4008387 - RNA, 17 nt, Human metapneumovirus
aauaucuuuggacuuaa

SEQ ID NO: 4008388 - RNA, 15 nt, Human metapneumovirus
aaucaacaaucucaa

SEQ ID NO: 4008389 - RNA, 15 nt, Human metapneumovirus
aaucaauaaaaacuu

SEQ ID NO: 4008390 - RNA, 13 nt, Human metapneumovirus
aaucugcaaauau

SEQ ID NO: 4008391 - RNA, 22 nt, Human metapneumovirus
aaugaagaagaagaugcagaau

SEQ ID NO: 4008392 - RNA, 17 nt, Human metapneumovirus
aaugcccucaaaaagac

SEQ ID NO: 4008393 - RNA, 18 nt, Human metapneumovirus
aauuaaaaacuuaaaagu

SEQ ID NO: 4008394 - RNA, 17 nt, Human metapneumovirus
aauuagaccugaccaaa

SEQ ID NO: 4008395 - RNA, 17 nt, Human metapneumovirus
aauuaguuaauuaaaaa

SEQ ID NO: 4008396 - RNA, 17 nt, Human metapneumovirus
aauuguuauuuagaaaa

SEQ ID NO: 4008397 - RNA, 17 nt, Human metapneumovirus
aauuugggacaaaucau

SEQ ID NO: 4008398 - RNA, 14 nt, Human metapneumovirus
acaaauaaaaaugu

SEQ ID NO: 4008399 - RNA, 22 nt, Human metapneumovirus
acaagucaaaaugucauucccu

SEQ ID NO: 4008400 - RNA, 16 nt, Human metapneumovirus
acaaugauaacauuag

SEQ ID NO: 4008401 - RNA, 23 nt, Human metapneumovirus
acaauggcuucauaccacauaau

SEQ ID NO: 4008402 - RNA, 13 nt, Human metapneumovirus
acacaaaaaccaa

SEQ ID NO: 4008403 - RNA, 14 nt, Human metapneumovirus
acacaguuaaaugg

SEQ ID NO: 4008404 - RNA, 14 nt, Human metapneumovirus
acaccaccagcagu

SEQ ID NO: 4008405 - RNA, 15 nt, Human metapneumovirus
acaccaccagcagug

SEQ ID NO: 4008406 - RNA, 12 nt, Human metapneumovirus
acaccagcaaua

SEQ ID NO: 4008407 - RNA, 18 nt, Human metapneumovirus
acacggucuuaaagagag

SEQ ID NO: 4008408 - RNA, 19 nt, Human metapneumovirus
acagaagguuccuaaaugu

SEQ ID NO: 4008409 - RNA, 20 nt, Human metapneumovirus
acagcauguuauaaaaggaa

SEQ ID NO: 4008410 - RNA, 23 nt, Human metapneumovirus
acagucugugaaguaaaaacagu

SEQ ID NO: 4008411 - RNA, 22 nt, Human metapneumovirus
acaucagagugggauaaaugac

SEQ ID NO: 4008412 - RNA, 20 nt, Human metapneumovirus
accaaaacugaaauaaagca

SEQ ID NO: 4008413 - RNA, 19 nt, Human metapneumovirus
accaagcucuaacacaggc

SEQ ID NO: 4008414 - RNA, 16 nt, Human metapneumovirus
accagcagugcugcuc

SEQ ID NO: 4008415 - RNA, 13 nt, Human metapneumovirus
acccacaggagca

SEQ ID NO: 4008416 - RNA, 20 nt, Human metapneumovirus
acccaugcaaaguuagcaca

SEQ ID NO: 4008417 - RNA, 19 nt, Human metapneumovirus
accccugcagaaaagaaac

SEQ ID NO: 4008418 - RNA, 19 nt, Human metapneumovirus
acggucuuaaagagagcua

SEQ ID NO: 4008419 - RNA, 17 nt, Human metapneumovirus
acucgaugaauauagca

SEQ ID NO: 4008420 - RNA, 14 nt, Human metapneumovirus
acugccaaucuuug

SEQ ID NO: 4008421 - RNA, 21 nt, Human metapneumovirus
acuggcaagagaggagcaaau

SEQ ID NO: 4008422 - RNA, 18 nt, Human metapneumovirus
acugugaaacaagaggag

SEQ ID NO: 4008423 - RNA, 12 nt, Human metapneumovirus
agaaaaagcaaa

SEQ ID NO: 4008424 - RNA, 16 nt, Human metapneumovirus
agaagaaccaaaagac

SEQ ID NO: 4008425 - RNA, 15 nt, Human metapneumovirus
agaagauaggacaca

SEQ ID NO: 4008426 - RNA, 16 nt, Human metapneumovirus
agaauccuaagcagug

SEQ ID NO: 4008427 - RNA, 22 nt, Human metapneumovirus
agaaugccauuguauauacaca

SEQ ID NO: 4008428 - RNA, 23 nt, Human metapneumovirus
agacaacgcuggaauaacaccag

SEQ ID NO: 4008429 - RNA, 22 nt, Human metapneumovirus
agacagugaaagcacuaaucaa

SEQ ID NO: 4008430 - RNA, 20 nt, Human metapneumovirus
agaccuuaccuaaaaaauga

SEQ ID NO: 4008431 - RNA, 15 nt, Human metapneumovirus
agacugugaaacaag

SEQ ID NO: 4008432 - RNA, 19 nt, Human metapneumovirus
agacugugaaacaagagga

SEQ ID NO: 4008433 - RNA, 15 nt, Human metapneumovirus
agagaagauaggaca

SEQ ID NO: 4008434 - RNA, 20 nt, Human metapneumovirus
agagaggagcaaauugaaaa

SEQ ID NO: 4008435 - RNA, 22 nt, Human metapneumovirus
agagauacuucaucauuaagca

SEQ ID NO: 4008436 - RNA, 13 nt, Human metapneumovirus
agauaacaaacua

SEQ ID NO: 4008437 - RNA, 14 nt, Human metapneumovirus
agaucauaaaguca

SEQ ID NO: 4008438 - RNA, 18 nt, Human metapneumovirus
agcagacauaauaaagga

SEQ ID NO: 4008439 - RNA, 20 nt, Human metapneumovirus
agcagcaggaaucaauguug

SEQ ID NO: 4008440 - RNA, 15 nt, Human metapneumovirus
agcaggaaucaaugu

SEQ ID NO: 4008441 - RNA, 17 nt, Human metapneumovirus
agcagucaaaggagugc

SEQ ID NO: 4008442 - RNA, 15 nt, Human metapneumovirus
agcauaagcaaaaua

SEQ ID NO: 4008443 - RNA, 19 nt, Human metapneumovirus
agcccaaggugcagcaaug

SEQ ID NO: 4008444 - RNA, 16 nt, Human metapneumovirus
agcucagccaaaucag

SEQ ID NO: 4008445 - RNA, 20 nt, Human metapneumovirus
aggaacacugauagagcuga

SEQ ID NO: 4008446 - RNA, 22 nt, Human metapneumovirus
aggacagguugguacaccaaug

SEQ ID NO: 4008447 - RNA, 18 nt, Human metapneumovirus
aggacccacagcagcaag

SEQ ID NO: 4008448 - RNA, 18 nt, Human metapneumovirus
aggaccuguuaccugcaa

SEQ ID NO: 4008449 - RNA, 19 nt, Human metapneumovirus
agggacaagauaugucuug

SEQ ID NO: 4008450 - RNA, 13 nt, Human metapneumovirus
aguaacagcaauu

SEQ ID NO: 4008451 - RNA, 18 nt, Human metapneumovirus
aguacuagauuuagaaau

SEQ ID NO: 4008452 - RNA, 14 nt, Human metapneumovirus
agucagcuacuguu

SEQ ID NO: 4008453 - RNA, 23 nt, Human metapneumovirus
agucauggaucccauugaagaag

SEQ ID NO: 4008454 - RNA, 22 nt, Human metapneumovirus
agugcugcucgaucagcuaaaa

SEQ ID NO: 4008455 - RNA, 22 nt, Human metapneumovirus
aguggagaauccgaagaagaag

SEQ ID NO: 4008456 - RNA, 15 nt, Human metapneumovirus
aguggugaucauuuu

SEQ ID NO: 4008457 - RNA, 13 nt, Human metapneumovirus
aguuauuuaaaaa

SEQ ID NO: 4008458 - RNA, 15 nt, Human metapneumovirus
aguuuccugaagauc

SEQ ID NO: 4008459 - RNA, 12 nt, Human metapneumovirus
auaaaaacagaa

SEQ ID NO: 4008460 - RNA, 20 nt, Human metapneumovirus
auagcagacauaauaaagga

SEQ ID NO: 4008461 - RNA, 23 nt, Human metapneumovirus
aucaacuggcaagagaggagcaa

SEQ ID NO: 4008462 - RNA, 15 nt, Human metapneumovirus
aucaagcaacugaac

SEQ ID NO: 4008463 - RNA, 16 nt, Human metapneumovirus
aucaagugcagugagc

SEQ ID NO: 4008464 - RNA, 13 nt, Human metapneumovirus
aucacaaaauggu

SEQ ID NO: 4008465 - RNA, 13 nt, Human metapneumovirus
aucagacaaaaag

SEQ ID NO: 4008466 - RNA, 22 nt, Human metapneumovirus
aucagcaggugcugaaaaugac

SEQ ID NO: 4008467 - RNA, 20 nt, Human metapneumovirus
aucaguuggcaaaaaaacac

SEQ ID NO: 4008468 - RNA, 17 nt, Human metapneumovirus
aucuaauagaaaaggac

SEQ ID NO: 4008469 - RNA, 23 nt, Human metapneumovirus
aucuagaaaagaacacaccuguu

SEQ ID NO: 4008470 - RNA, 18 nt, Human metapneumovirus
augcugcaucacaaaaug

SEQ ID NO: 4008471 - RNA, 16 nt, Human metapneumovirus
auggaucuagaaaaga

SEQ ID NO: 4008472 - RNA, 21 nt, Human metapneumovirus
augguaguguaaaauuaacag

SEQ ID NO: 4008473 - RNA, 14 nt, Human metapneumovirus
auuaagaaaaccag

SEQ ID NO: 4008474 - RNA, 15 nt, Human metapneumovirus
caaaaaauuugaagu

SEQ ID NO: 4008475 - RNA, 20 nt, Human metapneumovirus
caaaaugcagggucaacugu

SEQ ID NO: 4008476 - RNA, 20 nt, Human metapneumovirus
caaaaugucauucccugaag

SEQ ID NO: 4008477 - RNA, 14 nt, Human metapneumovirus
caaaccaaaaccag

SEQ ID NO: 4008478 - RNA, 21 nt, Human metapneumovirus
caaacuaucugacagcaaaca

SEQ ID NO: 4008479 - RNA, 17 nt, Human metapneumovirus
caaaugcaauagaggaa

SEQ ID NO: 4008480 - RNA, 18 nt, Human metapneumovirus
caacaaaauuguugaaga

SEQ ID NO: 4008481 - RNA, 21 nt, Human metapneumovirus
caacaauugugauaaacugac

SEQ ID NO: 4008482 - RNA, 17 nt, Human metapneumovirus
caacgguccccacagac

SEQ ID NO: 4008483 - RNA, 13 nt, Human metapneumovirus
caacugcagcugc

SEQ ID NO: 4008484 - RNA, 12 nt, Human metapneumovirus
caacugcaguga

SEQ ID NO: 4008485 - RNA, 14 nt, Human metapneumovirus
caagaaaaaaacug

SEQ ID NO: 4008486 - RNA, 22 nt, Human metapneumovirus
caagagacugccgagagagaaa

SEQ ID NO: 4008487 - RNA, 14 nt, Human metapneumovirus
caagagaggagcaa

SEQ ID NO: 4008488 - RNA, 12 nt, Human metapneumovirus
caagcaacugaa

SEQ ID NO: 4008489 - RNA, 14 nt, Human metapneumovirus
caagcccacagcau

SEQ ID NO: 4008490 - RNA, 22 nt, Human metapneumovirus
caaguggagaauccgaagaaga

SEQ ID NO: 4008491 - RNA, 17 nt, Human metapneumovirus
caauagacaacacugua

SEQ ID NO: 4008492 - RNA, 14 nt, Human metapneumovirus
caaucccaaaggca

SEQ ID NO: 4008493 - RNA, 19 nt, Human metapneumovirus
caaugcgacuguagcacuc

SEQ ID NO: 4008494 - RNA, 14 nt, Human metapneumovirus
cacaccuguuacaa

SEQ ID NO: 4008495 - RNA, 21 nt, Human metapneumovirus
cacagcagcaggaaucaaugu

SEQ ID NO: 4008496 - RNA, 16 nt, Human metapneumovirus
cacagcagcuguucaa

SEQ ID NO: 4008497 - RNA, 19 nt, Human metapneumovirus
cacaggagcaccuccagag

SEQ ID NO: 4008498 - RNA, 17 nt, Human metapneumovirus
caccagcaauaucuuug

SEQ ID NO: 4008499 - RNA, 15 nt, Human metapneumovirus
caccagcagugcugc

SEQ ID NO: 4008500 - RNA, 17 nt, Human metapneumovirus
caccccaagaaaaaaac

SEQ ID NO: 4008501 - RNA, 22 nt, Human metapneumovirus
caccuguuacaauaccagcauu

SEQ ID NO: 4008502 - RNA, 17 nt, Human metapneumovirus
cagaaaugauggaagag

SEQ ID NO: 4008503 - RNA, 22 nt, Human metapneumovirus
cagaagcuuuccagaaaucauu

SEQ ID NO: 4008504 - RNA, 19 nt, Human metapneumovirus
cagcaagcucaccagagac

SEQ ID NO: 4008505 - RNA, 16 nt, Human metapneumovirus
cagcccaaggugcagc

SEQ ID NO: 4008506 - RNA, 14 nt, Human metapneumovirus
caggaaucaauguu

SEQ ID NO: 4008507 - RNA, 16 nt, Human metapneumovirus
caguagaccugcaaaa

SEQ ID NO: 4008508 - RNA, 18 nt, Human metapneumovirus
caguagaccugcaaaacc

SEQ ID NO: 4008509 - RNA, 19 nt, Human metapneumovirus
cagucaaguuuccugaaga

SEQ ID NO: 4008510 - RNA, 16 nt, Human metapneumovirus
caguccacacaaaaaa

SEQ ID NO: 4008511 - RNA, 21 nt, Human metapneumovirus
caguuacagcagguguugcaa

SEQ ID NO: 4008512 - RNA, 17 nt, Human metapneumovirus
caguuggcaaaaaaaca

SEQ ID NO: 4008513 - RNA, 13 nt, Human metapneumovirus
caguuucaaucaa

SEQ ID NO: 4008514 - RNA, 18 nt, Human metapneumovirus
cauaauaaagaaaacaaa

SEQ ID NO: 4008515 - RNA, 20 nt, Human metapneumovirus
cauaauaaagaaaacaaaga

SEQ ID NO: 4008516 - RNA, 20 nt, Human metapneumovirus
cauaauaauaaguaauaauu

SEQ ID NO: 4008517 - RNA, 15 nt, Human metapneumovirus
caucacaacauuauu

SEQ ID NO: 4008518 - RNA, 16 nt, Human metapneumovirus
caucauuguaauaauu

SEQ ID NO: 4008519 - RNA, 17 nt, Human metapneumovirus
cauggguaaugaagcag

SEQ ID NO: 4008520 - RNA, 19 nt, Human metapneumovirus
cauuccuuacacagcagcu

SEQ ID NO: 4008521 - RNA, 21 nt, Human metapneumovirus
ccaaaugaaaaagacugugaa

SEQ ID NO: 4008522 - RNA, 17 nt, Human metapneumovirus
ccaagcucuaacacagg

SEQ ID NO: 4008523 - RNA, 19 nt, Human metapneumovirus
ccaagcucuaacacaggcc

SEQ ID NO: 4008524 - RNA, 15 nt, Human metapneumovirus
ccacaggagcaccuc

SEQ ID NO: 4008525 - RNA, 20 nt, Human metapneumovirus
ccaccagcagugcugcucga

SEQ ID NO: 4008526 - RNA, 20 nt, Human metapneumovirus
ccagcauucaucaaaucagu

SEQ ID NO: 4008527 - RNA, 20 nt, Human metapneumovirus
ccauaccgucagaaccaaag

SEQ ID NO: 4008528 - RNA, 17 nt, Human metapneumovirus
ccaugauccuagugagu

SEQ ID NO: 4008529 - RNA, 21 nt, Human metapneumovirus
ccaugucuuuugcgacacagc

SEQ ID NO: 4008530 - RNA, 24 nt, Human metapneumovirus
ccaugucuuuugcgacacagcagc

SEQ ID NO: 4008531 - RNA, 22 nt, Human metapneumovirus
cccaaaaaauuugaagucaaug

SEQ ID NO: 4008532 - RNA, 21 nt, Human metapneumovirus
cccagcuuaauaaaaacagaa

SEQ ID NO: 4008533 - RNA, 23 nt, Human metapneumovirus
ccgaagaagaagaagaaccaaaa

SEQ ID NO: 4008534 - RNA, 13 nt, Human metapneumovirus
ccguccacagcau

SEQ ID NO: 4008535 - RNA, 15 nt, Human metapneumovirus
ccuaagcagugcaga

SEQ ID NO: 4008536 - RNA, 16 nt, Human metapneumovirus
ccuuacacagcagcug

SEQ ID NO: 4008537 - RNA, 12 nt, Human metapneumovirus
cgacacagcagc

SEQ ID NO: 4008538 - RNA, 18 nt, Human metapneumovirus
cgagagagaaacugaaaa

SEQ ID NO: 4008539 - RNA, 19 nt, Human metapneumovirus
cgcuggaauaacaccagca

SEQ ID NO: 4008540 - RNA, 17 nt, Human metapneumovirus
cggcuugaaagugaagu

SEQ ID NO: 4008541 - RNA, 13 nt, Human metapneumovirus
cuaagcaaaguug

SEQ ID NO: 4008542 - RNA, 17 nt, Human metapneumovirus
cuaggagcaauagcacu

SEQ ID NO: 4008543 - RNA, 15 nt, Human metapneumovirus
cucaaaaaaauaauu

SEQ ID NO: 4008544 - RNA, 11 nt, Human metapneumovirus
cucaaauuaaa

SEQ ID NO: 4008545 - RNA, 14 nt, Human metapneumovirus
cucagaacaguuuc

SEQ ID NO: 4008546 - RNA, 21 nt, Human metapneumovirus
cucagaacaguuucugcugau

SEQ ID NO: 4008547 - RNA, 16 nt, Human metapneumovirus
cucagccaaaucaguu

SEQ ID NO: 4008548 - RNA, 15 nt, Human metapneumovirus
cucuaacacaggcca

SEQ ID NO: 4008549 - RNA, 21 nt, Human metapneumovirus
cugaagaucaauucaauguug

SEQ ID NO: 4008550 - RNA, 20 nt, Human metapneumovirus
cugaguggugucacaaacaa

SEQ ID NO: 4008551 - RNA, 14 nt, Human metapneumovirus
cugcaggacaaaua

SEQ ID NO: 4008552 - RNA, 17 nt, Human metapneumovirus
cuuaagagaagaccaag

SEQ ID NO: 4008553 - RNA, 21 nt, Human metapneumovirus
cuuacaugugccgauggaccc

SEQ ID NO: 4008554 - RNA, 23 nt, Human metapneumovirus
cuuagaagagucauguagcacua

SEQ ID NO: 4008555 - RNA, 15 nt, Human metapneumovirus
cuuuggacuuaauga

SEQ ID NO: 4008556 - RNA, 21 nt, Human metapneumovirus
gaaagugaaguaacagcaauu

SEQ ID NO: 4008557 - RNA, 16 nt, Human metapneumovirus
gaaaucauuaagaaaa

SEQ ID NO: 4008558 - RNA, 17 nt, Human metapneumovirus
gaacuagccagagcugu

SEQ ID NO: 4008559 - RNA, 16 nt, Human metapneumovirus
gaagaugaaagcacaa

SEQ ID NO: 4008560 - RNA, 21 nt, Human metapneumovirus
gaagcugcuauaagcagugaa

SEQ ID NO: 4008561 - RNA, 16 nt, Human metapneumovirus
gacaaauaaaacugau

SEQ ID NO: 4008562 - RNA, 16 nt, Human metapneumovirus
gacacagcagcaggaa

SEQ ID NO: 4008563 - RNA, 20 nt, Human metapneumovirus
gaccaagcucuaacacaggc

SEQ ID NO: 4008564 - RNA, 19 nt, Human metapneumovirus
gagaaaggaaacacuggcu

SEQ ID NO: 4008565 - RNA, 20 nt, Human metapneumovirus
gagagcuugacagaacuaag

SEQ ID NO: 4008566 - RNA, 19 nt, Human metapneumovirus
gaggaaaugagucaacgau

SEQ ID NO: 4008567 - RNA, 15 nt, Human metapneumovirus
gaucaaucaaacaga

SEQ ID NO: 4008568 - RNA, 15 nt, Human metapneumovirus
gaucuaauagaaaag

SEQ ID NO: 4008569 - RNA, 22 nt, Human metapneumovirus
gauuuuauggaucuagaaaaga

SEQ ID NO: 4008570 - RNA, 17 nt, Human metapneumovirus
gcaacauaaacauaucu

SEQ ID NO: 4008571 - RNA, 13 nt, Human metapneumovirus
gcaagcaaucaaa

SEQ ID NO: 4008572 - RNA, 20 nt, Human metapneumovirus
gcaaugguaagaagaaaagg

SEQ ID NO: 4008573 - RNA, 13 nt, Human metapneumovirus
gcacuaagagagc

SEQ ID NO: 4008574 - RNA, 21 nt, Human metapneumovirus
gcacuaaucaagugcagugag

SEQ ID NO: 4008575 - RNA, 18 nt, Human metapneumovirus
gcagacauaauaaaggaa

SEQ ID NO: 4008576 - RNA, 19 nt, Human metapneumovirus
gccaacacaucaacaacau

SEQ ID NO: 4008577 - RNA, 14 nt, Human metapneumovirus
gcgcaagcagaaca

SEQ ID NO: 4008578 - RNA, 16 nt, Human metapneumovirus
gcucagccaaaucagu

SEQ ID NO: 4008579 - RNA, 17 nt, Human metapneumovirus
gcucagccaaaucaguu

SEQ ID NO: 4008580 - RNA, 19 nt, Human metapneumovirus
gcugaaagcauaagcaaaa

SEQ ID NO: 4008581 - RNA, 17 nt, Human metapneumovirus
gcugaguggugucacaa

SEQ ID NO: 4008582 - RNA, 23 nt, Human metapneumovirus
gcugcuauaagcagugaagcaga

SEQ ID NO: 4008583 - RNA, 17 nt, Human metapneumovirus
gcuugaaagugaaguaa

SEQ ID NO: 4008584 - RNA, 23 nt, Human metapneumovirus
ggagaugagcaaaacuccugcau

SEQ ID NO: 4008585 - RNA, 14 nt, Human metapneumovirus
ggagugagcuguuc

SEQ ID NO: 4008586 - RNA, 14 nt, Human metapneumovirus
ggcaacugcaguga

SEQ ID NO: 4008587 - RNA, 15 nt, Human metapneumovirus
ggcaacugcagugag

SEQ ID NO: 4008588 - RNA, 15 nt, Human metapneumovirus
ggucuuaaagagagc

SEQ ID NO: 4008589 - RNA, 12 nt, Human metapneumovirus
guaacagcaauu

SEQ ID NO: 4008590 - RNA, 20 nt, Human metapneumovirus
guagggaucaucaagcaacu

SEQ ID NO: 4008591 - RNA, 21 nt, Human metapneumovirus
gucaagcagcuuugacccagu

SEQ ID NO: 4008592 - RNA, 21 nt, Human metapneumovirus
gucagcuacuguugaagcugc

SEQ ID NO: 4008593 - RNA, 18 nt, Human metapneumovirus
gugccgauggacccagcu

SEQ ID NO: 4008594 - RNA, 21 nt, Human metapneumovirus
gugucacaaacaauggcuuca

SEQ ID NO: 4008595 - RNA, 16 nt, Human metapneumovirus
guuauauaaaaaucaa

SEQ ID NO: 4008596 - RNA, 17 nt, Human metapneumovirus
guuggcaacugcaguga

SEQ ID NO: 4008597 - RNA, 20 nt, Human metapneumovirus
uaaccacucuguaugcugca

SEQ ID NO: 4008598 - RNA, 18 nt, Human metapneumovirus
uaagagaggaauuaauag

SEQ ID NO: 4008599 - RNA, 19 nt, Human metapneumovirus
uaaucaagugcagugagca

SEQ ID NO: 4008600 - RNA, 18 nt, Human papillomavirus type 11
aaaaacucaguauggugu

SEQ ID NO: 4008601 - RNA, 19 nt, Human papillomavirus type 11
aaaacaaaugggccugagc

SEQ ID NO: 4008602 - RNA, 22 nt, Human papillomavirus type 11
aaaacgaaaguauuuaggcagu

SEQ ID NO: 4008603 - RNA, 21 nt, Human papillomavirus type 11
aagacagcucagaagaugagg

SEQ ID NO: 4008604 - RNA, 14 nt, Human papillomavirus type 11
aagcacaggcauug

SEQ ID NO: 4008605 - RNA, 22 nt, Human papillomavirus type 11
aaguaguaccaccauuaacugu

SEQ ID NO: 4008606 - RNA, 12 nt, Human papillomavirus type 11
aauaucagaaga

SEQ ID NO: 4008607 - RNA, 13 nt, Human papillomavirus type 11
aaugcaaaugcau

SEQ ID NO: 4008608 - RNA, 14 nt, Human papillomavirus type 11
aaugcaauuguaac

SEQ ID NO: 4008609 - RNA, 17 nt, Human papillomavirus type 11
aauggaguaugugguau

SEQ ID NO: 4008610 - RNA, 22 nt, Human papillomavirus type 11
aauuugauggcugugaagacaa

SEQ ID NO: 4008611 - RNA, 18 nt, Human papillomavirus type 11
acaaaugggccugagcca

SEQ ID NO: 4008612 - RNA, 18 nt, Human papillomavirus type 11
acaccaguuaugaaaugu

SEQ ID NO: 4008613 - RNA, 22 nt, Human papillomavirus type 11
acagcaacguccgacugguugu

SEQ ID NO: 4008614 - RNA, 12 nt, Human papillomavirus type 11
acagccaaaaaa

SEQ ID NO: 4008615 - RNA, 10 nt, Human papillomavirus type 11
acaggauggu

SEQ ID NO: 4008616 - RNA, 20 nt, Human papillomavirus type 11
acaugguuguuucugugguu

SEQ ID NO: 4008617 - RNA, 15 nt, Human papillomavirus type 11
accuguauauaugua

SEQ ID NO: 4008618 - RNA, 11 nt, Human papillomavirus type 11
acuaacacugu

SEQ ID NO: 4008619 - RNA, 22 nt, Human papillomavirus type 11
acuaaucccauauguugugugc

SEQ ID NO: 4008620 - RNA, 22 nt, Human papillomavirus type 11
acuacauuacagggcuguacau

SEQ ID NO: 4008621 - RNA, 10 nt, Human papillomavirus type 11
acugcauuug

SEQ ID NO: 4008622 - RNA, 13 nt, Human papillomavirus type 11
acugguacauguc

SEQ ID NO: 4008623 - RNA, 21 nt, Human papillomavirus type 11
agaugaggaagaggaggugga

SEQ ID NO: 4008624 - RNA, 16 nt, Human papillomavirus type 11
aggagguggaggacag

SEQ ID NO: 4008625 - RNA, 19 nt, Human papillomavirus type 11
agggguuuuuuuugguggg

SEQ ID NO: 4008626 - RNA, 14 nt, Human papillomavirus type 11
agugccuguacaaa

SEQ ID NO: 4008627 - RNA, 14 nt, Human papillomavirus type 11
auacacauauacau

SEQ ID NO: 4008628 - RNA, 19 nt, Human papillomavirus type 11
auaucugauuuuguaguau

SEQ ID NO: 4008629 - RNA, 12 nt, Human papillomavirus type 11
augacaggcaua

SEQ ID NO: 4008630 - RNA, 21 nt, Human papillomavirus type 11
auggugauguuaaccugucac

SEQ ID NO: 4008631 - RNA, 18 nt, Human papillomavirus type 11
auuagaagacagcucaga

SEQ ID NO: 4008632 - RNA, 21 nt, Human papillomavirus type 11
auucuguggaagcacaggcau

SEQ ID NO: 4008633 - RNA, 15 nt, Human papillomavirus type 11
auugaugacaggcau

SEQ ID NO: 4008634 - RNA, 21 nt, Human papillomavirus type 11
auugccuguuguuauugcauu

SEQ ID NO: 4008635 - RNA, 18 nt, Human papillomavirus type 11
auuuuccugccuuuuaua

SEQ ID NO: 4008636 - RNA, 23 nt, Human papillomavirus type 11
caaaacaguuguaccaaaggugu

SEQ ID NO: 4008637 - RNA, 17 nt, Human papillomavirus type 11
caaagcaaaacaaaugg

SEQ ID NO: 4008638 - RNA, 15 nt, Human papillomavirus type 11
caauuguaacauuaa

SEQ ID NO: 4008639 - RNA, 23 nt, Human papillomavirus type 11
caauuuuuaaacaguguaaaaau

SEQ ID NO: 4008640 - RNA, 19 nt, Human papillomavirus type 11
cacacuaaauauugugugu

SEQ ID NO: 4008641 - RNA, 14 nt, Human papillomavirus type 11
cacauuaugcauug

SEQ ID NO: 4008642 - RNA, 21 nt, Human papillomavirus type 11
cacugugugugugcuauuuuc

SEQ ID NO: 4008643 - RNA, 15 nt, Human papillomavirus type 11
cacuuaaaugauggu

SEQ ID NO: 4008644 - RNA, 19 nt, Human papillomavirus type 11
cagaagaugaggaagagga

SEQ ID NO: 4008645 - RNA, 14 nt, Human papillomavirus type 11
cagccuccugaccc

SEQ ID NO: 4008646 - RNA, 18 nt, Human papillomavirus type 11
cauaacaaggauggcgga

SEQ ID NO: 4008647 - RNA, 18 nt, Human papillomavirus type 11
cauaguagagcacacuac

SEQ ID NO: 4008648 - RNA, 17 nt, Human papillomavirus type 11
cauauacauugugcaaa

SEQ ID NO: 4008649 - RNA, 16 nt, Human papillomavirus type 11
caugcaaggccacugg

SEQ ID NO: 4008650 - RNA, 21 nt, Human papillomavirus type 11
caugguacugaaaaaacuaaa

SEQ ID NO: 4008651 - RNA, 17 nt, Human papillomavirus type 11
cauuaacauauagcagu

SEQ ID NO: 4008652 - RNA, 13 nt, Human papillomavirus type 11
cauugcuaaacaa

SEQ ID NO: 4008653 - RNA, 23 nt, Human papillomavirus type 11
ccugucacuuaaaugauggugau

SEQ ID NO: 4008654 - RNA, 15 nt, Human papillomavirus type 11
cgacugguuguggag

SEQ ID NO: 4008655 - RNA, 13 nt, Human papillomavirus type 11
cggagacaucaga

SEQ ID NO: 4008656 - RNA, 16 nt, Human papillomavirus type 11
cguuuguguugccuuc

SEQ ID NO: 4008657 - RNA, 23 nt, Human papillomavirus type 11
cuacaagaccuuuugcugggcac

SEQ ID NO: 4008658 - RNA, 17 nt, Human papillomavirus type 11
cuauaucaaacaugcaa

SEQ ID NO: 4008659 - RNA, 22 nt, Human papillomavirus type 11
cuauugaaaugcaaaugcauuu

SEQ ID NO: 4008660 - RNA, 18 nt, Human papillomavirus type 11
cucaccugaggcaccaca

SEQ ID NO: 4008661 - RNA, 11 nt, Human papillomavirus type 11
cugcaggacaa

SEQ ID NO: 4008662 - RNA, 15 nt, Human papillomavirus type 11
cugugugugugcuau

SEQ ID NO: 4008663 - RNA, 14 nt, Human papillomavirus type 11
cuuagcaaaaacuc

SEQ ID NO: 4008664 - RNA, 18 nt, Human papillomavirus type 11
cuuuaacacaacauuacc

SEQ ID NO: 4008665 - RNA, 18 nt, Human papillomavirus type 11
gaaaaaacuaaaugugcu

SEQ ID NO: 4008666 - RNA, 16 nt, Human papillomavirus type 11
gaagaugagguggaca

SEQ ID NO: 4008667 - RNA, 14 nt, Human papillomavirus type 11
gaauguguauguau

SEQ ID NO: 4008668 - RNA, 15 nt, Human papillomavirus type 11
gacaggcauauuaca

SEQ ID NO: 4008669 - RNA, 16 nt, Human papillomavirus type 11
gacaguggguaugaca

SEQ ID NO: 4008670 - RNA, 11 nt, Human papillomavirus type 11
gacccuguagg

SEQ ID NO: 4008671 - RNA, 15 nt, Human papillomavirus type 11
gaccuuuugcugggc

SEQ ID NO: 4008672 - RNA, 17 nt, Human papillomavirus type 11
gacggcuguuugaaaca

SEQ ID NO: 4008673 - RNA, 13 nt, Human papillomavirus type 11
gaggagucugcua

SEQ ID NO: 4008674 - RNA, 21 nt, Human papillomavirus type 11
gcaguauguauucuuaguauu

SEQ ID NO: 4008675 - RNA, 20 nt, Human papillomavirus type 11
gcuaaugcaguagaaaguga

SEQ ID NO: 4008676 - RNA, 15 nt, Human papillomavirus type 11
gcucagaagaugagg

SEQ ID NO: 4008677 - RNA, 14 nt, Human papillomavirus type 11
gcuguggaugugac

SEQ ID NO: 4008678 - RNA, 14 nt, Human papillomavirus type 11
ggaauguguaugua

SEQ ID NO: 4008679 - RNA, 21 nt, Human papillomavirus type 11
ggacgauucagguacagaaaa

SEQ ID NO: 4008680 - RNA, 17 nt, Human papillomavirus type 11
gggaaauacuguggagg

SEQ ID NO: 4008681 - RNA, 20 nt, Human papillomavirus type 11
gggguuuaugucauuacauu

SEQ ID NO: 4008682 - RNA, 13 nt, Human papillomavirus type 11
ggguguacaggau

SEQ ID NO: 4008683 - RNA, 23 nt, Human papillomavirus type 11
gguacacaaauaucagaagauga

SEQ ID NO: 4008684 - RNA, 16 nt, Human papillomavirus type 11
gguuguuucugugguu

SEQ ID NO: 4008685 - RNA, 16 nt, Human papillomavirus type 11
guaacauuaacauaua

SEQ ID NO: 4008686 - RNA, 18 nt, Human papillomavirus type 11
guaccaccauuaacugug

SEQ ID NO: 4008687 - RNA, 14 nt, Human papillomavirus type 11
guaguauauacauc

SEQ ID NO: 4008688 - RNA, 14 nt, Human papillomavirus type 11
guauaugucacaug

SEQ ID NO: 4008689 - RNA, 14 nt, Human papillomavirus type 11
guauugauauacac

SEQ ID NO: 4008690 - RNA, 18 nt, Human papillomavirus type 11
gucgggguguacaggaug

SEQ ID NO: 4008691 - RNA, 21 nt, Human papillomavirus type 11
guggaaccuuggacauuacag

SEQ ID NO: 4008692 - RNA, 22 nt, Human papillomavirus type 11
guggaauguguauguauguuuu

SEQ ID NO: 4008693 - RNA, 16 nt, Human papillomavirus type 11
guuacacccagugacu

SEQ ID NO: 4008694 - RNA, 23 nt, Human papillomavirus type 11
guuacacccagugacuaaguugu

SEQ ID NO: 4008695 - RNA, 20 nt, Human papillomavirus type 11
uaaaugugcuaaguguaaau

SEQ ID NO: 4008696 - RNA, 22 nt, Human papillomavirus type 11
uaacaaaacaguuguaccaaag

SEQ ID NO: 4008697 - RNA, 22 nt, Human papillomavirus type 11
uaacacugugugugugcuauuu

SEQ ID NO: 4008698 - RNA, 17 nt, Human papillomavirus type 11
uaaccugucacuuaaau

SEQ ID NO: 4008699 - RNA, 22 nt, Human papillomavirus type 11
uacaaauugcugcagcaacaac

SEQ ID NO: 4008700 - RNA, 16 nt, Human papillomavirus type 11
uacaucugugcuggua

SEQ ID NO: 4008701 - RNA, 17 nt, Human papillomavirus type 11
uacauuacagggcugua

SEQ ID NO: 4008702 - RNA, 14 nt, Human papillomavirus type 11
uaguguguguauau

SEQ ID NO: 4008703 - RNA, 17 nt, Human papillomavirus type 11
uauaaacauuuguuuga

SEQ ID NO: 4008704 - RNA, 14 nt, Human papillomavirus type 11
uauugauauacaca

SEQ ID NO: 4008705 - RNA, 17 nt, Human papillomavirus type 11
uauugaugacaggcaua

SEQ ID NO: 4008706 - RNA, 16 nt, Human papillomavirus type 11
uauuguacuuauaaua

SEQ ID NO: 4008707 - RNA, 17 nt, Human papillomavirus type 11
ucuuguauuguguauau

SEQ ID NO: 4008708 - RNA, 15 nt, Human papillomavirus type 11
ugaaaugcaaaugca

SEQ ID NO: 4008709 - RNA, 15 nt, Human papillomavirus type 11
ugauauacacaaaca

SEQ ID NO: 4008710 - RNA, 15 nt, Human papillomavirus type 11
ugcaaacgcaacaau

SEQ ID NO: 4008711 - RNA, 16 nt, Human papillomavirus type 11
ugcuaaguguaaauca

SEQ ID NO: 4008712 - RNA, 22 nt, Human papillomavirus type 11
uggacuuuauugaugacaggca

SEQ ID NO: 4008713 - RNA, 15 nt, Human papillomavirus type 11
uggagauuaugugua

SEQ ID NO: 4008714 - RNA, 16 nt, Human papillomavirus type 11
uggagauuauguguac

SEQ ID NO: 4008715 - RNA, 19 nt, Human papillomavirus type 11
uggagauuauguguacaug

SEQ ID NO: 4008716 - RNA, 23 nt, Human papillomavirus type 11
uggagauuauguguacaugaacu

SEQ ID NO: 4008717 - RNA, 16 nt, Human papillomavirus type 11
ugucccaucugcgcac

SEQ ID NO: 4008718 - RNA, 22 nt, Human papillomavirus type 11
ugugaagacaauguaauggagu

SEQ ID NO: 4008719 - RNA, 18 nt, Human papillomavirus type 11
uguggaagcacaggcauu

SEQ ID NO: 4008720 - RNA, 18 nt, Human papillomavirus type 11
uguguauguuauguaugu

SEQ ID NO: 4008721 - RNA, 15 nt, Human papillomavirus type 11
uguuauuuauauguu

SEQ ID NO: 4008722 - RNA, 19 nt, Human papillomavirus type 11
uuaaccugucacuuaaaug

SEQ ID NO: 4008723 - RNA, 17 nt, Human papillomavirus type 11
uuaccaaauacugaccu

SEQ ID NO: 4008724 - RNA, 17 nt, Human papillomavirus type 11
uuguuuacugcauuugu

SEQ ID NO: 4008725 - RNA, 21 nt, Human papillomavirus type 11
uuguuucugugguuguuuacu

SEQ ID NO: 4008726 - RNA, 20 nt, Human papillomavirus type 11
aaacuaaaugugcuaagugu

SEQ ID NO: 4008727 - RNA, 17 nt, Human papillomavirus type 11
aaauacugaccuguugc

SEQ ID NO: 4008728 - RNA, 18 nt, Human papillomavirus type 11
aaauaucagaagaugagg

SEQ ID NO: 4008729 - RNA, 14 nt, Human papillomavirus type 11
aauguguauguaug

SEQ ID NO: 4008730 - RNA, 22 nt, Human papillomavirus type 11
aauuagaagacagcucagaaga

SEQ ID NO: 4008731 - RNA, 14 nt, Human papillomavirus type 11
aauuguuuaaaaug

SEQ ID NO: 4008732 - RNA, 15 nt, Human papillomavirus type 11
aauuuuuaaacagug

SEQ ID NO: 4008733 - RNA, 22 nt, Human papillomavirus type 11
acaaauaucagaagaugaggaa

SEQ ID NO: 4008734 - RNA, 16 nt, Human papillomavirus type 11
acagcucagaagauga

SEQ ID NO: 4008735 - RNA, 17 nt, Human papillomavirus type 11
acagcucagaagaugag

SEQ ID NO: 4008736 - RNA, 19 nt, Human papillomavirus type 11
accugucacuuaaaugaug

SEQ ID NO: 4008737 - RNA, 13 nt, Human papillomavirus type 11
accuguugcugug

SEQ ID NO: 4008738 - RNA, 12 nt, Human papillomavirus type 11
accuuuugcugg

SEQ ID NO: 4008739 - RNA, 16 nt, Human papillomavirus type 11
agaugaggaagaggag

SEQ ID NO: 4008740 - RNA, 14 nt, Human papillomavirus type 11
agcucagaagauga

SEQ ID NO: 4008741 - RNA, 20 nt, Human papillomavirus type 11
agcucagaagaugaggugga

SEQ ID NO: 4008742 - RNA, 16 nt, Human papillomavirus type 11
aggagucugcuauuau

SEQ ID NO: 4008743 - RNA, 19 nt, Human papillomavirus type 11
aggaugguuuaugguagaa

SEQ ID NO: 4008744 - RNA, 15 nt, Human papillomavirus type 11
agggaaauacugugg

SEQ ID NO: 4008745 - RNA, 17 nt, Human papillomavirus type 11
aggugauuccaauuguu

SEQ ID NO: 4008746 - RNA, 22 nt, Human papillomavirus type 11
aguaguaccaccauuaacugug

SEQ ID NO: 4008747 - RNA, 22 nt, Human papillomavirus type 11
aguaugguguggaaccuuggac

SEQ ID NO: 4008748 - RNA, 12 nt, Human papillomavirus type 11
aguaugugguau

SEQ ID NO: 4008749 - RNA, 20 nt, Human papillomavirus type 11
agugccuguacaaauugcug

SEQ ID NO: 4008750 - RNA, 20 nt, Human papillomavirus type 11
aguggguaugacauggugga

SEQ ID NO: 4008751 - RNA, 19 nt, Human papillomavirus type 11
auaguacuagaccugcagc

SEQ ID NO: 4008752 - RNA, 19 nt, Human papillomavirus type 11
auauaaacauuuguuugaa

SEQ ID NO: 4008753 - RNA, 19 nt, Human papillomavirus type 11
auauauuuguaauauaccu

SEQ ID NO: 4008754 - RNA, 21 nt, Human papillomavirus type 11
auauauuuguggaauguguau

SEQ ID NO: 4008755 - RNA, 14 nt, Human papillomavirus type 11
auauguuguuguag

SEQ ID NO: 4008756 - RNA, 15 nt, Human papillomavirus type 11
auauguuucuuguau

SEQ ID NO: 4008757 - RNA, 20 nt, Human papillomavirus type 11
auauuaaaauggggaagcuu

SEQ ID NO: 4008758 - RNA, 16 nt, Human papillomavirus type 11
augcgacugugcagga

SEQ ID NO: 4008759 - RNA, 23 nt, Human papillomavirus type 11
augcuauugaaaugcaaaugcau

SEQ ID NO: 4008760 - RNA, 20 nt, Human papillomavirus type 11
auggagguagugccuguaca

SEQ ID NO: 4008761 - RNA, 18 nt, Human papillomavirus type 11
auggugauguuaaccugu

SEQ ID NO: 4008762 - RNA, 11 nt, Human papillomavirus type 11
auguauguuug

SEQ ID NO: 4008763 - RNA, 11 nt, Human papillomavirus type 11
auguauguuuu

SEQ ID NO: 4008764 - RNA, 16 nt, Human papillomavirus type 11
augucauuacauuuau

SEQ ID NO: 4008765 - RNA, 17 nt, Human papillomavirus type 11
auguuguuauguauguu

SEQ ID NO: 4008766 - RNA, 16 nt, Human papillomavirus type 11
auguuguuguagugug

SEQ ID NO: 4008767 - RNA, 17 nt, Human papillomavirus type 11
auguuuuugugcaauaa

SEQ ID NO: 4008768 - RNA, 22 nt, Human papillomavirus type 11
auuaauaucugauuuuguagua

SEQ ID NO: 4008769 - RNA, 18 nt, Human papillomavirus type 11
auuauauauauuuguaau

SEQ ID NO: 4008770 - RNA, 15 nt, Human papillomavirus type 11
auugcauuugcagua

SEQ ID NO: 4008771 - RNA, 23 nt, Human papillomavirus type 11
auuugcaguauguauucuuagua

SEQ ID NO: 4008772 - RNA, 18 nt, Human papillomavirus type 11
caauucuuuuuacuaaca

SEQ ID NO: 4008773 - RNA, 23 nt, Human papillomavirus type 11
cagaucaaauauuaaaaugggga

SEQ ID NO: 4008774 - RNA, 22 nt, Human papillomavirus type 11
caggaccuaaaacgaaaguauu

SEQ ID NO: 4008775 - RNA, 15 nt, Human papillomavirus type 11
cagggaaauacugug

SEQ ID NO: 4008776 - RNA, 14 nt, Human papillomavirus type 11
caucuucaacgugg

SEQ ID NO: 4008777 - RNA, 12 nt, Human papillomavirus type 11
caugaacuagag

SEQ ID NO: 4008778 - RNA, 14 nt, Human papillomavirus type 11
cauuggaaaugcau

SEQ ID NO: 4008779 - RNA, 21 nt, Human papillomavirus type 11
ccaacauauuuuaucaugcca

SEQ ID NO: 4008780 - RNA, 14 nt, Human papillomavirus type 11
ccugauucaucccu

SEQ ID NO: 4008781 - RNA, 17 nt, Human papillomavirus type 11
ccugcagccuccugacc

SEQ ID NO: 4008782 - RNA, 18 nt, Human papillomavirus type 11
ccugucacuuaaaugaug

SEQ ID NO: 4008783 - RNA, 15 nt, Human papillomavirus type 11
ccuguugcuguggau

SEQ ID NO: 4008784 - RNA, 20 nt, Human papillomavirus type 11
cuauugaaaugcaaaugcau

SEQ ID NO: 4008785 - RNA, 14 nt, Human papillomavirus type 11
cucagaagaugagg

SEQ ID NO: 4008786 - RNA, 17 nt, Human papillomavirus type 11
cugaccuguugcugugg

SEQ ID NO: 4008787 - RNA, 14 nt, Human papillomavirus type 11
cugauucaucccug

SEQ ID NO: 4008788 - RNA, 13 nt, Human papillomavirus type 11
cugggcacacuaa

SEQ ID NO: 4008789 - RNA, 14 nt, Human papillomavirus type 11
cugguuguggagug

SEQ ID NO: 4008790 - RNA, 20 nt, Human papillomavirus type 11
cuguggaagcacaggcauug

SEQ ID NO: 4008791 - RNA, 22 nt, Human papillomavirus type 11
cuuaauugaggagucugcuauu

SEQ ID NO: 4008792 - RNA, 19 nt, Human papillomavirus type 11
gaaaaaacuaaaugugcua

SEQ ID NO: 4008793 - RNA, 14 nt, Human papillomavirus type 11
gaagaggaggugga

SEQ ID NO: 4008794 - RNA, 23 nt, Human papillomavirus type 11
gaagaggagguggaggacagugg

SEQ ID NO: 4008795 - RNA, 16 nt, Human papillomavirus type 11
gacugguuguggagug

SEQ ID NO: 4008796 - RNA, 22 nt, Human papillomavirus type 11
gacugguuguggagugcacaga

SEQ ID NO: 4008797 - RNA, 18 nt, Human papillomavirus type 11
gaugagguggacaaggug

SEQ ID NO: 4008798 - RNA, 21 nt, Human papillomavirus type 11
gcaacaauaauggugauguua

SEQ ID NO: 4008799 - RNA, 19 nt, Human papillomavirus type 11
gccaaaaaagguaaagcga

SEQ ID NO: 4008800 - RNA, 19 nt, Human papillomavirus type 11
gcuauuacuggggggccag

SEQ ID NO: 4008801 - RNA, 14 nt, Human papillomavirus type 11
gcuauugaaaugca

SEQ ID NO: 4008802 - RNA, 19 nt, Human papillomavirus type 11
gcucagaagaugaggugga

SEQ ID NO: 4008803 - RNA, 14 nt, Human papillomavirus type 11
gcuuguggagccug

SEQ ID NO: 4008804 - RNA, 16 nt, Human papillomavirus type 11
ggacauuacaggacac

SEQ ID NO: 4008805 - RNA, 21 nt, Human papillomavirus type 11
ggcggacgauucagguacaga

SEQ ID NO: 4008806 - RNA, 16 nt, Human papillomavirus type 11
ggcgugcacaggguug

SEQ ID NO: 4008807 - RNA, 23 nt, Human papillomavirus type 11
gggaagcucucccaagccugcua

SEQ ID NO: 4008808 - RNA, 16 nt, Human papillomavirus type 11
gggucgggguguacag

SEQ ID NO: 4008809 - RNA, 14 nt, Human papillomavirus type 11
gguauugguacagg

SEQ ID NO: 4008810 - RNA, 22 nt, Human papillomavirus type 11
guacaugucccccagauguaau

SEQ ID NO: 4008811 - RNA, 12 nt, Human papillomavirus type 11
guagcuaaugca

SEQ ID NO: 4008812 - RNA, 18 nt, Human papillomavirus type 11
guauauacaucugugcug

SEQ ID NO: 4008813 - RNA, 18 nt, Human papillomavirus type 11
gugguuguuuacugcauu

SEQ ID NO: 4008814 - RNA, 14 nt, Human papillomavirus type 11
guuguuauugcauu

SEQ ID NO: 4008815 - RNA, 20 nt, Human papillomavirus type 11
uaaaaaugcaauuguaacau

SEQ ID NO: 4008816 - RNA, 17 nt, Human papillomavirus type 11
uaaacaauuauuaugug

SEQ ID NO: 4008817 - RNA, 20 nt, Human papillomavirus type 11
uaaacaauuauuaugugugu

SEQ ID NO: 4008818 - RNA, 16 nt, Human papillomavirus type 11
uaaaguugaacauacu

SEQ ID NO: 4008819 - RNA, 15 nt, Human papillomavirus type 11
uaaaucaaaccgcaa

SEQ ID NO: 4008820 - RNA, 17 nt, Human papillomavirus type 11
uaaaugugcuaagugua

SEQ ID NO: 4008821 - RNA, 18 nt, Human papillomavirus type 11
uaaucccauauguugugu

SEQ ID NO: 4008822 - RNA, 21 nt, Human papillomavirus type 11
uacaaauugcugcagcaacaa

SEQ ID NO: 4008823 - RNA, 17 nt, Human papillomavirus type 11
uacauaacauacgugua

SEQ ID NO: 4008824 - RNA, 24 nt, Human papillomavirus type 11
uacauuacagggcuguacauggua

SEQ ID NO: 4008825 - RNA, 17 nt, Human papillomavirus type 11
uaccaaauacugaccug

SEQ ID NO: 4008826 - RNA, 22 nt, Human papillomavirus type 11
uacuacuguggauuauguguau

SEQ ID NO: 4008827 - RNA, 18 nt, Human papillomavirus type 11
uacuauugcagaucaaau

SEQ ID NO: 4008828 - RNA, 21 nt, Human papillomavirus type 11
uacuguggauuauguguauau

SEQ ID NO: 4008829 - RNA, 12 nt, Human papillomavirus type 11
uagaagccauag

SEQ ID NO: 4008830 - RNA, 16 nt, Human papillomavirus type 11
uagcagugaggaacaa

SEQ ID NO: 4008831 - RNA, 14 nt, Human papillomavirus type 11
uagugccuguacaa

SEQ ID NO: 4008832 - RNA, 23 nt, Human papillomavirus type 11
aaaauucuguggaagcacaggca

SEQ ID NO: 4008833 - RNA, 22 nt, Human papillomavirus type 11
aaaugcauuuagaauccuuagc

SEQ ID NO: 4008834 - RNA, 18 nt, Human papillomavirus type 11
aaccauaacaaggauggc

SEQ ID NO: 4008835 - RNA, 17 nt, Human papillomavirus type 11
aaccgcaauacuacugu

SEQ ID NO: 4008836 - RNA, 12 nt, Human papillomavirus type 11
aagguaaagcga

SEQ ID NO: 4008837 - RNA, 16 nt, Human papillomavirus type 11
aauuauuauguguguc

SEQ ID NO: 4008838 - RNA, 14 nt, Human papillomavirus type 11
aauucuuuuuacua

SEQ ID NO: 4008839 - RNA, 13 nt, Human papillomavirus type 11
acacaaagcaaaa

SEQ ID NO: 4008840 - RNA, 17 nt, Human papillomavirus type 11
acaccacccaaacggug

SEQ ID NO: 4008841 - RNA, 22 nt, Human papillomavirus type 11
acauuaugcauuggaaaugcau

SEQ ID NO: 4008842 - RNA, 15 nt, Human papillomavirus type 11
accuagggcacgcag

SEQ ID NO: 4008843 - RNA, 22 nt, Human papillomavirus type 11
acuaaaugugcuaaguguaaau

SEQ ID NO: 4008844 - RNA, 16 nt, Human papillomavirus type 11
acuggggggccagcag

SEQ ID NO: 4008845 - RNA, 13 nt, Human papillomavirus type 11
aguauuuaggcag

SEQ ID NO: 4008846 - RNA, 16 nt, Human papillomavirus type 11
auauaccugcaggaca

SEQ ID NO: 4008847 - RNA, 17 nt, Human papillomavirus type 11
auauguguauauguuug

SEQ ID NO: 4008848 - RNA, 15 nt, Human papillomavirus type 11
aucugcgcaccaaaa

SEQ ID NO: 4008849 - RNA, 12 nt, Human papillomavirus type 11
augcauuggaaa

SEQ ID NO: 4008850 - RNA, 17 nt, Human papillomavirus type 11
augcauuggaaaugcau

SEQ ID NO: 4008851 - RNA, 19 nt, Human papillomavirus type 11
auguagaaaauaguggugg

SEQ ID NO: 4008852 - RNA, 15 nt, Human papillomavirus type 11
augucacauggugau

SEQ ID NO: 4008853 - RNA, 16 nt, Human papillomavirus type 11
augugguauggacaca

SEQ ID NO: 4008854 - RNA, 11 nt, Human papillomavirus type 11
auguguauguu

SEQ ID NO: 4008855 - RNA, 14 nt, Human papillomavirus type 11
auguguauguuaug

SEQ ID NO: 4008856 - RNA, 21 nt, Human papillomavirus type 11
auguuuuagauauagacugaa

SEQ ID NO: 4008857 - RNA, 17 nt, Human papillomavirus type 11
auuacaccuguauauau

SEQ ID NO: 4008858 - RNA, 17 nt, Human papillomavirus type 11
auuacauuuauuguaac

SEQ ID NO: 4008859 - RNA, 18 nt, Human papillomavirus type 11
auuacuacacaaagcaaa

SEQ ID NO: 4008860 - RNA, 16 nt, Human papillomavirus type 11
auucuuaguauuguac

SEQ ID NO: 4008861 - RNA, 23 nt, Human papillomavirus type 11
auugugcaaacgcaacaauaaug

SEQ ID NO: 4008862 - RNA, 22 nt, Human papillomavirus type 11
caaaacaaaugggccugagcca

SEQ ID NO: 4008863 - RNA, 15 nt, Human papillomavirus type 11
caaaauucuguggaa

SEQ ID NO: 4008864 - RNA, 19 nt, Human papillomavirus type 11
caaauaucagaagaugagg

SEQ ID NO: 4008865 - RNA, 12 nt, Human papillomavirus type 11
caacacagccaa

SEQ ID NO: 4008866 - RNA, 14 nt, Human papillomavirus type 11
caauuguaacauua

SEQ ID NO: 4008867 - RNA, 17 nt, Human papillomavirus type 11
caauuuuuaaacagugu

SEQ ID NO: 4008868 - RNA, 18 nt, Human papillomavirus type 11
caauuuuuaaacagugua

SEQ ID NO: 4008869 - RNA, 22 nt, Human papillomavirus type 11
cacauuaugcauuggaaaugca

SEQ ID NO: 4008870 - RNA, 19 nt, Human papillomavirus type 11
caccuguauauauguauau

SEQ ID NO: 4008871 - RNA, 20 nt, Human papillomavirus type 11
cagaagaugagguggacaag

SEQ ID NO: 4008872 - RNA, 18 nt, Human papillomavirus type 11
cagagacuaaaggacaua

SEQ ID NO: 4008873 - RNA, 15 nt, Human papillomavirus type 11
cagcaacguccgacu

SEQ ID NO: 4008874 - RNA, 19 nt, Human papillomavirus type 11
caggaugguuuaugguaga

SEQ ID NO: 4008875 - RNA, 15 nt, Human papillomavirus type 11
caguuaugaaaugug

SEQ ID NO: 4008876 - RNA, 13 nt, Human papillomavirus type 11
caucugugcuggu

SEQ ID NO: 4008877 - RNA, 20 nt, Human papillomavirus type 11
caucugugcugguacuaaca

SEQ ID NO: 4008878 - RNA, 16 nt, Human papillomavirus type 11
cauuaugcgacugugc

SEQ ID NO: 4008879 - RNA, 18 nt, Human papillomavirus type 11
cauuguuuaauaggcagg

SEQ ID NO: 4008880 - RNA, 23 nt, Human papillomavirus type 11
ccauuaaacuuacaacacagcca

SEQ ID NO: 4008881 - RNA, 13 nt, Human papillomavirus type 11
ccgcaauacuacu

SEQ ID NO: 4008882 - RNA, 14 nt, Human papillomavirus type 11
ccuccugacccugu

SEQ ID NO: 4008883 - RNA, 21 nt, Human papillomavirus type 11
ccuuggacauuacaggacacc

SEQ ID NO: 4008884 - RNA, 22 nt, Human papillomavirus type 11
cgucagcaauuuuuaaacagug

SEQ ID NO: 4008885 - RNA, 13 nt, Human papillomavirus type 11
cuauacuauguua

SEQ ID NO: 4008886 - RNA, 15 nt, Human papillomavirus type 11
cuccucccaacccug

SEQ ID NO: 4008887 - RNA, 18 nt, Human papillomavirus type 11
cugaaaaaacuaaaugug

SEQ ID NO: 4008888 - RNA, 20 nt, Human papillomavirus type 11
cugauuuuguaguauauaca

SEQ ID NO: 4008889 - RNA, 23 nt, Human papillomavirus type 11
cugcagcaacaacuacaacauug

SEQ ID NO: 4008890 - RNA, 16 nt, Human papillomavirus type 11
cugccuuuuauauaca

SEQ ID NO: 4008891 - RNA, 16 nt, Human papillomavirus type 11
cugcuauuacuggggg

SEQ ID NO: 4008892 - RNA, 21 nt, Human papillomavirus type 11
cugcuauuauuaaugcuggug

SEQ ID NO: 4008893 - RNA, 21 nt, Human papillomavirus type 11
cuguacaaauugcugcagcaa

SEQ ID NO: 4008894 - RNA, 16 nt, Human papillomavirus type 11
cuguauccaagguugu

SEQ ID NO: 4008895 - RNA, 18 nt, Human papillomavirus type 11
cuguggaagcacaggcau

SEQ ID NO: 4008896 - RNA, 20 nt, Human papillomavirus type 11
cuguugcuguggaugugaca

SEQ ID NO: 4008897 - RNA, 23 nt, Human papillomavirus type 11
cuuuaaaaaacagggaaauacug

SEQ ID NO: 4008898 - RNA, 11 nt, Human papillomavirus type 11
gaagcacaggc

SEQ ID NO: 4008899 - RNA, 22 nt, Human papillomavirus type 11
gacauaaugcuauugaaaugca

SEQ ID NO: 4008900 - RNA, 20 nt, Human papillomavirus type 11
gaccccacuacacagcguuu

SEQ ID NO: 4008901 - RNA, 16 nt, Human papillomavirus type 11
gagacuaaaggacaua

SEQ ID NO: 4008902 - RNA, 23 nt, Human papillomavirus type 11
gcacguccgccagugcuugugga

SEQ ID NO: 4008903 - RNA, 16 nt, Human papillomavirus type 11
gcagcacguccgccag

SEQ ID NO: 4008904 - RNA, 15 nt, Human papillomavirus type 11
gcaguccauauguaa

SEQ ID NO: 4008905 - RNA, 18 nt, Human papillomavirus type 11
gccauuaaacuuacaaca

SEQ ID NO: 4008906 - RNA, 22 nt, Human papillomavirus type 11
ggaggacaguggguaugacaug

SEQ ID NO: 4008907 - RNA, 11 nt, Human papillomavirus type 11
ggaugugacag

SEQ ID NO: 4008908 - RNA, 23 nt, Human papillomavirus type 11
ggccacugguacaugucccccag

SEQ ID NO: 4008909 - RNA, 15 nt, Human papillomavirus type 11
gggaagcucucccaa

SEQ ID NO: 4008910 - RNA, 22 nt, Human papillomavirus type 11
gguggacuuuauugaugacagg

SEQ ID NO: 4008911 - RNA, 15 nt, Human papillomavirus type 11
gguguacaggauggu

SEQ ID NO: 4008912 - RNA, 18 nt, Human papillomavirus type 11
guacacaaauaucagaag

SEQ ID NO: 4008913 - RNA, 19 nt, Human papillomavirus type 11
guagagcacacuacaggua

SEQ ID NO: 4008914 - RNA, 14 nt, Human papillomavirus type 11
guguauauguuucu

SEQ ID NO: 4008915 - RNA, 20 nt, Human papillomavirus type 11
guguauuacuacacaaagca

SEQ ID NO: 4008916 - RNA, 21 nt, Human papillomavirus type 11
guuuaaaauguuuuagauaua

SEQ ID NO: 4008917 - RNA, 19 nt, Human papillomavirus type 11
uaaaguugaacauacuacu

SEQ ID NO: 4008918 - RNA, 20 nt, Human papillomavirus type 11
uaacaaccccuuugcaauuc

SEQ ID NO: 4008919 - RNA, 13 nt, Human papillomavirus type 11
uaacaaggauggc

SEQ ID NO: 4008920 - RNA, 18 nt, Human papillomavirus type 11
uaacacaacauuaccaaa

SEQ ID NO: 4008921 - RNA, 16 nt, Human papillomavirus type 11
uaacauuaacauauag

SEQ ID NO: 4008922 - RNA, 12 nt, Human papillomavirus type 11
uaaccugucacu

SEQ ID NO: 4008923 - RNA, 22 nt, Human papillomavirus type 11
uacacaaauaucagaagaugag

SEQ ID NO: 4008924 - RNA, 20 nt, Human papillomavirus type 11
uacuaaucccauauguugug

SEQ ID NO: 4008925 - RNA, 20 nt, Human papillomavirus type 11
uacuauugcagaucaaauau

SEQ ID NO: 4008926 - RNA, 17 nt, Human papillomavirus type 11
uacugcauuuguuguag

SEQ ID NO: 4008927 - RNA, 23 nt, Human papillomavirus type 11
uacuuggauuguuguuacuacau

SEQ ID NO: 4008928 - RNA, 18 nt, Human papillomavirus type 11
uauaaacauuuguuugaa

SEQ ID NO: 4008929 - RNA, 12 nt, Human papillomavirus type 11
uauacacauaua

SEQ ID NO: 4008930 - RNA, 18 nt, Human papillomavirus type 11
uauacaguguguggugua

SEQ ID NO: 4008931 - RNA, 15 nt, Human papillomavirus type 11
uauguguacaugaac

SEQ ID NO: 4008932 - RNA, 17 nt, Human papillomavirus type 11
uauguguauguuaugua

SEQ ID NO: 4008933 - RNA, 13 nt, Human papillomavirus type 11
uauguugugugcc

SEQ ID NO: 4008934 - RNA, 14 nt, Human papillomavirus type 11
uauguuuguguaua

SEQ ID NO: 4008935 - RNA, 15 nt, Human papillomavirus type 11
uauguuuguguauau

SEQ ID NO: 4008936 - RNA, 17 nt, Human papillomavirus type 11
uauuauguguguccugu

SEQ ID NO: 4008937 - RNA, 20 nt, Human papillomavirus type 11
uauugaaaugcaaaugcauu

SEQ ID NO: 4008938 - RNA, 14 nt, Human papillomavirus type 11
uauuguacuuauaa

SEQ ID NO: 4008939 - RNA, 21 nt, Human papillomavirus type 11
uauuuuccugccuuuuauaua

SEQ ID NO: 4008940 - RNA, 19 nt, Human papillomavirus type 11
ucauuaugcgacugugcag

SEQ ID NO: 4008941 - RNA, 20 nt, Human papillomavirus type 11
ugagcaauuagaagacagcu

SEQ ID NO: 4008942 - RNA, 14 nt, Human papillomavirus type 11
ugaugacaggcaua

SEQ ID NO: 4008943 - RNA, 15 nt, Human papillomavirus type 11
ugaugacaggcauau

SEQ ID NO: 4008944 - RNA, 17 nt, Human papillomavirus type 11
ugauuccaauuguuuaa

SEQ ID NO: 4008945 - RNA, 16 nt, Human papillomavirus type 11
ugcaauucuuuuuacu

SEQ ID NO: 4008946 - RNA, 14 nt, Human papillomavirus type 11
uggaagcacaggca

SEQ ID NO: 4008947 - RNA, 15 nt, Human papillomavirus type 11
uggaagcacaggcau

SEQ ID NO: 4008948 - RNA, 23 nt, Human papillomavirus type 11
uggauuauguguauaugucacau

SEQ ID NO: 4008949 - RNA, 23 nt, Human papillomavirus type 11
ugguacaggggcugguaguggcg

SEQ ID NO: 4008950 - RNA, 17 nt, Human papillomavirus type 11
ugguacaugucccccag

SEQ ID NO: 4008951 - RNA, 14 nt, Human papillomavirus type 11
uguagcuguacuug

SEQ ID NO: 4008952 - RNA, 18 nt, Human papillomavirus type 11
uguauauauuuguggaau

SEQ ID NO: 4008953 - RNA, 21 nt, Human papillomavirus type 11
uguauauguguauauguuugu

SEQ ID NO: 4008954 - RNA, 15 nt, Human papillomavirus type 11
uguguauauguguau

SEQ ID NO: 4008955 - RNA, 13 nt, Human papillomavirus type 11
uuagauauagacu

SEQ ID NO: 4008956 - RNA, 14 nt, Human papillomavirus type 11
uugaugacaggcau

SEQ ID NO: 4008957 - RNA, 16 nt, Human papillomavirus type 11
uuggauuguuguuacu

SEQ ID NO: 4008958 - RNA, 13 nt, Human papillomavirus type 11
uuguaguguguau

SEQ ID NO: 4008959 - RNA, 15 nt, Human papillomavirus type 11
uuguggaauguguau

SEQ ID NO: 4008960 - RNA, 16 nt, Human papillomavirus type 11
uuguuauugcauuugc

SEQ ID NO: 4008961 - RNA, 14 nt, Human papillomavirus type 11
uuuguguugccuuc

SEQ ID NO: 4008962 - RNA, 18 nt, Human papillomavirus type 11
aaacagggaaauacugug

SEQ ID NO: 4008963 - RNA, 16 nt, Human papillomavirus type 11
aacaacgucagcaauu

SEQ ID NO: 4008964 - RNA, 19 nt, Human papillomavirus type 11
aacacauuaugcauuggaa

SEQ ID NO: 4008965 - RNA, 20 nt, Human papillomavirus type 11
aacgucagcaauuuuuaaac

SEQ ID NO: 4008966 - RNA, 15 nt, Human papillomavirus type 11
aacuauaucaaacau

SEQ ID NO: 4008967 - RNA, 16 nt, Human papillomavirus type 11
aauaccacccaccauu

SEQ ID NO: 4008968 - RNA, 17 nt, Human papillomavirus type 11
aauacugaccuguugcu

SEQ ID NO: 4008969 - RNA, 15 nt, Human papillomavirus type 11
aauaucagaagauga

SEQ ID NO: 4008970 - RNA, 20 nt, Human papillomavirus type 11
acaccuguauauauguauau

SEQ ID NO: 4008971 - RNA, 16 nt, Human papillomavirus type 11
accauuaacuguguca

SEQ ID NO: 4008972 - RNA, 21 nt, Human papillomavirus type 11
acgacucauggguaaaaguaa

SEQ ID NO: 4008973 - RNA, 19 nt, Human papillomavirus type 11
acgcaacaauaauggugau

SEQ ID NO: 4008974 - RNA, 23 nt, Human papillomavirus type 11
acuaaaugugcuaaguguaaauc

SEQ ID NO: 4008975 - RNA, 22 nt, Human papillomavirus type 11
acuaacacuucuuuuauauuug

SEQ ID NO: 4008976 - RNA, 19 nt, Human papillomavirus type 11
acugaaaaaacuaaaugug

SEQ ID NO: 4008977 - RNA, 21 nt, Human papillomavirus type 11
acuuuauugaugacaggcaua

SEQ ID NO: 4008978 - RNA, 14 nt, Human papillomavirus type 11
agaaagugagauaa

SEQ ID NO: 4008979 - RNA, 16 nt, Human papillomavirus type 11
agaauccuuagcaaaa

SEQ ID NO: 4008980 - RNA, 12 nt, Human papillomavirus type 11
agcacaggcauu

SEQ ID NO: 4008981 - RNA, 21 nt, Human papillomavirus type 11
agcucagaagaugagguggac

SEQ ID NO: 4008982 - RNA, 20 nt, Human papillomavirus type 11
aggcguugguguuagugggc

SEQ ID NO: 4008983 - RNA, 18 nt, Human papillomavirus type 11
agguggaggacagugggu

SEQ ID NO: 4008984 - RNA, 15 nt, Human papillomavirus type 11
aguaugguguggaac

SEQ ID NO: 4008985 - RNA, 20 nt, Human papillomavirus type 11
aguccacgguuagacgccau

SEQ ID NO: 4008986 - RNA, 12 nt, Human papillomavirus type 11
agugcuugugga

SEQ ID NO: 4008987 - RNA, 18 nt, Human papillomavirus type 11
aguugaacauacuacuau

SEQ ID NO: 4008988 - RNA, 17 nt, Human papillomavirus type 11
auacccuugggaagcuc

SEQ ID NO: 4008989 - RNA, 21 nt, Human papillomavirus type 11
auaucaauauagaguguuuaa

SEQ ID NO: 4008990 - RNA, 13 nt, Human papillomavirus type 11
auauguguacaua

SEQ ID NO: 4008991 - RNA, 14 nt, Human papillomavirus type 11
auauguguacauaa

SEQ ID NO: 4008992 - RNA, 19 nt, Human papillomavirus type 11
auauguguauguuauguau

SEQ ID NO: 4008993 - RNA, 13 nt, Human papillomavirus type 11
auauuuguggaau

SEQ ID NO: 4008994 - RNA, 17 nt, Human papillomavirus type 11
augcuauugaaaugcaa

SEQ ID NO: 4008995 - RNA, 19 nt, Human papillomavirus type 11
auguaauuccuaaaguuga

SEQ ID NO: 4008996 - RNA, 16 nt, Human papillomavirus type 11
auguauguuuuugugc

SEQ ID NO: 4008997 - RNA, 13 nt, Human papillomavirus type 11
auguuucuuguau

SEQ ID NO: 4008998 - RNA, 18 nt, Human papillomavirus type 11
auuacagggcuguacaug

SEQ ID NO: 4008999 - RNA, 15 nt, Human papillomavirus type 11
auuccaauuguuuaa

SEQ ID NO: 4009000 - RNA, 13 nt, Human papillomavirus type 11
auuuguuugaauu

SEQ ID NO: 4009001 - RNA, 14 nt, Human papillomavirus type 11
caagaccuuuugcu

SEQ ID NO: 4009002 - RNA, 12 nt, Human papillomavirus type 11
caauuguaacau

SEQ ID NO: 4009003 - RNA, 17 nt, Human papillomavirus type 11
cacauuaugcauuggaa

SEQ ID NO: 4009004 - RNA, 14 nt, Human papillomavirus type 11
caccauuaacugug

SEQ ID NO: 4009005 - RNA, 15 nt, Human papillomavirus type 11
cacguccgccagugc

SEQ ID NO: 4009006 - RNA, 17 nt, Human papillomavirus type 11
cagaagaugaggaagag

SEQ ID NO: 4009007 - RNA, 15 nt, Human papillomavirus type 11
cagcucagaagauga

SEQ ID NO: 4009008 - RNA, 16 nt, Human papillomavirus type 11
cagcucagaagaugag

SEQ ID NO: 4009009 - RNA, 16 nt, Human papillomavirus type 11
cagguacacaaauauc

SEQ ID NO: 4009010 - RNA, 15 nt, Human papillomavirus type 11
cauaaugcuauugaa

SEQ ID NO: 4009011 - RNA, 19 nt, Human papillomavirus type 11
cauaguagagcacacuaca

SEQ ID NO: 4009012 - RNA, 20 nt, Human papillomavirus type 11
cauauauaccugcaggacaa

SEQ ID NO: 4009013 - RNA, 17 nt, Human papillomavirus type 11
caugaacuagaguaaac

SEQ ID NO: 4009014 - RNA, 13 nt, Human papillomavirus type 11
cauuacaggacac

SEQ ID NO: 4009015 - RNA, 16 nt, Human papillomavirus type 11
cauuuauuguaaccau

SEQ ID NO: 4009016 - RNA, 16 nt, Human papillomavirus type 11
ccuguugcuguggaug

SEQ ID NO: 4009017 - RNA, 17 nt, Human papillomavirus type 11
cucccaagccugcuauu

SEQ ID NO: 4009018 - RNA, 15 nt, Human papillomavirus type 11
cugcuauuacugggg

SEQ ID NO: 4009019 - RNA, 18 nt, Human papillomavirus type 11
cuguuguuauugcauuug

SEQ ID NO: 4009020 - RNA, 20 nt, Human papillomavirus type 11
cuguuguuauugcauuugca

SEQ ID NO: 4009021 - RNA, 20 nt, Human papillomavirus type 11
gacaccaguuaugaaaugug

SEQ ID NO: 4009022 - RNA, 21 nt, Human papillomavirus type 11
gacagcucagaagaugaggug

SEQ ID NO: 4009023 - RNA, 15 nt, Human papillomavirus type 11
gacgauucagguaca

SEQ ID NO: 4009024 - RNA, 14 nt, Human papillomavirus type 11
gacguaaacgugcg

SEQ ID NO: 4009025 - RNA, 21 nt, Human papillomavirus type 11
gaggggucgggguguacagga

SEQ ID NO: 4009026 - RNA, 19 nt, Human papillomavirus type 11
gauacaugguuguuucugu

SEQ ID NO: 4009027 - RNA, 16 nt, Human papillomavirus type 11
gauauugccuguuguu

SEQ ID NO: 4009028 - RNA, 23 nt, Human papillomavirus type 11
gaugaggaagaggagguggagga

SEQ ID NO: 4009029 - RNA, 19 nt, Human papillomavirus type 11
gcaacaacuacaacauuga

SEQ ID NO: 4009030 - RNA, 19 nt, Human papillomavirus type 11
gcaaggccacugguacaug

SEQ ID NO: 4009031 - RNA, 14 nt, Human papillomavirus type 11
gcauuggaaaugca

SEQ ID NO: 4009032 - RNA, 17 nt, Human papillomavirus type 11
gcauuugcaguauguau

SEQ ID NO: 4009033 - RNA, 14 nt, Human papillomavirus type 11
gccacugguacaug

SEQ ID NO: 4009034 - RNA, 16 nt, Human papillomavirus type 11
gccauaguagagcaca

SEQ ID NO: 4009035 - RNA, 16 nt, Human papillomavirus type 11
gcguauguuaaacgca

SEQ ID NO: 4009036 - RNA, 18 nt, Human papillomavirus type 11
gcuaugagcaauuagaag

SEQ ID NO: 4009037 - RNA, 21 nt, Human papillomavirus type 11
gcuauugaaaugcaaaugcau

SEQ ID NO: 4009038 - RNA, 14 nt, Human papillomavirus type 11
ggaagcacaggcau

SEQ ID NO: 4009039 - RNA, 17 nt, Human papillomavirus type 11
ggacauuacaggacacc

SEQ ID NO: 4009040 - RNA, 13 nt, Human papillomavirus type 11
ggaugugacagca

SEQ ID NO: 4009041 - RNA, 14 nt, Human papillomavirus type 11
guauauguguacau

SEQ ID NO: 4009042 - RNA, 22 nt, Human papillomavirus type 11
gugauaauggagauuaugugua

SEQ ID NO: 4009043 - RNA, 19 nt, Human papillomavirus type 11
gugauguuaaccugucacu

SEQ ID NO: 4009044 - RNA, 15 nt, Human papillomavirus type 11
gugcuauuuuccugc

SEQ ID NO: 4009045 - RNA, 19 nt, Human papillomavirus type 11
guuacauugcuaugagcaa

SEQ ID NO: 4009046 - RNA, 21 nt, Human papillomavirus type 11
uaauggagauuauguguacau

SEQ ID NO: 4009047 - RNA, 14 nt, Human papillomavirus type 11
uacaaauugcugca

SEQ ID NO: 4009048 - RNA, 20 nt, Human papillomavirus type 11
uaccaccauuaacuguguca

SEQ ID NO: 4009049 - RNA, 22 nt, Human papillomavirus type 11
uacuaacacugugugugugcua

SEQ ID NO: 4009050 - RNA, 18 nt, Human papillomavirus type 11
uagugccuguacaaauug

SEQ ID NO: 4009051 - RNA, 21 nt, Human papillomavirus type 11
uauauauguauauguguacau

SEQ ID NO: 4009052 - RNA, 22 nt, Human papillomavirus type 11
uauauauuuguggaauguguau

SEQ ID NO: 4009053 - RNA, 10 nt, Human papillomavirus type 11
uauauguuuc

SEQ ID NO: 4009054 - RNA, 23 nt, Human papillomavirus type 11
uauauguuucuuguauuguguau

SEQ ID NO: 4009055 - RNA, 15 nt, Human papillomavirus type 11
uaucagaagaugagg

SEQ ID NO: 4009056 - RNA, 20 nt, Human papillomavirus type 11
uaucugauuuuguaguauau

SEQ ID NO: 4009057 - RNA, 19 nt, Human papillomavirus type 11
uauguaaguccuauaagca

SEQ ID NO: 4009058 - RNA, 14 nt, Human papillomavirus type 11
uaugucauuacauu

SEQ ID NO: 4009059 - RNA, 14 nt, Human papillomavirus type 11
uauguuguuaugua

SEQ ID NO: 4009060 - RNA, 22 nt, Human papillomavirus type 11
uauguuguuguaguguguauau

SEQ ID NO: 4009061 - RNA, 22 nt, Human papillomavirus type 11
uauguuucuuguauuguguaua

SEQ ID NO: 4009062 - RNA, 14 nt, Human papillomavirus type 11
uauuauauuauaua

SEQ ID NO: 4009063 - RNA, 12 nt, Human papillomavirus type 11
uauuuuccugcc

SEQ ID NO: 4009064 - RNA, 18 nt, Human papillomavirus type 11
ucagccacacaacuauau

SEQ ID NO: 4009065 - RNA, 15 nt, Human papillomavirus type 11
ucugauuuuguagua

SEQ ID NO: 4009066 - RNA, 16 nt, Human papillomavirus type 11
ugaauuagcaucuuca

SEQ ID NO: 4009067 - RNA, 18 nt, Human papillomavirus type 11
ugauucaucccuguuuga

SEQ ID NO: 4009068 - RNA, 17 nt, Human papillomavirus type 11
ugcagccuccugacccu

SEQ ID NO: 4009069 - RNA, 13 nt, Human papillomavirus type 11
uggauuaugugua

SEQ ID NO: 4009070 - RNA, 14 nt, Human papillomavirus type 11
uguaacauuaacau

SEQ ID NO: 4009071 - RNA, 18 nt, Human papillomavirus type 11
uguauauguguauauguu

SEQ ID NO: 4009072 - RNA, 15 nt, Human papillomavirus type 11
uguauauguuucuug

SEQ ID NO: 4009073 - RNA, 18 nt, Human papillomavirus type 11
uguauguuuuugugcaau

SEQ ID NO: 4009074 - RNA, 13 nt, Human papillomavirus type 11
ugugguauggaca

SEQ ID NO: 4009075 - RNA, 17 nt, Human papillomavirus type 11
uguuguuacuacauuac

SEQ ID NO: 4009076 - RNA, 23 nt, Human papillomavirus type 11
uguuucugugguuguuuacugca

SEQ ID NO: 4009077 - RNA, 23 nt, Human papillomavirus type 11
uuacaccuguauauauguauaug

SEQ ID NO: 4009078 - RNA, 19 nt, Human papillomavirus type 11
uuaccaaauacugaccugu

SEQ ID NO: 4009079 - RNA, 19 nt, Human papillomavirus type 11
uuauacaguguguggugua

SEQ ID NO: 4009080 - RNA, 18 nt, Human papillomavirus type 11
uuaugcauuggaaaugca

SEQ ID NO: 4009081 - RNA, 17 nt, Human papillomavirus type 11
uuauuaaugcuggugca

SEQ ID NO: 4009082 - RNA, 16 nt, Human papillomavirus type 11
uucaucccuguuugac

SEQ ID NO: 4009083 - RNA, 14 nt, Human papillomavirus type 11
uugcagaucaaaua

SEQ ID NO: 4009084 - RNA, 22 nt, Human papillomavirus type 11
uugcauuaccugauucaucccu

SEQ ID NO: 4009085 - RNA, 21 nt, Human papillomavirus type 11
uuguaaccauuacaccuguau

SEQ ID NO: 4009086 - RNA, 15 nt, Human papillomavirus type 11
uuguguauaugugua

SEQ ID NO: 4009087 - RNA, 16 nt, Human papillomavirus type 11
uuguguauauguguau

SEQ ID NO: 4009088 - RNA, 13 nt, Human papillomavirus type 11
uuguuauguaugu

SEQ ID NO: 4009089 - RNA, 17 nt, Human papillomavirus type 11
uuuaugguagaagccau

SEQ ID NO: 4009090 - RNA, 20 nt, Human papillomavirus type 11
uuuucgguugcccuuacaua

SEQ ID NO: 4009091 - RNA, 17 nt, Human papillomavirus type 11
uauaauauuaauaucug

SEQ ID NO: 4009092 - RNA, 16 nt, Human papillomavirus type 11
uauacacauauacauu

SEQ ID NO: 4009093 - RNA, 15 nt, Human papillomavirus type 11
uauauguuuguguau

SEQ ID NO: 4009094 - RNA, 20 nt, Human papillomavirus type 11
uaucaauauagaguguuuaa

SEQ ID NO: 4009095 - RNA, 12 nt, Human papillomavirus type 11
uaucugauuuug

SEQ ID NO: 4009096 - RNA, 15 nt, Human papillomavirus type 11
uauguuuuugugcaa

SEQ ID NO: 4009097 - RNA, 20 nt, Human papillomavirus type 11
uauguuuuugugcaauaaac

SEQ ID NO: 4009098 - RNA, 18 nt, Human papillomavirus type 11
uauuacuacacaaagcaa

SEQ ID NO: 4009099 - RNA, 16 nt, Human papillomavirus type 11
uauuacucuaucaaaa

SEQ ID NO: 4009100 - RNA, 13 nt, Human papillomavirus type 11
uccaauuguuuaa

SEQ ID NO: 4009101 - RNA, 23 nt, Human papillomavirus type 11
ucccaagccugcuauuacugggg

SEQ ID NO: 4009102 - RNA, 22 nt, Human papillomavirus type 11
uccuaaaguugaacauacuacu

SEQ ID NO: 4009103 - RNA, 17 nt, Human papillomavirus type 11
ugaggcaccacauaaaa

SEQ ID NO: 4009104 - RNA, 19 nt, Human papillomavirus type 11
ugauacaugguuguuucug

SEQ ID NO: 4009105 - RNA, 20 nt, Human papillomavirus type 11
ugauuuuguaguauauacau

SEQ ID NO: 4009106 - RNA, 22 nt, Human papillomavirus type 11
ugcaggguauauacccuuggga

SEQ ID NO: 4009107 - RNA, 17 nt, Human papillomavirus type 11
ugcauuggaaaugcaua

SEQ ID NO: 4009108 - RNA, 18 nt, Human papillomavirus type 11
ugccuuuuauauacacau

SEQ ID NO: 4009109 - RNA, 12 nt, Human papillomavirus type 11
ugcuauuuuccu

SEQ ID NO: 4009110 - RNA, 16 nt, Human papillomavirus type 11
uggaagcacaggcauu

SEQ ID NO: 4009111 - RNA, 18 nt, Human papillomavirus type 11
uggaauguguauguaugu

SEQ ID NO: 4009112 - RNA, 16 nt, Human papillomavirus type 11
uggacauuacaggaca

SEQ ID NO: 4009113 - RNA, 15 nt, Human papillomavirus type 11
uggauuguuguuacu

SEQ ID NO: 4009114 - RNA, 23 nt, Human papillomavirus type 11
ugguagaagccauaguagagcac

SEQ ID NO: 4009115 - RNA, 19 nt, Human papillomavirus type 11
uguacuaaucccauauguu

SEQ ID NO: 4009116 - RNA, 13 nt, Human papillomavirus type 11
uguauauauguau

SEQ ID NO: 4009117 - RNA, 14 nt, Human papillomavirus type 11
uguauauauguaua

SEQ ID NO: 4009118 - RNA, 22 nt, Human papillomavirus type 11
uguauauauguauauguguaca

SEQ ID NO: 4009119 - RNA, 18 nt, Human papillomavirus type 11
uguauuacuacacaaagc

SEQ ID NO: 4009120 - RNA, 19 nt, Human papillomavirus type 11
ugugcaggaccuaaaacga

SEQ ID NO: 4009121 - RNA, 15 nt, Human papillomavirus type 11
ugugcuauuuuccug

SEQ ID NO: 4009122 - RNA, 16 nt, Human papillomavirus type 11
uguggaaccuuggaca

SEQ ID NO: 4009123 - RNA, 22 nt, Human papillomavirus type 11
uguguacauaacauacguguau

SEQ ID NO: 4009124 - RNA, 21 nt, Human papillomavirus type 11
ugugucagagacuaaaggaca

SEQ ID NO: 4009125 - RNA, 19 nt, Human papillomavirus type 11
uguguuuaguguguguaua

SEQ ID NO: 4009126 - RNA, 13 nt, Human papillomavirus type 11
uguugccuucaua

SEQ ID NO: 4009127 - RNA, 23 nt, Human papillomavirus type 11
uuacaacacagccaaaaaaggua

SEQ ID NO: 4009128 - RNA, 17 nt, Human papillomavirus type 11
uuaugaaauguggcuaa

SEQ ID NO: 4009129 - RNA, 15 nt, Human papillomavirus type 11
uuauguauguuaugu

SEQ ID NO: 4009130 - RNA, 14 nt, Human papillomavirus type 11
uuauguauguuugu

SEQ ID NO: 4009131 - RNA, 18 nt, Human papillomavirus type 11
uuauuauguguguccugu

SEQ ID NO: 4009132 - RNA, 16 nt, Human papillomavirus type 11
uugauggcugugaaga

SEQ ID NO: 4009133 - RNA, 12 nt, Human papillomavirus type 11
uuggaaaugcau

SEQ ID NO: 4009134 - RNA, 15 nt, Human papillomavirus type 11
uuguaguauauacau

SEQ ID NO: 4009135 - RNA, 14 nt, Human papillomavirus type 11
uuuaguguguguau

SEQ ID NO: 4009136 - RNA, 11 nt, Human papillomavirus type 11
uuuauauacac

SEQ ID NO: 4009137 - RNA, 20 nt, Human papillomavirus type 11
uuucugugguuguuuacugc

SEQ ID NO: 4009138 - RNA, 21 nt, Human papillomavirus type 11
uuuguguguuuagugugugua

SEQ ID NO: 4009139 - RNA, 13 nt, Human papillomavirus type 11
uuuuaucaugcca

SEQ ID NO: 4009140 - RNA, 17 nt, Human papillomavirus type 11
uuuuuaaacaguguaaa

SEQ ID NO: 4009141 - RNA, 16 nt, Human papillomavirus type 16
aaaacaugcaaacagg

SEQ ID NO: 4009142 - RNA, 23 nt, Human papillomavirus type 16
aaaauguuuaagauauagauuua

SEQ ID NO: 4009143 - RNA, 15 nt, Human papillomavirus type 16
aaacguucugcaaaa

SEQ ID NO: 4009144 - RNA, 14 nt, Human papillomavirus type 16
aaagcauuacaagc

SEQ ID NO: 4009145 - RNA, 19 nt, Human papillomavirus type 16
aaaugcuuguguaacuauu

SEQ ID NO: 4009146 - RNA, 15 nt, Human papillomavirus type 16
aacaggauguauaaa

SEQ ID NO: 4009147 - RNA, 22 nt, Human papillomavirus type 16
aagcacggaugaauauguugca

SEQ ID NO: 4009148 - RNA, 11 nt, Human papillomavirus type 16
aauaaagcauu

SEQ ID NO: 4009149 - RNA, 20 nt, Human papillomavirus type 16
aaugcauuauacaaacugga

SEQ ID NO: 4009150 - RNA, 22 nt, Human papillomavirus type 16
aauggcaacgugaccaauuuuu

SEQ ID NO: 4009151 - RNA, 22 nt, Human papillomavirus type 16
aaugugcuauuuauuacaaggc

SEQ ID NO: 4009152 - RNA, 21 nt, Human papillomavirus type 16
acauaugcaauacaaugcauu

SEQ ID NO: 4009153 - RNA, 11 nt, Human papillomavirus type 16
acauccagacu

SEQ ID NO: 4009154 - RNA, 20 nt, Human papillomavirus type 16
acgcuuuuuaauuacauaau

SEQ ID NO: 4009155 - RNA, 14 nt, Human papillomavirus type 16
acuauauuugcuac

SEQ ID NO: 4009156 - RNA, 13 nt, Human papillomavirus type 16
acugcagugucgu

SEQ ID NO: 4009157 - RNA, 17 nt, Human papillomavirus type 16
acugcauccacaacauu

SEQ ID NO: 4009158 - RNA, 18 nt, Human papillomavirus type 16
agaaaccauaaucuacca

SEQ ID NO: 4009159 - RNA, 18 nt, Human papillomavirus type 16
agacauaugcaauacaau

SEQ ID NO: 4009160 - RNA, 22 nt, Human papillomavirus type 16
agacauaugcaauacaaugcau

SEQ ID NO: 4009161 - RNA, 21 nt, Human papillomavirus type 16
aggugaugcuaauacuuuaaa

SEQ ID NO: 4009162 - RNA, 19 nt, Human papillomavirus type 16
agguucuaaaacgaaagua

SEQ ID NO: 4009163 - RNA, 13 nt, Human papillomavirus type 16
agugauacaggug

SEQ ID NO: 4009164 - RNA, 14 nt, Human papillomavirus type 16
aguguauuuaacug

SEQ ID NO: 4009165 - RNA, 17 nt, Human papillomavirus type 16
auaaauaaacuuauugu

SEQ ID NO: 4009166 - RNA, 20 nt, Human papillomavirus type 16
auaauguaauuguuacauau

SEQ ID NO: 4009167 - RNA, 16 nt, Human papillomavirus type 16
aucuugauacugcauc

SEQ ID NO: 4009168 - RNA, 20 nt, Human papillomavirus type 16
augacgagaacgaaaaugac

SEQ ID NO: 4009169 - RNA, 15 nt, Human papillomavirus type 16
auggagacauaugca

SEQ ID NO: 4009170 - RNA, 20 nt, Human papillomavirus type 16
auguauagaaaaacaaagua

SEQ ID NO: 4009171 - RNA, 22 nt, Human papillomavirus type 16
auguuuaagauauagauuuaaa

SEQ ID NO: 4009172 - RNA, 13 nt, Human papillomavirus type 16
auguuuguaugug

SEQ ID NO: 4009173 - RNA, 18 nt, Human papillomavirus type 16
auuauacaaacuggacac

SEQ ID NO: 4009174 - RNA, 23 nt, Human papillomavirus type 16
auuuaacacaggcagaaacagag

SEQ ID NO: 4009175 - RNA, 20 nt, Human papillomavirus type 16
auuugcaaccagagacaacu

SEQ ID NO: 4009176 - RNA, 22 nt, Human papillomavirus type 16
auuugugaagaagcaucaguaa

SEQ ID NO: 4009177 - RNA, 14 nt, Human papillomavirus type 16
auuuuugucucaag

SEQ ID NO: 4009178 - RNA, 23 nt, Human papillomavirus type 16
caauaaguuugguuuuccugaca

SEQ ID NO: 4009179 - RNA, 15 nt, Human papillomavirus type 16
caauggggaagaggg

SEQ ID NO: 4009180 - RNA, 17 nt, Human papillomavirus type 16
caauuguuacacuuaca

SEQ ID NO: 4009181 - RNA, 23 nt, Human papillomavirus type 16
cacaauauaguaaugaaaagugg

SEQ ID NO: 4009182 - RNA, 13 nt, Human papillomavirus type 16
cagaaacagagac

SEQ ID NO: 4009183 - RNA, 15 nt, Human papillomavirus type 16
cagaaacagagacag

SEQ ID NO: 4009184 - RNA, 13 nt, Human papillomavirus type 16
cagcucagaggag

SEQ ID NO: 4009185 - RNA, 15 nt, Human papillomavirus type 16
cagcucagaggagga

SEQ ID NO: 4009186 - RNA, 15 nt, Human papillomavirus type 16
caucaguaacugugg

SEQ ID NO: 4009187 - RNA, 17 nt, Human papillomavirus type 16
cauuacuggcgugcuuu

SEQ ID NO: 4009188 - RNA, 16 nt, Human papillomavirus type 16
cccaucuguucucaga

SEQ ID NO: 4009189 - RNA, 23 nt, Human papillomavirus type 16
ccuaagguugaaggcaaaacuau

SEQ ID NO: 4009190 - RNA, 23 nt, Human papillomavirus type 16
ccuugaaguguauuuaacugcac

SEQ ID NO: 4009191 - RNA, 13 nt, Human papillomavirus type 16
cuacauacacauc

SEQ ID NO: 4009192 - RNA, 16 nt, Human papillomavirus type 16
aaaacauggauauaca

SEQ ID NO: 4009193 - RNA, 14 nt, Human papillomavirus type 16
aaacacguguguau

SEQ ID NO: 4009194 - RNA, 20 nt, Human papillomavirus type 16
aaacuauugcugaacaaaua

SEQ ID NO: 4009195 - RNA, 12 nt, Human papillomavirus type 16
aaauaaacuuau

SEQ ID NO: 4009196 - RNA, 16 nt, Human papillomavirus type 16
aaaucuugauacugca

SEQ ID NO: 4009197 - RNA, 19 nt, Human papillomavirus type 16
aaaugggauuuaaacauau

SEQ ID NO: 4009198 - RNA, 19 nt, Human papillomavirus type 16
aacauccagacuacuugca

SEQ ID NO: 4009199 - RNA, 17 nt, Human papillomavirus type 16
aacuauugcugaacaaa

SEQ ID NO: 4009200 - RNA, 11 nt, Human papillomavirus type 16
aauaaacuguu

SEQ ID NO: 4009201 - RNA, 18 nt, Human papillomavirus type 16
aauacuuuaaaauguuua

SEQ ID NO: 4009202 - RNA, 19 nt, Human papillomavirus type 16
aauguaaaacauaaaagug

SEQ ID NO: 4009203 - RNA, 16 nt, Human papillomavirus type 16
acaagcaauugaacug

SEQ ID NO: 4009204 - RNA, 11 nt, Human papillomavirus type 16
acauacacaug

SEQ ID NO: 4009205 - RNA, 19 nt, Human papillomavirus type 16
acccaacuuuauaaaacau

SEQ ID NO: 4009206 - RNA, 22 nt, Human papillomavirus type 16
accucauuuuauaauccagaua

SEQ ID NO: 4009207 - RNA, 17 nt, Human papillomavirus type 16
acuuuaaaauguuuaag

SEQ ID NO: 4009208 - RNA, 23 nt, Human papillomavirus type 16
agcagaaccggacagagcccauu

SEQ ID NO: 4009209 - RNA, 22 nt, Human papillomavirus type 16
aggccucccacagcuacagaua

SEQ ID NO: 4009210 - RNA, 17 nt, Human papillomavirus type 16
agugcuuaugcagcaaa

SEQ ID NO: 4009211 - RNA, 17 nt, Human papillomavirus type 16
aguguauuuaacugcac

SEQ ID NO: 4009212 - RNA, 17 nt, Human papillomavirus type 16
auaaacacguguguaug

SEQ ID NO: 4009213 - RNA, 15 nt, Human papillomavirus type 16
auacuuuaaaauguu

SEQ ID NO: 4009214 - RNA, 14 nt, Human papillomavirus type 16
augcaguacagguu

SEQ ID NO: 4009215 - RNA, 18 nt, Human papillomavirus type 16
auggagacauaugcaaua

SEQ ID NO: 4009216 - RNA, 21 nt, Human papillomavirus type 16
auguaauuguuacauauaauu

SEQ ID NO: 4009217 - RNA, 22 nt, Human papillomavirus type 16
auguuagauuugcaaccagaga

SEQ ID NO: 4009218 - RNA, 17 nt, Human papillomavirus type 16
auuacaagcaauugaac

SEQ ID NO: 4009219 - RNA, 15 nt, Human papillomavirus type 16
auuauauuuguuuau

SEQ ID NO: 4009220 - RNA, 21 nt, Human papillomavirus type 16
auuguuacacuuacauaugau

SEQ ID NO: 4009221 - RNA, 16 nt, Human papillomavirus type 16
auuuaaacauauuaac

SEQ ID NO: 4009222 - RNA, 18 nt, Human papillomavirus type 16
auuugaaagcgaagacag

SEQ ID NO: 4009223 - RNA, 15 nt, Human papillomavirus type 16
caaguggugccaaca

SEQ ID NO: 4009224 - RNA, 22 nt, Human papillomavirus type 16
caaugcauuauacaaacuggac

SEQ ID NO: 4009225 - RNA, 13 nt, Human papillomavirus type 16
caccuacauugca

SEQ ID NO: 4009226 - RNA, 15 nt, Human papillomavirus type 16
cagaaccggacagag

SEQ ID NO: 4009227 - RNA, 16 nt, Human papillomavirus type 16
caggcagaaacagaga

SEQ ID NO: 4009228 - RNA, 20 nt, Human papillomavirus type 16
cagguaccaauggggaagag

SEQ ID NO: 4009229 - RNA, 14 nt, Human papillomavirus type 16
caugaauauauguu

SEQ ID NO: 4009230 - RNA, 17 nt, Human papillomavirus type 16
caugcaaacaggcaggu

SEQ ID NO: 4009231 - RNA, 15 nt, Human papillomavirus type 16
ccagcuggacaagca

SEQ ID NO: 4009232 - RNA, 18 nt, Human papillomavirus type 16
ccauccuuuauuaaauaa

SEQ ID NO: 4009233 - RNA, 13 nt, Human papillomavirus type 16
cucagaggaggag

SEQ ID NO: 4009234 - RNA, 19 nt, Human papillomavirus type 16
cucauuuuauaauccagau

SEQ ID NO: 4009235 - RNA, 22 nt, Human papillomavirus type 16
cugcaccaacaggauguauaaa

SEQ ID NO: 4009236 - RNA, 22 nt, Human papillomavirus type 16
cuugaaguguauuuaacugcac

SEQ ID NO: 4009237 - RNA, 18 nt, Human papillomavirus type 16
cuuugcuuugugugcuuu

SEQ ID NO: 4009238 - RNA, 15 nt, Human papillomavirus type 16
gaaacagagacagca

SEQ ID NO: 4009239 - RNA, 20 nt, Human papillomavirus type 16
auguauaaaaaaacauggau

SEQ ID NO: 4009240 - RNA, 17 nt, Human papillomavirus type 16
augucuauaugacaaau

SEQ ID NO: 4009241 - RNA, 16 nt, Human papillomavirus type 16
auguugcacgcacaaa

SEQ ID NO: 4009242 - RNA, 20 nt, Human papillomavirus type 16
auuacuuaacaaugcgacac

SEQ ID NO: 4009243 - RNA, 14 nt, Human papillomavirus type 16
auugaacugcaacu

SEQ ID NO: 4009244 - RNA, 14 nt, Human papillomavirus type 16
auuuaaaaagcauu

SEQ ID NO: 4009245 - RNA, 13 nt, Human papillomavirus type 16
auuuaccugaccc

SEQ ID NO: 4009246 - RNA, 17 nt, Human papillomavirus type 16
auuuuuaauacauacac

SEQ ID NO: 4009247 - RNA, 22 nt, Human papillomavirus type 16
caaaaacuauuacagugucuac

SEQ ID NO: 4009248 - RNA, 15 nt, Human papillomavirus type 16
caaaacaacauagag

SEQ ID NO: 4009249 - RNA, 20 nt, Human papillomavirus type 16
caagcaauugaacugcaacu

SEQ ID NO: 4009250 - RNA, 22 nt, Human papillomavirus type 16
caccaaguggugccaacacugg

SEQ ID NO: 4009251 - RNA, 22 nt, Human papillomavirus type 16
caggauguauaaaaaaacaugg

SEQ ID NO: 4009252 - RNA, 22 nt, Human papillomavirus type 16
cagguaccaauggggaagaggg

SEQ ID NO: 4009253 - RNA, 20 nt, Human papillomavirus type 16
caguuugauggagacauaug

SEQ ID NO: 4009254 - RNA, 17 nt, Human papillomavirus type 16
cauauauauauuuguga

SEQ ID NO: 4009255 - RNA, 20 nt, Human papillomavirus type 16
cauguccaccugacauuaua

SEQ ID NO: 4009256 - RNA, 14 nt, Human papillomavirus type 16
cauuauacaaacug

SEQ ID NO: 4009257 - RNA, 20 nt, Human papillomavirus type 16
cauuauuuuuaauacauaca

SEQ ID NO: 4009258 - RNA, 21 nt, Human papillomavirus type 16
ccaaguggugccaacacuggc

SEQ ID NO: 4009259 - RNA, 21 nt, Human papillomavirus type 16
ccauauagacuauuggaaaca

SEQ ID NO: 4009260 - RNA, 15 nt, Human papillomavirus type 16
ccuguuuuuguuuua

SEQ ID NO: 4009261 - RNA, 19 nt, Human papillomavirus type 16
cuaauacuuuaaaauguuu

SEQ ID NO: 4009262 - RNA, 17 nt, Human papillomavirus type 16
cuauaugacaaaucuug

SEQ ID NO: 4009263 - RNA, 16 nt, Human papillomavirus type 16
cuaugguuuaaacuug

SEQ ID NO: 4009264 - RNA, 17 nt, Human papillomavirus type 16
cugaucucuacuguuau

SEQ ID NO: 4009265 - RNA, 21 nt, Human papillomavirus type 16
cuggcuguaucaaagaauaaa

SEQ ID NO: 4009266 - RNA, 23 nt, Human papillomavirus type 16
gaauauguugcacgcacaaacau

SEQ ID NO: 4009267 - RNA, 16 nt, Human papillomavirus type 16
gagaugcaguacaggu

SEQ ID NO: 4009268 - RNA, 20 nt, Human papillomavirus type 16
gagcugcaaaaaggagauua

SEQ ID NO: 4009269 - RNA, 16 nt, Human papillomavirus type 16
gaggguacgggaugua

SEQ ID NO: 4009270 - RNA, 16 nt, Human papillomavirus type 16
gauccugcagguacca

SEQ ID NO: 4009271 - RNA, 20 nt, Human papillomavirus type 16
gccucccacagcuacagaua

SEQ ID NO: 4009272 - RNA, 14 nt, Human papillomavirus type 16
gcuggacaagcaga

SEQ ID NO: 4009273 - RNA, 13 nt, Human papillomavirus type 16
gcuuaugcagcaa

SEQ ID NO: 4009274 - RNA, 16 nt, Human papillomavirus type 16
gcuuuugugugucugc

SEQ ID NO: 4009275 - RNA, 15 nt, Human papillomavirus type 16
ggcagaaacagagac

SEQ ID NO: 4009276 - RNA, 21 nt, Human papillomavirus type 16
guuucaacaccuacuaauugu

SEQ ID NO: 4009277 - RNA, 16 nt, Human papillomavirus type 16
uaacuauugugucaug

SEQ ID NO: 4009278 - RNA, 21 nt, Human papillomavirus type 16
uaaguuguauguguguuugua

SEQ ID NO: 4009279 - RNA, 20 nt, Human papillomavirus type 16
uaauaaacuguuauuacuua

SEQ ID NO: 4009280 - RNA, 12 nt, Human papillomavirus type 16
uaauuacauaau

SEQ ID NO: 4009281 - RNA, 13 nt, Human papillomavirus type 16
uacauacacauca

SEQ ID NO: 4009282 - RNA, 14 nt, Human papillomavirus type 16
uacuuuaaaauguu

SEQ ID NO: 4009283 - RNA, 22 nt, Human papillomavirus type 16
uagauuaaaagcuauauguaua

SEQ ID NO: 4009284 - RNA, 21 nt, Human papillomavirus type 16
uagauuuuauaguaaaugaua

SEQ ID NO: 4009285 - RNA, 16 nt, Human papillomavirus type 16
uagguguuuuauugua

SEQ ID NO: 4009286 - RNA, 20 nt, Human papillomavirus type 16
uauagacuauuggaaacaca

SEQ ID NO: 4009287 - RNA, 13 nt, Human papillomavirus type 16
uauauguuuguau

SEQ ID NO: 4009288 - RNA, 21 nt, Human papillomavirus type 16
uauauguuuguaugugcuugu

SEQ ID NO: 4009289 - RNA, 15 nt, Human papillomavirus type 16
uaugcagcaaaugca

SEQ ID NO: 4009290 - RNA, 20 nt, Human papillomavirus type 16
uaugucuauaugacaaaucu

SEQ ID NO: 4009291 - RNA, 16 nt, Human papillomavirus type 16
uauuacuauuguggau

SEQ ID NO: 4009292 - RNA, 18 nt, Human papillomavirus type 16
uccacaacauuacuggcg

SEQ ID NO: 4009293 - RNA, 19 nt, Human papillomavirus type 16
uccacaacauuacuggcgu

SEQ ID NO: 4009294 - RNA, 18 nt, Human papillomavirus type 16
ugacacagaaaaugcuag

SEQ ID NO: 4009295 - RNA, 21 nt, Human papillomavirus type 16
ugcugaacaaauauuacaaua

SEQ ID NO: 4009296 - RNA, 11 nt, Human papillomavirus type 16
ugcuuuugugu

SEQ ID NO: 4009297 - RNA, 15 nt, Human papillomavirus type 16
uguauuuaacugcac

SEQ ID NO: 4009298 - RNA, 18 nt, Human papillomavirus type 16
ugucuacauacacaucau

SEQ ID NO: 4009299 - RNA, 17 nt, Human papillomavirus type 16
ugugccccaucuguucu

SEQ ID NO: 4009300 - RNA, 13 nt, Human papillomavirus type 16
ugugucuacauac

SEQ ID NO: 4009301 - RNA, 14 nt, Human papillomavirus type 16
ugugucuacauaca

SEQ ID NO: 4009302 - RNA, 22 nt, Human papillomavirus type 16
cuauaugacaaaucuugauacu

SEQ ID NO: 4009303 - RNA, 16 nt, Human papillomavirus type 16
cuauuacagugucuac

SEQ ID NO: 4009304 - RNA, 18 nt, Human papillomavirus type 16
cugaucucuacuguuaug

SEQ ID NO: 4009305 - RNA, 21 nt, Human papillomavirus type 16
cugcagguaccaauggggaag

SEQ ID NO: 4009306 - RNA, 22 nt, Human papillomavirus type 16
cuuuugucugugucuacauaca

SEQ ID NO: 4009307 - RNA, 22 nt, Human papillomavirus type 16
cuuuuguugcaagugugacucu

SEQ ID NO: 4009308 - RNA, 18 nt, Human papillomavirus type 16
gaaaaacaaaguagagcu

SEQ ID NO: 4009309 - RNA, 13 nt, Human papillomavirus type 16
gaaccggacagag

SEQ ID NO: 4009310 - RNA, 21 nt, Human papillomavirus type 16
gaccauauagacuauuggaaa

SEQ ID NO: 4009311 - RNA, 23 nt, Human papillomavirus type 16
gaugacgagaacgaaaaugacag

SEQ ID NO: 4009312 - RNA, 18 nt, Human papillomavirus type 16
gcaaaacaacauagagau

SEQ ID NO: 4009313 - RNA, 15 nt, Human papillomavirus type 16
gcacaaaauguguuu

SEQ ID NO: 4009314 - RNA, 22 nt, Human papillomavirus type 16
gcacaugcguuguuuacugcac

SEQ ID NO: 4009315 - RNA, 16 nt, Human papillomavirus type 16
gcaggaacauccagac

SEQ ID NO: 4009316 - RNA, 22 nt, Human papillomavirus type 16
guacauaauguaauuguuacau

SEQ ID NO: 4009317 - RNA, 18 nt, Human papillomavirus type 16
gugggcauuaguggccau

SEQ ID NO: 4009318 - RNA, 17 nt, Human papillomavirus type 16
guuacacuuacauauga

SEQ ID NO: 4009319 - RNA, 19 nt, Human papillomavirus type 16
guugugcguacaaagcaca

SEQ ID NO: 4009320 - RNA, 17 nt, Human papillomavirus type 16
uaaaagugcaauuguua

SEQ ID NO: 4009321 - RNA, 22 nt, Human papillomavirus type 16
uaaaugcuuguguaacuauugu

SEQ ID NO: 4009322 - RNA, 20 nt, Human papillomavirus type 16
uaauaaacacguguguaugu

SEQ ID NO: 4009323 - RNA, 14 nt, Human papillomavirus type 16
uagauuaaaagcua

SEQ ID NO: 4009324 - RNA, 21 nt, Human papillomavirus type 16
uauacaaacuggacacauaua

SEQ ID NO: 4009325 - RNA, 14 nt, Human papillomavirus type 16
uauacuauauuuug

SEQ ID NO: 4009326 - RNA, 15 nt, Human papillomavirus type 16
uaugugcuuguaaau

SEQ ID NO: 4009327 - RNA, 14 nt, Human papillomavirus type 16
ucagaugacgagaa

SEQ ID NO: 4009328 - RNA, 18 nt, Human papillomavirus type 16
ucaggauuacaauacagg

SEQ ID NO: 4009329 - RNA, 17 nt, Human papillomavirus type 16
ucugugucuacauacac

SEQ ID NO: 4009330 - RNA, 20 nt, Human papillomavirus type 16
ugacaaaucuugauacugca

SEQ ID NO: 4009331 - RNA, 18 nt, Human papillomavirus type 16
ugaccaauuuuugucuca

SEQ ID NO: 4009332 - RNA, 23 nt, Human papillomavirus type 16
ugaccauauagacuauuggaaac

SEQ ID NO: 4009333 - RNA, 13 nt, Human papillomavirus type 16
ugcuuuugucugu

SEQ ID NO: 4009334 - RNA, 20 nt, Human papillomavirus type 16
ugguaguccacuuagugaua

SEQ ID NO: 4009335 - RNA, 20 nt, Human papillomavirus type 16
uguacauuguauacugcagu

SEQ ID NO: 4009336 - RNA, 16 nt, Human papillomavirus type 16
ugugugccccaucugu

SEQ ID NO: 4009337 - RNA, 19 nt, Human papillomavirus type 16
ugugugccccaucuguucu

SEQ ID NO: 4009338 - RNA, 23 nt, Human papillomavirus type 16
uguugugguuauucauuguauau

SEQ ID NO: 4009339 - RNA, 19 nt, Human papillomavirus type 16
uuaauacauacacaugcac

SEQ ID NO: 4009340 - RNA, 14 nt, Human papillomavirus type 16
uuaauuacauaaug

SEQ ID NO: 4009341 - RNA, 17 nt, Human papillomavirus type 16
uuauacaaacuggacac

SEQ ID NO: 4009342 - RNA, 13 nt, Human papillomavirus type 16
uugaaguguauuu

SEQ ID NO: 4009343 - RNA, 22 nt, Human papillomavirus type 16
uuguaaauauuaaguuguaugu

SEQ ID NO: 4009344 - RNA, 22 nt, Human papillomavirus type 16
uuuaaaaggugaugcuaauacu

SEQ ID NO: 4009345 - RNA, 12 nt, Human papillomavirus type 16
uuuauuaaauaa

SEQ ID NO: 4009346 - RNA, 13 nt, Human papillomavirus type 16
uuuguuguguaua

SEQ ID NO: 4009347 - RNA, 17 nt, Human papillomavirus type 16
aaacauggauauacagu

SEQ ID NO: 4009348 - RNA, 20 nt, Human papillomavirus type 16
aaagcacacacguagacauu

SEQ ID NO: 4009349 - RNA, 12 nt, Human papillomavirus type 16
aacauccagacu

SEQ ID NO: 4009350 - RNA, 17 nt, Human papillomavirus type 16
aacauggauauacagug

SEQ ID NO: 4009351 - RNA, 18 nt, Human papillomavirus type 16
aacucacaauauaguaau

SEQ ID NO: 4009352 - RNA, 12 nt, Human papillomavirus type 16
aaguuguaugug

SEQ ID NO: 4009353 - RNA, 21 nt, Human papillomavirus type 16
aauaaacuguuauuacuuaac

SEQ ID NO: 4009354 - RNA, 14 nt, Human papillomavirus type 16
aauacauacacaug

SEQ ID NO: 4009355 - RNA, 19 nt, Human papillomavirus type 16
aaugacagcucagaggagg

SEQ ID NO: 4009356 - RNA, 18 nt, Human papillomavirus type 16
acacguguguauguguuu

SEQ ID NO: 4009357 - RNA, 13 nt, Human papillomavirus type 16
acagcuacagaua

SEQ ID NO: 4009358 - RNA, 17 nt, Human papillomavirus type 16
acaggugaagauuuggu

SEQ ID NO: 4009359 - RNA, 19 nt, Human papillomavirus type 16
acauauauauauuugugaa

SEQ ID NO: 4009360 - RNA, 22 nt, Human papillomavirus type 16
acauuacuggcgugcuuuuugc

SEQ ID NO: 4009361 - RNA, 14 nt, Human papillomavirus type 16
acauuauaccuaag

SEQ ID NO: 4009362 - RNA, 17 nt, Human papillomavirus type 16
accaaguggugccaaca

SEQ ID NO: 4009363 - RNA, 20 nt, Human papillomavirus type 16
accauggcugauccugcagg

SEQ ID NO: 4009364 - RNA, 19 nt, Human papillomavirus type 16
accuguuaaugggcacacu

SEQ ID NO: 4009365 - RNA, 15 nt, Human papillomavirus type 16
acgaaaguauuuggu

SEQ ID NO: 4009366 - RNA, 16 nt, Human papillomavirus type 16
acuaugguuuaaacuu

SEQ ID NO: 4009367 - RNA, 13 nt, Human papillomavirus type 16
acuguuauuacuu

SEQ ID NO: 4009368 - RNA, 13 nt, Human papillomavirus type 16
agaaacaauauau

SEQ ID NO: 4009369 - RNA, 13 nt, Human papillomavirus type 16
agaccuguuaaug

SEQ ID NO: 4009370 - RNA, 16 nt, Human papillomavirus type 16
agcaauugaacugcaa

SEQ ID NO: 4009371 - RNA, 12 nt, Human papillomavirus type 16
agcaucaguaac

SEQ ID NO: 4009372 - RNA, 19 nt, Human papillomavirus type 16
aguaaugaaaaguggacau

SEQ ID NO: 4009373 - RNA, 20 nt, Human papillomavirus type 16
aguggccauccuuuauuaaa

SEQ ID NO: 4009374 - RNA, 13 nt, Human papillomavirus type 16
auaauuguuguau

SEQ ID NO: 4009375 - RNA, 13 nt, Human papillomavirus type 16
auauaaacuauau

SEQ ID NO: 4009376 - RNA, 14 nt, Human papillomavirus type 16
auauaauuguugua

SEQ ID NO: 4009377 - RNA, 23 nt, Human papillomavirus type 16
auauaauuguuguauaccauaac

SEQ ID NO: 4009378 - RNA, 23 nt, Human papillomavirus type 16
auauauaacucacaauauaguaa

SEQ ID NO: 4009379 - RNA, 14 nt, Human papillomavirus type 16
auauuaaguuguau

SEQ ID NO: 4009380 - RNA, 20 nt, Human papillomavirus type 16
aucccuauuuuccuauuaaa

SEQ ID NO: 4009381 - RNA, 23 nt, Human papillomavirus type 16
auguauaaaaaaacauggauaua

SEQ ID NO: 4009382 - RNA, 20 nt, Human papillomavirus type 16
augucuauaugacaaaucuu

SEQ ID NO: 4009383 - RNA, 14 nt, Human papillomavirus type 16
auuccauugggaac

SEQ ID NO: 4009384 - RNA, 17 nt, Human papillomavirus type 16
auuggacaggacauaau

SEQ ID NO: 4009385 - RNA, 16 nt, Human papillomavirus type 16
auuuuccuauuaaaaa

SEQ ID NO: 4009386 - RNA, 19 nt, Human papillomavirus type 16
caaaaacuauuacaguguc

SEQ ID NO: 4009387 - RNA, 21 nt, Human papillomavirus type 16
caaaaacuauuacagugucua

SEQ ID NO: 4009388 - RNA, 14 nt, Human papillomavirus type 16
caauugaacugcaa

SEQ ID NO: 4009389 - RNA, 23 nt, Human papillomavirus type 16
cacaugcguuguuuacugcacag

SEQ ID NO: 4009390 - RNA, 14 nt, Human papillomavirus type 16
cacguguguaugug

SEQ ID NO: 4009391 - RNA, 16 nt, Human papillomavirus type 16
caggaacauccagacu

SEQ ID NO: 4009392 - RNA, 23 nt, Human papillomavirus type 16
caggauguauaaaaaaacaugga

SEQ ID NO: 4009393 - RNA, 16 nt, Human papillomavirus type 16
cagguaccaaugggga

SEQ ID NO: 4009394 - RNA, 21 nt, Human papillomavirus type 16
cagguaccaauggggaagagg

SEQ ID NO: 4009395 - RNA, 16 nt, Human papillomavirus type 16
caguuugauggagaca

SEQ ID NO: 4009396 - RNA, 18 nt, Human papillomavirus type 16
cauagagaugcaguacag

SEQ ID NO: 4009397 - RNA, 16 nt, Human papillomavirus type 16
cauccacaacauuacu

SEQ ID NO: 4009398 - RNA, 16 nt, Human papillomavirus type 16
cauuguauacugcagu

SEQ ID NO: 4009399 - RNA, 17 nt, Human papillomavirus type 16
ccauauagacuauugga

SEQ ID NO: 4009400 - RNA, 20 nt, Human papillomavirus type 16
ccucauuuuauaauccagau

SEQ ID NO: 4009401 - RNA, 16 nt, Human papillomavirus type 16
ccugaccccaauaagu

SEQ ID NO: 4009402 - RNA, 18 nt, Human papillomavirus type 16
cgggauguaauggauggu

SEQ ID NO: 4009403 - RNA, 23 nt, Human papillomavirus type 16
cguacuuuggaagaccuguuaau

SEQ ID NO: 4009404 - RNA, 14 nt, Human papillomavirus type 16
cuacuaauuguguu

SEQ ID NO: 4009405 - RNA, 14 nt, Human papillomavirus type 16
cuauuacagugucu

SEQ ID NO: 4009406 - RNA, 22 nt, Human papillomavirus type 16
cuauugcugaacaaauauuaca

SEQ ID NO: 4009407 - RNA, 10 nt, Human papillomavirus type 16
cugugucuac

SEQ ID NO: 4009408 - RNA, 18 nt, Human papillomavirus type 16
gaacagggucggguacag

SEQ ID NO: 4009409 - RNA, 13 nt, Human papillomavirus type 16
gaagaggguacgg

SEQ ID NO: 4009410 - RNA, 24 nt, Human papillomavirus type 16
gaagcaaaacaacauagagaugca

SEQ ID NO: 4009411 - RNA, 15 nt, Human papillomavirus type 16
gacagugauacaggu

SEQ ID NO: 4009412 - RNA, 18 nt, Human papillomavirus type 16
gagguaggucguggucag

SEQ ID NO: 4009413 - RNA, 15 nt, Human papillomavirus type 16
gauggagacauaugc

SEQ ID NO: 4009414 - RNA, 16 nt, Human papillomavirus type 16
gaugguccagcuggac

SEQ ID NO: 4009415 - RNA, 19 nt, Human papillomavirus type 16
gcaaacaggcagguacaug

SEQ ID NO: 4009416 - RNA, 22 nt, Human papillomavirus type 16
gcuuaugcagcaaaugcaggug

SEQ ID NO: 4009417 - RNA, 22 nt, Human papillomavirus type 16
ggaagcaaaacaacauagagau

SEQ ID NO: 4009418 - RNA, 22 nt, Human papillomavirus type 16
ggccagagaaaugggauuuaaa

SEQ ID NO: 4009419 - RNA, 14 nt, Human papillomavirus type 16
ggcugauccugcag

SEQ ID NO: 4009420 - RNA, 13 nt, Human papillomavirus type 16
ggcuguaguggaa

SEQ ID NO: 4009421 - RNA, 16 nt, Human papillomavirus type 16
guaauggaugguuuua

SEQ ID NO: 4009422 - RNA, 16 nt, Human papillomavirus type 16
gucggguacaggcgga

SEQ ID NO: 4009423 - RNA, 17 nt, Human papillomavirus type 16
gugucgucuacauggca

SEQ ID NO: 4009424 - RNA, 19 nt, Human papillomavirus type 16
guuaaugggcacacuagga

SEQ ID NO: 4009425 - RNA, 12 nt, Human papillomavirus type 16
guugaaggcaaa

SEQ ID NO: 4009426 - RNA, 17 nt, Human papillomavirus type 16
uaaaaagcauuguacau

SEQ ID NO: 4009427 - RNA, 21 nt, Human papillomavirus type 16
uaaacacguguguauguguuu

SEQ ID NO: 4009428 - RNA, 13 nt, Human papillomavirus type 16
uaaacuauauuug

SEQ ID NO: 4009429 - RNA, 13 nt, Human papillomavirus type 16
uaauuguuacaua

SEQ ID NO: 4009430 - RNA, 15 nt, Human papillomavirus type 16
uaauuguuacauaua

SEQ ID NO: 4009431 - RNA, 14 nt, Human papillomavirus type 16
uacauacacaugca

SEQ ID NO: 4009432 - RNA, 14 nt, Human papillomavirus type 16
uacauccuguuuuu

SEQ ID NO: 4009433 - RNA, 15 nt, Human papillomavirus type 16
uagaaugugcuauuu

SEQ ID NO: 4009434 - RNA, 19 nt, Human papillomavirus type 16
uaucaggauuacaauacag

SEQ ID NO: 4009435 - RNA, 18 nt, Human papillomavirus type 16
uaugauagugaauggcaa

SEQ ID NO: 4009436 - RNA, 13 nt, Human papillomavirus type 16
uauuacagugucu

SEQ ID NO: 4009437 - RNA, 14 nt, Human papillomavirus type 16
uauuuuuaauacau

SEQ ID NO: 4009438 - RNA, 11 nt, Human papillomavirus type 16
ucaugcaggaa

SEQ ID NO: 4009439 - RNA, 13 nt, Human papillomavirus type 16
uggaagugcaguu

SEQ ID NO: 4009440 - RNA, 19 nt, Human papillomavirus type 16
uguaacuauugugucaugc

SEQ ID NO: 4009441 - RNA, 18 nt, Human papillomavirus type 16
uguacauuguauacugca

SEQ ID NO: 4009442 - RNA, 17 nt, Human papillomavirus type 16
uguauguguguuuguau

SEQ ID NO: 4009443 - RNA, 19 nt, Human papillomavirus type 16
uuaguggauguguagacaa

SEQ ID NO: 4009444 - RNA, 16 nt, Human papillomavirus type 16
uuauaaaacaugcaaa

SEQ ID NO: 4009445 - RNA, 20 nt, Human papillomavirus type 16
uuauuugaaagcgaagacag

SEQ ID NO: 4009446 - RNA, 20 nt, Human papillomavirus type 16
uuggcacaaaauguguuuuu

SEQ ID NO: 4009447 - RNA, 19 nt, Human papillomavirus type 16
uuguauacugcagugucgu

SEQ ID NO: 4009448 - RNA, 22 nt, Human papillomavirus type 16
uugucucaaguuaaaauaccaa

SEQ ID NO: 4009449 - RNA, 19 nt, Human papillomavirus type 16
uuguuacauauaauuguug

SEQ ID NO: 4009450 - RNA, 13 nt, Human papillomavirus type 16
uuuauuguauaua

SEQ ID NO: 4009451 - RNA, 14 nt, Human papillomavirus type 16
uuuuuaauuacaua

SEQ ID NO: 4009452 - RNA, 16 nt, Human papillomavirus type 16
uguuguauaccauaac

SEQ ID NO: 4009453 - RNA, 23 nt, Human papillomavirus type 16
uugaaggcaaaacuauugcugaa

SEQ ID NO: 4009454 - RNA, 18 nt, Human papillomavirus type 16
uuguacguuuccugcuug

SEQ ID NO: 4009455 - RNA, 13 nt, Human papillomavirus type 16
uuguaugugcuug

SEQ ID NO: 4009456 - RNA, 23 nt, Human papillomavirus type 16
uuguuacauauaauuguuguaua

SEQ ID NO: 4009457 - RNA, 13 nt, Human papillomavirus type 16
uuuaaaugcuugu

SEQ ID NO: 4009458 - RNA, 14 nt, Human papillomavirus type 16
uuuuuauuuucaua

SEQ ID NO: 4009459 - RNA, 12 nt, Human papillomavirus type 16
aaaaaaaacagg

SEQ ID NO: 4009460 - RNA, 17 nt, Human papillomavirus type 16
aaaacgcacaaaacgug

SEQ ID NO: 4009461 - RNA, 13 nt, Human papillomavirus type 16
aaacaugcaaaca

SEQ ID NO: 4009462 - RNA, 16 nt, Human papillomavirus type 16
aaacgcacaaaacgug

SEQ ID NO: 4009463 - RNA, 12 nt, Human papillomavirus type 16
aaauaguucuau

SEQ ID NO: 4009464 - RNA, 19 nt, Human papillomavirus type 16
aacauggauauacagugga

SEQ ID NO: 4009465 - RNA, 19 nt, Human papillomavirus type 16
aaccuaacaauaacaaaau

SEQ ID NO: 4009466 - RNA, 16 nt, Human papillomavirus type 16
aacucacaauauagua

SEQ ID NO: 4009467 - RNA, 21 nt, Human papillomavirus type 16
aacugcaacuaacguuagaaa

SEQ ID NO: 4009468 - RNA, 23 nt, Human papillomavirus type 16
aagcaaaacaacauagagaugca

SEQ ID NO: 4009469 - RNA, 14 nt, Human papillomavirus type 16
aauacuuuaaaaug

SEQ ID NO: 4009470 - RNA, 17 nt, Human papillomavirus type 16
aaugacagugauacagg

SEQ ID NO: 4009471 - RNA, 19 nt, Human papillomavirus type 16
aauuguuacacuuacauau

SEQ ID NO: 4009472 - RNA, 13 nt, Human papillomavirus type 16
acaaaauguguuu

SEQ ID NO: 4009473 - RNA, 13 nt, Human papillomavirus type 16
acaacauuacugg

SEQ ID NO: 4009474 - RNA, 15 nt, Human papillomavirus type 16
acacagaaaaugcua

SEQ ID NO: 4009475 - RNA, 18 nt, Human papillomavirus type 16
acaccuacuaauuguguu

SEQ ID NO: 4009476 - RNA, 15 nt, Human papillomavirus type 16
acauaugauagugaa

SEQ ID NO: 4009477 - RNA, 15 nt, Human papillomavirus type 16
accauggcugauccu

SEQ ID NO: 4009478 - RNA, 18 nt, Human papillomavirus type 16
acgugaccaauuuuuguc

SEQ ID NO: 4009479 - RNA, 15 nt, Human papillomavirus type 16
agcugcaaaaaggag

SEQ ID NO: 4009480 - RNA, 20 nt, Human papillomavirus type 16
agcuucaaccgaauucgguu

SEQ ID NO: 4009481 - RNA, 21 nt, Human papillomavirus type 16
aguggaaaaaaaaacagggga

SEQ ID NO: 4009482 - RNA, 16 nt, Human papillomavirus type 16
auaaacacguguguau

SEQ ID NO: 4009483 - RNA, 21 nt, Human papillomavirus type 16
auaaugauuauuuaacacagg

SEQ ID NO: 4009484 - RNA, 15 nt, Human papillomavirus type 16
aucaguaacuguggu

SEQ ID NO: 4009485 - RNA, 17 nt, Human papillomavirus type 16
auguauaaaaaaacaug

SEQ ID NO: 4009486 - RNA, 19 nt, Human papillomavirus type 16
auguauaaaaaaacaugga

SEQ ID NO: 4009487 - RNA, 17 nt, Human papillomavirus type 16
gaacaaauauuacaaua

SEQ ID NO: 4009488 - RNA, 14 nt, Human papillomavirus type 16
gacagugauacagg

SEQ ID NO: 4009489 - RNA, 21 nt, Human papillomavirus type 16
gacauucguacuuuggaagac

SEQ ID NO: 4009490 - RNA, 15 nt, Human papillomavirus type 16
gaugaaauagauggu

SEQ ID NO: 4009491 - RNA, 18 nt, Human papillomavirus type 16
gcugaacaaauauuacaa

SEQ ID NO: 4009492 - RNA, 20 nt, Human papillomavirus type 16
gcuuguaaauauuaaguugu

SEQ ID NO: 4009493 - RNA, 19 nt, Human papillomavirus type 16
ggaggaugaaauagauggu

SEQ ID NO: 4009494 - RNA, 18 nt, Human papillomavirus type 16
guccacuuagugauauua

SEQ ID NO: 4009495 - RNA, 23 nt, Human papillomavirus type 16
guuauucauuguauauaaacuau

SEQ ID NO: 4009496 - RNA, 16 nt, Human papillomavirus type 16
guucucagaaaccaua

SEQ ID NO: 4009497 - RNA, 16 nt, Human papillomavirus type 16
uaaaaagcauuguaca

SEQ ID NO: 4009498 - RNA, 19 nt, Human papillomavirus type 16
uaaaagugcaauuguuaca

SEQ ID NO: 4009499 - RNA, 20 nt, Human papillomavirus type 16
uaauguaauuguuacauaua

SEQ ID NO: 4009500 - RNA, 19 nt, Human papillomavirus type 16
uacaguggaagugcaguuu

SEQ ID NO: 4009501 - RNA, 18 nt, Human papillomavirus type 16
uaccauaacuuacuauuu

SEQ ID NO: 4009502 - RNA, 21 nt, Human papillomavirus type 16
uacuuuggaagaccuguuaau

SEQ ID NO: 4009503 - RNA, 15 nt, Human papillomavirus type 16
uauacugcagugucg

SEQ ID NO: 4009504 - RNA, 14 nt, Human papillomavirus type 16
uauguagaggcugu

SEQ ID NO: 4009505 - RNA, 21 nt, Human papillomavirus type 16
uaugucuauaugacaaaucuu

SEQ ID NO: 4009506 - RNA, 14 nt, Human papillomavirus type 16
uauuacuauugugg

SEQ ID NO: 4009507 - RNA, 14 nt, Human papillomavirus type 16
uauuuguuuauaua

SEQ ID NO: 4009508 - RNA, 17 nt, Human papillomavirus type 16
ucagaggaggaggauga

SEQ ID NO: 4009509 - RNA, 21 nt, Human papillomavirus type 16
ugaagaagcaucaguaacugu

SEQ ID NO: 4009510 - RNA, 20 nt, Human papillomavirus type 16
ugagcaauuaaaugacagcu

SEQ ID NO: 4009511 - RNA, 15 nt, Human papillomavirus type 16
ugcagcaaaugcagg

SEQ ID NO: 4009512 - RNA, 20 nt, Human papillomavirus type 16
ugcuuguaaauauuaaguug

SEQ ID NO: 4009513 - RNA, 21 nt, Human papillomavirus type 16
ugcuuuugucugugucuacau

SEQ ID NO: 4009514 - RNA, 19 nt, Human papillomavirus type 16
uggagacauaugcaauaca

SEQ ID NO: 4009515 - RNA, 12 nt, Human papillomavirus type 16
ugguccagcugg

SEQ ID NO: 4009516 - RNA, 18 nt, Human papillomavirus type 16
uguaguggaaaaaaaaac

SEQ ID NO: 4009517 - RNA, 19 nt, Human papillomavirus type 16
uguauguugaauuaguguu

SEQ ID NO: 4009518 - RNA, 21 nt, Human papillomavirus type 16
ugugguuauucauuguauaua

SEQ ID NO: 4009519 - RNA, 12 nt, Human papillomavirus type 16
uuaaaauguuua

SEQ ID NO: 4009520 - RNA, 19 nt, Human papillomavirus type 16
uuacaagcaauugaacugc

SEQ ID NO: 4009521 - RNA, 19 nt, Human papillomavirus type 16
uuacauaauguauauguac

SEQ ID NO: 4009522 - RNA, 21 nt, Human papillomavirus type 16
uuacuauuguggauaacagca

SEQ ID NO: 4009523 - RNA, 23 nt, Human papillomavirus type 16
uuauacaaacuggacacauauau

SEQ ID NO: 4009524 - RNA, 11 nt, Human papillomavirus type 16
uuccugacacc

SEQ ID NO: 4009525 - RNA, 11 nt, Human papillomavirus type 16
uugaacugcaa

SEQ ID NO: 4009526 - RNA, 24 nt, Human papillomavirus type 16
uuggaugacacagaaaaugcuagu

SEQ ID NO: 4009527 - RNA, 15 nt, Human papillomavirus type 16
uugguauuacuauug

SEQ ID NO: 4009528 - RNA, 14 nt, Human papillomavirus type 16
uuuugucugugucu

SEQ ID NO: 4009529 - RNA, 13 nt, Human papillomavirus type 18
aaacaguacaagu

SEQ ID NO: 4009530 - RNA, 21 nt, Human papillomavirus type 18
aaaccgaggauuggacacugc

SEQ ID NO: 4009531 - RNA, 18 nt, Human papillomavirus type 18
aaauaucuuuaaauagug

SEQ ID NO: 4009532 - RNA, 14 nt, Human papillomavirus type 18
aaaugcaacagaca

SEQ ID NO: 4009533 - RNA, 12 nt, Human papillomavirus type 18
aagacauagaca

SEQ ID NO: 4009534 - RNA, 18 nt, Human papillomavirus type 18
aaggaacauuuugugaac

SEQ ID NO: 4009535 - RNA, 17 nt, Human papillomavirus type 18
aaugcaacagacacagg

SEQ ID NO: 4009536 - RNA, 16 nt, Human papillomavirus type 18
acaauguaauacauau

SEQ ID NO: 4009537 - RNA, 18 nt, Human papillomavirus type 18
acaccuuacagcauccau

SEQ ID NO: 4009538 - RNA, 19 nt, Human papillomavirus type 18
acagaaccuacucacugcu

SEQ ID NO: 4009539 - RNA, 14 nt, Human papillomavirus type 18
acaguaauuguaua

SEQ ID NO: 4009540 - RNA, 20 nt, Human papillomavirus type 18
acucccacaagcauauuuua

SEQ ID NO: 4009541 - RNA, 23 nt, Human papillomavirus type 18
agaacaaaauuuuuaaauacugu

SEQ ID NO: 4009542 - RNA, 15 nt, Human papillomavirus type 18
agacggggagggcac

SEQ ID NO: 4009543 - RNA, 17 nt, Human papillomavirus type 18
agagacagcacaggcau

SEQ ID NO: 4009544 - RNA, 20 nt, Human papillomavirus type 18
agcagauaaaauauugcaau

SEQ ID NO: 4009545 - RNA, 16 nt, Human papillomavirus type 18
agcuagagacagcaca

SEQ ID NO: 4009546 - RNA, 19 nt, Human papillomavirus type 18
agcuagagacagcacaggc

SEQ ID NO: 4009547 - RNA, 16 nt, Human papillomavirus type 18
aggaagaaaacgauga

SEQ ID NO: 4009548 - RNA, 20 nt, Human papillomavirus type 18
aggauauuccuaagguuucu

SEQ ID NO: 4009549 - RNA, 22 nt, Human papillomavirus type 18
agggaacauggcauacagacau

SEQ ID NO: 4009550 - RNA, 15 nt, Human papillomavirus type 18
aguaagcaacaaugg

SEQ ID NO: 4009551 - RNA, 18 nt, Human papillomavirus type 18
agugggcagaaaaaggca

SEQ ID NO: 4009552 - RNA, 20 nt, Human papillomavirus type 18
auacagaaccuacucacugc

SEQ ID NO: 4009553 - RNA, 20 nt, Human papillomavirus type 18
auagguuguuuuauacagug

SEQ ID NO: 4009554 - RNA, 21 nt, Human papillomavirus type 18
auagguuguuuuauacagugu

SEQ ID NO: 4009555 - RNA, 22 nt, Human papillomavirus type 18
auagugggcagaaaaaggcaaa

SEQ ID NO: 4009556 - RNA, 15 nt, Human papillomavirus type 18
auauaaaacauguaa

SEQ ID NO: 4009557 - RNA, 12 nt, Human papillomavirus type 18
auccauauuuua

SEQ ID NO: 4009558 - RNA, 17 nt, Human papillomavirus type 18
augcgcaggagguccac

SEQ ID NO: 4009559 - RNA, 16 nt, Human papillomavirus type 18
auggcaacaaagacaa

SEQ ID NO: 4009560 - RNA, 20 nt, Human papillomavirus type 18
auguacaagcuauuguagac

SEQ ID NO: 4009561 - RNA, 20 nt, Human papillomavirus type 18
auguaugguuguuguuguau

SEQ ID NO: 4009562 - RNA, 18 nt, Human papillomavirus type 18
auugauacacaaggaaca

SEQ ID NO: 4009563 - RNA, 15 nt, Human papillomavirus type 18
auuucaaaaaguaaa

SEQ ID NO: 4009564 - RNA, 23 nt, Human papillomavirus type 18
caaauaaauuugguuuaccugau

SEQ ID NO: 4009565 - RNA, 15 nt, Human papillomavirus type 18
caacauuuaccagcc

SEQ ID NO: 4009566 - RNA, 20 nt, Human papillomavirus type 18
caagccuugguauauuuuug

SEQ ID NO: 4009567 - RNA, 20 nt, Human papillomavirus type 18
caaguauauuuugauggcaa

SEQ ID NO: 4009568 - RNA, 16 nt, Human papillomavirus type 18
caauauagaguauuua

SEQ ID NO: 4009569 - RNA, 13 nt, Human papillomavirus type 18
cacaguauaugua

SEQ ID NO: 4009570 - RNA, 17 nt, Human papillomavirus type 18
cacauaaagcuauugaa

SEQ ID NO: 4009571 - RNA, 17 nt, Human papillomavirus type 18
cacugcuuuaaaaaagg

SEQ ID NO: 4009572 - RNA, 16 nt, Human papillomavirus type 18
cagacggggagggcac

SEQ ID NO: 4009573 - RNA, 20 nt, Human papillomavirus type 18
cagagcuagagacagcacag

SEQ ID NO: 4009574 - RNA, 21 nt, Human papillomavirus type 18
cauagacagccaaauacagua

SEQ ID NO: 4009575 - RNA, 16 nt, Human papillomavirus type 18
caucugucuguaugug

SEQ ID NO: 4009576 - RNA, 13 nt, Human papillomavirus type 18
caugggacaaaac

SEQ ID NO: 4009577 - RNA, 12 nt, Human papillomavirus type 18
cauguccaccug

SEQ ID NO: 4009578 - RNA, 21 nt, Human papillomavirus type 18
ccaugucccgcuuuugccauc

SEQ ID NO: 4009579 - RNA, 17 nt, Human papillomavirus type 18
ccauuuugcugugcaac

SEQ ID NO: 4009580 - RNA, 14 nt, Human papillomavirus type 18
ccugcagguggugg

SEQ ID NO: 4009581 - RNA, 18 nt, Human papillomavirus type 18
ccuuacagcauccauuuu

SEQ ID NO: 4009582 - RNA, 19 nt, Human papillomavirus type 18
ccuucgagcauuccagcag

SEQ ID NO: 4009583 - RNA, 15 nt, Human papillomavirus type 18
cuaagguuucugcau

SEQ ID NO: 4009584 - RNA, 12 nt, Human papillomavirus type 18
cuaauguuucug

SEQ ID NO: 4009585 - RNA, 16 nt, Human papillomavirus type 18
cuagagacagcacagg

SEQ ID NO: 4009586 - RNA, 17 nt, Human papillomavirus type 18
cuagauuauuaacuguu

SEQ ID NO: 4009587 - RNA, 16 nt, Human papillomavirus type 18
cuauauauuguccugu

SEQ ID NO: 4009588 - RNA, 16 nt, Human papillomavirus type 18
cugauacuaguauuua

SEQ ID NO: 4009589 - RNA, 19 nt, Human papillomavirus type 18
gagcuagagacagcacagg

SEQ ID NO: 4009590 - RNA, 20 nt, Human papillomavirus type 18
gagcuagagacagcacaggc

SEQ ID NO: 4009591 - RNA, 13 nt, Human papillomavirus type 18
gaggcagcacaga

SEQ ID NO: 4009592 - RNA, 14 nt, Human papillomavirus type 18
gagguggauacaga

SEQ ID NO: 4009593 - RNA, 17 nt, Human papillomavirus type 18
gaguuaaucaucaacau

SEQ ID NO: 4009594 - RNA, 16 nt, Human papillomavirus type 18
gauggcaacaaagaca

SEQ ID NO: 4009595 - RNA, 22 nt, Human papillomavirus type 18
gcagagcuagagacagcacagg

SEQ ID NO: 4009596 - RNA, 16 nt, Human papillomavirus type 18
gcaggaggcagcacag

SEQ ID NO: 4009597 - RNA, 20 nt, Human papillomavirus type 18
gcccauguuacuauugcaua

SEQ ID NO: 4009598 - RNA, 12 nt, Human papillomavirus type 18
gcgacucagagg

SEQ ID NO: 4009599 - RNA, 17 nt, Human papillomavirus type 18
gcuagagacagcacagg

SEQ ID NO: 4009600 - RNA, 12 nt, Human papillomavirus type 18
gcugauccagaa

SEQ ID NO: 4009601 - RNA, 17 nt, Human papillomavirus type 18
gcuuuuguguaugcaug

SEQ ID NO: 4009602 - RNA, 13 nt, Human papillomavirus type 18
ggagcggcuggag

SEQ ID NO: 4009603 - RNA, 21 nt, Human papillomavirus type 18
ggcugauccagaagguacaga

SEQ ID NO: 4009604 - RNA, 19 nt, Human papillomavirus type 18
ggcuggagguggauacaga

SEQ ID NO: 4009605 - RNA, 21 nt, Human papillomavirus type 18
gggacaaaaccgcuaccugug

SEQ ID NO: 4009606 - RNA, 17 nt, Human papillomavirus type 18
gguuguuguuguauguu

SEQ ID NO: 4009607 - RNA, 21 nt, Human papillomavirus type 18
guaacugacuuauauaaaaca

SEQ ID NO: 4009608 - RNA, 15 nt, Human papillomavirus type 18
guacaggguacauuc

SEQ ID NO: 4009609 - RNA, 16 nt, Human papillomavirus type 18
guagcaugggacagug

SEQ ID NO: 4009610 - RNA, 13 nt, Human papillomavirus type 18
guauguccugugu

SEQ ID NO: 4009611 - RNA, 12 nt, Human papillomavirus type 18
guguaugcaugu

SEQ ID NO: 4009612 - RNA, 19 nt, Human papillomavirus type 18
guguuuguauguccugugu

SEQ ID NO: 4009613 - RNA, 13 nt, Human papillomavirus type 18
guuugcaggaggc

SEQ ID NO: 4009614 - RNA, 15 nt, Human papillomavirus type 18
guuuguauguccugu

SEQ ID NO: 4009615 - RNA, 20 nt, Human papillomavirus type 18
uaaaacgaaaguuugcagga

SEQ ID NO: 4009616 - RNA, 15 nt, Human papillomavirus type 18
uaagcgacucagagg

SEQ ID NO: 4009617 - RNA, 20 nt, Human papillomavirus type 18
uaauaacguccccugccaca

SEQ ID NO: 4009618 - RNA, 16 nt, Human papillomavirus type 18
uacaguguauuguaca

SEQ ID NO: 4009619 - RNA, 13 nt, Human papillomavirus type 18
uacgguacagauu

SEQ ID NO: 4009620 - RNA, 16 nt, Human papillomavirus type 18
uagacagccaaauaca

SEQ ID NO: 4009621 - RNA, 21 nt, Human papillomavirus type 18
uagugaguaacaacuguauuu

SEQ ID NO: 4009622 - RNA, 16 nt, Human papillomavirus type 18
uauauaaaacauguaa

SEQ ID NO: 4009623 - RNA, 18 nt, Human papillomavirus type 18
uaucauccaccuggcauu

SEQ ID NO: 4009624 - RNA, 17 nt, Human papillomavirus type 18
uaugcauguaugugugc

SEQ ID NO: 4009625 - RNA, 22 nt, Human papillomavirus type 18
uaugugacucccacaagcauau

SEQ ID NO: 4009626 - RNA, 11 nt, Human papillomavirus type 18
uauugcccaug

SEQ ID NO: 4009627 - RNA, 18 nt, Human papillomavirus type 18
ucacacaauguuguguau

SEQ ID NO: 4009628 - RNA, 15 nt, Human papillomavirus type 18
ucugguacaugucca

SEQ ID NO: 4009629 - RNA, 21 nt, Human papillomavirus type 18
ugaugcacaaguguugcaugu

SEQ ID NO: 4009630 - RNA, 16 nt, Human papillomavirus type 18
ugcauaccaauauaga

SEQ ID NO: 4009631 - RNA, 16 nt, Human papillomavirus type 18
ugcauguaugugugcu

SEQ ID NO: 4009632 - RNA, 23 nt, Human papillomavirus type 18
uggcauagguacuggcaguggua

SEQ ID NO: 4009633 - RNA, 14 nt, Human papillomavirus type 18
ugggauacaugaca

SEQ ID NO: 4009634 - RNA, 20 nt, Human papillomavirus type 18
uguaaacaaucugguacaug

SEQ ID NO: 4009635 - RNA, 17 nt, Human papillomavirus type 18
uguaguaccaauauguu

SEQ ID NO: 4009636 - RNA, 13 nt, Human papillomavirus type 18
uguaugcauguau

SEQ ID NO: 4009637 - RNA, 14 nt, Human papillomavirus type 18
uguauuguacauug

SEQ ID NO: 4009638 - RNA, 16 nt, Human papillomavirus type 18
ugucuguaugugugcg

SEQ ID NO: 4009639 - RNA, 22 nt, Human papillomavirus type 18
ugugguaauaacguccccugcc

SEQ ID NO: 4009640 - RNA, 15 nt, Human papillomavirus type 18
ugugguucugugugu

SEQ ID NO: 4009641 - RNA, 20 nt, Human papillomavirus type 18
uguuacuauugcauauacau

SEQ ID NO: 4009642 - RNA, 12 nt, Human papillomavirus type 18
uuaaauacuguu

SEQ ID NO: 4009643 - RNA, 21 nt, Human papillomavirus type 18
uuauugauacacaaggaacau

SEQ ID NO: 4009644 - RNA, 16 nt, Human papillomavirus type 18
uugcaagacauuguau

SEQ ID NO: 4009645 - RNA, 19 nt, Human papillomavirus type 18
uugcaggaggcagcacaga

SEQ ID NO: 4009646 - RNA, 18 nt, Human papillomavirus type 18
uugcauguuuuaaaacga

SEQ ID NO: 4009647 - RNA, 20 nt, Human papillomavirus type 18
uuugcaggaggcagcacaga

SEQ ID NO: 4009648 - RNA, 15 nt, Human papillomavirus type 18
aaaaguaaagcacau

SEQ ID NO: 4009649 - RNA, 15 nt, Human papillomavirus type 18
acaaaaaaacaggag

SEQ ID NO: 4009650 - RNA, 13 nt, Human papillomavirus type 18
acaaguguugcau

SEQ ID NO: 4009651 - RNA, 13 nt, Human papillomavirus type 18
acagaaaacaguc

SEQ ID NO: 4009652 - RNA, 21 nt, Human papillomavirus type 18
acagaaaacaguccauuaggg

SEQ ID NO: 4009653 - RNA, 15 nt, Human papillomavirus type 18
acgucuaauguuucu

SEQ ID NO: 4009654 - RNA, 12 nt, Human papillomavirus type 18
acuggcaguggu

SEQ ID NO: 4009655 - RNA, 18 nt, Human papillomavirus type 18
agauaguguacaaauauu

SEQ ID NO: 4009656 - RNA, 13 nt, Human papillomavirus type 18
agccaaauacagu

SEQ ID NO: 4009657 - RNA, 22 nt, Human papillomavirus type 18
aggaacauuuugugaacaggca

SEQ ID NO: 4009658 - RNA, 18 nt, Human papillomavirus type 18
aggaggcagcacagaaaa

SEQ ID NO: 4009659 - RNA, 14 nt, Human papillomavirus type 18
aggcagagcuagag

SEQ ID NO: 4009660 - RNA, 17 nt, Human papillomavirus type 18
agggcacggguuguaac

SEQ ID NO: 4009661 - RNA, 21 nt, Human papillomavirus type 18
agguuguuuuauacaguguau

SEQ ID NO: 4009662 - RNA, 22 nt, Human papillomavirus type 18
aguuugcaggaggcagcacaga

SEQ ID NO: 4009663 - RNA, 18 nt, Human papillomavirus type 18
auacaucuauuguugugu

SEQ ID NO: 4009664 - RNA, 16 nt, Human papillomavirus type 18
auauauuguccuguau

SEQ ID NO: 4009665 - RNA, 21 nt, Human papillomavirus type 18
auauguuuugugguucugugu

SEQ ID NO: 4009666 - RNA, 16 nt, Human papillomavirus type 18
auauucuuugcagcaa

SEQ ID NO: 4009667 - RNA, 19 nt, Human papillomavirus type 18
auauuuuaggguuccugca

SEQ ID NO: 4009668 - RNA, 12 nt, Human papillomavirus type 18
augcaacagaca

SEQ ID NO: 4009669 - RNA, 19 nt, Human papillomavirus type 18
augcaggaacaugggacaa

SEQ ID NO: 4009670 - RNA, 13 nt, Human papillomavirus type 18
augcauguaugug

SEQ ID NO: 4009671 - RNA, 13 nt, Human papillomavirus type 18
auggcaacaaaga

SEQ ID NO: 4009672 - RNA, 18 nt, Human papillomavirus type 18
augugugcguaugcaugg

SEQ ID NO: 4009673 - RNA, 16 nt, Human papillomavirus type 18
auugcauuuagagccc

SEQ ID NO: 4009674 - RNA, 15 nt, Human papillomavirus type 18
auuggcaacuaauac

SEQ ID NO: 4009675 - RNA, 21 nt, Human papillomavirus type 18
auuuugugaacaggcagagcu

SEQ ID NO: 4009676 - RNA, 13 nt, Human papillomavirus type 18
auuuuguuuuaua

SEQ ID NO: 4009677 - RNA, 17 nt, Human papillomavirus type 18
caaauacaguauuggca

SEQ ID NO: 4009678 - RNA, 22 nt, Human papillomavirus type 18
caauuccagauaguguacaaau

SEQ ID NO: 4009679 - RNA, 18 nt, Human papillomavirus type 18
cacaacguuuaguguggg

SEQ ID NO: 4009680 - RNA, 15 nt, Human papillomavirus type 18
uaugugugcugccau

SEQ ID NO: 4009681 - RNA, 21 nt, Human papillomavirus type 18
uccccugccacagcauucaca

SEQ ID NO: 4009682 - RNA, 16 nt, Human papillomavirus type 18
uccuaagguuucugca

SEQ ID NO: 4009683 - RNA, 14 nt, Human papillomavirus type 18
ucuauuguuguguu

SEQ ID NO: 4009684 - RNA, 18 nt, Human papillomavirus type 18
ucugcauaccaauauaga

SEQ ID NO: 4009685 - RNA, 22 nt, Human papillomavirus type 18
ugaaaaaacaggaauacugacu

SEQ ID NO: 4009686 - RNA, 13 nt, Human papillomavirus type 18
ugcaucccagcag

SEQ ID NO: 4009687 - RNA, 14 nt, Human papillomavirus type 18
ugcuauauugucuu

SEQ ID NO: 4009688 - RNA, 15 nt, Human papillomavirus type 18
uggaccuaaggcaac

SEQ ID NO: 4009689 - RNA, 21 nt, Human papillomavirus type 18
uggcugauccagaagguacag

SEQ ID NO: 4009690 - RNA, 12 nt, Human papillomavirus type 18
uguauguccugu

SEQ ID NO: 4009691 - RNA, 18 nt, Human papillomavirus type 18
uguaugugugcugccaug

SEQ ID NO: 4009692 - RNA, 20 nt, Human papillomavirus type 18
uuaugcuuuuuguauuuuug

SEQ ID NO: 4009693 - RNA, 18 nt, Human papillomavirus type 18
uucgagcauuccagcagc

SEQ ID NO: 4009694 - RNA, 18 nt, Human papillomavirus type 18
uucugcauaccaauauag

SEQ ID NO: 4009695 - RNA, 21 nt, Human papillomavirus type 18
uugggcuauauauuguccugu

SEQ ID NO: 4009696 - RNA, 13 nt, Human papillomavirus type 18
uuguauauuuugu

SEQ ID NO: 4009697 - RNA, 15 nt, Human papillomavirus type 18
uuuauacaguguauu

SEQ ID NO: 4009698 - RNA, 13 nt, Human papillomavirus type 18
uuugugguucugu

SEQ ID NO: 4009699 - RNA, 23 nt, Human papillomavirus type 18
aaaguuugcaggaggcagcacag

SEQ ID NO: 4009700 - RNA, 18 nt, Human papillomavirus type 18
aagguggagggcaccacg

SEQ ID NO: 4009701 - RNA, 15 nt, Human papillomavirus type 18
aauacaguauuggca

SEQ ID NO: 4009702 - RNA, 18 nt, Human papillomavirus type 18
aaugcaauauucuuugca

SEQ ID NO: 4009703 - RNA, 23 nt, Human papillomavirus type 18
accauagugaaacacaaagaaca

SEQ ID NO: 4009704 - RNA, 16 nt, Human papillomavirus type 18
accugugggccccaca

SEQ ID NO: 4009705 - RNA, 13 nt, Human papillomavirus type 18
accuucgagcauu

SEQ ID NO: 4009706 - RNA, 14 nt, Human papillomavirus type 18
acguccccugccac

SEQ ID NO: 4009707 - RNA, 22 nt, Human papillomavirus type 18
acugaugcaggaacaugggaca

SEQ ID NO: 4009708 - RNA, 22 nt, Human papillomavirus type 18
agacgaccuucgagcauuccag

SEQ ID NO: 4009709 - RNA, 13 nt, Human papillomavirus type 18
agagacagcacag

SEQ ID NO: 4009710 - RNA, 12 nt, Human papillomavirus type 18
agcauuccagca

SEQ ID NO: 4009711 - RNA, 14 nt, Human papillomavirus type 18
aggcaacauugcaa

SEQ ID NO: 4009712 - RNA, 13 nt, Human papillomavirus type 18
aguaagcaacaau

SEQ ID NO: 4009713 - RNA, 14 nt, Human papillomavirus type 18
auaugacugaugca

SEQ ID NO: 4009714 - RNA, 20 nt, Human papillomavirus type 18
auauuccuaagguuucugca

SEQ ID NO: 4009715 - RNA, 21 nt, Human papillomavirus type 18
auauugcaauggucaagccuu

SEQ ID NO: 4009716 - RNA, 17 nt, Human papillomavirus type 18
auccuacaauccuccau

SEQ ID NO: 4009717 - RNA, 14 nt, Human papillomavirus type 18
aucugucuguaugu

SEQ ID NO: 4009718 - RNA, 18 nt, Human papillomavirus type 18
augcaacagacacagggu

SEQ ID NO: 4009719 - RNA, 22 nt, Human papillomavirus type 18
augcauguaugugugcugccau

SEQ ID NO: 4009720 - RNA, 14 nt, Human papillomavirus type 18
gcuauugaacugca

SEQ ID NO: 4009721 - RNA, 22 nt, Human papillomavirus type 18
ggcagcacagaaaacaguccau

SEQ ID NO: 4009722 - RNA, 14 nt, Human papillomavirus type 18
ggccuuagugggca

SEQ ID NO: 4009723 - RNA, 15 nt, Human papillomavirus type 18
gguuauugaaccugu

SEQ ID NO: 4009724 - RNA, 11 nt, Human papillomavirus type 18
guaauaaaagu

SEQ ID NO: 4009725 - RNA, 19 nt, Human papillomavirus type 18
guacagacggggagggcac

SEQ ID NO: 4009726 - RNA, 19 nt, Human papillomavirus type 18
guacgcuggcacuauugca

SEQ ID NO: 4009727 - RNA, 15 nt, Human papillomavirus type 18
guauauauauauaca

SEQ ID NO: 4009728 - RNA, 14 nt, Human papillomavirus type 18
guauuguacauugu

SEQ ID NO: 4009729 - RNA, 17 nt, Human papillomavirus type 18
guccacaaugaugcaca

SEQ ID NO: 4009730 - RNA, 14 nt, Human papillomavirus type 18
gucuguaugugugc

SEQ ID NO: 4009731 - RNA, 23 nt, Human papillomavirus type 18
gugguggauguugguccuacacg

SEQ ID NO: 4009732 - RNA, 12 nt, Human papillomavirus type 18
guguauauugug

SEQ ID NO: 4009733 - RNA, 17 nt, Human papillomavirus type 18
guuugcaggaggcagca

SEQ ID NO: 4009734 - RNA, 16 nt, Human papillomavirus type 18
uaaacaaucugguaca

SEQ ID NO: 4009735 - RNA, 20 nt, Human papillomavirus type 18
uaauccauauuuuaggguuc

SEQ ID NO: 4009736 - RNA, 13 nt, Human papillomavirus type 18
uacauaugcugua

SEQ ID NO: 4009737 - RNA, 21 nt, Human papillomavirus type 18
uacuauugcauauacaugcua

SEQ ID NO: 4009738 - RNA, 14 nt, Human papillomavirus type 18
uaggguuccugcag

SEQ ID NO: 4009739 - RNA, 19 nt, Human papillomavirus type 18
uaguagaaagcucagcaga

SEQ ID NO: 4009740 - RNA, 17 nt, Human papillomavirus type 18
uagugaaacacaaagaa

SEQ ID NO: 4009741 - RNA, 20 nt, Human papillomavirus type 18
uagugaguaacaacuguauu

SEQ ID NO: 4009742 - RNA, 15 nt, Human papillomavirus type 18
uauugugguaauaac

SEQ ID NO: 4009743 - RNA, 15 nt, Human papillomavirus type 18
uccaauacaguggug

SEQ ID NO: 4009744 - RNA, 23 nt, Human papillomavirus type 18
uccguggugugcaucccagcagu

SEQ ID NO: 4009745 - RNA, 19 nt, Human papillomavirus type 18
ugaaauuccgguugaccuu

SEQ ID NO: 4009746 - RNA, 16 nt, Human papillomavirus type 18
ugaacacccuguccuu

SEQ ID NO: 4009747 - RNA, 12 nt, Human papillomavirus type 18
ugcaggaggcag

SEQ ID NO: 4009748 - RNA, 21 nt, Human papillomavirus type 18
ugcaucccagcaguaagcaac

SEQ ID NO: 4009749 - RNA, 22 nt, Human papillomavirus type 18
ugccaugucccgcuuuugccau

SEQ ID NO: 4009750 - RNA, 23 nt, Human papillomavirus type 18
ugcgaggaacuauggaauacaga

SEQ ID NO: 4009751 - RNA, 12 nt, Human papillomavirus type 18
ugcuuuuuguau

SEQ ID NO: 4009752 - RNA, 13 nt, Human papillomavirus type 18
uggaaauuggccg

SEQ ID NO: 4009753 - RNA, 20 nt, Human papillomavirus type 18
uggcauuggacaggugcagg

SEQ ID NO: 4009754 - RNA, 20 nt, Human papillomavirus type 18
ugggcguuccaauacagugg

SEQ ID NO: 4009755 - RNA, 14 nt, Human papillomavirus type 18
uguauuauaugacu

SEQ ID NO: 4009756 - RNA, 13 nt, Human papillomavirus type 18
ugugaacaggcag

SEQ ID NO: 4009757 - RNA, 22 nt, Human papillomavirus type 18
ugugcaucccagcaguaagcaa

SEQ ID NO: 4009758 - RNA, 13 nt, Human papillomavirus type 18
ugugcguaugcau

SEQ ID NO: 4009759 - RNA, 18 nt, Human papillomavirus type 18
uuaaauacuguugcaauu

SEQ ID NO: 4009760 - RNA, 16 nt, Human papillomavirus type 18
uucacaguauauguau

SEQ ID NO: 4009761 - RNA, 17 nt, Human papillomavirus type 18
uucacaguauauguauu

SEQ ID NO: 4009762 - RNA, 21 nt, Human papillomavirus type 18
uucacaguauauguauuuugu

SEQ ID NO: 4009763 - RNA, 20 nt, Human papillomavirus type 18
uugcuuuuguguaugcaugu

SEQ ID NO: 4009764 - RNA, 16 nt, Human papillomavirus type 18
uuuagguguuggccuu

SEQ ID NO: 4009765 - RNA, 10 nt, Human papillomavirus type 18
uuuguuguau

SEQ ID NO: 4009766 - RNA, 20 nt, Human papillomavirus type 18
aaacaggaauacugacugua

SEQ ID NO: 4009767 - RNA, 17 nt, Human papillomavirus type 18
aaaggcggcuguuuaca

SEQ ID NO: 4009768 - RNA, 22 nt, Human papillomavirus type 18
aaaguuugcaggaggcagcaca

SEQ ID NO: 4009769 - RNA, 20 nt, Human papillomavirus type 18
aaauguuuacgguacagauu

SEQ ID NO: 4009770 - RNA, 19 nt, Human papillomavirus type 18
aaguauauuuugauggcaa

SEQ ID NO: 4009771 - RNA, 21 nt, Human papillomavirus type 18
aauuguauagguuguuuuaua

SEQ ID NO: 4009772 - RNA, 18 nt, Human papillomavirus type 18
acaacuguauuuguguuu

SEQ ID NO: 4009773 - RNA, 12 nt, Human papillomavirus type 18
acagacacaggg

SEQ ID NO: 4009774 - RNA, 19 nt, Human papillomavirus type 18
acaggugcaggcaaugaaa

SEQ ID NO: 4009775 - RNA, 22 nt, Human papillomavirus type 18
acaguguauuguacauuguaua

SEQ ID NO: 4009776 - RNA, 18 nt, Human papillomavirus type 18
acauuuugugaacaggca

SEQ ID NO: 4009777 - RNA, 21 nt, Human papillomavirus type 18
accgaggauuggacacugcaa

SEQ ID NO: 4009778 - RNA, 19 nt, Human papillomavirus type 18
accuauguagcaugggaca

SEQ ID NO: 4009779 - RNA, 22 nt, Human papillomavirus type 18
accuucuaugucacgagcaauu

SEQ ID NO: 4009780 - RNA, 13 nt, Human papillomavirus type 18
acgaggacgaaaa

SEQ ID NO: 4009781 - RNA, 14 nt, Human papillomavirus type 18
acuggcagugguac

SEQ ID NO: 4009782 - RNA, 17 nt, Human papillomavirus type 18
acuuauauaaaacaugu

SEQ ID NO: 4009783 - RNA, 18 nt, Human papillomavirus type 18
agaaacaguuuaaaaugu

SEQ ID NO: 4009784 - RNA, 16 nt, Human papillomavirus type 18
agagacagcacaggca

SEQ ID NO: 4009785 - RNA, 15 nt, Human papillomavirus type 18
aggguacauuccauu

SEQ ID NO: 4009786 - RNA, 20 nt, Human papillomavirus type 18
agguccacaaugaugcacaa

SEQ ID NO: 4009787 - RNA, 14 nt, Human papillomavirus type 18
aguuugcaggaggc

SEQ ID NO: 4009788 - RNA, 20 nt, Human papillomavirus type 18
auacaucuauuguuguguuu

SEQ ID NO: 4009789 - RNA, 13 nt, Human papillomavirus type 18
augcgcaggaggu

SEQ ID NO: 4009790 - RNA, 18 nt, Human papillomavirus type 18
auggcugauccagaaggu

SEQ ID NO: 4009791 - RNA, 16 nt, Human papillomavirus type 18
augguaucccaccgug

SEQ ID NO: 4009792 - RNA, 16 nt, Human papillomavirus type 18
auguagcaugggacag

SEQ ID NO: 4009793 - RNA, 19 nt, Human papillomavirus type 18
augucccgcuuuugccauc

SEQ ID NO: 4009794 - RNA, 16 nt, Human papillomavirus type 18
auugauacacaaggaa

SEQ ID NO: 4009795 - RNA, 21 nt, Human papillomavirus type 18
auuguuccaugcgcaggaggu

SEQ ID NO: 4009796 - RNA, 23 nt, Human papillomavirus type 18
caaggaacauuuugugaacaggc

SEQ ID NO: 4009797 - RNA, 18 nt, Human papillomavirus type 18
caauggcugauccagaag

SEQ ID NO: 4009798 - RNA, 15 nt, Human papillomavirus type 18
cacacaauguugugu

SEQ ID NO: 4009799 - RNA, 19 nt, Human papillomavirus type 18
caggaggcagcacagaaaa

SEQ ID NO: 4009800 - RNA, 20 nt, Human papillomavirus type 18
cauagacagccaaauacagu

SEQ ID NO: 4009801 - RNA, 16 nt, Human papillomavirus type 18
ccaugucccgcuuuug

SEQ ID NO: 4009802 - RNA, 11 nt, Human papillomavirus type 18
ccguggugugc

SEQ ID NO: 4009803 - RNA, 16 nt, Human papillomavirus type 18
ccuuuuaugcuuuuug

SEQ ID NO: 4009804 - RNA, 16 nt, Human papillomavirus type 18
cggguuguaacggcug

SEQ ID NO: 4009805 - RNA, 21 nt, Human papillomavirus type 18
cugcaggugguggcaauaagc

SEQ ID NO: 4009806 - RNA, 18 nt, Human papillomavirus type 18
cuuauuuuuuuauuuugc

SEQ ID NO: 4009807 - RNA, 13 nt, Human papillomavirus type 18
gaaagcucagcag

SEQ ID NO: 4009808 - RNA, 16 nt, Human papillomavirus type 18
gaaccacaacgucaca

SEQ ID NO: 4009809 - RNA, 18 nt, Human papillomavirus type 18
gaacuauggaauacagaa

SEQ ID NO: 4009810 - RNA, 16 nt, Human papillomavirus type 18
gaccacuauagagaua

SEQ ID NO: 4009811 - RNA, 15 nt, Human papillomavirus type 18
gagacagcacaggca

SEQ ID NO: 4009812 - RNA, 19 nt, Human papillomavirus type 18
gagcauuccagcagcuguu

SEQ ID NO: 4009813 - RNA, 15 nt, Human papillomavirus type 18
gaggauuggacacug

SEQ ID NO: 4009814 - RNA, 14 nt, Human papillomavirus type 18
gcaacagacacagg

SEQ ID NO: 4009815 - RNA, 20 nt, Human papillomavirus type 18
gcagagcuagagacagcaca

SEQ ID NO: 4009816 - RNA, 21 nt, Human papillomavirus type 18
gcagagcuagagacagcacag

SEQ ID NO: 4009817 - RNA, 13 nt, Human papillomavirus type 18
gcauauacaugcu

SEQ ID NO: 4009818 - RNA, 21 nt, Human papillomavirus type 18
gcauauuuuaucaugcuggca

SEQ ID NO: 4009819 - RNA, 14 nt, Human papillomavirus type 18
gcauguaugugugc

SEQ ID NO: 4009820 - RNA, 12 nt, Human papillomavirus type 18
gccaaauacagu

SEQ ID NO: 4009821 - RNA, 17 nt, Human papillomavirus type 18
gcuauauauuguccugu

SEQ ID NO: 4009822 - RNA, 15 nt, Human papillomavirus type 18
cagaaaacaguccau

SEQ ID NO: 4009823 - RNA, 22 nt, Human papillomavirus type 18
cagagcuagagacagcacaggc

SEQ ID NO: 4009824 - RNA, 19 nt, Human papillomavirus type 18
cagaugacgaggacgaaaa

SEQ ID NO: 4009825 - RNA, 18 nt, Human papillomavirus type 18
cagcaagggaacauggca

SEQ ID NO: 4009826 - RNA, 12 nt, Human papillomavirus type 18
cagcacaggcau

SEQ ID NO: 4009827 - RNA, 20 nt, Human papillomavirus type 18
cagcagacgaccuucgagca

SEQ ID NO: 4009828 - RNA, 19 nt, Human papillomavirus type 18
cagcagcuguuucugaaca

SEQ ID NO: 4009829 - RNA, 13 nt, Human papillomavirus type 18
caggaacauggga

SEQ ID NO: 4009830 - RNA, 14 nt, Human papillomavirus type 18
caguacgcuggcac

SEQ ID NO: 4009831 - RNA, 16 nt, Human papillomavirus type 18
caguauuggcaacuaa

SEQ ID NO: 4009832 - RNA, 19 nt, Human papillomavirus type 18
caguguauuguacauugua

SEQ ID NO: 4009833 - RNA, 20 nt, Human papillomavirus type 18
cauaaagcuauugaacugca

SEQ ID NO: 4009834 - RNA, 19 nt, Human papillomavirus type 18
caucaacauuuaccagccc

SEQ ID NO: 4009835 - RNA, 18 nt, Human papillomavirus type 18
cauguuacuauugcauau

SEQ ID NO: 4009836 - RNA, 15 nt, Human papillomavirus type 18
cauuuugcugugcaa

SEQ ID NO: 4009837 - RNA, 11 nt, Human papillomavirus type 18
ccaauacagug

SEQ ID NO: 4009838 - RNA, 12 nt, Human papillomavirus type 18
ccaauacagugg

SEQ ID NO: 4009839 - RNA, 13 nt, Human papillomavirus type 18
ccaauacaguggu

SEQ ID NO: 4009840 - RNA, 23 nt, Human papillomavirus type 18
ccagcaguaagcaacaauggcug

SEQ ID NO: 4009841 - RNA, 13 nt, Human papillomavirus type 18
ccgacgagccgaa

SEQ ID NO: 4009842 - RNA, 17 nt, Human papillomavirus type 18
ccgccacgucuaauguu

SEQ ID NO: 4009843 - RNA, 13 nt, Human papillomavirus type 18
ccuaagguuucug

SEQ ID NO: 4009844 - RNA, 18 nt, Human papillomavirus type 18
ccuacaauccuccauuuu

SEQ ID NO: 4009845 - RNA, 19 nt, Human papillomavirus type 18
ccugcaggugguggcaaua

SEQ ID NO: 4009846 - RNA, 15 nt, Human papillomavirus type 18
cguuuagugugggcc

SEQ ID NO: 4009847 - RNA, 22 nt, Human papillomavirus type 18
cuaauacguugggaaaaugcaa

SEQ ID NO: 4009848 - RNA, 15 nt, Human papillomavirus type 18
cuauggaauacagaa

SEQ ID NO: 4009849 - RNA, 22 nt, Human papillomavirus type 18
cucccacaagcauauuuuauca

SEQ ID NO: 4009850 - RNA, 18 nt, Human papillomavirus type 18
cugaugcaggaacauggg

SEQ ID NO: 4009851 - RNA, 22 nt, Human papillomavirus type 18
cuuagugggcauccauuuuaua

SEQ ID NO: 4009852 - RNA, 15 nt, Human papillomavirus type 18
cuuuuguguaugcau

SEQ ID NO: 4009853 - RNA, 18 nt, Human papillomavirus type 18
gaaaaugcaacagacaca

SEQ ID NO: 4009854 - RNA, 18 nt, Human papillomavirus type 18
gaacauggcauacagaca

SEQ ID NO: 4009855 - RNA, 21 nt, Human papillomavirus type 18
gacugaugcaggaacauggga

SEQ ID NO: 4009856 - RNA, 16 nt, Human papillomavirus type 18
gagacagcacaggcau

SEQ ID NO: 4009857 - RNA, 14 nt, Human papillomavirus type 18
gauguaauaucaga

SEQ ID NO: 4009858 - RNA, 13 nt, Human papillomavirus type 18
gcaacagacacag

SEQ ID NO: 4009859 - RNA, 16 nt, Human papillomavirus type 18
gcagcucuagauuauu

SEQ ID NO: 4009860 - RNA, 14 nt, Human papillomavirus type 18
gcugauccagaagg

SEQ ID NO: 4009861 - RNA, 15 nt, Human papillomavirus type 18
ggagcggcuggaggu

SEQ ID NO: 4009862 - RNA, 14 nt, Human papillomavirus type 18
ggaggcagcacaga

SEQ ID NO: 4009863 - RNA, 18 nt, Human papillomavirus type 18
ggcagagcuagagacagc

SEQ ID NO: 4009864 - RNA, 19 nt, Human papillomavirus type 18
ggccugugcuggaguggaa

SEQ ID NO: 4009865 - RNA, 20 nt, Human papillomavirus type 18
gggaacauggcauacagaca

SEQ ID NO: 4009866 - RNA, 20 nt, Human papillomavirus type 18
gguguuggccuuagugggca

SEQ ID NO: 4009867 - RNA, 17 nt, Human papillomavirus type 18
guagaaagcucagcaga

SEQ ID NO: 4009868 - RNA, 19 nt, Human papillomavirus type 18
guccacgguuacaagaaau

SEQ ID NO: 4009869 - RNA, 13 nt, Human papillomavirus type 18
guguuuguauguc

SEQ ID NO: 4009870 - RNA, 16 nt, Human papillomavirus type 18
guuagcagauaaaaua

SEQ ID NO: 4009871 - RNA, 14 nt, Human papillomavirus type 18
guuguuuuauacag

SEQ ID NO: 4009872 - RNA, 19 nt, Human papillomavirus type 18
guuuuauguacaagcuauu

SEQ ID NO: 4009873 - RNA, 18 nt, Human papillomavirus type 18
uaaaauauugcaaugguc

SEQ ID NO: 4009874 - RNA, 21 nt, Human papillomavirus type 18
uacaauccuccauuuugcugu

SEQ ID NO: 4009875 - RNA, 14 nt, Human papillomavirus type 18
uaccaauauguuau

SEQ ID NO: 4009876 - RNA, 20 nt, Human papillomavirus type 18
uacuguugcaauuccagaua

SEQ ID NO: 4009877 - RNA, 17 nt, Human papillomavirus type 18
uagaguauuuagggugc

SEQ ID NO: 4009878 - RNA, 18 nt, Human papillomavirus type 18
uagguacuggcaguggua

SEQ ID NO: 4009879 - RNA, 22 nt, Human papillomavirus type 18
uauagguuguuuuauacagugu

SEQ ID NO: 4009880 - RNA, 15 nt, Human papillomavirus type 18
uauauaaaacaugua

SEQ ID NO: 4009881 - RNA, 16 nt, Human papillomavirus type 18
uaugcuuuuuguauuu

SEQ ID NO: 4009882 - RNA, 19 nt, Human papillomavirus type 18
uaugguaucccaccgugcc

SEQ ID NO: 4009883 - RNA, 15 nt, Human papillomavirus type 18
auguuuuaaaacgaa

SEQ ID NO: 4009884 - RNA, 21 nt, Human papillomavirus type 18
caaauauuggugggauacaug

SEQ ID NO: 4009885 - RNA, 16 nt, Human papillomavirus type 18
caacuguauuuguguu

SEQ ID NO: 4009886 - RNA, 14 nt, Human papillomavirus type 18
caagggaacauggc

SEQ ID NO: 4009887 - RNA, 21 nt, Human papillomavirus type 18
cagagcuagagacagcacagg

SEQ ID NO: 4009888 - RNA, 21 nt, Human papillomavirus type 18
cagauaaaauauugcaauggu

SEQ ID NO: 4009889 - RNA, 21 nt, Human papillomavirus type 18
cagauugcgaaaacauagcga

SEQ ID NO: 4009890 - RNA, 20 nt, Human papillomavirus type 18
cagcaagggaacauggcaua

SEQ ID NO: 4009891 - RNA, 17 nt, Human papillomavirus type 18
caggaggcagcacagaa

SEQ ID NO: 4009892 - RNA, 15 nt, Human papillomavirus type 18
caggcagagcuagag

SEQ ID NO: 4009893 - RNA, 15 nt, Human papillomavirus type 18
caguguauuguacau

SEQ ID NO: 4009894 - RNA, 13 nt, Human papillomavirus type 18
cauagacagccaa

SEQ ID NO: 4009895 - RNA, 14 nt, Human papillomavirus type 18
caugcuauauuguc

SEQ ID NO: 4009896 - RNA, 16 nt, Human papillomavirus type 18
ccuauguagcauggga

SEQ ID NO: 4009897 - RNA, 15 nt, Human papillomavirus type 18
ccuccuucuguggca

SEQ ID NO: 4009898 - RNA, 19 nt, Human papillomavirus type 18
ccugauacuaguauuuaua

SEQ ID NO: 4009899 - RNA, 19 nt, Human papillomavirus type 18
cgaggaacuauggaauaca

SEQ ID NO: 4009900 - RNA, 21 nt, Human papillomavirus type 18
cuaagguuucugcauaccaau

SEQ ID NO: 4009901 - RNA, 15 nt, Human papillomavirus type 18
cuagagacagcacag

SEQ ID NO: 4009902 - RNA, 15 nt, Human papillomavirus type 18
cuauagagauauauc

SEQ ID NO: 4009903 - RNA, 17 nt, Human papillomavirus type 18
cuauauauuguccugua

SEQ ID NO: 4009904 - RNA, 14 nt, Human papillomavirus type 18
cugauacuaguauu

SEQ ID NO: 4009905 - RNA, 22 nt, Human papillomavirus type 18
gaaaaugcaacagacacagggu

SEQ ID NO: 4009906 - RNA, 15 nt, Human papillomavirus type 18
gacaaaaaaacagga

SEQ ID NO: 4009907 - RNA, 23 nt, Human papillomavirus type 18
gacacagggucggauaugguaga

SEQ ID NO: 4009908 - RNA, 22 nt, Human papillomavirus type 18
gacagcacaggcauuguuccau

SEQ ID NO: 4009909 - RNA, 16 nt, Human papillomavirus type 18
gacgaaaaugcaacag

SEQ ID NO: 4009910 - RNA, 19 nt, Human papillomavirus type 18
gcaauuaagcgacucagag

SEQ ID NO: 4009911 - RNA, 19 nt, Human papillomavirus type 18
gcagaaaaaggcaaaaagg

SEQ ID NO: 4009912 - RNA, 20 nt, Human papillomavirus type 18
gcauuuagagccccaaaaug

SEQ ID NO: 4009913 - RNA, 22 nt, Human papillomavirus type 18
gccaugucccgcuuuugccauc

SEQ ID NO: 4009914 - RNA, 22 nt, Human papillomavirus type 18
gcggcuggagguggauacagag

SEQ ID NO: 4009915 - RNA, 18 nt, Human papillomavirus type 18
ggcaaaaaggcggcuguu

SEQ ID NO: 4009916 - RNA, 23 nt, Human papillomavirus type 18
ggcacggguuguaacggcugguu

SEQ ID NO: 4009917 - RNA, 14 nt, Human papillomavirus type 18
ggcagcacagaaaa

SEQ ID NO: 4009918 - RNA, 21 nt, Human papillomavirus type 18
ggcguuccaauacaguggugg

SEQ ID NO: 4009919 - RNA, 22 nt, Human papillomavirus type 18
guaaagacauagacagccaaau

SEQ ID NO: 4009920 - RNA, 11 nt, Human papillomavirus type 18
guauguccugu

SEQ ID NO: 4009921 - RNA, 23 nt, Human papillomavirus type 18
gucuguaugugugcguaugcaug

SEQ ID NO: 4009922 - RNA, 12 nt, Human papillomavirus type 18
gugaagccagaa

SEQ ID NO: 4009923 - RNA, 20 nt, Human papillomavirus type 18
guguguauauauauauacau

SEQ ID NO: 4009924 - RNA, 14 nt, Human papillomavirus type 18
guugggaaaaugca

SEQ ID NO: 4009925 - RNA, 20 nt, Human papillomavirus type 18
uaaaauguuuacgguacaga

SEQ ID NO: 4009926 - RNA, 21 nt, Human papillomavirus type 18
uaacggcugguuuuauguaca

SEQ ID NO: 4009927 - RNA, 20 nt, Human papillomavirus type 18
uaacuguugguaauccauau

SEQ ID NO: 4009928 - RNA, 17 nt, Human papillomavirus type 18
uaauaacguccccugcc

SEQ ID NO: 4009929 - RNA, 19 nt, Human papillomavirus type 18
uacacgucccccagugguu

SEQ ID NO: 4009930 - RNA, 17 nt, Human papillomavirus type 18
uagacaaaaaaacagga

SEQ ID NO: 4009931 - RNA, 23 nt, Human papillomavirus type 18
uagugaguaacaacuguauuugu

SEQ ID NO: 4009932 - RNA, 17 nt, Human papillomavirus type 18
uauaucauccaccuggc

SEQ ID NO: 4009933 - RNA, 20 nt, Human papillomavirus type 18
uauauuuuguuuuauaccuu

SEQ ID NO: 4009934 - RNA, 20 nt, Human papillomavirus type 18
uaugcauggaccuaaggcaa

SEQ ID NO: 4009935 - RNA, 14 nt, Human papillomavirus type 18
uauguccuguguuu

SEQ ID NO: 4009936 - RNA, 14 nt, Human papillomavirus type 18
uauuguccuguauu

SEQ ID NO: 4009937 - RNA, 13 nt, Human papillomavirus type 18
ucccccagugguu

SEQ ID NO: 4009938 - RNA, 17 nt, Human papillomavirus type 18
ucccgcuuuugccaucu

SEQ ID NO: 4009939 - RNA, 19 nt, Human papillomavirus type 18
ucuauuguuguguuuguau

SEQ ID NO: 4009940 - RNA, 13 nt, Human papillomavirus type 18
ugcaggaggcagc

SEQ ID NO: 4009941 - RNA, 17 nt, Human papillomavirus type 18
ugcaggaggcagcacag

SEQ ID NO: 4009942 - RNA, 20 nt, Human papillomavirus type 18
ugcaggugguggcaauaagc

SEQ ID NO: 4009943 - RNA, 23 nt, Human papillomavirus type 18
ugcauguaugugugcugccaugu

SEQ ID NO: 4009944 - RNA, 17 nt, Human papillomavirus type 18
ugccaucugucuguaug

SEQ ID NO: 4009945 - RNA, 22 nt, Human papillomavirus type 18
ugccaucugucuguaugugugc

SEQ ID NO: 4009946 - RNA, 21 nt, Human papillomavirus type 18
uggacaggugcaggcaaugaa

SEQ ID NO: 4009947 - RNA, 17 nt, Human papillomavirus type 18
uggcuuaugucuguggu

SEQ ID NO: 4009948 - RNA, 19 nt, Human papillomavirus type 18
uggcuuaugucugugguuu

SEQ ID NO: 4009949 - RNA, 22 nt, Human papillomavirus type 18
ugggcguuccaauacaguggug

SEQ ID NO: 4009950 - RNA, 16 nt, Human papillomavirus type 18
uggugggauacaugac

SEQ ID NO: 4009951 - RNA, 22 nt, Human papillomavirus type 18
ugugacucccacaagcauauuu

SEQ ID NO: 4009952 - RNA, 18 nt, Human papillomavirus type 18
uguugguaauccauauuu

SEQ ID NO: 4009953 - RNA, 15 nt, Human papillomavirus type 18
uuacaguaauuguau

SEQ ID NO: 4009954 - RNA, 14 nt, Human papillomavirus type 18
uuaccugauacuag

SEQ ID NO: 4009955 - RNA, 17 nt, Human papillomavirus type 18
uuguaugauugcauugu

SEQ ID NO: 4009956 - RNA, 17 nt, Human papillomavirus type 18
uuguauguuacuauauu

SEQ ID NO: 4009957 - RNA, 14 nt, Human papillomavirus type 18
uuuguauguccugu

SEQ ID NO: 4009958 - RNA, 16 nt, Human papillomavirus type 18
uuuguauuuuuguaau

SEQ ID NO: 4009959 - RNA, 22 nt, Human papillomavirus type 18
cugcauaccaauauagaguauu

SEQ ID NO: 4009960 - RNA, 19 nt, Human papillomavirus type 18
cuguaacauaccauaguga

SEQ ID NO: 4009961 - RNA, 14 nt, Human papillomavirus type 18
cuguaugugugcgu

SEQ ID NO: 4009962 - RNA, 14 nt, Human papillomavirus type 18
cuguguuuguguuu

SEQ ID NO: 4009963 - RNA, 22 nt, Human papillomavirus type 18
gaaaacaguccauuaggggagc

SEQ ID NO: 4009964 - RNA, 20 nt, Human papillomavirus type 18
gacgaaaaugcaacagacac

SEQ ID NO: 4009965 - RNA, 14 nt, Human papillomavirus type 18
gagcuagagacagc

SEQ ID NO: 4009966 - RNA, 17 nt, Human papillomavirus type 31
auguacuguuguggaag

SEQ ID NO: 4009967 - RNA, 17 nt, Human papillomavirus type 31
auguguuagauuugcaa

SEQ ID NO: 4009968 - RNA, 20 nt, Human papillomavirus type 31
auguuggaaacauuaaauaa

SEQ ID NO: 4009969 - RNA, 21 nt, Human papillomavirus type 31
auucauacacaugcaucuuuu

SEQ ID NO: 4009970 - RNA, 13 nt, Human papillomavirus type 31
auugacagacaga

SEQ ID NO: 4009971 - RNA, 15 nt, Human papillomavirus type 31
auuuuuuaaauacug

SEQ ID NO: 4009972 - RNA, 14 nt, Human papillomavirus type 31
caaaaaugaggacu

SEQ ID NO: 4009973 - RNA, 21 nt, Human papillomavirus type 31
caaaugauguuggaaacauua

SEQ ID NO: 4009974 - RNA, 15 nt, Human papillomavirus type 31
cagaagcagagacag

SEQ ID NO: 4009975 - RNA, 17 nt, Human papillomavirus type 31
caggcagaagcagagac

SEQ ID NO: 4009976 - RNA, 16 nt, Human papillomavirus type 31
cagguacagaugggga

SEQ ID NO: 4009977 - RNA, 15 nt, Human papillomavirus type 31
caguaaaacagcaaa

SEQ ID NO: 4009978 - RNA, 17 nt, Human papillomavirus type 31
caguaauugacagacag

SEQ ID NO: 4009979 - RNA, 22 nt, Human papillomavirus type 31
caguaauugacagacagacagg

SEQ ID NO: 4009980 - RNA, 12 nt, Human papillomavirus type 31
caguccagcugg

SEQ ID NO: 4009981 - RNA, 18 nt, Human papillomavirus type 31
cauagacaguccagcugg

SEQ ID NO: 4009982 - RNA, 20 nt, Human papillomavirus type 31
cauauagacuauuggaaaca

SEQ ID NO: 4009983 - RNA, 17 nt, Human papillomavirus type 31
cauguacuuauuucugc

SEQ ID NO: 4009984 - RNA, 19 nt, Human papillomavirus type 31
cauugugcuaugcuuuuug

SEQ ID NO: 4009985 - RNA, 11 nt, Human papillomavirus type 31
ccagacagcgg

SEQ ID NO: 4009986 - RNA, 16 nt, Human papillomavirus type 31
ccagcagguacagaug

SEQ ID NO: 4009987 - RNA, 13 nt, Human papillomavirus type 31
cgcaggcagugcu

SEQ ID NO: 4009988 - RNA, 17 nt, Human papillomavirus type 31
cggaggaacaugcagag

SEQ ID NO: 4009989 - RNA, 22 nt, Human papillomavirus type 31
cuacuauuauuaauugugauuu

SEQ ID NO: 4009990 - RNA, 20 nt, Human papillomavirus type 31
cuacugucuacuuaccaccu

SEQ ID NO: 4009991 - RNA, 22 nt, Human papillomavirus type 31
cuagacuguaacuacaauggcu

SEQ ID NO: 4009992 - RNA, 13 nt, Human papillomavirus type 31
cucuaauagauau

SEQ ID NO: 4009993 - RNA, 22 nt, Human papillomavirus type 31
cuugaacuguauuuaacugcac

SEQ ID NO: 4009994 - RNA, 13 nt, Human papillomavirus type 31
gaaaaugaagaca

SEQ ID NO: 4009995 - RNA, 15 nt, Human papillomavirus type 31
gaagcagagacagca

SEQ ID NO: 4009996 - RNA, 18 nt, Human papillomavirus type 31
gaauguguauuaauguau

SEQ ID NO: 4009997 - RNA, 15 nt, Human papillomavirus type 31
gauauaggcugucaa

SEQ ID NO: 4009998 - RNA, 21 nt, Human papillomavirus type 31
gaucauauagacuauuggaaa

SEQ ID NO: 4009999 - RNA, 15 nt, Human papillomavirus type 31
gcagaggcugugcag

SEQ ID NO: 4010000 - RNA, 14 nt, Human papillomavirus type 31
gcuggacaagcaga

SEQ ID NO: 4010001 - RNA, 14 nt, Human papillomavirus type 31
ggaggaacaugcag

SEQ ID NO: 4010002 - RNA, 21 nt, Human papillomavirus type 31
ggaggggacgggaugcaaugg

SEQ ID NO: 4010003 - RNA, 23 nt, Human papillomavirus type 31
ggaugucauagacaguccagcug

SEQ ID NO: 4010004 - RNA, 23 nt, Human papillomavirus type 31
ggccaaagccuuacaagcuauug

SEQ ID NO: 4010005 - RNA, 17 nt, Human papillomavirus type 31
guaagcauugugcuaug

SEQ ID NO: 4010006 - RNA, 22 nt, Human papillomavirus type 31
guaauugacagacagacagggg

SEQ ID NO: 4010007 - RNA, 13 nt, Human papillomavirus type 31
guaccaaaggugu

SEQ ID NO: 4010008 - RNA, 17 nt, Human papillomavirus type 31
guauaccuauuagacca

SEQ ID NO: 4010009 - RNA, 20 nt, Human papillomavirus type 31
guauguuguccuuauauaca

SEQ ID NO: 4010010 - RNA, 14 nt, Human papillomavirus type 31
guauguuuauguau

SEQ ID NO: 4010011 - RNA, 17 nt, Human papillomavirus type 31
gucaacaggauauauga

SEQ ID NO: 4010012 - RNA, 21 nt, Human papillomavirus type 31
gucaacaggauauaugacuau

SEQ ID NO: 4010013 - RNA, 14 nt, Human papillomavirus type 31
gucauguacuuauu

SEQ ID NO: 4010014 - RNA, 19 nt, Human papillomavirus type 31
gugucaacaggauauauga

SEQ ID NO: 4010015 - RNA, 13 nt, Human papillomavirus type 31
guuccuacuuguu

SEQ ID NO: 4010016 - RNA, 13 nt, Human papillomavirus type 31
uaaaaguuguaca

SEQ ID NO: 4010017 - RNA, 16 nt, Human papillomavirus type 31
uaaacuauuguuccua

SEQ ID NO: 4010018 - RNA, 22 nt, Human papillomavirus type 31
uacuauuugugugucuugucau

SEQ ID NO: 4010019 - RNA, 17 nt, Human papillomavirus type 31
uagauaugccggugguc

SEQ ID NO: 4010020 - RNA, 19 nt, Human papillomavirus type 31
uaggucgcgggcagccauu

SEQ ID NO: 4010021 - RNA, 17 nt, Human papillomavirus type 31
uagugauacuggggagg

SEQ ID NO: 4010022 - RNA, 14 nt, Human papillomavirus type 31
uaguuguaccaaag

SEQ ID NO: 4010023 - RNA, 17 nt, Human papillomavirus type 31
uauaaacaauuguauga

SEQ ID NO: 4010024 - RNA, 15 nt, Human papillomavirus type 31
uauaucaaacaugua

SEQ ID NO: 4010025 - RNA, 17 nt, Human papillomavirus type 31
uauauuaaaauguuuaa

SEQ ID NO: 4010026 - RNA, 19 nt, Human papillomavirus type 31
uaucacgcaggcagugcua

SEQ ID NO: 4010027 - RNA, 15 nt, Human papillomavirus type 31
uauguaauacaugug

SEQ ID NO: 4010028 - RNA, 14 nt, Human papillomavirus type 31
uauguauguuuaug

SEQ ID NO: 4010029 - RNA, 18 nt, Human papillomavirus type 31
uauuaauguauaaagcaa

SEQ ID NO: 4010030 - RNA, 13 nt, Human papillomavirus type 31
uauuaauugugau

SEQ ID NO: 4010031 - RNA, 15 nt, Human papillomavirus type 31
uauuauuaccaugcg

SEQ ID NO: 4010032 - RNA, 15 nt, Human papillomavirus type 31
uauuguauaugugug

SEQ ID NO: 4010033 - RNA, 16 nt, Human papillomavirus type 31
uauuguuccuacuugu

SEQ ID NO: 4010034 - RNA, 20 nt, Human papillomavirus type 31
uauuuaggguucguuuacca

SEQ ID NO: 4010035 - RNA, 12 nt, Human papillomavirus type 31
uccugaaacuca

SEQ ID NO: 4010036 - RNA, 12 nt, Human papillomavirus type 31
ucugacaauccu

SEQ ID NO: 4010037 - RNA, 19 nt, Human papillomavirus type 31
ugagcaauuacccgacagc

SEQ ID NO: 4010038 - RNA, 22 nt, Human papillomavirus type 31
ugauguacacaacaccaugcau

SEQ ID NO: 4010039 - RNA, 17 nt, Human papillomavirus type 31
ugauugaacuaaauauu

SEQ ID NO: 4010040 - RNA, 16 nt, Human papillomavirus type 31
ugcaacacuacuauua

SEQ ID NO: 4010041 - RNA, 19 nt, Human papillomavirus type 31
uggacaaugcagcaaacaa

SEQ ID NO: 4010042 - RNA, 16 nt, Human papillomavirus type 31
uggcugauccagcagg

SEQ ID NO: 4010043 - RNA, 19 nt, Human papillomavirus type 31
uguaauucauacacaugca

SEQ ID NO: 4010044 - RNA, 15 nt, Human papillomavirus type 31
uguauagauggccaa

SEQ ID NO: 4010045 - RNA, 12 nt, Human papillomavirus type 31
uguauauauguu

SEQ ID NO: 4010046 - RNA, 18 nt, Human papillomavirus type 31
uguauguaauacaugugu

SEQ ID NO: 4010047 - RNA, 19 nt, Human papillomavirus type 31
uguauuaauguauaaagca

SEQ ID NO: 4010048 - RNA, 18 nt, Human papillomavirus type 31
ugucaacaggauauauga

SEQ ID NO: 4010049 - RNA, 19 nt, Human papillomavirus type 31
ugucaguaucaaaggccaa

SEQ ID NO: 4010050 - RNA, 23 nt, Human papillomavirus type 31
ugucauacguccacuugugcugu

SEQ ID NO: 4010051 - RNA, 13 nt, Human papillomavirus type 31
uuaaauaaauuug

SEQ ID NO: 4010052 - RNA, 13 nt, Human papillomavirus type 31
uuauaauccugaa

SEQ ID NO: 4010053 - RNA, 17 nt, Human papillomavirus type 31
uuauauaccuauguaua

SEQ ID NO: 4010054 - RNA, 17 nt, Human papillomavirus type 31
uucgcauauugcaagag

SEQ ID NO: 4010055 - RNA, 21 nt, Human papillomavirus type 31
uugaugacacugaaaacucua

SEQ ID NO: 4010056 - RNA, 12 nt, Human papillomavirus type 31
uuggaaacauua

SEQ ID NO: 4010057 - RNA, 14 nt, Human papillomavirus type 31
uuguaaccuuaaca

SEQ ID NO: 4010058 - RNA, 17 nt, Human papillomavirus type 31
uuuauaauccugaaacu

SEQ ID NO: 4010059 - RNA, 19 nt, Human papillomavirus type 31
uuuauguagaagcaguaau

SEQ ID NO: 4010060 - RNA, 15 nt, Human papillomavirus type 31
uuuguguguuauaua

SEQ ID NO: 4010061 - RNA, 17 nt, Human papillomavirus type 31
uuuuuuacuuguguaua

SEQ ID NO: 4010062 - RNA, 16 nt, Human papillomavirus type 31
auugaacuacaaauga

SEQ ID NO: 4010063 - RNA, 16 nt, Human papillomavirus type 31
caaaugauguuggaaa

SEQ ID NO: 4010064 - RNA, 23 nt, Human papillomavirus type 31
caaauuuggauuuccugauacau

SEQ ID NO: 4010065 - RNA, 18 nt, Human papillomavirus type 31
caacaaucaggcagaagc

SEQ ID NO: 4010066 - RNA, 16 nt, Human papillomavirus type 31
caaccucuccauuacg

SEQ ID NO: 4010067 - RNA, 16 nt, Human papillomavirus type 31
caagagaaaugggaau

SEQ ID NO: 4010068 - RNA, 19 nt, Human papillomavirus type 31
caagagcuguuaaugggcu

SEQ ID NO: 4010069 - RNA, 18 nt, Human papillomavirus type 31
cacaguauuaaccaccag

SEQ ID NO: 4010070 - RNA, 17 nt, Human papillomavirus type 31
caccuacguugcaagac

SEQ ID NO: 4010071 - RNA, 23 nt, Human papillomavirus type 31
caucuuuuuuaagucaacaguaa

SEQ ID NO: 4010072 - RNA, 23 nt, Human papillomavirus type 31
ccugucccagugucuaaaguugu

SEQ ID NO: 4010073 - RNA, 16 nt, Human papillomavirus type 31
cuaaaaaaauaguugu

SEQ ID NO: 4010074 - RNA, 22 nt, Human papillomavirus type 31
cuacuccauuuugauuuuaugc

SEQ ID NO: 4010075 - RNA, 15 nt, Human papillomavirus type 31
cuauuagaccaccag

SEQ ID NO: 4010076 - RNA, 17 nt, Human papillomavirus type 31
cugaccuccacuguuau

SEQ ID NO: 4010077 - RNA, 10 nt, Human papillomavirus type 31
cuuacaagcu

SEQ ID NO: 4010078 - RNA, 12 nt, Human papillomavirus type 31
cuugugcugucu

SEQ ID NO: 4010079 - RNA, 18 nt, Human papillomavirus type 31
gaaaauaacaguaaaaca

SEQ ID NO: 4010080 - RNA, 19 nt, Human papillomavirus type 31
gaaacauauucgacuugaa

SEQ ID NO: 4010081 - RNA, 21 nt, Human papillomavirus type 31
gaaacauuaaauaacacugaa

SEQ ID NO: 4010082 - RNA, 21 nt, Human papillomavirus type 31
gaacuaaauauuucuacagua

SEQ ID NO: 4010083 - RNA, 14 nt, Human papillomavirus type 31
gaacuuccagacag

SEQ ID NO: 4010084 - RNA, 22 nt, Human papillomavirus type 31
gaagacucuuugaacuuccaga

SEQ ID NO: 4010085 - RNA, 22 nt, Human papillomavirus type 31
gaagcaguaauugacagacaga

SEQ ID NO: 4010086 - RNA, 22 nt, Human papillomavirus type 31
gacaguccagcuggacaagcag

SEQ ID NO: 4010087 - RNA, 14 nt, Human papillomavirus type 31
gacauguacagaug

SEQ ID NO: 4010088 - RNA, 21 nt, Human papillomavirus type 31
gacuauuuagccuaaugauug

SEQ ID NO: 4010089 - RNA, 19 nt, Human papillomavirus type 31
gacuggacaaugcagcaaa

SEQ ID NO: 4010090 - RNA, 14 nt, Human papillomavirus type 31
gaggacuggacaau

SEQ ID NO: 4010091 - RNA, 19 nt, Human papillomavirus type 31
gauccagcagguacagaug

SEQ ID NO: 4010092 - RNA, 13 nt, Human papillomavirus type 31
gaugcaaugguug

SEQ ID NO: 4010093 - RNA, 15 nt, Human papillomavirus type 31
gaugucauagacagu

SEQ ID NO: 4010094 - RNA, 18 nt, Human papillomavirus type 31
gcagaagcagagacagca

SEQ ID NO: 4010095 - RNA, 19 nt, Human papillomavirus type 31
gcaguaauugacagacaga

SEQ ID NO: 4010096 - RNA, 17 nt, Human papillomavirus type 31
ggaggaacaugcagagg

SEQ ID NO: 4010097 - RNA, 15 nt, Human papillomavirus type 31
gggacaacauuucag

SEQ ID NO: 4010098 - RNA, 14 nt, Human papillomavirus type 31
gggaggggacggga

SEQ ID NO: 4010099 - RNA, 16 nt, Human papillomavirus type 31
gguacagauggggagg

SEQ ID NO: 4010100 - RNA, 14 nt, Human papillomavirus type 31
gguauauguauguu

SEQ ID NO: 4010101 - RNA, 18 nt, Human papillomavirus type 31
guaggccauccauauuau

SEQ ID NO: 4010102 - RNA, 18 nt, Human papillomavirus type 31
guccacuugugcugucug

SEQ ID NO: 4010103 - RNA, 20 nt, Human papillomavirus type 31
uaaagcaagagaaaugggaa

SEQ ID NO: 4010104 - RNA, 14 nt, Human papillomavirus type 31
uaaauauguguaua

SEQ ID NO: 4010105 - RNA, 22 nt, Human papillomavirus type 31
uaagauauaggcugucaaaaua

SEQ ID NO: 4010106 - RNA, 13 nt, Human papillomavirus type 31
uaauaaauaugug

SEQ ID NO: 4010107 - RNA, 18 nt, Human papillomavirus type 31
uacacaugcaucuuuuuu

SEQ ID NO: 4010108 - RNA, 19 nt, Human papillomavirus type 31
uacaguaggccauccauau

SEQ ID NO: 4010109 - RNA, 20 nt, Human papillomavirus type 31
uacauggcauuggacaugua

SEQ ID NO: 4010110 - RNA, 13 nt, Human papillomavirus type 31
uacguugcaagac

SEQ ID NO: 4010111 - RNA, 16 nt, Human papillomavirus type 31
uacugucuacuuacca

SEQ ID NO: 4010112 - RNA, 15 nt, Human papillomavirus type 31
uacuguuguuuguau

SEQ ID NO: 4010113 - RNA, 18 nt, Human papillomavirus type 31
uauaaacaauuguaugaa

SEQ ID NO: 4010114 - RNA, 15 nt, Human papillomavirus type 31
uauaaagcaagagaa

SEQ ID NO: 4010115 - RNA, 18 nt, Human papillomavirus type 31
uauaauccugaaacucaa

SEQ ID NO: 4010116 - RNA, 17 nt, Human papillomavirus type 31
uauagacuauuggaaac

SEQ ID NO: 4010117 - RNA, 15 nt, Human papillomavirus type 31
uauagauggccaaug

SEQ ID NO: 4010118 - RNA, 13 nt, Human papillomavirus type 31
uauauuccauuau

SEQ ID NO: 4010119 - RNA, 20 nt, Human papillomavirus type 31
uauggguguuuuuuuuggug

SEQ ID NO: 4010120 - RNA, 21 nt, Human papillomavirus type 31
uauguaugcguguguacuugu

SEQ ID NO: 4010121 - RNA, 17 nt, Human papillomavirus type 31
uauguuguccuuauaua

SEQ ID NO: 4010122 - RNA, 14 nt, Human papillomavirus type 31
uauuaaauaaauuu

SEQ ID NO: 4010123 - RNA, 23 nt, Human papillomavirus type 31
ucagaggacgaaaaugaagacag

SEQ ID NO: 4010124 - RNA, 16 nt, Human papillomavirus type 31
uccauaccuaaaucug

SEQ ID NO: 4010125 - RNA, 15 nt, Human papillomavirus type 31
uccauuuugauuuua

SEQ ID NO: 4010126 - RNA, 16 nt, Human papillomavirus type 31
ucccaauagucaugua

SEQ ID NO: 4010127 - RNA, 13 nt, Human papillomavirus type 31
uccuucuacagua

SEQ ID NO: 4010128 - RNA, 16 nt, Human papillomavirus type 31
ugaacuuccagacagc

SEQ ID NO: 4010129 - RNA, 15 nt, Human papillomavirus type 31
ugacagacagacagg

SEQ ID NO: 4010130 - RNA, 21 nt, Human papillomavirus type 31
ugagcaauuacccgacagcuc

SEQ ID NO: 4010131 - RNA, 13 nt, Human papillomavirus type 31
ugaggacuggaca

SEQ ID NO: 4010132 - RNA, 16 nt, Human papillomavirus type 31
ugaggacuggacaaug

SEQ ID NO: 4010133 - RNA, 16 nt, Human papillomavirus type 31
ugcaaccucuccauua

SEQ ID NO: 4010134 - RNA, 22 nt, Human papillomavirus type 31
ugcaaugguugguuuuauguag

SEQ ID NO: 4010135 - RNA, 15 nt, Human papillomavirus type 31
uguagaggugcaauu

SEQ ID NO: 4010136 - RNA, 14 nt, Human papillomavirus type 31
uguauauauguaua

SEQ ID NO: 4010137 - RNA, 22 nt, Human papillomavirus type 31
uguauguuaauaaauaugugua

SEQ ID NO: 4010138 - RNA, 15 nt, Human papillomavirus type 31
ugucgguauaugcaa

SEQ ID NO: 4010139 - RNA, 19 nt, Human papillomavirus type 31
ugugcagguucuaaaacga

SEQ ID NO: 4010140 - RNA, 13 nt, Human papillomavirus type 31
uguguauacuguu

SEQ ID NO: 4010141 - RNA, 17 nt, Human papillomavirus type 31
ugugucgguauaugcaa

SEQ ID NO: 4010142 - RNA, 15 nt, Human papillomavirus type 31
uuaaaaaaacaugga

SEQ ID NO: 4010143 - RNA, 16 nt, Human papillomavirus type 31
uuaagugauauuagua

SEQ ID NO: 4010144 - RNA, 21 nt, Human papillomavirus type 31
uugaauguguauuaauguaua

SEQ ID NO: 4010145 - RNA, 17 nt, Human papillomavirus type 31
uuggauuuccugauaca

SEQ ID NO: 4010146 - RNA, 19 nt, Human papillomavirus type 31
uuguaugaacaagugucau

SEQ ID NO: 4010147 - RNA, 17 nt, Human papillomavirus type 31
uuuauggguuauugcaa

SEQ ID NO: 4010148 - RNA, 14 nt, Human papillomavirus type 31
uuugugugucuugu

SEQ ID NO: 4010149 - RNA, 15 nt, Human papillomavirus type 31
gagacagcacaggca

SEQ ID NO: 4010150 - RNA, 13 nt, Human papillomavirus type 31
gaggauaugguug

SEQ ID NO: 4010151 - RNA, 13 nt, Human papillomavirus type 31
gcaaauauauuaa

SEQ ID NO: 4010152 - RNA, 22 nt, Human papillomavirus type 31
gcaacacuacuauuauuaauug

SEQ ID NO: 4010153 - RNA, 17 nt, Human papillomavirus type 31
gcaacugaccuccacug

SEQ ID NO: 4010154 - RNA, 16 nt, Human papillomavirus type 31
gcaaugguugguuuua

SEQ ID NO: 4010155 - RNA, 21 nt, Human papillomavirus type 31
ggaagcggaggaacaugcaga

SEQ ID NO: 4010156 - RNA, 22 nt, Human papillomavirus type 31
guaacauacuauuacuauuuua

SEQ ID NO: 4010157 - RNA, 16 nt, Human papillomavirus type 31
guaaccuuaacauaua

SEQ ID NO: 4010158 - RNA, 18 nt, Human papillomavirus type 31
gucaguguaagucuacac

SEQ ID NO: 4010159 - RNA, 20 nt, Human papillomavirus type 31
guccaucagacguuauaccu

SEQ ID NO: 4010160 - RNA, 16 nt, Human papillomavirus type 31
gucuguauguguaugu

SEQ ID NO: 4010161 - RNA, 13 nt, Human papillomavirus type 31
guguacagagcac

SEQ ID NO: 4010162 - RNA, 21 nt, Human papillomavirus type 31
guguguacuuguauauaugua

SEQ ID NO: 4010163 - RNA, 17 nt, Human papillomavirus type 31
uaaacgugcgucugcua

SEQ ID NO: 4010164 - RNA, 23 nt, Human papillomavirus type 31
uaaauaaauuugaugacacugaa

SEQ ID NO: 4010165 - RNA, 16 nt, Human papillomavirus type 31
uaacaguaaaacagca

SEQ ID NO: 4010166 - RNA, 20 nt, Human papillomavirus type 31
uaagucaacaguaacuuuuu

SEQ ID NO: 4010167 - RNA, 16 nt, Human papillomavirus type 31
uaauacaugugucugu

SEQ ID NO: 4010168 - RNA, 21 nt, Human papillomavirus type 31
uacaugugucuguauguguau

SEQ ID NO: 4010169 - RNA, 12 nt, Human papillomavirus type 31
uacuuguuccug

SEQ ID NO: 4010170 - RNA, 23 nt, Human papillomavirus type 31
uauauauguauaguauguuaugu

SEQ ID NO: 4010171 - RNA, 15 nt, Human papillomavirus type 31
uauaugguauaugua

SEQ ID NO: 4010172 - RNA, 23 nt, Human papillomavirus type 31
uauguaugcguguguacuuguau

SEQ ID NO: 4010173 - RNA, 21 nt, Human papillomavirus type 31
uauucgacuugaauguguauu

SEQ ID NO: 4010174 - RNA, 14 nt, Human papillomavirus type 31
uauuguaaccuuaa

SEQ ID NO: 4010175 - RNA, 18 nt, Human papillomavirus type 31
uauuguaaccuuaacaua

SEQ ID NO: 4010176 - RNA, 20 nt, Human papillomavirus type 31
uauuugugugucuugucaua

SEQ ID NO: 4010177 - RNA, 17 nt, Human papillomavirus type 31
ucaacaguaacuuuuuu

SEQ ID NO: 4010178 - RNA, 14 nt, Human papillomavirus type 31
ucacgccauaguaa

SEQ ID NO: 4010179 - RNA, 16 nt, Human papillomavirus type 31
ucaggcagaagcagag

SEQ ID NO: 4010180 - RNA, 19 nt, Human papillomavirus type 31
ucaguaucaaaggccaaag

SEQ ID NO: 4010181 - RNA, 22 nt, Human papillomavirus type 31
ucauauagacuauuggaaacau

SEQ ID NO: 4010182 - RNA, 20 nt, Human papillomavirus type 31
ucgugugccccaacuguucu

SEQ ID NO: 4010183 - RNA, 23 nt, Human papillomavirus type 31
ucuaaaacgaaaguauguaggua

SEQ ID NO: 4010184 - RNA, 15 nt, Human papillomavirus type 31
ucuacaguaagcauu

SEQ ID NO: 4010185 - RNA, 13 nt, Human papillomavirus type 31
ucuacauggcauu

SEQ ID NO: 4010186 - RNA, 19 nt, Human papillomavirus type 31
ugaacuguauuuaacugca

SEQ ID NO: 4010187 - RNA, 20 nt, Human papillomavirus type 31
ugagcaauuacccgacagcu

SEQ ID NO: 4010188 - RNA, 16 nt, Human papillomavirus type 31
ugaggaggaugucaua

SEQ ID NO: 4010189 - RNA, 13 nt, Human papillomavirus type 31
ugauguuggaaac

SEQ ID NO: 4010190 - RNA, 15 nt, Human papillomavirus type 31
ugauguuggaaacau

SEQ ID NO: 4010191 - RNA, 23 nt, Human papillomavirus type 31
ugauguuggaaacauuaaauaac

SEQ ID NO: 4010192 - RNA, 17 nt, Human papillomavirus type 31
ugcaagacuauguguua

SEQ ID NO: 4010193 - RNA, 14 nt, Human papillomavirus type 31
ugcaagagcuguua

SEQ ID NO: 4010194 - RNA, 17 nt, Human papillomavirus type 31
ugcuaugcuuuuugcuu

SEQ ID NO: 4010195 - RNA, 13 nt, Human papillomavirus type 31
uggauauacugua

SEQ ID NO: 4010196 - RNA, 12 nt, Human papillomavirus type 31
ugugaucauaua

SEQ ID NO: 4010197 - RNA, 23 nt, Human papillomavirus type 31
ugugauuuuauggguuauugcaa

SEQ ID NO: 4010198 - RNA, 17 nt, Human papillomavirus type 31
ugugccccaacuguucu

SEQ ID NO: 4010199 - RNA, 13 nt, Human papillomavirus type 31
uguguauguaugc

SEQ ID NO: 4010200 - RNA, 22 nt, Human papillomavirus type 31
uguuuaagauauaggcugucaa

SEQ ID NO: 4010201 - RNA, 22 nt, Human papillomavirus type 31
uucuacaguaagcauugugcua

SEQ ID NO: 4010202 - RNA, 15 nt, Human papillomavirus type 31
uuguuuuuguauaua

SEQ ID NO: 4010203 - RNA, 15 nt, Human papillomavirus type 31
gugucgguauaugca

SEQ ID NO: 4010204 - RNA, 15 nt, Human papillomavirus type 31
guguguuguguaugu

SEQ ID NO: 4010205 - RNA, 16 nt, Human papillomavirus type 31
uaaaacagcaaaacga

SEQ ID NO: 4010206 - RNA, 20 nt, Human papillomavirus type 31
uaaaaggugaugcaaauaua

SEQ ID NO: 4010207 - RNA, 12 nt, Human papillomavirus type 31
uaaauaugugua

SEQ ID NO: 4010208 - RNA, 17 nt, Human papillomavirus type 31
uaaauauuucuacagua

SEQ ID NO: 4010209 - RNA, 15 nt, Human papillomavirus type 31
uaacacugaauacaa

SEQ ID NO: 4010210 - RNA, 17 nt, Human papillomavirus type 31
uaauguauaaagcaaga

SEQ ID NO: 4010211 - RNA, 17 nt, Human papillomavirus type 31
uacuauuugugugucuu

SEQ ID NO: 4010212 - RNA, 22 nt, Human papillomavirus type 31
uacuguaaaaauaccuaacaca

SEQ ID NO: 4010213 - RNA, 19 nt, Human papillomavirus type 31
uacuguuguggaagggcaa

SEQ ID NO: 4010214 - RNA, 16 nt, Human papillomavirus type 31
uacuuguauauaugua

SEQ ID NO: 4010215 - RNA, 16 nt, Human papillomavirus type 31
uagacaguccagcugg

SEQ ID NO: 4010216 - RNA, 15 nt, Human papillomavirus type 31
uagguauuagugguc

SEQ ID NO: 4010217 - RNA, 17 nt, Human papillomavirus type 31
uaguaaaaguuguacac

SEQ ID NO: 4010218 - RNA, 17 nt, Human papillomavirus type 31
uaguauguuaugugugu

SEQ ID NO: 4010219 - RNA, 12 nt, Human papillomavirus type 31
uauaauaaacuu

SEQ ID NO: 4010220 - RNA, 15 nt, Human papillomavirus type 31
uauaauccugaaacu

SEQ ID NO: 4010221 - RNA, 22 nt, Human papillomavirus type 31
uauagauggccaauguacuguu

SEQ ID NO: 4010222 - RNA, 11 nt, Human papillomavirus type 31
uauaugugugu

SEQ ID NO: 4010223 - RNA, 14 nt, Human papillomavirus type 31
uauauuaaaauguu

SEQ ID NO: 4010224 - RNA, 14 nt, Human papillomavirus type 31
uaugcguguguacu

SEQ ID NO: 4010225 - RNA, 22 nt, Human papillomavirus type 31
uauguauaguauguuaugugug

SEQ ID NO: 4010226 - RNA, 17 nt, Human papillomavirus type 31
uauguuguguuuauaua

SEQ ID NO: 4010227 - RNA, 15 nt, Human papillomavirus type 31
uauuccauaccuaaa

SEQ ID NO: 4010228 - RNA, 19 nt, Human papillomavirus type 31
uauugcaagagcuguuaau

SEQ ID NO: 4010229 - RNA, 20 nt, Human papillomavirus type 31
uauuuagccuaaugauugaa

SEQ ID NO: 4010230 - RNA, 14 nt, Human papillomavirus type 31
ucaggcagaagcag

SEQ ID NO: 4010231 - RNA, 23 nt, Human papillomavirus type 31
uccagcagguacagauggggagg

SEQ ID NO: 4010232 - RNA, 18 nt, Human papillomavirus type 31
uccauaccuaaaucugac

SEQ ID NO: 4010233 - RNA, 15 nt, Human papillomavirus type 31
uccucccaauaguca

SEQ ID NO: 4010234 - RNA, 17 nt, Human papillomavirus type 31
ugacaauuguaauguau

SEQ ID NO: 4010235 - RNA, 19 nt, Human papillomavirus type 31
ugaggacuggacaaugcag

SEQ ID NO: 4010236 - RNA, 13 nt, Human papillomavirus type 31
ugauguacacaac

SEQ ID NO: 4010237 - RNA, 21 nt, Human papillomavirus type 31
uggcugauccagcagguacag

SEQ ID NO: 4010238 - RNA, 14 nt, Human papillomavirus type 31
ugguauauguaugu

SEQ ID NO: 4010239 - RNA, 18 nt, Human papillomavirus type 31
uguaugaacaagugucau

SEQ ID NO: 4010240 - RNA, 15 nt, Human papillomavirus type 31
ugucauagacagucc

SEQ ID NO: 4010241 - RNA, 22 nt, Human papillomavirus type 31
ugucauagacaguccagcugga

SEQ ID NO: 4010242 - RNA, 13 nt, Human papillomavirus type 31
ugugcuacuauuu

SEQ ID NO: 4010243 - RNA, 23 nt, Human papillomavirus type 31
ugugcuguauuguauaugugugu

SEQ ID NO: 4010244 - RNA, 14 nt, Human papillomavirus type 31
ugugcugucugugu

SEQ ID NO: 4010245 - RNA, 22 nt, Human papillomavirus type 31
uguguacuuguauauauguaua

SEQ ID NO: 4010246 - RNA, 17 nt, Human papillomavirus type 31
uguguauaccugugugu

SEQ ID NO: 4010247 - RNA, 13 nt, Human papillomavirus type 31
uuaaaaaaacaug

SEQ ID NO: 4010248 - RNA, 17 nt, Human papillomavirus type 31
uuaauaaauauguguau

SEQ ID NO: 4010249 - RNA, 18 nt, Human papillomavirus type 31
uuaguacacguccuucua

SEQ ID NO: 4010250 - RNA, 16 nt, Human papillomavirus type 31
uuauacuaacuggaaa

SEQ ID NO: 4010251 - RNA, 20 nt, Human papillomavirus type 31
uuauauacacccuauuagua

SEQ ID NO: 4010252 - RNA, 21 nt, Human papillomavirus type 31
uuauauaugguauauguaugu

SEQ ID NO: 4010253 - RNA, 12 nt, Human papillomavirus type 31
uugacagacaga

SEQ ID NO: 4010254 - RNA, 19 nt, Human papillomavirus type 31
uugguauaauaaacuuuuu

SEQ ID NO: 4010255 - RNA, 12 nt, Human papillomavirus type 31
uuuugugugcua

SEQ ID NO: 4010256 - RNA, 14 nt, Human papillomavirus type 31
uuuugugugcuacu

SEQ ID NO: 4010257 - RNA, 17 nt, Human papillomavirus type 31
aauguacuguuguggaa

SEQ ID NO: 4010258 - RNA, 22 nt, Human papillomavirus type 31
aauugacagacagacaggggac

SEQ ID NO: 4010259 - RNA, 23 nt, Human papillomavirus type 31
aauugacagacagacaggggaca

SEQ ID NO: 4010260 - RNA, 23 nt, Human papillomavirus type 31
acaauuauaucaaacauguaaag

SEQ ID NO: 4010261 - RNA, 18 nt, Human papillomavirus type 31
acacaugcaucuuuuuua

SEQ ID NO: 4010262 - RNA, 19 nt, Human papillomavirus type 31
acaccaugcauuauacuaa

SEQ ID NO: 4010263 - RNA, 15 nt, Human papillomavirus type 31
acaguaacuuuuuua

SEQ ID NO: 4010264 - RNA, 20 nt, Human papillomavirus type 31
accuacaggguguuuaaaaa

SEQ ID NO: 4010265 - RNA, 21 nt, Human papillomavirus type 31
acuccauuuugauuuuaugca

SEQ ID NO: 4010266 - RNA, 18 nt, Human papillomavirus type 31
agcaaacaagucuugaac

SEQ ID NO: 4010267 - RNA, 15 nt, Human papillomavirus type 31
aggcugugcagguuc

SEQ ID NO: 4010268 - RNA, 19 nt, Human papillomavirus type 31
aguagugauacuggggagg

SEQ ID NO: 4010269 - RNA, 15 nt, Human papillomavirus type 31
agugauacuggggag

SEQ ID NO: 4010270 - RNA, 14 nt, Human papillomavirus type 31
agugucaacaggau

SEQ ID NO: 4010271 - RNA, 19 nt, Human papillomavirus type 31
auaaaaaugcuauuguaac

SEQ ID NO: 4010272 - RNA, 15 nt, Human papillomavirus type 31
auacacaguauuaac

SEQ ID NO: 4010273 - RNA, 22 nt, Human papillomavirus type 31
auaccuguguguguuguguaug

SEQ ID NO: 4010274 - RNA, 18 nt, Human papillomavirus type 31
auaggcugucaaaauaua

SEQ ID NO: 4010275 - RNA, 13 nt, Human papillomavirus type 31
auauacuguagag

SEQ ID NO: 4010276 - RNA, 16 nt, Human papillomavirus type 31
auauuccauuauuugu

SEQ ID NO: 4010277 - RNA, 22 nt, Human papillomavirus type 31
auggugauguacacaacaccau

SEQ ID NO: 4010278 - RNA, 17 nt, Human papillomavirus type 31
auguauagauggccaau

SEQ ID NO: 4010279 - RNA, 22 nt, Human papillomavirus type 31
auguaugcguguguacuuguau

SEQ ID NO: 4010280 - RNA, 12 nt, Human papillomavirus type 31
auguuguccuua

SEQ ID NO: 4010281 - RNA, 18 nt, Human papillomavirus type 31
aaauaacacugaauacaa

SEQ ID NO: 4010282 - RNA, 18 nt, Human papillomavirus type 31
aacacgaaccaacauaua

SEQ ID NO: 4010283 - RNA, 14 nt, Human papillomavirus type 31
aacauacuaccauu

SEQ ID NO: 4010284 - RNA, 15 nt, Human papillomavirus type 31
aacuuuuuuacuugu

SEQ ID NO: 4010285 - RNA, 16 nt, Human papillomavirus type 31
aauagucauguacuua

SEQ ID NO: 4010286 - RNA, 16 nt, Human papillomavirus type 31
aaugauugaacuaaau

SEQ ID NO: 4010287 - RNA, 22 nt, Human papillomavirus type 31
acaaaaaugaggacuggacaau

SEQ ID NO: 4010288 - RNA, 14 nt, Human papillomavirus type 31
acaagcuauugaac

SEQ ID NO: 4010289 - RNA, 21 nt, Human papillomavirus type 31
acacccgguccguuuuuugca

SEQ ID NO: 4010290 - RNA, 21 nt, Human papillomavirus type 31
acaucuuuuuauaauccugaa

SEQ ID NO: 4010291 - RNA, 18 nt, Human papillomavirus type 31
acuuguauauauguauag

SEQ ID NO: 4010292 - RNA, 18 nt, Human papillomavirus type 31
agcaagagaaaugggaau

SEQ ID NO: 4010293 - RNA, 17 nt, Human papillomavirus type 31
aggugaugcaaauauau

SEQ ID NO: 4010294 - RNA, 16 nt, Human papillomavirus type 31
agucaacaguaacuuu

SEQ ID NO: 4010295 - RNA, 14 nt, Human papillomavirus type 31
agugauacugggga

SEQ ID NO: 4010296 - RNA, 18 nt, Human papillomavirus type 31
auaaacaauuguaugaac

SEQ ID NO: 4010297 - RNA, 21 nt, Human papillomavirus type 31
auagaacauacuaccauugca

SEQ ID NO: 4010298 - RNA, 12 nt, Human papillomavirus type 31
auagucauguac

SEQ ID NO: 4010299 - RNA, 16 nt, Human papillomavirus type 31
auauaccuauguauag

SEQ ID NO: 4010300 - RNA, 14 nt, Human papillomavirus type 31
auauuucuacagua

SEQ ID NO: 4010301 - RNA, 17 nt, Human papillomavirus type 31
aucagacguuauaccua

SEQ ID NO: 4010302 - RNA, 18 nt, Human papillomavirus type 31
aucagacguuauaccuaa

SEQ ID NO: 4010303 - RNA, 13 nt, Human papillomavirus type 31
auccaaacaaauu

SEQ ID NO: 4010304 - RNA, 14 nt, Human papillomavirus type 31
aucugacaauccua

SEQ ID NO: 4010305 - RNA, 14 nt, Human papillomavirus type 31
auguauacaacaau

SEQ ID NO: 4010306 - RNA, 13 nt, Human papillomavirus type 31
auguguguaugua

SEQ ID NO: 4010307 - RNA, 14 nt, Human papillomavirus type 31
auuauuaccaugcg

SEQ ID NO: 4010308 - RNA, 13 nt, Human papillomavirus type 31
auugguauuggua

SEQ ID NO: 4010309 - RNA, 19 nt, Human papillomavirus type 31
caaacauguaaagcagcag

SEQ ID NO: 4010310 - RNA, 16 nt, Human papillomavirus type 31
caagucuugaacugua

SEQ ID NO: 4010311 - RNA, 21 nt, Human papillomavirus type 31
caaucaggcagaagcagagac

SEQ ID NO: 4010312 - RNA, 14 nt, Human papillomavirus type 31
cacaggaagcggag

SEQ ID NO: 4010313 - RNA, 21 nt, Human papillomavirus type 31
caccuacaggguguuuaaaaa

SEQ ID NO: 4010314 - RNA, 18 nt, Human papillomavirus type 31
cauacuauuacuauuuua

SEQ ID NO: 4010315 - RNA, 21 nt, Human papillomavirus type 31
caugcauuauacuaacuggaa

SEQ ID NO: 4010316 - RNA, 16 nt, Human papillomavirus type 31
caugugucuguaugug

SEQ ID NO: 4010317 - RNA, 18 nt, Human papillomavirus type 31
ccaaacaaauuuggauuu

SEQ ID NO: 4010318 - RNA, 16 nt, Human papillomavirus type 31
ccacuugugcugucug

SEQ ID NO: 4010319 - RNA, 22 nt, Human papillomavirus type 31
ccagcuggacaagcagaaccgg

SEQ ID NO: 4010320 - RNA, 23 nt, Human papillomavirus type 31
ccaugcauuauacuaacuggaaa

SEQ ID NO: 4010321 - RNA, 15 nt, Human papillomavirus type 31
ccugaggcaacugac

SEQ ID NO: 4010322 - RNA, 16 nt, Human papillomavirus type 31
cggaggaacaugcaga

SEQ ID NO: 4010323 - RNA, 19 nt, Human papillomavirus type 31
cggaggaacaugcagaggc

SEQ ID NO: 4010324 - RNA, 14 nt, Human papillomavirus type 31
cgggaugcaauggu

SEQ ID NO: 4010325 - RNA, 15 nt, Human papillomavirus type 31
cguuuguguguacag

SEQ ID NO: 4010326 - RNA, 16 nt, Human papillomavirus type 31
cuaugcuuuuugcuuu

SEQ ID NO: 4010327 - RNA, 15 nt, Human papillomavirus type 31
cuauguauguuaaua

SEQ ID NO: 4010328 - RNA, 23 nt, Human papillomavirus type 31
cugauacaucuuuuuauaauccu

SEQ ID NO: 4010329 - RNA, 20 nt, Human papillomavirus type 31
cuguguguguuguguauguu

SEQ ID NO: 4010330 - RNA, 22 nt, Human papillomavirus type 31
cuuacaagcuauugaacuacaa

SEQ ID NO: 4010331 - RNA, 21 nt, Human papillomavirus type 31
cuugaacuguauuuaacugca

SEQ ID NO: 4010332 - RNA, 16 nt, Human papillomavirus type 31
gaaaauaacaguaaaa

SEQ ID NO: 4010333 - RNA, 17 nt, Human papillomavirus type 31
gaaccaacauauauuau

SEQ ID NO: 4010334 - RNA, 14 nt, Human papillomavirus type 31
gaacuacaaaugau

SEQ ID NO: 4010335 - RNA, 19 nt, Human papillomavirus type 31
gacacauccaauuacaaua

SEQ ID NO: 4010336 - RNA, 13 nt, Human papillomavirus type 31
gacagacagacag

SEQ ID NO: 4010337 - RNA, 18 nt, Human papillomavirus type 31
aaaacauggauauacugu

SEQ ID NO: 4010338 - RNA, 18 nt, Human papillomavirus type 31
aaacauggauauacugua

SEQ ID NO: 4010339 - RNA, 13 nt, Human papillomavirus type 31
aaaugcuauugua

SEQ ID NO: 4010340 - RNA, 18 nt, Human papillomavirus type 31
aaauuugaugacacugaa

SEQ ID NO: 4010341 - RNA, 12 nt, Human papillomavirus type 31
aacauuaaauaa

SEQ ID NO: 4010342 - RNA, 23 nt, Human papillomavirus type 31
aagagaaaugggaauacacagua

SEQ ID NO: 4010343 - RNA, 17 nt, Human papillomavirus type 31
aagcuauugaacuacaa

SEQ ID NO: 4010344 - RNA, 17 nt, Human papillomavirus type 31
aauaaauuugaugacac

SEQ ID NO: 4010345 - RNA, 13 nt, Human papillomavirus type 31
aaugcagcaaaca

SEQ ID NO: 4010346 - RNA, 22 nt, Human papillomavirus type 31
acaggaagcggaggaacaugca

SEQ ID NO: 4010347 - RNA, 21 nt, Human papillomavirus type 31
acaggggacaacauuucagag

SEQ ID NO: 4010348 - RNA, 14 nt, Human papillomavirus type 31
acauaaaaaugcua

SEQ ID NO: 4010349 - RNA, 15 nt, Human papillomavirus type 31
acauaaaaaugcuau

SEQ ID NO: 4010350 - RNA, 14 nt, Human papillomavirus type 31
acaugugucuguau

SEQ ID NO: 4010351 - RNA, 13 nt, Human papillomavirus type 31
acuaacuggaaau

SEQ ID NO: 4010352 - RNA, 23 nt, Human papillomavirus type 31
acucuuugaacuuccagacagcg

SEQ ID NO: 4010353 - RNA, 17 nt, Human papillomavirus type 31
acuguauuuaacugcac

SEQ ID NO: 4010354 - RNA, 23 nt, Human papillomavirus type 31
acuuuuuuuuuauuauuaccaug

SEQ ID NO: 4010355 - RNA, 23 nt, Human papillomavirus type 31
agagacgauuuuuuaaauacugu

SEQ ID NO: 4010356 - RNA, 17 nt, Human papillomavirus type 31
agauauaggcugucaaa

SEQ ID NO: 4010357 - RNA, 16 nt, Human papillomavirus type 31
agauggggaggggacg

SEQ ID NO: 4010358 - RNA, 15 nt, Human papillomavirus type 31
aggcauuguuucaug

SEQ ID NO: 4010359 - RNA, 17 nt, Human papillomavirus type 31
agguacagauggggagg

SEQ ID NO: 4010360 - RNA, 18 nt, Human papillomavirus type 31
auaacaguaaaacagcaa

SEQ ID NO: 4010361 - RNA, 16 nt, Human papillomavirus type 31
auacaugugucuguau

SEQ ID NO: 4010362 - RNA, 20 nt, Human papillomavirus type 31
auagauggccaauguacugu

SEQ ID NO: 4010363 - RNA, 17 nt, Human papillomavirus type 31
auauaugguauauguau

SEQ ID NO: 4010364 - RNA, 22 nt, Human papillomavirus type 31
auauaugguauauguauguuua

SEQ ID NO: 4010365 - RNA, 21 nt, Human papillomavirus type 31
auauguaacacgaaccaacau

SEQ ID NO: 4010366 - RNA, 16 nt, Human papillomavirus type 31
aucaggcagaagcaga

SEQ ID NO: 4010367 - RNA, 17 nt, Human papillomavirus type 31
aucuuuuuauaauccug

SEQ ID NO: 4010368 - RNA, 22 nt, Human papillomavirus type 31
auguacacaacaccaugcauua

SEQ ID NO: 4010369 - RNA, 12 nt, Human papillomavirus type 31
auguuggaaaca

SEQ ID NO: 4010370 - RNA, 13 nt, Human papillomavirus type 31
auguuguccuuau

SEQ ID NO: 4010371 - RNA, 22 nt, Human papillomavirus type 31
auuaaauaaauuugaugacacu

SEQ ID NO: 4010372 - RNA, 18 nt, Human papillomavirus type 31
auugacagacagacaggg

SEQ ID NO: 4010373 - RNA, 18 nt, Human papillomavirus type 31
auuucagaggacgaaaau

SEQ ID NO: 4010374 - RNA, 19 nt, Human papillomavirus type 31
caaaauauaaacaauugua

SEQ ID NO: 4010375 - RNA, 15 nt, Human papillomavirus type 31
caaaugauguuggaa

SEQ ID NO: 4010376 - RNA, 15 nt, Human papillomavirus type 31
caacaaucaggcaga

SEQ ID NO: 4010377 - RNA, 13 nt, Human papillomavirus type 31
caaguauaccuau

SEQ ID NO: 4010378 - RNA, 12 nt, Human papillomavirus type 31
cacaggaagcgg

SEQ ID NO: 4010379 - RNA, 17 nt, Human papillomavirus type 31
caccugucccagugucu

SEQ ID NO: 4010380 - RNA, 18 nt, Human papillomavirus type 31
cacgaaccaacauauauu

SEQ ID NO: 4010381 - RNA, 13 nt, Human papillomavirus type 31
cagacagacaggg

SEQ ID NO: 4010382 - RNA, 15 nt, Human papillomavirus type 31
cagacagacagggga

SEQ ID NO: 4010383 - RNA, 17 nt, Human papillomavirus type 31
cagacguuauaccuaaa

SEQ ID NO: 4010384 - RNA, 16 nt, Human papillomavirus type 31
cagagacagcacaggc

SEQ ID NO: 4010385 - RNA, 15 nt, Human papillomavirus type 31
cagcuggacaagcag

SEQ ID NO: 4010386 - RNA, 15 nt, Human papillomavirus type 31
caguaauugacagac

SEQ ID NO: 4010387 - RNA, 20 nt, Human papillomavirus type 31
cauagacaguccagcuggac

SEQ ID NO: 4010388 - RNA, 17 nt, Human papillomavirus type 31
cauauagacuauuggaa

SEQ ID NO: 4010389 - RNA, 13 nt, Human papillomavirus type 31
caugcacaggaag

SEQ ID NO: 4010390 - RNA, 16 nt, Human papillomavirus type 31
cgugugccccaacugu

SEQ ID NO: 4010391 - RNA, 17 nt, Human papillomavirus type 31
cguguguacuuguauau

SEQ ID NO: 4010392 - RNA, 22 nt, Human papillomavirus type 31
cuacuagacuguaacuacaaug

SEQ ID NO: 4010393 - RNA, 21 nt, Human papillomavirus type 31
cuagacuguaacuacaauggc

SEQ ID NO: 4010394 - RNA, 22 nt, Human papillomavirus type 31
cugaaacucaacgcuuaguuug

SEQ ID NO: 4010395 - RNA, 14 nt, Human papillomavirus type 31
cugaccuccacugu

SEQ ID NO: 4010396 - RNA, 15 nt, Human papillomavirus type 31
cugucccagugucua

SEQ ID NO: 4010397 - RNA, 22 nt, Human papillomavirus type 31
cugucccagugucuaaaguugu

SEQ ID NO: 4010398 - RNA, 19 nt, Human papillomavirus type 31
cuugugcuguauuguauau

SEQ ID NO: 4010399 - RNA, 17 nt, Human papillomavirus type 31
cuuugcuuuugugugcu

SEQ ID NO: 4010400 - RNA, 16 nt, Human papillomavirus type 31
gaaaaugaagacagua

SEQ ID NO: 4010401 - RNA, 19 nt, Human papillomavirus type 31
gaagcagagacagcacagg

SEQ ID NO: 4010402 - RNA, 23 nt, Human papillomavirus type 31
gacacugaaaacucuaauagaua

SEQ ID NO: 4010403 - RNA, 23 nt, Human papillomavirus type 31
gagcaauuacccgacagcucaga

SEQ ID NO: 4010404 - RNA, 18 nt, Human papillomavirus type 31
gaggaacaugcagaggcu

SEQ ID NO: 4010405 - RNA, 12 nt, Human papillomavirus type 31
gauacuggggag

SEQ ID NO: 4010406 - RNA, 13 nt, Human papillomavirus type 31
gauacuggggagg

SEQ ID NO: 4010407 - RNA, 21 nt, Human papillomavirus type 31
gcaauuacccgacagcucaga

SEQ ID NO: 4010408 - RNA, 22 nt, Human papillomavirus type 31
gcagccauuagguguagguauu

SEQ ID NO: 4010409 - RNA, 16 nt, Human papillomavirus type 31
ggaagcggaggaacau

SEQ ID NO: 4010410 - RNA, 16 nt, Human papillomavirus type 31
ggccaauguacuguug

SEQ ID NO: 4010411 - RNA, 15 nt, Human papillomavirus type 31
ggccuguguugguuu

SEQ ID NO: 4010412 - RNA, 19 nt, Human papillomavirus type 31
gguuaaaagcuauaugcau

SEQ ID NO: 4010413 - RNA, 14 nt, Human papillomavirus type 31
guaaaaauaccuaa

SEQ ID NO: 4010414 - RNA, 20 nt, Human papillomavirus type 31
guagaagcaguaauugacag

SEQ ID NO: 4010415 - RNA, 21 nt, Human papillomavirus type 31
guaguccuuuaagugauauua

SEQ ID NO: 4010416 - RNA, 20 nt, Human papillomavirus type 31
aaaaggugaugcaaauauau

SEQ ID NO: 4010417 - RNA, 22 nt, Human papillomavirus type 31
aaacauguaaagcagcagguac

SEQ ID NO: 4010418 - RNA, 20 nt, Human papillomavirus type 31
aaacauuaaauaacacugaa

SEQ ID NO: 4010419 - RNA, 16 nt, Human papillomavirus type 31
aaagcaagagaaaugg

SEQ ID NO: 4010420 - RNA, 12 nt, Human papillomavirus type 31
aaauauguguau

SEQ ID NO: 4010421 - RNA, 20 nt, Human papillomavirus type 31
aaauuuauauaccuauguau

SEQ ID NO: 4010422 - RNA, 18 nt, Human papillomavirus type 31
aacacugaauacaaaaau

SEQ ID NO: 4010423 - RNA, 17 nt, Human papillomavirus type 31
aacauggauauacugua

SEQ ID NO: 4010424 - RNA, 22 nt, Human papillomavirus type 31
aaccuuaacauauauaaguaca

SEQ ID NO: 4010425 - RNA, 14 nt, Human papillomavirus type 31
aauaaacuuuuuua

SEQ ID NO: 4010426 - RNA, 23 nt, Human papillomavirus type 31
acaauggcugauccagcagguac

SEQ ID NO: 4010427 - RNA, 21 nt, Human papillomavirus type 31
acacugaauacaaaaaugagg

SEQ ID NO: 4010428 - RNA, 12 nt, Human papillomavirus type 31
acaugcagaggc

SEQ ID NO: 4010429 - RNA, 17 nt, Human papillomavirus type 31
acgauuuuuuaaauacu

SEQ ID NO: 4010430 - RNA, 19 nt, Human papillomavirus type 31
acuuaaaaggugaugcaaa

SEQ ID NO: 4010431 - RNA, 16 nt, Human papillomavirus type 31
acuuguauauauguau

SEQ ID NO: 4010432 - RNA, 19 nt, Human papillomavirus type 31
agaagcagagacagcacag

SEQ ID NO: 4010433 - RNA, 22 nt, Human papillomavirus type 31
agaagcaguaauugacagacag

SEQ ID NO: 4010434 - RNA, 14 nt, Human papillomavirus type 31
agaccaaauauuaa

SEQ ID NO: 4010435 - RNA, 20 nt, Human papillomavirus type 31
agcauugacccuguaggucc

SEQ ID NO: 4010436 - RNA, 20 nt, Human papillomavirus type 31
agcauugugcuaugcuuuuu

SEQ ID NO: 4010437 - RNA, 21 nt, Human papillomavirus type 31
agcuauugaacuacaaaugau

SEQ ID NO: 4010438 - RNA, 16 nt, Human papillomavirus type 31
agguacagauggggag

SEQ ID NO: 4010439 - RNA, 22 nt, Human papillomavirus type 31
aguauguuauguguguauguau

SEQ ID NO: 4010440 - RNA, 19 nt, Human papillomavirus type 31
agugucaucuacauggcau

SEQ ID NO: 4010441 - RNA, 16 nt, Human papillomavirus type 31
auacacaugcaucuuu

SEQ ID NO: 4010442 - RNA, 21 nt, Human papillomavirus type 31
auacaugugucuguaugugua

SEQ ID NO: 4010443 - RNA, 23 nt, Human papillomavirus type 31
auacaugugucuguauguguaug

SEQ ID NO: 4010444 - RNA, 15 nt, Human papillomavirus type 31
auacuaacuggaaau

SEQ ID NO: 4010445 - RNA, 21 nt, Human papillomavirus type 31
auacuguuguuuguauuggua

SEQ ID NO: 4010446 - RNA, 20 nt, Human papillomavirus type 31
auaguauguuauguguguau

SEQ ID NO: 4010447 - RNA, 15 nt, Human papillomavirus type 31
auaugguauauguau

SEQ ID NO: 4010448 - RNA, 20 nt, Human papillomavirus type 31
aucugaggcaaguauaccua

SEQ ID NO: 4010449 - RNA, 18 nt, Human papillomavirus type 31
auggcugauccagcaggu

SEQ ID NO: 4010450 - RNA, 14 nt, Human papillomavirus type 31
auggguuauugcaa

SEQ ID NO: 4010451 - RNA, 22 nt, Human papillomavirus type 31
auguaauacaugugucuguaug

SEQ ID NO: 4010452 - RNA, 24 nt, Human papillomavirus type 45
auacuacacagcauccauuuuacu

SEQ ID NO: 4010453 - RNA, 18 nt, Human papillomavirus type 45
auauauguauguuuguau

SEQ ID NO: 4010454 - RNA, 21 nt, Human papillomavirus type 45
aucuguauauuguauacagua

SEQ ID NO: 4010455 - RNA, 23 nt, Human papillomavirus type 45
augcaauacuauuuacagcaagg

SEQ ID NO: 4010456 - RNA, 17 nt, Human papillomavirus type 45
auguaugaaugugccuu

SEQ ID NO: 4010457 - RNA, 19 nt, Human papillomavirus type 45
augugucucgcacaagcau

SEQ ID NO: 4010458 - RNA, 20 nt, Human papillomavirus type 45
auguuagcacauauauguau

SEQ ID NO: 4010459 - RNA, 14 nt, Human papillomavirus type 45
auuaacauuucaaa

SEQ ID NO: 4010460 - RNA, 21 nt, Human papillomavirus type 45
auuaacauuucaaaaagcaaa

SEQ ID NO: 4010461 - RNA, 17 nt, Human papillomavirus type 45
auuacuauaauguacag

SEQ ID NO: 4010462 - RNA, 22 nt, Human papillomavirus type 45
auuggccuaaguggccauccau

SEQ ID NO: 4010463 - RNA, 20 nt, Human papillomavirus type 45
auuggucgugggcagccuuu

SEQ ID NO: 4010464 - RNA, 15 nt, Human papillomavirus type 45
caagagacagcacag

SEQ ID NO: 4010465 - RNA, 17 nt, Human papillomavirus type 45
caaggaaaacaguccau

SEQ ID NO: 4010466 - RNA, 15 nt, Human papillomavirus type 45
cagguguugcaucuu

SEQ ID NO: 4010467 - RNA, 21 nt, Human papillomavirus type 45
caguauauauuauauaacuga

SEQ ID NO: 4010468 - RNA, 20 nt, Human papillomavirus type 45
cauaaagcuauugaacugca

SEQ ID NO: 4010469 - RNA, 17 nt, Human papillomavirus type 45
cauaauaccuaaacugg

SEQ ID NO: 4010470 - RNA, 15 nt, Human papillomavirus type 45
cauaugcaugcuuua

SEQ ID NO: 4010471 - RNA, 16 nt, Human papillomavirus type 45
cauuugcuguauacau

SEQ ID NO: 4010472 - RNA, 18 nt, Human papillomavirus type 45
ccuaauaaauuuggauua

SEQ ID NO: 4010473 - RNA, 20 nt, Human papillomavirus type 45
ccugugaugugcauguuguu

SEQ ID NO: 4010474 - RNA, 15 nt, Human papillomavirus type 45
cgagucagaggagga

SEQ ID NO: 4010475 - RNA, 13 nt, Human papillomavirus type 45
cuacaauggcgga

SEQ ID NO: 4010476 - RNA, 15 nt, Human papillomavirus type 45
cuauggaauacagaa

SEQ ID NO: 4010477 - RNA, 19 nt, Human papillomavirus type 45
cugucuaugugugugcuuu

SEQ ID NO: 4010478 - RNA, 13 nt, Human papillomavirus type 45
cugugaugugcau

SEQ ID NO: 4010479 - RNA, 18 nt, Human papillomavirus type 45
cuuuaugugugcugcaau

SEQ ID NO: 4010480 - RNA, 13 nt, Human papillomavirus type 45
gaaaaaaacaggg

SEQ ID NO: 4010481 - RNA, 17 nt, Human papillomavirus type 45
gaaacacugcaagaaau

SEQ ID NO: 4010482 - RNA, 18 nt, Human papillomavirus type 45
gacaaaacagcagcaugu

SEQ ID NO: 4010483 - RNA, 20 nt, Human papillomavirus type 45
gagcaagagacagcacaggc

SEQ ID NO: 4010484 - RNA, 15 nt, Human papillomavirus type 45
gaggaauggacacug

SEQ ID NO: 4010485 - RNA, 19 nt, Human papillomavirus type 45
gcaaaacgacgguuguuua

SEQ ID NO: 4010486 - RNA, 13 nt, Human papillomavirus type 45
gcaaagcacauaa

SEQ ID NO: 4010487 - RNA, 23 nt, Human papillomavirus type 45
gccuuaaagggccuugcacaaag

SEQ ID NO: 4010488 - RNA, 16 nt, Human papillomavirus type 45
gccuugcacaaagcaa

SEQ ID NO: 4010489 - RNA, 14 nt, Human papillomavirus type 45
ggaaaaugcaauac

SEQ ID NO: 4010490 - RNA, 13 nt, Human papillomavirus type 45
ggauccagaaggu

SEQ ID NO: 4010491 - RNA, 18 nt, Human papillomavirus type 45
guaccuaauggugcaggu

SEQ ID NO: 4010492 - RNA, 19 nt, Human papillomavirus type 45
guaucccaccgugcagcac

SEQ ID NO: 4010493 - RNA, 22 nt, Human papillomavirus type 45
guauggaaauuggucgugggca

SEQ ID NO: 4010494 - RNA, 15 nt, Human papillomavirus type 45
guauguuguauguau

SEQ ID NO: 4010495 - RNA, 16 nt, Human papillomavirus type 45
guauguuuguauguau

SEQ ID NO: 4010496 - RNA, 19 nt, Human papillomavirus type 45
guccacgguuacaagaaau

SEQ ID NO: 4010497 - RNA, 19 nt, Human papillomavirus type 45
guccauuaggggagcagcu

SEQ ID NO: 4010498 - RNA, 17 nt, Human papillomavirus type 45
gucccgcuugugcaguc

SEQ ID NO: 4010499 - RNA, 21 nt, Human papillomavirus type 45
gucucgcacaagcauauuuua

SEQ ID NO: 4010500 - RNA, 18 nt, Human papillomavirus type 45
uaacagcauuugcuguau

SEQ ID NO: 4010501 - RNA, 20 nt, Human papillomavirus type 45
uaacuguaggcaauccauau

SEQ ID NO: 4010502 - RNA, 16 nt, Human papillomavirus type 45
uacauaauugugguau

SEQ ID NO: 4010503 - RNA, 15 nt, Human papillomavirus type 45
uacauuuguugcuau

SEQ ID NO: 4010504 - RNA, 15 nt, Human papillomavirus type 45
uaccugugaugugca

SEQ ID NO: 4010505 - RNA, 12 nt, Human papillomavirus type 45
uacuauaaugua

SEQ ID NO: 4010506 - RNA, 16 nt, Human papillomavirus type 45
uagcacauauauguau

SEQ ID NO: 4010507 - RNA, 20 nt, Human papillomavirus type 45
uaguguuuuuauugugcuuu

SEQ ID NO: 4010508 - RNA, 17 nt, Human papillomavirus type 45
uauaguuguuauuacau

SEQ ID NO: 4010509 - RNA, 10 nt, Human papillomavirus type 45
uauauguuua

SEQ ID NO: 4010510 - RNA, 13 nt, Human papillomavirus type 45
uaucaugcaggca

SEQ ID NO: 4010511 - RNA, 12 nt, Human papillomavirus type 45
uauguaugaaug

SEQ ID NO: 4010512 - RNA, 18 nt, Human papillomavirus type 45
uauuaacauuucaaaaag

SEQ ID NO: 4010513 - RNA, 14 nt, Human papillomavirus type 45
uauuguauacagua

SEQ ID NO: 4010514 - RNA, 15 nt, Human papillomavirus type 45
ugccuuuaugugugc

SEQ ID NO: 4010515 - RNA, 23 nt, Human papillomavirus type 45
ugccuuuaugugugcugcaaugu

SEQ ID NO: 4010516 - RNA, 15 nt, Human papillomavirus type 45
ugggacaguauauau

SEQ ID NO: 4010517 - RNA, 20 nt, Human papillomavirus type 45
uguacaguacaguguaacau

SEQ ID NO: 4010518 - RNA, 17 nt, Human papillomavirus type 45
uguaugguguuacugua

SEQ ID NO: 4010519 - RNA, 17 nt, Human papillomavirus type 45
ugugauauauuacugua

SEQ ID NO: 4010520 - RNA, 14 nt, Human papillomavirus type 45
uguggcauguaugg

SEQ ID NO: 4010521 - RNA, 15 nt, Human papillomavirus type 45
uugcaggaggcagca

SEQ ID NO: 4010522 - RNA, 13 nt, Human papillomavirus type 45
uugcuguauacau

SEQ ID NO: 4010523 - RNA, 17 nt, Human papillomavirus type 45
ugugaugugcauguugu

SEQ ID NO: 4010524 - RNA, 19 nt, Human papillomavirus type 45
uuagcacauauauguaugu

SEQ ID NO: 4010525 - RNA, 19 nt, Human papillomavirus type 45
uuguauguauguauguauu

SEQ ID NO: 4010526 - RNA, 16 nt, Human papillomavirus type 45
uuguauuuuuguauuu

SEQ ID NO: 4010527 - RNA, 15 nt, Human papillomavirus type 45
uuuaugugugcugca

SEQ ID NO: 4010528 - RNA, 13 nt, Human papillomavirus type 45
uuuauugugcuuu

SEQ ID NO: 4010529 - RNA, 23 nt, Human papillomavirus type 45
uuuauugugcuuuucugugugcc

SEQ ID NO: 4010530 - RNA, 17 nt, Human papillomavirus type 45
uuugauggcaacaagga

SEQ ID NO: 4010531 - RNA, 21 nt, Human papillomavirus type 45
uuugcgugcguguauguauga

SEQ ID NO: 4010532 - RNA, 16 nt, Human papillomavirus type 45
gcuuauaugugaccuu

SEQ ID NO: 4010533 - RNA, 17 nt, Human papillomavirus type 45
gcuuauaugugaccuuu

SEQ ID NO: 4010534 - RNA, 19 nt, Human papillomavirus type 45
ggcagagcaagagacagca

SEQ ID NO: 4010535 - RNA, 13 nt, Human papillomavirus type 45
ggcagcaaggaaa

SEQ ID NO: 4010536 - RNA, 22 nt, Human papillomavirus type 45
ggcagcaaggaaaacaguccau

SEQ ID NO: 4010537 - RNA, 22 nt, Human papillomavirus type 45
guaaagacauaaacagccaaau

SEQ ID NO: 4010538 - RNA, 20 nt, Human papillomavirus type 45
guauuggccuaaguggccau

SEQ ID NO: 4010539 - RNA, 18 nt, Human papillomavirus type 45
gugaacaggcagagcaag

SEQ ID NO: 4010540 - RNA, 20 nt, Human papillomavirus type 45
gugcagguaauaaacaggcu

SEQ ID NO: 4010541 - RNA, 19 nt, Human papillomavirus type 45
guuguaccuaauggugcag

SEQ ID NO: 4010542 - RNA, 21 nt, Human papillomavirus type 45
guuguaccuaauggugcaggu

SEQ ID NO: 4010543 - RNA, 14 nt, Human papillomavirus type 45
guuuggaaaaugca

SEQ ID NO: 4010544 - RNA, 22 nt, Human papillomavirus type 45
uaaagggccuugcacaaagcaa

SEQ ID NO: 4010545 - RNA, 17 nt, Human papillomavirus type 45
uaacauuacuaugcuau

SEQ ID NO: 4010546 - RNA, 20 nt, Human papillomavirus type 45
uaacauuucaaaaagcaaag

SEQ ID NO: 4010547 - RNA, 15 nt, Human papillomavirus type 45
uaagugugacggcag

SEQ ID NO: 4010548 - RNA, 22 nt, Human papillomavirus type 45
uacuauuuguguguauguguau

SEQ ID NO: 4010549 - RNA, 16 nt, Human papillomavirus type 45
uaguuguuauuacauc

SEQ ID NO: 4010550 - RNA, 15 nt, Human papillomavirus type 45
uauaacugagacagg

SEQ ID NO: 4010551 - RNA, 12 nt, Human papillomavirus type 45
uauauuacugua

SEQ ID NO: 4010552 - RNA, 16 nt, Human papillomavirus type 45
uauauuguauacagua

SEQ ID NO: 4010553 - RNA, 17 nt, Human papillomavirus type 45
uauucuuuccuguauuu

SEQ ID NO: 4010554 - RNA, 23 nt, Human papillomavirus type 45
uauuuacagcaagggaacauggu

SEQ ID NO: 4010555 - RNA, 21 nt, Human papillomavirus type 45
uauuuacuaccuauguuugua

SEQ ID NO: 4010556 - RNA, 16 nt, Human papillomavirus type 45
ucaaaaagcaaagcac

SEQ ID NO: 4010557 - RNA, 19 nt, Human papillomavirus type 45
uccauuugugaacaggcag

SEQ ID NO: 4010558 - RNA, 14 nt, Human papillomavirus type 45
ucuaugugugugcu

SEQ ID NO: 4010559 - RNA, 17 nt, Human papillomavirus type 45
ugaaacugcaacagaua

SEQ ID NO: 4010560 - RNA, 17 nt, Human papillomavirus type 45
ugaggaauggacacugc

SEQ ID NO: 4010561 - RNA, 20 nt, Human papillomavirus type 45
ugcagucugucuaugugugu

SEQ ID NO: 4010562 - RNA, 21 nt, Human papillomavirus type 45
ugcgcaggaaguucagaauga

SEQ ID NO: 4010563 - RNA, 21 nt, Human papillomavirus type 45
uguaugaaugugccuuguggc

SEQ ID NO: 4010564 - RNA, 17 nt, Human papillomavirus type 45
ugucccgcuugugcagu

SEQ ID NO: 4010565 - RNA, 20 nt, Human papillomavirus type 45
ugugucucgcacaagcauau

SEQ ID NO: 4010566 - RNA, 15 nt, Human papillomavirus type 45
uguguguauguguau

SEQ ID NO: 4010567 - RNA, 15 nt, Human papillomavirus type 45
uguugguguuucuuu

SEQ ID NO: 4010568 - RNA, 19 nt, Human papillomavirus type 45
uugcacaaagcaaguauaa

SEQ ID NO: 4010569 - RNA, 17 nt, Human papillomavirus type 45
uugucagcacugaugau

SEQ ID NO: 4010570 - RNA, 20 nt, Human papillomavirus type 45
uugugcuuuucugugugccu

SEQ ID NO: 4010571 - RNA, 20 nt, Human papillomavirus type 45
uuuguauguuguauguaugu

SEQ ID NO: 4010572 - RNA, 14 nt, Human papillomavirus type 45
uuuuauugugcuuu

SEQ ID NO: 4010573 - RNA, 18 nt, Human papillomavirus type 45
aaaacgaugaagcagaug

SEQ ID NO: 4010574 - RNA, 15 nt, Human papillomavirus type 45
aaaagcaaagcacau

SEQ ID NO: 4010575 - RNA, 23 nt, Human papillomavirus type 45
aacagccaaauaaguuauuggca

SEQ ID NO: 4010576 - RNA, 19 nt, Human papillomavirus type 45
aacugcaacagauacaggg

SEQ ID NO: 4010577 - RNA, 23 nt, Human papillomavirus type 45
aagugcucaugcagcuacagcug

SEQ ID NO: 4010578 - RNA, 15 nt, Human papillomavirus type 45
aaugaugcacaggug

SEQ ID NO: 4010579 - RNA, 18 nt, Human papillomavirus type 45
aaugcaauacuauuuaca

SEQ ID NO: 4010580 - RNA, 22 nt, Human papillomavirus type 45
aauggcugguucuuuguagaaa

SEQ ID NO: 4010581 - RNA, 18 nt, Human papillomavirus type 45
aaugucccgcuugugcag

SEQ ID NO: 4010582 - RNA, 14 nt, Human papillomavirus type 45
acaaaauuuugugu

SEQ ID NO: 4010583 - RNA, 15 nt, Human papillomavirus type 45
acacaccauacaaua

SEQ ID NO: 4010584 - RNA, 15 nt, Human papillomavirus type 45
acacuacagcagcug

SEQ ID NO: 4010585 - RNA, 16 nt, Human papillomavirus type 45
acagcgucacaaaauu

SEQ ID NO: 4010586 - RNA, 21 nt, Human papillomavirus type 45
acaguauauauuauauaacug

SEQ ID NO: 4010587 - RNA, 20 nt, Human papillomavirus type 45
acaguauguaacauuacuau

SEQ ID NO: 4010588 - RNA, 19 nt, Human papillomavirus type 45
acauuucaaaaagcaaagc

SEQ ID NO: 4010589 - RNA, 19 nt, Human papillomavirus type 45
agcauauuuuaucaugcag

SEQ ID NO: 4010590 - RNA, 21 nt, Human papillomavirus type 45
aggaccuuagaacacuacagc

SEQ ID NO: 4010591 - RNA, 17 nt, Human papillomavirus type 45
aggaggcagcaaggaaa

SEQ ID NO: 4010592 - RNA, 12 nt, Human papillomavirus type 45
agugggcacaaa

SEQ ID NO: 4010593 - RNA, 14 nt, Human papillomavirus type 45
auaauguacaguac

SEQ ID NO: 4010594 - RNA, 17 nt, Human papillomavirus type 45
auacuauuuguguguau

SEQ ID NO: 4010595 - RNA, 23 nt, Human papillomavirus type 45
auagugggcacaaaaaagcaaaa

SEQ ID NO: 4010596 - RNA, 22 nt, Human papillomavirus type 45
auauuguauacaguauguaaca

SEQ ID NO: 4010597 - RNA, 22 nt, Human papillomavirus type 45
aucaguauaggguguuuagagu

SEQ ID NO: 4010598 - RNA, 13 nt, Human papillomavirus type 45
augaaugugccuu

SEQ ID NO: 4010599 - RNA, 12 nt, Human papillomavirus type 45
augcacaggugu

SEQ ID NO: 4010600 - RNA, 15 nt, Human papillomavirus type 45
augguuuuguauguu

SEQ ID NO: 4010601 - RNA, 16 nt, Human papillomavirus type 45
auguaguaugggacag

SEQ ID NO: 4010602 - RNA, 16 nt, Human papillomavirus type 45
auguauguauguauuu

SEQ ID NO: 4010603 - RNA, 14 nt, Human papillomavirus type 45
auuuacagcaaggg

SEQ ID NO: 4010604 - RNA, 14 nt, Human papillomavirus type 45
auuugcuguauaca

SEQ ID NO: 4010605 - RNA, 15 nt, Human papillomavirus type 45
caaaaagcaaagcac

SEQ ID NO: 4010606 - RNA, 17 nt, Human papillomavirus type 45
caaauaaguuauuggca

SEQ ID NO: 4010607 - RNA, 23 nt, Human papillomavirus type 45
caacaaggacaacuguaugaacu

SEQ ID NO: 4010608 - RNA, 23 nt, Human papillomavirus type 45
caagaaauuucauuaaauagugg

SEQ ID NO: 4010609 - RNA, 16 nt, Human papillomavirus type 45
caauuaagcgagucag

SEQ ID NO: 4010610 - RNA, 14 nt, Human papillomavirus type 45
cacaaagcaaguau

SEQ ID NO: 4010611 - RNA, 21 nt, Human papillomavirus type 45
cagccaaauaaguuauuggca

SEQ ID NO: 4010612 - RNA, 19 nt, Human papillomavirus type 45
cagggauaugggacaaaac

SEQ ID NO: 4010613 - RNA, 17 nt, Human papillomavirus type 45
caguauguaacauuacu

SEQ ID NO: 4010614 - RNA, 20 nt, Human papillomavirus type 45
cauaauaccuaaacuggcac

SEQ ID NO: 4010615 - RNA, 17 nt, Human papillomavirus type 45
cauauuuuaucaugcag

SEQ ID NO: 4010616 - RNA, 13 nt, Human papillomavirus type 45
caugcgcaggaag

SEQ ID NO: 4010617 - RNA, 21 nt, Human papillomavirus type 45
caugguauuaccaaacuaaac

SEQ ID NO: 4010618 - RNA, 14 nt, Human papillomavirus type 45
cauuaacagcauuu

SEQ ID NO: 4010619 - RNA, 17 nt, Human papillomavirus type 45
ccauuuugcugugcaac

SEQ ID NO: 4010620 - RNA, 14 nt, Human papillomavirus type 45
cccauuaacagcau

SEQ ID NO: 4010621 - RNA, 15 nt, Human papillomavirus type 45
ccuauguuuguauua

SEQ ID NO: 4010622 - RNA, 17 nt, Human papillomavirus type 45
cuguggcuuauauguga

SEQ ID NO: 4010623 - RNA, 22 nt, Human papillomavirus type 45
cuugcacaaagcaaguauaaca

SEQ ID NO: 4010624 - RNA, 23 nt, Human papillomavirus type 45
gaaaacaguccauuaggggagca

SEQ ID NO: 4010625 - RNA, 15 nt, Human papillomavirus type 45
gaaugaugcacaggu

SEQ ID NO: 4010626 - RNA, 22 nt, Human papillomavirus type 45
gaaugugccuuguggcauguau

SEQ ID NO: 4010627 - RNA, 14 nt, Human papillomavirus type 45
gacaacuguaugaa

SEQ ID NO: 4010628 - RNA, 23 nt, Human papillomavirus type 45
gauacaugcgaggaacuauggaa

SEQ ID NO: 4010629 - RNA, 19 nt, Human papillomavirus type 45
gauaugggacaaaacagca
